United States Patent Application Publication US 2007/0083945 A1 - sequence listing, part 30

SEQ ID NO: 202974 - DNA, 425 bp, Glycine max
tcatgacaaactatgtatggcagaacttcattattggtattcaatatatacaaatgagcttgttccaaagcaatgccttccaagattattttgatgatgccaaacgatcaagagtcaagcaagttccaaagaatcaagagtcaagcaagtttcatgaatcaagatcaagattcaagattcaagaataatcaagatcaagattcaagaatcaagagaagactcaatcaagataagtattaaaagagtttttcaaaaactattgaatagcacaattttgttcaaaataatttttcaaaagaaaatttttaccagagttttactctctggtaatcgattaccagaaggcagtaatcgattaccaatagtcaacatttgtttcaaactgatttacaaagctgtaatcgattaccataatcatgtaatcg

SEQ ID NO: 202975 - DNA, 278 bp, Glycine max
acttcaaacttcgggtttggtggacctctttctctcttgaattttcggggtatgggggtttgggagaaaataatgggatgccttgcttagttttcggttcacgaaaagttatttggaaaaaaactggtgaaagcaatgttaaaatggccttgttggaatagattaacctaacccatcttgtttaccggttttattaagaatgctgtgagatgtaattgccaaaaatggctattggaaaccgtgtaaatatgaaaggttaatttaccctagggtaaaaa

SEQ ID NO: 202976 - DNA, 282 bp, Glycine max
tttgcgcaaaaggaatagatgcccaatgggaataaatgttccattagaacatgacaatatgagactttacacctcttaacttatggtccttcgtagatacaaggcttccaatgtttgaagagtatccctttggaactttaactccatgaagaaacttacaaaaagatatttctttcttttctagaaaaagataagattgataagggtcatatttcagttattgttggtattaaaatgttagcacttatctttccattgtagaggtatcttataaacttcctt

SEQ ID NO: 202977 - DNA, 363 bp, Glycine max
accgccgctgcagctatatccctatattgttttctgaagaacttttttttatattggctcgtgcaaaggaagaaactctaagcttatcaactgttgaaagtatgaaaccctgtctcttactgtttctaaatataatttttaaacaacccatacttatatttttagacctttgctagacagcattgtccccctttgatgatgattgtgattccacaaagaatataatctctgttgaccgaaatcttgggctgtgttatggtgaacccaatattttttttggtggaaacccgataaaatcaaaaatgcgcggacttaacctaacaccttccttcccactttaaccaaaaaaaattttttttttta

SEQ ID NO: 202978 - DNA, 370 bp, Glycine max
tgaccctaataatatgatcgatcttcgtatgtcacaggacaataagttgagtggtcatgaatgactgaaactcacctctattgtcttagtcatatgaagatcccacaaatgtcgcatttccaaatcagaagtgttggagattatgccttcaggtaatgcatgatttccaccaagcctgcactgattctactaagcaaaatataagcatcaaagttgaacattccaaacagtaaataatcaatggctcaaatactctctaatttacgtgctgagtaagagaatgaaccttgccaatgtcatttcccaatttcttggtgttcattttccatcttaatagtttctgccgtataaaacccagactatcatatta

SEQ ID NO: 202979 - DNA, 412 bp, Glycine max
  unsure (1)..(412): unsure at all n locations
tcattctatgtacccgnagtggaccacatagaggagcgtgtcattttattcccaatatgcatactgtntataccccctgttgacgtgcttaagccattgtacttaagtcatttctcgcttaacttaaaaataaaataaatttccaccgaacgctcgaattgtattatccattaacttcggttaaaataaattccgaccgttcggtcgtgccgtaaccacgttggaagtcaaaaagaggcaaaaaataatataataatcaaaaagacatctttcagtaaaatatagcggaaaatcaaccgaacgttttctctttgggatttctcattcttaatcgaattgaataataactaaagtgaaactaaaggctaaaataaatctcctaatcaagctcgtccacaaaaataggcctttg

SEQ ID NO: 202980 - DNA, 396 bp, Glycine max
  unsure (1)..(396): unsure at all n locations
ctgcagcatgcaagcatgttagctagatgacttgtaagaaacagttngttgtctatcgtcaaatcagagaattaaacctggacatcttttagaaatgcttgctgaattaagacaggcagaaatccagtgtctccatttgggacaaaaacccattctttgcagcatataatccaaaaaagcccatgacactgagtcataggccttttcaaaatccaccttgaaaaccatagctggccttttgcttctacaagcttcctcaatcacctcattaagaactagtatgccatgcaggatgtgtctattttttatgaaagttgtctgcctctcatcaataagaccagatatcacttgtcttaatctatttgctaataacttatctattcccatgtacatata

SEQ ID NO: 202981 - DNA, 395 bp, Glycine max
  unsure (1)..(395): unsure at all n locations
tcatcaagttcatcaacaacaacagacgaaaccaacaattatttntacaacggtactatgggcatcaatattatgcactcatttttttaccaattacatcaatctcatgccctaattttcaaaggtttcaattttgtatgggcccggtggaaaaaatagatctgcgaatgaaacacttaagaaaattgctcctaaacataaggcaccaacaacaaatattacaaatttaagcaaaaacaaaatgaaaggttgtaacctaccaactgttgagaagaaggttaagaaggaaattggtcttgctgccacttatgccaaggcagacacatcaattaacaaagctaaaggaccagttgaagatactaataaacaaaaataggactctgtgaaagactttt

SEQ ID NO: 202982 - DNA, 371 bp, Glycine max
tggttttcaatcatggtgtcgggtatcttgttatcctcattttctgatccaattgatgaagaagaaaaggaaaaccatgggaagatatcctccttggtttccaattcctctgttttgactttaagctctgtttcaaaggtgaaaatcccctcagggttctgttgttgtgttttctctagaagtggttgattcttttggaattgattttcccccaaacctatctttatgtttgatgagaatgccttgtttaaatgcttagcttgcgtgcatgtatgtcttcctctgtaggtcacctcaattgttggtgggtcttcatctgacctttgaacttgttttgttgctagacacccttgtacatttctctgtgtgca

SEQ ID NO: 202983 - DNA, 324 bp, Glycine max
  unsure (1)..(324): unsure at all n locations
cacgcaagcgagantagaagttaacactgtgttttcttaataaataaacattacaagctaaaacccacaacagaaaacatcaaaataatggaacataacatccgcgaacatagaaatagccatacaaataacagctacactgagaatcctatatttagcaaataaatttaccacttgatttgcttctcaaaagaaatggcatccggatcctctgcagtaaaacttatctgtagcccttctctcatagaactatggttcatgcatttttaccggaccataaaataaagtactttctttactgtaaggaagcagatttattttatt

SEQ ID NO: 202984 - DNA, 339 bp, Glycine max
ctacacacacccctctcataacgaagctcacctccttgagaagcttccttaagaagattcctaaagaagctaaagcttagctacacatacctctctaatagctaagctcacctccttgagatgagaagctagagcttcactacacaccccctataatagctaacctcacccccatgagaaaaaacatgaaaataacaaaaaaaagtccttattacaaagacaactcaaaatgccccgaaaaacaaggctaaaaccctatactactagaatggccaaaatacaaggcctagacgaaggaaaaacctattctaatatttacaaagataagcgggctcatac

SEQ ID NO: 202985 - DNA, 229 bp, Glycine max
gaacatatctagacgctcaaaattgaaaacagtaactctaagcaaattcaaacgacaataacttctaactcggatgttcgagtgagtcatttaataattctcgacgctagaaattgaatacagaagctctcaccaaatttaaatgacaataactttttactcagaagcctgattgcggcctgtaatttatctagacgctcaaaattgaaaacaaaagctcttacgaaat

SEQ ID NO: 202986 - DNA, 345 bp, Glycine max
  unsure (1)..(345): unsure at all n locations
gcagctggttctgtccaatttgacgcagaagaagagttatttttttggcgnaactaatcatcaaggcatanaacataattaagaaagacaatgctctgataattaattttgttttttacaatagttagccttaccgaccctaccaaaacaatttaattcatattctcaattaggtcccaaagaaataggatttggtatttgggcgtaaagaagatgatatcacttttatataaggatattccaggtttaacaaaaaattttaggagtttaaagaaaaggtaaatgaacattcttaaccgaccacaaattgagggggttatctgttaatgggcaaaaaatttaagg

SEQ ID NO: 202987 - DNA, 190 bp, Glycine max
aaaatcgaagacaagtgaaaataaaccactaaccctcttaccctaaaattcatactatctctaaaaaataaggggcaaacaattctttatggaaaaaaaatggtattatacatatcaaaaaaaaaagaaatcctgcgggacaatctcatatcattgcctaaaaataatggtcagggaaacaaccaaaaat

SEQ ID NO: 202988 - DNA, 260 bp, Glycine max
gagctggactctgtctaggaagaatcggcaagcctatcacacaactttagtgaaacacatgccttgccatcataaggcacaggaaagggggtccggagccattgacatgtcgaaatcttacctctatgggctggatgcggtatacgaagcaaacgtaggaccaatcgtcgtgcgggtgggtcattacccactggttcagctacacgcaaatacccaagagataacagagaagactgcgtgacgagaaactcaacggcgag

SEQ ID NO: 202989 - DNA, 340 bp, Glycine max
  unsure (1)..(340): unsure at all n locations
gantcacatgccttataactagtcaaacatgatttggaatactattatttatcaattgtactgtacacttaaatttctataaatagcacacacattgtttccctatctgcacagacaaactaaatctaagatagttttactcggaggaacaggagaaattcaaagagtgagagatggagaacttccctgtgatcaacttggagaatatcaatggtgaggagagaaagactatcttggaccaaattcaacatgcttgtcagaactggggattttttgaggtaacccacaaccgcaaacttctttacaaaacctttgtcatactcactcaaatttatttata

SEQ ID NO: 202990 - DNA, 358 bp, Glycine max
ataaatagaagcatgtgtaacacttgttgtaactttgatgaatgagagtcttgtgagacatacttcaaagatccacttatctccctcttttattccttcaatttcgtgctcccccctctctctttctctccctctttcttttcctccattgaagcatacttccaagcttcttatccaaggctcatcttggtggggaagctctttcttccatggcttattccctaatggatggcgcctcctctcacctcttctactttgtcttccgctacatctccatggcggaaaatcaccattaaaggacctcactgaagctcaaagatccagcctccatagaagccccacaagccaagtttcatca

SEQ ID NO: 202991 - DNA, 385 bp, Glycine max
  unsure (1)..(385): unsure at all n locations
agctntacatcatattttagtaatgatccactaacctattattttaagaacttaatgccactaacctagggaattaaaagaacttaatagctgagtgtaactaaaattgtggcaaccaaaagtcaccccaacagccatcaagccagccaccatttggtctcccaaaaggctgatgcctatgttgccaattgggcccttattacaacttgaactaaaccaaactaaagctcttttagttaattaacccaaaacatatttttggtcaaccaactttacaaggattgggccattatttagacaaactaaacactctaaaattgagacaaagtggtgccatttagtcctcctccatttgggccatgatacaactcacaaccttggactt

SEQ ID NO: 202992 - DNA, 387 bp, Glycine max
attaatatatatgtgaggggtagagggtgtcacacgttctactaaagcaactgccccatccacccttgttgaggcaagagaggaagaagtattggatgatgatggggaagaagaaagagaggtttgtgtctgatctgctatttattttagtgtgatgctatatcttgcgagcttatctttggcaatctataaggttggtttgtacttatgcaatagtttcagttgttgaagcttttatttccattgttctcaagtttatcttgtgccatattcaggcactagatctactgaatatgttgaaaacagatgaatagatgctttttgttattaaagatagacaatccaaggtagtacatgcctggtgtgtcaatacttcataagcattgt

SEQ ID NO: 202993 - DNA, 335 bp, Glycine max
tccaacgcgagctctgaccactgttcttccttcccgcgatgcttcttttcatgtccgcctgagggggcttaaagcctaaaccatacttcccacgattcccttgggttttatcagactagctatgccgccattgtcttttgcctaaacccatcccgggttaataaccggtccccaacataactcgggccatcattatcgccgcctcggacagacaaggttgcccaaagagggagtccacggaggaaatgctgaccacctcaaaagactggaaagcggcttctaatgattcttctgcggcttccgcataaggcatggaggatggacggcttaccaag

SEQ ID NO: 202994 - DNA, 372 bp, Glycine max
actaatgaaacagtacacaaccacttcaattattatatttataataagaattctactccaccatcacaaccatacaagtttagttttctcccttcccagaatcaagtttcaaaccactttagagacttgaagcttttatgatgaaacatagcatgtacaacacaaaattggaatgaaggagagagactcttgttgtttgtatgtctgaaatgtttaacggcttttggactgtaccaagtagattttatctaactattaaattgtgaggtcatcttatcaagtgcattatgttattcaagtaagcagaacaatttctctttatccaatttcaattcaactcacccaaatatgacagcattccacaacattatg

SEQ ID NO: 202995 - DNA, 377 bp, Glycine max
  unsure (1)..(377): unsure at all n locations
atgctatctctacatatattaaacagcccaccattccaatttcgccaaatcatattcatatatcattggggcatttcatcgagcacttggggggtgcacgtttggacacaaattgcaagagaatggggacaatgtggcataccccattgcttcagaatacaacataggcctaatgcattctcacacaaaccctcaactcaacaaaacaagcatggattcagatgcgaattgcttcacgaattttgcaaaaaatgagcaactaaagcaccaaaacacatcaatggagagccaaataaccaaggggaaatgcacttacttgtggggagtgaattaaagcgtgaaaagggaagcanaaactcaacaatggaagcttgggg

SEQ ID NO: 202996 - DNA, 317 bp, Glycine max
  unsure (1)..(317): unsure at all n locations
ttctttnnnngcttatatctttcttgtataaatgaaaaatgcatattgagaagaagacattaaagccttaaaaaataaggtcaaaatctaacttaaataaccagataacataggaacctagggcaatgatgattataggcttcaaaacacgcacctagaaaacaaatcacagaacaatttgcaaaaaaaaatgaaaactataaccttccaaccacaagagagcgcaccattcattgaaattacccatcaacaggggagaatagatatgcaaaaatctttttcttttttctctccctcaatcaacaaaagaacataac

SEQ ID NO: 202997 - DNA, 332 bp, Glycine max
  unsure (1)..(332): unsure at all n locations
atgantctatnacagagcttttcgaaccgagtcttggaaagataggaatgtgggttgtggtttcgctaaaccaatcactggaattgatttgaccaatagggaggtagtgcgtaaacttgcataaagtttctaacatttccacctcgttttttcttgttgctggaggatcaatatgaaacacccatacatgaaagaactgttctcgaacttttgctatatataacaactaggcattcattcttttcttgcttaacaagtcaatgtactctgttctgaatccaaggtatttatatgatgaagagctctacgagaagtttgaaatggcaaaattt

SEQ ID NO: 202998 - DNA, 402 bp, Glycine max
agtcacctgcggcatgcaagcttctacatcggttgaaaaccgtgtattacgacgggttttctctttttttgttccagatgtcgttgtatgtcgacaacaacaacatcggtcatcctaggacccatatttgtaatgcaagaatacaacgtcagtggctataaaagaatagacgttataaaaaaggattcaacgacgcacatattagacaacccgtcgttgttttggtccatttcatcgtcgggttagcaagactcgtcgttgttgttgtccatatcaacgtcgggttcgcataacacccgtatttgctttgtttcctgtcaacatcggtggcaggctcaccaccgacgttgtttggtattatgtcaacgtcggtggtgaggacaccgtcattgtctctttctc

SEQ ID NO: 202999 - DNA, 421 bp, Glycine max
acggaaaatctgggacttagccatggtagaagtctctacatattgcctcccttgcccagcattatgaccagcccctaacgtgcttcacattcgaggacttccatctattgccgactgtgaaagagtttgaagaaatcctgggatgcccactgggaggaaggaagccatatcttttctctggttctatccctccacgacaagagttgccaaggtagtgaaaatctcatcacaagagttgaaccaggttaagcaaaatatgaatggggtagtccgagtatcaatgaagtgtttggaggaaagggcaaaggccttggaaaatcaaggcatatgggctttcttttattgacatctttgcgctttttgatcttggagttgtgctctttccaactatgaaaggttagtggacctaacagtgattgac

SEQ ID NO: 203000 - DNA, 340 bp, Glycine max
tctcattaatcttttcatgtcctcctaagtattcaccaaaggttctccaaatcttcttgttgttagtcccaccaaataagagcatagtcagtgaactccatggatgccaccttcatcatttgatttggcttcttctggaggatcttcattgcttcctttccctttccctttagaatcttgtccatgaatatgcatttgttctaaagattctgcaacatcatctaaaatatcctttcttggagaaatagcattagattcatcaaaggaaacatgaatagattcttcaatagtcataggtcttttattatatattctataagctctactatgcaaggaataa

SEQ ID NO: 203001 - DNA, 361 bp, Glycine max
  unsure (1)..(361): unsure at all n locations
gatcatagtgggtctaatatgatgcanatctgatcatcatgctttgataaatgccaaaaaaaaaaactggggcaaatgaagagggtgagaatgagggagaagcacatgttgtgactgccattcctatacagccaagtttcccaccaaaccaacaatgtctttactcagccattaccaaaccttttctttaccacccgcccagttttccccaagggcatccctaaatcaaccacaaagtctgtctaccacaattccaatgacgaacaccacctttagcacaaaccaaaaacaccaaccaagaaatgaattntgcagcgagaaagcctgtaaaattcacccccaatctatggtcctatgttga

SEQ ID NO: 203002 - DNA, 338 bp, Glycine max
  unsure (1)..(338): unsure at all n locations
atccattnattaggcgtggcgtgtctgacatagctctaactgttcttaatttttcaaaagcctataactgctcttgaaacaacaacaatcacactagaaaaggatcaaacagtgtgctaaccaaagataatgactcctaattattaaagacccacacaaacacgcgcgtaaataaataaacatacgcagagcccccaccgacaaaaaatgagcctagataaagctaactctaaccatttagtaactatgtaaacaaagtcctacaacaatctttcaagcaaaaacttgggataaaaagagcgacagaaagccctaagagaatgcttaataaaaccgct

SEQ ID NO: 203003 - DNA, 326 bp, Glycine max
  unsure (1)..(326): unsure at all n locations
gtattcatgaaaacgagtgcttataatcatacacatcaatacaaaagtgtagctgaatgatctttcactatcagcttgagaaaaggctaaagcaataagaaaattctacctaataacacacgctataagacanagctgaggaattatggaaaataaattacataaaatacttctaagggtcatataattccacagaaaatcaacaatgttcgcctaattcatagagcaaccttatggtactagttgtacagatattgaccccgaatattgaaaaataacaaacacggggaggacatgtgggacaaactttgaaaataccataataa

SEQ ID NO: 203004 - DNA, 273 bp, Glycine max
acaaccattatttttcaaaccccaccggtggaatgggccacaatgacttccaaaaagggcgaccacagtttaggataatcctcacgattatcgaatcatggctcataacctttactaggatagctttgcatgtctgcgacaaaaacagaaaattctgggatatgaaaaacggaccacgactctgccaagaggagtaaagactggggcaataaccacacttggccctaacctacctcctctcaatacgcccggccctcccacccacacatcccg

SEQ ID NO: 203005 - DNA, 426 bp, Glycine max
ctcagcttagctcttggatccttttcttctctgtgcgtcgctggatcttttgatattttggcaggagggtaagactgatgcatggaagggttcagcctctgaatcagattcactcaaccaatgggcagaaaagtctcgtttccaagttggagactatcttggtatggtaactatatttcccaatctttaattattttttacatctagatgaaaattttattttgatatgttttaagcacaaaattctcaattaacatttaaatgtgtatataagagcctgtctgttgcggattttttcttaaaatttgatccttacagattttacaaaaatgatatttgatggtgaatgattccagaatcatttttataagatttttttaaagacagtaatatttctacaagaccttatattatataatatatata

SEQ ID NO: 203006 - DNA, 382 bp, Glycine max
  unsure (1)..(382): unsure at all n locations
agcttcccacatacgcacttggaaggatccganttctgttttccttangcaatatcagtacaactctgatatgcctcccgaccggactcagctgcataacatggttaaaagggaaaacgagtcctttaaagagtacgctcagcgttggagggacctggcagcacaagtagtccctcctatggtcgaaagggaaatgattaccatgatggtagaaaccttgcctgtgttttactatgagaaattagtgggctacatgccctccagcttcacagacttggtattcgccggggaaaggatcgaagtgggcttgaaaagagggaagttcgattacttctcctccacaggcaccaatgctaggaggatcggagcaactggggcaaag

SEQ ID NO: 203007 - DNA, 416 bp, Glycine max
  unsure (1)..(416): unsure at all n locations
tcacttatgtagtttgctcctttacgcttaatacttttacgaaggcccgagaactgcctaaaagaccagaagataagcggccgaatgacccgtttcgcttccaagtattaagtcaccggtttaaggagcgctgaacaccaacagcgcttcgaggccatcaagggatggtcatttctccaggagcaacgcgtccagctcatggacgatgagtataccgatttccaggaagagatagttcgtcggcggtgggcatcactggtcacccccatggccaagttcgatccagacatagtcctcgaattttatgccattgcttggcctacagaggagggcgtgcgaaatatgaggtcctaggtgaggggtcagtggatcccgtttgatgcagatgctatcngccagttcctggggatcccttt

SEQ ID NO: 203008 - DNA, 438 bp, Glycine max
gatactcaacttacaaacttagaaatcaggtgatcatcaaggcggacatatatgtttgattttacgcatgcacatcttagctatatacaatcgttcgacgctggcatgaatcttgatatcaagtattggatatgcatcatcaaacagggcgagacagtacatgcaattgcctttgattgtttgatgatgatcatgatgatgggtttcaattgatgcaaacgggcttttcaagataaaaattcaagaccatacttcatgattacaagtcacaacatgcagaggatcacaatataatgatgaagggaattcctaattgattaacagacgtttgccaagggatataaactacaaaagggtcctcaaaggctcactctctaatatcgataccacaggatgaatccattaccagagccaaaaacgttctataacacctaaaaa

SEQ ID NO: 203009 - DNA, 402 bp, Glycine max
  unsure (1)..(402): unsure at all n locations
agtcacctgcggcatgcaagctntgaaccagttccattaatctactccatacttttttgttttcaaagcagctgggtggctcttagacttgtcaaattcagtagcaagttcttcaacaaggcttcttccaacatgaaatgatctatgtgcctctgagaactctttggatgtgacaaatctataaggctgatctttgtctgcccagtactgctcctgatccttccttgatgttacctataacataataattaatggtcaaaattaaatgtatataacattcttttaccagtgcagacagattaaattattgggacagaacacaagaccacttacttcttgcaaaaagtctgccacacctttcctctcaggacatttaaaacccattgatttgaaaaattccag

SEQ ID NO: 203010 - DNA, 399 bp, Glycine max
tctgaccgttagattgtacaattagaagaaagaattagtgaaaatttagctatagggtggtccaatttcagtttggtcccaaaacccttcttagggtaagagctactatagagttgcaacccttggtgcctgtactaagggggaaaacttttggggccagggccatgtgaattccaaatggttcggccgaaaaaagtttcaatccaaagacttttgataattattttttaaaaaaataataaaacgtgcctatcggaggaagattattgtagcaaacaagttctacatcatcaaatggggttcctttcattaattttaggttgacttccaatagtgtgcgtataatataggaaaaaacgagggtttgacttacttcctacaacaaccagacgtaagcaa

SEQ ID NO: 203011 - DNA, 239 bp, Glycine max
ctttgcccctttccaatgcagcatacctggaagccaattgaagccagcttgaaagcttaatgcctgcaaacaatttaacaaatagaccctccctcaacctcaagcagcataattaaccacagcagagcaattatgacctctccagcaacagatacaatcctggatggaggaatcaccctaatctcagaatggccagccctcaacaacaacaacagcagcctgctccttcccttcaaaat

SEQ ID NO: 203012 - DNA, 200 bp, Glycine max
aggcgccctcctcacacctatactcctatgtctaccgctgcatctccatggcggaaaagcaccagaaaaggaccccattgaagctcaaagatccagcctccatagaagcctcacaagcaagctaccatcaagtggcaaccagagcacaagagcctcaaggatgtgctccacaaagcccctaaacacaaatgagctggacc

SEQ ID NO: 203013 - DNA, 328 bp, Glycine max
aatgaagctaaaatactaatttatagatgagaaaagctaataaggaaatgcacataataattttcagaggggtaaattgctttgtacttaatgtacctgtcatgcgagaaaatagatgttcaaactctgatttaagctcttcattgctgtagttcatttcaactaatataaggctattgtctagataagctggacaattcgcattctctggatatggcattgaaggatagtctcttagcgatctttgatttgcttacatcacttgttcaatttcaagcaagaccaaattctgaagagttctatcatcaagctgcaatgctaatacaca

SEQ ID NO: 203014 - DNA, 387 bp, Glycine max
ctgcagctttgactattgagtgttgaacattgggtatctgtgcattatttttaactcaaaggaaaagatgaaatggcgcacatcaggtttagtatttttagcagcatagttcaaagtcacttcttgctttaactaacacacactttaaatggtaaatggtgcccctaaggatccttttgaggcttttgtactgtggtggtacatatgaacgcattagttgtgtgtgtgtgtttatggttttgatcaaaatgtttgttagtataaaaggagggagtgttgaattttaaaataagaatatatggattaattagtttttcaggatttatattcttgtattttcatctcacctttcttcataattttttgtttataaaaatgtcatatatg

SEQ ID NO: 203015 - DNA, 350 bp, Glycine max
atagccatcatccggaaaccctagctccagaatctccctcctcacgccctccggcaagggaccaccgctaactccgccgccgccgtcgtcgtagtagtagtcgtcgggggagtcatcgaaagcggagtcgtcggcgacggtgaaggaaacggggttgttgtcgacgcggacgaagacacggtcggattgggagaaggaagggtcggaggtgtcgcgagcgatgagttggaaagtagcagagttcttcttgtcgatgaacttcttcttcctcccttccattgtgccttccaagggttcgacgaaacgagaaacaaactgagtcagtgagtgctttcgaaacgttgcgttgc

SEQ ID NO: 203016 - DNA, 305 bp, Glycine max
ctgggatgggtatacgagaccagttacatccaaggtctgatggtaaaaaaatatacttgcctctagcttgtcatactttgtctagaaaggagaagataagtttgcgtcattgtttttgccatgtcaaagtgtctcggggattctttggaagcaatgccttccaaggttattctgatgatgtcaaagaatcaagagttaagcaaagtttcaagcaaagattcaagaatcaagtttcaagattcaagactcaagaatcaagtttcaagaatcaagattcaagaataatcaagatcaagattcaagac

SEQ ID NO: 203017 - DNA, 371 bp, Glycine max
cttgattaccaataggtgccacgaggataatgataaaaaatagggagcaaaaaggaagttgaaaaaacaaggaaggggagaatttgcaatatagtgagaagagaatgagagggggacgctacttaaagaaaaacttagactattttttttcttctaatttttcaacattttattgtaatataattacaaaagtaccccacatttccccccttttctctatagtcagagagaaaaggtaaaaaacactccacccttaattcttctatacataaaaaatttaatataaaatataagctaaacaatatcagaaccactagatgttgaatgcaggaccctacagtcaaatagccattgcagggaatcttggtcct

SEQ ID NO: 203018 - DNA, 392 bp, Glycine max
gcactgcggctgcagcttgaaacttatgttggtctttatgtcccctagatttgtaaaggaggaggatgaagttgaacctccgaaggctgctgaaaaggtttctgatttgttcttcactgaccgttctgcggatagcgttctcacggcttaccgggaagaagatgctgacttgtttgagggaagtcatgatgatgatgaccgtgctttgcagaagaaacctgtgtgggtggatgatgaagaacaaaatgccacagtgaacatagccaaggttaacagattaaggaagttgaggaagggagaggatgaggatttgatctcgggttcagagtacgtgtcaagattgagggcttcacatgttaagcttaacccatgaactgaatgggcaccggctg

SEQ ID NO: 203019 - DNA, 428 bp, Glycine max
  unsure (1)..(428): unsure at all n locations
taatatgatgattgagtttgtttcgatataatcaggttgtaagttcttaatttcaatatcaaaccaaaaaataataaaaaaatcaattcaattactcaactcattaactcaatatcaaattgatcagtagttttctttcatcttccgcccctctcttatctaaggtcgacacagcgtatctggtggttctattttttatttatatttttttgacggggcgtatctggtgtctttgtttaaattataaaatgtgatcatcttttgtatttgtttttatttatttatatatgtncgttttctattttataattcttcatgaagcttcctaaaagtctgtgaaaaatatgtataaactttcaaatataaactcggcgtgattagatgttattttagtaacaaacttaaaataattgaagtggtatcaaatt

SEQ ID NO: 203020 - DNA, 387 bp, Glycine max
cgcctgcagctggagagtaagtctcgtactgggtaatctattacttattaatttaatcgattacattgttggttgagacaatgattgattttttcaagagtctctactttaattgattaccaagtagattaatcgattacttctctcttgtttaagttgttcagaagtgaacaagaacattttaatcgattacctgggtcatctaatcaattacattgttcttgagtggttttccagatgttggacggacactttaattgattacttcattgaaatatttgattactttatagattttatcgattgcaagcggttataactattttctctataaataaccagcttgtgttcacatctatacatcatgagatcattagtgaacactca

SEQ ID NO: 203021 - DNA, 444 bp, Glycine max
  unsure (1)..(444): unsure at all n locations
actcagctctccctatttggtatataagggggagaagtgaagaagaaaagggtgtgcagacccttaggcacttctctctctctcgaattcgctgaggaaanatatttccgtgaagaaaatccaagccgaggcgcttccgtaacatttccgtgagtaattacgcgaaaattctcgaccgttcttcaagatccatcgttcgttcttcattttcttcaatctacaacgggtaagtaccttaaaccaagcttttcaattcattctatgtacccgtggtggtccacattttgtttcatgtatttttattctcgttttcctttaacttttatacccccttctgacgtgcttaagccatttatttaagtcatttctcgcttaatctacgaataaaataaatttccaccgatcggttgaattggaatcatccgtaaatttgggtaaaatgaa

SEQ ID NO: 203022 - DNA, 307 bp, Glycine max
aagacaaccttctttctccctctgttggcttgttaacatagcctttatatttcctctcaaagtgagctttgactctctcatgaagcttcttcacatagttcgcctttgctagacctttcttatgctaaaaacagaaacatcaggcataaggcaaagatcaagaggaggtagtgggttaaaaccataaacaacttccaaaggagaacaattaagggtgctatgaacagctctattgtaagcaaattcaacatggggtaaacaagcttcccaaagttttaagttcttcctcaaaactgtcctaagcaaa

SEQ ID NO: 203023 - DNA, 332 bp, Glycine max
ggagaaggctcagcctacataatgacaagtttcacagttatcttggagttgtaccacgagacaatattcctattgtgcactccacctagaatggtgtacccgaaatgctaacgaacacgatatgaggtgacatattggtaagtcccttttgtaagccacttaattttcgtacaaacattgatatataagtaaatgttatgccaatacaaatgctttgtaggcgagcagagttatgttgctagtgctggggcgcaacgtataatggacatcgttgctgccattggttgagatgaagccaatcaaggtacttgctactgtcactgcattgatac

SEQ ID NO: 203024 - DNA, 205 bp, Glycine max
tgatgacagctctacgaggactgctatacagtgatttgaggagaggcgactacctagcttttcagcaatcatagtggactccatcaagaatcggtggactggtcactggccctccttctgtatcgatgcacatcacaaggccttacccataactcactctgtgattgctacaggaggataagatgccaatgcgaaatgcctgata

SEQ ID NO: 203025 - DNA, 377 bp, Glycine max
  unsure (1)..(377): unsure at all n locations
agcttaaattgaataaacgttaagaacttttttttatcgattacacagngcatattgtgaatccatattttaatagctgtcgtaaatcagtttttgccactggtaatcgattaccaaagagtaaatttgttgaaaaaagactttttaacttaaatttcttggccaaactttttgctacttcaattggaattcccttcctatttaatataccctttctaagactctagagactgtcttgatcatccatcttgaatatctttaatttctttgtcttgaataaagctttgagacgcatgtgaaactttggcatcatcaaaacattcagcttgatcctttttctacaactacttgtgcttaatttccacttattccccatt

SEQ ID NO: 203026 - DNA, 338 bp, Glycine max
  unsure (1)..(338): unsure at all n locations
cgcagctaacagagngcaggcgagagcagccctcttttgaaaccgaacgcacctctcgcagggaaatatgccagagcgaggcgcaactgctggcaacgcgctccctcaacgtcagcaagacgataacgggcaccaccatcgactcaggcaaatcaacaacaaacccattacacccgtagacaaacccccaacgaagggatgcccaacaaaggacctggccaacacataaatgagaaccccaaagagaaacatcaccatccaaccatccctaacaagcacaagactctcacaaagcctgaagggacaaccacaatccctccacccagcggctcaccaaa

SEQ ID NO: 203027 - DNA, 176 bp, Glycine max
tgaatggagatgatccagtgcaccaactgaacctgtcttgggcccgagaaccatgtttttatgagcgcactatggctgctggctggggcctccggagagattcccctatctatagaaacatgcaaaaaaacacatgggtaaatagctatcaacacatataaacctacacaaggacc

SEQ ID NO: 203028 - DNA, 351 bp, Glycine max
  unsure (1)..(351): unsure at all n locations
agctnntaattttttggatattctccctttattttgttatctgagttctcgcactacaaaaaatttaaatttttgtgtgttcctaagccagtagcttgcgttgcattttgggtttatatctggatcattgggtaacttttttttttttgctttgtattttttgcaacccaaaagcttaaatttttttgggcgttctgcctttatatttttttcctttaatgccggctgaagttatttcaaggggttatattttaatatttgtccaatccctttgagttaaacactttcaactttgattttcaaatatatgacatgctttattatcccatatatgtcatcctttatttatat

SEQ ID NO: 203029 - DNA, 391 bp, Glycine max
  unsure (1)..(391): unsure at all n locations
tacctgtntatcaatgatatatcatttgcacctatctttgatctatatttctaatgnatngaaccgtgagcctcgaattgtaattcctatttaccttacttatgttttaagagggcacgttggtttatgacaattttaccccatatttgggggagtctgttagatggttaatgtttaaaggttagaaacaaaacacacatatcatataaataaaattatataaaaaagaagaagaaaagagttcaaataagtgtgtgttgttagaacaagtcaagtgaaaggctaatgagcaagctaagtatattaaaaagactaattagttaagtctagaatttgtgctctcttaaaatttaagcctttgaattctaagaaaacaaatattttgtagcct

SEQ ID NO: 203030 - DNA, 379 bp, Glycine max
agcttcttgattgcctaagtgtggaccctctagtgtattcttccattcaccactttatttggagccccatgaatgtcattgcctagcgctgttcatgtgtgctccaccttcgagtctggagccccacgaatgtcattgcctagcgctgttagccaattctccattctccacttttattcggagccccatgaatgtcattgcctagcgctgttcatgtgtcctccaccttcgagtttggagctatgcttcatgattgcctaagtgtggaccctctagtgcaatcctccattctccacttttattcggagccccatgaatgtcattgcctagcgctgttcatgtgtcctccaccttcgagattggagcaacgcttcatgat

SEQ ID NO: 203031 - DNA, 349 bp, Glycine max
gcttcctgacaaaagatgcatattcaaatagatagcttatacatgtaccactggtctattttttaagtattaataagctttcttaaaggcaacaaaatgagaaagtaattagctagaaaaatcaaagacatagaaagaaggaatataagtagaaaaaagggaatggtgaatggaagatcattacgaatgttcacagtttatgttgcatttagaacaagtaacaattgtttcatcaaattcactagcaccacatatatcacaaacttcagcctgcaaggaataacaaacacctaaataaatatctactaccaagaacagcgaaattaaaaaaacaatgttttaataaaaa

SEQ ID NO: 203032 - DNA, 386 bp, Glycine max
ttagaatgatttcaagattcagtcaacaagttcaagatcaagatataaatttcaagtttcatgagaagaaatccagaagattcaagaatccagagaaatttgatttcaagattcaagagaagaaatcaagaagacttcataagggaagtattgaaaagatttttcaaaaaacaaacatagcatagttttgtttttcaaaagagtttttctcaaaactttctaagttaccagagtttttactctctggtaatcgacctgtaatcgattactagtggcaaagtttgatttcaaaagcttttaactgaatttgtaacggcctaattggttttttaatggtgtaatcgactacaatatattggggatcgattaccacgggattctaacgg

SEQ ID NO: 203033 - DNA, 299 bp, Glycine max
ttgcagcttgtttattcactatagatgctatatgtatacatgtccaatttattttctaactaggggtgaattctcatctaattatgcaggccacaactatgtttaaggttatgaaggataaccctcctatacaagaaacattgtcagcagagggtaaagaattcctaagactttgctttataagaaatccagcaaagcgaccaactactcgaatgttagtagaacatcgattttagaacaaccatatgtttcatcttccatgcagctgcataatggaacaaacttgatggtaatataaa

SEQ ID NO: 203034 - DNA, 386 bp, Glycine max
tatcctaactacatgcaatagataagaatgaaagataggaaagggaaagaaaagctgggttgccttctagtaagcgctcttttaatgtcactagcttgacgcatcgtcctgctatccaggatccaaaagagttcctacttcaaggaccttcttctcaggtattgtttcctccatcacatgcactttaaaacaaacattttggctaggtggatctttgtcctcctggaacaaatcaaagttgatcttctgatcttctatgcccatctgcagtatctttttccccaagtccaccatctagcttgcagtagatgtggcggtcctaaattaaagactggcttaatagttataacttaaataacaacaaccatgggaaaattttttttttt

SEQ ID NO: 203035 - DNA, 384 bp, Glycine max
  unsure (1)..(384): unsure at all n locations
gcttaggtattgctctctaggagaggggagcttcattttttgtgcttanctatactgagctttaaaagattggttaaaattttgttaaaacataagcacttagacaatgaaggaaagctggagttgctgcacatgatgtccaacgttatgtcaaggaatcagattgggctgcacaatgcacaaggcaatataaaatgtcaaatgaagaattgaagctgcatgatccacgatgtcggacacgatgtcctgacatccggcccgaaaatactggacacataaatctgttatatctttaacagattaatgtgcgattagcaactgatttggcgatctatctttatgaacgaattaaaagataactaaagtttgaattacaaacttgaa

SEQ ID NO: 203036 - DNA, 414 bp, Glycine max
agtactggagaattgagtaccttaggatgatgtttgctgtggttaaaggactgaccacttatgaacaaattccacagttaatgggcaattgtattcttcatttagagaagcttgctttgctatgggatcattgcttgacgataaggaatatattgaggctttaagagaagcatgccattgtggcattggccaattcttaagaagattttttgtaataatgctcatatctaatagcatcgaaagaccaaatcaagtatggactgaaacatgcgagtgtctaattgacggtattcttcaccaatagaaaagaataacaaccatgccaagaaatgtatacggaacccttatatctctttattgaatgtaattgtcgttaaaacttacaaattcaattgttaattctgtccaaaaatt

SEQ ID NO: 203037 - DNA, 320 bp, Glycine max
cttgcaagcttcttccaactcaagcatgagagaagacagtatatatctggcaccgaagatttctgaaagcttttcacccttattgacgattgaaaaaaagcttttaatggaagtcaggagaatgaaggccccccggaaccattaattggaaaccaagttcatgatcgggtaatggacattgtaaccgtgtttgggaaatcccagaagaagacattttctcccaacaacctatggaaaaaacgctcaatattctttgatcttccatgcttggctgaacttacatgggggtcctcggctaaaagtttttcctggggagaaaa

SEQ ID NO: 203038 - DNA, 375 bp, Glycine max
ctcagctgatctctcaggaagatgagagccgtggaggattggtgtcttatccgtcgcagacatgacggatctttgcttattacccgatgttgttattcccccgaagttcaaagagccggacttcgacatgtataaagggacgacttgtcccaaaaaccatctcaagatgtactgccgcaagatgggcgccactctaaggatgagaagctattaatacacttctttcaagatagcttggccggagccgcggtagtgtggtacactaatttggaagcttcccgtatccgtacttggaaggatctgattactgccttcctaaggcaatatcagtacaattccgatatggctcccgaacggactcaactgcagaatatg

SEQ ID NO: 203039 - DNA, 311 bp, Glycine max
  unsure (1)..(311): unsure at all n locations
atccttaagtcacctgcggcatgcaagcttatccgacctnccattaataggtctttcattgataatttctgcatgccatgacagttacagcagccagggcaagaccagcagtagcagccggccgcaaatacaccaccgccacctncacaggagccaccatctctagagtccatctcggctcacatgcagaagatgaagctctatatgcagcatttgggtgaccaacaggtggccaaccataggggctaggggcaattgaatgacagattctaccagtataccctggactagcagcgccaggaccctatccc

SEQ ID NO: 203040 - DNA, 430 bp, Glycine max
gcgtagtccaccatttccatagtagaatactggtaatgtgtctattatcattgtcatcgtttttttcgtcattgaggtgccacttgagctgccaggttctccacctttgggcgtattctttgaaagatccgtgccccttttttttgcacatattttgtagttgcatcctatctgaagccattataccgacacagcctaacgaaggcaaccattaggtccttccaagaatggactcgagaaggttccaagttagtgtaccaggtaacaactaccccagtaagactttcttggaaggaatgtatcagcaattcctctttttttgtggatgcccccatcttccgacaatacatctttagatggttcttggggcaagtagtcccgttggactcgtcaaagtccagcaccttggacttgggaagggtgatgatat

SEQ ID NO: 203041 - DNA, 382 bp, Glycine max
  unsure (1)..(382): unsure at all n locations
gcttcttataagctgaaccattttatcaataatactctttttgangtttattcagaaaattagagtttatctcttttatcttagtgagagtgattctcctaaattcttgagtgattcaagaacaccctggctgtatcaaaggactttcacaacctttgtgtgttgccctcgctggaaagagtgattctttccttcctatcatctccacccttgttctttcaaaccacaattccagaaaatccacctctgcccaaaattatctcgtgaccataactcccatttcacacactcaaattaagtgattcttgagcctaaattgaatttcaaaacgagacctttcacctcgttttggaatcacctcatttggagccctgtagcttcc

SEQ ID NO: 203042 - DNA, 421 bp, Glycine max
  unsure (1)..(421): unsure at all n locations
tctagatgagttatgtctgcgaatcggacatcctgtganaagttattaccttttgaatttctcgagtgctccggtgattaatttcaagcggctcgatattttatggcctcanatcagacatcggagcgaaatgttatgaccattccaagttggcgagaagctttcgttttcaatttcgagcgtctaaatgagttatggcaccgaatcagacatctgagtgaaatgttatgaccattcgaatttgtcgagagcttccggtgttcaatttcgagcggctagatgagttaggtcaccgaatcggacatccgtgtgaaaagttatgaccattcggttttgtcaagagcttccgttgttcaattacgagcggctcgatttattatgccccgaatcgacatccgaggaaaagtatgaccattgactt

SEQ ID NO: 203043 - DNA, 408 bp, Glycine max
ttaagtcacctgcggcatgcaagcttggcctgcaagacaaggttgagccttagtgtttctattttctgagcctgccactagaaatgcaccgatacttgctcagatgtcagggaactatacagtatacaccacaaaagggaaaaataaaatagagccaaaacgcaatccctaaggcagagattaatcactagcgatgtgcttgacaagaatcaacccttaaatatttataagcaaaattgtcatcacttacacacatatatcaacaaaaatctttctaaaactgatatgatggagaaaaataaaacaggagctgcatggaggaaccttaaaagcttgcaatacattgtgcagtaaactcacactaatctaaggtcttacatacaatactatattgattcaactcggaca

SEQ ID NO: 203044 - DNA, 354 bp, Glycine max
tgagctgaactgacaaaggaatatctttagaggtctaatcaaagtaatgatctgtacggatctaattggaatatttatttattgtgcacctaatgacattaattatgtttagagatcatattagaatctttatctatagcgagcctaattaaaagaattatctttaagagactattaacaagaacttgtagtttgtactgtggggatctgaaattcatattgcatttgacaaacaacaatagctattgagaggagaactacatcgggaacaattggggtcccagtgtgtaagattatccaatcattttcatttctaatgcaataaagcatgctctttagttatgctatatccat

SEQ ID NO: 203045 - DNA, 377 bp, Glycine max
agcttgaaccaatgatggttgccatggatgattattttagtggggctccaatggtgggaatcttggaacccaaaccattcttgggaagggttcaagatcgcaatctcccaaaggtttcaagcttctaacctagggaatccttttcaggcattgttggcgctagaacaggaaaaatgccgtgcatgaattcatagtccaattcgagaagcatgtcggaatggtgaaggggttggaggaaccgtttctggtgaaggtgtttcttaaagggctaaaacaagagatcaacactaaggtaaggctctatgaaccaaaaaacttgatggaatctatggccaacgcttgcaaggtacaagataagacttacgccttaagaaaat

SEQ ID NO: 203046 - DNA, 366 bp, Glycine max
  unsure (1)..(366): unsure at all n locations
ntccatatatntcactgaagcacctcatagagaggcccttcctcgtatgatacgacatgtattggttatcctcaacatggacatcaccacgactgccaccattttgcggcattagcatcatactgttgcatggccctttcctgtgactgtttgactgatgctgaaagttttgagggtagattgtcacgtatgcactgagataacttttaggctacaaaaaacaacggaaggaaaaattgcatgcatgctaggaagatgtctgcctttatgacaacaatcggaagattaaaccctgaattggaaattcaaaaaatgtccgggctttgtcttttatgcccaatattaccacaatctctaatttgattg

SEQ ID NO: 203047 - DNA, 383 bp, Glycine max
agcttatgagaacaaaattgcctcaatcatttccaaatttgcatgtgaattaggaagcatcaacaagaatcaagccaaggctattgtgcaagcaatcaatggggcaaaacacaccaaatgattatgatgatggatggctcaaattctcacaaaggtaaactcatcactttcaaattgagctttcaaaactatcatgacatgtgatgcaatcctatcctgcaagggcattgggtagaagactccaagtagattgggctagagatccaagggaaggccctaaggttctcatgagccttagggtagatttcgagcccatgggctaagcatgacccgcttatctttgtaaatattagaataggttttttcttcgtttgggccttgta

SEQ ID NO: 203048 - DNA, 382 bp, Glycine max
gcttcaaagacaatcctctaagagatgtctgtaaatgcttgctttcaaaaagagttatctctaaaaactgtctttgaaatttgaatgcctttaaatattttggttctcgcttaattacttttcctgctcatttcttttttgctaatctagtttctctcatctcctcacccttactctctgtgttgtcactcttgtctgccgccgatgttgaacccattgtcatcgtcaaaatcaccattgtcgaacgttcttgctctggctctgatcccatccctgaaaggggagttccagtggatgttcgaattccgcctcaaggccttcgacaaattccagtccatgaaggaacccacgtggttcgacaacacttaccccccccccccct

SEQ ID NO: 203049 - DNA, 279 bp, Glycine max
  unsure (1)..(279): unsure at all n locations
agagcagtgtaccgcaagcgagggcgactggattgattcttttagncganacactaccatttagcatattgtcatctcattgaaagttgcatccccgacaacaaagatttccttactatcatcgttctaggtatgtatgtgattctcacactcatgtgcttaagtattataggcgatggttgacaagttactattctttagtaagacattcgaattcagtgagtgagccatagttccccgcttgagaatgaatacgacgattaaatcggatagtttgga

SEQ ID NO: 203050 - DNA, 332 bp, Glycine max
gctacaaaaggagagagcaagatatgaagagccaatggttgatacatggacggagatgaaaaagatcatgaggaagcggtatgtgccggctagttactcaagggacttgaaattcaagctccaaaaactaacccaaggcaacaagggggtagaggagtatttcaaggaaatggatgcgctcatgattcaagaaaagattgaagaagatgaggaggtaactatggctcgatttcttaatggttagactaatgatatccgtgaaattgcagaactgcacgagcttgttgaaatggatgatatgctcacaaagcaatccaagtagagcaaccatt

SEQ ID NO: 203051 - DNA, 385 bp, Glycine max
cttctggaggaatcttctggagggcccaagtgggcctggttgctatttgcacccccatttttactaagtacaccccctgccttttttttgtgattcttttttcgtaaaggtacggaaacttacgaatttcgtaacgatacttgttttctttccgtaatgttacggaaccttgcggattacataatcatcccctttttttacttacggaatgttacggaacctcactaattgtgcaacgatgcttccatttgatttccggtgtgtcacgggaccttacggattgtgcatcaatatcttcttttgttttccggcatggcccagaaattcaccaattgcctaatgatgggtgcccagcacctcacaagaccaacaaaagttgcatgta

SEQ ID NO: 203052 - DNA, 393 bp, Glycine max
tgcaagctggatttgtgagttgaacaagatgacgacacaaatgatcttgttgttattcattttatcatttattaggcgagataacgacttaaataaatggtaaaaagctcattaaaagcggaagaaaagataattgaaagtgaacgagatgaagatgaaagcaaacaaaataagaaatgaattgaaagtcttggattcgaacacttaccggttgaagactgaagaacgaacgaaaaagggacgaagaacggtggaaaatcttcacggatttgctcatggaaatgtctcggaagctttacggcagcacctcgacttggattttcttcacggaaacacattttttcacccacaacagctgaaatgcataacctagcggtcatgaacatttttgaa

SEQ ID NO: 203053 - DNA, 410 bp, Glycine max
tcgcggtttggtagagaatgaagcccaatctgaccttcactgttttcttctaggtaaccgtgattctacgctagttccttgttagattcagcttgtctttgcatcttttcttactttagaaccaccattgtttgtttttacgcttcctttgaaaaaccctagagaaagagactttgataaagttatctttttatgaaataggtgttattttcgtgaccttcactgaaccctgatcacattggcgtgattggaattttaaaatgatgttccttttgtagaatccgagatgcccttagccttttcatgtaatgacatgggtatttgactcagaatattgtttttaactttatttctgaaatccatagtaatctccttcgttctggtgtaatagagacttgcgttggaccgac

SEQ ID NO: 203054 - DNA, 340 bp, Glycine max
accacaagaaacaaggcaatcatttcatacacaacacccatccaactcagaaaaaataacgacaaaggggaaaacgcaacttatagctaatcacacaacaacccacgtatccaacatcaaacaccatcaccacgaaagccactaccgacatgcatagacacggaagaccccacaccaaaatacataaaacccaacacattcagattccatgaatccagtccaaggaaaaccagacaacaggacattaacaccaataaaataccttctatttatctccaaggcctagactccaaggaggccatcaggacctctctctcctaactcaggcccaacccagaaa

SEQ ID NO: 203055 - DNA, 332 bp, Glycine max
agggagatgaaatctcaccagcactcattaaagccattgaagattctcatgtatctattgtggtcttctacaaagaactacgcttcctcaaagtggtgcttggttgaactcatcaagattctggattgcaagaaatacctaggacagattgcaatacctgtgttttacgagatagatccatcacatgtgagaaagcaaactggtagctacaatcaagcctttgcataacatgagggggaacccatctgcaacaaatggaaaactgctctcactgaagcagccaacttggctgggtgggactctcgaacttataggtaaatgaattgagaatt

SEQ ID NO: 203056 - DNA, 403 bp, Glycine max
aggcagatagaagttcttaatattgttattgaacaataccttcaaccctttgttcattggcagccgagttcctgcggtaagctattattgtggattgaaaggtctcacaacacggcgtggaatgctacgacagggtccacaccttacaaggttacctttgggtggaaaccttttaactttctgaagtacctcaccggaaattccaaggtggatgttgttgatgagatgctaactatatgcgaagaagctttcctgctcatccgcaagaagctcattaaggcacaaggtcttatgaagaaatatgctgaccacaagtgtccggaggtggtctacatattgatgattgggtaatgggcaagttatgaccacgctgacaaacatcaaccatacaacaacaagactc

SEQ ID NO: 203057 - DNA, 280 bp, Glycine max
gcgccaactagtcacaacgatttcacatcattatccaataacccaccatctctgatctcactacactgagtcaaatctcttcccatatatccttatcctagatactcacaaactcacgttaccctcataaactcttgccatgatttccaaaaacacccatgttaaccttcacctatcaatacattactggactcacaaaactaaccaaaacaaggcaaatgcacataactctgtccaaaacgttaacgtcaaaattcactagctcttcacatccctaata

SEQ ID NO: 203058 - DNA, 300 bp, Glycine max
  unsure (1)..(300): unsure at all n locations
acaaacaccacacccacacggncacgccaggcccacggcccccaccaaaaacggaactaaacacaacaaacgcgccataaaacgaaaacgccgcagcacaaccaacccccgggagaaacatgaccccgcaacgcaaccccagcagacacacgggaaggccgcacacacctacccgcaccaaccgcgcggacccggccacccacgggacgggacccacgccaccaggcgaggacacacacgccctgaaaaccaccacccacaacacacaaaagggcaacagccacaccacacaccccaacc

SEQ ID NO: 203059 - DNA, 241 bp, Glycine max
aacccacacaaacacaaaaccagcagacaacgcaccgcacgaacgagaaacacaaccacaagaaccacaccaaacgaccacgaagaaaacaccgccgcaaccaggaacgcccacaccggccgagaaaacgaaaagcacaaaacgaaccgacacccccgccaaacgaaacgcgaacgaaccaagggaccgaagaacagaacgcgccaaacaccacacaccagaccgaaagcaggacagggcc

SEQ ID NO: 203060 - DNA, 196 bp, Glycine max
aaaaacaccacaaaacaaaaccaaaacaacaaaacaacaccaggccacaccaacaaaaaaagcaaaaacacaacacacacacaacaaaacacacaatcaacccaacacccaaaaaacacccacgaaacaaaaaacaaaaacaaaaaacccctacaacacaaaccaccacacccaaaaaaaacaaccaaccaccaaa

SEQ ID NO: 203061 - DNA, 389 bp, Glycine max
acctgcggcatgcaagcttcttaggccatttatgagaagccactttttatagttagttttaccaagaaatgctactcttaaaacaaaaatggcatacaacctcctccaataaacacaaacatcaatgtaaatttagagcaaatctatgcacatacttttgtacgaacattcactcgcacaagatattcttcttactaaaaaaatgcacaatcaaggcaccttcgttacctagattatttatatgtacttccaaggagtatttgcttatctacatcacatgcacttcctttgctaaatttacatacatgcatactcaaagcatttcggctaccaaaatttgcacacgtgcacattctggtatttccaatacctatacatatacaaacttt

SEQ ID NO: 203062 - DNA, 373 bp, Glycine max
agcttataagctctatgtaagcgatatctctaattatgattagacacacccctcctaggctacaattaatgcggctcaaagaggcctcaattaaagcgtccctaggatgactagttaatgtggttttccaacaatctcaaatattaatgttatcatctgcttttgcatactgcaaaattcttaaatttgaccttcctttaaatgtataaatgttgtgtactgtaatttcacaaaatatttctatttaatctttaaagcaattgattgatgagatcatcatcaacaaaatagaatgaaatgaattatgttaaaatttcactttatattgaaattggtgaagttgttctttaggtaaagcttttggagatgtttt

SEQ ID NO: 203063 - DNA, 280 bp, Glycine max
  unsure (1)..(280): unsure at all n locations
ntaagggaagaactgaacatgagagagagcgcgcctattatgttgtggatngacaacaaatcagcaatggattgagccaagcaccccgtggcacatggcaagagtaaacataatgaaaccaacgttcggctcttgcatgatcaagagagtaaggagaagcttgaattataagatcataggtccgaagatcaagtcgcagacatactaactaagccatagaagcctatccaagtcaaggaattgaaagacaagtcagcagggacatccctgacaaacctga

SEQ ID NO: 203064 - DNA, 372 bp, Glycine max
  unsure (1)..(372): unsure at all n locations
agcttatngntcttatattctctcttaaaaatgtttattatcttctttatccatncattctattgcgttactttagttttggcctaaaaatggaatcaatttgctatgtttttgtaaggaggattttggatctgttattatagcgccttgtttattttccttaatatgaatgttgagaagtgtatttataaatcatttcaaaattgatagttcactttttgggcactaaatgagtaagaatatacttcactaatggcattttcgtatgttggagtgagactaagggcttaaaacataaaatagcggaatatttggtacatttgggacaaagagttaagcaagcagtagcgacaatcatatgtattttagagg

SEQ ID NO: 203065 - DNA, 380 bp, Glycine max
  unsure (1)..(380): unsure at all n locations
agctntgagcaaattcaaacgacaatagcttttgactcttatgttttattgtgtcctgtaatatatcgagacactcgtaattggaaacagaagctctgagcaaattcaaacgacaataactttttactcggatgtccgattgaatcccgtaatatatcgacacgctcgtaattgaaaatagaagctttgagcaaattcaaacggcaataacttttaactcgggtgtccgattgtgtctcgtagtatatcgagacgctcgaaattgaaaactgaagctctgagaaaaatcaaacgagaataactttttactcggatgtccgattgagtcccgtaatatattgagacgctcgtaattgaaaacagatgctctgagaaaaatc

SEQ ID NO: 203066 - DNA, 237 bp, Glycine max
agaaaaagctattgactcttgaattcgatcaaggcctctggtatcaattaccagcgtctatatatactacgggacacaatcggacatccgagacaatagctattgtcgcttgaatccgatcaaagcctttgttatctattgacagcgtctagagataacacggggctctatcagacttccacgacaataactatttgctgttgagtctgataaaagcctcccttttcaagaaacagc

SEQ ID NO: 203067 - DNA, 341 bp, Glycine max
tggtcgaataaagtgtgagtgttataatatcgtatttgtcgcaacctaacatcgcaacgggacgacgaaagaaaataaaagagattttttttcctaagaaggaaacgagagggagtcgccactaacatttatttaagggaaacgttagaaaaacaaaaaagaaggtctgtgaattttgaaaagaagaggttcgcgagttgtttacgcataaggaatgtgttaacaccccacgtgcccatcacaaagaacggaaacctttaatcaagtgcgcaataaaaataacgtgacatcaaagttatttattttcctaagagtggataattttttggggttcttttttc

SEQ ID NO: 203068 - DNA, 420 bp, Glycine max
  unsure (1)..(420): unsure at all n locations
taatatctcccacactgtttgnggtgttctattcttggatggccttgattttctcagggtccacttggatcccatttctaccaactacaaaccctaataaaactatattatctacacaaaaagtacacttctctatatttgcatagagggtgtttttcctaaggactgaaagaacttgcctgagatgtcctaagtgatcatctaggctcctactgtacactaaaatatcatcaaaataaacaactacaaatctacctatgaaatcccttaagacatgatgcataagcctcataaaagtgattggtgcattagtgagcccaaaaggcattactagccactcatcaccctttttcatcctgatttggtgataaccactnttaagatcaatttttgaaaagatattggcaccatgcaactcat

SEQ ID NO: 203069 - DNA, 386 bp, Glycine max
agctgcagctttccttatacggtctatgtgttcctctagatttttagtcttgcacatatcaatttttacttttggtttgccaacagcattgttagttgcccctgtcatccccccagaagaatgttcttcatcaagctcttctcctccttccccctcgagctccctatcatagtaagaaaaggagctaaatgtggagcttggatcatacacattcacagcattattattattgctctgatcaaaagggtttgctggacatgaaagtagctgctgctgattgttagcaaaacaatcattgataaggtcagaaccgaattgatcacagctagcatcttcattctcccctcggaacaaattgatgaactgatcaaaatttgtatcaccaa

SEQ ID NO: 203070 - DNA, 437 bp, Glycine max
  unsure (1)..(437): unsure at all n locations
tgttccacncttgtttcttggctaattatatgatgtcacttcatattaaacagagataactaccaagatatgagtcggtatccttgtggcctccttcgatatcatctttgtcattacggaaatgaaatccgaaccctaactttgaaggctttttatggcggcacgactggactggataaagcatgttgttcatgaaacgaaaaggctagcctacaattgtgcaagttgaagctgtgctagctcagtgcaacctaatcgtcttaataaattcgtctataattgtactaatctattttaaaaactgggtttaaaggataagacttaatatgattcgcggatataaaagtagaatattaaacaaaaaagaacttggaaggcattacaacgaataacacttataattcagataacataaaatctctatgtcgatcaactct

SEQ ID NO: 203071 - DNA, 258 bp, Glycine max
cccaacacaacgcccaacaccccaaacccacgaaacacaaaggagaaagaacgccacccaaacccgaaagaccaagacccacacggatacacacacaccacaaccccgaaaaagcacaacaatcaaccaatggcgcaaaacgagggccaaaggacagaagcttcagctcgaagcaccaatggagaatgaacaaaaacagaacggccacgagagggaaaggggaaaaggcatctaaaaagagcgcggctgaaagaaaac

SEQ ID NO: 203072 - DNA, 340 bp, Glycine max
gtggcgatcgaggcgatggtgcaaaacaactctccacatctcacaaattacgcataaacccaccatccccaggtgcccaccttcaactgagctcacgtactcccatgtagcccttatcctcattcctctcaacaccgggtccccatcaatctctccaagctgccgcaacatccaagcaatacaacatccaaccatcatgaaccatcaaaaccaagaaaacagcgcaaaggaagaaaactctgcccaaaaaacacaaaccaataccgtaactgtccttactcaaataccccagtaacattttcttcgttccaatttgttaaccggtggatcgactcgaaaa

SEQ ID NO: 203073 - DNA, 393 bp, Glycine max
agtcacctgcggcatgcaagcttgccaaccatggaagctggtaaatctccatttttttgggggggccattcttggatggccttgattttctcaggatccacttggaccctatttctaccaactacaaaccctaagaaaactatattatctacacaaaaagtacacttctctatatttgcatagagggtgtttttcctaaggactaaaagaacttgcctgagatgtcctatgtgatcatctaggctcctactgtacactaaaatatcattaaaataaacaactacaaatctacctatgaaatcccttaaaacatgatgcataagcctcataaaggtgcttggtgcattagtgagcccaaaaggcatcactagccattcatacaaacgcaacttg

SEQ ID NO: 203074 - DNA, 377 bp, Glycine max
  unsure (1)..(377): unsure at all n locations
acaaaatngatggcaacaaaataaatgagataagggaagagagaatgcaaacacaattttatactggtttggcaaagtccgtgcctacgtccaatactcaagcaacccacttgagattttccattccttttgtaaaaatctgtttacaaagtttgaaccacacagggacaacccatcccttgtgttcaggaatccttacaacttaagagaccctcagtcccttaatcaatctctctgaatgaaaagacagaaagaagaattctctcttgaagagaaagatattaccaattgaagtccatggagaaactcttaatggatttgcaagtggttgtccaaaagtttcttttgagaaaacatttggcaatgaagttctcttg

SEQ ID NO: 203075 - DNA, 326 bp, Glycine max
aatgatgtaatattatataaatgatcatgcattccaaattttaaatattccataaattcataagtatgtaatttaataatcgacatatcttaaatagctcgttatatgtaaactaccttcacaagcaaaatgtaatttccataatggccatagatgtttattattgtttactgacctctatgcaaatcttccccctgataaggaaccactagattggaatactataatgaaaatagttgtcggtgctgcaaaaggattacaataccttcatgataaggcaaaatcatgaacaatttctttaattccaaccaataactaattttcat

SEQ ID NO: 203076 - DNA, 330 bp, Glycine max
agcatagtgactggctaatcagcgttacacatatacatgtatatataacacgtcgtaacaatgtgctttacctggactttatataattgaaacaagcttccaccaactaacaccatatggacaaaaccaagttcaactacaacaaactaattcagctttcacctgaagttgatataatagggtaatggcgatcagaagaactcaaaggccaaaccaagtttcatgtacaacaaactaattcaactttttctcaaccaaagtatgtcaaactacttggtggctattataagtggtaagtatttatgggacaagaaaagagaggtgtaagac

SEQ ID NO: 203077 - DNA, 437 bp, Glycine max
gcttatagcgcggtctggagacaaggtgaagcgttcgctatttgttaagatgatattccgagtactttggatatggtacaaccatgccctcctgatttccagctgggaaattggcgagtggaggaacgccccggcatttacgcaacgagcataatgtaaacctttacggttataaaagctctataattgggcctatgccttaaagatcttcccttttgttaaggctttgtgtcttttgcttttgaatttataatacaaggatctttcttcatctgttcctggtctctacccattctcattcatttgcatggttacttctttttctgaaacggcagatccgatgactagtcccccgaggtactattacctgtgacccgcctatcgacttcgagcaagatatgaattaacggaagatgaaggaaatgaggatgtgggac

SEQ ID NO: 203078 - DNA, 380 bp, Glycine max
  unsure (1)..(380): unsure at all n locations
agctnaaggataagncttgctgtggctcgctctatctcttacactntaatgttgcaaattgtatggaaacatcgagcgcaatacagttcccaccccaaaccctgaaccaataccttatcaatcacaatattatctttagtcccattattcacaattatcccatgcaacctatgacactttagctttatcccaacaaaaaaaatatttgaaccaaaaaaatgttttacctaacttctttttgcatcattttccacctatttttttgagtcccatcttggggatcatactcacacgtacttcagtacccctacagtggagccttcctcatcaatccgaccaaacgagcttcagttcacagcaaatccaggcttacctaacga

SEQ ID NO: 203079 - DNA, 433 bp, Glycine max
  unsure (1)..(433): unsure at all n locations
tgggcttctgaagcaaattggaagttatttatagtggacactactcttagaacanaaacggcatacaacctcctcccataaatacaaacatcaatgtaaatttagagcaagcttatgcgcatatttccttacgaacggtcacttgcacaagacattctatcaactaagaaaaatgcacccatatacaatcaaggtagcttcattacctagattatttacatgtacttccaaggtgtatttgttatttacatcacacacgcctccttggctgaatttacatacatacatactcaaagcactttggggtaccaaaaactgcacatgcgctcatcttggtatttctaatacccatacatatacaaacttcacgatgaatcttgactacctacacaataaggtgctacatttcatgctttctcttttttcaagtttt

SEQ ID NO: 203080 - DNA, 327 bp, Glycine max
  unsure (1)..(327): unsure at all n locations
gcagcatgcaagcttccacagacgatagcgaggaacaaccatctctttttcccanatcatagaataacgcgctcgaaactagatccaacacaccatcgcgcaaaaatactccgaacacccaaagctctagaaacccaaagaaagcgtttatacatactaaaaacagaaaaggcgaccatcccaaccctagcaatccacaatcctccctatacaatgccatccgaaaaactaaaaagcagcacacaatgaatcactcacaagagagtcaacacgcacctaaaaacattcgccgaccaataagtaactattaatacacaacatgattac

SEQ ID NO: 203081 - DNA, 381 bp, Glycine max
  unsure (1)..(381): unsure at all n locations
gagctgcagctatcnaggagaatggacctttgtggtctacaattggcttcaccttcccactttctaagtaagggtttagtttcctcagaacagctccattggaagtaactacaaatctgaagccaggtggtgtaacagcacctgtgagtgccacgacactgccgccttctttcacagccttcactgccctgtcacattgccctgcaagtcaccagcaagttatgaaacacaatcaacatgagtagcataaattagtgttggggaaagtgggagtatgggaagaaaattttgtgattttcctttatagagtatattattcattgaatttcagaaaattaagtatggtatacatgcaacaataacaaagtatttctcataaac

SEQ ID NO: 203082 - DNA, 396 bp, Glycine max
  unsure (1)..(396): unsure at all n locations
tctctcaactgttcttcattcttcttacttttttcactttntttcttcctttctcttgcacaaatttcatggttcttccactagtgatgatcatggaaggctaaacacaaaatcaatccaaggatccactccaagcaaggctgaatttgagttctggtttagtatttctaatctgtgtgaatgtttatctttttcttcaatcctattttcgattttcatgattatgaatattcttaggattgaaaatgaattangtgggatttctttcctaattttgaacataattacaaattgtttaaatgatattccaacctaatttgcaatctcaatgaattgagggattaatttgaatgaaccaactctaatgagaatgattaaaccctcacaacttgatca

SEQ ID NO: 203083 - DNA, 351 bp, Glycine max
agctagatgatatgggatgactacgagagagattaagtttattttgctgccttggatatgaaaggaaccctacggactctgtgtgaacgactgaagttggatataccctactatcacaattgccttcgcgcatctttcacgagcttgtagaccaatgagtattcttcttaaatgtgccagtgcgaacctcaaaatattttattttacaatcacaagcgtgtgcgtatttcattccattttagcacataattgttaaaataacatcatttaagtttttgtataaaaaacattaaaagcgatgaatttatgatgcttaatgaggaaaacaaggcaaaaaaaagcaggatcatt

SEQ ID NO: 203084 - DNA, 374 bp, Glycine max
ttccattcacaatcactacttgccacatgaagctattctacttgcaaaagccagattcaaattcaatctgatggtctcatatacattaattaatccattctagccaggtgagaaccaccattactattgctggtgccaccttaagcaaattcaaattcaaattcactctgatggcctcaaatacataaattgatccactctagctgtgcttactcaccaatactttcccttataaaaattgctttactgtgaaatataacttgctggtgctgaaaaacaacatttacttaactttgttaatgccatgccaagtgccacaagataatctcttccagcatgaatcattcatctaccaaaagccaaatcattctgat

SEQ ID NO: 203085 - DNA, 327 bp, Glycine max
agttctcaacttcagcgagaactgcacacctgatatcttatcgccatacttggatggaatagttagcaaactactcgtactcctacaggcatcaacagtgcagtataactctcaagaacaacgctataaaggccatttcgcccaatcatcatatgattgaattattgctttcaccctaattcgcggatattcctatccatttattaaaatggtaagcacatggtgcaagaaggtgccttaactgctttggcatcagttgccgattcttccccgtatttcgtgaactcttttgtccaatcaacatatgcaatatattttcctttgacc

SEQ ID NO: 203086 - DNA, 399 bp, Glycine max
tatctatgcacagaccatatgagagagcgctttattgtgaccgagaatgaaaacacttcactatgtatttctggtaggccaacaaattattgaagccctttgttggtatatccaagtacacacaggcactaaagcttaaacatatataaacactagactcgaatatcaaagcctatccgccacaacaactcaggtaagtctaattgatcagtaatctaactatttatctatctatagaaagttggtttttcttttatttaatatataaaacaaatctaccatttcactttctctactataactttcttcgtttagaaaatatttatctttacattgatcttcaccctatcatatcacaagaataagacataccgacattattagataactgggataaag

SEQ ID NO: 203087 - DNA, 374 bp, Glycine max
agcttgttacaaatgtagttaactcgtggacccctcaatgctctggtaaacacatctgccaattgatcacaagaatgaacaaatctaatgatgatgtcacctgactcaattttctgtctaataaaatgacagtccacttcaatgtgtttggttctttcataaaaaacaggatttgatgcaatactatatggcagcatatgaatcaactgattttccaaggaaaacgttttgatccttgtaaagccatggactatgctatttatctagcttggtcttggataaaggctaaagataaagattttagtactagtttcaaccattggtcctctaatatatccactttcgttgcttagaggggttggatctggttgctt

SEQ ID NO: 203088 - DNA, 383 bp, Glycine max
tgtgaatggtatctgatgatgtcaaaagaagaatcaaacaaggctcattttgcttcaagattaatacaagattgtttcaacaaacaaagccttgattcaagatttcttcaagatcaagtcatgcctcacaatgaaaggtttcaagtcattcaaggcacatgtaatcgattaccaatggtttgaaagtgtgtaatcgattacacatcatatgtaattgattaccagagactctgaatgttgggaattcaaattttaaatgaagggtcacaactgttcaagaaaaacaactatgtaatcgattacactaattctgtaatcgatttccagagaggattttcaaggaatatcgccaacagtcacatcttatcatttggagtttgaat

SEQ ID NO: 203089 - DNA, 389 bp, Glycine max
  unsure (1)..(389): unsure at all n locations
ccgccgctgcagcttcttatcaggctcatcttgagggtgaagctctttcttctatggctnatnccctagtggatggcgcctcctctcacctcttctcctttgtcttccgctgcatctccatggtggaaagtcaccattaaaggacctcattgaagctcaaagatccagcctccatagaatccccacaagcaagctttccatcatgaggccctatttgtattgggaggctggctctacccttacctctcggcgactgccgctcaaggcactgaccaccatggaacttggccttatatgggaagcgctaaatggcaatttctccaacgagcttttgggcatcacgttcaagctcgagccgttgcccatgagtactttggccataacgtgtt

SEQ ID NO: 203090 - DNA, 383 bp, Glycine max
ctagtctatttatagaagcatgcgtaacacttgttgtaactttgatgaatgagagtcttgtgagacacaactcaaagttcaacttctctccctttgtcttccttcaattttgtgctcccccctctctctctttatcttcggctttctttgcctccattgaagcatcctctccaagcttcttatccaaggctcatcttgtgggtgaagctccttcttgcacggtttattccctagtggatggcgccttctctcacctcttctcctttgtcttccactgcatcttcatggtggaaaatcaccattaaaggacctcattgaagctcaaagatccagcctccatagaagcccctaaagcaagcttccatcagttagacagtggagaa

SEQ ID NO: 203091 - DNA, 371 bp, Glycine max
cgcttgttattatgcaaagataatgaagttgaatgtttttattcttacatactatattcaatgtcttcttgttgtgcttgacataccgacacaaaactaacctttgctctatactttttttaattcaaatctacataaagggggacattctattctctatgattgataagcgtgacaacttctcttaagaactatacaagtatacaatatgtacctttatcttgttttaagtaaaaagagggacacgtgtttctcaatttgattatttataggatgaaaataatggttgaactaacgcgaatcttttgatcattaaaatcggccaaattatacattaatacactacatacttagctaaaagacattatcac

SEQ ID NO: 203092 - DNA, 362 bp, Glycine max
  unsure (1)..(362): unsure at all n locations
tttcaatcaatcaaacaaaattgtgtttgtttaaatagtggataaattgaaagtgctaggcattgagacaagtttttgtggtaacgatactctatatacattgttaaattagctgtataggtacacttgccgagaggtcaactccaacctgttcaatctcattcaagtatgggttaggtcatgagtgttaatttttaaacccatgaacccaactcatagacccattgatgtgatatgtnctttaaattactattgttttttatatgtatacatattttttataattaaaaaggtcagatattagtgataacacttttactaacttattcaaactcaaaattcttcatgattacttagttcca

SEQ ID NO: 203093 - DNA, 223 bp, Glycine max
  unsure (1)..(223): unsure at all n locations
ctaagatactcaagcttctatggaagctgcatcnttgagcgtagatgaggtccctcattgattattttcaaccatggagtcgtagcagaagataaagaggagaataggtgagaggatgcgccatccactaagaaataagccatggaatgaggagtttcaccaccaagagagtgtcttggataaaaagcttacagagtgagcttcaatgtgaggaaagaatgag

SEQ ID NO: 203094 - DNA, 382 bp, Glycine max
  unsure (1)..(382): unsure at all n locations
agctttggaagttaccatgtcagaggcattcttattatgtctcattntatctactctgcttgggcaatatacccctttcaaaatctcttataacacacataaggataagtggtcaattaatgagttattgattatgtgtgttcaacaagagaaaaggttaataatggaacaaggtgaaagggtatatttgattgttcagggaaagaagaaaggggatcaagccaagaataaaggcaagattcctactcattaggtcataaagaaagagtcaaaatgtttattttgcaaaaagaaaaggaacatgaagaaagactactcacaatttaagacatggctcgacaagaaagggtatggaaagcctcaagagaacagtgggaagtga

SEQ ID NO: 203095 - DNA, 395 bp, Glycine max
  unsure (1)..(395): unsure at all n locations
tactcagcttaattgtgctgacctcaagaacattcgcatttgntgttgttgntgttgnanagcctcttgaactgcctcataaaactttctatccaccgatgagtccatggaataggaccttctcatggcttgaactgataacctttcatctttggatctaacacctatacactcatctcccagacttgtcactttttgaagcttccttgctttcttttccttcaatagcttcatttgtgaagaaagactaataatacgacatgttggtaactcttgtctttcttgcaagttttggtctctatcatgttcaccatccagatcaatcacaacataacctccttcatcctcaacatcaccaatgaggttttcattggtttggctttgaccttgagggg

SEQ ID NO: 203096 - DNA, 379 bp, Glycine max
  unsure (1)..(379): unsure at all n locations
agctntaggttgctcattgactccagattgctacaaagatggacagagatctgtatggtgatttgcagaagaacatagaccacagactcttgcaacaggtgcagatttctgattcatggcaatctgagttactaggttgaccaaggcatcaagttttccctcaggctttttattttcaatagatgaagatgaattcgtggccacctcatggactcctctaaggacaatagcatcatttcttgcactgaattgttgggagttggaagccatcttcttaatcaaattcctagcctcaacaggggtcatatcaccatgagctccaccattggcaacatcaaccatactcctctctatgttgctaagtcccttatagaaatat

SEQ ID NO: 203097 - DNA, 314 bp, Glycine max
  unsure (1)..(314): unsure at all n locations
cggtcgaangaacttgttccgctccggagtacgacagtcaccgctttaggagcgctgtacaccagcagcgcttcgaagacatcaagggatggtcggttctacgggagcgacgcgttcatctcaaggacaacgagtatactgattttcaagaggaaatagggcgcacgcggggggcaccactggctactcctatggccaaggttgatccagagctaggccttgaattttatgccaatgcttggccaacagaggagggcgagcgtgacatgaaaacctgggttatgggttagtggattccgttcgatgccgacgct

SEQ ID NO: 203098 - DNA, 391 bp, Glycine max
ttaagtcacctgcggcatgcagcttgcatgctgacagaagcaatggagttcatttttatatggacacaacacctcctaacatagaaagagttacctcggtggcgcgccacaaccatatatcggggaacaccggcaatggaaactatttataggttaaatcaactgaattataaggtgttacgttttaatgctctaaaccaccattctggctaaaatatattggcggatcccccatttttctttctcctttgattcttgtaatttttttaaacctttatccctcccaaatgcggaaccattatttttagtgcctatcccattaatgaattttaattctacatttaataaaatatcttgctaaattttcacgtctctaaaatgagaaacccat

SEQ ID NO: 203099 - DNA, 392 bp, Glycine max
  unsure (1)..(392): unsure at all n locations
ctgcggcatgcaagcttanaacaataaacttggccttctcttaattgtctttgggcttggcgaccacgatcaacaaagtactttcggcacctactatatgttgacttgaccaacgctgttattggaatgctgcgacaatctttcaacaccttattcacacattctgataagttggttgtcatgtgaccatatcgtcgtccagatgtatcgtaagccatgctccatttttcctttgagattcgatcaatccatcttgctatggctggactcaattgacgaaatttttctaagttttgatcaaacacatgcttgcaaggagtgtacgctgcatcaaatttgttatcatcaaaagttgtacatagacatgaaactcaaattaaattaatgtataa

SEQ ID NO: 203100 - DNA, 416 bp, Glycine max
gatagagggagagatagagagatgtgggagcacgaaattgaacgaagaaaaagggagagaagttaaactttgagttgtgtctcacaagactctcattcatcaaagttacaacaagtgttacacatgcttctatttatagactaggtagctttcttgagaagctttcttgagaaaacttccttgggaagcttctttgagaaaacttccttgagaagctagagcttagctacacacacccctctaataactaagctcacctccttgagaagctttcttgagaagattcctaaagaagctagagcttaactacacacacctctctaatagctaagctcacctccttgagatgagaactagagcttagctacatacccccctataatatcttaagctcaacccattccaagaatacatga

SEQ ID NO: 203101 - DNA, 322 bp, Glycine max
  unsure (1)..(322): unsure at all n locations
agcacctagtccgaaaccttagacagagagaaaagaaatttgatattataatanacanccactcagtacaacctaataatatgaccaactgacctgcaccaaccgataacaatacaattactacagaataattccataaataaaaaaacctgtctatcccacacacacagtctatactaacacacaaatctatctattgcctccaacgcaaacacttaccttgctctccttacaaatcacagaatgtgtgattagcatcaccacattcaaaaatatgttaccaagtcaacaccaataaatcaaaactgtaaagggacactcg

SEQ ID NO: 203102 - DNA, 374 bp, Glycine max
  unsure (1)..(374): unsure at all n locations
ttataccgacaggagagaagcacatctctgagttttacaccacngcagtacaacagatctttaaagctagagacagttcccataacaactctgaatcatggccaaagcctccagacataccaatactctagcctgaagcccaaaacatgtccataaatagtactcaactgcttcttgaacctcctcagttgacaaacaagatgggtgtacccttttagggcacttttgggaatactaattcttggaaaacaacttgttttgccccctcaagagctctccacgaagccaaacgcctaacaacatccatacaaaccaacctccaagcaaatcgaactaaatgtcccctcgaactcgaacacctatgaacaactcca

SEQ ID NO: 203103 - DNA, 303 bp, Glycine max
cccaacctgtccccctaatcaaccattaatctcatcttctactcaagtatgaaattcgcttaaagacacctcatctcaacaccttacacttaactctactccaaccttgaatacgtaatacaaagcacatcccttactaatgcgagaacatgggcaacagaaatgctcgcctcaattctatcctggttcggacacactacttgtgcctacacccaaaatccaacccacccgcttgacagacccactatcttgtaaattctctttacaagttctaaacacccacggacaatccccccccatgtg

SEQ ID NO: 203104 - DNA, 373 bp, Glycine max
  unsure (1)..(373): unsure at all n locations
tgcaagcttattaagatgctacgctgtagaagcttcctctgtgtgtttcttgaaaagcttcctcatgaagctttctcgtaaagctacaatttttaactatccatccccctattaattaatccaccttccttataattaattacggatgaaatttacgcccctatataaccaacctcacccaatacttanatcttctatatgcacatatttataagggtgttcctcctaattcgaggtaatcacacttcactctaaccttaacctctatcccaaattattggaatgatcgtcaatcacaaactacttcttttatgaattgtatattatgcgacttcaccttcttcttaatattgaacatatgatgctctcaaac

SEQ ID NO: 203105 - DNA, 326 bp, Glycine max
tggatgcacgtaacggcgcttatgttcgagaacttatatgaatggggagaacgcaagaagggctatcattctgtcgcatgaagaattgtaaacaccatataccgattacggacgacttcttcactttaatgagctgcgcataaaaacttggtagtgaaacgtgacacatattctcaaggccttgggctgggttccttagaggctgagtttgtaaggaacgaacaatatttcgagattttataaatttttatactacacgtcttcaaaatgggaactgaaaatgataagttcatgaaatctaacctgcaatataccttaaatactct

SEQ ID NO: 203106 - DNA, 332 bp, Glycine max
cccctgaagagcaaggttcatcaaaatatgcgcatcgagaatgcttggcacattgtcgagcaataaaggaaatgattcctgatttataacataccaacacaacttcataagcgatgatgaatcctgactgataacaaacaaacgatggcaagctactactgttatgcaaaaactgactgaaggctattaatggagcttgagaaaccttttgtttggcaaatcaattaatcaaatgacctatgctatgttctcatttgacgaactcgtgatatttctttataacctgagtagataaccctgtggagaaggattcaaggggaggcattgccccc

SEQ ID NO: 203107 - DNA, 441 bp, Glycine max
aataccagctgacagctatggatagccccatgatgaatggaacgtaatgtcttatctcatccttctttcctgttgaataggccttctttaataccttgtatggttccacataaccggttactgtcactttctgctgcttactgtttatctccaccgattttactcctgcacttcaccaccattttatagtttcaccaccctcatgttacatgttatatgtataacactctgatacttataacatattatttattattattagttaaaatttattaaaaactgctccaagaaaagattttttaggatttgaagttctctatctagatatgaaaaggtgtaatctgccttatcttttaagttaaatataagttatataataatgtagaatacacactcttattgttttcataatcaacctcacaatcctaaattttttcctaa

SEQ ID NO: 203108 - DNA, 383 bp, Glycine max
agcttcaaaactatcatgacatgtagagaagaatctgtgatttcaagtcacaaaatgtcaagaacttttattttcaaaacaattaccaatttcttgaacatatcctataattcaaagaaaaacatgcaaattcgtacgtgcacacaaaattgacccaaaatattaaactggagatttgaagaaactaacaacattaacaaattaacacaactaacaaattaacaaaaccaacaaaactagcaaaaccaaagaacactcccccccatacttaaacaacacattctcctcaatgtagcacaattaaaagattaaaaacaatttaatcatcaaagagaatcggaccagtgtaataaaagcaaagaaggagataggaaaaaaaaaac

SEQ ID NO: 203109 - DNA, 409 bp, Glycine max
  unsure (1)..(409): unsure at all n locations
ctcaagctnntatgaagtttctgggtttctaaacgctgagaacttgtgctattcatcttttcattctcttctcccttngccaaaaagaattcgccaatgactaaccgcctgaattctttttgtgtctctcttctcccttttccaaaaaaacaaaggactaaccacctgaattcttttgtgtctcccttctcccttgtcaaagaattcaaaatgacacagtctaaaaattcttttgattcttccctttccctaatacaaaagtgttcaaaggactaaccgcctaagaattcttttgtatccccattcacaaagtatcaaagggttaaccacctgagatctttgtcttaacacattggagggtacatcctttgtggtacaagtagagggtacatctactttggtttgactg

SEQ ID NO: 203110 - DNA, 382 bp, Glycine max
  unsure (1)..(382): unsure at all n locations
agctntacagctaagaagtgagttgttctaatctgtattgtctatcttttatatgttataatggttgcgatttttgtggataactccttgtgatgacattctacccttatagttttgacccccattccagttttgaatgctatacaagcattgtaatgagcttaaaaagtaacttcgatgaatgatgataggaaaattgaacagatgaaagaaagctagttgagatccatatggaaatcaaataagtgtttaaaggctttatcattggtccatttgctctaatatgatatcatattatgctttttcagttttcttaagattttttctccttgcatatgctagttggctgcccagaaattgtgtcaaacttttttccttttca

SEQ ID NO: 203111 - DNA, 411 bp, Glycine max
  unsure (1)..(411): unsure at all n locations
atactagcttatagtgcggttcggagacaaggtcaagcgtgcgcgattttctaatatgatattccgagtactttggatttggtacgaccatgctctcctgatatccagctgggaaattggcgagtggaggaacgccccggcatttacgcaacaagcataatgtaaacctttacgggttaaaagctctatagttgggcctaggctctagagttttcattctgttaaggctttgagtctttggtgtttgaatttataatacaaggatctttcttcatctggtcctggtctctacccattctcattcatttgcatgtttacttctttttctaaaacggcagattcgatgacgaggtccccgaaggtactantacctgggacccgtccatcaacttccaaccagaaatgaatcaa

SEQ ID NO: 203112 - DNA, 380 bp, Glycine max
agcttcagggcgctcattgactccatattgttgtttatagcgacagagaaaggatcttgttgaatgatgctcaaatcaattatgctaccacaaagaaggaaatgttaccaatagtttatgcattggaaaaattcaggtcatactaggcgggaacaaaagttataatctacactgaccatgcaaccatcaagtatttgttgaataaaactgaatttaaccctccattaatcaggtggatcttgttgcttcaggaatttgatctagttatcaaggacaaaaaaggatctgaaaatctggtagctaattacttatctagactacgtaatgaaaaggtgaccctgaaggagttagaaataagagacgaatctcctgatgaatca

SEQ ID NO: 203113 - DNA, 411 bp, Glycine max
  unsure (1)..(411): unsure at all n locations
caagataccagctgcgnanaagaactaagtaggtgggtgaacgatgatttttgttataacggatcctacaacgctcatgactaactataagagatacatcctgatgaccaacaagttaacgatgtagtcatcacaatcatcgaaaaaggtcacgtcggccctcccaatcaccaatgaatgtataggccaatccaaaaccagctacaactaatgaagaactcaagcaagctctgcgcaaattttgaagcttggcttatgaagaaagcttcaagactagcttcgaccggccgaaattttaatttttgatatataacatagcatagcgtttgcttgtaaatgacacctctaatgagatatggattggttgtttttgcgcatcaccataacagagtgaacacaatacagtggaat

SEQ ID NO: 203114 - DNA, 298 bp, Glycine max
cccactaaatcaccgagcagcgcttaatctatcagaggaaatattttttgatcacaaatctacacgttattaaacaacatccaatcctcacacggcccaggcattatcagactaaaccgcccacaaccggcacacaatactctcctctctgcctatttaaacggcgaacatattatgtttggatccctccaaaatccaacacacaaattgtccaagaaggtagatcactcccctactaaacaaccttcctgtcctaacatatttgtaaagtccaaaaaccctgcaattaaacaaatat

SEQ ID NO: 203115 - DNA, 240 bp, Glycine max
agcttgtatactgaattgagtagggcgcactatttgtatgtctgacatgccttttagaggcttgaaagtgcaaaaaaaaaagcctatgcttcctgcgctcttcgtaaatcatgaacgacttcattataccaatcttgagaaccactaaagattaatcaatacagcatatccaacatacacccttcctttatacccatcttgtcattaattctgaacctcttcaacgctaactcatatata

SEQ ID NO: 203116 - DNA, 393 bp, Glycine max
tatccataatctccttcatgcgatgttgggctttgagtaatttcttggtcaagcttggatcattgcatcacgagtgggcagccacgtgcccactgcctcctcgtttgattccctggccatgtaacaccctaagatattataagttataagatcggatgttcaattgtatttactgtgttatatgactatatgatagacttgaatgagttgaagtatggcttgaactaatcatgtgtgaatttcttgatatggatgttgaattatgtggctgttgagcgaagttgaaattatgagattttagaatttaccaaaacctatgttagtgaaatcgcgataccggatacggtaaccattggatggtcttcaaattttggctggatctctctaagatat

SEQ ID NO: 203117 - DNA, 464 bp, Glycine max
  unsure (1)..(464): unsure at all n locations
tataaaactaagcttgtgcaataaatcactcctacatttcatctctagcatgcattttctttctttacccactcctcacgtttggttttttatggaaaaacaccataactaaacgcgccgcatgggatccctatcgcaccagatccaaatctagaacgatgggtgatcaagaggagacgcaagaacagatgaaagccgacatgtcggctctgaaagaacaaatggcctccatgatggaggccatgtttagtatgaagcagctcatagagaagaacgcggccaccgccgccgctgccagttcggctgccgaagcagacccgactctcttggcaactacgcaccattctccctcaaacatagtaggacggngaagggacacactgtggcacgatggctgccctcaactgggatacaaccgagcggcttacccttatggattgccgcccatctattcaccacccgtc

SEQ ID NO: 203118 - DNA, 361 bp, Glycine max
  unsure (1)..(361): unsure at all n locations
acaaaataataattcacaccttcatattcatcacgtattcaaaacaacacattttaagtacaacacaacattccacactaacataattcataatcccgagacatcacattatcacgcctcatgcaccatataccctccacgaccccaccaacgccaacatgnntatgtnaatatatggtgccaactggagattgaactatgcaaaacacacaactacgtcaatggtgtcaaaagaaatataacctcccgtgccttaaaacgatacaactcaccgcggtcccacagtggattacatcacaatactcattgcgaatagacaatgcatagctcacaactcaatgcgaacaaacaccaaacccca

SEQ ID NO: 203119 - DNA, 295 bp, Glycine max
actgccaattcatttttagataccccaacctatccatgccaggaatatcacaagataaaaagttaaactagttaaaaagtgaagatgacttgtctctaagcatagcaacactcctcccccccttttacaaagatgaaataattcacattattaattacaaaaattcaaccggggggaccctggtttagtacaataaaaaaaaattgatgtctaaacccccacaatatttcatcttaaaacatgagacatataccaaaaattcaaatcaatgttggcaaaaaccaggcacacaggt

SEQ ID NO: 203120 - DNA, 367 bp, Glycine max
  unsure (1)..(367): unsure at all n locations
tctatggnttnggaataagtgacatcaaatgttgtaactgtttatctcattacacagagagctcctatagctgttatgcgcaatgtaatctgttatgaaatgtggtaatctattatcttgaacctagagacttctttatgatgataatggcttaagtaatcaattaattcgataaaacttatcaatatttacagaaaagtgaagtttgatgctcgttataacactttggaattgattgctaaacttggtagtcactaaccaatggcgaactcattgcttctaaaaactttgagacaaataatttatcctgcatgtttgttacaactaacctggatataaagtctaataactcaaccgcctagcctaa

SEQ ID NO: 203121 - DNA, 371 bp, Glycine max
  unsure (1)..(371): unsure at all n locations
tgcagctaactgagtgtaaaagaagatattatatgtatgtgcggcgctaggttgcacaggagtggctntttccatgctctcacccaacaacacattgctctccgctctctctctctcaggtacatactcatttttcttcattctgcaaattaaataatggctacctcttattttgtttcactgcatgcagtttcttggcactccccgcgcggagagaanagtcttgaccagaacattctacaaagcaaagcagagcagactatgttgggtggtattacttgcaccttccgtcacgcttataaaaaatttaccctttagcgcaaaataggatggaccaccattattgcccaaataataaattgagctctgaa

SEQ ID NO: 203122 - DNA, 338 bp, Glycine max
ttgagccgatcaaagtcacgtggagacgatactgatctcatcttcactcagtatatatatccataccactcccaagagaaaaacctataaacatgatatggatgccatgttcttaaccagaagcgcgctttttcgcttttcaaagtatatgccttatgccccttcactatcccttaaaccctccatggacaccttctgctctactccctattcatgcgtaagttgatcacaatcacaactttatggttgttctgatgggttctattctgattcttatgtatatgttggagatagaacttgcactgatgattcttgcaaataatggatatataaaccgg

SEQ ID NO: 203123 - DNA, 443 bp, Glycine max
  unsure (1)..(443): unsure at all n locations
tgaggctgcaagcttgtatcgatacacaaggtatgtaaccgactactataagtttaaactgtttgtaacaacttttagaaatttcacttcaaattttaaaaacttgtaatcgattacatcatttgagtaatcgattaccatacacaaaaaattcaaatttcaagtctgaagagtcacaactaactgtgtaattgattaccacatttatgtaatcccccaccagaaggaattttcaaaaataacccccaagagtcacaactgttcaagaagtttttgaatggccatcaaaggcctataaataggtgacttgggaacaaaattccttagagtttttctgaacaacattgtcttatcctctaanaaccaaattgtcttatcagtcttaaaatattccttggccgaaacacttgcaaattcaataaggaatcttgatcgatcttcaa

SEQ ID NO: 203124 - DNA, 450 bp, Glycine max
  unsure (1)..(450): unsure at all n locations
ttatgaaaaccaacatccanagtgttgtgttttgttaaaagttcaatatgagctaactaacatacacatatgatttatatataagttggttaacgttcatagatgagtttgtacacttgtgcaattcacgaggttgattcatgttctagaaactctgaaatattttgtttttctcatgtgatttgaattgctaatcatttgaatttcaagtatgtacaagaacgtctcaacggaaatgaatattctatataaaatcattatagtacaagtagtactggagtagaaaatcacataacacaaatatgacattattgttgtccctcctccctctcctgtacatgtcggcacgtgacataagatgatagttctatgacaacggatacattcctttgaagcctgtaataaaagaccaatgcactggantcaacnaacaaactatgattattttct

SEQ ID NO: 203125 - DNA, 298 bp, Glycine max
atcactcggtagtaattattaatcagggcgccgcgtagttagatagctcggctgagatcattagaagaattaaggcacgctgcctataaataagaggggtcgagagggacagatatcttgtcgttagagagaaaaatgagaccttccgcccccggggcgctgaccttgaagttcttcaagttatgcactggattaaaggagaaatctttcattctttctattatacccggactagctatctatcaattgcaacaagctaaacatgattaatgctctaggtggagggggatttataggg

SEQ ID NO: 203126 - DNA, 337 bp, Glycine max
ttcggactatagttgttagatgtgtctttataggatatttgtctatattcaaggtgtacaagctttggaggatggaaccaagtgtatcattagtagagatgtaatcttcaatgataccagaatgactatgaatgctaatgatcaacaacatgatagtagtcaatgcaacaacttatacattactgaaattgatgtggagctaccaaaacaaagtgttcaactcatgaaaacagtaatgatcaacagccttaactatagttaatgattacaacttggttagagacaaatttaaaagaacattgtgcctctacaaaaatggacagttgatcaatctact

SEQ ID NO: 203127 - DNA, 383 bp, Glycine max
  unsure (1)..(383): unsure at all n locations
acagaggagaatgagagaagagagntgggcagagagaatggatgctntgttgacgacccttttgaacaaactcattaatgaatctaactaacggaggcaatgggcgttggattacattgtagctgaattaccatttgttggtttccattttaaattattatggattcctgcccccacccacacaacgaactaatctttaccgtagcttttgattacagagaatatgggaaaggagaatttggttgatgaaaggagtacttataggggatatgaacattttttttgaaaattgtacagaaagagttttactattagggatacttctgatgaaatatgtctgggacatgtactaagacgggatggatttaactgtctgatgattt

SEQ ID NO: 203128 - DNA, 453 bp, Glycine max
ttagatactcaagcttctaatcctgttatctcccctctgcttacaatacaactttcatgcccaacgtttctatttcaacctccctctgataagtgtggagatctacatgaaatatacgctttaactgttaactttgcaatatgtaagagggatacgtggttgactgcagatgataaaaacccgtactcaatcctttatgcatcgtctcatttgtaccagtacacccaattgtttatgtaggatttcttttgtattcattatgcaggtgaccaccatgcatctgatgaatgagctttactgaaacaaacatgatagaatgacagtgaaggtaataaataacaagatggccatcaaggctcgagctatatttgcgcagataaagatcaattgccttactattctggtactgttttgataatgatcaaatcttgtttttaatatgcaaatttacta

SEQ ID NO: 203129 - DNA, 95 bp, Glycine max
agagcatggaatctctcttacaggcccatattattgtgcccctctaagcgctcaaagactgatagacatatgaatgtatctaaaacattactcaa

SEQ ID NO: 203130 - DNA, 388 bp, Glycine max
  unsure (1)..(388): unsure at all n locations
cccctacctcaattacctcccgactaagtaaacgtgtgaagaaggngttttatctttttgcccctaacgactcactgcacaagcaagtagagagaatttttgtgtcaaaaccccccctatataccataaaaagtgttcacatccttgtgaactaggcaaagaaaactagccaaattacaaagaactttctagaactaggaaaaagccttgaatcatccctcctcccagacaacctagggaagtttgtgtgagcttaatgtaccatgaaccctggggctaaaacccattcattctggtctcgcccaaagcaatcaagcccaaattgacttgcaaaaacattaaacttatgggtgtnnntctttatattacccccccccccccccccccc

SEQ ID NO: 203131 - DNA, 347 bp, Glycine max
  unsure (1)..(347): unsure at all n locations
ctcagnaatccaccgcgccgccccatctggacacccttcgtgttcttgaggtacttgttttgtttcactatttcaatacaaacctgcagtccgaaataccgtctaccactcttccattttccactccccacacacataangttaaangaataatttacatgaactgtatatgagaaaatattggttgaatctagttttccttttcggatcgatcactacggcctacagtttaagaaggattctacgtccaattctctcatacaaacaatagctggtctcgatcctttatttcctttggtccatcataggacaaaaaaccccttaataagactgtggcaatactcctc

SEQ ID NO: 203132 - DNA, 64 bp, Glycine max
gaaaaaatgtaaaaaaaaaaaaagtggctactacacgaaaaaagcgcagtaacccgaaaggggg

SEQ ID NO: 203133 - DNA, 375 bp, Glycine max
  unsure (1)..(375): unsure at all n locations
catgcaagctnaacgaaacatacaaaagcatacagaggtatatattatgcgacgaaggaagaacataaacacctgtgatgctaacaaaggaagaagaaacaacgacgaaggatgattggatgagacgaccatggatgatcggaagagatgacgaaggagatcggaagcatgggagaaaaatgtcgaggaaggcacagcacaaccgttccccaccgacagaaaaattaggggttaaaaaatgaggagggtatgcttggattttgaaattttcttgaggacattaattggccaagccttattatgggacaacttcccgaaaaggagatttgagaaactggaaatcaaaagctaacataaagaactgctaacagcttt

SEQ ID NO: 203134 - DNA, 146 bp, Glycine max
gcgaacctgagctttttatcggtaagaggtaaactctgatctaactattcaagtatgtaattcgaactttaatcatctgttaattcagtcctaaagacagatcgccaaatctgttgctaactgcaacattaatgctggtaaaagat

SEQ ID NO: 203135 - DNA, 434 bp, Glycine max
gtcacctgcggctgcaagctcatggaggctgatcttgagcttaatgaggtccttcaatggtgattttcaaccatggagatgcagcggaagatataggagaagaggtgagaggagacaccatccactagggaataagccatggaaggatgaacttcaccaccatgagagtccttcgataaaaagcttagagaggaagcatctttggaggaaaactcccccacacacggggggggggcatgaaattgaaggagaaaaaatagggagagaagtcaaactttggtgtgggtctcacaagtttcacattcatcaaagtcgtgacaagtgttacatatgtttttatttatagcctaggtcactaactaaatgaaattcacaaaagttaatttcattttcatttgatgtgaatctaagaggaatactattaggattggccc

SEQ ID NO: 203136 - DNA, 333 bp, Glycine max
attatgcctagtgcataacctaagcattgatccattgtcttgaaaaccatcaaattatacggctaaaatatctaccattagttaaactttggtgaaataggaaaatattagtttatctatatcaatcaagtagcattacatattgctttctcttctttaacaagtatatattataatggctatttttttcataaattctagcatgcaaaatcatgtagaatctacttcaaagatatgcttgatgaaaatgaaaaaaatcataatacatataccaagttattgagtaacttaagtgtctatccttgatactagtgtcaatggatcatattttat

SEQ ID NO: 203137 - DNA, 361 bp, Glycine max
  unsure (1)..(361): unsure at all n locations
gagagaagggaagagaacagaggatcttgagntccacctcctctactaacataatctaacaatactaaccattaaaatttaccaataaaagaaaagtttgactaaagaatctcaagcaacaaataactccacctctagatgctggtatcaaaactcccccacccaactgtttggaaacagatatcatttctaattagaaaacagataaccaatataagcatgtctggctgagcattctaaaatagaattaatgttcacatttgattcatattctaataagcataggtaagatgttaccatactatctatggtggccactggtccacattcatacattgtttacccacaatgttgtaaacct

SEQ ID NO: 203138 - DNA, 447 bp, Glycine max
taacgacaaatcttcacaaatcatcgtcgagtggggagcaatgacataattttgtaaatatagacaacatttcaacaatttccgtgaaaatgtcattaaaacctcaaaacaaatacaatcttcaggaaaatcatcatcattaaaaccttaaaacaaagaggttttaacactgaaaaaattagaaactgtctttttactcctatatgatgatgcacgatgcacatatataaggatagatactaagatgcaacacataatacaacaactcaatacaaatttcactcatgtgatgtagacatgttaaagacaaaacttcgttaaacttcaaggttaaatcttcatgctgcttcccctatctctacaattatcggtccccgcatgagaagtgcaaccacttgtgatatgtggtttaactcattaaacccatgcattacatttctttcctca

SEQ ID NO: 203139 - DNA, 331 bp, Glycine max
attatgtatactttacagaataaccattaattggatgagtgtgatacaatttacacagagtttatacacaaaagttagtcgtattcaccgactaacaactccccaaattacagtttagcttgtcctcaagcaaactgcccacccccttgtctaaggaaataaatgcaggacatgacaaggtgatgcaaaaattttactgattgcatgattagagaaatgaagcattatgtactcattacttgtctttcacaatatatgctgctatttaaagagaagaataatatgtaagtggtacttatagatgagagtatatctatgacaaattttaaag

SEQ ID NO: 203140 - DNA, 276 bp, Glycine max
cgcaaagctcccccaccaccgccacgcgcggaagcgcgggctgtcaacgccgcccgcggagacacagcaacagcagcagcagcaacaaccccaagccaagaacggaccccacaacgaaggcaccaccgcccccgcgaagcgatgggacttatgaggagatgaaccgggggagaaagcacgaaggatacggagccggcgccgggaagaaaggaagacagcccccaacggacggtcgatagaacaatgaccacacaaaggaagcacccgaaacgcaga

SEQ ID NO: 203141 - DNA, 413 bp, Glycine max
  unsure (1)..(413): unsure at all n locations
acctgccgctgcaagctttgtgcttctatagatgctgaacctactttttttattatnccagctccatccgacattgctatcatattccaagtacgttagtacattttcaaattcattttcatctttcaaaccatagggtagatgatttcatgctttcttagttactagtgtgttaagttagggtttttagtttgagggttaggcacttcttcccccacgccacttaatattgattatgggaaatgttgttgaaaggggtgaatacccctgtgtgtcttttgggaaatcactttgaacgcgctagcgcgcttgttgcacttatcgtgttatcacagctgttaaatttttggattctagatgatcgcgctaagccgaccatgtctcgctataaggggtcatctctgcttaattaa

SEQ ID NO: 203142 - DNA, 366 bp, Glycine max
ttcccaccatgtataaatggttcattttaatgtccaacaccttactatgaccaccttccaagcaaatagaatcgcttgttccccctttgaaagaactatgctcgtcatattttcccttcgattgatggcacgtatgaacaagatccccgctcttgcctacctcaaatattaaatacataaccgctcacaactccatctttagctgtatcctttgggataaacatcagaagtgctaaaccttctcttcgtaattcactcccaatcttgtaattctctgacctggtcccttgtttttcaacttttcacaataaccttgtgggactccgaactttccatctttgttaacatcctatctacctttttccc

SEQ ID NO: 203143 - DNA, 342 bp, Glycine max
gcaagctgcctacgtaagagaagaaccctcatctgttttatacagaaacaaacatagctgatgtcagcatataaatatcaaagactaacattgaccggatacctatcgctatttgaacaaaaaaatatccataaaagggctgaggcaaaaaccctagcttgatggcgaccaaaaaacctaacatatatcagccaaaaaatgccgccccccccccacaaaagccttgacatggtgatcgaaacacatatcaactgaaagttctatgctagtataatggggacttttctagtctcaaggtgttggagcccataccaaccatcggaatgacgtgagaatacactg

SEQ ID NO: 203144 - DNA, 424 bp, Glycine max
taatattccctcgatcaacctgagagacaaattccatgttcttacacaacaccatgagtctagaacgagaagagacaccctttgatgattctcacattatagtatccacagataggtcattaacagttctccatcacttatgaaactccttaggcatgtaatcttgagatctctatgcttggatcaagtgcatcagacatgatgacatcttcaatagcagaattccttttcttgaaaacctgtgtcttattcttcaaacataatttcgttaacagtagatttaatctcatgacatactacatggacaaatacttcactactatagagctcttattgataccgtattgcttaccatgctatgaattcccaaaaaataacccctcaacatttatctaattttgcagagagcgctacattgatatac

SEQ ID NO: 203145 - DNA, 400 bp, Glycine max
  unsure (1)..(400): unsure at all n locations
agcttcaggctgctatattgctccaggttgttgtttgttattggcanaggtctgtatggtggtcagcagaggagcacaaaccacaaacccttgcgacaggtacagatttctgattcaaggccagctgggttactaagttgaccaacgcatccagtttgccttcaagcttcttagtttcagatgatgcagatgggtttgtaccccccccgcactcctctgtgactatggcatcatttctggcgctaaactgctgggagttggaggccatcttctcaattaaatttctggcttagcaggagcatgtctccaaggctccaccactggctgcatctatatacttctctcctattactgagtccttataaaaatattggagaagaagctgttctgaaatctgatg

SEQ ID NO: 203146 - DNA, 253 bp, Glycine max
ctttatactaactccacaatccattaaactgcgtttgctttctttctaagctagaatacatgtaacatggcgttaaatgagaactatatattaaaaggcttggattactttataaatctgtaacttaaaagtaactttttgggtaaaattccatacgaaactgtttctgaaaattggaaacgatgcgataattattgaagtggttaaacttaaaaatctcttatatgcgtgtcactgattaagtattgcattt

SEQ ID NO: 203147 - DNA, 322 bp, Glycine max
gagagaagagggagaaaggagttaattgaaaaagaaaaagattaaagaagtaaaaaaatggaaagatatagagattaaatgggagaagagagaaaataaatgataagaatataggtgattattattataggtgatttagaatgtagttattatgaaagatttaatgaaaaaatgggtaaaaagaaagaaagaaggatggattaatagattaaaggaaagaatgaatgagtttaatataattagaattaatagtatggtaaaatgggtgattatgaaaggaaagaatggaatatatattaagaaaggataaatgtaaaaaaga

SEQ ID NO: 203148 - DNA, 415 bp, Glycine max
  unsure (1)..(415): unsure at all n locations
gcagctntaacaagtttcttacaaataactatgatgatgtagtatactagcaagactacccatcatatctcccaaaaccccatacccacgaaatttaagagagaaaaaagttcacccaaacctgaaattttgaagtcccactcgtagccacgcacttcacgactccaaaaacgccctcctttcacgatttggggcataaatgatggccccgctggagctctgtggggtttaatggagaatggaggagaaggaaaaagcaacgtgaggaagagggagagcttctgaatttttctgctcggctgaagaggagagagaaaagctttttggttttaaataaaaagagggtgctcttttttattatttattataaatatggccatgtttcatttgagtggagcaaaagggcccactttcc

SEQ ID NO: 203149 - DNA, 387 bp, Glycine max
  unsure (1)..(387): unsure at all n locations
agctgataaacctgcataatgtatatatagaaataaaatctatctttantaccatcaatttaaacatgtgatgttacatgcctttctagaacgaatgaaaagatatacctcggcttgacggacatgatatataagtatatatagtagagtcatcaaaacaaatacaaaatagattatctttgggatagtaggcaagagatgttactataggtggtggagacattatagtagtcaaagtatgtgtaaggcaaatgtgtgacatacattatgttaaatataaaattaacatcattcttttaacaatgacattaggttaaatataataacaaaaacatcattgtaagtagcaaaatataagcaacaagcgggagctcaatattaagatta

SEQ ID NO: 203150 - DNA, 210 bp, Glycine max
gaaaaaaagaagaaaaaagaaaaaaaagtggtcgtgcaccaaaacaacgcacggcacaaccagggggggaggggcaaaacaaaaacgaaagaaaagcggaacaagccacacggtcgaaaaggcacaagggaggcgaaagaaacgggccggcacaaagccgggggagacgaaggcaagaaggagaaacgcacagcgcgcggcgaacaggaa

SEQ ID NO: 203151 - DNA, 362 bp, Glycine max
  unsure (1)..(362): unsure at all n locations
tgagctgcactgtataataccactactgaatcgatactatatgagtatttcagaanatattctcaacagtcacatcttttcagttggttcttgaatggccatcatttgtctatatatatgtgacttgagacacgaatttgaaaaaaagagtcttcagaacaaaaaggtattatcttcttaaaaagacaaatcattttatcctctttcccgcacaccccttcttctttntttttattaggaaagggatttagagactgagggtctcttgttgtaaagaaatctgaacacaaaggacgggttgccttgagtggttaaaacttgtaacatgctttcaaaatataggaactcttaataggtgtttg

SEQ ID NO: 203152 - DNA, 404 bp, Glycine max
tcgtatcataaggttgccttcttaatggccttgtgttgtttcatttctggattaactccggcaattcgccgtgaggtccaagttctgcaaccagtttcgttgagtcacgcaatagcatatgctaggttactagatgaaaagcagatcgatgctccaaggacattttgaccttcgtcagtcgcaggagcttcctcaagctctcaaccaccgttattactcactccatgcaccatattcccactgttaccaacacctgcgcgaatagcttcttcctacatttcattctagagactcactccagatgaattatccatacggcgagaaagggacaatgctttcaggtgatgaacaatacttgagagaacataatgctctcatccctttcctgctaatgttgaagataa

SEQ ID NO: 203153 - DNA, 350 bp, Glycine max
  unsure (1)..(350): unsure at all n locations
cttacatcctattgcttgaactgtgtgaagataatgttattatatattgtcnaatgggaagaaaaatgaatatgctacatgattaacaaatacacagattttatactaacttggaagtccacaagcagcctgaggttaaacaagttgctacaccaaaaaaagggcaccccaaccccatagtccatacctgttaatatatggggaaccccccaccaaccctgtgaacaaactaagggtaaagctttaagcttaaggaaaaagctgaagaagttttgaacaaagtttggcttttacctgccaaactcccttgagttacatattgattaagtggaatcttgggtgggcattct

SEQ ID NO: 203154 - DNA, 443 bp, Glycine max
gtgacttcagagagtaagaaaataagtaagcaacactgatttgattttcgttgttttgctggcaatacttcaatcgcttcttctacgaatgttaatgaactcactttccgtgttttcatagttgcaaaaatatggatatatttaattgtctgttaatatgatgattttgggttattccttattatcacttgctctctatttattttctaactgcccacgactaagaacatacttgtgtttgaagatctgactcttatttatgtatttttcctagtatgatactctgtttgcccattccattatgcttcaaatattgttgcattctggtcttgcgatgtatttgatattgacacatgttacacttttgggcatacattatatcacataaattgatgaggatgaccatatatatagccaaaataaaggggcaatcaatataaaga

SEQ ID NO: 203155 - DNA, 169 bp, Glycine max
gagtcccgtaagatatcgagacgctctaaattatatccgaagctctgagaaaattgaattgacaataactttatacacggatgtccggttgagtcctgtaatatatcgagacgctgcatattgaaaacgaaagctccgttgatattcaaaccactccacccttactgga

SEQ ID NO: 203156 - DNA, 409 bp, Glycine max
  unsure (1)..(409): unsure at all n locations
tctagtctcaattgtgagtgtctcgatatattacccgatgcattctgacatccgagtaanaagttatagtcggtgaattccctacgagcttgcctcttcaatttggaacgtcttgatatattacaggactcaaccggacatccgagtataaagttattgtcaagtcaatgttctcataacttcggatctaaattttgagcgtctcgatatattacgggactctatcagacatccggagaaaaagttaatgtcgtttgaatttgatacgaacttccgttttcaatttggagcatctctcgataaattacgacactctgtcgggcattcaagtaaaatagtattgtcgcttgaattctctaagaatttccgttttcaatctggagcgtctcgatatattacgggaactcac

SEQ ID NO: 203157 - DNA, 402 bp, Glycine max
  unsure (1)..(402): unsure at all n locations
tactcctaaaagcgcaaccatgattttgtttttttcaacaaagatcnatnacatggccaccaatatgcaaatctttgcaataatccattatacagattccttatccagagattgcaacatcagttcccatgcatccatgacatcttgccactcttcaaccttattcatatggatattggagttttgagttgaccctctcgcccccgccattttacgtataaggtggttgaagatagaaaaatattatccaatgcattcatgaaagtaagatccctaacattgacaattacctgagacaacactttatctttcacagacaatccttttaccttactaaagtccatttaaaaaatattcgttttctcataacctatataaccacatgaaaccttgaaagacatg

SEQ ID NO: 203158 - DNA, 432 bp, Glycine max
  unsure (1)..(432): unsure at all n locations
tgcggctgcagcttcttataagctgaactcatttatcaataaagacttgttgagttttattcagaaaattagagtttatctcttttatcttagtgagagtgattctcctaaattcttgagtgattcaagaacaccctggctgtatcaaaggactttcacaacctttgtgtgttgccctcgctggaaagagtgattntttccttcctttcacccaccctttctttaaacaaaattcagaaaatccaccacctctgcgagaattatctcgtggccataactcccattttacgcactcaaattaagtgattcttgagcctaaattgaatttcaaaacgagacctttcacctagttttggaatcacctcatttggagccctgtagcttcagttattggcatttctatatttctgtcaagccaccacttaacctaca

SEQ ID NO: 203159 - DNA, 342 bp, Glycine max
  unsure (1)..(342): unsure at all n locations
tactaagctntacactgatgtccgattcggggacataatatatcttgactctcgatattgaacaacggaagctctcgggaaaatcgaatggtcataacttttcacacgaatgttcgattcggggacataactcatctatacgctcgaaattgaacaacggaagctctcgagaaattcgaatggtcataagttttcacacggatgtccgattcgggaatataatatatcgagacgctcataattgaacaatggaagctctcgacaaatttgagtggtcataacttttcacacgaatgtacgattcggggacataatttatcgatacgctcgaaatggaacaac

SEQ ID NO: 203160 - DNA, 361 bp, Glycine max
  unsure (1)..(361): unsure at all n locations
gcttgaganagctctgttgttgccacactttgtctttagttgatgttgcatggcaggatggaaccatagagcgtggactaaatcctacaaggttattttctatagataatcctggggatcatgaattcgtttcacaacaatatgtagtagagaagacctccgatgatggtgagagtatttctgaagctaggcnanttgccgcccccccccgtctatgccagagggacanntttgtgaggggtgtaaaaaagtggccatagcagaagatccacgagagttcggacaggacgatactgtaatgcgtatgaccacagggcccttcacattatgaatactgctatggcgatgtgtgtgttcgcct

SEQ ID NO: 203161 - DNA, 428 bp, Glycine max
  unsure (1)..(428): unsure at all n locations
gtatagctgatagtntaatagctgatctattagattatcttgtgtttattaaatataaaagcctttagcttgtcacaatacaatgtcttgactaaaaagatgattcttattgagccccaatgacagtaactaattccatgatagggacaaaggacaaggataggctagcgcatataaaacaaatctttaatagcccccctcaagttggaaggcggactctacactaccatcttgggatgaaccatataagtaccaaaataaagcgaaaaacaatgaaacatgctggaaatacatcaacaacaaattgccaatgactgaaaacattaaaagacaattggaatatgcttgaccctctatcagaagtattaagcagaagtcttacacaaggttaaccacctcaaagcaaagcaaaccattgacaaatgctt

SEQ ID NO: 203162 - DNA, 230 bp, Glycine max
  unsure (1)..(230): unsure at all n locations
tgtcctccacatacgtgtgggcccatgaataatgtgcatattggggtcatgcgaacaactaatcattgtcataatatttgtgatacaataacaaacatggctataatatatcatgagtttaaaatgagattatagttgtgccgccgtgaatcaatgaatatttgcacttgnngtaactggagaaaaatgtgaacacactcgtattgcaaagtatatcttataaaatattc

SEQ ID NO: 203163 - DNA, 425 bp, Glycine max
  unsure (1)..(425): unsure at all n locations
tgcagctatcagattgttcttcaaatgtggcaaatgtcatgtgaaatataacttancaaacttgttaggtgtattttggcaagtgcactggtcgaacaagtaatacaaaagataaatctagatatcattttctcaacagactcgtgcaatataaggcaacgtattattaatgtaggctttagaacaacacaagaaaacactcgccccgaactttatgattttttatgaagtaataatatatcaagtaattaaataagaaagtagatgcttttatgtgtttttaaaaacaaaaacacagttataatgattttacacaaatggtagcaactattacagggctagatttcaccaaatcttcattatcttcatgcattaacgtgtcatgcntantttatagatgctcttatgttaaatcactcaataaa

SEQ ID NO: 203164 - DNA, 360 bp, Glycine max
tgttgcatacacaactaatactagaagtatacgtggagggattgtttttgtcatccacaatgatattatctgaataaagtaagattgtctcccgcggataatacttattatatgtactagctcaattcaaggatctctcattgaagctatgatatggatctttctatataaaatattctctctaatgaaactgctattaacaaaaacaacaaatcgtgttaaaaaaatcttatctttaatggatctgtgagttgagagaaaccataatggatggagaaacatctttcacaacagctccaccaccaatttttgatggtgaagagtacgaattatgcgctgcaaggatgaccactcatcttg

SEQ ID NO: 203165 - DNA, 453 bp, Glycine max
  unsure (1)..(453): unsure at all n locations
tttactcccatccttaagcacctgcggctgcagcttatttgatattgttcatctacaaatcagaatatccagtatttagcaaatattntcaaactttgtaaatgcagataccatcaaatcaaaccttgacatatgacagacctaaacttctataatctcataaattgctttttccacatctaactcttccttctcaagctgtatgtttgcatgcaatcgagatccttgaccccatccgaactattaccatngttagacgtgataccaacatctgcataaaacataaagccacaattctactaaggaaattgagttcaaaaattaatttctacactttacactcgtggaatcatagagaacatatattaattacatataaaaaaagatggaaaaaagagaagaaactaacagctaaatttttctattagagtggaatgttcttctggtattatt

SEQ ID NO: 203166 - DNA, 300 bp, Glycine max
  unsure (1)..(300): unsure at all n locations
tcctacataanagtagaggatgatagcttaatgtctatcattataggatgtgcaccctttcgtctcaacatctaatttggctgttgacatcggattatacttagcccttttcacttaataaaaccttataggtggaatgttgtggacttccttgtctacttgttgatcagcaaaataccttgacttggaaatcttgggtcacggttgggacccatcccatggggaaaatcaagtcctcttaacctttattagtacaaattttaaaattgtcaattgtttcactatccagtctattcattg

SEQ ID NO: 203167 - DNA, 447 bp, Glycine max
  unsure (1)..(447): unsure at all n locations
cttaagtcacctgcggcatgcaagcttctggatgtctagagagttctagagagagaatgttccaagttccagagagtttgagagaatttattgtgtgaagatctgcagagaccagagcttgaagaggaagtcatcctgagagcttgagatgagtttgtgagtgattgtgaggtcctagaggtgcaggagacatccccactacttgtatttctgcaatctttccccctctcttctctcctgtgaaatgaagcttcccagttatggaaagcaaagtcctctgttggttcttccttgtaggtacttgatgcaaatatctttttatctatttaatgatgttttgtgtggtcactgtgctattanaacttcatgctaccatgcttttgccttgatcacgtanctgcatgtgttttcaggatcatttcacaatggaaactagtctgattctta

SEQ ID NO: 203168 - DNA, 393 bp, Glycine max
  unsure (1)..(393): unsure at all n locations
ctgtcattaataatcacctaataaccatgttaatgtccaactccttgaatggacctctttgcttttatttggttaaacgtggatttttgaaagcctaaagccaacacataactttgtcactactttcaacataccacgagatcattaatggtccaatgccttaatgttttctctcctttcaaaaaagaatcaaaagatagtttaaatggtccaacgccttaaaacgactttcttgtttggtcataatatatcttgcaaaaaagataaaaactacttaaccaacgtttagttctcaaagaactacgtaggtctgatttccttatcacaattgaggaatacgtangagcaagggaaacaccctcgtcgccacaataagataaaaaaatcaaaaaa

SEQ ID NO: 203169 - DNA, 367 bp, Glycine max
  unsure (1)..(367): unsure at all n locations
ttctcaagggaagtttctgaaagaagcttctcaaggaagttttctcaagaaagcttctcaaggaagctacctagtctataaatagaagcatgtataacacttgttgtaactttgatgaatgagagtcttgtgagacacaactcaaagncttcccccctccctcttcttccttcaaattcgggctcccccttctctctttctctccctctttcttttcctccattgaagcatcctctccaagcttcttatccaagcttatcttggtggagaagctccttcttcatggcttattccctagtggaggcgccttctctcacctcttctcctttgtcttccgctgcatctccatggtggataatcaccatta

SEQ ID NO: 203170 - DNA, 383 bp, Glycine max
ttataagctccctaatcctagtagaatcttctttatataagtctctgcaggaccacaatgcatagttgcagaccatgaagtgatgaaactaatcactaattcctctgttccattcacaggctgtaaatattctttttattgtattggtttcagattcatttaaaaagtattttattatatatatgtaaaaaggttaatgaagtataagaacactaaacacgtgtgcatcttctaaattattatttattcaggaatggtttagctgacaatatctcttaatggactaatgtatacaccaagaaacatcattccttattcaaattttgggggatgcaagctttctgcttacaatatattgtggtcagaaatcatgagaggaaata

SEQ ID NO: 203171 - DNA, 380 bp, Glycine max
gcagcagtgaatagtcactgtcactgcccttttctctctatctctctctcttgtattctctatatatatgtaatcttttacatttaaataaagctaatggaaaggaggtgtttctcactccttcagatttaagtgtcacctttagcttccacaactcctcaaaaagccctatcctgtatcccttcaatttctgcccacctcattatattgtaagcagtcttcgctgcatattgtccacttgggtctgcctttcccacccactcgtaccttctgttcctctgtatagtcttcctctccatatctgttaagaagttatgaaccattggtatctcattatcaaacagcgtgcttctccatgatatggtttatttccactccac

SEQ ID NO: 203172 - DNA, 269 bp, Glycine max
ctttcttactttcgcaactcgaatccactatcgctaccccataaagctgcgcgaaattgtgaccggccatactctttcttgcgagccctttgggtctctcgatcaaaggctcttgcggaaaaagcattatcttcccaacaagcccacacttttgtaaaagtgagaaaagccaacttgaacttctccttggcgaaatttgcctttcctaacatcgcttttgagaggtaggacttactcgccctcttccggagcttccaaatccctttccg

SEQ ID NO: 203173 - DNA, 360 bp, Glycine max
  unsure (1)..(360): unsure at all n locations
ctttgagaaggaccgtgctattgaaaattgaaaccgntattacaatgcgaagaaatgacatatacgttgtaagcacaacactcgttagagaaatatctctcaataggagcctgatacagtggatcacttatgcactgatgnatatcctcccccccctcccgaaaggatatttagagagaaagtccttaacacttctaaaagaatgggagtattggccttactatgatgtacattcagatggtaacctacctatttgactggagatccctacatctaggttcaatgggtaacaacaggatatgaaggatttgagatgaacatgctggtatatgcgataacatcatgattcctgaatgaaca

SEQ ID NO: 203174 - DNA, 86 bp, Glycine max
acctgtatataagttgctggggtcaagacaccttgtggactccaagagaggtgctaatgcccaaaaccagacctagatcattcccg

SEQ ID NO: 203175 - DNA, 439 bp, Glycine max
tcttgagtcacctgcggccatgcaagcttgaaggtgcgtaccccagccattttcatagtatttctctggcaatgtgcctactattattgtgatcatctctttctccgtcattggaggtgccacttgagctgccaggtctctccatctttgggcatattctttgaaagattcgtgcccctttctgcacatgttctataggtgcatcctatccggagccatatcaccccccccgacgtggaagctccattggagcttgtaagcctaggatcttcttcatcaatggattcctttgcttcttggaagatgaatggcgacagaatggagaatgaagagagagaggagacgccccttctaggagaagatgagtctataagaagctcaccaccctataatgccatggataatagcttggaggaagaatgatatgaatgaagggaga

SEQ ID NO: 203176 - DNA, 444 bp, Glycine max
tcgacattgaagatggagaaacatgagagcgcaagctcatgttttattttccataaaagcactgtcattcccaacttttgataaatgtggaattatgcatggaccaagataatgcattattgatgatgagtcgcagccatggatgagatcaactgtgctaggggaaggaacaattcttataattagcactcccaaaaacttcaatcaaggataaagcttcaagtattatcatgggatgtataggcctcaacccatgcaaacagaggcctatactagaaaaagggcaacccattcttcaagagaccatgattcaatatatggccgacaatgatgagagaatgaagctggtggaatctcaaattaccaacatatatgactggcttgtctaatgatatccaaacaacaaccttcatagtctgaaccaaaacctaagagcgaggatac

SEQ ID NO: 203177 - DNA, 431 bp, Glycine max
  unsure (1)..(431): unsure at all n locations
agtcacctgcggcatgcaagcttcnttgagaatacttccttgagaagttagattcttatctacacacacccttctcataactaagctcacctccttgagaagattccttaagaagattcctaaagatgcttgagcttagctacacatacctctctaatagctaagctcacctccttgagatgagaagctagagcttagctacacaccccctataataccgactcacccctatgaaaaaaacatgaaaatacaaaaaaaaagtccttactacaaagactactcaaaatgccccgaaatacaaggctaaaaccctaactactagaatggccaaaatacaaggcccagacgaaggaaatacctattctaatatttacaaagataagcgggctcatacttagcccatgggctcgaaaactaccctaagggtcatg

SEQ ID NO: 203178 - DNA, 376 bp, Glycine max
cgattcattctatgtgctcgtagtggtccacattgtgtttcgtgcatttatattctcgtatcgtttactttgtataccccctgttgacgtgcttaagccattttacttaagtcatttctcgcttaacttaaaaataaaataaatttccaccgaacgtctgaattgtattatccattaacttcggttaaaataaattccgaccgtgcggtcgtgccgtaaccacgttggaaatcaaaaagaggtgaagaatattataataataaaaaagacatcttgtagtaaaataaaacggaaaatcaagtggacgttgtctctttgggatttctcattcttaatcgaattgatgaataactaacgtgaaactaaggctaaaatc

SEQ ID NO: 203179 - DNA, 399 bp, Glycine max
  unsure (1)..(399): unsure at all n locations
agcttcacatctaatatttgagcgtctcgttatattattgtactcaatcagacatccgagtaaaaagttaatacgagcttccgttttcaatttggagcatctctcgataaattacgacactctgtcgggcatccgagtaaaaagttattgtcgtttgaattttctaagagtttccgttttcaatttggagcgtctcnatctccccgcctccttggaattcgagataaaggtattgttatttaatttgctaaagcttttagattaattttgagcgtcttaatatattacccgaataatcggcctccgataacagttatggcgttgaatttctacatttccggtttaattggagcgctcgatatttacggactctcccggacactcgtgttaagttccgtc

SEQ ID NO: 203180 - DNA, 402 bp, Glycine max
  unsure (1)..(402): unsure at all n locations
tccattnntcaattggagcgtctcgatatattactgttgttttctggacatccgtgtataaagttattgtcgtttcattttgctcagatcttcggttctaaattttgagcgtctctaaatattacgggactcaatatgacatctgagtaaaaagttattgtagtttgaatttgctacgaacttacgttttcaacttggatcgtatcgatatataacgggactctatcggacatccgcgtataaagttattgtcgtttgaatttgcttcgaacttcaattgtcattttggagaggctcgatatattacgggactcaaccagacatcgcgagtaaaatgtacttgtcgtctgtatattgataatagcttccgttttcattttggatcatccctctatattttac

SEQ ID NO: 203181 - DNA, 429 bp, Glycine max
  unsure (1)..(429): unsure at all n locations
agtcacctgcggatgcagcttgtacaaccaatattctgtgtcctactaagnctttgttggctctaacacaaatgagaagatttgttattttgattgcacaatgactaatggtaaattactctttgagtggtattttgtgtgagtttttgtgtcattttgcatgtatttttcttagtagaactcatgtttggacactagttttgtattgcagaagcataacccccacttgagctgaaaaattaaagattacacaaatttttcaagatttgatgactttacacttgatcacggccgtggtacatttaccacgaccatggtaataacacaatgaaataaagtgataacaatcctctataacaatgtcaaaatccgataatggtcgtggtcaactaatgggggtcatggtcaactaagatggatccattcatg

SEQ ID NO: 203182 - DNA, 327 bp, Glycine max
actaagcttgtgtctttgtcttgaattataatacaaggatctgtcttcatctgttcctggtctctacccattctcattcatttgcatgtttatttcttttctgaaacggcagattcgatgacgagtcccccgaatgtactaatacctgtgacccgtctatcaacttcgatcaagaattgaaccaaacggaagatgaaggagatgaggatgtgggacttccttcggaactagaaagaatggttgcccatgatgaccaagaaatggggcctcatcaagaagatacatagcttataaacttatgaattggcagtggaaagaggaagtaaa

SEQ ID NO: 203183 - DNA, 98 bp, Glycine max
cccacacgcgaaggagacatcctcaccacttgcaattatgcaatctttcatctcgtaccactccctgatcgaaagagggccacctgaaacggaaagcc

SEQ ID NO: 203184 - DNA, 355 bp, Glycine max
ctactatcacaataatcgtgtggctttccattattgagggtaccacactgggtcgacatatccctacaccttttgggcgtgttcttttaatgatccagtcccccttttgcacatgttctgtaattgcatcctatccggatccatattaaaattgtactgatactgcctaacaaatgcaaccattaggtcctgtcaatagtggacttgggaaggttccaaatccatgcttcatctaccgacagtatgactttctcgataggaatgtatcagacaatactcatcgtttgcggattaccaccacttgtgacaataacatctttagaaggtgctcgtgacatatattccccttgtactt

SEQ ID NO: 203185 - DNA, 366 bp, Glycine max
actgtgcaaacgactaattatatatctcccggcacatttgtgctgacattgtcgcacctcccaagaggcagggcatatgcacatgaaccctttacatggtgttgagggtgtaattgggaaaagaaaaagcttatcagcaatatattcaaatcaccccccaccccctgacaataaaggatgtgtagtggctgttggaacaaaaaactaatatccttaaagagttggagtatgaatagatgccgacgaaaaaatatccaaattctcaaaaaataatacacctaatccttcaatacaacaacacataaaaactcgcaccgatttctgcagagcaataatcgatgttttatatcaaaaccacataaaaaa

SEQ ID NO: 203186 - DNA, 431 bp, Glycine max
tcaacatatgtgcaccagaaatcctaagcaggcaccatcttcttctaatgacattagtatctttctctttgattttcttccataatcattttccttttcattctttcattatcggttgaactcctttccatggtgaagcatacactgcaacaatctttagcccaagatatggagttcgattctaaacgtaagttgactcttctttaggaaaatatgcttcattttttatcacacatcttgttctgttgtcaacatacattacaaccttttatatatatatatatattcgtgtgtgagtgatattgcctatttcttaaaaatacgacaaaaggtatactctgaatatgattttccgatttgaagcaaaaagtgttacgtttctttatgttgaacacaccatgttataggcaacaaatggttttccaatacta

SEQ ID NO: 203187 - DNA, 292 bp, Glycine max
  unsure (1)..(292): unsure at all n locations
cgagctgcagctgactggcagagagagagcgttanttcttccttttattagccaattcggtgaagaacgagaaatccacaagagaaaatgtccggttgattttccgctttatattactaaaagggatattcctgataacatatcataatcttatcccttaaagatatccaacatggtcactgcaccaccaaacggtctggacccctccacccccccccactgatcatacaatttaaacgtttggaggaaatgtatttaatttttgaagtaagggagaaaggacttaaagata

SEQ ID NO: 203188 - DNA, 367 bp, Glycine max
  unsure (1)..(367): unsure at all n locations
ggcaagaattcgacaagatcataaaaaaattatgaatccatctctcaatcttctctcaacatcattcaatatctttcaactccttctacaaaatgtgctgattcatttctcttcatctttctaaaagttcttgtccaaacactttcttttccaagaaccccctccccccccaccttggngtattataatttttattctcttgattcttttccaaaagaacgaaggactaacacgcctgaattctttctggcctctctcttccctacaaaagattcaaaggaccaaccgcccgagaaatctctgtggtcttccccttcccttaagcaaaagagtgataaggacctacccgcctgaaatatcttctgtt

SEQ ID NO: 203189 - DNA, 154 bp, Glycine max
aaaaaaagtggctttattacaaaaactacttcaaaaggccccgaaatagccgctgcaaccctatactactagaatggccaaaatacaaggcgccaacgaagaaaataacctattctaatatttacaaagataattgggctcatgcttagcccat

SEQ ID NO: 203190 - DNA, 386 bp, Glycine max
tctcatgaggtgagctcatttatgagacgggtgtgtgtgttcttatctctatcttctcaaggaagttttctcaaagaagcttctcaaggaagttttctcaagaaagcttctctaggaagctacctattctattaatagaagcatgtgtatcacttgttgtaactttgatgaatgagagtcttgtgagacacaactcaaagttcaacttctctccctttttcttccttctatttcatgctcccccctctctctttctctccctctttcttttcctccattgaagcatcttctcaagctctttatccaaagttcatcttggtggtgaagctccttcttccttggcttattccctaatggatggggcctcctctcacctcttctccttt

SEQ ID NO: 203191 - DNA, 440 bp, Glycine max
  unsure (1)..(440): unsure at all n locations
gtcacctgaggcatgcaagcttgtcaaaagtactgaaatanaanagtttatcgtttcttgataaagttgcatacatccatattttcttgaaattcttcgatctttaaatatattgccgtagcctatattctcctgatatctatgtaagcatgctccatggtctactgatgtatgcctagtgtacaagtggaagctgttacctagttccagggtttaccctaccgacctaaatacttgatttggacattaatatacacttggatcaattccaatttcctatttctcctagaaggaaacacttcattagtgtttctacatgtgcttctctgacccaagctacatcttctacttggtcttaatcctgacacattcaagttggtcaattggaaattaatcatgtcacgatgtatgttgaaatctctcggtccctgtataaatac

SEQ ID NO: 203192 - DNA, 384 bp, Glycine max
agcttggtcatcatcttctgcatgtggtaacatcattccatttgtgagtacagcctcaccctttggaggtcagagttcagcgtttggtgagttcaagaatcattataattttgactgtgatattctattttcaggatacaaggaactgcagtatcttgtgcaaatgtagttgaaagtcattgcatattttttcttgcaggatcccatactccgacatcaacttttggtaatactggtgggcattcacgttttggaggtcaacatctgcgtggaagtatagttgctagttacacagcagcaactgaagcagatattggacctctggacagactgcaaaattggagtccatatctgccatgcctatttacatagacaaaagtcatg

SEQ ID NO: 203193 - DNA, 349 bp, Glycine max
  unsure (1)..(349): unsure at all n locations
ttaagtntcattgtctatattaaaaatagtaagtgttaattcttacacagtttttttgttatagttatatactgcctaaagttttcttctgtattcttttaattctttagttataggaaaaaaatcttgattaatctggagatcaattaaaacgcaccccgacgccgactaataattattttgaattattatatttacatcattcagtaaaacttgattttaatttatgcatatgtaagaactcaaattaaattctttaaaatactaaaattcgaaatgatgacaactatagaaattaagccgataatttaaataaatacctttaacaatatgatgtataatatgaaat

SEQ ID NO: 203194 - DNA, 393 bp, Glycine max
cttgtgggtggaggacgcatgaacgataacacaatgcatgggtctcctataaatgtttgaggatggagaattgcactaagcaatcactacacacggttccaatctccatggtggaggactcattatcgaaaaagcaattcatggggctcctaaaaatggttgaggatggagaattgcactaatcaatctctactaacggctccaaactcgtgggtggaggacgaatgaacgaaaatgcaattcatggggctccgtaaattgattgagaatggataattgctctaatcattcactacggacgactccatactcgtggtcaaggactctgaacgaatagcattcatgggctctgaaattgatggtaattgataattgactaagcattcactacgg

SEQ ID NO: 203195 - DNA, 424 bp, Glycine max
  unsure (1)..(424): unsure at all n locations
tgagacccatgtgatcattaggcatcatcacatcatcttcttgatccattgnctacaccgaggacatggtctgacagaagttcatcatcgccaactactactgatggaccatgaacgttgcaaaatacatcaaggcacaatataacgaataccacaagctgctggaagacctgaacactgataacatctctttgcaccaacccccccccgccacgccagaccttataattacattatcattgaagatacatttaggaaggaaagtgtcggaacaaagaccaaagcattttttgccaggcaaacatggtcaaaacaaaccattccatatgaggtatgccaacaaaattgatcacactaacaagagtaaagacaaatataataaaccaacgcgttgcgccttataatcccatcccacatgcccctg

SEQ ID NO: 203196 - DNA, 374 bp, Glycine max
  unsure (1)..(374): unsure at all n locations
tccagtcaaacagaaatacttcttataaaagacatcggtggtgttaaaaaaaaaatataaagtgtaatacaaaactttccaacagataattcattcaatgtggtccaaaggttgtttaaaggttaattttaaattgaaacattaaaattgaagnccaatccccctcaatcattgagataaacatgataaatggtactttagctcttttattcagtgatccttgcttacataatgcacaccaggaaatttagcccaaattagatttaatcattcgatcaataatgttgtcttgatcaacgctgctactaccaatgtatttgtaagcataagctaaatgggttgctatatactactctttatcttataatgataag

SEQ ID NO: 203197 - DNA, 374 bp, Glycine max
atcttgtggaagcctctcttgtattaagaatcaagatactaagagatcgctttcaaggtattctaaagttgtcacaagagagttatatcaataaggtcctacatagattcagcatgatagatagtaatgcaggagataccccgatagctaaaggagacaaatttatactcatacaatgccccaatattgaccttgaaagaatagagatgcataagattccttatgcatcagcaataggaagtctattgttcgctcaagtttgctacttgtccaatatatcatttgttgtacgagttctcggcagatatttacgaaatcctggaatgcatcattggaaagcatcataacgtgtgatgcgttacctaatgataaca

SEQ ID NO: 203198 - DNA, 428 bp, Glycine max
  unsure (1)..(428): unsure at all n locations
catcacctcattgagacacaaccttagaccttttngttccttggcctataaaaaaggaatcctcatcctttcccccgaagcaaaggacagcggaatctcctcaagggagagcatatataatgctaatacccgatttcccaaaaaaagggatggtgaaggaaaagtgaaaaggatgaaatggaaagaaagattaaagaagaaagagatgataataaagattaggaagatatggaaagatagaaaaaagataaaagagatgataataaagataagaacagaaggaaggaaagaaggattcccgatcaatgatcaaaaagaagtgaaaagggtaaagaagcaattctcgatcattgaaagaataaggacaaataatcttcaagccagattgccactcaaaatcattctcgactggaaatatcccatccaca

SEQ ID NO: 203199 - DNA, 372 bp, Glycine max
tgcaagcttctagaaggatcatcaaagaatggaacatatctttttcttgcccatatggagaaatgcattcggaaaaggttacatgacataaggaagggacaaacatttcttattcctaaggttacacaaggcagacaagaattgactgctggacgttatattgaagaaaatgcaaggaaggatctcgcatgtgctattatcatgcccacgccccacccccaaagtgaatattgaggggttaaaagaatattatcaacattccaacgacaatccacaatgttaaggtcctccacgagatcctatatagaaagagatcgactcgttatgactctgaaagatcaattgttatgaagctgtcggatacaaatgaag

SEQ ID NO: 203200 - DNA, 432 bp, Glycine max
ttcataagtgaagtcatgtgtagccatctgcctaatatttctctcatgacgaggagattgagccattgacacagtatgataattaatagccaaatgctcaaaattagaatgttcagaatcaccaacaacataatgctcacaatgcatggaatgcttataatgctcactatgcctaaataatatatgaaaggatctatctattctacgatcaaagggtgtgaaatcaccaggattgaccctattcatgcactatatgcaacaaatcttgtatttgtcatacaatcaccaagggtaacaaggtaggggtgatactacaactatactcaaacgatatccaaatgagctgaatatttgtgagctacaccctacaatattgaaaggatagacaatatttgtcaaccaaaatgacagtattacctatgaacactgcct

SEQ ID NO: 203201 - DNA, 382 bp, Glycine max
  unsure (1)..(382): unsure at all n locations
agctntaacctcatcgtgcctcacagtctttagatttgttatccaatccaatccttgtgttcggactctcagccacttatgatagccgccgatgatcccattactgcttcccctaagctctctgtcctttcttcacgccgcatcccatgccttgcgaactccttggagtaccctcgcgttgtggtcactaaaaccccncgcacgaccggcgcgatgctttcgtctaatggcgctcctctcatggggtagccaagctgtcttatggtgagaacgggattataattaatacaaccccttgttcccataagggacatttggcatccttcgcatgaagaagaatctgatcttcttcttctacagggaccattaaagacgcccccca

SEQ ID NO: 203202 - DNA, 425 bp, Glycine max
tatgggattatatggcacccgtcatatgtggtagttggtgtcgatcgggcgatggcacaaatcaactatcccatttccacaagccaggcataagcacaccatccccatgtgcccacctttaaatttagctcacgtgcacgtacgtacccttctcttcgttcctctcagcaccgagtccccatcaacccctccaagctttgacaatatccaaacagttcgatctcatttttcatgaaactaccttaaacaaagaaaaacagagtggaggcagaaatctttgcacaagattcattctaattccgcagagtttttcctacccacatacctcaataacatcctcttcggtccgattgttaaccaatggatcaccttaaaaattaactaatggttcctaatacagaatctaagtttgaccgtgggatcta

SEQ ID NO: 203203 - DNA, 247 bp, Glycine max
gtatggaactgtacgaattatgtaaagatactcgttctctttccgtaatgtcacgaaaccttatggattacgcaatcgtcccttctttggcttcctgaatgttacgggactttacggattgcacattaacacttccttgcaactccccccccaccgcctatataagattgtctaaaatgggtgccaactacttttaagggcaatacgatgtgtaaattctaacaaacatatagctcctaacgaaatt

SEQ ID NO: 203204 - DNA, 297 bp, Glycine max
cgtacgaatgtaagaacatcttctctgaccttggtgatccttgactccatctcattgaatcgcatgtccacttgtaactccaaagtatcaaacctttcaccaacaaaggtttgaagaccatcaaacctgtccaaaatcttttgaagaagagaggaatcttctacaccatgtaaatgtccttcttcatcaatgggttaagcaccctttttcacccaagagccatcatgctctttacagttaccaaaggatgcaatcacagcagcgcctattagaaaggatctcttgattggaacataa

SEQ ID NO: 203205 - DNA, 333 bp, Glycine max
caaccagctgcctccaactgttgtgctataagtttaatttatttgtctgcagattgtgctccctcatagagtttattcatacatgcttgatgttcatcatattatgaattcgctgacattgtgagtctctgtttgtttaaaccctaaatttacttaccacacccccaccaccttttgttattattggaggttttttcttcaacctgatgttggatagttaattggctataatcaactcaactggaactcctggatttagctgtacacctccttctggattggaagttgtactttcaaaagtcgttgagttcatttgaatgaatatgtttctag

SEQ ID NO: 203206 - DNA, 433 bp, Glycine max
cactatataatactaagcttggcattgtgtctcctataaaaaggtgaaaggctggtgtgattaaatgacaatctatgctagatacatttcatcctaaatatcaaattttatcaccttggcttttgcttgcaggatattgttcttcacttcctttgtatgaatttttccctcaagcatagtgtagaactgaccaccaaaatacaattctatttacactataagcttattcaaaagaaatactcatgtaacacaaagggcataagcaagtaataatcatatacctcttgttttcgtctttgctccctcatcattgaaatgaatccattatttgggaccgcgtcaccctgcgaggttggcatttttactaatccaagtgtaagacgaaattggtcgaccacttactaacactataacttactccttaaatcccccc

SEQ ID NO: 203207 - DNA, 423 bp, Glycine max
  unsure (1)..(423): unsure at all n locations
gtgactgaggctgcagctntaacaaggttcttacagataactatcatgaatctataactagcaagactacccatcatatctcccaaaaccccatacccacgaaatttaagagagaaagaagtccacccaaacctgaattttcgaagtcccactcgtagccacgcacttcacgaccccgaaaatgccctcctttcgcgatttggggcagaaatgatgggccgggccgaagctttgcttggagcttnaatggagaatgaagaagaagaaaatggccacgtgagggagagagagagctgtctgaaaaagtgtggggtgagtgaaagagagaaaagctttttggtttaaataaaagggttttctctttttctattattntatttaagcaatgccacatgtctcctattgagtggagcaaaaaggggc

SEQ ID NO: 203208 - DNA, 451 bp, Glycine max
  unsure (1)..(451): unsure at all n locations
tctaagcttacatatcgagatgcacgaaantgaacaacggaagctgtctagattttaaatggcataacttttcactcggatgcacgattcacgtgtatcacatatcgagatgcttgaaattgaacaacggaagctctcgagaaactcaaatggtctgaatgcttcacacggaagtgctattcaagcgcttaatatattcagacgctggaaattgtacaacggaagctctcgggaaatgagaatggtcataagatttaactcggatgtccgattcaggctcttaacatttagtcatgctcgaaactgaacaacgggagctgtgaagaaattgagacgggcataacgtttcactgggaagtccgatctggtgtatcacatattatatgatcgaattgaacactgaagttcctaataattcatatgggataacgtttcacagtgagcctattaa

SEQ ID NO: 203209 - DNA, 399 bp, Glycine max
  unsure (1)..(399): unsure at all n locations
gctatagttctctgtattgggtgttgattgcttgacctaatatatcagccaggcaccaacaggcgaaactaccatcaccttcaatgcctgcattatgttagccccttttgctgttgggactcttccaaaagattgatactccattcttctgtatataagtgattaagaatagcatttgaagcatatataatccccctctcatttatgcaataagacatagaacttacacgaagacaacatatcaaacaacttgttatcaataattctcaaagacttttggttgctttgataatcaatntgatatatgctacataccaactttgtctatataaataaaaagaacttaaaaaatcggcaacctcttaaattaaccacacccttaatcatcgagtccaaata

SEQ ID NO: 203210 - DNA, 437 bp, Glycine max
  unsure (1)..(437): unsure at all n locations
tactctatcacctcattaaagattaataccccatgcaagatgtgtctatctttaataaaagctgtctgtctctcatcaatgagagcagatataacaagcctcaatctatttgctagcaacttggctatgaccttgtacatacaaccaatcaaggaaattggtctgtaatcatcaaaagactgagggtgatgaattttgggaattagagctaggaaagaagcattgctgcccctanggaagcagccatgaacatgaaactcattcacgaatctgctgaaagcagcttttaccacctcccaaaattcttttaagaaattgatattaaatccgtccggtccagggcatttttccccaccacaactccacactgcctctttgatttcctggtctgagaaaggagcagacataatatccctctgcctctgtatgatagatgg

SEQ ID NO: 203211 - DNA, 350 bp, Glycine max
  unsure (1)..(350): unsure at all n locations
gaactaaagacatcaaggaaaaattattctcttcgcgtattgcataaaaattttcaaattttaaaaaatacaaaatataaatcaaaaagtaatattcaaaatttgagataattaagttgtgttattgggaaaattattattaagtggaattanagcacaacacacacccaatgtctaagtgaatttatgattcgtctattttgatggaaattaactaggataaatttttgacgagacagaaagacgtaaactttcaattcctccttgtttcctgcaactacgtaaaggaaggaagggcacctcatggatcccacttcatttcatattcctactaatttggaggaagaaga

SEQ ID NO: 203212 - DNA, 264 bp, Glycine max
gctagagcttagctacacaccccctataatagctaatctcacccccatgactaaatacatgataatacaaacaatagccttattacaaatacaacgctaaatgccccgaaatacaaagctaataccctatactactagaatggtcaaaatacaaggcctatacgaaggaataacctattcttaatttaaaagatagcggctcatacttcccagggtcgaatttacctaagctcagaaaccctaggctttcctgattctaccaat

SEQ ID NO: 203213 - DNA, 361 bp, Glycine max
  unsure (1)..(361): unsure at all n locations
atgcgtgttgtcctcattatagacttccatgtaggtggaaagtgttcaaaattagagcaacattgaaaggtgccgagactggtggataaccgagatataatggggcattaaccttcgaactttttcgacttttcgcctatttttcaagtacacaataaaattgccttctctgaactctctaactcgacattntccttcaaagaactttaattcttgccgggaactattgattgaatattcttgaagggggtctcgaagttcgtgccgaggagctatcngtgtctaccaccctcatttgaatgaaaaagtagggaaaagtcgaaaaggcaaaaccaaaaacactgacaaggtcgaccgcgtc

SEQ ID NO: 203214 - DNA, 420 bp, Glycine max
ccatcttggatatatttacaaactgtgggtcatcagagggagctgagagttatcagcaacagcttacttttaatggacctttatcttgatattggttttacgagtgacacattacgattctaaattcagtacaaggaattgtcgataaatccactaagaatcttaacaagtgtgacaatttgaaatcaactcgactggctctgttaagggtatccgcatctaaaagtttgttaaaggaccatttctgatatatttatcagttctcgaacaataataattgttgtgggcaaacttgtgaccggataaaggtttataggaatgaaatttaaaatataaaactatactttataagtgaacagttgccttgaaattctatatcctttttgcagatggtggtgattggtgtagaatcatagttct

SEQ ID NO: 203215 - DNA, 420 bp, Glycine max
gcagcttatgtgaaatagttcagaattaaactttattctttcttaatttattaatattttataagcttatatattatcttttaaaatataatatataagattaaattctattttcatataaattataatatgtatatttatataagttttatttttattttttatattatatttatctttcaaaataaaatcatgtgatcccccgacaccactcttttttatatatattaagatattcatggttatttaatgtaatatagataaaaataatgtcaataaatcacatatacatgtttctttactatataatttacgtctttaaaaaatttacatacatgattaaactaagttaaatataaataaaatatattattattataataactagaatatctcaatatatgtaagaaaatactatca

SEQ ID NO: 203216 - DNA, 388 bp, Glycine max
tgtgaaagaacttagaataaatcaagaacatgcttgttcgctcatcattcgtgtgtatgacatccactccacaaggtttgaagtagaggagaccttcaatcctattacgcaacgtggcggacaaaagtgggcaattaacttgaatggtcattattgtcaatgcggaaggtattatgcgcttcactatccatgttcacatattattgcagcttgtggttacgtgagcctgaactacctaccaatatataaatgttggttacacaaatgagcacatcttataagcttatccctgacccaactacaattcatgcgaaaggttggtccacatcaccaaggattatgaatgagatcgattggggcgaaccatctgagcactgacaaaatgcat

SEQ ID NO: 203217 - DNA, 373 bp, Glycine max
  unsure (1)..(373): unsure at all n locations
atgaaaagaggcaaatttaatcaccttgcttggacgaatgataaaaactggggcaaataaagaggatgaaaaggagggagaaacccatgctgtgactgccattcctatacagccaagtttcccaccaacccaacaatgtcattactcagccaataaccccctctccttaccaccaccgaantattcttaaaataaccacaaagcctgtttaccacacttccaataacgaacaccatctttagcacgaaccatacaccaacgaaggaaggaattttgcaccgaaaaagcctataaattcacccttaattcgatgtcctatgatgactngctcccatattcactcaataattaatgatagccataaccccaacca

SEQ ID NO: 203218 - DNA, 220 bp, Glycine max
aaaaccaagcttgaccaatcccgacccacccaggcatattcagtcagcgagaacctgtgatgtacctaagcaggcgagctcctggcagtcaacagataataggaacatagaccacaaaacaacgaatgcttgcgtggaggctggccagctgtggatctcgtgtgatataagggcgatggactctgggtatcgatgaccaaggatgggcactcgatgacaa

SEQ ID NO: 203219 - DNA, 422 bp, Glycine max
gcttgtagaatggctagacatgatacatgtcatgtgcttggttggttcaaggataaaagggatgccccacattattttcatgacacaaatgcaaaaatgatgatttggaaattttatgcaaaactggtcatgcatgcacctatgcggacgctcaagagtcaatattttatggtcatgtgatgctagggctcaggattcccccccccctttataataacccaatggttccaaaatatgttcttttattaatttgagcatttctccaaggtcatttgggggcgtccggggagaattttacagcattcaccctttaggtggaaacacgtttttttttttcaaaaaacgggtaagaacaatgaatatttttttatttctaaaagaaaagtgtgaaataatcttttttcaaaagcatatggggtttt

SEQ ID NO: 203220 - DNA, 425 bp, Glycine max
tcgtgttcgattaattgcctctgagcctaacttgcgttcatgcttaatggacgaagggctaactggtgtatgtggtgcctaatcacgtattgaaaaccctaagttgattttcgcttagtaaattgaaatatggttggattaagcggttgactgttagggacgaattctccataacccaggataagagaatggcttctgaatcagaggaaacaacccgtttttaatattagtagtttcgtattccagttacttgttctgctctttaattaccatacaaccaaacccccccaatcgttactgttactgcaagtatattatgaacatttggtttgtcactgctcgttgggaaacgacctatgatcactctctagttactgcatcttcatgtttatttgattcgggtacggactcgatcactatgcgac

SEQ ID NO: 203221 - DNA, 417 bp, Glycine max
  unsure (1)..(417): unsure at all n locations
gcttgtcatcgtgagacatcaggggcaagtaatctattatatgtgggttggataaattcacctgattgataaagaaaaaaataaaaaaagtaatacatcttaggcaaataagacatgttaggtcctaacattctcatctcattgaatttcatactatttcttttgttttttattaatagttattattttatattcagcttctcaccaccatcttttatacatnatgttatgttttttttttataaattggaaattatacaacacatatacaaaacaaagttcttgtggaaatcgatatcgaactttccagtctttactacttggacattcggtacactttccaaacggttaacaatacacataagggaattttcctccccaaagaaattatactggtgggggttctaaacaccttaa

SEQ ID NO: 203222 - DNA, 381 bp, Glycine max
ctgatatcggcttaatacaattcattgtgctcgatatatcttatataatagaattccaacactatccctttcatatagctgaaagatggtatagctctggcaagaacttgtgcttaatgaatatggtttaggtggtgattttattttttatttttccatttgcaccaaggatatcctccaactgatagtcagagactaatttctttcgaggcgtagaaatcaccaaaatgagttgcctctgtcaataaagctttttccatatacatcatcaagaatcgaacccctaacaacatgcttaagtgggtttaggtgttgattgaatatgaagatctagcactaaatatagtctaagatcaaattaatttaacttacattggagca

SEQ ID NO: 203223 - DNA, 408 bp, Glycine max
  unsure (1)..(408): unsure at all n locations
agcttctcatgcatgagaacaattctcaagttgtggttccaatcatcataattggctccgactagttnttcagattcaagaataccacgaagcgataagcgatagagaagatatactgttgattaagcacacaacaaaatataattatgtcagagcataatttttcaaaccttttaaaaaatataaaaatattaatgatctccccaccatatattgaaatgtaagaaatacttatttcttttaagtggatcatataaagcctcttaaaaattatgagtgagccacttggttatcaagttgtttctcatacacattataagacaatgtatcatatacatctttaaatcaaaataaaaaataccatatcacatatattcctgggtggcaagccaatcctattgatattaa

SEQ ID NO: 203224 - DNA, 451 bp, Glycine max
  unsure (1)..(451): unsure at all n locations
nggaatngaagacatggaagctgttgaggaacgatctgtgtttatcagcaagaaagagggatgttctctcacattgggtggtatttttactttttttttttcttttttagttttacattctttcttttcattggtttgttcatttcttattgtaggtagtggacttgctcaagttttcattgatttcaatgacccctgtgtcagacttaatcttacgaaaggaacaatatctttctaatattaacccacaaaatcaaaaccagtttcagtttggaaaaatattatctgagggtaggcaaatggttgtgaaaatacaaataagaaaatcaaatatgaagattctgcttgctgaancggatgaagagtttgtagactttctctttagttttctcactgttcccctgagaagagtgcttcacatgcttgaaagattttcttctgtaaactgcat

SEQ ID NO: 203225 - DNA, 409 bp, Glycine max
  unsure (1)..(409): unsure at all n locations
atcactcctacatttcatctctagcattcattttctttctttacccactcctcacnngttggtttttatggaaaaacaccataactaaacgcgccgcaaggtatccctatcgcaccagatccaaatctagaacgatgggtgatcaagaggagacgcangaacaggtgaaagccgacatgttggctttgaaagaacaaatggcctccatgatggaggccatgttaagtatgaagcagctcatagagaagaacgcggccaccgccgccgctgtcagttctgctgccgaagcagacccgactctcttggcaactacgcaccatcctccctcaaacatattangacngngaagggacacactggggcacgatggcagtcctcacctgtgatacaaccgagcggcttaccctta

SEQ ID NO: 203226 - DNA, 386 bp, Glycine max
  unsure (1)..(386): unsure at all n locations
atcccaaagagaaaacgtccaattgattttccgctttattttactaaaaagatgttgttgttttaattatattattttttacctctttngatttcaacgtgtttttgttctttttttttttttgttattttnnnnaaccgaagnnaacgganaanacaannnaaacgnnngggggaaattnattttatttttaagttaagcgagaaatgacttaagtaaaagggcttaagcacgncaagaggggggataaaaangaaacaaaacgagaataaaaaggcacgaaacacaaggggggaccactacgggacataaaaggaatcgaaaagcttggttcgaggtacttacccgttgaagatcgaagaacgatgaagaacgaatgaagaacg

SEQ ID NO: 203227 - DNA, 413 bp, Glycine max
actaagcttccatggtgagtgggaatggaagcaatgcaagtatgtgtgagagtatgttggctctgcatatatacctagctattctcatgaattaaggtaaataaagcatacaagtgcctgtttttcacgtgcggtacaattgattgttgtggggttactattgacgtgaatggttgaagtgatatactgcaacaaaatgttatttgaaaccgggattagagtttaatttgtgtataagaaatatagctttaatgcccaaatcacatcttttgcatctgtgcagattattggtgaaagttctttctttgttaaggtacgaaggtggaataagcatctcatgtttcaatttcaaaaagtaagtactattgtagaaactggacgttgttcctaatccttgacgtttattatgcaca

SEQ ID NO: 203228 - DNA, 416 bp, Glycine max
  unsure (1)..(416): unsure at all n locations
aagcggctctctaactttctagctttctcactctaagaagtggattcactcttggcttggatgggtaagaatgaaagctcctacctttatttatactactccacctccacaatgaatgggggatattacttgtatcctagggtggagattaattctctagaatgctccacacattctagcagtctctacactcttctactccctttcatactcttccataaggttccacacatctccagaatattctagaggttntcacaagcttcaagagagttctacactactttagagttctacaggacgttctagaaacttctacacttttctagaaagctctagaattttctagaaccctctcaattaaggagggatcccaacaaatatgtatcgccaatttctggatgcaaagagatctg

SEQ ID NO: 203229 - DNA, 482 bp, Glycine max
  unsure (1)..(482): unsure at all n locations
ctaagcttctaggagaaggtgtgctcaagaatgtgttnttgctccttattttcctgctgatgagcctcagaagtttgcaaatgtgcacaaagtctttggtgccagcaatgtcaacaagatgcttcangttcattattaattaattattcctcttatttgtgcatttcttgttactaattattggagatagtcagaatagatataatattcaaaattttcactgttttaacctgtttatataagattatttttagaccacaagatttgaacacaatttgcataataaaaataaataaatttagtctttctttatataaaacattttcatattcagaaacaagaatatggatacgatggtaaagaagactaattttcctgagatttatgctangntgggccacggggaaatactaatattacacaccttggagacattanattaaataccacatatgaatgatgtgatcatatgtgatacatgt

SEQ ID NO: 203230 - DNA, 450 bp, Glycine max
  unsure (1)..(450): unsure at all n locations
tagtcttagacttgatcatggtggacttctctgtttatatagacggagaaaggtaattatgtttcatcaacaatgggttagccaactatacggattgtggtgagaatgtatcctaagataataatgagaattaaccctgtgatatataatggtgagaatgagataggagtctacctgaagtattaacaatcgagaggtgaagatccgaccaaatgcataaaggattcgctagatacctggtgagggtaaatccatgagataaataaaatacttgcttgggtagaagaattcaattcatcaccaagatcttatatgtcttattcctttcaattnttatacttcnttcaagagagaaagattaagtgcttgctgattgagcttgaagtcccagctagaatcacatagcttatgtttatatgttcattcttcatgggagttcagtgacatttg

SEQ ID NO: 203231 - DNA, 371 bp, Glycine max
ctatcattaggagtatcgaaatccttagcttcaaaatcacctgaaacaatgcccatcatggttgcacaaaaaacacatattctttcgacgcatatacccattgcgaatacaacgcctgaccaaaagtaaataaacaaatatgtattttattctcaatgtttagtcaatacaactacaaagttgtttataatacatctttaaagaaaggcatccaatacaacatagtgcgttatcgaatcccatctaaagccttctacattggatgtttttaactcttaataaatatgatgcccatctttttgtgaattgttgtcatggtctcaatgtctactaacgtcccatcaccaaaccactacaaattataaaataaa

SEQ ID NO: 203232 - DNA, 488 bp, Glycine max
  unsure (1)..(488): unsure at all n locations
gatccttaaagcacctgcggcatgcaagctttcataagtgagatcaggtgtacttttctccctaagagtcctctcacgagggggaggtagagccatgttctcaatatgtaaattagtagtcgaatgctcaaaatcagaatattcagaatcaccagcaacagaatgctcaaaatgcacagaatgatcgggatgcacaatatgcctaaataatctatgaaaggttctatctatttcagtatcaaagggttgtaaatcacctggattgcccctagtcatgcactatatgcaacaaatcatctgtttctcaaacaagccctaggggagggttaaaactacaactatagtcaaatgatatccaaataagctaaaatcttgtgagcaaaaccctaaaatcattaatagatagcacaaanaatttcaaacaaaaatacaaagtctaactatataaactacctaagcanagtatagaagaatatgacaataatact

SEQ ID NO: 203233 - DNA, 379 bp, Glycine max
  unsure (1)..(379): unsure at all n locations
tgctcactagctnttcactttcatttgctttttatcttgtttcatcaacacactttattcctttattttcttntttttaacataccacttgtgtgttgtgtgtgttgatgctttctctctttctttgcatcccaattaattccactcccccaaatttgggggaaatttgctttgaactatatgctctcctagaatctaaacaaggtatcaggagataattatttaagttcagggttcaatttatgacaaaatcattcagctcaaaaagggtgcaaaggatataattatcattcaaggtgagctttttggtcaaaaggcttgtgtatgtacaatcatggccttcatcatgttctcgtttatacatttcatttctaaattt

SEQ ID NO: 203234 - DNA, 218 bp, Glycine max
cctctaagcacttctctctctctcgaaattgctgaggaaaattattttcgtgaagaaaatcccagccgaggccgctccgcaacgtttctgtaacgttcccatgagtaattacgcgaagattctccaccgttcttcaagaaataacgttccgtctgccgtttcttcagacttcaacgggtaagaacctcaaaccaagcttttcaatcattctatgtacc

SEQ ID NO: 203235 - DNA, 388 bp, Glycine max
  unsure (1)..(388): unsure at all n locations
tcaagaataatggcctcaacaaaacttcttatttttattattgaatgtcaataaataggcctcctatttttaatggaaagggttaccattactgaaaaacccgaatgaaaatcttcattgaggcaatagacttaaacatttgggaagccatagaagtaggaccttatatacccaccatggtggctggaattgcaacaatagaaaaacctatagaagagtggactgaagatgaaagaagattaatgcaatacaatttaaaggctaaaacatcattacttctgccctangaattgatgaatattttanggtttcaaatcgtaagagtgctaaggatatgtgggacactttacaagttacacatgagggaacaactgatgtcaaacgatct

SEQ ID NO: 203236 - DNA, 418 bp, Glycine max
gaccatggcctgagtttcaagaattatcatgaatcatcaatcatccatcatctatctgtcaatataatcctttcatctctttcaacagatcgttctgagtatatttctcttcatctttctagaagctttttatcaacactctctctttacagataagttctttgtacaaaaactggagttattcatattttcattctcttctccctttgccaaaagaacgaaggactaaccgcctgagctcttttgtgtctctcttctcccttacaaaagattcaaaggactaacccgctgagaatttcttgattcttccctctcctttaagaaaaagacttcacatgactcaaccgcttgagatatctcttgtttgccctacacagatcaaaggctaaccgcctgagattctttgtccaacacattg

SEQ ID NO: 203237 - DNA, 111 bp, Glycine max
caccaacaaagggagaggagaaggcaaaaaaaaacaagcacaaaaaagagacgaacaaagacgagcaccgtccaaacgggaaggggaaaggaagggcggcacaaacaacac

SEQ ID NO: 203238 - DNA, 287 bp, Glycine max
ggattcttcctctatcaactttcaggacctcaatcatcttcttagtagaatcaagtggtatttgatgtcaatctgtgattgagcatttttaatttagtagttttctattattcttagcttatttgacctctttctgactcttattttctcaccttaactcagttttggtcttaggaaaataattggggctaattaataattgtttcttattttcggattttgtgcttacttgatctatttgccttgtgtaggatttgtacaatactatagaactctgaatggagtat

SEQ ID NO: 203239 - DNA, 422 bp, Glycine max
  unsure (1)..(422): unsure at all n locations
gggagaggatgcttcaatggaggatatgaaagagggagagaaagagagaggggggagcacgatattgaaggaataaaagaggtatagaagtggaactttgaagtatgtctcacaagactctcattcatcaaagttacaacaagtgttacacatgcttctatttatagactaggtagcttccttgagaagctntcttgagaaaacttccttgagaagcttctttgagaaaacttccttgagaagctagagcttagctacacacacccctctcataactaagctcacctccttgagaagcttccttaagaagattcctaaagaagctagagcttagctacacatacctctctaatagctaagctcacctncttgagatgagaagctagagcttagctacacaccccctataatagcttagctca

SEQ ID NO: 203240 - DNA, 293 bp, Glycine max
  unsure (1)..(293): unsure at all n locations
aacttttcacacggatgtccgattcatgccaatcacgtatcgagacgctcagaattgaacaacggaagctcttgagaaattcaaatggtcataacttttcacacggatgtccaatttaggcgcatcacatatagtgatattcgaaattgaacaacggaagctctcgtcaaatcaaatggtcataacttgtcacactgaggtccgattcagggttataatatatcaatacgctcgaatataaacatcgganactctcgagaaatcaaatggcatgactttcacacggatgtccg

SEQ ID NO: 203241 - DNA, 339 bp, Glycine max
caatttcgagcttctcgacatattatgcgcccgaataagacatccgtgtgaagagttatgaccatttgaatatctcgagtgcttccgatgtttaatttcgagtgtatcgatatattttaaacctgaatcggacctccgtgtgaaaagttatgactatttgcatttcgcgagagcttccgatgttttatttcgagcgtatcgatatattataagcctgaattggacatccgtgtgaaaagttatgaccatttgaatttctcacgagcttctgttgttcaatttgagcgtctcgatatgtgattcgcctgaatcggacatccgtgtgaaaagttatgacca

SEQ ID NO: 203242 - DNA, 466 bp, Glycine max
agcttcccatatgtctccttaccaacaaatgatctctctctttcagtggaagaaaaccatcatcctccacttcactagaggaactatgagaactcttagatgactcactatccacctctctattctccaacacagtcatggtccttttgttaggacattaggatgcaatatgaccctttcccaaacacttaaagcattcaatggaactagttttattgggagggggttgagtatgagaagtaggattacctcttaaaggcttccattcaagatgttgtaaagaagaaccctccttcttggaagtgtctttgtccttccaagatgaataagtgtatgaagtcttcttgtaggtttgtttcctcttcaattgttgctctactttcacagccctatgtataagttcatccatgttgttgtagctataaagctctacaatatcttgaatgtgtctattcaagccatttaa

SEQ ID NO: 203243 - DNA, 476 bp, Glycine max
  unsure (1)..(476): unsure at all n locations
tgtgcatgcctagagatntctagagagagaaaggtccaagttctatttagttttgagattctgctgtgtgaagaccagcagagaaccaagcttgaagaggaagtcgtcctgagagcatgagatgagtctgtgagtgattgtgacgttctagaggtagaggagacatcctcaccgcttgtatttcttcaatccttcattttctcttctttttgctgtaaaggaagcttcccagttatggaaagctaaatcctccgttggttcttccttgtaagtacttgatgtaaatacttgtatatctatgtaatgatgttttgtgtgttcactattgtcgcaacctacctttcggcgggatggcgacgcgtgactcgcgggtgcgtcttccaagaaaggaatacgcgcggagtcgccccaacgttaatttgaggaatacgtcgaataacccgaaaagacgtgatctacgaacttcaagtgaaaag

SEQ ID NO: 203244 - DNA, 313 bp, Glycine max
ctgcagcttatacgttgctttgcaaatttttttctaattacttatggaaggagaaaccatgccagttacctccaatataactataaccttgaaagggggtaacaaaaattggtgctttggttgtggggtaactgcttattaacaaaaattttctctggaaactccccactggcataggacaaaatttccttaccacttcactttcttgttttgccctgaaacttattagcacatatcaatctgaacaagagcccaatttgcattaagtttttgcttgaaaagcccaattggaagtccaatggaaacacaggga

SEQ ID NO: 203245 - DNA, 448 bp, Glycine max
  unsure (1)..(448): unsure at all n locations
tactaagccctatttgatgatgcccaagactcaaggcaggaatcaagtttgttatctttattcaagaatctaagggtcattcaatccagaatcaagattcaagagaagactcaagatatgtgtgaaccttcagaaaaacatcaagataagtattaagagaatttttcaaagaaaagattgaatgacacaatttgtccaaaataatttctcaaagaaaaatcttttaccagagtgtttactctctggtaatcgattaccatacagtaatcgattaccagaagtccaaaacaattttataactgttttacaaagtagtaatcgattaccatgggcatgtaaccgaataccaatgttnttgaacgttgaacttcacatctcaagagtcataactggtggacaaatattttcgaaatagtgtaatcgactacacaatatttgtaatcgaata

SEQ ID NO: 203246 - DNA, 265 bp, Glycine max
aatttgctgcttcttctgctcacaacctgaaagataaaatgtgcctcaatttcacagtgcatttcaagggaaccccggatggccattacttttgtaaggggatattattctcatcacaatattttctttcgtacaaagggatttattaaaaagtaacatcttatttaatacctcctgatgtgatactatgaatctaatttcaattaagatatattgatatttcttttaaaatacgtctacacaagctatttcaaaataattctca

SEQ ID NO: 203247 - DNA, 339 bp, Glycine max
gccttgaatagaggttcacaaagcaaaaatatatacccccagactggttagcaagactcttcatcaggtggaaaccaaactaagttcccataagccttacgtgagaaactccgcaaagtgaaaggaagcatcacccaaattgattggaaagacctttaaccaagtcaaaactcaacccgggatgatcttatgtcatccaattctttatttcatactaatccgccaaggtactactatctatgccgccaagatcccattctcataaagataggctatcctttctaccacaagcaatgatacattgtttaacataaggcaacaacatgcagactcacaaca

SEQ ID NO: 203248 - DNA, 405 bp, Glycine max
  unsure (1)..(405): unsure at all n locations
cctgcatttatacgggctcggttttgtgaaagtgtatagttttctgtttatgtaggccatctcacattcacacacacacacaacttanaaattgtgaattgcttaaacaaaccattntaaatgcacataaatacaatacatataggtaatatcaactataaaatactcaagtctagattatgcgaagtgtaaagactaaatccaaacaagatcaagtacaaataatataatacacatagatagtttattaaattctttaataacacatcaaataattatcaatcttcaatgataatgtttggcttcatccttgatgtagttaggtactccaaatttcaatctcttaagaattgttcacttcttctacaatgaacaaagctgattaaaagcagcatgacattttat

SEQ ID NO: 203249 - DNA, 304 bp, Glycine max
acataacccatcaactcctgcaacaggtgagatttctgattcatggcaagctgagttactaggttgaccaaggcatcaagtttcccttcaagctttctattctcaatatatgaagatgaatccgtggccacctcatggacttctctaagatcaataacatcatttcttgcactgaattgttgggagttggaagccatcttctcaataaaattcctatcctcagcaggggtcatatcaccaagaatttcaccactggcagcattaatcatactccttctcatgttgctaactcccttatataaat

SEQ ID NO: 203250 - DNA, 311 bp, Glycine max
  unsure (1)..(311): unsure at all n locations
gaatctgcnccatccaagtcaggccccatttattacacattgcactaatgctgcacttttgtaagtcaataactattagaattaagttcatacatgtctacatatgcaatagcatcttattatgtattcatacaatactctcccccatcccaaacaaaaatcatactgaattcacttgcacaatgaatagttaaacttattacgcattaacgtatgatgatttgattatattgctatactttcacaatgaaacttactctacaagtacggcgcaatataatattataatgtctataattgtaccacaaaca

SEQ ID NO: 203251 - DNA, 440 bp, Glycine max
  unsure (1)..(440): unsure at all n locations
ttaagtcaccgcggatgcagctgtacnattcaacgacacatcttttactcggatgtccgattgagncccgtaatatatcgagacgcttgtaattgaaaacagaagctctgagcaaattcaaacgacnaataactttgactcggatgtccgattgtgtcccgtagtatatcgagacgctcgtaattgaaaagggaagctctaagaaaaatcaaacgacaataacttataactcggatgtcggatacagccccgtaaaatatcgagacgctcaaatttgaaaacagaagctctcaggaaattcaatcgacaataacatttgactcggatgtccggttgtgtcccatattatatcgagacgctcggaatttaaaactgaagctctgagaaaaatcaaacggacaataacttttactcggatgtccgattgagtctcgtaatat

SEQ ID NO: 203252 - DNA, 431 bp, Glycine max
  unsure (1)..(431): unsure at all n locations
nttggtttcaattacgagcgtgccgatatattattggactcaatcgtacattcgagtaanaatttattgtcgtttaaatttgctcagagcttctttnttcaattacgagcgtctcgatatactacgggagaccatcggacatccgagttaaaagttattggtcgtagatatttctaatagcttatgttctgatttttcgagcgtattgatatcttacgggacacaatcggacatacgagtcaaaagttattgtcgtttaaatatcttcagagcttctgttttcaattacgagcgtctcgatatattacgggactcaatcggacatccgagtaaaacgttattgtcgtttcaatttgctcagagcttctagtttaattacgagcgtctcgatgtattacgggactcaatcggacatccgagtcaaaatttat

SEQ ID NO: 203253 - DNA, 390 bp, Glycine max
  unsure (1)..(390): unsure at all n locations
agcttatatatgagaattgctctatcatattgaacaaccaangggggaagnaannaattaaatagatattttaaattaactttggtcctattacagnctataatagaatgttcattgttgtacaaccttgaaattaatataatgtataaacagagtctaggtccattgagtcattgttattgttgattttatcacccccaagtgttaattaattgagtaactgcggagagaagaaataagagacctaaaaacagagaaaattgacattattttatggttgaagagcagggcaaatgtgacaaagggagtctttgacaggaaagtaaaagtgattcatatgtccacaagatgaaagacagtgatggagctaacattgttagtggaaatttg

SEQ ID NO: 203254 - DNA, 471 bp, Glycine max
  unsure (1)..(471): unsure at all n locations
actcaagctgacattttgctaacgagccgagggaatctagtttttctagttgngcataggccttcacggacgacttaacttacatccatccctatcgataatggtcttgagtagggtttatctagtgaatgatatttgtgattnttagcataaccaaaactattttaatctatgaaattattgagtctttgatatgcacttctatgaaatacttgaagaaaaaaattgttgcactcgagtataatattgtgggttgggttcgtgtaattttttaaaacccaaatcaaaccaacttgttcatataccagataaagtactcgcatcagggcgagaaaacacttagtgcctcaaactgagtaccctctcggtcacgtactcacatatttcgtatgacacgtctcagtctttcacacacgacaaatttaacacctacgcctaatatatcgttcaataatatgtacatcatatgca

SEQ ID NO: 203255 - DNA, 468 bp, Glycine max
  unsure (1)..(468): unsure at all n locations
agacacctgcggcatgcaagcntggtatctccttcttcactacatctatattcaccgggttgagtcttttctatggctgtcttactggtttagctccattcctctaaattattcgatgcatacacgtggatgggctaataccaagaatgtctgccagggtccagcctatagccttcttatgcttcttgagaactgacaacaacttctcctcttgctcatcagcaagggaggcagatataatcactggaaaactcttgctatcatccaagtaagcgtattttaaatntgatggcagaggcttcaattctggtgtggtcggctggacagtggtagaaggagatggtttctcagcctttacctcataaagaaagtcagaggtatgtgtacttcctganacatggttagtcctatctgactctatnaaatcactctcaagaggaaaacaccaccccaggctgcaataatatc

SEQ ID NO: 203256 - DNA, 423 bp, Glycine max
  unsure (1)..(423): unsure at all n locations
tgtgcaaatcanatcactcctacatctcatctctagcatgcgttntctttctttacccactcctcacgtttggttttttagggaaaaacaccataactaaacgcgccgcaagggatccctatcgcaccagatccaaatctagaacgatgggtgatcaagaggagacgcangaacagatgaaagccgacatgtcggctctgaaagaacaaatggtctccatgatggaggccatgttaggtatgaagcagctcatggagaagaacgcggccactgccgccgctgtcagttcggctgccgaagcagacccgactctcttggcaactacgcaccatcctccctcaaacatagtaggacggggaaaggacacactgnggcacgatggcagccctcacctgggatacaaccgagcggcttacccttatg

SEQ ID NO: 203257 - DNA, 413 bp, Glycine max
  unsure (1)..(413): unsure at all n locations
ctaaaacccctcaatttagtggantttcaaggtttgagaagtgaaaatgagaatggggtaaatttggagcaaactctcacctcacacaagtctataacattaatctaaacttgctcaaactggttttacgcctaaaattccaccgaaacaaaatttgactcctcaacacccaattttaccctagaaatgactcttgttatcactttggtcactcatattcctcatttgcacagtctaagctttctcttaagtcctaaatgacatttcaaactaggattaactcactttaacccccaattaccactgaatccagatttagccttccaactctcaaagcctcactctttttccactcataacaccacattctcactttctaaccttaggttaactctacccttcatctctagcag

SEQ ID NO: 203258 - DNA, 390 bp, Glycine max
  unsure (1)..(390): unsure at all n locations
ctaagctgctgattacatctcctattttcaagctaatcttcttgatatcatcaaaatcttcatgatttacattctccccctttntgatgatgacaaccacctgtatgttaggagcaacaacaaagaaaatatctatttgcatatagtttactcccccttggttgtacaatgattgcttatatgagacaattgaagatttcatatttttcatatataaaaagttgtctcataaaacaatagataagttttcttactaatttatcttttatctttctctccccctttgtcaacatcaaaaacaaatcatgaatagaaaggagaaagatgttaccactttgttgcaatgtatgagaatcaagtgataccacaaggcattaaaacaatcattca

SEQ ID NO: 203259 - DNA, 337 bp, Glycine max
  unsure (1)..(337): unsure at all n locations
taaccctgctgggcttgatgtgtggataatatggtaggtnggttaataaaaggctctaaaaccatcttaacattagatttggggcctaactcatccttttaaaaccagcttataagatgaggggtacctaagctttatagtttataagccttgggttntttcgaatagagatgaagaaaaggaaaaatgtaagcaacctctttgatatagtacattgtcttgtaannagtgaaacttgatcttatttgttcagttcactgtgcatggcttaactcttgatgccatgttatatttatagctattttgatcctttttctttgctgattgcagaaatttc

SEQ ID NO: 203260 - DNA, 377 bp, Glycine max
  unsure (1)..(377): unsure at all n locations
tggaccaagcatgtncatcacctgcatacgtacccaaattaaaatgttctatagtaaagntggtgacgagaaaataaaatggttgttgtgtacgtcataccatcacataatattccccttgtctccctttgtagtgtactttaggtattccatgactgccaccaagggtgcttttcacaaaacaaaacattaaataaataaaaaaactcaggcaatttcacttaaacacaaatcttgtgcataaccgaaagcaatcgtcgacacatatctcttgcaacataaacaaagcacctacttgtacacttgccactcgtaaggagggccatagttacagcctttgctgttcctgtgctcaaatntcaaagccacctgaaaca

SEQ ID NO: 203261 - DNA, 364 bp, Glycine max
ttggacctgtacaaataaatattatgtaatagtaggccacataaaacagaaaatatttatgtgaaaagatgttaccaaattatagaacaagtgatgaactgaatgataatggactgaaaatgaactggtgaggatggaaatggaaaccgaaaatttttctaagtttcaaaaacacaacactgagcatgaggataaacacgccggtttggctatatagtgtaaaaaaacccagggaataactcacggaatgcccctccataacaacagagtcaaggctaaccttctagctttagctatttgagcagaacggtgcatttaggaaagcagggattccttcttgcaggggctgaaaccattccgaggg

SEQ ID NO: 203262 - DNA, 309 bp, Glycine max
atgactaaaaattatccactaattttcatgatgaaaacaaaagttacaaataattggtcctgtcaccatgatttggatgcagagaattgattcatgatgttattcaaacacattattagtgtagacaaaccttaaatttgttcatcctgtgtgcatacactgtgtttattgggccctattgattttttgcactaataatttatgcctatccaaatttaagcagaaattatttatcttttaaggcaaaggtttttccgcgtactaactacttgaatgtcctttttattaaatagtatcttccataaatag

SEQ ID NO: 203263 - DNA, 481 bp, Glycine max
  unsure (1)..(481): unsure at all n locations
ccgtccgtgatcttaagcaccgcggctgcagctgtctcttaaccaaaagtcttcattctgccatgcatngcatggcggaacacgagacttccgagaagaagaaacaaagattgaagacagttatgagacccattaattataacaacaactacaacgcaaaacaaaacaacatggaatacttgaacgagcagatagcgtatcaaagaaaacaagtacagcattacaaggaagtttcactatggagccaaacattggacaaaaccgttgggatcatggctaaggtggtttgcattgtctacgctagaatatgttccgtttttggaggctacatttctaattgcaactgctatgaaatcaatgatgacaacaacatcaacaacaattgctgttgcctcttggaacaccgcgagttgtacaagaaaaattattgtctctacgaggaatcacttcagaagcgtgtcacaagatccggtcccattcc

SEQ ID NO: 203264 - DNA, 451 bp, Glycine max
  unsure (1)..(451): unsure at all n locations
tggttacatcattcaagctttcaaaatattcaactactgaatcctaataacaaaataaaaattagtcatatacaactacacatcctaataacaaaataaaacaaaaaatgggccttcaattttcttcattttttatattgcatcatctttatcagcaacctttctttatttgggtcttgttatgtttaacttattccttgctactggtggaacaatagttgcagggacctacatgcaaatgccaaacatgaatagcacttgtaatatataaaaatggagtgctacaaaaaattatgttgagataaaaatactnttgtgtgacaaatatttaccatgaactccatgtcacatcttgtgaacaaatatgctgagataaataatctgcaccggaccttcttgaacatgagcaacagctttttcagcctcattcaaagcttgttcatcttgagct

SEQ ID NO: 203265 - DNA, 474 bp, Glycine max
ttaagtcaccgcggctgcagctttttgataagttctcagccttctgtttaacaaattgcatagggttcaaggtattcagccaaatattgaaaatgattttaatgccagatatcacattaaaaaagagagtaatgaagcaacaattcaaggatagaggagttagaactattacaccatttcaaccttgcaacaaagtccttgaatttattatctaactacctttgtcttccctcagaaaccaattgtgccataatactataaatagaagacaacaagacttatttctacaattgaaagggggaggggtagattgaagaaaaagaagacagggaagcttgaaggttccaacaataaaaccccactttcctgagtaattatttgttaataaatcaaaatattgagcagattgttcatttgttatctgaccttattgcagtatcccctccaattcttctgcctctaacattatcctga

SEQ ID NO: 203266 - DNA, 334 bp, Glycine max
  unsure (1)..(334): unsure at all n locations
ttcagctggttcacgtgcatcacatattgaacttgacagatgggtgcatttcaagtcattagagagaanaatcttgccaatctgcattctggttcctaatcttttctttgtatgcaatgtcaaatccttctcagaaaaggtgccatctgtatgcttcaattccaactggttttcactttggctctctattcttactggcctcttcttcagatgttcatttcctacaaaagaatctgattcgtcagtagacatggaacaagcatcttgatgacctttaagagaagacaagtatttgctgtcgccaataacattttcattctttgtcatgtagagc

SEQ ID NO: 203267 - DNA, 292 bp, Glycine max
  unsure (1)..(292): unsure at all n locations
atgaggaagtgtanaagggtgaaacttcctgcttttattcgttgaccacagagtgtgtcctggagatatgtcgcgggggtcatgaaaccttgggaacctcatgtggggtgctattgcccaaatccaagcttgaccaattccgacccaacccgggcatagtcgatcagtgagaacctgtgatgtacctaaacatgcgagctcctggcaatctacagattaaatgaacaaagaccacaaatcaaggaggcttgtggtggcttgccagctatgaacttgattcatatgtgagata

SEQ ID NO: 203268 - DNA, 281 bp, Glycine max
ttatcccgaaggatgggccttcttaacctttcctttgcatccgtgcatctcagggggaaatcaccttaaagaccccttgagctcaaatccacctcataaaccccaaacaagttccataatgcttttaacaaccctggaacattgcaatctttgaagtcgcaggaactaaatgtttaccacttaagagaaatttttgtctttcaaagcaatgaaacaaaatggtgctctgatataatttgaacaaaggaaggatcctggactaaagtattaaaatttcaaaa

SEQ ID NO: 203269 - DNA, 412 bp, Glycine max
  unsure (1)..(412): unsure at all n locations
ggagtaaattttgtntattaatatcgntttatggttaacactatctctagaacatttccattggatttaatgatgaaatctgtgcatttttatgagaaaaaaggctaagttttgaattgaaaaaagtagcagttggtgatgtaagctccattggagctcgtaggcctaggatcttcttcatcgatggattcctttgcttcttggaagatgaatggcaccggaatggagaatgaagagagagaggagacgttacttctaggagaagatgagtctagaagaagctcaccactatatgaggccatggataagagcttggatgaagaacgagatgaatgaatggagaggaagagaagagcacgaaattttgtgctcctaaagagctcttgaatctcgagttaattctatatgatca

SEQ ID NO: 203270 - DNA, 340 bp, Glycine max
  unsure (1)..(340): unsure at all n locations
actcactttcgagtaattttaccttacagtttaattttgcaggatggacgcaatgaatgatctctaaggtctctcttataatatgtcaattgctntatcaatcatactcttttcatataactgcagaatggaagcatggaaggcaaatcaatttctgacttgtacgaaaaaatttgtcacagattcagagatttcatgacagagtaatgtctaatcacactactttttagcttttagtatctttctatgtgctaaaaatcatnggtatatatgtggtaggtgtatttgtttatggagtaaataattatatgtntgccttggctgaggctgacccgacaac

SEQ ID NO: 203271 - DNA, 462 bp, Glycine max
  unsure (1)..(462): unsure at all n locations
agcttgtggtgggatgcggactgtcaaatggatatctcaaccagcaattaatgcagctggtggaattgtgtgcatatggagtgacanaaccttttctctataaagtaaggtcagcggaaatggatttataatgttaacagggaagtggattaaggaagcacaatctgttcacatcatcaacatttactccccttgtgattctcaaaacaagcgggtgttatgggacaagattaagcagctgaaaagctcaaacacaggaagtttatggtgcatattgggtgacttcaacactatcagaacaccagaagaacgagtgggggtcaatcaaaggggaatggnggatagcaatatgagggagtntaatgaatggcttgatgagctatagctggaggaagcgccatgggtggggaaaaagttcacctggtatagaccgaatgggtctgcaaggagtaaactatacaa

SEQ ID NO: 203272 - DNA, 340 bp, Glycine max
  unsure (1)..(340): unsure at all n locations
ctcagcttctaagcaagcttccattattggtgggtttggttatatcaacatatataaagtgttaaagaatgaaagagaacgtagaggaaattgagactgcaaagacctacttttattcagatatgaagcaatatatttataaacataataacaaaagagaaataactactaacagatagataaaatcactaactgatcatgcctaaagattaggactaaaacaactgtatcctatcagtcaacatgacttttattntttggaaaaaatagcgtaaaaatttgatctactatagtttgttagacagttccaacagtcacatcttcaacactcctccttgac

SEQ ID NO: 203273 - DNA, 317 bp, Glycine max
  unsure (1)..(317): unsure at all n locations
accattcaaacctccacatcatgccaaaggtgatcaagccaaaataaacattaatgcatagaagagaacacttaataatgaacaataaacatagattaataatcaaaatgttaacataaggatgcgttcaactacatcaacccccaaaatgggtaaacctaactacatgactacaagaagaaaagaagaatatngatgaaaaagaggatgagaaatggttgggaagtcataaagagcaaaagagagcttcccaactgcaacctanaaccctaaatagttcccccaaccaaatttgccttctattcgcaccttggtgc

SEQ ID NO: 203274 - DNA, 282 bp, Glycine max
  unsure (1)..(282): unsure at all n locations
tatactgttacaaaatgtaaatataacatcgctatgttaacatcgattttgtgaattaataaaacgcggtggcataatcgtaaataacatgagttngtcaacatcattttttcaacaaccgatgttaatgcacatagtttaatattggctctttgaaaatccgatgttgagaaatgataagttaacattgattttttcaaaaaaccgatattaatgttaacatcatttagttaacatctcgtttttacaaaaccgatgttggtaaaatgataagttaacatg

SEQ ID NO: 203275 - DNA, 346 bp, Glycine max
  unsure (1)..(346): unsure at all n locations
atctcagagtcacctgaggcatgcaagcttaacaaactgaactatcaaaatgggataaaccactctatacattgataacagagtcttggcttttataagccntacaacaacagataactaagaaaaaataaatggcccacgttttacacaacctagaaatgtggtatcatggctgggaaataatccaatgcgaaactatgtaattccaaataattggaataaacataaaaaaatttttaaacaacccaacaaattcctcccctatacgaattgcactactgatgcattcaatatacccttggttcagagcatacacctagtaacttactcaaacttttaaaaaaca

SEQ ID NO: 203276 - DNA, 383 bp, Glycine max
  unsure (1)..(383): unsure at all n locations
tactcagcttaggctatttaattgcttcagattgttgcacagaatgtttaaggtctgtgtggtgggcggcanaagagcataaaccatagagtctggcgacagatgcagatttttgattcatggccagttgggataccaggttaaccaatgcatctagtttaccttcaagctctttagtctcgggtgatgaagatgaattcgtagctacttcatgcactcctctaatgacaatagcatcacttatggcactaaattgctgggagttggaagccatcttctcaattataattctggcttcagcaggggtcatgtctccaagggctccaccactggcagcatctatcatacttctctccatgttgctgagtccttcataaaatatt

SEQ ID NO: 203277 - DNA, 443 bp, Glycine max
  unsure (1)..(443): unsure at all n locations
agctttagatgcctttaaagnttttagtgttgtaagtgagaaacaatatggagaacaaattaagattgtgagatcagatagaggtggggagtactatggtagatacacagaggatggacaagcaccaggttcatttgcgaaatttcttcaagaacatgggattgttgcccaatacactatgcctggttctccggatcagaatggtgtggcagaatgaagaaatcgaaccttattagacatggtgagaagcatgaggagtaatgtaaagcttcctcaatttttgtggattgatgctcttaagacggctgcgtatatattaaaccgagttccaaccaaggctgtctcaaagacancctttgagttattcaagggttggaaaccaagtttgcgacatatacgcgtttggggatgcccgtctgaagtaagaatttataatccacaag

SEQ ID NO: 203278 - DNA, 372 bp, Glycine max
  unsure (1)..(372): unsure at all n locations
tatggtatccatggggctntccaaaccactatcttcttatgcaaganatagttaatccattgggagttacatcccgaaggatatgatcaaatagctaattgggtcattctatctcagtaccaactctattttgttaaatgggtttttttttatggataatcgattctggtgaattgggaagagttacttcatgtataatgccttctattccacaaaactcattaaataaaacatattcaccactcatatcggatctaatccattttattttcttatttattttattttccacttttgctttatataaaagaaacatataaaaaactatacaatatatggatagcatatgaatgaccctctaatgtttttgct

SEQ ID NO: 203279 - DNA, 357 bp, Glycine max
  unsure (1)..(357): unsure at all n locations
ttcttttccatgggttaatacaaaacatttgcaaccaaaaactttgaaaggggagatgtttggttttctaccattgaaacagttatatggaagtttctttaaaatgggtctcattaaagccctattcatgatatagcatgcagtattaacagcttcagcccaaaattattttggaagaggagtatcatttaataaggttctagcaatttcttccaaagacctatttttcccttcagcaactccattntgttgaggggttctaggtgcaaaaaagttatgttcaatgccatgcttatcacaaaataaatncaaattctttattttcaaactcacccncatgattacttctaatggata

SEQ ID NO: 203280 - DNA, 448 bp, Glycine max
  unsure (1)..(448): unsure at all n locations
ctttaagttcaacctactatctgtttttggaattaactatgtcttttatcatnttacttaaaattgccttatttactgtccgaaataaacagttgcataattaattgatattggtttaaaattaaaaagtcattgagaagttaaaaagactaactctctggtaatgtgctatgccttgtttgataaaactaaataccattaattataagagattactgtccaaaataaatagttgcataattaattgataccggttaaaaatcaaaaagtcatttgagaagttaaaaagactcactctctggtaatgtgctatgccttgtttgaaaaattaaatatcattacttataagagataagaaatgcgttatataatatanatatcaggtntggtaaactactgcattgaactacctacaaacacatttatntatttggttaatattctaaat

SEQ ID NO: 203281 - DNA, 390 bp, Glycine max
  unsure (1)..(390): unsure at all n locations
tcgatgtgggtccaaaaagaggaanagttgatcatcctactaagacgactgagaaaactggggcaaatgaagagggtgagaaagagggagaaacccatgctgtgaactgccatcctatacggccaaatttcccaccaaccccacaatgtgatatctcagccaataacataacctctcccttcccaccaatccttcccttatcgaagggctctcttgatgcactcacaagtctgtttcccagacatacacctagtaacttactcactcttaaaaaacatccaccctaaatgggcttgttctaatattgcaatttgttcctgtgcgccaaatactcgaactcatttattcatcttagttaaacacaaagaaatggaccctacatcattatgc

SEQ ID NO: 203282 - DNA, 316 bp, Glycine max
  unsure (1)..(316): unsure at all n locations
accttagaaactaagctttaagttaggttacctttttattaattgcacangcttacttttgtcataagttactcctaataactcataataataagcttagctactatgatgtttttcttaactttatccttactatattattcgatttttttttttttactatttcataaaatttaaaaaccttttacttatgttaacattcttccaaacactagatgaaatttattttcttggttaatgaaaaaatacctttttatttaaaaaaactgtgttggaatatatatatgatgacatctagaaaagagttatacaattg

SEQ ID NO: 203283 - DNA, 447 bp, Glycine max
  unsure (1)..(447): unsure at all n locations
aagtcacctgcggcatgcaagctgaggatattgcctgcaganagttgtttttatgctgctctgctatgggccaagaattgaaatttaagaagaattggtgatgcattcctaaatgcaaaatcaattgaccattgctttttcttatttcttgttacataaaaataatatatagataattttatgttatcttgttttgaaattgagttttaagttatatgattgagttctgtttatggcagatccagaggacgaggaagaatacaagaacgtgcgtagagctgtgaaggagttccgagtggcaatgaatgaatattataaagcagnatgttgcattctttgtttgggttatatttagttctacatttgatcgatctagtagtttcctgtagctctatctgcgatcatatgtaaagactaatgggtctcttgttacctaaggctatgttt

SEQ ID NO: 203284 - DNA, 362 bp, Glycine max
cttagctggagagtaggtacctagcaaattaattcaatcgaggaaggtacgtaattaatattggatgaattgttacctgcaaaagctggtgttggttgtcccaaaaggttctattctcctcgacggtatctctgtgatcctcgtcttcatcgaaccgatccatttcatcactgctagcactttgagctaacaacgtttctccaatatcgtcaagaaagtcgaactcaacatcggcaacaacgcacgtgacgtcacggtggtgactggccaaaaacctcgtgactcttctgccggcggccacagaggttccacccatgattatgattaacgtagtagttggtttgtctgactcacatacattt

SEQ ID NO: 203285 - DNA, 380 bp, Glycine max
agaccttctctagtttcttaaaaagactctcctaagactacaataacattgataactcattttgaattggagttgcatcaaatggatgtaaagactatgcttctaaatgacaacattgatgagataattgatatggtgcaaccataataactttatctatgtgatctaaagtttatggtatgcaaactaaagaaattcatttatgcctttaaattggtttccagtcaatgatttacaaatttcatcaagatattacctgttatagctttgaagtaattttgcgttatgattgcatataccaaaagtttagtgggagtaacattgtcttttttgtattaaatggtgatgacatctttatatgcataataataagatattct

SEQ ID NO: 203286 - DNA, 387 bp, Glycine max
aattgtatgtatacactgacttctgatgatgtcaaaagcaagaatcaaacaagggctcgcttcaagattaatacaatattgtttcaacaaacaaagccttgattcaagatatcttcaagatcaagccttgcctcacaatgaaaggtttcaagtcattcaaggcacatgtaatcgattaccaatggcttgaaagtgtgtaatcgattacacatcatatgtaatcgattaccagagactctgaacgttgggaattcaaattctaaatgaagggtcacaactgctcaagataaacaactgtgtaatcgattacacttactctgtagttcgatactagagaggattctcaagatatatcgcgcacagtcacatcttatcatttggattttg

SEQ ID NO: 203287 - DNA, 251 bp, Glycine max
ctcagcgaaagggatattaataagcaccatcttaagtatctcaacaaatctagcaaattgtccctcctcactcttggttatcaatctttgagggaaatgagcactaacctaaagaggtgtcagtaccttcttctcatcctacttgattgacttttggctctctacaataagagccctttttcttgtggtggagtggctttcttcctcctctttagcatcgaggtcccatcaatatgaacttcatctctctc

SEQ ID NO: 203288 - DNA, 415 bp, Glycine max
agcttcggaagagagtgatgaggttcatgtctctaaggcagagcttgaaagagcccgggtagtcgaagagaagttcaagtccatagccatcaaagtctgaaaagagtatgatgaactaagggacgtcaatatggccacagctgaagccttggaacgagaaaccaagaaggcccgaaaggaagaacatgaccaaaacaagttttgaggggctttatagggcagcaatagtgagcccaagctccgaagaggtgaaaggaatcatcacgggtcaaaggcatgatctggaaggacgagctaaaggcttgccttatgtctgaaaagatatctgtcccaacagttaaagcgagactgaagggaatatgtgggccatcatctattagtgcaataagaagcttaattagcggcgactcacgag

SEQ ID NO: 203289 - DNA, 387 bp, Glycine max
tcaagctttgtgtcttctttaataaagatctagttgtagagactccctactagtggttctgtgttaacttttgatatgtgtttgaattgttctgtggagatatctggtaggatattcttgactgatttgatttgtttgcctttgagccagattgatgttattcttggtatggactggttatcttccaaccatgtcttgttgaactgttttgataaaagtgtggtctttgatgattctggagtgagtaaggatatgatgtttatctctgccaaccaagttgtgacatctttaaaggaagatgctcaagtatacatgatcttgtctagcctataagtagagacaaaggtttctatgtgtgacctcccttaatgcaagctccattggagc

SEQ ID NO: 203290 - DNA, 404 bp, Glycine max
  unsure (1)..(404): unsure at all n locations
agcttgactntgcgggttgatnttagccttattttcactntatttattagtcaattcaattaagaaagagaaatcccaaagaaaaacttccgattgatttttttttgctttattttactaaaaggtattttntgattattatattattattttacctctttttttatttccaacgtggttacggcacgaccgaacggtcagatttcattttaacagaaattaacggatattacaaatcaaatgatcgatgaaaatttattttattttttgattaggcaagaaatgacttaaataaatgactgaagcacgtcaaaagagggtacggaaagtaaatgaaacgagaaataaaagtacacgaaacaaatggggaccaccacgagtacatagaatgaattaaaagctcg

SEQ ID NO: 203291 - DNA, 431 bp, Glycine max
  unsure (1)..(431): unsure at all n locations
taccagaagcgccaatcagtggactntggtgctggtgattttgcctgagctatcatgagtaaagatcgtttacccactcattaatacaactagcttattgctagcaaaatcgagtcatattcatagtcctgatgctttcaatgttaatttccttattgtggtaatgcttcttctgatgatgagatggcttttgatctgaggatgaatcttcttcaccctgaaaaggatcctgcagtgcaagattgaccaaagttgaccaaaaaaagtcatctgtgtccatttntttacaaaggagtacactttttcgaatggaaacgaccttctaaagagactgcattccctactagcaatgtgttgatggatattnntagccanatctattgtaaagggtaaaanttgcaatttatcttttatggttttagtcaaatcta

SEQ ID NO: 203292 - DNA, 465 bp, Glycine max
  unsure (1)..(465): unsure at all n locations
agctttatcaccagtctgatcaaagcatttttcaacaatgcatgagctggaaggttgggtgtggggataaagtcagcttttggaaagataagtggttaggggaaggtcctactcttcaacagaaatacaatcagctgtttctcattaatagacagcaacccgaccttatttcaatgatgggaaatttctctcaagataactggagatgggacttgaaatggaggaggaatctgtttgatcatgaaagtgatctagctgtcaattttatggaagaaatcagctctatacatattcagaggcatgttaaggacatcatgacttggaaagctgatcctagtggtgtttattccacaaagtcagcctacaaattaatgataacccnctctactccagcctctgaactgagatcctcaacattactatggaaattgaaaatntccccaaaagctgcagttttcacttgga

SEQ ID NO: 203293 - DNA, 396 bp, Glycine max
  unsure (1)..(396): unsure at all n locations
ntacatgtaaagganaagggtacaggggagggatgaattttataaggtgaaactatatataattaagcacgtgaaatagtttctaattcttgcagtaagaaaaatgtaaattatatatcttaccagataaaaacacttattttaaatactgcgtttaatggtagaactatatataattaagcacgtgaaatagtttctaattcttgcagtaagaaaaatggtggtgaaatgaattttcatttctgtttagtctgattagcctgtctctttgtcttggctagtccatgtgattgattaataagaataattcggtgtgccaagctgtaagccacattctactttccccacccagcccaaattatgtgctaaaacagtttacacattctacttctgaat

SEQ ID NO: 203294 - DNA, 444 bp, Glycine max
  unsure (1)..(444): unsure at all n locations
agcttatttagttattatgacctttaaattgatcaataacctacctctaaatatactataaacaagtttatacgtatataagtaagcttaaacttttacaaaaatcaataaatttattattattttttacttaaataaattgacctattacgttttaaaaaggttgtttttaatatatagattgaagtctaactttttacttaatacatattttaaaaatatcttgatttgtttagtaaataaatctaatctgacttaagttcattgtgagataggttatataaagctttgtcccctggtctcaactatttctgctcctctaaagattagtttggtaagagtgacaacaacacataaacatgtttcattgttagaatatttatatcgatgattatcgggtaaattntatataaatctcacttaaattacaattaatgtctatat

SEQ ID NO: 203295 - DNA, 331 bp, Glycine max
  unsure (1)..(331): unsure at all n locations
tgatcatcctgctttgatgaatgagaaaactggngccaatgaagaggacgagaatgaggaaggaacccacgttgtggctgccattcctacatggccaaacttcccaccagcccaacaatgtcatcgctcagccaatatcaacccttcacattacccaccacccagtcatccacaaaggctatccncaaatcatccacaaagtttgctggccgcacatccaatgccaagtgcaaaccaaaacaccaaccaagaaatgaatnttgcagtgaaaaagcctgtagaattcaccccaattctgctagcatatgctaactngctcccatatctactc

SEQ ID NO: 203296 - DNA, 348 bp, Glycine max
atggatagtaaggatcgagccttgggcaaatggtccccaaattgggaaggaccgtttaaaataattcagatttattcgaatggtgcttatgaattagaggaattaacccctcagaaacgtactttgagtataaatggtaaatatttgaaaaaatataaaccaacactgctcgaagttaaaataagcatagaataagaaaaatactggaaacataaaaatggcgataatggtaaattgccacaaaagggcatttgtcagtattacatataaagtagaatcgaaatacagaattcgaaataaagaaattataagttctactaatgcatgacttagtcctcatatagtttc

SEQ ID NO: 203297 - DNA, 353 bp, Glycine max
  unsure (1)..(353): unsure at all n locations
ctggatggaacattgngcctgttctactcaacaatttggttcattgtggatgatgttgtatctcgcttggtcctacaagtgttgaatagaggagctaatccaactgaatttaacaaaactctccttgttcttatcccaaaggtaaaaagaaaccctacttgcactagtgattttaggcctattagtttatgcaatgtcatttttaagttgatcactaaaattgtgcttaattggcttaaatgtattcttccaaatattgttggagatacccaaagtacttttgtccctaatagaatcattattgacaatgctctagtngccttttagtggtttccgtatatgagaaacaaaat

SEQ ID NO: 203298 - DNA, 469 bp, Glycine max
  unsure (1)..(469): unsure at all n locations
gtcacctgcggcatgcaagctngatcatgaattaatcttgaagcaatgctttgtttgttgaagcaaccttgtattaatctggaagcaatgcttaacctttgaatgtttgttgaaataatattgaaagaaaccttgtttgattattctttgacatcatcaaaatcatgtattcatacattcacacggaagaccccttatcatgtatatgactgtgttagatgagtcaatggtgtctattacttgagcaagaagttcatggcgtgcgagatgaactactttttgctagaaaggacgtgttgtgccttggtgtgggcggctcaccatttgaggcagtacatgctaaattacactacttagttggtatccaaaatggatcccgtcaagtacatctttgaaaagcccgctctctctagactgatagctcagtggcaggttctattgttagaattcgatattgtctatgtcactc

SEQ ID NO: 203299 - DNA, 377 bp, Glycine max
  unsure (1)..(377): unsure at all n locations
tgattctgattagatatcattctgatatgatngnntccttatttacattaggatgggttccttatttacgttattgatttagtttcctatttactatttttatgtaattgatttagcttgattattatccctataatgaagggattagattattattttaattaaacattgattactataaataaacagccaagggtacattctctttaagcatctagaatatacaattcagattcaagtgttatgtgtgtgtgtgtgtggaataaactgtggtaaaataaaaaagagaaaggaaaaagaaagaggaaggactaaagaaaagaacaaaaaaaataataattgatgctacatgtaaaaaacagaagcgctggactgga

SEQ ID NO: 203300 - DNA, 400 bp, Glycine max
  unsure (1)..(400): unsure at all n locations
taatacatttgctgcccaagttcatggtcttgcggtgaagatccttataagcatcttagggagttccatattgtttgttccaccatgaagccccctgatgtccaagaagatcatatctttctaaagccttttcctcattctctcgagggagtggcaaaagattggctatactaccttgctcccaggtccattttcagttgggatgatcttaagagggtgttcttggagaaattcttccctgcatctaggaccattgccatcagaaaagacatttcaggcatcatgcaacttattggagaaagcttgtatgagtactgggaaagattcaagaaattgtgtgcaagctgtcctcaccaccagatntctgagcaactccttcttcaaatattttatgagggac

SEQ ID NO: 203301 - DNA, 462 bp, Glycine max
  unsure (1)..(462): unsure at all n locations
attgcgaaagccccactccatcattaggattagtatctgacatctcaaacaaacaaatcaaacgtaacaagacaattatagttgctggttgaatacctcacccactcaagtgtatcacacaattatggcttttctctaatgaaacactcttgccttttaccactctaattccccttgagttcttaggcaattcaagagattatggccacaacaaagaacaattcaccaatatgtgttatgtaaggctagagagacaaggaaaaggttaaccaagaaaaaggctaacaatgtttttaggcacaaatgaaggaaataaacatcagaatttaggaattcaagtaacaatccttcatgcaaccaatatattaccttagagagattnttttttttaaagttctcaagcatgaccattcacgcaattgtttttttttttaatttgctatacgaatctgctcttttttt

SEQ ID NO: 203302 - DNA, 418 bp, Glycine max
  unsure (1)..(418): unsure at all n locations
gcggctgcaacttgagcggcacgagtagaactatttctttttttaccaaanttttattctgctagataatatatgggcaggataaaaatgaaattccagaatctttatgctggtggaacaaatggcatcggaataaataagaagggcgggttgaatatatatgaacgtgtcttgactaattaaaaatttatccttcttaatgtttctagattcaactaggcttttactactaagttaagaaagtgaagaacataaacaatatcctaaccaaaagtaaaagcggcatctaaaagtacacagaggaaattatagagtgtagagaagatgaagactaacacaagattcttactggtttgacaacaacccgtgcctacatccagtccccaagcaaccaacaagttttcgagaatatctttca

SEQ ID NO: 203303 - DNA, 313 bp, Glycine max
cccgggcatagtcagtcagtgttaacctgtgatgtacctatacaagcgagctcctggcagtcaacagataaaagaacaaagaccacatagcaagggggtttgtgtggtggctggccagcaatgcatcaagagtgagaattgggatatggcctctggtaatcgattaccaagggtagtaatcgattacaagacttaaaagtgaagacaggaagctaagatggcctctggtaatcgattacaaagggagtgtaatcgattaccaggctttgaaacgaaattatgaagtaaagagggcttctggtaatcgattacc

SEQ ID NO: 203304 - DNA, 173 bp, Glycine max
gtcactcaggaccatgatatccgattcagagagaagtcccggcgggcatcactggtacccatggcagtcgacccaactagtctcaattatgccagctggctacgagaggcggcaaatgaacctgggagggagggatccttcagcgagcttaccattcggattcttatgtgaaa

SEQ ID NO: 203305 - DNA, 190 bp, Glycine max
accaactaccaactactttctaaccattgttgactttctaataactgacttttaacatggctaatatccctcttttagctggagaatgtatgttgacattttcaacttgcaatggagaaatagggatgcaccaactgggagagctttggtgtaaatgtgtgtcaatagatcagcggaagctataagcaat

SEQ ID NO: 203306 - DNA, 359 bp, Glycine max
  unsure (1)..(359): unsure at all n locations
agcttgtagaattatggggngctcttcacttgttgtaacaaggaggccgccgggcgatggcgcacaatangttttctccatccacaatgcgctcataaacccaccattcccggttgtccacctccaactgagcttacatactcccacgtaacctactatctcttttttttttacaaccgtggtcccattcatcctccgaagctttcacaacttccatagcaaaacaacattcatacacctcaagctttcatagccaaccaaaccatagtaaaggcagaaaactgtgctcaacacctaaatcatacacaccagtattcttacttagagaccaccgtacacatttcctttatccaatatgt

SEQ ID NO: 203307 - DNA, 407 bp, Glycine max
  unsure (1)..(407): unsure at all n locations
ttacttgcatttactgcntttaccatagaagtagtttatttcttgttttaaccatcgattatcaatgttgttccaacaatgccttacttctgaataaaactctatctaagaagcaagttccctgagttcgatactcggatcatttcgttttaattntaaatacttgacgacccagtgtgctttccggtgtttcatttcccttgaatataattgttgaaaattagagaaaaaggaaccatatgggaaaatgaacaatggacgtgtctctggcatgccangtaagggaagtcatcagaattgacaactctgtcctttttctgaccgttggagagtacattgaagaccactcgtaacaattatttgttgtaacaagcccatcggcacactcgcaatactcttgcatacgt

SEQ ID NO: 203308 - DNA, 453 bp, Glycine max
  unsure (1)..(453): unsure at all n locations
agcttgtcatcgtgagacatcaaaggctattattttaataaatgtgggtaggaaaaattcaccaaattgatagagaaaaatctaaaatcatacatcttaggcaaataaggcatgctagcccccaacattattgcattttgattccatctttggacattcaaattgttgtttatttttcctgttatcttttcctttgccttagtctaaatttcaaacttacaattcggtatctctttcttcttttgtttctcctcatttcttaataattggatttgcatcacttaagtacaaccaaagtccctctggattcaacagttgaacttcaatttcaatctttactacttgtgataaaattaggacacttgtcaatctattaacaagattttggcgcttgtgatggggactttggttttcgtacttggttgttacaaatcccaattngagagcaatcat

SEQ ID NO: 203309 - DNA, 391 bp, Glycine max
  unsure (1)..(391): unsure at all n locations
gctatcttacctatctatctnccagatgtcttttgcaagatttgaatagataaaaacatgaaggtctaattcaagatgttntctttggtgcatgggcataatgcaatcactctatgtctagcattgattntattaagatgtccctacctttgagttctactaanaattatcctctctcaagcgactaatccctaaaactgatgcatataaaaccttcaatgtatttctactaaggattaccctttttcaagcgccaaacccctaaagatgatgcaaggatgaagcatataatacatttgttggcattntaggcctcccaagccctaactaaagggggttagccttccattgtcatgagagactttacacttttgggggtgatatggatgga

SEQ ID NO: 203310 - DNA, 454 bp, Glycine max
  unsure (1)..(454): unsure at all n locations
agctngtatagtttcccaattcatggttatttttggagtaaatttgtaaataaatcttgttttatggttaacgctgtctctagaagatttccattggatttaatgatgaaatctgtgcattttcaagtgaaaaaaaaggctaagttttgaattgcaaaaagtagcagttgggctaagctcagcagttgggctaagcgcaacttcagcgcgcttagcgcaaaggagaatttggtagagcatcagcatcaaagttgcgcgctaagcgcgagattagtgcgctaagcgtagtaggtgccttcagccaggctaagcgcgaaactggtgctaagctcaattccacttacccgcgctaagcgcgaaggtggcgctaagcgcagcgtctcaatttcagagcctatataaagcctgtcttgtgcagaataagggtacaactttcacaacagttttacagact

SEQ ID NO: 203311 - DNA, 386 bp, Glycine max
  unsure (1)..(386): unsure at all n locations
ctcagcttaagagcatnccttctttcgtatattttcttcttgttatncaatctcaacagttccatttcgtgttcctgttacttttcaaatagtgttgcaagagacatgttaaataaatcttgtgactcaccaatggttggtaccttaagtatccattctctgcttaaagatctcaatactttatttatgacatcttcatttggaaatttcttccctagagatgcaagatgatttattatatgtgtaaaccctttttgcatgtcatgtatactttcatttgacatcattctaaataattcatactcatgagctaatgtatttatccttgaacttttacatctttgggccctcatgtgctactgaaggattccacattctttgacttt

SEQ ID NO: 203312 - DNA, 321 bp, Glycine max
  unsure (1)..(321): unsure at all n locations
catgcaagcttgactttgcgggttgatgtttatcctttatttcaccnctttttattcgccaaggcaattaagaaagagaaatcctcaagaaaaacttccgaatgatttttgtttgctttattttactaaaaggtattttctgactattaaattattaatttacctctttctttatttccaacgtggttactgcacgaccgatccgtcagattttattttaacagaaattaacggatattacaaatcaaatgatcgatgaaaatttattttattttttgattaggcaagaaatgacttaattaaatgactgaatcacgtcat

SEQ ID NO: 203313 - DNA, 448 bp, Glycine max
  unsure (1)..(448): unsure at all n locations
taccagaagcgccaatcagtggactgtggtgctggtgtttttcctgagctatcatgagtaaagatcgttacccactcattaatacaactagcttattgctagcaaaatcgagtcatattcatagtcctgatgctntcaatgttaatttccttattgtggtaatgcttcttctgatgatgagatggcttttgatctgaggatgaatcttcttcaccctgaaaaggatcctgcagtgccagattgaccaaagttgaccaaaaaaagtcatctgtgtccattttttgacaaaggagtacactttttcgaatggaaacgaccttctaaagagactgcattccctactatcaatgtgttgattgatattttagccaaattctattgttaaacgttacaattgcattttatcttatttgttttaagcaaattcatcgttaagagacatgaaaaa

SEQ ID NO: 203314 - DNA, 406 bp, Glycine max
  unsure (1)..(406): unsure at all n locations
agcttcnaatggaatatagagaccaatctttagcacatagcatggtcttgaaagaggagttagctgctcgctcaaggtccaaaagaaacttgtctcaacgtttatgcgagacagagaccaacatgctagccatcgtcagcaagtaccaagaagaactgaatctagccacggcccacgagcacaaagtggcggacgagtatgcccaagtgtacgcggaaaaggaggctagaggaagggtgatcgacgcgttacatcaagtggcaacaatgtggatgaaccgattcgctcttaccttgaacgggagtcaagagcttccccgattgctagccaaggccaaagcaatggcggacacctactccgcccccgaggagatccacggacttctcagctattgtcagcatatgat

SEQ ID NO: 203315 - DNA, 345 bp, Glycine max
tggatttcctttgtgagggaatctattcttcctaagatggacccaaacccagtcaccctgatttagaactatgctttttcttcatcctttgcctttagttgaatacacctttggttagttctctatttggttcttaaccctctcatgcaacttctttacaaactatgacctagattccccttctttatgtataaaagaagtgtccgatgggaggggaatgaagtctaatggtgttaggggattaaacccataggcaacctcaaaaggggactgtttggtggttctatgaacccccctattgtaggcaaattctacatgaggaagatactcatcccaagacttatg

SEQ ID NO: 203316 - DNA, 256 bp, Glycine max
  unsure (1)..(256): unsure at all n locations
ttctttaagccganaggtcggcctcatctgttcttgcactccctctttattatccatatttctggaacgagagttatatgggtgcctttgcgccttcttagctatggagagttccttaaagaaacaaacattcttgatgttgccaccaaatcatgaatttgctatgaatgaacagagcacttggatccacctaaaggccctttgttatataacgggttgagttgcacatcttctcggtttataaaaaggaacaaag

SEQ ID NO: 203317 - DNA, 296 bp, Glycine max
caatttaataccgacgaaacggttggcactggtatggatacatgcttggtatccattccagaaagtaattctggaaagacttttaacttaatttctggccaaccttgtacttaatagaatcccttctatttaatataccttctaaaccttaactgcttgatcatcatctaatattttgcttgataagcttgaaaaatgtacccttggatataaaaatcactgatctttgctcaattcccttctatatacaactgaatcaacagcttatcagagaaccctcactacctactccctac

SEQ ID NO: 203318 - DNA, 280 bp, Glycine max
  unsure (1)..(280): unsure at all n locations
atttttgaggagaaaaaaaaagaaagagaaaatcatggtcgaagtgcttctgtaacacttccgtgatgttcttctgataaattccgtgaacgtntttcgccgttcttcattcggacttcgttgttcggtgatcttcaactggttagttttcaatttcggagctttgaattcattctttctttgtatgttttcatcttcatctagnctactttcggnattctttttcttcgtttaagccagtttcgaccgatcgtttaagccgtaatctcacttaattaat

SEQ ID NO: 203319 - DNA, 470 bp, Glycine max
  unsure (1)..(470): unsure at all n locations
ctaagcttatgctgcanacatntacaatagacctgctcaacctcagcagcanattcaaccacaacagaacaattatgacctctccagcaacagatacaatcccggatggaggaatcaccctaatctcagattgtctagccctcaacaacaacaatagcagcttgctccttccttccaaaatgctgctggcccaagcagaccatacgttcctccaccaatccagtaatcgcaacagccccagaaacaacaaacagttgaggctcctccacaaccttcccttgaagaacttgtgaggcaaatgactatgcaaaacatgcagtttcaacaagagaccaaagcctccattcagagcttaactaatcaaatgggacaattggctacacagttaaatcaacaacagttccagaattctgacagattaacttctcaatctgtccagaatcccacaaatgtgaatgccattacattga

SEQ ID NO: 203320 - DNA, 424 bp, Glycine max
  unsure (1)..(424): unsure at all n locations
agtcattttccattcacaattccaatcaatcatgctcaatatgatgcaatgtggtaccacttgacctcaactctcaaatgcaatgtggtaccatccccaaagaaatagcctaagcatgtccacacgacactcttacttaagaaaactatgcagttagtgtcgaggtcacccttgcttgcacaagcaactccccctccccacggngatctgcctgagtctcaagggagttctaaactgagtgacatacccccaagtacaagtatttctcctcatgagaaactgcaagtactcactgacaaagtttatactattttcatgtcatatgaagtatgaaacatgggcaccatcaatgcactaatcacggataattaaaagatgtaagccatccccctccagagatgcttaaaaactcttaaccactcta

SEQ ID NO: 203321 - DNA, 302 bp, Glycine max
  unsure (1)..(302): unsure at all n locations
tgctgcanacatntacaatagacctcctaacctattttctatatagccacaacttatcaattatgacctctccagcaacaagtataatcccgggtggaggaatcatcccaaccttagatggtcgaatccttcacaatagcagcaacaacaacaacaaccttattttcaaaatgctgctggcccaagcagaccatacgatactacaccaatccagcaacaacaacaactacaacaacaacaaccacaacaaccccagaaacaacaaatagttgaggctccttcgcaacctttccctgaagaac

SEQ ID NO: 203322 - DNA, 400 bp, Glycine max
  unsure (1)..(400): unsure at all n locations
ctccatatttggccctaagntgtaaaacatgatcaagcttggattcaaattggacaaaattttgtttcagctatatgtcttgaacaaaactatntaatacctccttaatgtgagtggccatcactctttgaatagactcacttggaattggcaaaggatctcttcaggtgcttgagagtatttgttctaacctatgattgtcattagctgggaagtggatgtaaatcataatactggtgattaaactatattgcatgatatctgttattacttttatcataatcatataagtgcataatccagagattggacgacaatatctatatcatccaatctagtccttatgctgcaatctacctttctgtccaactgagcatccaatgacgcctaacaatgtatc

SEQ ID NO: 203323 - DNA, 426 bp, Glycine max
  unsure (1)..(426): unsure at all n locations
ttatagcgcggtctggaacaaggtcagtggtcgttatatactaagaccatgttccgagtacattaaatttggtacgaccatgccctcctgatntcacctggaaatggcagtggagaacccccgctttacgcaacagcataagaaaccttatggtttaaagctctgtattgggcctaggccttagagtttttcctttggctaaggctttgtgtcttttgttgttgggtttataatacaaggatctttcttcatctggtcctacgtctctacccattctcattcatgtgcatgtttacttctttttctgaaacggcagatccgatgactagtcctcccgaaaggactaattacctggggaccccgcctatctgactctgagcaagacatgaatcaaaccgaagatgaacgaaacgagaatgtgggact

SEQ ID NO: 203324 - DNA, 474 bp, Glycine max
  unsure (1)..(474): unsure at all n locations
gtcacctgcggcatgcaagctngtaagaattgcaagatcatcttccttgacatctccttgaaaattattgccatcaatacgcagagatgacaatttagagagtgatccaatactttgaaatggatttccactgaatttattaatagacagatagagatatcttaatgatgaacagtttcaaaatgatcttggaagagcaccaccaattaagttgttggaaaaatctaacatgtcaatatttttaaaagcctcaatttgatctgtcagattgcctgaaagttgtgaactccgaactgcaagtgttgtgagtccatgggaaatacaaggagcaagaatttctaaaagttcattaacctgttggttgatttcagatatgataaacctatcttccttaagttgcagagattagccaaagaagttggaatggttccttcaagtagattatatgacaaatcaagttcaacaagagaagtc

SEQ ID NO: 203325 - DNA, 416 bp, Glycine max
aactaagctgtagattctagacatttcctgacaactcttgaaagatgtctcaattgaagagatgacaattagagatattcatgagatgcaatttgagagtgacaaagactttcaatcaattccctgaatttatcaatagacagatcaagaatcttaatgtgaaagttttccaatgatctagaaagggcaccccaattgagttgttgtaaaatctgcatgtaacatttttaaaactccaactaatccgtcaattgggtattttatcatctaggataaatttttgtgtttttttctcatgtgggactttcaatttgctccaaagtgatagtggatttaacattaagtatagtctacattatatgattatatttttttactaatcgaaatattatgtctcttttattctccagcattaa

SEQ ID NO: 203326 - DNA, 457 bp, Glycine max
  unsure (1)..(457): unsure at all n locations
agctgaaatactactcaattacgcgattcatatcttcgantngaccatcactttgaggatggtaagccgaactgatgaataaagggtccctgttcgagaccaaactcctgggaatgccatgtatttttactacaatgtcaatgaacaaggaggccaccatatgagcagtatgtgccggcagaagtatacccaaatgaattccttttgaaaagtgatcaacaactacgaggagaacagtcttgccctggtagggaggaaggccagtgatgaagtccaaggagaagtcctcccatggacgaaatggcactggaagggggcacaacaaccttgctatcctctttgtctcgtatactggcattcgacacagttggccacgaactgtgtgatgtcatccctaaatctaggccagtgcaaattctccaagagcctatctatcatcttcgtgacccccatatgc

SEQ ID NO: 203327 - DNA, 441 bp, Glycine max
  unsure (1)..(441): unsure at all n locations
tttaccatacctttataccatttttgctccttcactccctcagctagggccatgtattctgctttagtagctgaaagagcaacaactgattgntgatttgctttccaactaattgttataccaaacaaagtaaatacatatccggttaaagactttcttgtacctacatttcctacaaaatctgcatctacatagcctgtgattgctgcctcatgtgttgtcttcttgtaccttaatccagcattcaaagatccatttagataccttagtgtccacttcacagcttcccaatgtgcactgccaagatctcccatgaatctgcttataatacttacagcatgagccaagtcangtctgctgcaaaccattccatacattatgcttccaacaccactgacatanggnngttgattcattttagacctttcttcagcctgttct

SEQ ID NO: 203328 - DNA, 375 bp, Glycine max
  unsure (1)..(375): unsure at all n locations
gtcaggaattctgcctgcatgtgcaccacaacaaataatggaccttgaaggcttattatgtacttcgttgccgctcattatgagggaacgggaatgtnttgaacctcacgcactatgttccaaaggcactataaattccattaaaccataactaacgacacaaacttgttcatcgagatctcaagtcatgcccggagtcattagaaacaagctcataggttaaaccatacaaacccatcatccttttcctatccatcanatagcaaacggacataatttgctaaactcaaaaagagcagagcttgatgacaccaaataaagattcctctgtttccaaggcaataaatgcccacacagcacccaaatatataacac

SEQ ID NO: 203329 - DNA, 317 bp, Glycine max
aatgctcggcacttattgcactaatatctctttcagatactgaaccttctttaattgttggtctaagtcttggtcatcatcatcattaatgacattgattagattggaagtgtccatggatctcattttggatgattcttcctaaggttgacgtgattcatggatgactttaactgcactattaaacttgtctaatactcactattgtataacctatttcttctataaggatttgcgttcctaattcccaacttcttgttttctttccctaccttaacggttgaataatgttttcttctgatattgatgagattctc

SEQ ID NO: 203330 - DNA, 461 bp, Glycine max
  unsure (1)..(461): unsure at all n locations
agcttagcagaccagatcaacctcagatttcttggttgggcactaagcatgagacttgcatcttatcgcatgaacagagatgcgtntagcgcgaggtttgcgcttaacgaaaagactgttnttcagaaaatatttttctatgttatttttcaatcctttttccatgaaattgaaacccttatgttaaacatccaaagattagctgatatactcctatgtacatactatatagaaagttccaaatgatttaaatgcgtgaaaataaacaaagataatagaatttaaaactgggttgcctcccaggaagcacttctttaacgtcattagcttgatgcttttacctcactgggtgatcttatgttttggttcctactttcagaaccccttccattacctgtaagcanacattgtgttctggagtacgcttgtcttcaacaaataaatcaaaatcaattttctga

SEQ ID NO: 203331 - DNA, 359 bp, Glycine max
  unsure (1)..(359): unsure at all n locations
tgngttcctacgcttagaagtgcatgtgggctcccatttcgaatcccctatgctgtccctatatatgtaaaacagtcccacaatcccaatcttacaaaatcatattcatatgtcattgtggcatttcaccgagcacttggtgggcgcatgtttaggcataaatagcaagagaatgggggcaatgtggcatgccccattgtttcagaatacaacataggcctaaggccattccctacaacccctcaactctaacaaatcaagcataaaaaaccccaaaactgccccacatatatgagcacattctcacaacttatagcaccaaaagatgaacaaaatgcaccaatgggaagcctaaaact

SEQ ID NO: 203332 - DNA, 399 bp, Glycine max
  unsure (1)..(399): unsure at all n locations
cacctgcggcatgcagctgaacgctattatanaacaaggttttgttttatnntttatatnanaganagatatatatatatatatatatatatatatcttaatacaaatctaacatatgtactttgatcaatgatattccatgtgtttatgaagttgtgagtgacatgaaaccatgttaggacaagcctactaccaatagtggaacaaattcatgggagaggcaaggttagggttttcctttctactgaattgttgtgagtgcttgagaacaacactttgtgaataccctttagctgaaatgtgggaaacacaactttggggcccattcttattaatatagacaaaaaccctttatatcatttttatacaaaaagggttgatgcgtctattaaaacataa

SEQ ID NO: 203333 - DNA, 293 bp, Glycine max
  unsure (1)..(293): unsure at all n locations
gctttatcctatgaattctgccatcccgcagctgattatctaactcatgtcgnagagctggacttttacaggttcggtggccttatcccgtctctgtggtgaaactatgctgcaggttgccaccaaggatgctgtagagagacatgtgttttctgttgctaaaggactacttataacagacggcatccctggtttgtatagagggnttggcacagttatcactggggcaattcctgccagaatcatattccttttcactctagagaccacaaaggtgactgccttcagaatgc

SEQ ID NO: 203334 - DNA, 431 bp, Glycine max
cctgatgcatgcaagcttgattaggagaattattgtacagtgtattagggaaccataaacataaggctgtttcatgtacaattatagaaattaagaaatcggcaaacctaaaatgataagggtaaccataaatatttgtgcgaaagaaagcttagccatctctaacaactatagtatcacccacaacgaggtttattcttaatgcttagttgtgtactaaaacataaactattgtctatatatagactaagtagtttatcaggaataagatataaactgtatcagtgcaatgaaaacgtctatgaaatgttaaaaaataaaaactacacggctaggtcaatggtcaattatgtgagttacaggtcaatagtcaattgtgtgattatattcttaataaagatgcaatataagtataaatacgacatacaatg

SEQ ID NO: 203335 - DNA, 387 bp, Glycine max
gataccttaaggcaggttcttgggatatgtgaaatctgaaataatgcttgatggcaattggcaatgttgctgcccttaaataaagaatgaataaattacactagttaattctaagattttgtgaaattactttttgttttaactcttttaacgttaacatttaccttgtttgtagacttcttttgagttgggaaaaaggaaccatacccaccaaattttgcaccggacaacaaatactgctctttgatttctcagtacaaggttcgaagtttattattccaatcatgtttaattgtgttataaaatctgcaattattagacaaaaataggtacctagtttttagctcccacaaaaccatgatttatcaataaaatattagtttatga

SEQ ID NO: 203336 - DNA, 414 bp, Glycine max
  unsure (1)..(414): unsure at all n locations
tcaccgactttatgatcaaagngggtctgaaaagaggcaaatctgatcatcttgctttgataaatgcaaaaaaagctgcggcaaattaagagggtgaggatgaaggagaagcccgtgctgtgactgccattcctatacagccaagtttcccaccaacccaacaatgtcattactcagccaataaccaaccttctccttacccaccgcccagttatccacaaaggccatccctaaaacaaccataaagtctgtcttccgcacttccaatgacgaacatcacctttagcacataccaagagcaccaaccaaggaatgaattttgcagcgagaaagcctgtataatcaccccaattccaatgtcctatgctgactngcctccatatctacttgataattcaatggtagccctaaccc

SEQ ID NO: 203337 - DNA, 457 bp, Glycine max
  unsure (1)..(457): unsure at all n locations
tctcataaactagatacttaagtcattagtggatcccgttatgcagnatgtagtaaatttcaattaacactaggtggatntattaaacatcatcatacattctgtttaaaagccacctaagtactttcttccagaagttgagtcttcaaagttggcaatcctactgggacaaaaaagacaaaacgatgcctcaaaaggacatatctattaatttccacctcctcctaacatatgaagaggggaaggaggaataatgaaaatgcacaagctagttattcatgatcaagtgtgccttggcatacattatgtagcttgaaccaacacttctaacattactggtcactagnattgcactaaacataattctagaccttcatgattcttagagtcacatatcgagaatacttaattttcatgtaagaatattttactctccagatagttcacgttttcacat

SEQ ID NO: 203338 - DNA, 445 bp, Glycine max
  unsure (1)..(445): unsure at all n locations
ttaagtcacctgcggcatgcaagcttatagaaattattatangagaacaatgacttttgaagaatcaattcatgtttcctttgatgagtctaatgttatttatccaagaaaggatatcttagatgatattatagaatctttagaacaaatgcacattcatggacaaagattctaaaggaaaagaaaaaggaagcaataaagatcctccagtagaagtcaaagcaaataatgatcttccaagagagtggaaagcttcaagagatcatccccttgacaacatttttggtgacatctcagaaggggtaacaactagacattctcttaaagatttatgcaataatatggcttttgtgctatggttgaacctaaaagttaaataagccatatagatatcattggatagtgctatgcaagaaaactaaatcattttgaaagaacaatgtgt

SEQ ID NO: 203339 - DNA, 366 bp, Glycine max
  unsure (1)..(366): unsure at all n locations
cctataaaactaagctgngagctcttgtcccaatgtcttctattaannccttttttaactcatcaaactttgtgtggtagaataccacattttgctctggtaacagcttcctgngtacaattatatcagtatacctctcccaagcttcttgagaggtgaacctagaccggtcatatctgacttgggaagtgtagaaggagcctttcttttcttagatgccatttggattgtgattgtaatgcaaaatgaagcaaggaagatgcagacaagccagttctagcatgcaaaaggaggcacacaagctcatggttagcaagcggcagaagcgtgggtgtaaaatagcgccaaagtgcttacctttgattt

SEQ ID NO: 203340 - DNA, 341 bp, Glycine max
  unsure (1)..(341): unsure at all n locations
tatttttggactcatgagatcacctaggcttaattaccctttccttttcccatcttccaatatttttttcatttgcaattgacgttggttacatcttataataattgtcaggatgctgtgtgtatgaaatggctgctcacaagccagcttttaaagctcttgtaagtttctgtctatggctggcagttatttggtttttttttaatgtttttaatgaaatattatttgcaaaactttttatattaaggagggaaatttgatggggatacaaatattatattggcatcattaattccatgggggatgttgagctattacatnttggaacacaacatgaaatc

SEQ ID NO: 203341 - DNA, 427 bp, Glycine max
  unsure (1)..(427): unsure at all n locations
aacagctacacacatttcatctgtggttggaaccataaatccaaagggttcccaaaccaatattagtagtgatggcggagcaaaccaatcatcattaaaatcaacggaaagattagaagacatacaaaggaaaaaaagaagcaagtgaaagagaaagttatatggggcgtgcctgacaaaataaaaacggtgaaataagtgctttacagatatactcaccttgtacttccaaacacggtgaaataagtgctntacagacatactcaccttttacttttaggtagatagctaggtttgtgtaattgtttaggtctgagaatttgataggaatatatcggtctccaaatangaaggagtgaggctagcacagcatgacctagtgaggggtagcactctcttgctcccactaaccaaagctagatcatgc

SEQ ID NO: 203342 - DNA, 491 bp, Glycine max
cttagagtcacctgcggcatggcaagctccttaagaagattcctaaagaagctagagcttaactacacatacctctctaacagctaagctcacctccttgagatgagaagctagagcttagctacacacaccctataatagctaagctcacccccatgacaaaatacaaaaaaaatccctactacaaagactactcaaaatgccttaaaatacaaggctaaaaccctgtactactagaatgaccaaaatacaaggcccaaacgaaggaaaaacctattctaatatttacaaagataagcgggctcatacttagcccatgggctcgaaatctaccctaaggctcatgagaaccctagggccttccattggatctctggcccaatctacttggaggcttctatccaatgcccttgtggggaaggattgcatcacaccttgtggcatggtataaagtgtgccatcttgctaaacctatccaccactacaaagat

SEQ ID NO: 203343 - DNA, 218 bp, Glycine max
tcagatcagcccagtcagaccgataaatcagttctgaagaatcggagactcgatcagagagttattcaaatcagagagatatcagatcagaataatcagagactccaggaagttgaaagatttaaaaacaactaccagttgtttcaagagttttcaattttagtccaagtttctctctggatcgtccgttctgatcatccgagcagtgttcaagctta

SEQ ID NO: 203344 - DNA, 335 bp, Glycine max
  unsure (1)..(335): unsure at all n locations
tgaaatattaaaactgaaattaaaatgactgaacaacaatcataaaataactgaaaattaactaaaatgttcaagatgcacaaattttaatgtcccgctccttgggttgctcttgtgcatgctcattaagggccaacacctgagcaactggtgaatcctgagagataggttgctttaactcatgtgctggtgcaaatggtgtggcatcatcacgtatgggtgcaggaaatggctcatgtatctgatctatggaagtccccttctcctgagtcatgtgtgcatctgcatcaaaataagaatgctcangaggggtgagctcattctccccctctgct

SEQ ID NO: 203345 - DNA, 433 bp, Glycine max
  unsure (1)..(433): unsure at all n locations
tacttttgtctgtnctgagggcaacttagattcagtacctataaatacttggtggttagatnttgatgccactactaacatcagtgtttcaatgcaagggtgcctaagctaccgaaagccaattgattatgaaatatgcatctttgttggagatggtaaatcggtggaggtggaagttacaagacattttagattattattatgtactggtttttatttggatttgaaagacacttttgttataccatcatttagacggaatttggttttagtttcttatttgaaaaaattgggttatttgtgttcatttggaaataatgtgttcacgttatcttctaattcagatattgttggaactgattcactcttggttaatgataatctatacttacttgatattgcagctcctatgttgaaactttaatgtaaattg

SEQ ID NO: 203346 - DNA, 414 bp, Glycine max
  unsure (1)..(414): unsure at all n locations
ctgttgcttaatagcttgaatgcggatttgcttttcgcgagaaaggattggagttattgcatagcggcgctgacctggctgaagaaactgttgcgctacgcagtgatctccgcttacccatggccttgatttgatgctctgcagattcttctgcccactaagcgcactgaagttgcgcttatcggtggatgcgagcttagcccactaatgaactaagctcaactgtcactnttagcacttcatgacttagcctctttttcacctgaaattgtacagatttcatcattaaattcaatggaaatattctagagacgggtctaaccatataacaagaattatctactaaatcactacaaaataaccataaagtggggaaactatacaagttttggaaaatggtttctatacaaagtt

SEQ ID NO: 203347 - DNA, 309 bp, Glycine max
ttttatgaaaacactgtatgtgttactatatggacatctcttctcgcatggaggccctaactgcagtcttcacctggcgatttttgaagaacggccctttaccagtttgagtgctctatctgaacctataaatgctgactactacaagcaccttagtcttcaaatgatcggaagtccagtaggactaggaactccctatagacttctggagaagatatagtctattttggtgccctatttcacaacatttaatgtttggcagatccttgctgcaatcgacctgatagagggagaatggcagacactttt

SEQ ID NO: 203348 - DNA, 459 bp, Glycine max
  unsure (1)..(459): unsure at all n locations
gtcaccgcggctgcagcttgaaatggcaactgatcatgtcagggttggtttggntcaagggtaaaagggatgccccacattatttccatgacacaaatgcaaaaatgatgatttggaaattttatgcaaaactggtcatgcatgcacctatgcggacactcaagtgtcaaatttntatggtcatgtgatgctagggctcaggattcatttcctctatttttagtcaatccaatgtttccaaaatatgttcttttatcaatttgtacattcatccgagtccactttgggcgtccgggaaaattttcacagcattcacccctcaggtgtatacacaattttttttaaaaaaactagttatgatcagtaatttttttcaaagaaaagttggaagtcatctcttttcaaaagcatgtcgggttttcagctaaacaacttaattttcttttctttttcctctcc

SEQ ID NO: 203349 - DNA, 464 bp, Glycine max
  unsure (1)..(464): unsure at all n locations
tgtatggttgactctgatgatgaatcannaattgaagattctnggtatattttgctccgcanatataatgttgagactagcacttggctagaaggaatntacaaaatgaaagaaaaatgggctagttgctatatgaaagatgcttatagtataagaatgcaaagtactcaacttagtgaaagtttcaatgctagtgtgaaagattatgttagatcaagcttggatataatgcaaattttcaaacattttgagcgagctgtggatggcaagcaatacaatgaattagaggctgaatacaatagcaggaaaaaacttcatcggctaaggatagaacactcaccattattaaagcaggttaggcaactttacacttccaanatattaaatttgtttcanaatgaatatgaatggagttttgcagcttatcttattcgtcgcaatgagactcatatgtgaatacgtag

SEQ ID NO: 203350 - DNA, 442 bp, Glycine max
  unsure (1)..(442): unsure at all n locations
agctnagagatatagatgaggtcgagatttttntgcttaattatcacttttgagccaaacaatgtgtgcctatccctcacactatagtatttattatatcatcaggacgaaaaaccaaattgtttcttgtcctggttcatctcgatccaacgataattaaggattactatataattttcctgcacccgtcaaattggttgttggcctcgtcattttcaacttgaatgcatgtatttagttggaagatcccttgttccaaaactacttgttctttcatggaacacgggatgtctcaatcttgactgaaacaatttaaaataaagagagaaaaaaatatgcatgctatttatggatatgtgcaaagcactgactcgcatggttcttcaacactttggtaaaaaaaaanaaaaagtttctaccacctactantatgtttatgtaa

SEQ ID NO: 203351 - DNA, 458 bp, Glycine max
  unsure (1)..(458): unsure at all n locations
agcttttaggggtattagactaatgagggtttatgggtaatctataaattagggtttcgtgttacttgaccaattagggtttattgggtattgaaaaattaagctttagtgttacttcaccaattagggtttaggattatgagacaatttataattacttgattgatcactatttaggggtatttgaaatttgggattcataggttacttgataaattggagtttatgtgcgtttatctaactagggttatgaatacttgactaattggggtttagttntactcgatcgataattaggggttatcgcacttgagttattaaggttttggggtatttgacaaattatgatttagggttacttgagaaagtccaaataggggtatttgactaattaatgttgagggataattgaataattagggctacttgactaagtacgggttaagggtatatgaaaa

SEQ ID NO: 203352 - DNA, 403 bp, Glycine max
  unsure (1)..(403): unsure at all n locations
agcttgtcttattatttatagcaaggtggtagttatgacaatatatgatgcataaaaaaggatctctataattattctacgtgtttgaaaggcctgattaaagactgatgcccatatgttggttgttaatttcaagagaaattatgagatgaattcattttactatgacttttaggttgatgatgagaggctaaaatatgtgtttctaggaggagggtcttcgtaaaaaaaaatactttgttcggagacatggtttcattcgataccacatacaatacaaataagtattgtatgatttttgcaccatttactgacataaaccatcattagcagagtaaaactttnggagctgccttgtatgtaatgaaaaagctgaatcattctgagtggtattcgaaacatt

SEQ ID NO: 203353 - DNA, 379 bp, Glycine max
gacctataaaactcagcttatcaagattgatagtttataattgttggctccttatacttggagtttgctggctgtgttgactctcgcacgttgacatctggatacatcttcataatgactaatggagcaatatcttggagaagtgccaaacaatcattaagtgctacttctatcatggaggctaagtttatttcattatttgaaacaacatcacaaggtatttggttaaaaagtttcataactggtctacgagtgattgattccatcctagactgtaaagatatattttgataattcagatggctttttttggtaaaaacaataaaggggagtgaataagcacatgcattaagattagcctgagcacgtgtcaacaatg

SEQ ID NO: 203354 - DNA, 439 bp, Glycine max
  unsure (1)..(439): unsure at all n locations
agcttgtatatatctatgttttgatgatgtcnaaaagaaatcacatgattgtcatcatcaaaaagggggagaatgtgaatgtatgtatacatgaatttgatgatgtcaaagaagaatcaaacaaggccgcttcaaaaggataagcatttgcttcaagtgtaatacaagattgcttaaacaaacaaatccttgattcaagatttcttcaagaccaagccttgcctcaaaacaaagggtttcaaagtcatgcaaggatctggtaattgattaccaggaagtgtaatcgattaccagaagggaagtttgagaaattgctgttgaaaagggtttcgaatttgaattntgaacatgtaatcgattaccatatgtttgtaatcgattaccagcaatggaactttggaaaattaaaatcaaaagtcataacccttcaaacataact

SEQ ID NO: 203355 - DNA, 317 bp, Glycine max
  unsure (1)..(317): unsure at all n locations
actcagcttaacctcatcgtctctcacagtctttagatatgggagttcttccaatccttgtgtccggactctcagccacttatgatagccgncgatgatcccattactggttcccctaaactctctgtcctttcttcacaccgcatcacatgccttgtgaactccttggaagacctttgcattggggtcactgaaaccgtgtaatgaaaggcgtgatgctttcgtctaatggcgctcctctcatggggtagccaagctgtcttatggtgaggacaggattataatttatacaaccccttgttcccattaagggaaca

SEQ ID NO: 203356 - DNA, 436 bp, Glycine max
  unsure (1)..(436): unsure at all n locations
agcttctggtatcaattacgagcgtctttatatactacgggacataatcggacatccgagtaaaaagttattatcgtttgattaggctaagagcttgtngtttgaatttcgagcgtcttgatatattacaggactcaatcagaaatccgatttaaatggtattcattccgacatccgagtaaaaagntattgtcctttgaatttgctacgagcttccggtttcaattacctgcatctcgatatactatgagacacaatcggacatccgagtaaaaagatatcatcgtttgagattgctcagagccttcgttgtcaatntcgagcgtctcgatatattacgggattcattcagacatccgagtagaaagtattgcatttgatttgctatagctctatttgaatttgagcgctcgatatatacggacacaatcgacat

SEQ ID NO: 203357 - DNA, 336 bp, Glycine max
  unsure (1)..(336): unsure at all n locations
caaacaaancaaacgtcacacgacaannatagnngccgggggaatacctcacccactcaagngtatcacacaattatggcttttctctaatgaaacactcttgccttttaccactctaattccccttgagttcttaggcaattcaagagattatggccacaacaaagaacaattcaccaatatgtgtaaggtaaggctagacaaggaaaaggttaaccaagaaaaaggctaacaatgtttttaggcacaaatgaaggaaataaaattcagaaattaggaatttaagtaacaatccttcatgcaccaatatattaccttaaagagttttttttttaa

SEQ ID NO: 203358 - DNA, 402 bp, Glycine max
  unsure (1)..(402): unsure at all n locations
ctcaaccagaatcaagccgaggctattgggccagccatcaatggggccaaacacaccaaatgattattatgatggatggctcaaattctcacaaagggtaaatcatcactttcaaattgagctttcaaaactatcatgacatgtagagaagaattaaggatttcaagtcacaaaatgtcaagaacttttattttcaaaacaattacccatttcttgaacatatcctataattcaaagaaaaacatgcaaagtcgtacgtgcacacaaaatngacccaaaatattaaactgaaaatccgacgaaactaacaacattaacaaattaacacaactaacaaattaacaaagccaacanaactatcanaaccaaagaaccactcccccccatacttaaacaacacat

SEQ ID NO: 203359 - DNA, 447 bp, Glycine max
  unsure (1)..(447): unsure at all n locations
tattcttatctagagtaggtgagcacacaacttactactgacatatattcgactttagtagtggacaatgtagttgagccttgcatcttgcatattcatgttactaagttagcaccgataaaagaatagcttccactagtgctttttctttcaactttatcaccaacatagtcaacatcataatagcttgtaagtctgaaactttctcttcttttgaacataagaccaagattagaagttccaattaaatatctacaaatatgtttaattttagttaggtgaacttccctttgttcttnttgaaatcttgcacatagataaacattgaacataatatcagaaatggatgcagtgagatagaccagtgagttgcatccactnnttttgatccttgtncaatccaaggtatgtcatggtgtggcatggagtcttcatttcttttcatcg

SEQ ID NO: 203360 - DNA, 190 bp, Glycine max
tttattattttaattccaaacattcctatcttctttttattatggagaattctcatagataacagtctcttgtcccttcccattgatattttatttttaaaataatttatgtaggggacttatgacgcaacttactattagaattgcctgacactagggaagataattagtcaatatatcgtaaaaattt

SEQ ID NO: 203361 - DNA, 454 bp, Glycine max
  unsure (1)..(454): unsure at all n locations
agctttcctacctgagattctatctgtactgctattacgatangatactagtaaggtaattaccgttctaatactagtaattgcgctaattttacaagttgtccatcttctgacttaaggaggccaatttcatgtcctaatatctcccaaaagtcagaatgctcctcaggcattagagtctggagcctctctatctcagcatgcttctctaaaagtgcttgatccttcatagccatcctttgcagtagattttcagccactagccaaagtgattgatttgatttctccaacatatcacaatgttcttcaccagtcttaagtttttcagcccctttctcaatttctctatttagtttttcaaaattctcttgtgcaagcaaaatttcattctccattttagagctttggaccacgtcttaggggatctcttaagctattctgcaagacaatgaac

SEQ ID NO: 203362 - DNA, 299 bp, Glycine max
tctgccagcacttggttattgtattggatatgaaatacgactggatgattacttaattgttacttgtagtcatattaagatatgtgacctcgtcttgattatctttatttgtaagaaaaatggcttgttaatatttaattaatagttgtgttgcaattaaattttatctgagctaaactcgttaaaataaatcatattaattagtttgtgtatagattaaaataaaattagcaagctattagaaatgttgctatatgtgtgagaaaatgaataactggagttaaattatatagttagag

SEQ ID NO: 203363 - DNA, 433 bp, Glycine max
  unsure (1)..(433): unsure at all n locations
agcttgtccacaaaaataggtttttgaagtttgtcatttcaatttctcactaagtaaaatggatcattttcaaggtccaacgccttaaaatgattacctcttaaagtaaaaaagaatcacttgataagaaagaactacataggtctgatttcctcatcgcaattgaggaatacgtaggagcaaagggaaacacccttgtcgaccacaaaaagagaaaaatataaaaagggtgtaaaggatataaggacttaaaagggaacataaaaaatcaaggtcatgtttgcacattcgattaaagcctgccgtcccttgggacggacgtgtggggtgctaataccttccccgtgcgtaaacacaactcccgaacctttcacttaaaaagtcgtagatcgcgtcttttccggttnttccgacgttntcctcaaataaacgt

SEQ ID NO: 203364 - DNA, 466 bp, Glycine max
  unsure (1)..(466): unsure at all n locations
agcttcacttacagagagtagttcaggcttagcgcaacaagcgcgctaagcgcacttccaagaattcaaaccccgtaagagattggtggttagcacttcctggcccgctaagcccagcttaaaaactcaagttacagaatggatctggggcttagcgcaggatagcgcgcttagcgcaggatagcgcgcttagcgctgctacaataaaatttttccagagaagaagtggcgcttagcgcatcatccacgctaagcccacttgttaaagttcaattaccatgaagatgtagggcttagcgtagtgatgttcgcttagctgaactattcagccaaccaatcaggggtctctatgcttagcgcgagcaagctcagcttagcacgtgaagactgagcacttagcgcanggtctgtgcttagcggatagacaattgcaaaaaatttctgagtcttttcctgtctatctcat

SEQ ID NO: 203365 - DNA, 330 bp, Glycine max
tctgcttatgtggcagggcgagcttccttcactttcttgtttcaactgcgagcttggccactgcttttccttcccgcggtgcttctcttcatatccgcctgagtgggcttatagcctaaaccatacttcccacgatttcctttggcatttatcaggctagttatgccgctgttgtctttgcctaaacccattccgggtttgtaaccgttccccaacataactcgggccatcattactgctgcatcggacaggcaagcttgcccagagaaggagtccacggaggaaatgctgaccacctcaaaagactggaaagcggtttctaacgattct

SEQ ID NO: 203366 - DNA, 404 bp, Glycine max
tgcggcatgcaagcttgcacaacaagtaacaaaatctatttttatacaaaatgaagtaactaactaactaattaacttccactaaaatatacaattactacttaggaggaagggatggaccttgatcaagctcatctaatctacctaattatactaattacacaacgcaaagaccaaattcacagtccgattattgaagtgcagaaattctgacttccaagtccaatttaacccttaaaatggcagaattgacccaagtgtatttttgacaaaactgaaaatcattttcttagcttcccaagaactactcacatgctccatttggagttttgtagtgtcctatagggtttgcacaagacaaataggttaagtaagcacaacaatacgaaaataagccacaatta

SEQ ID NO: 203367 - DNA, 346 bp, Glycine max
  unsure (1)..(346): unsure at all n locations
ntaggtgcanagctttagatacctcgataacagttacctgatatcccttaacaacttagatacctcgtgtccaaagctttaggtgcataattgttcttaacattctgtaaagcttgttgcctaacatgctagtgtattcttctcaattaactcttaacacatcccaacttttaaatcacaccagcaagctcacaaaacaaaaatacaatcttttgtattttctattagtaaatataatatatttataattatcaagaaaatcttgtaagttaaaaaaaaacaaagaactaaaccaatcatatattttacaattttaataaaaatattttctaagaattatatttca

SEQ ID NO: 203368 - DNA, 458 bp, Glycine max
agcttatattaactaaattgcctcaatcatttccaaatatgcatgtgaattaggaagcatcaacaagaatcaagccaaggctattgtgcaagcaatcaatggggcaaaacacaccaaatgattatgatgatggatggctcaaattctcccaaaggtaaactcatcactttcaaattgagctttcaaaactatcatgacatgtagaggagaatcaaggatttcaagtcacaaaatgtcaagaacttttattttcaaaacaattacccatttcttgaacatatcctataattcaaagaaaaacatgcaaagtcgtacatgcacacaaaattgacccaaaatattaaactaaaaatccgacgaaactaacaacattaacaaattaacacaactaacaaattaacaaaaccaacaaaactagcaaaaccaaagaacacttcttcccatacttaaacaacaca

SEQ ID NO: 203369 - DNA, 380 bp, Glycine max
  unsure (1)..(380): unsure at all n locations
cgagaggatngatggggacccggtgtttatagaaacgaagatatgggctacgtgggagtacgtgagctcagttggaggtgggcaacacgggatggtgggtttatgcgcgcattgtggatgaagaaagcttgttgtgcaccatcgcccgaccgccacctagtaccacatgtgatgggtaccccataatcctacaagcttgagatgaggaagtgttgaagggtgaaacttcctgcttttattgttgaccacagagtggtacctggagatatgtcgcgggggtcaagagaccttggggacgtcaggtggggtgctattgcccaaaccaagcttgaccaatcccgacccaacccgggcatagtccggcagtgagaacctgtgat

SEQ ID NO: 203370 - DNA, 394 bp, Glycine max
  unsure (1)..(394): unsure at all n locations
agctttaataaatgctactcanaaaatgttataatgtaaaanaaaaaaacttatttattgaataatgaaacaagtntttcaactagtaaaaaaattaagaatgagtcgaaatatcttgtcaaacataatcattttatgtgtgatttaattctcttccgggaaaaaaataaaaaacacaccctacccctgatcgtcgtcctggttcacggcttccatctcgttgagtaccatgttccacaatggtacaactaaaatgcagattgcagaagaaataactgtttaatctactattttacttctctacagaaatctcctcgataagttgctcatgatggagtcttattcttatgtgaggtacacttttaagtcttcactgtattcaacaacccttgta

SEQ ID NO: 203371 - DNA, 451 bp, Glycine max
  unsure (1)..(451): unsure at all n locations
caagcttggtatagcctatgatctcattataaacatcgatattgaaatgatcaatgaatcttaaggtcaagactacatatggaaatttataatccaccactcgacaactnttccacatgatatcttcaatcaacagtacccaattcatttgaataccttatttcaacccatatataatctgcaagtcatcatcggtgacttgagcatgattgctagatcttggtgccagaatatatgtaacaatgtatattaacattntgtctttccgttattagaccaccaacacccaatttgtcccttaaaattcttttcgagtcaagaagcatacctctgttgtggccattntgctatagccatccataaattcctcaaactttcagactccacccatnattattctttctactgctttccaaactggatttcaatcacaatctctactccattgaca

SEQ ID NO: 203372 - DNA, 469 bp, Glycine max
  unsure (1)..(469): unsure at all n locations
tgtagactggctagacatgatacatgtcagggnttggtttggttcaaggataaaagggatgccccacattatttccatgacacaaatgcaaaaatgatgatttggaaattntatgcaaaactggtcatgcatgcacctatgtggacgctcaagtgtcaaatttttatggtcatgtgatgctagggctcaggattcatttcctctattttaaatcaacccaatgtttccaaaatatgttcttttatcaatttgtgcattcatccgagtccatttcgggcgtccggggaaatnttacagcattcacccttcaggtgtagacacattttccaaaaattggttatgatacaatgaattttttcaaagaaaaggtggaaatcatctcttttcaaaagcatgtcgggttttcagctagacaacataaaatttctttttctctcttgtttttatcattatcaattggtgatttctt

SEQ ID NO: 203373 - DNA, 193 bp, Glycine max
  unsure (1)..(193): unsure at all n locations
agcttgtgcttgtttatntaaattcctaggatcatgagcaactaggtgtgtcctactatgacttgagaaacaaagggtgatcaaataacaagcaaaaattaaaaaggtactaggttgcctcctagtagcgcttctttaacgtcttgagctggacgcatgatgacttgtcggccacggctagtaccttgcttac

SEQ ID NO: 203374 - DNA, 481 bp, Glycine max
tggacaagcctataccaagggctcaaataaaccttgaagttctagacaactttcccaaggtgtggaagacaacaagcacccaaaatgctagagacctaaagaacctttcctaggatgaactgttgggggttcttagagtccatgaagccaacctttcgaatagatatcatatgtgtcataccctaatttcgtccggggttcattatttgatgatatacaacctttgattggccgcttcgagatactgggcaccctttgtttacaatatgtgaagtcccgagacgtgccaaaaaatcaaaaggaagcaggcttacgcgatctcatgaaattccgtaatgtgacagatatcgaaatgaggtgtttatcgcaatccgtgagttttcgaaacttcttcgaaagctaaaaaagagtaaattcataatctgtgaagattcgtaaccttgcggaaggaaaataagtatcgttatgaaattcgtaaagt

SEQ ID NO: 203375 - DNA, 346 bp, Glycine max
agcttctcaaggaagttatcataagaaagcttctcaggtatctacctagtctataaatagaagcatgtgtaacactcgttgtaactttgatgaatgagagtcttgtgagacatacttcaaagttccacttctctccctcttttattccttcaatttcgtgctcccccctctctctttctctccctctttcttttcctccattgaagcatccttccaagcttcttatccaaggctcatcttggtggagaagctccttcttccatggcttattccttaatggatggcgcctcctctcacctcttttcctttgtcttccgctgcatctccatgggggaaaatcaccatt

SEQ ID NO: 203376 - DNA, 103 bp, Glycine max
agcgtctcaatatattacgggactcaatcacacattcgagtaaaaagatatcttcggttggattaactctgaagggcacaaatccatttccaacggctagata

SEQ ID NO: 203377 - DNA, 464 bp, Glycine max
  unsure (1)..(464): unsure at all n locations
agcttaatgaattatgtaatttcttcatactgcttctctgtaagaaattatgcttagagacaaagatattagaattgtttcactattttacttttatagtaaatgtaatcttattctattgtttgagtaatacacttttaagtgaaacaaaatttgtgtgtaaaactgagggatttgggctgttttctaaggagaaggtatgcattccataataattataagtggtacaagaataatgtttcttccattttatctatgcaagtattttttgtttattgtttatcttcagctctttactaatactagtatatgctgtttaatttcaaggtatatagttagaaagagcataaagagtgcaaaagacatagttcgtttccctttccaacaggatgccaccatactttacttattgcacactgtgtacagaggcagagagaatctnccattacttactgtgcactatg

SEQ ID NO: 203378 - DNA, 468 bp, Glycine max
  unsure (1)..(468): unsure at all n locations
cttgagagctattacggtggacnataagttttctatttgatgttatcagcgagactagcaggattgtgtgttntgtaatccgtgtctttccaaagcagccaatggggacatcattatacatttagtacattacccacttttaattntaaattgggtccagatgtggataagaacaactaaactaagtcatttaatgtattgcttttatttaatgtatgtaaattattagttattgatttgagaaaaaatattatatcttactaacaaatttaatgtggatagcataggataagaacaactaaactaagtcatttaatgtattgcttttatttaatgtatttaaattattagttattgatttgagaaaaaatattatatcttaactaacaaattaatgtggatagcatagactgccagtttaaaagtttttacattggcaatgaatcaataaaaatattctttcgcatg

SEQ ID NO: 203379 - DNA, 443 bp, Glycine max
  unsure (1)..(443): unsure at all n locations
acctctaagtcacctgcggcatgcaagcttgtactttaacaagctcacgcattatcagttacatttgacaagacagggctagctctacatgccagcctgttatactttctcagtaaaattttaaacttctcacaacatgatgttctctccctaaccctaacaagcataactatcattattcaaatgacaaaaagtatccacaacatctttatgtttccctttatcaatatttcaatttgttgaaaatatatagctccttaatgcaaacattaaaaattgttgagatcacgtgatcaacaacacgtaaaangtgacacttaacattctaaatcttcattgctaatgtgcttaagcaaaccacatgcatcaaaaggagcaccttaaacctaattacctgtaccaaataaattattcaaaaggttgtttctaattcccaatttttt

SEQ ID NO: 203380 - DNA, 444 bp, Glycine max
  unsure (1)..(444): unsure at all n locations
tactctatgtaactttttcaacctcagtagctgcagaaggggagttacaagatatggctgtggttcagtgaatgcatttatgttgtataacatattattgaatgggaacttggacaaatgccaacctgttatgaacttttatgttctataaatggcttgtttggttacttttcagttaaaattttcatcacgaagaagccaaggttgtaatatatttcactttgttaattcaaattaagcagnttcatcttctaaacatgaatgccacaaatggttntgcttttattgtggtatttgaaagaatgttcatgtctgcaagtgtgcttaanaacttaagntgcgcagttatttttgtcttttctgatgcaaggactatatttatgacacaagaataatgatatggaaggactatggtaatgtctgaacatggcacaatttattcat

SEQ ID NO: 203381 - DNA, 473 bp, Glycine max
  unsure (1)..(473): unsure at all n locations
gcaagctggtaataaaattcctagattatatttgtattctttacaaaaagaggagtatgtatcctgtgtggtttgagggagtgcggaggtgggatttctcatgaaggagggagtggtttgtgtgacaagaggaaatggtagataggcttgtggtgttagtgagaggtgtatctctagaaaaggataggtcacattcatggaattgggttttggaccacactgggatatttntcgattagagccaatacttggctttagttgaacaaaagtttggatcttccagtgatgatattttggtccaaacttggaagctcacagtcccaccaaagatcaatatttctcttggaggcttacgaggaatatacttcttaatggggataatcttatgagaaagaatgtgggagctagactcggagattttcatcgtccatcttacagtgatcataatgagtctattatgcctcctttgttct

SEQ ID NO: 203382 - DNA, 357 bp, Glycine max
  unsure (1)..(357): unsure at all n locations
taagcttagttgtcaataatagaaataatgatcaagagattctgataatgatatagctatacctggatggcgtctacagggttccagacaatatagatacccatgctgtcaagatagcaagccagattattgcctcccattgagttaattcaagatcttcctccacatcagaattntcaccattctctcctccctacattatgaagtgtggaaattttgtgaaaatgcactgtcgaataataaagaaaaaaatgcattcaacaggcaccaattcactcacataaattcttttatgttgcnaatatatgcaacaatnttatactctgatcaagtttaatattaaacaagaaagcattt

SEQ ID NO: 203383 - DNA, 110 bp, Glycine max
aacaacctggtccaacgcatatttatttttgtccttttgtagaccctttgagcccgacactttgattttgtcggaacactaaacctaggaagaaaactttctaccttacc

SEQ ID NO: 203384 - DNA, 427 bp, Glycine max
agcttgtagaaaggctagacatgatacatgtctggtttggtttggttcaaggataaaagggatgccccacattatttccatgacacaaatgcaaaaatgatgatttggaaactttatgcaaaactggtcatgcatgcacctatgcgaacactcaagtgtcaaatttttatggtcatgtgatgctagggctcaagattcgtttcctctattttaatcaacccaatgtttccaaaatatgttcttttatcaatttgtgcattcatccgagtccatttcgggcgtccggggaaatttcacagcattcacccttcaggtgtagacacattttccaaaaattggttatgatcaattgaacttttcaaagaaaagttggaaatcgtttcttttcaaaagcatagctgtttttagctagacaacctaatttttt

SEQ ID NO: 203385 - DNA, 420 bp, Glycine max
  unsure (1)..(420): unsure at all n locations
cccttcgtcaatcgcgggcgacaagcccgctgacacgccgagaattacgtcatcttccgcgcttaccagaactgtcatactgacatttgagtcacgctgacaggccgaaatacccttgtggttatccgaataaacaatcttttttgctgtctggaagacgaaaagcctgatagaacgcagagactaacgtcatcttctgtgcccttcgtcaatcgccgccgacaagcctggtgacacgcggagaattacgtcatgtttcgcgctcacaagatctgtcatactcacatttgagtcacgctgacgggcggaaatacccgagttggtatccggataaacattctttcttgctgcctgtaagacgagaagcctgatagcacacagagactanggtcgtcttttgcgctcttcgtccatcgcggc

SEQ ID NO: 203386 - DNA, 468 bp, Glycine max
  unsure (1)..(468): unsure at all n locations
agctttagatcaacaacgatttatttgacttaactcaatattccctctcaatcatcttcaacaattgatggagctgaataaaaatcaatccatatgaaaagttaacaaaatgaatgaatttcaataagattaagataattaataaccaaccaacatcataacaataagaaaatggaataaccccaccagcaatcaagctttttggtgtcaaggtgaacaacaaataagcaacaaaaaaaaaaggtgtggctaggggaaggaaatcattaattaagcattgatatatagagagaaaattaccatgctaaatagacaaaaaggcgcaagaaaagaattctccttcttgtatgtgcatatgaaggaaatgccatgttggttgaaaaggagngatatgtaatggcaattgatacaaggcaacaggccgcaaagttcaaaaaataatttcaaatttatttgttttttgttttt

SEQ ID NO: 203387 - DNA, 308 bp, Glycine max
acttatgcttaattaaaagtagagtatctataacgctcgaagctctttaatagatttaaacatcagtatggataaaaatcacgttcaactcaacttataaaatatatttgtcaaacaaaccatgacagtgttcaatgatgatcaaacttgaattacgattctcaaatgtctgaccaagcacaaccaccgacgcgttggttatatatagttcaattacgcacatagtttagaatgaacctgcattaagccacaatcaaatacatcgtagttatatgcattttaccttcctttaaattaatggctgaatg

SEQ ID NO: 203388 - DNA, 401 bp, Glycine max
  unsure (1)..(401): unsure at all n locations
agcttagtggttgattaattgcctctacgcttaatttacgttcatgcttaatgatcgtttatgagtaattggtgtatgtgttgcttaatcacataatgaatgccttatgttaaatttcgcttagtaatttaatttagggttggattaagtggttaaactgataaaggataaattctcgcaacctaggataagagacttgcttgtgaatcaaggggaagcaatgtattttaattctgatatttntctaattcaattttactcgctatttaatctacaaaagcaaacaaccctcccccccccccccctcaatttgttactatctcctactatctgctatgaaccatttggtgatcatttctcattgggaaacgacctagatcacttcntaagtactacatttt

SEQ ID NO: 203389 - DNA, 151 bp, Glycine max
tacagatcttacaccatggagatgcagtggtaatcatatgagaagacgtgagatgaggctccttccacttagcgaatttctctgggataatgagctttaccacccagatgagccttggataagaagctgggagaggatgcttcaatggaga

SEQ ID NO: 203390 - DNA, 394 bp, Glycine max
  unsure (1)..(394): unsure at all n locations
agctntaaagttntaatttataccaacttataatcaggtagaatatgaggcactacttgtcaggatgccactcacttgggagatggagtcaaggagttagtggccaaaggcaactctaaggtagtcatgttgcaagccaaaagggatttccaagcaaaagacccacaactaacaagtatttagagaagctaaaagagttggcttagtatttcaccagattcgaccctaaccacctgcctaaggatgacaacgacaaagccaacaagtggtcaaaattaaggagttcgaagagacatggcagccgaacgattatttaagaaactttggaacaatctagcatcactttagcggaggcacatgtgatgttccttcaaaccaaaatagaatcttggat

SEQ ID NO: 203391 - DNA, 456 bp, Glycine max
  unsure (1)..(456): unsure at all n locations
cttggagtntccaagtgccaattcgtcttcttctttagtccagtcttcttctggcttcaattcttcagtgggctttccttctgtgtccagcatcttgggatgttcccagcctttgatgacagctttccaggttctgctatccagtgatttgaggaaggccaccattcttgctttccaatattcatagttgcttccatcgagaattggtggtctgttcactggtccgccttctttctccatgttcatcagaatttatctccctagatctcactctgtgatttcgagtgttggctctgataccaattgaaattctgataccaggggacagatgtcgtacaggatgtcacgacatcacgcttcagaacatgcagattatatgtgtccgtatgaacagattaaacaagttaataacacaagagaattgttacccagttcggtgctacctacctacatctg

SEQ ID NO: 203392 - DNA, 362 bp, Glycine max
ccaatttcagatcatgtattaaacacatcgatctgctatatcattaaatcgagagtaaaccatcaacttcatccctaaactaatactctctctgttaaatagtccctaaagtaaaacaaactatgaaagtgtttgaaatcatatcaagtagtcaccacactactaaaaaatccttcaagttggtccgtaaacttcactaaaatacgttaacagagggactaaactcaagggatggatattcaattctttagagattacttaaacaacttcattactttaaggatcatttgagagatcaacagttttaggacaaaattgatggtttgtcttaaatcgaccaaatcacccaaccaacagagaga

SEQ ID NO: 203393 - DNA, 371 bp, Glycine max
  unsure (1)..(371): unsure at all n locations
tagacatggtcacaatataacaggagtagttcaaactaataacccaccaaatgacaagttaatttaagtgggagtaaactagatgtctagttatttaaataaactacagttcaatactaagatgttgctgaatacttacatccttaggaagaaacacttcaactctggactccattcttgaatntactgcttcaagcttcattgacaaaaattgtgacaaaaaggggaagatatatatatatatatatatatatatatatacacactcataggggtaaatatatatatatatatgtaaaaaacaacttataattacacacctcacacccttggtcttctctgaaccaatagatattattatttatttatca

SEQ ID NO: 203394 - DNA, 452 bp, Glycine max
  unsure (1)..(452): unsure at all n locations
gtatgttgtatgactcttcccaattaccatatacctactcgagggcccattgttttgccagccatgctttacgatatgtgatggtgtatccgaactctngtcttacgaattcaatgaatgtaggaatggttagttgctcattntcttcaaccatcgcaacgatatttttgcctacaagtttcaaatccatcttattgtgatcttgtgaaatggttggcatgacacatgtgtgaggcccttctatcattctaatttcccanacttttagattttntcttttggacgctntaagtttccattggcaccattcagttgggcaacataagacccatgtatccttcacacacctcttggctttgaaagttacatggttcttaatgtgccacatttntaccgcgtgtttcaggtcctccaattgacggaatcactaaccaacatacaacctgtcatcg

SEQ ID NO: 203395 - DNA, 424 bp, Glycine max
  unsure (1)..(424): unsure at all n locations
atccaagcttggcgttaatctctntgctgaccttttatttgaataattcaaggatttccgttttggactcaagaagacccatgagtttagcataacaccatttaagtatgaaaacgtgactgatattcctgaagctatagactggagggaaaaaggagctgttactccaatcaaagaccaaggtcaatgtggtaagatcaagaagatcatataagtacttttttgtgctccatcacattatcattactggctttcctcggattaattatgtgtgtcttttgaaatatttctgaatctcgaattatttaatctgtcaccttaatatttttatttattaatttatcaacttacaatatattaatcactccttttattatgtatttactgcccaatacatttatggaataaacatatcttagtgata

SEQ ID NO: 203396 - DNA, 447 bp, Glycine max
  unsure (1)..(447): unsure at all n locations
cttggttcaaaacgttgctttggtgggaagaatcaactntgaatntggataatgtgactgtcgctcttagagaaaatgagataatgatgagaactgaaaatgttgataatgaacacaatgcaatagttatagtggagtctgagcgggggagaaatcattcaaggagacatgatgggccaagaggaagatcaaaattgcaatcgcgtccacaatgagatatgagtaacatagaatgttactattgtggtgagaatggtcatatgcaagtgaggtgcaaacaaatgaaggagaacttgaaacaattaatagatatgaacatagatggcaccaactcccaagctaatgttgaaaaagtgttgaagatgaagatgatgtgtttttggcaacaaacgatgaggttgcttaaacaaaatgagtgatggattttgctgcctccaagcacatttg

SEQ ID NO: 203397 - DNA, 202 bp, Glycine max
acacctgaggcatccagcgcgtctttcaacaagctcacgcatttcttgtttttctgacaacaccaggctggctatgcatgccagcctagtatactttctcactaaaactttaaacttcctccaacatgatggtctctccctaaacgtagcaagcataactatcattattcaaatgacaaagagtatccacaacatccttatc

SEQ ID NO: 203398 - DNA, 458 bp, Glycine max
  unsure (1)..(458): unsure at all n locations
taagctactctattaactttatcacctcagtagctgcagaagggagtacatgatatcggcttggttcagtgaatgcatttatgttgtataacatattattgaatgggaactggagcaaatgccaacctgttatgaacttttatgttctatataaggcttgtttgtatactttttagttagaattntcatcacgaatataccaacgttgtaatatatttcacttggttaattcagattaagcagttacatcttctatacatgaatgccacaaatggttttgctcttattgtggtatttgaacgaatgtccatgtttgcaagtgtgcttaaatacttaggctgcgcagatattttgtcttttctgatgccagactattttatgacaaagaaaacgaatggaacgactatggtatgtctaacatgcacaattatcatgtgttagacttctgtctccaatat

SEQ ID NO: 203399 - DNA, 349 bp, Glycine max
  unsure (1)..(349): unsure at all n locations
atgtttcatctgaacccgaatcaaattatgagttttttacccaggcaaggctttgtcatcaactaaactaaacaaactattataatttatacactgcaaagttgacggtttctagatgggtgttgncaagttattggtcgtctcattcagtgttctctatttcaggtttccatggtctcaagattgaaagatgacaattttgttgagttgcatggttactgtgttgaaagaaatcttcctgtacttgcatatgagtttgctactatgggctctcttcatgacatattgcacggtatgtagcttccggtcctatcttggatttatatctatatgttccgcaatgattttg

SEQ ID NO: 203400 - DNA, 392 bp, Glycine max
  unsure (1)..(392): unsure at all n locations
tgcaagttgataagaattttcttatgtatgataaaactaattctcaatgttagttagaggatgaacaattagtcagtagctcaaacttatatagtcgacttattaaatcatatatgcttgggaaatatgtatatctgaatagttaaaaaatataaaataatctagagaaacatatctatatgacatttgtatataattttcaatctaatcttatgaataanaatatatttttagatattatactcttagtttcttgattaatcttaaactctggtaatttctatttatatataagtgattctaattatatctttaatttcagccattagatttttatattatgtatgcaaccactactcttattctatatctcacaatatgcttaatcaagt

SEQ ID NO: 203401 - DNA, 351 bp, Glycine max
  unsure (1)..(351): unsure at all n locations
gcttaaacgtatatggatctaggcttaagcatanatatattnttgcctacacgtgggtgcctgttaaggttcctttggagcatttcactttaaattcaatcttaaatgtttcttgaggtgtatatgaaccttaaatggagtgagtggagtttatatatcttgctattatcatgtaattaactaatataagaagattatattatgtctgagtaaatgtatgaacatgaagattgataaatgctcattgtcgaaagggtgaaatatgtatatgtctcgcttgtcgaggtatgatatactcttaactgcgtaatagagctggaatcttgctattctcactgtaattatattcat

SEQ ID NO: 203402 - DNA, 504 bp, Glycine max
actcaagcttctaccgcaatattaggaaacataggggtaaaggtgatcaatatctgtattccaagataagaaatgaattcttttcaacagtgttgttaaatagcggctatggcaccgccatggcagaatggcatggcggattttttgccaactgccatacgcaatttgtgaaaggaggcctgcatggcagtgccataaggcacaatggcatgtttatatggcagaatttcatccttccaccattgataacactgctttacaattactagatctattccatctaacaacacataggccaactgatgcaaaacttaccgctcaatcattaaacaaagctgtgtatccatctgccacaaccattatttatgatgacaaagcaatctacaagcaagagcagtgccaagtagagatggaatctcatacacacacagcatacctcaatagctaaaaacaaagccaggagaagaataacaaaataaacaataccttcataaccatgtgcat

SEQ ID NO: 203403 - DNA, 269 bp, Glycine max
caatattggggccattttggtgtgttttcttgcctgaatgggttgaaatggggttttgtatgagatggccctatgcctataatgcattttgaagcaatgggacatgccacattgtccccattcttttgctattgatgcctaaacgcgcgcccgccaagtgttcggtgaaatgcctcaatggcattatcgcgtgatttttgtagggaaataacctatgggacaattaggtctgcacatgtttcttatattttgggggcatgtattcggtt

SEQ ID NO: 203404 - DNA, 492 bp, Glycine max
  unsure (1)..(492): unsure at all n locations
ctatcctcatggcctgcctccgngacttcacccccgtgccaccccggaagatntaatccaagcccctactttcgaggggcaactcccaccttatgaagactatcccgggcaagacgatgggggaaggagatacccatcttggccccctgctccacctcaaagatccgtccccacatgaactaccccaaccgaacatagtccgccatatcccggtgtcgcaaccttcccttctgcgggagggcgacacgagactcgcgggatgcgtgttccacgaaaggaatacgcgcggagtcgccaccaaccgttatttgaggaaaacgtctgataaaccggaaaagacgtgatctacgaactctttagtgaaaggttcgcgagtcgtatttacgcacggngaaggtattatcaccccacacgtccgtcccaagggacggcagcctttaatcgaatgtgcacacatgacnttgattttatgttccctttatgtctttatat

SEQ ID NO: 203405 - DNA, 438 bp, Glycine max
  unsure (1)..(438): unsure at all n locations
agcttgttgaaattgccatgtttggatgagttaaacatacccattctgttttagggttttgtgatgatgtttgtgatgtttgtatgctgaaaaattgctcatggaaaactgttagagatgaaatgtagagttaacctatggttggaaagtgagaatgtggtgttacgagtggaaaaaagagtgaggctttgagagttggaaggttaagtctgaattctgtggtaaatggaggttaaagtgagttaatactagcttgaaatgtcatttaggacttgggagaaagcttgaactgtgctagagagaagaacaaatgatcaaagtgaacaaagagccatttctagggcaaaattgngtgtggaggagtcaaattttgattcggtggaattttaagtgtaaattcacgttgagcaagtttagattgatgtttggacttgtgtg

SEQ ID NO: 203406 - DNA, 438 bp, Glycine max
  unsure (1)..(438): unsure at all n locations
atgcacttaagaaacacaactatcatcttgtatggaaatgtttatantttgtttattagggttaaggaattaatggattttaattattgtatttgtgtattggtttttgtgtattttaaatgtagggctgaatatgctcattgggctttaaaaagactattacagaatagccttggagacttatgtagtgtttgggatgccatgaacaacatgatcacactacaacacactgaaattaatgcatcctttgagacaagtacacatgtggttggtcattgtttttaaagttaccttatacaagaagctacttggcatggcatcaaggtatgctttatatcagaatgctgctgagtttgagcgtgtacattatgctgaaaaaaacccttctcattgtgtatgtgtcatgagaactactatggtcttccatgtgaatgtgag

SEQ ID NO: 203407 - DNA, 407 bp, Glycine max
  unsure (1)..(407): unsure at all n locations
agctntatgatcacacatcaggggaatagtattcaatcctaacaaatgcactgctattttagagatgcacagtcctattatcgtccaggaagtccataagctgaatggaagactagcatccttgtgagactaaacctgcgaacaacctttcttagccttcaagaagaccattgtcacattgccagtcctaagtcaacctaggccaggagtacccttactcctatatctctcagtagttgatgaagcagttagcccatccctttacaagaggaagggaagcaccagctccctatctacttcaccagcagcatactctatgatgccgagatgcgctaccaaatgatagaaaaggtggcactaacactcattacctcagcccagtgtctcagaccctacctttagagtca

SEQ ID NO: 203408 - DNA, 455 bp, Glycine max
cgagtataattcattatttgtgttaagagcctacatcaaacttttggattatttatgtttctgtcacaatcaagcgatagttgatgcctccatatgtgcgtacactgtgattatgcttttgtttctagaattcatttggaatgtctgttgttgattctaaatgagtgatctctcttgatttaaaagttaccgtctcctaatcatttaagtgtttattttgttatgggttgctcatcttccaatcatgtctagttaaactgcttgataatctatcttgttgttacttctactacgaataaagagagacttcgcccttgacaatcacgttaagatgttttgagaggaaatacttgagtaggcatgatctttgttacctgtagatgaaaatcaaacttaatacaacgtgtacctgtgttcttgaggatatgcttagtaccacctaactgagagattga

SEQ ID NO: 203409 - DNA, 360 bp, Glycine max
  unsure (1)..(360): unsure at all n locations
agctacataggatgaagaaagtaaattggatctcttaatgagagtnttgcacaaaaatggtgaggaatcaagagaatgaagatcatgagcctcttaccaaagctttgaaggaagaagactctagaacacttgtatgaagcttggaagaagaagaaaatggattcctttccctcccttgaagaacttgtgcacagcaatggagaatgaaggttccaagtntgatttttcggagaatgaaaagataaggctttaaggcttgtgccaaatgaaacttgattaggcttaatgttgataagatcaaattgacaacatgaatgaccatttgatagtcatggtggacgttccaaatgctatcatata

SEQ ID NO: 203410 - DNA, 476 bp, Glycine max
  unsure (1)..(476): unsure at all n locations
ctcggacatggaagtaaccatcagcctactcgctatcatagctgccaacccctgtccagtttgccatgcacaggtcacccgaattccagttcctcagattgcccatgggatcaatcataactttcttaatagttgcaattctagtcctaggagtgataaaagcaaccaatgcttaaccgacccatacaacgacaggatttgcaaatgtttcttaatagacactgtttaattcatagttaaacacaagcacaaaggaatctgagcaactaatgccatacaagaaatatgcagtgtaaatctaccaatttcataccatccataaaacatgacanaaaccactaggcaataagtatgcagtttgtatatacttgcactgtcatataagtatacaggtcttaagaggcttaatatgcaacaatcaaatcaaggggaataaatcattataaagatatcttacaagaaacaccctaatgata

SEQ ID NO: 203411 - DNA, 350 bp, Glycine max
agctagtagggttaaagtctcacgattgtttgtactcatgcaacaattgttagtcgtggctatacgaggcatcttgccaaacaaagtcaggttagccataactcgcctgtgctttttcttccatgctatatgtagcaaagtcattgatcctgtcaagtttgatgagttggaaaatgaggccgcaattatactgtgccagttggagatgtattttcccccttctttctttgacatcatgattcacttgattgtgcatctagtcagagaaatcaaatgttgtggtcttgtttatctacggtggatgtacccggttgagcgatacatgaagatcttaaagggtatacaaagaa

SEQ ID NO: 203412 - DNA, 436 bp, Glycine max
  unsure (1)..(436): unsure at all n locations
tctcnncccaatttctataaatagggggagaagtgaagtagataagcttctcccncatcctaacgcagatgagcatccatgtggctcagttaatcgctgatgccatttatatttntgcaagtatggcgcctaccaggcaccctttggatccagataagtccaacagggccctgngatttcccgcactgatcacaggattctgccagtcgttcggagtccccgtggcacctaccaaggtgattcggccgcccatcacccgggcttttattgagaagtactgcacccagagacaggctcanggggatgctccgcangccgcagacgcgccaccacctcatcaggatggccaggctggatcatttgatacggagcgatatttngcggcatttggtcgccagcaggcagccaaccaccgggcacatgtacagacncatga

SEQ ID NO: 203413 - DNA, 207 bp, Glycine max
agcttagagcgaggagtataatatccttgttgtttcttgacaagatggagactggctcggatatataaagctatggtggatatactacgctcctgattgccgccggtaagaaatatatgctgaatgctcgcttcgcctttactgcctatttagggaggacggcgtgtctctgaaccccacataccaggattttgaggccaatagtct

SEQ ID NO: 203414 - DNA, 229 bp, Glycine max
gcttggttgtgcatcgggtggattttatagtccgttaagtgctcttggttggtacggcggtgggtagtgggcgggactgatattggctaagtattgacattggtggggaggtgatcgacgttgtacccgacataaataaaaattaaaatgttctcactacgaaagtatcctatgtcattcttcaacgaactacgattcaccatatgtttataacaaatatgtcggaaat

SEQ ID NO: 203415 - DNA, 178 bp, Glycine max
tgtctttgcttacaagaaagaagccatttggattatataatgcccttgccaccttccacagatgtatgctacccatttatgttgatcttgtagaacaatgcattgaggtgttcatggatgatttctggctttggctcttccttttgaccactgttatccaacctggaatcgatgttac

SEQ ID NO: 203416 - DNA, 286 bp, Glycine max
agcttctaatgtgtactcatgtatcgcctatttgtcaataggtaagaagcaatatgaagaataaaacatggagcatggaaactgcattgttgcctaaacaagtagcaaaaatataacacctcatctttgagaagtgcttactgttttctctttctcagtgacgagaaacttcccctctgcaaaatcacaggctgcaattggtattgctagctgcttctgcaatttctttacaacaaacacttctgactcttcacatataggtaccactgtaccattcctacctagc

SEQ ID NO: 203417 - DNA, 473 bp, Glycine max
  unsure (1)..(473): unsure at all n locations
ctcagctagagttctaaggggaaaaggagtatacaacaaactctatgttttatgatgggcaagggagtaagcactcacctccaataacacatggatatgaactntgggcactatgtcttaagatctcttttccttctcactcttcctcttctcattctccttattctctctaattgattctttcttgcttatctctctaattctctcttccttattctatataaagtgtgtgtgttgagcttagcgggcctcgacccattttgggccttgtttccccatctgggtcctattattatgtatgtcaaatcctatcaagctaactattattaataatgcctaagggtatcctttaaccatntagattaaagactattccataaaagatctctgaattgtgtatactaatgtccaaaatttgggatgttataatatttctcacaaaatgtttgattttgatcataactgcatcatct

SEQ ID NO: 203418 - DNA, 460 bp, Glycine max
  unsure (1)..(460): unsure at all n locations
atgcaagctngaaccataatcggggagagtgtgatcttaaactatgagtgaagactagctnttagtaatagtctttgcatcaatctctgaattttagaatgaaatgtatgaatgaggacatgatgaaggccatgattgtatatacaagccaattgaccaaaaagcttaccttgaattataattgtatcctttgcaccctttgtgagctaaattacattttcaaaattgaaccctgaccttgaatgaatatctcctgataccttgcttggaaagcagatggttcaaggcaatttgccccaaatctaggggagttaactgggatgtacagtggaaggtaaagcacatnancatacacaacaaataagttgtcttaaaaataaaaaagcaatcaaagaaagtgtgtgttgttgtaataaggccaaatacaagttaaagtgaaaggctagtgagtaagctaatt

SEQ ID NO: 203419 - DNA, 475 bp, Glycine max
  unsure (1)..(475): unsure at all n locations
tataagaaacaaatngcctcaatcatttccaaatatgcatgtgaattatgaagcataaacaagaatcaagccaaggctattgttcaagcaatcaatggggcaaaacacaccaaatgattatgatgatggatggctcaaattctcacaaaggtaaactcatcactttcaaattgagctttcaaaactatcatgacatgtagaggagaatcaaggatttcaagtcacaaaatgtcaagaacttttattttcaaaacaattacccatttcttgaacatatcctataattcaaagaanaacatgcaaagtcgtacatgcacancaaaatgacccanaatattaaactaanaatccgaataaactaacaacattaacaaattaacacaactaacanattaacaaaaccaacanaactagcaaaaccaaagaacactcccccccatacttaaacaacacattgtcctcaatgtagcacaat

SEQ ID NO: 203420 - DNA, 424 bp, Glycine max
  unsure (1)..(424): unsure at all n locations
tgaggcatgcaagctngaaggcaaactggatgcataggttatacctggaatctatctggccttgaatcataaatctgtacctgtcgcaagggtttgtggtttgtgctcctctgctaaccaccatatagacctttgcccttccatgcagcaacctggagcaattaagcagcctgaagcttatgctgcaaatatttacaatagacctcctcaacctcagcagcaaaatcaaccacagcagaacaattatgacctttccagcaacagatacaaccctggatggaggaatcaccctaacctcagatggtccagccctcagcaacaacaacagcagcctgctccttccttccaaaatgctgctggcccaagcagaccatacattcctccaccaatccaacaacagcaacaaccccagaaacagccaaca

SEQ ID NO: 203421 - DNA, 456 bp, Glycine max
  unsure (1)..(456): unsure at all n locations
tgagatgaggaagtgtagaaggggtgaaacttcctgctnttattcgttgaccacagagtggtacctggagatatgtcccggnggtcaggagaccttggggacgtcaggtggggtgctattgcccaaaaccaagcttgaccaatcccgacccaacccgggcatagtcagtcagtgagaacctgtgatgtacctaaacaggcgagctcctggcagtcaacagataaaaggaacaaagaccacaaagcaaggaggcttgtgtggtggctggccagctgtgaatcttgtgtgatatatggattatggcctctggtaatcgattaccaagggtgggtaatcgattacaaggcttaaaaatgaagacaagacgctaagatggtctctggtaatcgattaccaaggggtgtaatcgattaccatgcttgaaaacgaggtcacgaagctatgagagcttctagt

SEQ ID NO: 203422 - DNA, 356 bp, Glycine max
  unsure (1)..(356): unsure at all n locations
caagctntacatagatttagtaatgatccactaacctagaattaaaagaacttaatgccattaacctaaggaattaaaagaacttaatggctgagtgtaactgaaattgtggcaaccaaaagtcacccgcaatagccatcaagtcagccaccatttgatctcccaaaaggctgatgcctaggttaccaattggacccttattacaacttgaactaaacctgactaaatccattttagttgattaacccaaaacatatttttggtcagccaactttacaaggatngggccattatttagacaaactaaacactctaaaagtcagacaaagtggtgccatttagtcctcctccatttg

SEQ ID NO: 203423 - DNA, 202 bp, Glycine max
  unsure (1)..(202): unsure at all n locations
agtttgtaggatatagttgtgattcggacttgtcgcaacctacccttcggcgggagggcgacgcgagattcgcgggtgcntcttccaaaataggaaaattcgccgagtcttcaccaacgtttattctatgaagacgtcggaataacccgaatggtatggtctacgtactttatctgtgaaatgctcgggagttgtatttact

SEQ ID NO: 203424 - DNA, 348 bp, Glycine max
  unsure (1)..(348): unsure at all n locations
gcttgtaattcattctatgtcccgtggtggttcacatttagnnncaagnattttntattctcgttttcatttaatttttatacccccttttgacgtgcttaagccatttatttaagtcatttctcgcttaatctaaaaataaaataaatttccaccgatcgtttgaattgtatcatccattaatttcggttaaaatgaattccgaccgttcggtcgtgccgtaaccacgttggaaataaaaaagagagggtaaataataatataataataaaaaataccttttagtaaaataaagcggaaaatcaatcggacgttttctctttgggatttctcattcttaattgaatt

SEQ ID NO: 203425 - DNA, 468 bp, Glycine max
  unsure (1)..(468): unsure at all n locations
cctcanagaggtccaggaaggataaagcggccaaaggaaccagttccgctcctgagtatgacagccaccgctttaggagcgctgaacaccagcagcgcttcgaggccatcaaggggtggtcatttctccgggagcgacgcgtccagctcaaggacgatgagtatgccgatttccaggaggagatagttcgccggcggtgggcatcactggttacccccatggccaagttcgacccagacatatgtcctcgaatttatgccaatacttggcctacggaggagggcgtgcgagatatgagatgctgggtgaggggtcagtggatcccgttcgatgcggatgctatcagccagttcctaagatatcctttaatgctggaagagggccaggagtgtaagtatggccagaggaggaaccggtccgatggttntgatgaagangccatcgcccaattgctgtgtataccggggc

SEQ ID NO: 203426 - DNA, 381 bp, Glycine max
  unsure (1)..(381): unsure at all n locations
ttaagtcacctgcggcatcaagctagtgtgagaaacgttgtatatcatttctcctactttnngttgttgaccacagagtggtacctggagatatgtcgcaggggtcacgagaccttgnggacgtcaggtagggtgttattgcccaaaaccaagcttgaccaatcccgacccaacccgggcatagtcagtcagtgagaacctgtgacgtacctaaacaggcgagctcctgacagtcaaccaataaaagaacaaagaccaccaaccacggaggcttgtgtggcggctggccaactatgaatcttgagtggtattaggaatctggcctctggtaatcgattacacaagggtgtgaactcgattacaagggttaaaaatggaaca

SEQ ID NO: 203427 - DNA, 461 bp, Glycine max
  unsure (1)..(461): unsure at all n locations
ctttatctagcttgaaaaaaacagcggacctaagaaactttgctataacgggattgcgcgggcagtgttctgggttcgaaccttaggcgcgagaagaaccaagtgtgcctgatatatattttatgtcatgatntatgaattcttctggcacgataaagcgtgagaaaataataagcagaacaatgcaatctatatccttccactatctcatgaggtgttttagtttagccttatttaaattggaacattcagctgataactgatgactaatggtgatgaccttanggcacttgttggttgcgccattaataaatatttttacaaggggtgagtgatataatagtgaagaaatagaaatataaagaaaaattcttatggaagcttctaatgtctctacctaacattnntggaaaaggaatatggaaaatggatgggtgaaaagggacgctctccatcatctg

SEQ ID NO: 203428 - DNA, 296 bp, Glycine max
actagtatgcttattcttccttggtaactaaagagtctttgttcggttctgcaagtaatgctcatctggaaacagttctactaaccaagcccatttttttctcacttcttttggagagaatcatttttataacacaatcagtaaatcagacactaaatggacatcttttccaactaaaaatagaaatatgattcttcacgtcacgctgtaaagactaattcctttacccctttgatttgattatgacccctccataagtaatgcaatatacttttatttcacataacttactctat

SEQ ID NO: 203429 - DNA, 441 bp, Glycine max
  unsure (1)..(441): unsure at all n locations
ncaatcatatgtattagcgaagaagatggctgcggtctaattacttgatcacaacgcacccaaatactagtctaggtgcaatacttcccaccacacatttgtaataagttaaatctacccttattaccaccatttcctcttgcaacttctacttctctctaactgtgtgtaaattggcttcgatttctcaatcttgaattgcttcaaaatgtcagctgcatatatcttctgacaaaaatctatagattatgctgaactacttcagtgtcaagaaaataagacatcaagtgcaaatctatcatctcacaaacaacttacagccttctgccatcatctgtcaattatcggtggagaaaattatataatctacatagaggcatacatacaaatatctatataatatacatagtaatgcattatctatcattatcaatatcctat

SEQ ID NO: 203430 - DNA, 278 bp, Glycine max
aaaacaaatccctcttattactagctattttgaattctttaattcctgaatgtacaactttcaaaatggtggtcggtcccctcttttgtttatgcaaaaaatgaaatcaatatcaaacaaaacatgcatacaattgtcatcgttattgctacttgaaccataaggaataccatctaaagaagtacttcaaaacgtttatttattttttttggtattttttgaattacaatttgacttcaatatctaattttttaatgtacttaggtggaggatgttga

SEQ ID NO: 203431 - DNA, 433 bp, Glycine max
  unsure (1)..(433): unsure at all n locations
gctngctctanattacatngatgtttgtatntatgggaggaggttgtatgtcatttctgttttaagagtagtgtcccactggtaaaactaactttccaaatgtttgccttcgcaggaaatggccccgaggaagcttgcctcaaagaggtccaggaaggacaaggcagccgaaggaactagttccgctccggagtatgatagtcaccgctttaggagtgctgtacaccagcagcgcttcgaggccatcaagggatggtcgtttctccgggagcgacgcgtccagctcatggacgacgagtatactgatttccaggaggaaatagggcgccggcggtgggcatcactggttactcccatggccaagtttgatccagaaatagtccttgagttntatgccaatgcttggccaacagaggagggcgtgcgtgacatg

SEQ ID NO: 203432 - DNA, 62 bp, Glycine max
  unsure (1)..(62): unsure at all n locations
gtatataaagttggacatantcaaagattggcaattaaatttttttttttttttaaaagaaa

SEQ ID NO: 203433 - DNA, 448 bp, Glycine max
  unsure (1)..(448): unsure at all n locations
tattgngaagtatgttgtatgactcttcccaattaccatatacctactcgagggcccattgttntgccagccatgctttacgatatgtgatggtgtatccgaactcttgtcttacgaattcaatgaatgtangaatggttagttgctcattttcttcaaccatcgcaacgatatttttgcctacaagtttcaaatccatcttattgtgatcttgtgaaatggttggcatgacacatgtgtgaggcccttctatcattctaatttcccaaacttttagattntttcttttggacgctttaagtttccattggcaccattcagttgggcaacataagacccatgtatccttcacacacctcttggctttgaaattacatggttcttaatgtgccacatatttaccgcgtgtttcaggtcctccaatngacggaatcactaaccaacatac

SEQ ID NO: 203434 - DNA, 241 bp, Glycine max
gcttacttgttgtttgcacttcttacatgctgtctatcactatccatggctttcaatgcctcatttgcttgcttcctagagcgctctaattcttgttgcaatgctgactgttgggatgatgctcgctctgcaatttcattcacctcagagaagcgggcctcaaaatcatctttttcctacaaatgaaatttcccacacaaaaaattagactcatggcaccatataaacatataaaataatc

SEQ ID NO: 203435 - DNA, 318 bp, Glycine max
attccaagaatttgaattaagtcatgtaacattctaatgttggttttaaatttagaaactcatttctagttattctttcattatccagaaagtatctcttttttattatcatgtgttgtctttgttatcttcatggtcaacgtaactaccttaatttatctgtgagaatacttaaaattgttatattatgcatccaataactttcattatattcttacaatattctccaatcctttaacctttcaaaaatttttcattatacttactctaactaccatgttattattatctacaaaaataacactttttgcacatttc

SEQ ID NO: 203436 - DNA, 484 bp, Glycine max
  unsure (1)..(484): unsure at all n locations
gaccttaagtcacctgaggcatgcaagctgcgtttataccttgctgancttatacttgaggaattcaaggattcacgtaatggattgaagaggacctacgagtttaaaacaacaacatttaagttaaatggatttaagtatgaaaacgtgaccgatattcctgaagctatatactggagggcaaaaggagctgttactccaatcaaataccaaggtcaatgtggtaagacaaataacaccatataagnacttcattatgctccatcttcttcattatttccttcatctcgttttacagtttgtttggatacacaaaaaaaatcaattataccctaataaaccatggtcatgaaaaaatagaaatcattatttactagatttaccaagaaagcataattaattattgctcactatgtatcagatttaagcacactattaattctcactgtgcaaatatatgaaattattactaggatcatattgt

SEQ ID NO: 203437 - DNA, 469 bp, Glycine max
  unsure (1)..(469): unsure at all n locations
tctcttttcttgtntaatgaatatattttgtttctaatccttgtatttgggtatgtntttatgacatttgaatacttagtatttcttttattatttgattagtatgattgaacatgatgattatatttacttgctcttggttgtttatggttatgagttttaaactcaattattttgatgatatatgattagtggtatgtacttttatttggttattatgaatgactttctggattatatgacattctatgaagtattatatttctagtgtgatgaatggntatgtttgattggtttctattctcgtgtatttggctatattattatggtatttgaacaatttactatntccttatntgcatggtatggttgaacaagtatgttatttgattatatggatntcatagttaataataaactaaaattcaagtagaattaccacatcgcaatttgaatcaaaaagagtcat

SEQ ID NO: 203438 - DNA, 416 bp, Glycine max
gatccttatgtcgacttcggcatgcaagcttcttagtttcagatgatgcagatgggtttgtagctacctcatgcactcctctaatgactatggcatctgtcataccctaatttcgtccggagacctttgcttgatgacatgcgaccattctttggtccttgtgaggtgcttggcacccatcattaagcaatttatgaagttccaggacatgccgaaaaccaaaaaaaaatgttgatgcacaatccgtaagtttccgtgacacatcggaaatcaaatggaagcatcgttgcataattaagtgaggttccgtaacattccgtaagtcaaaaaggggatgattatgtaatccgcaaggttccgtaacattacggaaagaaaacaagtatcgttacgaaattcgtaagtttccgtaactt

SEQ ID NO: 203439 - DNA, 488 bp, Glycine max
  unsure (1)..(488): unsure at all n locations
tgcncagagaaggaatccacggaggaaatgcttaccacctcgaaagactggaaagcggtttctaatgactcctctacggcctccacataaggcatagaggatgggcagctcaccaagatgtcttcctcgcctgatacgatgaccagatgcccttccactacgaatttcaacttttggtggtgtgtagagggaacaactcccactgagtggatccacggacaccccaacagacagctgtagggggggttaatgtccattatttggaaggtaactcggcatctgtgagggcctatctgtactgngaggtcgatctgtcccctaacctctcggcgggtgccgtcgaaggcacgaaccaccattgaactcggctttaggtgggaggcatcgaatggtaatttctccaaagtgctcttatgcatcacgtttaaactgggaccattatcgatgagcaccttggctacgatatggtccatacacttgactgatac

SEQ ID NO: 203440 - DNA, 398 bp, Glycine max
  unsure (1)..(398): unsure at all n locations
agcttgagatgaggaagtgtagaaaggtgtttcttcctgcttttanttcgtgaccacagagtggtacctggagatatatcgcgggggtcaggagaccttggggacgtcaggtggggtgctattgcccaaaaccaagcttgaccaatcccgacccaacccaggcatagtcggtcaatgagaacctgtgatgtacctaaacaggcgagctcctggcagtcaacagataaaaggaacaaagaccacaaagcaagggggcttgtggtggctggccanctgtgaatnttgtgtgatatatgggttgtggcctctggtaatcgattaccaagggtgggtaatcgattacaaggcttaaaaatgaagacatgaggctaagatggtctctcggtaatcgataccac

SEQ ID NO: 203441 - DNA, 207 bp, Glycine max
ttgcagaattggtcttcgccagtgaaaggatcaatgtgggtccggaagatgcaaatttgatcatcctactaggacgactgagaaaattggggcaaataaagagggtgaggataagggaaaaacccatgctgtgactggcattcctgtaccggccaattttccacccacccaaccatatcttttcttaacccataaccaactttcttc

SEQ ID NO: 203442 - DNA, 432 bp, Glycine max
  unsure (1)..(432): unsure at all n locations
gtgtagacctagctgacgtaatgtacaagtcaattacttcactctcatcagctgtacgaatacgtagtttctcaaagagtggcatctcatttattacggaacacaaagtctcttcgtgttttcccctaaaatctagcaccaacagttcccttaactgctttagctttccaacctctccaatgaccactccatcatcatctataatcactggaggtatctctggtagggatgtcatgcctccaattccattgaattgaacaactagaataagccagaagatgacgtagctntttaagcttcataatctcctctggaatctcaaacacatatgtgtctcttatatccaaggtctccaaaatagattnttttcttaantagtttatatgaaagttctatttttggatctttattctttgaaaatcattttttcta

SEQ ID NO: 203443 - DNA, 487 bp, Glycine max
  unsure (1)..(487): unsure at all n locations
atgaactcttagtgtaacaagacatgtttgattntggcttagcactttaatcctcttaccatagtgcttcagcaattntggtacccaaacttttatgttcaagtttgatcccatatctttcaaaaacatttaatggttcaatatatattattaaactcaatttatatatcacttatctggagtaagataaattttcaagggcttaatttatctttttgtctcattcattatttattntattcaatattgtcctcctaataataaaatctttaatttgatcgcttaattccaaatcgattcaatttgatctcttctgtccaaattcacttaacattgtttattaatagtgggatgagattgaatcanataaaggaacaaattaaattgtttattaaaattgaaaaaacagtgagaacaagaagtttattaangggtcaaatngcaccgatttgaaaattaaaagtgctaagtaaattngttattaata

SEQ ID NO: 203444 - DNA, 480 bp, Glycine max
  unsure (1)..(480): unsure at all n locations
aagcttaacttaacataattcacatcattntaccaatcattgtgtaacatcacttgtcctaaggatttaatcacaaaatcatattctataccttcacattaatcacatgttcataacaaaacatctcaagtacaacacaacatctctcacacacaattcattacccaccatcacgtagcaagtcacaatgatcattacacagatgttatgaaacatatatactaagactcaatcctatattgaatgtggtatcttgtcagtgaaaaataacactagggcacctangagtacataataaaatacaccacacaatgggtaagcaggtcactcttattaaaagaaatcataaggtgatcaattagggttattctgtttagcgtgaattctctaaccatatgagatgaacagagattanaggagcactcaaaccgagtgtatttaccctcaaggcctagactctgaagaatccattatggtctc

SEQ ID NO: 203445 - DNA, 388 bp, Glycine max
actggatgcattggttaactggaacccagctggccttgaaccagaaatctgtacctgttgcaagggtctgtggtttgtgctcctctgctgaccaccatacaaacctttgcccttccatgcagcaacctggagcaattgagcagcccgaatcttatgctgctaatatttacaatagacctcctcaacctcagcagcaaaatcaaccacagcagaacaattatgacctcttcagcaacagatacaaccctagatggaggaatcaccctaatctcagagggtctagccctcagcaacaacaacaacagcctgcttctttctttcaaaatgctgctggcccaagcagaccatacattccttcaccaatccaacaacagcaacagccccagaa

SEQ ID NO: 203446 - DNA, 469 bp, Glycine max
  unsure (1)..(469): unsure at all n locations
gcttctccccaattntctatanatagggggagaagtgaagtagattatgtgttcagccccttaggcacttctctctctttcgaatttgcttagaaaaattgtttccgtgaagaaaatccaaaccgaggcgcttccgtaacgtttccgtaacgttttcgtgagtgatttcgcgaaggttttcgaccgttcttcgacgttcttcattcgttcttcatcgttcttcagtcttcaacgggtaagtacctcataccaagctgtttaattcattctatgtacccgtggtggtccacatttggtttcatgtatttttattctcgttttcatttactttttatacccccttttgacgtgcttaagccatttatttaagtcatttctcgcttaacctanaaataaaataaatttccaccgatcgtttgaattgtatcatccgttaacttttggtgaaatgaatttcgaccgatcggtc

SEQ ID NO: 203447 - DNA, 318 bp, Glycine max
  unsure (1)..(318): unsure at all n locations
agcttctttgagaaaactttttttggaaagctagagcttanctacacacacccctctcataactaagctcacctccttgagaagcttccttgagaagattcctaaagaagctagagcttagctacacacacctttctaatagctaagctcatgcacggtgcccctcattgccccagtgtaaggcttcgaggtaccaatcattgtctttcgtcatgaccttgtagcagggaacctattgggtgagaacttctaatctgcgcctanngtcgcttaaggtttatgcatggtgcctttcattgccccagtgtaaggctctga

SEQ ID NO: 203448 - DNA, 480 bp, Glycine max
  unsure (1)..(480): unsure at all n locations
agcttagagttttatgccaagttagacattntcattatgtactcccttatataactttccccctcctttnttttaacaaaaaaaaataacaaataaaaaaaaaaccaaatgcacaaaaaacttccttttatatatatatatatattatgaacaatagccatgaagagaagccgttcacaaatccaaataccgatgttaaaaaaacaaaatacacccgaatttaaatcaaatatccaatttaccaacaattaatgtgttgttccaaaaaaaaaacttgggttcatataaccaaagcaatccaggtataattagaatcaaataactttaaatcccaataatcaaataataatggtgactctaataccacttgttggaatnttaggggatctttataaaatactaataaccaccaaaaacacattacattagaatatcaggaagaagtttaggaatacctggatccataataattaaatcaac

SEQ ID NO: 203449 - DNA, 407 bp, Glycine max
  unsure (1)..(407): unsure at all n locations
actaagcttgagggcaactggatgcattggttaactggtacccagctggcctttaaccanngaattgtacctgttgcaagggtctgtggtttgtgctcctctgctgaccaccatacagacctttgcccttccatgcagcaacctggagcaattgagcaacccgaagcttatgctgcaaatatttacaatagacctcctcaacctcagcagcaaaatcaaccacagcagaacaattatgacctctccagcaacagatacaaccctggatggaggaatcaccctaatctcagatggtccagccctcagcaacaacaacaatagcctgctccttccttccaaaatgctgctggcccaagcataccatacattcatccaccaatccaacaacaacaacagccccagaaaca

SEQ ID NO: 203450 - DNA, 390 bp, Glycine max
  unsure (1)..(390): unsure at all n locations
agcttcctcgaggccatttcctacgagaacaaacatttagaagttagttttacaagacaatccttatcttaacgcanaaaatgtcatgctaatccctctgantttagaacgaactcatataatctatttatgcacacgcgtatgtgtggaatatcctactatttatatcaacatagagggacatccaacacattctaattgtcatacacatatatgcatttgaaaagaacatacattctcacgcccaaggcattgcgtcaaagttcacacttaattatatcctaaacatttactattacaaactacctacacacatttgaaatatatatcatacaaattttattggttctctcacatttatttatatgccatatggaaagctaattacat

SEQ ID NO: 203451 - DNA, 469 bp, Glycine max
  unsure (1)..(469): unsure at all n locations
tcttctagacttatcttctccttgaagtggggtctcctctctctcttccttctccattccgctgccattcatcttccaagaagcaaaggaatccattgatgaagaagatcctaggcctacaagctccaatggagcttacatcgtgtggtatcaagagcatcttcatctaggtgatgttcttttgcttcctctatctttttgttcggtgaattctctttaattccttgttcttcatcttattctccatgtatatcctccattgtcttgtggtttggtgctgtttagagtagattcaaaaaaataataaaccgattaaatcttagatctacacttgttcttgcatttctttggttcanattttgtagatctactcttgaatcatgtttntgtgttgaatttaaggttctatcatttttcattcaanatattcttgtgcttgaccttagatctaaatnttctttcccaaata

SEQ ID NO: 203452 - DNA, 374 bp, Glycine max
agcttattctatgagatatttctttcacactttgatcacaaaattcaagtttatctagtttatcaccacctaatagaatttgttcctcaagttcatgcaatcctctttcactaacatgacctaatctcaaatgtcaaagttttgtcttatcaatcaatgtattactacctagcgatgcatgtccaataatagtggaaccttcaagaataaacaagccattacttttattcttgttacccttagctatgattaaagatccatttgaaatcttaagaacaccatctataattctagttgaatatcctagatcattaaacatgtttatagaaataagaattcttttgagttctggatggtcctctacattttcagta

SEQ ID NO: 203453 - DNA, 432 bp, Glycine max
  unsure (1)..(432): unsure at all n locations
ntcatagtaaggtgaatgtgcttgcctaagaccctcttgtccaagatcacgtagcatgtcttctatacgatcaccaacttcttggtcaactgcagcagtcggagggcttgatgacatttgtggtaattcaccatgccaaatccatntcgtatattttggactgataccatcacatataagatgtgttctaatgtcatccatagattgtcgtcgtccattcaaacaattaacacatggacataagtatagtccaccaatgggtgctgctttatgtatggcaaattgcaagaaatcttcaactccattgtcatactcgtcacttatgcgtggtcttgtcatccaacttcgatccattctggtgttctgccatagcccgcacattaactgatatgcatgtcaacctctctctttcataataaggtttgaccctac

SEQ ID NO: 203454 - DNA, 441 bp, Glycine max
  unsure (1)..(441): unsure at all n locations
agcttcaatggtgcctttttcttaacaatactcccaaaaacctctttattaaaaatcaagaagttttctttaactttagttaggacctggataggtcttcctttctcatcattccaagatttttcctccacagttgcatactgatcatgcataatccatgcaacatcatgggaaggtcgttggcctctggctggagtaaggccaccacatctaagcaagaacgggttatgatcagaatgcatacgacataatacctccacatagccttctggaaaggccatctgccagtcaagattagccatccccctatcaagtttcttggcaatatctatgccacgtaaatcagcccccggtagtggttaggtccaccaaattacaattntccataacctgaagaagctctatcgccctctggtgataaaaatgcccctctttgatact

SEQ ID NO: 203455 - DNA, 441 bp, Glycine max
cagagtccacatgttctatgacgacaatgttgattgtgaaccttctgcttacccatgattacttaaactaaaatcaattcaaagaaatacaagtcagaactcaaaatacatattaattaaactatcacaaagcccaattagaaagttaaggtatactccaacttcacacatttatagtttaccaataacaaaatttcacttcatattacaaaaggtttacaatgacataaaaaatccgccttgctggatccagatatggtcgcatacatagtaaaagattaagcttgataacatgtgaacaacccacaaaaaaactatcgacggttacatatctactagactccttcaacatgcctaaaaaactgttaatcctgttagaacaacccttaatagtgtaacgaacatcacaacatcatgttctgctcacagattatataaaca

SEQ ID NO: 203456 - DNA, 443 bp, Glycine max
  unsure (1)..(443): unsure at all n locations
ttatcttaatgacatgacacattaaatgctgttttacattgtcttttattattattattattattattattattattatgagtgctgagttacatcgttaaatgttaagtaaatatatgatttttatgtatataacttttatttaccaataacattaataagaaagcaaaagtaatacattataaataatatattttagaataaccttgattatcatataaattataattatgttatcttacataacatttataagaaattntgttattatatgaaaatcgatagatgaaaaataaaaaaattaaagaaaaatgaagtgaaaagttgtttcctaaattttctttcttttcattttctcttcagttaaaatttcaaacattttttctctcttttttcattgtccttttccatcaaaccaaataaatgtcattcaaaatggatgg

SEQ ID NO: 203457 - DNA, 475 bp, Glycine max
  unsure (1)..(475): unsure at all n locations
ngttattangactatttctctttagaggataaaatctcaatataacaanaattcttcttagaacaaattatcaactagaacttcatatgtgaatgatgccaatccaataggaaacaaattatcaaacaataactctcttggccaggaaacaacttgaagagtttaatccatgtcaatcatattagatgcaaattataatgtaaattgttcaatgaaagtatatatataactgctttttgtattggtatatcagaagttctattctctcacaaatatcaaaaggaattgcaattctttatatataaactttggagaatttgttgacatgtatacacacctttgtcttgataaaattggagcaaagctgatcagtttgaactatagaaaataaatttaacttattagttattactcaatatcaagtaattttagactaatgtttcgtggtaagcttgctttgtctataaggagagaa

SEQ ID NO: 203458 - DNA, 85 bp, Glycine max
agcttctaaactttaaacaagaatgaagctctgataccacttgttagacaagtggcctcagatatcttaagaggggggggggggg

SEQ ID NO: 203459 - DNA, 450 bp, Glycine max
  unsure (1)..(450): unsure at all n locations
ntgaatatgtgaggaggaaaactttcactaactngcttagttttatntcattcaaataacatatatatatacaaataggagagagacagctttacaagctttgacaagacagtacacactgctgtcttctacaacaagataaaatagggaaatctactctaaagatacatctaataatacccataattataacactccccctcaagctggagcatataaattatatgcaccaagcttggaacatataaactgaattctaggcccccttaaggatntagtcaaaatatctgctggctgatcattggaattaatgaattcagtgacaatctctttagacagtagcttctcccgaataaagtgacagtcaatctctgtgtgcttggttctctcatggaagactggatttgaagcaatatgaagagcagcctgattatcacaatacagcttcat

SEQ ID NO: 203460 - DNA, 400 bp, Glycine max
  unsure (1)..(400): unsure at all n locations
catgcaagctttgaagggatatctatagaaagagtgttagtngtntaaatgagtatatttagatggattngtggctccacaagaaaggacaagaatcaaaatgattgtgtaccgtgagacattcgtgtgacacctattgaggaaaagatgacaaaaaatggttaagatgctntgggcacatgcaaaggccgttagaggcattggtgaggaaagtaaattgtatggtttttaaccctgtgaaaaagggtagagggaggccaacaaggacgttagaggaaattaatagaagatatttcatgctggctaatattcttgagaattggttnttaaccaagtccaatgacatgtgatccttgtaaccaacctcacctagtgagataagggctataatatttgttta

SEQ ID NO: 203461 - DNA, 479 bp, Glycine max
  unsure (1)..(479): unsure at all n locations
tgaacttttatcaagtttgatttcttggtaatgtgggacacacattcacacacacgtatgtatatagttaaaagaaattaaaatgagcttgagtagtttataaaatggtacaattagttttatttttaaatttaattggcatgcataaaagtttttacacttttcactattccctcgaactaatcctttctaagcgttagtttttttttggttttttattntatttttaaacaatgtttctttccatttttcatttctaaagtttgaaataacattatttatttattttttgtttttttaaggaatttnttctttgttagctatactcttacttgctatctgatctaatcataattacaaatgaaaggagatagcaataaaaaccataatcaataatatttttttaaaataattattataaattcttattattataataattaaaacaatcattatgaaaataataaacttactatata

SEQ ID NO: 203462 - DNA, 246 bp, Glycine max
tcacactgacgtgtgaggcactgtgacgggcggaaatgccctattggctgtccgaatcagcatccttgagcgctgaccgtagaccgaaaagcctgatactatgcagagactaacggtgacttctgcgcccgtttataatcgcggccaacaagcccgtagacacggcaagatgtacgtcgttttccgcgcgcacaatatctgatatactgacatacgattcaagctgacgaaccgaactacccaaaa

SEQ ID NO: 203463 - DNA, 312 bp, Glycine max
ttcttaagggtgaaacctcaccactggagatgcggctctaagacatatgtagaagaggtgagaggaggcaccatacattaatgaattatccctggaaaaaacatcttcaccacccagattggactcgtataagaagctcgcactgatggttcattgtgggagacaaaggagggacagatacatagacgtgggaccgcgaagatgaccgaccaataaaggagagaagtggaactctcaggtgtgctccacaagactctcattcttaaagttaccacgaatttacgcatgcttgtatgtatagactacgtaact

SEQ ID NO: 203464 - DNA, 341 bp, Glycine max
agctttgtgtaatcgattacacttatttggtaatcgattatcagtgactgtttctgataaatcaaaagatgtaactcttcaaaaaggtttttgactttttcaaattgttttttgacttcttcagaaagtctaaccacttcaagattcgtggcctcttcaaatccctagtttcctgaaggaaattccattcacagaccacccattttcaatggtgagggttaccattattggaaaacccgtatgcagatattcattgaagccatagatctaaatatttgggaagcaatagaaataggaccacacatacccactgtagtagatgtaagcacaagcactacaac

SEQ ID NO: 203465 - DNA, 397 bp, Glycine max
  unsure (1)..(397): unsure at all n locations
tgccacctagttcgcccaagcgagctaagttgcttcctcgagaaggcactgccttctggaggaacttcctggaaggcccaagtgggccttggtgctattngcacacccactgttactaaatacaccccttgcctttttttgctgattctttntccgtaacattacggaactttacgaattccgtaacgatacttggtttcctttcgtaatggtacgaaaccttatggattacgtaatcatccctttcttggctttcagaatgttacggaacctcacagattgtgtaacaatgcttcctttttgattccggcatgttacgaaacttcacggatcgtgcaacaatgctttcttttgacttctggcaacgtatggaacttcacgtattgtgcaacaatgg

SEQ ID NO: 203466 - DNA, 383 bp, Glycine max
agcaccgcagctgcagcttattaccatcctgcagcggatgcatggtcttcttcggcggagacgaaagggacgaatgtttgtttcacctcggggagtcacacgacatggaaacctgtcccgtggtggaagaattgtcttaacggctcatggactgggggcagctcgaagtgtccaaaggagggagggaaaaaccatatattttcatgccgtcggaagaaaagaaggttcccccaaagccctagtaatatgtttcactaggaaagggaccggctccacacccaagtacccccggacaacgcctaagccgacgtcgtttgcatatcaaagcaataaggccattcctgggaagtatacccctcccacttttggagaaagagttgcaa

SEQ ID NO: 203467 - DNA, 464 bp, Glycine max
  unsure (1)..(464): unsure at all n locations
ctcagctctgatgacctagaactcactcnagaggatctgatacagcttgtagtattataaccggcccacaagcaaaatatgagcgaacataaggatcattgcttgctgctctgagacaaanagattatgaaagcagacttgattgtggcaacttaagatcgcccaaaccacaaagatataactagcaagaacaacatctttagctggcaggtgaacaactaatttgccaacaaccaggataagatccataggagaagcaagattaanaccctgaccagctaagttatagatgataaccaagaccaaatctaatctccaacccaactgtttctaatagagagcatacttngtgcanagcaagaatggccaaaattctttggtacatttcctagaaatggacagacatttaagaaatatatgacaaattctgggtgtatactttgaacgacggtgatccatcttta

SEQ ID NO: 203468 - DNA, 316 bp, Glycine max
tgaaattgcaccttttattcggcataaaaattgagcatctactatgcctcgtgactaaagttgtcaatacgggccggtccggctcgctattggcccgctataaacggaccagtttagcccgtcctgctaatcaaaacagcctacctttcttaatctggcccatttaagttggcccacgggccacccatcaatctatttatttattgtgtagacgatgtgtattgtctattatcgttgttgcaataacaactttgaatctaactcttgccttttataatttttatacctagaatgatatctctaatagtaacaataa

SEQ ID NO: 203469 - DNA, 376 bp, Glycine max
  unsure (1)..(376): unsure at all n locations
agctatacagcagaaangattattgaccttttatacctagaataaaataacttaatgccattaacctagggaattaaaacaaacttaatggctgagtgtaactgaaattgttggcaaccaaaagtcacccccaacagccaacaagtcagccaccatttggtctcccaaaaggctgatgcctaagttgccaattgggcccttattacaacttgaactaaagcccttttagttgattaacccaaaacatatttttggtcagccaactttacaaggattgggccattatttagacaaactaaacactctanaattgaaataaagtggtgtcatttagtcctccatgtgtgccatgatacaacttacaaccttggacttt

SEQ ID NO: 203470 - DNA, 337 bp, Glycine max
  unsure (1)..(337): unsure at all n locations
ctagagcaattcanatgctcatgaactttcactctgaggtctttattagtcgcataatatatcaagacgctcganatcgaacaatggaagctncttatcaattcaaatggtcataactaatcactcggaggttcgactcatgtgcataatatatcgagacgctcgatattgaacaatggaagctctcgagcaattctaatggtcataacttttaattcggaggtccgattcaggcgcatatatatcgagatgctcgagattgaacaatggaagctcttgagcaattcaagtggtcataacttctcactcggagggtcgaatcaagtgcataatatat

SEQ ID NO: 203471 - DNA, 407 bp, Glycine max
  unsure (1)..(407): unsure at all n locations
agctntgaatgctctattcaatggagttgacaagaatatcttcagactgatcaacacatgcacagtggccaaagatgcatgggagatcctgaaaaccactcatgaaggaacctccaaagtgaagatgtccagattgcaactcttggctacaaaattcgaaaatctgaagatgaaggaggaagaatgtattcatgacttccacatgaacattcttgaaattgccaatgcttgcactgccttgggagagagaatgacagatgaaaagctggtgagaaagatcctcagatccttgcctaagagattngacatgaaagtcactgcaatagaggaggcccaagacatttgcaacatgagagtggatgaactcattggttcccttcaaacctttgagctaggactcttcgata

SEQ ID NO: 203472 - DNA, 474 bp, Glycine max
  unsure (1)..(474): unsure at all n locations
cttattgtgctagtagtccctactggctgcaatatattttcaaagagaatgatacctctagaaaccatcaaaagagatatgactaccttgggggttatcactaaatgcctagttagttctctcccttataggtcccttaaataggggcacggagcaaacacgctgcgtgccatttttacactgccatgcataagtatcatatacccttttgcttatgttcagtgaatattatcatactgtgtacattcccgcattgtgtcttttgcataggcatcgcatatgggttctgtcttgatcccttctgtatacaaaccaacggagggtccgtgtcgccttcttaaaaacgtacgttggggcactttgctacccctagacattgtgtctaagaaggggacgaattccccggacccccgcattcctagattacatctgtgttatatgcattccttcatgcattcatncattccacccatg

SEQ ID NO: 203473 - DNA, 383 bp, Glycine max
  unsure (1)..(383): unsure at all n locations
agctnttcttcatgggttgatgggttctgtttgtanaatggcatgatcactagctgacatgttctcaattagctcagttgcttcttccggggtcttcagttttatctttccccctgcagaagcatctaatagttgcatggtttgtggtctcagcccatctataaacatattcaattgggttggcacggaaaacccatgagtgggagttcttctcaacaagcctctgaacctctccaatgcttcactcagagattcattatgaaactgatgaaatgaagagattgtagctttcccttccgcagtcctggactctgggaagtatttctttagaaacttttcaataacttcctcccaggtttttagactggtacccatgaatgagt

SEQ ID NO: 203474 - DNA, 485 bp, Glycine max
  unsure (1)..(485): unsure at all n locations
tatgcgcatatttccttacatacgttctctngcacaagacatttaaccgaanaagtgcacccatatacaatcaaggcagcttcgttacctagattatttacacgtactgccaaggtgtatttgttacttacatcacacacatctccttggctgaatttacatacatgcatactcaaagcattttggggtaccaaaaattgcacatgtgcacatcttggtatttctaatacctatatatacacaaacttcatgatgaatcttgactatcttcacaaaaaggtgctacacttcatccctttttntcaagttttgctacctaaagccgcatgcaaattcaagcatatnttcctttgcggaactaaaatgtattcaaattaaaaggtatattttttgtaatatgttttcttcacataacatgcaacatatttatatatatatnatttttttgcgagacattntgactaccaaaaaaatatatatacata

SEQ ID NO: 203475 - DNA, 404 bp, Glycine max
  unsure (1)..(404): unsure at all n locations
agctttgcagaattggtcttctctggcgatatgatcaaagngggtctgataagaggcaaatctgatcatcatgctttgataaatgaaaaaactggggcaaatgaagagggtgagaatgagggagaaacccatgctgtgactgccattcctatatggccaagtttcccaccaacccaacaatgtcattactcagccaataacaacccttttccttacccaccacccagttatccacaaaggccatccctaaatcaaccacaaaacccgcctaccacacaaccaatgctaaacaccacctttagcatgaaccaaaacaccaaccaaaaaggaattttgtagcataaagcctgtatgattcaccccanattcccgtgtcatatgctaacttgctcccatatctactc

SEQ ID NO: 203476 - DNA, 250 bp, Glycine max
  unsure (1)..(250): unsure at all n locations
nggagggattgatggtgacccggcgtgagaggatcatgattttgctactcgcgagtacgtgagttcagttgaaggtgggcaactggggatggtggatctatttatgatctgcggatgtggagagtctacttgcaccatctcccgatcgccacctgatactacatatgacgggcaccccatagtcctacaagcttgaagagagaaagctgggaacagtcaagcttctactattatttgttgaccacacagt

SEQ ID NO: 203477 - DNA, 424 bp, Glycine max
agcttctagacaatggttgtgtaagttctttactgtctttcttagtcatgggttccatcagtccaagcatgactactccttattcaccattggttcaaggaattccttagtcattctactagtggatgtagatgacatcatcctgtcaggaccaaattctgcctctgagcaagctatgcgaacccaattgtaatctatgtttcaatcgaagatccttggtgctttaaaatattttcttggcttagaaatagctaaatccaatagaggtatctcactctttcagagaaaatactctctatctcttttggaagatacacagttcttggcatgcaaaccttccaatcttctaatggatcccaacttgaagcacaatcttgatgatggagacttactcgctgatcccttagtgtataaaggttaattg

SEQ ID NO: 203478 - DNA, 225 bp, Glycine max
gatcgagatgcaataagaggaatctggtttgatacatgctccggatggtcctgatagcatgggattccattctcttatttccacaagagaatgataggtccctcatggaacatgtatgacatgaacatacgcaagaattgacacaggtcatggatgtcatgttaattacttctaaaagtctgcgttcgagtcccatcattttgaatctctctccccgtgattgac

SEQ ID NO: 203479 - DNA, 448 bp, Glycine max
  unsure (1)..(448): unsure at all n locations
tttctttccttgtcctntgtaagtatttaattactcgtgagcactatggatgacaaactctntgggtaataggtaatgctgccaaatttgtaaagccctaaccaaagcatacaattccttatcataagttgaatagttaagggcagcggctcctaacttttcactaaaataagctatcggatgtccctcttgcaataaaacagccccaatgcccacatttgacgcatcacactcaatttcaaatgattttgcaaaattaggcatagcaagaatgggtgcattatttaacctatgtttgagggcagcaaaggcctcttcttgtttcttaccnccattgaaacccacattcttcttaacaacttcagttagaggagcagccaatgtactaaaatccttaacaaatctcctatagaaacttgctaaaccatgaaatcccctcacctcactc

SEQ ID NO: 203480 - DNA, 466 bp, Glycine max
tgaatcggacatccgtgtgaaatgttatgaccatttgaatttctcaagagcttccgttgttcaaattcgagcctctcgacatcttatgcgcccgaatcggacatccgtgagataagttatgaccatttgaatttcttgagagtttccaatgtttaatttcgagcgtatcgatatattataagcttgaatcggatatccgtgtgaaatgttatgaccatttgaatttctcaagagcttcttttgttcaatttcgagcctctcgacatattatgcgcctgaatcggacatccgtgtgaaaagttatgaccatttaatattcgcgagagctttcgatgttttatttcgagcgtatcgacatattataagcctgaatcggacatccgtgtgaaaagttatgaccatttgaattttctcagagccttcgatgtttaaattcgagcgtctcaatatattataaggctgaatc

SEQ ID NO: 203481 - DNA, 448 bp, Glycine max
  unsure (1)..(448): unsure at all n locations
ttctttcttgataaaactttcttaagaatcttctttgagaaaacttccttggtgtcataccctaatttcgtccggagattattacttgatgacatgcaacctttaattggccgcttcaagatacttggtacccttttgttgcacaatatgtaagccccgagacgcgccggaaatcaaaaggaaacagggttacgcgatccgtgaaattccgtaatgtggtggaaaccaaaaggaggtgttgttgcacaatccgtgagtttccgtaacttcttcgaaagctaaaaaagagtaaatacatgatctgtaaggattcgtaaccttacggaaagaaaataagtatcgntacaaaattcgtaaagtttcataacgttacggaaaaagaatcaccaaataaagtaaaaggggtgcatttagtaaaaagggggggtcaaatacaatcaggcccatt

SEQ ID NO: 203482 - DNA, 430 bp, Glycine max
  unsure (1)..(430): unsure at all n locations
nntccggattggtctttgccagtgaaaggatcgatgtgggttctaaaagaggcaaatntgatcatcctactaggacgactgagaaaactggggcaaatgaagagggtgagaaagagggagaaacccatgctgtgactgccattcctatacggccaagtttcccaccaacccaacaatgtcattactcagccaataacaaacctcctccttacccaccgcccagttatccacaaaggccatccctaaatcaaccccaaagcctgtctaccgcacttccaatgacgaagaccacctttagcacatactaaaaaacaccaacaaataggaattttgcagcaaaaagcctgtagggttcaccccaaattccgttgtcatatgctaaacttgatcccatatccactcaataattcaatggtagccataacctcaa

SEQ ID NO: 203483 - DNA, 397 bp, Glycine max
  unsure (1)..(397): unsure at all n locations
tcattaatattgttgaccatttttgaccagagaattttctatgaattatccttatcctttgtagactttaacttaaaaacttaagagtttaaccatgcctaggtatcctatggtaacatctcatttttttaccatttctatagtttaaaaacactatctaattgcataacaaaataataatactgtctaccacacacacatggaaaattgggatgttacaagcttcgacaagtcaatcacttgcaacattctaaaattccaacctaactttcctcanaatcttgaatgtgtcatcaagtacatgtaattccagtttaactttaataagtacatacaaanattattcataaattcattaatcaatacttaaattaaccacaatccaaaaatgctaaat

SEQ ID NO: 203484 - DNA, 439 bp, Glycine max
  unsure (1)..(439): unsure at all n locations
cagctgaagctaaggaaagctngaagaaattgtgtgaagaagtttggctttacatgcgcaactcccttgagtggcatttgtattggttgtttcatcttaatacaattgatatttgggttgcattgtgcatcatcatagtgtgtataaagaaaagtttctaagttagaaaaatttcttcaaaagaaaaaactctctgttttaatcgactacagcttcattgtaatcgattacaataagctgtctgaagcttttagagttgagtcttgtatgagttcaatcaattaccgatatctcatattcgattacactgttgtttgagacaatgactcgatttttangagtctgctctaatggataccaagtgattaatcattacttcctctcgtctagtgttcaaggtgaacacaaacctttattgatatgtagagcattaccgata

SEQ ID NO: 203485 - DNA, 456 bp, Glycine max
  unsure (1)..(456): unsure at all n locations
catgcaagcttgaacctcaacttaagaaagaggagttgttattcgcttatatataaaangcnccagctctttgtaggtgggtacacttggttcctctaccctaacacttcatttcaggagaaagaagaaaaacttgatggtgatgcttcgttcaacaaatgttcttgctaccgctacagaattagcaccactagcatttccattatcagaaacagaaccttgagattctctccatgtctagcactgtccaaatttcttttgcctacaaggagtttgattaaatgcttctgaagatttgaaggtatatactattgtttgaagctctttactatctcaaaaaggtgcacaccaactgtttggtgattaatcttcttactgctttggtgattcttggcctatttttggcttattattctcacgcctttaggctcgctttgatagttataacttctacca

SEQ ID NO: 203486 - DNA, 469 bp, Glycine max
  unsure (1)..(469): unsure at all n locations
ctatgaactaagcttaacaatgtctntacaataatcatcacacagcagaaccctagcatgattacccatcatatcttcccaaaaccccatacccacgaaatttaagagagaaagaagtccacccaaacctgaattttcgaagtcccactcgtagccacgcacttcacgaccccgaaaatgctctcctttcacgaattgggggcagaaatgggcaccaaaggttgaagctntgtgtggagcttcaatggagaatgaagaataaaagaatggcaacgtgagggagagagagggctgtctgaaatttctgttttgctgagtgaggagagagaaaagctctctggtcttaatacaacgggtgtcctcttttctattattntattcaagctctgccacatgtccctatttgattggagcanaaaggtcccactntctctttttgactgtgacccatactcagtcacaaaagtga

SEQ ID NO: 203487 - DNA, 331 bp, Glycine max
  unsure (1)..(331): unsure at all n locations
taacttttatgaatgaaagttntgtgaggcacaactcaatgttcaacttttctcccttctttactccttcaatttcgagctcccccctctctctttctctttttctttcttttcctccattgaagcatcctctccaagctgtttatccaaggcacattcttggtggtgaagctctttcttccaaggcctattccctcatggttggcgccttttttcacctattctcctttgtcttccgctgcccctccatggtggaaaatcaccatcgatggacctcattgaagctcaaagatccagcctccatagaagccccacaagcaggctctcatta

SEQ ID NO: 203488 - DNA, 501 bp, Glycine max
atagacactcaagcttctatagaaggttcattcctaattgctctacaattgcatcatctctctatgagctggtgaagaagaatgtggcatttacctggggtgaaaaacaagagcaagcctttgtcttgctcaaagaaaagcttactaaggcacctattctagctcttcctgacttttctaaaactattgagctacaatgtgatgcctctggagtgggagtaggagctgtattgttacaaggtggacaccctattgcttattttagtgaaaaactttatagtgctcacccttaactaccccacctatgataaagagctttatgccttaataagagctctccaaacttgtgaacattaccttgtttccaaggaatttgtcattcatagtgatcatcaatcacttagtacattagagggcacagctaagtaaacaaaatgcatgcaaaatgtgtagagtacctacagaaattccatatgttgtctaatacaaaagggaaaacaa

SEQ ID NO: 203489 - DNA, 356 bp, Glycine max
  unsure (1)..(356): unsure at all n locations
agctngagatgaggaagtgttgaaaggtgaaacttcctgcttttattgttgaccacagagtggtacctggagatatgtcgcgggggtcaggagaccttggggacgtcaggtggggtgctattgcccaaaaccaagcttgaccaatcccgacccaacccgggcatagtcggtcagtgagaacctgtgatgtacctaagcaggcgagctcctggcngtcaacagataaaaggaaaacaagaccacaaagcaaggaggcttgtggtggctggccagctgtgaaatttgtgtaatatgtggattgtggcctctggtaatcgattaccaagggtgggtaatcgattacaaggcttaaaaat

SEQ ID NO: 203490 - DNA, 350 bp, Glycine max
  unsure (1)..(350): unsure at all n locations
tcgctcgatgtccgattcacgcgtatcacatatagagacgctcgaaattgatccatggaagcctctcgagatattctaatgggccttacttttaacaaggtggtctgattcaagcgcctaaaataacgagaccgttcgtattgaacaacggaagctcgagagaaattcaaatggtcataacttttcacaccgaggtccgactcaagcgcgtaatatatcgagatgttcgtaattgaacaacggaatctctcgagaaattcaaatggtcaaaacttttcactcggatgtccaaatcangcacatcacatatctagacgttcccaatggaaaaacggaagctcttgagaaat

SEQ ID NO: 203491 - DNA, 460 bp, Glycine max
aagtcacctgcggcatcaagcttctagccaatggacttacctagaattaattcctttgatatccccttagagcctattttcccctttctttgttttgaagctcattacaagccttaagtgaaaaccatgatatctccttacccttaaggaattttggagctttggaattgttttgggaataagctgggaataagtgtgggggggtatgtttcattggaagatatgatttttggccatgcttaatgttttattttggccatgcttgatgtatatatatattgcttagttctttctttaatcttcaatttcatactgttcaataaaaaaaataaaaaaaaatgaaaaatgaacaaaaaagacaagaaaagaagtgaaggtgaataaataaggtcttgatatgagaacttgtattgggagccttggttgattttgttgatattagagggtttgggtgtactac

SEQ ID NO: 203492 - DNA, 489 bp, Glycine max
  unsure (1)..(489): unsure at all n locations
gagtgcctnggataagaagcttaaagaggaagcttcattggtggaagataatgagagagagaaggtggcatggaaaattgaaggaagaaagggagggtggttgaactctgaagtgtgtttcataagactctgatttatcaaagttgtgacaagtgttacacatgttcctatttatagcctacgtcactaacaaaatgaaattcacnttcattcatgtgaatctaagaggaatatttgaaggatatgccaaagacaacttagaatattccaagaatatgccaaaggcatcttagaatgttccaagaatatgccaaagacatcttagcatattccctttagatgtcacaagaatgaaaggtgtgactctagcacatgggaaagaaatatgtcacaagaatgtgccanaggaatattccaagaatatgccacagggggaaaactacacacacctctccaatagctaagctcacacccatgccaaaatacaaa

SEQ ID NO: 203493 - DNA, 246 bp, Glycine max
aacaatatagtgtgccattgattctgtccactctattgtacaaccagcatcataaacacttggaaaaaagccattcttctgtgcacctctaaattagatatatccatatagaatactggaatcaccatcctaaacttattttggaaaataccttgatcccaacagatgccgatgcaattgaccctattggacaattcacatgatagtggactaatgtgataaacaacatatattcaatctcaaaca

SEQ ID NO: 203494 - DNA, 474 bp, Glycine max
  unsure (1)..(474): unsure at all n locations
agctaggacgaaggtggtgtttgggantttgtggtcatgggagaaggaggaagaacgggaaaagaagagaagagaggaagaatgaagggaaaaaaaatggctgcaagcaagttttttaaaattaaatataaaaataaaaaattcaagtggcacaccatgttattgatacctctgacatggctccacatgtgtatcactaacatgtccaattaacggacacatcatcacatttttttacggagactaacggcaaagatctcctacaaaacatttgaagtttcttggacccaacaagaagcaaaaaaatttcatggatcaattgcgaaaattgaatatatttgagggatctccaacatatttaagctcatttaanaaaagcatcaatagttaaaaataatagtatatcataatatcaattttttgtataaatctaaaatataatttatatgtngaaaaataatatttgcattttta

SEQ ID NO: 203495 - DNA, 469 bp, Glycine max
  unsure (1)..(469): unsure at all n locations
tcaagaaaaatggcctcagcaaactccttatttccagaaggaaattctatcaatagacctccaatctttaatggagagggttaccactactggaaagctcgaatgcaaatntttattgaggcaatagacttaagtatttgggaagccatagaaatagggccatatatacccaccacagtagaaagaattacaatagatggtagcacatcaagtgaaagcataacaatagagaaacctanggatagatggtctgaagaggatagaagacgagtacaatacaatctaaaagccaaaaacataataacatatgccctgagaatggatgaatatttcanggtttcaaattgtaagagtgctaaagaaatgtgggacactctacaattaacacatgaaggaactacagatgttaaagatctaggaaaacatactacccatgagttgaactgttataatgaatgcaatgaaagct

SEQ ID NO: 203496 - DNA, 313 bp, Glycine max
  unsure (1)..(313): unsure at all n locations
agctnttcgattcattctatgtacccatagtggtccacatngngtnntgtgtatntctattcttgtttcatttactttttttatacccnctcttgacgcggttaagccattttacttaagtcatttctcgcttaacctaaatataaaataaatttccaccgatcgtttgaattgtattatccattaacttcggttaaaatgaattccgaccgttcggtcgtgccgaaccacgttggaaattcgaaaaagaggtataatattaatatactaataataaatttctgttagtaaaataaagcggatatcaatcgga

SEQ ID NO: 203497 - DNA, 402 bp, Glycine max
  unsure (1)..(402): unsure at all n locations
tcatgatgaatcaagattaattcanagatgttgtgatgataacaaaggtgatgacaaaaagctcaaaggtcaatcaaagaatgagttcaagatgttcaagatagaatcaagaacaattcaagattcaagaggaaagttgatttcaagaatcaagaatcaagattcaaggatcaagcttccaagaatcaagatcaagattcaagactcaagatacaagaatcaagagaagacttaatcaagataagtatgaaaaggttntttcaaaaactgagtagcacatnggattttctaanaacatgtttaccanagaagttttactctctggtaattgattaccagattattgtaatcgattaacagtagcanaatggatttgaaaaagttttcaaatggaattacaat

SEQ ID NO: 203498 - DNA, 353 bp, Glycine max
agcatagattcttgatattagatgcttcttttagggagggtaaaagatctctcaacacaaactctataattcgtgaccgctatccaccagttggaattgaacttctagttgaaaaatcattggcaacttacaatggctttactatagggatgcatgacttgcttcaagaaacacctagggaaattgttcttaaagaatctcatgttgatgctggaaaacgtattaggttatggtctctagaggacacaaatcacgtatttaaatacagtacggtcagactatttctttttaactaaatttcaactcatttatattgtagagtttacattttatgtattgcctgcataattcac

SEQ ID NO: 203499 - DNA, 350 bp, Glycine max
  unsure (1)..(350): unsure at all n locations
tactcagctatcaagatgtaatcacttgtcatgcattcacgattngattcttgaccaaaccctaattaaganactagcgtttgggaattgatttgcgtgctttggaatctgaagatatcttatgcgtatttttacgtatgatatctccttctgaatgacaatcactacttataacaaccggaagtgaaacattgatgattttctgaacttcaattgttattcatttatctggtccatttccattccattgttgtgagtctcaaagtttatagggtccagctaaggtaaacctcaactttcctcagggtatctcttccctaattataatatttgagctattatcggcttct

SEQ ID NO: 203500 - DNA, 463 bp, Glycine max
  unsure (1)..(463): unsure at all n locations
agcttngcttctacatcactactttcttcttcttctctctcattnctctccgaattcacttaacactgaaggtccaaccccttcctcagtctccctcatgcctatttataagaaatgagggtacttggtggacttgcagctcgtactggcgagctgttgcttcaccctgaagtaacttggctcgcctaggcaagctacagcgcgcctaggcgagctggttacttcatccctaagccatttgagggtctaagcgagccanggcctataaaattgcatgcaatgaccctgttgccactccccttgggtattttccacaccctcgaccaacacgttgaatgatctttcatcttgcgtggcaactagtgtcaaatagcttaattcggctagcgagaatcacaatatccatgaatgatagtccccgattgaaattagggtctgacaactactttgattaattggatca

SEQ ID NO: 203501 - DNA, 446 bp, Glycine max
  unsure (1)..(446): unsure at all n locations
tcaattcagatctcaagagtgtgtattcttgggttattctccttcacacanaggttacaagtgtctagctgctgatgacagattgtatatttctaaagatgtcattctcaatgaaaatagcttcccttatcctaccctatttcttgagccatcttcagtaacttgaggttcctaattctacatccacccttactgtgttaccttcctctcagcttgcatcatcatctagtaacacaaataacaccttatcctcacttcatctcattcatcatctgtttcacctgatcacagtgaacagcatgcagcttcctagcacttctcattcacaacccttgaatgtcactgatattgacttaccttcagaccaaaatcccatcttatcacaagaccaaaccaatactactataccacaagaccaatagtgcaccttttctcctactgatact

SEQ ID NO: 203502 - DNA, 446 bp, Glycine max
  unsure (1)..(446): unsure at all n locations
agctntcataagtgaaatcaggtgcaaccatctccctaagagtcctctcatgaggtggaggttgagccatgttctcagtatgaaaattagtagttgaatgctcaaaatcagaatattcagaatcaccagcaacagaatacccagaatgctcacaatgctcaaaatgcatagaatgatcaggatgcacactatgcctaactaatctatgaaaggttctatctatttcaagatcaaagggttgtaaatcacctggattgcccctagtcatgcactatatgcagcaaatagtgtgttctcaatcaagcaccaagggagggttaaaactacaactatagtcaaacgatatcagaatgagctgaaattntgtgagcaataccctaaaatcatgaaaatatagcacanaaattttcagaacaaaattcaaagtctaactatgaaaaatacct

SEQ ID NO: 203503 - DNA, 352 bp, Glycine max
  unsure (1)..(352): unsure at all n locations
nnttggagtagaaacatgggaccaactcattntatttcanatatgaagtcgtatctagtcaaggtctgagagaccatacaagttccctaacgatttctaattatgtgggccattaagtctatcatatgctgacaatagccgagaagcccatgaatctcttcgggggcggagtaggtgtctgccatcgccttggccttggctaacaatcgggggagttcttgactcccgttcaaggtaagagcaaaccgatccatccacatggttgcctcttggtgaaaagagtcgatcacccttcctctagacctcttttccgcgtatacttgtgcatattcgtccgcaatcctatgctcgt

SEQ ID NO: 203504 - DNA, 321 bp, Glycine max
atcatcgcttgttaatgtcaccgtctccgccgccgccagttctccgacgaggctcccgcgagactaattccgaggaccggacggacctcccccatttggtgttccgaatctcggggtcggcctagctatgggaccagaggaagatctacatcaagctctggtacagatcgagggacatgcgcggggtggtgtggttcgacgagaaggtgaaatctgaggaaaacaacagcgacccgctcccgcctgtgagaatctccggccacacggcgaggttcaagtctacaacatgcaagggcaccggcctgcattacgatctcgcgg

SEQ ID NO: 203505 - DNA, 346 bp, Glycine max
ctcagcctttgtaagttccttaaataagaaaaaaagttctgaagtattaatgtgaatgtttccgactagcggccatgaacttctaaatgcaggttttctatttgctatatatctagcgtatgtgaatcccccccaatacaatgtttccataatttcattgtccatatctcattaacatcatatagtgtctgccatgctatacatatattagaaaaggaaatacaaaaaaggacagagatctgaaagaaagaataaaaaacggatcggaccatcggtttaactataaaattcatgaattggccgggattaaattcatttcacctaaataataatctgatctacaagt

SEQ ID NO: 203506 - DNA, 442 bp, Glycine max
  unsure (1)..(442): unsure at all n locations
agctngtaggattatggggtacccatcacatgtggtactatgtggcggtcgggcgatggtgcacaacaagttttccacgtccacaaatcgcgcataaacccaccatcccctgttgcccacctccaactgagctcacgtactcccacgtagcccatatcctcgtttctctcaacaccgggtccccatcaatcctcccaagctttcccaacatccaagtaatacaacattcaaacagcacaaattatcacagccaagcaaaacagggcaaaggcagaaaactctgcccaaaacaccaaccaaaatcacagcttttctcacttaaagaccccagtaacaattccttcgttccaattcgttaaccgttggatcgaactcgaaaatttactggaagtctatagtacttaagcctacattgtgaccgttgggatctactagcaaaaat

SEQ ID NO: 203507 - DNA, 502 bp, Glycine max
  unsure (1)..(502): unsure at all n locations
acacttagatactcagctaaagtatgcccgagtcattcatccctatgagatgttgttgaagtattggcgatcagaattgccattccttggattatagggttgaaccaagctcatgcttttacaaaaaggttcatcaagtcaagttgaaatatggaagtaaccgtcttgcaaaattggggcaaaagatgaatcgagtcacatcacttgttcgtctactgccaaacatatttaggattggtgatgtcccttgtacttccagtttcaccttgacaaagatgtcatggaccatgttgaaaatctaaattgattcaaccccatatcctgcgtaaaaattcgcaatcttcaactgtacatcattcgcatacatccatgnctttcattggttgctttgctcattgcattctttcctttgaaaataaaataaaataaaatgaacttatcaaaaagaaaggaaacgctttacggcgcccttaccgaactcgtgctagagctagagtaatgg

SEQ ID NO: 203508 - DNA, 423 bp, Glycine max
  unsure (1)..(423): unsure at all n locations
agctttacagcagaatttagtaatgacccactaacctagatataaaataacttaatgccattaacctagggaattaaaacaaacttaatggctgagtgtaactgatattgttggcaaccaaaagtcacccccaacagccaacaagtcagccaccatttggtctcccaaaaggctgatgcctaagttgccaattgggcccttattacaacttgaactaaagcccttttagttgattaacccaaaacatatttttggtcagccaactttacaaggattgggccattatttagacaaactaaacactctaaaattgaaataaagnggtgtcatttagtccttcatttgggccatgatacaactcacaaccttggacttttcttcttgaaacttgggctttgattcaaatagtatggacagcacttg

SEQ ID NO: 203509 - DNA, 340 bp, Glycine max
  unsure (1)..(340): unsure at all n locations
ntagagcaattcacatgctncataactttcactcggaggtccgattaagtcgcattatatatcaagacgctcgagatcgaacaatggaagctctttatcaattcaaatggtcataactaatcactcggaggtccgattcatgtgcataatatatcgagacgctcgaaattgaacaatggaagctcttgagcaattctaatgagcataacttttaattcggaggtccgattcaagcgataatatatcgagatgctcgaaattgaacaatggaagctcttgagcaattcaagtgggcataacttttcactcggaagttcgactcatgtgcataatatatcga

SEQ ID NO: 203510 - DNA, 428 bp, Glycine max
  unsure (1)..(428): unsure at all n locations
acctgcggcatgcaagctncaatcagctattcatggcaacaatgatcaaccatgttactttaattatgaacaagattgttgaatcctacaaggggtttgagaacatcaataanctggtggacgttggaggtggccttggggtcactcttaacataatcacttctaaataccctcatattaagggtatcaatnttgacttgcctcacgccatataacacgcctctccctctcctcgtacgatctctaattcatagatctagttcaagattatgtttgatgaatgctgcacaagacaaaaataacctcacaaaagaggtcaatggcacatatataatccaataaaatttttctatgtctaaattccttaaccattagccattaaaacctatattttagccatcaacctttttttttcttttaaacaaata

SEQ ID NO: 203511 - DNA, 452 bp, Glycine max
  unsure (1)..(452): unsure at all n locations
ctaagctatttccttatngaaagtctgttaacgttaatgaacattttttctattgttacaactctaataataaattccactagtaaaaagaaaaacatatagattattttcaacgttttaaattaactttaatggggcgtgaaattagtcataataaaaagtacatattttgtagaacatttatggactcgtcatcgaaatttctacttatcgagatcgaattaatatgtagaacataattactttctatatcaattgaattaatatagaaagttctccttacataagttctaaccacaatcaaagtaaacataatttctatatcagctatgctaacaactaatgtagaaagcatttgcttatttaaaataacacaatgcaactatattgtattctacaatataccaattcgaaagatcataataaagaatatatatatagagagatagaaa

SEQ ID NO: 203512 - DNA, 455 bp, Glycine max
  unsure (1)..(455): unsure at all n locations
tctctaagtcacctgaggcatgcaagcttctaaggaggtgagcttanntatgataggggtgtgtgttctaagctctagcttctcaaggaagttttctcaaagaagcttctcaaggaagttttctcaagaaagcttctcaaggaagctacctattctataaatagaagcatgtgtaacacttgttgtaactttgatgaatgagagtcttgtgagacacaactcaaagttcaacttctctctctttttcttccttcaattgcatactcccccctctctctttctctcattttcctccattgaagcatcctctccaagcttcttatccaaggcttatcttggaggagaagctccttcttccatggcttattccctagtggatggcgcctcctctcacctcttctcctttgcttccgctgcatctccatgggggaaaatcaccattaaaggacctcatt

SEQ ID NO: 203513 - DNA, 483 bp, Glycine max
  unsure (1)..(483): unsure at all n locations
gcacgtatcagncaagtgtatggaccatatcgtagccaaagtgctcatcgataatggntctagtttaaacgtgatgcctaagagcactttggagaaattaccattcaatgcttcccacttaaaagccgagttcaatggtggttcgtgccttcgatggcactcgctgagaggttaggggagagatcgatctcccagtacagataggccctcacacctgtcaagttaccttccanataatggatattatccccccctacaactgtctgttggggcgtccgtggatccactcagtgngagttgttccctctacactccaccaaaagttganattcgtagtggaagggcatctggtcattctatcaagcgaggaagacatcttggtgagctgcccatcctctatgccttatgtggaagcctaagaggagtcattagaaacttgctttcagtcttttgaggtggtaagcatttccttcatggactcct

SEQ ID NO: 203514 - DNA, 392 bp, Glycine max
  unsure (1)..(392): unsure at all n locations
agcttatgcgcatgtgtccttactaacgtttgcttgcggaagacatcctattaaccgagaaaatgcacccatatacaatcaaggcagctttgttacctatattatttacacgtacttncaaggtgtatttgttacttacatcacacacatctccttggctaaattcacatacatgcatactccaagcattttggggtaccaaaaattgcacatgtgcacatcttggtatttctaatacctatacatacacaaacttcatgatgaatcttgactatctacacaataaggtgctacatttcatgccccttttcaagtttttgctacctaaagccgcatgcaaattcaagcatattttccttcgctgactaaaattgattcaaattatatatata

SEQ ID NO: 203515 - DNA, 388 bp, Glycine max
acaaaacttacacacagtgtcttctgtgcctttagtgctgttctccaatcaattggagttttacctcggaaacttttgttgacctttaatgaaaacattttaacacgaactattgaggcgaaacttcaattataattgtataacaacatgaaaaatacctaacgagtaattcaaaaggtggaaagaccaagttaaacaacattttcttggaaaagatacacaaaaggaaagaaataatacctcttcacgataccaaggtaacttgtcttcatggccatggtgatgcaaataagtcaccaaatccaaccacataacaaaaatctcaattacaaaagtcaattaggacttgattggagtttaaagaaagactcttctaattaagtgtcta

SEQ ID NO: 203516 - DNA, 482 bp, Glycine max
  unsure (1)..(482): unsure at all n locations
agctntgcaccaactgcaacatcatagcctctataagatcctccaggaacccggtctggtgcacaaggatttctaggtgtgccataatgtatattctctccatttatactggcagattggaatacttagttacgtgagtaacagaaataaggtgttcaaaacatacacatgtctgattacacataaataccaacactcatagtcacattttccatagggagaagaaagctccaccaaagtgagctaaactgagcaagtatccatttaattattaaagtgcatcgtggtcttaccacactaaattttaagggtggaaacacccttatgcaaatactttacagacaaaaataatcattgaggagccttgttctttctatataatctactgactgactagagagtatattacttccaactctaagatttagcctaacaagccacaatttacatgacaatgatcacagtaatatattatcactctt

SEQ ID NO: 203517 - DNA, 412 bp, Glycine max
  unsure (1)..(412): unsure at all n locations
tacgtatttgatctttattactacaccatttttatgttttacacttagaaatgaatcgntntagtatctacacatacactttttaatctcttttagtacctactgtccaaaatagtatgtactaaaatggattaaaaagtgttgcgtggggactaaaacaagtagcttctaggggtagagactaaaatgtaaagatcgtgtgcagatataagaaccaaattagtaattcaacctaattgctttaaaagatagatttctaatccaatagtatattaataaaattttggtattgtgtatgacaattaaactcttataaataatacaaacttgcaagtacctgggaggttctctgagacggtagcatcaaggatccttttccccacagcttctacaaaagccgggccaccagtga

SEQ ID NO: 203518 - DNA, 444 bp, Glycine max
  unsure (1)..(444): unsure at all n locations
agcttaaaggaaaatattatgttgcaaccatatggtcacaaatgctttattttgttgatttttaaccgagtatcacagagatgaaaatgcttcaatctgaataatgactgtatcagagggaaagtaagtgtancatctactcatctattgaggaaaacatggtagaatagcatcttataattattggtcatgtgagaagaccattgaaagcattggtaagaagagttaattagatggaggataacccaatagttagaggtagtgaaaaaccaagaaaaactgtgagagaaaccattaaaaaggacttgcatttcaatgacttggcttttgacgagacacaatggtgccatttctcatttgatctatgcggctaactgcacttagtatgtagtataagaaaaaaactttgctgactaatttagctttgttgattatggtaacata

SEQ ID NO: 203519 - DNA, 409 bp, Glycine max
  unsure (1)..(409): unsure at all n locations
ccttgaacaatatactggccttcatttaactgtctctgtgcttgtcggccacgctcaacanagtactttcgacacctactgtacgttgctntgaccaaggctattatgggaatgttgcgacaatccttcanaaccttattgatacattctgagaggttggttgtcatgtggccttatcgacgtccttctctatcataagccatcgtccatttttcctttgaaatgcgatcaatccatgttgctatggctggacttatgttacgaaatttttctaaattttgatcaaaaatgtgcttgcaaggagtgtaggctgcataaaattagttatcaataacaactttaagtatatatggaagttaaataaacgtgaccattaaatatgaaatcttacccaacttcttcaacattt

SEQ ID NO: 203520 - DNA, 410 bp, Glycine max
  unsure (1)..(410): unsure at all n locations
agctntgagggtgcgtagcccaccatcttttctagtagagtatcgataatgtgtctaccatcacgatcatcgtctccctttccatcattgggggtaccacctgggccgccagatccctccaccttttgggcgtgttctttgaaagatccgtccccctttttgcaaatgttctgtagttgcatcctatccggaaccatatcaaaattgtactgatactgcctaacaaaggcaaccattatgtccttccaagaatggactcaggaaggttcctaagttagtataccaggtgacagttgtcctagtaagactttctcaagaaaaatgtatccgcagtttctcatcttttgcgtatgcccncatctttagacagtacatccttagatggttcttggagcaagtagtccccttgt

SEQ ID NO: 203521 - DNA, 412 bp, Glycine max
  unsure (1)..(412): unsure at all n locations
ntacacgtatcagtcaagtgtatggaccatatcgtggcctatgtactcatcgataatggttccagtttaaacgtgatgcctaagagcactttggacaagttaccattcaatgcttcccatttaaaaccaagttcaatggtggttcgggccttcgacggcactcgccgagaggttaggggagagatcgatctcccagtacaaataggccctcacacctgtcaagtcactttccagataatggacattaaccccccctacagctgcctgttggggcgcccgtggatccactcagtgggagttgtaccttctacactccaccaaaagctgaaattcgtaatggaggggcacttggtcatcgtatcgggcgaggaagatatcttggtaagctgcccatccttcatgccttatgtgg

SEQ ID NO: 203522 - DNA, 453 bp, Glycine max
  unsure (1)..(453): unsure at all n locations
atcttcaagaataatggcctcagcaaactttttatttccaaaaagaaattcaattaatagacctccaatctttaatggagagggttaccactactggaaaacccgaatgcaatattttattgaggcaatagacttaaatatttgggaagccatagaaatagggccttatatacccaccactgtagaaagaaccacaatatatgggagcacaacaagtggaagcacaacaatagaaaaacctatatatagatggtctgaagaggatataagacgagtacaatataatttanaagccaaaaacataattacatctgccctgagaatggatgaatatttcacggtttcaaattgtaagagtgctaaggaaataagggacactttacaagtaacacatgaaggcacaacagatgttaaaagatctatgataaacacattaactcatgaatatgaact

SEQ ID NO: 203523 - DNA, 405 bp, Glycine max
  unsure (1)..(405): unsure at all n locations
tacatcagagttagaggttccttctttaagaatcctagcagagttaggattggaagaatcagagtgtggggcatagacgtgatcgcggccatcgagaagattaaggctaaccagtaattaaaatggtgacaaaaagggttaagaaataggagaaaatgatgacacatcaagcaccttggccattctctatgtggggcatagacgtgatcgcggccatcgaacccaaggcttcaaacaggcatcgcttcatcttagtcgccattgattactttaccaaatgggcggaagcagctttgtcataccctaatttcgtncggngacctttgcttgatgacatgcgacctttctttggtccttgtgaggtgcttggcatccatcattangcaanttgtgaaattcaggaca

SEQ ID NO: 203524 - DNA, 454 bp, Glycine max
  unsure (1)..(454): unsure at all n locations
agctngtgaattctccaagaacatgttcatatatccatcaacatctactattgtgactgttgagaacattgatcccactatcgtgattcccttgatattgcattccgaacttgttgtgcctgttggacttcctcttttaaatgtagtttctctgtcacacttgaaccaatttatatgaatgtggatattttccttacctaaagaatggcatgtgtaatgcaatttcacaaataccaaacacaagctggtggcaagatctggtgaagaatattttggacatgttgatggaaggcttatggaatctacgatgaatcacctcaatgggataacaattgataaccgatgaaatatctatgttgcaaatataatgaatatggcacctacgaaaactatcgattcaagcaagccttatgttatactctgagcaatcctttgtgctcctcagttctctccc

SEQ ID NO: 203525 - DNA, 445 bp, Glycine max
  unsure (1)..(445): unsure at all n locations
cactatgaatactaagcttgaaggttaactagaaagtaatagactagctaactataaattataagtatttaatagaactagcatttaagatagttgacaagtataaaatgatgtgaacaaacacatataaaattataataagataattaggataaaaaagaaaaaaaagaaaagaagataggagcttataagctccatttaaaaataaaaacgcaaccaaaatgttgcaaaaataaactcccttacaaacaattttaatttggtcaaatatgcntttaagctaatcaaataagttagaagttagcttcaaaaccttgccaaacacactcactagtgatgaggctaaataattatttaattaccattccatcctctaagtccagcataagatatccatgggtcatttgcatctgctatggtagtcatgctgtgaaggagtaaaatg

SEQ ID NO: 203526 - DNA, 458 bp, Glycine max
  unsure (1)..(458): unsure at all n locations
agcttcacanagagaatacatnttattaacatcgacattacactttttcagtacattgcaacaacttttgagaaagcctgccctagtttggtatgccaagtaagaaacaatacatctatgtcaaaattacatgtgacacctaattgcatgttttgtattgacaattatgaattatgataggaagatgaagttgaactacagggaaatttattaaacacgtacagtatgaacaaatggagaatttgcaatgtaaatatacaaattataaaggagaaagaagaaacaatggtgagagaaagaggaaaatatggtctatgagtttagagaaaccataatgaatgtactcttttctttttgcataacatggcatcagtatgaagtatccactatcggaagcaatgactaatctccgtatagatcataagtgtcatgatatgggattcttctcccaacatagt

SEQ ID NO: 203527 - DNA, 484 bp, Glycine max
  unsure (1)..(484): unsure at all n locations
tggatcatacaaagaagagtccacaattagctacataaggatattttgaaagccttgaagcaaagaagagtgattcatgctaaagaaaccgtatatgatcatagaggggtttgactctggtcacacccatgatcagatgctgatcaaattgtttttcaacagttagaacaactcatgagggggatgaacctagtcacgcccatgactgtgacctttgagagttttattcaaaattntgattctattgtcttttaggcttgaactctatntatcccatacctttaaataaggaatttctatcctagtctanggttccacacttttgagagttagagagagaaagaaagaaacccaaggctgggggcgacattatatgtgtttggattcatccttcatcanaagtttcttcnccatggctatgagtagctaactcacctctttcatcaagggttaatgtaattggtcataccgtcacgtaaatgct

SEQ ID NO: 203528 - DNA, 406 bp, Glycine max
agcttcctcggagccattatctacaaagacacattcaactaaaatttagcatgaaaatttatttgcatgaaatacataacccatactatttagttatcccaagtatagcaaccaagaagtcaaccaattcttttgtggtctttattaattgtaggtgttaccatacaactaataaagatcaccactcaatgtgtattattttgaaagaaagaatttgatattctgcaaccatttatgcgtaatgcacccaccttggtgcagcaagtttaaccaaacaaataggccaattcaattcgaacaactttaagcattcatatgacttatgtaattgcatctaaagcaatgtccaaaacctcaagtttagctcacccttggcatttaatttaacaacctaagttgatcattg

SEQ ID NO: 203529 - DNA, 271 bp, Glycine max
ggatcgtgctcctcgatgctttgatgccaagacgcttctataatcagatcatgtgtttgtacactccgacaacctccacctctgggtatgatggaagcaacaacgctatgcaccatgatgtcattcaaatgttacatctacttaagaagaatcacttcaatgatgcttatgttggacttaccaaagatgccaacatcactctgtaattcagcattcactctaaacctttactggtcaatatgaagggtgtcttcattttacgaaatgactg

SEQ ID NO: 203530 - DNA, 487 bp, Glycine max
  unsure (1)..(487): unsure at all n locations
gaccttggatctctaagtcacctgcagcatgcaagcttgttgaaagacacattcaaaccattttgaaatggcttgatgggcctatagatatgtgtctaacttacaaaaaaagatagagagatttaaaaatagaacttaattgtcaaatgttctcccaataactatggccaaacacgtgcaaatctatttagaattcttctaggatcttcaatttgtatcatctactctagaggagaggaatctttctattcatctcttaaactcagttgtaatcaagagactggttgtctctcggattctaagaatcttgaacacaagggtaaaggatcccaaggtgtgttcaaagtttgtaaatgatttacagagatagtgaaaaatctcaagtgggttgcttgaggattggacttgtgcacgggaagtggctgaaccagtataaatggagtttgcaattctctcttccgttatctcatttattntattgctacta

SEQ ID NO: 203531 - DNA, 176 bp, Glycine max
  unsure (1)..(176): unsure at all n locations
tacggcatcgtagatagctgtcctgcattatatatatgatgagctgactgatcatggataataagacaactgtgctggacctggagncactacacttgcgtggactaggacggacctttataggctacctaattgtagcctctcatatataaacaaaatggaacttgaggtgagtg

SEQ ID NO: 203532 - DNA, 367 bp, Glycine max
  unsure (1)..(367): unsure at all n locations
tcttccctcatcatgaggcaattttctcaataaaggtccctttataaacttattcccgaaataaggcccttttataactaaatctggcatggcgctctttttcatgtaacctgcatgcataaaccatgcaaaccgccattggcaatggcgagttcactgcggattggacccgtggaacgtaaaccgccagccatgctggcgatttcgctgaacgtggcatctcgccacttccactggcgacacagccagtggtttcacaaaccgctggtttgactggcgacattgcangcgcgcaaggctatacagnggtacaggttgcaagctacatgggtgcaggtgcanggaagcagccttgacttcttgggct

SEQ ID NO: 203533 - DNA, 515 bp, Glycine max
  unsure (1)..(515): unsure at all n locations
cactaagacactcaagctgaggattatggngtacccatcacatgtaggactaggtggcggtcgggcgatggtgcacnaacaagtttccacatccacaatgcgcgcataaacccaccatcccctgttgcccacctccaactgaactcacgtactcccacgtagcccatatcctcgtttctctcaacaccgggtccgcatcaatcctcccaagcttccacagcatccaagcaaaacaacattcaaacagcacaagctatcgcaaccaagcaaaacagagcataggaagaatactctgctcaacacatcaaccaagatcacagnttttctcactgaaagaccacagtaacaattccttcgatccaattcgttaaccgttggatcgactccaaaattttactggaagtctatagtgcataagcctacatagtgaccgttggatctactagcaacatccagaactcattcttgactactctttccacagacaaccacacacaagcattttctgcaccaac

SEQ ID NO: 203534 - DNA, 318 bp, Glycine max
caaagcgcgcttagaaaaaaagttgggcttcattgaacacaaaccagtgcctggggcttcaagtcgggccatgtatgcaagaacttctcgaattccaacccttgttgttgacccgttaggtataattaattattgtgggatatggtggatttcaggaattggaatcggactctacttatgagaataatataactaaacgtcgtaaatgaatatagtacacatgaagaaaaacttatactactgcggagaaagggaaactctctgctgtctgagccaaattactacagctacgtggactgatctctagttagacactat

SEQ ID NO: 203535 - DNA, 388 bp, Glycine max
ctaaaccttgaaaacttgagttattcattcttttcatctcttctcccttcgcggaaagaattcgacaaggactaaccgcctgacctctttttgtgtctctcttctcccttgcccagaagaacaaagaactaaccgcctgaggtcttttggctcccttctccctcgtcaaagaattcaatacgacacattccgagaattcttgtgcttcttccctttcccatatacagaagtgttcaaaggactaaccgcctgagaattcttatgtatcctcatccattaaatatcaaaggttcaaccgtgtcagagctgtcgcttaccacactgtagggtacattctatgtggtacaaatagatggtacatctacttcggttgctgactgataacaag

SEQ ID NO: 203536 - DNA, 321 bp, Glycine max
  unsure (1)..(321): unsure at all n locations
agcttctctcttttctttagaaaanatttttgattttggggtcaagagaagttaaaacggccattttcttgtaccttgcatgtaagcataatataaagacttggaattggtgtgacgagggtggccaccttaattagtctaaatagaaactacaatatattaaacatgaattttatatcttcaaacaattaactacaaaaggaaaatacttaaatcttacaataataaataaatatcctgagtactacaaaataaatatcacaaaataaaagacacattcttaattaaaattttgaaaatttatataaaattatctgaaat

SEQ ID NO: 203537 - DNA, 455 bp, Glycine max
  unsure (1)..(455): unsure at all n locations
taaagttgtctagtgaacactattgatgctgatatattctgtcccatatagggcattagtgaactactactattctgtgcctnttatagacatatacatttggaaaaagttaaccaacatcccacagaacaatagttctgttgtactagttgacccattctttacttctttcgagtttacttattgaatggtttatgaattattttatattaatatttatatataaatggctttgtataattctacatagagaaattctaataagttgcgttagtttagttaaaaaaaattgataggctaagttgtaggaattacatctagtaaatatttagaaagaaatagagttgtatagtcttgcatcatagtaatattctcttttgttcttaattagaattacacatntatcacttactatgattcatcaggaagcatacctttcgttgagattaatcctc

SEQ ID NO: 203538 - DNA, 439 bp, Glycine max
  unsure (1)..(439): unsure at all n locations
agctagttcttgaattttcctcanttctttatcaagcttagaacaatatactnggccttcatataactgtctttgggcttggcggccacgctcaacaaagtactttcgacacctactgtacgttgatttcaccaatgctgttatgggaattttgcgacaatcctttaaaaccttattgatacattctgagaggttcgttgtcatgtggccatatcgacgtccttctctatcgtaagccatcgtccaattttcttttgagatgcgatcaatccatgttgctatggctggacttagttcacgaaatttttctaaatcttgataaaaaatgtgctcgcaaggagtgtaggctgcataaaattagttatgaataacaatntaaagtataaatgacagtaaaataaacgtggccactcaaatatgaaatntacccaatttcttc

SEQ ID NO: 203539 - DNA, 396 bp, Glycine max
  unsure (1)..(396): unsure at all n locations
tgccgccacggagttntccggctatgctcttgtgtggtggaacaatctacanaaggagagagcaagaaatgaagagccaatggttgatacatggacggagatgaaaaagatcatgaggaagcggtatgtgccggctagttactcaagggacttgaaattcaagctccaaaaactaacccaaggcaacaagggggttgaggagtatttcaaggaaatggatgtgctcatgattcaagcaaatattgaagaagatgaggaggtaactatggctcgatttcttaatggtttgactaatgatatccgcgatattgttgagctgcacgagtttgttgaaatggatgatttgtcttacaaagcaatccaagtggagcaacaattaanaaggaagggagtggc

SEQ ID NO: 203540 - DNA, 436 bp, Glycine max
  unsure (1)..(436): unsure at all n locations
agcttcccctgcaccaaatggctttttctataaatagccatgcagagggaaaggttaggggctggcaattgaaggaacacaaggaaaaacacatggagaaagagaagaagaaaaagcaaagtcgaggcaccgccaaatcgaaccgtggatcattccctacatcgtttctcttgctagccttgtaccctgtgcaacagtcggttagcttttcttaagaatttcatgtaatctatgtacccttatgggtcctttatgatattatgtgtacatttatcttctccacttatcgttggtaatttcaatttattcataaggcttaattctagtcgatcactaatgtcacgaaaactgtgtttttagtgagactggaaggtattaaacacaacaaaaatgaanaaaatcaattacaacccaactttttttataaatatactta

SEQ ID NO: 203541 - DNA, 391 bp, Glycine max
  unsure (1)..(391): unsure at all n locations
actaagcttaatgttatgtacatagatatgtcaaaccgttcatttatggagatcgnggtatggtattggtaagtggcatccttggccaaagtggatttgattgggatggcactaagcacatgatcacttgagaatgaaaatgctnggaatgaatattgcactgtaagtattctttaatatgttgctatttgttattcaaagtagattggatttgactnntttatttttgttcagtcgcataaatcggctaaaccgtttcgattcaaggtgcttcaaaaatgggatgatatagtggatttgtgtgctacagatagatccaccggtcatgaagctgaaactgctatggatgctgatgaagcgatgagtagagaaacaaatgaagtggaattat

SEQ ID NO: 203542 - DNA, 408 bp, Glycine max
  unsure (1)..(408): unsure at all n locations
agctntataagcgcgggtcttttatacaaatgtcaagtggtcacgatatacgaagatgatgttccgagtacattagatttggtacgaccatgccctcctgatttccagctgggaaattggcgagtggaggaacgccccggcatttacgcaacgagcataatgtaaacctttacggttttaaaagctctatagttgggcctaggctttagagtttttccttttgttaaggctttgtgtcttttgtttttgaatttataatacaaggatctttcttcatctgttcctacgtctctacccattctcattcatttgcatgtttacttctttttctgaaacgacagatccgatgacgagtcctccgaaggtactaatacttgggacccgcctatcgacttcgagcaagaaatg

SEQ ID NO: 203543 - DNA, 408 bp, Glycine max
  unsure (1)..(408): unsure at all n locations
nttgactgactataccaagctcttatgaaccaggactgagaattatctatatatangctngctaagggtagagagaggaagactagagatttggatcacgtaaagtgtgttaaggatgaagaaggcaaagtcttagtgcatgataaagatatcaaggaaaggtggaaggtgtatttccacaacttatttaatgatgaatatggatacgactctagcagtctatacacaagagaagaggaccggaactatangtattatcgtcggattcagaaacaggaagtaaaggaagcgttgaaaagaatgagtaacggtaaggcggtggggccagacaacatacctattgaagtgtggaaaactcttggagatagaggtcttgagtggctcaccanactctctaatgaaattatg

SEQ ID NO: 203544 - DNA, 313 bp, Glycine max
gcatcccttgaagataaaggagaagaggtgatagaatgtcccatctactatggaataagccatggaaggagaagcttctccaccaagagagtatcttggataagaagcttatagaggaatattcactggatgaagagaatgatggagagagacaaagcttcgtataaagttgaatgaataaagagagagaagttgaactttgaaatgtgcctcaaaagattcttattcatttaagttgtgacaagtgttacacatgtttctatttatagtctacgtcactaactaaatgaaaatcattttcatctcatcttaa

SEQ ID NO: 203545 - DNA, 478 bp, Glycine max
cgcattcgatagtggagctcatccaaaggagttattaatgcttatataattcaggggttaaagaaagagctgaatgctttggaggctggtatctctgacagaattctgaatcaatttgaagtggagctcaagaagtctcttcaggagcaattgtggcatgctgctaatgcctatgaatgtatgctgaagcaaaaggctatagtgaaatggctaaaggaaggggacagaaattcagcttactttcacaagctgataaatcatagaagaagacataatgctattcaaggattgatcattgatggggaatgggttcaggaccctagtagacgtcaaactgaggccttcaatcatttcaaagatagatttctgagcagaattttaatagaccaaccctggatggtgtgcagctaccttctctttgtcaaagtgagaatgaagcccttgtggccagattctctgatgctgatacagtttgtta

SEQ ID NO: 203546 - DNA, 393 bp, Glycine max
atcttgtgatatgcctacggtcccatcgatgagtcaaaggtggttgacaaaaagacttaaatatatttttcatctttgtaaaatacttctttttcatattactacctaaattgcttctttttttttgcttttggtacctataatatggctatctttgtttttcatactgatcgttagtgtctatctattaagtgatagcatgactgacagagtgttatgtcatccatgccatgccatcttgggttgacaaagttgttgaccttagccttttccatgtcattatctccttttaatttaaaaaatatgtaaccctaatatcttttaattcgcttacatccttagagatgtctgcaaagacaacaacgttgtcgatgtttcgctcatcaacaatgt

SEQ ID NO: 203547 - DNA, 479 bp, Glycine max
  unsure (1)..(479): unsure at all n locations
tatcanagaaggcanaanagaagggcaagagaacgcctcatgagcaattgggcttctcggccgtgaccctgagagcgtggaactcatgatccacgctggtgtttgctctgtcttcgccaaagtcctcanagaaggtcccatgatagtgcaagccgtggtggcttgggccgtgtcggaattagctgcgaaataccctacatgccaagatcttttcgctcagcataacatcgttcggttgcttgtaagtcatcttgcgtttgaaaccgttcacgagcatagtaaatacgccattgttagcaacaaacctacatcaattcatgctgttgtgatggctagtaataatagtggtaataattctaatggcaatagtagtgtgaagaaggatagtgaagatgaggagaagcacatgcagagtaggatgcagcatcccttgtgtgataggtcaacaaatcagatgcatagagtggtacaagtaccat

SEQ ID NO: 203548 - DNA, 362 bp, Glycine max
tttctttaaccatttcaaggtaaaacggaagtttcatggagataaactgaattaatccagaatcttgaaatgcttgaaagcaatcaaacacttcatcatcaaagaaagacaagtctacgaacttatggtctataattgaacgagaggagaaaagagaattgtaccggatacattgttcttccgaggaaaacaacgtatgagatgatatggagggaggaatttgagatgtctgctccttggatgttccgtggcttcgtgttttagagactgcggatgaagttgcaacctcctttcacttctttgatggttccaccattttgagagattatttggaatttcaatcggttgaaatgaaagatgat

SEQ ID NO: 203549 - DNA, 355 bp, Glycine max
aagcaaagaaagaatagttcacttgtcctcaagtgacaaaaagagtgggcaatcaaaacagaaaggtgttagattcatcaaggatatcaaccatatgaactgaatatcatggaatttttaaatcaaatcacttctcacaagcgtgcaactgttcatagataggatcacaaggattagagtcatagataaataagctagtaagcatgacagaaatcaaggaaggatgatcaacccaaacctcatagtcattgtttcactcaaactcaagtggttaggcttattccctcataacaaccaacaaagtaccaaccttgcattcatctctatatacaggaagaacacccaaatgaactga

SEQ ID NO: 203550 - DNA, 420 bp, Glycine max
tttctatacgcataggctgagccacagggtctaaatgaaagacccaagcctacatgaaccatcaaagaacgtcctaccacactagatagcttagaaatttcccatgggaaaactctgtcttatgtgactgcgtgtgcttgttagattgcttggggttctatgttaagcccattgtcaccttaggaaaatggacttatcgactgtcttgaactagaagtagaacagctaactcagactcagggggcacttctgacttgttagctgcaggtacgaacgtagagagtttgttaggtcccatccagtctacaaaaaaagaactcaaactactataccgactacgagggaatagacgggaagcatgcatggaagcactctatctaaagcaaatgcaccttacaacacttcgaaagcgaatttatg

SEQ ID NO: 203551 - DNA, 443 bp, Glycine max
  unsure (1)..(443): unsure at all n locations
tgtagaatggctagacataatacatggcgagggttggtttggttcaaggataaaagggatgccccacattatttccatgacacanatgcaaaaatgatgatttggaaattttatgcaaaactggtcatgcatgcacctatgcggacactcaagtgtcaaacttttatggtcatgtgatgctagggctcaggattcatttcctctattntagatcaacccaatgtttccaaaatatgttcttttatcaatttgtgcattcatccgagtccattttgggtactcgggaaaattntcacagcattcacccttcaggtgtgcacacattttttttcaacaactagctatgatcnagcgaatttttttttttcaaagaagagttggaagtcatctcttttcgaaagcatgtnggttttcagctagacaactaattttctctttctctc

SEQ ID NO: 203552 - DNA, 322 bp, Glycine max
agacgcagcagctgtaacgacaaacggagacagagattcttgcaagcacaaaccttgtgaaacgataagacagccgcatcgagaaaaaaaaaatccacacaaagaaattcccaactcaaacttacctcaactctccaagagatgcagagcgcaacgaaatgatgagacacagaccacacaaacgcaacaacaaacaaagcaaccaagaaagggggcagaaaagacaaactcttaaggactcttcagctcaaggcaagcatcagaagccccatactcagcaaatgaaccacggggagtcgcaaaacaagatgacagcggccaa

SEQ ID NO: 203553 - DNA, 403 bp, Glycine max
agcttgtgcagagcaaatgaggaagatgagtgtctatggtgatataaaagagccttttctaggctacattgggtgttgagaggtcaatatttgaatggctggggttttcaccttaaaaccagcttgagcaagtctaaatcaatgttatagacttgattgagatgagagtttaccccaaaattacccaattcttattttcacttatcaagccctgaaaatccactaaattgatgggttttggatacctagattttgaattgccttggtctgaagcttgtttttggtttaaatatgatttatacatgatttaagacttgttggatccaatttgagcacaattggatgtgggcaagatggatctccaaatttgtcctattatgcagaagaatgctgttgaattgtg

SEQ ID NO: 203554 - DNA, 403 bp, Glycine max
  unsure (1)..(403): unsure at all n locations
tttcaaccaaccaaggggtgtcctccacagaactttgaacttcagattntgaatatttattttgtatatacacatataatatcatctgtaagtgtttttattaacaacaaaaatacttatgttacattctaaggtgatatacttatttcaaagaagtcagattcgtcatagatatccctacttacatttaataaataaataattgctttagacttggcgctaaaacagtttaatagtgaaaaaattggataggtagtaagcaattttagatttaaaccataaaggagaaaacatttggctgtaatcggtataagggcaaatcagtgtgtatgtttgatagaaaagtacaattaacattataaaatatttgttgccattttcctgctattatacataaaaattc

SEQ ID NO: 203555 - DNA, 376 bp, Glycine max
  unsure (1)..(376): unsure at all n locations
agctagaccaatcccgatttattctgagcatatttggncagngagaacctgtgatgtacctaagcaggcgagctcctgacagtcaacagataaaaggaacaaagaccacatagcaaggaggcttgtggtggctggccagctgagaactttgattgatatgtgggttatggcctctggtaatcgattaccaagggtgggtaatcgattacaatgcttaaaaatgaaaataggaggctaagatggtctctggtaatccattaccacggggtgtaatcgattaccaggcttgaaaacgaggtcaggaagctaaggaagcctctggtaatcgattaccaaggggtgtaatcgattaccaggcttaaaaagggaactggga

SEQ ID NO: 203556 - DNA, 399 bp, Glycine max
agcttatcattgatgatgatgatggggaaatatttgtcgcacttctcctgctctgcaagaatatcatgcaaaatgtaagagtgggactatagtccatttctctgtttgatctccttttgtcatactttgattatacttctttctggcttatttattatttcactacccctagaagtagatatttaaataaataatattcttgaagctcaggtacgggctctatcttgcctaggtagtgcagatacacaagtagtgggcattcaccatgcagtaaaaagaaaaattgtagcatgtagttgcgtttgttgcaaaggtttgaacaagaagaacgaaacattgcgaatttgcttatctttggcgtatttaaaaaatacaacaaaagacgatataagggtgaaa

SEQ ID NO: 203557 - DNA, 285 bp, Glycine max
catcattcatgtaagtgatacccctcttgaatggcgaaaaaacgggaaaaagtttatccgctcctacttagaaatctgagataaaccctggaacacttccctcccacgcaacagacaaactatatcccaagtctactccaacattagacctcgggacaattaacatgtatagcctcttgaccgaacttgagaacgtaagcagagatggcaggcgtgatagaattctagacgaaaacaccccggggtataacgccccgaaaattctgggtaggggtatcaaactac

SEQ ID NO: 203558 - DNA, 397 bp, Glycine max
agctttatacctctcccatgcatcgaagagatactcaaatgacatttgttagaagctagttatcctttccttgataatttcaatctttgattctggaaagaattctttgaagaactcgtctttgatttgctcccatgaggttagactgtggtgtggttgagaatcgagccattcaagtgcactttctcctaatgaaaagggaaaaagtagcatctcgatgtgattgtctttgatttcgggtattcttactaatgtgtataattgttggaatcgcgtaaggtgggtatgcggttctttagtgctagattccataaattgagtgttatggagagtatttgaaattctgatactgaggacagatgtcgtacaggatgtcacgacatcgcgcttcagaaca

SEQ ID NO: 203559 - DNA, 475 bp, Glycine max
  unsure (1)..(475): unsure at all n locations
gcaagctacggagaatcgggacttatccttgttaagnctcacagggccattgcggccttgtccanattatgatcatccgttgaggtgcttcacctttggggacttctagctatcacctatggtagaagaatttgaagagatcctatgatgccctctatggggaaggaaaccatacctcttctcagggttctatccctcattagctagaatttccaagatagtccaaatctcgacgcaggaattataccacaggaagcaagtcgaaaatggggtgttggaatactaagaaaatatttggaggcaaaagcaagaatcttggcaggtaaaggcgagtgggccccattcatagacattctcgcactgttgatcttcggaggagtcctttttccgaatgtggatgggttggtggacctggcagcgatcgacgcttttctcgcctatcataaccacaaggaaagcccggntgtcgctatgc

SEQ ID NO: 203560 - DNA, 388 bp, Glycine max
agcttgagaaaattttaagaaaataagtactatctcaaatggttaatagtttctataattttgaaaagtataatgtacattaacattagtgacaaaatagtaaatggagtagttatacccgatccaagaaatatttagcaacattgggaagattatgtaattccttttttgtcttgtatgtttcttgaacagcaggatctttccagatttcatctaccataggagcatactcacgcgttgcagcagggaagaaggcctccaaatctccgatggccataatatccagtaatcagtcagaaaagtgcttgaatctttgattatagagtaaacactcaccttgttttcgtcagctgctgtctctgctaaatttattatacaattagattca

SEQ ID NO: 203561 - DNA, 346 bp, Glycine max
  unsure (1)..(346): unsure at all n locations
tgagggatcgagggttagtactttagggtaccacatagaacacaaaagcattgatgattagagaaatatccttatatgcatcagctttgttgttagaaagacccaacacttttacctactatngtcaatcttacttacttgcattattattgtttttagcctagacttagtttaactctgttctaaaccatcaattatcaatgtttctttcaacaatgccttatttctgaattaaccctatctaatactagttccctgaattcgatactccgattcatcccgtttaatttaaatacttgacatctggtgcgttctagtgaatggattcgcttgacatatttgtata

SEQ ID NO: 203562 - DNA, 400 bp, Glycine max
agcttcaacctagaggagacggaccattccattgttggagaagatcaatgacattgcctacaagattgacttgcctagtgagtataatgtaagtgccactttcaatgtgtctgatctatctctttttgatgcagatggaggggccttggatttgaggacaaatccttttcaagaagcagggagtgatgaggacataaccaaggtcaaggaccatgaagcacttgaagggcccatgaccagaggcagacttaaacaagcccaacacgtcatagagacaaggctagtcatttgtatagctgccattgatgatgattgaaggcccaagtggagaaagatgaaggcccagaggtagaggcactacccagactactaattgttgctgaaggcccaaactaacttg

SEQ ID NO: 203563 - DNA, 473 bp, Glycine max
  unsure (1)..(473): unsure at all n locations
taagcttaagaatcagatcaaattcaagactcaagattcaagaatcaagatatgtatgaaaagtgtttttcaaaaactgagtagcacatggatttttctcaaaacatgtttaccaaagagtttttactctttggtaatcgattaccagattgttgtaatcgattaccaatagcaaaatggatttgaaaaagttttcaaatgaatttacaacgttccaattgatttcaaaaagctgtaatcgattacaatattntggtaatcgattaccagtgcctttgaacgttgaaattcaaattcaaaagtgaagagtcacatcctttcacataaaagctttgtgtaatcgattacacttgattggtaatcgattaccagtgatttgttctgaataaatcaaaagatgtaacttttcanatggttttgactntntcgaattggtttaagttttataaaagtataactcttctaatggcctc

SEQ ID NO: 203564 - DNA, 413 bp, Glycine max
agcttgtaggcctaggatcttcttcatcaatgtattcctttgcttttcggaagatgaatggaagcggaatggagaatatgaagagttgagaggagatgccacatcaaggagaagatgagtctagaagaagttcaccaccataggaggccaaggataagagcttggaggaagaaagagatgaatgaagggagagggagagaagagcacgaaattttttgctctaagagagctctaaactttgaagattaattttcaaatgatcaaagttgaaaaaaaatgcacacacgtgacctctatttatagccaaagtgtcacacaaaatgggagagaaatttgaatttcaattcaaaattcacttgaatttgaaattgaatttgtggcgccaaactttggagccaaaatttcactaatta

SEQ ID NO: 203565 - DNA, 402 bp, Glycine max
  unsure (1)..(402): unsure at all n locations
ctactatcattggcatcatttgtttctccgtcatagaggtgccacttgagctgccaggtctctccacctttgggcgtattcttttgaaagatctgtgccccctttttgcacatgttctgtagttgcatcctatccaaagacattatactaacactgcctaacgaaggcaaccactatgtctttccaagaatggactcgggaaggttccaagttagtgtaccaggtaacagctaccccagtaagactttcttggaaggaatgtattagcaattcctcatcttttgcgtatgcccncatcttccgataatacatctttagatggttcttggggcaagtagtccncttgacttgtatagtccacaccttgaactggagggggatgatttgggacttgaacactct

SEQ ID NO: 203566 - DNA, 403 bp, Glycine max
  unsure (1)..(403): unsure at all n locations
agcttatccttgcatcattatctgactttggtatccccattgtatgtnttgtgcttcctttgaaaaaccctagagaaagagactttgtaaacgttatcttttcatgaaatgggtgttattttcgtgaccttcattgaaccccgattgcattggtgtgatcggaatttcaaaatgatgttccttttctaaaatccaaaattccctcaagccctttacgttttgacaagggtttcgactcagaatattgtcactagctntatttctgaaatccgtagtaatttccttcgttttggcgtaatagaaactcgcgttggaccaacaagcgtgaacaagaaagagacctctaagtgacgcatatatgaaccgatgggaagctcatgataggtgagaggagtttattata

SEQ ID NO: 203567 - DNA, 403 bp, Glycine max
agcttggttagtgcgtcgcactaagtgagccattctcgctaattgtaattaactctatgtcggagaataaggcttaacgagccatgctcacttatccactgtgcagcgtttagctaagcgaaggcgtctcgcttagcttgagtctttgatttatgttgttgtgctaagcgcgcccctgcgcactgagcgtaagtgttatttttcataatgcgcgctaagcaagtcagtctctctaagcgcccagtctgttattcaatattattttttcgctttcagatgaaataaaaacctgtctaacttgattatattgctcatttttgatgcacatggcctccagaaagaggaaagccacaacatctcggccctaagagccctatgataccactagattcacttctgaggg

SEQ ID NO: 203568 - DNA, 402 bp, Glycine max
  unsure (1)..(402): unsure at all n locations
cctgcacgcatgcaagctattaatttgctccttagaagatagatgttgtgagtgatttgaatactcattatcattnacatgcactatcccattatcactaagagtaaaatgatcatttgggagtatattgggacaggtctttcacaaaataattttagatcaatttaaaatttctgtgatatatataatctatatataagaatttttaatcaaatgaattatttaacataatgttattgaatgatttaaaaagaagcttgagctacactttagtaaaatcatccattacattctttctccttcttttatccattaaactgtattgaatgtaattgacacaaatgcaaagaggacaatcctaattctgaagcttacaagttcttagaaatgcttgcaactgcg

SEQ ID NO: 203569 - DNA, 350 bp, Glycine max
actccattgatgaagatgagccatgatagcctatgaagcacggacacgccgctgaagtgccgcgttccgcgtcagaggcccaccggacacgcaaacgagtacgactacagcgcgacgcagtgttcgctgcatccgccgtcaccggacacgggtggacgcatgaagcgcacgattggacgcggtccaccaagtggacatgtgcaggttaataatcgtgcgtgctcctccttcgataaggactcaccggactgcgaatatcacaagaagagaaggtagaagagataaacgacagacgaatcggttgatggttgacgaatcgcattataccgagattcgaatgaacgagctgc

SEQ ID NO: 203570 - DNA, 326 bp, Glycine max
gaaatacctgccatcatccacgcctcaatataaattttcgtcggaccattggtcatgtggctctacctcgcacgcccctacaaagaatcgctggctatatgtcctcttaacacgctactaattacctaaacttttgtcgaaacataacacttgttgccgaaggcatttatgaccactataggccctctcatcttcatttccctaaagagcaactttacatgacctaatacttgttacacccaaccttctttatcctttggcaaacaaaatgttcctaacctacccaagctattttccttcttccttcctcccctctccacaaaaac

SEQ ID NO: 203571 - DNA, 400 bp, Glycine max
agcttcgatgttaatagtgtcttggagaatatttcgcgaattggtacacggagaagaagagagtgtgagagggtaaacggagaataagagagcgcgagcgaaataggtcgcgtcaaatataatttaaaatgtaagttcagcatcggttttcaatataacaccgatgttaacaaattgatgtgaacgttaacatcgtgtttattaaaaaaaaccgatgttagagtcgctttgttaacatcggttttttaaaaaccgatgttaaggaatacacattatttaaaattatgccaccgcgtttacgttaacatcggttttgtcaaaaatcgatgttaatctgctgatgctaaatctggcttttctagtagtgtaacaaaatcagattagtgggttaccccttgtt

SEQ ID NO: 203572 - DNA, 409 bp, Glycine max
  unsure (1)..(409): unsure at all n locations
gagttttactacatgtattgaaagagaaacttacctggttgaattgggtcatagtgatggatgcgatagtaattatgtgttaactcggggtggtaagagatatcttattacctctcattgatgaatattccaaatattggtatgtgtatttagttaatcacaaaagtgagttggttgataagttcacagtggataaaacacaagtagaaaatccattagaaagaaaacttaaattctacgttttgatagaggtggagaatacacatctttagacacgagtaattcctataaaatgcatggtattattcatgaagtgacacctgcgtatgctcctcaatctaatggttatgcggaaagaaagaatcgtacctctgttgatatggtgaatgctatgctngtaatctctagt

SEQ ID NO: 203573 - DNA, 389 bp, Glycine max
agcttctcttggaccttatgcaaacctttatttcatccttcaagatcaaactgtctactcgtgattggtccctttcctctctccgaagattaagctcgttgttactgccccacagagcccctcagaatttgttccagtcgtgtttttccctacgagcccttttggtctcttgttccaaggccttggtggtagctatatttacgtctctcagtttggcattctcctttcggatcttaagagctgctgatttgaacctttctttggttgtttaggcttgctcgagttcttccctaagggcctgcacctcttcgtcttcctccggtgcttcaacttccacccctttagaggttctcatactcgggagccaatccaaaccttgaatgtgggct

SEQ ID NO: 203574 - DNA, 475 bp, Glycine max
  unsure (1)..(475): unsure at all n locations
actcagctgacgcacatcgtcgcgtgatgatatccacttcacatatgttgaagtagaggagaacttcaaccctataacgcaacgtggcggacaaaagtgggcagttaacttgaatggtcatcattgtcaatgcggaaggtattctacgcttcactatccatgttcacacattattacagcttgtggttacgtgagcatgaactactaccaatatatagatggttgttatacaaacgagcacatcttaaaagcttactatgcacaatggtggcctcttgggaatgaagcggctattcctccttctgatgacgcatggacacttatccctgacccaactacaattcgtgcgaaaggtctgcataaatcaacaaggataagaaatgagatggattgngtccaaccatctgagcaccgacaaagatgtagtagatgtggagccaaagggcataacaggcgtcgttgccaatggaatctg

SEQ ID NO: 203575 - DNA, 263 bp, Glycine max
aatacccatttttctttttcaaaaattttggccattatccggatatcaaaagtaaatatcctattccgattttaccatggtccataataattttttttttaaaaaaaactaactggaggtttatacctgttacccataagctactggaatctgatggagcctacctggaatctttgactgccgtgcaccacattatataatgattttcaaagggtttgttgaagacacaatcggaaaaaaaaactgtatggactttctaaagt

SEQ ID NO: 203576 - DNA, 427 bp, Glycine max
tggtggagatagagatcaagaaatgtgacaacatctacatcgttatttgtgcaagaatgaaggtaataatgacccttaaaagcctttagcggattttcaaaaccctaagagctataagtttgttttgatcattggagaagctagaagattattgtgagtttgaagctgatgaattgtcatcagaatcgtcgccatattcatggggtttcgattgagaattgttcgtgcttgacattatgagttttagatgaaaaattgcaagagatgaacaagaggaagaaaaagttaggttaaaggtaaataggataatccaacaataatctaaaaaatatattatttatagcaacaagactattgaacaagtgtagcagctaaagaagataaatacacagtcagatgcaaagaatagaataagaagaagaagaga

SEQ ID NO: 203577 - DNA, 394 bp, Glycine max
  unsure (1)..(394): unsure at all n locations
gaagcttaattgatcattcaagctgtnatcttgtttaataaatgataaaatgaatttcaaccgatcatttacgttgtaatctcgtttaatcactgctaaaacaaattctaattgatcgttcacattgtaaccacggttaaaccaaaaaaagcaaaataataataaaataatcaaaatatcttcgaataaaataataaaaaaaatcaatcggacgtttttctttggaagtttccttgaatgaattgactaataaccaatgtgaaactaaggctaatatcaactcacaaatcaagctttgtctgtaaaagtcacttataacctgtttaaggtccaacgccttaaacggtcctctttgcttttatcggntaacatggaccgttcaaaagcataaaat

SEQ ID NO: 203578 - DNA, 375 bp, Glycine max
agcttgagcttagctacacatacctctctaatagctaagctcacctccttgagatgagaagctagagcttatctacaccccccctataatagctaagctcacccccatgacaaaaaacatgaaaatacaaaaaaaagtccttactacaaagactactcaaaatgccccaaaatacaaggctaaaaccctatactactagaatggccaaaatacaaggcccagacgaaggaaacacctattctaatatttacaaagataagcgggctcatacttagcccatgggctcgaaatctaccctaaggctcatgagaaccctagggccttcccttggatctctagccaatctacttggagtcttctacccaatgcccttgc

SEQ ID NO: 203579 - DNA, 367 bp, Glycine max
  unsure (1)..(367): unsure at all n locations
gtgaagaaaacgttccccctccacccctttatattttcgtacaggggttgctcgcccaggcgagctaacctgtactttttttttttggcgaaacattaaccatgcctcccccccttacgggttagcagttgcctactcgaacctacttaagttagaatcaggcgtcgattactttatttaaaacaaataatagtaataaaatactgtgaattcaaaggatactgggctgccatgcaacnagcgtctctgcttgtctagcgccaggaatggacaacggtcggccgtgaccctatccctcatntgtcgaatgcattctttatccttcattgatacagatgcccatggctcatggctgccaaacacttac

SEQ ID NO: 203580 - DNA, 437 bp, Glycine max
  unsure (1)..(437): unsure at all n locations
tggtttatgagttatgaccttttatatgtttttaacaacgtttaataagtttcacaaaatcaaatataatttattttaataaattttacagtgatatttacaaatgagttttactaaataattgcttgattaagttatttatctaaatacatccaaaactaattgtcattcataaaacaccactaatgtgattgaaataatttcaaaatccagtgggtcagaaaataaatgataaggaaaggataaaaaactgccttgaaaatttagagcatgtataacaatgaaatgagactagctttcatgtaatgtcgctaaagaanaacggatgttgatagtaacaaaattgtntctaaaatgctggttgcaacaagttatctttggttctttcattttcagtatcaagcatgtggtctgtgcttaacaaggatggattaaag

SEQ ID NO: 203581 - DNA, 401 bp, Glycine max
agctttttggagtagaaacatgggaccaactctattttttttattataaagaagtcggatccagtctaggtctgagagaccatacaagtttcctaacgatttctaattatgtgggccattaagtctatcatatgctgacaatagccgataagcccgtgaatcttatcgggggtggagtatgtgatagccatcgacttggccttggctaacaagaggggaacatcttgactcccgtacaaggtaagagcaaaccgagccatccacatggttgcctcttggtgaaaagaggcgatcaccctttctctagcctctttttccgcatatacttgagcatactcatccgcgattctatgctcgtgggccgaggctagacctaactcttcctggtacatggcgatgat

SEQ ID NO: 203582 - DNA, 438 bp, Glycine max
aaaaatttctccaagaacaccctcgtgatgtcatcccagctgaaaatggacctgtgagcaagggattatagccaatcttttgccatctccctccagagaatgatgagaagcctttataaagatatgatcttcttggacgtcatgcggcttcatggtggaacaaacaatatggaactccttaagatgcttgtgaggatcttcacctgcaagaccatgaaacttgagcagcaaatgtattagtctagtcttgagaacatatggaacaccctcatcatgatattgaatgcacaagctttcataagtgaaatcaggtgccaccatctacctaagagtcctctcataaggtggaggttgagccatgttgtcagtatatgaagtagtagtcgaatgctcaagatcagaatattcagaatcaccttcaacaaaatgcttagaatg

SEQ ID NO: 203583 - DNA, 401 bp, Glycine max
agcttggtgagggagtggaaatgattgctatttttccaaaatttttgaaggaacatatttgctctgttggaaaataacacaagatcaagcaaaagtccttacttgtgtggccattccgagccagaaaataatcacgcttggcaatgaggggtttaggacttgaatgttctccattggaggaagattggagttcaatgattaccctaaaataatcatccctaaaacattactattaactctagatctgattagaatttgtataaacatgcttggcattccggtgtgctagtgtaaaattggcaaagttcatccaatagagaacgaatggtggatgaaactacaaccagcaacatatgagtttgtggtggggaaccgtcagtatggcatttagacagagcatc

SEQ ID NO: 203584 - DNA, 438 bp, Glycine max
  unsure (1)..(438): unsure at all n locations
ttaaagagttaagttagagatactaggcttgcctctaggagtgcttctttaacgtctttagtcggacacaggatgatgatcaatcgatcatgggcctagcacctgttcgtacctgctcctaagcttgaacaaaaaacgtggcatcatgcaaatgtgaagcaatactacaagatgcctgcattacctttcgcttacccttagtgcttatctcaaattggtgtggtgttgaccatcactcaaaatgactctttattcattctccgatttgcatgatcccggatgacaagatgcanatgcatgcatgtttatgattgaatggtaaatgcaacaattaaacaggtattaacatgttcaattttacttaaatgctcatggcaccctgttgatcgagccaattggctccggattcaatgggcaagaatgagagtgtatgtatta

SEQ ID NO: 203585 - DNA, 398 bp, Glycine max
agcttagcatatgtatgcttttgtgtgatttattatatgtatattctatgcatttgtcagatggcatataagacataatttttaaactttataattatttacatataatcaaaattattgaggattttgattcatcttatgaattaacacttttagcgtaatttgatagaaagggcaacattgaaacaatttagaaaaccaaaaaaatcaaattagtaatttatcttaaattcaatgaacgaattattttggttgatttgaatgcaatatcaaatctgacaaaattgaaactactcgtttgtaattttgtttggttcaattttggatttttaattttatgactttaattttgtatttaatttgacaactactaaaataaagcataattctgaaaacta

SEQ ID NO: 203586 - DNA, 450 bp, Glycine max
  unsure (1)..(450): unsure at all n locations
ctaagcttagcttttggtgttagtactagagcgttggcatttttctatttctagacactgatctagaacacttgtccccattgtagtttcttatggaagctacctacttatgagaattcccgattataccgttggataatcattccaacttatttatcattatattacttccaaaacagttgcccccaagtcactagtttctcacagaagttgccgacttattcgatccactaataaggttgtgcgannaagactntgtatagatggtgtgtcctcgaaatgtgttttgtacatagttctttccattatttggcagttattgtggtggcgcacaatgcatttcanatcatgttaagaattgtgtcatagtggtttcattttttcctcttcttttatataatgctattaaaagaagtaaatgacattaattacatttttttattcctatat

SEQ ID NO: 203587 - DNA, 409 bp, Glycine max
  unsure (1)..(409): unsure at all n locations
ctgcacgcatgcaagcttaccacaatcaattatgctcagntttgtttgtcggaaggataaatgnattattttgngcaatcacgggttttaatggcgtaaactgtcctttttatttttttttcatgagaatacagaaattccaactcttaatccatgtgatactattttaattcttatttataagatttaattatattatttattaaaattaaaaatatattaatttaatttacaaccataaatttaccctaaatgcttcaaaatttatcataacgtacgtgtcttaaagaaagcagtaataaatttgtcacgctctttgtgacaatatttatttcaataatactttncttttacccccaaaacataaacaatttgcgtcataccctaatttagttcggggactatggtt

SEQ ID NO: 203588 - DNA, 500 bp, Glycine max
  unsure (1)..(500): unsure at all n locations
aagctctatgggctgatcttgagcttaatgaggtccttctatggtgattttccaccattgttatgcagnggaagataaaggagaagaggtgagaggaggcgccatgcactatggaataagcaatggaagaaggagctttgccaccaagaatgtgccttggataagaagcttggagaggatgcttcaatggaggaaaagaaagggagaaggggggagcacgaaattgaaggaataaaagagggagagaagtggaactttgaagtgtgtctcataagactttcattcatcaaagttacaacaagtgttacacgtgcttctatttatagactatgtagctttcttgagaagcttccttgagaaaacttccttgagaagctagagcttangtacacacacnncctctaataactaagctcacctncttgagaagctttcttgagaagaatcctaaagaagctagagcttagctacacacacccgctataatatgtaagctcacc

SEQ ID NO: 203589 - DNA, 378 bp, Glycine max
agcatgagacgctcttcttgtgccttctctgaagaagaatatatgaaggttcatagatacaaaagtgaaaaaaaatatgaaacacataagctctaatatataaaagatcgtcataggtaaaacacaacaagttcaacttgttgacacgtaagtatgaactcttcactatggaagatggtaaagatatacaagttatgtttggacgcttccaaactattttaaatgaattacgttgtcttaattaaacatttgataattatgataatattgaaaaaattttaagaaatttatccaaaaagtggagaccacaagtgacaacattgagaactataaagaacctggattccatgtccattgaagagatgattggaaccttaa

SEQ ID NO: 203590 - DNA, 476 bp, Glycine max
gtgagaaagtgtggaagagtcagtctttctacttttattcgctgaccacagagtggtacctggagatatgtcgcgagggtcaagagaccttgcggacgtcagatggggtgctattgcccaaaaccaagcttgaccaatcccgacccaacccggacatagtcagtcagtgagaacctgtgatgtacctaaacaggtgagctcctggcagtcaaccgataaaagaacaaagaccacaaagcaaggaggcttgtgtggtggctggccagctatggatcttgagtgatatttggaatatggcctctggtagtcgattaccaagggtgtgtaatcgattacaaggtttaaaaatgaagacaggaagttaagatggcctctagtaatcgattaccagatgtgtgttatcgaataccatgcctaaaaatgggatcaggatagtgagagggcttcttgtaatcgattaccaatgggtgtaatcg

SEQ ID NO: 203591 - DNA, 400 bp, Glycine max
  unsure (1)..(400): unsure at all n locations
agcttagacaatagggcatacaagttatagtgtttanattgtttaacaantccaagaacatggaatgatacccatctaaatttctacttcagttaatcgactacaagacctggtgttgtactctttttcctgctcttttgccccaaagagaaaaatcagggttttggcttaagaggttttaacgaggcacacctacggaatgaaaggaattttgtactcaattggttacattgaataaaagtcctatctccctttagtattataatttttcttgtgtcaaccttacaaaggcttgtcaaacctaaggtctgcccttagtgagcctcgacaaaacccaagacagacacgtcactggtcgattctctaaaggctcatcaaacccaaggtccacccttagtga

SEQ ID NO: 203592 - DNA, 237 bp, Glycine max
agagtgtgatccttaaccttggagagaaaggactatcacttacaactgatttttggatgaatctcttaagtatggactgaatgcatgaatcgatgatgatgaatgccatgtgttgattgtgatagctacttatccaaaaagctgaccttgtgcttgaatgatttatcccttgcatctacgttgagctgaatgaattatcgattgaaccttgagcctatacaatgttatctcctgcta

SEQ ID NO: 203593 - DNA, 390 bp, Glycine max
agcttgcttgtggggcttatatggaggctgtatctttgagcttcaatgaggtcctttaatggtgatttttcaccatggagatgcagcggaagacaaaggagaagaggtgagaggaggcgccatccactatggaataagctatggaagaaggagcttcaccaccaagatgagccttggataagaagcttggagaggatgcttcaatggaggaaaagaaagagggagagaaagagagaggggggagcacgaaattgaaggaagaaaaagggagagaagttgaactttgagttgtgtctcacaagactctcattcatcaaagttacaataagtgttacacatgcttctatttatagactaggtagcttcctttagaagctttcttgagaaaac

SEQ ID NO: 203594 - DNA, 296 bp, Glycine max
tctctgtgattgaggcgccactagagctgccaagtctctacaccttaaggcgtattcttatgaaagatacatgcccactatttgcacatgttctgtagatgcatcctatccgaagagattatactgacactgcctaacgaaggcaaccactacgtccttccaagaatggactcaggaaggctccaagttagtgtactatgtaacagctaccccagtaagactttcttgtaaggaatgcatcagcaattcctcatgctattgagtatgcccccatcatccgataatacatctttaga

SEQ ID NO: 203595 - DNA, 391 bp, Glycine max
agcttctactacacgccgaggagaggcgattttccgtgttattgaaataggagagctgcgatagtgacaaggcgacgctgctagcgagaatcggtgagttggacgagaaattgagattgaagatgcatgagattgaggaggcggagacaaagcgggtcggccctagacgcttccactctttctttggcggcggcggtgttttttctccgctttacccattcattcattcatgttctttgtaagtctcctttactccttctatcatcattggtaagtctcttttgcttttgattgtgatcgtttgtgcccgtgagagttttttttttttcatttggatattctgttgagcacctggtgcatgtaaaatcaaaatgtgcgatgtgatgcacaa

SEQ ID NO: 203596 - DNA, 413 bp, Glycine max
tttgtggcagagatattattgaacaggccttcgaaaccttctaccgagatgtcttgagccacatgggcctcggtcagatcttttactagcagagcccgatgaggctcggagctcatgagtaaactccacagcgagaccctggccggagttgtgatgagctggttgataaccttgaattcgctctgctgaaatatacggaggaactcgctggctgcctctagcgacacctccattttaccatcgcttttctccagaagacctgtcaccggaatatctttattcgaagcatggggcgcttcaccatcttggtcctcaccactgtttctttccccttgacgtcgcggttggactgtatgccagaaggctacacacgacgctacgggcacaccgtcagtccgtgatattgtacctta

SEQ ID NO: 203597 - DNA, 337 bp, Glycine max
agcttggttcgaggtacttatccgttgaagatctaagaacgatgaagaacgaatgaagaacggtcgaagaacgatcgaaacctttgcgagattcctcacggaaaacgttacggaaacgtttcggaagcgcctcggcttaaattttcttcacggaaataatttttccaagcaaattctaaagagagagaagtgcctaaggggctggaccccttccttcttgctttcctcccctatttatagcaaaataggggaggtggttgccgcccagctcgcccaggcgagctcagctcgcccaggcgagcaaggttgcttcctccagaaacaaccgccttctgga

SEQ ID NO: 203598 - DNA, 404 bp, Glycine max
  unsure (1)..(404): unsure at all n locations
ttacggacctatgatactcagcttacatcaacacttgcagggctggatcttcttttatggactngatggtgcctatgcaagttgaaagccttggaggagaaaggtatgcctatgttgntgtggatgatttctccagatttacctgtgtcaactttatcagagagaaatcagacacttttgaagtattcaaagagttgagtctaagacatcaaaaagaaaaagactgtgtcatcaagagaatcaggagtgaccatggcagagagtttgaaaacagcaagtntactgaattctgcacatctgaaggcatcactcatgagttctctgcagccattacaccacaacanaatggcatagttgaaaggaaaaacaggactttgcaagaagctgctagggtcatgcttcat

SEQ ID NO: 203599 - DNA, 377 bp, Glycine max
agcttaactcatccaaacatggcaagttctttatgctttcaacaaatttcttcacaaataactatcatgaagcagaaacctagcaaaactacccatcatatctcctaaaacccaatacccacgaaaatcaagtgagaaagaagtctacccaaacttgaaatttcgaaatcccacacgtagagatgtgcttcacgactccgaaaatgccttcctttcgcgatttggagcagaaatgatgatcaaaggttggagctttgttggagcttcaatggtggttgaggaaagaggaagaaagctacgttagagagggagagaaaaggcttctgaattttttctgctgagtgagggaagagagagagttgctttttggtttaaaa

SEQ ID NO: 203600 - DNA, 411 bp, Glycine max
  unsure (1)..(411): unsure at all n locations
cacaatagcttcaagtttgtgctccttcaacctccattattttttttgctttaccttctcttccattgatgnttcttaattntttttctccatgtatctcctcacatgtcttgtgctaaatgtttttaacatgattctttatagtttccaccgattaaacttgctatataagctagatgtgattttctatggttcacatttcttgttcttgttcttgaaccatgaattgtgttgagattaggttcctttgagttttgtcttgttattttttgtggctganacctaaaccataaaattcttaaaagaatattaagtagaagaaaacctcaaaatctagagtgacttgtcacctattgtagttttgcatagaatcattgttagtcatgaaacttgtcacataagatttcttat

SEQ ID NO: 203601 - DNA, 410 bp, Glycine max
agcttctatagtttatggaataattgatcatttagtgtggtaatcgattatttttaaacacggagagctcttatgttttcagatgaaatctaatcgattaaaatatgtgataattgattattttgagctatagagactttcttcttttgaagctggctttggtaatgtttacaattcttgttaatcaattaatttgatgtaacttgccaatatttcaagagaagtacgttttgttgcttgttctaatactttgtaattaattacttaatccttgtaagctatgatatagtgttgaacttattgcttcttagaaactttgagatctattcatatatcttctcatgtttgataaccactaagcatgtataaagaaaaataagtctaaaacacttaacatgcctagtcttaag

SEQ ID NO: 203602 - DNA, 418 bp, Glycine max
  unsure (1)..(418): unsure at all n locations
tgaggcatgcaagcttggaccatagncaccacacccatttgataatgaaatttcttaccttgacaggggagaatgtaactatcaaggcagatcaaaagcaagcacgatagtgctatgcataaagcctaaagatagcaccatatcctcccaccagggaacctgtcatgcctctccccacagtggctgaaagcacttaagtcatgagtgtggacaaagggtctcaaattcgagtcctaaccgtctaccaagcaagcctgggcaatgaattcaacatagatccgcgagatgacacttatgacaaaggcccaaaacccatcaaagagtttgtcaagttgcaactcagacctaaacccaggcagtgcacgcggctcagtggggacctcactagtcatgaacaccgacgcatcgtcgatgtgct

SEQ ID NO: 203603 - DNA, 460 bp, Glycine max
  unsure (1)..(460): unsure at all n locations
cccttctncttctctctaatgcttggaaacccttgttagtttctagagggaaaacttcacgaatcttagagaaccactagagatgctttgtatcactaccacacttttcgcgtgagcctgcttagaggtaagggatgagtttatcacaattgggttaacatgaacatgtgtagggatccttcaaggatcaaattgnaatttattttgggataataactatattgtaattctacctttacgaatataattatgagatttttgtgtctgacgggccaattgatgccttgatgcgaatcggttgataaaattgagtgctcttggtgtttcatatttttacctatgattntgattctttgatttcatatgatatgtgaaattgttgagggttaatcatatgacataaatattatatttagtgtggactattatatgcatgagggatatatgtgcttggatatga

SEQ ID NO: 203604 - DNA, 406 bp, Glycine max
agcttctagccaaatggacttaccttgaattatttcctttgatagcccttttttagccttgtttccctttccttggtttgaagctcactacaagccataaatgaaaaaccatgatatcaccatatccttaaggaattttggagctttggaattgttttgggaataagtgtggggggtttttgtttcattggataacttgttttgttggctatgcttcatgatgtattttgggccattcttgatgtacattgtatattggttaaatgttggacatgctgaatgaaatgttgtttctcaaaggctatagagtaaaaaaaaaatcaaaaaaaaaaatcgaaaaaagaaaaagaaaagcaataaagttgagtgaataagatcttaaatggcacaagaatgatgaaactct

SEQ ID NO: 203605 - DNA, 498 bp, Glycine max
  unsure (1)..(498): unsure at all n locations
agcttctacttatgtggcagggcgggcttccttcactttcttgtctcaacgcgagctctgaccactgttcttccttcccgcgatgcttcttttcatgtccgcctgagtgggcttatagcctaaaccatactttccacgatttccttgggtatttatcaggctagttatgccgccgttgtctttgcctaaacccatcccgggttcataaccgttccccaacataactcgggccatcattaccgctgcatcggacagacaaggttgcccaaagagggagtccacggaggaaatgctgaccacctcanaagactggaaagcggtttctaacgattcttctgcggcttccacataaggcatggaggatgggcagcttaccaagatatcttcctcgcctgacacgatgaccaagtgcccctccactacgannattcaactttggtggagtgtagaaggcacaactcccactgagtggatccacgggcgccccaacaggaagct

SEQ ID NO: 203606 - DNA, 402 bp, Glycine max
  unsure (1)..(402): unsure at all n locations
agcttggcacaatntcatgactcgacttttattatttctcaatttttattctacccaagcacttcaagtataaaaactctttcaacttcctacgctagcttaactactatgttagttttccaacttcttaatttttcttacgtattgcattcactattcatttcaatgctggagagttcacttttttttaaaaagtaatcgtttattttaagattttacaaaacgtaaaatataataattattttttgggggaaaaatgaaacattaacatgcacttaatttgtacttaaaatttgagtgtttgtctcatctcaagttgtgttagtaaggaactttngcataattaagattattctacagatacaataggaaaataaaaggaagagagagtcagtgacatgt

SEQ ID NO: 203607 - DNA, 283 bp, Glycine max
ccatatgtgctaatgtaaaacaaaaaagtaattttgaaataatggcacatataaagaagtgtcataagtgccaataagaaaagtgttaataaaggaataaaggctgataaataaatatacttatgcaggaaataagtgacagttcttctaaggatgcatgctctcttataatcctaagtttttgaaatcccagaataaccatgatttcttgtgtagccaggctccgtgacaagccaataatagtccttaaggatccaccaagtctaagtaagcataactttaa

SEQ ID NO: 203608 - DNA, 393 bp, Glycine max
  unsure (1)..(393): unsure at all n locations
agcttatcggaatttattattcaattatttttgaggcaatgattgattctttcaagagtctctactattatcaattacgaggtgatatgatcgattacttctcttttaaaagtgtttcagaagtgattaagaacactctaattgattacatcaagaatctaatcgatttcattgttcttgatagctctgcagcttttgggaagaatactntattcaattgaaatgataatataattgatcacattgtatatttaattgattaaagatggttataactgttttctctataaatagccaccttgtgttctcacttctaataagttctaacaactnttgaatgagctagaattacgagctgataataatgatacaaaatanaagaagaaaaagtgc

SEQ ID NO: 203609 - DNA, 395 bp, Glycine max
  unsure (1)..(395): unsure at all n locations
tgacttcagccaagcattgttgaagctccaaatattggtgtctttcccactcaaacatatctctccttcactctagattccacccccaagagccatccctccaaatccccatattggtaatcttctcattgtgtttcaaggaaatgagatatagtctaggaaatttgtccgcaaaagtaaattcatcccccaattatctagccaaaatcgagcctggtttccctccccaacatgccacttaattctcttatctacccacttagactcactagcctctccacaagacacgcacaaatccctccaccatatagatgctntgctatcaaagctcttaccaaccctgtccacccctcatatttngaatccaacactctcacccataagctcttctcacg

SEQ ID NO: 203610 - DNA, 394 bp, Glycine max
agcttctagccaaatgtacttaccttgaattatttcctttgatagcccttttgagccttgtttccctttccttggtttgaagctcactacaagccttaagtgaaaaaccatgatattaccatatccttaaggaattttggagctttggaattgttttgggaataagtgtggggggtttttgtttcattggacaacttgttttgttggctatgcttcacgatgtattttgggccatacttgatgtacatggtatattggttaaatgttggacatgctgaatgaaatgttgtttctcaaaggctaaaaaaaaaaaaagaaaagcaataaagttgagtgaataagatcttaaatggcacaagaatgatgaaactcttggttctcctcttcatgttta

SEQ ID NO: 203611 - DNA, 446 bp, Glycine max
ctatgtacccgtagaggtctacattgtgtttcgcgcatttttaattctcgtttgtttactttttataccccctggtgacgtgcttaagccattttacttaagtcatttctcgcttaacttaaaaataaaataaatttccaccgaacgtttgaattgtattatccattaacttcggctaaaataaattccgaccgttcggtcgtgctgtaaccacgttggaaatcaaaaagaggtaaaaaataatataataatcaaaaagacatcttctagtaaaataaagcggataatcaatcggacgttttctctttgggatttctcattcttaatcgaattgattaataactaaagtgaaactaaaggctaaaatcaattcgcctagtcaagctcgtccataataataagcttttgaagttgtcatttcatattctcactacagtaaatggatc

SEQ ID NO: 203612 - DNA, 396 bp, Glycine max
agcttgtccaacatcagatgaagcaagaaacttttatcatataggggcaatcatattttctatgtcaatgggtagatatcagatgttttatatgactagaagcctgattctaaaggtaggttaagtcaagggatagataccagaagttgcacatgacttaaggatcattaaaagatgtaatgcttagactacaagtgaagagagatgtgtgtagcaaaatagtcaagaaacacacaacgagagttataatgatcaacaccatgcaacaatgtaccgatatgctaccttgatgaagctctcttgatccaatggatctattcaaaagaagaaggtgttaactcttactttaggaaggtaaccatgaagaagaaaagtagtcattcatagtttatagca

SEQ ID NO: 203613 - DNA, 371 bp, Glycine max
tttatggttaatgctatctctggaacaatttcattgaatataatgatgaaatatgtgcattttcaggtgataaagatgctaaggtttgaattgcaaaatgtagcagttatgctaagctcaatagttgcgctaagtgtagattcaacgcgcttagcacagaggagaatctggcagagcatcagcatcaaaactgcatgctaagcacagcaagtgccttcagccaggctaatctcaagactggtgctaagcccatattcacttactcgcactatgcgcgagggtggcgctaagtgcagcgtcgtgatttcagagcctatttaaagcctgtcttgtgcagaatatgggtaacaactctctacagctattacacg

SEQ ID NO: 203614 - DNA, 390 bp, Glycine max
  unsure (1)..(390): unsure at all n locations
agcttaaggaagtggctagctagggttcaatttagtgaactatgggcgcttcaaatgcgaaagggagaatgaaggttagggttcaaaacagtcaagaggctaggggcgcttcaaatgcgaaagggagcgagaaggttagggttcaaaacacagtcaagaggctaggtgcttcaaatgcgaaagtattgagaaggtggatggtcagaacaaaaaaattatcttctttttttatttattttgatttacaaaggtttcttttaatagaaactagcataaatgttattacacaaaacattctaaggcggttttaataaccgtcttagaatgtgcgtcgtgaattgtaattttcagcacaataattacacaatngtcaccgtaccactttctaaa

SEQ ID NO: 203615 - DNA, 443 bp, Glycine max
  unsure (1)..(443): unsure at all n locations
gcttctaaactntanacaacaatgaagctgaactttatacaatattgaagcttttatccacttgttagacaagtggcctcagatatcttaagaaggggggttgaattaagatattacaaactattttcccaattaaaattctactttgattttaatgcaagttcaaagttcccttaaagattaatttctaaatgatgattcaaaataaccaaactgaatgtaaaagtaaagcaacaataaataaaagagtttaagggaagagagagtgcaaactcagttttatactggttcggccacacccttgtgcctacgtccagtccccaagcaacccacttgagagttccactaacttgcanaaaccctctacaagttctgaaccacacaaggacaacccttcctttgtgttagattgattacaacaaagacccttgtctttaatcctt

SEQ ID NO: 203616 - DNA, 391 bp, Glycine max
agcttgagtgtccatatgggtgcatgcatgatcagttttgcataagtttctaaatcatcgttgttataggcgtgtcatggaaataatgtggggcattcccttttatccctgaaccgctggccaaagcaagtaccctgacatacgtcatgtcctgccttctataaagcctctttgagccaaaacctcaatccttcggccctaagtctccacccaggctaggaatttttacccttatcctcgaaaaaaaagaagaacaagaggatctaaaaaaatgaaaggaagaaaaagcttcatttactgttaagttatgaatgtgccttaaaaggaaaacaaaaagagaaaatccctgatcaaagattgaaggaaagcaaaagaaaaagaaaatgaaaaa

SEQ ID NO: 203617 - DNA, 362 bp, Glycine max
  unsure (1)..(362): unsure at all n locations
actcctctaaggaaaatagcattatttcttgcattgaattggtgggaagtggaagccatcttctcaatcaagttcctagcctcaacaggggtcatatcaccaagagctccaccactggcaacatcaatcatactcctcttcatgttgctaagtccttcatagaaatattgaagaaggagttgctcataaatctggtggtgagggcaacttgcacataatttcttgaatctttcctagtactcatacaagctctccccactaagttgcctgatgcctgaaatgtcttttctgatggcagtggtcctagatgtagagaagaatntcttcaagaacaccctcttaatgtcatcccagctggaaat

SEQ ID NO: 203618 - DNA, 423 bp, Glycine max
cctgcacgcatgcaagcttatcttttttcgttctagaagagacttttctttcccattattatattgacaaagagaaagtttacaatatttgaagtcccaatcacttagcacctatacattctcccaaagagcttgaaagttgaaatctaatgctatgcttattgggtcggctgatttcatttatttgcctaattttgtttgaagtcttcacacgcaatatacggaatcgatatacgtgatcaaaggtagaaaaagcacatcaaactactcttaatatacatgcacccttctcctcaacagagatgtatctcatatcaacttcaaaagaagaagaataagaaaaggctgaaacgagtactgaaagaccaaaaggaagaaatagagactctcatatacttatatacatatctctatatattggag

SEQ ID NO: 203619 - DNA, 371 bp, Glycine max
tggataatgatcaaaatgtgttggctatgtgcaacatagctctctgtgatctaaacaaggatgtgcgtatatattttgagcatgagttagatgtcatgccaaagatactttctgatgctttgactgatgttgttgataagccatttgttgacaacacaaacatagttgtgcctgatggtgaagatgcgggtgtagatgagggtattgaagctaaaattctaaatgaaaatgacaagattcctagtatgaatgcacatttattatatcacatcatggatgtatcatttcggtttatagtatattattgcgaccatagtaacattgtaaatatcagggatcattttgataattacctgcaaattaaactatag

SEQ ID NO: 203620 - DNA, 400 bp, Glycine max
  unsure (1)..(400): unsure at all n locations
agcttattaattcttgtaatgaggtntttctattttgaagctattttaataatgtttaattatttacaagcctttgttcatgggtggacaatccttacaaataattacctgattcccttctagttttttgaagttagaatgaaattttaatctgtagtttaagtttaagtttaagttagtagatgaaacaagcaaatatacttgttcattttaaaactactattgttatgatgaattatttttaattttgttcatgtaggtatatcatgaattcaattattacagtgttgtatttcaacggaagagtatatgaagacaatgatggtgtaatatttgaaggcagtacaaatgcgattcagattaaacgcgaaattagtttcatgctttgaaaaaaattgga

SEQ ID NO: 203621 - DNA, 415 bp, Glycine max
  unsure (1)..(415): unsure at all n locations
tcaagatgattgaaatgcaaatcaaagtcttacttttatagactcttcatgtctggtcaagagaaccattggaagagttatgacttttagaaaaacttataaccaatttgaaaaagtcaaaaaccatttgaagagttacatcttttgatttgtttaaaaactaacactggtaatcaattaccaaattagtgtaatcgattacacaaagcctttttgtgaaagaatgtgactcttcacatttgaatttgaatttcaacgttcaagcacactggtaatcgattaccataacattgtaatcgattacagctctttgaaatcaattggaaccgtgaaattcagttgaaactttttanaaacattttgtactggtatcgatacacaattggtatcgataccaagagaaaactcttggaac

SEQ ID NO: 203622 - DNA, 408 bp, Glycine max
  unsure (1)..(408): unsure at all n locations
agcttgtccgcanaaaanatcactaaaaaggattttaaggcttatttcctcagtttttcttaccaagtaaaaatggatcatttttaaggtccaacgccttaaaaagaccacattccaagtaaaaagaatcgcttgattcgccctttaaaaagaactacgtaggtctgatttcctcttcgatggagggtacgtaggagcaagagccctgcttttgtcgacctcaaaaataaaaaagaaataaaaagttagggtacacaatttcacacaattctaaaattaaggttgttgtcctttgggactaacgtgaggggtgctaataccttcctcaaacgtaaatacaactcccgaatttggaatattctttatgaccagtttccttcggttttttcgacgttttccacaaataaa

SEQ ID NO: 203623 - DNA, 441 bp, Glycine max
  unsure (1)..(441): unsure at all n locations
tgttcttctgcataatacaaatgtgtgctatatcttttcattatcttctcccttttgccaaaaagaattcaacaaggactaatcgcctaaattctttntgtgtctctcttctcccttttccaaaagaacgaaggactaaccgcttgaattcttttgggtctcccttctcccttttcaaagaattcaaaaggacacagtctgagaattcttttgattcttccctttcccttaaagaaaagatttcaaaggactaaccgcctgagatatcttttgtttccccttacaaagattcaaaggagtaaccgcttgagaattctttgtcttaacacattggagggtacatcctttgtggtacaagtagagggtacatctacttgggttgttgtaactgagaacaagagagggtacatctcttatggatcagttcaagtggagggtaca

SEQ ID NO: 203624 - DNA, 410 bp, Glycine max
agcttgccacccagctcgcccaggcgagcatgtttgcttcctctataagcaacagccttctggaggaatcttctggagggcccaagtgggcctgattactatttgcacccccatttttactaagtacacccccctgccttttttttggtgattcttttttcgtaaagttacgaaacttacgaatttcgtaacgatacttgttttctttccgtaatgttacggaaccttgcggattacataatcatcccctttttgacttacggaatgttacggaacctcactaattgtgcaacgatgcttccttttgatttccggtgcgtcacggaaccttccggattgtgcatcaataccttcttttgatttccggcatgtcccggaacttcacaaattgcctaatgatgggtgccaag

SEQ ID NO: 203625 - DNA, 437 bp, Glycine max
cgggtctgggagacaaaggtcaagtggtctttatatgttaagatgatgttccaagaactctggagtgggtccgaccatgccctcctgatttccagctgggaaattggcgagtggaggaacgccccggcatttacgcaacgagcataatgtaaacctttacggttttaaaagctctatagttgggcctacgctttagagttttcattctgttaaggctttgtgtcttttgtttttgaatttataatacaaggatctttcttcatctgttcctagtctctacccattctcattcatttgcatgtttttcttaaacggcagattcgatgacgagtcccccgaaggtactaatacctgtgacccgtctatcaacttcgagcaagaaatgaaccaaacggaagatgaatgagatgaggatgtgggacttccttccgagctag

SEQ ID NO: 203626 - DNA, 389 bp, Glycine max
gctataaatttaattatatcttcaattttgctggaatcgattaccatatatgtgtaatcgattacacagggcaaattctgaattcaaattttaatagctggtgtaaatcagttttggccactggtaatcgattacatcctctggtaatcgattaccagagaagaaatttcttgtaataaactttttaacttaattttcttggccaaaccttttgctacttcaattggaattccctttctatttaatataccctttctaagactctatagactgtcttgatcatctatcttgaatatctttaattgctttgtcttgaataaagctttgagacgcatgtgatcttttggcatcatcaaaacatcggctagatcctttgtctacagaattgt

SEQ ID NO: 203627 - DNA, 472 bp, Glycine max
tctatagaagggtcgctcctaagttctctactattgcatcatctctcaatgagatagtgaagaagaatgtggcatttacctgtggtgaaaaacaagagcaagcctttgctttgctcaaagaaaagcttactaaggcactttgtctagctcttcctgacttttctaaaacttttgagctagaatgtgatgcttctggagtgggagttggagctgttttgttgcaaggtgggcaccctattgcttattttagtgaaaaacttcatggtgcgacccttaactactccacctatgataaagagctttatgccttaataagagcactcagaacttgggaacattatccttgttccaaggaatttgtcattcatagtgatcatcaatcacttaagttcattagagtgcaaagcaagttaaacaaaaggcatgcaaaatgggtagagtacctagagcaatttccatatgttatcaaata

SEQ ID NO: 203628 - DNA, 396 bp, Glycine max
agcttgttcgcacatcgttcgcgtgtatgatatccactcgacaaggtttgaagtagaggagaccttcaatcctataacgcaacgtggcggacaaaagtgggcagttaacttgaatggtcattattgtcaatgcggaaggtattctgcgcttcactatccatgttcacacattattgcagcttgtggttacgtgagcatgaactactaccaatatatagatgttgtttacacgaatgagcacatcttaaaagcatactccgcacagtggtggcctcttgggaatgaagcggcaattcctccttctgatgaggcatggacattaatccctgacccaactacaattcgtgcaaaaggtcggccaaaatcaacaaggataatgaatgagatggattgggt

SEQ ID NO: 203629 - DNA, 303 bp, Glycine max
cactccatttatgcacttttgggagttacaagaccattggctcgggcaaataccctaggttttccatcaatcattggaaaaataaaaaagaaggtttttggtttcatcaaggaaagacttaggaggcatatcaaccattggacctccaagaacttgtcaaaagttggtaaataaatcataataaaatctgttgctcaatctattcccacctattgtatcactgttttactccttccttccactcttgaagatgagctacaaaagatgatgaattattttttgtggggatcaactttgcaacct

SEQ ID NO: 203630 - DNA, 384 bp, Glycine max
  unsure (1)..(384): unsure at all n locations
agcttgagctcattgttgctaccccaaaatttcctcggaatntgtcaccgccatgctcttccttgcgagccctcttggtttcttgttcaagggcttttgcagtagctgcattttcttctcgtaacccggcacactctttccggacgtctgtagcgaccaacttgatttgaaaaaaccttttgccacattgatttgtccccatgtttactaaagtgaaacaaaaacccgatgtgaatcaaaactccgacatctatcatgggtggaacggatgaatgcatgaaggaatgcacatgacacagatgcaatttatgaatacgggagcccgggaaattgtctccttcttagatacaacgtcttgnggtagcaaagtgcccaacgtatgta

SEQ ID NO: 203631 - DNA, 387 bp, Glycine max
  unsure (1)..(387): unsure at all n locations
tataactttcgcatctcaaagcaactttgatgacaatatattaacattcggatgttcactgaagataaaactgatatataatgaagatcaatatgttcgttagtgacaacaaagaaattggtaaaaatttttcactaaacacttggtgttaaaatgccattgaaagtggtataaaatgctcactaaatagttatggagataagtggaaacactcggtttatattgattcactcaacccgagctatgtctagttctcctttactcactacgaaagggttccactaattaaaactngattacaaaacaggttttctaatttttcacttctgacgttacacgtattcttaatatcactcgtagtactcttttagactccacgtgaatcta

SEQ ID NO: 203632 - DNA, 364 bp, Glycine max
agcttcattaagaagattctctaaagaagctttagcttatctttcatacctctctaatagctaagctcacctccttgagatgagaagctagagcttagctacacaccccctataatagctaagctcacccccatgacaagaaacatgaaaataaaaaaaaaagtccttattacaaagacaactcaaaatgccccgaaatacaaggctaaaaccctatactactagaatggccaaaatacaaggccttgacgaaggaaaaacctattctaatatttacaaagataagcgggctcatacttagcccatgggctcgaaatctaccctaaggctcatgaaaagttatgtccatttgaatttctcgagt

SEQ ID NO: 203633 - DNA, 494 bp, Glycine max
  unsure (1)..(494): unsure at all n locations
tgtangattatggggtacccatcacatgtggtactatgtggcgtgcgggcgatggtgcacaacaagttttccacatccacaatgcgcgcataaacccaccatcccctgttgcccacctccaactgaactcacgtactcccacgtagcccatatcctcgtttctctccacccgggtccccatcaatcctcccaagctttcacaacatccaatcaaaacaacattcaaacagcacaagctatcacagccaagcaaaacagagcaaaggcagaaaactctgctcaacacatcaaccaaaatcacagctnttctctcttaaggaccacagtaacaattccttcgatccaattcgttaaccgttggatcgactccaaaattttactggaagtctatagtgcataagcctacattgtgaaccgtgggatcgactagcanacatncagaactcattctgtactactctttccacagccaaccacacacaatgcatttctgc

SEQ ID NO: 203634 - DNA, 389 bp, Glycine max
  unsure (1)..(389): unsure at all n locations
agcttgatatgaggaagtgttgataggtgattcttcctgctnttattgttgaccacagagtggtacctggagatatgtcgcgggggtcaagaaaccttggggacgtcaggtggggtgctattgcccaaaaccaagcttgaccaatcccgacccaacccgggcatagtcggtcagtgagaacctgtgatgtacctaagcaggcgagctcctggcagtcaacagataaaaggaaaacaagaccacaaagcaaggaggcttgtggtggctggccagctgtgaattttgtgtaatatgtggattgtggcctctggtaatcgattaccaagggtgagtaatcgattacaaggcttaaaattgaggacaggaggctaagatggtctctggtaatc

SEQ ID NO: 203635 - DNA, 375 bp, Glycine max
  unsure (1)..(375): unsure at all n locations
aaaacacttatctggatcaagggatgaaggatagcttagagtcaacgctcccaacttccttcttcttccatcttctctcctctttctctatctctcccaaaatgatcctaatgtctatctcttcttttctcataacactttggtggataagggttgggtgcatgggcttggccctttattggaccttagacactntcttgatcttattatcttattgngtttgcctaatttaatactatagcaccttacaacaacattaaatataataataacaaaattatcaagattgttttcatttntattatttaacatcgatgatgtatgaattctttttccagatatattatttaacttgtaaatttaattaacacatac

SEQ ID NO: 203636 - DNA, 385 bp, Glycine max
  unsure (1)..(385): unsure at all n locations
agcttttaacaatttatttatataagaacattatattacgttatcaataaaatatttaaacaatgacatttggctaaggaaaaacttaagatgatgatatattaggacaattatttctgctatgaccatgttgcctacaaagtccacatttttttctacttgctcgttcattntcgtcttcgtccatctcagtaggaatgcgagttgaaacgggacgaccctttgcagtcctctttctccttggatcaggaccccacatatgtccttcatattcttgccacattgattcgtgtggcaataaaccaaaggagttgttgtcgtagatgtgcaaaatgtgttgtaaagtgaataacattgacagatttacagacagccatgacgtgag

SEQ ID NO: 203637 - DNA, 386 bp, Glycine max
  unsure (1)..(386): unsure at all n locations
gaaaatcagtgtttgttgattggcttgaagtgatcgattgtgtgatttgagtgaattggaatacgtaagtcatatgttntgaatgagtgtgtagtgattataagagaaagaacatggattaggatcatgaatgaaaatgttagtcagtttggcagtttgattgtgaaggtactcattagccacaacccggtgaaagtgtgatatttaattgtgagagaacgactagcattaagtaatggtttttgcatgaatctctgatatggaatgaatgcatgagtttgaagaggatgaaggccatgttttgattgaatgagccacttatcttaaaagcttaccttgtgaatgaatgacatatncttttgacccattttgaactgaaagtatga

SEQ ID NO: 203638 - DNA, 409 bp, Glycine max
agcttgtaattcctgatcctcagataacatatgtggtaaaggttgggactggatctagtcaccaatggctttctttaggagagagacatgaaagaccggatgaattttactgtgagatggaaaatcaaacttaagcaacaacacccaccttgtttaacacctagaaaggaccataaaaccgaggggagagtttttcattaatccttttagccaaggatcttctcctgtaaggttgcatcttcaagaacacccaatcacagactgcatattctatgtcctagcgacatttgttggcatttgcttgcttgatatcttgagacttcaacaaattttctcctagagtagccaataattcattccgagcaattgttagtttattgacttcttcaaggcaggaaggaatggggga

SEQ ID NO: 203639 - DNA, 444 bp, Glycine max
  unsure (1)..(444): unsure at all n locations
ctctcttctcatcagattgaggtattcatggacgtaaggagtntgttcttgcgttaactgagntttaattctgaagctcaattcttgctcttgagctttggtttctacatgcatgcaagtaatcactttcctctctttttcacttttgtagactaacctagctaagttaaataagttcatgcatgttagtttcagaagatttggaagcgaccaaagtgatctttaggaaaaagagcattcatttcttcgtttgagcacacaaagaacaacctacaaaaggtaggttaaaaacttattctagtgaggttgaataactactttacttgtatattgctcatgttgtaagatntttgggtattctggacgtaattaatcatttcaataaaaattatgaccttattcaatcatagaaggatagtaattaaattttttttatttaatatt

SEQ ID NO: 203640 - DNA, 404 bp, Glycine max
agcttgtagaattcaccccaattccggtgtcatatgctgactttctcccatatctgcttgataatttaatggtagccataaccccagccaaagttccttaacctctattttttcaatcatacgactcgaacacaacatgttcttatcatggaggagttctggggcattccatcgagcattgtagggccctgaagtataaagtgcaaagtctagttgatgtgggatgcttgaaattcagggagaatcgcttgtgaattctgacgttggcaagcaacactatacatagggcaatttgaaggttgttgttagatgtctccagtgactcagtaggattttcaagtttatgccgttattgtaaaccacagttacaatgctaataatatggataaaattggcatccttgt

SEQ ID NO: 203641 - DNA, 416 bp, Glycine max
  unsure (1)..(416): unsure at all n locations
ttgaccaccggccttcctttccgcgatacttctctttacatctggctgagtgggcttatagcctataccatacttnccacgatttcctttggcatttatcaggctagttatgcccgcgttgtctttgcctaaacccattccgggttcgtaaccgttccccaacataactcgggccatcattactgctgcatcggacaggcaagcttgcccagagaaggagtccacggaggaaatgctcaccacctcaaaagactggaaagcggttctaatgactcctctacggcttccacataatgcatagaggatgggcagctcaccaagatgtctttctcgcccgatacgatgaccagatgcccttccactattgaatttcaactttggtggagtgtagagggacaactcccactgagtggatc

SEQ ID NO: 203642 - DNA, 413 bp, Glycine max
tgcacgcattgcatgcttaagaaaaatggtctcagcaaacttcttatttcagatgttatcaattttagacccccaatctttaatggagaaggctaccactactggaaaatccaaatgctatttattattgaggcaatatacttaaatatttgggaagccataaaaataggtgtcgcaacctacccttcggcgggagggcgacgcgagactcgcgggatgcgtgttccacgataggaatacgcgcggagtctccaccaatcgttttttgaggaaaacgtctaaaaaaccggaaaagacgccatctacgaacttttaagtgaaaggttctggagttgtatttacgcgcggggaatgtattatcaccccacacgttcgacacaagggacgggagcctttaatcgaatgtgcaacat

SEQ ID NO: 203643 - DNA, 386 bp, Glycine max
cactatttagtgagaccatgtctcattgtcatgagtctctactctaatcaattaccaagtgattgtaatcgattacatcgttcttgaaagtgttcccagtagtgatcaagaaaactgtgatcgattaaatcaagagtctaatcgattacattgttcttgagagctttctaggtgttgggaagaacactttcatcgattaaaaatgataatctaattgattacttctttaaaataatcgattaatgtgggcaattaatcgattacatgcaattatgattgttttctctatatatagccaccttgtgttctcagcttttacgactccacattctagtcttcattcctgaagcattcatggttaaagtgagtcattaacatcttgtgag

SEQ ID NO: 203644 - DNA, 409 bp, Glycine max
agctttttcggagccatttcctgcgagggcaatcttttggaaagttagtttacaaggaaatgctagtttaaagcaaaaatggcatgctaatcctttcgatttagaacaaatttgtgcccacctctccttaaagaagaacatttaccaacgtgcatacgcgccaagtatcctgctatttatcaatatacaaggatattcaaaacattccagttaccacatatatgcatatatgcatgctcaaggtattgtgccaaaattacacatgtccatattcaaagtatttggctaccaaaaattacctacgcacatttgaagtatttaaaattttttgttggttcattcacatttatttatacatatacgcacattggatagccaatctcacgttatgcacacacttgcatttatt

SEQ ID NO: 203645 - DNA, 354 bp, Glycine max
  unsure (1)..(354): unsure at all n locations
ctcacaatactttgattattatgatagaaaaggctatgcgctataaatgtgtatccatttataaaacaattgagtattggtcattatacaatcaaatacacaaatctttttattggtgttagactacccatggcttactaggataaaaaaaaaatattgattggaacaagtttggtatagagcttgagttaaggaactaaaagtgagagtcataaatacttataagtagctgaagttagtagtacttagtggttngtcaagaactgaatgtagtctcaagaggttagatgaaccaatataattccatgcgtcttatctccgttattctctcttttgtgtgttaaactgacttat

SEQ ID NO: 203646 - DNA, 492 bp, Glycine max
  unsure (1)..(492): unsure at all n locations
accccagcttgcaatagtgaaaagtagcgtttaggggtattgtgttagnancttatatattctcttttctccgccacaaatgcgatgcctataatattgctattcctatacattcataattacgcgctgttgttttatattaatgacacgccatacatatggntcctctctctacaactataagataccggggactccctctcagacattatataatgaattgaacgctatttgacagttgccatcatacactacatctgatgaaattatacttgttaaggcttgtgggtgctatgccctctgcaaactacaatcactccttccatatatatagctctttgttaactcagggtgactatatcgcttntccgtattcctgaattttctttgtatattgaatcggaagccaatctttgaatagactataattccaataagtcaattgtctatcaagaaaaactgacgagatgcaacatagttccaggttgatga

SEQ ID NO: 203647 - DNA, 478 bp, Glycine max
ctcaagcttcttcaggtgttattccttccaatctctgtgagggtgactgtgaatcttattaggcgcaacgtttgatactggattgttgatggagagggacgccacttccatagatggaagataagtcacggtgacgccataaggaatcaaccttgataagtcagaatttggttcaacaggaaccctgagataagcttcctcacatatgtgaaaagaatgccaaaagtggcttcattcattttgatgaaaatatatatagttcaccaaaccctaaaaacgaaataaattggtgcagctgaataggcataggtttcagccacaaccaccaaattatttatttaattgcaataattaaaacaataaaatataaataataatattggaaacatgggccttcaatcatcatcaatggcaactatacaaataaccagccttgtctctatgacgtggtgcgcctatataagtctaccttttgtca

SEQ ID NO: 203648 - DNA, 386 bp, Glycine max
  unsure (1)..(386): unsure at all n locations
agcttcttaatgaagcttctttagaaagctttatgaagctgtccttggaaaaacgctgcccagccttcgntaaccgttggatcttctttaaatttggtctgcaacttcacaagacaattgtgcatgatcggaccgttgggatctttgagaagatgtctggagtttgctataagctttcgttcccgagagcatctcttatttaagcacttcagccttagctttcctgtagcttaggaaaaacgccatttcttcttttttctttcttccaaagccattgttaaagttccaagcactttctccatctcccacagccaccattagcatccacaaaccatcattgttttccattgaaaacccacaccgagaggaacccttctaccgaagcg

SEQ ID NO: 203649 - DNA, 343 bp, Glycine max
  unsure (1)..(343): unsure at all n locations
ccttcatgaatggcatcaagcatattccatanttcctttgcacttttgctccttgcagtacaaaagaattcatcagaagataaactagaagttataatatgtgtagctctttgatcatattgcacttttcttctctcatcatctttcatctcatcctattctttaggtaccaattcaccatttacttctttagttggtataaaagaacttttagcaatggcattccatccactaagatcaattgattgaataaagatttgcattccctattgccaaatagaaaaatgttctccctcacacaaaggaggtcgattacagatgcaccctctctgaagctatctgt

SEQ ID NO: 203650 - DNA, 398 bp, Glycine max
  unsure (1)..(398): unsure at all n locations
agcttcaggtaacgatcatatcgttcacaatatattatattagtcttagacacgaacatcttaattcaaatgtgctattgttgtgcttaatcatataaaatatattttttattttatgtataacgtgaatttatagtttttatttacgtctataggtttttgaatattaatgccaacaacaaaatagttcataattgttgttatcagcgcgcatgatattcactaattcagttgacaaaatattaaatttgtgtttgtggggaggaagaacatgagtttaattcgtgcataatacactnttaagtatgactaatgctcaaaccgaagattaatttcataacggtgaaatttgctattttgagatctcaccaagaaattagatatcttaaatatcatgg

SEQ ID NO: 203651 - DNA, 413 bp, Glycine max
  unsure (1)..(413): unsure at all n locations
tgattagatccttctggttgtaactgtgatgccatgatactcacatactaatggtactttaagattgatgcatgtggcagtactcagtaattgacatatgcttctctttcctctctcaccagtctccgtaattcccactaacaagatccactaacgagtatatggaaatgctaagttgcttcttctgattntcaggcttggcgggtttggtagctacttatggtttgaacttgaatgtccttcaggcttgggtgatatggaatcttctgcatgttgagaacaaaatgatatcagttgagagactattgcagttctctagcataccaagtgatgcgccattaattattcaagattgcagacctgaaccagagtggccaaatgagggaaaagttgaactacgtaaccttcatata

SEQ ID NO: 203652 - DNA, 293 bp, Glycine max
ccctagatcgacctgcagcagcaagctactcgcccaactatgtataaaagggtgttaagtgacaggaaaaaacgtccacccctcctggtaaatctaaatcacctgaaattagtgaaaaaaattgtttccttgaaaaaaatccatgccgaggcgctccctgaacgtttccgggggtgataccacgaagattataaaccgcacttggacgatcattggacgctcatcgcgcgtcttcggtcatcaaccggaaagtgcccgaaaccgaactttctcattcatcctatgtaccctta

SEQ ID NO: 203653 - DNA, 370 bp, Glycine max
  unsure (1)..(370): unsure at all n locations
agctatataagtgcgggtctatgagacgaatgtcaagtggtctcgatatgtgaagatgatgttccaagtaccttggatttggtccgaccatgccctcctgatttccagctgggaaattggcgggtggaggaacgccccggcatttacgcaacaagcataatgtaaacctttacggttttaaaagctctatagttgggcctaggctttagagttttcattntgttaaggctttgtgtcttttgtctttgaattataatacaaggatctttcttcatctgttcctggtctctacccattctcattcatttgcatgtttacttctttttctgaaacggcagattcgatgaccagtcccccgagggactaatac

SEQ ID NO: 203654 - DNA, 483 bp, Glycine max
  unsure (1)..(483): unsure at all n locations
tagaacactcaagcctgatttatactgggtcggccacttaccgcgttatctttcttcctcaagctttccacttgagattntccactctctttgtaaaactccttttacaaagtctgaaccacacagggacaacccttcccttgtgttcaggaatcctctacaacaagagacccacgatctcttaatcccttttcagaaataagaagaagaaatctctcttaaaagagatagattgtacaatgaagatcaataaaaattccttattgaatatgcaagtggttgaccaaggaatctttntgagaggataaaactattgggcaatgaaaactctctttaaattcgtgtttccaagtcacctttgatggccattcataaaccatttgaatagacgtgactcttggaaattattttctgaaaatctcctctggtaatcgattacaagacttgtgtaatcgatcacaggctcgtaaatttgaataaact

SEQ ID NO: 203655 - DNA, 390 bp, Glycine max
  unsure (1)..(390): unsure at all n locations
agctngattgatgttggatggcttacattttatgaggatagtctgaatttgaggactaatccacttgccaatcttggaggctcgatagtgaacgcagtggaagaatgggagtctccaggggcgtcacacgatgtggaaacatgcccaatagttgaggagctggagtagggaatgataaacagagggcaaattgaaatctggagcatagagaagaaggaaggggaggtatgcatgcagtcaggtgacagaaacctgagtaagcctaagcctttggtgatccacttcaccaaggacactaccactaagaggccccgaggcttctagctctttacaacaaagacgcctacacccttcccttatacgagtgataaggcaataccatggaaatat

SEQ ID NO: 203656 - DNA, 409 bp, Glycine max
  unsure (1)..(409): unsure at all n locations
acgacgcctcaacacgaaacaagccactgcgtttgtgcaagccatccctggggcgtaacacaccacatgagtatgatgacggatggctcaaattctcacaaaggtgaaatcatgactttcaaatagagctctcagaactatcatgacatgtagagaaaaatcaacgatttccagtcacacaatgtcgagaacttttattttcaaaacaattacccatttcttgaacatatcctataattcagagaataacatgcatattcgtacgtgcgcacacnatngacccataatagtaaactaaaaattcgacgaaactgacaacattaacagagtaacacaactaacaaatatacacacccactgagctgcaaaccaagaacactcccccccccccctacttaacacacatggc

SEQ ID NO: 203657 - DNA, 378 bp, Glycine max
  unsure (1)..(378): unsure at all n locations
agcatatatatacatgaggattgctatttgatatatacncgaagcggctctatctttgcattgctaaaggctaaagactatattcacatgcctaataacaattactatagctaagggacgcccacttatttcattttcctaactcctaagagctaatgttgtgagaagttttgccatcatctaaaatgcttttggatcaactaaataatataagcatacaacttaaaactggatgccaatgagtgtgaatgtgtcggaggctcactcctctaataaaaatcaccatcccccttcccatttaagatcttgctccttcgactattcgaaagacgtgatagtcattctctatgatgatattaacgaatgcatcctttttat

SEQ ID NO: 203658 - DNA, 403 bp, Glycine max
agcttgcctcaaagaggtccaggaaggacaatgcggtcgaatgttctatttccgccccggagtacgacagtcaccgctttaggagcgttgtacaccagcagcgcttcgaagccatcaagggatggtcgtttctccgggagcgacgcgtccagctcagggacgacgagtatactgatttccaggaggaaatagggcgccggcggtgggcaccactggttactcctatggccaagtttgatccagaaatagtccttgagttttatgccaatgcttggccaacagaggagggcgtgcgtgacatgaggtcctgggttaggggtcagtggatcccgttcgatgccgacgctatcagccagctcctgggatatccgatgtgtgtggaagagggccaagaatgcgagta

SEQ ID NO: 203659 - DNA, 433 bp, Glycine max
  unsure (1)..(433): unsure at all n locations
tactcactgagtacaaagggatttgcaacagtttgatgagtaattaagcactcctctatgtatgttaaatattgatatcatatagttatctaatatggatttcttttgcattttaggatgtgtactcatttatgaaagctgcaagattcactcatctgaacttggaagagacagagtgtagaatagtttataatcatcataagaagaccgcaaaaattagaaatggatggaggactttngcacaaacacnagaattgcttcctataactcanattatatttgagttcccagatgcaacttctaacttttgtntattctggctntgtttggaattaaagtacattactactctaatatattatcaatttgtaaaatttagtctatatgttannttagttagaaaatgttataactaccattggtgcatgatata

SEQ ID NO: 203660 - DNA, 408 bp, Glycine max
agcttcaatctataccttctcctctatcttaaactccactttgcgccattgttccacattttaccctatctctcactgagactcctaactaaccctccctcaatgcaggtagatccatgaatcaagaccaaggaacaaaatcttggaagaaaacccttatgatacaaacacttgcaggaaattaactagcttagcaagatgaagggactcattcatcatgcaagacgaagggacttcttgatatactcggtttttacatatagagaaaattcatgttgtcttgccattgaatctgattccatttgcatatattatatgcatgatactaagtcttgacttattattatgcttggatattaaataaaagcaagatgttccctaagatggcttgctgaatttaataaaaaa

SEQ ID NO: 203661 - DNA, 323 bp, Glycine max
  unsure (1)..(323): unsure at all n locations
acatccttggccagagtggatntgattgggatggcactaagcacatgatcacagttgagaatgaaaatgcttggaatgaatattgcactgtaagtattctttctttaatatgttgctatttggtattcaaagtagatgggatttgactttttctttgttttccagtcgcataaatcggctaaaccgtttcgattcaaggtgctntcaaaatgggatgatataggtggattgtgtgctaaagatagagccaccggtcatggagctgaaactgctatggatgctgatgaagcgatgagtagagaaataaatgaagtggaattcat

SEQ ID NO: 203662 - DNA, 399 bp, Glycine max
  unsure (1)..(399): unsure at all n locations
agcttggtggcaagctccttccctatattgctataaataggggtttgagtgaggagggaaggggttcagccttcttggcacttcgtattctcttaaatttactgagcaaaattgtttccgtgaagaaaatccaagctgaggcgcttccgtaacgttnccatggctaattacgcgaagattctcaaccgttcttcgacattcatcgttcgttcttcgttttcttcggtcttcaactggtaagtaccccaaaccgagcttttcaattcattctatgtacccgtggtggtccccattttgtttcatgtattnttattctcggtggcatttattttcccgacccccttttgacatgtttcaatcatttatttaattcatttctccgctaatcaaaaaataaaa

SEQ ID NO: 203663 - DNA, 485 bp, Glycine max
  unsure (1)..(485): unsure at all n locations
tctcggctcatgctgngaacgcctctagttaacaccctgcattctttgcacccacccagagggaagctccccaagttccaactccgaacgcgactcgaccggccggtaattccaacacgacaaggaacttccctccgaggccgttgccggaattcaccccgctcccaatgacgtacgaagatcttctaccatccctcatcgccaatcatttggccgtggtaactcccggaagggtcctcgaaccccctttcccgaagtggtatgaccctaatgcaacttgcaagtaccatgggggtgccccggngcattccatcgaaaaatgcttggcccttaaatacaaggtccaacatctaatggatgccggatggctgactttccaagaggatcggcccaatgtaaggaccaacccgctcgccaatcatggagggggagcagttaatgcagttgaatccgataggccccacagggtctaaaccgtgagagat

SEQ ID NO: 203664 - DNA, 292 bp, Glycine max
  unsure (1)..(292): unsure at all n locations
agccttatctnccaggaagacactatcgataaaagagcctacagactatgtgagtgtcaccagcatcgtctactctttgacaccattattgaatgacttatctctggtgcaatcagattccatagaagctcacgagaaaggtcttaaacagtgtgttctatcaacagagtcagtgcccaaaacagaaccatgctatctcaaacagataatgccgtcccaccattagccatacttacgaaatgttactctcctatgatcctaacactctccttgtagacccctttcaacctat

SEQ ID NO: 203665 - DNA, 387 bp, Glycine max
agcttgcatcagttgaggctcgggttcttctttttccatgggtaatcatctcataattaattaaattgtttacaaatgttgtttgcttttgcacttttgccgttatgcttatattatattttggctcttcttgtccctttagttgaaatatcatgacactggaagagagaaagaatacttgccacaagttggtcagtggaatatgatgaacaaggtcagctaagaatgaacaaataatgtttagatgtaattattttattgaaagaaaagaaaagggaaaattacttgtttccaacttactctaattctgggaaatctaatgcagaaagttataaatggaagtactgtaagatattgggcatgtatcaacttctcacgaagtgtaca

SEQ ID NO: 203666 - DNA, 420 bp, Glycine max
  unsure (1)..(420): unsure at all n locations
actcagctattattttggcacgccatgggcattgtttataatttatcttcgaaagctatctagacatcgccgttttctaaaagctcatcacccttacggaagattgaaaaaagattttaatggaagtcaagagcacgaaactgcgcggataccgttaactggtgagcaggtcttccagcggattgaacaccttaatactatanttggaaagacccaaaagaaggataaaagtaagagttgcatatggaagaagatgtccattttctttgatcttccgtactggtctgaactagatgttagacattgtattgatgttatgcatgtagagaaaaatgtatgtgacagtgtcattgggacactccttaacattcagggcaagaacgaaaatggtctatatacctgtcaagatctagctgacat

SEQ ID NO: 203667 - DNA, 395 bp, Glycine max
agctttaacctcatcgtctctcacagtctttatatttgggagccaatccagtccttgtgttcggactctcagccacttatgatagctgccgatgatcccattactgcttcccctaagctcgctgtcctttcttcacgccgcatcccatgccttgcgaactccttggagtaccctcgtgttgtggtcactgaaacctcgtgcgatgaaaggcgtgatgctttcgtctgatggcactcctctcatgggacatccttcgcatgaagatagaatccagattcttccttccttctagcgagggaaccatttaacagacgcccctccatgctagccaagagttggtgcacaacaaacaattcttgcgccgctcttttcacatccccggtcgaacgcgtcat

SEQ ID NO: 203668 - DNA, 391 bp, Glycine max
  unsure (1)..(391): unsure at all n locations
gccttggaggaaagaggtatgcctatgttgttgtggatgatttctccagatttacctgtgtcaactttatcagagaaaaatcagacacctttgaagtattcaaggagttgagtctaagactccaaagagaaaaagactgtgtcatcaagagaatcaggagtgaccatggcagagagtttgaaaacagcaagtttactgaatactgcacatctgaaggcatcactcatgagttctctgcagccattacaccacaacaaaatggcatagttgaaaggaaaaacaggactttgcaagaagctgctanggtcatgctccatgccaaagaacttccctataatctctgggctgaagccatgaacacagcatgctacatnncacacagagtcacact

SEQ ID NO: 203669 - DNA, 389 bp, Glycine max
  unsure (1)..(389): unsure at all n locations
agcttctttgtctaacaagccaacttacaattttatgccccaagagactcaacataacgatgcacaggtcaaagntgagggtgggaaaagattgtatgaccaagttaaggtgcaaattgcaaagaagaatgaaagttatactaagcaagccaaatagaagcatcaccggatgacgccgatcgaacatttcctaatcgattgaatagaaaaaacaacagctgacatcggtcgtgaaatagccccgactgatatccttctgtcgacattgcacaatttcttttacaaacgctagccgataatggtttttatggtagaggaaagtttttgttttgggttgcatacaaaaattacaatgtaagtccgctgggtttttttcgtgcgtgctcaac

SEQ ID NO: 203670 - DNA, 452 bp, Glycine max
  unsure (1)..(452): unsure at all n locations
aagaagagtcctatagaagctagagcgtactctctctcatctctaatagctaaactcacctccttgagatgagaagctagagcttagctacacaccccctataatagctaagctcacccgcatgacaagaaaagatgaaaatacataaaaaaataagtccttactacaaagactactcaaaatgccccgaaatacaaggctaaaaccctatactactagaatggccaaaatacaaggcccaaacgaaggaaaaacctattctaatatgtacaaagataagcgggctcatacttagcccttgtgctcagaatataccctaaggctcatgagaaccctatggccttcccttggatctctagcccaatctacttggagtcttctacccaatgcccttgcgggataggattgcatcaataactctcacatggatgtncgatcangcgcatatatat

SEQ ID NO: 203671 - DNA, 387 bp, Glycine max
  unsure (1)..(387): unsure at all n locations
agctttntggttataaataaaaggttttcctttttttttnttctattattttattcaagctctgccacatgtccctatttgattggagcaaaaagggcccactttctctttttgactgtgacccatactcagtcacaaaagtggggaaaatttgacctctgaaacgctaaaatcctgcctcggtttgcgtgccgtttctctggttccagtttctcgcgtttctctgcgtccgtcggggccagttttcgaaagtaagcaatatatatatcaaaacgctcagaataaaaccccgagcgtggttcagaggttgtgtttgttaaattctaagtcgcacgcaaaacgatgatttttaactaattaattaagaattaacccataacctcccag

SEQ ID NO: 203672 - DNA, 354 bp, Glycine max
cctctctaatagctaagctcacctccttgagatgagaagctagagcttatctacacaccccctataatagctaagctcacccccatgacaagaaacatgaaaataaaaaaaaaagtccttattacaaagacaactcaaaatgccccgaaatacaaggctaaaaccctatactactagaatggccaaaatacaaggccttgacgaaggaaaaacctattctaatatttacaaagataagcgggctcatacttagcccatgggctcgaaatctaccctaaggctcatgaaaagttatgtccatttgaatttctcgagtggcttccgtggtcaatttcgagtggctcgatattttat

SEQ ID NO: 203673 - DNA, 395 bp, Glycine max
  unsure (1)..(395): unsure at all n locations
tcgatggccccaatgacatctattctcacatggataaaggccaaggggcggacatgacatttagaggatatggcggaacattgacattgtccgcgtacacttgacatttatggcatttccttacatgggcgcaacaatcgctttccatagtgatgaggacatgaccaagagcaagggcaaggatccacttgaaggacttggaggacctatgacaagggctagagcaaggaaagccaaggaagctcttcaactagtgctgtccatactatttgaatacaagcccaagtttcaaggaaaaaagtccaaggttgtgagttgtatcatggcccaaatggaggaggactaaatgacaccactttgtttcaattntagagtggttagtttgtctaaataat

SEQ ID NO: 203674 - DNA, 446 bp, Glycine max
  unsure (1)..(446): unsure at all n locations
tcatagtagaatactgtttatgtgtctaccatcacgttttccatctccctttccatcattgggggtgccacttgggctgccagatccctccacctttgggtgtattctttgaaggattcatgctcctttatgcacatgttctatagctgcatcctatctagagccatatcagaattgtgctgacactgcctaacgaaggcaaccattatgtccttccatgagtggactcgagaaggttccaagttagtgtaccaggtaacagctaccccagtaagactttcttggaaggaatgtatcagcaattcctcatcttttgcgtatggccctaccttctggcaatacatctttagatggttcttgggggcaagtagtccccctgtacttgtcaaagtccagtaccttgaacttacgacgggtgatgatattgggactangaacaactcttc

SEQ ID NO: 203675 - DNA, 392 bp, Glycine max
agctttgtaagctctagaaggtcaagcacagatcgatcattcctatcattgtataacaacaacaacaacaacaactcatagacaggaatgtccaacccccggctatcatttagctctgacactgatggaaataattatagctttgagtctatgcattttggaaggaggtctatggatatcagctctgatttctcatccttttcccaagagagtgagggattatcattttctgcatcacagggcatggtaagcataagacattaagggaatgtgcatttttatttcctaatatacttgggcatgtcttaacagatagtacttctcttactctcactcttattagaggcccaataattttataacttatatagatttagctcctctaaactttg

SEQ ID NO: 203676 - DNA, 501 bp, Glycine max
  unsure (1)..(501): unsure at all n locations
aagctctataagcgcgggtctgggagacgaacgtcaagcggtctttatatactaatatgatgtttcgagtacattggatttggtacgaccatgccctcctgatttccagctgggaaattggcgagtggaggaacaccctgacatttacgcagcgagcataatgtaaacctttacggttttaaaagctctatagttgggcctaggctttagagtttttccttttgttaaggctttgtgtctttcgcttgtgaatttataatataaggatctttcttcatctattcctacgtctctacccattctcattctaatacctgngacccgcttatcaacttcgagcaagaaactaatcaaatggaagatgaagggaacgaggatgtgggacttcccccagaattaggaaggatggtcgcctatgatgaccaaganatggagcctcatcaagaagaaatagaactagtagacttgggaattggcagtggaaaaagggaggtaaagata

SEQ ID NO: 203677 - DNA, 373 bp, Glycine max
  unsure (1)..(373): unsure at all n locations
agcttatgtctggtcgagtacagattngatctattataatactcttaacaactgatgcatacagaattgctttcatttgttttcgttccacaatttctaggacattgcgtgagactaaatttgtttcctttctgaattggaacaggtgatgctaacaacttttccatcctaaatgtttctagcactttattgatatatgctttctaagagaagcctaacaatccttatgatctatttcagagtatttctatccctatcacatagcttgcctcacccatatctttcatttcaaagttgctagaaagaaacttagtctcatgaagaagacctagatcattagttgcaagcccatcatcctacaaaattataaaaa

SEQ ID NO: 203678 - DNA, 497 bp, Glycine max
  unsure (1)..(497): unsure at all n locations
aaactaagcttatgcggttccctaccanaaatgtagggtcatttttatgttttatntaaacagactagcaactttggagaatcttatgtagagaaatgttgtcgttaataattttgaggttgtttgttatttttgtaatggggagggcaatagcatagcacacattttccttatgtgtaactnttctttanagttatggaataaatgttatgaatgccttgacactctcacaacttaacattcagaaatcaaaaactacttttaccaacatgattgttacttattgaaaagggaaaaggcattggcatggtaaactatgggacanaagaggtggtcggacaacactatttggatcatccagtctagtcctctaaactagaactttgactgttgtattatcatccaggtgatatattggtggagcgtctaatcacatctaangagtgggctatctagtacatttagctagttagttggtttagtcaacaagttctatt

SEQ ID NO: 203679 - DNA, 314 bp, Glycine max
  unsure (1)..(314): unsure at all n locations
cgcncgttatttgataccattttttgtttttcttttcactaacaccccaaagaacactttattgcgcttcattgtgcgaagaaaattaagattcacttatgtaatataatgattcttataagattaaataaattaaaaggaaaccatgcatatctcgtaatttatatggcccccactaagctaattcaacatcttgaaagatgccccatttgtggaccaatccctctagtttcacaaaacaatgatatcatacccatcaagcttttaaggtgaggaattcaaagaactatccatttattcgacacgtaatggtc

SEQ ID NO: 203680 - DNA, 383 bp, Glycine max
  unsure (1)..(383): unsure at all n locations
gatccaaccaggcctaaatagtttgattgaacacctgtacgacaagacaggatctgtggattcaagtaaaatgaccatatntcgttcacttcttcttcattgtccggatcgacagcaggaaaatagtcagtgaaccaggccgggccaacctctcgactaatgaatggagcatgttggggaagaaacttgtcaaagctcagaaaaatcctcatgtactttatgaacagctnttgtgagttttgatctaaggtcttgggtgttaatcgaagtgctctctggccttcgatcgagcgatttgcaacttcttcagcataatcttgtgggattatgaatcccatttcttgttcgaaagtggcattaaaccacaattggagaagccacat

SEQ ID NO: 203681 - DNA, 396 bp, Glycine max
  unsure (1)..(396): unsure at all n locations
agcttgagtccttatacttattgtagnaattattgtgtgaaaaatgagtctcttaaaaaactagaaaagaatttaatattagatttttcaatgtttttggttgctcattgggtccacttttcacgcaattttccctatgtttatcaaccttttttattcaaactgtttttgtgagcaacacttacattttacacaaaaaaacaaagcttttcaagaccctaaacacattcaatttttagttttttctttacataatgttataaacttggtagcatccattagtaatcatttatacactatttaaacacttaaaaccatcaatttatacttttaaaactgttgaggacagccaccacgttttttctgcgtaagtcaagcttccatgcactanaacaa

SEQ ID NO: 203682 - DNA, 429 bp, Glycine max
atgcatatcggcgaaatgcttcatgcgctcctgagctttgagtatttgcttttgtaagctatccaacatggcatgcttggagcacaattagttatccacgacatcaactggggatgagcttggaatatatcggagaattgtgggaggtttctttccgaaagtgacctcaaacggtgaaatacccgtgcttgtgttacgggaggtattgtatgacccctccacccaaggtaggaatttgccccatgtcgagggtcgtttatgaacaaaggctctctggtactactcgatgatacgattcatgaacctttgttgaccgtcaaattgtgggtgataagcaaagcttatccacaattttgttcctgagagtttgaatagtttctgctgaaacttgctgatgaagaaaggatcctgatcatagaccaaactctt

SEQ ID NO: 203683 - DNA, 385 bp, Glycine max
agcttctacttatgtgacatggcgggcttccttcactttcttgcctcaactgcgagctttgaccaccgctctttcttcccgcgatgcttctctttatatccgcctgagtaggcttatagcctaaaccatacttcccacgatttcctttggcatttatcaagctagttatgccgccgttgtctttgcctaaacccattccgggttcataaccgttccccaacataactcgggccatcattactgctgcatcggacaggcaaggctgcccaaaaaaggaatccacggaggaaatgcttaccacctcgaaagactcggaaagcggttctaatgactcctctgcggcctccacataaggcatagaggatgggcagctcaccaagatgtc

SEQ ID NO: 203684 - DNA, 431 bp, Glycine max
  unsure (1)..(431): unsure at all n locations
aatctcagcttctcctatttgctataagtgggggagttgtgtattatatggacacttctctctctctctcgaaatagctgaggaaaattagttccgtgaagaaaatccaagccgaggcacttccgtaacgtttccgtgagtaattacgcgaagattctcgaccgttcttcaagattcatcgntcgttctttggtttcttcggtcttcaacgggtaagtacctcaaaccaagcttttcaattcattttatgtacccgtggtggtccacatnttgtttcatgtatttttattctcgttttcatttactttntataccccattntgacgtgcttaagccatttatttaagtcattcctcgcttaatctaaaaataaaataaatttccaccgatcgtntgaattgatcactccgtaattttggtaaaatgaattt

SEQ ID NO: 203685 - DNA, 396 bp, Glycine max
  unsure (1)..(396): unsure at all n locations
agctttatagtgtngnttttcctgctagtcttctattagcatctttcaaatatataaaataaaatgactagtccttaatgtaatatttgtaatacataaacaaaaaatctctacagccctatccttaaaatttaaatccaattatgatgtgacagacaaatattaaaaataaaactcacagtgattctgtcttcaatcctcaaatccttttgctttgatgaaaggcgagaatcaagttctgaggttaggttaaaggaaaagagctttgagaaccatgtaaagcttgaaaaccacgtaaagcacaatcaactgccacaacaaaatgaaaccccacattacaattcttattgatacttttatatggtaagccaagtggacaaaatgacccaataattt

SEQ ID NO: 203686 - DNA, 387 bp, Glycine max
  unsure (1)..(387): unsure at all n locations
tggagatcgcgatatggtattgttagtgacatccttggccaaagtgagtttaattgggatggcactaagcacatgatcacagctgagaatgaaaatgctcggaatgaatattgcactgtaaatattctctaatatatgctatttgttattcaaagcagattgaatttgactntttcttttttccaggtacataaatcggctaaactgtttcgattcgaagtgcttcaagactgggatgatatagtgaatttgtgtgctaaagatagagccactggtcatggagctgaaactgctatggatgctgatgaagtgataagtaaagaaacaaatgaagtgcatgggcttaggtgctactgctactatagacttagaagaaccaaactctaa

SEQ ID NO: 203687 - DNA, 387 bp, Glycine max
  unsure (1)..(387): unsure at all n locations
agcttgattttgtgagttgattttagcctttttttcactntagctattagtcaattcaattaagaaagaaaaatcccaaagagaaacgtccgattgatctttttgttttattttactaaaagatatttttttattattatattattattttacctcttttttggtttccaacgtggttaaggcatgaccgaacggttggatttcattttaacagaaattaacagatgttacaatttaaatgatcggtggaaatttattttatttcttgattaggcgagaaaatgacaaataaattactaaagcacgtcaaaagggggtacggaaagtaaatgaaatgaaaataaaagtacagataacaagtggggaccaccaagggtatacagaatg

SEQ ID NO: 203688 - DNA, 344 bp, Glycine max
  unsure (1)..(344): unsure at all n locations
gaaggttaatgagtntatgagcaactcaggattcaaaagatgtgacatggaccattgctgctatgttaaaaaatatactaatagntatgttatccttgttgtgtatgttgatgacatgttgattgcaggatctagtatggcagaaattaacaggttgaagcagcagttggcagaaaactttgaaatgaaggatcttggtccagctaaacaaatccttggtatgagaattcttagaaacagatcagaaggaattttgaagctgtctcaggagaaatatatacacaagttgcttgacagggtttaccttggagatttaagaccaggaatacccctttgggatctca

SEQ ID NO: 203689 - DNA, 390 bp, Glycine max
agcttccattataaaagaaaattgaaaagagttggtataaataaatcaagatgagagagaacaaataagagaggaagaaagatgaataataatgaatgatatgaaaagagaaaaacatgcctcctatagtagtcatgactcttgcaagagtttaagtgaagaacttagcaactattatagaaggctccatagttcacatactaaacatcattcccaaagaagagaaaaggatacaaggcctctagaggttaacattagcctcccatatttccatggaaaagataatgttgaggcctacatagattagaaaatgaaggttgagcaactctttgcttgccattatattagcgaagagagaaaaggttcattgactacccttagctttcaagg

SEQ ID NO: 203690 - DNA, 389 bp, Glycine max
  unsure (1)..(389): unsure at all n locations
tacttccgcttctcattcagatatcattgaatattttggnttctcgctcttgtacgngtcataattaagaaacttcttatagcctgtgtgtatgtgcaagtttgcacattatcatgtccatgataagcttctcatccagattccattaaatgtgttggcttctcgccaaggtatgtgtcatataaatttcttatagcctatgttgtagaagcaagcttcaaaggactaaccgcctgagatatcttttgttccccttcacaaagtttcaaaggactaaccgcctgagaactttgtcgtaacacattggagggtacatcctttgtggtacaagtagagggtacatctactgtgttgttgtgactgagaacaagagagggtacatctcttgt

SEQ ID NO: 203691 - DNA, 293 bp, Glycine max
  unsure (1)..(293): unsure at all n locations
aagcaccgagctgcagctcctgagagatgctcgaggagttttcccctctcttcctcccccagaaacgtgaaatacagagacatattcctatctcccaaatctacccaaaaggccctataatacaaggctaanaccctatactaccagaaaacccttaccttgtagagataaggcgcccttaaaatggcacttaatacaaggcccaaaaaaaggaaaacctattctaatatctacaaagaaaaagtggactaatacttagctcatgggcccaaaatatatctctaatgctcatg

SEQ ID NO: 203692 - DNA, 233 bp, Glycine max
ttaaatacgacgaatgaatataaatctggtgggataaacgatggtctatgtgttgaagcgggtgacgtttgaaggacacgtacaacacggtaactgtcttattactctgtcatggttgccgtacaaatgaatacctgacgcacgccaagatagagtataggggtgtttgatggatgtgaccaacgcgaaccacaatccaagagatgatgctccagaatcttttttttttgggt

SEQ ID NO: 203693 - DNA, 362 bp, Glycine max
gatccatcatcagacaaaccttccccggcatcgacctcttatccatgcacaatccctgatgaaaatgacacgcgaccccctcctacaaaggccaccccccctgcatcaacatacgaaaccgggatcagccacagaacatctgagtgcgtagctagattcttagtcctagagagagagcaccatgatattcttgaggtgcacaccttggtaaaatagacgcgacggatggcggaggccgatgaagatgaacatcatggcgaggagatcggagccagaaaccagctcggaagaaagccaccacattgcaggtattatgcctgccacaaaatcttcaaacaagctgacagaaagacgatcgccac

SEQ ID NO: 203694 - DNA, 294 bp, Glycine max
ttctcatcaagagttaaagaaagactaaaactccactggggatctatccaaatcatcatgtatatgaacaatgctcagatccccaatcccttccctcccaaatcaacactgatctcacaccaaattcatgctccaaaacaatccaatcgacaacccaagttccattcttgatacataacattctcaacatacaaataaattcacgttctaattatccctgccaatctcactttaaattctaaatacacaagaagtctttactctaccccgataccaatttggttttctatccat

SEQ ID NO: 203695 - DNA, 450 bp, Glycine max
  unsure (1)..(450): unsure at all n locations
agcttacatgcggattagcaaaacaacagtttttggagctccagaatggcgtgtgactggttttgctaaccatcacaatcatgaacttttagaaccaaaccaagttcggttcctccctgcatacagaactatctcggatgctgacaaaaaccgaatactcatgtttgccaaaacaggaatatctgttcatcaaatgatgaggcttatggagcttgagaagtgtgtggaacctggatatttgccttttactgaaaaagatgtaaggaatttactccagtcatttaggaaattagatccagaagaagaaagcttagatttattaagaatgtgcagaaatattaaggagaaagatcctaantttaaatttgagtacacacttgatgcanacaacnncgttggagaatattgcctggtcatatgcttcatcaacccaattgtatgatatatttg

SEQ ID NO: 203696 - DNA, 441 bp, Glycine max
  unsure (1)..(441): unsure at all n locations
cagcttcanacatgaacagaagtngtctgcagtcttaactacattttgattcttgcatgcttgcactagttcttttgctttacacactaactcagacaaaatgttgacccaatatgcttctcagttcaagaaaaccatggctacattcatcattgacttttggacaaggaattcagggaagtaacaactatttgcaagtaaaacttacatattattaggaaagaaatgagcttataccaccaaattgagttttttgagggcagctctagtgcatttggatttacatgtgtcaatagtagaccagacatgacacataaccaacaccaagcatgaatacaggagggagttgatgtttttattttttcagaacccaagaagaagataaggatcctctagatatacgacacaaagagaaaggcccaaccaaaccataatgaaaga

SEQ ID NO: 203697 - DNA, 375 bp, Glycine max
agcttgtgggaatacgtgtttatcagatgttgattgttaggtcttattttctgaggctgcagtggattttgaagcggtggccggagcacgggttgggtgaggatgtgcttaaaggagtgtttgttgatgggttgagggaggagtttcgtgaatgggttctcatgcagaagcctggttcgttgaatgatgccttgaaattggcttttgagtttgagaaggtgtggagggttaggggaaaggagggagtgggtcccacttgtgaggttagggatgtgttggggaaggatcttattgtggggtcgtgttctgtgggagagatcaacagtggccaacaaagggttgaagatgcaaagggagtgaacggttggtggggag

SEQ ID NO: 203698 - DNA, 402 bp, Glycine max
  unsure (1)..(402): unsure at all n locations
tgggcctcttcacgtctagaagatgaatgtagcttatatttccaaagacccataagtgctttgctgatggcttcttcccgttccaagcttcaattggagtcttgtcttttacagacttagttggacatctgttgagtatgtaaacagcagtgtagactgcttcagcccacaatgtgttaggtagtcccttctccttgagaattgatctagctatttccataactctgcgattatttctctcggacactccattttgttgaggagaatatgagactataagttgtcgctcaatgccttcatcctcacaaaatcttttaaactcgcgagaggtgtactttttgccgccatcacttcttagtacttntatccgttntccacttcgattttcaggaagggccttga

SEQ ID NO: 203699 - DNA, 421 bp, Glycine max
  unsure (1)..(421): unsure at all n locations
agcttgagatgaggaagtgttgaagggtgtatcttcctgcttttatggtngaccacagagtggtacctggagatatgtcgtgggggtcaggagaccttgnggacgtcaggtggggtgctattgcccaaaaccaagcttgaccaatcccgacccaacccgggcatagtcggtcagtgagaacctgtgatgtacctaaacaggcgagctcctggcagtcaacagataaaaggaacaaagaccacaaagcaaggaggcttgtggtggctggccagctgtgaaacttgagtgatatgtgggttgtggctctggtaatcgattaccaagggtgggtaattgattacaaggcttaaaaatgaagacaagtggctaaaattgtctctggtaatcgattaccacgggatgtaatcgattaccacgcttg

SEQ ID NO: 203700 - DNA, 486 bp, Glycine max
  unsure (1)..(486): unsure at all n locations
ctcaagcttgcttctcacctttctctctctagagaccctagacatgtcatagcttgattttttagtccaaactcacttcacaaaatctaatttcaggcttaaataggtggccttattcgtgctcttgcgcttagtgcacgaatggagcgcttagcgcacgttagtgatttttggcttagcgcgcctttctcgcttaatggatgaactgaagcagtgcgcttagagagatgaagcagtgcgcttagcgaacctgtacaactcatcttcttctggattcttcctcgcgcttagcccaggagtgttgcgcttagcggatgctcgctaagccaacagattggcttagcaagaaggtgaaaacaacacttttccaaagctttcctaattaacctaaaattgagagaaaatgattattatacacaaaanatgaanatactaagtatttattacctatacttaacatanaatacttataacattacaaaataa

SEQ ID NO: 203701 - DNA, 378 bp, Glycine max
  unsure (1)..(378): unsure at all n locations
agctataaggaagcaatgctttaccccatatggatcaatgcnaaggaagaagagttgaattctattgagaagaattcaacatgggaacttgttaatctgcctcttgacaagaaacccatagcactgaagtgggtttataaagtgaaggtgaaatccaaatgaggccagacttgtggcaaaagggttcttatgaaaacctggagttgactatggtgaggtctatgcacctgtggcaagaatagaaacagtgagattggtggtagcaattgcaaatataaaagggtggtctatgcataaactagatgtgaagtcttgcttcttaaatggacagctagatgaagaggtttatgtggaccacccactctttgaaaaatggga

SEQ ID NO: 203702 - DNA, 234 bp, Glycine max
tgaagaaatattcattgagagataaaaattcttcttgaataatatgatggaactcaataaaacaagagggggggggggggatggtcaactccctccccctccactcttacttttatcactctacttgccatcaacacactctattcctatctatcacatacattcaccatgtgaatgtcctcatcactgatattccattcttaactcctttctttaacactcattaattaaatc

SEQ ID NO: 203703 - DNA, 418 bp, Glycine max
agcttggttatctccttcttctctacatctatattcaccttgttgagtcttttctatggctgtcttactggtttagctccatcctctaaatatattcgatgcatacacgtggatgggctaataccaagaatgtctgccagggtccagcctatatccttcttatgcttcttgagaactgacaacaacttctcctcttgctcatcagcaagggaggcagatataatcactggaaaactcttgctatcatccaagtaagcgtatattaaatttgatggcagaggcttcaattctggtgtggtcggttggacagtggtaaaaagagatggtttctctacctttacctcataaagaaagacagaggtttgtgtacttcctgagacatggttaggcctatctgactctataaaatcaatctcaa

SEQ ID NO: 203704 - DNA, 426 bp, Glycine max
gctgtgcaaatcaaatcactcctacatctcatctctagcatttttctctttctttacccactcctcacgtttggttttttagggaaaaacaccataactaaacgcgccgcaagggatccctatcgcaccagatccaaatctagaacgatgggtgatcaagaggagacgcaggaacagatgaaagccgacatgtcggctctgaaagaacaaatggtctccatgatggaggccatgttaggtatgaagcagctcatggagaagaacgcggccactgccgccgctgtcagttcggctgccgaagcagacccgactctcttggcaactacgcaccatcctccctcaaacataataggacggggaagggacacactggggcacgatggcagccctcacctgggatacaaccgagcggcttacccttatgga

SEQ ID NO: 203705 - DNA, 437 bp, Glycine max
agcttctccctgatgctgttttatgttgtatagatcttcacatcagtaaagtcctgacttcttaggattcaagaacaagataccttttcaaatattatcagaacctactttctttccttcttggccttctccataagcaatgttggatcaccaatcccatctccaaacaggatgaattgcaccccataagttcatccatattttgcattgaaagtaaagaatactttcagtgcaacttatagttgttgaatgtggagaattgctcagttgaagaagtatggagaatcaagaaccttctgtaagtcaaaatcacctctctttggcaatggagggaaagccaaccctggatatgtagtctggaagccctcaagcaactgtcaacaaatcacaacaaatcaaagtttcatcatgagaaggttaaagaaaacacagcctat

SEQ ID NO: 203706 - DNA, 482 bp, Glycine max
  unsure (1)..(482): unsure at all n locations
tgcctaattaacctganattgagagagaatgattattattcacacaaaatgaaaatactaagtatttataacctatacttaacagaaaatacttatagcattacaaaataaccataaattgggagagtntgatacaatttatacaagttttatacacataagttagtcgttttcaccgactaacaactcccctaaatttacagttttgcttgtcctcaaacaaaaagagaacaactcacttgtcctcaagtgacaatgacatgcagtgactatgtacaaaggtgtatgctacaaagctactgattgcatgataagagaatggagtaaaatgccctcatcacttgttnttcacaaggtatgcaattattcaaagagaagaatataatgtaacctgaatagatagatgaagttaggcataagacagatatcaaggaaagtagcttataccacagtctcacggctactggttcactcaagcacaa

SEQ ID NO: 203707 - DNA, 377 bp, Glycine max
ggatccttacagcacttcatccagccatctgctgcgccgaacacatagttcaagatcatcacatgatccaaatacacacaacacacatggcgtgagcaatctcattcctaaccaacagataagtaacgactacttaatatacttatcctatacacgtagggtaacttacttgaatatatcccacattattctcccgctgtgtcattcgaaatgcacctttctatacatcattccattactctaacatcacactctcccgactcgacttaatgtccaatatgttcataatcaacattagcaccgtatgcatctgtttacaagactccaactattgcaatggatacctgtcagtgaaacccttctgggcgctagaaaca

SEQ ID NO: 203708 - DNA, 253 bp, Glycine max
caagctgcacggctccaccgctcatctttacaatctaggttcatgctccatacctcattacattccctcttttatatcaaagtacgggtcttatcatgactgggattggccttgggtttggaattcgtgtgagttttgcgctcagattagaacggcgacgtactgcattccagcgttggattcccgcccgcgctcaatgtcaccgctgccatagatggcaaactggaaatcacggttggctgatatacactct

SEQ ID NO: 203709 - DNA, 407 bp, Glycine max
  unsure (1)..(407): unsure at all n locations
agctttgaatgctctattctatggagttgtcaagaatatcttcagactgatcaacacatgcacagtggccaaggatgcatgggagatcctgaaaaccactcatgaaggaacctccaaagtgaagatgtccagattgcaactattggccacaaaattcgaaaatctgaagatgaaggaggaagaatgtattcatgacttccacatgaacattcttgaaattgccaatgcttgcactgccttgggagagaggatgacagatgaaaagctggtgagaaagatcctcagatccttgcctaagagatttgacatgaaagtcactgcaatagaggaggcccaagacatttgcaacatgagagtagatgaactcattggttcccttcaaacctttgagctangactctcggata

SEQ ID NO: 203710 - DNA, 437 bp, Glycine max
  unsure (1)..(437): unsure at all n locations
cgctttatgtgaaaggatgtgactcttcacatttgaatntgtatttcaatgttcaaaggcattggtaatcgattaccaaaacattgtaatcaattacagccttttcaaattaattggaacgttggaaattcaatttgaaaactttctcaaaacaattttgctactggtaatcgattacagcaatctggtaatcgattaccagagagtaaaaactctttggtaaacatgttttgtgaaaaatcaatgtgctactaagtttttgaaaaatccttttcatacttatcatgattaagtcttctcttgattcttgaatcttgaatcttgaatcttgatcttgattcttgaagcttgatccttgaatcttgattcttgaatacatccttcttcttgaatctagaagtgttcttctactttcctcttgagtctcgaattgttct

SEQ ID NO: 203711 - DNA, 466 bp, Glycine max
  unsure (1)..(466): unsure at all n locations
agcttttcgattcattctatgtacccgtagtgtgccacattgtgtttcgtgcattnttattctcgttntgtttactttttataccccctgttgacgtgcttaagtcattttacttaagtcatttctcgcttaacttaaaaataaaataaatttccaccgaacgtttgaattgtattatccgttaacttcggttaaaatgaattccgaccgttcggtcgtgccgtaaccacgttggaaatcaaaaagaggtaaaaaaataatataataataaaaaaaacatcgtttagtaaaataaagcggaaaatcaatcggacattntctctttgggatttctcattcttaatcgaattgattaataactaaagtgaaactaaggctaanatcaactcgcctagtcaagctcgtccataaaaaatagggttttgaagtttgtcatttcaatttctcactaagtaaaatggatcat

SEQ ID NO: 203712 - DNA, 438 bp, Glycine max
  unsure (1)..(438): unsure at all n locations
aacctcatcgtccctcacagtctttagatgtgggagccaatccaatccttgtgttctgactctcagccacttatgatagccgccgatgatcccattactgcttcccctaagctctctgtcctttcttcacgccgcatcccatgccttgcgaactccttggagtacctttgcattgnggtcactgaaaccccgtgtaatgaaaggcgtgatgctttcgtctaatggcgctcctctcatggggtagccaagctgtcttatggcgaggacgggattataattaatacaaccccatgttctcatctagggaacatttggacatccttcgcatgaagatacaatcctgattcttccttccttctagcgagggaaccaattaacagacgcccctccatgctagccaagagttggtcccaattcgcctttcctttttcaacgcac

SEQ ID NO: 203713 - DNA, 461 bp, Glycine max
  unsure (1)..(461): unsure at all n locations
cacctgcggcatgcaagctncctcgttatctctgtcatccgtggtttatacgtgttttcggctgttaaaacatgggtcttctgatagatttcaacccaactgtatgccgggacctttctaacccctcactctctcatggccttcttcacctttcccacattgttccattcaccagctgctgcatagatattggacatgctaacatatggtgcagcatctctaaggaccttcatattgaatagttggtctgctgctttctatgccaactcttgattcttatggatactgcatgagttgagaattgatgaccacattatctcatctcggtcaaatggcatctgagccatcaatttctcagcctcatcaaatcttccactgcgacataacatatcaacaattgacgcataatgctctcttttgggtacaagtatgtaatcctgagccatagagttaaagtactg

SEQ ID NO: 203714 - DNA, 445 bp, Glycine max
  unsure (1)..(445): unsure at all n locations
cttattcattatgtaaacatggtaactgtctaacatacatgttttattttgatngcgttttaactcttgatttgactttatgtcgttattcttggtgttattatgaactgtgtgattgttaaaagtttgtttgatggacaactttatgatggacgtgtcaatgctctgtactctacaccatccatatatactgatgcaaaatatgctacaaatgagtcctggccaatcaagactgatgatttctttccgtgagtttaatatttagttgttgcataatctttttgcttaattcttgtgtttttattccctgtgtatgatgttctatctcatgtatgcatgacaaaaataccagttatgcagatcgagcacatgcgtactgtacaggatactctaccagtaggccagctatcacacgctatgtcagattaatgagtggctattattt

SEQ ID NO: 203715 - DNA, 394 bp, Glycine max
gaggctgactcgctatgccttattcacacacagagaataaattgcacttatcgagcatgactcgcttagcgcatgaacaaaatttcacaacactaaattgccttgggcttatcgagactgactcgcttagcccaagtttattcatacctcaagggcatgggggctcattgagactgactcccttagtccgcacataataccaaaagcctcatacactttattctagataaactaactcgcttaacgtggcttgccggcttattcgatctcagatatataactataaatttaaacactcgctaagcctaattgtcgtggcgttgcgagctcatcacataacccacaaatcattctaatttgtgaactcgcctagcgagtacttgaatttacacaa

SEQ ID NO: 203716 - DNA, 321 bp, Glycine max
gacaggcgcatatgctgcgccctgcaacgacttcttgccagcacttagcttgataattacgcaatgccacgcgactcagggctatctctgactaggataactcactttaagaggacataccctcccgagctatgcgtgctaataatgactctaagcacacgcaagctacgcatgcctattaataccgaacgtggcagaccattctataaatagtcatgcgaacgggattatacaccgcgaacataagatacttcaaaaaaggagatggaaacatcatatgctctagcaatcctgacaaacaacacctttgataaggaagac

SEQ ID NO: 203717 - DNA, 346 bp, Glycine max
  unsure (1)..(346): unsure at all n locations
ctaatcgntctccttctgaagatgttaatggccctaacctactaactcctcttgatcttttgcctatgcctaatgtccctgcttttagcctaaagaaggtcaagcacaggcggactatgtgaagaagcttcatgagagagtcaaacatcatattgcgaggaaatataaaagctattgcttacaagcccactaaggcagaaagaaggttgtcttccaaccccgagatagtgtttgggtgcacatgataaaagaaaggctttctgaacaaaagaaatctaagcttctacctaggggagatggtccatttcatgtgcttgaaagaataaatgacaatgcttacaagttg

SEQ ID NO: 203718 - DNA, 423 bp, Glycine max
  unsure (1)..(423): unsure at all n locations
accggatgacgccgatcgaacattgtgtagaccgacgttatgtttatttcgctcttggattgaancgagaactcgttatgcgacatctgtcgtgaagtagcgaccgatatttatcagccgacattgcgcaattctttttagaaaagctcgctggtcgataatggtctntttacggcagagtatgttttcttgttttggtgttgcataaaaaagctactatgtacttcggttaggtttttcgtgcgagctcaaccgacattttgtctcggtcaggaaaacattacgccacctctgcaacacaaatatctgctaaccggcttcatgcatatttcattccacgattgaatagaaaactcaatagtcgacaacggtcgtgaaatagtaccgactgatatttctcaaccggcattgcgcacttttttt

SEQ ID NO: 203719 - DNA, 388 bp, Glycine max
  unsure (1)..(388): unsure at all n locations
agcttggagctaccagcacctccttcattattatcnnacnnnanccaccacggctaataacactagtactcgtgatttctagccgagcactccggctatattattatgacattcgaacaatntaccatttcttttatttgcctagtatgattgaacacttatgaactatgtaatatgactatgtggttattatatatttgacctatctatgtttcttgctccatgatcgtgttagatttcttcaatgaatgccttgtgaatgattagaaatgtatgtatgcattactattgatgcgcactttcggcttttgttgacgcctaagcgggagagaaataggactctaatcaagactctccctatatactacttaatacatgtcatcatatc

SEQ ID NO: 203720 - DNA, 441 bp, Glycine max
  unsure (1)..(441): unsure at all n locations
tgacgacccatgatgcctgagctggctgaattttttttttaaccatctatgatgactntattggttgcttctacttgaccattctactgtggatgctccacggatgtgaagatcaaccttatgtcgtaactatcacagaattccttaacattgttgtagttgaattgtgtgtcattgtcagctattagaatattggggaccccaaatctacatatgatagtattccataagaacttctttacctttttctgcagaaattttggccactggtttggcctccacccatttgctaaaatagatagttttcactatcacgtatttcaattggcacatgccaatcgacaatatgccgagcatgtcgataccncacttgtggaatagccaatgggaagacaattaatgcagacgctcggccgggaggccatataaaatggcatgtct

SEQ ID NO: 203721 - DNA, 339 bp, Glycine max
  unsure (1)..(339): unsure at all n locations
agcttgcctcanagaggtcctttaaggacattgcancanatggaactagttccgctccggagtatgacagtcaccgctttaggagcgctgtacaccagcagcgcttcgaggccatcaagggatggtcgtttctccgggagcgacgcgtccagctcagggacgacgagtatactgatttccaggaggaaatagggcgccggcggtgggcatcactggttactcccatggccaagtttgatccaaaaatagtccttgagtattatgccaatgctnggccaacagaggagggcgtgcgtgacatgagatcctgggtaaggggtcagtggatcccgtttgatg

SEQ ID NO: 203722 - DNA, 466 bp, Glycine max
  unsure (1)..(466): unsure at all n locations
tctanactntaaacaagaatgaagctctgatactccttgttggacaagtgttctcaaatatcttaagaaggggggggggggggtgaattaacatatcacaaactatgtccccaattaaaattttatttcactttctattcaagctataaattctcttaataatgaacttcgtaaatattaattcacgtacagaaatttgaatatgaatataaaacaacaataaatgaaggaggttaagggaagacaaagtgcaaactcacatttatactggttcggccacacccttgtgcctacgttcaatccccaagcaacccgcttgagaagtccactatcttgtatattccttttacaagttctaaacacacaaagacaatccttcctttgtgttagaaatctttacaacaagagacctctgtctttaatccttttcaaataaaaagagagagaagtatctctttgaagaata

SEQ ID NO: 203723 - DNA, 436 bp, Glycine max
  unsure (1)..(436): unsure at all n locations
agcttctcaaggaggagagtttagttatgtgatgggcgtgngnanctaagctctagcttctcaaggaagttttctcaaagaagcttctcaaggaagttttctcaagaaaacttctcaaggaagctacctagtctataaatagaagcatgtgtaacacttgtggtaactttgatgaatgagagtcttgtgagacacaactcaaagttcaaacttctctccctttttcttccttcagattcgtgctcccccctctctctttctctccctctttcttttcctccattgaagcatcattccaagcttcttatccaaggctcatcttggtggtgaagctccttcttccatggcttattccctaggggatggcgcctcctctcacctcttcttctttgtcttccgctgcatctacattgtggaaaatcccctttaaggacct

SEQ ID NO: 203724 - DNA, 468 bp, Glycine max
  unsure (1)..(468): unsure at all n locations
tgtgactctnggcaatntctttataaccagtcatttattatatagtngcgactntntaaaaaaatcttcagatacaaatcacttgaagaattgtgacatttggaaatgtatttttcgaaatcagtcactggtaatcgattaccattaaggtgtaatcgattacacatcaacaaatgtcactcttcattttgaattntgaaaattaaaacgcttagaagctttggtaatcgattacacaagtttaaaatactttaaaactgtttaaacataagttataactcttgatatctgaaatcttaacgttntaaaacactggtaatcgattacaactttgtaaatcacgtttgaaaacaatgctggctattggtaacaattactgccttctggtaatcaaataccatagagtaaaactctttggaatgattctgtacaacttcttgtctgctcaatgttgaaacttttatacta

SEQ ID NO: 203725 - DNA, 373 bp, Glycine max
  unsure (1)..(373): unsure at all n locations
cccagagcaaggggaaggatgaggagagagcccatagatatgttgacgtctttcacccnacgggcacaatagattgagaacacgatactctggcataacgattcacaatgtgttgcagtggtacaaacatcaccatgccgttcttcgttggaccagttcgttatgcacgtccatactcgtaaaattataggttcgggcttacctggactccgataattatcattttatatttcttggtccaaatggaaaattatagatggctcttggctgtacaaaaagagagtgaagattccagtaactggaggtgatccaaaaatagcctgataatatattaatgagtactggaaggcctctgtccaagattatagttacc

SEQ ID NO: 203726 - DNA, 454 bp, Glycine max
agctggtggcaacttagattatcatttctataatcaaagcatcaaaatggaaatcaacaaaatgcaaactaggtgcaggaagagaaaatagagtgatcttcctagtgttaaaaagggaagatagaaggacgtataggaattacaaaaggaacatatacaagataagtgtgtataggattttagttgttaaatataactaaaataaataaatggaaataaatgaaatttaagctatgtacaggagacaaaatgtttgaagtgagttttatagttactgagaaaaacaataaatggtcattagtggattgggaggaaaagagatagaggtttggtatgtgtgtagtgcgtacgagatttaattgttagattttattggaaaacgaaacgataaactaggtgcaggaaaaagaatggagtgagcttcctagtgttagaaagggaagatagacagacg

SEQ ID NO: 203727 - DNA, 440 bp, Glycine max
tccttttagtgcgtcacatctaataccaagttttatggttttacgagcctttaacggtagtcggcgagaagtgatgggggaaatcgacatccccattcagataggcccccacacttgcaatgtggtttttcaagtgatgaacataaatcccacctacaactgcctcttggggagaccctggattcatgcgctgggagtggtcccttcaacgcttcaccagaaattgaagttcgtggttggtggacttttggtgatagtatcaggcgaagaggatatgttggtgagctgcccctcttccgcaccatatgtagaagcagcggaagaatcattggaaacaactttccaatccttcgaggtggtgagttgtgcctctgtggaaacgaacccattgctaccttctctctctaatgcggccataatggtggcacgggttatgctca

SEQ ID NO: 203728 - DNA, 355 bp, Glycine max
  unsure (1)..(355): unsure at all n locations
agctaatgtattcaattgtgtgctnctcttttatcttacgcgactcaattggacatccaagtaaaaaattattgtcgttagaatttgctcagagtttctgtattgaatttcgggcgtctcgatatattacgtgactcaatcggacatccgagtaaaaagttattgacgttagaattatctcacaacttctgtattctatttcgagcgactcgatatattacgtgactttatcgaacatccaagtaaaaagttattgtcgttagaatttgctcaaagcttctgtattcaatttcgagcgtctcaaatataacgcgaccctattggccatccagtgaaaagttattgtcgatagaat

SEQ ID NO: 203729 - DNA, 401 bp, Glycine max
  unsure (1)..(401): unsure at all n locations
ctccgcttgagcagattggaggactttactttatcacggattttctttgagtcccgcagatatcgagacgctcaaaatttagatccgtagctttgagaatattgaattgacaatatctttatacacggatgtccggctgagtcctgtaatatatcgagacgctgcatattgaatacggaagctcgtaggaaattcaaacgacaataacgttctactcggatgtccgattgaatcgggtcatatatctagacgatctatattgagactagcaactttgagcatattgtaatgacaataactntatacacggatgttcggtgagtctcgtatatatcgagacgctctaaattatatccgaagctctgagataatttaattgacaataatcttatactcggatg

SEQ ID NO: 203730 - DNA, 382 bp, Glycine max
  unsure (1)..(382): unsure at all n locations
agcttccatcaatccctcttagggaaaggttatagattntcttctattggcgctcccctcatggggtaccctagatgtcttatggccagtgcgggattataattaatacatcccctagtccctatcaatggaacattagggtagtccccacacgagaaaagaactccctccttgccttccttccaacgaggaaaccaattgattgcgttgcctcctatcccagccaaatgttggtcccaatcgactcttcctttttcggcgcatgagcgataactntgaagcggacacgggtgtcttgtgtcttgttggaataggtgtgaaaccaaccacacacagagagcgggtaaacaacagacaatccgtgcactgtttttctcacacc

SEQ ID NO: 203731 - DNA, 441 bp, Glycine max
  unsure (1)..(441): unsure at all n locations
ntagatatttataactagcttttgcgtatngngaattgttctacaaacccaaagaanatgtattaatcattgtttaagaaagtgacttaaaaaaagtttaaaagttgtataagctctgtttgttactcggtgaaacagttttcctcattaatatggcaatatcactccccccaaacatatcatcaacaattttaatattatgcaacttcaacatgatcttctgctccacctagatatcccaccaacttattgatgcatgtacataattcccttataacctcactatcaaattgcatttgaggattgtgattgaactctgcattcgaaaacttgacaaccacatgtaataggcgatgaaagtggatattccatctttgttcaatgatttcgaacacacaagtgtgtgtgcttattgatntagtcaacatatgagaaagtttc

SEQ ID NO: 203732 - DNA, 449 bp, Glycine max
  unsure (1)..(449): unsure at all n locations
agctngcaacgcanagtcactcaaccagtgtgtcttcaaccataaatggtgagacgcataaactctaattcaaagatcagtaatttgtagagcataatcccaaagaaaaccaaaataataatcaattagtttaggcaaataattcaactgctcatcttcccaatggaactgcataagtcagacaatacaaggcatagctaaaagagaccgtctgagttagcctaattgcatgaagtatttctggctcaaaagatgaacaccctagatatccatggctcagaattttataatagcctttagtctttgccaaaatcagcactgtagtgagcactggattcaagtttctttgcatcattcagttttctaacagcctgcgaaccacagaaggaagtcaaattgttgtgcctatgagcaacgaggagtaatccctttgtacataatcgatacac

SEQ ID NO: 203733 - DNA, 484 bp, Glycine max
  unsure (1)..(484): unsure at all n locations
gggaatattttaanaatatatattaagttttacccatatctttatcgtttgattaattagtaactttctttcaaattatttatttagagaatattaataattaataatatttataagcttaaagtaagggattagattccttgagttggccccatgagttgggctagttaaaaattcttgataaactcaattcaaccttggtgtgtctttattgaacctgagtttgatcaaattcatttaggtctagttaattaaaaattttggacaaactcaatttaacccaacttaattaaacctatcaacaaagaaaataatataaacactaattaggtttaatttatttatatttttcaaacacaatccaactcaaactatgatcatcctatcaaagaagagnaattacaaataatcattntagcagagaatagccaccctcaccaccacaacacttcaacaatgattaanacagaagtagagcacatag

SEQ ID NO: 203734 - DNA, 477 bp, Glycine max
  unsure (1)..(477): unsure at all n locations
agcaccgcggctgcagctttcttctataatctccccttttgttgatggctttttctgaaatcaagaaacacacacagacactntttcctagtcgatcactcacttaaatntccattctccccttttgttttttgaatttatgcttatctttaaattaagttgattactcatgtgagttcttgatttaatccctatttctctaccccattggcatcaacataaagccaaactgcgtatcaaatttgaagtatacaaatataactaaacatccatacaacattcatggaaatactatcaaccaaatcatgaagcaagaaccatgaagcaacaatcatgaatagattaactataaaatccacatagtcaaataacatacttaatatttgctcaaacataccatgcaaataaggaaatagcacattgttcaacaataataaagattatttggataagtcgctgacatctattagtcctaat

SEQ ID NO: 203735 - DNA, 485 bp, Glycine max
  unsure (1)..(485): unsure at all n locations
ntntggcacaatgaagaagaagaagaagaagaggttcatttagattcataggttgttaaggattgtattgtaaaggttgtttaagatacttgaaatgcaaatcaaagtcttgcttttatagactcttcatgtctggtcaagagaaccatttagaagagttatgactcttagaaaaacttaaaaccaatttgaaaaagtcaaaaaccatatgaagagttacatcttttgatttatttagaaacaatcactgataatcgatttccaaatcagtgtaatcaattacacaaagcttttatgtgaaaggatgcgactcttcacatttgaatntgaatttcaatgttcaaagacactggtaatcgattaccaaaacattgtaatcgattacagattttngaaatcaattggaacattgtatattcagttganagctttttganaaacatctttgctaatggtaatcgattacaataatctggtaatcgata

SEQ ID NO: 203736 - DNA, 431 bp, Glycine max
  unsure (1)..(431): unsure at all n locations
tggctttagggaccgacgaagaagggcgagccatatttttgacccccttgaaacgaaaagccctcggctcttataatgaggacacggatgaacacgtcttggaaaatgcccctcaaaatgcaagatacactttatagcaccccgatcgaatcacacctaaatgagagagatctaaaggtgggacatgcatgagatattatagttgaggacgaattacggaaattaattgctactacctataccaataagatgtatctacttttcgatagcctgtcacataagaacttcacagtcaaatatgctngatttgaagtatgtatatggcgactgaccttttgaaaaccttccagacagcatgcgagtgaggattaagtacgttgaacagtcttgtgtgtgttgagaggatatcaatgatcttgaacagccaatga

SEQ ID NO: 203737 - DNA, 438 bp, Glycine max
  unsure (1)..(438): unsure at all n locations
agcttgagcanattcaggcgacaatatctttntactcgtatgtctgattgagtcccgtcatataacgagacgctcgaaattgaatgttgaagctctgagccaattcaaacgacaataactttttactcggatgtctgattgaatcctgtcatatatcgagacgctcgaaattgaatgttgaacctctgagcgaattcaaacgacaataactttttactcagatgtctgatatagtctcgtaatatatcgagacgctcgaaattgaatgttgaagctctgagcaaattcaaacgacaataactttttactcggatgtctgattgagtcccgtcatacatcgagacgctcaaaatagaatgttgaagctctgaggaaattctaacgacaataactttttactctgatgtctgatngagtctccgcacatatcgagacgct

SEQ ID NO: 203738 - DNA, 476 bp, Glycine max
  unsure (1)..(476): unsure at all n locations
gaaactcagcttaacattaatttgagcgctcgtaatagacgggacttaattgatcttccgagtaaaaatttattgcncgttggattggctcagagattcaacattcaatttcgagcgtctcaatatattacgggactcattcagacatccgagtaaaaagttattgtcgtttgaatcagcttagagcttcaacattcaatttcgagcgtgtcgatatattacgggcgtcaatcacacatccgagtaaaaagttattgtcgtttgaatttgctcagagccttaacattcaatttcgagcgtgtcgatatatgacgggcgtcaatcagacatccgagtaaaaagttattgtcgtttgaattggctcagagctctcacattcaatttcgagcgtctcgatatactacgggcctcaatcagacatccgagtaaaagttattgcattngaattggtcagagcttaacattcatctctagcg

SEQ ID NO: 203739 - DNA, 460 bp, Glycine max
  unsure (1)..(460): unsure at all n locations
agcttcataatgatgaaccaagcaattgtttgttgctctttgcccangtggttgattcaagattgattcaagacttcaagatcaagcatcaagaatccaatccaagattcaagattcaagagaagaaatcaagaagcaacaagtcaagacttcatataggataagtattaaaagattttttcaaaaaccaaatagcacagctttttttttacaaaagaattatctcaaattttctaaagttgccaaagtgattactctctggtaatcgattaccagttggcagtaatcgattaccagtgaccaaattggttctcaaaatgttctctaatgatttgtaacgttccaaaatgattctcaaatagtgtgagtgagtacactgtattacgaatcatttgcaagtgaatntgaacgttggaattcaaatccgtatgtgaagagtcataacttttcataaaataca

SEQ ID NO: 203740 - DNA, 429 bp, Glycine max
  unsure (1)..(429): unsure at all n locations
actcagctanagtattgagggagaataaacaatccagaatcttttgtcttttcangttttataaattctttttgcgacttttagatgagtagaggtaggagcctccataaagcaacacacaactcccaccgcatatagaatatcgggccttgtattggttagatacatcaaactccccacatgactcttgaagaccgtggggtctaccttctctccttcatcaaactttgataacttcaagccaccttccataggtgtgttcacgggattgcaatcaagcatattaaatatcttcaacacttcttttgtgtagctttcttgtgagacaaagataccattctccatttgcttcatttccattcccaagtaatatgacatgagtcccatatctgtcatctcaaattcatgagacatggaatccttgaagtc

SEQ ID NO: 203741 - DNA, 452 bp, Glycine max
  unsure (1)..(452): unsure at all n locations
agcttgtctcactaagcatgtttccatttttgtcactaagtgcgacaattcgcgctcagcacaattctctctcaggttggaattgcgcttagcgtgcttcttgtgctaagcaagaggtgaaacgttgttattnttcaaatcctaacggttgaaccatggggatatgggttagaaaccttcagtccaattttgtagacgatcgattaatgaattcaggatcatgactctactggaataggcttggataaaatctaaaatctcataatttcaacttaggttaataaaactcaacataactcaacatccacatcaagcaaatcacacatgactaatttacaccatacctcaactcattcaagtctatcatattatcgaataacatgataaatacaattaaacacccatttatagttagagaaatattacggcggtacacttttcaccgtgaaaat

SEQ ID NO: 203742 - DNA, 478 bp, Glycine max
  unsure (1)..(478): unsure at all n locations
tcanaccacagcaacacataatctaggtatccattaccttttcaattaatggattntcaaggcttgagaagtgaaattgagaatgaggtaaatttgaagcaaactctcacctcacacaagtccataacatcaatttaaacttgttcaaactggatttacacctaaaatttcatcgaatcaaaatttgactcctcaacccccaaatttaccctagaaatggctctttgttcactttggtcatttgtttctctctctagcacagcccatactttctcataagtcctaaatggcatttcaagctaggattaactcactataacctccacataccactaaatccagaattgggccttccaactctcaaaatctcactcttttttccactcacaacaccatactcccaccttctaaccctagggtaattctacccttcatctctaataagtttccataagtaatatcagcacataaacatcac

SEQ ID NO: 203743 - DNA, 291 bp, Glycine max
  unsure (1)..(291): unsure at all n locations
agcttgtaaatatttattggtntaacatgttttttccattttgcacancacgccaacagacgctacttcctacttgacatctttcgtcttgaatggaattgccatgacaagtatattgctactgtctttctaaattccgcattgatactagcgacgcggcacgtaattctgatagtattaactcaccattcttcacttgccgatgcgaatcacctttgtggctggatcacacaggaaaacccgtctccaagtgaaaccatatccttctatgcggcctaaccttgaaacccc

SEQ ID NO: 203744 - DNA, 468 bp, Glycine max
  unsure (1)..(468): unsure at all n locations
ngagaaagtccttctgattctatttatagcatttttttttttatggcatgttatgaagtacaaagattggagcttttgcaaatttttattaatgaatagcttaaacactgtggtttaagctactttccttgatatttgtcttatgcctaacttcatctaattgtacaggttacattttattcttctctttggataactgcatgccttgtaaaagacaagtgaagagggcatttttgcttcattctcttatgatgcaatcagtaacttttgttgcatacaccttttgtacatagtcacagcatgttattgtcacttgcggaccagtgaactgttctttatttgcttaaggacaagcaaaactgtacattngggggagttgttagtcgatgaatacgactaacttttgtgtataaaacttggtgtaaatggatcaaactcctncaaacttatggttatttgtagtggtat

SEQ ID NO: 203745 - DNA, 83 bp, Glycine max
caaaaacagcgccaaacaggaggaagtgttgcccgccaaaaagcagcacgcgccgcaaccacggcaactccacagcaagagcg

SEQ ID NO: 203746 - DNA, 440 bp, Glycine max
agcttatgccttttcttctttctgccattcttggagagatcaacgactctaacaaccttcatagccattgtgatgaaacttttccgttgcgtcatttgaagacgaagatcaacctgtaattgtctacaccacatcacagggtaaaacgatgaatcaacttcggtagctttttgtgcgttaaataatgatttcaccgggttgctcgattttatcgtgggtgcaacttgtttttggtgaacaaatgccaatatagtctccgaaatgaattgaaccaaaacccatgtgaatactcaattttatttaggtgtatttttatcttttaaataaaaagtatttaaaatatttttgaaaaaaaaaagaagagaatagtaaatattacagaagatgtggtagatacaagaagactctcataagttgttcttggattataaaagaaatat

SEQ ID NO: 203747 - DNA, 424 bp, Glycine max
  unsure (1)..(424): unsure at all n locations
tgccacccagctcgcccaggcaccgccttctagtggaactactctggaatgttcaagtaggcctgancgctatttgtaccccccatatttactaaatacaccccctgtcttttttgctgattctttttccgtaacgttacggaactttacgaattttgtaacgatacttgttttctttccataatgttatggaaccttacggattacgtaatcatcacttttttggcttccggaatgttacggaacttcacgaattgtgcaacaatgcttccttttgacttccggcatgttacaaaacttcacggaattngcaacaatgcttccttttgacttccggcatgttacggaacttcacgaattgtctaacgatgggtgccaagtaccttgaagtggtcaaaggagggttgcatcccaacaaatggat

SEQ ID NO: 203748 - DNA, 448 bp, Glycine max
  unsure (1)..(448): unsure at all n locations
agcttctaaactntatactttattgaagctctgataccacttgttggagaagtggcatcagatatcttaagaaggggggttgaattaagatatcacaatcttttcttaataaaaaaaattctattttgattttgtcctaacaacccaagattcattttaaaaatgaactcctaaataataatgtaaattaatcttactgaatagaaacaataagcaataaacaataaaggagtttaagggaagagaaaatgcaaactcagatttatactggtttagccacacccttgtgcctacgtccagtcccgaagcaacccgcttgagagttccactatcttgcaaaatccctttacaagttctgaaccacacaaggacaacccttcctttgtgttcagatttctttacaacaagagaccctcggtctcttaatcccttttgagaaatagaatga

SEQ ID NO: 203749 - DNA, 483 bp, Glycine max
  unsure (1)..(483): unsure at all n locations
tctcagaaaagtcacaaccaacctgaatcataatctcatttatctgttaaaatgagaacacaaacattatttaaatttaaataaaaagcaaatgaatcacaaaatagtaactaataatttttcttttgatatagaaagaatttttagctntgaagagatgccaatcctaagcataaagtattataagagcaaatggtttactatcaagtcaaagaattgtagtaccacttacccatgtgatagcttttagcctagtaaattcattaggagaacttgccctctatactaggatttcagccatgcgaccataatctacagacttcaagagtagcactgttcgagtaagaaaatgataaatgaacaaaaaactttgcttttgtgtcaaagtagtagttgaaaatgaagcacaactccattaatcaatacaagcacaagctaacacatatatcaaccctaaaagatggattatgggaaagataaaaa

SEQ ID NO: 203750 - DNA, 350 bp, Glycine max
agcttgtttgagaaaactttattgagaatctagagcttagctacacacacccctgtaataactaagttcacctccttgagaaacttccttgagaagattcctaaagaagctagagcttagctatacacacctctctaatagctaagctcaccctcatgacaaaatacataaaatacaaaaaaaagtctctactacaaagactactcaaaatgccatgaaatacaaggttaaaaccctatactactagaatggccaaaatacaaggaccgaaagaagaaaaaaaacctattctaatatttacaaagaagagtggacccaaccttggcccatggactcagaaatctaccttg

SEQ ID NO: 203751 - DNA, 378 bp, Glycine max
tgaccgtgtgtagcccaccatctttccatagtacaacattattgatgtgtctactattatcgagatcatctatctctctgtcattggacgtgccacttgagctgccaggtctctccacctttgggcgtatactttgaaagagtcatgcccctttttgcacatgttctgtagatgcatcctatctgaagccatatcagaatgtgactgatactgtctaacgaaggcaaccattatgtccttccaagaatggactcgagaaggttgcaagttagtgtaccacgtgacagctaccccagtaagactgtcttggaagaaatgtatcagcagttcctcatactatgcgtatgctcgcatctttcgacaatacatctgtacatg

SEQ ID NO: 203752 - DNA, 420 bp, Glycine max
  unsure (1)..(420): unsure at all n locations
agcttgtattattcatctttntcattcccttctccctttgccaaaaagaattcgccaaggactaaccgcctgaattctttttgtgtctctcttctcccttttccaaaagaacgaaggactaaccgcctgaattcttttgtgtctcccttctcccttgtcaaagaattcaaaacgatacagtctgagaattcttttgattattcccattcccttatacaaaagtgttcaaaggactaaccacctgagaattcttttgtatccccattcacgaagtatcaaaggtttaaccgcctgagatctttgtcttaacacattggagggtacatcctttgtggtacaagtagagagtacatctacttgggtttgactgagaacaagagagggtacatctcttgtggatcagttctagtggagggtaca

SEQ ID NO: 203753 - DNA, 471 bp, Glycine max
  unsure (1)..(471): unsure at all n locations
nggtgttcctaggcctaagtcctatttttggcacctactctaacctctacaaacttcccacacactcaaaaggtagccctatgtacatcaattntttttctacaggcagaaattcacaaagtcatgcacaaatgccattgaggcatttcaccgagcacttggtgggcgcatgtttaagcatgaatagcaagggaatgggggaaatgtggcatgcctaatcatttcaaaacacaacttaggcctaaggccattgccaacaacttcctaactcaaacaaacaagcatgaattcaaggccaaattgctccacggatttgagcaaattcacaccatttagagcacaaaaaggcatcaatggaaggctagaaaaccaaagaatgatgtacttacttattggtagtgaanaacaatgccgaacggaaccaaaaatgcaagaaatggtgacttanggctgganaattcgtgattttcg

SEQ ID NO: 203754 - DNA, 466 bp, Glycine max
agcttcatgatgatgaaccaagcaattttgatgatgccaaaagcccaaatgattaattcaagattgattcaagacttcaaaatcgagcatcaagaatccaatccaagattcaagattgaagagaagaaatcaagaagcaacaagtcaagacttcatataggataagtattaaaagattttttcaaattttctcaaattttctaagttaccagagtgattactctttggtaatcgattaacagttggcagtaatcgattactagtgaccagtttggttttcaaaatattttcaaatggtttgcaacgttccaaaatgattttcaaatagtgtaatcgattacactatattagtaatcgattaccagtgaatctgaatgttggaattcaaatccaattgtgaagagtcacaacttttcattaaatacattgtgtaatcgattacaccattggggggaatcgatattag

SEQ ID NO: 203755 - DNA, 477 bp, Glycine max
  unsure (1)..(477): unsure at all n locations
tgagactcttagcctctctcttgctgtgcctgatgtgtcgctctctctcacagcctcaaacgctttgcaaaatggcgaccaactcgttaggccaaagccttgtaagccatccacaaggaccacaactacgataaattcgtgttcaaatgattacacagcagcttctgtgtctcactcttactctcaccctttctcacacaaccaaagttgctcactcacccgaaattcaaccgagaattttgagtattcacacagcaaagatgatcaaatttggcattgtggagaggggactaatggctcggttcatagcaggttcaagccaattggagatggggttgctttggccaattattccttcatgcaagggaatagtcagtataaggctactagttcagataaccaatctttnttcccttcagaattgcctgcaagagtgagatttgaaggtcagtcagaatgctcaagaggaaacaattc

SEQ ID NO: 203756 - DNA, 399 bp, Glycine max
taactgtagaggcatacctagtgtgccataatgaataacatattaatgcttcccaggagtggcgcaggcaccgataataacgcatacatatattcaacacatctacttaaggcaatctgtatcaagttttcactcttgaatgaccatatcaccgctcggattgcggaaacacaataactctcgctcgccatctactctaagagtcacactagctaaagcgatctttgctttacggtcaaccgcatgccagaagctcaacattgttcagctttaaaatagtagccaacatgtacgcaaattcatctgctccacctactagatagatgaccatgacttaatatgagatgttctatactacgagttccagcaagcatattatcttccttctatatccttcta

SEQ ID NO: 203757 - DNA, 428 bp, Glycine max
  unsure (1)..(428): unsure at all n locations
agcttgtgagcatgtatcggatggcattgttcactcgagacaatgntgctcaagaattaatcattgctttagggttattcacagtttgaaattttttgtcaacaagacactgaattgcattaaataaatcaggcgaaaacgtacacatgtaatacaatgcaagcaaatatgcagtgcatatatatgcagcaattcatatttccccgtatgcaaatatgacacatgtagtccatctcccccttttggcattaacaagaccaaaatgtttgaacttatgcaaaaaaaaaaaaaaacatacaaatggaagggaaataaaaccatatcataaaaaacttaactatcatcattagacaaaaacaaacagaacgagacataacaaaacaaatcatcggatagcagaaccaggcacaagaacataactacgcttc

SEQ ID NO: 203758 - DNA, 288 bp, Glycine max
  unsure (1)..(288): unsure at all n locations
gcattaatatcaatgganaatatatcagttatgggagtcatttatcactggatttcttctcagagagttcaagcgctccagcaatgattgtggtttcatcatgtgtcagntctccaccttttccagcctaatatatcaaaattgtcaatagttgtatctctgacttctttcctactctactgagaactttaanaagtggagtggcttaaaggtccaatgttntgcctatcttacaataacttcgttaccttcttccaaacaaataaagtttttgcatataaataacct

SEQ ID NO: 203759 - DNA, 454 bp, Glycine max
  unsure (1)..(454): unsure at all n locations
agcttccacaacatccaagagatacaacatctaatcattatgaactatcaaagtcaagaaaatagggcaaaggcagaaaactctgcccaaaaacaccaaccaatatcacagcttttcacactcaaataccccagtaacattctcttcgctccaattcgttaaccgttggatcgactcgaaaattttactggaagtctctagtacataagtctacattgtgaccgttgggatctgctagaaaacgtccagaaccaaatctgtactactctttccacaaccagcaaatacacaacattttctgcacaaagccaaaattctgctgcacatatttgacagcaaaattctgcataaagtgcagattttcgaaatcacacttgccctcatccaatnttgcccaaattgaatcctacaagtcctaaatcatgtatcaatcatgtctaaaccaaggacaagc

SEQ ID NO: 203760 - DNA, 415 bp, Glycine max
  unsure (1)..(415): unsure at all n locations
taagatgaggaagtgttgaagggtgaaacttcctgctnttattgttgaccacagagtggtacctggagatatgtcgcgggggtcaggagaccttggggacgtcaggtggggtgctattgcccaaaaccaagcttgaccaatcccgaaccaacccgggcatagtcggtcagtgagaacctgtgatgtacctaaacaggcgagctcctggcagtcaacagataaaaggaacaaagaccacaaagcaaagaggcttgtggtggctggccagctgtgaactttgattgatatgtgagatatggtctctggtaatcgattaccaagggtgggtaatcgattacaaggcttaaaaatgaagacaggaggctaagatggtctctgttaatcgattaccacggggtgtaatcgattaccaggc

SEQ ID NO: 203761 - DNA, 455 bp, Glycine max
  unsure (1)..(455): unsure at all n locations
cctgcggcatgcaagctngtgttattctcatacaactctcaattggattatgaacctccatttctcgagacctacaagacccttgttctaaaccaccttgatgattcaaagaatgagtactcctctttggtggagagatcatgtgaactaccagtgatcgatcttggccagttcaatggcgagagagacaaatgcatgaaagaaattgcagaagctgctagtaaatggggttttttccaagtcgttaatcatgggatttcacaggagctgctgaaaagccttgaatttgaacaaaagaaattgttctatcaacctttnttgaataagtctgaaaaatttaatttttctagtttatctgccaaaacttacaggtggnggaatccatatgctaccaatctgagacaattgtcatggtcagaagcctttcatttttatgcctcagatatctcatggat

SEQ ID NO: 203762 - DNA, 451 bp, Glycine max
  unsure (1)..(451): unsure at all n locations
ctccgcttacctttagnntttatacttcttctttttattcttattatattattaatttttttgattatttctttaaaaataaattatgaattttatttttatgtcgctttacactttntagctatttttacagttgattttcttgaacacttataatttaataatctaattgtttcatctttcatctttcaactattagttagtttttttggattttaactagttatttagctatttcaataattgattttatcaaatacttataatttaataagttaattttttacctttcagctattggttaccttttcaacttctaattaccttntcatccaaacatagccatagccatagagatgagatgagtataattagcaagatagttcggggaaaaaatgnaaaaggttgtgaaactagcagaaacctagaanattgtgtcaacatgttttgg

SEQ ID NO: 203763 - DNA, 393 bp, Glycine max
  unsure (1)..(393): unsure at all n locations
agctttagaattngaattatatacgttcattaactgctggtaatcgattaccatatatgtgtaatcgattacacagtacaaattttaaattcaaatttaatggctgttgtaaatcgtttttggccactggtaatcgattacatcctctggtaatcgattaccagagagtaaatctgttgaaaaaacctttttaacttagatttcttggccaaaccttttgcgacttcaattggaattcccttcctatttaatatacccttcctaagattctaaagactgtcttgatcattcatcttgagtatctttgtcttgaataaatctttgagaagcatgtgattcatgtaatcctttggcatcatccaaacattcagcttgatcctctgtctacaatct

SEQ ID NO: 203764 - DNA, 471 bp, Glycine max
  unsure (1)..(471): unsure at all n locations
tctcatgcatgagaacaattctcaagttgcggttccaatcatcataattggcttcgactagttttccagattcaagaataccacgaagcgatagagaagacatactgttgattaagcacacaacaaaatatagttatgtcagagcataatttttcaaaccttttaaaaaatacaaaaatattaatgatatttccactaattaaaataataatataataatgtaagaaatacttaagtggatcacataaagcctcttaaaaattgtaagaaagccacttggttatcaagtcgtttctcatacacattctaagacaatgtatcatatacattntcaaatcaaaataagaaatatcatatcacataagttcctggtgtcacaccaatcctaggttgtctaggcgctcaatatataattaatttcaaaacatgcatcttatgcgagaaaaatgataataattaattataagtctc

SEQ ID NO: 203765 - DNA, 411 bp, Glycine max
  unsure (1)..(411): unsure at all n locations
agctntagtcacgtgacgtgtaagagtattattggngatttgaatggggattcacacaagtagttaaagatttaatatgaacttatacttattttatgggtgtgtgtgaatctctcataattcactttcttcacttggtggacaaccagcttctccaagaaaatattttgatgtgttacaagaaagtttgctattatagtgggctaaaagtttattgtactagcgaaaacccactctaaattgatggcttacaatggatcaaaagttcattggtaagttttatcaacgaaccccaaaaagttctttgtaataggatgagttaagcccactataactcgacgataatatagtgagtttagtcgtcaataatttgactatcgataatacagagagcttaacccgttataaatg

SEQ ID NO: 203766 - DNA, 476 bp, Glycine max
  unsure (1)..(476): unsure at all n locations
tatagacaactcaagcttgaacgaatgtaagacacatcttcttcaacctttgtgattcttgactccatttcattgaagcgcatatccacttgcaattccaaagtgtcaaacctctcaccaacaaaggtttgaagaccatcaaacctgtccataatcttccaaagaagagatgaatcttctccctcatgtccttcttcaccaacatttctagcaccctacttcacccaagagccatcatgctcctttatataaccaaaggatgctatgaatgaagcgcctataaggaatgatctcttgattggaacataaggttcagaatcaagagggatgttgaagtgttgaaggaaaagggtaacaagatgaggataaggcaaaggggcattcaatcgcaatgccttatgcatgcgatatctaacaagggtgtgcccaatcaattgtaaacctttatganaggcccatatgacaatgagatcttc

SEQ ID NO: 203767 - DNA, 444 bp, Glycine max
  unsure (1)..(444): unsure at all n locations
agctgtgagagaatacaatctataataactttttactcggatgncagattgagtcccgcaatatatcgagtcgctcgaaattgaataccgaagcgctgagcaaattcaaacgacaataactttttactcggatgtctgattgagtcccgtaatatatcgaaaagctcgaaattgaatgttgaagctctaagcaaattcaaacgacaaaaactttttactcggatgtctgattgagtcccgtaatatatcgaaaagctcgaatgtgaatgtagaagctctgagcaaattcaaacaacaataactttttactcggatgtctgattgagtcccgtaatatatcgagatgctcgaaatggaataccgaagctctgagcaaattcaaacgacaataactttttactcggatgtctgaatgagtcccgtatatatcgaaagctcgaattg

SEQ ID NO: 203768 - DNA, 466 bp, Glycine max
  unsure (1)..(466): unsure at all n locations
actatagaaactcagcttcacattcaatncgagctgggcgagaatactgtactcattcggacatccgagtaaaaagttattgtagtttgaatttgctcagggcttcggtattccatttcgagcgtctcgatatattacgggactcaatccgacatcagagtaaaaagttattgttgtttgacatttctcagagcttcggtattccatttcgagcatctcgatatattacgggactcaatcagacatccgagtaaaaagttattgtagcttcaatttgctcagggctccggtattccatttcgagcgtctcgatgtattacgggactcaatcagacatccgagtaaaacgttattgtcgctagaattagctcagagctcctacattccatttcgagcttctcgatatattacaggactcaatcagacatccgaggatacagtattgccgttgaatttgtcagagctc

SEQ ID NO: 203769 - DNA, 413 bp, Glycine max
  unsure (1)..(413): unsure at all n locations
agcttaacatctggaaggtctactttaatttgtaaaataagtatggaaaccctagagaggtaagagtgtttgtgggagagccagagcaatttcagtttttgcttgttcactaatactgttgtgtggagtatccttaatcggtgtttttgtgtacgaggctgttatgaaagtattccaaagagctctacagtacaatgatcccaaaaaggtctacctagcactcttgggaatgtatgagaggactgaacagcataatttagccgatgaacttctcaataaaatgacaaagaagttcaagcattcatgcaaagtattgtgaactttntaagtataaatactanctctttgatgttgataaaaaatgcatgtgaaacttattttgcactggattgtangtttggttgaggcgtata

SEQ ID NO: 203770 - DNA, 413 bp, Glycine max
  unsure (1)..(413): unsure at all n locations
ctttggaatatgtaataatacttcaatagttggctcttttatctganaaaccttgttcgtttgttccgatgcaatattgaaatcattttagcatttgactctttgggctcctacctccatagccagttttaggcctgctaactatgcctcatacttggcctagttgcaagaggctttaaatctaaaacatatcaactatgagaaagctatgctattcaacccttccaagatgaccccaacttcacttccatgctgattggacgagttgtccacatgtagagttcgtcatttatcttggaactaaggttgtggtgggcaaaattcatttacgaaatctgccaagctttgggcctgaatgctgcctcttggttcataatggatcttgtactttgataaatcaatggaccatgcca

SEQ ID NO: 203771 - DNA, 399 bp, Glycine max
  unsure (1)..(399): unsure at all n locations
agcttccttgaaaagattcttatagaagcttgagcttanctacacacctctctaatagctaagctcacctccttgagatgagaagctagaacttagctacacaccccctataatagctaagctcacccccatgacgaaatacatgaaaatacaaaaaaagtccctactacaaagactactcaaaatgcctcgaaatacaaggctaaaaccctatactactagaatggccaaaatacaaggcctaaacgaaggaagagacctattctaatatttaaaaagataagcgggctcatacttagcccatgggctcaaaaatctaccctaaggatcatgagaaccctagggccttcccttggatctctggcccagnctacttggagtcttctatccaatgccctt

SEQ ID NO: 203772 - DNA, 456 bp, Glycine max
  unsure (1)..(456): unsure at all n locations
ggccgcccagctcgcccaggcgagctaggttgctttctctataaggcaccgtcttctggtggaacttcctagaaggcccaagtgggcctggttgctattttgcaccccctgtttactaaatacaccccctgcctttttttgctgattctttttccgtaacgttacggaactttacgaattacgtaacgatacttgtttcctttccgtaatgtcacgaaacctaacggattacataatcatcccttttttggcttccggaatgttacggaacttcacgaattgtgcaacaatgcttccctttgacttccggcatgtcacggaacttcactgattgtgcaacaatgctttcttttgactttcgacatgtcacggaacttcacagattgcctaacgatgggtgccaagtacctcgaaaaggtcaagcanaggttgcatgccatcaaacaatggtccccg

SEQ ID NO: 203773 - DNA, 413 bp, Glycine max
  unsure (1)..(413): unsure at all n locations
agctntgatctaccaccaccaccgccactatcatcttagttttctattatttttaatattattagtactttgatttctagccgtctatttggctttattattatgacatttgaacaaattttgtatttcttttatttgcatggtatgaatgaacaattatgaattatgttatatgactatgtggtttttatatatttgatctattcatgtttcttgcttcatgattggtttagatttctcaatgaatgtcttgtgaatgattagtaatttatgtatgttttatatttggtacgcactttggctttttgttgatgccaaagggggagagaaatagggattaaatcaagaactcacataagtaactaacttaatttcaatagaagcgtaaactcaaaaacaaagggggagaatat

SEQ ID NO: 203774 - DNA, 454 bp, Glycine max
  unsure (1)..(454): unsure at all n locations
ntcattntaatcacccacccaaagaatatccctcacatttaaataaccacaaaggttggaaaggttgcagagtcggaaaggaaacaattattatttcacttcgataaagaaaaggctcccttacaaaaataggaaataaaagaacaattattattcaattattgttacctgaaaataatgcatagttggaaaggacacagtagcctccgtgaggactgtgacgaggaggtccacggattcagatgaatagacacaaacgcacaccttcgacggacaagggctcgtggagtctgaacaggccgttttgaaattaattattagtggagtggattcaagttaggtattaataatctcatccctgacctcgaacccaactntgcctggtggggaaaatntgaacccaaccctgatcctggtcaacttgngtttttcctgtcaaaatcangatatgtct

SEQ ID NO: 203775 - DNA, 437 bp, Glycine max
agcttgaccatgaattatttggatgggttttatgttgaattcaggttgttcctggtgcggagatgatggtactgcgggtgaaccacaagctgcagtttcttttggtgaggtagccatggaaaagcagagcgtttgaaatggtttcgtgaatctcacaaaactattgggaaatgctggtgaaaacacgaatgccaagcagatataaatttgaatgaagaatgtagaggggcgtgtgaagcaacggtcgaatttgctttgtagtgaacgtgctattaatgttaagtgattcgtttgggcacgttcagattgcagtagctgctataattcctctagcagacaaatgcccagcttgcccctcagtttttcaaactgatttgcatccaaagcctttgtgaaaatatctgctatttgttcctcagtgtcaacatgcttcagtg

SEQ ID NO: 203776 - DNA, 472 bp, Glycine max
  unsure (1)..(472): unsure at all n locations
ggacctatgaatctcagctaacacaacttgtgtaatcgattacgatacagttgtaatctattaaaacagagagnttttccttctgaagaaacttttctaacttagaaatttttattttcatttactcatgatgatgcatgatgcacaagagacatgatatggactaagatacaacattcaatataacaaccaatacaaatgccactcaaaggagttaggcatgtaaaagacaaaacattttcaagctttcttccaagcttcaagctttagtcttcatgttgctcatgttgctccccttatctctaacaactatgctttcagaggtgagtaaaacatttatcttttcaaaccatccatgttatatntattgaaaagtatgactnttgggttcttgataggaaattattagatcaaagatattatacatattaagaatgaatacatttgaatgtcatngtatgtggcatataat

SEQ ID NO: 203777 - DNA, 348 bp, Glycine max
  unsure (1)..(348): unsure at all n locations
catgcaagctntngttagcctaaccctaagccttttttttgtcacttatnnggggttgaacttngngtaaactttatcttgaattgctttagaactcaaggagaattttagagtggaaaaaggcaagaatgtacaaaattttaaaaaaagccatatttgagagatacacttgagtgtggtgaggttctattttctttataactattattatttttatttcgaatatgtcaggtagtggtgaacatcaaatggatggggcacaaagattctttgtggatgctcccaatgctcaaatgcaaagactgttgagggagaacaacgagatctttttcaccaacaagaactctt

SEQ ID NO: 203778 - DNA, 414 bp, Glycine max
  unsure (1)..(414): unsure at all n locations
agctngccgctggagctgacccatcaactgtcttaactcttttagactgttgatccctaggctcttgaccttgacttgatagaacctctttttaagcgaaggtgtttgacttgatcccatgttttactaaagtgaaacaaaatcgatgcgaatcaaaactccgacatctatcatgggtggaatggatgaatgcatgaagaaatgcatatgatacaaatgcaatttatgaacacgggagcccgggaaattgtctccttcttagatacaacgtcttggggtaacacagtgcccaacgtatgtatttaagaaggtgacatggaccttccgttggttngccaaagagagggtgtcgcaatgtgcccttcgcgggcgagcgagggcgacgctcacgggtgcgcttcccaaaggaggaaa

SEQ ID NO: 203779 - DNA, 488 bp, Glycine max
  unsure (1)..(488): unsure at all n locations
ggtaggattatggggtacccatcacatgtggtactaggtttctgtcgggcgatggtgcacaacaagttntccacatccacaaagcgcgcataaacccaccatcccctgttgcccacctccaactgagctcacgtactcccacgtagcccatatcctcgtttctctcaacaccgggtccccatcaatcctcccaagcttccccaacatcaaagtaatacaaaattcaaacagcacatgctatcacagccaagcaaaacagggcaaaggcagaaaactctgcccaaaacaccaaccaaaatcacagcttttcacataccaataccccagaaacatttccttcgttccagttcgttaaccgttggatcgactcgaaaattttactggaaatctctagtacataagcctacattgtgaccgttgggatctactagaaaacacccagaactcattctggactgctctttccacaaccagcaaatgcatagcat

SEQ ID NO: 203780 - DNA, 463 bp, Glycine max
  unsure (1)..(463): unsure at all n locations
acctgaggcatgcagctgcatacaaattctgctgcttactcttanatatctttggtgggtatatagatgtcttcctctaaatccccatgcaagaatgcagttttaacatctaactgctccaagtgaagattctctgcagctattatgctcagaataactctgatggtagtcatctttacaactggagagaagatctctgtgaaatcaattccttgtttctgctgaaacccttttaccacaagtctcgccttgtatcttcttntaccgttagattcttcctttagcctatagacccacctattctgtaacgctttctttccttctggcaatttagttaaagaccacgtcttattcttctgaagggatgtcatctcatctatcatcgctagctcccactcaataatgtcatttccttgtgtagcctcactgaaacattttggctcaccagcatcagttaacaaca

SEQ ID NO: 203781 - DNA, 481 bp, Glycine max
  unsure (1)..(481): unsure at all n locations
ataaaactaagctttagattatagccttatcttaagaggaggggtttcttatcatttggattcttcactcgatcttcatctaatgaaaatggtcgttgggagcatttaatgcttgcaataaatacacatcccttcttcatgcaaataatctattcttataggttattgtgttgaatactttattagaaagtcacttcatattcaccaaagtaggtttgcacaaaagagcgtgtcttttgatgatgattagtacttttagatcttgaacttcatttattctttataagactttgtcagatcttaggataatgtttctgcaaatagaatcttagacataaagaaataattgatctcttacatgcttcttttaaattccttattagatcatgacttatgctcgttgttgtctgatgtatcangcgcataatagtacgctatgatcaaattatgcataagacattcgttttaacattcgtattta

SEQ ID NO: 203782 - DNA, 300 bp, Glycine max
ggagcactgagttgatagaataaaatagggagagaagcggatcattgaagtatgtcccacaagactcttcttcatggccgtttccacaagcgatacacatgcttctatccatacactacgtagcgatgcttgagaacctctctggacaaaactttcttgagaagcagcttagagaaacctccctcgagaagctagagcttagctacgcacacccccccataactaaacccacctccttgagacacccccttacgaagagttctaaacccgctcgagcttagcgtcacacacatccctagt

SEQ ID NO: 203783 - DNA, 353 bp, Glycine max
  unsure (1)..(353): unsure at all n locations
agcttgaaggtgtgtaccctatccatttttttatagnaattcactnggaatgggtctactatcattgtgataatctctctctctgttattgggggcgctacttgagctgccagatccctccacctttgggcatattccttgaaggattcatgctctttttttgcacatgttccatagttgcatcctatccgaagccatattagaattgtactgatactgcttaatgaaggcaaccattatgtccttccaagaatagactcgggaaggttccaagttagcgtaccaagtaacaactaccccagtaagactttcttggaaggaatgtatcagcaattcctcgtcgtttgcgtatg

SEQ ID NO: 203784 - DNA, 475 bp, Glycine max
  unsure (1)..(475): unsure at all n locations
tctagtatatttaagccttcttcaatagtgggttgttgtttctaaaggatatatttcttcactttagcttacgtttgaaggatgtggtggttggagcatttaatgcttgcagtaaatgcatgtacttcttcatgatggaaaaacactattcttagctatcgtgatgaacacttcaataggaaatcatgtccttttgcgttagagcaggtctgtacaatagaacgcgtcttttgatgaagattggtaactctcagatcttgaacctcatttcataggattcgtcaaatcttaggagaatgcttctaaaaaacaaatctcaaacacaaagtactaaatgatgtcttaaatgtcatctcttanatgttgtattagatcatggctttagctaactatcgtctaatacttcaattccagactcgtcaagcatgttctaatatcgcataagacataacttctaaaaattgtatttatttat

SEQ ID NO: 203785 - DNA, 383 bp, Glycine max
caactgagcttggataattctaagcgtctgctaaaaacaaaaaagaaaagaagttcctattaatcataatatttggagggccactggattatgtggattggaaagcaatgctttatttggcggtgcaagtgggtaggcacctattttcatagctttacgaaattagggatgtttacagtgatacaaatcaatttatttcatacaaaaatagtataacatagaaatcaaacttatggttacattagcataaaaaataatatgcattaccctattaagtatttaaggataaaaatactactcctgctgccttacacaaaacccatgccaattttcatttgttaagttatcaattaatttgtgaacttatatacaccgatttgtct

SEQ ID NO: 203786 - DNA, 469 bp, Glycine max
  unsure (1)..(469): unsure at all n locations
ntcaacanatgtcttcacaaatagtatgaatttanattcttancangattacccatcatatctccccaaaaccccatacccacgaaatttaagagagaaagaagtccacccacacctgaatttttgaagtcccactcgtagccacgcacttcacgaccccgaaaatgctctcctttcacgatttggggcaaaaatgagcaccaaaggttgaagctctgtgtagagcttcaatggagaatgaagaagaagagaatggcaacgtgagggagagagagggctgtctgaaatttctgttttgctgagtgaggagagagaatagctttttggtcttaaataaaagggtctcctctttatctattatattattcaagctctgccacatgtacctatttgattggagcataaagggccaactctctctttttgactgtgacccatactcagtcacaaaagtgagaaaaatctgacc

SEQ ID NO: 203787 - DNA, 449 bp, Glycine max
agcttgccacccagctcgcctatgcgagctgggttgcttcctccagaagcaacagccttctggaggaatcttctggagggcccaagtgggcctggttgctatttgcacccccatttttactaagtacaccccctgcctttttttggtgattcttttttcgtaaagttacggaaacttacgaatttcgtaacgatactggttttctttccgtaatgttacggaaccttgtggattacataatcatcccctttttgacttacgaaatattacggaacctcactaattgtgcaacgatgcttccatttgatttccggtgtgtcacggaaccttacggattgtgcatcaatattttcttttgttttccggcatgtcccggaatttcacaaattgcctaatgatgggtgccaagcacctcacaaggaccaaacaaaagttgcatgtcatcaagc

SEQ ID NO: 203788 - DNA, 444 bp, Glycine max
  unsure (1)..(444): unsure at all n locations
tgagacgggcatctgattcgggctcttctttttatatctttttatctctatacaataatacacaataaacgagtaaattaagaaaatgacatctgcaatttaatataattaatgcttatattattttgaggggtcccctgaaagtaaattgttcatgaaaagaatttagctcaattgattaaatatgatacatgcagtattataaattttataatatttattttcaattcttataaataaaataaaataaaatctttcgactttggcatgtatatatgtcactccgaatcatttaagaaaccgactccgactcccanaacttcattttccttctaggctagtccatatttaaatatgcacataatttttgtttgagaagtgtgttgctagttgctactgcctcgtagttactatatagaaattaaagcaagatatatacataat

SEQ ID NO: 203789 - DNA, 314 bp, Glycine max
ctacgatagcacgctgagcgcgtatgcaagctgaatgcgagtaagtgagtggacgctaagcgaaccatgtgtgctaagagacctttcgcttgactgcagtacttttgctgctacttcatgatgagcggacactcttccgtaagcgacacggctcgctaacaagcttgcgcgcttagcgcagacattaggcttaactttttctctatcctgcctgtatactgcaaaaataaaacaaaatcatcaaccagttaattagtaggtaaacactactgccaaaactctaaatgtgaattcatgatcaataaataacataa

SEQ ID NO: 203790 - DNA, 438 bp, Glycine max
  unsure (1)..(438): unsure at all n locations
naagcttgatgttngtgtttaatgcattaattgtaaacagaccaaaagcaagaaattaggtgcatatagagctacaaacatcttggaattgatacatacagaccatttgtgggtcatttcatacaccttcaaggaatgatcaacaatattttatatcatttatagatgattactccatataagcatacttgtttcttatacatgaaaagtcaaaatctttggatgtgttcaaaacatttaaagttgaagttgaaaattaactcaataaaagaatcaagagtgtcagatctgaccatggtggtgaatactatggcagatatgacgatttangtgaacaacgtgcgagaaggcattggaaaagcaagatncaagttgcaaataacaagtttgtaactacgaaagacatttaaaggtgatgaattataggaaagatggaca

SEQ ID NO: 203791 - DNA, 451 bp, Glycine max
  unsure (1)..(451): unsure at all n locations
ttgaagtcccaatttattctaattttatgttcttggttttgtgaattcactagaattgtgctaatgttgagggacttagtgatttgcaggagatatataggaaattcgggatattagtttttgcatctggtatgcataataatatggacaatttagtcatttcttggaatacaataagacttgttttttctgattattgtcaactgtgttgaattgttatattgcttcagcccacaataacatacacatcactgcactgtcctgacacttgccaagtatgaatgtcttggatgttgccaaagccaggttgtcattttacagaaattattataattatatggactttctattatcagtactaagattcaatattntaatgaataatattggacgataaaatctcaatggatgaatgaatacatantttaatttcactagaaatgccaaaaag

SEQ ID NO: 203792 - DNA, 448 bp, Glycine max
  unsure (1)..(448): unsure at all n locations
tgcaagcttcttttgtagcatatggctggccattctttggattattgnacctatattattccagagagaattccttaacagtatgtggatagaatgggaatacaacaacaacaacaacgacaacgccttatcccactaggtggagtcggctacatggatcaacttccgccataatgttctatcaagtaccatacttctatccaaaccattaatttcgagatcctcttggataacctctcttatagaatgggaatagactcacgaatatcttccaactgatatactgtatattaatgacattcatagcaatggttaagcaataagcatgatgcaatcngaaaattcatacaagaaccaactagtgttacaatctagtaactttgttgtgatgtcaatgtgacttacggngaatgtgcatctccaacctgtaacaaacacccactttgac

SEQ ID NO: 203793 - DNA, 433 bp, Glycine max
  unsure (1)..(433): unsure at all n locations
agctngatgttagaaattgtgactgtagtgtatantttgtttaatngacaaaccanncaaatgatcctgcaggttccctttacgcatatattcatatactaggaatctatgctttccatcagcacagtagcctatcaaagaaacaagatttgggtggtcaagtctgctcaagatgtcaacttcgactcgaaactcgcgttccccctcagctgctataattgctggcaactccattttcttgattgctacaaccttcagaaggagacttgttgtattagtatgtatctatatcaagttcacttatttaaacctttttataagaagcatgctttctgcatggaagctatgaatgatgttacaaaatcttatgaattataatgaattcctgtgggctataaactcttgtccagagcttattatcctctctgaccgc

SEQ ID NO: 203794 - DNA, 469 bp, Glycine max
  unsure (1)..(469): unsure at all n locations
tgcaattgaaaactttgacatggacatctattctagttatctattcacaaaacaaagcaaagggaattttttaatttcccattntattttatttattattcttcaaagcaagatttcctcaatcgaattttatgaaataaatttatttcataattaaatatatttggatgtggaaggaattcaattattttattaaaaagaaaagaaagaaaaattctatccactgaagttgtagttgtacagtgacccctggtataaaaaattagctgttcgcaatctggttctccttcactctcataaaaaaactccgtttctcactttctctctctgtaagttcgttctaacgcaagcgcaacgcaactcanacgcacttccttccttcgccgcgtttcctattctcctcagatcactcccgctgtcccgcaccgttatctcgccgtcgccgtttcaaggtgatcgatccttcact

SEQ ID NO: 203795 - DNA, 337 bp, Glycine max
cctctacgcacttctctctctatcgaatatgcttgcaacaattgtttccgtgaagaaaatctaagccgaggcgctgccgaaacgtttctcggaggaatttcgcgaatgttacgaccgtacttcgacgttctacattcgttcttcatcgctcttcgatcttcaacgggtatgtacctcgaaccaagctcttctattcattctatgtacccgtggaggtccacattgggtttcgtgtatcttaattctcggtacattacttcttatacctcctcttgacgtgcttaagccatgttatctaagtcatctctcgcttaactctagaataaataaatttcca

SEQ ID NO: 203796 - DNA, 451 bp, Glycine max
  unsure (1)..(451): unsure at all n locations
agcttgcttctacaatctctatgaatcttattgccgataacataagaagcatcacccatatccttcacgtcaaaattcttggagagaaattgtttcaccttatgtagcaaaacttgatcattggctgtaagtaaaatatcatctacatataaaataagaaaatatattttactcccacttaccttgtggtatatgcattgatccatggggttttcatcaaaaccaaatgaggaatttagcccatgaaacttaaggtaccactgatgggagacttgctttaaatcatatatagatntattaagcttgcaaaccaaatgctcaccactactagaggagaagcctttagattgtttcatataaacctgctcctctaaatcaccattaagaaaggttgttttcacatccatttgttgtaactcaggtcaaaatcagcgactaatgtcaatataat

SEQ ID NO: 203797 - DNA, 465 bp, Glycine max
tcgaaggggaaagagagaccaatcgcgagcacatagcattgtcttgaaagaggagttagctgcttgctcaaggtccaaaagaaacttgtctcagcgtttatgcgagacagagaccaacatgttagccatcgtcagcaagtaccaagaagagctaaatctagccacggcccacgagcacaaagtggtggacaagtatgcccaagtgtacgcggaaaaggaggctagaggaagggtgatcgactcgttacatcaagaggcaaaaatgtggatggaccgatttgctcttaccttaaacgagagtcaagaacttccccgattgttagccaaggccaaagcgatggcggacacctacttcgcccccgaggagatccacggacttctcagctattgttagcatatgatagaattaatggcccatataattagaaaccgctaggaagttggactatcactcagatcttgact

SEQ ID NO: 203798 - DNA, 420 bp, Glycine max
agcttctaaactttatacattatatgaagctctgataccacttgttagacaagtggcctcagatatcttaagaaggggggggggggcgttaattaacatattccaaactgtttcccctaattaaaaatctatttcactttttactcaaattatgaattcccttaatgacaatcttcttaaatattaatctcaaatcaaacactttgaatatgaatataaagcaataatatataaatgagattaagggaatagaacatgctaactcatttttatactggttcggccacacccttgtgcctacgtccagtccccaatcaacccgcttgagagttccactattttgtaaattccttttacaagttctaaacacacaacgacaatccttcctttgtgtttatagatcctttacaccaagatact

SEQ ID NO: 203799 - DNA, 459 bp, Glycine max
tcttagtttcagatgatgcagatgggtttgtagttaccttatgcactcctctaatgactatggcatcatttctggcactaaactgctgggagttggaggccatcttctcaattaaatttctggcttcagcaggagtcatgtctccaagggctccaccactggcagcatctatcatacttctctccatattactgagtccttcataaaaatattggagaagaagctgctttgaaatctgatggtgggggcaactggcacatagtttcttaaatctctcccagtactcatacaggctctctccactgagttgcctaatacctgagatatccttcctgatggctgtggtcctggaagcagggaaaaatttttctaagaatactctcttaaggtcatcccagctcgtgatggaccttggagcaaggtaatacagccagtcctttgccactctctctaatgaat

SEQ ID NO: 203800 - DNA, 443 bp, Glycine max
  unsure (1)..(443): unsure at all n locations
agcttgttaacccatggaagctcctaatatctcctacactttntggggtgggccattcttggatggcgttgattttctcagggtccacttggaccccatttctacaaactacaaaccctaagaaaactatattatctacacaaagggtacaattctctatattttcatagagggtgtttttcctaaggactgaaagaacttgcctgagatgtcctaagtgatcatctaggctcctactgtacactaaaatatcatcaaaataaacaactacaaatatacttatgaaatcccttaagacatgatgcataagcctcataaaggtgcttggtgcattagtgagcccaaaaggcattactagccattcatacaaaccaaacttggtcttgaaagcnggttttcactcatcaccctctttcatcctgatttggtgataaccactttta

SEQ ID NO: 203801 - DNA, 470 bp, Glycine max
  unsure (1)..(470): unsure at all n locations
tgtagaatggctagacatgatacatgtcagggtttggtttgtttcaaggataaaagggatgccccacattatttccatgacacaaatgcaaagatgatgatttggaaattttatgcaaaactggtcatgcatgcacctatgtggacgctcaagtgtcaaatttttatggtcatgtgatgctagggctcangattcatttcctctattttaaatcaacccaatgtttccaaaatatgctcttttatcaatttatgcatttatcctagttcatttcgtgcgtccggngaaattttcacagcattcacccttcaggtgtagacacgttttttcttcaaaaatccggtatgatctatgaattntttttttcaaagaaaagttggaaatcatctcttttcaaaagcatgtcggntnttagctagacaacttatttnttcttttttctccttctctgttgtttttatcattatcat

SEQ ID NO: 203802 - DNA, 369 bp, Glycine max
agcttaaatgagcactcataccgggtgtatttacccccaaggcctagactttgaagagtccgtcagggcccctccctcctgattcaggtccaacccagaaaatattttagcacgcagactctatctatgaattgtacaaaacacacgactcctcaattgttctcaaaataattttatctcttcacgcctcaaagtgattaaacttgttgggtccccacagtggttcctatcataatactcaccgtgcattaacccatcacccttaaagggtcttacaatcatgtgattgtatagttgatagctaaaatgatttcacataatcatatcaaaatccaagaaaataaaatcataggtcaaaaataccaaaac

SEQ ID NO: 203803 - DNA, 450 bp, Glycine max
  unsure (1)..(450): unsure at all n locations
tctagccaaatggacttaccttgaattaattccttngtttgccctttgagccttggttccctttccttgttttgaagctcactacaagccttaagtgaaaaaccatgatattaccatatccttaaggaattttggagctttggaattgttttgggaataagtgtggggggggtttttgtttcattggacaacttgttttgttggctatgcttcatgatgtattttgggccatacttgatgtacattgtatattggttaaatgttggacatgctgaatgaaatgttgtttctcanaggctaaagagtaaaaaanaaataanaaaaaaattcaaaaaaaaaaaaattcgaaaaaagaaaaagaaagcaataaagntgagtgaataagatcttatatggcacaagaatgatgaaactcttggntctactcttcatgttaaattttatctttac

SEQ ID NO: 203804 - DNA, 441 bp, Glycine max
  unsure (1)..(441): unsure at all n locations
agcttatgctcatatttccttacaaacgttctcttgcacaagacattctattaaccgaaaaaaaatgcacccatatacaatcaaggcagcttcgttacctagattatttacacgtacttccaaggtgtatttgttacttacatcacacacctccttggctaaattcacatacatgcatactcaaagcattttggggtaccaaaaattgcacatgtgcacatcttggtatttctaatacctatacatacacaaacttcatgatgaatcttgactatctacacaataaggtgctacattttatgctcttttcaagtttttgctacctaaagccgcatgcaaattcaagtatattattctttgctgactaaaatngtattcaaaataagaggtatacattnnttggtaatgtatctttttacataacatgcaacatatttatgt

SEQ ID NO: 203805 - DNA, 440 bp, Glycine max
  unsure (1)..(440): unsure at all n locations
tccactgttcaatttcgagcgtctttattatgatccttctatatcggacctccgtatgacaagttataacaatttgaatttctcgagatcttccgtggttcaatttcgggcgtctccatatgtgatgtgcctcaatcggacctccctgtgaaaagttatgacgatttgaatttctcgagagcttccgttgtttaatttcgagttcctcaatatctgatgtgcctgaatcgaacatccgagtgtaaagttatgacaatttcaatttctcgagagctttcgnttttcaacttcgagcgtctcgatatgtgatgttcctgaatcgaacctccgtgtgaaaagttatgaccatttgaatttctcgagagatttcctgtgtcaatttcgagcggcttgatatatgatgcgcctgaatcggacatccgagtgaaaatgtatgatca

SEQ ID NO: 203806 - DNA, 388 bp, Glycine max
agcttcttagtttcagctgatgaagatgattttatggctacttcatgcactcctctaatgacaatagcatcatttctggcactaaattgctaggagttagaagccatcttctcaattaaattcttggcttcagcaagggtcatgtctccaagggctccaccactggcagcatctatcatgcttctctccatgttactgagtccttcataaaaatattggagaagaagctactccgaaatccggtggtgagggcaactggcacatagttttttgaatctctcccagtattcatataagctctccccactgagttgcctaatgcctaaaatatcctttctgatggctgttggcctggaagcagtgaaaattttttctaagaatactctct

SEQ ID NO: 203807 - DNA, 486 bp, Glycine max
  unsure (1)..(486): unsure at all n locations
actcagctaaagagagganatatgncagnttagagactacatattattgattgatagaggcattttaatactagaagaattgaagacatgaagtttgatttgaagtgttcactatttcattatttgcataaaaaactctctttgtaaattcttgtaaagtttagaaagtctgtctaaaaactttgttcatatcaagagaaaacactacgtgttgaattttcttattcgtttgtaagacgatagagtgtcagtcattgtgtaatcaaaccaacaaatcttcttatttttgttagactcagtaatggcttggcaagaaaaagaatattggttttaacaagcttgagttaaggagccagaagtggcagtgataaatacttgtaacttgtataagctagtgatacttggtggtttgcaaagaatttgacatagtctcggtgatatntgcatttagaacaataattattggccagactttacttatctcct

SEQ ID NO: 203808 - DNA, 438 bp, Glycine max
  unsure (1)..(438): unsure at all n locations
agcttatcctaacgtggaatacaccaccgtttatgaatatttgaatcagtttggctgatttctgaggaactggtgcaatgcaatttttgttgatctggaaagtgcccaataaaacccttgccttttttactttatgcaaaattgcttgcttttgtcctacccttcggaaaccatccacattaatgtaatcttcttttcacctagaagaatgagtaataatactctaatctgcagtcggaagcactgtttacaaattnttacattattcttgaatacatgtcactgttcattttctgcttgatggcgagggattcactttgaaaaatatttcaagcacactgcactcacacgtgggtgccggagtttcgtcaaagagggatactctacaatgtattctactctacacattgtcgaatatataaaatgacttaacggaat

SEQ ID NO: 203809 - DNA, 480 bp, Glycine max
  unsure (1)..(480): unsure at all n locations
ntatagttttctatacctcttgtttgcaataaacaattattgtgttgaatangatcggtattgattccaattcttccaaaatccacattatactgatccacctggatccttggaatatattcttctggacaatggatggttccattccattagcatgtcattgtaatttcaacacacttctactttttatttctcttttaataaatttatttcaaacatttaaacgtaataagatttattaaaaataaaatatttcttatactttatatttttaatataataaatactgtttaaaataagatttcatcgctttaaatcgctgaaaatcaactttaagtcttcgtttggtatcataaagaaagagaagaanaaatagtaatggaaataaaaaaatgcaaaaaaaaaaaatctttttcctttgtttgatagaacatagacaaggaagaaaaanaacatataaactttacctaaaatattcta

SEQ ID NO: 203810 - DNA, 439 bp, Glycine max
  unsure (1)..(439): unsure at all n locations
catgcaagctngcttanattcacttgcacaatctattatacaaatgtatgatctttgtaccaattggggaggttgataagctattaatgaaaagctatgcaaagaagccatgttaacaatacaactttattaaaattgatataaatttaacttccaaataggaaatgtaactagcaaaacttacccacaagccacaataggtgttgtgtcttcacaattctaatcaagacaatgctaataactttctttgtcgtaaaatctatctaacatgatatatctagagtccgaggagatttcatcctcatagataccaagagattctgaaggactatatcgatctgaaaatgcattattcgggatagaatctgatatgtgactcccgtgagtgtccttttgctaccaatccctaattctagatgaggtatcattcttctctcta

SEQ ID NO: 203811 - DNA, 485 bp, Glycine max
  unsure (1)..(485): unsure at all n locations
ctcacgcttattatctaatctcctnctttcttttctttaaaagacttttatgttggtccatcatcttggnaattcttctccctagtaaattctaatgctatctatgtatctagttntagtataactatataataccttcattaattctaattgtaattaaaaacatgtactgttgaatcttttgaattacagggaatcaaagtgaatatgatcatgacagactactgcatgccatgaatgagtggctatgatttactcaaacgaatcaaggtcaaaattaagttccattccacttcctcgtgaatcaacagnttataatatattcataatgcttctcattagcgtgcatgaatgcctatccagcatcagtttttcattaaatggtattgagttttgtcatgagatgtagcttaattaattgctttagtcaattttatttaaattatgtgtagctattactaccgtataagatttatgtgttatca

SEQ ID NO: 203812 - DNA, 461 bp, Glycine max
agcttgtcgctggagctgacccatcaactgtcctaactcttttagactggtgatccctaggctcttgaccttgacttgatagaacctctttttaagcgaaggcatttgacttgatcccatgttttactaaagtgaacaaaaatcggtgcgaatcaaaactccaacatctatcatgggtggaatggatgaatgcatgaagaaatgcatatgacacagatgcaatttatgaatatgggagcccaggaaattgtctccttcttagatacaacgtcttggggtagcaaagtgcccaacgtatgtatttaagaaggtgacacgaaccctccgttggtttgtttaaagagaggggatcaagacagaatccgtgcgtgacgcatatgtgaaaggcacaacatattatgacaatattcacaaaatataaaaagggtacatgaaacttatgcatggcagtggaaaaatgg

SEQ ID NO: 203813 - DNA, 460 bp, Glycine max
  unsure (1)..(460): unsure at all n locations
cattacggacctatgaaactaagctgtttaaatgaaagccctcatgtgatgatacctttattttttacatagatgatacaagtttttgaaaaaaaaagttgaaaatttcaaaaaggtcaccatactaaatgtatgaaattgaaaactgagctttcctaccttaaagaattgtttggaaaactaaacaaagggaagagtgatcttaatcatatgttcagtatgcaaaagcatgctacagataagactagcttgggatataacaaacaaacctccttttcaaagaaaactcagtttgtatcttcaaaagggtgaacctaactaaggtctcgaaaagaaagaacatggtgtattctacgagaaatgcaaaaacatgtcattattgcatgacaaagggtcacacttcatactattgttatgttagaaaaattgacattctgcatgganaatgcatgtggattct

SEQ ID NO: 203814 - DNA, 331 bp, Glycine max
  unsure (1)..(331): unsure at all n locations
agcnngcgaagagagacagagagtgttttcatccattcttancacannacccaaacgccgcacatagaggtactatatgttcacatacaaggtttcgccattggcaataaaacattctttccatacactacaaagtcaataacaatgcaataactagaaacatatgcttagggcctacaccaaattttcaacaaacattggatactcctgtcctgtgcctcagagatcctagaatgtagataagcccaaatagcaccccaaacaactgttttcatagccaaatcagaaactgtgatatgctccttgaagccatcttgtttagacaagtaat

SEQ ID NO: 203815 - DNA, 429 bp, Glycine max
ctcagcttgagaagagcacgagtagtgacaaggtttttatttattacacatttcccagcccacacatacagtgctactgctattgaatggctgaacttcagattgcatattgtatccactctcacatttgcctcctgttcggcattcttgatatcttttcctaattcactgactgagcctggtgagaactttaaactacatacattcactagtcatactggactccttatgaaactatacacaaaacttgattcctttttacttcaaatgtgcttttttttaatgtatcgcgcgattggctgtgacatatggacttaatctaaacaccctacaatctaatataatatggtccctttgccatgtggagaacaaaataatatctgttgtaagaatattcaatacacatctctcccagtgcaactcctcttg

SEQ ID NO: 203816 - DNA, 431 bp, Glycine max
  unsure (1)..(431): unsure at all n locations
agctgcttcaagactgcacttncattgtttcttggaagtttatggnctccttcggcagcagccaagattgttatctgatatataataagaacgagaattaaaagaaagatttatgaaatgtcctcatggaactccagttttttacccttctgagcaacaaggggcaaacgaacaagttggaaataaagaaaacttaaattacatacaaaattataaaatctacaagaaacaaattgtctgtgccttccatttccctttccactgaacagattcacagggcttaaattcaaactttttaaagctaaacaaaagatcactccagttacacatattgaatttaggattattgatgatatatgctcgctagagtaacggatgcaggtaaatacatattgacccacgttttagagagaagaagcatcagagttttg

SEQ ID NO: 203817 - DNA, 476 bp, Glycine max
actatgaaactaaccttccagcctggatccatggaaccatgcggattggtacttaaagcatttatgcagcattggaagaaaattaaaagccagcttgaacaaataaactactggaaatcatcatgtttccttgcaaagaaaaaaaaatattttaaaatgaaatcaatgatgtaaatcagtaatcataccatctcaaatagctcttcctttttctcctcaaataaaacctagatagtccacaggtaaagcatgagctactatgaacccacaaatgagtcccctatcatctatagtttaaatatgtaaataacatccatcacagacagacaatctacttcactagcaaacaagattgtcatacaaattacaaaatggaaatgcaagcagtcgtcaccttttcgtaatcttcaatcacaacgcctttcgtaatctcccacagcttcactgaaccagatgcatgctttatcgatagttat

SEQ ID NO: 203818 - DNA, 437 bp, Glycine max
  unsure (1)..(437): unsure at all n locations
agcttgatacatatagtgttattctgagtgttctttaaagactcagnaaaacaatcagccaagtgctacgagatctatctttatgtgtctagtatgttcatggaagactaaattagatgcaatgtgaagagagcaacttgattttcacacataagcttagtgtcttgagtgtctccaaactttaattgttggagaagttgcctaagccatgtaatttcgcatgccacttctgtcatggtatagtattcaacttcagcgctggatctcgcaactatattttgcttcttgcttctccatgagatcaaattccctccaagcagaacacaatagcctgaggtagaactcctgtccaatcagcactagagtaaccaacaactttgacattgtcttcgtctttatatagaaatacgtggcctggggccgtcttgatatatctg

SEQ ID NO: 203819 - DNA, 451 bp, Glycine max
  unsure (1)..(451): unsure at all n locations
tctatataagctgaaccattgtatcaataaagtttgtttatgtttatccagaanaccagagcctatctcttttatcttagtgagagtgattctcctaaattcttgagtgattcaagaacaccttggctgtatcaaaggactttcacaacctttgtgtgttgccctcgctggaaagagagattctttccttcctttcatcatcacccttgttctttcaaaccacaactccagataatccacctctgcccagaattatctcgtggccataactcccattttacacactcaaattaagtgattcttgagcctaaattgaatttcaaaacgagacctttcacctccttttggaatcacctcatttggagccctgtagctccattattgccattcctatatttctgttcagccaccacttaacctacattttaccatcccattcatccatattatg

SEQ ID NO: 203820 - DNA, 448 bp, Glycine max
  unsure (1)..(448): unsure at all n locations
agcttaaggtccttcaactgtacaaggctcttaatatttgaagagtatccttgtggaaccttcacccgacgaagacactgacaaaaacatatcttctccttcttggacaaagtatggcaggctgggggcaagtaaattntcttcccatcagaccttggatgcaactgtgatcgtatacccatatcagctagatcttaacgggtattcaagccatccttcgtcttgccttgaatgttaaggagcatcccaatcacactatcacaaacatttttctccacatgcataacatcaatacaatgtctaacgtcaagatcacaccagtacgaaagatcaaagaagatgaacctcttcttccatgtgcaactctgacttttatccttcttttgggtcttcccaaatacagtattcaggtgttcaacccgctgatatacctgctcaccagtcaacg

SEQ ID NO: 203821 - DNA, 472 bp, Glycine max
  unsure (1)..(472): unsure at all n locations
tgtcttgatgctgaaaaagtaagtggtcgttgcattgtttctgaaagctnttaaaacttgtattctgcattgcaccatatttttgtttattgttggttatggtgggaagtcatactggagaatttcacttaatgcaacctaatacacttggtatgtagactcagtttttccacaaaggaacagaattgggttgcaacctactatgcgtgattgcattagatatggaagggaaaccaagttgaatagaattaggtcttgcgatcaaatagcataaaaaatatcacatttaaactatgtgtaataattgatcacaacgtctatgaagaatttcattatcgcaaataaattcaagtattatactaatccaaaatattgtggaatactgaaccatgaacaataaggtgaaaataggcaacacccgacaaatcatgcgtgcatcatattatgtcatgtcaatgaacatatatgtcta

SEQ ID NO: 203822 - DNA, 389 bp, Glycine max
  unsure (1)..(389): unsure at all n locations
agctaccgtttgtagattgtgagnattatcctanatcaaccctacaaaatcagcttgtaaggtgagaattgctccccacttatatagtttatctcgacactatctttagttgatttggaacttcatcatgtccccttttgcccacagctacccattatgtggggctttcagcacacccctctatctagaggtgaccatgatttaggtggcttttctaacactagtaactacttcccttgattctttaatcaagactatcatcatcaaaaagcatggttctcacagttggctttaaacatagttcatggtgtgaagacagtttgattatanaattagtgtacgagttgtatccagaaattggttccctgcaagactacattantctacat

SEQ ID NO: 203823 - DNA, 477 bp, Glycine max
  unsure (1)..(477): unsure at all n locations
ggaccataaactaagcttagccgcatagattccacaagtttatggntntttattaacacactaatacagattcatagcagtagcacatagaataatcatagatacaaagatccaatttgggtgttaccttcagagagcattgaaatcaagaagtaaaaaataaaaaacaagttcagaatgataaaaaaaaaagacccatttgataaaacggggagaggtggtgggcgacggccgacgagatcgttggagaagtggcggtggtcgaatttgcaacccgtgttgattttgccactcacttttgttttatttatgttagttgaatactaaaacatttgtgttcttgcatctagatttaccacccgctgtgaatttgtgctttcaaacgttgaatttgttcttctgtcaaatatatgtgcaatttgcacctgagtataacaatttcttaaggtgtttaacatcacattatttattaacgcc

SEQ ID NO: 203824 - DNA, 438 bp, Glycine max
  unsure (1)..(438): unsure at all n locations
agcttgccttanagaggtctaggaaggatattgcggccgaaggaactagttccgccccggagtacgacagtcaccgctttaggagcattgtgcaccagcagcgattcgaagccatcaagggatggtcgtttctccgggagcgacgcgtccagctcagggacgacgagtatactgatttccaggaggaaatagggcgccggcggtgggcaccactggttgctcccatggccaagtttgatccagaaatagtccttgagttttatgccaatgcttggccaacagaggagggcgtgcgtgacatgagatcctgggttaggggtcagtggatcccgttcgatgccgacgctatcagccagctcctgggatatccgatggtattggaagagggccaggaatgcgagtatggccagaggaggaaccggtctgatgggttcgatg

SEQ ID NO: 203825 - DNA, 462 bp, Glycine max
  unsure (1)..(462): unsure at all n locations
ttctttctcaatcaatctgtctactgactaacaattctaattgcaagttcaaattcttgttctttctttgtctaacatacacacttgctcaaactcatgaaaagaaatacaaactccatcacaatcatgcgttcaattcaaaataaagacatacacccatttttcacaaaaagacaaaagtgtttcactgccatgtcatcaaaaacaagttaaactattcaaaatgcttcaagaagagcaaaccaactattcataaataaaactagcagtgtatgtaaatataaaggaaatactgtacaaaaaccataattataataataaaccaaaaagcaaaaagtaacatgaagaatcgacaatgtcaaaagtgcttaaattggggaatcagtgagagcaacaacttctctagatgacgaatcanaaagatcaacaattcctccaattgntgaaacaggggggtcagct

SEQ ID NO: 203826 - DNA, 439 bp, Glycine max
agcttgtggactataccttcggccaaacactgtcgtgtttctgtctcgacccggatttaaggcgggctgcagcaccggctccgcttccctaactgtactggaagcggttgtcgtggctttatcctctatagttttctggagttttaacatgacctccgagatggaagccatttgatcttttaaggccgatagattgaccttcatctgttcctgcacgccctcttcattatccatttttctggatcgagtgttatagggatgccttggtgttttcttagttatgatgaaattcctaaagaaataaacaaaggtgagtatgccaccaaaacatgaatatgcaaatgaatgatcggagcacttggatccaccccaagggttttttagataacgtgatgagttcagaatttctcattttataaaaagaaaaatgctttcatct

SEQ ID NO: 203827 - DNA, 492 bp, Glycine max
  unsure (1)..(492): unsure at all n locations
ctattacgtgacactctataagtactcagcttgccacccagctcgcccagcgagctaggttacttcctccataagctaccgccttctggagaaattntctggaaggcccaagtaggcctggttgctatttgcacccccatttntactaaatacaacccccttgctcttatttggtgattcttttttcgtaacgttacaaaactttacgaatttcgtaacgatgcttgttttctttccataatgttacgaaaccttacggattgcgtaatcatccccttttttgccttccagaacgttacggaacttcacggattgcgctctaacacttctttntaatttccggcatgtcacggaatttcacggattgtgctacaatgctttcctttgacttccgacatatcatggaacttcacgaattgcctaacgatgggtgccaagtacctcgaagtggtcaaacgagggtcgcatcctaacaacggatggtccccaaac

SEQ ID NO: 203828 - DNA, 303 bp, Glycine max
aaataactaaactgtcaagacctttattgaaatctcaaggactatatacagtgtttactgacaactcttggctatcttcatacataaaaactatacacatatacttatagatgatgtttgagagggacaattagatccacttacctttatttgcttaggaagtcttcaaaaattcttacttaagagatctatctacattgttcgagacaattctttctgtctaacacccgaagagattagagttctatcaaatcaacaatggtctctcaggagacgccaggtgagaacatctcttatatataa

SEQ ID NO: 203829 - DNA, 419 bp, Glycine max
  unsure (1)..(419): unsure at all n locations
tagctacacacaccctataatagctaagatgatgcgcttttcattatatgacnacacaaaacaaagcccttactacaaagactactcaaaatgccccgaaatacaaggctaataccctatactactataatggccaaaatacaaggcccatactaaggaaatacctattctaatatttacaaagataagtgggctcatacttagcccatgggctcgaaatctaccctaaggctcatgagaaccctatggccttcccttggatctctagcccaatctacttggagttttctacccaatgcccttgctgcgtaggattgcatcattcactccaccttggaaaggatttgacctcaaattccgaggttcttcatactctgagcttcttccctaacacctgtataagaaataaacatatgttt

SEQ ID NO: 203830 - DNA, 449 bp, Glycine max
  unsure (1)..(449): unsure at all n locations
agcttaacaagctntatttatagnttgagtttggccttnttatctaaagaggctntttaaaaagttgagcttgacctttgtagtaaacaagccgagccgagttgagccttacataggccgagccaaaggcccttgacaagctgctcggctcatttcaacccctagatacaataggtcggttgaagctcgttcttccctttcttgaagccttagagtaaatgtcatcttatgtcaaattcatgaaggaattgctcaccaaaaagaagtactttgataaaggtaccatcatactcaaagtgcattgaagggtatacttaaataactttacctccaaagaccaaagatctaggaagtactaccatcatgtgtaccattggtaatctaactattggaataccattttccatggcagcaaaaattggggatttggagatcaaacctacaagaat

SEQ ID NO: 203831 - DNA, 485 bp, Glycine max
  unsure (1)..(485): unsure at all n locations
tgtggactataccttcgaccaaacacggccgtgtttctgtctatgcccagatttaatgtgggctgcagcactggctccgcttccctaactgtactggaggcggntgtcgtggctttatcctctatggttttctggagttttaacatgacctccgagatggaagccatttgatcttttaaggccaatagaccgaccttcatctgttcctgcacgccctcttcattatccattnttctggatcgagtgttataggggtgccttggtgttttcttagttatgatgaaattcctaaagaaataaacaacggtgagtatgccaccaaaaacatgagtatccaaatggatgatcggagcacttggatccaccccaaggtttttagataacgtgatgagtccagaacttctcattttatataaagaacanagctttcatctagccaagatttatacaaaggtgttacaagagaacctaacgattcctaatta

SEQ ID NO: 203832 - DNA, 444 bp, Glycine max
  unsure (1)..(444): unsure at all n locations
caagcttgatggggtcgagaagacatagtatatatacatttttgtcatcgtcaaaaagggggagaatgtgaatgtatgtatacatgactttgatgatgtcaaagcaaaatcaaacaacgctgnttcaaatgataagcatttgcttcaagaataattcaagattacttcaacaaacaaagcctcgtttcaagattcactaaagaccaagccttgccttataacaaagtgctttcaagacatgcaaggctctggtaatcaattaccaggaagtgtaatcgattaccagaagacagggttgagaaatagctgttgaaaaaggttttgaatctgaatatttaacatgtaatcgattaccatatgtctataatcaattaccagccacgaaactcctacaattaaaattcaaaagatatgatccttcacatataagtggtaatcgataca

SEQ ID NO: 203833 - DNA, 467 bp, Glycine max
  unsure (1)..(467): unsure at all n locations
tcagctagttgaagctatcgactttgtgaatgatggcattttttcttcagaaactccacaatcattttcacttaaatccactgacatatgggccctttgcaagttttcatgaaggacagaaagctcagaaagaacgcatgatatatcttcaaataatttttcttcttgcttatgatccagcgtgcaagaatggctcacattatgaagtgcctctttggattcgagggcaggaaatactatatcatcttcagcattactatgagctctgtataaaccccacaaaagccggaatcttccactagattgccgaataattgtttcatcaccatcacaaagctttccagattcaatgtctaaatactccaagtctttgcgtatggctctatggaatntacatatggtatcaattggtctttctgtagaaccaactctacatgaactgttgtctgatcccatatgaaagacta

SEQ ID NO: 203834 - DNA, 380 bp, Glycine max
  unsure (1)..(380): unsure at all n locations
agcttatataaattcagatatactcctattttatgaaattaaaatcataaatataattntttttaacaaaaaagaaaaaacacaatggacacacatagatcctgtaaaacaccaccaacagcattagaaaatgccctattcgttcccccgaagcactagaatttcgaaaataaaataatattcagctaaaattttataatttattttttaaaaataaattatatggtttataatataaaaattgaggatgtcacacattaaaaattaaatctctacgatagtaagttttgaaatcattaaatactttccaatataaaataaatttagattctaaaattataataatttaatcaaaagtttaagatanggggtgtcatgat

SEQ ID NO: 203835 - DNA, 452 bp, Glycine max
  unsure (1)..(452): unsure at all n locations
tgtccctgtgcctcctcctgttatttgtggtggnctttccaatgataacatcctcaccagatactcgtgtgccctatttcataataataatgtctggtaaaaactcttggggacagacaacgaacaagcataaattcagatatgcttactggtggggcaagaccatcatcatccagcttatcataagaaccatgtctcattccctgaaaaatgaaacttggtaagagaccaccaacaagaaaccaatattcttttccaaataaaaattgcaatgcatgaatagttgcttgctaccaaagccaaaattctcaccatggtgttagctctatctggacggccaaaatcttctttcactacggttcccatcttcttctcttcatctctataanaagataagaatgcagcatatcattataatcacaaacatggcaacctaaaggagaatatctaat

SEQ ID NO: 203836 - DNA, 432 bp, Glycine max
  unsure (1)..(432): unsure at all n locations
agctntataagcgcgggttcttgagacatattgtaagcgttcgcgatatgcgaagatgatattccgagtactttggatttggtacgaccatgccctcctgatttccagctggggaattggcgagtggaggaacgccccggcatttgcgcaacaagcataatgtaaacctttacggttttaaaagctctatagttgggcctaggctttagagtttttccttttgttaaggctttgtgtcttttgtttttgaatttataatacaaggatcttgcttcatctgttcctggtctctacccattctcattcatttgcatggtttacttcttttctgaaacggcagatccgatgacgagtcccccgaaggtactaatacctgggacccgtctatcgacttcgagcaagagatgaatcaaacggaagatgaaggagatg

SEQ ID NO: 203837 - DNA, 469 bp, Glycine max
  unsure (1)..(469): unsure at all n locations
tgaggagtgttcttccacaccagtacgcgcccagtgcgtttgcagctcgctaagtgagacagttgtctcttatgtgctaagcacgagattggcgctaagccaaatctcccttactcgcgcttagtgtgagaatggcgctaagcgcaccttcgcggacaggaagcccttttttaagcttgacttgcggagaatgaaatgaaggtctagaagagagcgttgaatagccgttagagcttgaagagtgaaatacacataggcaaagaacagagcaaaggagcttaaagagtgaaatacaagggtgtgtcttccaagggaggaaaacgcgcggagtctccaccaacgtttatttagggaaaacatcggaaaaaccggaacgtgttggctacaaactctaagtgtganaggttcgagagttggttttacgcacagggaagggattagcactccacacatccgtcacaagggacga

SEQ ID NO: 203838 - DNA, 454 bp, Glycine max
agcttcaagcaccatgccatctcggccattatgatcaaccatacaaccataatgctcaagtgccggttcaatgccatactcactccacatgctactaaaaacccgtctcccctcctctacaagccctccatgactacaagccaccaacacacccataaatgcgatgcgatcaggcttcaaaccggactccaccatgtcataaaacgcctccagagcctccctaccacgtccatgcacggcaagcccgttaatcagcgcggtccacgtgacaacattcctgtgaggcatttcatcgaacaccttaaccgaacgatcaatgtccccgcatctcgaatacatgtcaataagtgcagaacccaatgaaacagtaaggttaaccccgatcctggaaataaaagcgtgaacccagatacccaattccaaggcacccaagctcgaaaccgcggatatcaca

SEQ ID NO: 203839 - DNA, 467 bp, Glycine max
  unsure (1)..(467): unsure at all n locations
tgtcactatttccctttcttttctgctatagaattgcattataataaaaagtcttttgtgtttcaaataatttaatgtagattaaattaaagtttgaaactctgtagtataccttattcatcaatggttaataagatttgaatgagaatcattaattcaaacctaatagtaccttagtcctttttttgcagccagctaggagaaaaaaaataagtgtattctatatgcatttactatcactatatatagatgctgcttcctaactgtgtagatacttaaatgttatgaagtagttaaaaatgaaaatcaattcaccataatggtaaactgattgtgaggaagtagcatatgttggattaaaattcactgaggaagctggaatgtgagtatggtaaaagagcttttatataanagtatgataatacatacacttaatgtcgtatactccatacctgngtgcttggaat

SEQ ID NO: 203840 - DNA, 438 bp, Glycine max
agcttgtagcactgcctttctagatttgccaaaatcattaatcgaattaagaacatatgttgttgggaactacatggctactattataacaatatggcacatacatgttttagcttgttttgttacagcaagcacagacaacctcctaggcatcctcgctatcccgaaaggccaggataccataatcatgcatccagtggagttgttgccaacaacatcactacaaatgcagtccatgaagcaacaaaaaacaatggaaacgaggaagattcttttggacaaagtttgaatatcgcaccagcacaatatcaacgtttaattgcttcatggtaattttgactagtgttataagcaattaacttcatatcttcctctggagtccaagtacctttcctcattccacttttgtcacaagacagtgttctcaccatctttgtg

SEQ ID NO: 203841 - DNA, 480 bp, Glycine max
  unsure (1)..(480): unsure at all n locations
tcgtattatgcatcaaatatcgatttatcaaattctagttgtgaacaattattatagagaaataaaaaagaaatcaagatacttatttcctttgttgtatttcttagtccgatgagccaaaataacttaattacaattaagagatatagtgttgcattttaaagagagtattctttttagtcacgtgtcaattttttaattggacggattgggatggtaacgtgctatttcaactcgcaaaggaaaaataaataaaaaaccatgaaaattattttttagactaaattattattttggtcttttaatttattttcaaagtttgttttaattctttaattattaaatgatttaatttaatcttctaattttaaaaaatattcaattaagtcattctgtccaaattgaagttaatggtatcaatgaattggagatagtgtcaattttacattttatgacaattaanagccaccaattaataac

SEQ ID NO: 203842 - DNA, 278 bp, Glycine max
  unsure (1)..(278): unsure at all n locations
agcttcattatctaattgtttgcganctgtattactgcgagacgcaatcatacatcagacatgaaccgttatgtcatatgaattagctcagagcttcagcattcaatctcttagcgtctgagaacttggaccagcactcattcggaccttctataaacaagtcattgactcacgaattagcttagaacattgatattgaattcttagcgtcaagatatgccaccgtactccttatacatacgatagagaaatattgtcgtttgaatgagccataagga

SEQ ID NO: 203843 - DNA, 372 bp, Glycine max
ggacctataaaactcagcttgagcatggaaacgagcatatctttattctcggatttctgactgaccaccgaggtatgcctggacgatccttatcgaggaccgaatctatgggctaattcaaactacaatagctgatgactcggatgtctgaatgatgctgatggtatgaatggactctcaagattgaatggtgatcctgtgagcggattcttacaaaacagactgttgtctatgatgtcagagtgtgtgccgagacatgactagactctctagaatgaatgctgaatgtctgcacctttatccacgactataacttatatctcagatattttgaagagttccactcataaacaaaactgtctaaatcgaatg

SEQ ID NO: 203844 - DNA, 385 bp, Glycine max
  unsure (1)..(385): unsure at all n locations
agcttataatgaanaatgatgacatgattttaacccaatcacactatattgaaaagctgttgaagaagtttaattattttgatgtgaaacctgtttctactccttatgactcatccatcaagctaaagaaaaatttgggtaaaggaatttcttcacataaatattctcaaattatcggttctttgttgcatttgacaaacttctctaggcctgatattgcatatgtagttggtagattaggaaggtatactaataatcttgatcattctcattggattgcattagaaagagtttttagatacttaaaaggaaccatcaattatgtcattcattatacatgttntcccacagtaattgaggagtttagtgatgcaaattggatttc

SEQ ID NO: 203845 - DNA, 464 bp, Glycine max
  unsure (1)..(464): unsure at all n locations
tataagaacaacattgccttaatcatttctcaatatgcatgtgaattangacgcatcaacaagaatcaagccaaggctattgtgcaagcaatcaatggggcaaaacacaccaaatgattataatgatggatggctcaaattctcacaaaggtaaaatcatcactttcaaattgagctttcaaaactatcatgacatgtagagaagaatcaaggatttcaagtcacaaaatgtcaagaacttttattttcaaaacaattaccatttcttgaacatatccagtaattcaaagaanaacatgcaaagtcgtacatgcacatgaaattgacccanaatattaaactgaaaatccgacgaaactaacaacattaacaaattaacacaactaacaaattaacaaaaccaacaaaactagcanaaccaaagaacactcncncnccatacttaaacaacacattgtcctaat

SEQ ID NO: 203846 - DNA, 226 bp, Glycine max
gtttaatactcgattatagcattacactacattctttttttcagataacttattaagaaaatacagaacatttaagctaattttttattggtgctacttcgaatgagatttatgacttcatgtagagaagaatatggtaggctaatgtataaacagaatgactttttattacaagattaaggtagtacttgatttgattttttaaacagcaatgctacttagtatg

SEQ ID NO: 203847 - DNA, 404 bp, Glycine max
  unsure (1)..(404): unsure at all n locations
tgcgaaggcaaacattnggaatgttagttattccaaggtatgctactcttaaaacaaagatggcatacaacctcctccaataaatacaaacatcaatgtaaatttagagcaagcttatgcgcatacttctttactaacgttcacttgcacaagacattcttataactaagaaaaatgcacccatgtacaatcaatgcaccttcgttacctagattatttatatgttcttccaaggtgtatttgttacctacatctcatgcacttccttggctaaatttacatacatgcgtactcaaagcatttggggtaccaaaaattgcacatgtgcacaattcggtatttctaatactaatgcatatacaaacattgtgatgaatcttggtatctacacaataggtgataca

SEQ ID NO: 203848 - DNA, 397 bp, Glycine max
  unsure (1)..(397): unsure at all n locations
cttcctaagcgcaccacctgtgtttgataagttcacttttcctcgtntatgngnttgtggctgttttctttccgaaatgtcctggaactttacgaattccacgacaatgggtattaaacattttgaaagggtcaaacagaggtcgcatgctgacaaacaatggtccccggacgaaattaggtatgacagttgcccctctttacttatcttttattggagataaaagggaagtaaagataaaacactaatttcgttcgactaaatccttacccgaccgaccaatagctttgttagggaaaaccatgacgtctctgatgctatcggactcgatcatttctggacagcagaagaggttcttggcgcgtcatcttactngattgtcctgggataacaaaaa

SEQ ID NO: 203849 - DNA, 462 bp, Glycine max
  unsure (1)..(462): unsure at all n locations
tgtacacacaagaaaatgaaacacttcacctggatggggatctaaactctttcatgtggaaagcaaaaaagagggtccactacctatgatgttaagtaacataaatgaacttctcccttgctatcattctgtatctctgttttttctcccttgctaacaaaaagttcacacattcctttcaagttgtgtgtgatcagccaatttgtgcactgattagtgtgtgtcatcactcatcagccaatttgtgcacaaattttaacaatttcatgcctaggctaggtataaggtactacactatttaaaaggcagtcctgagaaaacaattatngtttccaaataatactctggccttagaaccttgcacttaaactatatatggcttaatccatgtaattaacaccttaacaaattttcataaaacatacatttaagcagatatttcagattgagtatatggtaaaa

SEQ ID NO: 203850 - DNA, 386 bp, Glycine max
agcttaaacgctaaggcgtcatgtagcccttgttactccttctatctcttacaatcaatctcgatggcgctagccttaacctcaagtaaaagttagttctgaacaaacttacagaataagaactctgggctcattacatgggaactgcccgggttgtatgctagatgccgactacgcctttataacaagcatgcctgttggaccacataccgtccgggtgcctcatatataaaacaagcctggcggtgcataattgtctaactaaacggcacactaaagggtgcatgctgtgagctaacgacctcccccttgtgtggtttgatattgccaaaaccatctgaggtggatcgttgttttcccttcatagctcctgtgccaaaacttgc

SEQ ID NO: 203851 - DNA, 284 bp, Glycine max
  unsure (1)..(284): unsure at all n locations
attattgatgtttctatcacaatcaagtgattgttgacatctccatgtgtgtgtacaatgtgattatgttttcatttctaggattcatttggaatatttgctgttgattatgaataagtgacccatccttcttttatttaaaaatttttgtctcctagtcaatcgactattaatcttttgatgggctgattatcttccaatcatgccttgntaaactgcttgataacctatcatgtttttacttctgttatgaatagagagagactttgcccttgcccatcacg

SEQ ID NO: 203852 - DNA, 467 bp, Glycine max
tagacttctttagctgggactttgattcttgtagtctgtcttggaggtcaatgattaccttagcaaacttggccactgtcgcaacaggctcttctttctcttcagctgcatgttccaccttacttgcaaagttattcctctcttctagcaagtctttatagcattcaaacacttcgtcaccatccattcttgtgcgtaataacttagcaagaacatcaccgaccctggatgatagttagtggttggacttgacagcctcagcaagggcgacagtagcactagccaccttgggacgctccactcttcatacagttcgagcaatggccctctatttggaaacctcagcctccaaagatgcaactttgttaagagcttccttgttcctttatttgttctccaccaaaatggccagactcctcaagagaaaaaccttcacaaactcctctgctctgatctataattcatgc

SEQ ID NO: 203853 - DNA, 356 bp, Glycine max
  unsure (1)..(356): unsure at all n locations
agctnnttggagtagaaacctgggaccatctcattttatttcaaaaaggaggtcatatctagtcaaggtctgagagaccatacaagtttcctaacgatttctaattatgtgggccattaagtctatcatatgctgacaatagccgagaagcccatgaatctcttcgggggcggagtaggtgtctgccatcgccttggccttggctaacaatcggggaagttcttgactcccgttcaaggtaagagcaaaccgatccatccacatggttgcctcttggtgtaaagagtcgatcacccttcctctagcctccttttccgcatatacttgggcatactcatccgcgattctatgctcgt

SEQ ID NO: 203854 - DNA, 469 bp, Glycine max
  unsure (1)..(469): unsure at all n locations
ntcatgatgaangttggagactaagtacaaggaanaattcgttgtgggcgaaggtgattcgatcatgaaagctttattagttgtttggagctatatgttcagtcaaattattcaacatccataagtttcattcaggaagggtgtcccacgacccatatttcttcatatttggtgagggaaatacatgaatttacaaataatgaaggtgtatttcattggtctcatatctttaaaatgactaattaggaaacacacacccttgctaagtagggctattatattcagattaagggtaacattntttattttgttcctcttttgtttaccgattggttatggctaatgtatccggtattaccctcgtggtttctaataaatttctttctcttgggtgccataacccaatatttgccacccaaaaaatatttatgttaatntgtagaaaaattgtactaaatcttaatatcta

SEQ ID NO: 203855 - DNA, 388 bp, Glycine max
agctgggtcgaggtacttatcccgtgtagttctaagaaccacgaagaacgaatgaagaacgtctaagaacggttgaaacctttgcgaaattcctcacggaaaacgtttcggaaacgtttcacaagcgcctcggcttagattttcttcacggaaacaatttttccaagcaaattctaaagagagagaagtgcctaaggggctgaacccttttcttcttcacttcctcccctatttatagcaaaataggggagatgcttgccgcccagctcgcctaggcgagcagggttgcttcctccagaacaacagctcttctgaggaatatttggagggcccaatgggcctggttgtttttgccccccattttactaatacacccccttgccttttt

SEQ ID NO: 203856 - DNA, 473 bp, Glycine max
  unsure (1)..(473): unsure at all n locations
tactaagctttccttcaggtttgaaaagcatcaaggcattcctcattttatttgaagacgacatccttgttgagcaagttgctcaatggtctggctatctcggagaagaccttgatgaatcttctatagaaacctgcatgtccaagaaaacttctgataccctnggcatttactggtggtggtaacttcttaataacatncaattttgctttatccatcttgatgccttgagctataattttgaggcccaaaactatcgcttctcgaaccatgaagtgacacttctcccaattcagcatcagattggtcttaacatatctctatagtaccagctctagattcgtcaagcagtaatcaaaggaaggcccaaanactgagaagtcatccatgaagacttctatgcatttctctaccatgtcagcaaagatggctagcatgcacctctggaatgtggcaggtgtgttacataacct

SEQ ID NO: 203857 - DNA, 372 bp, Glycine max
tactaagctttactagtggcagggttgacatgaaccactatcttgatcttatccaattgtctaacaatcaagattgtgagtcgtgtggattgtctaggcctcctagatgtagattctgaagaaacagatgattgaagatgggagcttagtggtgtagccataagctagtgcaaataaaaataattgaaagttagataatatttcaagaatacaatgctaatatccaaacaagataaaaattgttcgaccttatgcaatattataaacattaatcttgagggttgccaattatgtaggaatattctcacacaagccttcatcgtgatcattataatttgcatgtacattatccacttcaagttcttcaattat

SEQ ID NO: 203858 - DNA, 418 bp, Glycine max
agcttcctctaccggagaataaacattgtttgtcagcgcttgtaaaaaaattgcgcaatgtcggctgaaaaacatcagttggggctgtttaactaccgatgctggctactgttttttctattccacccctgaataatacttggacgatgtcgatttggaaatgttcgatcggagtcatccggtcatgcttctttttaagacctcgatctgtcatcttttcctggccgacgtcggctagcatttttttcgatcaatatcggtgaatcatgctttttgccaaggtgggctaacgttttcgtggctgatgaagtgagagcatgccaatgtcggccgaaacacaatctcgcacgaaaaaccctagccgacctacattgtatattttgtaggcaataccgaacagcaaaacttcgtctaccat

SEQ ID NO: 203859 - DNA, 458 bp, Glycine max
  unsure (1)..(458): unsure at all n locations
ntgagcaaattcaaacgacaataactttgtactcggatgtctgattgagtcccgnactatatcgacacgctcgaaattgaatgttgatgctctgagcaaattcaaacgacaataacttttaactcggatgtttgattaagtcccgtaatatatcgagaagttcgaaattgaataccgaagctctaagcaatttcaaacgacaataactatttactcggatgtccgattgagtcccagaatatatcgaaacactcgtaattgaatgttgaagctctcagccaattcaaacgacaataacttttatctaggatgtcggattgagtctcgtaatatatcgacacgctcgaaattgaatgttgatgctctgatcaaattcaaacgataataactnttaactcggatgtctgaattagtcccgtaatatatcgagacactcganattgaataccgaagctctg

SEQ ID NO: 203860 - DNA, 360 bp, Glycine max
ataactaacaggagctccgcctctgttttactaaaggtatactttgatttaattaatttttccattgcttctagtctaggaattaggatataaacatggttttaaaaaaagtttgtggccatcaatgtgtgtagttacactctaagtttgttaggagaagatatatatttgattttaaaagaatatattatggtgaaaaataatggagatccaactgaaaaaccaaaaaattttaattactgtgttaggatggtgcacaacatatatggtgattcaatttaaacccattgattaaaagataataaccatggttaaagttaaattaataagaaaatattattaaattttgtgtgatatgta

SEQ ID NO: 203861 - DNA, 418 bp, Glycine max
  unsure (1)..(418): unsure at all n locations
tgaagcccttagntatagntgttggttaataattnngatatgtcaaacatgtttaatagatgtgtctattgtcttgaatgtattaaactangcatgtgtgtgatatagtctaagtctttttaatacttatttgtgatcaaatgtaaagcgaatgaagtattttatttctctaagtttcctaagtacaagcaatataacttacttctacttgaaatttggttgtaaccatcgaattaattgattgcctagcttgtgtattgagtgcctaagccagattcaaaagaaggaaggatgtatagcttacgataattgactggctctgttttggaaacaatgagaagttctctatgtgattctacaatctattaccacatgtgacaatcaactaccccgaaggcacagaagcgatagagatact

SEQ ID NO: 203862 - DNA, 460 bp, Glycine max
  unsure (1)..(460): unsure at all n locations
cactatataatactaagctntctaagtgctactttgcccaatcgcatgtgtgagatttttgtcccttggnatctccgagaggggtcgagcctgtcgcgtacaacgtggccgactgtctcgtataggctggtgccccaatccactaaagccttgatgagtttattggacctggtcggattctaccgtcagtatattgaaggctatgccatgatagctaaccccctggtcaagacaaccacgattgagcctttccaatggacctctcatgcctatacagcctttgagcaactcaaccaagcactattcactatccctattctcgccttgccgcaatttcaattgccattcaccatcgagactgacgctctcggtatcgcgatgggagctgagttgtctcaacacggacactcaattgcgtatctcataaaccatttacactgaagctcttcggcatcgatgt

SEQ ID NO: 203863 - DNA, 401 bp, Glycine max
gatggatttatttattttgcaaaccatagactttgagtcacctgatacaaagttttctggttgcatcatataaattgtttcttcaatgtcaccatttagaaatgcagtcttaacatccatctgatgtagctctaatcataatgagctactagtatcattattattctaaaagaatcctttgaagatactagagaaaaggtttctttataatcaatgccttccttttggataaatcctttagcaactagctgagccttatatctctcgacattgccctttgaatcccttttggttttaaatatccatttgcaaccaataagtttcacactttcagaaaattcgacaagattccaaacgtcattgtcttgcatagatttcatctcatccttcatgacattgat

SEQ ID NO: 203864 - DNA, 463 bp, Glycine max
  unsure (1)..(463): unsure at all n locations
tgtattccttcttcttcttttcccttatgaagaatttggggagcatattcatgctnttnttgcaaaccaagcttgaacgtcttccaacagttttagtagacaactgacttcttcacctaacatcttatgaaaaaggaagcttcttttgatcacaacaaacttccatgcatcttcccaagagtccatcttcttcttgtctttcttctctatatagatatgcaggcataactctatctagctcaaagtcgaagcagccagtcttaacctattcttaaaactctcaagttaggttttcttctagttggatgttgaggtctaccaaataaacctttcatctgtaatgtggtccccaccacataagatctacattatgcttacaatagaaggttatgtattcaagaatatntcatttctagtcaaaaggatagcaatgatngannataaataatctttcaacgtcatc

SEQ ID NO: 203865 - DNA, 457 bp, Glycine max
  unsure (1)..(457): unsure at all n locations
ctaagcttattggtcntaatacgctncanaattcaagacgacatcttatgcgtatttagagcatatntttagctcatcaaaaatatgggctaacagttatgtgctaaatagaatccccaaatcaaaaagcaagacatctccctatgagatattaaagaaaagacaaccaaatttgttttatttgagaacttggggatgtctggcctatgtaaggatcccagaccctaagagggttaaacttgcaagtagagcctatgaatgtgtgttcattggttatgctattaatagcaaagcgtataggttttatgacctatacgcacaagtgatcatagagtcaaatgatgctgatttttatgaaaataaatctccttttaaattaaggaatagtgggggtacttcatccaattatcttcctgatattagtagtgaaaatctcgcacaaccagaactagatatg

SEQ ID NO: 203866 - DNA, 308 bp, Glycine max
  unsure (1)..(308): unsure at all n locations
gacccaagcacgagcagcagcttaaagccccgcggatcaaattcttaaccaaacggcaatagggctccgtcgcaagaacggaaaccacatgcaaaaaaccgggtaggcccattaatctatgggaaaacatcccataagaacagagctaaaactataggcacccctccaaggaaggaacgccccaacataacttngcatggaggaggtgcttggaattattagcacctattacaaatggggggcacgcggctgccttaagggactaggcctcaccgaacatacacaacgagaacgggaaaaaaaaaagc

SEQ ID NO: 203867 - DNA, 460 bp, Glycine max
  unsure (1)..(460): unsure at all n locations
ggagaggtgaagagatggggtatgatggcccatattttaccatgtgtaaattgctatgagcaaaggagctgcatttgcggaatccatggctgctcccgtttgagttatttgcttactgtcttcgaaaataacgcatgcacgcgttcaaattaaatagtctccatcaactttctgtctctctctgattgcagaattatcaaagattggtgccacgtgaactacttgcatccatgtaatttatctatcattattgccggacacatactttacccaaggattacaccacatgactagggcaattaaatagatagagtaatattaatcatttaagtataactataatcattataatgatggattaaaaattatcatttatacgnnatgatccattaacactctgtcatatatgttgaaaaatcttctaatccataagaacccgtcattattatggtatcgtttt

SEQ ID NO: 203868 - DNA, 416 bp, Glycine max
agcttctattaacaaataaaattaaacaaatttataaattattttacttctatgataaacccaagtttcccttgtcactaaatagatggagattaggtttggaggtggactcttcaactcccgcaaggcctctcctttgtcctttcccttcaccgtcaccaagatctaatcaaaatcttgttctcccactctcgctgccaccatcaccacctgtgacagttgtatcccactctttgttctcactgtcctagttcccactccatcctctcgccaccagcacggacaatgcaacaccaccactttaacaacaacaagtcgatctaagaaccacataaatccaaatcttcgctctcggcacacgattatgaatccagcttggccatcgagtctcacattgcagcaaatcgaacatcaag

SEQ ID NO: 203869 - DNA, 471 bp, Glycine max
  unsure (1)..(471): unsure at all n locations
tcttggtttgtttaataatctaatcattcttttcttactttttgggatattaatcttagatgtgtccccaagttaccaaagggagaagatcacagagtttgatgaaatttcacatgaaattgggctgcaagtgattgaaggaggttatctgagtcaaggattgtcatactacaagacaacttttcagttatctgcaataggagaggataagactttggtcaacgtgaaaatttcttatgaccatgaatccgagatagaagaaagggtcaaacctacgaagacatcagagtcaactttattatatcttaggcgtctagaaacatatctgtccaatggcgcttgaagaaaaatgtagtatttataaaaatagtatattatatatgttttattttatatgttaaatagaataatgtatggatgcttttactatttcccaataaatatttagaaatanaaataaatatactatta

SEQ ID NO: 203870 - DNA, 408 bp, Glycine max
ttttttgttatggttttattcatcattgttaaaagggagaattacttctagtgtgaatatatgtagtcttcccataattgaaaaaaatattgatgtttcaaaaactcatttattgtaatatattttaaatacaaaatatatcatttttattcttttaagtggtagaaacaccgcgttataattattaatcttatgtttactcatgtgtctcattatattcctcatagtatttctggtatattatgaatgaaatgtcttaagttgtctcctctaaaaaaaaagcaaactatccacctgctgcgtggcttcaacacgattttcaacaattttatttcattcttgccctttattttaattgcattctctatgtttgcggttatcagaggacaatgagcccggatcaatgtc

SEQ ID NO: 203871 - DNA, 456 bp, Glycine max
  unsure (1)..(456): unsure at all n locations
ctaagcttatgaggaattggtcccgtntagtgacctcataaacctcttgaacatcaaccaatgaagttctcggaacaatagcataaagtatagcagaatgttcaacccataagttcaggaaaccaaaataatattcctgaataaagaaattagcctaactgtaattggctatgtccaattccaattgaaagcgtttggcagaatggtcctgattgaaaatgtgtttgagatagtcccacatgtctttggcagtagaaaatgatcgcaggttattgaccattaaaggctcaatggaccccaaaagccaagaaataatctgggcatcttgcgtctcccaagcagccaactcagccatggttgtgggtttagaggaggacctattgacatttccccacatgcctttccctttcatgaacatcttgaacttatactcccacgcagcatagttcttgtcgt

SEQ ID NO: 203872 - DNA, 448 bp, Glycine max
  unsure (1)..(448): unsure at all n locations
gcttgtacttatttgaacgtgnacaggtgttatacatttacaattacggatagaagcccagggtgaatacctgaaaaagataattgaagaacaacagcgactcagtggtgttctttctgaggcacctggttctggtgctgtagcggtggttccaggggatgcgtgccaagaacctgataataagactgacccgtcaacccctgaccctgaaaaggctgccaaagaccgtgctccagcgaagagtctttcaatagaatctttntcatctcaccctgaaccaatgacaccagattctggctgtcatgttggttcccctgctgaaagccctaaaggggagagatcggccatgaagcaacgagtaaccatggatggtgtgtattcttaaccaaagatggtgcttcacatcagatactggagtcaagcatgtatcattaccagcacctaacac

SEQ ID NO: 203873 - DNA, 395 bp, Glycine max
  unsure (1)..(395): unsure at all n locations
acctctctcttctcatttgaacccaaacccaatctccgggttggaaaacaaccttnttgcgccccttgtttgcttgtctaacatagctctcatttctcttttcaatttgggccttgactctttaatggaactttttcccatagtccactttggcttgtcctttcttatgcttaaaaactgaaatattatgcattggcaacaaatcaagaagagttagtggattgaaaccatatacaacctcaaaaggagaacaactagcggngtcatgcacaaccctattataagaaaattcaatatgaggtaagcaaacttcccacattttaagatttnttttatatggtccttagcaaggtacccaaagtcctattcacaacctctgtttgtcatccatttga

SEQ ID NO: 203874 - DNA, 471 bp, Glycine max
  unsure (1)..(471): unsure at all n locations
cttaacctaacacctttaatttttacttgattgctcatatgatgggataaagtttaaataactttcatagaagttctttcaaatatgccttgtataaaaaaattaaatcttcaattacctggttcccaagtgatggaacactttggtggacaacccattgagtgtcaaccactcctattttctcgtgaggaggctgcatccaatcaaatcaataaatatcatttggtacaaatccaatcgtgccaaagtgggttcttatcaaaagaaagttaaaaactactaacctccacacattntctgagaacgaaatcaaggccccatccatgaactatgtcgttctgcaaagtggcacgtgaagaacaagttagatatatatgaatcgaattgtgtggtgaaaataaaanaacatagaagacacaaaatgagtcctcatataaacctgtatcatgtgccacacacaacgccatgcat

SEQ ID NO: 203875 - DNA, 409 bp, Glycine max
  unsure (1)..(409): unsure at all n locations
agcttagataccaccagcattatggaattatggcggntgatggaacctctccaaatgcaagctttccgcaagacttacggaaagatcttatagttgaccttagcagaagtatccatagaagccattgcatcactcacccaatactacgaccggcctttgagatgcttcacattcagagacttccaattagtaccaaccattgaagaatttgaggaaattctaggatgtcctctcgggggaagaaaaccatatctttcatccgggtgtctcccctctttgagcagaattgcaactgtggtcaaggattcagcgagaggtttggaccacataaaatagactcgaaacggcatagcgggcctaccacgagggtacctataagacaaggcgaggggtatggccaatcaaggag

SEQ ID NO: 203876 - DNA, 466 bp, Glycine max
  unsure (1)..(466): unsure at all n locations
tactaagcttaacttgggctattttgctcaatctcgaattgtagcattttntgagtcttgaagtgcgtggctacgagtgggacttcgaaatttcaggtttgggtggacttctttctactttgattttcgtgggtatggggttttgggagatatgatgggtagttttgttagttttctgctccatgatagttatttgtgaagactcttgttgaaagcttgttgaacttgctatgtttggatgagttgaacatacccattctattttagggttnttatgatgatgcttgtgatgttcatgtgctgaaattgcttatggaaaactgttagaaatgaagggtagaactaacctatggttagagagtgagaatgtggtgttatgagtggaaaaagagtgaaattattatggctggaaggccaaatctagaattggtagtatttagagggtagagtgaataaatctatcttg

SEQ ID NO: 203877 - DNA, 309 bp, Glycine max
  unsure (1)..(309): unsure at all n locations
agctttgagcaaaancaaactacanaatcttttttctcggaggnccgagagagccccgcaatatatcgtgacgctccatactgaaaacggaagctttgagcaaaatcaaaagacaacaacctttttaatggatggccgatagggtcccgctgtattgtcgagaccctctaaatctaaaacagaggctctgagcaaaatcgaatgaaaataaatttttactcgggatgcgcaatgaattcccgaatatattaagacgctcgtaatggaaaacggaagctctgggcatattgtaagacaatactgtttact

SEQ ID NO: 203878 - DNA, 465 bp, Glycine max
gacactctgaaactaagcttcatttaattacaagcgtctagatatattacgggactctttcggactatccaagaaaaagttattgtcgtttgaatttgctcagagcatctcgtttcaatttctagcgtctcgatatattacgggacttaatcggacattatagatataagttattgttgcttgaatttcctctcaacttctattttcaatttctagcgtctcgatatattagagcactcaatctgacatctgagttaaaagttattgtcgtttgaatttgctacgagcttctggtttcaagtacgagcatctcgatatactacgagacacaatcgaacatttgagtaataagtaattgtcgcttgaatttgctatgagcgtctattttcatatcgagcgtctcgtatactatggtcacactcgacatccatttaaatttattgtcggtaatttgctacgagcttt

SEQ ID NO: 203879 - DNA, 423 bp, Glycine max
agctatgcgaaaagctcgccgctggagcttatccattaactgccctaactcctttagactggtggtccctaggctcttgaccttgacttgatagaaactctttttaagtgaaggcatttgacaagatcccatgttttactaaagtgaacaaaaatcggtgcgaattaaaactccgacatctatcatgggtggaatggatgaatgcatgaagaaatgcataaaacacagatgcgatttatgaattcgggagcccgagaaattgtctctttcttaaatacaacgtcttggggtagcacagtgcccgatgtatgtatttaagaaagtggtacggaccctccgttggttttccaaagagaggggatcaaaataaaatccgcgcgtgatgcatatgagaaaggcacaacacgggaatgtacagtatga

SEQ ID NO: 203880 - DNA, 455 bp, Glycine max
  unsure (1)..(455): unsure at all n locations
ntataagtgcgggtttaagacacgaaggccaagtcgccgctatattcgaggatgactccccgaggagatcggatttggtacggccatgtcctcctggtttccgactaggaaattggcgagtggaggagcgcccagacgtttacatgacaagcataatataaccctttatagctttaaaactctacggttgggcctaggcttcagagtttccttttgttaagtcattatgtcttttgttcttgaagttataataaagatctttcttcatctgttcctgcacctctacccattctcattcatttgcatgtntatttctttacactaaaaatgccagatccgacgacgagtccctcgaaggtactaatacccgggacccagccgtcaatttcgagcaagaagtgggttggatggagagtgaagaggacgatgatgtggggcttcccctanagctggag

SEQ ID NO: 203881 - DNA, 440 bp, Glycine max
  unsure (1)..(440): unsure at all n locations
tccttaagtcacctgaggcatgcaagcttcatattcaatctgatatcagtactaaattgactccaaaccttctttgttaactaactttccatgatgacatatgtttaatacaggattctaatgcttgcaagatgattggcacagctaatgcagaaagaggcccatatattctcacacagacagttgagtcttctcaatcctctgctatttgcaacgaactctccaactttgtttgcaacattgtttcaaaaaatttctcctgtagcttttcttctagtttgcccaatttatggcattataggttgggccatccttcttttgatagaggtcaaacaattaaggaaatggttcctttcattcattggaaaaanaaatccggttcgcgatatatgtcatattgcacaagcaagaaaactgagtttccctttgggttcttcttt

SEQ ID NO: 203882 - DNA, 453 bp, Glycine max
  unsure (1)..(453): unsure at all n locations
tcacattgttggtattgatagataaaatggatgtangattatgtcattgcaggtgctatcttcatgtataagaggtcgcaaacatacagtagttactgcagagaccatcaaggtagaacatttaagtgcttaaaagtacttgtgtgcatatatgcttaaatccaatttgcctttaattgatagttatcagttagaagagtagattgcaagatttgtagtcagtgaaaaggagaagagggagattataaatgatgtacgagataatcattaaggaagatctcaggctaaacaatatttttgaaactatggtctttagccgtgccaaatggtgtcatatgattcatagagtcgatcatccaagatactttaacaaatcaataaacattataaaatagtgaaaccaccctccacaacatcatccaagatactgtaagatattctaaaatacaatac

SEQ ID NO: 203883 - DNA, 343 bp, Glycine max
  unsure (1)..(343): unsure at all n locations
agcttgagtataattcattctgtgttgtgagcctacatcaaacaattggattattgatgtttctatcacaatcaagtgattgttgacatctccatgtgtgtgtacaatgtgattatgttttcatttctaggattcatttggaatatttgttgttgattatgaataagtgaccaatcttttttttatttaaaaattttgtctcctagtcaatcgactattaatcttttgatgtgctgattatcttccaatcatgccttgttaaactgcttgataacctatcatgtntttaacttctgtatgaatagagagagactttgccttgccaatcacgttaaggtgtttc

SEQ ID NO: 203884 - DNA, 472 bp, Glycine max
  unsure (1)..(472): unsure at all n locations
gacactataaaactcagctagactttttagctggacttgattcttgagtcggtcttggaggtcaatgattaccttagcaaacttggccactgtcgcaacaggctcttctttctcttcagctgcatgttccaccttacttgcaaagttattcctctcttctagcaagtctttatagcattcaaacacttcgtcaccatccattcttgtgcgtaataacttagcaagaacatcaccgaccctggatgatagttagtggttggacttgacagcctcagcaagggcgacagtagcactagccaccttgggacgctccactcttcatacagttcgagcaatggccctctatttggaaacctcagcctccaaagatgcaactttgttaagagcttccttgttcctttatttggtctccaccaaaatggccagactcctncagagagaaaccttcacaaactcctctgctctgatctat

SEQ ID NO: 203885 - DNA, 308 bp, Glycine max
gcttaaacattcaacttcgagcgtgtcgatatattacgagtctcaatcagacatccgagtaaaaagttattcgtttgaatttgctcagagcttcaacgttcaattttgagccgctcgttatattacaggactcaatcatacatccgagtaaaaagttattgtcttttggattggctcagagattcaacattcaatttcgagcgtctcgatatatgacaggactcaatcagacatccatgtaaaaatttattgtcgcttgaattggttcagagcttcaacattcaattttgagcgtgtcaatatatcag

SEQ ID NO: 203886 - DNA, 424 bp, Glycine max
  unsure (1)..(424): unsure at all n locations
ntgagctaattcaaacgaacaataacttttactcggatgcctgattgtgtcccgtgatataacgagacactcgaaattgaatgttgaagctctgagctaattcaaacgacaataactttttactcggatgtctgattgagtcctgtcatatatcgagacgctcgaaattgaatgttgaagctctgaaccaattcaaacgacaataactttntactcggatgtctgattgagtcctgtaatatatcgagacactcgaaattgaatgttgaacctctgagcaaattcaaacgacaataactttctactcggatgtctgattgagactcgtaatatatcgagacgctcgaaaatgaatgttgaagctctgagctaattcaaacgaacaataacttttactcggatgcctgattgagtcccgtgatat

SEQ ID NO: 203887 - DNA, 443 bp, Glycine max
  unsure (1)..(443): unsure at all n locations
agtcacctgaggcatgcaagctntccatacaaaaatgtgggcttcacatccatttgttttaacacaagatcaaattctgccaccatagccataagaattctgatggacctgtgtttcactacaggagagaaaacttcattgaagtcaattccctcctttagagtgaatcctcaaacaacaagtctagctttaaatctgtctggttcaactccttggatgccttttttcttcttgaagatccatttgcagctgaccactctaaaaccaggtggttgtttaatcaattcccatgtttggttgtcatggagacacttaatctcttcattcatggcacttagccatttttctttctccttactagctaagacaagcttaatagtgtgtggatcttcttccaaaacttcattgacagctaccagagcaaatgctattagatcaacata

SEQ ID NO: 203888 - DNA, 467 bp, Glycine max
  unsure (1)..(467): unsure at all n locations
taggctttcgaaaaagtctaagtaagtntaccttgtatgtcaagaagtctgatgttgaaatagtcattgattctttgtatgttgatgacttacttatgacaggaagttcgaagctgattgaagagtttaaaggaggaatgaaagaagcctttgaaatgactaatcttggaaaaatgtcctttttccttggtatacaggtgcaacaagatataggtgaagtctttgtaagtcaagaaaaatatgcaaaggaaattcttagaaagttcaagatggaggaatgcaagccaattgcaacaccaatgaatcaaaaggagaaattcagcaatgaagatggagctgaaaaggttgatgaanaactgtagaaaagcttaataggatgtctgatgtatttgactgcaaccaggccagacattacctatgcagtaagcttgttgtcacgatatatgcactgtgctagtgagattcat

SEQ ID NO: 203889 - DNA, 382 bp, Glycine max
  unsure (1)..(382): unsure at all n locations
agctngcttctcaaaatgatggtttattttttgtttatggtctgaaatcatgtatcaagatgaattgggtaatgctgattgaactgggggattatgaatttccttatgttgtgcctgccttgagattcattgactacttcaatggtgatgtctttaataagatagtggactttaccaaagcgtctagcgagaatatcaaaatacatctcaagaagcttggaatgaggtttgttgatcatgaatgaataatggttggagagccggaaactggaaactttgaccaaatggaagaagatgttgaagctgaagctccgcaagagtttacacatcaatggagtggcttcgagtcacttatgattcaaaagatggatgctatgcttca

SEQ ID NO: 203890 - DNA, 485 bp, Glycine max
  unsure (1)..(485): unsure at all n locations
actctctaatactacgctngaattattntatggatccttaggggtccatccttgctttgtatgttttcatcttcatctcgtctacttttggtattcttttgcttcgttttaagcgagttttgaccgatcgttcataccataatctcgcttaatcaccatttaaataaaattcaaccaatcatttgtattgtaatctcacttaatcactgtttaaatgaatttcaaccaaatgtgtgtgttgtaatctcacttaatcaatgtttaaataagttttgaccgatcgtttgagtcataaactcttttcatcaatgtaaaataagttgtaaccagtcattaacgccgcaagttattttataaaaaaaaggattgaagattaatgagcccaaatcaaatataaccaactcataaacttctttatttcatataaaaatcaaaagatcatgtcatggtccaacgcctataacgattctcccctttcaaaataa

SEQ ID NO: 203891 - DNA, 407 bp, Glycine max
agcttcagcagctttcttgctctcagaatctgcccttctcttctctgcctctataagcctcttcaatccaccaatttccttttccttttcaacaaccttattcttctcattctctaggaacttgcaagccttagtagcattcttcctcttagaatcagcccttcccttctccacttctataagctccttcaatctaccaatttccttttcccaatcagattggaaggtcctattctcatttccatccccgccacgtccctggtttgttatgggagtaacaatctgagactccaagctgaaagtttcactctctaaatgcaccctagcagcaacaaattctccaatttttccctctttccactttggcccacatactgcgagaaaacatcaatacattcattactagc

SEQ ID NO: 203892 - DNA, 458 bp, Glycine max
  unsure (1)..(458): unsure at all n locations
tattatttaaatataaataanatcttgtgtattgtaaacttctaaatatattggtacctttaaaatcttattattaaatttaaattaaataaatttcatctttatgtttatttaatttattaaaataagaaaataaaataatttaatttatataattaaataagtatatatataatagtagtctagccgtaaatctattagaaattaaaagggaagctggcaagttggtaattttgaaatttcgtcaagggctgtgttgtccaaaactcctcaaatatatatataaagatgtggccgtagcgggcttctacaaaaaattcaaaatccaacaaacggtgacgctttgggtcgtcttcttcttcttcttctccctctgcatctcgtaatcattcaccttcgtngctctctattcacgttctttacttctaacctttctgtgatttggggtttgttctatt

SEQ ID NO: 203893 - DNA, 355 bp, Glycine max
  unsure (1)..(355): unsure at all n locations
cagctgnggagtacttacaactatcaaatttgttacctcgtaattactacaaaacatgttttttgaagctgataacaagtgtgtcatacacaaagttgggtgcaattgtggatagaatccaatttcggggtcataataaattattatagaaccttgttatctcataactcaacctagccttggtttagttaagacttaagagacaaccaatggtgttacacatgagtttgcttaagtggtcccatgtttgcttaagctctactaattttatcatattatcccatatatgggggaaacttgttaggaatgaaatgatataaatcttctgtccaaaagaagagtacaagacaattaa

SEQ ID NO: 203894 - DNA, 395 bp, Glycine max
  unsure (1)..(395): unsure at all n locations
acttcaatcttggtggatgttatataatatgcttatcatacctttggccaataaatcctctttaacaaagaagaagctgatatttgagcccagccctcattactccctgcccaatttcccattcttnttgttgcctctacctggtaatgagtttggtcaaacttaattttgcctttgatttttggggcaagtgtattgtatggttgcacatactttgtagccacatcttatatgtgagttngatgccagatctcttcctcttgttgctcctctaccaactccatcagacagtataaaacattctgccatatttgtaattgaaagggaattgaagctattaaattntcagttaaacaactntgcaaatccatctcttggagataacagctccttgt

SEQ ID NO: 203895 - DNA, 357 bp, Glycine max
ttgggggttcaaatctggatgtattattcctagttcatgcaaaatggacaatgtccccaaactacattcctgtgtttcaaaatataaagtgaatagtgaaagaaccatggccaccagaaaataaacaaattaagttgaacaatatagggaataattgaaccctcatggttgagctttctaaatgaacacctatcacctccatgacagaatgatccttaatggaaattaaacaacactctcctgcatattcttaacatttttgtggccttctaccctttctaccaatcttttactatattattcttttacctccatatgtcagatttgtggcttcacatactattggattctctatta

SEQ ID NO: 203896 - DNA, 441 bp, Glycine max
  unsure (1)..(441): unsure at all n locations
taaccaagaagttaattaaaataagataaaatgagcttatttagagagtgatataagatcaaataagtttcagagggtgttccaaacaccctgattagtgctgactacttgttgcacggttggatttctatagattgaatgatagcacagagggaaggaaatggctgctgatgtttactattttcctatgtgacagggatatgcatttaaaaatagagacaaatatatctcttagtgtgcggtcaataatatgcagagatatggatcgtgcaagaatgaattgacagcctctgtaggctgttataatttgctttgacttggcggcacanattgtagatttcttgttcagtattatctgatttttntccctgtagtaattgaatnttcgatttatatcatttgtatttctattgctgctttgaaagtagaaagaagtgtaca

SEQ ID NO: 203897 - DNA, 423 bp, Glycine max
  unsure (1)..(423): unsure at all n locations
agcttcttgcgtagccgctcttggtgcttttaaaatcctataaacaaatccctcttattactagctattttgaattctttagttcctgaatatacaaccttcaaattgttgctcgttcccctctttcttttctgcaaaaaagaaaatcaatatcaaagaaaacatggatgaaatcctaagaaaatcaatatcaaagaaaacatggatgaaatgacaattaanaagcacacctaccaatctttcagagtcctttggttaatttgtcttgtctccttatgtggtggggttttggttaataatattatactnttgccttccaaaaaaacttatgactgatcctcttttattaatcctattttgcatgttattgcataaaagatcatgaggtttcaagttgctccactactcctcctctcctccttt

SEQ ID NO: 203898 - DNA, 459 bp, Glycine max
  unsure (1)..(459): unsure at all n locations
tcatggtgaatcataggtgattcaaaggtggtttgatgataacaatgatgatgacaaaagatgatgacaaaggtgatgacaaaaagctcaaagatcaatcaaagaataactcaagagaatccaagatcaatcaagaacaattcaagagttcaagataagaatcaagaagaattcaagactcaagaagaaagtctagagacaagaatcaagattcaaggatcaagatcaagattcaagaatgaagagaagactcaatcaagataagtattaaaaagtttttcaaaactttgaatagcacatgagtttttgacaaaaccttttactaaagagtttttactctctggtaatcgattaccatattgttgtaatcgattaccagtagcaaaattgttttgaaaaagttttcanatggaatntacaacgttccaattattttcaaaaagctgtaatcgatacaat

SEQ ID NO: 203899 - DNA, 394 bp, Glycine max
agcttggccctagtcactgctgaggtgtcttggcttcagtctcttttgactgaacttgcagttccacacaagctgccagtcattcattgtgacaacactaacactgggtcacttgctcctaacccagtccttcatgctcgcaccaaacacaaggacttagaccctgttttttgttcgggaaaaggttctgaacaaactgctttagagttgacacagttcattgtaatgtggcttattctttcagatcaatgataaaatctacttacattttctctcaaattctatcaagaatcaacttctatgtcctgtgttgctggtgttacatctccaaagcttcttcatgattgcgtgggtcatcaaaatttgtcaaaatttaaacaaatggatgaataat

SEQ ID NO: 203900 - DNA, 461 bp, Glycine max
  unsure (1)..(461): unsure at all n locations
tgacangtcttttatggcttctagcaagcaagtatgctttggagtgcaaaattaactgaattcctcatgcagtgtggttatactctgtcgaaggtagattattcattaatcagaaaatctgttcctgcaggattcactgtagttctgatatattttgatgacttcgttctagctggaaatgatcttactgagattgagtccctcaaacacaaactttacaggcaattcagcatcagagatctaggcaagttaaaaaaatatttcttggttttgaagttgcccgatctgtaaagggtatcactttataccaaaccttgcaatacacccatggacagcatgcttaaactgcacaaggaagctggttctcctttacctgatgcatcagtctataggagactatagactgattggagacttctgttctcactcacacatgccagattttgtttgagtgagtcatt

SEQ ID NO: 203901 - DNA, 368 bp, Glycine max
  unsure (1)..(368): unsure at all n locations
tagaaggatangaacagagcgcgagcaatgaatggctctctttctaatattttaaaatataagtccaacttcggttttcaatacaaaaccgatgttaaccaaatgatgttaatgttaacatcgattttctgagagaaatcgatgttaacttatcatacattaacatcggtttcataaaaaaccgatgttaattaaaagacgttaacatcggttcttcaaaaatcgatgttaacaaattaatgttaagatcggtttttcaagaactgatgttaatgttgttggatcaagcggccattgaattattaataatgggggggtgaattaattattaatgaacctttactaataaataatctatccttcttaat

SEQ ID NO: 203902 - DNA, 472 bp, Glycine max
  unsure (1)..(472): unsure at all n locations
ntaagtgtgataaatataggtatccgagatgtattagttatttacaacaaaaattattccatgcaaaccttagcttaaatccatattgttaactcgttgttcgcaacaaatttgtcatagtaaattattcaaaattgcgaatctcaatttccacatggatgtttgtacttaaattgatgcaaattcaatttataagtaagagataaagaatttaaaataacagataaagaaagatagtagataaaataaatatgaatttaaaataacagataaagaaagataatatataagataaatatttaaagataaaaatagaagatagaaaagataaaagatttaaattaaaagatcatatagacaatgagtaaaatataagataaaaaagtaaaagattaagatgaaaataaaattttagagttttctctattcgatttgtgaatttttcctacctacacctgctcctgatgtctac

SEQ ID NO: 203903 - DNA, 404 bp, Glycine max
  unsure (1)..(404): unsure at all n locations
agcttgaaagtttacagagagtaatggaattgttctatagacttgacccatggtattcaccgatagatttatattatgtatttcatatgaaaataataataaaatattttttaacaacatagtaataatacatcacgattacataataatttgttgacgttatacgagtaatagatcattttcatagaagatttgatgttattagaaaataaggatttgatcttatcaaattaagaattntgtatttggaaataacacactaaacgagggtatgttgaatggtaaatagacaaaaaaataaaaaaaaaaataacttacatttttgtctaatctttttaacttggtaattcgttgactcggtatctccgagtctatttgaatttacttagagttcataggagtta

SEQ ID NO: 203904 - DNA, 436 bp, Glycine max
  unsure (1)..(436): unsure at all n locations
tcaaagaanatattgtggctgatggaaaaatatacaagttacctttcattgggataagtgaagagggcatggataatttggggaaaaatgctaaaatatagataaaggagatgtatgggtgaaaaatacacaattaaggaatgaatataggtttataagagaaatgatggttgtctattaattaagagttatgaagcatattttgtttagtgcaaggtacaaacatgaaagcattgggacgtatgtaatggacaatcaagaaatggaaaaaagttgttagcatggtcgaaagagattctgaagctcttggccatagaatcagagaattgtacccacaatctagactatagtcaaagtggttggaagacagattatttaaacgagattattagtggctccttgtggcccctacaatatgagaaaataccccataccc

SEQ ID NO: 203905 - DNA, 343 bp, Glycine max
  unsure (1)..(343): unsure at all n locations
agctngccactcagctcgctcaggcgagcttagttgcttcctccagaagcaacaaccttctggaggaatcttctggagggcccaagtgggcctggttgctatttgcacccccatttttactaaatacaccccctgccttttttggggattcttttttcgtaaaggtacggaaacttacgaatttcataacgatacttgttttctttccgtaatgttacggaaccttgcggattacataattatcccctttttgaccacggaatgtacggaacctcactatttgtcaacaatgctccttttaattccggtgtgtanggaaccttacgattggcatcaaattttt

SEQ ID NO: 203906 - DNA, 429 bp, Glycine max
  unsure (1)..(429): unsure at all n locations
ngngtgatgttgtgcgtactgatgggtaccatgagaggtctgtgatggattgatccatgcgggtgctgaagtgacgacatgagtatctccttccttcctttttgccccagttgctccgatcctcctagcgttggtatttgtggaggagatgtaatcgaacttccttctcttcaaacccactatgattctctccccggcgaataccaagtctgcaaagttggagggcatgtatcccacaaatttctcctagtaaaacactggcaaggtatctaccatcatggtaatcatttccctttcaaccatgggaggggccacttgggctgtgaggtctctccaacgctaagcatacttcttaaaggactcgctntcctttttaaccatgttcaacaactgagtccggtcgggagccatatcagaattgtactgata

SEQ ID NO: 203907 - DNA, 250 bp, Glycine max
agttattattcatgataaagaccaaaaaaatatgacttctactactaatgtaatcttcaaagaggttttcaaaaatcttacaaggtaactctatattttaaacaagaaaattgactatctattggcaataattcccaactattatcttacttatatacattctaacatacagcccaagatgatatcatatattacaatgttaaatttaacattgccaggtatgcaatcttaatcacccacattaatatct

SEQ ID NO: 203908 - DNA, 466 bp, Glycine max
tggcaagggtaggtgctcaataataatatataagttgaaatatgaatgttcgtatacttggacaaggaggattgacacgaggacaatggtttgatgctagatatacacaactggtttggtcaaaagcacttggtggtccattagctgatagtgataaataaatagtacataacatgcttaaatttatataaaaaaaacaaaaagaagaagaagaaaatgtacattctgttataagaggatattaatgtaaatatttctttggctagaaatgaagaaggcatgtgcttgaatgcatgtgtgacaccttaacttagatgatgatagctatgatgcaattccaatttgagacggtaagctttaggtcattaagtactatagtagtttgcacaatgtaattgaagctagtcatttacttgcaaaacatgcacttagtttctcgcggattgacatattacagtcaaatatt

SEQ ID NO: 203909 - DNA, 246 bp, Glycine max
gctggatttcttttagaaggaatctatccttcctaatatggagccaaacccagtccccctcattaagaactagctcttttcttcctttattgcctttagttgaataagaccttgtttggttctctatttggttcttaaccctctcatgcaacttctttacaaactctgacctaaattcccttttttatgtataaaaaagtggcaggtggaagggaatggaggctaattgtgttaggggattgaccc

SEQ ID NO: 203910 - DNA, 424 bp, Glycine max
  unsure (1)..(424): unsure at all n locations
tgaagaggaagtcatcgngagagctngagatgagtctatgagtgattgttatgtcctagaggtggaggagacatccccactacttgtatttcttcaatccttcatctttctcttctctttgttgtaaaggaagcttcccaaatatggagagctaaatcctctgttggttcttccttgtaggtacttgatgtaaagacttgtatatctatttaatgatgttttatgtgttttatgtgttctctgtgctatcagtacttcatttcagtgtgcttttgccttgatcacatagatgcatgctttgttaggatcatttaacagtggaaaatggtctaattcttagaacttgataggacaaggctagtttatcatattatcacgagggatcggnngtacggaacctagatgtttgtatgtttgtcttaat

SEQ ID NO: 203911 - DNA, 375 bp, Glycine max
agcttctacattcaatttcgagcctttctatatattactgtactcaatcggacatccgagtaaaaagttattgtagtttgaatttgctccaggcgttcggattccatttccagcgtctcgatatattacgggacttaatctgacatccgagtaaaaagtaatcgtgtttgaaattgctcagagcttcggtatttcatttcgagcatctcgatatattacgggactcaatcagacatccgagtaacaagtattgttgtttaatttgctcaaggcttcggttttcattttgagcgtctcgatgtattacgggactcaatccaacttccgagtaaaaaagttttgccgcttgaatttgctcaagacttctacattcaa

SEQ ID NO: 203912 - DNA, 445 bp, Glycine max
ttgagcaaattcaaacgacaataactctatactcggatgtcttattgttttctgtaatatatcgagacgctcgaaatggaataccgaagctctgagcaaatttaaacgacaataacccttttactcggatgtctgattgagtcccgtaatatatcgagatgctagaaattgaatgttgaagctctgatcaaattcaaacgacaataactttttactcggatgtccgattgagtctcgtaatatatcgagacgctcgaaatggaatatcgaagctctgagcaaattcaaacaataataatcttttactcggatgtccgattgagtcccgtaatatatcggaacgctcgaaattgaatgttgaagctctgagcaaattcaaacgacaattaatttttactcggatgtctgatggagcccgtaaatatcgagatgctagaatatgaat

SEQ ID NO: 203913 - DNA, 301 bp, Glycine max
attgcatcccattgattggaaacatcaccggagaactatccaaagttggttaaaaaaaaattaaagaaatgcctattagtgttgttaacaaagtgaaacaattattgctggaagagttaacaggaatgagctaacattgacaaaaacagaacaatgattgcggaaataatgtaagcctgaaatgcagaattgaaattgtggagaatagaaatcacacatttggcagtttcacattataggttcatgggcttgtcttaaattttatacattttttttttattacatggtgattacaagggta

SEQ ID NO: 203914 - DNA, 477 bp, Glycine max
  unsure (1)..(477): unsure at all n locations
tactaagcttgacatnttctcgatcaggttgacaattcaaatctaattgtcccttggcagcttcagccaccgcatggttatgactccttgaatccaattcattttgcacccgtacctcattctccaatctgtcaactggagttaaatgtcgtaaggtgctatctacttctgattcatctttggtccgccatgataactgatttctctgagcaatctctgcttcacgttcggattgccgcttcttctttcgcatcatcagggttttaaaccgacgtttaactgtcatgcacacattgcaggtgcatgtgggtttgtgtatgcccttcccacttggtggctggatacagacaatgcaagagcacccaggtctatgccgaggatgttttgtggtgctaacaactgatgtcctgccagagtcacttgcatcatcacccagtattgctgcatttgccaaagcatccagtcctgaagattcat

SEQ ID NO: 203915 - DNA, 416 bp, Glycine max
acttttacctcggggtcttttcctttattcttgattgttcgagtccgccatgttctgtaaatatactacttttaaggagataaccttgttggagacggctgttctatgttagcctatttgcttttggtgatagcatctccatggccttttaccatgtgacttttgaacaacttgtctattaagctttatgatactgaatgttaagtttattaaatatgctctatatttagtttaccttatatgtttccaccttgttcttaaattcaattataactatataacaggtaaccgagagtcaactaggtttatgcctggttttatatatttccattgagcttttggtatatttttgaaataaacatatagaattgttgatgagggagctggtgacttcacaataatccttaacaaaatat

SEQ ID NO: 203916 - DNA, 372 bp, Glycine max
  unsure (1)..(372): unsure at all n locations
tgagactggatatataattatgaacaatatgatctgcactctggacaccagatctatacagatagaacttatattcctctaagcaccagcgtaaccataaatgacttacattgtgctctaaaagcagatatgagaggcacacatttgcaggcttctaaatcccaagtcatttatgaactntaaaggtagagaagatgctagggttctaaaacacatttgaattgtctgaatgataataactaacgcccacggaggctgtgatggaggaatttatccagacgtaatggatatcatactcacagattggcatataaatcaaaggggaagaggcggagatccgtaaggaagctgtgaattataggtcacaacact

SEQ ID NO: 203917 - DNA, 326 bp, Glycine max
  unsure (1)..(326): unsure at all n locations
agctnttcgattcattctatgtacccatgtgtggccacattgtgtttcgngtatttttattctcatttcattttacttttatacccccttttgacgtgcttaagccattttacttaagtcatttctcgcttaactaaaaaaaaaataatttccaccgatcgtttgaattgtattatccggtaacttcggttaaaatgaattctgaccgttcggtcgtgcccgaaccacgttggaaatcaaaaagaagtgaaataataatgccggaaatcaatcagacggtttctctttgggaattctcattcttaatcgaattgactaataactaa

SEQ ID NO: 203918 - DNA, 468 bp, Glycine max
  unsure (1)..(468): unsure at all n locations
taatgatgatgaatcaagtatgaatcaagtatgtttgatgatgacatttagcccaaaagaatgatttcaagattgagtcaacaagtttaagatcaagattaatttcaagattcaagagaagaaatcaagaagccataagtcaagacttcacaagggaagtattgaaaaggatttttcaaaaaccaaacatagcacagttttgttttacaaaagagttttctcaaacttttctaagttactacagtatttactctctggtaatcgattacctgtttcctgtaatcgattactagtgataaaatttgatttcaaaaaggttttaactgaatntgcaacattccacatgatttntaaatggtgtaatcgattacaatatattggtaatcgattactagtgtatctaaacattgaaattcanatttaattgtgaagagtcacatctttttattaaatgcattgtgtaatcga

SEQ ID NO: 203919 - DNA, 385 bp, Glycine max
agcttcttgatgatgcgtttgtgactatttggtgttgcagagattaattgaactttgccagcaacaccgttgttctatccaccaattgggccctcaatctgaatctcttgccttggacgtgtgtggtggttgttgtacaaccacaaaatggaattgattttttatttttattttggaatttatgagtgtttttaattaccaaaaattacatttaaaattcaactaaaaaatgctacttaggttcaaatgttcaagcttaaatcttgacaaaaaaataacattctgaatcttttaatatatataccactttactaatgtatatataccttgttattttaatatgagtacgttaacaaattatacctagatattattttaaaataaa

SEQ ID NO: 203920 - DNA, 420 bp, Glycine max
  unsure (1)..(420): unsure at all n locations
ttaaaataccttgtagattcttagagaattatcttatttctntatttataattcgnctttaagaagataaaaccagtttgtgtgaaaacaaacatcaacaaatcttttgggttgtttagatgtaatctcagtgttttcttgctttaaacctttcaaagaatagctttctttgtaaaaagagcgcttatgaattntttttattacaattcaatcccctttcttatcatatttgtctttacaaatagttttagaatctccaattaacaaatagtttgtaaatattaattttgctatctctaacaaatatagtttgtaaaaaatagttgtatttcacttttaaaataaaaaggaaatgcagttgtgattaagagcaccactttcatatcaatatngatgtaagtggttctcaatctacattaa

SEQ ID NO: 203921 - DNA, 382 bp, Glycine max
agctctgatcaagtgcttctatagcaaattttttgaactctttggtgcttcacccccaaataattagacttgtctgatttaacaatttctgctaattgactcccttgaagtatgttgcatgttgagttttcaaaaattggtccaagaatcttaaatttggaatgggcagtcctaccttttggcaacaatagagaaactttgccactagaagcaacccacataacaatttgattctttgctctcaatgaacttggcaatggtctccatatgaatgtttttcctgtacctccaaatccatataggaaaaacatgccgccctcgctgtgtagacagcttgcttaatttcggtgcaaattgatccttgccatctacatcatggata

SEQ ID NO: 203922 - DNA, 460 bp, Glycine max
  unsure (1)..(460): unsure at all n locations
tataagaacaaaattgcctanatcatttcctaatatgcttgtgaattatgaagcatcaataagaatcaagccaaggctattgtgcaagcaatcaatggggcaaaacgcaccaaaagattatgatgatggatggctcaaattctcacaaaggtaaacttatcactttcaaattgagctttcaaaattatcatgacatgtagaggaaaaacaaggatttcaaatcacaaaatgtcaacagaattttattttcacaacaattacccatttcttgaacatatcctataattcaaagaaaaatatacaaagttgtacatgcaaacagaattgacctataatattaaactagaaacccaacataactaacaaaactaacaaatnttacacaaacaaaactaatcaaactagcaaaaccaaaaccaaagaacactcgcccccctccccccccatacttaaacacaca

SEQ ID NO: 203923 - DNA, 334 bp, Glycine max
agcttggagggattgatggggacccggtgtttatatgaactaggataagggctacgtgggagtacgtgagctcagttgaaggtgggcaactggggatggtggatttattcgtggatgtggagagtagacttgcaccatcgccccatcgccacctagtacaacatatgacgggtaccccaaaatcctacaagcttgaagtgagaaagtgtggaaaaagcagtcttcctacttttattcgttgaccacaaagtgtgacctcgagatatgtcacgggggtcaagagaccttggggacgtcaggtggggtgcttttgcccaaaccaatcttgacaatc

SEQ ID NO: 203924 - DNA, 461 bp, Glycine max
  unsure (1)..(461): unsure at all n locations
cttgatttagacatgattgatacactgattgngtcttgttgatttgatttgggcaagattggatgaggggaagtgtggtttttgaaacctgcactctgtgcagattattgccgtgaaattgtgcagcaggattttgcacaagtgcagaaaaatgctatgtatttgctggttgtggaaagagtaatgtaaaattagttctggatgttttctagtagatcccaacggtcaaaatgtaggattatgtactagagacttccagtaaaantttggagtcgatccaacggttaacgaattggaacgaaggaattgttactggggctnttaagtgagaaaagatgtgattatggttggtgttatgggcagagatttctgcctttgccctgtattcttggctgagatggtttgtgttgatgaatgtgagatacttggatgttggggaagcttgggaggattgatgggga

SEQ ID NO: 203925 - DNA, 415 bp, Glycine max
agctagacataccaataagtgtgcaatttttaaaaatttacaattgtgactttgaaattgtagtatatttataaacatggccaaagcaaatcatagttcatatttggatcaggaaattcaaagactatttccacgtcaggcttgaagctttcagctttggaaaaagctctccagccggatccaatttttgttgtctttcgttagtcattgtaaataatgtgatattcgacacaatgttctataatcaaatgggtgaaccttttgtctttcataaagtaatatatactacttggaacatcctgacataaacaataacttaatgtgagatatgagatgataaaaaaaaattgacagataaaggtggttttgaattacttaagtatatagctaagtaacttaccaagttgctacacgt

SEQ ID NO: 203926 - DNA, 458 bp, Glycine max
  unsure (1)..(458): unsure at all n locations
ntcaatagcaacagtcccttttcccttaactgagatgatatcaccatttccaattnttactttggaaacaatggttntgtcaagttctttaaagaggttcaggtcattggtcatatggtttgtgcagccgctgtctattaaccatgaatcactggaactattgcttgtggcaaaacatgttgcgacaaagagttgctcatcttcttgttcctccgcaaccacctttgcttcctctgatttggacttgcatattcgctctacatgtcccatattgccataatttctgcacttgatatctagcctccaccaacattttctttcaggatgatatgtctttatgcaatgcagacaaggagganaggtctcaccttgctgctttttggagccttctggtattttgttcctccatatgatgttcttcttgtctttgccacctcttgaatattgtgctttcgtat

SEQ ID NO: 203927 - DNA, 340 bp, Glycine max
  unsure (1)..(340): unsure at all n locations
agcnttgaagacataaagtatgtatggatgtgctctttattcaagttctttctgtaaaaaagctttttgtgcaagttcttgtaaaagttaaaaaaattctcaaaacactttcattatcttgagagataagactaagtgttgaaagtatctatttgtctataagaccgaatgagtgttagtcattatgcaatcaaaacaaacaaatcatatgatctgggtgagagctaatagtggcttggtaagaaaaaaatagtgtttgtaacaagtttgatgttaagcttgagttaaggagccaaaagtgacaataataaatacttgcaacttgttgaagtaagaaaac

SEQ ID NO: 203928 - DNA, 454 bp, Glycine max
  unsure (1)..(454): unsure at all n locations
taacaaaaggcatgcgaagtgggtggaattcctagagcatttcccttatgttatcaaacataaaaagggaaaaggtaatattgtagccgatgctctttctcggcgtcatgcattactttctatgcttgaaacaaaattgattggtcttgaatgtttgaaaagcatgtatgaaaatgatgaaacttttggagaaatttttaaaaattgtgaaaaattttcagaaaatggtttctttagacatgaaggctttcttttcaaagaaaacaaattgtgtgtgcctaaatgttctactagaaatttgcttgtttgtgaagcacatgaaggaggtttaatggggcattntggggtccaaaagactctagaaacattacaagaacatntttattggcctcatatgaaaaaggatgtgcagaaatattgtgaacattgcattgtatgtaaaaaggcaaagtct

SEQ ID NO: 203929 - DNA, 184 bp, Glycine max
catcattttataatgaatgcggataccttctcctcattgtattaagcttttgattgtctttgcctttcatgtttatagaaaccctcagttttttttttttcccacctacacctacaagcccaccttaagctatacacttcaaaaaggtaaacacttgtgtgctccggctttttgctaattacct

SEQ ID NO: 203930 - DNA, 296 bp, Glycine max
aataaaggcacagtatcattgttcaccataaaatcaacacgttaattaatatatgtaaaaaaaggtatgcatcatacaccagataaaggacaaagaattgaaagaagacagcttgtcagtaagtccatttttaattggtgaatacttatcataattcagaaatattaatatgcatagtaggtactagttaacctattcaatttcttttaccttatatgaacccgtgtttgataaataaccatataatgaaacatgtgaattattgttgaactgtcatgtatatccactcttgaaga

SEQ ID NO: 203931 - DNA, 357 bp, Glycine max
  unsure (1)..(357): unsure at all n locations
actaagcttgtagatacggcaatggtgcaaacacaaatacctgtcacctcttttnatgggnatcagaaagcggaattaactttatggattggtcacgagtatgttaataattaacttttccgatccttgggagtataccttgaaactgcctgaattgtgaacatggttctactatgtagatctaatacacctttaactgcgacaaatagatacctaatatatgcacctcatgtttgggttccagcataatattgtttatatcccaaataaaaattgatgcagacaatcatgatatttattggttcccaaaatataaggcatgttatgtttatatatacgaaatgtcaacggaatgca

SEQ ID NO: 203932 - DNA, 330 bp, Glycine max
  unsure (1)..(330): unsure at all n locations
tatatcngagacaatctcggggtgctagaagttattataatggggggatacagcccaaaggttttctctagtattctcaacggtatgaacaaaacttaccctttatatatgtggagagaaaaaagcatgctcatctcccgttttgaacgcgatttccatgctcgaatgtgattttaaaaactcaacagtttatttggacatctcaaaacaatcagttcttacatatttcaatgaggtgcaaatatcctctaacctaccattttttctataaaactattctcacactaaaaccattttaaaactcagggaacactacccatcatttgatgg

SEQ ID NO: 203933 - DNA, 408 bp, Glycine max
  unsure (1)..(408): unsure at all n locations
ctctatagtgatcaaatgggcgatgagtttaaagnttacttatataatgaacaaactatcaataggtttaaattggttgctgccttacctcatctaaacttatataacccgatccctcttccacagctatatattttcattttgctcgtttacttccccggtgagagtacctttggctctatttggattctttagatcccctccgactagttaaaatataattaatgaataagaatatgagtctatttcttggttggattcattcatgttcctgccttcacattgtataccatattggtaagccgaaaagatacttagcagttttttattttacagacgaacatcaaaggttagaactcatagaagactgtcttggcgctggacaacttgatacccgacccataatat

SEQ ID NO: 203934 - DNA, 318 bp, Glycine max
gaaagcatcatcctatttcctaagtccccccacgaaactctggcacaagaaacttgatcattgccatcttgaaagaatgctcaccatgataaaaaggagaattgccacaaaaaatttgaaaaagggtccaatggaggaatgcaaatctattaccacattcatgaatcaaaaagagaagttcatcaaggaagaaggtgtatataactttgctgaagggatatataggagcttgattgaatgtctaatgatctcactcacacaaggccaaacattttatttgctctaatgacaaaattataatttttgtggacaatcaaa

SEQ ID NO: 203935 - DNA, 468 bp, Glycine max
  unsure (1)..(468): unsure at all n locations
ntgtaccttgngtatgggttgatctcttcattcttgagtgttaacacccactcatttcttaatgcattccttccttctgtccactagatcatatgcttgattttcaatcaaggactgaatttcttttttcatggcttgtattcatttttccttatcatctatctcaatggcttcctggaaactttgaggttccccatcattagtgagattgacatattcatcagaaatacctctttaatggttgactgactcttgttgatcacctcacttgagatacatcttccgtttggatagtctccattgttgattcttccatcgtctgagtaggatgctccgtctgactctgctccatctggtcangctattctatctgacgaggttgctccatctaattggcttctatcatctgagtgggatctgcctctttaaaagagtctctccccttgagtttctcactatgggctttcg

SEQ ID NO: 203936 - DNA, 340 bp, Glycine max
agtcacctgcggctgcagcttatgagacccgatatttcctcttcctctcttcttcctttctgcttcccatttccgaaataccaaatcagaaacacagaaaccctagaaactggcaacgaaatcagagcgagagaaaggaaaaatcgcatatattccaatttcggaacagagaccggaaattttccaccaccgaaaatcgcgaaacggtagtggcagcgttcgatctacggttttggggattcctgaattgcgcgaaggtagaagaagatgaaaaacgcaaacacgctttgtgattttgtttggttcacattaaatggatgaaccagggaacaagagaatg

SEQ ID NO: 203937 - DNA, 467 bp, Glycine max
  unsure (1)..(467): unsure at all n locations
ntctcccaagtcctaaatgacatttcaggctagtattaactcactntaacctccatttaccacagaattcagacttagccttcccactctcaaagcctcactctttttccactcataacaccacattctcactttccaaccctaggttaactctatatttcatctctaacagttttccttcagaaactttagcatacaaacgtcacaaacatcatcacaaaaccctaaaacagaatgggtatgtctaactcacccaaacatggcaatttcaacaagctttcaacaagttccttcacaaataatcatcacacagcagaaaactaacaaaaccacccatcatatctcccaaaccccatacccacgaattttaagagagaaagaagtcacccaaacctgaattttcgaagtcccactcgtagccacgcacttcacgactccaaaagtgccctcctttcgcgatttggagc

SEQ ID NO: 203938 - DNA, 428 bp, Glycine max
tggacccgggatcttaagtcactgggcatcagctaaggctgttcaattgtgcacatattggaaaaggtctgggtggtggtcagcaaaggatcataaaccacataatcttgtggacagtacagacttttgattaaagccagctgggttaccaggttaaccaaggcatctagtttaccctctagcttcttagtttcagcttatgaaaatgaatttgtggctacttcatgcactcctctaatgacaatagcatcattattggcactaaactgttaggagttggaagccatcttctcaattaaattcctagcctcagcaggggtcataccacctaagagctccaccactagcagcatcaattatacccctctcatgttgcaagtccctcataaaatattgaaaaagtgctaatattttggcgggaggcagct

SEQ ID NO: 203939 - DNA, 448 bp, Glycine max
  unsure (1)..(448): unsure at all n locations
ngccacccagctcgcccaggcgagcaaggttgcttcctctagaagcaacagccttctggaggaatcttctggagggcccaagtgggtctgattgctatttgcacccccatttttactaaatacacccccttcgctctttttggtgattattttttcgtaaagttacggaaacttacggatttcgcaacgatacttgttttctttccgtaatgttacggaaccttgcggattacataatcatccccttttttgacttacggaatgttacggaacctcactaattgtgcaacaatgcttccttttgatttccggtgtgtcacggaaccttacggattgtgcttcaataccttctatngatttccggcatgtcccggaacttcacaaattgcctaatgatgggtgccaagcacctcacaaagaccaaacataagttgcatgccaccaagca

SEQ ID NO: 203940 - DNA, 413 bp, Glycine max
cgcttcttcgggccattcctgcgaaggcaaacatttggaaatctattttatatgaaatataacaatcattacaaacaagggccaaacaacacttctcatggcacgagtgtcaacatgctacttataaaataatcatattggggtcgtgctaatttatgacacatacgtatttgcacacaataaaaatttgtgtgatgcattttacgacacctatccatgtacatattttatgacaaaccttttcatgctacatcctatatatatacacacatattaatggaaggcttgttttgttacctactcacaaatacacatattttgagaaacacttttacgctacccatccaacactatgtaaggcacttcatgctatatatattcatattatgcaaggctattatatgctatatata

SEQ ID NO: 203941 - DNA, 406 bp, Glycine max
  unsure (1)..(406): unsure at all n locations
agcttctcaaatgcaacctgaaggaaagctttattattatcaccaccaaccaattctagtgccatggtaggaaagggagtctagtggatgaatggaaatgagtaattcgaagtgaagtgcagggttcatgaactgatcaaatcagtgataggcaattttatgaaggatggctttaattaagattgagtcaaccaataactgttgagtcttcccaacaacacaaactntgacagctgtattccatgaattaatgcgtggctatgattctgctgagggtagctcctgagatattaaccaacacttgttagtttaattttatgaataaaaatagtaaaacaaataaaaattattatttattaaaaattaaatatttaaataattataaaggaagaaattaaaatactta

SEQ ID NO: 203942 - DNA, 458 bp, Glycine max
ttgaattgtctatggattcattgatagaattgtggttgttatttgtttcctgcaggtattttaaacgtttatactgatgtggtaagccaaatagagagtataaacagtgaagacaaagcacagctgaattgagaaaatcattacaaaaatggttcttcattatgaaatctcatcataaaaatgttaagagtatcatccaaaacataaagaagataaaaaaaaattgtagttaatgaacagatatgttagaacctaagatacataccggaatccagatgcagccaatagctactacaaatgcagctgctgatattataaaacagggcaagaagtagggaaacctgcagacatgattatgtttgtgaaaatgaagatcagcacatcattatatgataatatgatggaaggacaaaggtgagagggagaggaatactgaatccataagtccacttacttat

SEQ ID NO: 203943 - DNA, 272 bp, Glycine max
ctagaatttaacttcccttctatgtaaatagaggacccttcaaaaaggcttggggcaggcccaatagaccatgcccaaattcttgacataaaataatgtgaacctctctgtttccataatataatacaataatgtgaagtctgaataaaaaatgaactaaaagcagacacagagtaattatggtgtatattttatgaacactttaccatatttatatgatgcattgctcccaagcaactatataattagattcactaagtgtattctatata

SEQ ID NO: 203944 - DNA, 435 bp, Glycine max
  unsure (1)..(435): unsure at all n locations
ctttgaacttgcttactcttgtanttttggcatcatcaaaataatcttggaaatcattgcttacacatgagtgtggtgattatgttcatcgaaagggagataatatgccggtatgggttgcccaagaagattatcaccgataatgccaccaatttgaacaagataatgaatgagatgtgtaaggatttcaagatccaacaccacaattccacgccttacaagctcaagatcgatggtgcagttaatgctgctattaagaatatcatgaaaatagttcataagatgatcgtgtcatacaaggattggcatgagatgctccccttcgcactaaatggttattgaacatatgtgcgcacatcaactggtgaaacacctttctctttgttgtacgggatggatgatgtgctccacttcgatgtattggttccttctttg

SEQ ID NO: 203945 - DNA, 371 bp, Glycine max
  unsure (1)..(371): unsure at all n locations
gaaggttaatgagtttaagagcaactcaggattcaaaagatgtgacatgaaccattggtgatttgttaagaaatatactaatagttatgttatccttgtcgggtatgttgaagacatgtngattgcaggatctaatatggtagaaattaacaggttgaagcaacagttggcagaaaacttttaaatgaaggatcttgggccaactaaacaaatccttggtatgagaattcttagaaacatatcagaaggaattttgaagctgtctcaggagaaatatatacacaagttgcttgacaggttntaccttgaagattctaagaccaggaatacccctttgggatctcattttgaagtttcaaagaagcaatctt

SEQ ID NO: 203946 - DNA, 477 bp, Glycine max
  unsure (1)..(477): unsure at all n locations
acactctctaatactcacgcttgtcaactttacctcaagtatactacttggatggacatgatcttcagtatggagagatatattataaggagaaagaagaacttacaaataaagaaaaattaatcagtgctgaatctcaaaaggaagtcttggaagggaagattcaatcagctactgataggattaaatccttaatgaatcaactccaggaatcagagaaaattattgacagcttgagattggagatacagtcctataaagaatcaaatggaaaacttgagaatgaaatcaggaatcagcaagtgataatttcaaatcttgaagaacatcatacagaagaagaattaaaggaggcttgtaacaaggttttggctttagaagtggaactggagaataagaacagcaattgtaaagaattagaggccaaatgtactgaattgcangtccagcttgaaaggtatgaatcgtccttacata

SEQ ID NO: 203947 - DNA, 211 bp, Glycine max
  unsure (1)..(211): unsure at all n locations
agcttctacttatgtggcagggcgggctttcttcacctttttgtctccaacgngaaccttgaccatggttccttcttcccgcgatgctttcttttatgttcgcctggaggggctcataacctaaaccatactttccacgatttccttgggtatttatcaagctaattatcgccccccctgttttttctaaacaccatccgggttcataaac

SEQ ID NO: 203948 - DNA, 474 bp, Glycine max
  unsure (1)..(474): unsure at all n locations
actaagctttacttatgggagggcgggcttacttaccttttgtctcaacttttctttgaccatattcttccttcccgcgatgcttcttttcatgtccgcctgagtgggcttatagcctaaaccatacttcccacgatttccttgggtatttatcaggctagttatgccgccgttgttttttcctaaacccatcccgggttcataaccgttccccaacataactcgggccatcattatcgctgcatcggacagacaaggctgcccatagagggagtccacggaggaaatgctgaccacctcaaaagactggaaagcagtttctaacgattcttctgcggcttccacataaggcatggaggatgggcagcttaccaagatatctttctcgcctgacacgatgaccaagtgcccctccactatgaatttcagctnttggtggagtgtataaggcacaactcccactgagtggatcca

SEQ ID NO: 203949 - DNA, 307 bp, Glycine max
  unsure (1)..(307): unsure at all n locations
agcttgaatatggggacctgatagcgctttattacattcttggncgatataataaagaagactgataaccatactatggaacttgttgttgctctcaatgatgggctgtcatcaccaccaggaaataaattttacctatgaaagatctaacgaattccacctaatctttcatggcgattacttaaaataaagggtgattagctgtgcttactgacttgtactggtgaaaggaaaataaaaaatgccctattaaatgctttccaaggagactttccccttttcccaaaaaatataaaggttaatcact

SEQ ID NO: 203950 - DNA, 424 bp, Glycine max
  unsure (1)..(424): unsure at all n locations
atttttgncacatgaaatgagaaaaaatatttatgtctgttaattttataaaacacccaatcatttgataaatttattaaattattattattacattaaacatcacagataaaattatctcatactatatatatatacctaaaatgaaaacaaggatcccaatgtcaatatgctctgctcttactcccaaagctgtagctaattgttgtcctcctaccacttaagcaccagctaataatgtagcaaatcctctatttaaacctttgctgaggtgagcacctttttaattaacaacataacatattatatgttaatgcattattctttaagcactcttatactttggtcattaattattttattacgagcaatatgtatacgatgtctgaacttacctacactgaattcatacactatcaccact

SEQ ID NO: 203951 - DNA, 330 bp, Glycine max
  unsure (1)..(330): unsure at all n locations
agcttctcgatatattatgctcctgaatctgtctttcgtttganaagnnatgaccattggaatttctcgagagcttccgatgttctatttcgagcctctcgatatattatgctcctgaaatcgactttcgggggaacagttatgaccattttgattgctcgacaccattcgttgttcaatatcgagcggctgatatattatgcgcctgaatcggacctccggggaaaaggtattgacatttgagtttcttgagagcttccgctggttaatttcaaacttctcgataattatgcccctgaactgacttccgtgtaaaagtatgaccttgga

SEQ ID NO: 203952 - DNA, 430 bp, Glycine max
  unsure (1)..(430): unsure at all n locations
tctcgatatattatgcgcctgaatcagactttcgattcttaagttatgtccatatgaatntctccactgtattccgtgtgacaagttatgaccatttgaatttctcgatagcattcgttgttcaatttcgagcgtctcgatatattatgcgcctgaatcggacttccgtgtgacaagttatgaccatttgaatttctcgagggcttccgttggtcaatttcaagcttctcgatatattatgcgcctgaatcagacttccgtgtgaaaagttatgaccatatgaatttctccactgtattccgtgtgacaagtgatgaccattntaatttctcgatcgcattcgctgctcaatttcgagcgtttagatatattatgcgctcgaatcggacttccgtgtgacaaggtatgaccatttgaatttgtcgagagc

SEQ ID NO: 203953 - DNA, 316 bp, Glycine max
  unsure (1)..(316): unsure at all n locations
ctaagctgaagacattttcgctgccctgtgatgccatgtctgttcctatcttaagaactattgcgccgnccgttcaccaccttgaacgcatttgcacactctgatctcccaatcggagaagctgtcgtgtggtgctatacctcatacacagaaggccgtgacacttctgattccccaccttcattgtctgctaaatcaggaggaggctctgacatttgagacacatgtgctatagcaagataactcccagtggattaatgagagctactacggctgctcggtataaacatgctcttatactgtcggtgcttagcca

SEQ ID NO: 203954 - DNA, 173 bp, Glycine max
ctgagctgcagctggtaaaaactaacattcttgtgagcttagcgcctaatggccaggctttggactgcttggcattatactcattatgattctggggggggcattacttgtagcctcttgtgggtatgtaatgctgaaagaatgtagatttgaatcttacagtctgtttgttt

SEQ ID NO: 203955 - DNA, 358 bp, Glycine max
  unsure (1)..(358): unsure at all n locations
tanggatggaatacttacttgttggtgatgaacaaaagttctatactgtttcnanaaatgcganaaatgatgacccaagggctgcaaactcgtaaatcccgtgggtatggcttttgaaagggggaaaagaggtttttgaatgtaaaacgtccccccctctcgtcatttttatattttggtgcaaaggtggctcgcccaggcgagctaacctgcactttttttttttttttattttttttgaggggaacattaaccatgtcccctcccttctaatggattaacaatttgcctaacttgaacctactcagggtaaaattangcggtgaatacctatcctatatatacacctttccttttt

SEQ ID NO: 203956 - DNA, 189 bp, Glycine max
gaccgggaccttaagtcactgagctgcagctcagagaggagttttttattttataagaaaaaaaagagggaactattcatatgctccgaatgggacccgcggcgttttttgttactgttcttgggtgaccgcggttagttttatttttaaaaatggaatgggatctatgtccccttaagggggtgcccc

SEQ ID NO: 203957 - DNA, 433 bp, Glycine max
  unsure (1)..(433): unsure at all n locations
tgagccaaattcctgactcaccataaaccttgacccattgtgagaatgtcaatccttaccctcggaagcgaaaagaatagaaggaaggtttccaatcaaagagaaagcaaaatagaaaagaaggaaaattcccaatcaaagagtgggagaaagcaaaaagaaaagaaagaaaattcccaatcaaagaatgggagaaagtaaaaaaggaagaagaagaaggaaagaaagctcctgatcagggatcaaaagaaaacagaagatatgtgcagaaaggtctttggaccggacaatatctgaacaatacagaattgtcaccaaatgaacaaaaagaaggaaaggaaaccacgacctataatggtcttctccctttgattaccaaccataatcccatgcgctagcgactnttttcgccccgcactaaacaataaataaa

SEQ ID NO: 203958 - DNA, 368 bp, Glycine max
  unsure (1)..(368): unsure at all n locations
tgtganataccttttcattctcttctgcctttgccaaaatgaatcctacaaggcacaaccgcctgaatcctttttgtgtctctcttctcccttttccaaaagaacgatagactaaccgcctgaattcttttgtgtctcttttctccctttgccaaaaagaattcaacaaggactaaccgcctgaattctatttgtgtctctcttctccctttttccaaaagaacaaaggacttaccgcctgaattctattgtgtctcccttctccctattcaaagaaatcaagacgactcagtttgagaattcttttattcttccctttccctaaacacaagatatcaaggactaccactgagattcttttgttctct

SEQ ID NO: 203959 - DNA, 417 bp, Glycine max
  unsure (1)..(417): unsure at all n locations
ctgaggcatgcaagcgaggtaacnggactggttttatattttcttgttgtttatgcacaactaaagccaacagaccctagagttcgagctcaactctaaataccaagcctaatgccaaagtataaggaactggtaaatgagcaaaactgacaagtaattaacagagtatacttacctcacaaaagtgggacacaacctaccacggacaagttaccggcaccgacaaaacgcggaagcccacaagggagggcacaacgtatgagatgaagggcaaatggttacgaggctaccaaggaggttgctanggtgtgcgcatgacaggcaggaaaggcacacacaaataaaaggtaatggtgtgtcaattttcttaaaaatgatattaatttgcaaatttgcacaacgacggtgatttttaaa

SEQ ID NO: 203960 - DNA, 424 bp, Glycine max
  unsure (1)..(424): unsure at all n locations
ctaagaatactaagctggtgggaatatgtgatagtgattatgccggttatgttgatgatatacaaagnactaccggaattgcatcttttatgggtgattgtgttattacatggagttctaagaagcaaggcatggtgacactttctacttgtgaagccgagtatgtagctgcaacttcttgcacatgtcatgccatttggctaagaagattgttggaggaacttcagttgttgcaaaaggaaagcacagagatctatgttgataataaatctgcacaagagcttgccaagaatccggtgttccatgaacgaagtaagcatatagatacacggtatcatttcattagagagtgcataccaagaaagaagtagaattgactcatgtgaaaactcgagatcaatttgcggatattntcaccaagcct

SEQ ID NO: 203961 - DNA, 313 bp, Glycine max
  unsure (1)..(313): unsure at all n locations
gatccttanatcacctgcggctgcaagcttgcttgagcatcagaaanatttaattgtaccctggcttgagtttcaaaaaacgatcaatcatcaattctcaatcttctttgaatcatttatctttacatcatcttctttcaacatccttgaaataaatgttcaacatctctcaatatcttcgttcatcttcttcaccacttccaccgaaacttctaatacatttctttcctcttccaaaatttttgtcaccactcttattccaaaaaattcttggtcaaaaccgggcctataacttttcattcctttccccttt

SEQ ID NO: 203962 - DNA, 433 bp, Glycine max
  unsure (1)..(433): unsure at all n locations
taggaacccanacttgtagctacaatgcattgaaacattcttatggctaggaatcacaaaattggttttaggattagaaaagcatgataatagggatttgtttgtaagaatttgngctgccccatgattggtactttgcacctatgtaacgtgggaaatgcttttcaatgatgtgtagatatatgtgtaaatataaagggcatgaaattctttgtaaagggtgaaggaatattgaggtcccttcctaaatgaatgtatgatagcacgggattcccttttgaatgcangtatgtgcataatggtatatatcttgccaatatgcgtaagtgtatgtgaaacaatgacagtttgtatgggatatatattttgagtgtgtgtagggaggtttgtgatagcaagtgtttaagacatagtatagtgtaaattttgacgc

SEQ ID NO: 203963 - DNA, 338 bp, Glycine max
  unsure (1)..(338): unsure at all n locations
agctntaaatagactctaaattcgcgacgttgttcttagcaccaccctcgtgcttagcgcgagtaagtggattcgggcttaacgccagtcgggcgttgagcctggctgaagacacctgttgggcttagtgcactaatctcgtgcttagtgcatgaccttgaagctaaagccctaccaaatcttctatcgcgccaagcacactgaaactgggctaaccggtggatgcatagttagcccactgatgagctaagctcaactggcactttttgcacttcatgacttaacctctttttcaccctaaaattgcccatatttcattatttaatccaatggacata

SEQ ID NO: 203964 - DNA, 462 bp, Glycine max
  unsure (1)..(462): unsure at all n locations
ccgcttgtgtaattgattacactganttggaaatctattatcattgattgtttctaaataaatcaaaagatgtaactcttcatatggttcctgactccttcaaattggttttaagtttttctaaaagtcataactcttctaaatggttctcttgaccagacatgaagagtctataaaagcaagactttgatttgcatttcaagtatcttaaacaacctttacaatacaatcctttacaacctttgaatctctttgaacttcttcttcttcttcttcttcattgtgccaaaaagctttccaaagttttctggttttctaaaccttgaaaacttgtgctattcattcttttcatctcttctccctatgccaaaaagaattcgccaaggactaaccgcctgaattctntttgtgtctctcttctcccttttccaaaagaacaaaggactaaccgcctatattctt

SEQ ID NO: 203965 - DNA, 344 bp, Glycine max
tccaataaatcttacatgactaaataagaccaacatactcataattacaaatcaatacaaaaaataaattaacccctctacaaatcctaaaataaaccactttaaaaaatgtgcatcttattcaaagtttcattttaaaaaatagatcaacttaaaaatatcaaaattcaaactaaacatgttgatcaatatgaaaataagaacatccattatatattttattctataattagtctaaattagagttaacaagaagccagaacaaagaaactaccaatagtttaatttttttatatcgcgtatgctaatagattaataatttacaagttatttttttttcaata

SEQ ID NO: 203966 - DNA, 428 bp, Glycine max
  unsure (1)..(428): unsure at all n locations
aggagctcttatggaaacaatatatgatgcctagtgcatcatcctgnggagcgacagtgatgttagttaagatgggaccatgaggctatgtgtagactattatcagctgaacaaggtgacgattaataataggtaccctttgcctaagatagatgacatgatggaccaaatagtgggggcttgtgtgttcagtaagatagatctcaggtcaggtaccaccatattagagtgaagtctaaggatattccgaagacttcctttaggacccattacgaccattatgagtacttggttatgcctcttggtgtgaccaacacccatggagtgatcctggactaagtgaataggatctttcatccctacctagatagttttctagtggtcttcatagatgataccttggtgtattccaagactatggaggaaca

SEQ ID NO: 203967 - DNA, 324 bp, Glycine max
ctgcagctggccttcttacagctggatacgtactctcaaaatcgaagagaaggttcagcttcctgaccttgacttttctcctctcttcctcttccaccatggccatcgcacgatccgcgttcacattaaaccctctcatcacacactaaccctctcgacatcttctcttttctttatttacaaaaacttcatcccctttctcacaattaattccgcgccaaataacctaatcctaaaccgaaatcttatatcaatccgaatgcttttggttttccagtatttgcgatcggtataatcaaaggacgccgtccggaaaaaggaaca

SEQ ID NO: 203968 - DNA, 429 bp, Glycine max
  unsure (1)..(429): unsure at all n locations
tagttcatgtctgtttttgaattctccctttaagcactattacacagttattttntttaaaaaaaactatacaaacctcccctggaaggaaagcctagtggaaaataaagaaaaatctaggggatggtgttgaattatgattggtctcctttgtgaactcgttttaaataagaagtgagggattcaaaccattaattacaaaattaatacatttctttatgataaagtaaacgtttataccataacagactatgaatttattattctgatatagtagtatgtagtattcaatattcatcagcaagtttattttttttttttaacgaaaggttccaccgattggtagttagaaatttatggtggaagctgatttatcctgtgctgtgtatttcgtggtaactaactcgctatccaagttagcatcattgt

SEQ ID NO: 203969 - DNA, 228 bp, Glycine max
  unsure (1)..(228): unsure at all n locations
catgcaagcttgcccggtgagctgatgcttagntctgaaggaatgagctcgcctatgcaagctggntgcttaggcatgaagctatttcatggcccaggcgagccacatgctagcctaagcgagctagggtctaaaaaaatccaaagaaagaccattttgcccccttccattgtatctttttggtttcttgatcaaaacactgagtgattccttgctttgcactggaac

SEQ ID NO: 203970 - DNA, 455 bp, Glycine max
  unsure (1)..(455): unsure at all n locations
ttattctatctacccgtagtggtccacattgtgtttcgtgcattattattctcgtttgtgtactatntataccccctgttgacgtgcttaagccattttacttaagtcatttctcgcttaacttaaaaataaaataaatttccaccgaacgtttgaattgtattatccattaacttcggttaaaataaattccgaccgttcggtcatgccgtaaccacgttggaaataaataaaaagaggtataaaataatataaataatcaaaaaaacatctttgagtaaaataaagcggaaaatcaatcggacgttttctctttgggatttctcattcttaatcgaattgattaataactaatgtgaaactaaggctaatatcaactcgcctagtcaagctcgttcacaaaaataggctttcggagttcgtcatttcaatttctcactaagtaaaatggatca

SEQ ID NO: 203971 - DNA, 315 bp, Glycine max
agcttaataagtacatctatggattgaaacaagcttcccttcaatggtatttaagatttcatgaggtcatttcttcatttaactttgaagagaatgtcatggatcactgtatataccacaaagtcaaggggagtaagatttgttccttgattatacgaaaagatattctgcttccaccaatgataatggtatgctatatgaggtgaaacaatttctctcaaagaactttgatttgaaggatatgggagaggcatcttatgtcataggcataaagatccataaagaaagatctcgaggcattttatgcttgtctca

SEQ ID NO: 203972 - DNA, 428 bp, Glycine max
  unsure (1)..(428): unsure at all n locations
tcattgtaagaaatgtnggaagcacttgtagcagatgacgagagtgatgatcaaaatgacggcgacagcgatgaagtctatttcattgaatgccttgggaagagacggcaccgtgaagcgccatttggcggaggagattccgattgtggtgcctaggtatgccgtcaagcctctggcgacggtggcattggaaagcacggaccataggtgacgcggacgtagctgaaggcgcccctggcgacgggcatgtcgacgacaaactcggtgtagcagaaggcggagaggagggcgcataagccggcaatggcaattaaaataagagtaaacaccaaattcaaattaaatactagtagtatattaaaatatcattaatttatctacactatccatccatttgaaagtaaaaatcttttctatttcacctacaa

SEQ ID NO: 203973 - DNA, 344 bp, Glycine max
agctgcagcttttatttagagatgcagagagtttgagctatcttatgcctcctctaaagactatagcatcatttctggtgctaaactgctgggagttggaagccatcttctcaattaactttctggctttagtaggagtcatgtctccaatggctccaccactggcaacatctatcatacttctcttcatattactgagtccttcataaaaatattggagaagaagctgctcccaaatctgatggtgagggcaactggcacataagtttttaaatctctcctagtattcatataggctctctccactgagttgtctaatacctgagatatcccttctgatggtt

SEQ ID NO: 203974 - DNA, 481 bp, Glycine max
  unsure (1)..(481): unsure at all n locations
gacactatcaaactaagctntaacaagtttcttcacaaataactatcatgaagcagattactagctttactacccatcatatctcccaaaaccccatacccacgaaatttaagagagaaaaaagttcacccaaacctgaaattttgaagtcccactcgtagccacgcacttcacgactccaaaaacgccctcctttcacgatttggggcataaatgatggccaaaggttggagctttgttggggtttcaatggagaatggaggagaaggaaaaagcaacgtgaggaagagggagagcttctgaatttttctgctttggctgagtgaggagagagaaaangcttttggtttttaaataanaagagtattctctttttctattattntattataaactatgccacatgtctncatttgagtggagcaaaaagggcccacttttccttttggactgtgacccatactcagccacaaaagtgaga

SEQ ID NO: 203975 - DNA, 355 bp, Glycine max
  unsure (1)..(355): unsure at all n locations
agctttacagcagaattttgtattgacctttctacctaaaattaaaataacttattgccattaacctagggaattaaaaaaaaaaactaatggctggaggtaactgaaatgtggcaccaaaagttaccccaacagccaacaagtaggcccatttggtctcccaaaggatgatgcctaaggtgccaattaggcccttattacaatcttgaactanaacctaacctaaagcccgttttagttgattaacccacaacatatttttggtcatccaactttacaaagattggggcattatttatacaaaccatacactctaaaattgaaacaaagtggggtatttattccttcttcattt

SEQ ID NO: 203976 - DNA, 396 bp, Glycine max
ttgaaccatccgtcccatatgagcccaactttgcaggattattgggtcaaacaaaattttgatgaagctacaaaggagaactatggtataggaatgggcttaattgtagaaaccatcacggtgagatcctatgggttgccatgagcatggtgaaccattgttatcgaacacacatggcataagctgtagctttcaaatgggccttatagatagctaaggacctctttttttttttattttttgacattgtcatggaaacagattgcttgaagattgtttatacttggcacaacacacggaagttttcaacttcctattttgaaggcatcctcgatgatcgtagagagctgcagagtataggttttcatacgttcaaaatgtctcttgtaagcatac

SEQ ID NO: 203977 - DNA, 409 bp, Glycine max
agcttggttcgaggtacttacccgttgaatatcgaagaacgatgaagaacgaatgaagaacgtcgaagaacggttcaaacctttgcgagattcctcacggaaaacgttacggaaacgtttcggaagcgcctcggcttagattttcttcacggaaaccaattttccaagcaaattctaaagagagagaagtgcctaaggggctggacccctttcttcttcatttcctcccctatttatagcaaaataggggagggggttgccgcccagctcgcccaggcgagcagggttgcttcctccagaagcaaccgccttctggaggaatcttctggagggcccaagtgggcctgggtgctattgcattccatctttactaagacacccccctctgctggtttggggattctttttc

SEQ ID NO: 203978 - DNA, 442 bp, Glycine max
  unsure (1)..(442): unsure at all n locations
ggcanaagaactcatctncagattcttcatcagaggagctgtccattgtggttntaaaaaagcttataaaataagaattccccaagcattttccatcttttggctnttattttagcatgagccctatcataaagagcttcaacaagtgactctgtggttctgagcagtgttttctcaagaaaatgtacatatttttgggatggaggaggaccatcatagacttccatggcggtatctttaatagtagtaggagccttataattagaattcacttcttcaataatgggttggacttgatgaatgaaggtgaatgtggagtttggaagctctacagtgaatgagaaatttctctcagacacaacaacaaagtctttcttccattgacaaacgcaattggatggtgaatcaaccaccaagggattacgattgatagtttgataac

SEQ ID NO: 203979 - DNA, 337 bp, Glycine max
agcttgagatgaggaagtgttgaagggttatacttcctgcttttattgttgaccacagagtggtacctggagatatgtcgcgggggtcaggagaccttggggacgtcaggtggggtgctattgcccaaaaccaatcttgaccaatcccgaccaacccgggcatattcggcaatgagaacctgtgattgtccctaacaggcgagctcctggcagtcacagataaaggaaaacaagaccacaatcaggaggcttggggggctggcccctggaattttgtgaatatggaatatggctctggaatcattaccaagggggtaatcattcacgcttaaaataa

SEQ ID NO: 203980 - DNA, 364 bp, Glycine max
ctattacgtgacacttgaatctcatgctcctaaggaagattctcatggcatcttctttctcaaggatacttctcaaggaagattctcaaggacgtgagcttagatattagagacgtgtgtgtcgctgagatatagcttctacaggaagtttctcaaggaagctacctaagctataaatataagcatgtgtaacacttgccgtaatgctgatgaatgagagtcttgcgagacacacttcaaagctcaacttctctgcctctatcactacttgaatttcgtgcaccctactatctctttctctctatctgtcctttactccaatgaaactggatgtctaagcttcttattcgatgcactctcttgg

SEQ ID NO: 203981 - DNA, 411 bp, Glycine max
  unsure (1)..(411): unsure at all n locations
acttncagattggnataccatgctacagcgcggtccggccaaatctttatgttagaaanggaccaacagcttttcgtccgtagaatacgcccccatctttcggctatacatccgaagatgcccttatggacatgtgtgccctttgtacttatcatagaccggtaccttgaactcgggagggatgacgatgttgggcacgagacataaatccgttaaatccgagaacggataattgtcgaggaccttgactgctcttaacctctctataagcgccgtcatcttatccttatcttacgcgaagggaacagattctattacgggtgcggtcaagacaagacatggaagattatgttaggttggcgaagccatggggggatggatcattgaggaggacatggggccgagaaattc

SEQ ID NO: 203982 - DNA, 327 bp, Glycine max
  unsure (1)..(327): unsure at all n locations
agcttacctttcatgatgatttataaatgtgtcaaagatgtgtggctccgagacaaagaagaaggggagaaaccttcgcggaagagagacatcatgggtgagttggggaaggtgatgttaatttcttaagggaaatatatgatacaatcctcccaaggaggggacccatcactatagccatgtctaggagactccacgaagattgggctagggatgcaggagaagatcctaaggttctcttgagccttagggtagattttgtgtccatgagataagtttgaatccacttatctatgcacatattatattaaggttntattatttttt

SEQ ID NO: 203983 - DNA, 449 bp, Glycine max
atacgcttgtggagggtgactatgctggaactggactatttctatgtatgtgaaaaatatatcttttattttagagaacaaatttgctcatcatgctcttctgatgttgtagtatgatgcttgtgataattactatttactagctatagtgcttagttaacaatgaacataatttacggtgtacatattcagctcaatgcattgagcttttctcaagtgcagacaacccgatttgcatcaatgaattgaatattaccagtttagacatcatggagattcctatttgcttatgtggctccatctcatccactggatccactgtatatgtgctcatgttatcctgatttgatttgccccctgtgccaccttgccactccaatttcttattattcaattctcctccttagcattttaagaaaataagatttctttctgactgatgtttaatt

SEQ ID NO: 203984 - DNA, 385 bp, Glycine max
agcttagagcctcgggtagttcattaaatatcttgttcatttcctccaagctcatattttccaaaacggagggtctaggggcaaccctcacaatttcactaccttttggtttctgaactcgtgcggtggctttaatgactagttcggaattagagtttgcaccacattttattataaatggtgaggacgagcctgtattaaattggagtacattccactgtgcaacgtcagttttagatccagagcccagatctgttgatggcttgcgaccatgagaaatatcttgaatgggggcatcttcttcacgaattgactgtatgataacacaataaaagatttgggcatcaaagaaatcaatccaattcattttcatcagggcagttct

SEQ ID NO: 203985 - DNA, 441 bp, Glycine max
  unsure (1)..(441): unsure at all n locations
tcttcttgtttcttcccccatttgagaacatacatttttttattacctcattcaaaggttctgccaatgaactaaaacccttcacaaattgcctataaaaacttgctaggccatgaaaacttctcacctcggtcactttttggtgtagaccactcttggatagccttgaccttttcttcatcaacttgaacccctttggaactcactacaaaaccaagaaacacaacatggtctttgcaaaaaatgcatttttcaaggttagcatacaattgttccttcctaagcacacacaacaccaattttaagtgtggaacatgcaaatcaagggttgtgctataaacaaggatatcatcaaagtacaccactacaaatntaccaatgaattctctcanaacatggttcattaatctcataaaagtgcttggtgcattagtcanactg

SEQ ID NO: 203986 - DNA, 267 bp, Glycine max
  unsure (1)..(267): unsure at all n locations
agcttgcctgcaccaaacttttctnaatgttttgtgttagagggccttatggaatcaagaggtagtttggcccatcccgcctgttacatgctacttggaatgaatgcttctaatcccaatgaagattaagacttgtgtccagcataagttggaaatcaaaaaaagatgtttctgtnttgcccctcttgaggaggaggagtgtcttactgttttgctcgatgatggagaaggaggaccttgagttttgattctaatttgaaagatctc

SEQ ID NO: 203987 - DNA, 457 bp, Glycine max
aaacatgttggaaaagtatacccatcttcatattccttatttcttgatgagaaagatattctattaaaattctttgcaagtccaaaacttgcattaaaatgtaaactcttgttttatattttgtcttttcatggttatgcttagtgttgaagcatttgacaaagtaacaacatggtgttttatgccatgttaagatgtcacacattggactggaatatatggctataatactccttataagactttgcaatccttttcccttgaactagcttttgtgagtgagttatgccttgcccgtctctacccagtcttaatattgagtcacacgtagatgtctagtcatgcatacttcacagttcacagtctatatgcccaatcctgaacgtgagatgtgtgtattgagatgccacacattggctaggaatatggtcatgttagagatggcaatccttatctc

SEQ ID NO: 203988 - DNA, 267 bp, Glycine max
agcttcattgcctaacaagccaacttacattatttagccccaagagactcagcataaggatgcacaggtcaaagttgagtatgtgaaaagatggtatgaccaagtgaaagtgcaaaatgcaaagaagaatgaaagttatactaagcaagcccacaagaaaaggaaggaagtggtacttgaaccccgtgatgatcctggacatttgaggacaaatgttttccaaaaaagagggaatggccccgtctgtgggaaacggattgtttgata

SEQ ID NO: 203989 - DNA, 432 bp, Glycine max
  unsure (1)..(432): unsure at all n locations
tctacttatgtggcagggcgggcttccttcactatcttgtctccaacgctagttntgaccactgttcttccttcccgcgatgcttcttttcatgtccgcctgagtgggcttatagcctaaaccatacttcccacgatttccttgggtatttatcaggctagttatgccgccgttgtctttgcctaaacccatcccgggttcataaccgttccccaacataactcgggccatcattaccgctgcatcgaacagacaaggctgcccaaagagggagtccacggaggaaatgctgaccacctcataagtgatgaggacataaccaagggcaaggaccatgaagcacttgaaggtcccatgaccagaggcagacttaaacaagcccaacacgtcatagagacaatgctggtcatttgtatagctgccattgatgat

SEQ ID NO: 203990 - DNA, 466 bp, Glycine max
  unsure (1)..(466): unsure at all n locations
tgtttaaagacgtncttgattaattaattattntaaaacctactgaattattaactaanaaaagaaacttataaaatttcgtataagtaatgtacaaatcaaaaaataattgataaacaaaatcatattgaatttaagttgttaaagcacaaagtatatcaaaagataataaaaagagcataatattaaaaaatgtatggattaggtcctcgaccccaaagtttacaaatctattttaagtccaagcccataaacgaaataaaataaaatcttgacaaaataagataagattggacgaaataaaatctagatggaataaaatctggataaaataaaatcaagatggaataacatccggataagataagatttgataaaataaaattattattattattatttgttaaacaaaccgcttgtcaaacttaacaagcttttttatagtttgaacttggcattttatcta

SEQ ID NO: 203991 - DNA, 259 bp, Glycine max
agcttgaagagctacaccaccaaacttgtttttccaacttttaacctctatgccctctttctttgtcataacgacttcttcacagaattaaataaaacaccgaacccccaaacccattcgttcccgctatatccaacgataacccaatggggggcccctctccttccatggcaacaaacctaaattcctttgcagctacggcgggaaaatccttccccgtttccccacaacaagctccgttactttgggggccacaccc

SEQ ID NO: 203992 - DNA, 414 bp, Glycine max
  unsure (1)..(414): unsure at all n locations
gcttgagccataatcctaactcaccataaaccttgacccattgtgagaatgtcaatccttaccctcgaangcaaaaaagaagagaatggaaatcttcaatcaaagaanaaaaaagagaaggaaaatttccaatctaagagaatgctaaaaaaagaaaagatggaatatttccaatcaaagagaatgcaaaatgaaaagaatggaaattcccaatcaaagaatgggagagagtaaaaaaaaaaaatgatgaagacggaaagaaagctcctgatcaaggatcgaaagaaatcataagatatgtgcagaaaggtctttggaccggacaatatctgtacaatacatgaattgtcaccgaatgaacaaatagaaggaaaggaaaccacgacctaaattggtcttctccctttgattacc

SEQ ID NO: 203993 - DNA, 475 bp, Glycine max
  unsure (1)..(475): unsure at all n locations
gtctcagtgtttatgcgagacgaagaccaacatgctagctatcatcaccaagtaccaagaagagttaggtctagccacggcccacgagcataagatcacgcacgagtacgctcaagtatacgcgcaaaaagaggctagaggaagggtgatcgactctttacaccaagaggcaaccatgtggatggatcggtttgctcttaccttgaacgggagtcaagaacttccccgcttgttatccaaggccaaggcgatggcggacacctactccgcccccgaagagattcatgggcttctcggctattgtcagcatatgatagacttaatggcccacataattagaaatcgttaggaaacttgtatggtctatcagaccttgactagatacgactttctttttgaaataaaatgagttggtcccatgtttctactccaataaactcgtgcanatcatatcactcctacatttcatctatag

SEQ ID NO: 203994 - DNA, 417 bp, Glycine max
  unsure (1)..(417): unsure at all n locations
agcttgttcataaacgtgcatttgtgtgctatacacaattcccggnacaccacaacaaaatggtgtatcagaaaggcgtaatataactttaatggatatggttaggagtatgttaatcaattaaactttacccatatctttgtggatgtatgccttgaaaactaccatgtatttgttgaataaggttcctagtaaggcagttccaaagacatcttttgaactgtggacaaatagggcacctattataaggcacctgcatgtttggggttgccaggtaaaaataagaatttacaatccgcaagaaagaaaattggatgcaagaacaatcagtggatatttcattggttatccaaaaagtcaaaggcgtatgatgtttattgtcctaatcatagtatgagaattgtcgaaactggaaat

SEQ ID NO: 203995 - DNA, 433 bp, Glycine max
  unsure (1)..(433): unsure at all n locations
tttcatgagcacaatgctcatatgggtgtattcctaatttataataccttagtttagtgagagtcttgtttatgttctatatcgcattgtctctatatattgtattgggtggattttttgcaaaaataaagttgatgttttccattatatcatgagcttgttntgtgtgaaatatttatatgttgcattaggattgatctttatacagaataaagtttggacttgttgaaaataaacatgattaagatcacattacagtaattntaatgtcgtttatccatatttgatctatgtcatcatgtacaagtgactgtggtaatcatcgtggtttagtcacgttaagttataatgaaaacacaatggttccttgttgttatatgagatggatcagattgtttgaagaggagtcctaaagtaaataacatatgattgg

SEQ ID NO: 203996 - DNA, 464 bp, Glycine max
  unsure (1)..(464): unsure at all n locations
tgggggtactatagctgcactaaatagatgttgtggtattcttatgcagatgcaatgcagtagaagggggtaaagacaatatattactatcattatatgaaatagactaggtaatactaagaacagaatattactagcatgaccaaaaataatatagccgctgtgtctaataacataacaattgtctcatatataggaaaaaaaatactcctacgccatcattagccttattacttattgctgantttaaaaaaaatggtgcccatttctttcgaattgtggtgatgatgtcgatgtccaacggtgtgtcattagcaaaccactgcaagtattcataattgatagttagtactgcatatataaataatcagttccaattgcactgaatgttatgcataccatggaccagtcactctttatgttgctgttatgatgttcagatcaatgcattatgaatatccaca

SEQ ID NO: 203997 - DNA, 334 bp, Glycine max
  unsure (1)..(334): unsure at all n locations
agctnntttcaatttaaagacatgantatttttttctgatttttcaaagccaggaggctgatccatatatacttcttcttacataacaccatttaaaaaggcacttttaacatccatttgatagagtctaaagtccattttggatgcaaaagctaataacaatctaatggcttctaatctggctactggagcatagggttccccataatctaatcctccttcttgagtatatccttggccacaacctagccttaattctaattactattccatgttcatccaatttgtttctgaatacccatttgggtcctataactggatgattattggattt

SEQ ID NO: 203998 - DNA, 420 bp, Glycine max
  unsure (1)..(420): unsure at all n locations
tgtganaacaaanaagtgcaacacatttgatatagnttatatgcttctgtaattggctttagtctcgccagtagcaagtgcaagtgtgaaacgtgttttttcagctatgaagtttgtgaagagtcaactatgttacaaaatggatgatcaatggttaaataatcgtcttgtaacttttatagaaagagatgttcttggaacaatcaacaatgatgttatattagctcattttaaaaaatggatagtagacgatttttattgtaaatacacttccttaaacaacattatttcttattttccatatattttagtctataatttctttatatttttccacactgatatttattgtctggatccgtccctgacgctcggtaagctggaaaataattcgtttgattccaacatggtttatgttat

SEQ ID NO: 203999 - DNA, 323 bp, Glycine max
  unsure (1)..(323): unsure at all n locations
agcttgacaaaattatggacatatgtcttgtcttcangggttataatgctctcgggatgaaactgaactccctggtgaaaaaaaaaatcaatatgtgaagagaagagaagggagacaaagtgcaagttccaagattataattattacaataccaacagacaaaaggcctgaacttcatatcagcagaatcttttactgcttactaggaataaatgaggtaaaaggtttaatattgattgtaagcaccttcagagtagctaagtttcctaattttaaaccagcataaaatttaagattttgccctgtaaagtataacactaaaa

SEQ ID NO: 204000 - DNA, 466 bp, Glycine max
  unsure (1)..(466): unsure at all n locations
ttgtgtaatcgattagactgatgtggtaatcgattaccagtgattgttttttaataaatcaaaagatgtaactcttcaaatggttttttgaccctttcaaactggttttaagtttttctaaaagatataactcttctaaatggtcctcttggccagacatgaagagtctataaaagcaaggctttgatttgcttttcaatacacttttccaatcaatcttatacaatcctttacaagccttgaatctctttgaacttctttgttagacaaatggcctcagttatcttaagaaggggggggttgaattaagataacaagaactattccccaatttaaaattccgctctctctttttagattaacaatgcacccttaacatgaattactcaaaagacaattcagaataaacttctttaaaggcanaagataatagcaataaataaaagaagttaagggaagagagaaa

SEQ ID NO: 204001 - DNA, 322 bp, Glycine max
cgttccacaccactagataaaatatacatgagatttatttaaaaccaaagaatacttttcaaatttggtaactttcttgttcctgaatttgtgataaagggctagtgcctttctgttcaagggggcatataatatacctggagaaaactcatttcagaataactaaacctaagcttgtttcttatatgtaaacctaaatgagggttatattttatgtgaaacttattataagagaatgaattgcggacgcgacaatggccttgatggggttgtgttgcttttcgtttctcctttctgaaaataactaccaacagccccattt

SEQ ID NO: 204002 - DNA, 416 bp, Glycine max
  unsure (1)..(416): unsure at all n locations
tactagcttaaagaggaatatataaagataaacaatgagtattggtatttcgagaaatcaaactggcatattcaaccatgttaaacacttggacgaagaactctgttgctcatattaattntatctgactcgatagaattgattccaagtgtagtgtaaacaaaaaagtaaaacttacatatccattgatttcaagtgtagtgtaaacaaaaaagtaaaacttacatatccatattttatttccaacaacttacctaattaactcacggggactattatgcttttatgttttcctactaatttttaacttcagcaggttaaacataaaaacaataaaatctctaaattataaaatatagataatgtgaaaataanatacatgatgtgaatctctataataaaattagaggggtatt

SEQ ID NO: 204003 - DNA, 409 bp, Glycine max
  unsure (1)..(409): unsure at all n locations
agcttctcaaggaggtgagtctttttattatgggtgngngtagctaagctctagcttctcaaggaagttntctcaaagaagcttcttcaggaagttttctccaaaaagcttctcaaggaagctacctagtctataaatagaagcatgtgtaacatttgttgtaactttgatgaatgaaagtcttgtgagacacaactcaaagttcaacttctcctcctttttcttccttcaatttcgagctcccccctctctctttctctccctctttcttttcctccattgaagcatcctctccaagctttttatccaaggctcatcttggtggtgaatctccttcttcatggcttattccctagtggatggcgcctcctctcacctcttctcctttgtcttccgctgcatatccatg

SEQ ID NO: 204004 - DNA, 467 bp, Glycine max
taagcttgtaaagaagaaacaagatgataattccttttatagctagaatatcatttccacctctagaccattagaacttttatatcttgatttgtttggctcaagtagaacaacttcactatgtgacaaaggtatggggtgattatagtgaatgattattctaaatggacctaagttatgttcctagtctacaaggatgagtcatttaatatcttctttaaattgtttaaaagagtttaaaataaaaaagatgtatgtattactttaatcaaaagtaatcatagaggagaatttaaaaataaaaaatgtaaattgctgtatgaaaaatataagaagaatattccatttatctctctagtatctaattcaatctctctatattatcacatgtaaacaatctgtcaataaatattttaaagctgcatcattaaaaataaaaagtataacttgtcaaattaaattataga

SEQ ID NO: 204005 - DNA, 367 bp, Glycine max
taagcttgtctaaagagatccttgaagatattttgctaaaggaaccagttccgcccccgaatatgacagccaccgttttaggaacgctgagcaccagcagtgctttgaggccatcaaaaaatggtcatttctccgggagcgacgcgttcagctcaaagacgacgagtatatcgacttccaggaggagatagttcgccggcagtgggcattactggttacccccatggccaagttcgacccagacatagtcctcgaatattatgccaatgcttggcctacagaggagggcgtgcgagatatgcgatcctgggtgaagggtaagtggatcccgttcgatgctgatgctcctcacccgttcctgggatac

SEQ ID NO: 204006 - DNA, 429 bp, Glycine max
tgaggagtccagaccttcgcgtccaatacagtctcaatttatctcgtctatagaccactctagtaagaaaaagtgaaagatagatcactgagcaggctacataggatccgaagcttagggatttaagtgaaatagaggatgataaccctttgataatcccaaggaagtgaatagcagaacaagataaaccaaagaagtagaggcctgatcaaccaattatcacatcctcttttccaaagaagagaaagataagacctagatgcaagtccttaaccctaaaggaacccattaagatcccatccttcattgtctcttgttcgtctgatagtgaggcaactccaactcccactccacattcatccagtccaccaccagtgtagaccaagaagcctacatatccaagtttccattgctgggatccacatggag

SEQ ID NO: 204007 - DNA, 394 bp, Glycine max
  unsure (1)..(394): unsure at all n locations
agcttatttgtaaggatgtattttaagttttntttgtcncaaataccaagataacttatttattataattgatgacaatcttcactataaatagagaagagaattagtggagaagaggcccatgaagagagtgtgtgagaagagagattctgaaacaaaaccactttgttgagagaaaaatatttttctgtgagagtgttatcattccttgtaaccattgagtacggtactcggatttgtagaatgatacactatttggggaggttacaattttgtatcatttttgtgatagaaaatacttttgagacggtccatgtattaggcaagatgtgcgaaccatggtaattcttggtttttataatttttctacggggaaactttattggtctcatga

SEQ ID NO: 204008 - DNA, 257 bp, Glycine max
atcacagaaaatgtgggagaaatataggtggattaaaatcttccccacataaacctggaggaaccattctgtaattgaaatactatgaaagcttatgacctagaccgattattatgctttccatgtcgaagtggaagtgaatcatccattgatacttacatgtgacgtatacaacctatggtatggatgtctgcaagaacatttattgcacgattgggatgtttggaataacatctgattggagcatctgacgacta

SEQ ID NO: 204009 - DNA, 356 bp, Glycine max
  unsure (1)..(356): unsure at all n locations
atgtgctactcattgtttagaaaatcgtttctagcatctttattcttgacttgaggtcgttattcttgaattctctgaatctctgatcttcgatcatccttgattcttgattctcgattcttgaaactcgactcatgaatctttgcttgaaactttgcttgactcttgattctttggcatcaacaaattaaccttggaaaatattgcttccactttgtttgtacaaacactatttgtactatttgtgataatcggtgagatacatanaaagaaaatgactacttttatagatggagatgtggaagacattattatctaccctgattcttatacacatcttgataatatactcttct

SEQ ID NO: 204010 - DNA, 143 bp, Glycine max
agcctacccttatggcttgcctccggacttcactcctggttccgatacacatgatttgagcgaagctccctaccttcacagaggcaactgcctccttatgccgactatcctcttgaagaaagggatgaaggagatgcccattt

SEQ ID NO: 204011 - DNA, 206 bp, Glycine max
caatgcgagcataggatacagacccttaaggacatattatcgaccgctccagtgctagatttgcctaaccccagagaaccctctgaggagtattgggatgcatcaaagatgggtctaggcgaagtgttgatgcaaaacggcctatagtgggcctatgcctctagacagcttaagactcatgagatgaaatatcgcccccatgacct

SEQ ID NO: 204012 - DNA, 245 bp, Glycine max
cacgtgggaaaaacccacacctaagggagagatcgcccgacgaataatgtgaggccaagtcccacattggataaaaaacagaaagacaagcaccatgccactgaagaaaagacctataaaactacgactgaagggcttttattgtcagttaaagcgtgctgtcaagaccatttgtgcgacgtgcttaaaacccataggagaagattcctcgtgtgtctacccccctccatcgcacaaaaaaacga

SEQ ID NO: 204013 - DNA, 441 bp, Glycine max
  unsure (1)..(441): unsure at all n locations
acactataatactcatgcttctccctctnttccctatatatagggagaggagggatgatcatanacgtctcaaccctcctggtatctgatgatcacttgaaatcattgaaaaaaaatcatttccgtgaagaaaatccacaccgaggcgcttccctaacgcgtctgaaacgtttccgtgagtgattccgtgaagatgttcccgccgcctttcggtcgttcttcggtcttcaaccggtatgttcctgaaattgaactttttaattcattctatgtacccttggtggtacccacttgttttgcgcacttctattttaatttatattctttccgtacccccttttgacgtgctttagtcatttatttaagtcactatctcgcctaatcaaacaatgaaatatatttccaccgattatttgaattgccatttctgctaatttctgt

SEQ ID NO: 204014 - DNA, 419 bp, Glycine max
  unsure (1)..(419): unsure at all n locations
agcttgctagagctttcatcacaagatgcattgttgtcacaaaacaagttgttgtccaagcaattggaagcattgacagaaacactaagtaagctgccaactcaattaaattctgtacaaccttcaccctctgctgttttgcaggttgcaggttgtgtcatatgtggtggagcacatgagtctggctgatgtatttcccaagaagaaacaccacatgaagtcaactacatggggaatcagccaagacaaaatttcaatgctggtggatattttggatttcagcatggccagccatataattcaccacagggacaatggaggaatcaccctgnaaaccagttcaacaaagaccagggtggtccttctaataagccacaacaacaagggcctagtctctatgatcgaacaacgaagctgga

SEQ ID NO: 204015 - DNA, 453 bp, Glycine max
tgtaatcgattaaaccaatacaagacataactctgcattcttaaaacaatttgtgtaatcgattacgataaggctttaattgattaaaacagagagtgttgccttctgaagaaattttcttctcactcacacatgatgatgcatgatgcacaaatgatatgatatagactaagatgcaacattcaatataacaaccaatacaaatgccactcaagagagttggacatgtaaaagacaaaacttcttcaagctcttcttcaagcttcaagattaagtcttcatgttgctcatgttgctccccctatctctaacacctccaaggtcgcacttttgtttcaatagcttcacattctcatcgctgcttcctctaattcccttctcaaaggcctaagtcgttgcagctctcaccatggcagttatgtgccatggtagttgcacatcatcgatgtttga

SEQ ID NO: 204016 - DNA, 421 bp, Glycine max
agcttctcgccatgactgttggattaaggttatttatgtttatttacaggctctccagtcaaacaacacgtggagactcacaccttttcctcctcacaagacagctatcagatggatatgcatatatataaaatcaaatatcgggcagatggttccatagaaagacacaaagcgcgattagttgcaaaggggtacacccaaatggaggggttagattacctcgacacattgtctccggtagcgaagctcactacaatccgtcttcttcttgcattagctgcactcaaccgatggcatctacgatagctggatgtcaacaatgcatttttccatagggaacttgacgaagaagtgtatatgcaaatcccaccagatctttcggttgataatccgcagcttgtatgtcgtcttcaacgggctc

SEQ ID NO: 204017 - DNA, 440 bp, Glycine max
  unsure (1)..(440): unsure at all n locations
actataatactcatgctngctagaatataggagtctggtttatntactctaattttctgcatgattaccatattaaatgcaggctgcttgaatattgcagaaattttggcttgctggattctcgaggggcatccatgatatgcaccgaaaggcatctttggttcttgaagatgcaggtatgaacatttacactgttgttgcctcttgtgctggtaacaaggttatggagctctacaagctgcaattaaagaaaatatttaagcagagctttcttcatgggatggcaattggttttgcatttggcttttcacaagatctactttttgcttggaatgccctgctaccttggtacactgcaatatgtataatacgtggttacatggatccacctactgcactcaagagtacatggtnttctcatttgcaacatttgcacttgt

SEQ ID NO: 204018 - DNA, 332 bp, Glycine max
tctgtatgggggtcagcaaaggagcacaaaccacaaacccttgcaacaagtacagatttttggttcaaggccagctgggttaccaaagtaaccaatgcatccagtttgccttcaagcttcttagtttcaaatgatgcaactgagtttgtagctacctcatgcactcctctaatggctatagcatcatttctggcgctaaattgctgggagttggaagccatcttctcaattaaatttctggcttcagcaggagtcatgtctccaagggctccaccactggcagcatctatcatacttctcttcatattactaagtccttcataaaaatattg

SEQ ID NO: 204019 - DNA, 412 bp, Glycine max
  unsure (1)..(412): unsure at all n locations
taattaggttaacacgtactgagaattgtagcaaccattatttagcatcgcggaagaaggtgaagcgaccatgccagaaaccctagtcacaatggatttgaatttaaggaaggtggtagaaagaaaaggagcatgggcactaacacttangtaacccaaaaatcatgcagatcagaaaatcatatccaaatcaagaaattccatttctttctatttactgcacaaataactgacaagtagtattatgcatgtgttaaatttataattaattacaacattaaataaaggcctggctgttacaatngagtaaaggcgttattaagctgctatttatgaaaaatgactacctactgtattaacgtaaactttttttcattttataataacattatttttctattattgtcatgta

SEQ ID NO: 204020 - DNA, 404 bp, Glycine max
  unsure (1)..(404): unsure at all n locations
agcttggagaaggtgactttggaccagtattttttgttattaatgaaactgatatctagaacttctatttgcctcgtaaactatctatcttaagcatatgatttattggggggtatactgatatttggacaagaaatagcaatgataaggctatcaaacgagtctgtacaagggttagaagagtttaataatgaagtagccttgattgccaaatttctgaaccgtaatcttgtaaagcttcttggacgctgcattgaaagagaagaaaatttgttaatttatgaatacatgcccatcaaaagcttgagctactttgnttttggttggagcctatacaatttattctaaacttctttggcaatgcttttatttccgacctggtagttatgaaattacagagtgtg

SEQ ID NO: 204021 - DNA, 192 bp, Glycine max
ttctactatttttgcttatagaaaagcttatccaaacaaggtccactatatattctgcaatctggtactgtgccatatatatggatggtggttctggacatttggatttgtgtaatcgtcgtaaaaacaatgatgcttatgcctttgggcatgggtttggactatttgtggtggtttttgacacatgtatat

SEQ ID NO: 204022 - DNA, 413 bp, Glycine max
  unsure (1)..(413): unsure at all n locations
agcttgcacgaatggggcatgaatgttgtgtgttttcaaatncaccaatataaaaatgaatggatgagattcgctgatgtctacttgtttaggggcatttgtaaaaaataaggttagtgaaaatgtactattggtgtagaggcaaaatgtttctcatttgggataaaactcacagtttaatattttaaatgttttaattatgttatctaatatgttaaattttacttaaaaatcttttataaattttaaatggtatctaatatgttaaattgtacttaaatataattataaattatttgataagtttttattatctgtagattatgttaaattataagtatagtatttatttgagcatgcaacattaagtttaaacattcgaattaagcttacaatttgttctacctataaaa

SEQ ID NO: 204023 - DNA, 444 bp, Glycine max
  unsure (1)..(444): unsure at all n locations
tcaaacttgcaacagaggagttgagcagtgtataaatattcgncttcaaactcttagaggtgactgtgagcgtttgtttatggatgagtccgagtcaatatctgatttattttctcgagtattggccgtagtcaatcaacttaacagaaatggtgaagatgttgatgatgtgaaagtcatggaaaaaatacttcgaactttatatccaagttatgacttcattgttaccaacattgaagaaaacaaggattttaagaccatgactattgagcaactcatgggttccttacaagcatacgaagaataacaaaagagaataattaaacaataggaggctactgagcaactactacatctcatcgtacatgaagcaaactttgcaataacacgagcctaagaggactatgtctccgccagatcctggacgtgacgacgactggatga

SEQ ID NO: 204024 - DNA, 418 bp, Glycine max
agcttctaaaatgaccattcttttcattatttttgacaacatataaaccagcttattcatttcacaaaaagaaaacagaggaactgatttaaattaccacaaaaaacaaaagcgagccaccatgatagcataatagccaattcaagggggagtacaaatagttaatttataaaataaaataaaaaaatccgtcgtagaaaatatcacggaaaccatatttaaacacagaattgtcttcttctgatttcttcaaactaagtagaccatacagcaaaaagattttgcaacagagcaatctaaattcaattcagaaccaaacttcttttttgtactatctatctcgaatttaagattattaactacgacgagtaaaaaaatattttaagttctatcgcgaccatcgtttagatttcgacca

SEQ ID NO: 204025 - DNA, 378 bp, Glycine max
  unsure (1)..(378): unsure at all n locations
tcaagaataatggcctcagcaaacttcttattcccgattgaaattcaataaataggcttcctatttttaatagagagggttaccactattggaaaatccaaatgcaaatcttcattgaggcaatagacttaaacatttgggaagccatagaagtaggaccttatgtacccaccatggtggctggaaatgcaacaatagaaaaacctagagaagagtggactgaagatgaaagaagattagtgcagtacaatttaaaggctaaaaacatcattacttctgccctatgaatggatgaaatatttanggtttcaaattgtaagagtgctaaggatatgtatgacacntttacaagtacacatgagggaaaaactgatgtaa

SEQ ID NO: 204026 - DNA, 414 bp, Glycine max
agcttgaacacctgttgaggtaatatccatctgtgaagacaaatagagaatgggaaacaagatttatgttgatgaaagacattacagtcttaattaaaaacaaggtggataaataaagagaaggagaatatttgaagccaggtcatgagtagtacatctggcagatctgaagcaatcaagtactcattaattggtgttgtgttgtcatatatcttgtcagtaattccctctggtgcaggtccaccgttttccatattatatttaatcccaaaatcctgcaacaaggaaaccaaatgacagtaacaatcattcagagttaatcttacaacccacaaggtctcagcataatatcataagggaacacccatcaactcctactatttatgtttggaaatattcaccttactaacttaa

SEQ ID NO: 204027 - DNA, 390 bp, Glycine max
  unsure (1)..(390): unsure at all n locations
ntgcactggatattcaacccttttaacaaatatcgnattcttgtgactagatagctatttttgtttacctgaaatgctctgttaaagcttttgtgtgatttccttaatgtccgaaacaggttttggaatttctgaatgacatatttgacaccctgctcaaggcactttcagatccatctgatgaggtagtggtatccaaatagttntttttttcatctctatntcatcaatcgttcatttcttaaaatctctgcaaatgtggtttcatctgttcacttatcttatggataagttatataccgtggattaatcaaaccatatgggataagtactggtttcatcatttccttcttaggaccgtcacattcagtgcttcatcccccctttttc

SEQ ID NO: 204028 - DNA, 385 bp, Glycine max
agctttagctcgggtaagctcattcatatttgattccaaggactttctgatagctggcttgtctatgattgtgcatttgtctctcagatcattgaagattggagcaaatttctcaaccaacatagcaaactcagtaaaagcatcctctatatcaatttcaggattcttagaaaacaaagcaacctcatcagccaggactattaactctgacagaaactcagaaaaggctctcttttccttcatatttatctatgagacctgtaactttgggagaaaaaaaaaactatttagttacaaaagaaaacaaaactaaactacaattgacagataaataacagatgataagaagtgattgttgattagaaacaaaaagaataacatatta

SEQ ID NO: 204029 - DNA, 373 bp, Glycine max
accccggggaaccttcacccgatgaaaacactgacaaaaactcatcttcttctttttggacaaagtatggcaagctggaggcaagtaaattttcttcccatcagaccttggatgcaactgtgatcgtatccccatatcagctaaatcttgatgggtattcaagtcatccttcgtctttccttgaatgttaaggagcatcccaatcatactgtcaaaacatttttctccacatgcataacatcaatacaatgtctaacgtctaaaatagaccagtacggaagatcaaagaaaatggacgctcttttccatatgcaactcttacttttatccttcttttgggtcttttcaaatacaatattcaggtgttgaaccc

SEQ ID NO: 204030 - DNA, 365 bp, Glycine max
ggaagatcccacatgtaatggtctctttttttccttttattacatttattatttctattcaataattcatatcacactttcttgattattatagtgttcctttgttttagtttagccactagcaattaagttaaagtttatgtgattgtgagtgtgagtatataattattgaatggttccaactctatgtgatttagaaagttatagagacttgtttttatgatatacaatgttgatgcatgtcattagtatttttttattttcctcatgtgcgttggtattatttttaacagagattggtacaacttgagaaatcccagcgcgtgaaggcattctgatgtggtgaatttgatggatgtattgaa

SEQ ID NO: 204031 - DNA, 361 bp, Glycine max
  unsure (1)..(361): unsure at all n locations
ttttaaaatnaacgtaagggcgtatgaaataatgttcggcaggatgcttgaaaagtgcattgctaaaggtaaatccaaaaatttgatggattctttggagaacatgcctaatgtgacagaaaagcccaacacaggagacaaactgcctaagtgtagcattcatcctagcgatagtgataaatacatgtcatgtatcaagggcagtctctccacttttatcatctatttatgcgagtgatactaaattggcagagaaacaacattatagctagattacgagctgaccccaaacaaaggctctcggcagttaaagtctttagtaagtttaactcttcttgtatgcattcagcattgatcactt

SEQ ID NO: 204032 - DNA, 312 bp, Glycine max
  unsure (1)..(312): unsure at all n locations
ctcaagcttnttatcctaggctcatcttggaggtgaagctcctacttccatggcttatgtcctagaggatagagccatctctcacctcatctcctttgtcttctgctccatctccatggtggaaaatcaccatccaaggacctcactgaagcttgagatccatcctccatagaagcaccaccagcaagcctccatcaagtggaattaaagcacaagacttcaagtaggtgctcctaaacccccaataataggattcgctctaccttctcttccattgttgttcttatttatctactgtatccctcacacgtc

SEQ ID NO: 204033 - DNA, 345 bp, Glycine max
  unsure (1)..(345): unsure at all n locations
gatatttgtgttctaactccacaagaccccgcagagcgatcctccacccaaaggaagaatgcccccaaaacactaaaggcatttggtggctcaaatacattttggggaaataagcccccatgatgacacataacctatttataacgaaaatgtattccaatttcattacctgcaatgaatatacagatgatgacatntttagctcgggcaatttcaagctagaatgcctctaacgcatgtatacattggctcgctattcaatccgaatatgaacttctgtgtggtgtcactggtgcggctgcagcttggttcactgatagctccttacttttggtcttaacaagt

SEQ ID NO: 204034 - DNA, 410 bp, Glycine max
cctataatactcattcgtggaattgcattagggcacctattttgaatctcctattctgcacctacatataagaaacagttcctctctcccaatctgtacaaaatcatattcatacatcattgaggcacttcaccgagcacttggtgagcgcatgtttggacataaatttgcagaggatggggacaatgtggcatgccccattggttagaatacagcataggcctaaggccttctcattcatatcctcaactcaagaaaacaagcgtaataacagaccaaaactgccccacaaatatatgcacattctcacaatttgtagcaccaaaagatgaataaaatataccaatgggaagctaacaacatcaaagattgaatacttacttgttggagtgaataatttaccccaaaat

SEQ ID NO: 204035 - DNA, 416 bp, Glycine max
  unsure (1)..(416): unsure at all n locations
tgcagctngaaagattcctgacaacggatttatttccccgaaaaattgtaaaaccatgtgatgctgttaacagaaacacctaaaacgaagtaatactcaacggttcaatagtttttctggtataaaaaaaaatctataaattttaagaaccacgaggattcaaaaaatatgctcgtgggcataaaacatattaaaatataaataaaatgctttttaaaacacacacacatctaaaatgggctggtttgagtgagcaaactaaaaaagaaaacgacatattttaatgaaaaatttataaagcgactatatatctaaaggggacatttaataatgcgcgttgtaaagaaaaatcattttataaacacggaactgtagacccgaaatggctcgtatttttttttcttattataaataaa

SEQ ID NO: 204036 - DNA, 402 bp, Glycine max
ccgaggcatgcagcgtgaacagcctcctgctttgatgatgtctttgctctgtgttttgccaaaaagattttatcatgatgggtaacaaagaaagctgcttcaatatccttgtaatgaaacgcacctgggaaataaccaatccagttaactttcctgatgttctcaggcttgaatcttagtatgtcattcaggtacttcacaatgaactaatttccattacaaccgacaggggaatttctttcctgatgggtttggatatctaacacagatggctctacttgcgaaacagtcatcatggaagtcaaacttgctgtgaatgtactatttgcaatgagtataacaaatatccatggcgccaacacatattcagccagggtgctctgaattggttctcctgcctat

SEQ ID NO: 204037 - DNA, 271 bp, Glycine max
  unsure (1)..(271): unsure at all n locations
aacataaaggatatataaacgaatcgnacccacacttgaatcatttatatctagagggtttgcagacatatgactgtattaaagaaaatcatttactcctccagagcccatcactctagaataacccacatatttctacctagactcgagtaatctctgaatgggggaccttataagaagttttccaacaagcggtgtgattgaagtccaaacacgctgaaaaaccttgtgttaattgagggggaaattaatgatcatgatagcacctgag

SEQ ID NO: 204038 - DNA, 391 bp, Glycine max
  unsure (1)..(391): unsure at all n locations
ttgcttatgatttctcatatttgcgtccccctatctctaacaaatagctttggacaatgtatgaagggtgtgttagtttgccaagccnccccaaccatagacaacgtgttgtctagttgtctaagggtagtaactcttgacaggtgcaaagagtagcatgtctgtcaagcttgtcacgccctccaacctaaacaagtgttattcgagctatttttgttaagttgtccagggtgcatgcacttttcattttgcagacatgtcaggtgagttgaatctctatatntgacaatcctaccctcttttgatcattggagattgaagataggtatttttctttgcttttgctgcgggtaattgtagcgcacacacactacttttgcatatgtgtcac

SEQ ID NO: 204039 - DNA, 361 bp, Glycine max
  unsure (1)..(361): unsure at all n locations
tattctatgggatgtaccaagcacgctatgatntcaatattcaagtttatatagtttatcaccacctaacagattntgtttctcaagttcatgtaatcctttttcactaacatgacctaatctcaaatgccaaagttttgttttatcaatcaatgtattactagctaccgatgcatgtccaacaatagtggaaccttcaagaataaacaagccattagttntattcttgttacccttagctatgattaaagatccatttgaaatcttaagaacaccatttaaaattctagtngaatatcctagatcatcanacattgttatggaaataagatttcttttgcattttggaatgtaccttaca

SEQ ID NO: 204040 - DNA, 350 bp, Glycine max
tgagccccgactaatatcgagacgctcgaaatagaatgttgaaactctgagccaactcaaacgacaataactttttactcggatgtctgattgagtcccgctatataacgagacgctccaaaatgaatgttgaagcttagagccatatcaaacgacaataacttcttactcggatgtctgattgagtcccgtcttatatcgagacgctcgaaattgaatgttgaagctcttagccaattcaaacgacaataactatttactcggatgtttgattgagtcctgtgattatcgagacgctcgaaattgaatgttgaagcttttacccactcaaaccacaaaactctttactc

SEQ ID NO: 204041 - DNA, 302 bp, Glycine max
  unsure (1)..(302): unsure at all n locations
tatacattcaacttcgagcgtctcgatatattgcgagtctcaatcanacatccgagtaaaaagttatagtcgcttgaatttgactcacagccttcaacactttatatcttgagacgtctcgttatattacgggactcaatcagacatccgacgaaaaagttattgtcgtttggattggctcaaatattcaacattccatttcgagcgtttcgatatttgacaggacgtcatcagacattcctgtagaaagttattgtcgcttgaattgctcaagcttcacattcaatttgaccgttcgatta

SEQ ID NO: 204042 - DNA, 406 bp, Glycine max
agcttctcaaggaggtgtgttgtagacatatggctttagttatcttaagaaagggggggtgaattaagataacaagaactattcccgaattagaattttactctctctttttagattaacaatgcacccttaacatgaattactcaaaagacaattcaaaataaacttctttcacgccaaagataaatagcattaaataaaagtttaagggaagagagaaatgcaaacttaatttatactggttcggccacttcccgggcctacgttcagtccttaagcaacccacttgagatattccactctctttgtataactccttgtacaaagtatgaaccacacagggacaacctttcccttgtttcaggaatccttacaacaagagaccctcggtctctcaatccctttt

SEQ ID NO: 204043 - DNA, 396 bp, Glycine max
ctttaaccgttaatataaggcgattctcacctatataatgataaaatgaattcctaccgatcattcgtgttgttatgtcgtttaatcactgttaaagcaaaatctaaccaatcgttcacactataaccttggttaaataaaaaaggctaaataataataaaataattaaaatatctttgaataaaatatatcagaaaatcaattggacgtttttctttggaaagttccttgaatgaattgacttattaccaaagcgaaactaaggctaaaaatcaactcacaaatcaagctatgtccgcaaaaaatcacctaaaaccatattaatgtgccatgccttcaacggtcccatttctttatcggttaactggacctttcaaactaaaatcacatgtacct

SEQ ID NO: 204044 - DNA, 339 bp, Glycine max
  unsure (1)..(339): unsure at all n locations
agcattgaaaatggatagacaagatacatgttatgttttggccngcgacaaagataaaagggatgccccacattattttcatgacacaaatatgcaaaattgatgatttggaaatcttatgcaaaactggtcatgcatgcacctatgcggacactcaagcgtcaaatctttatggacatgcgatgctagggctcaggatacattccctctattttaatcaacccaagtgttccaaaatatcgtctcttatcaatangtgcattcatccgagtccatttcgggcgtccgggaaaatcttcacagcattcacccttcaggtgtatacacatttattcaaaa

SEQ ID NO: 204045 - DNA, 416 bp, Glycine max
  unsure (1)..(416): unsure at all n locations
agctnggacttggctcatttaaataattatatcttattttgagcttggatttatttatttaattaaacaatcaagcttgattaagcatttatagagtcgaactcgagtaattcacaaataggtgggctcatttatactcctaggtgtccccaatggattattcatgtttgtcttatcaaatttggcaaaaactcttcacgatgttgctcctttgtgagctcctcattgaatcataatgaagtgtatatgagaagacactttgacgcttaatttagcagcgctgaggtaacagcaggaatagtgaggttggattaaagttgattcacctgaactttaatgaccccttttattaggtcaaattggatgaaaggatctcaattcttctcataagacaatgtaattagggaaatgcatca

SEQ ID NO: 204046 - DNA, 410 bp, Glycine max
  unsure (1)..(410): unsure at all n locations
agctttaaaatttgaattaataactttttgtatactgctagtaanccgataccatatatgtgtaatcgattacccagcgcaaattttgaattcaaattttaatagctattgtaaatcagttttggccactggtattcgactacatcctctggtaatcgattaccagagagtaaatttgttgaaaaatactttttaacttaaatttcttggccaaactttttgctacttcaatgggaaatcccttcctatttaatatgccccttttaagactctagagactgtcttcatcatccatcttgaatatctttaatttctttgtcttgaataaaagctttgagacgcatgtgaaaccttggcatcatcaaaacattcagcttgatccttttgttacaaaggaattacttgattga

SEQ ID NO: 204047 - DNA, 216 bp, Glycine max
tgcctgtgaattttctatggaatctgtgatcttgagcttctatgaagtccttcaatggtgattgtccaccatggagatgcatcggaatgcaatagagaagatgagaggggagacaccatccactatggaataatccatggatgaatgagcttctccaccaataatgtgtcttggataatatactttgatagggtgctttaatggtggataataaag

SEQ ID NO: 204048 - DNA, 381 bp, Glycine max
agcttgggaactataatattccatttcccttttattagatggatgagcaacgctgagtggtcgaacaccttgagtagttggacattggaggcaattggggcctgaacggatatggctcatgcttgatatgcggacatgttgctggtgcacacgaatcctatcctgtcttggaaagggccacactgagggtgtggagagaccacactgccccaacgccatgacttagaatgcttgacgctccgccaaaccatacatgccatttgtcccgatcattgtccaacttttacttgaacaacaccatgatgttgtcaaccgggaattcctgatgcatgggctggctgtctctaataagctgttgagccaaagaatctgccaaagcgc

SEQ ID NO: 204049 - DNA, 377 bp, Glycine max
tgagttctaaaatgggacctggaacacaaaaagaccgaactgaaccctatctccttgtacaccgtgcttggaagcttttctagacgagaacgacacctcttgtgcgccaccaaaatatggtgggaagttcatacctgcacctcactctaacgtgatccactcttcataacgtactttccatgcttaccaagcagtccaaatggagtagacattaataattgtgagctaaatctggcaatgacctattttattaatgtcccctatcccgcagattaagaatcctacataagagaatgaaactagtggttgtgactagaacaagcttcttgtttgaagagttatttatagataatcaagagcaatcgcaaatgtcatag

SEQ ID NO: 204050 - DNA, 396 bp, Glycine max
gcttgattggatgatagtatacataaaatttaatattttttttgtctctcccatattttgatgagtattactgtatctatatttattctctcgtccaaacatttattatacaaaaatattcatgccctttcaagaaaagatctagtgattcttaaaaattgcgctccaaagagtacctaagttcactctattgtagtgttacataaggtcaatgattttcatgttgtacttcgttgacttgggtttatttgtcaatgctcaatagcataacttgatccagtttctgcttgctttttcaagtgaaaatttggtttttctatcttgattttttgacaagatcatagttgttctaataattggaggttctctattccgtttctttttgatatttaatat

SEQ ID NO: 204051 - DNA, 485 bp, Glycine max
  unsure (1)..(485): unsure at all n locations
ctcaagctgggagaggagggttngcgaggatacgggaaggcccactctgtggtcgatttattccttgatgtaaccgccgatttctggaggaagatccattgttgatgctcgacgaaagtcaaaggtacgggttcggaatcggcggtggttgcgataaaaggagaaagcgatggcggtataaaccctaatcggtgggaacggtggattgtgaaaacgaaagggacgttgcgatcggagaaaaagggtgtaattgaaatatattgatagccgttgggagattcaaattggaattttgatagccgtggggactgtggagttaataccagacgttaacgtttcctttngcttgctccaccactataacaatttgtgatggaatatatatgtatttatgagtgtcgattactcctatccactcctaagaagatgattcttcttactctcctctaataataatatttatgaattacacgctctgtatatta

SEQ ID NO: 204052 - DNA, 202 bp, Glycine max
  unsure (1)..(202): unsure at all n locations
cataatttttatttcttttcaaatacttcccatcgttacatgcctaaaaangcaaatctataaacctatcgaaagataaaatcatgcatggctacccggcattcttacaaaaaaagttgttaaacaccttatcgcgaaggtcatattatcgaataaaaataattgggcaagtctacattctttggtctatctttataaatga

SEQ ID NO: 204053 - DNA, 299 bp, Glycine max
  unsure (1)..(299): unsure at all n locations
gatgctatcaatggtcgaatcttttcttcttctactcacggcggaatgtatggtttgcatgtgttccataataaccaacaacaaatcctttgcttactcacatgcgtatagcaatgtgacagaaccacctaaagcttcttttactatctttccatccttggtaacagaaaataatttgttcggtttttggataatgaaatagttcctcctgcagtnttacaactcagcaagcacaactaagtcgctctgaattgctcagatcttaacaagtactgattgagatacgcctgaaatgacgt

SEQ ID NO: 204054 - DNA, 367 bp, Glycine max
  unsure (1)..(367): unsure at all n locations
tatanagaccacctgcaagcatgcaagctttgcggatttagtcttcgccattgtttatatctatgngggtcccaaaagaggcaaatttgatcattctactacgacgactgagaaatctggggcaaatgaagagggtgaaaaagagggaaaaacccatgctgtgactgccattcctatacggtcaattttcccaccaaacccaacaatgttattactcattcaataacaaacctcctccttacccaccacccagttatccacaaaggccatccctaattcaaccacaaagccttgctaccgcacttccaatgacgaagaccccctttagcacaaaccaaataatacaccaactaataggaattttgca

SEQ ID NO: 204055 - DNA, 194 bp, Glycine max
cctatagatacttaagcttgaagtatactagatgccttgagatgtaagctccatttgagcttgatcgcctaggatcttcttcatcaatggatttcttagcttcttgcgagataaatggctgtggaattgagaatgaagagagagaggagacgctacttctaggagaagatgagtctttaagaagctcaccacca

SEQ ID NO: 204056 - DNA, 420 bp, Glycine max
  unsure (1)..(420): unsure at all n locations
agcttgcctgtccgatgcagcagtaatgatggccctttttatgttggggaacggttactaacccgggatgggtttaggcaaagacaacggtggcataactagcctgataaangccaaaggaaatcgtgggaagtatgggttaggctataagcccactcaggcctatataaagagaagcatcttgggaaggaagagtggtagtcaaaactcgcggttaagacaagaaggtgaaggaagcccaccctgccacataagtaggagctttataagtgcgggtctggggacaaaggtcaagtggacgcgatatatgaagatggtgttccgagtacattggatttggtacgaccatgccctcctgatattcagctgggaaatnggcgagtggtagaacgctcccgcctttacgcgacaagcataatg

SEQ ID NO: 204057 - DNA, 311 bp, Glycine max
  unsure (1)..(311): unsure at all n locations
tgttttgggttanatatgaattatatatgatttaggacttgtaggatccaatttgtgcanaattggatgtgggcaagatggatttcgaaatctgccctgttatgcataaaaatgttgttgaattgtgcaacaaatttttgatgtgtgcacaaaaatgcttgtgccttgctggttatgggaaagggagtacatatcgggttctagtcattttgtagcagattcccatgggtcaaaagtatatttatgttctaagaaccttccattaacttttctagtcgatgcaatgggttacgaatctgaatgaagagaat

SEQ ID NO: 204058 - DNA, 205 bp, Glycine max
gcaatagcaccggacaaaacgccctctcaacgtacataatagagaagagtccacacaccaagggcgggaaaggtcttctaggctcaagcaccagcagggctgggtggaaaaaaaaactagccaagctaaagccgagaagagcagcctttcttttcatatagagaaaccagagatgtggatagttcggaggctcacctatagagaa

SEQ ID NO: 204059 - DNA, 333 bp, Glycine max
  unsure (1)..(333): unsure at all n locations
ctatanatactcagcttggaaacaaacatatcaaaatatgtcaattatctcttaaaaagatgttaacgagcatctgttggaccaccgcctcgggaaaaatatttccctagaagtatacccattgctaggggactgtatgccatcaaactaatctgaataaataaatattatcaaacaatgaggctttcatagaaaatacacaagaatgatttatgcccacaaatgtagtaaacataatatattctcatgcattaagccttcaatgttccatctcatctgaattaaatggaatcatatgactcttcttgtattgaacctgatgtatataaataa

SEQ ID NO: 204060 - DNA, 414 bp, Glycine max
  unsure (1)..(414): unsure at all n locations
agcttgtcatactttgtccaagaaagagattttcttttnttgccagtgtctgcgccgggttaaagtcctacaaggatactctctaaatattaagagccttgtgcagttgaaaaagcttaacctagtggggttaaagtctcatgattgtcacatgttgatgcaacaattgttagccggggccatacgagacattttgcctaacaaagtcaggttagccataactcgcctgtgctttttcttcaatgccatgtgtagcaaagtccttgatcctgtcaagtttgatgacctgaaaaacaaggctacaattatactgtgccagttggagatgtattttcctcctgctttctttgacatcatggcccacttaattggttaactggtcagagaaatcaaatgttgtggtcctgtttatct

SEQ ID NO: 204061 - DNA, 340 bp, Glycine max
  unsure (1)..(340): unsure at all n locations
actaagcttatatatcttatatggntataactagactcccgttagtggtaccttaagtttcatgggataatgtcttctattggttttgatgaagatcccatggatctatgcatattccacaaggttagtgagagtaaaatatgatttcttgatttatatgcacatgataatataattacatgaggtgaaacaatttcttcttaagatatttgacatgaaggatatgggtgatgcatcttatgtcatctgcatttagaatcatagagatagacctcgacgtattttatgtctatcacacggacacctatattaacaataattttatagattttggatgaaa

SEQ ID NO: 204062 - DNA, 420 bp, Glycine max
agcttgcattggaattggaaagttttatcattattggattagtacctgacatctcaaacaaacaaatcaaacgttacatgacaattttagttgctgtttgaatacctcacccactcaagtgtatcacacaattatggcttttctttaatgaaacactcttgccttttaccactctaattccccttgagttcttaggcaattcaagagattatggccacaacaaagaacaattcaccaatatgtgtaaggtaaggctacagaaacaaggaaaaggttaaccaagaaaatagctaacaatgtttttaggcacaaatgaaggaaataaaattcagaatttaggaattcaagtaacaacccttcatgcaaccaatatattaccttaaagagagtattttaaagttcttcaagctgaaccattca

SEQ ID NO: 204063 - DNA, 373 bp, Glycine max
  unsure (1)..(373): unsure at all n locations
aagcatgagatatggggacccatatatgttgactatgtgcggccggcgatgggcacaacaatgtgtcacatcacaatgcgcgcataacccaccatcctctgttgccacctaaaagtgagctacgtacatccacctacccatatcctcgttttctctacaccgagatctcataaatcctcccaagctttctcatcatcaaagtaatacaacattcgcacnacacaagctattacagtgcaaacataacagggcaatagcagaatactctggtctaacaccaaccataatacaggtttctcacttaaacccacgaacaattcttcattcaattgttacctcgggatcaaccgaatatactggaatctgtttacat

SEQ ID NO: 204064 - DNA, 391 bp, Glycine max
  unsure (1)..(391): unsure at all n locations
aagctgggaatctctaagttcccaatccccttttatctganggattaccaacgctgagtcgccgtacaccttgagtagtttgacattggagtcaattgctgcctggacggctagggcacatgcttcataattggccatgttgttggtgcaatcgaatcctaacctggctgtgaaaggtacacattgattgtctggagagaccaacactgccccaacgccatgacttagaatgtttgacgctccgtcaaaccatacagtccatttgtcccgatcttctttcaacttttcctcgaacaagaccatgatgtcctcattcgggaattccggatgcatgggctggtagttcgtaataggctggtgagccaaataatatgcccaagcgctttctttt

SEQ ID NO: 204065 - DNA, 393 bp, Glycine max
agcttaaaacaataaactgggccttctgttaattgtctttgggctgggcgaccatgatcaacaaagtactttcgacacctactatatgttgacttgaccaacgttgttattacaatgctgcgacaatctttcaacaccttattcacacattctgataggttggttgtcatgtgaccataataccgaccagatgtatcgtaagccacgctccatatttcctttgaaatgcgatcaatccatcttgctatggttggactcagttgacgaaatttttctaagttttgatcaaacacatgcttgcaaggagggtacgctgcatcaaatatgttatcatcaaaagatgtacgttgacatcaaactcaaattaaattaatgtataaaataaaccttacc

SEQ ID NO: 204066 - DNA, 232 bp, Glycine max
tactcacgcttgttgaaggatagattctcattatacaaagcctgcattaactatctcatcataggccaattatgagtgtagagcagttcattgataaggtggcctgggctggatcccaaccattttttgttggggataatgaaagttttactgccctagcacctcaacaacatgagccagaaccagaaaatgatcactcatctgaagtcaccatctttggagctgctgattg

SEQ ID NO: 204067 - DNA, 357 bp, Glycine max
tactcacgcttagcatcaatctcaaactcttcaatggacaacaacacatatgtattgctttgtaaaattagcattcgcaatgggtgattccttctataaatggaagaagagaaccatcacagagcgcatgaaaagtgagacacaaatcttcatacttagatggaaatgcgatagtgagagatagacacactcacatagagcttgttacaaagaaaaacgttttcccattattgtaacaatggaggttgatatactaatgggtgccatagttattctctagctcactctgagaagaaattgcatgtgaaaataacaatgcttattatactacattacttacgtaatgtacatttggac

SEQ ID NO: 204068 - DNA, 270 bp, Glycine max
  unsure (1)..(270): unsure at all n locations
actcagcttataccactcccgatgtcggagtggagcactgtgtantaacatttacttgactgctccaacaattatggagtccttgcctacactccgtaaacgcacaaaatgctcatagaagggaggagcaaaggctcacgtaatgaattctagaacatcatattccaatcagacaccaacgatgcctagccgcgtcaaaaaaagttgagcgaatcaagatgctccatcaggggcataccttccctcattcggaggcgcaatagatggtgt

SEQ ID NO: 204069 - DNA, 413 bp, Glycine max
gccaatggttggaggactttgttggatggtgaacctgatgtgtgggattcataatcatgaattggccaagtcattagttggacatccatatgtttggtgattggctaaagctaaaaagacacttattgctgatatgatcaagtcaatggtgaaaccaagaaacattctgctaactctgaaggagcacaatgccaatcgttgtacgaccatcaaacaaatatacaatgcaagaagtgcatactgtttttccaaaagaggaagtgatattgaaatgcaacatctaatgaagctttttaaacatgattggtatattcattggcacaaattaaatgatgaagaccgggttcatgatatcttttggtgtcaccctgatgcagtgaagatagacaatgcatgtaatttggttgttttga

SEQ ID NO: 204070 - DNA, 337 bp, Glycine max
cttagcagaccttgtttgttctcgggaatgaatcgagtccgttttgatgaaaggcaagtttgaatacgccttcaatgctggcccctacagcaatagaagatccccattggtgtgcacatggaataaggaaggggatacccacgctgtcaccactgaccgaacgaggatgataacgccccgaaatgctcataacttataccatctcatacacccgaacttatcgaatcgagccgggagttccctcccaactcaagtataatggcctgccctgaccaaaatagcggttgcactactcgctgctccagccacaccccgactatccaataatactacttct

SEQ ID NO: 204071 - DNA, 416 bp, Glycine max
agcttaattaagaaacacgttggccaataatctatttgttgggaggaaagtttagaacaaattctttgagaattataatttgtccacaatgaatggaaatcttgtgtgcttagaaaatagttcttgaaagaagatggttggaattgcaacttcactttggggatctcatttctgatgaccttagggattagtgattcctctcccgtgagttgattaggtctaatctttttcctctatattggcgcttgaggaagttgagataaaccaaactatcttgtgaaaatatgtggttggtaaggataaaatctgaggtccttcaaagtagttccggtaaaaataatgtcctaagtgagaaaattcctccaaatctcgactaattcagattgttggccaggagtttcacaatggaatttttg

SEQ ID NO: 204072 - DNA, 385 bp, Glycine max
actcagcttatatttctcataacctctatgtgtatgtctcctcatatccaattattctcaggttggtttcagttgattaattcatcttagtaatgatttcgttaaaattaattccatatttttatggtctgtttaaatttaaaaaattagaatttattaattaaatcaatttataaattattcatttaaaataatttatcaacactattcaacatatactcatatgatgtttaatattgcctatgaatggaacagtatgttgagtttataactccgggtgttttacgtgaacgaatgaataactcaaattaatagaatattaattggatatttaccaccttggactaatctatccgaaaatgctggaaaatattgcagtttttaa

SEQ ID NO: 204073 - DNA, 417 bp, Glycine max
agcttgcttgtggggcttctatggaggctttatctttgagcttcaatggggtcctttaatggtgattttccaccatggagatgcaccgaaagacaaaggaaaagaggttagaggaggcgccattcattaaggaataagccatggaagaaggagcttcaccaacaagatgagccttggataaaaagcttggagatgatgcttcaatggaggaaaagaaagagagaaggggggagcacgaaattgaaggaataaaagagggagagaagtggaactttgaagtgtgtctcataagactttcattcatcaaagttacaataagagttacacatgcttctatttacagactaggtagaagctttcttaagacaacttccttgaaaacttctttgagaaaacttccttgagaagctagagctt

SEQ ID NO: 204074 - DNA, 380 bp, Glycine max
tccatcaagtggtataagagcacaatatcttcaagtatgctctccttatacctccattaatattcagctttaccttctcctccattgttgtttcttcatttttctccatgtatctcctcacatgtcttgtgatgaatgttgttaacatgattttttagaatttccaccaattaaacttgctatataagttagatttgatttttctctggttcaaatttcttgttcttgttcttgaaccatgaagtatgttgagattacgttcctttgagttctgtattggtattcttctatggatgaaacgcaaaccataatattctttcaaaaacattaaaatcaacaaaaataacctctaaaatctataataacatgctcacctattg

SEQ ID NO: 204075 - DNA, 420 bp, Glycine max
  unsure (1)..(420): unsure at all n locations
agctnttatccatggcttcctacgcttcttcttgttttatcttttccttgaagtggcatctccaaccatctttgttccttctccattccactgccattcatcttcaagaagcaaaggactccattgatgaagaagatccaaggcctacaagctccacatggagctacatcaaaaggctacgccttcaaaagccaaaaattcatccaagcgccatccttttcttcaatttctgcatttcacttcatctcattcaagaaagaaccatgttctatctaattttcgtatcttatttaggttttattttatgaacttgtgttttcctttcaatgaaatgcaatttacattttcgaatgattggatgaccctttgttcaaaagggttgtgttctgaatcgtaataggcttgctcttgcttttctgc

SEQ ID NO: 204076 - DNA, 298 bp, Glycine max
gtaaccaattcaaggtgtgatacactaatttcatccggtgactgtcgctcgatggcatgcaacctttgatagaccgcttctaagtactatatcacccttctgtgcacaatatgtgaaggcccgagatgcgcccgaaaacaaaacgaagcatggttacgcgacccatgaaataccataatgtggcggaaaccacaaggaagtattggtacgcaatccgtgagtttacataacttcttctaaagctaaaatagagtaaatacgtgatgctgaaggttacgtaaccttacttaatgaaaat

SEQ ID NO: 204077 - DNA, 412 bp, Glycine max
aagcttatattctacatgccatattcttattttggttccttataaaaaaatttgaaaaaccccttgagttatggagaaaaagagaaccacatctgaaatatcttatagtgtgggggtgtcttgcaaaggttaacatccctattaataagaaaagaaaaattacaccaaaaaactgttgattgtgtttttgtttgatattctttgcataatacttcttatagattcttggttgttgattcagaagtgtccaaaatttctaatgatactattttggaatctagagatgtcattttctttgaaaatgtttttcctttgaaaaataaattgcctaaatctatttgtgatacttcttgttctaatttaccatcttgtagtaatgctaataaggacattgtttttgaacttatgaaga

SEQ ID NO: 204078 - DNA, 341 bp, Glycine max
  unsure (1)..(341): unsure at all n locations
tatgtacccttgtatgananattagaaattgattctattatagccttaggatgcacaaccttcacatagtttattaggggtgatagctatggtgaacttgaaggcaagatttgggtggagtgacaaaagcatcattgaattccttgtgttattgaataatatgtcttctaaagacaacacgttacccaataatcattacgatgcgaagaagattttgtcttgtgggtatggaataccaaataatacatacatgccctaatgattgtattttgtacgaaaaccaatttgccaatatgcgcaattgccctatatgtggtgtattacgctacaaagtgaagtat

SEQ ID NO: 204079 - DNA, 411 bp, Glycine max
  unsure (1)..(411): unsure at all n locations
agctngagggtatagcacatgagtgagttttatctgcagggagataataattgagcactatatgaacatttattgagggaaacaatgtgaataacgtggtaaccataaagaaaagaataatttgaaatggatccatggaagccgctcaaggaaaactgctagctttttcacgcccataggaattcttcttctcaattttttatctactgcatgtgttaagggttcactcttcttttaaattttctattttttatgaaagaaattttgtttatgtactttatttcagttagactgttacttatacatatggaacgtgagactggttccataaaaaaagagtttgacaacaagttaagttgtttcttctacgtaaaatcctaaatgactaagaanttatgtaagtttacgagt

SEQ ID NO: 204080 - DNA, 334 bp, Glycine max
  unsure (1)..(334): unsure at all n locations
tgctccttcatccttgtattcattactgtaaagncaagtacactttcaggcttcattccctgaatattntcaagtaaagccttacataatgaactgaatttttctgaggttaaaacattacagagcacacgctgacacatctcaatcacaccatggtcaggtgattcactagaacctccattacacatgacatctgcatgcccactagctttcttctctgtactatgaaaaagtggttaaaatgcaaagagcattcttgttcatctcttgtaattttaaaagtatcctgcaacaaaataagattgaacataaatcaaagagaccaaaattactt

SEQ ID NO: 204081 - DNA, 335 bp, Glycine max
ccgaagctgccccttagaaaaatggctagcaatttttttttttgggaatcatcaaaaccttcaatctttatggaagggaaccactccggaaacccgaatgcaatttttcgtgcaatatttaaatctgtaagccaagaccaaggcctttatcccaaccagaaaatgagttcataatcgttgtcttcatgtaagcttacctaaaaaccacaaaataggctgagaggttaaaacattcatcatccagagccaaactaatactctgcctggatgagaaatctaacacaaatgcgaaggtacgaagtggacatttcatacacatgcggacactattaaaa

SEQ ID NO: 204082 - DNA, 418 bp, Glycine max
agcttgacccttacgagtcagtatagtcaattgttaatctaacttggagaaaccatcgatgaatctctagtaatatcctgctaagcccagaaaactcctaatctcaaaaacagatttaggactctcccactcaagaacggcttctatcttagagggatctacaactatacccccttgagatatcacatgccctaggaaactttctctaaccaaaactcacacttggacaactcagcataaagttgttggtccccaagggtatgcaacacaatcctcaaatgttcttcatgttcctctttagtcttggagtataccaaaatatcatctatgaatactaccacaaaactatcaaggtaagggtgaaagactctattcatgtagtccataaacacacctggagaattattcacaccaaaag

SEQ ID NO: 204083 - DNA, 431 bp, Glycine max
  unsure (1)..(431): unsure at all n locations
acctacatactcagcttgagaaatgcttaatggggagaagaagatagttattagagagaggtgggagcacgaaattgaaggaagaaaaagagagagaagtngaactttgagttgtgtctcacaagactctcattcatcaatggtacaacaagtgttacacatgcttctatttatagactatgtagcttcctttagaagctttcttgagaaaacttccttgagaagcttctttgagaaaacttccttgagaagctagagcttatctacacatacccctatcataactaagctcacctccttgaaaagcttccttaagaagattcctaaagaagctaaagcttagctacacacacctctctaatagctaagttcacctccttgaaatgagaagctagagcttagctacacaccccctataatagctaaactca

SEQ ID NO: 204084 - DNA, 421 bp, Glycine max
  unsure (1)..(421): unsure at all n locations
gctggatattcagcctgacgagggatctttgttttttatttcangctacaacatagaacacatgaacatgattgatttgagaaatatattactatgcttcaacttgtttgttagaaagacccaacatatctacctactgctggcattttatttaccttgcgttttatattttgtagcatacaagtttagattaaattttgtttgaaattatcacttatacatgtactctcaacaatgcttcgattctgaacttaattcaggctaccattagttccctatgctcgatactcggattcatccgttttaattttaaatacttgacaacccagtgcacttttcggtaaacccccattgaaatttcctccagacataaatgcacaaaaagtaactgcaatggggggcgatcactcctcactatcca

SEQ ID NO: 204085 - DNA, 391 bp, Glycine max
  unsure (1)..(391): unsure at all n locations
actcacgcttaatgttctggataatgctatgctagacaaagtttctgtttaaagacctcttatatttcttgtaagtttggagagttgatgtgaatcccccttgccttgcttcattttggatcaactctaggatggaattggcacacctcttgcatttgagacgcattttaatgtttattcgnttctccgtctattgaactcaaattggaacaatttcaaaatgatgtgaaagatgccgttctgaaatgctaattatgcacataaaacacctaaaaaggtgatgtaactccatgttgagcttgtaagccttggatcttcttactaatggagtctgttgcttctgtagattaatggctctgattgaaaatgaaaaagatatctgaacgtttct

SEQ ID NO: 204086 - DNA, 316 bp, Glycine max
tgcaagcatgcaagcttttgatgatggaacaaccgagtgttatttctcagtcgccaccacactttgggtgtctttttcttcatcaactcacaaaagtatggaaccctaaactaagactaaaaatccttacttaaagcaatgggctaaataaagtttacgcccaaaacacaagataatgaaacattgaaataaaaaatcttacatggggtaatcatgggtatgaccaggtttaatcctcccctaccctgagattggttcaattgctgaaatcaattgataacttttaacatgggcgagccaacttcaacccccttgg

SEQ ID NO: 204087 - DNA, 355 bp, Glycine max
catcctatcaactaacaaaaatgcacccatatacaatcaaggcagcttcattacctagataatatacatgcacttccaaggtgtattagttatttacatcacacacgcctccttggctgaatttacatacatgcatacgtaaagcatttaggggtaccaaaaactgcacatgcgctcatattgggatttctaacacccctacatatacaaacttcacgaagaatcttgactacctacacaataaggtgctacatttcatgctttatttcaagtttttactacctaaagccgcatgcaatatcaaacatattttcctttgttgactaaaatttgactacaattacaagggatatat

SEQ ID NO: 204088 - DNA, 411 bp, Glycine max
  unsure (1)..(411): unsure at all n locations
agctntctaaactctgatacaattttatcattttaattactgacgtaacagtccttttataagaaccattgctgatgttcttatattaaaaccgtttctcacaaactaattaaaattgttggcatcctacaagtctttattgtggactatttaagcaacaaaacaaaactggcccaaaggattattatggatctcccccctttccctcgatgagtctgaaacatgacctccgaaagtccaggtcttttgggacgctactgtgagagatcataatatataggtgatatatatatcttggaattaaaaccttgactaattaataagcaatcgggtctgcaaaatatggaagataggagttcactctcggaactggtcaatttcaatctctattagccattaaaattggatata

SEQ ID NO: 204089 - DNA, 274 bp, Glycine max
  unsure (1)..(274): unsure at all n locations
ctcngcagaacagaaagggccagttttactttcctgttctaacagaaggcgtgctgcgaccgcttcgacgactcggctcataggaaacagaccatattgtcatgacatgcccgatcttctggagctaagaaacactctgttgcccacagggtgccatattaaaagcacacactgaatcactcaaactgtatggatcgtcgcagacatggtttcttgctcgaagaactactcgtgggatacacgcagccataatggcaaccgggtctacgaggga

SEQ ID NO: 204090 - DNA, 419 bp, Glycine max
agcttgtaatttctctaacaaaagtgttcatatttttatcatcattgattatgtgctttattgcaacattcagattatttgtcattgtacccttatagaccttacctaaaattgaaatccattaataagatttccttatacatacaaattcaatcaagcttggacaatttaaataaataagtggatgtcttcaattggttaggcaaggcaaagaaccaagatttaagtttttaactccaggaacacttatccaattcctgtagctcttatttcacagaaatatgtatttgtattattccagggcatctaggaaatttagatttaactgtcttattgtattttgcaatttttttctagactcattcatgattaggttaatatatttttggcaccaccatcttttcaacaaggagagaaag

SEQ ID NO: 204091 - DNA, 377 bp, Glycine max
tgccatctgttcacaggccaagccttttgttcaatagtttacgaagatgggttataaatgacacaaagtagtttgagaactttcatagttttgtgaatgatgatctaccccctcaaatatgttgtgtgaaagcctgaattgtctatgaggattgtagcatgatccatacaacttttacattagatttatattacgaacctccacgccccgtgaataaacagtgcatgacagactttctggtataaatcgttagaaacgaccacaccatccagtatttgttggagcccctacattgattatgcgtccaatgtgaatgggagccgtgcatcatcatttctcaatgccctgtacatgtcactatataacagagccttaag

SEQ ID NO: 204092 - DNA, 415 bp, Glycine max
agctttctccgcgaggaacgtaagtctactttgtttttttgcgggttattgcacctgtgtgcacgatggtagaaatatgctaagtttggaaggaaccaaggtggcaaattgtaaattactagcaaccaaggaggcaaattgtaaattactagaaaaattgtccatgaactatgttgagtgcttaaattgccatatggattcattccatcactggctagtctaagcctaagattttttgcctctttgccgaaatccaaatacaaatgatcaatcttccactgggaggaatcagccaaatgacggagcattccgtcacagtttctcccatttgcatgccatgtaaggccttttgcatcgtctccattagcaaaaggatgcttaaaccttggaatgatgggaagataccacaacacct

SEQ ID NO: 204093 - DNA, 370 bp, Glycine max
cggaccttaaaactcaactttccatgacaaattaaagcgttctcgacttttatcgatcattcatttcacgggataaattaaagaaacatccaaaagtgatttcatgcctagaatcattatcagagtcaggtgtgttactgtaatactctcatctgctaaatcttcaataccatttagccaccagaattcaggacatgtctttccttacactcttattttaccaagaattatagcatgttgggtcgagcattaattgacagaaataattattctccataatcactcttcagaagctgatagaaatagtaaacgatcttttcttcatagtaaggtggacacaacatgtactttctcttcaaaaccttccttt

SEQ ID NO: 204094 - DNA, 412 bp, Glycine max
agcttgtagattatggggtacccatcacatttggtactagggggcggacgggcgaaggtgcacatcatgttttccacgtccacaaatcgtgcataaacccaccatcccctgttgtccacctccaactgagctcacgtactcccacgtagcccatattctcgtatttctcaacaccgggtccccatcaatcctcccaagctttcccaacatccaagtaatacaacattcaaacagcacaaattatcacagccaagctaaacagggcaaaggcagaaaactctgcccaaaacaccaaccaaaattacagcttttttcacttaaagacctcagtaacaattccttcgttccaattcgttaaccgctggatcgacatcaaaattttattggaagtcttagtacttaccctacattg

SEQ ID NO: 204095 - DNA, 357 bp, Glycine max
  unsure (1)..(357): unsure at all n locations
tctganaaaaaaggcaatattgatcatcatactacgatgactgagaaaactggggccaataaagagggtgataaagagggagaaacccatgctattactgtcattcctatacggccaagtttcccaccatacccaacaatgtcattactcatccaataacaaaccttctccttacccaccacccagttatccacaaaagccattcctaaatctaccacaaagtctgtctaccgcacttccaatgacgaacaccacctgtatcacaaaccaaaaacaccaaccaataagtggaatttgctccagtaatcctcgtaaattcaccccaattgcagggtgctatgctgacttgcttccata

SEQ ID NO: 204096 - DNA, 401 bp, Glycine max
gaactctaaatcacctgagcatgcagcttgggtagaatgggcttctttttgttgttacatccctaaagcacaccatgtcccatacaatagcatctctttggagggtagcttcatcttacataggtttcgattttgcactcgacttattttagagaaaatcagccttgtcaaattaattcctaattttgctttactttccagaacttcattgggcgggatatatatcccaaatttatatctgtggagttccgtttaaacacgatgttacatatttaacaatttctgcgtgtaatcctgcttccagatgacgtctgactcttttctgtacccacatttgtgttctactttttcattataacttgtcctgctacaaccacgacatttgtcataagtatcgtgta

SEQ ID NO: 204097 - DNA, 350 bp, Glycine max
catacaaagatgacttactttgcgaagcatgttaaaaggggaaacaaattataacctcattttcaagaaataaactatgtttccaccacaagaccacttgaattgttacaaattgaattgtttggtctaacttgaacaatccctgtcagtggaatgagatatggtctagtagtagtggacaactactccagatggacatgggttatgttccttgctcacaagaaggagtcctttgagggatctataatatgtaaaagagttcaaaatgaaaacaaagtatgcattacttcaataagaagtgatcatgggggagagtatgaaatgaaatattcatctttttgcgaaaaaat

SEQ ID NO: 204098 - DNA, 360 bp, Glycine max
atccgatcatggaaggactaggcaactgtctttattaagcagttccagtacaatacggatatggctcccgatcggaaccagcttcatagtatgactaagcgagagcatgagtccattaaggaatatgcccaaagatggagagatctcgcagcccaagtcgtaccgcccatgaaggagagggagatgatcacaattatggtagatacgtttcccacgtgctactatgaaaagctgataggatacatgccagctaactttgcggatctcgtcttctccggagaaaggattgaattcggactacaaaaaggcaagttcgaatatgctttcaatgtggtccccatcacaacagaaaagcccaat

SEQ ID NO: 204099 - DNA, 295 bp, Glycine max
  unsure (1)..(295): unsure at all n locations
acgcagctgcagcagcccccacncgccaggcgagttttttttttcctccaaaagcaaaagccttctggaggaatcctataaagggcccacgagggcttgggtgctatatgcacccccatatttactaaatacaccccctcgcgttttttggtgacacctttttcgcaaaggtatggaaacctacgaatatctgaacgaaacttgttaacttttccgaaagtcacagaacctcggggagtacataatcatccccttattgactaactgaatgtttccgaacctcactaaatgtgca

SEQ ID NO: 204100 - DNA, 482 bp, Glycine max
acactacaatactcaagctgggaaggatgcttcaatggaggagtatgaagagggagtatattatagatgggggagcacgacactgtaggaataaaagagggagagaagttctaccttgagtcgtgtctcacaagactctcattcatcaaagttacaactagtgttacacatgcttctatttatagactacgtagcttccttgagaagctttcttgagaaaactttcttgagaagcttctttgagaaaactttcttgagaagctagagcttagctacacacatctctctaataactaagctcacctccttgagaagcttccttgagaagatatctcaagaagctatatcttatctaccacacaccctattatagctgagctcacccgcctgcccaaatacatgaaaatattaaaaagaggccttattacaaagactactccaaaatggcctggaatacaaaggctataacctctttacactag

SEQ ID NO: 204101 - DNA, 357 bp, Glycine max
  unsure (1)..(357): unsure at all n locations
cgtctttatctatgaatattaaactatataacgttgaaaatctgaaactcagattgatcctcaacaaaaaattgaacttcaaagttctgttttccccaccaaattcaattttagtagaagcagaaattcaaagaaaccgaacataaaccgtcatgtttgaactcacgaacaagttccacattaatcaaaatcattaacattaaaatcaagttaaaaagtcagaattacctcctaaaccgttcgtacaagaagcaaattgaaagtgagataaagaatggcggngataacaatccccacgagaactcttaccaacatttttagcctccttcagccttagttgatcctattatggtttag

SEQ ID NO: 204102 - DNA, 315 bp, Glycine max
tataatgtgagtataaactattatcttacatgtttatactacaatatttgatattgaaccgcacatcacgtggatgcataattattgtccttttaatattatgattattaaactttgtgtagggtaaaattatcttaaactagatatgcatggcagatatatatcgccagatattgaagccatctcttattaagccatttcttgtgcagttgaaccatggttcgaaaatataacttttgagacagattgtagattccttgggcagtagtgaatttcttttcaacctttctgtaattcatcagatcttaatgttat

SEQ ID NO: 204103 - DNA, 335 bp, Glycine max
gcaacaaggcaagatgcctataaaaaaagctagggtagagagggagtgttatgaacagaggaaaaaaacagaatgcagagacacaaaggtaacaagcttaagacagagacagaaggaaatttgcttatattcttcacatctccttctaataatacaccacctatatatagttatatgcgcatgctacaaaacaaaagctaataacagaatctctaaggcactaaataacagaattataaaagcataagggactactgcttctaacagaattgagcactactgctcataacagagtggagcactacaaaataacggagatggaccaaaaaccctaa

SEQ ID NO: 204104 - DNA, 399 bp, Glycine max
  unsure (1)..(399): unsure at all n locations
agcttttaaagctacgtcatcttctggcttattttatatctttatcgcagcgaatgatggttttggaggcatgacattctctacaaaaaatatgccttctgttaggattatagcgactaaggtcaagagaattcctctttcgcctacagtgttcaattattctataaactattacaccttttaattttaaaaatttgtaaagaaaagccgagactcatatatacgcttccatatactactttcattctcttccaagtaaattaaactaaccttntccttttgatgtcggaaaggggaaccatttttacaaacttggaagaatcattatcaacttcactcaactccaacagcttattaaggtggcaagggaaataatggaaaattacttggtttgcaact

SEQ ID NO: 204105 - DNA, 409 bp, Glycine max
gtcttactcagactcaccaatcatcaactatttctcggcgatttcatgcactcactcactcacataattgatgaactccttaatcgcgtcactcccatcctcttgtcatcttcttctccaacacctccaccatcaccatcagtacctgctaacaatcaccagatgaaattagatgtgcctcgttatgatggcaccagaccacatggttggatttcaaaatcaaccaattcttcgaataccatggtacaccaaagaatgaaagaattaccataccttccgtctacatggaaagcacggcactcacatggttccaattcattctacatgatcctttctattcctcgccctttttttctttgaagaactaaaccacgaattggaggatcatcttgatattgacatctctgaa

SEQ ID NO: 204106 - DNA, 412 bp, Glycine max
agcttgttgcgagcaagagacccgattttttttaagtcctgtcaccatcatacgcaaaatccttcccattcaatttagaatcatacgtttcatgcgtcctgtccagaagcttcctccatacacccttaccctccacaggtcgtccattatcatgaaaaagagcaatctgcttaaacataaacattgaataaatgattccatgttaaatagagacctaaaataaaaaatgcagatgaaaatgaaagcacatacactatactgataaaggggctttccaatacgctgcacagcccctgatattaatagaaggcttaatttaatttacatttcatttacataatttcaagaaagtaaaaaactttatcgtgaggagaaaaacatattatataaatattgttatcagagatcatct

SEQ ID NO: 204107 - DNA, 221 bp, Glycine max
  unsure (1)..(221): unsure at all n locations
ccgctctaacctatgtctgagtctcgcatatctcatcatatatcgacgnaactttaccggagaggacgcaaggacaaatccagatacagagaacatacgtgatcatacattctgtcaccaccgactatacgcctttcatcatagactcggacaccagatagcggccataacctaatctgtcgtctaaattgcgggagtgagatgaagattcttagtattac

SEQ ID NO: 204108 - DNA, 356 bp, Glycine max
agcttccatcactaggaacagcgcagtctttatctttattaggcaaaaaagtggaccgtctgtggacttaacaacatggttcccgaacgcaccaactacatctgtaaagctcgcctaagcgcggcacataactggctaaaccatgacaaacacatggcggcaaattaaaagccattcgaaaggcctattagaggtgagagcgaaacacaacagccagcttttcctcgtgcaaaaaacaattagagggcctagtacaaacgcagaaagctctcattacatcttcgttcccctcccccaccctttgacttgctaaaagctgatacagcccccactgggctgggtggagcgatggaatg

SEQ ID NO: 204109 - DNA, 404 bp, Glycine max
ccttaagtcaccgcagctgcagcttaactgaccgaaaatacttttaattttgattcaatggaattatcaaacgctcttagtaaaagtttaatatcatcgaactgaaagggctacgcaccaacgagcaattggtttcaagcgcatattgcttttgcacggtttcagctaccgtgtccacaattagaccaaaaattatgactcgatggcaggtgacaaaatcaaaccgaatattaacacaaacaactaaatagtatttaggcagatcattcatatgaaataaagaatctgtgcacgaacaaggcacaatatcaattccaaattccagcacgaacaacatagcgtataaaagtttaactaatcaataaacaacctgatttcagatctatgctctattacgcttacat

SEQ ID NO: 204110 - DNA, 403 bp, Glycine max
gacacttaaaactaagctgaggttggttaatttacgcagtctgttaattttatagacaagcgctacaaaacaggatggtgcaacaactatttgtgtctgtgaatataatgcatcaggtggctggtcactataatattaaaaaatatgcattctgagatttttaaaacatgatatattggtggaggaattatcagcagagagtttttctgatatgttacattcttaatctggtaagcaagggatttatcgagtgatgcttttgggaatggtcgatgatccacgtgttgcgctcatcaagcttgtatatccgtcttaccacttgataacaatgtacttactatgagccgcttaaattttgtatctttacccccaagtattgttggtctttcttatcttcccttgc

SEQ ID NO: 204111 - DNA, 388 bp, Glycine max
  unsure (1)..(388): unsure at all n locations
tgttntattcatagattttgctagatatctccaactttagtgaaatttaaggttaaatccaagttttaacacccaaagaactcattttgtttaccttaaaactttaagaagaaaaacatattacatagtttcagtcaagacagcagatacgaaattttgaacattaatacaatatgcaatgaagcttagcttccataaataacaagggtagaagtcaagaagtggaaagacccaccttaccttgaatgaaacttgcgtggaattctcaaaggaataagggctcagatcttggagtctcaagcttcataagatgaaaaagatattttggaaccgaaaataagagctgtgcgccactatgatggtgaaatacgaaaacaagagagagaga

SEQ ID NO: 204112 - DNA, 398 bp, Glycine max
agcttgttgaaatagccatgtttttattatttatacatacccattctgctatagggtttttgtgaagatgtttgtgaatgttatatgctgaaattgcccatggaaaactgttagagatgaaatgtagagttaacctagggttggaaagtgagattgtggtgttatgagtggaaaaagacttgggcttttagagttggaaggttaaattgatttctgcggtaaatggaggttaaaatgagttaatcctaacttgaaatgtcatttatgacatgtgagaaaggttaggctgagctatagagaaaaacacatgaccttagtgaactcagggccatttttatggcaaaatcgggtgttgaagagtcaaattttgatttggtggaatattatgtgtaaataca

SEQ ID NO: 204113 - DNA, 406 bp, Glycine max
  unsure (1)..(406): unsure at all n locations
ctataaaactcagctttatagaatgtcgtcctaattctctcaattgtatacctctcaatgagctggtgaagaagaatgtggcatttacctgaggtaataacaagagcaagcctttgctntgctcaaagaaaagcttactaaggcacctgctctagctcttcctgacttttctaaaacttttgagctacaatgtgatgcctctggagtgggagttggaattgtatttgtacaaggtgggcaccctattgcttatttagtgaataacttcatagtgccaccctcaactatcccacctatgataaagagctctatgccttaataagagcccttcaaacttgggaacattaccttgtttccaatgaattcttcattcatagtgatcatcaatcacctaagtacatcagag

SEQ ID NO: 204114 - DNA, 411 bp, Glycine max
agcttgcttcacatttgtagtcagttattttactaacttttgggtagaaaaagctatgtaaattgtaatcgactccttccatttacagtactttttgtagtattgtgagtactttttgttaaatttaggtaataagtactgagtatcccacttttgtgtatttaataacctttccatttcaatttcaggtaaaataagcaagtttgtggaagtgctgattttgagtcgctcgctaagccaattctctggctttgcaagccatccactaaacacagcagttcatggctaagtgcgtagaagatcttggaaacagatgagttgtcatgatgcgctcagcgagaatcaactcgctaagcgcaccacttgcacctccaggctgagcaaagaagaggcgcgctaaaccaaatgtca

SEQ ID NO: 204115 - DNA, 446 bp, Glycine max
  unsure (1)..(446): unsure at all n locations
gntgacggactataccaagctctatgaaccagggacggagaaagatctatatataggcttgctaagggtagagagaggaagactagaganttggatcacgtaaagtgtgttaaggatgaagaaggcaaagtcttagtgcatgaaaaagatatcaaggaaatgtggaaggtgtatttccacaacttatttaatgatggatatggatatgactctagcagtctcgacacaagagaagaggaccggaactataagtattatcgtctgattcagaaacaggaagtaaaggaagcgttgaatagaatgagtaacggtaaggcggtgtggccagacaacatacctatcgaagtgtggaaaactcttggagatagaggtcttgagtggctcacccaactctctaatgaaatatgatgtcaaacgcctgcccgagatggagagaacaccttttg

SEQ ID NO: 204116 - DNA, 418 bp, Glycine max
agcttatatggaggctggatctttgaacattaatgtatgttcttcaatggagattttccaccatggagatgcagcggaagataaaggataagaggtgagaggagacgccatccactatggaataagccatggaagaaggagtctcaccaccaagagagtgccttggataagaagcttagagaggaagctttaatggaggaaaagaaagagagagacagggggggggagcatgaaattgaaggaggaaaagaaggagagaagttgaattttaaagtgtgtctcacaagactctcattcatcagagttacaacaagtgttacacataattctatttatagcctaggtaacttcgttgagaatcttcatggagaaacttccttgggaagcttccttgagaagctatagcttatcttcacac

SEQ ID NO: 204117 - DNA, 435 bp, Glycine max
  unsure (1)..(435): unsure at all n locations
taaaactcatcttgagaatangcaatggcagatcccaaaatatactcatcataaaagctacgcctttgatgttaaaagctatgccttctttgcacaaattagactcaaggcttctttctaatgattggtaaatnttgagcagtagtgcatcaatttttaacaaatgtttgttgaattatacatctatagtaaatgcaaagtaatacacctatggctgtcatactttntgttagaaagaactttcttgaacttcatgatcataaaactctaaggacatagttgtgtgtgtctgttatattgatttacccttaaaaatgatctttgaaccaacaatacgatatattgtaaactaatattttgagtttgaactaactaaccataattacatngttttcttcaatttgctgaattacattggtacagcaaaaatataca

SEQ ID NO: 204118 - DNA, 417 bp, Glycine max
  unsure (1)..(417): unsure at all n locations
gcttattgaaagaaattaatttataagaatattttgtgatttaaattattataataaatgtcattaaaaaaatantttatcttatttgtattaatatatattgaaatattatgttgatggtattaaatgaatcaattttactattttcaaacatttgataatattgtattaactgtattggatatttggatgaatcatgatataaaataatagttataaaaaaaattaaataggtaaccagatggactaaaccaaaccaaaccaaaccgttcactaataggttgggttgagtttaaaaaaaaattgtaaaagttaaaccaaatcaaacctatcaaatttaattggattgagttttaaatttaatcaaaactgatctaaaccagcacacgaacacccctaaagtaaagtggaatcctt

SEQ ID NO: 204119 - DNA, 358 bp, Glycine max
  unsure (1)..(358): unsure at all n locations
acgggagcanaagatacaagtatcattcaaggttagctatntgttcagagagcttgtgtatgtataatcatggccttcatcatgtcctcatttatacatttcattctaaaattcagagattcatgcaaagattattactcacagttagtcgttcactcacaagttaaggtcacactctcaccggtttatggttcaagctttttctttcacaatcaatctgtctactgactaacaattctaattgcaagttcacattcctgttctttctttgttcgacatgcacacttgctcaacttcatgaaaggaaacacaaatcttatcttatgcatgcattcaatttaaaacagagtcacacacc

SEQ ID NO: 204120 - DNA, 388 bp, Glycine max
tgcaactcatgaggttagtcccttttttttatcctcccaaggaaaggcacttcccctatattctctggctctccaatgaggtattttagggccttaattgctcaattttcgccaatatcatgagacaatgtatgcttggattcacgcttgtttgtatgaataggagggttgtgggggatggccttaggcctaatgtgggttctgaaattgttgggcacatcacatcgcccccattcttttttccctcatacctaaggtgcacccaccaagtgctcggtgaaatgcctcaatggaattagtgcatggttttgtgaacattagagtgtacaactgacttgtgggtatatggacagcttgtagaggatagaataagtgccaaaaataagga

SEQ ID NO: 204121 - DNA, 402 bp, Glycine max
acactataatactcaatctagatcaaacaaaatctatacattgcaatccactctattcatacaatttctcattcgaagcaatcacaacacttcatttcataaaaaatcaaaccactgaatatcatattcaatcagttcactattcaatcatgcctttgtacaaacaactaatacaactgctatttaaaggactgtaatttaaataactgaaacatgaagcataaactaaataaactgatcataataaactgttcaaaatgcaagacaagaagataaagatgttggctatcctcctgcgggtgatcctctgcatgctcattaagaatcaacactggagcagcaggaggatcctgaacaataggttgcgctggctccgatgctggtgcagatggttgggaatcc

SEQ ID NO: 204122 - DNA, 271 bp, Glycine max
aacacctaccaaacgctgggcacgcaaaaaaaaaaaaaacgcggcacaaaatggaaccacaaatccagacgagctcccagcagcaaaggaaagaaaggaaccgccgcacacaaaaccatcatcaacgggaaggacgcggcaacctccacgcaacatagaaggggaaaagttgggcagaacctccacaaatacccacggagatccacaactgcacacccccaagtgcaaaccttgagagatgccgaccatggcaagcatttagaggccacaa

SEQ ID NO: 204123 - DNA, 480 bp, Glycine max
  unsure (1)..(480): unsure at all n locations
actcagcttctatccaccctatntctctccgcctgtggcaacatttaaaagccaatgtgcgtggcaatcaacacaagataatataatagagtgcacataatcaatcataagtcacaaccaaacataagctaatcataaataagtcataaccaaacataatccaagcattcagaagtgaaatataatccaaacagtcataatttaaaaccacatagaatccaagcataaaagactaatagtccaaataccgaagaataatttaaagttcagaaagtgataacgtaaagagcatagccaaatacacggcttataagaaaagataataataatctaaacactaagagggtggtggtggtggtggaaggtcnaanctctgacgaatataacccacatcctcttcagctgcgtgagacgatatccattcctgcaagcgaccatcaatgatcaatcgtcaccacatagtgtgaaacccgtactcta

SEQ ID NO: 204124 - DNA, 286 bp, Glycine max
  unsure (1)..(286): unsure at all n locations
gcagcagcagcngagcgaagccaaaacattagacacaagaaggacgcacgcccaagagccaaggagaggcggaaaaccacaaaatgaggaacaccaagaggaccaccacgcaaaggggcgtgaaaaaagcaaagaacgagcaagcaacggggaagcgcaaaacagactccaaagggaaggccacaagtgaaggaggaagaaagacaaagaacaactataaccaacaaaggaccgtgacggaagcaaagagacggcacaacaggaaagcgcaacagcaagccagaaa

SEQ ID NO: 204125 - DNA, 414 bp, Glycine max
  unsure (1)..(414): unsure at all n locations
agctnggaaggatgcttcaatggaggtattttttgaggagagaaagagagaggggggagcacgaaattgaaggaagaaaaagggagagaagttgaactttgagttgtgtctcacaagactctcattcatcaaagttacaacaagtgttacacatgcttctatttatagactaggtagcttccttgagaagctttcttaagaaaacttccttgagaagctttcttaagaaaacttccttgagaagtttctttgagaaaacttccttgagaagctagagtttagctacacacacccatctaaaaactaagctcacctccttgagaagctttcttgagaagctagagcttagctacacacccctataatagctaagctcacccccatgacaaataaacatgaaaatacaaaaaaaat

SEQ ID NO: 204126 - DNA, 389 bp, Glycine max
  unsure (1)..(389): unsure at all n locations
tttacaatatcacacttaanaattatcttgaataagacattccacataattattacataagggtaataatcctttatatatatatatatataaaatttatagttgaacatagtatatcattatgatacgttagtctgtattctgatcccattatgataatatgtcccaataaggaaacatgatgatttggagtgactagtggggaatcttctattgtaaaaaaaacacctgatcttgtntgtgatcctgacaagagaaagcataagcatgggagaagaaattgaattaatttaactcacattgatgcacgcaaactgtgtctagctttcacggcatgaggagaatacgccatgacattgttcctctatttaactactattcactacggg

SEQ ID NO: 204127 - DNA, 418 bp, Glycine max
  unsure (1)..(418): unsure at all n locations
agcttctcaaggaagcgacctagcttatattatatgcatgcgncacactcgtggtaactttgatgaaagaaagtcttatgagacacactccaaaggtctacttctccccctcttttattccttcaatatcgggctcccccctctctctttctctccctctttattttnctccattgaagcatccttccaagcttcttatccaaggctcatcttgggggngaagctccttcttccatggcttattccctagtggatggcgcctcccttctcctcttctcctttgccttccgctgcatctccatggtgaaaaatcaccattgaaggaccttattgaagctcaaagatccagcctccatagaagctccacaagcaagctttcatcactccgtgacaaaattaaaccctccaacatccctac

SEQ ID NO: 204128 - DNA, 235 bp, Glycine max
gccccaactgctgcagctgcaccactacaactcgtaaaaaggccaacgaagacaaagaaccttctgaattggccacccgagaagacagttacgtgaagaaagccaaaccatcgtaatactccaatggagagggacgtgagcccactatcccatcacaagctaaaaacttggattcaacggtaaaacctacaccaacggcaggcgtcccgaaataacacgccacccaacaaccaat

SEQ ID NO: 204129 - DNA, 419 bp, Glycine max
tatccatcagctccaaccagagatatgcttcacgcattttgaatgtgctagcgaagtatgatcaatatttctacatcattctctagcctcttatgctagctacaacaccaacgctcttcattcatgctgcaactactgggctactaatacttccttctttgcaagtaaatatttatgttggatactatataacttctgtagctatatgtaacacttatttttaacacggtctttatacaaaaaatgaaaagttgtttattcagtttatgcgagtaaaatcatgtgtcattatcaaaacagtgtcatttattatgtggccaatggattataacatagcatcaccctatgttagactaagtgatttaaatatttcttttagctataatcttgcgggaaaatgcttactccttgtattcact

SEQ ID NO: 204130 - DNA, 401 bp, Glycine max
agcttctccttccttttcctataaatagggtgtggagggaagaacaaaaatgttcaaccctcctggaatatgagattcacttaaaattagtgagaaaaattatttccatgaagaaaatccaagcgcgggcgcttccgtgacgtttctgtgggtgatttcgcgaagattttcaaccgttcttcgtcggtcgtcgttcgttcttcgtcgttcttcgggcttcaatcggtaagttccagaaatcaaaatcaattcattctatgtacccttagtggtcctcatttgtttcgcgtgcttttatttttatttcatttactttccgtacccccttttgacgtgctttagtcatttatttaagtcactttctcgcctaatcaaaaataaaataaatctccactgatcat

SEQ ID NO: 204131 - DNA, 436 bp, Glycine max
tgccacccagctcgcccaggcgatcaaaggtgcttcctccacaagcaacagccttctggaggaatcttctggagggcccaagtgggcctggttgctatatgcacccccatatttactaaatacaccctcttgcgccttttttggagattcttctttcgtaaagttaccgaaacttacggatttcgcaacgatacttgttttctttccgcaatgttacggaaccttgtggattacataatcatccccttttatgacttacggaatgttacggaacctcagtaattgtgcaacgatgcttccttttgatttccggtgtgtcacggaaccttacggattgtgcatcagtacccttcttttgattttcggcatgtcccgaacttcacatatttcctaatgagtggtggccagcaccttacaatgacaaacataagttgat

SEQ ID NO: 204132 - DNA, 412 bp, Glycine max
agcttgcttgaaaagcttaggttggatctttttatcttattgaggtccttcaatggtgattttcagccatggagttgcaacggaagataaaggagaagaggtgagagaaggcgccatccactagggaataaaccatggaagaagaagcttcaccaccaagaaagtgtcttggataagaagcttagagaggaaacttcaatggaggaagataatgagagagagagaaagttgcatgggaatgaaggaaagagaaggagagaagttgaactttgaagtgtgtctcacaagactctcattcatcaaagttaccataagtgttatacatgcttctatttatagcctaggtttcttccttgagaagctagtgttacacccctccaatagctaagctcaccccatgccaaaatacatg

SEQ ID NO: 204133 - DNA, 372 bp, Glycine max
tatccccacatgagtgcagaactattggcgagtttgtttgattataggaggctgaatcatgtgaccagaatagatcatttttccctgcctctcattgatgaaatgcttgagcgcttggcaggtaagactcattattggttcttgatggatttctggttatttacaaattcatattgctcatgaggataaagaaaagaccacattcacctattcctttggcacttatgcctataagaggatgcctttttgcctctacacgccccttggtaccttccaacggggatgcttagcaatttcagtgacttcttatagaattgcatagaagtgttaatgatgaatttacctggtaatgaatcttcttttatacatgtt

SEQ ID NO: 204134 - DNA, 209 bp, Glycine max
  unsure (1)..(209): unsure at all n locations
ttaagaacttttaggaagttattaaaaagttttaggaagtngtattataatgaagatggtaaattgtgtaattgatgaagaagtttggagaaaaataaattaagtttttagttttttattaatttgggtaaaaattttttttgtaattttttttataattgaagatgttgaagtttataaagggtatttgggggaagtntttttatggt

SEQ ID NO: 204135 - DNA, 476 bp, Glycine max
gacactataatactcacgcttgacaaccagcacagtgtcacattcgagccaaactttgctccaacctttgctgaaagcaaactccatagacaaaatagcagcaataacttcggcaaaaagagtagattgcacaccaatataaaataaatttttgtattaaattgtgtatatatattaacctaaatctcttacctatagttgggcatttgggtttgggcctacaatgggttttttagtcaacctgattaaatcatagggtaaaggggtttatccacgccccccacatgcattttacaatttaatataaaaaatataattataataaataaggggtataaactaaataaaaaatatataacaattaagcattctttatacggtttaatggctggtgaatgatgatataatattttgacttaatataacattaccgattaagtaatatgatgtaaaaaatactttataaattgagtaac

SEQ ID NO: 204136 - DNA, 406 bp, Glycine max
ctaagcttgtatatgcattccagtttcctcgctcgaatgagatgtctattataattttgtcaacaagcacaggagggaatgatgctctttctatgcttgcttcatataagcagttttttctaccatatttatttgaaaaaggaaacaaaaggaacctcataatagttgttatttattaacttctgttgtagaaacttcatttcattcatatgaccatatcatgtcttgcctatagctaggttctcttgctcatggtgctaatcataaatttcagtctcaaatcagtttgataaccttcaataaatgttcatgtttataaattgaaaaactatatatggaaatgtatcctacaattggattgtaatctcttccaagattttaaattgtggattgcatcacgtgaagt

SEQ ID NO: 204137 - DNA, 361 bp, Glycine max
aaccgccttctggaggaattttctggaacgcccaaatgggcctggttgctatttgcacccccatttttactaagtacaccccctgccttttttggtgattctttttccgtaacgttatgaaactttacgaatttcataacgatgcttgttttctttccgtaatgttatgaaaccttacggattacgtaatcatcccttttttgccttccggaacgttacagaactttacgaattgcacactaacacttccttttaatttctggcatatcacggaacttcacggattgtgctacaatgctttcttttgacttctggcatgtcacggaacttcacgaattgcctaacgatgggtgccaatttc

SEQ ID NO: 204138 - DNA, 354 bp, Glycine max
gccgttgtgaaagaattatacgccatcttgtctgatccaaaggatatatcaccctaccaggtgtgagtcacgggtcatctggttatattcgatgaagatggtccccataatatgttgggcatcccagtgagtgtagaacatggtgagaatgtatgttcgtatctaacattagcgctgctgaggcctgatcctcacgagttagctgctaagctctgcatccctacgatgggatatgagctgaacactgaagagctccccttgaagatcttaatgatgagaatgactactctgactcagacatgttgcattctctcttattgtgacttggtcccgacctttcacactattgacatc

SEQ ID NO: 204139 - DNA, 382 bp, Glycine max
gccatggaagaacaccacacccgggcccgacggaacgaagggcgcatctgtcgtacatgctaaagattatctatcctccgctaaggacacaaacatctctggcatgagtggcatgactcgtaacgggcggatctccgcaacacctgagccaccatggcgatccaaggacccaaaggggaaggcaatggcaggcatggaagaaagcgataaaacaaacccacatccacatgacgaggtcccgaccggaaggtttgccaaagaagaagatgacttctgcaaaaagggaatatctgctgaataagcaatcgagttccgctgaatcatccaacagagtgagttcaaggtaattgaactaaataacacccccactaggatatctctg

SEQ ID NO: 204140 - DNA, 220 bp, Glycine max
caccccggatatcgacagccaccgcttttggagtgttgtacaccaacatccgctttgaagtcattaaaggattgtctgtatttcgggagctacacgttcatctcatggacgaacagtatactggttttcattaagaaaatgggcccggcggtggcaccactggttcttccatggacaattttgagcctaaatatgtcttgaatttatgccaagcgttggc

SEQ ID NO: 204141 - DNA, 453 bp, Glycine max
tgttccaagaagcaagctcatgcactgtcacatagattgttgaagatgaacttagttacttgtaattcataaatgttatagaaccgaggtgtagatatcttattggtgggcgttggaagatggagataaggtggatgacaacattggtcgttatggcctaattctattgtcttctatattggaccttcaatattctgtaatatggtggagtgtccaatcatgtgaaagggagcatcaagtctggtgtttttattaacataagttgtattggatagtaactatctttttgtttttttgtggtaaccgtatcattgatattctaaattacaagttactatctacttaactattgtaatttttatcctaagaattgaaatagtacatggagtttatacactacaccttgtcgacattttatctgatcccttggacataattttgtataaatcgctt

SEQ ID NO: 204142 - DNA, 414 bp, Glycine max
agctttcatctagccaagatatacttttgtgttcaagagaacctaacgggttctaattatgtgggccatcaaacctatcatgtgttgacagtaattgattagcccatgaatctcctcgggggccgcacacacttcggccatggcttttgctttggctaatagacgcgggaggtcttgacttccattcaaggtcaaggcgaacctatccatccacatagtcgcttcttgatgcaatgcatcaatcaccccccctcttgcttctttttcggtgtacacttgtgcaaaatcctccactagcttttgttcatgggccacagactggttcaactcttccttgtattgccctatgatagctagcatgctttgctccgtggcttccaagtgttgagcccaactcctcttagatcttgcaca

SEQ ID NO: 204143 - DNA, 354 bp, Glycine max
tccatcaagtggtaatgagaacacattatctccaagtattgtgctcctaaacctccattaagttttctgacttaccttctcttccattgtagttactacattatttctgcatgaatcacatcacatgtcttgtgctaaattattttaacatgatattttataagttccaccgatcaaacttgctataaaagccaagatctgattctctatgggccaaatttcttgatctgttcttgaccatgaattgtggtgagtatatgtccctttgagtattgtcttgttatttctgtggatgaaaaaataatcatataattcttacacaaatattaaggaataataaacctcgaaaactca

SEQ ID NO: 204144 - DNA, 420 bp, Glycine max
  unsure (1)..(420): unsure at all n locations
agcttatttgggctcaatgactttctgatttttgtgtgtgacttaactnttttttccttgtccctaacgtttggcattctttcatattctgacacaatattctttttttagacatcagaaataaaccaagcagatgaagctgaacaagaaagtgatcttgattccccgaggaaaggaaaatgttttgtgctataaagaaatctacttgacaggtgataaagcttaaaatttcattcttctttgacaaaaatttcatctctccattgttcaatttccagtgtttatgtttccttaagactatttcttatttttaataatgctcttgcattagattaaatgtattattggttcattcatttctactttgacagggggctactaaaccatgataagaaaaaagtctgaatgggtctacctgat

SEQ ID NO: 204145 - DNA, 388 bp, Glycine max
  unsure (1)..(388): unsure at all n locations
gaccttaaaactaagctttagaagaaatgagacaaaaagcttgtgagtgtttatattcgaaacatatttgaggcatatctagccattaatattgtaagtttgcaaaaatctacctcatccacatattttaatactttntcctttacattgctntgcttaagctgaacttggatccaaaggacaatcatattgcaaaaactacaaaaggggctctcccttgtttgagaccgattccaactttgattatgcaccactgttttaataacatcactgcaggttaaagttagacttttgttaagagactgggacaaaggaacgtgtctctaaagaatcaagattaggataacgagaaaagtgtactccattgtattaaattcatttattgaac

SEQ ID NO: 204146 - DNA, 418 bp, Glycine max
agcttgaattttagcaagaatgatattgaataatgttcaaactgctactaaatcacatcaagtttaaaatgtgtcaagtcaataactaaaacgcacaatgatataactaaattaatgatatatttgtattatgaaacttattttatttatcttattataaatgcgcattaaataaatacaatacaaataggtaatatcaactatcaagtactcaaatttagattatgcgaagtgtaaagtctaagtacaaataatacaatacaaataattcaaaccagtctaagtattaaaacactctcatgtttattaaacaacacagcattttgtttttctccattaaggataaaaaacccacgggactcatgggttacgcgagacggagtaaaaagtccacttttcaaatgagcttacaaaatga

SEQ ID NO: 204147 - DNA, 407 bp, Glycine max
  unsure (1)..(407): unsure at all n locations
agctttatgcttaaaagaaatttatgtaattatttatccgaatcttnttttgaaaagttattaattattctcatccaataaaggggaaaaacctcggaactcgttaaaaataaaatgaaaaagattgaattacgaaggataaatattgtttgacacctctctaaaaggaaatacgtttttgtgaagagatttgaaaagaaaacaatataataattaatgtgctaaaaaataaaaatacttaaaataaatataaaaaataagagtgtaaaagaattaaaattaaattatgaaatataacttcttatgtgattatgtgaaaagtacatattattgtttctgtttcatacattcataaaggtgacacttttcttatctttcaaccctaaaacaggaatctactgaaacct

SEQ ID NO: 204148 - DNA, 447 bp, Glycine max
tgaactatagatactcgagctttaccttatgtatccaaaggatgtactcctcacgtttatgtctaagcaaaagatcaaaaaggtcagaggttatgcaaatttcaactcatagaaatcactaataaatagacattgaagaatgaacaagacacaattaatgtagattatccatacccaaattaacatattactcaaaaccctaaaatctgaaatgctacaactactaataccagtatttaaatcactttattttgctgtcagtgagatcaggtaattaattttttcaagtcttacatcttttactgagatagccttaaaaatgatccgggtgtaacatgacttcactccattctaacaacattattaaacataccctaaaacacattacggttgaaatatagaataactaaggacgccgttttaaaacactaaataatccattaaaat

SEQ ID NO: 204149 - DNA, 417 bp, Glycine max
  unsure (1)..(417): unsure at all n locations
agcttataagaaattcaaatggttatttctttttactcggacgnccgattctggcgcataatatatcgagacgctcgaaattgaacaacggaagctttagagaaattcaaatggtcataacttttaactcggaggtctgattcaggcgcataatctatcgagacgcccaaaattaaacaatggaagctcttgagcaattcaaatggtcataacttttaactcggatgtccatttcaggcacacaatatatcgagacggttgaaattgaacaacggaggctcttgagaaattcaaatggtcataacttttaactaggaggtccgattcaggcgcataatatatcgagacgctcgaaattgaacaacagagggtctttagacattcatatggacataacttgtaactcggatgcccatt

SEQ ID NO: 204150 - DNA, 276 bp, Glycine max
atatatgatgcactctggatctgacattccgacttaaaagttatgaccatctgaattctctaagagctttcgttgttaatttcgagcgtgttgatatattatgtgcctaaatccgacatcccagttaaaagttatgaccattcgaattcttctaagcttcgctgctaatttcaagctctcgattatataaccccgaatttacaaccagtgaaagtataacatttaattcacaagctccgtgtcaatttagcgctcattacttgcccccatcgactt

SEQ ID NO: 204151 - DNA, 347 bp, Glycine max
  unsure (1)..(347): unsure at all n locations
ggctgcagcaccggccttcgcttccctaactgtactggaggcgcgtgccgtggctttatcctctatgggtntctggagttttaacatgacttccaagatggaagccatttgatcttttaaggccgatagatcggccttcatctgttcttgcacgcccttttcattatccatttttttggatcgagtgttataggggtgccttggtgttttcttagttatgatgaaattcctaaagaaataaacaacagtgagtatgccaccaaaacatgagtatgccaatggatgatcggagcacttggatccaccccaagaattttagataacgtaatgagtccagaacttctcat

SEQ ID NO: 204152 - DNA, 398 bp, Glycine max
  unsure (1)..(398): unsure at all n locations
ttgctnacattaagacataccagcattttattgttccagtcctatgaccacaatattggtgccagacacaatatacacaccctgtaccaccacataagagggtccaaagaggaaggccaaagaaaaatagaaggagatctgtagatgaggacaatgtcacaggacatatgctaaagaggaaattggctgagtttacatgtggaaggtgtggccaaaccaatcataacattagaagctgtaaaaatattggagttcctgttaggccaaagaaatatgtcgcaccatcaacttcaaatgaggatgaccacctattatctcaagatgaacaagctttgaatgaggctgaagaagctgctgctcatgttcaacaagatccggtggagattaatttatctcac

SEQ ID NO: 204153 - DNA, 367 bp, Glycine max
  unsure (1)..(367): unsure at all n locations
tactaagctctagccaatggacctccttgaaaaagagcgtgattgtctttttgaccttgnnccctttccttggcttgaagctcactacaagccttaagtgaaaaaccatgatattaccatatccttaaggaactttggagctttggaattgctttgggaataagtgtggggggtttttgtttcattggacaacttgttttgttggctatgcttcatgatgtatcttgggccatacttgatgtacattgtatattggttaaatgttggacatgctgaatgaaatgttgtctctcaaaggctaaaaaaaaacaaaaaaaaaaaaaaaatatttcgaaaaaacaaaaaattcctaaacaaaaaggaaaga

SEQ ID NO: 204154 - DNA, 419 bp, Glycine max
  unsure (1)..(419): unsure at all n locations
ctctcagtcacctgcggcatgcaagcttggaagatccaaaggatcaatgtttctgctagcgtgtgttanatnggaagcaaaggaccaagatagcacgtcatgcgattccccaggtatgtcgagtcccgtggcagcagagaaccctatcctcacccactcgggaagagaagtcttcaaatcgaccacatcggagaggatattgctggttctctgtgaagggtagaccaaagaagcaaccaagaggctggtggaggcatcataggtaatgagaaccttggctactttattgttggccaaatcccaagacgtcgttttgatggatctgatagaattgacgttaattccgatgtgtggatttggtggatcccaagagttccggaaagtgtcaaactcaacagcgacgacttgatcaccacact

SEQ ID NO: 204155 - DNA, 453 bp, Glycine max
tattaattagtgcggtcacattcaaaagcgtcgcgcgggttctttttttttaaggtggcacaaactctttgactatgtcaccaatggtgaagttacggaccttacggtgcaacttggtatcacacactcatgatctcggcggcaactatcacgttttcacgtcaaagttcttacacagctatagttgcaacgacacaaagaacatgtgcatttccatagcttagaagtcgatgttgcaagagataatataaacaacaaaactaagattaagatgaacgacgtaaaaataaagaacgttaactgtgagatccataacttacctgtcatgttagaattaatattctattaacccttgaactggaaagtatgctatgaagtctatctctggccaattggagcactcgaaagttctggtcaaataacgcttaattgattattcccctcgccctgctc

SEQ ID NO: 204156 - DNA, 405 bp, Glycine max
  unsure (1)..(405): unsure at all n locations
ttgcttaactcgatcgtttaagccgttttctttcctaataattgatgaaangaatttcaatcgattattggtgttgtaatctcgtttaatcactgttaaaacataatctaaccgatcgtttacgttgtaacctcggttaacaccaaaaagggcaaaataataataaaataatcaaaatatctgtaaataaaataataaaaaaaaatcgatcagacgtctttctttggaagtttccatgaatgaattgactaataaccaaggtgaaactaaggttaanatcaactcacaaatcaagctttgtccgcaaaaatcactgaaaaccgctttagggtccaacgccttaaaatggtcctctntgcttttatcggtttacatggaccattcaaaagcataanatcaacatgt

SEQ ID NO: 204157 - DNA, 429 bp, Glycine max
  unsure (1)..(429): unsure at all n locations
tcttagtctcagcgaatgaagatgaattcgtggctactttattctctcctctaatgacaatagcatcacttctggcactaaattgctgggagttggaagccatcttctcaattaaattnttggcttcaataggggtcatgtctccaagggctccaccactggcagcatctatcatacttctctccatgttactgagcccttcataaaaatattggagaagaagctgctcagaaatctggtagtgagggcaactgacacatactttcttaaatctctcccaatattcatataggctctctccattaagttgcttaatgcctgaaatatcctttctgatggtcgtggtcctggaagcagggaaaaatcttctaagaatactctctcgaggtcatcccagctcatgatggacctttggagcaggtaatataa

SEQ ID NO: 204158 - DNA, 327 bp, Glycine max
  unsure (1)..(327): unsure at all n locations
aacgaattctccaacatctcacaaatcantgtataaccccacacatcccctgtgtgtcccacctccaacttgagctcacgtaccatccacacatagcccttatccgtcgttccttctcaacgcgcgggtcncccatcaatctctcccaaagcttccacnaacatccaagtaactcaatatccaaatcatcacaaactaacaaaccaagcaaaacagggcaaaggcagaaaactctgcccaaaactcaaaccacaatcacagctttttctcacttatagaccccagtaacatttccttcattccaattcgttaaccggtggatcgact

SEQ ID NO: 204159 - DNA, 375 bp, Glycine max
  unsure (1)..(375): unsure at all n locations
gaacaaaagtgcatgtaanaataaaaagtcacgatttacattgaaactttccattttttctaacagaaattaaaaatgactctatttaaaaatcaagagttttaggaaaagaatgaagtttttttagttgaataaataagaagaaatagttttatctattaaaataattgttttaagggaaataaaataaatatgttcttaagaaattaaaaggagattntatttattcattagataaggtgtaaaataaagtttctttctataaaataataaaataaaataaaatatagagtaaataataaactgaaaatatcttagtcataaattaagacatattagctcagtattatanttactataagtttctatgctctc

SEQ ID NO: 204160 - DNA, 366 bp, Glycine max
  unsure (1)..(366): unsure at all n locations
agcttgtaatcgattaaactaatatgagatataactntgcaaacttaagacaacttgtgtaatcaattactgtaaggttatgattgattaaaacagaaagttttgccttctgaataaattttctaactttagaaatattctccttactcacacatgatgatgcatgatgcacaaatgatatgatatagactaagatacaacatacaatataacaatcaatacaaatgccactcaagagagttgggcatgtaaaagatagcacttcttcaagctcttcttcaagattcaaggctaagtcttcatgctgctcattttgctccccctgtctctaacaagtgattttgtcaaaccattataactgtgcac

SEQ ID NO: 204161 - DNA, 398 bp, Glycine max
  unsure (1)..(398): unsure at all n locations
cagaggagcacaaaccacaaacccttgcgacaggtacagatttctgattcaaggccagctgggttaccaagttgaccaatgcatccagtttgccttcaagcttcttagtttcagatgatgcagatgggtttgtagctacctcatgcactcctctaatgactatggcatcatttatggcgctaaactgctgggagttggaggccatcttctcaattaaatttctggcttcagcaggagtcatgtctccaagggctccaccactggcagcatctatcatacttctctccatattactgagtccttcataaaaatattggagaagaaagctgtctgaaatctgatggtgggggcaactggcacatagtttcttaaatctnctccagtactcatacaggctc

SEQ ID NO: 204162 - DNA, 385 bp, Glycine max
agcttgttcatcatttatattgaatttatgtctttctatatgactctgtaagccactacgcttaggcttagcgagtgtttaaatttccagttttacttctaagtttgtataaacttgcttaggtggcatgccgtgctcagcgagttagtttagttaggtcagaatgtttgaggcttttggtattttgttggcggctaagcgagccgcgctcgctaagccaccatgcctctgaggttagaataagcttgggctaagcgagtcagtctcgctaagcccaaggcaatttagtgttctgaaattttgttcatgcactaagcgagtcatgctcgctaagcgcaatttcttctctgtctttgaataaggcttagcgagccacactccctaa

SEQ ID NO: 204163 - DNA, 350 bp, Glycine max
  unsure (1)..(350): unsure at all n locations
gctcctgagtatgacagtcaccgctttaggagcgctgtacaccagcagcgcttcgaggccatcaagggatggtcgtttctccgggaacgacgtgtccagctcagagacaacgagtatacggatttccaggaggagatagggcgccggcggtggacatcactggttactcccatggccaagttcgatccagaaatagtccttgagttttatgccaatgcttggccaacagaggagggcgtgcgtgacatgaggtcctgngtaaggggtcagtggatcccattcgatgcagatgctattggccagctcctgggatatccgttagtgttagaagagggccaggagtgcgagta

SEQ ID NO: 204164 - DNA, 324 bp, Glycine max
  unsure (1)..(324): unsure at all n locations
aactaagttcatcaattatattgaacttccggatccctgactcggatcaaacgtgagaagcacttatctntgacatcgtcaaaacttcatatcattatatgcctctacaaaaatatgatattgactccttagacaacaaaagctaatattctttctcacacttctttttatataaccaattaacctccatatgataaagaaaataatattcagatatgaggacaactagaaatacatgacacaacaaccttctcgattgatgacagaaaaatctaatctccacatacacagacatatatacatatatatatatatatacataca

SEQ ID NO: 204165 - DNA, 282 bp, Glycine max
  unsure (1)..(282): unsure at all n locations
ttggagaggancaataacaatgcctataggttggacctcctacaagagtatggagtcagcaccactgttaacatttctgatttaattccttttgcaggtggagcttatattgaggagaaggaactaacatatttgaggtcaaattctctttcaggggaaggggatgatgcaatcctccctaggaagggaccagtcactatagccctgaacaaaaggccccaagaggattgggctatagctgctgaagaagccctatggttctcacaacctcaaggagatttt

SEQ ID NO: 204166 - DNA, 357 bp, Glycine max
aagacacatctcttcaaacaatggaaggttctatatatatgtgtgtgtctgactctaaaagcaatgggagagattccaagtgaacttcattgccaaatgctctctcaaaagaaactcttgggcaaacacttgcaaatccattaagagttcatccatggacttcaattgtaatatccttctcttcaaaatagaattgttcttctttcttcttatacaaagagattgattaagggaccgagggtctcttaagttgtaagaattcctgaacacaagggatgggttgtccctgtgtggttcagaagttgtaaaggaatttacaaagagaaaggaaaatctcaactgggttgcttgagtact

SEQ ID NO: 204167 - DNA, 253 bp, Glycine max
ctgcatgttgcaagcttttcttccaatgcaagctcctctgattcaaagctgcaaaaccattctcaattgagttgatacctcatcaatatactccttgattagtcttggcatctgaagcctacctttgtggagctctggattacacatattacctagattcctaacaagaactgcacgcatacaaaatattatatctctaagagacccctcttgcctgcgatggcgaagctcttgaaagctggtactcaccaac

SEQ ID NO: 204168 - DNA, 355 bp, Glycine max
cagtgtaatcgattactataagacaatgttgaagcaaagggtttaaaaagggttttgaatttgaattttgaatcatgtaatcgattactagatgtttgtaattgattaccagcaacgacacttcagaaaacactctgaaaagacatgaaccttcaaaatataactctgtaatcgattaccagaaacttgtaatcgattaccagtgaagaatttcagagataactttctgagaagacacatatcttcaaaccattctgaaaagacacgaatgacctatctatatgtgtgtctgacttcgaaaagcaagagagagattctaagagaaactaattgtctaatgctctctaacaactct

SEQ ID NO: 204169 - DNA, 197 bp, Glycine max
ttctccaattacctgggaaacttatctagagaactcgaacttttgatgtgtttctaacgtggacaagattttcttaaaaagactggtctttaacaacgggaggaccctggtcaaactaaaacaggggtaactgaattctgacattgaggatcatcagagtatatgatcgtacccaacaaaatggtattgaagaaact

SEQ ID NO: 204170 - DNA, 305 bp, Glycine max
taccactactggaaaacctgaatgcaaattcttattgaggcacaaaacttaaatatttgggaagccatagaaatagggccttatatacccaccacaagagaatgatatacaatagatggaagcacatcaagtgaaagcataacaatagaaaaacctaaagatagatggtctgaagaggatagaagacgagtacaatacaatttaacagccaaaaacataataacatctgccctgtgaatggatgaatattcaggcgttcaaaatgtaagagcgctaatgaaatgtgggacactctacacataaca

SEQ ID NO: 204171 - DNA, 390 bp, Glycine max
tgcttctttggaccctgagcaggatactatcttctcttttttaaccatgctatgtgctcgcgactggtccctccccttcgcagcttgagttcactattgctaccccacagagctccgcgaaatttattccggccatactcttccttgcgagccctcttggtctcttgttcaagggctctcgtggtagttgcattctcttcccgtaatccggcacattccttccggatgtgtgtagcggccaacttgaacttctccttggcaagtctcgcttttcctaactcacttttgagagcttggacttcttcgtcctcctccggtgcctcaaaactctcttcgctggcgacttttaacttggcgagccaatctatacctcgtatatgaaccttcagc

SEQ ID NO: 204172 - DNA, 408 bp, Glycine max
  unsure (1)..(408): unsure at all n locations
gtgctcgngattggnctctctcttcccttcgaagcttgagctcactgttgctaccccataaagntncacgaaatttgtcacggccatgctcttccttgcgagccctcttggtttcttgttcaagggcccttgcggtagctgcattttcttctcgtaacccggcacactcttttcgaacgtctgtagcgaccaacttcaatttttctttggcaagtctagcttttcctagttctgtttttagagctcagacttcttcatcctcttccggagcttcgaagctntcttcatctataatctttaacttggagagccaatctaacccttttgtacgaactttcanccattcatgataaccaccaatgatgtcattacgaatgcccctacgttcttatcttccttaacggcttt

SEQ ID NO: 204173 - DNA, 340 bp, Glycine max
  unsure (1)..(340): unsure at all n locations
ccatgccaaacatgncaaatagacatggaatttatattgattgttttaaactaagcatgaagcttgatataggttaagcttttttatacatgcttaaaatggatcaaagatgttaaacaaatggattgatctctaagtttcttaagagaaatgagttcaacacagtgtaattcattacaaggttttgtaatcaattacaaagtgttagaacaaaaaatatatctctcttttacttgaaatttggcaacacttctccctataggcggtntggcctctgtggtggcagtctcttctccttctgcacttgaaaacaagtntgacggtggaacaacatgcgatg

SEQ ID NO: 204174 - DNA, 428 bp, Glycine max
  unsure (1)..(428): unsure at all n locations
ttgactctngatacaggntctatcctatccgacatgtttttttttcgtatnnngatgtctcattctccgttcatagtttgttctataatttgagttcttgtttatttcgtttgtgatttctgtatgttcatcttccatctctgagtctattcgattttgttttcagttttgtttttttgttttcgtttttcgctctcgttttcattttttcgttttctatctattctatttgattctgtttctctgtttgcttgttcaatggtctgtttgtgccttgttctattcgaattctgtttgggacgaattctatttgctggatgaatttggggtttgggtcaaattgcctatagaatgaatatatcggttggactagtggaattgattgaacattctattactcctgatgaattgtgaagagcacataatat

SEQ ID NO: 204175 - DNA, 221 bp, Glycine max
  unsure (1)..(221): unsure at all n locations
aggaagagagaaagctgnctttttaaaaatgagggctgagtgaagagagagaaaagctttctggttttaaataaaaggatttcctctttttctattattttattcaagctctgccacatgtccctatttgattggagcaaaaagggcccactttctctttttgactgtgacccatactcagtcacaaaagtgagaaaaatctgacctttgaaacgctaaaa

SEQ ID NO: 204176 - DNA, 464 bp, Glycine max
  unsure (1)..(464): unsure at all n locations
tgacgtctgcaactcaagtaagaaagaagattattctcttatctatctcctatatgngtattggctatacttgtgtccaaactacttacaaatattatgggaaagaaatgaatttgttcctcagtaaaccaagatagggaagtttggccaccaaaattcccaattaacaaatgttgagtacctacagcatatcaaactagtttttgtcctactattgtgaaattctagaagcataaacatgaaattagggtacttacttccaacattntttcctcccacaaaagcattttcacctgattccgggagctattaacctatctttgcctcttaaaccataaatnttttatataactaatatgaataactaanaagaacagcagaaaaaataccctggaatgatcaatacaatatacaattacatgaagtcatgcacacacanataatatgctgatgaagtacatata

SEQ ID NO: 204177 - DNA, 388 bp, Glycine max
  unsure (1)..(388): unsure at all n locations
agcttctggttttaattattagcgtctcgatatactacagacacaatcggacatccgagtaaaaacctatcgtcgnttcaattttctcattgcttctgttttcaattttgagcatctcgatatattacaagaatcaatcggacatccgagttaaaagttattgtcgtttaaatttgctacgagcatcttctttcaattacgagcgtctcgatataccacgggacacaatcgaacatcccagtaaaaagttattgtcgtttgaaaatgatcagagcttctgttttcaatttccagtctagatatattacgggactcaatcagaaatccgagttaaaagtaattgtcttttgatttatgtcagagcttctgttctgaatatcaagcgtct

SEQ ID NO: 204178 - DNA, 353 bp, Glycine max
  unsure (1)..(353): unsure at all n locations
tcccttaatatatagagacgctcgaagtggaataccgaagccctgagcaaattcaaacgacaataactntttactcggatgtctgattgagtcctgtaatatatcgagactcttgaaatggaatttcgaagctcagagcanattcaaacgacaataactntttactcgtatgtctgattgagtcctgcattatatcgagaccctcgaaatataataccgaagctctgatccaattcaaaggacaacaactatttactcggatgtctgattcagtcccgtaatatatcgagacgctcgaatttgaatattgaagctctgaacacattcaaactaccattaacttttacctcgat

SEQ ID NO: 204179 - DNA, 369 bp, Glycine max
  unsure (1)..(369): unsure at all n locations
agcttaatgttntaattttaatcaatttgtaatctaaagctggatatctggtaacactctacagtctacattaataatacaggaaaggtggaaaaagcaatgcatgagataaatgtgctaaggattgttcactctttgccacttgcagtataccaagaaaccttggccactgtttcagattgacaagtgagttttgatagggatagaatcttttcttttgttttgtttttgcttttcttcctttatttgttaagtgacactccactatcagcttaaaagaagagtgaaatggactgaatggtatcagaagagtttcccttttcttttcctctagcttttctttggtggtatcagaaggatctctgatca

SEQ ID NO: 204180 - DNA, 438 bp, Glycine max
  unsure (1)..(438): unsure at all n locations
agcaataccacaaaagtaagtaatgcaatgtctagtctacaaatttggtagtcagagggaatgattatttatgccaataaagaattatctagtttgtatgcattgaacttggcttattcacttgtttattccattctagttcataggttcttatgattggaaaatttgatgtttttctcttatctatatgtgagtcatttctatagaaacatactgaacccttatttgctgtagcataagctcacagacccttatcattttgttgtttgcctcatcattgatagtattcattgttggagactattgatactgagcattatcacaggtacgaatgcaaaacatactttcattggctttggttatgttagagtccctttttacgttgttttatgtgattaatgactattgttgtgcatatnagtaatgtttatcatgagt

SEQ ID NO: 204181 - DNA, 383 bp, Glycine max
  unsure (1)..(383): unsure at all n locations
agctataccattgnggatatttttggtgggttttctccaaatatgaaattagagctcaagtccaaaactngaagcgaagagaaatggtgaatcttatcaggaagtggcccccaaatccccaaggacaccaagctgagaacccttaagctggccaaccttgtcaaagtggagagaaaggaaacaatggagaaattcatggatagagtctgattaggaacagcaaatccattgaaccgttgcggcttctcagacttttctcccataattttaagctcagttatctcattattttcacatttaatgctcaggtttgcagagggtgaaatgctgcataggtcccaattgtaattttcccaaatttgcagagaagaagggtactcgag

SEQ ID NO: 204182 - DNA, 387 bp, Glycine max
ctcacgcttgcagctggatcttatcctattcgacttctatggggagcccgccaggtagcccgaaaacaccggcctcacaggataaaaatgagaagaggagctatttctactcgggcagaatagtggagagtctgattgactataggaggtgaaccggttaccaaaaaggaccatttccctgtcattattgaccagatgcttgtcgcctgcaggtaatccactactgttcttgaggttttcttgtattgcaatactatgtctgagataggaaagaccacttccctgccctttgactttgttaaaagatgccttcgctggcatgcctggccttcatgggcagtatatttaggattttaaaattgataagggttatgagatcctgatatg

SEQ ID NO: 204183 - DNA, 383 bp, Glycine max
  unsure (1)..(383): unsure at all n locations
tgcaagctagacgtgaacaaagactagnaagcnntttctttctttacctacaaacagcgggcgccaaataattcaatattaatggctaagggcttaggaattgttgcttttgcttatttactattactatatattgtgcagatctttgtcaccagaagaattgataccgatactttcttatctgtatccgggagaggaagcttatgctaaatatttcacatgttacttaatgaatgaggttagttaactacctatgaattgacatggtgttgttaattgtattaatacatattgaagcgaaataagaatcactagaaatagggatggaacatataacatgcttacatattaccaattattcgctgagaatgtatgtatacatg

SEQ ID NO: 204184 - DNA, 438 bp, Glycine max
  unsure (1)..(438): unsure at all n locations
atgttccatctctacaggtaagtgacaagacttgtctttatatcatttgaaacagcgataagcctatcggagtcttaaatgcagttctatatgcccataaagcatcatccagtttgagtgaccaatcattnctagtagaggccccaatattttctaaaatcttcttcaatttcctaattgacacttccgcttgaccattggtctaagggtgatagggtgatgctaccttgtgtgttacattatattgcttcaaaaccttctgtagctgattattgcaaaaatgtgtgcctccatcactgattaaaattctaggtaccccaaatcgtgaaaagatgtttttctttataaacttcactacagtcttggcatcattatgtggggtagccactacttcaacccatttagacacatagtctatagctactagaatatattcat

SEQ ID NO: 204185 - DNA, 241 bp, Glycine max
acacacaaaatttgattaatctttgctgacaacactcaataattaacacgctaaaacttaaatgtaataaacaaacacagtcttgaatactgagttgcgaccatcagccaatagctcattgatgaggatgttgacaaattgactccttcttgatttacaccaccactgagctctccttctcgtgatatagaactaataactaaatcacaatataagtgaaataattaacgcaaaaacgccc

SEQ ID NO: 204186 - DNA, 275 bp, Glycine max
tacacacacggacaatatatgtttctcgcagatgctcaatctgtgtttatttaagtttaaccacatctatgatgttatcgggtaaaagagtttatcgtcttgatgtcatgtactttcaagtcccttgttttttcctatgtcttgttctgtgcataagaggaaagagaaaagaattcttaatttttgctacttttgatatttgaaattattgtgatatagtcgtgctcttcctttcacagacataattgtgaatctattttgttttatttgtatat

SEQ ID NO: 204187 - DNA, 394 bp, Glycine max
  unsure (1)..(394): unsure at all n locations
atctaacctgcaacagtaatgccttcctgcaccaatgtcgctggctaccactatcaactggacacctaacacgcgtcgaaacaccgcgcctggtaagatatttcgaatacactctgtttagggttttctattgtctcttatgcagccaacatcatattagcctttctgaaattgagttaatccatagatgaattgtttatacaatgtggaatacgacaagatagacttgagcatttagttctaattatcaaactgcattatgagtggccaacaatagattatgttatgcatngtaatcgaatgggcttaacaattattacaatataccgttagatggtcaagaatcaaacaaattcatgaactctcttataactgatcattttgcccaaactgt

SEQ ID NO: 204188 - DNA, 401 bp, Glycine max
  unsure (1)..(401): unsure at all n locations
ttgctngcttaatcangcatcatagttaggatcatcgcctggttgtttgctaaaggatacaaccaagaggaatgtatttactatgatgagacctacgcttctgttgcaatgttggaagttattacgctattacttgtatcatggattttaggttatattaaatggatgtcgaaaagtgttttctcaatggatacattcaagaagagatatatgtagaccaacctccaggttttgtagacttcgaacatcctaatcatgtttacaagttggaaagggaattgtatggtataaaacaagcacttagatcttgtatgaaagattaagcacattcctaattggacaatcttttgtaagaagtcaagttgacaacaaattgtttatcaataaatcaaacgatgagt

SEQ ID NO: 204189 - DNA, 462 bp, Glycine max
  unsure (1)..(462): unsure at all n locations
ctcagctggtgaaatgcctgttggatgattgagcatcccattctgtttatggtctngngagatatttgtgacgtttatatgctgaaattactcatggaaacctgttagagatgaaaggtggagttaacctatggttagaaagtgagaatgtgatgttatgagtggaaaaagagtgatgctctgaaggttggaaggttaagtctgaattctgtggtacatggaggttaaagtgagttaatcctagcttgaaatgtcatttaggacttatgagaaagcttggactgtgctatagagaataacaaatgatcaaagtgaataaagagccatttctagggcaagattgggtgttgaagagtcaaattttgattcggtgagatgttatgtgtaaatccagcttgaacaagtctaaatagatgttatggactggtgtgacgtgagagtttgcttcaatttacctattct

SEQ ID NO: 204190 - DNA, 395 bp, Glycine max
  unsure (1)..(395): unsure at all n locations
agctngcatgatacacatgtctcccctgtgtttgcaaattctttnttgatatcatcaaaacctgcatgatttacattctccccctttttgatgatgacaaccacctgtaggttaggagcaacaagaaagaaaaaatatctatttgcatatagtttactcccccttggtttttcaatgtttgcttatatgagacaattgaagatttcatatttttcatatataaaaagttgtctcataaaaaatagatattttttcttactattttatcttttatcttttctctccccctttgtcaacatcaaaaacaaatcatgaatagagaggagagaaaatacgttaccacttgttgtaatgcatgagaatcaagtgataccaaaaggcattaaaccaatcat

SEQ ID NO: 204191 - DNA, 310 bp, Glycine max
tttttcctccacaacttacccgctaaaacatagttgctcccattatcggttacaacttgaacaaaatgtctcttctccaactgcctccacaatggcatcaagcaacctagaaagctcttgacctgtcttcacaaaatcagagccatcaacagacttcaaaaacatggtccctgcttgagagttaatcaaaaaactaatgatgcatccttgtttccgatcagcccatgcctcggacataatagtacaaccatacttgacccattgctccctttggcctttcatcagaatttcatgatattcaaccttcttc

SEQ ID NO: 204192 - DNA, 296 bp, Glycine max
ctcaccttcaatgagaagcacttcctcagacgaggagagagccatagctgaaaaagggttctacttgcaaccctctcccatgtcaactccaaaagacactgagcctcagctcttgcctttgctcactgtgacttcacctagagcttctgagtcaccttcttgaagacaaccgaattgaaccgaaccgaactggaaaacagattgttgtgcttcatcatcatcatcaagctatgatatagagaatgattatcatccgattctcaatcgagaagtacatagcttgctcaaattgaaac

SEQ ID NO: 204193 - DNA, 310 bp, Glycine max
  unsure (1)..(310): unsure at all n locations
gacgacgcttcttctcgggttgatgaaagtactcgtccatgcactcatgcccattgtcgtccatgtcaaacgcgcggaagaaggagccgttacaccccttccctccttcttcttcaaaactcatcatggatctcgaacctgaaccaaattataacaaaaacaccatccattagtcataagtcaaaaacaaaaattggagagagagaggttagattaatntcttttttattttcttaacgaacaaatgctattttgataattcttgttacaaatgttagtccatgttattcgaactcacgatctctctttc

SEQ ID NO: 204194 - DNA, 343 bp, Glycine max
gaaaaacacttcacacctgactgaccatgattaaccctgtgtaaatcaagcaatccaatatgtttggtatcactatcaccaaacggtgtttttaacagtgccactgaattgcactctgatcaaccattgaactgttaaaatattgcagaaggcacacaaccacttccttgggcaacaagagtcaagattgctattggtgctgctcaaggactttccttcctacatgactctaagcaacaaaatatctaccgtgatctcaaggctcctaatatattgtgagattcggtacgttgttaagcacttgcattgcatgctattgccacattcatggaaaattcttgca

SEQ ID NO: 204195 - DNA, 375 bp, Glycine max
  unsure (1)..(375): unsure at all n locations
ttgatccctagtagaccttacggagcatgtccttcantatctggtcctccaataaatgccattattcttgcttcttagccagggacacatgcccccaacaaactcgccgcaatactcagtgccgtgctggtgcaccgagcagcccgctgatccgccggcaccgcccaaggatccttctgcagctcctccaatacctgccaaccaaaccacaaacaaaccacacacanattaacatgaaatacactcaaaattcatttcattccactacaagtgacactcgacacacaaattaacaccaatacagtccatattcattccattccactacaagagactctcaacaaacattaccaaattgagagtgggagaacaatt

SEQ ID NO: 204196 - DNA, 406 bp, Glycine max
  unsure (1)..(406): unsure at all n locations
tgttcttganttttcctaagntctgaacaagctgagaactttatacttggccttctcttaataggctttgggcttggcgaccacgatcaacaaagtactttcggcacctactatatgttgacttgaccaacgctgttattggaatgctgcgacaatctttcaacacctcattcacacattctgataagttggctgtcatgtgaccatatcgtcgtccatatgtatcgtaagccatgctccattnttcctttgagattcgatcaatccatcttgctatggctggactcaattgacgacaattttctaagttccgatcaaacacatgcttgcaaggagtgtacgctacatcaaattttgtatcatcaaaagttgtacgtacacatgaaactcaaattaaactaatgta

SEQ ID NO: 204197 - DNA, 388 bp, Glycine max
  unsure (1)..(388): unsure at all n locations
agcttctacatgtctagggttttctagagttataaagatccaagtttcagacagtttgagagattntgttgtgtgaagacctgcagagaatcgagcttgaagaggaagccatcttgagagcttgagatgagtttgtgagtgattgtgaggttctagaggtggagaagacatcctcaccacttgtatttcttcaatccttcctctttctcttctctttgntgtaaaggaagcttcccagttatggagagctaatcctgtgttggttcttccttgtaggtacttgatgtaaatacctgtatatctatttaatgatgttttgtgtgttcattgtgctatcataacttcattctcccatgcttttgccttgatcacgtagatgcatgtgttt

SEQ ID NO: 204198 - DNA, 461 bp, Glycine max
agctggtatcatttatcctatctcagacattctttgggtgagtcccgtccaggtagtcccgaagaagaccggcctcacagtgatcaaaaatgagaagaaggagttgattcctactcgggtgcagaacagttggagagtctgcattgactataggaggctgaaccaggttatcaaaaaggaccattttcccctgccattcattgaccagatgcttgaacgcctggcaggtaaatcccactactgtttccttgatggtttttctggttatatgcaaattactattgctcctgaggatcaggagaagaccacattcacctgccccttcggcacttttgcctataggaggatgcctttcggcctgtgcaatgcccctggtaccttccagcggtgcatgattaggtatttcagtgacttcttagaacaatgcatagaaggtgttatggatgatttcactgtatatg

SEQ ID NO: 204199 - DNA, 232 bp, Glycine max
caagcttctatggagctgatctttgactttttaaggtccttcaatggtgatttttagtcatggaattacagcaaaagataaaggagaagaggttagaggagacgtcatccactagagaataagtcatggaaggagaagcttcaccaccaagagagtggcttggataagaagcttaaagaggaagcttcaatggaggaagagaataccagagagagggggagggggggggggg

SEQ ID NO: 204200 - DNA, 93 bp, Glycine max
aagagaatgagagagatagagtgatgccatcctaccccctaagggcattggatagaagactccaagaagattggtgtcccaatgctcattctc

SEQ ID NO: 204201 - DNA, 298 bp, Glycine max
  unsure (1)..(298): unsure at all n locations
agcttgccacccagctctgtttattcaagcnttancntctgcccaggccgagctagggttgtcttcctccattaatctaatcgccatttcacgaggtaatattcctgagaagggcctcagtgtgtcctcggctgctataatgaactacccatatttgactaacatacaccctccaatgctcctctattgagagacttctttcgtctgataacgtctaccataatttcgtaacaattccataactgatgcttagtttagtcctcataattgttttaatacaccttacaaattattgcaa

SEQ ID NO: 204202 - DNA, 360 bp, Glycine max
gaggcccaaagggcctgatcgtatatacacccccatttttactaacaacaccccccgcatctttaggcgagtccttcttccgaaagacaccaagacttacaaatttcgcaactaaactagcgttcttcccgaaatgttacggaacctcgcggatcacataatcatccccttttagacttacggaatgatacggaacctcactaatcgtgcaacgatgcctacatttgatctccgatgagtcacggaaccctacggatagtgcatcaatatatactgttgaataaccgcatgtcccagaacttcacaaacagcctaaagaagggtgccaagcacctcacaaggaccaaacaaaaagtgcat

SEQ ID NO: 204203 - DNA, 408 bp, Glycine max
  unsure (1)..(408): unsure at all n locations
agcttcctctctaagtttcttatccaagggctcnnctcttggtnggagaacccttatcacttccgtggtctttattcacctagaggagtggcgccctcctcataaccctctnntctcctttaaatcttctgctgcnnatctccatggnggannaaatcaccattgaaggaacctcattgacagctgaaagatccactccctccatagaagcttttcaagcaaagcttccatccagtgtatatacaaatacacctagccagaccttccttttccacttaggcatataaaatggcctatgccacttcctcttggttagatcattacataaattccttagatttttcatacattattcagttgttntagccatttgttactcaatcatagtcataaaggcatttacaatac

SEQ ID NO: 204204 - DNA, 424 bp, Glycine max
  unsure (1)..(424): unsure at all n locations
tggagggattgatggngacccggtgttgagaggatattttatattagctacgcgggagtacgtgagctcaattgaaggtgggcaactggcgatggtggatttatgtgtgatttgaggatgtggagagttgacttgcaccatctgccgatcgccacctagtaccacatatgacgggtaccccataatcctacaagcttgaagtgagaaagtgtggaagagtcagtcttcctacttttattcgttgaccacagagtggtacctggagatatgttgcgggggtcaggagaccttggggacgtcaggtggtgtgctattgcccaaaaccaagcttgaccaatcccgacccaacccgggcatagtcagtcagtgagaacttgtgagtaccttaacaggcgaactccttgcagtcaaccgattaaagaac

SEQ ID NO: 204205 - DNA, 223 bp, Glycine max
  unsure (1)..(223): unsure at all n locations
cacagacccaattcctagaggcatcctcaacacccataactaatgatgccataccatctgcaccagcatctgagttagagcacgctatctctcaagattcaccagttgctcaagtgttggatcttaatgagcatgcacaggagcaaccacaggagcaggacatttaaatgtgtgcattttgaacatnttagtttattgttagttattntatgatttatgttca

SEQ ID NO: 204206 - DNA, 419 bp, Glycine max
tatactatatattgcaggcgttggtgcaattctcttattcttaaactgctacttctgcacaggatgctctggatggaagaagcatacctaggtgacagttgtattatatgtctgacatgatatttagttcaactgtgatggacatatggctgtagatgtggtgcatatcctcagattggtcaactatagactgttgtaacttgtatattcacactctcactttggtttatttattatgtagtttatatgctgtttttgaacttgtaactgtatgcatcattgaatgtgtaaaatacggttagttatataacattccaactggaccaatcataagaataaatgtgctaaggtcaagttttttctactaatgagtaggtattagcacattcattggctctgctgatatagttatatacctt

SEQ ID NO: 204207 - DNA, 397 bp, Glycine max
ttgatcctttgtacaactacaagtaagaatttttatgcaaattggcatgatagaaaaaggaaataggaaatattttagtgcacattcacaagtcatacccataattttataataagtgcaggaagtaataatgccattctatcaagccaaattatttctacttgagaattatgcatgtattatttgtaatggaacattcggattacctttatggttacataaataagcacaggaagaaattcatcagctcctggaggattctctctcgaagcaaccgaagcattaagtagcaagttgctaataaccctgcaacaattcagaatacagacaagtttatccctgggtgccttgtacatgtcgatcttcttgaattctttctgtgcaagctgccaccata

SEQ ID NO: 204208 - DNA, 426 bp, Glycine max
aagggacataaatttttcttcaaatgatactcagttccagagtttgagaataattcaactactactaaaataaagactaagattcctttcttaattaaaatatcatgctggactctgataacagctagtaacctttagaagtttggataatcaacattcttttgcaatcaaaataaatttttattattgtatcaatatatcatcctagagataaggtgatttcttcttttatgaaatggtaactagagatgttttataaaaacaaataaataaatcagttacctcggattgcatattgatgcttgcactctctggctcatgactgcaagcagcacaagtagaaatttcttgaggattaaatgaagagaatgcaccattgccctcattcagagaattcacatgagatcgggaagtctcaaccaattc

SEQ ID NO: 204209 - DNA, 415 bp, Glycine max
  unsure (1)..(415): unsure at all n locations
ctctcagtcacctgcggcatgcaagctntntgctgcanaattcctttnggatgtgtgttttttgttttgngctaaaggtggtcttcgtcattggaagtgcggtagacaggctttgtggttgatttagggatggcctttgtggataattgggtggtggggtaaggaggaggtttgttattggctgagtaatgacattgttgggttggtgggaaacttggccgtataggaatgatagtcacagcatgggtttctccctctttctcaccctcttcatttgccccagttttctcagtcgtcctagtaggatgatcaaatttgcctcttttcggatccacttcgatcttnttgctggcgaagaccaaatctgtaaaacttgaaggtgtgtaacccaccatttttttcatagtagaacacc

SEQ ID NO: 204210 - DNA, 384 bp, Glycine max
atcacggaagggggatgtttccacctcttgaatcctgatcttgttatctttagaagctagacttcattgcatgttctttcgatgttacaaacttgtagctacttccttggctggatctgtgtaatatgctgtttttatagaaattataaggttaaaaatgagttccttgggtgtcaaaactcatggttagccttaaatttcacctaaattagagttttctagtaaaagttatgtacaaaacaagtttaagggaagtttttgggattaaatctatcacgaacataaagtggttggtatggccatatagactacttttattataagtttgacttcaaaaatgaaggttctaggtgtgaaaatatacggtagcatataacaattatg

SEQ ID NO: 204211 - DNA, 251 bp, Glycine max
atccgaataggcagttaatataattataaatggagacccttggagtaaaaaataaaaacttgactacttcgtctgtttgctctgagatttaatacggggggtaatattctaatgctcatagggcccaactgctcctttaaacactgcttgactttatgtagtaccaccattattgtatgcttgttcagacacttaattaatcacattatcactagtgcatttgtgtatgttaacagtgtaattactacaaa

SEQ ID NO: 204212 - DNA, 406 bp, Glycine max
  unsure (1)..(406): unsure at all n locations
actaagctcgaatgagctcatggagaaaagagagagggaaatagatataggggagcccaaagnaggcctttcttggaatgtgtggggggacgattgcatcagctgcgcacatacatatgaaacttttttttttgcgtggactattcatgaccctgttccgcatcacgcatcgacctccacagattattaagatctacattatgcgtgtctgtgcatgttatgncagtgtgtagttgcacatattgaaatgttacctgttttttgtgcatgactatcaggcatgttccgcatcatgcaccgacctatgcaatattgagatccgcatatgcggtgtaatgctgtgagtacagtgtgcactgcccattactgatgacttctatccttgctctgtcatgactgtccgatc

SEQ ID NO: 204213 - DNA, 377 bp, Glycine max
  unsure (1)..(377): unsure at all n locations
tgtaatatagcgttttggttattaactggttacactgttntgttgattatgtgttgtggcattctgcttttagtggttatgcataataaatttagaaattttcagttacattctactataccgtactggttagtgactgattacctctattggatatttatagaagagggttgtgtattgaatgttttaactttgttcactcttattgtgctgattgaatattttgatttgtagacacacaccctttcagataatccatattgttgcaaatttcatgaggatatggtcaatatactccatgtaccgctacttcttgcagactggtgcttctgttgttctttttctgtttgcctgcctggccccagcgtccatcctat

SEQ ID NO: 204214 - DNA, 294 bp, Glycine max
tatcatataacctactagagggtgcaccttccaaccttcaattctacaagaacgctacaattgaagcgttaagaaaaaaaaaaagcttgtgtggcaatgtctctggcttggaaaccgtgccccaaaattaggtgacaaatatcacaaccataacactaacaaagtcatattggcgttttacccattggttcgggcactttaatactggcaatatttgcctatggggacccatactatcttcgtcaatgttcagagacaaaagataccaggacgaagaatcactagttccgaatc

SEQ ID NO: 204215 - DNA, 387 bp, Glycine max
  unsure (1)..(387): unsure at all n locations
gcaagctcgagatgaggaagtgttgaacggtatttcttcctgctnntatcgcggaccacagagcggttcctggagatatgtcgcgggggtcaggagaccttgcggacgtcaggtggagtgctattgcccaaaaccaagcttgaccaatcccgacccaacccgggcatagtcggtcagtgagaacctgtgatgtacctaagcaggcgagctcctggcagtcaacagataaaaggaaaacacgaccacaaagcaaggaggcttgtggtggctggccagctgtgaatcttgtgtaatatgtggatcgtggcctctggtaatcgattaccaagggtgagtaatcgatcacaaggcttaaaattgaggacaggaggctaagatggtctctgg

SEQ ID NO: 204216 - DNA, 350 bp, Glycine max
  unsure (1)..(350): unsure at all n locations
cttacactcgcgggaacagagtcacaagatgaggatagcaacttccttgacagagatgactctcttgaaagtccttgttcatggnggagacagaaagtggagaccaaaaaaaaatgaacaagaaccaaggcccacacagcagccaaaagtctgaagctgacgatcttcttcatgagaaatacagaatggtttcagcaagaagcagcgcaagatgtaagagtactaatagttctcaagagtcggatcaaggttatatatgaaaagcaatgagcatgctctatgcacgaggttcaccattacttgcactatattatatatcatattgtagggggaaaagacataaacataat

SEQ ID NO: 204217 - DNA, 387 bp, Glycine max
  unsure (1)..(387): unsure at all n locations
agctntaatggtgtaaatattaaatcacatttttgtcattatcaaaaatggggagaatgtgaatgtatgtatacatgattttgatgacgtcaaagaagaatctaacaaggttgcttcaaaggataagcatttgcttcaagaataattcaagattgcttcaacaaacaaagctttgtttcaagattcagtaaagaccaagccttgccttaaaacaaagtgctttcaagacatgcaaggctctggtaatcgattaccaagaagtgtaatcgattaccagaagacagggttgagaaatagctcttgaaaaaggttttgaatttaaattttcaacatgtaatcgattaccatatgtctgtaatcgattaccatatgtctgtaatcgattac

SEQ ID NO: 204218 - DNA, 439 bp, Glycine max
  unsure (1)..(439): unsure at all n locations
ttggaaaatgatttctaaacaaaagttagtcgtatttatttactaacaactcccctaaatttacagttttgcttgcctcagcaaagaaagaacaattcacttgtccttaagtgataaagacagtggccaatcaaaacaaaatggtgtttgattcatcaaggacatcaaccatatgaactgaatatcatggaatgcttaaatcaatcacttctcacaagcatgcagtttttcaaagataggagcacaagtattagagtcacagctgaaataagctagtaagcatgacagaaatcaaggaaggatcatcaaccaaaacctcacagtcattatttcactcaaactcaagtgtttaggcttattccatcatanacaaccaacacaagttccagcctttgcatntcatctcctatcatacaacaatgaacacataanaatgaat

SEQ ID NO: 204219 - DNA, 381 bp, Glycine max
  unsure (1)..(381): unsure at all n locations
agcttcaacattcaatttttagcgtctcgttatatgacgggactcaatcagacattcgagtataaagttattgtcgtttgaattggctcagagcttcaacattcaatntcgagggtctcgatatattacgggactcaatcacacatctgagtaaaaagttattgtcgtttgaattggctcaaaggttcaacattcaatttcgagcgtctcgttatattacgggactcaatcagacatccgagtaaaaagttattgtcgtttgaattggctcagagcttcaacattcaatttcgagggtatcgatatattgcgggactcaatcagacatccaagtaaaaagttattgtcgtttgaattggctcggagcttcaacatttaatt

SEQ ID NO: 204220 - DNA, 444 bp, Glycine max
  unsure (1)..(444): unsure at all n locations
gagctaattcanacgacaataacgtgggacttgtttgtcngattgagtctctncatatatcgagacgctcgaaattgaatgttgaatctttgagccaattcaaccgacaataactttttattcggaagtctgatagagtcccgtaatatatcaagacgctcgaaattgaatgttgaacctctgagcaaatgcaaacgacaataatttttttctcgaatgtctgattgagtcccgtaatatatcgagacgctcgaaattgaatgtggaatctcttagccatttcaaaggacaataacgttttactcggatgtctgattgagtcccgtcatatatcgagacgctcgaaattgaatgttgaagctctgagccaattcaaacgatgataaccttttactcggatgtctgattgagtcccgtcatatatcgagacgcacgacaatgaat

SEQ ID NO: 204221 - DNA, 304 bp, Glycine max
  unsure (1)..(304): unsure at all n locations
agtcacctgcggcatgcaagctgtatgggaccatgttattctatcttcttctcnacagaaccatgcgatgtgctcgttactggtccctctcatccctccgcaacctgagatcattattgcaaccccaaacagctccgcgaaaattgttccggccatactcttccttgcgagccctctaggtctattgttcaaggagcattgccggaattgaatactcttcccagaacccggaacactccttctgaacgtgtgcagcagccaacttgaacttctccttggagagttatcctttacaaactcactt

SEQ ID NO: 204222 - DNA, 378 bp, Glycine max
  unsure (1)..(378): unsure at all n locations
atcctctagatgtcacctgctttatgcaagcntanagaggaagccgtcgaggaggatttgtatgagagagagatggggggaacatgaaatcgatagaggaaaagagggagagaagttgaactttgaagtgtgtctcacaagactctcattcatcaaagttacaacaactgctacacatgcttctatatatagcctaggtagcttccttgagaagctctgttcgtggccggcaagtgcaccagatcgcacaagtagtataaaacggtaagaaccgagtattcaactcttggggaactcgtgttatctggcacgctatattgataaataggcgtttggtatgaaaatataactgtggttatgaataggcatttaatctat

SEQ ID NO: 204223 - DNA, 410 bp, Glycine max
  unsure (1)..(410): unsure at all n locations
ntgaggatntggtctatgccagtgaaaggatctatgtgtttctgaaaaaaaaaacaaaaagaaaaaagggcaaatttgatcatcctactatgacgactgagaaaactggggcaaataaagagggtgaggataagggagaaacccatgctgtgactgccattcctgtacgaccaagtttcccaccaacccaacaatatctttactcagccaataacaaactttctccttacccaccacccagttatccacaaaggccatccctatatctaccacaaagtctgtctgcacttccaatgacgaacaccacctttagcacaaaccaaaaacaccaaccaagaagtgaattttgcacgagaaagcctgtagaatcaccccaattccagtgtctatgctgacttgctcccacatta

SEQ ID NO: 204224 - DNA, 351 bp, Glycine max
agcttgttagctagatgacttgtcagaatcttattgttgactagcgtcaaatcagagaattaaacctggacatcttttagaaatgcttgttaagtcaagacaggtagaaatccagtgtctccatttgggacctactgctcagtaaatctgttgagggaaaaattcacagcctccgtcttaacatcattggggttctgaatccattcacactgaataagaattccttgaagaccattataatgtcttctgaaattgatgactttatggaaatacgttgagttgctgtccccttcttttagccatttagctctagatttctgccttaataaagattcataagctattgaggcc

SEQ ID NO: 204225 - DNA, 378 bp, Glycine max
  unsure (1)..(378): unsure at all n locations
ggaccttaaaactcagctagcatgctgcctaagcgcaagctagcatgcttttcttagcgctcanctctattatctgataaatctttctgttttcttgagaataaacctgtactaatctcttgtgttttgtcttatattttgcagatggcttctatgaaaaggaaggcaccgtctacacctacccaagtcagatttgatagatccagattcacttcccaagaggcttgggaaaaatacactgacattgtggtgcctcataagcttttaccagaaaggaatgtggtggtctactcatacagtgttgatgagttcaagggggaactcgagagatgccactgtgatgaagagttgactgattttgttgacgacaacattgat

SEQ ID NO: 204226 - DNA, 233 bp, Glycine max
gcccaacgacaatagagtcgaaaacgatgaccacgcctaatggcacttgggatgacgaatgatcggacagcaacgtacttatacccgcccaactacctcaagatgaagctgaggaagaacacccaagagaaccaccttcacctccaccacatccactacatcaagaactatcagcaccgaatgctacttcaggacgagcaagaacttcggcggacctatataaaacccgaaat

SEQ ID NO: 204227 - DNA, 410 bp, Glycine max
  unsure (1)..(410): unsure at all n locations
tcttcagcacctgggctgccgcttgctatgatgcggtgtaccgttttgcgtgtggtgactgttaaggatagcaatatagttgatacacttccatttagcatattgtcatctcattgaaagttgcatccccgacaacaaagatttccttactatcatcgttcgaggtatgtatgtgattctcacacttatgtgcttaagtattataggcaatggttgacatgttactattctttagtagtacattgtaattcattgagtgagccatagttccccgtttgagattgaatacaacgattaatacggatagtttggattaattgttgtattcaaacttgaattgtctgtttggacagtttgngaagacaaattgtttctacttcattntgacttataagttaagtatgttgtgt

SEQ ID NO: 204228 - DNA, 367 bp, Glycine max
acaaaaaacatatggaggatagcttggcaggggaagaacagtagccatcaatgggcccactggaataacaggaatggtccaaacccgagtaggttctgcccgcaaaataaggcataatctacctaacttctgttaactttagcttagagacatatcactagcatggaataaaacaaataatctctttcaccacacaatcagtttctttaaatacttgccaagggtaaaagcaacttgagagatgatcctgaagggggatagtcaagtgacgacgcccaagtaacaacagatgccaacccagaatccttcccatcaaaacctgacataatttatgtagcaaagaagaaataccaatcaacacattgat

SEQ ID NO: 204229 - DNA, 361 bp, Glycine max
  unsure (1)..(361): unsure at all n locations
ttacaaaatattttatctaactaactaactaatttccactattatatagagtgaatacttaaaaggaagggatgggccttgattacgcccatctaatctacctaattaaactaattacacaaaacaaagcccaaaatcatagccaaattattcaagtacaaaggttctaatttccaagaccaatttgaccctcaaaatggtagaactgccccaagcttatttataaaaaaattggatacctttttcttagctnttcagggactactcacaccatttggagttctgtactattctactggccctgcaaaaggtatatagatcaagtaagcacaaaaatccgaaaataagccataattattaa

SEQ ID NO: 204230 - DNA, 421 bp, Glycine max
  unsure (1)..(421): unsure at all n locations
ctcagctgagtgagctcggctacaaaatcagagggtgttattttattcatatgctcaaannccaagagagcacagttcctatacttatcccaatggtctttttcatgcacttagctcgctcactaacttttcaatttcggttgcttttgaccttgttacattagcacactntattcttttcttttcttttctttatttaacatacaacttgcgtgttgtgtgcgatgatgctttctctctttcttttcatgcaaattagttccactcccccaaatttgggctaaatttgccttgaactatatgctctcttagaatctaaacaacgtatcaggagatacttatttaagttcagggttcacatttctacaatatcattcagctcagaagaaaggtgcaaaggatataattatcattcaaggta

SEQ ID NO: 204231 - DNA, 381 bp, Glycine max
agcttgagatgaggaagtgttgaagggtgatatcttcctgcttttattggtgaccacagagtggtacctggagatatgtcgcgggggtcaagagaccttggggacgtcaggtggggtgctattgcccaaaaccaagcttgaccaatcccgacccaacccgggcatagtcggtcagtgagaacctgtgatgtacctaaacaggcgagctcctggcagtcaacagataaaaggaaaacaagaccacaaagcaaggaggcttgtggtggctggccagctgtgaattttgtgtaatatgtggattgtggcctctggtaatcgattaccaagggtgggtaatcgatacaaggcttaaaattgggacaggaggctaagatggtctct

SEQ ID NO: 204232 - DNA, 464 bp, Glycine max
  unsure (1)..(464): unsure at all n locations
ggccaccgagctcgcccaggcgagctaggttgtgccttttttatgaacttcctagaaggcccaagtgggcctgctctctagttgcacctccctgtttactaaatatacccccctgtccttttttgcttgattctttttcgtaacgttacagaactttatgaatttcgtaacgatacttgttttccttccgtaatgtttacaaaaccttacagattacgtaatcatccccttttgggcttttggaatgttacggaacctcacggattatgtaacaatgcttccttttgattttcggcatgttacagaacttcacggatcgtgcaacaatgctctcttttgacttctggcatgttatggaacttcatgtattggtcaagccaaggttgcatgccatcaaacaatgctccccagacgaaattanggtatgacagttgcccctctttacttaccttttatcagagata

SEQ ID NO: 204233 - DNA, 348 bp, Glycine max
  unsure (1)..(348): unsure at all n locations
acctgaggcagcaagcttctgggtcctgcaacatgacaacattattattacttacatgcaanaaattctttntattcctggaaccctntggtcgaccacgcttctttggcctcacaatctcacctaggcctgcaccttcatcatcggcactaccttcctcaacagaaagcaatggcctttcagactttaaaactgtgataatactcatcctatntgaaccctttggtcgatcacgcttctttggcctcacaatctcacccaggcctgcaacttcatcctcagctttatcttcctcaccagaaaacaatgatctttcagactctaaaactgtgacattacttattctat

SEQ ID NO: 204234 - DNA, 389 bp, Glycine max
  unsure (1)..(389): unsure at all n locations
ntagagggctacacgcnctcaccgtcagaggactacacttttcttttcatcagagggtngcacgccctcgcaatcagaggactacacgtccaccccatcaaagggctgcacgcccccaccttcagaggactacacgtcgtcacctttagagggctgcacgccctcacctttagaggactacacgtcctcgccttcagaaggctacacgtcctcaccttcagaggactacacgtcctcgccatcaaagggctgcacgtcatcgccatcacaggactacacgtcctccccatcagagggctgcacccgctaacctttagaggactacacatcctcgccttcagaggacagcacgacctaaccttcggaggactacaaatcctcaccttcaa

SEQ ID NO: 204235 - DNA, 351 bp, Glycine max
ctactttattccacactgccagaagtatgaagtcttaccaagctcttgcattccaccaaccttaaccttgcaccaccatacactacccttatggacaaagaattaattgtgtgccagcaagaacaagacaactctgatgcctctcactctttgtcttattcagatattcatcaactacagctagggaacaatggcacacacaacatctttcacacaaattcaggttgcaccctatgataagcatggattctgcttccattgacaatagctcttcatctaacattgttgtatatgatggttatggaggtggtggtggctataatgtgattcctatggggactactactactg

SEQ ID NO: 204236 - DNA, 385 bp, Glycine max
agcttgcatgatttacactatccataatgttttaatgaaattaacaacttgaattgaacatggtgtagtccaatcggacatccatagcccgttccttcaaaacaccatttacttgtgacttaggttctttctgtttcatttgtcttcatgctcaactttagagacagcaaattaattaaacctttaaggacccattaagacaaacaagtattttcaatatcacccaaaaggaaagtttattagcaaaataagttgaaccttccacacacacagaaactacaatttccagttaacatgattaataaccacacctcaacagaataaagacccatttaatataaataatccatttaatacctctttttgtatacttttacacgtggtg

SEQ ID NO: 204237 - DNA, 465 bp, Glycine max
  unsure (1)..(465): unsure at all n locations
tctaaactntatacaagaatgaagctctgataccacttgtttgacaagnggcctcagatatcttaagaaggggggttgaattaagatattccaaactacttccccaattttaaaaaaaaaaaaactatttcactttttattcaagttatgaattcccttaatgacaatcttcttaaatattgattcaaataaaacaatttgaatatgaatataaagaaataataaataaaggagattaagggaagaaaaagtgcaaactcaaatctatactggttcggccacacccttgtgcctacgtccagtccccaagcaactcgcttgagagttccactaacttgtaaattccttttacaagttctaaacacacaaggacaatccttcctttgtgttagaattctttcaacaagagaccacggctcttatcccttaagaatgagaagaaaagaatgatctctctaaaagaga

SEQ ID NO: 204238 - DNA, 384 bp, Glycine max
agcttgatgtagataggccttatatggtgtttttaaggggttattagagggttagttaccttcttatgcctagccctataaatactcaaaaactcttaattttggaaaatttttgtagaattgaaattaagttgtgcttagagagagctttagcctcttctttggtttttgactagaaaccaaattgattcttctcaaagaagctattcctttatggcaaatcctcctaccggttatcgattcttcatggattgtggcatcgttttgttcatcttcttcatcttttatatttttttgttcttgagttcttaaaaggccatcaatggtgttcaatttgcatccagaatgatccaaaccaagcattcatggcttggattgcatcat

SEQ ID NO: 204239 - DNA, 381 bp, Glycine max
  unsure (1)..(381): unsure at all n locations
tcatctntntcattcccttctcgctttgccaaaaagaattcgctaaggactaacctcctgaattctttgtgcgtctttcttctcccttttccaaaagaacaaaggactaaccgcctgaattcttttgtgtctcccttctcccttgtcaaacaattcaaaatgacacagtctaagaattcttttgattcttccctttcccatatacaacagatttcaaaggactaaccgcctgagaattcttttgtatccncattcacaaagtttcaaagggttaaccgcttgagaactttgtcttaacacattggagggtacatcctttgtggtacaagtagagggtacatctacttgggtttgactgagaacaagagagggtacatctct

SEQ ID NO: 204240 - DNA, 387 bp, Glycine max
  unsure (1)..(387): unsure at all n locations
agctttgagccaaaatcctgactcaccatttttcttgacccagggtgagaatgtcaatccttaccctcggaagcaaaaaaagaatagaagggaaatttccaatcaaagaaaaagagaaggaaaatttccaatgaaagcaaaataagaaaggaagggaaatttccaatcaaagaaaaaaagaaggaaaattccccaatcaaagagcgggagaaagcaaaaagaaaagaaaggaaattcccaatcaaaagaatgggagaaagtaaaaaaggaagaagaagaaggaaagaaagcccctgatcggtgatcgaaggaanaacagaagaaatatgcagagaggtctttggaccggacaatatctgaacaatacagaattgtcaccaaatgaac

SEQ ID NO: 204241 - DNA, 470 bp, Glycine max
  unsure (1)..(470): unsure at all n locations
tctcnncccaatttctataaatagggggagaagtgatgtttatattggttcagccccttaggcacttctctctctttccgaattgcttaggaaaattgtttccgtgaagaaaatccaagccgaggcgcttccgtaacgtttccgtaacgtttccgtgagtgatttcacgaaggttttcgaccgttcttcgacgttcttcattcgttcttcaccgttcttcagtcttcaacgggtaagtacctcaaaccaagcttttcgattcattctatgtaccacgttggaaaccaaaaaaaagaggtgaataataatataataataaaaaaataaaaaaatacccctctagtaaaataaagtgagaaatcaattggacgttttctctttgngatttctcattcttaatcgaattgactaataactaaagtgaaactacggctaaatcaactcgcctagtcaagctcgtccacaaaaat

SEQ ID NO: 204242 - DNA, 345 bp, Glycine max
ttaagcattgacctgcacccacctcgtgtgtctcctttttaaataggacaataagatatagattcttattagttgtggcatcaaaaaacacgttcttatccatgtctaagggccaaaacaaaactcatttttctgcaaccaaaaccatgcatatacaattcaactcacaatgatgaacacaaatatcatcatcgtggtgcgggtcgccattaccaatatatacattatataatactaaattattcatccctatcattcattgtctcacatattacaatcaaaatttttaagtaaatgaatgataataataacagaataaccttaaaagacatatcttgaaaaaat

SEQ ID NO: 204243 - DNA, 324 bp, Glycine max
  unsure (1)..(324): unsure at all n locations
ggctgatacaataattaggggagagagagaagcactggnctatatcaaanagnccaaaggaggctatgttcctgggtgagttggacaaaccttgaaacaactcacccccagaattcagcgctgtatggtggcattgtttcgtcgcaatgcacgctgtttgaataaccctcattttcaggcttgaacaatcaatactttcctctggctgcatttctcgttctcctcttatttcatgatgaacatacacccgaattccaattaattctctctggccacttccctcataccgcatacctgaatccatatctcaactcacctcctcta

SEQ ID NO: 204244 - DNA, 350 bp, Glycine max
  unsure (1)..(350): unsure at all n locations
agcttaacccttgaggggatggacctnttattttttggagaggatcaataacaatgcctataggttggaccttctagaagagtatggagtcagcaccactgttaacatttctgattcaataccttttgcaggtggagcctatattgacgagaaggaactaacatatttgaggtcaaatcctcttcaaggagaaggggatgatgcaatcctccctaggaagggaccagtcactagagccatgaacaaaaggccccaataggattgggctaaagctgctgaagaaggccctatggttctcaccaacctcaatgtaaatatttgagcacatgggccaagggtgggtccaatta

SEQ ID NO: 204245 - DNA, 365 bp, Glycine max
  unsure (1)..(365): unsure at all n locations
gtttgaanagacacatctcgtcgaacaatggattggcctatatatatgcgcgngnccgactttaaaagcaatgggagagattccaagtgaacttcattgccaaatgctctctcaaaagaaactcttgggcaaacacttgcaaatccattaaaagttcatccatggacttcaattgtaatatccttctcttcaaaatagaattgttcttctttcttcttatacaaagagatcgattaagggaccgaggggctcttaagttgtaagaattcctgaacacaacggatgggctgtccctgtgtgcgccagaagttgtataggaatttacacagagaaacgataatctcaactgggttgctagagtacta

SEQ ID NO: 204246 - DNA, 320 bp, Glycine max
catctcctttactacattattgcaacacctacccctatctctgtctctcattcactcatcctaggtttgatgtttccttctctcaattcccaacctcgcatctcccattatgttattctcaaaccacgacaacaaaagcacaaactcggtttctcaatttcttcctctcgatcctacccgagttaaattaaaaacaagaggagagaatacaacacagaacaaaatataggtttggtcttttgaagtgggagtgaggaatcagacatctgcgttgggtgcttgctaagttcggttaatgttagaacgtgggatctcaacga

SEQ ID NO: 204247 - DNA, 392 bp, Glycine max
  unsure (1)..(392): unsure at all n locations
agctngaagctacaagatgctctgtggttatctcaatgctatctgaatcatngagccaactatcttgcctgaaaccaatactatttgaaacctttattgtatcgaaattactgcatattgcataggtatggtagttgtatattaggctttggtccatatgttatgcacaaattttttatttaatttgtcttatgtattttttgaatttcttacaactaattttactacaggaatactattgagtgtgttttttgtgatgaatatctcaaagttatcatagacttagtaagagatcgtaatgtctttcctccatttcttggcaattcattatagcgactaatcttgctgacatataactaaatacatgacaatgaaacatgtgaaatgtatat

SEQ ID NO: 204248 - DNA, 473 bp, Glycine max
  unsure (1)..(473): unsure at all n locations
tatggggtacccatcacatatggtactaggttgtatttttctatggngcacaacaagttttccacatccacaaatcacgcataaagccaccatcccctgttgcccacctccaactgagctcacgtactcccacgtagcccatatcctcgtttctctcaacaccgggtccccatcaatcctcccaagcttccccaacatccaggtaattcaaaatccaaatcatcacaaactaacaaaccaagcaaaatagggcaaaggcagaaaactctgcccaaaactcaaaccaaaatcacagctttttctcacttaaagaccccagtaacattttctccgttccaattcgttaaccgttggatcaactcgaacaatatactggaagtctctagtacataagtctacattttgaccgttggatctgccagaatacatcaagaactcattctgcactactctttccacaaccagcaaaacat

SEQ ID NO: 204249 - DNA, 415 bp, Glycine max
  unsure (1)..(415): unsure at all n locations
cagtcacctgaggcatgcaagctntggntgcctataaagtgtttaaggttgttgtagnatttcaatgtggaaaacaaattaagattataagatcagatagaggtggagagtactatggtaggtacatgaaaagtggacgagcacctgttccatatgtgaaatttcttcaagaacatgggattgntgcccaatacactatgcatagttctctaaattagaatgtgtggcagaaggaaaaaatcaaaccttaatggacttggtgagaagtgtgaggagtaatgcaaaacttcctcagttcttatggattaaagcacttaagatggttgtgtatatattaaatagagttccgaccaatgttgtctcaaagacaacttttaagatattcacaggttcactctataatcctaggtcatga

SEQ ID NO: 204250 - DNA, 406 bp, Glycine max
  unsure (1)..(406): unsure at all n locations
ntgacaagacagtacacactgctgtgtgctacaacaagatatttatggaaatctactctaaagatacatctaataatacccataattataacatgtcccttattaaccgccaagcgaataccgttatcttgctaggaattctaatcttccataattccttacaccattcctcttgccgacctcctgtaatagtttccaaaatcagattatatgcgctgcttgtcgaataatttcctgattgatcacctaaccactcccattgatctgatccttgctgctgaatgatcatgccttcgatctcccttaggaaattgatggctgactcgatttcattatcaaacagcgatcttctccacataaaatgccactcccaccctgaatgtagatgatgtcccatctgtctaat

SEQ ID NO: 204251 - DNA, 380 bp, Glycine max
  unsure (1)..(380): unsure at all n locations
agctttatggaggctggttctttgagctttttgaagnccttccatggtgattttcaacaatcgtgatgcagcgaaagataaaggagaatatgagagaggaggcagcatccacaagggaataagccttggaaggaggagcttcaccactaagagggttccttggataagaagcttagagagggagctttaatggaggaaaagaataagagagagggggggggggcttgatattaatgataaaataaggataaaagttgaagtttgaaatgtgtctcacaacactctaatacattaaacttatgacatgtgttacacagtcttttttatataccctaagtcactaacataagaaagcttccttgataactttccttgaaagc

SEQ ID NO: 204252 - DNA, 468 bp, Glycine max
  unsure (1)..(468): unsure at all n locations
ttatattaacagtagagggaggaggaaacttttttcaagacaatagctcacattgtttcttgtaattataaaatattcaaacaattaaatgccttttttatttctttccaattcattgtctatcctcaatcaaaacatagctaaaatgattcaaaataaccaaccgcacttccctgtttcaggtatattaattaaagaaattcagaactcaagaactatttaattaacttgtgtttgctaatctcaaactctgaggcaagctctattggtcaacttttttttttaaatactaacattctgtttcagagaacttcaacaactttacatgaattgaatgtgagggccaagtgattaacangcatgtaaagacaagaaagtgcacaccccaactccaagcagaagagattatatgcatgtagggcttaggggggaccactcttctttctaactgagctgataagatactac

SEQ ID NO: 204253 - DNA, 382 bp, Glycine max
  unsure (1)..(382): unsure at all n locations
agctatacattactcgtgttgcntttcactttgtcnnaaaagggtcgacttcttctgttctgccacaccatactgatccggagaaccatacacagtgtactgggcaacattcccatgttcttgataatattttacaaatggacctggtgcttgtccatcctctgtgtatctaccatagtactctcctcctctatctgatctcacgattttaatttgactttcacattgtttctcaacttcagccttaaaaactttaaaggcatctaacgcttcattcttagaatgaagtaagtagagatacatatatcgtgaatcatcgtctacaatggtctatacaggatttggactattttcatccatgtctggacaacatatgtctata

SEQ ID NO: 204254 - DNA, 461 bp, Glycine max
  unsure (1)..(461): unsure at all n locations
ntacaatctgataacgcataagagtagcgcacctttacttcttatcttactggaaaagggattcatcacagatcgacctttccatatacaccatgaacaaatatgggacaccctgaaagagagcatagacatttgacaaaaactggtctcactctgttggcttcagcttctctttcttgaaattattggggagagtcattcagcactgcagctactataatcaattatcttccttcacctgcccttaacaatatgagacctttagaaaaattggttcataaaaaaccatattataagttcttgagaagtgttggatgtgattgctatcctctattacgaccttataataaacacaaacttgactttcggtcacacatgtgcctattcattggtatagttcttacacagcggtataaatgtcttcacctcggcaatgcacattctcgacatgtaatcttcat

SEQ ID NO: 204255 - DNA, 315 bp, Glycine max
  unsure (1)..(315): unsure at all n locations
tggtcgtgggcatctatagaggctagagcgatgatctttattgacgnccncnaanggngactcaccatcatggatgatgcaacgaaagacatccgataacaggtgataggacgcgccatccactacggaataatccatggaacatagagcttcaccaccaatatgagcctaggataacaagctcggacaagatgctttagcggacgaaccacaactcgagagagaaatagagaggggggagcacgaaattgaatgaaaaacaagggagagaaatcgaacttccagttgtgtctcacaagactctcattcatcaaa

SEQ ID NO: 204256 - DNA, 354 bp, Glycine max
agcttgtaatgtaatcctgtaaccgcttattcatttcattgagtgatgctatctgcaaaagttcacagattgaagacatttattttttatcatattcacaaattattggaaaaattgagaagtggaaagaatcaaagaaattcaatggattggaattgtactgtttattttaccttttgatttgcactttgcatctttcgttgggctcttccaaggtcctctgacagagtactatgtgacctctcaatgtcaagcctagcttctctctctttaacaaaaaattccgctgtagcctttgatatacaatgataataaaaagattataatccatcgtataacatctcctttcaccat

SEQ ID NO: 204257 - DNA, 214 bp, Glycine max
ggagaccacaaggactctgcgctaaataaagacaagaacaagcatgagctgggggcggcactggatttggaaatggatgggctcggaatcataccagggggatcatacaagtaaatgaaactgagcaaaggcttggaacataccaagggaatgaaccagtgaaacagaaaactagagcttggatcaacaggggaagatacactaaaagaacgaa

SEQ ID NO: 204258 - DNA, 346 bp, Glycine max
  unsure (1)..(346): unsure at all n locations
agggtgcaatttgtgttttatacggtttgtttttcaaggtggtggattgttgggctgtgactaaaatccatatgaaagtttattctgttatttctttctgttttgccctctgcttataaaaggcaaggatgccttatattttggataggcttctactngtatattacatcagtaataaaagctttctgttttccctcccgtggatgtagccttactcaagggtgaaccacgtaaaatctgtgtgtgttttttctctctttttctccctttcattttgctgcaacgttggtgtatgacatttctattctgctgcatctcctgttgctgctctcgtttgtcctacatc

SEQ ID NO: 204259 - DNA, 449 bp, Glycine max
  unsure (1)..(449): unsure at all n locations
aagctacatctttcatggcttattccctagnggatgacgcctcctctcacctcttctcctttgtctttcgctgcatctccatggtggaaaaccaacattaaaggacctcattgaagctcaaagattcaacctccatagaagctccacaagcaagcttccatcactttacatgtctcatgacacctaagtatacttatggagaatcttggatttgatcttgaattagtgggctgaaccatagcagaaattcactaatcataattagtcaaattttggctccaaacttggctccacacattcaaattcaaattccagtgaaatatgaataaaaattcacatatccctccaattctatgtgaaacttacgctataaatagaggccttgtgtgtgcattnnttcaactctgatcatttgagaaattagacttannaagtcagaccccattctg

SEQ ID NO: 204260 - DNA, 257 bp, Glycine max
gttattaagttatgatcgaggcgtgagattaatgcgtattgtgattgacgaacgacatgcgaaatttaaacgacaacgtggtgtaactatcttacctatgttactctaactcgcacccacttattgatagagatcacctgaagcgtcgttctctatatgtaggaatgcgaaactcactctctgtgagcgatttgacttagactctgtcatgatcatgactttgtgttctaggaaccaaaacttgtatttgtcaatga

SEQ ID NO: 204261 - DNA, 338 bp, Glycine max
agctagaaagttggataatatgagtggattttgatggagggaaggagaacaaaactctgtgtcttatattacgtcaggactttgaagtgtaattctcaaaagatcaatagttgaataaaatgcacacacatggcctttatttatagcctaagagtcacacaaaattggagggaaatttgaatttctattcaaatatcacttgaatttgaaattgaatattgggagccaaattttggaggcaaaatttcactaattatgactagcgaatttcagttatggttcatcccactaatccaagatgaagtccaagattctccactattgtgctaagttcatga

SEQ ID NO: 204262 - DNA, 334 bp, Glycine max
  unsure (1)..(334): unsure at all n locations
aagctgggaatggcattgggcacctatgaagaaggagcgaagctgtctctacataganaaaacagtcccaccatcctaatgttacaacatcagattcatacatcattggggcatctcaccgagcacttggtgggcgcatgcttagacataaatcgcaagagaatggcggcaatgtggcatcgccccattgcttcagaacacaccataggcctaaagccttctcacacaaattcttaactcaacacatcaagcataaaaagtaatccaaaactgtcccacaagcatgagcatgtcctgacaatttagagcaccacaatgaacaaaatgcaccgac

SEQ ID NO: 204263 - DNA, 389 bp, Glycine max
accttaagtcacctgcagcatgcagcgaggtgaaggaagtattctcatattttattgtgcacgaactagttcactagaggccttttattagctgagagcagttcattgagaaggtggcctggcctaaagcccgaccttttatgtgggggataatgaaagttttacaacccaatcacctcaactgcaggagcctgaaccataaaatgatcactcatctgaagccaccatccctggagcttgtgattttgaaaaaagaatattatagacgagatcctatgaggctgctcatctggaccagtgccatcatcagatgaagcaccatttctaggagtagattcatcttcatctcaccatgcagaaacttttgcacttctgtgttagagatacaa

SEQ ID NO: 204264 - DNA, 266 bp, Glycine max
ggcaatggtatgaaaggattaatttacactgcatcatctgtgggtctgagggaagcaaatgtgattcttcttatgttatctacacatatataaagcgtactgtttatcttttatgctatgtggacgacatcatcattacaggtagttctgtctctcttattcagcaactaactttccaaactaaatactgtcttctctcttagcaactgggtcacatggactatttctgggactggaaataaaaaccttcctacaatctcttacta

SEQ ID NO: 204265 - DNA, 388 bp, Glycine max
  unsure (1)..(388): unsure at all n locations
agcttatgaaggagccatactaatactggtttgttngctatngntgtaagtaaactcagtcaatggcaaacaatccatccaactaccttgttgctctataatacatgcccgatgtatatcctctaaagtctgaatggtttgttcagactgaccatctgtttgaggatgataagctgaactaagctttagctntgtccccaaggcttcatgtagacttgtccaaaatcgcgaagtgaacctcggatccctatcggatacaatactagaaggaattccatgcaaccttactacttccttgatgtacaactacactagcttctccattctatacttcatattcaccaaaataaaatgagcagaattggtgagtcgatctactataacccac

SEQ ID NO: 204266 - DNA, 424 bp, Glycine max
tcaagagatcattccctcgacaacattattggtgatatctttaaaggggtaacaactagacattgtcttaaagatttatgcaataatatggcttttgtatctatgattgaaccctaaaatataaaagaagccatagtagatgataactggatcattgccatgcaagaagaactaatccaatttgaaagaaataatgtgtggaaattagtataataacctgaaaattatcctatcataggaacaaaatgggtttttagaaataaattagatgaacatggtataattattacaaataaagctaggttagtagcaaaagggtataatcaagaagaacgaatagactatgaagaaacatatgctcctgttgcaagattagaagccattagaatgctattggcatatgcattcataatggattttaaac

SEQ ID NO: 204267 - DNA, 148 bp, Glycine max
tgcatcgcataactatatcctactcattcatcatatatctctctatgatcagatttggcgaatgtattagaccactcacaatttttattctttggaacatggtgccgaaccacgtgcactctcttaagacaaagggttaaccaagtca

SEQ ID NO: 204268 - DNA, 352 bp, Glycine max
  unsure (1)..(352): unsure at all n locations
agctngaaggtgtgtaacccaccatttttaaatagacacactggaatgtgtctactatcattggtgtcatttctttctccgtcattgagggaaccacttgggctgccaggtccctccacctttgggcgtattctttgaaagatccatgccccctcctgcatatgctctatagttgcatcctatccggagccatatttgaattatactgatactgcctaacgaaggcaaccattaggtccttccaagaatggactcgggaaggttccaagttagtataccagctgacagctgcctcagtaagactttcttggaagatatgtatcagcagtttcccatcttttgcgtatgcccc

SEQ ID NO: 204269 - DNA, 447 bp, Glycine max
  unsure (1)..(447): unsure at all n locations
tggccgatggagtgccccattaactgcccgaactcttttatactggngattcctaggctcttgaccttgatttgatagaacctctttttaagcgaagggcgttgacttggtcccatgttttactaaagtgaaacaaaatcggtgcgaattataaccccgacatctatcatgggtggaatagatgaatgcatgaagaaatgcgtatgatacagatgcaatttatgaacacgggagcccaggaaattgtctccttcttagatacaacatcttgnggtagcaaagtgctcgacgtatgtatttaagaaggtgacacggaccctccgttggtttgccaaggaaaagggatcaagacagaacccgtgcatgattcatatgcaaaaggcgcaacacgggaatgtatatagtatgacaatattcccaanatataagcaaaagggtacatgacac

SEQ ID NO: 204270 - DNA, 361 bp, Glycine max
gcagcatgcttgcttccgttgggacatcttgacttgctatacaatccgacattcaccacagaatctgcctgcttctatttttttattgggaatgcctctaacagcacctttgtcaatgattttcttcatgcctcttaagtgcagatgtccaaatctttgatgccatattttgacttcatcttctttggacaatagacatgtggaggagagactggattcttgaggtgtccatagataacagttgtcctttgatctgctgcccttcattagaacttcactcttctcatttgtcaccaggcattctgactttgtgaagtttacattgaatccttcatcacacagctgactgatgctgatcaag

SEQ ID NO: 204271 - DNA, 283 bp, Glycine max
aaccactcgacccggcgaggggagaacttttttccaaacgaagaaccagggtggacctgacccccctcccataagaaaaagggaggtgcgccaagtctgagaaatcgaccacccatacagtacccctttgacttacaaaagccaaacccacgaggttcaatgatatcattttcttccctcccaataaggaaagctaccaagtcgaattacgacatcgaacaagaaccgaacctttcaaaaacggaactaagaccactcaaagcctgaggcaatcaacctttac

SEQ ID NO: 204272 - DNA, 388 bp, Glycine max
  unsure (1)..(388): unsure at all n locations
cagacgacctgcggcatgcaagcttatcttaacacactgagctcaccatgttgtttatnngatattatctntangaaaacatgtagtgttctatcactatatgacagcctcgttggcttcattaatactcgtttatagaaactagacgacatagcctatttttctttttcaaatttgtcggcaaaaaaaccctttatctgtgaaaatattctatcctttgataacatagcatgcaatccccctttctagtgtgattcttggtatctcaattggcatcaaagctcagcctcacgggttgagtatttaacaatattgaggaaaagatccaaccatcactgaaagatatggaacaccaatacttgttaacgttctaattatgttaagatat

SEQ ID NO: 204273 - DNA, 367 bp, Glycine max
  unsure (1)..(367): unsure at all n locations
ctcctttttctatggctaaatcagtaatggatggcgccttctctntcctactctcctttgccttacgctgcatctccatggtgaaaaactcaccatgaaggacctcattgaagctcaaagatccagcctccatagaagccccacaagcaagtttccatcaaaattgaaatgggcttagctcagccttggccagcttagtggaccgaataagcctgagatgcaagggttgagcgctaagcgcttgagaccctcgacttagcgcatgaccaatgatgctcttagcgagaggactgattttcagaaaaaaaaaattctaagttatttctcaatcccttcctcaagaaattgaaacccttatatctatcat

SEQ ID NO: 204274 - DNA, 221 bp, Glycine max
gagatcacaaacattcaatcatctcatcatacaagatgaactcgcttaacgggacagggcccgctcatcgagtccatctataaatccagatattcatcagaaagtgatgaactcacttagcgcattcatcgccatttccaaaaaaactggtgctggatccagaggcctcggaataattaagaacggggggaggctgaaccaaatattcatgaacccttact

SEQ ID NO: 204275 - DNA, 359 bp, Glycine max
agctgtagaggaaaggatttcttctgcttttatatggaaaaagggccgcactaacgtgctggatctccgcgaaaggctattacggacaatggacccatcatctacaaattatgatctgccctagacaacaagtcatgaatccatgcagtataagagttggtgttgatgctcctgcaatgcaaatcataaggccatttgacccaactactaaaaagacatggaaggaatcattgttgtgacacactcttctaattggcaataatagcttattgtatggcatcagccttagtgcataaaacatcctatcatcaccttattcttgtacacaatttaatatgctattaaactgccgtgtaaac

SEQ ID NO: 204276 - DNA, 384 bp, Glycine max
tagcctgcagcgccgcacatcagtgtaacacttttactggccaactagacaggcgagaagatttgggcatacgtctaaatctctgcctaaaacaccaaccaaaatcacagctttgctcacgtaaagaccccagatctatagcctacattttgaccgttgggatctgatagcaaaaatcccaaactcattctgcactactctttccacaaccatgcaaaacatagcattttactgcacatagccaaagttctgctgtacctatctgacagcaaaattctgtataagcgcataatacaaaatcacactttcctttatctcaattttcccagatcgaatcctacaaggcccaaatcatgtatccatcatgtctaaccatagacagct

SEQ ID NO: 204277 - DNA, 412 bp, Glycine max
  unsure (1)..(412): unsure at all n locations
cccgcgaccttaagtcacctgcnngctgcagctaaaaattgaattattcattctttactgctggaatngataccatatatgtgttattcattacacagtgcacatttcgaattcaaattttaatagctgttgtaaatcagctgtgaccactggtaatcgactacatcctcttggaatcgattaccagagagataatctgttgaataaaacttnttaacttagatttcttggccaaaccttttgcgacttcaattggaattcccttcctatttaatatacccttcctaagactctagagactgtcttgatcattcatcttgaatatcttttgcttgaataaatctttgagaagcatatgattcattgtaatcttcggccacatcaaaacattcagcttgtatctttgtctcaa

SEQ ID NO: 204278 - DNA, 427 bp, Glycine max
  unsure (1)..(427): unsure at all n locations
acacaaaatactcagctatctgaacatatcaactcatcagcgtcttttatacaacactgggaaaaatccaaaagctactaagatcataaaaactgaaaagacttcaagataagatatcgctctttggacaagggcactcagatatgcaacgcttgtgaaacttttaaggcaaaagagtgcaagctatgtcttgagaatgagacaatcaccacaaaaattgctttattagagaactttccagagttggaaaacaaattgaaaggcctataangatatgatctgtagaggaaatgtacaccagcacacaaagattatgataaccttgaaagagtaaggatacatcttcgggtggaatgtgcagaacatacgacgcttgtgaaatattaaacgaaaagcaattgagaatgaagaattaaggggccacttc

SEQ ID NO: 204279 - DNA, 326 bp, Glycine max
  unsure (1)..(326): unsure at all n locations
tgatgactccaacaaacaacctaacaacgcttcttcaaacgaaaagctctcgctacaaaaataacccaagatcgctacaccacactaagaccggtgacaagaatcactaaagacaaagcctcgccttaaaacacagtgctctcacgacatgcagggctctgcgaatcacataccacgaagcgtaagcgaaaaccagaagacagggtccagaataaactgtcgaaaacggccttgaacacgaatactcaacatgtcacctatcaccatatgtctcggatcaataancaacaccaaaacttcggaatcgcaaatccacaagcacacac

SEQ ID NO: 204280 - DNA, 54 bp, Glycine max
  unsure (1)..(54): unsure at all n locations
cccccccccacccccccttttccccnccccaggcctgatgtgatccgccccaaa

SEQ ID NO: 204281 - DNA, 349 bp, Glycine max
gtgatcaccatcatatccgctatgcccaaaagggcacgcttaatgcgaggtcgcgtgaactttaagctaccttaagcctataaaaagagtaggaagcaaaagaaaaagacacactgagactcaaagctctatattgaatacacccaaagccttggacatgtctaataggggaaaccctctttctatagctattttttcctttatcttcctttatccatccctcttcttcttccatcctcatcaacccctaaagtgtaaagtctctcatggcaatgagaggctaaacccccattgttgggacctgacaagccaaacttttgtcatgtaactattccttactatctattta

SEQ ID NO: 204282 - DNA, 494 bp, Glycine max
  unsure (1)..(494): unsure at all n locations
ctcatacatattaagatcttaatatattatttgcagacagagaaagttctttgtaattgttgtnttaacatttactttttcgacaataacttgttaaagcaaataatacttaaagtagaacacagcaacatttaacattaatttatattgaaataataataaatatattcctaacttttctcttcaactattntcttaaagtgacaaaagtaactcttcactaattatattattcatacaatattatatttcatgagtattttctgccagtatgacaacaaatataaagaaataaaaattaatacttttcatgaaaatttaagagaaatttaaatgtatcttaccggataataaataaaaatatagtaatgaggataaacatttttgtaagaactaagaataaaaattacacttaatttcgtagaatgagcttcttttactaaatatttttcctttcacatatganatcaaattaaatctaacataatcactct

SEQ ID NO: 204283 - DNA, 202 bp, Glycine max
gagcttgatgcccacattatctgatgaggattttccatctgatcttaaaactggactgatacatttgctaccaaagcggaataacactagcgtgttaaaacgcgcgcaagcattagcaagaatttcacattgtttgctcgcccatacatccgccaaatgtccaagaggaccacatattcctgaaggctaaccattatactct

SEQ ID NO: 204284 - DNA, 346 bp, Glycine max
ttaaacctccattaaagtttttgcttaaccttctcttccattgttggatcttcaattttctccatgtatctcctcacatgtcttgtgctaaatgttgttaacatgattctttaaagtttccaccgattaaacttgctatagaagctagatttgattttctatggttcaaatttcttgttcttgttctggaaccatgaattatgttgagtttaggttcctttgagttttgtcttgttatttttttttggctgaaacctaaaccataaaattctttcaaaaatattaaagtttaagaaaacctcaaaaatctagagtgacttgttcacctattgtagttttgtcataa

SEQ ID NO: 204285 - DNA, 380 bp, Glycine max
agcttgagctgtgtgaatgttacatttattttaaacaatcaagagataatttccaacaggcaaagcatggagagcaagtgagtgccttgaacttcttcatgcaaacttatgtggcccaatgaaagcagtctcactcggtagaagtaagtatttcttgctcatcacagatgattatagtagaatgagctgggtttattttcttaaagctaagtctgaagcatttgaaagctttaagattttcaaggctatggttgaaaaatagtctggcttgtatgttagagctttgagaatagatagaggtggtgaattcttatcaaatgaattcattactttttgtgaggagcaagggataaaaagagaattgattgctccatatactt

SEQ ID NO: 204286 - DNA, 267 bp, Glycine max
cgacgacatctacacattgcattgcatctaatcttttgtaatgttgcacacagcacgtgtgtctaatctgttgtagatagttatcaatctgacattgtttaataccaataccatacctggtacattttattcgttgcattcaatcccaaaatctaccaagctcactttcctgtcgaatcccataccaacatcgggtcataatcatcgaacctataaccacaatctacacttacatttagggatatgctatgtgcatctcacactatt

SEQ ID NO: 204287 - DNA, 409 bp, Glycine max
agctttgctatcacaccattcatggcctgtttatcagaagttgtttaccaatcatagttatagaactcactaagcgcgcatctacgcgctaagcccaaaaacccctcgggttcacatttttgagaatagggctaagcgcgtgaatttaaattctgaaaattcaaaggtcacagagtgctcgcttagcgagacactcgcgctatgcgagcatatcgaaactgcaaaagaaaaacataactgccttagggcagttacattttaatgataattataactgcacctcatcatttcttttgctaccatttgcactgtgcttaccattgcattctacttcttgcatctccacttcactctacttgctgcaactccaagtaaggtaatctttttatctatgcgggctatgtttatt

SEQ ID NO: 204288 - DNA, 399 bp, Glycine max
agcttgtgcatccaatttcttgatgaggatgttccatatgttcttaaaactggactgattcatttgcttccaaagtttcatggccttgcaagtgaagacccgcacaaaccatttgaaagaatttcacattgtctgctccaccatgaaacccccatatgtccaagaggatcacatatttctgaaggcttttcctcattcattagagggagtggcaaaggactggttgtattaccttgctccaaggtccatcacgagctgggatgaccttaagagagtgttcttagaaaaaaatttccctacttccaggaccacaaccatcaggaaggatatctcaggtattagacaactcattggagagagcctgtatgagtattggcagagatttaagaaactatgtgc

SEQ ID NO: 204289 - DNA, 401 bp, Glycine max
agcttttcaaatgggtaaaaggctcacgttcactttcttctacatcatattcaaacttgtccaaataaataataaagtcatctcgactcaaagaaagtcatataagtctcatacaattaatatagaacctatatcctaatgtcacatcctatcagagcgtggtgttcccgtgtcctctagcattaggttcttcatagtcatccacctattcatctgctcccccgaacacaagttcaagatcatcacaggatccaaacacaacaacacacagggagtgagttatcacattcctaactaatagagaaacaagacaattaaatatacatattatataaatgagataccacttgcttaaacatagctcacgtaacttcaccacttcgtcattcaaaattcacttt

SEQ ID NO: 204290 - DNA, 372 bp, Glycine max
  unsure (1)..(372): unsure at all n locations
tcttatcaaccantccagagtacccactcaccaattgcattatctcttagcaatctgtgcctcttccaaacacagattaaagtaaatccatgcattctccattacgcatggtgtcctactcaacancnntaacatgggcaagcacctcatattcacaatcgtgtccctctctgtgcccatgtcctatgcttacaacgtgntcacgtgcgtactgtcctatgcttacaacgtgtttaccatagatcataaccccaacgtgttcacgtgtaacaccatgaccagtggctatgctgaaagcgataacccgagacctgcacttctgttctatcagcaaatgatagtgtctcgtattgaacctgacactcacactta

SEQ ID NO: 204291 - DNA, 389 bp, Glycine max
agcttcagaaagaaatattggcactgcagtttgataaagagtttggatggagcttgtatgaaaattcctatgaaaagcattgggagattgaagaccggattacagaaatgcagaatagggtttgcagcttgcaagatgagtttggcattaatacaatgatagaagataacgatgcacgagctttgatggctgcaacagctttaaattcttgcaaagagacccttgctaagttgcaagagacacaggcacaatcatctgaagaggctaaagaatcctaccaaagggttaaggaagctcgtgacatgtttgaaaccattagaggccaattcatttctaaacttaatagtcaagaagaccaaggaactgaaccaaaaagcatagaggaagaa

SEQ ID NO: 204292 - DNA, 386 bp, Glycine max
agcttgtaagtggctcatagttaacaaattttattaactgttggattcatgacaaggatgtctccaccatcgacttccttggcgagatcgaaaccctctccaacggctattggatctcgttagtgtcgcattttacacggtaacaacattgctgctctgccgaggatacgatggagaactaatgacgataacagtggtgtcatcgatgaatgcaattcacgctacttccacttgatgatgaatgctaatcgaaggcacaactctctaaagggagccatgattgatggaacttgggtagatgacccgtataaggtgaaggaggaagtaagatcattcttttcaaaaagatttcaagaagcagatgaacaatgacctagactggatgg

SEQ ID NO: 204293 - DNA, 403 bp, Glycine max
agcttcatgatgaattttcaatgattcatatgtgttttgatgataacattgatgacaacaaaagatgatgacaaatgtgatgaacaaaaaggtcaagtgaatcaaagaacatccatctcaagaatcaagattcaagattcaagttcaagaatcaagaagaattcaagactcaagaagaaagcctacaaacaagaatcaagattcaagattcaagagttcaagaatcaagaagaattcaagactcaagaagaaagcctacaaacaagaatcaagactcaagatctcaagaatcaagattaacattcaagactcaagattcaagaatgaagaaaagactcaatcaagataagtgtcatacccttaattcgtccggggattattatttgatgatatacaacctttg

SEQ ID NO: 204294 - DNA, 293 bp, Glycine max
ttatggatcattctcttctccttctacaggaggagcttctgaatatatagactctctctatgacccattctattgacgggatttatcactacgcgagcggctcacccggttactccagaatccaaataattctattttctgatgctagcactgtatatgagtgcaaataggaacattatcttctcaagacattctactttgtttcatcatgtgggaattagaattaattcccagctatctacatttatctatgtgggtggaaaaaatcgtttgtatatcagctacaaagttta

SEQ ID NO: 204295 - DNA, 389 bp, Glycine max
agcttttgggacggatctgtgaaaggccattattgtctgaaaccaaattaggctggtatccaaccaggcctaaatagttcgattgaacacctgtacgacaggacaggatctgtggattcaagtaaaaggaccatatttcattcacttcttcttcattgtccggatcgacagcaggaaaatcgtcagtgaaccaggccgggccgatctctctactaatgaatggagcatgttggggaagaaacttgtcaaaactcagaaaaatcttcatgtacttgaggaacagcttttgtgggttttgatcgaaggtcttgggtgttaatcgaagtgctctctggccttcgatcgagcgattggcaacttcttcagcatagtcttgtgggattattaat

SEQ ID NO: 204296 - DNA, 374 bp, Glycine max
agcttagtcaaagatagagtgcgcaatgatatgaagcaaactctgttccatgacttttcagccatagaagtcctagaggctgtgaatcaaatgcatccttccaaggccctaagatcggatggcacttccaagcttttctaccaaaccttttggagtcaggtgggagatgatgtgattcgtactgccctcaatatttttaattgcaatggggacccttcttttctgaacaacacttacttaacccttatccctaaggcaaagaagtcgaaccatgctagccaattttgacccattggcctttacaatgtcattttcaaaattatcactaacacaattgcaaaccgcttgaagaaaatattgtcgcccttagtctc

SEQ ID NO: 204297 - DNA, 332 bp, Glycine max
cgaaatccattgtgtgtggacctgttgaatcaagaaaaaaatggaataagttagttcaatcaaactttataaaatattttgtacctaaatttgttattataatatttataataatagtttgctaaccttccctaaaggttttgaaaaacgtctttgtatcccacgttaatagtggtattgcaaggcttgccttgttgatcaagaattaaaatgcgtaatccttgtttactctgcactctagatagtgccacataaatctaaccatgactaaaaacaagcctttgtaaatataatacaacatttgacaaagattgtccttgagattgtttata

SEQ ID NO: 204298 - DNA, 413 bp, Glycine max
agctttcttgagaaaacttcttgagaagatctttgagaaacttccttgagaagctagagcttagctacacacacccctctcataactaagctcacctccttgagaagcttccttaagaagattcctaaagaagctagagcttagctacacatacctctctaatagctaagctcacctccttgagatgagaagctagagcttagctacacaccccctataatagctaagctcacccccatgacaaaaaacatgaaaataaaaaaaaaattccttattacaaagacaactcaaaatgccccgaaataaaaggctaaaaccctatactactagaatggccaaaatacaaggccttgacgaaggaaaaacctattctaatatttacaaagataagcgggctcatacttagcccatgg

SEQ ID NO: 204299 - DNA, 309 bp, Glycine max
  unsure (1)..(309): unsure at all n locations
ttatctggatagngtcctgctatacaacataaactactgactgttgcaacagatgcataattatgattgatggcaggctgctttactacggtgtgctgagcctcatgatatatctcaagctctatatttacagtacaggaagagaagtccgtggccacatcatggactcctctaatgacaggtacataatgaaatgcgctgaagtggcgcgacgaagaatcgatcttatcaatcacattcgcactctcaacaggggacatatcgccaagagctacggcactggtgacaagaaccatactcctttacatg

SEQ ID NO: 204300 - DNA, 352 bp, Glycine max
ttaaacaatggttgccacataagaaaagtccacccaaatgcaccttatcaattccccccacccaattagggaatttggcataccaaagtgattaattttttttatcaaaataaattttattttattttaaaaacatcagtatcacataatacatttcagacaaataagatatattataaaatatcagaatgacaccatcttttttattacttatttcgaagtagttaatagttgtctcacattcgtgaaactgaaatagatgaaagaaatttaaaaaaagactatgtaaacaaatccaagatatgagtaattttcttttgtatcatatcaaaatgctctataatatataaaa

SEQ ID NO: 204301 - DNA, 270 bp, Glycine max
  unsure (1)..(270): unsure at all n locations
catgcaagcttagccctagaggggatggacctttttttgtttggagaggatcaataacaatgcctataggttggacctcccagaagagtaaggagtctgcaccacttttaacatttctgatttaattccttttgtaggtggagctaatattgaggaggaggaactaacagatttgaggtcaaatccttttcaaggggaaggggatgatgcaatcctccctaggangggaccancccctaaagtcttgatcacaaggctccaaaaggatag

SEQ ID NO: 204302 - DNA, 366 bp, Glycine max
  unsure (1)..(366): unsure at all n locations
ggctagatggagttcgaaaatctgcactttatgcagaattttgttgtcaaatatgtgcagcagaattttggactgtgcagaanatgcttgtgtatggctggttgtggaaagggtagtacatattgggttctggacatttgctagcagatcccaacggtcaaaatgtagacttatgtactagagacttccagtaaaattttcgagtcgatccaacggtgaacgaattggaacgaaggaaatgttactggtgtctttaagtaaggaaagctgtgatattgaattgtgttttgggcagaagtttctacctctgccctgttttcttggctgtgttagttcatgatgcttagaatttgaattacttggatg

SEQ ID NO: 204303 - DNA, 379 bp, Glycine max
agcttgtcgaacttcattgtggaatctcgttatttcttccatttttttgtagcccttggctcgctcccgtaactcgtccatgctgctggaaagcttcttgcacaatctgttagcaagtttgccaagttgtagggctagcaacatagaatgcaacgccacctcaggattaaggttcctaatttggacaacaagctgaccaaatctgcccaaaatttgtagagtggctcttcgtctacctggcttaaactagcaagggcggcagaagtcacatggtgcgatcagcttgtcgcatattgagagctgaaatgaccgacaaaggtatcaaaactatcaaaaggtcggggaaggagtgctctataccacgtcaatgcagctccct

SEQ ID NO: 204304 - DNA, 393 bp, Glycine max
ttttttttaccagcgggacactactcttaacacacaaatgacatacaacctcctcccataaatacaaacatcaatgtaaatttagagcaagcttatgcgcatatttccctacgaacgttcacttgcacaagacatcctattaactaagaaaaatgcactcatatacaatcaaggtagcttcattacctagattatatacatgtacttccaaggtgtatttgttatttacatcacacatgcctccttggctaaatttacatacatgcatactcatagcatttcggggtaccaaaatatgcacatgcgctcatcttggtatttctaatacctatacatatacaaacttcatgatgaatcttgactaccttcgcaataaagtgctacatttcatgc

SEQ ID NO: 204305 - DNA, 398 bp, Glycine max
agcttcgaagggaatttatagaccaatcattatcacatagcatgggcttgaaagaagagttagagctcaaggtccaaaaggaacttgtctcagcgtttatgcgagacaaagaccaacatgttagctatcgtcagcaaataccaagaagagctaaatctagccatggcccacgagcataaagtggcggacgagtatgccaagtgtacgcggaaaaggaggctagaggaagggtgatcgactcgttacatcaagaggcaacaatatggatggaccggtttgctcttaccttgaacgggagtcaagaacttccccgattgctagccaaggccaaagcaatggcggacacctactccgcccccgaggagatccacggacttctcagctactgttagcatatg

SEQ ID NO: 204306 - DNA, 476 bp, Glycine max
  unsure (1)..(476): unsure at all n locations
cgcctnttagctaagaggctatcttcagtcagaacatggtcttttctatcttcaatgtcacgcattcattccatactctgagattcatgcaaaaataattactcaatgttagtcgttctctcacaattaaagatcacactctcaccgtgttgtagctaatgcgttccttcacaatctacttgacaaaccaactaacattttcaggcatgatcctaattccatgttctatctcttctaatgactgcatgctcattcaaggcatatgatctacgcatttcaattcactcacatcattcaattgatcaatgcagaccattcacagacactgattccataatcaagtatcagccacttgataatataaatgcattgttcaatcaaactttatacaagctaccacacaactaanaactatatactgagatntatatactgagactaaacataatctacattatataattactaaaacatga

SEQ ID NO: 204307 - DNA, 380 bp, Glycine max
agcttgaaacatgtgttgtatcgtttttctttctataagaccaataggtgctgatatgagcaaaagtggattcggcttattaagcatattttgagttcgagattgtggattaaacacatgcgattagacagagagaccctatttaaagcggttactaaaaaaaaggggttatatcttgtgaatcaaaaaaattatgatgggaagaaaattttcactaaaaatgatcaatctaattttcaatgaagattaatcattaataaaacttgatgaataccttagaactaatctcatgataaacaaaaactagtatcataaatcctattgtcctatgcccatattactcttattatcacaattcttgttaatgcatgtctaaggga

SEQ ID NO: 204308 - DNA, 384 bp, Glycine max
agcttcatcgaacgcttggcagaactaacttttactgtttcattggcagataacaataatataacatactccttaaacttaaccatgtggtcaaggatttaatcctccggtccaagttagttggcaaaactcaactccttaaatagatcttaatactttcctaaattagtgcctaacttttcactaagagatacccaagaaattattgtttacctgtattggatggattggaatattccatgttaaccaatgcactgattccatgtataagcatcaaaattttattgtttgacaagtctaatactctaactgcatgtgcagtcagaggcatatatatgctgaatatccatgtataatcgatatttagttgtgatccatcaacta

SEQ ID NO: 204309 - DNA, 395 bp, Glycine max
agataatctactatatagagagtgtaatctgttaaatcaatctaatgtgatattttgaaatcatcaagaacaattgaatttgttaaatgcatcttgtaatctattagttcctatgacagaatggcatgtttatcattctgaagctttaatctgttagcaactaagataatagattataagtaaattattacccatttaaatgattgattttatgtctttaagagctaattcatgagcttgaagtttgatctcttgtacttgcaagtgagtgtcttcatcaaaactctttttgagatccttatagagataatgttcttctacatatggtgattttttgcgttaacactactgaacctatttctatctcgtaagttctatatacccatatcatccta

SEQ ID NO: 204310 - DNA, 384 bp, Glycine max
agcttgatgtcattcataagagactatgtctttctaaatgaagactgaacatgcattgtttatctaattgtattcattatgcgatataatttgttgtaagccattaaaggataattattaagtactcgttgcgttaaaaaaaaaattagttggtgcaaccaaaatcaattacgcatgtacgatacatcattgtcataattgaaaacatataatgatatgcatgcatattaaattttgagcgtaacacgacattgactgacttgacaacacattttgatgcacgacattggttgagtaggaaacataaacatgaaacatgttcacgcgtgttcttttgtaaaaaaaaaagtgaagcaatctgtcggtgagaaccatgtatatata

SEQ ID NO: 204311 - DNA, 402 bp, Glycine max
agctttacagcagattttagtaatgaccttttatcctagaattaaaataacttaatgccattaacctagggaattaaaacaaactaaatgactgagtgtaactgaaattgttggcaaccaaaagtcacccccaacagccaacaagtcagccaccatttggtctcccaaaaggctgatgcctaggttgccaattgggcccttattacaacttgaactaaagcccttttagttgattaacccaaaacatatttttggtcagccaactttacaaggattgggccattatttagacaaactaaacactctaaaattgaaataaagtggtgtcatttagtcctccatttgggccatgatacaactcacaaccttggacttttctccttgaaacttgggcttgtattc

SEQ ID NO: 204312 - DNA, 333 bp, Glycine max
ttggctcagagcttcaacattcaatttcaaagcgctcgataagttaccggactcaatcatacatccgagtaaaaaagtatggtcgtttgtattggctgagagctttaactttcaatttcaaagcgtctctatatgttactggactaatcccacatccgagaaaaagatatggtcgttagtattggctcagaacctctacattcaatttcaagcgtctctatatggtacgggacctaatcacacatccgagtaaaaagtatttggcgttcgatctgctcatagctccaactttcaatttcaagcgtgtcgatatgttacggacacaatacacat

SEQ ID NO: 204313 - DNA, 387 bp, Glycine max
agcttctagagaaaactacatgaagctgcttcggtagaaacgatgcccagccttcgttaaccgttggatcttttcgaaatttggtttgaaacttcacaagacactttaccatgatttaaccgttgggatctttgattaaatatctggagtatgctagaagcttccagtcccgagagcgtctcttatttaagcatttcagcctttgctttcttgtagcttaggaaaaaggccatttcttcttctttctttcttccaaatccatttctaaagttccaagtactttctccatcacccacatccaccattagccaccacaaaccattattgttcttcattgaaaacccacaccgagaggaacccttcaatcgaagcagagtttccaacttg

SEQ ID NO: 204314 - DNA, 432 bp, Glycine max
  unsure (1)..(432): unsure at all n locations
ataaaactcaagctgggctngcccctttctattcgtctctatgtgtatgattcatttgttgaacaagtgacatcaacaactgtacttaccataatctagagctggtacacgtcagggtggacatggacaagttgggctcctagacgcccatgtcagacttagaatggtctttgttcaaaggacaaataggaaggattcgcataaacaaaggactacaacactcaagtaagtatgtgagttacgagagtatgagtgagtatatgaaaaagtatgagggaacctggcaattatagtgtagactacgacctgtgagtccttgcttgtaggggcctgttatggtggtgtaataacccttgtagataattaccggcttgtagataatagctagtagttaatggtggattacagataatagtacagaaaatatgttgc

SEQ ID NO: 204315 - DNA, 374 bp, Glycine max
agctttttgatttatggatcacctactttttatgtaaaataacagggaatcggaaccagaatatgtattctaaaagcccaaatttatacttacgaaatgatcattctagaacccagattgactttcccgaatagtgttcagaatacataaaatatgcttttgaaatgtttgttctagaaacatgtttattgactctgtattccctaatgcatgatgttaaaagcatttaatggaatccctaatccaaaattataatttatggtttccaaaaagcctcttcccaaaatcaaatttattctgcaatgggaaggaaggtatatctcatcaagggtatttttttatttttcataaaagtaggaggtgctagatacact

SEQ ID NO: 204316 - DNA, 189 bp, Glycine max
agggctttctcggcacatggtgacggacttttggcgatgtggcaatgatattttaaagacatgacctgatatgttttttgccgacatagctcaaatttggtcaattggcagactattttgatgagctctaggttttggtgtatcactactaacatattggcgtgtactaatttttgaagaggggtggga

SEQ ID NO: 204317 - DNA, 403 bp, Glycine max
  unsure (1)..(403): unsure at all n locations
gcttactcattgattagaaagntagatttttagcttataatattatgngattatggctaatttatgactntacgctgacagggcanaactggacgacaatgcccaactcttggatttcactgaaaaactagaggcagcttgcattggagtattaaaagctgggaagatgaccaaggatttggcacttattcttcatggatccaagtacgttaaattgtcattgttgcgaattgcccaatacactttgctttctacttgacatgattaattaacttactatataattgttgcaagtaggctttcaagggagcattatttgaacacagaggaattcattgatgccgtggcagccgagcttaangctaagctttctacatagacttgatttaaagtagacttgctc

SEQ ID NO: 204318 - DNA, 310 bp, Glycine max
  unsure (1)..(310): unsure at all n locations
tcaacaactataaatagagggtcagtccaaaggaaagaaaacaccacgacagaaccccctctcctaggggttacatttactccctttctttctttcacccttcctctcatttgaaagccctcaatggccatgagtggctaaacccttagttaaggtctggcaagcctataagccaatgtgatgtatgatgtactcttcactatttatcaatgcaatanccagtttttctttcctattttcttttctggttttaccttgcatactcatctttatatatctgtagggcgtagatgctccggagagggtaact

SEQ ID NO: 204319 - DNA, 389 bp, Glycine max
gcagcttatgaagggcttctcaagagctttttttggctactttgagaaatcttaagagacttctttgagaagctagatccttatctacccacacccctctattaactaaattaacctccttgaaaataattatggatcaaaataacacaacgaatatagtcaaacatcaaacataattactaataatatatagatatatatcagggtgttacaactctcccacccttttagaaatttcgtccccgaaatttaccttactcaaacaaggatgggtgagcttctcgcatttgaatttctaattcccacgtggcatcttctcctaatgcacctccccagatcaccttgaccaacgaaatctctttccttcttaggtgttttgttcgcctatc

SEQ ID NO: 204320 - DNA, 400 bp, Glycine max
  unsure (1)..(400): unsure at all n locations
agcttatgcgcatatntccttacaaatgttctcttgcacaagacattctattaaccgaaaaaaaatgcacccatatacaatcaaggcagcttcgctacctagattatttacacgtacttccaaggtgtatttgttacttacatcacacacatctccttggctaaattcacatacatgcatactcaaagcattttggggtaccaaaaattgcacatgtgcacatcttggtatttctaatacctatacatacacaaacttcatgatgaatcttgactatctacacaataaggtgctacatttcatgctcttttcaagtttttgctacctaaagccgcatgcaaattcaagtatattttcctttgctgactaaaattgtattcaaattaaaaggtatacattt

SEQ ID NO: 204321 - DNA, 370 bp, Glycine max
ctctacatttcgaaagcattagcaccaaagacctcggtgccactgtgtctttcgtctttgcctctgcaggagaatgagtgagagcgagagcaatagcgagatgatagtgagagtgagagggtgagagaagaccggagacgttagtattaaaacccaacatcacggtattaaaaaactaatgttaacatcccgatgttaatatcagttcttttataactgatataaacaaaaatcgattaatatcgggtgtttataagatcgatgttaacgtcgagtttataaaacaaaccgatgtaaacatctgatatttgaataattgatgctgagacaatcgatttatttaccaagatcgttaccgcccttttgttaa

SEQ ID NO: 204322 - DNA, 414 bp, Glycine max
  unsure (1)..(414): unsure at all n locations
agctttcactttgtaatatcataggtccagttaaaatttctggtatatctttcaatttccttcaacaaggatctaggtcacacacaaatattaaacaaatataacaacatgtcattaagaactaatttaactagttggattctacccatgaccgaaagcatgcactactaaaaaatcatttttttacgacgcgtattctaagacggttatatataaccgtcttataatgttacacggtggcaattttgtaattaggaagaatgaattttttttataacacacattttaagacgggttcacgacaccgccttaaaatgtcctagggggaacacanacaacgtcgggcttttatacaaaaacgtcattgttttgtgtgcgtgtgctttaatttgaaatccctagcctcgactcttc

SEQ ID NO: 204323 - DNA, 392 bp, Glycine max
agcttcatccgcagattctctttgtaagactatgcctatactaaatagcattattgtaacagcataattaaaaccaaaacttcatccgcagatccctcttgtaagactaaggttcgatcctacttcaatcaagttctaaggcaacagtacatttcccaatgctaaattcacctaactatgcacacaaatggatgatcaaaccaaaaacatacaaacattaagcattaaaggaagctttgaacgcagaaaacatgatcaattagatatcaggtatttacatcagttgttcattagaaatccctaactagggtgtttagctagccattacagaagaaaccctaacaataataaacttacaaaacctaggtatctctgcagaagatgctcctctt

SEQ ID NO: 204324 - DNA, 274 bp, Glycine max
ctttgatatcgctcccactatgtgatcgaagaaaaggtctctctgagctctccattctctatggaggccctcacgagtcgaggctcagatctctgttgttatttcagggtattcaattctgggtacatcttcgagagtggaacctttgccctcataacctgaatcttcatctcctgaagaaatatgttgagcaatagatgtacgtccgtctcacactgcatgaactagatcttccgcacttaacattctcctatagacactctctatgctttac

SEQ ID NO: 204325 - DNA, 399 bp, Glycine max
  unsure (1)..(399): unsure at all n locations
naagcttgggtagaagattggtggataatcttgatccaatcaatgataactattttctgaaaaaggcaagaaagcgactgagactttatgatgttacagaagttgttttcttaaaatcacatctttgaccctattttccttggtaactcattttctaattactacgtaacaaatattttgaaacaaaataactcttaatatatgctggataggagcaggtagatccatattaaaaaagctgcacaatttggcaaaggatacatccagatcttatgcgatcgagttctccgttgaaaataatcagttttcattcagtgtncaagacagcctctttataaagttcttccacaacaagtatttctgaaatacaagggaacactaatcaggaaactttcattg

SEQ ID NO: 204326 - DNA, 325 bp, Glycine max
  unsure (1)..(325): unsure at all n locations
cgacactataaaaaacatcaagctatataaaaataatangtcgaaagcgtgtagctgacaatgtatattcatactntnacaggattaggatccataaactcctgtgccaagtaatgaactggcaaaggccatgtagcactgaacatatccatttgacgatctgcagataagtatactctctttaataaaaaaaaaaataagctgggacaatttgtgtgcgcaaaanncnagtatgtaagctccttggagaatcagaangttcaatgtagttcaactataacaaatttaagccaacatttataagaatactattacaagaaattaa

SEQ ID NO: 204327 - DNA, 374 bp, Glycine max
  unsure (1)..(374): unsure at all n locations
agctgcctctaccgttttatttatattatcttgtcagngcatcaaanaagaattgcgctattgtccgcatataaatattcaccgtggctatataacgaccgatgtcaggtatttttgtttcaatacaatccctgaataattttggatattgcccactaggaaatgttcgatcggcgtcatcaggtgatgcttgctttttattttagacctgctggatcggtcatctttcctggccgacatcgactatcatgttatttatcagtgtcggtgaataatgtattttggccgaggtgggctgatgtttttctagccgaatnaatgagaacacgccattgtcggccgaaacacatctttggttgagctcgcacgaaaaa

SEQ ID NO: 204328 - DNA, 385 bp, Glycine max
aattaataaataacttactggctgagtgtgactgaaactgtggcaaccaatagtcacccccaacagccaacaagtgaaccaccatttggtctctcaaaaggctgatgcctacgttgccaattgggcccttattacaacctgaactaaacctaactaaagcccttttatttgattaacccacaacatatttttggttagccaactttacaaggattgtgccattatttatacaaactacacactctaatattgaaccaagtgggtcatttattcctcctcatttgggccttgaacaactcacaaccttgacttttctcttgaacctggcctgattcaaaaagatgacacacatgtgaaagcgtccttgcttcttgcctaccctggc

SEQ ID NO: 204329 - DNA, 374 bp, Glycine max
  unsure (1)..(374): unsure at all n locations
agctttgttaaaaggttttgtcttcatatattacattgntattatgtgatttagntgtatcaattatcttttgctgtgcatgtgattgtgaatgaaggctcttccactgatattgtagacctagtgcaacttgtactccccacaaaaaccttatgtcccctttgctgccttatgtttatgtaacattcacaatttatgagttttttttctttgaaaaactaggctcagtgtgaagtatttactatttaggtagccattcttccaaccatctttgaaaagcactttaaggttaaaattgcttccaaccttgaaatgaggatcaagctaggatatgaaaagagtgttttgttactttctttggtgtctgttactct

SEQ ID NO: 204330 - DNA, 399 bp, Glycine max
agctttaagccaatttatatataataactttttactcggatgtctgattgagtcccgtaatatatcgagacgctcaaagttgaatgtttaagctttaagccaattcatacgacaataactttttactcggatgtctgattgagtcccgtaatataacgaaacgctcgaaattgaatgtttaagctttgagccaattctaacgataataactttttactcggatgtccgattgagtctcgtaatatatcgacacgctcgaaattgaatgttgaagctctaggcctattcaaacaacaataacgttttactcggatgtccgattgagtgacgtaatatatcgggacgctcgaaattgaatgttgaacctctgagccaactcaaacgacaataactttttac

SEQ ID NO: 204331 - DNA, 421 bp, Glycine max
acaaaaactcagcttcacattcatttcagcgcgtgaatattactggcttcttcagactccgagtaaaaaggtattggcgtttgaattggctcaaaggttcaacaattaatttcgagcgtcccgatatattacgtcactgaatcagacatccgagtgaaaaggtattggtcgttgaattggctcagagctttaacattcaatttcgagcgtctcgatatatttcgggactcagtcagacatccgagtaaaaagttattgtcgtttgagttgggtcagaggttcaacattcaatttcgagcgacccgatatttacgttactgaattcgacctccgagaaaaagttatcgtcgttgaattggctcaaactcaacaatcaatttgagcgtgcgatatatacgggactaatcgacatccgataaaa

SEQ ID NO: 204332 - DNA, 350 bp, Glycine max
agcttgatgcatgcaacttatatgctccattttgctgggcgagagacgaatattatcgctagtacatagattatttatcagagacacggtacgggtttgatttaaaaatcctcatatccgcatgaggttccgtagaggaaacacatactatagtgggatgaggactcaatgtctagggccatccgatcgtaagagttacctgtatatccgtaggcttttttcggtttattgcacacgagaaatacctactgcttcaatcgtttcctccagtctcaaatataccatgaggagcgttctcacgctcgtattttgagtataatgaagtattactagctacttccagtcagtat

SEQ ID NO: 204333 - DNA, 200 bp, Glycine max
  unsure (1)..(200): unsure at all n locations
ngtatgtgaatggatgaggctcttcacattngtatttgttatntcaacggcaacggcactggtgatcgattaccacaacatagtaactcgattacacgttgttgaaatcaattgtaacgttgtanattcaatttgaaaacttcttcaaagcaactatactactggtaatcgattacaacaatctggttatcgattactag

SEQ ID NO: 204334 - DNA, 373 bp, Glycine max
  unsure (1)..(373): unsure at all n locations
agcttagtgaanaaattccttcgaataattttttatatttaaaagactcaattttaaaactttatttgagttctattcaacttgaccatcaacacattggtaaatattttacttaaatgggttaagtagatttttagtctttaaatttttcaaaatttaaattttaatccttgaataaaagcttaactagtcaagtctcaacttcttttttgttaaaattttagtctttcaacaaaagcttgaccagatccttaaactttttaaaaattttattttaaatttttaaataaaagtttaaatttcattattttatttatttatttatttaataagattttagaaattaaaaattaaaattttaaaaaccttgatg

SEQ ID NO: 204335 - DNA, 368 bp, Glycine max
  unsure (1)..(368): unsure at all n locations
gttctggtggcctcattctttatattttaactatctgctctgttttgaatgataattaaagtatggattgatattgatgggtgacttgaagacataagtaatgatctttcacatttccaagtccaaatactcctcctttgtccccaattgtatgtacccatacgtccaagtcagaaggcaagtgatcattagatggttggctatcaactccacctttcttaaagtgaatgttgtaacaacccacattcgttacatgttcattttactaatacatatttaaaactattatataataatatgaaaatacctataattntgtcattgttcaatccataacacaatatacatatcaaaacataaaggtatta

SEQ ID NO: 204336 - DNA, 323 bp, Glycine max
  unsure (1)..(323): unsure at all n locations
aaaaaccttcctcatcacaaggctaattaaaacatgtgagagatggatttgcgtgaagggagtctctttatatatttgcaaaaattgcctgaactgccacgttatgaagaatattgcacaattattaaagactcaaacacattctatctttatatacttttgcaaaagatttacataaacataacatgctttcttttcatgctgacgagattaatgagaatttgtntataggcactcgtgagatttgttttccacttaagtgaaccatgatctaagtgatttaattaaagagcaattgttaaaaaacctaaattcctagtact

SEQ ID NO: 204337 - DNA, 404 bp, Glycine max
  unsure (1)..(404): unsure at all n locations
agctntctttgtttttcaatgatggctgtttttttgtgacaaattattccctcatacctcatcatcatagcctttaacttcacaattctggaactaatgtaaaatcagattccttctaacaaactgggtattggcttgtctctgtactctataattgcctagttgaataccttaaacattttgttgacttgcaaatcacacttggtgtttagtttaaaaatcttgtccaagcactagggtttaaattttccaaatccttccaagcttttgcatcataatccttaatctaattcatagccttttccctatcacgaacaataattgctcgagctaccatccacatcaattctttcatatgtgctacgaggtccttctttctccaattaccatctaaatgtttcaca

SEQ ID NO: 204338 - DNA, 358 bp, Glycine max
  unsure (1)..(358): unsure at all n locations
tttagtccagncttcttctggctacaaatcatcagggggctttccttctgggtccagcatcttgggatggtcccagcctttgatgacagcttttcaggttctgctatccagtgatttgaggaaggccaccatccttgctntccagtattcatagttggttccgtccagaattggtggtctgttcactggtcctccttctttctccatgttcatcagaatttatctccctaggtctcactcagtgatttcgagtgcctgctctgataccaattgaaattctgatactggggacagatgtcgtacaggatgtcacgacatcacgcttcaaaacatgcagattgtgtttgactgtatgaac

SEQ ID NO: 204339 - DNA, 399 bp, Glycine max
agcttcaatccttgatgttcatcaaatgattttgtttgcatgatcttgatcagatgactttctttgaagaaatgccttggaaatcctctaagaggccatttttcattgtaatatgtagttttatcacgcaaaagagtcacattaggtaaataagatgagtatttaaaatgaaaaaatttataaccgtcacaatcaattatcaaaacctagtaattagttatttcgcttatataccatttggtatgcatttccaaatcgtggtaatcgattacaacaataagttaatcgattattttgatcccacaaaacaatcttccaattgcaataagatataatcgattacaagaacttggtaatcgattatcccacttgcaatttgtcatatttgcctttagtatg

SEQ ID NO: 204340 - DNA, 417 bp, Glycine max
tgaagaagatgctttaatggaagataagaaagagagaatgcgatttctctaaatcgaaggaatgaaagaacgaaagaagtggatctttgaagtgtatctcataagactttcattcatcaaagttcccacaagtgttacacatacttctatttatagactaggtagctttcttgagaagccttctttagaaaacttcccgtgagaagctctctttgagataacttccttgagaagctagagcttatctacacacacccctctataactaagctcacctccttgtgaaggcttcttaagaagattcctcaagaagctagagctcagctacacacacctctctaatagcttagctcacccccatgacacaagaacatgaaaattacaaagagagttcttactaccaagactacttcaaat

SEQ ID NO: 204341 - DNA, 409 bp, Glycine max
  unsure (1)..(409): unsure at all n locations
cctgcaggcctgcgagcttgacaatgaaggagctgagaagggtnctttatttaatgagtaaacctttggaaggttcccaggtagaaaatgacaatgaaaatgatgatgtatagcgcagaaacccgttggccttggcacattttgctaatcaccccgcaaaagggatgcttccaaatgtcatgatttgcccttatgactttccattgactgacaacaacatgagagtttacatacccaacatattatttggaaacgcacaagtaaacatcatgagacttggcagcttttggttcacaattggagtttaagaaatagtcaatcagatgttcttaccctgaaaacttgtgttctggtagcaactaggagtcttctagatgaagaacttgctctgaactacacgctgagcaac

SEQ ID NO: 204342 - DNA, 422 bp, Glycine max
  unsure (1)..(422): unsure at all n locations
ttgcaagcttnntaatttcaattgttttngtaagcatgatctttattgcctaggaaattctaaannntttggttttgaaattgtaacaagggcatgtaatattaacgacactgtttgaagaggttctttattaagaatttataatttggctgccctcgtgaggaaataccttgcacctaggtagcatggaaaatacctttcaacggtatgtatatatgtgaatatatgtggcataaaaatacgttgcaaagtgtgtgaatatatggcataaaaataccttgcaaagtgtgaatgaatagcaaatgacgcatttcaaaaatctgtatgtgtaggataggtagcgtaaaaatgcctttcaaaatatgtatatttgtggataggtagcataaggagcctttcaaaaaatgtacccatgtcaaaat

SEQ ID NO: 204343 - DNA, 267 bp, Glycine max
tcaatgatcatggcagaatcacttcatttggattcgatgaatacccaccggatcattgcttattccatcatgtcactgagagtaaactgcgtcctcttggcttacatgcggatgatagcactctcgctgacaatgatcgccgcttgctatagaacgcgaagccattactctctgactttattgacctggaggatgtgaaacaccatcttacgtctttcgccttattatactattagagataaaccttatagatcttaagtctatcac

SEQ ID NO: 204344 - DNA, 394 bp, Glycine max
  unsure (1)..(394): unsure at all n locations
agctnngctttttcttttctttataaaacattatttgngatttggtataaatggggtttgggtcaactcaaaatggagttttggtacattagaataggcaatagctaacacaaatatctgaaaaatttttttatctgtatgtgaataaacttgcaaactcacgaaatacatggtacatttaacccatattaggtaaatcaaccatgtaaactcaaaattaaataggccaaaactttaactaatattccaacctgcacaggctatattaatatgaaccgatttgtgctccgtgactcgcatatacacccacctttatctttgatcttaacccatcaaatcaaaatttacgggatgatacactcttgtctgctcactttagattggtaatccccat

SEQ ID NO: 204345 - DNA, 404 bp, Glycine max
tgttaacaacgaagaattgtccgatagtgttgagtgtctctccattatattatgttttattcaacaatacaatcatggacattggtgtttggagttggcggaggcattattaatgctcggttttggctagataagaaaccgatggtaaaggagaaatctatggcatgacagaaaaattgtccaagttcatagataaggaaatgggtacatcacatgaataggttgcgagaaacctccttaatttgaacattgccgatgaggaagcttgctagatgatatgattgatgagaatatattatattgtgtccatattctcccataaaagaaatattgttaatcctataactcactattgttatttattatttctcatttgtggagatccccagtatttttggtgttat

SEQ ID NO: 204346 - DNA, 386 bp, Glycine max
  unsure (1)..(386): unsure at all n locations
agcttcctccacgtttttctccatacctatatcttcaaaccttcgattctcactcgattcttcaccaaatcacgtcccgtaaagcccaatcttnctctttttcactcctctttcatttccaccgatcgaaatccagaaaaacttcatcaaatggcagagccatcaaagaagagaaaaggatcatcctccaccgctaccgctgctgcccatcgccgtcacggcccatccggagcacccacagcacctattcctccttctttgtcatctccaagatcatcaacactgttttcatccgatgatcaacgtctacggtacctttctcagttttcttctagaataatcttagaccctaagtacctagacgtagagttctttaatgatgaaac

SEQ ID NO: 204347 - DNA, 325 bp, Glycine max
acacgaaataaacaaatcttctctttttcaggtcatacccacataataccagatattcacgattcactcgatcaaaccttcaaactttcgaagagcttgcgaatctgtactaaaaccccgaagcgtgtcattcgttgacttggacaatgtcttgggtggccttgaggtatcaaactatctgagaactttgctcaaaaacactggcaatgaaatgtgcacatgtggctgccaaattgtgagataacatcaacaagacattcattaccttcaaccgccaataacctgaaacaaataaggggtatgccccaaatatcaataaagcaca

SEQ ID NO: 204348 - DNA, 394 bp, Glycine max
agcttaagctccttcaactgcacaaggcttttattgtttgaagagtatccttgtggaaccttcacccgacgaagacactgacaaaaacttatcttctcctttttggacaaggtatggcaagctaggggcaagtaaattttcttcccattagaccttggatgcaactgtgatcgtatgcccatatcagctagatcttgacaggtattgaagccatccttcatcttgccttgaatgttaaggagagtcccaatcacactatcacaaacatttttctccacatgcataacatcaatacaatgtctaacatcaagatcagatcagtacgaaagatcaaagaaaatggacctcttcttccatatgcaactcttacttttatccttcttttgggtctttc

SEQ ID NO: 204349 - DNA, 384 bp, Glycine max
tgagctcaaagatataaatggacttttttgaatttaagagatatcatctcttctttaatctttctcaaacatcattcaatatctttcaactctttctacaaaatttttgattctttttctttccatctttcaaaagattttgtcaaaactttctcttcaataattttgtcaaaaacttgtgctatcatcttttcattctttcccctttgcaaagacaaaggactaacgctgaaattttttggtcttcctttccttagcaaagattcaaggactacctctgaatatttttgttccctacaagatcaaggctaccgctgaaattttgtccacacatggaggatatcttgggacagagaggacattcttgggatgtctgaaacaaaa

SEQ ID NO: 204350 - DNA, 371 bp, Glycine max
agctttattcattgttgggtcaattgaagtttaaagaaaacatagaacgaagaagaagaacagatcagaaaaatggcgtccaaagttccaaagaaggccaatctcctggatcaccactccatcaagcacatccttgacgagtctgtctccgaggtccgtaaaaccctaacttccttttcgatctctctctctttcaccttcaccccccccccccccccttttgtattttaattgcgttttcggttcgctaattggacttggacttgctccaattttgggctcgtgtaggtcgtaacgagtcgtgggtatgtggaagacgtgagattgagcaatgcgaggcttttcattggggcaatcatcatcgtcattgc

SEQ ID NO: 204351 - DNA, 466 bp, Glycine max
  unsure (1)..(466): unsure at all n locations
tgctntgcctaaattctcataagagcaccatcaacattcttcttatagcgatcttgaggtctaagattgagattntagctcaataaattcttctgaatcatcaaataattcaactgacattagcaaataagtcattttaggttgttttagaagacttaatgtcattttaaattctaatgattgaatagcataacattcaaagtacatttcanaaattaaattacaactcgaaatatgactatgatacaggttaatgtcaaaaccaccaattagcctactctgtctacttactttaatatacaattcannaatagtatttggcttttgcagctccaattgccaaaatgctctgcatatttacaaatctaaagcagttatgtctcatctcatgactcaataccatttactatgtcatgattcgtgacttatttacatcatcatcattgtctcacgacgctcacaaatg

SEQ ID NO: 204352 - DNA, 377 bp, Glycine max
agctttagacatcatggttaaagcagtctgctcctatgttgcacaccaagaagcaacagaagtaactatgtgtctctgcacttcctttccaccactccattctgatgatgggtatgtggacagatcaacctatgttgcacaccaagttctgcaagataattggtaaatggcctatactctcccccagtcagattgtacagctttaacaggtaaattgaattgagttttaactagagtatgaaactgtttaaacagatcaagagtttcagatttacttttcaacaaataaagccaagtaaatcgagtgtgagcatcaacagaggttacataatatctgtaaccagtgctggataagaaaggggatgggccccacaaat

SEQ ID NO: 204353 - DNA, 479 bp, Glycine max
  unsure (1)..(479): unsure at all n locations
cccatcacatgtggtactatgtgtcggtcgggcgatggtgcaagacaattctccacatccacaaatcacgtataaacccgccatcccctgttgcccacctccaactgagctcacgtactcccacgtagcccttatcctcgttcctctcaatgccgggtccccatcaatcctcccaagcttccacaacatccaagtaattcaacatccaatcatcataaactaacacagccaagaaaatagggcaaaggtagaaaagtctgcccagaacacaaaccaatatcacagcttttcacattcaaataccccagtaatattctcttcgttccaattcgttaacagttggatcgactcgaaaatgttactggaagtctctagcacataaatctacattatgaccgttggaatctgctagataacgtccagaacccaatctatactactctntccacagccaagcaatacacaacactttctgcaca

SEQ ID NO: 204354 - DNA, 372 bp, Glycine max
atttctgctcttattgcgaaaggatggcattttccgagcccgtgaacgcgtctctacgtgtgggacttcgaaatttcaggtttgggtggacttctttctctcttgatttttgggggtatgggggtttgggaaatatgatgggtagttttgctaagtttctgcttcataatagttatttgtgaaaaaatttgttgaaagcatgttgaacttgccatgtttggacgagttaagcttacccattcagttttagggtttttatgatgatgcttgtgatggttatgtgctgaaattgctcatggaaagctgttagagatgaagggtagagttaacctatggttagaaagtgagaatgtggtgttatgagtggaaaaa

SEQ ID NO: 204355 - DNA, 410 bp, Glycine max
  unsure (1)..(410): unsure at all n locations
acagagnggcacctggagatatgtcgcgggggtcaggagaccttggggacgtcaggtggtgtgctattgcccaaaaccaagcttgaacaatcccgacccaacccggacatagtcggtcagcgaaaacctgtgatgtacctaagcaggcgagctcctgtcagtcaacagataaaaggaaaaacaagaccacaaagcaaggaggcttgtggtggctggccagttgtgaatnttgtgtaatatgtggattctggcctctggtaatcgaataccaaggttgggtaatcgatcacaaggctcgaaattgataacaggaggcttagatggtctctggtaatcggataccactgcgtgtaataattaccacgctcgaaaacaagtcatgaaactaatggacctttgggaatctatta

SEQ ID NO: 204356 - DNA, 392 bp, Glycine max
gcttgttagcttgatgacttgcagaattttttgttgactagcgtcaaatcatagaattaaacctgcacatcttttaaaaatgcttgttaagtcaagacaggtagaaatccagtgtctccatttgggacctactgctcagtaaatctgttgagggaaaaattacagcctccgtcttaacatcattggggttctgaatccattcacactgaataagaattccttgaagaccattataatgtcttctgaaattgatgactttatggaaatacgttgagttgctgtccccttcttttagccatttagctctagatttctgccttaataaagattcataagctattgaggcctcccacaaatcttgtttgaattctctcttagcctttatctcatca

SEQ ID NO: 204357 - DNA, 376 bp, Glycine max
ctctattactgataaaaacatcctcgtctcttgagaataaacctgtactaaactcctgcggctggtcctatattttgcagacggcgtctatgaaaaggaaggcaccgtctacacctacccaagtcagatttgatagatccagattcactttccaagacgcttgtgaaaaatacactgacattgtggtgcctcataagcctttaccagataggaatgtggtggtctactatacagtgctcgatgactccaaggcggaactctagagatgccactgcgatgaagagttgactgatcttgttgacgacaacattgatgttgccattgtgaatgaattctatgccaacctctctgaccccgaggacatctcacctaagca

SEQ ID NO: 204358 - DNA, 401 bp, Glycine max
agctttgatgatatggtcttcaccgacgaatgtatcaaagtgagtctaaaaagaggcaaatatgatcatcatactttgataaatgccaaaaaaactagggcaaatgaagagggtgagaatgagggagaagcccaggctgtgactgccattcctatatgaccaagtttcccgccaacccaacaatgtcattactcagccaataacaactcatctccttacctaccacccaattatccacaaaggccatccctaaaatcaaccacaaagcctacctaccgcacttccaatgacaaacaccacctttagcgtaaaccaaaacaccaaccaagaaatgaattttgcagcgagaaagccttaaaatttaccccaattccaatgtcctatgctgacttgctcccata

SEQ ID NO: 204359 - DNA, 401 bp, Glycine max
  unsure (1)..(401): unsure at all n locations
gatgnacctaaacaggcgagctcctggcattcaacagataaaaggaacaaagaccactatacatggaggcttgtggtggctggacaactgttaactttgattgacatgtgtgttaaggacattggtaatcgattaccaagggtgggtaattcattacaacgcctaaatatgtagacatgaggctaagaaggtctcttgaaatctattaccacggggtgtaatactatactatgcttgaaatataagtcaagaagcttacggagcttctggtatccattaccaagggaagtaatcgattaccatgcttaataaggaactgggagatggtggacgcctctggtaatccactccagcctatgaatcgatcaacagatgaatgcgcactggcaatctataccaat

SEQ ID NO: 204360 - DNA, 189 bp, Glycine max
gggcgaaaaaaattgagatgaacataaagctattcagtcacaacctatcatgcacaaagaaagaggtttaactcaaatctgtgactggtatggagatatagggtgactatggggaaaaaatttgacttgagctacctaaagggagtgttgaaaaaggggcagaaatatcgtcactgaaacgttttgaaa

SEQ ID NO: 204361 - DNA, 338 bp, Glycine max
actgatgcattgttatactggaaccctcatgtctgtatcataaacggacctgcggcagatctgtggttatgcctccttgctgccaccataaaacctttgtcccttatgcagcaacctgtaacattgagcagtctgagctcatgttgcaacattttcaatagacctcttcacctagcacaaaatgaacccagcgatcatatatacctctccagggaccatccggtggtggatgtaccctcatttaccacttctaggtcttgcacccatcgtaagcaatttggaagttcatgcacggccgaagtacaaaagagcattgtacacaatccgtgaaattcgcg

SEQ ID NO: 204362 - DNA, 341 bp, Glycine max
acaaagtgaggccgatgagctcccctgtcaaatgagtgcacaaaatgctaactagtcagcactcgctaattcccctaggttctttgaacctctttgcccactataccacaatgtatctttatcaatcacccattttctcaatgcaatctcaccttctcatagatggaataaaaccattggttccttactctccatccaatcattttcacttttgccatcgcatcatgtgtgtagccctcatgccacttacatcaaaaatctcgtacatccaagaaacaagagagagagagagatagagaggaggctcgggcctacatactacctttatgtaactaaatctt

SEQ ID NO: 204363 - DNA, 266 bp, Glycine max
ttgaagtaccaaaaggttggtccaaaaaattaagttaaaaaagtctttttaaaaaaaattactctctggtaatcgattaccaaaggatgtaatccattaccagtggcccaaactaatttccacagctattaacattgaatcaaaattgcactgtgtatcgatacactatatggaatcgattaccaccagttctgaatgtttaattcaattttgaacttgaatcgatacacacatactgtatcgatactagagaggtttcagaaaca

SEQ ID NO: 204364 - DNA, 482 bp, Glycine max
  unsure (1)..(482): unsure at all n locations
ntattgtacagctatatgcncagctatattatatggtatttgttgttgggctntaaagggacaacatgagaganaagtcgagggtagcaaatatgagaatgttaagatggatgtgtggccatacaagaaaagatagaatacggaatgacattatacgagaaaagattggtgtatcacccattgaggataagattgcagaaaatcacttatggtggtttgngtatgtacaaagaaagccacaagaggtgtcagtaagaagagtggataacatgatttttagttggaaaaaaggagaagagggagatcgaagaggacattggaggagatcatcatgggagaccttagactcaataatatcgctgagactctggtttttaaccatgccaaatggcatcatgtaatccatgttaccgacttcatctagtgngataaggctctgttgttgttgttgtaatgcactaaaattggatccattacaaaat

SEQ ID NO: 204365 - DNA, 386 bp, Glycine max
agctttttataatatttatgacggaggatatatgttggaaaattcagaaagcgtctcctaaaacaaatggccttcctctcactattatcgcatgaagtcataggttttagcctcaatgaccattgtacgcaaaatactatctatgtcaaatattgggatacacaatttgtaaaacatgaccttttattttaaaaattttaatttataatcacacaagtatttgcgtttaccactgtctttggtgaggctcggcaatgaaaacatcccctctgcaataaagataggctcatccacagaatctgtttagttcctgtagcttttaagctatagtcaactcccaactccataccacgacatgatatattttcaatccatttttatcccac

SEQ ID NO: 204366 - DNA, 402 bp, Glycine max
  unsure (1)..(402): unsure at all n locations
agctgtgganaatgatttctataaaaaagttattcgtataaagcgactaacatggagcaagaagaaagggaggtcaaggtccgcacttgtatgtccgcgaatgtctgagatgaattagtgactcttttgcgagactaccaagacatcttcgcatggtcttaccaggatatgcctggtttaagctcagaaattgtgcagcataagctacctctaaatcccaagtgctccccggtaaagcaaaaattgaggagaatgaaacccgagatgtccctaaagataaaggaggaagtgaagaagcaattcgatgccggtctcttggccgttgctcaatacccagaatggatcaccaatatcatgccggcccccaaaaaggatgggaaggtgtgaatgtgcgtggactat

SEQ ID NO: 204367 - DNA, 423 bp, Glycine max
  unsure (1)..(423): unsure at all n locations
ntatgagaaaccataaanactaaggtagttcctaatcttttttcattngaggaagcttcgccaagtatccccattgaaaaacctttattcaaacctttcaaagttagtgagaaggctaaatgaaaaattatggaacttataaaacctaaatccttaattgaaggcgtatgtgataaccatagtgaattacttaacaagattgggagtttacttaaggtcattccagatactccccaagcctcggaaaatacttccaaaatggtaacaataagtacctccaaattaattaatgctattaatgaagatagtgaccaaaactcagacaacacaactgagatatgatcagtgtcagacaagaatataaatccaattaattccacacactggaaaacaccctccaaattatattattaacgtccgact

SEQ ID NO: 204368 - DNA, 373 bp, Glycine max
  unsure (1)..(373): unsure at all n locations
agcttgtataattgtactgtatcgcanagtttcatgttgatcgtgttcatttgcatcttccttttcttcatctttctttacaagttcctcatcgcttatggtattatcatttcacttctttcttctctcttcatttatccttttatattttttatttcgaatctaatactctctctctctctctctctttttttattaataaggcgatttcactttgatgtctaaaaagcaacctaatcgccaagagattgaagataaggctacatgaatgaatgagatgcacacactttgattcctcattcttcgtgccttacataaatgactctgccttttcaatgttcgtttcctccacgttgtttggattactggtgct

SEQ ID NO: 204369 - DNA, 395 bp, Glycine max
  unsure (1)..(395): unsure at all n locations
atcttattttatccaaattttattctatatagatgttatnttatccaaattntatttcatccaatcttatcttatcttgtccagaatttattttatntccgttatgggcttggacttaaaatagatttgtgagctttcgggctgaggacatatataacagcaccaacgttttagtttagagagtttntttttaggagaataattctaggattctagaattccagtttttattactgttcatgcacactgttcacgtagaataaaatttgttttctacaattttgtttcggcttcaatctatagtttccgttctactaataatggaaagctaagtctccagcattggtttctctagaggatcaaatacagattctctctgaggtttcgtattacta

SEQ ID NO: 204370 - DNA, 382 bp, Glycine max
agctttcctacaagtcctaattgacatttttaactaggatcaactcactttagactccaatttacaataaacccaaatttagtttctctaaccctcaaaatctcacacttttctacctacaacattgtcatcctcacatttaacccctaagttaactttccccctcatccataccagttttctatcaacaatttcagcacacaaacatcacaaagcatcatcataaaaccctaaaacagaatgggtaaatttggctcacatcaaacatgtcaagtttagcatgctttcaacaaattccttcacaaataactaccataaggcataaacctagtagaactacccatcatatctcccataaacccaatacccacgaaattcatgt

SEQ ID NO: 204371 - DNA, 452 bp, Glycine max
  unsure (1)..(452): unsure at all n locations
tgagaatatcatgccttgtccttctcttcacgtcaattcttatctgccaagaagctcgtcctctacctttcaccttctcaagaagtaatcaaagccatgcattttcagggagtgccacaaaattggttaaggagcttttgctaaggaagcaattgcttggtacggaaaattatgagcctaatcgactcagtccaggtggtccagaccctcttcatcactaatgaatgtgcaattaatgcatgaaaacttgagaatcatagattcatgcaacaggaaaaggaaagattgttattgtcactgcatttaccttcccacgtacgcattccttttagaattaggagtccataaatcattntattgcataaaatgatttatttgnaccattttagttgattcttaagaagaatcacaaagagggtaggtggaatgatcctagaatattctctgtcgtc

SEQ ID NO: 204372 - DNA, 359 bp, Glycine max
atttcttggaagcttcattcaatgaaggggagtctttccacttctagaaccctaaccttattgtctttggaagctaggcttcattgcatgttattttgatgtttaaaaatttcgtgtttgctgccatgactggaactgcataatatgttgtctttatataatttttaaagttaaaaatgatttattgggttaaaacttagggtcagccttaaacttcacttaaattagagttttctagcaaaagttatgaataaaacaagttttagaacattttattggatacaatctatcacgaaattaaaattgaagtgggaactttataggatgtttttcttaaagtctgacctcaaaatgagttg

SEQ ID NO: 204373 - DNA, 406 bp, Glycine max
  unsure (1)..(406): unsure at all n locations
tttttttttatatngtgaatcgaatacacaatgcanattttgaattcaaactttaataacttgtgtaaatcacttttggtcactggtaatcgattacatcctctggtaatcgattaccagaaagtaaatttcttgaaatagacattttttaacttaaatttcttggccaaaccttttgctacttcaattggaatacccttcctatttaatgtaatctttctaagactctagagactgtcttgatcatccatcttgaatatctttgatttctttgtcttgaataaaactttgagaaacatgtgattcttttggcatcatcaaaacatcatcttgatcctttgtctacaatgatatttctattttggaaccaataatgatattactatttgtcggatcaaggtgcctc

SEQ ID NO: 204374 - DNA, 378 bp, Glycine max
agctatgctgcaacattgacgaagacctgtctacctcagcttcaaaaccaaccccgccaaacaattatgacctctccccaacaggtccaacccgggtgaaggaatctttcaaacctataatgggcgagagtccttcaaacagcgagcaacaccaacaacctattttcagaatgctgttagcccaaccagaccatacgttcctccaccattctcgcaacaacaacaacaacaacaacaacagccccagaaacaacaaatagttgaaactcctccgcaaccttcccttgaagaacttgcgaggcaaatgagtatgcaaaacatgcagtttcaacaagagaccaaagcctccgttcagagctaaactaatcaaatgggaca

SEQ ID NO: 204375 - DNA, 395 bp, Glycine max
  unsure (1)..(395): unsure at all n locations
ttattgncgtttgaattgctcanagttttttttcntgaattcgagcatctctatatactacgggaaacaatcggacatccgagtaaaaaagttttgttgtttgaattttctaagaggttatgatttcaattttgagcgtctcgatatattacgagactcaatcaggcatccgagtaaaaagttattgtcgttagatttttcttagagcttctatttccgattatgagcgtctcgatatattacgagattcattcggacatccgagtaaaaagttattgtcgtttgattttgctcaaagcttctgttatgaatttcgagtgtctcgatatactacgggacacaatcggacatccgagtaaaaagttattgacatttgaatttgctcatagcattcg

SEQ ID NO: 204376 - DNA, 390 bp, Glycine max
  unsure (1)..(390): unsure at all n locations
ctctatgcaaagtcaaacgacattaactgtttcctcggatgttcgatggtgtaccttattatatcgaggtgctcagaattcagaacagaagctgtgagcanaatcgaaagacaaaaactttttactncgatgtcccaatagagtctcgtagtatatcgagacgctcggaattgacaacagaggctctgagcaaatttaaacgacaatacctctttactcggatgtccgattgtgtcccgtagtatatcgagacgctcgtaattgacagcggaagctatgggcagaatataatgacactaacttcttactcggatgtgcgatagtgtcctgtatttatcgagacactccaaagcagacagaagctcttacaataacaatgacataactttt

SEQ ID NO: 204377 - DNA, 402 bp, Glycine max
  unsure (1)..(402): unsure at all n locations
agcttggtactttgggcacatgttgnttaatttgcacattaagctatttgctgaaactatgcttaaaattggctttctgatgcataaggattgcttctttatatangtgaaaaaatgcttgtgaagtaaaggcacttcgcttgtaaaagctgcagacatgaaaaaggaaaatctcagacatgttgccaaccttttagataagttcactgacacaatgtcatggtttatattaatcactgtctggttgttaggcattatggtccaaatcttaatagagacattaatggtaattggtgagaaatcgaaagttcgtattaatgtgtattaggttggtataaaattatttagattatgtgtacgggttacatactcatgtttattaaaatatgatatcgggttatt

SEQ ID NO: 204378 - DNA, 487 bp, Glycine max
  unsure (1)..(487): unsure at all n locations
cccttgaaataactgggaattgcaaaagcatagaaaagaaatatttttattggtgctgaagngtaaaaactggataggtacattctactattatagctgtatatacataagttagttgaaataattaactctgaactaactatggtaagaattttgtggttcgtggaaggagcatcaaggaacatgactttaaaatgacatgacaggttactgcgtgagtggtgacattattagtgcggtataccttgngtcacgtagatgctcccttcagcccatcgttagttaaaaccagattatcccatatatggaacacaacatcgagattgtcacgattgtaaccattaattaaaataatttaccttataacagagtaattataaaacatactaagtaaactaaaccgttgaatcagaacatcttgttagcatgcatttttgtttttctttggtattgaccagaaatcacaaaaatatacggctccttttat

SEQ ID NO: 204379 - DNA, 381 bp, Glycine max
  unsure (1)..(381): unsure at all n locations
agctngnatntaaatatgttttaaaaatatttttaattaatatttgaatttttattcctttattaatatatatgtgaggggtaaagggtgtcacaaatgtgacctaaacgtctatgccacaagaaaacaaattgttcattcactaaactatgtttagtgtcaagaatatgatgtacagttaaaatagtttcagcatacaaaccatctaatttcaatttatataaaccatcataaagaacaccagtatcaatgagatgattatgcttaaataaactgaaacattcattaccaaaattaaaagagtatccagcgacatcaagtttagataatgaaactaaattcctagataaactatgtacataaagagtttccagtaaatct

SEQ ID NO: 204380 - DNA, 300 bp, Glycine max
ctctagatttgaatataacctcgacaccattagaatagacagtgacattaagctcaagatcctcattatctatacttgcatctagagctggctttgctttactggtggacgcattaatcatcacacacaggttggctacttcctcattgtcctcattagacaatgaatcatctaagtcctcccaagtgctcatgaagctcttcttttttgacttgaagaatttccttctccttatcctctgacttttcaaggccagaacattctgacttgaagtgtcctaccctcttgcactcataacat

SEQ ID NO: 204381 - DNA, 379 bp, Glycine max
  unsure (1)..(379): unsure at all n locations
agcttatgagnngnatatgtttagatatncacttcatatgngagggattgatattcagtcaatattcttaggattctcaaatgcgaaggatcgattcggggtaatttaatgtgcatatcagtaatgctagaaaatgattcatatatattaatcttatttggatactgaaagtatgaacgatgaaatccagttctacgtctttcttgaattaatttaatctaatttaattgtttccataattgtatgtatttccgacacagtaatttcgctatatccgctatttcctctattttttacttttgctattttcgctatttctattaaagccataatatttcgataaatctgtatataactattgaactgtttacttttattt

SEQ ID NO: 204382 - DNA, 317 bp, Glycine max
gtgagcacttccagaagacacagattcttcttccggaagaaggttcttccggaaaagttccggatagaattcttccggaaaagttccggaagaagaattgctgataggcagtgtcgccacttcactgtttgctgagtgccccatcaataatgctgggtgcacgtagctactccccttgtctaatcacaatatatgtcccttagaggatttatggctgaaactcccatcatcttgagggattgctcggtggcgcacgatgtctgggtggtctgagtattccaatcatgtggatttggagaccctcttttctctaatct

SEQ ID NO: 204383 - DNA, 393 bp, Glycine max
  unsure (1)..(393): unsure at all n locations
agcttgcttctacagatgatgacaaaaagtccaagagaatgatttcaagattgagtcaacaagattcaagaatcaagagaagtttgatttcaagattgaagagaagatgaattcaagattcaagagaagaaatcatgaagacttcacaagggaagtattgaaaagatttttcaaaaaaaacaaacatagcacaattttgtttttcaatagagtttttctcaaaattttctaagttaccagagtttttactctctggtaatcgattaccagtggcaaagcttgatttcaaaagcttttaactgaatctgcaacgttccaattgatntttaaatggtgtaatcgattaccagtgtaacttaacgttgaaattcaaattcaattatgaagagtcac

SEQ ID NO: 204384 - DNA, 400 bp, Glycine max
  unsure (1)..(400): unsure at all n locations
agcttgtggaggatgctacttaatgaagcttctatagaaagctacatgaagctgcctcggtaaaaacgctttccagccttcgttaaccgttggatcttctcgaaatttggtctgcaacttcacaagaaacttttccatgatctgaccgttgggatctttgagaagatgtctggagtgtgctanaagcttccgttcccgagagcatctcttatttaagcatttcagcctttgcttttgtgtagcttaggaaaaacgccatttcttattctttctttcttccaaagccatttctaaagttccaagcactttatccatcacccacagccaccattagccaccacaaaccatagttgttcttcattgagaccccacactgagaggaacccttcaaccgaagcgg

SEQ ID NO: 204385 - DNA, 318 bp, Glycine max
  unsure (1)..(318): unsure at all n locations
tactcagctgaggggttgatggngacccggtgctgagaggaacattgatttggctacgtacgagtacgtgagctaagttgaaggtgggcaactggngatggcgggttcatgtttgatttgtggatgtgggagagttgatttgcaccatcgcccgatcgccacctattatcacatatgacgggtaccccataatccaacaagcttgaggtgagaaagtgtggaagagtcagtcttcctacttttgtttgttgaccacaaagtggtacctggagatatgtcgcgggggtcatgagaccttgccgtcggcaagtgggatgc

SEQ ID NO: 204386 - DNA, 379 bp, Glycine max
  unsure (1)..(379): unsure at all n locations
agcttggactcaaggagatacttagaatgtttctagagtngagtnaaaaaaactataaagaaagactcaacaaacctctagctttggcccatgtttttcacgctaattttcaattgaaatttaggaactaagattggtataaaataggaaccaattatagaataaattttgagccaaaacaacaagcacacttccctttcaccttttttttcctggatactgatttttcttccaaattgtgtgatttttatcatttttaaattttatccaaatcacttggttctttttttataacttttttccagatgcctagaaaattcagtaaaaatttcagctcaaaattcgaagtaactaattctcagtaatttttacaagttcg

SEQ ID NO: 204387 - DNA, 416 bp, Glycine max
agaagcgaaaatgagaatggagtaattttggagcaaactctcatctcaaacaagtctataacattaatctaaactttctcaaactggttttacaacgaaaactccaccgaatcaaaatttgaccccttaacacccaatttaccctagaagtggctcttgctttcactttggtcactcattatcttcatttgctcagcccaagctttcccacatgtcctaaatgacattttaaacttggattaacttactttagccttcaattaccactaaccccaaatttagcctttcaatccctcataacctcacactgttccactcacatcactatcattctcacttttaaccctacgctaactgtccccatcatctctaccagtttcctaccaacgagttcagcacacaagcatcacaaagca

SEQ ID NO: 204388 - DNA, 383 bp, Glycine max
agcttgtataaataagggaaatgaagcgactttggccacaccatgttgcagtaaaatacaggatcgccaagcgtgatgtctttatgcagcacttaacttcttttccgattcaccactagaatggatacccatgacttgctcttttaatgccacaaacgtaatagggcatttaattaatatcattcgacagaaaataaagaaattgcaacatagttattttttaggaataaaaaagaaatatcacaatcaaatatgctgacaaatgaccctcaagaatatagttttctatatattgttaggaccatctgtttaatgccaaaatatacatgtgtttccatcaaactccaaagcctgtaatgcaggtgagaaattatgacaaaaat

SEQ ID NO: 204389 - DNA, 354 bp, Glycine max
  unsure (1)..(354): unsure at all n locations
ttatattaattatttaatagagcaggaggaaacaattattttttataaaatggaattggaattggaatctgataagtattataattggacagctttggcatcagttttttgctgctgtgatctgtttatgcattgcatcatttttcagatggaagaggagtttctcttgctaaggaatgccttcacaaaggcacttattgcagatgaacatattgcctgtatccttcttgtgtcaggaacattttatatgaagtagatacacagcacatgcatcggaataaaagttgagagactgtttttcttaacatttctagttttaactaagcaatggtacattaacattntggcacggat

SEQ ID NO: 204390 - DNA, 407 bp, Glycine max
  unsure (1)..(407): unsure at all n locations
tttatcaagttattgtctggtctatcttcacaacgttttgtagttatcttttttaaaaaattaacttatgggaaccacccaagaaattctttaatattcaactgaaaatatttaatatgctcaagaaaccaaatacctggatcaaggaagggtttatattcatatatatagagagagattaactatatatatatatatatatatatatatatatatatatatataaaagttatatatatacaattatatttaataacattaatcatctanacttcgcttatgtgcttaacaatataatggaccatttnttattatctagcatcaaccaactggtatggtagctctctttttcttctcctatataccgatagacatctgtgggtaaaccactatgaggtaatgtctat

SEQ ID NO: 204391 - DNA, 348 bp, Glycine max
  unsure (1)..(348): unsure at all n locations
gggggaaccgaaantgaaggaataaaagagggagagaaatggaactttgaaagggattctataagactttcatttctcaaagttaccacaagggttacctatgcttctatatatagactaggtagcttccttgagaagcttctttgagaaaactttcttgagaagcttctttgagaaaacatccatgagaagctagagcttagctacgcacacccctctaataactaagctcacctccttgagaagattcctaaagaagctagagcttagctgcacacacctctctaataattaagctcacctccttgagatgagaagttagagcttagctacacaccccctataata

SEQ ID NO: 204392 - DNA, 217 bp, Glycine max
tcatacacgatgcttcgttttcttttcgtaatgatatgaaaccttacggattacgaaaccatcccttttttgccttccggaacgttacagaactttacgaattgcacactatcactttcttttaatttctggcatatcacggaacttaacggattgagctacaatgctttcttttgactttcggcgtgtcacggaaaatcacaaattgcctatcgat

SEQ ID NO: 204393 - DNA, 218 bp, Glycine max
tggttaattgagaaaatattccataatgctctgaaccccgagagcgcaaacattggaaattatttctattacaaatgcctccgaggctgacctcagagaaactgctactctatcccacgagggatttactgaaactatggtccccctgaagatcttaggataaatgactcttatcaacatgacatcttcttatgacttgtccacttcaactttgcatc

SEQ ID NO: 204394 - DNA, 387 bp, Glycine max
  unsure (1)..(387): unsure at all n locations
agctttgagccaaaatcctgactcaccattttctcttgacccatggtgagaatgtcaacccttaccctcggaagcaaagaaagaaaagaaaggaaattcccaatcaaagagtgggagaaagcaaaaggaaaataaaggaaatttccaatcaaagagaaagcaaaatgaaaagaaagaaaattcccaaccaaagaatgggagaaagtaaaaaagggaaaggaaagaaggttcttgatcaaagaaactagaagaaatgtgcagaaaggtcttttgaccagacaatatctgaacaatacagaattgtcaccaaatgaacaaaagaaagaaaaggaaaccatgacctanagtggtcttctccctctgattaccaaccaaaatcctgtgcgt

SEQ ID NO: 204395 - DNA, 474 bp, Glycine max
  unsure (1)..(474): unsure at all n locations
tggttcgaggtacttacccgttgaagatcgaagaacgatgtttatcaatgaagaacgtcgaagaacggttgaaatctttgcgaaattcctcacggaanacgttacgcaaacgtttcggaagcgcctcggcttagattttcttcacggaaacaatttttccaagcaaattcgaaagagagagaagtgcctaaggggctccaccccttccttcttgccttcctcccctatttatagcaaaataggggaggtggttgccgcccagctcgcccaggcgagctcagctcgcccaggcgagcagggttgcttcctccagaagcaaccgccttctggaggaatattccggagggcccaagtgggcctgggtgctatttgcacccccatatttactaagtacaccccctctgctgtttttggcgattcctttttcgtaaagtacgggaaactacgatattcggaacgatacttgttttcttc

SEQ ID NO: 204396 - DNA, 448 bp, Glycine max
  unsure (1)..(448): unsure at all n locations
tgctaagctttgcaagtatgnggttgttgtcaacacccccgtgnnnttgttgagtatatatctcagaacagaaaaatttgggccattttgtggggttttctaaacttgacactttttatggagaagttctccttagcaatgtttctgtgggacccaccccacattgagtctgattgaggtatgtgcaccggtaaaagatgtcaccttttgtgtgtggtttccatttctaattcagaatcaagaagaaggttccttgaagtgaattgaactgaagaaaagaaggaaagcattgtgtttgtgttgcagcaaagaacccaattggataggggtgcttctgtggtgtgtgaaagatgcagtcaaccttacaatgagaaaattagtaaccatttattccctcgcagatttgagtgaacgttgtcnatgatgtgatgaaggggcaatgcaatac

SEQ ID NO: 204397 - DNA, 282 bp, Glycine max
ctatcagtcctttccttcaatttaaaaagttgcctcttgaaaggtttcctggacaaaatataccacaatggttgaagcctgacaagataattacgagtttgtgtgagctatctattacaggaggaagactccaaagtatggatcttcaacaataagctcacgcgtcttgctcattacagatcatacgtctcaagtgcctaaaacatcttgaagctcgattgaagcaacaaagatgctggatctgttccctgatattgtcttgttaatcttttctcttgattt

SEQ ID NO: 204398 - DNA, 384 bp, Glycine max
  unsure (1)..(384): unsure at all n locations
agcttagtctttatttttgatgccgnaaggtaaagacccatcatttctttgcgatttcacgctggcaatggtctatcaaaaaaatacaaagctcaaaaaggtttaagtttgaaccagtggatctattatctcatgtttgcatttttttttgcttgtcaggttctgaaggtaatttcaggagcttccattcccatttgttaaaagcccaagatggtgttccctttactggagtaaaatctttgatgctttgatctacaatggtcaatattcttgccttttgctgatattatttgccttccttgctggtaaacctattgacacaaaatgaatcagatttatcacttaaaaggagcatcaatgccctcaaacgataatgctacccat

SEQ ID NO: 204399 - DNA, 377 bp, Glycine max
agcttatgaaggagatttattatagggtgttatgtgtggcctccctaaataaagattgggttaataggaatgatttaaataacaaagaaaaaaccatgggaaattcttttttctttttctttttcggttctttctctttttcacagcaattaagttcagaaggaaaatcatcactatagagtcctgaatgaccagttcacaactctatttggagtcatttctttttgatcacgcataacctctaaaatattttgctctttcaaaagaataaaagtatgtcagccattactttaggtcgtcacgtgaaaataataaaataaaatatggtcggtgaactctctttcaataaagtttgttacacatcttctcaatacaag

SEQ ID NO: 204400 - DNA, 332 bp, Glycine max
  unsure (1)..(332): unsure at all n locations
actatgtggcaattcatatacacgtgggtatatatatatatatatacatacacactccccgcaactaatggtgaggatcctttgtgtgtgcaaattntcatactcaaacatttcaagtaattctaaagagtctaaacagctaaccattttaattcatggaatctaaataagccttatagatgcacacatcccagatattaccattcatgagaatttaatcatttgaaatagcactaactgctgataacacaaaccttattacacaggctttatctgtatatcctctccgcccgcactaaatgaattccgcaccatactcattggcgtcaaca

SEQ ID NO: 204401 - DNA, 289 bp, Glycine max
  unsure (1)..(289): unsure at all n locations
agaccggacctcatanacctgcggctgcagctgagagatttttttatggttttcctccgcttcagagtgaccacagatggcacctgatatagggcggtggtcagacacctgggacgcatgtgggggctttcccaaccatacttgccatccccacctatcgtgctagtagtcttgaaaacctgtgagacctaccggcagctttgcagtacatataagtactaatccaatccggagctggtggggctggcacttgacttgggaatagggttggcttggaacataccatggg

SEQ ID NO: 204402 - DNA, 395 bp, Glycine max
agctttgattaaacatttattcttcaattttttagctggaagttgattagatttaccatccaaactaggcttcaaggtctttattgcattggttagaaaaaaaacatcaatgtgggatggaggatttaaatatttacatacctaagttcataataaagaaaatgagttataatttaaaacttaattcgttaaattgtgactttgatgtgaatatcaggcttcttatgcaacaaacagaaccagacaacaacatcattcctaagacacacaaaaacaagttgctaataggccctgaatttgagaataattagctaagtataatgcacacattattttaattcactatttaacttttacttatttattcaagtaagctcctaggtagacctctcttt

SEQ ID NO: 204403 - DNA, 391 bp, Glycine max
agcttataaattataaactattttaatgattcaatatgacgaggtatgattgataatgaaaactaggatatatatatatatatatatatataataatttttatccaaattaaatatcacaaaaacattttaaatataacaatagaaaactacaacaagtaccaagacatatctttgtttttttatctgtaacaagaatatttgcacaatctacttaaccaaaagctagttagatatcattggtaccaagcatatcttaaaccttatcttaacaacatctcaagtgtatcagagtttttctttttaagaaaaacatatcagagttctatgtaagctacgttggagccatatatgattattttataaaataattaatagtatattttactacg

SEQ ID NO: 204404 - DNA, 402 bp, Glycine max
tgaaatccactcgactaggtttgaaatacacgaaaccttccatcctattatgcaacatgggggacaaaagtgggcagctaacttgaatgggcattattgtcaatgcggaaaggattctgcgcttcactaatcatggtcacacattaattgcagccttgtggttacgtgggcatgaactactaccaatatatagatgttgtttacacgaaggagcacatcttaaaagcatactccgcacagtgggggcctcatttgaatgaagcagcaatttctccttctgatgaggcatggacactaatccctgacccaactacaatatatgcgaaaagtctgccaaatcaacaaagattaagaatgagatggattggatcgaacatttgaccaccgacaaaatgtatatat

SEQ ID NO: 204405 - DNA, 376 bp, Glycine max
agcttgcataataagtaactaattttgtttttttataaaattaactaactaactaagttctactaatactgactacttagaaagaagtgatgggcctttgttaggctcatctaatctatctaattaaactaattacagaaaaccaaacccaaactcggagcccaattattgaagtgcagaggttctgacttcaaagctcaaattgaccctcaaaatggcagaattggccaaaacatatttttgacaaaattgaatatctttttcttagattcaaagggactactcacactctccatttggagttctgtagtgttctctaggtcatgcacaaggcagaattgtcacgtaagcccaaaatctaaaaataagctacaat

SEQ ID NO: 204406 - DNA, 380 bp, Glycine max
  unsure (1)..(380): unsure at all n locations
tacttactgggtggtgatgaataatagtttctttcggaatcaaanaatgcgaaaaatgatgaccctagggctgcaaactcgtaaatcctgtgggtattgcttttgaatggngggaagaagtttttgaatacaaaaacgtccccctttcttcngtttttatattttggtgcaggggttgctcgcccaggcgagctaacgtgcacttttttttttttgaggggaacattaaccatgtcccctcctttttcatgggttaacgtctcgcctaacttgaacttacttaagttagaattatgcgtcgattacttattttaaaacaaacaaatagtaaaagaaaactgctaatacaaaggatactgggctgccttgcaccgacgttc

SEQ ID NO: 204407 - DNA, 385 bp, Glycine max
  unsure (1)..(385): unsure at all n locations
atctttatagaggtctctcactcaaaatttatggacgacgaaggggaaatggtttaagaattgaagaaaaagtagggaaataggatggtaacgagaaccagatacaccctctttgttctcacctccagcccaactcaactgccatgtttccattgccattatatttttgaactgaaaaaatgccatcaataatatattggaaatggatctaaatgtggggtttatattgggactaaactgcaaaacccacaataaaaaaagaccacttctaagtatctgtggtctttaatctcatctattaaatatttgttaatatatcaaattcttaattgcatattttaccatccaactatcattattttatgattngaccacttaatttttc

SEQ ID NO: 204408 - DNA, 381 bp, Glycine max
tggcctcagcaaatttcttatttccagaatggaattctatcaatagacctccaatctttaatggagagggttaccactactggaaaacccgaatgcaaatttttatcgaggcaatatatctaaatatctgggaagccatagaaatagggccttatatacccaccacagtagaaagagtttcaatagatggtagttcatcaagtgaaagcataaccatagaaaaacctaaagatagatggtctgaagaggatagaaaacgagtacaatacaacctaaaagccaaaaacataataacatctgccctaggaatggatgaatatttcagagtttcaaattgcaagagtgctaatgaaatgtgggacactcttcgattaacacatg

SEQ ID NO: 204409 - DNA, 414 bp, Glycine max
cttcaaagcaaatattttcttaattttttttattcaaaattatcaggtcttgaaattggtaccctttttctaacatttatagaaatacatggttctaaaattatattttattgaagatttctagaataagttattgagtaagaacctaagaagttaaagaaaggcatcttacatttattataagacatggtatgcggagtatagtattagcattaattactgttcactccattacacttacaccagactattatcaatctattcattcagttatacaactgacacgtaacttcagcattaggtacagggtacttggtgaattagttgcacgtcactacaagcaaccgatcaccaatcatcgtgataaaatccagaaaccatatcagtataatcatgaattttctgtttcatatt

SEQ ID NO: 204410 - DNA, 364 bp, Glycine max
aaaaaatttctcagaaccccataaagctttacacacacacgtaaataaaaaaaaatccaattttatgtccaatccatttacacaaacaacgaataaaaaaaaccatgatttatgaagaaatgaaccaaaacagttattgttgctaactacataataaaaacacgtattgtgggtccagagtttgctggaatctgacattccgacaccaaaattttccttccaaatagcctgatacctaatccttctctttttgagacatgttgttggtgttgtgttgcacactctgaaactaagcaccccgaacacccattacatataacagaagaagtgagagagaaaatcagatatattagtgagagagaga

SEQ ID NO: 204411 - DNA, 409 bp, Glycine max
  unsure (1)..(409): unsure at all n locations
agcttgtaggattatggggtacccatcatattggtactaggtggcggncgggcgatggtgcacaacaagttttccacatccacaatgcgcgcataagcccaccatcccctgttgcccacctccatctgagctcacgtactcccacgtagcccatatcctcgtttctttcaacaccgggtccccatcaatcctcccaagcttccacaacatccaagcaaaacagcattcaaaccgcacaagctatcacagccaagcaaaacagagcaaaggcagaaaactctgccaaaacaccaaccaaatcacagcttttctcacttaaagaccccagtaacaattccttcgatccaattcgttaaccgttggatcgactccaaaattgtactggaagtctatagtacataagcctaca

SEQ ID NO: 204412 - DNA, 492 bp, Glycine max
  unsure (1)..(492): unsure at all n locations
tatagatactcaacttacatcagatttattaatgacccactaacctagaatttatttttcttaatgccattaacctagggaaataaaagaacttaatggttgagcgtaactgaaattgtggcaaccaacagtctgatgcctgggttgccaattgtgcccttattacaacttgaactaaacctaactaatagccttttaattgattaacccaaaacatatttttggtaaccaactttacaaggattatgccattatttagacaaactgaacactctaaaattgagacaaagtggtgccatttagtcctcctccatttgtgccatgatacaactcacaaccttggactnttctccttgaaacttgggcttgtattcaaatagtatggtcaacacttgttgagacactcgaaattaacaacagagccctctagaattcaaatgtcataaccttcactggattgcgattacggcataattataaaacctcaaattg

SEQ ID NO: 204413 - DNA, 308 bp, Glycine max
agtttttataagaactgatactcagctcggccagttggtagatgacatgactaaagttgtggacagaagagaaagaaagtatgcaaagaatgaagaacattaagaaagcattattcaagttactacaatccatcatcaattgatcaacaaagaagaaaaggatgaagttttcagtactccagaatattcttgcatggcaactgctggttatgttgtaggtatagataaaggttgattggaactcagtgtggaggatcaaaaaatcttttttgacctctttgaagccattaaacactcagatatgggtg

SEQ ID NO: 204414 - DNA, 253 bp, Glycine max
cataaatcgagacctgtcgcaagagtctgtggtttatgctcctctgctgaccaccatacatacctttgcccttccatgcagcaacctggaacaattgagcagcctgaagcttatgttgcaaacatttacaatagacctcctcaacctcagcaacaaaatcaaccacagcagaacaattatgacctctccaggggaccatacgttgttgggatgcgaccctcatttgaccacttcaaggtacttggcacccatc

SEQ ID NO: 204415 - DNA, 359 bp, Glycine max
agcttggagccatgctttttgattgcttattgttctcgccatcctcaacccttttttggagccccatgaatggcgttttcgttcatgcgtccttcacccacgagtttggagccatgcgtagtgattgcttaatgcaattctccatcctttaccctttttcggagccccatgaactgcatttttgttcatgcgttctccacccaggagcttagagccatgcgtaatgattgcttagtggaattctccatcctcaaccctctttcggagccccatgaatggcgttttcgttcatgcgtcctccacccatgagtatggagccatgcgccgaaatgtgcttaatgcaattctccattctcaat

SEQ ID NO: 204416 - DNA, 370 bp, Glycine max
  unsure (1)..(370): unsure at all n locations
agcttattcgaatcattttccaatgnatcatacataggggcatgtgcttgttgaagagactctngtccaagatcatgaatcatatcctctaatcaatctcccatttctacatcaaccaattcaggatcccctctgcatgtctatcaattcaccatgtcatatccatgtcgtataattcttcttaatttcatcacacaaaagatgctctcgtatgtcatctagtacttgttgtcttcgattcaaacagtttatacaaggataaaaatataacatcctcatctgatcgacttctttcggagggaaattccaataattgttcaatgccttcctcatacacatggatcatgcgacttgcattcatctaaacttt

SEQ ID NO: 204417 - DNA, 395 bp, Glycine max
agcttgtaatttattattttcagtatcttttattataacttaaattttaatattttttacaataaattattaataattaaaaataacataatatctcaatataaattatttatcataaataaaaaatatattttatatattaaaaaatatttaccaaggtattcgactcagtttattgagtaatatgtgtgagtactatgaatattattatactcttttgattttacggataaaaaattatttaaaaatatgtataaaaaatatttaattatataaataaacgtacatttgagggtaagccctgttgcagcggtaaagttgtaccttggtgacttggtggtcatgagttcgaatccggaagcagcctcttttcatatgcaaggggaaggctgcgt

SEQ ID NO: 204418 - DNA, 472 bp, Glycine max
ctcagcttgctttatcatggcggcatgaggttacgaatgttctatgacttaacaataaaaaggatccaaatctaacgtttacgtcatgcattgagttgtaagttgtgtgcatgtttcttctatattaagaacatcattatggtttgcaaattgcctctttcttctatttcttacttgtaaaaacatgttgtatattgcgggagggttgtgtgacgatcttctgacaacgattgtgcgagcatgggactacaggaagccactttttgttgcaccatccatgagcacttgtatatggagaaactctttcacagaagagcatttatgtgaaattgatgggcttggcatcatgctcatcccacctgtacctgttaatggggatcttgagcgcgcaatggtggaacctgctaccattatctcaagagtgaaagcttcttatatgatagcaaagatggagcacatagatggtacttgt

SEQ ID NO: 204419 - DNA, 398 bp, Glycine max
agcttccaaagaatcttgctgaggagtgtgttgtacaatatatcaaacaattagaatgaacctcatgaacattaaaaccattttacctatcttcatttgaagaattctcattcccaaaaacgagcccaaaaacgccctgcaaaagaattaagaaattaatttacgcatgagcacaaactcggataaaataaaattgacatatttaatatcaaattactcactagtcactaccaaatgcaagcactgagaattaataacttaagctagcaatttacaaattaacttcatcagactacacagataactcgggtaaaacgacaaccaactattgctactaaaagtaaacatcacaaaatgttcttcatttctcaacaagcccagcattgaatatttacaaa

SEQ ID NO: 204420 - DNA, 393 bp, Glycine max
atcttgctcacaagattcttcttgcctgtcacttcaaaaccttctggttgggtcatattgatgcaagctccattggagctcgtaggcctaggatcttcttcatcaatggattcctttgcttcttggaagataaaaggcagcggaatggagaaagaagagagatatgagactcctcttcaaggagaagataagtctagaagaagctcaccaccataggaggccatggataatagcttggaggaagaaggagatgaatgaacggagggggagagaagagcacgaatatttgtgctcaaaaagagctctgaaatctgaagttaatattcaaatgatcaaagttgaaaaaaatgcacacacatgacctctatttatagcctatatgtcacacaaaat

SEQ ID NO: 204421 - DNA, 414 bp, Glycine max
  unsure (1)..(414): unsure at all n locations
gagggatagaagtagaactctgaagtgtgtctcataagactttcattcatcaaaggtacaacaagtgttacacatgcttctatttatagactagggagcttccttgaaaagctttcttgagaaaacttccttgagaagcttctttgagaagacttccttgagaagctagagcttaactacacacacccctctcataactaagctcacctncttgagaagcttccataagaagattcctaaataagctagagcttagctacacatacctctctaatagctaagctcacctccttaagatgagaagctagagcttatctacgtaccccctataataactaagctcacccccatggcaaaatacatgaaaatacaaaaagaatccctacaacaagactactcanatacctcgaatac

SEQ ID NO: 204422 - DNA, 305 bp, Glycine max
  unsure (1)..(305): unsure at all n locations
agcttatggtcccaaaagtgaagaacgtggtttagaaatgtacatcattaagtattggttattgcatttgtattgattattctgtcttcttgttcatttttttgtcaatatgtggtgaggtgcacatggtggttgtgttattgattagaataatattttttttttggagggggggggggggttccatnctatccattcttttttatacttctcttttttataattctccacatatcttctcatcttataatatatattctcttttcttctccacttattatacatctccactttttatataccct

SEQ ID NO: 204423 - DNA, 464 bp, Glycine max
  unsure (1)..(464): unsure at all n locations
tctgatctttattatgacaaaactattaattatatnaagtgaagggtttatgcaaaggtagctagagataaagaaagcaaaatgagacttgatggttcaagacggtgggatcaactcgttctgttgcacagtagtttccacttggtcaggcaattttttactccagcagttattcatagataactcaactagtttccctacccatggaatgtatgagagggggatcacgaacctaaagccacaagataagggaaaatggaagatagagcaaatgttggacaaaagggaagcaaacagttaaaagtttctgatcaaacaagtgcttaaattaatatcaacttaatagtggattgattataaatgcttaacaagtgctaagcatggtactttttattgatatgacaaatgaacagtcatattcaatggtgtctcaaacatccctcacttcaatactgaacaacaca

SEQ ID NO: 204424 - DNA, 387 bp, Glycine max
agctttattccacacttggtcatggttacgttgtatggagcaagatttccatactcactttaatcaatggtctgtcagattgaaggaagaaatgtcgtagggttgtctgattgatgggtacccagcttctgtgctggtctttttttagtagcttgggattggcaggttttgcctattgtatttaattgttatttgtcagtattgctaatactgacctattattaatataattatttttgctgtgcaaaaaaaaaaaacttagtgctttgtaaattataacagttcgctgttgtgcaaattttctcgcaatgagatccaagaaaaatatcaattaatgcatagtgaataataataaagcatttgtaaaaagaaaatagggacaaagca

SEQ ID NO: 204425 - DNA, 387 bp, Glycine max
aagcacctgactttctatttgtttgtgattctgtgtccgtaacgatacgaaactttacgaatttcgcaacgatacttattttccttgcgcaaggtgtagcgaaatttacggatgatgtatttactccttttttacctttcgaagaagtcacggaaacttacggattgcgcaaaaacacctcttttcgacttccgccatattacggaatgtgacggaacgcgcaagcctgcttcctttcgatttctgagacggctcgggacttcatttattgcatgtcatcatgtaataatgcccggacaaaactatggtatgacagttgcccctctttacttacctctcatcggagataagaggaaagccaagataggacactgatttcgttcgcct

SEQ ID NO: 204426 - DNA, 439 bp, Glycine max
aatcagaagtcttctatccactatcaagagtttatcttccttttatgacaacatagatccctcaaccgtctttcttatatatacaagaaacatgccatatagaaactatctcacataactaactcactaatgtaactaactactggataactaacctattataactattaatgacaggtacctaatcactttccattctcattgagaaaattaatgactagttttggttatatatgaatccttaacagaatgatttcatatgctttttaaattttcttctcatgtaataacttgacttaaaatgtaattacttacctacaacaataaagcatacaaattgaattatcttctaacttactccttacgagacattagtagctgaaattcttttatcgcgctgcattcgacacaacactaatactttgtgttatgatttttt

SEQ ID NO: 204427 - DNA, 435 bp, Glycine max
  unsure (1)..(435): unsure at all n locations
gcttgtagaatggctagacatgatacatgttatggtttggntnggtttatggataaaagggatgccccacattatttccatgacacaaatgcaaaaatgatgatttggaaactttatgcaaaactggtcatgcatgcacctatgtggacactcaagtgtcaaatttttatggtcatgtgattctagggctcaggattcatttcctctattttagtcaacccaacgtttccaaaatatgttcttttatcaatttgtgcattcatccgagtccattttgggcgtctgggaaaatcttcacagcattcacccttcaggtgtatacacattttttcaaaaactagttatgatcagtgatattttctcaaagaaaagttggaagtcatctcttttcaaaagcatgttggtgtttcagcttgacaacttattttccttttt

SEQ ID NO: 204428 - DNA, 451 bp, Glycine max
  unsure (1)..(451): unsure at all n locations
ntgaatccattccatgcacncttaggggtccattcttgcgttgtatgttttcatctttcattcttctacttttggtattcttttctttcgttttaagcgagtttcgaccgaacgtttaagccgtaatctcacttaatcaatgtttaaatgaattttcaaccggtcgttcatgtcgtaaccttggttaatcatcaaaaaggcaagtttcaaaccggacatttactttgaaaatgagttgggaaataaccaagtgaaactaaggctaaaatcaactcacaaatcaagcttttgcccgcaaaaaggtcaattgaaatcgtttcaaggtccaacgccttaacggtctttntttacttttatcggttaaaacgagtcgtttaaaagtctaaaatcaacactctgcataattttattgcttttgaagaactacgtangtctgagtttctcatcgcaa

SEQ ID NO: 204429 - DNA, 429 bp, Glycine max
  unsure (1)..(429): unsure at all n locations
agctttaagtgtcataagctaccttttgttttattttcctcatcaatattttgtttttatgatcaaaattccaaacatagcctggttgttactgtgagaaattcttagaaaatataagattgacatgataataaaaaaaagtgggggagagagggataggtgttcgaatcctcctctaaattttttttaataaactaacatttgtctaacaaaaagaaacattagttttcaataatggaattttgaactactacagtccttaattatcgtgaagcattcagaataatattgtagcaatgacggttcagtctctaattaggaaccagttgggtggaattcaaatagtctaagacggtgaatttgttactgattcttgccatgggtttaggattgggatatnttaagcgtngaactttgcaatatacaatg

SEQ ID NO: 204430 - DNA, 460 bp, Glycine max
  unsure (1)..(460): unsure at all n locations
actaagcttccatacactgtcttcttaactccgctatggcttgaatatcttgattnttgagctgaaattntaattagataaaatagacatttggacaaaatcagtggaaaaagaatgaacaaaaacgaaaaataaatgagaaagaaaaagttataaatattaacatcaaaagacacgtgcagaagaacaaaaaaaaatgtgtatcttgatttgcttaaaaattgttcattattttgagttgtattacaagcctattttgctttgagtcttttttttttttaatttgtcaatctaatctagtatcattctaggacttcctttgtgttccaccttggcctgtggtgttgttcttttgctttatttttccttgaatctcattcaattaatgtcatgttaaatttccttttagtttagctttcatttcatctttgggtttttagcttggcttcttctctttttt

SEQ ID NO: 204431 - DNA, 438 bp, Glycine max
agcttggatataatgcaaattttcaaacattttgagcgagctgtggatggcaagcaatacaatgaattagaggctgaatacaatagcaggaaaaaacttcatcggctaaggatagaacactcaccattattaaagcaggttaggcaactttacactccaaaaatattaaatttgtttcaaaatgaatatgattggagttttgcagcttatcttattcgtcgcaatgagactcatatgtgaatacgtagttggcattcatgatatggttggggaatataaagtgattggtaatatcaagaatcaaactttgacgtgtagttgtaaaaaatttgagaccatgggaatcttgtgttgtcattgtttgaaagtcattaatatataggatatatttaaagaaattacctgatcaatacattataaaaagatggagaagagatg

SEQ ID NO: 204432 - DNA, 452 bp, Glycine max
gcttatatgccctctcccctcggcggggatttcttcttcggcgaaggcgagatagttgttgtcagtgatattattgaccagccctccgaaaccttctactgagatgtcttgggccacatgggcctcgttcagaacttttactagcagagcccgatgaggctcggagctcatgagtaactccaacagcgagaccctggccggagttttgttgagctgttcgataaccttgaatttgctctgctgaattatacggaggaactcactggcttcctctagcgacacctcctttttaccatcctttttctccggaagacctttcgccggaatatctttattcgaagcgtggggcgcttcaccatcttgttcctccaccacttttcctttccccttgacgttcgcgggttggactggtaggtccggaggcgcaaacacacgaccgctacgggtcacac

SEQ ID NO: 204433 - DNA, 438 bp, Glycine max
agcttataagctagttgatttaatttaaaatgtttgataagactaattgataaatattaaatgacatatttaatatttataatatttaaattttatttctaatagtttatcatattaaaaagtaggatagtaattctaaagttgatatgattcaaagaatttttaatctcaaaggaacaatataatgatgataattgacaagttaaccgtcatgtgtcatgtgcatgtaagagaataatattagatacaaagatttttccaaacaatgaacaaaaaatataagaatttttaaattgaattaaaggataaaatggaatttcaaataaaatagtaaggataaaattgataagaaaaaaaaaacctagcagcttatggttatgttcagcaatacattttaccgaacacttataatctaataaattagtttttcaactacct

SEQ ID NO: 204434 - DNA, 456 bp, Glycine max
  unsure (1)..(456): unsure at all n locations
nggcccganatcgacaccttgacancccaaattgtttcgccccagatatcaagattgggttcacacgataaaagaccccattgaaagacaaccttagaccttttggaaccttggcctataaaaaagggaatcctcattctttccctcgaagcaaaggacagtggaatctcctcaaaggagagcgaatagaatgctaaaacccgatttcccaaagaaagggatggggaaggagaagtgaaaagaaagaaaaggaacaaatggaaagaaagaaaaagaaaaaagatgaaaataaagaaaagaacaaaaaaagaagaggaaagattcccggtcaaaggtcgaaaggaagtgaaaagggaaaagaagcaattctcgattaatgaaagaaagaggacagaaattcttcaagccagattgccactcaaaatcattctcgactggcaatatcccaccccacat

SEQ ID NO: 204435 - DNA, 449 bp, Glycine max
  unsure (1)..(449): unsure at all n locations
atgctctacagtctagctgaggcgtgcaagctttgagagggtgtcttctatgaacgtcttattgttcttgagagagagagctaccttcatcactctgctctaggcggtgtagttcttgtgatcaacgggttgagatgtgagaactaggcaaagcccatctaaatgatgaaggggaaaagggttggttggatcttgacttggatcggtggttggtgtantcattaaaactagcagaatcaaatcatgaatatgttgtaaggaaaggacaggttggatcgatgttagagtggaattctctaatctgataccatattgaatcttatgatgaattgaatatcatgagaaagaatctaaggttgctggagaaagacatcaattattgaaaatgaaaaaaatgagttaaaactagagagagaactctattgagaattttatacatacaagatgta

SEQ ID NO: 204436 - DNA, 442 bp, Glycine max
  unsure (1)..(442): unsure at all n locations
tcccagttatggagagctaaatcctctgttggttcttccttgtaggtacttgatgtaaatacttgtatatctatttaatgatgttttatgtgttctatgtgctatcagtacatcatttcagtgtgtttctgccttgatcacgtagatgcatgctttgttaggatcattcaatggtggaaactggtctgattcttagaacttgataggacagggctagtttatcatattatcatgagggatcggggtacggtaacctagttgtttgtatgtttgtcttaatgcgattctggtcgagtttagtccaacaagaggaatctgaggatgatgcttgatcgggattaggctagactatcatgaggaatcagggtttatccttttaggagacaccatagaacacatgagcattgntaagtagagaatatccttttaagatcaggcacct

SEQ ID NO: 204437 - DNA, 375 bp, Glycine max
  unsure (1)..(375): unsure at all n locations
agctnggaaatgaactgactgacttgttattcagcaaaagcaatgtctcgtcgggtattggttaagtaaagaagtctcccaataagcctcctaaaagaagtgacatcctctagaagatttccctcatcatagttcaatttaatagatgtgaatcatgcaggttttgatgatgctgaaaaaaattcacttgataatgattgttatcataaaaaagggggagaatgtgaatgtatgaatacatgattttgatgaggccaaagaataatcaaacaaggttgcgggcaagattacttcaacaaacattcaaaggttaaagcattgtttcaagattaatacaaggttgcttcaacaaacaagcattgcttcaagattaat

SEQ ID NO: 204438 - DNA, 441 bp, Glycine max
  unsure (1)..(441): unsure at all n locations
tcaactaaagccaatattntggggatcttcattcattccatttcttatttcatagcttcttaccatttcttgcaatccaagattcgcatagcctcttcatagtttcttggatcatcatcatcatgataaacctcctttgatgtggcatctaggaccatcaagtttaatctatcaagtgcacgatgcactcaagtaaatcttgttaggaattttataattcctaattaattaatatgggctacatattatattataacatttatattagttatttatatttaaatgggttcaatataaagtgatctatttaagtgagcccattagactgccaacagataattgatatgggcttaatgagcggaaaccagtttggcccattaggggataatgagaaccctaataggtttaaaacataaggcatggttatggtccccaatacac

SEQ ID NO: 204439 - DNA, 442 bp, Glycine max
  unsure (1)..(442): unsure at all n locations
ntataagtgtgggttcgggagacaaaggtcaagcgttcgctatatgcgaagatgatattccgagtactttggatntggtacgaccatgctctcctgatttccagctgggaaattggcgagtggaggaacgccccggcatttacgcaacaagcataatgtaaacctttacggttttaaaagctctatagttgggcctaggctttagagttttcattttgttaaggctttgtgtcttttgtttttgaatttataatacaaggatctttcttcatctgttcctggtctctacccattctcattcatttgcatgtttacttctttttctaaaacggcagattcgatgacgagtcccccgaaggtactaatacctgggacccgtctatcaactttgagcaagaaatgaatcaaatggaagatgaaggagatgaggatgtgggacttt

SEQ ID NO: 204440 - DNA, 326 bp, Glycine max
  unsure (1)..(326): unsure at all n locations
ttttttgtgataccttccttccaatataacaaaggtggttgtaatttcactgaaatccttccacattttcacttatggctgtgctgaaacactctngaaaggaggcggaaaatgggaggatattataaagaaatcctcacttaagacacatctttaaccactttttaaattttttttctctgatatgaggctatgggctactgaaaatcaaactgtatccctaattaaatgactgactattgtaataaaaacaaaaaatacgaaaatgaagattgaactataaaaataataaataaaaatgagttagtgtttgttgaataaactat

SEQ ID NO: 204441 - DNA, 447 bp, Glycine max
  unsure (1)..(447): unsure at all n locations
gcttaagtctttaaggactcattaccaccacaaaattagcctatgttttaccttcctacaacaaagaaaaacacataaaaaagtcctagatagaaaaactaagggggtgtttggtttgactgttttctgttttcattttcagtgaaaacaaaaaatggtgatgaagaagtgtttggttggatttttgaaaacattttcaatgaaaatgaaaacaggaaacaaccagaaaatgaaaacaataaaattttgttttcagtgttttcagttcaaaacagaaacctcattttggataaaatgaaaatgcgatggcaaggaatgtaattttaagcaaatctaaaaatacaaaaagacaagaagttaacatatcattaaattttagtatttntatttcctgaaaacagaaaacaagaagtcaaaccaaacatattttcagaattctaatctttt

SEQ ID NO: 204442 - DNA, 413 bp, Glycine max
  unsure (1)..(413): unsure at all n locations
agctntttattttattagatgaagatgatattatggccacctcatggactcctctaaggacaatagcatcatttcttgcactgaattgttgggagttggaaaccatcttctcaatcaaattcttagcctcagcaggggtcgtatcaccaagagctccaccattggaagcatcaatcatactcctctccatgtagctaagtccctcatagaaatactgcagaaggagttgctcagaaatctggtagtgaggacaacttgcacacaatttcttaaatctttcccagtactcgtacaagctctctccactaagttgcttgatgccaaaaatgtcttttctaaagacagtggtcctatatgcagggaagaatttctccaaaacaccctcttaggtcatcccagctgaaaatggacct

SEQ ID NO: 204443 - DNA, 437 bp, Glycine max
cttaccaaagagttgttactctctagttatcgattaccagtttattgtaattgattaccagtagcaaagattgttttcaaaaagctttctactgaatttacaacgttccaattgatttcaaaatggtgtaattgattacaatgatttggtaatcgattaccagtgtgtttaaacgttgaaattcaaattcaaatgtgaagagtcacatcctttcacaaaaatgctttgtgtaattgattacaatgatttggtaatcgattaccagtgataagttttgaacaaaaatcaaaagatgtaactcttccaatggttttcaagtttttctaaaggttataactcttctaatggttttcttgaccagacatgaagagtttataaaagtaagaccttaacttgcattttacaacacattgaagaacattgattataatctttta

SEQ ID NO: 204444 - DNA, 436 bp, Glycine max
tgcacagagaagcactaaaccgcttctgcccagttgcctttgcaagaacaatagtcttttccattaaatcctaacaaagataatcatgtcaattttctagcagcaatattggtaaatgagaattttataacagttacaggtcaatcttacctgaagaaggtcaacataagattttccctcggtctcatttgacaggctccttgaccaaatttcaacagttttatcaatatttccagcacatatataacacagagttgcagctaatgtattgccagcccccatgagttttgaagcaagtgtgtcacaaagcatagtccattcatctctctgagcaaactgttaatatgtgataacatgaacgatatgtaatatataataactaaatcatgaaaatttatggctaatatgaagtttcaaatttgtactataagagaaa

SEQ ID NO: 204445 - DNA, 433 bp, Glycine max
  unsure (1)..(433): unsure at all n locations
ctttattggttcttggatggctactcanggtaaaatcattaataccaagaaaaaaccacttttacatgcccctttggtgtctttgcttacaaaaggatatcgtttgggttatgtaatgtccctgccacctttcagagatgtatgctagccattttgttgatctggtaaaaaaatgcatcgatgtgttcatggattatttctttgtctttggattttcctttgaccattgtttatccaacttggaattggtgtgaccacaagatctcgtctcgagggattgaagtggacaaggcaaaaattgatattattgagaagttgcctccacttatgaatgtgaaaggcatccaaagttttctcatacatgcccgacttctatcggaggttcataaaagaattctccaaaattgctaggccatttagcaacctgttgaac

SEQ ID NO: 204446 - DNA, 325 bp, Glycine max
tgcagtcgcccacaatttgcttcttctatgtagttcatacttcccaccgcaagatacgcataccctgttatgttttactttacttcgaagctgctaaccatctgatagaagatataattttcgggatatggctgatgttaacgcagagtacttaggttacaggaaactgtaaacaatgtcctctataggctaagattatatattccattaaggaccttattaagaaaaaatagtggtgaatacaccctgtgttttcacagcaattacaaatgaacgcactgcagcgcgcctgctgagcttagccaacacagttgtatatgatgaa

SEQ ID NO: 204447 - DNA, 339 bp, Glycine max
cacagagtctatggactatgctcttgtgtggtgtatcaacgctctttatgtgatagcaagaatgaaagatccaatggttgatacatctgcggctatgaaggggatcctgatgaatctatgtgtgcctgctagttactcaagggatttgaaatacaagctaccaagactaacccaatgcaacataggggttgtagaagatttcaaggacatggatgtgctcatgattcaagcaacgattgaagaacatgaggaagtaactatggctcgggttcttaatggtgtgactaatgatatccgtgatattgttgatctccaggagtgctttcaaatggatgattt

SEQ ID NO: 204448 - DNA, 375 bp, Glycine max
aattggctaccttcatcaactaggaacactaccacatcgctccttccatgcactttcacgcaaatatggccctgtcatgttgctgcaattgggccaaattccaaccctagtggtctcatcagctgaagtgtgcagagaaataatcaaaaaacatgattttgtcttttacaaccgcccacaatctacagctgttaaatattactttgtggatgacgcaatgatataaaaaacaaaaatattgaacatgttgaacaccataggtaatacactctgattaaacagggaagagaaaaaaaataaatttcacaggtatctttcttttattatatccactagctcaaaattgattggtgtcgtttatgtaaagggaggaat

SEQ ID NO: 204449 - DNA, 382 bp, Glycine max
agtaaacgcatatgtgtttgagctgctatgtatttcttagtttctgggatcaaagcctaatatataacatatgaacactgtctgaacatgtttttaatgaagttgaacattgagaccatatctattgagctcaagaatggcactattgttcatgacaccattacaagttgctttttttcctcaatatttctttttctggtggcataaaagtgttgaaccatttataaataacatatattacagttggatcggaatagagaggcgtttaattatttgcaagggtactctactccttctgacaattttcatttttgggagctttatgttgcacgaattattggtggatgatgccttgatgctgcgtggcgattctagtgcgctg

SEQ ID NO: 204450 - DNA, 333 bp, Glycine max
  unsure (1)..(333): unsure at all n locations
agctngactaatcccgacccaacccaggcatatatcagtcagtgagaacctgtgactnttctaaacaggcgagcttctaacagncaaccaatataaaaacaaagtccacaaaacacggaggctcgtgtggcggctggccagctatgcttctcgggtggaatctgaaaatcagcctctggtaatagaaaaccatgcgtgggtaatccatagcaccggctttaaatggagacaggacgctaaatggcctctggtaatcgtaatacaagggtgtgataatgattacacacggggataaggcactggaaaccattaccaactgggtgaaattgattc

SEQ ID NO: 204451 - DNA, 453 bp, Glycine max
  unsure (1)..(453): unsure at all n locations
tatgctgcaatcatntataatagacccccttagcagcatatccaacaacaatagaattattatgatatttcaagaaacagatacaatccagattggagaaatcatccaaatctgagatgggcaagtcctccacaacaacaacagcctgtccctcctttccagaatgctgctggtccaagcaagccatatgttcctcctccaaaacattagcagcagtcacaacaaagacaacaagcaactgaggctcctcctcaaccttccttagaagagttagtgaggcaaatcaccatccagaatatgcaatttcagcaagaaataagagcctccattcagagtctgacgaatcagatggggcagatggatactcagttaaaccaagctcagtcccataattatgacaaattgccttcacaaactgtgcagaatccgaaaaatgtgagtgccatcaccttg

SEQ ID NO: 204452 - DNA, 426 bp, Glycine max
gcatgcaagcttgtaaagcattgagtgtgatactgctttatctatatatgcggcttttgtatgtttacaatactaaagacacctttgactcccttgtaatgagaacacacaactgattcaacaaactcgcacacatatgaggcaaacccatcgtagatacttgtccagactcagactctacattcatacatacacactctcacacattctctcacacacacactcacacacactctcagagtcacgcacacatatatatcacaacacactatgccgaatatacacacagagaccccacccatagacgcacactgagttaaaacaccacatacacatacacactcatcccttggtccgactccccccacatagtgagcaatcaccatataagatacataccaactccacaccccacacagagtacac

SEQ ID NO: 204453 - DNA, 436 bp, Glycine max
gtactccattataaaatggttaaagaacctttacatgtgattctgttctgaatcctatatatcttattcgggttgcaagtggagagagagataaatcaatttattatcacattcttaatcgtagataaattaacattttaaagttttaaagtatttattatcaatattaaatcattgcattaaccttcaactatctttactggagtcctgcagaaccaaaaatcatcgaaattaaaactacagaattactataagatataggaataaagaaaattgctgacatcgttacttacccgaatggactttgtttgatagaaagcaattcaatgtccaactgcagtccgaaaatagcaaacggttaattgtattttgaaaagaaaatccactttaacaagagaacaatagaataaaatactgcagcaatagacagagagct

SEQ ID NO: 204454 - DNA, 432 bp, Glycine max
agcttgcatgtctagtgattctagagatttataaggtccaagttctttatagttttgagagattttattgtgtgaagatctgcagagaccatagcttgaagaggaagctgttctgagagcttgagatgagtttgtgagtggttgtgagatcctagaggtgaatgagacatcctcaccacttgtatttttgcaatctttcatcttgttcttctcttttttgtaaaggaggcttcctggttatggaaagctaaaatcctctgttggatcttccctgtaggtacttaatgtaaatatctttctatctatttaatgatgttttatgtgttctctgtgctatctgcttttcattctagtatgcctttaccttgatcacgtagatgcatgctttgtttgggtcattcaacaatgaaaactggtcttattctgatgacc

SEQ ID NO: 204455 - DNA, 449 bp, Glycine max
  unsure (1)..(449): unsure at all n locations
tcttatttagttttccctgataggagtgggtctgaatagaggcaaatctaatcattctgcttggacgaatgagaaaattggggcaaatgaagagggtgagaatgaacgagaaacccatgctgcgactgtcattcctacatggccaaacttcccaccagcccaacaatgtcattactcagccaataacaacccttctccttacctaccacccagttatccacaaaggtcatccctaaatcaaccacaaaacccacctaccacaaaaccaatgctaaacaccacctttagcacgaaccaaaacaccaaccaaggaaggaattttgcagcaaaaaaaaaaaacttgtagaattcaccccaattctggtgtcccatgctaactngctcctttatctagttgataattcaatggtagccataacccctgccatgtttcctcaaactccattttt

SEQ ID NO: 204456 - DNA, 418 bp, Glycine max
agcttgtaggattatggggtacccatcacatgtggtactaggtggcggtcgggcgatggtgcacaacaagtttttccacatccacaatgcgcgcataaacccaccatcccctgtagcccacctccaactgagctcacgtactcccacgtagcccatatcctcgtttctctcaacaccgggtccccatcaatcctcccaagcttccccaacatcaaagtaatacaacattcaaacagcacaaactatcacagccaagaaaacagagcaaaggcagaaaactctgccaaaacaccaaccaaaatcacagcttttctcacttaaagaccccagtaacaattccttcgatccaattcgttaaccgttggatcgactccaaatatttactggaagtctatagtgtataagcctgcattttgac

SEQ ID NO: 204457 - DNA, 305 bp, Glycine max
  unsure (1)..(305): unsure at all n locations
ggtatgccttgttntgtagattctgtcaaatcttgaatatcctttcccaattggcagctagtttgccctctattttgtctttctaggtttctccttgaactatctaagccagactccccctttaaactgccttggtttaagttgagaattgaagcgttgagtcattgatcgaggccatacccgaatcaaataaacattaaaaatgcagtatctaggaagtgatcctaggtcgtctcccaacgagcaatggtcaaccaaagttcataatagatagtgataaaacaataacgaattggggggggggg

SEQ ID NO: 204458 - DNA, 296 bp, Glycine max
gtcaacgactctttggtctgtctttgcaaacactgactagtcaccactatggtatttatattcttcaccgcaccgtatagaccgcgaaaggaaaaacgcctccgaatgaagaaacctaattttgtgtgattattgagcgcaaccactttcctgtggcaaacatccactcgctaatgcgcaaataacatggactataacgtgtgcaatacccattggtggaaataagccccttctcatgttgttacgaacacactgtgacacctcctgatgactctactattatccatgggagaaac

SEQ ID NO: 204459 - DNA, 363 bp, Glycine max
  unsure (1)..(363): unsure at all n locations
gcggcatgcaagctttagtcattctgaataatccgaaaatatttaagaattgggcgttgaaaaaacataaccaaactttctgtgattggtttaaagatacaacttttgcagatgaaaatgcttcagaaacattaaaaaaactatccgatgggcctaaaagaaatgttataacctggcaaggatacgacataaacaagttttcatttttcacacaagcacatgatgacataagtacaatgccgaacagcgggggcaccctaagggctgaatcttaacactttgcaagtgtcaagacgccaatccctgggagctcncatccttaccttgggtcattgatgaaatttagaacttatatttgtgaaa

SEQ ID NO: 204460 - DNA, 432 bp, Glycine max
  unsure (1)..(432): unsure at all n locations
tagtagctaactctngaggatcaggcctcaggagtgcatatctataataagcaaagagtgattccccctcttccataataacagggatcttcaagaaagtgttaagagtgtcctcatcaaacttaatcaaatgacctctcaccctcacctgcttaggtgatttgtcctcggggtcatagaggttggcatagaattccttcgcaatggcaacatcaatgttgtcgtcagcaaaatcagtcaactcctcatcccaatagcgtttctcgagttccttcttgaactcatcaaactctgtatagtggaccaccacattcctctctggtaaaagcttcctaggcaccacaatgccagtgtatctttcccaagcctcttgggaagtgaatctagatctgtcaaatctgacttgggtaggtgtagaaggtgcctttcttt

SEQ ID NO: 204461 - DNA, 421 bp, Glycine max
  unsure (1)..(421): unsure at all n locations
agctngtacagttgaaagctagaccaaaatattgtcccaccttgtcttaagggtttaccccttgtgtacccatggcacctatcaataaacatcacgtgaactccttgataatagacagatatgtagcctttttttcgtagtattttgttgcatttatatgttattattattcaaggccacaagggttggtactttttatataccatagcattattgagttttgaatctataacttcttgcaaactatgcaaatgcaaaacccttttcatcatatatgggtggcatttggttaatgatctatacacaatatctttagatggtaccaaacttctaacgatatcagtgtaaagttttgcttttgaagacattcaaaagcttctggagttcagttttcaatgttagtgattgagtcttaagttta

SEQ ID NO: 204462 - DNA, 422 bp, Glycine max
  unsure (1)..(422): unsure at all n locations
tgtagagttaagtctcgtatcggnttaatcaattgtcgatatctggtaatcgattacactattgtttgagacaatgactaatttagtcaggagtctctgctttaatcgattaccaaggggattaattgattacttctctctcgttcagttgttcaaaggtgaacaagaacactttaattgattacttaggtcatctaatcgattacattattcttgggttgttttccagatgttggatgaacactttaatcgattacttagataatctaatcgatcactttgctaaaataaccgattaccttatagatttaatcgaatacaaatggttataactattttttctataaataaccaacttgtgttcacatctacacatcacgagatcattagagaatactcaatacatctcgaaaaaacttctt

SEQ ID NO: 204463 - DNA, 436 bp, Glycine max
tgcatgcaccctatacacattgatgcacaaccttattttgtacaatatgagataaaagcccaatattaatttaagaattgcaccaacagtaccacaggtactgtgtctgaacacattttaagaaacatgctaatgaatttaattgtttcaaggcggtcaattagcacggtgaagttctaactttattttcaatgcatatttatgggatccaaccgagaatgtccatttcaattggttgtacaagaagcgtgagtgaatgtaaacctcctaatatccgtcttccattcctacggataaaaaaaataaatccaagaaagtttgaaaaacatatttattctttaaactttttatgtgcctccattgactatgtttttatatgtattggcagcaaaatatatttttcaaaaagtcatgatgaacaactgaaggattagca

SEQ ID NO: 204464 - DNA, 430 bp, Glycine max
tgagatgaggaagtgttgaatggtgaaactttctgcttttattgttgaccacagagtggtacctggagatatgtcgcgggggtcaagagaccttggggacgtcaggtggggtgctattgcccaaaaccaagcttgaccaatcccgacccaacccgggcatagtcggtcagtgagaacctgtgatgtacctaagcaggcgagctcctggcattcaacagataaaaggaaaacaagaccacaaagcaaggaggcttgtggtggctggccagctgtgaattttgtgtaatatgtgagatatggcctctggtaatcgattactaagggtgggtaatcgaatacaaggcttaaaaatgaagacaggaggctaagatggtctctggtaatcgaataccacggggcgtaatcgattaccacgcttgtaaacgatgtc

SEQ ID NO: 204465 - DNA, 428 bp, Glycine max
cagcttgacatgattgatcgatagtggagtgttttaaatctactaatttagatctgatttctaaaagtgattaatcatgaatttgatctctaaatcttttcaaatttttacttttagttcctaaacaaaaaattgatcagtcttaggccctcgactttttgtccctcaatggtgattatccttactattaaatttattggtatacaatgatgacatggcataaatattctaatcaattaataatattgtgtggtgattaattttatagcagtcttaaatcggtagaaaatacttgattgaagcatttgaaagatgtcaaacaattcctgataattaaaaatcgttagaaatttccgaactattgtctcaattttatacgcctgtaattcacttcccacaaaaaatatccaaattttcatttggcactc

SEQ ID NO: 204466 - DNA, 475 bp, Glycine max
  unsure (1)..(475): unsure at all n locations
cactctagaagactcacgcttcggatcgttgagaggcactagaagacaataatgatgctcttgaactacctttaaatccaacggnggctcacatgacgaatcacaaagagaggaagaccatataggctaatgctaaagatggccttttctcagctgtgtcaaaaattattcttacaagaattatgaacttcaagtctgccaaacagatttgggattatctcagatcagaatatcacggctgtgaaagaaccaaaggcatgtaagtactcaactcggacagagaattcgagatgcagagcatgaaagagactgaaacaattaaaggctatgatgactgactatcatgcgtagcaaatagagtgaggcttcttgggaaggactttcctgattaaagaatagtgcaaaaaatactggtcactatacccgagaagtatgaatcaaagatatcagcattggaggagtctacagacctgtc

SEQ ID NO: 204467 - DNA, 62 bp, Glycine max
gccgttgcaaaaatattcatggccttttccacacagatggtatgacaatctcacaagataac

SEQ ID NO: 204468 - DNA, 440 bp, Glycine max
  unsure (1)..(440): unsure at all n locations
catgcaagcttgcaatattttctctaccaatntggttaagtactttatccctatcagcaactagtgtgaccaaaatggcctcacatgttgtacctagcagcacacctccaccactacctgaaaagagaaaagcctttgggagcttcagaacctgacctatccactccatgacaatgctttctaattctgttgctgctggtgaagacacccaattgaaccctaccaagttgaaccctgtgctcagcatctcaccaagaaaccctgctgtgctaccgctggagggaaagtaagcaaagtaattagggctttgccagtgtgttatgccagggactatgtgctgctgcaaatctcgaaggatggtttcaattggttcagggttgagaggtgcaaaagatggcatgagttctctaagataaccttggtctacatggctcaacact

SEQ ID NO: 204469 - DNA, 455 bp, Glycine max
  unsure (1)..(455): unsure at all n locations
ntagcggtcccaattcttccaaacggaaccctctttctttgccaacaaagaacttctgtaaaatccttagggaagttaacttccctattcgaggaggtaatcttgatagttctgggcaaccattaaaagatagttgttgtagagcttttaagcataccaaactgttaggcaacattttgagacgactgcaacgatctaatttcaatatctgcaaattccatagtttacatactgattctggcagagtttcgaagccacccccagaaagattcaagtaccttagatgctttaaaagaccaattgatgatgacaatttttctcgctttacaaaatcaagcacccgcaaggaatgacatttcaacacattaggatgcggagaaagttggtcaccatagtgatctggcaatatataggtcctcaaagttttgaatagatgcaactgcactgaatcaatg

SEQ ID NO: 204470 - DNA, 345 bp, Glycine max
taccaacttttaggaagaacctccgatcccttgttgaactcgaaggagaaaaataactcctctctcctaatgtagcttgtacaaatggaaaggggtcaagaattggtttaaagaagccggagatgaggctaatgctttgtccaaagaaacttggtaggcttaagtgacaagttaattgatacatgaatgactatttgtagctatgctcaacctgttagctaacaatcagtttctgcatataaatacaaaaaaagctattatcaatctgggataatttatcctcggctaatcattatcattattcattagacctgaacataattttctcttaaacacgcaaacata

SEQ ID NO: 204471 - DNA, 412 bp, Glycine max
aagctttgagccaattcaaacgacaataactttttactcggatgtgtgtttgagtccttttatataacgagacgctcgaaattgaatgttgaagctctgagcgaattcaaacgacaataactttttactcggatgtctgattgaggcccgtaatatatcgagacgctcgaaattgaatgttgaagctctgagccaattcaaacgacaataactttttactcggatgtctgattgactctcgtcacatatcgagacgctcgaaattgaatgttgaagatctgagccaattcaaacgacaataacttcttactcggatgtctgattgaggcccgtaatatatcgagacgctctgaattgaatgttgaagctctgagccaattcaagcgaacaatactttttctcggatgtctga

SEQ ID NO: 204472 - DNA, 332 bp, Glycine max
  unsure (1)..(332): unsure at all n locations
ttccacattcaatntcgagcgtctcgatatattacgggcctcaatcagacattcgagttaaacgttattggcggttggattggctcagagattcaacattcaatttcgagcgtctcgatatatgaccggactcaatcagacatgcgcgtaaaaagttattgtcgtttgaattggctcaaagcttccacattcaatttctagcgtctcgatatatgaccggactcaatcagacatccgagtaaaaagttattgtcgtttgaattagctcacagcttcaacattcaatttcgagcgtctcgatatatcacgggactctatcaaacatccgagta

SEQ ID NO: 204473 - DNA, 365 bp, Glycine max
agccattacttatcatgcctcttcgcatcactccgtgcctatcgacatcattaatcctttcagatgacacgtttaaagctcttaatttatcaaaaaagacaaataacaccttatattatgtcaagattatcgacacctctctattatacctcttaccattctctaaaggaggcaggacatttgatgtgatgacacggatcatactgttcggaacatgtatcattatttcgcacccctttatggtatgctcgtcatatctcaattacatacttcaattcacaccctcctaacatatctgccctttccctcatatccagcttggcgggacgacatgcttgacaacatcgacgtgaaatgtaaccctg

SEQ ID NO: 204474 - DNA, 411 bp, Glycine max
  unsure (1)..(411): unsure at all n locations
agtctgtgaaaaaacaagaaggaggagcatctttccggccctataagaagctctctggggtcatcaagaagtgcctatagaaatgcatgaacaagttcgtttctcgtgaaaatcatcatcatcatcatgcatagaaacacatgccatgctccatggtgcctgagacagagccaccaccaccaccaccccctgaaataagttggaatcaccaagggaaattgaaaggtgcacttgtgaggaaacaacatgggagtgaggaacttaacgaaaaagaaaaagaaaaacctttacctgtgccacccatgtacaaagcccgaccatagcactatcacgacctntagaatatggtccgtaaatgcatcatgagaacatgccccaaaacagggccttgaagctatctgggcctcttag

SEQ ID NO: 204475 - DNA, 435 bp, Glycine max
  unsure (1)..(435): unsure at all n locations
cttgcaatgactcgaggttagttttcaatctgataacgctttcatttttagttngagtngaatatgtttatttgatttctaacatgtctacatttagtctatcatttggtatcagattgatgtgtatgcctttgccttgcttagttcgatattgtcataatatggactttatgttttttgaggcttttaattcaaactaacattttctcttgtgtctaagaaagattttcttcgagtagttatgacattagtagttcattttgactttgagttacatcaaatggatgtgaaaatagtgttcctcaatattgatctagcaacaaggtttacatgaaacaactcgcagggttgttctctactaaaggtgaacacttactatgtaagcttaataaatccatatatggattgaaacatgtttcttgccaatggtattta

SEQ ID NO: 204476 - DNA, 365 bp, Glycine max
acctcagagtcacctgcggcatgcagcttccacatttgtacttgggaggatttgtttactgccttccttaggcaatatcaatacaactctgatatggctcccgaccggacttagctgcagaacatgggttaaatggaaaacgagtcctttaaagagtacgctcagtgttggaggaactctgcagtgcaagttgcctctcccatggtcgaaagggaaatgattaccatgatggttgacaccttgcctgtgttctgctttgaaaaataagtgggctacatgcccttcacctttgcagaattggtatctccccgggaaaggatccaaatgggcttgaagagagggatgcctaatactgttccttctca

SEQ ID NO: 204477 - DNA, 399 bp, Glycine max
  unsure (1)..(399): unsure at all n locations
gacctatgaatctcagcttgagccaaatcctgctaccatatctcttgccctttgtgtaatgncaatccttaccctcggaagcaaaataaagaaggaaaggaaatttccaatcaaaggaagataaaagaggagaggaaatttccaatcatagagaaagatacgaagaggataggaaattcccaatcctagagtgggagaatgagaataaatagaaagaacagtcccaactcaagaatgggagaataagaaaaaagaatagaaagaaaagtcccaaccaaagaatgggagaaagtaaaaaaggaaggatagaaagtttctgatcaaagaaacacaatatatgtgctcgaaggtcttttgaccagacaatatctgaacaatacacaatttgtacccaatgaa

SEQ ID NO: 204478 - DNA, 414 bp, Glycine max
  unsure (1)..(414): unsure at all n locations
agctntntgatcttgagaattgcataccatttgntntcatgnttgctcatccttgcgttttcctctacaaaacaaaaacaaaaaagggggaagcgtgaaacttcacactacattcttagtttcatgtgttaagcaccacgagccaaccatgttgggatcataaacccgtttcacttaaaaaacaaaataattgaacatnggacctaatgcatggttaactaggaaatggtgtttcttcgggcatctcaatttcataattactttttccgtgcataagcttaaagtatgcccgagtcattcatccctatgagatgttgttgaagtattggcgatcaagaatgccattccttgaattatagggttgaaccaagctcacgcttttacaaaaggttcatcattcaagttgattatgga

SEQ ID NO: 204479 - DNA, 440 bp, Glycine max
  unsure (1)..(440): unsure at all n locations
tgccacccagctcgcccaggcgagcatggttgcttcctctatatataacagccttctggagaaaccctctggagggcccaagtgggcctggttgctatttgcacccncatttttactaagtacaccccctgcctttttcttggtgattctttttttcgtaaagttacggaaacttacgaatttcgtaacgatacttgttttctttccgtaatgttacggaaccttgcggattacataatcatcccctttttgacttacggaatgttacggaacctcactaattgtgcaacgatgcttccatttgatttccggtgtgtcacagagccttacggattgtgcatcaatattttcttttgttttccggcatgtcctagaatttcacaaattgcctaatgatgggtgccaagcacctcacaaggaccaaacaaaagtcgcatgtc

SEQ ID NO: 204480 - DNA, 359 bp, Glycine max
  unsure (1)..(359): unsure at all n locations
agctngaaatgatgaagtgtggaagggtgttacttcctacttttattcgttgaccacagagtggtacctggagatatgtcgcaggggttaggagaccttggggacgtcaggtggtgtgctattgcccaaaaccaagcttgaccaatcccgacccaacccgggcatagtcagtcagtgagaacctgtgatgtacctaaacaggcgagctcctggcagtcaaccgataaaagaacaaagaccacaaagcagggaggcttgtgtggtggctggccacctgtgaatcttgtgtgatatatgggatatggcctctggtaatcgattactaaaggtgggtaatcgattacaaggcttataagtga

SEQ ID NO: 204481 - DNA, 426 bp, Glycine max
  unsure (1)..(426): unsure at all n locations
nnggaattgcattgnngcacctatttgaatctcctatactgtacctacatataagaaacagtcccactctccccattttacaaaattatattcatacatcattggggcatttcaccgagcacttggtgggcgcacgtttcgacataaattgcaagagaatggggacaatgtggcatgccccattgcttcagaatacagcataggcctaaggccttctcattcaaatcctcaactcaagaaaacaagcataaaaacaaaccaaaactgccccacaaatataagcgcattctcacaatttggagcaccaaaagatgaagaaaatataccaatgggaagctaaaaacatcaaggattgaatacttacttgttggagtgaattataacaccaaaaatgaaagcaaaaggcaaccaaaagtggcttgaggg

SEQ ID NO: 204482 - DNA, 390 bp, Glycine max
taagagctctggatcagtctatatcgacagttaatatcgatcccgctactgggagaggatcgggccatcaaaaagaaaagttccacaactatctaggggtagatgctcgagaaaggttcctattgtgcatagcaactggaaagatatacctgaattgctaaaggagctagtgtgggatgacattttagtaaagcctcaaatacatgttgcctttattttgatgttatattttaaaagtacatgttcacattgactaaatgtaacataactaatgtatatatgcaggctaaatttgatatcccataaacaccaaaggcgaagaaaaaggtcatgtcaacagttgcgataagatagaggaaatttaagtccaccttgactagcaaatttgtg

SEQ ID NO: 204483 - DNA, 438 bp, Glycine max
  unsure (1)..(438): unsure at all n locations
tctgtccctgaganactggttcccagaagacaacagggatttaatattgctgaaaaccctagccttgcaacaagttctagggaagtagacacggagatggacaagaaaatccgcagtattgtgagtagcattctgaaagatgcttctgtgcctgatgctgagaaagatgttccaacatcgtccaccccaagtgtttctgtgcctgatgctgagaaagatgttccaacatcctccgctccaaatgctgaagccttcccttcacccagtgaagaggaatcaacagaagaagaggatcaagccgcagaggagacccctgcaccacgggcaccagaatctgttccaggtgacctcatcgacctggaagaagtcgaatctgatgaagaacccattgccaacaggttggcacctggcattgcggaaagactctcaaacaaaaag

SEQ ID NO: 204484 - DNA, 434 bp, Glycine max
  unsure (1)..(434): unsure at all n locations
tggaacaaatattntgaattattggtccccttatagattttgtaaagatgtctgctagntgatcattagaactaacgaattcaataataacttccttagaaaggaatttctcccgaacaaaatgataatcaatctcaatatgtttagttctctcatggaatattggattagaagctatatgtaaggctgcttgtgttggatcgagtggcctctgaataattaagaagggggggttgaattaattattcctaaacttttactaattaaaaaattactcttctaaggcttttacttatgttgttaagagaatatggagtagaagagaaacttaacaaaaagtaaaagcggaaattaaatgcacagcggaaagtaaaagagtatggaagaaggaaacaaacacacaagagtttttatattggttcggcaacaacccg

SEQ ID NO: 204485 - DNA, 431 bp, Glycine max
  unsure (1)..(431): unsure at all n locations
agcttgngaataatctcctgagctgttcaatgatcatcatgaaaaatgaccctattacacctgcaccataaaatataacaaccctccaaacagcaaagaccaatttatatcatgaactagatgggtcatagaaagatattaacttgcagccacatcttccaatcagcaatggaataaaattcattgccatcattccttcaaataaaaaattgccactgcacactagcatagtcacaatctcgaaaaagatgaaggagattctcttcttggttatcacaagcaggacataaattgttgttagtcaaactcaatctcatccgccaaaagtttccaaataaaacatttagccctctctggacccttccaattagcaacaagtttgaataaactagaatacataaaagggatgttattactaaccacctcatacg

SEQ ID NO: 204486 - DNA, 452 bp, Glycine max
  unsure (1)..(452): unsure at all n locations
tctnggaaagcaactngttctgtgccaacagtgcatcctgtgatgaaagctccaacttacttcttttggtgggaatatgagtctgatcacgcaagatagtgtgatcacttgcagccatattttcagtcaatcccatggcctcttttggggtcttcaaattaatttttcccccagtagaagcatcaagcaacttctttgactgcggccttaacccatcaataaagatattaagctgaatcggctctgagaattcatgagtcggagttttccgcagcaagctatgaaatctttctagagcttcactcaaggactagtctggaaattggtgaaaaaaagagatggcaacttttccttctactattttcgactcaagaaaatatttcttcataaaattttcaacaacttcatcccaagtcttcaaactattacccttgaatgagtgtagccatctc

SEQ ID NO: 204487 - DNA, 437 bp, Glycine max
agcttcagtggatgattttgaaacagtgagttgtttcttagaacgcttagaaagaaggttgtttcccaaaaaaacacaaaagccagaagtggatcttctggtatcaacacagctggcccaatcagcatcagcaaaggcagtgagggtgagagagttttgagcagggaaaaacaaaccttgtccaggagcagatttgatatactacagaagattatgaacaacatgtaggtgaggaactctaggtgctttcatatactgacttaatcgattcacaacaaaggtgatatcaggtcgtgagatggtcaaataaagcaatctaccaattaatcttttgtacatttatggatcagggagtaagtctccatcatgaagatcgagtttcagattgggatccattggtatattggaagggttgcaggccaagaaacctatatctt

SEQ ID NO: 204488 - DNA, 450 bp, Glycine max
  unsure (1)..(450): unsure at all n locations
tctacaagaagagatgaccgagaggatcaaggatggactactcatcaaattcttgaaggagaaaattacaaggagttgaattggagcactntgatgattgttgaacagttcatttagcgacaccaactcactaaacacaattccagcaagtaggcttaccacagatgtctggcttagcgcaattccaactcaaggtaaaattgccctcactaaacacacttaaggcaatttcaacccgagaagaaattggtgtggaagcaatgctttccaagattattttgatgatgccaaagactcaagtcaagaatcaagagtcaagaaagtttcaagaatcaaagagtcgttcaatcaaagcaagtttcaagaatcaaagagtcgttcaatcaagattcaagattcaagtnaagaatcaagagaagaatcaattaagataagtattaaaagagtttt

SEQ ID NO: 204489 - DNA, 298 bp, Glycine max
  unsure (1)..(298): unsure at all n locations
ccggattttgtcgtgtntaccatatactcgaattcacacccagggatatacattcttttgacttaatcttaaagcggatactctatctttattcataaatattaattctcacagggtacaatcgtcatttgtaacagactgaataatatgatactgtacctatgattatacatcgttataactaccaacatatttaactcttattcaaatgctgcatgatcataattatgaaatttaatattaaacaaactctgttccaaaacaaatataactactatgagtccttatgatctcatta

SEQ ID NO: 204490 - DNA, 397 bp, Glycine max
  unsure (1)..(397): unsure at all n locations
tgacatgagatgtntggtctatggggagatttaccttcctattttgagtcttggnngactaaaaattccttctttgttctttctttcttttattttaacaccagattgtggaggtgcggtgtatgcaagaaataacggtatcccagttatattgtaccctaaagcaaaggatgaatccaatccaagtgaccttgttgagacactaaggtcagatgcttctttacttcatattctgcaatcgtatttaactttatgtggttaaattattaacatataatacattttctaatcaggaaattcaaggttgattttattcttttagctggataccttacacttataccagtggaatggatccgagcttacgaaagatctatattcaacattcattcatcac

SEQ ID NO: 204491 - DNA, 440 bp, Glycine max
agcttccaagcttattttgatgatgcaaatgtctcaagtcaagaatcatgattcaagcaagtttcaataatcaaagtcattcaatcaagaatcaagatttaagtgaagatttaagagaagactcaagatatgcaagaacctcaagaaaagcatcaagataagtattgtcataccctaatttcgtccggcgattattatttgatgatatacaacctttgattggtcgcttcgggacacttggcgtccttggttgcacaatgaatgaagtcccgagacgtgtcagaaatcaaaaggaagcaggcttgcgcaatccgtgaaattccgtaatgtgacggaaatcgaaaagaggtgttttgcgcaatccgtaagttttcgtaacttcttcgaaagctaaaaaagagtaaatacataatccataagggattgtaaccttgcggaag

SEQ ID NO: 204492 - DNA, 447 bp, Glycine max
  unsure (1)..(447): unsure at all n locations
ggccagccactactggacttataacaacaaaggagttatgtgatttanactgcacaaatacaaattttcatctcacatagggtttctacttagaaagatataatctctcacttctatcttagatctattacatattacaagcttaatacaaaagtgggtcactctcaaaagagactgttcgattaagctgagaatctagaaggggggttgaatagattctttgaaaatctttacctattcgttcttaacaccgattaaaaacatccccttaaatcaatcaaagtttcttcaaaaattctttagaaataagaaactattatttgggcccttaagatcaattccacaaccaatatgattacaaaactcagagtaatagagaatatgagaaatacataagactttatactggttcagtccaatctggatctacatctagttgttctaaat

SEQ ID NO: 204493 - DNA, 410 bp, Glycine max
acgcttccacttgatcccagcaacaatggtgtgttcgaagatgaagaagaagcagatacgcgaagaagaagccttcacttgggaagaagatgcagaatcgcggcgcgaagaagaagaagaacgaagaagatgcttaatctcgaagaagaagcagaagaatgaagaagcagaagcggaaccgtccgaggaaggaagaagaagaagcagaagcagaaccgtccgaggaaggaagaagaagaagcaggcgcgggaaagagagaggcgagagttatttttttaaaaaattcctgaggggcttttaagtcttttcccacaaattgctgggtgcacctagcagcactcggtctccaattggtcgatgtatgcaacctggccacaaggtaagtgtccatatccattccatatattag

SEQ ID NO: 204494 - DNA, 430 bp, Glycine max
  unsure (1)..(430): unsure at all n locations
ntatcttggcagatattctgatgatngtggtggctccattattgacgatggagatcattggctgtctaatctcatttctttaacccatctttccttgtacaacatatctaatctcaacacttctcatagcttcctccaaatgattgccaagctaccaaaacttagagaactgagattatttgattgtagcctttccgatcattttatcctttcactaaggccctcgaaattcaatttttctagttccctttccatccttgatctttccgtgaacagcttcacgtcatcaatgatactccagaggctgtccaacgtcacttccaaccttgttgagcttgaccttagtgataacctcttggagggttccacatcaaaccattttggccatgtaatgaattctcttgagcacctcgacctctcaagtaatata

SEQ ID NO: 204495 - DNA, 423 bp, Glycine max
  unsure (1)..(423): unsure at all n locations
agctntaaaccgtttatttaagccgttcttttctaataattgataaaatgaatttcaaccgatcatttgtgttgtaatctcgtttaatcactgttaaaatgaaatctaatcgatcgttcatgttgtaacctcggttaaaccaaaaaaggcataataataataaaataatcaaaatatctttgaataaaataatcaaaaaaatcaatcggatgtttttctttgaaagtttccttgaatgaattgactaataaccaaagtgaaactaaggctaaaatcaactcacaaatcaagctgtgtccgcaaaagtcacttaaaaccgttataaggtccaacgccttaaaacgatcctctttgcttttatctggtaacatggaccgcttcaaactctataatcaacacataactttaccgctttcgcagaac

SEQ ID NO: 204496 - DNA, 442 bp, Glycine max
  unsure (1)..(442): unsure at all n locations
tactttggatgtagccgtagactntcatgtttcggtgtctattgtaaattaaaacatgtaagatatgtttctaatgattgtcttttccaacaaggcattggtgatatattataacaacgaacaaataaagtcaatgttgtaaattttggttatagttacaaaatggataaatcaaagagatggttcttaaagggaagcaagcttgcccttgttcatgatttctttcttctctttttcctctttccttttcttttttcactaggtgaggatgcttttctgactaggtcttgtagtcacccatattcattgataaaaaataaatgtgatgatttcaatatatgtgatgttagtatcacccttttttcaatgtttttttgttaaacttgtgttcttacgatttgttgtttgacttattatcattactagttgtgggtaatattat

SEQ ID NO: 204497 - DNA, 415 bp, Glycine max
agcttagcagccaactcttgaggattaggctctaagagtgctaatctagagtaagctggtaatgtctccccctcctcaatgatcacaggggtcttcaggaatgtgttgagggtgtcttcatcaaattttatcaaatgacctctgacccttacctgctttggtgatttgtcctctggatcatagaggttagcatagaattcttttactatggcaacatcaatgctgccttcctcgaagctggtcaattcttcatcccatcttcttctctccaattcttccttaaattcatcaaattcagtgtggtagattaccacatttctctctggaagcagcttcctaggaataataatgtcagtgtacctttcctaggcctcaggagaagtgaacctggatcagtcatatcggacctgggaag

SEQ ID NO: 204498 - DNA, 436 bp, Glycine max
ggccacccagctcgcccaggcgagcagggttgcttcctctataagcaacagccttctggaggaatcttctggagggcccaagtgggcctggttgctatttgcacccccatttttactaagtacaccccctgcctttttttggtgattcttttttcgtaaatttatggaaacttacgaatttcgtaacgatacttgttttctttccgtaatgctacggaaccttgcggattacataatcatcccctttttgacttacggaatgttacggaacctcactaattgtgcaacgttgcttccatttgatttttggtgtgtcacgaaacctcacggattgtgcatcaatattttcttttgttttccggcatgtcccggaatttcacaaattgcctaatgatgggtgccaagcacctcacaaggaccaaacaaaagtcgcatg

SEQ ID NO: 204499 - DNA, 421 bp, Glycine max
agcttggttttatctcataattagaataatttatgaattgtcacttaggaatttaaattgatagttcttgtaactttttgatgtttctatggggtttttacaggaaattaagtcaaaaaatgaggtggagttccctcgcttaagcgtggcttgctgtgtacttaagcaaagggaggcataatcaattaaagaagccactgacatgcctcgcctaagcaagccttcttagacatttgagcagagaggaacttaaaggctggatgatggagacaagctcgcttaaggaagctaagttagtatgcatctttggagtcattggaagctctcacttaagcccaagccttaaggcgcttaagtgaggcaattaagcaaaagataaacttgaagtccttgcttaagcgtgatattctacgagcttaag

SEQ ID NO: 204500 - DNA, 438 bp, Glycine max
  unsure (1)..(438): unsure at all n locations
cttgaatntggatactngatccatntatgtcttgngtctttcttaagttcactaacaacagactttcatctccatgttaggagggtctattctcggattgaagtttctagatccccttgctgaacttctcgtctcaggcatgattttgaaagctggagctgaaacaggttaccagaggtacctatatctctccccctacagtttatctttgcttgcaagtttgactaatattgaaactattttctttaccctggtgtatacatgtcaaccacattttgaaacctaagttaaacaaatgggaactaagtgtgatcctcatacaaggatacaacaaaatattgaacaaacctatgctagacatagatgacatgtgttagatacctaacaattagattatatttatcctcttggatatagcatctaattaatgaaacaagt

SEQ ID NO: 204501 - DNA, 419 bp, Glycine max
  unsure (1)..(419): unsure at all n locations
agctngattgctcgtagatctgacttttataactntctgaataaaatgagtttatcccatgtttttactccaaaagtcagtgcaaatcaaatcactcccgcattttatctctagcatgcattcattattctttacctactcctcacgtttgatttttttaggaaaatcaccataactaaacgcgccccaaggcatccctatcacaccagatccaaatctagaacgatgggtgatcaataggagacacaggaacagatgaaagctgacatgtcggctttgaaagagcaaatggcttccatgttggaggccattgtatgaatgaggcaactcatggagaataacgtggccaccactgctgctgttagttcggctgccgaagcagacccaactctcctagctaccgcgcaccatcctccccg

SEQ ID NO: 204502 - DNA, 436 bp, Glycine max
  unsure (1)..(436): unsure at all n locations
tcatggtgaatcacaggtgattcagaggtgtgttgattattatttgatgataacaaaagatgatgacaaaggtgatgacaaaaagctcaaagatcaatcaaagaacaactcangtgaatcaaagatcaatcaaagaacagctcaagtgaatcaagaacaagtcaagagttcaagataagaatcaagaagaattcaagactcaagaagaaagtctagagtcaagaatcaagattcaaggttcaagatctcaagaatcaagatcaagattcaagactcaagattgaagaatgaagagaagactcaatcaagataagtattaaaatgtttttcaaaactttgaatagcacatgagtttttgaaaaaaccttttaccaaagagtttttactctctggtaattgattaccagattgttgtaatcgattaccaatagcaaaa

SEQ ID NO: 204503 - DNA, 404 bp, Glycine max
ctgcagcttttgatcttgatgagaggtttgttattgatccaaactggtattttgtttacccttgtttttatgaagtactctctagtttatgattagtatgagtaccgaacttccttgaatttttgttgtttggcctataacaggtacataccagtcataccattggttcttgtcaatggtagtgaaggaattgggacaggctggagttcttacattcccaattataatccaagggacatcattgccaatgttaggcgtttgttgagtggggagacaatggtgcctatggatccatggtacaagggattcaaaggaaccattgagagaagccccaaggaaggtggatacgtagtctatggcttcagggaggaaataaatgaacaaactttcagaatcactgagct

SEQ ID NO: 204504 - DNA, 412 bp, Glycine max
  unsure (1)..(412): unsure at all n locations
ggtagaaaccaaagagacagagatatatagagaaaatctctcttgtataaaccatagaaagaaataattntttttgaattgatttttttactgctttgagttgcttactaattataacaaaatttcacttctttcacatttgtgcatttgctgtcacatgaaggcttgtctgtttggccttattgtgaaatattatggagtacactcgttgacagcaattttgtgtgtctgctactctgctgtcatataaaaacactaaaaagaatttggcaaaacaccatgaagagttaaaagatatgtctagctttctacatcggttcaggccaaaactgatgtagaattctacacattctacatcggttattagaatgaccgatgtngaaagctnacattctacctcacttatttgaac

SEQ ID NO: 204505 - DNA, 406 bp, Glycine max
tctttgaagagaaattgctcactcctatggctctagccttgtctgagtcatagagtgcctccattgctctccatgtattgggaatgtctggttgctcaagatattctttattgagtccaaatgttccacttttcatgcggactggccagtggatctacagcagaaaccaatttagtttgttttaagacagaataattgatgaaaatgaaatcaacccctgataactaaactctgcattacatgaatgcgtataaccgatgcactttgctcaaagcgtaattttaatttaaagcacttaggggcagagaaaacgtttttatttctcctattctcagtttaaaatactatcaagttaccatgttattacgttaatcaactctgttgaggactaatttttgccgttgaa

SEQ ID NO: 204506 - DNA, 382 bp, Glycine max
  unsure (1)..(382): unsure at all n locations
ctttaaggacaaaggggaaggtgaattgtttttgcttanggccatctctcaccatctggcggaagagcaacaaagatttcattgggtcattactattcgaatagccccttattaaatgattgtacatgaatatattgggttggggaatttgatcgaacagaaggtgtgcgtaacggagatcaccctcttgaacgcatagagagagtatcttgcccagtgtgacaacttgggctgcaagtccatggaaaatgatctgggcatggacaagcttgagtcgtttcatggaggaacattggtccaaaacatggtgaagggtctggtgagtgggtgacttcaactggtgccatatgtgtttgcctatttgtgtttgtagagagccaac

SEQ ID NO: 204507 - DNA, 458 bp, Glycine max
  unsure (1)..(458): unsure at all n locations
actaagcttgactggtacaagggaagcnnnnnnnattccaccaagtgaacttggagtacttgtcagtaagctctgtaccatctcgcacaagagcctccaacttatctatctcctctgtgtgggtntncaggttcctgttcaactgtgtaatctgttgtactcgagaagataaagagtcgaaggtttctctgcttctttcgagggtgggtcggaactcnnnaccgctgcgaatgatttcaagagcccctttcaacaactcttccgcagcagctccagcgaacggctctgccatcactactcacacacacccgtgggatgaaatgaaagctaacgaataatatgtactactcacaagacacaccanacccgcgtttttgtccgtgacgatgactacacttatttctattagctcggataatgcaaacatanaaaagttactttattctctttgatataca

SEQ ID NO: 204508 - DNA, 395 bp, Glycine max
agcttccatgcaactttatagaacggtggtttgtagtgttaacctatttcattcattgtgagaaaaccatgaaaaggttatgccgtgattttctacttccatcaaaacacccaattccctagaaaaataaacagatgtgaggatttccaaccaagaatgaggtgaagacggcaaacaaagcaccaaaactcaaattgactgagtaaccaacaccctgactaaacaccggcttgcttcaaagaaactggtatgactcacactcacaccttcattttcaaactcatgatagtgcttgctaaagaatcaaatgagggcactctactaatgcgtaaccatgaatcttgaaggatatgtcttattcgtggctattaatccactaaaatggaatacataca

SEQ ID NO: 204509 - DNA, 431 bp, Glycine max
ttcaactgcacaaggctcttaatgattgaggagtatacttgcttgactttaacccggcgcagacactggcgaaaactgattttctcttttctggacacagtatgacaaagctggaggcaagtatattttcttaccatcagaccttggatgcaactgcaatacgatgcccatgtcagctagatcttgacgggtattcagaccatctttcatcttgccttgaatgttaaggagtgtcccaatgacattggcacatacatttttctccacatgcataacatcaatacaatgcctaatgtcaaggttagaccagtatggaagatcaaagaatatggacctcttcttcaatatgcaagtcttacttttatccttctattgagctctccacaaaaaaattcaagtgtgctcccactagaagactgttcaccaataac

SEQ ID NO: 204510 - DNA, 429 bp, Glycine max
  unsure (1)..(429): unsure at all n locations
agcttcgagagttgtatttccgcacggggaatgtattancaccccatacgtccgtcacaagagacggcagcctttaatcaaatgtgcaaatatgacttcaatttatgttgtcttccttttttaagttcttatgtctttttatgccttttttatatttttatactttntgtggacaacaagggcgtttccctttgctcatacgtattcctcaattgtgatgagaaaatcagacctacgtatttctttgtgaacaaagtgtttggttaagttgtttttatcctttctgcaaaatatgttcgtattgaatgaaaggtcatttaaggcgttggaccattaaacaatctttcgatttcttttgaaaagagagaagacattaaggcattggaccattaatgatctctttatttttgatagggtaataaagtacat

SEQ ID NO: 204511 - DNA, 451 bp, Glycine max
ctctataagacgcctgatgcttgaaatgtcttttctgatggcagcggttctatatgcaaggaagaatatctccaagaacaccctcttaaggtcatcccagctgaaaatggacctgagaacaaggtattatagccaatcttttgccactccctccagagaatgaggaaaagcctttataaagatatgatcttcttagacatcaaggggcttcatggcggaacacaaaatatggaactccttaagatgcttatgaggatcttcacctgcaagaccatgagacttgggtagcaaatgtattagtccagtcttgagaacatatggaacaccctcatcaagatattgaatgcacaagctttcataagataaatcaagtgcaaccatctgcctaagagtcctctcatgaggtggaggttgagccatgttctcagtatgaaaattagtattggaatgg

SEQ ID NO: 204512 - DNA, 428 bp, Glycine max
agcttcaaatttgcgcttaagcaaaaatagtttgtgaatcttgagtcttcatcaaccaatgtaaggaacaatctccttcccttataggtagggtgagcatatggaccccatatatcacagtgaattaagtcaaatggtaattcatataaatggttagagttaggaaaagataatcttctaaatttagcatgaggacaaacttatcatttagaaaaagagaaattgggagaaaggtgcagaccaactttattattcaaatgtttgaaaactttgtctaagatatgaccaaatctagaatgttcaatatgagcatttttactaggaatggaatttgtatgtgaattgataacacacaaagtaaatttgcaatctagagtgtccttgagatctaagacataaaggccttggatgagatcccctctaccaat

SEQ ID NO: 204513 - DNA, 437 bp, Glycine max
  unsure (1)..(437): unsure at all n locations
agacgtaaggtaaagttgagcatttgtgtgtaagttgtgatcttctagaagaattgtactacattaacaagtcctggaccgcagatgagggaaaaaggagctgaaattctctttagctcttgttagatcctttgttgcactttttaaaatgatttcaaagttagcaatgctgtatgcaaagagtatatgtacaaagagataagcaaagcaggagttatatgctgactttaagcaaacatttctgttactttattgacaaaaaatgagcattccatattcatagagcatttaacatagagctaaatgagttaagttcatatctgcaagaaattggccatttcatattcatatagtacttcaaatcccagcatgtaccttgtntgctcatagtaatacatgactctgtgtcttagaattggtggatagatatcacatat

SEQ ID NO: 204514 - DNA, 436 bp, Glycine max
  unsure (1)..(436): unsure at all n locations
catgcaagctngctgcatggcatgatggaacttgcttttattctttcaccttttgttttcacggaaatgtatgtcttcctaggtttttctatctgttcaggaatcatatacaaataccattattactagcattaatcatatattctctttcgttatttttctcttttgtagtacttctcattatgctaggtggaggagagcgaggacttgaattatttattantaatttgccactcattattcattcataatattatccttccactgttatcttcaacgcatttatttgaattttgtgggggaactcgagtaagttgaggagtttgacaaaatcaaagtctatagactatatcaaacgttaaattcctagttctgatgtttgacaaaatcaaagtctatataagaaagccataaattcatggataaaagtctaaat

SEQ ID NO: 204515 - DNA, 452 bp, Glycine max
  unsure (1)..(452): unsure at all n locations
gcttagcccatcatcaatattgatttcaagaaaccaaaaagcttgtagatatatcattgaactgagccagaccaaggaaaaatacatcaaagaaaataaataatctagtatagctaattntataatcagataaagcatctgagacctgctgccatgtggtatcaacaggaggctgccgccgagcatcgccagcatcaaaatccagtacaccataatccctcaaccgaatctacacagcaataactaaaatcagaagtctttttgaggattaaatgcatggcattatctataagacacatttttcaaattgagacaaacccgaaggaaggcacggattctttgcaaattcccaacaccaccaccaagagcagcctaccattagataaaaaagcaagcagaaattaagtgttgataacaaatacaaattcatgcttgctctcttatatgaatta

SEQ ID NO: 204516 - DNA, 90 bp, Glycine max
taatttttaatatttctctggaacaaccattggatatccaaagaaacttggactgttaaaaaacagctctatttaaaactctctattgaa

SEQ ID NO: 204517 - DNA, 443 bp, Glycine max
tatgctgcaaacatttacaatagacctatctaacctctttaacaaaatcaaccacagcagaacaattatgacctctccagcaacagatacaaccctggatggaggaatcaccctaatctcagatggtctagccctcaacagcaacaacaacagcctgctccttccttccaaaatgttgttggcccaagcagaccatacattcctccaccaatccaacaacaacagccccagaaatagccaacagttgagacccctccacaaccttccctcgaagaacttgtgaggcaaatgactatgcagaacatgcagtttcagcaagagaccagagcctccattcagagcttaaccaatcagatgggacaattggctacccagttgaatcaacaacagtcccagaattatgacaagctgccttctcaagctgtccaaaatctcaaaaatgt

SEQ ID NO: 204518 - DNA, 421 bp, Glycine max
agcttcaaaccacagcaacacataatctatgtgtccaaaacccctcaattcaatggcttttctaggtttgaaaggtggaatttataatgaggtaaatttggagcaaattctcacctcacacaagtctataacatcaatctaaacttgctcaaactggatttacacctaaatttccaccgaatcaaaatttgactcctcaacacccaattttgccctagaaatggctcttggttcactttggtcatttgtttttctctctagctcagcctaacctttctcacatgtcctaaatgacatttcaagctagtattaactcactttaacctccatttaccacagaattcagacttagtcttccaactctcaaggtctcactcttttttcactcataacatcacattctcactttctaaccctaggt

SEQ ID NO: 204519 - DNA, 441 bp, Glycine max
  unsure (1)..(441): unsure at all n locations
nnttggagtagaaacatgggaccaacttattntatttcttaaaggaagtcatatctagtcaaggtctgagagaccatacaagtttcctaacgatttctaattatgtgggccattaagtctatcatatgctgacaatagccgagaagcccatgaatctcttcgggggcggagtaggtgtctgccatcgccttggccttggctaacaatcggggaagttcttgactcccgttcaaggtaagagcaaaccgatccatccacatggttgcctcttggtgtaaagagtcgatcacccttcctctagcctctttttccgcgtatacttgggcatactcatccgcgattctatgctcgtgggccatggctagacctaactcttcttggtacttggcgatgatagctaacatgttggtctctgtctcgcataaacgttgagacaagctt

SEQ ID NO: 204520 - DNA, 414 bp, Glycine max
  unsure (1)..(414): unsure at all n locations
agctncacgtctttcttttgcctcnnttctttatctgcaagannngaatatttggatcttccctgatatccaaatgtgaaatcgatataaacttacagcttcggaggcatttatagatatatatcgttgccgctcttaaccacttgttaaatgcaatgcttattagctgagaataccagatttaatcaaaatgtaaatagtcaatgccagagcacattgttcaacactgcaatgtacacactcactctcaaagactcaattttgggccacataaaaagatgtttcagcccaaaatcactagaatcggtatatgcctccatgatcaagactaataccacccaagattgcttcttgggaaacaattataagtgcatgtcaaacctttcatgattaatttgacgcttcagctttgca

SEQ ID NO: 204521 - DNA, 441 bp, Glycine max
  unsure (1)..(441): unsure at all n locations
tgtcatatattatgacagcaaacaacttaatgttccaattatatatgnaattactctaaaaagaaactgggtattggagtagtcttaaaatgaaagagtgtgctataacttactctcacatgtgtatttttcatgttttgaaatggttttatttacagcaatggcgtaagagttcgtggttactttgtgtgggctgcatttgacacctttgaatttcgagcggggttttctcaaaattggggacttattcatgttgattttaaacatgatctcatgcgtcaaccaacaactgctgctaaatggtacaagagattctcgaatcatgtaatttgacactaaaacattcttagatttgattgagaaaggggaaccgatgaaaaataatagtgacagaggcaagggattccatttaaataagtgataatataattgctagtattg

SEQ ID NO: 204522 - DNA, 301 bp, Glycine max
accaaatactgtcttcagccttgaccacctgcaagttatccttattataacacataaagacaagtctcggacatagtaattaaccaccacaaatcacaacacttaaaagggccctcttcctacatattcattgatgatcaacacattaacatacctggataccaatgagctcatatagccggggcacaagaagagccaagctgtatttgggagtgacaccctacggccctccctgcagatgtcatcataacttgcaaataatcatcttacacaatccaaccatactagtaatgcaaactac

SEQ ID NO: 204523 - DNA, 429 bp, Glycine max
  unsure (1)..(429): unsure at all n locations
tatgggagggtctgttagtagattgtgagagtacaattttctatattagtatcttccatacttattatactgtcatttgccagtatgatctttgatataagtttgtagattgttggtaaaatcaattaagattacatgcttacctaaattctgatccagttctattatactgactaatcttattttaagactggttggcatatacatgtatgtactatgtatgtatgcatttgcagactattcaatcaatgttaattgtcttcatttgcagttgttagatagttcacagacattgttaccagcagatgagttgaagaagcgatttgaacaagaaggtgtgaatgtgttctgatggatatttgtaatgctaaatctcttgcatttctttgatctntgtaactctaacgtcataaatttctattgatatgc

SEQ ID NO: 204524 - DNA, 437 bp, Glycine max
  unsure (1)..(437): unsure at all n locations
ggatacatatacaacggcatttttatcatgcattttcnttttgttnccacaacacggtcatatagtggcggcattggagtactcattccagcgtttcacatcaccccggaataatatgtaacttgcaccactcgatggtactctctgaactgtatggaatgataacggagtagagatgtggaagtataatggcattatagtctttctaactttgtgaggactggcattcacgacccttggcaagcctacccttaacaaaaagatggctttttggaaaggtaataatctattgatcaacataatgtctctcaaattaatctgatcataagtcatattcctttagctttaccacacattgaatccaaactccacattatcttataatttcacatgcatatttgcatagtgaccctgcctgggctgatttttttacaaaa

SEQ ID NO: 204525 - DNA, 383 bp, Glycine max
ttcttgaagaggtttctttgaaagaatacttgtgtgtagcctacaaaggcttagagaatactatcttgagcctgtagaggcttaaagaatacttagtggatcctgcagaggtttaaattactaggttgggtgttgcatgtaaaggcaagtaaagaatactaagtggaacttgcaaagttcaagaatactaggttaagaatactaggtgtggagagtttaaaataatgaataccatggttgtgtgtttggtcttagtggaaaaatcctaaacttgtaggtactaaatgttgcccatgttgggatgaactagtataaatgatttcatgtattggatccttctttactatttctcatttatattctcccattgtgtgcttatcatt

SEQ ID NO: 204526 - DNA, 434 bp, Glycine max
  unsure (1)..(434): unsure at all n locations
ntgaaagtgttggtnttcaccttctcgctaagccattctactggcttagcgagcatccgctaagcgcaacactcatgggctaagcacgacgaagactctggaagaagataagttgtacaggtttgctaagcgcaccacttcatctcattaagcgcaccgcttcagttcatccgctaagagagaaaggcacgcgcttagccaaaattcactaatgtgcgctaagtggtccataattgcgctaagcgcacgagcacgaacaaggccacctatttaagcgtgaaatcagattttagaggtggagtttggactgggattcagagctttgcatgtctagagtttctagagagagaaaggtccaagttttagagagttttgagagtttttgttgtgtgaagatctgcagagaccagagcttgagacgagtttgtgagtga

SEQ ID NO: 204527 - DNA, 340 bp, Glycine max
  unsure (1)..(340): unsure at all n locations
agctttgactctctaagttggttgncatcttgaatcacaccaccagtgtcgtcgtgaagcacaccaccagtgtcatcgttgtcgtcgaccattctccatcactgtccggggtaagcttccaggacatcttcctttctccctttctttcttatacataaactctgaggtaaaagggctttgtggcgcccctctttgaatatggttgtatctgcaaccctattctttgcgcaaccatataacttgctgcatttcaaagaaacttgattagggttggaagtatgatggaaccgtgtaaatgcaatgaggcatccattctgtctatgaaatatataacccttat

SEQ ID NO: 204528 - DNA, 437 bp, Glycine max
  unsure (1)..(437): unsure at all n locations
tataagaacaaaattgcctcaatcatttccaaatatgtatgtgaattangaagcatcaacaagaatcaagccaaggctattgtgcaagcaatcaatggggcaaaacacaccaaatgattatgatgatggatggctcaaattctcacaaaggtaaactcatcactttcaaattgagctttcaaaactatcatgacatgtagaggagaatcaaggatttcaagtcacaaaatgtcaagaacttttattttcaaaacaattacccatttcttgaacatatcctataactcaaagaaaaacatgcaaagtcgtacatgcacacaaaattgacccaaaatattaaactaaaaatccgacgaaactaacaacattaacaaattaacacaactaacaaattaacaaaaccaacaaaactagcaaaaccaaagaacactcccccc

SEQ ID NO: 204529 - DNA, 410 bp, Glycine max
agcttgtgtaatcgattacactgatttggttatcgattaccagtggttgtttctgaataaatcaaaagatgtaactcttcaaatggtttttgactttttcaaattggttttaagtttttctaaaagttataactcttcaaaatggttctcttgaccagacatgaagagtctataaaagcaaggctttgttttgtatttttaatcaatctttctaagcaatctttctatcaattcatctcaatcatttctttcaatcatctttcattattttctttcatctctttcaacagttgttctgtttcatcttctcttcatctttctaaaagtttttgttcaaaactttctcttccaagaaaagttctttgttcaaagacatgtgctattcatctttttcattcccttctcccttt

SEQ ID NO: 204530 - DNA, 427 bp, Glycine max
  unsure (1)..(427): unsure at all n locations
tgaaggcanactggatgcattggttaactgggtaacccatctggccttgaatcagaaaattgtacctgttgcaagggtttgtggtttgtgctcctctgctgaccaccatacatacctttgcccttccatgcagcaacctggagcaatcgagcagcctgaagcttatgttgcaaatatttacaatagacctcctcaacctcagcagcaaaatcaaccacagtagaataattatgacctctccagcaacagatacaaccctggatggaggaatcaccctaatctcagatggtccagccctcagcaacaacaacagcagcctgctccttccttccaaaatgctgctggcccaagcagaccatacattcctccaccaatccaacaacagcaacaaccccagaaacagccaacagttgagggccctccacaa

SEQ ID NO: 204531 - DNA, 435 bp, Glycine max
  unsure (1)..(435): unsure at all n locations
gcttcttatccaaggctcatctnggnggttaagctccttcttccatggctaattccctagaggatggcgcctcctctcccctattctcctttgtcttccgctgcatttccatggtggaaaaccaccattaaaggacctcattgaagctcaaagatccagcctccatagaagctccacaagcaagcttccatcaagtggtaatcagagcacaagagcttcaagtaggtgctccttaaacctacattaattttttgctttaccttctcttccattgttttttcttcatttttctacatgtatctcctcacatgtcttgttctaaatgttgttaacatgattctctagagtttgcaccgattaaactcgctatagaagttagaattgattctttatggttcaaatttcttgttcttgttcttgaaccatgaattgtgt

SEQ ID NO: 204532 - DNA, 435 bp, Glycine max
gttaagtattttgcacagatatttttttaaagtgttttttccaacttttaagaataatgaagtcttcatttttatgttgctacaattgactatggatttcaaccaacatttgttgtgtagcagctttcaagttataaaaaagccaagaaaatggaaaaacgtgattttgagaaatggaaatcttctgtgcttgcatccaatgaacaaaacaagaaaggtactgagataattcttgcattttctccttacttgccaacagccaaagataagtgatcctatttgtttgtttttttagcgccttgcaagcgaaccagacagactaatctcaactttctcaacaaagcttccgataatcaaaaagtggaggcaatgtgagatggtattgcttgtgtttatggtcaaatatgattttggtggaagatcagctcattggga

SEQ ID NO: 204533 - DNA, 436 bp, Glycine max
cagcttgcaccttgcttctctcccttgtctttccctcacccaagtgagccactaagtcgtgtaactcggacgagtcgtcatcgtcctcctccacctccctctttcctttctcctctggctaccatcaatccatcaccataagccacgcaacaccgccaccccttctcctccccttacacgtctccacagacgacacacataacagaaaaagacaattgaacatcaacaacgcataactgtcacataacagataacacaaatgaacatcaaataaacaaaggagatcgagagagaggaaagcgaaatataaaaaaaaatacacaggattgaaagatatggggaaaaagagggtctattgtttacgatgaaaccccaaatccgcccgtgagtccatgtcgggaattgaagagtcaaagaacttctgttgctctctgat

SEQ ID NO: 204534 - DNA, 421 bp, Glycine max
aaacaaagagaagagaaaatgaaagatggggttcatcaggtattggggttgtctcctccacctctaagacctcataatcactcacaaactcatctcatgctctcagacggcttcctcttcaagctctggtctctacagatcttcacacaacaaaatttctcaaactcgctggaactaggaccttcttctctctagaactctctagacatgcagaagcttcaagaaaaggccaaactcccttccaaaatccgatttcaggcttaaataggtggctttgttcgtgctcgtgcgcttagtgcaattctgaaccgcttagccgcattagtgaattttggcttagcgcgggcttttctcgcttaatgaatggactgcactggtgcgcttaacgggatggcccttcactcagcgaacatgcacaact

SEQ ID NO: 204535 - DNA, 391 bp, Glycine max
  unsure (1)..(391): unsure at all n locations
agcttataaattaacttaagtttataagttattatatgctaggagtttagaacttaaaaaattataaattaactgattgaagattaattgaactagtttgtaaactggtcaaaataatttatataattacgtactagagtgacttatcagccacatttttgtatcatattgatgtcttttattaattaaaatccatatgattctcaataattaaattcacatgtttaattaagaaatcgaaaccacatgtttaattaaattcacgtaataagagagaatatatcgaaaagagagagcaagagagtattttgatatatcctcattnctcatgttatatggnctatgacatttgttgactatttttgttcacaatcttctcttcaatatatat

SEQ ID NO: 204536 - DNA, 446 bp, Glycine max
  unsure (1)..(446): unsure at all n locations
cctcttcacgtctggaatatgaatgtagcatatatattcaaagattcttatgtgctttgctgatggcttcttcccgttccaagcttcaattggagtcttgtcttttacagacttagttggacatctgttgagtattgaaacagcagtgtagactgcttcagcccagaatgtgttacgtagtcccttctccttgagcatcgatctagccatctccataactgtgcgattctttctctcggacactccattttgttgaggagaatatgcgactgtaagttgtcgctcaatgccttcatcctcacaaaatctttcaaactcgcgagaggtgtactctttgtcgcaatcacttcttagtacttttatccgttttccactttgattttcagcaagggccttgaactttctgaatactccaaagacttatgagtnttcttttagaaaatata

SEQ ID NO: 204537 - DNA, 414 bp, Glycine max
agcttcaacattcaatatcgagcgtttcgatatattactgggctgaatcagacaaccgagtaaaaagttattgtagtttgaagttgctcagagcttcaactttcaatatcgagcgtttcgatatattacgagactgaatcagacatcagactaaaaagttattgtcgtttgaattatctcagagcttcggtattccagttcgagcgtctcgatatattacgggactcaatcagacatctgagtaaaaagttattgtcgtttgaatttgctcaaagcttcaacattcaataccgagcgtctcgatatactacgggactcaatcagacatccgagtaaaaagttattgtccgttgaaattgctcagagcttcggcattcaagttcgagcgtctcaatatattaccggactcaatca

SEQ ID NO: 204538 - DNA, 440 bp, Glycine max
  unsure (1)..(440): unsure at all n locations
attcaaacgacaataactntatactcgggtgtctgactgagtctcgtaatatattgagacactcaaaattgattatcgaagctctgagcaaattcaaacgacagtaactttttactcggatgtctgattgactcccgtaatatatagagacgctcgaaatggaataccgaagctctgagataattcaaacgacatatactttttactctgatgtctgattcagtcccgtaatatatcgaaacgctcgatattgaatgttgatgctctgagaaacttcaaactacagtaactttttactcggatgtctgattcagtcccgtaatatatcgaaacgctcgatattgaatgttgaagctttgagtaccttcaaacaataataactttttactcggatgtctgatngacacctgtaatatatctagacgctcgaaattgaatac

SEQ ID NO: 204539 - DNA, 400 bp, Glycine max
  unsure (1)..(400): unsure at all n locations
agctttgagactcatgtgtatctttggcatcatgaaaacatcggcttgatcctttgtctacaatctccccctttttgatgatgacaatccctgaaatcaagacaaactatatacaagatgatagcacgttcacacaacccttactacccctatcttttggcatgtatgcctaactntacttaatgaaaaaatttctaattgatgtttaacccaagctttctcaagttctctccctctttggcaacatcaaaaagaactaagcantacatacaaaatcctaacaaagccaaacatgaaaccaaaataaagccacacattgtcataaccaaccaaagcaaagtcctgaaatataataatagtgcaagagtacgataactagagcacaaaaagccaatacacg

SEQ ID NO: 204540 - DNA, 457 bp, Glycine max
  unsure (1)..(457): unsure at all n locations
ggacctataaaactaagcttttatccaggcacattcttggtggttaagctccttcttccaangcttattccctagtggctggcgcctccatggtggataatcaccattgaaggacctcattgaagcacaaagattcaacctccatagaagcccctgaagcaagcttccatcaaaattttcctcttcttagacccacttcgatccgttcgccaatgaaaactaaatcggcaaagcttgaaggcgtgtaacccaccatcttctcatagtagaacaccagtaacatgtctactaccattgttatcatttccttttccatcattgggggtcctacttcagctaccagatccctcaacctttgggcatattctttaaaagtttcatgctccctcttacacatgttttgtagttgcattctatccgaagccataagaaaattgtactgatactacctaatgat

SEQ ID NO: 204541 - DNA, 417 bp, Glycine max
  unsure (1)..(417): unsure at all n locations
agcttgtcgctggagctgacccattaactgtcctaactcctttagactggtcgtccctaggctcttgacctcgacttgattgaacctctttttaagtgaaggcatttgacttgatcccatgttttactaaagtgaaacaaaatctagcgtgaatcaaaactctgacatctatcatgggtggaatggatgaatgcatgaagaaatgcatatgacacaaatgcaatttatgaacacgggagcccgggaaattgtctcattcttagatacaacatcttggggtagcaaagtgcccgacgtatgtattaaagaaggtgacacgcgaccgtcgttggttttcctatgtgcgtgatgcatatgcgaaaggcgcaacaccggaatgtacagtatgacaatattcacanaatataagcaaaaggg

SEQ ID NO: 204542 - DNA, 416 bp, Glycine max
  unsure (1)..(416): unsure at all n locations
tgngaggattgatggggacccggtgtttagagaaacgtttatttgtctacgtgggagtacgtgagctcagttggaggtgggcaacangggatggtgggtttgtacatgatttgtggatgtggagaacttgttttgtaccatcgcccgaccgccacctagtaccacatgtgatgggtaccccataatcctacaagcttgaaatgaggaagtgcagaagggtgaaacttcctgcttttattcgttgaccacatagtggtacctggagatatgtcgcgggggtcaggagaccttggggacgtcaggtggggtgctattgcccaaaaccaagcttgaccaatcccgacccaacccgggcatattcagtcagtgagaacctgtgatgtacctaaccgggcgagctcctggcagtcacagat

SEQ ID NO: 204543 - DNA, 390 bp, Glycine max
  unsure (1)..(390): unsure at all n locations
agctntntattttttgtagatgaagatgattccgtggccacctcatggactcctctaaggacaataacatcatttcttgcactgaattgttgggagttagaaaccatcttttcaatcaaattcctagcctcagtaggagttatatcaccaagagctctaccattggcagcatcaatcatactcctctccatgttgctaagtccctcatagaaatattgaaaaaggagttgctcaaaaatctggtggtgaggacagcttgcacacaatttcttgaatctttcctagtactcatacaagctctctccactaagttgtctgatgcctgaaatgtcttttctgatggcagnggtcctagatgcacgaaagaatttctccaagaacaccctctta

SEQ ID NO: 204544 - DNA, 435 bp, Glycine max
  unsure (1)..(435): unsure at all n locations
tgaagtgagaaagtgtggaanagtcagtcttcctacttttattcgttgaccacagagtggtacctggagatatgtcgcgagggtcaggagaccttggggatgtcaggtggggtgctattgccaaaaaccaagcttgaccaatcccaacccaacccgggcatagtcagtcagtgagaacctgtgacgtacctaaacaggcgagctcctggtagtcaaccaataaaagaacaaagaccacaaagcaaggaggcttgtgtggtggctggccagctatggattttgagtgatatctagaatatggcctatggtaatcgattaccaagggtgtgtaatcgattaccaagggtgtgtaatcgattacaaggcttanaaatgaagacatgaagttaatatggcctctggtaatcgattaccaacggtgtgtaatcgattaca

SEQ ID NO: 204545 - DNA, 405 bp, Glycine max
  unsure (1)..(405): unsure at all n locations
agctntgcagaatataatgagaaanttaacttaacattgtgttgttaggcttttcatttttaattgtaatgttagttttagggggaatgtattttaagtaaaatgtgtaatagcaccttttgatattgtaattgtcgttttgctgaaaaatctgtagtacgaagtagcttttgtattgtaataacaccttttgttgctactgccaatcgttgttttgctgaaaaatttgtagtacgaaatagcttctgtagtgaaataacagcttttgttgctactgtcaatttcccatttcatttcaatataatatgttggtgaaatttgtcgttaaatttgcatcttttataatattatttcataaaagaaagagatatatcgtatatcacgccccctatattgtttatttga

SEQ ID NO: 204546 - DNA, 439 bp, Glycine max
  unsure (1)..(439): unsure at all n locations
nggatggataacccatggatgtgcttgtaagagaactatctttgatcaatttactgcccatgggtttctaatgcaggggacaactatgtttaggaggaatggctcgaagaatatgcatactactacgagcagtggtaattgtatggccataatgttggaattttctattccaataattaatgtgggctaatattataagacaattatattagctatttatcattagtgggttttattttatgtgatcaaattaagtgagcccattagacaactaaatcagatgatatgaacataaatgagtagatgtcagtgttagcccattaggggataatggaaaccctattatgttaacacgctataagaaggctatggtccccaatctatcgagctgtcacacagtntctcttctctccatctgaagagttacaaaggtcctatt

SEQ ID NO: 204547 - DNA, 396 bp, Glycine max
  unsure (1)..(396): unsure at all n locations
gagagggacctgggactaacacgagcgtatgtgcttctttttgttctcggaaggcagactaaagattcagaaacagcacaagttctcttgcaagaagcatagaggctaataaacccaaaacgatcactaacactccttggcaccttagctccattccacaaatttgtacttggatcttcaatatcattctttgagcaattaaccactgcatcaaagaaaggatcccttcggaaaacactctgcatngaattcttctttctaatccttgtttcttcatgagtgtgctttctaaaagagcgcgtggtatttggaggaggcaatggtagtactttcaaggaggactcctgcagcttctttttggaattctgcttcttgggaatttcaggcaagtattcc

SEQ ID NO: 204548 - DNA, 196 bp, Glycine max
tcctcaattgtggctcaagccttcaaaattccctgctattttggggaaaatggataacctcaaatccttcttatagatagcactggtataaaagaattgcctcctttcattgtaaaccctgttggactttagaataaagcatgacatcttgctttagcctcaatgaactacctgacaactttgataatgttgcaaa

SEQ ID NO: 204549 - DNA, 409 bp, Glycine max
tgcaatcaagacgacttcattttaatgagcatttttattttcatgataaagacacatgtaatttctgtattgtcattggattcgttgtcatgatggaacccactgttgtttgccaattatttctcctgtattctaaactttagtctgccttctattggttctggaagtcaaatgtgattttttttctttttctttattgaagtttgtggaattactctttaaagtttgcaatgaatattctacatctaacaggacattttcctgttccttcccaatataaacaattccagaatgcaatatctttggtattctactgaattaacttcctgcgttgctggaatcaatgttgcttaccaattatcttgactatccttgtcttgttttctacttttgttatcatgcaaaatta

SEQ ID NO: 204550 - DNA, 415 bp, Glycine max
tggtgatgaatcgccagtgattcatagacgtcttgacgttgactgtgatgcatactgcagagtctgacacaggtgatgactactatgctcagatgagcgtcatagaacccctcatgggtatcaacgatcgcctcatgtgtgtcctgaacagttcaagagttcgagattagagtcatgaaggatcatgactcgacaaaattgttatagtctacactcaagattcagggtgcaagagctcaagaatgaacagcgtgattcaggactcaggattcgagaatcatgagagggctgagtcgagattagtatggataggttttctcacttatagagtagcacatgatcgttctcataacatgttctccatagagttagtactctctgggaatcgagtagcagattggggtgatcgattacc

SEQ ID NO: 204551 - DNA, 427 bp, Glycine max
agcttccttctcctctcggccctgttccttctcaatgtagcttcaatttctaagtccagaggaactaaattgcctgtgggagatctatgcatacaaaatactaatagacacaacggttatccaattcaataagagaagataaatatgaattgtaaacaactattcacaaataataaaagaataaggaataaagaatagatacctaaaaatgaactaactttccaaataaaaagaagttcctcgacaatggcgccaaaaacttgttcgcttccagtaaatgcaccagatcgcgcaattagtataaaatggtaagaatcgagtatcgaactctcggggaacttgtgctacttggtaaagctattttagtgaataggtgtctagtgtgagaagagatgtgtttactatgaacaggtgtgtaaactaccta

SEQ ID NO: 204552 - DNA, 428 bp, Glycine max
  unsure (1)..(428): unsure at all n locations
nntacagcagatttagtaatgacccactaacctagaatttaaataacatattgcctttaacctagggaattaaaaaaaacttaatggctgagtgtaactgaaattgtggcaaccaaaagtcacccccaacagccaacttcagccaccatttggtctcccaaaaggctgatgcctaggttgccaattgggcccttattacaacttgaactaaacctaactaaagcccttttagttgattaacccaaaacatattttggtcagccaactttacaaggattgggccattatttagacaaattaaacactctaaaattgagacaaagtggtgtcattcagtcctcctccatttgggccatgatacaactcacaaccttggacttttctccttgaaacttgggcttgtattcaaatagtatggacagcacttg

SEQ ID NO: 204553 - DNA, 370 bp, Glycine max
agcttggtggtttgggtaacaaaagcctgctttttgggaacaaattttgcagcaagcttcatgtgcttaggatagagtacaacatgaaagtttgtattagagtcaagctgtgaactcaactcatttctagacatgtttttttttttctgatttctcatttagggtcaactatccctactctaattttatttattatgttttaatatttaatcttctatacttttggagatttaatttattgtgttaaatatactatagggagattggagaaaaaagtgggaaacatgagatcaaaattagggagaagggaactgaattttctttaactaaactgaatttagggtgacaaaaagggactcttaatatcatg

SEQ ID NO: 204554 - DNA, 432 bp, Glycine max
attgcttctttaacttcttggacccttgattttgtgttgtttattgttagattctagcatgaaaaccatggtttgtatattttaatcttgcttgtatttttttgggctcaattgcattatctttcgtgtgtaactgcaaaggtcttttgaagaagttttggagattgtatcatatatatgacttttttctctccaacaatttcattggatatgtggagtctgtggccattgatgatggaagcattggaggattgggcaattgatttctttctaagtatggtggtttaggccattgatcaactactttcaactctctttttttcactctgataattaatctcctagtgtatgaataatttgtgggtggcctcttttgattttgatattaaagaaatgagtttatctctaagatagacacagctatggactgct

SEQ ID NO: 204555 - DNA, 432 bp, Glycine max
agcttgaaaggcaggatctagaagaccaattgtctcataagatcgatatgaagaatgtgaacaatgaacgttaccttcaagtgacgttctcaaagcgtcgcatcgagattttcaagaaagcaagtgagcttgcccccctctacagtgtggaccttgctgtgatcttattctcaccttgtagtcgatttttctccttcggtagccccaacatggattcttttatccaacgctatatgatgcaagccccatctcccactcttattctacaacaccatggacgagcataagcttcacgcacacctcaatgacctggccaaccgattagccaaggataagaagcacatagaggatttgaatcatttgttaaaggttgcataggatcacttttggtgggccataccaattgaaagcataaacagtgcccaagtcgag

SEQ ID NO: 204556 - DNA, 458 bp, Glycine max
  unsure (1)..(458): unsure at all n locations
tactcacgcttgaagaagtnttgtcttttacatgcgcaactctcttgagtgacatttgtattgattgttgtattgcgtgttgcatcttagtctctaatttttcatatatgcatcatgcatcatcatgtaggagtaagaagaaaggttctaaagttagaaattttctgttatgtttaaaactctatgttttaattgattacaggttgatcataatcgattatacaagtgtttgtagcttgcagagaagttttcgtatcggtttaatccattacaaggtaatcgtaatcgattacacaattctttttgagacaatgattggttttttagaagtctctgctttaattgattaccaagtgatcataatcgattacttctctctgaaaaatatttctgaagtgatgaataacactttaattgattacatcaagaatctaatcgattacattgttcttgaaagt

SEQ ID NO: 204557 - DNA, 358 bp, Glycine max
  unsure (1)..(358): unsure at all n locations
tgcaaagctggcgataaactgtgtggtgagactttttatgtgtgggaaatttgtctactttgngaagttcgngaaactcgattgttaaccacaactttcgtctcaaatggagagagaacacgataaatgcgctacttcttttggtatctttgtctaaactgcatagtgtcgaattgacctgatcaaaaaatacctattttaaaatagtttcatcatgaacttgtttgcaaaattgcatcctttttaaagttatccaacgatacttattttacacaaaagactttaaattttatacacaatacccctcctagaattgattatagacttttaaactcatttttatactatcacatgactt

SEQ ID NO: 204558 - DNA, 451 bp, Glycine max
  unsure (1)..(451): unsure at all n locations
agctcagatgcaagctcaaggaaaatataatcgnncagattcttanacacttgattatgaaaacccataaatactagatgctttgaagaaatgagtaacgaacctacacgctatcattcaaattctttatgtagaaaactctttgtatattcttataaagtttgaaaagctctcaaaacatcttgaatactctaagacaaaaaactaaatgcttagatttcacatttgtttgtaagatgattaagatttaatcagttagcaaatcaaacaacatatcttcttatttgtatagaaccaacagtggcttggtaggacaaagaatattcggatgttaaagcttggcgactaactttgttgtgagagctaatagtaacagtgactaatacttgtaacttttgtgatattagtgaaactttgatgctaacctaaaactgaacttagcctgaatggc

SEQ ID NO: 204559 - DNA, 430 bp, Glycine max
  unsure (1)..(430): unsure at all n locations
agcttaagatgtcacaatgaactttaaaattatatgttgcttggattcatattgatcaatngaatatntatagcaaaagtattatattattaaataaaacgtaattaatgtattccaatattatattattaaataataaattaataatatatgttcaatgttattgcttgtttgggtcaaaattatttaatgtaggccaacattatattataagtaaacgcctataaaataaatacaacattatattggtttaattgtgttattggcccctataattgatcaaattggtaattataatcacgtcctctagttttgtttactgaaattaaatttttatacttttaaaattaatggaatttagtccaacacttattttaccgtcaaatttctaacaacattaggagacatggatttcattatatatgatatg

SEQ ID NO: 204560 - DNA, 390 bp, Glycine max
  unsure (1)..(390): unsure at all n locations
ttattaanananatgtgaggggtagagggtgtcacaagaactaaaatcaaaaatgagataaactatatgataaaaaatatatttaaatctttttttcattcactatatatacatttacttgtaattggggtaataactttagtattttggttcttcttcctgcttttagtgttntcaaatttcattttttttgtgtggttgtttactttaacaatatgaatttattagcttgaaattcttctgcatctgtatcattatcttaatctagttttgtcctatctgatatgtttgttggcaacagaaatccaatcatgtactcccattccacatttntatttcgcatcttatgatgtcgttgtcatgattaaggaaattcagatgactattgag

SEQ ID NO: 204561 - DNA, 416 bp, Glycine max
  unsure (1)..(416): unsure at all n locations
agcttttaatgatttgataaactntaactttatttctgcaaaaaacccaaacaataaaatgtttgttaatcataagatataaaacataagcaagtctcctactaaactaagatactatcaggaaatacacctatatgagcaatatgctcatgaaaaaactttaagtgcaaacctttagtaaggggatcatctaacatggaatgagtccctatatgttctatacaaatnnnnnntttcttgaattctttatttaacaaccaaatacttatatcaacaaacttttacttgattgaatccttaataagactgctaagatattgtctcaatcaacaccggatggcttttaatgttgcaacaacaatcaagctagtacaataaattagaagtataaattctattatatgtctaacaaatat

SEQ ID NO: 204562 - DNA, 441 bp, Glycine max
  unsure (1)..(441): unsure at all n locations
tcacagctcataagaagacttaaattatccttggntgtgtactgtaacaaattccatatgctcactggatgatgagaaaacttcaaatcatatgaaggaatcaacaacaaaaggacaagaatgaaatagcaagaaacacactaaaagaggggaggggtgaatagtttgcatatcaaaaatataaaattttgctatataaaagagaatatagatagcaatatattaaaaccaggtcatccactaaagatagaactagtatataatgaagatcaaaatgttccttcagtgacagataaaagaaagttttctaaaacattttatcaactaaacactcggtgttaaaaggtgattgaaagtgctataagaattctcaataaatcgtcatggaaagaagtagaaacacttgatttatatangttcactcaacctgagctacgtctt

SEQ ID NO: 204563 - DNA, 412 bp, Glycine max
  unsure (1)..(412): unsure at all n locations
agctttattatttcacaaaactcacttgtttcntcttttctctaggcttatgaagctcaaacccattttctttttttctccacactacttggcaaaacactataccaagttgaaagcgttataacataatcaaacccattttctttttttctccacactacttggcaaaacactataccaagttgaaagcgttataacataataaaacttacctcttcaccaatcacaactcaactccttctgtaacagcaattattttctctttgtggtaattttgataggtgcgttggtgaggaaggaactgttctgttctgttcgagtattgctcccaaaggacctgtggtgctaatccactcgtgctaatccactctcacaggttttagaattagatattattacgcttgatttattt

SEQ ID NO: 204564 - DNA, 401 bp, Glycine max
ggaccttgaaactcagcttgtggacccactctaagctttgtcacattcttttgagtcctatctgtctcaaacatgtttcaaccaacgcatggggtcagccataccttggtaccaggttcggtgtcacacaaacatgccaaacaatggtatatggtaaacaatcactccctttcaacataacttcatcaacacagtgtcctctttactgtcccctccctcttggttctccacttaactgtacttcttctagtatttgccatcgtatttggagaattaggccatgtgaccaaaactatcattagagtgtgcaagtggcttcacccttgtgcctttttagctgagggaaccttcacttaaggaccggcttatgatctggtgcaagcattcaaactaatcactta

SEQ ID NO: 204565 - DNA, 429 bp, Glycine max
  unsure (1)..(429): unsure at all n locations
actagctgagcttgtcaatcaattgatgccatagagttattgttgcctagcatctcacacaagcaaatggtgttgctatcaaccaaccctgccaactcagggcagcaccctttgtcgggctttgacaacttactcccatcctcaacataggtcagacaatctgacatgtttgctagtgccatcaagcagccattgctctccggggccggggccgctgcagtggttttcggcactgaggtcggggcagacatgccacaacatgctagtgcgaggactaatgtgacaatggtggccatagtaacaattgaggccattttgatgttgtgatgtatcttgatatctgatatatattccaaaccctttgtattatatgatgatgagtttgggagagggagtgtgaaaatcangggtgttaattttggcatgtga

SEQ ID NO: 204566 - DNA, 415 bp, Glycine max
  unsure (1)..(415): unsure at all n locations
agcttatagttattggagggagaataaatctttccaaaattaattgtacctttcaagtaacgaagaattctttttgcggcctttagatgaggagaggtaggagcctccgtaaagcgacacacaactcccaccgcatataaaatatcgggccttgtattggttagatagcttaaactccccacaagactcttgaagaccgnggagtctaccttctctccttcatcaaactttgataacttcaagccaccttccataggtgtgttcacgggatcgcaatcaagcatattaaatttcttcaacacttcttttgtgtagcttccttgagagacaaagataccaatctcttgttgcctcactttcattcccaagaaatatgacatgagtcccatatctgtcttataaattacgagacatg

SEQ ID NO: 204567 - DNA, 433 bp, Glycine max
  unsure (1)..(433): unsure at all n locations
tatcccatgcctccttagcggatgttgcatcagatatcttttcattcgcatcatcatctaatgcttgatagatgagaaagagaactttcttgtgtctctttcttggatcctttaaagtctctttttgtgcttgggatagtgaagtctcatcttgcggttccttatagcttttttcaaccatttcctaaacatcatgtgcttcaagaagggccttcattttgatgctccaattgtcataggtgctcccctttagaagtgaaacttgaaaggatgttgctccattgcttgccataactatagagggatttcttatcaaaacctaagctctaataccactttgttggaaaggagaatgttatangaagtatttgagagaaatacaagaggagagaatatttgaaagaaggctaattnttttattacttgagaaata

SEQ ID NO: 204568 - DNA, 432 bp, Glycine max
ggaccttaagcaccgcggctgcaactggagaggtgctttttggaggataagaaagagggagagaaagagagaggggggagcacgaaactgaaggaagaaagaaaggagagaagttcaactttgagttgtttatcacaagactttcattcatcaaagttacaacaagtgttacacatgcttctatttatagactaagtagcttccttgagaagctttcttgagaaaacttccttgagaagcttctttgagaaaacttccttgggaagctagagcttagccacacacacccctctcataactaagctcacctccttgagaaggttccttgagaagattcctaaagaagctagagcttaactacacacacctttctaatagctaagctcacctccttgagatgagaagctaaagcttagctacacacccctttta

SEQ ID NO: 204569 - DNA, 437 bp, Glycine max
ggttgcctaacatgctagtgtattcttctcaattaactcttaacacatcccaacttttaaatcacaccagcaagctcacaaaacaaaaatacaatcttttgtattttctattagtaaatataatatatttataattatcaagaaaatcttgtaagttaaaaaaaaacaaaaaactaaaccaatcatatattttacaattttaataaaaatattttttaaaatttatatttcataattagcaagaaaaaattcagaacataaccacacactagtagataaaataggatcaaaacaagcggccatcgtgtcaattagcttgatgttgtttctaaagaaaattgttcttaccacaataagtttgcctttgttctcaggcagctgagccaatctgagtgctccaactatgttagctccagttgatatccctacctggaaaa

SEQ ID NO: 204570 - DNA, 300 bp, Glycine max
  unsure (1)..(300): unsure at all n locations
ggatccttgagacacctgcggcatgcattctttgtaccaatggttctttgttgatatttatgatganacaaaggcaactgcataaacaatcggacaatattgggaagaagatctatcctgcatgagttggcttgatcaacaacctcatggttctgtcttgtatgttgcctttggtagttcactcattttgaccaaaaccaattcaatgaactagctcttggacttgacctcaccaataaacctttttttgggttgtgcgtcaagacaacaagagggtataccctaatgaattcttggggt

SEQ ID NO: 204571 - DNA, 435 bp, Glycine max
  unsure (1)..(435): unsure at all n locations
ntctattgcattgnggnggggcattgttctagagtaaatgagagggcaatattggaaacataagtcaattcacagaagtgcccatgaacgaacatcttcgcacgtttccacttattttttgtgtctgtctcagattgtgtcaacttcaagcaaattgtcaatgtcactaatcacaatcatcaactcaccttcttcctaagacgatctctgactgagtcatgctaaatttttctggaaattgaatataataaaagaatctgacactgaaaaatacaatatgtctgggaattgagtttttaattcagtttaataacatggtcttttttaattgagtttaataatatggtctgatttattagtggaataacactatgttattattggtgtttgaatataataaatgcctttcgtgtgggtnttcttctttttattttt

SEQ ID NO: 204572 - DNA, 412 bp, Glycine max
atctttaacctcatcgtctctcacagactttagtattgggagccaatccagtccttgtgttcggactctcagccacttatgatagccgccgatgatcccattactgcttcccctaagctctctgtcctttcttcacgccgcatcccatgccttgcgaactccttggagtaccctcgcgttgtggtcactgaaacctcgtgcgatgaaaggcgtgatgctttcgtctgatggcactcctctcatgggacatccttcgcatgaaaatagaatcctgattcttccttccttctagcgagggaaccatttaacagatgcccctccatgctagccaagagatggggcacaacaaacaattcttgcgccgctcttttcacatccccggtcgaacgtgtcatacatggccaaaatggcg

SEQ ID NO: 204573 - DNA, 450 bp, Glycine max
  unsure (1)..(450): unsure at all n locations
ggacctataaaactcagctggttatcctctagtcttggaccttgcatatgctgtttgcacctccatcattccctccctctntgaaaggattcatccttgaatctgattcattacctacatcaaagaaagatagatcaaccacattaaaggtagtacttatgttaccatattctcttggcaagtccaactagtaagcattgtcatttatcttttctagaacttgaaaaagcccatctcctcttggttgcaacttggattttcttttagcagtgaacctttccttcctcatatgaaccgaaacccaatctgctggtttaaaaataactntgatgcgacccttatttgcttgttttgcatattgttcattcttcttctcagtgttggcttaaacttttgcatgcaactctntgatagaatctgcctttttcttaccatcaaaattagcatact

SEQ ID NO: 204574 - DNA, 431 bp, Glycine max
  unsure (1)..(431): unsure at all n locations
agctntntggagtagaaacatgggaccaactcattttatttcagaaagtcgtatctagtcaagatctgagagaccatacaagtttcctagcggtttctaattatatgggccattaagtttatgatatgctgacaatagccgagaagcccatgaatttcttcgagggcggagtaggtgtccgccattgccttggctttggctaacaatcggggaagttcttgactcccgttcaaggtaagagcaaaccgatccatccacatggttgcctcttggtgtaaagagtcgatcacccttcctctagcctctttttccgcgtatacttgggcatactcgtccacgaccctatgctcgtgggccgtggctagacttaactcttcttggcacttggcgatgatagctagcatgttggtctccgtctcgcataaacgctg

SEQ ID NO: 204575 - DNA, 431 bp, Glycine max
tagatgactatcttgtaggagttcttaggggctccctactgcacttggtgctgcatagctgcgacactcgccacagaggtgacataggacctatacttcaaaacatcatccctccgccattcaaagccagcaacggtagaggggacgatggcgacccagaactatggctatgccgcacatggtgggatgccctaatatccccaccaccactttctcttgctcctatagaaacagaagggggagaatcatagtgatcgagatgggctccccagccggggaagcaacagaaggctacgaccttttacggaggttagaagtgcctccaccagtacgacgcaaaaccctcaacctctatgaggaagaggattcactgttagaggccccacgacgagtcttctgtgaggaggaaccactgatggacatgacttctc

SEQ ID NO: 204576 - DNA, 402 bp, Glycine max
  unsure (1)..(402): unsure at all n locations
agctntagttcactgcttcaagtagtgcacatcatgcttccaaaggattacacatttcctaaaggttactataaagcgaagaaaatattgtgtcccacgggtatggagtattaaaagattcatgcttgcccgaatgactgtatattgtacagacatcaatttcaagaaatgtcgaaatgccctatgtacggngtatcacggtacaaactcaaggataatgagaagtgtagtagtgatgaaaactcaaacaagggtcccccaacgaaggtgttgtggtatcttccgatcattccaaggtttaagcggttgtttgctaatggagacgatgcaaaagaccttacatggcatgcaaatgggagaaactgcgatgaaatgcttctttatccggcttattccttgtag

SEQ ID NO: 204577 - DNA, 450 bp, Glycine max
  unsure (1)..(450): unsure at all n locations
aatggctaatgagcagggaaaatgatagtcaatctttagntaaaatactcttttctataggagaatactatgatgaaattntatgtaatataaatccctatggaagcagggcacattttgttgggtagaccatgacaatttgacaagaaagcaatccacaatggtctcaccaatgaaataaccctcacccatggaagcaaaacattcaaacttgttcccttgacaccttcacaagtggttagggatcaattacaaataaaactcaaatgggatgaggaaaagaatagaaaaagaaaaaaagagcaacctttaatggttaaggaggtaagtgtctccacgtcttctcttttgtaaaaggacacttgttagcactgccacacctcttgggcttgaggttattcctcaagtaaaggagttgttggttaaagggttgattcataagaacttaaa

SEQ ID NO: 204578 - DNA, 434 bp, Glycine max
  unsure (1)..(434): unsure at all n locations
agctntatacacaaacgacttttgagatttatcaaacaatgggcagtctaacactcctcgtgctggtcactgcactggcgaccgtattcatccaaaaaattaaattctctaaagaagaaaaagaaaaaaaaggaaagtgtgtgtgattattgattattcgtttcactattatggtaaccgtttgaataattgaatgtaaccttctatttttccaattctgcatgtgagagtattcaatttctcacataaattgagattgtgagaccaaagactttttctttccctacaacgcgacacagcaaatcgaaaccttatcactttcgagatggcggagaaacagctcatcgttgccgtcgaaagcaccgctgctatgggaccctattgggacaccattctcatggattatctcgacaagatgatcaggttctccttct

SEQ ID NO: 204579 - DNA, 135 bp, Glycine max
tcctgcgagttttatcagaatgaccatagaggtatagaccctttggcactaactaggatggacttataccaaagagaggatagcccgaaatggactaaatcatgccaatgtttagccccttacattagggaactg

SEQ ID NO: 204580 - DNA, 388 bp, Glycine max
  unsure (1)..(388): unsure at all n locations
agcttgcttgtggagcttctatggaggctttatctatgagctnctattatgtcctccaatggngatattacaccatggaaatgcagcggaaggcaaaggagaagaggagaggggagacaccatccactagggaataagccaaggaagaaggagcttcaccaccaataattgccttgataagaagcatgaagaggatgctttaatggaggaaaagaaagaaagatgggggagctctaaattgaaggaataaatgagggagagaagtggaactttgaagtgtttctcaaaagactttcattcatcagagttacaacaagtgttacacatgctcctatttatatactaggtagcttccttgagaagccttctttaaaaaactttcttgaga

SEQ ID NO: 204581 - DNA, 445 bp, Glycine max
  unsure (1)..(445): unsure at all n locations
ctaagctgctgatctggaagtttgttcgtaggtatgatgaattacttcnggtatctaattaattagaaattctaaatcctcgtacaagtttttcctactagtccttctactgattaaatgaataaaatattgagtttttttaaagatatttaatgtactttttcatttattacttgagaatgaattctctcatgaggaaacttagtaagtttaataattattcactagttttaattaaccaggctccatctatttatacttatgaagagagagatacaaaatttcaacctatgtgaaaatttgacatgagaggatctattcctcattttctttacatggtattaggaaagttaacagggatagtggtttatcttactcataatatatttttgtaaaccttggggtgtgcttaatacttggtcgaataaaatgggaggaagaagtc

SEQ ID NO: 204582 - DNA, 410 bp, Glycine max
atcttgtctcagcgtttatgcgagacggataccaacatgctagctatcatcgccaagtaccaagaagagttaggtctagccacggcccacgagcataggatcgcggacgagtatgctcaagtatacgcagaaaaagaggcaagaggaagggtgatcgactctttacaccaagaggcaaccatgtggatggatcggtttgctcttaccttgaacgagagtcaagaacttccccgcttgttagcgaaggccaaggcgatggcggacacctactccgcccccgaagagattcatgggcttctcggctattgtcagcatatgatagacttaatggcccacataattagaaatcattaggaaacttgtatggtctctcagaccttgactagatacgactttcttttttaaataaa

SEQ ID NO: 204583 - DNA, 430 bp, Glycine max
  unsure (1)..(430): unsure at all n locations
tcgattnntcaatttgagagtctcgatatattacaagactcaatcggacatctaagtataaattattgtcatttgattntgctcagagcttctgttttcaatttcgagcgtcttgatatattacgggactcaatcgtacatccgagtaaaaagttattgtcgtttgaatttgatatgagctttctttttgaatttgaagcctctcgatatattacaggactcaatcggacatccgactaaaaatttattgtcgtttgaatttgctcaaagcttctgttttcaatttcgagcgtctcgatatattacgagactcaatcggacatgcgagtcaaaagttattgcgggttgaatttgatacgagcctccgttttcaatttggagcgtctgaatatattacgggactcaatcagaaaatctgacttgaaagtta

SEQ ID NO: 204584 - DNA, 390 bp, Glycine max
  unsure (1)..(390): unsure at all n locations
agctttgtaaatactacattanaagcattatctggtttggccagaatcgatatcgtaagcatgtttaacatcaatttttctaaaaatcgatgtatatgactttcaacatcagtttttttagaacccatataaaaaacacttcagaatacataattgtgaccacatttctatattggtttcagttaaaactgatgtagaaaaagatttttatcatcaattttaaaattgatgttaaaaatgtgtacattcaatgacgggcgttcaacattattttagaatcgatgtgaaattctccggagccgatattaaacccttcgtgtagagtggagatggacatactctaaagactacccttaaagaaagacacgtaaaaacttgtttttttttttg

SEQ ID NO: 204585 - DNA, 446 bp, Glycine max
  unsure (1)..(446): unsure at all n locations
ctaagcttagaggcgaatattttgaaggccactatgctnttatagttttgtctataccaccatgcaaattaatgctttgatggacaaatgctttaattccacaaattgtaccttttttatataaaaaacgtatttgtgtaataaatatatataattttttacggtnaagagagaaataaaataaaaagagacaagtgttagataatatacatatatattttttacaacaacaataacaaggtttaaatcctaaattgtggacaaattatcttaatctttcaccactaaatcaaccttaatggattataaaatagttgatatgatgaaggttattaaatttgagagtttagatagactcgtgagagttttatagattcgactcgtgactcaactcttaaacttgtaagagtctacttcatataaaaataataataaaatagtaaatc

SEQ ID NO: 204586 - DNA, 385 bp, Glycine max
  unsure (1)..(385): unsure at all n locations
agcttatgaacactaatgtaaaaatagattgcttttntgaaacacgtaattaatatattttttgtattacaattttatgtatattcgatctctttgttattttctgttgtttttatcttcctttgggtattgtttgtaagtctctaacgtgctgtttaacttgaatgcatagatctaaacatgctgacgtaactttgagaaaacaaatagaatttagttaaaaaattacatattcgtttttagttaaaattattttttatgtatgcgttgaaatgacttgttatactcatttttgttttaaaaaaatatttattttgaacaaaataactaaaaatatttaatataaattaaattttaaataatttttgtcacatgaaaagagatg

SEQ ID NO: 204587 - DNA, 439 bp, Glycine max
  unsure (1)..(439): unsure at all n locations
tatgcgcatatntccctacgaacgttcacttgcacaagacatcctattaactaagaaaaatgcacccatatacaatcaaggtagcttcattacctagagtatttacatgtacttccaaagtgtatttgttatttacatcatacacgccatcttgtcaaaatttacacacatgcatactcaaagcatttcggggtaccaaaaattgcacatgcgctcatcttggtatttctaatatctatacatatacaaacttcatgatgaatcttgactacctacgcaataaggtgctacatttcatgctctcttttttttttcaagtttttgctacctaaagccatatgcaaattcaagcatatcttcctttgctgactaaaatcgtattcaaattagaaggtatatattttttgtaatatgtttccttcacataacatgcaacaca

SEQ ID NO: 204588 - DNA, 411 bp, Glycine max
agcttcaagaatataaaactgaagttttgtgttgtaaaagcttgttcaaaaatgtatcttttgaatgcttgaaagtgagaacacaaggtgggtatagatagagaaaacagttataactgcttgtaatcgattaaatcatcaatgtaatcgataatctcgagaaggtagtcaattagattctctttttaataaattaaaatgttgttgatctcttctaggaacactttcgagaaaaatgtaattgattccccaaacctggatagcattcaagacaatgtaatcggttgcaatcttgatttaatcgattaaagtgttcttgatctcttttatgaacactttcaagaacaatgtaatcaattactataccctcataatcgattaaaccagagactcatgagaacatacatggtc

SEQ ID NO: 204589 - DNA, 441 bp, Glycine max
tatgcaagcgtagttggagataagtatgatggggaatttttattcttccttggacttcaaatcaagcaaacaaatgaacgcatatacgtacattaaaccaagtacgtgaaagaacttctaaataaatttaagatggacgatgcaaaacaaatgaagacccctatgcatccaaccactatacttggactggacaaataatcaaagcaggtggacaaaaaaacatatagaggattgataggatttcttctgtatctcactcgtctatacctaacactatgtttagtgtatgcctctttgctagattccaaaaggaaccatgggaagttcatttatcagctgttaaacgcatatttagatacaaggaactaaacatgggggtagaataaaaaatcttacaatcaacttgcatgtgtttagtgtaacgacccgtctcgtcgctac

SEQ ID NO: 204590 - DNA, 393 bp, Glycine max
agcttcaacatcataccacttccagggtgttggaactacttcacatggacttgatggggcctatgcaagttgaaagccttggaggaaagaggtatgcctatgttgttgtggatgatttctccagatttacctgggtcaactttatcagagagaaatcagaaacctttgaagtattcaaagagttgagtctaagacttctaagagaaaaagactgtgtcatcaagagaatcaggagtgaccatggcagagaatttgaaaacagcaggttcactgaattctgcacatctgaaggcatcactcatgagttctctgcagccattacaccacaacagaatggcatatttgaaaggaaaaacaggactttgcaagaggctgctagggtcatgcttcatg

SEQ ID NO: 204591 - DNA, 439 bp, Glycine max
tgagatgaggaagtgttgaagggtgatacttcctgcttttattgttgaccacagagtggtacctggagatatgtcgcgggggtcaggagaccttggggacgtcaggtggggtgctattgcccaaaaccaagcttgaccaatcccgacccaacccgggcatagtcggtcagtgagaacctgtgatgtacctaagcaggcgagctcctggcagtcaacagataaaaggaacaaagaccacaaagcaaggaggcttgtggtggctggccagctgtgaactttgattgatatgtgggttatggcctctggtaatcgattaccaagggtgggtaatcgattacaaggcttaaaaatgaagacaggaagctaagatggtctctggtaatcgattaccaaggggtgtaatcgattaccaggcttgaaaacgaagtcaggaaactaa

SEQ ID NO: 204592 - DNA, 399 bp, Glycine max
  unsure (1)..(399): unsure at all n locations
agcttctacttatgtggcagggcgggttttcttcactttcttgtctccaacgcgagctctgaccactgtccttccttcctgcggngcttcttttcatgtccgcttgagtgggcttatagcctaaaccatatttcccacgatttccttgcgtttttatcaggctagttatgccgccattgtctttgcctaaacccatcccgggttcataaccgttccccaacataactcgggccatcattaccgccgcatcggacagacaaggttgcccaaagagggagtccacggaggaaatgctgaccacctcaaaagactggaaagcggtttctaacgattcttctgcggcttccacataaggcatggaggatgggcagcttaccaagatatcttcctcgcctgata

SEQ ID NO: 204593 - DNA, 394 bp, Glycine max
  unsure (1)..(394): unsure at all n locations
tgtnccataaaatagggtttgaagtttatcatttaaaatttctactaagtaaatggatcattttcaaggtccaacgccttanaatgatcaccttttaaaataaaaaagaatcacttgataagaaagaactacgtaggtctgatttcctcatcacaaattgaggaatacgtaggagcaaagggaaacacccttgtcgaccacaaaaaaggaaaaatataaaaagggtataaaggatataaggacataaaagggaacataaaaaccaaagtcacgtttgcacattcgattaaaggctgccgtcccttgggacggacgtatggggtgctaataccttncccgtgcgtaaataccaactcccgaacctttcacttaaaagttcgtagatcgcgtcttt

SEQ ID NO: 204594 - DNA, 387 bp, Glycine max
  unsure (1)..(387): unsure at all n locations
agcttgtgcgaaacccatcacaagcatgttcataaccactactccaatcagttncatctcatattttaccattattcttctctaagggcttactgtctaacttagaattctgtatagatgtcgatttcttattgtgatttttccttggaaaatgaacactaatttatagagaaaaaataatgttcctaaaataagaataatcccttaagattgtattgaccttttcgatgattactatcacatcatgttgactggttttcttttaactaaaaaatatgatccatatattatatatgtaaaataaataggctaaatgtgtattgtagtcgaaataggtttcacctctttaaatgcctacataaaaaaataacttttgttttaaaaaaa

SEQ ID NO: 204595 - DNA, 438 bp, Glycine max
  unsure (1)..(438): unsure at all n locations
taaatntatgtctcttaatatataagatacttttaatttcttaactagtagtactcttaggacacttgttaatatttgtttatattagattagatccttataaaaaactttatttatttagcttataataaacatatgtaagaaaaaataatttaaaattttgattggacaaagtctaaaattcgtttattttagaaagacaataataatttcatattttctaggaataaaaaaaacaaaaatcacaatacgctcattttataatttcaaaaatatattttaagtcttatacagtgtaagaatttacctcgatagaagctgtggtgcaaattgtgatcatagtgaaacaacccgtatattcttctaagattgtagaaatattactagaaaatagacttttaacattgattacttttaacttttaacatcgacttttaa

SEQ ID NO: 204596 - DNA, 407 bp, Glycine max
agctttttattttcaatagatgaagatgattccgtggccacctcatggactcctctaaggacaatagtatcatttcttgcactgaattgttgggagttgaaagccatcttctcaatcaaattcctagcctcagcaagagtcatatcaccaagggctccaccactggcagcatcaatcatactcttcttcatgttgctaagtccctcatagaaatattgaagaaggagttgcttagaaatctggtggtgaggacaacttgcacataatttcttgaatctttcgcagtactcatacaagctctctccactaagttgcctgatgcctgaaatgtcttttttgatggcagtggtcctagaggcagggaagaatttctccaagaacaccctctaaggtcatcctagttgaaa

SEQ ID NO: 204597 - DNA, 413 bp, Glycine max
tctagaggaagcctcttaatgaagcttctagagaaagctcatggagctgtctcggtaaaaacgctgccccgccttcattgaccgttggatcttctcgaaatttgatccgcgacttcacaaaacacgtttccatgatctgaccgttgggatctttgagaaaatgtctggagtgtgctagaagcctcttaatgaagcttctggaggaagcctcttaatgaagcttctagagaaaactacgtgaagctgcctcggtagaaacgctgcccagccttcgttaaccgtttgatcttctcgaaatttggtttgcaacttcaaaagacactttaacatgatttaaccgttgggatctttaagaaaatatcgggcgtgtgctacaagctttcgttcccgagagcatctcttatttaagcatt

SEQ ID NO: 204598 - DNA, 432 bp, Glycine max
agcttctggaggaagcctcttaatgaagcttctagattttgctacatgaagctgcctcggcaaaaacgcttcccagtctttgttaaccgttggatcttctcaaaatttggtcttcaacttcacaggacaattttccatgatcttaccgttggatcttctcaaaatttggtcttcaacttcacaggacaattttccatgatcttaccgttgggatctttgagaagatatctggagtgcgccagaagtctcttaatgaagcttctagaggaagcctcttaatgaagcttctagagaaaactacatgaagctgcctcggaaaaaacgctgtccaaccttcgttaaccgttggatcttctcgaaatttggttttcaacttcgcaagatacttttccatgatctgaccgttgggatctttgagaagatatctgcagt

SEQ ID NO: 204599 - DNA, 452 bp, Glycine max
  unsure (1)..(452): unsure at all n locations
ngcaagatccanagtatcactggtgctaccatctgacaacttgtatgcaaaagaccaagaaaacacgtcatgggtttcagcgaagcctttattcgccccggtggtggcagagaacccaacattcacccattcgggaagattgctcttcaagctcactgtctcagagaggatataactcgttttccgtgaggggtggaccaaagaagcgactaagaggctcgtgtcggcgttataggtaatgagaatctgcgctacttgcccgttggcaaacccccacggcgccgttttgacggacttgatggagttcacatcgatgccaatgtgtcggcttgccgggtcccacttttggttatagtaagtgtcgaactcaaccgctacggtttggagtgacatgttctttgagtcactgttgaaagaccaangaccctgctttgattgggcttggacccacg

SEQ ID NO: 204600 - DNA, 416 bp, Glycine max
agcttatatccgccaatggtattagcgatataggtgtttatatatagatgcgttttcggtttaaaaatttgtgagtattgagtgttgagtattcagggtttcagtttaaaaattttctgagaaagctttagcttgaaaatttatgagtattaagtgttaagtgtttgtatttttaaagctcgtctctgaatcaataagtaatatttttcttctctagtattggttttatttatttaaagtaattattttgagtttcaactgacattaattttatttatttatttttctggcattgttttattttatttatttgaagtttgaaataaaatttgagtttcgagtatttctttgtataaatttttttagcttgagggtatgaattttaacattaattatttataatagcaactaaaatg

SEQ ID NO: 204601 - DNA, 420 bp, Glycine max
  unsure (1)..(420): unsure at all n locations
tataagaacaaaattgcctaaatcatttccaaatatgcatgttatttangaagcatcaacaagaattaagccaaggctattgtgcaagcaatcaatggggcaaaacacaccataagattatgatgatggatggctcanattctcacaaaggtaaacttatcactttcaaattgagctttcanaactatcatgacatgtagaggaaaaacaaggatttcaaatcacacaatgtcaagagacttttattttcataacaattacccattacttgaacatatcctataattcaaagacaaacatgcaaatttaacacaacaaaactaacaaaattaaactaatttaacgcaactaacaaaaccaaaaccaaagaacacactccccccatacttaaacaacacattgtcctcaatgtggcacaat

SEQ ID NO: 204602 - DNA, 442 bp, Glycine max
  unsure (1)..(442): unsure at all n locations
agctnttgattttgattggatagaaccttttcttaagctaaggtgtttgatttgatctcatgtttatggttgaaaagttctgtttgaatcaatacttcgatatcctatcatggaggaaaataggatgaatgcatgaagggatgcttatgctacgcatgacacaaatgcattttatggacacgagagcctgaaagatcatctttttttacttgcaacatttggcagcacggtgccccatgtatgcatttaagaaggtgatacggaccttccgacttcccatgacaaaatgaggaggctaaatgcaacacatgcatgatgatgcaatatagacataaatgcgtaataacgcatggttgatagcacaaaaaaggatgtttgagcatggcaatatcatcaaacaaacatgcagcagagacacacatgacatttaaaagattgcctg

SEQ ID NO: 204603 - DNA, 464 bp, Glycine max
  unsure (1)..(464): unsure at all n locations
taataaatcaatctatggcttgaaacaagcctcccgccaatggtatctgaagtttcatgatgtcatcacttcatttggctttgaagagaacatcatagatcaatgtatataccaaaaggtcagtgggagtaagatttgctttcttgtgttatacgtggatgacattttgcttgcaactaatgataagggtttgctatatgaggtgaaataatttctctcgaagaactttgatatgaaggatatgggagaggcttcttatgtcattggcattaaatggaccaagtgggagaatgatgaaatttttggatggcccacgttctgtttcaataagttttttggtttttcccgtcacaatatttttgggaatatggtntctgaatctggtccattttctttccacgttcaatccttatctttgcgatatttagaaacaaccttacgttcctatactcaaacccacattt

SEQ ID NO: 204604 - DNA, 449 bp, Glycine max
taagcaccgcagctgcaacttgacccggaacttacctaacttgttgactttatcttgctacccccacgaacaagagacaatgccgaggaaaagtggaaaatgagacgaaagctttttgaaaatggagtaagaagcttttccggaaaagaaatgccctttttaagggaagaaagttgataggggcaatttcggcatttcaaattttggttgggtgcacctagcaacactcttttattattgtaattttggtccaaactgtttagaagacccatgttttttttttatctttttgttcagatacactatttgtattggttattgttttcaataaaaaaacttttggcattttattaaatttggtgagagcttctctttgggtccttgttgaaccatctcacacttataaggtaatctttggtgcgtttacccttgattatcttcctccctga

SEQ ID NO: 204605 - DNA, 377 bp, Glycine max
tgcccagagaaggagtccacggaggaaatgcttaccatctcttatgactggaaagcggtttctaatgactcctctgcggcttccacataaggcatagaggatgggcagctcaccaagatgtcttcttcgtctgatacgatgaccagatgcccttccactacgaatttcaacttttggtggagtgtagagggaacaactcccactgagtggatcaacgggcgccccaacagacagctgtagggggggttaatatccattatttggaaggtgacttgacaggtgtgagggcctatttgtactgggagatcaatctctcccctaacctctcggcgggtgccgtcgatggcacgaaccaccattgaactctgcttttagtg

SEQ ID NO: 204606 - DNA, 420 bp, Glycine max
  unsure (1)..(420): unsure at all n locations
actcagctttcagcatcctccaccgcgagtcactgggattattttgttttttataganctccattgagcatgccaggcttatcctcaataccattgcctcgattttgcagtctaactctgaacctcttgtcgtcttgaagcttggggaaataaattccatcagcgtcgacatccatgatctggtttggtgcctctacattcaatcctactagaggtttctcctacgcaagcacaacgactccccaaccatagctgatgtctagccttccaccttcgcctttgatggctacttattctctctctcaccgcttcatgtgaattcttcatttaccttccatcctaactcttttcatgatggaatttgatgccctaatatgcacttataacacatgacgtgttcgttcggactaatgcatttcc

SEQ ID NO: 204607 - DNA, 364 bp, Glycine max
ccaggggagctaggttgcttcctccataaggtggagccttccggagaacattctgtaaggcccaagtgggcctgatagctatatgcaccccccctatttactaaatacacccctatttccttgttttgttgattctttttccgtaacgttacggaaacttacgaattacgtaacgatacttgttttctttccgtaatgttacgaaaccttacggatcacgtaatcatcccctttttaccttccggaatgttacggaactttacggattgtgcactaacacttctctttaacttccggcatgtcacggaacttcacggatttgtgctacaaatgctttttttgacttccggcatgtctcacaact

SEQ ID NO: 204608 - DNA, 387 bp, Glycine max
cttgacggtgttgagaagaaatcacatgtatgtcatcatttttaaggggagaatgggaatgtatgtatacatgatcttgatgatgtcaaaagaagaattaaacaacgctcatttttcttcaagattaatacaagattgtttccacaaacaaagccttgattcaagatttcttcaagatcaagccttgcctcacaatgaaagttttcaagtcattcaaggcacatgtaatcgattaccaatggtttgaaagagtgtaaccgattacacatcatatgttattgattaccagagactctgaacgtttggaatccacattctaaatgaagggtcacaactattcaagaaaaacaactgtgtaatcgattacactaattctgtcatcgatta

SEQ ID NO: 204609 - DNA, 434 bp, Glycine max
  unsure (1)..(434): unsure at all n locations
agctttagtagacactgggtgttccttttcttccatatgcaaaagtgttgtatctcaacataattgctttagaagtaatataataaccaagactagaactatgtcaggagacataataatgaatgatacagaaactgaaaaattcactatacaattatctacaaattgtgacatttttggcaaaaagatttttataaacaaggctgacatagtagatttgcaacctgctaaagaacaaatgatcctaggacttgattttattaaacatgataatatattagttactattacaaaagattatctattaatctctacaaactcacaaatgtcaaaaataatagatgaactcacataagagaatcgagcaaagtgtggtgatacccctaccaacactacacctaccctnaattcccaatgtccttttgacatacgtg

SEQ ID NO: 204610 - DNA, 482 bp, Glycine max
  unsure (1)..(482): unsure at all n locations
tacggacactatgaaactcagcttgtatagttgtctgtacaataataccaagttcttttctgcatctttcccctataccccaaaagttttctcagataaactgtaagtatgaatctcactatgtctggctaattcttgtgaaggcaccctcaaggggccttagttatcttcatttggaaaatgcgaatgtgatttagaacccaactgcttgtaaatagtatttttttttcttttcttttgcttgttttcgaaaacctgngattggtaagcctgcaaaggtgtgcccttgataactgtttttgaaaaactatgaaagtcctttttggttaggctggtgcttggaggaaaataagatctacataagacccaaaagtaagtgtgggcagtttgcgatcttcagtactcagcttaatatccaaacaactgataaggacgttgttgaatttttcttaaaaaaaagagtacaggtcatcatatttata

SEQ ID NO: 204611 - DNA, 379 bp, Glycine max
  unsure (1)..(379): unsure at all n locations
agctaaggatggaaaacatgtaatcaggtaatcactctgancnccaaaatccttgggataacaatgggcattgaccaccccctataccatgacttaaccaaattacccaatgacggtgtaccatgtgaaggtacactgaatgacgactggaaatttgatttctctgcccatgatgcccgccagttgagttgcaccaacaatgcggatatgaccggacatcttcttgccgggtcattggctttagaaagccgcatccttcactattcaatagtgcgtatttagcttacacggacttacaaccttgcacagtttctgaggaagatctaataatcatgtgggcctttcttacagggccacaacttgactgtgcacacctagt

SEQ ID NO: 204612 - DNA, 447 bp, Glycine max
tcaacttacaaagagtagttcatgcttagcgcatcttgttcgctaagcgcacttccaagaattcaaaactcgttagagattggcgcttagcgcttcctgccctgctaagcccagcttaaaaactcaagttacagaatggatctggggcttatcacaagatagcacgcttagcactgctacaataaattttttctagagaagaagtggtgcttagtgcatcatccatgctaagcccactgggtaaggttcaattaccatgaagatgtggggcttaacgcaatgatgtgcgcatagctgaactattcagccaaccaatcaggggttgatgcgcttagcacgaacaagctcaacttaatgcgtgaagactgagcgcttaacgcatggtctgctcatatcaaatagatcaattgcaagaaaattctaattacattttctgtctatctcttc

SEQ ID NO: 204613 - DNA, 315 bp, Glycine max
  unsure (1)..(315): unsure at all n locations
aaccaatttataaaaggcggttaataacntttatttctctntcaacacgacaccgccgtgagaattcctatcacttttacacacctataagaataagtcgtgtcgggatacatgcccttaccaaacattaccctaatggtattttaaagagcttgataaagctctgaaaaatggatctcttttcttatatgatttcacacgagagaacgttaacttaaattctttttagatagatttagatcctccatcaacaaacactaactgattcctttgttcaatatagaagttttgatagtttattgttattatacatta

SEQ ID NO: 204614 - DNA, 423 bp, Glycine max
  unsure (1)..(423): unsure at all n locations
acacataaatctcagcttctagactttattggtgtttttgatctccttttttgctctatattgtgggggtgtgctcaaatatatggggcaatcttgatttgatttcttgcttgattacgatgaattatgggttggtatgagatggccctacgcctataatgcattttgaaacaataggacatgccacattgtccccgttctcttgctattgatgcctaaacgcgcgcccaccaagtgttcggtgaaatgcctcactggcattagcgtgtgactttcgtaaggagacaacccatggggtattttggtttgagcatatttttaatatgtattcatttccgaaaaaggctagagnaattgcctcacaattatactatgtctagaaactgaaattttatgcaaaagagctccaatgagtgcatattg

SEQ ID NO: 204615 - DNA, 260 bp, Glycine max
aagaacaaaagctcttaaaatactctaaacatcttgagagaaaagactaagagctcgcttacgggttatattcatctgtgagacgactaagatttagtcagggagcaaatacactttaaacatttcgaattggttacagttagcactgaatcgggaggacaaaaaatactgggtaggccacgcttggtctatagagtcacaagtgaccaaaatcattactttttactgttagaagctaacgaaactttggggtcaaccaa

SEQ ID NO: 204616 - DNA, 427 bp, Glycine max
tggagatgattcttcaatggaggaaaagaaagagtgaatgtgtgagcacgaaattgaaggaataaaggagggagagaagtggaactttgaagtgtgtctcataagactttcattcatcaaatttacaacaagtgttacacatgcttctatttatatactaggtagcttccttgagaagctttttttagaaaacttccttgagaagcttctttgagaaaacttccttgagaagctagaacttagctacacacacccctctcataactaagctcacctccttgagaagcttccttaagaagattcctaaagaagctagagcttagctacacacacctctctaatagctaagctcaccctcatgacaaaaaaacatgaaaatacataataaagttcttacctacaagacttcttacaatgcccggaataa

SEQ ID NO: 204617 - DNA, 390 bp, Glycine max
  unsure (1)..(390): unsure at all n locations
agcttgagaattataaataggtgtaaacctttttncnacgccccanatccgcttctctcctctatccaaccctattcttctatccacattagcctttaaaagcgaaagcctctcatgacaatgagaggctaaaactttctctggtgggagcctagtagccaacacccttgaaatgtaactacttttattatctataatgcaatttatgcttctattgctcctttctgctctaatttttattgaatggtttgatcatcatgcattattttaggggttatcattgaaaaatgattttcctaagaattggaaaaggcactatcaattattactcggaaaaatgcttgttcttcttgatactcgtatcttcatgcatttatatttatcttgcaa

SEQ ID NO: 204618 - DNA, 428 bp, Glycine max
  unsure (1)..(428): unsure at all n locations
ctttgctctgattgttctaatagggttttcaatctttatttatatngagaagagatcgaaacctccattntttagtgtcttcatgcgaagcacttttctctctctgtgaacataatttctcaaattccaaacgatgaaggtgtgaaaaaattgaactgggaacctagtgcttaaatttcacgacgatccaacggttaacgagtttgggattatagttttattggacaggtttttggtctttgtgggaaaagagaaagttacgatgcatatggcatttctcttaccttcaacatttatttgcaagttccaatggtgagaattatcagaaatgagttccgaatctggtgcttaaatttcatggcgaatccacggttactgagtcccagatcgtcattttacttatatacgtttgagtgtatgccggaaaa

SEQ ID NO: 204619 - DNA, 385 bp, Glycine max
taagcaccgcggctgcagcttcttggaaccgctcttgggcttataatatttcaaaacaaatctttcttattactagctattttgaattctttagttccttaatgtgcaaccttcaaattgttgctcatttccctctttatattctgcaaaaaaaaatatcattttcaaagaaaacatggatgaagtcctaaggatgtcatgtacatgtgtatttctgaagatataatatttatattccatcaaccatacattgactgttgattacatgtaatagactttttataacatggttgccccaaattacaattaaaaagcacaactaccaaattttcggaggcctttggttaattagtcttgccttcttctgtacgggggatttgtctaa

SEQ ID NO: 204620 - DNA, 457 bp, Glycine max
  unsure (1)..(457): unsure at all n locations
tcatgatgatgaatcaagttgattcgagtagttctgaggttgtcttatatgatgacaaaaagcccaaagaatgatttcaagattcaagagaagaagaattcaagattcaagagaagaaatcaagaagacttcacaagggaagtattgaaaagaattttcaaaaaacaaacatagcacaattttgtttttcaaaagagtttttctcaaaattttcaaagttaccagagtttntactctctagtaatcgattaccagtttcctgtaatcgattaccagtggcaaagtttgatttcaaaagtntttaactgaatttgcaacattccaattggtttttaaatggtgtaatcaattacaatatattggtaatcgattaccattgtatttgaacgttgaaattcaaattcaatggtgaagagtcacatcttttcatagaatgcctttgtgtaatcgattacat

SEQ ID NO: 204621 - DNA, 418 bp, Glycine max
tgaactctaatgtggggaaattcttttttcttcccacacactgtggaatctccgtccttatccacgccgcaacccatgaagacaacatgggctgctactcatatgtatgcctttgctaaatgaaactaaaggaatttggtgaacccattaccattatttgcggcattcgttgaagaaatccttcctttgcttcagattctatactaaggattgtcgtggagatcctaaataccacccactttttactagatgcaatattggatccaaaaatatcactttggcttaccacacactttatggagaaacaatgccaaggctaacacaaataaggtggctggaacatagacactgcttttacttcttatatgggcacctaaatggaatgctccacttcactaacttaaaaattgtgccttca

SEQ ID NO: 204622 - DNA, 443 bp, Glycine max
  unsure (1)..(443): unsure at all n locations
tagagacgtcatatgatggggccancttttcttttagnacttcaganatttttgaggatttctcttgatgaaaaatataacctgcatcctcttgagttcaaccattcccacttctgcaccatgggatttgttacctggtgggagaagtattattccggccgctcggttggagacacaactatcatgatctccagacttgagagtggttttacacaaccaacggtcgagaatattcgctcaaaccttcaagctcgaggtactaacttttgatttttctaaattgatatgtatttttgcctttcctaatattctcactttcaggcaaaacaatcatgacaaagaacatcgctgaaatatctctagctgatgtgagacccataatacccactggggtgaagatcccagaatggaaactacaagagaagggtactcttctgaactta

SEQ ID NO: 204623 - DNA, 426 bp, Glycine max
  unsure (1)..(426): unsure at all n locations
ctacgctatacctttattntaacccttagaacttcccggccattatttcctttgataaagcaatgtngatgaacaaaggacacttataatccctttttaatcaactgacctacacttatcaagtctaggtcaatattatgtacataaaaaatatatgatattaatttgatacctgaacacgttgaaattgcaatagttccttttccttttactagaatatagccaccattcccaattgtgacctttgagacattagttggcttcaaatccttgaatagagtcttatcatatgtcatgtggttcgtacaaccactatcaatcaaccaactttcacttgtttcactactcaagaagcatgtggccacaaacagttggtcctcttcatcttgattatcaatctgagctccctcacatggcgaattttgt

SEQ ID NO: 204624 - DNA, 358 bp, Glycine max
  unsure (1)..(358): unsure at all n locations
ctcagctgcaagtgaagccatataggcagaacaaattttattacctcgacangncacgctgactctattggccatcaaggataccataatactttggtgcaaggtacttattgtccattctagattattactctcgaaaactttggatctacacctagaaaactaaagatgaatcatttgagaacttcaagactggaaaacacttgctgaaaatcaaactaaaatacaagtaaagagattccgattgacaatggacttgaacttaggtatgaattcttcaaagatctattcacgaacatgggataacaaggcgcaaaacaattagttggactccacacccaaatggtctatcaaaaac

SEQ ID NO: 204625 - DNA, 354 bp, Glycine max
  unsure (1)..(354): unsure at all n locations
agcnttcagcaaattcaactattttatttttttactcggatgtctgattaagtcccgtaatacatcgagacgctcgaaattgaatgttgaagctctcagcaaattcaaacgacaataactttttactctgatgtctgattgagtcccgtaatatatcgagacgctcgaaattgaatgttgaagctctcagcaaattcaaacgacaataactttttactcggatggttgattaagtcccgatatacatcgagacgttcgaaattgaatggtgaagctctcagcaaattcaaacgacaataactctttactcggatgtctgattgagtcccgcaatatatcgagacgctcgaaatt

SEQ ID NO: 204626 - DNA, 325 bp, Glycine max
  unsure (1)..(325): unsure at all n locations
tcagaattcaatttcgagcgtctcaatagattactgtgtctcaatcagacatccgatcaanaagttattgtcgtttgaattagctcagagcttcagaattcaatttcgatcatctcgatatattacgggactcaatcagacatctgagtaaaaaagttattgtcgtttgaatttgctgagagcttcaacattcaattctgagcgtctcgatgtattacgggacttaatcagacatccaagttaaaagttattggtgtttgaatttgctgagagctcaacattcaatttcgagcgtctcgatattttacaggactcaatcagacat

SEQ ID NO: 204627 - DNA, 224 bp, Glycine max
  unsure (1)..(224): unsure at all n locations
cagaccggantcaagcacctgagctgcactcaaagaactttttattttcccacagaaaggccttcatcggaaatctctggagggtaagcctatgttagatcggatggtccctgttggttagtccccactgtttgattgcacgaaaactattggtaacgattgtcagcaagatctccattgcctgacctgcgggctaataatcaaatcagcctgactaaaacaac

SEQ ID NO: 204628 - DNA, 423 bp, Glycine max
  unsure (1)..(423): unsure at all n locations
tgacacctgatccnaactcaatttagaacatgttattcttggcccacgagataaggtgtccctagttacatccaattcaagaattggatgcagctttgagtcttgacgttgaatgtgctacgagatggactactaagcgtgtgtttggattacggctatggaagtgtaatatggttgaacttttgaaacttatgttcagttgtttaatataacttaatctatgtttgaagctttctatattcaagggaaaaggaagagagtattcttaaggtaaatcttagcttgggtgaaagtcaccttaaccaaactgaaaaaatgtttggtaacacgcaacatacctttctgaggtcgatctcattaagtgttatacatgtaccaacctccctttatcttatagttctactcccatatcttctattttat

SEQ ID NO: 204629 - DNA, 350 bp, Glycine max
  unsure (1)..(350): unsure at all n locations
ttaagncacctgcggcatgcagcttctgcccaaggactattataggtgggttaattgaancagaaaaggggccagccccttaggcacttctctttctttcgaatttgcttaggaaaattgtttccgtgaagaaaatccaagccgaggcgctttcgtaacgtttccgtaacgtttccgggagtgaattcgcgaaggttttcgaccgttcttcgacgttcttcatcggtcttcagtcttaaacgggtaagtacctcaaaccaagcctttcaattcattctttgtacccgtggtggtccacatttggtgtcatgtatttttattctccgtttcatttacttataatcaccccc

SEQ ID NO: 204630 - DNA, 260 bp, Glycine max
  unsure (1)..(260): unsure at all n locations
catctagccaagattatacaaaggtgtgacaaatttattcttcttatcctaanatatgggccatcaaatctatcatgtgttgacacccaccgatcagcccatgaatctcctcgggggcagtacacacttaggccatggcttttgcttttgctaacacactcgggaggtcttgactcccattcaatgtaaatgcgaatctatctatccacatactcgctatctggatgtagcgcatcaaacacacttcctcttgcctcttt

SEQ ID NO: 204631 - DNA, 401 bp, Glycine max
agcttgctggagaaacttctataatggcttgtatcttgagcttcaatgaggtccttcaatggtgattttcaacaatggagttacagcggaagataaaggagaagaagttagaggaggcgccatccactagggaataagccatggaaggaggagtttcaccactaagagagtgccttggataagaagcttaaagaaaaagcttcaatggaggaaaagaatgagagagagaggaggagcacgaaattgaaggagaagaagggggagagaaattaaacttcgaagtttttctcagaagtttctcattcatcaaagttgtgaagtgttatacatgtttctttttatagcctaggtcactaactaaatgagattatgtgaatttcatttttatctcatgtgaatat

SEQ ID NO: 204632 - DNA, 393 bp, Glycine max
tctatagaaggttcgttcctaatttctctacaattgcatcacctctcaatgagctagtgaagaagaatgtggcatttaactggggtgaaaaacaagagcaagcctttgctttgctcaaagaaaagcttactaaggcacctgttctagctcttcctgacttttctaaaacttttgagctagaatgtgatgcctctggagtgggagttggagctgttttgttgcaaggtgggcaccctattgcttattttagtgaaaaacttcatggtgccacccttaactacccaacctatgataaagagctttatgccttaataagagcactctgaacttgggaacattaccttgtttccaaggaaatttgcattcatagtgatcatcaatcacttaagttca

SEQ ID NO: 204633 - DNA, 361 bp, Glycine max
  unsure (1)..(361): unsure at all n locations
agctngncaactgttctagttctcccatttttgaagnngnatacgagttctgattccatcacttgataacaacttagggggagtggaaaagcttatattttaacattcaaataaaactccttcacacagtcacatatatcctgaccaatgacttcccagtattcccaatgactattatttcaaacttgaacatgtggaagatgtatttgcccaattcattatttgttggtaccctgcaatatttgggaagncntgaagctttgtgggacgacaagaaaaacttgtctaattgggatgtttttgttcttcacacccaaaccttaatnnncntgtgaaacagactttaaatatcatcccattt

SEQ ID NO: 204634 - DNA, 338 bp, Glycine max
  unsure (1)..(338): unsure at all n locations
tgtntgatgcaaccatgaaggttacagcccttaagcaatccatccatgacatgatcgctcatgtgggtaaggctctagctgccgtggaagagctgagaaagttccttgtggctgattcattggaagaagtgaacagaaaactggacaagttctacatggtcctcatcttgagaagcttacacttaaactttgatcatgtgtgtgatcaagtacttgctggggaccaggttccatcaatggattccctcatcactagacttctccgcgtgcctcatgtatcgaaggatgaaaatcctgctgatagtatggagacgtcagccatggttgcatctcgtggt

SEQ ID NO: 204635 - DNA, 394 bp, Glycine max
  unsure (1)..(394): unsure at all n locations
ggacaatggcaaactgaagcctttattttttctttgtgatgccccacatcggaaatataatattccttttctttattcccaaatttcctaactgcatttaaacagttttgattgttattcttttaacaaatatttccttttttaatgctcttgattagctataaaccaaatagcataacctccactttattagcaattctctaacggtcaatctgttgaatgtgtagctaataatcatgatatgtggacaggaaaagaaaaagacgttcttcattgttttgctattaaaaagaggactgatatagtcttgaaaagacttgcacaggcagaataataattntcaattcttctcttattatctacttctaaaattatgggcaattgttctgtgatt

SEQ ID NO: 204636 - DNA, 449 bp, Glycine max
  unsure (1)..(449): unsure at all n locations
agcttactggctctctatgttgaacatttatcttgattctgnctgttctccattcgagaatctattagtctaagctcgagcatcgtttttgtcgcactcgagcatagtgacaactctgtggttcttctcctttgccaccacacctaggaatgtttcgtctccttcgcgttgtcttctccttctcgttgtcttcttctccatcgaagctttcttgctctatatgttgtccatttaccttgaagctgtctgttctccatctgagaatctgtttgtctaagctcgagcattgtgttcgttgcactctagcattgtgacaactttgtgcttctattctatcgacaccttacctaggtatgtttcggcctaaacctgcttaaaatatttgatcgcatatatgtctcgcacacttagtgaagataaaattggtagggtatctcatatataacacc

SEQ ID NO: 204637 - DNA, 462 bp, Glycine max
tttggaaggctctgaaatgttcttttcttagagaatgtttattcttgataaagagaactgaaccatcgatatgccccaacaaaaaatagtttgtgtctgggttcttattcttcaatcatttgaaagtggcaccgtgaagtgcccttcgtatcattaaagttcttagatggaggttctatctcaagtttcatacatctaaaaccactatctaagaatcttttgttattgaagactctgatttgcgcacaagcacattaaaaagataattattagtttcctaaaggatctattaagactaactagatattaaaaataagttcacactatatctcatgagaaaaccacgtctatttcctataacaatgaagagactagagcccttgtgacaaaaatatcttcaagttgtgttctcgaaatttcataaaaatatgtttaatttatttttcgattttctgctcactg

SEQ ID NO: 204638 - DNA, 444 bp, Glycine max
  unsure (1)..(444): unsure at all n locations
caagctacacattgttggcactgagcatgtcctatgactgagtggtttattcatcacagggaattccacagatagtgatataccacaatatccgttgtaattgataaaattatcttattttttgactcgataaacatagcatacacgtttggagggaggtttgtttcatcatcactacaccaccacattaaaccgacttctagatagatcacatgtatcacctagttactgtgtttaagttagatcgaaatttttaggcatatgttttattttatattccacacaaaataaaaatataggnttaccagtgtttgtattggaaatacccgctccttgataaaataaggccacaatggaaatttattatactcttggaaagacaatagcgaaattacccctaacagtattggatgtttatatggcatgggggagtgctttgtcaat

SEQ ID NO: 204639 - DNA, 445 bp, Glycine max
  unsure (1)..(445): unsure at all n locations
ntacaaatgggtaaaaggctcacattcactatcttctacatcatattcatacttgtccaaataaataataaagacatctcgactcaaagaaagtcatataagtctcatacaattaatatagaacctatatcctaatgtcacatcctatcagagcgtggtgttcccgtgtcctctagcatgaggttcttcatagtcatccacctattcatctgctcccccgaacacaaagttcaaatcatcacaggatcgaaacacaaacagcaaaccgggagtgagttatcacattgctaactactagagagaaacaacacaacatatagtaaccaaatacgatttacttagcatatctcacattattctatcactttgtcactcatcgatcacacttttcattcattaatcacaacctttcatcatcaatcattatacaccaggatcacacact

SEQ ID NO: 204640 - DNA, 410 bp, Glycine max
  unsure (1)..(410): unsure at all n locations
agcttgganaggatgcttcaatggaggataataaagatggagagacagagggaggggggagcacgaaattgatggaagaaaaagggagagaagttgaactttgagttgtgtctcacaagactctcattcatcaaagttacaacaagtgttncacatgcttctatatatagactaggtagcttccttgagaagctntcttgagaaaacttccttgagaagcttctttgagaaaacttccttgagaagctagagcttagctacacacacccctctcataactaagctcacctccttgagaagcttccttaagaagattcctaaagaagctaaagcttagctacacatacctctctaatagctaagctcacctccttgagatgagaagctagagcttagctacacacccccta

SEQ ID NO: 204641 - DNA, 361 bp, Glycine max
atactcagcttgcttgggagcttctatggaggctggatctttgagcttctatgatgtcctttaatggcgattctccaccatggagatgcagcggaagacaaaggagaagaggttagaggcggcgccatccactatggaataagccttggaagaatgagcttcaccacccagatgagtctgggacaagaagcttggagaggatgcttcaatggaggaaaagaatgagggagagatagagagaggggggagcacgaaatttacggaagataaagagagagaagttgaactttgagctatgtctcacaagactctcattcatctatgttacagcaagtgttacacactcttctatttatacact

SEQ ID NO: 204642 - DNA, 269 bp, Glycine max
gacccaatcaccgaagcagcaacaaggagcaggtctgttagtttacaccacaacccagccgggcggttcaaaagagagcagccgaactcctgagcacacacaccgcaattgaaaagactcaacaggacaccgcaacgcgaggtcacccgaagggacacgaggcgacccacaacgcaccgtgacacgccctgctatccgaggccgaaaaacggggaaggggaggacgggcgttccaccaccacgaaagacaggggggcaactcgacggag

SEQ ID NO: 204643 - DNA, 191 bp, Glycine max
atctgcaggttcttctctggaagacagtagattcacctatggctactataaggcttaaataattgttggaatctcgcaaattttttcctcgcgacaactctggtagaacctgacttggaatcaccttcttttactatatatcctcactagctaactatttcgctgtgtctcttagattatccaaatgggct

SEQ ID NO: 204644 - DNA, 381 bp, Glycine max
  unsure (1)..(381): unsure at all n locations
tttgccaaccnctttaacatacaaaagatgcatagtattttactctagcaatcacanataagtcaaaaactaactacatgcaatgatgaacaaaaaaaatgattgagaaaataaagaaaaagctaggctccctcccaataagtgtttatttaacgttactagcttgacatatgttacctctaagggtcctgtaattgcaaaatggtggtcaatttctcaatgtttccaccgtggcatagcttcaatatctggccattcactatccatggtatattcatagtatctgactaacggtcaaataatttcactgctccataatgcttgacatccttgacggtgaacggtccataccattataactttaacttgcctggaaatagc

SEQ ID NO: 204645 - DNA, 365 bp, Glycine max
  unsure (1)..(365): unsure at all n locations
ntagcttctctagcttctaaggaagtttctcaatttatctttaaggaagatttctcaaggaagcttctcaaggaagctacctagtctataaatagaagcatgcgtaacacttgttgtaactttgatgaatgagagtcttgtgagacacaactcanagttcaacttctctccctttttcttccttcaatttcgtgctccccccctctctctttctctccctctttcttttcctccatagaagcatcctctccaagctttttatccaacgctcatcttggtggtgaagctctttcttccatggcttattctcttgtgccaaagctagaggtttgttgaataatccccttcacctttcatttcatatt

SEQ ID NO: 204646 - DNA, 369 bp, Glycine max
attagctgaacctattttttatttaacacacgttgagctttattcagaaaattagagtttatctcttttatcttagggagagtgattctcctaatattctagagtgattcaagaacacccttggttgttcaaaggactctcacaacctttgtgtgttgccctcgctggaaaaagtgattctttcctatctatcatctccacccttgtctttcaaccacatttccgaaaatccactctgccaaatattttgacatactcctttacacctcaatttagtgatcttgagcctaagggaatttcaaacgaactttcacttgtttggatcacctatttgggccctgttctttccgtttggcattttttttttct

SEQ ID NO: 204647 - DNA, 446 bp, Glycine max
  unsure (1)..(446): unsure at all n locations
tggttcgaggtacttacccgttgaagatcgaagaacgtttattaacgaatgaagaacgtcgaagaacagtcgaaaccttcgcgaaattcctcacggaaacgttacggaaacatttcggaagtgcctcggcttggattttcttcacggaaacaatttttccaagcaaattcgaaagagagagaagtgcctaaggggctgaaccctttttcacttcacttctccccctatttatagaaaattgggggagaagcttgccacccagctcgcccaggcgagtagggttgcttcctccagaagcaacagccttctggaggaatcttctggagggcccaagtgggcctggttgctatntgcacccncatttttactaagtacaccccctaccttntttttggtgattctnttttcgtaaagttacgaaaacttacgaatttcgtaacaatact

SEQ ID NO: 204648 - DNA, 328 bp, Glycine max
aagtcacctgaggcatgcaagcttttatacaagaaaagagctttacttcacgtatctgcaactctcactataggaagaggaatttcataccacaccacccccacgtcacttttagtattcataagttacaattttctatgtaacccactatgggttgtttcacaagggagaataaaatggcacaacatatcgaaatggatacaatagagattctaccaccctctaggggaactttccagaatccttaaggaaagtagatctccttttctgttgacgactttaaacttttccctcttacaaccaaataaacaagtatttttgactaaag

SEQ ID NO: 204649 - DNA, 111 bp, Glycine max
acataaaactcagcttcctcccgggctgcgacgcagtgttatttttttacacacacgaaacccgggcggtttaagggagatcaacacatgacctcccctccctccatattc

SEQ ID NO: 204650 - DNA, 383 bp, Glycine max
  unsure (1)..(383): unsure at all n locations
agcttaagctccttcaactgcacaaggttttttttatttgaagagtatccttgtggaaccttcacccgatgaagacactgacaaaaacttatcttctccttttaggacaaagtatgacaagctgggggcaaataaattttcttcccatcagaccttggatgcaactgtaatcgtatccccattttagctaaatcttaacgggtattcaagccatcctttgtcttgccttgaatgttaaggagcatcccaatcacactgncacatacatttttctctacatgcataacatcaatacaatgtctaacatccagatcagaccagtagggaagatcaaagaaaatagacctcttctttcatatgcaagtcttacatttatccttctt

SEQ ID NO: 204651 - DNA, 446 bp, Glycine max
  unsure (1)..(446): unsure at all n locations
tcaacatatgtaagggaattatgtgcaattacaaccgttgttaagaggtggaggcaatacttgctgggtcatcaattcattattttaaccgatcaccggagtcttaaagaactcttaacccaggtcattcaaacccctgagcagcaaatgtatttagctagactcatggggtatgactattgcattcagtatcgttctggtaacactaatttagtagcagatgctttatctcgaagaatggaagcaacagagagtactctgttattattatcagtcccttgcctaacatttttggaagaactaaagaagcaattgaatcaggaaccctcttttgtggaattcagagacaacatcaagactaatcccaccaaatttcctgattattcagtttttaatgatttagttntgcagggaaatcgtatttggctttcacagggcattccctt

SEQ ID NO: 204652 - DNA, 443 bp, Glycine max
  unsure (1)..(443): unsure at all n locations
agctntttggagtagagcatgggaccttctgtttatttcaacaatatgtcgtctccagtcaaggtctgagagaccatacacgttgcctaacgattcctaattttgtgggccattaagtctataatatgctgacaatagccgataagcccatgaatttcttcgggggcggagtatgtgtctgccattgcctcggccttggctaacaatcggggaagattttgactcccgttcaaggtaagagcataccgatccatccacatggatacctcttggtgtaaagagtctatcacccttcctctagcctctttttccgcatacacatagggcatactcatccgcgattctatgctacggggccgtggcttaacccaactcttctcggatcttggtgatgatagccaacatgttggtttctgtatagcataaacgcttagtacaacttt

SEQ ID NO: 204653 - DNA, 307 bp, Glycine max
  unsure (1)..(307): unsure at all n locations
tgcttgtggggcttctatggaggctggatcnttgagcttttatgaagtcntttaatggtgattttccaccatggagatgcagctgaagacaaaggagaaaatgtgagaggaggcgccatccactanggaattagccatgaaagaaggagcttcaccaccaagatgagccttggataagaagcttggagaggatgcttcaatggaggaaaagaaagatggagataaagagagaggggggagctctaaattgtacgaagacataaggagagaagtttatcttttagttgtgtctcacaatactcttttt

SEQ ID NO: 204654 - DNA, 319 bp, Glycine max
gcgaaaaaataaaaactgctacacctttgttgtccccgcgacgtgaagaaaataattaggaagcaaacaagaaatggtgctagcactagaggcatcatcatctgatgagaagtcttctccttgaagaccatatatcagagaggtggaactcaatgacaaagacaaactgataacaataaaaccaaaacacgggctatcaaacaagagagacaagtaccggagagaaacagaggggtcactactatctaagcacttggactacactaaatgtgtgctcggtctctctcctagaatgaagactattaaacctacttctacc

SEQ ID NO: 204655 - DNA, 350 bp, Glycine max
  unsure (1)..(350): unsure at all n locations
gaaccttcacttgatgaagacactgacaaaaacttatcctctcctttttggacaaagtgtgacaagcctggggcaagtaaattttcttcccatcataccttggatgcaactgngctcgtatccccatgtcagctatatcttgacggatattcaagccatccttcgtcttgccttgaatgcttaggagcgtcccaatcacattatcacatacatttttctccacatgcataacatcaatacaatgtctaacgtccagatcagaccagtatgggagatcaaagaaaatggacctcttcttccatatgcaagtcttactcttatccttcttttggtctttccacatacaatat

SEQ ID NO: 204656 - DNA, 430 bp, Glycine max
  unsure (1)..(430): unsure at all n locations
agctcgtctcatcgtttatgcaagacggttaccatcatgctagctttcatcgccnagtaccaagataagttaggtctagccgcggcccacgagcatatgattgcggacgaatatgcccaagtattcgcggaaaaagaggctagaggaagggtgatcgactctttacaccaagaggcacccatgtggatggatcggtttgttcttaccttgaacgggagtcaagatcttcttcgattgttagccaaggccaaggcgatggctgacacctactccgcccccgaagagattcatgggcttctcggctattgccagcatatgatagacttaatggcctacataatttgaaatcgtaaggaaacttggatggtctctcaaactggactagaacaactctcttttgaaataaaggagtaggcccatgtttctctcc

SEQ ID NO: 204657 - DNA, 447 bp, Glycine max
  unsure (1)..(447): unsure at all n locations
atctgaagaactcgccaagcgcacttactgcactatgttatttcatctnttgaggatgaacactcatcctcttgctgaactacctgtggctaagcgaggctgaatcgctaagcccaggtaacttaaccatttttttttgtgatagccacatgttagacaagtggcctcagatatcttaagaaggggggttgaattaagatatcccaaactacttccccaattaaaaatctatttatctttttattcaaattataaattcccttaacaatgaacttcttaaatattgattcaaataaaacaagttgaatatgaatatcaagcaataataaataaaggagtttaagggaagagaaagtgcaaactcatatttatactggttctgccacacccttgtgcctactgtcagtccccaagcaacccgcttgagagttccactatcctgtaaat

SEQ ID NO: 204658 - DNA, 404 bp, Glycine max
tttaccagtgggacactactctcaaaacaaaaatggcatacaacctcctcccatgaatacaaacatcaatgtaaatttatagcatgcttatgcgcatatttccttacgaacgttcacttgcacaagacatcctatcaactaagaaaaatgcacccatatacaaacaaggtagcttcattacctagattatttacatgtacttccaaggtgtatttgttatttacatcacacacgcctccttggctgaatttacatacatgcatactcaaagcatttgcggtaccatagactgcgcatgcgctcatcttggttttattaatacccctacatatactaacttcacgatgaatcttgcttcctacacaatatagcgctacagttcatgcttattttcaagtcttgct

SEQ ID NO: 204659 - DNA, 473 bp, Glycine max
  unsure (1)..(473): unsure at all n locations
acacattactcaagcttattgagttttttcctctcaatattccttgatttgcttttgttttgtggcttcactactaaaaaaaatagnttcttatgatgcacattcgacgacaattgctcataaaccgtcttagcaagtaagacggtgataattttgtaaatataaggtttttcaacgaagacgatcttattaaaactgccttgtaaattaccattccacgacattctaagacagttttgtaaaaccgtcttaaaagggagtgtgtttttaatgtttctccctctactcttttctcactctccgacttcccttcttctaactcttggttcctcttctttccatctccctatttgttctccttcttacttctcttctttcctttctttgccactgtatctattacgtaaatacaaactcaatacaaattgcgtatggttgtattttctttccctcttataacacagaaccctact

SEQ ID NO: 204660 - DNA, 428 bp, Glycine max
  unsure (1)..(428): unsure at all n locations
agcttgccgccacggagatttccgactattctcttgtgtggnggaacaagctacataaggagagagcatgaaatgaagagccaatggttgatacatggacggagatgaaaaagatcatgaggaagcggcttgttccggctatttactcaagggacttgaaattcaagctccaaaaactaacccaaggcaacaagggggttggggagtatttcaaggaaatggatgtgctcatgattcaagcaaatattgaagaagatgaggaggtaactatggctcgatttcttaatggtttgactaatgatatccgtgatatcgntgacctgcaagagtttgttgaaatggatgatttgtcttacaaagcaatccaagtggagcaacaattaacaaggaagggagtggctaagaggagtcttaccaactttggttct

SEQ ID NO: 204661 - DNA, 391 bp, Glycine max
  unsure (1)..(391): unsure at all n locations
ntgagccaaaatcctgactcaccataaaccttgattattgtgttattgtcaatccttaccctcggaagcaaaaaaagaatagaggggaaatttccaatcaaagataaagagaaggaaaatntccaatgaatgctaaaaaagaaaagaaggaaaattccccaatcaaagagtgggagaaagcaaaaaaagaaaagaaggaaaattccccaatcaaagagtgggagaaagcaaaaagaaaagaaaggaaaattcccaatcaaagaatgagagaaagtaaaaaaggaagaagaagaaggaaagaaagctcctgatcagggatcgaatgataaacagaagaaatgtgcagagaggtctttggaccggacaatatatgaacaatacagaattgtca

SEQ ID NO: 204662 - DNA, 422 bp, Glycine max
agcatggactacctgagttttggtaacttttctttcctcaggcgaacccaaacccaatcacctggttcaagcacgactttctttctgctattgtgggcttgccttgcatagctcgcatttttctttacaatttgaaccttcacttgctcatgcaacttcattacatactcagctttagcctgtgcatccttatgcttaaacatagcaatgttaggcataggccactaatcaagaggaggcaaaggattaaatccatacactatctcaaacggtgaacaattagttgcgctatggacagcccgattataagcaaactctacatgaggcaaacaggctttccaagatttaatattttctcttaaaacagtcctaagcactgtgcctaaaagtctattgcctcctcagttgaccatcaggttggg

SEQ ID NO: 204663 - DNA, 450 bp, Glycine max
  unsure (1)..(450): unsure at all n locations
ntgagccaaaatcctgactcaccataaaccttgactcatgttgagaatgtcaatccttaccctcggaagcaaaaaaagaatagaggggaaatttccaatcaaagaaaaagagaaggaaaatttccaatgaaagcaaaaaaagaaaagaaggaaaattccccaatcaaagagtgggagaaagcaaaaaaagaaaagaaggaaaattccccaatcaaagagtgggagaaagcaaaaagaaaagaaaggaaaattcccaatcaaagaatgagagatagtaaaaaaggaagaagaagaaggaaagaaagctcctgatcagggatcgaaggaaaaacagaagatatgtgcagagaggtctttggaccggacaatatatgaacaatacagaattgtcaccaaatgaacaataaagaaggaaaggaaaccacgacctaaaatggtcttctccctttg

SEQ ID NO: 204664 - DNA, 338 bp, Glycine max
gtagtagcgtgggtctgggagacagaggtcaagtgtttttttatgttctaagacgatgctccgaggacgttagattcggtacgaccatgccctcctgatcttcgctgggaaattggcagtggaggacctctcctacatttacactacgagcatcatgaagacctttacggatgtacaagctctataactgggcctaggcttgacagatctaccttttgttaaagcctctgaggcttgtgtggcagattttacaatacaaggatctttattcatctgatcctacgtctctacccattctaatgcattggtatgtatagcttctttatcagaaacggctg

SEQ ID NO: 204665 - DNA, 259 bp, Glycine max
cttcaaaaactcactcttttaccacttataacaccatatattcactttctaaccctagggtaactctacccttcttctctaacagttttccataagcaatgtcagcacataaacatcacaagcatcatcataaaaaccctaaaactgaatgggtcaacttaactcattcaaacatggcaagtgcaacatgctctcaacaaatttcttcacaaataactatcatgaagcataaacctatgcaaactacccatcttatctc

SEQ ID NO: 204666 - DNA, 437 bp, Glycine max
tcaggctgctcaattgctccaggttgctgcatggatggtgcaaatgtctgtatggtggtcagcagaggagcacaaaccacaaacccttgcgacaggtacaaatttctgattcaaggccagctgggttaccaggttaaccaatgcatccagtttgccttcaagcttcttagtttcagatgatgcagatgggtttgtagctacctcatgcactcctctaatgactatggcatcatttctggcgctaaactgctgggagttggaagccatcatctcaattaaatttctggctttagcaggagtcatgtcttcaagggctccaccactggcagcatctatcatacttctctccatattactgagtccttcataaaaatattggagaagaagctgttctgaaatctgatggtgggggcaactggcacatagtttcttaatct

SEQ ID NO: 204667 - DNA, 454 bp, Glycine max
  unsure (1)..(454): unsure at all n locations
gggatcttaagtcacctgcggcatcaagctnttggagtaaaactgggaccatctcattnatatcaaaaagaaagtcgtatctagtcaaggtctgagagacctatacaaatttcctaacgatttctaattatgtgggccattaagtctatcatatgctgacaatagccgagaagcccatgaatttcttcgggggcggagtaggtatccgccatcgccttggccttggctaacaatcggggaagttcttgactcccgttcaaggtaagagcaaaccgatccatccacatggttgcctcttggtgtaaagaaacaatcacccttcctctagcctcttttttcgcgtatacttgggcatactcgtccgcgaccctatgctcgtgggccgtggctaaaccttactcttcttggtacttggggatgatagctagcatgttggtctccgtctcgcataaac

SEQ ID NO: 204668 - DNA, 441 bp, Glycine max
  unsure (1)..(441): unsure at all n locations
ntacagcacaacaacacagaatctaggtgtctcacacctttcaatccaatgggttntctaggtttgaaaagtgaaattgagaatgaggtaagtttgaagcaaactctcacctcacacaagtccataacctcaatctaaacttgctcaaactgaatttacacctaaaattccactgaatcaaaatttggctcttcaacacccaattttgccctagaaatggctctttattcactttgatcatttgtttttctctctagcacagtccaagctttctcccaagtcctaaatggcatttcaagctagtattaactcactttaacctccatttaccacagaattcagacttagccttccaaccctcaaagcctcactncttttccactcatagcatcacattctcactttctaaccctaagttagttctacccttcatctctaaca

SEQ ID NO: 204669 - DNA, 204 bp, Glycine max
caagcaccgccgctgcagctaacagacggggcaattattttttttatggggcgccacagcgaaataaacggtaaaacctcaagcaaaccaattgaacatgggcaaccccttacagtagattgttttattgttgaagaaggagtctttcaatgaaatgaaatagcgactatccttccaattcatcccgaatccaaacattcataa

SEQ ID NO: 204670 - DNA, 359 bp, Glycine max
  unsure (1)..(359): unsure at all n locations
accttgatgtcctaccaagatctgaccatctgaaatttctaacaaaggaatgtgacgagatgggtgccactataatctatgcaacacatatattcgatggacctgaggattggccaacaaatattgaacgctcatgctccattctgaccactntttatgtcaacgtttaagcataggccttcatcattcttaatgtccattttatccaggctatgtaccccaagggaagctgcactctcactgcctatggcacagcataaattaccaatgtgctctaatgcgtagtgctctccttatttttaacttaaaaacaatcgtacaatatgatcccccctccctgttcgaatgggtaacaaata

SEQ ID NO: 204671 - DNA, 399 bp, Glycine max
  unsure (1)..(399): unsure at all n locations
taaaactaagcttctagcagagcagcagacacaacaataattttatctcgcgtttctctgaccctattattattattgaaattatttttcattcgacagtgacagatagaccctcatggcgggtcactgcttcctctctctcctctcaattatggagggattggattggatgcatagcctggtgcaaccagtgccagaaaaaaaaacaacaaattcgctgaaatttcattggaatcaaattttcgagccttactntgaatttgaatctagacaccctttcgtgaaaagaagaaccagtagtaccttctaagctactactttattggtcatttgcttaagtcgttaatttattgttcttgcttgggataaatatattctattgaataaatgctcactacc

SEQ ID NO: 204672 - DNA, 304 bp, Glycine max
gggcaccaaacattatttcacgcggtaccaaatggtgaaacaaagaaggtagccgcctttgtgaaaaataaattgtctttttctcatcctctgagttaaaagccaagtcaagctctaataaagaaagaggcttactttattttcaatttaaaaactacttgttataatcaaattactacaaacaaaccataaaagtactttaaataatggggactgtatactaaatgataaacaggtggactaataattctcccgccccaaagaatcgtaatagagaaccaatatatataactcaaataatctg

SEQ ID NO: 204673 - DNA, 368 bp, Glycine max
  unsure (1)..(368): unsure at all n locations
actaagcttgatgcttggggaaaacaaaagaagttttttttattgcttgngntaaaaggagcacattgacgaggttgaacatatgctacgcggtctttatgataactgcatgaaacatcacattgatgtgttggttgacaaatctctcacaaaggttaggcatggtatagttgaaatgcatgacctaattcaggacatgggtagagaaattgagcggcagagatcaccataagagccagggaagcgcaagagattatggtcaccaaaagatataattcaagttttaaaacacaacacggtgagtgagctcatgaatagtcgacattttttnttctttttgtctttctcatatgtacatcgtagctaac

SEQ ID NO: 204674 - DNA, 464 bp, Glycine max
gacacttaaaactcaccttgtagatttgcctaggaggctagcactgttcacactgtattcttcacgcaacgcagctataaaacaggggttcaacccaatgcactgagatcgcactcccacacagcttacacccaaccattgcaatcttttcctctattttctctgttgcgaaccacgaatttaatgcataatcatgtgatgatacgatatgatatctgatttagaggaaactcaatatcccctacttatgagccatcaatactatatatccatataaactagcactctctgtgcaaactggcacaccatctcaatatactgtcaccttacattcttctcatattctccatggtaccagcttcttgttggaggaataacaataacgtatccttcccgcgaaccacttcccacactattctggggcatgccctgctttacataacctttcttattcccactcttcc

SEQ ID NO: 204675 - DNA, 423 bp, Glycine max
cgctccaaacccatacaagcagagagagattttcccttcctgtcttggaaaggctagctttggtttgatgtgggttattctttttgtatattctcaactattgttcggcagatgatgatttttgaatatgccttacataagtgattgatgctgactaacactaacaggtggtttgtgtagggggcccttttttatgcttgaacatttcttcacatgaattattaatatttttgaaatatggtagttcttaaatggctggtgaactgattttcaattcttaagcaaaaaattgttgcttatttgattacttaactcatccttttctgcaaatgaccaaattaccccctctcttgttttggataaagaatattaccttgtggcctgtgcagtgaagggataagacaatatcatatgcactattgc

SEQ ID NO: 204676 - DNA, 386 bp, Glycine max
  unsure (1)..(386): unsure at all n locations
cactatcatactcagcttacatgtccgatgaactcaccacgaaacataacttgttccaattgtgntcctcaagcttgaaatcatctttggatatattcttgaaatctttccataggtctntctcagcgttaaagagaatatatgagttagataaaagctaatgatcatcttttctaagagattcaaagtcttcaaaatttacgtcatcttcccgatttaattcaactcctcagaagttgtatctgccatcaatcatatgttggcttctttatcatcttcaccagacaaggtgtcatgtcgatcctcccaggtacccataagacctttcttgtctctagtcttgatgaattttttcttatcttcactctattccatatgtggacatt

SEQ ID NO: 204677 - DNA, 404 bp, Glycine max
  unsure (1)..(404): unsure at all n locations
agctttatcatctatgcgnatatagaatgtatcattttttttcactctctgggcattcgcagatattccatgcattcaagtattctgtntaacgactgtactaaaaaaaattccagctaaattagattgtttctcgctatacttatggatttttatcaaggagaactgcaccgaaggggtgttgaagcaattaatacatacttttttgggaagccaacaccaaaaatgagatttcttttgcgtatttttttttctttgttcagtaaaaatttattattgaaattgtctaggaacatatttcaacaagactattttttatcagatttttgtgaatgcctaaacatattaatgattgtcatattacacccaaaaaactaattttccaatttacggatctatacttc

SEQ ID NO: 204678 - DNA, 337 bp, Glycine max
  unsure (1)..(337): unsure at all n locations
ggtcctcgaaaccaactaatgtaattntcttcccctcccatctgctcctaacaataggtccgacctgccactcttcaatggcggacaccaaactttccatcgcctgtgtggaacgtctcgaggccgccatggccaaactcgctgcaattcaaactttcattgctgcagaccaaacttccattacttcaaaacttgatgccattattcggatattgaataccatggtacctaaacaaccctcttcatcttctgcctctgcgaagacaccacccatgccgtctctgcttcctaagacaatcaactcaacttctttctctgttaaaccaccaccaacagc

SEQ ID NO: 204679 - DNA, 360 bp, Glycine max
  unsure (1)..(360): unsure at all n locations
actcnaagcttggaaaggcttctgggctcttttcagaacggcaatggtcattgagcctntcatccaccgcaaaaagatatttgaagttgaaattctgatactggggacagatgtcgtacacgatgtcacgacatcacgcttcataacatgcagattgtatatgaccgtatgaacagattacacaagtaaataacacaagagaattgttaacccagttcggtgcaacctcacctacatctgggggctaccaagccagggaggacaaccactaaaatagcgctagctcgaagatctaacagtcactgtttacaaacttcttaccgaaccactacccgtgctatctctacctaagagccactc

SEQ ID NO: 204680 - DNA, 254 bp, Glycine max
agcgtaaggttgcacaatagcttcagatttttgcacattaaggccaaggtctgcgtgctggtcctaataggaacataaaccacatattctggcgacaggtgcagatcttttattccaggacagatgggataccaggataaccaaggcatcaaataaccatcaagcttcttagactcccctgaagaatttcgggctacttcatgcactcctctatagacatatacaacacttctggcactaaactgccgggagtt

SEQ ID NO: 204681 - DNA, 395 bp, Glycine max
  unsure (1)..(395): unsure at all n locations
ctcagcttaatcagtaatcatcacctgaataggaggtcttgttttctcattgtgngcaggttccgaacaagcattctttaccaccatatggcttgcctaccaactatacgccacccaatgttgcacacactctcgatgagaatggtgacaactctgcacccatgttcattgagagccaacaaccccaatctaatcatgcacatgtctctcacaccatgggggagacacatgatgcactccaagaccacaatctagttgacttctaaccttacctccgatatgccgctgaagggcatgcgttttgcggcatacccctgccaaacactttggggggccctcaatatctcccacaaccacaacccttgctatttgcgtaggaagagtcctcctgtttt

SEQ ID NO: 204682 - DNA, 346 bp, Glycine max
  unsure (1)..(346): unsure at all n locations
nttgtttatgtgcttactgttgacattaaacagattatgtcttttgaggttgcacgagaatgtagcacacgattaagtaaaaaggaagacaactttgaatatcgctcaggaacaggatgatatccctcttttttattcacaatggagcagggatcatggtggctctacctcaccagttttacaaggaggtagcattctattctattttattttttaaaattttttacggagaactattgattctcttgtccctatttttatacatatcttactgttgaatcacccagtggccatcagatttggaggatgtctatccaagatgggctgcgaactatcactacacctt

SEQ ID NO: 204683 - DNA, 446 bp, Glycine max
  unsure (1)..(446): unsure at all n locations
ggatccctnagtcacctgcggctgcagcttgcattacggtatgatgaatttctcatctttgaccngtgtgaggatgtgcaaggcatcaaagacactctgtcaattgtgaaaggtgtgctgttggatgctaaggacaacaaggaccacaaccctgggttgcgtgaatggctcaggcagaatcaaaacgtatgcctacatgctgaacatgttttggatggatttagattgccacacttcaacatcccatttttaatgaaattaattaaaaaataatttatttcaaatatattgaactgtaataaaataataaattttttttatgtaaataaataattttattaactaaaataataattttagataataacatatattatatattatcttcttaagaaatatattaattaattctttgataaacctaaactaattttttttatacaaat

SEQ ID NO: 204684 - DNA, 427 bp, Glycine max
tagcatccaatatctgctcgggagtatcccctcttactgtatcactatgaacccatttcaccaaatctacaccttcaccaaaatcctcatcaactggtagtctagttgtaaggatttccagcagaacaacaccatagctataaacatttcctggtgctgtgacttgcatagtatatgcatattctgcattacagaagaaatgtaacatgaagcatgctaaacataataaaagttaagagtttaatttttatgcaatgtcagtataattttttttacactctcaatcaattaaaaatcatcattatggtttttaacgtaatattgtaaaatcaacaaactaaccatacatgacgatttgtgattattaaatgatagtgtaaagactatttactatataaagtaatacgaagaatagatggaggaattg

SEQ ID NO: 204685 - DNA, 360 bp, Glycine max
  unsure (1)..(360): unsure at all n locations
ngaataaagagttactattttgcacagaaagcgaagcttctttttctcacagcaagatggatcacgctttgttgatttttggttttcggtcatcggcttcttctgtgcacctttagtggtgaccttttctggaggaggacacatagagttttgatcagggtaggcaatttcctggagtttactctttagagttactttgccacaacatcaagctccttaaattgcttgaatatggtttccatctcttccggtatggtcacttagggctcagataacccttggtctgaaaatactagcctccgcccaacatactgattgaataagtggatggccaagacatattcgatagctacatgccct

SEQ ID NO: 204686 - DNA, 389 bp, Glycine max
gacctatgaaactcaactctatccaagctcatctgggggattcttttctttctggctcatccttaatggatggtgcctcctctcaccttttcctttgtcttccgctgcatctcctggtggaaaataccattaaaggaccccattgaagctaaagatcagcctccatagaatccctctttgtaaacaaccaaaattctcaattgattattttccttgtctgtgattgtgcaattctcttatgtatactagctgaatgaaatagtgtgtaatctctcctctccattttctagtttattttcacttgaacctttccaaccctttctacagttgtgaacatttccaaattctactttgcactttgacataaactattaaggatttacatgtta

SEQ ID NO: 204687 - DNA, 297 bp, Glycine max
  unsure (1)..(297): unsure at all n locations
ctttaacaanntatntatataagaacattatattttctttttcaatacaaacacntaaacaatgacatttgtctaaggaaaaactaagacgaggatacattatgataattattcctgctatgaccatgatgccggcaaagtccacatttatttctacttgctcgttcatttttgtctccttccatctcagaatgcgagttgaaacaggacgaccctttgcagtcctctttctccttggatcaggaccccactgatctccttcatattcttgccacactgaatcgtgttgcaataaac

SEQ ID NO: 204688 - DNA, 322 bp, Glycine max
agcttaacattttgcgctatctattatttgaagaccctgtccatgagccttttatatgtagccttaccttcttcaacccgaaagggatgaccttataataaaaattggcgtctctagctatgaaggtgttcttttcttgcctgaagggtgcatccttatttgatcgcaccccaatcaatgttccactacgctcactcacttgatttctaacgccccatctaccaccccattgctcccggtcaaaagactatcctccttggtgcctgccccactcagcccaatactcctcgtcacattctgtcatcctcctgtgtctctctaa

SEQ ID NO: 204689 - DNA, 299 bp, Glycine max
tggagaaaagcataaaagacaatatagaatagagataattatatttataataataataaatacagagaggtttcctttgtaccagacaatgtctgaacaatgtgcagaattgtcaaaagcaaaaagaagggaaatagtaacaataacttggttaatatcgagggatgcatgaagcaatcaccttcttagttaccaactgtcataccctaatttcgtccggggacctttgcttgatgacatgcgaccattctttggtcctcgtgaggtgcttggcaaccatcattatgcgatatgtgaaa

SEQ ID NO: 204690 - DNA, 253 bp, Glycine max
  unsure (1)..(253): unsure at all n locations
ctgcagcatgcnagcttacaaaccctaagttgaggaggattattcatgtgattactataatcttcgacaactttctaaatgttgcatcaaagtccaatctaaagtgttacacctctgggaccattcgccacgttgaatactctatgtgtcactatgattaccatcaatgcacctcactaatggtgttactctcaaatttaaccgtgaggactattttgctaaacctcatgcacagacacgactatttttaaca

SEQ ID NO: 204691 - DNA, 346 bp, Glycine max
  unsure (1)..(346): unsure at all n locations
cgagaaagaactcatctccaaattcgtcatcagaggaactatctcattgttgcttcaaaaaacttcttacataagaactccttatggactttccatcttttgacttctattatagcatgagccctaccatgaagagttttagcaatcacctccctggttttgaaaagtggtttctcaagaaaacatacatactcttaggatggaagagcaccttatcaggtacttggtcattggcaactacatttctcagctcctcttcccttatcgatgttgtcgcaacctacccttcngcggaagggcgacgcgagggctcacgggtgcgttttccattggaggaacatgctcc

SEQ ID NO: 204692 - DNA, 424 bp, Glycine max
agcttgctctatttttacattgatgtctgtatttattggaggggggttgtatgccatttttgttttaagggtagcattttttggtaaaaactaactttccaaatgtttgcctctccaggaatggccccgaggaagcttgcctcaaagaggtccaggaaggacaaggcggccgaatgaactatttccgctccggagtacgacagttaccactttaggagcgctgtacaccatcagcgcttcgaggccatcaagggatggtcgtttctccgggagcgacgcgtccagctcagggacgacgagtatactgatttccatgaggaaataaggcgccggcggtgggcatcactggttactcccatggctaagttcgatccacaactattcctctgagtttatgccaatgcttggccaacagatgatgcaa

SEQ ID NO: 204693 - DNA, 347 bp, Glycine max
  unsure (1)..(347): unsure at all n locations
tccattcaccgggcttccgaggcttccgttatgcttccgtaaaatantngaaaaccttgggggtgataagggaagataaaaaagatgaaaatcaaatccagcctccatattccacttaatattggtgaaagggaagataaaaaagatgaaaatcaaatccgaaacacttccgtaaggcttccgtaactttttcgtaaaatacgaaaatgggggtgaacttagtaattcgggtgcgcttagaaatcttcttcatttagtctctgggcggcaagcacctcccttttttcctataaataggggagggggagctgtttcaaaatgttcaagaccccttggctatgcatttc

SEQ ID NO: 204694 - DNA, 433 bp, Glycine max
  unsure (1)..(433): unsure at all n locations
agcttatgaacactaatgtaaaaatagatatctntcttgaaacacgtaattaatatattttttgtattacaattttatgtatattcgatctctttgttattttctgttgtttttatcttcctttgggtattgtttgaagtctctaacgtgctgtttaacttgaatgcatagatctaaacatgctgacgtaactttgagaaaacaaatagaatttagttaaaaaattacatattcgtttttagttaaaattatattttatgtatgcgttgaaatgacttgttatactcatttttgttttaaaaaaatatttattttgaacacaataactaaaaatatttaatataaattaaattttaaataatttttgtcacatgaaaagagatgttttgataaactatttatgccattcattttttagaatatataaatatta

SEQ ID NO: 204695 - DNA, 406 bp, Glycine max
tatgcgcatatttccctacgaacgttcacttgcacaagacatcctattaactaagaaaaatgcacccatatacaatcaaggtagcttcattacctagagtatttacatgtacttccaaagtgtatttgttatttacatcatacacgccatcttgtcaaaatttacacacatgcatactcaaagcatttcggggtaccaaaaattgcacatgcgctcatcttggtatttctaatatctatacatatacaaacttcatgatgaatcttgactacctacgcaataaggtgctacatttcatgctctctttattttttcaaggttttgctaccttaagccatatgcaaattcaagcatatcttcctttgctgacttaaacgtattcaattataaggatatattttttgaa

SEQ ID NO: 204696 - DNA, 444 bp, Glycine max
  unsure (1)..(444): unsure at all n locations
agctatgctttacaatcttcccctttttgatgatgacaactcctgaaatcaagaaacacatgcacactttntcctagtcaatcactcttataaatgctccccctttgtttttgaatttatgcttatcttaaaattaaattatttactcatgtgagttcttgatttatccctatttctctccccctttggcatcaacaaaaagccaaagtgtgtatcaaacttaaagtatgcaaatatatcttaaacattcataaaaaatattaaccacaacatgaagtaaaaaccctgaagtaacaatcataaatagattaacttataaaatccacatagtcaaataacatacttgttcaaccaaaccatgcaaataaggaaataatacattatcaaataccatagttatatagagatttattttgataagtcactaacatctattagtcctaa

SEQ ID NO: 204697 - DNA, 411 bp, Glycine max
  unsure (1)..(411): unsure at all n locations
ttngaatccttagaaaaccatgaattgttggcagctctattctcattacaagcctagaaagtccttcggattcatttttgtgtgttcattgctgtatgataggagatgaaatgcaaaggttggaacttgtgttggttgtttatgatggaataagcctaaacacttgagtttgagtgaaacaatgactatgaggtttaggttgatgatccttccttgatttctgtcatgcttcctagcttatttcagctatgactctaatacttgtgctcctatctttgaaaagttgcatgcttttgagaagtgattgatttaagcattccatgatattcaattcatatggttgatgtccttgatgaatcacacaccattttcttttgattggccactgtctttgtcactagatgacaagtg

SEQ ID NO: 204698 - DNA, 420 bp, Glycine max
tcatcttcaacccacgacggaagtgataaggaggattctaatgatttatacaaagatcatgatctcagtctttttgtaaaaagattcaaaaaatttctaagagtcagaggaaatcagacaagatcaaatttcaaatcaaagaaaagggcagaagattcatcctctactccaaaatgttatgaatgcaatcaacctggacatctgacggttgattgcccaattttcaagaacagaatacagaaatctgaaaggaaagcttttaatgaaaagaaagcttagaacgcctacattacatgggatgacaataatatggactcatctgaagattcagaaaacgatagtgtaaacctatgtctgacggccaagaattatgaaagcgatgaagaggtaacactttctgataacaacttatccattcta

SEQ ID NO: 204699 - DNA, 441 bp, Glycine max
  unsure (1)..(441): unsure at all n locations
agcttgcattttaaattgcaaaatcccctctccatcattaggatttgttcctgccatctcaaacaaacaaatcaaacgtaacaagacaattatagttgttgtttgaatacctcacccactcaagtgtatcacacaattatggcttttctctaatgaaacactcttgccttttaccactctaattccccttgagttcttaggcaattcaagagattatggccacaacaaagaacaattcaccaatatgtgtaaggtaaggctagagagacaaggaaaaggttaaccaagaaaaaggctaacaatgtttttaggcacaaatgaaggaaataaaattcagaatttaggaattcaagtaacaatccttcatgcaacccatatattaccttaaagagattnttttaaaagttcttaagcatgaaccattcacccaatttttttttt

SEQ ID NO: 204700 - DNA, 424 bp, Glycine max
  unsure (1)..(424): unsure at all n locations
tcttatccaaggctcatcttggtggtgaagctccttcttccatggcttattccctagtggatggcgcctcctctcacctcttctcctttgtcttccactgcatctccatgatggaaaatcaccattaaaggacctcattgaagcttaaagatccagcctccatagaagccccacaatcaagatcccatcagtgaccttgactggtctccctatgatattacctagtgcgagtgacttgacttgctagtgtgtggtttgtcttgtcatgtactcctaggcgcccgacgaggtttttcactgacatggtgccacattgcatataagattgagtcttagtgtatttgttgcataacgctngtgtattgctctatatcgatttatttgatgatattgctgtttgactattgagtatgcgaatgttctg

SEQ ID NO: 204701 - DNA, 381 bp, Glycine max
ggctttctctattgtgcaactatctcattcttcttttcaggtgtaaaatgaagcttgacaggttcaggtgcaggtgctgctactggtaaaggcacttgaatttggttgccaaactctaaggagatgacactcacatttttcggattctgcacagttttggaaggcaatttttcagaattctgggactgagcttgattcatctgagtagccatctgccctatctaatctgtcatactctgaatggaggctcttgtctcttgatgaaattgcatattctggatggtcattttgcctactaactcttctaaggaaggatgaggaggggcctcagtcgcttgctgcctatgatgttgctgctgctgctgccgttgtttctgcatt

SEQ ID NO: 204702 - DNA, 396 bp, Glycine max
  unsure (1)..(396): unsure at all n locations
ngagagagtccntctcattctgtagatacatttctgactttatggcatgagatgaaattcaaagatcggacctcttgctagttgctatcaatgaatcactagcgacactattgtttaagctactttccttgatatctatcttatgcctaactacatctatctgttcgttcacattttattttctctttgaataactacatattttgcgaagacaagatgaaagcgcccattgcttctactttctcatcatgcaatcagtaattttaatgcatacacctctgtacaatagcactaattgtcattatcacttgtagacaagcaaacctgtaaatttgggaagttgtacactggaacacaactactttttgataaaaccgttaaattttaaaatctcca

SEQ ID NO: 204703 - DNA, 361 bp, Glycine max
ttgacctcgaacgaagtgtctatctcaactgccatgcacttccatgtataatttcgagtgtcacggtatattatgcgcctaaattggacatccgagtaaaaaagtatggccatacgagtttgcctagaacctttgtgcacactctgagcaacttgatatattaatggcctgaatcggataccaagtcaaagacaggccatatgaatttccttctgctcatataaatatgagcgctcaaatgctatgccccgaaccgatatttagtgaaagcataccattgaattttgagacttcgtgtaaatttgaccgatgaataactggcctcatatacactcacgacaagtaggaaattgatttgcca

SEQ ID NO: 204704 - DNA, 429 bp, Glycine max
  unsure (1)..(429): unsure at all n locations
agctntngnganaatgtcatgtgctactctatgttttgaaaaaactctttagtacttatattgattgagtcttttcttgattcttgaatcttcaacttgattattcttgattcttgattcttgaaacttgaatcttgaaatcaaatttctcttgattcttgaagtgttcttgactcaatcttgaactcattctcttgggctttttgtcatcatctttgttatcatcaaaactccctgaatcaatcttgattcatcaccatgaagcttgcttctacaatctccccctttttgatgatgacaactttaaaatcaagaaacgcatacacacattttttcctagccgatcacttacttaattttccattctccccctttgtttttgagtttatgcttcacttgaaaataagttaatttcttatgtgagttctt

SEQ ID NO: 204705 - DNA, 467 bp, Glycine max
gtgcttctacattacattatgtatgccttacgtactttgtttttttgttgatgccataaggggagagaaaatatgtattaaatcaagaaataacataattaaataacttaatttcaagtgaagcttaaactcataaacaaggggggagaatatggagaattaagtgagtgatcgactatgaaaaagaatgtgtatgtgtttcttgattttagggttgtcatcatcaaaagggggggatattgtagaagcaagcttcatgatgatgaatcaagttgattcaagtagttctgatgatgacaaaaagctcatgataatgatttgaagattgagtcaacaagttcaagatcaagattaaatcaagaagattcatgattcaagattaaagagaagtttgatttctagattcaagagaagatgaattctatattcatgagaagaaatctagaagacttcagcacggaagtatt

SEQ ID NO: 204706 - DNA, 319 bp, Glycine max
  unsure (1)..(319): unsure at all n locations
atgacgaaacgaatctcgcaaatgacaaatgaccagtcttagaattgaactttgattctttcccaagttcttccgacctaaataaaaatctccaccgagcgacgttgctacatcatgcctgatgatatgcatcacaaaccatttccgatcagaccaacctctcttatttgtactggaacgttggaagaatgatctctaaaccaaatcatcaacatactcctgaccaaccctctctanagtcctaccatatcttggtttcttcaaagagcttccgcccccactacaaattaatcattttttcaactcgaaacttgtggta

SEQ ID NO: 204707 - DNA, 197 bp, Glycine max
aaaaaaaaaaagaaaaaagaaaaaaaaaaaaaaaaaaagaaaaaaaaaaagaagaaaaagaaaaaagaaaaaaaaaaagaaaaaaaaaaaaaaaaaaaaaagaaagaaaaagaaaaaagaaaagaaaaaaaaaaaaaagaaaacaaaaagagaaaaaaaaaaagaaaaaaaaaagaaaaaaaaaaaaaaaagaaaag

SEQ ID NO: 204708 - DNA, 421 bp, Glycine max
  unsure (1)..(421): unsure at all n locations
agctnctagagggtaagcggcgatgtcctttttttctccccccncggaaacatgaaaatatcatagttcatggttcgcaacctaaggtagaaaatcatattcaaatgtaactaacgctgacatattcattcataagtcaaaatcaaatataatttagtcataaaatactaagcgccaaatactgaattttaactaaagttcatagaataatgacttaaaaaaaacatatccaaatacacgacttaaaataaaagataataataatctaaatctacgaaggtggtggaaggtctaagcaccgacaaagataactcacatcctcttcaagttgagtgatgcgggtattcattccttcaaagcgaggcattaatagcatcgataccaccatgcaaggaatcaaagtcgtcaccaacatatgcgc

SEQ ID NO: 204709 - DNA, 392 bp, Glycine max
  unsure (1)..(392): unsure at all n locations
cattacggacctatgatactcagcttanaattgaataaaatgttcagagctactgtttatttttaccatatatgtgtaatcgattacacagtacaaattcctaattcaaatttaatagctgttgtaaattcgttttggccactggtaattgattacatcctctggtaatcgattaccatagagtaaatctgttgaaataacctttataacttatatttcttggccaaaccttctgcgacttcaattggaattctcttcctatataatatacccttcctaagactctagagactgtcttgatcattcatcttgaatattctttgtcttgagaaaatctttgacaagcatgtgatttatgtaatcctatggcattatcagaacattcaacttga

SEQ ID NO: 204710 - DNA, 424 bp, Glycine max
  unsure (1)..(424): unsure at all n locations
caagcnngagaggaagagaagagattatactatctgcaccaaccacnccctggagaacgactgcaacgcgcccccgacaaccaacaagacaaacgtgaggacggaactcaaagaaaacagaactacacatggcaaacagacacacacaacaagactctcgaaaggaaggaacaagcacaaacgcgcgaagcccaaaagcgaatcgagacgcaccaggagacacacaagaagaggaaccaccagcagaaatactaaaaccacacaccatatccaacaaaaacccgtacacgcccataacaaagcgaccaaaagcgcttgacgcaccgaggggcaccggcaacacgaaagccaccaccaaaacccggaacccaaagcggagcagcaacaccacttccaagagaaggagagccggcaaacacaacca

SEQ ID NO: 204711 - DNA, 375 bp, Glycine max
ttagggaaagcaatgttttgtgatgtcaaaaaaatccacacgctcatctgcttcagactaatacaagattgtttcaacaaacaaagccttgattcaagaattcttcaagatcaagtcatgcctcacaatgaaaggtttcaagtcattcaaggcacatgtaatcgattaccaatggcttgaaagtgtgtaatcgattacacatcatatgtaattgattaccacagactctgaatgttgcgaattcaaatttttaatgaacggtcacaactgttcaagaacaacaactatgtaatcgattacactaattctgtaatcgatttccagagaggattatcaggaatatcgcaaccagcacatcttattcattggattttg

SEQ ID NO: 204712 - DNA, 265 bp, Glycine max
cacaggccctagtatgttgatatgccgatgtatagctgattttacttctgacaaatgcatcttttaagttgattatttcatagtcttctctgatttaatcgattactccttcgtgttaattgactacaatgcggttatacgtttcatcaatcttttgaaactttatgtcttaataaatcacccttatgatttaattgattaccatttatgtgtttggggtgttatggttcaaaattgtctatttcaatcaattactactacgtat

SEQ ID NO: 204713 - DNA, 432 bp, Glycine max
  unsure (1)..(432): unsure at all n locations
tcggacagactgacagagtgagggccctttagcaccaattatgtttgaattgcatgttgcaccagttgtagaagcggaaactaactcacaattttaatggttcgttgaagtgtgaaagcggcacattatgaatcaggtgctcgtcaatgtactcatttcctgttgtttctcacgaattaatcgtgacaaatagcattgttgatgatgtcgaagcaaaatcggacccaaataatgttttcatatcattttatattaattattgtacatcgtccgatcaaactcacgagaccgattaataccgatccagagaatattatattgattacagtagaacattcgtgtctcagacctcggatccaatcacatttcataagtnaaaataactctctcttatcatcattcacacacattctaagattttgtaaccactct

SEQ ID NO: 204714 - DNA, 430 bp, Glycine max
  unsure (1)..(430): unsure at all n locations
agctcgngcaaatcagatcactcctacatatcatctttatcatgcattnnncttctttacccactcctcacgtgtggtttttttagggaaaaaacaccataactaaacgcgccgcaggggatccctatcgcaccagatccaaatctataacgatgggtgatcaagaggagacgcatgaacagatgaaagccgacatgtcggctctgaaagaacaaatggcctccatgatggaggccatgttaagtatgaagcagctcatagagaagaacgcggccaccgccgccgttgtcagttcggctgccgaagcagacccgactctcttggcaactacgcaccatccttcctaaacatagtaagacggtgaagggacacactgtggcacgattggcaccctcacctgagatacaaccgagcggcttacccttatgga

SEQ ID NO: 204715 - DNA, 352 bp, Glycine max
  unsure (1)..(352): unsure at all n locations
cctggagatatgtcggggggtcatgaaaactggggatgtcggtggtgtgctattgccaaaaccagcttgaccattccgacccacccgggcatgtcagacagtgagaacctgtgatgtacctaaacaggcgagctcctggcagtcaacagataanaggaacaaagaccacaaagcaaggaggcttgtgtggtggctggccagctgtgaacattgtttgatatgcgggttatggcctctggtaatcgattaccaacgatgggtaatccgatacaaggtttaaaaatgaagacaggaggctaagatggtctctggtaatcgataccaacgggtgtaatcgataccaggcttgaaa

SEQ ID NO: 204716 - DNA, 286 bp, Glycine max
cccaaacagacccaaacacccttccagccaaagcccactaacaccccgacaccgaccacaggagaaaaaccacatcgccacgagcacaaaaagccgcccaacccggagacaactaagaaacaggcccacacagcccccaaaccgtgagctccccaacctaacaaggctcccaaaacacaccgcccttaaaaacgaaccgaaaccgcgacacccccaccgaaacacatatagacgacgcccaagcagcgaaacacgccacaaagagacaaaccaagcccggggaggg

SEQ ID NO: 204717 - DNA, 425 bp, Glycine max
  unsure (1)..(425): unsure at all n locations
gactaattctccagattcaagaataccacgaagcgatagagaagacataccgttgattaagcacacaacaaaatatagttatgtcagaacataattttctaaaccttttaaaaaatataaaaatattaatgatatttctaataatatagtaatgtaagaaatacttatttcttttaagtggatcacataaagcctcttataaattgtaagcgagccactnggttattaagtcatttctcatacacattctaagacaatgtatcatatacattntcatattataataagacatatcatatcacacaagttcctggttgtcaagccaatcctatcgatatcaataaattaattgtaatacatccctaggttggctaggcgctcagtgtataattaatttcaaaaacatgcatcttatgcgagaaaaa

SEQ ID NO: 204718 - DNA, 423 bp, Glycine max
  unsure (1)..(423): unsure at all n locations
tcttcttgactcatcttctccttgaagtggngtttttgtctactctccttcttctccacttcgccaccattaaaattcaagaagcaaaggactccattgatgaagaagatccaaggcctacgtgctccaatggagctacatcaaaagcagagatagaaagtctattgaagactaatttcattcacactgcaaggtatgtcaattggatttctaatatagttcatgtgattaaaaagaatgggaaaatgcatgtgtgtgtagattttacggatttgaatgcagtaatacctanagatgaatatcctatgccaatcgcagatatgttagttgattcaatagcaagcaatgagattctaagtctattagacggttaatcaggatataatcaaatatatatctgtgaaaataatatatcttaaacta

SEQ ID NO: 204719 - DNA, 373 bp, Glycine max
  unsure (1)..(373): unsure at all n locations
tctaagccctgtnctctcgccttggggacatcttattgtaaagcacgtggaaattaacataaggcagaatataacacagccataatcattcacaagtcaagagcaaacatagttcagtcataaaatactaagtgccaaatacttacatataaccatagttcagagaagaatgtcataaaacatagccaaatacacgacgtggaatcaaatataataatagtctaaatctatgaagatgggggagggagatcaaagcactaacgaacataacttatatcctcctcaagctgagtgatgagagtatacatgcctccaaagcgagcatcaatggcatcgatacgaccattcaaggaatgagagcgctcaccaacat

SEQ ID NO: 204720 - DNA, 442 bp, Glycine max
  unsure (1)..(442): unsure at all n locations
ggatcttaaggaccgcggctgcagctctacaaaggactactttgtttatattctttgatangccctttgagccttgtttcccttttccttgttttgaagctcactacaagccttaagtgaaaaaccatgatattaccatatccttaaggaattttggagctttggaattgttttgggaataagtgtggggggtttttgtttcattggacaacttgttttgttggctatgcttcatgatgtatttcgggccatacttgatgtacattgtatattggttaaatgttggacatgctgaatgaaatgttgtttctcaaaggctaaagagtaaaaaaaaactaataaacgaataaaagaattcgaataaagaaaaagataagcantaaagttgagtgaataagatcttaaatggcacaagaatgatgaaactcttacttctactctt

SEQ ID NO: 204721 - DNA, 398 bp, Glycine max
  unsure (1)..(398): unsure at all n locations
tagtanagctaagcactaacagagaagataagtctatattaatctcaccaccataggaggccatggataatagcttggaggaagaatgagatgaatgagggaagagggagagaagagcacgaaattttgtgctctaaatgagctttgaaatctgaagtttaatattcaaatgatcaaatttgaaaaaaatgcacacacatgacctctatttatagcctaagtgtcacacaaaattggagggaaattcatatttcacttgaatttgaaattgaatttgtggagccaaactttggagccaaaatttcactaattatgattagtgaatcttaattatggttcagcccactaattcaagatcaattccaagattctccactaagtgtgcttatgtgtcatga

SEQ ID NO: 204722 - DNA, 272 bp, Glycine max
taagcttaatttcatctatccactccatagtatgcacagtggagcatgtgtaatcccaatatatttatggagctttgacggacattgattcttgttgctttactccacctgcatatttgttggtctgtacattgtcacctcttgcaaaagagtcaccaattatagatatgcatgctacaagaactaatcattaatttcatcacagttaagagaacaaaatgttgattactctagacactacacactgacctatcatgtgaggaaataattat

SEQ ID NO: 204723 - DNA, 364 bp, Glycine max
  unsure (1)..(364): unsure at all n locations
ttgatgaatgggaagccctgcggcatattaaagaggatgagaatgcagaaaggacccatggtgtgacttgcaattctttatggacaaatatcccaccagcttaacaatgtcattactcaacaaatatcagcacttctcattacccaccaccctatcagccaagaacccccaatcattcacaaaggccacccttaaaccagccacaaagcctacctgccgcatgatcgaacccggcangtgcattggatcatgcaagtagtataaaacggtaagaatcgagtattcaactctcggtgaacttgtgttacttggtaaaactatattcaacgaataggtggtctgtatgaaagatatgtgtggacta

SEQ ID NO: 204724 - DNA, 390 bp, Glycine max
  unsure (1)..(390): unsure at all n locations
actcatccggacatccgggtataaagttattttcatttcaatntgctcagagcttctagtctcaatattgagcgtctcgatatattacccgattcaatcggacatccgagtaaaaagttattgtcggttgaatttgatacgagcttccattttcaatttggatcatctctcgataaattacgacactctgttgggcatccgagtaaaaagttattgtcgtttgacttttctaagagtttccattttcaatttggagcgtctccatatattacgggactcaaccagacatccgtgtataatgttatggcatttcaattttctcagagcttctagtctcaattgggagcgtctcgatatattacccgattcaatcggacatccgagtaaaag

SEQ ID NO: 204725 - DNA, 467 bp, Glycine max
  unsure (1)..(467): unsure at all n locations
actcagcttgagcanattcaacgacaataactgtgtactcggattttctattgagtcccataatatatcgaggtgctcctaattgaaaacggaagctcatagcaaatttaaatgacaataactttttacttggatgtccgattgagtcccgtaatatatcgaggcacacgaaattgaaaatggaagttcgtagcaaattcaaacaacaataactttttactcggatgttctattgagtctcgtaatatatctacacgctcaaaattcagatcagaagctctgagcattatcaatcgagaataactttatacacggatgttcgattgagtcccataatatatcgagacgctccatattgaaaatggatgctcgtagcatattcagaggacaataactctntactcagatgtccgacagagtcctgtaatatatccagatgctccaatttngaaacgaaagctcgtacc

SEQ ID NO: 204726 - DNA, 359 bp, Glycine max
gtcctaagagggtcagattccaatgccaacaaggctctatgcacagatgcattaccagccgtgggaagatcctgttaaccaaaaacaactaatcaactacatggggtgcattcaattactcaaatcaccaagtggcaaagtataaaacaacagttcgcaacagcgatttcagcctcaacatcaagggtttggactcatgtaagcaatgtcccgcaacgtcaatgatcgcgacgaaaccgcaatctaaaatcatgccatgtgggctatgctctaaacaaacctacgtaaataggactctccaatttcgctattaaaaacgagtttcaatcaaaatcgaatatctggcacgacacaacaaa

SEQ ID NO: 204727 - DNA, 378 bp, Glycine max
cgatctaggaacaacatgaagtggactgtcaaccaatatggctatcatcggccacacaatactaaagattgtttttggcttgctaaagggtgtgaataacgctaataagaaatgctatatataatgagtaacagtggatgagttgcactcgataattacattgtggccatttagaggatgggctatggatattattggaaagattcaccctcctctaagaggcattcattcattttagtagtgacaaattattgtactatacgggttgaagcacaacctatggagaatgctactcaagatgatgtcgatatcagataatatgccaatattgtattcccaaacgattaccacattataaggaactatgtttacaagaga

SEQ ID NO: 204728 - DNA, 462 bp, Glycine max
cttggagggttggtgcactctatcacacagagatagctttatcattaccacacatattctcaatcaatatagttgcttcttcaggggttttcagctttatcttccctcctgctaaagcatctaacaactgcttggattgcggtctcagcccatctataaacatgttcaactgaattggctcaaagaacccatgattgggagtctttcataacaaaccatgaaatctctccaatgcttcactcaaggactcatcagggaattggtggaatgatgaaatagcagccttcccttctgcagtctttgactcggggaagtatttctttagaaacttttaacaacttcctcccacgtctatagactgttgcctttgaatgaatggatccacctcttggcttctcttgccaaagaaaatgaatatacgctgagtttgatggcaccgcgcaatacttctgcaatcttaca

SEQ ID NO: 204729 - DNA, 429 bp, Glycine max
  unsure (1)..(429): unsure at all n locations
agcttagntacggaggctctacgaccattttcttattcccatatctcaggtatcacttgcttctcacttgaattatgggtgttctcagcatcatcagaattatgatactcatgcaattcctttagagctgtcaccacagcaacgtatgccttctctcccaaatcattttttaaagataataatttaggatcattttcatcaatttcttcctgaaaaaataaaatgcgagagacatcaaattttgctcatttaattgtccatgctagtgtacanttgtgacacataattgaatcccctaccctgctgataacatgccatgttttacagattatgccagtttggttgtaacaaactctaaattggagatatacataatatcttcttacatgatcatgttgttatgggatctataataaaggaacattatta

SEQ ID NO: 204730 - DNA, 426 bp, Glycine max
ctaattaaaataacaaacttattcaataacgactcctataataacaataacagactcctatgaatattcaatttattcttttgatcctttatatctcctggaaaccctccaaatctttggcttgggcccactgtcaaggcccaccacttgatccacctttctatgaattccctcctccatagaaacggccttgtcctcaaggcaaaaatctggaaattgaccctgcaatacggcattatcgtcccatgtgacgtcctcccatgtcttgtgcttccatataatgagactttgctgcacagacactccttcttttagagtcactctagagcccatgaccttctctggaacacaatactctcattgtgagttccaaatctgtgcgaagttcccctagaacctgatagtcttcaatcgccttcttcaata

SEQ ID NO: 204731 - DNA, 312 bp, Glycine max
acttaagcaccgagctgcacttttggggggaagttttttttaaaggggacatggcgactgtttaacaactagttgtctttagggtttactttattttccccctacaaacattatactgttaatgcgcctacccttataatatgtaactggttgctcaaagtccatgggggagcttcttacaactgaaacttcaagcttactaggattataagaatgggaataagaaagttctttctttcatcttgactagaatttttctaacttcacactcctcagcttaattacctgagaagacccctttgtttctcaaga

SEQ ID NO: 204732 - DNA, 391 bp, Glycine max
  unsure (1)..(391): unsure at all n locations
tcatgagagagtcaaanatctgattgagaggagtatatttttctatgctatacacgccaacaaagggagaaagaatgttgtcttcgaacccggagattgtgtttgggtgcacatgagaaaagaaaggttttctgaacaaaggaaatcaaagcttcaaccaaggggagatggaccatttcaagtgaaagaatcaatgacaatgcttacaaagatgagctgcctggtgagtataatgtttgttctaccttcaatgtctctgacttatctctttttgatgtagatgaagaatccgatttgaggaaaaatccttctcaatagggagagaatgatgaggacatgactatgagcatgggcaatgatccacttgaaggacttggatgacctatgacaa

SEQ ID NO: 204733 - DNA, 336 bp, Glycine max
ctaacaaaaactgtcagtatcaaataacagtgtgtgtgccgcctattaagaaacagagaagtctacatgcggtagaggctaagtgatacgagcttggaatcaaaaagataacagtcgatatactgatgaatgctctcctataacctaagcttttgcatcctataaaaatcatgatgtgggcagcccaacctcattacaagcctattaaagtccttcgaatgcagcttgtgtgttcttgactgtatcatatgagatgaagtgcaatgattgagacatatgttgcgtgttgattgatatataacctaaacacttgtgcttgagtgaacaatgaccgga

SEQ ID NO: 204734 - DNA, 301 bp, Glycine max
accctgctcggacgaatgagaaaaccgcggcaaatgaagagggtggtgacgaacgataaacccgcgctgtgattgccattccaatacagcccaaggtaccaccaacccaccatgtcattactcaaccaataacaaaccttcatcatacccaccgcccagctatccacaaaggccatccctaaaatcaaccacaaggcctacctaccgcacaaccaatgacaaacaccacctgtagcgtataccacaacaccaaccaaaaaatgaattctgcagcgagaaagccttacatatcaccccaaca

SEQ ID NO: 204735 - DNA, 381 bp, Glycine max
  unsure (1)..(381): unsure at all n locations
tactcatgcttaaaacttaanagaaaattagaacaaggaattataccattgtgtaactgtcaaataggatttaattgggtgtgcaaaagtcattttagttatcttataacacattgtgctagtgctgattatgtgatgtttcacttgtgtgtctctatagtctataccatcaagttatttgtttctcatgtttacaaatccacctttgtttaagcttggcactagaagactttgctaaataaaattagaaatctcataggttgcacaacaaacaccaacaaccaaggtaagcaagacccaggaaacaaccccagtcactaaggctcctgcaacagaacaaccagcagctgagattcctgcaacagaacaaccacccgctga

SEQ ID NO: 204736 - DNA, 409 bp, Glycine max
  unsure (1)..(409): unsure at all n locations
agcttgcttctacaccacgcccttagagtaataaggctggnctctaggccaggccacctgtgcgtcaaactccctcatgctcataatggagggcaagcccaaaccctaaaggctctgcataatgatggactaccctcaatggatactctagagcatggagtgaaaataaaatatgctggacctacataaagaggagctggtagtggtatctatgaaggtgtagaaaggaatcactggaatatctgtggaggaagaaggaggaagtgtataaaaagagggtgctggtgtgatgtgccatcattttcttatattttctaaaccctttgtgcaccattttaataactgattggtccttattgccaattaattaggcagctttattaattgtgcgctatttaacaaaattgat

SEQ ID NO: 204737 - DNA, 451 bp, Glycine max
  unsure (1)..(451): unsure at all n locations
ttatctaannatttgcatattgtatgaaaagtgttctcttattgggattgagatagatcacacgaatgacctccaaggagccttctaaccattaaaaggtcaccttcttcatgggggtagacttcctcactagactctccaccccttacttcatctttacttccactatatgaagggcaagaagtagtttcctcttgacaactataaatgtcttgacccctcataattatatatattgaaaagtacgagtggtactaagaatacattggtagatataaatgtgcatttggttgctgttttataacagaaccacttacaacaagctaattgatacatagattctgaatcctctacagcctatntactaaacaattcctttatgttggaggaccacttgataanatgtgttccaacgtctctctccatatttctaatccatgtccaaagtact

SEQ ID NO: 204738 - DNA, 262 bp, Glycine max
gaccggacttagcacgcgcgcaggggggagggttttttgttcccccccagacacacgttttgcacgataagcccaaacatcgttctgaaaaaacagtgcgagacccttgcatagagatgaggtagcctctgcatgaacacaattcaattgcgtaaccacagggctggagataaaattggtgactactggttaggctagaaaccccaatacacgataatctgaaatatgacagggactggggttgcaaacaactacctgggta

SEQ ID NO: 204739 - DNA, 335 bp, Glycine max
  unsure (1)..(335): unsure at all n locations
tcctcttttcacttttagaatatctctttctctagcacacatttcatggctttaccattggtgatgatcatggaaggctaaacacttaatcaatccaaggatccactcatagcaaggttgaatttgagtactggttttgtatttctaatctttgngaatgtacatctttttcttcaatcctatttatgattatcatgattatgattatgcttaggattgaaaatggattaagttatggattcataaacgaatatgagatctagttctgaatttcttcaatcctggagttcataagtgaattgtggattgaaccacaattgattgcatttttgagt

SEQ ID NO: 204740 - DNA, 307 bp, Glycine max
ttaaaatcactgacttacagcatcaaacctctttcgtcaacttataaacatctctcacccatacttaacatacagccctcttcttgaaatatttacttttcgttctaccttggctatagtttgaagccactaaccttaaggaaacccaacaatgacttcctttagtgggatgttcataaaagcttcactagttgggggggctaaaatcattttacttgagtgaataggatgtccaccactacttaatccatgatgcgatcatagttctcacaagactttataccactccgatgcttcatatagggaa

SEQ ID NO: 204741 - DNA, 402 bp, Glycine max
taagtatttattatctatgcttaacaaaagatacttattacactaccaaataaccataaattggaagagtttgatacaacttacacaagctttatacacaaaagttagtcgtatttaccggctaacaaactccccaaatttacagttttgcttgtcctcaagcaaaaagagaacagctcacttgtcctcaagtgacaataacatgcagtgactatgtacaatggtgtatgaaacaaatgttactgattgcatgataatagaatgaagcattctgtactcatcactttgcttttacaaaatatgcaactattcaaagagaagaatacaatgttagttgactattagatgacgtaatcatagatagatattaggaaagtacttatacacagttcacaatactgt

SEQ ID NO: 204742 - DNA, 384 bp, Glycine max
ccaggggatcattgcctgaacctgttgcacgcatgacggaagcatatgttactgatactcatatgacctacactgtgtaccgcaacttaaactacctccgcatatactttacgttatttattcttgcaatccaggattggtaagaaatacattctatttactgcgcatcactgaaacaaattcaactagttgattagaccgctcacgtgggacattatgttgtctaaattctgagaccaattacacaatgagctgctttatctttctgattaaacatatggaatcaatctacaatcgtacgtaacgaccgcgcgcgtaatatatgaatgacattatgtataccatcataagtagaaatgagattggcctaaacaaacaaatatg

SEQ ID NO: 204743 - DNA, 429 bp, Glycine max
  unsure (1)..(429): unsure at all n locations
agctntggaaaggagatatattattgngttttatgttttccattaacaggaaaaattggaagctttcccccaaaaacacagaaatatgcacatttccaaatgatgattgaagactactagagtatataggactgtgttgtaactataaaatgtctgttgctgttaaatgttctgatagctgtagccaccatgtgatctgttagctgccgtaggttactgactgtctattcttggtaactacatcgtttagatgtatttgatcgatgccctatacagagcttacaatttatgtaaatttctcacttctaaatagttttgagtctcagcttctatctgatatcttctctggttcttatgttaactctcattcaactcattggttttgcgtaaaaaacgccatagcctaagtttagccataatgaaagaaat

SEQ ID NO: 204744 - DNA, 353 bp, Glycine max
  unsure (1)..(353): unsure at all n locations
actcagctttgacggctattccngctctagagggagggagcgttttttttttacattttttgtcaacgggagacagacgtgtactatatatttgtatcacgtaaagagtgataatgatgatacaagcaacgtctcagcgcatgaaaaagatatctatgaaaggtggtaggcgtattaccacaacttatttaatgatcgatatggatatgactctaccactcttgacacatgagaagaggaccggaactataactactatcgacggatcacaaacactacttaaggaagcgttgaaaaaatgatattggtatgtggcggtgcaaacctcatacctatgatgtgtggaaactctc

SEQ ID NO: 204745 - DNA, 427 bp, Glycine max
  unsure (1)..(427): unsure at all n locations
agctangngnaancgaggacacgtaggtgttaatttttcaccagcgnnngntctgaaaaatctaaagatgtaactctccaaaaaggttttgactttatcaaatgggttttaagtttttctaaaagttataactcttctgaatgaccttcttgaccaggcatgaagagtctataaaagcaaggctttgttttgcattttaatcattctctccaacaacaatcttgaatacttttgcttttccaatcaatcctttacaagccttgaaatctctttgaagttcttcttcttcttctttggtaccaaaagctttctgaagttatctggttttctaaaccttgaaaacttgtattattcatcttttcattctcttctccctttcgccaaaaagaattctgtaaggactaaccgcctgaatttttttgtgtct

SEQ ID NO: 204746 - DNA, 336 bp, Glycine max
acctggagatatgtcgcgggggttaggaaaccttggggacgtcacgtggggtgctattgcccaaaaccaatctttgccaatcccgacccaactcggacatagtcagtcagtgagaacctgtgatgtacctaaataggcgagctcctggcagtcaaccgataaaagaacacagaccacaaagcaaggaggcttgtgtggtggctggccagctatggatcttgagtgatattcgggatatggcctctggtaattgaataccaagggtgggtaatcgattacaaggcttaaaagtgaagacacgaagttaagatggtctctggtaatcgattacaccac

SEQ ID NO: 204747 - DNA, 421 bp, Glycine max
  unsure (1)..(421): unsure at all n locations
agcttcttgagatgcctttctactatctatggtttgctcngttataanccacaaaccccttatagacatcaacctttgagtagtcaatgaatattagaggcaagcacaacatatggaatctcaatccacaaggcgacaacatttcagcataatgtcttcaattagcaatacccatatcatcttaatacttgattttagaccataaagaatttgcaaatcatcatcagttacctgagcatgattgcttgaccttggtgtgagaatgtaggtgatgaggtataccagcattttgtcttcagtagttaatccaccaactccaaggtgatttctcatatccttgtaagatcaagaaacattcctttataagtttgcatcttgttgaaccatcaacggtttcatcagacttgccgactccaccaat

SEQ ID NO: 204748 - DNA, 465 bp, Glycine max
  unsure (1)..(465): unsure at all n locations
ctcagagagaacagatgatcagaatttgatttgacaaagctcttttagagccaagacgaccagccgggcaccaccgagggctactgtttctgatatgagcgccattatatctatcatcttctgacaatatcgtgtcagacttcaagataagattagttcaggatttcgtggaccacatcaagatgacttcacaagggaagtattgaaaagatttntcacaaaacatacatagaacacatttgtttttctcaaaattttctaagttactagagtttttactctctgggaatcgattaccagtttcctgtaatcgattactagtggcaaagtttgatttcaaaaagcctttaactgaatttgcaaccgtccaattgatttcaaaatggtgtaattgattacaagatattggtaatcgattaccagtgtatctgaacgttgaattctaaatcattctgaagagtctat

SEQ ID NO: 204749 - DNA, 343 bp, Glycine max
tagacgaataaaattgaccaataaacattgtttcgagagattaatctctagggttagtcaaaagatattttagattcacctaatagaacagtgttcaataaatataaaaatataggtgctattgtttttgggtttttaattgataaataaaaagtgaaaactttatgataattaaatatttttaaagaacacacaacttttgaaagaattaataatattctagagatacaaaaatcacataataactttattaaaaaagtttcatccaatagtgcagtcacgtgaaaagtagataatgacatgaaagaacaactcttacggttattttttttttctggtgagt

SEQ ID NO: 204750 - DNA, 460 bp, Glycine max
  unsure (1)..(460): unsure at all n locations
ttttgtcttggcaacaatacacgtgacatgttacattcttatgcaagttacttccataataaccattctatatagcggctcattatttgtccgcgtatcactttgccactcctctcctttcgaaaggaaaagctatatttcacacatttcagttttgtaaacaatgttaatttcaaatgaataatgatatattaattactctttatcttaaatatttcatcaatttttttgatctctttttctatcacatcatagattttattatatatacttatatttttttctttttttcttcctcggctgattnttagatgttagataacacttaaatatcagtcaaacatttttcatttcaaacacatacttccttcaaagatcatatgaatgacacatcatggtgatgtccattaatcaaagtcaataaatgatggggagtgagtgaatgataaatatgtaaaag

SEQ ID NO: 204751 - DNA, 258 bp, Glycine max
  unsure (1)..(258): unsure at all n locations
cacaaaaaccaagcnaaagagacaaaaagggagagagacgttttttcaaaaaacgaaacacagatccgacagccaggcccactaacatagcgcagacataccacgacacttccgccaacaaaatcgtacactaagaaacaacggataaatatacacacggagcaaaccacaaaaactctaacacaacacaccatcaaattcacacaaagaacaacgaaacatcacacgtcatagaaatcacaagaaaatagtaatacc

SEQ ID NO: 204752 - DNA, 406 bp, Glycine max
  unsure (1)..(406): unsure at all n locations
agcttttgaatgtaaaattgtttgatatacaactgtattnngatcaaactcaacttgaaaatgaaaacaagttttgaatgaaaaagtagagaaacttttaaaagatgtagctaactttgttgctagaacaaaaaagatggataagttaatttgagtccaaaggagtttttatgatagaaatggtttaggattaaataagaatcctaacaaaaatttaaatagtctaatagagtcagaaaggccaaaagggaatgctctaactgtaatagatggggacaccaaaccttacaattttacagaaaatggaagattcccttcagaaaggtgactaacacacaaggacccaagaaattgtgggtacctaaaatcttactactttctgatgcaagattgtctgctcgacatc

SEQ ID NO: 204753 - DNA, 435 bp, Glycine max
  unsure (1)..(435): unsure at all n locations
ttggaaatgatttctatacaaaagttagtcgtgttaagtctctaacaattacaatgattacgattctgatttcaaggaaagaatgcaatgagcaatgcatccaaatgtgaaaagaaaaataagcatggatgtatgtgaatgatacattcttgaagtattgcaagttttacacaggacattcagtagaacataaggtcgaatcaattcagatttttattaaagcaacatggttcatcgcatcttgtcaaagtgaaactggaaataaaatattgacatcaagagtcctcaattntgtgaattatctagctcaatcttgtgttggcagtagacaaataagctatgtaacttgatccatcttctgccccaacctttgcaagctggttacttccatacttgaccttgacttgatgaaaaacctttcttaaaagcatgtgc

SEQ ID NO: 204754 - DNA, 221 bp, Glycine max
tcttaagtgcagatgtcccaatctttgagccatattacgacttcatcttctttggaggatagacatgtggacgagcaactggcttcttgaggtgcccataagtaacatgtgtcctttgatctggtgcccttcattaaaacttcactctacttatttgccaccaagcattctgactttgtgaaatttacattgactccttcattacacaactgactgatgct

SEQ ID NO: 204755 - DNA, 387 bp, Glycine max
  unsure (1)..(387): unsure at all n locations
tcttggatgctgcatcgaaagagaagaattaatgttggtctattaatacatgtcccacaaaagcttgaactactttgtttttggttggagcctatacaatttattctaaacatctttgtcaatgttcttatttcgtatatatagtttatgaaattatggagactataactatgctaaatatgtgtgtctattttactagatgaaactcaaggcaagttactagattggtgtaagcgtttcaacattatctgtggcattgctcgcggattattgtatcttcatcaagattcaaggctgaggattattcatagagatcttaaaactagcaacattttagtggattcaaattgngaccccaagatatccgactttggcttggctcgatca

SEQ ID NO: 204756 - DNA, 384 bp, Glycine max
agcggagagaagaaagattattatttctattcatcaacgcgcggacaaaaagctcttatgagtaatttcaatcttaatgatattagacttgaacgttactcttgacgagacacataaaaaagttagggactaattattttgtcttgatttctagcctgatcggccagtttagtaataatcaaaatgtcacgggtttggtatgtcatgtgagcgtcctttaagtataattgtccatctaagggcttaactctgaaatggcaaatccttattatatatcctcattccttaaatgctgtatttatcaatggattactgtaaatgctggtttatggaatatactacatcggcgttaattttctgttagtagactcttgaccaagacag

SEQ ID NO: 204757 - DNA, 416 bp, Glycine max
  unsure (1)..(416): unsure at all n locations
tcgngtaatattaatgccatgttgatttggtcagacacttctgttattacttattcaaaactctatagtctatagcatctattttagtttatgttttccaccaaaatacaaacagatattttatcaacactcaaaattggtttcccacgtgacaaagaagggaagaataataatacttgcaaatttagaaagcaaaaatatcaatcacaagagcattcaggaaatgagaagattgaataatatgaaacctttatttacgaaagaaaagagctttctgaaatgggataaagaataagttaaaacacgatgctcattcatcctgactgtatactgtaaataatttgcgaagttttcctttctgattttacagctatccacgatggtttgtacaatagaacacatgaatatacatttac

SEQ ID NO: 204758 - DNA, 327 bp, Glycine max
  unsure (1)..(327): unsure at all n locations
acactttctttggggggttatgctctgaaacatattggccttcgcaatttaacgtatatattaacttagccttgacaatatcattcaggttatgttatgttgcccaaattcctatatttttgacaattttgtctcagattattaattcattggtgggttatgctctgaaacatattggccttcacaacttaaagtatatattaacttagccttgacaatatcattcaggttatgttatgtctgctctgaaacatattggctntcattcttacagtcgcaatgataacttttgcttatctaaatgaaatagttcctaaagagttattc

SEQ ID NO: 204759 - DNA, 353 bp, Glycine max
  unsure (1)..(353): unsure at all n locations
ccccaagaaccaagcncacctccccgagaaactcccacgagaagattcccacaaaagctagagctcaactacaaacacccaactaagaacaaaacgcaacccccctgagacgagaagctagagcgtagccacacactccctataacacgcaagccccccccagagacaaaacacatgaaaacacaaacaagcccccaccacaaaaaccactacaaacgcccagaagaacaacgcgaaaaccccacaccaccaaaacggcctaacacaagcacccaaagaccgaaaaacccaatccaacacaacaaagaagagtggacccaaccatacccaacgggcatacaaacttaccgcga

SEQ ID NO: 204760 - DNA, 427 bp, Glycine max
  unsure (1)..(427): unsure at all n locations
agcttggagganatatttatcacagaactgtaagttttgtttgttgnattgcatgaaactgagtgttgggtggtaaaaagccactaacaaaataaactcaatgtagcatagatgagaatgttatgttggataagtggacatattagacaagataggattaaaatgaatgcattagaaagaaagttgagaacttgagatagcatctgttgtcgaaaaaaatggtagaatctcaccttaggtggtttgggcatgtatgtagaagactagtagaagccccacttaagaggggtagcctgtagtcctatgtggggaagttaggctgaaaaaaattatagtctaaaccatttagaggttaatggcttctccatggacatgatttgaataaaacactatggcaccatttaatccatgtaactaacctcatgta

SEQ ID NO: 204761 - DNA, 371 bp, Glycine max
atcttgatccttggtgcgcaaccatttgcttaaagaacttggcaaatgggcagatgactatatcaagctcttctgtggcacagacagattcaaggaattaaagacctccctacttgttgatgggttatccatggtatgtaatttatgttttgctttctaagaattaactttaaataactttgaagtatatatttgtttgattcaagttactgtgtgtcgcaacgtgcccttctcgggcgagcgagggcgaggcttacgtgtgcgctttccaaaggaggaaagatgcgcggagtcgccaccaacgcttatttgtggaaaacgtcgagaaaaccgaaggaaactggtcaaaatgaaaattctaagttcgggag

SEQ ID NO: 204762 - DNA, 273 bp, Glycine max
aaaacaagcaacaaacacgcaacagaacgcaaaaacgaagacggatcaacccaccacaacacacagaaaacaccagcacacagcacagcccaccaccaaaaaacgaaaggacagggagacccgccaaagaacgtgcagacaccgacaaacaacggcacccaaacacgaagaaccaacaagccgaaacggaacaaaaacacggaaagaagcacaccaaatcaaaacaacaacagcccgcccaacaagatcgcaaccaaacacgcaaacaaacac

SEQ ID NO: 204763 - DNA, 326 bp, Glycine max
aacacacaggcacaggaccttccactttattaaattacctgaaagactcatttgtttctatcaagcgatttacaattccgccgcgactttgcttgtctaaaaaaaaattacccacatttcttaaattacaatgcttcaataattacactgctgaactcgtgtattaaaataattaataatggagacagcctgcatgctcattattaatagattctagggggtcacaccaattatcacttctgcccctcatgatataatatattgtgtcatttcaagcctcatatgatcatacatgtttacacaacagttgtactttgatcattttt

SEQ ID NO: 204764 - DNA, 285 bp, Glycine max
  unsure (1)..(285): unsure at all n locations
actatacactactcaagcttatagacaactacatanaccatggcggcagctcgtttgttatcatgcggatctcaacaaagctcatcacgttcaattagtcgaatttgccctgcataatgatggatcaagcggcgtccgaataattaagaagggggggtggaattaattatgaatgtgtctcgactaattaaaaatttatccttcttaacgtcactacattcaattaggctgtactactaagttatgagaaagttaagaacaaacacgataactcaaccacaaagt

SEQ ID NO: 204765 - DNA, 410 bp, Glycine max
gagagggggagcccctaactgaacgacatataatagggagatacgacggatctttgaagtatgtctcacaagactctcattcatcataaggtacacacgagtggtacacatgcttctatttatagactacgtagcattccttgagaagctatcttgagaaaacttccttgagaagcttctgtcgaaaaatttccttgagaagctagagcttagcttcacatacccctctaataactaagcccacctccttgaagagcttccttaagaagaatcctaaagaagctagagcttagctacacatacctctctaatagctaagcccacctccttgagatgagaagctagagcttacctacacaccccctatattactaagcctacgctcatgacgaaaacatgaaaatacaaaa

SEQ ID NO: 204766 - DNA, 410 bp, Glycine max
agcttacagctcttttagtattacaatatctttaagcacaaacctttggccactgccatcactatgcaaatcaaaaacaaataaaccatcttcctcaatgttgcaggcctgcaacgtaatcatagttcctgagcaaaggcatcgatttatataccttgccaacttgacaatttgctatgaatggccgcaggaagatatacaatttacctgtactagttcagcaccggcagcatccccaaaaagaatacaggagcctctatctgtccaatcaacatatcgtgaaatagcatcggctccaatgactagaacattattaaaaccaccccctgcactcacacaataaagggcaacggttttcatcatatttagcaagtattaagtaaataaaaataaaaattataagctctcat

SEQ ID NO: 204767 - DNA, 389 bp, Glycine max
tctgttgggtatatactcatacaccaacactcttctgttcttttccacacagtaacccaagagggtcaccaagaatggagaccttaaccctccaagaatctgcagttcattttgaaactctctctctgactgcaaagacaacgcgtccaggcgtttgatggcaatcaacttgccatctttaagtattcctctgaaaacagtgccagagccacctttgccaataacattggcagtgtcaaagccattggtggcttgctttaaatctttgtatgagaatctttggagcttcaagggagcacttgcatcaaaggggatggtcttagctctgtgaacaagagaatgccacagatggtagaggaagtagaggattgagcaaaaaatcacaacac

SEQ ID NO: 204768 - DNA, 428 bp, Glycine max
agcttaaccaccaagtagaaactataccttttagtttaaccacttggcagaaccaacgaggcttaaccatcaagaacagaagccaaacaacatttcaatacttaaccatccatgacaaaaacttaaacaatgcttaatcatcacgggcagaagcttacatcaacataatagaagaatcacaaaatttgtcttctatgaggacttttcacaaacactttgtgaattaacaataaccaaaacttaatcactcatgatagaagctaacagatgaacaatacttaaccaccacacatgatagaagctaagatcatcaaaacaagtctaataggctgaaacaataagccaaaatctttagaagtgtttaatcaaacaccttgttggcaaacactgaatagtgctagacatgaaaaaattactctagtatacaa

SEQ ID NO: 204769 - DNA, 467 bp, Glycine max
  unsure (1)..(467): unsure at all n locations
ttctacttcctcaaagattgtgccgtctatgcttctctttgntatctcttgctgcttcactgtattcatgtgcttcactcacaggcttggcttcttgcttggataatcacaatatcaaacactctaccacgttccctcacaaagaacatgatcattcctctgcctatagttacttcaaaattctcaatttttccatccaaaaccttcggtttgcagaacccgtgattcctaagccaatagccattgtactgccagagagtttggagcatctgcagaaaagtgtagcatgctgtatagaacgctccatggaaataagagtaagatgtggtggacacagctatgaagggacttcatatgttgctgatgatggcactcctttngtcatcattgatatgatgaatctgaaccatgtttgtgtggacatggagacagaaacagcatgggttgaaggtgggcaacattgtgag

SEQ ID NO: 204770 - DNA, 406 bp, Glycine max
agcttaacgatggaatacgtactgcgcggttatgtttaaaagcgcaaaacggaatcgaagaatgcgaaaagtagagatcctagggctgcaaactcgtaaattccgtgggtatggcttttgaaaggggggaaaagaagtttttgaatgcaaaaacgtcccccctttcgtcactattatattttggtgcaggggttgcacgcccaggcgagctaacctgcactttttttttttttagaggaacattaaccatgtcccctccttccttatgggttaacattttgcctatttgagcctacttaagttagaattaggcgttaattactaaaaaacaaacaatggtagtaaaatactgcgaattcaaaggatactgggctgccttgcgcgacgctctctgcttgtttagcac

SEQ ID NO: 204771 - DNA, 382 bp, Glycine max
tcactcctacatctgatgtgtagcatgctttttttttctttacccactcctcacgattggcatcattacggaaaaacaccataactaaacgcgccgcaagggatccctatcgcaccagatccaaatctataacgatgggtgatcaagaggagacgcaggaacagatgaaagccgacatgtcggctctgaaagaacaaatggcctccatgatggaggccatgttaggtatgaagcatctcatggagaagaacgcggccactgccgtcgctgtcagttcggctgccgaagcagacccgactctcttggcaactacgcaccatcctccctcaaacatagtatgacggtgaaaggacacactgtggcacgatggcagccctcacct

SEQ ID NO: 204772 - DNA, 367 bp, Glycine max
tgagggatctgcggactaaactcatattaagttagtctaaacctaagagggctgtctaaattgggtggagtcttacatgagggatctacagatgaagcttggatattcaccctaacgagggatcgaaagcttagtaattcaggctatagcatagaacacaagagcatgattgattagagaaatatatttttatgcaccagcttgcttgatagaaagacccaacatatctacctactgttgtcattatattcaccttgcattttatagatcttagcataatggtttagattagattttgtatgagattatcacttatacatgttctctcaacattgcgtcaattctgaacttaacttaagctaacatt

SEQ ID NO: 204773 - DNA, 450 bp, Glycine max
  unsure (1)..(450): unsure at all n locations
ctcagagtcacctgcggcatgcaagcttctccanagggcatggagagggctattcttttgtttatatccanaaatctagctagaagtctttctttgcctttcctagaacgtaccaaaggatatggtacttctctcccttctgctgaagatgcttctttctttttctctctagcatactcactcttgctttctctcatctcttcttttctctctttttctttttcctttttctcattatttcattttcttttcctttctcttttatctttttctttctccttcttctccttctcacttatctcttttacactcacaattattggtatctccttctattgatcatcttctacttccactttctcctcagtctcactctaaggttccaccactgggtcaatcgttgtctcagtcaccagttggtgctattcttcacctaatctcttctctcct

SEQ ID NO: 204774 - DNA, 207 bp, Glycine max
aaccaagccacaaaacgccagacataaaagacaaacaagacccatcactgaacagatccaaaagcaaaaaaaacaagcaagccgccgcgccacgaagcgcccacactataactgaaatccacaacaaacacatacaaataacacacaacaataaccaacacaactgcaaaccacgacacccccaaccaacaaacatgcccacgacaa

SEQ ID NO: 204775 - DNA, 465 bp, Glycine max
  unsure (1)..(465): unsure at all n locations
caagtctttcggcaaagagagagagaggtagaagatatttctattatgntatgttcataaggcctcctgcggcaaaaacgatgtataatagctttgtatatcactatcatcacaatatgcactattcacaggtctctgctttttataagactcatttatgtctcggtcatatgtgaaacccattggaagaagttatatacctttaagaaaaatcctgaaaaccattttgaagagttacatcttttgatttttattcaaaacttgtcattggtaatcgattaccaaatccttgtaataaattacacaatactttttatgaaagaatgtggctcttcacaattgaatttgaatttcaacgttcaaacacactggtattcgattaccaatatcttgtaatcaattacaccattctgaaatcaatggaacgtgtaaatctattaaaagctttgaaacaaactttgccct

SEQ ID NO: 204776 - DNA, 441 bp, Glycine max
  unsure (1)..(441): unsure at all n locations
tcttgtggtcttgtgtcatggacatattgagacatgtgtgtggtctaccccatcgngtgactntccatgaataagttatcttagataaaatttccttcatatagaaagggcaaggacactctacgcatttattcaagcaacaaacgacatacttgttcgatttgctttcaacaactttgaaacattgatgcaccttcataacatattgtttgactacattcttgaccgcatctttactatcaaaatccatgccaacatataattgttggccaacattaaaactcgatggcatctccaaaccacaaatgtcctcttcatcaggatgattccaagtgatattgttataactgtaaacatcattccanaatggattttgaattccttgtacacctaatagttcagaagcaaattcacatcatacgtattgagcattatatacaa

SEQ ID NO: 204777 - DNA, 194 bp, Glycine max
gaccaacacgcgacagccgaagggagacaatcacccaacaagcaaaaccgaagaccaaaggccaacgaaaggcccccgaaaaacgcaaaaaaccaaagaagccccccaaagaaacccccaaccgcgcaacacagaaacacaaaccaacgccacaacgcgaaggcaaccgaccgcgcgacccaagaaacagacaa

SEQ ID NO: 204778 - DNA, 393 bp, Glycine max
  unsure (1)..(393): unsure at all n locations
gccacgacgccncgagggggagcacatttcaccattagcaaacacccacaccccaacaccagcttgaaactaacccccggaaaccgagcctgggccccccgaacacaaaatgctcagacaaagaagagttgacacaaagcgctactgacggacaacggcgacgtgaattccttcggaaccacagacgatatatcgcgatggcgagacgaaatcgcaccacgattctcgggattccgcaacgttgctatctccaacagaactcgaagcgagctaatttcctaccacacacctgacagaccaccatggaaaaagtcgacgaacaagcacagcaaaacggagcacatgcaaccgcacaggaaaactaacacgcgtatctacacatcaaatgcaaac

SEQ ID NO: 204779 - DNA, 296 bp, Glycine max
gcagcagcagcccaaaagagcacaatcttttccccccccgaaacacaaaacaagacaggaccacaaacgcaaaaacaaaaaaccacacaagcacaaacccccaagcaaacaaagaaccagcagaaaacccgggccaaaactgacaaaacaagtcaaaaaaagcccaaaaaacaaccaaccacacaaaaaaaagaaataaaaccaaccacgacgggggaggccaacaccgacaaaaaaccacacccacaaggaggagcggaccaccctcaacagaaacaacacaacacaccagaaca

SEQ ID NO: 204780 - DNA, 351 bp, Glycine max
actcagcttaaattgataaatgtcgagcactgtgtatttttacatattgttatcgataccagtcaaatttaaattcaattaatgctgtgtaatgtttttgccctgtaattgatacatccttggaatcgataccagaagttaatctgttgaaaaacttttaactagattttggccaacctttgcgattcatggaattcctcttttaaatacctcctaaaatttgagacgctataatattttgataccttgctgaaaattttaaaccatgaatcttatcctggctttaaaaattacggtccttgtaccacccttgaaaagacccccccaaaaaaaggtaaagagggccttcct

SEQ ID NO: 204781 - DNA, 364 bp, Glycine max
  unsure (1)..(364): unsure at all n locations
agctngggtgatgatgcgcgaactgatgttttccatgaggcgnnngctggggcctgacccacgcgggtgatgaagagacggcatgggcatctccttccttcctttttgcccctgttgccccgattcttttggcattcacgttcgtggaggaaacgtaatcaaactttcctctcttcaatccaacctcgattctttccccggcaaacaccagatccgtaaagctggacggcatgtaacccactagcttctcatagtagaacactggcagagggtctaccatcatggtgatcatctctctctcaaccatgggaggagctacttgtgccgccaaatccctccatcgctgcgcatattctttaaaggt

SEQ ID NO: 204782 - DNA, 357 bp, Glycine max
  unsure (1)..(357): unsure at all n locations
actaagcttggaaatgttgtntcaccttgtcgctaagccaatctgttggcttaataagcatctgctaagcgcaacattcctgtgctaagcgcgaggtgtaacacccttatatatatatatatatatatatatatatatatatatatatatcaatatattattagaaattatgtttgatgtttgagtatatttgctgtgttatttgatccgtaattatgttcaaggaggttaatttagttaatagagggtatgggtagataaggatctatcttctcatagaagccacgaggaagcttcttgaggaagcactctaatgaagcttcttgaggaaactacatgagctgcctcggtaaaaat

SEQ ID NO: 204783 - DNA, 338 bp, Glycine max
taaatctacgccaggctatttggcatgccttcattggggcactacacactaaaagagtatgacgatggtaggcttaaattcctcactaaagcaaactcatcacttttacattgagccattaaaaactattttgcgcttctataggaaaatcaaggattgcaaatcccaatatgtcacgaaactttcattttttaatcaaatacccatttctctgacatatcttattatcctagaaaaacatgcatagtcctaccctcacacagaattgaccaactattaatctcgaatcccaacgaatctcacactattaacctattatcccatctaatcaaattatc

SEQ ID NO: 204784 - DNA, 289 bp, Glycine max
ctaggtgcacccagcactaaagcggaataaacctatatacctctggcaatttttttaaaatttgtgcacccagcagacaaatttcttgcgcgccgattagattccttacttccttccgagacctcagttcttcttacttctgcgcgtggttcttgcttccgcgacctacactgggctttgcgcgttctggctttcgacggcatgagtgttgctttatcaccattgttggcggagtggtggcggtgctctacaccttgcgccgtcttcttctgggtgggctgctaatcga

SEQ ID NO: 204785 - DNA, 342 bp, Glycine max
  unsure (1)..(342): unsure at all n locations
agcggggaggcggcttagtcttttatttattaacaccggncgggtcgtattgtataaaatagagttcatctcctttatcttagtgagagcgatcctcctaagtccttgagtgtatccaagaacacttctgccttatatcagaggtcctccacatcctttgtgtgacgttctcgctggatagggtgactctttccttccaccatttcatcttcaaccttgttcttcacaacttcaatttcaaagactccaatcgtcctagaactatctcggaccataactctattttactcgttaaatcaagcgattcttgagtctaaactgatcctaatccacagcttcacc

SEQ ID NO: 204786 - DNA, 381 bp, Glycine max
tatccagcgcacggtggtgagtccagatcgtacacggttatataaacatgaaggctgcacgggtgtttcaccaagtcagagattatagagctattttgtgagttttgtgacttgaatgttttgtgagccaccttgatgttaccctaacatcaagtgttggacctgagtgtgcagagttgatctctattgttcagagagcaatctctggtgtgtctttgatttgttgaaacacgggtgagtgattgaaagggagtgagaggggttctcatatctaagagtggctcttacgtagaagttgcatgggtagtgattatgtgagaaggttgtatacagtggctgattgatcttctaactaatactattttagtggatttccttcct

SEQ ID NO: 204787 - DNA, 200 bp, Glycine max
gggaaaaaggaaggaaattttttatacaatatacacacaaacaatctaagcaaactatagggaacgaacacccgcaccactgaagtgatccaccacgcagcaagtaaccacggaacgacataccacaagacccccaaacggaaggaagcaccaaagaaagccctgtacaaaagactacgacaaacgcaccacagaaacaa

SEQ ID NO: 204788 - DNA, 228 bp, Glycine max
gctctgcttgagcactcgaaagaggccccttctcaactccaccccaatagttgggccatggcgaaggcctatgacaattagtgcccttccttaaaccatcgacacattgcgcctgtagttcgcactttttccaaatgaaggtgaccgtaagatcagctgggtctccatgaacagcatgtccaaaaagctttccgaagtttacaccaatgtatttcactacttcaagga

SEQ ID NO: 204789 - DNA, 239 bp, Glycine max
cattcgaaggaacacgacgaaaaaatcacggacaaagagaagaagaaaacagcaaagctgacgcgccattaaaatcaacactggatcgtttccaacatcctttctctcgctagccatgtatcctgtgcaatagtcagttagattttcttaaaactttgatggaatctatgaacccttatgggtcctccgagatattatgtgtgcatttatcttctccacttatcgttggtaatttcatt

SEQ ID NO: 204790 - DNA, 391 bp, Glycine max
  unsure (1)..(391): unsure at all n locations
agctntncgatcgatgctatgtacttgttttggnccacattgngcatcgcgcatttttattctcgttatgtttactttttataccccctgttgacgtgcttaagccattttacttaagacatttctcgcttaacttaaaaataaaatcaatttcgaccgaacgtttgaattgtattatccgttaattttggttaaaatgaattccgaccgttcggtcgtgccgtaaccacgttggaaatcaaaaagaggtaaataataatataataataaaaaaaatatcttttagtaaaataaagcggaaaatcaatcggacgttttctctttgggatttctcattcttaatcgaatcgattaataaccaaagtgaaactaagactaatatacacttaca

SEQ ID NO: 204791 - DNA, 378 bp, Glycine max
aaactagctttatatgggagggggttagttacttttgtttcacgtgagctctgaccactgttcttccttcccgcgatgctattttttatgatcgcctgagtgggtttatagcctaaaccatacttcccacgatttccttgggtctttatcaagctagatatgccgccattgtctttgcctaaacccatcccgggttcataaccgttccacaacataactcgggccatcattaccgccgcatcggacagacaaggttgcccaaagagggagtccactgaggaaatgctgaccacctcaaaagactggaaagcggtttctaacgattcttctgcggttttcaataaagcatgaggatgggcacttaccaaatattttctc

SEQ ID NO: 204792 - DNA, 403 bp, Glycine max
  unsure (1)..(403): unsure at all n locations
tgagctaattcnacgacagagcgtgttgctcttatgtttgatcgacacccgtaatatattgagacgatcgaaattgaattccgaagctctgagctaattcaaacgacaataacgttttgctcggatgtctgattgagtcccgtaatctattgagacgctcgaaatcgaattctgaagctcacagctaattcaaacgacaataacggtttgctcggatgtatgattgagacccgtaatatatcgagacgatcgaaattgaattctgaagctctgagctaattcgaactacaataacgtcttgctcgaatgtctgatggagtcccgtaatatatcgaggacatcgatattgaattctgagccctggagcaattaaacgacaataacttttgcttgatgtctgttg

SEQ ID NO: 204793 - DNA, 264 bp, Glycine max
catcactcacatatattatcattctccactcttctctcctttgctattgtattatgcttcatataaaataagtaattactcatatgagctctgtttaatcctattttctccgcttggtatcacaaaagcccagtgcgtacacgatgaacatcaagtcacctattcgtccacacattctggaaattaacctattctgcgcagaacttgcttataactctaaaaatactcgtttaacaaattatactgtccaccccctgctaaaga

SEQ ID NO: 204794 - DNA, 366 bp, Glycine max
gatcgataatcatattaggattttgactaatttaatagcttctattcaagattttacaaacattagattaattagtttaatgatctgttctattaattactcaatattttttttaacgcacaatcattttttaaaatctaaaattattatttttatataaaagctaaaattaattattcgaagttataaattcgtttattcatttttttttcattttaaacaagttattatccgtatagataataactgaaaaccctgcctagaccaatatttgtgacgcaaacgcaagatgcaacgctttgagttcagcgagtaagaaaagaacaacgctgattgattcttttattctgcttgccgtacttcaat

SEQ ID NO: 204795 - DNA, 382 bp, Glycine max
ctcagccaccttaagaggcctaatgaatctgtacatagctaacttgtagtacgttcggtgagtaattcaacattgtatataacaagtacctctacctgtgaaattgttaaaaacatatacatatctaacatgaacttaatcttaattttcagatttgttgagcactatgtactcatttatgaaaaatgaaaaattcacccatgtttatttggaagggactacaaaatgcaagattgttacaatgataggaggaattatgcaaagattggttctggatggaagtcttttgcaaattctcaaaatttggaagctgggtaggaaattattattgagttcccaaaccaaaatctaactttgtttatcctggattcttctgaattta

SEQ ID NO: 204796 - DNA, 282 bp, Glycine max
cacaatcaaccccacgaagaagatgacgaataaattgagcttgtttcatcaataacaatcataccaccacacatgcataattttggagaatctaactttgaagattctcaataccgccatagcttggatcacaaagaagaccaacatctaatagggactctctttaaagggacgtgtttctaacaaaacaagacgtacaacatgctttgcagcagtatcatgtgagcaaaggagctaactacaagatacaactatcaaacttgataaagctaattatcattt

SEQ ID NO: 204797 - DNA, 278 bp, Glycine max
cgcagcatgcaactaaaataaacggaacagcgggagtttatcttcggaaaccctcggaaaaaccaagacacaacactatgcacacggatgtccgaatcaggcttataaaacatcgaaacgcgcgacatcaagacaccggaaactccccgcaaactcaaacggccataacataccaccggacacccgactcgcgcacataatatgccgagaagctcgaaaccgaacaaccaaagcactatacaaatacaaacgggcacaactattcacacggacgcccg

SEQ ID NO: 204798 - DNA, 243 bp, Glycine max
atttttaaagcgaccagcatgctgagaacctcaattgctacgattttatttgtggctttagacatcttgctgcatacctgaatccagatctctccggcggagtaggtcgcatccctggcttggtaaaatcggaagtttgactacgtcaggaagacaaccgatcatccatggtgcctctgggaaaagtcatcccttcttagcttttttcggaactgggctatcgcgaacctatgtggggcgcgg

SEQ ID NO: 204799 - DNA, 390 bp, Glycine max
  unsure (1)..(390): unsure at all n locations
agctnaactctgagggagaagcacactctttatcgagagacgaacacctcggcagaagcgacgactactcaatctccaccactgttcatacctgacaatgacgaacatgttgacaaccagtgtctcatcgacacaatctgacaaacaagaagcatttgactccgaacatgtctcatattcttcaacatcaaattcatctagaataaagcttttgacaactaactcaaagacactcttatatatacatcgcacataaactcgagatcacatcatacgacatccgccaattgatacgatcaatacttcttaatcttcaatcttaatattacagaggactattataatataatcattaacatacaatacaaccaccatctccttgtcttttat

SEQ ID NO: 204800 - DNA, 351 bp, Glycine max
  unsure (1)..(351): unsure at all n locations
gactttcagcttgggagactggtagaagttgccccattgtcatcacatatttcacctaccttgcattgatatgtggctgacgaaacatggttcctgcccattatgcagaagggatctgggtaattctgtaaaagcaaaagacaaaccggaaaaatagctacgtcctttcattcttattttttttatataagggaattacttttaagaatgtatagtatggttaaatgtagtaggaactaggaaccagccatgtcactcatgagtgtcataattgtaataagttactacaaagaaaactttgacataaatcagcctgcatttcttgnataaacaaacctttctttattcatt

SEQ ID NO: 204801 - DNA, 461 bp, Glycine max
  unsure (1)..(461): unsure at all n locations
tcttaaagcacaacanacaatgaagcactgtgcggataatttatgtctcgatgtgagttttcaagtgggtcattgtgtgtttgtgaaactgcaacctcgccgtcaagtgtcggtaacaggagcttctcattcgaagttgactaagagatactttggaccatttcaaataatccaaaaggtggggcccgtagcttaccaactccaattaccggctgattcccgcatacatcctgtgtttcactgctcttttctgaagccatgccatcagctctctgattcacccagcataaccgcggagctaccaccctcttccattaacaatgatcccattatttcttctttagccatcctcagcaccaaatgggaaactttggaacatacacctaagctataggtcttggttcaatggagagggctacacccggatgatgctacaagggaatcatgggaagaactcaaac

SEQ ID NO: 204802 - DNA, 360 bp, Glycine max
  unsure (1)..(360): unsure at all n locations
agaaacacacacgctcacacacacacacacacacacacacacacacacactctttttctagtcgaacactcacataaatttccattctcccactttgaattagaatctatgccttctcttaaaattaaaatgattacttatgtgagttcttgaataatccctatttctctccccctttggcatcaacaaaaagccaaagtgcgtaacaagtttgaagcatataaatacaactaagcatccatacaacattcatggaaaaatataaaccaaatcatgaagcaagaaccatgaatatatcacatatataaaaaccgcatagtcaaataacataattaatattngttcaaacataccatgcaa

SEQ ID NO: 204803 - DNA, 302 bp, Glycine max
cttgaccattaggggagacccggattaaccctctggaggaaatcacggatcatcgaagcaatacgagcgtggataacggctcacctgaatcagttattgattcacattaacctctctaaagattctcccacccatctattatataggcccattcgatgtttgccaccacgacattcttagtactaagttgagggccttgctcaccccctcaacttatgtgcctacttactaacaataactaaacttagaatccttgatggtgtaggtatgacacatccgtgaccaccctctccctcatggaa

SEQ ID NO: 204804 - DNA, 459 bp, Glycine max
  unsure (1)..(459): unsure at all n locations
agcttaagagcaaaaactacggggtgctaacttcgagattcgtgcatggggaataattccttgggatgagatcactgagtttgtcatgaaagcataggggccactaccttgtctcccgcttgcataatgcacttcccacccaannacccatcttgggatgggcatcatagtacaaccacacaattggttcgcctctgggtcagggtaaccactaataactaagtgcaagcgattatacctttccttaagggtacgaaaaactatctctcccactaggcatcctacacaaaaacttgacccttacgaataagcttagtcaaaggtaaggctagcttagaaaaaccctctatgaatctatgatagtatcctgctaaaccaaggaagctcctaatctcaaacactgacttaggactctcccaactcatcaccacctctaccttggaaagatctattgctatc

SEQ ID NO: 204805 - DNA, 435 bp, Glycine max
  unsure (1)..(435): unsure at all n locations
ntntatttcactntctatttctatagtgttggatcatgattcctatacttcatataccaacagtgtttgagtagacacctgttgatgtcatctgaaagcaactattgtttagttcataagaattcagaagacaaatataagaataggcttatccaagtaactaaagtcagctacatagatcacacatgtcaataaaaaactttgtaccccattgtccagaggctcttcgctatgcgaaggtatgggggagggatgttgtacgcagccttacccttgcatatgcaaagaggctgtttccggattcgaacccatgaccaacaagtcaccaaggcacaactttaccgctgcaccagggctcgccctcagatcacacatgtcaatattagactaanaatcaaattctcagagaaatattcatcataagatccctttatg

SEQ ID NO: 204806 - DNA, 430 bp, Glycine max
  unsure (1)..(430): unsure at all n locations
acctgcggcatgcaagcttctcaaggaagtttctcaaggaagctatctantctatttatagaaacatgtgtaacactggttgttaatatccatgtagagcttgtaggccttggatcttcttcatcaatggagtcctttgcttcttgaagtttaatggcagcagaatggagaagaaagaaagatgattggagatgtcacttcaaggagaagatgagtcaagaacaagctcaccaccataagaagccatggataagagcttgaaggtaggagaaggagcacgaaattttttgcctcaaatgaggtctaaactttgaagtgtaattctcaaattatcaaagttccaaaaaatgcacatacaaggtctctatttattgcctaagtgtcacacaaaattggagggaagattgaatttctattcaaatttcacttg

SEQ ID NO: 204807 - DNA, 457 bp, Glycine max
  unsure (1)..(457): unsure at all n locations
tgaggtttggtgttggtgatcaacgaagaccctgttcctctccctttggtgttgtttggntgagtcatggaagggtaagcacctctttttctcccctttgactcctttttcattttccttcatagagcgcccatggggttcaagaaaatactcattattggggttttaatgttgcttctttttgtttatgggttctaggtgtgtggtggcttagtgatagtgggaaagcattcatcttggacccaaagccctctctattttccctttcttcctctcaaagattgcttcttgatttataaaggtaacaaaagctaaccatgtgacaccctctacccctcatctatatactaacaaaggaataaaaattcanatattaattaaaatcattgtttaatacattcttaaatacaagcctttcaaagggataatagggtcacaatcactttcttctatatca

SEQ ID NO: 204808 - DNA, 431 bp, Glycine max
ccctccatattctagatgcatcattttagctaagccggcccagatcccggctcagcgagagttataggtcttatgacctgcagaatttgctaagcaccgcttttgtgcgctaagcccaacttcattaaaaaaattgaatttcaaacttgggctaagcacgcatatctgctaagtgaacctctttgagaaaccaaatgtctctctggctcgcttagcgctgaggttggctaagcgagaaggttgaaaaattgcttaagtgagtgtaacatcagttacactcacatttgcccaaaattctcagagcatatcctgcattttctctctcacctaaatctgtacaacctgcattcttgctttcttttttgcatcttctacgcatctttagcccacaacaatccaagtaaggattagaaaaccatataattagcttt

SEQ ID NO: 204809 - DNA, 361 bp, Glycine max
  unsure (1)..(361): unsure at all n locations
tnctgtgatgacatngccattaatatacgccatatatattctcattcttgngccttttataaacaaaaagtgaaggaccacatttactggctgagaagccaaactgaaccaaggtgctttgcaatctttcaaaccactgccgaggagcctgtttaaggccatataaggctgtattatttagcttgcacaccaaagagaccgggcttgagactgaaatccaggaggctgctacatgtaggcagtctcatcaagcaagccattaagaaatgcattgttcacatcaagttgatgtagaacccaatggtgactgaatgctatggtgagaatcaatcgaatggtgactgctttaaccactggagaa

SEQ ID NO: 204810 - DNA, 413 bp, Glycine max
  unsure (1)..(413): unsure at all n locations
atgcttcaatggttgaaaatatatnaggagagaaaaagagaggcgggagcatgaaattgaaggaataaaagagggagagaagtggaactttgaagtatgtctcacangactcttattcatcaaagttacaacaagtgttacacatgcttctatttatagactaggtagcttccttgagaagctttcttaagaaaacttctttgagaagcttctttgagaaaacttccttgagaagcttctttgagaaaacttccttgagaagctagagcttagcaacacacacccatctaaaaactaagctcacctccttgagaaacttccttgagaagctagagcttacctacacacacccatctaaaaactaagctcacctccttgacaaaatacatgaaaatacaaaataagtccatact

SEQ ID NO: 204811 - DNA, 329 bp, Glycine max
ctatattccaaaccaggaagagccccccacatctaaatttacccttgcctcgagacggacggcgctccgattgccgctactttgaaagtagcagatgagtgcgtgaaacccactggccaatgctctgaatggcggcctgactcaaaagctccaagcctaactttgtattttattcaccaattcgcatgacaagatgccccctaaccctcatttatacatgctctaacatatgccacaccaactatatgaggaaaatacacacatgcgattctacgtgctattttaatgcttgaaaggcgaaagagacttacccatgttcaacaattatt

SEQ ID NO: 204812 - DNA, 432 bp, Glycine max
  unsure (1)..(432): unsure at all n locations
agctntgagccaaaatcctgactctccatttaccttgacccagggtgagaataccaatccttaccctcggaagcaaaaaagaatagaggggaaatttccaatcaaagaaaaagagaaggaaaatttccaatgaaagcaaaaaagaaatgaaggaaaattccccaatcaaagagtgggagaaagcaaaaagaaaagaaaggaaaattcccaatcaaagaatgggagaaagtaaaaaaggaagaagaagaaggaaagaaagctcctgatcaaggatcgaaagaaaccagaagaaatgtgcagagaggtctttggaccagacaatatctgaacagtacagaattgtcaccaaatgaacaaaaaggaaggaaaggaaaccacgacctanaatggtcttctccctttaattaccaaccaaaatcccgtgcgctagcg

SEQ ID NO: 204813 - DNA, 447 bp, Glycine max
  unsure (1)..(447): unsure at all n locations
gtgatcttccaccaccgccaccaccatcatcttatatttctattttaatattattagtactttgattttcagccttgtattttggctatattattatgatatttgaacaatttactatttctttattttcatggtgtttgaacaaatattaagtatgttatttaactatgtggattttataattaatttgtttatgactgttgcttcatgattcttgcttcatgatttgaatgatatttttccatgaatattgtatggatgcttagttatatttgtatgcttcaaatttgttatgcactttggctttttgttgatgccaaagggggagaaaaatagggattaaatcaagaactcacatgagtaatcaacttaattntaagataagcaaanattctaaaacacagggggagaaatggaaattatgtgagtgatcgactacgaaaaagt

SEQ ID NO: 204814 - DNA, 434 bp, Glycine max
  unsure (1)..(434): unsure at all n locations
agcttaacaaaaggcatgcgaattgtgtggtattcctanagcaattcccttatgttatcaaacataaaaagggaaaaggtaatattgtagccgatgctctttctcggcgtcatgcattactttctatgcttgaaacaaaattgattggtcttgaatgtttgaaaagcatgtatgaaaatgatgaaacttttggagaaattcttaaaaattgtgaaaaattttcagaaaatggtttctttagacatgaaggctttcttttcaaagaaaacaaattgtgtgtgcctaaatgttctactaaaaatttgcttgtttgtgaagcacatgaaggaggtttaatggggcattttggggtccaaaagactctagaaacattacaagaactattttattggcctcatatgaaaaaggatgtgcagaaattntgtgaacattgc

SEQ ID NO: 204815 - DNA, 413 bp, Glycine max
  unsure (1)..(413): unsure at all n locations
tataaaagtccttctgattctattcatgtatttcttatttatgacatgagatgaagttcaaagattggaccttttgttagttgttattaatgaatagcttaaacacttgtgcttgagtgaaacagaagccatgaggctatggtttaagctgctttccttgatatttgtcttatgcctaacttcatttaattgtacaggttacatttcacttttctctttgaataacgcatgctttatgaaagacaagtgatgagggcattttacttcattctgttatcatgcaatcaataacttttgtgcatacacctttgcacatagtcactgcatgttattctgacttgaggaccagtgagttgttctttatttgcttgaggacaagcaaaactgtaaatttggnggaggtgttagtcgat

SEQ ID NO: 204816 - DNA, 414 bp, Glycine max
  unsure (1)..(414): unsure at all n locations
agcttccacatcaagcaagttcatctcatagctcttatgcaaacaatagaattcaaaagttggagaatttgcttgaaaaccttgttgttgtccttaaagtgcattttgcagaagatccacaaattaatcaagtcttagaagctatagatcaagaggtatcaatatataatccaacttattcaaagatttaactatgatatgatactttacaaagaaaaaacattgttctaatttaggtacttacaaatggttctactagtaaaaatcatcaaactacaaacgatctgaactagaggtgagttgaaatttaataattaatatattgacaatatcattnttgttagcatatggtatagcttggaatgtatccgtactatctatgtatataataagttgacatttaataattaacat

SEQ ID NO: 204817 - DNA, 430 bp, Glycine max
  unsure (1)..(430): unsure at all n locations
gtatagatntagtgtttgctagcgagaatatcaaagtggttctgagaagacgcaaatntgattatgctactctgatgaataggaagcctgcggaaaatggagagaataagaaggagggagaaacccatgttgtgaatgtcgttcctacatggccaaatttcccactagctcaataatatcaattctcgaccaatatcagtcattctcattacccaccaccctaccagctaagaacacccaatcatccataaaggccacccctaaatgggccacaaaacccgcttgctgcacatccgaggccaaacaccacccttaatacaaatcataacaccaattatggaaggaagtttccagataagaggctcgtagaattcacccaaatntcgatgtcgtatgctaacttactctcatatctactcaataatgaaat

SEQ ID NO: 204818 - DNA, 450 bp, Glycine max
tgcaagcttgccttgccccttgatatatatgaggtgattttgtgtcactatgaaggacaaattccttgtgataaaggtagtgttgtcatgttttcaaagcccgtactaaggcatacaactccttatcataagttgaatagttaagggtaggaccacttatcttttcactaaaataagcaattggatggccttcttgcatcaacacagccctaacccaacatttgaagcatcacactcatattcaaaagatttttgaaagtttggcaacgcaagtatgggggcattagttagcttttgcttaacattgaaagcttcttgttgtgtctgtccccatttgaaaccaacatttttcttgagcacttcattgagaggtgctgccaatgtgctaaaatcattcacaaatcgtctataaaaacttgctaagccatgaaaactcctcacctctatcac

SEQ ID NO: 204819 - DNA, 254 bp, Glycine max
aatttttcagagcttaccattcacattgagcttttcgatatattacgggactcaatcagacatccgagtaaaaagttattgtcgtttgaatttgctcaccgcttcggtattcaattaccagcgtctcgatatattacgggactcaatctgacatccgagtaaaaatttattgtcgtttgaatttgctcagaagtttcacattcaatttcgagcgttccgatatattaccggactcaatcggacatcccagtcaa

SEQ ID NO: 204820 - DNA, 219 bp, Glycine max
aaactagacgctatacagcttggaaaattaaccgaagtaaatggggagactatcattctcctatcatatttatcatatcgaaattgcaagcctgatgacaaggaggtatgtgtatattatggtatgagtaatatgtggtacgggagacaagggcaaatgggaaagatgtttgtcatgagacaaaacccctgctaaaaacgacccgctggacgaacatgg

SEQ ID NO: 204821 - DNA, 402 bp, Glycine max
  unsure (1)..(402): unsure at all n locations
actcagctgttgaatctggagaaggcgggcgaagacctattttgtctctttcancaaaataatgcctctttctgtgttcacgatttctcctatcacctctttgattactttatctttgcagttatgaggattgaaatttctatctttttactgaacgaactcggatgacgagttgattatgactaccacttttcggctttattattaattctaacttctataaaacctatcttattacaccttctaatagagatcaaatgaaagtcctcaaagataaatgaagagtttgttagaggataaatctgattacgcttggatgcccaataataaggacaaaggctaataatgctaatgagatgtcacttgaaccataatcaacacctacttatttacacttaatgt

SEQ ID NO: 204822 - DNA, 423 bp, Glycine max
agcttgtcggagtatcaccctatattactcataggtggtcttcataggatcatttcgaagattctggccaatagaatgaaggcagtattacctactattatatctccgcaacaaatagcctttttacccggaaagaaaatccatgatggtgtggttgttatcaacgagttggtggattgggaaaaacgacaatgtaagaagatgcttatctttaaggttgatttccagaaagcgtatgactcggtcaactggaggtttctggaatacatgttacttcatttggggtttggccaaaaatggagaagatggataaaagcttgtgtttgttcatcaagaatctctatattagttaacagaagcctgacgcaggaatttgaggtcaagagagggctgaagcaaggagaccctctagctccactgctc

SEQ ID NO: 204823 - DNA, 445 bp, Glycine max
  unsure (1)..(445): unsure at all n locations
tcttagtttcagatgatgcaactgagtttgtagctacctcatgcacttctctaatgactatagcatcatttctggcgctaaactgctgggagttggaagccatcttctcaattaaatttctggcttcagcaggagtcatgtctccaagggctccaccactggcagcatctatcatacttctctccatattactgagtccttcataaaaatattggataagcagctgctctgaaatctaatggtgagggcaactgacacatagttttttaaatctctcccagtattcatacaggctctctccactgagttgtctaatacctgagatatctttcttgatggttgtggtcctggaagcagggaaatttttntctaagaatactctcttaagtcatcccagctcgtgatggaccttggagcanggtaatacatccagtcctttgccact

SEQ ID NO: 204824 - DNA, 450 bp, Glycine max
  unsure (1)..(450): unsure at all n locations
acactataaaactcaagctaagggtatnnccaacagaaagggggtatgatttanttctctcccatcgcacattgggagtaacatccaaaggtgctacaagtagaaaaacaatttgtatttttctctaaatttattctcttccttttcttataaattatttttttagagcaagaacattggtatttaaaaggttgaaggatcctcttgcttcacacgatcaaaaccaacgattgtcgtatcttgagagaagagagcaattagattttcttgtcagtgcaattaagacgttttccctcattgcactcaagatagcgtttgcgtgcttcaacctatgctatttaaaatttctctcttaaaaatgttttcctttgtggttattgaatgttatatcacattggtaatctatgttctggatattctaaagntacattgctactattggtgttatta

SEQ ID NO: 204825 - DNA, 446 bp, Glycine max
  unsure (1)..(446): unsure at all n locations
ttaagcacctgagctgcaagctgctaattagcttgtgctttctctttcactcttggattnctcatcatttctgccatagcccactctagtgttgatgctgaagtatcagttccagcagcaaatatgtcctggtgaaacaaataaaatatctttatataaagtttggtaaaatgaaaagagaaattgcatttatataacaaaatcgggcaacttttttaatagaaaaggagatgagaagaaaaggaagaaaaatgtaagataaagtaattagtacaaatgagaggattaaagagattaatgttataaaaagagatgttagtgagaaaaaacgtacttcagaaacaggaaatataatagaagttttgaggcatttacttaccaatatcaaagctttgatgttgttagtcgtcatttggatgtcgagagtgtcatcttgttggattctg

SEQ ID NO: 204826 - DNA, 457 bp, Glycine max
  unsure (1)..(457): unsure at all n locations
tgaagaaagagtcatagatgcatgttatagtttgtaattttattatgtatatattattgaactcatcacctcacgaacgaattctattaattattntagtacggntaattctttggacataaaacataataacatgcatttgaaggatcaaatcactataaagtaaaataaaggaggtaaataaggagaaattgtttttctttgaaggacataatgagaaattgttaagaaaataatcaaatactactgcccagttagatactttgacttggtgcccaacagcaattagagtgcaacgacaatttctattttgacttagtgcgcatgtgcaacagcaattatatagctttcaacggtcaaggttctcactaccacattaactattgctgcccaagtggcacttatatatctacaatagtattacacaatataaaaggagtaacgatgacatcctaat

SEQ ID NO: 204827 - DNA, 388 bp, Glycine max
  unsure (1)..(388): unsure at all n locations
agcttaagctaacttaactgcacattgcttttattatnngaagagtatccttgcggaaccttcacccgacgaagacactgacaaaaacttatcttctccttcttggacaaagtatggtaggctgggggcaagtaaattttcttcccatcagaccttggatgcaaatgtgatcttatacccatatcagctagatcttgacgggtattcaagccatccttcgtcttgccttgaatgttaaggagcgtcccaatcacactgtcacaaacatttttctccacaagcataacatcaatacaatgtctaacgtcaagatcacaccagtacggaagatcaaagaaaatggacctcttcttccatatgcaactctgacttttatccttcttttggg

SEQ ID NO: 204828 - DNA, 363 bp, Glycine max
  unsure (1)..(363): unsure at all n locations
tcttcttccgcgctnagaaaggtgagggagcttcttctcctcttgtattggcatcctccattgactagctttgttcgtttcttccgccatccaggctagtgttctaacctcgtgtcttcatttggaagcgttaatggtcgtaggatacacaacatgagtgatgtgtggtggctgaggttgaagatgaaagctcttctgcgagaagaaccttcttccgtgcatgtgggaggggcagctggatattgaagcggaaaaaggagttcttccgcgggaatctacggaagaaaggggagaatgttcttcctcgcgttcccgcggaagaaagttccgaaggttcttccgctggatccagcggaagctggt

SEQ ID NO: 204829 - DNA, 392 bp, Glycine max
  unsure (1)..(392): unsure at all n locations
anctngaaggcaaactggatgcattgtttatcctgttatcccagccggctntgaatcagaaatctgtacctgtcgcaagggtttgtggtttgtgctcctctgttgaccaccatacagacctttgcccttccatgcatcancctacagcaattgagcagcctgaagcttatgctgcaaatatttacaatagacctcctcaacctcagcagcaaaatcaaccacagcagaacaattatgacctctccagcaacagatataaccctggatggaggaattaccctaacctcagatggtccagccctcagcaacaacaacagcaacctgctccttccttccaaaatgcctgtggcccaagcagaccatacattccttcacctatccaacaacagctg

SEQ ID NO: 204830 - DNA, 387 bp, Glycine max
  unsure (1)..(387): unsure at all n locations
cggtatctanacactggatgctctaacgcatatgacatgtctttatgtagnggctcattgcattagatacaagtatatacacaatggtctagctacttcaaccttgaatgtgagggagttggcaatattttgatcagaagaaaggatggctagacaacattgattgataatgtgttgtttgtgcttggcatgcactgcaatctcatgagtgtgggacaactagttgaaaatggattcttagtgattatgcacaaagaatctcttcacttgtttgactcatacaaaaggttgatgcttagatcctcactctcaatgaacaaaacctttctagccatacattaatgatgcagatgcacagtgtcttacaataacagtggctaattaaga

SEQ ID NO: 204831 - DNA, 336 bp, Glycine max
tgaatcccgagatttaacatcagcaatctgaatgatgaaactcaaagaaacagttattattgtgagtgaatttactaacactaagtaaatctttggtaagggagggaactagcactaaatgtttaagggaaagagtactgtttggaaaatatgggaacctaaacagattcgagcctatggaagagattcttgtacctgtgccattagccattacgatatgttcatttcctgcatcttgactgctctaaaggagattatgtggatcattggttgcatggtgtgaagcacctgaatctggataccactcctatgaaatgttatcatcacgtggaattt

SEQ ID NO: 204832 - DNA, 432 bp, Glycine max
  unsure (1)..(432): unsure at all n locations
agcttgaaattgaacaactgaagctcttgttaaattcaaatggtcataacttttcacacgaatatgcgattcaggcttataatatatcgagatgctcgaaattgaataacggaagctcttgagaatttcaaatggtcataacttgtcacactcgggtccgattcaggcttataatatatcgagacgctcaaaattaaacatcggatgctctcaagaaattcaattggtcaaaatttttcacacggatgtccgattcgggcgcataatatgtcgagatgctcgaaattgaacaacgaaagctctcgagaaattcaaatggtcataacttttcactcggatgtccgattcaggcgtatcacatatagagacgctcgtaaatgcacaacggaagctctcgtgaaaatcaaatggtcataactttntacacggatg

SEQ ID NO: 204833 - DNA, 322 bp, Glycine max
gcggagatacgtgcgtttttttatgaccagagcaatcgctggagagtttccgacgtctaaatatgagcgtagccagatatcaacatcctggagaggacctctgcgtgaagagttatgaccaagctaacgtcgcgagagcttgcgcggttcgatatcgaacgtgtctaaatgggacgcgcctgagacaagcattcgcgtgagaagttatgaccatctgaatttgtcgagagcttacgttgttaacttatgagcgctctcgaaatagtattcgcccgaataggacatgcgcgtgagaagttatgacaatttgaatttctcaaga

SEQ ID NO: 204834 - DNA, 415 bp, Glycine max
agcttgtgctagccactaagtgagttgacgtgctgagcctgtcttatacgctaaacgagttgtcctaatcttcaactttttcttcaagtttttgcatcaatttttcctcccaagcacttgtaatttccttcttttgaatcctgctggtcaaaaattaaaatgatattaaaatcctcattattccatttaaaacaacagtaaagtagacaaattctaatcattcttagtcaaaattgaaaatcaattaaacccaaattttgcatttatcaaacgatgtattcgatatagatccgcacgatgacacttttgatagaggcccaaagcttattgaagaactcattaaattgcaactcggacccaaaccaaggcagtacgcagcttagcagggacctcatcagcaatgagcacaaacgca

SEQ ID NO: 204835 - DNA, 429 bp, Glycine max
  unsure (1)..(429): unsure at all n locations
ntgcatagctcctatcgtcatctgaaattgatcttgctatatcaattacaaataataactattttgtgacaatttaaagtgaaaaatcaacaaaatccaatttatattacctggcaagagtagtctccacctgatacatagtctggtagtggttgcccagactatggctataccgagatggtcggtaaatgtacaagaccacatgatggttgtccttactttagcgaaatgacatacgggtgggaaaccttgaaaaatcaaggtagatagtaagagggtccccaagtggcacaacatcacccagaagaattatttgttgctgctagtccgcctacgcatgatcataaagccaatacataggacggngaggtggatggtgtggaatcctctatacatggccaaatttcctcaacaccctttctggacgat

SEQ ID NO: 204836 - DNA, 445 bp, Glycine max
  unsure (1)..(445): unsure at all n locations
agcttcaccaccaagagagtgccttggataataagcatatagaggaagctntcatggatgaagagaatgagagagagagagatgggcatggaattgaaggagaattaaggagagaagttgaactttgaagtgtgtctcacaagtttctcattcatcaaagttgtgacaagtgttacacatgtttctatttatagcctaggtcactaactttttatgaatttcattttcatttcatgtgaatctaagaggaatattccaaggatatgccaaaggcatcttagcatattccaagaatatgccaaaggcatcttancatattccctttagatgctacaagaatggaaggtgtgactttagtacgtggaaaaggaatatgccaaaggaatattctaagaatatgtcaaaggcatcttatcatattccttgagaagctagagggggaaac

SEQ ID NO: 204837 - DNA, 428 bp, Glycine max
  unsure (1)..(428): unsure at all n locations
ntgccaatttagttntcatcggcgacaggatcgaagtgtgtttgaatttatgaaaaattgataatcctgttttgatgaatgggaagcctgnggcaaatagagaggatgagaaggcagaaggaacccatgttgtgactgccattccttcatggccaaatttcccaccagcttaacaatgtcattactcaacaaatatcagcacttctcattacccaccaccctatcagccaagaacccccaatcatccacaaaggccacccctaaaccaaccacaaagcctacctgccgcatgatcgaacccggcaagtgcattggatcatgcaagtagtataaaacggtaagaatcgagtatcaaactctcggggaacttgtgttacttggtaaagctatattcagtgaataggtgtcttgtatgaaaagatatgtgt

SEQ ID NO: 204838 - DNA, 404 bp, Glycine max
  unsure (1)..(404): unsure at all n locations
atctaanctcaattctctgatcctgtaaaaaaagaaaatctcaattctgtatgatagtttcatttttgagacaactattgtcttgttgtctatgctacctttttcttcaacgtttactattaaaagggcacaagcaaacaaggcacaataggttggcaaaacccaaataagtaagatactatagtaattgatcggtgcttcaagaaaaggacaaaagtacatttttgggaatggataatcatgctcacattcaaaggaactactgatagacatggaaaaaaaaaatcagtacccgtatacacccatctgaatcttctgattttgatgaataatatttaaattgatcggatatgaattcggacaaaaggcggatacgggtatgagtataagaatattacatccgt

SEQ ID NO: 204839 - DNA, 469 bp, Glycine max
  unsure (1)..(469): unsure at all n locations
cactagaaactaagctagacggccttgtttgaaccgagagacgtatgatgtattgnactatttngaatatgaagtagaagaaagtgaatgtgagccttttacccctttgaaaggcttgtatttaaaaataatttaaaaatacttttaattagtatttgaatttttattcctttattagtatatatgtgaggggtagagggtgtcacagttttcatatatgtattttgttagaacaaaatcaaaaagaaaagagaaggagcatgaatactaagttgcatacaacatgatcaaacatggtctaatgttatgatagcattaatactaattataaacaaagtgactgcgacacactttcgttacatactaatcaattatagtacatgcttcagtccaaagtaaattatagacaagggtacganataatcataaaatcaccttttggataacatatatttctaaagttacaaaa

SEQ ID NO: 204840 - DNA, 415 bp, Glycine max
  unsure (1)..(415): unsure at all n locations
agctaagctcttaactgccaagctcttttatttgatgagtatccttggtgaaccttcacccgacgaagacactgaanaaaacttatcttctcatttttggacaaagtattacaagctgagagcaactaaattttcttcctatcagaccttggatgcaactgtgatcgtatccccatcttggctagatcttcacgggtattcaagccatcattcgtcttgccttgaatgttaaggatcatcccaatcacactatcacatacattnttctccacatgcatatcattaatacaatgcctaacatctagatcagaccagtaaggatgatccaagaaaatggacctcttcttccatatgcaagtcttacttttatccttcttttgggtcttttcaaatacagtattcaggtgttgaacct

SEQ ID NO: 204841 - DNA, 440 bp, Glycine max
  unsure (1)..(440): unsure at all n locations
tgcttctacagttgaacctccagagggagncctatctgtttatttctctaccctctgagaagttatagtataaatatgaccccacaacctgcttccgtcacttgatacatagtcactattgttagcaaatgtctcatcaccatctagcacaagatgcctttgaattgcctgataaatagtcaaatgcctattaagctacttcccactagcagtaaatatcaactttggaggatcattagaactaccaaacaacgaatgccctagtcgatctcttccacccttgatacctctgttattagtagatctaagtccaaccatagcaacaacaacaaatgacattgcacctcttgagcttaaggcatagtcattcctaanatcagcagagtctgatcccctgactgtactagctgtgctactagaacctaaggcagcattagtct

SEQ ID NO: 204842 - DNA, 371 bp, Glycine max
ttagagtcacctgcggctgcaagctaactccttaactgcacaaggtctaatattgaagagatccttgggaaccttcacccaacgaagacctgacaaaaattatttctctttttggacaagtatgacaagctgggggcaagaaatttcttcccataaaccttggagcaactgtgatcgatccccatctagctagaacttgacgggattcaagccatccttcgcttgccttgaatgtaagacgtccaatcacattgcatatacattttctcaatgcataaatcatacaatgctaacgttaacagacctgtcaaaatcaaaaatggaccttttcatagcagcttactttatctttttggctttcaaacagatta

SEQ ID NO: 204843 - DNA, 448 bp, Glycine max
  unsure (1)..(448): unsure at all n locations
tgcccaggaaagctgngtgcttaaggctgaaggtatagcttgttccttgtgaaccacatgctagcctgngtgagctagggtccagaaatttccaaaaaatgaccattcccccccctttccttgtggtttttgttcccggatatgacaatcaaacatcaaatttgagcgatccctcgaccttgcgctgcaaccagtgccaaacaccgtaatttagttagtaatgatcaaaacatcacaagtggatgataaaaacatcatacccggatgaaattagggtctgatagttgcccctctttacttatcttttattaaaaataagagataagtaaagataatgacactaatttcacttgagcgatccaacttttcaaccggatgccagagaaaacaaagaagcaaaataaaaaaaccaaaaggacgttgaagtcctataacatcaaaagaggac

SEQ ID NO: 204844 - DNA, 435 bp, Glycine max
  unsure (1)..(435): unsure at all n locations
agcttgttgaaattgccatgtttggatgagttatacatacctgtgatgnacctaaacaggcgagctcctgacagtcaacagataaaaggaacaaagaccacaaagcatggaggcttgtggtggctggccacctgtgaattttgtgtgacatgtggattgtggcctctggtaatcgattaccaagggtgggtaatcgattacaaggcttataaatgaagacaggaggctaagatggtctctggtaatcgattaccacggggtgtaatcgattaccaggcttgaaaacgaagtcaggaagctaagggagcctctggtaatcgattaccagcctgtgtaatcgattacacacagggatgggtcactggtaatcaattaccaggtatgtgtaatcgattacacagtgcatgtttgcatatcttatgttctgaggctgtg

SEQ ID NO: 204845 - DNA, 452 bp, Glycine max
  unsure (1)..(452): unsure at all n locations
ctatagacaactcaagcttgcctcanagaggtccaggaaggacaaggcggccgaatgttctantttcgtttctgagtatgacagtcaccgctttaggagcgctgtacaccagcagcgcttcgaggccatcaagggatggtcgtttctccaggagcgacgcgtccagctcatggacgacgagtatactgatttccaggaggaaatagggcgtcggcggtggacatcactggttactcccatggccaagttcgatccagaaatagtccttgagttttatgccaatgcttggccaacagaggagggcgtgcgtgacatgagatcctgngtaaggggtcagtggatcccgtttgatgccgacgctatcagccagctcctgggatattcgttggtgttggaagagggccaagaatgcgagtatggccagaggaggaaccggtctgatgggttcgatg

SEQ ID NO: 204846 - DNA, 437 bp, Glycine max
  unsure (1)..(437): unsure at all n locations
acatanaaactcaacttaccgggcaacaanctggttaacagaaggttgtaanatantgtttaaactgccgcaaccaagaaagcatagcatgttataataaacaacaactattctaataaacagcaactcaacaaacaacattattcattatactactgtatgttataaatattcgactctgatatagcattagcaaagtaacatgtttatatgttctccagcaaggaattaatatggatgtcattattaaatctcattgttgtcgatattcattgcaaacaaagggtaaaagcgtcatacctctggccactgaaacgttagacattccacattattattgaactttctcaagagctcacaagcaactagcgccatatgttctgcactccccatataaatgaacggacaaatattcatatgagcattaacaatatgtc

SEQ ID NO: 204847 - DNA, 425 bp, Glycine max
agctttatgcgttgatccaccagcttatattacttgttattaaaacttgatgcctactctgttatattaacagaaacctagtaggtcataatttaaatatttacataattatgatcatatttaataaataaataaattataaatgaatataataattataattaaacgtgtttttttcttcttttctataaactgtgatcataggattttcggttcatgaactagaaattccaaaagttgaaggaactaattaatctctgacctgtattatgagaggaggaataatacactagaactctggccatgaaagcctcagcaaaaacagcaccttctccgttgcaatccacctcaagcttgtgagtgtgatcatccacactcctcaaccttccagctaaggggtaataatacacctagaactctggcta

SEQ ID NO: 204848 - DNA, 427 bp, Glycine max
  unsure (1)..(427): unsure at all n locations
ggatttgcgcanaatgagaagaggggtctgatttactttttgtggtctaaatagactacgaagaaagcgttgaatagccataagagcttgaagagtgaaatacacaaagtaaaagaacagagcaaagaagccaagttttgatcttttaggaagatttgtgagtttttgagtgattatgagattcttagaggtggaggagacatccccactcctttgtaagcaagcaatttctcttaattcctctttgtcattataaaaggagctttcttgctatggaacgctaaaccctcagttggggattcttgttgagtaattgatgtaaattctttccctatctaatttattaagggtggtttatgtgttcattggttctatcagcattntattattgcatgtttgtggcttgatcacccatatgcgtgtactg

SEQ ID NO: 204849 - DNA, 418 bp, Glycine max
  unsure (1)..(418): unsure at all n locations
agcttgccttgtttctcacaaccttaccattcttcgtccagcttgttgngaaatacccattttgctccattttccttctttccttgtggtatttagatgagattccagacatcattcttttgaaactggtcaagctcttcttgcatcgctttcacccagttgtcatcttgcattgcctcgtcaatgtgtttaggctccatcttagagatcagtgcagtgtatccttgtgtttctaatgacaatctagcttgaacatgatctattggataacttatgatttgactctgtggatggttttgagcttcttgttgagtggacgcgagtatttctattttctttctggatgagatagtaattgttgtgctatcatccaactgtaaatctgcaatggacttatttagctatgatatatctttat

SEQ ID NO: 204850 - DNA, 457 bp, Glycine max
  unsure (1)..(457): unsure at all n locations
acactatgaatactcagcttgtgaaatcatggaatccaggatggcgtgtgttcaagttgttcaatnnngnncttagaaacgtgacctaagcgcttatgccataatgctcatgaatttgtactatgaattctacgcttagtaccacacaattccgcattaaaggattcaccataggaagctacagtatcaagtaaatatagattatcataagtcaatagtgaaccagttccaacaatatctaaattgaaagacaacctaaacacattgtttccaaataaacacaaataacccaatttgtccaaataagaaattgaaaccaaatttcgtctaagtgatggtacaacaagagtgcctttcaaatcgaaataaagaccaatacataatgataatctaaagttacctatagcttccaccttcgctaatttaccatctccaatgtatatccatctttcagaat

SEQ ID NO: 204851 - DNA, 421 bp, Glycine max
  unsure (1)..(421): unsure at all n locations
agcnngnnaaccccatgtggaatttgctttcttttttttgnncatagcaccactagttgttctccttttgaagttgtttatggatttaatccactaactcctcttgatcttttgcctatgcctaatgtttcagtttttaagcataaagaaggccaagcaaaggcggactatgtgaagaagctttatgagagagtcaaagatcaaattgagaggaaaaataaaagctatgctaaacaagccaacaaagggagaaagaaggttgtcttcgaacccggagattgggtttgggtgcacatgagaaaagaaaggtttccggaacaaaggaaatcaaagcttcaaccaaggggagatggaccatttcaagtgcttgaaagaatcaatgacaatgcttacaatgttgagctgcccggtgagtataatg

SEQ ID NO: 204852 - DNA, 438 bp, Glycine max
  unsure (1)..(438): unsure at all n locations
ntatattagtgcnggattgcaatagtatggccgattgatttttattggcccgcactccttgcatggtatactttcttgattgttgtataaccattggcattgtgctccttcaacattagcagaatattttttggttttaccattgacttttttatatcaacaataataatcttctcatccttagtcaatcgactagcatatggatgtctaagtaatgacttggccaattcatgattgtgactcccacacattaacttcaccatccatcattcgccaccaaccactggtttcccatgcagcttaaagggacacccacattgtctaccggccataactgtttttaccaaatccttcttcctggcacaaaaccagattcattaacaacatatccagcccaattcataacatcatcacagctagcatacacctactatgcat

SEQ ID NO: 204853 - DNA, 432 bp, Glycine max
agcttatgcatggaaaatgtaattatgaatttgagatgcccgaagaaacaccatttcctagttaaccatgcattaggtaccatgttcaattattttgttttttaagtgaaacgggtttatgatcccaacatggttggctcgtggtgcctaacacatgaaactaagaatgtagtgtgaagtttcacgcttcccccttttttgtttttgttttgtagaggaaaacgcaaggatgagcaaacatgaaaacaaatggtatgcaattttgcagatcaaaaagtttgttgaacgcatatgcatgatgatgccatgactcatgcaaaatgtgaggctggaatatgataacggacaaatgcaggatatgtccattatgatgttatgaagagatgcttatgcggtgcatgatatgaatgcattttacggacacgagagcct

SEQ ID NO: 204854 - DNA, 457 bp, Glycine max
  unsure (1)..(457): unsure at all n locations
ttagaatctcagcttggagagtctttcgaatgagagaagacatttctctttctctccgacttaacctagcgttcatgtgggaaaaaacaaaaacacaaactatagagaaattgaaagagaaacatgatgaacttatatatatacgtttttctttagtagacaggagaacatgacagtatgaatactttctttgcattgtaagaaaaataattagagacaaagataaagcatacagtcacggcatatataatcacgcggcatttcgtcatcattttacgaacaccaaattttattaatctctaattattgtatccctttttattgacttttcatcctttatacacaaacaaattacattngacaaatttgatcccagaatctttattatatatcttggcatgctgtgtcttaattggtaggcgaatgggacattatgggtgatcttctttctcttctt

SEQ ID NO: 204855 - DNA, 432 bp, Glycine max
agcttcaccccacatatttttatgcaaactttaacttacgagcataccattcaccatatgaagcaaggtacgattctttctttctaaaataccattagattgaaaagcatatgaaggtgccacttcatgaataatatcatacatttcacaaaaattactcatatctaaagatgtgtattctccacctctatcagaatgtagaattttaatttttctttctaattgattttctacttttgtttcatatactttgaacttatcaaacgactcacttttgtgattaactaaatacataacaatatttggagaaatcatcaatgaaagtaataaagtatcttttatcaccacgtgttaacacatcattactatcacatacatcactatgaaccaattcaagcaagttagcttctctttcaatacatgtaataaaaa

SEQ ID NO: 204856 - DNA, 189 bp, Glycine max
tgtgtaagttaagaaattaatagggttttgttctattttgttcggagcaactgacccaaatgtccactactaaaatgggggatatgctaggtgcacccactaattaagtgaatgcggcacacctccccctctcctcatacctttcttaccattactcacacaattcgtcacactcacatttcatccttc

SEQ ID NO: 204857 - DNA, 409 bp, Glycine max
agcttgtatccaattgagagatgagatattattatactagttatgggcaatggtgcaaacaataaaaaaatacaaatgaattaatggtctggactccttgcaacaggaactaaagtgaaggcacaccagaaaacaactgcatacctgagggtacttgttttcttccttaaagccagtagatttgtgtacagttttataccaccaaggggcccataagccatctattggttttggacctgcttcccaactggaaaattcaaaatttgagttgtcacttctcatgtatgtatgcataaaacttgttgcatggaaaattttcaattactgaatgtcttcaacatttccaaatcaaaggagatgaacaagaaaatattgcaaaaaagaaagaacaggaaaaaataggagcaca

SEQ ID NO: 204858 - DNA, 431 bp, Glycine max
tgcatgtaagaaagaaaaaaaaaagaacatatccgattatccatataggcatatccggctaattccattttagcgcatctttgatctctctccgtaccccgtgtttaaacgctgccgtttcttctagtttccccgctattctttcttctttggaaaaaaaaaagcgactcatactttttttttctctcgctgcgtggtactgcactactggtttgttcttgctgaatttttcgacttcatgttcatccacaaattaatgcttttttctttctttctttctttcttttttccgttttccaatgttcgagttcagttgacttgactcgttgatctgccacgacttgactcgctcccctcttctgcgtcgaatcgaacggctccactgaaacactgtcgttttagacgtcgatctcgggttcgggataatcatg

SEQ ID NO: 204859 - DNA, 390 bp, Glycine max
  unsure (1)..(390): unsure at all n locations
acctctataaanagttatatggcttgaaacttgctcttangcattggtacaagaagtttaatgagtttatgagaaactcaggattcaacagatgtgacatggaccattgctgctatgttaagaaatatgctaatagttatgttatccttgtccggtatgttgatgacactgttgattgcaagatctagtatgacagatattaacaggttggagcaacagttggtagaaaactttgaaatgaaggaccttggtccaactaaacacaccctcggtatgagacattttagaaacggatcagatggaactttgacactgcttcaggagaaatatatacacaagttcgctgcctcgctaccttgaaattctagagattaataccctttgggtctc

SEQ ID NO: 204860 - DNA, 345 bp, Glycine max
  unsure (1)..(345): unsure at all n locations
tgtgaagtgtgaatactatatgtcaagtataacttgagttatgtccttaataggaacccaagaactccccattatggtaatattttgccttganaacttgtgaaacaacagcatcctggtcagaagctaagcttcatccttgcttccctaggatagccaaattaacagtgaaaagatgttgaaaacccataccttcattctcctttctaatagttagacgtttgcaactaaaccaacgtatatctttgcttgaatttatgttactttcccaccaaaatgaattcataatcttctggatttcatcctggagagttgaaggtggaagaacaaaaacacttatgccct

SEQ ID NO: 204861 - DNA, 388 bp, Glycine max
  unsure (1)..(388): unsure at all n locations
agcttcaccggatgacgccgagcgaacattttctattctacgtcatgcaaanttcggtcagggattgaattgagaactcgttaggcgacatctgtcgtgaagtagcgaccgatatttttcagccgacattgcacaattttttttagaaaagctcgctggtcgataatggtctttttacggcagaagcagttttcttgtcttggtgttgcataaaactgttacaatgcacttcggctaggtttttcgtgcgagttcaacctactttttgtttcgcgcagcacaacatttgcccacctttgcaaaaaaaataatttggtaaccgccttcatgcattttccttcgcgattgaaccacaactccgttgccgcgacgggggcgatataacccg

SEQ ID NO: 204862 - DNA, 396 bp, Glycine max
actaagcttaaccaagggagatggaccatttcaagtgctagagagattcatttacaatgcttacaaagttgagctgcccggtgagtataatgttagttccaccttcaatgtctctgatttatctctttttgatgcagatggagaatccgatttgaggacaaatccttctcaagagggagagaatgatgaggacatgaccaagagcaagggcaaagatccacttgaaggacttggaggacctatgacaagggctagagcaaggaaagccaaggaagctcttcaacaagtgcttgccatactattcgaatacaagctcaagtttcaaggagaaaagctcaaagttgtgaggtgtattcatggccaaatggaagaggactatatgacacccctttgttc

SEQ ID NO: 204863 - DNA, 425 bp, Glycine max
  unsure (1)..(425): unsure at all n locations
agcttatggataatagtagttcagctgtatctttatttaaagagctggggggtgttgagcttttggctcaaagattacagatagaggttcatagggtcattggttttgttggagagaatgataatgtgacgctcactggtgaaagctcaagacatagtagtactcatcagctntactctcagaagaggctgataaaagtgtcccttaaggcccttggttctgcaacatacgcccctgcaaactctaccagatctcaacactcccatgacagttcattacctgcaactctagtcatgatttttcagaatgtaaataagtttggaggtgacatttattactcagctgttactgttatgagtgaaataatccacaaagatcctacatgcttctcttctttgcatgaaatgggccttccaaacgctttt

SEQ ID NO: 204864 - DNA, 421 bp, Glycine max
  unsure (1)..(421): unsure at all n locations
tatgtnnttggaaattaaccttgatgctntaagtagttgttcttttgtagtttcctaatatgagtccttcatgatgggaaaataacggaactgtttttttttgtgttcaatttgtcataggggccgtggtccaacttaaaaccataagtggtgccctttctgctgatgaaagtttgtccgactttgctgttgagaaaatcaagctgctccaacaaattcttacatatgttgtatcaataatttatattttcattgatttgggttcaaatatagacaaaaaggatgagttattctgcagtcttgtaggctttatttcacatgctgatgctccaatcatctcttcaaatagttcaaaggttntgtctactgaagctaggttacattggcgtcagaaagcaattgtttctgtgatggaagctgg

SEQ ID NO: 204865 - DNA, 441 bp, Glycine max
  unsure (1)..(441): unsure at all n locations
accttatntaacttatctccaatgaattatatgtaataaagcttctcgcttttgaacatggagctctttatataaagtataaaaacttgaagtctctcaatttttttttaattaaaaggaactttaaaatgacaatcaccacatgtctaatatggatcttgaatcttcatgtgtctaatgtaacattttcagaaaaatatgtaaatattgaatagatatttagcacgattagaatcacatattaactataaatatattcaataaaaaaaacacataaaacataaaaaaaaagtatgtaaaaaacataaataacaaaatgaacacaaaatattaaataagccaaatatacataacgaaaataaaaggatggattctttaaagaaaagaaaacgaaaatataaagaaatatcagttatttaatttcataccaattgctagatg

SEQ ID NO: 204866 - DNA, 367 bp, Glycine max
  unsure (1)..(367): unsure at all n locations
tccgcatcacccgctacttcaattntttcctttatcattctttntggtgtattctagctntcggnatttgaacaatttttcaatataaaattattccctaaaatgaacactgcatgaacatgttccaacgttgcaactccacctttaacgtacgcatatattttaatactttgaaaataaaattaaggtgtcagttcatctcttatgttagtgcacagtgatattgtgtccataaaagactgcttatcattatagaatatttctattttacatcgcttcttgttttatttattggtgtaagtacttttcttatttcaatgcgtttttgtatgtgtgggtattattgcttacactatgaatacatgta

SEQ ID NO: 204867 - DNA, 431 bp, Glycine max
  unsure (1)..(431): unsure at all n locations
agctntgagcaaattcaaacgactataactttntactncggtgtctgactgactcgcgtaatatattgagacactcgaaattgattatcgaagttctgagcaaattcaaatgacaataactttttactcggatgtctgattgagtcccgtagtatatcgagacgctcgaaatggaataccgaagctctgagataattcaaacgacaataactttttactcggttgtctgactgagtcgcgtaatatattgagacactagaaattgattatcgaagctctgagcaaattcaaacgacaataactttntgctcggctatccgattgagtcctgtaaaatatcggaacgctcgaaattgaatgttgaaggtctgagcaaattcaaacggcaataactcttttactcgggtgtctgatggagccctataatatat

SEQ ID NO: 204868 - DNA, 420 bp, Glycine max
  unsure (1)..(420): unsure at all n locations
tcaacattcaatatcgagcgtttcgatatattattggactgaatcanacaaccgagtaaaaagttattgtagtttgaagttgctcagagcttcaactttcaatatcgagcgtttcgatatattacgggactgaatcagacatcagagtaaaaagttattgtcgtttgaattatctcagagcttcggtattccagttcgagcgtctcgatatattacgggactcaatcagacatccgagtaaaaagttattgtcgtttgaatttgctcaaagcttcaacattcaatatcgagcgtttcgatatattacgggactgaatcagacatccgagtaaatagttactgtagtttgaagttgctcagagcttcaacattcaatatcgagcgtctcgatatattacgggactgaatcagacatccgag

SEQ ID NO: 204869 - DNA, 408 bp, Glycine max
  unsure (1)..(408): unsure at all n locations
agcttattttttatgatttaggcttaaagtgcatatattaaaaccaantaaaaggacactaaatacttaaacatatagaatttcttaatgacctccaaatatattggaacaaaatgattgagcagcagacaagtcatagcaataatattttgcttgagtcatccaccattttcatgcaacacattttctattaatctcctatgcttctcactttaacacaaaatttcacttataaagacccaaaatttcccattttctaatcaaatagatcttccttgttattcacatttgaataatataatggcaagtctcatgtatatatataaaataaaatttccacttagccaatccaattccttacctttctctccaatacacaactcgagaaccaaaatgacatcttagcat

SEQ ID NO: 204870 - DNA, 356 bp, Glycine max
  unsure (1)..(356): unsure at all n locations
tacggaccttgaaactcaagctttatttcgtngaggagatgaatctatgtgtcccttatttatcctctaagaacaaagcatcatttcttgcactaaattgttgggagttggaagccatcttctcaatcaaattcctagcttcagcaggggtcatatcaccaagagatccaccactggcagcatcaatcatactcctctccatgttgctaagtccctcatagaaatattaaagaaggagttgctcggaaatctggtggtgagggcagcttgcacacaatttgttgaatctttcccagtactcatacaagctttctccactaagttgcctgatgcctgaaatgtcttttctgatggct

SEQ ID NO: 204871 - DNA, 349 bp, Glycine max
tacagcaagggaccaaagggcttcaactgggattgtggcccttcaccgtccaatttctgtctctggtagagactcatatatactctgaatccacatcataataaggctatgtatgtaaaagaaaattaagatatcttagtggcgtaaccataaaaaattttttgatcgaaaaagaagcagagattttgatttagtcgaatactaataagagctttctttcttcttcttcttgtatctcagaaaattataaaatctgcgattgcaaatgcaaatttaatttgtgctgtttccttctatcctcttactctgaacttttttttgctattaagtcagctctctgctgtgctct

SEQ ID NO: 204872 - DNA, 416 bp, Glycine max
  unsure (1)..(416): unsure at all n locations
agcttctagccaaatggacttaccttgacttattttctttgatagcccttntgagccttgtttccctttccttgttttgaagctcattacaagccttaagtgaaaaaccatgatatcaccatatccttaaggaattttggagctttggagttgttttgggaataagtgtgggggtttttgtttcattggataacatgttttgttggccatgcttcatgatatattttgagccatacttgatgtacattgcatattggttaaatgttggacatgctgaatgagatgttgtttctcaaaggctacagagtaaaaaaaaaattataaaaaattcggaaaagaaaaagaaaagcagtaaagttgagtgaataagatcttaaatgacaaaagaatgatgagactcttagttctactcttta

SEQ ID NO: 204873 - DNA, 51 bp, Glycine max
tagttcagcttatcatcctcaaacagatggtctgtctgatcttttcattca

SEQ ID NO: 204874 - DNA, 433 bp, Glycine max
agcttcaagagaaaggtggcctcttcaaacttcttatttccagaagggaattctatcaatagacctccaatctttaattgagagggttaccattactggaaaacccgaattcaaatttttattgaggcaatagacctaaatatttgggaagccatagaaatagggccttatatacccaccacagtagaaagaattacaatagatggcagttcatcaagtgaaagtataactatagaaaaacctacagatagatggtctgaagaggatagaaaacgagtacaatacaatttaaaagccaaaaacataataacatctgccctgggaatggatgaatatttcagggtttcaaattgtaagagtgctaaggaaatgtgggacactcttcgattaacacatgaaggaactacaaatgttaaaagatctaggataaatg

SEQ ID NO: 204875 - DNA, 359 bp, Glycine max
  unsure (1)..(359): unsure at all n locations
tctttgctgganaattccttcccgaattggtgtttgtgctgtgtttgtggtcgccggngggacgagattgtgtgggaaacgagttttgtgggggaggcctttgtggatgagcacgcaatctttgctggacgggcgtcgaattgggagggttttcgatgttggccgaatagcttcgttggtgtggggaatattggttagtggggttgtgaggggtttgttgtgatttaagccatgtaggagctgaagttacagcatgggtgtctccctccttcttcttggctccacttgtttctaacctcctattacttgtgcttgtggaagtggcataattaaactttccccttctcaagcctacctta

SEQ ID NO: 204876 - DNA, 409 bp, Glycine max
gaccttaagcacctgcggctgcagctttaccttgacttggaaaacctcttgctggtttgatttgttcccatgcttgctaaagtgagacaaaagctggtgcaaatcaaaactccgatatctcatgggtggaatggatgaatgcatgaaggaatgcatataacacagatgcaatctatgaatgcgggggtccggggaattcatccccttcttagacacaacgtctaggggtagcaaagtgccccaacgtacgtttttaagaaggcgacacggaccctccgtgggtttgtttacacaagggatcaagacagaacccatatgcgatgcccgtgcaaaagacacaatgcgggaatgtcacagtatgacgatattcactgaacataagcacaagggtatatgatacttatgcatg

SEQ ID NO: 204877 - DNA, 403 bp, Glycine max
  unsure (1)..(403): unsure at all n locations
ntggagtttccaagtgccaattcgtcctcttctttagtttcttcttcttctggcttcaattcatcagtgggctttccttctgtgtccagcatcttgggatgttcccagcctttgatgacagctttccaggttctgctatccagtgatttgaggaaggccaccattattgctttccagtattcatagttgcttccatcaagaattggtggtctgttcactggtcctccttctttctccatgttcatcagaatttatctccccagatctcactctgtgatttcgagtgttggctctgataccaattgaaattctgataccaggggacagatgtcgtacaggatgtcacgacatcacgcttcagaacatgcagattgtatgtgtccgtatgaacagattaaacaag

SEQ ID NO: 204878 - DNA, 406 bp, Glycine max
  unsure (1)..(406): unsure at all n locations
agcttcaacttgagggggagtgttgaaatattataaatattnaagggatagatttttaggatctaaattataggaaacatatttgatttagagaaaactgaatatcctctcattagtgaccactgtataataatagaccatctgtgtactttaacatacgattttagttgattgtccttctatattttttttctttcattttacagatgtaaataaaaagattggggaggaagttactgattaataatttcttatagcttttacaccaacacatttcagtttgactttgcttgaaaacaaggcaaaatacctgaattttggagccttcagggtcatttacagattgctccatcaagcgcttcaaagtgctggtactgaaagcaatatctccggctagcattttgac

SEQ ID NO: 204879 - DNA, 411 bp, Glycine max
  unsure (1)..(411): unsure at all n locations
ntaattcatttacctgaatactcatagtttttgtttagataatattnnngnncttatttaattatgagtaaaggattttaatggtttataatttgggtattttaaccaagtgcagatttttacattgcagcttagaccactttgataaaattatcctgcttgactactcgagatactaccaaggtgacatacaacaacaaaaattagtaatagatattatagaaacaaagcttggtaatgaagttataagcatcatcgagacagactgtgaggtggactttactcctcgcttggattacaagaaactcaaaaagcctatattattgcaagcaaaacactagaaaaatgttttcatacctgttcttatctgggaaaattgacttgaatattggttctttctgtatattatct

SEQ ID NO: 204880 - DNA, 149 bp, Glycine max
ggttattttaatgaagactaggatggataaaatatataattctaatagaacggtgctaaaaaatgcacaactattactaattgaactttttactgaaaatcgtaagcaccttatatttaagtaataactattagctaattaataaactc

SEQ ID NO: 204881 - DNA, 325 bp, Glycine max
gcagctgcacaaggagaacaatgcctaccagcgagagaatgcgacttctacttcatttacagatcaggagagccatcgtcaatctgtgcgtcgccaacacccgagggaatccgatcatcacccatattaatgcgctcgagatgacatttcatggacagcgagtgacagcaccatccattctatatgagagcctgacatgtcaacaataagttatgatggcgtggctccacgtatctattgtctaacgtcataccattttcttctagatgataactatcattctgcctgctgtgaataggatattcctgacggtcaccaacggttt

SEQ ID NO: 204882 - DNA, 425 bp, Glycine max
  unsure (1)..(425): unsure at all n locations
agctngccacccagctcggccaggcgagctttggnttattcctccanaagcaacagccttctggaggaatcttctggagggcccaagtgggcctgggtgccatttgcacccccatttctactaagtacaccccttgcctttttatggtgattcttttttcgtaaagttacggaaacttacgaattttgtaacgatacttgttttctttccgtaatgttacggaaccttcccgggggaacaaaaggtgcagaagacgatgtcagcctctgcatgctatcaagcgttctgtcttacagatagcaaaagaatgtttatacggataaccactctggtatttccgcccgtcagcgtgactcataagtcagtatgacagatcttgtgagcgcggaagatgatgtaaatctcctcgtgtcaacgggcttgtc

SEQ ID NO: 204883 - DNA, 399 bp, Glycine max
  unsure (1)..(399): unsure at all n locations
ntaaccaattcaggataaataggcaattgtaatgacatattatgttttatacctaagttctgaaaggcttgaatgcaatcaaaggttttagcagaaaagaattccatatcaataaacttagggtcgataatggaacgagatgagaaaagattggagtaccgtttctgctgttcgtcggaagaaaacactgtggaagaggacaatgagggtggaattggtgctgtggatgcgctactggctccagaacgatgagctcttgaagccaaagcggaggcagaagaaccctttcgtttctttgacgagtcttccatttgagggagttgttgcagaatttaatcggtgaaatccaaagaaaaatgtaaaagaagaagattgccatatacgggagttgttttgtga

SEQ ID NO: 204884 - DNA, 433 bp, Glycine max
  unsure (1)..(433): unsure at all n locations
accagcttaggagagaacagggccacagagggaggcgttttgtttcttatctagccaaggnctgagagaccatacaagattcctaacgatttctaattatgtgggccattaagtctatcatatgctgacaatagccgacatacccatgaatttcttctggggcggagtaagtgactgccatcctcttggccttggctaacaatcggggaagctcttgactcccgttcaaggtaagagcaaaccgatccattcacatggttgccttttggtgttaagagtcgatcacccttcctcttgcctctatttccgcgtatacttgggcatactcatccgcgattctatgctcgcgggccgtggctagacctaactcttattgttacttgcatagagtcatcacccttcttctttaaactatctatgtgctgcgactggc

SEQ ID NO: 204885 - DNA, 408 bp, Glycine max
  unsure (1)..(408): unsure at all n locations
agctnctatagctacaagagatatagatgttttncttctatctgnaggccaaatacatgctgcatattttttattctgggatctgtagatctgaggcatagtattcatttatggttaaaaatatctgttggtgtttaagctgggaaatctgtaacagatattaatacattgtttaaattgctactttatatctcactcgaatataacgggatattttggatgaaacttcctgagtgttttcccaacactcagcttctcttataaatcaaacttagcttacaaaggaagctttttacagaaaactcagaacagagcataatagcttacaaaaagacaaagagaagaacagtcgcctagtataataggaatataataacttattttctaacaatctncgtgatggaaaca

SEQ ID NO: 204886 - DNA, 449 bp, Glycine max
  unsure (1)..(449): unsure at all n locations
actaagctgcaatcggntgagtttggtacgggagggtatctcgtattatnatcatctcgganaaccagaccggcatcgctcttatgaacaataccagttaccgagtcaccatctcggataaccaaactggcattgctcttatgaacaataccagtctggggggactactgttatgggggtatctcggacgacacaagcgtccgagatccttgcctcacgaggccatgtgcctcctaaccaccattcttgccagaatgttcctataaaaacccctccaccaagggaaagagacaacttttagacacaatctgaaatcataatggatcctactagtgcagagactctcattctctttcttctctctctcctccccttctccaccccctcactcagcatcacctgagcgagagtcgtgccaccatgccagaagctcatctctgttgcacggg

SEQ ID NO: 204887 - DNA, 437 bp, Glycine max
  unsure (1)..(437): unsure at all n locations
agcttctaacaatggcaggggagagaatgtgttttcttatttggacatccatacacacgaataatttcaagcatttgaaggcttanaaaatgtgtggggcccttccatatgaacttgagctcaggtagattagtcaagtcaagaatagatagatccaagtttaagggaacttgcactccattgatcccaagttctaccatttggaattgaaaaagaccttttactccaagatgagacaaatcaaggtatctagatttgaggacaactttaagttctgaggaaaacatttgatcgcctaaatggttgaatgtggtggcaaccagccatagtatttcattctcctatatataaaacagaattcactggtagtcttttacatgtgatgattcaattaaacgggacaacgatgcacaagtcgtttaaacagataatagccg

SEQ ID NO: 204888 - DNA, 461 bp, Glycine max
  unsure (1)..(461): unsure at all n locations
acacttagaatactcagctcgagtgcttgtaaatatgttatggccacagagcctactattttgctttcatgtaantncagangtatggacattaacccagtggagtagcagcatgttaataataacaactggatgcagtttgaatttgttttgaatcatgtttcactagtgagtgcatggaatggacacagtttgcagatgttgactttttttttctttttttttgcagtatcagaaaattatgctactattcaaaatgctacttttagaaatactattacaaaagtatttaaaatattaagtttggttaattatgaaaaagaacttagttcaaatttttagagtaattatgatttgattagtttgttttcttgtactattaatatagcatttactttcatactactagatgagtgatgctgatgcatgtgtcatagttgccgagtttacggtggcaattg

SEQ ID NO: 204889 - DNA, 414 bp, Glycine max
  unsure (1)..(414): unsure at all n locations
agcttgctagtggaaacagaactgtttttattgtaggaatccacagnataatgccatcagattcttcaccacaatagttattggtatcatttttggactaatctattgggacaaaggaaaaaagacgtaagtcaaatagttatttgatagtattgcactccatcagtacttgttaactactaaattatttctaactcaaataaacaatgagacgtttctatccaagaaaccttagcaatttcatgaaccacaggattgccccaagatatcattagacataagaccaagatggaaaaaccagcttatgtaaggaaactctttgtttgagaacctaaatggagtcaccattctcctcccacaagagtcttcccagtgaggctggcatcaagaagcatttgcttgaaaatatgttat

SEQ ID NO: 204890 - DNA, 387 bp, Glycine max
  unsure (1)..(387): unsure at all n locations
ntgcataccccaaggatccattaggaaatgacttgtgatatagagccatgagggtgggctcatgggccactttgggatagacaagacccttgtcttactcaaagaaaagttttattggccccatatgaagaaagatgtccataagcattgcactaggtgtgtggcttgtttacaagccaagtctagggtgatgcctcatgggctatacacacccttacccatcccatctgcaccttgggtagacattagtatggactttgtccttgggcttcctagaacccaaagaggtgtagactctatctttgtggtggtggataggtttagcaagatggcacactttataccatgccacaacgtggatgatgcttcccatattctcaaactttt

SEQ ID NO: 204891 - DNA, 422 bp, Glycine max
  unsure (1)..(422): unsure at all n locations
agcttcataatgcacgactccgcttgnattttatgtttacancnatnngacgggggctctcccatttaatcgtttctgcctttctcaagagtgatgtaaatgttgccttttgctagattcagaaaaaaggtccaaaaaccattatatatactggttgcaaataataattttgatttcggccacattttactcagcattttggaaaaccaatagtaaagtcttttttctcctatcaaaaatgcaaaataataatatttttatatcaaacaagtgaagtgtaaatgatcaaagtgctatattaattttataaaatgtcaaactattttataatatgaaccaatcaataagtattttaggtatgaattttatacaacacgatgagtaaaaaatgaattatacaacactcttctcaatttctttct

SEQ ID NO: 204892 - DNA, 430 bp, Glycine max
acctatgaaactaagcttgaatggtccttggtgagagcacatggaggttatcattgtttattggatgaatgtcgtcaagccgggggaactcgtcgattatggtggagagcttgtcgtgaaaatactgctgagtatacttcactttgcgcatgtagaattggcgcagccgtgaaatcgcatatcctttgtgcacaacggttggtgtctgacgctgggtgcgagagaggataatgtcgaccacatccttcccatttggcaccacggtaatcttcttaaaattgtactgaaccatcgtgctctatcaaccttgttgccacagaaaattaagaaaaagggactatattagtaaaacaagataaattccgtggagctacataatttgagatcctcactgaaagctgagagaaaataataagcgattatgtgaatg

SEQ ID NO: 204893 - DNA, 341 bp, Glycine max
tccaacacgtgttaactataaaagctaacaaaacatctgcagcccaattgctccaactagattttaatacctgaattaaggagagagatgagtcaagatggatgtttacataaattagggactgcaaccatctgcaaggtttgagagcaaaagagcaagaaaagaataggtgatgagcactttcttcactcatattacacaaacaacatatggaggcaaagacacatcctctctctttcagatgatcctatgtgggcaatctatccaacaaaaacctccaaagaagataagacttagatggggcgacagcatgataccaaatatgcctcgcccaagaaacc

SEQ ID NO: 204894 - DNA, 376 bp, Glycine max
taatcacaaataaattttgtttagtaagaggcacacatgtgttgcacgcatatgcacacgcgtgcacacatgtacatagagatgtcggaattttataggatctttataaaatattagtaaccatcaggaacacattacgttagattatcaagaacctagattcataataattgatcaaatagatgcagcgaaatatgaacaggtaggtgatttatggtctatgcgctcttacgatctgttacggaatggtgtatagacaacggataactcgctaacaacggtgattacatggttctttctcaatcggaacctctctattcctcaataggaccttcgtaactcttcagatgaggagaagagaaactatgaatgtgat

SEQ ID NO: 204895 - DNA, 418 bp, Glycine max
  unsure (1)..(418): unsure at all n locations
agcttcacaacttcaagagaaatggcctcttattatttttgnnnnccgaaagtaattntaggtataggtcaaatctgaaatcatttcaagatcatgatgaagatcaagccaacttatgtctcatgaaaaaatcttatgagaacaacgaggaagaatctataaggaagaagtggtacatcgacagtggatgttccaagcatatgacgggagatgtatccaaatttacaaccatttcccccaagaaaagtggacatgttacatacggtgacaacaacaaaggcaaaatcattggagtcagcaaaataggtacgagttcctctactcctattgaaaatgtgttacttgtagaaggttaaagcatagcctattaagtgttagttaattatgtgatagaggatataaagtatcttttgattct

SEQ ID NO: 204896 - DNA, 372 bp, Glycine max
  unsure (1)..(372): unsure at all n locations
ccaaagggttgggcttcgcaagactgctctccctcgcggactgcatgcagatatgctgctcttctcttccctcactgccgacttccagtcgaccttgatctatcatctgctgtaacaattcctccacttacaaacacgtttccatgttatgcagctcgctggaatgcagcaaactagaatcctccttatgcccaccatggggaatcacacctcccttntgtagggcctcaatgataaacctcctaggggttgccacatcctttataggtttagaccggcagggcctatctgacccaatggcgttaaccgccccccctccatgattggcgagcgggttgggtttcacgttgggccgatcctcttggaacgtca

SEQ ID NO: 204897 - DNA, 420 bp, Glycine max
ttaagagtgtaattctcaaacaacgcagatgtttaaatgtttgttgtcatccaagcaaaacttatttttacgtgaattttaagataattattacagaagtgaataaattcattattcttatgaaaaaataaaaaaatatatcatacatatatcaatttgtaattgaataatattgtaaaaaatattatatatatatatatatatagattatttactaatttttaattattaatataatgtcacaatcttttcaccaaaccatgtatctaatttaaaaataaaagtagagatattgcaaaacgattaaactcacagtttaaaattaaaagtagagatattataaatcgcagttaaatatagctgaagtgttcgtgtagtgctcgacatacatacatatgtcttcacgacatgatatatcta

SEQ ID NO: 204898 - DNA, 421 bp, Glycine max
agcttatccccacaagagtgcataacaacttgtgagtctgcattgattataggaggctgaaccaggtaacccgaaaagatcatttccccctgccattcattgaccaaatgcttgagcgcttggcaggtaaatctcattatttttttcttgatggtttttctagttatttacaaattcatattgctcttgaggatcaagaaaagaccacattcacctgtccctttggcactttttcctataggaggatgccctttggcctatgcaacgcccctggtaccttctgtcgcaacctacccttttgcgggcaagcgaggcgaggctcacgggtgccttttccaaaggaggaaaatgcgcggagtcgtcaccaacgtttatttgtggaaaacgtcgaaaaaatcgaaggaaaccggtcaaaagaata

SEQ ID NO: 204899 - DNA, 430 bp, Glycine max
gacctatagaaactaagcttaacttctaaggaagcttctaaggtggtgaccttatttattagaggggtatgtgtagctaagctctagcttctcaaggaagctttcatttagttagtgacctaggctataaatagaaacatgtgtaacacttgtcataactttgatgaatgtaaaacttgtgagacacacttcaaagttcaacttctctccctctttttctccttcaatttcgtgcctcccccctctctctctctcattcttttcctccattgaatcttcctctctaagcttcttatccaaggctgtctcttggtggtgaagctccttcttccatggcttttccctagtggatgatacctcttctcacttcttctccttcaatctttcgtgcatctctagaaatgaaaatcacacttgaagaaactcattg

SEQ ID NO: 204900 - DNA, 412 bp, Glycine max
  unsure (1)..(412): unsure at all n locations
agctnnttggagtagaaacatggtaccatttcattttattncaaaaaggaagtcgtatctagtcaaggtctgagagaccatacaagtttcctaacgatttctaattatgtgggccattaagtctatcatatgctgacaatagccgagaagcccatgaatctcttcgggggcggagtaggtgtctgccatcgccttggccttggctaacaatcggggaagttcttgactcccgttcaaggtaagagcaaaccgatccatccacatggttgcctcttggtgtaaagagtcgatcacccttcctctagcctctttttccgcgtatacttgggcatattcgtccgcaatcctatgctcgtgggccgcggctagacctaactcttcttggtacttggcgatgatangctaacatgtt

SEQ ID NO: 204901 - DNA, 438 bp, Glycine max
  unsure (1)..(438): unsure at all n locations
tctcccctattntgctataaataggggaagaagtgttgtaataaaggttcagccccttaggcacttctctctctttcgaatttgcttggaaaaattgtttccgtgaagaaaatctaagccgaggcgcttccgaaacgtttccgtaacgttttccgtgaggaatttcgcgaaggtttcgaccgttcttcgacgttcttcattcgttcttcatcgttcttcgatcttcaacgggtaagtacctcgaaccaagcttttcgattcattctatgtacccgtggtggtccacattgtgtttcgtgtatttttattctcgtttcatttactttttatacccccttttgacgtgcttaagccattntatttaagtcatttctcgcttaacctanaaataaaataaatntccaccgatcgtttgaattgtattatcccgtaacttcg

SEQ ID NO: 204902 - DNA, 385 bp, Glycine max
  unsure (1)..(385): unsure at all n locations
atcctcaaacctaagagtaataaagcattacaaattttaacaagcaaaagattatgctggtgataacaagataacctcaatcaccaagcagcataaagatcagaaccagaaagagacacactctcaacattgaatttatttattcaaaattgaaattacactttttacaaagaatatttatagacaactcaagaaatatagaagggataaagaagattctccagataatacacactttacgaaggtagactntgaacttactagaactcgatgaaaataaaataaacgtgattgatcgccttgtttatataggtcaccaaaagtacttcctaaattataagctatgacgtaagaatggtacattaaccattgataaacaattgag

SEQ ID NO: 204903 - DNA, 420 bp, Glycine max
  unsure (1)..(420): unsure at all n locations
ggagttcgacagggtatgtggggagctgacaagaagttgtattcttattaccgacatangagaaacaaagggtttctggtaccccattgtcaccctgtgcacgtgctgctaagatcaacactaaagtaaccatggactatgtgaggtctctggaaaacacgaccagtgacttgttggagactgaatatcaggattcttctgacaaaccaggtggaaggaacatacctaagcttttaattgttggtggagccattgcccttgcctgcactcttgatcaaggactactgactaaggcagttatatttggagtaacccgaatgtttgcacanatgggaggaaggagggtgtgatacattaatgcttttgctttgagaaactgccaggcccgccaatctcctctggccgtagaaatagaaaatg

SEQ ID NO: 204904 - DNA, 423 bp, Glycine max
  unsure (1)..(423): unsure at all n locations
agcttgccaacccatggaagctactaatatctcccttacctttnggggggggccattcttggatggccttgattttcatagggtccacttggaccccatttctaccaactacaaaccctcagaaaactatattatctacacaaaaagtacacttctctatatttgcatagaggatgtttttcctaaggactgaaagaacttgcctgagatgtcctaagtgatcatctaggatcctactgtacactaaaatatcatcaaaataaacaactacaaatatacctatgaaatcccttaagacatgatgcataagcctcataaaggtgcttggtgcattagtgagcccaaagggcatcactagccattcatacaaaccaaacttggtcttgaaaagcagtttccactcaccaccctttntcatcctga

SEQ ID NO: 204905 - DNA, 375 bp, Glycine max
  unsure (1)..(375): unsure at all n locations
ggcctcanagagatccaggaaggataaagcggctgaaggttccttttcgctcccgaatatgacagccaccgttttaggagcgctgagcaccaacagcgcttcgaggccatcaagggatggtcatttcttcgggagcgacgcatccagctcatggacgacgagtataccgacttccaggaggagatagttcgccggcggtgggcatcactggttacccccatggccaagttcgacccagacatagtcctcgaattttatgccaatgcttggcctatataggagggcgtgcgagatatgcgatcctgggtgaggggtcagtggatcccgttcgatgcggatgctctcagccagttcctgtgataccctttagtgctg

SEQ ID NO: 204906 - DNA, 367 bp, Glycine max
cgtggtgtattgtatatattatgtttgactccaaatcataattatatttattataatgattatatttttggtaatcaaattttctcaattaatatgttttaaatagctacagattggtgaggtcatttaaatttcgaatattaattttttattggattttcaataaaggttatcgctgcacaaaaataaaatccgtaaatatattgcttctattttgaataaatatttctgtaaaatatacattatacgagagtaagaattttatttatataaaattatttgaaattagatagttaaattagttaatgtgattttaaatttaaaatggaccatttacttcaacctaaatatcaaatgtccattgaag

SEQ ID NO: 204907 - DNA, 441 bp, Glycine max
  unsure (1)..(441): unsure at all n locations
actcaagctntntacgactgacattctaagacggtgaggaaaaaccattttgcttagatgtatgncggggcaaccctgtaatcttatggaatgaaaactacgacgggttttacttaaaaaccgccttcattctcattcccaaatttaaagtgcaaatccaagctccattctagggtttactactttttccccagggtcacatgaagcgcgcctctccctcgcattacctcagccttctcatctgctctctccccttcgtcccctgtcgaccctttctccgacaatgtcttcgccaagttcctcctcactcccctgtcataatcacaatatcaacatttccaaaacgacaccaaggaggttcgaaatgacgatgacgatgaggactgcgtgaacaacggtgtcgtttcgttcgcgaagattctcactccctccgatgccaac

SEQ ID NO: 204908 - DNA, 426 bp, Glycine max
  unsure (1)..(426): unsure at all n locations
agcttcgcttagaagaccctcctgctctctctccctatgtgaagggtggaaacttccatcctaggttaaggttgtggaaacaagtcgatgtttgactcaaaaggcttgcaaatcgcaggacataattggccagacggcttataaagatggggatgcccaaatcatttccacgaaacgcatatcatgatgattagaaattcatgcaaaatttaatcatagcacacatccatgtggacacccaaatataaggttttgtggccatgtaaacactaaggcttagggttcatttccatattcaagctgaaccagtgtttcgacaatttctcttttatcaagtcacacaaaacatccgagtccattttggcattcgggaaagtctttcgttgttttcaccctctcggtgcacnnattatttttcaaaaacct

SEQ ID NO: 204909 - DNA, 450 bp, Glycine max
  unsure (1)..(450): unsure at all n locations
tganatggcaatccaaacacaccttaacaggtgagtagatatagcctttgctcataagccaaatgataatagtactataacacctttaccagaaatgctcttcgtgggttgaagtgtatttctggtgataccaatgttagtttctttcatttaacaatgtaatgataaccaagtagacacatgctacaaaaagatataacttatattttcttgtgaagctgaagactaaataatgacccataaacagaattaccaatttaagatattaataaaacataatagcatcaatgtttaaaaatcttcaaattgtagctgccaagaagcaaattagtttaagatattaataaaacaaaattaaaaagaaaaaatgtaagattatacagtataaacttgaggaaaaatatatntatatgctgtcactttcgtttacaannagtttgtgaataatat

SEQ ID NO: 204910 - DNA, 371 bp, Glycine max
acggtatgcgagacagaatctttttgttatctatcatcgccaagtgccaagaagagttaggtctagccgcggcccacaagcataggattgcggacgaatatgcccaagcttacgcggaaaaagaggctagaggaagggtgatcgactctttacaccaagaggcaaccatgtggatggatcgggttgctcttaccttgaacgggaggcaagaacttccccgattgttagccaagggcaaggcgagggccgacacctactccgcccccgaaagagaacaagggcttctcggctattgtcagcatatgatagactaaatggcccacataactagaaagtcgtaggaaacttggatgggctctcagaccctgact

SEQ ID NO: 204911 - DNA, 459 bp, Glycine max
  unsure (1)..(459): unsure at all n locations
tctcggctcatgcggngaacgcctctagttcaacacccgttcagcctattgcacccacccagagggaaactccccaagttccaactccgaacgcgactcgaccggccggtaattccaacgcgacaaggaacttccctccgaggccgttgccggaattcaccccgctcccaatgacgtacaaagatcttctaccatccctcatcgccaatcatttggccgtggtaactcccggaagggtcctcgaaccccctttcccgaagtggtatgaccctaatgcaacttgcaagtaccatgggggtgccccggggcattccatcgaaaaatgcttggcccttaaatacaaggtccaacatctaatggatgccagatggctgactttccaagaggatcggcccaatgtgaggaccaacccgctcgccaatcatggagggggagcagttaatgcagttgaatccgata

SEQ ID NO: 204912 - DNA, 431 bp, Glycine max
  unsure (1)..(431): unsure at all n locations
agctnnacaacagatattagaaatttccttttaacctagaattaaaataacttaatgtcattaacctatggaattaaaaaaaaacttaatggctgagtctaactgaaattgtggcaaccaaaagtcacccccagcagccaacaagtcaaccaccatttggtctcccaaaaggctgatgcctaggttgccaattgggcccttattacatcttgaactaaacctactaaagtccttttagttgattaacccaaaacatatttttgttcagccaactttacaaggattgggccattatttataaaaactaaacactctaaaattgagacaaagtggtgcaatttagtcctcctccatttgggccatgatacaactcacaaccttggacttttctccttgaaacttgggcttgtattcatatagtatggacaata

SEQ ID NO: 204913 - DNA, 459 bp, Glycine max
  unsure (1)..(459): unsure at all n locations
cggacactatgaaactaagcttgatactgaattgagtatggcgcacacatttttttcttatatgccatnagaggctngaaaagggcgagaaaatgagttgggttttctgcgttttctggaaaacgcgatgaactcgctaaacgcgcttaccgcgctaagcgagttcattttttgaggatgaacactcatcctcttgttgaactacctatggctaagcgaggctgaatcgctaagcccaagtaacttaaatcaatttttttgttgatggccgcgcgctaagccaaacttttctgggccaagcgcgactggttgcggcatcctctgagctaagtgagcttcgccaacacttagtagaatatttgaagagttgttgccgctaatcgcaacctttaaagagcttagtgcacatccttgtagcacatggtgngacatcctagaatttctacccgcgaatttgtt

SEQ ID NO: 204914 - DNA, 428 bp, Glycine max
  unsure (1)..(428): unsure at all n locations
agcttccacatcaagcaggtgcatctcatttctcttatgcanaacaaagaattcaaaagttgggagaattgcttgaaaaccttgtagctgtgcttaaagtacgatttgtagaagatccataaattaatcaagtcttagaagctatagatcaagaggtatgaatttataattctacttattcaacgatttaactatgatatgatactttacaaagaaaaaacattcttttaatttaggtacctacaaatggttctaccagtaaagatcatcaaactacaaacaatcttaactagaggtgagttgaaatttagatggtaatgaagatgcgagccggcgacaaaatgttatttcaggaaccatgattagatggtaatgaagatgtgagctggcaacaaaatgttcaagtgtttggtttttacttcgtctat

SEQ ID NO: 204915 - DNA, 394 bp, Glycine max
  unsure (1)..(394): unsure at all n locations
tcttgcgtagccgctcttggtgctcagaaaattccanattcttttccctcttattactagnctatttgaattctttagttcctgaatgtacaaccttcaaattgttgctcgttcccctctttcttttctgcaaaaaagaaaatcaaatgctgtcaaaacatggatgaagtcgtaagaaaatcaataccaaagaaaacatggatgaaatcacaattaaaaagcacaactacctatctttcagagtcctttggttaatttgtcttgtctccttatgtggcggggttttgtttaataatcttatactttttccttccaaaaaaaacttatcactaatcctcttttcattaatccaaatntgtatgttattggataaaagatcatgggttcttcacct

SEQ ID NO: 204916 - DNA, 421 bp, Glycine max
  unsure (1)..(421): unsure at all n locations
agctncaagatggctagctgatgtttaatttttaattcactngnactgtanaaatagttccggtcacataaccggtactgtaaaaaatagtgtttctatcggctataaaaggagtcttcaaccatattgtgaggcaccctttgagttagtctgatagcagtctagaaagagaagctctgcagagaaaacacatctttgtaagcttttcttttgaaatcaataaactggaaagtcttatttatctctcttttccctcctgaccgatcctgtgcagctctgccgccgcttcggattcttctcccctccttcctcacagatcctgtgcggctctgccaccgcttttggttctttttgttttaatggtttaatttaatttactttactgcattcattctcattttcaatataccttagatttggc

SEQ ID NO: 204917 - DNA, 441 bp, Glycine max
tgagatgaggaagagtagaagggagaaactttctgtttttattcgttgaccacagagtggtacctggagatatgtcgcgggggtcatgagaccttgggggcgtcaggtggggtgctattgcccacaaccaagcttgaccaatcctgacccaacccgggcatagtcagtcagtgagaacctgtgatgtacctaagcaagcaagctcttggcagtctacagataaaaggaacaaagaccacaaagcaaggaggcttgtgtggtggctggccaactgtgaatcttgtgtgatatatgggttatggcctctggtaatcgattaccaagggtgggtaatcgattacaaggcttaataatgaagataggaggctaagatggtctctggttatcgattaccaaagggtgtaatcgattaccaggcttgtaaatgaagtcacgaaacta

SEQ ID NO: 204918 - DNA, 420 bp, Glycine max
  unsure (1)..(420): unsure at all n locations
agctngnngagatggctgaggagtgtggttttattctactgganaccctctctggagtatttctaatctgcgcttgatttttaactgatgtggatggcttaactgcaaccatttaaatagaagttattcaaatgcctttcatatgatcgaaataacattactagatcaatgaacaatgaataatgaattttctagaaggttcatgagttttacatataattgaagtaataaccttactacaacaggcagctataaaacattttctaaaagattcatgagcataccatcttgcacttttgtctctcaataatatcaatttctaactagcaatcaaacaaactgaataatcacacaattcattatcaatatcaaaatttaaaagtcataaaataaattttaaataaataaacaaataacacc

SEQ ID NO: 204919 - DNA, 452 bp, Glycine max
  unsure (1)..(452): unsure at all n locations
ctcagcttgctaacaagctggtcagaacaaagatatagtatgtttatttcagatncataaaatgatagatttcagattttcatttcagaaaaccttatttctctctctctcagacaatcctagtttctacaagaacaaagtatgatttgaattagacatacagaatttgaaaatacaacagaatagggaggaagattatgaacaaaaaaagaaaaagggataggaaaaaagtaaagaggaaaaagacagacattgggaaagaacagaggatgaaacacaagttcagacaagagacagaaggagaaagtgatacaagtgtaaaacagacaaggaagaaaagggaggacagaacaaacaagagagaaaggaaaaataaatagaaaatctttcttataagtgggtaagactcactagagactcgccggctgccgcaaatgacagaatgatggacg

SEQ ID NO: 204920 - DNA, 434 bp, Glycine max
  unsure (1)..(434): unsure at all n locations
agctngctctaaatttacattgatgtttattggaataggttgnatgccattttcgttttaagagtagtgtcccactggtaaaactaactttccaaatgtttgccttcgcaggaaatggccccgaggaagcttgcctcaaagaggtccaggaaggacaaggcagccgaaggaactagttccgctccggagtatgatagtcaccgctttaggagtgctgtacaccagcagcgcttcgaggccatcaagggatggtcgtttctccgggagcgacgcgtccagctcagggacgacgagtatactgatttccaagaggaaatagggcgccggcggtgggcatcactggttactcccatggccaagtttgatccagaaatagtccttgagttttatgccaatgcttggccaacagaggagggcatgcgtgacatgagatc

SEQ ID NO: 204921 - DNA, 295 bp, Glycine max
ctcagctctaacttatacagaagaagccggagttctttgtttttttgggcccagaatcctaagaagggggtgaattaagatattcaactatcttcccaattaaaattatttcctttctattaaggataaattcccttacaatgaacttcttaaatataattcaattaaacaattgaatatgaaataaagccataataacaaggagtttagagaaaaaaagtgcaactcagatttatctggtcggcacacccttggcctacttcagtcccatcaacccgcttggagttcactatct

SEQ ID NO: 204922 - DNA, 410 bp, Glycine max
  unsure (1)..(410): unsure at all n locations
ggtgtgattttatatttaattnagaaannaagcgtcaaactgtaattaattgatttaagtatcaaattacttataccaatagtacaagacttgtggtaggatgacttctttttagcacaatcaaatttgtctttatcaatacaaaagtatacgcgcgacattaattaaaatctatgtctctgatgagacatccaagctctcacattaaaactgggtgttaataactgattcaatttaatgcaaactgtgcaatccaattgaaattttgataaatggattatttgtttaataaaatggaactaccttgtttattatgaatatttattaattagtgataatatcatatttaagaatgtgttattcattgggtattagttctatgaaagattatggactatcttcaacttata

SEQ ID NO: 204923 - DNA, 435 bp, Glycine max
  unsure (1)..(435): unsure at all n locations
tgtgtcntagatggaggaggccgggagttgtacagtttttctcttgngcngctcataagctccgggttattgcatcgttctcattggtacctccgcatctaaaaagctccatcttggataatattgtgctctgaagagtctagcccccaataaaataaacttgaccgagaacatctaaattaatattatttggtagacaaaatattttataatgtgagacctacattataatttataaaatttcacacaattttatccaatcaaacgtacatgcgcactcaaattctacacaatcctcttcctttgttcttttttctataactacctaacaaaagggacacgttggatataaggtctgtgttggaaatgaagatctaaccttgctctcccaaagagggagcttaatgcccaaaatactctgtaccccatgcctca

SEQ ID NO: 204924 - DNA, 408 bp, Glycine max
  unsure (1)..(408): unsure at all n locations
agctttactacaacaaatagatgcattctttatagatgaagctgaagattgttaatttccctcgcaactgaagctcatttagcaggaagaagcagattcacactcttaatatttatgatgctaggactttctggaatcagattgtgtggatggactctcaaaaagcctccacttctggttatgatggaagtggtaatgttgagcatcgtaacatcgttcaagtattatgtcctattaggaattaccactttgatgatgcttgcgtctacttcacaaaggttgctaacaactacttgtttattcaacatcttgtcaaacttcctactattcaatatgacaacacttataattngaagaagatgattgaagaccagatgttagctcatgtgactcagctccatgaagctc

SEQ ID NO: 204925 - DNA, 441 bp, Glycine max
  unsure (1)..(441): unsure at all n locations
ttgcatgtttagagatttctagagagagaaaggtccatgttccaatgtgttttgagagattntgttgtgccaagactgatagagaactaagcttcaagaggaagccatcctgagagcaagagatgagtttatgagtgattgtgaggttctagaggtggaggagacatccccaatacttgtatttcttcaatccttcatttttctcttctatttgttgtaaaggaagcttcccagatatggagagctaaatcctctgttggtttttccttgtaggtacttgatgtaaatacctgtatatctatttaatgatgttttatgtgttctctgtgctatcagtatgtcatttcagtgtgctttttccttgatcacgtagatgcatgctntgttaggatcattcaacagtggaaactggtctgattcttagaacttgataggatgggg

SEQ ID NO: 204926 - DNA, 425 bp, Glycine max
  unsure (1)..(425): unsure at all n locations
agctntgcgganttggtcttcgccagagaattggtctaagtggatctgaaaagaggcaaatttaatcatcctgcttggacgaatgagaaaactggggcaaataaagagggtgacgatgagggagaaacccatgctgtgactgccattcctgtacggccaagtttcccaccaacccaacaatgtcattactcaacccttctccttacctaccgcccatttatccacaaaggccatccctaaatcaaccacaaagtctgtctaccgcacttccaatgacgaacaccacctttagcacaaaccaaaaacaccaaccaaaaaatgaattttgcagcgagaaagcttgtagaattcaccccaattccagtgtcctatgctgacttgctcccatatctacttgataattcaaatggtagccataaccctag

SEQ ID NO: 204927 - DNA, 402 bp, Glycine max
  unsure (1)..(402): unsure at all n locations
ntaagtgtgaggaatgaaaatatagagcagagaagagaggttagatcatctaattcttctcatggagaagatgcggngtatgaacatgatgagggaggatagaggaatgagaggtatagggagagaagaaatcatagaagatatggaggtagacaaagagaggaagggattgatggagtgaaggtgaagatccctacttttaaagggacttgtgattcggaagtgtatcttgagtgggagatgaaggttgagaaggtctttgcttgctacaactacaatgaagaggaaaaaaatcaaattggcctccttggagtttgagggatttgccttagtgtggtggaatcaagtgaggagtgatgttgagaggatgataaggcctttgattaatacttggcaagacat

SEQ ID NO: 204928 - DNA, 432 bp, Glycine max
  unsure (1)..(432): unsure at all n locations
agcttctcccccatttttccaataaatagggtaagatgtgaanggaaaaaatgttcagccctcctggtaattcgagaatcacttgaaattagtgaaaaaaattgttccgtgaagaaaatccaagccgaggcgcttccgtaacatttccataacgtttccgtgggtgatttcgcgaagattttcaaccgttcctcaacgttcttcgttcgttcttcatcgttcttcggtcttcaaccggtaagtacccaaaatcgaacttttcaattcattttatgtacccttagtggtcctcatttgttttcacatgcttttatcttcatttcatttactttccgtatccccttttgacgtgctttagtcattttcttaagtcattctcttgcctaataaaaataaatttccaccgatcatttgaattataatatcccgtag

SEQ ID NO: 204929 - DNA, 446 bp, Glycine max
  unsure (1)..(446): unsure at all n locations
tcctcggngccattcctgcgaaggcaaacatgtggaaagttagntttcatganatataacaatcattacaaacaagggccaaacaacacttctcatggcacgagtgtcaacatgcactatataaaataatcatattggggtcgcgctattttatgacacatacgtatttgcatacataaaaattttgtatgaagcattttacgacacctatccatgtacatatttttttgacaaaccttttcatgctacatcctatatatacacacattttttggaaggcttcttttgttacctattcacaaatacacacatagtttgaaaaacactgttacgctacccatccaacactntataaggcacttcatgctatatatattcatattatgcaaggcattttcatgctatatatatacatattgtgcaaggcattttattcaactttctgc

SEQ ID NO: 204930 - DNA, 423 bp, Glycine max
  unsure (1)..(423): unsure at all n locations
agctatgaatctaggtaataacataagcttgatttatctattatnnngangntgngggggtaatataacacacccgtgcatgcacacatgcacgtgtatgcacacacatgcacgtgcatgcaaacacatttttatttttacataattatttaaaaggaattaattacactttcggtcttcctattattggtaaaatatgattttggtctctttacttttttgtggaaatttaacctctttactattttaattttgatattttagttcatttattaaatttttaaatggatgtttaatattgaacaaaaatgttgatgtgacactgcatgacagtctcaaattaacatttcattaaacattggatgtcaagttaacaagttgacaaaaatttcacaattaaaatagtaaaggaccaaattcatg

SEQ ID NO: 204931 - DNA, 460 bp, Glycine max
  unsure (1)..(460): unsure at all n locations
actcaagcttattcttgtattgagattgaatngtgcggagggcatattttctntcttcgttcagaaaactaaaagcatccttatatcaaacgttttcaccagcaaaagtaaaaattaaatactatcaagatacattatcaaaccaatttgaagatataactaatattcaaatatataaataaattaaatataattaacctaattatatactaacattcatatgtcgccacatttcatctacaccatccttactaatatcactccagcgattaacttgtaaaggagctttttggcgaatatacacttgtgcctcagacttgaaatattatgtatgttttccgcaaatcttataaaatgatggaggaaattggatgtcgatgttttttccctttgcaataagactttcctttttcttttgaaatttgcattattatatgcccacgtccctctcttgtgacat

SEQ ID NO: 204932 - DNA, 378 bp, Glycine max
  unsure (1)..(378): unsure at all n locations
agctataanaaacttagtgggggagagatttttgtttatattcatncagcncatgaagttaagagcaccaccaatacttctagacataaattgaaaatagaacaaatgtgttttagcttcttatttataccagnttataatttattaaaaacatattttccaaaaaataatcagaaccttacaataacaacaataacaataaaattcttacctaactaagttaaatagagagaacccatatattgtgaagaaaaaaaacagaatgaactaccgactttattttggacgaaatgaaccacggatcagagcaggtccataaactggcaatttaggcctgatccatcttcaggccctgcttattggacttttaaataaact

SEQ ID NO: 204933 - DNA, 367 bp, Glycine max
tttaaataagcctttacacatcacttgcgttggtggcacggcaagaaaatcatatcatacgttatatatatcatataatcatcgtaggctaaaccaatacatgtttacatttaaccactattgttcttatacgagccatgaagctactaatataatacgcataccacattagactcagcgaaagctctatattacatttatattaatacttgcccctgcacttctgtaagaaaaagaaagatgggctcacgtctatagtctaatatttcacaaagttatcactctgtaaaagcgttatataaaagaaactattattcttataagagctagatcgaattgaaagaaacaaaaactcgcgtttatattc

SEQ ID NO: 204934 - DNA, 383 bp, Glycine max
gcagatcgaacaaaagattcagagatgaatctttactaatattgaaagtatactcttaggctgtatatattatatagaagtaagtgaaactataacaagaatggcaggtgttttcttccttagcacctctcgcaaagatgatggattggactcattctccttcaacagaaccccaactgtttttatcccgtgcttaagcagccgccgataaacgtgttttgatatatgtttcaaacgccatgtttcatcattgagggaaggagagtcgcgtttctgattttctaaaatgaccaaatcacgtacgtgcatgtcagtgattaaggcttacagcttattatatcatctagattgaagcataacacaattaatcaactacaatatgc

SEQ ID NO: 204935 - DNA, 346 bp, Glycine max
  unsure (1)..(346): unsure at all n locations
actagctatggttggggaactcggacagagcagttatttttttctgagncacacatgctggcggagatgactctctcccctcttatatcgcgatatttcttcaaatcggacagggaaagtatttatctacacagggttattatacttcttgcatttaagacgatgctattcaagtctccaccagatagggcaggcatgctcacgaacattgacaatgcacaacgattgcatttactaacctgttacactaagagaaatcattttaagaattgtccttctatgaacagactcccaccctgtacgagattctatgatcaatctaaatttaactgcacctaaataactc

SEQ ID NO: 204936 - DNA, 429 bp, Glycine max
agcttaaaaccgctgtgaggattttattttatgctgaaataatcacaatcacaagcagagtatcctaactacatgcaagagataagaatgaaaaataggaaagggaaagaaaagttgggttgcctcccagtaagcgctcttttaatgtcactagctcgacgcaccatcctgttatccaggatccaagcatagaacagagttcaatctttccatagctccaccatgatattgcttcaacctttgtccgttcattacctatgtcctatcaggatctttagattgaggatcacaaagctccactgctccatatggtcaaacttttttatggtaaatggtccacaccactttgatataagctttccagggaacaacttatgtctgagttgacaagcaacacttattgtcctagctgaaaatccttcttgagct

SEQ ID NO: 204937 - DNA, 297 bp, Glycine max
  unsure (1)..(297): unsure at all n locations
cactacctgaaaaagtgaaacgcgtacctattctcgcattgcttcatgctaccatgactttcgatatagaaagagacgcatccaaagcgaggatacggccgttgtaatgccctaaagacgacccatatctcaccttactgaaagaatgaaaggaggcgatcttaataattgcacatattacaaacatgttggtgctgtggcaacaacatgaaatgatacatgctgacgcatagatgattgctattcagtcttatctcagccacgaattcntgaactacagaaaatgaagacctctct

SEQ ID NO: 204938 - DNA, 428 bp, Glycine max
agcttaaacaatgcttaatcaccacatacttaagcttacatcaacaaaatagaagaatcacaaaatctgtcttctatgagaactttttgtgacaccctctacccctcacatatatactgataaaggaataaaaatctaaatattaattaatagtatttttaaatacaagcctttcaaatgggtaaaaggctcatattcactttcttctacatcatattcaaacttgtccaaataaataataaagttatctcggtttaagcaagaccgtctaagacttcatacaattaatataaaaccctataccccaatgccacatcctatcagagcgttgtatctcgacgtccttcagcacaaggttccttaaatcaattcacctagtcgtctgctcccccgaacacaaagttcaagattatcacaggatccaaaca

SEQ ID NO: 204939 - DNA, 429 bp, Glycine max
  unsure (1)..(429): unsure at all n locations
tcganttttatctcaaacaagtttgttntctttgattctctgtctacgttnngnnngnnnntttggttctcacaatacaaaagcttatttttttttgtgaacctcagccttctcctatgtccgactttttttgggttttatgatttttcgcaagacaaaagctttaatttttttgggtgttctccctttattttgttttctgagttctcgcactacaaaaaaattaaatttttttgtgttcctgagccttctacagcttgcattgcattttgggtttatatctggatcattgggtaactctttttttgttttttatttttcgcaacccacaagcttaaatttttttgggtgttctgcctatactatttttttcctttaatgctgactgaagttatttcaatgggttatatttttatatttgttcaatcc

SEQ ID NO: 204940 - DNA, 405 bp, Glycine max
  unsure (1)..(405): unsure at all n locations
agctncaagaggaaagatgagatttatattangtaatntaaaagccatccacttattaggcttgtattctttatttacatgtctctgttaacataagtacataactacattagtccttagggttgatgttaataagtcaaaagtggaaataaaaattattggaaaaatgacatttattacattggaaatacaaaagccatttatttcctttttaacccaataaaaactttccacttttggtttcttaatgtcagccctaatccatattcaaaagacaatatttaaatagattccttaaaaaaaccattagttaaaaccatttccacataagtgtatcaacgtgaaaaaataactgttttaaaaaacgactttttatcagaaagatatcataccatgagcagaaaa

SEQ ID NO: 204941 - DNA, 444 bp, Glycine max
  unsure (1)..(444): unsure at all n locations
tctcaatattgggcacctgttgtagagagactatgcaatttcttggacncaacgctgaagttcagcgaaataagagcttttaaattgcgcaagacgttctctggaaattctccatgcggaattatcttcagttcattttcaccgtatgttaggtgctgcaaattgggtgtaagctaccaagagaaaccaatataaccaagctaaagcaggttagggaattcatagatccagctcttctatataaaactgaaataatgaactttcatgctaaaagaagtctgataattaatgacaaatcatcttattcaattacatttgtgcacacaagtcaattttaaggaaaatataagttttcttaataaccataaagaaacaagatgataaaccagcgtatctcgttataaggtggaagggatgttgattatgtatgtgtctacacaaatt

SEQ ID NO: 204942 - DNA, 422 bp, Glycine max
agcttccttgagaagatgcctaatgaagctatagcttagcaacacacacatttctaatagctaagctcacctccttgagatgagaagctagagcttagctatacaccccctatagattcatttcagcatcaaattcagacatatgatcaagtacaaattcagattcaatgcatgaagagtgacaagcatgcagattagaatgaagatcagtcatgtattcatcaacaatatggtcaattatttcaacatgaaatacagaaagatcttcagatgggtgtttcatagcattaagaatattaaaatgaataattatatcaccaaactccatagatactgtgcctgcatatacatctatcttagttctagtagttttcataaaaggtctgcctagaatgatgggaactgatcccttacaacatccc

SEQ ID NO: 204943 - DNA, 439 bp, Glycine max
tagtttctttctcatcatctttctgggggtgattgcatttatctttgtcttcatcctcactaaagggaccaatttctttgttaggtaagctagacatgcaatcaattattataattatattacaatcattatataaattaaaatgaattcttcttataaaaaatcaatgaatttattgctaagagctcttaaaaatattatgtgtaaacatttctattgaaaaacatttttgtatgtattattttagatattgattgattgatgatgtaacttttttttttgaaacttgacttggttaaaaatttaattaatgactgatttagtaataaacatttatacgaataatttatttttttaaataggattgaaatctaagctttaaatcaaaacgacttcaatataataataattataacaacaccataattattacaatata

SEQ ID NO: 204944 - DNA, 384 bp, Glycine max
  unsure (1)..(384): unsure at all n locations
agcttactatgtaaatactctntggatgattataatacattttctatcaaacatatattatttgtgcaagtcaggaggcttagtgacaaagaatacttgggtcttaatattagggagagattatttgtagagttaggaggggcctagagagtactcattgtagcctaaagtggcatagagaatatttggttgtaatcaaaggtttgattagtgaaaccctttaaggtttgaaggagaactggacgtaacccaagagttggggtgaactagtataaaatctttgtgttttctttactgcttctatataactagttnttttttctataaatcacttctacgctacaatatccaggttttgtgaaactagttttctgagcacaacat

SEQ ID NO: 204945 - DNA, 433 bp, Glycine max
  unsure (1)..(433): unsure at all n locations
tccacaatatccaagcaattcaattccaaatatcatgattctatcgtaaaccaagaaacagggtagaggcataaaactctgcccaaaacacattcaaataccacaactttccttactcatataccccagtaacattctcttcgttccgattcgttaaccatttgatcgacttgaaacttttattggaggttcctagtacataaatctacattttaaccgttgggatctgctagaaaatgtctggaaccggaaatgtactactcttcccatgactagcaatgcacaagcattttctgcactatgttaaaaaaactgctacacaattttgacagcctttnttctgcataatagggcagatttcgaaatccatcttgcccacatccaattntgctcannatggatcctaaaagtcctaaatcatgtataaatcata

SEQ ID NO: 204946 - DNA, 421 bp, Glycine max
  unsure (1)..(421): unsure at all n locations
agctntgcagatttggtcttcgctagcgatttgatcaatgngggnctgaaaagaggcaaatctgatcatcatgctttggtaaatgcaaaaataaaaataaaaatggggcaaatgaagagggtgagaatgagggagaaacccatgttgtgactgtcattcctatacgaccaagtttcccaccaacccaacaatgtcattattcagccaataacaacccttctccttacccaccacccaattatccataaaggtcatccctaaatcaaccacaaaacccacctaccacacaaccaatgctaaacaccacctttagcacgaaccanaacaccaaccaaggaaggaagtttgcagtaaaaagcctgtagaattcaccccaattctggtgtcctatgctaacttactcccttaactacttgataat

SEQ ID NO: 204947 - DNA, 433 bp, Glycine max
tggatgacccgtcccaacccgaattgccctaagcccaatttatttttacacgctatcgagtcagtctgttccaaaaaccctacgtctgttgggccggatatcgaatcagaacatggtcattctgatcgatggcagtaacacacataattttatgcaagcacgcctggtcaagcacttgggcctcatatctcagcccacccaggccctgcgagtactcgttgggaatggtaattaagtcgaatatcaccaactatgtccaggtgccacgattcatgtgcagggacgcatgttcatgatggacctccatgttctttcgctatgtggcatcgatatagtcctaggagtccagtggctgaaatcgcttgggccagtattgacagattataatgaatttacaatgaagttcattcatgaaggaaagctcatcgaactc

SEQ ID NO: 204948 - DNA, 417 bp, Glycine max
  unsure (1)..(417): unsure at all n locations
agccttgatgatagaggatgcactaacatttttnggcaatcaattcgtggggctccggactcaatggtggaggattcatgaacgaaaatcaattcatggggctgcgaataagatggtggaggatgcacaaacaacattaggcaatcaattcgtgggtctctggactcaatggtggaggatgcatacacgacaatcaattcatggggctccgagtaagatttaatgatggaggatgcacgaacagtgctaggcaatcaatttgtggggctctggactcaatggtgtaggatgcataaacgacaatcaattcatggggctacaaataagatgctggaggatgcacgaacagcactaggcaatcagtttttgtggctccggactcaatggtggaggatgcatgaatggccatcaattcat

SEQ ID NO: 204949 - DNA, 420 bp, Glycine max
  unsure (1)..(420): unsure at all n locations
ntgtgtagtcgattacactgatttggtaatcgattacctgtgattgnttctgaataaatcaaaagatgtaactcttcaaatgatttttgactttttcaaattggttttaagtttttctaaaagtcataactcttctaaatggttctcttgaccagacatgaagagtctataaaagcaaggctttgttttgcattttaaatcaatctttctaacaatccaatcaatctattacaatcctttacaaaccttgaatctctttgaacttcttcttcttctttgtgccagtagatggtacatctacttgggttgttgactgagaacaagagagggtacatctcttgtggatcagttctagtggagagtacatccactacgttcatagagaacaagggagggtacatcccttgtggatctttgctt

SEQ ID NO: 204950 - DNA, 407 bp, Glycine max
  unsure (1)..(407): unsure at all n locations
agctggggtctagntgtatgaactagattctttggtgacatcttcatatgngcaaccaccagaaagaagacccggcaatgctattctggcctctggcaagttagttccagttattgatcttggaggacatgatcgagctgttaccataaagaacactttgaactcctcccaggattatgtctctttccaggttcaaattgttgatttattactatttccctatgatttagataatttcttctttttattagtacgtccttcatcacatgtgtttgtcgtaacatgatgagtactggttatacaaatgtgtttgtattgtagacgtggaatcacctttcatcgtgaacataccgatttattgtctacctcagttacataacatgcgtctgtggcgttatggtatatca

SEQ ID NO: 204951 - DNA, 427 bp, Glycine max
actaagcttttgatatttcaatttatgaaactatggagcaggcggatgttttgatgttatattataagaccacagaggtgggtattgcgtaattcaagatcttgatgaaactggactcttgtgatgtatttttgccttgaaaattgtatttatagaaaaatttatctaaataggacctaaatatggttttacttccattatgtacgatagaacattgaaaggttctattttggtgtggcatctttaggaatgttatttgctaatagcccgttatgtctaattctacactcttttttgtaagatccgattcttatattagttcatttaatcaccttgccaaatttgtattatttagctaaactgcgacctcttttgaacatgcaatcgctgatcggactaacagacatctctgtctggaaaggacctc

SEQ ID NO: 204952 - DNA, 258 bp, Glycine max
ttgggtgcatataaagctacaaacgtcttggaactgatacatacggacatttgtgggccatttcatacaccttcatggaatgggcaccaatattttacattactcatagacgactactccagatatgcatatatgcttcttatacatgaaaagtcacaatctctagatgtgtccaaaacatttaaatgtgaagttgacaatctactcaataaaagaatcatgactgtcacatctgaccatactgatgaattatctggc

SEQ ID NO: 204953 - DNA, 392 bp, Glycine max
  unsure (1)..(392): unsure at all n locations
tatcatttaagaatttcacagaccttgtatgtgtctcactttcttctattagatcattcttactattctccaaatcttcgtaatctttntgtagaaaaacatggtttgtctgaagatcatacctttcttcattaagctaatcttgcaactctttaagtactttcaacttattttgaactacctcaatttttgtttctaaatcatgagagttctataataagatatccttttctttggatagatgttcattttcaagctggagcacgacttcggaattttgtcctttttaaaaatcattgcttattgaaatagatttaaaagaactaccattcttttcttcataaacattgtgacagtggatatgatctctggtaagctttttagaaatcttc

SEQ ID NO: 204954 - DNA, 414 bp, Glycine max
  unsure (1)..(414): unsure at all n locations
agcttcttgcgtagccgctcttggtgctcttatnatcccaaaaacaaatccctcttattactagctattttgaattctttagttcctgaatgtacaaccttcaaattgctgctcgttcccctctttgttttctgcaaaaaagaaaatcaatatcaaagaaaacatgaatgaagtcctaaggatgccatgtgcatgtgtatttctgaagatatagtatttatgttccatcaagcatacattgactgttgattacatgtaatagactttttataacatggtttccccaaatcacaattaaaaagcacaactaccaatctttcggagtcctttggttaatttgtcttgtctccttctgtggtggggttttgtttaataatattatacttttgcctctcaaaaaaaatttatgactga

SEQ ID NO: 204955 - DNA, 455 bp, Glycine max
  unsure (1)..(455): unsure at all n locations
tgcttctataatctctcccttnttgatgatgacaaacctgttatcaagatatgcatacaagctctatcttctattcgatcacataattctcctcctttgtttttgagtttaagctttacttgaaatttagttatttaattatatgatttcttgatttaatcccaactttctctccccctttggcatcaacaaaaagccaaagtgcgtatagagacataaaatcatacattcactcataatcattcaagcaaggaagacaataatgcatacataaactaagcaaggatgataataattcatttgtaaactataatataatgtcagataccttagagagtcatccaagataaccaaattaaaaaaaaaaaattagaaagtaacatacaagtgtttcaaaacatagtcataagacatcaaaacataaaacaaatcatttgtctaagtcactagcatct

SEQ ID NO: 204956 - DNA, 433 bp, Glycine max
  unsure (1)..(433): unsure at all n locations
agcttccaagctntggagtacacgtgtcatatgatattaggttcagataatatgtattaatacgtggtgtattgtatatattaggtttgactccaaatcataattatatttattataatgattatatttttggtaatcaaattttctcaattaatatgttttaaatagctacagattgttgaggtcatttaaattttgaatattaattttttattggattttcaataaaggttatcgttgcacaaaaataaaatccgtaaatatattgtttctattttgaataaatatttctgtaaaatataaattatacgagagtaagaattctatttatataaaattatttgaaattagatagttaaattagttaatgtgattntaaatttaaaatggaccattactttcaacctaaatatcaaatgtccattgaaattat

SEQ ID NO: 204957 - DNA, 437 bp, Glycine max
ttttacgactgacattctaagacggttattaaaaacctatctcgtcttataatgtatgttggggcaatcctgtaattttatggaatgaaaactacgacgggttttacttaaaaaccgccttcattctcattcccaaatttaaagtgcaaatccaagctccattctagggtttactactttttccccagggtcacatgaagcgtgcctctccctcgcattacctcagccttctcatctgctctctccccttcgtcccctgtcgaccctttctccgacgatgtcttcgccaagttcctcctcactcccctgtcataatcacaatatcaacatttccaaaacgacaccaaggaggttcgaaatgacgatgacgatgaggactgcgtgaacaacggtgtcgtttcgttcgcgaagatcctcactccctccgatgccaacaa

SEQ ID NO: 204958 - DNA, 177 bp, Glycine max
actgaagttaggtatgaaacttaatgaggctgttattcaatgaattagaaagtaaaaaaatcgctataagatggtatttacttaatctttcaaatactgcttaattatgaatcttcatgactgcagaatttaaataatgtatctttaacactgtcagaaataacatactttttttga

SEQ ID NO: 204959 - DNA, 402 bp, Glycine max
  unsure (1)..(402): unsure at all n locations
tagcaacaacggcagcacggggagcagtattctatctcngtgattcgacaaagaacacggacgacagcttcttgtgcaagagaatgttcttgctctgatgtctgcaaaagattatatccaatttagtttgtttccaagacaaatatcatagatattgtatataatattttataatcttctactacacgctcccataagctgcaggcatgttttgcaaagaaaactaccaatacggagaagttaccatgattagaacaactcaacagcaactcacaggggaaacaatctgaagatgaacgccacccccttgaaacacacacagattacgctgttgattataacacaagaacactcgtattgtagaatctctctcttggatccccagaatatcttgaaaccaga

SEQ ID NO: 204960 - DNA, 428 bp, Glycine max
  unsure (1)..(428): unsure at all n locations
agcttctaagaacccaacagagaattattcttatcaacgaanaacaattcgtccaaacgatcaaaacatattgccaaaaatgaaaactttccccagaccctagccatttgctcagacccaaatccggaattttccttaaaagagtgaaaaacacgaagtcaactatgaaagccgccgtgggtaagtttatgttaccttggcgggatcgatgtgagtgccgtcagaagaatcgtggttggtattgtcctcctcgtacgaacaaaggatgtcgccggaacccaaatcaaagccgttggaaccaccgttgctgcgactagaaggtaaagacgccatgcccggagctcaagctggaaggtgtctttgacgcagagagacaagtgtcacgtgaaagatataggaatctgtggagttgagatagagtattaagg

SEQ ID NO: 204961 - DNA, 458 bp, Glycine max
  unsure (1)..(458): unsure at all n locations
gacactatgaaactcaactttaattagaaaaaaaaaaaaataactaatatgcttattaaattaattaatataataataaaggagatgataattttttttactaaagtgtcaaagaaaaaaatataaactcattattagctattttaaatggtacattaaaaactatatattaataaaataaacattacaccaaacacctaattctaatcaaataatcttataaactaattaaattaattaattaaaataacttatcaagtatcatctcaggtcggtaaattaacttcagggggttctttttacaaactaattacttaaaagaatctattttaaaacttattttgaggggatctaattttacaaccattntaccgtctaaactggcaaaacacaatanacaggaacatcttgtcgtccatgttggcgaaataagtgcagcatatgggcagggacagttt

SEQ ID NO: 204962 - DNA, 419 bp, Glycine max
  unsure (1)..(419): unsure at all n locations
agcttgnagagntatgtctcatatcgatttatttgattacagccttatcattatcgattacatagttgtttttgagacaacaactaatttatttagtctctgctttaattgattaccatatgatataatcgatcacttctctttctataagtgtttcaaaagtgaacaagaacactttaatcgattactttgagtatctaatcaattacattgttcttgagctatttccaagttttaggaaaaacactttaatggattatattgttcttgagttgtttcaaggttttggaaagaacattttaatcgatcaaaaagataatctaatcaattacttcattgaattaatcgattaccttgtagatttaatcaattacaagcggttataactattttctctgtaaataaccagcttgtgttct

SEQ ID NO: 204963 - DNA, 440 bp, Glycine max
  unsure (1)..(440): unsure at all n locations
ntgttacacaaattatttgagtgttcttcatgatttcatttcatggttagaacacgaggtctacgtcgtttggtaggcacaggtagaggcagagaccttagtcaggatgtggctgaggatgttcctcgtcgtcgtaggccactgcctcagcacgtaggcaacgtgttacccagatggcggaggatgtggctgaggatgttcctcagttgcctgaggatgttcctcagttggctgaggatgtccctgatgcgtctgatggtagcccagacaggacaggagctgccgatggtgctgagtctgatggagtggctagtgatgggacaactgctgatgatgaggggttccccggtgggccacgcgaatccatcggtntgataggatttgctgatcatgtcgcacacaacatatggtgtggacaggtacgtacattatttattcta

SEQ ID NO: 204964 - DNA, 419 bp, Glycine max
  unsure (1)..(419): unsure at all n locations
agcttcttccctttcatattagtctcggttttgacctccactggggggaacccggntatcccttaatcattggttgaatcaacattccccacgatagacgttgcgaggctcattctgatggtgacgttctgcttcactgcattgttgatgcgattctaggggcgctaggtcttcctgatattggccagattttccccgattctgatcctaagtggaagcgttgtgcctcttccgtcttcatccatgaatctgtcaataatatctgcctccctttttcttctctatccatatctcatattacttttggctatttctattgtactattgttgattttaattcgatccctgtcttcaataggataattgtggacactgcgtatgacttttaacgttagtatgcagagttagaacttaagtgg

SEQ ID NO: 204965 - DNA, 463 bp, Glycine max
  unsure (1)..(463): unsure at all n locations
accttagaaactcagcttgacgaatgtagaacatcttcttcgaccttttgattcttgactccatctcattgaagcgcatgtccacttgtaactccaaagtatcaaacctttccccaacaaaggtttgaagaccatcgaacctatccaaaatcttttgaagaagagaggaatcttcttgcaccatgtccttcttcatcaacatgtcgagcaccctttttcacccaggagccattatgctctttttgataaccaaaggatgcaatgacagcagtgcctattagaaaggatctcttgattggaacatagggttcagaatcaagagggatgttaaagtgttgaaagaagaatgtgactacgtgtggatatggcaatggagcatntaatcgcaatgacttatgcatgcgatatcgaattaggtgtgcccaatcaanttttaggcctttatgaaaagcccacataacaa

SEQ ID NO: 204966 - DNA, 429 bp, Glycine max
agctttagcagaggctgaggtagtcttttctccaccatatctctgggaaaaatcctccatgatgcgttcaagataggccattgcaagttggcgaccaacagactctactgccacaacacagtaagctaaaaataatagatcatgtgagtccaactaattgtggtataatttataaggaaatggaaagcaatttataaattagagacataaatttcagtagacgttaaacaactttccactaaaacaagcactaccatgcatgcttacttatttaaatttgattacattaatgttttttcaataaagagtagtagtaatatatgataataatggagccactgtagtgcttaaaaacgtgaacggagttggtatgacatttcttggagtgaaagttacgttagtagataccatttttttatgtaagtatta

SEQ ID NO: 204967 - DNA, 413 bp, Glycine max
tatccaacctcccattaacaggaccttcatagataagtattgcttgccaaggtaggcacaacaacaggggcaagcacagtagcaggggcaggaccaccagtagcagccagacgcagatgcattgttgccacctctacgacaaccaccatctctgctcacatgcggatgatagagctccagatgcacgcatatatgcagcatgtggccgaccagcaggcggccaatcataaggtttaggtgcaactgaatgagagcttttacctgtacaccctgcatcagtagcgctaggaccccaatccttacccatggcctactcccgagcagttcgaggccatggtcgcatggcctggagacagacccagttttcaagcaggggcaagacccgtagagaccccacgagatgaagatggagc

SEQ ID NO: 204968 - DNA, 380 bp, Glycine max
  unsure (1)..(380): unsure at all n locations
agctttgagggtgcgcggtccaccatctttttatagtagagnaccgataatgtgtctaccatcacgatcatcgtctccctttccatcattgggggtaccacctgagccgccagatccctccaccttttgggcatggtctttggaagatccgtcccccttttttgcaaatgttctgtagttgtatcctatccagaaccatatcaaaattgtattgatactgcctaacaacggcaaccattaggtccttccaagaatggactcgggaagactcccagttcgcggaccagggtacagcgtcgcccataagactttcttggatggaatgtatcagcaattcctcatcatttgcgtattcccccatctctctgacaatacatcct

SEQ ID NO: 204969 - DNA, 431 bp, Glycine max
  unsure (1)..(431): unsure at all n locations
tagggttgaagtaaccagctcgcctgtgcgagcattgtttcttctagaggaagcaagtagctcacctaagcgagctgttgtgcaacctccatccctcatttgctataaataagcgtgagggagttgaaggaaagaggtcccaaggtctagaggtccatagttgagaagaaagaagagaaaagaaggaagaagagaaaaagaagctaaattgccactgaatagtgactgcaatcgatttctgcatcgttcttcgattgttcttcattcttcgtccagttagtgtttgcttttaagaatttgaacttgattcatggacccttaggggtgttctctattgttttatgcatcttcatctccttattcaatcatcggtgatncaatttcttttgtgaactaagtgtaaccgatcattagtaccataagttatcttt

SEQ ID NO: 204970 - DNA, 416 bp, Glycine max
  unsure (1)..(416): unsure at all n locations
agctttgcacgtatcagtcaagtgtatggtctatatcgnagccaaagtgctcatcgataatggttccagtttagacgtgatgcctaagagcaccttggagaaattaccattcaatgcttcccacttaaagccaagttcaatggtggttcgtgccttcgacggcacccgccgagaggttaggggagagatcgatctcccagtacaaataggccctcacacctgtcaagtcaccttccaaataatggatattaacccccctacagctgtctgttggggcgcccgtggatccactcagtgggagttgttccctctacactccaccaaaagttgaaattcgtagtggaggggcatttggtcatcgtgtcaggcgaggaagacatcttggtgagctgcccgtcctctatgccttatgtgga

SEQ ID NO: 204971 - DNA, 414 bp, Glycine max
  unsure (1)..(414): unsure at all n locations
ntaaaacttgaattaaaacattctgaaactgctggtaatctattaccatatatgtgtgatcgattacacagggcaaattttgaattaaaattttaatagctgttgtaaatcaattttggccactggtaatcgattacatcctctggtaatcgattaccagagagtaaatttcttgtaaaagacttttaacttaattttcttggccaaaccttttgctacttcaattggaattcccttcctatttaatataccctttctaagactctatagactgtcttgatcatccatcttgaatatctgtaattgctttgtcttgaataaagctgtgagacgcatgtgatcttttggcatcatcaaaacatcggcttgatcctttgtctacaatctcccnctctttgatgatgacaatccctg

SEQ ID NO: 204972 - DNA, 422 bp, Glycine max
agcttccccggaagtcgttgaatcctgactctgacgagttgactaggggagactcggcgcgttccgctgattcgccgcgtgctgctggcagaagctacaaactacacggtgtaagttcttccactgccaagcgagcttcgtcgtcggccgtgtttccggcgagcatggtgtccggaattgaacctttggtgccgtttaaggatgttcctaatgctgagaagatgaacctgtttgtgagcaaattgagcctttgttgtgtcacatttgatttcactgaccctggtaagagcattgcagataaagatgtgaaaaggaagactttggttgagcttgttgattttgtggcttgtgggacaatgaggtttagtgagcctgctatccttgctatgtgtagaatgtgtgctattaatttgtttagagtt

SEQ ID NO: 204973 - DNA, 443 bp, Glycine max
  unsure (1)..(443): unsure at all n locations
tggtgtanagcttgagttgtagaactagtaggggtagtttaaaatacttagaacttgttaaatttagtagaacttggtggtttatcaagaactagacatagtctcggtggttaagatgaaccagtataactttttgtgtctcacaagttttcatttttcttttgctttaaattgacctagggttcaaatttgattttgtttttggaaacgttatctatcttatgaaatcgtgtctatcgtgtaaattgttttatgaaaatttgttatatactttttgtcaaacttctcatcagacgataacgttgttttgttntaagaaggatttaaaattgataaaatcacaattcaatcccttntcttgtgatattnttctttgtaaatagctaagaagatgcctttgaattggttgacttgcttcactcgttatttgggaagtatgcccc

SEQ ID NO: 204974 - DNA, 333 bp, Glycine max
  unsure (1)..(333): unsure at all n locations
tctctttttctaatatttatataagcaatgccacatgtctncatttgatggagcaaaaggcccactttcttcttttgactgtgacccatactcagtcacaaaagtgaggaaaatctgaccttagaaacgctaaaatcctgcctcgggttgcgtgccatttctctggttccagtatctcgcgtttctctgcgtccgtcggggcccagttttgaaagtactcaatatatatatcaaaacgcttaaataaaaccccgagcgggtttagagttcggtttcgtaaatttagtccgacgcaaacgatgattttaactaattattaggaataacccatac

SEQ ID NO: 204975 - DNA, 182 bp, Glycine max
gggaatcatccaaaatctgaatggacaagtcttccacaacaacaacaagattgtcctccttatcgactgctgccgcttcaagcaagccatattgttatccctcaatataacagcagtcactaaaagcaatttgggtctctcctccaccttacttataaaagttagcgaggcaaatgaccatc

SEQ ID NO: 204976 - DNA, 387 bp, Glycine max
  unsure (1)..(387): unsure at all n locations
acaacaacattaaatctgggcttaaattgagtgacactcatttgngtttaacaaccacagaaaagatgaagcaaatggtccctttgctgtactttatcaggatgagtgcacaatgtagctctncttataacctttctaaccgccagcagtaatcaatcatgcaacaaactgaaggccacccattatgccacacacctgatcatatcatgatgaaacttttacataaaaacatataactttgcaatgagcaggcttcaaaacaatcatataatttgcatatagaatgctgctgcacactccacctttaattattgttaaatgaacaacacatgtacctttacctacacatttatattatgagatggaaagaaagaaaaaaaattatcc

SEQ ID NO: 204977 - DNA, 403 bp, Glycine max
  unsure (1)..(403): unsure at all n locations
tgggaggattgatggggaccccgtgttttgtttatcgaggatatgggctacggggagtacttatctcaattggaggtgggcaacaggggatggtgggtttatgccccccttggggatgtggaaaacttgttgtgccccatcggccgaccgtcatccacccccactgtgatgggtacnccataattctacaaccttgagatgaggaagtgtagaagggtgaaacttcctgcttttatccttgaccacagaggggtacttaaagatatgccgccggggtcacgagaccttgcggacgtcatgtggggtgcttttgaccaaaaccaagcttgaccaatctcgacccaacctgcgcatagtcagtcagggagaacctgtgatgtactaaacggcgagctcctggcat

SEQ ID NO: 204978 - DNA, 299 bp, Glycine max
tacctgtcagagaacatcaatagtgatctgaccaccactttctgccaatagcttcacccgaaacttctgcactccgctcttcgtgtctccctcggcgtacaccttcggcatcgctataacaaccttgctcgtcgccgtcccagggggaggagcaccaccaccaccaccgatggccctcccgtaatcgccaaaacttgaccaagtggaagacgatttcggcaccgagcctccggcaccgaacagttccaccttaccgccattgtaggcaagcactctctctccgtatacatcttcgttct

SEQ ID NO: 204979 - DNA, 173 bp, Glycine max
acccagacaaaccgccatattacctacacaaaaattgaccacagcaaggggggaaacgagccggtgacaaaaacccacggcagagacaaacaggagcaacaaaaattgtcgcgagaagccagtccaaaaccgagaaccaaacaccaactaccgcactgaagaacacaagaaga

SEQ ID NO: 204980 - DNA, 375 bp, Glycine max
  unsure (1)..(375): unsure at all n locations
gaattgaatgaaaagtggtgaatggagagttgtcngatgaggaggatcaagagaagtactgtgtggattttattcgcaagggaattgagcatgatgagttgccgccaccgccactgggccgtgatgtgttgctacaaaatgaagatggtcctgttaatgatgatgatgattcatcgatgtttaacatgaatcctgttgtgcctgtgcgaacagctggagctgttgacaattctgattataaacgcaatattaggtatgagatttatgttttcgcgttatacggttataccatgttatgtgatgaaaagtcatatgtgttagactatatagtatgggtggattcaatgtgaagctcttgagaattgagatgatact

SEQ ID NO: 204981 - DNA, 354 bp, Glycine max
acactcccacttcagagtaaacactctattgacattgatacttatattattgtttctctttctattaaatcttacatgacaagtaatctgagggttattaattctttatcggtaatcttctctctagaggatattcttgggttaaatattagtccaattacagtttctctcttagccatcttattctctctatgtgaatgcgaacactaactgctgaaggatcatttctctcttaagtaacatgggcttatctaaaatttccgcacacctattcacatttctggcgggggagacaggtaatttcattaccatgaaaaattatgctaatgctgaataaaaatctatattttggat

SEQ ID NO: 204982 - DNA, 320 bp, Glycine max
  unsure (1)..(320): unsure at all n locations
atcctttcattacttggaagttatctttttttaacaaatcaaagaccaggggggactggtatatattcacatcacaaagcaaaaacaaatctgaaatttaaactaggcgcttagcgagaaggattcccttatcacgacttatgagagataactcattcactccgcgcgatcgaggtgcgttnagcgagtatacacagaagactaccctactgcataattggctcgctatgcccaattccaaaataaaaaacaattggcgcttagcgcatacggtgcccttatcgcgacaacaaactagagaataattggcttagcgagca

SEQ ID NO: 204983 - DNA, 223 bp, Glycine max
  unsure (1)..(223): unsure at all n locations
atcttcttattttactagnnngcaacgagtcaaaattcagaaacttcaatgcccaataagttttgtgctccaactcaacagtaggtgaaagattgccatagaccaattggaagggagtgcatactgcatgagctctgtatgtngttctgtatcccccacaaagcttattctagtacttgggaccaatctttccttgattgagcaattgttttctctaggatct

SEQ ID NO: 204984 - DNA, 315 bp, Glycine max
aggaaataaacgcattttataagagcatgtctgattggaaaatattgcctatttgttgcacgccccctacttaagggaagaagattaatttatgaaagttatgtaaatggacgtaagtatggctaaatatgtattgattactatttaatgatattaaatgcggtctaagcgcatgaagctcactaatctactcttttgtaaatgagaattaatatggaaaaatacacaattaaattcgattataagcatgtttcgattagaggtcattctataaaaggtgataattcattgagtgttttttcgttaattttttta

SEQ ID NO: 204985 - DNA, 229 bp, Glycine max
ctgcctaaaagacaggatgttttttgtatgaccatccgtgcgatattaaccacgtttagaggcgacaccacacgttcaaggcataaggatggtcttcttcggagcgacaagttcgttagccacacctaccgcttcatagaattttcccggcggggcttatggaccccatgcaattgaccaactatcccaatttagcacgctgcctaaaggaggcgcgaattcatctggt

SEQ ID NO: 204986 - DNA, 416 bp, Glycine max
  unsure (1)..(416): unsure at all n locations
agaggttccatcaaccgccctaattccttgattctggtggnatctaggcctttaaccttgacttggtaaacctctgccggattgattagtccccatgcttactaaagtgagacaaatagctggtgcacatcaaaactccgatatctcatgggtgggatggatgaatgcatgaaggaatgcatatgacacagctgtattttaagaatgcgggtgcccgggacattgtctnctttttagacacaacgtctaggggtagcaaagtgccccaatgtatgtatntaaaacggggacccggaccctccattgaatttgtctatagaggggatcaagacagaacccctatgcaatgcatatgcaaaagggcgcatagcatgaaaatactcactgtacatatgcaagagggtatatgatattta

SEQ ID NO: 204987 - DNA, 291 bp, Glycine max
  unsure (1)..(291): unsure at all n locations
atttcatctaaaataggttacgaaaaatgagaaagctcaacaagagaatgtggaagaggctttgcaagcacaaggtattgataaaatctcaaacccgatgctataattgtcaaaagattgaccactatgctcagaatgtagattcaccaagaatagagttgatgaggagaataactatgtgaaaaagacaagaagnttgaaccattgctctatcacgtggatgcaatgaatgtagccaagaaaacaaatggttccttgacactagtgcagcaaacatatgtgcggaaaaag

SEQ ID NO: 204988 - DNA, 453 bp, Glycine max
  unsure (1)..(453): unsure at all n locations
aaagcatactctgagtaggagcagttctctttgtctctacccacggctctaggcaaatcacgcctaaaatgggctttatgatctcgacatcgtgcttaacgccattctcgcacttagcgcgagtaagtatatntgagcttagcaccaaactcgcgctaaacctggaaagcgatagatgactcacttattgagctgataacgtgctaagcgtgtgcttgcgtagcagatgcctttccagaatcccctttactcgctaagcgtatcggtgctgggcctaatcgttgatgcgtgctataccccattatctcgcttaacgcgatgactacctttgcacctcatcatatagctccattcttcctgaaattaaacaatattaaccttaatctcctgtgaagaggccgtttctgagccgagaccacaacaaagaaactttatctactatcctaccaaaag

SEQ ID NO: 204989 - DNA, 201 bp, Glycine max
caaactatcaagtgtttaacataaaattttcattctttcagacatactatttatgacgcctttaattatattaatcaccaagtgttcagagtgtctaaacaaaaaacaacgactagcggccaaggaaaattggacgcaaatatgattttcctctctaataaagaaagagtattaccgcccttaaaatctctcgaatctttt

SEQ ID NO: 204990 - DNA, 378 bp, Glycine max
  unsure (1)..(378): unsure at all n locations
acacagcaatcttcacaactggacataataacttgaaatgtgcaagctgtataactatctcgtggaaaaacagaatgtacggattatttggccctcagtttctatttgatcatcaaaatgagcaacttctcaaacaccacaatctcttacactttttcacctccattcagaagatagtgctcaactatataaaaagaaaataggtatctctagaagaagaaaaaaaacaaattagactttatgtaacccatctaagagttgatactcaacctaagtacacaaactatggatttaaagtctaagactctangtcagctgacatcaaataaagcttaactctaatgaggaatggattaggattaacctcataaatgatca

SEQ ID NO: 204991 - DNA, 377 bp, Glycine max
  unsure (1)..(377): unsure at all n locations
tctgtccctgacatactttcgtattcctaactcttatctgtgcaagaatacatgcctatcagaaattcatggtccgtcatacttgttataaccaaggcccacccttggtacatacttttacgaataccaatgtctgcccttggtacacaaaaccacaggaactgcattggtctgctcactcgcagcaacaacatgaccattgtccaatgccttagttcaataatacatactgtcaccacactatttggcatgacttttaatctagtcaaagctacacctagtcctctaattatcagaggagtaatattactagtcaatgtgacccaccaccgaattgtcaagcaagaccttactcaagatcnctcacattactcctc

SEQ ID NO: 204992 - DNA, 384 bp, Glycine max
atgttgctctatattggaacctgaggagaaaccacctgttgatgcttatcatcatatagttgggcatttatatcaaactctataccactcgtgcgttactcaagagactcctttcaacatgatctgcacatgacaaagggaattctatgcttagtctgatcgcactttatcatttatggtgttatttcctttctctaaattcttcttcacacatcatgtggatcctatcattgaaaaagttgagtttgacactgcatttggattcctggctattcacgtgtatgatccttcaccttcatgagcctatgttcaactacattgaaaggaacttgttagatacagagaggcacttgctcaagccttgaatgaatgagcccatgttga

SEQ ID NO: 204993 - DNA, 288 bp, Glycine max
tataatttttcttctctaaaccttcctgaattttttaaattaggcttgaatccattatctacaaagggaaatagcagtttcactacatgtctatttaggggtagaaaatcttcaccatacagaaacacgcttaacaggtaccagctaacttatgtggtgtcatgtgtgaatgtgttcaagaggcattcaactggacatgcccacattgctgccctctctccttgtataaaccacgttacatgatggagatatattaaaataccaacaatacaatgcattgtataatac

SEQ ID NO: 204994 - DNA, 316 bp, Glycine max
aattattgcaagcttctagaaatttttttttcaccacccccaaaggcggggcatgtcatgagaactccaccgaaaactgccttgggaagccttcttgaaagctagacctatcaccctaccctcaaaggctgaataattctcccacccccgaaatgctttctaacacacccttagaactaagtacctcctgcaaaaacagaaatacaaaaaaaccctactcaaaaacagctatatcgctagaatacaaggtcaaaccctatacactacaatggccataaacacgggccaaagaggaaacatttagtttacaagaaag

SEQ ID NO: 204995 - DNA, 407 bp, Glycine max
  unsure (1)..(407): unsure at all n locations
cctcaatgcctngaaaacaaaaatccaacgtaagatgggcctaaactgaggtcaaaccataaccgcagtcatttatcaataccacgttnttgttaggtctgacatgttaaattactaggttgttaccatcagtgacgatgaggatattgatggcatattcaatgtatataactgacatcaatgcttaagtggctntcagatgctcgtacaatacgaacaacaaccttcttctaccaccaatgtcgaaacaatcattcaatcaccataattcacaaaataccatacactaactaccatacttaaacctaccatgaaggcccatttacacacaccaatccattaggctacaaatgatatacatccttatttgaaccattgaattgatcccacattactataccacaact

SEQ ID NO: 204996 - DNA, 337 bp, Glycine max
ccctatctttctggtggacaatgcccatttaatcttacttggtcagaatttttggatggttatatgacaaataaaattcatttccaagttatatacttgccttggagggcattagttatgtaccggtttatgttttttgtagatatttgttaattgaataatcaaatagtaattgctatcaatgctaccccatgcaatgatattgtaagataagctgttatctgcaccagtttcttttttctctccatggaatttgttcttcttagagtatatggcaatatattctaacacttctttaatatcattcaaagctaatgaatcatcctgctcttcattc

SEQ ID NO: 204997 - DNA, 477 bp, Glycine max
  unsure (1)..(477): unsure at all n locations
actaagctatcgtgttgaatagcaccttaatgaactctggaggtttctctatatcaagagagagttgttagctcctaacatcaaatattgtattatatattatntttaattntaatatttgattnttgcttataaattaaaaatttgatagatgaattaatttttactataataaactaattcttataatctagttgaagtatgacaattcaaataatttgttcttcattctttaagaagaaagaagtcaataattttagactatctctcagtctactcctatgtcacanactttaaaattttcaccacaaacttgtatacatcatgaagtaatttgaaagaagaaagaaataaatgagttattggtatatntattttcatanaacatataatatatttttattaaaactaaatttagacaattattaatagtaaaaattagtcatttctaattttattgcatgtcttaattctagc

SEQ ID NO: 204998 - DNA, 381 bp, Glycine max
aggaatatttttttgtcattataatttgaacacatgtctttatccctactattgacagattgatcttaatcgtacaatgtacatgcatgtttatcttaactggtgccttgaaaggattcaatgataaaaacggcacccatcctacgaaaatgcttgaatggattctatattaaataagtaatttaaacaatgttggtatcttccaaatgacattttattgtataagcaaacttcatgatgatgcacccagcttatttgttgatgccaaaagcccaaggtgatcgattcaagacttcaagatcaagcttcaaaaaatccaatccatgattcatgattcaagagaataaatatagaagctacaggtctagacttcatatatga

SEQ ID NO: 204999 - DNA, 399 bp, Glycine max
  unsure (1)..(399): unsure at all n locations
actcttcacatttgaatttgaatttctacgtacaaggcactagtaatcgattaccaaaacattgtaatcaattacagacttttgaaattaattggacgttgtaatcaattgaaactttgtaaaacaatattgctactggtaatcgattacaacaatcctggtatcgattactagagagtaaaaactctttggtaaacatgttttgagaaaaatcatgtgctactcaatttttgagaaaaactttacatacttatcttgaataagccttctctcgattcttgaatcatgagtcttgaatcatgaacttgaattctgagatctagaaccttgaatcttgaatcttgactctaaacttacttcttgagtctngaattctttcttgattcttatcttgaactc

SEQ ID NO: 205000 - DNA, 264 bp, Glycine max
tatgatatgaaagttcatgtgacacatacttcaaagatctacgtctctccctcttatattgctggaatttgaggctccgccctctatctttttatctcccccctcttcctccattgaagcattctgacaagctttttagtccaggctcatattgggggggaagctccttttcgcatggcttatgccctagtggatggtgcctactctcacttcttttacttttctttctcggcgtccccatggtggataatcaccattaaagga

SEQ ID NO: 205001 - DNA, 387 bp, Glycine max
gatgaatgtggcatttacctgtgggcgaaaacaagagcaagcctttgctttgctcaaagaaaagcttactaaggcacctgatctagctcttcttgaagtttctaaaactactgagctataatgtgatgcctctggagtgggagttggagctgtttgatacaagtgggcaccctattgcttatttaatgaataaatcatggtgccacccttaactacctcacctatgaaaagagcttatgccttaaaagagaactccgaacttgtgacaataccttgattacaggaatatgtattcataggatcataatcacttaattcattgagggcaaagcaagttaccaaaggcatgcaaatgggatagtcctatagcatttcctatgtttcaaa

SEQ ID NO: 205002 - DNA, 340 bp, Glycine max
gagcctaatcttgacaccgaaacatatatctaatgagatgatatacatgcttctaaaatctatttcttccttagaatatctcttatatatagagaacctatgttcagccacgctcgaagttaaaactcaaatgtcctggcaattgactaataaaacaagtcctgcaactaattaaggtggataccggacaaaggacccaacaaaagctggggagcttccctgctaatttattaattaagaaataactccacactgtacctacaaaaacatcataatgtcaaatgataaactcccaaaagtccaccgtcatttattacagccacggcaatattcagctgct

SEQ ID NO: 205003 - DNA, 402 bp, Glycine max
tatatgagttggctacactataacatatgttggtaaagttgtagctgattgaccacctctatattcaattaactaataatattaatatttgcctagaaaaaaaaatacttaagcttgagtgcattataactagcctagtgtgtaatatgtttatttcatctagcttgaattcttttctttgttattggttgcaatttttttaaaaaaatcaacacaaggcaattaagtcgactgtattattcacaatttaaaatctcgagatcatttcagaaaccgtttaccactttggtgcgtgcgtgcaaagattaatttgtgtcaaatatgactcttagactgacaactgttttatagactcacgaagatttttgttatttattataattacgcggtcctatttgactg

SEQ ID NO: 205004 - DNA, 206 bp, Glycine max
ctctgaaatcctttgcgagcatgtgattggaatatatcctaccagttacaccattatgattggctatggacaatctatatggtcttttgttagacctggaaacatatccctatgcgttttatcctccctccaccagcgcttaattttgctggctataaccaaaaccagagattatggtgtgtgcctaaaacaattccttacaatat

SEQ ID NO: 205005 - DNA, 414 bp, Glycine max
  unsure (1)..(414): unsure at all n locations
actaactcacatatgctaataaagcttagattacctctttgttttatcttngagaagaatgacgcttaaactatctctacccaccaaagaagataatcttttggttacaaccatcaaatcccttcatatggaataagaggccataattgaaaacaaattttagcttaactgtttaatgtaacttaccaacacatgattatgaaataagagaagaagttcaacacagaacactacaatcgtgacaccatccatatagtaatatatggaacatataatcaaacttcccctctgattgaaacagatctggtctaatagcactaaaactaagcatcagtgttaaggcttaaaccattttatatactgcaatgctacatctacctgtagttttaatgtacagtgttctcactcccttct

SEQ ID NO: 205006 - DNA, 214 bp, Glycine max
cccataaatgccacgactcccaaacaccatggctacctgggggggcattgagatgaccccccccccacctggaccttaaagcattaataggcaattctatattgaaacaaccctagggaagctaacaatgacttcccttatactatggtctaaaaagacacccctaaatgataacctcggcttcgttcgataaaattaagccataaacctaaag

SEQ ID NO: 205007 - DNA, 373 bp, Glycine max
tgaagcaaactctcacctcacacaagtccataacatcaatctaaacttgcccaaactggatttacacctaaaattcccccaaatcaaaattggactctttaaccaccccattttggccctagaaatggctcttggtcaacattggcattggtttttctctctagctaagcctaaccttttaacatggttctaaatgaaaaattcaagctagaataaactaactttaacctccttttaccacagaattcagacttagccttccaactctcaaagtctcactctttttccactcataacatcacattctcactttctaaccctggttaactctacccttcatctctaacagtatccataggcaatctcagcatat

SEQ ID NO: 205008 - DNA, 310 bp, Glycine max
gtgcctgtatattgatgcgcctgaatcggacatacgagtgaaaagttatgaccatttgaatttctcgagagcttcctatgtttaattttgagcgtctcgatatattatacgcctgaatcgaacctcagtgtgaaaagttatgaccatttgaatttctgtagagcatccgttgttcattttcgagcgtctctatatgtgatgacaccttaatcggacctccgtgtgaaaaagtatgaccatttgaatttctcgagagcttccgttggtcaattcgaccgtctggacatattatgcgcccgaatcggacatc

SEQ ID NO: 205009 - DNA, 431 bp, Glycine max
agcttctcccccaattatctataaatatgtggagaagtgaagtgaaaaagggttcagccccttaggcactcttctctctttcaaaattgcttagaaaaattgcttccgggaagaaaatccaagccgaggcacttccgtaaccgtttcgtgagtgatttcgcgacgcgcccccactgttcttcatttgttcttactcggtcttcgggcttcaccgggtaagtacctcgaaccaagcttttcgattcattctattgtcccgtggcggcccacattcggtttcgtgtattttccttctcgttttcatttactttccgtaccccttttgacgtcttaagccattttatttagagcatttctcgctaacctaataaaaatattttcccccattgttgaatgtgttatcgtaacttctgtaaatgaatccgatcgtc

SEQ ID NO: 205010 - DNA, 349 bp, Glycine max
  unsure (1)..(349): unsure at all n locations
cagccttctggaggaatcttctggagggccaactgggcctggttgctatttgcaccccnccttttactaaatgcacccccttctattttttggtaattctttttccgtaatgttacgaaactttacgaattttgtaacgaatcttatttttctttcgcaaggttacgaaatcttacggattacgtatttactctttttagctttcgaaaaagtacggaacttacggattggcaaacaccctttttctattccgcacatacggatttcacggatgcgcaagctgcttctttgattttgagacgctcggactcattattggcacaaggacccaatattaaagcggtaacaa

SEQ ID NO: 205011 - DNA, 260 bp, Glycine max
aattactacccgttgtgactaacttccttgatcgaataccatataccctaccgatgcttatgcccaggaatgggtagaacactgtcttaactcattggggagatgataagcttacatttcacattgccattcctacatggcgaacgcaccatgtcatggtccaattccttctggaccgggaagatggagagatatcatctggaacataggctgatcatattcagtggctatataactatttcacatcgaattttcgttaa

SEQ ID NO: 205012 - DNA, 294 bp, Glycine max
tggagtataaacatgggaccttttctttttatttcataaagaaaggcgtatctagtcaaggcctgagagaccatacaagtttcctaacgatatctaataatgcgggccattaagtctatcatatgctggacaaagccgagaagcccatgaatttttttccgcccgcctacgtgtctgccatcgtcttggccttggctaacaagcgggaaagtcttgacttccgttcaaggttgagcaaccgaccatcacatggttgctcttggaaagaatcaaccccttcattagccttttttc

SEQ ID NO: 205013 - DNA, 227 bp, Glycine max
tctctctttctttactcattgaacatcctctccagcttttatccaagcacattcttggtgggaagctccttcaccatggttattccctagtgatggcgcctccttcaccttttcttcttatctttactgctttcctggtgaaaatccaattgaaggtctataaagctaaagaacagcctccgttagcttacaaggaacttatctaagaggtgactcaaccttttacc

SEQ ID NO: 205014 - DNA, 331 bp, Glycine max
tatcctctatatcatcttcttctttcctgcgatcaacccacatccccaatttgaagaacgcattatggcaaaagacaggccacacagagtgactctggaggactactctagtttctctatacctcaatacttcactggcatagcctagcccgaagttctagctgacaacattacttatccacattcctggaattaaggcaatctctttcatgtgctaccaaataaagatccatatgctcaccttgccacatacatagagatttgttacactgtgaagatagcaagagttctagaagatgtcatccacccaaactattttctttttctctcc

SEQ ID NO: 205015 - DNA, 315 bp, Glycine max
caacttcaacatagcctttggggccaactttggctactttaagccaagttatacatggaatactctggaaattatctaatttcggccctatattgacgccccccccacgcacatgaagatttttgaagacaaagtgctatctttttaaaaatcttttcaaacctcaaacaatgcaacctggagcccacattgattccatcctcagtaaaccaaatctgatgactaaactatcaaattccaggatgatgtaaatgcactttttaggatccacaagccctaatgaaggagtcactattttttacattacggatgtgt

SEQ ID NO: 205016 - DNA, 414 bp, Glycine max
  unsure (1)..(414): unsure at all n locations
gctttattgcatccaacagaggtatgtttacctctactcttctaaatgtttcctagatctccttctctgcctcttccattttattgttggaaattgctcttggagggaatggaagagggatatgttgcttctctttagattcacctgcatagaaattgttaacttactctttaaattgttgncatcatctttttctggagtagagtgaggttgggcaagttcatttgcggatgaggaagatgctactggttgaggtccttgacactgctatcccgatctcaatgtaatggcactcacatttttgggattctagacagattgagaaggtaatttgtctgaattctgggactgttgttgattaactgtgtagccaactgtccatataattagtagctctgatggggctctggctct

SEQ ID NO: 205017 - DNA, 369 bp, Glycine max
  unsure (1)..(369): unsure at all n locations
caaaacaggtaggaaattggcgctaagcgcatcctgccccgcttaagcccagttatggagtctaattacagaatggatatggggcttaactcatgacaccgcgctcagcgctgttacaataaaattttttccagagaaaaagtggcgcttagcgcatcatcttcggtaagcccactgcttgaagtttaattctagtgaagatgttgggcttaacgcgatgatgtgcacttagctaaactattcagccaactagtcgcgggtctaagcgtttagcgtgagtaagctcatgcttaccgcgtgaagagatggcgcttagctgatggacaactgaaatntcttttctgagtcttttctattatttctttacct

SEQ ID NO: 205018 - DNA, 423 bp, Glycine max
  unsure (1)..(423): unsure at all n locations
ttatccaagccttaagcaacatanacactactcttgaattctaggctgaaatcgctggtgctagcagcttgaacatacgaacttgtaaaaattactaggaattggtcactacgaattntgagctaaaattctcactgaattttctagaaatctggaaaaaaaattatataaaaaagagctaagtgatttggataaaaggaaaaaatactaaaaatcacacaagttggcaggaaaatcagtgtccagaaaaaaaaaagtgaaagggaagtgtgcttgttgttttggctcgaaatttgttctataattggtacctattttataccaatattagttctgaaatttcaattgaaaattagtgtgaagaaaagtgtcaaaactagaggtttcttgagtctcttcttatatagctcttttactctactc

SEQ ID NO: 205019 - DNA, 313 bp, Glycine max
gtaatctctcccacacccaagtttggaccaagtagtaatagggtgacaaaagagttaactacaattcaaattcttctttaccatacaaacaaactattgttttcttcgatagaccaaaatcattttatatgttggataaaaatgttggtcacaaagctgattctctccagctagatgaacaaccataataaaaacaaactttctcaccaagccactatgagagaagccaatcattgccatgcaagttgcacgggatgtttctagctcaatttcactcgcactattgacaacacccatacctactatatttata

SEQ ID NO: 205020 - DNA, 344 bp, Glycine max
ataagacatcactctttattttttcccgagggaactcaggaaaggcctccatcctaacggcggggtaccatcataggaaaaccgctgcaattttatagaggtatagatctgaaatctgggaagcatagaaatggccctacctcccacttggcggcaggaaatcaccatagaaaacctagaaaaatcgatgaggaaaaaaaaatagttatacaattaaagccaaaaataatacatctgcttagaaggagagtcttagggataaatgtaaaccaaaaaatgtggatccctacataacactgaggacacaatgtaaagactagaaatcctgaccggatataatatta

SEQ ID NO: 205021 - DNA, 136 bp, Glycine max
agtattgaacaaaaaatcaatgtagcaacggacaccccacccaccctccaaaataacgcccgagagacatagaaaaacggctgcattctgagactagcatccgaatgcacctacttactcctacttaaagaaaacc

SEQ ID NO: 205022 - DNA, 406 bp, Glycine max
gctctttccggagtctcatatgagaagaaagggagcacatatgatcccagattcctcgccgacaacaccttgaatagggaataagcttttccacatgtcggcaagtcatccttgtctcatatcgtactctctcaacctcttcatgtgagacatttgagcacacaacattcaacttcactcatacactcttctaaactcacatttcacattctgtgttatcctgcatcatgggcagttgtcacttatgtatatataagcatagaaggtcaaaggctgaaattcctacccatgaacatttccaggttgttccttatccaaaactgtttctgatgtctggaatcactattcatcttgctacttggagctttaataattaattagcaaggaacacgctaaagttgacttt

SEQ ID NO: 205023 - DNA, 341 bp, Glycine max
aagatgaggacaaagaatatgaacatgctcaacaacaatgggagaagtactcaactgtaaataaacaacaagaaaatagtttccaaataatagaccttcctcatcaactgattattacatcacgccggcacggaaaacatgatgaaaccttatgtgccattctttctttaatcacaagcatctttcttgaaatgatttggaatgtacttccaaactatatgaagttcatggaatttctaactaaaaggcgaaacttcaaggaagatgtgttctatgtgactttcatgccaccttgaaggtattaaactatgcgccaagctaatgacattaaaaaagcgctt

SEQ ID NO: 205024 - DNA, 457 bp, Glycine max
  unsure (1)..(457): unsure at all n locations
ccgaatactgatgggtggatgttgatttttgttgttctggcgcggagatgatggtacagcgggtgaaccaaaagcggaagtttcttttggtgaggtatccatggaaaagcagagcgtttggaatgatttcgtaaatttcagaaggctattgggaaatgctggtaaaaacacgaatgccaagcaaatataaatttgaatgaggaatgtatagggtcgtgtgaagcaacggtcgaattttccttggttcagtagtgaacgtgctattaatgttaagtgattcgtttgggcacgttcagattgctgtagttgctataatttctctagcacacaaatgcccagcttgcccctcagtntttcaaactgatttgcatccaaagcctttgtgaaatatctgctatttgttactcagtgtcacatgcttcagtgtgatcactttatcatcaacaagatctttgat

SEQ ID NO: 205025 - DNA, 259 bp, Glycine max
gagaaagaatacttggagggaagcctaaagatgctatgagaaagaatacttggaggaagctaggagaggatttgcacaagaatactctatgaagcctatagaggcttttcagaagtaatattcatggagcttgttgaggctataaaaatactaatggtaggagcttatggtgctaccaaaaaaaaaaagaatatcactgtagggtgctatgtctttgaggagaaagtctataagtgcaggtatttggatgtagcccatg

SEQ ID NO: 205026 - DNA, 408 bp, Glycine max
  unsure (1)..(408): unsure at all n locations
agcttcgtccgcagatccctaataaatattatgcttngatcaaacaacattgttgtagcaacatatttaaaaccaaaacttaatccgcagatccttcatttaagactaaagttcaatcctgcttcaatcaagttctaaggcaacaatatcatttccaatgctaccccccttagctatgcacacaaaagtaattacactagctgttccttagaaatccccaacaagggtgtttagctagccattacagaaaaatcctaacaataatgagattaaaagtagagaatcactgctccttacacaagaagggggattcctcctcctctttcaacatctcacaatactctgcactcataatctctcttattacaaacttagtctctgaaaagtgttctcttgctgctcaagctt

SEQ ID NO: 205027 - DNA, 368 bp, Glycine max
ctgcacttaaaaaaatgctttttttctattcaagggatctatcataacctcaatcttatggagaggtaccactactggacacccgaatgcaattttatcgggcaatgatctaatatcgggaaccattgaccacgcgccttatatacccaccacagtagaaagagtttcaataaatggtagttcaccaagtgaaagcataaccatagaacaacctaaagatagatggtctaaagaggatagaaaacgagtacaatacaacctagaagccaaaaacataataacatctgccgtaggaatggatgaatatttcataagttcaaattgcaagagtgctaaagaaatgttggacactcttctattaacacatg

SEQ ID NO: 205028 - DNA, 364 bp, Glycine max
  unsure (1)..(364): unsure at all n locations
atgaggaataaaaagggagagaagtggaactttgaagtatgtttttattactctcattcatcagagntacaacaagtgttacacatgttcctatatatagactaggtagctccctggagaagctttcttgagaaaacttccttgataagcttctttgagaaacttccttgagaagatagagcttacctacacacactcctctaataactaagctcacctccttgagacgcttccttgaaaagattcctaaagaagctagagcttatccacacacacctctctaatagctaagcacacctccttgagatgagaagctggaacttatctacacaccccctactatatctaagctcacccccatgac

SEQ ID NO: 205029 - DNA, 387 bp, Glycine max
gaaaaacgagatgcatgcattaaggcaatcacctttttcaaaatagaggtttgtctttgaccatacaaattatgaaataatatgcatgcttatttacttgttaagagatagaatgttatataaaagatagccgcgagccggcttttttgataataaacttaacttggaaaatggcacaaagaaaaacgtgggaaaagtcaacagaatatatcaaacaaggtaggcataagcatgtattagtgtatattccagctactaggcaacactatagtatatatattatattactattaaatcacgtaatagtttggtgggtagggattcctatttcctacccatatataaagaagcaagctatcccagatataacatccaacgactaagcac

SEQ ID NO: 205030 - DNA, 395 bp, Glycine max
gaactcatgaaatcttatttcactaaattaactactgaagggaggatagggggctcacaacgagtttggaggaacgaagttggaacaacacctctgaagctgaagcagaggagtaacaagctcgaaagccttcaaacagaggatatggccccgcccaacctttgatcccttcaaagttgtcagcttacaaatcaagaataggataggctgtttggatgacgtgaaacgaacccttatgtgagcactgggcatgatgtttgaaccccctgccctattgcgtattcatacaaacaaagcatgttattttgctctgaaatggcgcagatagtagacttgtgtaatcagactacactcgcaaggctatgttattctgccaattctacataagtgcgact

SEQ ID NO: 205031 - DNA, 411 bp, Glycine max
  unsure (1)..(411): unsure at all n locations
tttcttctaaatangaagaagaagaataaaaatgttcagataggaaattccggactgcaaatgtgaatagagtctggtacaaaaagaaaatactctggttatttaatcacagttgttatggtaaagagaaatttctggttntttatcccaaaaaaaccattcttcttacccctgtgatatatctccattgtagaccattgttcttgctattaacttggaagtccttgcataaaggattcattaagttaaatcttcttcttgtatgttagttgttgacacagactgatattgagaagatgaatctgttctgtgtgaatgtattggatgttggaaatggttggatagtatcagaggtatatttaaataattggtgcttataatttaaaatatatcacacataagtagtgcatg

SEQ ID NO: 205032 - DNA, 470 bp, Glycine max
  unsure (1)..(470): unsure at all n locations
atataacttatggaccctgtactctttatattaaattttcttatgttctnggagatgcgagcgaactaacttttggctactccttaataaggcatgtgttgtgttgtgttgttaatatggttaagggaaatgtactttttaacaagcccttatcttggccctttctctagtgggtatcgggcaactatatatattatatttcactctcatcgcttgtttggtgtgtttcacggctaaaagtaacacaatttttgtttaagcttttaatgtgtctttaaaattatagggagggaaataaagagaatagaccatatttttctgtataaaaagacattgtacatcgattatgtcattaaacgatatagaaagtggtaatacaacattgatcaaatgggaaattcgatgtatataagacactctctatatcggctntagacataatcgaagttggattgataccttctacactg

SEQ ID NO: 205033 - DNA, 360 bp, Glycine max
tctttatttacttaacccttttttatttctctctcatttcatacatcatttcgattatatttctttcttcttattttattaataatcattaattttattctgatacaatctttaccttttagtctttatacctaaaaaaatttcattttgatccctgcacattatttctctgtgaaccaaagtataaagatttaatggattaacatatatatatactaaattaagttaaaaatgtatttataaggactaaaataaataattcctgtataagaactaaaatgtataaattacttagatataaagacgaaataattaattagatctttctctattttcttcaacctctctctatttaccaaa

SEQ ID NO: 205034 - DNA, 375 bp, Glycine max
agcattgaatggttaaaacacgcactgttgtcatggatagcagaattgatgcacgcctagggagcctaggcttcaaaaaaaggtaaagtgaacctacttatatctgaacacgactgatggagaaattcttcgtagtatccctatatgttgatgatcttacgcccccgcgcaaccagccggggagtatatttgacgagttcaaggaataatagaaagatgttttcgaaatgacagaccttggaaggaagacattctttctcggtaagaagggtgatcaaaaacagaatggaaacattctttgccaggaaaacaatgcaaatgaaactctcaagaaggtcaacatgggagggtgcaaaccaacttgcattccaatga

SEQ ID NO: 205035 - DNA, 419 bp, Glycine max
  unsure (1)..(419): unsure at all n locations
ctataaatagacctcctatctttaatggagtgggttgccactactggaaaacccgcatgcatatctttatataggcaatagatttaaatatttgggaagccatagaacaaggaccttatgttccctctataatggccggaagtgcaacaatagaataacctatagcagattggactgaggaagaaagaagattagttcaatataatttaaaggccaaaaatattattacatctgccctatgaatagatgaatactttacggtttaaattggaaaagtgttaaggatatgtgggatacactacaagttacacatgaaggcacaacagatgttaaaagatctangataaacactttaactcgaaatatgaactgttaggatgaatgaaatgaaaaatacagacatgcaaatgagatcacac

SEQ ID NO: 205036 - DNA, 392 bp, Glycine max
gctttctcactccaaggagtgaatatactcttgtctctctaacactctagctttctcactctaaggagcgaatgtactcttgccttggattgactcactctctactgtaactcactcaagcttgaggatagagacttcccaagctaattatcttctctctcaaagagacttctttactttgtagctttctcactccaatgagtggcaccactcctgtcttgggaatagttacggatgatagctcctacctttatttatactaccccacattcacaatgaatggatgaaatacttgtatcctggaatcaatccctagatgctccacacattcatgagtctttacctcttctagcccttcatttcttcatactttcataaggttaaaagctcac

SEQ ID NO: 205037 - DNA, 449 bp, Glycine max
  unsure (1)..(449): unsure at all n locations
gactatacgagggatcttccttggtatattttattttaanggctaccgtgtctacaacgttgcaactaagaaactcgtcatcagtcgagatgtggaagttgatgaatatgcttcttggaattgggatgaagaaaaagtggagaagatagttcttatacccgctcaactacctcaagaagaagctgaggaagaagacccaggtgaaccaccttcaccttcaccacaacaacatgatcaagaactatcatcacccgagtctactccaagacgagtaagatctttggtggacatatatgaaacctgtaacttggccatacttgaacctggaagctttgaagaagcgtcaaagcacgatgtatgggtcaaggcaatggaagatgagatgcatatgatcgataataacaacacatgggagttagtaaatcgtacccatggcaaagatatcattg

SEQ ID NO: 205038 - DNA, 362 bp, Glycine max
tgtcgcacgagattgtgtgttgtactcctctgctgaccaccatacagacctttgcccttccatgcagcaacctggagcaattgagcagcctgaagcttatgctgcaaacatttacaatagacctcctcaacctcagcagcataatcaaccacaacagaacaattatgatctctccagcaacagataccaccctggatggaggaatcaccctcaactcagatgggccaaccctcagcaacaacaacaacaacctgctccttccttacaaaatgctggtggcccaagcagaccatacattcctccaccaatccaacaacagcaacaacgcctaaaatagccaatatgtgagacccctcccaacc

SEQ ID NO: 205039 - DNA, 322 bp, Glycine max
  unsure (1)..(322): unsure at all n locations
ttcttcacggaaacaantttccaagcaatttcgatagagagagaagtgcctatgtgctggaccccttccttctacaacttctcccctatttatagcaaaataggggaggtggttgccgcccagctcgcccaggcgagcaaggatgcttccttcagaagcaacccgcttctggaggaatattccaaagggcccaagtgggcctgggtgctatttgcacccccatttttactatggacacccccctctgctgtgtttttggcgattgctttttcgtaagctacaaaacttcgaatgtcgtacgatacctgtttctttccgaatg

SEQ ID NO: 205040 - DNA, 439 bp, Glycine max
agcttaccaccataggaggccatggatattatttttatgatgaaggagatgaatgaggggagagggagagaatagcactatattttgtgctccaaatgagctttgaaatctgaagtttaatattcaaatgatcaaagttcaaaaaaatgcccacacatgaccccatctatagcctaagtgtcacacaaaatgggagggaaattcaaatttcacttgaatttgaaattgaatttgtggagccaaactttggagccaaaatttcaataattatgattagtgaatcttagttatggttcagcccactaatccaagatcaattccaagattctccactaagtgtgcttatgtgtcatgaggcattgaaaagcatgaaggacatgcacatagggtgactttatgaagtggcattggggtgtattaagcacatgctcaccccccc

SEQ ID NO: 205041 - DNA, 398 bp, Glycine max
  unsure (1)..(398): unsure at all n locations
aaatttggttntagagttagaaaaacatgaaaattatggattgcttgtgagagttattgctcgaatttgggctgccccatgtttgatactttacatagaggcagcgtggaaaacaccttgcaatagtgtgtatacataggtaaatataaggagcatgaaattcctagcaaagtgtgaatgattgtcttcctaaatgaatgtatgatagcacggaattcccttttgaatgcaagtgtgtgcataatgtaaatagcttgccaatatgaataaatgtgaatgaanacaataaattttttttatgatatatatttcaaacatatgtaggtagtttgtaaatagcaaatgtttatgatataaattaggtgtanagtctgacgcaacactttgagcatganagt

SEQ ID NO: 205042 - DNA, 336 bp, Glycine max
catgatcaagttaaatgcttacagttttcccatttgtggtaatgaaggtgacatatttgccttgatttgtgtcacctctccatcaatccatgcatccttaggatcctcaacccaaacctgtgatccaacgatgatgttcacaggtgtttcctgaaccaatctcaacaaggcaagaaaaagtgttacttgttacacatgatctgacagcaataatatgtgaatgatccaactacaaccaacaatcaacacaatgaaaactcctttcttatcttttatcttcttcagattctcaccatgacgctgctactaaactcttctgatcatgaaactcaaaat

SEQ ID NO: 205043 - DNA, 410 bp, Glycine max
  unsure (1)..(410): unsure at all n locations
aatttttcttagtatagatcaagtcatgtgggttaactagtgactcactacgttgacccatgactcaatggcctaacaccctgactgtgtcaatcaccatctgagtctaataacatggaacacatcctatctacaccactcaaatccctcatgatcaatatgattcattacaggcccaattactagctntataatcatcctgctatagatgatgtttgatagcattgtacgaattgtagattgttcaagtcgaaagattactatctcataatggttgccatgagaaacaattatgacacttacataactattatgaagccttctcatagagagcttgccttttattaatgttactcctaatatttatacttgtatgtcaagttgatatctcatatcgatgacctgtgagc

SEQ ID NO: 205044 - DNA, 402 bp, Glycine max
caaaactctactttcagggttacatcctcttctatgaattatggaaaaacttttcggtagtattgtaatttattggttcctttttactgctaataccaacacgagtggtacgggttgcatttgtatgacctataaagaaattataaatctgatgcttgctatttctttctttatcacgttcgatgccatatgtttatcaatttgttacactatgtgatgctacgttattcaagttattatctttatatgtgactatgtgctacagcttgaagattatataacatgtgggatggattttgagaaaatgatgatcatataatgccccatgctattgacaaacatatataatcatttgttatacaatgagaaagcttgatagataacacctctctaattacattg

SEQ ID NO: 205045 - DNA, 317 bp, Glycine max
  unsure (1)..(317): unsure at all n locations
tataattntagaatgatttttttagttcctatcgtttacattttaattctagtttttgaaattaatttttttagttcctataatttatattttaatttctttttagtccttatcatcaaaatatgagtaatattatccattacaattaactacaaaaatattaacaagtaatccgtaactaaattatcacaagataatttgtaacataaaaatagttgataatttataattaatctatagttaattacttttatatatttctttggngaacggactaaaggaattaaaatatcattatagggactataaagatcact

SEQ ID NO: 205046 - DNA, 376 bp, Glycine max
tttattgtcaataaaagaaggcggattatttctcaaattataactatctaaaatatcaaaattacagaaagggcttgatgctattatataataaaatcactaatatacattattcacccccctacggtaactatccaatacatattttattcattgaaaaaaaattgtttgatcgttgaattacaaatattttaatgaacacgtctacaagggaaacatgaactaataattaatggtaatgactatattttattaccgacattaatttctaataatagtgcttttaaaacggagataaagaactgtagtgcacctgggcaattattttgagataaaaatctttaattcctgaggcgtaagctcatatgtgtaacat

SEQ ID NO: 205047 - DNA, 339 bp, Glycine max
  unsure (1)..(339): unsure at all n locations
atgggaaaccactcttctttagtcattcctctctttctttcttttaatcatctagccccttcttccatccacattagccnctgaagtgtaaaatttctcatggccatgaaaggctaaacctccattgttgggatcctaacaagtagggatggaaatgagtcaagccgctcgttaagggcctttggctcggctcgactcggcttgacttgattactaggccaaactcaagcttttaaaaagttttttagattaaaggtcagagtaaactataaaaatacttgttagcttgacagccacttgttaagaatttaatatataatataatatactatttcttta

SEQ ID NO: 205048 - DNA, 353 bp, Glycine max
atctaccatatagatcagatcatcctaagatcgaccaagacttaagagcattaatgataaagaataagaatcttattaataccccaaactagagatccataaattgaattgtaatacacctaacgctgacaaaatgcgggttatctttgacacgggaaacaaacgccaaaataagaaagcgatatagaaaaactccatacatccttgaagaaatgtgagtttgcatacgtttcattccattgaacatatagagagaaagactgccccaacagcgattgataaaaacaagatattaaatcccttcctaatccattagaaggggctagagccaggccacagctttaatgcctatt

SEQ ID NO: 205049 - DNA, 460 bp, Glycine max
  unsure (1)..(460): unsure at all n locations
tcacttcacacaaacacttattcattccaaggtagctctatttcatatcnangggtgtgattgggtcttgcatcggattctatacacttggctctcaaaaatcatattcaataggtggttcttattgataaaaactatataaatnggttaatagataaccgaaagtagccaactaaattaaactccacccgacgatattgctagctttgttagtactattcttggaatgcaattttacaatatttatgtcgacatgtaattttcaaatgtccactataacttacatattctgatgtgtataatcactcattaccgtggaaagaactcacctgatgaaatctaagaactcgtcaagatgaataaattcattgaacttatcataaaggagatctaaaaaacattcatcatatgctaacgtatgggtttattaacccataatatactcaattggtccctatac

SEQ ID NO: 205050 - DNA, 455 bp, Glycine max
  unsure (1)..(455): unsure at all n locations
taactacacactgctcttatgataggtcctacataaagctgtgttacaacgactgacagaggacaacaacactctaagaatgatgcttcaagttctaagcagcaagtacacaaagcttgagacccatcttcaagacataaacaagacacaacacaagggcatgacttcaaatcaaatagggtcagtaacagtaccacctatgtttcatacatacaacagagcgagactagatttgacttcatggaagacaaggctgacctcatcattggaaattacactgatggagaaatggtatcatccttaatggctnctagagctcgagatactcgggttgttttgtggatcatcatgctactgtggccataacagtataaacacaccgcaactagctaggtagaataaacctcatcattgcgctaggtagaataagaaatcacaataaaccggaatagagt

SEQ ID NO: 205051 - DNA, 331 bp, Glycine max
attgtgtctcacaagactctcatccatcatagttaccacaagtgttacacatgcttttattatagactacggtgcttacctgagaagatttctcgagaaaacttccttgagaaacttctttgaaaaacttccttgagatgctagagcttagctacacacacccctctcataactaagctcacctccttgagaagcttgctaaagaagctagagcttaactacacatacctctctaatagctaagctcacactccttagatgagaagatagaacataactacacaccccctataataactaagctcacccccatgaccaagaacaccaaaat

SEQ ID NO: 205052 - DNA, 361 bp, Glycine max
agaagagaattgcctaagggcttgaccccatacttcttacttcctcccctatttataacaaaataagggatgtggtttgcgcccaactcgcccagtcgagctcatctcgcccatgcgagcagggttgcttccatcataagccaccgccttctggaggaatcttctggagggcacaaatgggcctggtggctatttgcaccccctttttactatgtacaccccctttgctattttttggtgattctttttttcgtaagttacggaaacctacgaatatcgcaacgatacttggtctctctccgtaatgttacggatccttgccgattacataaacatcccctttttgactgacggaatgtta

SEQ ID NO: 205053 - DNA, 400 bp, Glycine max
agctttaacctcatcgaccctcacagtctttatatttgggagcgaatccaatccttgtgtgcggactctcagccacttatgatagccgccgaagatcccattactgcttcccctaagctctctgtcctttcttcacgccgcatcccatgcctagcgaactccccgcaccccctcgcgttgtggtcactaaaaccccgtgcgatgaaaggcgtgatgctttcgactaatggcgctcctctcatggggtagccaagctgtcttatggcgagaacgagattataattaatacaacttcttgttcccatcaaaggaacatttggacatcctccgcatgaagatagaatctcgattcttccttccttctagcgagggaaacaaataacagacgccctcccatgct

SEQ ID NO: 205054 - DNA, 378 bp, Glycine max
gcccctactttcgaggagcaacttccacctttatgaagactatcccgggcaagacgatggggaaggagatacccatcttggccccctgctccacctcaaagatccgtccccacatgaactatcccaatcgaacatagtccgccatatcccagcctcacccacacccgtaaaagaatctgttccctttgcggaagataagggaaagattaaggcgcttgaagagaggttaagagcagtcgagggccttggcaattacccattctcggatttggcggatttatgtcttgtgcccgacatcgtcatccctcccaagttcaaagtaccagactttgataagtacaaagggacgacatgtccaaaaaggcatctacggatgta

SEQ ID NO: 205055 - DNA, 420 bp, Glycine max
  unsure (1)..(420): unsure at all n locations
tcctctccggagtatgacagtcaccgctttatgagcgctgtacaccatctacgcttctaggccatcaagggatggtcgtttcttctggagcgacgtgtccagctcatggacgacgagtatactgatttccaagaggaaatatggcgccggcggtgggcatcactggttactcccatggccaagtttgatccagaaatagtccttgagttttatgccaatgctcggccaacagaggagggcgtgcgtgacatgagatcctgngtaaggggtcagtggatcccgtttgatgccgacgctatctgccaactcctatgatatccgttggtgttggaagagggccaggaatgtgagtatggccagatgaggaaccggtctgatgggttcgacgaggaggccatcgcccatctgctatgtataccc

SEQ ID NO: 205056 - DNA, 414 bp, Glycine max
  unsure (1)..(414): unsure at all n locations
tatgtaaagagctaaagctttaacctgctattgcttatatactgctttataaaaacatgtgggagaatattantgtccttcatcatgtgtgtgtgtgtgtatgcaatatgcattcctcacggtggatctatcaataacttaaagtatacagatgatagagcattcatcctccacaacaacctatgaaagtgtcttgttgattatgggtccaatgggtctgagtgaataagggtacaaaatagaatatatgggaaattaagaatttctatgtttggacaactatatttattatcaggatttttgaccaaccaaacttattggaaatgttgtttctcaacatggcataagattacgtgattgcccttctgatttggtacttaatgctgcttgatagaatttcgaaaatataatggc

SEQ ID NO: 205057 - DNA, 228 bp, Glycine max
agtcttcatattattactctcgccctcaccaccattactatactggatatttcctttataataaagggtgtaaggaaaaaaacaattaacgcatctagaaatataaaaagggtcttataaaagggacaaacaaatttttgaaaagggtcttataataagagacggggggagaacttcctagaattcccatagtatcttactctataatatccattatcttccttttat

SEQ ID NO: 205058 - DNA, 455 bp, Glycine max
ctaagctttgggcctttcaaattcttagttgctatacttctttattatctttgtccaattaaaccaatataattagttggtcgacgagatgattataaatttttcttaaatattaacactaactcttctttggatccctctttgtgactctcttacttataagtgaagtccatttaaaaaattaaatcacaataagaattttgccaatagccacgacgactatcattatggtgccttcctaccaaattggcatggtattgcaaggcccaattgttaacggatttgaatatgtcttgtatttgttcacatggattcttgttacacataagaatgcattgatgagcaatttagattattggatgagcattgcttgtgcttcatcctataacattcttattaaataaattctctggtataaaaaaaaaatcatacaagaatttaaggtgttaatgaac

SEQ ID NO: 205059 - DNA, 370 bp, Glycine max
cggtttttgttttgcccggatacaagcgggctgtagcaccggcttcaattacctaactgtactggaggcggttgcggtggctttatactctaatggattctggagttttaacatgacctccgagatggaagccatttattcttttaaggctgatagaaaggccttcatcttgttctgcacgccctcttcattatccatatttctggaacgagtgatataagggtgccctggagctttcttagatatgatgaaattccctacgacataaacaacggtgagtatgccaccaaaacatgagtatgcaaatggatgatcggaacacttggatccaccccaaggttttcagataacatggtgagtccaaaacttc

SEQ ID NO: 205060 - DNA, 363 bp, Glycine max
taaaagggatgccccacattatctccatgacacaaatgcaataatgatgatttggacactatatgcagaactggtcatgcatgcatctatgcggacactcaaatgtcaaatttttatggtcatgtgatgctagggctcgggattcatttcctctagtttaatcaacccactgtttccaaaatatgttcttttatcaatttgtacattcatccggagccattttgagcgtttgggataatcttacagcattcacccttcaggtgtagacacattttccaaaactagttatgatcagtgaatttttttcacagacaagatggaagtcgtctcttttcataagcattgttggtttctcagcttgac

SEQ ID NO: 205061 - DNA, 396 bp, Glycine max
  unsure (1)..(396): unsure at all n locations
catgcaagctttaatctggttgttaaaccaaacttttttttataaaaacgttatgttacacgggactgaagtgttccaaattgcaaactgataaaagacaagaaaatttgtttgcaggtacttactccttcgtactccctccaaagaggcttccccatgaaacatttcaccctcgcacaacccaaacttcaaatatcaacaacaaaagcaaggtcaaagctgttatctttngcacaaccgcttgaaaaactacatgtatgtggaaaatgtgttatagagaatgcatgagacatcatgaagtaaaatataattatacacttagggtgctcaaggtattggtgaaaccaatttttgtgttctgtgccaactaggacttttaagcccgaggtgaaggtg

SEQ ID NO: 205062 - DNA, 378 bp, Glycine max
ggctcttctttgacatggctgctattggtcattggcccttacatcagctagatgttaaaaatgtattcccttatggtgagctagatgaggagatttacatggagcaacctcttggtgttgttgctcatgaggaatctggtctagttcgtaagctattttggttcttctacgagctcatacaatctccacaagcctggttttggaaattcaatcatgttcatagttctgggctgagacgaagtaaagcagatcattcacgtttttattgccatacatcttctctgatatgtgtctatcttgttgtctatgtgaatgacataattatcacaagaaatgatagtgttatgattctccacctgaaagagttcttgttaagtc

SEQ ID NO: 205063 - DNA, 358 bp, Glycine max
caaaaaaaattttttttttcatttactcgatcgtaagagagatggtatgacacaagggaataaataaaaggaaagtcaccttgctgaaaaatctattgagtatactaacgaatgaaagacgttagagaatacattttttccccacccccccttcagggtatatcataaaactgggagaatataaaataaggggtcagacccacattaattctccctccacttcacactttcatttcctcctccgtacctagaacaaaaatatcggcaataatgaccaactttaatcctccaaaactagcccttagaacaaagggtaaaagctggcaagtaaaactaataatacaaacttatgatggac

SEQ ID NO: 205064 - DNA, 233 bp, Glycine max
ctttcagaatctatccacttggccttttacggcttcattcaaagactacttcttggacttagcagatgcaacttctgttatcctcagggagatgaagctagattgggtgagacttcataggtctaaggtggaaggtctatggagggtaaaggttgaagtgtacggcttttaagaatcacatcattagattcttggttcattggaggtgaggatgattgagttttatatggtga

SEQ ID NO: 205065 - DNA, 334 bp, Glycine max
agcttggatcaaccccataacccatggaatgtctattttgatcgccactaacttacggacgtgtcatagggatgagagacctcggaatacgcatgctatgcatggaaaatgtaattatgagattgagatgcccgaagaaacatcctttcttagtaatcatccctccgccccctgtccaatcattttgtttttaagggaaatgcggtaaagatcccaaccggatgagttataggaaccgaataaatgcaacttaaaaggcaacgagaatctccgcgcgtttttattttgttcttgctggcaggggaaaacgcaagggccacgcctgagcaaacat

SEQ ID NO: 205066 - DNA, 483 bp, Glycine max
  unsure (1)..(483): unsure at all n locations
actaagctgggagaggatgcttcaatggagganaagaaagagggagagattatagatgggggagcaccaaattgaaggaagaataatggagagaagttgaactttgagttgtgtctcacaagactctcattcatcaaagttaccacaagtgttacccatgattctatttatagactaggtagcttccttgagaagctttcttgagaaaaattccttgagaagcttctttgagaaaacttccttgagaagctagagcttagctacacacacccctctcataactaagctcacctccttgagaagcttccttaagaagattcataaagaagctagagcttagctacacatacctctctaatagctaagctcacctccttgagatgagaagctagagcttagctacacacccnctataatagctaagctcacccccatgacataatacatgaaaatacaaaagaaatccctactatcaagactact

SEQ ID NO: 205067 - DNA, 387 bp, Glycine max
  unsure (1)..(387): unsure at all n locations
attacccaggaatntgttcatgaacatttgtccaattattgcctacgtctatatacgaagactggggtcctaaaccttctaagattctacactgctggttatcagaacatatcttttcaaagaaactgtgcacaattgctggtcctctaatcaacaatcgggttggggagggtatgttctcaaagaaaaaattaagagactcatacaaaggctgaaattttggaataaggagagctatggagatacctacaagaaggtcaagaagattgacgactaattaaacaaagtggatgaggatacaattcatagacaattatttaatcaggaggagatgaaaaggagacaattacaagaagctctatgggtggctgcacacgcttatgaacc

SEQ ID NO: 205068 - DNA, 216 bp, Glycine max
gaatgcctcttgtgagaggtgctactatgagacatcttccttccacctgcctatcagagagatgatcatcactctggattatgcgtctcgtctatagcacttgcctgtgacaggtagacgcattgatcattactattgacctccgacagagacaaggtggagatcctgataatgactcatccttgcattctgacatagacagaggatgcatgcatg

SEQ ID NO: 205069 - DNA, 393 bp, Glycine max
aaaatgcttttaattttttaaatgaagggaaaatcgacctttcattgaattgctgggtgcacctagcatattccaaactaatagagagtgatatggcccacatccatccggtttgggcgggtcaagcccaaacctgtccatccatatgatattgaacttaatatttcttggcccacatctgactgtttgcatgttcgggttatataaattcgaatgttgctaggtacacccagcatttttactggtgcacccaacaatacttttaaatgccaaattgcccctacttctttcttaattaaaatgaacctttcttttcccgaaacgtgttaacttcattttaaaacattggcttttgtttcttttttcggcgaaatgctctgttcgatgggtgca

SEQ ID NO: 205070 - DNA, 452 bp, Glycine max
  unsure (1)..(452): unsure at all n locations
ttccttacgaacattcactcgcactatatattcttctaactaagaaaaatgcacccatgcacaatcaatgcactttcgttacctacattatttgtatgtacttccaggtgtactacctacaccacatgcatnttcttggctaaatttacatacatgcatgctcaaagccatctggctaccaaaagttgcacacatgcaaactttatgatgaatcttggctatctacacaataaggtgctacatttcatgctttattccaagtgttttactaccataagccgcatgccaattcaagtatattttcttttgccgactaagattgtattcaaattaaaagggtgtttttgtaagggtattttctttacataacatgcaacatatttatatatttatgtgagacattntgactaccataaattatatgtacatacatccaagatttatctaccaca

SEQ ID NO: 205071 - DNA, 233 bp, Glycine max
taataattaatttttttttcccgacatggaagggggggggatattaagaccgatggggcctaaaatagtcattaagagttgcggggggcccaacgtaacctcttacaaatgcccccccccccctataacagatagtttagacacttactactatatatgaatttacgcatcaagtgtgcacaggattgaatgataggatagcaaatacacttcattgctcatttagcaaatat

SEQ ID NO: 205072 - DNA, 111 bp, Glycine max
taaatttgtagccttgagattacatggttttatattccttatcaagtcattgtctaaaataaaaataaaggcattccaatttgcgtggtcctggttatcatttccctttga

SEQ ID NO: 205073 - DNA, 407 bp, Glycine max
aatcttactaggcaagaaataaaataatattaaaatcctcattaattcattaaaaacaacattatagtagaggaatgggtatcattcttaagtcaaaattgactatcaattaaactcaaacttcgcagatatcactcattcatttcaaacaacttgagcttgtgagaaagtttactgaacttgatatatttctatctacataggctatgccttggtgcatggtcaaaccatggtgaaaggactggaggattttatgcttgcaatcgttatgaagcaacataacaagagggagtgggaggggactagaactactctacttcattgggtcatgttcatgaaaccattaacctactgcccctggatatatttgaaagcaaatctcttctgaactaatgttgtgcatgtat

SEQ ID NO: 205074 - DNA, 312 bp, Glycine max
atcctatttgttggactaggcttagaataaacagcatttccatcacaacatattaagtaaactaaaacttaacccccaccccctcacttaaaactaaagtttaatcgtgcttctattcaagttctaaggcaatagttacatttcccaatcgctaaagccacctaaactaaacataccaaatggctgattagaccaagagtgccataccttaatttcgcccggcgactattgcttgatggcttgcaacctttattgaccgcttctacatcttggaccctttgtgcaaatatggaaatccgaacccccgaaatc

SEQ ID NO: 205075 - DNA, 448 bp, Glycine max
  unsure (1)..(448): unsure at all n locations
acctcacacaatatatatatgtatgtttatgttttgaaaatacctaagatatgcatgtatgttaacaaaaatacttcacagaatatatatatgtatgtttagatatgcatgtatgtagcaaaaagatatctcacaaagtatatatatgtatgtttaggtagcaagattccttggatatgcatgtatatagcaaaaatatctgacgaaacatatatatgtatgtntaggtagcaagataccttggacacgcatgtatatagcaaaatgtcctcacaaaatatacatatgtntaggtagcanatacctcatggaagacaaacaagaaaaagaaatanacaaattgataaaaaaaagagagaaaaaagaatgatatgttgtctagctgagataccaacatgcttttaaaagagatgattccaacttttctttgaaagatttactgatctaa

SEQ ID NO: 205076 - DNA, 374 bp, Glycine max
taatttttttatcaacctacaacaatttacttgtggttaatttaactagtcttgggcttggcggccacgatcaacaataatctttcgacactgactatatgttgatttgaccaacgctggtatgggtatgttgcgacaatccccacctccccatttatacattctgagaggatcgttgtcatgtggccatatcgacacccttttgtatcatacagcatgctccattttcctttgaacgccatcatccatgtgctatggtggacttattgacagatttttctaatttcgtcaaaaattggttgcaaggtggtactctgttgtattatttgcacctatttttaatttacataaactttattccgggcctgataaaa

SEQ ID NO: 205077 - DNA, 177 bp, Glycine max
acgaaagcttttgattacaacttctaacctgaataaaaaccacagcctaggatgctcctatggctgttacatgtggccatgctaagtctttgaaaaaagtcttccgcaaaaaactcaagttgatacttgattgttaacagatttacattgggatataacctaaaactgttttggaag

SEQ ID NO: 205078 - DNA, 356 bp, Glycine max
gccatgctactcatcatgaatattagtaattgagtgcgcaagatcagaatgatcagaatcaccagctacataatactcagaatgctcaagaggctcaatatgcacacaatgatcaggatgcacactatgcctaagtatctataaaggttgatctatttatgatcaagggttgttatcacctggattgccctatcatgcacttatgatcaaatcatgtgttctaaacaacaccagggaggttaaactgcactattacaaacgattgcaatagctgaatttcggagcacaccctaatcatgaaagatgccagaaatttcctacaaattcgagtctacttgtaacttcctagaaatcag

SEQ ID NO: 205079 - DNA, 235 bp, Glycine max
  unsure (1)..(235): unsure at all n locations
cttgtttcccttatcttggtttgaagcccactacatgcctgtagggaaaaaccatgatttcaccatatccttaaggaaatttggagctctggaattgttttgcgccccaccgcccggcggtttttgttccttggacaacnttgttttgttggctatgcttcatgatgtattttgggccttacttgatgtacattgtatattggataaatgtcggacatgctgaatgaaatgttgt

SEQ ID NO: 205080 - DNA, 384 bp, Glycine max
  unsure (1)..(384): unsure at all n locations
ataatcgattaccaattatgggaattttgaaattcaatttgaaaagtcatgacccttcccaatataactgtgttatagattaccagaaacctgttatcgattaccagtgaagaatntaagaaaaaactttttggaaagaaacatctcttcataccattttgaaaaggcacaaagggcctatatatatgtgtgtcttgacttaaaaaacaagagatagatattctaagagaacttcattccaaattctctttaacaactcttgggcaacacttgcaatctatttagagttcatcaggaatttanattgtttatatctctgaagagagaaatcctctggaacttcagtgttcatcacttaaggagagatttttgtcattcaaagtc

SEQ ID NO: 205081 - DNA, 353 bp, Glycine max
  unsure (1)..(353): unsure at all n locations
gatctttgagcttcaatgagggcctttaatggtgattttccaccatggagatgcagcggaagacaaaggagaagaggtgagaggaggcgccatccactagggaataagccatggaagaaagagcttcaccaccaagatgagccttggataaaaagcttggagaggatgcttcaatggaggaaaagaaagagggagggaaagagagagggaggagcacgaaattgaaggaagaaaaagggagagaagttgaactttgagttgtgtctcacaagactctcattcatcaaagttacaacaagtgttacacatgcttctatntatagactaggtagcttccttaagaagctttctta

SEQ ID NO: 205082 - DNA, 425 bp, Glycine max
  unsure (1)..(425): unsure at all n locations
tccctttctttggccaatgctggactcgtttggcagtgtttttcttggcaatctgatgctcagaaacatcaatatccaccactccttcagtaggtctgcccaggtacttgttgatcacagcaggggagaatctaacacactttcctctgacaaacaccttttgatactcatcactctttctgtttgttatgtcagagggaatgttgacaatgaattccctgactaggctttcataacaatctcccaacttggtgacagtcttcagtagtccagcagccttgatgagttccatggtctccttgcaatccaaggcatttcttcccagttctctttctaaagcaagtctgcgttgatatacatatttccacctttcaacattgccaatggagtggaatgaaatggtgtacaatggagcatcanggaca

SEQ ID NO: 205083 - DNA, 182 bp, Glycine max
ctactcaaccaacagattttggatgacaagcttttaaaaaaaaaaagaaattatctatcatcaaacgagcttgcgttattttttaacaccgctattaaataaagtgtttcatgaatgcactttaatatcatgtgtatatgtatgcatgtatattttattgtgaggctagatttttctttcat

SEQ ID NO: 205084 - DNA, 386 bp, Glycine max
actaagctcctctacacaaatcgatcacgttcaacgtgcttcggttctctttcttgattcgtataaaacaaacacaccacacatgatataatgttcccacgcagctttaacattagcggcggtgatgcggggcttccacaaatgttgcatcctcgtcgcatggtaactccaatggaagaacaacaacgttcgaggtggaaacccatcgtcgaggttgcacccaattgccctcgctgcgcctccaccaacaccaaattctgttactacaacaactacagcttgtcccatccgaggtacttctgcaaaggctgcaggcgctactggaccaaaggcggctctctcctcaacgtcccgtcggcggtggctgacgcaagaaccgccgtgga

SEQ ID NO: 205085 - DNA, 162 bp, Glycine max
atctcggtatttccatattcacgggaaaatatcttgggtcgacttttactctatcggaaaccaagtttcaacttgttgagaagaaccttgatagctattaccttgcatcccattggaagactcggctttctattaaacctctagaggggttgcttgccattt

SEQ ID NO: 205086 - DNA, 349 bp, Glycine max
  unsure (1)..(349): unsure at all n locations
tactttncgaatgttgagttgtttggagttaggttatcttacgggngaagntntgttgaacttccttcgaaacacgccatttctgaagactcttgttattttaaaggttagtaattgattgattgaaacaggcacaattactaaattacaagaaatgtttttgtagattgtcaacatttttgcaaaggaaattctggcgactactaattagatttaattattaagttattttaattctaattaattaatgtgttattcagttattgtaatgcaaattaattgatatagctttgtctttgactgtcatcagggcatatatcaatttgatgaagaactcactaatcctgat

SEQ ID NO: 205087 - DNA, 335 bp, Glycine max
tcttgcgtagccgctcttggtgctcagaaaatcccaaaaacttattcctcttattactagctattttgaattctttagttcctgaatgtacaaccttcaaattgttgcccgttcccctctttcttttctgcaaaaaagaaaatcaatatcaaagaaaacatggatgaagtcctaagaaaatcaatatcaaagaaaacatggatgaaatcacaattaaaaagcacaactaccaatctttcagaagcctttaattaatttggcttgtctccttatgtggtggggctttgtttaataatattatacttttgccttccaaaaaaaacctatgactgagc

SEQ ID NO: 205088 - DNA, 360 bp, Glycine max
  unsure (1)..(360): unsure at all n locations
cccgcccccatcaaagcaaaaggattttatgattgaaaacccaatcactgtgagttttatttttaatatttgtctgtcacatcataattggatttaaaatttcaggatagggctgtagagaattttttttatgtattacaaaatattacattaaggactagtcatnttattttatatatttgaaagatgctaataggtagctagcaggataaacagcactacaaagcttatcattgggggttcagctttgtacagatgtattaatttatcattctgtcaatgccctgataaaagattgcttatatatagttaatttatgcttacaggggaggatgaagcctactctactcctattaatat

SEQ ID NO: 205089 - DNA, 470 bp, Glycine max
  unsure (1)..(470): unsure at all n locations
aactaagcttctcacggagattnttatgagttactgatacactaattttttgtttgtatcgttaactcttatcatatttatggggaaataatcggatggtgcgcggactcacgggattcttgtagaagtgcaagatggaaggactcatatactccctgcgctttgccacaatctcgatagaggtgggccccgcatacggaggcggagagtaatcgaacaacggaagcgacggcacggcaacagtgtccttttcggcctctaccgccgcccgagaaaagctgcgccgccagagaagcggcggtgatctccgcaacacgagcctctgggctaataatactgtcattttcgccccgtaaacagagaatctatgggcgaagttatccgataacgctatcccgacccgaatctgatgagagtgtggaaatggagaatgactaagaacgatgaatggtgaagtgtcatatatggag

SEQ ID NO: 205090 - DNA, 380 bp, Glycine max
  unsure (1)..(380): unsure at all n locations
aagctacctagtctataaatagaagcatgtgtaacacttgttgtaactctgatgaatgagagtcttgtgagacacaactcaaagttcaaattctctccctttttcttccttcaatttcgggctcccccctctctctttctctccctctttcttttcctccattgaagcatcctctccaagcttnttatcccagactcatcctggtggtgaagctccttcttccaaggcttattccctagtggatggcgccacctcttacctcttctcctttgtcttccgctgcatctccgtggtggaaaatcgccattaaaggacctcattgaagctcanagatcccgccttcatagaggctccacaacaaactttcatactatgttcat

SEQ ID NO: 205091 - DNA, 386 bp, Glycine max
  unsure (1)..(386): unsure at all n locations
cgcgctgcacttgcatccaggcttgattctacattcttctgtttggccatcaagtccctgcattccccacttttgcttcttctttgtagttcatacttcacaatccaagtaagcattttctgttttggtttactttcctttaaagntgcaaaccataggatagaagatttaattttcaggattgtactgttgttaggttagtgttcttaggtttcgggtttactgtagacaatgtagtatttaggttaggattttatagtccattaggggcctttgttgggaaaaaatggggtgaaaacccctgtgtatttctggaaattacaatgaacgcactaagcgcgcctgctgtgcttagccagttcattgcatatgatgaatattttgat

SEQ ID NO: 205092 - DNA, 356 bp, Glycine max
  unsure (1)..(356): unsure at all n locations
tgccgtcacggagtntttcgactatgctcttgtgttgtttatcatgctacaaaatgagagagcaagaaataaagagccaatggttgatacatangcggagatgaaaaggatcatgangaagcgatatgtgccggctagttactcaagggatttgaaattcaagcttcaaaaactaacccaaggcaacaaagggggtgaagagtatttcaaggaaatggatgtgctcatgattcaagcanagattgaagaagatgaggagggaactattgctcgatttcttaatggnttgactaatgatatccgtgatattgttgagctgcaggaagtttttgaaatggatgatttgctttacaaag

SEQ ID NO: 205093 - DNA, 394 bp, Glycine max
  unsure (1)..(394): unsure at all n locations
agctgtataacaatccactgtgaatgagtctaagatcggcattnttctgggatagatgtggtggtatgcgggaaaagacaaagttctgggaggaagagaaggaaaaacgaaattgacaggaagaggaggatgacaagctatcgtcagtctgaaaattgagctaaaatttctctatatatagttaggctactcacaacccattatttactctatttatttatttttggtattttataaaaacaaactctattttattttctatccaatgaataaataaaatatcctttttattttctctcaaaccattattttaattaataaaagctatctcctccctatttatttaattataatgatcccctcatttttataaaacatttatttacaaattaca

SEQ ID NO: 205094 - DNA, 358 bp, Glycine max
gattaaaacaaaaagttttgccttctgaagaaaatttataacattagaaattttctccttactcacacatgatgatgcatgatgcacataggatatgatagagactaagatgcaacataaaatacaacaatcaatgcaaatgtcactcaagagagttgggcatgtaaaagaaaaaacttcttcaagcttcaatgctaactcttcatgtttctccccctatctctaacagcttggatgcaagatctggaatgagtggttcaacttcatctacattggacgcttcaccagtctcatccatgacactattgtttgtaaggtcaatgatgaccccacacacattggtgttgtccgcaacttt

SEQ ID NO: 205095 - DNA, 363 bp, Glycine max
ggtgagaaccgaactaagagaagcgagacttgccatagatttatttctgttggtcactacacacggctggaaagagtgtgccggcgtaccaaacgtaaaagcagctaccgcaaaagcccttgaacaagaaaccaagaaggctcgctaggaagagcatggccgtgactaattccgcggagcattgaggggcagcaacagtgagctcaagcttcgaagggaagagagagacccatcaccagcacatagcatgggtttaaaagaagagtaatcgctcgctcaatgaccaaaagacactcgtcttagcggttatacgagacagagatcaacatgttatctatcatcaccgagtaacattgaaaacta

SEQ ID NO: 205096 - DNA, 414 bp, Glycine max
  unsure (1)..(414): unsure at all n locations
tgcaagcttatggctgnttgaattgtgagtccttatattgtttggnttagccttggaaaaactggaatcagcaacaggctttgcattgttatgttgagttaatccagccactgccttcattcaagtgattatcaatgtttactcctgctccactcacttcttgaccttctggtttgtgattctcgacatcaagaaaaattaaatgcttgattacaattagcatccctgtaatttaagtgtgaaagaactactcctgttgcactcacttcttgtctccttgtctgcctatcataacatacaagaaaaaaggtaaaattttgtttggagttatgatnggattgaagatgcaataagctcttgaggacaaatgcaacaagtggtcaagtcaagtcaaccaacacccaacattcacat

SEQ ID NO: 205097 - DNA, 292 bp, Glycine max
ggacctatgaaactgggctttagccaatggctaccctgactaattctttttttttttggagcaccgttccctttccttgatttgaagctcactacaagccttaagtgaataaccatgatatcaccatatccttaaggaattttggagctctggaattgttttgggaataagtgtggggggttttgcttcattggataacatgttatgttggccatgctccatgacatatttagagccatacttgatgtacattgcatattggttaaatgttggacatgctgaatgagatgct

SEQ ID NO: 205098 - DNA, 397 bp, Glycine max
tcaaatttatgaactgccaccaatgcttgtgaaccaatcttaggtagggttgatagcccatgccacccaaatagaactgcacctgcaaatgtgggtggtagttccagtgcagtgaggattcaaacattggcaactcctcacatgctgcatagttaaggtttctaaaaaatatgtatgaattgcatggttgttgggtggaaagcacaatgatcctagtgaagaatgtgaggaactaataaaatgcatctctaatggaagtcatagccataatcattatccgattgaagagaaaattgagagaaacaatacctacaatgagatattctagatgcacataaacttaacaccttacacacaatcaattcaaatttgacaagtaatatatataaagaaaaaa

SEQ ID NO: 205099 - DNA, 405 bp, Glycine max
  unsure (1)..(405): unsure at all n locations
agcttgggcaacctcagaggttttnttaatgttgaanngattataggcagacagaccaatgttattgaaagaaaaactgcacaataatnttaaaggatcaacctaacactaaaagagcactagtacagttttcatttgtgcgaagtcatacaattcctagaacttgatggaaatcaaattttctatcaaattgagactggtttgattgcaaattctaataataaactcttatcagatgcaaagttgttgaatttttgttaaaacttatgctttccctacaacagtggtgaaaaataatagttttaatgccaagagccttgtggggtacttatatggtggactcaaacccaagtctaatgtacctattttgcataaacactacatggacaacgtactttgtgcaat

SEQ ID NO: 205100 - DNA, 345 bp, Glycine max
tgggtttagcaagtttgatgtatctaagttgctgtttttgacaatgtgataggaagtggagcatcagggaatgtctacaaagtggcgctcatcaatggtgaagtggtggcaccaaagagattgtgtggaacacctattgaatgtagatggaaatgttggcgctaggaaagatgaatttgatgctgaactgagacccacgggaggatcacgcacaaaaatattatgacgtggctgtggtgttgtgcaacagtgaggatcagacgctcctggctatgaataatgccaatgcgagttggcctaattgttaaggtaacaccaaaattttcggatttgccctaagataaa

SEQ ID NO: 205101 - DNA, 393 bp, Glycine max
  unsure (1)..(393): unsure at all n locations
ttctatacggaatctctaataacgtntgcatatatcatacatgcctataatttcacttgttaacatatcttttgtgtgatggagtaaaaaggaatttatattgataaagacttattgttatcagagttattttatgtgggactctttcgcatctggtgtagcggcctcaagcatgagaaactccaataaaaaaaataaaagggaaaacgaatttgctcatatggagtacatgaacataactgtaattacttcgaacaaaccttatgggatatctgatggctccaacccattttttgatggcctcaaagttcctaaattcaatctaaaaaaaggcggngtgcatagtggtcatgttcaacaagggcttatagataaatttgtttgtgaaaatgg

SEQ ID NO: 205102 - DNA, 438 bp, Glycine max
  unsure (1)..(438): unsure at all n locations
tgttggaacttcatagtttctcttataatccatcttatttttatcatatcttgtacaaacaccagttaaggtttttaatttatataaaaaaagattaaggtagtgtttggtccagttttcttttcttgcatttcttctttaaaggagatgaatcaaatacattttgagaattaaaaaattcaagagcttaatttttataaaagaaaagccaggaaaaagtagatttaatgaaaaagctaactgaagtagctttgaaaaataagccacatacctttgcctctcttccctctcatcttgaactagtcagtgtgggacattgaaacaaagcttttaatttaaaagtaatttttaagttaaaattgtcaaaaccactctattnttaaagcccttatttgagcttataagaaagtgggcaaacataaatatgacagaacatat

SEQ ID NO: 205103 - DNA, 331 bp, Glycine max
  unsure (1)..(331): unsure at all n locations
ctatgttttngacctcttaggggggtcttctctgagggaattcacggtgacatcataggaaatgatagatttgatgttttctcacactgctatttgtacattgccatcaccaattgatcacttattgtctttagaagtgttacacctaagtggaactaatgttgagatcttgcctgcaaacataaaaaacctttcaatgatgagaaaactaaaaatagatgatttctgtaccaaactcatgtatctgccggagcttccaccatccctaacagagcttcttttaaataattggcagagacttatgttcttaccgaagctntcatcatccctg

SEQ ID NO: 205104 - DNA, 252 bp, Glycine max
  unsure (1)..(252): unsure at all n locations
gataccatgtctatggaatcacaaccaaagttaagaaaatttttgaagacatatacagcgttgtgaaccgacgccccaaaacaagtttggagttaggtaccactatctaacatttctgattcaattcctttttcaagtggagctgatgctgangaggaggaaccaacatatttgagctcaaatccttctctagagagaggggatgatgcaatcctctttaggaagggaccagtcaccaaagccatgatccag

SEQ ID NO: 205105 - DNA, 362 bp, Glycine max
  unsure (1)..(362): unsure at all n locations
tccacattttatctctagtttgcatngnanggnggncgtcgccttggtcacgggaagccggaaggtccatatcaccttcttaattgtacacatggggcactgcgcccccaaatgcgcgagtaaaaagagataattttccgggctctcgtgtccgtaaaatgcattcatatcatgcatcgcataagcatctcttcataacattataatggacatatcctgcatttgtccgttatcatattccagcctcacattttgcatgagtcatggcatcatcatgcatatgcgttcaacaaactttttgatctgcaaatagcataccatttgttttcatgtttgctcatccttgccgtttcctctacaaa

SEQ ID NO: 205106 - DNA, 409 bp, Glycine max
  unsure (1)..(409): unsure at all n locations
tcagaccatagcaactcanaatctatgtatccaaaactctttattttaatggattttcaaggtttgagaagtgataatgagaatggggtaaattaggagcaaactctcacctcacacaagtctataacatcaatctaaacttgctcaaactggttttacgcctaaaattctgccgaatcaaaatttgactcctcaacacccaattgtaccctagaaatggctcttgccttcactctggtcattagtttttctctcttgcacagcccaaactttctcataaagtctaaatgacattccaagctaggattaactccctttaacctccaaataccactaaatccagatttggccctttaactctcaaaacttacattttttcacttatacaccatatttcactttcttacct

SEQ ID NO: 205107 - DNA, 305 bp, Glycine max
  unsure (1)..(305): unsure at all n locations
tccttgtcccttctgctcctctccaagcgcttcctaatataaacaaccttcttgatgaggtgatacaaatctttcgaaatttcaggagcacgccctaaacaagagaaaaacatttcacttgtcagattcttcttaaagctacntaatgtaataaccaacaacaagggaaaagcatactgtgagccttcaatatacgaagaatcttgcttccagtgacactcttcacctgagcaattccatgagagtcatgaagaataacaccaatgtgagagggagtaaacctttcttgccaaacttgccgatgt

SEQ ID NO: 205108 - DNA, 304 bp, Glycine max
acctaaattatttacatgtacatccaaggtgtatttgttacttacatcacacacatcttcttggctaaatttacatacctgcatactcaaagcattttggggtaccaaaaattgcacatgcgcacatcttggtatttttaatacctatacatacccaaacttcatgatgaatcttgactatctacacaataaggtgctacatttcatgctcctttcacagttttactacctaaaggcgcatgccaattcaagtatatttttctttgctgacctaaattgtattcacaataaaaggtatatattt

SEQ ID NO: 205109 - DNA, 339 bp, Glycine max
agcaagacaaaaatcgatagtctatccattttattaaataaactccctaagtacatggctcactatcaagttaacaagtcatccctatccacgaataaataacataatgacacacaaatctcttaaaaggatgaaaatataaaatttagtcccgaacaactaaaaattactgacatttttatttaataaaaaagcattgatattcaccgccaaaaatgagatcttactcacattctcgttcaattcattcagcatgatcgcgctaacaatcatttcaaagacaaattagtcttccgcgccacacagatcattccattaatgataacagacaaaagacaa

SEQ ID NO: 205110 - DNA, 179 bp, Glycine max
tgtccgggagaaatcccccggatgccttcattaactttgccgaatcgcaaaagatgattgtgccgctgactcagcacctgtttgagttaattgcccgcgatgccgcagaattagaaaaagtgctgccggtaggcgtcaaatttggtattaacattgcgccggaccatctgcacagcgaa

SEQ ID NO: 205111 - DNA, 251 bp, Glycine max
taaaactcagcttcgtggcaatggccgcgcaatgtaatttttttgtccctccgcacacttttctaatttgcggatcggggccataactcaacagtgctgagtcagggcacaatatttttgcgatcggcaaagttataaaggattcgggggattctcccccacagatgccgccgcgaacagacttccagcccgttctcgaaagctgcatgcctgaggtcatctaaagatcccggtaccgactcaattcccct

SEQ ID NO: 205112 - DNA, 372 bp, Glycine max
  unsure (1)..(372): unsure at all n locations
agctttaatttaaagctatagacatatnttatgatcaactataanaaggaatctggaagtgcctttcccaacccctcagccaggtccataaaaggaacagagtgctatctgtcagcctagtgatatcaaacgtttgattcagaaaaatgatatcatttctgagcctccaaatagaacttgtagctgctatccaccacattgtccttcttgtgttagaatcctttgaagctgctgaggagtattgctggagaaaattatccaatggtctgcagtgaaacaccttgtcttcctttacccaagataggaattcccaccataaaggcatagttttgccacaagtgaaaaacaagtgggatgcggtttcaggttgac

SEQ ID NO: 205113 - DNA, 375 bp, Glycine max
  unsure (1)..(375): unsure at all n locations
agcttagcagttgggctaagcgcatatccattcgtttgcgcagcttcagcgagcttagcgcataggagaatctggcaaagcatcancatcaaagccgtgtgctaagtgcgagatcagtgtgctaagcgcagtaggtgccttcagccaggctaagctcgagattggcactaagccttaatccacttactcacgctaaacgcgagagtggcgctaagcgcaacgtcacaattttagagcctatttaaagcttgtcttgagcagaattagggtacacttttgacagcttctacagaacagccagggcacagaattccacaacaaccatagtgcctatttggggaaaagagccctataagcaaagagaggagcagcttt

SEQ ID NO: 205114 - DNA, 84 bp, Glycine max
cgcatgatctacattctccccctttctcaagaaaattcttaattcttcttgacatcctcaaaatcgtcatgatttacaatgcat

SEQ ID NO: 205115 - DNA, 314 bp, Glycine max
ttgcctaattttcatgctgcgcggattttgatctctaaatgatgaaaactgccattggctatggagaaactccgatgaagctttattgtcatagttacactgatagagggcacttatggttcttcttgtgggttcttgccaaataaggacattgctcatctttggaaactcctcctctgtaatgtgcatttctcaccttatgctgccttgttcttttgagaatacttggttgtcattttaagctttttgaaccttttttttatttgcgtgatgaatgctatcaagcacttccatagacaaccctggttttgttt

SEQ ID NO: 205116 - DNA, 411 bp, Glycine max
  unsure (1)..(411): unsure at all n locations
agctngacctcttgctatgttaattntgttaatacataatttgcggctctctttttgtcgatgttatgtgtgaatgattctgtctgatgttctttgaatgtgaatgaattgaacacctagagattttgaattttgaggttttataattgagcaatttctaacgccttggcggccaaaaatcatttaatccggaaaagaaatttaccataagcaatttttggccatttttaagcggcagaaataacatcgccacagaatgtaataatataataataaaattagtgtcagatcattatgtaagagttatatttgacctagggacaaaaatcattaacaaaataaaagtttaaggattaagacttattataatctagtttggggactaaaagttaaatatgtaaagtgcctaat

SEQ ID NO: 205117 - DNA, 372 bp, Glycine max
taaagcaatgacaggagatagactacatatgtactagtttattgaccaaactacatctcggaactaatcctcatcagtaatgatcattgacaggaagagaaatcaccactgatatgatcatcagtgaatagccaaataaatcctgaagttgcaccacaacataagtttctatgcactgccatgctccattcaccaatttagcttttccatgcatgcaaaagcccacaaagacttatctccaacactctcactggccaattcgatgactcccagactccattgtcttggtttgctcccctcccaacaagtatctagctgccttgcgtataatcatgtctagatatatttgacatgccttgttgctatggtttt

SEQ ID NO: 205118 - DNA, 412 bp, Glycine max
  unsure (1)..(412): unsure at all n locations
agcttaatgtgaatggggattatattntgttccatatctaaagccttccacacgttttcatcatggaagcatacctttacttttgaataaagaacaattgatgtttggttctgtagtatactacgtgtcatgtgagttaaaactatgaacttgatattttggagggcttaactcgtctcactcaactgagacttgcatatataaataggaaataagtacatgacaagatatgaaaagatagggtgcagactgcggcccttgtacagcagagaaagagtgccaaataagaaagattattaaacataaaaaaaacacatttatctaacaatgtgcaaggcagcacataagtatttgttgcataatgggctacatgacataacactcctgatcatagaatatttatgctttaaaa

SEQ ID NO: 205119 - DNA, 408 bp, Glycine max
  unsure (1)..(408): unsure at all n locations
ccttgcgctgagcgctcagtcttacgcactataccgagcctgctcgctctaagtgcattgacccctgattggttggctgaatagttcanctaagcgcacaatactgcgttaagcccaacatcttcacttgaattgaatcttaatcagtgggcttagcgtggatgatgcgctaagcgccactttttctttggaaaaattttattgtagtagcactaagcgcactatcctgaactaagccccaaatccattttggaatttgagctttcaagctgggcttaacggggcaggatgtgctaagcgccaatctcttactgtntttgatttcttggaagtgcgcttaccgcgctgttgtgcttaacctgaactactctctgtaagttgaagcttgatggtacacttaacctcaca

SEQ ID NO: 205120 - DNA, 429 bp, Glycine max
  unsure (1)..(429): unsure at all n locations
actcaagctagtattcgntcctacaataccatatacatatctaagatctttctctttttcattatcccaaataatcgaagtataatcacaacataatcacaattcaatatcattctctccaaacttttgcaaaattaaaccacaacatatccacacattttactgaatgggagatgcactaaatacatggtgataggtaatttaaatgcccttcaaagtgcaggtgagaactcgtctttttcatttttagtgcaactataattattatggaatttaaaatagatccattctttattataatgccattaaaatactaatgtaacataagagtatacacaatgcatgattccttacatgggattcttatcttaaatctgtgagttcgtacatgcccatagaattaagaatttacacaagaaatactccatg

SEQ ID NO: 205121 - DNA, 384 bp, Glycine max
  unsure (1)..(384): unsure at all n locations
atgcacgcttatnggaattatcatcacaagatgctttgttggacatattaagntgctctctaagcaacttgaaatcttatcagaaacacttattaagttgccaactaaattgtctactggttaaccttcacattcttcagttttccaagttaccggttgtaccatttgtggtgaggctcatgaatcaggtcatttcattccccttgaagaacacactcaggaagttcactacatgggaaatcaattgaggcaaggttacaaccaaggaggattttcaggtttccagcaaggtccctaaaattagcaagggttatggagagcacaccctggcaatcaaattaacaaggaccagggcaaactttccaacaggccacctcaacaagg

SEQ ID NO: 205122 - DNA, 229 bp, Glycine max
cttataaaaccaaatgctacatgtggaggaaagtgtctatatcatatatactaagcacatataacctctttatactccgaaatctggaggtgtctgacgtcaagtttgacatatacaaaataggctccttgatctcctatgtcaaattaacaggtgatctccaccgggggaacacaagggggggggggggggctattaaacaatagactctcacgctcaaataataccc

SEQ ID NO: 205123 - DNA, 369 bp, Glycine max
  unsure (1)..(369): unsure at all n locations
taccggatagcagctgtgccagatggttgttgagcgctctttctttttctgagatcgacatttcattgtcgttgagaatcaccagcatatcaggacggatatcgcccgcgtgattcatcgctacaaacgccatgcctgcggtaatcgcgccatcgtcaatgacacagacggtgcggcgatttttgccttctttttctgcaacaaccgcaataccaattccggcactgatggaggttgatgaatgcccgacgcttaatacgtcatattcgctttcgccgctccacgggaacgggtgcagaccgcctntctgactgatggtgccgattatgtcgcggcgtccggtcataattatatgcggataggcctgat

SEQ ID NO: 205124 - DNA, 420 bp, Glycine max
acttgcggcatgccgcttctgcataccacttgggcttagaaaccattatcttatccctcttattactagctatgtggaattctatagttcctgaatgtacaaccttcaaattgttgttcgctcccctctttgttttctgcaaaaaagaaaatcaatatcaaagaaaacatgaatgaagtcctaaggatgccatgtacatgtatttatgaagatatagtatttatattccatcaagcatacatagactgctgattacatgtaatagactttttataacatggttgccccatatcacaattaaaaagcacaactaccaatctttccgagtcccttggtaatttgtcttgctccctctgggcggggtttttttattaaattaacctttgcctccaaaaaactatgactgtccttttcattatc

SEQ ID NO: 205125 - DNA, 355 bp, Glycine max
ttccacaattctctcctccctccaaatatgagcttctggggaagggggaagtggcaaccccaactccatgaatccactcctttccttattgccaggttaaattagcctttgactggttcaccggaaaagaggtggtggaactacactgcctacagcaacatttacttgaatggctcccaaagaatagcccaggtttaccctcataattcgaaagcacaatgttgggggcagataaaatctgggtatgcttcccgatcttggtaagcctaaatcgaggcattaatgtgacagccgctcctccatcaatgagcactcttgttgattccacaccttttcaacctttgccctgatgaaa

SEQ ID NO: 205126 - DNA, 341 bp, Glycine max
acaacggagggcaaatcattctgttttcacactgacaatgcacatgtgcacccacgggttcagcaatggaaatacaagacacgggttcacatagtgcacgaatacgaagataatgcagaagttctctgcggaaaaaacgaactgaatcctctaacctccgtgacaagaggagaaaaaagctggagcgcatgtcacaacctcgcaaatcgcaaggagaaatcgaaataccgctaaccaaagctggcgataaaaatatcaaacaagacatacatataactcaaataaccggcggacaagacacctgatatataatgaaagataagacaaaaatgaacacgacc

SEQ ID NO: 205127 - DNA, 344 bp, Glycine max
tgcttacgttacagacccactgtactttcaccattctctattcccttgggttgttggtatagagtgaagttatgagtatattaacttaattcgaagcttttttctcttcaaatattttctctggagaagttgagaacaaaatatttgccgacatgtttgactgacattttttaaagtcgattttgtttttggaatgaacaaaaaacaagccgcccgctattttcattgggcgtgttacatatgttattatggactagagttcgaagtagctcatggtgaatcaattcttttcattgatggatcacctaatcccaagggattactctccaatgggagcctttctt

SEQ ID NO: 205128 - DNA, 431 bp, Glycine max
  unsure (1)..(431): unsure at all n locations
acctgcggcatgcaagcttatccaaactggtttggggttganttttatatttgatacttgatacttgaaaataagcttcataaaatttgctgtcagtttttgtgcactttcggtcccaattctctacttgtaatatctatattatataagcttcataacttcttcttttaaaggctcggttgaaggctgcttcgctgatatgtatcagtgaaacatccaagaccaagagtactgggatctgatacatatcaactacggatccttgaagcaaactaaagcacaggtgcttcatagagcaccaccaaacaagccactaaaataggaagaatcactaagacaaagcactcacagtagagagggttgagacttgagggagagatgcttangatcagtcacacgcacaagcactgaagcacagccacaaacacaat

SEQ ID NO: 205129 - DNA, 375 bp, Glycine max
  unsure (1)..(375): unsure at all n locations
tgccatacatatacagcacttccgtccctacagaccagttgatggctgactcaagttggtccttaattcagcataaggtatcaatgaattggctgaaaacgaggactntctcattaactgcatcacatagtcttataaactcaatcaaaaatttggttttgacccctccataagggttcaatctaagcttttccaacttatccttgtgaacaacagattcttctttttttgacagagagcagttgaggaatagggatggatggacagagacccaggccaacttgtgttcaaagttcagtgcaatctgagaacattcaatgctctctagagtttcttgctgcaaaatgtctggcttttaaaccagcacacaatctc

SEQ ID NO: 205130 - DNA, 304 bp, Glycine max
gattaaaacaaaaagttttgccttctgaagaaattttataacattagaaattttctccttactcacacatgatgatgcatgatgcacataggatatgatagagactaagatgcaacataaaatacaacaatcaatgcaaatgtcactcaagagagttgggcatgtaaaagaaaaaacttcttcaagcttcaatgctaactcttcatgtttctccccctatctctaacagcttggatgcaagatctggaatgagtggttcaacttcatctacattggaacgcttaccagtcttatccatgacact

SEQ ID NO: 205131 - DNA, 351 bp, Glycine max
gtgaataccgaactaagaaaagcgagactcgccattatttatttcaagttggtcactacagacgtctggaaagagtgtgctgggttactagaagaaaatgcagctaccgcataagcccttgaacaagaaaccaagagggctcgcaaggaagagcatggccgtgacaaattccgtggagcattgtggggcagcaacagtgagctcaagcttcgaagggaagagagagaccaatcacgagcacatagcatggttttaaaagaagagttagtcgtttgctcaaagaccaaaagaaacttgtctcagcgtttatacgagacagagaccaacatgttagctattatcaccaagtaa

SEQ ID NO: 205132 - DNA, 401 bp, Glycine max
agcttgtgtcgcactttcaactaccaaagttgaatatattgttgcaggaagttgttgtgctcaaagtctctagataaagcaacaactagaagactttggagtaaaccttgatcacattcctctgaaatgtgacaacacaagtgctatcaacctaacaaaaaaccttgtcatgcattctaggactaagcacacagaaataagacatcattttcttaaagatcatgtgttaaaaggcgactgctgcattgagttcattgatagtgagcatcaactagtagatattttcactaaaccgcttactagagataggttctttttcattaaaaatgaactaggcatattggatgcatctaacaaaaaatactttttggttgcatagtgtgtgactcatattgctaccc

SEQ ID NO: 205133 - DNA, 396 bp, Glycine max
  unsure (1)..(396): unsure at all n locations
ntagccttaggctgttccatgttgtttttccctctatctctaacacaagatcctcaattgtcttacaagaacttgggagccaaagatcacagcgatcaaagaatccaaggacttagcatcaaagtcgatggaagctttcttcgaaaatttcctgcatatgaacatgagttgattcaacaatctcatgcagaagaaacaaaaaagaaaagaaagggaattgcacttaaagttaactcttcaatggaagattacaaagaaatttccagtgatgacgaagatgcagagaattttaacttgatggtgaaaaagtttggaaaatctctcaaaagatccaatgacaaaaaattctttaagccttcgaagaaaattgagagcaacaacaacatcttcacatgc

SEQ ID NO: 205134 - DNA, 376 bp, Glycine max
  unsure (1)..(376): unsure at all n locations
agcttttgaatcgccacgttatgcagcacctgatcataggcgcgtngcaggaaagtggagtaaatcgcgacaatgggtttgtacccaccaatcgccagacccgcagcaaaggtcaccgcgtgttgctcggcaattgccacgtcgaagtaacgatccgggaatttacgtgaaaactcgaccatgccggaaccttcacgcatcgccggagtaatcgccatcagcttgttgtctttcgctgccgtttcgcacaaccagtcgccaaagatttttgaatagctcggcaaaccgccgctacttttcggcaaacaaccgctggagggatcaaatataagcacggcgtggaaagagatcgggtctttttctgccggttcataac

SEQ ID NO: 205135 - DNA, 322 bp, Glycine max
  unsure (1)..(322): unsure at all n locations
ttactcttcactgcgcgaaggcgggatanaagttttctcttgtgtgccgccaattaaagagctgctcaaacgcaccgaagaacatattaaaggcatggtagtgcctggcacgttgtttgaagagctgggctttaactacatcggcccggtggacggtcacgatgtgctggggcttatcaccacgcttaagaacatgcgcgacctgaaaggcccgcagtttctgcatatcatgaccaaaaaaggtcgtggttatgaaccggccgaaaaagacccgatcactttccacgccgtgcctaaatatgatccctccatcggttgtttg

SEQ ID NO: 205136 - DNA, 406 bp, Glycine max
agcttgaagagggaaatcagtctctgtgatccggagattgaaaagacttgcaaaaaatacaattcaaaaaggaagaaacaaaagcaccaagaaaggcaagctagacaaggagagtcttcttctcttcaacctcaaccagtttcgctccctccttgctctcttatcttggaggagacaccactcatggcggaagagaagcaacctcgagtgaatcttgaagactactcaactcatgcaatcctgcaatacttcacaagtactgctaggcccaatgtgcaagcaaccaacatctactatcctcattctctcatccagttgatccaaaaatgtcaagattttttgcttgagacactcaccctttcacctaacacactttctctacatctcccatgcttggcatcaaatg

SEQ ID NO: 205137 - DNA, 378 bp, Glycine max
  unsure (1)..(378): unsure at all n locations
tcaatgcggacatcaatttcatctcggtatgtattttttctataatgcttcaattngacgtcgttgtaattgttggattggactttgagcaatccggatctgagtttttttttagcgaacgatatgattcacgaacgcttgctttgtgatgatggtgattatatgcttgggattgtggcaacgatgttactggattaatctgcttctatgtatatgatttgctagattttatgtacttttgctgtagcggtggtattgtattttcaacgatgttgctttgaataaacttgatggcgcttgtttgattcacctgtatgtattgaattgaattcaaaatttagaatagggttctctgttgatggagaggggtggcgctga

SEQ ID NO: 205138 - DNA, 390 bp, Glycine max
  unsure (1)..(390): unsure at all n locations
agcttgacactatagctctctgcaaaaacaacaacaaaagatatctagtgatgttggtatgatctatgccataatctttaaccaagaattagatccagaaaaaccttataatggattgaaatatcaaaaaccatcgatcgaaaaattgcgtatgaactccacgatgaactgattgcattggtgctttactttgaatctttcatatagaactagaaccatcatagtttcctcatccaattcggaggattgaactcgttattctagtgtgatgccaatggttctcattgaaaaaattaacagttgaagtttgtcctttcatgctttttatgattctggatctatggattggnaatgacaaaactgcatcaaattatgcgctcatcctgttac

SEQ ID NO: 205139 - DNA, 435 bp, Glycine max
  unsure (1)..(435): unsure at all n locations
agctntgatacttatgggtgtaagcggatcatattgggttgggtttgatcaaatgacctaatccaatcaaatttgaatggattggtttgagttgattttctaagaaaaacaatgaaactcacttaaaccaacccggttgtaaatgatttggattgggttgggtgaatgagtcaaaatatttaattttgtctattcttatttaaaacacaatattttttataagttaaagtttttattaaatgaatcaggcacaactgtttcttgttagattttttattaaaaagaaaattatgtgatactgtcacaccttactacattccacactactagaaataatcgttttaacatcactagcttaacatcgattntagaaaaaatcgatgttaacaaaaacacaatgacatactcgtaaataacatgagttcgttacaacgg

SEQ ID NO: 205140 - DNA, 253 bp, Glycine max
  unsure (1)..(253): unsure at all n locations
ntatacacaaaagttagtcatattcaccgactaacaactcctctcaaatttatagttttggttgttctcaagcaaaaagagaacagttcacttgtcctcaagtgacaacaacatgcagggactatgtacaaaggtgtatgctacaaaagatactgattgcatgataagagacagggcccaactcccgttagggcagcgagatacgaagcctctgacctttgatgtctaacaaataagtttaggggctattgga

SEQ ID NO: 205141 - DNA, 346 bp, Glycine max
  unsure (1)..(346): unsure at all n locations
tatgggcanacgcacacaatgcgtatacaaatttggctttcagtcaccttggatctcattttaaaacctgaatatgaatgagttttttcttaattcaaaattgcataaagctcacaatttcaactctttccaaatttaccccaaaaatatagacttcgactgttaaattcaaagcagtaataaaaaccctacgcccctctacaataatctgatttgcccctatttcgtcttaggtcataccaaatgaccaatctatgaatttagggtcatattctatcctcccttaaattcagaatgccattcaatttcgggtgtattaccacttcattgaccctatctttttcat

SEQ ID NO: 205142 - DNA, 426 bp, Glycine max
agcttccatcaattagtgtattacaaaactcttcaactgatcctacaatgttggagttggatcaatcttgttactgaaattcaaaagaattatactttacatatgtgaggagatggaaaatgaaaaagaaaagattaaatgaaactttaataacaccaagaaaaggtataatttctaaactttctcagatttaaaatttgcttgtgtattattttaagttttaagcttttgatctagataatttaattttcgtggaacctaatgatgatgcacaatctaaggaagaccttgatgatgatgatggagatggagatggtgatgaaagtgatgatattcatggagatgatccaattagaggattggacatgcttcattgaaaacaatttgtgcttttttaattatataaatgctttaattttgaacact

SEQ ID NO: 205143 - DNA, 316 bp, Glycine max
tagaatcataatctctaagaaactctaaccatctcctttgtctcatgttcagctcgtactgactaaacaagtactcaaggctcttatgatcactatacacctcaaacttagagctaataggtaatgcctccacatcttaagggcaaaaactacagcagccaactgtagatcatgggtgggataattcctctcatgagccgtgagtagcctagaagcataagccactacttggccatttcgcatcaacactacccctaaacccaactttgatgcatcataatacaccccaaagggttctcttgggttatgcaaaact

SEQ ID NO: 205144 - DNA, 393 bp, Glycine max
agcttgccgccacggagttttccgactatgctcttgtgtggtggaacaagctacaaaaggagagagcaagaaatgaagagccaatggttgatacatggacggagatgaaaaagatcatgaggaagcggtatgtgccggctagttactcaagggacttgaaattcaagctccaaaaactaacccaaggcaacaagggggttgaggagtatttcaaggaaatggatgtgctcatgattcaagcaaatattgaagaagatgaggaggtaactatggctcgatttcttaatggtttgactaatgatatccatgatatcgttgagctgcaggagtttgttgaaatggatgatttgcttcacaagatgtccgattcagtagcataatataacgagacac

SEQ ID NO: 205145 - DNA, 424 bp, Glycine max
actaagcttctaatatattatgcgcctgaatcggacctctgagtattatttttttatgatttgaacttctacacagcttccgttgttcaattcgcagcgtcttgataaattatgcacctgaatctgaccttcgaattaaaagatatgacgatttgaacttgtcgatagcttccgttgttcaatttctagcgatttgatatattatgcgcctgaatctgaccttcgagggaatagttatgaccatttgaattgctcatgagctttcataattcaattcctagcgtctcgatttgttatgcacccgaatcggacctctgaaggataagacatgacgatttgaacttcacgagagcttctagatgttcatttcgagcgtttttatatatatgctcctggatcgtacctcctatttaaagtcctacca

SEQ ID NO: 205146 - DNA, 258 bp, Glycine max
ctttgcatatttgggagaaagaataattttagggtttgcaattctagtttttactattcacgtagcaataaaatttcattttctgattcaatctgcaatttcggtctctactaattaatggaagggctagtctccagcgttgttttctcttgaggatcaagcaccactctctttgaggggttatcattactattgaatactgatcaggttttcctcttcaccaattactctggatttgtactattaatccatgcctgc

SEQ ID NO: 205147 - DNA, 404 bp, Glycine max
agctttaaactttaataattatacaataatattgtttaatgcttttagcggtcttaagaacaattttttttatatatttcaattaatgaaatgtaaaataatatttgattaatgtgaatcttatgcaaaaaagaaaaattatatcagtatatcactaaatcacagttcatatatgcgcgtatgttactttaggtagtacttttttgtaataaaagtattaaattaaattacacgcccataaaattattttaatttatatcaatttgtcacttgataataacttatatacgagtttatgtaactctggtactactcttttcttctctaaaataagagaatgcaaattaaattacagtagtattacacatccaagatatatcaaataccaatttaatatttgaaga

SEQ ID NO: 205148 - DNA, 349 bp, Glycine max
agcttgtaataaagtaagtcacgacgcgatgaacccattgtgggtcatccattggtaccatgacaaagtagggccatccatataaaacgaagctactattatccattcatggtccgacaggccctgataatcgaagaactggcatattttaaaaatccagccaagaggatcttggccgtcaaattagggtacatcaagcttcatatgaggtttgtatgaaagtggtgagggtgtgggcgctggggatgggtgggtatgcggcgaaactggttgaatggagagggtggcgagatgttctaccatggaatccattttcaggtacatggaagtttgggtccgggctaaagaa

SEQ ID NO: 205149 - DNA, 411 bp, Glycine max
agcttgttttatttgttgatcgaatcgattcttaaagtagggcgtcacagtgcggaggaaagaaaagaaagaatttctaaatacagagccaagagaaaccagaggaacttcaacaaaaccattaaggttattaaggaaagagtaacaaatcaaaaagtactatttcttgtggttcaatgcatgaaatgaaatacaagctgcgtaaatatgtgttattaagagaagtaatagtagggggaaaagaattaaaggtgtctgaatttttgtttttatgtggttaccagtatgcatgccgaaaaacactagcagataatcgaccacgcattcgtggcaaatttgcccgcaacgactagtccagcgagactctcaaggtttcatgttctacccgaaatgaagatgatgtcgatttct

SEQ ID NO: 205150 - DNA, 365 bp, Glycine max
  unsure (1)..(365): unsure at all n locations
taattaanacttctagatntattatgcatgtatgttattttatttttcatgaaactagtcactagatcattaaaacaaggtactggtttttcagaccaaggatgaaggtgattattttttaaatctatatgtaggatggagtactggatgggtttcagtgttgtttctcttctggtcatcatcacagtacaaataataattgaggtcttttaagatttaaatttaaagtgctacgttattagacaaaattgaaaagatttcttcacttcacaaaattctacgtcctactcctacaccaatgtatttgagtgtgggaagaattgagagaaaaactaagatcaaagaaaagagtggcttatgtctag

SEQ ID NO: 205151 - DNA, 415 bp, Glycine max
  unsure (1)..(415): unsure at all n locations
agctgtgtgctaatatgttctattgacactctnntgttttgaacttcttctttcacggcaaagtacttcaattccatatgcttagcacccgtagagtacttgtcgttcttagaaaagaatattggtgcggagttatcacaatacattttcagcggcctagcaatactgtcgacaattccaagccctgaaataaagttccgcatccaattagcctgaattgtagcctcaaaacatgctacaaattcagcttccatggtggatgcagcaacaactgattgttatacactcttccatgatattgctcctccggttaagagaaatacaaagccaaaagtggattttcttgtatccacacattcagcaaagtctgagtctgaatatccaatcacctctaggtgaacagaccttttatatg

SEQ ID NO: 205152 - DNA, 440 bp, Glycine max
gacctataaaactcagcttcatgctcctgctccatgttcttgttctatttgtttaaaccagataattgcaacatgctttcatattatgtttcttgctttctccatacctactctcattgacaatcggaatattgaagaaaaaaactgaatctaatggagatagaactagaagtgttatgtttcatgcttaatcaactagtcaatacctttcacattttacttttgttccaaaaagtggcctgtccttgtttcatttgatattattctcatttatttctgcttctgagttggaatgcagtatacacatggatgacatgatacaaaaactaaataatttgtttctttttttctatcccaaaaatattctgtttatcctacacataatgctggtatttccagatatgaattttacactcatacatgtggtttgaatctataat

SEQ ID NO: 205153 - DNA, 413 bp, Glycine max
  unsure (1)..(413): unsure at all n locations
agctttcaatatattgagacgnctcgaaattaacttctgaagctgncgagaaattcaaatggtcataacttttcacacggatgtccgattcaagcgtatcacatatacagacactcgaaattgaacaacggaacctctcgagaaattcaaatggttataacttttcacacagatgtctaattaaggtgcatcacatatagagacactcgaaaatgaacaacggaagctttcgagaaattcaaatggtcttaacttttcacactgaggtccgattcaggcttataacatatcggggcgcctaaaattgaacaacagaagctcttgtgaaattcaaatgggcataacttttaactcggatgtccgattcaggcgcatcacatatagagacgctctaaaatgaacaacggaagctc

SEQ ID NO: 205154 - DNA, 401 bp, Glycine max
cgagtgcctgtatattgatgcgcctgaatcggacatccgagtgaaaagttatgaccatttgaatttctcgagagcttcctatggttaattttgagcgtgtcgatatattatacgcctgaatcgaacctcagtgtgaaaagttatgaccatttgaatttcttgagagcatccgttgttcattttcgagcgtctctatatgtgatgcaccttaatcggacctccgtgtgaaaagttatgaccatttgaatttctcgagagcttccgttgttcaatttcgagcgtctcgacatattatgcgcccgaatcggacatccgtgggaaaagctatgaccatttgaatttctcgagagcttccgttgttcaatttcgagcgtctcgacatattatgcgcccgaatcgga

SEQ ID NO: 205155 - DNA, 410 bp, Glycine max
  unsure (1)..(410): unsure at all n locations
agcttgtcacttttttgagtcactcaggtcatccctaagnttacttcaattggtgtctttatagaacttgtcttttcttaatacacttaagcaaactcataaatagggattaattgaaaaggcttatgatttgtgtttagaaggcttgtaataattaaagcatcaagggttttggactcaacaaatttcccataaaataagatgtaaaaacaattatcaaagagacattggagaacattcaccatacaaggatagagagcacatatgaactaatcaaactgaatggtacacagattgaaatcataagggactaaacaataaatatctaaacttcatataaccggttaaaattacctgctacaacaagtcaattttggtgattcatcgtgcactgcccatttcaaaacatt

SEQ ID NO: 205156 - DNA, 447 bp, Glycine max
tcatgatgatgaatcaagttgattcaagttgttttgattatgacaaagttgatgacaaaaagcccaaagaatgatttcaagattaagtcaacacgaagaaatcaagaagattcacgaatcaagtgaagtttgatttcaagattcaagagaagatgaattcaagattcaagagaagaaatcacgaagacttcacaagggaagtattgaaaagaattttcacaaaaaaaacatagcacaattttgttttttcaaaagaagttttctcacaattttctaagttaccagagtttttactctctggtaatcgattaccagtttcctgtaatcgattactagtgggcaagtgtgattcaaaagttttcaactgaatatgcaacgttccaatcgatttacatatggtggtagtcaatacaagatattggtattcgatactagtgtatctgaacg

SEQ ID NO: 205157 - DNA, 370 bp, Glycine max
agcttaccagaagcgccaatcagtggactttgttgttggcgattttgtctgagctatcatgagtaaagatcgtttacccactcattaatacaactagcttattgctagaaaaatcgagtcatattcatagttctaatgctttcaatgttaatttccttattgtggtaatgcttcttctgatgatgagatggcttttgatctgtggatgaatcttctccaccccgaaaaggatcctgcagtgcaagattgaccaaagttgacccaaaaaagtcattcgtgtccatttttttacaaaggagtacactcttttgaatggaaatgaccttctaaggagactgcattccctactagcaatgtgttgattgatatt

SEQ ID NO: 205158 - DNA, 325 bp, Glycine max
tgtagaattcaccccaattccagtgtcctatgctgacttgctcccatatctacttgataattcaatggtagccataaccctagccaaggttcatcaacctccatttctccgagaatacgactcgaacgcaacgtgtgcttgtcacggagaagccccggggcgttccattgagcatggtagggctctgaagcgtaaggtgcaaggtctaattgatgcgggctggctgaaatttgaggagaattgcgtgtaaatcctgacattgacaagagatgccacacatggggcaattttgaaagctgttgttaggtgtccctaatgactcatc

SEQ ID NO: 205159 - DNA, 342 bp, Glycine max
atctccttcttcactacatcatgaatcaccgggttgagtcttctctgtggttgtcttactggtttagctccatcctctaaatttattcgatgcatacatgtggatgggctaataccaggaatgtccgccagggtccagcctatagccttcttatgcttcttgagaactgacaacaacttctcctcttgctcatcagcgagggaggcagatataatcactggaaaactcttgctatcatccaagtaagcgtattttaaatttgatggcagaggcttcaattctggtgtggtcggctggacagtggtaaaaggagatggtttctcatcctttacctataaaaaa

SEQ ID NO: 205160 - DNA, 448 bp, Glycine max
actcaagctggaccacatagaagacaaaaatgccaagaaaaacatttcctttttattttctgtgcttcactggttatctgattttcatactaaattaagagagattaaaatccctatgaagtaacaagctaaattgtgtatagaatattattgccatgtcaattatggactgccatgtattctttatttaacattttatctaaaatagtttaataaattgagattacttgaagcatatgatcatgatttctcatgaagtgattactcatgcaagtcaatgatcaatcactacattactcattgttccagctgggtaaatatccactctgcttgtcaaagacatttgggatgcaacttaacacacctcgatcgacttataaataatacaccgatgccaggtcaagacaacatatattaatatgctttatataaccaacttatgaaactt

SEQ ID NO: 205161 - DNA, 418 bp, Glycine max
agcttgaggaaaagcttggtaacacttggttttgaggaattgcttggatgtcttggaaacactttgtgtggaggaaaagcttgatcttgaattaatcttgaagccatgcttgtttgttgaacaaccttgtcaatgcttaacctctgaatgtttattgaagtaatcttgaatgcaaccttgtttgattattctttgccatcatcaaaatcatatatttatacattcacatatacctactcataacactgattgcttgtgctatgtttggtctagtgcataccatagcttacataagactacctaccacacttgtatatggaacatgagacaagtattccttctctgattctagctgaacaatattgtgttagattgacaatggacgcttcacaggagtcattttggatttgaatgcccc

SEQ ID NO: 205162 - DNA, 170 bp, Glycine max
ttaacacctcttcatgccatcttctttacaaattctgacctagattccccttctttatgtataaaagaagtgtccagtgggaggggtatgaggtctaacggcgttaggggattgaacccataaacaacctcaaaaggggactgttcggtggttctttgaacccccctgtt

SEQ ID NO: 205163 - DNA, 425 bp, Glycine max
  unsure (1)..(425): unsure at all n locations
agcttaacaactaacatttagttgcgtcatttataaataatttagttataaacaaatataccaatatcattngaaatgggttagatagtaatatttgcaagatcattatctaatacattgattttctcattggttaagaatggcggtgactcctccaatacccaattagcatgctcatagtcatcaagagtttctacattgaatgtaattttgattcttcaactgattcctatgtttattaatttggtcataaacaagtaatcaacatagtaaacattatatataagcaatcaatatagaataaacataattataccttcttaacgaacataaacaagatcattgagcttttgatgctccaacctattttattttctttgaatggatatgcctcaatacactgcgatatttgttgacaaccccaa

SEQ ID NO: 205164 - DNA, 342 bp, Glycine max
tgttcttttttactggcttcgagaacatattaacaggagtgtgcacagtgttgatcttatgaactttgaatcttctttctgaccgaatgaagtgaaattctaacatcctatatcgctctggcctctattcatgaatgaaccgcgatcgctgggccaatgcatataagcactataggcctgtcacatgtatgatgtgtaccatacctctttgattatatattcgagatcatttatcagaccactcagccaaattcctttctttgcagcttcagttaaagccttattttcaacctcatatttcgaaggcaacacaaggctggagtgtttccttcaactccccat

SEQ ID NO: 205165 - DNA, 402 bp, Glycine max
atattcgctgtctacacatccaatacgttatcatatacgagtatcaggttcagagtccaagcaattgtcgaagataaatatgataatgcgttggttgagtttgctttccaatatgcacacaaaaaggattattctatctctcacaaaaaagtgaaatagtctgtttaaatttgacatgagttgttattgccattttattcgtcatcataggtagattttgatataagtaatattaatacaagttactattttgaaataccacaacgacaacgtttctagctcactcgttttcttcgttctgttgctttgctaagtactatctgctcctatggctggttccttaagcctttttatattttctttttaactctttcgtacggtttgctcccctatcttcctgct

SEQ ID NO: 205166 - DNA, 301 bp, Glycine max
  unsure (1)..(301): unsure at all n locations
cagctgcagcaatgtaaatatcgaattataatatttatatattgtacaatcagtgactaccgacattctgattttgatgctccggctcatcaaattacaataagtccctcaactgagggcaggatcattacatttccagctttatacttctatagtggactaaatatgtatcatctcacgttatgcantcggaagacgattcttctgccaccacacttttctgggtatcacagaagttcgacctaattctatatgggcttctaggagcactctcatgcatgagtgatggcaaccattactt

SEQ ID NO: 205167 - DNA, 415 bp, Glycine max
  unsure (1)..(415): unsure at all n locations
agcatgccatcctagcctatttaaangtacaacacattaagaaggagaataattagcatgcgggagcaacaattataaattatacatgcaatctccctcacctactctcatccatgacttgtgaacactcagaaacttggaagttatctaacaataactaacaggtgcactatccaacaaccaagagatactcattagaaatttcacaaatagtttaatatagattgttggacttgtagcaatatttcatcatgtatataagtagtttgaaaaaaaacatgatgaagacaatgctaacagcctgtacacattatgcaccaccttcttccaagagagatgaaaaacatcatctatgaccagcaaaagaacatctatctattgtatacattaggcatttcacatctggatattattg

SEQ ID NO: 205168 - DNA, 406 bp, Glycine max
ctcagcgtgcacacatcgagcataaaaggtacaaacagtttttctatcacagccgagcaaaacagagcatggctgagaactgtgttcaccacaccaactaaaatcacagcttttctcacttaaagaccccagtaacaattccttcgatccaattcactatccggaggatcgactactaaattatactggaagtctatagtgcataagactacatgttgaccgtcgggatctacaagcacacatccagaactcactctgcactgatctttaacacccagaaatacataacattatatgacttgtgcaaatgcgctgacaatttccagcaaaatctgtcacaggcggatttcatatgcacttctctcatacagcttgccaatacttctacagtccaaatatgctaata

SEQ ID NO: 205169 - DNA, 365 bp, Glycine max
agcttcactggtatgtgatatgatgtaaactttatggtctgctgaacaattgcttctaactaccatgctttggtatgtcaaacattatgtgaaattgattaaatgccatgtttcttctctttcttttataaattatacactgtgttggatatggagttggagtaggaccacctggtttagtgctacttcaataacttcaaaaagctatacaacaacaaattatatttaataaactacaaatttcaccaacaaattatatttaattgaaatgggtaactgacactagcaacaaatttctttctactacaaattctttagcagaacaacaattacaatatcaaaagatgctattacacattttacct

SEQ ID NO: 205170 - DNA, 451 bp, Glycine max
  unsure (1)..(451): unsure at all n locations
cgaagaggatgctntaatggagganaagaaagagagaattgtttagcacgaaattgaaggagtaaaagaaggagagaagtggaactttgaagtgtgtctcataagagtttcattcatcaaagttacaacaagtgttatacatgcttctatttatagactaggtagcttccttgagaagctttcttgagaaaacttccttgtgaagcttctttgagaaaacttccttgagaagctagagcttagctacatacacccctctaataactaagctcacctccttgagaagcttccttgagaagattcctaaagaagctagagcttaactacacacaccccttataatagctaagctcactcccatgccaaaatacatgaaaatataaaagaagtccctactacaaagactactcaaaatgccctgaaatacannggctaaaccctatactactac

SEQ ID NO: 205171 - DNA, 366 bp, Glycine max
  unsure (1)..(366): unsure at all n locations
agcttgagttgggagttgattttagccttattttcactttggntattagtcaattcattcaaggaaacttccaaagaaaaacgtccgatcgattttttttattattttatttaaagatatttattattattttgcctttttttgtttaaacgaggttacagcgtgaacgatcggttagaatttgttttaacagtgattaaacgagattacaacgcaaataatcggttgaaattcatttcatcatttattaggcgagaaaacgacttaaacgatcggttaaagctcgttaaaaacggaagagaaagaaaccgaaattgaacgaaataaagatgaaagtcaaaaaacaagacatgaattaaaagtctc

SEQ ID NO: 205172 - DNA, 450 bp, Glycine max
  unsure (1)..(450): unsure at all n locations
tgcaccaacttctcatttcatccataagatactagttctatttttaattaatgttcagtaacaagactaaacatcataataagaccaaagatatataaattttttatttgatacttatctgtatatactaaaaggaaaactgctgaaattagtaattattgattatttttgcaacatataggaaagaagacgttatgtgtgcttttttagtgatacgatgttatgtgtttaacagactaataatatagttttacgtattgaaacatcaaattataaatattttgtataaaaaataatggtatatagttgttggatgtatttattcagaanaaaagggtattgcgtgtatttccttttattggcgcctcctgtcttctaagttanggttgtccctgcacatgtcattggccaatctatgttaatgtggcttaattaatattcctataattg

SEQ ID NO: 205173 - DNA, 330 bp, Glycine max
agcttgttattttttgctcagtcaaaatgttatctgtcaaaatcatatgtgccaagaaacttatacaacttcatgctaatatccccgaaatatcttcaaccttcaactagttccgcataaggatcgacaagcacaatgctgctatcaaatcgatgccccttaccccagtctcgaggtccatctatgcgatatccatacagaacattgcttcgtggaagatcctacacattgaaaattgaagaaaaaaaaatacttaaaagctactactaagaccgtgtttagataagctattctagggggggagggagagctttctttacttgatttctg

SEQ ID NO: 205174 - DNA, 325 bp, Glycine max
  unsure (1)..(325): unsure at all n locations
gctagaaaggttgngtcgaaacatgcacctattggattctgcggagaaaccgcatcaagacgatgaagcatatgcaattgcctccacaatgcctaagctcaagcatcttgatatggctcatcatcttatcagcacttcgggtgtccttcatatactcgcaaactgccctaagcttgaaattttggatcaaagggggtgttggggtgtgacacttgaccacatgtctttaaagcagaaatttccaaaactgaaggtttaggggcctttgggtcttgacacttaagacagtgacggctgagatgatcttcacatgtgtctgattcat

SEQ ID NO: 205175 - DNA, 363 bp, Glycine max
  unsure (1)..(363): unsure at all n locations
agcttagattaatatacttgtccttcatttaattgnctttgggcttgacgaccacgatcaacaaagtactttcgacacctactgtatgttgattccaccaacgctgttatcggtatgttgcgacaatccttcaaaaccttatttatacattcagagaggttggttgtcatgtgaccatattgacgtccttctctatcataagccatggtctatttttcctttgaaatgcgatcaatccatgttgctatcgctggactcagttggcgaaatttttctaaattttgataaaaaaaatatgcttgcaaggagtgtaccctgcatgaaattaattagcaacaacaatcttaagtatatgtcaaactt

SEQ ID NO: 205176 - DNA, 401 bp, Glycine max
  unsure (1)..(401): unsure at all n locations
ttngatggtggtgataataataatcaactaaatattttcttttgtgataagttgacaggaaaacagaattcactccttaaatggggaaacaagtggatcttacagggagaaagttgttcaatattgagttggagcatggagataggttgaaacagaaatgtgacttcgatggaagcaatttgtaagaattattttgaaagaatgttgtaattattaagcttttggtgggaaaattaatttgctcgttatgagatcgattgaagtccatttggaaacactttgaaggggtgggtgttgtcgacatcaccatggctttatatggtaaagtctgactttgcaaaggattaatatataatgggtggaaatgtaccatgattatttctgattgtaccatatagttg

SEQ ID NO: 205177 - DNA, 373 bp, Glycine max
gccctggctcatgtgtaacaaagaaagctggatgcccgggctttaaaaagtgattcattggctatcctgaaggagttaaaaaatacaagctgtggaaattggaaccgggtgagacaagatgtaccatcagtagggatgtgacctttgatgaaagcacaatggcaatgctaaattaagataaaaaggataacaactctcgtggtgagagctccatattcgaggtggaaccttctgagttttataattatggcagccgtcgatactattgattcctcctgatcaatggagatcctggtgatatatgaagagctagcttctcagtctgacttgtccaattatcaattgactatagatagaaaacaaaggtgataac

SEQ ID NO: 205178 - DNA, 267 bp, Glycine max
  unsure (1)..(267): unsure at all n locations
catttactggcaaagtttcatggccttgcacgtgaaaacccccacaaacatttgatagaatttcacattgtctgctccaccatgaaacccccagatgtccaagaggatcacatatttttgaaggcttttcctcattcattanagggagtggcaaaggactggctgtattaccttgctccaaggtccatcacgagctgggatgaccttaagagagtattcttagaaaaaatttccctgcttccaggaccacacccatcaggaaggata

SEQ ID NO: 205179 - DNA, 298 bp, Glycine max
tacccaggaccctcctaagaactagcactttggtacctctattgcccttagaggaaaacaccttggtgtggtactttataaaggtcataaccctctcacgcatcttgtttacaaacttctgagcctagtggtcccctatctttacaaataaaagacacctccattgggggggaatgaggcctaacggtgttaggggattgatcccatagacaaccttaaaaggggactggttggtggttttattaacccccttgttgagggaagagttccatgtggaaaatctcataccaagactgaa

SEQ ID NO: 205180 - DNA, 299 bp, Glycine max
  unsure (1)..(299): unsure at all n locations
gcttcactgtagttgttagtccattcaattaacaatgaggaatccccattagaaaacgcccgattgacctttcgcttttaatttactaaaagggatttttatattattattttacctcttttttgattaccaacgtggttacggcacgacccaacggtcggaattcattttaaccaaaattaacggatgatacaattcaaacgatcggnggaaatttattttattttttgattaagtgagaaatgacttaaataaatggtttaagcgcgtccaaagggggtataaaaagtcaatgaaaa

SEQ ID NO: 205181 - DNA, 205 bp, Glycine max
aaagcagcggagatggggtcccatcaatgtggactatgtgggtactgtctaaggagccaacaaggcggctcatcatcagaatgcgcacaaacacaccatcctctgttgtccacaccctactgagctcacgtactcccacagaggccaaaactagcaattactgaacaccggggcccatatatgaaagaagacgctatgtgtgctt

SEQ ID NO: 205182 - DNA, 278 bp, Glycine max
cctatgagtctgtatctcggtccttttccgatacatgttagtaaggttaggcttctgtcttacacggagaaaatggattgttgcccgcctccaatcagctaccatttcaatcctaattaatggaagccctacaaagaaatttgcccccactataggtttgaggcaaggggaccttttaaccccttcgctttttaatatagcgggtgaaggtcttatcggtatgatgagagatacccttcataataacctttataaaacctatcttgttgggaagcaaa

SEQ ID NO: 205183 - DNA, 125 bp, Glycine max
taatatagctgatagtgctcatttgtatgaaaatttttgtcgacagaactatgtggatggttgtgaccttggtacaccagctcttttctatgcatggaactgggtatgatgatgttcctagtgag

SEQ ID NO: 205184 - DNA, 417 bp, Glycine max
  unsure (1)..(417): unsure at all n locations
agctgtagcattataacgctatntaaggttttttatcctanaagnngagatccatatatgaacatataaaaaagaaattggaaaaagataatgagatggagatatttgtcagaaaattgacagctaaaattttcatcctaatttttatatatgtaatgatttgatattaaaaaaaatgaaaagtaatagctaaattgtagaaaacgaaatttaacattatataataatataatgtgatttaatcataatttaaattttttcatatattattaaaaaattatttactcatgtataacacgggtcatttcattctaatttacatttaaatatttggaatgaagaatataagtatggatactgttgttaccccactccatccgtctccagactagtacataatttatcataataaatttt

SEQ ID NO: 205185 - DNA, 439 bp, Glycine max
  unsure (1)..(439): unsure at all n locations
acctataaaactaagcttagggaggggagttncaatgttctacttcttcttcccttgtggttctttgngaccttgagcccttgagtcatcaagtttaggtaaatgaactccattcttcatcctaaacttcattcctcttcattctcttgttctagtttctctaataacttggaattgtcatctgattttactcatgaagggaaactttgaaaaaccttaatattcttcattctccttcaagatttcgtgtgttcttctagaggtaaggaggctctctctaagtcttcaaccatatgcttgttgttgaacttccttgaacatgttgtagctttgaaatttttgaggttgttgtcatgtcctacatttgaggctaagttgtttccttgagtttattcaaaatgacgctttgatgtaaacatatattagctacatttaccca

SEQ ID NO: 205186 - DNA, 359 bp, Glycine max
  unsure (1)..(359): unsure at all n locations
tttattcgnngaccacagagtggtacctggagataagtcgcgggggtcaggagaccttggggacgtcaggtggggtgctattgcccaaaaccaagcttgaccaatcccgacccaacccgggcatattcagtcagtgagaacctgtgatgtacctaagcaggcgagctcctggcagtcaacagataaaaggaacaaagaccacaaagtaaggaggcttgtggtggctggccaactgtgaaacttgattgatatgtgagatatggcctctggtaatcgattaccaagggtgggtaatcgatacaaggcttataatgaaacaggaggcttaaatggctctggtaatcgataccaaggggtga

SEQ ID NO: 205187 - DNA, 380 bp, Glycine max
  unsure (1)..(380): unsure at all n locations
taacctaataaaagcttaaaagatggttaacctatctttctcaaccctcactaacctgatttcggcaaagaaacggtgttgtaaaaggcccttttttttagtagtgaataacttttatgtcgaattcaaagaatgaaaaactatcaaagtgtgggtggcttgacctacaaccctttgacaccgtcaattccttctatgaaagaggctctgacgtgtggaacaccaatttttattcatttttttttcttgtgattgtgagatattatgtgagttttataaaataaggcatatggcagttaaaacaagacaaatggttttaaacttgcacatgctgatattaattaataggagtatatatagtaagacaataantcttatat

SEQ ID NO: 205188 - DNA, 338 bp, Glycine max
cttgaaactcagctctttggatctgacggcactactccttttttattttgcttgtgctccgactggccctctcttcctttgcacttggttcactattgctaccccacagagctcccgaaatttattctggccatactcttccttgcgagccctcttggctcttgttcaatggctcttgcgtagttgcattctcctcccgtacccgggcactccttccaatttgtgagcggcaacttgacttctcttggaagtttcgctttctaactcgctttgaagctggacttttctccacttcgggcttcaaatctttcctgcgctttacttgggagcatctaacc

SEQ ID NO: 205189 - DNA, 381 bp, Glycine max
  unsure (1)..(381): unsure at all n locations
gcaactcctgtcttgattttttngtattaaaaaccaaattgaagattgaagttaaataatcatctttttgggaaaataatatataatatctttaatgggtgtacgagatgaaaatattatttttaaatattaaccatgaaatcatatataaatgataagaatatttacttaaatttaatcttaattattttattttattgttgagattaattcacccgcactctctttaattgtgctataagaaagaaaagataaattcaactaattcaacatgaaagaatgttaagattgtaacctgagcaatagttctgccatgtgcctttgcaatttccttgagtatttcactgtccatgaccacattggaaccccaactatccccct

SEQ ID NO: 205190 - DNA, 303 bp, Glycine max
  unsure (1)..(303): unsure at all n locations
tctgctgttgacaggatatgttacacaatttgttatatttctcccttacaggatcctgtaccatgagccacaagtcccatttaacccatgcaattctctattgatcaaggccaccaccccataagaacctgctctggattagccccgatcggtattcccaaataatagaacagcacacgcatgattctgcaatttaaataactggcagcctacaacttccattgttcatattggcccaacaccccaaagctgntcttcccataatatatttaagtccttgctgtagttgacatcatgatgcat

SEQ ID NO: 205191 - DNA, 346 bp, Glycine max
cctcttgaaccttgaagtggtcttgattcaatcttgaacatcttgaactcattctttaattcttgagatcatcatctttggtatcatgaagagttcttgacctttgaactttctatcatcacctttgttatcatcaaaacttctttgaatcaatcttgattcatcatgaagcttgcttctacaatctccccctttttgatgatgacaacttctgaaatcaaaaaacacacacactttttcctagtcgatcactctcatggatttccattctccccctttgtttttgaatttatgcttctcttaaaattaagttgattactcatgtgagttcttgatttatccctat

SEQ ID NO: 205192 - DNA, 355 bp, Glycine max
  unsure (1)..(355): unsure at all n locations
ntgatggtgttgagaagaaattacatgtttgtcatcatcaaaaagggggagaatgtgaatatgtatacatgattttgatgatgtcaaaagaagaatcaaacaaagttgcttcaaaagataagcatggcttcaagattaatacaagatttcttcaacaaaaaaagtcctgcttcaagattaactcaatatcaagtcttgccttataacaaagtgctttcaagacattcaaggctctggtaatcgattaccaggcagtgtaatcgattaccaaaagacagggttgacaaatagctggtgaaaagggttttgaatttgaatcttcaacatgtaatgaattaccatatttctgtaatcg

SEQ ID NO: 205193 - DNA, 396 bp, Glycine max
atacgaacgacaataactttttactcggtagtccgattgagtcccggaatatatcgagacgctcagaaattaaaaccgaaggtcgcagcaaattttaacgacaataacatttcactcggaagtccgattgagtcccgtaatatatcgagacgctcgaaatttaaaaccaaagctcgttgcaaattcgaacgacaataacatttcactcggaagttcgattgagtcccgtaatatatcgagacgctcgaaatttaaaaccgaagctcgcagcaaatgcttacgacaataacattttactcggaagtccgattgagtcccgtatatatcgagacgctcgaaatttaaaaccgaagctctgtacaaattcgacgacaataacatttactcggaagtccg

SEQ ID NO: 205194 - DNA, 339 bp, Glycine max
  unsure (1)..(339): unsure at all n locations
tcagttntaaatttcgagcgtctcgatatattacgcgtctctttttcttctctcgagcgaaaagntattggcgctagaattcgctacgaacttccattttaaatttcgagcgtctcaacatggtacgggactcaatctaacttccgagtgaaaagtaattagtcgatcgaatttgctacgatctttaattttaaattgcgagcgcctctatatattacaggactcaatcggactctcgagtgataagtaattgtcgttcgaatatgctaccatcttctgtttaaatttccagcgtctcatatattcaggactcactcggacttccaatgaaacttattg

SEQ ID NO: 205195 - DNA, 381 bp, Glycine max
aacaaactcccccaaatttacagttttgcttgtcctcaagcaaagaaagaacagttcacttgtcctcaagtgacaaagacagtggccaaataaaagaaaatggtgtttgattcatcaaggacatcaaccatatgaactgaataccatggaatgcttaaatcaattacttctcacaagcatgcagtctttcaaagataaaagcacaagtattagagtcacagctgaaataagctagttagcatgacagaaatcaaggaaggatcatcaaccacaacctcacagtcattggttcactcaaactcaagtgtttaggcttattccatcataaacaaccaacacaaggtccaacctttgcattcatctcctatcatatagaatgaa

SEQ ID NO: 205196 - DNA, 291 bp, Glycine max
  unsure (1)..(291): unsure at all n locations
ggcctcagatatcttaagaagggggggggctcaattaaaacattcnatacatacccttgtaattaacaatctatcttactgtttacttagcctttgaattcccttaataacaatcttcttaagtcttaattccaatgaaccacctcgtatatgaatatcacgcataataaataaaggacataccggaagagaaaatgcaatctcatttgtatactgcatcggccacaccctggtgcctacttccagtccccaaacaacccggttgagagatccactaactttgtaattcct

SEQ ID NO: 205197 - DNA, 440 bp, Glycine max
  unsure (1)..(440): unsure at all n locations
ntgcctttcataagcagtctgtctggtgactaacactatttatgtgagttcacactcatgttcaccggctgctctacaggcatacttgtccacattcatgataagaagcacacaccggatcttcagcatgcattcaattaaaaacacagcttacattcattgaacaaaatagataaacaagtggaacactgccatattataaaaaataagtatagctgctcccaatgctacatgagaagcatactaactacttgtatatcataccagcaggatatctacatatgatggaaatattgtacgaagaacacatgtataagtgtacatggtcacaaagcgaacgctgtcctccagaactaacacttctatgaccggtcctgattgtactaggtctaaacattctctcatgctaanaatgcatactggagtatgtgaggagaaga

SEQ ID NO: 205198 - DNA, 418 bp, Glycine max
  unsure (1)..(418): unsure at all n locations
catgccagcttcagatcaaatcaactcataatctatgtatctaaaattctctaatttagnggatgttcaaggtttgagaagtgaacatgaaaatgaggtaattttggagcaaactctcatctcacacaagtctataacattaatctaaactcgctcaaactggttttacgacgaaaaatctaccgaatcaaaatttgactcctcaacacccaatntaccctagaaatggctcttgccttcactttggtcactcattctcctcctttgtacagcccaagctttctcacagtcctaaatgacatttcaaactaggattaactcactctaacctccaattatctctaaatccagatttggcttttcaaatcttcaaagcatcacactcttccactcatatcactacattctcactttttaa

SEQ ID NO: 205199 - DNA, 384 bp, Glycine max
gtgtagggatcatcccaaattccgttgtcatatgctaatcttttatcccatatctactcgataattcagtggtagccataaccctagccaagctcatcaacctccatttctccgagaatactactctaacgcaacgtgtgcttgtcacagagaaaccccggggcgatccattgatcattgtaaggctctaaagcgtacggcgccaagtctaatcgacgctggctgaactttacgtaaattgtgcgtaatcctgacattgcaatagatgcccacatggagaatttgaaactcgtgtcgagtctctacgactcaccacattcaactttcccggaatgtggcgaaccattgcctgttgctcaacaaccgccccttgatgtgactcca

SEQ ID NO: 205200 - DNA, 324 bp, Glycine max
  unsure (1)..(324): unsure at all n locations
tagcatctgacatacgcgttccaatagatttggtctaatgagggcattcaatccttctattttttgaaacggaacttactgcctggagtagaaactttgcttctttgatcttgntcatttgaattaaacatatagccgaattgcgctgtttgttcctatcaacctctaaggacaatgctatcctgtagaaaccaataaggaactgttactttttttttccaaaaaacaaaagtaaaatacctaaactccattttgattccatattaaagcctcaccttaatggtcctcagcacgtgtataggcttctttttgcaagtatgccca

SEQ ID NO: 205201 - DNA, 172 bp, Glycine max
atcacttttctagaaacattgaggcactcttgctacccaccagaactgcagtgtgctgataaagagacaaccttatctgaaatgctcatgatgaaatctggcgtggaggaaaaggaaaagttaattcaacgaattgtagaggctttggctttcttacaacaaaaagaagagg

SEQ ID NO: 205202 - DNA, 375 bp, Glycine max
  unsure (1)..(375): unsure at all n locations
actgcctctggactcatntgcggagaaggccttggggctcttcccgcttccattcttgctcttgccaaagttaacccgcctatctgcatgaattttcttgcttcctagaacttgatcaactacatcaaaccaatgaatgccataataagttagttaattaatactactatatatgttagcaggtacacttcatacataaccaaaatgctataaatattccaagtgtctggccattgggcttaggaacattgtattatcgcttactacaactctgtaggaaaagtcagtttctgttaattgatctctcggaagggaagttctttttcccaagagtcataattaattctagttataacctacaacgtcgattgctac

SEQ ID NO: 205203 - DNA, 295 bp, Glycine max
  unsure (1)..(295): unsure at all n locations
aagagccggncacggcctgtgcctcctgatctaagtccaacacataaaacattttaacacatatactctatctatgaactatacaaaacacacaacccctcaattggtctcgaaataattttaactacttgagcctcaaattaattaaacttcccaggttaccacagtggatcccatcacaatacttattgcacattatctggactcccttaaaaggtcttacaggagtatcattgtgcagttcatagcttacaattcaatgcgtacaataacttaatgcacctgtatttacaat

SEQ ID NO: 205204 - DNA, 285 bp, Glycine max
gcattttcggagtcgtgaagtgcgtggctacgagtgggacttcgaaatttcaggtttgggtggacttctttctctcttaaatttcgggggtatggggttttgggagatatgatgggtagtcttgctagttttctgcttcatgatagttatttgtgaagaaacttgttgaaagcttgttgaaattgccatgtttggatgagttaaacatacccattctgttttagggttttgtgatgatgtttgtgatgtttgtatgctgaaatcgcccatggaaaactgttaaag

SEQ ID NO: 205205 - DNA, 393 bp, Glycine max
tgtttaccccatgcttgaattgcttacaatagagctgtttatggcaccactaattgatctccttttgaagttgtttatggttttaatccactaactcctcttgatcttttgcctatgcctaatgtttctgtttttaatcataaagaaggtcaagcaaaggcggactatgtgaagaagcttcatgagagagtcaaagatcaaattgagaggaaaaataaaagttatgctaaacaagccaacaaagggagaaagaaggttgtcttctaacccggagattgggtttgggtgcacatgagaaaagataggttccggaactaaggacataaagcttcacccaagggagatgaccatttaagtgcttgcaaaatcaatgacatgcttacaaatttagct

SEQ ID NO: 205206 - DNA, 400 bp, Glycine max
  unsure (1)..(400): unsure at all n locations
gcttatgngatgaatgttatcatgaatctttatgaaataagcnaagaatagtttatgagaatcttgagccaatttggtaagcccaaataatctctctccttagaggttcttccgaatgcctcccaaataattgatgagtctttgttattcaatttgcaatgaattgttttccctttttaaggggagatagaaaagacatcaagtgtgagactatgagactaacaatatagattatttccaatttaaaacaaagtaacatggctgatgatctttttaacctaattactttggtagtagagcaaagagtgcttggagaaagtggctgaaacaattcatctgctcttacaacctggagagtcacttttgtttctactcacaggtattaaagaattttatcctg

SEQ ID NO: 205207 - DNA, 398 bp, Glycine max
  unsure (1)..(398): unsure at all n locations
agctttnctttgtgggttgatgaactttttttgcataatggcatganccctggctgacatattcttaattagctcaattgcctcttcaggggtcttgatgaggacatgaccaagagcaagggcaaggatccacttgaaggacttggaggacctatgacaagggctagagaaaggaaagccaaggaagctcttcaacaagtgctgtccatactatttgaatacaagcccaagtttcaaggagaaaagtccaaggttgtgagttgtatcatggcccaaatggaggaggactaaatgacaccactttgtctcaattttagagtgtttagtttgtctaaataatggcccaatccttgtaaagttggctgaccaaaaatatgttttgggttaatcaactaaaa

SEQ ID NO: 205208 - DNA, 372 bp, Glycine max
gcgcaactctggaccgcttagcgcgcattagtgaatttcggcttatcgcgcgtctgctcgctcaacggatggactcaagcggtgcgcttagtgggatgagccctcactcaatgaacacgcatagctcatccttcttccagattcttccttgcgctcaaccaaaggagtggtgcgctcaacggatggctcgctaagcgggcaggttggcttatcaagaggatgaaaatcagcgctttacaaacttgtctaatgaacctgtaattgagaggaaatgattataaatacaccaaatgggagttctaaatattttatacctatctttaaaaaaagtaattgcactcttcaaaaaaaccataaatggatgagtttgat

SEQ ID NO: 205209 - DNA, 279 bp, Glycine max
  unsure (1)..(279): unsure at all n locations
gtctctcantagtgatactgcgcgaacggtatttttttcacatgcgacactcttcagaggtatacacgttttattctgagcgtggacatgatctgtgcacgtgaatcaagaataactggaaaatatttctatccataagcatgtctggcttattcatcctagagaacattatttgagcgtctctcttccttatgcacctgaatcggacattacggcgatatagattatgaccatttgttctttctctcagctttcttttttcagaataagacgtgtgga

SEQ ID NO: 205210 - DNA, 405 bp, Glycine max
  unsure (1)..(405): unsure at all n locations
agctnatgcagcaaatatatttaatagaccttctcaacctcagcagcaaaatcaaccacagctgagcaattatgaacctttccagcaacagatacaaccctggatggaggaatcaccctaacctcagatggtccaaccctcagcaacaacaacagcagcctgctccttccttccaaaatgctgctggcccaagcagaccatacattccttcaccaatccaacaacagcaacaaccccagaaacagccaacagttgaggcccctccacaaccttccctctaagaacttgtgaggcaaatgactttgctgaacatgcagtttcagcaagagaccagagcctccattcaaacttaaccaaaaaatgggacaatggctacccaattgatcaaaacagttccaaattctt

SEQ ID NO: 205211 - DNA, 309 bp, Glycine max
tatatcaagccaaatgctgtgacatttacaaacatattgtgtgcttgtaaccatgcaggactggtcaatgagggagagcaactttttgaacaaatggaaccattatacggtattgtgcctcaaatacaacactacgtttgcgtggttgacatatttggacgtgcaggtcttctggaaaaagctgcatcattcatagagaagatgccaataccaccaactgctgctgtgtggggagctttgctcggggcctgtagtcgccatggaaatgtcgagcttgctgaacttgcttatcagaatctacttgaatta

SEQ ID NO: 205212 - DNA, 364 bp, Glycine max
  unsure (1)..(364): unsure at all n locations
tagccttgaatcagaagtctatatctgtcacaagagtctgtggtttatgctcctctgtcgaccaccacacagacctttgcccttctgtgcaacaatctgaagcaatcaaacagcctgaagcttatgctgcgaacatctacaatagacctcctcctcctcaacctcaacaacaaaatcagccacaacagaataactatgacctctccagcaacaggtacaatccagggtgaaggaatcatcccaaccttagatggtcgaatccttcacaagagcagccacaacaacagccttattttcagaatgttgctggcccaagcaaaccatacgntccttcaccatatcagcagcaacaagcccataaaca

SEQ ID NO: 205213 - DNA, 367 bp, Glycine max
  unsure (1)..(367): unsure at all n locations
ntagaagaagtgttggcttntacatgcccaactccttttagtggcattagtattggttgttaacttgattgttgtatcttagtacatctgatatctatgttgcattttgcatcaccatagagtgactgaagaaaattnttataagttaaaaaaatttcttagacgcaaaaactcactgttttaataagttacaatgttgtcgtaatcgattacaacaagttgtctaaagcttaaaaagttaactctcgtatcactttaatcgattatggtagtactttaatcgatcacactattgtttgagacaatgactacatttctcatgagtctctactttaattgatgactagatggatcaatccattacttc

SEQ ID NO: 205214 - DNA, 348 bp, Glycine max
atatataggcttgctaagggtagagagaggaagactacagattcggatcaagtaaagtgtgttaaggatgaagaaggcaaagtcttagtgcatgaaaaagatatcaaggaaaggtggaaggcgtatttccacaacttatttaatgatggatatggatatgactctagcagtctagacacaagaaaagaggaccggaactataagtactatcgtcggattcagaaacaggaagtaaaggaagcgttgaaaagaatgagtaatggttaggcggtggggccacacaacatacctattgaagtgtggaaaactcttggagatagaggtcttgagtggctcaccgaactcttt

SEQ ID NO: 205215 - DNA, 362 bp, Glycine max
  unsure (1)..(362): unsure at all n locations
actataaaactcaacccaaaacataagaaatngaggtcgattcactttgatttacttattgttaaaaattgaactaatttatattaaggtaatgctcgaaatgaaataagttttatttctcacgttaaccacataacccttttaaaaataaatcttaacgttaaaataaataataatatataagtttatactaaaaacttatcacaactaaattcataaatatagtgtgtgttcatatatacatgttactaatctattcacttaagtgagaatataataaattcgattatatcttaaatggtttgggttgtctttttctttttttacaattgtcgaaatatagttagaatatatttgtgggt

SEQ ID NO: 205216 - DNA, 402 bp, Glycine max
  unsure (1)..(402): unsure at all n locations
gaagcacttttatgaggaaaaaaaataagattatttgagcttctctatcagctaatattaggtctccattagctaattcatagatgtcctctcatcttttaaagaagctatatgagagagcttctacaaattaactaatggagagctaattttagcttatgaagaagcttatttcatttttttgttcttattttttgaataagcttacccaaacaggacttagtttttgtagcagtgtttatggttgaagaggaggaatctagaattttttaggacactngtttgactctagacttcatttgggataaaggtatttttcagcttccctgtggtattcttctcgtggtcttttgtacaatatatggtaaatatcaaataaacctccataattttaacaatctt

SEQ ID NO: 205217 - DNA, 423 bp, Glycine max
  unsure (1)..(423): unsure at all n locations
ttgcctccccaaagataactcttcatcgtcttcgaccaacatttattaaaaaagaaagtattaaaaatccaaaaaactcagggcgaggtgtagagaaatgaaatcaagaattgaagtgaatataatcataccaagaactttgagcgaacggaatccattcaagaatcaagaagcacaatcaaagaaatgcaagtaaaaattgcaattaagaagtgaacgaaattgcaggtccagaaatttaaaaaaaaaaaaaaaacagttccagagtcaaggaaaatagtgaaaaatctagatacgcacgtcaaagacgaaacaaatgtcatggtttatcttttatcttttattctatttccaaagtgtacccnctttagagtgagtgagaactatggagagagtaaaatattggggagagcatgaagatac

SEQ ID NO: 205218 - DNA, 239 bp, Glycine max
ggagctcgcctttgcccgatgaataagggttaaatgttgaacttcgaattgtgtctcaaaagactctcattcatcaaagatactactggtgctacacaggcttctattaatacactaagtggcttccttgaaaagctttcatgagataacttcctgcataagctacattgagaaaacttgcttgagaaactaaaggtttgatacgctcacccctctattaactaatctcatatccttga

SEQ ID NO: 205219 - DNA, 308 bp, Glycine max
ctaagcttaggagactcactaggggcatggttcgagatttttgtgtacgcccatacgagatgtggtgtcgacaaaaaggacgccatacctgattgtgctcctgtgaatcaaagtaccattctcatgaaaaaagtactgttcggcgagaacagagttgtaactaatcacgcatcaccaaacaagacaacagatctgagtcagattaccaaatctgtaatggcgatcgaaagttaaagacttatgaattttgaacacggattctgacatgaaatacgactttgtggtggacattgtcgtggaggaggact

SEQ ID NO: 205220 - DNA, 358 bp, Glycine max
  unsure (1)..(358): unsure at all n locations
tgtatgggttggatgttgaatttctggtgttcctggggcggagatgatggtacatagggtgaaccaagagctgaagtttcttttggtgaggtagccatggaaaagtagagcgtttggaatgatttcgtaaatttctgagagctgttggggaatgcagaaaacgagattaacacgaaaatataagtttgaatgaggaatgtagagggacgtgtgaagcaacggtcgaatttgctttggttcagtagtgaacgtgctattaatgttaagtgattcgtttgggcacgttcagatatcagtagttgctacaattcctctagcagacaaatgcccagcttgcccctcaattnttcaaactgtt

SEQ ID NO: 205221 - DNA, 352 bp, Glycine max
  unsure (1)..(352): unsure at all n locations
actaggcgagttgattttaaccttagtttcactttagttattagncaattcaattaagaatgaggaatcccaaagagaaaaccgccgattgatctttcgcttttattttactaaaaggtatttttatattattattttacctcttttttgatttccaacgtggttacggcacgaccgaacggtcggaattcattttaaccaaaattaacggatgatacaattcaaacgatcggtggaaatttattttatttttagattaagtgagaaatgacttaaataaatggcttaagcgcgtcaaaagggggtataaaaagtaaatgaaaacgagaataaaaatacatgaaacaaaatg

SEQ ID NO: 205222 - DNA, 426 bp, Glycine max
tgtaggattatggggtacccatcacatgtggttcttgttgcggtcgggcgatggtgcacaacaagttttccacatccacaaattgcgcataaacccaccatcccctgttgcccacctccaactgagctcacgtactcccacgtagcccatatcttcgtttctctcaacaccgggtccccatcaatcctcccaagctttccccaacatccaggtaattcaacatccaaatcatcacaaactaacaaaccaagcaaaacagggcaaaggcagaaaactctgcccaaaacacaactcataatcacagcttttcacatacaaataccccagtaacatttccttcgttccaattcgttaaccgctggatcgactctaaaattttactggaagtctctagtacataagtctacattttgactggtgggatct

SEQ ID NO: 205223 - DNA, 361 bp, Glycine max
  unsure (1)..(361): unsure at all n locations
caggactngatggggcctatgcaagttgaaagccttggaggaaagaggtatgcctatgtttgtgtggatgatttctccagatttacctgggtcaactttatcagagagaaatcagacacctttgaagtattcaaagagttgagtctaagacttcaaagagaaaaagactgtgtcatcaagagaattaggagtgaccatggcagagagtttgaaaacagcaagtttactgaattctacacatctgaaggcatcactcatgagttctcggcagccatcacaccacaacaaaatggcatatttgaaaggaaaaacaggactttgcaagaagctgctagggtcatgcttcatgccaaagaacttc

SEQ ID NO: 205224 - DNA, 341 bp, Glycine max
gtcttcttgagtcttgaattcttcttgattcttatctttaattcttaaattatacttgattcacttgagttgttctttgattgatctttgagctttttgtcatcatcttttgttatcatcattgttatcatcaaaacacctttgaatcacctttgattcaccatgaagctttacttctacaatcctttatcagttcaaccacttaatccaaccctaaattaaattactaagcgaaatttaacataaggcattcattatgtgattaagctacacatacaccaattactcatatacgatcattaaacatgaacgtcaattaagcgcacagacaattaatcaag

SEQ ID NO: 205225 - DNA, 322 bp, Glycine max
  unsure (1)..(322): unsure at all n locations
tgaacacagcatgctaccatttgaaaccatggctgatattggagtttcatggctatgaaacagcaactgatccactgcgcgcctgtgggcttcgataaaccctagtagcgactttagctctctgattatgttaaagcctctttagaaacctttgattgtgatcttattgactacgctcctgtcaagaggtgggtttgatggggaaatggtgtgngcaaacgttccattgatataacattatgattatgattgatgctgacgagaatacacatatgtgtcaactcgtttgcttgtgagaataacaatttaccttagaccgggt

SEQ ID NO: 205226 - DNA, 347 bp, Glycine max
gagagaacgagagaggtgggagcacgctattgaaggaagaacaatagacataagtcctactttgaggtgtgtcgcacaagactctcattcatcaaagttacccctagtgtgacacatgctcctatttatagactacgtagcttcctagagaagtttacttgagaaaacttccttgagaagcgcctttgagaaaactcccttgagaagctagagcttatctacacacacccgggtgataacaaaactaacctgcttgataagcttccttaagagacattctaaagaagctagagcttagctgcacatacctttctaatagctaagctcacctccttgagatgagaagc

SEQ ID NO: 205227 - DNA, 362 bp, Glycine max
  unsure (1)..(362): unsure at all n locations
tgcatcgatgccccacattatttacatgacacaaatgctattatgacgagtaagaaactatatgcagaactggtcatgcatgcacctatgtggacactctagcttcaagtgtttatggacacgtgacactagggcttaggattcatgttccctatataagtcaacccagagtatcaagatatgttcttttatcaagtcatgcattcatccgagtgcattatgggtgttcgggaaaattttgaaagcatatacccttcacgcgcatgacacacattttctgtctaaaataggttatgatcagtgaatgtttttntcacagaaaagctggaagctatctcttctcaaaagcatagtggcttttc

SEQ ID NO: 205228 - DNA, 393 bp, Glycine max
  unsure (1)..(393): unsure at all n locations
gcttgcntttacaatctcccctttgttgatgatgactttcctgaaagcaagaaacacatacacagttgttttattcgatcactcacttaattctccatattctccccctttgttttttagtttaagcttcacttgaaattaagttatttaattatatgagttcttgatttaatccctattttatctccccctttggcatcaacaaaaagccaaagtgcataagaaatataaaaccatacataaatgactaatcatacaagagaatagaaaacaatcaaacaagataacttaaccattcatcaaactagaaagataatacttcatagaatgtcatataatccagaaagtcattcaaaataaccaaataaaaactactaatgcaggaaaaaatgc

SEQ ID NO: 205229 - DNA, 421 bp, Glycine max
  unsure (1)..(421): unsure at all n locations
tgactcatccaaacatggcaagttcaacatgctntcaacaaatttcttcacaaacaactatcatgaagcagaaacctatcaaaactacccatcatatctcccaaaaccccatacccacgaaaatcaagagagaaagaagtccacccaaacctgaaatttcgaggtcccacacgtagagatgcgcttcacgactccgaaaatgccctcctttcgcgatttggagcagaaatggtgaccaaaggttggagctttgttggagcctccatggagaatgaagaaaaaagactaaagcaacgtgagggagagggagagaaagcttctgaaattttggcgctgaatgacgagagagagaatttgcttataacttctaaaaaaagggcttttgcctctttcttattaatttattataagctatgccaca

SEQ ID NO: 205230 - DNA, 409 bp, Glycine max
  unsure (1)..(409): unsure at all n locations
agcttncgactatcatcattaatatgnnttatctngctctcaaccatctcttgatatgatctcatttcaaacttcaattctgtctttcctagagaatatagatgtatcacaactttaatttaaaatagtaaatgattgccaaagagaagaaacgcaaaaataacaccagcatccctctcttttcctaaagagaatagacgattgccaactaagaattactaaactaccaaactctaaggaaagtagagctgccatattcaagttgatcaccaattatctcaataagaaaaaaactgtataggaaaactgattaagagaagaaaaaaaaattacctctagagtgctcgttgaaaatatctaaatcttctttagaagccaagttaccataaagttggcgcttccacctggg

SEQ ID NO: 205231 - DNA, 362 bp, Glycine max
ttaaatgcgaaggcacctcgccgaaaattattgattgaagccaggacaacaaaaactagtcttgttcccaagcaaggtacttcaatgggaacataaaagcgatgcttcaaccattgtcatttgtctttgttgggaaactggagaggcaactgcagatcatggtgattgtttcagaagcggtgaagtaaagtttgaagaaaaagggatgcacgttttgccatggaggaactgtgattacatgctctctaagtgactctctccgtctagcattagggagaatgacaagcaacccctatcctcctttgtgcaaagttgtgtcatcgtgccaaaaatgatgtcctgtggtgatgcggcgtctatgg

SEQ ID NO: 205232 - DNA, 367 bp, Glycine max
catgcaagcttttagattataggggcagctggggttttgtctctggctctttcccttggcttggacgttttcatcaagcacaggagaaatgctgccaagttgaacacttcagtggagacagagcttcacatgccaagggctccaaacaaaccacggcgctttgccttttctcaactttcaactgcaactcggtcattcagagagatagagttgctcggcagtgataatagaggagagtactacagagggaagctttctggtggcagtcaagtggccgtgaaaaggttctcagctcagtttctcagcacacatggatcagacaagaagcgtttgttgaaggaaatcaaaggcattagccatgttcgcc

SEQ ID NO: 205233 - DNA, 413 bp, Glycine max
tcacagagtctctatatggtctgattgaatctgacttgttctctgacagacaagctctccttgagttcttttccaatgttccacatgccccaaggctaaactggagtgattctactccaatttgcacttcttgggctggtgtcacttgcaaccaaaatggaactagtgtcattgaaatccatcttccaggagctggattcaagggctccattccaaagaacagcctaggaaaactagattctcttaaaattcttagccttcactccaatggccttagaggaaaccttccttctgacattctctccattccttcactccaatatgtaaacctgcagcagaataacttctcacgcctaatcccttccactatctcacctacactcatagaattggatatttcttctaacaacttt

SEQ ID NO: 205234 - DNA, 379 bp, Glycine max
  unsure (1)..(379): unsure at all n locations
cgatgtgggtctgaaaagaggcaaatttagtcatcctgcttggacgaatgagaaaactggggcaaatgaagagggtgaggatgaaggagaagcccgtgctgtgactgccattcctatacagccaagtttcccaccaacccaacaatgtcattactcagccaataacaaaccttctccttacacaccgcccagttatccacaaaggccatccctaaaatcaaccacaaagcctacctaccgcacttncaatgacaaacaccacctttagcataaaccaaaacaccgaccaagaaatgaattttgcagcgagaaagcctatagaattcaccccaattccagtgtcctacgctgacttgctcccatatctacttgataattc

SEQ ID NO: 205235 - DNA, 415 bp, Glycine max
  unsure (1)..(415): unsure at all n locations
cctaagatcttcttcatcaatggattccttngcttcttgtaagatgaanggcagcggaatgaagaaaggaagagagagaggagacgcctcttcaaggagaagatgagtctagaagaagctcaccaccataggaggccatggataagagctnggaggaagaaggagatgaatgaagggagagggagagaagagaancgaaatttgtgctctaaatgagctttgaaatctgaagtttaatattcaaatgatcaaagttgaaaaaaatgcacacacatgacctctatttatagcctaagtgtcacacaaaattggagggaaattcaaatttcacttgaatttgaaattgaatttgtggagccaaactntggagccaaaatttcactaattatgattagtgaattntagttatgggtca

SEQ ID NO: 205236 - DNA, 465 bp, Glycine max
  unsure (1)..(465): unsure at all n locations
cttgacttgtatatgaaaatttcttctatctgtgaaatgtgaacttgggttaccaagtgtttgatgtagtcatggctctatgcatcaggctggttatgaatcacagctagagagtgttcttagaagcgcgtctatgaaggataagacagtgataatcacaactctaaatgatgcatgggcaaagccagngtccatatttgacctttttcttgagagttttcgcctagggaaccaaaacaaaaagtttttgaatcacttggtggtaataactttggaccaaaaggcacatgctcgttgcctagctttgcacaaacatttgtaccaacttgaaactataggtgacaatttcaccggtgagagcattttcatgactgcagactacctacagatgatgtggagaagaattgaattccttggtacacgtcttgatatggngtacaactctgtgttcacgggttatatata

SEQ ID NO: 205237 - DNA, 498 bp, Glycine max
  unsure (1)..(498): unsure at all n locations
cttagtcacctgcggcatgcaagctntaatggagctacatcatatttagtcatccctggtccctctanaactcacaaaatgtaagatgaatgggtttggattatgaaaaatgggagtgaaaaaataaaattcaatttcatccatattaaatttgtggaaattcatctaatgttttttttaattatttattcatatactttaaataaattataaattaagttattaattatagnttaattctatgtatgtaatgtatattttcataatgaataataaataacttatatatttagttaaatgtataaattttaattttgttataattagtattatgattataatattatttatttaactattaaaataattattctatatctttatgattataaaaaaagtgaaatataacaataattagataattatataattaaacaatacatgtagatatataccaaaataattatagatagacttatagttatttattaataatta

SEQ ID NO: 205238 - DNA, 420 bp, Glycine max
  unsure (1)..(420): unsure at all n locations
agcttaccatgaactactttctaactnctccatactgtaaaaaaacttacaaagttntaaagaataaatttctaagtatccaaagaacatgaagccttgagtgctagcagacgtgagtttgggatggataatgttcatcttttcaagcctatgatatcttagaagaaggacaaaatagactctggttcaaaaatgattcttacaaagaggaaattaanaatttgaatgcaaagcttttgaaatctaaagcaaactcatctctaaaagatcaaccacgtgatgttgaaaacttcatgatgaaattgatctttaaagaagaattttccaaattgtgaaggggttgaaattaaacacagttttgaatacacataaatactatgacanattgaacatgattacgggaaagaaattgtttatgat

SEQ ID NO: 205239 - DNA, 432 bp, Glycine max
  unsure (1)..(432): unsure at all n locations
agctntacagcatattntattaatgactctctatcctagaattaaaataacttaatgccattaacctagggaaataaaataacttaatggctgagtgtaactgaaatagtggcaaccaaaagtcacccccaacagccaacaagtcagccaccatatggtctcccaaaaggctgatgcctangttgccaattgggcccttattacaacttgaactatacctaactaaagcccttttagttgattaacccaaaacatatttttggtcagccaactttacaaggattgggccattatttagacaaactaaacactctaaaattgaaacaaagtggtgtcatttagtcctcctccatttgggccatgatacaactcacaaccttggactttttctcttgaaacttgggcttgtattcaaacagtatggacaacact

SEQ ID NO: 205240 - DNA, 412 bp, Glycine max
atgctgaagaatctgtaaatatacataaatattatctctatcaacttgctcctcagaacttattccaacaatatccattgctctccttgtatccctatattctttagattcatcacacccttccaactcaaagcaatttgattgattcaaataatgaaacatttttggatctcctaatttgtactttttaatatcctgccaaagaggaccagataatagacgtaataaaataaaaaagagttagcacaaattaccaataagaacttcaaatattttgctatcagacacatttacgacaaaaaaaaaacattaagtaagcatcatagaattatgagggaaaggaaatcactcttttttcctcaaagtctcttaagtcatttcacagttttataatgtaagtactcacttttga

SEQ ID NO: 205241 - DNA, 459 bp, Glycine max
  unsure (1)..(459): unsure at all n locations
agcttaaaanaaactctataaaagagcatgtgtcaagaganaaagatgaggagaaagaagaggaacaagctcaacaacaatgggagaagtactcaccagttgaaaaacaacatgaaaattttcttcatatcaaaaaccttcctcatcaactgattatcaagaaaggaaggcaaggagaacatgaggaaaccttaagtgccattctttctttaatcacgagcatctttcttgaaatgatttggaatgtacttccaaactatatgaagttcatggaatttctagctaaaaggcgaaacttcaaggaagatgtgttctatgtgactttcatgccacctagaaggtattaagctatgcgccaagctaatgacattaaaaaagcgcttctgggaagaacccagattaatttctgtatttttgtnttcatgctatatcatgtggacttcgctttatctgactttg

SEQ ID NO: 205242 - DNA, 410 bp, Glycine max
  unsure (1)..(410): unsure at all n locations
agctnggctntcctgcacttatcacagcattgtgcatagccagaggagtagtatctgactcactcaccttcgagtccctcagcctggccattaacttggcctacatcagaaagaactgttggaacccagatgatccgatcatcacatttcttgggtcccgcaagaccagggctaaggctcctgcatatgcttccacctcagtttctactcccacaccagcaccagtaccaacttcagcccctctaacaccagtctcagccccagtgggcccatccatgcatagcacagacgccatcgtgccgatgttgcaaagcattcaccacggctttttcctggtgatgcagagcattcataacttagctcaacaacggccgatcatcagcatggaggaattcatgaccccaagttcc

SEQ ID NO: 205243 - DNA, 448 bp, Glycine max
  unsure (1)..(448): unsure at all n locations
ttatgctggattgatntggtctgacaagggatctttgtttantaatntaggctacaacatagaacacaagagcatgattgattatagaaatatatttatatacatcagcttgtctgttagaaagacccaacatttctacctactgctgtcacttttacttacgttgtattntaatagttttagcataaaggtttagtttaaattctgtttgaaatttatcatcatacatgttctctcaacaatgcttcatttctgaatataactcaagctaacattagttccctgtgttcgatactcggatccattcattttaattnttaaatacatgacgatctagtgcgctttcccgacaaccagatttcccttaaatatatttgtacgaagagaaagtggacaaaaagtaatcacatgggaaatccaacacagaccctatagctangcccacaat

SEQ ID NO: 205244 - DNA, 379 bp, Glycine max
  unsure (1)..(379): unsure at all n locations
agcttggttaactgtactgtttttatattttcgtgttgcttatgcacaacttagtccaacagaccctagagttcgagctcaactctaaataccaagcctaatgccagagtataaggaactggtaaatgagcaaaactgacaagtaattaacaaagtatacttacctcacanaagttggacacaacctaccccggacaagttaccggcaccgacgaaacgcggaagcccacaagggagggcacaacgtangagatgaagggcaaatggttacgaggctacgaaggaggttgctagggtgtgcgcatgacangcaggaaaggcacacaaattaaaaggaatggtggacaattttttaaaaatgaaattatttgcaaaatgc

SEQ ID NO: 205245 - DNA, 427 bp, Glycine max
gcaagcttcttagtctcagctgatgaagatgaattcttggctacttcatgcactcctctaatgaaaataacatcatttctggcactaaattgctgggagtttgaagccatcttctcaattaaatttctggcttcagcaggggtcatgtctccaatggctccaccactggcagcatcaatcatacatagttttttaaaatctctcctagtattcatataggctctttccacttgagtgcctaatgcatgaaatatcctttctgatggccgtggtcctggaagcagggaaattttttttctaagaatactctcttgaggtcatcccagctcgtgatgaaccgtggagcatggtaataaagccagtcctttgccactccctctaaagaatgaagaaaggccttcagaaatatgtgatcctcctggacatc

SEQ ID NO: 205246 - DNA, 474 bp, Glycine max
  unsure (1)..(474): unsure at all n locations
agcttattcaagtcatggttgtcaaaatcattatctgtcttataaaattatttgattntaacatcaagcaccccttgacaatctgaatcttgagttgaatcgctggagagtaggatcacagagggattgcttttgtccatgtttaatcatgggatcatttatcctggtgaggcagaagacggacaaaatcacaaggttggggtcatatgatccaatttgggcaaaacccctttttctccttcaaacaatttcctttccatatgtgactatgtgacttctctaacctaatctccatcaattgttttttgaattgtgtgccattggacctctttcacaactgttgaagcttaccttgtgccactattgctactgcnggttgtggtagtttggcactgcaattgcacctcttaccaacatcttctttgtggtctctctactcagcactctcatccaatctctggatatctttctttc

SEQ ID NO: 205247 - DNA, 453 bp, Glycine max
agcttcgtatcatggtttaaaacatacatacttctcttgagggttaaaaaattatttgtatccatatgtaagagtaaaaaaagtaggatattttgtgtaatttgacagaacataaggaagtatttaagtgtaatttgttcttataaatgtgttgaatgaatggaaaagtgattgtttgtgctaaatcctcctctaaaaagaagatacaaatgaaaggaaatacgtaaatggtgttataatccttttcatgtatgaggacattatataaagatgggtgtaaggactatctaaaaaatgtttttttaatgttaaatagtaatagcttatttatgaaaaaacttattttgaacatggttttttaaaaaaagaacattaaaattagataaaaataaaccttataatagagtgaaaattgaagaattacttattccaaatatttttttttattaataa

SEQ ID NO: 205248 - DNA, 393 bp, Glycine max
  unsure (1)..(393): unsure at all n locations
agtcacctgcggctgcagctatggatatattattttgatggcctaatttgcggactgatagtatcgtctcgaagtggcctttggttccagtagacgaattgttttctctggttagcattaataaaatcatttccagtgctcgtttttatgttatttccttgaatacatnatggtttctatctttcttatccttggggtttatcactatcccaatttccaattagctttatttcattgtacagctcacgttcattgtatcttaagaaattgagataattacccttatttgtgagtgtactctattaacaatctctgtatacatatcatttaactgagtgtgtgtaagtgtgtattgaccattcaagaatattcacacgaaatcaatcttatttt

SEQ ID NO: 205249 - DNA, 445 bp, Glycine max
  unsure (1)..(445): unsure at all n locations
ccgctgcaacttaaacctataatattgctcttttcgtttggggcatatttctgttctgtccatacatggacacaaatatnttctaacaactatagatgattacagtcgattcacttttataattcttttaaaaacaaaaaggcaagcacgggaacaagttcaaaatcttactataatgctcgaaatgcaaaatgatgctaaaattaaaattataaggactgacaatggcctgaattttctatggattaattttataactctaatgggataattcatcaaacaagttgtgttgaatccccacaacaaaatgggagagttgagaggaaacatcaacatgttctgaatgtggcgagggctctttgtttcaatctatataccataacacatttggcctatgctattctcatgccccttctttataaatacattccaatgctctattaaa

SEQ ID NO: 205250 - DNA, 332 bp, Glycine max
  unsure (1)..(332): unsure at all n locations
gagctacgaatgtttctgatgaagctgctgcttatgttcaacaagatccggtggagatatattatctcaacctcatttgtcacaagatagtgacatggagtngacggtaaatatttgtcacaacaacagaagttttatctcaacctaatttggtgcagcactccatttttatatattacaattattcatgtttggcatttgcatgtgagtccctgcaactattgttccaccaatagcgaggaataagctaaccatatcaagagccaaacaaaggaagggtgctgataaagatgatgcagacaactgaagaagcattttttgttggattttga

SEQ ID NO: 205251 - DNA, 397 bp, Glycine max
  unsure (1)..(397): unsure at all n locations
ggatccttaagcaccgcggctgcagcttactattttagctaaaattagctataatatttgactgaacatagccttaaaattatagacaaggtattatagtataatatgaattatggatggttatttttacctcttccaaatgctatttctaaatntattttaaattataattngatttaaattttaaatcttgatatgttgcgttaatttgaagatatttttccagataatctaaatcatatattattataatcgtaactaatcctaaaaaatataatctttaaaaatataattntaaataaggataaatatctattttcttccttaaatatgttaagtgcggatagttgggtccctaaagatgaaaagttaaactcgtgtcctcgaatgtataaaa

SEQ ID NO: 205252 - DNA, 390 bp, Glycine max
  unsure (1)..(390): unsure at all n locations
agcttcanggaactattacaataataatacctttatggcacacacgttgtcctcctccaacccttctacaccctctgatcacaacagcatcaatgatgaaaaggaaatggaaaataaggaagaggaagagaagaagcaattgaagaatgaatcggaggatgaggataaaagccaatgcaaacaagaaatcacacaacttcccaacaatgatgacagtaataatactagtaatgcaaatgcaacatgttccagtgaaaaaatcacagaccccaagagggtcaaaaggtaattaaacattcatgtccaattctatactcntcctcgcaaacttgcattgcattggtccatatatgactntaatcttttataataacagtttctaaaagaaaa

SEQ ID NO: 205253 - DNA, 396 bp, Glycine max
  unsure (1)..(396): unsure at all n locations
ttaagcacgctgcatcaacttgactttatctccacatgtttttatattcaagtttttctctacccccagtccacagcatgatggtttctttattttcttaatagaggatctgagggtttcagcgagacgattctcacagtattagaatgaatgtggcgcaatgtgtgtgtccaccgagcggtttccggcatatttctggtgggatgagatagacaanagagagcgcctcatgtttctgagccgccagttcgaaatttcacacgttctacatataacatacatcatcacattgcttttaaggataccgagtttgataatctgtaacttcgttttgtcaaccaatgtaactcaacaggcacatccgtttttaaaacacagtgacatacatcttacatc

SEQ ID NO: 205254 - DNA, 381 bp, Glycine max
  unsure (1)..(381): unsure at all n locations
agcttcttcgagtgtgctgctgtcaataatgtctcagctgctgacacctcacgctcaagagcctttggaggcgctgggactgcatggaaatctggtgattggatattcaatcggtgagttagctaagttttttttttatgtatataaaaaagtttaagtgagttgaatttcaaaagctcatcaagattaataagctaagttgtaagtcacaacattcacacacaaacctactaactgactatctacccaacaacaacaagttcaaacttgcatctcgagtggtattctaccaactagaccaactntaatcgactagactagatatcagctagataccaacctctctcttttgattattgattccttttgaggggacaattt

SEQ ID NO: 205255 - DNA, 442 bp, Glycine max
  unsure (1)..(442): unsure at all n locations
tagctntagaattaatgctagctaaacaaccattgtgttcatagtcttcataggtgcacatacgtttgagtaaatcaatgganacttttcattcatttattctccatgtagttgaactaagaaaggcaacctatactgcttacctgcttgacaacctccaaacacttctaaataaacttaagtattgagcaaaattttgattaactcttctaagcanatcgaatggatttcaacaactaaactttaactaataggaaatcatcttttcaccatttatacttcaagtacctcatgattatcaacaatatatggtagctacacaactccctacttttcaatagcaaaaataaccatcttgattcatttgactcacaccccactacatattttgagagggtatgagaattagtgtataaatgactttggatgaaaactattagaa

SEQ ID NO: 205256 - DNA, 443 bp, Glycine max
  unsure (1)..(443): unsure at all n locations
agcttacctgagctaagaacatttcgttgcgtcaaatcccatacttagtgtatttctgaagtgtatgatgcccctaagcgcgaaccttgaggagcttagtgcaaatccttgcggcaacagttaggcttagcgggcgtgtgccagctaagccaattatgcagaacctaaaattctgcaacattcgctaagcggccccacatgtcgctaagtggtagtgcgtatcttgtgaaggccagctaagcagaccatgtctcgctaagctgccagtacctttttcagttttatttttcattntttgaatttgagtaacttgtgtcctgattaactggttggtccttttatttgcagatgacatctangaaacggaagagtatcggttcaagactcacaacacaatacgatacaaggagatttcactccttagatgcttggaactgatacac

SEQ ID NO: 205257 - DNA, 436 bp, Glycine max
catgcaagcttctcagcatgactgctggattatagcgttgaaagctgaactacattctctacaatcaagcgacacctggagacttactcctcttccttctcataagaccgccattgggagtggatggatatacaagatcaaacatagagcagatggttccatagataggtacaaggcacgtctcgtagcaaagggctacacgcaaatggaggggctttactatcttgacaccttctctccagtggcaaagctaaccacagtacgtctcttccttgctcttgttgcccttaatcacgggcatctaagacaactggatgtaataacgcctctctccgtggcgagttagatgaagaagttatatgcaggtcccgcctggatatcggttccaactccaactggatgtttttgcaggttatatccgactaaacagcgagcg

SEQ ID NO: 205258 - DNA, 443 bp, Glycine max
agtgagccaccgtagagtgagtcaattttcatacaagagtgaattcactccttggagtgaggaagctagacagttagagagcccttttgagagacaagataaatagcctgggaaggctctatcctcaagcttgagtgagccaccatagagtgagtcaattttgttaacacatacttgtaccttactatcattttgtatagtggaagaatctccatacttgaagaattataatcggacgctcccattactacctttaattactaagggtctatcttaaacttcacgaagcggtaaagtccgagatttcccaacaccttcctcttagacgctttcctttacggttcttcgacctcgacacaacttttaccaccaccatgcctaaactccttgcaccgtcattgtattttgatctccagttaatggaaaatggaacaagttcatct

SEQ ID NO: 205259 - DNA, 394 bp, Glycine max
  unsure (1)..(394): unsure at all n locations
agcttctaaactntatacaagaatgaagctctgataccacttgttagacttgtggcctcagatatcttaagaagggggggttgaattaagatattacaaactacttccccaattaaaattctatttcactttctattcaagttataaattcccttaataatgaacttcttaaatattgattaaaatagaacaatttgaatatgaatataaaacaatgataaataaagaagtttaagggaagagaaagtgcaaactcagatttatactggtttggccaccccttgtgcctacgtccagtccccaagcaacccgcttgaaagttccactatcttgtaaattccttttacaagttctaaacacacaaggacaatcctttctttgtgttagaattaca

SEQ ID NO: 205260 - DNA, 438 bp, Glycine max
tgacgcttgcagctttgagcattcagatggcatactttttactcgaggtccaattatgcgcataattattgagacgctccatatataacaacggatgcactcgggattcatgcgcctaatattacgagacgctcgtaattttaatgcacgtaatatatctagacgctcgatattgaacaaagcgaagcattctagatattcatatggtcttaactttttactagatgttcgaatcaggcgcataatataacgagacgctctaaatgaacaacgtaagctctaagcaattaaatggttataactttaactcaattgccatttatgtgcatcacatataagacgcttaaattgacaacgaagctttataaatataaagctttacttttcaacggggttgattcaaagattatatttgaacgcttaattgacatggagttt

SEQ ID NO: 205261 - DNA, 417 bp, Glycine max
  unsure (1)..(417): unsure at all n locations
agcttgtcactcttctcgtccaggcgagcttatctcgcccaggtgagcaatgttgcttcctccagaagcaacagccttctggaggaaggatttggaaggcccaagtgggccagattgctatttgtaccccccnttttactaaatgcacccccttctatttatttgtaattcttttttccgtaacgttacgaaactctacgaatttcataacgatacttattntccttccgcaaggttacgagtccttacagattatgtatttactctttntttgctttcgaagaagttacgacaactcacggattgcgaaaaaacctcctttcatttccgcacatcacgaatnttacggattgcgtagcctgctacctttgatttcggatgtctcggacttatttatgtgcaacaaagacgccagta

SEQ ID NO: 205262 - DNA, 438 bp, Glycine max
  unsure (1)..(438): unsure at all n locations
agcttgagatgaggaagtgttgaagggtgaatcttcctgcttttattgttgaccacagagtggtacctggagatatgtcgcggtggttaggagacctcggggacgtcaggtggggtgctattgcccaaaaccaagctagaccaatcccgacccaacccgggcatagtcggtcagtgagaacctgtgatgtacctaagcaggcgagctcctgccgtcaacagataataggaacaaagaccacanagcaaggaggcttgtggtagctggccagctgtgaaacttgactgatatgtgagatatggtctctggtaatcgattaccaagggtgggtaatcgattacaaggcttaaaattgaagacaggaggctaagatggtctctggttatcgactaccacggggtggtaatcgataccaggcttngaaacgagataaaaagc

SEQ ID NO: 205263 - DNA, 370 bp, Glycine max
  unsure (1)..(370): unsure at all n locations
agcttaagaaaaatccctatataagagcatgtttcatgagaaaaagatgaggagaatgaagaggaacaagcacaacaacaatgggagaagtactcatcagtagaaaaacaacaagaaaatattctccaaatcaaaaaccttcctcatcaactgattatcaagaaaggaaggcaaggagaacatgaggaaaccttaagtgccattctttctttaatcacgagcatctttcttgaaatgatttggaatgtacttccaaactatatgaagttcatggaatttctagctaanaggcgaaacttcaaggaagatgtgttctatgtgactttcatgccaccttgaaagtattaagctatgcgccaagctaatgaca

SEQ ID NO: 205264 - DNA, 349 bp, Glycine max
  unsure (1)..(349): unsure at all n locations
agctnatcaaaattgacttgaaacatagtgtattaaacgttgaattatgaaattactgggacagaacaagtcatttaacagattctgaagaattatgaaccagaagtggaaaatcaaaaggtaatgcactactatctttatgttcaggcaatcaaaggcacaaaagtttacatgacccatcaccgaaaatattacagacactaactagaacttacacattctaaataaacatactattagtctaataatatagccaaagtagtgcacacacattgctatagtaaacagaattgaaccaccacatactagtacactttgaacttcggtgcataatcaatgaaacacaaat

SEQ ID NO: 205265 - DNA, 309 bp, Glycine max
  unsure (1)..(309): unsure at all n locations
acttacagcttatttattaatgacccacttacctagaattaaaataacataatgccactaacctagggaattaaanaaaacttaatggctgagtgtaactgaaattgtggcaaccaaaagtcacccccaacagccaacttcagccaccatttggtctcccaaaaggctgatgcctatgttgccaattgggcccttattacaacttgaactaaacctaactaaagcccttttagttgattaacccaaacacatatttggtcagccaactttacaatgattgggccattatttatacaaattaaacactct

SEQ ID NO: 205266 - DNA, 365 bp, Glycine max
  unsure (1)..(365): unsure at all n locations
agcttgaaggtgtgtaacccaccattttccttaatagaacactattaatatgtctactatcattgttattatttctttcttcgtcattaagggaaacacttgggctgccatatccctccacctttgggcgtattctataaaaaaatttgtgccccctttttgcatatgtcatgtagntgcatcctatccgaagacattatactgacactgcctaacgaaggcaaccattangtcctttccagaatggactcgggaaggttccaagttagtgtaccaggtaacagctaccccagtaagacttttttggaaggaatgtatcaacaattcctcatcttttgcgtatgcccccatcttccgacaataca

SEQ ID NO: 205267 - DNA, 388 bp, Glycine max
  unsure (1)..(388): unsure at all n locations
agcttctgcttatgagtgcacaactctntcatgaatttagcatatcttggaatttgctttattgcatccagcagaggtatgtttacctctacttttctaaattnttccaatatctccttctctgtctcttccattntttttgtggaaattgctcttggagggaatggaagagggatatgctacttctgtaaatcagaattaccagtggaagattcacctgcatagaactcgttaggtaacttttttaaattttgtcatcatctttttttggagtagagtgagattgcgcacgttcatttgcggatgaggaagatgttgctggttgaggttcttgacactgcttttccaaccttaatgtaatggcactcacnnattttggattctggac

SEQ ID NO: 205268 - DNA, 467 bp, Glycine max
agccttgagactgcatgtatttatgatataatgttgttatatatatacatatattcagagaattatttttagactaagaaacaacttaacatctttttttatattcttaacaagtaattagagaactttatataaatcacgtcttatcgaaaatacaataagaacataatacactcttataggcttgtggaagagatctttaagcctatgagaaatcctatttcggaacaaacaaccataagagaaaaaccaacattctagtaattagaaacctaataaaaataggaaattatgacacaagaataagattagaatagagaaagataataatcaaacagcacaaagaaagtgttggcatactatagatcttatatttgcacatcaaattctgacattctataaaaacataagaaagacctgtctcttaaataaatggaagaatgaatattttttaaataatatatata

SEQ ID NO: 205269 - DNA, 458 bp, Glycine max
  unsure (1)..(458): unsure at all n locations
gcagctatcacttttcctctgtttcttttatctctctacactcctatttgaaatgtacactaaacatttttcttcatttggtctatcaatatgcgatatcgtttataatatatgtggaattngaaccctaaccatcatcaatataaattaattttcgcgggatcgagaaaattcccaatgactcacatttcttcacanatcacaatgcacattactaatgaagtcaaaactactaactcattatttgactaacatcagctacttccatttacaattgaagcnagtagcgtaaagttaatcaaaaagtaaaatattattcaattaattaatgccctcttccagttgcgtaaatgattatatatttatccaaagaaagcagtaaaatctatttctangcattaacacttgatgtaaaactcaaatcaatttgtcaaaacatcattttatgaattcttgta

SEQ ID NO: 205270 - DNA, 416 bp, Glycine max
  unsure (1)..(416): unsure at all n locations
tgcacgcatgcaagctctgtgctcaatgatgccatctaacttcttacatctgttttnaatgttacanaagaaaaatgtaataacgccctagcttgctagaggctggtgctactaataatgcatgtcacaaaaatatataatattaggtgttttactccgtctagacatactaatgctactaataatgtatatccatgactcccgacgtgcttatatctgtctctcattcaatattttgataggggtcaatctttttatgtgaacctaacctacttaaaacgtgacaatatatatgataagatcggatcaaccacgttcttttatcggccaaacatatatattaatattatgcacaagaagttttacctgcggtctaattttatttatacaaacatatttaagcttggaccgtggtc

SEQ ID NO: 205271 - DNA, 458 bp, Glycine max
  unsure (1)..(458): unsure at all n locations
ctgcagcttatacaatgatcttttaaatcttctatcaggttaatnatattataanaataataatatatataatattaaaatttttaatatatatctaatggtagaccgtgttgttttttggtgtgtggaatgtgcagcaatntagttgaaacacaaaggcttaaaagttctatttgattgttaaaatattctataaaaaacggatcaatatttttggtttatcatttggataataaatagaatgaataaagtgtgtttgttaattcttttactacccttactttaaatactatcattnttttccatctttgataaagngaatacatatcatcccncctcgcctatcacttttctacttatttgatattgagcataaaattggaagtataaaatatctaatgagacattttcttgctaagaaacaaaatatacatagagtgaatttaattttaactata

SEQ ID NO: 205272 - DNA, 285 bp, Glycine max
  unsure (1)..(285): unsure at all n locations
attatcttttgcaaaaacttcgtaatcattgnaagttagaaaaaaaactctcaatataccttaaatatattgagataataagactaagcattgtgttcatttctccatatggttcctttctctctaatttttaacaaatatatttcagggaaatgaaataccggaaagcgcaccgggtcatcaagtatttaaaaataanaacggaatggtctgagtatcgaactcacgaaacttgtctattagacagagttttattcatgatgtaatgcattgctggaataaaca

SEQ ID NO: 205273 - DNA, 405 bp, Glycine max
  unsure (1)..(405): unsure at all n locations
agctntcaactctgtatatctaaaaaccgctcttgaaagcaacatttcaaacacgggttttaagaaaccgtcttgtctttagatattntcccattttatattaagctgaaaacaaacacaaaacctcatccatgttttctctcctcaacccacacacagccccatcctttccaaattccttctctcccaatccccaaatactaaatcgtcacgcctcgtaacagtgtgcgcggaggtgaaacagaccttcaccgtcgccaccaccaccactttcttcgacaacaagatccgcgaaatcctcggcaaccacaactacaacaagctcggcctccctttcaacgagcagaagtaccttgccaacgtcatagtcgacaccatccttgacaatgtctccatcgccacaac

SEQ ID NO: 205274 - DNA, 391 bp, Glycine max
agcttgagaggttgcttcatggaggatattttgagggagagaaagagagacaggggagcacgtgtctcccaagactcccattcatcaaagttacaacaagtgttacatatgcttctatttatagactaggtagcttccttgagaagctttcttgagaaaacttccttgagaagctagagcttagctacacacacccctctaataactaatctcacctccttgagaagcttccttgagaagattcctaaagaagctagagcttagctacacacaccccctataatagctaagctctcccccatgccaaaatacatgataatttataaagaagtccctactacaaagactactcgaaatgctctgaaatacaaaggctaaaccctatactact

SEQ ID NO: 205275 - DNA, 405 bp, Glycine max
agcaagcttgcgaaatgcttgtcgctagagctgattcatcaactgtcctaactctttcagactggcgactcctaggctcttgatcttgacttgatagaacactattttaagcgaaggcgcctggctcaatcccatgctctttactaaagtggaataaaaaccagtgcgaatcaagactctgacatctatcataggtgaaatggatgaatgcatgaagaaatgtgtatggcacaaatgcattttatggatacgagagcccgggatattatctctttcttaaatacaacattcgagttgcgtagcgcccgatgcatgcatttgagaaggcgacatggacctttcgtcttctcgtgacaaagtgaggggatcaagacgcaacccgtgcatgatgacatgatgcagatg

SEQ ID NO: 205276 - DNA, 454 bp, Glycine max
  unsure (1)..(454): unsure at all n locations
agcttcattcagatggattaaaaggctcaatgttcacatgcctttcatgattgggtcacgattctcatgcctttcatgataatagtagataagcctatgttgtatcaaaaggctaactgctataagggcaacgagattcttattgaagatgatgtgtagatgctcctccaattagataagagagcttgtcttggaaggttgttcaaacataagcttgaatctcttaagcagaaaattgagcacactagtatggattggtgtgttataaagaggttctataaactgaaagctcactattaaggtctggaaccatttatgttgtaaggcgtttatcatgcagaaagcgtttatcacgcagtaaggcgttattatcatactctaaaccatttatgctntactgangagaattctttaacatggtttgcccatgactannggagtttcatgtgttctg

SEQ ID NO: 205277 - DNA, 430 bp, Glycine max
  unsure (1)..(430): unsure at all n locations
tgctngntaatgcgttgatgaaaatggaagtgcaattgttacccacttctcttgtgccatttgcaaatctttaaagggtggagatttcagatagtcagagattggagtcatttccaaaagagagaatgccttcctagatttccatgctgaccatcaaaccatgtgttttgttaaaggcaagtttcaagagcaatggagggagagtnggaataaatcgctcacattccatgcatgattgtcaataacanagtgatgattatatagtgttcaggtcaatgttctcgtcaagctaacatttctacataagagaatatttgctacggtcttccaactgcttatangaatcattacatcaatatcaaaattatcatttatcacgttgaaatctctttnttttctttcttanttctacacccatgaatagaatgga

SEQ ID NO: 205278 - DNA, 437 bp, Glycine max
  unsure (1)..(437): unsure at all n locations
tagcttgcaagaggattgtgtaagggtatctcaccaaggcctttatgtcctaaacctcaaggacactcatgattgcaaatttactttntctgttatgaattcacacgtaaattccactctttgtaaaaatgctcatatttggcattctaggtttggtcatatataagacaaagttttcaatcatttgaataataaaattagtttacaattctctcctaatttcttttcttctaattgttctatttttccacttgctaaacttagaagattatcctttcctaactctaacaatntatcttatttaccttntgatttactctaatgtgatatatggnggccctatgcccaccctacatatgaggggcagagatctttccttacatttgtagatgactgctcaagattcactttgttatttctacttaaacacaaatctg

SEQ ID NO: 205279 - DNA, 391 bp, Glycine max
  unsure (1)..(391): unsure at all n locations
agcttcttctaataagccaagggtcatcactagtcactgtcacagacatttatcgccatattcctcggttaacaactaatcacactntatcaatagtccaaatatcttaatctaagaatagtcaagattgtgatttttttagttaccacaccaaaattattgtttaattactactaatttcttttgtttttggtgatttagtttcactaaattattaattaatttctaactttgtgatgttgtcaaatgtcaagaacctcaaatgtgtgtggtggcccaccatttgatttttgacaaaagaaaaacacactatgtatacacacatatacacgcattcacatacacacacatagacctttgtgaacgaatctaacttgcgtacaaaatctcc

SEQ ID NO: 205280 - DNA, 388 bp, Glycine max
  unsure (1)..(388): unsure at all n locations
tgtttcaagcattagacgattcttatgaagaatcaagcttgttagacaatgaagtgtcttaggactgacaatggcttggaattctataatgatgatgccattacaagatatcatattgtagactattatgtgagaagcaagtgactctccacagattattntcgattgatgccacaagagtccaagagttaatgcaagttccaaaagaatcagacttctagaatcaagtctcaaagaatcaagattcaagaacaattaagtttcaagattcaagattcaagattcaagagaagctgattccaagattcaagagaagaaatcgataagaaacagtctagacttcacatgggaaggattttttcaaaaaatccaaacatagcacaatttt

SEQ ID NO: 205281 - DNA, 384 bp, Glycine max
  unsure (1)..(384): unsure at all n locations
agctntatttgatgatgccaaagactcaagtcttgaatctagattgaagcttatttcaagaatcaaagggtcattcaatcaagaatcaagattcaagagaagactcaagatatgttagaacctcaagaaaaacatcaagataagtataaaaagaatttttcaaagaaaagattgaatgacacaatttgtccaaaataattcttcaaagaaaaatcttttaccagaagttttactctctggtaatcgattaccatacagtaatcgattaccagaagtccaaaacaattttataactgttttacaaagtagtaatcgattaccatgggcatgtaaccgattaccaatgttnttgaacgttgaatttcaaatctcaagagtcataac

SEQ ID NO: 205282 - DNA, 302 bp, Glycine max
gcttatgcgcatattttcgtacgaacgttataatttcagaatcctttatactaaaagaatgcacccatatacaatcaaggtagcttcattacctagattatttaccatgtacattccaaggctgcactttgttatttacatcacacacgcctccttggctaaatgtacatacatgcatactcaaagcatttcggggtaccaaaaattgcacatgcgctcatcttggtgtttttatacctatacctatacaaacttcatgatgaatcttgtctacctacgcaataaggcgccacattccatgc

SEQ ID NO: 205283 - DNA, 331 bp, Glycine max
aatcgattacacagcgcacactttgaattcatatcttatatagctgatttaatatctctggccactggaattgataccatcttctggtaatcgtttaccaaagagcaaatgtgttgaaaatgatttttaacttaaaattcttggtcataccttatgctacttcaattggaatccccttctatttaatatactctttctaagattctaaagactgtcttgaatatcattcgattctatgtcttgaataaacgcttgtgaaacatgtaatcctttggcattataaaaacataactttatcctttgtttcacaggaaatgtcttttaaacataa

SEQ ID NO: 205284 - DNA, 348 bp, Glycine max
  unsure (1)..(348): unsure at all n locations
agctttggtgtttctttatggagaatgattatatattaaggcaacgngagggagagggagagagagagagctgttctgaaattgggctgagtgaagagagagagggttgctctttgggttttaataaaagggttctctctttctctattattttatataagcaatgccacatgtctccatttgagtggagcaagaagggcccactttctctttttgactgtgacccatactcagtcacaatagtgaggaaaatctgaccttagaaacgctaaaatcctgcctcgggttgcgtgccatctctctggttccaagttctcgcgtttctctgtgtccgtcggggcccagttt

SEQ ID NO: 205285 - DNA, 360 bp, Glycine max
agcttgtaggattattgtgtacccatcacatttggtactaggtggcggtcgggcgatggtgcacaacaagttttccacatccacaaagcgcgcataaacacaccatcccctgttgcccacctccatctgagctcacgtactcccacgtagcccatatactcgtttctctcaacaccgggtccccatcaattctcccaagcttccacaacattcaagcaaaacaacattcagacagcacaaactaccacagccaagagaacatggcaaaggcagataactctgctcaaaacaccaaccaaaatcacagcttttttcacttaaagaccccagtaacaatatcttctatccacattcgtaacc

SEQ ID NO: 205286 - DNA, 401 bp, Glycine max
  unsure (1)..(401): unsure at all n locations
cgtatatctttttgattggaggtatatatctatggtcttctgatcacttcatactatcatatatatttctaatagaaatatacactaaataagttcttttactcttattcggaagggaaaggtggtaaacttacaataatggtattacgaccactgcgctcactttaattttattaccaagacaataattattttattctctcacttcgcncaatctaggaatcggaacctatgcccatataaattattgttatctctttatcaaataccatagtaaaacgctctccccaatgataacattaattctcaaaagtatttcacctccattatctttatcaactatatcgccccactgtcacttataatggtgatacacatattttctacctataattcaaatc

SEQ ID NO: 205287 - DNA, 307 bp, Glycine max
agcttataagaacataatagccttaatcatttccaaatatgcatgtgaattaggacgcatcaacaagaatcaagccaaggctattgtgcaagcaatcaatggggcaaaacacaccaaatgattataatgatggatggctcaaattctcacaaaggtaaaatcatcactttcaaattgagctttcaaaactatcatggcatgtagagaagaatcaaggatttcaagtcacaaaatgtcaagaacttctattttcaaaacaattacccatttcttgaacatatcctataattaaaagaaaacatgcaaa

SEQ ID NO: 205288 - DNA, 348 bp, Glycine max
  unsure (1)..(348): unsure at all n locations
agcttcggaaagaggaatgtaaccaatcacttgtagacagnttgatcttgaaggatgaattaaggatttgcctaaggtccaagagaagcttgtctcagcggttatgcgagaccgagaccaacatgttagccatcctcacgaacccttctttagtggacgtagtggtggaagagacttccttactccaccctactcttcctccaccatgacttagggagnttttcttttcctatctccttctttgcttttattacacttgtctgattctctttgatgaattaattgtttttaatcttttaattgtgctacattgaggacaatgtgttgtttaagtatggggggaggggg

SEQ ID NO: 205289 - DNA, 365 bp, Glycine max
agcttatgcgcatacttctttacgaacgttcactagtactagacattcttatatctaagaaagatgcacccatgtacaatcaaggcaccttcgttacctagattatttatatgttcttccaaggtgtattttgtacctacatctcatgcacttccttggctaaatttatatacatgcgtactcaaagcatttgtggtaccaaaaattgcacaggtgtacattctcgtatttctaatacttatgcatatacaaactttgtgatgaatcttggctatctacacaagaaagtgatacatttcatgctttactcaagtgtttttgctacctaaagccgcatgcaaattctaagattatttcttttgctg

SEQ ID NO: 205290 - DNA, 438 bp, Glycine max
  unsure (1)..(438): unsure at all n locations
tcgatgacgcttgcaagcttgaacaattattattatccaaagaagtctgctgtatgagaattacaaacttctattccatctagngaagtagaggaaacaacacatgaagagaatggtaaatgcaaaaatgacaaaatggctggcaacacaggtaaggaagtggacaatgctcaagcaacaaagtccatgtcataccatgcaagagttcctaagccttaagaggaggacctcaatttaccaatatcaagaaatagtgctactaaaataaatgattctctgtatgaatctctttcacctaacaaggaaactatgttcttcactggttgccgaatcagtcacaccccttcacgctctctatcttctgacatacatgtggaggtttctgatagtggttcaccaacactgacagttgatgagaaccatgagaacactacagat

SEQ ID NO: 205291 - DNA, 348 bp, Glycine max
  unsure (1)..(348): unsure at all n locations
agctngtaacgtggtcgggctaacaagaaaattatggtttttcttaaattctaacanctaggttcaaggagagcattcacctattccttgtctacttaaaggaccactttttctttgacctcccaacctttattgacatgccacaattaacagcgcccacaggtttttttttttcntggtatgcatttgctttcagatcatatttcccccttttctttctacgatgatagtgattacaaaagaatgtagttctgattctctatgtgtttgttactcatattcctggaacataatttacccaacacactctcccaaatttgaacaaatttgtcttgaccataataatgc

SEQ ID NO: 205292 - DNA, 404 bp, Glycine max
  unsure (1)..(404): unsure at all n locations
cttaagcgactgaggctgcatctgaaatttatgctcaagtccttgttttgtctatatgaactcttttgttttggctcttggatacggtcacacanagttttgtgagtcgataacgtttcaacttttgttttctctcttgtttggttcaaggcaagaatttaatccagagaaataatcgcgcatagcagttgtatctaattctctacttgtggaagctctanagggctctataacaactatatgtaggtcatcgttggagggaataatataaactctcgcgtgatctgttctccgaaccctaattttggatccaatctgtaatggattgatggcagggcataaccttgctttatatatcttgttcacatttctgaaggaaattttcattttgacatctttaaaaa

SEQ ID NO: 205293 - DNA, 371 bp, Glycine max
  unsure (1)..(371): unsure at all n locations
ggcttgttggattttgctgaaaatcatgggttgttctggttgggntacaagcctacaagtgctgataaaaggaggattcccttggaaagataagagaaattgcttgctcgtttacaagggctaaaaccgcctgtggagagggttcctatttgtcacatcaatgagagctcttgagtgtagggtggatttacgaagattgcggtgctatcgtggataaagagacacaccaggatcatccgaattgcgtgcagccatgtcctctggacttcgaattgaaaaattggcagccaccacatatttttgtttctgattcgatgtaattaaacacgtttagatactattactatgcctaagggcttagaaatcacata

SEQ ID NO: 205294 - DNA, 369 bp, Glycine max
  unsure (1)..(369): unsure at all n locations
tatgcttgccganatattgctgaggcatantacattttgttcatgaagattgtgtcatttctatgggacgagacctacgacacagccttcttagtctataagaagaccattggcacatgacacgttctgagttgatcctggccagaagtaccacttcttctattactctctatagttgaagaagtcgttagctatccccttatatcagaggaagggaatgtcccgctccctatctacttcattagtcgcatactctatgatactcagaagcgctactatatgatataaaaggtggcgctagcacttattaccttggcccgacattctatgccattctcttaaagtcatcatgtggtctatctgacgaac

SEQ ID NO: 205295 - DNA, 300 bp, Glycine max
  unsure (1)..(300): unsure at all n locations
cacctcttctatgcacactntcaacataatctcaatatttttatcacacgattatgcttctttcttttcacaagaacttgattgagagacatttcacaaacttaatgaaacaaacaaaagcataacgataattcataacaattcaaaatttaatgagaaaataaaagaattaatgaagacctggttaacttgtgatgctaacaaaggaagaagaagatatgacaaaggatgatctgagagaaatctaagaatggagagagattgtgaacgaagaagaaggataacaagtaattggaggac

SEQ ID NO: 205296 - DNA, 344 bp, Glycine max
tagcttctgaaagaggaatgtaccaatcacgagtagacagtttgatcttgaaggatgaattaaggatttgcctaaggtccaagagaagcttgtctaacggttatgcgagaccgagaccaacatgttagccatcctcacgaacccttcttagtggacgtagtggtggaagagacttccttactccaccctactcttccttcaacatgacttaagggagttttcctttcctatctccttctttgcttttattacacttgtctgattctctttgatgaattaacttgttttaatcttttaattgtgctacattgacgacaactgtgtgttaagtattgggggagggg

SEQ ID NO: 205297 - DNA, 435 bp, Glycine max
  unsure (1)..(435): unsure at all n locations
agctnggaagctgccaattgtatntgagaatgctgttattgacacagaaaatgattaagatttatcttacaggtaataaggaatgaagcattgtacttcttactcacctgacctgtgaagctgaggtaacctatttgatctaatggtcacttccttcaatntctatcttttagattctttttattggatgctaaagttaaattataatctaattattctgatgagggcaggagattcaaaaaatcgttgtctttgaaggcgcatttgagaagaatttcagtatcatcaaagaggagggaggttcagatggcggtgtggttgacaggtgagacatagtttctttccagtagtttattaacttacatagttgcatataacacatgatgagatttaaatcatatctataaagcttttggctagctgacatacaattta

SEQ ID NO: 205298 - DNA, 357 bp, Glycine max
  unsure (1)..(357): unsure at all n locations
gctttaatgtangacattatgaattcaaagaatggctatatcattcagggttataggagaatggtgtanagcatatgttaaacttggctatgaatgctcaagaatttgaaggcaattattaaaatttggacttagggtctaactcaatcccgtaaaatcagcttgtaacttgaaaggcgaggactgcccaagctttaatgtacgacactacaaattttagttggaagagaggctctaccattcaggatcataggagaattatctagagcatatatgttaatttggttggctgctcaagaatttgaaggcaattattagaatttgtgctgaaggcctaacttaatcccataaaatcag

SEQ ID NO: 205299 - DNA, 468 bp, Glycine max
  unsure (1)..(468): unsure at all n locations
gcttagtccttctgtccacactntatgaaatgatttgtgatggagatcttataatttggggatgtctttagatagcattaccaatacaagagactatgtattcaataagaatttcagcaccgctgaaggctatttttttttagttcattaatcattttcccattttgtctcatgctcgtaaatgttcatttaataaggaaaatgaataagacggaatttgaaatcttgatattagtttgatataatgaagagtaaatagcatatcgatctcgggatttcccctctctcttgaagaatcactttatttgacagatatgatatacgtccacaaaaaatcagattgaagactataaaagtcttaacatataagcaagcaggattgggttgcgtgtccaccacaaaaagattgtgttgggatagattaggggcatttatggacgggatttgaatttacattttcactgcttt

SEQ ID NO: 205300 - DNA, 269 bp, Glycine max
agagaaatagctgcgagaagatctgcacagaccaaagcttgaagcacgagccggtttgagagcttgagatgagtttgtgagtgattgtgagatcctacaggtgaatgaaacatcctcaccacttgtatttttgcaaatctttcatcttggtcttctctttggtggtaagaagactttcctggatggaaagcttaatcctttgttggatcttccctgtttgtacctgatgtaaaataattctatctattaaagatgtttcgtgtgtttct

SEQ ID NO: 205301 - DNA, 302 bp, Glycine max
aatctcgaacccttagcttatcatgtgctatgaagattcttccaattaatgactattaatgtttcacctaaaccgactaaacatatatttatgattataacaaacgcactatggcgaatatcaagggaattaaatcagaaattttttctgactagctagcgcatgcacatgaatggaatcaatgtatattcacacttccatgggatcgaatcatcagataatatacatataatatataaacccttggctcatatatattgccttgcaagacgtgacaagtgcccttaattaatcctacttat

SEQ ID NO: 205302 - DNA, 339 bp, Glycine max
  unsure (1)..(339): unsure at all n locations
agctngcttgtggtgcttctatggaggctgtatctttgagcttcaatgaggtcctttaatgggtgatttcaccatggagatgcagcggaagacaaaggagaagaggtgagaggaggcgccatccactagggaacaagccatggaagaaggagcttcaccaccaagatgagccttggataagaagcttgaagaggatgcttcaatggaggaaaagaaagagggagagaaagagagagaggggagcacaatattgaaggaagaaaaagggagagaagatgaactctgagttgtgtctcacaagactctcattcatcanagttacaacaagtgttacacatg

SEQ ID NO: 205303 - DNA, 410 bp, Glycine max
  unsure (1)..(410): unsure at all n locations
gagctntgacactattacttgcaggtcacaatcttatgtgtcatcgtctacctagccgaattctccctaatgtcacatctttctttttttctggaaagcacttacatgaactacactctccaataacaccaaatccatgtatctaactacaatccacaactttttatctatcctacaccattctttaacatccaagaccgaataaaaaagaaatgaccgagcactgaatgttaaacctaacgaacccaaaacaactctttcatgagcacatgcatgaccagaccaaagctcagaacctataccattaacttcaatgcaatcttgaataatactacttattactttacctacagtcaccgtactagtgccagaattgttcatgaaccacctcagcaacaaaatccaccact

SEQ ID NO: 205304 - DNA, 371 bp, Glycine max
agcttcatccgcttattcttcagttaagactatgctcagcttaaacagcttacataagttcatactaatttaacctaaactttgtcctcaaatccttcttgtgggactaggcttagataaaacagcattatcatcacaacatattaagaaactaaaacttaatttgcaaatccctcatttaagactaagtttcaatcgtgcttctatcaagttctaacgcaatatgacatttcccaatgctaaagtcacctaactaaacatacaaatgggtgattagaccaagagtgtcataccttaatttcctccggagactattgcttgatggcatgcaacctttgattgaccgcttctaaatacttggcaccctttgt

SEQ ID NO: 205305 - DNA, 346 bp, Glycine max
  unsure (1)..(346): unsure at all n locations
agctcttattgacagccactcatgacacacatgtccttangcttcccttctttgtgagttatntgtgcaatggcattgcagcatggcatccctacatcaaagttgtaaaatcagcacacatgtaggttaggaatgaaaaaaaaaaaactataatgaacacaacctgttagttgccatactccacaagtgcatgtgcattcagcttaatagaccttaacctttattccctcacattgtggacctcatatttcagacctatgttatcaccacaccaaatgggagtccattgatcaaaatgaattttcttttctagtctttatactcattggacataatggccaggctt

SEQ ID NO: 205306 - DNA, 314 bp, Glycine max
  unsure (1)..(314): unsure at all n locations
agctttttggaaatgttttcaaagttattatcttaagtttcaaagctgtaatcgattaccaatgctctaaaacggttaaaaatgaatttgtaagtgtgtaatcgattacacatcatatgtaatcgattaccagagctcttgaacattggacatttgaattctgaataaaattaactgtgtaatcgattatgccaatgctgtaatcgattaccagagaggaattttgagaaaatctgccaacaatcacaactnttcattggatttttgaatggccataaaagaatttaaataagtgacttgggcacaaattttct

SEQ ID NO: 205307 - DNA, 297 bp, Glycine max
ttagctggtttgtggtggatatatttatattcccagcgtgcctttctgggcgatatatttaggaagctataactacggattggtatcttgatctttggacaccttttatcattatttcgaattatagaaccactttgaggggtgttaggtgtctgtaatactgcgagaaagacttatgaacattgtctttcctctggggtatgtctatgctaatttcttataggcgttctaagatttgctgtaatcattgaccgcctattcactctctgatgggaggtttgacgtaactatctaatt

SEQ ID NO: 205308 - DNA, 462 bp, Glycine max
agcttattgtttagtagtgtgataatctcaatatataaaataatcataatgtgtttataaatagtgataatctgaaaaatcagtcatgatatccgcaatgaatttaaaataaaattatatatgtatatatatactccaataaaaatcatattaaactcaccatttaggacattttgaataaataaaatatttaaataaagtctactttataaaattaactatttgtgtgattctacaacaaaaagtctacttttatataaatgttatacataatttaaaatctatttgaccaatatttatttttattatctttatctctattatttaaaatataaccaaccactatctctccttatttttttctaatggtttaccaatcgttcatgtacaaagcattcaataaagtcaatctttattatattattattggctctaccaaactaatattttcgaatgtacatg

SEQ ID NO: 205309 - DNA, 400 bp, Glycine max
  unsure (1)..(400): unsure at all n locations
agctngcaactcttcaaggtatnattaccaatactaaaatacaatanaatcatttattgataaatttcgaaaaatgctattgatagctaaattaacaaatattttttatattcctaatacaatcttcataatcattnttttctcattctcaatatataaagtatttaagaatcaagtaaaataagaacatattcaaaacataactttttatnttatcaaccaaaatctcaaattgtcttgtatatgacataatatcattaaaatcattaacttgaactaatttagaagtcatatctacaagttcaatggttggcaatgtaaaaatcttacacagatagtatattataattaagctctgaataacattatattaaacttctattataacagataaatgaaa

SEQ ID NO: 205310 - DNA, 392 bp, Glycine max
  unsure (1)..(392): unsure at all n locations
catgcaagcttaaagacaaaaagataagaaaaccaattttattctaactcttgatatattgaaaagggtagtcctagcatgggaggctcaaagagaaggctttcaagcagagggcttggaggagcccttagggagcaaagggcaaggctttacataattaaaaggtgtttggtcatgctcctctactggcatgactagaatcccagctcgatttccatgactatggaacaacattnggngtatttctctttgttttattctttgatagggaagcagcatctatccaagaaagatttggggaaaactgagacacagctagagaagcacgaaatgatcaaagaaaaatgctatctccgctttcctacactgncattcattcccaaagaacctga

SEQ ID NO: 205311 - DNA, 330 bp, Glycine max
  unsure (1)..(330): unsure at all n locations
aagaactgggtctngaaaaagcataacaagactttctgtgattggttcaaagataccaatcttgctgatgataatgcttcaaaaacattaagaaagctagcagatgggcctaaaagaaatgttataacttggcaaggatacgacatcaacaagcatttcttttacacaaaagcacaagacgacaaaagtacaatgtataacagcggggtcaccctaagggctgaatctcaacattttgcaagtgtgcatgatgacaatccctgtgtagtttccttcccttatgtcgcaacctacccttcggcaggagggcgacgccaggggctatgggtg

SEQ ID NO: 205312 - DNA, 374 bp, Glycine max
agcttcaacatcagaccacttccagggtgctggaactacttcacatggacttgatggggcctatgcaagttgaaagccttggaggaaagaggtatgcctatgttgttgtggatgatttcttcagatttacctgggtcaactttatcagagagaaatcagacacctttgaagtattcaaagagttgagtctaagacttcaaagagaaaaagactgtgtcatcaagagaattatgagtgaccatggcagagagtttgaaaacagcaagtttactgaattctacacatctgaaggcatcactcatgagttctcggcagccatcacaccacaacaaaatggcatagttgaaaggaaaaacaggactttgcaagaagct

SEQ ID NO: 205313 - DNA, 288 bp, Glycine max
gacttaaggactgagctgagcttgaggttaccaccttcatatgaaacggttggttctacatgctgtttttttgtttgaggccctttagctgcagtctcacttgacgttcttgaaattggcccctttgacatgtttgtatgctctattgaactttctgcctgctacaagtccattgtcttcaaatggctggaggttcagtacgccagtacactccctaacttttgaggaagttatttcctttttgctgccctctcattactttaaggttgggagagcctgctgtaagtc

SEQ ID NO: 205314 - DNA, 444 bp, Glycine max
  unsure (1)..(444): unsure at all n locations
agctntgaaggtgcgtatctccaccatttcttattagaatactggtaatgtgtctactatcatcgtcactcgttttttttttgtcattgaggtgccactttgagctgccaggttctccacctttgagcgtattctttgaaagatttgtgccccctttttgcacatgttctgtagttgcatcctatctgaagacattatactgacactgcctaacgaaagcaaccactangtccttccaagaatggactcgggaaggttccaagttagcgtaccaggtaacagctacccagtaagactttcttggaaggaatgtatcagtaattccttatcttttgcgcatgcccccatcttccgataatacatctttagatggttcttggggcaagtagtcctcttgtacttgtcanagtccagcacctttgacttgggaggggtgatgatatt

SEQ ID NO: 205315 - DNA, 400 bp, Glycine max
  unsure (1)..(400): unsure at all n locations
agcttctccttttgcaaggaanataactaaattgacccagccaggcatgcatctaatacatgtatcatccagactgtctaagaatattactatttcaagatgaaccatgtagacaacaaanagctttaccatcagcaaatgaatagatacaggataagaaacaaaaagctntcaattggcaaacgaggctcattttaccaaaacagagcttanagaaagataagatcgagattatagatatacatggaatatcataggaattgttactactgtgttctaattatcttaatagatatacaaatagggtgcttctcctagcacactttcaattcatattcaatagttcccaatggtaacccaaacaagaacttaatcnttcatatatgcacaagcattaaag

SEQ ID NO: 205316 - DNA, 326 bp, Glycine max
  unsure (1)..(326): unsure at all n locations
agctttgagaactgcccaaactccccctccatttctgatttcaggcttaanaaggtggccttgttggtgcttgcgtgcttagcgcaactccggcttgcttagcacgcataagtgaatnttggcttggcgctcgtcttctcacttagcggatgcatgcaagtagtgcgcttagtgggatgagccctcacttagtgcgtgtgtccaacgcatccttctnttcaaatcttccatacgctcagccgcaagagtggtgtgctcagcggatgacttgctaagccgacagattggcttagtgagcagatcataatcagcacttcacaaactag

SEQ ID NO: 205317 - DNA, 333 bp, Glycine max
  unsure (1)..(333): unsure at all n locations
agcttataccanaggagccagatagttctgctaccaattaattgcgaaggcacctcgccgaatattattgattgaagccaggacaacaaaaactaatcttgttcccaagcacggtacttaaatgggaacataaaagcgatgcttcaagcattgtcatatgtcctttgtgagaaactggagaggcaactgcagatcatggtgattgtctcataagcggtgaagtaaaacttgaagaagaaagggatgcacgttctgccatggaggaactgtgattacatgctctctaagtgactctctccgtctagcattagggagaatgacaagcaaccccta

SEQ ID NO: 205318 - DNA, 341 bp, Glycine max
  unsure (1)..(341): unsure at all n locations
tgcaagcttctagccaaatggacttaccttgaattaattcctttgatagccccttttgagccttggttccctttccttgttntgaagctcactacaagccttaagtgaaaaaccatgatatcaccatatccttaagggaatttggagctctggaattgttttgggaataagtgtagggggtttttgtttcattggacaacttgttntgttggctatgcttcatgatgtattttgggccatacttgatgtacattgtatattggttaaatgttggacatgctgaatgaaatgttgtttctcaaaggctatagagtaaanaataaaaattcgaaaaaagaaaa

SEQ ID NO: 205319 - DNA, 283 bp, Glycine max
tctctgcattgctgctcctcttgtagcctccagagctcttttcccgaaatatgcactgtggtgtgccttggaatctgtgtcaatcatctactaacagtctgcgtctaaaagttgtaccctaaatctgcacaaaacagactttaaatggctctgaattcgtaacgttgcgcttagcgccaccttcgcacttagtgcgggtaagtggattcgagcttatcgccagtcgtgcgctaagccaggctgaagacacctactgcgcttagtgcattgatctcgcacttag

SEQ ID NO: 205320 - DNA, 391 bp, Glycine max
gttaaacgctttattctttattgccatttttttcttcctcaactaaacccatggtggccaataacattcccttaaatcccataaaaaacaatttcacatctctatgtacttcaatctataagctctaatgccttatatcctatagaatcatcagatacggtgaaacgtcttttatataatccatcttttggtaaatcctatcaacaagtctaccttgaacgccatggttgcatgatatacatttattttgaataccacttcaacaactctcttcaacctttgcaattcacaacgcctaacaccatatatccattgattaactctctttatgactctaccactttcataatatacacctatacttggaaacaaactggacatatataatgct

SEQ ID NO: 205321 - DNA, 369 bp, Glycine max
  unsure (1)..(369): unsure at all n locations
gcagcttgaattttattttaaaaatgtttattaacttgattatgaggaccccgagattgacgctttatctatgtttcatgtttttacctctcggctgttttgttaattttttagntgttgggcaatatacttctgatattttatgaacatgtttcctcatgaatgaaactgtggtttggttgatatatcttttgcttgtatcttagacttaattgattacctctggtatttatatctcaatataatttacatatttcttttcttataatggcaaaaaggtggagatatgactctcttgtgtggttaatttcacatctgcgtttaagcttataccctcaccccctataggcctcccaaacaataatagtt

SEQ ID NO: 205322 - DNA, 231 bp, Glycine max
cggccgaaagaaacaaagaaaaacggcaaccaatgaagaaaaaaaagaagccggatccttgcacaaagccaaacaatcaaaaccgaacgaggaaacacgaaccacaaacccgatacacaaacccgtgaggacggctcactcacaggttggaagagaacagaagaccgggagagaagggcaccacctccaggaaagaaacacgaagagcggcaacagacaccccaaaaagac

SEQ ID NO: 205323 - DNA, 383 bp, Glycine max
  unsure (1)..(383): unsure at all n locations
aataattactttcttttacttccttttttatttctgttacttgtttccataattttgcatgttaattgatagggacttgggtattaaggggtgcccaagttcccacatagagtagtatttaagtgcttggttctccccccttaacaactatgctttaagggtgggttcaccaagtgcttgggtgcttacattaataatccttttaccttttactccctccattccaaattgattgatgtttaggcattaataaaatttaatatttactattttntcagtcttcaaacttcaatgagatattaaaacatctatctctatgttgccctctattaatattgagagagaaggatatttatgtaaattcccctataatactattgctt

SEQ ID NO: 205324 - DNA, 270 bp, Glycine max
gtaaactcaatatataagaaattgtctttttgaaaaactgcactccattttatctctttattgtcgtattttaccccaccattatcaatttcagggtaactaccattcatcatgattttaagcttttccaaaaatatctatcccactttctagataacatgaattaaaagaccaaatctccctatcgcttaaagtgttatgtaaagaccacatattaattttatatcttgtaacatgccagcataaataaacatttttcggcttgtaaca

SEQ ID NO: 205325 - DNA, 492 bp, Glycine max
  unsure (1)..(492): unsure at all n locations
cctgaggcatgcaagcttggaatcagcacactgcacattctatactccacagttatattattataatcaaaattgaaaataagattataatgagtcctccattgaataagtcccccatattaagacttacctaacacatctaaagcagatctaactaaaactgaaagattgaccgaatgaacggaacacccggcccatcatttccgatcaaatccccaatcctcctatttatagcatatgacccattcccttgattgcgtccattttgaaatggctattccaaatcgtgattcaatgatttggaatatcatatagattctgcataaactacaacaatgtttagtagacatntttatccaccaatgttagttggaatcaaattaggtttgaatctttaaatataaatattaattggagatttgtgaataaaaatatatttannaaaatattanaatatccattaggttatgataaaaatagtattcacatact

SEQ ID NO: 205326 - DNA, 345 bp, Glycine max
  unsure (1)..(345): unsure at all n locations
ctgaaatcctacttgagtataccctttgtgtctgttatttcccttataatgaatntcttgagtgttntcttcaacggggatacattggtctgtttcatgagcctcaccatagatggtacaacctgtaacctgcaaaatagaagaatgtgtaggttgaccaatagacagtttatttggcaacttaccaagtgtttctgttaaaatctcaagttgcttagaaagcaaattattttgtgccaataaagcgtcatgtgatgatagttctaacaagctcttctttgtgggttgatgggttctgtcgcgcagaatggcatgatcactggctgacatactctcaattagctc

SEQ ID NO: 205327 - DNA, 351 bp, Glycine max
  unsure (1)..(351): unsure at all n locations
cacgtgctcatgcttcttttgttttctgnggctattctagacatcttgccaaacaaagtcaggttaccataactcgcctgtgctttttcttccatgctatatgtatcaaagtcattgatcctgtcaagtttgatgagccggataatgaagccgcattatactgtgaaagttggagatgtattttccccctgctttctttgacatcatgattcactttgattgtgcatctggtcatagaaatcaaatgttgtggtcctgtttatctacggtggatgtacctggttgagcaatacatgaagatcttaaaagggtatacaaagaatctatatcttccagaatcatctattgttg

SEQ ID NO: 205328 - DNA, 402 bp, Glycine max
  unsure (1)..(402): unsure at all n locations
taagcacctgagctgcagcttgaacgatatttaggcttttatttaattcttttaattangatttttttcatattttctttggagtcaaattagtattcagatttaatcagaaaataataaaacttatgcaatcaatttacacaacaaaaagtgattattaataaatcgtcgaatttatccccagaagggcaacaaatacaagttgcgtgagttcttgtaattgtgaatttgagagtttgttccataatcaaaagcattggattgaaggaagatatcttgaaattagttacctcctatgagcgacttctactaaatatatttacttcagttctctacgtgaggtgagaaagataaaccctatattaaagagatatacaaagatgcatgagtgaacgaacaaca

SEQ ID NO: 205329 - DNA, 349 bp, Glycine max
ttatttctaatgaagacaaataatcaagtatatatagctcaaaaaatctgacgtaattggccatgttaagagaaagatatacgactcaattgaagataatagatacaaatagttacatatcaagatctgtgcattagttttgtcatgatataatacgaaaaatagttagaaaaaaattaagatttgataatttattattatatttcacaatttaaattgtagacgatatataaatacacacatataatgcttttacacaattacatacaaacaaataactgtataggattataacttgtataatcgtattataggtaatgtaataaaaaaaaaagttgatataggtacg

SEQ ID NO: 205330 - DNA, 378 bp, Glycine max
agcttccaatagaggctctcttaggcttacttattgcaagccaccctcgcaaagcctccaccctacaccctcgcaaatctggttgtcgatgtagaggcatccatcggaggaagagacagtggtgcacagtgtcagggttgagccaatagaggaggtggaaggaccgacttgatgaggaggaagtcattgtcggagtcctagatttggagggagaaagaaagaggggaaggcgaacaacttgtcatcgaggttgtcatggaggtgagaggaggaaaggcaagggcaagaagggttccgagtagaaatagagacggcgaatggtatataaagagaaggaagagaggctacgatcgttggattagagagagagagagagag

SEQ ID NO: 205331 - DNA, 390 bp, Glycine max
  unsure (1)..(390): unsure at all n locations
taacatattggtatatttttttatataccaggttactaatgtatatatacttgttttttttaatatgaatacgttagcaagttatacctagatattgtcttaaaatacaccaataatatacctagatattttaattaatatataattagaagtatattattattattattattattattaccaaatactccaatatttctatgataaaagcaaatgcactttgacaattaaaaagttacctttcttataaaatatgaattttctatgagtctagcatattctgattaatatataggaaaaaataaaaaaatattagtcaattcaattgagaactgatgaanaccataattgtatttgttggagaacacatgaatcgtccatgtcattggt

SEQ ID NO: 205332 - DNA, 364 bp, Glycine max
caagagccctctctcaaaatgatattatacaaatttacatgaaaagaaattatatgttggagaaataaaattttgctatatttaatgtttacataagcggaaattcatctttaaatcgacatgcgatcaaacctaattattcgccacacggaataataaaatcatcacattaaaaactaaatggagctcccttaactatgggcccagccatcccttgaaataaccctcaatattacgtctaatgtggcattaatattgtaaagatatggaccatttatataacataacgtagatgaattatgtttttactctcttaagccatgatggacttcaaagaccatgttctgattatttactctaaatt

SEQ ID NO: 205333 - DNA, 372 bp, Glycine max
  unsure (1)..(372): unsure at all n locations
ctctaagtcacctgcngcatcaagctttctttccactatgttgataatattatngngaagnnccctaattgactgttgatggtctttccttttaatatataaatcacttatacttatgtggtattctattatgttgctcaaacctgacaagaattattttgatgctttcctagctgactttttttttatagattttcttttaattataaagagtttgaatagcatttgcttttaagaggtttgatctttgctataatttagtttagctgacctcgctggcaaacttaattttaaaattaaattcttgtgaaaggttaaataaaacaatcatgtcacttttttttttgttcaactcaaatttctgtgcattat

SEQ ID NO: 205334 - DNA, 248 bp, Glycine max
ggggaaaagggaaaaaatttcgccttacaaaaagagagcggggaaggcacacaagactaacggaacggctcaacaaacctcacagagggtcaataaacagcagaagggggcctcgccgaacgcgagcccaacccacgttaacacaaaacacgaaagatagaaaagggcacagcacagatagaaccgaaggcactagaacgaacccacaggcacccagaacgtaaaaaaacaagcgacatagaacgaaa

SEQ ID NO: 205335 - DNA, 386 bp, Glycine max
  unsure (1)..(386): unsure at all n locations
agcttaatatgcttaaacataagnttgtttttctaccctaganggatatgccataaggaggttctacagactgcatacatgcttctttggattggagcctaaggagaaaccacatattgatgcttatcatcatgaagttgggcatttttatcaaactttgaaccactcctgattcactcaagaaactcccttcaacatgatttgcacgtggcaaatgtatttctatgctacatctgatcacaccttctcttttatggtgttatttcctttctctcaattcttcttcacacattatgtggatcccatcactgaagaagttgaatctgatactaacactacttttggctccctggttgtcaagtgatgaacatcaccatctaagccta

SEQ ID NO: 205336 - DNA, 391 bp, Glycine max
  unsure (1)..(391): unsure at all n locations
tgagtttcaataattatcaatcatctttgaatcgtctatctttcaatctttntttcaacatcatctctcaaacatctttcaatcaagcttccaatatctttctacagaattttctaattcatttctcttcatctttctaaaagttttttatcaacaccttctcttcaaagaaaagttctttgttcaaaaacttgtgttattcatctttttcattctcttctccctttgccaaaagaatgaaggactaatcgcctgaattcttttgtgtctttcttctcccttacaaaagattcaaaggactaactgcctgagaattcttttgattcttcccttccccttatacaaaagatttcaaaggactaaccgcctgagaattctgtgtcctaacaca

SEQ ID NO: 205337 - DNA, 339 bp, Glycine max
  unsure (1)..(339): unsure at all n locations
tctttaatacgacatactcaaatgaacttaagctctcaaattatttaattaccttgtcgcattgccatgcatgggatccgattttatcttgcatgtttgaggtagtggtaattcatacaattccattcacattggacattggagtgtctacacagtttttttagcaaaaatgtaaatgtcaataaacttaataaagacacttgtgatagaaaattatcaacagtttagaaggacatgcgaaatcatccagattgataattgcattatttgtatactcanactgaaatatcaagctcagctatagataatgctgatttgtaattaagatgtgtggattta

SEQ ID NO: 205338 - DNA, 274 bp, Glycine max
acaacaagaggcaaagtgctgctgataatgcaactagaaccccacatagccctaaaaaaaactccatctatctgatctctttgagtcagtgtatctatgaactatctgatgcttcctaattatggttgtgtagtgtctatgtcgggtatttttataagaaagtgttgaatatatatgagaatgcgtggctgttgactatgaaaacaacataatattatttgtatcctctgataatcctcggttgaccttttgactcacgttatggttgaatatt

SEQ ID NO: 205339 - DNA, 368 bp, Glycine max
  unsure (1)..(368): unsure at all n locations
atgcaagcatatcccaagctgtattnncggattttatgatggataannangttttttcacctcctgcaactgccaaattcatggggtatgaaataatgcatgttacatgaaaaccgtgaaaaaaggatccaacgacgcttagttctaatcatatgcctacagtcaaccaccctatcagaaagcataactcatttcaaatcaccaacccaatatcaacactgtactcgtatcagcatgcaaaactctgcctactcaaataacctaggatgccaattaattattaaaatgtccacaccactccttgccatagaaagttctgcaatactattagccaggttttcatagaacataaacagaactagagtacc

SEQ ID NO: 205340 - DNA, 376 bp, Glycine max
  unsure (1)..(376): unsure at all n locations
agtgtccatggatttctgtacggagaaatggaagatttaacacataagggtgcgcgttgaagtactaatatggcccatatcgtttagaagagatagaaataactctatatcttatgtataaagaagatttgaagccatgtatactcatacctttctcggccttttggctaagatcaagtgtagtatctggtcttatcagtttaatatctgatatgtgggccattggtccacacgatattaaattactttnttaatggggagagtccaacacagtagcgggctactgtgcctctcaagtgtcgcccatgcgttgcactatagcatgggccttgcacacactataactacctttatatctttcttggctgtgaaacat

SEQ ID NO: 205341 - DNA, 408 bp, Glycine max
  unsure (1)..(408): unsure at all n locations
agcttaaaaccctntgttcattactaaattagctgaaattaatcataaggacaagcaagatgtcctaactacatgcaagagataagaatgcaaatataaaagggaaagaaaagctgggttgcctcccagtaagtgctaatttaccctaagcttcgtcctcaaaatccctttgttggactagacttaaaccaaacaacattattgtaacaacatatataaacccaagcttaatccgcaaatccctcttgtaagactaagttccaatcctgcttcaaccaagttctaaggcaataatacatttcccaatgctaaagtcacctaactatgcacacaaatgggtgatcagaccaagaacatacatgaattaagcactaaaagaagcattgaccacaagaaacacaatcaatt

SEQ ID NO: 205342 - DNA, 465 bp, Glycine max
  unsure (1)..(465): unsure at all n locations
ctaagcttgtatcttttatgatgaagcagccatgaagtattnttctctaggtgatgctagctgcataaatcaaaagacaccattggtttctatcttcaactaaaccctttgccagtccatttagataaaatataaacataaaaaaaatccaggttttcatgcctactctagtcatgatgatgaggttttgggtaatgaaacacaaataactgttaaattttttgagagaactaaataagaaaaatcctaacaataaggggaaaaaagtaattaagaaaatcaagagatgtacacattacagatgtacaagaaagaaggataatgagacccctagatcaaccaaaaaaaggatatttagatttccaaatgtttttattatagggtttaagagattcagatttcctaatgggtgtgcccctgatggtattcctattgagtaccatggtgaagtttacaattgacatg

SEQ ID NO: 205343 - DNA, 388 bp, Glycine max
  unsure (1)..(388): unsure at all n locations
agctngaatcggacatccgtgtgacaacttatgaccattttgtatttctcaagagcttccgttgtgcaatttctatcctctcgacatattatgcgctcaaatcggacatccgtgtgaaaagttatgactatttgaaattctcgagagtttccgacgtttaatttcgagcgtatcgatatattataagcctgaatcggacatttgtgtaaaaagttatgaccattttaatttccaaagagcttccgttgttcattttcgagcgtctctatatgtgatgcgccttaatctaacatccgtgtgaaaagttatgaccacttgaattttcaagagcttccgttgtttaattntgagcgtctcgacatactatgtccccgaatcgaacattcgt

SEQ ID NO: 205344 - DNA, 384 bp, Glycine max
ttgatgcaacatatggagatgttaatgaaacaacgagatgatgcgctccttgagaggttggatcaaatggagaatagagatcataatgaagaagataggaggagaagaaggaatgatggtgttcctaaacaaaaccgaattgatggtattaaactcaacattcctccatttaaaggaaagaatgatccggaggcctacttggagtgggagatgaaaatagagcatgttttctcatgccacaactatgatgatgaccataatgtgaatcttgccgccacggagttttccgactatgctcttgtgtggtggaacaagctacaaaaggagagagcaagaaatgaagagccaatggttgatacatggacggagatgaaatagatcatg

SEQ ID NO: 205345 - DNA, 374 bp, Glycine max
  unsure (1)..(374): unsure at all n locations
catgcaagctttgatgcaacattnggagaggttattgaaacaacattatgatgttctccatgagagggtgggtcaaatggagaatagagatcataatgaagaagaaaggaggagaagagggaatgatggcgttcctagacaaaaccgaattgatggtattaaactcaacattcctccatttaaaggaaagaatgatccggaggcctacttggagtgggagatgaaaatagagcatgttttctcatgcaacaactatgaggaggaccagaatgtgaagcttgccgccacggagttttccgactatgctcttgtgtggtggaacaagctacaaaaggagagagcaagaaatgaagagccaatggttgatacatgga

SEQ ID NO: 205346 - DNA, 440 bp, Glycine max
aacactaagctatgctgcaacatttatatatacctgctcagcagcttttcctacttcaacagaataattatgacctttcaagcaatagatacaatccaggttggaggaatcatccaaatctgagatgggcaagtcctccacaacaacaacagtatgtccctccttttcataatgttgctagtccaagcaagccatatgttcctcctccaatacagcagcatcaacaacagcagtcacaacatagacaacaagcaactgaggctcctcctcaaccttccttataagagttagtgaggcaaatgaccgtccagaatatgcaatttcagcaagagacaagagcctccattcagagtctgacaaatcagatagggcagatagctactcagttaaaccaagctcattcccaatattctgacaaattgccttcacatactatgcaa

SEQ ID NO: 205347 - DNA, 434 bp, Glycine max
  unsure (1)..(434): unsure at all n locations
atcctctgagncacctgcngcatgaagcttgacanacaccttgtcttctgttctctctttgncnccggaatacataacagatcaacctgttatttggttaccaatctacgaatggatgaccatttcacccctctccccagccccctaatattataagagataatattcatgatgaactggttctgattcctaattcttgtgcttcctttctgtctttaatctccatatctgcganttttcctatgattaaagattgctctgccccataggtcagccccaacccttttgccacttcccattgagcattatcctcatcccggatcaaagagtctgctgaacttgatgcctggttgaattcgagctcacttatatcatggtccaatngtgtctgtgatccaacatcacactgctggaatgtttctaataaatatgct

SEQ ID NO: 205348 - DNA, 422 bp, Glycine max
  unsure (1)..(422): unsure at all n locations
ccaaccctattacttgccttttggcacttagctntttctttttattaaatagcagcacacacacacttttattttataattacatttttttaacacaattatctgggtgtgttgctctgctcttaccattccattcctttttaccccgtagctcccccaaatttgggacaaatttgttttgacatataattcccccaaatttgagacaaattttccttgaatcaagtctttctatgaatgatgctcttctacaacctaagacaaggtagcaggagattaactatgcaggctcaaaggtcaatcaatcaaacattcattctggttacactgtgtgcaagggataaatcattcatgcacatggtcagctttttggctaaatggctatttacaaatcaacatgggcttcataatcctaaattcat

SEQ ID NO: 205349 - DNA, 318 bp, Glycine max
gctgtacttttgagtactcaaaagcctaattttcttaatgggcttataaacttgcttttttaatcacttaacaactcataatggcataattgaaaagctatgatttgtgtttaaaggttgtataattaaacatcaaaggtttggactcacaaatttccattcataagatgtaaaacaattataaagatacattggagaacattcaccatacaggatgagagcaaattgaactaatcaaattgatggtacacatacgaataatagggactacaataatattaacttatataccggtaaatacctgctacacagtaattt

SEQ ID NO: 205350 - DNA, 227 bp, Glycine max
  unsure (1)..(227): unsure at all n locations
aaaatcatctntaaaaaaaattatgagtggttttataaattaccgtcttatgtatagaacaatccattttatgttgctcttctctttttcttttttttttctctaaaaaaccttctacagaattaaagatgcttatccaaacactagaagttggtttaatcattaagattgagtttgttctaagcttatgctattgtacgatgtcatttcccaggcttttgatgctc

SEQ ID NO: 205351 - DNA, 395 bp, Glycine max
catgatcgaactactaccatgtgtgagggtggatgaactatgtgaacacaagtgttatatgcataagaagaatggaatagagaacatattaagcaaataaactgcttttgaaacacaaaattacaatataaactcttcagaaaattcactaattgaaaaacatggcagtcatataattcttatttaaagaccaacaacacagagggtactgggtcaccagcactaatgaacttcaaagtgacatcttcaaatgacaatatgtaattgatctgcgaatcatattcctgttagatacgattgttcttttgaattatcaaaacaaactctgtcgacaggctgatatgcacgttgattcatgatataaaaaaacaatcacagtgatcaaccaaatatca

SEQ ID NO: 205352 - DNA, 233 bp, Glycine max
aacgccctaaatgaccccctttagagtgaattaaacaacttgcttctccccttctgaaagaacttcgtatgtctgattccctttctgatggagggtatcttaggagcaaaagctcctgttttgacgctctctatactagaaaagatatatagtttacatacataatattacacaattctaagttaaagctgttgtcctttgtgacaaacgtgagaggtgctaataccttcctc

SEQ ID NO: 205353 - DNA, 87 bp, Glycine max
agattatttgctataaataacttgagaacttaggttgccacagagagtggcaaatactataaatagagcaatattaatatgacagaa

SEQ ID NO: 205354 - DNA, 390 bp, Glycine max
  unsure (1)..(390): unsure at all n locations
agcttaaccttgacgtatgaatctaccttatttatgtcttcctgaatgggataggaccacaccttaaatgaaaaagtgagattcatgcatcgaataacttttggagtatcacaaagttattatttatatggatcgaagttggatgaaggaaagtcgcatacgccctgtgtatgacgaaggtgtggaacacgtcctaaaaattgctttatacagaagtcgaccgaatgaaaacgggaaattntttttgtccatgcataaattgtttgaacgggagatagaaaatactcgatgacatattggagcatctgttgtgagttaggattaagaagaattatacaatatggatatgggcaggtgaatcgacagacatgcagagtgggtccaatctga

SEQ ID NO: 205355 - DNA, 358 bp, Glycine max
ctaagctggatttctttatagggaatcatcctttctaaatgtgccaaccctgtccccacattaagaactagctcttttcttcttctattgcctttagttgaatacacctttttttggttctctatttggttcttaaccctctcatgcaacttatttacaaactttgacctagattccctgtctatttgtataaaagaagtgtcaagtggaaggggaataaggtctaagggtgttatggaattgaacctataaacaacctcaaaagggaatgcttggtgttctatgacccccccctgtggaggcaaattctacataggaagatactcatccaaaactatggttgcctttcaaaaaaccc

SEQ ID NO: 205356 - DNA, 375 bp, Glycine max
  unsure (1)..(375): unsure at all n locations
naagctttattttaatacttggaagcatgtatttacgcctaggaatctaagtttggttttgaatgtaaaaaggcatgaatattaggacatgtttgagaggttgttattaaaatttaaatttggctgccccatgaggaatactttgcacctaggtagcatggaaaatacctttcaacagtatgtatatatgtgaatatatatatagcatggaaatgccttgcaaaatgttgaataaaatgccttgcaaaatatgaatacatatagcatgaaaatgccttgcataatatgaatatatatagcatgaagtgccttacanagtggtggatgggtaacgaaaagtgtgtttaaaatatgtgtatttgtgagaggaacaaa

SEQ ID NO: 205357 - DNA, 414 bp, Glycine max
tcgtcctcagatccctcttggtgttctaagcccaattgttacagcccttttaggtgagactaacttatactgagtttcgtccgcagatccctcttgttagactatactcagctcaagtagcttacgatagtttagcctaatttagcctaagcttcatccgcagatccctcttctaagactaggcctagactatacagcattattgtaacaacataattaaaaccaaaacttaatgtgcggatccctcttgaagattaagtttcaatcctacttcaatcaagttctaaggcaacagtacatgttccaatgctaaagtcacctaactatgcacacaaatggatgatcagaccacaagcatacaaacattaagcattgaaggatgccttgaacacaaaatacataatcaataagata

SEQ ID NO: 205358 - DNA, 451 bp, Glycine max
  unsure (1)..(451): unsure at all n locations
actccatttgatcatttaatttcatttcaatttcaatataaacaatttccaatggtgatttcttttgtaatgaaaataaacaaaagtcaaggttaatctctcaaaagtattggaatttaattttcaagaccattttttttcaaatggacaattgtatttttcaattttaagggttacaacatgtaagagattgaagactcttatatgtaatgattatgaacataattcaaatatgacttcaaatgttgttatcgataataagtctttcaaattttaaatcatgtaatgttactatgtattattttctatcactatttcttatatactctntaatatttattagcatattatttctttatttgtatactcttcaatattgatttcttggattaaattgaccatgaaatgtagcataatattgaaaattgacacatttatataanaacacact

SEQ ID NO: 205359 - DNA, 462 bp, Glycine max
  unsure (1)..(462): unsure at all n locations
tccttgagaagctagaggggggctactcacacccttccaatagctaagttcaccccatgccaaaatacatgaaaatacaaaaaagtccctactacaaagactactcaaaatgccctgaaatacaaggctaaaatcctatacccgtaacttgtacccttaatttgtatggtaccctacaaacctaaaatggccaaaatacaaggcccaaaagaaggaaaacctattctaatatttacaaagaaaagtggacccaaccttggcccatgggcttagaaatctaccctaaggttcatgagaaccctatggccttcttcatcagctctagcccaatccttttggagcctcttgctcatgactctggtgactagccccttcttaaggaggaatgcatcaatgtgattcttgatatatgctctctatgactgtcattntctaacttgaatgcatatgtatgttgatatg

SEQ ID NO: 205360 - DNA, 390 bp, Glycine max
  unsure (1)..(390): unsure at all n locations
gagccaaaatcctaactcaccatataccttgacctanggtgataatgtcaatccttaccctcggaagcaaaaaagaagagaaggaaaatttccaatcaaagaaaaaaaaaagagaaggaaaatttccaatcaaagagaaagcaaataaaaaaaagagagaaggaaaatttccaatcaaaggaaaaaagagaggaaaggaaattcccaatcaaagagtgggagaaagcgaaaagaaaagaaagaaaactcccaaccaaagagtgggagaaagtaaaaggaaggaaagaaagctcctgatcaaggatcgaaagaaatcaaaagaaatgtgcagaaaggtctttggaccggacaatatctgtacaatacaaaattgtcaccaaatgaacaaaa

SEQ ID NO: 205361 - DNA, 344 bp, Glycine max
  unsure (1)..(344): unsure at all n locations
caccgcaggggatggattcaatgtctttccgcaagcggatattgagtttgatggacaccgtttccgaagtgaggagtgatgtgtcattattttctcctatttcttacccctttctgtcaccattttaattactgattagcctttattgtcaaattaattatgcaagttttatcatttgggcctacttgactaattatgtgttttaatttaatttcaggaaaattataagcaattgggctggaatccggaattgggctgaaccggcttggacttgaagagagcaaacaattttatttgtcgtccagttttattttatttcanttttgggctgtatttntgtaatt

SEQ ID NO: 205362 - DNA, 342 bp, Glycine max
  unsure (1)..(342): unsure at all n locations
ctgaagatgccgcttgcttcaacaattattctatgtacccaggttttccatttgnacatgactttattctcgtttcattactttccgaccccctttgacgtgcttcaccatttattaagtcatttctcgcctaacaaaaaataaaataaacttccaccgatcattggatttgtaatatccgaaaatgtcggttaaaatgaattccgaccgttcggtcgtgccgtaaccacgttggaaataaaaaaataggtgaaataataatataataataaaaacataccttttagtaaaataaagcgacaaaatcaatcggacgctctctctttgggatatctcattctt

SEQ ID NO: 205363 - DNA, 449 bp, Glycine max
  unsure (1)..(449): unsure at all n locations
caacattcnacagcgcattctatctcttctctagcaaacaaagcaaaggcagaatactctgtcaaaacaccaaccaaatcacagcttttctcacttatagaccccagtaacaattccttcgatccaattcgttaaccgttggatcgactccaaaattgtactggaagtctatagtgcataagcctacattttgaccgttgggatctactagcgaacatccagaactcattctacattactctttccacaaccagcaaatacacggatttttctgcacttgtgcaaaattctgctgcacaattttacagcaaaatctgcacaaagagcatatttcgaaaaccacacttgccctcatccaatcttgcccaaatcaaatcctacaagtcccacatcatgtatcaatcatgtctaaaccaaagtcaagcttaaaccacaacaacacaaaatct

SEQ ID NO: 205364 - DNA, 331 bp, Glycine max
gacgaagaatgcgaacaatctcttttatccttcaagtaaagcattgctacactgctgggcttgagttgactcaggctaggagtacccatactcctatatctctcagttagcaacgaagcattatctcaacccttgtacaagaggaagggaagcactcgctccttatctacttctccaaccacatactccatgatgtcgagaagcactaccaaatgatagaaaaggtgacacttatactcattacctccaccagtacgaaccccgtgttcccatgcatacacaattcatggtagacttcttggtataattcgcttggaatgaccaaccaccc

SEQ ID NO: 205365 - DNA, 339 bp, Glycine max
catgatttacattgtgcccttttttgatgtatgactaccacctatacgttatgagcacctacaaggataatattgtttcgcatataatttctccccctggtgtacatcagattgctttattgagacaattgacgatctcatatttttcatatatagaaagtgttctcataaaacaatagatattgtgaaatatactctcttcattagaagaatatttcaataaagatcatgctagaatcctcttagattctgcatgtgtgtggccaacgatctctttagagataacactgtgcaatgaagatctttggaaattctctcatcgaattttgagaggataag

SEQ ID NO: 205366 - DNA, 289 bp, Glycine max
cataatactatcgagacgctctagataaaacaacggatgcactctggattcacgcgcataatataacgagacgctcgaaattttaaggcacgtaatatatcgagacgctcgaaattgaacaatggaagcattctagaaattgaaatggtcataacttttcactagatgtgcgattcaggcgcataatataacgagacgctcgaaattgaacaacgtaagctctcaagctattcaaatggacataacatttaactcgaatgtccgatttaggtgcatcacatatagagac

SEQ ID NO: 205367 - DNA, 326 bp, Glycine max
  unsure (1)..(326): unsure at all n locations
cctggatcgtctcatcattgtgttctttgtctttntggagattaatggcagcggaatggataatgaacataaagaggagacgcctcttctatgagaagatgattttataaaacgctcaccaccaaatgaggctatggattatagcttggaggaagaaagagatgaatgaagggagaggataataacagcatgatattttgtgctctaatagagctctgaaatttgaagtttaatctgcaaatgatcaaattcggaaaaatgcgcacacgtatcctctatttattgactattttgtacataagaatggatggaaatttgaatttcta

SEQ ID NO: 205368 - DNA, 320 bp, Glycine max
  unsure (1)..(320): unsure at all n locations
aacaaaaataatnngnaaatgtntgaaccaattgaaccaatttgacccaacccttttatgattgattatggtcacaaatccaccccaacctaatttattgatatttgattaagttgaatcacagatttatgtcaaatcggtccaactcgacccaagaacacccttaacctgtattctgtctccctccttctctgngtgtgtgaagtacctgaaaaacactagataatgaagggggggggggttgaatagcataatggattaaacttagtctttcagaaaccttgaaagctttttctttaacatatatcaatggacaatgg

SEQ ID NO: 205369 - DNA, 363 bp, Glycine max
gatacaccatactgtagtcattccagattgttatttctgtaaatattctcaacagacacatcttctcatttggatgttgaatggccatcaaaggcctatatatatgtgacttgagacacgaatttgctaagagttgtctgaacaaaaaggtcttatcctcttaaaaagcaaaatcgttgtatgctcttacaaattccttggccaaaacacttgtgattcaataaggaattatgtgagtgctcaaattgttcaatctatctctttcaagagagattacgtcttctcttgttctttattctgaacagggattaagagaccgagagtctcttgttgtgaaagaattcttaacacaaatgaatgatt

SEQ ID NO: 205370 - DNA, 432 bp, Glycine max
  unsure (1)..(432): unsure at all n locations
agcttatggaggtccattcataanatgttgtatctccatggagnagagtcaatggtggatgattgggcttgtctaatgagttatgttggacactaaatgtgatgatgtttcttgatgaggattcaagatagctcggttttaaatgatatttatgatattatgttattggtgataatagagaacttattttaagatattacgttgatgatgataattgaagtcttatgttgagatcatgttgtgtgcataagatgatatcagtgagctataatgttgaatgtctgttggtgtttattgatgaacaatattggagataacttacatatgaattgagttttgtataaatgacagctattatgaatagatctaaacttcataattaaagttattcgtcttcttattatggaatttttattgttatgataggttatt

SEQ ID NO: 205371 - DNA, 406 bp, Glycine max
  unsure (1)..(406): unsure at all n locations
tcaatanatagacctcctattgttaatggagtgggtgatgtgtcatcattttctcatatttcttaaccctttttgtcaccattttaattgctaattagccttaattgtcaaattaattatgcagttttatcatttgggcctactaaattaattttgtgtttgtaatttaatttcaggaaaattataagcaattgggcttgaatccaaaattgggcttggacttgaagagagtagactattntattctaccaaattttatcttatctagattgtatcttatctagatattatttagatttgatctcatctaaatattatttcatctagatcttatcttatcttatctagaatttattttatttatggggcgtggattaaatagatttgtagctttatgctgaaacta

SEQ ID NO: 205372 - DNA, 348 bp, Glycine max
  unsure (1)..(348): unsure at all n locations
agcttttctcagtcgtctgtaggatgtttgngtgttatanaacggcgatgcctactgtagactggttttctcccatgttttagttgtgtgtaacttgtattttcttcacagatggngcaagcatgatgacccttaacactgtaaccgctgagattcccatatgctgggaagtcattaattgtacaaaaaagcatttcacgcatttcaaacgtctccttgcgaaatgcatcaaacactacaaccccctcgtcccataactttcccagatcttcaaccaacggacttagataaacatcaatgtcatttcctggctgtcttgggcccgatatcatcataaacaacatcatg

SEQ ID NO: 205373 - DNA, 451 bp, Glycine max
  unsure (1)..(451): unsure at all n locations
ttccctatatctaaattaagtgcgttcattttttatgattctacaaacctgtatgatgccaagttctattctcccccccccccccaccgcanactttaatgttctaaatttttcttctattctcttcaattatatcctattattttgtgactatttgtttattctttaatataggtttgagcacaaatccatcacttattcttcattcgaactgacatattgcaaaggcatcaaccacatagaggtttatacaaagttaaacgcaaaaatcataatcggggatgccacaaggtttttttctttttctctatcataagtttttcttcccatgtgaagtacattaaatatatctactaaaagatactatattttctattcaaatggtaacttcctaattaaaaatcttattttctgtctaccttcatgcttgttgtcttcatgaacaattgtc

SEQ ID NO: 205374 - DNA, 425 bp, Glycine max
  unsure (1)..(425): unsure at all n locations
ctgcagctgaaaaaaatgttttcatttataattcagcttataaagtcataactccaaatcttcagagtttctcacatttatagtcaatctatataaagcatctgctgtctctaaatggtccaaaagtttcgtctgagcttgtgtttgaagaaggtatatattagtgaaactgatatagcattgtgcttatctttcctgagccacactctggtagtggntaaagcactttatcgtagagtaggtttgatcatagtaggtataacaggcagcgcatcttatgagagaatgggctgatcttttgattgttctcttacttccttggatattggcagaacctacgacgatatttacacattcactgttanatgaatctcaagcataaagcatttattcagtcttaaatgcttatcacaacatggcacatg

SEQ ID NO: 205375 - DNA, 383 bp, Glycine max
agcgttggttcctaggcctaaagtatctttcaagttctcatgaaaactgcctacatgctaaaaaaatggcaaacattcgcataccaaattgtgtcatatgttattcctcacaaaatcatgcgcaaatgccattgaggcatttcaccaagcacttggtgggagcatgtttaggcatgaatagcaagggaatgggggcaatgtggcatgcccagtcttttcagaatacaacttaggcctaaggccattgcctacaaccctccaactcatcaagaacaagcaacaattcaaggataaatccctcacattttttagcaaatacatgtaacttagagcaccaaaatacatcaatggaaagctagagagcccaagaatgaggtacttac

SEQ ID NO: 205376 - DNA, 415 bp, Glycine max
taatatggtccacactttttgtaggggccattcttggatggccttgattttctcatggtacacttggaccacgtttctaccaacttcaatacctaataaaacgtatttatctacacaaaaggtacacttctctatatatgcatagagggtgttcttcctaacgattgaaagaactgcctgagatgccctaagtgatcatctatgctcctactgtacactaaaatatcatcaaaataaacaactacaaatctatctatgaaatcccttaagacatgatgcataaacctcataaagttgcttggtgcatcagtgagcccaaaatgcatcactaaccattcatactaaccatacttggttctgtaaacgagttgtcactcatcaacacttttaatcctgatttggtgattaccacttt

SEQ ID NO: 205377 - DNA, 397 bp, Glycine max
  unsure (1)..(397): unsure at all n locations
agcttcctagcggnacctaattatatggtttcttatatcnancanangctgacaaatagccaagaagtccgtggatttcctcgggggcgacgtaagtatccgccatcgctttggccttggcaagcaatcggggaagttcttgactcccgttcaaggtaaaagcaaatcggtccatccacattgttgcctcttgatgtaacgagtcgatcacccttcctctagcctccttttctgcgtacacttgggcatactcgtccgccactctatgctcgtgggtcgtggctagatttagttcttcttggtacctgctgacgatggctagcatgttggtctctgtttcgcataaccgctgagacatagttcttttggaccttgagcaaaccttcagctcatcttt

SEQ ID NO: 205378 - DNA, 361 bp, Glycine max
taaacacatgaactttgttgtttaacaactggtgaaagagaagtgatgtatatcgacaggttatattggccaactattttaaggattgcataattatgcaaatatgtgaagagtgccaaacatgttacatcaacagttctaacaagtgattacattcgaaaaaaaacctggcttttcaggatggacattaaatttgtaggcaaattcatccattttcctcgaaggacaaagagatcttagtgttgttgattattttacaagtgggtaaacaattccttaaaatgtgatcaagggattaactattcataaacaaatatattttgatttggatccataacacttcaaatataaggacttttta

SEQ ID NO: 205379 - DNA, 381 bp, Glycine max
  unsure (1)..(381): unsure at all n locations
agctgctacctttaatttgtctaggtttccatcctcgacactagataatctctttcttcaacaaattggactgagagcttatggggcttgtgtactgtctggggtctgccaataacatgatgagtgacgtgatgttaaagtacacacattaactttcctcgtgagccctagatctagaatgcagatgatcctcgtataaagtcaaccctagctcccggcagccagatggctaggccattatgattctgatatataagaatcttgataaggttgttactctatcattcggttgttacgaggtagttatgcatgatcaacaaagntgttatgttgttataacaaccctgacaagggaggaaccaaggtttcatctatcactac

SEQ ID NO: 205380 - DNA, 363 bp, Glycine max
catgtcatacatcaagttgtttagaacagtcatgcacttggaagaaattccccttttatggtgcactttcttcaatagcctatacacatacctctgcattattagaaaatatgctttctacatcggttatttatgactttcaacatacggttttcaaccgatgttgaaagtaccgacgttgatagtattatcgttaacatcggtttttgaaaaaccgatgtttacgtaaaattaccaacatcggttatataaataaccgatgttgccaatatgaattacacccagaaaatgtatattaatgttgaaaggtaacatcggtttttataaaataccgatgttaacgaatgtgttactatttgacag

SEQ ID NO: 205381 - DNA, 452 bp, Glycine max
tcaccttttggtccttctcatatttgttgcatgagaattcatgctctattttcatctctcactccaagtatgcctccagatcattctttcctttaaagggaggaatgttgagtttaataccatcaattcggttttgtctatgaacaccattattccctcttctcctcctttcttcttcattatgatctctattctccatttgatccaacctctcatggagtgcatcatctcgttgtttcactaacctctccaaatgttgtatcaaagcttgcatttggaattgcgaaaaccccactccatcatcaggattagtacctgacatctcaaacaaacaaatcatatgtaacaagacaattatagttgttggttgaataccttacccactcaagtgtatcacacaattatggcttttctctaatgaaaacactctttgctttaccactctaattccc

SEQ ID NO: 205382 - DNA, 351 bp, Glycine max
  unsure (1)..(351): unsure at all n locations
catgcaagctttatgattgcaattatcctatgttctatacttcttcactgccgcagtcagctcctccatcatctactactcctaatcaaccacaagctatgattgctggatccactaatactccatctagtagctggtttcctgattctggtgcttccctcttgtgacctcaaatgttcaaaacattcaacattgtgttccctttaagggatctgatcaggttattatagtaaatggtcaaggtttgccgattaaatctattagctcatcttcattnttatctccattcaattctaatgttactcttaatcttcataatctgttgcatgttcctaatatctctaaaactct

SEQ ID NO: 205383 - DNA, 404 bp, Glycine max
  unsure (1)..(404): unsure at all n locations
gtgctcatttaagcttgacattgacttgctacttctacaagaagtctggacacatgaagaaagagtctacaaggtaagttgcatggcgtgtaaagaaaggtaaatctcttgctcttgtttgttttgaagttaatttagcaataacagatcattcccatttatttgcatatctagtgatttttttaattaaattgattgacacgatatattgtcaaagtaatccctattgtaaaaattgatttgattaaaattacatagatttatgtataagattatttatgcgaattgtgttcagcccataggaagacataatttggccaataatatttgtacctgtgatgaaaatgtgtgacaatataggtgtntcatgtgaatatagtcggccaaataaagactatatttga

SEQ ID NO: 205384 - DNA, 401 bp, Glycine max
  unsure (1)..(401): unsure at all n locations
agcttgagatgaggaagtgntgaagggctaatcttcctgtctttattgttgaccacagagtggtacctggagatatgtcgcgggggtcaagagaccttgnggacgtcaggtggggtgctattgcccaaaaccaagcttgaccaatcccgacccaacccgggcatagtcggtcagtgagaacctgtgatgtacctaagcaggcgagctcctggcagtcaacagataaaaggaaaacaagaccacaaagcaaggaggcttgtggtggctggccagctgtgaattttgtgtaatatgtggattgtggcctctggtaatcgattaccaagggtgggtaatcgattacaaggcttataaatgaagacaggaggctaagatggtctctggtaatcgattaccacggg

SEQ ID NO: 205385 - DNA, 371 bp, Glycine max
tcctaaagaagctagagcttagcttttcttacctctctaatagctaagctcacctccttgagatgagaagctagagcttatctacacaccccctataatagctaagctcacccgcatgacaaaaaacatgaaaataataaagaaaaagtccttattacaaagacaactcaaaatgccccgaaatacaaggcttaaaccctatactactagaatggccaaaatacaatgcctagacgaaggaaaaacctattctaatatttacaaagataagcgggctcatacttagcccatgggctcgaaatctaccctaaggctcatgagaaccctatggcctttccttggatctctagcccaatctacttggagtcttc

SEQ ID NO: 205386 - DNA, 430 bp, Glycine max
  unsure (1)..(430): unsure at all n locations
agcttgactngagtcatcaagagattttttattgtgaccatgacatgagttntaaaaaaaatcaataatcaataatcatcatcaatcatctttgaatcatctatctttcaacctatctttcaatatcttctttcatctctttcaactaatctttctgaattatttctcttcatttttctaaaagttttttatcaacactttttctttcaagaaaagttctttgttcaaaaacttgtgctattcatctttttcattctcttctccctttgccagaagaacgaaagactatccgcctgaattcttttgtgtctctcttctcccttacaaaagattcaaaggactaactgtctgagaaatcttntgattcttccctttcccttaagacaaagattcaaaggacaaccgcctgagaatcttttgttccccttac

SEQ ID NO: 205387 - DNA, 339 bp, Glycine max
  unsure (1)..(339): unsure at all n locations
acatcccttcgtataaactttaatggaatagcataataaggaatgcaacnatttgagcgcattattccacctcatacacaacaacagaccatttttattcgacatgtctttcggaccatgaaagaacaacatattcatttctcaatcaagtcacactaaacattatataacaacaaaagccaacctattatcctagaaagcaaacctataacccagtctctgaattgactacccaaatccccagaaatttcacctcaatataaggaatcataacaccaaaaatttataagaatcaatagacaccatcaaacccttaacttgacactaagctttaaaccc

SEQ ID NO: 205388 - DNA, 397 bp, Glycine max
ctgcagcttttatccagggctatctaggtgtttaagctcctttcttcatggcttataccctagaggatggcgccttccttctactcttctcctttgccttccgctgcatcttcatggtgaaaaatcaccattgaaggacctcattgtagctcaaagatccagcctccataaaagctccacaagcaagctttcatcaagtggtaatcagagcacaagagcttcaagtaggtgctccttaaacctccattaatttatttgctttaccttctcttccattggtgtatcttcatttttctccatgtatctcctcacatgtcttgttctaaatgtgtgtaacatgattctttagatattccaccgattaaacttgctatagaagttagatatgattttctat

SEQ ID NO: 205389 - DNA, 294 bp, Glycine max
ttctacctaaaggttacgggaacgatgtattttgtatgattatatatataagtattatgcagcgcatatgcgtatatgttctgggtagaaataagagtagtgagggcaagatacgcggggtaggctaattaaggaagaaaaatccacaactgggaagtgatggggtaattccaaatcaattaggctaaaaatcatcggtgtgcatgcgacttaaaatttaacgaaacacacctttgaaccacgctcggaggtttattccgagcgctttgtatatatattgcttactttcgaaac

SEQ ID NO: 205390 - DNA, 280 bp, Glycine max
  unsure (1)..(280): unsure at all n locations
ttcgtnnaaaaggcatgaagatagatcagtnggagaacaattggatttggttaataaactgattttagatcttgaaaatatcgatgtcactattgatgatgaggatcaagctttgttattgttgtgctctttgcctaagagttactctcatttcanagagactttattgtttggaagagactttgtttctcttgatgaagtgcaggctgctctgaattcaaaggaattgaatgatagaaaggaaaagaactcctctacaagtggtgaagggctgacaaca

SEQ ID NO: 205391 - DNA, 412 bp, Glycine max
tgtggtatcaagagcatctttttctatgagatgttcttttgctttctctatcattttgttttgtcaattcacgttaattccttgttcttcatcttattctccatgtatatcctccattgtcttgagtattagtgttgtttagagtagattcaaaaaaatataccgattaaatcttatatctacacttgttcgtgcatttgtatggttcaaatattatagatctactcttgaatcatgattatgtgtggattttatgtactatcatctttcagtcataatcttcttgtgctgaaccttctgatctaaattttattccaaaatattgattatatagaaacataaaaatctaagtgttaatcacttactccatgttgtcttagagtcacgttgaatcataataattgtcacatta

SEQ ID NO: 205392 - DNA, 462 bp, Glycine max
  unsure (1)..(462): unsure at all n locations
agcttacatcaagtggttattatagcattagagcttcaagnaggggctccttaaacctccactaattaatcttgctatagaagctagatttgattttctatggttcaaatttttggtcttgttcttgaaccatgaattgtgttgagtctaggttcctttgagttttgtcttgctattttttgtggctgaaacctaaaccataaaattcttacaaaaacattaaagtagaataaaacctcaaaaatctagagtgacttgttcacctattgtagttntgtcatagaagtcatgtctagtcatgaaacttgtcacataagatttcttatgttgggctgaattttatttttcttgtttctttgtctaactcatttgntcatgagtgtatgaaattcttttagcctattatttgattcgagtcaaatcttgcattgtaattagtccttaacatgttcattcaaaatc

SEQ ID NO: 205393 - DNA, 388 bp, Glycine max
tattcaagatttgggtacccatatcttgttgggtccaacatagttagtacccttagaacattgtttcttcttatggatgcatctgaacttgaagtgtccagacttaccacaaaagtcacatttgtctgaaatagactatgacttggaggatgttgttcctttttcgaagcccaagccagactggtcatggagatgttgatggaaattcaaaagagtggtgacagtatttgaactttccaagaacttcacaaagtctttagtaagacatgcaacttcttcccttagtttttcaagagtggacgtttcatcagtcttactagccagacttagactctcttctagagttcgaatcttctttgttatatcttcatttgaattccttaattta

SEQ ID NO: 205394 - DNA, 415 bp, Glycine max
  unsure (1)..(415): unsure at all n locations
agcttcgnctgaaattatatctaaaatataatcatcaagaactagaagcatttcaaagatntaaagacaaaatggcatatactacaaactcgagtctttgtctaagtaaggaaagacaaaaaaaaaatgtttacaaattctcatatgttaaaagaccatattggtacaaaaataaagtagacaagacaatgttgcagataaagtcaacgtacctaaagcactaagtcggaaacttctacttgctatcaaagaaagtaccaaaagcgaagataaattatacactttatcataatattcatggactcttgctagtgtgggagacctaactaagtctctcgtggtgaaaaactcaccctaattgttggatacatagttatttaaatgggtggtctcgattattatggggtaacccatt

SEQ ID NO: 205395 - DNA, 440 bp, Glycine max
  unsure (1)..(440): unsure at all n locations
gcattaaacaaattgtaattttaaaaaccngcttagacatcaaatgcataatggaatatgctaattacaccaataaataccttcaagttgtaggagaatccattatatcaaaggctactcctaaatagaaaaatcatgaagaatctctgtcaaatgtccctatagaaaaactcttattcaaaccttttaaggttagtgaaaaggcaaaacaaaaaattatggaattgaggaagaataaatcccttacggaaagagtaggtgacaacaatagtgaattattaaacaagctcgatagtttacttagagtcatccctaaaactcgccaaccttcagatgaaacataatatatgattacatgaatgcacctccaatttattaatgttattaatgaagatagtgaccaacatttataacacacaactataatatgttattatctg

SEQ ID NO: 205396 - DNA, 397 bp, Glycine max
  unsure (1)..(397): unsure at all n locations
agctttgcgaaaggcttgtttctagagctgacccatcaactgtcctaactctttcagactggcgactcctaggctcttgatcttgacttgatagaacctatttttaagcgaaggcgcctggctcaatcccatgctctntactaaagtggaataaaaaccagtgcgaatcaagactctgacatctatcataggtgaaatggatgaatgcatgaagaaatgtgtatggcacaaatgcattttatggatacgagagcccgggatattatctctttcttaaatacaacattcgagttgcgtagcgcccgatgcatgcatttgagaaggcgacatggacctttcgtcttctcgtgacaaagtgaggggatcaagacgcaacccgtgcatgatgacatgatgc

SEQ ID NO: 205397 - DNA, 420 bp, Glycine max
cgcttgagaagcatgtgatcctttggcatcatcattacattcttcttgatcctttgtctacagatgcaactgatttgtcttacaaaagtttacttctcctcttgaccctgttccttcgcaacgtagcttcaatttctaagtccagatgaactaaattgcctgtgggagatatatgcatatacaatactaatagaacagttgttatccagttaaacagaaaaagaaaaatagaatttatgaacgaatattcacaaaaacaatcaaagaataacaaatgtagaatagacacctacaatcgagctaacttcccaaataaaaagaagttccccggcaacgacgccaagaacttgttcggctttcggcaagtgcaccggatcgcacaagtagtataaaacgataagaaccaagtatcgaacactc

SEQ ID NO: 205398 - DNA, 445 bp, Glycine max
  unsure (1)..(445): unsure at all n locations
gcttactggatgtgtatgatgaattcattttgtctgcngaacaatagcttctaactaccatgctttggtatgtcaaacattatgtgaaattgatttaatgccatgtttcttctctttcttttataaattatacactgtgttggatttggagttggagtacgaccacctggtttaatgctacttcaataacttcaaaaagctatacaacaacaaattatatttaataaactacaaatttcaccaacaaattatatntaattgaaatgggtaactgacagtagcaacaaatttcttcctactacaaattctttagcaaaacaacaattacaatatcaaaagatgctattacacatgttacctaaaatacattcgcgctcaaactaacatttcaatttaaaatgaaatacctatcacacaatgctttgtatattctcattttctctgc

SEQ ID NO: 205399 - DNA, 447 bp, Glycine max
tgaagaggatgctttaatggaggagaagattgagagattgttggagcacgaatttgaatgagtaatagaaagagagaagtggaactttgaagtgtgtctcataagagtttcattcatcatagttacaacaagtgttatacatgcttctatttatagactatgtagcttccttgagaagctgtcttgataaaacttccttgtgaagcttctttgagaaaacttccttgagaagctagagcttatctacatacacccctctaataactaagctcacctccttgagaagcttccttgagaagattcctatttaagcttgagcttagctacacacaccccttattatagctaagctcactcccatgccgaaatacatgaaaatataaaataaggccctactacaaagactactcataatgccctgaaatacaatggttaaaccctatacta

SEQ ID NO: 205400 - DNA, 429 bp, Glycine max
  unsure (1)..(429): unsure at all n locations
atcctctgagtcacctgcggctgcagctatgttacattgtccctagctttanttttctatgttcatcttttcaattttatacctactaattacactaaataatacttgaaatgtatattctagctagatttcgtgttgttgaagaaaaatatgtaagcagttttttgggtatgaatatggtgggatgctctaacaagtaacattatccctttcaacattacaactttaacatcgggatatttcctcgtgtttgggacattttgacatacatttcagtggtattagtatgtggtaaacaatttaataaaaaaaatataagattaaggggattaataatacaactgtgtaacggcactggaatgtaccatttaatggagaataactcatggtaaccgaaaaagtgtacattcaattcttgctaaaatttta

SEQ ID NO: 205401 - DNA, 328 bp, Glycine max
tatataattccatcctaataaggaacaaaataactattcctcggatagagtgataggaaaatgatcaaattaaaaataaataactaatattcttaggatattagttaaaaaatgtaaaatataaatattgttattaaaagataaaaaactacgtgacttatgactatttttggatgtacgcataattgttaccttacatattattcagttttagcttcttaactaatacttttactacactgattatacaatatccataaaaaaataaccgtgttcaattgtttgacgggtttcatttaataaacaaaattaattattaagcatatta

SEQ ID NO: 205402 - DNA, 399 bp, Glycine max
agctttgttcaatccatttacaatattcttttactcgcatggctgggtgagtcccgtcatatatcaagacgcactcaattgaatgttgaagctgagagcaaattcatacgacaataactctttactcggatttctgattgagtcccgtaatatatcgagacgttcgaatatgaatgttcaacctataagccaattcaaacgacaataacttgttactcggatgtctggttgagtcccgtattatatcgagacgctcgaaattgaatgttcaacctatgagccaattcaaacgacaataaccttttactcggatgtctgattgagtcccgtaatataaccagacgctcgatattgaatgttgaacctatgaccaattcatacgacaattaacttttactc

SEQ ID NO: 205403 - DNA, 347 bp, Glycine max
gtttgaattggctcacatggtcaaaattcaatttcgagcgtctcgttatattacagtactcaatcattcatgcgagtaaaaagttattgttgttgaattggctcataggttcaacattgaatttcgagcgtctcgatatattacgggactcaatcagacatccgagtaaaaagttattgtcgtttgaattggctcatagcttcaacattcaatttcgagcgtctcgatatattacgagactcaatcaatcatccgagtaaaaagttatcgtcgtttgaattggctcataggttcatcattgcaatttgagcgtcccgatatattacgggactcaatcatacatccga

SEQ ID NO: 205404 - DNA, 440 bp, Glycine max
  unsure (1)..(440): unsure at all n locations
agcttgaataccccatcaatgctcccattgcaaatggtgcagcaactatcttcattatcttccagtaatctccctcctaagaatgctgtcacacacctgattggccctctatggcccactagaactgccagacacgtgtgttgaccatcttgttctctagcccaaaccctgctcgttgagtcagccgagccactcactacatatttggccacacttgccagacacaacactgcatgcgtgtgcccttggattgagccaccgtattgtaactgccccgcaaaccaacccttgtgccagtagtgtatgtagccatcagtgcatccaccgtacagaattccagcatctggggttagtggtaaggccttcactgnggagtacttggcgtgtaatgtactgtgaagaatgangctggcatggctgcaaaattctacccaactcta

SEQ ID NO: 205405 - DNA, 418 bp, Glycine max
  unsure (1)..(418): unsure at all n locations
cttgatctttccttgaagttacctatacaaaattaacaactgccatttacattcttctttttgatttttttgaaaaatatgcccttatgcagtaatttatcacaaaattaatactcccgttaatctaatctagtgcatacttattccaaatatttatgatatttgttttataagcacttactggatgagtacagtaaagtaacccaatttgaattaacatcaattttataagaaattctcaaaatccatgctaaattttgtgaagtttataattatttatgaaaagttagtgggtaataaacttcttaaacaaagttaaaatacataaatgtattttaatgtatgaaaaannatggtttattgtattgtatggattcattttttttcttctcgatataaataatggggtgagaattta

SEQ ID NO: 205406 - DNA, 425 bp, Glycine max
  unsure (1)..(425): unsure at all n locations
agcttgggggcanatagagagaatgaatttgatggaggatcccatgttgtgactgccgttcctacaaggccaaatttcccaccagctcaacaatatcaatactcaaccaatattagcccttttcattacccgccaccctatcagccatgaacctcaatcatccacaaaggccacccctaaatcatacaataccaaacaccacccttaacacaaaccaaaacactaaccaaggaaggaattttccagaaaagaagcctgtagaattcaccccaattctggtgtcgtatgctaacttactcccatatctaatcaataatgcaatggtagccataaccncaaccaaggttcctcaacctccatttttccgaagatcaactcatcacaacatgtgttctcatggggagtttgggcattcatgacattga

SEQ ID NO: 205407 - DNA, 419 bp, Glycine max
  unsure (1)..(419): unsure at all n locations
ttatccttcttngatgaatatgaagcctgcggcaaatggagagaataagaatgagggtaacccatgctgngattgtcgtccctacatggccatatttcccactatcacaacaatatctatacttatccgatatcatcccttctcattacccaccaccttatcatcctataacacccaatcatccacataggccacccctaaattatccacaaagcctgcctgccgcacatccgatactaatcaccacccttaacatgaaccgaaacaccaaccaaggaaggaatgtttcaaaatagaaacctgttgaattcaccccaatttcggtgtcgtatgctaactcactctcatatcttactcaatatgcaaaggttgccataataccatctgtataccctcaatttgtctggtgaccttctttg

SEQ ID NO: 205408 - DNA, 291 bp, Glycine max
accactggaatttctcgagagttctcgatgttcaatttcgagcatctggatatattatgcacctgaatcggactttcgtgtgattagttatgaccatttgaaattctcgagagctttcgatggtcattatcgagcgtctcgaaatataatgcgcctgaatcggactttcttgtgaaaagtaatgaccattggaattgctcgagagcttccgatgttcaatttccagcatctgaatatattatgtgcctgaatcggacatcccggtgacaagttatgaccatctgaatttct

SEQ ID NO: 205409 - DNA, 224 bp, Glycine max
aagagcccgaacggcaccggcgtaagactgcatctgaaaccgagacagcggctgcaagcgaccctcgaatatgatcgatgaacggaccccgtggactagcacgacatagaatgcgcgaagccccgtggaaaatgaagcgctcggaaagatgcgcccgaaacggacccggggaaaggacgacatggaggaaccggagccccggcggcaaggcaacacgcgaatat

SEQ ID NO: 205410 - DNA, 384 bp, Glycine max
  unsure (1)..(384): unsure at all n locations
agcttgtgaatgactatacaataaggattataaaaatatattccctctttntttatatatnaactaaggaaaaggtgaaaaaaagagtagaaaataaagaaagtaaaaactccagtattagttttgaacctttgaaactactactgaatctatggaaagacaagaaacaacctgatgaactgaaatattaataatcacagaaaaaaaaaaaaaagcaaaagctattttcataatgagcaaaatgggagtagcttaaatcatgaaaactgtgttgtgagagagctatacaagtgtcttactgcaagataaagtagcacagaacactacatcctagatggtgagcttccaatacccaaaaaaacatcactgacttgcactctcacc

SEQ ID NO: 205411 - DNA, 376 bp, Glycine max
  unsure (1)..(376): unsure at all n locations
caatgctctcattctctatcatccctcactctcggacattgcgttgaaacattttaattnttaatatgctntgctcgttctttatctttgctctttatctcattctaacctaattttgtttgccttaatttcttgcattgctaagacttgcacttcttatttgtttcaatgtaaatcttctcctctctctcattttgacctaattttggatgatttgagataaaaacatatgttttgcacttttattttgtttcagtgtcataaagtagtcacgttgagatttgagaatgacatgtaagagtttaatgaatttggtgaattattttgtttatgagccgtagtgtgatgatagattacatattntattcatgttcat

SEQ ID NO: 205412 - DNA, 429 bp, Glycine max
  unsure (1)..(429): unsure at all n locations
agctnngccaccgtagcacttgccaatatttgttttatatttttattgaggngaaactttaattatgatggaacatcaatgctaaaaatacttaagtaactgcacataaggtttgtcctactaagaatagttggagagtctgatattctaattaaaattgaaattggttttgcaattgcatgcaggcctgtatcaagggctttcatgaaccctgcaagaagtattggtccggcacttatcaaacatgtttaccaatggttatggatatacgtagttggtccaattgtttgatccatagctggagcacttgcctataattttcttatatccccatacaagccaccatcagaataaaccacatggctggctttcttaagagcagtgaataaggtacataacattgttggggggaattatatttcagtctac

SEQ ID NO: 205413 - DNA, 246 bp, Glycine max
caaataaatcaacaagcagaacgactgtggacacaaatctgaatcccacagtacccttatgaacatgatcctttatgtaacggagcggtattaccatgtgcgcggcacaagaatgcacgatgaaaccttagaaagatctatgccaacaatattatcacagagaatagggaatctactcgcaaacaagctgtaatcctcaagatgatggtggatccacaagagttgaaaacaacaactcgtagctaa

SEQ ID NO: 205414 - DNA, 446 bp, Glycine max
  unsure (1)..(446): unsure at all n locations
agctgggagaggatgtcttcttggaggttaatanagagggagagaaagagagaggcgggagcatganattgaaggaagataaagggagagaagttgaactttgagttgtgtctcccaagagtctcattcatcaaagttacaataagtgttacacatgcttctatttatagactaggtagcttcctttataagctttcttgagaaaacttccttgagaagcttctttgagaaaacttccttgagaagctagagcttagctacacatacccctctcataactaagctcacctccttgagaagcttcattaagaagattcctatagaagctaaagcttagctacacacacctctctaatagctaagttcacctcctcgagatgagaagctagagcttatctacacancccctataatagctaagctcacccccatgacgaaaaacatga

SEQ ID NO: 205415 - DNA, 431 bp, Glycine max
  unsure (1)..(431): unsure at all n locations
tgggtcgaggtacttgcccgtgaagatctttaacgtttgttgaacgncgaagaacggtcgaaaccttcgcgaaattccttactgaaacgttatggaaacgtttcggaagcgcctcggcttaaattttcttcacggaaacaatttttccaagcatattcgaaagagagagaagtgcctaaggtgctgaacccttttttcacttcacttctccccctatttatagaaaattgggggagaagcttgccacccagctcgcccaggcgagcagggttgcttcctctagaagcaacagccttctggaggaatcttctggagggcccatgtgggcctggttgctatttgcacccacattttggcttagtacacccccttgccctgtttttgtgaattctttttcgtaaagntacggaaacttacgaatttcgtaacga

SEQ ID NO: 205416 - DNA, 406 bp, Glycine max
  unsure (1)..(406): unsure at all n locations
agctngccacaacccttagtgagctnttttatttgtttcttaacnntcctgctcgaggagcttccttgcttcaccttggactcaccacattangtcgctaggttgaaaggctcgaagctggaccttggtattgtatcttcttgatgctcacagcttggtggcctcttccttgattttggccatctcttggactttgcccttcatctctaattccacccttatattttctttgttcttttgttcccaaaaaaacaaccttcttgtcaatggttcctcgatttcgacagggaacatggcatttgtgtcgtatgtaaggcgataaaaggtcccgttagtcgttgtctagggtgaacaatgataagcccataatatgctggagagttcctccttccacggacccctggac

SEQ ID NO: 205417 - DNA, 334 bp, Glycine max
  unsure (1)..(334): unsure at all n locations
aacaaatttgaggtcgtggatgtaggcatgatactctgaaccacgttaacaatataaattgtgtggatgtanggatgaggacacgaaccacattaaataaatttgtgatcttgttctatttaatcttatggtgttgccttttgttttgtggtgtgttttctcatcaatatgaataaagagatgtctgttgtttcccacaacagatgagagagaggggaaaataaaatgacaagtggcatgagaggagtgaataatatggattctgctactgattgatataagcagacttatatgatgaggaatggaatgtgtatggatattcacgaatttacaa

SEQ ID NO: 205418 - DNA, 363 bp, Glycine max
  unsure (1)..(363): unsure at all n locations
ggactttggaacaaatcttcataatacagtcacttgaagaattatgacttttggaaatgtatctctcgaaatcagtcgctgataatcgactaccatcaaggtgtaatctattaccattaaggttttatcgattacacatcaacagatgtgactcttcatttntgaatcttgaaaatgaaaacgtttagaagctctggtaatcgattaccagttgtgtgtaatcgattacacaagtttacaatgatttaaaactgttaaacacatgttgtaactcttgaaatttgaattcttaacgttctaaaacactgcgtattgactactactttctggtgatcgattacagagaataaactctttgtaatg

SEQ ID NO: 205419 - DNA, 323 bp, Glycine max
ccaataggccaataattgacccatccatactgatttaagtaacataaaatataaatatatgtcttaattgtcgttgcaaacttaataattaaataatttttttttcggtcaattctttaatatatcatatttttttgtatgtttattaaatcgtatattaaaaatagtttatttgggtccaaccaattcaataagagtgattcactgattcaactataccgattatcaactcaactattgacccagatgtatcaaactgagtcacactacgacgactacttgaccgatgcaaaatcaatttgacttgatcacacatctaatct

SEQ ID NO: 205420 - DNA, 207 bp, Glycine max
atgttatgacatccaggtctacatatgtataaagggaaaaaatatttggtaagtaatacaggtggataatattcctatttctaaaactaaatattatcataatatgatcaccctttaataaaggctggtaaataaaatactaaaaagattttttaagaagacttcaaaaagtttagtttttttttgccaaatttatgatgatgcttt

SEQ ID NO: 205421 - DNA, 370 bp, Glycine max
  unsure (1)..(370): unsure at all n locations
agcttctaaactttatacaagaataaatttcttatattacttggtagacaagnggcctcagtatcttaagaaaggagggttgaattaagataccaaactatccccaattaaaatttaactctctttttaattaataatgaaaccctaattatgaattatttcaagaacaattcaaaataatatttctttaaagtaaaatataaactgcaataaataaaagaagtttaaggaaagagagaatgcaaactcagtttttatactggtttgatcacgctctgtgcctatgtccagtccccaagcaatccgtttgagatttccactatcttgtaaaagccttttaccaaggttgaaccacacatggacaaccctt

SEQ ID NO: 205422 - DNA, 399 bp, Glycine max
  unsure (1)..(399): unsure at all n locations
tcataatccaaggatctaatccaaggtaagtgtttcatttatgggattctnttacttgtactattcgattccggtgaaacccactctcttatatcccatttgtgtgtaaggaaatttaagctacccgcgtcttctttgaatagaaatctgattgtagaaacctcaactagtggttctgtgttaacttctgatgtgtgtttggattgtccattggaaatttctggtagaacattcttgattgatctgatttgtttgcctttgatccagtttggactgtcctaacggacgcccttaccatacctgccaagggctcctcccaatttgctttctttttctcggcacacatgcaatgaccttgtaggggacatacaggtctactttcatgacgaataacatggg

SEQ ID NO: 205423 - DNA, 425 bp, Glycine max
  unsure (1)..(425): unsure at all n locations
acttctaactcttggtactnggtcttttctctctctagaanctctagacatgcaaagctctgaatcccaacccaaactccccctctaaaatctgatttcaggcttaaataggtggccttgttcgtgctcatgcgcttagcacaattatggaccgctgagcgcacattggtgaattttggcttagtgcgtgcctttctcgcttagtggatggactgaagcggtgcactgagtgggatgaagtggtgcgctcagcgaacctgtataactcatcttcttccagagtcttcctcgtgcttagcccatgagtgttatgcttagcggacgctcgctaagccagcagattggcttagcgagaaagtganaaacaacactnttcaaagcttgtctaattaacctgatattgagagaaaatgattattaaacac

SEQ ID NO: 205424 - DNA, 450 bp, Glycine max
  unsure (1)..(450): unsure at all n locations
ttcatttttgtcatttatacaacaagcataacttaatctctttatttactaaaaattaaatgataaaccctttcaatattttttatatataacttaatgcattggtttgtttgccaagntttgtttttttagttattattttatctcaaattgacgtaaaatgcgggggaagtgattttcttgatttcacttttttccttttaatttcttcagaaattaaatcatttttttgttggataattcaaaaataataaataatttgttaataaaaaaatggtgtaaaaaattgtattttaattagtataaaatatttctaaataacttatttatttattttcactctgttttccattatcccaaacgggtaaaaagaaatgtattcatttctttcattntatttctatgtgttcgaatattatatttttgtactatattttcatctatttttat

SEQ ID NO: 205425 - DNA, 380 bp, Glycine max
  unsure (1)..(380): unsure at all n locations
acttcatcagggcccctcaccaactaccgacgctccactttcccctctggccgttgatcaccatcccctcgtcagtcctttaaccatattggactggaaatgggacacttctgtcactcccccgctacgcttggtgctcgtccagtgggccggtttacctccggaagatacgctctgagaatcttggtctgagttacagtcaacctacaacctcgaggacgaggctgtttctggaagcgtgggtgttgatagcattatgcagaacaaggccacagataccaataacagcagctctaacaagnccaagagagtgacccacagacccacatacctggaagacttgtgtgatatctgatccatattagaagctacccttggat

SEQ ID NO: 205426 - DNA, 418 bp, Glycine max
  unsure (1)..(418): unsure at all n locations
aatctaacctactaaagatccgacgagagagtctcactgttccagtctatatagtcattgtgttcaaggaagtcattgcccaaggaaagatagaattgacataccatctccaaataatatattgccggtcaagcccaagtaaatcaaatgttgtaaatcagccatacaaggacttatctctccaccaaagctccatctccgataagattcccaatcgtggtcgtcattgaaaggagaatgtgaagagtcgaggtgaaactgataaacgtgngaagtgacactgtggcagaggactacataccagtggcaacagttggtattattctgattccaagaccaaagcctatctgaaggatctatgaaattatctcttatacttcaaatgtgtctcacgctcacttgggatgcacacactctc

SEQ ID NO: 205427 - DNA, 499 bp, Glycine max
  unsure (1)..(499): unsure at all n locations
acctgaggcatgcaagcttanatnacagtgcaaacacatgcttactctcacttanctactcactnaaaanctcttgtctgcgctcataatggtaaagaatacaaaagcggagattcaccaacataatttctcttcttatactctaaaagacaaagtattcataacaatgaacatttgattttctctctcaagttagacggttcgaatttttgtcttcttcagcaataatatcactgtccaaatacagtactgtaaaatgtttagttgccaatgaatgtatttactaagggtgcgtttaaataaacaacttattaatcttatctattaagttagaatctattcataaagttgagtgtgagtgtntctaaaataanttggaacgaattcaagcaaaaatcgtaattatttgaattaagattagaaaactccgcagctgatttntatatcctaatatctgaatacacggatgaatacgtatctatatattgtgtagtcacat

SEQ ID NO: 205428 - DNA, 421 bp, Glycine max
  unsure (1)..(421): unsure at all n locations
tgccccttcatgtaagagcctttgtgcttggaatgtggacaatgttcaaacccacctaccttatgcttaaattaaacatctttgttagaaaaatggggctggcatggatcaaactgttaaccacttcatcatatatattctgatgcctttgcatgatccaactatctatatagtttaagttgttgggtgaagacacataaacgatgttatataatttcttaaaaatttcataaatcacataagccctatactgaagacaatttgtagtacatctgtactatatgcattggaatatcatngatgcaggcattgctgaagtaggtgtcatgatggttatcaccaccttggtgacccttgtgatgtgtttaatttgggataccaacctattattggcattttcttttgctctagttattggtac

SEQ ID NO: 205429 - DNA, 480 bp, Glycine max
  unsure (1)..(480): unsure at all n locations
acccgttatcctcatagtcacctgcggcatgcaagcttgcttaaacacagacatactcagttatcanggtgtgttatgnactcaacatttaaaatatgatttaacatgcttatacaagataagtgagtgcctcccaattgatcacaaaaatagcacacccaacttagtattctagctagatcataacacacttcttgggaaacattagcagaaaggaacatacaaggaactcacagtcacaggtcatggtaggtatcttgtattctttctattgcagaggttgtctatttatctgtaatactcttctgtttctaatcagcagtattgcatgaaatatggaactcaactttaaatgtcagtatgtatgtcttgaaatcttattttgggttaattattcatttggtcttatagatacaaaactttcccttttagtccttatacttaaaaacacccccttttaggtcctacacatctatttta

SEQ ID NO: 205430 - DNA, 415 bp, Glycine max
  unsure (1)..(415): unsure at all n locations
cgggcttgcttcactttcttgtctccatctcgagctntgacctctattcttcctttccgcgatgcttcttttcatctccgcctgaatgggcttatatcctaaaccatacttcccatgatttccttgggtatttatcatgctagttatgccgccgttgtctttgcctaaacccatcccatgttcataaccgttccccaacataactcgggccatcattactgctgcatcggacagacaatgttgcccagagatggagtccacggatgaaatgctgaccacctcaaaagactataaagcggtttctaacgattcttctgcggcttccacataaggcatataagatgggcagcttaccaagatgtcttcctcgcctgacacgatgaccaagtgcccctccactatcgaattcaacttt

SEQ ID NO: 205431 - DNA, 335 bp, Glycine max
  unsure (1)..(335): unsure at all n locations
agagggggggagcactaaactgaacgaagatacacggagagacnctgaaccctgagccgcgccccacaagaccctcattcatcaaagttacaacaagcgtccacacgcttgtactcatagacaatgcagcttccttgagaagatgtgtagagaaaacttccttaagaagacgctatgagagaacttccctgagaagctagagctcagccacacacaccccgctcataactaagctcccctcctcgagacgctggcttaagaagactcccacagaagctagagcttagctacacatacctccctaaaagccaactcacctcctgagatgagaagaa

SEQ ID NO: 205432 - DNA, 255 bp, Glycine max
  unsure (1)..(255): unsure at all n locations
acaagtcacagatacagagaattancaaacataacaccctcgcgaaggctttcacttgcagctgcaaacatcttctccaagacagcctctccaactgcattagcagcagcacgcaactggaaagaagataaaattagaactgggaaaaattcatcaaggcactgtgatctctgacctccatacattgaactagaccgaaataagataacctaacttggagaacgaccaagcataccaatgggttattttacaagc

SEQ ID NO: 205433 - DNA, 463 bp, Glycine max
  unsure (1)..(463): unsure at all n locations
agcttataaataaaatcttcttacaaatctttaatcttattgtcatnatatcatnattattttcacacaataatatttattattcaaaatatccaacaatatgtattaaattatgtgnaatgtttgatattgcatcgaacctcataatattatatatacaaatgaatttaatgggctcgaaattttnttacattntgatacctatcactacaaagaaaatattatagtagtattagggtgtaaannaagtttgaacactctaaattatcannattgaaatcttctctcaatactcttgtgattgcgtttttttttcntaatcancgtagaaaacttgatatattgataaacagnngaatatttacatacactcaangcattcatattttctacaaattgagctatgacacccttntggttttctctatatatancgtgagcatcattgctgggattagaactt

SEQ ID NO: 205434 - DNA, 474 bp, Glycine max
  unsure (1)..(474): unsure at all n locations
tctaagcttaagccagatggagacaaggaatatgtcattctctctttcagctaaagggggtgcagtatttattgaactagtactcaagatggtagactgcttgaaaggcttctgtaattctccaggtaaagttggcaagacacaatttgcaagtctgcggcacactgggcaaagaaactctcccttgaaaaaaagaatgaacattcaaaaaggaagagagtgaaaagattataaaggtgtcataacaaaaggaaaaaaaataaattagaaaagacataaacctgatctgngtcaacaatatgtcctccttcaaaaacaattcttctgacagatctgtccagttacaataacaataataatcactccacagcaagaaaacttgaccatctactcatntcatattaatcatttccgtatcgtgatatgtgtgtcataatgccatctaagttaatcagacttgatttcattgaaaac

SEQ ID NO: 205435 - DNA, 462 bp, Glycine max
  unsure (1)..(462): unsure at all n locations
agcttgcttgggagctttatggaggtgtatctttgagctncaatgaggtccttcaatggtgatttttcaccatggagatgcagcggaaggcaaaggagaagaggagaagggaggcgccatccactagggaataagccatggaagaaggagcttcaccaccaagatgagccttggataagaagcttggaaggatgcttctatggaggaaaagaaatagggagagaaagagagaggggggagcacgaaattgaaggaataaaagagggggagaagtagaactttgaagtgtgtctcataagactttcattcatcaaagttacaacaatgtgttacacatgtcttctatttatatactaggtagcttccttgagaagctttcttaagaaaaacttcttgagaagctgtcttaagaaaacttccttgagaagtttctttgagaaaacttccttgagaagctagagt

SEQ ID NO: 205436 - DNA, 447 bp, Glycine max
  unsure (1)..(447): unsure at all n locations
tatgcacatatgtccttacgaacgttcacttgcacatttcatcctatcaacttttattaatgcacccatatacaatcaaggtagcttcattacctagattanttacatgtacttccaatgtgtatttgttatttacatcacacacgcctccttggctgaatttacatacatgcatactcaaagcattttggggtaccaaaaactgcacatgcgctcatcttggtatttctaatacccatacatatacaaacttcacgatgaatcttgactacctacacaataaggtgctacatttcatgcttgttttcaagtttgtgctacctaaagccacatgcatattcaagcatattttcctttgctgactataattgtattcaaattacaaggtatatatttgtgtaatatgttccttcacaaagcatgcaacatattatatatatttttgtg

SEQ ID NO: 205437 - DNA, 417 bp, Glycine max
  unsure (1)..(417): unsure at all n locations
agcttgccttggtccattcatcccttattgtanagttacacttggagtgactgactcaaactgtgctctctctcttctgtcaagacaaacctgtggttccagaaacacagccccagcaacaagtgttgagctgaacaacaacttgttgaatttcaatgggacatccatgacacaatnttccgcggcttcttcacaaactgcagccatccatcaacttccaaatgccacctcatggttgtacctaaagggagttggttctggtgattgttcgcctgagggtgtccccgatcttggtctaggtcaaatttcgccgcctcttgatagccatcttcatggtgagcttaatgtgtcacagcagggcaggaggcattacatggatctaggggaatccacggcatgtgagtcttctcactggtc

SEQ ID NO: 205438 - DNA, 383 bp, Glycine max
  unsure (1)..(383): unsure at all n locations
tttccctataaataggggaatgatggattatcttaaggntcaaccctcctggtatctgaggatcacttaaaattagtgagaaaaattgtttccgtaaagaaaatctaagccgatgcgcttccgtaatgcttccgatagtttccgtgggcgatttcgcgaagcttttctgccattcttcatcgttcttcgttcgttcttcatcgttcttcggtcttcaaccggtaagttcccgaaatcgaacttttcaattcattcaatgtacccttagtggtccccacttgttttgtgtgcttttattttcatttcatttactttccgtacccacttttgacgtgctttagtcatttatttaagtcatctctcgcctaatcgaaaataaaata

SEQ ID NO: 205439 - DNA, 468 bp, Glycine max
  unsure (1)..(468): unsure at all n locations
agcttgactacttcctatgtgaangcttttatgaacctttagagggcccaactggctcttcacttagtctacatggnttacactaagctattacacacaaatagaggtttgggtggtctcttggagacttccaatacacccctgaagaatgtcaaaatacaaggaattgtaatagataaaattcagcactcaattgttttattacaacaaattcaacaaagcaattaaggtcttcaaatttgtcttcaaatccaatggtcctccttggatggttaacctccaagactcaaaaatcttcctcccagcaagtgcaccaattctgtcttcaatccttatttgtaggcaacacttagacacataagaaaaacaagatagatacccaaagatgaaatgaaagctaaaccaataggatattaacatgacattaattcaatgagaatcaaggaaaataaagcaaaaggacatcac

SEQ ID NO: 205440 - DNA, 460 bp, Glycine max
  unsure (1)..(460): unsure at all n locations
cgctggtaatcattatagacaactatcctgcattatatatgtgttgatatcactatcctggattatagacagctatgttggattggagtagctagatttggttggatttggacttctctttattggttacctaattatagctactcaaattcaaactgattggagctagagttgtgtgccagtttttattttatcatgggatcaagaacattgttcgtgtatgctgaagaaaatcttaaatcaagggtagcagtctagaagcaaatatccagatggcttttatcagtatttaaggtagcagtcctgcaatctagtatttcatattgctaagtttgcctaaaatagttccattaataagtatactagtaagagtccacttgtcatggagttcttttatcaaaaaagaactaaacannaacaaaagggacgtaattatttatgaattatattcaaggtgttc

SEQ ID NO: 205441 - DNA, 449 bp, Glycine max
  unsure (1)..(449): unsure at all n locations
agcttcacanatccacaattccttanaatatgcctaactcacaaaaatgtccccagtggagtcgccaactgtcgcaacgtgcccttcgcgggcgagcgagggcgaggctcacgggtgcgctttccaaaggaggaaagatgcgcggagtcgccaccaacatttatttgtggaaaacgtcggaaaaaccgaaggcaaccggtcaaaaataaaaattctaagttcgggagttgtatttacgcttgaggaaggtattagcacctcttacgtttgtctcgaaggacaacaacctattttttagaattgtggaattgtgttatcttaactnttatttctttttgttttttgaggtcgacaatagcggngcttttgctcctacgtaccctnctttggagaggaaatcagacctacgtagttctttcgtatgtgtgaatcaagtaaaatcttttact

SEQ ID NO: 205442 - DNA, 370 bp, Glycine max
actggtataactctgcctttctttatttttcttctttccatgtcatgtttaccatactgcattgccagctacaaatatgcttactatttctgatggttgggataaaagccttaattgatagaaacagttgcgagatcaatgtcctgaaatgaaaagttattgcaagttttggttatgaatgatgattacttgaccaatattgttaaggtatcctcatttgaaagagaatgatattgctgagaaatgtcctgtgtgccgtggtaattgcaattgcaaagcatgcttgagctgtgatgaacttattaaggttaggtcttcccccttctacattgactttgtccaggtaattttggttttctacatttgaaaa

SEQ ID NO: 205443 - DNA, 419 bp, Glycine max
  unsure (1)..(419): unsure at all n locations
agctngaggaatattatggaactgctatatactccgctattactattgggctacacacgtgagtctgcttagaggaagagatagttatcgcaatnggtgtgaatgaacatgtgtagggatccttagatgaattaaatggattttattttgggatgtttattgaaatataatctttctttacgattataaatataatattgttgtatttgacagaccaattgatgtccttatgcgaattggttgataaaattaagtgctcttagtgttttcatggttttgacctatgattttaattcattggatttaatatgatcgcgtggaattgtntgagggggtttacttcccatgtgtgaaaagcatcttgtattnattgttatattgagattatgtaatggtgactcaaattgtgaagaagtgac

SEQ ID NO: 205444 - DNA, 404 bp, Glycine max
  unsure (1)..(404): unsure at all n locations
aagctctaatatctcccacactttttgtagtggtgtcattctggattctcttgantntctcaagggccacttggaccccattgttaccaactacaaaccctaatgaaactatattatctacacaaaaagtacacttctctatatttgcatagagggtgtttttcctacggactgaaagaacttgcctgagatgtcctaagtgatcatctatgctcctactgtacactaaaatatcatcaaagtaaacaactacaaatctacctatgaaatcccttaagacatgatgcataagcctcaaaaaggtgcttggtgcattattgagtccaaaatgcatcactagccattcatacaaaccaaacttggtcttgataacggttttccactcatcaacctttttcatcctg

SEQ ID NO: 205445 - DNA, 415 bp, Glycine max
  unsure (1)..(415): unsure at all n locations
ccaaatgctagcctaaacccaatgcttaggcattcactttaagactacacagtgtaacatgatagacacaaaacagaaaagatatttatggaactataagggcataaaagagttaccttattgctagttgaagaaaaaacaagaacaactttatcaatgtattccaaagattttgagaagttgcccgaatcatagaaggactgagttgtttcaaagcactctgagcctgcagtagttgagagagcttactttctgtagctgaatcttcaggtgttaactccagagaaaatgtacaagcgcacaattaactcaagcatttacgaactntatcatattcactagtcatattatacagatagtattcagtggagaatatagagaatcattatcagcacaaataacatattagacatat

SEQ ID NO: 205446 - DNA, 346 bp, Glycine max
caaagatgttgacaatggcgatgaacaatgagtgcacacatctctataatctccggggagtgcaagtacatcccatgtgtattataacacaggcaagagctcagggattgaatagagaattcatcgactcaattaagaaatcctacaatctttactcgacactctgatctcaggattcatcatctagattcaagactcatgattcaagactcacgattcaagaataaagataggactctgtcaagatacgagttaaaagtgatcaaaacttggaacagcacatgagcttttgactaaacctttaccaaagaagttttgctctctggaaatcgattaccatattggt

SEQ ID NO: 205447 - DNA, 483 bp, Glycine max
  unsure (1)..(483): unsure at all n locations
acctgaagatgcagctgaggatatagggacccgcacttgtggtactatgtggcgancgggcgatggtgcaagtcgactctccacattcacaaatcacacataaatccaccatccccagttgcccaccttcaactaagctcacgtacttccacgtagcccttatcctcgttcctctcaactccgggtccccatcaatccctccaagcttccacaacatccaagcaattcaacatctaacatcatgaactatcaaaaaccaagataacagggcagaggcagaaaactctgcccaaaacacaaccaataccacaactttccttactcaaataccccagtaacattctcttcgttccaattcgttcaccggtggatcgactcnaaaattntactggaggcgcctagtgcatttgtatacattttgaccgctgggatctgctagaaaattgtctgaacccatatgtacaaccctttcacaaccaacca

SEQ ID NO: 205448 - DNA, 309 bp, Glycine max
aacacaagctttgaataggaagcatctaagcacagaacaagctgatgtgaagtggtgtcatttacctggaagggacaagggcaacaaatggtgcaaaagtgataattaaaacatttactcgccttgtgatacagctctcgaaagaaatctgtgggaacaaatcagacaactgataactgcaaatatggggtgggggtggctatggctatggtgtgtattatgatactctaacaatgttagaagaccattagaaagagtgggtatttctcacaggatgcaagatgatggcattataaaggagcttaatga

SEQ ID NO: 205449 - DNA, 287 bp, Glycine max
  unsure (1)..(287): unsure at all n locations
aagagaagatacaaagcttgagatgtctctatcctcaagcttgagtgagccaccatagggtgactctttccacgtggagagcccttctgagagagaagaataatcgcctgggaagtctttatcctctagcttgagcgaaccactggtgaatgagtcaatccaatgagagagcctcttctgtaagagaagacaaatagcttgggaagnncttatcctcaagcttgagtgagccaccatacgatgagtcaatcttgttaacccattcttgttacccttctatcactttg

SEQ ID NO: 205450 - DNA, 364 bp, Glycine max
  unsure (1)..(364): unsure at all n locations
agcttgtagttggaagttgataaaaattttcttattaaattatcagnatctagtaaaaataacaattgaagtagcggaaaagtataaaatattaaaaaataataaaattataatttatttaacaatgacgagaaaaaaataaaaagaaaaaaattataatagctaaaaactaatattttaaaaaatattactacaagtaaccttaaaaaaacgttaaaaactatttaaaaacgactaaaaaaatttatttattcaacaattaatacaacttttcagttataaaatattttttaaaatataatctaaattaattnttctaatgtgatangaagacaaatgctcatatgacatctctatcatttat

SEQ ID NO: 205451 - DNA, 399 bp, Glycine max
ataacaaaaaccatagtgtttaccatatcgaagtatctacaaatgaggaggcggaaacaaataccaacataatatcaagttactacttttatttactacacagcttggcagaatcgtggttgagcttgggtgtaaaaagcagttttttagtagtatactttcaacataagataaaccaccaattaaatcaaggcttggaaaaaaattaacaagtgtagtttggggaagctggtacatctttgggagagggagggggagaacatgaatcagccataatatatgaccgaaacccgaatgattcgattgaataagccagcatgttaattgcttttaccacttgatatgatcaataccccactactaaaaaagctcctttactaccgatttaaaatgttcaaa

SEQ ID NO: 205452 - DNA, 481 bp, Glycine max
  unsure (1)..(481): unsure at all n locations
agcttctactaatgtggcacggtggaatctctntggcttgctttcctaaccgcgggccttggcctttgttcttcctttccgagatgtttttccttatgtcagcctacgtaggtttatagcttaacccgaatttcccttgatttcctctaacacttactaggccggccctgtcgccgttgtccttgcccaaacctattccgggcttgtagccatgccccaacatcacccaggccaccatcattgccgcaccagacaggcggngctgccttgggagggaatctacggaggcattgcttaccacctcaaaggattggaaagctgtttccaatgactcctccgcggcttccatatacggcatagaggaagaacaacttactaggacatcttcctcacctgatactatgaccaaatgttcttccactacaaacttcagctttnggtggagtgtggaggggatgactcctactgagtggatccatgg

SEQ ID NO: 205453 - DNA, 369 bp, Glycine max
  unsure (1)..(369): unsure at all n locations
cccaccatcttctcatattataacatctgtaacgtgtctactatcattgttatcatctccctctccatcatngtgggcactacttgagctgccatatccctccacctttgggcgtattctttgaaagattcatacttcttcttacacatgntttgtagttgcattctatccaaagccatgtcagaattatactgatactacctaatgaaggaaaccattatgtccttccaagaatggactcgggaaggttctagattagtatactatgtgacggctgccccagtaagactttcctggaagaaatgcatcaacaacttttcattctttgagtatgcccccattntcctgttgtacatcttcaagtgattc

SEQ ID NO: 205454 - DNA, 481 bp, Glycine max
  unsure (1)..(481): unsure at all n locations
agcttgaaggatgctttttggaggatattaaagagggagagaaagagagaggggggagcacgaaattgaaggaagaaaaagagagagaagttgaactttgagttgtgtctcacaagactctcattcatcanagttaccacaagtgttacacatgcttctatttatagactaggtagcttccttgagaagttttcttgagaaaacttccttgagaagcttctttgagaaaacttccttgagaagctagagcttagctacacacacccctctcataactaagctcacctgcttgagaagcttccttaagaagattcctaaagaagctagagcttagctacacatacctctctaatagctaagctcacctccttgagatgagaagctagaacttagctacacacccnctataatagctaagctcacgcccatgacatataacatgaaaatacgaaaaataagtcctactactagactactcaaa

SEQ ID NO: 205455 - DNA, 386 bp, Glycine max
aaatgtgatgcagaactggtcatgcatgcacctatgtggacactcaagcatcatagttttatggtcatgtgacactaaggcttatgattcatgttccctatttaagtcaacccaatgtttccaaaatatgttctgttatcaattaatgcattcatccgagtccattttgggtgttcgggaaaattttcaaagattcacccttcacgtgtatgacacacattttctttcaaaattggttatgatcagagaatttgtttttcaagaaaagctggaagttatctcttttcaaaaacatgttggcttttcagctgaaagatatattttcggccattgtgtggttttgtcttttttcatgaagattttgacacccaaacaaggtatatttt

SEQ ID NO: 205456 - DNA, 392 bp, Glycine max
  unsure (1)..(392): unsure at all n locations
agcttctagctgagttgtgttggtcctttgatggttttcgngtatatagaccgactgccctatcttttacttgtttacaaatctatatttgatgttggcatgcacatttatttaatgtaattcttttgatacgtgtagatagagaaaggtgcatgctacatattgtttaaaaactttagaagcccagtaatttatcatgagaaggatgcgggtcttgaaattctaagcaaaggtaatggttcatttttcatgattaacatcttgcaggcaatgtgatatttgtctatttttcatgttttatgtctgcatttntacaatttttgatgctggtctcaaatgtagctgttcaagagttacaagagcaacctggtggtgattctaagtcacttaat

SEQ ID NO: 205457 - DNA, 409 bp, Glycine max
gatagaaaagaacagagcacttagaagctgcaatgagcagtccttcaaaggccactcatgctcccacaacctatgccaaattctatgatattccccctcttctttgtaccactcatatatacaatatgagttcctttcccccatgattgccatatcccctgccaccattccttgttattatattcttacctctctcctatcctatcacttacttacactcccttgctcctttcattgattagattactacctccattgaccctgcccctacccctgcccctgtccctggtacaatccttttcatcctgtgatacatgtgcaaggcattatcattgttaggcatgccctacagtccctactttttcttctttatacatgtgactcaaggcccatcaaaattaaatacaca

SEQ ID NO: 205458 - DNA, 406 bp, Glycine max
  unsure (1)..(406): unsure at all n locations
agcttcaattctgcttcattcaagttctttgcaacaatacatttcctaatgctaaagtcacctaactaggcacacaaatgggtgatcagaccaagagcatacaaaatttaagcactaaaagaagcattgaacacaagaaacacaatcaattagatattaaaataattacatcagttgttctttagaaatccccaacaagggtgtttagccagccattacagaagaaaccctaataataatgagcttacaaaacctaagtatctctgcaaaagctgctcctcttgctgccttcagagctctnttcccaaaataggcattgtggtatgctgtggaaatttgtgccctgggtattataaaagttgaccctaattctgacaagacagacttaaataggctctgattcatg

SEQ ID NO: 205459 - DNA, 410 bp, Glycine max
tcatgagacttgcatcttatcgcatgaacagatatgcgctttgcgcgaggtttgcgcttatcgaaaaagactgtttctcagaaaatatttttctatgttatttttcaatcctttctccatgaaattgatcccttatttaaacatccaaagattagctgatatactcctatgtacatactatatagaaaggtccaaatgatttatatgcatgataataaacaaagataatagaatttataactgggttgcctcccaggaagcacttctttaacgtcattaacttgatgcgtttacctcactgtgtgatcttatgttgtggctcactacttcaaaaacccgttcatatcctgtatgcaacattgtgttctggagtaagctgtcttcaacaatatatcaatacaatttttgat

SEQ ID NO: 205460 - DNA, 478 bp, Glycine max
  unsure (1)..(478): unsure at all n locations
agcttatctttaacattcttacttcccatttattntctctctaagctctccaagcagagccattagtgagtttgagtatccattcaatcactgaccagtgagattggaattggcattgaacatgcgtaggaaagtgagaaacatgaaaaacaaacaaagaataccatttgcaaaaagcatggatcgtgacatcgactcttgaatatgcttagtgagcacatcatttgaataataataataataataataataataataatatgcacctgagaaatgtttttgtggtgggaacagataactggaaatgcaacagatttagaacctcactctccattntcaatacctatcacatgccaatgattaggtggtttatatatcaccagcagcttgtataaataaaatttgaaaagatgaaggttgcaacagaactaccaaatgttatacctctgctgttgtgacgtatatctgtgatgaagca

SEQ ID NO: 205461 - DNA, 440 bp, Glycine max
tcacattcactttcttcttcatcatattcaaacgtgtccaaataaataataaagtcatctcgactcacagaaaatcatataagtctcatacaattaatatagaacctatatcctaatgtcacatcctatcagaacgtggtgttcccgtgtcctctatcatgaggttcttcatagtcatccacctattcatctgctcccccgaacacaagttcaagatcatcacaggatcctaacacaacaacacacagggaatgagttatcacattcctagctaatagagaaacaagacaattaaatatacatattatataaatgagataccacttgcttaaacataactcacgtaacttcaccacttcatcattcaaaattcactgtgcaattatcaatcacattacacaagaatcccacacttcgatcaagatataataacacatcaa

SEQ ID NO: 205462 - DNA, 436 bp, Glycine max
  unsure (1)..(436): unsure at all n locations
agcttgttaataacggaagataataatttcganaatgaacgaaaggaagacgaaagctataaaacaagaaaggaattaaaagtctcggattcgaaaacttacctgttgaagaacgaagaacgaacgaagaacgaatgaagaacgacgaanaaccttcacggattcgctcacagaaacatctcggaaacgttacggaagcacctcggcttggattttcttcacggaaacaatttttttcacccaaaatagctgaaatgcatagctaggcggatctgggatccttaccctttcgcctatttataggaaaaagggggaggaggttgtcgcccagctcgcccaggcgagctgcattgcttcctctnagaagcaccctgcttccaaatactctagaaggcccaaattcaaattttgaaattttatttgcatcccatttgat

SEQ ID NO: 205463 - DNA, 403 bp, Glycine max
tgggagagatatacttatattgtgtgtgcctaaaaacttctatcggagaggaatgtagtagtttacttcactgagtttgacgagttcaaggaggaactcgagagaagacactaagatgagaagttaactgattttgtacacaaaaatatagacattgctattgtgaaggaattttacgcgaacctctatgaccctgtggataaatcaccgaagcacgtgaaggggagaggtcatctagtgtaaattgatgaggatactctgaacacattcctgaagacccctgtagttctcgaaaagggggaaaatttgtgttcttattcgaggtttgcactcctgaagcctgatcctcatgagttggctgctaatctctgcatcccatggaggggattcgagctaatgctga

SEQ ID NO: 205464 - DNA, 304 bp, Glycine max
  unsure (1)..(304): unsure at all n locations
tggatttaatttgaaattcatcatagcctcttggagcttactgaaggaagatgtcaaaagatttcttaggaagtttcatgttaatggtgtgttccctagaggtcgcaatgcatcattcatcaccttgatacctaagattgaggatccacaaaatctgggggattttaggtccatttcactggtaggatgtatgtataagatccttgctaaaatccttgcatgaagactaaaaggtgctntggtagtgtgattgacaaaaggcaaatcgccttcttggaagggagaaacttacttcttggagtct

SEQ ID NO: 205465 - DNA, 446 bp, Glycine max
tgtccgcaattgttgatctggaaactgggattggtttctgttgtcttgctggccttgcactggcttttgatcagctactaactgacgcttctggtgctatactcgaagaaagtgctcccttgatacattccgtgctagatgggggtgctaagcatctacccgatggagtaccatataaggaagaaatcaggataatgataacagtggccaatactgtatgtgttaataatcatgattcagtgtgggtaagatcaatgttggaggaagttggtggtgcacgtgatggatcatggtgcttgttaccattattatttgccacattcatgacatcttatactttggtccaccacggcatttaacgttgacacagaagggtttactaacaatatccattgcttggcaggtcagtatggtatattctggtgaaatactggtatttgaacact

SEQ ID NO: 205466 - DNA, 439 bp, Glycine max
  unsure (1)..(439): unsure at all n locations
atgtgatctcataagggtgaactattctccatttatagtgaccctgactagtcaccttatgatttcacttagtgagagtgacctaacatacccactatgtggtgtgtcttgttatgtactcctaggcgccctggtgttgttnttcactgaaatggtaccacattgcatataagattgagttttagtgtatatgttgcataaagcctatgtaatgatcattgtgacttgctatgtgatggtggctaatgaattgtgtgagtgtgagatgttgtgttgtacttgagaatttntgttctggacactgtgataatgtgaaggtgtggaatgtgaatttgtgattaaatccttgcgacaagtgatgttatgcaatgagtgtaaaatgatgcaaatgtgtatgttgagctggatgctatactatatatatgngccttgttatgct

SEQ ID NO: 205467 - DNA, 386 bp, Glycine max
tactaagcatgaataccctcttatgcataatctgtagctcaaagaattctcaaacttgttgaagaaaggagaaaaggtatggaagcagaaattgactaattgttgaaggacaacttcattcgtgaagtaaactataccacttggatatacaaaaaaatgtgaaagcttatgtatacgatatggtagtgatgtcactattttctgattagcatgcttgtgaattagctaaaaattttgcagagcttataaatcacatgaggttgaacactaaaaaaatgcatagttggagttctctctctatctctctctctctctctctctcttaattcttgcccgagatggcaaataacgcaaaatcattcttcatattgttgaaggaatcacat

SEQ ID NO: 205468 - DNA, 432 bp, Glycine max
  unsure (1)..(432): unsure at all n locations
agcttatcaaataacattaagtaataattattgntcaatcatattacatacataattgatataaaatccaaaaaatcctaacaatcttcatgcatcttctatacgccgccctcatgttgatcgaacatatacattctgttgtgttgtcactcctctagcgatccttaggcacttctcgatcacagtgtgtgcttctgttccttcagtgactaccctcagcttgatcaagcattccaacctttctgctatttcttggcaagcctcctacgacattgacaacaatgaataaagtaaacacttaatgtgtgacacctaaaatgagtaacagtgacgattcataatatattatacctgtgcatgtcgaggctggtctacattatgtaggtcagttatagggtggtctttcatagccactgcagcgaccgactactg

SEQ ID NO: 205469 - DNA, 373 bp, Glycine max
agatagcatatactaataccccccctgtcttttggagattatgcctaatttctctgaaatgtatctctggatttataatttctaaacccgtttttctccccctttggcaacatcaaaaagccaaagtgcatggaaatttaaaacatcgaactcaagcaatcattatacacgaatgtttgaatcaaccaatcaatccttatttatccaaatcactaacatctaagaggcctaattctctcctaatggcaaataatgtttccttatggagaggtttggtaaagatgtcaacaagttgatttttagtatccaataattatagaacagagtcttcctttataacatggtctcttaaaaagtggtgccttatttctat

SEQ ID NO: 205470 - DNA, 447 bp, Glycine max
  unsure (1)..(447): unsure at all n locations
tgatccttcgagtcacctgcggcatgcaagcttaagaattatttgatgatgcccattaatttcaatgatcattcaagatagatttcaaggatgaagaaagcaaagatctcaagataagaattaagatagactcttagaaaagtttttgaaaagcacaactgattggccaagtgagtttctatcttaacaaaaattttaccaagcattttactctctggtaatcgattaccagaaggtagggatcgattatcagtagcccaaatatttatgaaaatggtttttcaaaggtgtaatcgattaccatggcattataatcgattaccaatgcttataacattcaaaaatattttcaaaaaccttgtaatcgattacacaaaacatgtaaccgattaccagtggctctngaacgttggaaattcaaatttaaattaagagtcanaactgttc

SEQ ID NO: 205471 - DNA, 458 bp, Glycine max
  unsure (1)..(458): unsure at all n locations
gtatgttgtatgactcatacctttttccgtattcttgctcgagggcccattggttctctagccatgctttacgatatgtgatgatgtatccgaactcttgtctaacaaatgcgatgaatgttggaaaggttagttgctcattttcttcaactatcgcaaggatatttttgcctacaagttttgaatccatcttattgtgatcttgtgaaatggttggcatgacgcatgtgtgatgcccttctatcattctaatttcccaaacttttagattntttctttcggacactctaagtctccattggcacacatcatgttgggcaacataagacccatgtatccttcacacacctcttgtgtttgaaagtgacatggttcttaacgtgcgatatttttactacgtgtttgatgcctccaattgacagaatcaatgaccaacatacaactcgtcattctgtgag

SEQ ID NO: 205472 - DNA, 385 bp, Glycine max
  unsure (1)..(385): unsure at all n locations
agcttctcaaggaagttttctcaagaatcttctcaaggaagttttcttaagaaagcttctcaaggaagctacctagtctataaatagaagcatgtgtaacacttgttgtaactttgatgaatgaaagtcttatgagatacacttcaaagttccacttctttccctcttttattccttcaatttcgtgctccccccttctctctttcttttcctccattaaagcatcctcttcaagcttcttatccaaggcaattattggtggtgaagctccttcttccttggcttattccctagtggatggtggcctccctctcctcttctnctttgccttnncgtgcatctncatggtgaaaaatcaccattgaaggacctcattgaagctcaa

SEQ ID NO: 205473 - DNA, 415 bp, Glycine max
  unsure (1)..(415): unsure at all n locations
gagttcactctatgcaccgnttatggttcctcttgntgntnttcacatcttcatctcatttttctaccattagtgatctagtttctttgtataaagcgattttgactgatcatttgtgccgtgatatcactttatcactgtaaaataaaatttcaactgattggttgtgttataatctcactcgatcattgtaaaataaaatttcaaccgatcgtttgtgctgtaacctctttccatcagtgtgaaataaagttttaaccagtcattcaatttgcaagttatcttttaataagtttgaaagtaaataagtggaaccaaagttaaaattaacccatatacaagaatttatccatganaatcgcttgaatccgttcaaaggtccaacgccttaatggtctctnttgccctttcaaac

SEQ ID NO: 205474 - DNA, 374 bp, Glycine max
  unsure (1)..(374): unsure at all n locations
gcttttcattcaggaagcgttgatggcgtcatcgaccctccatccctggtgagacgccacgtgaagtggaagatggcccgcacgaagaaaatatgggagatgacgactgaggccgcgaatgaaatcgcttcgaatatcgtaagccattttcaactaaccattagaattatatttcaatattttgtgaatgccatgtacaactgtgtgttttctatgcangattcctttgaggagcatgtgacacaaggatccttcgtcccccatggacgtcatgatgttctcaccgctgctattgtgacgtcaaagcaccctaaacgtgttcgtgctgctggagtcggtgtcaccatcaaacaatactttggattggctccatg

SEQ ID NO: 205475 - DNA, 410 bp, Glycine max
  unsure (1)..(410): unsure at all n locations
agctntgattatgtcgagaagaaatcatatgtttgtcatcatcaaaaagggggagaatgtgaatgtatgtatacatgattctgatgatgtcaaacaaggatcatttgcttcaagacgaatacaagattcaaacaaagccttgattcaagatttcttcaagatcaagccttgcctcaaaacgaaaggtttcaagtcatccaaggcacatgtaatcgcttaccaatacatgtaatcgattaccaaggtacatgtaatcgattaccaatggtttgaaagtgtgtaatcgattacacatcatacgtaatcgatgaccagagactctaaatgttgggaattcannatttaaatgaagagtcacaatggttcaagaaaaataactgtgtaaatcgatacactatatgctgtatcga

SEQ ID NO: 205476 - DNA, 353 bp, Glycine max
tggtcttcggcattatatttatgctcgattcattgttgctaataacctttgcgacaacatggtccatacactttaccgacacatgaagagccttgttgtgtcctcttccctctacgggaatctcttcttccgcaaacgcgatataattgttggtgggtatatgattaacgatgccttcaaaaccctccactgagatatcgtgggctacatgggcatcattgaggacttttatcaacagcgtacgatgaagctcggagtttatgagcagttcaagcaacgagatccttgctggaagtttattcagttgctcgactaccttaaactcgctttgtggatgatgcgaatgaactcat

SEQ ID NO: 205477 - DNA, 367 bp, Glycine max
  unsure (1)..(367): unsure at all n locations
agctntcacactgatgtcctattcgggtacataatatatcgagacgctcgatgttgaacaacggaagctctcgggaaaatcgaatggtcataacttttcacacgaatgttcgattcggggacataactcatctagacgctcgaaattgaacaacggatgctctcgagaaattcgaatggtcataatgtttcacacggatgtccgattcgggaatataatatatcgagacgctcgaaattgaacaacggaagctctcgacaaattcgagtggtcataacttttcacacgaatgttcgattcggggacatattatatcgagacgctcgatatggaacaacggaagctgtcgagatattcgaatggtcat

SEQ ID NO: 205478 - DNA, 362 bp, Glycine max
atgctctatttccatctcccactcctcgtatgcctccagatcacttcttcctttaaatggaggaatgttgagttcaataccatcaacccggttttgtccacgatcactatcattccctcttctcctcccttcttcattattatgatctctattctcccattgatccaacctctcatggagcgcatcacctcgttgtttcattaacctctccaaatgctgcatcaaagcctgcatttggaattgcggaagccccactcaaccattaagatgagtacctgacatctcaaacaaacaaatcatacgttacaagacaattatagctgcttgttgaatacctcacccactcaagtgtatcacacaac

SEQ ID NO: 205479 - DNA, 467 bp, Glycine max
  unsure (1)..(467): unsure at all n locations
agcttcaacatcagacttcttncagggtgctggaactacttcacatggacttgatggngcctatgcaagttgaaagccttggaggaaagaggtatgcctatgttgttgtggatgatttctccagatttacctgngtcaactttatcagagagaaatcagaaacctttgaagtattcaaagagttgagtctaagacttcaaagagaaaaagactgtgtcatcaagagaatcaggagtgaccatggcagagaatttgaaaacagcaggttcactgaattctgcacatctgaaggcatcactcatgagttctctgcagccattacaccacaacagaatggcatagttgaaaggaaaaacaggactttgcaagaggctgctagggtcatgcttcatgccaaagaacttccctataatctctgggctaaagccatgaacacagcatgctacattcacaacagagtcacactg

SEQ ID NO: 205480 - DNA, 384 bp, Glycine max
  unsure (1)..(384): unsure at all n locations
ngagatgangaagtgttgaagggtgaaacttcctgcttttattgttgaccacatagtggtacctggagatatgtcgcgggggtcaggagaccttggggacgtcatgtggggtgctattgcccaaaaccatgcttgaccaatcccgacccaacccgggcatattcggtcagtgagaacctgtgatgtacctaatcatgcgagctcctggcagtcaacatattaaaggaacaaagaccacaaagcatggaggcttgtggtggctggccaactgtgaactttgattgatatgtgggttatggcctctggtaatcgattaccaagggtgggtaatcgattacaaagcttaaaaatgaagacaggaaagctagatggtctctggtaatc

SEQ ID NO: 205481 - DNA, 337 bp, Glycine max
  unsure (1)..(337): unsure at all n locations
acctgaggcatgcaactatgctgcaatattatctatagttctnctcaaccttagcagcaaaatcaaccacagcagagcaattatgacctctccagcaacaaatacaaccctggatggaggaatcaccctaacctcagatggtccagccctcaacaacaacaacaacagcctgctccttccttccaaaatgctgctggcccaagcagaccatacattcctccaccaatccaacaacagcaacaaccccagaaacaaccaacaattgaggcccctccacaaccttccctcgaagaacttgtgaggcaaatgactatgcagaacatgcaatttcagctag

SEQ ID NO: 205482 - DNA, 369 bp, Glycine max
ctacttgggagtgcgtgagctcatttggatgtgggcaacacgggatggtgggttatacgtgatttgtggatgtggaaaatcgtgttgcaccatcgcccgaccgccacctattaccacatgtgatgggtaccccatattcctacaagcttgaaatgaggaagtgtagaagggtgaaacttcctgcttttattcgttgaccacagagtggtacctgtagatatgtcgcggtggtcaggagaccttgtggatgtcaggtggggtgctattgtccataaccaagcttgaccaatcccgacccaacccgggcatattcagtcattgagaacctatgatgtacctaaacattgcagctcttggctgtcacttata

SEQ ID NO: 205483 - DNA, 479 bp, Glycine max
  unsure (1)..(479): unsure at all n locations
agcttgtgcganacccatctcaagcatgttcataaccactactccaatcagnttcatctcantttntaccattattcttctctaagtgcttactgtctaacttagaattttgtatagatgttgatttcttattgtgatttttccttggaaaatgaacactaatttatagagaaaaaataatgttcctaaaataagaataattccttaagattgtattgaccttttcgatgattactatcacatcatgttgacttgttttcttttaactaaaaaatatgatacatatattatatatgtaaaataaatagtctaaatgtgtattgttagttgtaataagttttaacataataaaatgactaacaatangaaaataaatatatgtatagaacaaataagttatatatgtaatttgtcaaggatataaaatcgcattaatttagtatttcattaatagaaataatttaaaactattaaaatag

SEQ ID NO: 205484 - DNA, 412 bp, Glycine max
taaatttatgtctcttaataaattataatactttaatttcttaactagtagtactcttatgacacttgttaatatttgtttatattagattagatccttataaaaaactttatttatttagcttaaaataaacataggtgagaaaaaataatttaaaattttgattggacaaagtctaaaattcgtttattttagaaagacaataataatttcatattttctaggaataaaaaaaacaaaaatcacaatacgctcattttataatttcaaaaatatatgttaagtcttatacagtgtaagaatgtacctcgatagaagctgtggtgcaatatgtgatcatagtgaaacaacccgtatattcttctaagattgtagaaatattactagaaaatagacttttaacattgattac

SEQ ID NO: 205485 - DNA, 408 bp, Glycine max
  unsure (1)..(408): unsure at all n locations
ncaagctttctatatattacgggactcaatctgacatccgagtaaaaagttattgtagttngaatttgctcaaggcttcggtattccatttcgagcgtctcgatatattacgggactcaatcggacatcagagtaaaaagttattgttgtttgaatttgctcagagcttcggtattccatttcgagcatctcgatatattacgggactcaatcagacatccgagtaaaaagttattgtagtttgaatttgctcagggcttctgtattccatttcgagcgtctcgatgtattacgggactcaatcagacatccgagtaaaaagttatttgtcgttgaatatgctcagagcttctacattcaatttcgagcttttcgatatattacgggactcaatcagacatccgagta

SEQ ID NO: 205486 - DNA, 392 bp, Glycine max
  unsure (1)..(392): unsure at all n locations
tgacaatatcacattttttatcgttgttgtgatccgaatatatcgagacgctcgatatggaataccgaagctctgagcaaattcaaacgacaataactntttactcggatgtcagattgagtcccgttatatatcgagacgctcgaaattgattaccgaagctctgagcaaattcaaacgacaataaactttactcagatgctgattgagcccgaatatatcggacgctcgaaatgaatccgaagcgctggcaaattcaacgacgataacttttactggatgctgatgagtcccgtaatatcgatagctcgaatgatgtgaactctgacaattcaacgaataacttttatcgaggctgatgatccgtatatatgagagctgaatgaatacaa

SEQ ID NO: 205487 - DNA, 453 bp, Glycine max
  unsure (1)..(453): unsure at all n locations
atctgtataaagaggagatgctttggttcaaaaatccagagacaaataggtagaattttgtaacagaaataccaaatttttccatattcaatctgtaataaggataaggaatagaattactgctcaaatgatagatagtgtgtggtgctcaaatgatgatattctaaaaagaaaggcccaaaaattctacaagaatctttttcagctagatgagcctagtgatccagggagtctcactttgtcaactattcctaggattggtcaacctttgtttgaagctcttatcaagactgtttctttggatgaagtgtgaaatgctattntttctgagtcctttcaaggctccaggctcagatgggattcaacctatcttcttccagacttattgagatttttgtggcaatgaatgttgggaaatggtagctcactccttctcctcaagtaacattgatc

SEQ ID NO: 205488 - DNA, 341 bp, Glycine max
tgaaatatctaatatctcgccagatgacgatccttttctttcttgtgaagtaccacaagatacggttctttcacaccttcatccacaactttttaactcctactcttctttgcaagcatattattttttttcttccttttcatttttttcattttctatttctttttctttttctctggcctttaattatttattcttgaccattatttgttcctctttttcttgattactttcacctctcacctcatttttcttgtcatcaatacttttcttgttaacagttttcttcttatgcacaacactatcatcatccttaacttccacaaaccttttactccttg

SEQ ID NO: 205489 - DNA, 379 bp, Glycine max
gcataacaagactttctgtgattggtctaaagatacaatctttgcagatgataatgctttataaacattaagaaagctagcaaatgggcctaaaagaaatgttataacttggcaaggatacgacataaacaagtgttcaatttacacaaaagcacaagatgacaaatagtcaatgcagaacaacggggtcaccctaagggctgaatctcaacacttcgcaagtgtgaatgacaccaatccctgtgtagcttccatcccttaacttgggttcattgatgaaatttgggagcttaactatgtgaaatttactgtatgtgttttcaaaagtaaatgggttgacagcaacaccagtgtgcgcaccgatgatataggatttacg

SEQ ID NO: 205490 - DNA, 289 bp, Glycine max
actaaactgatatttattttgaaatttctgcacctttcatattgttgattattctctcccaatgctgattcagtgaaagtgtcttgttaacagatgatgcttttgaacatgttggttcaatacttgttgacatctgagaacagcggaaagggagggagcttctacttgacccaaaacggggtctctgaaagcaaataatctgacagtttgattccaacagttcattgagaaaaaaaggggtgcgtgcaataaatgcatctataacgatttctgtttgccagccttgggt

SEQ ID NO: 205491 - DNA, 502 bp, Glycine max
  unsure (1)..(502): unsure at all n locations
tccctgagtcacctgcggcatgcaagcttgaaccataatcggtgagagtgtgatctttaactatgagtgaagacntagcttgagtaatagtctntgcatcaatctctgaattttagaatgaaatgtatgaatgaggacatgatgaaggccatgattgtatatacaagccaattgaccaaaaagcttaccttgaattataattgtatcctttgcaccctttgtgagctaaattacattttcaaaattgaaccctgaccttgaatgaatatctcctgataccttgcttggaaagcagatggttcaaggcaatttgccccaaatctaggggagttaactgggatgtacagtggaaggtaaagcacatcancatacacaacaaataagttgtcttataaataaaaaagcaatcaaagaaagtgtgtgttgttgtaataaggccaaatacaagttaaagtgaaaggctagtgagtaagctatttgtattgaanagactacttggata

SEQ ID NO: 205492 - DNA, 221 bp, Glycine max
cacaacccctattatattcttatgctcacacacccatgacaatataaaacatgaaaatacatataaaatatccgtactacaatagactactcaaaatgccctgaaatacaatgctaaaaccctatactactagaatggccataatacaatgcccaaaagaagaaaacaacctattctactatttacaaagaagagtggacccaaccttggcccatgggctc

SEQ ID NO: 205493 - DNA, 473 bp, Glycine max
  unsure (1)..(473): unsure at all n locations
agtcacctgacgcatgcaagctctgcgataactatgtgaagtnnttattttagtaagtncatatgtgtncgattctgcttcaaattttcaaccacacccatcaagttatgtctagcattgcagattcttttcattggtgaaaaagctgtatctatatttatccaggatgtgtagaattttaggttttctcattgtttttataagcacaaattctttctttaatttcttctgccaattatcttcaattgtttgtatttatttgtttagaagctatactaaaaattatttatggacttgcgggagttggttcatgagtcctaaaactcttggcaggaaactaatattacttggctagagcaaaactaatattactcttcacaaatgttccaactgggcaggcaagtatccagaggtaataactagtatagactgggtcaagtttgacanatttttctaatgggctcttattgatt

SEQ ID NO: 205494 - DNA, 394 bp, Glycine max
tatttaattcttgttgtctccatagatcatttcatcatcattgtaactatagctgcccattattaaatagcttatacaatctatgtctgctgcttctgaaccttttatttatacttgaagtagtgtaattttttttttatttgtgttcaactaatgaagagtgaaaactgaagttgttctgtcagactcgttgattttcctttcatttcgatggaagcctaagcaatacactaccactgaattgccagtaagaaagattggtcatgaaacacacacacacacacataccctgatgacacacacacacactcacgtatgatataaacacacagactcacactgttgacactcacactctctcacactcatcatatcatgacacacacaagtttga

SEQ ID NO: 205495 - DNA, 287 bp, Glycine max
  unsure (1)..(287): unsure at all n locations
tatggtcgntacctatatattgcctgtgttggtatggaaagntacattttatatttaaagtgacaaagttgccattgcggccacaaggtaaaattaatgtgctagattatgtgtattttctattattattagattgtgtgtatnttagtttaagcctttaaggagtacagtatataatattccctgtgttgtcttcgaaacatgagtaatgaaactacaagatctattttaaaagaagggccattgtcacaacttaatttgagctttatatgatgtcggccttatat

SEQ ID NO: 205496 - DNA, 482 bp, Glycine max
  unsure (1)..(482): unsure at all n locations
atccttaagtcacctgaggcatgcaagcttccttgagaagattcctaatgaagttagagcttagctacatacaccccctataatagctaagctcacccncatgccaaaatacatgaaaatataaaaaaagtccctatttcaaagactactcaaaatgccctgaaatacaaggctaaaaccctatactactagaatggccaaaatacaaggcccaaaagaaggaaaaaccaattataacatttacaaagaagaatggatccaaccttgacccatgggctcaaaaatctaccctaaggttcataagaaccctagggccttctttaatagctctagcccaagcctcttggagtcttctatccaatacccttggggggtaggatttcatcatccnctccaccttggaaaggatgtgaccttaaatcctgaggttcttcatactctaggctccttccctcgacacctgtnaaaaaaacatatgtatt

SEQ ID NO: 205497 - DNA, 383 bp, Glycine max
  unsure (1)..(383): unsure at all n locations
tatgatgacccttcgaatatgatgatatggcctttctgagctacaaaggaccagtatagtgggagatatataggcatcactagtttttcaatatttcttttttagtgaaaagttttatcctttcactcataacattttttactctttttctttaattttttttcttattctctcttctttctccaacacctaacaaattaagtgaacaacaacatttttttcttgtttaaattgcaattttttaatcaagtaatacaatatcggttattattatgctaaagtnaatgttaaattattcgaatattatttaagtcgaattctngaaaaaattacttcttgattaaagtttactcgcctcttagtcaaacttagtcataattctt

SEQ ID NO: 205498 - DNA, 355 bp, Glycine max
tgcaccagtaaacatactcagttataagaaatttactatggtaattggtaccctttatgtctatggtgcccaatgcacaagctatcatgcatctaatgataaatgattttataataaaaaaaaaatataagttactgcatctaccggttgcaaaagaaatgcttgcaacttacaccaaacacatgataagatgattacccaagtaatggccccaatcataatgttacttacatgtacctgaaactctctctatgcctacctatgttaattctccggtttatacactcagtttactctgattgctctgcttaaataaactttcagtatctaatgaaaatcaatataacgattctgc

SEQ ID NO: 205499 - DNA, 373 bp, Glycine max
ggacacttaaaactaagctgatgtacctagtattcttatcaccagtattttttgctttacaattaaataaattgggctgagttgctcaagatgaatctgaatcgtcttacaacggtatcaaatcaatgctagtcttttatctcaatatatcaaaattttgagagtttttttttactttacaatgattgtgaatgtttttttttttgcaaaaaagaatatgatgtttttatgcagattctgatcaatttaaagctttagttatatggcacatttcagtatccgtatctatatgaacatcatttttcataaaaaattaaaagtttagtaaaatataaaataataatcaggaatataatctaatgcctacttaaac

SEQ ID NO: 205500 - DNA, 514 bp, Glycine max
  unsure (1)..(514): unsure at all n locations
ggatcttaagtcacctgcggcatgcaagcttganatctaattatggagtctcgttctttcttcttccaccttccccagtaagaatgaatgaatgattgacctaataatcactgttaaccctaaccctttttgtgatcttgtgaatgatttatgagatgaacagaattcgatatgtgttagggtttcactgagctgatgacttttcttttgagaaagagagtcggggtaggctttggtgttcttggaacttcttctgccactagacttgacctacccccctaattacgggtatctatttcttccattttttcccttagaaaaacatgtttcttcttctcttgttaccaacaagttatattcctctttgattctttctggctactacttctgaaagcacttcatatttcaatttttcattttcattttgtctaatgtaaaactatggtaggggaatttggttcccaaagcctcaacatttcctttagtaatgaaggctctagcttattatgttcat

SEQ ID NO: 205501 - DNA, 320 bp, Glycine max
atcctgactcaccataaaccttgacccgttgtgagaatgtcaatccttaccctcggaagcaaaaaaaaaaagaagaaaaggaaaatttccaatcaaaggaaaaaatagaggaaaggaaattcccaatcaaagagtgggagaaagcaaaaagaaaagaaagaaaattcccaatcaaagaatgggagaaagaaaaaaagagaaaaggagaagaaggaaagaaagctcctgatcaatgatcgaaagaaaacagaataaatgtgcagagaggtctttggaccatacaatatctgaacaatacggaattgtcaccaaatgaacaa

SEQ ID NO: 205502 - DNA, 392 bp, Glycine max
  unsure (1)..(392): unsure at all n locations
ccttaagtcacctgcggcatgcaagctngaaatgaggaagtgtantttggtgtaacttcctgctnttattcgttgaccacagagtggtacctggagatatgtcgcgggtatagtcagtcagtgagaacctgtgatgtacctaagcaggcgagctcctggcagtcaacagataaaaggaacaaagatcacaaagcaaggaggcttgtgtggttgctggccanttgtgaaacttgattgatatatgggatgtggcctctggtaatcgattaccaagggtgggtaatcgattacaaggcttaaaaagtgaagacaggaagctaagatggcctctggtaatcgattaccaaggggtgtaatcgattatcaggcttgaaaatgggattaggaagcta

SEQ ID NO: 205503 - DNA, 244 bp, Glycine max
tgatcgtggcgagttcaccaacgtgagtataaaaagaaagtaacttggggcaccattgcttgctacaaaaagcgttatggtgtcctcccttggagaacacttgattcatacccgaaccttatgcatccatttctaccacgaatgatttcgtgaattcatgcaatgcgatgactggcgaatgtgtcattgcatgcttcaatttgttgaatgcaacctcatctttgacagtccaatggaattcttc

SEQ ID NO: 205504 - DNA, 406 bp, Glycine max
  unsure (1)..(406): unsure at all n locations
caatacttcaacaacatctcatatggatgaatgactcgggcatactttaagctatgcatggaaaatgtaattatgaaattgagatgcccgaagaaacaccatgttctatttaaccatgccattatgtaccatgttcaattattttgttttgttgttgtgtgcatntttttttagaaatgggtttatgatcccaacatggttggctcatggtgcctaacacatgcaactaagaatgtagtgtgaagttttcacgcttccccttttttgtttttggttttgagaggaaaatgcaaggatgagcaaacatgataacaaatggtattgcaatttgcagatcaaaatagttgttgaacgcatatgcatgatgatgccatgactgcatgcaaatgtgatgctggaatatgat

SEQ ID NO: 205505 - DNA, 398 bp, Glycine max
  unsure (1)..(398): unsure at all n locations
tcaagattnnatagcaaaaaatatgaatctcattatatatgatatcccatgcctttagttgaattctcgaattcatttatttcaggtcagggttattaatcctcattaaatagttggtgttagatatataacacaaaacatacatgtgcaagcaaaatttcatttttatgggaaggtcccacaccaaaagtgatcatcacagaccctgatcaaatcaaagaagttttcaacaagatccatgactttgagaaaccaatagtgagccccattatcaatttgttgggcactggactagcaatattacaaggcgaaaaatggaggatacatcgaaagattatcgaccctgctttccattttgaaaattgaaggtatatacatactattaatttatggtttga

SEQ ID NO: 205506 - DNA, 312 bp, Glycine max
  unsure (1)..(312): unsure at all n locations
ttttgttcaccctcggctaatataggggctcttggccacatttggagtccacctttagacacttcagtttgctatcatgattgaaaatgcaccatttctgctttccaatattcattattgggtccatcaagaattggtggtctgttaactgggccatcttctntctccatggtcatcagaatttatctgcctagatctcactctgtgatttcgagtgttggctctgattccaattggaattctgataccatgggacagatgtggtaccgggatgttcgacattctgccttagaacatgcagattatatgcgt

SEQ ID NO: 205507 - DNA, 59 bp, Glycine max
aaagggggtttttttttgtaccccccccccccacagtaagtaggaggaagggaataaat

SEQ ID NO: 205508 - DNA, 377 bp, Glycine max
ctgaatcactatcctgcgctgaaggattgaaaacacatatagcgaataaactaatccgtgcttgtgattatttaagctgactaaacacataagaggaataactttagtgttcaactttggattataagcaggctaaagatcgatgttattgtgtcagcggattataatctgcgtgagcataaaggagccatggataaatgtcttgtacgtaaacattgagtatagaaaccatttggtaacaaaattcgaagcacaatatcttttttgcctagtatgaacactatgatattaaaaagttcagtgagttattacaacagaactaagttccatgtgtgtacttatttactaattaccattgaaaaacatggagtagaaat

SEQ ID NO: 205509 - DNA, 304 bp, Glycine max
ttattgtacacggaccgacgctgttttcttgagacttttcttttattaataaacacacatgaaatatgatatgtagcatggttcatacccgtctatgctacaacttttatcatatgtgatattataggaagacacggactttcactaaataacattggataccttttgtttatcacacccaatcctacattgagcaaacactatttgaatgagtttgaagccgcacacacgttggggcacaatatcgtggcctacaacattgaagctcttcttgtctccccattgaacagcatatctggcctta

SEQ ID NO: 205510 - DNA, 433 bp, Glycine max
atgacgaaagataacatttggtacctcaaagccttacactggggcaatgaggggcatcgtgcatgatccttaagtgaacataggggcagatcaaaagttcacacccatcgatgtttttaaacaagataaaaaaggcggagacatgccctggaatttcaatagattgattaaacatcaaacggctccattcccgtcactcaaaaacggtcaagtgactaaatcaaacagaacatacactctgagggagttcccggagagattttcaaaaagataggatgagggtgcatgaattatcacctctttcaaaaggatagtcaatctgtgttttccaaaaaattaaatcaaaatcaaaatcaccaaatagggaaagattgcatgaaccgtgtacaactttccattacattgcattgtttatatgaagtcctgatttacc

SEQ ID NO: 205511 - DNA, 460 bp, Glycine max
tgatctgatgtacttacccgttgaagatcgaagaacatttaagatcttttgaagaacggcgaagaacgggtgataccttttgcgaaattcttcacggaaacgttactgaagcgtgttggaagtgcctcggcttatactttcttcacggaaacaatttttccaagcaaattcgatagagagagaagtgcctaatgggctgaacccttttcttcttcacttcctcccctatttatagcataataagggagatgcttgccgcccagctcacccatgcgagctcatctcgcccaggcgagccatgttgcttcctccatatacaacagccttctggaggaagcttctggaatgcccaagtgggcctgattgctattacaacccccatttactaaatgcacccctgtctattttttgtattcttttccgtacgtacgaaacttacgaattcgaacgatacttattt

SEQ ID NO: 205512 - DNA, 412 bp, Glycine max
gtctaatgtctatgctcgagccaaagcttcttattagaaacttttgtgaggtttatagatacaatacaatttacaaacgttcgtatagaataagttacttaaagtactgacacgtatcctaatgtgatatcaatactccaccaatatgaatatgagaagtatccaagcctttaaaaaaaatagaatccttgcgctccttatataagaggcaaagtgaacaggatgaagcatcttgtatagaactattggagtgtgtttctaaatcaaagagacatttagatcgtgatcttgataatcctaaaccatgcaagtttataaagtcattagttctagtcattatttcttgcagaacagcaagatcttatttgtggcttgagacctctatacatactttttatgcagacaaatcggt

SEQ ID NO: 205513 - DNA, 413 bp, Glycine max
  unsure (1)..(413): unsure at all n locations
caacctcatgtatcatacanaacatgttgatgacttactctttctatcacaaacaagttgaaacctatctatatgtaatgattaatgaaaataaagaaaaagaaccgggttgccttccatcaagcgattctttaacgtcactagcttgacagatgttatctcatgggtctggagcaagcttggctctggccaccaaaaccatcccattcttaatttcctccatcttagaacagatgttccgatcaagtaagtgcttttttgcatcaaacaaatagaatttgatcttctgatcatctacacccatttccatgttacctttccccatatccaccacacaattggcggttaacatgaatggatgacccaaaattagagggatcttatcatcctcttcaatgtccatgacaacaaaa

SEQ ID NO: 205514 - DNA, 238 bp, Glycine max
gaatattaatacggtaaaccaagagcttacctagcatatacatacttttttgaggtaattgtatcgtctatacactactttgttaaaaacattttaaacttgtatattccccattatagtatttgtaggattgaaataaatctgttatgtatagtgctctaagatctccatgtattaatgaaaattgcacattatataaaagagctaatctgaggctaaagacagtgcctcactacat

SEQ ID NO: 205515 - DNA, 477 bp, Glycine max
  unsure (1)..(477): unsure at all n locations
agctntgagccaattcaaacgactatatctnnttactcggatgtctgattgagtcccgccatatatcgagacgctcgaaattgaatgttgaagctctgagccaattcaggcgacaatatctttttactcggatgtctgattgagtcctttaatatatcgagacgctcgaaattgattgttgaacctctgagcaaattcaaacgacaataacttttttctcggatgtttgattgagtcctgtcatatatcgagacgctcgaaattgaatgttgaagctctgagccaattcaaacgacaataactttttactcggatgtctgattgagtcctgtcatatatcgagacgctcganattgaatgttgaagctctgagccaattcaaacgacaatatacttttactcggatgtctgattgaggcccgtatatatcgagacgctcgaaatgaatgttgagctctgagccaatctaacgacaat

SEQ ID NO: 205516 - DNA, 400 bp, Glycine max
ccttgatattattgagggactcatggtctctatgaatgacaaattccttgggataaaggtagtgatgccatgttttcaaagcccgtactaaagcatacaactctttatcataaagtgaatagttaagggtaggaccacttaacttttcactaaaataagcaattggatgaccttcttgcatcaacacagccccaatcccaacatttgaagcatcacactcaatttcaaaagatttttgaaagtttggcaacgcaagtatgggggcattagttagcttttgcttaagaacattgaaagcttcttcttggttctctccccatttgaaaccagcatttttcttgagcacttcattgagaggtgctgccaatgtgcctaaatccttcacaaatcgtctataaaa

SEQ ID NO: 205517 - DNA, 500 bp, Glycine max
  unsure (1)..(500): unsure at all n locations
tgattattaactcacctgcggcatgcaagcttctggatagttcggaacatatactttctntgatggaggcgcactngggaggaggggatgctataatgctgcgccgggaagtgaaaagaactattctagttgcggcaagagggaagcgcttctgagaggcagtgattataggcgcgcgtgcgttttgaagagggaatggatagagtgaggatggtggggtgcgtgcaaaaagaagaggcatggtggtggaagagaaggaagaagaggaagatggggtgggttggtttcggataaagctaacagcttgagaggaagagtgtgatgttgtggaccatgtgtatcggagaaggaagaacagaggataatcgcatggttgcggttgcttcagcttctgactcgaatatgcctggtgctgtttgctttaccacaaacaacacatgccatccaccaccagtcattcattactgcangtcatattcactttgttattttntttaaat

SEQ ID NO: 205518 - DNA, 399 bp, Glycine max
attatcctgcaaaccggttggtgttgcatttgttaaaccatatgttatattcctttagtattctgagtctacatatttgatgaagtgatgattaaatcagagaagtctaattatggagctgagtctacatgtcagtctttaacttactagttagcttgaattctgttattgaagaaatctaatgtccttaaccgaaacacttcacatgtagtagaatagggtaatcttatggtgctttgttcacgaagcatgtctgcgtgacagttctcattattttcccttttccctcattgaactggtctggttggcaattggattttttttcttattctggaatatctgcaagaattcttctgcttcaccatgccaaccaagcctttagactatgggtcaataaat

SEQ ID NO: 205519 - DNA, 443 bp, Glycine max
  unsure (1)..(443): unsure at all n locations
agctttagcatgtataggaagttttagttagagaaaggtccaagttccaaagagttctgagagattttgctgtgtagagatctacagagatgcgagttcaaagcggaagccgttctgagagcttgagatgagtttgtgagtgattgtgagatcctagaggtgaaggagacatcctcaccactcgtgtttttgcagtctttcatcttgttcttctctttgttgtaaaggaggtttccggacaatggaaagctaaatcctctattggatcttccctgtaggtacctgatgtaaatatatttctatctatgtaatgatgttttgtgtgttctctatgctatctgcttttcattccagtgtgcttttaccttgatcacataaatgcatgctnttgtagggtcattcaacagaaggaactggtctgattctaaagtccttggtagtat

SEQ ID NO: 205520 - DNA, 420 bp, Glycine max
ttctagactttcattggtgtatatagatctccttttggttgctctaattgtgggagtatgctcaaatatatacggcaatcttggatagctttcctgcttgactaaggtgaattatgggtgtgtatgggatggtcctatggctattatgcatttatgaacaatgtgacatgccacatcgtccccgttctcttgctattgacgcctaatctcgcgcccaccaagtgttcggtgaaatgcctcaattggcttagcgcgtgacttgtgtaatgaaacaacccatggggcattttggttcttacacattttctttttttggaatatgtattcattcctgaaaaggctacagtaattgccccgcatatattctatgcctatgaactaaaattttatgcataaagaacacaagatgaggtgcatatt

SEQ ID NO: 205521 - DNA, 397 bp, Glycine max
  unsure (1)..(397): unsure at all n locations
agcttatccgacctcccatcagcatggttttcatagagaaatattgcatgcccaggtagatgcagggtcaagaactacagcagccagaggaggaccaggctggtgcactatcgccctctctaaaggagacatcgtccctggggttcatctctgctcacctgcggaggttagagctctagatgcacagttacatgtagcatgtgatttcgtcttttattttatgtcatcactttcagtntatatttgttatctcattttgatgaaactagactcaatgttagcgctttcagtatttgttatttcattatgatagacctgaacttgatgttttcgctttcaagttttgttatctcattgggatttactttattgtnnctaagggattggcgtactattg

SEQ ID NO: 205522 - DNA, 345 bp, Glycine max
  unsure (1)..(345): unsure at all n locations
ttcttttccatgctatgtgctcgcgactggtccctttcttcccttcgcaacttgagttcattattgctaccccatatagctccgcgaaattttgttcggccatactctttcttgcgagccctcttggtctcttgttcaaaggctcttgcggtaattgcattctcttcccgtaacccggcacactccttccgaacgtgtgtagcatccaacttgaacttctccttggcgaattttgcctttcctaactcgcttttgagagcttggacttcttcgtnctcttccggtgcttcaaaattctcttcgctgacgacttttaacgtggcgagccaatctaaacctcgtatg

SEQ ID NO: 205523 - DNA, 424 bp, Glycine max
  unsure (1)..(424): unsure at all n locations
ctttacctattatatttttnnaaaaagtgtctgtctcagccggacctagcaccgcgagcagctataaagcttctttaatctcataaaggctctagacactcctacattttctcaagatccccacggtcagacatggatagtttttgggatattccaccaatttcgagactacacacggccaatgaatgctgggcaggcattttaccgaggcagcttcatgtagctttgtctagaagcattattaagaggcttcctctaaaacctctcgcggctttttgaaaactctctcaaaggcttgtttgagaagctagatccttatctatccacccctctattaactaaattaacttccttaaaaataattacggatgaaaataacgcacaaataatcaacatcaaacataatactaaaatatatatatta

SEQ ID NO: 205524 - DNA, 377 bp, Glycine max
agcttgcgcggtaatatatgtaatcatctatttctcattattacgcatatccatccatattgtaatatggcgggaaaagtcccttcatattgtaattaccctattccgtgtgtattggcatgtgtatggataaatgttgataatcttgattttctaaaattaatttacttaacaaatgatgttttttgtacacattacaaaatgagtttgcttatgtgcgagtgtatatatgtgaaaagtgattttccgttcgcctcaacatgtatttcaataagcacttttaaattaattcaaacgctaattatataaaattgacttttaagcacctatgtgggaaaagtgaatgagtgttatctggatgataataaacataacta

SEQ ID NO: 205525 - DNA, 469 bp, Glycine max
  unsure (1)..(469): unsure at all n locations
acttataatactcagcttgtagctaaagttgcaactttcagtgaacgtgagnttttgatgggcagntaagactcgatatttagatgtcaaagagatgagctcattccaacaatatgatggtcctgaggactccaaccttcaccatcaaaatccataaatacaataaaatgtcagtgtaatattattatggcatagctgattgagtaacaaatatgatgtatcaagagaaaacatccgaaaattaattttaaaaaagcaaaagaaagtagttataaaagagaaaaatcagcaaaagatatctcaagccatgataattattttattcagtaatcagtacatcagttgaaactagcaaggtaaattttatactaaaaagtcgagtcatgtgagaagtatatactgcaaaatagctcaattaaattaaaaataatataaccgtgttctcattggaatgccaaacggtgcacca

SEQ ID NO: 205526 - DNA, 430 bp, Glycine max
agcttatctggggtcatattcttacctatgcatcttcgtctcctacttgagaattttaattccacctttagatcagaggtgttgaatatcaagaaagtataagcttgtacaagggtattagtagctaaaaatattagattaaattttacgctttactttcgatgtgttgaaatcaatcatgcctcgttgaaattcataggcaggacattgatgtaagtgagattactaaaaactctataccatggtatcttaatgaataaaaagggtacattccaactgcaaggtcccatttaacatacgtgtggtgaaaatttatgcaagtcgcacatccaacagatgaaaggatccatctgtccttcatgaaattacttctataatatggttccctttggaaaactttcttgtctggctgaagagacaggcactgatt

SEQ ID NO: 205527 - DNA, 423 bp, Glycine max
  unsure (1)..(423): unsure at all n locations
tctcggccaggcctgcttggaatcatgattatgttatcttggaactgtcggggatgggcaaccctcgtgcagtactttctctccatgaccttgtccgttcataccatccagatattattttcctttatgaaactcttgtagtgcataagaggattggtgaaataaaatcgattttgggttatgattgttgccttactattgattgttttggtagaagtgtgggcttagctcttatcgggagaaatactctcatttgctcccttttaaaattctcacacaattttattaatgttaatgcttctcaacttggacagccctgttggcgttttacatgctcttatggttttcctgaaagacaanaacaaaatactcttatgaccatctatgaatctctctcgtgatatactctctcatgtatattat

SEQ ID NO: 205528 - DNA, 503 bp, Glycine max
  unsure (1)..(503): unsure at all n locations
tcttaagtcacctgcggcatgcaagctttngtttccgccgacgatacacagtgaattgtaaaataccaatngctgatactgcaattgttagtagaacaatgccaactgtgatagatgtcgctcgtttggattttgatgaatattggcaatgagttgtattgcaaggcaactttacattatcagtttctgggatatctctagaaagaccaccaactccagctccataaggttctggtcgagtgagattgacatgatctgaagcagtgcaagctttcaaggatgaaaacccaacgccacataaccccatattatgttcaaacacaaatccttcctctagtctctttagagcttcattaaaccaaggaaagcaaaataaacttattttagtttgaacattttcaatgataaaacaaaacatatcaatgaagaaatggacagtagcaataaaataaaatgaaaggagtagcatcattattaccaggaggtacattccccgagagagt

SEQ ID NO: 205529 - DNA, 425 bp, Glycine max
ttgcatgtgctcaccttatcaaaccacgtgtatgccattttttataaatatgaaccggactcccttatttactctcctcttcagcgaagaccggtgttaattcttctaaaacgtcaaaccgaagtaagtttaatacaatgattcgtatagtacgatatataattacacggaactttttcacccactcccttcttcgaatcttaatccaatcaaaaatatcattttaaaaaaaacaattgatcttctaagttgagtactttaccgacttttctattatatcttataactaatatgtttccattcaaaattgaaatattaaattatataattgaatactgatttcttacatcttatcggaatcatctcaatatcaataatctttccaattatctcttagtgacattaataatactatgaaaactatt

SEQ ID NO: 205530 - DNA, 434 bp, Glycine max
  unsure (1)..(434): unsure at all n locations
agctntcagccatttcaaacgatcatatacttttactcggatatcagatngagtcccgtaatataacgagacgctcgatattgaatattgaagctctgaactaattcaaacgacaataactttttactcggatgtctgattgagtcccgtaatatatcgatacgctcgaaattgaatgttgaatctctgagccaattcaaacgacaataaccttttactcggatgtttgattgagtcccgtaatatatcgagacgctcgaagttgaatgtttaagctttcagccatttcaaacgaccataactttttactcggatgtctgattgagtcccgtaatatatcgagacgctcgaaattgaatgttgaagctctgaactaattcaaacgacaataactntttactcngatgtctgattgagtcccgtaatatatcaag

SEQ ID NO: 205531 - DNA, 476 bp, Glycine max
ttaatctcagcttaacatcagaccacttcctggtgctggaactacttctttggatttgatggggcctatgcaagttgaaagccttggaggaaagaagtatgcctatgttgttgtggatgatttctccagatttacctgggttaactttatcagagagaaatcagaaacctttgaagtattcaaagagtttaatctaagacttcatagagagaaagactgtgtcatcaagagaatcaggagtgaccatggcagagaatctgaaaacagcaggttcactgaattctgcacatctgaaggcatcactcatgagttctctgcagccattacaccacaacagaatgggatagttgatatgaaaaacaggaccttgcaagatgctgctcgggtcatgcttcatgccatagaacttgcctatatctctgggctgaagccatgaacacagcatgttacatccacaacagaatcacactgataat

SEQ ID NO: 205532 - DNA, 488 bp, Glycine max
  unsure (1)..(488): unsure at all n locations
tcctttagtcacctgcggcatgcaagctnttcgtaaagcttacgtgaaaatctgggtcctatccatggtagaagtctccacagaggccattacctccctcgcccagtattatgatcagccgttgagatgctttacctttggggacttccagctgtcacccatggtggaagaatttgaagagatcctatgatgtcctctagggggaaggagaccatacctcttctcagggttctatccctcattagctagaatttcaaagatagtccaaatctcgacgcaggaagtagaccatggaaaacaagtcagaaatggagtggttggaataccaagaaaatgtgtggaggcaatagcaagaaccttggcatgtagaggcgaatgggccccgttcatagacattctcgccctgttgatcttcggaggagtcctctttccatatgtggatgggttggtggatctagcaccgaacgacgcttttcttgcctatcatg

SEQ ID NO: 205533 - DNA, 396 bp, Glycine max
  unsure (1)..(396): unsure at all n locations
ctaagcttcaatatcccgtgtgtatacccgtaaccgatgattgtttatgtttttggagtntaaccatgacccattgccctattgtgatctgtgcatgccttcacttcggatccactatttgcctcattccgtttgagcatttacaagcatcgtcctaaactatgatgatatgccttttttatctgacaatactacgtgcattaaatccactgtggaacttacgaccatgtattgggaaaaattgtacggcttgttgtgcgatgtgatttaaaagtggagatgctactgaaccctgattccatacagggctggtagacaatttgaccaattcatagatcctcccaccatgatagttattatgtcaacagcactgatatttgttcaatgactgactta

SEQ ID NO: 205534 - DNA, 377 bp, Glycine max
cctgacgcatgcagcttatatagcttagagcttaatctttgtattttcaactgccgggataatagagatggacttgcacgaggtctctaccgtgcaaagagagagtatggaccacttacactctctgcagcctatctgtaaagaagtacagtttgctaatgtcgccataagctcaaagctgattttatgttactgatcgaaagacacattaacaacatctgatttaaggagttacgattgtcaatataaaacaatctattatttccgctatatgtgtctttgcaacagatttttactaaacatttgggcgagacttcctcgtgaatgttattatgactgagaatagagtaattgttccaatgctatcgcaatataga

SEQ ID NO: 205535 - DNA, 298 bp, Glycine max
  unsure (1)..(298): unsure at all n locations
gtgtggtgcttcaatggataatgagggaggaagaatttctacgtttgtgaattataaaccgtccgaaaaaaaaatgagggctgagtgaatagagagaaaagctttttggttttaaataaaagggtttcctctctttttattattntattcaagctctgccacatgtccctatttgattggagcataaatggcccactttctctgtttgactggtacccatactcagtcacaaaagtgagaaaaatctgacctttgtaacgctaaaatcctggctctgtttcgtgccatttctctggtt

SEQ ID NO: 205536 - DNA, 364 bp, Glycine max
  unsure (1)..(364): unsure at all n locations
taaatnaacgcaaggggccacacatagtgaccaatataatttcaagaactcaacttccaacaacttaccaacaacaatataattggcaacaatatctatgactaagtgaataatatcttcaaagttaacataactaccccttaaaattctatataaattttctgcaaatttaaaagcataataagtatccacaaactttaaaaaaatagcttctttatagaaaaaaaactaaaatgttaattatagtctaccttcaacaatatccacttactactataaagtacaactagttgtttccaacctcaaatactttcacaagttcttacatcatattcactatttataaaaatcacaaacattataa

SEQ ID NO: 205537 - DNA, 491 bp, Glycine max
  unsure (1)..(491): unsure at all n locations
agctngagatacatcttntctgtctagatattactagaaaggccaagtatatacaatntgtggataaagcataatattacttgaaatgaataacccaccacttgtaagaattcatcccatgaatatatttccaacccagaattttcaacttcttgcttttgttcaggggtaacctttccgaagcttacaattgctgaaacaaagacataaaaatgaatgcttctttctgaagcataagcattttatgaaagaaaggatagaatcgacaaaactaactcttgagatactttgttgcatttggaaatgtcttcaatagctgaaaagtttcaaaaacaaatatatgggtaagactgactatttacaaaagaatgtacacagctctcaaattcttcctaacaattaaactgctataaaacggtgtgttgtgaaggagaacctcaagtattttcttttcttctgcaaatgcaattgagacctctgcatggcatata

SEQ ID NO: 205538 - DNA, 311 bp, Glycine max
actaagcttagagaatattgataatgcaaactaacactgaatttttttacatatttaaaattcccacactcaaaacttaacactataaacttgaaccaatatcataactcccacacccactcgagggtgtatatgtatcttgctaatgaaaatataaatttggataattcgaatgctcattatgtactttctgattattaatatgaacctaccctgtggctggatacgggatatataatatatatatatgtacatgccgcgaatgtgacgggatgttgaacactataccactagttagtgtgaagaatgac

SEQ ID NO: 205539 - DNA, 413 bp, Glycine max
  unsure (1)..(413): unsure at all n locations
agctngaaggcatgtaacctaccatcttctcatagtaggacaccggtaacgtgtctactatcatcgctatcaactccctctccatcattgggggcactacttgagctgccatatccttccacctttgggcataccctttgaaagatttgtgctcccttttgcacaagttctgtagccacatcctatccagagctatattaggattgtactaatactgcctaatgaaggaaaccattaggtctttccaagaatggactcgggaaggttccaaattagagtaccaggtgcggcttccccaataagactttcctggaagaaatgcatcaacaacttttcatcttttatgtatgccctcactttcctgcagtacatcttcaggtggttcttgggggcaagtagtccccttttactta

SEQ ID NO: 205540 - DNA, 352 bp, Glycine max
ggccaaagaaccgaagtcttctcttttagcctatcaaagtcctcatcttccagggtgccatccttgtgaaaaacttctgtaaacaatttcctgcgcccctcttctaaatcttcaagagaccggggtaatgaatttaccccttcctccaaagcctgaaaatccctaagaagagtttgcattcattaataccttttcgccaatagtgccctgacttgcctacaaacagatgcatcttgtgcacttccatgcaatgtgattttcaggacacaatcaactaaatgaacctgaagagccttcctgaaatccccatgaactctctcaagatggtgaaaacggttttttaattctccat

SEQ ID NO: 205541 - DNA, 323 bp, Glycine max
  unsure (1)..(323): unsure at all n locations
gcaagcctcaacatacaataccaagctgttttatatattacnggactctatccgacatccgaacaaattattattgtcatttgatattgctcacagctactgcattcaagttcgagcgacacgatatactacgggacttagtcagaccaccgagacaaattgatattgcctctcggatttgctcagagcctccgaatgcaatgacgagcgtttcgatatagtacgggactcagatatacatccgagcaaaaagttatagtgtttgaattagctcaaagcttcgggattcaatttgcgacgcctcgatatgttacgggactcca

SEQ ID NO: 205542 - DNA, 279 bp, Glycine max
tatttgagacactcgaattgatatcgtagcttgagcaaattaaacgacagtaacttttctcggatgttgattgactccgaatatatcgagagctcgtatggataccgatctctgagataattcaacgacatacttttactcgtgctgactgatccgaattattgagacactcaaatgatatcgtagcttgacatatcaacacataactttctcggatgtctgactgatccgaaatatcaacgctgaatggatacgagcttggatattcaacacatactt

SEQ ID NO: 205543 - DNA, 474 bp, Glycine max
  unsure (1)..(474): unsure at all n locations
agcttgtgtgccacgaataacttgttctataatattgtgctatttatttgtgccatttaagaatgacaatgtatatgtttaatttgcaatgcgcacaaatgtcctttgatctttttaacctcgatcgagtttatgtatttgtgtttattttcttaataaaacaaaaacacaccgnttaaatttaatgttaatttaagttcatttttttaattatgatattgatatgaagttatcttgtaaaatgaatatttttctcccaacatgatttattttgtatttcagagtatttctaataaaaatttcttaaatgagttttttaagttactttttgtgatctccacagtattatattattctaagaaattcatacatatatttgtgttaatggtaagaaaatttaagaccatttaaaaaattcatattntatattnttatttttatttaaatatgatactaccatgtgttatataaata

SEQ ID NO: 205544 - DNA, 375 bp, Glycine max
tgatgaacaagttaaaatgctatggaggcggccctggtggaggtgacttgtgactttctcttgtgcgtgtcgtacctcgaatgatataatagctctggcttggcactgcatgagaaaaagattgataccgtgttgttgttgggaacataaatctctgctgagcctagatttagacacagataaccctccaagttcaaacctactcttctaattattggacatttttcctcttaaatcactgttaattgttggcgactttcttcgtataaaatattggcattttccgaattggttctgcttgcctattaccgtttctgatgactactcagatcacatgtcaagttttttggtgcaatatgactataatatattatc

SEQ ID NO: 205545 - DNA, 471 bp, Glycine max
  unsure (1)..(471): unsure at all n locations
agcttccttgagaagctagagcttanctacacacccctataatagctaagctcacccccatgacaaanaaaaacatgaaaatacaaaaaaaatcctactacaaagactacttaaaatgccctgaaatacaaggctaaaaccctatactactagaatggccaaaatacaaggcccaaaagaagaaaacaacctattctactatttacaaagaagagtggacccaaccttggcccatgggctcaaaaatctaccctaaggttcatgagaaccctaaggccttctttatcaactctagcccaatcctcttggagcctcttgctcatggctctggtaactggtcctttcctagggaggattgcatcagaaactntgtttcttttttgctttctctcaatctttgatcggngaattttctttcttttttgctttctcccnctctttgattnggaattttctctnttggctttcttc

SEQ ID NO: 205546 - DNA, 356 bp, Glycine max
aatgctattcttaaaacgcaaatggcatacgacctcccccatttacacaaacatcaatgttaatttatagcgaactcatgcacatactttctttcgaacattcactcgcacaaaatattcttctaacttagaaaaatgcacctatgcacaatcatggcaccttcgttacctaaattatttatatgtacttccaaggtgtatttgctacctacatcacatgcacttcctttgctaaatttacatacatgcatactcaaagcattgtgactaccaaaaaatgcatacgtgcacatgttggtatttctaatacctatacatatacaatacttgtgatgaatcttggctacctacacaat

SEQ ID NO: 205547 - DNA, 432 bp, Glycine max
  unsure (1)..(432): unsure at all n locations
agccttggaccaaatntctcagtgatatttatcgtcatggagccaatattcttcaaatgcagaatctcaaatgggtcatgaattcatggaacttaattattaaggtgaaaaatgttcttaataagggttttatttataggattgggtgtggtgatatttccttttggtatgacaagtagattcctaatggacttctttgtcatgaggttctgatgcatacagggagagagagctagtataaatattagaaccaggtaaggaagttttccaaatttctgcctcctttattgctcaaccaaaagttacatatatagggagcaaaaacagaataacaaactaagagatggatccactaatccactactaacagaaaggataagctagcactagtccactacagcaagcactaactaactgacaagcatttttttt

SEQ ID NO: 205548 - DNA, 403 bp, Glycine max
aaattgcaaaaattaagggattttgtgccttatcttttaccattatggtcaatttagacaatcacgattttctttaattattttatgaccatttttctttaaatgttttaattacaatgtatttatttgtatttctgttactttaacgtgctccatcacatcactataaatattggcccttggcatcaattttatatacaccaaaacgaagaacatcttcatcttctcttctttctctgagttctccctttcttgttttccttgctaatttttgttccatgttcatacatgaaagatctgttaaatcttagttgatttgcgcactacgcatataattcatatagcacagtgtgtctaacccacatctcgtgtctaactcttatatcatcgattgtgcatcact

SEQ ID NO: 205549 - DNA, 511 bp, Glycine max
  unsure (1)..(511): unsure at all n locations
ggatccttgagtcacctgcggcatgcaagcttctccttccatgacttattctctattggatgacgtctcctctaacctcttctcctttatcttttgctgtaattccatgactaaaaatcaccattgaaggaccttattgaagctcaaagatccagcctccatagaagcttcataagcaagcttccaacaagtggtatcagagcacaagagcttcaagtaggtgctccttaaacctccactaaattttcagctttactttctcctccattgttgtttcttcgtttctctccatgtatctcctcacgtgtcttgtgctgaatgttgttaacataattttttagaagttccaccaattaagcttgctatagaagctagatttgattttctatggttcaaattccttgttcttgttcttgaaccatgaattgtgttgagtttaggttccttngagtttatattgtcaattttttggtgaaacctaaaccatataattcttacaaaacattaaagt

SEQ ID NO: 205550 - DNA, 320 bp, Glycine max
tcacaagaaagcttccatcaatattatacttagactatcctaaataatgatagctttttcaattggaaacccatgattgctaaccagacctttaagtcagatcccatcctttattgcttctattatagcatgcactctacctttgtagtggataaaaccacaatgggctaaagagtttccttccaactatcaagagagttgccaatcatgaatgggtaccttgtcatagttctccttgcatccaaatctacagcatagtcaaaatctaaataaccagcatgagcactagacgtgtctccatggtagacaagtccaatatc

SEQ ID NO: 205551 - DNA, 485 bp, Glycine max
  unsure (1)..(485): unsure at all n locations
tcttaatcacctgcggcatgcaagcttagttgaggactatnttattttacatttcantgttgaagaagaagaaggagaaagaaagagcaaaaggggtgctcctgtggcattattattgtgatatgtaaagtaaaaatgccactgacggaaatatttatgataatgccactgatgagtttgctgtgtgattaggataaggtgtaggcgcggacaatgcgtcattggatggtttttgaagtgacacaactgcatgcctcaccatttgtttgattgcttccattaaacgacaatatttggtgagtgagtaaatgtggagcttggacagtggcattcaaatcacacccaccatgatcatggaataaaaaaaaaatctcaataatagttaaggcttattattgagaaacatggggtgtttaatgagacattaattataaactatcttgaaaaccaaaaattaataacttttctttcttaatcaagttttc

SEQ ID NO: 205552 - DNA, 332 bp, Glycine max
tcgtcactcgccgtactgttctttctttatgcttaccaacacccacactacttctcgtagtacggaaccctgcactatcccacacaacgaccaccgcacccccttggattttctacagccaccgttgaccgtctctacgttgtcctggacgatcttgatgtcgcgacacgccgcttggatgcccgactggacgcccttctcctgcgacttcctcgacgacctagacctctggcgcggattccgcttcacactccgtcattgacgatgccatggacgtttactccaccgaccacttcgcatttgccaccgactgctacagcatctacatcgcc

SEQ ID NO: 205553 - DNA, 449 bp, Glycine max
  unsure (1)..(449): unsure at all n locations
anngcttgcggattggtctntgccagtgaaaggatcaatgtgggtctgaaaaaaggaaaatttagtcatcctgcttggacgaatgagaaagctggggcaaataaagagggtgaggatgaaggagaagcccgtgctgtgactgccattcctatacagccaagtttcccaccaacccaacaatgtcattactcaaccaataaccaaccttctccttacccaccgcccagttatccacaaaggccatccctaaaacaaccacaaagtctacctaccgcacttctaatgaaaaacaccacctttagcataaaccaaaacaccaaccaagaaatgaattttgcagcgagaaagcctgtagaattcaccccaattccagtgtcctatgctgtcttgctcccatatctacttgataattcaatggtatccataaccccaaccaaggttcatcaacc

SEQ ID NO: 205554 - DNA, 470 bp, Glycine max
  unsure (1)..(470): unsure at all n locations
gacacattaaactcaacttttgctcatgaggcctctaacttcaaacatcgtatttatatgtgacaaaagaataatgtaataacgccctatcttgctagatgctggtgctactaataatgtttgtcacaaaaattatataataataggtgttttactccgtctagacatactattgctactaataatgtttatccatgactccgtacatgtttatttctgtctctcattcaatattttgataagggtcaatctttttatgtgaacctaacctacttaaaacgtgacaatatataggataagatcggatcaaccagttgtttttatctgcaaaacaaatatattaatattangcacaatattttttacctgagttctaattttatttatacaaacatttctatacctggaccgtggtcttggtatgcggattacatctatgttatttccttctaagtgagcttatgtgacct

SEQ ID NO: 205555 - DNA, 463 bp, Glycine max
  unsure (1)..(463): unsure at all n locations
tcctataagtcacctgcggcatgcaagccttttacatattatcatactgtggtattgtttatcattatttttttatccgcaaatattattnttagttttgttagaaattgacccagtgtttgatgaaaggtacgaggagaagtcgcgtgtaagttgagttcatgtttggttcatttcaattacgattattcaagcctttctttttttataaaaaaaatagaatgacaattttcaagttttcaaggttcttgatattgcgggttacaattgtggaagcctcttaaaacttgtggaccgttttttaaaaccttcgttattagttgattaaaatgagtttaatccaaaattacatgttgggaagcagatgtggtcctttttgggttgttatagggtttgaattgagatcaatatatatatatatatatatatatatatattataaaataggaattctcttaatcta

SEQ ID NO: 205556 - DNA, 414 bp, Glycine max
tctaaccatattgcttgacaagcactcatgctggcatctatgtattcatcctcacatgacgattatgccaccacagattgcttctttgaacaccaactgatagctgcatttcctatctgaaacaaataccatgtggtactctttctatcagttttatccccacaccaatcagcatctaataaaccaatcatctcacaagaattgctactcaagtttgtaggaaacagctaaccaaaaccaatagtccctttcaagtacctcaatagccttttcactgcattcaaatgaccttgttgtggtgctttcaaaaatctactcaccaagccaactccatatgctacatctggtctggtattgcatatatacctcaatgagccaaccatgtgtctgaacatagtcttatccaccaatttt

SEQ ID NO: 205557 - DNA, 338 bp, Glycine max
  unsure (1)..(338): unsure at all n locations
tcacaggaacctgttagcctacctgctgcatgcaagctatcgtaataattacctttattttgagacancggctattacatataagagtcactgtgattagagattatcagagtgggaacccgttcactcttactttatttggttggaacatacgggagaagaacccatttgaacccacacttgagccgttcataacctcacagtggtgatgaaccggttccaatttttgaaagaacactttattccttttaaaagaaaacaaacgcggtacgtttcctacttatcatatagtagtcagtacactttgcccatttttgaaatcagcaatgatgtataaa

SEQ ID NO: 205558 - DNA, 284 bp, Glycine max
tagaaaggttgggggaaagcaaggcaatgattaaaatttgtgagttcagaatcaaaattcagttttgagagggttaaatgatgccgaatgtatggccacatgaataaaatttatgggtgtggctggcagcactcattatgaccacaatccacctcttggtaatgctcgcgcaccaccatactcatacactagtatcttctaagcccacactttcacacactgtcactctcacacgcaatgttgccatccccatcatacctacactcacttacacaagtcacaca

SEQ ID NO: 205559 - DNA, 487 bp, Glycine max
  unsure (1)..(487): unsure at all n locations
agctngaagaagagcctgaagatattttgtctnttacatgcttaactctcttaagtggcatttgtattggttattgcattgtgtgttgcatcttactctctaatatttcatatatgtatcatgcatcatcatgtaggagtaagaagaaaagttctaaagctggaaaatttcttctaaagttaaagctctctattttaatcgattaccagttgatcgtaattgattacacaagagtttgtagcttgcagagaagtctctcatatcggtttaatcgattacaagcttatcgtaaccgattacacaattatttttgagacaatgattgattntttaggagtctctgctntaatccattaccagtagatataatcgattacttctctcttaaaaagtgtttcagaagtgatcaagaacactttaatcaattacatcanaaatctaatcgattacattgttcttgaaaagtttccaattttgggaagaacac

SEQ ID NO: 205560 - DNA, 436 bp, Glycine max
  unsure (1)..(436): unsure at all n locations
ttggttcaatggccccaatgacatatattcccacatgttataagccaaggggcggacatgacattcagatgatgtggtggaacattgacattttccgcgtacgcttgacatttatggcatttccttacatgggcacagcaatngctttccatagtgagccaataataacctgctctaatgatcttcctggccatagcatgcccattggcatgtgtcccaaatgaaccccggtggatttcctcgaacatgtatttcgcctcattggcatctatgcatcgcaggatggtcatgtcctgatttcatttgtacaagatggtaccactcacaaagaaaccagtagccattctccttaacgttctttgttctcgacataactgttgatgtcgaaataccacngttctcaatctcgctcttcctctatcgcacaacaatgtgt

SEQ ID NO: 205561 - DNA, 469 bp, Glycine max
agcttcacaaggaaaatcatcttgatattattgtcttgagattaacctcaagctagcatgaccaaacttattatgacatacccagtgatgcattttgactgaaagtatgcatgacaccttttgactggacagatcactaagtttaatcttataaagatttccttgtctcttagtagagaagagtggcattgtatccactgtcacataattgacttatgctcaacagattatgcttcaatcctttaacaagcaaaacattatcaataggagaatagggtggaataccctccgaaggtaacaaccccaccagacatagggcttagggattggaaaatagactttttgcttgtcatgtgttgtgagcaaccagtgtctaggtaccatgattggtgtttctttcctgctatcaaggagatctacaacaagaaattatttgctctcaggtacctaaatcttttggggccttttt

SEQ ID NO: 205562 - DNA, 284 bp, Glycine max
tacattctccccctttctcaagcaaattctttattcttcttgacatcatcaaaatcttcatgatttacacgttttggtcattctatcctactgggcaatggccaaaaaccggttgtttccgaaaaagtatactctgggacgctgacaacatctattatttgtttgtctcagcatgagcctagaagatatgctagttgtggcaatgcatgacgttgttgtatttgtgggtgcatcgtgtcggcaacttacatgactgagtgttaggaaatacatgtggcagttta

SEQ ID NO: 205563 - DNA, 478 bp, Glycine max
  unsure (1)..(478): unsure at all n locations
agcttgtagagttgagtctcgtattggtttaatcaattacatatatctcacaatacattacactgttattngagacaatgactaatttagtcaagagtctctgctttaatcgattaccaagtggattaatcgattattatttctctctcattaagttgtttagatgttaacaagaacacattactacaaaagtcatttactacgacgtaccaacaaggacggtccacagaaaaatggcatagaatctttagatggtaagttcaaggacggttattntaaaaacccgtcnttgaattggtatgtttttttctctctcttatcttatcttctcgggtacactactaacccttcattntcccctaacctntcattttcctctctcattgttgccttgtatctccctttctctttgtcgttttctatctctggcagaggacggcatgggtggatgtggaccactagcttcactccaatgacc

SEQ ID NO: 205564 - DNA, 417 bp, Glycine max
ttggtgcgtgtgcggcaagtcccaggaaaggttatctatgtgtcagcggggttccatcagttcttcttcacataagccaagttgatcgcaaggctgagtgactcaaagatcatggtatcagaaaccaccccttgaatgtcacacagcgctgtaatcaacgttgggaacccgatcctcgatgtgctggactgggcaatctgactgatctgctgtgatataaagctgcccacatccatatccatgcggctcaccaaaccgtagatcaagcgggccctgtcaagattaacatcagatgtgtgagaagtgggcgcgagatcatagttagagatgacactccatgtctgagcaagtgtcgtcatgttcttcctcaacagctttcatgggagtccatctacattaagaacaatatgcccccct

SEQ ID NO: 205565 - DNA, 479 bp, Glycine max
  unsure (1)..(479): unsure at all n locations
caactctgaagatatggtcttcatctaatattggttcanagcgggtctaaaaagaggtatatctgatcatcatgctatgataatcgcataaaaaaaaaaaaaaactagggcaaatgaagagggtgataatgtgggagatacccatgctgtgactgccatttctatacagccaagtttcccaccaacccaacaatgttattactcagccaataaacaaacctttttcttacccaccgcccagttatcgacaaaggccatccctaaatcaaccacaaagtctgtttaccacacttccaaagangaacatttccttttacacaatcctaaaacacctaccaatatatgaattttgtagtatgaaagcctatataaatcaccccaattccagtgtcctatgctgacttgctcccatatctacttgatattcaatggttgcctaacctcaacaaagtcataacctccattttccaaatttattg

SEQ ID NO: 205566 - DNA, 300 bp, Glycine max
taatgactcctctgcggcttccacataaagcatagatgatgggcagctcaccaatatgtcttcctcgcctgatacgatgaccatatgcccttccactacgaatttcaacttttggtggagtgttgaaggaacaactcctactgagtggatccacgggcgcaccaacagacagctgtatggggggttaatatccattatttggaaggtaacttgacaggtgtgagggcctatctgtactgggagatcgatctctcccctaacctctcagctggtgccatcgaatgcacgaaccaccattga

SEQ ID NO: 205567 - DNA, 466 bp, Glycine max
  unsure (1)..(466): unsure at all n locations
agcttgatgatatggtcttcaccgattataggatcaaagcgggtctaanaagaggtaaatctgatcatcatgctttgataaatgcaaaaaaaaaaaaaaaaactagggcaaatgaagagggtgagaatgagggagaagcccatgctgtgactgccatttctatacagccaagtttcccaccaacccaacaatgtcattactcagccaataaacaaaccttctccttacccaccgcccagttatcgacaaaggccatccctaaatcaaccacaaagtctgtctaccacacttccaatgacgaacatcacctttagcacaatccaaaaacaccaaccaagaaatgaattttgcagtgagaaagcctatagaattcaccccaattccagtgtcctatgctgacttgctcccatatctacttgataattcaatggtagccataaccccaaccaaggttcatcaacctcca

SEQ ID NO: 205568 - DNA, 387 bp, Glycine max
gagtccacgaatgaaatgcttaccactctcttaagactggatagcggtttctaatgactcctctgcggcttccacataaggcatataggatgggcagctcaccaagatgtcttcctctcctgatactatgaccatatgcccttccactacgaatttcaacatttggtggagtgttgagggaacaactcctactgagtggatccacgggcgccccaacagacagctgtagggggggttaatatccattatttggaatgtaactcgacatgtgtgagggcctatctgtactgtgagatcgatctctcccctaacctctctgctggtgccatctaatgcacgaaccaccattgaacctggctctaaatgggaggcattgaatggtaattt

SEQ ID NO: 205569 - DNA, 488 bp, Glycine max
ggatccttaagtcacctgcggcatgcaagctagctgaaatacatgtgcttgtgatgtctcctccacctctaggacctctcaatcactcacaaactcagctcacgctctcaggacgacttccttttccagctctggtctctgcagatcttcacacaacacaatctctcaaactctctggaatttggacctctctctctagaactgaagacatgcaagagatcctgaagaaaaatggccaaactccctctctaaatctgatttcaggcttaaataggtggctttgtttgtgctcatgtgcttagcgcaactctgatccgctcaacgcacattagtgaatatcggctcagcgcgtgcttttctcactcagcggatggactgaagcggtgcgcttagcgggatgacccttcgcttgcgaacatgccaactcatccttcttcagattcttcctcgcctcagtcgaagagtgttgactcaacagatggctcgct

SEQ ID NO: 205570 - DNA, 249 bp, Glycine max
ccttttttaatgggggaatatgtaccgctgtgcggcatattgtaccatttttattccaatactctgaggaatatccctgtgtgaatgtgccaactgtatctggtcttacaaccatgtttacttgaccaaattacgttcctacaagatacgctaggcgaataaaattcacataaacaccaaattggcatagcaatatacaccacaatggaatggcttcttaatctatgcgtacctatacacgcgggctac

SEQ ID NO: 205571 - DNA, 491 bp, Glycine max
  unsure (1)..(491): unsure at all n locations
ggatcctctgagtcacctgcggcatcaagctagaactctnggcatntctttattactagtcacttaaaaagttgtgacttttgaaataatctttagaaacaagtcacttgaagaattgtgacttttggaaatgtatttttcgaaatcagtcactggtaatcgattaaatgtgactcttcattttgaattttgaaaattaaaacgtttagaatgtctggtaatcgattacaagtgttgtgtaatcgattacacaagtttataatgatttaaaactgttaaacacaagtcgtaacttttgaaatttgaaatctgaacattttaaactctctggtaatgattttgtgaaaacttcttgtggtattcaatgttttaaaagctttcttagtacttatctngattgagtcttctcttgattcttgaatcttgagtcttgaatcttgatcttgattattcttgaatctagattcttgaacctgcatctgaatcttgga

SEQ ID NO: 205572 - DNA, 435 bp, Glycine max
  unsure (1)..(435): unsure at all n locations
tacacttctgaattttttatgctgaaatttaaagaacggaaacataaaagctgaaatttaaatgacataatcataaaataactaagaataactaaagtgttgagaatgcaaaaaattttaaacgtcctgctcctactgtggctggtcttcattaatatccagtgctaatggctgagtctcctcataagcaggtgaagaagatggagatggttgtggggtctgatctggagtggtctcctcctctactgctgttgctggtgatggtgctggtgttggtggctactcattcacatgctcctatgctgcatatgccccaccccctccataggaatatggttggtctcctatccatgccacctgagcatcatactcctncatgtttataatggtgggcaagcccaatccctgaatgctctgcatgatgatggactgcct

SEQ ID NO: 205573 - DNA, 510 bp, Glycine max
  unsure (1)..(510): unsure at all n locations
gcgatcctctaagcacctgcggcatgcaagcttatgcgcatatttccttacgaactttcacttgctcaagacattctattaactaagaaaaatgcacccatatacaatcaaggcagcttcgttacctagattatttacatgtacttccaaggtgtatttgttacttacatcacacacatttcttttgctaaattcacatacatgcatactctaagcactttggctatcgaaaattgcatacgtgcacatcctggtatttctaatacctatacatacacaaactttatgataaaccttgactatctacacaataaggtgttacatttcatgcttccttttttcaagtttttttttttttttactacctaaagccgcatacaaactcaagtatattttcttttgctcactaaaattgtattcaaaaaaagggtattttgtaatgtatctcatgcaacatatttatagaattttgtgagacatnnttgataccaaaaatcctatggacataca

SEQ ID NO: 205574 - DNA, 247 bp, Glycine max
atgcaatataagactagctctattaagtgctttaaatgtcttggaagatgacacattacttcttaatgcctcaccatgaaaaccatgtttatgaggggccaagacatttattgttgcgtacatgataatacaaaataaatgcatgtttgtttggacaacctatgttagtctactttttttgtttgaatatcaacatgtaatacaaaatatataactgttcattgcgatacttacataatttgttaat

SEQ ID NO: 205575 - DNA, 512 bp, Glycine max
  unsure (1)..(512): unsure at all n locations
cttaagtcacctgacgcatgcaagcttaaaaacccctggttcattactaattaaatcttatataatcacaatcacaagcaaggtatcctaatcacatgcaagagataagaatgaaaaatagaaaagggaaagaaaagctgggttgcctcccagtaagtgctcttttaacatcactagcttgacgcatcgtcctgttatccaggatcaaacagagttcctacttcaaggaccttcttcttaggtctcttttcctccatcacatgcactttaagacaaacattttggctagggggatctttgtcctcatggaacaaatcaaagttgatcttctgatcttctatacccatttgcagtatcttctttcctatgtccaccatgcagcttgcagtagacataaatgggaggtcaagaataagaggaacgtcagcatcctcttctatatctatgacaacgaaatcagctagaaatataaggtgtttaaccttcaccaatacattntcaatgactctata

SEQ ID NO: 205576 - DNA, 384 bp, Glycine max
ttcctaaagaatctagagctgagcttctcatacctctctaatagctaagatcacctccattagataagaagctagagcttagcctcacacccgctataataactattctcaccttcatggcaaaatacatgaaaatacaaaaaaaaatccctactacaaagactactcataatacctcgaattacaatgcttaaaccctatactactagaatggccaaaatacatggcccatacgatagataaacatattctaatatttacaaaaataaacgggctcatacttaacccatggtctcaaaatctaccctaatgctcatgataaccctatggcttttccttggatctctggcccaatctacttggagtattctttcaatgcccttg

SEQ ID NO: 205577 - DNA, 451 bp, Glycine max
agcttccatcagtgtgtctaacacacgtgaaggatcatcttgataaactaatctttgttctgatggcgctacatgacttttatgtcaagatgggagatgaagatctagcaatgatttggttaacctttcttccttcctcctatgagaattttgtaagttttcttagtataggcaaggactccattacacttgaacacattaagtctagtctctattcttgagagcttcgactaaaggcgtatgggaatggagatgaagcctctatggccagattatcggtgattggaaggggactattcaaagaaagcaaagaagaaaggcaaaggtggcaagactgcaaagaatcaaataattggaaggggactatccaaagaaagcaaagaaagattatgttgttgctctcgtttagaatgacgcctcatcgaaaagcaatctggttttggattttgac

SEQ ID NO: 205578 - DNA, 388 bp, Glycine max
ttctcattatacaaagcttgcatgaactagctcagcaattgccaattatgaatgtagagcagttcattgagaaagtgtcctggcctggagcccgaccttctgttgtgggggataatgaaagttttacagcccatgcaccttatcaacattggccataaccagcaaacaatcactcatctgaagccatcatccctggagctattgatttttcaaaaagaagattagagacgagatctaatgaggctgctcattctggatcaatgccagcatcatctgatgcaccatttccaagagtggatgcatcttcacctcatcacacatcagactcttccattcctatgttagagatacatgatggccagatcataccaattatgcctttggatac

SEQ ID NO: 205579 - DNA, 361 bp, Glycine max
ctgacgcgtgcgctcctgcatagccacacgtgtcacactgctgtccaaacatagatgggaatctaggtaccgatgagggcatatcacgagcctatgattggcctacatgaggggttacctacaaaagttactcctttaacaggcataactgttcgagaaccataccataatctgacattcgataaccgaactcgtttacgccctcctccactactctgttggtcttgatgccaaacaagagaaacaggaatacatcgactggtccatgctttggtgctattgtcaccaagaagttatggagggatatgtgagaacgagacataatgcggttgcgagtatgagatgtgaaggaatacatgca

SEQ ID NO: 205580 - DNA, 392 bp, Glycine max
tcgctgatcgacatccggtgaaagttgactagatttcttttatctccttgtcatttcgagctttgattattttaccgaatggacatcgttgaaaagtttgaccatttgaatatctcaagagcttccgttgttaaattcgaacctctctacatgttatacgcccgattcgaacatccgtgtgaaaagttatgaccatatgaatttctcgagagctaccgatgtttaatttcgagcgtatcgatatattataagccttaatcggacctcaatgttgaaaacttatgtccattttaatattccaggtacctccgttgttcattttcgagcgtctctatatatgatgcgccttaatctaacatccgtgtgaaaagttatgaccatttgaatttctc

SEQ ID NO: 205581 - DNA, 366 bp, Glycine max
  unsure (1)..(366): unsure at all n locations
cagcttcgcctaaatcccttggtggtctattgtaattanactgccctccgggatgagactaacttaaactaagcttctgcctcagatccctcttgttggactagattcagctgaaatagcttacaaaagtttaaactaatttagcctaagctttgtcctcagatccctcttgttggactagacttagaccaaacaacattattgtaacaacatttttaaaacgaaaacttaatctgcagatccctcatttaatactaagtttcaatcctgcttcattcaagttctaaggggncaatacatttcacattgctaaagtcacctaaccatgcctacaaatggttgatcagaccaagagcatacataatt

SEQ ID NO: 205582 - DNA, 347 bp, Glycine max
actaagactttaaggaagttctctaagaaagcctctcaaggaagcttcctagttctataaaacaacatgtgtacacttgtggtctctttgatgaacgaaagtcgtgtgagacacaactcatagttcaaattctctccattgttcttacttcaatttcgtgctccccactctctatatctcttactctgtcttgtgctccatggaaacatcctctccaaggcttttattcaaggctcatcatggaggtggagctgcttcttacatggcttattccctaatggatggaacctcctctcacctattatcctttgtcgttagctgcatctccatggtggaatatcaccatt

SEQ ID NO: 205583 - DNA, 408 bp, Glycine max
  unsure (1)..(408): unsure at all n locations
ggatcttaactcacctgcggcatgcaagcttaaggatggaatacttacttgtttttgattaacacaagcgcanaacggaatcaataaatgcgataaatgatgaccctagggctgcaaattcgtcacttccgtggctatggcttttgaaagggggggaaaagaattttttgattgcaaaaacttcccccctttcgtcatttttatattttggtgcaggggttgctcgcccaggcaagctaacctgcactcttttttttttttgagaggaacattaactatgtcccctcctcctttatgggttagcgttttgcctatcttagcctacttaagttagaattaggcggtaattacttattcttcttaaacaaactaaatattaaaagaaaaactgtgaatacataggattca

SEQ ID NO: 205584 - DNA, 466 bp, Glycine max
  unsure (1)..(466): unsure at all n locations
ctgaacttctggctgtgcaatactagtgatatatngtggttcaatagaacttgaataatcctccagtgttactcttcttggctcttcaaccatgattgtattttcaacagattctatatgataatgccctgcaattagaaaactataagatgcctcgaaagatcgaggttcttgttagtgtttaactctactgagctttaaaagattggctaagattttgttaaaacataaacacttatacaatgaaggaaagctggaattgctgcacatgatgtccaacgttatgtcaaggaataagatcgggctgcacaatgcacaaggcaagataaaatgtcttatgaagaattgaagttgcaggatccacgatgtcggatacaatgtcctgacatcctgcccgaaaatactggagtagctgcacaatgcataagtcaagataattgtcaagtgatcattaaagctgatgatc

SEQ ID NO: 205585 - DNA, 437 bp, Glycine max
  unsure (1)..(437): unsure at all n locations
agcacctgcggcatgcaagcttctccctctgttccctatatatattgggttgtgggaagaacanaaagattcaaccctcctggtatctgaggatcacttaaaattagtgagaaaaatcatttccgtgaagaaaatcaaagccgaggcgcttccgtaacacgtctgagacgtttccgtgggtgatttcgtgatgattttccgccgttcttcgtcgttggtcggtcttcaactggtaagttcctgaaatcaaactttttaattcattctatgtacccttggtggtccccacttgtttcgcgtactcttattttcatttcatttactttccggatcccctttgagcgtgctttaatcatttatttaagtcattttctcgcctaatcacaaaatagaataaatttccaccgatcattcgattgtgcatctgttatttctat

SEQ ID NO: 205586 - DNA, 430 bp, Glycine max
taattattcaattccacacaaaaattcaagctaatctatttcttttcctatgaacccacctctacatcaatggatcttcaattccaagtaagggtggacttctcctcactagaaatctgagggtgttgggttcttgcaagctataatgggtagttctactaagttatcgcatttacgtagttcgttgaggaggaaattattgtaagtcatgctaaaacttgatatgtttaatttatacataactgcccatgttgattgatggttaaataatgatgatatgatatatatgtatgcttaaaatgaagctagtaaactggtaaaaaaattggtagagttagcttacagtaaatgtgacgaatgtagtgttgtacgtggaaaagtgtgacatcttgatgtttataccgccaaatttggtgtcagtggaaatctg

SEQ ID NO: 205587 - DNA, 349 bp, Glycine max
  unsure (1)..(349): unsure at all n locations
ccaaggataaaagggatgccacacatttatttccatgacacaaatgcaaagatgatgatttggaaatcttatgcaaaactggtcatgcatgcacctatgcggacactcaagtgtcaaattattatggtcatgtgatgctcgggctcaagattcatttcctctattttaaatcaacccattgtttccaaaatatgttcttttatcaatttgagcattcattcgagtccattgtgggcatccgggaaaattttcacagtcgtcacccttcaggtgtacacacattttttcataaactagctatgatcagcacattttttcaaagaaaagtggaagncttctctttcaaaac

SEQ ID NO: 205588 - DNA, 442 bp, Glycine max
  unsure (1)..(442): unsure at all n locations
cggatccttaagtcacctgaggcatgcaagctntgcaacatgtggaacccagcttttaccatcaaagattcgattctaaaatctgaagaaggcataacatgagcttatgattggattacatcgtctgttacctacaaaaaataaaaataataacaacatcactatttgtgaaccataacataattaacattcgattaaacaaaatgtattacatacttctccaaatctatgtaggtattgtttccaaaaaagagaaacagtagtagatttcatggtttaggctttggtactaatgtcaagaagaagttaaagagggatatatgagaacgagacatagtgaggttgcgagttagtgtatatgatggcaatacatgcattgtatttatagaaaaanaactaacagaaattgattcattcnatgggatcttggtcgttgatttgc

SEQ ID NO: 205589 - DNA, 452 bp, Glycine max
aatcttggtacctacttcttcactacattaagaatcaccgtgttgagtcttctctgtggctgccttactggtttagcctcatcctctaaatttatccgatgcatacatgtggatgggctaatatcaagaatgtccgccagggtccatcctatagccttcttatgcttcttgaaaactgataacaacttctcctcttgctcatcagcaagggaggcagatataattactgaaaaacattttctatcatccaagcaagcatattttaaatttgatggcagatgcttcaattctggtgtgggcggctggataatggtagaaagagatggtttctcagcctgtacctcataaagaaagtcagaggtatgtgtacttcctgaaacatggttagttctatctgactctagataatcaatctcaagaagtaaaacatcaccagacatgtaatcaatatc

SEQ ID NO: 205590 - DNA, 476 bp, Glycine max
  unsure (1)..(476): unsure at all n locations
ngcttatccattagcccaagatcatcatttctttccacttttacagacacaggtattgaatttagaatcagatatctatatctttccatgcttattttgtaagtttaaattctatggaagaaactcgaaattggtggtttttcacactttctgacgaagtgttttgggtgttggtaattttaggaaatcctgatgaatatatttcaatttggaagaattagaaaaactgggaaattatggttattccatgttcgaaaaagtttcatgtttgagaaaacactaaaactgttttttcttaaatcatgatattcaaaaaccgttgatcttacttctccctaagtgagcctctaagacagcagatctgttgataaattgcattaagatttaaaagcaataatgcaatcctatttcttcccatgtactgcattagtggtttatgtgacagtcagttcttctgcaggatatacacatctcat

SEQ ID NO: 205591 - DNA, 439 bp, Glycine max
agcttaatgtgcatgagatatcttgaattgttccgtgacaaacatgagattacttggagaagatatgagagttggtgcacttttagcgcaagtagtgcacttaactaattgtttcctctacaactagtatgcactaagcacaaatcctggattttggagcgaaaagtttaaaagagattgcatcaatttcatctattaaagtatgtttccaactttttgtacttggaaccataagttcaatgttcatgcactctcgtgtcaagtagcaattttcaaacttttatactaccaccatcatgcaatcatgggcctttccaagcttgaacttttgtgccatctccaattttccatcttatcttttttatggatggaatggagaaaatctcattcaatttgtaatcgataaatttctcgtaaacgtgttggattataggagaga

SEQ ID NO: 205592 - DNA, 147 bp, Glycine max
  unsure (1)..(147): unsure at all n locations
ctgtatgacttcaatccacgattcatatctatatatacaatagatgctcaagagttnactaccaattccaattcaagaatgcttgatgaatacctcatccctaaaccatatggattcaagattgttcttcatgacgacaaaatcttt

SEQ ID NO: 205593 - DNA, 435 bp, Glycine max
agcttcaagacgacaagattgttctagttttactgcaaaatcaaggcaatggtattgaggataagcctggcatgctcaatggagatctatagttactcgaagattttcacaagttgactcgctggttggaggataactcgagaagcttgtgcttcaacaaaattagggtttgtgtcaggttggagaagatgaggcataagattggcaagaagttgtgctcgaaggcctcgcgccttgggtgaatcatggtggttgggttcctcgccaatgaagatgacatggatgtcttctgtggttctttcatggcaacgccgagtgaaaaatcatgacataatgatagagagggagagagaggggatataataagaaagatagagttgttatctttgattcaggaacaagtataggaagatgagagagatacaagtgctttct

SEQ ID NO: 205594 - DNA, 331 bp, Glycine max
gtggtttttgtaaataaatactgttttatggttaatgttgtctctagaacatttccattggatttaatgatgaaatatgtgcattttcaggtgaaaaagaggctaagttttgaattgcaaaatgtaacagtggggctaagctcattatttgggcttatcgcatatccaccgctaatcgcggcttcaccgcgcttatcgcataggagaatctggcagagcatcatcatcaaagccgtgccctaatcgtgatatcagtgcgcttagatcatcaagtgcctttatccatgctaatcttgagactatcgctaagcccaatttcacttgctcgcac

SEQ ID NO: 205595 - DNA, 485 bp, Glycine max
  unsure (1)..(485): unsure at all n locations
agctgggttcaaggtacttacccgttgtagatcgaagatcgatgaagaacgaatgaagaacggtcgaaaaccttcatgaaattcctcacggaaaacgttacggaaacgtttcggaagcgcctcggcttagattttcttcacggaaacaatttttccaagcaaattcgaaagagagagaagtgcctaaggggctgaacccttttcttcttcacttcctcccctatttatagcaaaataggggaggtgcttgccgcccagctcgcccaggcgagccaggttgcttcctccagaagcaacagccttctggaggaatattctggagggcccaagtgggcctgggtgctatttgcatccccatttttactaagtacacccctctgcntttttggtgattctttnttcgtaaagttacggaaacttacgaatttcgtaacgatacttggtttctttccgtaatggtacggaaccttgcggatacataatca

SEQ ID NO: 205596 - DNA, 342 bp, Glycine max
ctaagatagttcctaaacaaaaatcaattgatgaagcttcgccaagtgtccccattgaaaaacctttattcaaacctgtcaaagtcagtgataatgctaaacgaaaaattatggaacttagaaaaactaaatccataattgaatgcgtatgtgacaatcatagcgaattactaaacaagattggtagtttgcttaaggtcattccatacactccccaagcctctgaaaatacttccaaaatggtaacaagaagtacctccaaattaattaattttattaatgaagatagtgaccaaaactcatataacacaactaagataggatcagtgtcagaaaagaata

SEQ ID NO: 205597 - DNA, 516 bp, Glycine max
  unsure (1)..(516): unsure at all n locations
gcgatccttaagtcacctgcggcatgcaagctggtatggatggaatattatgccgtgaaataagctattcttcctaagttttacgttcattttaattggccatgcaaaaggtacgtagagcaacgtgccttctagtcggtcaagcaaacttgcacttcaacttatcatttttttttcttcttaaacaacatttttatcctaaaataaaataaggactttgtaattntattttattttaaaaaaatatttttaaatttcatatatttaaaagagttgatgaagtcagagtaattgattagggaatttaaaaatccagtttataaaaaaaatgtgattatcccatcgaatttctaaaaaaaaacatgacaaatcaatgggttattaatattattggtatgttgtcaaacgattttttaaattttacaagaaataaaataaagcacaaatatataaagggggtgaaataanaacactatatttatgaagacnncgattttttttttactaaacaagcat

SEQ ID NO: 205598 - DNA, 434 bp, Glycine max
  unsure (1)..(434): unsure at all n locations
tttgagtgtgatctataaagcatatagacaactagaggtcttgatttattaagcactgcaagacagcattggcatagcaactgcaaaaataaagagattaaaaaaaattaacaatgattcggaacataccaagaaatgaaccataactaaatttttccaaaaagttatctccaagtgaatcatggctcattnttgcaaattccaacaagatgagaagtttgaaaacaaaaggtaaattgagacagttcacaagagtaatcttgaaatggggaaacctcccctccccaaaacttttggccaacataacaataataataatctagctggtgaataagggtacagcatcacttgatanatgaccaaagttaatatctatgttaaatgataaatctataaatattagcattttttctactttatacaatataaagtga

SEQ ID NO: 205599 - DNA, 492 bp, Glycine max
  unsure (1)..(492): unsure at all n locations
agctntnggagggagcctcattgtgtactgttttaccttcctgagacnaatttttaccttaactctcccccaaattagggacatataatgactgaaacccttatgctctcttaaaccctaaaacaaggtaggagatgattaaagtaggcttaggatttttacaaaagacattattatcatttttggctcaaataaggtgcaagtgataaatttttatcaaaggttggatttttatcctcgttagcatcatcttatttttttttaattcaaagtcaaacattaagttgtaaccccagatgtcttatctttctgcaaacggcaacactaagtaatgatctagaaattgtatggcattagaggcattctctatatatgtatgtataaacaagttcaagtgggaaaaaatcaagctaaacaaaatggttactatntcttcaactaacatcatattcctaaacattgcttggatcatttacatatgtgcaattctgc

SEQ ID NO: 205600 - DNA, 341 bp, Glycine max
tcactctgtaataccatatgaagaaaacttgtcttaactattcgcatataatgtctaacttccattttacgaagtattactgtttttgcaaaatccctagaacataagattacttttaaatcctacattaccgttatgcattttttttcagcatataaaggcaaaccctaaaaaaataagataacttttaaatcctacattaccgtcaagtatgttttcagcaaataaaggcaaacatttattatctttttaatgcaactatcataaaggataaagcttaatttccttttgaacgcaacttgctaacttcttagttttgcatccctcttctttcacttttc

SEQ ID NO: 205601 - DNA, 394 bp, Glycine max
catttattagagatgaaattgataataataacacattaataagtaacaaaatatcattagttaaaagccaaacgataatgttaagtttgtagacataaacctaatcgaaactaagcatccacagtattatggtctaaaagtaatttacctgacacaagtcatattgctgtaaaaaaattatgataggaaagaaaatcaacgatcatggaaataattcatttcttcactccattggtgaactctccttcaactggaattgatgaatcattcagaatactactgatcacaagtctcgtaatttcttgtgcccattgattcatcgtctgcctcaactttatatgctcgagtgttctttgttgaagtgacgtctttaagtctcacttcaacctttatt

SEQ ID NO: 205602 - DNA, 369 bp, Glycine max
aagaactaatgaagaagggtcgaggaccttcttgacactgctcacggaaaagcgtacggaagcgtttcggaaccgcctcggcttaaattggcttcacggaaacaatttgtccacgcaaattcgcacgatagagaagcgcctatggggctgaacccttttcttcttcacttcctcccctagatataacagaatgggggaggtgcttgccgcccagctcgtccaggctagccaggttgcttactccaaaagcaacagccttctggaggaatattctggagggcccaattgggcctgagtgctgtttgcatccctatttttactaaccacacccctctgctctctttggagattcttatttcgtaaagttgc

SEQ ID NO: 205603 - DNA, 357 bp, Glycine max
tgacttgggcggagcctggaggatcatgacaaacatgcgtatgttggatttaaagaatgtgttactaaattgatatattaagcagtgattttttgacaaactgttcttgttcttcccgatggaaggtgcaatgacacataaggaaggtgttgttcaatctcaataacgacgtaacaccctgtacagggttctcttaataaagagaaaacatctctctattactttgcctacatactatagaggcgatgggtctaagacgaccgctgtatatatgcagatagagaatatcgataccccctgtgggaaatgtgcatgtctaaattagagttattataaaacatacgtttaatatgaacg

SEQ ID NO: 205604 - DNA, 487 bp, Glycine max
  unsure (1)..(487): unsure at all n locations
ggatccttaagtcacctgcggcatgcaagcttanttttggtgctaaatgtatattctccgctaagcgcagcttcagcgcatttagcgcataggagaatctggcagagcatcatcatcaaagtcacgcgctaagcgcgagatcagtgcgctaagcacagcaagtgccttcagccagactaaggcgctaagcccaatttcacttactcacgctaagcgcgagggtggcgctaagcgcattgtcacgatttcagagcctatttaaagcctattttgtgtagaattagggtaagcagatgattggcacagagttctagagcagccacatgcctatttggggaaaagagccctagaacaaaaaagggaagcagctatgcatagaacctaggtttttcatttgaagttattgatagagaggagtgtagatgcaaaaaggagatgatcccctctttgaacgaacacatcttacttaatcaattaatgaaggttc

SEQ ID NO: 205605 - DNA, 358 bp, Glycine max
acgttgagccataatcctgacacaccataaaccttgacaccttgtgagaatgtcaatccctaccctcggaagcgaaatggaaagaaggaagacttccaatcaaagagaaaggaaaaaaaaagaatgagcagaaggaagattccccaatcaaagagtgggagaaagcaaaaagaaaagaaagaaaattctcaatcacagaatgggagaaagtaaataaggaagaagaagaaagaaagaaagctcccgatcagggattgaatgaaaacagaaaaaatgtgcagagaggtctttggaccggacaatatctgaacaatacagaattgtcaccaaatgaacaaaaaagaaggataggaaacca

SEQ ID NO: 205606 - DNA, 457 bp, Glycine max
  unsure (1)..(457): unsure at all n locations
ggatccttaagtcacctgcggcatgcaagccttaagatcatactctnttctctctttttctcacaatagntcttcatttntcatcctcttttcacttctgttcttcctttttcttgcacaaatttcattactcttccattggtgatgatcatggaaggctaaacactcaatcaatccaaggattcactccaagcaaggttgaatctgagttttggtttagtatttcaattttgtgtgaatgttcatctttttcttcaatcctattttcatttttcatgattatgaatgtgattaggattgaaaaaaaattaggttatggatccatttcctaattgagaaatttaatcatagattgtctggatgatattccaacctaatttgtgatctcgatgaattatcgattaagttgantgaactatctctaatgacattgactagactttcacaatctaaacat

SEQ ID NO: 205607 - DNA, 398 bp, Glycine max
tctgtgagaaaacttccttgagaagctagagcttatctttcacacccctctcataactaagctcacctccttgagaagcttccttaagaagattcctaaagaagctagagcttatctacacattcctctctaatagctaagctcacctccttgagatgagaagcgtgaacttagctacaccccccctatattagctttgctcacccccatgacaaaaaacatgataatacaaaaaaatgtccttactacaaagactactcaaaatgccccgaaatacaaggttgaaaccctatactactagaatggccaaaatacaaggcttaatcgaaggataaacctattctaatatttacaaagatgagtgggctcatacttagcccatgggcttgaatataccc

SEQ ID NO: 205608 - DNA, 429 bp, Glycine max
  unsure (1)..(429): unsure at all n locations
agcttaacttaacataatgcacattattttatctatcatggngtaacatcacttgtcctaaggatttaatcacaaaatcatattctataccttcacattaatcacatgttcataacaaaacatctcaagtgcaacacaacatctctcacacacaattcattacccaccatcacatagcaggtcacaatgatcattacacagacgttatgcaacatatatactaagactcaatcctatattgaatgtggtatcttatcagtgaaaaataacgctagggcacctaggattacataataaaatacaccacacaatgggtgagctggtcactcttattaaaagaaatcataaggtgatcaattagggttattctgttagcgtgaatgctctaaccatatgagatcaacatagatttaaaggagcactcaaatc

SEQ ID NO: 205609 - DNA, 295 bp, Glycine max
tttttttttgcttctctaaacccttaaaacacgggagaggcacatttccctccaaaattatgtggtatgacccctaatatattttacaagcttcttctaattgggcggaacagaaattctataattgttgcccaagtttgtgaatatgggctgaggatttattttcttttacgcacttgacctcctggtgaaactcagtttttctcccactacacaaatttaaaaaactttttccccctaagcgtcctgatctccctctatttttgacaaaaaaaccagaatttttacattcctt

SEQ ID NO: 205610 - DNA, 515 bp, Glycine max
  unsure (1)..(515): unsure at all n locations
atccttaagtcacctgcggcatgcaagcttaacaatntcacatctcttgcacttctcatacaatatatagtaatntacgtggccggcgccgggaggatcatgacaaacatgcatatgtttgatttaaagaattgtttaataaattgttatattaaaaagttatatcttgacaaattgttaatgtactttcccatggtagctagaaagacagagaagcaaggtgttgttcaatctcaatcaggacgtcactccacgtacagtgctattaaaaaaatgagaaaacatttcttttttactttgattacatattatcgtgtacataactataagattgaccgttgaatagattatagataatgaagattagatacaatcctgttccaaatgatgcatgttctaaatatagtgtatattattaaaacatcaaattntattatctaatgagatcaaattntattggtattgntgtataatatttattatgggatgagagtaactaattatagtgtgtagta

SEQ ID NO: 205611 - DNA, 398 bp, Glycine max
  unsure (1)..(398): unsure at all n locations
tccaatggattgaaaagtggccctgactcaaatgtgtttgtgtcatatgccctcattgatgtttttgcctantgtggtgaaattgaaaactccgtgaaattattcactgtatcgacttagaaaaatgaggtaacttggaacactataatttgtggttatgttcagttaggggatggggagaaagcattaaatttattttcaaatatgcttggatatgacatacatccaactgaagtgacatactcaagtcttctgcgtgcctctgctagtttagtatcattagagccagggcgtcaaattcattccttaactatcataaccatgtataacaaggatagtgtagttgcaaattctttgatagatatgtatgccaaatgtggtagaattgacgattcacg

SEQ ID NO: 205612 - DNA, 384 bp, Glycine max
  unsure (1)..(384): unsure at all n locations
agcttgctatccattataaatttttgtctcattgtcattnataagncgaccaaagctatgagcacccctactccattacctttaaatagcaaatgaggccatcaactcagccatcatctaggaatattgaaagcaccaaatgatcgaggaggtggcattggcactcataatctttgcttcacaccctaagtcatacattcaaagtcaccaaatcattgccataatggagcaccctgtcaagctagagttgagaaatcctgagctggaaagaaaaattgtaacatggtccgtagagctgtcataattngatctccaatatgagcctcgcaccctatgaaaacctagctgatggtggactatctattagagtttgctggcaatgtc

SEQ ID NO: 205613 - DNA, 335 bp, Glycine max
  unsure (1)..(335): unsure at all n locations
tgttttcgtgagatttacgtttcactatgagaagntaacacaaactagttctgtcctattttctctgaagattttctaaagtacaatgaaatgaaatctcttggtatgtcaaatcaatgatcaagtcatcaatgtctggtttgcgaatttatttcttaattttattatttactccaatgtgtctcggttttgacttgcttagtatttagctagcaaaaacatccatcaataataaaaaggactcgtggttgtagtcattaatgcgaaacatataagttgtgaattcgattgcaagagcataaagatactttgcttggcgcctctgtttgatgttt

SEQ ID NO: 205614 - DNA, 390 bp, Glycine max
  unsure (1)..(390): unsure at all n locations
aatatactatatntctgcgaaaagcacaggtatagcattggtaggatctcatttatttgagaaaaaaaattgaattaaaaggcatgccatttatatacgacattgaagtatctcctttccaagataatttaaatgtgtcttttccagattatatgagtcatacgtacgtgcatatcaacaaattacacttattttgtaaacatacttttacattctctaagtttcagaattaaaggtttctcttttccctctccttattcttcttcttgcttcatctacctttcttctatcttcttaatttgtgttgttcaatcccttcaatggagggctaaattcgagttcaactcaaggtatttaagagtgatgataaatctgagtatccctctctta

SEQ ID NO: 205615 - DNA, 376 bp, Glycine max
  unsure (1)..(376): unsure at all n locations
atatacgtctccnaatgtgtaggtcacaaattgaacatgcacactttctcacacattaatatttctttgacttgtcggatgtagatgtgtcatacaaattgaagatacaaagtttgtgcatttcgcagtttgccattatatccatgggctggctggggcgtctgcactatccatattatagtattagaggggatatatacatattcatttcattctcatttataatctgcggtagtgtcactggaacagaacttggctttctcttattatgtaattgctcgccgactcagcttatcacactcttagctctccactgcctctacctctgcttgcttgtctatgtctaggatatttcactctgcatattctaaaatat

SEQ ID NO: 205616 - DNA, 495 bp, Glycine max
  unsure (1)..(495): unsure at all n locations
agtcacctgcggcatgcaagcttctggagtntgtgccaattccgatgtcattctgtgacttgttgccatccctaatcgctaaccagttggcagtggtgaccctaggaagaatctaccagtctcctttcccgaggtggtacaaccccaacgcgacctgtgcgtatcatgtgggtactccgaggcatttgatcgagcagtgtgtgaccctcaagcataaagtccaaagcttgattgacacaggatgactaacattccaagaagatggtctgaatatgaagacaaatccgcttgccattcatgggggactggcggtaaatgcaatagatgcgtgtgggatgcagaggcctaagcaaatgaaggacgtggtaaccttaagaaggtttatctttgaagcattgcaagaggtgggcatcgtttcctttgacgggcacaaaagggactcctatttgatgcatctgggtgcatcacatgacatggagacatgttcaacaacgg

SEQ ID NO: 205617 - DNA, 477 bp, Glycine max
gacacttaaaactaagctttataagtgatatcatgtgcattcatatccctaagagtcctctcacgatgtggagggtgagccatgttctcagtatgataagtagtagttgaatgctcaaaatcagaatattcataatcactatcaacagaatactcagaattctcaaaatgctcacaatgctcaaaatgcacagaatcattaggatgcacactatgcctaactaatctatgaaaggttctatctatttcaagatcaaagggttgtaaatcacctatattgccctgagtcatgcactatatgcagcaaataatgtgttttcaaataagcaccgggggagggttagaactacaactatagtcaaataatatccaaatgagctgaaattttgtgagcaacaccctataatcatgaaaagatagcagcaaaaacttcaaacaaaaattcaaagtttaactatgaaaactacttatgcaaagt

SEQ ID NO: 205618 - DNA, 371 bp, Glycine max
agcttatgtgccattacctatcacatactacgttatgtctcctattgtgcaaccagagatggtcttacaatcaagggttatccttaagaaccaccaacaagtgcaacaacaactaattaagtgggaaggtttggaatatgatgaagctacatgggaagatacttgacctattaaaatagtttctcctaacttcaaccttgaggacacagtttcttttaaaggggaaggtaatgtaacaagtgcagtgctagtggaaaatgaagaatgaaaaggtgggaccaaaacaagaagacatatggcaaatgaggaagggagaaagactaatcatgagggccagaatactaactccacgctgactgattttgtgtggt

SEQ ID NO: 205619 - DNA, 401 bp, Glycine max
  unsure (1)..(401): unsure at all n locations
tcacctgagggcatgcaagctagaatagaataagatgaagttgattgattctctacgnatcaaacaaggtcccattattgactaaatagaaacagaattccttcaaacccgtctaagcacaatctttatacctggtcaggtcgttgttgtatgaaaaatgacacattaaatacatctcttttcccctagctcatcaaatagtaaaaaggaagggtgaaaataatcatagtttgattcaatgattgactatatattaatatatatcaaaccatgcacttagcattcgaagtattgtttaagtttcattctttctctctcactgagtgacacacatggttggtgggtgcagtgccacattcacattggtaaggagtgtgcattgggagttccatcaaaggaaa

SEQ ID NO: 205620 - DNA, 419 bp, Glycine max
  unsure (1)..(419): unsure at all n locations
cttaaaaagaccaaatataatgaatctttaatttttcgacaagncggngccaaaaaatagattataaataaatatgattaaatgaaataatataatcaatacattcaacttcatataattataataataaattaaaatactaatgtttcaaaagttacacatgtgtcatgtgaaaagaacagctgacatccaatgttagcgtcagattattaaagtcatattatgggtgatttttcattattatttaaaaaaatcttaaaatcaaaattatattttgttaagatttacggttcaatctattttgggtgttagtttttaaaaattgtgtcgaaaattaaaaatagataaaaataagtcaaatattctatctcatcttactccattacaaaatcatgatatatgatagaatagactaaaaa

SEQ ID NO: 205621 - DNA, 457 bp, Glycine max
  unsure (1)..(457): unsure at all n locations
cctgaggcatgcaagctngagacacgctctttaaaggatattttatttcaaattaagggcaaaagtgnggccagaaattctcaccaatttaataaagatctcatcattttctttcttgtttgacagtggctgcatggatgcaaattccttgatgtccacctttcttgcttcagtcttttgagcctgcagggccttccttttctcttccagcaccttctcatactcttccagtgtcatctcctacaacacagtttaaattccgtttagcaatgagtgaacaataacatagagaatataaatttcaaacgtaacccactaaaagcatgatggagcaagaatagtaaatgcaattgaagtcctaagtccctacantttcaaaaaacgtatagcaatgttatagaccaagagaacatgtcagcatcaagagaaagactgacagatctttcaagtaataaag

SEQ ID NO: 205622 - DNA, 359 bp, Glycine max
aaataataaccctaagcctatattgtagttcatatcttttagctccacagatgggcttaatctgtaccaaaatgatatgctgtatcctaaacagttaccctgtgatttgtctatcataaatgggactaaagcattctaaagtggtaaactttatcctaagtagtaaaaatcttcaatttctccttttttatcttttacaaatggtgattaatcttttcaattctttgcaaatggatcttaacaaattttcctactacattaatttacaaacaaagatttcattcctataatgttgaaaatataaaattctaacatagtagctttagttcaaacatactatagaacacaagcctaagctt

SEQ ID NO: 205623 - DNA, 442 bp, Glycine max
agcttatagataactaaacaaactgttttaacatcttgaaagagagcatgaggatcttagaaaactcattaagcttatttatttgattttgtcatggaaaccacttcacctagtgatgtacaacacacctttgattatgaggaggtaaaggcattattggacgaaaaggtatccggtggatggaagattcttctaaagatttagaagaaaagttcaaggaaacgcttaaacaaaatgttttactgcaaaaagaatgcacccttgctaataatgagctcgaaaagttgaaaaagaagaacttagatctctagacgaaatgtcaacgtcataaaaatgtctcttctgatttaaactataagcttagaggatgtgaggtcttgaatgaactactgcctaagattgtaagactctatgcagagatagaaaccttgagagataacct

SEQ ID NO: 205624 - DNA, 422 bp, Glycine max
  unsure (1)..(422): unsure at all n locations
ttctcaatcacctcattgagaactagtatgtcatgattgatgtgtctgtctttgatgaaggctgtatgtctctcatcaataagaccagatatcacatgtctcaatctatttgctaataacttatctatcacctggttcatacacccaatcaaggagattggtctgtaatcatcaaatgactggtggtgttntaatttgggaattagagacaataaggaagcattactgcctctagggaagctgccatgcacatggaattcatctacaaatcttctgaagtcagttttcagcattccccaaaattctttaatgaatttgaagttgaatccatcaggtccaggacatttgtccctatcacaactccacactgtttctttgatctccaaatccgaataatgaacaatcaaaaactccctctgctc

SEQ ID NO: 205625 - DNA, 479 bp, Glycine max
  unsure (1)..(479): unsure at all n locations
gtcacctgcggcatgcaagcttcatgataatgaatcaagtatgtttgatattacaanaagcccaaaagattgattgcatgattgagtcaacaagttcaagatcaagattacattcacgattcattcgaagaaatcaggaagattcaagattcatgagaagttcgatgatgacataatgcccaaaagaatgagttcaagattgagtcaacacgttcaagatcaagattagtttcaggattcattagaaaaaatcaagaagattctagattcaagagaagttgatttcaagattcaggaaatgacatcaagaagaaatcaagatgcgacaaatcttgacttcacattgggaagtattgaaaaggatctttctaaaaccaatcatatcacaatcttgtatataaaagagtagtctcaaatgttcctaacttaccagagtatgtactctctggtaatagatcaccacnttcctgtgatcgatt

SEQ ID NO: 205626 - DNA, 439 bp, Glycine max
  unsure (1)..(439): unsure at all n locations
agcttgaactaagcaagttctgttaatttaatgaaactgtcttgtgcgaataaactntgtttgagttattctggatgagttttacacttgcttgattataaatgtgttaatgcagtcacaagaaaaagcgtagcaaacagattaaaaaattggtgcagaggggtctctatgatccggagaaaggtgattcgtttgaattgtttgtggcaagtgggggattaacttattgtttatacaaggattcagaaagagttcttggcaatacctttggcatgtgcgtgcttcaggtatcaaacacttccttcctgctcaatattttgtgcagttgtgctttctaggctgtctttctctttcctttttccaagatagatcaatctttccatcatcttccaatttaggaatttgaggcgttgacacctaatctcctatcaagaacaat

SEQ ID NO: 205627 - DNA, 422 bp, Glycine max
agcttgagacttcaagatatgatctcctttgttccttgagcatttcatgcaagcttcacttaaggtaagggggatttttccacttcttgaaccttaacctttttgtctagcaaaatttatgtataaaacaagtttaaggtcttttgtaggattaaagttactttggatatgttggatcaagtggcctctgaataattaagaaggggggttgaattaattattactgaacctttactaattaaaaatgtacccttcttaggcttttactataatgttaagaaagtaaataacagaaatggaaacttaaccaaaagtaaaagcaataattaaagtgcacaacggataataaagagtgtagggaagaagaaaacaacacaagagtttatactggttcggcacaacccgtgctacatcagtcccca

SEQ ID NO: 205628 - DNA, 378 bp, Glycine max
tgaacaatgaatctctaaatgcataaatatgacatcatttctaaaaccaaatgcttgcacaatttcaattccgatctatgatatgaacttgtctccatacaatccaaatccctaaaagctttgttgataactcctaacatgcatctaagcaaagaattgaaatatgatcacataacctaagaattgatatgataatagagaattacatacttgaattctactctcacttagcaattggaaatttagctcatttggatcatgaatgatccaaattaaacctcaaaagatgaatcacaattgaagaaaatttagaaagagagaatttcaggattttattgttgtaaatcacaaaatgaactaaaagtcctttacaatgat

SEQ ID NO: 205629 - DNA, 449 bp, Glycine max
ttaagtcacctgcggcatgcaagcttcatattgtattcacgaaatcatattattcttcattcacaggattctggagaactacaaattcatagtattcttcaatcaagagtcagactcaaacctaccaatagaagaggaaaagaagaaaacctatcgcggaagccgggatggagtgatggaacaatcgcaccgtcacatagtcatgggagccaagatggagtgagggaatagtcgcatcatcacaccatcaaacagtcacaccttcacacaaaacacaaagtgaggtggaagaaagaaaattgcaggaagaaagaagaattgtggcacagactggtgaagtgaggagaacaaaagaaaaatgaaacgacttcatttcattttttcccaaatccacaaactcgacacaaactcacgagtgtacactaactcactcaagtctgggcaaactt

SEQ ID NO: 205630 - DNA, 387 bp, Glycine max
  unsure (1)..(387): unsure at all n locations
ttgaaaatgggnttcacatggcttatcagcatcactatcgcaacctcatggctagcgtgatgaaactctcgaataagatgatggttacaaggttgcttagcgtgccacttcatctcactaagtgcaactgcttcaattcatccacttagtgagaaaggcacgcttgcatccgaaattcactaatgtccgcttagcggtccataattgcgcttatcgcaccaacacaaacaatgcgccctatttaagcctgaaatcatattctagagacggaagttggacagggattcatagctttgcatgtctaggatttgtacagaaagaaaggtccaagttccagagaagtttgagagatttttctgtgcgaagatctgcagagatcaaagcttg

SEQ ID NO: 205631 - DNA, 455 bp, Glycine max
  unsure (1)..(455): unsure at all n locations
agcttgaagaaacttgaataagttttgtctttacatgcccaactctcttgagtggcatttgtattgattgtngtattgtgtgttgcatcttaatctctatcatttcgtatgtgcatcatcatgtataagtaagaagaaaggttctaaagttagaaaatctattcaatgtttaaaactctctattttaatttattacaagttaatcataatcgattacattagtgtttgtagcttacagagaagtttctcgtatcagtttaatcgattacaaggtaatcataatcgattatacaattcagatgagacaaagattggtttttcaggagtctctgctttaatcgattatcgggtgatataatcaattacttctctcttaaaagtgtntcaaaagtgatcaataacactntaattgatacatcaagaatctaatcgattacattgttctttgaaagttt

SEQ ID NO: 205632 - DNA, 418 bp, Glycine max
tgaagaggatgctttaatggatgaaaagaaagagagaatgtgggagacacgaaatgaaggaataaaagaaggaaagaagtggaactttgaagtgtatctcataagactttcattcatcaaagttacaacaagtgttacacatgcttctatttatagactatgtagcttccttgagaagctttcttaagaaaatttccttgagaagctttcttaagaaaacttccttgagaagtttctttgagaaaacttccttgagaagctagagtttagctacacacacccatctaaaaactaatctcacctccttgagaagcttccttgataagctagagcttatctacacacacccatctaataactaagctcaacctcttgagaagctttcttgagaagctagagcgtatctacacacccctat

SEQ ID NO: 205633 - DNA, 432 bp, Glycine max
  unsure (1)..(432): unsure at all n locations
gatcttaagtcacctgcggcatgcaagctngtganatgtctctcaatcaagttcttgtgaaatgaaagaaagcataatggtgtgataaaaatactgagattatgttgaaagtgtgcataaaagaggtgaatgctggaaataaacctcacaaccacttcactaagcttggttgggaaaatattgcagaaaagttcaataaggcaacaaatttgagatatgaatataaacaattcagaaataggtgggattctttgaaaaaggaatggcaattatgggctaagcttattggtaaggacacaggtcttggttgggatggggagaagaaaaccattgcaactagtgatgaatggtgggaagccaaaattcaggtatgtgttattcaacgaaaatagagtttttgtgccatgccactctttgntcttttgtttttat

SEQ ID NO: 205634 - DNA, 422 bp, Glycine max
atagcttcaccaccaagagagtgccttggattagaagcttagagaggaagcttcaatggaggaagagaatgagagagagagagagagtggcatggaaattgaaggagcataaggagagaagctaaactttgaagtgtgtctcacaagtttctcattcatcaaagttgtgacaagtgttacacatgtttctacttatagccttggtcactaactaaatgaaattcacttcatttcatgtgaatctgaaagaaatattccaagaatatgccaaaggcatcttatcatattccctttatatgccacaagcatggaaggtgtgatgctagcacatgggaagcttccttgagaagcaaggaaggtagcttctctgggaagcaaggaagaaagcttccttgagatgctagaggggggacgtgcacttc

SEQ ID NO: 205635 - DNA, 505 bp, Glycine max
atcttaatcaccgcggatgcagcttctatataagtaagaaattcatcttttttaatttcctaacatctggttataacatattgtgccttgaactgtgtcttgaacatgtgatatgtttgtgttactgctaagctaggatttttttttcttcattgtgcggcccttccgtctgcaccattatctctttctgtggagtcatctgaacaaatgaaaaatgctaaattctatcaaaatgctaaatattttttaaaatatagaaatcaaaattaggtattttgaaaataggaaaaaaattacatttaagtttctttttttttaccggaggtccatatgtctagtacttagaaatcacgtcattataaaaatgcgccactagagcataatataatagcatgaagaacgtcattatacttacatttagggtatcttattatttctaccatatatacatactggttaataagacacttcttgtaatcagccatgaatagagactaaataagta

SEQ ID NO: 205636 - DNA, 403 bp, Glycine max
gaaaacgatgaaatttgacagagccacttagattgtttgatgttttatccaagtcagtaagggccacaacgccaataattgaccccggaatactgccttgtaacttgttgtgggataaagacaatctctccatggaatatgatgagactgcactaatatggccagataattggtttcctgatagatctaaatccaccatagatgacccagattgacacccagaaggaattgtcccatgtcactaagttgccatataagcgtaacgatggtaagcttgaaaaccctgttatattgttaggcagagggccctccaatgtattatgtgaaatatccaagtgaatgacatgttgaagatttgaaagtgttgatggcacctcaccctctattttgttatgtctcaaat

SEQ ID NO: 205637 - DNA, 328 bp, Glycine max
gccaagaagaaaaaatttgaacctgtagacaaactctgtggtctaagctcctctaccgaccaccacacaaaccttggcccttctgagcaacaatttgcagcaattgaacaacctatagtttatgctgcaaacatctacaatagacctcctcaaccttaacagctaaatcagccacaacagaacaattttgacctctcagcaacaggtacaatcccgggtggagaaatcactccaaccttaaatggacaaatccttgacaacagcagcaacaacaacaacaaccttattatagaatgtgtgggccaagcagatatacattcctccatca

SEQ ID NO: 205638 - DNA, 235 bp, Glycine max
  unsure (1)..(235): unsure at all n locations
aaaaccagctatcaccgntaaagtagggagggggtttgcttcttgtcaacaacccgaaccgggcagcaagaacacccgatcaaaaaatgaatggtaaaaagggaacatcattctaccaaagaaaagaaatccccaaatcaatgtgaatagatatagaagaaagagaattatatctggcgaataaaatctagaagaaatgcaacgacatcaacgcacataggacacaagggaagca

SEQ ID NO: 205639 - DNA, 351 bp, Glycine max
  unsure (1)..(351): unsure at all n locations
agcttatcgtaatcgattacacatttattnttgagacaatggctaagttatataggagtctctgctttaatagattatcatgtgatataatcaatcacttctctttctataagtgtaacagaagtgaacaagaacactttagtcgattactttgagtatctaatcaattacagtgttcttgaaccgtttccagtttttgaaagaacactttaatcgatttaaaagataatctaatcgattactttattgaattatttgaatgagttaggatcacttgccgatattagttaaagaaagaagagaagaaaagtgcttataaacaatgactcacaacttttaatattggattat

SEQ ID NO: 205640 - DNA, 387 bp, Glycine max
tcattaagatgcttcctccataatcttcctcgtggcttctttgataagacttctcaaaatgcttctttgagaagctagatccttatctatccacacccctctattaactaaattaacatccttaaaaataattacggatgaaaataacgtaacaaattatcaaacatcaaacataattactaataatatatagatatatatatcacggtgttacaccgtgtccagacatacagttatctagtgctgctctatctagttctaaggattcaaaacattttccaatgctaaaaatcctaactttacacacacatgggtgattagtccacaaacatgcaataattaaatgctaatagaatcaatgaacacatcataacaacattaaatata

SEQ ID NO: 205641 - DNA, 367 bp, Glycine max
atccttaagtcacctgcggcatgcaagcttcgtacggtgagtggcagccatgttaggcagccatgggaggtcaatgaaagcaccaatgttacgtgtagcggcttggttactgacttcgagggtcagctcctccagaataataaggaagaaaaagaagataagctggcttcgaggcgccaaaaccttcagaggaagaaaaagagaaaggaagctttgctatttcattcattcatatcccctgcaagtgccattacacaaatatatataactatgaaggggaccagggccccaccagcacttattgaaaagaataaagtaaatcacaatattctaaccaccaatattctggtattacactacacatttt

SEQ ID NO: 205642 - DNA, 359 bp, Glycine max
  unsure (1)..(359): unsure at all n locations
gttattatataccctcattcaattcttcaacttcatcctgaaggttaatatggtaaatataaatgcttgaatggactataattattcttgaggtcctatatttttgtaaagaaattgtttcttttcatgaattcacttanactttgatagttttgcctacatgatgcctaaaagattcatttcttgttacaaagttgatcccttcatgtctaagtgagtaactggtattgtgtgtgtcagcaaattaagagaaagatgaaaggaagagaaagccttaccataatggcatgcaagatagatatgatatggagagaaagaaactgaaaggaataaataacataagttggatgggggaaatg

SEQ ID NO: 205643 - DNA, 469 bp, Glycine max
  unsure (1)..(469): unsure at all n locations
agcttcgttcgcataaccctcatttattattagtcctaaattaaatagcattattgtaacaacataattaaaaccaaaacttaatccgtagatccctcatttaagactaagtttcgatcctgcttcaatcaagttctaaggcaatagtacatttcccaatgctaaagtcacctgactgtgcacacaaatgggtgatcagaccaaaagcatacaaacatcaagcattgaacactgaaaacacaatcaattagatattatgtatttacatcagttattcatcagaaatccccaactagggtgtttagtcagccattacaaagaaaccctaacaataaatgagattaaaagcaaagaatgatagtttcttacacaagaagagggattcctcctcatcttctcagcatctcacactcactctctcctaataatctttcttaaatgacaaaacctangcgtcaatgcacaagtt

SEQ ID NO: 205644 - DNA, 408 bp, Glycine max
tgcttttagtgcgtcacgtttaatatcgagctcgatggttgtgcgagcctttgatggtactcggcgggaagtaatgggggaaattgacattcctattcagataggcccccacacttgcaacgtggtgtttcaagtaatggatataaatctcgcctatatctacctcttgggaagaccgtggattcatgccctgagagtggtcccttcaacgcttcaccagaaattgaagttcgtagtgggtggaactttagtgatagtgtcgggtgaagaggacatgttagtgagcttgccctccttcgcaccatatgtataagcggcggaagaatcattggaaacggatttccaatcctttgaagtggtgagctgcgcctctgtggaaccaagttcgtcgctaccttctctcttcaa

SEQ ID NO: 205645 - DNA, 471 bp, Glycine max
  unsure (1)..(471): unsure at all n locations
cttaagtcacctgangctgcaacttaacccttcttaccctttcttctttgatgctcaacacacttactctctagatgactccactaatatcacatctcatggttgaaaccaaaatctagtgctagaggttgaggatcaaagtcctacaagtttctaacttggtgtggtaaaaaacaaaggcttgacatcatcacacaattgtgggtgttctcgacaagaacatctcatactcccttattaacacaacgttaccctaccagcaaactagcagatggaaacctctaagataaggattggctgaaaaaaaacaacgaatgatcatggataaaacttctccaagaagataagaagatcatccaagaacaaaaacatcaaatgttcttgaatcaaactattgaaacaagatataacttttaatgatcataacttttatcccttaactcctgttatcaagaattggcaacacattta

SEQ ID NO: 205646 - DNA, 365 bp, Glycine max
aaaaagctagccagaggcttctctctgaattgatcactaataatgacttcattgatggactccacaagttgggcaatttgaaagaagcaagcgaacttgtgaaaaaattgctctacaatggacttgttccagatcatgtaacatatactagcatcatccatgctcacttgatggctgggcatcttaggaaggctagagcattgttccttgatatgttgaacaaagggatatttccttcagtagtcacttacactgtgcttattcattcatatgcagttaggggaaggctgaaacttgctattttcacttttttgagatgcatgagaagggtgtacatccaaatgtgatcacctacaatgctttaa

SEQ ID NO: 205647 - DNA, 481 bp, Glycine max
  unsure (1)..(481): unsure at all n locations
atccttaagtgaccgcagcatgcagcttaacctaaggaggcggccatttatgtgttggagaagatcaacgacaatgcctacaagattgacttgcctcgtgcgtataatgtaagtgccactttcaatgtgtctgatctatctctttttgatctctttttgatgcagatggaggagccttggatttgaggacaaatccttttcaagaaggagggagtgatgaggacataaccaagggcaaggaccatgaagcacttgaaggtcccatgaccagaggcagacttaaacaagcccaacacgtcatagagacaaggctggtcatttgtatagttgccattgatgatgattgaaggcccaagtggagaaagatgaaggcccaaaggcaaaggcactaccaagactactaattgttgctgaaggcccatactaacttgaaggcccaagttaaataagtttttaagtataatnntattttattgaattt

SEQ ID NO: 205648 - DNA, 426 bp, Glycine max
  unsure (1)..(426): unsure at all n locations
tattcttatgggctgcctacagacttattcttccgtgcctctccggaagatataagccaaactcctacttttgaaagacaactcccaccttatgaaaactatcccggacaagatgatggggaatgagatacccatcttggccccctgctccacctcaaatatccatccacgcatgaactaccccatctgaacatattccaccatatcccggcctcatccacacccataaaagaatttgttccctttgcggaagataanggaaagattgacgcgcttgaagagaggttaatagcattcgaaggcctcggtaattacccattctcggatttggcaaattatgtcttgtgccaacatatcattcctccaattcaaatacagatttgatagtacaatggacactgtcaaatggcattccgatgattgccg

SEQ ID NO: 205649 - DNA, 263 bp, Glycine max
tgcctggttcaattttcatattggggatgcctccaacaccacctttgtcaatgatttacttcatgcctcttaagagcaaaagtccaaatctttacgccaaatcctgacttcaccctttatggaggataaacatggggaggaatactcggttcctgggcgccaaaggaacaatgcctttgactgctaccataattaaaaactcactcttctcatgtggcaccaagcattctgactatgtcaagcttacattagaatccctcatc

SEQ ID NO: 205650 - DNA, 216 bp, Glycine max
caaaacaatgttttttgtgggtttcggaccttaataatccacttaattattacccgtcaaatggaaattacaaattggcctaaaatccgcaaattaaagaatgataaaaatgccataatcatgtggttgaatttaaaaagcgcactaacgaccatcaattggtgggtgtaactgcttttagttttggctgaccaaaggggaaatggtcaaatttgc

SEQ ID NO: 205651 - DNA, 148 bp, Glycine max
attccggcctgtttgtcgagcccccggaatcagactgacgtagggtttgtcgccaaaggggatggtggtaatttcgaaattacaaaactggtccatcttttatctccggaagattatttggaattgttttgaattatattagttacgg

SEQ ID NO: 205652 - DNA, 308 bp, Glycine max
  unsure (1)..(308): unsure at all n locations
ctaacttctgctattattattctttacaagcacagataaatttcccctcataattaccagaagaaaaaaaatgccattttgtgtgtctatgaaaaataaaagggcgtgtgtgtatttttttcctaaagaatcttgctaatttacctttttctttgttgattatggttgaagtgatgttctttcttgacagattaaaaagttagttgatagtgctacttttgatcactntttttatacatagaactggcttaaactttatattgtatatgtatgccactgattttatcatgttaccatctgattactct

SEQ ID NO: 205653 - DNA, 221 bp, Glycine max
aaaaaattccaaaattccaatttaagcgattgcgctgatttgaaaaaaaaaaataattattaaaggcacacactattttactttatttttgtttaaaatttgtcccaaatagaaaaataatttaactctttttattttaccttatatacaatttttttaaaaaaaaaagataagtgatttttattaaaataaagtggaacaaactaaaattttatggacgt

SEQ ID NO: 205654 - DNA, 216 bp, Glycine max
aattcttcaccgaaaacgttaccgaaacgtttcggaagcccctcgggttataattttcttcacggaaaccatttttccaagccaaattctaaaggaaaaaaaatgcctaaagggctgaacccttttcttcttcacttccctccctatttatagcaaatatgggaggtgggtgccgccccactcgccaaggcgagctcagctcgcccaggcgagcca

SEQ ID NO: 205655 - DNA, 282 bp, Glycine max
aaagaactctcaaatgcgattaataatgtatgaatcgagcttgtatatccgaatagagatttcctatgcaatattttcttttccatcttatactcccttagttaataaaaaaaaataggatagaatatgctccaaatatttttcattatttggaaaaacctaaacttactataagcgaaatggcatatgtggtcaacgtatagaacctctaatcacttatttaacatgtctcaagccactctctgatccatgccacataaggcccctgagatcatagctctt

SEQ ID NO: 205656 - DNA, 384 bp, Glycine max
ttacaaccaattaaaacaaatgagggcattcctctaataccagtatctgtgtctgatctcataatcaccgccacaaaactaatatcataagcaacagaccgagcccaatgcaaaacatcatcatgggtagcaaatacctacaatgcaatccatacaatgttagtcttcaagggacattcatttacttactttaacagcaaaaaattatattaatacctgagaagtattgaaggcatcataacaatcaacgtgttgatgcacaccagctatctctccattatcttcattcataccagattcctcttcattttcttccgatatatcaaacttttcaaacattatgctattatgcatccactgatctttcgccatctaatcaaaaca

SEQ ID NO: 205657 - DNA, 471 bp, Glycine max
  unsure (1)..(471): unsure at all n locations
ctttctcagtcgtctgtatggatgaatgagtgttataaagcgtgttatgcctactgtagactggttttctcccatgtttcagttgtatgtaacttgtattttcttcacagatggggcatgcatgatgacccttaacactgtaaccgctgagatttccatatgctggaaagtcattaatggtacaaaaaagcattgcacgcatttcaaacgtctccttgcgaaacgcatcaaacactacaaccccctcgtcccacaactntctcagatcttcaaccaacggacttagataaacgtcaatgtcatttcctggctgtcttgggcccgatatcatcatacacaacatcatgtattttcgcttcatgcacaaccaaggaggcaaattgtaaattactagcagaactggccatgaactgtgttgagtgcttaaggtgccatatggattcattccatcactggctagtccaagtctaa

SEQ ID NO: 205658 - DNA, 421 bp, Glycine max
tgaatcaaaatgtttagtttctgtgtttctttcaattaccatccatgtgtaatcgattacacagtgtaaaatttgaattcaaatctataatagctgttataaatcatttttgccactggtaatcgattacatcctcgagtaatcgattaccagagagtaaatctcttgaaaaagacatttttgcttaaatttcttggccaaaccttttgttgtttcaatttggaattctcttcctaaaacactagagatcttcttgatgtgtgatcttgtattcttggatttttgtcttgaattaaactggagaagcgcattttcataaggcatcaaaacatcatgatcatatggcatcatcaaaacatcaaaggcaaagtctttgcttctacaatctccccttttttatgatgacaatttaatctttgga

SEQ ID NO: 205659 - DNA, 487 bp, Glycine max
  unsure (1)..(487): unsure at all n locations
actcagcttaagaaaaatggtctcagcanattccttatttccaaaaggttattctatcaatagacttccaatctttaatggagagggttaccactactggaaaacccgaatgcaaatttttattgaggcaatagacttaagtatttgggaagccatagaaatagggccatatatacccaccacagtagaaaggattacaacagatggtagcacatcaagtgaagcataacaatagaaaaacctagagatagatggtctgaagaggatagaagacgagttcaatacaatctaaaagccaaaaacataataacatctgccctgngaatggatgaatatttcagggtttcaaattgtaagagtgctaaggaaatgtgggacactctacaattaacacatgaaggaactacagatgttaaaagatctaggataaacacactaacccatgagtatgaaactgttagattgaatgcaaatgaaagcattcaag

SEQ ID NO: 205660 - DNA, 351 bp, Glycine max
actatccgtgctaagaaggagatttttttgatcttttcggccatccacttttgtccagatcgggctaggccctctccgacgatctttgaaatttttttcttatattccaattttatttttggatattttttattggcccatatgtttgacctgcctttggtaataataatttgtgttacttacgcacattttaattattttacaaatttggtattgttatggaattaccgtaatgtgattgagaacaattatctcctaaaaattacatggttgtttgaacattaacatctaatttttcaagtgcacccatggaatgatgctttttaaaaagaaactcccctctctgactaa

SEQ ID NO: 205661 - DNA, 478 bp, Glycine max
  unsure (1)..(478): unsure at all n locations
tgatgcttaactatgtatggcaaaacttcattactgaggttctagacatatatgtgagcttgtnacaaatcttctacacttggagggatctcctgcagtcctcttgaacccttaccacccactctgtcatcatgccgacactcaggaagcctaacagctttagccttctctaagtattctgaacaaaattcaatggcttcttctgtaatgtacctctcaacaatagatgcttccggatgatatagattctttgtatacccttttaagatcttcatgtatcgctaaaccgggtacatccaccgtagataaacaggatcacaacacttgatttctctgaccagatgcacaatcaagtgaatcatgatgtcatcgaaagcagggggaaaatacatctccaactggcagagtataattgcggtctcattctccaactcatcaaacattactggatcaatcactgtgctacatatagcatgga

SEQ ID NO: 205662 - DNA, 479 bp, Glycine max
  unsure (1)..(479): unsure at all n locations
atgaagtcccaatttattctaatttcatgttcttggttnggtgaattcactataattgtgctaacggggagggacttagtgatttgcacgagatatataggaaattcgggatattagttcttgcatctggtatgcataataatatggacaatttagtcatttcttggaatacaataagacttgttttttctgattattgtcaactgtgttgaattgttatattgcttcagcccacaataacatacacatcactgcactgtcctgacacttgccaagtatgaatgtcttggatgttgccaaagccaggttgtcattttacagagattattataattatatggactctctattatcagtactaagattcaatattctaatgaataatattggacgataaaatctcaatggatgatgaattacatatctttaattcactagaaatgccaagaagaagttataaaaagattgactcataaatt

SEQ ID NO: 205663 - DNA, 394 bp, Glycine max
gaggggtaccactactgtaaaaccccaacgccaattctcatttgagcaatgcacttatcaatttcggaagacgtagaaatagggccatatgtgccctccacgacatgaaaggactacaacagatcgtatctcatacagtggagcacatcactttataatccttgacatatatgggctgaagacgatataagacgagtttaatactgtctacaacccggttacataattacctacgccctgtgaatgaaacaatattaccggcttctcaatgacagaccgctgaggatatgtgagacacctctactactaacacatgaagggactactaatgtttaaagaatctggattaacacacttacccatgaatatcaactgtctacattgagtgcatatg

SEQ ID NO: 205664 - DNA, 360 bp, Glycine max
  unsure (1)..(360): unsure at all n locations
aacgtaataaaactaaggtcatgctatcacttaatgtcccaattagatggaaataactaaagcatatgaaaggaaaatgggtcaaaaatgttgatcggttctcgaaagtttatgaaccaaaccataattgccgaanaattcaaggatgaaaatcataatttacccctatattattactattaattaaattaaaatataaaatgttattattagttagaatatttaaatcatgattaactactataattaaatatttcataattaattgggaaataaaccaaagagtgagtttttccatacacattttttccccacacatatgcctttaacatgtaacattacaatgcaacaatatccaca

SEQ ID NO: 205665 - DNA, 472 bp, Glycine max
  unsure (1)..(472): unsure at all n locations
ntattatgtcctctncccttggcggggatttcttcttcagttatggcgagantagttgtggcagtgatattattgaccagccctccgaaaccttctaccgagatgtcttgggccacgtggaccttgttagtgcttagcactactgagtttaaaaaggttggctaagattttgttaaaacataagcacttagacaatgaaggaaagctggagttgctgcacatgatgtccaacgttatgtcaaggaataagatcgggctgcacaatgcacaaggcaagataaagtgtcaagtgatgaattgaagttgaaggatccacgatgtcggatacaatgtcctgacatcctgctcgagaatactggaattgctgtacaatgcaagataaaagtcaagtgaagcattgaagctgcaggatccaagatgtcggatacgatgtcctgacatctggcccgaaaatactggacatataaatctg

SEQ ID NO: 205666 - DNA, 333 bp, Glycine max
  unsure (1)..(333): unsure at all n locations
actgcgatggaattgcttggacaatacatgcaatttaaacaagaggccaaaaaagatggaaaaaaaaccagtaagttcatatacctcctttggacattcttttttttgtgtgggtattggatgtttttatacatgttcacaagaaagagaaggatccatngaaaccaaagcaccccatgtaagtatttcttgttcactaatgataggggagcagctcttgctgccgagaacaagatttcttggaggtaatngcgtggcacccttgttgtgaattgcgatcttaagttcataatcatgattgaggacacatataagggttcatatttaaatcag

SEQ ID NO: 205667 - DNA, 469 bp, Glycine max
  unsure (1)..(469): unsure at all n locations
antgctntatctcattanatacagtgcatgcatccactattgccccatatcttgagtacatgggaataagggaattgtttattgttgaatccggaagaacggtctttgtgacaagctgatgtaactgcttaccaaggtaaagatccaccaacccagtagacacactgataactgaagataatgtgtgtttatctggcctctctccctctagttgcatctcagaaaatagcttaatagcacccttatagtcttcatttttctcataaccagctattattgtgttccatgagatcaggtttttgtggggcatcctctcaaagaaatcttttgcaagattcaagtcacccttctgtgccaacccagatattattgaattccacgaaagtacatcaggactaggcatttccctgnaaagctntgaagcctcttccatgttggagattngaacatagcaactgatcagaagtgt

SEQ ID NO: 205668 - DNA, 183 bp, Glycine max
  unsure (1)..(183): unsure at all n locations
ctttggatgatctcctttctaaacttactcttttttcctctattatgaatgttggttttcctctattcatttaggtcatttcttgctttcataattnataagtttttcctttgcggatctttctaatatatatgaccgagaatgatatttttgcattgccctataaaaaatcatactaccatt

SEQ ID NO: 205669 - DNA, 380 bp, Glycine max
  unsure (1)..(380): unsure at all n locations
ctaagcttctatctcacacttaagcaatgtaagatggccatgatgtgtttctatatagaattccgacaatatgtnttccttgagtcanattctcagatattcttatttgctagtggaccatatctctatctgtccaagtaatcctatattgattttgaactcctcggttggattcgataaagggtttccaagagcatcaatctgaaaatgagtgagaatgagaatccccaaaccttggacattgtgcgtgagtatagccttaccctctaatatataataatgaggctaaactaccatatttcaaatatggctcttagatataatatgttgattcacttacttattttatgtcctctcctctcttgtgatataattcttac

SEQ ID NO: 205670 - DNA, 462 bp, Glycine max
  unsure (1)..(462): unsure at all n locations
tttggttttacatgcctaacttcttgttttttatttgtattggtgtatcttggttgttgcatcttagtacatttgatatctgtattgcattatgcatcatcatgattagtgtgaagaaaagtttctaagttagaaaaatttctttagaggccaaaactctattntaatcgattatagagttgttgtaatcgattacaacaagctgtttgaagcttgtaaagatgagtcttgtatcaatataatcgattaccaatatctcataattaattacactgttgtttgagacactgactgaattattcaggagtctctgctttaattgattaccaagtggactcatcgattacttctttctccgttaagtgttcagaggtgaagaagaacactttaatcaattacgtagggcatctaatgaattacaatcgttttaacgtcgtttcagatattggatagacactttat

SEQ ID NO: 205671 - DNA, 426 bp, Glycine max
  unsure (1)..(426): unsure at all n locations
cacttgttacccaaccagagttttatgtggcttttattgtgtatatcncacatgatgttgaagagctttgtgtagctcatgttatgcataatgacactcgtaaagctgttttagttaaccacagttagttgtaacagacttcagacacttacatctaacttctaaggttctggaatttgttgtacagacttcagacacttacaaatctgacaaatgtctctgtagctatatgtggaacttatgtagtcagataccttacgaatcagttcagaaatacaaaatcaaaaattaagtaactttccaaattctctcaaaactttatctgtatttctaccaccccctgtccttttatctttctaatctctaatcagcaaggacctagctggaatccattatcaagacaattaacagatcaagtttaaccat

SEQ ID NO: 205672 - DNA, 337 bp, Glycine max
ctaattggtggtctatttgaacatgggttagtaaaaggaattagttttttgtgtagtgatcttttgatgatgagtaatatcattttcaaaattggacacataaggctttctatggtgataaagtttatgaaattccattaaaaatttgattttataagatggcggtactgtattgtgataaaacaaagtatgtgttactttttgaattattatgtatcgggtggaattttactttggatttggtataccttttcatgaactagatttataatgatggtaaaaataatctaattatgataataattggggatgataatccattaagataagtgataac

SEQ ID NO: 205673 - DNA, 458 bp, Glycine max
  unsure (1)..(458): unsure at all n locations
gaagtttgactntcacatgcctaactcccttgagtgtcatttgtattggttgttatcttgtatgttgcatcttagtacatatgatatcgtattgcatcatgtatcatcatggttagtgtaaagaaaagtttcttcaagaggcaaaaaatctttgttttaatcgattataggttcattgtaattgattacgacatgttgtctaaagcttgaagagttgagtctcatatcggtttaatcgattacattgttgtttgagacaatgattgatttattcaagagtctctactntaatcgattacgaagtggattaatcgattacttctcgctcgtctagtagttcaaaagtgaacaaaaacactttaatcgattacttagagcatctaatcgattacattgttcttgangttatttcagatgttgggaaanacactttaatcaattacttagataatctaatc

SEQ ID NO: 205674 - DNA, 366 bp, Glycine max
  unsure (1)..(366): unsure at all n locations
ccccattgnctctcacaggctttagatttgggagccaatccaatccttgtgtccggactctcaaccacttatgatagccgccgatgatcccattactgctgcccctaagctctctgtcctttcttaacgccgcattccatgccttgcgaacttcttggagtaccctcgcgttgtgggcactgaaaccccgtgcgatgaaaggcgtgaagctttctctgatggcacttctctcatggggtatccaagctgtcttatggtgaggaccggaattatattaataccaccccttgttcatcacggaacatttgacatccttcgcataaaataaaatcctaatttttctccttttaccagggaccaataaca

SEQ ID NO: 205675 - DNA, 482 bp, Glycine max
  unsure (1)..(482): unsure at all n locations
gcttagagaccaccatcttaccacctctagtgttcatcctcaccatcaaaattccctctttctctntgtatggacctctaaacttaggtaaaggaatcctttcatgtggactcaaaccccatgattgtctttcggaggattcaaccatggcattgcatgcttgcctctataggtattactttttctttacatgtgtcatttaaatgagtgattttatttcaaaattatgttttgttgttgaaactgatttgagagtgcatattcctcttttatccatcttttttactctttatttctttgggaagactctaaataaaaaggagactttgcccaaattttatcaaaattttaaaccaagcttttcccttaaaattcaaagttagaatagaggaggaaatggttgttttcaggttttggtttgagaaggtgctgctctctcgggccgttaagaatatctaatagttggaattttgtaaactttg

SEQ ID NO: 205676 - DNA, 472 bp, Glycine max
  unsure (1)..(472): unsure at all n locations
tgccttgcccctngatatatttgagggactcatggtcactatgaatgacttattccttgggataaaggtagtgttgccatgtnttcaaagcccgtactaaggcatacaactccttatcataagttgaatagttaagggtaggaccacttaacttttcactaaaataagcaattggatggccttcttgcatcaacacagccccaatcccaacatttgaagcatcacactcaatttcaaaagatttttgaaagtttggcaacgcaagtatgggggcattagttagcttttgcttaagaacattgaaagcttcttcttgtttctctccccatttgaaaccaacattnttcttgagcacttcattgagaggtgctgccaatgtgctaaaatccttcacaaatcgtctataaaaacttgctaagccatgaaaactcctcacctcggtcacagacttatgtgtangccattcttgaat

SEQ ID NO: 205677 - DNA, 480 bp, Glycine max
  unsure (1)..(480): unsure at all n locations
agctaagagtntatcctagtattatntnttaatatatntttataaatcacttcaattaacttataacttattatctcctagccttcttttgtttccatgtctactcggactaatttacttgaatctattttcatctttttttaaaaaaatattctaaacaccataaatagttgattaaattattattttcttggtgaaaaagataaaacatataacaaaaaatatggtgttcagttaaatgtatattatttttatcttattctaaaattaattaaaatattttaagatatagagtaagattagtaatcgaatacacaatatgaaaaaaatgaatgtattactaaataatgaaaaaatcgttcaaaacaaattaaatntaaaagcactataatcaactaaaatttcttaaaaaatctaaaacanaaatttgtcatatttggtggtattaatgacatatttgaacttaaatataataaaata

SEQ ID NO: 205678 - DNA, 329 bp, Glycine max
  unsure (1)..(329): unsure at all n locations
cgttaacaagactcttattgaaaagtggtagcatcaacatcaaattacattccaaatatcaaaatagaatagtattatttatgtgagtttttttttctcactcagaaatcacatgtatttcttacttttgatgcggcgtgtgtggttatcgctggtaaaaaaaaaactatatacaacgagaagattgacccagcttaaagaatgaaaggaagcaatgctntataaagagaggtataagatcgttttcttttcttttaaaaaaaagtgcaggggagcaggtgagaataatacggacgcaaagtgatgttgaaaccacatttcttctctgg

SEQ ID NO: 205679 - DNA, 345 bp, Glycine max
  unsure (1)..(345): unsure at all n locations
tgtagtgatccttggaagtgttccatcgtcatagntnctaaattattggttttctctattgncacaacaatgtgctcaaatttgggatctcatgagtgtagtatcttctccataattcttacatcttctaacttctcaccattttttttagttgatttgaaatagtgagaattcttganaaatagtcaaaaatggactttgactctttcatatgtaaggatttgagctcacttcttagagnttggagacacaccttctttactttgtcttcttcttgtcagaggtttgaagcttatcccatngcctcttagcgtatgttcataaaanatttctcaaactcatcat

SEQ ID NO: 205680 - DNA, 168 bp, Glycine max
  unsure (1)..(168): unsure at all n locations
tttaaatcnacatatacacatccaggttgcaggaatcctcctattttgagatgggcaagtcctccacaacaaaaacaacctgtgcctcctttccagaatgctgctagaccaaacaagccatatgttcctcctccaatggggcaacaaccgcgacaactactaagacaa

SEQ ID NO: 205681 - DNA, 272 bp, Glycine max
  unsure (1)..(272): unsure at all n locations
agtttgtcttgattcttaaggatgaaccatttttacttttctatatttggatnagacagggaggtcatgtgctgtcatgattaccaaataacatctatcctagttgtagatatattcaatcttgagtacggtgtgttaacaggtggtactactatcctacgcaatttacaaattgtagtgataataactacgttgatgcttctcagatacaatttgcagttacttatagacaatttcaagtgctccttaattggttgggatatagattataa

SEQ ID NO: 205682 - DNA, 323 bp, Glycine max
tcatgcggaaaaccctatgatggctttcggtgaacactatacaaaaatcagttcttttaatcaagagatctatcacagaaaacacatcttttgatgttgtggggaactttagaacttaacttcattattcttataggattcgcaaatcctgaaagaatgcttgtggacaatttctgcaaatgaacctcagacacaagactaaatgaagtctaaatgccatcttaatatgatcagacatacttattctactctgctgaatatcaatagaaacataagcatatctgttccataaacaaactttaccgtgattatttgattaaaaa

SEQ ID NO: 205683 - DNA, 303 bp, Glycine max
tgcactaaaaaaaggctcgttatttttttcaaaggaatttcataactcatcttagggaggtccctctggaaccaagcaatttttgagcatgacctaatttgggaagcctaaaatgggccttatatacccaccacagtagaaagagttacaatagatggtagttcatcaagttaaagcattacaatagaaaaacctatagatagatggtctgaagaggatagaaaacgagtccaatacaatttaaaagccaaaaacataataacatctgccctaggaatggatgaatatttcagggtttcaaat

SEQ ID NO: 205684 - DNA, 469 bp, Glycine max
  unsure (1)..(469): unsure at all n locations
tctcgcatccacacctagaaggatctgctaccgtcttccttatgcagtatcagtataactntgacatggctcatgatcggactcagctacaaaacatggttaaacatgaacatgagtcttttaaagaatacgctcagcgttggagggacctagcagtgcaagtagcccctcccatggtcgagagggaaattgttactatgatggtggataccttgtctgtattttactatgagaagttagtaggctacatgccctctagctntgcggacttggttntcgccggagaaagaattgaggtgggtttgaagaggggaaagtttgattacgtctccccggtaggtgccagcggtaagaggactggaatagctggggcaaagaagaaagagaaagatgcccataccatcacttcaacatctgcgtgacccaagccgccgcaaacccctcacggtacccaccaatatgcacagca

SEQ ID NO: 205685 - DNA, 369 bp, Glycine max
atttgggacctggcggatttgatttgggccacataggatgagaagaagggtgattttcgaaatctgcacttatgcacaatatcgctgtcaaaataagcggcccacaattttggctttgtgccaaaaaatgcttgtgtgtggggggctgcggaaagagtatttcagaatgagttctggacctttgctattaaataccaaccggtacaatgtaggcttatgtactatagacttccagtaaaattctggagtccacccaaccgttaatgaattggatccaagaattggtcctggggtctataagaggaaaagctggattttggtggtgtttggcagatcttctgccttgctctgtttcttggtggggaaatt

SEQ ID NO: 205686 - DNA, 453 bp, Glycine max
tgctggggtgaccgacactccatagaactgacttaggcatgttttcagagcaggacatcccaaggccctattggacgtttttgggtccatcgagtgtcttgtatgcgcaattcctgcaaactggtgaatagcgtcagagatcagttgagccacatgtacactcacctgtgtcagtatggtgtagaccagttgacacttgggcaggggaggtctgagttgtggtctttggagaggatgttgctaagcagcaacgtcatccagatctgagtgatagtggtcatgctggtgcgcatgattcgcacccgttttctcgccgcggaccgggcaaagtcctgccccggcatgcacaacaactgggtgatagcctcctcatcgaagcctgaggcttgactcctcctctggctatactcacactactggcctttgttcgatggctgacaagtgcaccggatc

SEQ ID NO: 205687 - DNA, 332 bp, Glycine max
ttttaacacaaccactactatctcacggccctaactttgggagcaaaaaaaccctgtgtcaggaccctcaacacttatgaaagagactgatgaacccaatactgctttcccaaaactctttgaccttccttagcgtaacataacaagcctagaggactcctcgaacaccccttggttggggtcctaaaaccccctgcaagaaaagcgggatctttcctcgaagcgctccctcatgcggaaccaagtgactaaggcaggtgggataaacaaaacaaccctgtccctaaagaacaaggaaaccttccatgcgaaaaacccatatcctcctccac

SEQ ID NO: 205688 - DNA, 447 bp, Glycine max
  unsure (1)..(447): unsure at all n locations
taaccatattggtaatagaacatccaagggatccaacataacttatatttntacacgnaatagaggagcctatacgatgnaaaaatagtcaacatacgtggtaaactcgaatcctatgcctcagagttgctagaatgtaaataagcataaacagcaccccaaacaatggttttgagagctaaatcagtaagtgtgacgagctcctctgaaccataattgttatacaagtaaaaataacttagtaagcacaacacaaggttgaacacacaaataattaagctacaaactaaattgtgtttgtagtagaagaaaccagcattacgaaatccttttctctcactgttttctctgtggtccacttgcactttctatcatacccaatacacaacaaacacaagttacaaaactatgttgagtgaagcagacacccctcgtgtgaaatagatt

SEQ ID NO: 205689 - DNA, 281 bp, Glycine max
  unsure (1)..(281): unsure at all n locations
ttttttagacgganaaagggggtttttctgggaactataaacacgataaataccttgggagactgtttgagtaacctacttatttattttatgctttggaactgccaaaatgtacacttcatggtatttgtttcctgcacacatgcacttgaaacaagaatgaacattgtttattcaactgtgaattaaagtgaacggtctgcctttcctcctgtttgtctagttaggcttacgcatatgctgttgatattagggacattaatgccgtataaaatggaaaa

SEQ ID NO: 205690 - DNA, 457 bp, Glycine max
  unsure (1)..(457): unsure at all n locations
tcagctttttacaaagaaaataataaaacggagcactattatagttattgtattcaagncttaagtaactatatgtaactaattgttgtttctttgtaacgtcactattttaatagcaacctcgcatcagatggatggaagaacataaattgcaatgacaaccaacatgatgctaaagatatgtcgaacagtaaatttttaaaaaatacaacataattatcatcataacattaaaatctatcaaaagaatagtcaaataaatgtagaattacatagttaaaaatgaacataatatatactaatggcngaaacatccaaaagtgaataagatcataacaatcttctttactaatgtaccccataccaacaaatcaaataagttcctttgtatatatacagtctcttggttgcctcccttgaaaatctctatataactcatcatgcgatgatgagtcaa

SEQ ID NO: 205691 - DNA, 433 bp, Glycine max
  unsure (1)..(433): unsure at all n locations
tgtaattgattacacatatactgtattcgatttccagagcttatttcagaaaatattctcaacagtcacatcttcttatgtggttcttgaatggctatcaaaggcctatacatatgtgacttgagacacgaatttgctaagagtttttcataacaaaaaggtcttatcctcttataaagcaaaatcgttttatcctcttacaaattccttggccaaattacttgtgattcaataaggaattatttgagtgctcaaattgttcaatctatctcttttaagagagatttcttcttttcttcttcttcattctgaanagggattaagagaccgagggtctcttgttgtgaaagaattctaaacacaaaggaaggggtgtccttgtgtgtgtagaacttgtaaaggaatttacaagatagtggaactctcaagcggg

SEQ ID NO: 205692 - DNA, 299 bp, Glycine max
  unsure (1)..(299): unsure at all n locations
tgatgtccttgcaaataagggtgatgcatttttggcccgccggccaaaaggaaagacaaccatttcttgctcattgtacaaaccatgatggggtagtggctggaaatcttgctacgagtaataagtgaaaaaagaacaaagtgttgatgggattggtgaaaaatctattgaggcgtgcatcctttgtttgatattcctttntcttttttaanattatattcaaacaaatatattaaatagtgatttcgatttgttttctttttttacaaaatgagctatcaataaatttaaattaacat

SEQ ID NO: 205693 - DNA, 93 bp, Glycine max
  unsure (1)..(93): unsure at all n locations
tgctaatcccacatccatggcttaacgagaccatttgggcataacatgnaattttctgggttttgatgaacgtgctaagtgccccatggcggc

SEQ ID NO: 205694 - DNA, 311 bp, Glycine max
  unsure (1)..(311): unsure at all n locations
cgactaaagcacacaaagcgcatttttttttgggttgntacgnaatggtggccttggccttttctctttccattcccgctctgggcatgctgttgcacaattctcgccaccactattgtgacctttgccgctttttttaattttctgcctcagaggctgcctttccttctgcctcaaagtgtcacgggggaacaatacccgacaatacacgggccctcgttggctgtcgccaaccatggttattgggctaacaacaatagaaaaatctttccgttctattggcttatacaattgtacaaccttgcccatat

SEQ ID NO: 205695 - DNA, 460 bp, Glycine max
  unsure (1)..(460): unsure at all n locations
tcttagtttcagatgatgcagatgggcttgtagctacctcattcactcctctaatgactatggcatcatttctggcgctaaactgttgggagttggaagccatcttctcaattaaatttttggcttcagcaggagtcatgtctccaagggctccaccactggcagcatctatcatacttctctccatattgttgagtccttcataaaaatattggagaagaagctgctccgaaatctgatggtgagggcaactggcacatagtttcttaaatcgctcccagtactcatacaggctctctccactgagttgtctaatacatgagatatctttcctgatggctatggtcctggaagcagggaaaaaattttctaagaatactctcttaaggtcatcccagctcgtgatggaccttggagcaaggtaatacagccagtccttngccactccctctaatgaatg

SEQ ID NO: 205696 - DNA, 211 bp, Glycine max
accctattttttaattcaatgaccaaaatcgaaaaggaatcataaaaataaatttaaatactttaacaagagcatgggatacaacaaaataagatctttggatctctgcaacactgttgtctctaaaaatcggggtcttgaccattggtattaggggtgataaaaagaggtggagctgccggatcaaatagttctgacccattaaaaaata

SEQ ID NO: 205697 - DNA, 202 bp, Glycine max
  unsure (1)..(202): unsure at all n locations
tgttcagccatacgttcatcattaactccagggccaaactttaatattttatttcattataagctgngaattcaaagaaaatggtacataagaatataaataactacatcgtctgaattatttacaagtatcctactggtcattatatnttgaataagtactaaaaacatttatcccaaatttctttctatacatttctttc

SEQ ID NO: 205698 - DNA, 477 bp, Glycine max
  unsure (1)..(477): unsure at all n locations
ctcaagctttggagtnacacatgggaccactcatttatttanatttaaggaagtcgtatctagtcaaggtctgagagaccatacaangttcctaacgatttctaattatgtgggccattaagtctatcatatgctgacaatagccgagaagcccatgaatctcttcgggggtggagtaggtgtctgccattgccttggccttggctaacaagcggggaagttcttgactcccgttcaaagtaagagcaaaccggtccatccacatggttgcctcttggtgtaaagagtcgatcacccttcctctagcctctntttccgcatatacttgagcatactcatccgcgattctatgcttgtgggccatggctagacctaactcttcttggtacttggcgatgatagctagcatgttggtctccgtctcgcataaatgctgagacaagcttcttntggaccttgaacatacaattaactcct

SEQ ID NO: 205699 - DNA, 424 bp, Glycine max
  unsure (1)..(424): unsure at all n locations
gctttgagtgaaaggatgtgactctttacttttaatntgaatntcaacgttcacgggcactggtaatcgattaccaaaacattgtaatcgattacagccttttgaaatattggaacgtgaaattcgtttgaaactttttaaactncatttgctactggtaatcgattacaacaatatggtaatcgattaccagaaagtaaaaattctttggtaaaggttttgtcaaaaactcatgtgctattcaaagttttgaaaaaattcttaacctaccatttttagctntcatagttagactttgaatttttgtttgaaattttttgtgctatcttctcatcattttatagggttgctcacanaatttcaagtcatttggatatcattngagggtagcttgagttcaaacctacacccttatttacatgac

SEQ ID NO: 205700 - DNA, 487 bp, Glycine max
  unsure (1)..(487): unsure at all n locations
ttacggacctataaatctcaagcttaaattgaatanaacgttagaaagtgtttgtaatctattaccatatatgtgtaatcgattacacagtgcaaattttgaattcaaattttaatagctgttgtaaatcagttttggccactggtaatcgattacatcctctagtaatcgattaccagagagtaaatttgtttgagaaagactttttaacttaaatttcttggccaaaccttttgctacttcaattggaattcccttcctatttaatataccctctctaagactctagagactgtcttgatcatccatcttgaatatctttaatttctttgtcttgaataaagctttgagatgcatgtgataccttggcatcatcaaaacattcagcttgatcctttgtctacaatctcccnctttttgatgatgacaatccctganatcaagacaagctatatacaagatgatagcatgttcacacaacccttac

SEQ ID NO: 205701 - DNA, 425 bp, Glycine max
  unsure (1)..(425): unsure at all n locations
gcttcaagaattatggcctcatcaaactatttgtttttcgagggaaattctataaatagacctcccatctttaatggagtgggttaccactactggaaaacccgcattgcaatctttatagaggcaatagatttaaatatttgggaagccatagaacaaggaccttatgttccctctataatagccggaagtgcaacaatagaaaaacctanagcagattggactgaggaagaaagaagattagtacaatataatttaaaggccaaaaatattattacatctgccctaggaatagatgaatactttagggtttcaaattgtaaaagtgctaaggatatgtgggatacactacaagtaacacatgaaggcacaacagatgttaaagatatangataaacactttaactcgtgaatatgaaactttt

SEQ ID NO: 205702 - DNA, 438 bp, Glycine max
  unsure (1)..(438): unsure at all n locations
nggaggggttgatggngacccggngctgagaggtttgatgatattgctacaacgngcacgtgagctaaatttanaggtgggcaattggggatggtgtgcttatgcttgacttgtggaaatgggatagttgatttgtgccatcgcccgatcgccacctagtaccacaaatgacgggtgccccataatccgataagcttggtgtgaggaagcatggaagagtcagtcttcctaggtttatttgttgaccacagagtggtacatggacatatgtcatgggggtcaggagaccttggggacgtcaggtggggtgctattgcccaaaaccaaacttggctaatcccgacccaacccgagcatagtcagtcagtgagaacctgtgacgtacctaagcatgcgagcttctgacagtctaccaattaaagaatataagaacaaagt

SEQ ID NO: 205703 - DNA, 334 bp, Glycine max
aaagaggtaatctgatcatcatgctttgataaatgcaaaaaaaaaaaaaaaaactagggcaaatgaagagggtgagaatgagggaaaaacccatgctgtgactgccatttctatacagccaaatttcccaccaacccaacaatgtcattactcagccaataaacaaaccttttccttacccaccgcccatttatcgacaaaggccatccctaaatcaaccacaaagtctgtctaccacacttccaatgacgaacatcacctttagcacagtcccaaaacacctaccaagaaatgaatgttgcagtgagaaagcctatataattcaccccaattc

SEQ ID NO: 205704 - DNA, 440 bp, Glycine max
  unsure (1)..(440): unsure at all n locations
tgcccagagaaagagtccacgaaggagatgcttactcacctcttaagactggaaagcggnttctaatgactcctctgcggcttccacataatgcatataggatgggcagctcaccaagatgtcttcctcgcctgatacgatgaccagatgcccttccactacgaatttcaacttttggtggagtgttgagggaacaactcctactgagtggatccacgggcgccccaacagacagctgtagggggggttaatatccattatttggaaggtaacttgacaggtgtgagggcctatctgtactgggagatcgatctctcccctaacctctcggcgggtgccatcgaaggcacgaaccaccattgaacttggctttaagtgggaggcattgaatggtaatttctccaaagtgctcttaagcattacgttcaaactggaaccat

SEQ ID NO: 205705 - DNA, 336 bp, Glycine max
ccccttacattttttgttgtgaaaagggtaagtgccataattgtaatttggcaaaatctatccaccattttaaatgctttattaatattaattcaaggtgggtctaataccttctttgtcctcgggtctacagctaacggggcactgatcttcttgtattcattgccaagaagtctctttaaggtgttacttcaaaccaccctagacaggtttgtgtgtgcatgaggcaataaactaaatgaattgggtattagtatacaactttatttctatattatggttggttgcatttggaaattcataaatttttatgtaactcttttcacaaatgttata

SEQ ID NO: 205706 - DNA, 457 bp, Glycine max
  unsure (1)..(457): unsure at all n locations
taaagaaacctttgcttgcacaatgtccactngatgggcttatcatatataacattcttatgttctatcttttgaaagatggaaacagtttggatgttaataagatactaactgaaatggaagagaagaaagttgtacttgatgaagttggtcataattctgttgtatatggtttcttgcaatgtagagaattatctagttctgtgcattatctaactaccatgatttcaaagggacttataccaagtaaccgcggcttgaggaatgtaataagcaagctgtgtgatgctgggaatctgaaaaaagccctgtagttgagtcaagaaatgagattaagaggctggatgcatgattcttccattcaaacattattgttgaagccttctctgtgtggtatatacaagagcaaaacctttttgacagatgggagggaatctctaatcctgatatatcatta

SEQ ID NO: 205707 - DNA, 456 bp, Glycine max
  unsure (1)..(456): unsure at all n locations
tctagaatgagaatggagacaagggacccactttctctcgcttaacatgggatgggtcgaaatattcgaccattccaacgttgcccacatcttctatgtaggaaagcttctcggcataccccagagacatggttgattggtgactcaatgtgctgttatgacagaaattctctccaagtccctcactttctttctctctcagaagaaagaagaaattgagaagaagtgtgttttgttcttcaaacacagagagagagaaagagaaacatttgtttcttttaaggagaccccaaaacaccaatgtactctcatacactgtatcatcccctggaacattatgaatcactagcaaatcacacaacatttaattgcacaactcattttctaaaaatagtattatcttnttttaatgtttcttaaaattatttaccttaaatattagactaaatttatgta

SEQ ID NO: 205708 - DNA, 412 bp, Glycine max
  unsure (1)..(412): unsure at all n locations
cagctgaaagctcaaagaagactcaagtgtccttggctgcataccgcaatgaaaaagtcaacatgctcaccggatgaagagaaaaaattgaagccctgagaaattattaaaaattaaagggacagaagaatgttgccaaccttaagatttgcacaatgaacatgacatgaagaataatattggtgcaacagacttaaagaggaatttcatcaacatgatgaagtcattttaaacattgtatctagagttcaagaaattcaattgagttgttcttggtgtctatgtaaatcttgaagaaatatcttcaagtttcatgaacaagtcgnggttggatactatctagatcatggataaaattaagccttgaagtttaaatgctggtttgctgcgcaacttaatatgtgtgcattaa

SEQ ID NO: 205709 - DNA, 189 bp, Glycine max
  unsure (1)..(189): unsure at all n locations
ntgatttcctttgttccggagatctttcttttctcatgtgcacccaaacccaatctccgggttcgaagacaaccttcttttctcctttgttggcttgtttagcatagcttttatttttcctctcaatttgatctttgactctctcatgaagcttcttcacatagtccgcccttgcttgaccttctttat

SEQ ID NO: 205710 - DNA, 342 bp, Glycine max
aatggataaaatcaagcttaaacaaaaacggcaaaaatgcttttgtaaaaccgaaaaaactatcctaatcctctagattactgcgctaacctcccttgggatatgggtacttagagtgaaactggcacagagcctacccacacaaagacaaattacacctgcgactcaatgcacattggaattctcgcacaaatgaaaacctaactcacaatgtttttgttctctataagcctatacataaacaatctctctctctctatttccacacacataacacaaaattttatgagttaaacatatacctactcaattaattttgacattcacaaagccacacacagt

SEQ ID NO: 205711 - DNA, 249 bp, Glycine max
  unsure (1)..(249): unsure at all n locations
gacagccaccgctntaggagcgctgaacaccaacagcgctnctaggccatcaaaggatggtcgtttctcccatagcaacgcgtccagctcagggacgatgattatacctatttccaagaggagatagttctcctgcggagggcaccataggttacacccatggtcgagtgtcacccatacataatcctctaaatttatgccaatgcttggcctactgatgatggcgtgcgagatatgagaacctgggtg

SEQ ID NO: 205712 - DNA, 415 bp, Glycine max
  unsure (1)..(415): unsure at all n locations
tgtcattattgttgntggcttcatcatcatcatcgacaacatgttgttttattnaaattctatccttgccttcattagaaggaccaaggcattcattcgatcgtctgaacactaaaaattcaccttcattctgttcactaggtgggatcacccctcaagggatgacctctacttcatggctactcctagatgcctatcaacatatgtatagagtcactcatacaaaacgaatgtgaaactaacacatcggtgagaaatgatgtggaaagaagtcgtgttgaagatgtggttgacttccattcattttgttgtgattatgtaaaatctaatgtggcttgtccaaattgacatgactcgttgatggtgttgcatcaaaaccaagtgaattaatggattacggatatgaaaataatgg

SEQ ID NO: 205713 - DNA, 426 bp, Glycine max
  unsure (1)..(426): unsure at all n locations
ctctgaaactcagctgttgaagacaaatctattatacaagcttgcggaactatctttttnatgcaattagagtgngagcagntcatgagaaggtgtctggcctggagcacaccttttgttggggggataatgaaagtttacagcccaggcaccctatcaacatgagccataaccagcaaacaatcactcatctgaagccatcatccctggagctattgatgtttcaaatgaagattatagacgagatctaatgatgctgctcattctggatcaatgccagcatcagctgatgcaccattttcaagagtggtccattttcacctcagcacacagcaaacatcttcattcctattntatagatacatgatggcccgatcataccaattttgcctttggatactttccttccacttctctactatggga

SEQ ID NO: 205714 - DNA, 465 bp, Glycine max
  unsure (1)..(465): unsure at all n locations
ctcaagctggtgcttgttaaaatatgagtaggtcacaagctagaagagacttatattgttatagnaccaccccacacggcttcttttgaaaagattatagatcttaataccagaaatatatgatgcatgtatcctgagaataaaactaattaatttatttgccttctatatgttgcagtgaaattgctacaagcaatatcacacaaggtagagaacctgaattggaaagttacacaacgttcttgcaacggcgatagaggatttgataacaggaacatttcacgggataataagtctcatatcattaggaatgtcacgtgtgattgttctttaacaataacactacttgccatgtgacagctatgtaagcattttttcaaaccctaccttactagagtctcttcagatggatcttggcaactacacaattcgtattataccaatatgcatattgtgagttgtgaa

SEQ ID NO: 205715 - DNA, 263 bp, Glycine max
ggacctctgaaactaagcactcttcctggctcattctctaacgggtggcgtctggtcttacgtattgtgcttcatatgcggggctggaaatctgcgtcgtacgaccttattgaagctctaagatcgatgctacctagaaggttctcgagcatgcttgcatcacatgcatcccaaatcttcgtgagtcacatgcatggggactgattacgggagtggattgccataattgtgctcgatacaaacataggcgctcatatgggaca

SEQ ID NO: 205716 - DNA, 335 bp, Glycine max
aatctcttttccaatatccatcctactctaattgaatgaaataacttattattgtatcttttttcaaataaaattcctttgaattaatgccaaaaccatgtaaaatggctctaaaaaactttaattcactattaatggactgcgggtatcagtttcttttctttggcattcccatttatatgatcaaattaaagggtcttttttctggaatatttattataacacttttaactaatacatatatatatacttttctatctatatctctacgtatataacaatctattatatatgcactcctctataggcgattgaaaaacatttttctaaaaata

SEQ ID NO: 205717 - DNA, 385 bp, Glycine max
ctataaaactcaagcttagaaataaaaaatactttaacaatattctttttatttgtatcttcatacatccttagcttttgattggtcgtgcctataggtactttgcttacatatataataagtgctcaacctgatcccttaaactgagacttatctgtctttgatgaatttaataacatacgtgcagaaatattgtgcctgagtactcaacaaaagtaatggcacttgcttctactttgttcgagttactgtcagaggctcttggccttgatcgcttttaccttatacaaatgggttgtgatgaaaggcttcttcatttgttgtactattacccagcatgccctgagccagaattaactatgggcactagcatgcacacagacgg

SEQ ID NO: 205718 - DNA, 349 bp, Glycine max
aagctttttctacacaaagggattcctctgcacaaacaaaatgaatggtgcagtagcgattctaaagaaattaaagagagaaaattggtcaaggttgaaaggtaaaatggaggaacaactttggggtttagggtttggagaaaatcgaagttggagcaaagaaacacgttgtgggtatgaaaagttagggttgaagatttggagcgaagaaccactttgatgcttgaattttctttgtgggaaaggaaaagtcgagaatcacatttctactaaagaaatatttgcttaaactcgtcgggttgacccaacggggaaacccaacacaatattcgcaaaaacccattatctt

SEQ ID NO: 205719 - DNA, 425 bp, Glycine max
  unsure (1)..(425): unsure at all n locations
tcttgcgtagccgctcttggtgctcagaanatctcacaaacttatccctcttattactagctactctgaattctttagttcctgaatgtacaaccttcaaactgctgctcgttcccctctatcttttctgcaaaaaagaaaatcaaatgctgccaaaacatggatgaagtcctaagaaaatcaatatctaagaaaacatggatgaaatcacaattgaaaagcacaactacctatctttcataggccttcgggtaatttgacttgtatccttatgtggaggggttgtgtataataatctcatacttttgccttccaaaaaagacttatcactaatcctctcttcattaatccaattttgtatgttattgtataaaagatcaatggttctacacctgcctgcactaatgttactcctcttctccttc

SEQ ID NO: 205720 - DNA, 128 bp, Glycine max
gcctaataggagcatggggcaactttcacttctccaaaatccctcggaaggagaaaaacaccatcaataccttatgaagctgctccaaccaagaagcaaccttctttcgctgaagatcttcctctttt

SEQ ID NO: 205721 - DNA, 413 bp, Glycine max
  unsure (1)..(413): unsure at all n locations
ctctaaatnacattgatgatagtatatactgtattgatgtttatatgccatcnttgctttacgagtaatgtcccattggtaaaactaactttccaaatgtttgccttcgcatgaatggccccgaggaagcttgcctcacagaggtccactaatgacaatgcggccgaatgaactagttccgccccggagtacgacagtcaccgctttatgaacgtttgtacaccagctacgtttcgaagccattatgggatggtcgtttctccgggagcgactcgctcagcttcaggactacgagtatactgatttccacgaataaatttggcgccggcggtgggcaccactggttactcccatggcctagtttgatccagaaatactccttgacgtttatgccaatggcttggccacataag

SEQ ID NO: 205722 - DNA, 169 bp, Glycine max
  unsure (1)..(169): unsure at all n locations
agacaggagacacagcagactggagacccccacngagaaaccgcagagcgacacgacaaccacaggcaagaaccagcaccagcaggcccgacacagcaggaaccacagggaaagcccaaaacaccaagggcaaaagacggcagcgggcacaaggggaaaaaaagaaacc

SEQ ID NO: 205723 - DNA, 173 bp, Glycine max
ttttatcaaactaacgggggggtgatcattaacacccgcaatgccatgaacaaaggacggttgctgccaaattaaatattccacaagatttccccttataccgttttgattgaaaggacctgattgaaaaatattgatccattgcacaaacccctaagattttaaaaaagaat

SEQ ID NO: 205724 - DNA, 412 bp, Glycine max
  unsure (1)..(412): unsure at all n locations
aagcttattgtgacaatnttaaagatatgtggcgcagctttctagttgnttcttacacgcaccangtggagttcgttgagtgtcttatagagcctcacacaacacaaatatataaagcaagcacaaatatccaaaaattagccacaattattaattgagctcaatcatttttctaataccaaatatgagttaaggtgagaaaatataagccattgagaggtcaaataagctatgatgatagaaaaaacaatactaaactactaatgctcaatcattgatgatgatgatgatgatgatggatgatggataaatcatggtgangaagatcgactgactgaagggaccgatgaatgatttttaaatgagggtgatgaactaatgattttatgacatgtcctgtcatggaaactaa

SEQ ID NO: 205725 - DNA, 441 bp, Glycine max
  unsure (1)..(441): unsure at all n locations
ngnacttgtacttgctattggcagattacatgcattacttctttctttccaactcatcaacgtgagtgggcagtttattctctttctataattacggggttaataagatgaaacaatatggtgatgaaacgaatagggtgtcctctcactgcttgaagcatccaatttttatttttatttttatggtagaacatattatcatatnctggaagcatcagctgtgactcggctaaaggctaccgcggtctttgagccagatgggcgccccaaatgcttgccgatgaactcaccggctaacatgagctttccgagatcaacgttggttttcaccccaagtccattcagcatgtacacaacatcttcggtagctacatttcctgaagctcccttggcataaggacagccacctagaccagcaactgaagaatcaactgcactgat

SEQ ID NO: 205726 - DNA, 380 bp, Glycine max
gaccttttcttctagagaggcagagttgaacggtgagtcatttcagggcatgagtacattgaagtcgcataaatgatcccatgaatctgagtacgttcgtatgacaaccatatgatgctgacataacctatttcttttttcttttttacttactctcgactccattataaatttataattaaagaatagaaaacaaaaattgtgtagattaaatactaagcaaatctttattatttcaatcttaatttaatgatatcatcccaaaataacctataattaatataattaattgagattttattctcaacgatttctttattctcgatattaaatttaatgaatgcactttagaaaaaaaatatttttaaactattacctaa

SEQ ID NO: 205727 - DNA, 417 bp, Glycine max
  unsure (1)..(417): unsure at all n locations
tgtcaaagccttgtcaaaccttagcatgcgtagcttcatgtgtaccttatgaatttttagatctacgtagatgacaaaatctttngagcaacttcagaaaggacgtgcaagtatatgagacaatgaagtatgatgggtgagctaaagttcttcctaggacttcaaatcattcagaaagatgatggaattttcatccatcaagagaaatataaaaaggaccttctaataagaaggggttggtatacggaccaattanngcctattaagcctcagcctatgaagcccccattttagatggaccggataagtctggtccacaaaataaatggactttntttagttctatatttggcccacacaagttcacaaacaacaaaatcgatcttcagacctaaatattaattcgataaaaaatat

SEQ ID NO: 205728 - DNA, 476 bp, Glycine max
  unsure (1)..(476): unsure at all n locations
ggctgtgaganaatgagagctaaattttctgaatgggcttctattgtttttccatctatcagaatggacttagcactttaagacaaaatgtgtttcagaatcctgcatctaaagaacaagaatgaatgtcacaactaattcaaagtgcacccataccctggcccaacgggagttaaaagacatatctcctcgctctttaagcattgacttaaaactggcatcagcagctgcacgcattgctggagacttttcttcaccatctttcttcaaaggaagcactctgatacacaaataggaaccccatcaaccatcattctgtanaagtcccatatgattataaaaaaaaccatctaccatgcaaattcaaagagttcagagggcataaggacacacccacagagaatccgagagtctgtcattagcctactacctgctgactcatgttgctttcaaggattatcaatagaaatcatttc

SEQ ID NO: 205729 - DNA, 239 bp, Glycine max
tttttcaaggaaactcttcttattggattgctctctttctttagaactaggctcgcctaggtcacgtgtgggcagtggccctggagatctttggcacgatgaatttctttgtaacgttgatttccttaaggataatcgaaaaaatgttgccgaaactattcaaggctgtatgacgttttctcttcattaaacattttattcttgtgtgtgcgacccgtactttttagcaattattgaag

SEQ ID NO: 205730 - DNA, 490 bp, Glycine max
  unsure (1)..(490): unsure at all n locations
tcagaaactcagcttttatccagacactctcttggtggtgaagctnctccttctttggttttttcctagnggacggcgtctcctctaacctcttctcctttatcttccgctacatcttcatggtggaaaatcaccattgaaggatctcattgaagctcaaagatccagcctccatagaaacttctccagcaagcttccatcataattcttatgtagtttaatcattatagtaatgaacatggcaattnttttatataaaaatgattgtttatatgggtaatatgttttgtttaacaattttaagatagttataagatttttttttaagttctaaggaatgcattattggataaaaaacatgttgaagtttttaagtttgcactatgttgaagttcataaagattgcatgccctatngccttatgctgaattcttagatgtcatgtggtattagctcaccgaaaatgagttacagcaatttattatggtct

SEQ ID NO: 205731 - DNA, 389 bp, Glycine max
  unsure (1)..(389): unsure at all n locations
tatccgtanatgttgcgacttaacttacggatgaggtaatattttttgttttatgtatgaacgatggctgnagttggtctgtctcaggtggtccaagattgctgccaggttaccaggaaggacagacaacgagattaaaaatcactggaacacccacattaagaaaaagctccttaagatgggtattgatcctcttactcacgaacctcttaacaaacaagtcttatccaaagatagttcatcctctgaagagaatttgccacatgctgacaacactcatcaggttaatgaaagtgatagggttctcaacttataagaaaattcttgctcatctacagctgaagattcttctggtgaagaataccttttagtggaaagctatgtgtctc

SEQ ID NO: 205732 - DNA, 449 bp, Glycine max
  unsure (1)..(449): unsure at all n locations
ggagtgttgaacatcaaaattattattcttattctattaataatngcaggttataggaacataatctttgatttagaggaaacaaatatcctctatttatgtgtaattaatgtaattaacctatataagcacacatctgttgtgtactcataacacagtttccagttcattatccctttgttttctcctattttaacaattgagaagcatagctcatagaacccacagactcagntgatagttcaggacttacactttgtatggaaccaataatttaggagagagaattgagttgggaagagaacacacttcaagataatgttctcatttggaacagtgaaaagatgaagagattcaagagaaacaaagactatgctgtgggaactgcaaagaaatagatctccatatatcgaagaaaaaggtaagaggtgatgaatttgatgtaatga

SEQ ID NO: 205733 - DNA, 430 bp, Glycine max
gcaagctaataaagctaaacactaacaatcttctcttttggcaaaatttgtctaaaacatacttaaaccacttctgagcaggtacgaacagttatgcaagtgggatcagcaactttcattatcagagtaatcaaacacagcggaaattctgcaagttgcaagtcgtttccaggatgtcaagacatctcacgtgacatccagcttttgcttctgctccccctgtctccatgcttactgcagcatcttctatcagctactagtcttttccaggatgtcaagacatctcatgtgacatccgtcatcatcagcagcagcagtctccccctaaaatcatatacatacaactccccctcaaatcatgaatcatgcatacatcggatcctactactcaaaatcatgaatcatgcacaatacatactactactccccc

SEQ ID NO: 205734 - DNA, 470 bp, Glycine max
  unsure (1)..(470): unsure at all n locations
gtcttgagaaaacttccttgagaagcttcttgttataactttcttgagaagctagagcttagctacacacacccctctaataactaggctcacctccttgagaagattcctaaagaagctagagcttagatacatacccccctataatagctaagctcacccccatgccgaaatacatgaaaatataaaaaaatccctaatacaaagactactcaaaatgccctgaaatacaaggctaaaaccctatactagtagaatggcaaaaatacaaggcctataagaaggaaaaatctattctactatttacaaagaagagaggacccaaccttggtccatgggctcagaaatctaccatgggattcatgagaaccccaaggcctntnttagcagctctagtccaatcctcttggagtcttctatccaatattcttggagggtaggattgctcatcctctccaccttggaaagga

SEQ ID NO: 205735 - DNA, 475 bp, Glycine max
  unsure (1)..(475): unsure at all n locations
tctgccaatacagaacaagttaatnactacatcttattngattatgaaattatcangannacctcttctttccccccaaaatttgtagcaatgaaataaattctccccaaaatcaaaaatgattttgattaatagttaatatattatagatcgctgacaggactgtcaacatgataaacttattttggtcctagttcttatcaagcaggagaattatagtaaaacataaaacattataaaaatttagtgtataccttcccattatggcaagaggaagataaaaaaaaatactcactcaataagcaactaagctccaactaaggaagtttcagattataaaagaagatggggaagaaaactctctcctcanacctaaaacatttgctccctattcgtggtcaatatgataatgcaataacaaaattaacaataattctgcaccagctggattgtgaatccagacttataatactat

SEQ ID NO: 205736 - DNA, 475 bp, Glycine max
  unsure (1)..(475): unsure at all n locations
tgccacccagctcgcccaggcgagctcagctcttctttctttcatgntgcttcctccagaagcaacagccttctggaggaatcttctggagggcccaagtgggcctggttgctttttgcatccccatttttactaagtatacctccccctgcctttttttggtgattcttttttcgtaaagttactgaaacttacgaatttcgtaacgatacttgttttctttccgttatgttacggaaccttgcggattacataatcatcccctttttgacttacggaatgttacggaacctcactaatagtgcaacgatgcttccatttgatttccggtgtgtcacggaaccttaccgattgtgcatcaatattttcttttgtgttccggcatgttccggagattcacaaactgcctaatgatgggtgccaagcacctcacaacgaccaaacaaaagtcgcatgtcatctagctaaggtcccc

SEQ ID NO: 205737 - DNA, 352 bp, Glycine max
  unsure (1)..(352): unsure at all n locations
actcaagctacactcaacgagggggcaagganacgagcacctatttcgattgttcatgtataacagacagngaannccgggcaatgcgcacatatccagtagcgccgggacacaantgtattagagcaaacgcggcatgttgtcccaacaatcagaagaggaagaaccctcacaaggcagaggatcatcattgaagaatactaggctctgcggagagagtcaaactgaaacctggtcctttggcagaagcccataaagatgtgccggaaccgaaaaacccaatatcaaggaggatatcaattccctcacgatcaccaacgacgccatccatgaggacctggaaagacacaat

SEQ ID NO: 205738 - DNA, 220 bp, Glycine max
atattgtatgttgcatctcaacccatatcatatcttttgtgcgtcattcatcatcatgagtaagggagaagaaaattttctaagttagaaaagtttcttcataaggaaaagttgcatctactccaatggcaacgtcaacctaccttggcttgatgagaaagggaaatcacgggatgaagtcagatatagaggtatggttggatcacttctttacctaact

SEQ ID NO: 205739 - DNA, 354 bp, Glycine max
ggaagcaaaaaggagagaacgaaaatctccaatccaaggaaaaaaagagaggaaaggacattcccaatcaaagaatgggagatagaatgggcgaaagctacgaaagaaaagaagaaagctcctgcgcaaaggaaccacaacaaatgtgcagagaggtctttagaccggacagtaactgaacaacacacaattgccaccaaatgaacaaatagaaggaaaggaaaccacgacctacaatggtcttctccctctaaatgccaaccacaatcagagcgctagcgactagatcacctcgcgcaataccataacagaaaagggaaaagccaacaacaaaatcacaagccagaaacacac

SEQ ID NO: 205740 - DNA, 466 bp, Glycine max
  unsure (1)..(466): unsure at all n locations
tgaatggagaagaacaccttttgactatgaggtgttagcggttaccagnnnctnggatgatatctcgcggggtcatattgatcgttggacatcaaactgctgggtttggaaaccagaacctaatggcaagttttctacaaggagtgcatactgtatgctactagaaggagcagcatatcagactatggatgaggctntagaggacctatggcagctcanaatccctttaaaaccaacaacatttgcttggtgattgatcaaagatagaatcccaactaaagggaatntgtggagaagacagctggagaaaggctttgcccagccctacaactattggtttagtaatttatcaacatcattttttgattanggtagcagtgtagggttattgtattctatttagattggcacctgattcgtaggacctatggttctgctagtctggtggtttctaccttgtatattt

SEQ ID NO: 205741 - DNA, 318 bp, Glycine max
aggtcaattcattagtttcttgttaatatgtggaaacaaaaataattaaagtgggaaggaaacgtttaaactttgctaagactaataacatgaagttggatatttcttctaaatagtatattaccacttaaaccaatcgcacgtccactagaattaccgtggaacctataccaaaaaataacattgataaaacaagatcttgatgtatcacaggttcaaagggtgttggacataaatacataactgtcagtggtttcaggatggcaatagcaacgttgcacctgcacgtgtgataggatcatcaagagcaacaataac

SEQ ID NO: 205742 - DNA, 445 bp, Glycine max
  unsure (1)..(445): unsure at all n locations
tcttcttcaaagcttaagctntctttcttctntgtctcttatttttatcncttctttaagcttcttttccagctcaacaaactgcnataccacccaataattttttctcttcaatttaagggagtgaaataaaatctaataaaaaagttttctagcaaaaactagaatgcttcagaaaacacaatagcaatgccattttctttccttaatctaaattgtctcttgaatgaaacaactagcaatgtatgaaattaccttgttgcccaatgattctgcttcttctttgccacccttgaagcatgtctctctgctagtaatctccctctgaggcactctagagtatccaaaccattatgtccttccatgttcttgccactgaaacaaccatttgaacaatgtgagttccattntattttctttttttcttgccagtgagatagcacat

SEQ ID NO: 205743 - DNA, 313 bp, Glycine max
gaaattgccgggggaaactctattgattaactttcatttcattttttgggactatggtaatgcttggtctttgttccttgttgtgagtggcatataggaatggaaaagaagatggtccatcccttgaaaattgattcaaaagcagggaaaacccctttaaacttggctagaacactccaatgatgaatcaccaaagaaacaccccaaattgagaccttgtggatttgtatgacattactacttattctttaatttgaaaaaaggcctctttgaagtagtggaccccaaaagcacctcttcattggggaaaatt

SEQ ID NO: 205744 - DNA, 481 bp, Glycine max
  unsure (1)..(481): unsure at all n locations
ctttatttatgaacaccatggacaaaccataatatgttnggcatcatacatggcaatggatggcagatgatatcatattcaatcatagaaaacaaggtgattctatatattataaataaatattggttactcataatcattatgtttattattttgctaatcacaggtattcgccttactgaaaaggaaacaattcatttatgcttaactgagattgagaatatgctacaagcgaacagaagaagcttgcgagattttctatccatcccatacccaattggatatgcacgaaaccaacatcataataatctgatccataatgaaatggcatatgacaaagaaatgttagcaaaacaatacaacacggcataccaattgctgacaggtacttacaaattatgaacacgttgatataggaactccttaatcacaatagtatatattactatnttgtaatatgtgaatatataattacagatga

SEQ ID NO: 205745 - DNA, 473 bp, Glycine max
  unsure (1)..(473): unsure at all n locations
ntgatgtaattatgcgggcaacccaaggtatgccacaagtttttcacttttattgcacatgagcagnntttttactgatataataataattattattattatttgatggcattattattaaggtctatcttctttagctttcaatttcaataagttggaccatctttgtttgtgacataaatgggttccattttcttttgtgcctacctgccttatttagtccacgattttatatgctagcttgtggaccaagaataaacaataaaatgtaaaaactagtaataagtaaactaaaaattctaaaattttataacttatattcttaattttaattgattaaatttcaatatacagtaaatatatcaatgaaacacaagtctgtttagtgggtgtggtaaaagaaaaatagaaatagaatgttatgtacgacaacctctgttagtttgaagtgtcaatgagataaatattggaac

SEQ ID NO: 205746 - DNA, 112 bp, Glycine max
ccttgaaactcgcttaaagttggttctaactggatacttgggcttattttacttcccatgctgccacaacataaaagcccccatccaatttgcaaatcaattatatatattg

SEQ ID NO: 205747 - DNA, 190 bp, Glycine max
caccttgtttggagtttttttttagcctacttcccagggacaacaatattgctcttttcatatggcatgaagtcattgtttgccccgcttatgaaatgtttgaccgaatacactctccataacaataaagggagataattgtcctagaaattactccctaactgtcaattattcattttgttgggcaggt

SEQ ID NO: 205748 - DNA, 369 bp, Glycine max
  unsure (1)..(369): unsure at all n locations
ctaagctgtcanaagggaagcaagttaaaaactctgttcatagcaattatgttgtttctacttgtcagactctaattatgttcgggtccaaaaaaagaaagaataagcatgaaagatagaaaacaagaaaaaacagagaaaacatttaaatagaataaagagaaaatagaaaacgtattaaaagtgataaagaaaaaaagataggaaataaagatagaatacattgcaaagaataaaagaagaagataatgtgatataaaagaaaggaaaaaaagattacgttcaagagaatatagttgtagaagaagaagaagaacaagaagaagaatgataaaaaagagaaaaaatatatttattgtgtgacctatt

SEQ ID NO: 205749 - DNA, 238 bp, Glycine max
ttctgtactaattagccactattatttattccaatatcccgactataaaaacctccagatgatttttgttttggataaatccaaaactctgaaacaatataaataatttttatatcatcgcagctccttcgtaaggaggcggacaatggacgtcacgttatgccatcaacccatcatacttttccttctcttccttctccctctcccttgagactaggatggaaagaaaactgaatga

SEQ ID NO: 205750 - DNA, 463 bp, Glycine max
  unsure (1)..(463): unsure at all n locations
ctatgatactaagcttcggttgagataattccanaatccatgtcattgttctcataataaaacaatgcagaatacaagtttggccaatattctcggatgtcagcatatactcataaaattgataaatacttgggctttccttagttgagcggtcgagctcataaatctgatttccattatgtcctggatcgtttgaacagcaagcttacgggctggatataaaaaaatgttaaataaagatgggtgtgtgacacttgcatagtcagttttaaattccattccagtttattccatgcacaacttttggctaccggagggagttcgtgagtccattgataggataacaaggagttttatttgtggtagccaacacagtcattgggtcactatggagacagttacataaccaatgactcaattgtgttgtgagttcgcactgcatggaatacatatacatcccttc

SEQ ID NO: 205751 - DNA, 298 bp, Glycine max
aaaacgaccaaaaaaaacctcaaaggccaaaggaaataccaaagtgggggagggggggggaacacaaaaaatgaaaaggagaaaaccgacctgggggaatgaaataaaatgtccggtgaaccagtaccgaaaaaaaccaatcgcgatgggtacaaaaaactggcgaaaataaaaacccaaaataggtagggagaaaaaactaactgacccgcagcttcatgtccatccagagcaatccgaaaggggcgaaaatccacaaagaagggatttgggatgaagagacccaccaaaaaaaaaa

SEQ ID NO: 205752 - DNA, 472 bp, Glycine max
  unsure (1)..(472): unsure at all n locations
tacaaatctgttntaagtccaagcccataaatattataaaatctatactatataagataagaattgataaaataaaatctagataagataagattggatgaaataatatctagatgagataaaatttggataagatagatttgataaaataaaattgtatgctctcttcaagtccaagcccaattccggattcaagttcaattgcttataattctcctgaaattaaattaaaaacacaaaattagtccagtaagcccaaatgataaaactgcataattaatttgacaattaaggctaatcagtaattaaaatggtgacaaaaagggttaagaaataggaggaaatgatgacacatcactgttgtagaatgtgaaataaagaatattggacattcttgtgaccttctttattgtacaaaatcaaatcctttacaaacgtaggagatntgtcctanagtctagcatacatattg

SEQ ID NO: 205753 - DNA, 269 bp, Glycine max
  unsure (1)..(269): unsure at all n locations
caaccgagtccctacttactaagggaaataatgatcatgatcaattccctaattgcattgaggcacattcagttgtggcatgctagtaacacaatgttaaattactactataatgttngttttcaacatgtcacttgatgtacacaaactgttgttaggcctctcttattgtcacactaaatnttttgaagggtactaattcatgattcacatgaacttttgtaaattccacgagtcacacacacaccaaaaaaaaagaaaaatcaaat

SEQ ID NO: 205754 - DNA, 448 bp, Glycine max
  unsure (1)..(448): unsure at all n locations
ttaatgcagatatganagatggttnttatgatatgttggtatctgagcttcaaggttcaaggaatacttattatgtaggcggacttatggcatttgagctcacagagagaaattcatcttatgccatggctttgatctgcaagaactttgcatataggaatgattttccaatatttccttacaccaaggtaatttgtcatccgtgtatattttgacatctcattgatttgaaaagcctagcttttatcgattttagatagtcatgtttcccaaatagacctacacttaatagaagcatgttttatgcagaatttgtttcccttgcaagctttgtgccagaaaaagaatcgtagagaattaggtgaattgccagaagtgcaatttcctaatttgcctactttgaatagctacttaacgcactggggaactcatccaatcactcaaaaca

SEQ ID NO: 205755 - DNA, 464 bp, Glycine max
  unsure (1)..(464): unsure at all n locations
tagcgtggcgcagtgctacaacaccatcgagtctttggcgtatgatactgatgtgcgccngcgcgaccccatgtatggctgcgtgggcttcatcttgctcttgcaacaatgactatgcgaaatcacaacaaaggtacacaacgccaacgagttatcaacctacctcaaccctaagccatgcaggttcttttagccaatcttggaatgtgacaacatggtggtgttaatgttgtgcctcatttggatcaaccaatgttcaatgtcatgttcaaccatatttttggtgggcacgatgttggactaaaggtggnttgggacccataacaacaagagtttctagaagctcaacaaatggttctcttatataaggatcatatataagaattaatgtctcatgtgagagacatgtgatttatgtagggactaataaaacaatattaataattcacgactaacttgatatt

SEQ ID NO: 205756 - DNA, 387 bp, Glycine max
ttgttgaacatagccttgaagttacatttttttaaacgctaacttttattttttttggattttctttcctttttatcctaaatatatttatcaaatttctagattacatttttaaaataaaatataggtttatgtcttttaatgtcattttacaatttttatctacttcaacaactaattttattaaacacttacaatttaataaagtaaattttcagtttccagttggtttttcagttagttttgtcgaacataacttaagtagcatttcaaaaaacactacaaattattaaaaaaaaattacaaaacaattaacaaacttttaattaatcagagaagttaaaacaattgaatgtcttatcaattagctagagataaagatttaaa

SEQ ID NO: 205757 - DNA, 383 bp, Glycine max
  unsure (1)..(383): unsure at all n locations
tgaagagacgattattcttcgtcttcccagttttttttgacaattctagtttgcttagttcctcaatgcctgaatctgaggatgatctatgaagactattatatcgcattagaggctcagcttctttctcaaaggcaaccaaatcagtctcagacgatcttcccaacttttttgtaaccacccactcgtaagaactttcaaagcgaagtaatccagatatcatggcattaatattagttaccgacatagtgttctcaaatagaaggtaaggaactataaacggaaatgaccgtggagctggtagaacacttangagggacattgattcaggaatgtaacaaacaacccangctgggagctccgcttctggaatggacatggtc

SEQ ID NO: 205758 - DNA, 265 bp, Glycine max
accaaaattcattatatatatatatatatatagggacacacgcacacagactaactactggtttacccatggaaaatgtaacccgatgcctttctctctttggttttgggcgcaagattcccattcctttatttcgattcgagttggaaaaatgcttaatgaatacattttccaccctctccataagcctagtgacctgcagggaaacgtgattcacaaggaaaatcaattaaaagcatttcatatatgtattcaaaacgacgat

SEQ ID NO: 205759 - DNA, 470 bp, Glycine max
ggccaaaataagaaacctacagtgcccctgtatgcttaccattattagaaattcataagtaaggttactctcaagtcctaatacaaatctcagtacatctaactggtaactgacgccagacactagttgatcaatcagattagattgagcttcagccagtaaatctcacataggacacattcacctcacatcagtatatgctgcattagataggggatggactaaaagagtcaaccttaatttcctcgtgagtacatgagtggcacaatcaacgacaagaacaagaaccttatcctaacaagtgggacccactacatgaatcacatgacacaacgtcattcctctcaagttaaagactaaatcttcaaagatattatttaccatgagatctctctaaacaacttcctccaatcactaaattagagaagcaaaacgtgtgctattggtctactatttgtacttttccctag

SEQ ID NO: 205760 - DNA, 303 bp, Glycine max
  unsure (1)..(303): unsure at all n locations
cctgattactatttgtaccccctgtgtactaaatacatccccttgccttttttgctgattctttttccgcaatggtacggaactttacgaatttcgtaaagatacttgttttctttccgtaatgttatggaaccttacaaattacgtaatcatcccttttttggcttccagaatgttacggaacctcacgaattgtgcaacaatgctttcatttgactttcggcatgttacgaaacctcacagattgtgcaacgatgcttncttttgactttcagcatgttacggaactttacggattgccta

SEQ ID NO: 205761 - DNA, 156 bp, Glycine max
agaagctagagggggctactcacacccctccaatagctaagcttaccccatgccaaaatacatgaaaatatattgggaagcttccttgagaggcaaggaaggtagcttccttgggaagcacggaaaaaagcttctttgaaaagcgggggtggtatc

SEQ ID NO: 205762 - DNA, 307 bp, Glycine max
actcaattgacgagccgcactaaaaaaacggagctaagttttttttttttacaggggtatcattccagctgaaacagtcagaacttgggctttataatcatacaagggggtatcatccaactaaattaagcacagttgtaagccttgtatcatacctctggtatcataccattgttaatcattccatgctattagtttatgtctgaacgggatcaatatccttgtaatgatccaagctggtacctctaattaaagctaaaacctttttgctgaggttaacaatggtgcgctataatctgaaattacc

SEQ ID NO: 205763 - DNA, 469 bp, Glycine max
taagggcacaacagtactcaggtagtgcaggctagctagactacgagagtacgcgatgtatagattaaatttaccagcatacaaaaacggtcgttataaaacccgtcgttgggtaatccagttcaacgacaatgcctattaaacccgttgttgtaattggaagacgacatcgttttcggtaaaaacgtcgttgaaataaagcgcatatttactataatgccaccgcctgttaaacaacaacgtttttcggacccccgtccttgatagcgggtcctagaagcaagagtttgtagtagtgaatattttatattacattctataactattttcttttacattttacatatcattcaattttttcatattagtaatttctaaattcaaatatatattttgctctataaatatttcacatcaacaaaattcatgatcgaagaattatttttcaactaatctagacaaaatatgt

SEQ ID NO: 205764 - DNA, 367 bp, Glycine max
  unsure (1)..(367): unsure at all n locations
cttaacatcaatcggtgctaagttttcttttccattgtttaatacaaaacaattgccaccaaaaacatgaagatgcgaaatgttcggtttcttaccattgaacagttcatatggagttttctttaaaatgggtcttattaaagccttattcatgatatagcatgcagtattaacggcttcagctccaaaatattttggaagaagagtgtcatttaataaggttctatcaatnttttccaaagacctatttttcctttcaacactccattttgttgaggagttctacgtgtagaaaaattatgttcaatgacatgcttatcacaaaataattcaaattctttgttttcaaattcacccccatgatcac

SEQ ID NO: 205765 - DNA, 487 bp, Glycine max
  unsure (1)..(487): unsure at all n locations
actaagcttctggtaatagtactatctgatagcatccncatccactattgctttttcttcatcctggctttccaagcaacaaccgaagttatatcaataccatatttcaacctcacagcatccattatctatgtcaatttgacatcatcgttgtactttaacttctctacaataattttttacactcatttagagttagcattcttgctaaaaacctttccatagtgatgtgttggtctgcaggtctttatcttgtatgtgtgactcctccaaaccttgttgcaaaaaatctcatacccacatttctctttgcattgactatgtcatttggtcgaaacacaacctctctcccattcattatagaatggtcaataattgcttctttgaattcctgtaggctgcaaaaatccataccaatcttgaactcanaatctctactcaactcctctttcctgtatctgacagacatatgtaagtcttctttgtc

SEQ ID NO: 205766 - DNA, 329 bp, Glycine max
tgtttcctttgatgaatctaatgctatttctccaagaaaggatattttagatgatattgtagaatctctaaaacaaatgcatattcatggagaagattctaaaggaaaaggagaaggaagcatgaagatccttcagtaaaagtcaaagcaaataatgatcttccaagagagtggaaagcttcaagagatcatccccttgacaacattattagtgatatctcaaaaggggtaacaactagacactctctcaaagatttatgtaataacatggcttttgtatctatgattgaacctaaaagcttaaatgaagccctaatagatgaaaattg

SEQ ID NO: 205767 - DNA, 443 bp, Glycine max
  unsure (1)..(443): unsure at all n locations
tctcaggaggtgagcttagntatgatatgtgtatgtgtatctaagctctagcttctcaaggaagttntcttaaagaagcttctaaaggaagttntctcaagatagcttctaaaggaagctacctattctataaatagaagcatgtgtaacacttattgcaactttgatgaatgagagtcttgtgagacacaactcacagttcaacttctctccctttttcttccttcaatttcgtgctcccccctctctctatctctccctctttcttttcctccattgaagcatcctctcaaagcttcttatccaaagcttatcttgatggtgaagctccttcttccatggcttattccctagaggatggcgcctcctctcacctcttctcctttgtcttccgctgcatctccatggtggaaaatcaccattaaaggacctcattgaagctc

SEQ ID NO: 205768 - DNA, 81 bp, Glycine max
gcctttctttttgtcactttatcaccatactaggtgtccatcccaagcttaccaaaagtgttttaatatttttaaaaaaac

SEQ ID NO: 205769 - DNA, 475 bp, Glycine max
  unsure (1)..(475): unsure at all n locations
ctttaatgcttgcattanatgcacgtcccttcttcatgccaagttcaagcttatatgatagtgtaccttgcacttcaccaggaaagtcacttctttcatcataccaggtctgcaacaataaagtgcttcttttgatgaggattaacatcttccgaactgtgggattcttttattcttcataggactatgacaaatcctaggagaatatttcatgcttgaaagaatctcagacatagagtattaaatgaatgtcttaaatatactatttaaatgatatatcatatcctcttatgagtgcatcatttgaaaattcagacgcacagagacaaactatgatctgatatcatatcaaacactactnttatcatttgtattatttgcatctaaccaaaataattaggagtcttgattcatatttaagacataaatgtcttttgacttaacaaccagtatatgtactcatttcaaacactac

SEQ ID NO: 205770 - DNA, 286 bp, Glycine max
gctgcactggaagtgcttatggtgattattaaatcaaagaggggggggccaaatgtagagaaaggggaaaattactttagtggttcacaaacttatctcaagtacaaatgttccatgttctttataccatgacttcttaaaattcttaaattttttaaaactctgaaacttcttaaacttttaaactaactaactatcacctcttatacaactactctgaaactctgaaattatgaaaatctaaaactaactatcccactttaactaatactctgaaaaacaacta

SEQ ID NO: 205771 - DNA, 263 bp, Glycine max
  unsure (1)..(263): unsure at all n locations
ggctctanattacattgatgtttgtatttaggtgaggaggttatatgccattnttgctntaagagtaatgtcccactggtaaaactaactttccaaatgtttgccttcccaagaatggccccgaggaagcttgcctcaaagaggtccaggaaggacaaggcggccgatggacctagttccgccccggagtacgacagtcaccgttttaggagcgttgtacaccaccagcgctttaagcccatcaagggatggtcgtttctccg

SEQ ID NO: 205772 - DNA, 366 bp, Glycine max
  unsure (1)..(366): unsure at all n locations
ntgagccaaaatcttgactcaccataaaccttgacccagtgttagaatgtcaatccttaccctcggaagcaacnaggagagaatgaatatttccaatcacaggaaaaaaagagaggataggaaattcccaatcaaagaatgggagaaagaatgggagaaagtaaagaaagaaaagaagaaagctcctggtcaaaggaaccaaaagatatgtgcagagaggtctttatacccgacagtatctgaacaatacagaattgtcaccaaatgaacaaaaagaaggaaaggaaaccatgacctaaaatggtcttctccctttaattgccaaccagaatcagtgcgctagcgacttgttcacctcgcgcaaaa

SEQ ID NO: 205773 - DNA, 389 bp, Glycine max
  unsure (1)..(389): unsure at all n locations
agctggagaggatgcttcaatggtggaatttaaagagggagagaaagagagagggggagcacgaaattgaaggaagaaaaagggagagaangtgaactttgagttgtgtctcacaagactctcattcatcaaagttacaacaagtgttacacatgcttctatttatagactaggtagcttccttgagaagctttcttgagaaaacttccttgagaagcttctttgagaaaacttccttgagaagctagagcttagctcacacacccctctcataactaagctcacctccttgagaaacttccttaagaagattcctaaagaagctagagcttagctacacatacctctctaatangctaagctcacctcttgagatgagaagctagagc

SEQ ID NO: 205774 - DNA, 369 bp, Glycine max
tctagccaatggacttaccttgaattaattcctttgatagtccctttgagccttggttccctttccttgttttgaagctcactacaagccttaagtgaaaaaccatgatatttccatatccttaaggaattttggagctttggaattgttttgggaataagtgtggggggtttttgtttcattggacaacttgttttgttggctatgcttcatgatgtattttgggccatacttgatgtacattgtatattggttaaatgttggacatgctgaatgaaatgttgtttctcaaaggctaaagagtaaaaaaaaaaaaaaaaaaaaaatcgaaaaaaaaaattccaaaaaagaaaaagaaaagcaataaag

SEQ ID NO: 205775 - DNA, 339 bp, Glycine max
  unsure (1)..(339): unsure at all n locations
gctgcaaactttcaaactttccttatttgcggactgtttacatatatgctgctcttcactcccctcatcgtcgacttccagccggccttcgtctatcatttgttgcaacaaggcctccactgctaaacatgtttccatgttattgtactccgcgggatgcatcaaataagaattttccctgtgcccaccgcggggaattacgccccccttttttaaggaactcgaaataaacctcctgggggtcgtcacgaacttcaaaagcttggacctgcgcggnctacccgactcaacgggattaactgctccccctncatgattggcgagtgagttcgtttttac

SEQ ID NO: 205776 - DNA, 433 bp, Glycine max
  unsure (1)..(433): unsure at all n locations
cttgagcanattcaaacgacattaactatgtactctgatgtttgattgagtcccgtacgatatcgagatgctcgaaattgaatatgtaagctcctagcaatttcaaaccatattaactttttactgggatgtctgattgagtcacatattatatcgagacgctcgatattgaaaatggaagctcctagaatactcaaacaacaataactttttactcggatgtctgattgagtctcgtgatataccgagacccctaaaattgaatacagaagctccctacaaatccaaacaagaatatctttttactcggatgttcgattgtgtccctaaatatatagggacgcttggaattgacaatggaagcactgaccatattcaaacgaaaataactttatctcagagggtagattgatgtccatatcataccgagact

SEQ ID NO: 205777 - DNA, 122 bp, Glycine max
ccttggcacaaactgttgtaaagaacttacaaaacagcaccagggaaagttttaacctgctatacagtgttatacattgactgcgaataaactaaacttactttctcctttgtagttatccc

SEQ ID NO: 205778 - DNA, 163 bp, Glycine max
  unsure (1)..(163): unsure at all n locations
tgaccaatctcgacccaacctgngcattgtcagtcagtgatatcctgtgatgtacctaaacaggcgagctcctggcagccaaccgattaaagaacaaagaccacaaagcagggatgcttgtgtggtggctggcagcaatgaatcttgagtgagattgggatat

SEQ ID NO: 205779 - DNA, 258 bp, Glycine max
aagcaccggggcggacaagagaaggccacgccaaccaaagaaggagaccaggacaaagaaccgcgaaccaaaaaaacaaggcggagggaaaatatcgataacacaacgcggaaaaaggaaccacacagaacaacaacaaaacagaagcaaccccgcctggagagggccgcaaaacccaaagtcgggcggacaaaaacccacaaggaggcagccaaacccaaaggaacccccaaagcccacaaagaaatccaaaaaacg

SEQ ID NO: 205780 - DNA, 390 bp, Glycine max
  unsure (1)..(390): unsure at all n locations
gaaatgctactcttaaaacaaaattggcgtacaacctcctccaataaacacaaacatcaattgtaatttagaagcaactcatgcacatacttccttatgaacattcactcgcacaagatattcttctacctaaaaaaaatgcacccatgtgcaatcaaggcacctttgttacctagatttatctatgtgtacttccaaggtgtatttgctacctacatcacatgcaattccttggctaaatttacatacatgtatactcaaagcatcttggctaccanaaattgcacatgtgcacattctggcatttctaatacctatgcatgtacaaaccttgtgatgaatcttggctatctacacaataaggggctacattccatgctttattcaagt

SEQ ID NO: 205781 - DNA, 418 bp, Glycine max
  unsure (1)..(418): unsure at all n locations
agcttctcgatatattatgcgcctgaatcagacttccgtttctttattatgaccatatgaatatctccactgtattccgtgtgacaagttatgaccatttgaatntctcgatagcattcgttgttcaatttcgagcgtctcgatatattatgcgcctgaatcggacttccgtgtgacaaggtatgaccatttgaatttgtccagagcatccgttgttagatttcgagcgtctcgatatattatgcgcctgaatcagacatctgtgtgacaagttatggacatatgatattctcgagagcattcgttgttcaatttcgagcgtctcgatatattctgcgcgctaatcagacttgcgtgtgacatgttatgaccatttgaattcctcgaggcttccggtgttcaattcaagcttccgata

SEQ ID NO: 205782 - DNA, 429 bp, Glycine max
  unsure (1)..(429): unsure at all n locations
ttctcgatatcttatgcgcttggatcggacttccggtgttatgtttgactattggaanntctctagagcttccgatgttcaatttcgagcatctagatatattatgtgcctgaatcggacatccgtgtgacaagttatgaccattntaatttctcgacaccatacgttgttaaatttcgagcgtctcgatatattatgcgcgtgaatcggacgtccgtgtgataagttatgaccatttgagtttctcgagagcttccgttggtcaatttcaagcgtctcgatatattatacgcctgattcggacttccgtgtgaaaagttatgaccattggaatttgtcgagagcttncgatgtgcaattatgactgtctggatatattatgtacctgaatcggacattcgtgtgacaagttacgaccattngaatttc

SEQ ID NO: 205783 - DNA, 375 bp, Glycine max
  unsure (1)..(375): unsure at all n locations
tactctgacaaaatattgcatggatttataaaactggggaaccaaatctgtgaattaaattatagggggaccaaatctgaaatcggagataaactgcgagaccaaaaatgtaattctacctataaaatatgatccattaaaagttaaaaatatatgaactacaaaattaagcataaaatataatccactcattatattctcaatggagaaggtagttatcgtctatcacgtcagagtgtacaatatatacgacctacaatattgggtatcaaatatagttcactcattatactaatcatgttaaagtatacaaagggaaagacaactccttaaaggatgaanacaaatgagaatatcttacttcatcttaaattt

SEQ ID NO: 205784 - DNA, 417 bp, Glycine max
  unsure (1)..(417): unsure at all n locations
taactcanangacaggggtagaggggacttatgggtaccttgcaccacaatatatcattggaggtagggcaagcaaggaatcaaacatttatagctttggggttgtggctctcgaaattgcatgtgggagaaggatttatcaagacggggaagttcatgtacctctcgtgaatcgcgcgtggcaattatattgggaagggaatgttctacgtgctgttgatgagagaatgaacaatgagttcgaggtggatgaaataacacaatcgaatgctatggggttgtggtgcactaacccaaacgacaaataaaggcccaaggctgcacaagtaataaaagttcttcagcttgaagcgccattgcctgtgctttcgcttgatatgcataacgcgtaacctccttctctaattacccatgggc

SEQ ID NO: 205785 - DNA, 471 bp, Glycine max
  unsure (1)..(471): unsure at all n locations
agcttaaagatgcccgagtcattcatccctatgatatgntgnngaagnattggcgatcagaattgccattccttggattatagggttgaaccaagctcatgcttttacaaaaaggttcatcaagtcaagttgaaatatggaagtaaccgtcttgcaaaattgcggcaaaagatgaatcgagtcacatcactgcttcgtctactgccaaacatatttaggattgttgatgtccttgttacttccagtttcaccttgacaaagatgtcatggaccatgttgaaaatctaaattgattcaaccccatatcctgcgtaaaaattcgcaatactttaactgtacatcattcgcatgcatccatgcttttcattggttgcattgctcattgcattctttccgggaacaataaaataagataaaatataatgaacttaatcattgttataaaaagagaggacacgctttaccacccct

SEQ ID NO: 205786 - DNA, 431 bp, Glycine max
  unsure (1)..(431): unsure at all n locations
acacttgcgatgcctacttctatttctntttgtatacatgagnagcagaacaagtggtagcattctgtaattaccacctgacaacaaaaaanaaaaagagatgcataagcttttcatcccacacaagaagtcagattcgggtctatttttcaaatgttaattttgtaacagactagcaagtgactgaaacatatgcacaccccttggatacttctccataagcacttgtngaagaagaaaataaataaaaatgaaataagctaattgaaaagcttgtttcatttagtttcatcaaaagctgattntgtattgtgcataagctaattttgatttatggagagatttatttcatattacctgtctattttcttctccctcctatgagtgggtttagattagtttatcaaaacaggaccaatatctaacagtga

SEQ ID NO: 205787 - DNA, 450 bp, Glycine max
agcttaaccgcccaaatggctttttctctattaatagccgcgaagggggaggggtttaaggggttccaaggctcaagagttgatccaagatagaaagaagaagaaacatagatgaggcgctaccgaatcgtgactgtgatcattccctacatcgttttcttgttctgtgttcctcgtgcaacaatcggttagttctgtttttaaggattgagtatgatctatgtacccttaggggtcccctctgttattatgagcatattcatcttctccatctatcattggtaatctcattttttatttgtaaagtttaatcttaactgatcactagtttcgtaaagctgtctttaaagagattgaaagctaataaacaaaaccataataaaaccaactcataactggactcctcccatcaaaaagtcacttgagattgtttaagggtccaacgcttta

SEQ ID NO: 205788 - DNA, 358 bp, Glycine max
  unsure (1)..(358): unsure at all n locations
tagtcgatctctcacttaattttccatattctccccctttggttttgagtttatgcttaacttgaaattaagttaattacttatgtgagttcttgatttagtctctatttctctcccccttttccatacactactaatcatacacaagacattcattaaagagtataaaccaatcatgaagcaagaaacatgaatagatcaaatatataaaaaccacatagtcatataacataattcataattgttcaatcataccatgcanataaaagaaatactaaattgttcaaatgtcataataatatagccaaatacacggctagaaatcaaagtactaataataatagaaaactaagatgat

SEQ ID NO: 205789 - DNA, 465 bp, Glycine max
  unsure (1)..(465): unsure at all n locations
agctngangtggtataataagaaatgtgtgaattcttttaattacaacagaattctgngccttattatataaatatatttattatggtctgcacacatgtttctatattttatacttgnagttaattgcatagtttcaacattttatacatatcataattaatcaataaaatatttcatttattattttgatcacataattgattattgtaattataaaaactattccagacaaactaataattaaactaatgtattatataaaataaaaattcatataagatttatcaatttaatcaaaccaaatatatactcatggtaattgtcttaattatctatataattttgtcaaaatttctctagatatgttttttttttgttggaaagtaattaacactgaaaactaaacacggaaatataatactagttaatgatacaaatattgttgattaatcactacaaaagg

SEQ ID NO: 205790 - DNA, 347 bp, Glycine max
gcacacacacactttttgttatttgatcactcacataaacctccattctccaccattgtgtttggcctacgcttcatttgaaattaagttagctaattacttatgtgaggtcttgagttagtccctatttctctccccctttggcatcaacaaaaagccgaagtgcgtatcaagtatgaaacatacatatactactgattattcacaagacaagcatggtagaatataacccatcatgaagccacaacatgattattaataccacatagtcgtattatatattcataaatgttcatcaaaccatgcaaattaagaaatactaatttatccaatggtattatattcca

SEQ ID NO: 205791 - DNA, 424 bp, Glycine max
  unsure (1)..(424): unsure at all n locations
agcttctggccatagagtaaatattattnttgaacctagngnnagnatcatcccaataagcactcagcaataatagaataagcttagtcaaaatcatcaatcaaatacttcaaaatcacaatttggagagataagttcacattgtttccaaattccaataacattaaccaggttagtaagatatagcatgtgggtttttgagtggttggcttgaccgatgaatagaataatcaggtttcaatactaaccaccaaaacataaccgaatgttctagaaagtgaaaataaaagtgaggaataaacatgttaacagagtaacactgaactaagataaaataaataaataaataatataaaataacaagatatatacatgaatggataataacgttacaacaacttactggtattgtggagggaagaat

SEQ ID NO: 205792 - DNA, 441 bp, Glycine max
ccttgacttggaaaaacctcttgccggttttattttgtttcatgcttactaaggggagacaaaaagctggtgcaaatcaaaactccgatacctcatgaatggaatggatgaatgcatgaaggaatgcatatgacacagatgttacctatgaatgcgggggcccgaggaattgtctccttcttatatacaacgtctaggggtagcaaagtgccccaacgtaccgttttaaaatggcgacacggaccctccgttggtttgtttacagaggggatcaagacagaacccatatgtgatgcatatgcaaaagacgcaatgcgggaatgtacatagtatgacaatattcactgatcataagcaaaagggtatatgatacttatgcatggcagtgtgaaaaatggcacgcagcgtgtttgctccgtgcccctatttaagggacctata

SEQ ID NO: 205793 - DNA, 405 bp, Glycine max
  unsure (1)..(405): unsure at all n locations
agcttgtctgactgctatgatgttgttcttgtgtgtgngagccatgttgtctctgctccttcccttatttgcatcgacgggggtcctgatggcatgacaacaaacaatggtgtttctcgcgtgtcatttttctttgatttctccttgtgcgccgaagacgacaggcaactctgtaaggtaaggtgttttttattgttacccagattgtgctgatggccttcattttcgttacatttctccccatggccatcattttcgttagatgtcttcttgttgtttcgttattgccgacaagggattaatcatgcgttagggtttgttgatgatgctctatttctggtataaacatgaataaatttattactaatccaatgacgcttagtttccttcttcttgtgactttat

SEQ ID NO: 205794 - DNA, 370 bp, Glycine max
  unsure (1)..(370): unsure at all n locations
gatatgatatgtatatgtgtatatatgattatattcgccgctctggtggtgtttgattttgttttgccaaaaaaaagaaaaaaaagaaaaagaagaagtagagacgagagtcgtcatcactgaaaggcagggcggacgaaatcagtgtcctatctttgctttcctcttatctccgatgagaggtaagtaaagagaggcaactgtcataccctaatttcgtccggngattattacttgatgacatgcgataaatgaagtcccgagacgtcttagaaatcaaaagaaagcaggcttgcgctgtccgtgaaaattcgtaatgtggcggaaatcgaaaagaggtgttttgcgcaattcgtgagttttcgtaact

SEQ ID NO: 205795 - DNA, 373 bp, Glycine max
tgcagctttggttcaggcgtttcgtatctttttcgaacttagcatggagcgacctggaaggctctggagtacactctcaacctggctcaatcgtctaagagaccatcaagctgcaggtccaccgttcagctttacaatctaagtcattctcattctccttcattcccttttttgtaaatagggtattttatgattgggatggcttggttggaatcttggtgtttggctcaattgaacggatgactgattccacgtgattccccccgctatgcccgtgcaagtggaatggaatacggttgtgattactctcactgatggctttcgagttggtctggatccatgcctttaaagacctcattttactgttaaaact

SEQ ID NO: 205796 - DNA, 457 bp, Glycine max
agtctaaggatttgtgtttataagaaaatacagatttgtataaagtgacataacccaacaccctgtttactgcaatgttttgaaaactaaatccaagattcaattggtgatgcctctggatcatggcttgattgatttatcctggtaaattttttatttaacatgatgaaatttgaacaggacatagagctggttcatgctccaactgtgtgattggtttttttttttccctttattttgctattgctggaaagtggagaggctggtctattttcacaaagtaattttacatcccctttttaccactcacttacttcaactggatagagaagtagaagacatttgaacaagattaatcattggtctgaaaattatgctatcctgatctctttttgatgataaccgagagttatgaccagttatgaaagttattggtagaaagtaatagtagtgattt

SEQ ID NO: 205797 - DNA, 437 bp, Glycine max
  unsure (1)..(437): unsure at all n locations
acgctttgncactccatccatatctggccttgacattatccagacttaacaccgncgacaatagcatcaaggaattgttgtaccccgaatacaaaggcttctttgagtcactctacaatccttcatacacaggggcatatgcttgctggaaagactcttgtccaaagtcacgaatcatatcctccaagcgatctcccatttctacatctaacggttcagattgctgcccactatgcatgtctgtcatttcaccatgccatatccacgtcgtataattcctcttaattccatcacacaacagatgctctcgtatgtcatccagtatttgtcgtctttcgttcaaacaattgatggcaggacaataatattcttcatcttcatccgattgacctctntctgaagcacaatgaagaactgctcgacacacttctcatatt

SEQ ID NO: 205798 - DNA, 383 bp, Glycine max
  unsure (1)..(383): unsure at all n locations
ttattccagncttcttctggcttcaattcatcagtgggctttccttttgtgtccagcatcttgggatgttcccagcctttgatgacagctttccaggttctgctatccagtgatttgaggaaggccaccattcttgctttccagtattcatagatgcttccatcaagaattgtggggctggtcactggtcctccttctttctccatgttcatcagaaattatctccccagatctcactctgtgatttcgagtgtttgctctgataccaattgaaattctgataccaggggacagatgtcgtacaggatgtcacgacatcacgcttcagaacatgcagattgtatgtgtccgtatgaacagattaaacatgttaataacacaag

SEQ ID NO: 205799 - DNA, 355 bp, Glycine max
  unsure (1)..(355): unsure at all n locations
tttcaccaacaaaggcttgaagacatcgacctatcctaaatcttttgaagaagagatgaatcttctgcaccatgtccttcttcatcaacatgtcgagtaccccttttcacccaagagccatcatgctctttttgataaccaaaggatgcaatgcctgaagcgcctattanaaaggatctctttatttgaacataaggttcacaatcaagaggcatgttaaagtgttgaatgaagagggtgactaaatgtggatatgccaatggagcattttatcacaaatccttatgcatgcgatattgtattgagtgtgcccaatcaatttgtcagcctttatgaaaagcccacataacaataa

SEQ ID NO: 205800 - DNA, 470 bp, Glycine max
  unsure (1)..(470): unsure at all n locations
agctttgnggctgaggacctatataaagcttttgtgtttattttanggagnntttggagaggagaataattctaggattttngaattccagttnttactgttcatgcacactgttcacgtaaaataaaattcgttttcagcaatttcgtttctgcttcaatctacaagttcgtttctattgattaatggaaggctaagtctccagggttgttctttcttgaggatcaagcacatctctctttgaagttttgttattactattgaattctgatcaatatttcctcttcaccaattacgttgtatttgttgctattaatcgacgcatgcttagtgcttgaataattggctctgcgcttaatatatgttcatgattaattggtgtatgtgttgcttaatcacataatggcagccttatgttaactttcacttagtaattcaattcaaggttggattaagtggttgaactgatt

SEQ ID NO: 205801 - DNA, 337 bp, Glycine max
catgctggatttatggttgatttatggatgacctttgtggatgattgggcggcgggtaatgagaagggttgatattggctgaggaatgacattgttgggctcgggggaaatatggctgtgtatgaatgacagccacaacatgggtttctccctcattctcatcctcttcatttgccccaattttctcattcgacgaagcaggatgatcaaacttgcctcttttctgacccacttccatgctttcaccggcgaaaactaaatgaacaaagcttgaaggtgcgtagcccaccatctatatcataggagaacactggttatgtgccttatgacatgtagt

SEQ ID NO: 205802 - DNA, 52 bp, Glycine max
tttctttccactgtccgctgttgatttttttttcgttcttagcgctggaggc

SEQ ID NO: 205803 - DNA, 384 bp, Glycine max
aatcaagacatggcagggaactaaattgaatatttttgaactttaggtatgatttaatataattagacttgcctacggcctctctctctatatatatatgcgcgcgcgctaaagaaagaattgcagaatccatgagatagtaatgtattgggtctacattatatgtatggaggttctggaagtgctagcaacatccagtttcataacattgaaatggacaatgtgaccaaccccattataacaaatcagaattactgtgacaaaaataaagatgccatgtcaaacacacggaaatatatatcattaaacaacttttgctactactggaatatcactactgatttggtatgtatagctactgattatacatatagctatggagaa

SEQ ID NO: 205804 - DNA, 315 bp, Glycine max
ggggcaaaacacaccaaatgactataacgagggatggatcagagtctcacaaaggtaaaatcatcactctcaaattgagctctcaaaactaccatgacacgtagagaagaaacaaggagttcaagtcacaaaatgtcaagaacttttatattcaaaacaattacccatttcttgaacatatcctatgattcaaagaaaaacaggcagagtcatacgtgtacacgaaattgacccacaatattaaactgaaaatccgacgaaactaacaacattaacaacataacacaactaacagattaacgaaaccaacaaaac

SEQ ID NO: 205805 - DNA, 395 bp, Glycine max
agcacatactacataaccttgcaacacgtacatatttctgattcgaggccagctgggttaccaagttaaccaatgcatgcagttttctgtcacacttcgtattctcacatgatgcagctgagttcgtatctacctcatgcactcctctaatgactatggcatcatttatggcgctatactgccgacagttggaagccatcttctcaattaaatttctggcttcagcaagagtcatgtctcctatggctccaaccactggcagaatttatcatacttctctccatattactgagtccttcataaaaaaattggagaacacattgttctgaaatctgatggtgggggcaaccggcacatagtttcttaaatgtctcccattaccacatcggctctct

SEQ ID NO: 205806 - DNA, 464 bp, Glycine max
  unsure (1)..(464): unsure at all n locations
agcttccatcaagtggcattagagctcaagatcttcaagtaggtgctccttannacctccattaatttttttctttaccttctcttccattgttgtttcttcatttttctccatgtatctcctcacatgtcttgttctaaatgttgttaacatgattctttagagtttccaccgattaaacttgctatagaagctagatttgattttctatggttcaaattttcttgttcttgttcttgaaccatgaattgtgttgagtttaggctcctttgagttttgtcttgttattttttgtggctgatgttagtgtttggctctactgagctttaaaagattggctaagattntgttaaaacataagcacttagacaatgaaggaaagctggagttgctgcacatgatgtccaacgttatgtcaaggaataagatcnggctgcacaatgcacaatgcaagattaaatgtc

SEQ ID NO: 205807 - DNA, 445 bp, Glycine max
aacgcattgttcctttggcttcatccaccatgacctccactacaactcttactatgacaaaaacttgatcgtgatttaaaacataatctcaagccgaacaactataactcaaaacatgatgtggtctatctaaggctgtcataatcaaactaacactagactaagacaacttttcaagcattttaactataagaagttaatctaactcttataacaccaaatgcaatataatatactataacaaagacaacaacaataacaacaacaacaacaatagatacaaaatacacatgtgtataagaacacacactatcacaacatgtgtacatgcttagtacaaaaccaataatatacaaataataatagcaattatttacagaatatacgatagaagagtcctaataagaattctccttatggtatattcctagtactcacaacttat

SEQ ID NO: 205808 - DNA, 463 bp, Glycine max
  unsure (1)..(463): unsure at all n locations
agctttngactactttaccatatctttattcttagtgagnaaatcgnggaaccttctttggattcttcataggtactagtatcaataagaaagtcacgcgaagcatctcaagcaactagagaggctctgttacttgatccccgtaggcaggccttttgactatcacaatgaactattgttttcaaatggacattaacaacataatcattcctcattccttgacatttcaaatagcaacaagaaaacatcaaacaaatagtatcacttatcactatcataacctagggttaaccaagtcatggcacaagtcaaaactacgagatcttcttccttcaccaaactcagattcgcaattattatacttcacacgaatcattttcttcttctaattgaaagatccagaacatgagttactaacctgcggaggaaacaatttntttaaagcgaatactctgatgcttga

SEQ ID NO: 205809 - DNA, 356 bp, Glycine max
ggaacctccagccgacgaagacactgtcaagaacgtatcttctccttcttggacagagtagtggaaggtgggggcaaatacattctgatgacattaaacctatgatgcagctgggatcgtatacgcatagcagctggatcttgaggggtatacaagccatcattcttattgccttgaatgttaaagagcgtggccgtcacactgccacacacagttttttccacatgcataagatctatacaatgtctaccggcgggatcgcaccatggcgatagataacagagaatggacctcttcttacgtatgcgactctgacttggatccttctattgggtcttgcgagatacgacattgat

SEQ ID NO: 205810 - DNA, 313 bp, Glycine max
acccacgccacaggaagtgcacgctgactctgaataaccaactacgcgtgaacaagaggagactcgccaataggaaaagacaactaatggaaagaaatcgcaacacaaacaagataaaccagtcgcttatagatccaccctaactcgaaagggacagacagaacacaaaaggaatacgttaaggctattcacaccaaaagtagagacggcggcaacaacactccgagggccaaaaagagacataattgtgcagctggcattctgctcggaccccaagaagaaagggtcagactctgaagtatcctgaagaaaa

SEQ ID NO: 205811 - DNA, 345 bp, Glycine max
gtcctatgacactaaatatatacctgacgtatgcttgagacctgatgtttgtttgagacttgagtacgggtggaaatgagctcaaccaagtcaagttttactgcttgagttctgctcgagataaatatgtgagacacgagctttgttcattatctgtcatacacttttattataggctcggcttggcttacatcaaaacttaacttaacctatgagcctatttataagtctgctgcttaaagacgtctttgatcaattaattattttaaaacctaatgacctactaactaatataagagacttagtcaattctgtttaagtaatgtacatatccaacaataattg

SEQ ID NO: 205812 - DNA, 466 bp, Glycine max
  unsure (1)..(466): unsure at all n locations
ttaaacgactgcagcangcaagctnggccagagccaatgactgttgttatctcataggtngnagagcctgcacctcgcgtggtatattcggtggatagacccaaaatgaagcaactcatcaacaacggaggggcgagcccgacaacgcggatagcaaggctctctaactctgagagagactcgttgacggcgccccttatgtggattttgaaaagcgatccgaaggggtcggcctagtacaacagggcaaaacgtgattctaaggcctgtagcattgcttgccaagatgtgaggaaaccattcctcgacatccatcgaaaccagcaaagggaaggccctccatggagaaggaagccacagtcaggcgctcagcatcagaaacaccttgatagtcgaagaactgcggaatttaaagaccatccgaaggatctgggcattgaacacaaaactcaaccttcatgtggga

SEQ ID NO: 205813 - DNA, 454 bp, Glycine max
  unsure (1)..(454): unsure at all n locations
agcttgccgcccagctcgcccaggctagctcatctcgcccaggcgagccaggcttcttcctccagaagcaacagttttctggaggaatcttctggagggcccaagcgggcctggttgctatttacacccccattcttactaaatgcacccccttttctatttttctgtaattctttttccgtaacgttacgaaactctacgaatgttcgaccgatacttattttttcttccgcaaggttacgaacccttacgaatgatgtattttctctttcttagcttccgaagaagttacggaaacttacggattgagcaaaaacacctcttttcgacttccgccacattacggaatttcacggatcgcgcaagcctgcttcctttagatttctgagacgtctcgggacttcatttattgtgcatcanaggacgccaagtatctcagagcggctaaccaaag

SEQ ID NO: 205814 - DNA, 443 bp, Glycine max
  unsure (1)..(443): unsure at all n locations
taagacatgctttgtcccggatattcctttcacctcttcggagtttgagctcactatagctgccctataaagcccctcaaaacttgntttggtcgtgttcttcctttccggccttcttggtttctcattcaaaggcttcatcggtggccatattgacgtcccttagttcatcatactctcttcagactttgatggctatggacttgaacttctctttgactacccgagctctttcaagctttgcctttagggcttgtacctcatcactttcttccgaagctttaacctcattgtctttcacaatctttaaatttgggagccaatccaatccttgtgtccgtactctcaaccacttatgatagccgccgatgatcccattactgcttcccctaagctctctgtattttcttcacaccgcatcacatgccttgtgaacatcttgg

SEQ ID NO: 205815 - DNA, 398 bp, Glycine max
  unsure (1)..(398): unsure at all n locations
agctntatacctgagaccctctatgtaaattttacagcctcgnctctcccttcctgaaaacccactaaaaactgcctaacccccctgatgttactccatatattattctgcaataactgcttaaggcagatacatatgggcctaaatcactacagattcagttacgattaaccctttgttcctaactagggtttcgaaacatcacaacagaggcaaaccattgaacaatggattttcatcattaacatacaacagagacataccttcgatggaagcgcagacacgaactccacaaacgcgaactcgacaatgtggttgcagtgacggaagcgcaacccattttgcgacaaaaacgaactcaggcagaaggagaaacacgccctgngagtacccttttc

SEQ ID NO: 205816 - DNA, 400 bp, Glycine max
  unsure (1)..(400): unsure at all n locations
gaatataanatatttctctaaacaatcatgctctggtgntctatgtcngagcctaaattactaaacttcgatccctcgtcagaccgaatcaatctaagcttcgtccttagatccctcttgttggactaagcccaatttagacggccctcttaggtttagactaacttaaactgagttttgtccgcagatccctcttgtaagacttgactcagctcaagcagcttacgaaagtttagcctaacttagcctaagcttcatccgcagatccctcttgtaagactaggcctagactaaacaacattattggtacaacctacttaaaaccacagcttaatacgatgatccctcttgtaagacttgtgaatgtatgaatatatgaactttgatgatgcccaagaat

SEQ ID NO: 205817 - DNA, 470 bp, Glycine max
  unsure (1)..(470): unsure at all n locations
agctgaggattatgggggacccatcacatgtggtactaggtggcgttccggcgatggtgcacaacaagttttccacatccacaaagcgcgcataagcccaccatcccctgttgcccacctccaactgagctcacgtactcccacgtagcccatatcctcttttctctcaacaccgggtccccatcaatcctcccaagcttccacaacatccaagcaaaacaacattcaaacagcacaagctatcacagccaagcaaaacagagtaaaggcagaaaactctgctcaaacaccaaccaaaatcacagcttttctcacttaaagaccccagtaacaattccttcgatccaattcgttaactgttggatcgactccaaaattttaccggaagtctatagtacataagcctacattgtggaccgtgggatctactagcanacatccagaacttattcttcactagaactttcaca

SEQ ID NO: 205818 - DNA, 378 bp, Glycine max
  unsure (1)..(378): unsure at all n locations
tttgttntaagaatagcatcccactggtaaaactaactcttcaaatgtttgccttcgcaggaaatggccccgaggaagcttgcctcatagaggtccatgaaagacaaggcagcaaaaagaactagttccgctccggagtatgatagtcaccgctttatgagcgcggtacaccagcagcgcttcgaagccgtcaaggggtggtcgtttctccgggagcgacgcgtccagctcatggacgacgagtatactgtatttcatgaggaaataaggcgccggcggtgggcaccactggttactcccatggccacagttgatccacaaattagccttgagttttatgccaatgcttggccaacagaggagggcgtgcgtgacatg

SEQ ID NO: 205819 - DNA, 444 bp, Glycine max
tgctatatagaagataacacttttatctttgtgtgataagccgcttcgtaggaactctaggtgcaataaaaggcatgcggtaccaagcccatgactgcaatagtatggcacaaccacccataactcgatcaaccttcgatgatgactgtcatagttctctgtacagggttgctaaataagccgaactccgactatattattttatgttgctcaaatcatgtaataggatcaaatacattacatgaactctatttccagaattattaggaattaaagcaccgctaatcatgtacattatgtaagctttatacctaacattgcagctggagagatgtaggttatataggccatggtgtgcgccagatgctaaggaaccatgtaagctcccggcagctccttgcggtatttttagagggattccctagtactcgcgcgaaacttatc

SEQ ID NO: 205820 - DNA, 377 bp, Glycine max
  unsure (1)..(377): unsure at all n locations
ggtgttgccatgactttgngcacaataaacaaaattcttaaagtacatcatttaccaagaccataaagataataattgtccatatcgacatttaaaaaaatgattgcgtttcctattaaatatgaaatacattactccgatataatgcaattacgtaggaatgttatcccataaaccttcatcatgatcattatcantttcacgtacatcatccaccttttgttcttcaattatagaaggcattcgtgtggagaaagcagacatctcgccaaaatcaagtgtagaatcatcatnttggtgactgataccacttgtagaaccactgacaatcttgagtcacatggatcttggacgtacaacacctgtctgacttgttt

SEQ ID NO: 205821 - DNA, 383 bp, Glycine max
ggaacgaatccatgccttcgaatagagaaccccccaatagaaccctatcccgctgtaatttcgctgcccacactattaaatctctatttctttcgccctatgtatggacagacatgagaatgcattgtacaccttctctgtttggaatttggaaatctttttaacaatataaaatcaatgtaaattaactatattaaacatgtacattagaaacatattaaaacggcctatcatttgaaatcggagcgattcaaattcattataatttgctatcctattcttcttaagtattaacaataagacgagtttatggcgagaaatgcaaacatgttcctcaccatggatatgttttaaacacccgtagaattttgtactctcatgaa

SEQ ID NO: 205822 - DNA, 307 bp, Glycine max
gaggaggaggtggcgatccacccgtagatctatctcatgcgaaagccatgaaaatcttcttaagattgagcctactctatactccatagcacactagagagaaaagattatgtgaaagagaatagtattgaggaagtcaattctactaaaaataggttacacctctatttatataacctaagtgagtgacagatctaatacaatggtcttaactatcagcggtacaactacaaccgtcattatactcattgccttagctcaaaggaaaatacattgcggagtaatggtactgcaattcaatcaatct

SEQ ID NO: 205823 - DNA, 347 bp, Glycine max
ggacttcacgatctattgctcggaagagcgaattatttaccttcaagaccttcaacttctgcctcaccatcaaattgcatggcgactccagaggctctattccatctgccaccatcaatatcccatcctcaatgagatcctaatattctgcggaacggaaaaaatacaccatcagcattgcccaaagatcataacgaccattaaaccttgaaatcgcaagctgcacgaacctgctactcccaccttccgtcattcttcacaacccgttctactcgaagagagaaaaagtgaagctctttctcgactcacactcactcgtttctcacatgcactaatatcatacccta

SEQ ID NO: 205824 - DNA, 470 bp, Glycine max
  unsure (1)..(470): unsure at all n locations
agctngcatgcattaattgatagtcttatttttgcttagcngnggcatggatgacatatggtaagacctataaatggtattttcatttaaataatattattgtattggttcacacaaatggtttaaaaaataattaataaaagttgagctattataattttggcatgcataattgtgacaagaattccatgtggctaaattatattgttatatcatgcatagctttgacatgattgccatatgatgaaacttacatacaatccattaattgatattgtcatattagtgcatagttgcgacatggttgccatatggcgaacaaatttgtaccatatcatccacttaaattatgtttaccaccacacagataaaaaaaaaaacaattagaaggtaggactaattgtaattacaacatggacgacatattgtaagacctataatgtggtattttcatttacataatagtatta

SEQ ID NO: 205825 - DNA, 464 bp, Glycine max
  unsure (1)..(464): unsure at all n locations
tctcccaaaagatagggtcatccgcagagtggagtatgttcaccgtgatcttatgctnccccaccaaagaagcttgaatacagttntngattaaagcttccctcatcattccagtcaggccttcagccaccaagacaaacaacaatggagccaaagggtccccttgtctcaagcctctttggggcttaaactcagaagtagggcttccattgactacgacagatatagaggctgatgagaggcaccccttaatccaaccaatccatttatcatggaaccccattcttcccatcatataaagcagaaattgccatgacacggagtcgtaagctttttcaaaggccactttatacaccatacaaggcctcttatacctcctagcctcctcaaccacctcattgggcattaaaacaccatggagcagctgtctatcctttacaaatgctgactgcctttcatcgatg

SEQ ID NO: 205826 - DNA, 433 bp, Glycine max
agcttcaagaaaatgatggcctcagcaaattccttatttctggaagcataaccatagaaaaacctagagatagatggtctgaagaggatagaaaacgagtacaatacaacttataagacaaaaacataataacatctgccctaggaatggatgaatatttcagggtttcaaattgtaagagtgctaaggaaatgtgggacactcttcgattaacacatgaaggaactacagatgttaaagatctaggataaatgcactaactcatgagtatgaattatttagaatgaatgcaaatgaaaatattcagagtatgcaaaagagatttacacatatagtaaatcatctagcagccttaggcaaagaatttcaaaatgaggatcttataaacaaggtgttaagatgtttaagtagagaatggcaacccaaagtaacg

SEQ ID NO: 205827 - DNA, 474 bp, Glycine max
  unsure (1)..(474): unsure at all n locations
tgagatgaggaagtgttgaagggtgaaacttcctgcttttattgtttaccacagagtggtacctggagatatgtcgcggnggtcaggagaccttggggacgtcaggtggggtgctattgcccaaaaccaagcttgaccaatcccgacccaacccgggcatagtcggtcagtgagaacctgtgatgtacctaagcaggcgagctcctggcagtcaacagataaaaggaacaaagaccacaaagcaaggaggcttgtggtggctggccagctgtgaaacttgattgatatgtgagatatggtctctggtaatcgattaccaagggtgggtaatcgattacaaggcttaaaaatgaagacagggggctaagatggtctttggtaatcgattaccaggcttgaaaacgaagtcaggaagctaatggagcctctggtaatcgattaccagcctgtgtaatcgattacacagagggatgg

SEQ ID NO: 205828 - DNA, 405 bp, Glycine max
  unsure (1)..(405): unsure at all n locations
agcttgtagaatggctagacatgatacatgttatggttnggttgggttcaaggataaaagggatgccccacattatttccatgacacaaatgcaaaaatgatgaattggaaactttatgcaaaactggtcatgcatgcacctatgtggacactcaagtgtcaaatttttatggtcatgtgatgctaggggtcaggatatatttcctctattttaaatcaacccaacgtttccaaaatatgttcttttatcaatttgtgcattcatccgagtccattttgggtactcgggaaaatttcacagcattcacccttcaggtgtacacacatttttttttcaaaaactagctatgatcagcgaattttcttttcaaagaagaagtggaagtcatcctcttttaaaagcat

SEQ ID NO: 205829 - DNA, 399 bp, Glycine max
  unsure (1)..(399): unsure at all n locations
accaagaaatgcaactcttataacaaaaatggcatacaacctcctccaataaacacaaacatcaatgtaaaattagtgcaaactcatgcacatacttccttatgaacattcactcgcacaagatattcttctacctaagaaaaatgcacccatgcacaatcaaggcaccttcgttacctagattatttatatgtacttccaaggtgtatttgctacctacatcacatgcacttccttggctaaatttacatacatgcatactcaaagcattttggctaccaaaaatcgcacacgtgcacattctggtatttctaatacctatgcatatacannacttgtgatgaatcttggctatctacacaataaggtgctacatttcatgctttattcaagtggttt

SEQ ID NO: 205830 - DNA, 328 bp, Glycine max
ctaaaacctcgccgataaaggaaggagcccaacacttacaaaccttaatcctagctgaacttttttccttaacggagcataccaacctcagagcctgtgcgacacaaagcctgaacccagacttattcctcatacagaacacaatatacgcctcatgacctgcatttaatccggaacaagctgacatcgaacaactcaaagacttacccttacaagttaacagcccacacctacggacagagcctacatatacagctagagaaattccagaagtcgcacggacattgggtcatttacactctagatgcgatcataaaccagagcactc

SEQ ID NO: 205831 - DNA, 201 bp, Glycine max
ggcacttattaatcttatcaggagatactctttaaaagggggggggaccattcgagttaccaattacttctcctaaaaaaaatattaaaaccttaacttttaccaaaatgttaacatttttaagtaagcttaaataacctttttttattccccaatatgttaatataaaaaaccgaatataattataatacccaaaaaata

SEQ ID NO: 205832 - DNA, 100 bp, Glycine max
agctagtaagcatttatcctattttgtagcataataataactctattagataactaacccaacaagatgaggtataaaggaatgttttgtctccccctta

SEQ ID NO: 205833 - DNA, 435 bp, Glycine max
  unsure (1)..(435): unsure at all n locations
ataatgtctctttttattcttgntatcataaaaaaaatggtttagaaaaataaatataccattaatttagatattctggtgttactcatctcatttcgttaacatctctctttgtatgtatatgtggtatacctatgtcctataatttaaacattagtcgtgttagagtgtcatatccgatatccatatcaaagtctctccgtgattcatagatcaagaatataaatgtattgcattcttatgaataaatttagacacaacattaagggattaacaatagtttggtatgcatgaagagaatgaaattcggaaagagaagaagtgtgtcccacgttataagcgtgtttggataaatgtcaaacaccaacggtcaatcatgctttaacaccggacaatctcaccttatgtggtaagcaacttatganaaattcaagt

SEQ ID NO: 205834 - DNA, 416 bp, Glycine max
  unsure (1)..(416): unsure at all n locations
attcgtctgacaagggattatatgtttattaattangctacaacatngaacanaagaggcaaatatgatcatcatgccttgataaaaaaaaaatggggcaaattaagagggtgagaatgagggagaaacccatgttgtgactgccattcctatacaccaagtttcccaccaacccaacaatgccattacttagccaataacaaaccttctccttacccaccacccagttatccacaaaggccatccctaaatcaaccacatagcctatctaccacacttccaatgacgaacaccacctttagcacaaaccanaacaccaatcaaggagggaattttccagaanaaagcctgtagaattcaccccaattctggtgtcctatgctaacttgctccattatctacttgatactgcaatg

SEQ ID NO: 205835 - DNA, 475 bp, Glycine max
  unsure (1)..(475): unsure at all n locations
gctttaaggaagctacctagtctataaatagaagcatttgtaacacttattggtaacttgatgaatgagagtcttgtgagacacaactcanagttcaacttctctccctttttcttccttcaatttcgtgctcccctctctctttctctccctctttcttttccttcattgaagcatcctctccaagcttcttatccaaggctcatcttggtggtgaagctccttcttccatggcttattccttaatggatggcgcctcctctcacctcttttcctttgtcttccgctgcatctccatggtggaaaatcaccattaaaggaccccattgaagctcaaagatccagcctccatagaagccccacaagcaagtttccatcatgggccctcatcaccctctggaaagtcaagagcatccacagcaagctcaggaggtagctcatctgggtcctcctcagggtctttctccgatgacgt

SEQ ID NO: 205836 - DNA, 387 bp, Glycine max
  unsure (1)..(387): unsure at all n locations
atatgggctacgtgggagtacgtgagctcaagtgaggtgggcacaggggatggtgggtntatgcgcgcattgtggatgtggaaaactttgtgtacaccatcgcccgaccgccacctagtaccacatgtgatgggtaccccataatcctacaagcttgagatgaggaagtgttgaagggtgaaacttcctgcttttattgttgaccacagagtggtacctggagatatgtcgcgggggtcaggagaccttggggacgtcaggtgaggtgctattgcccaaaaccaagcttgaccaatcccaacccaacccgggcatagtcggtcagtgagaacctgtgatgtacctaagcaggcgagctcctggcagtcaacagataaaaggaaaaca

SEQ ID NO: 205837 - DNA, 424 bp, Glycine max
  unsure (1)..(424): unsure at all n locations
tcatgagtctgggcttaattgantaccatgtgatatattcgattacttctatttctataagtatttcagaagtgatcaagaacactttaatggactacattgaggatctaatcgattacattgtgcttgagaggtttccagtttttgggatgaacactttaatcgattgataagataatataattaactacttcattgaaataatcgattacattgtatatttaatcgattataggcagntataattgttttctctataaatagtcaccttgtgttctcacttctaagtacaagttcattaagtgtgaaattatatgagctgaaataattgaaagaatagaagaagagtgcttagaaacagtgactcaaaacttctaatctttgattatgaagatattttcataaagtgagttgtcagacattc

SEQ ID NO: 205838 - DNA, 465 bp, Glycine max
  unsure (1)..(465): unsure at all n locations
agcttcttaantgaagtcatagataactcgatattgttatgcaaaaacaacacaaagacaacttatgcttcataatggaaattcctatcccatacatttattgaagaaagtagaaagcatagagcttcttcccactctaagtttcaagattacgactgggttagtttataataaatcaattgcagatgggccaaagtggaaatccttgtcattntcaaatctcactatacaaaaccgagagattaggtatatattatattaagattaaagctaaagcttctttaaccaccataactgtgatatttattggtctagtgcatttaattagcaccgactgcagcatgctggcttagtaagtgtaccactttcgctaaatgaacgtgatcatcgcaaggattgttctataaatatttatatgaacaaaaaagacataaaatgcataatcaaattcttgtaaaattagtt

SEQ ID NO: 205839 - DNA, 387 bp, Glycine max
  unsure (1)..(387): unsure at all n locations
tgtgtcgaaacgaagaatataattaattttttaagaaaggagacgccgtgagaaataatataaaatggaatttgctataagaaaaaaaaggaagagctcgcagaaatatcagttgtagtgcacatgtaatcttagatatttacaaaattcaattctgttactgagggggacacggtaccacctggacatggcncaataggcatttcatatacatctcatttatagacttagatagatatattctataattgttggggatcgattgcattcatgtgatggatactgctggaagtttctttacattgcagaacattttgtacttacttgcgatgtgaataatatatattgtacacccttacctacatttattattctataaggataaat

SEQ ID NO: 205840 - DNA, 426 bp, Glycine max
  unsure (1)..(426): unsure at all n locations
gaccttaagtcacctgcggcatgcaagctntaacctcatcgtctctcacagtctttatatttgtgagccaatccaatccttgtgttcggactctcagccacttatgatagccgccgatgatcccattacttgcttccctaagctctctgtcctttcttcacgccgtatcccatgccttgcgaactccttggagtaccctcacgttgtggtcactgaaaccccatgcgatgaaaggcatgatgctttcctctgatggcacttctctcatggngtagccaagctgttttatggcgaggatgggattataattaatacaaccccttgttcccatcaagagaacatttggacatccttcgcatgaagatagaatcctgattcttccttccttctagcgaggaaaccaattaacagacgcccctccatgct

SEQ ID NO: 205841 - DNA, 467 bp, Glycine max
ttcttaagaaaacttccttgagaagctttcttaagaaaactttcttgagaagcttctttaagaaaacttccttgagaagctagagtttagctacacacacccatctaaaaactaagctcacctccttgagaagcttccttgagaagctagagcttagctacacacccctataatagctaagctcacccccatgacaaaaaaaaacatgaaaatacaaaaaaaatcctactacaaagactacttaaaatgccctgaaatacaaggctaaaaccctatactactagaatggccaaaatacaaggcccaaaagaagaaaacaacctattctactatttacaaagaagagtggacccaaccttggcccatgggctcaaaaatctaccctaaggttcatgagaaccctaaggccttctttatcaactctagcccaatcctcttggagcctcttgctcatggctctgggaact

SEQ ID NO: 205842 - DNA, 327 bp, Glycine max
  unsure (1)..(327): unsure at all n locations
ctttacttatgggagggcgggctttctttattttcttgtctccaatgcgagctctgaccactggtcttccttcccgcgatgcttcttttcatgtccgcctgagtgggcttataacctaaaccatacttcccacgatttccttgggtttttatcaggctagttatgccgccattgtctttgcctaaacccatcccgggttcataaccgttccccaacataactcgggccatcattaccgctgcatcggacagacaaggctgcccaaagagggaatccacggaggaaatgctgaccacctcaaaagactgganagcagtttctaacgat

SEQ ID NO: 205843 - DNA, 447 bp, Glycine max
gctccttctccatggcttattctctagtggatggcgcctcctctcacctcttctcctttgtcttctgctgcatctccatggtggaaaatcaccattagaggacctcattgaagctcaaagatctagcctccatagaagtcccacaagcaagcttccatcaacatcttttttcccatatctactacgcagcttgtagtagacatgaatggccgaccaagaatgagaggaatatatgcatcctcttctatgtctatcacaacaaaatcagttgggaatataaggtgtttcaccttcactaaaacatcttcaatcactccatacggtcttgtgatggatcgatttgccaactaaagggtcatgcgtgtaggcattatctcaagctctccaagtcgccggcacatgaagagaggcattagattgatactagctcccaaatctatgagagct

SEQ ID NO: 205844 - DNA, 320 bp, Glycine max
caatatggtatttatactttggcataaactaaaaattactacacggcgctaattgaaaatgaccttatatgagaaggctactcttgtttacagaactagcatgcataactcgtccgcaaatctttaaggcgtaatgatcactaacttatataaaggaaagctacaataaaaatgtaaaaggaatcaatttgatatgagttaaattcggataaaaaattaatcgaacatttgttttcatatatcaactttccttacatgaaaccataatttctaaatcctaaataacatatatacctcacactaaaatgagattttacatt

SEQ ID NO: 205845 - DNA, 410 bp, Glycine max
  unsure (1)..(410): unsure at all n locations
agcttgatgtttgcgttgaatgctttattgtttaacagaccaaaagcaagaaattaggtgcatatagagctacaaacgtcttggaatntatacatacggacatttgtgggccatttcatacaccttcatggaatggtcaacaatattttatatcattcatagacgattactccagatatgcatacctgtttcttatacatgaaaagtcacaatctctattggactccagatatgcaacaccttatgagctttgggttgggcgaaagcctagtctgaaacattntcatgtatggggatgtccagttgaggcaaggccttataagccaaatgaaaggaaattggactcccgaacaatgagcaactactttattggttattctgaaagatccaagggttataaattntatgat

SEQ ID NO: 205846 - DNA, 442 bp, Glycine max
  unsure (1)..(442): unsure at all n locations
actcatctagcttcgtaagtgtgttatgctctgcanacgncttcatttagcctaatgaatgtttaatgtctttatgacaatcatgttttggatatttggaatatttgcagattgtgttgaaagtttaatggcaactggtatggatttctagcagtttctttaagttgtggtttttcgattttcatccatattctatttggaataactcgaatttgtgtattattgtagcaatgttttgaaggttgacctcgatagctgaaatatatgacaaaaaggaaacttggaagattgctgtttgagtgattaacatgtggaccataccaagatcgcctaagtctattgttgatctaattttagttgacaagaaagtcaggttaattgatttttgtcagatatgttgtatgtattgggtgttgattatcgtttatagcaaatcttttaa

SEQ ID NO: 205847 - DNA, 462 bp, Glycine max
agctcaaacggtgatgatgaggtgtggtctgtttcaactcctacaactgccaagtactgtcccgacgatatacaatctgattcagctcgtggtccagcatcttcctcacaggttactgaagatgataagcctttaccatttattttcgagaactccgaggaagcaatatccatcattataacccctggtgatattcatagcgacgaatgtgatgctcctgatgcacaatatcaaattgttgaaccacctgcagaggatagattggctgagttagttacaatctatgattgcattgttcctttctcttgttttaactctccccctaatttgatttcataacattgagattgctgattctgtaactatacttgatagtgactaattcaagaggatcagccgttgagcgttgacattatttatgacccaacaatcaccaattagacgagcaattgtcttccctgc

SEQ ID NO: 205848 - DNA, 259 bp, Glycine max
caaactaacaactaacactttgtctctgctttccattgctcatgggacattacctacaacactgcattattctcttctcacacttacacctacacctacaccaaccctcccatcatatctaatctagatactacctattcctatctatctgaacagagcacaggagagagagagagatacacaggctcacacacaacacaaaacacaaagggtctgtgtttgttcttctgaaaagtccagctatctccaccacctcact

SEQ ID NO: 205849 - DNA, 466 bp, Glycine max
  unsure (1)..(466): unsure at all n locations
agcttcccatttcgcgcacaatggttcgcctttgacttgagattngcccttngaaactcggacaagggtgaaccgctgacctgaagtgggcgccgcccagaaatgatcacaagcaacaacaccccatagctatacacatcacacttctcagacacttccccaccatagccacactcaggagcaacataacacacagttcccctaatactaggagtactactcacaccaccactctntggaatctccccactagcagaatcaaagctattattcctcctccctctccataactcaccactcaacccatccatccagcaatccatgttcccacgggtgttcctactcctactcttgcccttcctcttatgcatggcatcatcactcatccaccaatcatcaccacaattctcatcatcattactctttacactcccacccctgctctttttcttctncttcttcttct

SEQ ID NO: 205850 - DNA, 399 bp, Glycine max
gtacctccaaattaattaatgtccttaatgaagatagtgatcaaaactcaaaaatcccaactgagataggttcagcatcaggaaaagacatatattcaataaattccaaacactagaaaataccctccaaattatactaccaaagaccaactgcctctgaccttctattataagaaagaggtgaaaataattttaagagtttcaatgcaaacaacatctatgagtggaatatagatgcccaggcggagtataatatcatgaatacactccaacatataaccatggtagccacagcctaccaaacatcccatgaatgttcgaaagaaactattattgatatcttagtggcgggattctccgggcaggtaaaaggttggtgggataattatctcactaatg

SEQ ID NO: 205851 - DNA, 416 bp, Glycine max
  unsure (1)..(416): unsure at all n locations
cctcagagtcacctgcagctgcagctnacattactcctcatgcttgtacctcttcttataaggtncgatttcttcgttctgccacaccattctgatccggagaaccacacatagtgtattgggcaacaatcccatgttcttgaaaaaaatttgcaaatgaacctggtgcttgtccatcctctgtgtatctaccatagtactccccacctctatctgatctcacgatcttaatttgtattccacattgtttctcaacttcagccttaaaaactttaaaggcatctaaagcttcattcttagaatgaagtaagtagagatacatatatcgtgaataatcatctataaaggttatgaagtattccatactatttgcatccatgtctggacaacatatgtctgtgtgtatgatttctaat

SEQ ID NO: 205852 - DNA, 422 bp, Glycine max
  unsure (1)..(422): unsure at all n locations
catataccttggttctcctttatatgaactnggattcagactaaggaatcctatatacaagaaggctgttcgatgtacagatgtggaattattcgaagatcagacaatacatgatattcaacgatctgagaagccaaagcccatagtgagaaacttaaggggggagactcttctaaaagaggcagaacccacttagatgatagaaatcaatcaaatggagcaacctcttcaatagaacaacctgaactaatggagcagagttatacaaatggtgcaaaacaagacttggaggttgagcaaattgatgtaaaaacaacattcttacatggagacttagagggagaaatttatatggagcaactagaaggttttgtagaaccaatgatagaacaatttgtgtgccgcttggagaaaagtcttta

SEQ ID NO: 205853 - DNA, 452 bp, Glycine max
  unsure (1)..(452): unsure at all n locations
agctntgtgacaaaccagtggttggagggcattgttggatggtgaagttaatgtgtgggattcataatcatgaattggccaagtcattagttggacatccatacgctggacgattgactaaagctgaaaagacacttattgctgatatgaccaagtcaatggtgaaaccaagaaacatcctgctaactttgaaggagcacaatgtcagtagttgtaaaaccatcaaacaaatatacaatgcaagaagtgcataccgttcttccattagaggaagtgatactaaaatgcaacatctaatgaagcttattgaacgggatcaatgatcgaggccgtacccgaatcaaatcanataaacattaaaaatacagtatctaggaagtgatcctaggtcgtctcccaatgagcaatggtcaaccaacgttcataatagatagtgataaaatagtaaccaa

SEQ ID NO: 205854 - DNA, 430 bp, Glycine max
  unsure (1)..(430): unsure at all n locations
tgaggaagtgtggaagggtgagacttcctacttttattattgaccacagagtggtacctggagatatgtcgcggnggtcaggagaccttggggacgtcaggtggggtgctattgcccaaaaccaagcttgaccaatcccgacccaacccgggcgtagtcagtcagtgagaacctgtgatgtacctaaacaggcaagctcctggcagtcaaccgataaaagaacaaagaccacaaagcaaggaggcttgtgtggtggctggccagctgtgaatcttgagtgatatataggatatggcctctggtaatcgattaccaagggtgggtaatcgattacaaggcttaaaaacgagatcaggaagctaagagggcttctggtanacgattacaaaggggcgtaatcaattaccaggcttataaatgggactggaat

SEQ ID NO: 205855 - DNA, 395 bp, Glycine max
  unsure (1)..(395): unsure at all n locations
agcttgctctaaattacatggatgttatgttatgtatgttgttgccacttttgttttaagagtaatgtcccactggtaaaactaactttccaaatgtttgctttcgcaggaatggccccgaggaagcttgcctcaaagaggtccaggaaggacaatgcggccgaaggaactatttccgccccggagtacgacagtcaccgctttaggaagcgtgtacaccagcagcgcttcnaagccatcaagggatggtcgtttctccgggagcgacgcgtccagctcagggacgacgagtatactgatttccaggaggaaatagggcgccggcggtgggcaccactggttactcctatggccaagtttgatccaaaaatagtccttgagtattatgccaatgc

SEQ ID NO: 205856 - DNA, 396 bp, Glycine max
aatatattaattctaaattaaatatttaaacaaatactaacatatataaacctgataggagggagatgataagattaagctgactaattaattctaactaaataaacattttaaagtaactccatgcctctctagtgaaaactacaaaaacaagttgcattgagttcaagaaactatcagcaataaatgttagaaaaaaatacattcctcttgaaatgtggatatcttgaagataaaaatcaaagagagtatttcatagtttggaatgaaacaaacagtttccacttaaaagactaaatcctatgcatattcttcttttacatatatgtatagaaaaagcaagctatctaatttgaacctcttgactttttctgttctttattttcttcttctttg

SEQ ID NO: 205857 - DNA, 476 bp, Glycine max
  unsure (1)..(476): unsure at all n locations
gtcacctgcggcatgcaagcttgtaatcgattacacacatacagagatctattctctagcacattntcaaanaatattctcaacagtcacatctttntatgtggttcttgaatggctatcaaaggcctatatatatatgtgacttgagacacgaatttaagaagagtttttggagaacaaaaaggtcttatcctattaaaaagcaaatcgtgttatcctcttacaaattcctcggccaaattacttgtgattcaataaggaattatttgagtgctcaaatngttcagtctatctctttcaagagagatttcttcttttcttcttcttcattctgaaaagggattaagagaccgagggtctcctgttgtgaaagaattctaaacacataggaagggttgtccttgtgtgtntagaactttgaaaaggaatctacaagatagtggaactctcaagcgggttgcttggngactggacgt

SEQ ID NO: 205858 - DNA, 413 bp, Glycine max
agtttccacaatcacaaattgcgcataacccaccattcccttgttgccacctccaacttgagctcacgtacttccacgtagcccatattctttgtttctctcaacaccgggtccccatcaatcactccaagctttcccaacattcaggtaattcatcatccaaattatcacaaactaacataccaagcaaaacagggcaaaggcagaaaactctgcccaaaacacaactcataatcacagcttttcacatacaaataccccagaaacatttccttcgttccaattcgttaaccggtggatcgactctaaaaatatacttggaagtctctagtacataagtctacattatgactgttgggatctgcatgcaaacatccaagaactcattctgcactactctttccacaaccagc

SEQ ID NO: 205859 - DNA, 463 bp, Glycine max
  unsure (1)..(463): unsure at all n locations
tgaggcatgcaagcctcatacaattaatatagaacacaaattttantgtctctttctatcagagcgnngngtncccgtgtcctactacatgaggttcttcatagtcatccacctattcatctgctcccccgaacacaagttcaagatcattacaggatccaaacacaacaacacacagggagggagttatcacattcctagctcatagagaaacaagacaattgaatatacatattatataaatgagacatcacttgcttaaacatagctcacgtaactttaccacttcgttattcaaaattgactgttcaatcattaatcacattacacaagaattccacactttgatcaagatataataacacatcaattatcaagcatatgctacagttatgctaagactcaatcctatatgcagtgtggtaccatattagagaaaaaccaccctcgggcgcttaagagt

SEQ ID NO: 205860 - DNA, 344 bp, Glycine max
ttatatattttggacgtatgtgctatgtgctacctatacccatggttctaaattcatcactaaaataagttgtgataaattatacatataagcatatgataataatattgagatataagcatcatcttactattaaaaaatacactctcaacatcggttatttagaacattctacatcggttctaaaaccaatgttgaaagtgccgatgttgaatgtatcaatgctaacatcggttttggagaaccgatgttaacatatatatgacaacatcggtgctctatatacccgatggttaacacaatgaacaacaacacaaaaaagagtacgcctgacgaacagtgac

SEQ ID NO: 205861 - DNA, 324 bp, Glycine max
  unsure (1)..(324): unsure at all n locations
ccctgcctttttttgggattctttttcgaaaagtacggaaactacgaatttgcgaacgataacttgtttttttacccaatggaatcgaaccttgtggattacatattcatacccttactaattgagacttacggaatgttacggaacctcactaatggtgcaacgacgctcccaattgattaccggagnggcaccgaaccttacggattgtgcataatattatctattgtttttggcacacccctgtatatcacaaacgcctaagagggaggccaacaccttacaggaacaaataaagtcgatgtatcaagaaaggtacccaaa

SEQ ID NO: 205862 - DNA, 468 bp, Glycine max
  unsure (1)..(468): unsure at all n locations
agctngaatcggacctcagtgagaaaagatattatcttcttaatttctcgacagcttccgttgttcattntcgagcgtctctatatgtgatgcgccttaatctaacttccgtgtgaaaagttatgaccatttgaatttctcaagagcttcctttgttcaatattgagcgtctcgatttgtgatttgcctcgaatcgacatccgtgtctaatgttatgaccatttgaaattctaaagagctttcgttgttcaatttcgagcctctcgacatattattgcgcccgaatcgagcatccgtgtgaaaaatcatggccatttgaatttctcaagagtgtccgatgtttaatatcgagcttatcgatatattataagccttgatcggacatctgtgtgaaaatatatgaccatttgaatttatcaagaggtaccggtgttcaatgtcagcctctcgacatattatgcgcccgaa

SEQ ID NO: 205863 - DNA, 399 bp, Glycine max
  unsure (1)..(399): unsure at all n locations
tattctcaacagncacatcttttatgtggttctagaatggctatcacacgcctatatatatgtgacttgagacacgaatttgctaagagatctttggatcccaaaggtcttatcctcttaaaaagcaaaatcgttttatcctcttacacattccttggccaaattactcgtgattcaataaagaattatttgagtgctcaaattgttcaatctatctctttcaagagagatatcttcttttcttcttcttcattctcgaaagggattcagagaccgagggtctcttgttgcgaaagaattctaaacacaaaagaagggttgttcttgtgtgtttagaacttgtaaaaggaatttacaacatagtggaactctcaagcgggttgcttgacgactggacat

SEQ ID NO: 205864 - DNA, 384 bp, Glycine max
  unsure (1)..(384): unsure at all n locations
agctntgncctcagatccctcttgttggactatacttanaccaaacaacattattgtaacaacatatntaaaaccaaaacttaatccgcagatccctcatttaagactaagtttcaattctacttcattcaagttctaaggcaacaatacatttcccaatgttcaagtcacctaaccagacacacaaatggtttatcagaccaagagcatacaaaatttaagcactgaaagaagcattgaatacaagaaacacaatcaattagatattaaagtaattaaatcagctattctttagaaatccccaacaaggttgtttagccagccattacagaagaaaccctaacaataatgagattacaaaacctaggtatctctacaaaagct

SEQ ID NO: 205865 - DNA, 461 bp, Glycine max
  unsure (1)..(461): unsure at all n locations
actcagcttgagccattaaaagagaatgagcatgtgnatggtcaagttaactgttctttgaggacaagtgatcattgtagcttgtcacttgaggacaagtgaactgttctttctttgcttgaggacaagcaaaactgtaaatntgggggagttagttagttgtcttatatgactaacttttgtatagaaaacattttccaaaacttgtataggttccccaatttgtggttattttgtagtgattttgtaaataaaagtttcatggctaaagctgtctctagaatatttcaattgaatttaatgatgaaattgtgcaatttcaggtgaaaaagaggctaagtcatgaagtactaaaagtgacagttgagcttagctcatcagtgggctaagcgcgcatcgaccactaagcgcatcttcaacgtgcttagcatgacagaagaatctggtaggatatcaatatc

SEQ ID NO: 205866 - DNA, 458 bp, Glycine max
  unsure (1)..(458): unsure at all n locations
agcnttgnccgcaaaaagcactgaataccttttttatttccaacgccttaaacggtcctctttgttcttgtcggttaacatggaccattcaaaagcataaaatctacacattactgtactgccttcgcgagaactacgtaggtatgatttcatcttcgatggaggatacgtaggagcaaaagccccgctttcgtcgacctcttgagatggttagaggttcaacgccttatctttctaacccagtaaaatggatcattttaaggtccaacgccttaaatgacccctttccgagtaaaaagaatcacttgatccgccccttttcaaagaactacgcatgtctaattgtcgtatcacaatttgactatacgtatgagcaagggaaacacccttgtcgccacacaaagataaatatacaacgaggcttaaaacgcataatactgtaaaaggaaaataaaaaa

SEQ ID NO: 205867 - DNA, 314 bp, Glycine max
agacatacattaaagaaccacttctctccctctgatattccttcaattacgagctccccccactctctttctctaccatcactcaatacctccattgaagcaaccctccaagcttcttatccaacgctcatcacgcgggagaagctacttcttacatggctaatctcctagaggaagccgcctcctctcacctccattcctatagcttccgctacatccgcacggcggaaaaacaccatcaagggacctcattgaagctcaaagatccagccttccatgaagccccacaagcaagttccaacacgacaccacgt

SEQ ID NO: 205868 - DNA, 433 bp, Glycine max
agcttgctctaaattacattgatttttgttttatgggaggagggggtatgtcatttttgttttaagaatagtatcccactggtaaaactaactttccaaatgtttgccttcgcaggaaatggccccgaggaagcttgcctcatagaggtccaggaaggacaaggcagcagaaggaactagttccgctccggagtatgatagtcaccgctttaggagcgcggtacaccagcagcgcttcgaagccgtcaaggggtggtcgtttctccgggagcgacgcgtccagctcagggacgacgagtatactgatttccaggaggaaatagggcgccggcggtgggcaccactggttactcccatggccaagtttgatccagaaatagtccttgagtgttatgccaatgcttggccaacagaggagggcgtgcgtgacatg

SEQ ID NO: 205869 - DNA, 495 bp, Glycine max
  unsure (1)..(495): unsure at all n locations
cggacctatgaaactcagctntacacggaggtctgattcatgcacatcagatatctattattctcaaaattgaacaatggaagctctcgataaattaaaattgtcataacttttcactcgaatgtcccattcaggcacatcagatatcgagacgctcgaaattgaacaacggaacccctcgagaaattcaaatggtcataacttttcacacggaggtacgattcaggcgcatcatatatcgagacactcgaaattgaacaacgaaatttcacgagaaattcaaatggtcataacttttcacacggaggtccgattcaagcgcatcacatatggagacgttcgaaattgaaccacggaagctcttgagaaataaaaattgtcataacttttcacacggaggtcctattcaggcgcatcatatatcgagatgcttgaaattgaacaacggaagatctcgagaaatcgaaattctcataacttatcactcggatgacc

SEQ ID NO: 205870 - DNA, 365 bp, Glycine max
  unsure (1)..(365): unsure at all n locations
acgacactgatgatatgacagtgtctcacgacggaactgattcttcttctttttccgattcttctatgtgtgtcgggtctaactctttagaactcatgtcatccacctttctttgtgcacattttttattattcatttctttaatttgtactcactacactacaatttaaaacgattgtaatagcttaaaaatattgattcttttactcaattaatncacatactccgtgacctaaactatttgattcttttactacttatacaataagaatatcaccccgctaagtaatctttgctcaataaagaaatctgtttccagatacagataagagagattacctaaaattaacccggttataacaaaa

SEQ ID NO: 205871 - DNA, 414 bp, Glycine max
  unsure (1)..(414): unsure at all n locations
agcnttctccccaattntctataaataaggttataagtgaagngaanaagggttcagccccttaggcacttctctctctttcgaatttgcttggaaaaattgtttccgtgaagaaaatctaagccgaggcgcttccgaaacgtttccgtaatgtttccgtaaggaatttcgcaaaggtttcgaccgttcttcgacgttcttcattcgttcttcatcgttcttcgatcttcaatgggtaagtacctcgaaccaagcttttcgattcattctatgtacccgtggtggtctacattgtgtttcgtggtattttattctcattntctttactttntatacccncttttgacgtgcttaagccattttatttaagtcatttctcgcttaaactaaaaataaaataaatttccaccgatc

SEQ ID NO: 205872 - DNA, 454 bp, Glycine max
  unsure (1)..(454): unsure at all n locations
ttcactctacacctganaaagaggatgagatagttgcacataatatatagcttcctaacaaaaattatcatgtaggtggaccttcttctagtaattctgacttatagcaacctcctatcgctcttccattcccacctagagcaattccaaacaaaaagatggaagaagcggaaaaggagatcttggagaccttcagaaaagtagaggtgaacatacctctgctagatgccatcaagtagattccaagatatgtcaagtttctaaaggagttgtgcacccacaaaaggaagttcaagtgcaatgaaaggattagcatgggcagaaacgtgttagcattgataggtaaatttgttcctcacattcctgagaaatgtaaggacccaggtaccgtctatataccttgcattattgggaacaataaatttgagaatgccatgctagatctacgagcatc

SEQ ID NO: 205873 - DNA, 465 bp, Glycine max
  unsure (1)..(465): unsure at all n locations
agctatatagaacaagatttccaatgttgatttgctactcannnnatnangnactatgttaatggtcaattactgattgaatatatatcatgtgtgtgagcaatgtttatcagccactgctgagtctgatccaacactcttgggatccatcacaccggctaagcgcatatttccattgtctcacagtcaactggatggaataccattcgaagatttatcatccatacaactatcctcaactaggctgggcaaaaagcatatcaagactgaattatcaccatgatccactgttgaaatcgtacaccttccttattttttttgtcaatttgaactaatgtaagcaattatatgattattctgagcacattatcactcatgtgttgtggtgaaatgtgtaacacatggacacaacatctctgggtttgtaatctatttagtgtagtggtcaatattggtatttatatt

SEQ ID NO: 205874 - DNA, 395 bp, Glycine max
  unsure (1)..(395): unsure at all n locations
ctcaccatggatatgcagcggaagacaaatgataagaggtgagaggaggtgctatccactagggaataagccacggaagaaggagctttgccaccaagaatgtgccttggataagaagcttggagaggatgcttcantgcaagacaagaaagagagagagagagagagagaaagagagaggggggagcatgaaattgaaggaggaaaaaggggaaagaagttgaactttgagttgtgtcttacaagactttcattcatcaaagttaccacaagtgttacacatgcttctatttatagcctagatagcttccttaagaaacttccttgagaagcttccttgagaagctagaccttaactacacacacccctcttataactaagctcacctgcttga

SEQ ID NO: 205875 - DNA, 393 bp, Glycine max
  unsure (1)..(393): unsure at all n locations
agctttctgaagtattctggttntccaaactcttgttaactngngctattcatcttttcattctcttctccctttgccaaanagaattcgccaaggactaaccgcctgaattctttttgtgtctctcttctcccttttccaaaagaacaaaggactaaccgcctgaattcttttgtgtctcccttctcctttgtcaaagaattcaaaacgacacagtctgagaattcttttgattcttcccattccctaatacaaaagtgttcaaaggactaaccgcctgagaattcttttgtatccccattcacaaagtatcaaaggtttaacagcctgagatctttgtcttaacacattggagggtacatcctttgtggtacaagtagagggtacatctac

SEQ ID NO: 205876 - DNA, 401 bp, Glycine max
aagagaatattatagaacttttgcttcctcaagagaagcaaattagaaagattaagtggctctcattgtcaagcaccaaaacagttttgatcaaacataaatagtactgtaataaaaaaaccccaaatatgtaaagcacctcacatgcaaggattgagagtggtaccaaacttatggtacccatatatttcttcaacataaatgtgacatccaactaacccaaaccaatgcacttaaattagtcacattaatgcattgacttgagacttcaatctcttacatatatatcaccttttgctcttaaaatgaaaatatcatctcataaccaaaatacgctacgttggtttcgtgccattggtaggccaaagaggaagcaccaaccatccatttcaaacgggctt

SEQ ID NO: 205877 - DNA, 461 bp, Glycine max
  unsure (1)..(461): unsure at all n locations
agctngacatanacccaatcacctacagcatttatatcttgttgntggtgagcatcagcatgtttcttcatagtttgttgtgccctgttcatatgctatttcaattggcacaatgcttcatcacggtctatgagaacggtagcaacaaactcaacttatgtttctccaaccaagaaacaaagcactgtgggaggtggtcgaccatacaacacttcaaaaggggattttccgatggctgaatgggaagaagtgttgtaccaaaattcagcctaagatgaccaagagtaccatttggttagcttgtataatgtgaagcaaagaaaggtctccagacagtgattcacaacttctgtctgcccatcaatttggggtgatagaaggtgatcatacacaaaactgttccctgaagccggaagagttccccgcataacttactcanaaagatggtgttcactaataat

SEQ ID NO: 205878 - DNA, 352 bp, Glycine max
  unsure (1)..(352): unsure at all n locations
atctacccacacccctttattaactaaatttaacctcccttgaaacaattaaggataaaaataacacaacaaatataatcaaacatcaaacataattactaataatatatagatatatatcanggtgttacgacatgtctggcgcggcaataaaggtggcccgtgtgatgttagggcacgaatatgaacccagaaagggcttgtgaaaaaataatgatggcatggccagcttagtggacattaangaaaactgcggaaagnttgggctaggctataagcccacgcggactgatgtgagaagaaacatcgtatatagaatgagcaagggcgcangcccgctactaatgacaca

SEQ ID NO: 205879 - DNA, 435 bp, Glycine max
  unsure (1)..(435): unsure at all n locations
gctaacacagatgatgctgcaaacatagcttctcatttcttgttcagaagcataccaacagttctgttcttcaagaatggagagaaaaaagaaagcataattggcgccgttcccaaatctacactgtccgcaacagtggataaatatgttgaattataaactggaaaaatgataaacaattgcatgcattacagtgctacaattgaaaggatggaatgggagaagtgacaatagtgacattgcaaatttcattctcttcaattcttttccattccttaaatggcaatagatagtgctttgttataagtataaagaccatctttccttctgggatttgacaattataagtaatacttgtactcttatttttcattntgtaaatgttacattggataatcaaacttcattcaatgattgaatgttgattacttcctt

SEQ ID NO: 205880 - DNA, 316 bp, Glycine max
cctccataaagcgacacacaactctcaccgcatatagaatatctggcctagtattggttagataccttaaactctccaccagactcttgaagatcgtggagtctaccatcactccttcatcatactttgataacattaagccaccttccatatgtgtgctcacgggattgcaatcaagcatattaatattcttcaacacttactttgtgtacctttattagagacaaagataccatccttcgtttgcttcacttccattctcaagtaatatgacatgagtcccatatctgtcatatcaaatttacgagacatggac

SEQ ID NO: 205881 - DNA, 334 bp, Glycine max
  unsure (1)..(334): unsure at all n locations
agcttctaaactttatacaagaatgaagctcttatattctttgttaganaagnggcctcagatatcttaagaaggcggggggggntgaattaaaatattacaaactattttcctagataaaaatctatttcactgtgtattcaaagcacaaattcccttaacaatgaacttcttaaatattgattcaaacggaaaaatccgtatattaatattaaacaataattcataaaacagtttaagggaagagacagcgcaaactcagatttatactgggtcgaccacaccgcttgtgcctactttcagtccccaagcaacccgcttgagagttctacta

SEQ ID NO: 205882 - DNA, 364 bp, Glycine max
atgatcacacaaggtgatgacaaaaagctcataggtcaatcaaaggatgagctcaagatgttcaagaagatatccagaacaaattcatgactcaacagggaaagttgaagaacacttccagattctagaagaagaatgaattctagaatcatgattcacggatcaagcttcaagaatcaagatcatgattcaagattcaagaatcaagagaagacttattcaagatacgtatgagaaggatgtttcaaaaaccgagtaccacatggattattcatataacatgtttaccaaagagtctttactctctggttatcgattaccagatttctggaatcgactaccagtcgttgtctcttgataaaat

SEQ ID NO: 205883 - DNA, 444 bp, Glycine max
  unsure (1)..(444): unsure at all n locations
agcttgccacccagctcgccaggttatcgtgttgtcttctccagaagcaacagccttctggaggaatcttctggagggcccaagtgggccaagtatctatttgcacccccatttttactaaatacaccccctgccttttttggtgattcttttttncgtaaagttacggaaacttacgaattttgtaacgatacttgttttctttccgtaatgttacggaaccttgcggatcacataatcatcccctttctgacttacggaatgttacggaacctcactaattgtgcaacgatgcttccatttgatttctggtgtgtcacggaaccttacggattgtgcatcaatattctcttttgatttccggcatgtcccagaacttcacaaatgcctaatgatgggtgccaagcacctcacaaagaccaaaccaaagttgcatgtcatcaa

SEQ ID NO: 205884 - DNA, 416 bp, Glycine max
  unsure (1)..(416): unsure at all n locations
aatgaccatcaatgctgtatatgtacaaatctttttttaataataataagcacaacaaaaaagaaataccttttctgacaaaggttgtataagatgcgtcaaccaagcaaggaaggtgttaagggtttgtccgactaacttggttagttccaaatttgagattaaattgntagcacttatcctttgattgtaatagttttcttccaaactacccttgaatctagatcgttatatatattgtatagctactaatatagttgcttaaatatgaatgattcatccatgattatgtacgtcttttatggttgtttgatgaatccataaacaaagctttaatgaatggcaaaacaatcatttcatataagaatttggcctaaaatttgctcaagctaccatctagctcgcctaggcaaaat

SEQ ID NO: 205885 - DNA, 340 bp, Glycine max
tacgaaattttgttattcaattatttgtgtcctaagacatccgactcaatactttaatagaccccatttaaatataaaaataatgattttcttctaaaattaaaaaaatgttcttctattaattttagatgcaaaatgttcaattaattaattaaattattacaatttttttaattggtaatatagttctgtaaccagatcattctctatatatgaaagagttaaaagcaaattatgatagcattctaaaacggatatcataaatcaatgtgcgtggcacatatagattttggtatttaaactaatcgaaattgcgagttattggttggaattcataaca

SEQ ID NO: 205886 - DNA, 399 bp, Glycine max
  unsure (1)..(399): unsure at all n locations
cctacaatcggaatataanactcactgtcaatggtatgaatcaaacatcttttactgtcaacttataccacctagataggattaaaactcaatctaacctcatttcaagaattaacaaaaatggtttgaattttctacattgtgttacaacattaccataactatttgggggaatggggtgagagctttaagtgttctactatgtattaaagaagagaagcttaccataagacagaaccatgaccgtgtcactgtctattacagttgtaactctgtgagccacatttataactgagcattcagagaattcatgcttaatgacacctttgaaaatggcatctgttgcataatcaatggaagccgttgcttcatctaaaactaaaattctattacttttta

SEQ ID NO: 205887 - DNA, 470 bp, Glycine max
  unsure (1)..(470): unsure at all n locations
agctttaggatagatgattctttatatgatttcttagnctctataaccgagtgattgagtgccctactcattcttccaaataaaagttgaattcaagcacaaggtagttggtgagctaatgcattgcccacacttcaaacttgaaagggtattgcttgaagggggcatgttaaagatataaaactatttatgtgctttcacctatctgcttaggggctcgttgttttaatttgctaactccatttgcatgatttcccatgtgaaaaacacattttccaatgctccaatttctcaaagtaaatttttttcacttcagtcgagaatctgtttgatcttgaatacaaacaggctcttatatgtaagcaaagatttcaaaatttgttgcgatctgtttcttattccaatgattgtttgtaatgatggaattgtggaacgaagttacttggttgntccaatacagatcttgacat

SEQ ID NO: 205888 - DNA, 446 bp, Glycine max
  unsure (1)..(446): unsure at all n locations
attatntcaataaatattaccttctagttcttataaacaaagcagatggtctcgctggccgtgatttgaattctggatggaattgtgcacctacataaaatggatgacttggaagctctaagatccgcacaagaagaatntctaaacatacaaaaaataaatgcagtgtccatgcaggaaacaagtgataaaagaaatgaattatgtgtaacaataatataaagaaagtagaaacacaaaagcaggataacaaatgcaaccacatccaattgaaactgagattctcaaccttggtttccactaagttaatattgctttgcatcgcaacattacccaagctaaaaacttacctccattcattttccactttcatccttcccaacaaactntagtccatcttcttctaaagttccaataacatctggatttacctacataatgtcaat

SEQ ID NO: 205889 - DNA, 401 bp, Glycine max
  unsure (1)..(401): unsure at all n locations
aaggcattgtggaaaagcaataattaatgcaagaatcaacttcaaaataatcttatcatagggaaaaaaattataagagagagttgtatatttaaaacaaatatattaacattttaaaagagaataacacgagtattaagaataggagataggtaacccaactctataatcattaaaagtatgggtacaattntataacatataattataataatggtgtgagtaatttcacacttatataatatcacactcacgtaaccattacgagatatgaaagaaaaaaatgtgctgtaacattacttattcgtcttcaagtgagagatgtacttgaaagtattcttcggaaaaattattataatatcgaactggtttgtatataaatgagaaaatgtgaagctgat

SEQ ID NO: 205890 - DNA, 319 bp, Glycine max
  unsure (1)..(319): unsure at all n locations
agctngctttgctgtccttctctttccgttatatttcctcgggctcgaacgcaaggagcaacccttaccaacccaaacacttctcattcttgagatataataaaattccaattctcattcttgaacctgttacaaagcaggtaactacttctggaagtctttgccttgctagactcttaaattgatagataagattatgggcttactctccattgtattcaaggctttatttagacaatggttcttggatcttgaatatatttgtgttgattgacaaaaatgtctttctgttgaaagtgtatttctaatcccaagaaat

SEQ ID NO: 205891 - DNA, 464 bp, Glycine max
tcactgcctcacgaatgcccaccctggtctatatggttcttgtattaacatgcataatcacatagaaggtggtttctagtataagaaaaaatgttatccaagtaagtgcaattggtttatctggagctacagaggggtggcactgaatcatgcagactgccttctgttatagcgattaattgaagttttctttcatgccctgaacgtgaaatacagtgggtcttataatacttttataatattatgccatgtgagtataatgacaaccttttcatatcctttcagtggtttcggtcatgtcatttaaagttttatttgaaaagaaaatttataaaattgtttttatagagaaggaactatattggaattatacattaatgtgggatattgctcattaccacagacgacatctatggagtttgcatttctaattatatgggtattgaataacgatctatgaatat

SEQ ID NO: 205892 - DNA, 455 bp, Glycine max
  unsure (1)..(455): unsure at all n locations
agcttaggaggatgaagttgtgctgtatgctttcttggngaaattgtgcaaaaagtagaagtcatgaagctagtccaatttacaatgcagtgaataaccctacagttaactatagantttgtagtacttccttgaaaatcacattggttgttttatttagtggttttccttctttatcatgaataagaaatttcaatccagctgtgctctgaactcttgataatgccacataaagttgaccatgactaaaaactgggtgaggaagatataatccaacacattgaagagattagccttgagatttattgattgtcatggcatatgacacaataagtgggaatcgtcttctagtcatcttgaaaggccaaggagtttgagattgtgataatgacattcgtggaatgtaaaccaaatgtcctactttntttccagaaattattcgtgcctcaataaca

SEQ ID NO: 205893 - DNA, 283 bp, Glycine max
cctttgaactgcgaaacgagatttgatcttctaaacctaacttcttacaagcttcattaagatactttctcaatgtcttgcattttttttcttgtttgcatttgtcaagagtgttatttgagtggactaacaaaacttttgaaagcctaactggcttttgccaaccatgacctgaccataaaccacctccttaccattttacaaataaaccatattgcctttgataccttataattgtacatgcccactgatcattttgtaacatataaagatggaggatctt

SEQ ID NO: 205894 - DNA, 438 bp, Glycine max
  unsure (1)..(438): unsure at all n locations
agcttgcaaccattagaagagaatgataatgttatcgaaatcatgactganaatgttagttagtttgtcagattgattgaaaggaattcattgaccgtatcccgatgagagtgtgatccttaaattttgagagaaacggctatcatttagtactgagttttacatgaatatctgaagtatggactgaatgcatgaaattgaggatgatgaaggccatgtttgagctgaatgaattattgattgattgaaccctgagcctatacagtgttatctcctactaccttgacttaggttgtaggagagcatcatccacaggaagtgtggttcanagaaaatttgtcccaaatttgggggaggcattgngtaagaattgaaatggtcaaagtaaatagcatacacacactatagctgtatatacacataatggttctgtatata

SEQ ID NO: 205895 - DNA, 432 bp, Glycine max
  unsure (1)..(432): unsure at all n locations
catgattgaatatgattttgactttgttgaaanaaancgggcacaattgtatgaaggccagagtggttttcgaaatctgcactctatgcagaattctgctgtggaaatgtgcagcagacatttgcattagtgcagaaaaatgcttgtgtatggttagctgtggaaagggtactgcacatggggttctggacatttgatagtagatcccaacggtcaaaatgtaagcttatgtgctagagacttccagtaaaatttttgagtcgatccaacggttaacgacttggaacgaagaaaaggttactaggatatttgtatgtgacaagctgtgattttgggttgtgttttgggcagaagtttctgcctttgcccttgtttgcttggttttgttagtccatgatgattggatgtggaattacttcgatgttgtgggag

SEQ ID NO: 205896 - DNA, 451 bp, Glycine max
agcttggaggcctaggatcttcttcatcaatgtgtttctttgctttttggaagatgaatgacaacggaatggagatggaagagagagaggagacgccacttcaaggagaagatgagtctataagaagctcaccatcataggatgccatggataaaagcttggaggaagaaagagatgaatgaatggagatggagagaagagcacaaaattgtgtgctctaaaagagctctgaaatctaaagtttaattttcaaatgatcaaagttccaaaaaatgcacacacatgacctctatttatagcctaagtgtcacataaaattggagggaaatttaaatttctattcaaatttcacttgaacttgaaattggaattgtggagccaaattttggagccaaaatttcactaattatgattagtgacgtttagctatggttcagcgcactaatcccag

SEQ ID NO: 205897 - DNA, 416 bp, Glycine max
ggacctgaagatatgtcgcgagggtcaggagaccttggggacgtcaggtggggtgctattgcccaaaccaagcttggccaatcccgacccaacccgggcatagtcagccagtgagaacctgtgacgtacctaaacaggcgagctcctgacagtcaaccaataaaagaacaaaagttcacgaagcaaggaggcttgtgtggcggctgaccagctatttatcttgggtgttatatgaaaaataccctctggtaatcgattaccaattgtgtgtaatcgattacagggtctaaaaattgaaacaggacgttcagtagcctctggtaatcgattaccaattgtgtgtaatcgattacacagtgttatatgctactggtaatcgattaccaattgtgtgtaatcgattacacaatgttata

SEQ ID NO: 205898 - DNA, 280 bp, Glycine max
  unsure (1)..(280): unsure at all n locations
gaacagatcgctcctgcatcagaccgttatcatactccaacatcacactttgcatgagtcattgcaacaacatgcatatgagagcaacatacttggcggtagacaaacagcataccctttgattacatgctcgctcatgcgcgatccatgcaattttctctacaaaacataaacaaccagggaagccagacaattcatgatacattcctgggagcatatattcngtaccacgagccaaccatggtgggatcatacacccattgtcagaaaaataccaaaa

SEQ ID NO: 205899 - DNA, 452 bp, Glycine max
  unsure (1)..(452): unsure at all n locations
agtcacctgaggcatgcaagcttcctcggngccattcctgcgaaggcatttatttttaattgttagtttaccagtgggacattactcttaaagcaaaaatggcatataacctcctcccctagatacaaacatcaatgtaaaattagagcaagcttatgcgcatatttccttacaaacgttctcttgcacaagacattctattaaccgaaaaaaatgcacccatatacaatcaaggcagcttcgttacctagattatttacacgtacttccaaggtgtattngttacttacatcacacacatgtgctatggtaaaatctcatacatgcatactcaaagcattttggggtaccaaaaattgcacatgtgcacatcttggtatttctaatacctatacatacacaaacttcatgatgaatcttgactatctacacaataaggtgctacatttcat

SEQ ID NO: 205900 - DNA, 371 bp, Glycine max
  unsure (1)..(371): unsure at all n locations
aacgaaggatgggaagaatttttacccacgcagcttcatgtagttttctctagaagcttcattaagaggcttctatcacactccagatatcttctcaaagatcccaacggttagatcatgtacacgtgtcttttgaagtagcagaccaaatttcaagaagatccaacgtttaacaaaggctgggcagcatttttaccgaggcagcttcatgtagttntctctagaagcttcattaagaggcttcctncagaagcttcctcgtggcttctttgagaagctctctcaagaggcttctttgagaagttagatccttatctatccaaacccctctattaactaaattaacttccttataaataattacggatgaa

SEQ ID NO: 205901 - DNA, 394 bp, Glycine max
agcttgtgcattaaaggccatgcacgtctattccggtatattgaacgctctagaaatattggcaaaaaatttcatatgaagcggcccccacttcaacattcacataggtgagtctgtcaagagtactcttgtagcctaggtactccacttaacataaagtatagatctcattaagaattacgaatttttttttcataactcatcctcttgttacttcaggaatcatgttgctttcacttataacagcatgttcatctcatatcacttcataacttgttattacccatagaacatagttcttgggatctccagtcatataggtcgggttaccatcatgaatgatcatcacagtaagggcaatagtcccattcttttagaagtgttatggactttc

SEQ ID NO: 205902 - DNA, 424 bp, Glycine max
gagctctgaatcactgggcgcctcactttatgttttttataggctagccaagtcatcgctgatgaagaccaaggtctgaacaactttggtatttcaagaaagattcaaaagatcatggctgaacaaccgaataaaaaaagaccagaaatagtctcaaaaggataaagaagaagaatagcttcttgccaaggagcacaagactagaagacatgaacctactgcgtctacttctgaacgtccaccggtagtgaactcagtcgcacaaaggttgaaagacctaagtgagactgatgaagatgatgaaggtttggtgccagtggccaagcaaaagaggaaagtagctgctccatatgcccttacaccaaagaaggccaagaaaactcaactagtctctgaacctcgggcatttgtcatcctttctatt

SEQ ID NO: 205903 - DNA, 367 bp, Glycine max
  unsure (1)..(367): unsure at all n locations
ttgggacttgnaggatttgagttgggcaagattcgatgaagggaagtgtggctttcgaaatctgcactttgtgcagatttttgctgtgaaatngtgcagcagaattttgcacaagtgcagaaaaattctgctgtgatagcttgtgctgtttaaatgttgtattacttggatgttgtggaagcttgggaggattgatggggaccctgtgttgagagaaacatggatatgggctacgtgggagtacgtgagctcagttggaggtgggcaacaggggatggtaggattatgcacgctttgtggatgtggaaaaacttgttgagcaccatcacccgaccgccacctagtaccacatgtgatgggtacccca

SEQ ID NO: 205904 - DNA, 417 bp, Glycine max
  unsure (1)..(417): unsure at all n locations
agtgcttagtgcatctcgccgcttaagcccaacttgtgaaagttcaattctagaatggatatggggcttatctcangacagcgcgcttagcgctgctacaaaaaaaatttcctgagaaggagtggcgcttagtgaatcatctccgctaagcccattgcttgaagttcacttccaatgaagatgttgggcttagtgtagtgatgtgcgcttagctgaactatttagccaactagtcaggggtcttagcacttagcgcgagcaagctcangcttagcgcgggaagacatggtgcttagtgcaagggttgcgcttagcggatggacaactgacaaaaaaattctaattcttttctgtctatctcttcacctaggcttaaaacccccttgttcacaactaaacaagctgaaaaattaatca

SEQ ID NO: 205905 - DNA, 375 bp, Glycine max
  unsure (1)..(375): unsure at all n locations
agaatatacgctattatatgttataatattatatatcgtaactctcttaataaatcataagttgtaaagttaatattattttacggttntagaaatttaaataagttattagataataatattttagagtttagccttttaataagctataagagttaagctattactattttagggtttagtcttttaataagttttaagttacatttgtattttgtgacagatggctagcgaagaatccataataagagataatgttaacgatttcagtgacgatgagctacaatatgatgttcacaaacatgtagaaccaaggaatcaaagtgagtcgtcttcatattttgaaactattaatagccaactttcagaaatcaa

SEQ ID NO: 205906 - DNA, 401 bp, Glycine max
tactttcactattgatactcaacgagtcccaagattctttggttatcttcaatctacataccttgctatactcatttctaaacaaagcacatgtcagagtataacgagcttttgtatttagttccactatagcaaggtttgcatctgtccactctacttctagtatgggaatgagtatgtctccataatcaaccagagtctaaactcaatggacttgatgtacatcttcattttgtccttccagtaaggatagtcctatcttgtgaagcatggtgaccttgtgatggatgctccattaacaataaattgactactgttgttatctgccattacgatcttttcctctagacactattaggtgctcaacccttagaggttgagctctgatataaaattggtaa

SEQ ID NO: 205907 - DNA, 426 bp, Glycine max
  unsure (1)..(426): unsure at all n locations
ncaagcttgtggtgggattcagacttgagttgtgtatctcagccggcaataaatacagctggcgggttgttatgtatatggaacgagaaggtatataaggtggacaggagggtcacgggtaggggcttcatcctgctggagggtctgtggacgcaagacttacagaaaatctccattgtgaatgtttacgcaccatgtgaagctgatggaaagagagctctttgggaatccattaggcaactcaaggatcttcatcctggcggcttgtggtgtatattgngagactttaacagcatcaggcacccctcagagagagtcagtactagtcaaagggagggggaccacaatagcatcactgaatttaatgaattggtgtctgacttacctgtagaagaagtggcatgggtaggcagaataattactttg

SEQ ID NO: 205908 - DNA, 430 bp, Glycine max
  unsure (1)..(430): unsure at all n locations
atgatgataaaaagccctaagaatgatttcaagattcagtcaacaagttcaagatcaagataaaattcaagtttcatgagaagaaatcaagaagattccagaatcaagagaagtttgatttcaagattcaagagaagattgatttcatgattcaagagaagattgatttcaagattcaagagaagaaatcaagaagacttcacaagggaagtattgaaaagatttttcataaaaaaaacatagcacagttttgtttttcaaaagagtttttctcacaattttctaagttaccagagtttttactctctggtaatcgattaccagnttcctgtaatcgattaccagtggcaaagtttgatttcaaaagcttttaactgaatttgcaacgttcaaatcggtttttaaatggtgtaatcgattacaatatatt

SEQ ID NO: 205909 - DNA, 468 bp, Glycine max
  unsure (1)..(468): unsure at all n locations
agcttgngactcttggcaatatctttaaaattattttcttaaanagcngngacttttaaaaaaatcttcagaaacaagtcatttgaataattgtgactttgggaaatgtatttttcgaaatcagtcactggtaatcgattaccattaaggtgtaatcaattacacatcaacaaatgtgactctttattttgaatcttgaaaattaaaacgtttagaagctctagtaatcgattacaagtattgtgtaatcgattacacaagtttaaaatactttaaaactttttaaacataagttataactcttgaaattngaaatcttaacattttaaaacactggtaattgattactaccttctggtaatcaattaccagagagtaaaactctttcgtaatgagtttgtgaaaacttcttgtgctactcaatatttntgaaaaccttcttagtacttatcttgattgagtcttctc

SEQ ID NO: 205910 - DNA, 459 bp, Glycine max
  unsure (1)..(459): unsure at all n locations
ctatggaagctggaatcttgagcttttatgttgttctttaaaggngacattccacaatggagatgctgcggaagacaaaggagaagaggtgagaggaggcgccatccactatggaataagccatggaagaaggagcttcaccacctagatgagccttggataagaagcttggaaggatgcttcaatggaggaaaagacagagggagagaaagagagaggggggagcacgaaattgaaggaagaaaaagggagagaagtttgaactttgagttgtgtctcacaagactctcattcatcanagttacaacaagtgttacacatgcttctatttatagactaggtagcttccttgagaagctctcttgagaaaacttccctgagaagcttctttgagaaaacttccttgagaagctagagcttagctacacacacccctctcataactaagctcaccttctt

SEQ ID NO: 205911 - DNA, 454 bp, Glycine max
  unsure (1)..(454): unsure at all n locations
agcttattgcanaaaagatgcttgacccttttattcagcccccattcccttatttataggagaaaggggaggtggttgtcgcctatagacttcttaggaagattcctgagcgcacccccaattgataagttcacccctccagggttgcatactaattaagtttcctaagcgcacccccaattgattagttcacccctatccagggttgcttaccgattaagtttcttgagcacatcccctaattgattagttcacccccaccttctagagtgttctagatgaactttcttgagcgtaccccccgtgttngacaagttcacccnncattttgttttttttttgctgtttcttttcgaacgtcccagaactttatggattccacgacaatggatattaaacaatttgaagtggcaaatgagcgccatagacaaattaggtatgataattcttgagt

SEQ ID NO: 205912 - DNA, 417 bp, Glycine max
  unsure (1)..(417): unsure at all n locations
atgaactctttgcttccttctgaagatctcaatcttatcgtgtcatgtaacactccaaataaatcacactataatgagagggattcacaggcaatgcaggtgtgggatgtatagttgagtgtgacttgaaagacttaattggcacttgntatacaaacacgatgcatttacttttcggtcgctcatgtaacaccccgaacgaatcacaccaaaatgagagagatttcaaggttgtgcaggtatgcgatgtacaattgagtatgacttaaagtaattaattggtactactaatacaaacaagatgcatatactttgtggtagcttatcacttaagaacttcatagataaacatgtttggcttggagcaactacggcatgagtgactttttgggagggtttctgggaagagtatgagtg

SEQ ID NO: 205913 - DNA, 439 bp, Glycine max
  unsure (1)..(439): unsure at all n locations
agcttctaaactttgtacaagaatgaagctcttataccacttgttagacaggtggcctcagatatcttaagaaggnggggttgaattaagatattccacactgtttcccctaattaaaaatctatttcactttttactcaagttatgaattcccttaatgacaatcttcttaaatattaattcaaatgaagcaacttgaatatgaatataaagcaataataaataaaggagattaagggaagagaaaatgcaaactcagttttatactggttcggccacacccttgtgcctacgtccagtccccaagcaacccgcttgagagttccactatcttgtaaatttcttttacaagttctaaacacacaaggacaatccttcctttgtgtttagagatcctttacaacaagagactcacagtctcttaatcccttagagaatg

SEQ ID NO: 205914 - DNA, 405 bp, Glycine max
tgctataagagtagtgtcccactggtaaaattaactttccaaatgtttgccttcgcaggaatggccccgaggaagcttgcctcatagaggtccaggaaggacaaggcggccgaaggaactagttccgctccggagtacgacagtcaccgctttatgagcgctgtacaccagcagcgcttcgaagccatcaagggatggtcgtttctccgggagcgacgcgtccagctcagggacgacgagtatactgattttcacgaggaaatatggcgccggcgatgggcaccactggttactcctatggccaagtttgatccagaaatagtccttgagttttatgccaatgcttggccaacagaggagggcgtgcgtgacatgagatcctgggttaggggtcagtggatcccg

SEQ ID NO: 205915 - DNA, 397 bp, Glycine max
ttcaaggataaaagggatgccccacattatttccatgacacaaaaatgcgaaaatgatgatttggaaactttatgcaaaactggtcatgcatgcacctatgcggacactcaagtgtcaaatatttatggtcatgtgatgctagggctcaggattcatttcctctattttaatcaacccaatgttccaaaatatgttcttttatcaatttgtgcattcatccgagtccattttgggcgtctgggaaaatcttcacagcattcacccttcaggtgtatacacatttgttcaaaaactagttatgatcagtgaattctttcaaagaaaagaggaagcatttcttttaaaacatgttggtttcagctgacacatattttcgttttccctttttttttttct

SEQ ID NO: 205916 - DNA, 374 bp, Glycine max
aaggctatcgtggcaacacgaattatatctctcagaccagcattcacctttcggatcatcagagctactgatttgaacctgaagcaatacctatcccgcaagggcattgggtataagactccaaatagattgggctaaagatcccatggaacgccttatggttctcatgaaccttagggtagatttctagcccatgggctaaacatgagcccgcttaatctttgtaaaattagaataggcgtttttcttcagttgggccttgtatcttggccatctaatagtaaagggaattaaccttgaatatcgggcattttgagaatccttaggaaataggaccttttattttcgcattccatatatattgtcatgggggg

SEQ ID NO: 205917 - DNA, 456 bp, Glycine max
  unsure (1)..(456): unsure at all n locations
ctgcagctaataattatattggttaaactatctctctcgttttggtaccttaagtttagtgggatattttcttcatttggttttgatgaaaaccccatggatcaatgcatataccacagggttagcgtgagtaaaatatgctttcttgttttatatgtagatgaatatttacttgcagccaatgatcggggtttgctacatgaggtgaaacaatttctctctaagaatttgacatgaangatatgggtgatgcatcttatgtcatcggtattaagattcatagagatagatctcgaggtattttgggtctatcacaggaaacctatattaacaaaattctagagagaattcggatgatagattgttcaccaagtgttgctcccattgttgaaggtgatatgcttatattaaaaccattgttcaaagaatgactttgagagggaacaaatgaaaaca

SEQ ID NO: 205918 - DNA, 409 bp, Glycine max
gtcatttcagaagctacagtggagatcggaataactaacacatcccttgcaattgcttgtagtgttggatactttaactcattcaatttccaccacattaagatatcaaaatctgaacttcttggtaaaattttctcctctaagaaatgatctaactccattttcataggtgagggtctttcccttttctttctctcaatgtatctatcataatcacacaatgtactctttccatcactaaccacatctggtgattcaaaagaactagtagaatcttgatgctttctggcttgatattccgaaaccaaatcataacacaagtttccgatcctattaacttgtaaaaaataatccatggggtaaattgattcaaagtaaactcaagcaactccattttgttatttggatc

SEQ ID NO: 205919 - DNA, 300 bp, Glycine max
ggtataaaactcattcatacacccacaccctgataacatataaatcagtcactgagacacaatcttgttgtccaagcatcaacactgaaataactagaattaaatgacctaaattaaatgaatgaaacataaggcaactcaataactaataactaaattgttcatgatttgcagaaattaaaacagaacagagtttaaacatcctactcattcgatgggtgatctttatataaatccatcgctggagtagctggtgcatactgaataatgggttggaggggatggctctggcatgggata

SEQ ID NO: 205920 - DNA, 363 bp, Glycine max
cctgctaagtaaatgttccgcatatcttaacatgtttcccttgaatgatgataatgctgcacatatatcttaaagaacccaaagcttatcatgacaatgatattgggcttaagacccaatgatattggttccccaagaagtaactctttctcccatgtaacatgaaaagggagatttcagctgagcatccacttgtagcccaacaatccaaaagtattcagtagttgccctcagaatccaaagttcaagaagaatgtcaaatttcaacatttgtaagttttctttcatgagacctattattaggaaaagacaaaggggtccagattagattactgaagcgtcgtgaatacattaagctacaaa

SEQ ID NO: 205921 - DNA, 460 bp, Glycine max
  unsure (1)..(460): unsure at all n locations
tgcaagctntctccacgagtttcttcacaaacattgtttattttgttngatctgagactcggaatcagatattcaattgctcaaattaaacagagagaacagagaatagtggggaatggtatttggccttgtgtgataactgatgttttcacaaagagttgttaattactctaataaggagcatttgattgcagcgtcctactttgttctgtatctgatgatggtttggtagtgacaagagacaaccaagtaagtgtcttttataaggggaaaaaaaccaaaggcaaactgtgtatatttaatactattattctttaaagtatgagatctctcttaagctcttttcacatttattttttcaaatattgaatgcgagttatttcttttggatattatcaatattttctaatttaatatcatcgcaactgaagatttagattattctgtgatatctgaaaga

SEQ ID NO: 205922 - DNA, 419 bp, Glycine max
tcccctagggcccttgaagtgattaaaatgtaaggtaatccattaaaacataacacaaagccaaaagaagccataaaccacatgtaatcgattaaaatgaggcagtaatcgattacaacaaaacacaaagcctaaaaaagctttaagccatacatgtaatcaattaaaacgaaacagtacgtgattacaacaaacaaccttaaaccataacaccatataagcaagtatggtaatcgattaaaacatgaggtaataaattaaaacaaaaagtttcaaaaactgattaccacatagcaacacaatataatcgattaacacgagaaagtaatcgattaaaataatgaagaacacacaataacgaagtaaacatgtattttcaataatattcaccagaaataatatctaagatattaacacaa

SEQ ID NO: 205923 - DNA, 386 bp, Glycine max
  unsure (1)..(386): unsure at all n locations
tcaaggataaaaataaacaaaaatgattaattgcaagattgtttaaaccaatataatatacttacgtccacactttgttaccaacatggcgattaacaaggttgcagcgttttgggatggttatggcaaccttaggatcggctccatacatttttgctgtgttggagagcataacaccacacagacaactagggttctcgccaagtttctcgatctgagcacagcaattcttagtaactttaacattttcatcttttgcggcagagacacaaggaataagctttatcgttttattatctggagtagtagaccttccacattcccctgaccctccactctataatatttgnatgcttacaaaataaagtcaaaatgcaacacctttt

SEQ ID NO: 205924 - DNA, 370 bp, Glycine max
tgaacatttataaaatgaagaaaattgtcttattgataatattttctaaagatattatatgtccaagtgtatccacctaaaatatatttctaaagataatgggttttggagcaagcatttgtataagatatatatcattaattatagattatgtgatgaactttaaaacaatgccatgtatggaacaaatttatacaccactatatcatatggacaagtctatattagagcgcattaacatatctatatttagctatctatctaatatatggaaatgagaggttgaactcttataaccattacatccaaaattaaatttcttggatggtatttgaatcgatctgatctaacatttttgaaaactaaatgc

SEQ ID NO: 205925 - DNA, 429 bp, Glycine max
  unsure (1)..(429): unsure at all n locations
agcttgagcanattcgatctattttactgttcactcggaagnccgattgagtcccgtaatatatcgagacgctcgaaatttaaaaccgaaggcagtagcaaattcgaacgacaataacaattcactcggaagtccgattgagtcccgtcatatatcgagacgctcgaaatttaaaaccgaagctcgtagcaaattcgaacgacaataacaattcaatcggaagtccgattgagtcccgtaatatattgagacgctcgaaatttaaaaccgaagctcgtagcaaattcgaacaacaataacatttcactcggaagtccgattgagttccggtatatatacgagacgcaagaaatgtaaaatcgaagctcgtagcagagtcgaacgacaataacattttagtcagaagtctgaatgagtccagtnatatat

SEQ ID NO: 205926 - DNA, 137 bp, Glycine max
aagttttgtgtcgattgctcaccgttggattgaggttgatttacggctcaagactcaggaatgttgcgtcgattgtcggcttgtaaatgacgtccttatcggctatcgatcgggaagtttgctgattctcactcgtt

SEQ ID NO: 205927 - DNA, 416 bp, Glycine max
  unsure (1)..(416): unsure at all n locations
catgcaagcttccgagaggcaggagaggatgtttatgttttcatggtngnggagagaaggggtggaatggcctctgtatatggcgcgcgacacgcacacatgtaatttattggacaagttcggcgaattgtgaaatgggtttcttgctgtgagtgacggtggtttggacgtggataaaggtgggatttttagttttttaatgattgggaagggtatatgtgaagctgtgctttgctttgatatggaagggttggttgctggctgtttgaggctatcttgtttctcttttgatgagcttggtgggatttgtgttgattcgaatgaagcatagatgctggcaatgaagtttgtgaatgctgtcttcgttgaacactaagaagaagcaatgtgtaacggttgcttgaaaatgatgtttt

SEQ ID NO: 205928 - DNA, 432 bp, Glycine max
gctcttatcctgaatatgacgagagttatttttttcagcttattcccggaagttcaagttagcctacataatgactgaattttctgagttaaaacattacagagcacacgctgacacatctcagtcacaccatggtcaggtgattcactagaacctccattacacatgacatctgcatgcccattagcttacttctctgttctatgaaaaagtggctcacattgcaaagagcattcttggccatctttgtcaattttaaaagttctctgcaaaccaaataagatggaacataaaataaaagagaccaacaatactttaggataagttgagtaagcacgatgtatgtatgtttagctgaagaaccaaccataactgtagtggattgaatatgtttaggataaagaataagtgcttcccttatcacccctctat

SEQ ID NO: 205929 - DNA, 468 bp, Glycine max
  unsure (1)..(468): unsure at all n locations
agctnggagncgttgcaacatgatcatacatttatggtttgtgaacttagnatcgcagtcaatcggtcaaagcatagtgttcttggaaaatgttgttgatgtttggaatgattcgaaggagagattctctcaaggagaccttatcagaatttctgaacttcaacaagagatatatggcctcaggcaaggttccttctctgtcactgaatgttattctgagttaaaaatactgtgggaagaactttaaacatatatgcgtattccatgttgttcctgtaccattaaatgcacctgtgctgcaatgagaaatgccagacattttcatactcttaattatgctataagatttttgactgggttgaatgagaattnttcagtagggaaatctcagatcctactaatggattcactgtctagtatgaacaaatattgttctatggtcattcaacatgaaagacaagggaacta

SEQ ID NO: 205930 - DNA, 438 bp, Glycine max
atatatccccaagagctgagagagtttaatgtgttttacgagcgagtgaaattgctcgtgtcgagagagtgaatatgctacacgtccttgcttgctgctgttcgtgttcttccattctcttaaaaacttgtaacgtatatattgaatattttgtatggtctatttatatagatgcttatattctgatcatggaatggcgttaggtattgcaagttaataactttgtatagattagtttcaattcttaatgttatatgcgagattagacttagtttacaatcttttatatggtaaattaagaatagttttacatactctaagttattaattttatatggcagactaagaatagtttaaagttttatatgatagatcaggtatagccgaaattttctatataatagattaggaatagttttacgtaccataccttattaa

SEQ ID NO: 205931 - DNA, 433 bp, Glycine max
agcttgctctaaatttacatagatgtttgtatttatgggaagaggttatatgccacttttgctttaagagtaacgtcccactggtaaaactaactttccaaatgtttgccttcgcaggaatggccccgaggaagcttgcctcaaagaggtccaggaaggacaaagtggccgaaggaactagttccgccccggagtacgacagtcaccgctttaggagcgttgacaccagcagcgcttcgaagccatcaagggatggtcgtttctccgggagcgacgcgtccagctcagggacgacgagtatactgatttccaggaggaaatagggcgccggcagtgggcaccactggttactcccatggccaagtttgatccagaaatagtccttgagttttatgccaatgcttggccaacagacgagggcgtgcgtgacatg

SEQ ID NO: 205932 - DNA, 411 bp, Glycine max
  unsure (1)..(411): unsure at all n locations
accatggagatgcagcggaagacaaaggaaaagaggtgagaggaggcgccatccactatggaataagccatggaagaaggagcttcaccaccaagatgagccttggataagaagcttggagaggatgcttcaatggaggaaaagaaagagggagagaaagagagaggggggagcacgaagttgaaggaagaaaaagggagagaagttgaactttgagttgtgtctcacaagactttcattcatcaaagttacaacaagtgttacacatgcttctatttatagactangtagcttccttgagaagctttctcgagaaaacatccttgagaagcttctttgagaaaacttccttgagaagctagagcttagctacacacacccctctcataacttagctcacctccttgagaa

SEQ ID NO: 205933 - DNA, 414 bp, Glycine max
  unsure (1)..(414): unsure at all n locations
agcttgngaatcctacaaaaaccattatttttggttttttaaccccattacaagcctagaaagtcattcggattcattttgcatgttcattgctgtatgatatgagatgaaatgcaaagggtgggacttgtgttatttgtttatgatggaatgagcctaaacacttaagcttgagtgaaacaatgactctgaggttttggttgatgatccttccttgaattctgccatcctaactagcttattttagttgtgactctaatacgtgtgttcctatctttgaaaagctgcatgtttgtgaaaagcaatatattgaagctttccatgatattcagttcatatggttgaatttctctatgaagcanacaccatttttgggtgaccactcgtatgtgccactagatgacaactgaactg

SEQ ID NO: 205934 - DNA, 449 bp, Glycine max
  unsure (1)..(449): unsure at all n locations
ctcatgctgggaacgcctctagctcaacacctcgttcagttctaaggcacccacccagagggaagctccccaagttccaactccgaacgcgactcgaccagccggtaatttcaacacgacaagtcaccccgctcccaatgacgtacgaagatcttttaccatccctcatcgccaatcatttggccgtggtaactcccggaagggtcttcgaaccccctttcccgaggtggtatgaccctaatgcaacttgcaagtaccatgggggcgccccggngcattccatcgaaaaatgcttggcccttaaatacaaggtccaacatctaatggatgccggatggctgactttccaagaggatcggcccaatgtgaggaccaacccgctcgccaatcatggagggggggcagataatgcagttgaatccgataggccccacacgtctaaacccgtg

SEQ ID NO: 205935 - DNA, 431 bp, Glycine max
  unsure (1)..(431): unsure at all n locations
agcttggttgaaatgccatgtttggttgaattanacatacccattctgttntacggtttttgtgatgatgtttgtgatgtttatatgctgaaattgctgatagaaatttgttagagacaaagggtagaactaacccaaggttataaagtgagaatgtgatgttatgagtggaaaaagagtgagactttgagagttggaaggctaagtctgaattctgtggtagatggaggttaaagtgagttaatactagcttgaaatgtcatttangacatgtgagaaaggttaggctgagctagagagaaaaacaaatgaccaaagtgaaccaagagccatttctagggcaaaattaggtgttgaagagtcaaattttgatttggtggaactttatgtgtaaattccagttgggcaagttagattgatgtatggacttg

SEQ ID NO: 205936 - DNA, 408 bp, Glycine max
  unsure (1)..(408): unsure at all n locations
gtgtcacgaatgtcacgtgctcatgctataattgttagccgnggctatacgagacatcttgccaaacaaagtcaggttagcaataactcgcctgtgctttttcttccatgctatatgtagcaaagtcattgatccagtcatgtttgatgaaatggaaaatgaggccgcaattatactgtgccagttggagatgtattttccccctgctttctttgacatcatgattcacttgattgtgcatctggtcagagaaatcaaatgttgtggtcctgtttatctacggtggatgtacccggttgagcgatacatgaagatcttaaaaaggtatacaaagaatctatatcgtccagaagcatttattggtgagaggtacattgcagaagaagccattgaattttgttggaatac

SEQ ID NO: 205937 - DNA, 439 bp, Glycine max
  unsure (1)..(439): unsure at all n locations
catgcaagcttagaacaatatacttgtccttcatttatcttgtcttggacttgccggccacgatcaacaaagtactttcgacacctactgtatgttgatttgaccaacgttattatgggtatgttgcgacaatccttcaaaaccttatcgatacattctgagaggttggttgtcatgtgaccatatcgacgtccttctctatcataagccatcatccatttttcctttgaaatgcgatcaatccatgttgctatggctggactcagttgacgaaatttttctaagttttgataaaaaaaaaatgtgcttgcacggagtgtaacctacataaaatttgttaggaacaacaattntaagtatatatgaaacttaaattaacgtgaccatcaaaaatgaaatcttacccaatttcttcagcatttctttttgtttggcatta

SEQ ID NO: 205938 - DNA, 341 bp, Glycine max
tactaccatgccctcctgatttcaacctggaaattggcgagtggaggaacgccccggcatttacacatcgagcattatgttaacctttacgggtttaaaagctctatagttgggcctaagctttagaagttttccttctgttaaagctttgtgtcttttgttcttgaatttataatacaaggatgctttttcatctggtcctaggctgtacccattctcattcattgcatggttatacttttttctgaaacggaagaccgataagagtccctctaagtactaatacctggacccgcttttcacttctctgagaactatttaactgaaatgaaggtcgatga

SEQ ID NO: 205939 - DNA, 442 bp, Glycine max
  unsure (1)..(442): unsure at all n locations
gcttgtaccttcaagggtgtatatgttcctttaatttngctnnagaaagaactgtgcatggtgtatatcgcttcacctttgtatgcagggcatggtttacaaaaagattggacggctcttctagaccatttaattttacagaacttctgcttgtgtcattgtattggtttgctttaattgatcagaggattccttatcttccatctcattgtacagntttatctttctatttctaatacaattctcacaaaaaaaagtaataatattgttaaaatgggagaaaacaaaggaaaattgagtgaaaaccgtatgactgagtacatagtaggtgcatgtttatataggttagttacattaattgtacataaatggaggatattcttgttatctaaatcagagaatatgttcctatanactgcaattattaattgaatcagaatat

SEQ ID NO: 205940 - DNA, 353 bp, Glycine max
atcactactagaaaatctatagtaataacggaggtcatctctagatttataccttaattagacaattattaccaccaacattagtgactaatcaccttattttacgataatcgaatggactaaccaagttaattttattccgttgaaaacagaaaatgagttagtctagccttctactttaataggtggtaaaggaatatccatccattaaagagttatatattactttgactttaattaacaaaaacatgtcctttttcaatgataaaaaatatcattggggcctatgagagaggggagaaatgcgagaactaccgagcaccttgagaaatcatgtgcaattttattctatc

SEQ ID NO: 205941 - DNA, 459 bp, Glycine max
  unsure (1)..(459): unsure at all n locations
ctcgcccaggcgagctaggttgcttcctctataaagcactgccttctatggnngctgtgtgcacccctccccctttttactaaatacaccccttgcctttttttgctaattctttttctgtaacgttagggaaacttacgaattacgtaacgatacttgttttccttccgtaatgttacggaaccttatggattacgtaatcatcccttttttgcctttcagaatgttatggaactttacggattgcgcactaacacttccttttaatttccggcatgtcacggaacttcacggattatgctacaatgctttcttttgactntcggcatgtctcggaacttcacgaattgcctaacgatgggtgtcaagtacctcgaagtggtcaaacgagggtcgcatcccacaaatggatggtccccagacgaaaatanggtatgacactggtgcagtgacttcttt

SEQ ID NO: 205942 - DNA, 404 bp, Glycine max
  unsure (1)..(404): unsure at all n locations
taagcactcctctctctctcgaatttgctgagaaaaattatttccgtgaagaaaatccaagccgaggcgcttctctaacgtttccgtaacgtttccgtgagtaattacgcgaagattctcggccattcttcaagattcatcgntcgttcttcgttttcttcagtcttcaacgggtaagtacctcaaaccaagcttttcaattcattttatgtacccgtggtggtccacatttcgntacatgtatgtgtattctctgtttcatttactttgtatacccccttttgacgtgcttaagccaattatataagtcatttctcgcttaatctaagaataacataaatctccaccgatcgcttgaattgtatcatccgttagttgtggttaaaatgaattctgaccgttcg

SEQ ID NO: 205943 - DNA, 538 bp, Glycine max
  unsure (1)..(538): unsure at all n locations
tctgtcttctcctcttactctctcttctcccccnnctcctccacaagcgccatgattcttccgttccgncactcttanagtcactgcagcatgcaacttttcgatactgtcgacaaacaaactatctgtttgtcngtatatcaaaattacacttctattactgatgtttgtaatgtcataaaataatctaatgcactacttcctagtgtcttactttgtaatgggagaatattacagttgtggacttacccacgagtcaaaacttggtgcaccgatccgttttagcgaatacaactgaaatgaaaaaaataagtttggatctggttaattaatacaacggtgctataaattgatccgtgatgtntcttttctgactggtgcttattcctgatttgtgagagtaattctaatattcatagccacttaattggagagcagtgtatattctgtggtagaaaaaattgcatcggcatgattatgtggtggcaataaaaactaatctgttatgctggcagacaatgagttgattcaggatatg

SEQ ID NO: 205944 - DNA, 335 bp, Glycine max
  unsure (1)..(335): unsure at all n locations
cgtgagctcggtgtttttgaacttacgcggtgagagcattgggtggacgaagactcctactacctcgttctttatttgcaagagcatgggtgctcgcccacgcgagctaacctgtatatcttttttgnggggagggctgtttgtggaggagctctggtgctcaccaacgaggatatgctggaactaccctgcaacataagattccatggcatgttcttatattacggtgggacttcttggctatcgacgaagaccctcgatgactatataattcttggtacgcgtgttcaaagaaagagaacacagggatgacgctacgctcctcacttttggtc

SEQ ID NO: 205945 - DNA, 448 bp, Glycine max
agcttcccaggtttcgtacatgaacatcttatcgtgtatggaactcgatgccacttagtgcaggtatgttgtctaaatcctctgttgaaaacaatgggaacaaccatagggccttcttagtgccaaaaaccttgagaaataaggtaaaatagatgaaaagtcattagttcaatcagagatcacggaattcctattacatgattctttttatgcttattagtactttgcgttcccctattttctcaatttcgtgaatttcatctcaattatttatctatctattgtaaattcgctcctccattattttagttgtctaattttggtctatttgttaatctaatattcattacttattagaaatactgacatgatactctaatggatagacatgttagcatatccatgctgatctgagactctattgcactaacactcagcagtataatta

SEQ ID NO: 205946 - DNA, 453 bp, Glycine max
gggcaagcgagaccaaattgtaataatttttcaacttgttttttacttatggatgaagattaattaatttgatttcagagagggcatagaatgacctacttggtttgctgaagttgtttatcaaattcggcaagcaagaaacgaagaggtctttactgtcaccacataatttggcaagcaagtggtttatcaaatttggtttgttgaagttgtttatcgaatttggcaagcaaaaaataacattttgttatagtgcaaaaatgaagttgttgctgcattgtatatgtcatcattcttgtagttaatgtcaacttctatggtatttaattaaagagatatttaaatatgatattctatgaaaatcccttaaaatatttttacaaactaatataagtagagattaatttactctaagagtgtgtttgaataggataatttaactacgtaatgtat

SEQ ID NO: 205947 - DNA, 428 bp, Glycine max
  unsure (1)..(428): unsure at all n locations
ttaagtcacctgaggcatgcaagctntcagccatttcacacgacaataactgttttctcggatatctgattgagtcccgtaatataacgagacgctcgaaattgaatattgaagctctgaactagttcaaacgacaataactttttactcggatgtctgattgagtcccgtaatatatcgagacgctcgaaattgaatgttgaacctctgagtaaattcaaacgacaataacttttttctcagatgcttgattgagtcccgtaatatatcgagacgctcgaaattgaatgttgaagctctgatccaattcgaacgacaatacctttttactcggatgtctgattgagtcccgtcatatatcgagacgctcgaaattgaatgttgaacctcttatccaattcaaacgacaataactttttactcggatg

SEQ ID NO: 205948 - DNA, 427 bp, Glycine max
  unsure (1)..(427): unsure at all n locations
acattcagtntcgagcgtctcgatatatgacgggacttattcagactttcgattaaaaagntattggcgnttgcgttggctcatagcttcaccattcaatttcgagcgtctcgatatatgacgggactcaatcagacatccgagtaaaaagttattgtcgtttgaattggctcagagcttcaacattcaatttcgagcgtctcgatatatgacgggactcaatcagacatccgagtaaaaagttattgtcgtttgaattggctcagagcttcaacattcaatttcgagcgtctcgatatatgacgggactcaatcagacatccgagtaaaaagttattgtcgtttgaattggctcagagcttcaacattcaatttcgagggtctcgatatattgcgggactcaatcagacatccgagtaaaaaggta

SEQ ID NO: 205949 - DNA, 307 bp, Glycine max
  unsure (1)..(307): unsure at all n locations
cctgcccatgcatgacaaagggtatgcgtctttgggacatgccttgcttanatcagtgtagttgatgcacattcatcattggtgttggcctctttgaccatgatgacgttggtcagctaggtaaaaaacatgatctctctgataaagtttgcatggaggagctattcaacttttttttatgaccttataccgttcttctctcatctttcttttcttctgggataccggnttgacctaggggctgatagtcagtttgtggcacattatgttgggatggattcccagcatgtcagatggctgccaagca

SEQ ID NO: 205950 - DNA, 465 bp, Glycine max
  unsure (1)..(465): unsure at all n locations
ttgagttcctgaatggcacatgatcctccttcttggcttatgcgaatataacatcactcagtgatgataaacttttgttgattgcctggttacagatgaaagagagtttaaactatgtgaaatcaaataagcacaagtgagaataaaagcaccacgactttgcatacttgagtttctttcaaccggtccccggttgatccactctttgaaagccgctcgctaccagctagatcaatgaggttcagaacaccttgtacttgttggtcagtgctctggaagaaagataaaatangttgcattgtgatgcaagtcagtgtgtttgttgaaggttgagatggaaattgaaaactaaacataggacatggttntagttattgtcaaaagagaaacatctttacctcatttacaccgtatattcgaagagtgaatacaaaatgacttcttgatgattgttcattcatctgg

SEQ ID NO: 205951 - DNA, 456 bp, Glycine max
  unsure (1)..(456): unsure at all n locations
agctntnatgagagaagagaatcttattgttaatttcncttaacagaaagattgaattatttttagagactatttaaatggctaatatggtcatatattccataatgagatgcatatgggaggaaaagagataaaaaaaggataaacatattagactatatgatgaaaaaagagataataccaaaggaatgcaaagaaaaaaaataatgcaaaaaagaaatcagaatcctaaacttttaataaaagaaagtgaaattttattttgttcgtgcctgagaatcgaagacaaatcaaatattagaatttataataattcacatattttacttaatcaacagtcaactacaccttcttggttatttgaagaatgtattttttttttactgatgacaaaagcttaatccaacactttaaaaaaagtaaataaaataactaataatcaatggaaaaaataat

SEQ ID NO: 205952 - DNA, 474 bp, Glycine max
  unsure (1)..(474): unsure at all n locations
gaaactacgcttgccaaaattacacaattccttataagttatatcatattccttttttagangnaaataagttattctaaatgcacccttatttgggcacacatcacaattatgacttatgttaaacagttcagaatcatttctattataatcaattatacccaactttaaaacaaataggtacttagagaggatgggaggaaatagaaaggcacgaagtaaaatggaaaggggaaggatggaatggagacaagttgtgcagtagaggttatgcatgagatatcaatatgcccatatgaatgcttttcaattagttcaatttatgggtgaaattaaaatgaaccccttgttatccaccaaattggtagagaagggaacctagtattcttcctcctataaaatcttaagaaaaatcaaaatgagtgtctgttaaagacaacagggtgtaccatgctattgaaaggagtaaaagct

SEQ ID NO: 205953 - DNA, 478 bp, Glycine max
  unsure (1)..(478): unsure at all n locations
ttaagtcacctgaggcatgcaagcttaagaataatggcctcagttaacttcttattcccagaaggaaactcaataaataggcctcctatttttaatggagagggttaccactactggaaaacccgaatgcaaactttctttgaggcaataaatttaaacatttgggaagccatagaagttagaccttatgtacccaccatggtggctggaaatacaacaatagagaaacctatagaagagtggtctgaagaagaaagaacattagtgcagtataattttaaggctaaaaacatcattacctctgccctaggaatggatgaatattttagggtgtcaaattgtaagagtgctaaagatatgtgggacactctacaagttacacatgagggaacaactgatgtcaaaagatctaggataaatactctaactcatgagtatgaaaatattangatgaagacgaatgaaagtatacaagata

SEQ ID NO: 205954 - DNA, 456 bp, Glycine max
  unsure (1)..(456): unsure at all n locations
tgtgcccncttctttgtctcgctcatacgttcttccctttagcatatactggcttttgtttcctaactcatattcttacttgagggttgaagtcctttgttttgcagatccctcctcctatcaaaggcacctctccaagacgacgtgtgaagttcgggaccccactcaaccacatccaccctgatgtgtcacggtttcggttttggtaagaacattggataattaaccattttcgtccgtgaattgtgtataacgctgataaattcatccttaatttgtgttatgtagactctttcattaacggtaacagatagaagttaacggatgaatgaatttgtcacacttttttactttgagggactaatatttgaatttccatcctacaaaaacgaaattgtaacgcttatatattagggatgaattatcagactttattattcaggataaaatgatatt

SEQ ID NO: 205955 - DNA, 418 bp, Glycine max
ttatctcatatctgccgcgtcttctttaatattactcactcttacatctctcacccacacgtaaacaagaacatttcttcattgaatgaagtacaagctggtcaaacattccactttaatgcactgattaacaagaaacgagtagccgagaaatgcatcatcatattctcattagttattggaacataatctcaaattataaaagattcattcatgtctaagaagctccttcgaagtcttttatatgtttacaactcttagactttggtttccaaatgggatgtatgttataacttacatcaattccagatgagcttatcaagaatgccaagtacatagccacacctgggaagggcatctcggcagcagatgagagcactggcaccattgggaagcgcctatcgagcattaacgttga

SEQ ID NO: 205956 - DNA, 468 bp, Glycine max
  unsure (1)..(468): unsure at all n locations
actaagcgtgcacaagcttaatttgtaacaatgacatgtccatatattttagtgttattnttacatactacaataagcacagagaaagatattccatggatatactatctcatagaggtagccaagtaattgtcaaatgggtcaaaagggtgagctaggttcgacttgtccagctagaatatgagttatctatcaacatgccctagaagagaaaatttaacagaataaatccgtagaaggattaaaatatacgacaatttgaattgagagtggggagatctagcaatgagtgaaaagaagacacagatgacatcagatcatggcttgtatacatgtggtccatgccatagcggngatacggcaaaataacgaaactagtcaatatcgtagntcctgttcgtgtacgcatgtgtgtgtgtataatgtaaacatgggtatgaaaagcgtgcttccccacaaacatttcag

SEQ ID NO: 205957 - DNA, 444 bp, Glycine max
  unsure (1)..(444): unsure at all n locations
agcttccatcaacacattngcatgtatgtttaatagtgaattgngaagatgacatttcaagacctcgcattcttgctctctctctctcccacgnaagtttctcctctctctctttattttattttatcaaaatggttgggattaggtggaaaatcccattttcgtaggcccacatgtgtttttctgatgggagttgataatggtccctactaaaattgctattggtccttacaaaactttaaaatttgaggaaaaggccaatttaccctctattcagacactccacccctccttcccccttcttcttactattgcttatgttcttctcaaccccatgttaaatatacaatggaaatacaattctattgtaaacttcngtaaaaanaataatacacaacgcanacatgattttgttgtggtcttagttagacacacaacataatt

SEQ ID NO: 205958 - DNA, 470 bp, Glycine max
  unsure (1)..(470): unsure at all n locations
tgtaggattatggggtacccatcacatgtggtactagtgtgtctgtcgggcgatggtgcacaacaagtgttcccacatccacaatgcgcgcataaacccaccatcccctgttgcccacctccaactgagctcacgtactcccacgtagcccatatcctcgtttctctcaacaccgggtccccatcaatcctcccaagcttccacagcatccaagcaaaacaacattcaaacagcacaagctatcacagccaagcaaaacagagcaaaggcagaaaactctgctcaacacatcaaccaaaatcacagcttttctcacttaaagaccccagtaacaattccttcgatccaattcgttaaccggtggatcgactccaaatttttactggaagtctctagtacataagcctacattngaccgttgggatctactagcanacatncagaactcattctgcactggctctttcaca

SEQ ID NO: 205959 - DNA, 451 bp, Glycine max
agcttatgctgcaaacatttacaacagaccttctcaacctcagcagcaaaatcgaccacaacagaacaattatgacctctccagcaacagatacaatcccacatggaggaatcaccctaatctcagatggtctagccctcaacaacaacaacagcagcctgctccttccttccaaaatgttgcttgcccaagcaaaccatacattcctccaccaatccaacaacagcaacagccccagaaatagcaaacagttgaggcttctctgcaaccttccctcgaagaacttgtgaggcagatgactatgcagaacatgcagtttcaacaagagactagagcctccattcagagcttaactaactagatgggacaattggctacacagttaaatcaacaacagtcctagaattctgacaagctgccttctcaatctgtccagaatcccaaaaatgtg

SEQ ID NO: 205960 - DNA, 386 bp, Glycine max
tcttgaggaagctacatgaatctgtctcggtaaaaacgtcttcccgtattcgttaaccgttggatcgtctcgaagtttggtctgcagcttcacaagacacttttccacaatctgaccattgggatctttgacaagatgtctggagtgagctagaagattccattcctgagagcatttcttatttaagcatttcagtctttgctttcgtgtagcttaggaaaaatgtcatttcttctcgtttctttcttccaaagctatttctaacgtcccaagcactttctccatcacccgcagccaccattagccatcacaaaccatcgttgttctccattgaaaccccacactgagaggaacccttctactgaagcggaatcttccaacctggc

SEQ ID NO: 205961 - DNA, 444 bp, Glycine max
  unsure (1)..(444): unsure at all n locations
agcttgacaaaacccaggcagacacgtctctggttcaaagctctacaaaccanaggttcatccttggtgagcgctttctgttactaagtttcatctccataagaatccaaggtatataaggtctaccattgacgatctgctctgttcttgactgaagatcgtcaagggtaagctccatcttgtctgggcgagcttcccctgcatcaaatggattttctataaatatccatgcaaagggaagggtttaggggctggcaattgaaggaacaaaaggaaaaacgtctggagaaagagaagaagaaaaataaaagcatagccgaggcaccgccgaactgaaccctagatcatgtcctcatcctttctcttgctagccttgcaccctgtgcaacagtcagttagttttcttaagatttgaggtatctatgcaccctatgagtcctctat

SEQ ID NO: 205962 - DNA, 440 bp, Glycine max
  unsure (1)..(440): unsure at all n locations
atacttcatgttaattagaggaagctctacatttctgcatcattacattcttttccaaccttaaatccaaacttgcctctactaccttggccatccaaactagccctaccctagtttccaccataattgttacagatgcttcgacttcccttccctcatgcactgacccgatttatacttccctcaccctacccttattgatccctattacaacccccatctttactatgacctcgtccacaacaatgtctaccatagcattttccaccacaaacatgactagttttgtcccaccaggctttattctcccatgtcatgttctgctaagttttatgccttaactaggacattctcgttatactttcccaaaattcaattatacccctcacttcaaaacctncactagccctaaccctaacccctttcctttaccaaagatg

SEQ ID NO: 205963 - DNA, 464 bp, Glycine max
agctccctctaggcactccatctctactctatcactgattagctgcgccgccatcacgatctacaagaaagaagagaaaggggtagactctttcacaagaatctaactgcgctacacacaatttgtctcataaccactacatgcaagtaaaatgggtattttaaggctttccatctctggtaatcgattacacagccttggtaatcgattaccagaggctaaacttgaattacacagcctcaggacatgaaatatgcaaaaatgcactgtgtaatcgattacacatgcctggtaatcgattaccagtgacccatccctctgtgtaatcgattacacaggctggtaatcgattaccagaggctcccttagcttcctgacttcgttttcaagcctggtaatcgattaccaaagaccatcttagccccctgtcttcatttttaagccttagaaatcgatacccaccc

SEQ ID NO: 205964 - DNA, 470 bp, Glycine max
  unsure (1)..(470): unsure at all n locations
agatgaggaagtgttgaagggtgaaacttcctgctnttattgntgatcacagagtggnacccggagatatgtcgcggnggtcaggagaccttgggaacgtcaggtggggtgctattgcccaaaaccaagcttgaccaatcccgacccaacccgggcatagtcggtcagtgagaacctgtgatgtacctaagcaggcgagctcctggcagtcaacagataaaaggaacaaagaccacaaagcaatgaggcttgtggtggctggccagctgtgaaacttgattgatatgtgagatatggtctctggtaatcgattaccaagggtgggtaatcgattacaaggcttaaaaatgaagacagggggctaagatggtctctggtaatcgattaccaggcttgaaaacgaagtcaggaagctaagggagcctctggtaatcgattaccagcctgtgtaatcgattacacagagggat

SEQ ID NO: 205965 - DNA, 364 bp, Glycine max
  unsure (1)..(364): unsure at all n locations
tgcagcatgcaagctgagccacattgaaagaatcggtatctgttatcaaaatttatcacagncaatcattgctaccacctgctaactttcccacatatgcacagaacaccaaaatcaagttagagatgcgataacaaaacatatatatttggaccaacacaaataacattttcacattcactgtttttgcacatgttacgatatcctagcgatatcctctacgtgaggtggctgtataaaataataaatgaagatggattgtgctgctattttcctataggacttgcgaatcacaacaatttatatgtgtgggaaaagctaaacacattacactctttttgtccgttactagtagctcaatttg

SEQ ID NO: 205966 - DNA, 401 bp, Glycine max
  unsure (1)..(401): unsure at all n locations
tcccatgccaaatttaaactagtgcgtgagtcatatgacccanaagacatgcatgtttctgtgaacccttcttgtgttaataatcttattattatttcttttttaatgacagtgagaaagacagagaaaagggaccagggacagggtacatttgtatttggattttgtattggaatgcttagggctaagatgcttcatgtattccaagaatggttttttgcctagcatgagtcatgtcttgctgaaaaagaaataaagtgcttaactaccagagaaaggaatagcacggcaaaaaaaaggtagagtgtantttttaattatcaaaatatctcacaattcagntttactttctattaaaaaattaatcaaatttggtgagatgaaaagaggataaattaata

SEQ ID NO: 205967 - DNA, 450 bp, Glycine max
  unsure (1)..(450): unsure at all n locations
agcttcttatccaaagctcatcttggaggttattctctntcttccatggcttattccctagaggatggcgcctcccttctcctcttctcctttgtctttcgcagcatctccatggtggaaaatcaccattaaaggacctcattgaagctcaaagatccaacttccatagaagctccacaatcaagcttccatcactatgtattaactagtattctcagtttcctgtgtaatttgtaatttctgttctatttctttgaataaaattcagtccttattcccttaccagttggtatctatcacttttccaatggaatgggctctaaattcaagtttatgaattgtgaagacaactcgtgctttactatgaccataaagtgcatagatgtctttaaatagccatgcaattagagcacttgaccaatcatggcagtggatgatatcttgcccatt

SEQ ID NO: 205968 - DNA, 459 bp, Glycine max
  unsure (1)..(459): unsure at all n locations
gcaaaacaacattcaaaccgcacatgttatcactgtcattcaaaacagagcataggcagaaaactctgtcaaaacaccaaccaaatcacagcttttctcacttaaagatcacagtaacaattcctttgatccaattcgttaaccgttggatcgactccaaaattttactggaagtctatagtgcataagcctacattntgaccgttgggatctactagcaaacatccagaactcattctgtaatactctttccacaaccaaccacacacaagcattntctgcaccaagctaaaatcctgctgcacctattntgacagcaaaattctgcataagtgcagattntgaaaatcacacttccnctcatccaatcttgctcaaatcaaatcctacaagtcccaaatcatgtatcaaacatgtctaaaccaaagccaagcttcaaaccacagcaacatgaaatct

SEQ ID NO: 205969 - DNA, 397 bp, Glycine max
  unsure (1)..(397): unsure at all n locations
agctnttaacttcatatatggctaccgagtatactatatcttatatttcanataaaaaaaaacattatgcagagaaaatggactataatattaataattaatatgtgtaatatatagatatcgcgtgccacgttagaaaatatatgtttaaaaatatcttcatatatgttaactatttacttgagtgtcgataataaaatgttcgtgtataagaattattactcgtgtatacatcaagaaaagtttaaattgaatcaggcaatgtttcccggtaaaagatgctgaagagaatgttttggtattacataagaccaagacacaagaatttctttttcaggttgattctttatcccttttgaaattgcacactcacgtntagttgtatatcgcccttaat

SEQ ID NO: 205970 - DNA, 456 bp, Glycine max
  unsure (1)..(456): unsure at all n locations
aatgttgagttatcaaatggaacatgtaatngtattcttcanagcatctctagcatctcttttgctctgccacttttacataaatgaaatgtcatttttcagaaagagaatatatcaaaggcaacgtgtgcgtctactcattgtgttgttctgtcttgatgattttcttctttcctcattttcaatataaagtaatactgtggccgcatcaaaagttgtgatcttaaccgatgcgaatgtggaccacgagaaactgtcggcaacagtaggttcatcaaaatagtggacaatatttttatacggtggcgcttgacttgattaatntatttaaagggcacaacaactaggatcggattgtatttagattcatatactcttagttgtacgcacctcacttttagggaatngtatactnttttggattgattngtatttgntttctgcacacttaatctt

SEQ ID NO: 205971 - DNA, 403 bp, Glycine max
  unsure (1)..(403): unsure at all n locations
agctnttagaaaccattgtgcttctggttatcaattacttttatctgggaatcgattaccagagaagaaaaactctttggtaaaaggttttgagaaaanatcatgtgctacttagtttttgaaaaaactttttaatacttatcttgattgagtcttctcttgattcttgaatcttgagtcttgaatcttgatcttgattcttggaacttgaatcttgaaactttattcttattcttgaaatcaaatttccttttgaaccttgaagtgttcttgattcaatcttgaactcattctttgattcttgagatcatcatctttgttatcatgaagtgttcttgacttttgagctttttgtcatcatctttgtatcatcaaaactctttaaatcaatcttgagtcatca

SEQ ID NO: 205972 - DNA, 446 bp, Glycine max
  unsure (1)..(446): unsure at all n locations
ntttaacatcgggtaggtaggactttcaacatcaattatttattgatgttgaaagcaccgacgttgaaagtattatagttaacatcggttttcaaaaaccaatgttatcgtaaaattacaacatcggctatttaaataaccgatgttatataataagaattacacggaaaaagtatatatgttcataccaacattggtagttaacatcggttttttaaaaaaccgatattgttattgtaagttaacatcagttttttttataaaaccgatgctgattttaggattatttgtaatatgctgtatgttctttcaataatcccaaaattaacctgcatagtttataagcagaccacacaacatatattttgtattttgttttgaagcaatntgtaccaaaaatttgatgacgaatttattaattactatgaattaacagaatatttaat

SEQ ID NO: 205973 - DNA, 449 bp, Glycine max
  unsure (1)..(449): unsure at all n locations
agctngaagaggatgctttaatggtggattttaaagagagaaggggggaacacgaaattgaaggaataaaagagggagagaagtgaaactttgaagtgtgtctcataagactttcattcatcaaagttacaacaagtgttacacatgcttctatttatagactaggtagcttccttgagaagctttcttgagaaaacttccttgagaagcttctttgagaaaattccttgagaagccagagcttagctacaccacccctctaataactaagctcacctccttaagaagattcctaaagaagctagagcttagctacacacacctctctaatagctaagctcatctccttgagatgagaagctagagctttactacacaccctctacaaaatacatganaatacaaaaaaagtccctactacaaagactactcanaatgccctgaaatac

SEQ ID NO: 205974 - DNA, 457 bp, Glycine max
  unsure (1)..(457): unsure at all n locations
atagaatgaacaagtagctagccagttgtggttttttttctcaacctctatgatttacttctccttaattntgtcagtctactccataggcaagagaatcatgcctttattgtaattaaagtttccaacactctaagttaattgaagtcttattaataggttttcatattgatcttatatcccatacccttaataattcatcacagttgatatattatggactttagaatgtcatattgggagcaaggtcttgaccgcaaatcctaattaataactagataatttagaagttgtggatcaacgagtacatcaataaaagaaaatcatatccaacagtatgtttctacctacctacttttcttgtagagaaaccaaatcttagtgctatattaaaaaacaatagtcgtgcgctaacaaaactcttagtataggtaaccgaaattgttgtaagatcaaa

SEQ ID NO: 205975 - DNA, 438 bp, Glycine max
ggaccttaagcgacgcagctgcagctgaagaggtaaccacatctttttagagaaactggaagggtcactatcatgtacattttttctcgcattgaaggccacttgagctgccaggtctctccacctttgggcgtattctttgaaagatttgtgcccctttttgcacatgttctgttgttgcatcctatccggaaccatatcaaaattgtactgatactgcctaacgaaggcaaccattaagtccttccaagagtggactcgagaaggttccaggttagtgtaccatgtaacagctaccccagtaagaatttcttggaaggaatgtatcagcaattcctcatcttgtgcgtgtgcccccatcttctgaaatacatctttagatggttcttggagcaagtaatcccttgtacttgtcaagtccagcaccttgaacttggg

SEQ ID NO: 205976 - DNA, 461 bp, Glycine max
  unsure (1)..(461): unsure at all n locations
tttaactgatnttgcaacgttccaattgacttttaaangttgttatttattacaatatattggtaatcgattaccagtgtatttgaacgttgaaattcaaattcaattgggaagagtcacatcttttcacaaaatgctttgtgtaatcgattacatggttttggtaatcgattaccagtgacaagttttgaataaaaagtcaagagatgtaactcttccaatggttttcaggtttttctcaaggttataactcttccaatgattntcttgactagacatgaagagtctataaaagcaagaccttgacttgcatttctataacttttacacacaacttttgaacatctttttgaacttcttcttcttctttttcctttgccaaaaactttctaagttttctggtttccaaaccttgttcttttacagaaaacanaagtgtgctatatcttttcattctcttc

SEQ ID NO: 205977 - DNA, 401 bp, Glycine max
agcttaagctattaggagaaggtttatgtttaatttttatctctaacatggctccccaaacaagagccctctgggcttgaagcataaacaatgcacaggcccacctttcaatgtgttgaaattccacttttagaaaaatgggtccggccatgatttaattcttggccacttagttatacaatgttaagaaccgaccattctaagtgaaggctcctgaatggttcttttatataaactatttaactaaagcattttctctttaggagctgataggaacttttggtaattaataagatagttgtatgaactcttatctgcaatacacatgacatggacatgtctgactcgtggtaaaaatatataaaatgtgggttggtggtggagactgaagaaataagggc

SEQ ID NO: 205978 - DNA, 470 bp, Glycine max
  unsure (1)..(470): unsure at all n locations
tcagaagcctaataaatggctncagagtctttntcctttttatttctatngnnnaanccgngcggtgcgatgttttgggtatgcaccaattaaatcatgtaatttgctggttcctctaacatgctatggcttgccatctaggaagctggaattgatgtgcgcctttgtgacattggtgccgcaattcaagaggtcatggaatcttatgaagttgagattaacgggaaggtgtatcaaggtatgaagcttgtagggatggttgtgcttattttttgtgatcattctatttggattatatatttctcaatctatattgcatgcattgaattgtaagaatggaaacaaatttaaaatttacatttcagtattatctaatgaaggctccttgatcaacgcccttttgtcgagggtttgtgcttgatatttcctaatgtcacagacaaacataataaatcatctagtaaattttg

SEQ ID NO: 205979 - DNA, 352 bp, Glycine max
cttaaagtcacctgcggcatgcaacattgcttcactatatattcactttatactcattgacagccaataaccccaaactgatcatgcacatgtctcttaaaccgtgggggagacacatgaaattccccaccaccatctagccgacgtttagccttgcctaggatatgccattgaagggcaagcaattgagggtatacccctgcaaaacactttggagggccctcattatcacccataactacacctcttgtattccccaacaagtaaaaaccctcatgctatggcagaaatgggaaagttggatcatctagacgaaaggcttaaggccatcgaaagacgtgaagattatgcc

SEQ ID NO: 205980 - DNA, 390 bp, Glycine max
  unsure (1)..(390): unsure at all n locations
accaaacactctcaaaaacaaaagaagacccacacccaggagataagaaaagaaaagaacctttgggccacatccaaacgggcccatagtcttttgcttttattcacatgactcctttgttatgtagcaacttgcactatttcccttttattggggtcattgatgagactttcctagttctctttcttttaaaatcacatcactgtgtggtttataaatgatcatttttttgcttacttatgtgtgatagatatttattatttgcggtctaatttgttntagatgatagataaaggctggttactttggaatccactctgttgccttaacattttctagagtactatatcactcagacgtggttttttcacatttaaaatctcatatact

SEQ ID NO: 205981 - DNA, 398 bp, Glycine max
  unsure (1)..(398): unsure at all n locations
caagatttgtttttatacatctgtttcagagtcaggacattgctgaagtntatgtttaagccacaaaggtgtaaaaggctgagtcattgccacattgatgttgaagatgaatagtttatttcattgtcttggttgcacaaataaaagctaggtagggtatcacatatattgtctgaagtattaggtttggactattgggccaagggatccttggcaaagtgattagaagtgagacattgtttcaacatgggaagggaactactgcataattctgttctcggaacttanaggaaaactcagttatttatgtcaatgatggaataatgtataattttttttactaaaccaagagttgtgtcctaactctatataaatcaaatcactaacttcagagtcat

SEQ ID NO: 205982 - DNA, 451 bp, Glycine max
  unsure (1)..(451): unsure at all n locations
ntaaagagaaaagcacatgacacatcagaactttgttaatttgtatnactcagtaagggcgtggcacaaccagaggagtgggaattggacacccaaaatgaccaaaaaaccattaaaagggacaattgtctaattttcaagcatgagcacaccagtaattttcctatacttctcttttataatataggatatagatagattacttttttatacttatagaagcattcgagtaacacacgtgaataggacatatataacattactttaatataatcttccttttgctgtgccaaaaaaagaagttaatttgcgattcgattgattatgaaattgtgatcgaagatatcactttatttcaatataaacctattaatgggagggaaattattcggatgccaaagtcaaatagaagttgtgtacgttttttgaattaaaatatacttagagtata

SEQ ID NO: 205983 - DNA, 84 bp, Glycine max
tttatgaagatgcttgtgatgttcatgtactgaaattgcttatggaaaactgttagagatgacaagtacaagttacctacggtt

SEQ ID NO: 205984 - DNA, 368 bp, Glycine max
  unsure (1)..(368): unsure at all n locations
tctgttgttcaatttcgagcgtctcgatatatnaagcgctctgaatctgttatccgtttgaaagggtatgaccatttcaatttctcgagagcttccgttgttcaatttcgagcgtctcaatatgtgatgttcctgaatcggacctccgtgtgataacttatgaccatttgaatttctcgagagcttccgttgttcaatttcgagcatctcaatatatgatgtgcctgaatcggacatccgagtgaaaagttatgacaatttcaatttctcaagagcttccgtggttcaatttcgggcgtctccatatgtgatgtgcttgaatcggacatccgagtggaaagttataacaattttaatttctcaagagc

SEQ ID NO: 205985 - DNA, 417 bp, Glycine max
  unsure (1)..(417): unsure at all n locations
agcttcccattccagagtcaaaggtctcttattgttttgctacagagacagctntaccaatggtagtataagggttggagttctttgccttcagagaatctagtgtatctacaaagttctgcgcacgatgcacctgttgaagggtgaaaaagctggtgttcaggccatcaaagataatgcaattatcaatgattataaaaatggtaagttcatcactcaccatgcacaaaaatttaagtaaaaagtacattatttcactcaatgctagagggggggggttgttctacttactctctttcttcccttccgcattcatactttttcttttctctttggagactttcatattataatactaagtctttcttctctatggtatttagtgtgtctgtttcaaattttttttctttttacacc

SEQ ID NO: 205986 - DNA, 459 bp, Glycine max
acacatcgtacacgtctatgatatccactcgacttttgttgaatattaggataccttcaatcctataacgtaacgtggcagacaaaattgggcagttaactagaatgatcattattgtcaatgcggaaagtattctacacttcactatccatgttcacacattattgcagcttgtggttacgtgagcatgaactacttccaatatatatatgctgtttacacaaatgagcacatcttaaaagcttactccgcacaatgggggcctcttgggaatgaagcggcaattcatccttctgatgactcatggacacttatccctgtataattcatgtgaaaggtcagtccaaattaacaacgataaggaataagatatattggctcgaaccatctgagcatcgactaaaatatattatatgtggaacacgaaggcacaacatgcgttgatgtccaatgcaatct

SEQ ID NO: 205987 - DNA, 462 bp, Glycine max
  unsure (1)..(462): unsure at all n locations
agcttctgcatgtttagagatntctagagtatagatggtccaagttccagagatttttgagagcttctgctgtgcgaagactggcagagaattgagcttgaagaggaagccatcctgagagcatgagatgagtctgtgagtgattgcgaggttctataggtggaggagacatccccactacttgtatttcttcaatccttcatttttctcttctctttgttggaaaggaagcttcccagatatggagagctaaatcttctgttggttcttccttgtaggtacttgatgtaaatacctttatatctatttaatgatgttttatgtgttctctgtgctatcagtatgtcattttagtatgctttttcctagatcacgtagatgcatgctttgttaggatcattcaatagtgggaactggtctaattcttagaacttgataggacagagctagtttatcgtatta

SEQ ID NO: 205988 - DNA, 460 bp, Glycine max
atgccttaatcatttccaaatatgcatttgaattattacgcattaacaagaatcaagccaaggctattgtgcaagcaatcaatggggcaaaacacaccaaatgattataatgatggatggctcaaattctcacaaaggtaaaatcatcactttcaaattgagctttcaaaactatcatgacatgtagagaagaatcaaggatttcaagtcacaaaatgtcaagaacttttattttcaaaacaattacccatttcttgaacatatcctataattcaaagaaaaacatgcaaagtcgtacgtgcacacaaaattgacccaaaatattatactaaaaatccgacgaaactaacaacattaacaaattaacacaactaacaaattaacaaaaccatcaaaactagcaaaaccaaagaacactcccccccatacttaaacaacacattgtcctcaatgtagcaca

SEQ ID NO: 205989 - DNA, 459 bp, Glycine max
  unsure (1)..(459): unsure at all n locations
agcttagcatacaatgatatttcacaaagtctgactttgcancacantttgaaggaaaaaggaggcattgtgtcttttgaagggagccaacaatggagacacattctgaagcaaaacatccactttgagggatcttcttctttcatttcctttgtttcatctcttgttttgagtttctaatgactatgagaggctaacttacccattgttgaggcttgaataccaaaaactctgtgatgtaatgatctttactatcaatttaatgttatttcaatattattgcgtcctttctacatttattgctntgtttaatagttgatcacccatttacatgtatgttataggattntaatcatttgaaaatgttcttactctagggaaggaacttataggtaacccatgtttaggaatggaatggtattatttagccttatctatacatctttattcttaaagcaa

SEQ ID NO: 205990 - DNA, 471 bp, Glycine max
  unsure (1)..(471): unsure at all n locations
ttcttcttgactntgctcagatgaacagtatattgtttctgtcaaattctnggaaatcaaatcctcagacaatcctgtgctcacatggcctattctctctccaagtgcaagtagttcctggtcgagcaaagcatccaaataattaaccagatttgatagtgcatgatgttaatttttaacacacacaaataataattacctcataactcatgttgtctatgtccatcctcatgtctctatgtcgatcaagcatattcctaggtccatacagtgaagtgcgatcaacaatcatgaaaccctgaaagaacgataaaaccaaatttgagtcatataccccaataaaagaacaaaatttgatttattggaattaaatccagaaactactgtattgctaatattaagttaataactagtccacttcacgaaggatatattggaaccaacgtgcctataaaagttgctagctataca

SEQ ID NO: 205991 - DNA, 438 bp, Glycine max
  unsure (1)..(438): unsure at all n locations
agctgtggaactctgactggaggaggtcttattgtttctattgttactctcttaggaagnccgcacgataatactctccctgagagtggaggttcactcagtatgctacttcataatgccaacagtatctttagcattggagagacgtctagtccctttggtaccagtgacaactctgcatgcgccactaatgtcatttcaagggggtgctggggagaacgatatggcttatgggtcctaggacatattatgcatgaagagcaatagcagcctgagaagtaatagtagtttgagtcatgggaatgctgttgatgctcctaaaaataccaacattggtggaggttggcagttggtttataaatcagctgatggtgctgggggtgggaaaagagaacgacttcatagtgttatttcacgcagatactgctgtactttctc

SEQ ID NO: 205992 - DNA, 473 bp, Glycine max
  unsure (1)..(473): unsure at all n locations
gataggaagatgccttgaattgaacagcttttctattgngctgcttataagccncgggttattgcatcgntctcattggtacctccgcatctaaaaagttccatcttggataatattttgctttgaagattttagccacgaaataaaataaaattgacagaaaatatctaaattaaatttatttggtagataaaattttttaaaatgtgagacctacattaaaatttaaaaaatttcacacaatttcatccaatcaaacgtacatgcacactcaaattctacacaattctcttccttttttcttttttctattctaacctaacaaatgggacatgttggatatagggtttgggttggaaatgaggttccaaccttgcttccccaaaagagtgagcttatagccaanaatactctgaaaccccatgcctccatgatctntatcaacaactaacttatcgcaggacatccaatgg

SEQ ID NO: 205993 - DNA, 369 bp, Glycine max
  unsure (1)..(369): unsure at all n locations
atccttaagtcacctcggctgcagctcagggagagtggaattctctggtctttaacattntgcaacaccgaaggagaagatgaatcccaatttgcatgcacggtgtggtctatgttgttgttgttgatgattcccacatgggtttggcttcctccaccacctcctactaacgagtacaaaaagtctttgttgttgcaaccgtaaatgaatggatcttgtgggaaaaccacggtctctagggccatagttttttttttttttctcgcacttgtcggataaagttggaaaatttttcaagtggaaaagtgggagtgtagctctcaagggagaccccactttttttgttccaagaggagcatgcagagatga

SEQ ID NO: 205994 - DNA, 464 bp, Glycine max
  unsure (1)..(464): unsure at all n locations
tcaagctgggctaagntcttcgataattaggacgaatttatggnntttgcttggatgcangnangcatgattatgccaaagtacggagaaaacatggngaagntaagtccaaaatgttggagttaagggtaaacacgccatttggtaaggactatggtttcatatgtacctgtatcacgggttctaccaagttcccaaagtcattgaccacttccggatattgtcggattacgggactactcccggtctaacaacgtccataggaaagcctcgtttgagtgtagtatcgcgtgtcaactaattcaagactactcttgattagccaccgcactacgtcctaaaaggctaagatgggttaaaggtaactaagggtcctcaacttcataggtcgcttggaaatatcaatgctgaacacgactactcatgccaacatagtaatattcccaagatccctccattgagcg

SEQ ID NO: 205995 - DNA, 459 bp, Glycine max
  unsure (1)..(459): unsure at all n locations
agcttgtcgatgggtaggcttcattacgtctccgttctcccttaacctcacccacccctccaccttccatttatctagatctcctacctccattgttgccgactcatagaattccaacattccttattgtccgtacaatttcttaaatcaaaaaggttttcaaaaaagtaaatgtttttatatcataatttcttttcgcatcccttttttaagcactccccactttttgtttgtcaaattttatttcaatcatgtccttgtacacatgattatttcgaaactattttacatactattggaaatgaatttttggaagggttacacattcccaaaaattataatttagaagtagttaatttttttatcattttcgaaaactaaattctggaagtgataaccttagtcacctcccacacactatgggatccttctcttttcatctntttatgttccacgtaa

SEQ ID NO: 205996 - DNA, 453 bp, Glycine max
  unsure (1)..(453): unsure at all n locations
ctgcatcagacaaagacgatagcaaatcctttccaggatatgttttcactntaaatggtggtgcagtaagttggaaaagttctaagcaagccacgatagcagattcaactattgaagcagaatatataacggcaagtgaaaccactaaagaagatgtttggatgaaaaagttcatatttgaacttggtgtggttccttcaatagaagagtcagtcccattattgtgcgacaataatggggctattgcttaagcaaaggagccaagatcacaccagaagtccaaacatattttgcaaaggtatcacttgattagagagataatagaacgaggtgacgttaagattgaaaaggtagatggaaaggagaatgcagcagatcccttcaccaaggcgcttggcatatgtcgcaacctacccttcgacgggagggcgacgcgtgactcgcgggatgcgt

SEQ ID NO: 205997 - DNA, 389 bp, Glycine max
  unsure (1)..(389): unsure at all n locations
ttatcttgggccaagatatgagcattgggccaacttctacaattgcttgttagcatttcatttntaatgtattgcagagggggtatgatatgatattttttcatgatatcatatttgaaggatatatatgggaattatttaaagctaattatgtcatgttggataactggatttttaaatgtagttttttttgtgtaaaataagaatgatattggtttgaacgaatgcagtatatgcagcatgatgtgctacatgtggacgattggcatgaacgattttttaaaaatattgtttaaagcataattattatataagcagtagcatatgaatgctagatatttcatcattgaacttcaacaatttaaatttctatatttcacagagaaata

SEQ ID NO: 205998 - DNA, 474 bp, Glycine max
  unsure (1)..(474): unsure at all n locations
gacacaagaaactaagcttagtagaacttcttgaaacttatagaatatatttatattttanatacatcatcgatgccacatttaatttccctaacagctatggtttcataccttcaattgatacttttcctgtgtaaaagaccaaagaccctgaaatgatgacatttcagatgttaaaaaagcttttntatcgataaacaaaaggctaaaagttgtgtatcagtagttggctccagatgatttgaacagaaaaaagaccaacaattttggacatcgctaatagagattagagggtctattgatattgtttagatgctaaaacaacatcagaacaatacatcaaactgacaatataatgtgtagattgaaacaaagctctaggaaatgtacatgaaacatttatttaaaaagtaagaaagaattatgtaatgggatatgtgcttttgaacatacatacanttttatacctcatcg

SEQ ID NO: 205999 - DNA, 448 bp, Glycine max
  unsure (1)..(448): unsure at all n locations
agctntgatgatgtcgaaaagaattcacttgtttgtcatcatcaaaaagagggagaatgtgaatgtatgtatacatgattttgatgatgccaaagaagaatcaaacaaggctgcttcaaatgataagcatttgcttcaagaataattcaagattgcttcaacaaacaaagccttgtttcaagattcactaaagaccaagtcttgccttaaaacaaagtgctttcaagacatgcaaggctctggtaatcgattaccagaagacagggttgagaaatagctgttgaaaaaggttttgaatttgaattttcaacatgtaatcgattaccatatgtctgtaatcgattaccagcaacggaactttggaaattaaattcaaaagtcataacccttcaaattataactgtgtaatcgattacacaaacattngtatcgattaccagtggaaagt

SEQ ID NO: 206000 - DNA, 464 bp, Glycine max
  unsure (1)..(464): unsure at all n locations
gggagccattgtttctacacctcatttcgtattgtaatttccatatccacaggggaaatcatcattgtcaaagataatcagaccaatgctcgtgactgttatgtaaaaagttgcaagatagaactgaacaataaggtgaaatagaagaaaaacaacaaggcaccaatcttcaatatcaatgttgtcgtcactacattgcaggatcctgatccttgattaggttttgaagatcggtgaccaaccccaattgagtacattgagcctatccaaattggcagggacttcaatgtactaatattaacaagcaaatagaggattcaatagtgccgacttgtttgcttggagcgcatccaacatgccaaggataggtcccaattttatttgccacaaacttgctattttcccttaagccaaacctatagcttagagaanatgcaagctcgtagaataaaggagaaaaacta

SEQ ID NO: 206001 - DNA, 421 bp, Glycine max
  unsure (1)..(421): unsure at all n locations
agctagagtgataagcgtatgatnatttgtttccctacagggtcaggctgagtaagggtaacacgtacttctttcttgcctaaattaacgttgtactgtatcaattccttagacatgaatatctcccaattggaaacaagtttattcaaaatgtaaagattacctcgtagctccttaaatcaacaatcttttttcacactcaatcattcgttcaacaaatgtaaactcggagacttgtaaaatgtacaacttattctatcctattacgaaaaaggagagcttatctcgatggaaaataaaatgaaattctaaaacaatattatctttcatttatagaaatgtaatcgtaactttagacatacaatgagaaattaaaatattattatctttacttaaataaatcaaataaaggtaatgcata

SEQ ID NO: 206002 - DNA, 436 bp, Glycine max
  unsure (1)..(436): unsure at all n locations
tctcttaaatcaaggacatctcttatgcatgttatcanttcatcaccgacaacaatgattcgaaatctagatttccaaacatacaaaaaaaaaatgtaataaaacttgaaaatgtttcattctgttttagtcacttattgcgtctttaaaatattgcatttggaaaaaaaaatagagagagtagatctccaataattgtagtaacttgacattgaaagtacggcaatttgacaatagaacataaaatgaagccatccccctacgtttgccaagaaaattccaaatatgagaaaaaaggagattcacttgggcaaatagttccaaaaataccagttccttgaacagcttctgatttccatgacatatgggttgctccagcaacataatagttgccaggaccaaccaaactctgcaagcacagaagttaaatgtatca

SEQ ID NO: 206003 - DNA, 451 bp, Glycine max
  unsure (1)..(451): unsure at all n locations
gcttaaggctaagtcttcatgttgcttatgttactccacctatctctaacaattaattcgatgttgctagccaaatttcaagtagaagtaagttctgaagaaacttagagaataagaatacttcatccatttcatgtttaatccatcactaagcatgagaaaaaaagactaagactatatcacaaacatgcctattaaaaaacattcaatacaaatgcctcatctattaaacatgttaggcattgcaaaattatcaaacaaaactaaaaactaaaggcttcaagctttgatctaacaatctcccccattttggttttgataatgccaaatccatatgatgtgtattgatgttttcccttcatagtacctggtttaaaacatgcttcacaaacatgttagtagcatctttttaattcaagtttaatgggtacaaatacttaatntctatcgg

SEQ ID NO: 206004 - DNA, 459 bp, Glycine max
  unsure (1)..(459): unsure at all n locations
tgtaggcttaggatcttcttcatcaatggattcctttgtttcttggaagatgaatggcagtggaatggagaaggaagagagggaggagacgccacttcaaggagaagatgagtctagaagaagctcaccaccataggaggccatggataagagcttggaggaagaaggagatgaatgaagggagagggagagaagagcacgaaattttgtgctctaaaagagctatgaaatctgaagtttaatattcaaatgatcaaagttgaaaaaatgcacacacatgacctctatttatagcctaagtgtcacacaaaattggagggaaatttgaatttcaattcaaatttcacttgaatttgaaattgaatntgtggagccaaaatttcactaattatgattagtggaatttagttatggttcagcccactaatccaagatcaattccaagattctccactaagt

SEQ ID NO: 206005 - DNA, 372 bp, Glycine max
acaatttctagtttcatatactacttaaaggtgtctattcttaatcttagttccctctcatcctaaagcaacttctacccaagaaagatctatagctacctctcttctagaactaacatactctatatcatcatctaactaaaatgcatactaagacgcctatcacaaaaggtgatccccatgagtttacaacatcttttagatactccacatacttcaacctaactcgaaacacactacgacacgtaacacaaggcttaccaccacatctaactcagggaggggagaacctgtccatgcatcccatgaacacacaggtcatcgatcatgtcaagacatgatcaggtacacatagagactatgacgagtcct

SEQ ID NO: 206006 - DNA, 479 bp, Glycine max
  unsure (1)..(479): unsure at all n locations
actcagcttatgatgaataagatgattcaagagttngangaatcattatatttgactttaagctcaaaagtcaagaacacttcatgataacaaagatgatgatctcaagaatcaaagaatgagttcaagattgagtcaagcacacttcaaggataaagaggaaatttgatttcaagaatcaggaatcaagtttcaagaatcaagatcaagattcaagactcaagattcaagaatcaagagaagactcactcaagataagtatcaaaaagttttttcaaaaactgagtagcacatgaatttttctcaaaaccattttaccaaagagtttttactctctggtaatcgattaccagattattgtaatcgattaccagtagcaaaatggatttcaaaaagctttcaactgaatttataacgttccaattgatttcaaaatgttgtaatcaattacaatgatntgataatcgattaccagtgtg

SEQ ID NO: 206007 - DNA, 426 bp, Glycine max
  unsure (1)..(426): unsure at all n locations
agcttccatcaagatgttcttggcacatcttcttacttgattgtccttggataacaaanagtatctgcagaaaaaatctcaaaaaaatgattagaaatagacgactatcatcatcctagatatcatcggacttgctcgtcctgagaggataaaaggactttgatagccttggagtaacgaaagcaagtgtgcggataaccaaaaggtatctctgcatgttaccggacctgtcacaggtcggggtaatagaattgtgtttgtacggataaccacttggggtattttcgcctgccacctgacgcatgggtcaagatcaacagatgttgtctttgtacgaataatcacttgtgtatatccgcctgccacctaacgcatgggtcaagatcagcagatgttgtctttgtacgaataatcacttgggtatat

SEQ ID NO: 206008 - DNA, 437 bp, Glycine max
agcttatagcgcggtctggagacaaggtaagagttcttatatgctttatatgttccggtgctttggattggacgaccatgccctcctgatttccagctgggaaattggcgagtggaggaacgccccggcatttacgcaacgagcataatgtaaacctttacggttttaaaagctctatagttgggcctaggctttagagtttttccttttgttaaggctttgtgtcttttgtttttgaatttataatacaaggatctttcttcatctgttcctggtctctacccattctcattcatttgcatgtttacttctttttctgaaacggcagatccgatgacgagccccccgaaggactaatacctgtgacccgcctatcgacttcgagcaagaaatgaatcaaacggaagatgaacgaaatgaggatgcgggactttccc

SEQ ID NO: 206009 - DNA, 456 bp, Glycine max
  unsure (1)..(456): unsure at all n locations
agcttccatcagtgtgtctaacacacgtgtattgtatcatctcgatatatctaatcttgtnctgatggcgctacatganctttatgtcaagatgggagatgaagatctagcactgatttggctaacctttcttccttcctcctatgagaattttgtaagttttcttagtataggcaaggactccattacacttgaacacattaagtctagtctctattcttgagagcttcgactaaaggcgtatgggaatggagatgaagcctctatggccagattatcggtgattggaaggggactatcctaagaaagcaaagaagaaaggcgtaggtggcaagactgcaaagaatcaaataattggaaggggactatccaaagaaagcaaagaaagattatgttgttgcttctgtttagaatgacgcctcttctaaaagcatttggtttggatttggactcgag

SEQ ID NO: 206010 - DNA, 451 bp, Glycine max
  unsure (1)..(451): unsure at all n locations
ttctcattatacaaagctggcatgtctatctttttaatgtcaattatgagtgtagagcagttcattgagaaggtgtcctggcctggagcccgaccttctgttgtgggggataatgaaagttttacagcccaggcaccttaacaacatgagccagaaccagcaaacaatcactcatctgaagccatcatccctggagctattgatttttcaaaaagaagattagagacgagatctaatgaggctgctcattctggatcaatgccagcatcagctgatgcaccatttccaagagtggatccatcttcacctcagcacacagcagactcttccattcctattntagagatacatgagggccagatcataccaattatgcctttggatacttctcctccagctactctagtatggcatctaacagatgagaagaatgttcatgtacaggacagtc

SEQ ID NO: 206011 - DNA, 461 bp, Glycine max
  unsure (1)..(461): unsure at all n locations
cggatccttaagcaccgcggctgcacttacttaaatttattcggaccttcttgtttattttgatgcataaattcacccttataaaagtattcactcttgaacaagagaatattaggaactactcactctctttcatgataagctatataacttctcctgtatcaagtatgtcacactaatttatttttaagttttttatttctccctattgtttaaatttagtctatctcaatttaaatttgaattttgaattttaaaatttgatacattatatcaatttgatagacatacggatcacatgtatttatttaaataatttgttcacaatgtggtcatagctaaaaaattgcagagctaaaaacttctaactaaatgcttaggtgtaacataaattggaaaatcaaaatattgatacttactgggtatagttcanaatcagtagctgacccaatagttaatat

SEQ ID NO: 206012 - DNA, 473 bp, Glycine max
  unsure (1)..(473): unsure at all n locations
agcttatgaaagcctatttgcaatgttatcccccacatttcagtatcaactctattacaataccagntatgaaaataatgcacgaattctaaaatgcaacactaagcagaagggtcaatttgtaaagttcatatagcaattcaattctaatcgaaatataacctattttatatatattcatattcccgaagagtctacttttaaaatataattttattttcatcaaaccgtatgtgaatcaaacaaagtaaaaaactgtgtgaagtatgtcaaagctgaaatttgtaaaacagcatgtgtgcacaaactttcaacaccaaataatatagaaatgactctaagagcccatactcatggaggatagcctcccaaaccaaaatngacattaaagaanatagaaactctcaataccttgagagatttgaagtcttctagagntcaagaaaatgcaaaacaaaatggattgatgaaaa

SEQ ID NO: 206013 - DNA, 425 bp, Glycine max
  unsure (1)..(425): unsure at all n locations
ttaagccacctgcggcatgcaagctngacaagtctttatatggcttctagcaagcaagtatgctgtggagtgcaaaattaactgaattcctcatgcagtgtggttatactctgtcgaaggtagattattcattaatcagaaaatctgttcctgcaggattcactgtagttctgatatattttgatgacttcgttctagctggaaatgatcttactgagattgagtccctcaaacacaaactttacaggcaattcagcatcagagatctaggcaagttaaaaaaatatttcttggttttgaagttgcccgatctgtaaagggtatcactttataccaaaccttgcaatacacccatggacagcatgcttaaactgcacaaggaagctggttctcctttacctgatgcatcagtctataggagacta

SEQ ID NO: 206014 - DNA, 448 bp, Glycine max
tgaccagttagactagcagaaccttccataatttttgggtcttttagtttaacagatgggagtggaagtttcaatggaggagaaatctctttgatcacgaaattgatatggcagcagctttcatggcagacattgttgagtttcaaatccaaccttcaagcagggaccttctcctttgggggcctgattctggtggaccctactccacaaagtcagcatacaacttcctgaaggatgttgacactcaggttactgaagatagtgcttccaagattatctggaatctcaaaattccacctagagcaagtgctttctcttggagaattttcaagaacagaatacctaccaaggttaacttaaggaggagacatgtggagctgccttcttatatattgcccgctggggatgaggaagaaggaaactgtggtcatgtcatgtattcatgcat

SEQ ID NO: 206015 - DNA, 428 bp, Glycine max
  unsure (1)..(428): unsure at all n locations
agcttgngatttatcacgtggactatgtgtcttttcctctanantgctntgtaaccaacaaggctccagcttaggctccaacaactcttgcaaaagtcatccaatgtgcaaaggataactcttcagaggacgatcaagaaagaacaaaccaccttcataataaatttggggcagtgagtgtggttagcatcggccgaacaacgttgatgttgcttgggatagcttaggtggcagtggcaaccatgggccttatttccaacatggagttgatccatttggcaactgcattttcaatgttcttcgccaaacactggtaatttctttccttctcctatgttagaaaaatattgctcccctgttcctgtctcttgtgtttgcgtataagtgttatgaaaacgacgcgaatctttactgatccatgatattgt

SEQ ID NO: 206016 - DNA, 454 bp, Glycine max
  unsure (1)..(454): unsure at all n locations
gacacaacaaactaagctaganatttcagagacgaaccagagattttgctttattctccatcacnnncnacaaggaaccaaacttcaggggcagaagatcactcagntccaagctctcctgcaattcctacatacatggctgcaacaaaatcaacacaagcaaaagcaagatcaacaagctccccaagagcaaggataggagggagatttgacatcaactctgatagctattcaccatgcaagaataagttacctattgtgacttctattaatggtgaagtgcttagtaatggtaggattggcaagctcagcagtaatcagcaaagatcacctagcttaaagggccttccaagacctctaaaattaagtcaaacattgaggggtcttagcattaattcagattgcccagtgccaattcgagatcaacanagntgcttcatgtgatggatattat

SEQ ID NO: 206017 - DNA, 298 bp, Glycine max
  unsure (1)..(298): unsure at all n locations
cttccccccccccctccggcttgatgcatcttgancntggaccccaagcactgagcagcaacnaggaagcggagagattattccgacatactaccanggaagtgaatggacgctaaggagtagcatcgggctagtttgatacaaacaaaagcctatactgagtctcgaaaaatgggaggacacatagaacatgccctatgaaacaaatctatgccatggaaacgcatgacataggatcatattggcgtgcaatactgtaatcgcatcagatatgactactgaagatatcaatgggcac

SEQ ID NO: 206018 - DNA, 412 bp, Glycine max
gaaactaagcttgaaccattaaacgacaataacttttactcggagtccgattgtattccgaaatatcggaacgctcgaaattgaatgtagaagctctgagcaaatttaaatgacaataactttttactcggatgtctgattgagtcccttaatatatcgagacgctcgaaatggaatatcgaagctctgagcaaattcaaacgacaataactttttactcggatgtctgattgagtcccgtaatatattgagacgctcgaaattgaataccgaagctctgagaaaattcaaacgacaataactttttactacgatgtctgattgagtcctgtaacatatcgagacgctcgaactagaataccgaagctctgagcaaattcaaacgaccaataacttttactccgatgtctga

SEQ ID NO: 206019 - DNA, 441 bp, Glycine max
  unsure (1)..(441): unsure at all n locations
agcttgaagatatgagtcttcactcttanattggatcaaagcgggtctaaaaagaggtaaatctgatcatcatgctttgataaatgcaaaaaaaaaaaaaaaaactagggcaaatgaagagggtgagaatgagggagaagcccatgctgtgactgccatttctatacagccaagtttcccaccaacccaacaatgtcattactcagccaataaacaaaccttctccttacccaccgcccagttatcgacaaaggccatccctaaatcaaccacaaagtctgtctaccacacttccaatgacgaacatcacctttagcacaatccaaaaacaccaaccaagaaatgaattttgcagtgagaaagcctatagaattcaccccaattccagagtcctatgctgacttgctcccatatctacttgataattcaatggtagccata

SEQ ID NO: 206020 - DNA, 467 bp, Glycine max
  unsure (1)..(467): unsure at all n locations
tgcccagagaaggagtccacgaaggaaatgcttaccactttataagactggaaagcggtttctaatgactcctctgcggcttccacataaggcatagaggatgggcagctcaccaagatgtcttcctcgcctgatacgatgaccagatgcccttccactacgaatttcaacttttggtggagtgttgagggaacaactcctactgagtggatccacgggcgccccaacagacagctgtagggggggttaatatccattatttggaaggtaacttgacaggtgtgagggcctatctgtactgggagatcgatctctcccctaacctctcggcgggtgccatcgaaggcacgaaccaccattgaacttggctttaagtgggaggcattgaatggtaatttctccaaagtgctcttangcatcacgttcaaactggaaccattatcgatgagcactttggctacgatatg

SEQ ID NO: 206021 - DNA, 379 bp, Glycine max
actggtgatcgataccagagagtaagttctctggccactcagaaaacttgagaaaactcttttgaaaagcaaaagtgcgctatgttcggtttttgaaaaatccttttcaatacttcccttgagaagacttcttgatttcttctcttgaatcttgaattcatcttctcttgaatcttagaatcaacctctctagaattctcgaatcttcttgaggtcttctcatgaagcttgaaattaatcttgatcttgaacttggtgactcaatcttgaaatcattcttttgggctgtttgtcatcatcaacactacttgatgcatacttgaatcatcatcatgaaacttgcttctacagataagcctctgtagatcaaggggctcaa

SEQ ID NO: 206022 - DNA, 469 bp, Glycine max
  unsure (1)..(469): unsure at all n locations
aacaanaaactaagcttgggattcttgagccaanagggatatagcaaatatatatgtgtactgaaaananaatgggaatcccttgctacactcaaacaaataataattgggaatcactttcaatgacatttagtcaagtgattgaaagaggcatctaataattcttcaaatatatggtttacaactcagaaaaaacaatataaaatcatataggagtgcaaatccacatagcttacatgaatcagaatttttttttttaccaaaatacctaattttatctcgaaagcaaataacccattcaattgctccaaagaaaatcttgactntggtggcaggtatcgcattttatttcatctaacttcaacttcgcagaaatctcaatttaatggccccatctggaatcaaaaccatatgttgggccctaaattatttcccatgctggcttccaagaaacatatatatatgccct

SEQ ID NO: 206023 - DNA, 445 bp, Glycine max
agcttgttgaaattgccatgttttatgagttaaacatacccattctgttttagggtttttgtgatgatgtttgtgatgtttatatgctgaaattgctgatggaaaactgttagagatgaagggtagaactaacctagggttagaaagtgagaatgtgatgttatgagtggaaaaagagtgaggctttgagggttggaaggttacgtctgaattctgtggtaaatggaggttaaagtaagttaatcctagcttgaaatgtcatttaagacttatgagaaagcttggactgtgctagagagaaaaacaaatgaccaaagtgaaccaagagccatttctagggcaaaatagggtgtagaggagtcaaaatttgattcggtggaattttggtgtaaattcagttcgagcaagtttagaatgatgttatggacttgtgtgaagtgagagt

SEQ ID NO: 206024 - DNA, 435 bp, Glycine max
  unsure (1)..(435): unsure at all n locations
tgttcaacacanattaatgaaacctctactcgcttcacgtagtttgtagatggnncaatcttggtgcaacacgtggtgactccctgtgcgataccaacaaaaggcgaatctttgtatggtgtgggtggaagagagtgatggtgaggttgggggaattggtattgggattggaattcttggtgaattcgtttagggtttcgacgatgtcgttttgccaaagcttcttgcggaggtggaaaggtttgtggggttcgaggttgagggtgtggagccggtggtgacgtgctggttgtttcatcgttgccattataataggttctctgtgtgcttcctttgatggggccactcagacaacgagtacacgtggcaccacacgtcgcatgccaacatgtccggttaacggtcacataaacagtttacggatctagattaacg

SEQ ID NO: 206025 - DNA, 450 bp, Glycine max
  unsure (1)..(450): unsure at all n locations
agcttgcattggttatttttccgcatcctattaagattagtacttcgagttttccaccatatagccaagccaaggttgagactatgttatttgtcaagttccaaaaaccagtgaggtttacattgacaagtccagcctcacaattctccaaaagggggagaagaccaacatcagttatgcatagagtccaatcagattaatatgctgaagttggagacacaatttgaacaatcatggctaggctagcactaccaaaaccagggcacttttgaatgactaaagattgaaaagactcgcaaggagaaagtatagacacttccatatcgatatctntgactcccatgtacttcacaagggaaagagatttcaacttcattntgatgtttacaagggcaacaataatcctagtcagagtgaacctgttgcactcctccaacagcaagttctcaa

SEQ ID NO: 206026 - DNA, 374 bp, Glycine max
  unsure (1)..(374): unsure at all n locations
ntaacaactaccaaaaccagttgtatgccattccccttttgtgttgctgncatgcatactttcccaaaaacactatagtacagcaaatgtccctccacaagacacgtcatcaaaacccgtttcctctttggttagccatctgaaccataaacaacgatatacactatagtactagctgataacacgtagatagacagatagcaatcaaccttgaacaaaaccatagaaatacatatatgcccagctaaataccttaagaatattacttcattttctggcagattttcttgttccatctcattgaaaaccttgattgcttcttgtccttgaccatgaaatccataagtagaagcaatcattgagttccacaactc

SEQ ID NO: 206027 - DNA, 431 bp, Glycine max
agcttgctctacaaggcggatcgcccggtggcagagtttgctatccgagttcaatatagtctacgtcacccaaaaggcaataaaaggaagcgccttggcagattatttggctcagcaacctctcaacgactatcaacccatgcatcccgagttcccggatgaggacatcatggtcttgtttgaggaaaagctacacgaggaccaggacaagtggatcgtgaggtttgatggagcatcaaacgttctaagccatggcgttggggcagtattggtctcttcagacaatcaatgtatacctttcacagccaggctggggttcgactgcaccaacaatatggctgagtatgaagcgtgcgccctggccgtccaggcagcaattgactccaatgtcaagatactcaagtgtagggggactcagcactagtgattca

SEQ ID NO: 206028 - DNA, 455 bp, Glycine max
tgtagaattcaccccaattccagtgtcctatgctaactttctcccatatctactcgataattcaatggtagccataaccccaaccaaggttcctcaacctccatttttacgaggatacgactcgaatgcaacatgtgcttaccatggaggagcttcggggcattccattgagcattgtaggaccctgaaacataaggtgcaaggtctaattgatgttggctggctgaaatttgaggagaatcgctcgtgaattctgacattggcaagcaacactatgcatgggcaatttgaaggttgttgttagatgtctctaataactcgttaggattttcaagtttataccattattgtaaaccacaattacaatgctaataatatggataagtttgacatccttgtctctcatcctctcacaattacatctttgcttatttgacttccattggaatgtgagt

SEQ ID NO: 206029 - DNA, 338 bp, Glycine max
  unsure (1)..(338): unsure at all n locations
gacgaagacactgacaaaaacgtatcttcttttttnttgaccaagtatgacaagctgggggaaagtaaattttcttccgatcagaccttggatgcaatggtgatcgtatccccatctcagttagatcttgacgggtattcaagccattcttcgtcttgccttgaatgttaaggagcgttccaatcacattgtcacatacattcttctccacatgcataacatcaatacaatgtctaacgtatagatcagaccagtacagaagatcaaagaaaatggacctcttcttccatatgcaagtccgacttttatccttctttttgggtcttctaaatacaata

SEQ ID NO: 206030 - DNA, 287 bp, Glycine max
aactcaagcttgtctcagcgtttatgcgagatggagaccaacatgctagttatcatctccaagtactcaagaagagttaggtctagccacggcccacgagcatagaatcgcggatgagtatgcccaagtatacgcggaaaaagaggctagaggaagggtgatcgactctttacaccaagaggcaaccatgtggatggatcggtttgcccttaccttgaatgggagtcaagaacttccccgattgttagcccaggccaaggcgatggcagacacctactccgcccccg

SEQ ID NO: 206031 - DNA, 422 bp, Glycine max
ttaagcaccgcagctgcagctttgacttttggctggtgagttttagttatataacgtggctttgggttataaaaaggctttctttatttttaaagttgtgccacatgttctcctttgagtggagcaaaaaagggcccactttttctctggatgtgactcatactcagccacaagaagagaaaaatctgaccttttgaaatgctaaaatcttgcctcagtttgcgtgccatttctatagttccagtccctagcgtttctttgcacccgtcggggcccgttttcgaaagtaagcaatatatatatcaaaacgctcagaatgaaaccccgagcgtggttcagaggttgtgtttgttaaattctaagttgcatgccaaacgataattttaagactaattaattgagaatctatctataactgttca

SEQ ID NO: 206032 - DNA, 472 bp, Glycine max
  unsure (1)..(472): unsure at all n locations
actcaagcttccatcaagtgggaatcagagcacagagcatatcaagtatgtgctccttataccnccatnaanncccggctttaccttctcttccattgttgtttcttcattttttctccatgtatctcctcacatgtcttgtgctaaatgtttttaacatgattctttagagtttccaccgattaaacttgctatagaagctagaattgattttctatggttcaaatttcttgttcttgttcttgaaccatgaattatgttgagtttacgttcctttgagttttgccttgttattttttgtggctgaaacctaaatcataaaattcttacaaaaatattaaagtagaagaaaacctcaaaaatctagagtgacttgttcacctattgtagttctgtcatagaagttatgtctagtcatgaaactcgncacataagatttcttatgtcgtgatgaatcttattatcttgtttc

SEQ ID NO: 206033 - DNA, 456 bp, Glycine max
  unsure (1)..(456): unsure at all n locations
agctctaggctgctcaattgcttcagatttttgcttacaanggctaaggtctgngtggnggccggcataagagcataaaccatagagtctagcgacaggtgcagatctttgattcatggccagttgggttaccgggttaaccaaggcatctagtttaccttcaagcttcttagtctcagctgatgaagatgaatttgtggctacttcatgcactcctctaatgacaataacatcatttctggcactaaattgctgggagtttgaagtcatcttctcaattaaatttctggcttcagtagggagcatgtctccaagggctccaccactggcagcatctatcatacttctctccatgttactgagtccttcataaaaatattggagaagaagctgctcacaaatctggtggtgaaagcaactggcacatatttatctaaatctctcccatattcatat

SEQ ID NO: 206034 - DNA, 432 bp, Glycine max
  unsure (1)..(432): unsure at all n locations
atccaaggctcatcttggtggcgaagctccttctttcatggcttattccttattgganggcgcctcctctcacctcttctcctttgtcttccgctgcatctccatggtggaaaatcaccattgaaggacctcatttaagctcaaagatccatcctccatagaagctccacaagcaagcttccatcaagtggtaatcagagcacaagagcttcaagtaggtgctccttaaacctccattgattgtcagatttaccttctcttccattgttgnttcttcatatttctccatgtatatcctcacatgtcttgtgctaaatgtcgctaacatgattcgttagagtttccaccgattaaacttgctatagaagctagatttgatattctatggttcaaatatcttggtcttgttcttgaaccatgaattgtgttgag

SEQ ID NO: 206035 - DNA, 172 bp, Glycine max
actggatcatgctcaacaatatcagataccgcagaaccgactttgtcttgatccgtatcactgactcggcgttgaactatatacactttgtcagttttcatgtcgggaaccccatacatcataagcccttctatcctatcagctcttttatacacggatagtgtatgacccg

SEQ ID NO: 206036 - DNA, 282 bp, Glycine max
aactcgctgtggcactggagtgatggactttggttttacgggttaaccctgggatgctcggagacagtgaatggaggtgtaggaggcgccatacattagggactaagccattgatgaatgatgttcgccaccaatatgagccttggatgacacacttgaatatgatgcttggatggccgataagaaagagagaatggtggtgcacgaaatgcaaagaattaatgatggaatgacgtgcaactgtgaagtgagtgtaataagagttttattcatcatagttac

SEQ ID NO: 206037 - DNA, 446 bp, Glycine max
  unsure (1)..(446): unsure at all n locations
agctngngtactattgcattctactaatatatgtgttttggccactgctttgcatgaggataagaattgcttgaccacaacaacgctagaggcggtaaaggacaacggtctttcaaataaacttgttgtacgtgaataaacattattaactcaaatgaaccacggaagttattggataattctaaaagttagactaattatattcaatgtacctgaacaaaatgatttccaaacacatgaccgacatatatcttgcggtgcacagaagaatcgggtggtggttgacttctaagaggaaaaaatggcatgctttgttgtcgggacaacgatacaaggattacgttataccttgatgcaatgacatatcccatctcccttatatccatccactngtccacactanatngaatcanacaaacatacacatctaagttatttaaatctct

SEQ ID NO: 206038 - DNA, 469 bp, Glycine max
  unsure (1)..(469): unsure at all n locations
cagcnnctggggctgtctgcgaagcaaaatnggaatgttagtntttattgggacactactcttaaaacaaggagggcgtacaacctcctcccataaatacaaacatcaatgtaaatttagagcaagcttatgcgcatatttccttacgaacgttcacttgcacaagacatcctatcaactaagaaaaatgcacccatatacaatcaaggtagcttcattacctagattatgtacttccaaggtgtatttgttatttacatcacacacgcctccttggctgaatttacatacatgcatactcaaagcattttggggtaccaaaaactgcacatgcgctcatcttggtatttctaatacccatacatatacaaacttcacgatgaatcttgactacctacacaataaggggctacctttcatgttgttntttcaagnttttgctacctaaagccacatgcaaattcaagca

SEQ ID NO: 206039 - DNA, 425 bp, Glycine max
  unsure (1)..(425): unsure at all n locations
agctngcctaggatgtatactattcttttttgtttatgttnacactctttttgataactcaagccaagtgtggtttattctatggtttgctttactttatggatggattgcgctatggttgttgctgctaccttagttattctctttagacattcttggcgttttgatgttgccaaagggggagagaacaagggtggaatttatcatacacttatgcataaattccaatcttgagggggagtaagagttgtgagcatgcattatcaactgtatatcatttatcttgatttcagattactgtcatcatcaaaaagggggagattgtagaagcaaatatgatatgaagttttgatgatgccaaagataagcgcttctcacgtgtgatccaagccaagaatctagaaattcaagataattgattaact

SEQ ID NO: 206040 - DNA, 472 bp, Glycine max
  unsure (1)..(472): unsure at all n locations
gaaactaagctnacaaaagnnanaggtgatatgaaacaagttcttggctttggnacaagaagnnnaatgagtttatgagcaactcaggattcaaaagatgtgacatggaccattgctgttatgttaagaaatatactaatagttatgttatccttgtcgtgtatgttgatgacatgttgattgcaggatctagtatggaagaaattaacaagttgaagcaacagttggcagaaaactttgaaatgaaggatcttggtccagctaaacaaatccttggtatgagaattcttagaaacagatcagaaggaatcttgaagctgtctcaggagaaatatatacacaaattgcttgacaggttttaccttggagattctaagaccaggaatacccctttgggatttcatttgaagttttcanagaagcaatctttgcagacagatgaagaanaatgttacatgtcaagagtaccata

SEQ ID NO: 206041 - DNA, 454 bp, Glycine max
  unsure (1)..(454): unsure at all n locations
agcttataattacatgttagaattagcttatttctctagacatgctntctattttcatgttcaattttttcccctaaaaccccatggaattgataattttcatcattactttgtggttaagtttaattcgtcaaagtatgtaactaggttctctacatgacttaatttaacaaaatttgttggcataaagagattactaagttggatgtgcatatatctaatgcatcatttatcccattgttagtgagttgtatgcatgaactaagtaggtttgggggcattacaatgagtaagtaatgatatattttaggtgttntgttgactnttaattgcatctatntactttgttcatctgtcaactntggcaaccatgttgttggtaagaactctacttaatatccagaatggtacagaatngacaatcatgctcatgtgtataaatctataagggata

SEQ ID NO: 206042 - DNA, 459 bp, Glycine max
  unsure (1)..(459): unsure at all n locations
actaagctggaggagaaagggataagtagtctttcacttttgnngtttactcacagagnggacctggagaatgttgcgggggtcatgagaccttgcggacgtcaggtggggtgttattgcccaaaaccaagcttgaccaatcccgacccaacccgggcatagtcagtcagtgagaacctgtgacgtacctaaacaggcgagctcctggcagtcaaccaataaaagaacaaagaccacgaagcatggaggcttgtgttgcgactggccaactatgaatcttgagtggtatctggaaattggcctctggtaatcgattgccaagggtgtgtaatcaattacaaggcctaaaaatggagacaggatgataaggtggcctctggtaatcgattaccaatgatgtctaatcgattacacagagtaacagggcactggtaatcgataccagttatgtgaatcgat

SEQ ID NO: 206043 - DNA, 421 bp, Glycine max
agcttgtgagtgagtaactgttttatttttatggtccatttttttagctaggcaatgttttattaagaaggaaagtatatatatggtttgcgtgcatgtagccaacatttttttaggtttgattgcttttgaaaaaaatgccaatatatagtccaatgaccaaacaaattaaccagttggtacaacaaaaaattgatatttgaaatttaggatatgatacgacctagatacgttaacaataattgataaaacgttttatatgttaagaaatgtagcagctggttcacaacaacaacaaaaaggagtgatgagtgatgcattaagaaatagaatgatgtttggggctaggaatggctacaacctatctagggagggtaatgtattatgatctgagcaaagaaacaagtgatggtgcctgtgt

SEQ ID NO: 206044 - DNA, 469 bp, Glycine max
  unsure (1)..(469): unsure at all n locations
gaaactcagcttggttctccatttagggtccgcccttttcttctttttgtctntctgngagcgtatcttccgccatcgatgttagtgttctaaccccattggctttggttatctgttagaatcgcgttaatggccttaggatagacgacattgctgttgtttggtgctgtaggttgaagacgaagttcttccacgagaagaagcttcttccgcgcatgtgttatgggacgaaaatggagccagcggaagaaggtgttcttctgcgggctcctgcagaagaaaggtgaaaggttcttccgtgggtgccagcgggtgcctgcggaagataggtgaaaggttcttccgctggatcaaggcggtgatccatgttgcagtggtgattacaaatccaagcacccacatggatccccaagccttgtgcncgttttgatatctgaccatactctctattcttattaattctcatttc

SEQ ID NO: 206045 - DNA, 452 bp, Glycine max
  unsure (1)..(452): unsure at all n locations
agctnngttaccccatgttgaatttgcttatttagagctgttcatagcaccactaattgttctccttttgaagttttttatggttttaacccactaactcctcttgatcttttgcctatgcctaatgtttctgtttttaagcataaagaaggtcaagcaaaggcggactatgtgaagaagcttcatgagagagtcaaagatcaaattgagaggaaaaataaaagctatgctaaacaagccaacaaagggagaaagaaggttgtcttcgaacccggagattgggtttgggtgcacatgagaaaagaaaggtttccagaacaaaggaaatcaaagcttcaaccaaggggagatggaccatttcaagtgcttgaaagaatcaatgacaatgcatacaaagttgagctgcccggtgagtataatgttagctccaccttcaatgtctctgacttatc

SEQ ID NO: 206046 - DNA, 461 bp, Glycine max
  unsure (1)..(461): unsure at all n locations
tctagccaaatggacttaccttgaattaattcctttgatttgcccttttgagccttggttccctttccttgttttgaagctcactacaagccttaagtgaaaaaccatgatattaccatatccttaaggaattttggagctttggaattgttttgggaataagtgtggggggtttttgtttcattggacaacttgttttgttggctatgcttcatgatgtattttgggccatacttgatgtacattgtatattggttaaatgttggacatgctgaatgaaatgttgtttctcaaaggctaaagagtaaaaaaaaaaaaaatctaaaaaaaaaaaaaatctaaaaaagaaaaagaaaagcaataaagttgagtgaataagatcttaaatggcacaagaatgatgaaactcttggttctactcttcatgtttaatttntatctttacttctttttattttctt

SEQ ID NO: 206047 - DNA, 443 bp, Glycine max
  unsure (1)..(443): unsure at all n locations
agcttccttgtagagcgtcacatttaatatttagctcgatggtggagcgagcctttgatggtactcggcgggaagtgatgggggaaatcgacattcccattcagataggcccccacacttgcaacgtggtgtttcaagtaatggatataaatcccgcctatagctgcctcttgggaagaccgtggattcatgccctgggagtggtcccttcaacgcttcaccagaaattgaagttcgcagtgggtggacttttagtgatagtgtcaggtgaagaggacatgttagtgagctgcccctccttcgcaccatacgtagaagcggcggaagaatcattggaaacggctttccaatcctttgaagtggtgagctatgcctctgtggaaccaagttcgtcgctaccttctctctccanagcggccataatggtggcgcgcgttatgctc

SEQ ID NO: 206048 - DNA, 459 bp, Glycine max
  unsure (1)..(459): unsure at all n locations
aaactaacctatgcgcatattccttacaacgncacttgcacaagttatttattaactaagaaaaaatgcacccatatacaatcaaggcagcttcgttatctagattatttacatgtacttccaaggtgtatttgttacttacatcacacacatctccttggctaaatttacatacatgcatactcaaagcatttcggggtaccaaaaattgcacatgtgcacatcttggtatttctaatacctataaatacacaaacttcatgatgaatcttgactatctacacaataaggtgctacatttcatgctcttttcaagtttttgctacctaaagtcgcatgcaaattcaagtatatttttctttgctgactaaaattgtattcaaattaaaaggtatattnttttttgtaatgtatntcctttacataacatgcaacatatntatatatatatnntttttc

SEQ ID NO: 206049 - DNA, 448 bp, Glycine max
agcttaaagataggcattttaaatgtattataagcttacattgtcattcacatacatatcacctcttgaattggtttaagataattattttaaaagttaataaacttaccatacataatacaatatgattaaatgattgtataatatttttacactaccaatatataacattttttctcatatataatatttcatataataattcaaattaataattaatatatattttaaaaaaataaacaaaattttaagccttaaataatttggggcctaaagcaactgcttaaatgggcttgcagttgccacggtcgtgcatgtaatgtgatttagtggttattgcttggtgagtgaagtggtgcaaatgtggggggttatatacaagataagataggactccttcggcaatgggaatgtaactggtggttatggagaatgcatgtgacaagtt

SEQ ID NO: 206050 - DNA, 457 bp, Glycine max
  unsure (1)..(457): unsure at all n locations
tgttaaagatattatgaaaaatctagaacaagcttgntcttacatcgtttgcgcgtatgatatccactcgacaaggtttgaagtaaaggagaccttcaatcctattacgcaacgtggcggacaaaagtgggcagttaacttgaatggtcattattgtcaatgcggaaggtattctacgcttcactatccatgttcacacattatttcatcttgtggttacgtgagcatgaacaactaccaatatatagatgttgtttacacaaatgagcacatcttataagcttactccgcacaatggtgacctcttgggaatgaagaggctattcctccttctaatgatgcatggacacttatccctgacccaactacaattcgtgcgaaaggtcggccaaaatcaacaaggataaggaatgagatggattgngtcgaatcatcttagcaccgacanaaatgtagt

SEQ ID NO: 206051 - DNA, 456 bp, Glycine max
  unsure (1)..(456): unsure at all n locations
tgtctntntatataatatatatttaaattttaaatacttatatataagnggntngatgtattattttgtccaggatcctcaaaatgtcaagatccatcctgagattgtttaagctacaaaagcattgtgcataatttaatatgaaataatgatagcacaaaagttagttgtgtgagcatgcagggaatgtgacttgttgtattatatattaaaagatttggatcgtatatagaagatcatatgttttaattttagtgtgattattgtacactaaaaggttatgagaaagataagtttgctcagttatcttccttgaattgtcatactatcctttactgtttgattgtaattcgtgcactttcatactatcctctaaaanaaagtattntacattaagaaacgctatcttgcagttcttctctatgtcgaatttaacaagtctttgggctaaaaatt

SEQ ID NO: 206052 - DNA, 344 bp, Glycine max
  unsure (1)..(344): unsure at all n locations
gcatgcagtctcagcaccacatgagattacttcttgaaatctacactcgacaccaggcaccatcctggtcagaacatacactcagagacctcggcccgtatcaatccatgagtaaaagaatggagaagaatttctcttcaaagactaatattgcaatgaagatccatggatacactcttaatggatttgcaagtgttttcccaagagttcttgaagagcatttggaaatgaagttctcttggaaatctctctcattttcttttgagaggataagacattctggaccagcaaaactctctcttaaaattcgtgctcaagtcacctatttataggccctntgatgg

SEQ ID NO: 206053 - DNA, 468 bp, Glycine max
  unsure (1)..(468): unsure at all n locations
cttgatggtgtcgagaagaaatacatgtttgcatcattttaaaggggagaatgtgagtgtatgtatacatgattttgatgatgtcaaaagaagaatcaaacaaagttgcttcaaaggataagcatggcttcaagattaatacaagattgattcaacaaacaaagccttgcttcaagattaactcaaagatcaagccttgccttaaaacaaatagctttcaagacatgcaaggctctagtaatcgattaccaggcattgtaatcgattaccaggcagtgtaatcgattactagcagacagggttgaaaaatagctgttgaaaagagttttaaatttgaattttcaacatgtaatcgattaccatatgtgtgtaatcgattaccagcaacgaaactcttgaaattcanattcaaaagtcatgacccttcaaattataactgtgtaatcgattacacaaacattgtaatcg

SEQ ID NO: 206054 - DNA, 455 bp, Glycine max
ttaagtcacctgcggcatgcaagctttctaggaagaaatgcatcagcggtttcttgttcctagagtatgcccccatttttcggcaatacatcttaaggtgatttttggagcaagtgatccccttgtatttatcaaaatgtggtaccttgaactttggagggatgacaacatcaggtaccaaacaaaattttgtcatgtcggtgaaagggtaatctccaaacccttcgatagcccttaatctgtcattgatgcgatcaattttctctctcccttccactgtcggaggcggcccccctattgagaaatgcatcggttgtagagggcggagctgaagagctcccacggtattgggttgaggtatagcattaaaccccgatctctcggcggtgaatgtgggatatgggttgaagtcaccttgagcttactctcgtggttcttcacgggtgccttcccat

SEQ ID NO: 206055 - DNA, 478 bp, Glycine max
actatcgaaactcaagcttgtagaatggctagacatgatacatgtcagggtttggtttgtttcaatgataaaagggatgccccacattatttccatgacacaaatgcaaaaatgatgatttggaaactttatgcaaaactggtcatgtatgcacctatgcggacactcaagtgtcaaatttttatggtcatgtgatgctagggctcaggattcatttcctctattttagtcaacccaatgtttccaaaatatgttcttctatcaatttgtgcattcatcctaaacgaagaactctacacggttccagaatttcaaacatcatcgatagtaatgatatataaacactaacgcaacaatcctaataaaaatgtatgcgctgtacaaatgacaatcgaaacaacaaaaacaaacattagtctctcaagtcaaaacataacatataaatgataaaagaaatatgaaagaaaacatgaatctt

SEQ ID NO: 206056 - DNA, 429 bp, Glycine max
  unsure (1)..(429): unsure at all n locations
aganagcgcggaagagtcagtctgcctacagttatttgtcgaccatattttgtgacccggagatatgtcgcgggagtcaggagaccttgtggacgtcacgtggggtgctattgcccaaaaccaagcttgatcaatcctgacccaacccgggcatagtcagtcagtgagaacctgtgacgtacctaaacaggcgagctcctggtagtcaaccaataaaagaacaaagaccacaaagcaaggaggcttgtgtggtggctggccagctatggatcttgagtgatatctagaatatggcctctggtaatcgattaccaacggtgtgtaatcgatcacaatgcttataaatgaagacagaaagttaatatggcctctggtaatcgattaccaacggtgtgtaatcgattacaaggcttatacatggatacagga

SEQ ID NO: 206057 - DNA, 459 bp, Glycine max
  unsure (1)..(459): unsure at all n locations
agctntagtcttgcaagaagtaaagcttcacctgttgttgattctgttctgcacaatgaggatgaaggttgcactcttcctcagggattgtagatataggaatcagataaggtgttttcggttcttaattttaggatataaaaagtaatagggttattctatttactgattattagtgtcttcagttaatgacatttccaataaaaacaaattatgtgcagacttttgaggttagtggaaatctgacatccaagccctctagcaatcctcaataaatagcttgtactgatactaattacacaaaagtggaattagtggcaaattcagagagtctaaagactaatgtacaacaagttgttcctgacattgatgcaatccaaaataccgatattcaaaatccatgtcttccaagcgaacataaaaaaaagcttaggtcanaagaccgcgacacttggaact

SEQ ID NO: 206058 - DNA, 461 bp, Glycine max
agttcagttgtgttgttacttgtctcatgatcttctttctccatctcatcctcacgtgagattccaacatccaaaccctcattttttccatttgaaacactagcaaaagaaaggaaagaagttgaaaactgcaaaggagcatcagaaggctgtgcaacttgagaaactaagacaatattaagatcagaacttgtactgttggaaggttgttcaatagtagcaccaaaatttcttgagggtccaagcttcaattcagatgaaccatttgaaggttcatttggtcgagtgactacttctgcagaagcatctaaaacagtctgagttagacacaacacctggttgaatctttgacttaagtgactctaaggttgacttcaagccaagtggattaggtaacgatgacactctatctttatgtgcttgattagataagtgaagaaaaactgatgttaaagatgatg

SEQ ID NO: 206059 - DNA, 435 bp, Glycine max
  unsure (1)..(435): unsure at all n locations
agcttttagtgtttgcatggagaaactctctggtttaatgaactcctgacagctcccgaccaggtacaggaagatcccttcatgaaaagatatatttctcagtacaatttcgttctgtctcaaagaaattgaactaaatcaataggcataaataggattcatgtcaccgcctcacctaggttttgtagctcctacagtcaagacaatggcgtcgttttcccctcgaagccgatcaagagtgtataaaggatcatgtccaacattagcatttaccacaaaatctattccctcttcagccataagatttactcgccgttgaactatatccactntgtcagttttcatgttgggaaccccatacatcataagccctcctatcctatcagctctttcatacacggntactgtatgacccatnttattagctgatcagca

SEQ ID NO: 206060 - DNA, 449 bp, Glycine max
  unsure (1)..(449): unsure at all n locations
tatggaggctggatctngagctttttggggttcnttaatggngannnnccaccatggagatgcagcggaagacaaaggaaaagaggtgagaggaggcgccatccattaaggaataagccatggaagaaggagcttcaccaccaagatgagccttggataagaagcttggagatgatgcttcaatggaggaaaagaaagagagaaggggggagcacgaaattgaaggaataaaagagggagagaagtggaactttgaagtgtgtctcataagactttcattcatcaaagttacaacaagtgttacacatgcttctatttatagactaggtagcttccttgagaagctctcttgagaaaacttccttgagaagcttctttgagaaaacttccttgagaagctagagcttagctacacacacccctctcataactaagctcacctccttgag

SEQ ID NO: 206061 - DNA, 299 bp, Glycine max
acggagcccaacaaggaaaaagacagaaaacaagcccgggggaaaaaagttccctcaaagaagggcaggcctgaaccttatatccatgacggcaagaataagataaggagctccacggagaaacgccacatggactttctccagatcccacaagagaaggaaacacgacgtcggagtatgcaccacaaacgtgcagcataaaaaatatacatagcgagattagacatgacagaaccaacaattcgcaccaggataatcccgcccaaagcgaaactaagaaaccgaaggaggagggagag

SEQ ID NO: 206062 - DNA, 335 bp, Glycine max
aacggacgccccacactatctccgtgacacacatgcaaaaaggatgatccggaaactttatgcaaaagctggcatgtatgcacctatgctgacactcaagagctaaattgttatggtcatgtgacgcttgggcttacgattgacttgctctatactagtcaacacaatgtctccaaaatatgttcttcgatcaatttgtgcatacatactaaacgaatagatctacaggggtccagaatttctaacatcatcgatagctatgatctatagacgctaacccatcaatcctgattaaaatgtatgcgctgcccacatgaccatcgacacaactaaaa

SEQ ID NO: 206063 - DNA, 448 bp, Glycine max
  unsure (1)..(448): unsure at all n locations
agcttctttgtctagaagagaatattntcttattttatagctcttcttctattttcatgaataaataagttctatattatggacatttgaattgattttaataatatgaaaattaataaaattgttagtatagctcttatataataataaaaaaacttccaaatttacccgtgcatcacacgatagttaaatttaaaaactcgttcttaaattacatgaagtcatagtcaaattatactatattgtcttataaagtcgngtatctttcttatatatgacatttactataaatgtatacggtaaatcaattcaaattcaaattaatttatttcttaattagttattcaaataaagagattttgactatccataacttcatattaatatttaaatttctttcataaacattaaatataacaaagatgtattaattattgtttcaaagtat

SEQ ID NO: 206064 - DNA, 451 bp, Glycine max
  unsure (1)..(451): unsure at all n locations
cgcttgttgaaagatggtggattggtttgtgagttacatgactattttattcctgannttagtgttacctatgcagcacgtcatgggcactctcgacatcaaaaagatcatatcacaatataacattatttcaaagtgaacatatttttaattgtagtagataagtaggaagtaaatgctatgtttagtgagcaaacaatgaaacttttaactttaagctctactttagctcctaaggatttttataaagctttcaatgttgatgatatatacactcttgtgaataaattttataatttaatttttagtgaacaagagaagattagtttaaaatttcaacttcaacattgtattgtggntactcctactaatcagatttaaagaacttgtccacaatgcttgaattgtgtaattattgagacctccttcaagctaccattgcactacattt

SEQ ID NO: 206065 - DNA, 354 bp, Glycine max
  unsure (1)..(354): unsure at all n locations
tacatttgtgtattgataagaccgtgcactatttcttgaagctcgagctctgacagtcttttaagatagtttttcgaaaaccgtcttggaataacaaccattctaagatgttttttgcgaaatcgtggtggaatagtagattccaagacaattttcataaaaccgntgaaaaacccatatttacaaaagtgccattgttttatatactaagatggttcttatgtttggtagaaaatgttnttctagtagtggtggaagtcgtggtataatggaaacaaccaacaacaatcacaaagatatgttgtttcttacgtttggtccgctactatagaaacattattgaaagatttctaa

SEQ ID NO: 206066 - DNA, 456 bp, Glycine max
cataaccttactgtcgttagcgctctttattaaattattggccaaaccatcgcaaagcatttgagtattcttctaagaacttcaacttgtatcatcctctctaaaagagagaaaaacatttatactttctgaaaaagaattgttgtgatatagagattatttgtctcttgaattgtgagaatcttgaacacaagggagagggatccctacgtggttcataagctgtaaaagagttttacaagcatagtagaaatctcaagtaggttgcttgaggactagacatatgcacgggaagtgaccgaacctgtataaatcgagtttgcgattctctcttccgttatctcatttattttattgcaatcaattttgtcttgcacgtctaaataacaatcaatcaattgattgttgcttttgttatgcatttaaatcttcataatcattagaagagggattaaa

SEQ ID NO: 206067 - DNA, 456 bp, Glycine max
  unsure (1)..(456): unsure at all n locations
agctgtgattccttaagacatccttatttattgnnntaatncnnnacccntaaaggtacgttatatactngttataggaaccttataattctaagtatatagttgtagtatggtgttctaccttaattgtataaatattatggttgtttgtgatttcttgttcttagtgatgttaatactctatagttggatgattcatatcaagttatatttcataaggaatactcttttgatcgtaccttctaattctagtgcaacctattctttgtgttgcgtgcttaagtcaagtaatttgattacacttgaaagctngagtataattcattctttgtgttatgagcctacatcaaacaattgggttactgttgtttctatcacaatcaagcgaatgttaacgtccccatatgtgtgtacattgtgaatcatgttttgtttctagaattcatttgaaacgtt

SEQ ID NO: 206068 - DNA, 464 bp, Glycine max
  unsure (1)..(464): unsure at all n locations
ntcacaaaacctttcaacaactntcaaaatgattcctatgatgtcaatccagggctatgtgggtttcgtttgtcaaaatcatgccaccagggtaaaaaagagccgagagattcagcaacttttaagcatgatgaacaattcgggtttggttgaaaacccgtagctattggatatgagagcggagggatattaggaatagtgtttggggtatgttatattcttcattcagaaaccacaatggtcgataattgagcatgttggaggcattcttaatcaaagagtgagaaaaaagagaaacagatgtaatgcaaatacaagacgatacaatcaaggccattgaaggatctgagagtcagtccacgctgacgtaagtgaaattttaatgtgctntaaatttttcatgttaggtggtaccatgaaaaaatgtgtcataatcttcaatctgataatcactgacctgatat

SEQ ID NO: 206069 - DNA, 452 bp, Glycine max
  unsure (1)..(452): unsure at all n locations
agcttcgagccaaaatcctgactcaccatttaccttgatccagggagagaatgccaatccttaccctcggaagcnaaaaaaaaggagaatatattgaaaatttccaatcaaagaggaagcatataaaggaaagaaaggaaattcccaatcaaagagtgggagaaagcaaaaaggaaagaaagaaaattcccaatcaaagaatgggagaaagaaaataagagaaaagaaggaaagaaagctcctggtcaaggatcgaaagaaaacacaataaatatgcagagaggtctttggaccggacaatatctgaacaatacagaattgtcaccaaatgaacaaaaaagaaggaaaggaaaccaccgacctaaatggtcttctccctttaattaccaaccaaaatcccgtgcgctagcgacccttttttctcccccgcactaaacaaaaaaaacagaaaa

SEQ ID NO: 206070 - DNA, 452 bp, Glycine max
  unsure (1)..(452): unsure at all n locations
ctcacgctntgtgtaatcgattacacatatnnggtaatttattacttttgtttgtttctgaaaaatctaaagatgtaactcttcaaaaaggttttgactctttcaaatcggttttaagtttttctaaaagttataactcttctaaatggtcttcttgaccagacatgaagagtctataaaagcaaggctttgtttttcattttcaattcattcattctatcaatcaatcttttccaattcattctttacacaagcaagttttccacattgatttctgagtctctttgaacttcttcttcttcttccttttgccaaaagctttccaaagttttctggttnttctaaaccttgaaaacttgtgctattcatctttttcattctcttctccctttgccaaaaagaattcgccaaggactaaccgccctgaatctttttgtgtctctcttctctct

SEQ ID NO: 206071 - DNA, 418 bp, Glycine max
  unsure (1)..(418): unsure at all n locations
tggagtcttctcacanaaaatagagatcctgactggtcaccttatgatttcacttagtaagaatgaccttacataccctttgtgtggcgtgtcttgttatgtactcctaggcactctggtgttattcttcattgacatggtaccacattgaataaaggattaagtcttagtgtatctgttgcataacacatgtgtaatgatcattgtgacttgttacgcgatggtgggtaatgaattgtgtgagtgtgagatgtagtgttgcactcgagatttgtagttctacacaagtgattaatgtgaaagtgtgaaatgtgattttgtgattaaatccttaggacaagtaatgttatgcaatgagtggtaaaatgatgtaaattgtgctaagttgagcttgatatacttatattatatacgtgtg

SEQ ID NO: 206072 - DNA, 442 bp, Glycine max
  unsure (1)..(442): unsure at all n locations
tctgaaaagcaaattggattatttaatcaacttgttttatgagtaactaacatgaatgagacttttattaaaaataaaaaataaaaaaacactcttttttaattgcttttactccaccttttaaagtggaaaagaggatttttttttccctccttttttttaccatagaatgaggcaagtgtagtgcaaaaaacgggattgtcaaataattgatgcttaattatttttagaagaatattaattattttcccctccttcatttttaaatacactntgttgataaattatggggcataagtttcttgcaatttcaaataagtcaggcatgcaataagctctgagtttgtacaccacataaaggacacaggtccgaatgagaaataagggatttgctattgngccttacactattgctattggctcctacaacgtggatgctttt

SEQ ID NO: 206073 - DNA, 429 bp, Glycine max
  unsure (1)..(429): unsure at all n locations
agcttcatgantgaatcattattaantcttgaatcaagattgattcatgatgatgaatcaagattgattcaacgtgttttgatgataacaaagatgatgacaaaaggcccgagagaaagacttcaagattgagtcaagaatatttcaagaatcaagagaaatttgatttcaagaatcaaatttcaagtttcaagtttcaagaatcaagaatagtcaagatcaagattcaagaatcaagaaaagactcaatcaagataagtactaaaaggtttttcaaaacactgagtagcacatgaagttttcacaaaagcttttaccaaagagtttttactctctggtaatcgattaccagtagcaaagtgtgttttcaaaagctttcaaactgaatnntataacgtccaatttaattaaaaatggtgtaatcgatac

SEQ ID NO: 206074 - DNA, 458 bp, Glycine max
  unsure (1)..(458): unsure at all n locations
tgacaagttgacttgtttaactaataataataataatattaacaactntattttatcaaatcttgtcttatctagattntattctgtatagattttattttattcagattttattctatctagatcttattttgtccagattttatttcatctcatcttatcttatccagattttattttatttcgtttatgggcttgaacttaaaatagatttgtaagttttggttcacgtagaataaaattcattttctgcaaatcatttctaattcatatattttttaatattatgttctttttattttcttttgatatattttgtactttaacgacttgaattcaatatgattttgttcatcaattatttttggatttgtacattacttatacgaaattttataagtttttttttttagttagtatttcactaggttttaaaataattaattaatcaaagacgt

SEQ ID NO: 206075 - DNA, 426 bp, Glycine max
  unsure (1)..(426): unsure at all n locations
aagtcacctgaggctgcagcttaaaggacaatggacacagtatttgtttgacatagntgaccaatgcttaagtgatatacaaagtccaaaaatctttgtgtaagatacagtagatctaagtcatcccaagccaagataactggcatanaatccactaacaatttttcacagggtagggcaacataacactaattacaataatacaaccacatgagataggcaagcaaggttagtagtttgatttaccttatctagccactaagtgtgtatttattttgcattagagtgactactctcttaaagaataatcgatttggagttcttgatgaatgctgggtgtgtctatatacttctagcctagagcacaaacttggtggcagagtgcagattttttgttctaccatgcttatggttggagtagaatgc

SEQ ID NO: 206076 - DNA, 450 bp, Glycine max
  unsure (1)..(450): unsure at all n locations
cttcaaggtcatattttctggtgtgagtgtatcttatttattntgtgcagtttgaaatgatcatagttccttttttttgtgtgcttagaatgtgccatatgagaactgaggtacattacttttatgtaacctcatattaagcaagaaatgtggtttttattgtattggtgatgtaaagttataaacacataataacaaaacatttagtggtagaaagattactaattctcttgcagcttgatgctctttaagaatttgattgacatgtacacaattacgtgcactacccttttacttgggggaaggggaagaagaaacaccttaatcagcatctttgactaatgctttatcttttcaccaatactgtgttactatagggagtttgctttgtctgtcttaatgattntatttattgcaaagagcaagaactggtggaaattacttcaactc

SEQ ID NO: 206077 - DNA, 423 bp, Glycine max
aagacttacatagttactagatgagttcaataatcaaatgtgataaaattgttgagcataactataaatgttattcaatctatcatgttatcacttttagtaaataattattctttattttattatcatatttattattttattaaattgttaattcgacaagtttttgattaaattataggcttgttatcatgaagagattatgataatgagaaaaagttatttataatttcattctaaattgttcttgattgtaagattattgtgaatatgatatcaataatccggataagttaatatatatctaatggtctctattggataaagatcaatagatctaatttattaaattgcatataaagattatgtatatgtggatgttataattaaagtgacttaattgagaattcctaatagatacta

SEQ ID NO: 206078 - DNA, 476 bp, Glycine max
  unsure (1)..(476): unsure at all n locations
ctcaagctttccttttgaaaataatgaacatctaattgctattagattctatgcactgtgtaacttttctggtcaagtgcgtgcatcatttangtaagaatttcctattcacatgctaaagcatcaacaaatctattcaattattttctgacaattggcccagctagcaaaaccagaatgtaaaccattccattattgtttttatttaaaataataaaaactaatataatttaggcttaattttatcagacaataaaacctaagctaataatgaatttaagttatagtatttctcttctccttaattatccttttggttctcatatagtgtttgagcaatatgaatctggtacctttttaattgtttaatcagaaatgctattgacatgcactctcattcatattattttatcggtccttaattataagattnnttttaaaaaaaattataagaattttttntaatttctagatga

SEQ ID NO: 206079 - DNA, 459 bp, Glycine max
cacctgcggcatgaagcttaaaccccttgacattactaaactagctgtaattaatttcaatcacaagcaaggtatcctaattacatgcaagaaataagaatgaaaaatagaaaagggaaagaaaagctgggttgcctcccagtaagcgttcttttaacgtcactagcttgacgcatcgtcctattatccaggatccaagagagttcttacttcaaggaccttctccttaggtcttttttcctccatcacatgcaatttaagacagacattttggctaggtggatctttgtcctcctggaacaaatcaaagctgatcttctgatcttttatgcccatctgcagtatcttctttcccgtgtccaccacgcagcttgtagtatacatgaatgggctgccaagaatgagaagaatgtcaacatcctcttctatgtctatgacaacaaaatcagctggaaatat

SEQ ID NO: 206080 - DNA, 455 bp, Glycine max
  unsure (1)..(455): unsure at all n locations
tggncttcaccgacgaaaggatcaaaatggttctaanaatatgcaattctgancancatgctctgataaatgcaaaaaataaaataaaactagggcaaatgaagagggtgagaatgagggagaagcccatgttgtgactgccattcctatacagccaagtttcccaccaacccaacaatgtcattactcagccaataaacaaaccttcttcttacccaccacccaattatcgacaaaggccatccctaaatcaaccacaaagtatgtctaccgcacttccaatgacgaacatcacctttagcacaatccaaaaacaccaaccaagaaatgatatttgcagcaagaaagcctgtagaattcaccccaattccagtgtcctatgctgacttgctcncatatctacttgataattcaatggtagccgtaaccctagccaaggttcatcaacctccatt

SEQ ID NO: 206081 - DNA, 440 bp, Glycine max
  unsure (1)..(440): unsure at all n locations
agcttatagaatatataataaaagaacaatgacttttgaagagtctatacatgtttcctctgatgagtctaatgccattcttccaaggaagggatttttagaagatatttcagattccttagaagatacacatattcatggaaatgactctaaagaaaaagatgaaggaagcaatgaagattctcaagataatggagttagagcaaataatgaacttccaagagaatggaaagcctcaagagatcatcccctcgacaacattattggtgatatatcaaaaggggtaacaactagacattctcttaaagatttatgcaataatatggctnttgtatctatgattgaacctaaaaatataaaagaagccatagtagatgataactggatcattgccatgcaagaagaactgaatcaatttgaaagaaacaatgttggaaact

SEQ ID NO: 206082 - DNA, 477 bp, Glycine max
  unsure (1)..(477): unsure at all n locations
aagcttctgtaatctcctgaacatgaacacactcatgctctgtgtttttgattattgcaattctcatggcttaccagacgttcagatgggcgaccggctttctttaacacctggatggtggcagtctgtaaagtatagtaattgtcagcaaagactatacatttgaatgaatgacaatcatttgggtggcaagaaacagaccagtgcaatctaaagaatgagttctagtcatgaaggcaattaagaataagtagaataactaattgatatatgtcattatacaatttgtgcagaattttcaaatggtaaacaaccacaagtaacaccacccaggggagagagggcaaagaanatataatcattccattcaacaaaattatcaattcttatcttataggctaaggttgttgcattaattttatgtatctagtgagaaagtcanttttatgagtgaaaggagtaaatatgggtcataca

SEQ ID NO: 206083 - DNA, 460 bp, Glycine max
  unsure (1)..(460): unsure at all n locations
agcttatgcacacaaattaacctaatggttataatttctagtgtttggaggtccaccctagccgtcgtctttctttggtctgtaagtaaaactctaaatagaacaaaccacatagcaagagacattttacaaatgtttcaagaacatgtgtctgttgttatttgttgagtatggcttttttgacaggataaacgctcaaattcagcctactaccagatttctctagaaggaatttagaatttattgttgttaaattttcgaataaacattgatgctntaaaagtaaactaattcaacaaataccaatcttaataaacaaatgactgacattagacaacttatatctaactagtcatgatcaagtttatgataaaacaataacacagatcaaagttgagcataataataatgtcactacctcaacaacacaactctaattngatcctttgacactagacac

SEQ ID NO: 206084 - DNA, 461 bp, Glycine max
  unsure (1)..(461): unsure at all n locations
ctataaatagggggagaagngaagttgtataagggtttatttctcttaggcacttctctctctctcgaaattgttgaggaaaattattttcgtgaagaaaatccaagccgaggcgcttccgtaatgtttccgtaacgtttccgtgagtaattacgcgaagattctcgaccgttcttcaagattcatcgttcgttcttcgttttcttcagtcttcaacgggtaagtacctcaaaccgagattttcaattcattctatgtacccgtggtggtccacattttgtttcatgtanttttattctcgctttcatttgctttttatacccccttttgacgtgcttaagccatttatttaagtcatttctcgcttaatctaaaaataaaataaatttccaccgatcgttngaattgtattgtcccgttaatttggttaaaatgaattccgaccgttcggtcgtgccgta

SEQ ID NO: 206085 - DNA, 455 bp, Glycine max
  unsure (1)..(455): unsure at all n locations
agcttgccgctggagctgacccatttattttcctaactccttaaggctggtgacatctacgcccttaatcttgacatgatagaatctttttccgatttgatttgtccccatcatttacctaaaaaggggtgaatcaaggctctgatatgaatgatgcaatgcacatgcatgaaaccaaaagaagaataacaagtggtaatttacatatacgagaccganaaagatccatctttgtaatactacgctctaggcattgcggcgccccaacgtatgcattaaaaagtgacgtgttactctaaagagacaagatatcactagatatacaacaaaactataatttatgtgctattcgcagaagaatgtatgagaacaaatggtacagagcgtgcttgctcaatgcccctatttngggacgtataggataatatctangggtctctaataactactcccaa

SEQ ID NO: 206086 - DNA, 477 bp, Glycine max
  unsure (1)..(477): unsure at all n locations
gacacaagaaactaagcttatataatcgattacatagtggtttgttaaacaactattttattcaggagtctctactttaatcaatatcgattgctcctctttctataagtgtttaagaagtatacaagaagactttaatcgattactttgaggatctaattgattacattgttcttgagttgtttccaatttttgggaagaatactttaatcaattgaaaagataatctaattgattagttcattgaaataatcaattacattgtagatttaatcgattacaggcagttataattattttctttataaatagttaccttttgttctcttcaaaatacaatgaaatgaacttctgagtgagcttgagtcacgtgttgatattatntaaagaaataagagaagaataatgcttagaaataatgactcacaacttctaatcnttngattatgaagatgttttgtgataagtgagttgtga

SEQ ID NO: 206087 - DNA, 451 bp, Glycine max
  unsure (1)..(451): unsure at all n locations
agcttatagaagaaggctattatgtgcatttgaactgttttttntgtttatgtatgtatattagcattgcttgtaccaatttgcttatatattggcgaagtacgaagatggtgagtggaaaaaaataatataactaacaaataaattaacgagcattaagctgaacgcgtgataggggattaatgcaccaaatggtcgaagcacgatactttctacagactaaacatttaatgcttctaacttgtctttctattgcaaagtcaagtgacgaccttatatgaatttccaagagcacaatattgttaaccatgcgcggagttattataggctccaactctcattgttactcatccttacaaacgtgagaagaaacctgtttactcctcagctctcacttccccttctccttgtcacccgcatcaccaccaccgtaccaaggcttgaagccacc

SEQ ID NO: 206088 - DNA, 465 bp, Glycine max
  unsure (1)..(465): unsure at all n locations
ctttgtgttgtaaatatacaactnggggatctttattctttctgttgtgtgngacatgcatgcatgcatgctaccacttataacactntttgtttgttttactctctgaaaatgctttgagagagattcaagaaagcatagaagctccattgatttgccgtcgtgtcatgatccatgtaacacgagccaggtgccctcattacgtgtcagcagcgatgtgatgttggtttcgtgctgtgtgtgagcataagcccatacttttcggttgtttgtctttcatgtgagatgatcgatcctggttgaaggtgatggaatcgatcaaaaggtcatcttctcttctcgatcataaaagagttcacattacaaccaaatgaacaaaaaaggtaattaaaacaactcgcgctcgatcgttataaaggaattaagccccgatcgatcggcttgtggtttaatttatcttatcaa

SEQ ID NO: 206089 - DNA, 443 bp, Glycine max
  unsure (1)..(443): unsure at all n locations
agctngctaacccatggaagctcctaatatctcccacactntntgaggtgggccattcttggatggccttgattttctcaaggtccacttggaccccatttctaccaactacaaaacctaagaaaactatattatctacacaaaaggtacacttctctatatttgcatagagggtgtttttcctaaggactgaaagaacttgtctgagatgtcctaagtgaaaatctaggctcctactatacactaaaatatcatcaaaataaacaactacaaatctacctatgaaatcccttaagacatgatgcataagcctcataaaggtgcttggtgcattagtgagcccaaaaggcatcactagccattcatacaaaccaaacttggtcttgaaagcagttttccactcatcaccctttttcatcctgatttggtgaaaccacttttaa

SEQ ID NO: 206090 - DNA, 461 bp, Glycine max
  unsure (1)..(461): unsure at all n locations
ntgcctcacaccacanaatngactntctgttataatatattttttatacataatataattactttggtaacacctgtcatattaaatatatcgtgattntttttgttcatatatttgttttcctgcatttttataaatatcaatgttgcttctggacattgagtcaacaaaaaaaaatactttggctgtctacactaccacagatacattcacaatgattgatatgactctccatatccaattttcccatgctgcattgaatgctcgacaatccttaaattcattcgtattgcgggacttatacattttcaccaaccactatgtcaattcaacatttattctccacaaagcacttcttcaacactcaacagatattcagttttcattccttgaagaanaaatagtaaaactgctcagagactggcttcagaatcatccgctgacttaacgaatacaagtag

SEQ ID NO: 206091 - DNA, 437 bp, Glycine max
  unsure (1)..(437): unsure at all n locations
agcctggcctctgagttgagctcttaacatagcagaggaaaggaaattcttgaaatgatggaagaaggatttgttgtaaaaatgtctcctatntcaagggatccaactatgatttaaactataagcttaaagggtgtgaggtcttgaaggaattacctcctatggttgtaaaactctatgaaaagataaaaaccttgaaggataacctacgtaaatttgtttgtggtcataaagccctggacaaaattattaaagtgcaaagaaacccccaaacacaaatctgcccatggtttcaaaggcaaagaggttatggatagtgaagaagtcattgttttctatttctgtggaaaggtaggtcatgagactcataagtgcaaggaccttcctgaaaggacaacccatcaagggtccatccatgctaccacacccacaactac

SEQ ID NO: 206092 - DNA, 458 bp, Glycine max
  unsure (1)..(458): unsure at all n locations
tcccagatccgatcatggaaggacttggctactgcctttattatgctttaccagnacaatatggacatggctcccgatcggaaccagcttcagggtatgactaaacgagagcatgagtccattaaggaatatgcccagagatggagagatctcgcagcccaagtcgtaccgcccatgacgaagagggagatgatcacaattatggtagatacgttacccacgttctactatgaaaagctgataggctacatgccagctaactttgcagatctcgtcttcgccggagaaaggattgaatccggactacgaaaaggcaagttcgaatatgctgccaatatggcccccaacaacaacagaagagccctagtagtgggcgcgagaaaaaaggaaggagacacccacgcggtctaccaccgcccaacatggatgaaagcaccccanaatatccaaagctcata

SEQ ID NO: 206093 - DNA, 438 bp, Glycine max
  unsure (1)..(438): unsure at all n locations
agcttgaaactggtccaataatctggttctaactatcaagtttaagttaactagctgcaatatcaaaactaaagattttttttcttaactatgagtttgggttattattattgcaggatctggttttgcgtcaaaccagatgtttttatttgggcaaattgacatgcaaatcaaactattgccaggtgattctgcaggcactgtcctggcctattatgtaagcaaccctttacccttcttttttcttattgttttaaatcataaaaatatagactcattttaacttggcaatatattattacagcttacctctgatcaacctaatcgagatgagatagactttgagtntcttggcaatgtctctgggcagccatatattctacaaacaaatattttcgcagatggaactgacaatcgagaggagaggatttatctgtg

SEQ ID NO: 206094 - DNA, 460 bp, Glycine max
  unsure (1)..(460): unsure at all n locations
ntgaaatagattatnaggacaatgttnttnttatanatttacaataacaattaaaaatgttagtgcaaaaaaattaccatcaacctaaaaatgagacagaaaatgatagaaaataagttaatattattggctcccttaacgttgacaatttgacataagtgttgacctgactactgcaaccatagtgtcgactttgttaatatcgacctctgctaaaacaaattatcataaaagaatttaaaataacaagaattgattgaatataaaatataagtatgtaataattatcataaaacaaatttctgacaaattgaataagaatntagaaaactgcaaatttattttaaaacgttataattttaatttgttagattctntaagttctatataatcagataagtattcgtcgagaggtcgagctaaataaaatggcctaattcttaaatacttatcatattct

SEQ ID NO: 206095 - DNA, 443 bp, Glycine max
agcttcttatccaaagctcatcttggtggtgaagctccttcttccatggcttattccctagtggatggagcctcctctcacctcttctcgtttgtcttccgctgcatctccatggtggaaaatcaccattaaagtaccccattgaagctcaaagatccagcctccatagaagccccacaagcaagcttccatcaagtggtaatcagagcacaagagcttcaagtaggtgctccttaaacctccattaatttttttctttaccttctcttccattgttgtttcttcatttttctccatgtatctcctcacacgtcttgtgctaaatgttgttaacatgattctttagagtttccaccgattaaacttgctataaaagctagaattgattttctatggttcaaatttcttgttcttgttcttgaaccatgaattgtgttgagttt

SEQ ID NO: 206096 - DNA, 458 bp, Glycine max
  unsure (1)..(458): unsure at all n locations
tcattggagcttgtangcctatgatcttctttatcaatttattccnnngcttctcggaagctgaatggcagcgtaatggagaaggaagagagagaggaaatgccacttcaaggagaagatgtgtctagaagaagcttaccaccataggaggccatggataagagcttggaggaagaaagagatgaatgaagggagaggaagagaagagcacgaaattttgtgctctaaaagagctctgaaatctgaagtttaattttcaaatgatcaaagttgaaaaaatgcacacacaagacctctatttatagcctaagtgtcacataaaattggagggaaattataatttcaattcaaatttcacttgaatttgaaaatgagattgtggagccaacatttcactaattatgattagtgaattttagttatgggtcagcccattcatccaagatcaattccaagat

SEQ ID NO: 206097 - DNA, 393 bp, Glycine max
accgcatgagaagttccatatgatgaaaataacgaaaatcatgagtaacctactcctacctgtcactaaacgtatgcaaaattacatgaatgtgcatcctaaatatgaaggaaaatgcatcccataagtggtgccatattgtatgagcttgtggtattcttaatctaattgagaatttgtcaataaatcatgtccaaataaaattcgatatgaataagcgaaaataattctacaaatgtataatcaagtttactgatcaataattgagaaacagttatcagtacattcaaacgatgttattttcaagtaagaggagtcaactcaagaggtctaggaatatgacaattttgcctaatcttgacacatacttttgctaccacatatacaaaatct

SEQ ID NO: 206098 - DNA, 325 bp, Glycine max
gcttgaacatatgaacttgttaacatgactgggaattggccaatccgaatttgacgtgacatttttactgaaatctctagacatctggaaaaaaaatagaaaaaaagacacaagtgatttggaaaaagtgaacaaacgataaatacacagttggaggaaagtactgtcatgaagaaaaagtgaaagaaggtgctgtgcttgactcaatttgtctatatgaggccatttataccaactagtttaaattcactgaaattatgcaaacaaggccaaacaaaggtcttgagctttttttgtttttactctactctaaccatctagttct

SEQ ID NO: 206099 - DNA, 458 bp, Glycine max
  unsure (1)..(458): unsure at all n locations
actcaagctngttatcctaggctcatcttggtggtgaagctccttctttcatggcttattccctagtggatgacgcctcctttcacctcttctcctttgtcttccactgcatctccatggtggaaaatcaccattaaaggacctaattgaagctcaaagatccagcctccatagaagccccacaagcaagcttccatcaagtggtaatcagagcacaagagcttcaagtaggtgcttcttaaacctccattaattttttgctttaccttctcttccattgttgtttcttcatttttctccatgtatctcctcacatttcttgtcctaaatgttgttaacatgattctttagagtttccaccgattaaacttgctataaaagctagatttgattttctatggttcaaatctcttgttcttgttctcgaaccatgaattatgttgagtttaagtttcttt

SEQ ID NO: 206100 - DNA, 426 bp, Glycine max
agcttcacatggagctacatcaggtggtattcagtactcatgtgtagctctgttccacttaataggaatagttcttgctagaatttactaataaacaatgggtcatggtctgagaccaaactcttaggcatactatgaagcttgcgaaaaatttccatgaaaagtaaggccaccgtatgagcagtataatgggaaggaagcatccccaagttaatacctttagaaaagcgatcaacgatgactaaaatagtagtatgtccatggtacagtggtagaccaatgatgaagtccaaggaaagctcctcccatgactgggatggcactggaagggggtagagtaacccgacgggctttcaagcttcatatttagtggtgttggaaatgatacaagctgcaagaaatgtttggacatccttccttaaccct

SEQ ID NO: 206101 - DNA, 482 bp, Glycine max
  unsure (1)..(482): unsure at all n locations
actcaagctnctagaagttggaacattcattntaactagacaatcgagatgnttgattttgttaaangcgaggaagagccatgtgtttacaaaaaggttagtgggagtgcaattattttcttagtgttatatgtagatgacatattactaattggaaatgacataccaacattgcaaggcacaaagattgggctatcaaaacaattcttcatgaaggatttgggagaagcagtctatattctaggtataaagatttatagagatagatataaaaggttgcttggactctcccaatctatgtacattgatactatcttaaagagatataacatggataattccaaatgaggctattttcctgtaggtgttggaattactcttagtacggagaattgtccaacaactcctgatgaaagagaacgcatgagcagagtaccatatgctagtgcagtgggagctatcatatacaccatgacttcaca

SEQ ID NO: 206102 - DNA, 486 bp, Glycine max
ttaagtcacctgcggcatcaagcttaaccaaggagagatggaccatttcaagttttataatcaatgacaatgcttacaaagttgagctgcctggtgagtataatgtttgttctaccttcaatgtctctgacttatctctttttgatgtagatgaagaatccgatttgaggaaaaatccttctcaagagggagagaatgatgaggacatgactaggagcatgggcaaggatccacttgaaggacttggaggacctatgacaagggctagagtaaggaaagccaaggaagctcttcaacaagtgttgtccatactatttgaatacaagcccaagtttcaaggagaaaagtccaaggttgtgagttgtatcatggcccaaatggaggaggactaaatggcaccacttttgtctcaatttagagtgtttagtttgtctaaataatggcccaatccttgtaatgttggctgacccaaaaatatgtttgggg

SEQ ID NO: 206103 - DNA, 481 bp, Glycine max
  unsure (1)..(481): unsure at all n locations
ctcaagctggcttctacacttgagatttcaataaccttgtaaaatcctttacaagcttagagccacaaaggatgtaccctcccttgttctctttgaacaaccaagtacatgtaccctctacttgaagcgaaccacaaaggatgtaccctcccttgtgttcactattacaaccaagaagctacccgcttcttacacagaattctcagacggttagttctttgaattcagtgtttgggcaaagaattctcagacggttagttctttgaattcttttggcaagagggagaaggaaagaagaagaagagaaaaatagaaggataacacattctttgtttttgcagaattntcctttcttcaaggaaagattgaacanaaacttagaatgaatntggcaaaggcttttctgtgttattggatattggcgtgtgttttttaaaacgcgtgtcaaggtcttatatntatagaaccttgataccttatg

SEQ ID NO: 206104 - DNA, 403 bp, Glycine max
agcttaagtgattgactatcacaagtattttggccaaccaaagaatgtgagcgggtgtaaatcactggcgggtcatcataaacaatctcgttcacttcttctaggggctcaccagtagtggaatcaatgttattcaaatctaccgtaacaggaccaaagacatcagagaaatccagctcaatatgctccgtgttcacagtatcaggaaggtttgcaggaaagagtaactgagtctgtgcaggtttgtagccagccatagtcaaaccagaaaactgagaggacaccatttctcacaccactcaacaataagggatctaaatatgctgctgctgatgatgaccaaactaataaagactatatgttaaccaccccgaagtttccaaaactcccaccgccgatggac

SEQ ID NO: 206105 - DNA, 462 bp, Glycine max
  unsure (1)..(462): unsure at all n locations
cttaganactcagctgagggttacgcatgaagttgttcggatgttaccactgttttncgattaatnttttaatagattgaagaaagggtgcgctatgccagtatgccacagaagatgtagaagttgatattaacttgtattgtacccggtgtaatatacaattttttttttttttattatccatggaaaattccaatatttggttaacaactttggtacaacttgttttaaggaaaacggttcaatacagtttatatatgtttttggtactatgatctttaatcagagtgatagtttcattttgataattataattntattcattgctaataactaataagcgtatgttaagtttaaacagatcttaagtataaatgtaatattttcttaaattaattgtacagggtgctaataagtaattactggtaataatangagttagataatgacgagagaatgatt

SEQ ID NO: 206106 - DNA, 457 bp, Glycine max
  unsure (1)..(457): unsure at all n locations
agcttataaaacagaggccggtgtatatattttgacgcaacccatatggcgggaaggaatgcttgctctgaacctaaacatgataaggctcacatgcattttttgctgcctcgccttcttgacctactacatttgagactggacaattcacttaattgaaaccgattgggtgaatcgggtccatcttagtagttgtactcgcaacaacaattgtagtagtgttatcctccatcatcttcctcgngctcatcatttcttccatcatcattgtcattttttccttcatggcctccatatcagccttcatttgttcttgtactttttcgatctcacttattattctagccttggcacgtgtctggtaagggtgtcctaaagcgcgatctttctctttgattacaatgattacgactttgatttcaaggaaagaatgatatgagcaatgcaaccaatgtgg

SEQ ID NO: 206107 - DNA, 400 bp, Glycine max
aaactcggccttctcttaattgtctttgggcttggcgaccaacatcaacaaagtactttcggcacctactatatgatgacttgaccaacgctgttattggaatgctgcgacaatctttcaacaccttattcacacattctgataggttggttgtcatgtgaccatatcgtcgtccagatgtatcgtaagccatgctccatttttcctttgaaatgcgatcaatccatcttgctatggctggactcaattgacgaaatttttctaagttctgatcaaacacatgcttgcaaggagtgtaccgctgcatcaaatttttatcatcaaaagttgtatgtagacatcaaactccaattaaattaatgtataaaataaaccttacccaatttcttgaacatctctt

SEQ ID NO: 206108 - DNA, 463 bp, Glycine max
ttaagcaccgcggctgcagcttaccggctgagtgatacgtttgcttgaacttggctcattacctgtcataggctttttttaaggctcgattcggcttacatgaaagcctggcttggcccaccagcctatttaaaagcttgcttaaagacgtctttgattaattaattattttaaaacctagtgaaatattaactaaaaaaagaaacttataaaattttgtataagtaatgtacaaatccaaaaataattgataaacaaaatcatattgaatttaagtcgttaaagcacaaagtatatcaaaagaaaataaaaagagtataatattaaaaaatgtatggattagagatggtttacactaatatagccaaacaaaaattattattagttaaagtaacaatctttaatccaagttgtgaatatataattatattaaatatcttttttaaaaaaatatatctacaat

SEQ ID NO: 206109 - DNA, 478 bp, Glycine max
  unsure (1)..(478): unsure at all n locations
gaaactcaagcttggaacatgagctgaagcatctcaagctgttctatctatctataattggctgcctcctgatggagttgatgctcccaaatacaaaatttgattgaactggggcagtttgctgacttgtgtggaggtagaggctgctgctgccggagtaaatgaaaattgaggagttgatgcactggagaactggcagaagtaacaaacacagtggatgacgatgatgtactatatgtggaaccaaatgcagacttattgggctgccaactaaagtagaacttggaccacattggagctaacagagtagaccaccaaagaggaagcaagggtgccaagttcaaaagatgtggtatgtcttgaagaaggaaacaacaaattcccagaaacaaaagttgtacttgctgcagggctggacttcanagtgattagtactgattatgagacaacacactctctctcacgagatggaagatgg

SEQ ID NO: 206110 - DNA, 373 bp, Glycine max
agctcgccgtaaagagatctagttttgatttatcggctgaaggaaccacttccgctcccgaatatgacagccaccattttaggagtgctgagcaccagcaacgcttcgaagctatcaaaggatggtcatttctccgggaacgacgcgtccagctcatgaacgacgagtataccgacttccaagaggagatagttcgtcggcgaagggcatcactggttacccccatggccaagttcgacccagacatagtcctctaaatttatgccaatgcttggcctacagaggagggtgtgcgagatatgccatcctgggtaaggagacaatggatcccattcgatgcggatgctctcaaccagggctgagatacccttta

SEQ ID NO: 206111 - DNA, 429 bp, Glycine max
acaagaaactcagctgggagagagcttaatggggaaagtttttggagtttaattagaggggggacaccacatcgtggtctatataggagagaagtcaactttgacttggtttcacaagaccctcattgatgaaagctaccacgagtgctacacatgctcctattaatagactacgtagctctcttgagaaaactaccttgagaagcttgtatgagatagcttccttgagaagctagagcctagctacacacacccctctcataactaagctcacctccttgagatgctatcttaagaagattcctatagaagcttgagcgtatctgcacatatctcacttatagctaagctcacctccttgagatgagaagctagagctgagctagccaccctctataatagctaagctcaccccgctgacagaaacgc

SEQ ID NO: 206112 - DNA, 388 bp, Glycine max
agcttctcgatacattatgcgcctaaattgtcatccgagttaaaggctatgacaatgtgaactgctctagagattccattgttcaatttccagcgtctcgatatattatgaatttgaatcggacctccgagataaaagttatgaccatttgaatttctcgagagcttccgttgttcaatttcgagcgtctcgatatattatacgcccgaatcggagcttcgtgtgaaaagttatgaccatatgaatttctccagagattgcggtgttcaatttcgagcgtctcgatatattatgcgcccgaatcggacctccgagtgaaaagttatgactatttaaatatctcgtgagcttctgtggttcaatttcgagcgtctcgatatattatgct

SEQ ID NO: 206113 - DNA, 348 bp, Glycine max
gaagactaagcttaactcggatgccgagtcggcgcatttatatcgtttttttgttccgagaacagacgctctcggaaattcgaatggtcataactttcacaccgatgcccgaatcgacgcactatatgtcgagacgctctatgttgaacatcggaagctctcaagaaactcctatggtcataacttttcactcagaggaccgattcaggcgcataatatatggagacgctccatattgagctacggaagctcccgcgatattcaaatgggcataacttttaacatagaggtccgattcacgcgcataatatatctagactctcgaaattgaacactctatgctctcta

SEQ ID NO: 206114 - DNA, 435 bp, Glycine max
  unsure (1)..(435): unsure at all n locations
agctaggttcgaggtacttatccgctgaatatcgaagaacgatgaagaacgaatgaggaacgtcgaagaacggttgaaatctttgcgagattcctcacggaaaacgttacggaaacgtttcggaagcgcctcggcttatattttcttcacggaaacaatttttccaagcaaattctaaagagagagaagtgcctaaggggctggaccccttccttcttcatttcctcccctatttatagcaaaataggggaggtggttgccgcccagctcgcccaggcgagctcagctcgcccaggcgagcagggttgcttcctccagaagcaaccgccttctggaggaatcttctggagggcccaaatgggcctgggtgctanttgcacncccatttttactaagtacacccncctctgctgtttgttggagattcttttttcg

SEQ ID NO: 206115 - DNA, 464 bp, Glycine max
  unsure (1)..(464): unsure at all n locations
agaaactcaagctagaaggggcttcaaggttgaaagaaattatattgtgggagcacgaaattgaaggaataaaagaggaagagaagtggaactttgaagtgtgtctcataagacttttattcatcaaagttataacaagtgttacacatgcttctatttatagactaggtagcttccttgagaaaaattccttgagaagcttctttgagaaaacttccttgagaagctagagcttagctacacatactcctataataactaagctcacctccttgagaaacttccttgagaagattcctaaagaaactagagcttagctacacacacctctctaatagctaagctcacctccttgagatgagaagctagagcttagctacacacccnctataatagctaagctcacccncattccananatacatgagaataccaaaataaagtccctactacaaagactactc

SEQ ID NO: 206116 - DNA, 430 bp, Glycine max
  unsure (1)..(430): unsure at all n locations
agcttncatcagtgttgattttgactgtctgaaggggcggaggattccattacagtgtctgtgcgtgaagaaagagccagcatccaagaggatatttggttctcaatgtaccaaagacgccaagtgaaccaagttgttactgcgaagaggacgtggtttgttcctcgagtattgcttctcaaccactccgctgcattcttgttgaaaaattcagcttcatcgggaagcatgtgactggctcgccatatttgctttgctcttggacagtctctaagacaatgaatctaatcttcttccacatatgaccgcacctgaaacaaaaagagaaacgagagatgtgccgcttaaagcggaaagagttaattggtaggcatcctctgtaggaaagccaaatgaggtgtttgatgtccccaaataagtctgtctggga

SEQ ID NO: 206117 - DNA, 445 bp, Glycine max
  unsure (1)..(445): unsure at all n locations
tgtcccctgctctaacggcactatcccactaatcccttttctacccttaggcataatcttgaaggtaagctggcctcattactctccttttgggcttttccatattctgcacctctgctgaatgttctctttgtacccctgctctgtgatctgtgttttccctatcatagtctttttaaacaaaagggtttcactgtttcagaagcagcagatagaaggttgaaatggagaaaaagttttaagtaaagctttgtgatcctttaccaccaaatcatgatcaagtgatatataccatatgcatgatgcatgaaccctacatgagagaaaacgatcataccagcgtatatatggngcagccacctcaactaattaacaggaaccgtgaaaatcaatttgagctntgagaaggtgtggtggtgtttgaagggtggggactagtagtagt

SEQ ID NO: 206118 - DNA, 402 bp, Glycine max
  unsure (1)..(402): unsure at all n locations
tgccattaatagnaaatagcaaagatagtaccgttagtgtagctttttcactcatggggggaaagaatacatagattttactcaaaaattataggatgacagaaacaattgaagtacactatatcaagaaacagactaaagtaatgaaatacagaattataaagagagtgcagcagtacgaagacacaaaagcaacaaatcacagccattggtggcatgaagacaaattggtacctgaactagttttttagcttcatcatcaacatctccacaataaagagttgctgatgtgtccccatgatagccctgcaatcataaaattaaatttcattaaccacaatacnagcttaaattnanaaatactaatagatgtaattgaaaccaaatacaatggggaaacac

SEQ ID NO: 206119 - DNA, 419 bp, Glycine max
  unsure (1)..(419): unsure at all n locations
tgagtcgaagactagcgcgtttatattaatttattaactttcttaccaactggtttttatgaatacgtttataaaattataatacgtgcaatatacatagntctctttttgttttattcagaaaaatcacagtcagcacaaaaaaaaattatatcctacgaacttgtaagttcctcctgcatatctactatattgtagtactaatatactatactcctattcgaacttttcttgttgcatttggataataaattcagattctttcctcctctgtgccttatggtcaaagcatataaaatttacttaagaatttatgtcaaatgttgtagtagttatttactgttataaataatcttgtcaaagaatataatttcagcaatgctacttggtttcttgaaaggcaattttttaatattcgt

SEQ ID NO: 206120 - DNA, 210 bp, Glycine max
  unsure (1)..(210): unsure at all n locations
gagctcaactactatggactntatcgaggataanatcaaatgtatgantagtaaatntcttgtcaagaattganatccgggtacttatctaagtcctcgatttacttannatccacttgcaccactatatcctacttgactggccagctagcattatttatagaaaagatgcgcggatttcatcactctctntagctccagaactatcac

SEQ ID NO: 206121 - DNA, 302 bp, Glycine max
  unsure (1)..(302): unsure at all n locations
atctctgccatagaactcttctgttcctttcctttgctntataatttccatnntgttctgcaataaaagaaatcagcanaataaccaaaggactaattctctnnttatttgtacattggaatgacaaaccatagcatactctannactcttaagtatatgtgttaataccttctaanactntattgtggacctctntatctctggataacttccatatcatcaagctcataagagtggcagatgtgccatgactagcaacanataaaanaaaatcaagtgtcagttataaaatcatcatcta

SEQ ID NO: 206122 - DNA, 492 bp, Glycine max
  unsure (1)..(492): unsure at all n locations
tcatgctagctacaagtcaagcaggatctgaggaagagtctaaaattccnccattgttntaaagcatagttcgactaattacaaataacaaagaatttgtgcttctgcaataacaactataatatttatcaagtataaactaataagcttaagaaatcaacaaacataaacttaaacatgaccacaatcaaaatcatcaatgtagttcatgttctaagatgagccacaactaaaggccaataaaattcagcaaaacaaacaccgaatttgttagattttaaactacgaattgggtccatatatttctaagcacaaacaaactagtacaaatctggctaaattgcatcaagttntctaaaaggctattagacaattcatatgatcattnatggtctaggcttataantatacaataaatatgaacctagtagccagctttaaaaaatgacactttttcttaaagttgcagctacaattgaaatcaacatacat

SEQ ID NO: 206123 - DNA, 388 bp, Glycine max
  unsure (1)..(388): unsure at all n locations
aacttgaacgatcttctatgggcgtcacattccatccaaagatgangntnacttatcttaaagtcctcataatctttttgtgcttgtgcacattccatccatagatcatgtctctcttcactctgatgatcatgaagttcatttagttcctttagatatttttggtgcctcttcaagttagctttcaactcctaaaagttcttcaattaagtgtatttttctatggcagctggcttattctcaagacatagcttggattccttattcttataaacttgacaaacatcacatgtctgagtggactcctccaatgaaacatttactttatcttgaaaggtgttttcaggtccttaaagctttggacaacttttgaaaactttcgcagatt

SEQ ID NO: 206124 - DNA, 231 bp, Glycine max
  unsure (1)..(231): unsure at all n locations
caagcatctcgatatattacggaactcaatcggacatctgagaanaaagtatggtcgtaagaattngacagatcttctcttttcaattttgagcgtctcgatacattacgggactcaatcggatatcccgagtaatagttattgccgttggtgttgctacgagccttccatttcaattactagtggctcaatatattaccggacacaatcagacttctgagaaataaagta

SEQ ID NO: 206125 - DNA, 198 bp, Glycine max
  unsure (1)..(198): unsure at all n locations
caaatatagntaactttgttagtgacaagttagatgatgatgatttcgacttatatatgctttattctaccatatttgttcttcttaacttaggggaaagtgaaagtcgataattttgcaccccacacagaaattgagacaagatatgaggagagtattaagaactagctacaggaaatggtgaacaagtctatatac

SEQ ID NO: 206126 - DNA, 169 bp, Glycine max
  unsure (1)..(169): unsure at all n locations
ctcttatctgaagagatatggatacaatnttttgaaaggagaacaataggatttggaaatattgatacctatttgcaatgataatctgttaccagcaanatataatattgttactcgtggcagtgtccaattgtacaagagtaagtactgaagctgagttcaatctaca

SEQ ID NO: 206127 - DNA, 394 bp, Glycine max
  unsure (1)..(394): unsure at all n locations
ctctgttatgtttccttgaccgaaatggcggcagaactgngactagtggtgcttgcaaaccactgacatccgaccacccggctatcgcaggaaactggatgcctaacggcagctctgcagcacaataaggacaaacccaacaggagctgggggtgcactgaattggtaatggatatggcttgaacatacaggggacatcagtaaggaacgagtaatgcttgatcatacacgggatcatccactaacagcagacctagcttgatcatcnaggggataacactaaaggtgactggncttgatatacactgatatccaggtgcatgataacagtggacatccgctttgcatatttagggataatacttgacatcagtgatgtcaaaactaaacttct

SEQ ID NO: 206128 - DNA, 283 bp, Glycine max
  unsure (1)..(283): unsure at all n locations
gctagtggagttggcattggggctggtttgatacaaaacaaaaggcctatagcttatttctcggaganaatgggaggagccagattgaactattgcacctatgacaaagaagtctatgccattgtgagagctcttgatcattggaatcattatttgcgttctaatcactttatattgcattcagatcatgagtcattgaagtatatcaatgggcagcagaagttgagtccaaggcatgctaaatgggttgaatttcttcaatcttttaatttctcttcaaaat

SEQ ID NO: 206129 - DNA, 278 bp, Glycine max
  unsure (1)..(278): unsure at all n locations
ttttttnacgcaataaacggttatattggttaaaataacttaggatggagtatggtattttgagtggtacctttttgactcttttataaatgaaagcaatgctcataggaaaaatttgcgaactagcaacgttgaactacagatataaggctcacctcgaaagacagatggtgttaaaggcttacactgttccttgtttttgcccagtgcctaaacaattcttctactttcatgacttactatacgaaattgttgatcgcctgaaattagttataata

SEQ ID NO: 206130 - DNA, 319 bp, Glycine max
agctctactaatgcatgaaacataataaaagggactgcgtgcctccaggaacgctcgttaatgtcttagctgatcatattcttcagggctgggcaacttggtccaccttcaacctttagatactcttcactgcaacaacatctggccacaatgctttcttatcaataatagactgactttgactcatgccatcctaactacactcccaatgccacaatgcacttgcagtacatgatagatgccatgacaagggatctacatttttcatgcctgacaacaatcactaggaaggaagtctactcgacacacatcttatact

SEQ ID NO: 206131 - DNA, 509 bp, Glycine max
tgaatggcattgacccaaataaaacttgagtcatcaactttagaatccccaaaaccaacaacaacaaaatagactgtggctgactatgcctggacaatacaaactctcctggcctaagaagacataggcctcaccagagtaccaaaattggtcaaaaagacctgagcaaaaatggccttataatcatactatgattctgaaacagacctactaaaacaaatccaaaaggccaaacagaccataactgcctgtaaccaaaaaccaagccaaccgttgactcaacaagaatcaacaccacaacccagcaatagctatatctcatacaacaaattcttcaatgtcttacaaatggaactagaatactgggacaagaatcctgtcaaggcaaccgtcaaagtattctccccaggattccattatatgccaacgaccacgaataacaccagactattgtatacttcatcctatagatacaactcagttttaataacacttcaagaccccaagat

SEQ ID NO: 206132 - DNA, 162 bp, Glycine max
  unsure (1)..(162): unsure at all n locations
accgaagcgctgagcannatcanacgacaataactntntactcggatgtctgatngagtcccgtaatatatcgaaaagctcgaaatngaatgttgaagctctaagcannatcanacgacanaaactntntactcggatgtctgatngagtcccgtaatatat

SEQ ID NO: 206133 - DNA, 413 bp, Glycine max
  unsure (1)..(413): unsure at all n locations
actcagcttctacattcnatttcgagcttttcgatatattacgggacttaatcggacatccgagtaanaagttattgtagtttgaatttgctcagggcttcggtattccatttcgagcgtctcgatatattacgggactcaatcggacatccgagtaaaaagttattgttgtttgaatttgctcagagcttcggtattccatttcgagcatctcgatatattacgggactcaatcagacatccgagtaaaaagttattgtagtttgaatttgctcagggcttcggtattccatttcgagcgtctcgatgaattacgggactcaatcagacatccgagtaaaaagttattgtcgtttgaatntgctcagagcttctacattcacattcgagctgttcgatatattacgggactc

SEQ ID NO: 206134 - DNA, 193 bp, Glycine max
  unsure (1)..(193): unsure at all n locations
cttactctctctanacatattagttttgtggtatgcaatcaacanaaacttnctcagtaaactgaatacaatatgattaacggggtagtacactgttcgttatcgttagcacaactctaaacatttagtcatgtgtntcagagtaacanacgaagaaataactacactgtttgattgatatatttcaccggac

SEQ ID NO: 206135 - DNA, 244 bp, Glycine max
actcactcttttattaacaaaaacacaacagtgagcgaggtcaacaataaacacgcatatattgagtagatataagaacaaatattaaaactattacctgcgacgttataatctcttagaactctatccatcattacctctaatataaatagaaaaacattcatgcacatggtgcactaatctacacttgtaacaatatttaaaagagccatatacacgtgatcgatgactatcatataaaaga

SEQ ID NO: 206136 - DNA, 387 bp, Glycine max
  unsure (1)..(387): unsure at all n locations
tacctcaatggcaaaagtggtggagacgtctcatcggatttcatccatgcgcggaatatgaaccaacaagtatcggagatgtcctccaatgctcacgctcaagaagagaagaagccaacaggtcaaaggcgcatagaagataatgaagcggtgcaaggaggagctggactaacacactgaccagtaatgtggagggaggaaatttatattntgtgaagggcatgttcgcccattcgcttaaaatgctgggtgcacctagaaacacccaggcttaaaacattgcggtccacctttcggacagcccaaacccttccaatacctactggatcaatatagaaaacgcccaacatccacattgggtatatataccgcaaatatcttggtctt

SEQ ID NO: 206137 - DNA, 399 bp, Glycine max
  unsure (1)..(399): unsure at all n locations
ttttaagataagaaatatgagaagaatggtattctaattattatgacaaagagatatgaaattatcttaaataaaatctatttttttaaaaaggcctaaatttatatctctttaacattataaatagaaatatatacctgagagtaaagtgtacgagacaaacaagaaaatttcaaatctagtttttagacttgaaaagtagaaagagtgcttgctctttagagtttcactcatcaatgatagcagatattggtcgcgatttggatacacgtagagtcttcacactattgaagaaagattttgttatttcaagaacgaacatccaggtatacgcatctatctctctctatttattatagacgnatatctgttaatgcaaaatatatagaacataatttt

SEQ ID NO: 206138 - DNA, 192 bp, Glycine max
  unsure (1)..(192): unsure at all n locations
tatttagccactttcattataagaatcagtgtacattgttacacgagactaattgcttatctnatttccagtcttccaataatctaatctaatttctaacacagttcattgacttanaataacctatatatganacaagactaattctgatatctatggattcctcgagccacaatccatttataggtctgg

SEQ ID NO: 206139 - DNA, 446 bp, Glycine max
  unsure (1)..(446): unsure at all n locations
taatccccttgaaatgagggtaggagttttgtcctggattcacctagggactactttccttagcacccttatgttcaatatgttcgataaataaaaatagctttttttttgctatatgcatgagagtttcaatgctagttgtcacacaaatgtattacacaaaagtacctatcacataaagagtggctatgcaatttataatgcatcaagaagttttagattgtgtggctacattctttggaaccaaaggcattgcatggaaaaattactacatacccatatctgactggaatttctattttcctgcatggcttctttgagggacatgtcaccacacattatgcacgatggtggaagcagtcaatactggatcatcatcgngattttgcanagaatattactcagngaaatagtagtctatgcaatgatgttggtgtttccacctg

SEQ ID NO: 206140 - DNA, 413 bp, Glycine max
caagcaccgactcactgtgcaaaatcaatctacactgcgtataatatctcaacaaagcccccaatgacacctacaggaatacttcttcctgcatcttgcctttacacttatttatctcatcaacaaacacatatgcctaaatatgttgtctttatctgaccaagccttcctcgtcagaaatggcgggaggtctatgacatgcacctgaaacatgcaaatcgtcgactgactcttataaacgaagtatccacgcggctttgtgctacaactaatttttttttacttttgtaaacactatgaaaaattattttactgtgaaccgaaacacatcacaatatttgctaacccacaacgaccttcctctttggaactaccttcattaataaaaatagaatgtgcactcggctcggata

SEQ ID NO: 206141 - DNA, 240 bp, Glycine max
  unsure (1)..(240): unsure at all n locations
gcggccgncaaagaagagcatgcagtatacacgtattatttcgagnaagaacaataacaaagggctggctctatcttttgtgaacccgttaaatcgggctagaggggtgaaacaaccggaccatgaacatcagatgcaccaaaacaaactgcgagttgatacgagcacccagcaatattgcaggggcacgcaccaaacagtgaacaggcgaaactgcccctaaacaattattcttccgga

SEQ ID NO: 206142 - DNA, 209 bp, Glycine max
aagcaccggctgcctaatattacgccaaagacaactcttttcaaaagatgctaatgaactaccatcacttctttcgacacactcaaaatggtatgtgactcatattacgtattagattcaccaaaattggtatgtcaatactatgacgtcattcgacatcacatcaaaaattgcgcgattgtcaagtaacatattcacgctctttacga

SEQ ID NO: 206143 - DNA, 352 bp, Glycine max
  unsure (1)..(352): unsure at all n locations
cacttgcacagtggccaaagatgcatgggagatcctganaatcactcatgaaggaacctccaaagtgaagatttccagattgcaactcttggctacaaaattcgaaaatctgaagatgaaggaggaagagtgtattcatgacttccacatgaacattcttgaaattgccaatgcctgcactgccttgggagagaggataacagatgaaaagctggtgagaaagatcctcagatccttgcctaagagatctgacatgaaagtcactgcantagaggaggcccaagacatttgcaacatgagagtagatgaactcattggctctcttcaaacctttgagctacgactctcggat

SEQ ID NO: 206144 - DNA, 386 bp, Glycine max
  unsure (1)..(386): unsure at all n locations
ctaagctgagcttattgcctatcttgggaggctaattgttttacatatattatagnnngaatctaataagttcactaactctgagttttatgaactggtaggtggtggagatatattttatgctggcttgaatatcatttttctgtacatatgtcaacttcctattgatcagatgtgtggcacatatgtcaactcctgttatatgttctgtaacagacattttcagcttattaaaattngttggcaggccatacgatcatgagatggtggacttgtatgttgagtgaactgttcttctgaaaatggagtatctacttgtaataatcttgctcgatactctgcttattggttataaatatgctaatgcaggatttattttcaactct

SEQ ID NO: 206145 - DNA, 374 bp, Glycine max
  unsure (1)..(374): unsure at all n locations
gaaaggatcatanaactgaggggaaacgctttcattaatccttttagccaaggatcttctcttgtaaggttgcatcttcaagaacacccaattaccgactgcatattctatgtcccggtggcatttgttggcatatgcttgcatgatatcttgagacttcaacaacatttctcttagagtagccaataattcattctgaacaattgatagcttattgacttcttcaagacgggaaggaatggtggatcccttgagaatgtgagggggatcatgtccctacaaagctcggaaaggagatatcttgcttgaagccgtataattggtgctaaccagatatctgccatgaggacaagaagctattcctatgcttatcc

SEQ ID NO: 206146 - DNA, 154 bp, Glycine max
ctatagcttcttcctcagaccaccccttagtgccaccactagcgccgtccctctcgacgtagaatgtcttgaaacagaaatatactaaagtaacgaagctcaaacttcatacacggcgctcttatctcatagcgtttatagcaatcaatttagt

SEQ ID NO: 206147 - DNA, 454 bp, Glycine max
tcagagcacaagagcttcaagtatgtgtcttttaaacctccattaattttttgctttaccttctcttccattgtttattattcattttttctccatgtatatcctcaaatgtcttgttctaaatgttgttaacatgattctttatagttttcaccgattaaacttgctatagaagctagactctattatctataatttcttgttcttgttcttgaaccatgaattgtgttgagtttaggttcctttgagtcttgtcttgttattttttgtggctgaaacctaaaccataaaattcttactaaaatattaaagtataataaaacctcaaaaatctagagtgacttgttcacctattgtagttttgcatagaagcatgtctagtcatgaaacttgcacataaaattcctatgtgtgctgaatttatttcttgttccttgctaactattgtcatgat

SEQ ID NO: 206148 - DNA, 203 bp, Glycine max
ttaaggagcacactgactcttgtttcttgaactggaagaggtggagatatatcacatgctggcatgaatatcatttggctgtgcatatggcaacttcctatagaccagatgtgtggcacatgtgtcaactcctgtttatgttctgtaacatacactgtgactcatcatactttgtggaggccataaatcatgaaatggtggac

SEQ ID NO: 206149 - DNA, 350 bp, Glycine max
ttttttaaagggcagcttacatcaaaaaatcaggatctttcttcaacctcaaagttttaaacaactttagctataacactcattcaccttcttctgaagttcaaactatctgcctcatttactcactcatccttgcctacgataatatccttccaaacgaaaattatcgaaaaagaattattaattccataatatactaaaatttcacctccttacctataatactaccttgctatttttcttctataataactcttgctctcaaggcatctaagatggaaatatttttgccttttaacaacacctgtgtagggaatgttgccaccaagatcattccctcctttataccg

SEQ ID NO: 206150 - DNA, 135 bp, Glycine max
gccatcactctcgatttgtggggcttgtttgcggctgttttaatcagtataaaattgggaggtgaactctttatcaagagggcgtgatccctgtccccgaaggtgcccaaggtttaaatcagatctcgcagttga

SEQ ID NO: 206151 - DNA, 111 bp, Glycine max
  unsure (1)..(111): unsure at all n locations
tgactctggccaatatgacattntttgaattccaactngtatatcgaataatcagtagaatagatggggaggatggttaagagagtagaacactaaagcgagagaagacac

SEQ ID NO: 206152 - DNA, 416 bp, Glycine max
  unsure (1)..(416): unsure at all n locations
tgaatgattaaaaaggggctaaaggggcactggctaattctccatatccgatntttcagatgtgctattttcattcttctaaagacaacgtttcgcatggtcactcaactcatctatacattggattttgctattccattgctctactttccattttctaaatatagggttcacatactcagttacacattaccaactttggactttttctcagttaaaattatcacatgtacctcctatgaatctaaggatctgatacaatttatgactttaaaaacaagcttgacaaatcaccatttgaattgcagtagattaccttgcctataacagttacacaaaaaatagacaacatgttcaaatgctattcaaatctaatactgcatgatataatcatcaacatatagcgatatggacaa

SEQ ID NO: 206153 - DNA, 462 bp, Glycine max
  unsure (1)..(462): unsure at all n locations
tccagagttagccccaatcccaatgtcatattgtgacctattgctgccactaatcgccaaccagttggaagtggtgacccctggaaggatttaccagtctcccttcccaaagtggtacaaccccaacacgacctgcacatatcatgggggaactccaaggcatttgattgagcaatgcatggccctcaagcacaaggtccagagcttggtcgaggcgggatggttgacgttccaagaagacgagcctaatgtgaagatgaacccgttcgccaaccatggaggatcgaatgtaaatgcaactgaggcgtgtaaatngcaaaagcctaagcattngatggatgtaatgacctctatgaggaattattttgaagccctacatgaggcacgcgtggttcctctcngtgggcacaaggaggatccttgctngatgcatccnggtgcaccacatgatatggaaacatg

SEQ ID NO: 206154 - DNA, 353 bp, Glycine max
gccataatctcgctatctaacgggaaacaccacgcgatgattctgtatagtggccggaagatagagcatagatgcaatttttggtgctctgcaaagtgctcaataaaacctatgccttatctttttggcgaaacaggtcgctcctgtcctatgtaaccgaaaccatccacattagcgtgatctttattttgataccttagtattactctgatatgcggaccgaacctctgaagaaaacatgctacctaattcctgaatacgcgtcaatgatccatatctgtcgacgggttcacactgataccacacattggcgagatatagagacatcgctcaacaattttactctacgaact

SEQ ID NO: 206155 - DNA, 191 bp, Glycine max
  unsure (1)..(191): unsure at all n locations
aatgctttcttgtgatcaaatattttacaaatatacttaagttccaacgattggatatctaatagaattaaggtggaagactnagctgcatctcagtggccaaatgaatcaagctgaaaactgacataaggtcctatcacgtagctacaataaggagtctggaagactttgtaagattgaaaatctgcctt

SEQ ID NO: 206156 - DNA, 471 bp, Glycine max
  unsure (1)..(471): unsure at all n locations
gcatgtgcacaccatatntactatactttgatcttctgatacaatctatnngattgaaaagataatttatactactcttctaatgtagtggacaactaaaattaaaataatataatagaaaatactgcttaagccattcaaatccagtcattttgaatctcaccattagtatcatgcatgtcaaagataaggagaatcangcatcgtaatgcataacacaaccaaacattaaaagataacatgcttcctaaagccaaccaaggtaaaaatgtattcatatttcatgaactntnntcaaaatatacgacacatataaccatatataaaaacatggcagaacaatctcaccccatgaacaacatagaccacacattttagaatatgagtggtaaggaaaaataatatagcactgtttataanaccgtagatacaccaacataacaagggtgtcatgacaaaaggaactcattt

SEQ ID NO: 206157 - DNA, 290 bp, Glycine max
catcaaccctgtaattttacgacatttcacaatcaagaaagaggccaggcgccctcttttatttcctatatacaaaaggagggtgcgccctcccgcaccagtgctctcaaacaaacctttgaggactctgagcccatggctgggcattgccccatttctagcaccactgtgtttgtgattttcgaagtcggactacaatctacatctgttcttcgatgtacgacttggatctacctctttactagatgcgactctattgccactcttatcgggacgacacgtgctaattt

SEQ ID NO: 206158 - DNA, 213 bp, Glycine max
  unsure (1)..(213): unsure at all n locations
attatatctctgcagatgtaactnttntatgaagaagactcatactttgctccctccatggttgagtccaatactctccaagaagcctctcctattccttatcttggtccatcaccttctctgtangaatcagagtcaactgtaaattctaccatagatattcttgacaatctgccacttgtgcagactcaaaaatcacccatcatatatcga

SEQ ID NO: 206159 - DNA, 201 bp, Glycine max
cgcttactttggctctagatactcagaccggagaggaaagtccgcaaaactctgagacttaggagcacctctctgtgtgcctactcgagaacctcctccaagaaagggggctgatgtaaaagattgacgctctatccagaaccagattgacactcactaagagagctgaaccttcaggctctccaggattgaagctgtcac

SEQ ID NO: 206160 - DNA, 415 bp, Glycine max
  unsure (1)..(415): unsure at all n locations
cagatctangaaggataaagcggctgaaggtaccagttccgttcccgaatatgacagccaccgttttaggagtgctgagcaccagcagcgcttcaaggccatcaagggatggtcatttctccgggagcaacgcgtccagctcagggacaacgagtataccgacttccaggaggagatagttcgccggcgttgggcatcactggttacccccatggccaagttcgacccagatatagtcctcgaattttatgctaatgcttggcctacagaggagggcgtgcgagatatgcgatcctgngtgaggggtcagtagatcccgttcgatgcagatgctctcagccagttcctgggataccctttagtgctggaggagggccaggaatgcgagtatggccagagaacgaaccggtctgat

SEQ ID NO: 206161 - DNA, 156 bp, Glycine max
cataatatagtgtggttcctaaactacgatgtgacatatagcctacaagttcctataagatcgcgtggccctggcctttgtctaaacgaaaaattgtcctatccaggaggaaatgcaaaaattgaggagggacaacctatgctttctattctcttg

SEQ ID NO: 206162 - DNA, 377 bp, Glycine max
  unsure (1)..(377): unsure at all n locations
tttacatgcatgtgcacaccatattcactatacgttgattctctgatacgatctattngaacgtagagataaatgatactatctctttaatggagcggaccacttaaattaacagaatataatataatatactgcttaagccattcaaatccagttcatttgaatctcaccattagtattatgcattgtaaagactacgagaatcacgcatcgtaagtgcatacacaaccgaacatttaaagaaaacatgcttcctaaagccaacctactgtaaaatgtattcatatttcatgaactntgtcaaaattatacgacacatataancatatattaaaacatggtagaacaatctcaccccatgaacaacatacaccaca

SEQ ID NO: 206163 - DNA, 472 bp, Glycine max
tctacttatgtggcagggcgggcttccttcactttcttgtctccaacgcgagctctgaccactgtttttccttcccgcgatgcttcttttcatgttcgcctgagtgggcttatagcctaaaccatacttcccacgatttccttgggtttttatcaggctagttatgccgccattgtctttgcctaaacccatcccgggttcataaccgttccccaacataactcgggccatcattaccgccgcatcggacaggcaaggttgcccaaagagggagtccacggaggaaatgctgaccacctcaaaagactggaaagcggtttctaacgattcttctgcggcttccacataaggcatggaggatgggcagcttaccaagatatcttcctcgcctgacacgatgaccaagtgcccctccactacgaacttcagcttttggtggagtgtagaaggcacaactcccactgagtggatc

SEQ ID NO: 206164 - DNA, 174 bp, Glycine max
  unsure (1)..(174): unsure at all n locations
acctcacacnatatacatatgtatgtntaggtagcaagataccttgtatatgcatgtatatagcaacaatatatatgtgtatgtntaggtagcaagatacctcggatatgcatgtatatagcacacatagctcacatagatatacacatgtttatgtagcaaaatacctcatga

SEQ ID NO: 206165 - DNA, 431 bp, Glycine max
  unsure (1)..(431): unsure at all n locations
tcctctgagccatttactgcgaaagcaaacattgggaattantattttaccaagaaatgctactcttaaagcaaatatagcatacaacctcctccaataaacacaaacattaattgtaatntagagcaaactcatgcacatacttctttacgaacgttcacttgcacaagacattcttataactaagaaaattgcacctatgtgcaatcaaggcaaccttcgtacctagattatttatatgtacttccaaggcatatttgttacctacatctcatgcacttccttggctaaatgtacatacatgagtactcgaagcatctgcgataccaaaaattgcacatgtgcacattgcggcatttctaatatttatgcatatacaacacttcgtgatgaatcttgggtatctacacaataaagtgatacatttcatg

SEQ ID NO: 206166 - DNA, 451 bp, Glycine max
  unsure (1)..(451): unsure at all n locations
nttctgaactatacgatagacctgacattcagaggagactatcacttctataatnttgaatatattgataaaagattattataagagaagatatacacggaagtgaacataggattcaggaatccttccaatagtggtacaaggaaacaaacactagtttcattntctctgtatgtctaagaaacaaaccccttcgaaacaatttgtgtaaccatgaaatcatcttcaaaaccacaacacacctatttttcgtgagttgataggcaaatactgcgtgacagggtttttgatggttcggagaagtntctcgcgcttgccaacagcagatatgctcatattttgaagcaattccactgcaggatagtaatagtcacgagcatcaaatgagaactcattacaacttctcacgagccaaggaaatcaaataactaataatgacttacacatgaca

SEQ ID NO: 206167 - DNA, 483 bp, Glycine max
caagaaaaaaccgggcaagaaagaccagagtcctttttttttctaacacaaccaatgtgctatccacaggatattgttggacaatattataggtaaggccggttagataaatacaaaattgaaatcctagttcgtggttaaaaaatcctaagataaatatcaaatcttaaatgctcagtataattaatcgttgaaggaattaaataatatataatgagtaagatgacatatacaatctaacaaatagttagaaaatataatgcatagaatgacatatgccataagaaaattaataattaactttaatagaatataacttcaaattgcatctcaaaaaagttataaaaaatcctacaaaactattaaagaagtattactgaagaacaaataattcttaataataagaaatagattaactaaatcaaatgtcgacatacccaagtatattctacctaagtaatagctatctagttataatacaca

SEQ ID NO: 206168 - DNA, 449 bp, Glycine max
  unsure (1)..(449): unsure at all n locations
taggtgaacaacttccttaaaatattggagtgcattctttgtatagatcagttgtagcgaagtctgccaactttcctttatttggaaaattttcttgtaaatatttggcatactttggcatttgaacaattgcctcagcaaaggcgatattaatataaatctagaaaattgccaacctttgagggaaaggaacacttacctgaggaggtcttagtacctcattctcactctccttgtttgcctcttgtctctctttagtaagaacctttntttccctgtggtggagtggctntttccttcttctttagctctatcatnaggtgtccactcctaatactcacaacattcacttccttcttgggattgngttcagtctatgaagaagaatgcatgactgcctttgtgacaagaaagaatgtatactagtcacatatgactctcgttcttgg

SEQ ID NO: 206169 - DNA, 259 bp, Glycine max
  unsure (1)..(259): unsure at all n locations
taaaataacccacctgagcagcgaagaatcacagctttttcttcccagctcaaacatgtgcttgactactcaggaatatanacatctttaacacatgagtcggcgtatgtgattacgcattgaactccataactcattgggctaagatataggctatttggaacgcattctgcaagcgcaagaaaatcaccctgtcggcacctgtacccattgaaaactagactttacaccgctccttcaagagcattgtaaccctcaa

SEQ ID NO: 206170 - DNA, 339 bp, Glycine max
actccaacctattggcatgctgtaacgtatagctttcaggagattaggtataagttcatatgatgaaggaatggtctcctactaaaagaaaatccgagtcactaccatgagaaaacgggcgcgtccaagttctacataacataaacagacaatgcttacaagcttcacttgccaatagaatatgcgaacataagccagtacatgtcgtacaaagctaccttttaagtgggtgatctattcttctctgccgtaggatccaatctcaatcacagacaattctcgtaaaaggaaagaaagatggaggccaccaacccctctatgatccttacatggattgga

SEQ ID NO: 206171 - DNA, 357 bp, Glycine max
  unsure (1)..(357): unsure at all n locations
tatttatcactataatatctatattggtattttttctcactcttcgcgtgacttttattatgaaaagtacctgtggaccctgatgagatatttagtgcatgtagacttattatagggaattgcctagaaaattatgtctatatcttaatanattcagnttccaccattaaaaggagtgtgttgttcataaattttttaaaaatgatgtcacattattaagataagaagtaaatattatgtacccgattctgaagttgaagactgtcatgtattgaggccttctttcttgtgtctatatacttggtgaatgtaggaatataagacatgctctacttttagttatgctatgttatactg

SEQ ID NO: 206172 - DNA, 405 bp, Glycine max
  unsure (1)..(405): unsure at all n locations
tcccaacatccaagcagaacaacagtgtttaccgttcattctatcacagccaagcgaaacagagcataggcagaaaactctgccaaaacaccaaccaaatcacagcttttttcacttaaagatcacaggaacaattcctttgatccaattcgttaaccgttggatcgactccaaaattttactggaagtctatagtgcataagcctacattttgaccgttgggatctactagcaaacatccagaactcattctggaatactctgttcacaaccaaccacacacaagcattttctgcaccaagctaaattcctgctgcacctaatttgacagcacaattctgcataagtgcagattntggaaatcacactatcactcattcaattcttgctcaatcaaattctaca

SEQ ID NO: 206173 - DNA, 433 bp, Glycine max
  unsure (1)..(433): unsure at all n locations
tcctctgatcgaaatatcctattatcattctgattatgttgtctanaatcactactcttacgttttttagaggccatctgcatataaaggaaccaaacaactgatcaagacataagtattcaagttttaaaaactaaaaaataaaactaaaaaagacactgaccgcttatcgagacatggtccgcttagctggcctttgcaaaaaaaaaaaatctaccgcttagcgacatgtggagccgcttatcggaagttgcagaattatagattctgtagaattggcttatcagaatagcgctcgctaagatgaacatcttgccgaaggatatgcgctaagctctttaaggttgcgcttacggcccaacttttaaaaattcactaaggttgggagttactagcgaactcgcttactaacggatgcacaacaattggcttg

SEQ ID NO: 206174 - DNA, 190 bp, Glycine max
cagcgctcattatacggactaatatactcgaaaaagtatgggcgtgattgctcaagtcacatcaattcagcgtctcgtatattacggactcaatcaacatccgagaaaaagtattgtcgttgaattgctgagagcttaacattcaatttcgagcgtctcgatatgttacgggactcacacagacatccga

SEQ ID NO: 206175 - DNA, 445 bp, Glycine max
  unsure (1)..(445): unsure at all n locations
ggaccttgaaactcagcttgagccattcnacaacaataacgttntactcggatgtctgattgagtcccgtaacatatcgagacgctcgaaattgaatgttgaagctctgagccaattcaaacgacaataacttttttctccgatgtctgattgagtcccgtaatatatcgagacgctcgaaattatatgttgaacttctgagctaattcaaacgacaataactcttttctcggatgtctgattgagtcccgtaacatatcgagacgctcgaaattgaatgttgaacctcttagctaattcaaacgacaataactntntactcggatgtctgattgagtcccgtaatatatcgagacgctcgaaattgaatgttgaacctcttagctaattcaaacgacaataactnttttctcggatggtctgattgagtcccgtacatatcgag

SEQ ID NO: 206176 - DNA, 275 bp, Glycine max
  unsure (1)..(275): unsure at all n locations
tctangatattactatttatgaagcaacattaacgttngggaacgtcaccttctccacgctntcacttctcgatgatatctttnntaaatagatcactttcaatcggttgtggtaagcgttcactatgtaaaagagaactatcctaatgttctattcttaaaaagaggaagaaagacaagtgctgaatgtngtaaatgaataaatatcacaccacgactacagaaatatctgcaggtacaatatctcatttaaacagagcaaaattctcatgaaa

SEQ ID NO: 206177 - DNA, 483 bp, Glycine max
  unsure (1)..(483): unsure at all n locations
taagntgancggtattgtantatcttgaaacactcggtttttaatgctcctcttccttggaagttcagcccttgcatctgttacatatttgaactttcagctctccactctcaatgccattataagcttttaggatctatatattttcttcttgccttagggcacatctcatctcatgaactatactgtcccttgattgttctcatacactccatcttatctgagttcacaggaccatatgtcttggaaggagccctcacaactgtttgagagcatggtggttgttggacttcctcctaattgcgatgttcangcactgcaaaggcaatatgttgatagaaagtttgaaggctctggtaaattgagacgtgcactcggttatcagaatcaatctcgtgagaacccaatattgaacctcaggctgtgatcttttgtaacagatactgaactntcataagtattattctcattgccaaatggact

SEQ ID NO: 206178 - DNA, 272 bp, Glycine max
  unsure (1)..(272): unsure at all n locations
ctttattaaaaaacgaagaagaaagaacaccacaatccaatgtcttgggcccgcggcccaatgttccaaaactagatgccttgcgcgaagaaaaaaccatagatgccttacttaaggcaattgattaatacacctnctcagtttaattataatacctttctcccacttttagccattatctatatatgacccatttttccattccgaaaactaaattcctatgtacacaacaacaaaacagagcgcgccatttttatttgtggaccgaaaac

SEQ ID NO: 206179 - DNA, 455 bp, Glycine max
  unsure (1)..(455): unsure at all n locations
ggacctataaaactangcttgaaggatgcttcaatggaggacaagatagagggatatttacatagatggcggagcacgacattgaaggaataaaagagggagagaagtggaactttgaagtgtgtctcacaagactctcattcatcaaagttacaacaagtgttacacatgcttctatttatagactaggaagctttcttgagaagctttcttgagaaaacttccttgagaagcttctttgagaaaacttcccttgagaagctagagcttagctacacacacccctctcataactaagctcacctccttgcaaaaaaaacatgagaatacgaaagaaaagtccttactacaaagactactcaatatgccccgaaatacaatgcttaaaccctatactactagaatggccaataacaagggccaaacgaatgataaacctattctaatatttacaa

SEQ ID NO: 206180 - DNA, 424 bp, Glycine max
gatgaaaagaacgagggagatatatagataggtgggagcaccaaactgaaggaataacagagggagagaagtggtactttgaagcgtgcctcacaagactctcattcatcaaagctaccacaagtgttacacatgcttctatttatatactacgaagcttccttgagaagccttcttgagaaaacatactctgaaagcttcttcgagaaaacgtccttgagaagctatagctttactacacacacgcctctcataactaagcttaccctcttgacgaataaaacatgaatatacgaataaaaagttcttactatcaagactactcaaaatgccccgaaatacaaggctaataccctactctactacaatggccaatataccaggccccaacgaatgagacacctattctaatattgacaaagat

SEQ ID NO: 206181 - DNA, 215 bp, Glycine max
  unsure (1)..(215): unsure at all n locations
gtagaggagaccttcaatcctataacgcaatgtggcgaacaaaagtgngcagttaacttgaatggtcatcattgtcaatgcggaaggtattttgcgcttcactatccatgttcacacnattattgcaacttgtggtacgtgaacattaactactaccaatatatagatgttggttacacaaatgagcacatcttataagcttactctgcacaatg

SEQ ID NO: 206182 - DNA, 350 bp, Glycine max
tccctacccattttgcagcttgcgagggttcattcttaacacactcacggcatttatgagctttgcatacaattcatgagatgatggtgaaagcatacttacagaattgtgaagcattgaggccatagcttgacaggattccaaggagacaagggaatctccatcacctgcagtgactaacactggaatgtctcctacagcttgtaacaatgcatcaacgctgttagccaaaatgatggtttcaaacatggcacttctcattaatatcatgcaatttaaactttaggtatatgcactaccttcccgtaagaaattctatatgttcatgatactgctgggagggtctgtga

SEQ ID NO: 206183 - DNA, 265 bp, Glycine max
  unsure (1)..(265): unsure at all n locations
cactctgcgcacaataaggcaaacccaacagggctggggggtgcctgaattgggattggatgcttgatatccagggggacatcaggtaaataatgagtaaggcttgttcatcacctgaatgagcgaacttaacttgtacatcaaggtgacatcagctaaagaacggagtggagcttgtacatacnctggatcatactagatggcactgatatacagatggatcatccaggctttagttatgctactggatcatggcttgatcatc

SEQ ID NO: 206184 - DNA, 202 bp, Glycine max
  unsure (1)..(202): unsure at all n locations
acttctgttctagttggtgaggatattaatcacactcatcgtgagatgganatgtcatattactggataatgcannactattatacatataatcctagaatggtaaagctcaatctacaaccaacagagtaattggtgtactaatttcatatattttctaattntgaacgtgttgaagtcagtgaacaacattgatatcata

SEQ ID NO: 206185 - DNA, 510 bp, Glycine max
  unsure (1)..(510): unsure at all n locations
ggaccttgaaactaagcttgtatcgatacacaaatactgtaatcgattactagagttatatttcagaaaatattctcaacagtcacatctttntatgtggttcttgaatggctatcaaaggcctatatatatgtgacttgagacacgaatttgaaaaaagtttttcagaacaaaaaggtcttatcctcttaaaaagcaaaattgtcttatcctcttacaaattccttggccaaaatacttgtgattcaataaggaattatttgagtgctcaaattgttcaatctatctctttcaagagagatttcttcttctcttcttctgtattctgaaaagggattaagagaccgagggtctcttgttgtgaaagaattctaaacacaaaggaaggattgtccttgtgtgtttagaacttgtaaaaggaaattacatgatagtggactcttaagcggatgcttgggacttgactttgcacataggataacctactcatataatctgagttgcactttc

SEQ ID NO: 206186 - DNA, 397 bp, Glycine max
tctattaggactttgcaccacatcctcctttattgccaacctctatccaccttgagctaaacaaatataggacaccttttatgtaagtcttaggatcattcaacctataagtgcactgtactgacacctaaccgatgtaacacattcaaatggtgcattgggctaagatctaggaaaaatatagctaagaaataaactactatggaaaaataaaatgtattgaagatgacttaaaggaggccttaactaaataaaaccaccccgactcacggtaaaacatcattactgatgatgctgggtccatgccacctcaaagcattattttttctaaggtccgccaatgactgcaaagtccacctaacctcttgtaaggttagaaagacaccccgttatttaa

SEQ ID NO: 206187 - DNA, 428 bp, Glycine max
  unsure (1)..(428): unsure at all n locations
tattagatgaatgaggctagcaagttgaatgggacatgttgtccnttgtttatactatttctatactctgtgttatatggtctattgggcatgcatgtgataaaaaaaattaatcaaaacatataatataatgaataaacttaatcataattaaatattatcaataaataataacagtgatcataaaatataattaactaataataatagttataaaagtataataaattatgtaagacataacaaataatattagttataataaattaaataaacagaaatatataataatgataataatatatagacttgtttaggtatgatatgaaacatttaaaccttatngctaaaaataaagtcatacggatcagnttagtactccctattcgaaataattgactcaatgattcaatggttgaatcaattag

SEQ ID NO: 206188 - DNA, 279 bp, Glycine max
cacatatgacctgacaactctttatcactatatttaatttgtccctaccgtgtacaaccattgcttgttctattggaaatctactgcttgttgagtactacccctgcgctactaattcttgtaaatgggatagtaccccgtcgtacctattgaaaagatttgattccctaacctgttccctaccatataattatagccctactcgttgctacgccactattagttattttatttacggaactgacatgccacacttggtaactggatgacacctcatat

SEQ ID NO: 206189 - DNA, 237 bp, Glycine max
tgtcctcggtttaaacatgattggtacatgagtgacgacttgtccgattctaattggacaaaattggatgaatgcaatagtggttttctaatatccgcacttatgcagaattttgctgtcaaatatgtgcatcataattttggctttgtgcctaaaaatgcttgtgtggttggctgtggatatagttattcacaatgagttttggatgtttactagttgatccctactgtccaaatg

SEQ ID NO: 206190 - DNA, 236 bp, Glycine max
ctcttctgacaatctgctcaacattatttctagtggcctgatacaagatctttggctttaagacctttcactgaatagtttcatctgttataagactattatctcactatacatggtacattattggacttaagctgtaaaataagaaacttttcttcactatacatagcgtaataaaccttatacatgatgagtgatcgataaaaagttaagtgacaccactgattgccctctaa

SEQ ID NO: 206191 - DNA, 433 bp, Glycine max
  unsure (1)..(433): unsure at all n locations
ttaacccanagaaaaaactcttctcattaaaggatccagaactgtttgttcnctcatggaaccattcaacctgaccttagtaaattgattttcctttctaatcatttgaatttgaaactcaaattaactcacagctggaagaaactaatacaccatccacaaatactagacttttagtattgaaagatagtggtttacgacatgaaaataataacaatgacaataattggatatctttttcttcccttggattcctctgttcacctcactcctcaactctcttctttggccaaataaataatatgcatttcaacaatgaagatgaggcaacatctatctcaaaaagaataagaatgtggccatataacaagaagaaaatataataatccacaagttatttacaaaaaattattgcaattacgagacaatatgc

SEQ ID NO: 206192 - DNA, 418 bp, Glycine max
tctggtctacatgaatttcagatatgtgaatcgattgtttatcttatatgcattcaaaactgtattaaaaaatggaatattcttcgaattgaacattaattatatgttacaagtcctgcttatatggatttttgaaatatgcatttataataatggtttttgccttttaggtaacttgcaatgtacatttgtaataacttaaatcaacttagtttaatagcttatttaactaacaatcattaactcgaaagagaatatgagaaaaaaaaagctgatatccagtaagctgctctcctacctatgtccatcttaacacaagaaaaatttcatttcaatatttatggtgccaaacaagctggctattagctgaaagcaaactcatacatacaagtatactagactgacgacatattcaata

SEQ ID NO: 206193 - DNA, 204 bp, Glycine max
  unsure (1)..(204): unsure at all n locations
ccactcttagtctagaggctctttactcgtttgcgctccacacaacttaactttaactgacctcttttaanccttctgcnagctagaaggtaacttttcaacgatcactaatagggttgtgctgccctaacacctaccgtatgcaaatgaattgtacctcttctgtatgagctgacgggtacaatactctacactccatatctt

SEQ ID NO: 206194 - DNA, 238 bp, Glycine max
  unsure (1)..(238): unsure at all n locations
tagttctaanaacaaacttgattgattgcggctctttgaggacaatcgatcatatttcagattgcacctaagattattcaaggacaaaacatggaagcataggatttgtaatcacttcttcctatgattcaatcccagttattatacaacgccatcagttaggaactgactcctaagatgtgagctggtagcccaacttatgatctttttgcaagtagagcctctctttttctgctgc

SEQ ID NO: 206195 - DNA, 492 bp, Glycine max
  unsure (1)..(492): unsure at all n locations
ttagacanaggacaacagtggaaatcaaatcttacttttttgtcgcttctctttaattctaccattggaggtaaccctaacgactgcgtgtaaattttaatcataaaatcattgggccctaccaattaacattgatttgggaaagttgcctacggtgtgaaagaaactttagggccatctaatcaaatcatagaagaaaaaagataatacaattaatgcaatgaagaacttgctcttattaatcaatttaatttattatagttaaactcttggtaggagacaagttcctctcataatggacgaagatgggtatgatttctgctttctgtcaaaagctatacttcaataatgaatacagcttcaaccaaaataatccacaagaagaaccaaacaattctatcttggtatncagttaactccacagaacacatacaacctagtcaagttctgatgttgacgggataagccaatggattactcaacatgaaaata

SEQ ID NO: 206196 - DNA, 306 bp, Glycine max
  unsure (1)..(306): unsure at all n locations
tactcagcttcgtgtagcggggcatacaccttgttaaataagctgtgtctanggacgaacacaacgcccatatgataactcgaggcatccatttcgagtatgaatgggatagaaaaatccagcacaactatgacaggggtgtgagtcatgacaaaattcaatttgtcaaacgtctgttgtgactcacggatccaattgagttggttctttcatagaagtgtcgtacgtacggccataaggttagcatagtctttaataacgcgtttgtataaacatgcaataccaacaaaaccacgcatagctatt

SEQ ID NO: 206197 - DNA, 216 bp, Glycine max
  unsure (1)..(216): unsure at all n locations
taccttatcntatttgcgagtacaggtngcacactttgtggtggagctcatgggtcangctcgtgtattctcactatagaaacatctcatgaagttaatacatgggagactagcctagacaaaactttaatgcagcgtggatttctagatttcaacatgggcaaccttaccaatagcataatcanatggagagatcaccatggtaatcatgtcaat

SEQ ID NO: 206198 - DNA, 272 bp, Glycine max
actgtccatgggcaataaacatgaccactcccagtgccccttaacgtaccacgtctccagtacccaatcgaatccttggaccggggccataacactcagttcacaatatcacaatcattcattcatgaactccctaaccaagaatcaggaaggcaaactatgcaaatacataccattcaacttctatcaaagccaggcttctattattattgtaccgggacactgaaattatgaatttagcaaacactatacgggggcgtataatgcaacaa

SEQ ID NO: 206199 - DNA, 277 bp, Glycine max
  unsure (1)..(277): unsure at all n locations
gacatgacatgagtcatacagaaggtatgccactgctntataaaggtgtnttgagatgagttgagaatcaaaaaatattaatgtatagaattattangatttgattatangaaacatatctgatntagaggagagtgaacattctctcattnatcagtattatgggagtgaccactatatactagagcatccgctgtgtactttgacacacaatntcacttcgatatccctctatattngactgtctcatcatagaatataaaaaatgcagatatct

SEQ ID NO: 206200 - DNA, 474 bp, Glycine max
  unsure (1)..(474): unsure at all n locations
aaaagataagagatagnntttatntttataaagtataagatatatgaaattattntaaataaatttttctaaaaaaaaggtccaaactcatatctctttaacattataaatagaaaacatctacctgagagaaaagtgtaccagacaaaaactagaaaagttaaagcctagttttagacctaaaaagtagaaagagagtttgctctttagagttccactcatcaaagagttgataacaaagattgatttcagtgtagatatacatagagtctttacaatattgaagaactttatactctagtagctcatatccaggtatgtgttcatttgaattttgcaatagtatactntaaacccaaaatagattcctttntttattccgctatgtggtgttataaacaatatttttcttacagataactctccaaccatgtttctctaagaatgacaagtattgtaaatgtgctaatcatg

SEQ ID NO: 206201 - DNA, 389 bp, Glycine max
  unsure (1)..(389): unsure at all n locations
agggtgactgccgaggatctaatcgtctacttcactcccaaggcccacgcgttatgatcggcgttggtatccacggccaccttcgtttgacggaggaccgcttcccatgcattaacctcactggtttgcgcgggaagcgctcttgttagggaatttagagaaaacaagagaagagaatgtgatcagtctgagtacagagcataattgtgcatgggacggttcgaccgcgacatttataaatgatgacgaanattctctcgcttctgttttgcgtgttgctttctccctcactttaattcgccacgttcatgccttcactcgaattttgattctccctccgctaccatcttgatatatatatatatatatatatcaatactcacatctct

SEQ ID NO: 206202 - DNA, 357 bp, Glycine max
  unsure (1)..(357): unsure at all n locations
taaacatatgaataattacttagagtctgcgggggatcgaagcaacgcctgatgaggcttatatcattttcaagcctagtgatacgagtatccctctcatcaaagcgagtattcatcgcatcaaaaggctcacccacaaattgctcaagatcgcggagctctgtgagcacttctatcataaaagaagtgaaatcatccctttgtggtagaggagatgaggtacgtncattaagaataggtggtggaaagtcttggttgccaacccactgaccatcaacattcttttggtaaccaaaggaggttactgctatgacaccaatggaaaatgaccttttaccttgacatatggttcatcat

SEQ ID NO: 206203 - DNA, 498 bp, Glycine max
  unsure (1)..(498): unsure at all n locations
gcttcatcttcaatccaagaagaaagtgataaggaggattcaattgttatagacttatatgatgatcttacgtcttttggaaaaagattcaacaaatttctaagagtcaaaggaaatcaaagaagatcaaattttaaatcaaaaagaagggcaaaagattcatcttctactctaaaatgctatgaatgcaatcaacctggacatctgagggttgattgccaatattcaagaaaagaatagagaaatctgaagaaaaaaaaagttgttaatgaaaagaaggcaaaaaaggcctacattacatgggatgacaatgatatggactcatttgaagattcagaaaacaaaattgtaaaccagagtctaatggccaagagttatgaaagcaatgaagaggtatccttgaagaagagttggtacatatatagcggatgctctaaacatattacgggagatgcatcanagttcactcatatctctcccaagaaaagcggacatgtg

SEQ ID NO: 206204 - DNA, 452 bp, Glycine max
gctgcgctgtaaaactaaaaatcgattttctgttctcctcgtcgcggatgaatccctcccaatgttgaagaaaggagaccttcaatcctattacgcaacgtggcggacaaaaatgggcagttaacttgaatggtcattattgtcaatgcggaacgtattctgcgcttcactatccatgttcacatattattgcagcttgtggttacgtgagcctgaactactaccaatatatagatgttgtttatacaaatgagcacatcttaaaagcttactccccacaatggtggcctcttgggaatgaagcggctattcctccttctaatgacacatggacactaatccctgacccaactacaattcgtgcgaaaggtcggcccaaatcaacacggattacgaatgagatggattgattcaaaccatctgaccaccgacaaatatgcagtatatgtgga

SEQ ID NO: 206205 - DNA, 457 bp, Glycine max
  unsure (1)..(457): unsure at all n locations
agctgaggatatggggacccatacatgtggactagggggttgtctgtcgatggngcactacaagttttccacatccacaaatcgcgcataaattcaccatcccctgttgcccacctccaactgagctcacgtactcccatgtagcccatatcctcgtttctctcaacaccgggtccccatcactcctcccaagcttccccaacatccaggtaattcaacattcaaacaacacaaactaccacagccaagaaaacagggcaaaggcagaaaactctgcccaaaacaccaaccaaaatcacggctntttctcacttaaagacccccgtaacatttccttcgttccaattcgttcaccggtggatcgactcanaatttttactggaagtctctagtacataagcctacantttgaccgtcgggatctgctagcaaacatccagaactcattctgcactac

SEQ ID NO: 206206 - DNA, 354 bp, Glycine max
  unsure (1)..(354): unsure at all n locations
catcactgctgcataccctaatgtgcgggtgaactaatattcagaggaaattataattttatctcaattagagtttntttactagccattgccctaatgacattctntttaataattccttaacgtcttttacccttagagtaatggatagaaaaaacgacttaattacacaccnnanngaacagnatacatgcaaattaacaagtttgcggatttagtttcttactgagcaagggctacaagtctttgatctatcgctccctgccttttggtccattctatataccccatgtcatcttggcaattgtaaatacaaagatgtatttttcttccatagaaatgtcatttgataca

SEQ ID NO: 206207 - DNA, 367 bp, Glycine max
  unsure (1)..(367): unsure at all n locations
gagagagagagtgttgctagcactcctcttgacgtcttattaatgttaaatgcttcactcgttttgggcactcttttgactcttatgagctcatcacaagaatcccactcgcattttgttgatttatgtgttcgagcaggattgttcaaacataataggctaacagataatatacttacgtacaatatctactcctataatggagaaagaaaataaaaaatggcttgcaataacaatagttatattntctcaattactaatgcctatgataagtttatcacctctatccatgttatttatacgagtttttttttctttctcgaaggataatgaggatttgatgagttgctatattctctttcttttg

SEQ ID NO: 206208 - DNA, 397 bp, Glycine max
  unsure (1)..(397): unsure at all n locations
actcagctntataacaagtgttggtgggtgcaggaactgtatctaagttcttataaagaaagagngntatctttgggtttgacttgtgaatctttcatatggctacggtagccgttttattgtgcctgcaaagctcagaaaatggtgtgaagaacgatgccatggatctgacttgcgtatggtggaatcgcagtaggctccacacccatttatacaactgttacatcttgcagatggccactatgattttggcatttggattcgcatttattaatgttcttctttcttggctatggcttggtctcttttttttttatttttatcggatgtgtagttttctgtgggtgcttttaaagttagctctgatttagatagtccagactcacagcaagacatg

SEQ ID NO: 206209 - DNA, 359 bp, Glycine max
  unsure (1)..(359): unsure at all n locations
agctntgtgtggagcttcaatggtgaatgaatattaaataaagctacgtgagagagggagagaaaaggcttctgtgtttctttcttttggctgagtgaggagagagaacaactttctggttataaataaaaggggtttctctttttctattattttatttaagctatgccacatgtccccatttgagtggagcaagaagggcccactttctcttttgattgtgacctatactcagtcacaaaagtgagaaaatctgacctttgaaacgctaaaatcctgcctcggtttgcgtgccgtttctctggttccagttcctcgcgtttctctgcgtccgtcggggccagtttcaaaagcaagca

SEQ ID NO: 206210 - DNA, 437 bp, Glycine max
  unsure (1)..(437): unsure at all n locations
ttcccttagagtcctttcactangtggaggttgngccatgttctcagaatgtgcaaaatcataatgctcagaatcagaatgctcaaaattataatgctcaagatcaggatgttcaaaatcaccaataacagaatgcacaggttcaccagttatggaatgctcagaatgatcaaaaggtataaaatgatgcctaactaatctatgaaatgtcctatctatctcangatcaaagggttgtaagtcagatggattgcctctagtcatacactacattcagcatgcacacaactagttgccttgtcatgtaaataaaggtgcaggtttgaactacagctaccctcaaatgatatccaaataacttgaaattttgtgagaaaccctataaaatgatgagaagatagcacaaaaaatttcatacaaaaattcaaagtctaact

SEQ ID NO: 206211 - DNA, 394 bp, Glycine max
caaccccaactccatgaatccattctctttctaatagcaagttaaaattagccttggactgaatcaccaggaatataagtggtcgaactattactgctacagcaacatctacttgaatggctcccaaagaatagccagttttaccttcataattcaaaagcacaatgttgtgggcagatagatcagtgtcatgtttcccgatcctgtagagcatagatcgaggcattaagttgacagccgctcctccatcaatgagcactttggtgattccaacattctcaactcttgctctgatgaaaagaggttgagatgacatttcatctgaaaatctggcttttcgaaattggctaatggctcttccacacaggcattattcataacatagaaacatact

SEQ ID NO: 206212 - DNA, 270 bp, Glycine max
gaagtgtgcctcacaagactctcattcatcaaagttacaacaagtgttacatatgcttctatctatagcctaggtagcttgcttgagaagcttccttgagaagcttcttcgagaagctagagcttagctacacacacccctctaataactaagctcacctccttgagaagcttgcttgagaaactaccttgaaaagcttcattgcgaagatttgtagagaagctagagcttagctacacacacccctctaatagctatgctaacctcctt

SEQ ID NO: 206213 - DNA, 431 bp, Glycine max
  unsure (1)..(431): unsure at all n locations
aacatgcaatgtcttaaaaaatgtccttttgagaacagcctaagccatcataacttaattttaataccttatgaattntcatatttgaaatctttnttagttttctcaattcactttctcatgcttctttacttcttgaacgaaaacttacacccaaaacttttaaagccaaaggaatacctttgcataggaaaatgctcttcttgattgatcttcatatccatctttaggttgtatttctccaaaaacagtcaaacagaaaaactgaagagaatgctcagagctcaaatcttggacctgatatatntcatcaattgggctaagtatttgcttgtttctagttgtaacaatgatcctacttcctgggtgacactctctaccccgatatacatataattaagaaaaggatataaaaaatctgaattttattt

SEQ ID NO: 206214 - DNA, 184 bp, Glycine max
  unsure (1)..(184): unsure at all n locations
gtgtgggttcaactcatttanatccttttagccagacaagtagtttgcaatctacatagtgaattcaaggcacattaaattagaagaataaatgcatagacaatgaagcacacaaacacaaaacacataagcttcagcactaacattaattattaattaatatatacaaacctattcttcaatc

SEQ ID NO: 206215 - DNA, 421 bp, Glycine max
  unsure (1)..(421): unsure at all n locations
tgcaagctttcttgagaaaacttctttgagaagcttctttgagaaaacttccttgagaagctagagcttagctacacacacccctctcataactaagctcacctccttgagaaacttccttaagaagattcctaaagaagctagagcttagctacatatacctctctaatagctaagctcacctccttgagatgagaagctagaacttagctacacacccnctataatagctaagctcaccctcatgaaaaaaaaacatgaaaatacaaaaaaaagtccttactacaaagactactcaaaatgtcccgaaatacaaggctaaaaccctatactactagaatggccaaaatacaaggcccaaatgaaggaaaaacctattctaatatttacaaagaatagcgggctcatacttagcccatgg

SEQ ID NO: 206216 - DNA, 379 bp, Glycine max
  unsure (1)..(379): unsure at all n locations
tctccaagggcatgggcatttctagtttcctgaanatatctaataatctcgccaaatggaggtccttctccttcttggaaggtaccatacgatatggtacttccacaccttcgttcacagctttttctgttttcttctctctaacttgttaacttctatttttctcttcattcttattttttttcatctttttcaatttttcaattttctttttctttttatccttctttatctttttcttggncattaaattattttttcttgaccattatttgtttctctttttcatgattgctttcacctatcacatcatcattcttttcatcagtacctttcttttcagcagctttcttcttgtacactacactatcctcatctt

SEQ ID NO: 206217 - DNA, 368 bp, Glycine max
  unsure (1)..(368): unsure at all n locations
gctatacataccttaatatcatcctcagttcttcctcctcaggnaccataacatgagcattctctaatatatcttcatcctccaatggtctctcaagagatngcaaatgcttacgtagcaatttagcatgaatttcctttaaacaagcctgcatttggagccatttataatacagtcaaagaaaccattgttcataggcatataagaatactggaaaataatatgatggagaataccttggccttataaatgtggagatgttttaaaatggcctcccagtactcaaccacctttgctgtaccagtacgcatttttgattcaatgtgaacccgtatagcctccaactcttgatgtgtcttcccctgcaa

SEQ ID NO: 206218 - DNA, 399 bp, Glycine max
  unsure (1)..(399): unsure at all n locations
actcagcttgatccgctcatatttccacatccatcctccctcattattgagtttctggcgaagggtagatggcacagccccaactccatgaatccattctcttcctaatagcaagttaaaattagccttggactgaatcaccaggaatagagttggtcgaactatactgcctacagcaacatctacttgaatggctcccaaagaatagccagttttaccttcataattcgaaagcacaatgttgtgggcagatagatcagtgtcatgtttcccgatcttgtagagcatagatcgaggcattaagttgacagccgctcctccatcaatgagcactntgttgattccaacattctcaactcttgctctgatgaaaagaggttcgagatgacttttcatctg

SEQ ID NO: 206219 - DNA, 401 bp, Glycine max
  unsure (1)..(401): unsure at all n locations
atttgttcttatctactcgcatatttttactctctagtgttttaantttgacataacgactaacacttggtccttttatttntaatttttctttcttgcagcaggtgtacggtacgatggtagtgaggagccagaatccctcttcctgctttatgatataatacaaataaaatagcgattccggaaatcatgtctgtagctgctctttttatttatgtgataaatgtaaaacgctttggtttggcttggccgttgtgcattaggttgaaaaaataaatgttataattactcagaatctcagatctttctcatactctgcccctgattataagtctctcaaattcaactaattcatcttactttanaaaaaatggtaactaattaatcatattagatatatg

SEQ ID NO: 206220 - DNA, 461 bp, Glycine max
  unsure (1)..(461): unsure at all n locations
tctcaaactaagcnttgaaataagcagataacatgaatggctagtaaagtcatactcgccttggtcttcttgtactcattcactgccttgtgggaagcataactgaaattcacatcaggtcccaactcggggacaataaagtggctggatcaatgcacataaatcaatcaggtcagtcatggcatcaccagtaattccttcgtttttaattataaaactccttttagaaatttatttatttccttttatatttttttttaattnttaaatatattatttatttattttcactatatatctttacttaattattttttttcgaaacattaataagaaacaattaagtggacagagagataagacaaaaatgtaattntggcatgatagtataaataattgacagatntaatataattaactaactacttttcttaagagacatgaattaattaaaatgatct

SEQ ID NO: 206221 - DNA, 303 bp, Glycine max
tcactactacaaatataggtgatgccatttggcctttccaatgcgcctacaatgttccaatccaccatgaatgaattgctaaaacctttcttatgccaattcgtaattggtttctttgatgaaatattggtgtatagcctatcattggtagaacacctttcatatttggaggaaatctatgttggtttatgccaaaaccaattctacttgcggcgcaataagtgcttatttgccagacaatcacttcaatatctgggtcacattgtctcagcccatggtgtgggtccagatcctaacaaactc

SEQ ID NO: 206222 - DNA, 467 bp, Glycine max
  unsure (1)..(467): unsure at all n locations
tccttcatcttgtttaaacaagaggaagaatctttctttgtatgctatgcncgacaacgacncagagaagctaagttatacttgacaagatatgctaattaagttgaatttcaaaattgatttagagaagcacaagtgctctcaacaacctaagttatacttgacaagagatgctgtgaaatatcataatgttcgtataattaanattgagaatcggngattcaacatatttatattatgcataatgaatacatataancaacgaataattaattaattaattaaaacctaacaatgagtaatcaaaattatctatattagtaataatgaataaatataattagggataccttaaggtttgttgtgaacccaagttaagactgatggcaccattctgattcgtgcttcaatgttctgcaaagtaccttatgcatgaagaagctacacatgtatcaaagttaacatga

SEQ ID NO: 206223 - DNA, 436 bp, Glycine max
  unsure (1)..(436): unsure at all n locations
gcttacgtattcaactcaagccgagctcaatgcttttttattttgtgtttaactngactcatttccatccctactcctactaatacatattaacatgaagtgtttatggatttttaaagagcactcgtcgaagagataagaagaatagacgtgtatttaaggagtaagcaatatttatctttaggcttaatttgtttcaatgtatcctattttaaatgtgtaccttggattaatgataaatttcctttatacaatgaagatctttgaccatgagtatgacttgcacagttgcacgtttaaaaaactctagtcaaaacaataacattatgtatattacaaagtgatagttcgattatttttccctttcaacaaaaagtctgattttttttctttcgtgcactcagaagttagggcaaaatactatttggaaccgaat

SEQ ID NO: 206224 - DNA, 366 bp, Glycine max
  unsure (1)..(366): unsure at all n locations
ctcgggtaagcctctgcagttgataattgatactcccccaagactttctgttctttntactctgaaaaaaacaaaattgaaatgttttttttttcttgtactacttaaattctcaactcaaaagcaactaaaagcagttntgattaaactaaatatatattattacctgagcatcaatacagacatttaatagctccttctggcgagcacaagcgtcggtatcgctatggtttgcagccatacaactgagaaacaatgccatttccttcatgcacgggttttgaagataccaaatctcttggggttgatgaaaagcgtaccagctttccgacccattatccttcaacaactttacattcatgatcc

SEQ ID NO: 206225 - DNA, 423 bp, Glycine max
  unsure (1)..(423): unsure at all n locations
atccccgctatatataagaagttaagtagcacaaaaagtacaatgagatatttttgaaaaaatctgaaattttgaaaataaaaaagtctgaaattatacgggataaggtgcaactatctacaaccagatgcacacggggtctatttaaaaagaagtgcaactaaattactatcttaagttntatatttaacctctattttagaatcgaagctgattctgttgtgataatgttacacaataaaaaaatgtttcacaaattcggtcagaatttgtaaagatttaagagtgttcattagataaatcaaagtggcagaaacatttatttatccaagaagtaatgataatgccattttaaattaatctggcaaaaattaanaacaagaccgtctaagtagtatctttcattttattatatataaacat

SEQ ID NO: 206226 - DNA, 463 bp, Glycine max
  unsure (1)..(463): unsure at all n locations
atgcaagcttatgcgcatatttccttacgaacgtnctcttgttcaagatatttctatanactaaaaatgcacccatgtacaatcaaggtagcttcattacctataatatgtacttccaaagtgtatttgttatttacatcacacaccgccttctttggctgaatttacatacatgcatacttaaacattttggggtaccaaaaactgcacatgcgctcatcttggtattctaatacccatacatatacaaacttcacgatgaatcttgactacctacacaataaggggctacctttcatgctctatttcaaagttttgctacctaaagccacatgcaaattcaagcatatttttcctttgctgactaaaatggtattcaaattacaaggtttattatttttgcaatatgttttcttcacataaaatgcaacatacttatattatatttcttgtgagacatttt

SEQ ID NO: 206227 - DNA, 472 bp, Glycine max
  unsure (1)..(472): unsure at all n locations
ctgaaacaactctccttctggtaactnttcatccaatatctatgttcttatctattgaaaaancatcnttggtggtctttcatgcaaaagtatgcattacttattcatttacatattttttttttctagaagcaagttagatccccatgaccttagagtagactcccaaaaaaatcttgaattttcctggaaaaaaatgggatactatttgaacaattcttaaaaaatcaaacaaaatcatattcacttgtgtccttcttctcttttctcatgcatgtcacgaggtaaaacttgagaaactatctatcattatcttcacaaaaaattaatgtcanaattattttctttccaatgaagaatttttttttgtttttctttatgattttggtaacctcctgctaaactttgcttttcaggtcatggatatcaaactaagggattaacatgcttatcaataagttcaaattcaact

SEQ ID NO: 206228 - DNA, 423 bp, Glycine max
  unsure (1)..(423): unsure at all n locations
catgcaagctaacacctatatatacaccattctttttttttattagacacactcacatggtgggctatttaattaaatnttattatctttctatttccggtcttaacagcaccgtatctttcattttgacacattttattttggtgcatcacgttattggagcccgattatttaattttggtatgcttaagtgggagtggatataacaatgcctcattgctccatcttgttactgtcacactcgaagagtgaagaataccatgagcatataaaaaaatgtgagactccaaagcacagtatgccagcaaaattgattctttttttcctgcgttgaatgtagaaagcctcagacacatgattatgaatagacatatataaatctataaataaaatctattcaatgtgggttgtataaaaagatct

SEQ ID NO: 206229 - DNA, 326 bp, Glycine max
  unsure (1)..(326): unsure at all n locations
ggtacaggttatggtgcatggataatgggcatcctcgtgtcttgataagcanggatgttgtgttcaaggagtctgaaatgtatcacttgaaggaggattcaagtaaagggaaggcagtgtggatgcacgagagcgtccagttggaggtggagtctgttgcaggatcgtctagtacaagagggggtcgtccactacttgggtctacaggtgctgaagtggagcgtccagagcacgggtcgtctggtgccagagtcaagacgcaaggggaggaacaggaggctggcatcatgcgctcagacttgcaggactatctcttatcacgagat

SEQ ID NO: 206230 - DNA, 231 bp, Glycine max
  unsure (1)..(231): unsure at all n locations
gagggaaaagaaatggccagcaactcctccttnttctcttctccatcaacttgcgttacatgtacaacttatatttatgtttacagttgaatgacaagcaattaataccatattcgatatagtataatataagcatcncttttcttttttatgcaacatatctcatctatgaaaccccacgccctctcatgacgcatgacaaatatttctagtcntcagctcttttatcaa

SEQ ID NO: 206231 - DNA, 457 bp, Glycine max
  unsure (1)..(457): unsure at all n locations
gcaagcctttgaatgacgcggagaagcggttggngtttatttactannccaaagaagacggcggcggcggctatgccgacctggcttatggcgaggaagtcaacgaagaggttgtggggattctgcaggaggcttaccgcaaatgaatggaaagaattgatctttctggacgccagttgaagctcttgcctgaggcttttggtcgcatttctggcttgctcgtttttgatctttcaaccaatcaactctctggaacctccacctttttttttgctacttactttccgtaattgaagaaaatttttttctattgccaaatgttaatcattagtttgtaattttttttcgaagaaacattaaccccacgaccttctcctttttctctcccttacctccatctaccgtatatttctttttgctaacatgtaatcacaattactcttctttcccttaacca

SEQ ID NO: 206232 - DNA, 324 bp, Glycine max
  unsure (1)..(324): unsure at all n locations
ataatgggcttgttcatgaacttgattaaaaagacaccatcaagctntgttctcctcccgccatcatcaaagaaccttcttgcctctctttctattcgccttggatcatctacctaacaaccatctatagatagtcctctaatcaagcttttctttctcctccaacttacatcattatggaaattntntgaataacaataaccttccatattccatttcaatctttccttttgtcgaataattgactcactataattccttactttccaaaatggttcttgcaactccatgttcctntttgtgtcctcatcactcaacataaca

SEQ ID NO: 206233 - DNA, 439 bp, Glycine max
  unsure (1)..(439): unsure at all n locations
gcaagcttggccttggcctctcttatcttcctctctttgtgattctttatccgaaccactgtaggattntcaggcggtggacaaactgcatagtcttcttctatcggttcccacagatctagtgcttcaagatgggtagtcattcttgcagcccataggtcgcactcctcaccatcaaaaactggtgggggtattatgtgtgttgtgcctgcttccattatggtttctctcaactcacagatccctcaagatgatgactctgataccaatttgttgaatattagatcaaaaacagagaagagcacatatatttatgaaggatacatagttgttattcattcgcctctggctagagatatatatacaaaacaaaaaatccctaggcatgactaacacagtctctagtttgataaaaacaanatcagaactcctacaaaat

SEQ ID NO: 206234 - DNA, 408 bp, Glycine max
  unsure (1)..(408): unsure at all n locations
actcaagcttctgcttatgtggcagggcgggctaccttcactttcttgtctcctactcattctntgaccactgctcttccttcccgcgatgcttcttttcatgtccgcctgagtgggcttatagcctaaaccatacttcccacgatttcctggggcatttatcaggctagttatgccgccgttgtctntgcctaaacccatttcgggttcataaccgttccccaacataactcgggccatcattactgctacatcggacagacaaggctgcccagagagggagtncacggaggatatgctgaccacctcanaagactggaaagcggtttctaacgattcttctgcgggcttcacataatgcatagaggatgggcaactcaccaggatgtcttcctcgcctgacacgat

SEQ ID NO: 206235 - DNA, 433 bp, Glycine max
ttaagtcacctgcggcatgcaagcttgtactcgaattgtccacagatctttattattcttataacaataaacaaggccttcccttaattgtctatgtaattggcgaccacgatcaacaaagtactttctgcacctactatatattgacttgaccaaccctgttattggaatgttgcaacaatctttcaacaccttattcacacattctgataagttggctgtatgtgaccactatcacacacagatgtatcgtaagccatgctccatttttcctttgaatgcgatcaatcaattttgtatggctggactcattaagaaatttatctagttttatcaacccatgctcgcaagagtgacgctgcataaattgctatcccaaaagtggtcgtaacatcaaactaatctaataatttaaaaaaacttacccattctt

SEQ ID NO: 206236 - DNA, 318 bp, Glycine max
agagacaagcacatagatgtgaaactacacttcatcacacatgtgattgaatctgagaatgacaaggtggagaaggtttcatcagaagaaaacctggctgatatgttcacaaagtccctctctagtgtcaagttcaagcactacttggacttgatacattttgaagatgcctacagcagattgggagaagtgcagccctgaatcacaaggtagacacttgctgatttagagtcaatgtgcgagattgtggtgtgtgacctcaaatcacaaatggcacaagtgagaagaccttaaagcagaggtgtcataatttgtttc

SEQ ID NO: 206237 - DNA, 72 bp, Glycine max
atgacataattcataaaataactggtattaaactacagtgtgtattatgcaaaaaaattaaacgccatgctc

SEQ ID NO: 206238 - DNA, 231 bp, Glycine max
tcattcttctcatttgatcactacgcctaatcatctctgccatgagccttgtggttattggagatggtggagtagcatctccactcgtcgaagactaatcattattatccatgataatttgccgactgaatattctacatcagcggtatctcacttatcgacggacaatgccgatggaaagtatttcgtgggaaaaagcttcaatatctgacggaatttacccgcgacaaa

SEQ ID NO: 206239 - DNA, 396 bp, Glycine max
  unsure (1)..(396): unsure at all n locations
atccttaagtcaccgcggctgcagcttttatccaggcaattcttggtggngaattctcttcttccttggcttatttcctagtggatggtgcctcccctctcctcttctcctttgccttccgctgcatctccatggtgaaaaatcaccattgaaggacctcattgaagctcaaagatccagcctccatagaagctccacaagcaagcttccatcaattattctctagtcttataagagaagagaaaatgattccacgagactggtggtcagctagaattaaaccttacaaatgaaatgaaattaccaacgataaaggggagaaggcgaatacatacataatatctgagagaacccataacggtacatggattaaattcaacttttacgaaaagaaaa

SEQ ID NO: 206240 - DNA, 472 bp, Glycine max
  unsure (1)..(472): unsure at all n locations
tctcaaggaagttctctcaagatagcttctcttggaagctatctattctataaatagaagcatgtgtgacacttgttgtaactatgatgaatgacagtcttgtgagacacaactcagagttccacttctctccttcttttcttccttcaatttcgagctgccccctttctatttctctccctctttcttttcctccattgaagcatcatctccaagcttcttatgcaaggctcatcttggtggcgaagctccttcttccttggcttattccctggtggatggtgcctcctctttcctcttctcctttgccttccgctgcatcttcatggtggaaaatcacgattgaaggacctcattgaagctcanagatctagtctccatagaagctccacaagcaagcttccatcaacccaatcattcacaaaggccacccctaaatcaaccacaaagcctnctaccgcacatccgatac

SEQ ID NO: 206241 - DNA, 273 bp, Glycine max
  unsure (1)..(273): unsure at all n locations
gcaagcctcagnngacctctcagatctaacaagatcatttccgcgcactcgagcccttgccaccatcctcacattgttgagcaaaacagcaacttcaacattccgggaatcaatctgacaggctntctcagcagctgtaactgcatnctcaaacctgcaatacacccatcatccattntctactttcaacagaaacatcttangatntcagatgaaggctaatagtgtctgaactcaccttcccaatgccatctcaatctgagctctgacaaa

SEQ ID NO: 206242 - DNA, 382 bp, Glycine max
catctttattctttctcctttgccaaaagaattcccaaggactaatcgcatgaattctttttgtgtctctcttctcccttttccaaaaaaacaaaggactaaccgcctgaattcttttgtgtctcccttctcccatgtcaaaagaattcaacacgacacagtctaagaattcttttgattcttcccattccctaatacaaaagcgttcaaaggtttaaccgcctgagaattcttttgtatccccattcacaaagtatcaaaggtttaacagcctgagatctttgtcttaacacattggagggtacatccttcgtggtacaagtagagggtacatctacttgggtttgactgagaacaagagagggttcatctcttgtggatc

SEQ ID NO: 206243 - DNA, 439 bp, Glycine max
  unsure (1)..(439): unsure at all n locations
gcttgagcacaaatcctgactcaccatanaccttgacccagggtgtagaatgttattcttaccctcggaagcaaaanaggaatagaagggaaatttccaatcaaagaaaaagagaaggaaaatttccaatgaaagcaaaaaaagaaaggaagggaaatttccaatcaaagaaaaaaagaaggaaaattccccaatcaaagagtgggagaaagcaaaaagaaaagaaaggaaattcccaatcaaagaatgggagaaagtaaaaaaggaagaagaagaaggaaagaaagccctgatcggtgatcgaaggaaaaaacagaagaaatatgcagagaggtctttggaccggacaatatctgaacaatacagaattgtcaccaaatgaacaaaaaagaaggaaaggaaaccacgacctanaatggtcttctccctttaattacca

SEQ ID NO: 206244 - DNA, 241 bp, Glycine max
  unsure (1)..(241): unsure at all n locations
ttggatatttccattggaaagtacaatgataaggtgctttgtgatgttcttnctatggaggccaaccatgtagctctggggagaccatggcaatttgataagagggataatcatgatggtttcaccaacaagatctctttcatgtatataggcataaagatagtgctcataccattgactccacaagaagtgtgtgaggatctaagataaatgatagataatatacttcatgaaaagagag

SEQ ID NO: 206245 - DNA, 441 bp, Glycine max
  unsure (1)..(441): unsure at all n locations
agtctcacgattgtcacgtgctcatgcaacaattagttagttttggctattctatacancnngccaaacaaagncagggtcaccataactcgcctgtgctttttcttccatgctatatgtagcaaagtgattgatccagtaatggttgatgagttggaaaatgaggccgcaattatactgtgtcagttggagatgtattttccccctgctttctttgacatcatgattcacttgattgtgcatctggtcagagaaatcaaatgatgtggtcctgtttatctacggtggatgtacccggctgagcgatacatgaagatcttaaaagggtatacaaagaatctatatcgtccggaagcatctattgttgagaggtacattgcacaagaagccattgaattttgtcacaaacttagagaaagctaagctgtgggcttctgagtg

SEQ ID NO: 206246 - DNA, 413 bp, Glycine max
  unsure (1)..(413): unsure at all n locations
ttctagaagacactggaaatgttgcttgaacaattcgttattcaaacctaggaacataatcaatcccaattcccaaatcagaccctaatcaagaaagagagaattcccgataacctaggtgagggaacagagaaagagaaaggaacatcacaaattaaacctaaatcaaaacctatggagaaccctaatcaaaccctatgaaagagagatgaattccagagagagagagagattgtgagtttgagtgagatgaaccatagagcaagaatgagcgagagaatgaccattnttgagcaagaacgagtggtctatgccagagtattgagggtcgcatgtctcaaagaagatgtctccttcgtgatgcgaacaagatttttaaattcctttctgttacaagattacaattccaaatt

SEQ ID NO: 206247 - DNA, 441 bp, Glycine max
  unsure (1)..(441): unsure at all n locations
agcttgaattctagtcaaaaaactcctcaagcatattctaatactcatgcatcttttacattcaaaactggaaacttagattcctaggcatgagtcantcctttggcgctttagtctagcttctacaaactacccacacactcacaatgcgcataatttgtttcgcaagctaagttccacaaaatcatgcgcaaatggcattgaggcatttcaccgaacacttggtgggctcatgtttaagcctgaaaatcaagggaatgggggaaatgtggcatgcccctttatctcagaatgcaccctatgcctaaggccataccctacaaccccataattcaacaaaaacaagaaataattcaaggataaatccctcacattctgagcaaatacatgcaacttagaccaccaaaatatatcaatggatatccaaagagcccaagaatg

SEQ ID NO: 206248 - DNA, 214 bp, Glycine max
gcttggtgggaagactgaaacatcaaacgactgttttatctttcatagtaaagacgacgggggtggtgggaacaaacaacgcaagaaaacttctaagatcctgagagtacgccttggtgatggttctgtttcagcccttcttgatcaatcagatcctggtacaacacaccgctcataatgtgacaaggatgactctggaggatggcctcctgtg

SEQ ID NO: 206249 - DNA, 488 bp, Glycine max
  unsure (1)..(488): unsure at all n locations
accatgcagagaatggcagtctccagggagaatgcagnaaatgagagttaaagctttttgattcatgaaagagaactcacagttgaaggtatcctcatatgactgagatccaagtttccctttttgaggcaattcgaattccaagttcaagttttgctagtgatgaaaaagaccctgagagaaaagaaagggtaaagaagaagaacaaaatgaggatgaggaggaggaggaggaggtatggttcattgattaaaatcctcaccccagcagcagcagcagcagcagcaataagcaagtgtgatattgattgggtgggtcattctcattcaccgcccaacccaagtaaaaatcattgacagggactgttactgccctccaaacaataagcagtgtaggccccccccttcctcccatatgcttctttcttcanaatcaaaacagaaagaaagagaaactcaaactgatttgaagatgggactggtgatgaa

SEQ ID NO: 206250 - DNA, 362 bp, Glycine max
  unsure (1)..(362): unsure at all n locations
ttcctcagnccttacacatcctttacctcttccatacatacccatttctccgcctttctcaattgcattacagtaaataataaataaataaagctccagaaatgccttctaactgctaacagatatgataaacgcgctgctggaaagttggttaacaatgatagtagtactctttttacagcatgctgcagatgaaagaatcagactggaagaattgtgtcaaaaggtaaacttcttcatattgattatgtgagaaatattttccagtattacttatgaaactagtcaaatacttaggtattgtcaggagaagcaaaagcaataacctatctaggtgctgaacacgaactggtatgcatcta

SEQ ID NO: 206251 - DNA, 221 bp, Glycine max
agcatatatgagattcagagttaaattgaccctgaacttcaataccttgcagatcttaaaaattctaccagaacaaatagtgcacctcctcagtgataagccaaattgagacggctgcacaatcctgggggagactggaaatatagttccaaaaaaattcgggatatcgctactttaaattgagggtccataaaccgcataccataataataggcctcccc

SEQ ID NO: 206252 - DNA, 420 bp, Glycine max
  unsure (1)..(420): unsure at all n locations
nntacagtagatttagtaatgacccactaacctataattaatataacttattgccattaacctagggaattaaaaaaaaacttaatggctgagtgtaactgaaattgtggcaaccaaaagtcacccccaacagccaacaagtcagccaccatttggtctcccaaaaggctgatgtctnggttgctaattgggcccttattacaacttgaactaaacctaactgaagcccttttatttgattaacccaaaatatatttttggtcagccaactttacaaggattaggccattatttagaaaaactaaacactctaaaattgagacaaagtggtgccatttagtcctcatccatttgagccatgatacaactcacaaccttggactttgctccttgaaacattagcttgtattcaatagtatg

SEQ ID NO: 206253 - DNA, 434 bp, Glycine max
cttatcagactaagacctgttttgtattactcacctcatacttggcggagaagtaatttataatatagttatcttatcaacaaatacacatatagttctttgaaggaaattggttgacaaactaataaacaaaaatattattataataggaacatcgtactatataacttaatatataaaaatattcaaagatatttattattagaaaacagcataaaaagtttattcagagatcatataatttataatcataaaacatcgcaaatagaataacttaacttaaataagaaattatctaaaatataatattataaatatattttgcggctatgagtagagtctgagactgtaataattacacctgttaaattttgtaacaatacccacactctggatgattataaaacctattcattacaatagggttatggata

SEQ ID NO: 206254 - DNA, 370 bp, Glycine max
  unsure (1)..(370): unsure at all n locations
atctcacaatgcgtgcattntggttaaaaagctttgcgtgatgactggctnntgcagaaattggatgaattgcctaacagcaagcgtaaacgtctgagacctgngaaagtttctccgcggcgacaggtgccgaagaatataccgaggcctccgtatgtgaattctatgattcctccagggattgccagtggagctgaagtgcatgacaagaaagggatagaatgcatgagagcttctggaaggcttgcagcgcaggttcttcaatatgctggcaccttagttaaggtgagttcctttcatctgattgtatgtatcctacataaaatcttggctgcttactatgaatttatgatgtaaaatacaattatca

SEQ ID NO: 206255 - DNA, 490 bp, Glycine max
cttaagcaccgcggcatgcactgcttggggctttatgggtgttgtatctttgagcttcaatggggtcctttaatggtgattttccaccatggagatgcagcggaagacaaaggataggaggtgagaggaggcgccatccattaaggaataagccatggaaaaaagagcttcaccaccaagatgagccttggataagaagcttggagggatgcttcaatggaggaaaagaaagagggagagaaagagagaggggggagcacgaaattgaaggaagaaaaagggagagaagttgaactttgagttgtgtctcacaagactctcattcatcaaagttacaacaagtgttacacatgcttctatttatagactaggtagcttccttgagaagctcttttgagaaaacttccttgagaagcttctttgagaaaacttccttgagaagctagagcttagctacacacacccctctcataactagctcaccttcttg

SEQ ID NO: 206256 - DNA, 410 bp, Glycine max
  unsure (1)..(410): unsure at all n locations
gcgcagcccaccatcttttcatagtggagtacttattatgtgtctaccatcacgattatcgtctccctttccattattgggggtaccacctgngccgccagatccctccaccttttgggcgtgttctttgaaagatccgtccccttttttgcacatgttctgtagttgcatcctattcagaaccatatcaaaattgtactgatactgcctaacaaaggcaaccattaggtccttccaagaatggactcgggaaggttccaagttagtgtaccaggtaacagctaccccagtaagactttcttggaaggaatgcatcagcaattcctcatcttttgcgtattcccccatcttctgacaatacatctttagatggttcttgagacaagtagtccccttgtacttgtcaaagt

SEQ ID NO: 206257 - DNA, 330 bp, Glycine max
taatattataatatatataataactttaaacattatttaatttttttttccaaactaaaagagagataaaagataattgaaggctttgagatgaaagaaacatatacttttaattgtggagtaattttgaaaaaaaaattgattattctattacttttaattggttgataccatttgtcattaagatatccttcaataggaactttcttatttccaaccatggagagattaccctcgttggccaatgagaagaaaggaaaatcaaagtttgtttttggtttaataccccgtctagatatggagacgagaaaaaggaaaatgattaaaatc

SEQ ID NO: 206258 - DNA, 234 bp, Glycine max
  unsure (1)..(234): unsure at all n locations
atgtttatataatttatcttatatattacatttcaatgataatattaattcctgaaatttcgttggcatttgatttctttntgtttctcatctgcaggcagaagttgaaaatttaacaatgaaggagcgccagttagatgaacaaataaggttngngtgccatgcgttanggttattcatcttattgaattatttcattcttttttggtatctatactaacagtttntaattat

SEQ ID NO: 206259 - DNA, 433 bp, Glycine max
  unsure (1)..(433): unsure at all n locations
agctttaatnttattggtttttatgcatgtnttcttcttaactaatagttattttttcttactgatttntctagtttgtnttttattttcccgcttaccaagctatcgacgaagaagcatccagcaggcaagattttttccctttggctgttatgtatgtttttttcattactatttgtctctatttgcaaggttttaattttgtttgttcttatgaatgttttttatgagaatcctgaaactgaccaaatacaggctaaaggcctaagtggagaaggacaaagcccccaagtggagaaggatgaaggcccaagtggaaaaggatgaaggcccagaggcagagacactaccaagactattaattggtgctgaaggcccagattaaattgaaggtccataataaatatgttctatttttttattataatttttt

SEQ ID NO: 206260 - DNA, 447 bp, Glycine max
  unsure (1)..(447): unsure at all n locations
tctagccaatggacttaccttgaattaattccttngatagtctcttttagccttgnttccctttccttgttttgaagctcactacaagccttaagtgaaaaaccatgatattaccatatccttaaggaattttggagctttggaattgttttgggaataagtgtggggggtttttgtttcattggacaacttgttttgttggctatgcttcatgatgtattttgggccatacttgatgtacattgtatattggttaaatgttggacatgctgaatgaaatgttgtttctcanaggcaaaaaaaaaaaaaaaaaagcaataaagttgagtgaataagatcttaaatggcacaagaatgatgaaactcttggttctactcttcatgtttaaattttatctttacttctttntattttcttatttntttcttaatatgcacttattcccc

SEQ ID NO: 206261 - DNA, 304 bp, Glycine max
  unsure (1)..(304): unsure at all n locations
ctggggatggtgtgcatatgcctgactttgggaaatgatatagttgatttgtgccatcgcccgatcgccacctattaccacatatgacgggtgccccatantccgataagctcgatgtgagaaagtgtggaagagtcagtcttcctacttttgttagttgaccacaaagtggtacctggagatatgtcgcgggggtcaggagaccttggggatgtcaggtggggtgctatttcccaaaaccaagcttgactaatcccgacccaacccgggcatagtcagtcagtgagaacctgtgatggtacct

SEQ ID NO: 206262 - DNA, 303 bp, Glycine max
  unsure (1)..(303): unsure at all n locations
acaaccagcttactcggtttaaaccgcctgaagcacttttacctttntagaccgcttgcttaaatttccttatataacgaacaacacaactatcatgtttttctaaccaacacagccatcttcaattcttcctccatcccaatctaatcgaccctcgacagggcgcgaggaacaactcacgcgcacacacattctcacacaaatcggaatctcgaacacacacacagtcgctccttacagcaagactgcacgatagcaacatctgaatgctctcgccaccatgaaactaaaagacgcttttag

SEQ ID NO: 206263 - DNA, 459 bp, Glycine max
  unsure (1)..(459): unsure at all n locations
gatcttaagcaccgcggctgcagcttaatcttgattggtaatcaattctttaattaggggcttgattagtcttaagacataaatatctnttgacttaacatgttgaatgactttcgcaagtctcttgaaagccttaaaagcattattctctatagcaagaaaaattgtccatgttaaatcttgagagtaatcatcaagaatgacaagaccataattgtcacctcccaaactcatagttctaaaagggctatacaagtcctagtgtagaagttccaatggtttagatgtagaaactacaccttttggttcaaaagagactttgacttgtttgccttttaacaagcatcacaaagcttatccttttgaaatttcagtcttggaagtctttttacaagggttttggcaatgatcttatttanataattcatatgaacatgtgcagatattctattgccaagc

SEQ ID NO: 206264 - DNA, 403 bp, Glycine max
  unsure (1)..(403): unsure at all n locations
cacaaaataacagccattgtatcctatccacaccaaggaaaaacatattacaaacaaagacaatatagatttaaaagttctgagcaaatcagtgtgagttattctgcataagaactcagaccaacaatcatggagaacagcaaattcttcgtgatacgactggtataatcatnttctttattataagaaaaattacaaacgttcagcaatggttgatagaatacatagtgtcacaagataaccccatgcaatatccaaaacagaatagggatctcaaaggattagagagaatattaagaaaaaatagtggaagcattataacatatataaacattgatgagtgatgacaaaggaaaaatanattaaacaagccaatgaaaaaagctcaggagatctggtgatg

SEQ ID NO: 206265 - DNA, 419 bp, Glycine max
  unsure (1)..(419): unsure at all n locations
ggactgttctactattagaagatgacaatgagntttatcaganaagttaacttttattgaaagaacataatactattttgaagagcatttagatatctcagatggtgaagttatatagaccgaagaaatgaaagttcattgtttaaatgggttaaaacttgaaatgggctttttcctactgtccaatctgcagggcagttgttagagactagtatgcagcaatgattgaaatatcattttctttctaattaactacaaagagagagtaatttactttgtatacatgaccaaatcctccttctccaatcttgttgtaaagagagaaattctcggttgcggcttcaattatggcaatctcaaacaatgggagtgtaaattcatttctttcactccctagctctccaacactaaactgacta

SEQ ID NO: 206266 - DNA, 265 bp, Glycine max
aaaagaaaaaaagaaagcgacaaaacaaaaaaaagacaagaaaaaaaggaagacaaaaaaaagcaaaaaaggagaagaggaaaaaaaaaccgaaagaagaagaaaaaaaaaagagaaaaaaaagaacagaggaaaaaacaggaaagaaggaggaaaaaacaaagaaaggaaagaaacaaaaaaggaaaagtaaaaaagaaaacagaggaaaaaaaggaagggacgaaagaaagaaaaaaaaaaaaaagggaaaaagaaaaaagaa

SEQ ID NO: 206267 - DNA, 500 bp, Glycine max
atccttaagtcacctgcggcatgcaagcttctagagagttctacactactcttttgttctctatgacgttctagaaaattctacacttttctagaaagctctagaattttctagaacctctccaattaaggagggatcccaacaaaaagggggcacgttgtcacgtcattcgtgcattttagacgaaaatttgtttcataataaaaagcatttccctttttatttttcaattaagaattatttataaaaagatatccatgccatccacgtttaaaattcgtgcatttcttgctgttttggttcgtatcaagtaccagtgctcatagtgtaggtatgtggtgatctctgttactaaaatgtggtgcgatgaaatgaaatatggttttggcattgcgcagttctatttgttacatgattacataacagaacagcactatatgcacgaatttgaaatgtagatgactatcttctttctattaataatccttaattgaaaataa

SEQ ID NO: 206268 - DNA, 454 bp, Glycine max
  unsure (1)..(454): unsure at all n locations
actcagctgcaaaatgattactggagtaacaagttatttgttgttaaaattatgaatatgaagaagctgtggtaatattaattatttctaaagccggctataattttttttaagagagccggcctctttcatcaataggtgggagactaatctttcttttncacataatatagatcgtaatgaaattttgccacaatgatgatatatgagaatatcctaaaaaattgaaaaattaatttattaaatcataagtgtttgataaaattaattatgaaaatagataaaaatataaaataacatttaaaaaagataataaaaaaattaaataaatatttttaggacaaaaaagaaataacaaataaagaattgaagttaacattaaaaaaatgttatttcaagttttaaaaaatactaagagttattaaacaaattggttataaaaagaaaagtctac

SEQ ID NO: 206269 - DNA, 358 bp, Glycine max
  unsure (1)..(358): unsure at all n locations
tgcaagctgngatgtgtaatattattccgttttattatgattgcatatatactcctgtttcaaacctgctctgtgtaaaattgtttggtttatggactcccatccatgaccatgcagatgtntaagtagaaataatactttatatgctttactttcttagatgnntttgaatgcagaccttactgaataagttcccaaaggtcctccatatgtcagaacacaggtgtcatatagaagtcccttgcaacttctgtcttctttttagtttgtcttatcggttagttctgcgttctttatatggaaatttaatgtaaccaaatgtattgttcaaaattttctgcacttgtagattaacatt

SEQ ID NO: 206270 - DNA, 376 bp, Glycine max
  unsure (1)..(376): unsure at all n locations
agtaacaagtcataattttatctttagctgtaaaaccgtattcttaaatcccccaaacgctgataattcaaatggtaagcttagtccaaccgaaaagaanaatcgtacggtatcgttggtttatatggattatggagtaccaaaaaaaattgaaaaatcaaatccaccgttttagagattaaaagttaccacagatagaaatcacaggaatgcagagaaatagagactcagtgacctgacatcggggttgatgcagatattgcgaaccaactgcaaaccacatattccaagagctgcaaacagtgggtatacctacaaatacaatgcattcatgcacacaatctaaaactcttattatataaacatgcataaaaat

SEQ ID NO: 206271 - DNA, 368 bp, Glycine max
  unsure (1)..(368): unsure at all n locations
tgaacatgaaggactccttcattgatgagtgacaatgcattttgagaatccgactcaagatgatggaagtgtagacagtatcatatgcgatacanagcccatgatagacagcaaacaatttaattggcacattttgatttaatgtaactccacaattatgattactagttaatcactattggtgatgttattactagcaaatgaccattataattatcacaaatttcatcatagtcatcatattgttattattattatcatcttagttatcacaccctgtaatngtcattacaacgacaaanattatattttaaaaaattagtatcatatacgcactacaactattatcgctactatagtattaattt

SEQ ID NO: 206272 - DNA, 288 bp, Glycine max
  unsure (1)..(288): unsure at all n locations
aattgctgcaattaaatgttttttctactttatcgcctattactggacacgataaacgattacctcaagaacaagaaaaaaccttactatgacatctgttaatcattatgttcattattttgataatttacagagcaattggggtccaccatgacagctcaacaaggtgacgctaantgaatgcaaccttcttacaacttgtcatttgctagaaccaagcatataatatacctgttatgtggatctgcttcggatcctcattagtgtcaacatgagatttaaagagtg

SEQ ID NO: 206273 - DNA, 435 bp, Glycine max
  unsure (1)..(435): unsure at all n locations
ctgcagcttatatngaatagatcatcttgtaaaactctttctnttcttcaaggaagaaattagaatttagaacaacggataaggtactcatggttgaaaatngagtaccaagcaaaaagcatattttggaccattagatatatacatgtatatcttaatgaatggttaagattgatatagaggcaataggaaaggattttgaataattttggctagtgtattacctagctcctgattcaaaaaaaatgcaaaccaaaccaagcaaattcaaatatgtaaggaaaacacaggactgagtgtgactgtgttaccaaagaaaggtatatgatgtatcatgccccactacctaggcagtaaatattgcagcagcatccctagggaaaatgagggagcatgaccctctacaaaatatgggaatcctatgctaattttctt

SEQ ID NO: 206274 - DNA, 325 bp, Glycine max
  unsure (1)..(325): unsure at all n locations
acgctatgaaagcctttctgcttcaagatagatntgatgtagtgtgagactctcagaatttctaaaggaaaattatgtgcactacttgtttgacattgagttgttgctgttaggatttcgtttcaaaaggatatgcttgtaagttgtaatccaggatttctccatgtcaaagaaatccaaggttgttcctgacatttcgctgtttcgataaataaattatgtggcatctttctattactcaaagttcttactcctgatgatttagatacttgttntgcaagttggtgttttacaatgattggaatttcttcgccagattatgaac

SEQ ID NO: 206275 - DNA, 333 bp, Glycine max
ttaagtgacgcggctgcagctgtatgttttgtcggctgtagattttttggaatctaacttcttcctcatatgtagcttggcttgcttccacttgccatgctaccggtggttttgcacaatgttgtaacttgtcgagcgtaggcgggaacggaagcacactacctcgggttagatttggactaatgatggcctcaacatcccgaattttgagactcatgctgctgcgcaatggctaagcatccagtatgcgggaaaccgtgggggtacgccctgatcgtcgagaggtgtaacttctatggcctagtggagtcatctccagtaatctgcccctga

SEQ ID NO: 206276 - DNA, 190 bp, Glycine max
atctaacacaatgaatatgactcctctctgtgagatattatagaagagcattggacacctagatcggagcatagagcctcattgaacacccattactgcttatatctctatgattaaagtatagtaacatacctgacgcttctagcttggttcatagaagcacgctagtcatattactactatgtggggg

SEQ ID NO: 206277 - DNA, 378 bp, Glycine max
  unsure (1)..(378): unsure at all n locations
gagaataatataaaagtntagtacaccgcattcaatcataaataattatttatgataaatgtattaatttttataataatttacttaaaaattatattaataataattttcttattgatgattatgtaaactcttgcgcaaataatacatgtatattaaactcattttgaaatcttaagggataattaattgattctagtaatactatcacactgctgaaagtttggagtaacaagggtgaaatttcaagataaaagtgtgattaattaanattaaagggagaaaatttaggcatagagacctatgcttaagattatgatcaatagtaattctaaattatgtggttgattcattaataagtttttttaacgaatacat

SEQ ID NO: 206278 - DNA, 424 bp, Glycine max
gttctgcgacacaacggacagtggaggaaaaaagggtgagcacgaaaaagaacacgaagagtatcaccttaaactttctatctctgttgccatggtttcatcaagtgtttttgaggaattgcttggcatcccatatccagcttggatatttcttaaattcggatgggtaggaggaggagtaaatattggagctgcatctggtgaacgcttaggaaaaactactccagatcgctgccatttatataatccaacacaaattattatgatacgatctcatggtcattgaatattaactcacatgtgaatatggattacagatatcgatgctctcttctattctgtacttaaaatgtaaatttgccacacactggatgatggttggattttgtcgggacaatcctcccactgatgttttgatgaaaaa

SEQ ID NO: 206279 - DNA, 474 bp, Glycine max
  unsure (1)..(474): unsure at all n locations
gcgaagtgggtggaattcctagagcaattttcttatgttatctaacataaacagggaaaaggtaatattgtagccgatgctctntctcgacgtcatgcattactttctatgcttgagacaaaattgattggtcttgaatgtttgaaaagcatgtatgaaaatgatgaaacttttggagaaatttttaaaaattgtgaaaaattttcagaaaatggtttctttagacatgaaggctttcttttcaaagaaaacaaattgtgtgtgcctaaatgttctactagaaatttgcttgtttgtgaagcacatgaagaaggtttaatggtgcattttgtggtccaaaagactctataaacattacaagaacattnttattggcctcatatganaaaggatgtgcagaaattntgtgaacattccatcgtatgtaaaaaggcaaagtctaagggtaagcctcatggattgatactccattgc

SEQ ID NO: 206280 - DNA, 404 bp, Glycine max
cctcaatttaatggattttcaagggttgagaagtgaaattgagaatgaggtaaatttgaagcatactctcacctcacacaagtctataacatcaatttaaacttgttcaaactggatttacacctaaaatttcaccgaatcaaaatttgactcctcaacacccaaatttaccctagaaatggctctttgttcactttggtcatttgtttttctctctagcacagcccaaactttctcataagtcctaaatggcatttcaagctaggattaactcactctaaccttcaaataccactaaatccagatttggccttccaactctcaaagtctcactctttttccactcacaacaccatactcttccactttaacactaggttaactctacccttcatctctaacag

SEQ ID NO: 206281 - DNA, 465 bp, Glycine max
  unsure (1)..(465): unsure at all n locations
tgagatgagtntgtgagtgatngtgagatcctatatgtgattgagacatccacaccacttgtatttnttcaatctttcatcttgttcttctctctgntgtaaagaaggctccctggttatggaaagttaaatcctctattggatcttccctgtaggtacctgatgtaaatatatttctatctatttaatgatgttttgtgtgttctctgtgctatctgcttttcactccaatatgcctttaccttgaccacgtagatgcatgctttgttagggtcattcaacagtggaaactggtctgattctaaagtccttgatagtacagaactaagttgtcgtactatcacaaggaatcgaggtgcgataatttagttgtgtatgtgtgtcttaatgtggtcctggttgaagttagtccaacaagaggaatctgcggacaatgcttgatcaggattangctaaactatcatg

SEQ ID NO: 206282 - DNA, 461 bp, Glycine max
  unsure (1)..(461): unsure at all n locations
agctntcccaacatgcaagtaatacaacattttgattttcaaattatcacagccaagcaaaacagggcanaggcagaaaactctgcccaaaacaccaaccaaaatcacagcttttctcacttaaagaccccaataataattccttcgttccaattcgttaaccgttggatcgactcgaaaattttactggaagtctctagtacataatcctacattgggaccgttgggatctactatgcaacatccaaaactcattctgtactactctttccacagcccaccacacacaagcatttttctgcacaaagccaaaattctgctgcacctacttgacagcaaaattctgcataagtgcagatttcgaaaatcacacttcctctcatccaatcttgcccaaatcaaatcctacaagtcccatatcatgtatcaatcatgtctaaaccgaagccaagcttgaaacc

SEQ ID NO: 206283 - DNA, 460 bp, Glycine max
  unsure (1)..(460): unsure at all n locations
ctgctgttctcgtagttcccgtgagcttgtggggtttttgaagttatgtggaagagtttcgggtgaagaaaacgttccccctccaccccttttatattttcgtacaggggttgctcgcccaggcgagctaacctatatatatatatatatatatatatatatatatattttaggggtgcattaaccatgtctcccccctcttatgggttagcgttttgcctaacttgagcctacttaagttagaattaagngtcgattacttatttaaaacaaacaatagtaaaagaaactgcaaacgcaaaggatactgggctgccttgcagcgacgttctctgcttgtttagcgccgggaaggggtggcgcttggtcggttgcgatcctatccttcattcgcttccatccctaagtacctgcaagtaagagccaaatgatatgcgaccaatcatgaccggtcatcgtc

SEQ ID NO: 206284 - DNA, 350 bp, Glycine max
  unsure (1)..(350): unsure at all n locations
ctatgcccancatctttggggcctgtccccaaaatagtgttcagatgactgtataaggaaacgtgcatttctaaaacattgtattactntattattgttagaaacacaatgttctaatagtactacatgattctgtaatttctgttcatgtacaatgcaaaaataggacaattgctgcggctgctttgagtttgctgcccattatatactctcttgaactctttctttaatgaactatagtaatttaatcatgtntatatcgactttctcaaagcttagtgcaatctcagccagcaattattggttaattagtaatccagactttcacgaaataatctatatagagaatt

SEQ ID NO: 206285 - DNA, 405 bp, Glycine max
  unsure (1)..(405): unsure at all n locations
agctntgagtaatcgattacatggttttggtattcgattaccagtgacatgtnttgaataaaaatcaagagatataactcttccaatggntttcaggtttttcaaaaggttataactcttctaatggttttcttgaccaaacatgaagagtctataaaagcaagaccttgacttgcattttaagaacaaatattacaactttttcatatattcttttacaacctttgaatctctttgaaaatcttcttcttcctttgccaacagttntctaaagttntctagtttccaaaccttgaaaacaaaagtgngctatatcttttcattctcttctccctttgccaaaaagaattcgccaaggactcaaccgcngaattctntttgtgtctctcttctcccttttccaaa

SEQ ID NO: 206286 - DNA, 393 bp, Glycine max
  unsure (1)..(393): unsure at all n locations
ctaagcttagacaacttcttgtaatcgatacgacaactatgtactctattatacatatangtnttgcctctgaagaaatctctctaacttagaannatttcttcacacagactatgatgatgcataatgcaagacaaatatcaaatgtactaagatgtaacaatcaaattaacaaccaatacaaatgccactcaaaggagttaggcatgtaaaagccaaaacatcttctaaagctctttcaaatttttcctagggcttaaagctntagccttagtttttttcgtgttgtcgttccccctatctctaacactnttgttaggacattgngatgcaatatgaccctttcccaaacacttaaagcatttaatggaactagtttttattgggaggggg

SEQ ID NO: 206287 - DNA, 360 bp, Glycine max
  unsure (1)..(360): unsure at all n locations
aactaagctggaaaagattactggcgcccacggatgtgaaatattttttttaacgcgcggggaccaacgcgaactntattaaagcnctaatagtcacgactttcataatttataatcacttaatatctatcagcataattattattagttataatcggagataaaatcgcaatctataaataggaggacaaaattttacaattaaaaccacaatatcaaatctgaatttaaaactctgcccaattgaattaatttttataaatagcatttatattttatatttttagcttaaaaatattttctcttcattggaagaaatttatgtattgtaatatacttttaataacactattttaattg

SEQ ID NO: 206288 - DNA, 413 bp, Glycine max
ctccctcttccatggcttattccttaatggatggcgcctcctctcacctcctttcctttgtctttcgctgcatctccatggtggaaaatcaccattaaaggaccccattgaagctcaaagatccagcctccatagaagctccacaagcaagcttccatcaagtggtaatcagagcacaagagcttaagtaggtgctccttaaacctccattaatattttggctttaccttctcttccattgttggttctccatgtatctcctcacatgtcttgtgataaattgttttaacatgattctttagagtttccaccgattacacttgctataaaagctagatttgattttctatggttcaaaattcttgttcttggtcttgaaccatgaattgtgttaagttaggtcctttgagttt

SEQ ID NO: 206289 - DNA, 467 bp, Glycine max
  unsure (1)..(467): unsure at all n locations
ntctccactaagttgcctgatgcctaanatgtctnttctgatgtgctttggcctagtgcanggaagaatttctccaagaacaccctcttaaggtcatcccagctgaaaatggacctgngagcaaggtagtatagccaatcttttgccagtccctctagagaatgatgaanagcctttagaaagatatgatcttcttggacatcagggggcttcatggtggaaaaaacaatatggaactccttaagatgcttgtgaggatcttcacctgcaagaccatgaaacttgngcagcaaatttattagtccagtcttgagaacatatggaacaccctcatcaggatattgaatgcacaagctttcataagtgaaatcaggtgcagccatctccctaagagtcctctcacgaggtggaggttgagccatgttctcggtatgaaaattagtagtggaatgctcaaaatcagaata

SEQ ID NO: 206290 - DNA, 440 bp, Glycine max
  unsure (1)..(440): unsure at all n locations
agcttgcggatnntagcttttccggctaaaggatcgaagtgggtatgagaagtggcaaatttgattatcttgctttgatgaatgacaaagctggggccaatgaagagaatgagaaggagggaggaactcatgctgcgattgccgttcctacatggccaaatttcccaccagctccacaatatcaatactcccccaatattagcctttctcattatccgccaccctatcaaccaagaaccctaaatcagccacaaaggccacccctaaatcatccaattccaaacgccacccttaacagaaaccaaaacaccaacctaggaaggaattctgtggaattcatcccaattccggtgtcatatgctagcttgctccatatctactcgataatgcattggtgccataacccacccaagttcttaactcatttttcaggatcactc

SEQ ID NO: 206291 - DNA, 241 bp, Glycine max
ctcagcttctctgatcgaatatcctattatcattctgatcatgtggtctatatatcactactcttacgtttttagaggccatctgcatataaaggaaccaaacaactgatcaagacataagtattcaagttttaaaaactaaaaaataaaactaaaaaagacactgaccgcttagcgagacatggtccgcttagctggcctttgcaaaaaaaaaaaatctaccgcttagcgacatgtggag

SEQ ID NO: 206292 - DNA, 444 bp, Glycine max
  unsure (1)..(444): unsure at all n locations
gctatttncccgtatgggatatcccctcattattcttcttctcttctgcagtaacagtcttccatttagcacctaccatggttgaaatttccttaaattcggcctctgggttcgctttcttgatctgcaccaagccatcaatacataaaaaaaattgagctgaaaccaacaacttaaagagagaaaataagaaaaattgaatggattatcccaagtgagcttaaaccaacaatcagtgggcttaaaggatacagtcttcctcagcaaatcatatccaaccaagtggttcatctgtgctatagttccaaagatggaacccgatgccactggggcgaaagcaaaccacattgcatcatcaaaaacactaacaaaagtggttaaagaatttaacacaatgtccacaccagcaaaatgtgttgaataattggaacctaattgattatt

SEQ ID NO: 206293 - DNA, 392 bp, Glycine max
  unsure (1)..(392): unsure at all n locations
tgtccacccacgagtgtttcggccatgtttcactatgatcagagaatagaagagagaaaagaaaatatgatggtagttntgtgccgaacttgttgtgacaaaagtatgtagagagggtcagtttttccacatatttgaacaatattgttgttgggaacagatggaattgttatattttatattcacaattcaaacttgaaacacctgttccaaacttcaaccttcaatcttcgtctaacaaactaacactaacgatttaaatattaattaattgtgtaaatacgtgaaaaaactatcccaagagtaagatcgagttagctattttaaagagaatacgngtgtgttagatagaggaaataaacaatgcaataattataaattataacaataac

SEQ ID NO: 206294 - DNA, 460 bp, Glycine max
  unsure (1)..(460): unsure at all n locations
taagacacctgcggcatgcaagcttatntgttctccagtggtgtacatgcgtttgttatgagtgtacgaaaggatttaatcaagtttcgttgacggagaataagatgtacgtgaagtacatatggattggtgatccgtatgacccatacggattgacaatccgtatgaccatacggatcagcaatccatatgacctatatggattgttgatccatatgggtcatacggagnattttttatttttaattgttaaattaattattaataaatttgtaattttttttactcagtttagtaatattacattgtttaanaatgaatatactaatgattaataattanacaaatttatatgagaatgattatgtatttaatggttcttattgaaggatgtatctattagatttatatgacattttaatggaaaagtgctgtaaatattttgtgtaacaactatttt

SEQ ID NO: 206295 - DNA, 178 bp, Glycine max
  unsure (1)..(178): unsure at all n locations
tcatgctntaaagccatctcatacctatgtccatctgttctaacttaacctgccaattctgaaagactcatgctgtggcttcataagtacaattattggcccctgtaaatccatctaagatgcatcatgccttgctatctattgtactttcttaactcacatcttgattaccttgtcc

SEQ ID NO: 206296 - DNA, 325 bp, Glycine max
tataagaattgcgctatatggatttacattctctgaagttattttttatatagcaaataaaaataaatttgaaaaagaagataatctatctcccaagaaatattagagactataaaatttaaattaaatataagaaaagatgaattagctttacagaaaataaaggaggacgaagataaaagaagaatggcaaaaaaaaaaacgataattagtttatgatatttagttacttttaaatcgtgccggcaatattaaacatgtcataagagatattcagttacacgttggcaatcgtggtgctcatcgggatatcaccattctaaga

SEQ ID NO: 206297 - DNA, 185 bp, Glycine max
cactgtcgggcatgacatctactctgatagaccttccgaagccacaaaaagtgtacgtatgccccatgtgcctatatggtctcagctctagcctcctcaccggagacctgaagcagctccatcaacaagaagactgcctcatccacaaacagaggctcatagctgtgtaacacacctgtgattgg

SEQ ID NO: 206298 - DNA, 447 bp, Glycine max
  unsure (1)..(447): unsure at all n locations
atatgttttctacacattgttattgcaatagtatgggnnnaccgcacgcccgaatatgngtttctagtttgaagctaagagtacgcttctcttatgcttagattcagtaagaaccctagggttgggtgcctaagtttcattttctaagtagaatttgaaagtgcttgtgattgcttgtaaaactcaccatgcataatggaaatctaatttgggttgaattagataactggactagattcactaaggaccctacggttgggtgcctaagtttcgttttctaagtagaatttgatattgcttgtgattgttgtaaaactcacattgcataatgaatatctaattccggttgaattatataattggattagcttctctagacatagacggtgaaccacgataaatcttgctctttaatttctctctgtatttcattctctatcttatctc

SEQ ID NO: 206299 - DNA, 344 bp, Glycine max
ggaaagagggaaatctaaccattctactttgatgaatgagaaaattggggcaaatgaagagggtgagaatgaaagagaaacccattgtcataccctaatttcgttcggggattattacttgatgatatgcaacctttgatcgaccgctttgagatacttggcatcctttgtttcacaatatgtgaagtcccgagacatgccggaaatcaaaaggaagtaggcttacgcgatccgtgaaattccgtaatgtggcggaaaccaaaaggaggtgtttttgcgcaatccgtgagtttcgtaacttcttcaaagctaaaaagagtaataatgatccggaggattcgaac

SEQ ID NO: 206300 - DNA, 345 bp, Glycine max
tttgaggcagcggcctagatgcaggaataattttccaaagcaccctctaaggcatcccactgaaatagacctggagcaggtattataccaatctttgccacttctccaagaatgggaaaagcctttaaaagaatgatcttttggacgtagggggcttcatggggaacagcaatatggatctccttatgatgtttatgaggatcttcacctgcaagaccatgaaacttgggcagcaaatgtattagtccagtcttgagaacatatggaacaccctcatcaggatatggaatgcacaagcctttataagtgaaatcaggtgcagccattctcctaagagtcctctca

SEQ ID NO: 206301 - DNA, 350 bp, Glycine max
ctcaagatgctatatcacttcatgatagcagagatgaagactttccagagtgagttcgtcagtgagtgaataacactccgatggtcgacaggatattggatttctgcatgtccgattcactatctcagattagtcgctatctctattcctgactcagaaactcaagaatcgagagaagaattcttcaagatagctattattaagctttccttagcattgagtagcacaagatgttgattgcatactcctcccctcagtagcttactctctggtaatcgtgaccccattatagaatcgattaccattggttctagcgcgttatgactctcataatacaaaatgaagagtca

SEQ ID NO: 206302 - DNA, 411 bp, Glycine max
  unsure (1)..(411): unsure at all n locations
cttggcaactgcaaacttatcaattgctacctgcagttcattagggcctccaacaaccctcatggtgtataagttggcaccaaagacaatagctatcaaacccccaacaactaccaaattctttgccttaggtggaaggctcctatatccnaaaatcctaaccatcttgatcaataggggaagaagggttagcacaattttacacatttacaattaccctttgttgatgcaagtgctaaaagcacaaaagataaaaagatatataatcttaaattgcgataatgaggagagtgaaagaaagttaaggtatacattttccaaacagaataagggcgaggctgccccacactattgaaagggagtaaatgatacgttagaggggcaaattattcataaacaaaactttttgat

SEQ ID NO: 206303 - DNA, 352 bp, Glycine max
  unsure (1)..(352): unsure at all n locations
gaataatcaaccgggcccttnacatttgttctttccctattcctttntaggattaggattgggatgattatgctttatttgatattagttagtatttcaatgctttaatttccttacaaacactntaatttataccacaacataaaatttgtcttgtctcttctagtgaccatgcttatattacatttgtaacacaaattgtaagattcaattaaaatgcaaaattatgtgtgtatgttgaaaacatttgtggtcatttctttgtgtaatccatatgtcatattgttccataatatagntgcatattattggtattgaattggtccaagatatcaatatttgtactgcattc

SEQ ID NO: 206304 - DNA, 457 bp, Glycine max
  unsure (1)..(457): unsure at all n locations
cttagagacgacctgcggcatagcagcttgaagtactcaagggatgngaaatagggttttctatcaacactccccgcaaggtatcagatcttgcacatttgtcataactaaagcacctcaccatacatataggaagtggggccgggagccaagataaagaatttgacagcttggaaaagttgtctgtacttgagaaactcaaaatatcatggtgtgtgtttgacacaaggtacagtgctattcacgccactttgccttcaaattagacaaattgcattttgaagggtttcctggactacatataccgtaatgggtgaagccctgacagataactacgaagtgtgtgagctatctatacccgaggaagacttaaagtttggaccttaacatatgctccagttgttgcttttacagatcatacgttcatgccctaaacattgagcttgttgagcaccaa

SEQ ID NO: 206305 - DNA, 488 bp, Glycine max
  unsure (1)..(488): unsure at all n locations
accatcaaactcaagctggagacccttgatggcatgtngacgtgccaagggttttatatttttgttgcttggntnnntaattttaactaaaataggctaaagtacgcttaagcaaaaatgataaaaaattattattgctaaaactggtaaatcttatcctaatcttctagattagtgtactaacctcccttgggatatgtctacttagagtgaacctcacacagagtccacttacacagagacaaattacattgtgacttaatatatagtgcaattcttgcacaaatgaaagtttagctcagacaatttctatntctctaccaaactntactaaatcaatcacgcgcacacacataacacaaaatcctatgattaaaaacatataactactgaaattaaattcatatatgcccaaatgacacacacaaagtnttctctgtcagtttaagttataatttntcaaggtgtctcaactctaangctattta

SEQ ID NO: 206306 - DNA, 453 bp, Glycine max
  unsure (1)..(453): unsure at all n locations
agctnttatttgtgggataaaatgttctctttctttatgtanaatggaagaagnggaactaactatatgagagtttctgaatggaggttgttatgacatgggaatgtttgtgtgttaaggccatgagggcctctcttatataatgcttgngactagggaataggtacatcactgtagtgtttttttttaaatttccaaaaatacccatggtcggcaaattattatgatggcaggtggcataatttggatgttatcccaactcccaaaacttaccttcttattagggcttttgtaataaatgatgatgggtacttcaatgggacattggccaattttgaagtactatttgtcacataaatcggtcaagggttatacatgttcactagtttataactcgacctgccaaatgggtttatgtggagggtagaggacaaatctattgacttgatgagg

SEQ ID NO: 206307 - DNA, 410 bp, Glycine max
  unsure (1)..(410): unsure at all n locations
gacaacatactgcatatcatgcttagacgacttctcanaatccaccatgtgcttcacaaccaacaaattcaatggaaggggcacactcacctgctaggacatctgatgtatcacctccaccttcaatgaaaggggtacgctcaccatgtacatcacaaccaacaaattcagatgcaggacgtgctgatagatcttttgcttcattagagacacagagaaatgaggcctagccaattntatatcttgatgggcaagggtgatgttgctctattttttacttatttgactatggcttttcaaacttgtgacatttacatgtaatatttgcagattcttaccttctcgctctgctgctaatgggattggggatatcctcaagaagaaatttactgatcctttggcatcatgga

SEQ ID NO: 206308 - DNA, 341 bp, Glycine max
acaatcacaagcaatctaacttaactaaatgcaagagaaacaaaattaaaaagggttgggttgcctcccagtaagcgctcttttaacgtcattagcttgacgcaaaagttccttgtcagcccggatcaatcttggttctctccttcagaaccttctcttcactctccttcacctctagacaaaaattttggtccagcaatggtcctttcttcatcaaatagctcaaagctaatcttttggtcttcaatacccatttctagcttcttttttcccatgtctactacacagcttgcagtagccataaatggacgttccaaaattaagggaacatatgtatcttc

SEQ ID NO: 206309 - DNA, 380 bp, Glycine max
  unsure (1)..(380): unsure at all n locations
catcacaacatattcagaanaccaaaaccccacaatccatccctggtaatggtagtatntagtcctgcttctatcaagttctaaggcaacaatacatttcccaatgctaaagtcacctaacagtacacacaaatgggtgatcaggccaagagccatgtagtaattaagcattgaaagaagcattaaacacacaaaacacaattaattagatattaaagataattacatcaactgttccttagaaatccncaactagggtgtntagtcagccatacatagaaaccctaacacanatgagatagagagtacagaataattattngttacacaagaaggggngatccctcctctcttcttggcacctacaatcactctaacac

SEQ ID NO: 206310 - DNA, 406 bp, Glycine max
  unsure (1)..(406): unsure at all n locations
agcttcttatccaaggctcatcttggtggtgatgctctnttttccatggcttattccttaatggatggcgcctcctctcacctcttctcctttgtcttccgctgcatctccatggtgaaaaatcaccattgaaggacctcattgaagctcaaagatccagcctccatagaagctccacaagcaagcttccatcaagtggtatcagagcacaagagcttcaagtaggtgctccttanacctccattaattntttttctttgccttctcttccattgttgtttcttaatttttctccatgtatctcctcacatgtcttgttctaaatgttgttaacatgattctttagagtttccaccgattaaactcgctatagaagttaaatttgaatttctatggttcaaaattc

SEQ ID NO: 206311 - DNA, 358 bp, Glycine max
  unsure (1)..(358): unsure at all n locations
ctcaccatanacctttatctcaggttataatgtcaatccttaccctcggaagcaaaaaaagaaggaaaattttcaatccaagagaaagccaaaaaagagaaggaaaatttccaatccaagaggaagcaaaaaaaagagagaaggaaaatttccaatctaaggaaaaaaaaaagaggaaaggaaattcccaatcaaagagtgggagaaagcgaanagaanagaaagaaaattcccaaccaaagagtgggagaaagtaaaaggaaggaaagaaagctcctgatcaaggatcgaaagaaatcagaagaaatgtgcagaaaggtctttggaccggacaatatctgtacaatacagaatttgt

SEQ ID NO: 206312 - DNA, 156 bp, Glycine max
acacggctagcttacgtctcgtgccctcttggaaatcctataaccccgggggtacaataaacccatcatctttgagggatgatctgcaccccaattgctttgccctcctcatgccaaaccaatacatcgcacctttcccactacggccccctctcc

SEQ ID NO: 206313 - DNA, 392 bp, Glycine max
tcactactttgctcgataatacaatgtgtataccatatcaaagcttcttaagggaaaggacaatggtctcttacaaatacctaatacatatagacatacaccttttaattattaaaacacatattattactatgccctacacaacatgatgattgatgttttactttgaacaaaatgaatgtcatacacataactcgaacatataaccgcgaggtaataaaataattctctgtggtggttgactttttaaagaggaaaacacacatcatgcttttgttggagtaaaagagagacaagggatgacattatatccttgatgcaatcacatataccatgtcgggtatatcatcaactatccatggggacatgaagtatcatttcaatttacttta

SEQ ID NO: 206314 - DNA, 369 bp, Glycine max
  unsure (1)..(369): unsure at all n locations
aatgcacgaaacacatttgcagggatactaaaacacaagccttaaaccaaatataggaaacttaaactagaattaaataatccaacgaacctatgntttttttttcttttgcaaaaatatggtatgtagatagaattcagaggaaaaaaagagatagagaaagtggccacaagttaaaaagttaacaatacttttaatataaacgaacataattacattaatttgtggactattttctcaaatggattgataaaaagaaatagactaatgaaattgcattctaggtttgcaatttagcctttagtttgtagagttctagtgttgtagtcttgctgctattgatagattggttgtggctctcctgaacac

SEQ ID NO: 206315 - DNA, 326 bp, Glycine max
  unsure (1)..(326): unsure at all n locations
ccatcacgattatcggctccctttccattattgggggtaccacctgggccgccagatccctccaccttttgggcgtgtctttgaatgatccgtccccctttttgcacatgttctgcattagcatcactatccggaaccatattaaaattgtactgatactgcctaacaaaggcaaccattaggtccatccaagaatggactcgggaaggtccaagttagtgtaccaggtaacagctaccccagtaagactttctngaaggaatgtataacaattcctaatttttgcgtatttcccatcttctgacatacatcttagatggttctga

SEQ ID NO: 206316 - DNA, 298 bp, Glycine max
  unsure (1)..(298): unsure at all n locations
aagcataaaaatccatacatcactttactgccttttgcgagaactacgtaggtctgatttcctcttcgatggaggacacgtangagcaaaagccccgcttttgtcgacctcgtgagatggttagaggtccaatgccttatgcttcgcaccaagtaaaatgaatcaatttaaggtccaacgccttacatgacccccttccaagtaaaaagaatcacttgattcgctcctgttgtaagaactacgtaggtctgatttccttatcacaattgacgaatacgtaagagcaagggaaacaccc

SEQ ID NO: 206317 - DNA, 107 bp, Glycine max
tgctcaatgtgtaattgatactgggttggttttctatattatttcgcagctaaaattatgcaatttctctgataaaagtttctttgcctgacctacaaattggatta

SEQ ID NO: 206318 - DNA, 297 bp, Glycine max
actatcatcaatttcaatgacatctagttagaacattttcaagttgtcagcaataatctattgcttgcaggtcatccttggatacgaaattacaataatgtaaaagttccacttgatattttaatatttaagttgatgaagacatatatgagatcatcatccttacgcaaggctgccttaaggggtgcgtatttatttgttgaaaggaaagttcaatcaattttctgtggctgtatgcttcctggggaatgaagatttcaattcattcatccctcattcttgaatggatatataatc

SEQ ID NO: 206319 - DNA, 446 bp, Glycine max
  unsure (1)..(446): unsure at all n locations
aagctttttatccaaggcactctttttgtggtgaagcttctccttccatggcttatcctctagtagatggcgcgtccgctcacctcttatcctttatctttcgctgcaactccatggccgaaaatcaccattgaaggaccttattgaagctcaaagacccaacctccatagaagcttcacaagaaagcttccatcaatattatacttagactatcctaaaaaatgatagctttttcaattggaaacccaagattgctaaccagacctttaagtcagatcccatcctttattgcttctattagagcatgcactctacctttgtagtggataaaaccacaatgggctaaagagnttccttccaactatcaagagagttgccaatcatgaatgggtaccttgtcatagttctccttgcatccaaatctacagcatagtcaaaatctaat

SEQ ID NO: 206320 - DNA, 400 bp, Glycine max
atgcgacataactgaggatgcatcggtcaaactcatctttaaatatctggcataaagtagtagggtcattctgatcagcaagatattcaaggatgctttccaaacactcctaataataataacagcaattgctccctctgcctcatttggagaagaggtaaacctgtaatcatatgtaagctcttcccactgtttaatgtccctctgcgcaaatattataatatgttcatcgccattaacacttataactctggaatagcaatttggctgcactcaaacaaaaattataagcaattattctttttctttagcaaccaaaataaggctgaatgaattcttccataaataaacaagttgaattgcaatatttacaaactaatgtcaaaagcataggagtcaa

SEQ ID NO: 206321 - DNA, 375 bp, Glycine max
  unsure (1)..(375): unsure at all n locations
gaaattagataanatcgagttcagcatagttaacctttagccaaaattataaagatatcaacccttccaacaatattttcctaatagaactcatcactaggtcccacatggacaccctacttggattagctccaatcgagatcccgaggaacttaaaaatctcctcagctgaacaatgcaagaaaatacttttagcaaagtttacctttaaccctaaggcaagctcgaaactcctaagaatgaccttaatggttagtatagagcactaaaagaagagaaagaaataaagggaagaaagaataaaacacacagtttaacgtggttcagcacacaatgtatgtgcctacgtccacggctacactangagaactttta

SEQ ID NO: 206322 - DNA, 370 bp, Glycine max
  unsure (1)..(370): unsure at all n locations
gaggtgatccctcttgctgtctaattttgaattggagaagcacgtaacattggaactgtgagcttagcaccaattacaatgttgatagctagatggtgaagttcactagctagattgtaaacctaggtagctagtgagaagacacagcttgcatgcatgtcccaagcatgcaagctgtgtcttataatatccactgctctttctgtaaaatcaatttcaaaataaccaaagtaaacaaatcatatataatatcaaattctatacaactntatctgctgcaaacactactatagtactattgctatgtcttataaaatataaaactacaattacttctctaccccttctaaaggtaaatcacaagtattta

SEQ ID NO: 206323 - DNA, 458 bp, Glycine max
  unsure (1)..(458): unsure at all n locations
tgtgttctccctcgtagaactacttactgttttaacagttgcggcccaactatctggtagtgatgacaatagaatcaatgccttcacctcatcctcaaatttaatttgcactgattccaattaggcaagaatagtattaaattcattaatatgattagttacagagataccttctcccatcttgaggttgaacaaccggcgcatcaagtatactntgttggctggcgatggcttctcgtacatatctctgataacgccttcattaagcctgcagtagtcttctcgttcatgatgttgaacgcgacgttcttggctaatgtcaatctgatcacgccaagagcctgtcgatctagcaagttccattcttcttgcttcatgtcttctggctttacccctgataagggctgatacaacttcttctgatatagataatcctctatctgcatcttccaaaagct

SEQ ID NO: 206324 - DNA, 427 bp, Glycine max
  unsure (1)..(427): unsure at all n locations
atgtccaccaaatgcttcacaattnttcctttgctcanaagtagtaactgacacatcaaatgctagaaattttgaatatatgaaaatcttaagttttaccacatcaaactctcgggcaatcaaagatgttcatgcaaattatggtttccgcaaccacacactccaatattccaaatggacacaactatgtcatgcaatggtttccttgagaaacaccaattggtgttttgattatgacttcgttgactatgtacgaattttcttttggccagccattattggccttcaaaaataggtcttatttgatttattacaacacatcaaggttgacataggttnttagcccccctcccacttaatatagaagttcaaatacttcaactttntaattgtcaatganggccaaaccaatatcatgtggtttagt

SEQ ID NO: 206325 - DNA, 322 bp, Glycine max
  unsure (1)..(322): unsure at all n locations
aagtttagaccttctggtcatagagactctaatactttgtcatgaaccaactctcgcaaagcaaatgcaccaatgattntatgccnttacatctctggccatcagactcgtctaacctgaaatagctgtcaatacagcagtgtaaataaaagttaactaaaaaatagtttatcttcctagggagctaaatctagatacttatttgagggaagggaagtgaagtatgtatctttccttaaccaatggtatagtgcacatactgactagttcaccaaaatcattatatacaattgactagttcacccaaatcatcatatacaat

SEQ ID NO: 206326 - DNA, 460 bp, Glycine max
  unsure (1)..(460): unsure at all n locations
ntcttatgtgtgttcaggttgctaaagaatattgtgagcaattgntcgttgatgcctgcataaaacttnttgagcaatttaggtcatatgagggactgtactttntccttggatcatacttgagctccaggtaattctttcatttggaaaaaaaacttgtttttctgttggtaattgacctcattttattgagatattgtccgatgtatttctgctgatgtatgttcctctaaataatatggaacagtgaggatcctgacattcactttaagtacattgaggcagcagcaaagactggtcaaatcaaggaggttgagcgtgtgacaagagaatcaaatttctatgatgctgagaaaaccaaanactttctgatggaggctaaactctcagaatgcacggctttgattaatgtttgtgaatcgtttggatttgttccagatctaacacactatctatacac

SEQ ID NO: 206327 - DNA, 283 bp, Glycine max
  unsure (1)..(283): unsure at all n locations
gcaagctgactggtctttaactcaagaagaaaattttgctttaatatnttacctggggaacatgttatccagcatatacttttcactttttatcaattagcaagccattgtgaatcctgtgtacaatttgtatttaattctctagagttgactcttgactcatttttcttatactaatggatggtcctgcattagacttctgctttgtaaaaattctcatagatacattaatataaaaaaaaagccattgcattaccttgaaaaaaaaggcataaaaacaagt

SEQ ID NO: 206328 - DNA, 405 bp, Glycine max
  unsure (1)..(405): unsure at all n locations
ctatagcattgtggagtgaccaagctgaggccctgtggtcgacacacacggcaatgatcacgcattgaaagcttgccatgaaacacattaagccagtgctcgtgtaaggagctggaaatgtcttgcttatgtctttctgaaaaacgtaatgatataataattctcttaaagaggaaaattaaactagttaagatagattgatgcttaattacttgaattatgaaccatgctgcccaaacaagggtgctaagaattacgaccaaagggcctaggaacatgtttcctttgccagaagagctagttccttccattttctcagcatatctccagtggaatacttgattgcctaaaccaatggttnttccatggtaaaatgacannaagcaggctccactcacacacaat

SEQ ID NO: 206329 - DNA, 417 bp, Glycine max
  unsure (1)..(417): unsure at all n locations
gagctaggtcatgaaatgagggatntcgacgagtgagggctttcaagtttaaaatgatgacgaggaacaccacgacgcgagtagctcaacagtctagcacggcagcgataacgacaaccaccacgatgcgagtagctcaacagtctagcacggcagcgataacgatgaccaccacgacgcgagtagctcagcgagagtcattttcgggggtgagtagctngaacaaggcatagtgaatgagtagacagagtcgcgatagtcattntcgagggttgttgtacgaacgccgtttggattttcataaacttgtggactcgaagcagactcgcgagtctaccaaaactcgttcgagtctacttccgattcgattctacttccgattaaatcgccaacccttagtagaatcgtaaaattgac

SEQ ID NO: 206330 - DNA, 294 bp, Glycine max
  unsure (1)..(294): unsure at all n locations
ntagtctntagccttcaattatataaaagtaccaagtaggactaatgttaaacaattaaatgaanaagaanaagggttaaacaaaaaatattagtccttaatgtcttgttgtaggaacatacttaacgtgggtcgtggcttgtggctcgtcttgactcttgagagaaagggctctgagagagaagggttcaaagaggcagcggcgatggagagatctggcaatggattgcacagtggcatggttgtcagaggagagggcgatggcgaactggtggagctagagggggggggggg

SEQ ID NO: 206331 - DNA, 325 bp, Glycine max
ctcatgggccactttgggatagacaagacccttgtcttactcaaagaaaagttttattggccccatatgaagaaagatgtccataagcattgcactaggtgtgtggcttgtttacaagccaagtctagggtgatgcctcatgggctatacacacccttacccatcccatctacaccttgggtagacattagtatggactttgtccttgggcttcctaaaacccaaagaggtgtagactctatctttgtggtggtggataggtttagcaagatggcacactttataccatgccacaaggtggatgatgcttcccacatctcaaaac

SEQ ID NO: 206332 - DNA, 353 bp, Glycine max
  unsure (1)..(353): unsure at all n locations
ttaagcaccgcggctgcagcttgggggaaagattctgtgcgggattttcattaaacaactnatagatctaagacgcatatgagcagcatatgtgaaagaattaaacaagagaagtagagattagtggaggacatctatcaattcttccataatacatagaattatctatgatactgaacatttgtcaatgccctggattgaacaagtgtagtggtattgttgttatatatatcgtgttatcgatgttaattagagtcgtgtgactgtgaggaagcatatgtggcaaagatgggggagagagagtggtatctgttcagcttgagggacataaaatacccaactgggctagaaca

SEQ ID NO: 206333 - DNA, 358 bp, Glycine max
  unsure (1)..(358): unsure at all n locations
actcgtcctcgntggttcctaatttctttggttanaccatgcgacggagaccgcgcacctccttcctcgtctccttactctccattctcaccttcgcttcattttccctttacctctctcgcaatgccatttccacttggcgcccctactccgacctcagaaaattaaacgccgtcaccaaccacctcgtccttcacaacagaaacaaaaacaacatcttcaacaatcaattctcacgccaaacacggcgggtgtnctccatcaaggacaccttattatccaccgtctccgttctcatccccgactgggagattctcgtcatcgtcgcgccaaacacgcccttattcttctncgacac

SEQ ID NO: 206334 - DNA, 324 bp, Glycine max
aatttagggttggattaagtggttaaactgataaaggataaactctcgtaacctaggataagagacttgcttgtgaatcaaggggaagcaacgtgttttaattctgatattttctaattcacatatattcgctgtttaatttacaaaagcaaacaaccccccccccccatcgttactgttactgttactgcaagtatattatgaacatttggcttgtcactgctcgttgggaaacgacctaggatcacttcctagttactgcattttcatgtttatttgattcgggtacggcctcgatcaaatttggcgccgttgccggggagc

SEQ ID NO: 206335 - DNA, 439 bp, Glycine max
atgagtttcaaatataatcaatcatctttgattcatctatctttcaatctttttcaacatcatctctcaaacatctttcaatcaatctttcaatatctgtctacagaatttttctgattcatttctcttcatccttctaaaagtttttgattaacactttatcttccaagaaaagttctttgttcaaaaacttgtgctattcatctttttcattcacttctccctttgccaaaagaatgaaggactaaccgcctcgaattctttgtgtctctcttctcccttacaaaagaatcaaaggactaaccgcctgagaattcttttgattctcccctttcccttaagcaaaagatttcaaaggactaaccacctgagatatcttttgtttccccttacaaagaatcaaaggactaaccgcctgagaatatcttgtcctaacaca

SEQ ID NO: 206336 - DNA, 427 bp, Glycine max
tgtccatttatttatatttcggttcttattttttaaaatttcatatcaaaatagtgaaaatactttttattttccattatttttgtacatttttaaaataaaagtataatacttaaaacaaagataacttaattaaaataataaaaaataaaaataaaaaccgtttttctctaaaagtaaattccttacgactccgtttagagaaaataatttataaataacatatttgactttatctcaaaacataaatatctatataagtatttgtagaacctataaaacaacttataatatatctataaacttaatttaaccctaattcactttcgaatataaaaataacaacttattataaacacttataataatgaataagtgttatcgaaaggagccaaactataaagaaaaaaacgtgcacgtctacacg

SEQ ID NO: 206337 - DNA, 461 bp, Glycine max
  unsure (1)..(461): unsure at all n locations
ctgcaactagcgagcttccactaacgttgtttatgggtcttttacgcgctaaacgtgtgttgcacgctgagcgataatgcgcgcacggcactgtcttgcatgttaagcgggctttccaattctttcatatttttcttcaaggtgttttcttccagtatttgcatcaatntttcctctaaagcacttgaaatctttttcttttaaaattttctaatcaaaaatagcaaagatgttaatttcttcattatttcattaaacacaataataaagtaaaaaattacgcccacttatgaatccaaattgactatcacattagcttatatttcgcaactatcaaagggaaagagaattaccaataagggcaacgagaatggcagtttcttttaaaggattccaatttaatttaaataaattgactattaagccacagagaccatgataagatagaatgcaggtctaat

SEQ ID NO: 206338 - DNA, 326 bp, Glycine max
  unsure (1)..(326): unsure at all n locations
cttatgtgtttactgtggatgtaaatgctatcatctccaaaccttacaccatttggtgagaccattatgcatattgatgaaagtcgtcctttgttattattaacaatactaaccaaattcactctcctttattgtcatctagttcttgcctaccgctgctctcgattttttggtgctctaacacgatgtatgacaatgcaacatanngatggcgttcgtggcatatggagcatctccatgcataatgctatacaatatgtggatgacccttggcacggattcttaatggagaatcacttgatgggtggagatgagggtcgtgttta

SEQ ID NO: 206339 - DNA, 444 bp, Glycine max
  unsure (1)..(444): unsure at all n locations
tgttaagcaagatctatagattattaatatgttcttcagcgtataaaaatatgattttcatgcctccctctctcaaaactccgtcaaaccaccctagaaactcctcctccaccaccggtggccaccacgagccgccgttgcttgctaccaaaccatcatatggagagaaacattttaatcggagcggaatcctcggaatccatttcaagaattcagtggagaacaagctctcaatccttttttcgtagtttctttgaggtaatcttgatttctatatctttctcctagttagtttgagtttttcttagtgtctcttttgttttgggcaccataatagaatgttgttacatntnctttgaaaaacccttaannaatgaaagcgtgtaaaattatctcttatcaaattgatattatttntgtgatcttcaccaaaccccagtcaca

SEQ ID NO: 206340 - DNA, 321 bp, Glycine max
  unsure (1)..(321): unsure at all n locations
gctgaaaatcaaaagatcctagccagacgtatatgcttccccattacatcaaccaactggtggggcaggactacattaaatatctcatagcccttgggaaaaaggaaactgtccatcagctcaccctttttagcaatttcagctaacttgtcctatgatcctatccaattctcgtatacaaagattgatcaagcttatattntctggatttatntcttcatttcaatgcccaatcagtgtaacagaccttaccacaaacattctaggtgtcccatatttgtaaaaaaaaaaaaaaaaaaaaaaaatcttctaccccattgc

SEQ ID NO: 206341 - DNA, 439 bp, Glycine max
  unsure (1)..(439): unsure at all n locations
ttatcttatatgtaagactnggtggtccagtccaatatcgtgggatgtatcctttcgagaggtataaaatgagtaatcatttatacgccattgtattatatacatatagtcattnntaaaaaaatacttattcatattaattntaggttnttacactccctcaaaaataaagtcaagaataaagctaaagttgagggaatcgattgtgaagcgtacttagtggaggaaacatctaccttngcctcattntactatcctgatcaaatngcagcgagaaggactangatgccttgaaatgttgatgtggatgaaggttcttcatctnttcctcctatatcaattntcaattacctaggaagagcgagtggtaaatcaaaacatatttttttggaccaagtgatctttatgtngctcatttgtacgttgttcaaaaattttc

SEQ ID NO: 206342 - DNA, 381 bp, Glycine max
  unsure (1)..(381): unsure at all n locations
acctcattacaagtctagaaagtcctccggattcattttgtgtgtttatttctatatggtagtagatgaaatataaaggttaggacttgcgttagttgtttatgatggaataagcctaaacactcgtgcttgagtgaaacaatgactatgaggctctggttgatgattctttccttgatatctgctgatcgaggccgtacccgaatcaaataaacatgaaaatgcagtaactaggaagtgatcctaggtctgttcccaacgagcaatgataaaccaaatgttcataatatacttgtagtaatagtaacgatcgggggggggttgtttgtctgtgatttaaggagcanaacaagtaaactggaatacgaactaatataataa

SEQ ID NO: 206343 - DNA, 371 bp, Glycine max
  unsure (1)..(371): unsure at all n locations
tcatctgttcttgcactccctcttcgttatccatcttactttnggatcgagtgttataggggtgcctttgcgctntnttagttatggtgaattccctaaagaaataaacagtggtgagtatgccaccaaaacatgaatatgctaatgaatgatcagggcacttggatccacctcaaggcctttntagacaacgtgatgagtttctgaacttctctttntataaaaaggaacaaaagctnttatctagaanagatcatacaaaagtgttacaacagaaactaacggtttctaattatatgggccattaaatctatcatgtgttgacagtaattgattagcccgtgaatttcctctgnggctgaacacacttc

SEQ ID NO: 206344 - DNA, 358 bp, Glycine max
actaagctggctcctcacccttctttcacaccactagttttctaactttgtcattatgataggcatcctggagcatgaaagatgcaatgtggaggatcttgactactgggaaagactggacagcattttcctgtatgaaggaaacacggaacagcatacaaagattttgcctaccttgttatagatatgatggatacttagacgatatgtttttgtagcctccaatacactagatgccaacttgacaggctacggacatcatcaagcttttcgagcaactattattaactaggtggtaattaacagacacaacactacacattttttctttatataacagtattggtgggtgcagttt

SEQ ID NO: 206345 - DNA, 423 bp, Glycine max
  unsure (1)..(423): unsure at all n locations
ctcagcttttatccagacacttgtggtgggaagcttcccttctatgtntattctctagtggatggcgccttctctcacctcttctctttatcttccgctgcaactccatggttgaaaatcactattgaaggaccttattgaagctcaaagaaccagcctccataaaagcttttcaagcaatattccatcatatgccacccacggtgagtgacatatatgcaagagcacaccaccatgtctccagtgggtgccacccacgacaagtagcgtgtatgcaacagcacgacgcccaaaacccaggtcaaacaattccttggatgatcctccaaaggtctcacaaaacccaaggcctacccttggtgagtcccacttatttacaccactatgtctcccagatgtgtcatttcataagtgacacgtatg

SEQ ID NO: 206346 - DNA, 444 bp, Glycine max
  unsure (1)..(444): unsure at all n locations
agctttaccccaagcttgacaacaacttggtatttcttgtcctactatgtgggctctaaacaaatcaaaaggatntgttgtttgggattgctcactaactaaaactatgaacgtcttatagacgaatatacaataaggtttttagtcttttctctcaatatgttcaaggtgttttaagaggttntgaactttacaacaatatacaaaaaaccttttatagaaaggatgaaaagaatgtatgcgcataggatttgtgtcttcttcttcaaagcttccagtatttatagccttcatcttcaagtatttgttatctcacaatgattggattcttcacttgatctttgtttgatgataatggcccttgggagcatttaatgcatgcattaaatgcacgtncctttcttatgcagacaatccacacttataggatatcatgttgaacac

SEQ ID NO: 206347 - DNA, 387 bp, Glycine max
  unsure (1)..(387): unsure at all n locations
tgtaattngtaatagatctaagataaaagtgggtagatgctttttcctgagtgaaaatcctcttgtgaggtgaaatctgtatctatgcagtcaaaaatacaaagaaccttttgttgttggaagtccaatagtggcagacaaaggttgtaaccaatgttgctttttgtctagcggatgatangtgtgaagtctagtgtgagtgcgaataggttgttgaaagctagtggntaggttgtgtaatgaaatttatattgagggtggngactggatgtaccttatgtacctaagatagaggtaatcatattaaaccatgacatcattcttgttctctctctacatgatttgcggttgatctattatacntttgtatcatttaaaaacatttac

SEQ ID NO: 206348 - DNA, 258 bp, Glycine max
agcttgaccgagattgcccacctggttagttgtaccagaaacacaaccgagtactgagaacgcatcgataattgctgacaccacaagttacactggccgcttccttccttgcgcagatgagcagacctacatatattcctatactatattcaaatcggtgagtgctgatcatactagtctcaactagagcttctgtagtctgtgaccctcccttcctccatgcatgattgacaggaaaggccaccattgcatatatga

SEQ ID NO: 206349 - DNA, 287 bp, Glycine max
agcttagcaggaagatgtttattaaatgttctttaacaggaaggtacggaatcgcgagtcccagaattgacgatgataaatgctctgttgtgacttaagaaagagcttaaaacccaaatgagaactatcgactggttgattacgcactctacgaggcgaatgagacctggcataaaacggaggttgagatggatgtggtgaatttaagagagtcatcgaataacggcattttgatccttcctacttaattgggacacaggcgttagcgaggttatcgtattaagttg

SEQ ID NO: 206350 - DNA, 248 bp, Glycine max
cgggaaacaatgctgtcgacggcgttgatgtatatcatatgtgaactctatcggtggcggcggaacaattgacgaggtggactcagtccagaacaatgctgaaacaagaacctctcttaggcctgggtccatatcacgtgggatagatctgaatgccgctctatggtgactacaaaaattcacgcgttcctcacatcaccttatacggccgggctgtattgcatgaaagtgcgttatagccactctac

SEQ ID NO: 206351 - DNA, 438 bp, Glycine max
agctcgacaagagcttggaaggagggagcttctatttatatgacatatccaagaattcaagatcgaacaagttggcaatactctcataagggaaagtaccattgaatagacaatagtgaagttgaagcattttcagttcctttaaccttccaatgcttgcaggaatgtccccactaaagcttgtggaaccgagattaagatgctgcaagttaaccaagttgtctatgtcatcaggaatggtgcccgaaaaatcgttcatttcgaggtcgaggtaaaccagcttggaacatttgtagagaaatgttgggaactcccctggaatgaaattcctactgaaattaacaagtgtgagatttttgaggtcacacatgaaaggtggtagtgtttgagtgatgttgctgttgaccaaagtcaatccagtgactgagtagtcactgg

SEQ ID NO: 206352 - DNA, 473 bp, Glycine max
  unsure (1)..(473): unsure at all n locations
actaagcttattgaggcatttaaatcctgcacctccaacttgtattctgcagcttctatcttatgtatgngaacaaaaatagttctttcacaaaaaactcttactcttaaatgttcattttagaaggtaatttttactttctgaaatagatattttagaatatttttaaagtatttacttacattctaaaatataatatgatgatacaaaactatttctgattaactgttttggaaggtatcatgaactcccattttagaagataattttcactttccataataactattcccaaatagaagaaagtgttctaaaattatttcacaataactattctagaaagtaaaattaccttctgaaatagaaataagtgttctaaaactatttcacaaaagctattctagaagataagaattacctttcanaatgagcattctagaatagggtgatacacactatttcagaataactat

SEQ ID NO: 206353 - DNA, 438 bp, Glycine max
agcttcttcacatagtccgcctttgcttgttcttctttatgcttaaaaacagaaacattaggcataggcaaaagatcaagaggagttagtgggttaaaaccataaacaacttcaaaaggagaacaattagtggtgctatgaacagctctattgtaagcaaattcaacatggggtaaacaagcttcccaagtttttaagttcttcctcaaaactgtcctaagcaaagttcccaaagtcctattaacaacttccgtttgcccatcggtttgtgggtgacaagtggttgaaaataacaatttagtgcccaacttgctccacaaagtcctccaaaaatggcttaggaacttagagtccctatcactaacaatgctccttggcaaaccatggagtctcacaatctccttgaaaaacaaatcagccacatgggaagcatcatca

SEQ ID NO: 206354 - DNA, 370 bp, Glycine max
  unsure (1)..(370): unsure at all n locations
tattgtcgnttgaatntgctcaaagctactgttctgaatttcgagcatctccatatactacgggaaacaatcggacatccgagtaaaaaaggtttggtgtttgaattttctaagaggttatgatttcaattttgagcgtctcgatatattacgagactcaatcaggcatccgagtaaaaagttattgtcgttagatttttcttagagcttctatttccgattatgagcgtctcgatatattacgagattcattcggacatccgagtaaaaagttattgtcgtttgattttgctcaaagcttctgttatgaatttcgagtgtctcgatatactacgggacacaatcggacatccgagtaaaaagttattga

SEQ ID NO: 206355 - DNA, 368 bp, Glycine max
caaagcgagatgcagcaactgcatcaaaccatgcatgcatacctgcatcaaggaattatataagtgatgagtcacatcacgcatgccatatgacatatatcttacaactactctcaaccaacctacaagtgatattccagtgatacctatcctataagggtctatattcctctctctgaagtagatgatctgccaatctaatcaaagtcccagacctgccagatcaaagaataatacaccatatctgaaccaaactaatcataaatataaactgccataattacagttcatacaaatcaggtggagcattaagcggctccatcttaactacaatatggcgaagctgcatgataaacaagtcaccgcgt

SEQ ID NO: 206356 - DNA, 377 bp, Glycine max
atcaagccttgggttctgcctgctgtttattgagattcattcgccgctttgtcttctatgcttcttaacggcgttagcatttttaagcacatgctcaaaataatccgtcttaatttgttccaaagataacacactattttttataataattttcgtgaacaaataaacaattattttttaaaaagtttcgaaggaaacttaaaaagtaattgtttttaaaaatcaaactaaaataagcatgcatggagtggccaattatatatgtattgatgaattagttaagattagcaactatattccttaaaaaagaaagattagcaagtatattgagtcatctcaccaacgagttacgtttgaatattctccttgggattcac

SEQ ID NO: 206357 - DNA, 396 bp, Glycine max
  unsure (1)..(396): unsure at all n locations
acctgaggcatgaagcttngtgctctgatgaccacttgattttttttgtttttggtgcttctatggaggctggatctttgagcttcaatggggtcctttaatggtgattttccaccatggagatgcagcagaagacaaaggagaagaggtgagaggaggcgccatccattatggaataagccatggaagagggagcttcaccaccaagatgagccttggataagaagcttggagaggatgctctaatggaggaaaagaaagagagaaggggggagcacgaatttgaaggaataaaagagggagagaagtagaactttgaagtgtgtctcataagactttcattcatcaaagctacaacaagtgttacacatgcttctatttatagactaggtagct

SEQ ID NO: 206358 - DNA, 351 bp, Glycine max
  unsure (1)..(351): unsure at all n locations
tcgattcattctatgtacccgtagagggccacagggtttttcgtctattttattcnngnnnngnggactctttatacccgccgttgacgtgcttaagccattntacttaagtcatttcttgcttaacttaaaaataaaatcaatttccaccgaacgtttgaattgtattatccgttaacttcggttaaaataaattccgaccgttcggtcgtgccgtagccacgttggaaatcaaaaaagaggtaaaaaataatataataatcaaaaaacatcttttagcaaaataaagcggaaaatcaatcggacattttttctttgggatttctcattcttaattgcattgactaataa

SEQ ID NO: 206359 - DNA, 370 bp, Glycine max
  unsure (1)..(370): unsure at all n locations
tgatattgaacacccgaagctcacgagagttttanaaggtcttaactattcacacggatcgacagcctcacgcttataatatatagctacgctccatattaaacatccaaaactctcgctaaattgaaaaggtcataacctttcatactgatgtgcgattccggcgcatcatatgtcgagaagctagatattgaacaactgaaactctcgatacattcaaaaggtgataactattcacactgatgtacgattctggcggatcactatatcacgacacttcaaattgaacaacggaagctcttcacaatttcaaatggtcataactcttcacaccgattgtcgacttacgcgcatcacatatagagacgct

SEQ ID NO: 206360 - DNA, 427 bp, Glycine max
  unsure (1)..(427): unsure at all n locations
tctaagccttctaagccatgtttctctcctcctttggcatcacanaatagccaaagtacgtcgaaattaacataaggcagaaaataacacagccataaccattcacaagtcgaaatcaaacataattcagttataaataactaagtgccaaatacttaaacataaccaaagttcagagaataatgtcataaaacatagccaaatacacgacttanaataaaatataataataacctaaatctatgaagatggtggtggaaggtcgaagcactgacgaacataacttatatcctcctcaagctgagtgatgcgggtatccattcttgcaaagcgagcatcaatggcatcgatatgaccatccaaggaatcaaagcgctcaccgacataggtgcggaggcctcgtaactttgaaagaaattcatgcatg

SEQ ID NO: 206361 - DNA, 374 bp, Glycine max
cggcatgcaagcagagcaggaacacgtgtatatgttaatgaaacaacgagacgacgcgctccatgagaggttggaccaaacggagaatagcgaccacaacgcagaacaaaggaggagacgagggattgaaggtgtacctagacaaaaccgaatggaggcgaataaactcaacagtcctccatctaaaggaaagaatgacccggaggcctactcggagcgggagaagaaaacagagcacgttctctcatgcaacaactatgaggaggaccaaaaggggaagctcgccgccacggacaattccgaccacgctccggcgcggcggaacaagctacaacgggagagagccagaaatgaacagcccatggccgacaccc

SEQ ID NO: 206362 - DNA, 350 bp, Glycine max
  unsure (1)..(350): unsure at all n locations
tgccaacaatttccatganatgtaaggccaccgtatgagtagtataatgggaagggagcattcccaagtgaattcctttagaaaagcaatcaacgatgactaaaatagtagtatgtctgcagtacactagtaaaccaacgatgaagtccaaggaaaggtcctccacagccgggacggcactggcagggggcagagcaacctggcgggctttcgggcttcatatttagtgtgctggcaattgatacaagctgcaacaaacgtttgcacatcctttcttaaccctatccaagtgaaatttttgcacacccgtgcaagggtcttcataatacccatgtggccacttgtgggca

SEQ ID NO: 206363 - DNA, 378 bp, Glycine max
  unsure (1)..(378): unsure at all n locations
gaagcaaacgaggatatcattgagacagatcctagagctactcttatttgtcctaggccaatgtctgatgttgatgaacaactctttgctgctcaattngatacaacaaatgaatacaagcttagatggttataagagatttatggaacaccaaaacttgtctccatagaagttataaagaagcgtctagacgcatgaaagctaatgatgttaactgacgagactattagagtgttaaaactattcaataagcttgacatgagactgatgaagccaactaaacaaaaatccacaacatggatcttgccttcaagaccacctattcagaagcaactatacatttaagtgcatcccaaccctcacaccaaattgtatcat

SEQ ID NO: 206364 - DNA, 372 bp, Glycine max
  unsure (1)..(372): unsure at all n locations
cgctnntggaaatgatttctataccaaagttagtcgtataaagttactaagactaaacatgtaaatatgtcggatcctgacaaagatcccttctacctgatgatattgaccatcccgcaacttttcctcaagctgttgcaggtggcgtggaatgctagcgtgtttggggtgtataatgataactccccattttgtacataaagcatgaagatctttctgaaatagctcacgatggtcaatgtttgagcatctgttatacaattgtggattttgtaagtcactttacattattggatattagctaactaattggtttatacccatgcataatttactatattttaacaatatgcatatggctgagacaactat

SEQ ID NO: 206365 - DNA, 426 bp, Glycine max
  unsure (1)..(426): unsure at all n locations
agctttggtaagagactcttattcttctttctcttcttgnnnncctcaccaaattcgtccaagcttctcattcttagttccaaaatttcatttttcattctgtgaagcttgagagatcaaggatcagagctccttgttcatctaagccatttttgtgtagcttcatcaaggtaaggggggtttctccaattcttgaaccctaatcttgttgcctttggaagctaagtttcattgaatgttgttgtgatgttcaaaattcgtagctactgccttgtctggaactgtattatgtattgttttttcctgaaattttaaggttaaaaatgagttctttgggtgtcaaaacctatggtgaaacttaatatttacctaaatcacgagtttctaataaaagttatgaacaacacaagtttaagaatctttttg

SEQ ID NO: 206366 - DNA, 349 bp, Glycine max
ctcagcttcataatggctccagctcgtaagtgtcttctacttatcaaccaaaaatgatgtatccacatcaacaagcaaaaatcttattgtgaggctcctagagagttggcgttgaccgaaagtggtcattaggtccacatagtctctggtctttactattttgcctacaaagccaaggagtggaccagcgtgagggtggacaatatccggggagacctcaagcctatgaaaagttctccaatacaagatgtcggtggagttgccctggtcgatgaggactttggacaccataaagtttgtgatgatgatggagaccaccatgggattgatacccttgaagtccctatct

SEQ ID NO: 206367 - DNA, 311 bp, Glycine max
cagagaacctgcttcgccgcgtgacctcgacggccacagaacccacaccgcctccaccgtcggtggctccgtcgtttccaacgccacgctcctcggctacgccaccggcacggcccgcgggatggcgccgcaggcgcgcgtggcggcctacaaagtctgctggaccggcggctgcttctcctcccacattctcgccggaatggatcatgctatccaggacggcgtctacgtcctttcgctctacctcggtggctccttcttctccgtccttactacttttacaacatcggcatcggagccttctcggggct

SEQ ID NO: 206368 - DNA, 377 bp, Glycine max
  unsure (1)..(377): unsure at all n locations
ctcaaagagttggaaaagaatgatagagagtactaagagaatgcttactaaacaattaaggagaaaagtaaaaacacttaatttaaactgattcactcaatatgagttacattcagtcctcgtttacacaagagtaaaagtaaagtattttgatttgttactcctgactataaaagtatttttgatactacttcttacacttttttagactcctcctaaatctaagaaaacactaagtcacttctgaccttcacaaacaatagtttgaatgaatacaaatattcaataacactcaacaagtgaataaacaatacagctcanatacaagataactntttttagcnacgataaacaaataaaagctttaaatcagtcat

SEQ ID NO: 206369 - DNA, 333 bp, Glycine max
  unsure (1)..(333): unsure at all n locations
acacaagcggagctntattcagagaaatatagtttatctcttttatcttagtgagagtgattctcctaaattcttgagtgattcaagaacaccttggctgtatcaaaggactttcacaacctttgtgtgttgccctcgctggaaagagtgattatttccttcctttcatcatcacccttgttctttcaaaccacaattccagaaaatccacctctgcccaaaattatctcgtggccataactcccattttacgcactcaaattaagtgattcttgagcctaaattgaatttcaaaacgagacctttcacctcattttggaatcacctcatttg

SEQ ID NO: 206370 - DNA, 268 bp, Glycine max
tggaactaccttatgcactcctctaatgactatggcatcatttctggcgcttaactggtgggaattggaggccatcttctcaattaaatttctggcttcaacaagagtcatgtctccaaaggctccaccactggctgcatctatcatacttctctccatattactgagtccttcataaaaatattggagaaaaagctgttctgaaatctgatggtgggggcaactggcacatagtttcttaaatctctcccagtactcatacaggctc

SEQ ID NO: 206371 - DNA, 429 bp, Glycine max
  unsure (1)..(429): unsure at all n locations
agctntacaggaacgattactcaaaagattattaaagctttgatttcgattcattgggataaagataggaaaaaaagagatttccgtggtttatgtattagtcgaataaatgcagtaattctatgcaaaattattgattttggaccaagtgatagtgacaatcacactatcgatccgactgtctcaaacatttttttcttcctaaaaattatatgaaagaaagaaataaaatagaccgaaacccataactttttcggaacattacacgagttcaatgtttgtggggttatgcgtgtggtacaaaaaataattattgaagagttacgagtcctgagcatatcataactaacaataaaaatatttaatatcgttaaaaaaacagataaataatactagtataacagtaaagaaaaacattattactaacga

SEQ ID NO: 206372 - DNA, 402 bp, Glycine max
  unsure (1)..(402): unsure at all n locations
agacatggacattaacttatgtgctctcattcaaattctttntgtaaaaagttttttgtttagcgctaaaaggctctcaaaataccttgaacaccttatgagaagactaagtgatgagattgtatatccgtcagtaagaagatttagagttagtcattgtgcaaacaaacaacaaatcaatttgatttgtatagagctagtagtggcttggtagaacaaagaatatcgggttgtatcaagcttgggataaagcttgtgttgtagaaccagaagtggcagtgattaacacttgtttgttgaagttagtggaacttggtggttagttaagaattaaacgtaatctcagtggtggagacaaaccagtataactctctggcttttgtgctttcatttcttctttac

SEQ ID NO: 206373 - DNA, 437 bp, Glycine max
  unsure (1)..(437): unsure at all n locations
agctngtagaagctactgccatctgtcatttaaccatcatctggctttggaaataatacagtctctttggcaatctgttgttgtaatgattgaaaaagagatctggccaacttggatgctccaggacttttggttacgtcttcaactgcaccaaagacattgctaaataggttataggaatatcatggccattgttgtaaacctaacactatgcagccagatacatgttctcatattctttgactctcctccctcccccttttctccttttatcagatttgcaaaaagattaaaacattattttccttcattgaggattcctcatcctcctgctacgccttntattagcaaattattgttatttaaccttacataaaaagataaaatggaaaattgccaaacaaccacaaagaccgatgaatcctgtccctaccgag

SEQ ID NO: 206374 - DNA, 378 bp, Glycine max
  unsure (1)..(378): unsure at all n locations
tggacttcctacgagtttatatttattcaagaaaaaattggtccacattntaccgaaagccattgagggtttgtttgtatccatatttgatatgcttcaatctgagtctaagatgagtcaaacatgatttttttatatagatcatgatgtttgatattgtgttggaacttgaaaaaattattctaaattttagaataaaaacttattgaaactattagaagtaattntatttgtttcatgcatacacagtaaggcattttgttagatattgcaaatgtataaatttgtttttctgtcgttaattatttaatagaatctattgtcatgacactagatgataagtagaaattgatgtgattctaacaagtatgctgacgt

SEQ ID NO: 206375 - DNA, 439 bp, Glycine max
agcttgtaatcaattacacacatactgtattcgattaccagaggtgtttttcagaaaacattcttaacagtcacatctttttatctgtttcttaaatggccatcaaaggcttatatatatgtgacttgagacacgaatttaacaagattttttcagaacaaaaaggttttatcctcttaaaaagcaaaattgttttatcctcttacaaattccttggccaaaacacttgtgattcaataaggaattatttgagtgctcaaattgatcaatctatctctttcaagagagatttcttcttcttttcttctttattctgaaaagggattaagagaccgagggtctcttgttgtgaaagaattctaaacacaaaggaagtattgtccttgtgtgtttagaacttgtaaaaggaatttacaagatagtggaactctcaagcggg

SEQ ID NO: 206376 - DNA, 367 bp, Glycine max
  unsure (1)..(367): unsure at all n locations
tcanacttgcaacanaggagttgagcaggtaanaaagattcttcttcaaaatcttataggtgactntgagcgtttgtttatggaggagtccgagtcaatttctgattatttttctcgagtattggccgtagtcaatcaacttaaaagaaatggtgaagatgttgatgaggtgaaggtcatggaaaaaatacttcgaactttaaatccaagttttgacttcattgttaccaacattgaagaaaacaaggatttaaagaccatgactattgagcaactcatgggttccttacaagcatacgaagaanaacaaaagagaaaaattaaacaaaaggaggctacggagcaactactacaactcaacgtaaag

SEQ ID NO: 206377 - DNA, 441 bp, Glycine max
  unsure (1)..(441): unsure at all n locations
agcttcatgatgatgaatcaagncgattcttgtagnnnttantattacaaagangataacaaacagcccaaataatgatttcaagatggagtcaacaagttcaagatcaagattaattccaagtttcatgagaagaaatcaagaagattcaagaatcaagagaagtttgatttcaagattcacgagaagataaattcaagattcaagagaagaaatcaagaagacttcacaagggaagtattgaaaagattnttcaaaaaacaaacatagcacacttttgtttttgaaaagagttttcctcaaaattttctaagttaccagagtttttccacaagatgtaactcttccaatggtttttaggttgtctcaaggtcgtaactcttccaatggtgttgttgaccagacatgaagagtctgttaaagcatgaccttgacttgcct

SEQ ID NO: 206378 - DNA, 300 bp, Glycine max
cccctaaatcagccacaaagcctgcctgccgcacatccgataccaaacaccacccttaacacaaaccaaaacaccaaccagggaaggaattttccagaaaagaagcctgtagaattcaccccaatttcggtgtcgtatgctaacttactcccatatctactcaataatgcaatggtagccataatcccagcaaagattccacaacctccattttcttgaggatacaacttgaatgcaacatgtgcttatcatggaggagttccggggcattccattgagcattatatgaccctgaaacat

SEQ ID NO: 206379 - DNA, 378 bp, Glycine max
  unsure (1)..(378): unsure at all n locations
gacctctgagcaccgcagctgcagcttttacgaaagaccttcttccgtattcttcttattttaattgtttnttacgctccgccctagacttgcgaaaaacaataatgtttatgaatattatataattgaagtaaaataatttgcatttgcggatcattagctcaattaggcataataacttaggtataatattaaattatataggtataataattgtattttgtcgtagtactaaaacgtttaattagttgctagttatacttgtatatattttagttgttaattacggtgcaaaatttgtatgtttgaagtatttttttttgcgaaactagatgttccgcaaaatttattattatcgcgttttcgtagcatgtgctg

SEQ ID NO: 206380 - DNA, 355 bp, Glycine max
ttaccgaagtaccccacctggttagggtgacgaagttgacaactgtatactgataaagcatgggtaatgctgccaccagactttccgtaagcccacgcggtccttgcacaaataggctgatctccagaaagtcccataaaaaactcaaaacggtgtgggctgttcttctcaatctcaactaaggctgcaatatctgtgtcaccagcctgtaccaatacatctcagtaagataatacgaccattgtagaaatcacatctagtcgaacatatggttactaacctgaatgattttagtttgccaaagctttgtaatgcgaaaacctcgacgctcaaacaatcgtttgcaaacaccttg

SEQ ID NO: 206381 - DNA, 249 bp, Glycine max
  unsure (1)..(249): unsure at all n locations
tttttttttgctngcccagacgacaacttaaacataactccatcctccgggaacactatactcttagcacgtatgaacccatgagtttctgaaggacagtagggtatcataagtgctcaaaccagtcccctgagtgctgcggatgccgatgcggctttggatggaagaggcatttcctcttcactgtgctgtatggctgtcccactataatcaaggagttgtttttacgtaaaaaggcttacaggaaat

SEQ ID NO: 206382 - DNA, 424 bp, Glycine max
  unsure (1)..(424): unsure at all n locations
ctatctataatatgcagcaggggacgtatttttgctttttaagacngcgcacttggcgtaacaagcattattcgtcaccatgaaacacataccttgcttctcttgaggttctgactttgtcttcgtgtagctagggtctttcattctttctattgtaatgacgtgcacatgatttactaatgatcataacttgacaggcatcatatctaaaccttcctgattctactttcaaggtaaccattgttattgatcttcctgcactttctttgtctaagcttcaaatgtggctcttctgcaaaatccatggctgttctttggaactattaaagcaactccatggagctaaccccttttcattaagcatccatgtcatgattcagatgagacccaactcatctacatgcttctcgtttatgcttctact

SEQ ID NO: 206383 - DNA, 323 bp, Glycine max
  unsure (1)..(323): unsure at all n locations
ngctntgagataatggagtttatgtgaagtaactaattncatgcaaaaacgatcttgctatcgttttttttttttttataaaaaaactatcattgtcctgttttaaaaaaaaagtaaggactaaaaacttatcccaccactctactcctataataagagagtaagtcactcacacttttcattctctcaatttgacatttttaatctttataacaaattaacattgattgataattgaaactaactaaaaaaaatctaaccccacaagaaatgtgatcgtacctcctgtaaaaaatcagcggttccctttctttcaggacatc

SEQ ID NO: 206384 - DNA, 363 bp, Glycine max
  unsure (1)..(363): unsure at all n locations
taaaacataaaaaaatattattttccaataaaatatatttaatattatttctaaaaatatttattattaactttttcaaaattatcatataaatattaagcaacagaatatgtttttttatttaaattattaaaaataaagttaaaatattatttgtgataaatataatagcaaattaatagattgttaaattatgaattttttaaaaatagttgtatttagtttcacaataacaatacatgtattcaaataaaataggttaaaatatgattttcatctttataaatataaaaatattcaaaattcatcgntataaaaatttcacccagaactaggtttgaataatcctaacttacatatatg

SEQ ID NO: 206385 - DNA, 365 bp, Glycine max
  unsure (1)..(365): unsure at all n locations
tgtaactntggttctctcaagagactcggtattataatgttatcagcangngctctatctcttcaaaacagaccctttatttggttcttcctcgtccatggccatctaaaagacaccaccacaaccacaggcaccttcggttgggcatgctcaacaggtactgttctatatagtcttgtagatttctagctaccatagtcttttgtgctatttctcacagcttgcgtggttgtgttctgtgtgtgttgtaaacattggcttgttgaatgatgatgatgcacaaggagggcacacttgaaagaagcaagacaaaggaaaaggattggtgtggtgaaatcacagattcagatgaagaacttgaaact

SEQ ID NO: 206386 - DNA, 416 bp, Glycine max
  unsure (1)..(416): unsure at all n locations
agctntatggtacagctntgttggtatntttttgtgaganctaannggattgagaggttntctcatccatcctctttgggtggactttcttttggttcagaactgatatagaaactgtttttcggggtttaagttggaaataaaattgatttagtttataatcaggattcggatctcttagcaatttggtgatatttgtttagtgacgtttttgtttagttattattttttaaaaggttctgcatcctaagtaaatctacttttggtagtcaacgtgaaggcataatgggactctgttaaacactcttgtctcgcgccccaatctgggacaagttgcacatattgtctgcctttcacttttgccatacaggtatgagtattattgtggaaagtccggttcatcgtttaccttttat

SEQ ID NO: 206387 - DNA, 342 bp, Glycine max
taccattgtgatcattgtgaggtcaatagagccctgatgtttatgtttagaatggaaaaagatatctgtcttcctgatcgccatacatataacatggtgctcaaattgctgattaggataggaaggtttgataaggtaactgaagtttgggagaacatggtggacaaaaagttttatccttctgtctcaacatattctgtcatgatccatggtttttgtaagaagaagggaaagctagaggaggcatgtaagtattttgaaatgatgattgatgaaggaataccaccatatgttactactgttgagatgctgaagaatcggcttttgggtttatgggttata

SEQ ID NO: 206388 - DNA, 416 bp, Glycine max
agcttaagtatcgcgatcctcttggtgtgttatactcggatgccattcacaggtatatcctatcttataaatattatttagggccttgcttcaactcgcttgatataaataactcaagttttagtaataatacagattagaacctgtaattatagagcttaagcgccaacgagcacctgttgttgtgatatctcaccaggttgtatgcaagtcattaagctacattcatgcttgtaaagactttatatggttgactgttctaatccgtgaggtttttccatacgtttcacattgcaggcatgttagagggcactatatgcttattttgctgacagacctttgaacgaaatttcgcatatagcgggaatttgtgaattattcatctgaactttctgttcttactaaatgggcgcata

SEQ ID NO: 206389 - DNA, 319 bp, Glycine max
  unsure (1)..(319): unsure at all n locations
tgaagaatcttanggaactagtagagatgcctctatcgttgtatgactacacacatgagtttagaggtaagggatgagtttatctcatttgggattagaatgaacatgtgtatagatccttacaggatcactttgaggtttattttgggatgcttactgtattgtaattcttcctttacgattataatcatgagaatgttatgtttgacgggccaattgatgccctaatgcaaattggttgataaaattaagtgttcttggtgttttcatgtttttgaacctatgcttttgattcctttgattctgatatgaatatgtg

SEQ ID NO: 206390 - DNA, 378 bp, Glycine max
  unsure (1)..(378): unsure at all n locations
agctncaagaagatcttgaagtatttntgtcttttacatgcccgactcacttgagtggcatttgtattgattattgtaatgtgtgttgcgtcttactttcaataatttcatatgtgcatcatgcatcatcatgtaggattaagaaggaaagtttctaaagttagaaaatttctttagtagttcaaactctttgttttaatcaattacaggctgatcataatcgattacaggttcatagtaatcgattacacaattctttttgagacaatgattgattctttcaggagtctttacttaaatagattactaggtgatataatcgataacttatttcttaaaaaagtgttcaaaagtgatcaaaaacaccttaatcaatta

SEQ ID NO: 206391 - DNA, 371 bp, Glycine max
  unsure (1)..(371): unsure at all n locations
tgaaaaccacgtaaagcacaatcaactgccatctcaaaatgaaaccccacattacaattcttattgatacttttatatggttagccaagtggacaaaatgacctaataatttgataagaaccttcgaacaatgccaccgcactgattaagaacttaataagaagagcaacaaactaaggtagagctcataccttgttaactggcagcgtagaaagctntgagcttggagcacccacgactgttccaagagcagtctagggttttcttcaacccacagttccaacagtagtgtagggttttcttcgacttttctttgattggagattctgtgggttccagcgagcggtttctgacagtattgaaatgaatgt

SEQ ID NO: 206392 - DNA, 386 bp, Glycine max
  unsure (1)..(386): unsure at all n locations
agctnattataagtaatagaatttactttgttngggnncagagaactcttaagctctcagaacctagaatacaatgctcattatgaaacagacaataactaactgtctaaccaaaaatggatacaatagaaaaatagtaaacggttacaattacaagacaacacatgttaatgaaccatcagattagaggctcccttctacatgactagacattccactatattatagaagattgaacgaccaatatagaagacaagagtactcaactagatgaccaacacaatcttcaaccctatctctattgtccatcatccaacaatcaacatgatttatctcaatcaccaagactacgtccagttcttgtcgaaccatcaagttccaccaac

SEQ ID NO: 206393 - DNA, 394 bp, Glycine max
agcttatacggacacatgaagggagatattttacatctttaacacacataatatcagaaaaagaaatctcattaaacaaagcaccagaaacaaagacaatttttcccaacctcacacaacaccccaaatggtgagtttcaactttttcttacatacacaacgttgttcaaacatcaagatccatttcttttaaaatcttacgttaggtgttgcacctcattaggcaaattttaaaaccctctcctccccaatatgtcaaatgcatagcatgtccacactagcaccttcctttttaactccaaattggctcaaccaaaaaaaaaaaacccaacacactacctaacatatagaacacctatactagatcattatgacaaataaacctcattgttgc

SEQ ID NO: 206394 - DNA, 383 bp, Glycine max
  unsure (1)..(383): unsure at all n locations
ntccttaaatttggntctgacattngggagcttgctgtttaactactctctatttcctttgattggtattcaggttttgtgatccattgatggattcaaatgttgaagagagagcatatgaaagtaagagttattttggaatgctagctggatcagcagattcacaacaggacaaagacacccataaaagcagttggaaaatttcaaagtcctggactggtcatatcttgaaaaaattgctatcccagttcattaaagagattgttgagggaatgatcggttttgttcaccttccaactatcatgtctaaactcctgtctgataatggtagtcaagaatttggtgattctaaacttacaatattgggaatgctgggaacatat

SEQ ID NO: 206395 - DNA, 430 bp, Glycine max
agcttattgaatgggatcaatatattcatttgtttagattaacggattaagaagcggtacatgatatcttttggtgtcaccctaatacagcgaagttatgtaatgcatgtaatttgctcctgatattgatcttctatcatttggacccgaagcccaatcaacatcatagtatgcttgtacataaaatataaggaactggatggctgaaatcataatccaaagttaagagtgccatttaagtatcgatgaattctttttacagttgtccaatgctgttatgaaggatttgacataaactggcacaccttgttgacaaaaaaaactgattttcggtctttatatggtggcatactgcagtgccctaaccactgattgatatatagaaagatctttgtatggtgtgctggttggaggaatggacctcatctga

SEQ ID NO: 206396 - DNA, 389 bp, Glycine max
cgtacacagaagaaaatgaaacacttcagctagtttgggatctaaaaataccgccaaaggtggcaacttttcatgtggagattgatcctaaataggttgccatcgcgagataaacttcttcagcacaacatcatcactaatgtaactgatgtttgttggagcaaaataggagaaacaagaaacacaaaaatcaatctaaacacatgaactcgtgagagagaaagattggagggaaattttttttattctattgtatgtattctgttacacataatgatatgtctatatatagactaactcaactaactaaccaccataattactaacaaactagtaactggttttttgattatccttaacaccccccttttgttcaaaaccgtggatca

SEQ ID NO: 206397 - DNA, 440 bp, Glycine max
agcttttacattgaacataaacatcgagtatacagtagcgggttcactcaacaactagtcatgaaacccaaaacagaaaccaatatctgatgtactgccatatatccattatccacaaaaataaagctcactctatcaagccaatgccccccaaaattgaaaaggacccaaaagataaactttttttttcaaaagaaccaattacttgcagtgaatgtcatgaaaatattttgaacccaatttcaaattcaaataagaggcacaaaatgccatagcacgccaaagaacacaaaaatcacacaagataaccaaatagtgcattgggtagagacaactaattccatatcccaaatacagtagacaatgcaatgaatgcatcaacaatttatttacaagcatatggagttatgaacaaaattcaaactcataaaggaatcatt

SEQ ID NO: 206398 - DNA, 342 bp, Glycine max
  unsure (1)..(342): unsure at all n locations
tgaccttggtttagacatgatggatacatgatttgagacttgtanngattgatttgggcaagattggatgaggggaagtgtggttttcgaaatctgcattttgtgcagatttttgctgtgaaattgtgcagcaggattttgcacaagtgcagaaaaatgcttgtgtgtggttggctgtggaaagtctagtgcagaatgagttctggatgtttgctagtagatcccaacggtcacaatgtaggcttatacactatagacttccagtaaaattttggagtcgatccaacggttaacgaattggatcgaaggaatttgtactggggtctttaagtgagaaaagct

SEQ ID NO: 206399 - DNA, 370 bp, Glycine max
  unsure (1)..(370): unsure at all n locations
gctgtcaacaagtactttggtaattaccttaaacttaatgtntgccaaagctaagggatgaaatttctctatacaatcaacacgaggaatttttggaatcaagattaccatgtcagagtttaaatttggagtgatccagccttgtgtgaaaaaatgcagcattgacttgtagacattantagctacaatatgacaaaaatgctagaaaaaacatccaccatacctgtcagggctaggtgctccatcaccattcaaagagaatatcgcatttttaacctcttccacaaaaaggacatttataatcatggcattatcatcaatcactagtttaagaattacccaagagaccaaatcattctcctcataagag

SEQ ID NO: 206400 - DNA, 412 bp, Glycine max
  unsure (1)..(412): unsure at all n locations
aagatggttaacctaactaactacaaccctcactaacctgatttcggcaaaagtgatcttcgagtcgcgaagttcgagctgattcgagtcaatatacttcttcactctctcatcgggttcgagtcacgagcttcgagccgtgaaaaaagatgaaaacgttgctgggaacttcaagtggggttggtgttaaaagaacaacgtgaagcggctagggttcgagtcgggttggtcaagctaggtgcaaaggaagaacaaagaagaacaaggctagggttcgagtggggttagcagtcaaggtgcaaaggaagaaggaagaaaggctagctaggagtgaactttgaaatgccgaanagtaacaactaaaccccttcaactattttttttatttacgatggttatttaataaaaactg

SEQ ID NO: 206401 - DNA, 418 bp, Glycine max
agcttatgatacttgttaatattttcttattaactggggttatttaatttttgtattaatttcttttataataaacttacccctcgcaatttttgtaccgtgtggttggtacttgtgatgatcgcgaacctttgttcgtgggagcagaatgacaatagtagtggacaagaagtgagattcttttatggaactgtcaacccgccgagctgacgtgatgacgttgggattattttgggagagttgtgttttgttaatcaactcctccatagctggttccataattctgtttgttgatttgaagatgtaaatcacaaatctaattatatgtaggaacaaatttattttccattatgtgaaagatgtgtactaaggtactatatatatatatatatatggatggatggatggatggatggat

SEQ ID NO: 206402 - DNA, 408 bp, Glycine max
  unsure (1)..(408): unsure at all n locations
tgaggaatcatanggaaccactaaagacacttctattgctatcaaactacacacatgagtctgcttagaggtaagggacgagtttatcacaattgagattagagtaaacatctgtagggatgcttagaagatcaaattggggttaatattggggtgttttatgcattttaatttttcctgtacaatgataactacgaattactcatgtttgacaggtcaattgatgccctgatacgaattggatggtttaattgagtgtttgactttgaatattagaaacctagaaatttgggaattcttgattcttgcatgttttctcataattgattgagtagttntgtttccatgatgtgattacatgttctgtgctatttgttttgcatttgggtgtggtttgatgtctgaatt

SEQ ID NO: 206403 - DNA, 380 bp, Glycine max
  unsure (1)..(380): unsure at all n locations
agcttgtctgatatgtggttgtttctaattctnnatttacacaccgccgcgcnacagtttttggaattttgatttagtttatgcatgaaaatattctagaacattttattctatgtatatatatatgaaatcaaacgcataatatcatatttcaattataaaattatatgagaatcttattcataattatattgtgtcttgattttgaaatgcaaaatactatttattctcataataaatttttatgtctaagtgatctttataattctgattaattatggattaaccacaacatctatatttgattaatactttatattaagttgggtaaagatcatataaggatttagacataatattgaattaattatacttatata

SEQ ID NO: 206404 - DNA, 350 bp, Glycine max
  unsure (1)..(350): unsure at all n locations
actcaagctattatactcactttgtgtgtcttagagcatatttaattatttnntattcttaacaaactttgaagattgcatgcttatataagatcctcacgccaaaacttaagaaactcacaatgcatactacttgcttcaacaacgacaaaaaaatatttttaaaaaaatatatattctaagaaactcatcaagcatcgtccaatggagatggcctaagatgcacaatcacatgtttaatgccagtgactgacatatcacagcgttcttttgtcaatgtctcacaccttctttgtgttaaacattcgtgcctcgagttgtccttatgctgagtatttgtaacaacattt

SEQ ID NO: 206405 - DNA, 394 bp, Glycine max
agctatagaagtataaggattgttgattgttcccagacaatcattattgttgtattaatatggtcatatttagtacttcaactcaaaaacaaaccattacagtgaaagttaacaacagacacacatacttctgatactctgacagaagtactaattgctgcaacagagaaatcatgactatggtggatgccacactgtctagaactgaactgagaaagaatgtaataaatccaatctgcaaattaagcattaattagtcaatttccattagagacaaaaaaaatagtgatgcaaactacagaaaatttagaattcgagtagggggagaggaagaatttgctcttgaaaagtctgctatcatggatgcacagcctaaattaatagtactagaccc

SEQ ID NO: 206406 - DNA, 384 bp, Glycine max
  unsure (1)..(384): unsure at all n locations
tccatctntgattgaattaaggtttcaatattngcagtattgcaatgatgctgtgacatcttttatcccatccagtgggaagtctgatgacactgctgattttagcccgcttgatagtgttccttttattggtgaaccacacactgatacaacagaactgacagatcctaactttaatgctgaagatcctctaagaaatttttattcctttgatgaagaagttataaatcctgatgttcaaagcatggttgaggattcttcagatgatagtgaagttggctttactagtcgtcatcataaatactggtttgcagatgtttttcctgggtggagttcagaagtgcctcttcagaatgaggtagtcaacttggccacttcccccct

SEQ ID NO: 206407 - DNA, 426 bp, Glycine max
  unsure (1)..(426): unsure at all n locations
agctttccatgtggcaactttagtgatgtctntcctaataaacgaagcaattttgtgtgccatatgccaagaatataattgtttggcttagctttgagactccacctcaaaaggaaagaccttttccacatagttcaacactgacaccaggtttttgtaggccacaaaatgtaaacatgtatgaaactagatccatcacttgaacttcaaaattgaacactactcgggaggtaacagcataattggatgttaggtaattttctaaaaaggttatcatattttactttaatataacaagagaacattttaaatggccaacatttggtccttaaaaattaattgcattagatctttagccaaacatgtatatatatagaacgatatctgcactaaaagattctctcataaactgctcaatccatcttt

SEQ ID NO: 206408 - DNA, 250 bp, Glycine max
cctcgtgacaaacaaagcctccaagaacaaaaggatgcacattattggtaacttccaatccattctgttctccaaattcaagaactgccttctctgacaacacctttgaaacagcatatgaccaactaaaaggcttcacactcctaagcaaatccacatcactccaaacactctcatccaccacatctttttcttcaaggctgccgacagaaactgcggatgcgctacaagtgctaacaaccctcttcac

SEQ ID NO: 206409 - DNA, 430 bp, Glycine max
agctataagaaggtgttcaatatttattgttgtgattgtacatcaaaaaaagatgagaaaaatgaaaacattttttttgtaatgaaaaatgaaaagattaacaccaaaaagaagaaggtgttggagacaccgatattaatagctgcaaagaacggtgtgacagaaatggtagagaaaatcattgactcgttcccagtagctgttcatgatatggatgccaagaaaaaaaatatagtgctattggcagtagagaacagacaaacttacttatataacttcttgctcaacaagaaaaatctaaaggaaagtaatatattcggaaaagtggataacaagggaaacagtgcattgcacttggcagccaaacttggagactataaaccttggctaattcctggcgaagctcttcaaatgcattgggaaatcaagt

SEQ ID NO: 206410 - DNA, 352 bp, Glycine max
  unsure (1)..(352): unsure at all n locations
ngataaccttatcaatcgtgtcatcgcccttgaatccaaccctccttctccttcatccgcctccactaatccttctcaccacgcccaaacaccctcaccccacaaactcaaactcgatgtacctaggtttgatggctcagacccctctggctaggtattcaagatctcgcaattctttgaataccatggggttcctgattcggagcggctcacggtagcatcgttttatatggagggacctgccctcgcatggttttaatggatggcccgcaaccaccaacttcccacttggtcaggctttcttcaagcgattgaagcttgctttgccctctccccttatgaggatccaact

SEQ ID NO: 206411 - DNA, 327 bp, Glycine max
  unsure (1)..(327): unsure at all n locations
agcttagaaagcatgttggtgacattngttttgccctgctgaagtgccctgatacaagtcatgagttgtggcatcatagtagcattatctgtacgtagcgaatttacatcaatcactagtgaatgctcatcttggactccaagattctggtatggcatggtatataaagaggaacgaagaataataagggcatagctaaaacctactccaacaataactaatgccaatttaatcttcaagagttgtactattagacatcccaggaaaaaataaaaaaaatccacttcaaatccacactcagtttgccttgacaggctgagggacacg

SEQ ID NO: 206412 - DNA, 402 bp, Glycine max
  unsure (1)..(402): unsure at all n locations
ctcagctatactcacatgcttgcactgttaggttggaagttaaaacagaagagggggtataaagaccagtggccttggaacataaagctatacactgatgagaaaggaagcaacaagggtgatggttgtcttgtctacgaagatccttctgcagctcattctgctggcagttnttacaatagtacttgatctaactgctactactctcttngttttaagatacttattgtttatcttctattatgaacatgcacttaccattgatctttcattgcagattatgatttgaggggttacaaaataaatgttgcaatggcagaaaaatctgctcaaaagctcttgctgcaataaccatgggtattccatatttatatttttcacatgatggtgactgcgttattt

SEQ ID NO: 206413 - DNA, 409 bp, Glycine max
  unsure (1)..(409): unsure at all n locations
agcttctctttcttggagccagtcatagtctatgaagactcatgtaagatttttctgtgactgctataaaaaagaaatataaaatgagtgaatattttgatgtgatgtataattttgtgtgttgatggcagcttattgcagcaacaagtgtgcggacagatgctcatcggcaggggttaaggataggtgtgtgaagtactgtggaatatgctgtgctgagtgcaaatgtgttccttctgggacctatgggaacaagcacgagtgtccttgctacagggacaagctcaacaagaagggcaagcccaaatgcccttgaacttcaactcanacaccaagtcgaatagagacttaagagtagtagtttttgcatgtggntgtattcttgttttcaatgtctggtgggtatgtt

SEQ ID NO: 206414 - DNA, 337 bp, Glycine max
  unsure (1)..(337): unsure at all n locations
ggacctatgaaactcagcttagaagatatgatgcatgatgtcccagtcaatcattattggtgtattaatatgggcatatntagtacttcaactcaaaaacaaaccattacagtgaaagttaacaacagacacacatacttctgatactctgacagaggtactaatttctgcaacagagaaatcatgactatggtggatgccagactgtctagaactgaactgagaaagaatgtaataaatccaatctgcaaattaagcattaattagtcaatttccattagagacaaaaaaaatagtgatgcaaactacagaaaatttagaattcgagtagggggag

SEQ ID NO: 206415 - DNA, 430 bp, Glycine max
  unsure (1)..(430): unsure at all n locations
agctntacatctttagttgaacaaaaggaatcatgaaccaactattcangagttgattaacaaaacacaactctctctcaaaataatcccaacgtcatcacgtcggctcagcggctcctcaacagaatctcacttcctgcaccctactgctgtcattttgctcccacgaacaaggttcgcgatcatcacaggtatcaaccacacgatacaaaattgcaagggtgagttcattataaaaagaaccaatactaaatccaaataaccacaattagtaagagaacataaacaaacatcatgagctcacacaatattcattaatcaacacacacatccaacaattattcatcatccatccatggatccaatcaattatgctcagaatgatgcatgcacctgaccttcactctcagatgcaatgtggtacgtacca

SEQ ID NO: 206416 - DNA, 388 bp, Glycine max
  unsure (1)..(388): unsure at all n locations
ntgtcgaagcaggtatggttatgaagattaggttcacagtgtttgctgtgcctgcgatctgcnggggctatagaaatggcatacaagataaacctataagcattgaagcataacttgatgcatattaaatagccaaagaagccttttaacttataatagaattctatatcaaggaaaatgctacatgtatgtagacattgttgattttcccgatacttgcacctgatggcatataatatagccacgtattagttatttacctttagttttttcattgtttgcatacattntctgttttctggttctcaaggttctgatcttaaactctcagtggatcacttggaaaaagaaagagactttactttgcanaactaagggatatagaaat

SEQ ID NO: 206417 - DNA, 455 bp, Glycine max
gatctctaagcacctgcggctgcagctatacaaatatgactatcattatttaattgcttaagtggccacacattgaatttaattccaacattctaggcttcttaaatggatccatgagctgggactccagtcactagtacacaggtttatgtactttttatttgaattattcttcttgtcgtaataagtagcttattcaatactgtacatatgaacagagtttagatgaaggaaaattgaggttttggtattaacttatgtggattgtgtaatatcatagccttaagggaagcaaaacaaagtacctttgcttacaacagcaagtataattgaaagcttggcatcaacccatatgatttctgtcacaattgcatcctttctcgtgtctgtactatcagattcggtcattagcgttgttttatgtaatatactcgacaagatatagtgatatacct

SEQ ID NO: 206418 - DNA, 386 bp, Glycine max
  unsure (1)..(386): unsure at all n locations
tctgtttgttnggctggttntctaggttggtgctttcttctgatttattgtttttttcatcggataaatattaattattagtatttatagcttttgttaataaaatattttcgaatttcaaacttccatcttctttcactctcccattagtcatcgttttattttcttgttgaaaacatatgtacagagtatttgcaattgtgagccttctttagtttaagtgtgtgagaaactgagaatgaaattataacgggctaggcttcacgccatcgtgctgaacgggtctaaagtttattccggcggatgaggaatatatatattnntttcttttcttaaatttatttttcaggctaagttaagtggtaggttctatcacggatgatttg

SEQ ID NO: 206419 - DNA, 434 bp, Glycine max
  unsure (1)..(434): unsure at all n locations
caagcttgtccgngtgtgtcaacttcctcttatatttgtcattggacaagccgttctgtcattgttgtgtctcttcaagtttggcatgttcttcttgggatggatcttgatcatgttcacctttgtctatttccttctccccgagacaaagaaggttcccgttgaagaaatgacggagagagtgtgttgaagaggtttatagaagatgattgtgttgaagaagaaaaagtagtcactggcaattgagaacgtccaaggatttaatctggcttctcagttgtaaattatacaaattctggcaatgctttggtttgtgactntgtaaaatgagtattttagactccatggagtgcttggttagattggttgtacaactatgctatttatcattcccactatgttattggcctatcgtccttttatgcgagtcatat

SEQ ID NO: 206420 - DNA, 309 bp, Glycine max
cttgtcatttttacttcattgaatatttgctgaaacctgtataatcctccttggtgatccacaaatatattttcaaaagtttgtctattgtggatttattttcctggtttggtacaatcaatgagttctcacagaagcaatgtgtggaccacatctggcttcccttttcctattaacataacacatgaaagattttcgtttataggcctaccaaaaacatcaaataatttacagatcatttgtaatatttgaacaataaaataaaagatatagtagtgatatttaagtacccttatttacctattaata

SEQ ID NO: 206421 - DNA, 440 bp, Glycine max
gatctcaagcacctgcagctgcagctgctgcaaaaaataaaaaaatttattgctctcgtaatgcacatgatgctgacccattattgagcattgctacaatggcacttggatacaaatgacaatctagaaattttaagttatcatgataataattatatatatatatatatatatatatataaattaatatttcagttggtgtattataaatatgatatttttatatataattaaaattaaaataataaaaattagttttcaatatttaaattgaattataattaaaattcctagtaaataaatatatttaaatatataaattgaactttggatttatgacaaagaatttaagttgtgatattagattatttgtagctattgataataatttcttaaaatatgattgatatttaatttacaaaagagtaaaatagagcata

SEQ ID NO: 206422 - DNA, 268 bp, Glycine max
accacatgttaccaacgccaaaatattaatcataaataaatctttgataggatgagcttcaaactgtatgctataagaaaaaaaaatatgcaaaaaattaaaaacataccactgagaatactttttcgactgcttaataaatcatgtagaccacatccaccttcactagttgttatctcccaggaatagccctggaaaagagaggcaaatctttatgcattgatatcattacataataatacagaaccttggttctccaaaatggtat

SEQ ID NO: 206423 - DNA, 431 bp, Glycine max
  unsure (1)..(431): unsure at all n locations
agctntaaggactcattctttaactaccattataaagaaatgcagttttgctaagcccagtttagagtatcttggcctcatcatttctggttttggggtggcagcagataaatccaaggtggctacaatgagttcctggccagttccgaaagattcgaagagtttgaggggatttttaggattgataggctactatagaagatttgtccaaggctatggtaaaatagcaaagcctttgactgaattactgaaaaaggatagctntgtatggacactagtagctactctagcttttgaaactttaaaatctgccatggtcagtttgcctttattagcagttcctgattnttcaaaaacctttgttctggagacaaatgcttctagcaaaggagtaggggctgctcttatgcaagagggcaggcctttggctt

SEQ ID NO: 206424 - DNA, 451 bp, Glycine max
  unsure (1)..(451): unsure at all n locations
taaaggcatcaatgggaagctaganaccaaaggataatgtacttacttgtatggagtgaccaaaaacgctaaaaatggaagcaaaaacgcaaaaatggtggcctaggggcgaaaatctgtaaaacccgtgggtgctgcgtttttgaatgagggaggggagttttgggtggagagaaactncccctccnctcgtttttatgtttccaggtgcagcggttctcgcccaggcgagctaaccatgtattttttatttatttcttatctttttatttttttttgcgagacacaggtatgcactctttatgggtccacgttcgcttactcgaacccccttagggtatattaagcattcgatcattaccttaaagacccaacacgtatattactgggacttaaaggatctatgctccttcagctgccttcctgttgtcaagctgtcatggacacaatc

SEQ ID NO: 206425 - DNA, 412 bp, Glycine max
agcttctgttacaacatagtatttagaattatgaatgattgccgaaatacaagtagtggggatgtctcctccacctgtaggacctcacaatcactcacaaactcatctcaagctctcaggacggcttcctcttccagctctggtctctgcagatcttcacacaacaaattctcccaaactctctggaatttggacctttctctctctagaactctccaattatgcagaagcttcaagaaaaggccaaactctcctcaaaaatctgatttcagacttaaataggtggctttgttcgtgctcgtgcgcttagcgcaattttgaaccgcttagcgcgcattaatgaattacggcttagcgtggcttttcttgttcagcgaatggaccgaagcagtgcgcttagtggtatggccct

SEQ ID NO: 206426 - DNA, 324 bp, Glycine max
  unsure (1)..(324): unsure at all n locations
tctcccncaattntctataaatagggggagtattgaagtgtataagggttcagccccttaggcacttctctctctttcgaatttgcttggaaaaattgtttccgtgaagaaaatctaagccgatgcgcttccgaaacgtttccgtaaggaatttcgcgaaggtttcgaccgttcttcgacgttcttcattcgttcttcatcgttcttcgatcttcaacgggtaagtacctcgaaccaagcttttcgattcattctatgtacccgtggtggtccacattgtgtttcgtgtatttttattctccgttcatttactttnntataccc

SEQ ID NO: 206427 - DNA, 406 bp, Glycine max
agcttggtcaataaaaaggataccttgtgtatgcatgcaagtaacacatagtgtaagcatggtatgtctagaaggtatcatgataatatctagcatgcatgatatttggacagattctctccctctcccgacttgagacacacacacacacctcacatgtccattattagacaaaatatgtgttgctacacacatatcttagtgtttttggatcgaattcgattcaactattaaaataagttaacttttgggctagaacacaacttttgatttctaaacttattggctctttagtccaacccgtgaactcatttttttataattattattattattattatcatcataatagttagggaagactacatatcactcttatattatatacgttcttttcactcacatg

SEQ ID NO: 206428 - DNA, 312 bp, Glycine max
  unsure (1)..(312): unsure at all n locations
ntagctntngaaaacattgaattaaagaaatcaaatgatgatctaaattagaagatccagactctagaagagagtctgagcctggctagtaagactgatgaaacttccattgttgaaaaactaaggaaagaagtagcatttcttactaatgactttgggaagttcccggaaagttcaaagactctcaccactttatcaaaattgcatcaacatccccacgataagtcttacctgngctttgaaaagggaacaacttccttcgagtcattgtctgctttagacaaatgtgacttctatggtaaatctggatat

SEQ ID NO: 206429 - DNA, 417 bp, Glycine max
  unsure (1)..(417): unsure at all n locations
gctgcatattacaatctaattttgtgagctngaagaactggtaatgttccaaagtaaaaaaatcatcaatccaaaatagaaataatgtgtaacataacctcaaatagaaaccaaaacaaatttacagtagtaaaattaagtcattgaaatgcacacaaatctccctatcgggcaccttgcaaatcaaaaccccaagtaaaaaaaatagtaaatagaataaatgagagaggaagaagaaggaaaaaaagaatacaaaaagtggaagtttaccatccctatcataaacagcgatgctccaccgtgcttagctaccggagtgatttttggcaacttccctcttcccaatttcttctcttctctttctcttttgaggatcaaagggatttccaaattagattcaccatacattgttgcatc

SEQ ID NO: 206430 - DNA, 246 bp, Glycine max
  unsure (1)..(246): unsure at all n locations
ntctttgttgaaattaggaagagagagcttcagctctttcttagcaagcaaaatggtttagtcaatgaagtttcttccttcataggtaatattctattacttccttgtcattttgccttaggtaagattcatccactgccgtattctattaaatttgttttcctttgtacttatatgtaaatgttttttgaattttatgaagggagaaatagaaatcaccaaggtctggcatgtgctattattctt

SEQ ID NO: 206431 - DNA, 397 bp, Glycine max
  unsure (1)..(397): unsure at all n locations
agctntgtgtggagcttctttggtgaatgttanaaattaagaagaaggctgcgtgagagagagggagagctgtctgaaattttgtggggctgagtgaggagagagaaaagcttttggtcttaaataaaaagggttttccctttttcccttattttattcaagctctgccacatgtccttatttgattggagcaaaaagggcccactttctctttttgactgtgacccatactcagtcacaaagtgagaaaaatctgacctttgaaacgctaaaatcctgcctcggtttgcgtgtcgtttctctggttccagttcctcgcgtttctctgcgtccgtcgggaccagttttcgaaagcaagcaatatatatatcaaaacgctcagaataaaaccccgagc

SEQ ID NO: 206432 - DNA, 291 bp, Glycine max
  unsure (1)..(291): unsure at all n locations
gtgaaaggttcgggagttgtatttacacacggngattgtattatcaccccacgcggccgtcataagagacggcaacctttaatcaaatgtgcaaatatgacttcaatttatattcttttccctttttacgttcttatgtttttttatgcctttttatgtttttatctttttgtggtcgacaagggcgtttccctttgctcctacgtattcctcgattttgatgagaaaatcagacctacgtagttcttttgggaacaaaagcgtttggttaaaatattttttatccctttt

SEQ ID NO: 206433 - DNA, 393 bp, Glycine max
  unsure (1)..(393): unsure at all n locations
agcttctgctcaaacttactatatataattgtgtgattngngnagnactaatccgatggtgtgaaatggaggggattggttgctgagaagttacaaccgttggattgaataagtgatgacattacagcatattggccacacgagtgaggaaaattttgaatggtagccttatcgttaggtaccatgtggaagtgacacgtggaggaggcttcattatcttatctcttccttggaagaacgtaaaatgtgtgatggtggtggagtttgatattatttgtgagtggtttgtactgtgccctcattccatattaaacctaacatattttgtgaccatcatatctcatgcatgggttaggtgaaaaccctttgccctttgtacagtgatcttttata

SEQ ID NO: 206434 - DNA, 406 bp, Glycine max
  unsure (1)..(406): unsure at all n locations
aaactcaagctgatcttggcacctcacctaccacctatgtcttatatctagcacgaccctatctgggcaatttggtgatacaagttggtgcggtttgggtatggggaaggagagggggcgaaaacaatttggtaagtgggcaaaagagggatttcatatggtttggtagtgttaataataaatttggtagtgccaatattattgccctttttggacttacatttcatggactcaattcaacttgtttggccataaaaaaatgacagcgactaaggtggacaaggactctaaatgatttatggtggaccactttgtccatccttagattcattttatccacacaacaatttgatagaacttttgtacaaatattntatattttttggaatttttctcttcttttccc

SEQ ID NO: 206435 - DNA, 397 bp, Glycine max
  unsure (1)..(397): unsure at all n locations
agcttaaaaggtgatgtagctaccattattcatatattagtgttcaagctaattctttcattactctttgcaggatgggccaccattttccttagaggattttctcaaaagttgatggaaaacagtaaaaaatggagagtcaattggggaatgaagctcgtttaccttgaacctttctcgtctcatattggattggtgtacggnttcatcatagtgtaaagttttttgaatgccttttcatctataaattctttgtttccaagctatcttcttctttttggtcttgctgcacttttgcgaggcatgagtaatctatgagtgatcatggccaaaaatgcaagattgagatgatcctcctgtccgaggcatgtgacctcatctgggacctaaattccac

SEQ ID NO: 206436 - DNA, 277 bp, Glycine max
  unsure (1)..(277): unsure at all n locations
ctggaatagaatcatcatttgtggtaccaaacatagcatttatttgctgntatgnngatcattngattctattaagtcgtctttgtttaatatttttcttatatatatgtggcaggggtttaggtccttggggtcccaacatagtccgcaagtatacaagtgctatgtttggtacacattcaactggggaaatactgactgaagaggaatcaacattgctgacaggtattgctagataacacattgataaatgggataaatgtaagagtacattcta

SEQ ID NO: 206437 - DNA, 422 bp, Glycine max
  unsure (1)..(422): unsure at all n locations
agcttcagctctcatcccanactcccttcacaaaatctgatttcaggcctaaataggtgaccttgttcgtgctcgtgtgcttagcacaattatgaaccgcttagcgcacattagtgaatttcggcttagcgcgtgcatttttcgctcagcagatggactgaagtggtgcgcttagtgagatgaagtggtgcgctcagtgaacatgtacaactcatcttcttccagattcttcctcgtgcttagccaaagagttttgcgcatagcggacgctcgctaagccaacagattggcttagcgagaaggtgaaaaacaacacttttcaaagtcgcctaattaagctgaaattgagagaaaatgattattaaacacacaaaatggaagtactaagtatttattacctatacttaataaaaagtacttat

SEQ ID NO: 206438 - DNA, 328 bp, Glycine max
  unsure (1)..(328): unsure at all n locations
tctcccncaattntctataaatatggggagaagtgaagttgtattaggttcagccccttaggcacttctctctctttcgaatttgcttggaaaaattggttccgtgaagaaaatccaagccgaggcgcttccgaaacgtttccgtaacgtttccgtgaggaatttcgcgaaggtttcgaccgttcttcgacgttcttcattcgttcttcaccgttcttcgatcttcaacgggtaagtacctcgaaccaagcttttcgattcattctatgtacccgtgggtggccacattgtggttcgnggatttttatttctcgttcaattactttta

SEQ ID NO: 206439 - DNA, 455 bp, Glycine max
  unsure (1)..(455): unsure at all n locations
aagtcacctgcggcatgcaagcttgaagtgagaaagtgtggaagagtttgtcttcctacctttatttgnngactacagagtggcacctggagatatgtcgcgggggtcaggagaccttggggacgtcaggtggggtgctatttcccaaaaccaagcttgaccaatcccgacccaacccaggcataatcagtcagtgagaacctgtgacatacctaaacaggcgagctcctggcagtcaaccaataaaagaacaaagaccacaaagcaaggaggcttgtgtggtggctggccagctatggatcttgagtgatatctggaatatggcctctggtaatcgattaccaagggtgtgtaatcgattacaaggcttaaaaatgaagacaggaagttaagatggcctctggtaatcgattaccaagggcgtgtaatcgattacaaggcttagaaatggagac

SEQ ID NO: 206440 - DNA, 290 bp, Glycine max
  unsure (1)..(290): unsure at all n locations
ntgctaaaaagctaanattcatccctgcaccttctatcttatagaaaattggctccgaagcaggccactagatcatgaaaaacaccttgagtcccacattgggaaaataaccttagtcttttnctttccctatatatagagaagaccatcaagcctttggagcaccacaaaatagagtggtcttaggattaagtgcggagcccctcatagttaatattttcatcttcccaagagttttcaaacttggcgcatataggtgatgtggggttgtgttttaaatcacacctatg

SEQ ID NO: 206441 - DNA, 437 bp, Glycine max
agcttatgcaggataaattcgaaataagtttgataggatatctaaagttcttcttaggactgcagataaaatagaccaacaacggaatctatatccatcaaaccaatgtcaaggaacttatcaagaagttcaagttggaagatgcgaaggaaataaagactcctatgcatccaacaacatgtcttggattagacgaggaatccaacaaagtggacaactctcaatatagagcaatgattggatccttgttatatctaactgcgtccaaacctgacatattgttcattgttggactatgtgccagattccaacaagactcaaggaaagttcacttaactgttgtcaaaagaatatttagatatttaattggaactcctaatcttggtttttactttaagcatggcaagaaattcaggttgattagttaccgtgatgct

SEQ ID NO: 206442 - DNA, 304 bp, Glycine max
tatcgaatactaagcttctggagatcgattactatatgttgagcatcgattacacattttgagttattttgaacaacgcttgaaatgatactcaaaaagcttatgtacttcctggaatcgattaccagagagactgctctcaatggccttagacgaagctttcaaatcctttgttttgaatgatacgtatctaatccaaatctttgggcttaccaatctaacttataagactcacttaagaatctatctagtcaatcttactcgagtatcttggattgcgtgacgcctacttgcattatccgtg

SEQ ID NO: 206443 - DNA, 426 bp, Glycine max
  unsure (1)..(426): unsure at all n locations
agctntgncagtgtgggcttaaggggcaattattaagtgtccatgatacatgatggacccctgcaagagcgtccaggctgggtacaaccgtgtcttccagggttttagctaggaaactgggaagtcatggaacaacctgaggtttcctcagcatgcatcatgtaaactttaaagtttagaaccctacggctgggcctaggctctaaggttttccttttgataaggcactactttactcaataatacaagatcttttgttcatctgttcttgcaccttcaccctttctcattcattngcatgtttatctntttgctacgtctataatacaaatccgatgacaagtcctgtgaaggtacttataccgaggacctagctataaatttcgaacgagagatggatcaaacggaagaggaggaaaatgacat

SEQ ID NO: 206444 - DNA, 204 bp, Glycine max
gcttctacttatgtggcagggcgggcttccttcactttcttgtctccaacgcgagctcttatcactgttcttccttcccgcgatgcttcttttcatgtccgcctgagtgggcttatagcctaaaccatactttccacgatttccttgggtttttatcaggctagttatgccgccattgtcttttcctaaacccatcccgggttc

SEQ ID NO: 206445 - DNA, 417 bp, Glycine max
  unsure (1)..(417): unsure at all n locations
agctngnggaaaaggaagttggggtcaatgtcttggcatgtctgatgcgctccaagcaaatacgtcggcattgcttaaaagcacttgttctacttattttcgtatggcatactccctcttttttctaattttggtgcattgatgtgactccatgtcaattgggaaaggctcaatgtcttcaattgggattggtcgccgatcttcataacttgatcgggggttcagatcctccaatggggtgacaacaacgttgatattgatacttttttgtatttcttctctttcaccatattgcagggttcaatgttgcaagtctttaaatagcattcatgagcatccacctaatcaactttgacaatgacaatctcccctgtggatgagggaaattttattgccaaatgagatgtagaaataatt

SEQ ID NO: 206446 - DNA, 286 bp, Glycine max
  unsure (1)..(286): unsure at all n locations
ttatgaagttntctggttntccaaaacttgaaaacttgtgtctttcatcttttcattctcttctccctttgccaaaaaaaattcgccaaggactaaccgcctgaattctttttgtgtctctcttcttccttttcctaaagaacaaagaactaaccgcctgaattcttttgtgtctcccttcttccttgtcaaagaattcaaaatgacatagtctgagaattcttttgattcttccctttccctaatacaaaagtgttcaaaggactaaccgcctgagaattctttt

SEQ ID NO: 206447 - DNA, 361 bp, Glycine max
  unsure (1)..(361): unsure at all n locations
cgcgngnggataacagggatggagggcagtttttgtnttcttttaagtttgagtcngcgtttgaggtttgtgttttggaagacaaactacaacaaaaagttttgggcgtaggtgtatgttactcttcatatagttcggccaacgaaatctttctgacgagtcatgtttgtgattgcgctatgacatcccttctgatatcaggttttaatcctcccgcatagcaatccaatagagcttcttgtgtaactccttgtactcgattagctaaagccgcgaactgcacgtaatatgactgaactgaaccaattctagcgaagttaaacaactgagatctaggacattcatactgtgatgggccaaa

SEQ ID NO: 206448 - DNA, 246 bp, Glycine max
gaatacctcacccactcaagtgtatcacacaggtatggatgtcctctaatgaaacactcttgccttttaccactctaattccccttgagttcttacgcaattcaagagattatggccacaacaaagaacaattcaccaatatgtgtcatgcaaggctagagagacaaggaaaatgttaaccaagaaaaaggctcacaatggttttaggcacaaatgaagggaataaaattcagaatctacgaattc

SEQ ID NO: 206449 - DNA, 408 bp, Glycine max
  unsure (1)..(408): unsure at all n locations
agctacaagaaccgttgaatttgatgtcttttccnncncaagggggagagaatgatgcaatcctacccccaagggcattggatagaaaactccaagaagattgggtcagagatgcaatataaggccctagggttctcatgagccttatggtatattttgggtccaccgactaagcatgagcccacatatctttgtacatattagattaaggtttcattatatctgcgccttttatttaaggctccatagagttggaagggtactgttagaccctaatttcatccagggactattattccttgatgttttgattcttgctacccgaattgttgtgatcgacaccagtttccccacaagatgacagatccatctatatttttgtcaaggatcggaaagatgacaaaaggg

SEQ ID NO: 206450 - DNA, 325 bp, Glycine max
  unsure (1)..(325): unsure at all n locations
tganaagctaaagcatgtgagagacactgtttcattgtctcttgtcaaagacctgtactcatcaatatcatgtccaaagaacgtgaatggctcaacaactcacgtgcctataagcaatttattggagcacatgtccttcaatataattgtgaggatgatagctgggaagagatttggaggggacacagttaatcaagaagacaatgaggcatggaggctaagaaacgctatcaaagatgccacatatctatgtggtgttnttgtggcagctgatgctattccatcccttagttggattgatttccaagggtatgtgagtttcatg

SEQ ID NO: 206451 - DNA, 421 bp, Glycine max
  unsure (1)..(421): unsure at all n locations
acctcgcaagnggactaatgtattactatatcatataaatacnnaccgacttccatctaaaaaataaaacgatattttaacaaaatctaacttatcgcatatttaatagggaggaggggcctgcatgcaacaactaggattccctgtacattggatctgctgctctcttccattgtttcctctctcaattattaatttgattcgcatagtatatacatacatatcagctggataagataagaagctatcctttccaattattttcccaatatattagcaggtgccaggtgagacatattatgaatattcttaaatatgcgtgagccatgagaggggcaaacacaattacagatgcatatagagatacttattattctacagtcgaaaacgaattgagtataaaaaccacttctacatttat

SEQ ID NO: 206452 - DNA, 271 bp, Glycine max
tgcacaatgatcaattctttaaatgtcctatagaccgatatgtaatctcaacacttacgttattctctcaagataatcaaagtgtttttagagccttttctaaactttacacaaatttacatattctttcttatcacaaagaatttgaatgaatgcacataacgttcgtgtcccattttttcaaagttcctgatatttataagtcttcatcctacagtggttgttgtctcacaacggatgaaattctttagtaaacctcttccgaacttat

SEQ ID NO: 206453 - DNA, 418 bp, Glycine max
agcttgtacattcaattttgttcgttcctttatattacgggactcaatcggacatccgagtaaaaagttattgttgtttgaatttgttcagagcttcaacattcaatttcgagattttcgatatattacgggactcaatcagacatccgagtaaaaagttattctcgtttgaatttgctcagggcttcggtattcaatttcgagcgtctcgatatattacgggactcaatcagacatccgagtaaaaatttattgtcgtttgaatttgctcagagcttcaacattcaatttcaagcgttccgatatattacgggactcattcggacatccgagtaaaaagttattgttgtttgaatttgctcagagcttcggcattccatttcgagcatctcgatatattaccggactcaatcagaca

SEQ ID NO: 206454 - DNA, 314 bp, Glycine max
  unsure (1)..(314): unsure at all n locations
tgtgcaacgtcggctganaaatagcagtgctgtcttttttactgccgatgttggctattgtgttttatattcaatccttgaataatatttggctgatgtctattangaactgttcgatcggcatcatccagtgatgttttttttaaaacctggattgatcatctttcttggccgacgtcaactagcatgttttccgatcagtatcggtgaatcatgttttttttccgaggttggctaatttttttcttgctgagcaaatgaaaacatgtcgatggcggccgaaacacaaattcaattgaacttcaaccaaaaaa

SEQ ID NO: 206455 - DNA, 427 bp, Glycine max
  unsure (1)..(427): unsure at all n locations
agcttattgtcgtttgaatatgctcaaatcttctgttctgaatntcgagcatctccatatactacgggaaacaatcggacatccgagtaaaaaggttttgttgtttgaattttctaagaggttatgatttcaattttgagcgtctcgatatattacgagactcaatcaggcatccgagtaaaaagttattgtcgttagatttttcttagagcttctatttccgattatgagcgtctcgatatattacgagattcattcggacatccgagtaaaaagttattgtcgtttgattttgctcaaagcttctgttatgaatttcgagtgtctcgatatactacgggacacaatcggacatccgagtaaaaagttattgacatttgaatntgctcatagcattcgttgtcaataacgagcgtctagatatata

SEQ ID NO: 206456 - DNA, 441 bp, Glycine max
  unsure (1)..(441): unsure at all n locations
gacactataaatactacgcttgaccaaatcaacgacacaacttttactcggatgtctgaatgaatactgtattatatcgagacgctcgaaattgacaatatatcgagacgctcgtaattgaaaccaaatgctcgaagcaaattcaaacgacaataactntttactcggatgttcgaatgaatcccataatatatcaagacgctcgtatttgaaaacataagctctaagcatattctaatgataataactttntactcggatgtcggattgagtcccgtaatatatcgagacgcccgtaattgaaaacggatgctcgtagcaaattcaaatgacaatatcgagatgcttcaaattgaacaatggaagctcttgagccattcaaagggcataacttttattttcgaggtccgaatgaagcgccaatatattcagacgctccaa

SEQ ID NO: 206457 - DNA, 336 bp, Glycine max
  unsure (1)..(336): unsure at all n locations
actcagctaaaaatctatatatgggtgaaacaagctttcgtattggntctttaangcccatgggataatttcttcatttggttttgatgaaaaccccatggatcaatgcatataccacaaggttagtgggagtaaaatatgctttcttgttctatatgtagatgatattttacttgcagccaatgatcggggtttgctacatgaggtgaaacaatttctctctaagaatcttgacatgaaggatatgggtgatgcatcttatgtcatcggccttaagattcatagagatagatcctcgaggtattttgggtctatcacaggaaacctatattaaca

SEQ ID NO: 206458 - DNA, 418 bp, Glycine max
  unsure (1)..(418): unsure at all n locations
agctntatgcacatacaaattattttagtattaaaccatgtgcacatcgattggactgaatatttttatactacagcgccacagtatcagaaaagaatgttgatgtctatcagaagtggaaacttcaaattcgttgcattgcagttatcttcattattgacacatttggttatctgttttattttcttgtgctgcaacatctccagcctcaccaatgtcatccaatcaaagttttggatattagtaagacaaaatcccttaattgatttttgtgcaacaggttgatatggtcattgtaccagcaacaactgggcagatgggtgttctcccaggacatgtagcaacaattgcagagttgaaacctggtgtcctatctgtacatgaagggaacgatgtgaccaagtactttgtcagcagt

SEQ ID NO: 206459 - DNA, 312 bp, Glycine max
tgaggaatctcaggaaattgctagagatgccactatctctatcataatacacacgtgagcccgcttagaggtaaggggatgaggttatcgcaattggggttagaatgaacatgtgtaggaatccttaagggatcaaattggggtttattttgggatgtttattgaattacaattttcctttacaattataaatatgatactgttgtgttgatggaccaattgatgtcctaatgtgaattggttgataaacttgagtgctcttgatgttttcatatttttgacctatgatttgattcgttgattttaatatga

SEQ ID NO: 206460 - DNA, 421 bp, Glycine max
agcttagatggacaagaacagagcgcatgtaaagtagggctcacgttctgatattttaaaatataagtccaacatcggttttcaatacaaaatcgatgttaaccaaatgatgttaacatcggttttctgagaaaaactgatgttaacttatcatacgttaacatcgattttataaaagactgatgttaattaaagacgttaacatcggttcttcaaaaattgatgttaacgaattaatgttaacatcggtttttcaagaaccgatgttaatgttagttcattaacattgattttgcagaaaaccgatgttaacgaatacaaattatttacaattatgtcatcgtgtttatcttaataccggttttgttaaaaaccaatgataatctgacggtattaaatctattttttgtagtagtgaata

SEQ ID NO: 206461 - DNA, 309 bp, Glycine max
  unsure (1)..(309): unsure at all n locations
tgtacgccttggatcttcttcatcaatggaatcctttgcttttcttgaatttgatggcagcggaatggagaaggagaaagatgattggagacgccacttcaaggagaagatgagtttagaagaagctcaccaccatgggaagccatggataagagcttgaaggtaggagaagatgaatggnggaagagggagagaaggagcacganatttatgcctcaaaagagatctgaactttgaagtttaattctcaaatgatcaaagttgaaaaaatgcacacacatgacctctatttatagcctaagtgtcata

SEQ ID NO: 206462 - DNA, 436 bp, Glycine max
  unsure (1)..(436): unsure at all n locations
agcttgtattgtcacttagatcttgactagttataactttctgaataaaatgagtttatcccacgtttttactccaaaaatcagtgcaaatcaaatcactcccgcattttatctctagcatacattcatcacataagcatctcttcatggcatcataatgaacatatcgttcctgcatttttccgttatcatattccaacatcacattttgcttgagtcattacatcgtcatgcatatgcgttcaacatactttttgttctaccaactgcataccttttgttttcatgttcgctcatgcgtgatccttgcattttcctttacaaaacaaaaacaaaaagggaagcatgaaaattcgtgatacattcttgngtgcatatattcggtaccatgagccaaccatgttgggatcatanaacccgttcacttataaacaaa

SEQ ID NO: 206463 - DNA, 319 bp, Glycine max
  unsure (1)..(319): unsure at all n locations
tgagatgaggaagtgttgaagggtgaaacttcctgctnttattgttgaccacagagtggtacctggagatatgtcgcggnggtcaggagaccttgtggacgtcaggtggggtgctattgcccaaaaccaagcttgaccaatcccgacccaacccgggcatagtcggtcagtgagaacctgtgatgtacctaaacaggcgagctcctggcagtcaacagataaaaggaacaaagaccacaaagcaaggaggcttgtggtggctggccagctgtgaattttgtgtgatatgtnaaagaatggcctctggtaatcgattacc

SEQ ID NO: 206464 - DNA, 428 bp, Glycine max
  unsure (1)..(428): unsure at all n locations
agctncannccctatgagtcaagagttatattctttgttgccacaaggncgaatgattgacagccttagtaattggtaccatatcctcatctacaatcatgtaaagagatcctcgcttctttccacgagccataacgagattgccttttgtttccttccaagctccatctccaaaagtggcgtgatgcccctcatcatccaactgccttatagatattaaattcctctttaaggcaggaatatgtctgacattgtgcaatgtccatagggatccactggaggtcttgatgtcaatatcacctcttccgacaatgtccagagattttccatctgcaaggtatacttttcccaatcttccagaagtatagttagacaacaaatctttacagggagtggtgtgaaacgacgcacttgagtcctgaaccatg

SEQ ID NO: 206465 - DNA, 317 bp, Glycine max
  unsure (1)..(317): unsure at all n locations
ctcaagcttgcctaattaacctaaaatngagagagaatgatgatgattctccaatttgtaagcactaagnatttattacctatacttaacaaagaatacttataacactacaaaataaccataaattggaagagtttgatacaatttacataagctttatacacaaaagaccccgagggcatacgcctcatactcggccatgttgttggtgcactcgaaacccaatctggccataaagggtacacactgattgttatgagaaaccaatgntgcccccaacctatgatctaaagcgtttgatgcctcgtcgaaccata

SEQ ID NO: 206466 - DNA, 428 bp, Glycine max
  unsure (1)..(428): unsure at all n locations
agcttggaggaagaaggagatgaatgaatgttgagggatataacatctcgaaattttgtgctcaaaaagagctctgaaatctgaagttaatattcaaatgatcaaagttgaaaaaaatgcacacacatgacctctatntatagcctaagtgtcacacaaaattggagggaaattcaaatttcacttgaatttgtggagccaaactttggagccaaaatttaactaattatgattcgtgaattttagttatggttcagcccactaatccaagatcaattccaagattctccactaagtgtgcttaggtgtcatgaggcatgaaaagcatgaaggacatgcacaaagtgtgactatatgatgtggcaatggggtatagtaagcaaatgctcacctctccctctaaaatttaattggattgcgcttctacc

SEQ ID NO: 206467 - DNA, 309 bp, Glycine max
  unsure (1)..(309): unsure at all n locations
tgcctcanagaggtccaggaaggacaaggcggccgaaggatctagtttctctccatattacgacagtcaccgctttaggagcgttgtacaccagcagcgcttcgaggccatcaagggatggtcgtttctccgggagcgacgcgtccagctcaaggacgatgagtatactgatttccaggaggaaatanggcgccggcggtgggcatcactggttactcccatggccaagttcgatccagaaatagtccttgagttttatgcccatggttggccaacagtggagggcgtgcgtgacatgagatcctgggt

SEQ ID NO: 206468 - DNA, 435 bp, Glycine max
agcttgagagattacagaatccagctgatttatgatctgttgaaacatatataaataacatgtctaccttttcaaactctaaatatgtatctccagggattatagacatcaagttgcacagtgacaatatcgctgcctgctgttctagtggattagcactcttcaagcccattggtcctagtaagacctgcaacacaatatatgatttggcagttagtagaacatagttaacctttaaaaggagatccagtttacacatgattgaggtcaaacaattagcacaaaactcaacacaaatatgttctaacacaaataaacagataacaaagaaagcaatgaagtttccctaaaccattcagtaaatttagcaaaagcaaatgattacaatataaagtatatagccaattccgctaggcaatcagtgtctctattctc

SEQ ID NO: 206469 - DNA, 293 bp, Glycine max
  unsure (1)..(293): unsure at all n locations
acacttcaaactaacctagggttttaaggaagagggcattggatntgccaagttgttgtggtttcatagtgcagattaagggtattttggaaaaacaaatcataaaagggagtggattagtgtaaatagcagttcccctaatgaaatttgacaaattcggctctagtgtttttttaaggataaattaaaggtgttgctacacacaccatgaaattgctggtgcacccagcataacttgtgcaattctcattttgtcttcccataaaactgatacagaatgcataattcatatg

SEQ ID NO: 206470 - DNA, 429 bp, Glycine max
  unsure (1)..(429): unsure at all n locations
agctnttcactntagaagagtaagatctgtttctcatgtattttgatcttataaagggtaataattatttcttttagttaattgatttatttagttgatgtacatagaataattgatgtttaatcatacctgcgggtgatcaatctgacacattcttttaagtttatcccccgcatcttgcaatcgaagtgacgataaccacacataatttttcacttaacagttaaaaaaatggaaaggtgtgactcttgcaacaaaccaaaaggcacaaggtaaaaaaacagttatgattggtcactacttcgaagaatagccttattcgattatcattgtaagaaagaaagaatgacatgtgtcaaataataaggttttgcataaactatacttacttttgcctaattatgcccaagtacagacgaccacacacat

SEQ ID NO: 206471 - DNA, 315 bp, Glycine max
  unsure (1)..(315): unsure at all n locations
gcgcctcctctcgcctcttctcctttgtcttccgctgcatctccatggagaagaatcaccattgctggacctcattgaagctcaaagatccagcctccatagaagctccacaagcaagcttncatcatggcctcaaccaaatgaatcatccaacctcggctagggtaggcaaggatttgcgaagtacgggcgggcccatttatgcgcaaattcaaaacaagcatgcctttccaccatatggctngcctcccaactatacaccacccaatgtggcatacactcccaatgaggatgtcataactccgctccatactc

SEQ ID NO: 206472 - DNA, 425 bp, Glycine max
  unsure (1)..(425): unsure at all n locations
agcttatttcaaatgttctctccggngcttgcaaagaacttgaacgtattggcttggaccacctccaggtgcaataatatttactaatntgcagataaaaagaaatgtgtaattgtttgaaagcagatattttaaaaatgttcatgtcaaatagcttcttattgcaccccgtcctagtttttttttccctagatcaatgaagactatgttaaggtccttttgctttttgctatgactttttgttgaatcccaatcccattagtgggcttgagctaggccatttttgcactcctaccatgtgttaacaaagtaggcattaaaggcaaggtgtatggtatggtagtgtgttgtataagtctttacgagatataaaacattcatgtgcattcaggtaatcaattgaagctttactctcccattcttga

SEQ ID NO: 206473 - DNA, 292 bp, Glycine max
  unsure (1)..(292): unsure at all n locations
ntgntattggtgngctctttgcctaagagttactctcatttcatagagactntattgtttggaagagattctgtttctcttgatgaagtgcaggctgctctgaattcaaaggaattgaatgaaagaaaggaaaagaagtccactacaagtggtgaagggctgacagcaagaggcaagaccttcaagaaagatagtaaatttgataagaagaagcaaaagccagaaaatcataagaatggtgaaggaaacatcttcaaaatcagatgttatcactgtaaaaaggagggtcata

SEQ ID NO: 206474 - DNA, 342 bp, Glycine max
accgcagctgcacctgcagagcaaagtctttcaccttttttttaaagaacaagagccaaagtccaccaaaggaattgagagtatgatcaccgttctattattcattccttctcagacattaaattatcctctgacaaacgaaactttcattatacactgctgagaaccaattctatatcacggactggcaccaaatgatccgatgcaatggaaaggattgggacatcccttgttcacagtaccattcaccttgatagttcaggtacgatgatacgcacggtaagattcgtttgactaatgaaaccatacaatttctgaaactgaaaaagactggctcaactt

SEQ ID NO: 206475 - DNA, 252 bp, Glycine max
acaaggtcaatggattatagaatgaccgtggaaatgaaaaaggtcagactttcaaagtgtacgtgtttttttttattcttatgctgaatataattgctattgctattgtcaactgtttagatttcaacctataagttctatttgattccgaaagtaattcctctgtcttttgcttctcatacccactctttaatttgcaatatatgcattctttgttcgtgttattctgcatggtccatcattactcataat

SEQ ID NO: 206476 - DNA, 412 bp, Glycine max
  unsure (1)..(412): unsure at all n locations
agcttatcatggggggtgtttctttatctttttgncaatgtnggattaaattttagcttatatattgctaatttcagcttataggtgagaatgaagctactttagctcctatatataaccattgattaatagcaatatggcactttgagcaagatttactctctataagttttcatatcacgagtcaaatgctattgaaatggataaatgcacaatataattggtgtgtatcaaccctaacacaacaacactaccacaaaaacacacaccctatgatccacaatttgaaacgaagggaaaaagtcatgaaaagtgaaaaagaagagaacctatctgatgtaagctccattggagcttgtaggcctaggatcttcttcatcaatggattcctttgcttcttggaagatgaatg

SEQ ID NO: 206477 - DNA, 376 bp, Glycine max
ctatcaaactaagcttgtaagaactggggagaataagaacatgctgacttacatcgttcgcggtatgatatccactccacaagtttgagtagaggagagcttcaaccctataacgcaacgtggcggacaaaagtgggcagtaaacttgaatgatcgtcattgtcaatgcggaaggtattctgcgcttcactatccatgttcacatattattgcagcttgtggttacgtgagcatgaactactaccaatatatagatgttgtttatacaaacgagcacatcttaaaagcttactccgcacaatggtggcctcttgggaatgaagcggctattcctccttctgatgacgcatggacacttatccctgacccaaccaca

SEQ ID NO: 206478 - DNA, 389 bp, Glycine max
  unsure (1)..(389): unsure at all n locations
agcttgtcctcggtgacgatatacaaaatattagcccctttgagcttttcacaggcgtcaacgattcgtagaaggaagggtctttgtttggaggtgcccgcgaggtggagaacaacctcattgtcggaggtggtggtgaagatggaaacgttgtcctccaggttggttcagaggctcttatactcgacgaggttgtcgntgtgggccacgcggacggagccgaagcggtaaccggcgacgaagggctggacgttttttagcatggacagaccgacagtggaatattggacgtggccgatgaaggggctgccggtgagttggttgaatacttttgaaactaggcccatgcccgtgattggtaggacgacgttgttgttgacggtgacaat

SEQ ID NO: 206479 - DNA, 389 bp, Glycine max
  unsure (1)..(389): unsure at all n locations
gaactctcaaactaagctgaggacctatcanagacattgatttgttggtttatgaatgtgagaangcttaaagatatggaaacaaaggtttattagacatgagtaggacatgcgtctttctggctgttacttgatatttgttcttcaattatgtttttcatacatacctatttctggtataggtttatcatgccaagttttttaacatctgaagaaacgaaagctgtcaagaagctttgatttattgactaattccaatccatgctgagacattaatatcttattcggtggtgaagctccaaattacaaaggaatatctgataccctctaaatgtccttttgtatctttaattcggaatttgaatgggttaagggctttcaatttgaac

SEQ ID NO: 206480 - DNA, 422 bp, Glycine max
agcttccgttggtcaatgtccagcgtctctatatcttatgcgcctaaatcggacctccgagtgaaacgttatgaccatttgaaatgctcaagagcttccattgttcaatatcgagcgtctcgatttattatgcgccagaatcggaccttctagtgaaaagttatgaccatttgaatttctcgagagcttccgttgttcaatttcgagtgtctcgatatattatgcgactgaatctgacttccgtgtgaaaactgatgaccatttgaatttctcgagagcttccgttgttcaatgttgagcgtctcgatatattatacgcctgaatccgacctccgagtgaaacgtaatgaccatatgaatttctcgagagcttccgttgttcagttttaagccgctctatatgtgatgcgcctgaatctgac

SEQ ID NO: 206481 - DNA, 452 bp, Glycine max
  unsure (1)..(452): unsure at all n locations
attcactcggatgtccgattcaggcgcataatatatcgttacgttcgaaattgaacaatggaagctcttgagcaattcaaatgatcataacttttcactaggatgtccgattcaggcgcataagatatcgagatgatcgaaattgaacaacggaatcttatgagcaattcaaatggtcaaagcttttcactcggatgtccgattcaggcgcataatatatcgagaagttcgaaattgaacaatggaagctcttgagcaattcaaatgatcataactnttaactcggatgtccgattcaggcgcataatatatcgagacattcgaaattgaacaatggaagctcttgagaaattcaaatggtcataacttttcactcggaggtccgattcaggctcatcatatatcgagaccctctaaatgaacaatggagctctcgagaaattatatggcat

SEQ ID NO: 206482 - DNA, 407 bp, Glycine max
agcttcatggttgttgtgcatctttaatttcataaactctgatgagctcaaagactaggatgttttcacttgtggagctccaaatgctatgaggacggcgtggaccttggtcattgcagagtgctttattccctggtttggtaatcattggagctagacattcttagcatttataaacagaacagtgtttctaattgtatctcttggatgcaatgcttgtattggtagcatgaagttgagtatctcgctgtagatctgcttttaatttgtgctctaaattcactaacgtgttcatgaactttggcatccttgactatggtagtagctaccttgcatataggttggttcttggcaatgaagtttatcataatgcatctactgataacatcttgggccattccaatgtg

SEQ ID NO: 206483 - DNA, 359 bp, Glycine max
actacgcttgtccggaagggagatataagtgcatacatttcagagaataaaattggcagctggtgataaacctatcgcatgaggatttttatagattctgttggaacccttataatatagggctggcccattgcattctgttctgggcatgctgttatttattgatttccctaactgatgggaagatcttggaatttgaatttagtagtgtttcatttacggctgataatcactattcaatattcatcgctaaatgtagcaactaattgagggtttgctgtcacgttgaatattcatcatcttgaccactgacaataaactaagagttcatgctatcattggaacttacctgctgtatt

SEQ ID NO: 206484 - DNA, 427 bp, Glycine max
agcttgtttaccaattccaattcccacattaagtgttctctacgccactcaaacttctaaagccaatctccatcactctagaatctcatctcacacaccttatgtcccctctgtgtagatgttgcatacaaacaaggatatttagaggcaagaggttcactcccaacctaagtgttactccaaaaaaagagttttatccccttgacccacttttctcacacccaacgaatcaaaccacttatcttcagctaccccccacaaatcttacaaaggttgttccaccaagcaaaaaaagcgaacttgacccaccattcaccaaacctctccatcccctatactttagattctaaaatatcacacctcataccctccttttactccatgagctcccacctccactttcccaacatagaagcattaaatttaa

SEQ ID NO: 206485 - DNA, 329 bp, Glycine max
  unsure (1)..(329): unsure at all n locations
ccctctcattggaggttgtctaaggataaatttccatttggtagatgaggatatggttcactttntttggtaaatgtcactttgcctgtagattttggaaccattgttacaaatgagtaagggtgtctatggtccaaccaggggataggaaatcacactnttctcaacataattgttattggttggngaaatggaaaatccataatttggaggacagtttgggattgttgtttgggttctttggactcaccgtaataagatcatttttaataaaaaaatattggaatttgatttggtgacaaaacaaattagcttcatatcagatcatg

SEQ ID NO: 206486 - DNA, 458 bp, Glycine max
  unsure (1)..(458): unsure at all n locations
gatccttaagtcacctgcggcatgcaagcnttcaataaattttaattggtaatacatttgcattatattgattgtacaatttttgtttgaagcgaattgattgtacaattaacagatatagtttagtatttttccctttaaagtaaatttccacgtttttttattgagaaagaaattttcacatacttgatgagtaaaattgtatgataaatgataagagcattaacagtagagacgtaggcaagtttgggtcaacttgttcatattaattgggtcagactggccaatttgatctagagggaaaacgtagttgggtcagtttgatctagggaaggtcaaaacatattcatattagtaactgcataaaaaaaattcatattagtaattgggagggtaatgggtaaggtaaaaaaaaaggattatagtacttatttttcatacatccaattaaaaatatt

SEQ ID NO: 206487 - DNA, 431 bp, Glycine max
  unsure (1)..(431): unsure at all n locations
ntaagcctacatgtntattctcacagcaataggtcactggcatcacgccttcaagtttcatccataaagcaccgaaccgattaagatatacaactagaaagtacggatatgatatatatagcgcatacacaaaaatgccacaaattttgacacaattataacgtaacatataaattttcttgtttagataaatttctcaaatacttataagaaaaaaattacagtaaataaatttcaacttatacatgagctaatcttaacttataaacaaggtctattttattttttttcttattttttcctggaaattcttatgaacaagtttattcaaacgtagctattaaattaatttttaaatttaaagagcagattaatggtctaaatgtgaacatgaattattataaaatacaataaaaattataattcatcaa

SEQ ID NO: 206488 - DNA, 432 bp, Glycine max
  unsure (1)..(432): unsure at all n locations
agcttcataattntccttaattatcattatttatatcttatttaatcttaaaacattcctttttatctttttttatattttcagttaacaaatgataagaaggataattctattatccattaaattgaaatacatgtctacgtatttatctccaaattaaatgattaattgactgaaatcaattttttataattgtaattataattaaagtaattaatttttataaatcctattttataattaatgaatgtaaatcatttttttattttatcttctaattttaaaaaaattcacaatcatatttatattcagtatcagtatttaattaaaaaaattagtatggaaaatatttttgtaaataatttaattgaaattaaaataattatattggaataaaatatcaaattaactatttaatggtcaattgataaa

SEQ ID NO: 206489 - DNA, 395 bp, Glycine max
  unsure (1)..(395): unsure at all n locations
tgacactatgaaactaagcttagcccaagcctcttgaaatgcctgcattgcatttcaattactatagatgcttcaagtacagtaccaaattccataaaaaaacaataataagtataataaaaaaatacaataccaactaccaaccaccgttttgtgatgatttttgattgaatgatagtacaattttttaacatgtgtgtgtatataatgtattgagtttgaaaacataatttatttgcctaattaataatttcaaaattaaaataaattttctctaggttaaaaaaaagtactatattaaatactatgtggagctgagatgactgattccagactangtttgtcctatttggaaaaacatagctaaccaccgttttgtgttctataaactaaaa

SEQ ID NO: 206490 - DNA, 431 bp, Glycine max
  unsure (1)..(431): unsure at all n locations
agcttgaagttcaaggaaaagcttgaagatgttttggcttttacatgcccaacctccttgagtgacacttatattggttgttatcttgtttaatatatcgnagtacatctgatatctattttgtattgggcatcatcatggtttgtgcgggtgcttgtgttgacaaccgaggccaaggggttggagacgtgcgttgtacatgcttaggccttggttaggcctagttcaaatatttttcagataatggtttggacgaggagtttgctcatagtcacatacattgctagcaaccaagtgtgttgtcgtatgttcatgacaacctcgacaaatcggggttcaaagtggtaactaacacatctgtctattaactatatcaacaacttcngtgttttataatacacacatgctttatcttagnacaaatgatagac

SEQ ID NO: 206491 - DNA, 345 bp, Glycine max
  unsure (1)..(345): unsure at all n locations
aaatcccaggaaaatggctntgtgtagattataacatgatcagtttgtgtgtcatcattcaacctctctactagtgcccaatcgatttacttcaaaaactacaataaagaagacaagngatactaaataaggcttacattattgaacattacttaatctggtttctttgttctcttccatgatttataagtttgaaattgttaaggaagacaacataagtttagaacaaaatgctaaatcatgttcttcattgagttttatgcaatattttgaatttcttttcatctcgatcttaatgagaaatgttctacgaattactcatgaattatcccaagtattacaaag

SEQ ID NO: 206492 - DNA, 435 bp, Glycine max
  unsure (1)..(435): unsure at all n locations
agcttgnggntgtggctgggtagatattcttgtgcttctgtgattaatagagaaaccatggctggagaagaagaaggaatagaaatcagaagaagtgtttttcttgttcttgttaaccagagaagggaaatgcagcagcagaaataataaagattgatgattatataaatggcttctctgattagacagaaaatagtagctaaatgactgttgaacgaatgatttgcacttacgaataaaaataaaagattttttttaattaaaatagaatataaaaaatatgaactaaaaaaatataaatttcttgtttagtattcattttttcctcccaccacaaacacaccattacaatcacattagtgtccctctttatatattgtggcgctaattcctacttcggagttcagcacttcctatattttaactctttatact

SEQ ID NO: 206493 - DNA, 344 bp, Glycine max
  unsure (1)..(344): unsure at all n locations
tggtatccaagctgatcatgtcaaatctgacaagtgcttatctaacctgttgccatattcttctcagnaccaagatggcaaaaccaaaggaactgataaggtgaagaaaatgatgaagtcaaggtcatttcagctttcagatttcgagcctcctcaatcaccaccttcggtcaggagcttgtcccagccaagaaagccatcacctcttcatgttccaactactgcagcatccccacaacagcagaaggctatggtcagaaggtcacccaattacatgaagcctaccagcagttcagatgcaaaaaaggagcttttgccggttagtcatcggaataccccatcta

SEQ ID NO: 206494 - DNA, 430 bp, Glycine max
agcttctatataagctgaaccattttatcaataaacacttgttgagttttattcagaaaattagagtttatttcttttatcttagtgagagtgattctcctaaattcttgagtgattcaagaacaccctggctgtatcaaaggactttcacaacctttgtgtgttgccctcactggaaagagagattctttccttcctttcatcttcacccttgttctttcaaaccacaattccagaaaatccacctctgcccagaattatctcgtggccataactcccattttacgcactcaaattaagtgattcttgagcctaaattgactttcaaaatgagacctttcacctcgttttggaatcacctcatttggagccctgtagcttcagttattgccatttctatatttctgtccagccaccacttaacctacat

SEQ ID NO: 206495 - DNA, 388 bp, Glycine max
tgttaactaaatgagctaagttatattgtaatataattatattcatttatttcatgataaagaattaattttactcacaatatttgtgtgttacacgtacatattaaaggtggggcaggagaggagaggaaacttacaaaagaataaattaccatatgtttataaaatataattaacttatttcaagttttctataatttataacgacaatttaatcttattcggttttttaaatatagaaatgatttatataaaaacatgtatatatgataaacattaagtgtttaattaaactatttatctaagcacataaacatcaaatttaaaaattaattaacctttaaaatcaaccgattaccagactagtttttcatttttgtcgcgttct

SEQ ID NO: 206496 - DNA, 443 bp, Glycine max
  unsure (1)..(443): unsure at all n locations
gatccttaagcaccgcggctgcagctggattaacttatgtttgagtgtaggtgaagattntttttttgatttatgagtaaagggtgaagatgacaaagtggaatacgataatcgagagagatgacaaaaatgatgcagctatgacttcggtggagaagaaatagtttcaaattatatctgaacccaatttggaaaacgaaattttgtttatatttataaataatatgtttgataaattaataaatttgtttgaatatgatattgggtcgattactactaaaaaacacttttagaacggttaaaaatcacttaaattatgatttggagtttttttttgtgaatagggaatatttattttaatagacattatttatcatagataaaatatttaattatttaagaaaaaatttatttaatttgtttttagaagaacattttatttg

SEQ ID NO: 206497 - DNA, 316 bp, Glycine max
  unsure (1)..(316): unsure at all n locations
ntatgattccaggctataacctagtccagaagtaaagacatccataggagcaaatgtaatgccttttaaacaaccatcaaaatataagtgctcctctactagcatcacattcaatatccttcactgacttatatgtatagaaaatgtttactctagccatcaagcttgtacatcaaatatcccctataaaagtctttttaagagttgtgcacagtataatttattagaggttcaaccctccactaggccacctaaaatcatagtttaaactaaaataatgataaaaagaccaagataatagccagtaggattcatg

SEQ ID NO: 206498 - DNA, 427 bp, Glycine max
  unsure (1)..(427): unsure at all n locations
agctntatcttgaagtgcttagttntgccatgaaacactggatcattagcaattgagattgcagcctggttgtccacaaaaatatgtgtgctttcttcttgtttcatatgcaaatctgtcataattttcctgatccaaagagcttgattcactgcagcaacaacagttacatactttgcttttgcagttgattgagctacaacttcttgttttttagaacaccaagaaaagactctagaaccaaaggaaaaacaataaccagaggtgcttctcatgtcatcaatacaacctgcccagtcactatcagaatatccatggagcttaaaattatgagaatgagagtacattataccatagtctaaagtgcctttaacataatctaataactcgttggcaacttgaagatgaacttcactagcacaatgca

SEQ ID NO: 206499 - DNA, 335 bp, Glycine max
tctattggagctagtacaaaaggcagcttatattcaaattcagataaactattcattacttgcctaggtgaagaaaagggttctgatttcacagaacattgctccgctaaaaatggaataaaataatgctagagaaaactaaatgagtgtgactatatatatgtgtgtgagaaattatatgggaccacgacaagcaatgaatactatccactttatttcttcagttaggtgactattaatttatgcacaatgtagtaccacaccttatgactagcttttaacaattcagaatttcttagccacttcactatattaaattgacgagtaaataattt

SEQ ID NO: 206500 - DNA, 394 bp, Glycine max
agcttgcttctacacaaaatgtgctatggttagcccagggaaggtctatcaacctccttttccccgatggtataatcccaacgcaacttgcgcctatcatggtggtgtttcagggcactctatcgagcagtgtgtagccttcaagcacaaggtacaaagcttgattgatgctggatggctgacatttcaagaggataatccgaatgaagaatgggagtctcgaaggctaaaacaaatagggaatgtctcaacctccagacggttcatattggaagtattgcatgtggctagtatgattgaccttgatggtgacaaaggaggttcttgtttaatgcatccagggacatcgcacgatgtggagacatgttcaatggcggaagaactgctacaagga

SEQ ID NO: 206501 - DNA, 327 bp, Glycine max
tcctttaaaaattatagatgtgcagattttccagatgtctttgttggccaattacagtctgacctattagtaggttagcgcagctagatttacatttctaatttcatcaccagtgtttgtgggttttgttttctgttactggattttactcaattttttagacgtcattggtgtggttgacgaggttgtctttcgtcatatttcacccaaaagtaagagaagttgttttaaccttatgaatttgaggtaaacgtctgatatgttctatgagttattaatgattctacgatttatcggtggatgttgttaactaaatggttgtataat

SEQ ID NO: 206502 - DNA, 421 bp, Glycine max
  unsure (1)..(421): unsure at all n locations
agcttagctttctctattcaccaataatctgattattgctntattaatcggcggaagttgtttatgcaccaataaacatactcagttataggagatttactatggtaattggtaccctttaggtctatggtgcccaatgcacaagctatcatgcatttaatgataaatgattttataataaaaaaaaattagaagttactgcatctaccggttgcaaaaaaaatgcttgcaacttacaccaaacacaggaaaagatgattacccaagtaatggccccaatcataatggtacttacatctacctgaaactctttctatgcctacctaatttaattctccgcgttatacactctgtttactctgattcctctggttaaataaactttcagtatttaatgacaatcaataaagggatctgcagt

SEQ ID NO: 206503 - DNA, 384 bp, Glycine max
tgagatcacaaagttaaggtgtaatgtgtgatccatgtaattgatctcacctagtaggaaaaagttactgttgttattattggaatgatgaaatcggaccttctccctgcttttgatcatattgtgtttggggcattatcagtggctactgcctaatgatcttctaaatctgtggctgaattcttcatgtacgttgaggagacttcaagagtgaggttcttttcctaacaataggctctttctatgccctctctagtgttgactttgtcaagggtgcacacactttagtagttgtttctttgagggagtgtggatgagaccaatttgagggccatgccttgtttcatcaagagggtccataacacatttaaggtagatgatgat

SEQ ID NO: 206504 - DNA, 415 bp, Glycine max
agcttcaaaccacagcaacacataatctatgtgtccaaaacccctcaattcaatggcttttctaggcttgaaaggtggaatttagaatgaggtaaatttggagcaaactctcacctcacacaagtctataacatcaatctaaacttgctcaaactggatttacacctaaatttccaccgaatcaaaatttgactcctcaacacccaattttgccctagaaatggctcttggttcactttggtcatttgtttttctctctagctcagcctaacctttctcacatgtcctaaatgacatttcaagctattattaactcactttaacctccatttaccacagaattcagacttagccttccaactctcaaagtctcactctttttccactcataacatcacattctcactttctaacc

SEQ ID NO: 206505 - DNA, 337 bp, Glycine max
  unsure (1)..(337): unsure at all n locations
tatagaatatataataaaagaacaatgacaattgaagagtctatacatgtttcctttgatgagtctaatgccattcttccaaggaaggattttttagatgatatttcagattccttagaagatacacatattcatggaaatgactctaaagaaaaagatgaaggaagcaatgaggattctcaagataatggagttagagaaaataatgaacttccaagagaatggaaagcctcaagagatcatccnctcgacaacattattggtgatatatcaaaaggggtaacaactagacattctcttaaagatttatgcaataatatggcttttgtatctatga

SEQ ID NO: 206506 - DNA, 393 bp, Glycine max
agcttacatcattgaacaacaagctagcctttaaagcttatgatcatcattgtgtgtgaggcaattgggtttagtgcaatctattcccaagataataagtttccccatctgtcttctagttagactacatacttcttgtcaactaaataagatactatagttctggaggacattgaagacaagctccactcctttgtattcaagtgctttgcctttagtcctaacaatgtggacttcttcacataatggtgaggggctatgctggttatcttatattttggtcaacagccgatcttctcgctatgctgatcaatgacatgcctgatgatgagatgccatcctctatcctcattaagcatgagccagagagaacatctacctctaatttaatta

SEQ ID NO: 206507 - DNA, 303 bp, Glycine max
  unsure (1)..(303): unsure at all n locations
ngganacaanggtgaccatgacagatggagctgaactatatttaactaatccaatcaaaggaatgggaggaatagcaaacaacacttataaactttaggaattcaacaacataaatcctctcatgcgacaatttccaaacccaaccaatactcaggttacttgaactgttgaacctanactattatttctgtttgatatctcttactaggagaaagaaaatctttaaaactgtgtatacttgtactgcagtaatgcttggttgcccttatgataataatatatacttttcttttctattacaa

SEQ ID NO: 206508 - DNA, 404 bp, Glycine max
  unsure (1)..(404): unsure at all n locations
agcttgngcaaatcaaatcactcctacattttatctctagcatgcattgtatgttggtctcgtcctttgtcacgggaagccggaaggtccatctcaccttcttaattgtacacatggggcactgcgcccccaaatgcgcaagtaagaagagataattttccgggctctcgtgtccgtaaaatgcattcatatcatgcatcgcataagcatctcttcataacatcataatggacatatcctgcatttgtccgttatcatattccagcctcacattttgcatggtcatggcatcatcatgcatatgcgttcaacaaactttttggtctgcaaaattgcataccatttgttttcatgtttgctcatccttgcgttttcctctacaaaacanaaacaaaaaaaggggg

SEQ ID NO: 206509 - DNA, 365 bp, Glycine max
  unsure (1)..(365): unsure at all n locations
tgcttcatgaaaggaaggattgatatgatatattaatattctcatgtaaacatgacccacaataaggttntaaacttcttgaccatcttgggcttgagatggatcttcctgtcattagtcaattttctatccataatatatttaattttttagttatatgatatcaatgtaagcctttgatctcattgattgaaactccaagctctgacaagtcacactttacaatgttgctttgtgatgtctgtggatggggaagcaagcacggtgatgaaaggtgttcaatatgaagcctgtgattatctctttaagcctattaggatgaaagaactaattaacatatgggagcatatcttaagaaataccgg

SEQ ID NO: 206510 - DNA, 437 bp, Glycine max
  unsure (1)..(437): unsure at all n locations
agcttcagaccaaagcaattcanaatctatgtatctaaaacccctcaatttagtggattttcaaggtttgagaagtgaaaatgagaatggggtaattttggagcaaactctcatctcaaacaagtctataacattaatctaaacttgctcaaactggttttatgactaaaactcaaccgaatcaaaatttgacccctcaacacccaatttaccctagaaatggctcttgctttcactttggtcactcattttccccatttgctcagcccaagctttcccacaagtcctaaatgacactttaaactaggattaactcactttagcctccaattaccactaaatccagatttagcttttcaaaccctcaaagcctcacactnttccactcatatcactaccattctcactttntaaccctaggttaactctacccttca

SEQ ID NO: 206511 - DNA, 415 bp, Glycine max
  unsure (1)..(415): unsure at all n locations
gacacttcaaactcagcttgactattgtacaactaattaattgggtggctntcattatatgttgtttgaaggtacaaataaattatggcaaatggcaacggcagattttgcttttgtccatctgcatatgtctgtccacttcttccactctaggttaagacttatctgagaactgtcattatgaataatttcctcaaattatgaaaagttttttgtgctcataacgctgtcaagctttggatgacaggaaattcaatgtgggatttagttgggttttcctatttatgtcgtgtgtacatcttgattggatagaataagaggaataagtaatttattattgatcaagtttttttaaacttaaatgaataacattataaaaaaatatttgtggataagtgttttttttttaaaatga

SEQ ID NO: 206512 - DNA, 435 bp, Glycine max
  unsure (1)..(435): unsure at all n locations
agctntacatctttagttgaacaaaaggaatcatgaactaactatacaggagttgattaacaaaacacaactctctctcaaaataatcccaacgtcatcacgtcggctcagcggctcctcaacagaatctcacttcctgcaccctactgctgtcattttgctcccacgaacaaggttcgcgatcatcacaggtatcaaccacacgatacaaaattgcaagggtgagttcattataaaaagaaccaatactaaatccaaataaccacaattagtaagagaacataaacaaacatcatgagctcacacaatattcattaatcaacacacacatccaacaattattcatcatccatccatggatccaatcaattatgctcagaatgatgcatgcacctgaccttcactctcagatgcaatgtggtacgtaccatcccc

SEQ ID NO: 206513 - DNA, 417 bp, Glycine max
  unsure (1)..(417): unsure at all n locations
ntgtcgaagcaggtatggttatgaagattaggttcacagtgtttgctgtgcctgcgatctgcggtggctatagaaatggcatacaagataaacctataagcattgaagcataacttgatgcatattaaatagccaaagaagccttttaacttataatagaattctatatcaaggaaaatgctacatgtatgtagacattgttgattttcccgatacttgcacctgatggcatataatatagccacgtattagttatttacctttagttttttcattgtttgcatacattntctgttttctgtttctcaggtttctgatcttaaactctcagtggatcacttggaaaaagaaagagactcttactttgcaaaactaagggatatagaaattctctgtcaggctttagaactagagaac

SEQ ID NO: 206514 - DNA, 433 bp, Glycine max
  unsure (1)..(433): unsure at all n locations
agctcgnnacagtataagaattttcaatatatatctgcactcgatttttcaataagagttttcaatcattatccacactatcactactacaaaaaagcctttttacgacatcgtttctaccacggttataagggaaccgctataaaaagtggtacggcggtaattntgtaattattgcgctaaaatttggaatccacgacgcacattctaaggcggttattgaaaaccgccttagaatgtgttgtgtaataaaatttacgccggtttatattaaaaaaccatctgtaatcaatataaaatagaaaaaaaataaaaaataaaattttagttctgaacaccctaagctgcattcgcatttgagatcactattttgaaccctaaccttgtcgctcatatcacatatgaagcaagcccttatgttgttcactgttat

SEQ ID NO: 206515 - DNA, 359 bp, Glycine max
  unsure (1)..(359): unsure at all n locations
atcaaagaagagagagggatctccaagaattccctcattatctctcatgnnctttcctctntntccctttcctctcttcttcttctcctacgttcttcttctatttttattgtttttaagttcgtagcttcgtcgtttgtctcggtggtgagatctatggtcgtcaatgagatctgtacaagttgatatcgtcattttttcttggtgctttattttggttcatgatttttttcgcattccatcatccttttcttctttctcttccttctttttccattttccgatgaagcctcgtgcggtgctgccatggnttatattttatgttttaaataagtcaacatacttcatacaaataattc

SEQ ID NO: 206516 - DNA, 435 bp, Glycine max
agctggggattcagactgtgatcttcctatgtccatatgttgccagcaatgtccctttaagttgtttgaatccactgtcacaaagtcagaggatagccaagtagcatgccgacctagctttccgagccaccttgcatgatatgaaaagatgatcctgggtctcatattgctgccggcaaaatggacataataaattatcttaattgacaatgatatttctccttccaaggttgtctcttgttggcaatctatatctcattgctctccaaattaagaatttgactttatttggaatattgatgttccttagatgcagaaaaatactcccttcttcatcctccacatgctcttgtaatctccatttacaagccgagaatgttgagtaaatccccgaagagcatcccgaccaagccataaatccatatcctctctaca

SEQ ID NO: 206517 - DNA, 353 bp, Glycine max
ctttagtcttgaattcaaatcacatcagaatgataattgtacatgaattatcaataacaacatgataataacccaattttgttagtaacagatttacacattgctttccagcagtaagtctggtctttttggattggttgccgtcaactaattagctttggcagctttcaggtctgatgccttcttcatttcataattttggaagcttgacggataaggttgtgcagtgagggaagggggtgctgaccattacagaaagaagggtaattttgtccttcacctaattatttggaagtgcaggaagtaattcccttattagtgacttggatatttggcccaatccattaaaaaac

SEQ ID NO: 206518 - DNA, 421 bp, Glycine max
  unsure (1)..(421): unsure at all n locations
agctnggaaatatagtaaagtttaagttgtgaataggttttctgcacttttaactattcagacaaaagtaaaatactcaaagctgtaaaatgtgacaaatatcaagataaaagcgatagggagtttcctactgaaatttctcttaccgtataaaagggtttttctctatttaatattatcctagtgttcttacaccgagaaaatactcagaccatgatttctcacatgaatgatcctaactctcttagcttttgttcttgattcctcaacaaactcattctaaaagagttgcactatgcatacaatgtaaaatatactaaatcactgcactccattcctagacatacagatttctagcttgctctatcaagttctaaggttntaaagcattttccaatactaaaaagcctaactacacata

SEQ ID NO: 206519 - DNA, 340 bp, Glycine max
  unsure (1)..(340): unsure at all n locations
tgcctcanagaggtccaggaaggacaagacatccgaatgaactagttccgctccggagtatgacagtcaccgctttatgagcgctgtacaccagcagcgcttcgaggccatcaagggatggtcgtttctccgggagcgacgcgtccagctcagggacgacgagtatactgatttccaggaggaaatagggcgccgacggtgggcatcactggttactcccatggccaagtttgatccagaaatagtccttgagttttatgccaatgcttggccaacagaggagggcgtgcgtgacatgagatcctgngtaaggggtcagtggatcccgtttgatgctgac

SEQ ID NO: 206520 - DNA, 420 bp, Glycine max
  unsure (1)..(420): unsure at all n locations
agcttataatatattctatactactttgattattaattaaaaaaaatattgtcgttaaacttctttgtaaatatcattaaaataagttgaaaaacttattatataatcatatattcattttgataaatccataagtttgataaaaaaaataaaaaatcacaggacttcttttgcaaaattgaccattgaattttacaagattttttttcgaccacaagtatattatagaataatcaactctttggtatccattaacttttgcaagatttctttcaatcacataatccaaactaaggccttatttaaggtattctacctcaattctagaattaacatgttggtaagtgatatacctgagccttaaagactntgaaggcatccaatgcttcatttttattataaagcaaataaacattcata

SEQ ID NO: 206521 - DNA, 286 bp, Glycine max
cggacgtggagagcgccagtatacacaatgctcccaattttatgcgcaaggtggaactaccgtatattctcacgagatacacagctaaactagatatatagctactaatagtatagccaacactgattcatacgtgatagatcatgcccacctatatagtctacgcatgaagtatgcttaaagcatatgatggggctctagagtatctgcttaagaaatcatatccataatagataactacttgatctaaccaacttgatgcactttttgctctaacatacacagg

SEQ ID NO: 206522 - DNA, 427 bp, Glycine max
agcttgttagaactatcatcacatgacactttattggcacagaataagttgctttctaggcaacttgagattttaacagaaacacttggtaagttgccaacgaaactgtctattggtcaacctacacattcttctgttttgcaggttacaggttgtaccatctgtggtgaggctcatgaaataggccaatgtattcccattgaagaaaacactcaagaagttcactatatgggaaatcaacagagacaaggatatactcaaggaggattctcaagcttccagcagggtccttataaccaacaaggacagtggagatcacaccctggcaatcaattcaacaaggaccagggtggaccttccaacaggccaattcaacaagggcctaacatctttcagaggactactaagctggaggagactttgactc

SEQ ID NO: 206523 - DNA, 456 bp, Glycine max
  unsure (1)..(456): unsure at all n locations
gctattacggacctatgaaactcagctnttggtcaaaggctggtgtatgtacaatcatggccttcatcatgttctcgttaatacatttcattctaaaattcagagattgatgcaacgattattattcacagctagtcgttcactcacaatttaagttcacactctcaccggttttggttcaagcttttctttctcaatcaatctatctattgactaacaattctaattgcaagttcacattcttgttctttctttgtctaacctacacatttgctcaaactcatgaaaagaaacataaactccatcaaaatcatgcacttaatttaaaataaagacatacacctatttttcacagaaagacaaaagtggttcattggcatgtcatcaaaaacaaagtgaacttggtcaaatgcttcagaatangcatacctactattcattaataaactagcaaaa

SEQ ID NO: 206524 - DNA, 410 bp, Glycine max
  unsure (1)..(410): unsure at all n locations
agctnttaatttattgaaagataagntaatcaatgcacctttgctttgttttcctatttttgataaaactttagaaattgaatgtgatgctcttggtgttggaataggggttgtactgatgcaggactctaaactagttacatactttagtgaaaggcttcatggggcagctttgaattattccacgtatgacaaagagttgtacactttggtaagagctttgtagacatggtaacactatttgtggcctagggaattcataattcattatgaccatcaaagtttgaagtttataaagtctcaaggtaagctttaaaagagacatgccaagtggttggaattaatcgagatgtttccttatgtgatcaagtacaagattggtaaggaaaacatagtggctgatgctttgt

SEQ ID NO: 206525 - DNA, 437 bp, Glycine max
ggcttctactgttagtcctttgaatcttgtgttagggataagagagactcaaaagaattcaggcggttagtccttcgttcttttggcaaagggagaagagagacacaaaagaatttaggcgattagtccttcgttcttttggcaaagggagaagagaatgaaaaagatgaatagcacaagtttttgaactaagaacttttcttggaagagaaagtgttgaacaaaaacttttagaaagatgaagagaaataattcaaaaagatctattgaaagagatgaaagaagatattgaaagatagattgaaagatagatgatagatgatagatcaaggaacaattaataaactcatgccatggtcacatatttataatctcttaatgactcaagtcaaagcatgtgactcttggcatttatttaaaactagtcactttaaaag

SEQ ID NO: 206526 - DNA, 411 bp, Glycine max
  unsure (1)..(411): unsure at all n locations
agctntgtggagtagaaacatgggaccattttattttatttaaaaaagaaagtcgtatctagtcaaggtctgagaaaccatacaagtttcctaatgatttctaattatgtgggccattaagtctatcatatgctgacaatagccgagaagcccatgaatctcttcgggggcggagtaggtgtccgccatcgccttggccttcgctaacaagcggggaagttcttgactctcgttcaaggtaagagcaaaccgatccatccacatggttgcctcttggtgtaaagagtcgatcacccttcctcttgcctctttttctgcgtatacttgagcatactcgtccgcgatcctatgctcgtgggccggggctagacctatctcttcttggtacttggcgatgatagctaacatgtt

SEQ ID NO: 206527 - DNA, 362 bp, Glycine max
cggaaggatgcttcaatggaggaaaagaaagagggagatatttagagaggcgggagcacgaaattgaaggaataaaggagggagagaagtggaactttgaaagatgtctcacaagactctcattcatcaaagttacaacaagtgttacacatgcttctatttatagactaggtagcttccttgagaagctttcttgagaaaacttccttgagaagcttctttgagaaaacttccttgagaagctagagcttagctacacacacccctctcataactaagctcacctccttgagaagcttccttaagaagattcgtaagaagctagagcttagctacacatacctctctaatagctaagctca

SEQ ID NO: 206528 - DNA, 416 bp, Glycine max
agcttcttttggaccttgaacaggcaactaactcctctttcaaaaccatgccatgtgctcgcgactggtccctttcttcccttcgcaacttgagttcactattgctaccccatagagctccgcgaaatttgttccggccatactcttccttgcgagccctcttggtctcttgttcaagggctcttgcagtaattgcattctcttcccgtaacccggcacactccttccgaacgtgtgtagcggccaacttgaacttctccttggcaagttttgcctttcctaactcgcttttgagagtttggacttcttcgtcctcttccggtgcttcaaaactctctttgctgacgacttttaacttggcgagccaatctaaacctcctatatgaactttcagccattcgtggtacccaccaatg

SEQ ID NO: 206529 - DNA, 341 bp, Glycine max
  unsure (1)..(341): unsure at all n locations
tctcgattcattctatgcacccgtagtggtccacattgtgtttcgtgcattnttattctcgntntgtttactttttataccccctcttgacgtgcttaagccattttacttaagtcatttctcgcttaacttaaaaataaaataaatttccaccgaacgtttgaattatattatccgttaacttcggttaaaatcaattccgaccgttcggtcgtgccgtaaccacgttggaaatcaaaaagaggtaaaaaataatataataatcaaaaagacatcttttagtaaaataaagcggaaaatcaatcggaccgtntctctttgggatttctcattcttaatcg

SEQ ID NO: 206530 - DNA, 322 bp, Glycine max
  unsure (1)..(322): unsure at all n locations
gtataagtgcgggtctgggagacgaaggtcaagtggtcgctatatgtgaagatgatgttccaagaactctggatttggtccgaccatgccctcctgatttccagctgggaaattggcgggtggaggaacgccccggcatttacacaacaagcataatgtaaacctttacggttttaaaagctctatagttgggcctaggctttagagttttcattntgttaaggctttgtgtcttttgtctttgaatttataatacaaagatctttcttcatctgttcctggtttctacccattctcattcatttgcatgtttacttctttt

SEQ ID NO: 206531 - DNA, 423 bp, Glycine max
agcttgttggccgcgattgacaaagggtgcttatatacttactttgtctccgcatgctatcatgcgttgagtcttagagatagcaaaagaatgtgtatacggataaccacttaggtatttccgcctgccccctaactttacgagttagtctcgacagaggttgtctgcgcggaagacgacgtaaatctccgcgtgtgaacgagcttgttggccgcgattgacaaagggtgcagaagacgacgttagtctctgcatgctatcatgcgttgacttttagagatagcaaaagaatgtttatactaataaccacttgggtatttctgccggccccctaacttcacgagttagtaccgacagagtttgtaagcgtggaagacgacgtaaatcttctcatggtaacagacttggtggccgcgattgaca

SEQ ID NO: 206532 - DNA, 397 bp, Glycine max
ttagacctccatcttaatggagagggttaccactactggaaaacccgaatgccaatttttatcgaggcaatagatctaaatatctgggaagccatataaataaggccttatatacccaccacagtagaaagagtttcaatagatggtagttcatccagtgaaagcataaccatagaaaaatctagagatagatggtctgaagaggatagaaaacgagtacaatacaacttataagccaaaaacataataacatctgccctaggaatggatgaatatttcagggtttcaaattgtaagagtgctaacgaaatgtgggacactcttcgattaacacatgaaggaactacatatgttaaaagatctaggatgaatgcactaactcatgagtatgaattat

SEQ ID NO: 206533 - DNA, 399 bp, Glycine max
agcttgtccacaaaaataggttttagaagtttgtcatttcaatttctcactaagtaaaatggatcattttcaaggtccaacgccttaaaatgatcacctcttaaagtaaaaaagaatcacttgataagaaagaactacgtaggtctgatttcctcatcgcaattgaggaatacgtaggagcaaagggaaacacccttgtcgaccacaaaaagagaaaaatataaaaagggtataaaggatataaggatttaaaagggaacataaaaaatcaaggtcatgtttgcacattcgattaaaggctgccgtcccttgggacggacatgtggggtgctaataccttccccgtgcgtaaatacaactcccgaacctttcacttaaaaagtcgtagatcgcgtcttt

SEQ ID NO: 206534 - DNA, 368 bp, Glycine max
  unsure (1)..(368): unsure at all n locations
tcaatggggccaaacacaccaaatgattattatgatggatggctcaaaatctcacaaaagtaaatcatcactttcaaattgagctttcaaaactatcatgacatgtagagaagaatcaaggatttcaagtcacaaaatgtcaagaacttttattttcaaaacaattacccatttcttgaacatatcctataattcaaagaaaaacatgcaaagtcgtacgtgcacatgaaattgacccanaatattaaactgaaaatccgacgaaactaacaacattaacaaattaacacaactaacaaattaacaaaaccaacanaactagtcaaaccaaagaacactccccnncccccccatacttaaacaacaca

SEQ ID NO: 206535 - DNA, 377 bp, Glycine max
agctttgtacttttatattcttaataaaatagcatacatttaaaataaactttttttttaccgaatacttaaattctttaatttggttaaatttatcttttccataactctcaacattgactttatagatgttagggtatatggaaagcatgaagggactctcacccctttttttttttgtgggtatggtacccaacaagcattcaattggcttctggttatatttaatagagccataaacatttgttagataatcaatattcaataaatgcttgacagctccataagtaccatatccatcaggtaccatggcaacttccaagagggaaatgaataatttaaagcactctaaggttactggagaaaatcagaaatag

SEQ ID NO: 206536 - DNA, 448 bp, Glycine max
  unsure (1)..(448): unsure at all n locations
tatatttattgaagatatatctattgcttatttatacttattcctccttggatattgatgagttatttaatatagagatatttttaaaaaataatttttatcagtttataattattatacataactcattggtaatgaaatattaagtattatgtgtattttttaaaataaacatattgattattaattttttcatgagattatcactggtaaataaaatacattaaatatcatagtttattaaagtaacttatatttccagataaactatatattttatatttattaacatttaaataagagaaaatataaactaattaattaacctaactctagaatcaacacaggtgtgagtctnagtntataacacagtcattataatgattttggagaacaaatcataataattatggtagtattttgcacttatataacttctcactcatgc

SEQ ID NO: 206537 - DNA, 343 bp, Glycine max
  unsure (1)..(343): unsure at all n locations
cttataagctttcggttaattgagttaatacaattttgaacagtttttgcattaggtaaaaaaaattatattgaactttactccaaaatttatttttataatttttaataaaacatatactttaatatatatttaacatataatacttatattttgtctatcaaaatacatgttattactcctattcctaaatataagactcttttaattaactaatttacaccctctaagaaaattatttaatatagttagttgcatgaaattttgttaaaaattgtattattttgccaaatcatttaaaaatattgggacacattntttctcttttatttaattaccttct

SEQ ID NO: 206538 - DNA, 392 bp, Glycine max
  unsure (1)..(392): unsure at all n locations
agcttctagccaaatggacttaccttgaattaattcctttgatagnccctttgagccttgtttccctttccttgttttgaagctcactacaagccttaagtgaaaaaccatgatattaccatatccttaaggaattttggagctttggaattgttttgggaataagtgtggggggtttttgtttcattggacaacttgttttgttggctatgcttcatgatgtatnttgggccatacttgatgtacattgtatattggttaaatgttggacatgctgaatgaaatgttgtttctcaaaggccaaagagtaaaaaaaaaaaaaaaaataaaaaaattctgttaaaaaaaaagaaaaagaaaagaaattaaggtgagtgaataagaacttaaat

SEQ ID NO: 206539 - DNA, 380 bp, Glycine max
  unsure (1)..(380): unsure at all n locations
ctacttcttatggacttgatggggcctatgcaagttgaaagtcttggaggaaagaggtatgcctatgtgggtgtggatgatttctccagatttacctgggtcaactttatcagagagaaatcagacacctttgcaactgtcaagcactttcacatctttggaagtccatgttacantttggcagatagagagcaaaggagaaagatggatcccaagagtgatgcaggaatattcctgggatactctacaaacagcagagcatatagagtattcaattccagaaccagaacagtgatggaatccatcaatgtggttggtgatgatctgtctcagcaagaaagaaggatgtcgaagaagatgtcagaacatctggagacaat

SEQ ID NO: 206540 - DNA, 380 bp, Glycine max
actcagcttctccttatttggctataatagggggaggaatgttgattgttatgggttcaccctttctggcacttcgtattgtctgaaaattgctgacgaaaattattcttcgtgaagaaaatccaagccgaggcgctttcgtaacgtttccgaaacgtttccgtgggttattacgcgaagattgtagaaccgtcttcgacattcatcgatcgttcttcgttttcttcggtcttcaaccggtaagtaccccaaaccgagcttttcaattcattctatgtacctgtggtggtccccatttgtttcatgcacttttattctcgttttcatttactttccgtacccacttttgacgtgcttcagtcatttatttaagtcatttc

SEQ ID NO: 206541 - DNA, 55 bp, Glycine max
gagcttgaaagaagacttggagccttggtcatttctatttctctctctcgccata

SEQ ID NO: 206542 - DNA, 359 bp, Glycine max
  unsure (1)..(359): unsure at all n locations
agctntaaccgatcgtttaagctgttatctctcctaataagtgataaaatgaatttcaaccgatcatttgcgttgtaatctcatttaatcactgttaaaacaaaatctaactgatcgttcacactgtaaccacgattaaaccaaaaaaaggcaaaataataataaaataatgaaaatatcttgaaaaaataataataaaataataaaaatatctttgaataaaataatcaaacaaatcaatcggacgtttttcattggaagtttccttgaatgaattgactaataaccaaagtgaaattaaggctaaaatcaactcacaaatcaagctttgtccgtaaaaaatcactaataaccatttt

SEQ ID NO: 206543 - DNA, 427 bp, Glycine max
  unsure (1)..(427): unsure at all n locations
tgagatgaggaagtgttgaaaggtgaaacttcctgcttttattgttgaccacagagcggtacctggagatatgtcgcggtggtgaggagaccttgtggacgtcaagtggggtgctattgcccaaaaccaagtgtcgcaacctacccttcggcgggaaggcgatgcgtgactcgcgggatgcgtgttccacgaaagggaatactcgcggagtcgccaccaacgcttatttgatgaaaacgttggaaaaaccggaaaagacgtgatctacgaacttttttgtgaaaggctcgggagttgtatttacgcacggcgaaggtattagcaccccacacgttcgttccaagggacgacagcctttaatccaatgtgcanacgtgactttgatttntacgctcccttttatgtgcttatatccattttatatttt

SEQ ID NO: 206544 - DNA, 381 bp, Glycine max
acctgcagcttgcagcttacataagagctatttttgtggtatctagagcatcttcatctacgtgatattcttttgttgtctctatctttttgttcagccaatacactttaaatccttgttcttcatcttattctacatgtatatcctccattgtcttgtggtttggagctgtttaaagtacatcgaaaaaaataaaccgattaaatcttagatctacactcgttcttgcatttctatggttcaaatattatagataaactcttgaatcatgttttcgtgctgaatgtaggttctatcatttttcactcataatcttcttgtgctgaacctttagatctaaattttcttcaaaataatgattataaaaacaacacacaaatc

SEQ ID NO: 206545 - DNA, 274 bp, Glycine max
  unsure (1)..(274): unsure at all n locations
caaacaatgctaccatgcttgaggtatgcctaacttgatgggtctttcttatctgggggaaatagtctatgtgattcatcttttgaaaatgcaccgtgatttcaaaggacattttatttatcactcaagcatatctattaatgtagangtagtactttcacattacagcaanaaaccaaagctactattaggcatgtagccctctagtgtttaacatttaaagtgcctacgcatatatttactacacactaactaggtgcagatcttgcatgtc

SEQ ID NO: 206546 - DNA, 388 bp, Glycine max
  unsure (1)..(388): unsure at all n locations
agctagagatgaggaagtagtgaaaggtgattcttcctgctnttattgttgaccacaaagtggtacctggagatatgtcgcggaggtcaggagaccttggggacgtcaggtggggtgctattgcccaaaaccaagcttgaccaatcccgacccaccccgggcatagtcggtcagtgagaacctgtgatgtacctaaacaggcgagctcctggcagtcaacagataaaaggaacaaagaccacgaagcgaggaggcttgtggtggctggccagctgtgaatnttgtgtgatatgtggattatggcctctggtaatcgattaccaagggtgggtaatcgatacaaggcttaaaaatgaaacaggaggctagatagtctctgtaatcgata

SEQ ID NO: 206547 - DNA, 360 bp, Glycine max
ctatttatcttctctctcatagaagctctttctcactctaagaagtggattcactctttgtcttggatggataagaatgaaggctcctacccttatttatactactccacctccacaatgaatgggggagattacttgtatcctacgggggagattaattctttagaatgctccacacattctaggagtctctacactcttctactctttttcatatccttccataagggtccagaaggttccacacatctctagaatattctaaaggtttccacattctttcacaagcttctagaagagtttagactactctagagttctccaggacgttctagaaaaatttacacttttccaaaaagc

SEQ ID NO: 206548 - DNA, 279 bp, Glycine max
  unsure (1)..(279): unsure at all n locations
gagaacctaacggttnttaattatgtgggccatcaaatctatcatgtgttgacagtaattgattagcccatgaatctcctcgggggccgtacacacttcggccatggcttttgctttggctaatagacgcgggaggtctngacttccattcaaggtcaaggcgaacctatccatccacatagtctggtcttgatgcagtgcatcaatcacccttcctcttgcttctttttcggggtatacttgtgcaaaatcctccactagcttttgttcatgggccat

SEQ ID NO: 206549 - DNA, 263 bp, Glycine max
aaataaatacgtttagaagctctggcaattgattaacagtattgtgtaatcgactacacaagtttagaatactttgaaaccgcttaaatctacaggtcaattatttgaagttgaaatcttaacggtttaaacactggtaatccaatactaccttctggtaatcgactaccagagagtaatactctttggtaatgatgtaatgaatacttctttgctactctatatttagaagaactttttaggacctatcttgatcggtcttc

SEQ ID NO: 206550 - DNA, 352 bp, Glycine max
  unsure (1)..(352): unsure at all n locations
ataaactactgtacttatagccattattttgttttgtattgncacgctttnagtttactatctgcttgtcttttattaataaaactcgcttttattttaaatttccaattgaaattctattgtaagatgtgaatggccattaccgattctgaagcataaaagatctttgtcttgattatgaaaatgccgaatacacgaatattaaaaattgaataggaaaaatttggataggtagaaacaaatatatgattcactggaaggatgcctttgagaggtaatatacaacacatgaattttttatttttcttctttttggtcttatctgaggagattcctttactaaagtagtctc

SEQ ID NO: 206551 - DNA, 352 bp, Glycine max
  unsure (1)..(352): unsure at all n locations
taacacttgtcatgtgtctactatcatagctatcatctctctctccatcattgggggagctacttgagctgccagatgcctccaccttttgggcgtattctttgaaaagattcatgcctccctcttacacatgttctgtagctacattctatccagagctatatcagattgtactgatattgcctaatgaaggcaaccattaagtccttccgggaacagacccgggaaggttccagattattatacccagtaacaactaccccagtaagacttttctggaagaaatgcatcaataatttntcatctttcgcatatgcctccattttcctgcaatacatctttaagtgaattt

SEQ ID NO: 206552 - DNA, 279 bp, Glycine max
  unsure (1)..(279): unsure at all n locations
actaatctcctcctcctggacaaagaacggcacgccggcggcaacgaaaaaatctcccaacacaccttggatgcaacctgtgatcttatacccacatcagcacaacttgacgggaatcaagccatccttcccctgcctagaattataaggagcggtccaaacacactgtcacaaacaattttctccacatgcataacatcaatacaatggctaacgccaagatcacaccagtacggaagaacaaagaanatggacctcttcttccatatgcaactctga

SEQ ID NO: 206553 - DNA, 366 bp, Glycine max
ccttaacactgagctcaacttatcctcaagccagaaagtttctccaaccactcagttggcaaaccctttctccatcctctttcgaaagcttcaattcatcattgtccttcagaggtttgtattcaatacattccgtcaaagcccccttattaagtttctatatgtcttccacttagtgtgaccctcatagaactttgggttatgttcatagttgtgacccttgaagtcaccctttctgtgtcactgaagctttggctgggtcgtctctcacttgaaagtctgcgaagcaacggtgaagcactctatctgtcaactctgtgttaaaggtaacaacccctgtctggcaagtgtgtaaatattcactct

SEQ ID NO: 206554 - DNA, 298 bp, Glycine max
  unsure (1)..(298): unsure at all n locations
ttatactgggtcgggcacaacccgtgcctacgtccagaccccaagcaacccgcttgagatttccactattcttgtaaaatcctttactagccatgaaccacaaagggcttccctcctttgggtncaatgattacaaccacagaagttatttccactttttgcaatgaaccccaacgaacgatggtcctttgtgtccactcgatacaaccaaaaagttatacccacttcttgtaatgaacccaaatgaccgttggtcttttgtgtccagtgatcaaccaaaaagcaaattctgcttctt

SEQ ID NO: 206555 - DNA, 321 bp, Glycine max
  unsure (1)..(321): unsure at all n locations
agcttatgagtcataccatgaaattatgggaaagagtgatcgatcggagattaagaaaggagactcaagttactgagaaatcaattggtttcatgccgggaaggtcgaccatggaagcgatttatttattacggcgggtgatggagcaatatcgcatggcccaacaagacttgcacttgatttttattgacttggagaaagcgtatgatagagtgcctaaagagattntgtggaaagctctatagaagaaaggggttagggttgcatatattccagctatccaagatatgtatgatagggtatcgactagtgttaggacac

SEQ ID NO: 206556 - DNA, 321 bp, Glycine max
acccttggtgagccctttttgtttctaagtccatcttcaaagaactcgaggtacacaaagtttgtccttgacgatcttctttattcctaatttttatctgtctaggaatacgagtatatataaaacccaaggtctgcccttggtacagattcctccaaaacccaaggtccacccttggtacgtactcctgtaaaacccaaggcatcccctaggtccactcactcgcacaactatgacgaccacaatcaaaggtctaagttcaacaacacaaactaccaccaaactatttggcaaggcctttcaatcaggtggaagtcatac

SEQ ID NO: 206557 - DNA, 421 bp, Glycine max
agcttctgtctagatgaacaatatttatctgattgatactataacttaaagaatgttggggcaaattgagagtgatggctccgcaacagtgaagcgatattagagatgaaacctttgaagatgatgatcctaaaaaaaagaagggacaacaaaagaaaaatacaattcttcaaggcatgtgcaaacaattatttggatacaaagaattggtggctttctgttgttctattattttatagtaattttcggcatgtagattgattctctttgtgaatcatctcatatcttttagtaaaaaaaaattatcattcaaggagtaaatctcattatccttaatgaaaagtccttttaaagactaatcacaactcatctcttgctagatgaagactcacatatttttttctttatttcttctatcatc

SEQ ID NO: 206558 - DNA, 394 bp, Glycine max
  unsure (1)..(394): unsure at all n locations
ctaagctttgcatggcacggacttggttctcgaagtcctttattctctctatcccacactcaccgatccttctaacagcaaaggctcttccatcttccagaaccgccttgtaaacaatgctgacgtggctgtttcccaaaatatacgctgaagccttaagcaaagtctcaagctccaaatttgtctccccgtccacggtcacaagagtgccgtgtttcggaagggtcctgttttgtgctgctatgatgtccactgcggtgctgctctcacagtcgctgtcggagcttgttgcttctgaagtttcttcttctttgattggtaagcacgaacaaggaagtgaaggtgtacagntcttgcctctgcatcttgtcttgaaacagtttcttgtttcttt

SEQ ID NO: 206559 - DNA, 393 bp, Glycine max
  unsure (1)..(393): unsure at all n locations
agctnctggaattccagtagatgttatacatatagtaacacctcttatctcctcctctatctcacacgcaaagtccctttttggtgccccaatgtctgaaaaatcaagtgcactcttttcttgaggtgtaacctccataccacctttgttgcaatcatctagaagatccttccctttgttttctttcataccccgtaatgtcatagacaatatgtagctccataacatcttcatcaacatctaatgaatgttctcgcttagtgttttgactactttgacttggctaatcccacatcaacattgaacccatcattttcgacaccaacaaaccttcatccctatacccttcacctttgaacgccactatcatcgaccaacattcattatcctgaa

SEQ ID NO: 206560 - DNA, 358 bp, Glycine max
  unsure (1)..(358): unsure at all n locations
ttcattctcccctgcctttgccgaaaaaaaaatcgccaaggactaacccgcctgaattctttttgtgtctctcttcttccttttcctaaagaacaaagaactaaccgcctgaattcctttgtgtctcccttcttcctttgcaaagaattcaaaatgacatagtctgagaattctgttgattcttccctttccctaatacaaaagtgttcaaaggactaaccgnctgagaattcttttgtatccgcattcacaaagtatcaaaggtttaacagcctgagatctttgtcttaacacattggagggtacatcctttgtggtacaagtagagggtacatctacttgggtttgactgagaaca

SEQ ID NO: 206561 - DNA, 426 bp, Glycine max
  unsure (1)..(426): unsure at all n locations
agctngatgttccatataacagacattccatttatctctctcattttctgttccaaagctgagacaggtaacctttcattgcaatacactttgacaaagctatcggatagttcaactaaagaaggcacttctgggatcatgtcatatgaagaagcacaagtgagcagactgggtgcttgttttcatggtacaggacctgatccaaatagttgactccaacctttgccagataggtctctaagtctatccgataaacgattttgaaagggagaagactgtgtgcaacgcacgttatatggctgaaatacagataacacattagagttactatgccaaaattgtttcattctatgatcacaacacgtaaagagagatattgtccaagcatcatctcacaacactcaattgcttcttaattactaaata

SEQ ID NO: 206562 - DNA, 305 bp, Glycine max
ggacctgattttttagagtgccgagaactacattgagccacagtttctaaaagaatggtgccaaacagtgatccaatggtgtcacagctacgctatgggaccataatattgcttaatagagagccgtcattaataacatatctttctcaacgattatgaatgtaaatgtttacatgcaagtctactcatcttgagagcgcatattcacacccttttgtgacggggaacgttctgcttctgtccatttcgctgaactaatgcaagctcttcccatggtaatgccctactaccacgaactagaaaat

SEQ ID NO: 206563 - DNA, 332 bp, Glycine max
  unsure (1)..(332): unsure at all n locations
agcttctcatggtctagtgtcatagtcatatttagacatgtgcgcggnccaccccattgtgtcactttccatgcatcaatttttttagataaaattgccctcatatgaaaagggcaaggagactctgcgttgttgttggggcaacaaacgatatatttgtgtgatttcgtttcaacaaccttaaaactttgatgcaccttcatcacatattgtttcagtgcattttttatcgcatctttactgtcaaaatccatgccaacatataattcttgtccaacattaaaagtcgttggcatgtccaaaccacaaatagcctcctcgtctggatgact

SEQ ID NO: 206564 - DNA, 474 bp, Glycine max
  unsure (1)..(474): unsure at all n locations
ccttaaaactcaccttgatgactctgatttcacctagcaaagttattttctnttatntatttatttatttatgaatttatttaacttttaacattaattcgcgatttcaaattaactgaaaaatataacattaatctttgtctctgaaaaagattaattacttaaaaattacttcgtactaatatcatgattagaaaaaaaaatttacacatatttattagaagaaatatactacaatgaaggtttttattttgttacaatgtagaatatagttcttcaaatatttttgaaatcatatattaattatacatacattatatatgttgataatattattcatgaatatttacatgtatacttgactgaattatttttatctttattttggttgataaagcgtttgagacatataaaanataatttgacgaattatatatttatttcaacaatttacatatatttattattccttat

SEQ ID NO: 206565 - DNA, 412 bp, Glycine max
  unsure (1)..(412): unsure at all n locations
agcttagcatctgaaattatttttttgttttatcatcatcagcattatttcaaaaggcattagaattaaatttcgaagctaacacagagtgcaaacctggatacacaatgaccaggggttttctggcctcattctgtagagtacgtggaccatttaaccctatcaatagatgaagacttctccaaatacttcttcaccaagcagagatagagacacctcttgcatgatatctgtaattcaaataatccttctcatgaaagcaagtctcacattcataaattaacttaaacacttataccaggtctgggtcttcctttatttctttntcttctcccaattaacacacactgactttggctctctcttaacacaaagtaaacttcacatcggaccaccgctgcttacaacaaaa

SEQ ID NO: 206566 - DNA, 346 bp, Glycine max
  unsure (1)..(346): unsure at all n locations
atgtatacccatttgactccaatatcattttgtcttgaggtctttctacaagatgccaaggttgggttttctctatcattgatagctcctccttcattgtaacaacccaaacttgatatttcttggcttcttcataattttcaggctcacatacaacaatgttacatctgtcatagatatcagagagcagtctagtacctctaacaagaacatcatcaactaactcattctgccagccttcaatttcggaacttggtgcaggaaatttcaagtttagattntcagaggcatgaattatcatctttggatcatcccaactccattcttcatcttctgcaaagcgcac

SEQ ID NO: 206567 - DNA, 432 bp, Glycine max
  unsure (1)..(432): unsure at all n locations
agctagagagcaaagtcgtcaatctatttgattntgcaaatagtttgggaacaagatttcgcacaccctagcttgtgtttgttcgaaattgcaaatcctgaagtatttcacaaataagattgggtctgttgtgtttttcgagtggagtaaactggaggggtgcatttcatttgggcagggatcatttgggcatttaaaaaataattaagaccgttagtaacaatgactgtttaggaggtgtaaaaaaatgcgattttagaaaagtgatgcaagtatgataagcgttaacctctggaaaaatgagtgtagtttgttgtgatttgctcaaaatattgatccatttttcccttccaattactacctaaatcaatatatcatcaattaattctaacaaactgaaacactttaaaaaataaagaacaaaaattaatt

SEQ ID NO: 206568 - DNA, 409 bp, Glycine max
gcttacagtaaaatctgttacttatccatggtagaagtctccacagaggccattgcctccctcgcccagtattatgatcagccgatgaggtgcttcacctttggggacttccagctatcacctatggtagaagaatttgaagagatcctaggatgccctctagggggaaggaaaccctacctcttctcagggttctatccctcattagctagaatttccaagatagtccaaatctcagcgcaggaattagaccataggaagcaagtcgaatatggggtggttggaataccaagaaaatatttggaggcaaaagcaagaatcttggcaggtaaaggcgagtgggccccgttcatatatattctcgcactggtgatctttagaggagtcctctctccgaatgtggatgggt

SEQ ID NO: 206569 - DNA, 447 bp, Glycine max
ttaagtcacctgcggcatgcaagcttcgaagagaggaaagagaccaagcactattatttctttgatcttgaaggaagagttgaggatttgcctaaagtccaagagaagcttgtctcatcaatggtgcaagactgagaccaacatgttagccatcatcagcaagtaccaaaaagaattaaatctagccatggcccacgagcacaaagtggcggacgagtatgcctgagtgtacgtggaaaaggaggctaaaggaagggttattgactcgttacatcaagaggcaacaatgtggatggaccgtattgctcttactttgaacgggagtcaagaacttccctgattgctggtcaaggccaaagcaatggcggatgcctactccgccctcgaggagactaccgacttctcagctattggcagcctatgatagacttaatggcccatataatt

SEQ ID NO: 206570 - DNA, 385 bp, Glycine max
agctttcgacgaaataggcgcacgccttcatatgctatattgatcccaatcaggttgaattctatacttcgggccgcacttccaatgaagctgcctttctttatcagctttttgcccgtgaatacgggagcaataactttcccgactgctccaacatgtgccatgaaccgacaagcgtgggtttggcagcgagtatcggtgtaggtaaagggaccgtgttgctggaagactttgagaagtgcgatttagtcatttgcattgggcataaccctggtacaaaccaccctcgcatgctgacttcgttgcgcgctttagtgaaacggggagcgaaaatgatcgccatcaatcctctacaggaacgtggcctggagcgaattaccgcacc

SEQ ID NO: 206571 - DNA, 398 bp, Glycine max
ctggcattgccagcgcaaaattgccccccatgcagatcaatgctcgagcctgccccgtacatattgcttgcatgctggcaattgcagcatgttcaagtgcatgaggtggggtgaagccatatcgctcacccagacgagccagaaactctgcagacggtttctcggtgataccgacggttcggtcgccctgtacattagagtgtccacgtagtgggcagatactcgcaccaggcttgccaatgttacctttcatcaacagcagattgaccagttgctgtacgttctgggtaccatgttcgtgctgagtgatccccattccgtaacagataatggtgcgttcggcagcggcatatgcgtcagccagttctgcgatttgtgtctgacttagtccagaaata

SEQ ID NO: 206572 - DNA, 362 bp, Glycine max
tatgtgtacccaaacccaatcacctggttcaagcacgactttctttctgcttttgttggcttgccttgcatagctcgcatttttcttttcaatttgaaccttcacttgctcatgcaacttcttcacatactcagctttagcctgtgcatccttatgcttaaacatagcaatgttaggcataggcaacaaatcaagaggagtcaaaggattaaatccatacactatctcaaatggtgaacaattagttgtgctatggacagcccgattataagcaaactcaacatgaggcaaacaggcttcccaagatttaagaattttctttaaaacagtcctaagcagtgtgcctaaagtcctattgacta

SEQ ID NO: 206573 - DNA, 362 bp, Glycine max
ttgaatacctcacccacttcaggggatcacacaattatggcttttctctaatgaaacactcttgccttttaccactctaattccccttgagttcttaggcaattcaagagattatggccacaacaaagaacaattcaccaatatgtgtaaggtaaggctagagaagacaaggaaaaggttaaccaagaaaaaggctaacaatgtttctaggcacacatgaaggaaataaaattcagaatctaggaattcaagtaacaatccttcatgcaaccaatatattaccttatagagatattttttaaagttcttcaagcatgaaccattcagccccatttttttttttttttatttttgattataca

SEQ ID NO: 206574 - DNA, 346 bp, Glycine max
  unsure (1)..(346): unsure at all n locations
actgcggctgcagcttaactnggntacactgtctgagtttcattgttatttccatganattcacgactactccaatcaactaagttggtttacactgataattcacaattgctcatcgggtgtacccataaaactcaatgccacacataatttgtttttatcaattcactacaacaaattatccagatatatcattagcctttcaaaacacccattagttactatttaattcatttgtgatttgtggaaaggacactggtgcagtgaaacagacacatcaatcacataatgaaatagcacacaacgataaaaatgatattttgaatcacagccatgtatgtgtaat

SEQ ID NO: 206575 - DNA, 256 bp, Glycine max
  unsure (1)..(256): unsure at all n locations
gagctctataaggagctctgaaatctgaagcttaattntcaaatgatcaaagttgaaaagaatgcacacacaaggcctctatatatagcctaagtgtcacacaaaattggagggaaacttgaatttctattcgaaattcacttgaatttgaaattgaatttgtgaagccaaaatttcactaattatgattagtgaattttaactatggctcagcccactaattcaagatcaaggccaagactcttcactaagtatg

SEQ ID NO: 206576 - DNA, 353 bp, Glycine max
ctcccctttcttttggagattagactccccctttcttttggagaatatactcccccttcctaatttttctgaaatgtatctcttgatttctaagcctatgtttctccccctctggtaacatcaaaaagccatagtgcggggaaatctaaaacattaaactcaatcaatcattaaacatgaatggttcaatcaaccaatcaatccttatttatcgaatatcaataacatctaagaggcctaattctctcctaatggccaagaatgttttcttaaggagaggttttgtaaagatatcaacaagctgattcttttgataacaaaatctagaacacaatctctcttcagacatgatc

SEQ ID NO: 206577 - DNA, 411 bp, Glycine max
  unsure (1)..(411): unsure at all n locations
agctngctaacccatggaagctcctaatatttctacactnnttggggagggccattcttggatggccttgattttctcagggtccacttggaccccatttctaccaactacaaaacctaagaagactatattatctactcaaaaggtacacttctctatatttgcatagagggtgtttttcctaaggactgaaagaacttgtctaagatgtcctaagtgatcatctaggctcctactgtacactaaattatcatcaaaataaacaactacaaatctaccaatgaaatcccttaagacatgatgcataagcctcataaatgtgcttggtgcattagtgagcccaaaaggcatcattagccattcatacaaaccaaacttggtcttgaaagcggntttccactcatcaccctt

SEQ ID NO: 206578 - DNA, 419 bp, Glycine max
  unsure (1)..(419): unsure at all n locations
tctacttatgtggcagggcgggcttccttcaccttcttgtctcctatgcgaactntgaccattggtcttccttcccgcgatgcttcttttcatgtccgcctgagtgggcttatagcctaaaccatatgtcccacgatttccttgggtatttatcaagctagttatgccgccattcttttttcctaaacccatcccgggttcataaccgttccccaacataactcgggccatcattaccgctgcatcggacagacaaggctgcccaaagagggagtccacggaggaaatgctgaccacctcaaaagactggaaagcagtttctaacgattcttctgcggctttcacataaggcatggaggatgggcaacttaccaagatatctttctctgctgacacgatgaccaagtgcccctccacta

SEQ ID NO: 206579 - DNA, 392 bp, Glycine max
  unsure (1)..(392): unsure at all n locations
agctnttagcagatataaaggttcctttaatgttaattgctataagcaaaattaaatagtataattctacccattggttttaaaaactatagcgcgtcttgcaaaaaaacattaaggtggtgattaaccttgttaaggtattgggtcacttgctcaatggttgaatgagtgagccacttattcaactgcatgacctgatctttgataaaaaaaattaaaattttcatatcatgtcttagataaaagcacaccacaagttactactactataaattcacaaattaatataacattttattattagtaataatatctttatatataaaagcatacaccaggataattatgtctttttcactcattctaagactaaatctcctctctattttatg

SEQ ID NO: 206580 - DNA, 375 bp, Glycine max
  unsure (1)..(375): unsure at all n locations
tgagtcatcatcttctaattcacctacatccagggaatctcaaacagaaaaatnttgagctgaagtcatggctgaagagcaacctcgacgagtgaccctggaagattactcaagtacatctatgccacagttctttactagcattgcgcggccggatgttcaagcacagaatataacctatccacattcattaattcagttgattcagaacaatttgtttcatggtctgccaaatgaagacccgtatgcacatatttagccacttatattgagatttgaaacactatcagactggctggcgtgcttgaggatgctgttagattaagcttggtttcattntccttgtctacaaaggcaaaaagatggttccattca

SEQ ID NO: 206581 - DNA, 444 bp, Glycine max
agcttcgtcctcagatccctcttgttggactaagcccaagttagaagaccctcttaggttaagactaacttaaattgagtttcattcgcagatccctcttgtaagactagactcagctcaagcaactaacgaaagtttagcctaatttggcctaagccttgtccgcaaatctctcttgtaagactaggcctatactaaacaacattattgtaacaacataattaaaaccaaaacttaatccgcaaatccctcttgtaagactaagtttcgatcttgcttatttcaagttctaaggcaacaatacattttccaatgctaaagttacctaactatgcacacaaatggatgatcagaccaaaagcatacaaacattaagcattgaaggaagcatttgacacaaaaaatataatcaattagatattaagtatttacatcagttggtca

SEQ ID NO: 206582 - DNA, 437 bp, Glycine max
agcttgtagaattcaccccaatttcagtgttgtatgctaacttactcccatatatactcaataatgcaatggtaaccataatcccagcaaagattcctcaacctccattttcccaaagatacaactcgaatgcaacatgtgcttatcatggaggtgttccggggcatttcattgagcattgtgtgaccttgaaacataaagtgcagagtctaattgatgcaagttggctaaaatcgaggaggacaactgcttgtgaattctaacgttgtcgagcgatactatgcatggtacttggggaaatttgaaggttgttgttagatgtctccaatgactcattatgaattttaagtttatgccattattgtaaataacaatcacaatgctaataatatggataaaattgatgtccttgcctttcaatctctcacaaatacact

SEQ ID NO: 206583 - DNA, 345 bp, Glycine max
  unsure (1)..(345): unsure at all n locations
ctagtttatctctctctcctctctctcttctattattcggttttaggtttaagctctcttctctttctcttttattttcggtttttacaattccagttcagacttttagttttatcaataaaattttgtcctctatttgattaatggaaggcntaagtccgcagcgttggtttctattgaggattaagcacagntctctttgagggtctattattactggntaaatatgttcnagttttcctcttcactaattactctgaatttggtgctataattcatgcatgcttagtgcttgattaaatggctctgcgcttaaattacattcatgcttaatgatccattatg

SEQ ID NO: 206584 - DNA, 319 bp, Glycine max
  unsure (1)..(319): unsure at all n locations
agcttgacaggttcaggtgcatgttcatgttctgctactaggggaggcccttcaatntgcttgccagacctcaaggtgatggcactcacatttttcggattttgcacagtctgtgaaggcaatttgtcaaaattttggaactgagcttggtttaactgagtagccatttgctccatctaatttgtcagactctgaatggaggctcttgtctcttattgaaattgcatatcttggatggtttattgcctcactaactcttctaaagaagggtgaggaggagcctcacttgcttggtggcctttgtgtgacttctgctact

SEQ ID NO: 206585 - DNA, 364 bp, Glycine max
  unsure (1)..(364): unsure at all n locations
atttttacaagtcaattgtacttccatgaatattgatattgtatcatgcttaattatatgcatttgcttattctgatcattgtgtgttgtgtgattatttcttccatgcaggtacatgattcctatttgttgtgagagtgaaatgatgggcagaagcaccaactgaggggagtttatatttcctttntttttgtctttatctttgntagtttggtatatattttttattttatatgtttgagttttaaatgtgtaaaaaatagaaataaaaaggtctgctgatttcttaagaattccttgctgtttcatggcattccttttgaacctcaaaaggtgctggatgatgccctaattctaccttggt

SEQ ID NO: 206586 - DNA, 379 bp, Glycine max
  unsure (1)..(379): unsure at all n locations
agctagaaggtgcgcagtctaccatctttttatagtagagtaccgataatgtgtctactatcattatgataatctctttctctgtttttgggggtgctacctgagttgccaagtctctccatctttgggcgtattctttgaaagattcgtgccccctttttgcacactntttgtagttgcatcctatccggagccatatcaaaattgtactgacactgcttaaggaaggcaaccattaggtccttctaagaatggactcaagaaggttcctaagttagtataccaggccacagttgtcctagtaagactttctcaggaaaaatgtatcagcagtttctcatcttttgcgtatgcccccatcttccgacagtacatcttt

SEQ ID NO: 206587 - DNA, 347 bp, Glycine max
  unsure (1)..(347): unsure at all n locations
tggactcaaagagaaacttagaatggctctagagtagagttaaaaaactataaaataaagactcaacaaacctctagcttttgcacttgttttcacagtaattntcaattgaaatttctgaactaagaatggtatcacatatggcccaattatagataaattttgagccaaacaacaagcgcacttccctttcacttttttctttctggatactgaattctctgccaacttgagggatatttagtattatttcctgttatccaaatcacatgggtctttttttataacttatttccacatgtctagcatattcagagaaacttgctgctctaaattcgaagtaccaa

SEQ ID NO: 206588 - DNA, 457 bp, Glycine max
  unsure (1)..(457): unsure at all n locations
agctggctganactgatgtaaccttctgagaacttgttgcaacatctctatgactctgagatggttttatttatttattattattattaaaaaaagagaatagaggttattagccctaacaattggtctctgtgctatggatgtggggagaccaaaactacctcaatcagtggaagcgggtgggtttaagtttgagtaaagtggagattttttgagtttaagagattgcaaaacagatatgagccgattttaagcgaggattaagttttttgaaacaggtatttcataaaaaaacatttcaatgtttgaagcattgcaactggaataaactataattacagctgtgaatctgaaatgtgatgtttaggagttctggagtgatggaaggcgggtatgcaaacggccattgtgatactgctgccttttattgtgataggaacctacgatgctcatactg

SEQ ID NO: 206589 - DNA, 331 bp, Glycine max
tattgccttacatcatacgtacacaaccctacggaggcatagccaggtaagaacaatcactaatatccatatataaaatgccaaagtgccccaaatatttgttaggtaacaaacagccctagcctacatggtaagacattcaattagcgtttctaaagcataaatgcaccagacaaatgatgatagagatcaggaaaaagcctggccacctgcgatatagtgattgtagaaagattgcctaacaaaacttctggatcacttccagaatcccaagaaccaactgctaaacaagaccagaaatcgagtgcacactgcaaaacgctctcaataa

SEQ ID NO: 206590 - DNA, 385 bp, Glycine max
  unsure (1)..(385): unsure at all n locations
atctatgtgtgtaagtaaacttgtgaacatgtaactatgcaaaaatttgtacacaatcatttaaaagaccatcaaaataactcttattggaggtccttctaccattccattaatttaccatcttttggcaatccaatttaaaatgaacaaaagagaaggacagctgaagagttgtttccatagcccatctcagggcactaactttagcaacatgagcttcaaagacatatgggagaatgagtgaggctgcagatatggctttctccctagagttgcagaanataactntagcactaacttgattttgtttcaccaaggcatcaatgttaggttagatgaccctttccttcagttnttcccacccttttctttgctgaacaacatt

SEQ ID NO: 206591 - DNA, 454 bp, Glycine max
tgagaagctagagcttagctacacactcccctcttataactaaagtcacctccttgagaagcttccttaagaagattcctaaagaagctagagcttagctacacacacatctctaatagctaagctcacctccttgagatgagaagctagagcttagctacacaccccctataatagctaagctcacccccataacaaaatacatgaaaatacaaaaaattccctactacaaagactactcaaaatacctcaaaatacaaggcaaaaaccctataatactagaatgaccaaaatacaaggcccaaacgaaggaaaaacttattctaatatttacaaagataagcgagctcatacttagcccatgggctcaaaatctaccctaaggatcatgagaaccctagggccttcccttggatctctggcccaatcttcttggagtcttctatccaatgcg

SEQ ID NO: 206592 - DNA, 393 bp, Glycine max
  unsure (1)..(393): unsure at all n locations
tagattgagtttgaattctgatgcttcaaactctattggaaacaaatccatgtttatgaatttagcatccataatggaacgagaggagaaaaggtttatgtaccgtatccattgttcttctgatgagaacaacaaggaagaggaaatggaggagggaatctgtgtttcctgcgcctcggagtgtcattggcttctactcgaagaacccttgcattntttttatggttctgccatttgagggagttatttgaaatttcaatgaaaaagaagaattttgggatttgtgggacttgatttggacaagatatggcatacatatgaattgggaacgatgcanattcagttaaaactcttgaaatcaaatttatcactggtaatcgattacaagaaact

SEQ ID NO: 206593 - DNA, 430 bp, Glycine max
cattgctccaatgctgcaagaagacttgatctgttggtgatctgtataagaacatagaccacagactcttgcaacacgtgtagatttctgattcatggcaagctgggttactaggttgaccaacgcatcaagttttccttcaagctctctattttcagtaagtgaagaagaatccgcggccacctcatggattcctctaacgacaataacatcatttcttgcactgaattgttgggagttggaagccatcttctcaatcaaattcctagcctcagcaggggtcatatcaccaagagctccaccactagcagcatcaatcatactcctctccatgttgctaagtccctcatagaaatattgaaaaagaagtgctcacaaatctggtggtgtcttgaaactttcccaatactcatacaaggcttctccacta

SEQ ID NO: 206594 - DNA, 364 bp, Glycine max
  unsure (1)..(364): unsure at all n locations
gctttaaggatnntcatatctcttatgtgtggtgtatgatntgcaacatacactcaatgaaatcacctatatgagtatcaagcgaagccacttgcatgagatccaagagagatctttatagcactcacgaatattgggcacgcatatggcctagtagcataacacaacaacaacgacacaaattgtgggggatattatgagtggtaaccactatcacaagccaagtgtttaggtttaatagcttgctatacttactacattgtgtgtcatgtcttaccgatctaagtttagttcaatagcttgctacaccaccttcgatgtattatattccatgtgaaccctcgaactcttttcttctattctt

SEQ ID NO: 206595 - DNA, 344 bp, Glycine max
  unsure (1)..(344): unsure at all n locations
tattttatggagaatttattctattcagagtttattctatctagattttatttcggccagattatatttcatcccatcttatcttaacttatccagattntatttcatttaagggcttggacttaaaatagatttgtatgctttggggctgaggacttatataacaacaccaatgttttagtttagggagttctttttgttgtccggagaggagaataatcctaggattttagaatttcagcttttattactgggtatgcacactgttcacgtaaaataaaattcattttctacacatcatctctaatccatacactctttaatattatgctctttntattttc

SEQ ID NO: 206596 - DNA, 468 bp, Glycine max
  unsure (1)..(468): unsure at all n locations
agctntaataaaaatggttgatatttntgttactcttagtccaaattagtgacagacttttcattttactaaaggtccttaaacttgttttatttgtaacttttgctagaaaacttcgatttaagtgaaatttaagctaactttatgttttaacatgcaaataactcattnttagcataaaaaactcgaggaaaataactcagcacacaaattcaagacatgaaaacaagctcaaaaatttcaatgcaacatgttcaaggaagttcaacaacaagcacatggttcaagagttggagattgagatccccccttacctcttgatgaactcatgaaattttgaaggagaatgaagaatattcaattttttcaaagtttcccttcataagtaaaacaaaatgactgttctcaagtattagagaaactataacaagagaatgaagaggaatcaagtctaggatgaagaatgga

SEQ ID NO: 206597 - DNA, 427 bp, Glycine max
  unsure (1)..(427): unsure at all n locations
ctaaccttgatgcacattnggagaggttaatgaaacaactatangttttctctccatgagagggtggatcaaatggagaatagagatcataatgaccaaaaaagaacgagaagagggaatgatggtgttcctagacaaaaccgaattgatggtattaaactcaacaattcctccatttaaaggaaagaatgatccagagtcctacttggagtgggagatgaaaatagagcatgttttctcatgcaacaactatgatgaggaccaaaaggtgaagcttgccaccacggagttttccaactatgctcttgtgtggtggaacaagctacaaaaggagagagcaagatatgaagagccaatggttgatacatggacagagatgaaaaagatcatgaggaagcgatatgtgccggctagttactcaagggac

SEQ ID NO: 206598 - DNA, 404 bp, Glycine max
  unsure (1)..(404): unsure at all n locations
agctntanaagagatgagtaagagttttatatatngttgaatcggaattttcgttgtctttaattcttacctgcgattctgatcctttntaatctcccgcaatcctttntgccaaagaagttcggttctgtttttatcaatttggttcggtttgattgttttttttacactcctggaggacaattaatatccacatctctcagaggaatataataaactcttaattcttttgtttgataaataatattttttaatgtatctaaagacttgtatttgatgtttcacatgcttcatgcccaaggttggccaatatcattcgagtcatctcagtgaattgaagaaaataaataaggaaataacttgaacttttcttggcttctataaacccaaatagtccacacatt

SEQ ID NO: 206599 - DNA, 364 bp, Glycine max
  unsure (1)..(364): unsure at all n locations
acatcctttcttctcctttaagagcttctgcacaaccatgttgaatcaagattgcttccatcttgattctccataacctgaagtcattttcccctgaaaacttctcaatatcgtactntgttgttcccatctttcttgatcttgattcttgttcccacagacggcgccacttgttggttctttgtatgagttctgcaactcttaaacctgcntaagatcaaaaaagaaaacaganaacacagcaagccatcacagcagagcaagaacccaaagatttacgtggttcggcaatgtgcctacatccacgagaaagtgcaattccttatcagcacattgatcatganattaccaagttcatacaagc

SEQ ID NO: 206600 - DNA, 469 bp, Glycine max
agcttggggctatgctggactagatttggtattattttcccgttctgagacatcttatgttcctttttctctctgtaccaaaccctagaaatttgggaattagaaggtatagagagagcaacgcattgcaggaaccaggagaaggttgaggttgagtcgatcagactcaacttcttcccaaagaaaatcctttgctaaaatgacaaaataaacctcctaactaatccctaggcataaataaatatagccttctagtgagagaatcatctcatataattacttcaaattttctttttaattggttcgttcaaaatttcaatttgatctaatttaaaatggtttaaattatattaactttctatttcagtcttattctttattgggtaaaggcttaaataaattataaattataaaacataccatgaagatgctaatatatcatctattaattcatttataaagtaatagt

SEQ ID NO: 206601 - DNA, 449 bp, Glycine max
  unsure (1)..(449): unsure at all n locations
agcttgatctcatagtatcaaacaatcaanaacatgatatcatacacattaaaattaattaaattataataataatctatcaaaatccgatcaattattctcactaaataatcataatccaactcaatctatcttataattattagcatcaataaatcttataaataatgattatcatacttgcaaaatatatgtaaattagtatacataaattattagatataatacaatcataaaatttagaatgttactaaccccaaattctttgtccaaaattccaaagaaaatcctttaaaaatattccatgtatgggtttgaaagaaaataagtattttactcactttctaattaaagaccactttaagcctctagacattcttgcagtgtatcctaagtcacaactgatcgagggcgtacccgaatcaaataaacattaaaatacagtaact

SEQ ID NO: 206602 - DNA, 334 bp, Glycine max
  unsure (1)..(334): unsure at all n locations
actcagcttgaggattcaccccanattccggtgtcatatgctaacttgctcctatatctacttgataatgcaatggtagccataacccctgctaggttccctcaaacccccatttttctgaggatatgactcgaacgcaacatgtgcatatcgtggaggggccctggggcattccattgagcactgtatgaccctcaagcgtaaggtgcaaggtctaattgatgcgggctggctgaaatttgaggagaatcgcgtgtaaatcctgacattgacaagagatgccacacatggngcaattttgaaaagttgtggtagatgtctctaatgactcatc

SEQ ID NO: 206603 - DNA, 448 bp, Glycine max
  unsure (1)..(448): unsure at all n locations
agcttcttccanactttatctcgaacaaatttaaatatttgagtttttgatctcccaaccatggttggaagacccaaatatttgccatgactctttactggctntactctaagaagcatagtcagcccatcaactctggaactatgcacatttcagctacaagagagctcagattgtccattttaattttcagacaaaagttgtctcatatctctttaggatagttcctagagacatggtttcctcctttgtttctttagtaaaaataatgttatcatttgcaaagaaaagatgagcaataatagttgtagatggccaattttcaaatcatgtaaacaaccttgggccatagctttgtcaatcattgtagataaaaccttagcaaataaaataaaaaggtaaggagaataaatggtctcttgtctaaagcctgtatgtggaaaaaaat

SEQ ID NO: 206604 - DNA, 317 bp, Glycine max
  unsure (1)..(317): unsure at all n locations
agcttggacaggagagataccaagtgtgtctcacctcacagagnttggatctatttgttatagacatgtacctgaccaactgagaactaagcttgatgataaaggagaaatgatgatattgattggatatcactcaactggaggttataaattgttgaatccaatgaacaacaagatagtgataagcagggatgtagtggcggatgaaagcaaggattgggagtggaatgtcacaccagagatagaaaaataaaatcaagttgaattgcaacttgaagacagtgactctgtgactgtgcaggaaaatgaaattggag

SEQ ID NO: 206605 - DNA, 337 bp, Glycine max
taaactcaaaacaaagggggagaatatggtgaattaagttaatgatctactagaaaaaagaatgtgtatgtgtttcttgattttagggttgccataatcaaaaagggggagattatagaagcaagcttcatgatgatgattcaagtatgaatcaagtagttttgatgatgacaaaaagcccaaaagaatgatttccagattgagtcaacaagttcaagatcaagattaatttcaagattcattagaagaaaccaagaagattcaagattcaagagaagttgattctaagatgcaagaaaagatgacatcaagattcaagagaagaaatcaagaagac

SEQ ID NO: 206606 - DNA, 366 bp, Glycine max
  unsure (1)..(366): unsure at all n locations
cagagaagaagatcctaatctaaatgactgattcccaaaaacacaatcaaaaccaatgtaaaaactaaaaagcaatgtcatagataccaactggtaagggaataaggactgaattttactcaaaagaaatagaacggaaattacaaattacacaggaaagtcaataaaccagttaatacataggtttcccccaagatgtttgagagcctggtctctcccttcctgaaaacccactaaaaactgcctaacccccctgctgttacgtcataatttattctgcaataactgcttaaggcagttacatatggtcctaaaaacacacacataatttattntgcaataactgggtaagggcagtacatacac

SEQ ID NO: 206607 - DNA, 410 bp, Glycine max
  unsure (1)..(410): unsure at all n locations
agcttatgctgtaaacatctacaatagaccttttctttctcagtagcaaaatcagccacaacagaacaattatgacctcttcagcaataggtacaatccccggtggaggaaccatcccaaccttagatggtcgagtccttcacaacagcagcagcaacaacaacaacaaccttatttttagaatgttgctggcccaagcagaccatacgttcctccactaatccagcagaacaacaacagctgcagccgcaagagccccataaacaacaaacaattgaggcccctccgcaaccttcccttgaagaacttgtgaggcaaatgactatgcaaaacatgcagcttcaacaagagactagagcattcattcagagcttaactaatcagatgggacaantggctacatagttaaa

SEQ ID NO: 206608 - DNA, 460 bp, Glycine max
  unsure (1)..(460): unsure at all n locations
agctttgatgcantcagatttgttataatctttatttttgtaaccagaattgcttaaacaaattaaaatatgatcctttaatactataaacatgacagaaaaaaggtgaaaaaaaaataaaaaataacaatgtacttgaaactaatccatcaagaagtttcaacatggatagttccaacatttagagtctcaatgttaatagtatttaaagtcaaaccaaataattctaagaattttgatatgttcggttcgattcggttttgatcagatatataaatctaaactcatgacctaaaccatacataaacgattttaatcaatntaattcaattttgaccaaatatataaatgacataactcacacggtttagaagaattgaatcaatttgaattcacacatgatcacctatagggatgagaaaagtattaggggtctatgattgcaaattatttacttaaa

SEQ ID NO: 206609 - DNA, 360 bp, Glycine max
ttttctcaaaagaaagctttctcaagggaaagttttctaaaagaaagcttcttcaagaagctacctaatctataaatagaagcatgtgtaacactttgtgtaactttgatgaatgagagtcttgtgagacacaactcaaagttcaacttctctccctttttcttccttcaatttcgtgctcccccctctctctttctctccctctttcttttcctccattgaagcatcctctccaagcttcttatccaaggctcatcttggtggtgaagctccttcttccatggcgccgcctcttacctcttctcctttgtcttccgctgcatcttcatggtggaagatcaccattaaaggacctcattg

SEQ ID NO: 206610 - DNA, 462 bp, Glycine max
  unsure (1)..(462): unsure at all n locations
ctgcagcttcatcagtggtatcagagccatttcttttatttgtgctccttaaacctncattaaatgttttttctttaccttctctctcattgatggttcttcatttttctccatgtatctcctcacatgtcttggtctaaatgttgttaacatgattctttatagtgtccaccgattaaacttgctatagaaactagattcgattttctatggctcacaattcttgtttttgttcttgaaccatgaattgtgttgagtttaagtccctttgagttttgtcttgttattttttgtggctgaaacctaaaccattaaattcttacaaaaatattaaagtagaagaaaacctcataaatctagagtgacttgttcacctattgtagtttcttcatagaagtcatgtctagtcatgaaatttgcacataagattcttatgttggctgaatttattttcttgttctt

SEQ ID NO: 206611 - DNA, 340 bp, Glycine max
tccgcgaaatttgttccgggcatactcttccttgcgagccctcttggtctcttgttcaagggctcttgcggtaattgcattctcttcccgtaacccggcacactccttccgaacgtgtgtagcagccaacttgaacttctccttggcgagttgtgcctttcctaactcgcttttgagagcttggacttcttcgtcctcttgcggtgcttcaaaattctcttcgctgacgacttttaacttggcgagccaatctaaacctcgtatgcgaacattcagccattcgtggtacccaccaatgatgccattacgaatgcctcttagctcttgatcttttcttaac

SEQ ID NO: 206612 - DNA, 289 bp, Glycine max
agcttctacaataagagatggccaaaaggatcaatgttgtgctactcatctaaagaaaagaaggagaaaactataaggagctgaattggagcacgttcaagattgtcgaacaacatgcctgggcttaacccatgctgtcaagcctaatgcgagtgggctagcttatcactcaccttccgcatgaatttacgagagctagatgtaaatacgccttattagaggcttaattatcctcttaagcctagttctatgaatactcacaaactcttaattgtagaaacctttgaca

SEQ ID NO: 206613 - DNA, 430 bp, Glycine max
  unsure (1)..(430): unsure at all n locations
tgccatgacctgcctcgcactttctctgtgattctcttctctagctagnccctgatctgctgggtcagctgctataattcgtcacgaggcaaggaggaaacgctgcgggacgtctgtggagtcgatccacaggtttgcttgatggtggcaccggctccaacaacacggacacgttcagggtgctctggacgtccattagcagcagcgagaacatcctgacgtccatgatggacgaacgatccctgtgtggcctgctcctcaaacgaatcctgcactgaaaacacacagtggtacatggcattctcacaatattgaaacataattgtaatggttaggtgaaaatgacttccaatcttctcagcgattttctttgcgggctcagtcgtcatctcccctgtcttcttcgtgcgggccatcttccacttcacgt

SEQ ID NO: 206614 - DNA, 392 bp, Glycine max
agctttctatgctgccagttaacattgtattagctctaccttagtttgttgctcttcttattaagttcttaatcagtgcggtggcattgtccgaaggttcttatcaaattattgggtcattttgtccacttggctaaccatataaaggtatcaataagaattgtaatgtggggtttcattttgttgtggcagttgattgtgctttacgtggttttcaagcttgacgagagttacacgccgagcaaagtttccatccttgccggtgatggttttcacaacttgaaggtaaatttttattttattggtttgggtttgattgggatgattatgcttaattatttggtgttgactttgggaacatttttaggagattaagaccgtggaactcgtga

SEQ ID NO: 206615 - DNA, 459 bp, Glycine max
  unsure (1)..(459): unsure at all n locations
tttcttatacatcattaanatcatgccaatacagggtaattattttatagaatggtgcatcaaatatcaagttttttaaaaaggtttaaattaatcattatgttgtagaataaatacctatttgcgtaattatttaataattaatctaaaaaatgtgcattgaatatagaactactttttatttaatattntaataatgattttattacataaatttaataattatgtaatattgaaaagtaattaaactcatttaaaattatacaaatatttatatcatacgcatttaatatatcttttgtacaattaatacacaattactatacaactcagatgttcaataagtttaactatataatataaaacaatatttaaaaaactgaaataaattaaaaatatttattctatataatattgaaaaaatttaaaataagactattaagcctacctacaactaca

SEQ ID NO: 206616 - DNA, 444 bp, Glycine max
  unsure (1)..(444): unsure at all n locations
agcttgatcataaatggtaccatcttaatgttcttgaattacaagacaacaaactaaaaaatataaggtgttgctacgtgtaccagcggaattattggtacacccaacaatttcacatttttccaattttctccttttaggttattagcatagtgctctaaccaattgagctaatgaaccaattatattataaaataaataatgttgttatacataatgtatatttaatgcgcatgtaaatttaaataataaattttgtgataattaatttttatataactcatatgaattatttaatccgcatatttttttttataaaaaatatttactattaaaaaatttaatgtatattaaattttgtaatagtaatttattctaatgcacaaataagtaatttaacatattaataattaanaaaataaaactttaagaaattaaaaaaaa

SEQ ID NO: 206617 - DNA, 458 bp, Glycine max
  unsure (1)..(458): unsure at all n locations
ggtactagtcatatatatgttacataacaacgaaagcaatattgtatcgattatggcagatacagaaatacttaaacaaacctgcaattatgagttntgcagctttttgcaaattccgcccatgtttcttgatcaaggccatacttgactgtaggatcagatatttgctgaccttcattgtcagcaaagacaaattttgaagtcaatgaagacttaaattgcctccatcttgctgcaactgttgacatcacctttttttttgcattttcaccttcagggatatcaaatttgcgctgcacaacaaaaggagttatgtaacagcatgtaaatgaatcctttaaaagtaacttaacaacacaatcatgaatacaagtgtatttagaattacttaccaaaatatctttccatattaagctctntagatcgacggggacaacattccaattcgcgtgtacaat

SEQ ID NO: 206618 - DNA, 416 bp, Glycine max
agcttaagaataatgacatcatcttattatttatttcccgaagggaattctataaataggcctcctatttttaatggcgtgggttaccattattggaaaacccgcatgcaaatttttatagaggtaatagatctgaatatctgggaagcaatagaaattgggccctacattcccactatggtggcaggaaatacaaccatataaaaacctacggaagaatctagtgaggaagaaaagagattagttcattacaatttaaaagccaaaaatataattacatctgctttaggaatggatgagtactctagggtatcaaattgtaaaagtgcaaaagatatgtgggataccctacaattaacacatgaagggtcaacagatgtaaaaagatctaggataaatacattgactcgtgaata

SEQ ID NO: 206619 - DNA, 400 bp, Glycine max
  unsure (1)..(400): unsure at all n locations
gagacatgagaaactcgagaaatggattcgaagacttgaaatgactggttttgaaaaggtacctttgagctacaatgggaggttagaagcaaagaatctgttgcagagatatagtaataaatacaaatttcgagaagagaatgattggttacttgtctgctggagtgacaganccattgtttctgtatcagcttggagttttaggagatgaatgttcatatatgtgctggaatatgaagaatcccttgcattgccatggatttcaagaagttgaaaatgaagtaatcaacaagacaagacgatggatcgattcttattttcatctttctttcttttctagggggtaactcgttttaaattctatgtataaggggtctatgttttgttctcttaacagctg

SEQ ID NO: 206620 - DNA, 431 bp, Glycine max
agcttattacaagcctgtgagacaacctcttttattgctgaatccaataatgaaagaagaagtaaggaatgaagtgttcaagttgctagaagaagggcttatctacccaatctcagacagttcatgggttagtcctgttcaagttgttcccaaaaagggaggtatgacagtgataaagaatgataaagatgagctaattcctacaagaacagtcactgggtggaggatgtgtattgattacagaaagctgaatgaagccaccaggaaagaccattacccgcttcccttcatggaccaaatgcttgagagacttgcagggcaatctttctactgtttcttagatggatattcgggctacaatcaaattgtagtgaatcctcaagaccaagaaaagacagctttcacatgcccctttggtgtatttgcttatc

SEQ ID NO: 206621 - DNA, 371 bp, Glycine max
tcaggctgctcagttgcttcagattgttgcacagaatggttaaggtctgtgtggtggtcggcagaggagcataaaccacaaagtctggtgacaagtgcagaatttttattcatggccagttgggttaccaggttaaccaaggcatctagtttaccttcaagcttcttagtctcacctgatgaagatgaattcgtggctacttcatgcactcctctaatgacaataacatcatttttggcactgaattgataggagttggaagccatcttctcaattaaatttatggcttctgcaggggtcatgtcttcaagggctccaccactggcaacatctatcatacttctctttatgttgctgaagccctcataaaa

SEQ ID NO: 206622 - DNA, 407 bp, Glycine max
agcttccgatgttcaattttgagcgtctcatttagtgatgagcctgaatcggacctccgtgtgaaaagttatgaccatttgaatttcttcgagatcttccgttgctcaattttaagtgtctccatatgtgatgtgcctgaatcggacctccgtgtgagaagttatgaccatttgaatttctcgagagatttcgttgttcaatttcgaacgtctcgatatatgatgcgcctgaatcggaattccgagtgaaaatttatgatcatttaaatttctcgagagcttccgttgttctatttcgagcgtctcgatatattatgcgcctgaattgaacatctaagtgaaaagttatgaccatttcaatttctcgagagcttctgttgttcaatttcgagcgtctcgatatatta

SEQ ID NO: 206623 - DNA, 409 bp, Glycine max
  unsure (1)..(409): unsure at all n locations
tttattcaaaaaattagagtttatctcttttatcttattgagagtgaatctcctaaattcttgagtgattcaagaacaccctggctgtatcaaaggactttcacaacctttgtgtgttgccctcgctggaaagagagattcttttcttcctttcatcttcaccctcgttctttcaaaccacaattccagaaaattcacctctgcccagaattatctcgtggccataactcccattttacgcactcaaattaagtgattcttgagcctaaatngaatatcaaaacgagacctttcacctcgctttggaatcacctcattnggagtcctgtagcttcagttattgccatttctatatttctgtccagccatcactatacctnacatttaccatcccattcatttcatttat

SEQ ID NO: 206624 - DNA, 282 bp, Glycine max
tcacatgctttgaatgtgggaagcaaggccacatcacacttgaatgtgctatctacctcagaaaacaactcgttgaaaagaaaggaaaatacgatgaaaaatataaaaaggcctacataacttgggaagacaatgcatccataacctctaactcttctagtgaagaagatattgcaaatgtatgctcgatggaacatttaatggatgactcctcaaccatttaagaaactgaaggaaattctaaattcgaagaagttttgaaagcattaatgaaatgcatga

SEQ ID NO: 206625 - DNA, 400 bp, Glycine max
  unsure (1)..(400): unsure at all n locations
tgggttcaaacccctccactgacatttctaaccaaactaacaaaataacatttgtcggaaaaaaaaacccagcttgtcccgacaactttattggggccctaggggtatcatttggccccatgtcagtcccagagaatcttggtcctgccactatacantttaatctccttttaaaaaagatttatttgaagaaagcttagtaatctttagcttgagggatagtattagaatatattaagatataatatcctaaattattctttaggattagttttcctatgtcccattatctcttaagaatggagaccatatttctttatctcatgaattgtttccctaattgattangaaaatgattagtataaataagtgttatatacacatgaatacaaatacattc

SEQ ID NO: 206626 - DNA, 355 bp, Glycine max
  unsure (1)..(355): unsure at all n locations
atgcgtagatcaatttgctctgaatgaatattcagtatttaaaagataaagaacatggattaggtacatggttgaaaatgttagttggtttgatagattgattgtgaaaataatcactagccacaacccggtgagtgtgtgatcattaattatgagagaacgactaacattgagtaccgatgtttgcatgaatctctattattgaacaaatgcatgagtttgaagatgatgaacgccatgcatgacttaaatagctacttagccaataagcttgccttgtgcatgaatgaattatcccttgcacccatgttgagctgaaaattngattgattgacttgaaccccgagcctataaa

SEQ ID NO: 206627 - DNA, 368 bp, Glycine max
  unsure (1)..(368): unsure at all n locations
aacctgtgacatcctaaacaggcgagctcctggcagtcaaccaataaaaagaacaaagaccatatagcaaagaggcttgtgtggtggctggccagctatggatctagagtgatatctggaatatggcctctggtaattgattaccaagggtgtgtaatcgattacaaggcttaaaaatgaagacaggaagttaagatggtctctggtaatcgatttccaagggggtgtaatcgattaccaggcctaanaatggggacaggaagttgagatggcctctggtaatcgaataccaaggggtgtaatcgattacaacgcttagacatggagacaatatgttgaggaaggctttggtaatcgactaccaatac

SEQ ID NO: 206628 - DNA, 334 bp, Glycine max
tatatgcgaacaaccaccaggtttgaatattggataagccaaatcatgtctataaattgaaaaaggttatatgggcttgaacaagccccttgggcttagtatgagcggctaaataagttccttttagaaaaaggacttctctagaggaaaagaggatactactctttttataaagagaaaaccacataatattttattagttcaaatttatgtagatgatattatttttggatccactaatgaattattgtgcaaggaattctcccatgacatgcaaagtgagtttgaaatgtcaatgatgggagaacataatttctttcttgatatgcaaata

SEQ ID NO: 206629 - DNA, 372 bp, Glycine max
  unsure (1)..(372): unsure at all n locations
tctaagtcacctgcggcatgcaagctngaagacaagactatacgaggtatctttcttgtttatagcaatatctctaagggctaccgtgtctacaacttgcaaactaaaaaactcgtcatcagtcgagatgttgtagttgatgagtgcgcttcttggaattgggatgaagaaaaagtggagaagaacgttcttatacccgctcaactacctcaagaagaagctgatgaagaagacccaggtgaaccaccttcacctccaccacaagaacaagatcaagaactatcatcactagagtctactccaagacgagtaagatctttggtggacatatatgaaacttgtaactcggccatacttgaacctggaagcttt

SEQ ID NO: 206630 - DNA, 319 bp, Glycine max
ttcattagggttaggacccttaaaaaaatgtttatctttagtgcctatcaaaccgtgacacgtggcaatcaaagctactgcctaacggtcaacatccaattgtgacgtcgggggaccaacattgcaattttttatataataaaggaccccattcgtgaattaaattatcgggggactaaatgcaaaattggacctaaagtaggggaccaaaagtgcacatttgccttttatttatatacccaaaggaaataggtactactagttggtgcatatttaatggtcaaataatgctaagagttttactagcagcctatcatgt

SEQ ID NO: 206631 - DNA, 95 bp, Glycine max
ccttttttacttttattggttaaaacgaaccatttaaaagtttaaaatcaacacccgcagaactttctcgcttttcagagaactacgtaggtctg

SEQ ID NO: 206632 - DNA, 410 bp, Glycine max
  unsure (1)..(410): unsure at all n locations
gacctctaagccacctgcggcatgcagctttaggacttaacacctatctgtattttgttttggctgnagaggcttaatacaggttttaatacatgctttacacatatacatgtatatataacaagtagtaacaatgtgctgtacctggacttgatataatgaaacatcttccacaacaacaccaatggacaaaccaagttcaactacaacaaactaattcagcttcacctggagttgatataatgagtaatggcattagaagaactcaaggccaaaccaagttcaagtacaacaaactaattcagctttttctcaaccaaagtatgccaaactacttgttggctattaaaagtgttagttattcatgtgaaaggcaaagagagttgtaagacgataattcttgtttctat

SEQ ID NO: 206633 - DNA, 462 bp, Glycine max
aaaaaccagctcttgacctcttatgcaaatagaagaatttatttttcttttctatcacattctttgcccgaaaaagtagcatgttgatgaaatgccaatcttgaaagatatccattgtcttacttaattccacattgttaccaatattgtacttattaaccgttgagaaatcatcttcctgtatgatattattgctcttgttatcatttcgtgcaactctaatgaaaataattcaaacataagatatttttttaaaaaatgaaggattttgtaagttgtaaaattttattggaagaagtaaagtttttaaaaaataatgttgttgaaatttgatgttttggttgattagctctgattgaaaaactgtttacaataatttaatcaatttaaatcatatagtgacacacagtcaccagacttgatgtcactaaaatgattgtttacctattctctttatgttta

SEQ ID NO: 206634 - DNA, 307 bp, Glycine max
accacagagtggtactctggagatatgtcgtggggagcacgacaccttgcggacgtcaagtggggtgctattgcccaaaaccaagcttgaccaatcccgacccaccccgggcatagtcggtcagtgagaacctgtgatgtacctaaacaggcgagctcctggttttaacatataaaaggaacaaagaccacacagcaaggaggcttgtggtggctggccagctgtgaaacttgattgatgtgtgagctatggcctctggtaatcgattaccaaaggtgggcaatctgatacaaggcttaaaaatgaa

SEQ ID NO: 206635 - DNA, 395 bp, Glycine max
  unsure (1)..(395): unsure at all n locations
cattacactacagatgctcttgtatggcgtccaatatttgtcgtctcccgttcaaacaatttatacaaggacaaaaaaaattttgttcccaactggttgacttctttcgaaagcaaattgtgagagctcttcgaaaccttcctcatatgcaaggctcatgcaactttcattcatccaacttcgatccatctaaataataactctgtgatactcgcaaaattatttgatgcatgaaaatctcactttttcattataggtgtggccctatcccattcacgaagacattttttatggtagcttcatacgtcaaggttaagtctatcttgttatatttgacaataattccgcaacatttcgcattgatcntcaagtacacaacatgaaatgggtgagat

SEQ ID NO: 206636 - DNA, 368 bp, Glycine max
  unsure (1)..(368): unsure at all n locations
agcttagatagacacattgaacacttgtntttttcctctactagataataaaaatagttacatcaagtactcattaaaaattctcaacaaaggagtttatccctccattacaagggagcagctttcacaaataagagaagggtttcaaagaaaataccacattacaaagcagcggggatgtctcgtccacctttaagaacctagaaaataactctaaaacctagaatcttcctaaaagttaggacctttgcttccttgctcaacttttcctctgttctctgcatacaattcgcaatcaattcagacctctttcacgtccgcacgctctctttttttctgtgaaaatcatgcttataaaaggcttttta

SEQ ID NO: 206637 - DNA, 447 bp, Glycine max
ttaaaactcagctaccattaatgacatctggagggaagaagattctctgttggtgtactcaacggctgcatctgacttcccaagagccttttcaccattaacatatcacctagcatagcttccttctcaagctcttcttacactgcttcttccctaatttcacattcactggtgatttctctatctgccttcatgatccatggcctcctagttggacagtccagaagcaatatgacctctgcctaagcatttgaagcactttatgtttttggtaccactgtctgatgataacgccaaattatgcttggtccagcactgggcgctgctgacttttcatgtggagactatttgatggactagacaatttgcctcctcctttctgacttgctggccaattctggttgaagtgtggatgaatcctcctgcttgctttcctcttcaactgtg

SEQ ID NO: 206638 - DNA, 414 bp, Glycine max
  unsure (1)..(414): unsure at all n locations
agctagtagaatatggtgtacccatcacatgttgtactaggaggcggacgggcgatggtgcaaaaccattctccacgtccacaaatcacgtataacccaccatcccctgttgcccacctccaactgagctcacgtactcccacgtagcccttatcctcgttcctctcaacgtcgggttctcatcaatcctcccaagaattcacaacatccaactaattcaacatttaatcatcacaaactaacacagccaagaaaacagggcaaaggcagaaaactctgcccaaaacacaaaccaacatcacagcttnttacattcaattaccccagtaacattctcttttgttcagttcggtaaccggtggatcgaatcgaaaaatttacttggaggctctagtacataaatctacattttga

SEQ ID NO: 206639 - DNA, 376 bp, Glycine max
actcagctgaaggaaacttgtgccttggcaaccttgaacccatcttgtcatgaataaaaaatctacagctgttgcaagagtctgtggtctatgttcttctgcggatcaccattcagatctttgtccttctttgcagcaatctggtgtcaatgagcaacatgaagcttatgctgcaaacatttataatagacctccatagcagcaaaaccaacaacatcaaaataattatgacctttcaagcaacagatacaatccaggttggaggaatcatccaaatctgagatggacgagccctccacaacaacaacagtctatccatccttttcagaatgttgctggtccaagcaagccatatgttccttccttcatacagcaa

SEQ ID NO: 206640 - DNA, 371 bp, Glycine max
  unsure (1)..(371): unsure at all n locations
agcttatctctctcattcttgatcactgcgatgcctgncntcttaggaaccacttggactagactcacccactgactgtcagaaatggggtaaatgattcctgcttgcaagagcctggtcacctccttnttcaccacatctagaatgatggggttgagtcgccgttgtgactgcctcactggcttagctccatcctctaaaagtgtcctatgcatgcaggtagatgggctaataccatgaattcctgctaaagtccatccaatggctttcttatgcttcttgagcactagcaacaacttctcctcttgctcagcagcaagggaagcaaagatgatcattgganattttccttgtcctctcaagtatcatac

SEQ ID NO: 206641 - DNA, 382 bp, Glycine max
actcagctgctgaaatttcagacatatttgaccatttttatttcttatacagataaatcgagaatgaaatggactcatattaaactgcaaaactagattattgaacttatttttttttaaaaaaaaaggaaaatcaatgatattataaataagggccccaaaatgtgaccaagagacaaaaccgagcaagagaacaaaacacaaaaagtgataacactaacctttgtgccaaaagggccgacgggatggtttatttgaagaatatcccttccctgaacaaaaagaaaaaaattatcaacatactaacattgaaaaaatcacgatatatatgcacaattaatctaggtttaattctgataatttatataattctttattataa

SEQ ID NO: 206642 - DNA, 378 bp, Glycine max
agcttcccatgagtctccttaccatcaaaagttctccctcttccggaggaagaaaaacatcatcctccacttcactagaggaactatgagaactcttaaatgaagcattatccatctcaccattctccaacacaatcatggtccttttgttaggtcattgggatgcaatatgaccctttcccaaacacttaaagcatttaatggaacctagttttattgggagggggttgagtaggagaagtaggattacctcttgaagacttcctttcaagatgttgtgaagaagaaccctccttcttggaagtgtctttatccttcgaacatgaatagtgacatgctagtagcaaaatgagtggtagtgttgtaagaccactctgc

SEQ ID NO: 206643 - DNA, 364 bp, Glycine max
  unsure (1)..(364): unsure at all n locations
ctaagagattctgctgggtgaagatctgcagagatgagagctcgaagcgaaagccgttctgagaactttagatgaatttgtgaatgattgtgagatcctataagggaaggagacatcctcaccacttgtatttttgctatctttcatcttgttcttctctgtgttgcaaaggaggtttctggaccatggaaagctatatcctctattggatcttccttggaagtacctaatgtaaatatatttctatctatgcaatgatgtcttatgtgttctctgtgctatgtnatgagtttagtcttacaagaagaatctgtggacgaggctcgatcaggattaggctatgctatcatgaggaatcatgggc

SEQ ID NO: 206644 - DNA, 365 bp, Glycine max
tatcttaagaagaggggttgaattaagatattccaaactatttcccctaattaaaaatctatttcactttttaaccaagttatgaattcccttaatgacaatcttcttaaatattaattcaaatgaaacaatttgaatatgaatataaagcaataataaataaaggagattaagggaagagaaaatgccaactcagttttatactggttcggccacacccttgtgcctacgtccagtccccaagcaacccgcttaagagttccactatcttgtaaattctttttacaagttctaaacacacaaggacaatccttcctttgtgttaagaatcctttcaacaagagactacagtctttaatccctta

SEQ ID NO: 206645 - DNA, 448 bp, Glycine max
  unsure (1)..(448): unsure at all n locations
gctgcagcttcttaccgaaaaagatatatcgttcagtgttttataaaagaatgcgcaatgtcggcagaaaaatatcagtcgtggctatataacgaccgatgtcaggtattttttntttcaattcaattcctgaataatttttggatattgtccaataagaaatgttcgatcggcgtcatcaggtgatgcttgccttttattttagacctgctggatcggtcatctttcctggccgacatcgactatcattttttttatcagtgtcggtgaataatgttttttggtcgaggtgggctgatgtttttctagccgagtaaatgagaacacgccagtgtcggccgaaacacagcttctgttgagctcgcacgaaaaacaaaaccgacctacattgtaagttttgtaggccacaccgaacaacataaccacacttctctaccggaaaaactat

SEQ ID NO: 206646 - DNA, 315 bp, Glycine max
  unsure (1)..(315): unsure at all n locations
tgggaagggactcaaatacgtggggcaattttgggttgtttcttgcttgaatgggttgaattgaggatttgtatgagatgaccctacgcctataatgcattntggagcaatggggcatgccacattgtccccattctcttgctattaatgcctaaacgtgcgcccaccaantgttcggagaaatgcctcaatggcatttgcgcatgattttgtagggatacaacctatgggaacaattggtttgcgcgtgtttgctatctttggaacatgtattcagtttcataagggctagaatgattgccccacatacaccct

SEQ ID NO: 206647 - DNA, 372 bp, Glycine max
tgctcatttgataatgaactggggggatgatgctctcctatgtatgttttctgtaggaaccttatcaggtgttggattggaattggttaatggtttgggtgatggacccattgcttcgtttgatgagaattttgagttgttcactgtcaggttgtagcttacaaagagaaaccaccaacaataaccaatctatttgacatccatcaacaggtaaccaagtcactacagaacttcttagctcattttaactcaatcgcagcacagattttatacccacatgagagaatggtcgtggcatctttctacaaggggttacatgttggaccgtctgatgagtcttttgttatacacaagtaaagacgatggtcgaca

SEQ ID NO: 206648 - DNA, 376 bp, Glycine max
  unsure (1)..(376): unsure at all n locations
gatgttacttcacaaaaggacatgcacttacttgactcagttgactgatatgtacaataacagaacgagcctcgaggtgatggttgtgagcagtctaattattatactacttcaatatctttggtcctttctatagaatgaagaacaagaagttagctaaaccttaatttaatgtttatttattgnttttcctttccactcaaacaaactattaaaaattatagatataatactatttaagaaataaaaatggaattttttattaaaacatgtcattaataaacttttactgtgatttctaatatatttttaatacaaactttaatagttttattttaaatttcttaatcaatatctttaaattattgattatcaa

SEQ ID NO: 206649 - DNA, 411 bp, Glycine max
  unsure (1)..(411): unsure at all n locations
agcttatgttaagaaccacattgttgttgttaacaactatcattgcttatgaagaaagctaaaccaatattaacaacttcgattcctatntaacagcaccactggaactcaagtcacaagacttaatttcacaacattcacaagaggtcattgtagattgaggaatatttcagtcacaactaaacacgtgaaaaccttgacacaagcttaaattctcaaaacagagtgcctaaacaaacttagtcatatttcagtcaaaacatattttaaagctgaatataaaattaatagctgatctgaacacccataaaatgttcttttattaacatagccattgaacacattcacaattacaatatgccgatacaaaaaaccaaattatcccattcttttttctaaaaaacaacatat

SEQ ID NO: 206650 - DNA, 323 bp, Glycine max
gtgtgagtctgcaattgaggtagtggttattaacatcaagtcatgcgtatttatgattggggtagtgactatgaacctcaagtcggtgaatccaacatccgaggtagtactagcgatggacctcatgttgcgattaaacaagtacgtaagttaattaaaagtctttgaagagacctcaacctagtgctctgtggattaagtcagcatactaaacatatatagttgtcagtcaatagtacatgcatcataggattatcatgtgaaagaataaactaatagaaatggtaaacttatattaaaaaggattattcttggtttatatt

SEQ ID NO: 206651 - DNA, 400 bp, Glycine max
gtactaggtggcggtcgggcgatggagcacatcaagttttccacattcagaatgcgcgcataaacccaccatcccctgttgcccacctccaactgagctcacgtactcccacgtagcccatatccttgtttctctcaataccgggtccccatcaatcctcccaagcttccacaacatccaagcaaaacaacatacaaacagcacaagctatcacagccaagcaaaacagagcaaggcagagaactctgctcaacacaccaactaaaatcacagcgtttctcacttaaagaccccaggaacaattccttcgatccaattcactaaccggtggatcgactccaatatgtactgggagtttatagggcataagcctacattttgaccggtgggaattacaagc

SEQ ID NO: 206652 - DNA, 410 bp, Glycine max
  unsure (1)..(410): unsure at all n locations
tctcagccgngnctttgagctgaaacaatgntaatcagcattcattgtaagngcgaaagacaacagtataaaggacacatggaataattattctgaaaaagacagggtaaattgtttgttgtgagatttaaacctgtgtgtacatgtcccaacagataaaataatgtaaattttaatatatggttaaaccaaaagcaaaacatactaatttgaaaaagaaaatcaattcttaaagcctattgttacaattaagaaattttataaaaataaacttcaattagataaatggcttaatctggatgtccattctattcaatgcagaaaatttgaaaccaagttacaaacaatatagcaccacatgaaaataaaccatttcaaagacatctggctccaagagaagtaattaacaa

SEQ ID NO: 206653 - DNA, 385 bp, Glycine max
  unsure (1)..(385): unsure at all n locations
ggagtagttttggcttcggctgtggtgaggccagcaactatgatgaagatgaggacaatgacatggactatggaggcgatatagttgaagcgggaggagcctttcgtgctgaagacggcgaagaagccgatgacgacgagcacgacgacggcgatagggtcgagctggctgtantctgctgcgaggccgtggacttggatgaggaacttgtcggagggttggttgcacagagtggcgaagtatgatgttcatgagcgtgccactgctgcaccaccaatcacgtattcgagaagaatgttgcctgaagctatgaatgctacgaaatcaccaagctccactcctaagtaagcaaatgaaccacctaattaaacaagcacatttcaca

SEQ ID NO: 206654 - DNA, 437 bp, Glycine max
  unsure (1)..(437): unsure at all n locations
aacatagaaactaagcttagccaacaggccctaagtgtctaagaagaaggttattctttcttttgtctaacaccagaatcattataattattattaaccatagtgattacacttatttagatgcaacagattctgtttggacacagcgaatacactttctaaatatcattattttcgtattaagtacactctaacactaaatgagggggagtaacctagatcttacccttttgatttactgaaatttgcaatacactatgttctgcttgggaaagttcttttatttatttatattatgtttatatcatttatagcagattgatctaaccctaaaccaaaggtaccaagattcgtgttcgatgtcacagaaaaagacaacgaatgaatgaatggcatagatgagagtgaagctntaagagacatggcaattgagtcac

SEQ ID NO: 206655 - DNA, 360 bp, Glycine max
cgccattgaagatggcgacatattaacttacgtggagggtgcctgccgtgctactggcgagacacctctccgttggatccgccaatggagttggcgttaccgcgcctgaaaagggtgggtgagtgtgtcgctttctctggtggtgagataggtgcatttcgtgatacctcgcattgttgcagatggcagttagtggtacagcttttgcagtattaaggttgcatgcatggactgaaaacgtatagtaagcttaacttaagttttgatcgtgctttttactttcttctataaaatagcctccgcattttaaattttacgctaaccttttttctttttttcaagctttttttttctcttttt

SEQ ID NO: 206656 - DNA, 469 bp, Glycine max
  unsure (1)..(469): unsure at all n locations
ctatanaaacctcagcttattgagttgagagaacttgagcacacaagatatcnatcngttgtatatgagcttacaactctttgctttctggtggaggaactttcaaaggaactaatgtgctaatgtacgcaaattttgaagcagctgaagaacttagtatgaggtattgtctaaattcttttgcttcctactttcatttaataatgctggatacaagcagatccggtggtagaattcctggtatatgccttgtgcccctaccactcataaaccataattggaagagagagagagattatgtgagggatgctatgttcactcactcaaataagcattgttgtaaaaaaatgattctacgtcgattctacaacacttaccaagacaattttgaaccgtctttgtagtcatgtcgtagaaagtcaatactttctatgacgattcttataaaaccggcttagaaaattattat

SEQ ID NO: 206657 - DNA, 399 bp, Glycine max
  unsure (1)..(399): unsure at all n locations
agcttgtagaactaccataagggaaaagagtcttttgtgctaagcgcatgtttagaaacaagccatacaaggcaagtaaggttgcgagaaacaagacaagattggttgccaaaggttactcacaatatgaaggtatagactatacataaacctttgctcatgttactcgtctaaggcaatacacattatactctcatttacagctcatacaaaaatgagactatatcatatagacgtaaaaagtgcattcctcaatggagcaatacaagaagtagtccatgtagaacaaccccatgggtgtgagggtaacactcttccacaccatagttttaaacttaataaagctntgtatggacttaagcaagctcttacagcttggtatgaatgtatcacttcatt

SEQ ID NO: 206658 - DNA, 287 bp, Glycine max
  unsure (1)..(287): unsure at all n locations
gaccttagatactaagctgggtatttccttcttcactacatgaagaatcatcgggttgtttcttcncngnggctatcctactggnttagctccatccttctaaattattcgatgcatacatgtggatgggcttataccaggaatgttcgccaaggtccagcctatagccttcttatgcttcttgagaactgacaacaacttctcctcttgctcatcagcaagggaggcagatataatcactggaaaactcttgctatcatccaagtaagcgtattttaaatttgatg

SEQ ID NO: 206659 - DNA, 352 bp, Glycine max
  unsure (1)..(352): unsure at all n locations
agcttgtagtcattagaagagaattatcatgtgattggaagtatgactaaaaatgtgagtcagtttgtcacattgattgtgaaggaaagcattaaccgtatcctggtgatagtgtgatccttatattttgagagatacgactatcaattagtactgatttttgcatgaatctctgaagtatggactggatgcatgaaatngatgatgatgaacgccatgtctgatagttatagccacttatccaaaaagctaaacatgtgcttgaatgatttatcccttgcacccagttagagctaaatgaattattgattgattgaaccctgagcctatacagcggtatctcctgctacct

SEQ ID NO: 206660 - DNA, 390 bp, Glycine max
agaccagaaagccagggaaaaaaaaaatctggtccttcttaatgacgatatgtggctggttccaagaaaaaaaaagacaatttgggccaaccaaaaggccatttctatcaaactgaaaaaagtagaaatttaatgcgcgcctaactttttggaatggataaattctcctataattattagtagtggaataaaaagttgtttcccgagcaatagaataaagcttgccccatcagtcacatgagtaacacttatgcctcacatattttgttgagggataaacgcacattaattaaactagggaaatatacatttgaacaactgccaggtgtgacacaggtgtacacatatctataaaaattgcttaaacccttgctgtccatacaataccac

SEQ ID NO: 206661 - DNA, 230 bp, Glycine max
gacccaccataagggtataaacttcttgaccatcctgggcttgagaaggatcttccagtcattaatcaaatttttatccataatatatttaaattcttaagtatattatatccatgtaagcctttgatctcattgattgaaactccaagctctgacaaggcacactttacaaagttgctttgtgatgcctgcggatggcgaagcaagcaaggtgatgaaaggtgttcaat

SEQ ID NO: 206662 - DNA, 318 bp, Glycine max
aagcttttcgaatcattttatgcacgcatggtggttcttattgtgttacgcgcatttttattctccggttgtttacgttttataccccctgttgacgtgcttaagccaatttacttaagtcatttctcgcttaacttagaaataaaatcaatcttcaccgaacgtttgaattgtattatccgttaactttggttaaaatgaattccgaccgttcggtcgtgctcgaaccacgttggaaatcaaaaagaggtaaaaaatactataataatcaaaaaacatcttttagtaaaataaagcggaaaataaatcggacgtttt

SEQ ID NO: 206663 - DNA, 419 bp, Glycine max
tcacaaacttaaaacaaggatcatgttttcgaatattttgtaaatttgatcacatttatctataacaattgtgttgtgcttgcttgaatcttgatttcaagtattggattgtcatcatcaaaaagggggaaattgtagatgcacatggctttgatgttttgacgatgatcatgataatgtgttgcaattgatgcaaatgggctttttaagattaaaattcaagacaatacttcaagaatacaaggcacaacatctagatgatcactagaatattaggacaggaatttctcattgaattagcacaggcttggccaagtgatttacaatacaaagagattttcaaaggatttactctctggtaatcgattaccacaggatgaatttattaccagctgcctatacattttatacagctatta

SEQ ID NO: 206664 - DNA, 356 bp, Glycine max
  unsure (1)..(356): unsure at all n locations
agcttccacctcttgctatcatatagatcccttctcatattcgagntttggatgaggaattctcatccttgtgttgagcttttgttgctccaaagtctagctgcgctctcggcttctatcgcgctccctttcttgcttttttgaaagttccttatccttaacgaatctatgtaaatgtattttctggttcaatttttctatcttgtccttgagggtagtggattcttatgtgttatgaccaatgactcgatgataatgacaatatttggacttgtctactcctggcggaagtcgattcttatccgataactaaattaattatacatccgatgcttcctctagtactcgggttctac

SEQ ID NO: 206665 - DNA, 404 bp, Glycine max
gatttcataacttgatttttggattaccgcgtcactgaaaaaatatattatttttcaacactgggtttgttttatcactctcttaaaaatattggtttccaaacacgaagaagaaactcttggaattaaagagacttaaagacttaattacctttaaatatatttttaacttttttatactcagcatgaatgtgattgattacattatacttttagtgtcagatatttttagatgctcatcatatttgagaataatatctctattatataaagacttatttaattctatttcttatacatgagatattttcatactaatataatcttgagagtttatacgttctttcgtataaagtgtattttaatgaagaacattacaattctcacttctatatatttaatct

SEQ ID NO: 206666 - DNA, 313 bp, Glycine max
gctatagctctgattaataatatactatattttctgcctcccaaaaaaaaattatttcacattgagagaaactgatgaatcaagtggttacaagatgatcttgtcagagatctaactatttccatcatttattattgatggaaaattgtgtgaacatttaactaattatcatatcaggttatatcttttactatttcacatgaagaaaaattgagaaatcaagcttcttctaacttgtataattgattcacagttgaatcctggagactctggcatggatggtagacagcttctccttgatgctctgagacat

SEQ ID NO: 206667 - DNA, 327 bp, Glycine max
gcaccactccaagtattaattttatttaaacgctattatttatttcatatgtatatggcaactctaatgaatttaatgcgcctatgtatgctactggttctatttaattatattgcgtatatatgtcttcaattataaatagtcgctgtatttaggaacgttatacgttgtatttacgaacgttataaatagtcatatgtatatggtagaactatagtattattacaattcctcaatggccactttatggtgttaacgaaactcttttataaagggcaggcagccattctgaaacaccacaaaacacaacacacatttacaagcaac

SEQ ID NO: 206668 - DNA, 415 bp, Glycine max
  unsure (1)..(415): unsure at all n locations
accaaagggaaaggacattatctttatagactataaaaagaaaataagattttggtaaaaatattattatcttagaaataaatattaaaaaaagaataaatacttctttaaaaaaattatagatagattaaacttaaatctcattatctatacggttaaactcttataaaaaattaatcgttctgattattgtaatattaaaatataatactcattaaaaaaattaaactacaaaatagttagggagcaagttcccccaatgcctaaagtanatccgtgcccgaatagatgaaagtccaattaaaatactttcttttactggcgtttaaatatttcttaaggaataggatcatctagtgaaaactcatcttttanagagaacatgctccgattgaagaaaattataataattaaa

SEQ ID NO: 206669 - DNA, 294 bp, Glycine max
gcttataatactactataatagtcaatgttgctatagaccctaaagatcatgacaagtacaattgatttccataatattccaaacaaatatgcctaaagcttgatacttctggtgttatatctactgtcaagtatcaaacaacatggcctctataaaataatgtctggtgaacatatatatgactgaattctacagataatttgttaaaaatgatttcttacaattaatgcaactgaacgacaaaatgcagctctcctggcatgagaagcatcatatccatcgtattcagcttc

SEQ ID NO: 206670 - DNA, 329 bp, Glycine max
  unsure (1)..(329): unsure at all n locations
actccgcttggctgtccttatgttagcctccctctttttattctttttgtcaagggctaattcgcgcctttgtgcgtgattctgattcgtctagttttgatttattttatttcttgataggtgcgtctttttaattcgttggcagcgcaagtcaatttgagtattttgtgttaaatttctgcaccttatgttctaattgttcacatctgctcttgagaggcttttggcacaccctcttgtttgatccataannaaatgagtntgaagttgggtgttttcataaatattacaaagtccagtatttattatccaaaaaggagatgagaagt

SEQ ID NO: 206671 - DNA, 415 bp, Glycine max
  unsure (1)..(415): unsure at all n locations
agcttatcagaatcttgagaagattcttcattttatccctctttggctatnttatacagcacgcagatgagcactagctggggcagctgcatgagatgcaacagctgctgccaactcaccaagagaactccacctttcttccacaacctgcacatattcatataaacagcaaatttattacaggatgacagatatcttttacatgggaacaaggaatatctgataagcaagcataaaaacctcgttgaatctgcgtccttctcgagctgcttgctcttgtgcacgctttaaggctttaagtttccaacttgctcctccactcccaacaagggaagaagatagaagtntggtancaccaactctacctcactttgctccgggagacacttcattattcttagatatgattcattcc

SEQ ID NO: 206672 - DNA, 403 bp, Glycine max
  unsure (1)..(403): unsure at all n locations
cgcttatttgtttcgcttactgaagctattgttttgagtcttctgacgcatgtgagaggggaatgagaatcgtctntgagaagcttctaaatttggttctttgtaacggggggtttaagggttgggatcctttccatgccgcgagaagcgtncatggtacaccacgattggatgagtctcccaatggtgtggcttggtgtgagatcggtgtaatcaatcaagggctgtttggtaatggcgcatgtcgtggttttcttcgagaacagccacgtttcgatgctttcacggtcgtaggtgatgcccgttgagaccgtcactggatccttcatgattttctgcgaaatggggcagagaaagaacgaatgaacatcgatttcgttcatgtccatgtaaatagataaaa

SEQ ID NO: 206673 - DNA, 452 bp, Glycine max
agcttgagatgaggaagatgtgaatggtgatacttcctgcttttattggtgaccacagaggggtacctggagatatgtcgcggaggtcaagagaccttgtggacgtcaggtggggtgctattgcccaaaaccaagcttgaccaatcccgacccaacccgggcatagtcggtcagtgagaacctgtgatgtacctaatcaggcgagctcctggctgcaacagataaaaggaaaacaagaccacacagcaaggaggcttgtggcggctggccaactgtgaattttgtgtaatatgtggattgtggcctctggtaatccactactaagggcgggtaatcgattcaaagcttaaaattgaagacagaggctaagatggtctctggtaatcgattacaaagagtgtaactattaccagcttgaaaacaagtccgaaactaggagctctggtaccata

SEQ ID NO: 206674 - DNA, 245 bp, Glycine max
tatgcctatcaggtgcgcctacgataaaagtatggcatctgcacctattatgacatttatgatgtcactctcttttgtaagtggagccgttatagatgaggaggaacttacatatttgatgtcaaacccttttcaatgggaaggggatgatgcaatcctccctatgaagggacctgtcactagaaccatgacctagacgctccaagataattgtgctaaagctgctgtataatgccctagggttc

SEQ ID NO: 206675 - DNA, 186 bp, Glycine max
  unsure (1)..(186): unsure at all n locations
agaatgagacgagacaccaaccagtgagagtgtgccaagtggttctggtaatgccttgtgcagagaccatagcgagcagcgagtgaagaacaagaagccnaaagagagcactgggaacggcgcgtggcttccacattccggcgaagtttctgcttccggtgaaattccggctaagcctgccggaga

SEQ ID NO: 206676 - DNA, 311 bp, Glycine max
  unsure (1)..(311): unsure at all n locations
agcttctttgaganaacttccttgataagctatagcttagctacacatacccctgtcataactaaggtcacctccttgagaagcttccctaagaagaatccttaagaagctagagcttagctacacatacctctctaatagctaagctcacctccttgagatgagaagctagagcttagctacacaccccctataatagctaagctcacccccctgacagaaaacatgagaataacaaaaaagaagtccttattacaaagacaagctaaaatgccccacaatacaaggcttaaaccctatactactataat

SEQ ID NO: 206677 - DNA, 219 bp, Glycine max
  unsure (1)..(219): unsure at all n locations
tataaatagaagcatgtggaacacttgttgtaactctgatgaatgagagtcttgcgagacatacttcaaagttccacttctctccctcttttattccttcaatttcgggctccccgcttctctctttcttttncttcattaaagcatcctcttcaagctttttatccaaagcaattcttggtggagaagctacttctgtcttggcttattccctagtgg

SEQ ID NO: 206678 - DNA, 389 bp, Glycine max
agcttaccaatgtcattaactccttcaaattgtactctccatttagccccatatctgctaatgcctcaagtgggctttctgtcacctcaaattgatgaaccttctttaccaatagtacctcaggttgcctaaaatccacagccttaagtccacttacactctcaagcaccactacaccaaaactacctagtcttggccaccacagccttaaatccacaactcctaaccttaattaaaacccacagcctcaggttgctcctatcgctgattacatgatggccatgctcagtccttgacaaaaactcagccacaacaaaactcaagttgtaaacttgactggtgagcaagtataccagtgggttcaacacctaaatactgtatttggaaag

SEQ ID NO: 206679 - DNA, 322 bp, Glycine max
ccctggtctcaatttaaaaataatagttgaatgctccaaatcagaatggtcagaatcaccagccacaaaatactcagaatgcttaaaatgctcaagatgcacaaaatgatcaggatgcacactatgcctaaggtatctatgaaaagggtgtatctatttaaggatcaaagggttggtaatcacctggattggccctagtcatgcactatatgcatcaaatcatgtgtttctcaaacaagcaccaagggagggttaaaactactactatagaccaacgatatccaaatgagctgaaattttgtgagcaacacccctaaatcat

SEQ ID NO: 206680 - DNA, 100 bp, Glycine max
agcttcttccgcgcgtgtgttatgggataatatatggagtcagcggaagaaggtgttcttcctccagctcctgcggaagaaaagtgataggtctctcttc

SEQ ID NO: 206681 - DNA, 380 bp, Glycine max
  unsure (1)..(380): unsure at all n locations
ctattacgtgacctataaaactcagctttggaattgatcttcctctcagctacgtcgtctgatttacactaaaggaactagtatgatgttccacattcgattagagacacacacaccttcccaacaggatactaccccaataccgaaggagatcgaggaactgctggatcgatattcgtcgntattcaagccaatagtgggtcttccaccatcaagggacactgatcacgccattaacatcctacctgaagcagcaccaggaaatgtgagaccatataggtatccccactatcaaaaatgggaaatcgaagaccagataagctctatgctgaataagggcttcatacgcaccagtgccagtcccttttcgttctcatact

SEQ ID NO: 206682 - DNA, 152 bp, Glycine max
agaaaaaagtaaagagaaaaatggggtaaagaagaggaaaaaaaaaacgtaataaaagagagagaatacaaagagacaaagcggagagtccaagaaaagaagaaaaacacacgggcccaaaaagaagacaggagagaaagggacgaacaaag

SEQ ID NO: 206683 - DNA, 457 bp, Glycine max
  unsure (1)..(457): unsure at all n locations
ctgcagcttatattcggatacaagagtgtgcttttttcctcttcttacatctggagtgcctatatgagtgcctttatgagtgacttcaatcattttccgtatctttttgcacttttaaccttgtagaatgcaaaaattcatcaaaagataaaccaaaagttaaaataattttagattttttatcatcttgcacttttcttttctcatcatctttcatcttatcccattctttaggaaccaattcaccattgacttccttagttgttataaagggtcctttaaaaagtagcattccatgcaccggggtcaattgattgaataaataatttcattctcttttgccaaaacataaaatgctttccctcaaacaatggtggtagattgagagagacaccttctttgaaaagtgattgtttagagcctatattngaagaaagcaatgatcttcagtaacttg

SEQ ID NO: 206684 - DNA, 465 bp, Glycine max
  unsure (1)..(465): unsure at all n locations
gacctatgatactaagcttctgatttaccgttaagtaggtggacatgctcatggtatatgcttggagcacgacgttgtttgcatggaagaatattaatatagtttgtatctctcaatgtatgagaatttgttttatgtactttggtcatgttttgtaaggcgtatatatgtcaatggctttatataagttttgttcttatgatatatgtatgtttaagttttagtttcacccaattaactatgacattcttatatttcaagttttcaaaattaatataagcaagcaaaagataacattccttatggtgttacaatgtggcaccgagcttatcaattggcgatagaaacaaatgtgtggagacaaagtaagaaaatatcgataaagttgcagcgaanatgataaagaataaaagaanacaggaaagtggtcacggagtatgacggaaaggcgatgtacggaaataa

SEQ ID NO: 206685 - DNA, 485 bp, Glycine max
  unsure (1)..(485): unsure at all n locations
aagtcacctgacgcatgcaagcttgtaggantatggggtacccatcacatgttttactacgcggcggncgggcgatggtgcacaataagttttccacatccacaatgcgcgcataaaccnacatcccctgttgccacctacaactgagctcacgtactcccacgtagctcatatcctcgtttctctcaacaccaggtccccatcaatcctcccaagcttccccaacatcaaagtaatacaacattcacacagcacaagctatcacagctaagcaaaacagggcaaaggcagaaaactctgcccaaaacaccaaccaaaatcacagcttttcacatacaaataccccagaaacatttccttcgttccaattcgttaaccggtggatcgactcgaaaatttactggaagtctctagtacttaagcctacattgtgaccgttgggatctactagcaaacatccagaactcattctgcactacaatttc

SEQ ID NO: 206686 - DNA, 443 bp, Glycine max
  unsure (1)..(443): unsure at all n locations
ntcaagaaattcanatggtcagagctcttcacacggatgttttattcatgcgcgtaatatatcgagatgttcgtaactgaacaacggaagctctcgagaaattcaaatggtcataacttttcactcggatgtccaattcaggcgcatcacatatctagatgctcgaaattaatcaaccgaagctctatagaaatgcaaatggtcataagttttcactcggatgtcaaattcaggcgcatcacatatcgagacgctcaaaattgaacaatggttgctctcgagatattcaaattgtcataacttttcactcgcatgtgtccaatccaggggcatcacatatcgagacgctcgaaagagaacaacggaagctctcgagatattcatagggtcataacttttcacacngagatgcgatttatgcgctaaatgtatcgagacgctcg

SEQ ID NO: 206687 - DNA, 465 bp, Glycine max
  unsure (1)..(465): unsure at all n locations
agctntntgtaaacttgccaaaatgattcataattataaagatttaaaaaccatacgctttctgggaagcttcctagaaggtcacccatcccataactacttnagccaagtatgctaactgaggagttcttatgtgataggctaccaaaaagtatatgcatattgtttgtataggtagtagcaattaattcctttaactcatccttaattgtattggcccatacttgcacatcctttggatccctccctttctgttgtgatttgttggggttttacacaagtggtgaggtcggctagctggaaattaggtaccgaagcaagtttccacagttntaaatgagtaaatggtatttagggataattgaataaagcaattgagggtatgcctttctggtgaagtggagaagacccggcacaagatggcgttgcttgtggtatacaaaataacttgggtgacatacacat

SEQ ID NO: 206688 - DNA, 466 bp, Glycine max
  unsure (1)..(466): unsure at all n locations
nttcgattcattctatgtacccgtagtggtccacattgtgtttcgtgcanttttattctcgttttgtttactttttataccccctgttgacgtgcttaagccattttacttaagtcatttctcgcttaacttaaaaataaaataaatttccaccgaacgtttgaattgtattatccgttaatttcggttaaaatgaattccgaccgttcggtcgtgccgtaaccacattggaaatcaaaaaagaggtaaaaaataatataataatcaaaaagacatcttttagtaaaataaagcgaaaaatcaatcggacgttttctctttgggatttctcattcttaatcgaattgattaataactaaagtgaaactaaaggctaaaatcaattcgcctagtcaagctcgtccataanaataggcttttgaagtttgtcatttcattntctcactaagtaaaatggatcaatttt

SEQ ID NO: 206689 - DNA, 283 bp, Glycine max
agctagacatacatgtgatagaaggattgtttttctttactttgacgtgacagagtatttctattccatcctctgaaatatactttgcgctctttgaataaaactcttttacaagacaaagtgaattatggttatgcctgaagcactgaaataacaaagggtcttttacatatattcatgcaacctgagctgagaagctatgtcccataataactgtgcaaacatgaaaaaatctcacagtcaaaaggataacttgaaattgctctgagatagaacaacattt

SEQ ID NO: 206690 - DNA, 431 bp, Glycine max
  unsure (1)..(431): unsure at all n locations
ctactggngactgtntatgacgcataanatattttgttttttgaaggataatgtaggcgagacagaagggcaccaaacgatattatgatcctctctgngagctagtggaagagccacattttgaatctcaacaacaagttgaggatagagttgttgaaaaaaatcaggaaaatgtcaaactccttgatgcataaaatcactcatcaccctagcacgtaagctcgagtgaagatgattagggatgttcaaaagttcaacaatatggctcgaaaaccatttgtcactccaaaatcaaatgtgagtaccatctcctatttgccaaatagaattatcatggatagtcaccacgaaaggcttanaaccacaccaaatacaagatgatacatgaaacattacttggtggttaattactctctgtaaagcatacccta

SEQ ID NO: 206691 - DNA, 408 bp, Glycine max
  unsure (1)..(408): unsure at all n locations
gcttatacagactatagatgagtattattttnttgaagaatccaaatagaaaaaatgcaaactaagaggaactaaaataaagtcataaggaacaaaancaaaaatgatacttacataaaacaaaaacatatttaatatttcacaaaagagggaggaattaaaaaaaatttaaaaagaaagaaagaaaaggtgctttaagtaaagaaggagatacgaatagcactttaatatttatagaaagttgtagctataatataaaagcccataatacacattaatctccaagaataattaccacattaaaacaaccttatggtttccctaaaatttagtatatccctaaggtcggaataaaacgtgagccgccaagcataaatatcacctaacaacagtatcagaattttctat

SEQ ID NO: 206692 - DNA, 460 bp, Glycine max
caagctttaaaatcaatcccaaggctccatatgctccgctatgtccttttcccaatttggaccctccttttaacacttctcttctctgctctctctttcagtgtgtctctcttcacacttacttactttcatcactcactgaacagaaacaatgtccactccatattacacacttggtcttcttcttcttcttcttattgtactcatttccccatcctcctcctctcttcatccaacggacctgaatgcccttctctccatcaagaacaccctcaccgaagtctcacccacgaagcccttcttctccacgtggaacctcaccgcaccggatccctgctcctccttctccggcgtcacctgcttcctctcccgcgtctccatcctctccctcggcaccccctcccttccactcgccggcaccctccccgccgagtcaatctcccaactcacagagttgact

SEQ ID NO: 206693 - DNA, 460 bp, Glycine max
  unsure (1)..(460): unsure at all n locations
ctgatgtgttctaaaagttggttatggaattcagataatgcatgtaaaattctgaatgcttatgtgatactttatgaattgcttatatttttaaaacttataacttgttatttattattttataattattatttataggttctagatcaattgaagaattaaattttactgatgagattgaatccgatgatgaaggtatattcacttttagttgttctatttttttttaatatcattatacatatctaatttttcaaattttttaaaatataggtggatctttggtcagtaacattactcaatgtttgcaagattagtagacattattgttgatcggtaaagtaataactatacttatttactaatgtgatgtgtgattctaagatttgaaacatctaanatatgatgtttgattttataaatatcangttgaacgctgaagaagaaatgtgatgacatc

SEQ ID NO: 206694 - DNA, 487 bp, Glycine max
  unsure (1)..(487): unsure at all n locations
ggaccttaagncacctgaggcatgcaagctggacccagatacaagagggtggantttttgttgtcagacaacagaggctatcctggagtctaaatatctacctggccttgtggcttttntantaatgtaccttgtccactcgccttgcccagtgttatgtaaaataaaatcagttctactttctccacgctcatgaggtccaatcattgacatgatgggtgtttgttgagattacacatcaacatatgcacatggtgaaaatagagcttggttaaggttggataattctcacctcataccaaaattttggaatcaattatatgccctgtccaaactctagagataatatatataatcttgaatgctgtagagcacttgtgcataaaaatgagaaagcatctatatagtctctatctaatactgataccaatgcacatacttacatgcttatacttagagcttcttaatagcttctacatcttacatc

SEQ ID NO: 206695 - DNA, 323 bp, Glycine max
ccaaatactaaaacaacatactcattactaaactcaatcaaaatatctcctaaacttcacatcacaattaagatatcatcactcttctcattctacaggagaccaactacgcaaactcatctattttaaaggcaatccgagcccgacgaaaacgattattaccatgttatttttattgaatctttcgtgaacgcggaatatgtatcctttcattctctgcgaatataaaagcttactctcattgaatatcgaacctttgtgagaattgaattcccgccctacgcgcatgggaaaatgaacaacgcataaaacaaataagctct

SEQ ID NO: 206696 - DNA, 424 bp, Glycine max
  unsure (1)..(424): unsure at all n locations
gacagccaatgggtgagtcccgtccaggtagtcccgaagaggaccgacctcacagtgataaaaatgataaggaggactaattcctactcgggtgcaaaacagttggagaagttgcattgactataggaggctgaactaggttaccaaaaaggaccattttcccctgccattcattgaccaaaaaggaccattttcccctgccattcaatctgcttgattgtggtttttattggcccaccatctttaaagatgcatggaagatctgcagcacttgtgagcagtgtcagagagcaggaaatacacttacatggcgacaacanatgcctcagcaacctatgctattctgtgaggtgtttgatgtctggngtatagaattcatgggccctcttcctgtctcttttggtaatgttacattctccttgaa

SEQ ID NO: 206697 - DNA, 443 bp, Glycine max
tcttatccaggcaattcttggtggtgaagctccttctttttggcttattccctagtggatggtgcctcccctcttctcttctcctttgccttccgctgcatctccatggtgaaaaatcaccattgaaggacctcattgaagctcaaagatccagcctccatagaagctccacaagtaagcttccatcatgtataaatttgcatagaattctttcaccaaatacaggtctatgctcccatcggctaaattggtgaggcgtttatggaaattacgcctctccagctcggtcttaaagtcatctaactcagtgtgatacaactctactttcctctcaggtaaaatgtttcttcctagaacattatcagtgtatttggtccaagcatctaatgaagagaatctccttgtgtcatatcgagatgtgggccttgtaccaatgctctttc

SEQ ID NO: 206698 - DNA, 139 bp, Glycine max
gatttgagagggaatggagggatgaaatgcatcaacgtgtagaagcgagggatccggagctggacaatgcacgagcagcaatccggaagcttgcaaaaaggcgggaacaactaactcaggaactacgcgacagacagaa

SEQ ID NO: 206699 - DNA, 446 bp, Glycine max
  unsure (1)..(446): unsure at all n locations
tgcaccacaggacctcacgcatagcaacactgttaatattatcactgagtgggacggctcttaataacgcatacgtctaatatatagatgttaatagtaaaaaaattattaaggctgaatatcttacccttgggccaaccctgattatacctctccttaacaaagtctttgaaccctctaacaggcataaatccattcaccctcagatgccatgcatccagacacgagaaagaagaaatttgtctagcttactacaagcgcccacccccatctgaaccaagtatacattctaccagcaaatggtggttccacaagcatcatcccttcaataaagttgttaaattgttttgcctcctgcagatttgaggtgaactcaccattctccnctcttctttcttccatccttctgactaacgtatntccggttctagtatctatctcacgct

SEQ ID NO: 206700 - DNA, 450 bp, Glycine max
  unsure (1)..(450): unsure at all n locations
cgggatcttaagtcacctgagctgagctgcagaatttatttttgctttaacgaaaaggcctgtgataactanatcccatatttgttgtaatataaactncacagaattatcatcgatatgcccaaaatgagttattgtaggcaaagtctatacacatgtttgggattacttatatttaacatacgcataatacaaatattggaagaagcaacagcaaatgccaaggcgcatatgttaatgaagttgtactacaattcatttcctcaaggaccttagcacttcacttgtatgacttgactctatagccggccacatatcagggagctttgcaaagatgtaatttatcaagtttgtaacttcattatacactgattgttgttgtctacctgatcatttgctacctcttctggctcccttgtgatattgtgaatcaatttggagccaatcacc

SEQ ID NO: 206701 - DNA, 453 bp, Glycine max
  unsure (1)..(453): unsure at all n locations
cgaaattgaacaacggaagctctcgagaaattcttatgtgtcataccttntgactcagaagtccgattcaggcgcatcacatatagagatgttcgaaattgaacaacggaagctctcaagaaattcaaatggtcataactttcactcggatgtccgattcaagcacaacacatattgagacgctcgaaattgaacgacggaagctctcgagaaattcaaatggtcacaacttttcagtcggatgtccgattcaggcgcatcacatatgcaacgctcaaaattgaacaacggtagctctcgagaaattcaaatggtcataactttcacacggatgtccgattcaggtacatcacatatcgagacgctcgatactgaacgacggatgctctcgagaaattcaaatggtcataacatttcactccgatgttngattgaagcacatcacatatcgag

SEQ ID NO: 206702 - DNA, 403 bp, Glycine max
  unsure (1)..(403): unsure at all n locations
gcacgnggaggatgttcatggattgtaaactcatcaacaacatcaccgngaggtcagacatcctaccctagactcgatgatatgttggatgaacttcatggttcttgtgttttctccaaaataggtttgaaaagtggttaccatcaaattacaatgagagaaggtgatgaatggaaaaccgctttcaaaactaattttggactttatgagtggttggtcatgccttttggcttaaccaatgcaccaagcactttcatgcgactcatgaaccatgttttgaggcaatttattggaaaatttatggttgtttactttgatgatatcttgatttatagcttaacaatcgatgaccacttataccatgttatgagtgtcttggaagcgcttacacacgaaaagttgt

SEQ ID NO: 206703 - DNA, 412 bp, Glycine max
catcttctgcagataattaatgactgcacgatctcgccatcaccctagctttctagatctatggcagggtaattactcacttctaacacttaatcttgtaccttttggggtgtgatcgcactttgattcttacaacttaatttttacgtggtttgtatttgaagctcgaggaatatgtattttttagattccatcattatcccattcccattactacacatccttcgatctgatcttaattcaatccactggttttagcatatctatattcattccagtcatcctcaaagtactaagtgtgccatagacggatatgaatataatcacgtaccgtgattctcgagatatgataatattttgatacgcatgatacttcaatttaaaatatcagagaagatgacgcactaactaa

SEQ ID NO: 206704 - DNA, 470 bp, Glycine max
  unsure (1)..(470): unsure at all n locations
tctggtttgattcttcttttgtgccattgctattttcttttgttatctgcctgaggaatatttgaaagccattatcccttttttttatggcttccccatttctgcttgtatatcattagattctcgttacctgtacaagtaaaacttattgcagccattgtccattttttttatctttcccctaatccatcttttagggttgatatacctgttagcttgtgcttgtattgattaacagagctgtgcttcattttcaactactactttgacacaaaagcaaagttttttgttcatttatcattttctgactcgagcagtgctactcttgaagtctgtagattatggtcgcatggctganatcctggtacagagggcaggttcttcagatgaattcactangctaacagctatcacatgggtaagtggtactgcaattctttgacttgatagtaaaccatttgctcttatat

SEQ ID NO: 206705 - DNA, 370 bp, Glycine max
  unsure (1)..(370): unsure at all n locations
ccttttgaaaaaatcttcagaaacaagtcacttgaagaattgtgactgttggaatttatttttcaaatcagtcactagtaatcgattaccattaaggtgtaatcgattacacatcaacagatgtgacttcattttaaattttgaaaattaaaacgtttagaaacactagtaatcgattacaagtattgtgtaatcgattacacaagtttaaaatgatttgaaaatgtttaaacacaagttgtaactcttgaaatataaaatcttaatgttttaaaacactagtaatcgattactaccttctggtaattgattaccagagagtaaaactctgtggtaatgattntgagaaaacctcttggctactcaatgt

SEQ ID NO: 206706 - DNA, 469 bp, Glycine max
  unsure (1)..(469): unsure at all n locations
tcanaccacagcaacacanaatctaggtgtccaaaacctctcaattcaatggcttttctaggtttgaaaggtggaatttagaatgaggtaaatttgaagcaaactctcacctcacacaagtccataacatcaatctaaacttgctcaaactgaatttacaccaaaaattccaccaaaccaaaatttgactcttcaacacccaattttgccctagaaatggctcttggtttactttggtcatttgtttatctctctagctcagcctaacctttctcacatgtcctaaatgacatttcaagctagtattaactcactttaacctccatttaccacataattcagacttagccttccaactctcaaagtctcactctntttccactcaaaacatcacattctcactttctaaccctaggttagttctacccttcatctctaacagttntccatcagcaattnttcagcctac

SEQ ID NO: 206707 - DNA, 451 bp, Glycine max
  unsure (1)..(451): unsure at all n locations
agctntgaatgctctattcaatggagttgtcaattatatctttagactgatcaacatatgcacagnggccaaggatgcatgggagatcctgaaaaccactcataaggaacctccaagtgaagatgtccagattgcaactattggccacaaaattcgaaaatctgaagatgaaggaggaagagtgtattcatgacttccacatgaacattcttgaaattgccaatgcttgcactgccttgggagaaagaatgacagatgaaaagctggtgagaaagatcctcagatctttgcctaagagattngacatgaaagtcactacaatagaggaggcccaagacatttgcaacatgagagtagatgaactcattggttcccttcacaccttngagctaggactctcggataggactgaaaagaagagcaagaatctggcgttcgtgtccaatgatga

SEQ ID NO: 206708 - DNA, 459 bp, Glycine max
  unsure (1)..(459): unsure at all n locations
tgctctanatntacattgatgtttgtatttattggagggagttgtatgccatttttgttttaagggtagcatttcttggtaaaaactaactttccaaatgtttgccttcgcaggaatggccccgaggaagcttgcctcaaagaggtccaggaaggacaaggcggccgaaggaactagttccgctccggagtacgacagtcaccgctttaggagcgctgtacaccagcagcgcttcgaggccatcaagggatggtcgtttctccgggagcgacgcgtccagctcagggacgacgagtatgctgatttccaggaggaaatagggtgctggcggtgggcatcactggttacgcccatggccaagttcgatccagaaatagtccttgagttntatgccaatgcttggccaacaaaggagggcgtgcgtgacatgagatcctgngtaaggggtcagtggatccc

SEQ ID NO: 206709 - DNA, 458 bp, Glycine max
  unsure (1)..(458): unsure at all n locations
agcttaagagcatgcttagagggaatcgtgatatcttttacctagcaccaaagatatgaagaccattgtttggcagaaaaaagaagggatggaaggggattgaatgctcatgccgagtttcaaaagttgcatcagagaattgatcagcttgatagggagacaatcaatgcaaggaaagagattatgcatgaagtgaatgggaaagagcatttgaggttgttgaaggacatatgcagtcaactaaaattaattgagttagagatgagaagctggaaaacccaaaaagcaccacctaagagtaataagagggataatcgttcggatcctcttcaagaggtaatgtatactatagtgctcttttgccttcttttgagaagaatgttctgtngcatgcaaatatctcctttacttgattctcccttatcaagggctagtagtttttgttagataatattaca

SEQ ID NO: 206710 - DNA, 459 bp, Glycine max
  unsure (1)..(459): unsure at all n locations
tacagttatagatggggctctaaaaatactttttgccacttatgatgccttgtccatggnggcagtcaaaagattgaactcacgcactaaagaccaagataattcattctgggcatcaatgcttaagttgtattcctggaagtagccgttataagttattacggacatgatggccctggaaagttgaaaaatataaaaatttagcaaacatagatatcagaagttttctgaaacatgggaaaaacacaagttatgaagagcatttctggaaaagttgtgtgataaattgctaatgccacacagctgaccatagaccgcgtttgtaatccctcaaaaaggaagtaccacactttaatgaccatacctctgaagggaccatctacttatctggtttataatgggtttgatgattctacaccttcaattgtacctctgattttatcanaccacccaattaac

SEQ ID NO: 206711 - DNA, 388 bp, Glycine max
  unsure (1)..(388): unsure at all n locations
tatagacaagagncaactagctagatactcgggaatagttatcaaaattatactagtcntacgtatcaatagagggcaccgacacactagaaaaagtcattcagaaaagtctgttaatcctcgttagcttccaaacaatggactgtgtagcgctcattgatatccttatcataaagaatcgggatactagttaattttattgttaatacagattgttagaattttagaggatccttataaaataccaatataatcaccaagaacacattatgttagattatcaagaatagttttaggaatacctgcattgataatgattgatcaaacaaacatggcagaatatgaattcctacgtgatttctgatctatgtacttcttttcagatctg

SEQ ID NO: 206712 - DNA, 472 bp, Glycine max
  unsure (1)..(472): unsure at all n locations
tgtggttnttaaaaataagcttagaagtgatctattattttatctcaataaancggcttcaacacacagtgagcttgataaattgaagcaagacaatgaaagacttgtttcaagttataaagccaccggctgtgtttgtgtttctacatctcttaatattcattattacaaatctttgcaagatgagtttgaaaagtttaaaaaggatcactataaagaactacgaaactgcaaactgagctttcctatcttaaagatcattttagaaaaatgaataaaggaaagagtgatcttaatcacttactttgtgtgcaaaagaaaattgacctttctaagaaaaccaagtttgcatcctccgaanaggtgaacccaaatagagtctccacaaaagaaaaacatagtgcatcataagcctaaagcaaagacttgacattattgcatgaaaagaggacacacatcttataaacactat

SEQ ID NO: 206713 - DNA, 278 bp, Glycine max
tgccgggaagggtgtacacaactttgaaggtatatatttatttcattggtttgggtttgccgggatgattaccctccccatctggtgtttgtagaacctatgggtgatggtgaatgtgattcatatgagtgtttatgataccaatgatgaccactctagatgatgagaaaggtgatgatcaataaatgttcaatgatcatagaagatctcatgtgaatctatgaacatctttatagattatgagtcgtgatctaagaatttgactctgaaatctaaat

SEQ ID NO: 206714 - DNA, 350 bp, Glycine max
  unsure (1)..(350): unsure at all n locations
actaagaaactcagcgnacgacacaccccgncgaaagcgagagggacatncttgaaatgagaaacnagaaatcagctacacacaccccctataatagacaagctcacccttacgccaaaaatacatgaaagaacaaaaaagtccctactacaaagactactcagaataccctgaaatacaatgttaaaacctcatactactagaatggccaaaacacaaagcccaaaaataggaaaaaactattctaatattcacaaagaagagtggacccaaccctggcccatgggctcaaaaatgtaccctgaggttcataagaaccctagggtcttctttagcagctctagctcaat

SEQ ID NO: 206715 - DNA, 410 bp, Glycine max
  unsure (1)..(410): unsure at all n locations
accggtttaatattaagaacaataattgtgtttttgacgtagatcgttaatgtggtttccccggccgtcgactctgatgttttgttggtcttcgactttatctttttgttgacctgtgtactcaaactctgcataaaacataataaaaaattgccaccaccactgcatctgcatcccttggtgttgcttccacaatagattgtttaatatgcaagtgtgcgtgtgaacttgggctaagggcaagtcaatagattatcagtctgctagcttcaccagcgacagccaagttgtttgaacataaaagcatggataagtagctcactctagtccatcaatntagaatctaattcgatagtttcctcaagaggtatatatcagatagagattgaaatgtaacgtactaatgtaat

SEQ ID NO: 206716 - DNA, 474 bp, Glycine max
ggacctataaaactcagcttgaaaatattttaaaatccttctagacattattattttgatttatgaaaaaataagtatttttttaaatttttattatcttagaaagaatgtttacatattatgaaattcttcaaacataaatttttattcatgttgacgaggtttgattctttgaatgtgcctacagagaaaatttcattgaaatagaaagataaaatttattttgatgatctttatatcttgaagatttatatgataacttttgattatgaaaatatcatgttttcaaaaaaaaaataatcacagttttctttaactaaaataaaaatttaattgcaaatttagtttcttatttatctgagtttattaatttcgattttctataattcaattcatagattaattgtttaagctgagacatttactatgtgtattgaatgctgattatgtgctcacagaattcttaagtttatt

SEQ ID NO: 206717 - DNA, 477 bp, Glycine max
  unsure (1)..(477): unsure at all n locations
accttaagtcacctgcggcatgcaagctggggtgattggctgatagaacaagttatatgtcactcgaagngggtaaacgccgcactgggagatccataagtatccttgatatttatgggtttcgtcattccaggatgcagtttgtattaacgtgtttattgatgcttcatagatagactctttgttaacagtttgttatttttctttttagaataacaactttgaacaattttgtataaactatgccaatgagaggcttcaacaaaatttcaattggcatctgtttaaacttgagcaggaggtcatcaactatgttaagctttaatttgaacacaaaattgccagtgtgtaatacaattccaggaatattatttgtgtttaagattgctgggtgtcataccctaatttcgtccggggacctttgcttgatgacatgcgacctttgtttggccttgtaaggtgcttgcacccatcatt

SEQ ID NO: 206718 - DNA, 432 bp, Glycine max
  unsure (1)..(432): unsure at all n locations
nntattttgcctttaatcttgttatgtcaatggtcatatttgttttgttaactctgacttgttttacagcacanaaaacctgctgatggcatgttacttggctccagttctcgcaacccagtaggggaggcacctgcttcccctaagtactctgacagactttctcctgcaatcaacaattatctgtctgaggcctcaaggcaggaagtcagagtgagccaacttctgcagagctaattagctattactagtcaagtgttctaatatatttttctgctgtttgatatcttgttactgcttgatttgcttaagtactggatgtaggtgactgcattntgtgcatctcacgccttatgattttgttgcagcctcagggaacaccagataatggttatttatggcagagagtaaattcccagttaagcttcccta

SEQ ID NO: 206719 - DNA, 447 bp, Glycine max
  unsure (1)..(447): unsure at all n locations
agctatagatatcagaacaaagattaaattattctcacattatattagaagcatatgtgcataaataacaaataagtcataagtcatcaaaacataaacatttgtctaaactatgtggctttgtgaaaatgtctacaagttggtttttagtatctacaaattttaaaacacagggtggtaaatatgatttctttgttctaaatcttgatatgtggtgttctcagattcagttaaatagctaacttaatgtgagttattgcaaatttgatttctctgttctaaatcttgatatgtggtggttatgaaaatgccttatgcttttgattcacatttaatcaattggtaggaataacactgctactaaatgggtgtctggacacatattgatgggtgtttcataaatgcctatgttttgagcacattaatcactntgaaaaattcctccat

SEQ ID NO: 206720 - DNA, 462 bp, Glycine max
ggcctaagtccatacaattatttgttcaattggcatactattgtaagaatttctgacttgtaacctttgggaagttccatataaacttcttcaaacaaatctccattcaaaaaatcattattaacatctaattggagaagacacaaatttatagcaacaacaacacagagcaaaactctcatagtggtaagcttagccactggagaaaaagtatcaaagaaatagattctagcttgttgagtgtaccctttggcaaccaatcgagctttttatccatccatagagccatctattttatatttaaccttatacacccatctacaacctatacaatgcttatcaggcggtaagggaacaagtgtccaggtgggaattgcctcaagagctctgatttcctcatttattgcttgatgccattcaggatatggcgcaacttgatgataaagctaaggttcatgtaca

SEQ ID NO: 206721 - DNA, 470 bp, Glycine max
  unsure (1)..(470): unsure at all n locations
cgcttgcatctttntaaagagtgtgactcttattattattattaaatgntgcctttgacaacaattgtccccacatggtgctcaaataatacaaatcaataactcgtgcattgaatgacactagaaatcacgcagtgcttgcagaaggccaacttagattaagttatttttattcgtttaaggaaaaatcaaatggtagataatgaaaaagaataaatctaaatgtcttttattaaataattatttaatttttacgaaagttgtttcaaataaaatattaaatgatgaaaatcataaatgattttcatattttaatatattaaattaaatcatttttattntcaaacctattaaagtatcaagacaaaacattaaagatgaacatgtttgaagaagacacatttcacaccttataaataatagggaaataccaaatacattcaagntaataattcttttacaattaatta

SEQ ID NO: 206722 - DNA, 455 bp, Glycine max
  unsure (1)..(455): unsure at all n locations
agcttctgtgtgcatctttttctattttttttcnatantcnngaaggccttgctttgtcaaatctcgtggtttaattagagcagccttgtattgatcttatattatcaccaacgatgtctaatgttggatgctggaagtaaatgatttcggaattcatcgtttttagggttatggcgataagttgaaaaaatattgccaataatggatagttattcatctttatcaaacttcaagatagacttctgttttgtgcaataggacttatcggcttcaaaattaactgtttgttctttttcaattgtaaatatagcggatgattattgactctgataattatactactccattgatatttctaattttcttgggttacaatgatatgcaggagacttganaataacanantgactggcgatgtggcatcactttcaaattgcattagtctctctctact

SEQ ID NO: 206723 - DNA, 453 bp, Glycine max
tatcacccttaccggtgattgaaaaaagcttttattgttattcaagagcatgatagtgcacggatactgttaactagtgaacaggttcttgagcgggttgacgacatcgatactgtatttggaaagacccaaaagaaagaaaaaaaaagtaaaacttccatatggaagaagaggtagatattgtttgatcttccatactggtctgatctagatgtcagacattgtattgatgttgtgcatgttgagaaaaatgtttgtgatagtgtcatcggcatgcttcttaaaatttaaggcaagttaaatgatggtttgaatactcgccaagatctagttgagatgagtatacgagactagttacatccaaggtttgctggtaacaaaagatacttacctccagcttgtcatactttgtccagaaaggaaaagataagttcttgtctgtgtttatgtcgt

SEQ ID NO: 206724 - DNA, 369 bp, Glycine max
  unsure (1)..(369): unsure at all n locations
ttgtcacgggaagccggaaggtccatattaccttntaattgtacacaggggcactacgcccccaaatgcgcaagtaagaagagataattttccgggctctcgtgtccgtaaaatgcattcatatcatgcatcgcataagcatctcttcataacatcataatggacatatcctgcatttgtccgttatcatattccagcctcacattttgcatgagtcatggcatcatcatgcatatgcgttcaacaaactttttgatctgcaaaatcgcataccatttgttttcatgtttgctcatccttgcgttttcctctacaaaacaaaaacaaaaaagggggaagcgtgaaactcacactacattcttagttcat

SEQ ID NO: 206725 - DNA, 445 bp, Glycine max
  unsure (1)..(445): unsure at all n locations
tcgtctgcagatccctcatctaagactaggcccgattatacttccctcttagatntagactaacttaaactgagtttcgtctgcagatctcttatgtaaaactagactcaactctagtagcttacgaaagtttggcctaatttagccaaagcttcgtccgtagatccctcatgtaaggctaggcctaaattaaacaacattattgtaacagcataattaaaaccaaaacttaacccgtagatccctatgtaagactatgtttggatcctgcttcaatcaagttcttaggcaacagtacatttcccaatgctaaagtcacctaactgtgcacacaaatgggtgatcagaccaaaaacatacaaacattaagcattgaaggaagcattgaacacagaanacataaccaattagatattatgtatttacatcagctgttcattagaaa

SEQ ID NO: 206726 - DNA, 364 bp, Glycine max
  unsure (1)..(364): unsure at all n locations
acaattctttctgtgaagcaaccatcttccaagntggatcctttgggtttcctctcttcctatcagatttgcaccgtttgaatcacttatcttcacttcgatcattgttcctcaggcgagttttcttggccatttatcggggattgttggtggatatgctatagcatggggtttgattcatgggatgagcaattactgggcactttccttgttgggatggattgcacttgtctttgttttgagtttgaagagatctgngcgcggtgacctaaactttcttgagattgaatctgttacggatccttccttaccctctgtgcggtttttggcatcaaacagtggcagaacactgcagatgagtgca

SEQ ID NO: 206727 - DNA, 476 bp, Glycine max
  unsure (1)..(476): unsure at all n locations
ctaagctggaagtataaataaaatggagatgatgaataatttgtgattagtgatatttattatcttagaagcggaacaggggccttctttgactgtatagatttctttacctattagctntggcctatcttaggtttacattntgcaaattcttatattattataatatttgatatatttgtaatgttttttattttatatatatatatatctctttatgttcgtgcatgtgtatgcatgaatgcgtgcatgctggtaagtatattcataaatatctattaaaaaaattaaaaaaaataaataaattgaaaacaaataaatttgaagcatattgtattagaacaacttanacttatatataattaaagttatttaagtaatttcatattacaggtacatataagtttgagttattagctaatcatgtgtcananataatgtttaatcctccccacctacaactnagtgataagtta

SEQ ID NO: 206728 - DNA, 460 bp, Glycine max
  unsure (1)..(460): unsure at all n locations
agctntgacaagacagtacacactgtctttttcttatattttataaaaagggaaagctactctaaagatacatctaacaatacccataattataacactgnnttcaagctggagctataaattatatgcaccaagcttggaacatataaactgaattctaggcccccttaaggatttagtcaaaatatctgttggctgatcattggaattaatgaattcagtgacaatctctttagatagtagcttctctcgaataaagtgacagtcaatctctatgtgcttggttcactcatggaagactgaatttgaagcaatatgaagagcagcctgattatcacaatacaacttcatttgcatcactttgcagaatttcaactcttcaagaatgtgtttgacccacataagttcacatgtaactacacgcatagatctatattcagcctctgcactagatctagca

SEQ ID NO: 206729 - DNA, 459 bp, Glycine max
  unsure (1)..(459): unsure at all n locations
ntganaacatgaagaacgaattgaaagagctcattattattctcnttttgtataagttctttgtgtaaatttttgtaaaatttagaaaaattctcaaaacactttgattatcttgagagaaaagactaagtgttgaaagtgtatatctgtctgtaagactatcaagtttagtcattgtgcaatcaaacaaaaacatcttctaatttatgttagagcccatagtgacttggtaggataaagaatattggttgtaacaagcttggtgtatagcttgattcaaggagccaaaagtgacagtgatagatacttataacttgttgaagttagtggaacttggtgtgttgccaagagttagacgtagtctcggtggttgagacgaactagtataaatttcttgggccttattctatttattntctcttctgctctntaaactaactcaaggtctgaattggatct

SEQ ID NO: 206730 - DNA, 444 bp, Glycine max
  unsure (1)..(444): unsure at all n locations
ttaagcaccgcggctgcagctccaggagctctgggggtttcttttttccttggctatccctgggtgggcctcccttcctctttcctttgccttcnntntttcatgtgctactcaccattgaaggacctnattgaagctcatagatccagcctccatagaagctccacaagcaagctttcattaagtggtaatcagaacacaagagcttcaagtaggtgctccttaaacctccattaattttttgctttaccttctcttccattgttgtttcttcattttttctgcatgtatctcctcacatgtcttgtgctaaatgttgttaacatgattctttagagtttccaccgattaaacttgctatagaagctagatttgatttctatggtcaaatttcttgtcttgtcttaaccatgaattgtatgagttaggtccttgagattgctt

SEQ ID NO: 206731 - DNA, 465 bp, Glycine max
  unsure (1)..(465): unsure at all n locations
tgtcagaggttgaagagaagtttggtagaacaattgagctattataagagaatatgttgataatcatttatcaatataaggagaaggtgaacctggctgctagtcatgggcagatgttggaagatgaataggcaaaggtattggctctgcaaattgaaagggaagcgagagagagagagggtgatggagttattgcatggggaagccatgaaatggatgaatagattcgctctcactctgaatgagagtcaagagtttccaaggttgttagccagagcctaggcagtggctgacacgcactcagctcccgacgaagtccatggtcttttcgattactgccaacacatggtcgaactaatgacccacataattaggagtcactaaggcatttgtgttgtatttatgctntgactctaacaagatgtgatgaaacatgtcgttctaatgaaatangatctgatttga

SEQ ID NO: 206732 - DNA, 394 bp, Glycine max
tgaaaaggattatataaagtcacaaccttccatattaagtgaaaaatggttgtaattatacccttcaagttcaaaggatgatgaacaatcaatgactgacattccaatacctattattgataatccagtagatcaaattaatcatcaaattcctaaaaatgatgaacaaccagcttaaaagcatgatccacaagataatgttgatgcaacattaaggatatatactagaagaagacaattagctattcctagagattatattgtatatttgcaaaaatctgactataatattggagctgataatgatcctgagacttttgaacagccatgagttgaaagagtaaattatggtatgtgctaaaacgatagataaatccatcaaagagtgagtttg

SEQ ID NO: 206733 - DNA, 451 bp, Glycine max
  unsure (1)..(451): unsure at all n locations
tatgctgcaaacatntataatagacctgctcaacagcatttttctttacagcagaataattatgacctttcaagcaacaaatacaaggggaaacaacatgttttaattctgttattttctaattcaaatttgcttgctgtttaatttacaaaaacaaacacccccccaattcgttactattttatcactatctgttatgaacgtttggttgaccattactcgttgggagacgacctatgatcacttcctagatactgcatttctaatgtttatttgattcgggtaccgcctcgatcactcttcctaagggcactcttaagatcattccaatactctactggaggatccccatgaatccttcgttccctaacaagggaagttcaccaatagagggcatactcttgaaagctaagggtagccaatggaacttttctctcttcgctaatatgat

SEQ ID NO: 206734 - DNA, 403 bp, Glycine max
  unsure (1)..(403): unsure at all n locations
taagcacctgcagctgcagcttaagaaatcaggggctatttttctccccctatcnctaacaagcgcccgctgtttttcttagatgatgacaaacttgaatatgtcaatgantcattgggaggtcgagccttgagagcagagacttgcttttattagacaatactgaaaatgcttaacacttaagaaaaaaatcaattcttatcatcatcatcatcatatatcatactatataatttgactaatgctagcgcaagttattcacaaatgcttatgcaatgcgagcgaatgtgctagttcatctccgccttttagaagtaacaaagccaaattgtttgaactatacacaaccatctgaacacatgaaaagtgaagggtgacttaaccatctcagttcattaatcat

SEQ ID NO: 206735 - DNA, 471 bp, Glycine max
  unsure (1)..(471): unsure at all n locations
tgcagctctttctacgtcctcacttgcttggttggagcttaaatacactagaggccatatactagaatcagaggtaattcgtaattcataggtactcaaggaactagtaaaaactgcattggagggtcaaagttaatagttggcgccgtgataaaggggatagtggatgcaaagaaggcattgttggagttgacatatgttagaaataggcaagataaggcagtatcttgggatacggtggatgtgcaagcatcagaggaacatggtgtaggttgtccaaaaaagtgtataggtggatgaagtgcaatggggataactattggtggtggtggttcctaatacatagcaagaggcaaaaggggaaagaataggaaatattatgttgatgtacaagtggatgtgcattaataccaattagaggcattagagtagaagtaaatgcctctatttatgaagtaaatntanaacatt

SEQ ID NO: 206736 - DNA, 446 bp, Glycine max
  unsure (1)..(446): unsure at all n locations
agctncactctgaagagtgggagtagtttcacccttaagtcaangncatggcctatcagagcacaatagtgtacctgataattttcttttgtctcatgttatagagattacactcctccctcaatccattgtaataaaaggtaatcttacttacaatatgtaattatcactagtttaattttttttacatataataaaaatgaaaaacaaatcattttgttaaatagaccgttctcatttagaatggaacttacaccaacctttggaatgttatcaagatcatttaatctaagagtgacaacaagtgaacaataggtatatctttgaaatgctgattatgaacacaagtttaataacctaaaaaataagaagacggcgagaacaaagcataatttaaagatgagaagctataaatcgataattactttcttataagaagtaattga

SEQ ID NO: 206737 - DNA, 469 bp, Glycine max
  unsure (1)..(469): unsure at all n locations
tattcagaaacgtggcatttgtgcgcaatacacaatgctcggtataccacaataaaatggtgtatcagaaaaacgtaatagaactttaatggatatggttacgagcatgttaatcaatttgactttacccatatctttgtggatgtatgccttgaaaattgtcatgtatttgttgaatagggttcctagtaaggcagttccaaagacacattttgaactatggacaaataggacacctagtataaggcacctggatgtttggggtttccaaacagaaataaggatttataatccgcaagaaagaaaattggatgcaagaacaatcagtggatatttcattggttatccagaanagtcaaaggggtatatgttttattgtcctaatcatagtatcagaattgtcanaactggaaatgcaagattcattgaanatggtgaaatcagtgggagtacaattctacaaaaagtg

SEQ ID NO: 206738 - DNA, 453 bp, Glycine max
actcagcttggagttaaaagctccactagacatctagaattttttttttaggcaaatttaatggactgaagagaagactcaaaatattactacttaccagatgtcattataattagcaagaacataaattgttaccagatatatatcaatataaagttattaagaaaagacatatgatgagtctaggagaaagtacatctgaacttattgacaaagcagtatcaatatcctgaattaacaacctagcttcctctgcatagtcctgcatcaacataagttaaccaaaaaaatatggctgaaaactgcaactaccacagggattattgacagtttgttaagagaagcaccttcaatttatgataaagaggttcattgcgtcgtgcacgagtaaatttcagtaactcatcaatgaattctaaattaactttcttgacattagagtcccgatgacac

SEQ ID NO: 206739 - DNA, 411 bp, Glycine max
gctttgtaggttttcaccctcatctcgcctactttagatatccttttccttcatttttaccaagtttctaccgaccatttgagttgtaatcttacttaatcaatattgaaatgaatttcaaccgattgtttttgttgtaatctcgtttaatcgcctttaaaataaaattcaattgatcgttcatgtagtaacctcggatattcatcaaaaaggaaaatttaaactatacatttacgttgaaagtgctttttaaatgagttgagaaataaccataggagactaaggctaatatcaactcacaaatcaagctttgtccgcataaagatcatttgaaaccatgtcaaggtgcaacgccttatagcggcctttaattattattggtaaaatgaagtgttaaaagtctaaatcaac

SEQ ID NO: 206740 - DNA, 461 bp, Glycine max
  unsure (1)..(461): unsure at all n locations
tagaacaatatactngtccttcatttgactgtcttgttactttcggccacgatcaacaaagtactttcgacacctactgtatgttgatttgaccaacgttattatgggtatgttgcgacaatccttcaaaaccttatcgatacattctgagaggttggttgtcatgtgaccatatcgacgtccttctctatcataagccatcatccatttttcctttgaaatgcgatcaatccatgttgctatggctggactcagttgacgaaatttttctaagttttgataaaaaaaaaatgtgcttgcactgagtgtaacctacataaaatttgttaggaacaacaattttaagtatatatgagacttaaattaacgtgaccatcacaaatgaaatcttacccaatttcttcagcatttctttttgttgtgcatattgaacttgcgattgacattgcttgctatgtgtc

SEQ ID NO: 206741 - DNA, 165 bp, Glycine max
  unsure (1)..(165): unsure at all n locations
cagcaagccacacgaagaggaggcccggatcgttttgcgcgccaacgcgaaagcccgagcaaagcgcaaggccgcatggaaaccaagcgaccgtagggtntcaggcaggaatgccgcaccggccagacacacggggaaccaaanctaagcacggacagaccaaga

SEQ ID NO: 206742 - DNA, 462 bp, Glycine max
tgtcatcgaagacttgtagtctaggactaatatttctattataaagcaagtttgtagcttgttgtgtttggttattcagttctttaggctacatattcttattttctaaaaaatggaaaactatcaatgatattattaagtcccattgaattagttattagcagcaccctctctcgccagcctatagatgattgaacaaatatttagctcggccagttgaagtatgactatcggattgatctatgagctgcaaattgtgcagatggttgtattcttagttctgttaatggctacatttgtcactagtgttctttgtttatttaattctgatacacttcagactttcttgatagaaaatgcgttatgcttctattttcgcttcactttctctggttttgtagaacgtgtactcttacaccttgcctagctgactcttcctttaaacacctctctttagtatgg

SEQ ID NO: 206743 - DNA, 462 bp, Glycine max
  unsure (1)..(462): unsure at all n locations
tttatgtgaaaagatgtgactcttcacatttgtattnttatttcaacgttcaaaggtattggtaatcgattaccaaaacattgtaatcgattacaactttttgaaaataattggaacgttgtaaattcaatttgaaaactttttcaaaacaattttgctactggtaatcgattacaacaatgtggtaatcgattacgagagagtaaaaactctttggtaaaagattttgtcaaaaactcatgtgctattcaaagttttgaaaaactttctaatacttatcttgattgagtcttctctttattcttgaatcttgagtcttgaatcttgaatcttgattcttgtatctaaacattcttcttgagtcttgaattcttcttgattcttatcttgaactcttgaattgttcttgattcacttgagttgttctttgattgatctttgattcacttgaagtgctctttg

SEQ ID NO: 206744 - DNA, 461 bp, Glycine max
  unsure (1)..(461): unsure at all n locations
agctnttcgattcattctatgtacccgttgtggttcacattgngtttcgggcatttttgttctcgttttgtttactttttataccccctgttgacgtgcttaaccattttacttagtcgtttctcgcttaacttaaaaataaaataaatttccaccgaacgtttgaattgaattatccattaacttcggttaaaataaattccgaccgttcggtcgtgccgtaaccacgttggaaatcaaaaaagaggtaaaaaataatataaataatcaaaaaaaaaaacatcttttagtaaaataaagcggaaaatcaatcggacgttttctctttgggatttctcattcttaatcgaattgattaataactaaagtgaaactaaggctaaaatcaactcgcctagtcaagctcgtccacaaaaataggcttttgaagttcgtcatttcaatttcccactaagtaaaat

SEQ ID NO: 206745 - DNA, 469 bp, Glycine max
  unsure (1)..(469): unsure at all n locations
tggttcgaggtacttacccgttgaagatcgaagaacgaatgaagaacgtcgaagaacggttgaaacctttgcaagattcctcacggaaaatgttacggaaacgtttcggaagcgcctcggcttagattttcttcacggaaacaatttttccaagcaaattccaaagagagagaagtgcctaaagggctgggatccttttcttcttcattttctcccctatttatagcaaaataggggagatgcttgccgcccagctcgcccaggcgagctcagctcgcccaggcgagcagggttgcttcctccagaagcaaccgccttctggaggaaccttctggagggcccaaatgggcctgggtgctatttgcacccnncattttactaagttcacccnctctgctgttnttttggtgattcttttttcgtaaagttacggaaacttacgaatttcgtaacgatacttggtttcttt

SEQ ID NO: 206746 - DNA, 463 bp, Glycine max
  unsure (1)..(463): unsure at all n locations
acctctaagtcacctgaggcatgcaagctttatggaagcataacttacaatggtgtatccttctcaaattccatgaagaggaacactggctttgtcacacaagatgatgttctctaccctcacttgccgcgactgagaccctactcttcactgcacttntcaggttgcccaacactatcttcaaagaagagaaagttaacaaagcaaaagatgttattgatcaacttggtttaaccaagtgcaaggatagcatagttggaagccctttcttgaggggggtttctgggggtgagagaaagagggttagcattggacaagaaatgctcataaacccaagcttgttgtttctgatgaacctacctctggcctagacttaaccacagcacaaagaattgtctcaactttgtgggagcttgcatgcggaggaagaactattgtgatgactatacaccaaccttcaagt

SEQ ID NO: 206747 - DNA, 401 bp, Glycine max
tcatcatcaccattgtagttcccaagtcttcacgaatccacaaaacaattgtatgcactaagcaatacccttcaaacctttgaactctttaatcttaagttcttaactttcaatcccaagccacagaaaaacctgcaaaaacctcggatctatcaaactcaatacacaaaaccagacatttccattacatgtaacagacaaaaacaccatgattgtaattctaacataacaactcacgagacatgacgcaacacaaactcacaaacaagagtcttgacagggaattatattgtgtacttacccttttggtcgtgaataacctgcttctgcaaaagtgattagcacggttcacagagagacacaaaatgagacccacattagattacgtgaaccccattact

SEQ ID NO: 206748 - DNA, 413 bp, Glycine max
  unsure (1)..(413): unsure at all n locations
agcaccgaggctgcagcttcctaaagggcgagagaattcntttctagaatcaacncactntagactccaatttccactaaccccaaatttggcttttccaaccctcaaaactcacactttccactcacaacattatcattctcacatttaaccctaagttaactctccccatcatctctaccagttttctatcaacaatttcagcatacatatatcacaaagcatcatcataaaaccctaaatcagcatgggtaattttactcacatcaaacatgtcagagttagcatgatttcaacaaattccttcacaaatgactaccctaaggcaataacctagtagaactacccatcatatcttccagaacccaacacccacgaatttcaagtgagaagaagccacccatacctgaaat

SEQ ID NO: 206749 - DNA, 470 bp, Glycine max
  unsure (1)..(470): unsure at all n locations
tccctcactactcctcactatcccctcgcaatatatctattgcattgcctcactaatctctcacaatacgcatgttacatttctctctctaatccctcacaaaatatctatcgttggacctaactaatccctctccaatttgttgcaatattcaaatgggggaaatttctagttatcccattcctctatcaaatttttgtgataattttaattcaattaatttttgcgctttcaaagaaattcttcaattaaattaaataaaatgttcaaatataataaacttcattcaaaataaaatttgcaagtgacaacatgtcttacataatcaaaatactcaatgtcttanaaaaccaaaccgataaaatgtacaaatatactaaaacttcatttaaaataaaacttgcaagtgacaacatgtctagatgaatngacgaattgtgatgtttgttgaatgccttacgatgaccatc

SEQ ID NO: 206750 - DNA, 419 bp, Glycine max
  unsure (1)..(419): unsure at all n locations
agcttctacttatgtggagggcgtttttttctttctttcttgtttccaacgcgagctctgaccactgttcttccttcccgcgatgcttcttttatgtcgcctgagtggctcatatcctaaaccatacttnctacgattcccttgggtttttatcagactagttatgccgccattgtctttgcctaaacccatcccgggttcataaccgttccccaacataactcgggccatcattaccgccgcctcggacagacaaggttgcccaaagagggagtccacggaggaaatgctgaccacctcaaaagattggaaagcggtttctaacgattcttctgcggcttccacataaggcatggaggatgggcagcttaccaagatatcttcctcgcctgacacgatgaccaagtgcccctccacta

SEQ ID NO: 206751 - DNA, 282 bp, Glycine max
  unsure (1)..(282): unsure at all n locations
tcaggactaanacagcattntaactaaaacaaaatatattatttttaaaacggggtaaataatcaaatttgcccctaaaagtgtcatgggatgacaaattatttccggaaagatggaaaatacaaatttagtcccaaaatgtggaaaaaaaaattgacaaattaatattcaagaaccaattccacaataagttatattcttcaaggatcaattcgaatttgtcattaaattctctagagaactaatcacatcttcaggacggagttagcatcaccccccccc

SEQ ID NO: 206752 - DNA, 467 bp, Glycine max
  unsure (1)..(467): unsure at all n locations
ttacatggctcttatcttgagaggcctacattcatattttgatcatgtacgtgatcaagtccttgctggtgatcaagttccgtcaatggactctctagttactaaacttcttcctgtgccccatgtgttgaaagatgaaaacttagctgaagtcgtagaaacatcagccatggttgcacctcgtagaagaggaggaagtcgtaacaacagaggaggtcgcggtggaaggagtggatgtcctcaatgcacctattgcaagaggatgggtcatacttaagaaaattgttactccttacatggctttcctgacaaggtagcaaatgtatctaaatcagataaatcagagtctaagttttctaatgaggagtacctagaatatttgaagcttatatctgannaatccaacaaccaagctcaatcctcctcggtaccatgtgtttcaacaacatgtatctctcaatctatgg

SEQ ID NO: 206753 - DNA, 461 bp, Glycine max
  unsure (1)..(461): unsure at all n locations
tgaagatgttcatgtctaatgagtcacatcatacgatatatttctgagacaaaacaaacaagtactgtaacattgttggtccattggacgaaagaaactttagcgaattgattgaatcttagctctgctaagttagtgagtttcattatattcgagcttactatgtaaacactctttaagtgattagaatccattttctatcaaacatatattgtntgtgaaagccaagagtgacttagtgacaaagaatacttgagtcttaatctcaaggaagattaagcctagtaccaggagtgacctanagagtactcattgtagccaaaagtgacatagagaataattgattgtaataaaagatttgattactggaacctcttaagggttgaaggagaacttgacgtagcccaagagttgggatgaactattataaaatctttgtattttcagtactacttctatat

SEQ ID NO: 206754 - DNA, 274 bp, Glycine max
ttgaagaaatgagacaagatgatgtgaacctgattatgttctgatcgtttgatacacgctaccgaggtttggatgacgcctcttctggtgaacgaagataagtcacggtagacgcccctcggattaccttgatcagtctgagattggtctaccaccgaacttatagagactttctcaccacattatcatatgtcacaagtttcttttattgacacacaacaccactacttatagcgtatctcgaacaaacgataatactatacatgggtcttct

SEQ ID NO: 206755 - DNA, 202 bp, Glycine max
  unsure (1)..(202): unsure at all n locations
tgtttgggcccttntctcttgtgtcttacaattatggttattctccttgcgngatcagcaccttggactaaactctataaatagatatgtcacccctttcatttgacgtttgctccattgagggggtaaccaccggatctgctctctttcttgcccttcagactagaaccctctgtgaccattaccaacaggctccatactt

SEQ ID NO: 206756 - DNA, 446 bp, Glycine max
agctttctagatggcgatggagaattgtttttactgaaaaagaacaaaacaaaggaaattattaaggaagacaaaatgggtaatagaataataccaccctgctggatcttctttgctgttgaccttgctaaaaacaaaactaaaatgataagctaattgatcaacattggacgttaaaatgaagtttagataatagttagcaaaattcacaattgatgtaaatgggatggtaccccttgcaacatactctatatcaatataggcattttatttgttgatcaaaaacataaattaattagcctcaattttttaacagaatcatacgattcttttggttatgcatgaacaatagtgcattacatattataataataaaaaagggttatatttgtgtactcgatgattattgcctccttggagtagaagttagggtctttatctcttac

SEQ ID NO: 206757 - DNA, 436 bp, Glycine max
  unsure (1)..(436): unsure at all n locations
tcttgatgggcctagatgggcccagggctgattaacactttctaaattgattagttcacccccattttgagtgtttggtttatttccttctgaaacatcacgaaatcttatggatcgcgtgacaattggctttaagcagctcaacgtgaccggaaaaaatctgcatgtcgacaaacaattgtccccggacgaaattagggtatgacaatgatatgttaagagatttgacattcctatagccaaatgtgtctagattcctaaagatttaattgtgaaagttaaccccattggatctaacctaaatttggtaccacctctctctaattgattntgtcttgtaggtgtgcctaaaagcaagggactcactatggtacttggatagtggctgctctaggcacatgatgggtgacaagtccaaacttactaaccttatgtc

SEQ ID NO: 206758 - DNA, 455 bp, Glycine max
  unsure (1)..(455): unsure at all n locations
gctttaatggaagtcaagagcatgattttgctccgattccattgactggngagcaggtatatcagcgggttgaacacctgaatattgtatttgggaagaccaaaagaaggataaccgtcagagttgcatatggaagaagatgtccattttctttgatcttacgtactggtgtgatcttgacgttagacattgtattgatgttatgcatgtggagaaaaatgtttgtgatagtgtgattgggacgctccttaacattcaaggcaagacgaaggatggcttgaatacccgtcaagatctagctgatatgggtatacgatcacagttgcatccaaggtctgatgggaagaaaatttacttgcccccagcctgccatactntgttcaagaaggagaagataagtttttgtcagtgtcttcgtcgggtgaaggttccacaaggatactcttcaaatatta

SEQ ID NO: 206759 - DNA, 391 bp, Glycine max
  unsure (1)..(391): unsure at all n locations
aaaaagcagcagggggattcttatttgtgcaaaaggatacttaccatcccagnnagcagagacttcatcgaaaatgctaagagtgaagcaacaaggccagtaactattgtgctcttaacaggaacttggctgcacttgtttatgtaagaaaacaatggtggcagcaacccattccttgccatagccatcaatattcttggctgagagacattaaacaaaacacattgataattttacctacaaaacttcaagagaaaggaacaaaaaaaattatgtgataactacgacaggcaatcacagtacaaatcagtaagaggaaatgctaaatatatttggaacattacaatattaacaaaatcgaatgtatacatctaggttacntgtacatatt

SEQ ID NO: 206760 - DNA, 457 bp, Glycine max
  unsure (1)..(457): unsure at all n locations
ntanaatttgaattaaaacgtttagaaactgttggtaatctattactcatatatgtgaatcgattacacagtgcaaactctgaattcaaattttaacagctgttgtaaatcaattttggccactggtaatcgattacatcctctggtaatcgattaccagagagtaaatttgttgaaaaatactttttaacttaaaattcttggccaaaccttctgctacttcaattggaattcccttcctatttaatataccctttctaagactctagagactgtcttgatcatgcatcttgaatatctttaatttctttgtcttgaataaagctttgagacgcatgtgaaactctggcatcatcaaaacattcagcttgatcctttgtccacacagaggactntgagtcctatgaaagcataaagacagaggactttgagtcctatgaaagacaaaagtgacgac

SEQ ID NO: 206761 - DNA, 296 bp, Glycine max
  unsure (1)..(296): unsure at all n locations
gagcggtacctggagatatgccgccgcggtcaggataccttgnnncccccacctggggcgcgcacccccaaaaccaagctttgataaaaantgatctaacctgggcatattcggtaagtgagaacctgagaagtacctaagaaagcaagcaactggcagtcaacagataaaaggaaaacaagaccacaaagcatggaggcctgcggtggccggccaaccgtgatatttgtgaatagagagagaaatggcctccgcgaatctataaccaagggagggaaaactgattacaaggctta

SEQ ID NO: 206762 - DNA, 359 bp, Glycine max
aatgaggagaattcgaagcaaactctcacctcacaccagtccataacatcaatctaaacgtgctcaaactgaatttacgcttaaaatctcgccgaatcagaagttgactctccaacacccaaatttaccctacaaacggctctttgttcactttggtcatttgttcttctctctagctcagcctaacctttctcacatgttccaaatggcattacaagctaagattaactcactctaacctctagatactaccaattccaaatttggccttgcagccctcaacaatacactcttattccactcacaacaccacattctcactttctaacactaggttaactctacccttcatctctaac

SEQ ID NO: 206763 - DNA, 451 bp, Glycine max
agcttccaagaatcaagatcaagattcattattcaagagaagacttaatcaagattcaagattcaagaatcaagagaagacttaatcaagataagtatgaaaagttttttcaaaaactgagtagcacatggatttttctcaaaacatgttttaccaaagagtttttactctctggtaatcgattaccagatcgttgtaatcgattacctgtagcaaaatgaatttgaaaaagttttcaaatgaatttacaatgttccaattgatttaaaaaaagctgtaatcgattacaatgttttggtaatcgattactggtgcctttgaacgttgaaattcaaattcaaatgtgaagagtcacatcctttcacataaaagccttgtgtaatcgattacactgatttggtaatcgattaccagtgattgtttctgaatatatcaaaagatgtaactcttc

SEQ ID NO: 206764 - DNA, 456 bp, Glycine max
  unsure (1)..(456): unsure at all n locations
ntgagggtgcgtagcccaccatcttttcatagtagagtatcgataatgtgtctaccatcacgatcatcgtctccctttccatcattgggggtaccacttgggccgccagatccctccaccttttgggcgtgttctttgaaagatccgtccccctttttgcaaatgttctgtagttgcatcctatccagaaccatatcaaaattgtactaatactgcctaacaaaggcaaccattaggtccttccaagaatggactcgggaagattccaagttagtgtaccaggttacagctaccccagtaagactttcttggaaggaatgtatcagcaattcctcatcttttgcgtattcccccatcttctgacattgngaggaatgtaccagggttcttgggacaagtagtccccttgtacttgtcaaagtccagcaccttgaacttaggaggggtgatgatatt

SEQ ID NO: 206765 - DNA, 294 bp, Glycine max
  unsure (1)..(294): unsure at all n locations
aaaatgcactgcagataagcacgtacgtctnangatagacctctacacgattacccggacccaaacctgagaattgaagagctgaagactggagttacttttgcctgcggtggttctggctctgaaccgattacactatgcatgactgtattgaactataaggactattttcctaatgcctttaaatgtggtgaggtgcggatccaaaaagagacttgttttaaatatgttggtcatatgtatgcatgtggtctatgtactaaaaaaaaatatttttcacctgtgctatttacg

SEQ ID NO: 206766 - DNA, 352 bp, Glycine max
aacacacgccagaccttattgctgcacaataagacaggaggtggaaattattattgtccgcacacaccaacagctcagcgggaccaaacctatttaccgctcaccccgcaacagacaagaaggctttgaaggcaagcttgcaagggcaggagacacaaagaacataacacgacttcacagccattcctccacgcacttagatcgcctttaaaggggtgaaacccttgcttgcggccctgaaaatgcgaacaaaagctaggaaactcaaaacgcggaggacactcacgccagtacccatcattattattatcatcaccattacaatgataatcatcgtctcctcggtaaagac

SEQ ID NO: 206767 - DNA, 465 bp, Glycine max
  unsure (1)..(465): unsure at all n locations
ccgggatccttaaagncacctgaggcatgcaagctnnttgccccaaggtgcttgttcatttattacgcccgngagctcgccgccataatatctgctatgaagaagtggcgccagtacctactgggccccaattcatcatctcactaaccatcggagtttaaaggaactaatgtcccaagtggttcaaactcccgaacagcaactctacttggcgcgattattaggatacgattataaaattcactatcgctccggcaaggccaatgcggcggcagatgccctatctcgcattccagacacaaccccaggacaattacttctgctaacaacaccaaatttcgtgtttttgcaggaacttcagacccaacttcaccagcacccagacttcattggctcttcgagcctctattaaccaagaacctgagaaacaccctgatagcatcattgttcatgattggatcatgc

SEQ ID NO: 206768 - DNA, 467 bp, Glycine max
  unsure (1)..(467): unsure at all n locations
tctaagtatgattgattgaaagagttcccgcttaatcttttccctatcaaccatatatatgtcttggtgcaaaagacttgagtctggggtaatatgtttgttcttttcaacatctcacccacttttgttgcttcattctaaatggaattagtgtttgattttgtattctatttgcttaatcaacttctacaccagtcacacatgactcacaaaaggccaccaactatatataggctcttaggcattttgaaaataagtataagaaattaaacaagtttctgtatctcttcaactcaatggccatcaaacaagttttttgtttttgtttttctagtttttgaaaactaaactgttttaaaaaaatagaaatcatgcaaacatgtccttagtgttattctttccaaattttccctatgttttactctctctnntttttgcacnattttctctaattntntcttcatcta

SEQ ID NO: 206769 - DNA, 444 bp, Glycine max
  unsure (1)..(444): unsure at all n locations
agctttgacttaagtgataagagtttttaacttgttaccanggcacgaatctcatatcatctttttaaaacatctctttcaacaatcaagaaatctactttcaatcttcctctcaacatcattcaactttttctatagaattttctgattctttttctcttcatctttctaaaagtttttgttcaaaaatttctcttctaagagaagttctttgttcaaaaacttgtgctattcatctttttcaggctcttctccctttgccaaaagaatgaaggactaaccgcctgagaattcttttatggtacaagttgagggtacatctacttggggattgttatactaagaacaagagagggtacatctctcgtggatcagttcaagtggagggtacatccactcgggtttcaaagagaacaacggagggtacatcctttgtggatcttt

SEQ ID NO: 206770 - DNA, 463 bp, Glycine max
  unsure (1)..(463): unsure at all n locations
tctatggaccatggagatgcagttgaaggcaaaggtttttaatataggggaggcaccatccactagggaataagccaaggaagaaggagcttcaccaccaagaattgccttggataagaagcttgaagaggatgctttaatggaggaaaagaaagagagaaggggggagcacgaaattgaaggaataaaagagggagagaagtggaactttgaagtgtatcacataagactttcattcatcaaagttacaacaagtgttacacatgcttctatttatagactaggtagattccttgagaagctntcttaagaaaacttccttgagaagcttctttgagaaaacttccttgagaagctagagcttagctacacacacccatctaaaaactaagctcacctccttgaaaagcttccttgagaagctagagcttagctacacacatccctctaataactaagttca

SEQ ID NO: 206771 - DNA, 262 bp, Glycine max
gaaaacatttactcagcaccaaaaaaccaaacccttcaaacaaatagaacaccacatgtatatcttcatgaaaaccaaaccagcacaatgctcacatcgcataactcacattatgaatcaaaatcggcccatcctctccaaggaaaacatgatccttctaaaaggaacgtgcaatcgcttcccacacaccctacccaaataaaataaccacaataacaataaaaggactctaatgcacataatatgaatgactatagagcac

SEQ ID NO: 206772 - DNA, 437 bp, Glycine max
  unsure (1)..(437): unsure at all n locations
ctatgaaactcagcttactggactcatcatactattggtagccttattcttcggcaaagaggaagaacacagtctttgttgcagcagctatgttgagtattgattttagcatccaaccatttgaatagatggtttatcaataccaaatgaaagtactcttccttttatctcatcatagaaagatgaaaagaaaaatagaaattgaatttaactataaacacatctcagctagtgactttattaatgaatctattacgtttgacaatatatgggatttaattgtagtttctattataaatttaggaaaactttggttgtttttgtaagaggtctgtttaacttaaggtagagggcaggagtaataacacagctntatccactactagaaattatagagttaatatcggttttcttaacaatatgagtttattaacatc

SEQ ID NO: 206773 - DNA, 432 bp, Glycine max
  unsure (1)..(432): unsure at all n locations
ngcttagagaggaagctcaatggttgattataatgacacagagagagagagagagagagagatagtgacatggaaattgatggagaatagggagaaaaacgacctttgaactgcgtctcacaagtttcacagtcattaaagttatgaaaagtgttacacatgtttctatttatagcatagcacatgggaagctttcttgagaagcaaggaaggtagcttccttgagaagctagaggaagaaagatttcttgagaatctaggggggctactcacaccactccaatagctaagctcaccctatgccagaatacatgaaaatacaatgggaagctttcttgataagcaagaaaggtctctttctcgggaaacatggaggaaaacttacttgagaagctagagggcggctactcacactcctctaatagctaagct

SEQ ID NO: 206774 - DNA, 464 bp, Glycine max
  unsure (1)..(464): unsure at all n locations
ttccattctcttggaagttcatcattggatgtgacttcttctggaggatcttcattgcttcctttatcatttcctttgaaatattgttcatgaatattcatatgttctaaagaatctgcaatatcatctagcatattctttcttgacaagatagcattagattcatcaaaggtaacatgaatggattcctcgatattcatagttcttttattatatatcctatatgctttgctttgtaatgaatatccaagaaaaataccttcatcagattttgcatcaaattttcctagattagctcttccattattaagcacaaagcatttgcaaccaaaaacatgtagatgagaaatattaggttntctaccattaaataactcatatggggttttctttanaataggtcttattaaggccctattcatgatgtaacatgctgtattgaccgcttcagcccanaaatactt

SEQ ID NO: 206775 - DNA, 436 bp, Glycine max
  unsure (1)..(436): unsure at all n locations
agctcnatcactactgagtaggcgatcnatanttttctcaagngccaccangaacaccactccatctgcaactttaatgcctcatactctctttcttgccttttcccaacgacccgattctccatgactgcttttttaggcattgcaatgaaaagaaccccatgagaaaactttgcacggattgaattcatattacatccttttaaaattttaatttctctgcagaaacggctccatttgttattggatgcatctcacgcctttcttggtgaatagttaggatcccccagctgtaggtttgaatcttaagtgactcctttttaaaacatgcaagagtttaagataagaaaanattaccatatgtataccattaaaataaagtccatcttactctattattatgatttcctttccattttaactgatatcatcaata

SEQ ID NO: 206776 - DNA, 463 bp, Glycine max
tataatgttacgtgatcaattcagagtgaacatgcttgtatgttcgttacaatgcaatcacgtagctcgcccaccagaaaaaaaacaacttactcagcaaagtcgtgagagtacgacctgcccaaactattaaaacatagtatagtaataaacaagacaaatattttgttacaaaataaaaacattaaacacccaacaaaactcaaccaagttggaaatataaccacaatcaaccataacaacaaactacttagcctttgtaagtagctaagtagtactgagtactgatattcaagtagcttgagaattcctcttccacccctcaatttgtctcttaataataacctcacaactcccaccaacaccagcagctgcagccttcctagctggcttcttcatttctgcagctcttaccctcagagaatcattgctcatcatctctttgaatctcttagcaatttcc

SEQ ID NO: 206777 - DNA, 396 bp, Glycine max
  unsure (1)..(396): unsure at all n locations
tctagtctncaatttgagcgtgtcgacatatttttcttttcattcggacatccgagtaaaaagctattgtcgtttgaatttgctacgagcttccattatcaacttggagcgtctcgatatattacgggactcaatcggacaaccgtgtataaagttattgtcgcttgaatttgctcagagcttccgttttcaatttggagcgtctcgatatattacaggacccaattggacatccgtgtataaagtttttgtcgtttcaatttgctacgagcttccgatttcaatttggagcatctcgatatattacgggactcaagaggacatccgattatgaagttattgtcgtttgaaattctcacaacttctgttctcaatttcgagtgtcttgatatatta

SEQ ID NO: 206778 - DNA, 352 bp, Glycine max
  unsure (1)..(352): unsure at all n locations
agcttgccgtcacagagtttttctactattctcttgngcggnggaacaagctacaaaaggagagatcaagaattgaagagccaatggttgatttggacggagataaccacatcatgaggaagcggtatgtgccggttatttactcaagggagaaattctgatactggggacagatgtcgtacaggatgtcacgacatcacgcttcataacatgcatattatatttgacagtgtgaacagtttaaacaagtaaataacacaagagaattgttaacccagttcggtgcaacctcatctacatctgggggctaccaagccagggaggaaatttactaaaatagtgttagttcgaa

SEQ ID NO: 206779 - DNA, 450 bp, Glycine max
  unsure (1)..(450): unsure at all n locations
tggctatctccttcttcactacatgaagaatcactcgtttgagtcctctctgcggctgtcttactaggtaaactccatcctctaaatttattcgatgcatacatgtggatgggctaataccaggaatgtccgccagggtccagcctatagccttcttatgcttcttgagaactgacaacaacttctcctcttgctcatcagcaagggaggcagatataatcactggaaaactcttgctatcatccaagtaagcgtattttaaatttgatggcagaggcttcaattctggtgttgtcggctggacagtggcagaaggagatggtttcttaccctttacctcataaagaaagtccgaggtatgtgtacttactgaaacatggntagttctatctgactctatataatcaatctcaagaggaaaacaccacaccaggcatgtactaatatcac

SEQ ID NO: 206780 - DNA, 458 bp, Glycine max
  unsure (1)..(458): unsure at all n locations
catgcagctngnntaatagacgcgttgctattttttattctttatacaagananaggaagaaaaacataaagatgtttgattaatttaggaagcaatnggtgccntttatgcacatgacccgcaacgtcatgaatttcatccatccaaggattgttctccttagaaggattgatggtcctcaaaacccttcacacagcactgttgcacttaaaccctgacccaaatgcaatctgccaagtcctatcacctttcttgatcctccccttggcttcagagtaggccaactcataccacaaggaactgctataagtgtttccaaacctatacagtgtcatccttgagggctccatgtgccaatcagagagctcaagattcttcttcaactcatccaacactgccctccctccagcatgaatgcaaaagtgctcataggccaatttaatatctggaatgtatg

SEQ ID NO: 206781 - DNA, 468 bp, Glycine max
  unsure (1)..(468): unsure at all n locations
tgtcgtcaaaattggctatntcgtatctagagtccctgtatttagtaattgagaaagatatataagaagaagaatattagtatatattgatctgatgatgataaatagagaaattaaagtgcttacgattcaccaaggaggaaatcaaagtgattagcacagacaacagtggtgacgatagcccagtagacagcaacagggatctcttgcatggcttctgccaaggctgggacgtccttcaagtcataacctttggtggaaagcctctccaactcggtgatgcactcaaccgcgatgagcaagttcttgaccaagctgttgtagtcagccacggcttgcctgttcctctccacgatgtgaactcggctcatctgtgccagtgatcttcccagatggtctccactcggagtctggacgaggtgccagaagtttccatactccaaagccaaagccgccagaaccaatatc

SEQ ID NO: 206782 - DNA, 401 bp, Glycine max
  unsure (1)..(401): unsure at all n locations
ntcaagagctgaagttagaagaacagaaggaggcgcgattctcttattcatncccancttcaagccatctttcgtatatatctaagtttataaaagctttcaaaacacttagtataccttgagagtaacaagatagtgtgcttaagctagattatagccttgtttgtgtataatcaaacatcaacaaatttgttgatttgttcaaagccaaaagtaggagggtttctaactcagaggcgaaaataggagaccatattatccctcaattcacacggcttaaatatcctgggactgtaattcacgatgatggcgaaattgaaggggatgtgaatcatcgcattccagcacgatggatgaaatggagaaaagcctccgaggtgttatgtgatgcacaggtaccg

SEQ ID NO: 206783 - DNA, 462 bp, Glycine max
  unsure (1)..(462): unsure at all n locations
agctnttcanatgggtaaaaggctcacattctctttcttctacatcatattcaaacttggccaaataaataataaagtcatctcgactcaaagaaagtcatatcgtctcatacaataatatagaacatatatcctaatgtcacatcctatcagagcgtggtgttcccgtgtcctctagcatgaggttcttcatagtcatccacctattcatctgctcccccgaacacaagttcaagatcatcacaggatccaaacacaacaacacacagggagtgagttatcacattcctagctaatagagaaacaagacaattaaatatacatattatataaatgagataccacttgcttaaacatagctcacgtaacttcaccacttcgcattcaaaattcactttttaatatcgatcacattacacaagaatcccacacttcgatcaagatataataacacatcaatta

SEQ ID NO: 206784 - DNA, 465 bp, Glycine max
  unsure (1)..(465): unsure at all n locations
ntatcatcacttgctgcacaagcacaagtcagagtaggcttgtgaagggaaagtaagaatttagtgccacgtaccaattaacaatcatatgtgctggggaaaattgaggaattaatcgacaatatagactgtgattttttttgtcaatacttggaataaccatcaataattgcaactggtggttacatcaatcaattatggttacagttgccgcttaatgatatgtatgttggtataggttagcgtctcgcaaattaattagtactattttaaatttttttattcatttgtggacaaggaaagcttgtgaaacattcttgtgttttagacgatatgaaagattttttgagataggaaaagaaaaaatgttggggaatttttgtgtctagaaattctagaagagaggaatgcgaaaatagggtcaaataatcccttgtagttatgatgttgtcattagtctatata

SEQ ID NO: 206785 - DNA, 281 bp, Glycine max
  unsure (1)..(281): unsure at all n locations
tgcagaatggccagacatgatacatgtgagggattggtttgtttcattgataacagggatgcccacattatttccatgacactaatgcaaatatgatgatttggaaatcttatgcaaaactggtcatgcatgcacctatgtggacgctcaagttgcaaatttttatggtcatgcgatgctagggctcaggattcattccctctattttaaaacaacccaatgtttncaaaatatgctcttttatcaattcgtgcattcctactcacccattttcgcatccg

SEQ ID NO: 206786 - DNA, 427 bp, Glycine max
  unsure (1)..(427): unsure at all n locations
agcttctagccaaatggagttaccttgttttaattcctttgatagcccttttgagccttgtttccctttccttgttatgaagctcactacaancnttancgaaaaaccatacatcaccatatccttaaggaattttggagctttggaattgttttgggaataagtgtggggggttttcgtttcattggacaatatgttttgttggctatgcttcatgatgtatcttgggccatactcgatgtacattgtatattggttaaatgttggacatgctgaatgaaatgttgttcctcataggctatagatgaaaaaaaaataatcgaaatataaataagaaaagcattatagttgtatgaataatatcttatatggtacaagaatgatgaaactcttgcgtctactcttcatgttcaaactgtatctttac

SEQ ID NO: 206787 - DNA, 466 bp, Glycine max
  unsure (1)..(466): unsure at all n locations
actcagctttatacttccgagtgagatctaacagaattgtttttaccctcacattctaactgaacctagaatattctcgataccctaacagaagtggttactcgttccctacttccatgcatgaatcttcacgctctcacgcttcatacgtagtcctccatgtacgttggggccttcgttttccttttgggcctctcctcgcgctgctgtgctcttacttcctgcaacccttcttctctattcgtaacaatagactactaaaactagaaggaataaatttttttaaaggtacaagataagacaaataatgaagataaaagtttggaatcttttattaatttattaaatataattacaactcataaatgacactgtgaaataacctagtaatccacaatgaacaatttaatatggttgttntaagtggtaaccaatttgctacacttcccaacctcaagaagctttc

SEQ ID NO: 206788 - DNA, 458 bp, Glycine max
  unsure (1)..(458): unsure at all n locations
accttaagcaccgcggctgcagctgagagaggaagagagaagggtgttctttttcttttanccgccgaccacagagtggtacctggagatatgtcgcggaggtcaggataaattgggacgtgtggtggcgcgccattgccaaaaaccaagcttgaccaatcctgaaccaacctgtgcatagtctgtcagggagaacctgtgatgtacctatacaggcgagctcctgtcattcaacagataaaaggaactaagaccacaaagcacggaggcttgtggtggctggccagttatgaacttgattgatatgtgggatatggcctctggcaatcgaataccaagggtgggtaatctattacaatgcttgaaaatgaagacaggaggctaatatggtctctggtaatcgattaccacggggtgtaatcgattaacatgcttgaaaacgaggtcaggaagccatg

SEQ ID NO: 206789 - DNA, 459 bp, Glycine max
  unsure (1)..(459): unsure at all n locations
tgaaccanaaccggtgagagtgtgaacttaaattgtgtgtgatctactagctgtgagtaataatctttgcatcaatctctgaatctttgaatgaaatgtataaacgagaacatgatgaaggccatgattgtacatacacaagccttttgaccaaaaagcttaccttgaatgataattatatcctttgcaccctttttgagctgagtgattttgtcataaattgaaccctgaacttaaataattatctcctgataccttgcttagattgtaggagagcatatggttcaagacaaaatttaccccaaatttgggggagtaaagtcagttagaatgcacagaanaaggtaaagcatcaacacacacaacaaatatgttgtatgtaaaaaaaaaaagaagaaagtgtgctgatgtaacaaggtctaaagcanatganagtgagcaagccaagtgattatggca

SEQ ID NO: 206790 - DNA, 424 bp, Glycine max
gaccataagtcacctgcggcatgcaagcttctccctataggctataataggtttagaagcgaagggaaaaaatgttgaaccctcctgttaattcgagatcacttgacattagtgaaaaaaatgcctccgtgaaaacatccaagccgaggcgctttcgtaacaattttgtaatgattgcgtgggtgatttccccaagaatgtcgatcgttcttcattcgctcttagtcgttcttcgtcgttcatcagagttcaaccatgtagttccaaaaaacgaactcttcaatccatggtatgtacccttagtgtgcctcatttgttgacacatgcatatatattcattcctttaactttccgaaacccctcttgacgagctttagtcacttacttaagtcactttctcgcctaatagacaaaataaaattaa

SEQ ID NO: 206791 - DNA, 454 bp, Glycine max
tgccacccagctagcccaggcgagcaaggttgctttctccataagcaaccgccttctggaggaatcttctggagggcccaagtgggcctggttgctatttgcacccccatttttactaaatacacccctgccttgtttttggtgattcttttttcgtaaagttacggaaacttacgaatttcgtaacgatacttgttttctttccgtaatgttacggaaccttgcggattacataatcatccccttttttgacttacggaatgttacggaacctcattatttgtgcaacgatgcttccttttgatttccggagtgtcacggaaccttacggattgtgcatcaatatgacagatgatgggtgccaagcacctcataatgacgaaacacaagttgcatgccaccaagcaaaggtctccgaatgaacttatggtatgacagttgcccctctttactt

SEQ ID NO: 206792 - DNA, 284 bp, Glycine max
  unsure (1)..(284): unsure at all n locations
tcggatcttaagcgacgcggctgcagctgagcggacctgagggtttttattttttngaaccacagagcgccgtgttaatttgagcgtgcaccatagatgtgntgaagggcgaatcgcagacaagatacgatcatttgaagtcctatagggttatagatgggtgatttcgagcgtctatatatataagaattcataatcatacccctatgtgtatagttcccaccatacgaatttctgattatcatcggatgcacactcatcatcgcaccgggagggagttctca

SEQ ID NO: 206793 - DNA, 431 bp, Glycine max
tgaatcggacatccgtgtcaaaagttatgagcattcttatttctcgagagcttccgttgctcaatttcgagtgtcactatatgtgatgcgccaaaattggacattctagttaaatgttatgaccatttgaatttctcaagagcttccgttgttcaattctgagcgtctcgttatgtgaattgcctgaatcggacatccgtgtgaaatgttatgaccatttgaatttctcaagagcttccggtgttcaatttcgagcctctcgacatattattcgcccgaattggagatccgagtgaaaagttatggccatttgaatttctcgagagcttccgatgtttaatgttgagcgtaccaatatattataagcctgaatccgacctccgtgtgacaatgtatgaccattttaatttccgagagcttcgttgtcaatt

SEQ ID NO: 206794 - DNA, 347 bp, Glycine max
accgggaccatagagtgactgagctgcagctgaagagagaggggtagttttttttttattgctgcctatataagagctgttcttggttgcgttattgacctaagtttttgcacaatactgatatcttagacgcacgcctcttgtaacagcaaagattttcaacatgaagctggaaaaatgaacttcttatcccctctatctatttcagggctgcaagaaattgcgaggcggagtaactctaaggtatgcatgacttttgcacctaaccaaatatttatctggttttcttgaagaacaaattgcatggttttcgataacaggttgaatttatgtctatcttaagcacc

SEQ ID NO: 206795 - DNA, 331 bp, Glycine max
cctatggacttactaatgcctcacgattgtcgttagtcttctattaccaggtctgtgcctataagtggggaagaattattgaaggagcttggggatgtctttcccaaagacaccccttatgggttacctcctttgaaagggatagagcaccaaattgatctcattccaggagcttccctaccacataagccaacatatagaagcaatttggaagagacaaaagagatccaaaagcaagtggagagctcgatggacaaaggatgggcgagagaaatcttgacgccatgtgctatgcccgtcatctcgtagatcaaactctatctcaatttct

SEQ ID NO: 206796 - DNA, 294 bp, Glycine max
  unsure (1)..(294): unsure at all n locations
tgcatggcatacgcagaacgaanannaaccgcgccactcccaccgcgcgtcgaggtttaagatgaatcaacgcaccacgttgttgcctggtgatgttttcaaattttccataagggttcagctaaacactacaccagatccaacactcttgttatactctccctctcaaaccgtacctagccatagctgcttgcaagagggtcaatcatagaagacaatgtaatctcgcatacacttcttcattgatactatagaagaagtaacaaaaggggccacttcttgtgtacaagaact

SEQ ID NO: 206797 - DNA, 275 bp, Glycine max
  unsure (1)..(275): unsure at all n locations
cgatcacgaaaccatatgtcagcggaacttgtataatttgtattnccagtacccctgggactgttatatatatatactaatttatcttcgctgatcaaaaaaaaagattgcgaatttacgaactcaccaatgcataacgaataacaaaattatgcacaaatgaacatcacactcttttcaggtatcatctcttaacattctctgcaatccaaactcttacatccctaacatgaatacactcctgtcaacatataactcattgcataacatgaaac

SEQ ID NO: 206798 - DNA, 391 bp, Glycine max
  unsure (1)..(391): unsure at all n locations
gatagacaatangcaattctgcttttctatctactgggtttggccaggccagggcacttcttgaatggcataaaatatcacgattctgtggacattgtggagagaaaacagtccctatggaagctgggagacgtaaacagtgctcaaatgaatcatgcaaacagaggatatatccacgacttgacccggtttgccatcttctgttctaatagttgagtgatcaatggatgatcaggctntgctgaatttttgtagtcaccttaacttatgcacgcggccattatgctagtaattgatcgggagaatgaccgtgcccttctgagcatacaatccacaattgtacctagaatgtggagctgcttagcaggttntatagaggtgcatgcttgac

SEQ ID NO: 206799 - DNA, 416 bp, Glycine max
  unsure (1)..(416): unsure at all n locations
tcaaataggtgcaggggataaattattatcaaaggctgcctttctggctaantggagaaaataagaaaaacatggccatgatcattttcaccttatgtaattaatctaacagtctaagaatgatgtaaaatcaggaaattaaaaacagtcattctttcacaagtgagtttcacacaacttaccgggacaaaacaaagtcgttgacttactgcacaatgatttcttttagacagactaacctcttctctctttnttgtgattcatatttcattacttgaactgatgttggccttcatggagccaacattttcacaataattggtatgcaacatttcaagggtgttagacctataattcatccggagatgatcattngcgaacattctggttcttgctagacgaattgagctgcttaa

SEQ ID NO: 206800 - DNA, 389 bp, Glycine max
  unsure (1)..(389): unsure at all n locations
ttacattcatctaccctaaataaatcctanaacatctatttgtcggtgccagtaaaccagcgaatctagtgtgagaatcaacaaaggtcacataatacttaaaaattgaactagaagaaaatgttgtaaggccccacagatcattaaaagaagttcaaaatgtatagaatatatagtaacacaaggagaaggaagacaatgagacttgccaagatacgatgcgtacataaatcagaaaaaaacgaatctaaccataggaagattataaagtctgaaaacaattttcatggcaacactacgatgagcaagtctagaatgccaagtggcaaaggaaagtggattacaaacaacaatatttacaacaagaattntatgtagactatttatag

SEQ ID NO: 206801 - DNA, 424 bp, Glycine max
  unsure (1)..(424): unsure at all n locations
agcttcgctttaactctctggccgtagttatataatattttacnctnnnncctgtcaaaaaatatattttaactctctttttttatttaatcttggctttatactgcattttctctacacttctttatttattttttctttaagggaaatttctcaatctttttaaatctctttgaatatatttttattcttttaaatatttgacatttgcatgatggaatttttgctgttgctgttatttctgcgcatttcaactactaatgtgtttaaagagaaattttacaattgaggaaaaaggcgtattagtgtgccacaaaaataacaattattttatttttctagaattctaattcacacgtttgtttgtttttcttttttctagatggtttttctatattattgttgtaattttaagttcttacac

SEQ ID NO: 206802 - DNA, 461 bp, Glycine max
  unsure (1)..(461): unsure at all n locations
caccanatggacctgggngtcgctcagcttcatcatatctttcttttactcatcacctctatcatatctaataatttttacatttctgtctaatttcctttttacttcattctagtaaatttctaaggcatccattgcctgagaaatctcagacagtaagtacacataaccataacgtgaataatcatcaataatggtgataaaatatctttcctttcgaaaagaactaacatcaaaaggtccacaaatatcagtatgtacaatttcaagaaactgagtgcttcttgtagctcctttctttgtatgttttgcttggtttcccttaatacaacccatacaaatatttagatccgtaaaatctagaaatgtgacctatacctttatgccacaagaaaacagatcgttcattcacttacactacgttagtaccaacattatgatgcagagctaatacagtttca

SEQ ID NO: 206803 - DNA, 465 bp, Glycine max
  unsure (1)..(465): unsure at all n locations
ctaacctcatcgtctctcacagtctgtagatgtgggagccaatccaatccttgtgttcggactctcagccacttatgatagccgccgatgatcccattactgcttcccctaagctctctgtcctttcttcacgccgcatcccatgccttgcgaactccttggagtaccctcgcgtttgtggtcactgaaaccccatgcgatgaaaggcatgatgctttcgtctgatggcacttctctcatggggtagccaagctgtcttatggcgaggacgggattataattaatacaaccccttgtttccatcaagagaacatttggacatccttcgcatgaagatagaatcctgattcttccttccttctagcgagggaaccaattaacagacgcccctccatgctagccaagagttggtcccaattcgcctttcctttntcgacgcacgagcggtgaccttgtagcggatag

SEQ ID NO: 206804 - DNA, 383 bp, Glycine max
  unsure (1)..(383): unsure at all n locations
agcttagccctagaggggatggacactttttgttttggagaggatcaataacaatgcctataggttggacctcccagaagagtatggagtcagcaccatttaacatttctgactcacactccttttgcaggnggagctgatattgaggaggaggaactaacagatttgaggtcaaatcctcttcaaggggaaggggatgatgcattcctccctaggaagggaccaatcactataaccatgagcaagaggctccaagaagattgggctagagctgctgaagaaggtcctagggttctcatgaaccttagggtagatttctgagcccctgggccaaggttgggtccaattatcttttgacatattatactaagaatgcattatat

SEQ ID NO: 206805 - DNA, 451 bp, Glycine max
  unsure (1)..(451): unsure at all n locations
tgcaagtaccaagaagattggacaccttagtactatcatcttttatacactctaagcactgacggtanacaccggtgagggcatgatcatcatatcaggggaaggttaatccttcgtaagagccgcgggagattctatccccgtgtgtagctcgtaactaccctcacccacattgtcaaagcttatcaaccctctcaaaaggggaggacccattatcagagacctcatgaggaacctcttccgatgaagaatcttcgatgggaaccacttcccgctctaccatgggttgtcgaacagaacccctagagtcacttcctctcatgcctaacgcagaatanaaaaaagacatagtagggaaaagggggggtacctggagtgattatcaatcgaataaggaagaggataaattgaagatcactcatatatcacacagtgtcacacctggaaatat

SEQ ID NO: 206806 - DNA, 463 bp, Glycine max
  unsure (1)..(463): unsure at all n locations
agctntgcagatttggccttcgccagtgttatgatcattgtgggtccgaaaagagggcaaattgatcatcctactaggacgactgagaaaactggggcaataaagagggtgcggatgaacgacaaacccatgctgtgattgccattcctgtacggccaagtttcccaccaaacccaacaatgtcattactcagtcaataacaaacctcctccttacccaccacccagttatccacaaaggccatccctaaatcaaccacaaagcctgtctatcgcacttccaatgacgaacaccacctttagcacaaaccaaaaacaccaaccaagaagtgaattttgcagcgagaaagcctgtagaattcaccccaatttcagtatcctatgctgacttgctcccatatctacttgataattcaatggtagccataaccctagccaaggttcatcaacctccacttttctga

SEQ ID NO: 206807 - DNA, 438 bp, Glycine max
cacacggacctataaaactaagcttgagccaaatctgctaccatgacctgacttatgtgagaatgccaatccttaccctcggaagcaaaaaaaggaaagaaggaaaggaaatttccaatcaaagagaaagcaaaaaaggaaggaaaggaaattcccaatcaaagagaaagcaaaaaaggaaggaaaggaaattcccaatcaaagagtgggagaaagagaaaaaagaaaagaaaggaaattcccaatcaaagagtgggagaaagaaaaaagaaaagaaagaaaattcccaaccaaagaatgggagaaagtaaaaaagaatgaagctcctggtcaaagaaaccagaagaaatgtgccgagaggtccttggaccagacgatatctgaacaatacagaattgtcaccaaatgaacaaaagaaagaaaaggaaaccatgacct

SEQ ID NO: 206808 - DNA, 375 bp, Glycine max
  unsure (1)..(375): unsure at all n locations
agcttacagcagattgtagaatgtttttttacctaaaagnanaataacttattgccgttaacctagggaattaaaaaaaacttaatggttgagtgttttgtaattgtgcacaccaaaagtcacccctatacaggaatatgttagtcaccatttggtctcccaaaaggctgatgcttagattgccaattgggcccttattacaacttgaactaaacctactaaatcccttttagttgattaacccaaatcatatttatggtcagccaactatacaaggattgggccattatttatacaaactaaacactctaaaattgagacatagtggtgtcatttattcctcctccatttgggccatgatacaactcacaacct

SEQ ID NO: 206809 - DNA, 456 bp, Glycine max
  unsure (1)..(456): unsure at all n locations
tcttgattcattctatgtacccgtagtggtccacattgtgtttcgtgcatttctattctcgctgtgtttactttttataccccctcttgacgtgcttaagccattntacttaagtcgtttctcgcttaacttaaaaataaaataaatttccaccgaacgtttgaattatattatccgttaacttcggttaaaatcaattccgaccgttcggtcgtgccgtaactacgttggaaatcaaaaagaggtaaaaaataatataataatcaaaaaatatctttttagtaaaataaagcgaaaaatcaatcggacgttttctctttgggatgtctcattcttaatcgaattgattaataactaaagtgaaactaaggctaaaatcaactcgcctagtcaagctcgtccacaaaaataggcttgtgaagttggcatttcatttctcctaagaaaatggatcat

SEQ ID NO: 206810 - DNA, 454 bp, Glycine max
  unsure (1)..(454): unsure at all n locations
gagctggcctcggagagagagggatatgtgtaacccaatctaaccnccatggtttgcttcaaggtaacctagatactaagctttttccttggtagnttacctcaccctcgcccacccctctgactctggaaancaaattggatgttttacgcttcctttgaaaaaccctatagacatagactctatgaaagttatcctttttctgaaatgggtgctattttcgtgaccttcaatgaaccccggtcgcattggcgggatcggaacttcaaaaagagttcccttttgaagaacccgaaataccctctagccttttcatgtaggaacaagagtataggactcacgatatcgccgccactatatttctgaaatccattgaatattccttacatttgacaaatatagactcgctgtggaccgacacgcatgaatgagaagagaccttatgagacacaaa

SEQ ID NO: 206811 - DNA, 448 bp, Glycine max
tcggaagacagtgatgaggtacaagccctaaaggcatttcttgaaagagcccgggtagtcgaagagaagttcaagtccatagccatcaaagtctgaaaagagtatgatgaactaagggacgtcaatatggccacagctgaagctctggaacgagaaaccaagaaggcccgaaaggaagaacacgaccaaagcaaagttttgaggggcttcataaggcagcaatagtgagctcaagctccgaagaggtgaaaggaatcatcacgggtcaaaggcatgatcttgaaggacgagctaaaggtttgccttatgtcgaatagaaatttgtcccaacagttaagcgagactgaagggaatatgtgggccatcatcgataagtgcaaagagaagctaaatctagcggcgactcacgagcaaaggctataggatgagtacgccaagatatccacag

SEQ ID NO: 206812 - DNA, 233 bp, Glycine max
  unsure (1)..(233): unsure at all n locations
gttttaatattgcatgtagatcgatgcgaatccttgacatttnnccaccacatgagtttcgccgatgattacggtnttgcataaaatattaaatatctttattgttgcggacgcacattgtggttatatattggatcatgatttataaccatactaacaattttgcgcttngtgtttaataatctattaattgatgatagaatgtgaaaattaatataagttttttggaatgt

SEQ ID NO: 206813 - DNA, 382 bp, Glycine max
  unsure (1)..(382): unsure at all n locations
ctgtgtaatcgattacacatattaggtgatttattacattgtttgnctctgaaaaatctaaagatgtaactcttcaaacaaggtttgactctttcaaatgggtgttaagctcttctaaaacatataactcgtctgaatgactttcttgaccagacatgaagagtctataaaagcaacgctctgctttgcatattaaatcaactattccaagtctttctaacaatctcttacaatcctttacaagccttgagtctctttgaacttcttcttctttgtaccanaagttttctgaacgtttctcggtttctaaaccttgaaaacttgcgctattcatccttttcattctactctccctctgccaaagagaaatcaccaaggacta

SEQ ID NO: 206814 - DNA, 405 bp, Glycine max
  unsure (1)..(405): unsure at all n locations
agctaagaatataccgaaggcctttagtttctgagcatatatattagatagctctcaacgttgctatgagaaacaactgtattctatactancctcgtggagtgagacatcactctctctctaattttgaataaaatgatgttgcaacttttgagtgaaatagagtctctgctaaaatatgtggtattcctatgttttggcttcagactatgacaccaaagcaccgaaatgtgttggcctgtgagcagattggtctgctcgattatagtaaatgatttgtgcgattttaatgctataaaataaaaataaaaatggttatatgaaggggtcaatcgtcatctactgttntacatgcacaaacatcggacggacccttatataaatcgcctaaaatatgatatgttt

SEQ ID NO: 206815 - DNA, 452 bp, Glycine max
  unsure (1)..(452): unsure at all n locations
ngcaatatagagttcaagtgtcactacgttgattttggttcataacttgttagtccactaaattatgttggccattataggttacactgcatgcattagaacctactgattgaagattatttagctgctaggctctttttttttaggcacatggacatgcattcttgtcttgtgctacacaaaaaagtcatgttaatattgctgtctccgagctctcttgttgagtcctcttaaatttcgcaggaaaagtggaccaaataaatgataaataattgtcggttgaaagaatttcagcaaaactttgaaccatagtaaaatgaaattttaatttctacagaactagcaagcacacatttgaattgtagttttccatttcgactcacaaaattccttttataaaattgcaagcctgatgttttgaatgcttctatttaaagtaatttatatagaat

SEQ ID NO: 206816 - DNA, 298 bp, Glycine max
  unsure (1)..(298): unsure at all n locations
ctcaccactatgcatacacactactctcctaccttcatccattgtccgggaacacaaactacataaaccaaaataagcatgcaaggcggaacacctactccctatggcttcattcatataaaccaaacggggaagacctcaatcgcactctccgtttacccatggacaaaaggcacaaactctccatccgtctcacgctgcacgcactctanttccatttccactcttcggcgggttcaaaaaatggctacgactgcaatgtgagggaacaccaggcttagaggccgagcaccgataa

SEQ ID NO: 206817 - DNA, 119 bp, Glycine max
  unsure (1)..(119): unsure at all n locations
ttaaaaaaaagaaagagaaggaaaagaaaaggaagtgagtatataaactnnaagaaataattaagaggaaaagttgaatatttaatattatattatataataaattataaaagaaggag

SEQ ID NO: 206818 - DNA, 454 bp, Glycine max
agcttgccacccagcttgcccaggcgagctatgttgcttcctccagaagcaacagccttctggaggaatcttctggagggcccaagtgggcctggttgctatcgcacccctattttgctaaatacatccccttgccctttttttggtgattcttttttcgtaaagttacggaaacttacggatttcacaatgatacttgttttctttccgtaatgttacggaaccttgcggattacataatcatccccttttttgacttacggaatgttacggaacctcactaattgtgcaacgatgcttccttttgatttccggggtgtcacgaaaccttacggattgtgcatcaatactttctttcggtttccagcacatcacagaacttcacaaattgcctaatgatgggtgccaagcaccttaaaatgaccaaatacaagttgcatgccaccaagccaag

SEQ ID NO: 206819 - DNA, 465 bp, Glycine max
  unsure (1)..(465): unsure at all n locations
tcttcaccccatnttcttccccccccgccctgggattcatggttntgaagccctaagtcaccattcttttcattntttttttcattttagcactcttactcactccctacaagtaagtgcacttccccttgattctttggctctccattgatgtattttggtgccttagttgtttagtttttgccaattacgtgagacaatgtatgctaggatttatgcttgttttgtttgaattggaaagttgtgtgggatggccttaggcctaatgtgaattctgaaataattgggcatgccacattgctcccattccccttttgttcatgtctaaatatacatccaccaagtgctcaataaaatgcctcaatggcatttgcgcatgagtttgtgaaatttagtttgtgaatttgacttgtgcttatatggctgtcattcttgagtgtatgggcagcttgtaggagctagaat

SEQ ID NO: 206820 - DNA, 233 bp, Glycine max
  unsure (1)..(233): unsure at all n locations
ttaggagaaatctaactcttgcatncnaccctcaccacttcgatatccactgatgatcccattggtgtttccttaattctttatactttcttagtgaccctttgaaaaattcctgcattggggtcactgaaaccccgcgcgatgaaagaggtggtaactttttacgatgtgctcctctcatgggggacccaagttgtcttatggcaaggacgtgattattaattgtataaccc

SEQ ID NO: 206821 - DNA, 384 bp, Glycine max
tctcaaggatgtaatgtgttaaaagagagggataaatgattaaacaaaggtagcatctcaaccaaaccaaggagaagaagaaaaaaacacaaaaaaagaagacaatattataggtgacttttgtgtcttaaattttgtgtcatgttaatagcgtgtagtaagcaagtgtttcttgagggcgagccctggtgcagcgataaagttgtgccttggtgacttgttggtcatgtgttcgaatctgaaaacagcctctgggtaatggggtacgaagtttttttctttttttttttatgatccttcttccgtcttgagtggttttcagcaagttgtgaataaaactatgcactctattagtatctattatagtcccgaaatctatggcat

SEQ ID NO: 206822 - DNA, 433 bp, Glycine max
  unsure (1)..(433): unsure at all n locations
agcttagttnttccgggcttcgtagttttcggtaaaaaatagtattacaactaagataagttatagttaatatgtaaatgtattatttcacaagatatatgatcatacatttagacttccattttcaaatatattatcatctttaactatttaaatatcatatacaataacacaaccgacaaaagttgctctgttctattttcttgggctgcactattcttagaatgtgggtttgagtctaattcaaccctacaaaattggcttgtaaggtgaggggtgcccccacttatatactctatcttggccttatctctggccgatgtgggacttggggttctttcccaataactatggacaaagcanaataaacgtattaaactntntttcttctattgctcttctatttttatttagggatttaaagggtcattat

SEQ ID NO: 206823 - DNA, 462 bp, Glycine max
gcagctgtagcttctgtacgaagcttcttaaggaagcttcttatgatgtgagctctactatgagaggggtgtgtggagctaagctctagcctttcaatgacgatttatcaaagaagcttctcatggaagtgctctcaagatagcttctcatggaaggcacctaacctataaataaaagcatgtgtaacacttattcgagctttgatgaaagaaagtcgtgtgagacacaactcaaaatgcaacttctctcgctttttcttccttcgatgacgagcaccctctctctctttctctccctctttcttatgctccattgaagcatcctctctgagcttctttgacgaggctcatcttggcggtgaagctccttcttccatggcttattccttagtggatggagcctgctatcacctatactcctttgacttacgctgcatcttcatggcggataatcaccattaa

SEQ ID NO: 206824 - DNA, 421 bp, Glycine max
  unsure (1)..(421): unsure at all n locations
agctnttgtatcaagtttgagcgtctcgatatgttacgggactcaatcggacttccgagtgataagttattgtcgatagaatttgctacgatcttngttgtaaatatcgccgtctcaatatgttacgggactcaatcagactttcgagtgaaaagttattgtcgttcgaatttgctacgagcttcggttttaaatttcgagcggctcgatatattacaggactcaatcggacttccgagtgaaaagttcttgtcgttcgaatttgctacgatcttcggttttaaatttcgaacatctagatatattacgcgactcattcggactttcgagtgaaaagttatggtcgtcgaatttgctacgacgctccattttaaatgtagaacgtctatatatattatgcgactcaatcggacttccgagt

SEQ ID NO: 206825 - DNA, 429 bp, Glycine max
  unsure (1)..(429): unsure at all n locations
tgcagcanatgctaacgacaataacatttcactcggatgtcttattgagtcccgtaatatatcgagacactcaaaatttaaaaccgaagctcgctgcaaacgctaacgacaataacatttcactcggaagtccgattgagtcccgtaatatatcgagacgctcgaaatttaaaaccaaagctcgtagcaaattctaacgacaataacatttcactcggaagtccgattgagtcccgtaatatatcgagacgctcgaaatttaaaaccgaagctcgtagcaaattcgaacgacaataacttttcactcggaagtccgattgagtcccgtaatatatcgagacgctcgaaattaaaaccgaagctcgcagcanatgctaacgacaataacatttcactcggaagtccgattgagtcccgtaatatatcgag

SEQ ID NO: 206826 - DNA, 393 bp, Glycine max
  unsure (1)..(393): unsure at all n locations
tttctggctctaacaaattagtagagttgctgatgtttgctngcacataaactancctttcgcttattgaccgacctacagattaagcacttaattttttttttgttaggatttacaaggggtttcgagaagtcttacaacttatacaatttcaaaataagcttatagcagagagggaaagaaatatttcaaatatggctggcaagtttgtcactccaattcttcaaagcttcttgtatatataccctttcttcataaagtgggtcttgtctctaaatgagcttatgttcttcgtgttagcttgcatttgagaggtatccattggtgcattaatgtgagcagtaatgcgcatccaatcatgttgataaacctctttctatctttttaaccata

SEQ ID NO: 206827 - DNA, 455 bp, Glycine max
  unsure (1)..(455): unsure at all n locations
ntattcaagacaaagcaattaaagatattcaagatgtatgatcaagacaatctatagagtcttagaaagggtatattaaataggaagggaattccaattgaagtagcaaaaggtttggccaagaaaattaagttaaaaattcttttacaagaaatttactctctggtaatcgattaccagaggatgtaatcgattaccagtgaccaaaactgatttacaacagctattaaaatttgaattcaaaatttgccctgtgtaatcgattacacatatatggtaatcgattaccaacagtttctgaacgttttaattcaaattttaaagcttgtaatcgattacacatatactgtaatcgattaccagagcagattttcagaaaatattctcaacagtcacatctttctatgtggttcttgaatggctatcaaacgcctatatatatgtgacttgagaca

SEQ ID NO: 206828 - DNA, 423 bp, Glycine max
  unsure (1)..(423): unsure at all n locations
agcttcacaaaagtttgtatggcttgaatcaagcaccgaggcagtggtacaagaagtttaatgagtttatgagcaactcacgattcaaaagatgtganaggaccattgctgctatgttaaaaaatatactaatagttatgttatccttgctgtgtatgttgatgacatgttgattgcaggatctagtatggcagatattaacaggttgaagcagcagttggcagaaaactttgaaatgaaggatcttggtccagctaaacaaatccttggtatgagaattcttagaaacagatcagaaggaattttgaagctgtctcaggagaaatatatacacaagttgcttgacagggtttaccttggagattctaagaccaggaatacctctttgggatctcatttgaagatttcaaagaagcaatcttt

SEQ ID NO: 206829 - DNA, 459 bp, Glycine max
  unsure (1)..(459): unsure at all n locations
tgctctanattacattgatgttagtatttatgggatgttgttgtatgtcattttcgctttaagaatagtatcccactggtaaaactaactttccaaatgtttgccttcgcaggaaatggccccgagaaagcttgcctcaaagaggtccaggaaggacaaggcaccataaggaactagttccgcttcggagtatgatagtcaccgctttaggagcgcggtacaccatcagcgcttctaatccatcaaggggtggtcgtttctccgggagcgacgcgtccagctcagggacgacgagtatactgatttccacgaggaaatagggcgccggcggtgggcaccactggttactcccatggccaagtttgatccagacatagtccttgatgtttatgccaatgcttggccaacagaggaggccgtgcgtgacatgagatcctgcgtatgggtcagtggatcccg

SEQ ID NO: 206830 - DNA, 347 bp, Glycine max
  unsure (1)..(347): unsure at all n locations
atagatgataaagacagtttatagagttttataatgggaatattaaatattgatnnnnaattaaatatgaaaaggaacaaagcttggcctagataattatattatatagttttttatagaaaatttatgtattgagtaactaattacttaatgatgaaatcttttataaaagtgttaaactgaataattaatgtgataataatggaattaaaaattgtagttgtaaaaatgataaatattgatagtaaatctaaaatgatatattatacggaatagtcagttaaccgttgaatattattatttattaaaggttagacttaattttaaattaaatttataatatatat

SEQ ID NO: 206831 - DNA, 472 bp, Glycine max
  unsure (1)..(472): unsure at all n locations
gacactataccactactaagcttagaagggnntctattctggacatatcatattgtcaaatatatatactctggcatggggatatgttttacttaaattttcagatatcagaaagttggagttatccaccccttacggatactgctgatgctgctaaaaaggttcatgaagcacttgctgcccgagggtggaaactgaaggtatagaatgcaatttgaagttgacaatatactttttacaaaattatttgtttgtctaaatgggtaaccatttgtttgatcggaagacattgcaatacataatattttattcagaccacaaataggaaatatagatggtatgcatgcaatcattttcagcgtagcaattctgaatgtgtaatgtaaagtaaagcatattttttggcattctcaagaatgaggcaaataaaaaaaatatatcgaaaattctccctctattatctttgacaatg

SEQ ID NO: 206832 - DNA, 407 bp, Glycine max
gggtgatgaagaagggcatcccactgtaacagttaacatcattaattgtggcgaatatagcgagggtgagaattactttttctatctttagaacacttagactttattcttaataagcatggtgaagattaaatcccaaattattttgctgagagttctgtctccaagtctgtaaatgccgatcataaagaattgtgtttatttttcctcttcaattgaatgtgtgatgctctggttcagtatttcacttttaaatatatttgatctcttgatttgaatccttatacttgcagatggaaagaaggtaaataaatcaaatatgtgacagaataataaatcttcataagacagaaggaatagggagaaatactactcattcacatcacgaagctcgtcatattctgata

SEQ ID NO: 206833 - DNA, 484 bp, Glycine max
acctgaggcatgcaagcttgaccaatcccgacccaccccgggtatattctgtctgtgagaacctgtgatgtacctaaacaggcgagctcctggcagtcaacagataaaaggaacaaagaccacaaagcaaggaggcttgtggtggctggccagctgtgaaacttgattgatgtgtgagttatggcctctggtaatcgattaccaagggtgggtaatcgattacaaggcttaaaaatgaagacaggaggctaagatggtctctagtaatcgattaccaggggatgtaatcgattaccaggcttgaaaacgaagtcaggaagctaagggagcctctggtaatcgattaccagcctgtgtaatcgattacacagagggatgggtcactggtaatcgattaccaggtatgtgtaatcgattacacacgtgcattttgcatatttcatgtcctgaggctgtgtaatcaagtttacctctgtaatcgata

SEQ ID NO: 206834 - DNA, 460 bp, Glycine max
  unsure (1)..(460): unsure at all n locations
aagcttctcaggaagctacctangctataaatagaagcatgtgtaatgcttgttgtaactttgatgaaagagagtcttgtgagacatacttcgaagttcaacttttctccctcttttcctctctctctctttattttcctccattgaagctttctctctaagcctcttatccaaggcactctcttggtggtgaagctccttcttccatggcttattccctagtggatggcgcctgctcttacctcttttcctttatcttctgctgcatctccatgatggaaaatcaccattgaaggacctcattgaagctcaaagatccagcctccataaaagcttcacaagcaagcttccatcacatgttgtataattcttcttaatcccattacactacagatgctcttgtatggcgtccaatatttgtcgtcttccgttcaaacaatatatacaaggacaacaaaaa

SEQ ID NO: 206835 - DNA, 475 bp, Glycine max
  unsure (1)..(475): unsure at all n locations
agcttggacttcctatgttctgggaacctcttctttcttaagtgtacccaaacccaatcacctggttcaagcatgactttctttctgcttttgttggcttgccttgcatagctcgcagttttctttttcaattgagccttcacttgctcatgcagcttcttcacatactcagctttagcctgtgcgtccttatgcttaagcatagcaatgttaggcataggcaacaaatcaagaggagtcaaaggattaaatccatacactatcttaaatggtgaacaattagttgtgctatggacagtccgattataagcaaactcaacatgaggcaaacatgtttcccaagaattaagatntttctttaaaacagtcctaaacagtgtacctaaagtcctattgactacctcagtttgaccatcagttngtgggtgacaagtagtagaaaacaacaatntattaccaatcttactccacaagg

SEQ ID NO: 206836 - DNA, 431 bp, Glycine max
  unsure (1)..(431): unsure at all n locations
cactaatcataattagtgaaattttggctccataatttggctccacaaattcaatttcaaattcaagtgaaatttgaatagaaattcaaatttccctccacatttgtgtgacacttaagctataaataaaggctatgtgtctgcatttttttcaactctgatcatttgagaattacactttaaagttcagacctcatgtgaggcacaaaatatcgtgccccttctctccctctccctccactcatcttctcctaccttcaagctattatccatgtaatggcatctccaatcatctctctttcttcttcattccgctgccattaaacttcaagaagcaagggactccattgatgaagaagatccaagggctacaagctccccatggagctacatcananagtgcttaaaataagtgtgcgactcaacttcta

SEQ ID NO: 206837 - DNA, 307 bp, Glycine max
ccacgagcataggatcgcggacgagtatgctcaagtatacgcagaaaaagaagctagaggaagggtgatccactctttacaccaagaggcaaccatgtggagggaacgggttgctcttaccttgaacgggagtcaagaacttcctcgcttggtagccaaggccaaggcgatggtggacacctactccgcccccgaagagactcatgggcttctcggctatcggcagcatatgatagacttaatggccacatactacaaatcgcaggaaacttgatggctctccaccttgctagaacgacttcttttt

SEQ ID NO: 206838 - DNA, 318 bp, Glycine max
  unsure (1)..(318): unsure at all n locations
ttctcaaagaagcttctcaaggaagttttctcaagaaagcttctcaaggaagctacctagtctataaatagaaacatgtgtaacacttgttgtaactttgatgaatgagagtcttgtgagacacacttcaaagttccacttctctccctcttttattccttcaatttnatgctcccccctctctctttctctccctctttcttttcctccattgaagcatccttccaagcttnttattcaaggttcatcttggtggtgaagctccttcttccatggcttatttcctagtggatggcgcctcctctcacctcttctcct

SEQ ID NO: 206839 - DNA, 479 bp, Glycine max
  unsure (1)..(479): unsure at all n locations
agcttcagaccaaagcaactcanaatctttgtttcttatacccctcaatctanagggctttcaaggtttgagaagtgaaaatgagaatggtgtaaacttggagcaaactctcatctcanacaagtctatatcatcaatctaaactcgctccaactggttgtacgacgaanaccctaccgaatcaaaatttgactcctcaacacccaattttaccctagaaatggctcttgttttcactttggtcactcatattcctcatttgcacagtctaagctttctcataagtcctaaatgacatttcaaactaggattaactccctttaacctccaaataccactaaatccagatttggccttccaactctcaaagcctcactctgtttccactcataacaccacattctcactttctaaccctaggttaactctacccttcatctctagcagttttccataagcaatntcagcacataaacatc

SEQ ID NO: 206840 - DNA, 378 bp, Glycine max
  unsure (1)..(378): unsure at all n locations
gcggaacaaangcatgtctcttcagttgacatatgaacccaaattacataacggcagtactcgggtaaaatcatttttagttcgatattgataaaaaaaaaatggagacagcaacgttgggttcgtgtaaaggttatgtgcacgaaatacctctgaagcttcggattctatggaagcattctcttgtcaccctacaactttagctcttacaagttcgtgagggctattaaaatgttgaacaatgccagtgtcgcttatttgaagcagacatgtgctgaagacctagtatattaaacaaaaactataaaaacgatggctggcctcaaaagtaacatctaatatctatatgtgcggatccagtaatggtcaataatagtg

SEQ ID NO: 206841 - DNA, 308 bp, Glycine max
  unsure (1)..(308): unsure at all n locations
caaaaccaagctntggaccaatcccgacccaactccgggcatatgtctggtcagtgagaacatgtgacgtacctaagcaggcgagctcctggcagtcaacagataaaaggaaaacaagaccacagagcaaggaggcttgtggtggctggccagctgtgaattntgtgtaatatgtggattgtggcctctggtaatcgattaccaagggtgggtaatcgattacaaggcttaaaattgaagacagggggctaagatggtctctggtaatcgattaccaaggggtgtaatcgattaccaggcttgaaaac

SEQ ID NO: 206842 - DNA, 483 bp, Glycine max
  unsure (1)..(483): unsure at all n locations
tactaagcttctacttatgtggcagggcgggcttccttcaccttcttgtcncctacgttaacttngaccattggtcttccttcccgcgatgcttcttttcatgtccgcctgagtgggcttatagcctaaaccatacttcccacgatttccttgggtatttatcaagctagttatgccgccgttgttttttcctaaacccatcccgggttcataaccgttccccaacataactcgggccatcattaccgctgcatcggacagacaaggctgcccaaagagggagtccacggaggaaatgctgaccacctcaaaagactggaaagcagtttctgacgattcttctgcggcttccacataaggcatggaggatgggcagcttaccaagatatcttcctcgcctgacacgatgaccaagtgcccctccactacgaatatcagcttttggtggagtgtagaaggcacaanctccactgagtggatcca

SEQ ID NO: 206843 - DNA, 432 bp, Glycine max
agcttgtggagcggcacgggcccagaaactgtgtctctcattagcaggtccattccgggccggtctgggaagtcatgcaggcttcggtggtgcaaccagctgtcgccccaggtcgagcaccgggccttcacaccggaagaggacgagaccattattcgggcccatgcccggtttggtaacaagtgggccaccattgcgcgcctcctctcgggccgcaccgataacgccatcaagaatcactggaactcaaccctaaaacgcaagtgcgcgtccttcatgatggcgggtgatgaagccgtcgccgtgagtccgaggccgctcaagcgatccttcagcgccggcgcggcggtgcctcctcccggaagcccctccggatccgatttcagcgagtccagcgctcccggcgtggtctcggtctctccttcgcacgtg

SEQ ID NO: 206844 - DNA, 461 bp, Glycine max
  unsure (1)..(461): unsure at all n locations
tcaccttacaagntgatattgtgggtttgatgtattttcttaagtccaaattctaaaataatatcagagcttatcttagatctattctttggtcacctgcatcttagccctggatgtaacaaggtgtgttggaaagccgccttttttttttttgaaaggcagaaaatatatatatatattaataagaaaaaactacagttccaagggtactgatgataaacatacaaaggcagctgtgctgccagcctcccaaaaagagaacaaaaacccttcacaaagcccaactacaaggtatgacacctgattaatcaaaggcctccattagatgggatgaccagtgattaaaagggatattaaaacctntaactctagctttagaccangaccaagccaaaaataaggcatcatccataactnttggaataataaaaggaaagccctgaaaatgagtaaatcctatg

SEQ ID NO: 206845 - DNA, 267 bp, Glycine max
cctcactaagcaaaatggatcatttttaaggtccaacgccttataatgatcgacctttaagtaaaaaagaatcactcgataagaaagaactacgtaggtctgatttcctcatcgcaattggggaatacgtaggagcaaagggacacacccttgtcgaccacacaaaaagaaaaatataaaaagggcttaaaggatataaagacataaaaaagggaacataaaaatcaaagtcatgtttgcacattcgattaaaggctgtcgtccctt

SEQ ID NO: 206846 - DNA, 384 bp, Glycine max
  unsure (1)..(384): unsure at all n locations
acacaatagcacgagcgaatagagaaatatattnttatgcctaagcttggtnggtagaaagacccaacatttctacctactgttgtcattttatttaccttgcactttataggttttagcataaaaggtagtttaaattctgtttgaaattatcaatcatacatgttctttcacaatgcttcatttctgaacttaattcaggctaacattagttccctgtgttcgatacttcgattcatccattttaaattttaaatacttgacgatccggtgcgctttctggcgaactggatttcccttngaatatattgaacaaagaanaaatggaacaaaaagaactacatgagagatcgaacacttaattaaagaacttaaagttaaaca

SEQ ID NO: 206847 - DNA, 253 bp, Glycine max
taggcattccactttggatagggtgacctatacacagtcatgttgagtgactgcaactgctcaccaaaatgactatgaatttcttatgatatcttattagcattaacagattgaggggaattcctccttgtcttaacccaagtgggtattgtgttctacatcaaaatacagggttgtttaccaaccattcttggaactatcacatcctggggaggcatatggaatgacatttgacttgttagccccactttca

SEQ ID NO: 206848 - DNA, 428 bp, Glycine max
  unsure (1)..(428): unsure at all n locations
gactacttatgggcgccattattatactcaatatgactatgaagtatgatgccatcacattttcctcctgatttggtataatctggtttgagaatcagttagtgacctcaatttttttttccttaaagaacgtggatgcaggtgcagcaaaggaactgatggcatatttggtcaagctgcagtcctcactttcagaagtcaatcagtatgttaattntagtacactaacaatagagaaaaaagaactattatgtgatgtaagtcatgatattgataaccnncatttataagaaaaatttcggccctagctaagagatataacacacnnattgtatggtaattacgttatgcttgatngaannttgatagntntaaaaattcacttactagtaatcaaaataatcagactcaagacanaattgttcaat

SEQ ID NO: 206849 - DNA, 467 bp, Glycine max
  unsure (1)..(467): unsure at all n locations
aactcaactttacttatgggacggcgggcttacacacttcttgatactttcgagcnngaccactgtcttcttcctgcatgcttcttttatatccgcctgagtgggcttatagcctaaaccatacttcccacgatttcctttggcatttatcaggctagttatgccaccgttgtccatgcctaaacccattccgggttcgtaaccgttccctaacataactcgggccatcattcctaatgcatcggacaggcaaggctgcccagagaaggagtccacggaggaaatgctgaccacctcaaaagactggaaagcggattctaacgattcttctgcggcttccacataaggcatagaggatgggcagctcaccaagatgtcttcctcgcttgacacgttgaccaagtgcccctccactacgaatttcaactttnggtggagtgtagagggcacaactcccactgagtgga

SEQ ID NO: 206850 - DNA, 450 bp, Glycine max
acctgcggcatgcaagcttgtctatcatttatgcgagactgttattcttatgctagctatcatcgccaagtaccaagaagagttaggtctagccacggcccacgagcataggatcgcggacgagtatgctcaagtatacgcagaaaaagaggctagaggaagggtgatcgactctttacaccaagaggcaaccatgtggatggatcggtttgctcttaccttgaacgggagtcaagaacttccccgcttgttagccaaggccaaggcgatggtggacacctactccgcccccgaagagattcatgggcttctcggctattgtcagcatatgatagacttaatggcccacataattagaacatcgtaggaaacttgtatggtctctcagaccttgactagatacgactttctttgtgaaataaatgagttggcccatgttctacttcaaaa

SEQ ID NO: 206851 - DNA, 471 bp, Glycine max
gcttctaagagggagctagtattagagggatgtttttttttctctagcttctcaaggaagtcttctcaaagaagcttctcaaggaagttttctcaagaaagcttctcaaggaagctacctaatctataaatagaaacatgtgtaacacttgttgtaactctgatgaatgagagtcttgtgagacacatcttaaagttccacttctctcccttctttattcctttaatttcatgctcccccctctctctttctctccctctttcttgtcctccattgaagcatccttccaagcttcttatccaaggttcatcttggtggtgaagctccttcttccatggcttattccctagtggatggcgcctcctctcacctcttctcctttgtcttccgctgcatctccatggtggaaaatcaccattaaaggacctcatttgagctcaaagatccagccttcatagaagccccacaagc

SEQ ID NO: 206852 - DNA, 413 bp, Glycine max
  unsure (1)..(413): unsure at all n locations
acctgcggcatgcaagcttaaggattgcggcaagttatttcttaaattattcaaaaaataattattaattgatgtgattaaatttgaaataaaataaagaacaggacaccatttaccagaacgtgtcaaattaatttttgtactattttaattacataaatgatatatatatatatatatatatatatatatatatnatatatatatcatatatataattggcatgaataaaaatattttttttctttttatcgaatttaaactttaaaaagaggacattttttctatacggaacatacaagtaacatcaacattggtttatatatatataaatatattataaaaatattactttagaaaaaaaaaatacgttaaaattgcataatcctgataatcaattttataaaaaaaaa

SEQ ID NO: 206853 - DNA, 90 bp, Glycine max
  unsure (1)..(90): unsure at all n locations
accgcagcagcagctagaaggaagcacccggagaaagatatgatagagagggcgggcgccccgcccccgcgccgnaccgcccacccggcc

SEQ ID NO: 206854 - DNA, 377 bp, Glycine max
cttaccctcggaagcaaaaaggagagaatgaataatttcaatccaaggaaaataagagaggataggaaattcccaatcaaagaatgggagatagaatgggagaaaggtaagaaagaaaataagaaagctcctggtcaaaggaaccagaagaaatgtgcacagaggtctttaaaccggacagtatctgaacaatacagaattgtcaccaaatgaacaaaaagaaggaaaggaaaccatgacctaaaatggtcttctccctttaattgccaaccagaatcagtgcgctagcgacttgttcgcctcgcgcacaaccataacagaaaagggaaaagccaacatataaaatcaaatgccaaaacacactaagccgaaaacca

SEQ ID NO: 206855 - DNA, 479 bp, Glycine max
  unsure (1)..(479): unsure at all n locations
gcttattgtggactcaccgagaagatgatttttttattgtgaagcggagaaagatagcaagaaatgctagttttttcgatggccattggaagaataaagtccaggatcctaaaagggggaattattattcacattagaagaatacggtgctagctagccgtatgagcctggggtcttctcgttgctacatatatactctatatatcagaagatgcaatcttcaatgtgttacagattaaatattcaaatataattgctacccgtattagctgttgccatgacttactcttatggatcgatcagacatcaccacaccacaattatcccatggaaataagtcatttttttatattaaatatagtgtaagacaattcacaactactcatcatattcnatcacatgaattagactttcttagcatgaaaataagctatgataaattgatatttcacaccgataatataatatagctagatgat

SEQ ID NO: 206856 - DNA, 468 bp, Glycine max
  unsure (1)..(468): unsure at all n locations
ctcaagcttgataanggcatatattttccattcttgtagagattttctcctttaaacatcagacatgtatcaatgtaatcatgactgactctggagtatggacactngtttccaggtcttataagttacaactaattgttgatcttaatatatcaactgtactacagattgaagttactttgcaagatggaagaacatttgaggggaaagtcataaatgctgacctgcattcagatgttgctattttgaagattaattctgaaaccccactgccagaagctaaatttggttcgtcaagtaggctacgtccaggggattgggtaatagccatgggctgtccactttctcttcagaatactgtcactgctggaattgtaaggtgtgggaaaaaaatcangcgataatagttgtccctattttatgctgctgttattttgttgtaaagtatgccatttcacattgatacgt

SEQ ID NO: 206857 - DNA, 472 bp, Glycine max
  unsure (1)..(472): unsure at all n locations
agcttctatgagtagaatatgttactatgtcttatattaaaaaaatatttatgtttaaaagatgaattatgattcataattattctaattaaatataaataataaaatttatatataatatattattggatcataatttataattttatgtttgtattttcagtcaatacatttattaaacaatctagcataacatttatgaactaaatttaaaacctttatttaagattctttcatgtaaaagatattttcctaggagtatatatatgatatatgattatgttgggtcatatttatgatatatgattatgttgggtcatatttatggtatctcaaggtctcaattgacagttttgggttctttttttgtgaaaatattctctntcttaattcttttcaatgtacttcactgtgtaatgtaattcccaatctatactactgtggactttgtgctttgatcatatcactttac

SEQ ID NO: 206858 - DNA, 364 bp, Glycine max
  unsure (1)..(364): unsure at all n locations
aaaaattaacagataaataaaattatcatatttcttttacttttaaaactaaaattttaattttaatcttttaaagacaaacttgtcccacacttaaacataagaagaaaatagttattaaaaaattaaaatggaagaaccttactcctggatcaatgattcgggtcttacccgcgtgaatcctgattctgaatctggaacagcggcgtccgtccgatcggcatgtaaggtacgaccatgaatcagtaactgacatgtatcttatcattcgtgcaactatcatctgtatatagagcacaacacgggaaggcgttgactggctggtactacnaatattcatccgccacgtggcaccatatgattg

SEQ ID NO: 206859 - DNA, 466 bp, Glycine max
  unsure (1)..(466): unsure at all n locations
agctnttaccaaagagnttttactctcttgttatctattaccagnttactggaatcgattaccagtagcaaagtttgttttcaaaagctttcaaactgaatttacaacgttccaattaatttcaaaatggtgtaatcgattacaagattttggtaataaattacaagattttggtaatcgattaccagtgtgtttgaacgttgaaattcaaattcaattgtgaagagtcacatcctttcacaaaaatgctttgtataatcgattacaatgatctggtagtcgattaccaatgataagttntgaataanaatcaaaagatgtaactcttccaatggtttttaagtttttctaaggttataactcttctaatggttttcttgaccagacatgaagagtctataanaacaagaccttgacttgcatttagaattcatcacaacaattattaccatcccttacatctttg

SEQ ID NO: 206860 - DNA, 461 bp, Glycine max
  unsure (1)..(461): unsure at all n locations
actaagctcgctggggcttctatggggctggatcttgagctcaatgattcttttgatggngaanntccaccatggagatgcagcgaaagacaaaggagaagaggagagaggaggcgccatccactatggaataagccttggaagaaggagcttcaccaccaggatgagccttggataagaagcttggagaggatacttcaatggaggaaaagaaagagggagagaaagagagagggggggagcacgaaattgaaggaagaaaaagggagagaagttgaactttgtgttgtgtctcacaagactctcattcctcaaagttacaacaagtgttacacatgcttctatttatagactaggtagcttccttgagaagccttcttgagaaaacttccttgagaagcttctttgagaaaaccttcttgagaagctagagcttagctacacacacccctctcataact

SEQ ID NO: 206861 - DNA, 458 bp, Glycine max
  unsure (1)..(458): unsure at all n locations
agctntacattcctccttgggaattttttttatattagctataaaactgctcaatgatctatccaccaattgctttgcaagctgtcccacttggacctcaagattctttatggcagacattgtgctcttctggttggacatagaaacctgcataaactgagctagagtctcttctagtttcattgtgtgatcataaagactaggcccttgttgttgtggccttgttgatggtccaccttgatctctattaaactaatttccaaggtggttcctccattgtccctgctgttgattatattgctggccatgttggaatctagaaaatcctcctgcattaaaattatttttgggctgatttcccatgtaattgacctcacgagtggcgtgttctttaataggaatacagcatccaaattcatgagctccncacagatggtacatcctgcanagtgaagtat

SEQ ID NO: 206862 - DNA, 444 bp, Glycine max
  unsure (1)..(444): unsure at all n locations
ttctatggaggctggatcgttgagcttatttgtgtcctttaatggnngatttccaccatggagatgcagcggaagacaaatgagaagaggtgagaggaggtgccatccactaaggaataagccatggaagaaggagcttcaccaccaagatgagccttgggtaagaagcttggagaggatgcttcaatggaggaatagaaagagggagagaaagagagaggggggagcactaaattgaaggaagaaaaagggagagaagttgaactttgagttgtgtctgacaagactctcattcatcanagttacaacaagtgttacacatgtttctatttatagactaagtagcttccttgagaagctttctaagaaaacttccttgaaagcttctttgagaaaactttcatgagaagctagatcttaactacacacacccatctaaaaact

SEQ ID NO: 206863 - DNA, 461 bp, Glycine max
  unsure (1)..(461): unsure at all n locations
agcttgaacgtatataaagaatgtttatgatntgtttaatacggcacgggcataattngataggaacggggtttaacaccaatgggtttggttttttggtgtgaaacgatctttattttgtgagtagaatttaggtgtgatgtgaggggcattactatgagagacgtgaaatatggaattgaaaaaaaaataaaaatgaatggagatatgggtgagggagtgtagcttaatgaagagggtgaagaagacgtggactctaacaaataacgttcttttcctttacacttcattcatgcggcctgatcgggcccggaatttgttttttaaacgtaaaaatatgtaatccgaactcaatcttggttgaagaaggatattcttacaacaacaagttgactcttttgtatgtgacgaacaaattgaacaatatttctgggtttaattgcttttcagaaatcatttct

SEQ ID NO: 206864 - DNA, 403 bp, Glycine max
  unsure (1)..(403): unsure at all n locations
tttttcaataaaaatcatcctataaaactcaaccaacatttaaaatggaccacaaaaatctttcaagtactcaattagccaaacctggactgctataaatctatctccactaacttcatacataagaaaaagttccatgcaatgtgccaactgaacccaacaatngttcaccttgatatctattgagttactgtcaaaatatattggtaccttgataaagggatgaagatcattatgcttcctaacagggtagaggcaataatagtattttgtaatgaatcaacatttgtcttgtggacattttcacctttgcaaacatcatcagctggaaatccgtatgaatatgagccctgcaataaaataaaaacataaattcatctaaattcacatagaaacaattaaa

SEQ ID NO: 206865 - DNA, 219 bp, Glycine max
aacctcctcgttgcttccgactattttgcctgctttctaaacgtcagtcggccttctcttggcctcggaaggctacaataacatcctttaagcgcaggttgtccaatgactctttaaaacctgggatgtagatttgacacctgctgtatctctgctatctgactgcgacaatcccgtgcgtgctggactcaactggttcttaccaatcatcctgactgg

SEQ ID NO: 206866 - DNA, 333 bp, Glycine max
  unsure (1)..(333): unsure at all n locations
tagctttgcttctacacgtcttatttactatctttngtatagaaaacattctctaaaacttgtatatcccccaatttatagttattttgtaggaatttgtatataaatcttgttttgtttgaatagttgtctttagagtatctcccatgtgatttaatgataaaatttgcacaatttcaggtcaaaaaaggctaaaatcttgaagtgctaaaaggagcagtcgcgctaagcggaccctgtgggctcagcacgcatccaccactaagcacaacttcaacatgcttagcgtgacaagggaatctagaanagcacaatgtcgcaatctaccctttt

SEQ ID NO: 206867 - DNA, 197 bp, Glycine max
tgagggaccccactcaagtaactttttgcacactgctattttctcgctgaggcatgactccagcttcccttggcgattttgaaaccggccctttgcagtcgagtcatcttcaaacatatctgccactacaagcacctagcctcaaagaccgaagtcagtaggccgtcactccctagattttgaactgtgaaagcaag

SEQ ID NO: 206868 - DNA, 332 bp, Glycine max
  unsure (1)..(332): unsure at all n locations
ctccaaaatgccattcaaacccttacaccttctttttcaccacccatgaccaccggtggccatcatgatccgccgttactttccgttgaactcccacaccaagaggaacattttaattcaagtgaaatactcagaatccttcttaaagattctgtggagaaaattccccaatccttcatttaaagcttttttgaggtaatcttgacttctaagcctttcttgtagttatgttgagtttcttttagtgtctcttgtgtgttgggtactgtaataangcgtttttacacttcctttgaaaacccttgaaaatgagatttgtataagctattttt

SEQ ID NO: 206869 - DNA, 414 bp, Glycine max
  unsure (1)..(414): unsure at all n locations
tagcttccacttatgtactgcatcantaatataaagttttatgttttccctccgcggatgtagcctttctcaaggtgaaccacgtaaatctgcttgcgagccctttctctcttttcttctctttcaccttgctgcacaattctatgtgtatgacatttctggtctgctgcatctactactgctgttcctgttggttcttcatcacttccataacaaactggtatcaagagctcaagttgcgatcaagggaattcaagattctcgtctgaatacaaagatcaagctgtgggagtcttgtttctggttctttcgctgcttctctgtgatcaagaacattcaagacatcatgtctaacacaatcangaatgagaaactcactggaaagaacagcttcaatctgtggcgcatcaagat

SEQ ID NO: 206870 - DNA, 428 bp, Glycine max
  unsure (1)..(428): unsure at all n locations
agcttaaagctgggacaatacattttttgtgtatacgtacncctatcatggctacaagagaattatcatagtatatgtgaggccggacactggactgtaatagctcaagtttatttgctgcatttgttacgttgcattctttttgctaacaaaagtacaacacacgtgcatgtggtgntcttggatgccttccgagacctcagtcagagtggaagctacncatggagagctgccgcccaactgcatatgtacgataatttgaatgatgcttgtaagagctacaacagacaacttgctggatatatcacactattgaaggcaattgtcattgattgttatttaattacttctaatatttttctaatatgttcattagaaattgtttttgttttgatcaaatttttgtagtgtgggatttatgaacattt

SEQ ID NO: 206871 - DNA, 471 bp, Glycine max
  unsure (1)..(471): unsure at all n locations
ggaccttaagtcacctgcggcatgcaancttgcaactctgacaaccctttgtgttcttcttcgttgtccccttaatgggtctctctccaattcccctcacaaagcctatctattctgatgtctgaatttcactatggctgtcatatgttcccaaaggctacacctttgcgggtgtacaagtggataatctcatagcttttgggacaccccattttgaagaaagtgtgtgtgtgtggctgcagctatggtcgcaaacacttggattcgtaagatgggtaaccaggtaagttccaatctcaagcatgcccttcttcttgaaaccttgacaaagagaaaaccgaaccacaagaggtcagatactaaagaaaccataggtattctctcttttgaggtagcaaatgtgatgtcaaaaactgtgcaccttcacaggtcactgtcagagtctgagatctcanagctgacgaatgagat

SEQ ID NO: 206872 - DNA, 475 bp, Glycine max
  unsure (1)..(475): unsure at all n locations
cggatcttaagtcacctgcggctgcagcttctctgcagtcgacaaacttgtctctgtactctcataagtctctataaaatctacagtgtaactgaaactgtttggaatgaaattaaatctcacagttccatanattttatgcaaagctctctctttctcttactctctatttccctttccttttattttgtagnttcaattcattcctagtagatgtgatccctctctttttgtgtactcgaaatcagaatctataatgtatagtctaatatttagaggatatcatagtcattggaaatgactctaaactgatttagaaactagtttctcagcttaacaacctattttccttaaaagatcatggagatcttgattattctttgggaatcgaagcagctaatcaagctgatggctcacatatacttacttcaactaagtatatgtgtattagggatcttctagcanagacaaaaat

SEQ ID NO: 206873 - DNA, 444 bp, Glycine max
  unsure (1)..(444): unsure at all n locations
agctttataagcgcgagtctggnggactattgttaagtggttgcgatatacgaagatgatgttccgagtacattggatttggtacgaccatgccctcctgatttccagctgggaaattggcgagtggaggaacgccccggcatttacgcaacgagcataatgtaaacctttacggttttaaaagctctatagttgggcctaggctttagagtttttcttttgttaaggctttgtgtcttttgtttttttgaatttataatacaaggatctttcttcatctgttcctacgtctctacccattctcatccattagcatggttactcctttactttttaaaatggcagatccgatgacgagtgcctcgaaggtactaatacctgggacccgcctatcaacgtcgagcacaagacgaatcaaaccgaagatgaagggaacgaagatgt

SEQ ID NO: 206874 - DNA, 407 bp, Glycine max
  unsure (1)..(407): unsure at all n locations
actcagcttgtggcctaggatcttcttatcaatggaggcctttgtttcttggagaaagaatggcaacggaatggagaaggaagagagagagagaggagacgccccttcaaggagaagatgagtctagaagaagctcaccaccataagaggccatggataatagcttgggggaagaaggagatgactgaagggagagagagagaagagcacgaaattttgtgctccaaatgagctttgaaatctgaagtttgatattcaaatgatcaaagttgaaaaaaattcacacacatgacctctatttatagcctaagtgtcacacacaattggagggaaattcaaatttcacttgaatttgaaattgaatttgtggagccaaactttggagctaanatttcactaattatgat

SEQ ID NO: 206875 - DNA, 450 bp, Glycine max
tagtcccacgtagcgaaaatatggcagccgccatactccgtgtttattctatgcaatatgatgtctatacccagacggaggtcagtaatggcaaaccatcgaggcggttccggcaattttgcagaagaccgcgaaagagcatcagaagcacgttaaaaaggtggacagcacagcgggggtaatttcaagaatgacccgcagcgcgcatctgaagcaagtaaaaaaggtggtaagagcagtcacggcaaaagcgacaactatccgggctaatcaatgacgaatgcatatttgtctgtagctcgtcaaaaagccatcaccgccggttacccggtggttgatactgatgacaaatgtaagcttaccctctggacctcaaatcagatgattgactggtgccgcaccgatcttggcaaaacgctgaaagttcccgtggagaatgtgcgtattatc

SEQ ID NO: 206876 - DNA, 357 bp, Glycine max
caacattagttatttagaaaaaccgatgtcaacatacaccttaacatctgtttttcaataaactgatgttgattatttctaataacatctgatagttatacataaccgatgctaatatacaaacgttaacattggctatttataaataacagatggtatatatagctaactacaacaaataagtgtatagatgatggacgttcacatctgctattcataaaaaaacgacgttaagctattagttaacatcagttgtttctagagaagcattggttatctattagttacattgagtttataatacaaccgatgtcaacgtcatcatggatacacctaatttggtgtagttctttatat

SEQ ID NO: 206877 - DNA, 477 bp, Glycine max
tgcagcatgcaagcttataatgtgatcattgtcatactttctcattttcttcctttttcttatggaggtatcgagaagaaacgaaaatctaaggcctatgtggtttgagaaaacgtttctgttctcatgtcccgctttcacaaatttcaagaggcatttttggcattatatgcgaaaataaaaaatgacaatagaaaatgttttctacagcccgcagctagcgtatctgagttctcaatcgctcttgtattttggaagatgattgattaaatgccactcctacacatttttctgttcctatacataatctaacccattggcatgttgtttaaagatatatattaagggtgttatctgttgggtctactctgatgtacaatacttcattttatgaacaggaatcaagttggatctctgtataaagttgggctatgtatcatatgttagaagaatactcgggcattgttatccagtaac

SEQ ID NO: 206878 - DNA, 283 bp, Glycine max
cgtcattgatgagccacatgagctggcaagttcttcaccttgggcgtattctatgaaagatccgcgcccccttttttgcacatattatgtagttgcatcctatccaaaaccaattgagaattgtgctgatactggctaatgaaggcaaccattacgtccttccaagagtggactcgagaaggtttcaagttagtgtaccaaggtacaagtaccactcagtagacttccttggaaggaatgtatcagcaactgtctactctattgcgtatgccccttgcttccg

SEQ ID NO: 206879 - DNA, 455 bp, Glycine max
  unsure (1)..(455): unsure at all n locations
atctctnagtcacctgcggcatgcaagcttctntgagaaaacttccttgagaagttatattttagctacacacacccctctaataactaagctcacctccttgagaagcttccttgagaagatttctaaagaagttagagcttagctacacataccccctataatagctaagctcacccccatgccaaagtacatgaaaatataaaaaaaaatctctattacaaagactactcaaaatgccctgaaatacaaggctaaaatcctatactactagaatggccaaaatacaaggcccaaaagaaggaaaagccaattctaacatttacaaagaagagtgaatccaaccttgacccatgggctcaaaaatctaccctaaggttcatgagaaccctagggccttctttggtagctctagtccaatcctcttggagtcttctatccaatacccttggggg

SEQ ID NO: 206880 - DNA, 359 bp, Glycine max
  unsure (1)..(359): unsure at all n locations
taccctatctgcgacagccaatgtggtgttttccgtccacgtagtcccgaagaagattggactcaccgtgatcaaaaatgagaaggaggagctgattcctactcgggtgcagaacaattggagagtctgcatcgactatatgaggctgaaccaggttaccaaaaaggaccattttcccctgccattcatttaacagatgcttaaacgcctggcagggaaatctcactattgtttccttgatggtttttctggntatatgcaaatcactattgctcctcaggatcangagaaaaccacaccccttcggcacttttgcctatatgaggatgcctttctgcctgtgcaatgcccctggtacc

SEQ ID NO: 206881 - DNA, 266 bp, Glycine max
ccagtcgccacattgtatgtaagacaaaaacgctcacttggagagatcgctcctatcacaggagattcaaatgagctttgacatacctgattgcggttatcttttgcgacttatggaaaaaatgggcgttcataaaaaatggattggggggatgatactctgtctaacaactgtacaacattctattatgatcaacggcgacgtatgaaacattatttgaagaaaaggtctcgacaggataacccaccgtgaccctacctcttttt

SEQ ID NO: 206882 - DNA, 475 bp, Glycine max
  unsure (1)..(475): unsure at all n locations
agctntaaaattagaatganaacgtttattatatgctggtaatcgattaccatatatgtgtaatcgattacacagcgcaaattttgaattcaaattctaatagctgttgcaaatcacttttggccactggtaatcaattacatcctctggtaatcgattaccagagattaaatttcttgtaaaagactttttaacttaaatttcttggccaaaccttttgctacttcaattggaattcccttcctatttaatataccctttctaagactctaaagactgtctagatcattcatcttgaataaagctttgagacgcatgtgatcctttggcatcatcaaaacatcagcttgatcctctgtctacacatgtgatcccttggcatcatcaaaacatcagctagatcctttgtctacaatctccccctttttgatgatgacaattctggaaatcaagacaagctatatgcaagatgata

SEQ ID NO: 206883 - DNA, 406 bp, Glycine max
aaatgttctggtcttggctgctaatgacacctttattgtaataccaggtaactggagtggaaagtattatataaccgcttaccgtctggatattaaagaataactttctccgtctgttgccactagggtgattctgtgcacccaacgttattgttggtgcatccagcattttaagtgaatgggtgaaaatgttcttcactactcaagttgatccctatgagtcataccgatcaaggtatccctatgagtcatacaaatcatgttgatctgtatgactcatacggatcaagttcggccgtacaaaccatacggatcaacttgatccgtatgttaaattatacttacagatcaaactcatccgtacaaccatacggatcaaccacgaactcgcgaccctcgacgtagg

SEQ ID NO: 206884 - DNA, 320 bp, Glycine max
agcttgagaatgtctctgtgacatgttattatctattaccacatttggtaatggcagaacctgatggaattgatgaactaatcaattaccctcacttgttaattctcattactgactcttgaacactcttatctcttatgaaacacattctaaagtcatccaggggaattattctgcatttctttaagagattaaagctgatcaagactcattcactcttgatcatgagtcgactatccaaggaagagcttgaagacgttgtgatctacacatgaagaagcatgcaatccaaaattgattgctctctactttcttaatcc

SEQ ID NO: 206885 - DNA, 392 bp, Glycine max
  unsure (1)..(392): unsure at all n locations
agctntctcccaagtcctaaatgatatttattgctttattaactcactctaacctccatttaccacataattcagacttaacctctcaactctcaaagcctcactctttttccactcataacaccacattctcactttccaaccctagggtaactctacatttcatctctaacagttttccatgggcaatttcagcatataaacatcacaaacatcaccacacaaaccctanaacagaatgggtatgtctaactcatccaaacatggcaatttcaacaagctttcaacaagtttcttcacaaataactatcatgaagcagaaaactagcaagaccacccatcatatctgccaaaccccatacgcacgatatttaagagagaaagaagtccac

SEQ ID NO: 206886 - DNA, 438 bp, Glycine max
ccaagggccacctaacgagcaagtaaggatgtttatattctttatacggggatctcatgcgatccctatatggggctctgactaccccaccttcattataatggctaccttaagcctgttcctaaatgatgggctatcttaagctaacctggtaacttccaaggtcttcattagaataactaagcttaaaagcctgccccctaacgatctaactttaactcagcttgggaacttccaaactctttacactattctttcaatgataagctttaaatatctcttcaaagagatccttaatgtaattcctacaaagagactaagcaatcaaaaccacacaaaagccataagactaagttcttaaaataattctctaaagctgagtgtattcaaggatcaaccaaattgtgctaaacaacgctcaaaagcatgagaacatat

SEQ ID NO: 206887 - DNA, 301 bp, Glycine max
agctcgaatcggacatccgtgttatagttattactattctgaattctctagagctcccgttgatcaatttctagcttctcgatatgtgatttgcctgaatcggacatccgtgtgaaaagttataccaattgaatttcttaagagcttccgttgttcagatttgagcgtctcgatatgtgatttgcctgaatcggacatccgtgtgaaaagttatgaccatttgaatttctcaagaccttccgttgttgcaattcgagcctctcgacatattatgcgaccgaatcggacatccgtgtgaaaa

SEQ ID NO: 206888 - DNA, 428 bp, Glycine max
agctttgcttacacttcttggtatgcattatatgcttaacagaaattaataaatactccctttatatagaagagtcagaaaagtaatcaggatatactaaaaaagcttggtgaacaattgttgcttgcatagaatgcaaaattaatgaaagaacagatattgacgaacccatatatatgaagataggagttctctgtcagaaattctttctcatatagctgcatgcaaacatcataactgcgtttgtagacctgttggttggttcaagggaaattccagtcaaaagccaaaaagaaacttcattgagtcaaccattcagtcatgtatctcaatttaattaaagatttagaactaaatatatctccacaaaactttatttgtatagaaaggtcaaacatgtctaatcaacctttacattattgtaacat

SEQ ID NO: 206889 - DNA, 453 bp, Glycine max
  unsure (1)..(453): unsure at all n locations
tctaacagagaggagctttatcttttatacaaatntctcactccaagatcttgcatatagtgggtgttcagagacatctaagggttttttaaaacaatttttcaaataagcacttggtgtaaaatgatgttagaaaaagataatatgaatacttaataaaataatatggagagaagtataacaacttggattatttcggttcgctcaacttgacctacgtctaagtctcctttactcactggtaaagggttccactaatcaataactaattacatataagtattctaatccgcaactcctgaatatacaagtattcttaacaccacttatagaatcttcctagactctccctgaatctaagaacccaagtattttgaacactaagtcactcctgtcacanacgaatgcttgattggatacaaatattcttaacaattaaggacaaatacaaac

SEQ ID NO: 206890 - DNA, 184 bp, Glycine max
tcccacccccaccttttatccctataaaaatagaaaaagggttttgtcgagaaggttttaacgaggcacacctaaacttatactatcaatgaatacattgtcccaacaattatacctgccacctttctttataggaccctctcgaataccctcgtcggcagagggtgaactctacgataacaac

SEQ ID NO: 206891 - DNA, 407 bp, Glycine max
atgagtgtagagcagttcattgagaagatggcctggcttggaacccaaccttcctttgtgggggataatgaaagttttacagcccaggcacctcaacaacatgagccaaaaccagaaaacgatcactcatctgaagccaccatcccctgagttggtgattttgcccaaagaagattagagacgagatccaatgaggctgctcatcctggaccagtgccagcatcagctgatgcaccatttcgagtagtggatccatcttcacctcagcatgcagcagacgcttccactcatgtcttagagatacatgagggtcagaccataaccagcctgcccttggatacttctcctcctgctactctaatatggcatctaacagatgagaatggatgtcatatacaggacaacca

SEQ ID NO: 206892 - DNA, 360 bp, Glycine max
gagaaggggcctgccaggacctaaccctctttggggggaaaagaaagttctacaacccaggcacctcaacagcatgagccacaaccagaaaatgatcactcatctgaagccacaatctctggagctgttgattgccaaaaaagacaatcagagacgaaatccaatgaggctgctcatcatagaccagtgctagcatcagctgatgcaccatttccaggagtggatccatcttcacctcagcatgcagcagactcttccatatcgaccctagagatacttgagggccagaccataccagggctgcctttggacactcctcctccagttactccacgatggcatctaacagatgagaagaat

SEQ ID NO: 206893 - DNA, 322 bp, Glycine max
  unsure (1)..(322): unsure at all n locations
aaatacttgggttgtgcttaacctcaagggagaattatgatgtgttangagtggcctataaaacactgtgtattcagaagttgaagactcaaatacttgtttgaatacatcttcttattaatgggacccttcaaagttntgaaagagaactggttgcacctcatgaatttaagtgacccagtataaagctgtgtttttattctagcttcaactatgacttgctcttctcttaagatgcctcttgacaccttgtactcatacgctttgtgaaaatatttgctgttgtcgacactattagtaagcttgttttgtcaactatgtt

SEQ ID NO: 206894 - DNA, 381 bp, Glycine max
agcttgagagattgcatgggaaaactgatcttattttaaagagatcatcaatgaacacagagaggcaaagtctaaagctaaagaagaccaaggtgaagcagaggaagatttggttgatgttctcctaaaatttcaggatggtgatgatagaaaccaggatattagcttaactattaacaatatcaaggctataatcctagtgagtataacaacatcttctaaatcctttcttttatcaatataatctcactcctttctatagaacttagacaaatgtttaatagttacaccagaatatatctcacacatgagctcttcaaaattttgctgtatgtgataaattccgtagtgtattactggatgccttcggcttataatatt

SEQ ID NO: 206895 - DNA, 312 bp, Glycine max
ataacattttcgacagatattttcggcagaaatttccgtcggactaaaaaaatctatcagttcaaatttcttacgatcaattttcccacaaattgtagcccactgaaaattatgaattactgacgggattgttgagaattccaacgaattttaggcacttggagatgcactctttttcttgtagtgaacatgaataatattaaagggggccaaatccaagcaagtgaagtttttcggataccattcttgaaaggtcatcaacaaaacactttcatcactactagtaattttaggctatatcctttattatac

SEQ ID NO: 206896 - DNA, 330 bp, Glycine max
  unsure (1)..(330): unsure at all n locations
tacatanagaatggccaaggtgttgtcaagactgtcaaaggtatgggaagggcattgacattatcagcgaaggcctggcacttatggcattttctcacatggatgcaacaatcgctctccatagtgagccagtaatatcccgctctccgannattttgagccatggcatgtgttagtcatcatttacgactaacttttgtattgaaaaagtttataatatttatgtcttctccccaatttatggttctttttgtaagattgtacatatttcttatgtttagtttaactttactcacgagatattcccaatattgggattaatgtggttca

SEQ ID NO: 206897 - DNA, 411 bp, Glycine max
  unsure (1)..(411): unsure at all n locations
ttgagacaatgactgattngtttaggagtatatgccttaatcgattaccaagtggattaatccattacttctatcttgtttagttgttaagaagtgaacaagaacactttaatcgattacttagagcatctaatcgattacattgctattaagttattcccatatgttgggaagaacactttaatcgactacttagataatctaattgattgctttagtgaattaatcgattattctgtatatataatcgattacaggagattataattggtttctctataaataaccagcttgtgttcactccacaacacatcaagagaatactcaatatctcaaaaataacatcttatcctctgaatgaagaagatctcatgttgtcattagtgaataaaagaagagaagaataagagc

SEQ ID NO: 206898 - DNA, 468 bp, Glycine max
agcttatgactggatcgcattggattgttctgtatgccaaacaagtaagaagaatttcgttttaatctgaattttcaggcatatatatttgtaattaaggtttatacatgttttaatccttataaatatagcaaaatcctttaattttttttgttacgtttagttttataaatttatttttcttaagaatagacttaacgtgacacgtatctaaacatgttacatcagtattttctttgatgggataagtttaaatgtaatatgctatgtcattagtaaatgatgatagaaatcattcttaaattgtataaagataccagtcattcaagcttgcattcatctctttctgacaggataaatgtgagttaatatgtaagtaattttgagttagaagacttttgttatctttgaatgaagtgtcatttttttctctatattttttttacaataataaataaatataagaac

SEQ ID NO: 206899 - DNA, 415 bp, Glycine max
  unsure (1)..(415): unsure at all n locations
gagaagntaaccaactaattcatttgctgtgactgttaaaaaaaataaaaattgtgtaaaacggcttctctgccaccacaaccaactttagtcaattagggtgtgttgtttggagaaaaagaggataaaagaaagtacaaatcaacaaagtgagattcacatttctacactctagttctaaatttttatctcactttaattttttgacttttaatgcttctttttcctgttattaacattgcttgttacatgtttttttagttaagggtagtggattgattaataagttaaatagttgaatagttactaaacaagtgtatagatagaacatgtatctttgngctcattntaactaattacatttaggtgattttttcttcttattattattggctctttggcttaatctgtctgt

SEQ ID NO: 206900 - DNA, 392 bp, Glycine max
  unsure (1)..(392): unsure at all n locations
agctntgaagaatgaagtcatnctacagtatttaaaacattcatcattccttttgcaaaaagctttttgtatattcttggtaagttagaaaaagttctcaaaacaccttgaacacatagagaaaaaaatgactaagcactaatttgtatatccacctataagaagattctagttttagtctctgagcaatcttcaaccacaaatctattttgatttgtttagagccaatagtggcttggtaggacaaagaatactaggtgttaatcaagcttgggggtaaaacttgatttgtatagctagaagtggtcatgacacaagacttgtactggtgagaagtaagtggaacttggtagttcgccagaattggatgaatcttagtggagagacgaaat

SEQ ID NO: 206901 - DNA, 359 bp, Glycine max
  unsure (1)..(359): unsure at all n locations
gattacacagcgtaaattntgatttcaaattttaatagctgttgtaaatcagttttggccactagtaatcgattaccaaagagtaaatttcttgtgaaagactttttaacttaaatttcttggccaaacctttttgctacttcaaattgaattcccctcctatttaatataccctttctaagactagagacttgtcttgatcatccatcttgaatatctttaatttctttgtcttgaataaagctttgagacgcatgtgaacctttggcatcatcaaaacattcagcttgatccttttgttacacgtangaggctgaaaggaangggtttatcacccttggtaagcatatttcacttaa

SEQ ID NO: 206902 - DNA, 445 bp, Glycine max
agcttgctttaagactgtatattgattttttttattatgcacaccatgtgctcatttgcttcaactgagaacctcattggttggtccatacaaatattcttctctaaatcttcattcagaaaggcggttttcacatctaattgatgtagctccaagtcataatgggctactaatgccatgataatcctgaaagaatcctttcgtgagaccagtaaaatgtctctttataatcaatgccatctttctgagtaaattccttagcaacaattctagccttgtaacattcaaggttgccatgagagtcacgtttagtcttgaagacccacttacaaccaactctcttacaccctgtggtaatttacacagcctaaacacctatgttcatggatctacttttcttcatggatttaccactctcaaacttccaactacaactgggaaacaa

SEQ ID NO: 206903 - DNA, 312 bp, Glycine max
  unsure (1)..(312): unsure at all n locations
gcttcgtggagctatatccaatctggacaacaatatggtaattctataagcacacaaacgcatgataccttaaaaaacatctcaatgaatggcaacaacaaataacttacactatcaccatcataataaatctcgtgcatcatcgatatgaaaagtgaagcttcatccttaataataaaagaacgaattcaattattagtaactaacagagngaatattaaacacaacaacaactacaaaaacgttacctgatgttgtaagtcggaagctttgaaataacaaacttcattatttcatcatcctctgataact

SEQ ID NO: 206904 - DNA, 365 bp, Glycine max
caaagaagctagagcttatctacacatacctccctaatagcctaactcacctccttgagatgagaagcctgagaattgctacacaccctctataatagcttagcgcatccccatgacaaaatacatgaaaagacttaaaaaagtcctactactagactacccgaatgcgctcaaatacaaggctaacaccctatactacaatgaatggccacaatacaaggcctcaacgaaggaaaaacctattctaatatttacaaagataagcggactcatacttagcccatggacttgaaatctaccctaaggctcatgagaactcttagggccttcctctgatctctgacccactctacttggagtcttct

SEQ ID NO: 206905 - DNA, 368 bp, Glycine max
  unsure (1)..(368): unsure at all n locations
agctncttatacaaagctcatcttggtgttgaaactccttcttccatcgcttattccctagaggatggcgcctcctctcacttcttctcctttgtcttacactgcatctccatggaagaaaatcaccattaaaggacctcattgaagctcaaagatccagcctccatagaagccccacaagcaagctctcataagctttgtaggcacaaaatatgttgctctctaagcaacttgaagtcttaacagaaacacttagtaagttgccaactaacatgtctactggtcaaccttcacattcttcttttttgcaagttgtatgttgtaccgattgtggttgtgctcatgaatcacgccatttcatttccatt

SEQ ID NO: 206906 - DNA, 459 bp, Glycine max
  unsure (1)..(459): unsure at all n locations
agcttttgctggggatgatgtagatgatgattttgataaatataagcacgagatcctcaacgaagaaaatcctgagccagagaagcctctattacttcctggctggggccacaggacacatgttcagcaaaagaaaggcttaccatcttggatgctgaaaaaacatgaagatgcccagaaaaaaagggcagaagccctcaaaaaaaggaaagatgctcagctaacaaatgtgattatatctgagaagatagacaagaaggttagtgccattaaatacaaagttctgaacctttggtactcttttcagattatagatatcaacttgattcaatgtgcacaactatctttgttttccgataacaaatttgtggagttgttctgggtcagcataatnttaatcattggcggttgcactttgcatatgcttcttccagaatatgattaggaattatagctatt

SEQ ID NO: 206907 - DNA, 425 bp, Glycine max
  unsure (1)..(425): unsure at all n locations
cagcaanngggacatttttcactcgactagctgaatttgcattaagagatattattatcaatattacttttcaacaatgaactgttaacaaacagtttgatttaaggcaaactttgattgcaatactggttctcatactctggcactatcagtaagacagtaacatactaatgagtgctaatgcatttacagggtatgcctgagtggcagcaaattgtgaaggagctaccaccaaaggaagcatttttaagcaagatagaaagatgagaagtattgttgagaattcagacggctcaaattttaattattattttttttcctgtcccaagtgtctcctggtatctccgacgttggtaatgtcccacaacaatatttttcttggcattatactaaacactgggcatccattcctccacgatcactac

SEQ ID NO: 206908 - DNA, 236 bp, Glycine max
cctaagcacaaggattttaaacctcacgcaaagagcccaacccctaacacataaggaagaaacccgcaacagatggaccataaatctcaccaacacctagagaaagctgacttggaccgctacccgaaaaagttttaacttggacaccacgcctaacccccaaagtacttcgaaaaacaacagaaggaaacccctcaaggcaaggcttgttggaacacagactcacagataataca

SEQ ID NO: 206909 - DNA, 253 bp, Glycine max
  unsure (1)..(253): unsure at all n locations
tgaacctgagtgaggataattcatgtcatccgcataagcaacttatacaaccatatatcagaacataaacttatgtaaccccttgtatgtaacattaattcaaagaaacaaaatcaaaggaatcattatagaataataccatgacatgaggagcaatcctaacacaatagacaaggaatccagtgtataatttgaacggtccacctgctttgaggtttngacagcacaatcaacaaagccagtgtatggatat

SEQ ID NO: 206910 - DNA, 427 bp, Glycine max
  unsure (1)..(427): unsure at all n locations
actaactcttactagnatatagagtgactactcagaaggaagcgatgggtcttcattatgctcatctaatctacctaattaaactaattacacaaaacaaaacccaaacttgaagcccaattattcaagtacaaaggttctgacttccaaactcaaattgactctcaaaatggcagaattggccaaagcttattgctgacaaaattgaagaatcttgtcttaacttcaaagagactacaattttcagatttttgtcacactctccatttggagttctatagtattctctaagtcttgcacaaggcaggtatatcacgtaagcacaaaatctgaaaataagttacaattctcaattaagctcaatcatttgcataagaccaaaactaggttaaggtaagaaaataagagtcaaagagatgtcaattga

SEQ ID NO: 206911 - DNA, 345 bp, Glycine max
tttatcacccaaagtaaatgccacattcttcttcccaactcattgagagggatgcaattgcagagaaattatgaacgaaccttctatataagcgtgctaacccatggaagctcttaatatctcccacacttttcgggatgggccaatcttggatggccttgattttctcaagggccacttgaaccccatttctaccaactacataccctaagaaaactatattatctacacaaaaaggacacttctctatattcgaatagagggtattctttctaaagactgaaagaacttgcctgagatgtcctaagtgatcatctaggctcctactatacactaaaatatcat

SEQ ID NO: 206912 - DNA, 390 bp, Glycine max
  unsure (1)..(390): unsure at all n locations
gagggtgagccatgttctcagtatgaaaattaataatggaatgctcaaaatcagaatattcagaatcaccctcaacagaatgctcataatgctcaaaatgctcaaaatacatggaatgaccaggatgtacactatgcctaactattctatgaaaggttctatctatctcaagaatgtaaatcacctggattgcccctagtcatgcactatatgcaacaaataatgtgtttctcaacaagcacctaacaagggggtaaaactacagttatactcaaacgatatcaaaatgagtntgaaatttgtgaggaacatcctaaaatcatgaaaagatagcacaaaatatttcaaacaaaaatttataagtgcagctatgaaaactagctaagaaac

SEQ ID NO: 206913 - DNA, 464 bp, Glycine max
  unsure (1)..(464): unsure at all n locations
agcttctagccaaatggacttaccttgacttaattcctttgatagcccttttgaaccttgtttccctttccttgttttgaagctcactacaagccttaagtgaaaaaccatgatatcactatatccttaaggaattttggagctttggaattgttttgggaataagagtgggggattttgtttcattggataacatgttttgttggccatgcttcattatatattttgagccatacttgatacacattgcatattggttaaatgttggacatgctgaatatgatgctgtttctcanaaggctacagaaaaaaaaaatattataaaaaaaaatcgaaaaagaaaaagaaaaacaggtaagttgagtgaataagaaaagaatgatgagactctcggttctactctctatagttaaaatttatctttacttcttttatttcttatgtntcttaatatgacttattcc

SEQ ID NO: 206914 - DNA, 342 bp, Glycine max
aagcacggtacacttgttgaactttatgaatgaagcttgtgagacatacttcagagtccactctctcctcctttattccttaatttcggctcccccttcttttctctcctctttttttctcattgagcatctctccagcttttatccaggctatcttggtgggaagctcttcttctggttatccctagggatgggccgctgtacctctttccttgcttcactgcattcctggggaaataccataaagacccattgagctaaaaccagctcataaagctcacagcagcttcataagggaatcaaccagagctaagtaggctcttaacctctaattttttctta

SEQ ID NO: 206915 - DNA, 455 bp, Glycine max
  unsure (1)..(455): unsure at all n locations
agcttcactatagtgaacattgacttcttatttattagcttttntatttgagtatttttctagctttcttggtgtgataattgcaacttttgatagccaactagaaacattatcaacttacaagagagaaaagtgttatacaagagaaaggctttctaatttatatttcttggcccacaagcttcataagttttgtgtacaaatttcctattgttgagtgtatatgagttaccatttttttaatatgacaacaacaatattataccatatcctaagagttattctagactcttttgctgatgatacaactggacatctatctattttggtcgtctattattttaacaaatattccggttgaatagtatgtgacattatgttggtatacccaaacaagttctaaatatagaatctagaagcaatcttctcatatctttcgcatagtctatcaattc

SEQ ID NO: 206916 - DNA, 339 bp, Glycine max
atttgtagggtaaattgggtgttgaggagtcaaattttgaatccgttgagtttttaccgtaaaaccagtttgagcaagttcaaattaatgttgtagacttgtttgagatgagagattgctccaaaattactccattctcattttcacttttcagaccttgaaattccactaaattgaggggttttagatacctatattttgaatctgcttggtttgaagcttgttcttggcttatatatgatttatacatgatttatgacttgtaggatccaatttgagccaaatcggaggtgggtaagatggatctcgaaatctgtccaattgtgcagcaaaaagctg

SEQ ID NO: 206917 - DNA, 298 bp, Glycine max
ctcccctttttatgcttttcttaattcttcttgacaccatcaaaaacctcatgatatacattctcctcctttttgatgatgacaaccacctgtaggttaggagcaacaacaaagaagagacatctatttgcatatagcctactcccccttgggtttgcaatgactgcttatatgagacagttgaagattccatattttccatatgtaaacaaattgtctcataaacaatagataatgttttatgcgtgtctactccttaaatatttgattgccattaatgtcttcgactgatagttat

SEQ ID NO: 206918 - DNA, 379 bp, Glycine max
cgagatgatgggacagcgggtgaaccacaagcggaagtttcttttggtgaagtagccattgaaaagcagagcgtttggaatgaattccttaatctcagaaggctattgggaaatgctggtaaaaacacgaatgcccagcagatattaatttgaatgaaaaatgtagaggggcgtgtgaagcacggtcgaatttctttgtgtgaacgtgctttaatgttaaggattcgtttgggcacgtcagattgagaactgcttattctctacagacaatgccacttgccctcagtttaaactgattgatcaagccttggaaatattgctattgtctaatgcacatgcttatgtgacactttatcacaaactcgattaggagctatgc

SEQ ID NO: 206919 - DNA, 452 bp, Glycine max
  unsure (1)..(452): unsure at all n locations
agcttntaatggatctcaagaacatgaaactgcttcgtaaccattacagggcaaagagagttatgatcgcgtgaaggacatcataaatatctttggcaagacacaaaaaaaaaacctccaactgacaaaaacatatggaagaaaagatccattttctttgatcttccatattggtctgatcttcatgttagacactgtatagacgtgatgcacgtggagaaaaatgtttgtgacagtttaattggaacccttcttaacattaaaggaaaaacaaaggatggcttgaagtgtcgttaggacttggttgaaatgggtataagagaacagttgcacccaatatcacaaggttcgcgaacatatctacccccagcatgtcacacgatgtcaacaaacgagaagatgagtntttgcattgtttgatatgctanagttcacaggatactctcaaatat

SEQ ID NO: 206920 - DNA, 463 bp, Glycine max
  unsure (1)..(463): unsure at all n locations
atgccttaatcatttccaaatatgcatgttaattatgacgcatcaacaagaatcaagccaaagctattgtgcaagcaatcaatggggcaaaacacaccaaatgattataatgatggatggctcaaattctcacaaaggtaaaatcatcactttcaaattgagctttcaaaactatcatgacatgtagagaagaatcaaggatttcaagtcacaaaatgtcaagaacttttattttcaaaacaattacccatttcttgaacatatcctataattcaaagaanaacatgcaaagtcgtacgtgcacatgaaattgacccaaaatattaaactgaaaatccgacgaaactaacaacattaacaaattaacacaactaacaaattaacaaaaccaacaaaactagcaaaaccaaagaacacttcccccccatacttaaacaacacatttgtctcaatgtagcacaat

SEQ ID NO: 206921 - DNA, 438 bp, Glycine max
acttggcttaatttaagactaatgtgttattaattattgcgcgcaaactacatgtgtttattaattactgacagcgtaagagtttgttgctgctcattgaattataacatcactgttgtatgactaattaaaatcaactaatgttttgatgcaacaagatcattcaaccacgaaatttcagctttacactaaatgcatgtatactttatgcaatgtttatacttagaatcttaagcacgtgtggtgtaagacaaagttagtgtgactttgtattaacatattctctatggttgaatggtatggcgctgtaatggtgcatctctttattttgagtcatgataatcaacttctgaggctattatctgcaacgtatcatcaatttgcaattatgatattttaaaaatgaccagcttcttgcaacccaatataatatcattg

SEQ ID NO: 206922 - DNA, 435 bp, Glycine max
  unsure (1)..(435): unsure at all n locations
acatagtcggatgatgagagccttggcatattaccatggcagagggtgtacccctagcaatcatccgactaaaatgttgtaagaccactgagatttgagagttctagtggcatctgaccaatgtcatatatttatcttaagatagtgaaaaataatggttaggatgtgtgtgagattcggtagataagcacaacatcgtggttgctagttttgtgtgtaagacttgttttaagtctttgtgtctggttgacgaagtangaagactctttccttacattttngttcaggatcaaatggagccggatattctccttaagctagattgctaccttggaaagtggatcctcaatcagaggcattgatcacttcatcgagtacctttgatttattgctacgtccctagatggcattgacaatgcatcaaagtatgtggag

SEQ ID NO: 206923 - DNA, 432 bp, Glycine max
  unsure (1)..(432): unsure at all n locations
gcttacagcanatgccactctactctaagtgatgaaaggagatgttaataagtatacacacgnatattcaccaataaaacattgttgtggaaggaaattgttgttctgtgattcaaaaaatcctttcaccctagcttaaagaccctgtgagtgtaaccattccttgttcaattggagaagtttctatggagaaggctcttatttatctgggagccagtattaacttaatgtcgctctccatgtgcagaacgttgggagagttggagatcatgcccactaggatgactctacaacttggtgactgctccattaccagacttcttgggatatacaacttgggatgtatcagcttgttttttacatgatagataaaagggtttcaaactcttgagaatagacagagtaaacttataaagtttttctgaaaacagt

SEQ ID NO: 206924 - DNA, 406 bp, Glycine max
  unsure (1)..(406): unsure at all n locations
ancttaccaactaagctaccaaacatatttttatactacaanattcatcactcttcctcaagctggagcatataaatcatatgcaccaagcttggaacatatagtctgaaatttgggtcctcttaaggacttagtcaaaatatccgctggctgatcattaaaaccaatgaagtcagtgacaatctccttggacagaagcttctctcgaatgaaaagacaaccaatctctatgtgcttagtcctttcatgaaagactgggtttgaggcaatatgaacagtactctgatatcacaatacaacttcattngcaactcttcacaaaacctcaattcttgcagagattgttaatcccatgagttcacagtaactggaccatatatcatattctacttctcaccgagcgaca

SEQ ID NO: 206925 - DNA, 251 bp, Glycine max
ttgatgtcctgcattttttatcttttaccccccacacaggcggaaggttgtaaccctatatcgaaaattattgtccacaccatatccatttaattgatggcatttccccaatatactgtgtgccccctgtcgtcgatacactatttaagcgaaattcaatctaaagaaaatcataattatttgaaaagagagaatttcgatatcttaccaacacgccaaccttaaaaacatctaatgattgtaacctatcc

SEQ ID NO: 206926 - DNA, 407 bp, Glycine max
  unsure (1)..(407): unsure at all n locations
aacatataatcctattaataatcctaccattattcacataatcctaatttgattgctttggaaatgtactgatttcaagacaaatggtcatctcatacgcaatagacatagggcatcatcatttactcaattaaatgaagtttgcatgttcaaaatatcacatatgcatatggatgataccttgcagataatacccttagacgttgattattatgacaaaaaattgaaggctgcatcattacactatcataccatttaaccacaatagagaatttatacaaactcacactaaacttgagttacaccacatttgcttaagacacttagtataaacattgcatgaaatatacatgcattcaacataaaacagaaacctagtgngtgataatcactactgaatcaaaata

SEQ ID NO: 206927 - DNA, 308 bp, Glycine max
agatctgtgtggtggttggtcaaggagcataaaccacagagtctggcgacaggtgcagatttctgattcatggcaagctgagttactaggttgaccaaggcatcaaaatttcctttaagctttttatttttagtagatgaagatgaatctgtggccacctaatggactcctctaacaaaaatagcatcatttcttgcactgaattgttgggagttggaagccatcttctcaatcaaattcctagtctcagcaggagtcatatcaccaagggcttcaccacttgcagcatcaatcatacttctctccat

SEQ ID NO: 206928 - DNA, 467 bp, Glycine max
  unsure (1)..(467): unsure at all n locations
cataacaactagctattatagtatagaattacaatgaagggctgtttatttttctttagcnctcagaacctagaatacaatgctcattatgaaacagacaattacttactgtctaaccaaaaatggttacaatagaaaaatagttaacggttacaattacaagacaacacatgtttatgaaccatcagattataggctcccttctacatgactagacattccactatattatagaagaatgaacgaccaatatagaagacaagagtactcaactagatgaccaacacaatcttcaaccctatctctattgtgcatcatccaacaatcaacatgatttatctcaatcaccaagactacgtgcagttctttgtgaaccatcaagttcaccaacatgggttaactattacctctgcaagtgcgttttataagataaatatttattttatagaattactattcctaataaa

SEQ ID NO: 206929 - DNA, 355 bp, Glycine max
agcttcaccccatttttgctataaaaggtacatgggaggctgagggaaggatcccagcacccttggcaagcatatttcacttaaaattaatgaaaagaaggagaatggagaggaaaatcaaggtcaaggcgcttccataacttttctgtgatcaattcgaggtgaaccaaaatgggcgtgaactaatcaatttgggggtgcgctcgggaaacttcatcaggaagcaaccagctcgccggagcgagctgggcggcaagcttctccccattctgtctataaaagtggtgtgagaggctgaaggaaagatcccaggaccctgtgagctcaagaatcacttaagatggtttcgtaacac

SEQ ID NO: 206930 - DNA, 365 bp, Glycine max
actctcccacattcaaaaatcaaacatgaacccaccatccctagttgcccaccttcaactgagctcacgtacccccacgtagcccttatcctcgttcctctcagcaccgggtccccatcaacccctccaagcttccacaatatccaagcaattcaatatccaaacatcatgaactaccctaaaccaagaaaacagggaagaggcagaaaactctgcccaaaacacattccaataccacagctttccctactcaaataccccagtaacattctcttcgttctgattcgttaaccgatggatcgactcgaagaatgtactggaggtccccagtgcataagcattttctgcacaagaacaataattct

SEQ ID NO: 206931 - DNA, 312 bp, Glycine max
  unsure (1)..(312): unsure at all n locations
actcagctttgtttcantacagcgggcgagggcgacngattcttccacatcanangaaaattattggctttaattgctcaactctcctttcatacgacgttcgattataccggctcaacgacatccagtaaaaatattgccgttgaatttgcagagcttcgtttcattacaacgctcgatttctactggctcaatcgactccaagtaaagctttgtcgttgatctcccaaactccgtttaataaagcgctcaaatctacgacacatggactcgagcaaaagtttgcgttgatttcttaagcttcgtttaact

SEQ ID NO: 206932 - DNA, 428 bp, Glycine max
  unsure (1)..(428): unsure at all n locations
agctntgagtatagntggtgattatatagtttgttctgaaatngacatagcatttgccagggattcaaccattttagctccagaacctctagttgattatcctgccccatatgaaattcctcttgctgattcagctgaaccaccttcactagataatagcccttctgatggcttaactgaatacattgagttatattcaacactattagaatatttcgatctgacttggtatggagcagtggctgatgggaggacaagttctagctctgtaagctcttgacttgcatctaagaactcagtgatggaggataactctgcaggatttgtagctttttttttactatntatgcattttaccaatggaaaataaaactagtgtagctagaagcaagtaaacatcatggtctatgttatggtatcaatatcgc

SEQ ID NO: 206933 - DNA, 459 bp, Glycine max
  unsure (1)..(459): unsure at all n locations
tatatagaaagttntggaactctgatttatgttttaggttcttgagttatgtgacagaaggaataagctgttttatgccttatttccgacatattgtgttgttaataaatttcttttggccttttaaaaacaaaattttggctttaccatcaaatttgagggacttgagttaagagataaacatgggatgattttggaacagttaaatacaaaattatagaaatagaatctagctctgtctaaatgtttgagtttgataatcatgttgattgaaatcgttagctggtgttggaaaagatctttagtatctcagttaatcataaaggctaagattgtttagaatggaacaatgggatgtttacgtgcctctttcataataatatgggctggtgatatattaaacgacggaagctgagatgaangaattaaatagtgtgaatgagaaacgaattgcatata

SEQ ID NO: 206934 - DNA, 359 bp, Glycine max
agcttccacaaccctctattacgtggcttcatacttttttactataaccccggcactgttcctcatgcacgtggcgatgtagatgaaaacctggcaaacttctttcgcacgatcctgcaccgtcttcggcgtgttatcggtgtggatcttcggtaaccctgcgatttcgacgtgcatgttgacgtccttgagagactttgtgtagttttcatgacagatagtgtgataaatgacaacggcgagggtggaggcgccggaagtgtattagaagtaagtggggatctgaagcgtgttaatgacacgtgcggcgctgtattttatgaaggccaagactattgctttgaggtttgaggtttggg

SEQ ID NO: 206935 - DNA, 437 bp, Glycine max
  unsure (1)..(437): unsure at all n locations
gtatgatgggagaattgatgttcttccttgaacttcaaatcaatcaaatagatgaaggcatatacatacatcaaaccaagtacgtgaaggaacttctgaagaagtttaaaatggatgatgcaattcaaatgacaactcctatgcatccaaccagtttacttgcactgaacgaagaatcatagtacgtggatgaaaagacatacagaggaatgataggatctcttttgtatcacactgcgtccatacctgacattatgtttagtgtatgtctctgtgctaggttccaaaaggaaccatgggaagttcatttatttgcagctaattgcatatttagatacttaattggaactcctaatcatgtttatgttntaagagagaaaaggaatacaggtttcttggttaatgtgatgcgacatttgttggagatcaagtagaaa

SEQ ID NO: 206936 - DNA, 331 bp, Glycine max
cccgctcatagatcggctaatagaactgcagatttttcggctcattttgcttgaatgtaaagaaagatactgggtggaggagatccttcaccagttaaaattctatcatctcttctaatgtaaggctttgagccctttcttagagaatgaaagattgaagttacaaaaaaaaaaaaaaaaaagacaataggcacttgcaatataatgacgagttcttcaatttttgatggagcgggaatgctgggaaaaagtcattcttgttgctcaaaagaaggaaatttataaccaaattaataaggtaaacttttcacttaggtcttaatccacaaat

SEQ ID NO: 206937 - DNA, 474 bp, Glycine max
  unsure (1)..(474): unsure at all n locations
aagctatgcgcatacttcttttacaacgttcacttgcacaagacattcttatttctaagaaaaatgcacccatgtacaatcaaggcaccttcgttacctagattatttatatgtgcttccaaggtgtatttgttacctacatctcatgcacttccttggctaaatttacatacatgcgtactcaaagcatttggggtaccaaaaattgcacatgtgcacattccagtatttctaatacttatgcatatacaaactttgtgatgaatcttggctatctacacaacaaggtgatacatttcatgctttactcaagtttttgctacctaaagccgcatgcaaattcaagtatattttcttttgctgactacaaatgtattcaaattaaaaggtattcttgtaagggtatttctttacataacatgcaacatatatatatttcttgtgagacattttgactaccanaaattacatgta

SEQ ID NO: 206938 - DNA, 434 bp, Glycine max
agcttaattagttcttcttttcctaactctcttctgcattcttcgtcattggctcactgtgtgatactatcggaggtgattgtcggcaacgacaatttcttcttcttttttagatttcaaatcctatcccttggccttggacaagaaaaaacaaaaacctttcttaaggatgtttcaatgtgcgacaacatagtgcgatgttgaaagaatgattatggttgtactcaatccttttgacgccgccgagagaagaagaaatgtttagttcgagatcaacgattcgttgcactctcttggcgttgctgccagggtgaaaagatgtatgacatgctggcttactaattccaaacgtgaactaccttagtgctctcttcacgctaaacattccttcttccaacttccagcttacagttcgtgaatccgtagtgctccta

SEQ ID NO: 206939 - DNA, 463 bp, Glycine max
  unsure (1)..(463): unsure at all n locations
cgctcaggatattngatatttccatctccattgtgaacttgtttaagccccagaaggtgtccatggagagcttcttgacaccaaccagtgcacccatcttgtaaacgaggttgaatctgcataacaggaaatgagaaattttttgtttttttaaaaaaagataatccagtgtaagcaacaatagtatgctaccttgaatttggcccaacgtttggttttggacctttggcagatgcgtaagatagcaaagtagtttattgtatcaataacaaataaaaaaaatgttaaacgtcgcctgagagattcgaactctcgcggggaaaccccatgtacttagcaggcacacgccttaaccactcggccaaagcgacttatattagaccttctttaaatttacgtatttatacccctatatgtggaacagaactaccatcttgtttaatttctgtaccgtggcttaaat

SEQ ID NO: 206940 - DNA, 432 bp, Glycine max
  unsure (1)..(432): unsure at all n locations
agcttcaagaaaaagatggcctcagtttatttcttatttccagaagggaattctatcaatagacctccaatctttaatggagagggttaccactactggaaaacccgaatgcaaatttttatcgaggcaatagatctaaatatctgggaagccatagaaatagggccttatatacccaccacaatagaaagagtttcaatagatggtagttcatcaagtgaaagcataaccatagaaaaacctagagatagatggtctgaagaggatagaaaacgagtacaatacaacctataagccaaaaacataataacatctgccctaggaatggatgaatatttcagagtttcaaattgtaagagtgctaangaaatgtgggacattcttcgattaacacatgaaggaactacagatgtaaaaaatctatgataaatg

SEQ ID NO: 206941 - DNA, 452 bp, Glycine max
  unsure (1)..(452): unsure at all n locations
ctcagctttgatagnntttggtctaaatactaattcttaagtctttgtgcangactgccttgaattgttgaacaatttgcttcgtagcaatgcatccaatcaggtttgttgattctgttgggtttattcagttctaaacctggtgctgatttcaactctttatggttcaggtactactaagagagactgtaggacttgactcattgatattgattttgaagctgagaggaagtagtttcacttttaatcaacaaaaggttagattcattcaatttttcactttagtttatgctattaatgaagtgaacccttatagctaactcttttttatccatgccagttgacaatcaatctacttattgcattagaaaccattaaattattactaanggaggttctgagtctggtcctgcgaaagatatgaataaacagacaaataagactactctggt

SEQ ID NO: 206942 - DNA, 436 bp, Glycine max
agcttccttgagaagattcctaaagaagctttagcttatctacacacaccccctataataggtaagctcacccccatgccaaaatacatgaaaatataaaaaagtccctactacaaagactactcaaaatgccctgaaatacaaggctaaaaccctatgctacaagaatgaccaaaatacaaggcccaaaagaaggaaaaaacctattctaatatttacaaagaagaaaggacccaaccttggtccataggatcagaaatctaccttggggttcatgagaaccccaaggccttctttagcagctctagcccaatcctcttggagtcttctatccaatacccttggggggtaggattgcatcatctagttcgagccttgatcatctatgaagtgagcttggacaacgtatttgacgtagatccattgcgtgagactg

SEQ ID NO: 206943 - DNA, 455 bp, Glycine max
tctggctgagaagaagaagaagctggaggaagctacacattcttgaagtgttgatggcatcatcgaccctgcatccatggtcagatgccacgtgaagtggaagatggcccgcacgaagaaaacaggggagatgacgactgaggccgcaaaggaaatcactgagaagattgtaagtcattttcaactaaccattagaattatatttcaatattttgtgaatgctatgtacaactgtgtgttttctatacaggattcctttgaggagcaagcgacacagggatccttcgtcccccatggacgtcaggatgttctcaccgctgctaatggacgtccagagcaccctggatgtgtccgtgctgttggagccggtgtcactatcaagcaatactttggatcggctccacgaacgtcccgctgctctttctccatgccttctgaagaattgcagcagctga

SEQ ID NO: 206944 - DNA, 465 bp, Glycine max
  unsure (1)..(465): unsure at all n locations
ggtgttggggagggtttaggggaagagaatgatgttataatggttnttttatgctgttggacgtatttgaaacctgcaacactcgcctgggcgagtttcgctcacctgggcgagctgatccagctcaaatttttctgcttcagtaaaaaaaatcatatctcatacccaagatgttatttcacaaatcccaacggtcataatgtggagaattattttaggaacctccagaaaaaagttaaaaacgatccaacggttaaggaattcgggatgaaggttttactgaaataagtttaggtaaaatttgaaatctcataatttcaacttaactcaacaaaactccacataactcaacatccacatcaagaaattcacacatgactaattcaagtcatacctcaactcattcaagtcaaccatatagtcaaataaaacaatanatacaattaaacatcaatttataattag

SEQ ID NO: 206945 - DNA, 419 bp, Glycine max
cttagtcacttgctcaatgtgcaaaagcacactaccgattagaatggtttggggtataacaagcctgctaccttatctaagagaaccaaatttgctttcttcaaaaaagcgaacccgaaaaatgtcttcaaaaagaacaacatagtgcattctaagcttaaatcaaagacttgtcattattgcatgataagaggacacgcatcttataaatgctagtgtagaagatatgtattttctacagaaaatgtgttgggattcctaaagatataattatggaaattaacctcattggacccaacctcaattcataccacctctctctagttgagattttctctgacgctcgcctaaaagcaagggactcactatggtacttggatagtggcggttttaggcacatgaggaaagatatgccactt

SEQ ID NO: 206946 - DNA, 436 bp, Glycine max
  unsure (1)..(436): unsure at all n locations
agctntgatcatgagcatgctgatgttaatttattcaagcctttctgatcacttacagtttctttgcagaaatcaaacttgcagtaaacgtatgcctagatcactaggacatgaagaaaagatgcaaaaacattttcttcttgggtatatatgatgatacattcatttgaaagtcatcttgcatttctgtcagcatatttctaacataatgttacctaatatctgaattaaacattattttagggagttggctacttgaagtatgataattgtgaaaatgatggtatattagccacagaaaggtatgcatgatctttaaatacaaacaattaagtatctacatgcttataatgttattaaacaaggaattcaccgtttcatatcatacattttttagaacaggtatccaccaatgagtggaagctttgtaaaaact

SEQ ID NO: 206947 - DNA, 435 bp, Glycine max
  unsure (1)..(435): unsure at all n locations
tgtgtattgctgcattctactaatatatggaattgtcctctgctntgcctgagaataacaattgcttgaccacaacagcgctggaggcggtaagggacaatggtatttcaaataaacctgttgtacatgaacaaacattatatcatgcgctgaccgtgccaaacgaaccagcgaagtcattgcataattgttatactaactatattcaatgtacctgaacaaaatgatttccaaacacgtgaccgacacatatgatgcggtggccagaagaatcaggtggtggttgacttctaagagggaaaaatgtcatgctttgttgtcgggacaacgatacaaggattacgttataccgtgaagcaatgacatatcccatgtctgttatatccatccacttgtccacattaacctgaatgaaccaaacatacacatgtaagt

SEQ ID NO: 206948 - DNA, 385 bp, Glycine max
  unsure (1)..(385): unsure at all n locations
agcttccatcacgctgcgcgatgattctccttcctcaaagcnnattcggagacccatgaattgattgcctaacgctgttcatgtgtcctccaccatcgagtctagagccccgcgaattgattgcctagcgctattcgcctatcctccaccctcaaatctttttcggagacccgtgaattgattgcctagtgctgttcatgtgtcctccaccatcgagtctggagccccacgaattgattgcgtaacgctgttcgcctatcccccaccctcaaatcttattcggagacccatgaattgattgcctagcgctattcatgtgtcctccaccaatgagtctggagccccgcgaattgattgcctagcgttgttcgcttatcctccaccc

SEQ ID NO: 206949 - DNA, 457 bp, Glycine max
  unsure (1)..(457): unsure at all n locations
gtccatccaagagaaaggatgggaagaaattgttcgttctttctctttgcagaatgggaaaatgggaattgaaagcctacttacaaagaaaggtaaattatattgattattgaatgaaaaatggaaaagaaaagctttttattagcaaaatcaaattaaatttcattttaattatataataattattttttaaatctattgtgataaaataatattaatatctatattttttaacatatttgtttatgaaaaaattagtaaaataaaataatttatttttctttctctgactttataataaatataaattaattattatctaaaacttgatataaaaagaataaaaatgcgatataaaatataagacttgactctaaggtttgatgcatgctctntgcgattntttccatgatatattattagtcatatgcttaagattaccttcttaaagtaaaca

SEQ ID NO: 206950 - DNA, 428 bp, Glycine max
  unsure (1)..(428): unsure at all n locations
gtttggtacaagcaaacaactcanagtgctgaaatttaaattactgaaanttgaagaattgaaatataaaaactgaaattaaaatgactgaacaacaatcataaaataactgaaaataaactaaaatgttcaagatgcacaaatttaaatgtcccgctcctgtggttgctcttgtgcatgctcattaaggtccaacacctgagcaactggtgaatcctgagagataggttgctctaactcangtgctggtgcagatggtgtggcatcatcaggtatgggtgcaggagatggctcangtatctgatctatggaagtccnctcctcctgagtcatgtgtgcatctgcatcaaaataagaatgctcaggaggggtgagctcatcctccccctctgctgctgctgctgttggctcctcagaagcaggctatt

SEQ ID NO: 206951 - DNA, 407 bp, Glycine max
  unsure (1)..(407): unsure at all n locations
agcttgcaactatgtaaagacacatactngtatttgaggggtcctttgggggcagtaataggaagatacccatcaagtgatggagttacccaaatgggtggaattataaagcacaacaagaaatgcagggacatcactgttctagtgatcttcatagctttttggatagcaatgattgtcaactccagctttgctttcaaccaaggaaacccactgaggtgagcaatcttaaagtttccaacttttatctgtattggagctgtgagtggagtttctgcaattggcaagttgtggttttgaatgtagggtttgacacgtggggtgttgtctttcaacggggttcctttatagagcttattgttaggtgaaattggtgatggatgcatttttttaagctagtggttatg

SEQ ID NO: 206952 - DNA, 469 bp, Glycine max
ctatcatgtgtctacactattgaagagcacacactagttcttactgttagaagacatgcagcagtgtttagaagcactaattttgaagctatgaatttctattatacttgaagattttcaaaatgaaactcaaagaagacaacaagtccttatcagaaatgagaaactagaagattgaagattgaaggtgcatttcactacaattaccacaacatatcaagaagacatcctgcatacaaatcttaaaaagacttcccattattcaaattcaaaaatcatgaggatccactaagaccataaaattaagcacacaatggatacatttcaaattgaaatgtgcaagttgtcaataacaattgagaaaaagcatagatgaagaaaccaactcaagaagagttgcagaagacttggaggatgaacagtgtgcaaaacaactagttgtatatacatgtacatggacaacccatat

SEQ ID NO: 206953 - DNA, 432 bp, Glycine max
  unsure (1)..(432): unsure at all n locations
ttaagtcactgaggctgcaagctgacaagtattcaagggaagatgncatgatctttatccagccactcaccgtgctcctcccgtacccgagtagtttcacaccttgcccttctggtagacctttaacaacggtccagttcggaggagtgggggcacaccacggcgaagaagcgaaggcgaggttcagaataaggccttcggagatgtaagcgattcgataaggggatgagattcttactgggaggcccctgaaaatctgagcaatgcgagattgcaccacggtgagtggacaggtttcgtttctggtggcggcgagttctagtccgccgttctttaccccgaagaggggtaggatgtggtatgtgccgccgtttctaatggcggcgccgtctctgtcngtgacggcatctgctcccgctgaagggaggtgtg

SEQ ID NO: 206954 - DNA, 396 bp, Glycine max
  unsure (1)..(396): unsure at all n locations
cacaattatctcaattgttcttacaaaacactctagaagcatatgatataaatctacaaacggatagtcttgaaaacaggtaaaggacaaaaagaaaaatttgatcttaaataaattgtcaataaaacaaaaattttcacatatgggtaaaactattctgaanagaaaaaaagggaaacttgaaatgaaagcattactaggagcttcatttactaggaaaattatagggtaaattaataatgagaaaattgtgatttttgtaattgtataccattgcatatagntgaacaaatgctaaaagttagaaactaacaagtgcaaacatcctcataaaaaaaaaagtgtaaacattaattatctaaataggtatatctggttatatatacattcataatc

SEQ ID NO: 206955 - DNA, 437 bp, Glycine max
  unsure (1)..(437): unsure at all n locations
agcttcatgatgatgaacaacaattgtgatgttgtttatagcccaaaggantgactcaagattgattcaagaattcaagatcaagcatcaagaatccaatccaagattcaagattcaagagaagaaatcaagaagcaacaagtcaagacttcatataggataagtattaaaagatttttttcaaaaaccagataacacagttttgttttacaaaataattttctcaaattttctaagttaccagagtgattactctctggtaatcgattaccagttggcagtaatcgattaccagcgaccagtttggttttcaaaatgttntcaaatgattggtaacgttccaaaatgattttcagataatgtaatcgattacactatattagtaatcgattacaagtgaatctgaacattggaattacatcctattgtgaagagtc

SEQ ID NO: 206956 - DNA, 350 bp, Glycine max
  unsure (1)..(350): unsure at all n locations
tcgnatggtctgaaacacgtnaaagggcatggtataatgttattgattgttattttctaaaaagaaggctttaagaagagtgaaaatgaagtcactttatatgtgacgtgataaaaaaatgaagtgcaactcatggtctccttatatgctgatgatctattccttatatatagggaatcaaattccctaaaccaagtcaagaatatcggaaccttggagaatctttatgatagatacaattaatgtataagaaaatgatggagagctaccatgtcgaagatcaattcaataaatataaacaacatctgacagcttctagaaagagacaacaatcaataggcaattggtgt

SEQ ID NO: 206957 - DNA, 455 bp, Glycine max
ttaagtcacctgcggcatgcaagcttggttcgaggtacttacccgttgaatatgattatcgatgaagaacgaatgaagaacgtcgaagaacggtttgaaacctttgcgagattcctcacggaaaacgttacggaaacgtttcggaagcgcctcggcttatattttcttcacggaaacaatttttccaagcaaattcgaaagagagagaagtgcctaaggggctggaccatttccttcttgctttcctcccctatttatagcaaaataggggaggtggttgccgcccagctcgcccaggcgagctcagctcgcccaggcgagcagggttgcttcctccagaagcaaccgccttctggaggaatcttctggagggcccaaatgggcctgggtgctatttgcacccccatttttactaagtacacccccctctgcttgttttggtgattcttttttcg

SEQ ID NO: 206958 - DNA, 469 bp, Glycine max
  unsure (1)..(469): unsure at all n locations
cggattaattcggttggacgagggatcgagggtttagtattttatgctatagcatagaacacaagaacacgattgattagagaaatatatttctatgcatcagcttgtttgttagaaagaccgaacatttctacctactgctgtcattttatttaccttgcattntatagtttttagcataaaagtttggtttaaatttcgtttgaaattatcactcatacatgttctctcaaacaatgcttcaattctcaacttaattcaagctaacattagttccctatgttcgatactcggattcatctgttttcattttaaatacttgatgatccagtgcgctctccggtaaacccccattgaaatttcctcgagacatanatgaacaaaaagtaactgcaatggggagtcaacacacatcccaattgataccttttcttaatttttgaaatttccttgtcaaatntttcattct

SEQ ID NO: 206959 - DNA, 421 bp, Glycine max
  unsure (1)..(421): unsure at all n locations
agcttgtagagctatatatgcaccaaggcnttagtcttcttgtgttaacctaacaaagagccattgtttgggacttctaagtgaggaggtcttaatttacgctgtgttgggtgatgggtgtcgagcattatttaaaggtcatatgacgttggttttcttggtcatttttggtttgataactatgggaggtgtgacacatgttatcccgtacctaattattaaataatacattgtgaaaaaagaataatttttaaacttttattaatcttaaaactttcatatcataaatctcataaataattaaaacttatctctccagaaggccatgcaaaatgtctacaaaaataaacaatccaaacataagaattcatattattaatctagcttccatgtcacaaactatntagaatttacaatccct

SEQ ID NO: 206960 - DNA, 442 bp, Glycine max
  unsure (1)..(442): unsure at all n locations
ctctattacacaatattctntagaagggtaggtatagagcgtacttgcatatctgaagaggagatcaaacattatattagattttcaaagtgaagaaagaaacttagagaactcgtgattatacaaacacgggttttattcgatggatataattgagagtctccatggtatatatcaagaggaggatacatgataatattatggcttacattagcgtttgccatagttaaagcacactattacaacttttcttaaaacaaatgcatattttaaggacatacaggaatatgacaaaagacgttattatagtgatttctaacacactctgaatcttatcttaaattctgactagccataaagttgagttgatgatgttacttttctgagatgatacttctatactaaggatatatgccacaaaggacatctaatctgtatagat

SEQ ID NO: 206961 - DNA, 372 bp, Glycine max
gacactactcttaaaacaagaatggcatacaacctcctcccataaatacaaacatcaatgtaaatttagagcaagcttatgcgcatgtttccttacgaacgttcacttgcggaagacatcctattaactaagataaatgcacccatatacaatcaagggagcttcattacctagattatttacatgtacttccaaggtgtatttgttatttacatcacacacgcctccttggctgaatttacatacatgcatactcaaagcattttggggtaccaaagactgcacatgcgctcatcttggtatttctaatacccctacatatacaaacttcacgatgaatcttgactgcctacacaataaagtgctacattt

SEQ ID NO: 206962 - DNA, 417 bp, Glycine max
  unsure (1)..(417): unsure at all n locations
accaagggatgctactcttaaaacaaaaatggcatacaacctcctccaataaatacaaacatcaatgtaaatttagagcaagcttatgcgcatacttctttacgagcgttcacttgcacaagacattcttataactaagaaaaatgcacccatatacaatcaaggcaccttcgttacctagattatttatatgtacttccaaggtgtatttgttacctacatcacacgcatttcctttgctaaatttacatacatgcatactcaaagcactttggctatcaaaaattgcatacgggcacattctggtatttctaatacctatacacacaaacttcatgatgaatcttgactatctacacaataaggtgctacatttcatgctctttttcaagtgtttntactacctanagccgcatg

SEQ ID NO: 206963 - DNA, 432 bp, Glycine max
  unsure (1)..(432): unsure at all n locations
agctntcatagcactgtagctatggtgcttttgaccgaacgggaatcccgtggctttggaaatattgtctgagatgtcgagcaacattaactaatgctaaagccacttctccattacttgataacgagtttctggatcatgtaacactcgggtgacaaaatatattggtcttaattcaccattttcctcttggacgtggactacacttatggctttgaaggagattgagaggtatactataagtcttttgctagtgccaagttttgaaagcactggataggttgcaagtgaaacctttaactgctgaaaggtttcttaacactcattggtccattctatgttttttgtctttttaaaaagattcatgattagtttgaccctctcagcaatccttggncagaatctagataaggagactattctatcagacta

SEQ ID NO: 206964 - DNA, 418 bp, Glycine max
  unsure (1)..(418): unsure at all n locations
ttggtagagaaagaaagaggatgatgtgatagtggttatggtatttggaaagaaaatgggtatgttctatggaggaaatgtgaaaaatttagtggaaaaagttgtaaagatggaaaagaaaggataaggggggcatacaagaagtaaagatgagacatcaaggggggaactataaaaggttgtgaggatgctttcttataatgtgaggaggttaggggataaggtgaaatagaggtttattatagagttagtggtgaaggagaaagtccaagttgtgtgtatccaagaacaaagaaagaggggtgaaataattctttgtcaagcactatgaagggataatgaagtggagtggttggaaaatctgataattaatgtggngggtgcgggggctattatgtctatcgaataataatttctt

SEQ ID NO: 206965 - DNA, 431 bp, Glycine max
  unsure (1)..(431): unsure at all n locations
agcttcatgatgaatcaagagtgatttctatatgtttgatgataacaaaggtgatgacaaaagactcaaaggtcaagaacacttcatgataacaaagatgatgatctcaagaatcaagattcaaggttcaacctttcaagaatcaagatcaagattcaagactcaagattcaataatcaagagaagacttaatcaagataagtatganaaagttttttcaaaaaagaatttgccaaggactaatcgcctgaattctttttgtgtctctcttctcccttttccaaaagaacaaaggactaacagcctgaattcttttgtgtctcccttctcccttgtcaaagaattcaaaatgacacagtctgaganatcttttgattcttccctttcccatatacaaaagatttcaaaggactaaccgcctgagaattctt

SEQ ID NO: 206966 - DNA, 465 bp, Glycine max
  unsure (1)..(465): unsure at all n locations
tgaaccaaaaccggngagagtgtgatcttacactgtgagttaacgactagctgtgagtaataatctttgcatcaatctctgaattttagaatgaaatgtataaatgaggacatgatgaaggccatgattgtacatacacaagccttttgaccaaaaagcttaccttgaattataattttatcctttgcaccctttttgagctgaatgatattgtcaaatatttgaaccctaaacttaaataattatctccagataccttgtttagattctaggaaagcatatggttcaaggcaaatttacccccaaatttgggggagtggaacaaattgtgatgcaaagaaagagataaagcatcagcacacacaacacataagttgagtgttaaaaaaaaaaggaaaagtgtgttgatttaacaaggtcaaaagcaaatgaaagtganaagctagtgagcaagctaaccgcatg

SEQ ID NO: 206967 - DNA, 376 bp, Glycine max
  unsure (1)..(376): unsure at all n locations
agcttctgttctcaatgtcgagagtcttgattattactggacacaatcggacatcnccagaaaaagttattgtcgttatgaatttggtgctagcttccgttttcaattatgagcgtcacgatatattcgggacacattcggacaacccagtaaaaagttattggtcgtagaatttgctcagagcttccgttttagcatctcgatacattaagggattcattcggacattccgagtaaaaggtattgtcgtttgatattgctcagagcttctgttctgaattttgagcgtctcgatatacttcgggaccgaatcggacattcgagaaaaagttactgtcgttgaatttgctaaaacttacggtttcacatacgagca

SEQ ID NO: 206968 - DNA, 467 bp, Glycine max
tgtagggttaaagtctcacgattgtcacgtgctcatgcatttattgttagcggctatacgagacatcttgccaaacaaagtcaggttaacgataactcgcctgtgctttttcttccatgctatatgtagcaaagtcattgatctagtcatgtttgatgagttggaaaatgaggccgcaattatactatgccagttggagatgtattttccccctgctttttttgacatcatgattcacttgattgtgcatctggtcagagaaatcaaatgctgtggtcctgtttatctacggtggatgtacccagttgagcgatacatgaagatcttaaaagggtatacaaagaatctatatcgtccagaagcatctattgttgagaggtacattgcaaaagaagccattgaattttgttcagaatacttagagaaggctaaacctgttgggcttcctgagtctcggcatgatgata

SEQ ID NO: 206969 - DNA, 436 bp, Glycine max
  unsure (1)..(436): unsure at all n locations
agctngcatcagattcctcaagaggttattatganaatgcaatcattgttgcaatctttaggggttgattgctcttaagagagtagtttggaagttctcatggatgagaggcagttaataggtttagaaaatggtggtgcttctaacccagatggccatgattaggctcttagtctaacgataaattccctattattgatagggaaatagagacagatcaaggtactcgggtatgaggcacttcattggattgataaaaaggcttaggagatctaatcattgataactccaagcgtgattggtcatttgggggtcttcttttcctatcacacaagctaggaatgttaggggttcgacagctgaggcccctagtggcgatggcaagatatgctcctaaggtcagaaggaaaatgtggggtgagtcttttgatgatgt

SEQ ID NO: 206970 - DNA, 437 bp, Glycine max
  unsure (1)..(437): unsure at all n locations
tgtagaatggctagacatgatacatgtcagggtttggtttggttcaaggataaaaagggatgccccacattatttccatgacacaaatgcaaaaatgatgatttggaaattttatgcaaaactggtcatgcatgcacctatgtggacactcaagcgtcaaatttttatggtcatgtgatgctagggctcangattcatttcctccattttagtcaacccaatgtttccaaaatatgcttttttatcaatttgtgcattcatccgagtccattttgggcgtccgggaaaatttcacagcattcacccttcaggtgtgcacacatttttttcaaaaactagttatgatcagtgaattttttcaaagaaaagttggaagtcatctcttttcaaaagcatgttggcttttcagctagacaactnttttttctttntttttc

SEQ ID NO: 206971 - DNA, 378 bp, Glycine max
agctttgagcaaattcaaacattaattacttttgattcggatgtccgattgtgtcccgtattatatcgagatgctcgtaattgaaaacagaagctctgagccaattcaaacgacaataacttttgactcggatgtccgattgtgtcccgtaatatatcgagacgctcgaaattgaaaactgaagttctgagaaaaatcaaacgacaataactttttactcggatgtccgattgagtcccgtaatatatcgagacgctcgtaattgagaagctttgagctgattcaaacgacactaacttttgattcggatgtgcgattgtgtcgcgtattatattatgacgctcggcattgaaaacagaagctctgatccgattcaaa

SEQ ID NO: 206972 - DNA, 449 bp, Glycine max
  unsure (1)..(449): unsure at all n locations
ntctcgctacanaattcacttcttggttggtgtttttggtttgtgctaaaggtggtgttcgtcattggaagtgtggtagacagactttgtggtagatttagggatggcctttgtggataactgggtggtgggtaaggaggaggtttgttattggctgagtaatgacattgttgggttggtgggaaacttggccgtataagaatggcagtcacagcatgggtttctccctctttctcaccctcttcatttgccccagttttctcagtcgtctaagcaggatgattaaatttgcctcttttcagatccacttcgatcctttcactggcgaagaccaaatccgcaaagcttgaaggtgtgtaacccaccattttttcatagtagaacacaggtcacgtatctactatcattgtgataatctctttctcttgttttggngtgctacttgagtt

SEQ ID NO: 206973 - DNA, 421 bp, Glycine max
  unsure (1)..(421): unsure at all n locations
agcttgagatgaggaagagtttaagtttattcttcctgcttttattggtgaccacagagtggtacctggagatatgtcgcggnggtcacgagaccttggggacgtcaggtggggtgctattgcccaaaaccaagcttgaccaatcccgacccaacccgggcatagtcggtcagtgagaacctgtgatgtacctaagcaggcgagctcctggcaatcaacagataataggaacaaagaccacaaagcaaggaggcttgtggtggctggccagctgtgaattttgtgtgatatgtggagtatggcctctggtaatcgattaccaagggtgggtaatcgattacaaggcttaaaaatgaagacagggggctaagatggtctctgaaattctgataccaggggacagatgtcgtacaggatgtca

SEQ ID NO: 206974 - DNA, 453 bp, Glycine max
  unsure (1)..(453): unsure at all n locations
ntccacaagtgtcttcacaaataactatcatgaagtctttatctagcaagaccacccatcatatctcccaaaaccccatacccacgaaatttaagagagaaagaagtccacccaaacctgaaatttcgaagtcccactcgtagccacgcacttcacgactccaaaaacgccctcctttcacgatttggggcagaaatgatggccaaaggttgaagctctgtttggagcttcaatggagaatgagggagaagaaaatggcaacgtgagggagagagagagctgtctgaaaaagtgtgggggctgagtgaagagagagaaaagctctttggtttttaaataacagggggtgttctccttcttctatcattttatgtaagcaatgccacatgtctccatttgagtggagcaagaagggcccactctctctttttgactgtgacccatactcagtca

SEQ ID NO: 206975 - DNA, 418 bp, Glycine max
  unsure (1)..(418): unsure at all n locations
agcttatagtaataggctttaagcccaacctttatgtgtntaaaatgctcatatatntntggcaggtaaaaaagaatttcttatatagcccaacaaaaaatggaaggtattaattaattaaaaaatgctcaataaaaaaacgaaggttggtcattggctatgggaaattgctatatagttcctaaattcactccccttcactctttgggcccatattttcccttccctattttgattttttcataaaattcttattttatccctctcccttccctcacctcccccctcggnctcaccttaatatcttcttcaagcatcttctcactttctcttctacaagcattgctcttcctcgtcctccattatcttttttatgtgagctttcgcacctccattacttatatattgacagcattct

SEQ ID NO: 206976 - DNA, 423 bp, Glycine max
  unsure (1)..(423): unsure at all n locations
atccgcaggaatgatgagttgatcattgttcttgcacaaagatggggttctaagaccaacacgtttgtgtttccttggggagaagcaacgataacattggaggatatgaaagtttgttggggttactctgttatgggagctcctatttctagccctcttgtgagtggtgaggaaagggaaatagaacanaaacttataagagtttttaggatgtttttcaaatctaaggccagaagggcggatcatactccatggatgaagcatttcatgagtaacgagagccgagtggagcatgaggcgttcttgtctttgtggttgtcgaggtttgttttccctggtagatcatatacaaccattttgcaagagggcttaaactagcacttgctcctgctgtcttggccagcatctacagggatttcagta

SEQ ID NO: 206977 - DNA, 435 bp, Glycine max
  unsure (1)..(435): unsure at all n locations
agcttgattccaagcctgcttatgtcgaatctttttcttttgggcttgcctctggagctgccctcaaaggtattggtgcagttgtgcctcatattattgcccctcttactcagatatggaactctgtttcctctgccattaaatcttccccccaatgatattagtatgtaattattagttcgtagaaatattttttaatgaaatgactatgctaccattttttatgtcattataattcttgtttccaaaaggcaacatanagtagcacaattttcctcctcaacacctcaatgctaacctgaagacaaaaatacctagaaggtttgtacaggacagctttccccttattgggtcattcaccttatataatccaaaatcacatgtttgatcccaaaggagttaattctaagtaaaattgattgactttaaaacaat

SEQ ID NO: 206978 - DNA, 465 bp, Glycine max
catgacaaatgttgttaacaaaaataatatgagactcgttgtcttgttttctctttttcccacagaaactcatggcaagttatggaaagatataaaagaaaattataggcgtatctagccgctatggacctgtaaactttggaggaagttgggaagcaagttatttaatttgggatgttaatttagaaagtactattattgcagagtaataatcaatttagcttcagaaattataatgttcgttttaattgtttcctaaaaattgtaaaatgagaagataacatctaaaattgtaaattctaattaatttaatccatagaattataacaattggtcaaatacttccaaaataacactcgcaattataattcttaaaaagagaatttacaattataataatcatacatattaatcatgaatttattattttttaatgtatttgctctaactagtgcgatctaacac

SEQ ID NO: 206979 - DNA, 435 bp, Glycine max
  unsure (1)..(435): unsure at all n locations
agcttgcagggattctagcaggacgtgtattttctgttttggactancaattattgggtgcgccacttaaacaattataaaaagggtgaaactacccaagccaggtgacattttctaacatttaactctccaatagtcatttattgttatgaaaacaaaatcaatttaaatgaaagaagtatttttcaattaattcttcaatctgttttctgtttcatctatatgtcccattatttagttaacatcataatataaccactaatataatataacccatagtgcaaatcccaaaagatgcggtctttttggcaaatgaaaccaccaaattactttttgatctctgagatcgatatggtctaattatgacagcttggagtttcaatattgtagatattaaagcatatactaacggatgattttttcactgatacttgt

SEQ ID NO: 206980 - DNA, 470 bp, Glycine max
  unsure (1)..(470): unsure at all n locations
cttttaagcgcaaagtatcattccagagataaagaaaagattattattggtcgaaaataaataggtgccatatgtgttgttagaacaataaagtgaggcgggaaaaaaacaaataagcctacgttgaataagtggaagtttttctaggataaattctctcttataaccctactttttgaaatcttagaaaaaccataatttctttgattagccacgccacattacaagccaataaaagtccttagtgatccaccaagtgtaagcagggtaactttaactgagatgaagtgcaaagttgggaacattaattacaggtcgtagaaattntaaacactcatccaagacacttgtgggcagagagaaacaccaaagccttgtgaggaaaagtgaggtaagccggcctgattcatttatgctactaaccaattctaactcaatgtgtggttatgcgttcattgcaagatcatgac

SEQ ID NO: 206981 - DNA, 460 bp, Glycine max
  unsure (1)..(460): unsure at all n locations
gcatccttaagtcacctgangcatgcaagcttaaactntagagttattaacataaaatattattatacaaaaaagtcacacgtataaaaaaatcacacattttgatcataaaaatctaatatatgtctctctcatttaaaataaaataaaaaatattttaaaatttattttaaatctcaatgatctttggaccggtcctaaataccctccctttcctatgaaaagatacaattaaattatttacaagtaatattcccaagtataacaaacagattatggcaacaccagcgataacaagatgaaaaaactcctaggattgcatacgaacacactacccctacaaaacaaaaccaaccatcaataaaaaatatataatatataatatgcagaacatatgtaattaagaagctagcaactaaaaaaactgccgtggacgcacgcacttacttattgctgctgt

SEQ ID NO: 206982 - DNA, 470 bp, Glycine max
  unsure (1)..(470): unsure at all n locations
tcttcccggaggtcatagggccttgagatcagctatntaattttctgcacgtatcaaagaggctcaatctcggggatatgccaatggtgttgaagaactatagaaaaaaataacaaagtaatagatgaagacaaacattaaaagaaaaaagggtaaaggtcctgcgatgcattatggtcttcctttggggtttgtggtgtgttttctccattgcatttgcaattaagtagatgatacaaactgttgttgttttgttgtttttagatatgcactgattcaaattgtgttgtgatcaaatttaaggttatgggtttggtatttagttactgtatgcacaagtttgtattaacacatttagtaatgatatttttttggatcacgtccctattaaattgaaaaattatgtattaggtccctctgaaaacctcattnttatgtgttttaaatgaattaaaatatgatgtcatacc

SEQ ID NO: 206983 - DNA, 422 bp, Glycine max
  unsure (1)..(422): unsure at all n locations
agcttgctaacccatggaagctcctaatatcttctacactttntggggtgggccattcttggatggccttgattttctcagggtccacttggaccccatttataccaactacaaaccctaagaaaactatattatctactcaaaaagtacacttctctatatttgcatagagggtgtttttcctaaggactgaaagaacttgcctgagatgtcctaagtgatcatctaggctcctactgtacactaaaatatcatcaaaataaacaactaaaaatctacctatgaaatcccttaagacatgatgcataaacctcataaaggtgtttggtgcattagtgagcccaaaaggcatcactatccattcatacaaaccaaacttggtcttgaagcgggnttcactcatcacccttttcattctgatt

SEQ ID NO: 206984 - DNA, 467 bp, Glycine max
tcactaaaggtagtattgatgtagctattgtcaaggaattctatgttaacctttatgacccaaaagacaagtcacctaagtaggtgagggttagaggtcatctgatcaaatttgataaagatactttgaacacttttttgaagaccccagtgattctagaagagggggaaaatctttgtgcttattctagattttcactcttgaggcttgatcctcaagagttagttcctaagctctgcatcccagggaggggatttgagcttaatgcagatgacctccctttgaagatattaaggaagaacatgaccactttagttcagacatggagcgttctttccttctttaacttgattcctacctcccatacatctgatgtcacattagatagggccaagttaatctatggaataattatgaagatggacatgaatgtgggttacctcatctctcaccagatctctattata

SEQ ID NO: 206985 - DNA, 427 bp, Glycine max
  unsure (1)..(427): unsure at all n locations
agctnngctttgcctcaataacgtttttttttttgttagatccagacaccataacttacaccaaattaccccttgacaacttgcactggcttattgatttgagagtttatattaagcaactnttacttaaccaataaacatttgtgtgatcctgatgaaaaataattaatgaaactggtatgctcaatcacaaaggtgtcatgagtcaaaagtgagaactatcaccataacacactctctaaagcanagtctcaaagatattaggtttaattgtaaaatttgaccttctattttaccctttccaccaaattaatcttcttatttttttaatttattatcagagaattattaaagtgacttactattaaaactaaatatttgatgtgaaaaatatattaatatttatttatgtaaaaatactcaaaat

SEQ ID NO: 206986 - DNA, 443 bp, Glycine max
  unsure (1)..(443): unsure at all n locations
catgtgcatgagcgtctgtgacgcttgggaactatttatattctntgaatcttaaatcagatgctatgaattacatgtcttccaaccatggcaaaacagaagacaaggaattgaaactgttctaaatcaacgcagaggcaagcttgaattggtttgtaacttacaatctatagatttttctcaaaacatctatctgtagtgtacactcaaagacaacaataggaacaaaatattcataatatgacatgcttaaacattttagtttgattaccttaatagctattggctgacttccaggattttcttgtggctgactacctgaattcattatcagatgcacaaatttcagaatgacctcaaaaatggattggatatcatgatgaaacataagatgagtatatatgtgtctatggattattctagtcagaatcatatagtatata

SEQ ID NO: 206987 - DNA, 359 bp, Glycine max
atcactgtattttattaaatcaaatcaaatggtgagacttgagacatggaaaaaaaaggggaccaccacatggaattccagacagagcttcccaagtgctattcagcactctgtctactgaaatttccctgacaaaagatataagcagtacctatcggtgagagtttggttggtaccatccacttggggttacaggtgtaagaatttttctatttattttttttaaaaaaaaaattatttttaggttctatattgttgttaaatctaaattttagactttgaatttcgacaatctagttactaaaatttataataaaaaaaaaaatattaatagctctccttaaagcttggagtaaaaa

SEQ ID NO: 206988 - DNA, 414 bp, Glycine max
ttttcgtttgtcttattttattagaattaatatagaaattttgttattaacctcatctattattttattagaattttctttttttgtattattttattagaattcttaatttttttaaaaaaacaaagacattctaagatggttctttgaaaaaccatcttagaaagtatacattctaaaataatttttgaaaaaattatcttagaattcttaatatttttaatttaaaaaaaaacgttctagccatcttaaaaaatataccttttaagaaggttctttgaaaaattgtcttagaatccttaaatttttttgtttttttaaaaaaagaacaaggattctaagacagttttgcagagaactgtcttagaaagtttattttctaagacggttttccgaaaaccgtcttagaattct

SEQ ID NO: 206989 - DNA, 427 bp, Glycine max
  unsure (1)..(427): unsure at all n locations
agcttctnttggaccttgaacaggcaactatacttctctttcaaaaccatgctatgtgctcgcgactggtccctttcttcctttcacaacttgagttcactattgctaccccatagagctccgcgaaatttgttccggccatactcttccttgcgagccctcttggtctcttgttcaagggctcttgcagtaattgcattctcttcccgtaacccggcacactccttccgaacgtgtgtagcggccaacttgaacttctccttggcaagttttgcctttcctaactcgcttttgagagcttggacttcttcgtcctcttccggtgcttcaaaactctctttgctgacgacttttaacttggcgagccaatctaaacctcgtatatgaactttcagccattcgtggtacccaccaatgatgccattac

SEQ ID NO: 206990 - DNA, 395 bp, Glycine max
aatatgttaagctcctacagataaaagagcaactggctataagaggagaggaaagcaatttcagaagctgtgaaatattggacccctataggaggtgagaacgtgccgggcactagtatcaaaaacaggttctttgaggaggtcgatataaaaaggtgattacaatcgtcatttatatctctataacataggctattgcggagataatcacatttctctgtgatcttttatataggctatctatagagagctctaatatacctttgagcgacacgacacaatcgtactgtgaaacccatttatttgcagcgtaatactatatgaaaatcaatgcgtaagttggttgggggtaacactaattataaagttgctgggtagacactcactgactatat

SEQ ID NO: 206991 - DNA, 379 bp, Glycine max
agcttgcaacaatgtggctaaagagttggtttaaattatcacacggaaccgtgtttagtgtcactattcttgctcggaacctaagtaaaacatacaatatggacaaattgattcgaatctaaaaaatagaataaaattgataaagaaggataaaaattatattatctaaaaaaattattcttttcttaatttagaaaatatacgatcgaattgatttgtttgagtgagcatttataaaattgatatttattataattattttgaattatagtgatttatctttgaatatttttataataaaaataaattataagacaacttaatataagattttatatcaacattaaagctactcaaattatttcaactcaaaattaat

SEQ ID NO: 206992 - DNA, 464 bp, Glycine max
  unsure (1)..(464): unsure at all n locations
cgaatngagtctggngattntgtgtccttgcccactattatttctcaccaagcttggcctgcattgtgcgtcgtagtctgctttgccacctctactaaaatgtggaattattatgatgtgttttaatcatgttagattatattgtgaagtgaggtgacttgtgtttgtttatttttgaagaatcttgtgtggtggtttttatgaatgtgaaacttaagctgtgtgtatgtgttgatttggtttgattgttgttgatttggttattgaaatcaatgatttgctcccttgatgtgtttgggaggatagaagctaatcttcttttgattattttggtagatggatagggcctcaatactangggatgccattgactacttaagggagttacaagtgcgaattactgatcttaatcatgaactagagtcaggcccgcctggctcataccttccacctgctgcaagctt

SEQ ID NO: 206993 - DNA, 405 bp, Glycine max
  unsure (1)..(405): unsure at all n locations
agctngnactatgacgaatgatgcctttttattcatcgtattaacctacgattcaatttcctgcttctggaaatgggggtatttgtaaggctgaacattaacaggggtggagttgggtaaaaggtgaatggaatggttggtggtgccggatggaaggagttgtgttggtggttggaaaaaggttggaaattggttaatgatggagaggatagtgggatgagtagntggtaggggtgcagcttgaggacaaacacgaatgtggaaaaattcacttgcacttcgtgtttggagaacaccatggagttgggttggactgattgccgtcaacggtgtttctgatgttccctttaattcgatcaattggccatcattgatgaacttcatggtgaggcttgtataatctgt

SEQ ID NO: 206994 - DNA, 466 bp, Glycine max
tgcatgcattaattgatagtcttattagtgcatagttgtttgttggatgacatatggtaagacctataaatggtattttcatttaaataatattattgtattggttcacacaaatggtttaaaaaataattaataaaagttgagctattataattttggcatgcataattgtgacaagaattccatgtggctaaattatattgttatatcatgcatagctttgacatgattgccatatgatgaaacttacatacaatccattaattgatattgtcatattagtgcatagttgcgacatggttgccatatggcgaacaaatttgtaccatatcatccacttaaattatttttaccaacacaaagataaaaaaaaaaaaaattagaaggtaggacaaatgtaatttacaacatggacgacatattgtaagacctataattggtattttcatttacataatattattat

SEQ ID NO: 206995 - DNA, 348 bp, Glycine max
tcacactctcaatataattgagactgttgtcttggcttaaccccttcgtaattggaaaagactataataaatgaattgagctgtgttatgatcgaatatgtggaactgtattcacattacactagaaataactcggggaatattggagaccatatttttcattgaacctcatcattactcattttcaactgaaagagaaaaactatttcagggacccaaatggattatttcatcaaactttaaacagtgtttacccatgtgatggatctcaacgtttaaatgtttttttgcaaaaaatgtatagattgtttttaattttatcgcagtgttctccaaacaaataaagtt

SEQ ID NO: 206996 - DNA, 421 bp, Glycine max
tctgatgttctgccagcaactctgataggtactggctgcttatatataaaaaaaaaaacccacccttttcttttatgaatcaaaagcacacaaattcatctaaaacaaatcaaacagacatggccaaatccaaagggtgtttcaccaagagtccaagattgtgtcctttttctttttttcagttttgatctaaaaaaaaaacatcacaagaaagagaaaccaactcacctgtccacttctggattgctcctaatctgaggagaagcagctctagcaggagagaagttgggattatacaagcctgacatggctcactttttttctttagtttcttttttccttaaggattggaagaaggagaagaagaagaaaaacaaaccataaaacaaaaagttgaaaaagaaggttttagttggtgtat

SEQ ID NO: 206997 - DNA, 389 bp, Glycine max
  unsure (1)..(389): unsure at all n locations
agcttgactaggcgagttgattttagcctttgtttcactntagntattagncaattcaattaagaatgagaaatcccaaagagaaaaaatgtccgattgattttttcgcttttattttactaaaaggtattntttgattattatattattattttacctctttttttgatttccaacgtggttacggcacgaccgaacggtcggaattcattttaaccaaaattaacggatgatacaattcaaacgatcggtggaaatttattttatttttagattaagcgagaaattacttaaataaatggcttaagcacgtcaaaagggggtataaaaagcagatgaaaacgagaataaaaatacatgaaacaaaatgtggaccaccacgagtacat

SEQ ID NO: 206998 - DNA, 450 bp, Glycine max
  unsure (1)..(450): unsure at all n locations
tctaaactntatacaagaatgaagctctgataccacttgttagacaagtggcctcagatatcttaagaaggggggcattgaattaagatatcacaatcttttctaaattaaaaattctattttgattttaacccaaatcccaagatttctttcaaaaatgaactcctaaataattatgcaaattaatcttactgaatagaaacaataagcaataaacaataaacaataaaagagtttaagggaagaaagattgcaaactcagatttatactggtttggccacacccttgtgcctacgtccagtccccaagcaacccgcttgagagttccactatcttgcanaagtcctttacaagttctgaaccacacaaggacaacccttcctttgtgtttagatttctttacaacaagagaccctcggtctcttaatccctttttagaaataagatga

SEQ ID NO: 206999 - DNA, 422 bp, Glycine max
  unsure (1)..(422): unsure at all n locations
tctttggaacttcatcattttgattggcttcttctggagaatcttcattgcttcctttccctttcctttagaatcttgtccatgaatatgcatttgttctaaagattctgcaacatcatctaaaatatcctttcttggagaaatagcattagactcatcaaaggaaacatgaatagattcttcagtagccatagntcttttattatatattctataagctntactatgcaaggaataaccaaagaaaattccttcatttgacttagcatcaaattttcccaagttatcctttccattgtttaatacaaagcatttgcaaccaaaaacatgtagatgtgagatatttggtttcctaccattgaacaattcatatggagttttctttaagatgggtcttattaaagcccctattcatgatataa

SEQ ID NO: 207000 - DNA, 469 bp, Glycine max
  unsure (1)..(469): unsure at all n locations
tctagaagtccttctagagtgtatccaaacaggctcaaagatactaatagttacagcagttactgcattntttcaaacaaaaggtaacattggatcactagataaattcagacaatataattcccaatgaatttgcatagttcatagtaaaagatatgctcagtgtctatattaacagcaatcataaattcatgattaacttgagaagggaaaagggtaaaaattctgccccctcaaatggcatttcaaatgaagaggacataaagaaacaaacaaataataaaacaaaaccttagttcactaggtggggctggccacaccgcaagaatcaaatgatgctattgtgctatgtcaacgactgttagaatggtataacatatattaattagaagttgtacattattgtggacaatgtagtgttgattctaatatgctagaaaaatcaactacaaaagtggaaggcactcaa

SEQ ID NO: 207001 - DNA, 436 bp, Glycine max
  unsure (1)..(436): unsure at all n locations
agcttactaaacatgtgttgtcagtcctctgttattgactaaaatcaagtcccttntaataaatatatataaacactaagaatatattaattttttttaaaaaaattaaatttaaatttaaacgtattttgatttataaaaagcatagtttatcctaactttaatatacatctagtttgctgcttcccccaactggattgttgtgaaggcattgctgtcacgtacgcacaggtacctatatctacgtgatactccaaaacatgcaccaacgacaagaacctcaatacaagatcttactataattagggcatattcttggatgttggtgattggaattttgaaagatctaaaaggaaaatttgttagtattttagaggtttaccgaataaccatacccttatcttcttgaaatttcattatttgcaaacattccagg

SEQ ID NO: 207002 - DNA, 483 bp, Glycine max
  unsure (1)..(483): unsure at all n locations
tacggacctatgaaactaagcttatgtatccagggagggcagtaatactgactatngngaagttcagtctatttctttctctaacttgataggttttcagatttctgatagtgctatcatatggtcgtttctgaataaactatgaccctaaatattatgtagttcttgtcttgactctagaacttgttctattattgttcataattgaaattctttttcctgctttataatatgctcctgcttcatctcctagtatttattgtgaagctttgatatttttaattatggcttctatcgtaagattatttgattatgggtttttaggatttttttgaagttactctttgtgtatgtcttatgacttgtttgtttgacacttacaatcaatttctcatactgtgcacatgtttcaatgtaaaatgtatggttgaaattaattanggcacacatctcaatacattaatcagttctatcaaaatcaat

SEQ ID NO: 207003 - DNA, 437 bp, Glycine max
  unsure (1)..(437): unsure at all n locations
agcttagacaacttaaagaaaccaatttggatagcataatgagcccaacattntacactcaagatatatctatgaaatttatttggatgaatatttgggttgaatagttaactgagcccattgcatttattatgtccgaatatattcaaaggatattgaagatatcatatgtttaacatttattattaagatttagagtttagagtttatatcattatgatatgtttttatcttgtctttggatttgtttcatttattagaactcttattttgttaagatttgttttctcttttaggatcaaaatcttattttatcatatctttagttcatataagagtattgntntatcttatctttaggctagacactattaaaatttgttttccgccacttgttttgtatctccctataaataggacgccatgtaatggaaatg

SEQ ID NO: 207004 - DNA, 444 bp, Glycine max
tcttgagtagctgtaatgtctacaacataatcatcataagctccatcgccacccacgccagaggtgttacccccatacagaagagggttggactcctggtcaggcaaccttttgtagaaaagcctttggcgtcatcaatggagcctccatagaaaggtgaatggatagctggtgcaggttttgggtgacgaggcaatggccatgatggaggctctgcatcatctggactagatgctcttgctgggaagacgaggaaaaaggcttgctggctatataagaggtggttggaggagggattaccgaaggtggagctggtggagcatctggagtggttcgagccttgactcgccttggtcccgggaggacaatggaaggggctactggattcacaactggtttgacttcatcttgttctagaaacaccaacttcaggtgccaaccatc

SEQ ID NO: 207005 - DNA, 295 bp, Glycine max
  unsure (1)..(295): unsure at all n locations
gcaccgaggctgcaagctactgaataggtgacaaagaatttacatnatttcttttcttttcaatctaattgtagggggtctcctttacaggcctcctggtactggtaaaacattgctagccgggctattgccagtaatatagatgctaacttcctaaaggacacattatgtctttttatttataaaatctgtgtgcttagaagtcttcttcgttgtaaaattgacaagcacattggcaattttatgctaacttccctttattctgatgcacgttgtttccagtgccataattgac

SEQ ID NO: 207006 - DNA, 463 bp, Glycine max
  unsure (1)..(463): unsure at all n locations
tgtaatgaacaacattatntgatttttttaggagatcaatattaaaaatacccaggaatcttgcacaaaaattaattttttggcatcggatgactgaactccgagaagtaaagcggtagctgcaagggtgaaccgctggaaacagtttgaccgtgtgataagaagatcatgcggttgagaagccctaggattctgtaacttagttggcgaatggacatgattatgatgcttccactctgtgcgattctctgtagcaccttcaccaccatgtatgcgctcgttgaatcaagtccatgttgccttgtccaggattagaaggtttttgtgaatctacccttctttattcaaccaacccacgcaagcgtccaacctcacaattntggattttgatgtagcaacagaagaggggaattgattgattgtctctcangtaactgagtacctttntcaagctttcacgttt

SEQ ID NO: 207007 - DNA, 398 bp, Glycine max
  unsure (1)..(398): unsure at all n locations
agcctcaacattgaatatggagcgtttctaatattacgggactgaattagacatccgagtaaaaagttattgtcgttttaattcgctcagagcttcggtattgcatttcgagcgtctcgatatattacgggactcactctgacatccgagtaaaatgatattgccgtttggacgcgcttagagcttccataatttatttcgagcgtctcgatatattacggggctcagtccgacatcccaattaaaaagtattggctgttgaatttgctcaaagcttcgacatccatttttagccgtttcgagtttttacgggactcattcggcaatcccattaaaaagttcttgtcggttgagtttgctcacagcttnagaattcatatttcgagcgctctcatata

SEQ ID NO: 207008 - DNA, 465 bp, Glycine max
  unsure (1)..(465): unsure at all n locations
ctcagcttgagcaattcaacgacataagttttactcgtatgttggattgagtcccgctatatatccagacgctcgaaaatgaatgttgaagctctgagcaaattcaaacgacaataacctttttactcagatgtcggatagagtcccgtaatatattgagacgctcgaaatggaataccgaagctctgagcaaattcaaacgacaataactttntactcggatgttcgattgagtcccgtaatatatcgaaatgctcgaaattgaatgttgaagctcggagcacattcaaacgacaataaatttttactcggatgtccgattgagtctcgtaatatatcgagaagctcgaaatggaataccaaagctctgagcaatattcaacgacaattaacttttactcggatgtcttattgagcgccataatttatctgaacgctcgaaatgcaataccgaagctctgagca

SEQ ID NO: 207009 - DNA, 419 bp, Glycine max
agcttcttggagctgatggtagctggattatgtattcatccaatgtgcttcttttatttgtttatcattattttgataagggagtctttatggttgtttgtcaatgtttcatgaaacttcacctatatttggccgaattggtctctacctacctttattttcctgcttgttatcttcagttgaattggccgtgccataaaaacactatggaaaaagagggattgcacacatgtgcattaaaatatatattattataattagaaaaggaccacaatgccctcaaccataatgcatgttaaacatttggtatttgactatatggtcgcagataaaattttatgtctaatcccatattttttagattaagaaatcattaataagcctatgaaacatggtttttacttagagaaaatagtata

SEQ ID NO: 207010 - DNA, 479 bp, Glycine max
  unsure (1)..(479): unsure at all n locations
tataaatctaagctccctaaagcccttttaatgcatctggtcgngccatttttgatgtgttccccacattngnngctcaanggnttacaattccgtgcacgtctatcaaaacttgttttgtagcacttgcatataaatattgaagagcaatgttatatcttttcactattcttctcaatgttttatgaaaatgatgttaaatgacatagtaaataatgtcatgttttgacatttttaaaagctttcaatactttttgttatcgtctaataagtaaaaaagatttagaattatttttaaaaaaatctctgtccaatgataaagagtataaaggtaaataaaataagcatgtaattgctaataaaaagttaataataaagaaatgcgaaaaanataagtttatacacaatataatttaaaattattataatctttaataaactattattatcatattttatcttctaaagtcgactactca

SEQ ID NO: 207011 - DNA, 116 bp, Glycine max
  unsure (1)..(116): unsure at all n locations
agcttcanaaggagccataccaatacttgctttgtaactattgggtgaagtaaactcaatcaatggcaaacaatccatccagctaccttgttgctctataatacacgcccgaagta

SEQ ID NO: 207012 - DNA, 458 bp, Glycine max
tatttatgcctataaatacgacatcaatgagtaaagaatgtagacgaacacgtccagaataacaagagtcatgaatcaataaacaagagaaaaggaaagaatttgttgagaaatacactaagcgtaaaagagtccatcatttgtgatatacaaagtacatgtgagagattataacttcattgtaaactcactctttgaaaacttctatttgtgaaattcaagagtggcttagtacaaaacaatatttgggtgttcttagattcaaggggagtctaagggttgtgtcaatagtggccttgagaatattcgtaagctagaagtggcataaaagaatacttgttgtaatcaagtttgactagttgaaccctctattggttggtagaggaaaactgaacgtatctcatgttgagtgaactagtataaaatgaagtattttattggtttctttactcaatcta

SEQ ID NO: 207013 - DNA, 363 bp, Glycine max
agctttgcctttagcgcttgcacctcattactttcttccgaagctttaacctcattgtctcccacagtctttagatttgggagccaatccaatccttgtgtccggactctcagacacttatgatagccaccgatgatcccattactgcttcccctaagctctctgtcctttcttcatgccgcataccatgccttgcgaactccttggagtacctttgcattggggtcactgaaaccccgtgtaatgaaaagcgtgatgctataatataatggcgctcctctcatggggtagccaagctgtcttatggcgaggacggtattataaataatacaaccccatgttcccatgcagggaacatttgga

SEQ ID NO: 207014 - DNA, 429 bp, Glycine max
tctaaacattatacaagaatgaagctctgataccacttgtttacaagtggcctcagatatcttaagaagaggggggggggggggggttgaaccgcctatcgcgcctttttgagattcggcttatggcggctcttctcgctcatcggatggactgaaacggtgcgcttattgcgatggccctttgctcaacgaacaagcacaactcatccttctttcagattcttcctctcgcttagccgacgaatgttagactcagcacatggctcgctcagccagcatattggcttagcgagagggtgaaaactaacacttcacaacttgcctaattaacctgaaattgagagagaatgatcattaaactcaccaaatggaagtactagtgattattacccttctctaacaaaacgtgcttccatcctacgaaatacc

SEQ ID NO: 207015 - DNA, 421 bp, Glycine max
  unsure (1)..(421): unsure at all n locations
agctttatgtccacaagaagaggcgcatgttatcctacaactactgtccacaagtcaacgatgtagtacacaactcaaccctagttgaccaaaagtcaactgccacaaaattaaaaacacagacatatcttttttaatggtgggccctggcaatctaacctattgaaataattcgctcccaacttggttttaattcttgttttgtagtaaatagcacaagcaggagtggaggctacctctattatggaagaaacctttcctaatccatatcatatacttttcttccatctcattaactangttttatggcttttgataactgcgacatttgagtctaattgatagtcaattttgactaagaatgattagaatttcttcattgtactgttatttttaatgaaataatgaagaacttaatatc

SEQ ID NO: 207016 - DNA, 466 bp, Glycine max
  unsure (1)..(466): unsure at all n locations
cttgctatgatgcaggtgtcactattaaggcatgtggtggttgttaatgatagcaatatagtttatacactttcatttagcatactgtcatctcattgagtgttgcatccccgccaacaaagatttccttactatcatcgttcgaggtatgtatgtgattgtcacactagatatttattgattaatacagacaatttggtaactagatatttattgattaactagatagttagtgaagtagagacgtgaagccacaaatgtgtcccaagcaaagttaatttcttgttcaacccaaatgtaaagtgaggggtatatagcatttttaattgaggtcatgagctgacacattttaatttgagagaaagggatgggaacaaacttttggataaaattttttttgtttgataagcatggtgttttgatatatagttngngtgttaattactattctaaatatatttgcata

SEQ ID NO: 207017 - DNA, 421 bp, Glycine max
  unsure (1)..(421): unsure at all n locations
agcttatagttattggagggagaataaaactttccaaaatcaattgtacccttcaagtaacgaagaattctttttgcagcttttatatgagaagaggtaggagcctccgtaaagcgacacacaactcccaccgcatatagaatatcgggccttgtattggttagataccttaaactccccacaagactcttgaagaccgnggagtctaccttctctccttcatcaaactttgataacttcaagccaccttccatatgtgtgttcacgggattgcaatcaagcatattaaatttcttcaacacttcttttgtgtagcttccttgtgagacaaagatatcattctccgtttgcttcacttccattcccaagtaatatgacatgagtcccatatctgtcatatcaaaatcacgagacatggact

SEQ ID NO: 207018 - DNA, 458 bp, Glycine max
taatacaccaaattctttttttttattcgaggccattatatttatttatttcaatttctatccttatacctgtaataagtattgacatttatccaaattttattttttcattttcagctcacaaagttgaagctattctatctaattttttatagataattttcatgaataaatgaaaactcaaataaaaaaataaatcttatgcacaatacaaaaacctatatttcttttgtaatatattaattacatgaaaatgaatttgaattataattgaatatgtttgttattttgagaaccccttgaatcactactacaatacttgattcaaaggttaagatatatcaataaatatgttttttaacatacattatgacatgattttattatttttgatacatatagtaatatattacattgaaattgatatatatatatatatatatatatatatatatata

SEQ ID NO: 207019 - DNA, 432 bp, Glycine max
  unsure (1)..(432): unsure at all n locations
agcttcgtccgcagatacctcttgtatgactatgcccaatttaggcaaccctcttaggtttagactaacttaaactgagtttcatccgcagatccctcatgtaagactagactcagttcaagtagcttacgaaagtttagcctaatttagcctaagcttcatccgcaaatccttcatgtaagactaggcctaaactaaacagcattattgtaatagcataattaaaaccaaaactcaactcgcagatccctcatgtaagactaagttttgatcctgcttcaatcaagttctaaggcaacaatatacttcccaatgctaaagtcacctaactgtgcacacaaatgggtgatcagaccaaaagcatacaaaccttaagcattgagcacagaanacacaatcaattagatattaggtatttacatcagctgttca

SEQ ID NO: 207020 - DNA, 451 bp, Glycine max
tcaagaaaaggccaaactccctcaaaaatctgatttcatgcttaaataggtggctttgttcgtgctcgtgcgcttagcacaattctgaaccgcttaacgcgcattagtgaatttcggcttagggcggcttttctcgctcagcggatggactgaagcggtgcgcttagtgggatggcccttcgctcaacgaacaagcacaactcatccttcttccagattcttcctcgcgcttagccgaggaatgttgcactcagcaaatggctcgctaagccagcatattggcttagcgagagggtgaaaactagcacttcaaaacttgcctaattaacctgaaattgagagaaaatgattattaaactcacaaaatggaagtactaagtatttattacctatctttaacaaaaagtaattacaacactacaaaataaccataaattggaggagtttgata

SEQ ID NO: 207021 - DNA, 398 bp, Glycine max
  unsure (1)..(398): unsure at all n locations
agcttgccttggcccttgatatatgngaggttctcatggtcactatgaatgacaaattccttgggataaaggtagtgttgccatgttttcaaagcccgtactaaggcatacaactccttatcataagttgaatagttaagggtaggaccacttaacttttcactaaaataagcaattggatggccttcttgcatcaacacagccccaatcccaacatttgaagcatcacactcaatttcaaaagatttttgaaagtttggcaacgcaagtatgggtgcattagttagcttttccttaagaacattgaaagcttcttcttgtttctctccccatttgaaaccagcatttttcttgagcacttcattgagaggtgctgccaatgtgctaaaatccttcac

SEQ ID NO: 207022 - DNA, 472 bp, Glycine max
  unsure (1)..(472): unsure at all n locations
atgacccaaaatcctgactcaccataaaccttgacccattgtgagtttgtcaatccttaccctcggaagcaaaaaaagaatagaggggaaatttccaatcaaagaaaaagagaaggaaaatttccaatgaaagcaaaaaaagaaaagaaggaaaattccccaatcaaagagtgggagagagcaaaaaaagaaaagaaggaaaattccccaatcaaagagtgggagaaagcaaaaagaaaagaaaggaaaattcccaatcaaagaatgagagaaagtaaaaaaggaagaagaagaaggaaagaaagctcctgatcagggatcgaaggaaaaacagaagaaatgtgcagagaggtctttggaccggacaatatatgaacaatacagaattgtcaccaaatgaacaaaaaagaaggaaaggaaaccacgacctanaatggtcttctccctttgattaccaaccaaaatcccgtgc

SEQ ID NO: 207023 - DNA, 341 bp, Glycine max
tatttaaaagctcatttgactatatatctttctgcctaatccagtgcctaataacgaaccaacattggcattgggctcaataataattatttcattgatcttttattcacaaggaactgagagtttctgtaccatacaaaccattctatatttttttttttacagaaaccatagattccatttttgacgtgataccttaatgaaaatgctgataactaaaatgtagcctacattccaagtatattggtggataaaatgaaacagtgacggatcactcattcgtctaagatcatttaaaacgagaagtcgttctcaataataccaaccgttactaaagaaat

SEQ ID NO: 207024 - DNA, 221 bp, Glycine max
  unsure (1)..(221): unsure at all n locations
gagcccactcctgaagacgcaattttttttacatttcaanagtgaacacagacagtgctgtcccatcaggaacaataacagaatcacacgggccctttactacctaacacatatgtacattgtcttagaagaaatgcttggtacccacgcgtaagccaaaccacccgttaaatatccataatacctggccctgctcagtaattggaaaaattcttaaaatc

SEQ ID NO: 207025 - DNA, 433 bp, Glycine max
  unsure (1)..(433): unsure at all n locations
agcttatatgcttgtcatttgtgaaatattcttctttcttgtgctcaaattaagctcctccaatgtatttttcctcaaaataagccatcaatgttttctgttaaagtttgaatgcatcatttttttaattaaaactatctctctcggatggaattcaccttttgtcacaataatcgatttatgcgctggatttaaaggctaattatgtttgtgctctggcaaataagagtatcagttatgcaagccaggtcagttctctgctgggcttttatcttatttgtaccgtacatatcatgttggaagtataattatcaatcattactatgtttgcggtatcactactgcaagtgttaaactataatatgtgtttggccgctacatcaatagaaatatttaactttcatatgatnttttggtcacgatttcaatgttt

SEQ ID NO: 207026 - DNA, 495 bp, Glycine max
attacggaactatgaaactaacctcgctgattacattctcgccctttctcaagagaattcttcttgacatcatcaagatcttcatgatttacattctcccccttttcgatgatgacaaccacctgtaggttaagagcaaaaacaaagaaaaatatctatttgcatatagtttactccctcttgattttgcaatgattgcttgtatgagacagttgaagatttcttatttttcatatgtaaacaaattgtctcataaagaatagataatttttcttactattttatctattatctttctctacccctttgtcaacataaaaaacaaatcatatatagagagcagacaaatgttaccacttgttgtaatgtatgagaatcaagtgataccaaaaggcattaaatcaatcattcaatattgatcaagcaaaaacaagtatagtagcacatcaataaaaaacacaatcaaacacaatcaatcaaatatacaatcacaat

SEQ ID NO: 207027 - DNA, 438 bp, Glycine max
  unsure (1)..(438): unsure at all n locations
agcttcctcggngcaatntcctgcgaaggcatactattggaaagttagttttaccaagaaatgctactcttaaaacaaaaatggcatacaacctcctccaataaacacaaacatcaatgtaaatntagagcaaactcatgcacatacttccttacgaacattcactcgcacaagatattcttctaactaagaaagatgcacctatgcacaatcaaggcaccttcgttacctagattatttatatgtacttccaaggtgtatttgttacctacatcacatgcacttcctttgctaaatttacatacatgcatactcaaaacattttggctaccaaaaattgcacacgtgcacattctggtatttccaatacctatgcatatacaaactttgtgatgaatcttggctatctacacaataaggtgctacatttcatgcttt

SEQ ID NO: 207028 - DNA, 463 bp, Glycine max
  unsure (1)..(463): unsure at all n locations
gaagatgctntaatagagganaagatagagagaaggtggtatcacganattgaaggaataaaagagggagagaagtggaactttgaagtgtgtctcataagactttcattcatcaaagttacaacaagtgttacacatgcttctatttatagactaggtagcttccttgagaagctttcttgagaaaacttccttgagaagcttctttgagaaaacttccttgagaagcttccttaaaaagattcctaaaaaagctagagcttagctacacacacctctataatagctaagctcacctccatgagatgagaagctagagctcagctacacaccccctataatagctaagctcacccccatgacaaaatacatgagaatacaaaaaatgccctactacaaagactactcataatgcctcgaaatacaaggctaanaccctatactactagaatggcaaaaatac

SEQ ID NO: 207029 - DNA, 425 bp, Glycine max
  unsure (1)..(425): unsure at all n locations
agctntaggagaaaccatataaactaaggttgtttctattcaaaaatcaattgaggaagcttcgccaagtatccccattgaaaaacctttattcaaacctttcaaagntagtgagaaggctaaacgaaaaattagggaacttagaaaaactaaatccttaactgaaggcgtaggtgacaatcatagtgaattactaaacaagatcggtagtttacttaaggtcattccagatactccccaagcctcggaaaatacttcccaaatggtaacaagaagtacctccaaattaattaatgttattaatgaagatagtgactaaaactcagataccacaactgagatagggtcaatgtcagaaaagaatatanatccaattaattccaaacactggaaaacaccctccanantnnatatatcaacgtcga

SEQ ID NO: 207030 - DNA, 462 bp, Glycine max
  unsure (1)..(462): unsure at all n locations
ctcagctcctcagggtatagagccagagctcaagtagttcttttaaacctccattaattntttactttaacttctcttccattattttttcttcattttttctccatgtatctcctcaaatgtctagtgctaaatgttgttaacatgattctttagagttttcaccgattaaacttgctatagaagctagattttattttctatggttcaaatttcttgttcttgttcttgaaccatgaattgtgttgattttaggttcctttgagttttgtcttgttattttttgtggctgaaacctaaaccataaaattcttacaaaaatattaaagtagaataaaacctcaaaaatctagagtgacttgttcacctattgtagttttgtcatagaagtcatgtctagtcatgaaacttgtcacataagatatcttatgttgtgctgaattttatattcttggttctttg

SEQ ID NO: 207031 - DNA, 378 bp, Glycine max
ctccctcttattactagctattgtgaattctttagttcctgaatgtacaaccttcaaattattgctcgttcccctctgtgttttctgcaaaaaagaaaatcaatatcaaagaaaacatgcagagaattgtcatggttattattactcaaaccagaaggaataacatctaaacaagtcattttattcttaaaatgtgaaaactctgcatatttatggagaaaatgaggtatggaggcacgtaagcatgtgaataccacaagtcattttctccaattcaagggcttgattaattgctctatgaaaaaagcatacatctggtatattgttgcgttgcagctgtttggagcatttggcaaaacaaaaattttggtttacgtt

SEQ ID NO: 207032 - DNA, 106 bp, Glycine max
tcagcttgcaaacgaaacccccttggatgcagctctttgtgtgacagctgtggacaactcggcaagattcgagacggccggcgggcgtgaactacacgcgctaaag

SEQ ID NO: 207033 - DNA, 423 bp, Glycine max
agcttgaacgaatgtaagacacatcttcattctttgtgattcttgactccatttcattgaagcgcatatccacttgtaattccaaattgtcaaacatctcaccaacaaagatttgaagaccattaaacctgtctaaaatctttgaaaagagagatgaatcctctccatcatgtccttcttcaccaacatgtcgagcacctttctttacccaagagccatcatgctccttttgataaccaaaagatgttatgactgaagtgcctataaggaaagatctcttgattgatgtcatgccctaatttcgtccggggattattactagatgacatgcaacctttggttagccactttgagatacttggcgtcccttgttgcacaataaatgaagtcccgagacgtgtcagaaatcaaaaggaagcaagc

SEQ ID NO: 207034 - DNA, 451 bp, Glycine max
  unsure (1)..(451): unsure at all n locations
catgattgatacatgatttatgatcttgttgattcaattcgggaaaaattggatgagggcaagtgtgatttcgaaaatctacactttatgcagaattttgctgtcaaatatgtgcagcagaattttggctttgtgcagaaaatgttgtgtatttgctggttgtggaaagagtagtacagattgggttctggacgttttctagcagatcccaacggtcacaatgtagaattatgtgctagagacttccagtaaaattttcgagtcgatccaatagttaacgaattggaacgaagagaatgttactggggtatttaagtgagaaaaactgtgatattggtttgtgttgggcagagttttctgcctctgccctggtttccttgngtttgatagttcatgatgtttgggatgttgaattgcttggactgtgtggaagcttggagagattgatggg

SEQ ID NO: 207035 - DNA, 430 bp, Glycine max
  unsure (1)..(430): unsure at all n locations
agcttgnaggattatggtgtacccattacatgtggtactaagtggcggccaggcgatggtgcacaacaagtttttcacatccacaaagcgcacataaacccaccatcccctgttgcccacctacatctgagctcacgtactgccacgtaacccatatcctcgtttctctaacaccgggtccccatcaatcctcccaagctttcacaacattcaagcataacaacattcaaacagcacatgctatcacagccaagtaaaacagggcaaaggcagaaaactctgcccaaaacaccaaccaaatcacagcttttctcacttatagaccncagtaacaattccttcattccaggttattaactcgaggatcgacttcaaaatattactggaaggcgttaaaacataagcctacattttgacggtgggatctact

SEQ ID NO: 207036 - DNA, 413 bp, Glycine max
  unsure (1)..(413): unsure at all n locations
aagaaatgcatcaataacttctcgtccctggaatacgcacccatcttgcgtcaatacattnttaggagattctttgggcaagtcgtccctttgtacctattgaagtcgggtactttgaacttcggagggatgacgacgtccggtaccaggcataggtcggtcatgtctgcgaacggataatcactgaacccttcaacaacccttaatctttcttcaatgagatcaagtttccccatttctttcgctgcccggggtggccctcccacgggcagaaacatcggctatattgggtgatttcaaggttctcccgtgatgttgggtcaaggtagcacgttgggcactggtccctcggtgggaaatggggagtaggagtctgacgtctcctaagaaggctcttaatatcattgtggacc

SEQ ID NO: 207037 - DNA, 368 bp, Glycine max
agcttagccctaatagacagcgcggagactatttgtttcttcaagaacaagcaaaccctgtataacgggacaacacacgttctcaactgggttccctattcccacatgcaccaaccctccaagcacattcaagcaaagccccaattatagggcatcaattgggcaagtcctttgaggaaaaggactgccaccgtgcggcggcgggtacggtggtgagattggtggtgggtatatcaccaccggcggcggtaccaccggagggttgattatgatcggcggcagcggaggggatactttcggccggcctccgccgtgatgcggcgggtgttagtggtgacgtggcggaatgcatggcccacatgcatata

SEQ ID NO: 207038 - DNA, 467 bp, Glycine max
  unsure (1)..(467): unsure at all n locations
aaactcaacctcgcatgcttcccaatggtcttaatctcaagtgttaagagnttttgtgcctaacaagctcaactcatctagaggaagaacacaaaaaattaggaaaagttgtatttttattctttatactttcaacatggttaatattcttatatttataattttggtcatcaaattttaaaaacatatgaattttgttcttctagttcttctaattgtaaagtggatataattgacttgaattttagcttacctacttctcatcacacttagctcatatgtacataatttataaagtttcttcttctttttttttgttgaatgaaggggtaaaacgacccacaagaaatcattaaaacccacgagaaaaagaagtagattttttacatcaactataacaacacacataattaaaggcaaaacagaatcataaactctcaaatattcaactagagacattccatggt

SEQ ID NO: 207039 - DNA, 374 bp, Glycine max
gcttgtgcttaacacttgtttttacttgataagaatctgaaagatcgatatgtgtgaggacttggaattaagataaaatctaagtatctgaatagcatcaccacattaacaaataatataaatgtcatgttatggagagcccgattaaaacaaaacaaatttatgaagcctacactaaaaaaaaagtcatgcatgattgcatgttataactattttggtataattatcttgataccatttaccaactgtcgctgttgtgcctaacaaccaagtgtctattagtggctgtgaagatcaaccacaccacgaatttatgacttagaccttgcgacaagaaaaccaactgaaatgtttaaaatgtgcttatttgatct

SEQ ID NO: 207040 - DNA, 448 bp, Glycine max
  unsure (1)..(448): unsure at all n locations
tctagccaaatggacttaccttgaattaattcctttgttattccttttgagccttgtttccctttccttgttttgaagctcactacaagccttaagtgaaaaaccatgatattaccatatccttaaggaattttggagctttggaattgttttgggaataagtgtggggggtttttgtttcattggacaacttgttttgttgactatgcttcatgatgtattttgggccatacttgatgtacattgtatattggttaaatgttggacatgctgaatgaaatgttgtttctcaaaggcaaaaaaaaaaaaaaaaagcaataaagctgagtgaataagatcttaaatggcacaagaatgatgaaactctnggttctactcttcatgtttaattnttatctttacttctttntattttcttatttttttcttaatatgcacttattcccct

SEQ ID NO: 207041 - DNA, 419 bp, Glycine max
  unsure (1)..(419): unsure at all n locations
agctntatcttgagaatgaaaagatatccgtatattaagttgttntggtgcaaaactttcttgatttagaaaaccaacttagtgttttacaaaaagacttataagagataattgagctgaatgataatcttaaggaagatagatatgatctttggagagacaatgcacacatacaaagagattataaggacttggaaaagagtaaacataatctttggatagaatgttagaccaacaaatggtctgcaaaaatcttaagtgatggtttgggtaaatctgaacctatgatgatgattttttacattgattatgcatataattaaccttctacctgaatctacgatgatggtttttaatattggttatgcatataattaaccgatgtaaatggtactnntttttatatcaantatgtatat

SEQ ID NO: 207042 - DNA, 457 bp, Glycine max
  unsure (1)..(457): unsure at all n locations
tctagccaaatggacttaccttgaattaattcctctgatattctttttgagccttgtttccctttccttgttntgaagctcactacaagccttaagtgaaaaaccatgatattaccatatccttaaggaattttggagctttggaattgttttgggaataagtgtggggggtttttgtttcattggacaacttgttttgttggctatgcttcatgatgtattttgggccatacttgatgtacattgtatattggttaaatgttggacatgctgaatgaaatgttgtttctcaaaggctaaagagtaaaaaaaaaaaaaaaacaaaaaacaaaaaaaaaatcgaaaaaaaaaagaaaaagaaaagcaataaagttgagtgaataagatcttaaatggcacaagaatgatgaaactcttggttctagtcttcatgtttaaattttatctttacttcttt

SEQ ID NO: 207043 - DNA, 433 bp, Glycine max
  unsure (1)..(433): unsure at all n locations
agcttgtaaaatggctagacatgatatatgttatgtgcttggnntggnncaagggtaaaagggatgccccacattatttccatgacacaaatgcaaaaaatgatgatttggaaattntatgcaaaactggtcatgcatgcacctatgcggacgctcaagtgtcaaaattttatggtcatgtgatgctagggctcangattcatttcctctattttaaatcaacccaatgtttccaaaatatgttctttcatcaatttgtgcattcctccaagtccatttcgagcgtccggggaaattttcacagcattcacccttcaggtgtagacacgtttttttcttcaaaaatcgggtatgatcaatgaatnttttttcaaagaaaaattggaaatcatctcttttaaaagcatgtcggnttttagctagacaacttatt

SEQ ID NO: 207044 - DNA, 441 bp, Glycine max
  unsure (1)..(441): unsure at all n locations
atatcaaagagaaagaagacctatgtgttttaagggctacacttaagtgggtcgctctcctacaaattgatttagatgctttgaggccaacttgaagaagcactctgagaagcccaatttacaagacaagaatcactcaggggccgagttgatcaattttggtggactattaatattgggctgattatataataattaagcccaatttgttgggcttattttttgacttgtaatggactgttatctttttattgttatttctaagacttttaattattagattagttattaggccttgagcctaatttacggttattagtaggagttataaatagactccttagacactgtgttatgcagattntgaatattaataaaatttgagagcttcttattgtgagagtgtttctcttgttcttgnggtaagaactgatagtgttg

SEQ ID NO: 207045 - DNA, 411 bp, Glycine max
  unsure (1)..(411): unsure at all n locations
agcttctgtctggggtgactaagcattgntttttcttttgtcatggatgggaaagcattgaatcggtggtctgcttctgctcctgatggctaaacctctttgcttctgcccagtggttaaactctgaggtatgagttctacttggtagctaagctttgatagtctcctggattgatgattcgagcttttgacaaacgggcttgatgctgattacacttgatgggtaagcatagatacttgcattggactcttggaagaatgttgaacttggaccaaaatttctataagtgtctgttatgatcggcgtatctccggcatgttgagctatactctacgatacaaattctttcattttcgttgatgatgaggtattgtcttctccaagctgcaagtgctatcaacacctttcag

SEQ ID NO: 207046 - DNA, 425 bp, Glycine max
ctaagctaaggccttttttttatgttgcgatgacaagagttaacatttacatttcctatctcttaatttttttctgttatccatgtttgatttgctactacttgtttccatttgcacggtcatccaccaagaagcatgcgacaaccaaggctttccttttgtttgaatactaagtcttctttatactctcttttaattcgcgcttattattattattattattattattattattattatcattattattattattattattatgccgactctagcggaagtccctctttgattatgtatacgtccagcaggtaagacttttcttttgtttattgttatgcatgttcgtttcctcagaaaaatgaagtttcagacgccctgttttacattgtggtgacagaagataacgtaaatattcctatatc

SEQ ID NO: 207047 - DNA, 397 bp, Glycine max
  unsure (1)..(397): unsure at all n locations
tgcaagcttgaaccaaaggccttggatttcaagatgattttatgtttangagcgatcgctatggtcttagaggtggaggaaacatccccaccactttgtaatcttaattttccctcaaaaacctcaacttggtgctgaaaggtgctaactttcaatggaaagctaaatctcttgttggggatttctggtgggctttgatgtaaaactcttcactatctatttaaagntgcttttatgcgttcatttcttctatgtgtatttaattattacatgcttgtggcttgatcacccatttgtgtgtaaagttaggattttaagcattggaaagtattttaaatccttagaactggatagagcatgctagaaaattgtatgtctaaacatggagtgcanggat

SEQ ID NO: 207048 - DNA, 460 bp, Glycine max
tcgtccctggcacaattgtcaagattcaaactattcctgtactggacgagttcaaccaaccaatcccaaacaaggtcatattccatcgacttttttggtcatttaaggcatgcattgatgcgtttgcattttgtaaacccattgtgcaaatcgatggaacatggctatatggaagatacaaagggacgttgttagttgcaattgcacaagatggcgctaacaacatatttccattggcatttgccattgttgagggtgagacagtaaatgggtgacactttttttttgtgaaacttgagaacacatgtgacaccacaacatggtatatggttaatctctaacaggcgcgagtcaatcaaaagtgcatacagacaacctgatagtgggtggatagcaaacaacttgtcacatgtgttctaacgcataatatttaattattcaacattaaactaacatttat

SEQ ID NO: 207049 - DNA, 453 bp, Glycine max
  unsure (1)..(453): unsure at all n locations
gtcacctgaggcatgcaagctangtttaaacaaaaggggaaatatgtcttctttatcatgtatgtgtgaaggatgcttgcatacatatatcttcactgaataccgngtattgcattgtatatacatataaggctgtttatgtatatatcgcactaaatattaatatgcatattacacgatgaactgggtgaaaaaaagatacattaacatatgcacaaaaaagaatgagtnttgaaatgttgaagtctaacaaaaagaaaagaatgctaagcataaccttataataacaaaatgatgatacaacgagagcgtgaatcaattggtacaatgttattgtatctgaaaaaatatggcaattaaatctactgcaagaatttgttagagttcacattcacatactataaatggacttttgtcttatcgttctattcagagcagaaatgctctccacat

SEQ ID NO: 207050 - DNA, 463 bp, Glycine max
  unsure (1)..(463): unsure at all n locations
ccatatatggtgtatttattcttaatcatacggatacgattttatgatgaatatttattttattaatcttctgactgtacatataaaactcattagtcatttattaaataatatgtaggattttttttcgttttatttgtttctttttccgttntttataggtgcatgatatattgaaagcctagaaggaccagaaaaaaaataaaaaggcccaaaggcatacaagcacttgactaaaacaggtagcccaagtccgaatagttcttacttggtgttaaattgttaatgtacaatcgcaggaaattaatttttatatttttacgtgttgcgccactctaattttattttaaaaatgagtatagtgtatgcactaatataaaggggatttataatgatatttaatcacaaatgatcatatatgataaatctattaattcttactataattaccttagagttatgc

SEQ ID NO: 207051 - DNA, 358 bp, Glycine max
  unsure (1)..(358): unsure at all n locations
agctncttggaggtgtgatggagcctttctttttgtatangccatataatccggcccatagtctttagtaattcttgctctcttacctcttcgaggctctatttctagttctggttgtgcaagattttcactactaatagcacgaagatgattggatgaagtacccccattattccttaatttaaaaggaaatttattttcataaaaatcagcatcatttgactctatgatcacttttgtgtttaggtcataaaacctatatgctttgcttttaatagcataaccaatgaacacacattcataggctctacttacgagtttaaccctcttggggtctaggatccttacataggccata

SEQ ID NO: 207052 - DNA, 329 bp, Glycine max
accggagctgggctgactcgtgttgaccccatcatatatcccggaagtctaaatcacggagttcctcactgtcgcaggcatcatgcgcttgtgcttgcacccgccaatgatgcacgagcttctacgagcgatcgagacagacatgttgacactactgtctggctacaaatgaaagtacttcataagcacatttactgagtggataaatctagaggtgatgagtcgtggattctgaaccgaccatgacgacatgttgatcgaatgcttaaatagcaagagtggggcgtgaaccatgaaagtagtgtaattgggtgctatacgaatcgcat

SEQ ID NO: 207053 - DNA, 426 bp, Glycine max
  unsure (1)..(426): unsure at all n locations
agcttagtcttcatggggcgctgcttatcttaacatatttcacaatgataaactttttataaaaaatttaaaatttattttacataattaattcatatttaattacatattaaaaataaaatatcaatataataactattattttcttcacaaaatattagtgtctaaaatttgtttttacataaaggggtattcatttttttgtttattatcttcccacttaaaataaatttttcattattttcttcttgatggataatttttaatttttttatacattgatatgtatgtgacaatatattaaaataaattatatataaattataatagattgggataaatgtttttatttataatagcatgtagaaaattttatatttaattcatgagaatanaacaattacctggacgaatattaatatctaa

SEQ ID NO: 207054 - DNA, 314 bp, Glycine max
acgaactcactctgaaggaagaaagaaagacactatgatttcaaatgacaagaacaatcaagctatcatgacagagatcacataagagccagcctatgggagggaaaaaagaagaatgctatgttaattctagtgaattttcctgaaaatgaatcaaatggtagtctttctggaaagaataagcctacaggagggagtaaaacccataccaagacttggatacatcaaaatattaacctggtgggaaagaagactacatttgataattaacaatcatgaatcagcgtaaatagtatgtaacaaggtactagaac

SEQ ID NO: 207055 - DNA, 367 bp, Glycine max
ttcgttatgtacgttcattaaaaaatgagaaaattaattagtagtcttagaataaattaaaaacactgtgaataaataattattatatctaagttatataatacacataaattaaaacagtacggtgatggagatgagagacatagagacatacataataaacataacataattaaacaagaataacgagacatactaaaaaatacaattgaaacacaaaaatgacgaaactaatgatagtttgaaagatgttgtgcaagagacatgtcttcttccatttagggtactagtttgctaaaaatagccaaaatttatattaggcataatcatttctagtaattggattctactaacatctttaacacgt

SEQ ID NO: 207056 - DNA, 465 bp, Glycine max
  unsure (1)..(465): unsure at all n locations
ntanagtatatatctnttactttttaaaaataaaaagtatttctatttattttgaagttgaaaagtatatcacgatttataacgttatataaatcctgacccttaaaagtaaccaaattatgcaaattaagacattttttttttcaaaatttaaaacaggtttgcaattattttttagtggatcatatctttacaattgttttcatcaaaacatattcttacatattttatttttataatatagtaataattttatttgtaacacaaaattaaattaatatattttaaaaaattaaaaataaaatatatattattgtaatttacatagatatatagatataaaatattttaaatatgtgcataaattagtaatatacatatattaaataagtgttttaaaagtaaatattctaaaattaanaaattattttaaactattttttctatttctggttaataataata

SEQ ID NO: 207057 - DNA, 410 bp, Glycine max
agcttcagcgtgatcgctaaacgacaatctttctgtggctgagcgtgacctattgtcaccaagtgcaattccttacggccataattgaggtccatgatgctaagcgccagtcatggcagctaaacgagattcatttcagcaatgtgagtgttaagcgagtccctctttgctaagggcatgttcctctgtacttaagatgcatcattttagctaagctggccagagccaggcttaacgagagttacacgctttctgatctacagacctcgctaagcggactcaacctcgtgctaagccaagtctctgttaaaaaaaactgattttgaatttgaaacgtcggctaagcgcacgggtttgctaagccagcctttgtgagaaaccaaatgtctctcttgctcgcttaatgcagc

SEQ ID NO: 207058 - DNA, 478 bp, Glycine max
gacctatgaatctcagcttgatagttccccaatttatggttattgtggagtaaattttgtttataaatattggtttttggttaacgttgtctctagaacatttccattggatttaatgatgaaatctgtgcattttcaggtgaaaaaaacgctaagttttgaattgcaaaaagtatcagttgggctaagcttagtagttgggctaagcgcttatccacttctaagcgcagctttagcacgcttagcgcaaaggagaatctggcagaacattagcatcaaagtcgtgcgctaagtgcgagatcactatgctaagcgtagcaggtgcctttagccaggttaagcgtgtgactagcgctaagcccgaatccacttacccccgcaaagcgcgaaggtggcactaagtgcaacgtcgtaatttcagagcctatttaaagtctgttttgtgcagaattagggtacacactttgatgtaaagctc

SEQ ID NO: 207059 - DNA, 377 bp, Glycine max
  unsure (1)..(377): unsure at all n locations
agcttcnggaaataaccactggaatattgctcattgctatctctctctctttctctctctttacgntactttgttggtgagatgctcttcctttggctttggngaaggtgaaacaacgcactgatgttataatagtgatgatcaaaggttttaaaaaatggtccgcgaccatgattttggccacaacgttaggattgcttaactgtctatgaccgcaattgagaatgcatttatcggatgtgtctctaatttatcacgatatcaataaacagggtgaaatcacaatgtgggcaacatttntaacatggggtcctttttgaaacatattcccaaaatgggtcttttttggaagtatttcttgcatgattgtgtttttg

SEQ ID NO: 207060 - DNA, 450 bp, Glycine max
  unsure (1)..(450): unsure at all n locations
ctgggaaatgctccaaggaacactctctacttttttcgattctctggctgcttgctccagtaaagcacaagaagaaatatgagcatcagcagattgccccattagataaatcctattacatagtaacaaaaaaaaggaaaagataaatctcagttcaatgtctatagatatcaattacaaagatgcttatactaaatgtgatgttctatatttttaacttttttaaaaataacaaataattcaattaagatatacaccactagacaccattaagtttaggacacagtgtgatgcaagcatcctcgtagttatgatttatgaatttcccagactcaatgttctggaaatagactattataaaaagcanccaagttgcctatcagaatacctcanacatagagcaagtcagaccaaaagtaaatggtagactcaatcttcactgcttgactg

SEQ ID NO: 207061 - DNA, 351 bp, Glycine max
  unsure (1)..(351): unsure at all n locations
agcttccttagagatgcggcctgatatttgagtcttttntccgncacggncttatttggttcaaagaatatcatctccagaaccgtacttgagatgaaaatctcgcacggctcctaccttatgtgtgatgataaaaatatatagaataaaaaaagattgcagtattcttattatcaactgaacaggttcacaacacaagtggattcatgtgcaccaaccctgtgtttattgaaattgtgatcaatgcttgcattaatacaaactaaacagtattaaaattgggaaaaagcacacctcaaactaatattctgacggcatattttatccttctatgatattatggggagtccc

SEQ ID NO: 207062 - DNA, 463 bp, Glycine max
  unsure (1)..(463): unsure at all n locations
ntcatctattgagtaccttctaagccatattgaaaatctttatatgtgcattcacgatctacaaataggagttgagcacctcacaagaaaactaattaggaacagaatttcccttctcaacatattcaaccactaatcatagaacacctctatgatttttgtgaactcaattttgaccccatgagtattgtctcccaattgtacataaatgtaaataattttttgttctatctgcagaacaattacttacggattcaattatagttatttcatcttcactctttttccttattcttgagtatactccaaatctcatctttctgtttccctttattctttcaaatatccacctctgaaataagctaaaggaaataaaaaggttaaacanacattttttcatttcanaactataccaacaatttgatcagccttcttcatctatacaagaacgaaaatgaagtga

SEQ ID NO: 207063 - DNA, 417 bp, Glycine max
  unsure (1)..(417): unsure at all n locations
agcttcttatccaaggcactttcttggaggtgaaacttcnccttccatggcttattctccagcggatggcgcctcctatcacctcttctgctttatctttcactgcaactccctggctaaaaaatactattgaaggaccttattgaagctcaaagatccagcctccatagaagcttctcaagcaagcttccatcaagtcaaatttacaaagttttacttgtttaaaaagtatattttatcatcaaaaactataaatttattaaaaaaaactacttttataactatatttgaaatattcatatttatgacttataatttaagtatttttttaataatgaaaacaactacggttatcacgattaatcatcaaaatgaatacttntgaatgcaataccataatacatggttatgtcaata

SEQ ID NO: 207064 - DNA, 443 bp, Glycine max
  unsure (1)..(443): unsure at all n locations
tctcatattgaaacctgaatcctgcggtatttcagtaattaatcattccttgctttagatcataccaacaaaattatattggcattggagttaattccctttgatgatgtttgtggttctcagctttggaggaatggcgaaagaggaagatggagagggccagacaaagagaattggagaaaaatggaacaacttcttctcaagcttgactntatatattctcttatatcaagtgaaagttgacatgctgatttcaatacataatgggacaattagtagtcatttagtgtacactgtatagcatctttaagattttccacagcttatgttataaaggaatctttcttcggacagaatttgtgattaatagttngatactattactcatctactntagttntctttatattntanaaattaaaantaaataattaccatctttc

SEQ ID NO: 207065 - DNA, 392 bp, Glycine max
  unsure (1)..(392): unsure at all n locations
agcttgctccagaacacaatgtttgcttgcttgtttgggataaggtcaagaggttttgaaggtgagaaccaaaacgtaagatcgcccagtgaggtaaaaatgtcaagctaatgacgttaaagaagtgctccctgggaggcaacccagnttcaatttgtgttatttttggtttttcatgcatttgataattgggaaattgttgtataatctgaacattggagcatatcagcctccctttgaatggtaaaattaagggtttcaatttcttgggaaaggactaagtttaaaacttagaaaatctttttgaaaattagtccttttgccaagcgcctgcttctcgctaagcgcataatcattcatgcactaagccacgagaattaagtgcttggtgc

SEQ ID NO: 207066 - DNA, 471 bp, Glycine max
  unsure (1)..(471): unsure at all n locations
ngaaggcaaactagatgcattggttaactgggtaacccagctggccttgaaccagaaatctgtacctgttgcaagggtctgtggtttgtgctcctctgctgaccaccatacagacctttgcccttcgatgcagcaacctggagcaattgagcaacccgaagcttatgctgcaaatatttacaatagacctcctcaacctcagcagcaaaatcaaccacagcagaacaattatgacctctccagcaacagatacaaccctggatggaggaatcacccaaatctcagatggtctagccctcagcaacaacaacagcagcctgctccttccttccaaaatgctgctggcccaagcagaccatacattcctccaccaatccaacaacagcaacagccccagaaagtgccaacagttgaggcccctccacaaccttccctccaagaacttgtgaggcaaatgactatgcagaacat

SEQ ID NO: 207067 - DNA, 430 bp, Glycine max
  unsure (1)..(430): unsure at all n locations
agctngagctcactgctgctgccccacanagttctcatggaattttctcggccatgctcttccttgcgagccctcttggtttcttgttcaagggctcttgcggtaactgcatttccttctcgtaactcggcacactctatccgaacgcatgtagcgactaacttgaatttttctttggcaagtcttgcttttcctagttcggattttagagctcggacttcttcatcctcctctggagcttcgaagtcctcctcgttgataattttcaacttggagagccaatctaaccctcgtgtacgaactttcagccatgcctgataaccaccgatgatgccattacgaatgcccctaagttctttatctttccttaatgggatttcccacgccttatggactcttcgtataatcatgaaactttgcgcgccgaaat

SEQ ID NO: 207068 - DNA, 334 bp, Glycine max
agtcctgctacttattgtttgtgaccacacagtggtacctggagatatgtagtgggggtcatgacacctctgggacttcaagtgcggagctgtatgccaaaaccaagcttgatcagtccccacccaccctgcgcataatcagtcagtgagaacctgcgacgtacatcaacaggcgagctcctgggtgtctaccaatatgagaactaataccacacaccaccgaggcttgtgtggcggctgaccttatatggatcctgagaggtatctggatattggcctctgcgtaatcggttaccaagggcgttgcatttattacgacgcttatcaatggaga

SEQ ID NO: 207069 - DNA, 319 bp, Glycine max
tacacgacctgcttagagatgctctcaaaatactttgtgtatcgtgagatggtagactacatgctgagagaggatatctattaattatacgagtgactattactactgatgcgaacgagaagaacatatcttataactttgattatagccaacaggggctagataggataaagaagatgatgtctaccgagcttgtggtatagcttgatttgtagaggctaccgattgaacacctgaagtatggaactaggtgaagttggagcaatggctgtagctgtcgacatttagacgtattcgtcaaggatgagacaaactatta

SEQ ID NO: 207070 - DNA, 382 bp, Glycine max
  unsure (1)..(382): unsure at all n locations
agctnntaggaaaatcttatctctcagttttgttggatcaagnggactcagaataattaagaagggggggttgaattaattattaatgtgtcttgactaattaaaaattatccttcttaatattactagattcaattaggcttttactactaggttaagaaagtaaagaacagaaacagaaacttaaccaaaagtaaaatcggcaaataaaagtacatagtggaaattaaagagtgtagggaagaagaagacaaacacgagatttatactggtttggccacaacccgtgcctacatctagtccccaagcaaccaacggttcttgagatttctttcaaccttgtaaaatcctttacaagccaaagatccacaagggatgtacc

SEQ ID NO: 207071 - DNA, 428 bp, Glycine max
  unsure (1)..(428): unsure at all n locations
ntgannattggcatctaaagtctaagagctctgggcagatatgtgtgctaaagctggaagtggggctgaagtagaagatggagggatgccagctattggtgcaaaggaagaagggacatcagctgctctgagcttggtcttccttgcctctagaaaattaactatttgctcattcgcattccaatagttccttatgatataagctaagtcaatggccggtcttaggttttgataggaggtaagggcatcaaatcccactcccttcgatctacacaaggttgtgattaaagctgggaagcctaagcgagaagagttagattgagccatcatggtcatttgtccagagatcaaaccgccaatgttcatgtccatccttgtgattaagccatagaccaacctagctctatctgtgttcaaatctaaagtgc

SEQ ID NO: 207072 - DNA, 343 bp, Glycine max
taacctatggaatcaaaaaacaacttaatggctgagcgtaactgaaattgtggctactataagtcaccttcaacagccaacaatgttagccaccatttggtctaccataaggctgatgcctaagatgccaatcgggcccttattacaacttgaactatacctaactaaagcccttttagttgattaacccaaaacattattttggtcagccaactatacaaggattgggccattatttagacaaactaatacactcttaaatcgagacaaagtgggccatgatacaacctataaccttggactttctttcatgaaacttgggcttgattcaaatagaatggac

SEQ ID NO: 207073 - DNA, 425 bp, Glycine max
  unsure (1)..(425): unsure at all n locations
agcttctcccccattgtgctataaattttttgagaagnngaaaaaaaaagggttcagcctcttatgcacttctctctctctcgaaattgctgaggaaaattatttctgtgaagaaaatccaagccgaggcgcttccgtaacgtttccgtgagaaattacgcgaagattctcgaccgctcttcaagattcatcgttcgttcttcgttttcttcagtcttcaacgggtaagtacctcaaaccaagcttttcaattcattctatgtacccgcggnggtccatattttggttcatgtanttttattctcattttcatttgcttttataccccttttgacgtgcttaagccaatttattaagtcatttctcgcttaatctaaaaataanataaattcccccgatcgtntgaatgatcatccgttattttg

SEQ ID NO: 207074 - DNA, 469 bp, Glycine max
  unsure (1)..(469): unsure at all n locations
ctctccactaagttgcctgatgcctgaaatgtctnttcttatgtttgtggtcctagatgcagggaataatttctccaagaacaccctcttaaggtcatcccaactgaaaatggacatgggagcaaggtagtatagccaatcttttgccactccctccagagaatgaggaaaagctttagaaagatatgatcttcttggacatcagggggcttcatggtggaacaaacaatatgaaactccttaagatgcttatgaggatattcacctgcaagaccatgaaacttgggcagcaaatgtattagtccagtcttgagaacatatggaacaccttcatcaggatattgaatgcacaagctttcataaatgaaatcaggtgcagccatctccctaagagtcctctcangaggtggaggttgatccatgttctcagtatgaaaattagtagttgaatgctaaaaatcaaaatatt

SEQ ID NO: 207075 - DNA, 340 bp, Glycine max
cacctttgcttcttgattaaataatggtatttcacatcaaaaaatctatcagatcgtatcatgtatgatttttagtggtctaaaagttttgtaaaaccctcaagtttgctgatgaaatgccttgagtagaacacagaatggccgaaaatttgtcagattatgtcatgtatgatttttaatgatcaagacgctatgatacaccctaaaatatgctggtcaagtgcctagactggcaacacagcatgactgttcattgcaacggcattgaagacgcattcataattggttgctttatcattgatcttaacagatgacatgtgtttatagaatatagattatg

SEQ ID NO: 207076 - DNA, 465 bp, Glycine max
  unsure (1)..(465): unsure at all n locations
ctggctaattgttctgcaaaattaaccatgcatcttnttgtatttattntcagatatttaatgtgtacttcaaagcaaaggactcaaaccatcatctctcaccactttctgattctctaattacaaaataacacagcaccggaaaaaactaacaaccatgctagagatttctttttttaatcgagtgtccttttttaaaattaaaataacagagaaaggacagtgatatcaatccctaaatgacatgcatggctcaaagaaaagtatgtgttacatttacaggttgagaaatactagcaatccattttgttcctcatttttaatacaccttctatcattatttaaaatttatttgaaaatcaaaaatatttgtggatattattacttatttaattattcttattcataaatttaaattcttttaattaattntaaccaataaagagggtggttcaatttctttta

SEQ ID NO: 207077 - DNA, 371 bp, Glycine max
agcttagcccaagaggggatggaccttttcttgttttggagaggatcaataacaatgcctataggttggacctcccagaagagtatggagtcaacaccacttttaacatttatgatttaattactttagcatgtggagctgatattgaggaggaggaactaacagatttgaggtcaaatcctcttcaagaggaaggggatgatgcaatcctctctaagaagggaccagtcactagagccatgagcaagaggctccaagaggattgggctttatgtcttgaagaatgccctatggttctcatgaacctcagggatgatttactatcccatggaccataggtgggtccaattatatttgtccatatagactat

SEQ ID NO: 207078 - DNA, 437 bp, Glycine max
  unsure (1)..(437): unsure at all n locations
tctgctgttgacaggatatgttatacaatctgggatatttcgttcttaaaggttcttgttccatgagccagcagtcctcccaaaacctgattttgtccccacaccccactttccaatctattgcagattgaaacagaccatgcacagcttgttcatggatgactgaccttaaatcctgccaccatatggattcattggtaactgatgttccctcctctagagccctccaacctccatacttcgagatgagaatcttaacccaaagatcatcatgcttcgagatgaatattccatgcaaatcaaacaaacagaataaggaggcccaggagagtgttttttgggatgtagccagagatttgggaatgactttcgaagagaattcacgcaacatagtccagatgaagaatgaattanaacaggctgacatatcaacagca

SEQ ID NO: 207079 - DNA, 397 bp, Glycine max
  unsure (1)..(397): unsure at all n locations
agcctttaaatagataaagagttggtttgtctagnatacaanngcgggaatccaagtaaaatttataaataaaacatcaccaataataatacaattatacgatattaagaataaataatcatcgtccttaaatgaaaggtttaatgagctattcttaaataaaagtgttttacgatttattttttaatgagagtgttatttaagatttattttgtctcgccgagctagtgcctatcctaatcattctatcgaatattttattttattattcttttaaaatatatttcttatttttaatttcacatattatgtcagttaaccactaatcaaaatacctggccatttaaaaaatatctatcataattttattcgcacattcttttaaaacttcttatct

SEQ ID NO: 207080 - DNA, 432 bp, Glycine max
  unsure (1)..(432): unsure at all n locations
ttctctttgcaaccttaagtgccctcttatccttctctttcttagcaactcagntatacgctnttcatagggtgcaaaaccagcaacctctcttatgaggttcctcacaaagtgcaccctcttgcttgttttctgttttgaatcaatataattttaggaccacatataagatataaaaacaaaatctctgtatgtcttaattatttttatccaatacagcatcataatttaaaacaatttaagaatgatccatcaatacacttctaacatgataaatagtccaattttcacaaccaagaacacattttattcagagtgaatgcattgataaaaggaagggaaaataggtctccaaagattgagatcagtttggaaataaaaattggcgcatatacgagttcaaaatcttagtgctcnccacaaagaacacct

SEQ ID NO: 207081 - DNA, 437 bp, Glycine max
  unsure (1)..(437): unsure at all n locations
ggatcttaagtcactgagctgcanctgatttgataggtttattattgtaagaagaaatatatgtagtttaaaattgtttctaaatttggtgctaatggtgcaatgttattttggtcaccagatgaacacctactcctcaatggatggtgttctctattgcaagccacactttgaacagcttttcaaggaatctggcaatttcagcaagaactttcatacaggtaagatgtaaccatcctttgttcatcactttgtttactatttttattcaaccgcaatctcattgagtacaaattcatatgcacctgtcactttctattgacttggctaacatgttatgttgttntcatgaccataattgcggcacagcaaagtcttctgataacaaaatgagacggtttgttacgatccaccctaacacatatgttgcattttga

SEQ ID NO: 207082 - DNA, 450 bp, Glycine max
  unsure (1)..(450): unsure at all n locations
ntntctagatattgaacatcaaggctgtccacataacttgttcaagcttgctgatgacaaattttcggggaaatccctccatgtgcatatgctgctcaaataatttccatgaataatctaattgattatcatcaatagcattttgtatctccaaactaactttggctgggtcttgagcctggaccaggattctttcagccacactagagaaatatagtccttgaagagtaaatttattctctgatccaagtggaaatgcttgagaacttgagttggctaaataagagccaacagacttaacaatagactggacacttttgttactagaaactcgggctgtgccataattgcaattagcaaccatgacatataaaacanaagggatatcangtcctgttttgagctntcttattgcaagcatcttcaactatcagcaactttgcgaagatg

SEQ ID NO: 207083 - DNA, 384 bp, Glycine max
agcttatatataatacatacattggcacgctttaacattaccactttcttacttacaccacagcacttctgctaacctttcgtcttcaatttccctttggatttcattcattaggtaatacacacaaatgacaaatctctctttttaattttaataatactttttttattcttaatgaaatgaaatcaatttatattcttattctaactattaattattttgtgggtttttgacgtgtgtgtaattgattcaaatggattcgagttgaagacatcaaaaattcgattatctgtttaagttgttgatgattggagactctggggttggcaagagtagtcttcttctcagtttcacctccgatgcttttgaagatctctcccccac

SEQ ID NO: 207084 - DNA, 422 bp, Glycine max
  unsure (1)..(422): unsure at all n locations
tcatgagtgacattcgtggttaatgatgtgagagaatgttgatattaaggatatctcttattaaacgaggaataggttaaaatcaaaataagttatttcttctagaaagttatgcttacgcatttgtgagttatttgccaacaccttttatttataagtagaaggtaattgctactcaatctaattaagaccaactttgtcgtgactatgcatgttaggtttttcctagagttactagcttgattctctactttctatatgatgacattcctaatcatattcaagcttcatgagtgacattcgtggttgatgatgtgagagaatgttgagaataaggatatctcttattaaacgaggaataggttaaaatcaaaataagttatttcttctagaaagttatgcttancgcatttgtgagttat

SEQ ID NO: 207085 - DNA, 428 bp, Glycine max
  unsure (1)..(428): unsure at all n locations
gcagcttaattccttgagggttaattnttttttcttttggtagatnnggaaccaatatccttaaactactcaatatatttattaaagttaaagaaaaaaaatattgaatggcatacacatgttcttgtgaagtaaccactatgcactaaccaacaaagatgcaaacaacatcaccactgatatacatatatttctcgctttcttaagatatagtagcttgccaacaattgtcaaattatgcaatcaagataaatggattcttgaatcacggaagtgcttgggcttacacctatcaactccttgtatctcacgagcctctggtaaataaaggtgaaaaccacctgtaaaacacataatctaaaccaatcaaagactttggatgtaagcaaaaatgagcaaacattcataatgtctgaagcaggacatac

SEQ ID NO: 207086 - DNA, 419 bp, Glycine max
aaagagtttgagaagttacaaggtatttttggtaaagatcgtgcaaatggtcgtggggccgagcgttgtgaagatgcaatggaaaatcaaattggtgagaaccaagttagtgatgatgatgagtggctacaccaacatgataattcaccttcttttattggaaatacttttgttggaccaccttctaaatgaccacgccttgctcaattagccactagatttattgaaagtttcaatagtaaatggatatggtaacaaatgattttgcaaaagttgtagccaaactttcagatccttcaaagtcgaatccttcaaaaagagacttggttgaagaggttaagacattacgattaactaaagaagaggaaattaacttagttatcaagtttgctcataaccaacaatatgaaaagttcttt

SEQ ID NO: 207087 - DNA, 437 bp, Glycine max
  unsure (1)..(437): unsure at all n locations
tgaggatgcagctgggatctctataagcactctatacccatgttttttttcgtagaggttaattggatagttaacaaaaaaatatttcttagtaataaatttatattttgccttaaacatacttgactaaagattgaagcactttatatgtatatgtaagattaacatttaatttgtttattgtaagaattgaacacggtatataacaatcagatattatattcaaccaactaaactagactcccttaatgataaacatttaattttcacaactagccattttctttgataaacaatatgtaagtatagatataacatcttatacctttgaccttcatagccttgaaatggcattctgccatttcctataaaaaatgcatgatcgaaagaaattaaaatgtataaattttttaanattttgaaacattaaattaaat

SEQ ID NO: 207088 - DNA, 471 bp, Glycine max
  unsure (1)..(471): unsure at all n locations
tgtgggcctctatattgtctcatgccttagtctaccaaaactttgttatatggatcattcgacccaaagatgggtcactacactcgatatcaagacctaacatgacaggacccggagtggaaaccccaagcaactaagggactggtctagcttatggaccttataaggattgtaagaacatctcatgcccacaatggggattggtaaaacaaatataggaacaccacctcctttttattgtatatataaagttatagataacatgtatcatccataaaagataattttattcgaatcagatataattattatggtcaataaattntttcctatgaatatttaacatatacatacatatatgatacttaaaattgaagctctngattaaattatcttaataattacagcgtcagtgcttattaatttatactaattagatttttttaactatttaaaaaatattattctatg

SEQ ID NO: 207089 - DNA, 428 bp, Glycine max
agcttgttcatgtcctcatgggcttaaggcacaagtacttctaactaattgaactataaaaaaagcatatctttggcacttgggtacaggccttacttgggagcagccacatttttgtttaaaatatgcttttctattttgaagccttttaatagcatggaattgtcagaaaatgacaatttgtggtggctttaaaaatcttaagagatcaattacaaatattttacaagatcaacgacacaattactatttttttagtttagagacctaaataaaaactcctaaatagttgagggaattaaattaaccttgaatgaacataaacagacaatttttcacatggatatgtaaataaaaacaccaaaattcctaattaaaatgaagttgtgacttttacggatcacctgacccgtaacatgttctggatc

SEQ ID NO: 207090 - DNA, 446 bp, Glycine max
  unsure (1)..(446): unsure at all n locations
tcttgaagaatcctggtttgcatcaaagcaatctcagaactcaatgtttatggatgatacatgtttcttccttcaacaagagacccctcattacaatgaaaaagttgaagttgagttgcatccattacccggaaaccaattatcttctgccgtgtccgattatgttctgagattcttgtcaaactcaacaagagtcttggcttccactaaagggttgattctttgtaatcacgccacgagccacacaccaattgaactcttcatttgtaacccataaacaaaaacttggttacccattcccaccccaaaggaagttcaaaaaagatatgatgctgctgatcccacaatggtgttgctagaatcttcctacgacggctgtgatgatgattacatggtatttcaccttgaacttganagcacaacagaatggtcctcannatatgcct

SEQ ID NO: 207091 - DNA, 415 bp, Glycine max
  unsure (1)..(415): unsure at all n locations
agcttccatgccacatatttctttgcaactacttttattttngaggacagcacgcatcctgggcttgttcaaatccttatcttgcctagatgcattgtttgtgaacaagctgtgaagcacacaagtgagtgagtctagtccgtgaacaactcaagcgaatcgattagtcacaacaaaagaaataatcgcccagatatgatatagacagtactactaaaataaaatggaaatgataaaattgtagaagaaataggtctaaacatgcccatctaacaaaatgtacatcctagagatataggaatgaaaccataaagaaagcctaatctaagagtcctcctgaggctggtgggtatcatttgtctatttgcgataatgaaaacataagtcaggagtagcctcttgaattgtccgggac

SEQ ID NO: 207092 - DNA, 466 bp, Glycine max
  unsure (1)..(466): unsure at all n locations
tgacccttacgagtcagtttggtcaaaggtgaagctaacttggagaaaccttctatgaatctccgataatatcttgttaagcccagaaaactcctaatctcaaaaacagacttaggactctcctactcaagaatgacttctatcttagaaaggtctacaattatatgcccttgagatatcacatgccctaggaaactaactttctctaaccaaaactcatacttagacagcttagcataaagctatcaattcctaagggtatgcagcacaatcctcaagtgctcctcatgttcatctctagtcttggaatataccagaatatcatctatgaatactaccacacaactattgaggtaagggtgaaagactatattcatgtagcccatatacacacctagagtgttagtcacaccanagggcatgactagatactcgtagcgaccataacaggtcctaatagcaatct

SEQ ID NO: 207093 - DNA, 397 bp, Glycine max
  unsure (1)..(397): unsure at all n locations
agctttgcaaagtaaaaggcagaaaccaaataattttcctggntntcatatagccgntggccatccaggtactgaacaaaaccgtcaataagatatggaccaacataagaagccaaagtgtttaacaatgcaagaaaagctgtgataagaatctccttccatgctgacattattaacgacttcgccaacttcagtgtggtgactctgttaattcccccacaatcagcctcaagtttctctctgaaacttggaaaagcaccaattacactatctctgccgtctagttgaggaacatcctcaaggtccagggtcttcttattaccaacagctataagagggacccacccagagaaggtaagaatgctcaaaaacccagcatatgagaaaggggtcacag

SEQ ID NO: 207094 - DNA, 460 bp, Glycine max
  unsure (1)..(460): unsure at all n locations
tctaagatntctccaacttaatacatattctgatgctgctttaagaaattcctttaagtgtaatgttcagtagctgttaagagggaatgctgtttttactgttatgctgctaattacagtttgtctttaaaacgattagaggaatggaaaatctangaccttgaatttgagagttaatagctgatcttattccgtaattgttatgcacagcaaaggctggttatgaatgcaagttagaaatgatatgctattgtgggaaaaatattatgttaacgtttaaaaaacatgtttactttcgtttggcagagtccttactttcgtttttgtcttggcttttttagtatatgatagtaaaccgtaatgtaatcttcaagcgattcgtttctggttactttntgccttcctgcgtagtttatataatgtaagtgatatttacaatattagaaatatgttctaagtt

SEQ ID NO: 207095 - DNA, 410 bp, Glycine max
  unsure (1)..(410): unsure at all n locations
agcttataaaggcctatgcaagcctcttcttatattcttactngngagggtgagttagattcatcctatattcaagatgatatcaaagtctatcatagatttgatattggaccaccatcaattgtcctagaatctacctaacctcgtgactttccctgtccaatctacctgaccccacggctttcccagtacaatatatgtccaaagtagggcttctaaaggctttaggtcaattctcactttatgagcntaactttggacttgagttaggcctagccaaattcaagagttttaattgtctcttcttctgtcttcaattctacaattgcaaaccattaagttggcttcagaatattgttacacttaaaactacaattcctctctgtctcggttcacacatatgtaaatgc

SEQ ID NO: 207096 - DNA, 470 bp, Glycine max
  unsure (1)..(470): unsure at all n locations
ntaacaattgaggccacttcattagattgatgatctatgttttcttatcactgtacgcgtcattatcccaattttcttgtcattcaccaacttgcacaataatgtaataaattaatattaaacacccaaaccgacgaaccacgctacaaatttccaacaaaataagtaattaaataacaagtcctttataaattattaggtatgaactatgaagagtttgattttacaaaattttcaagcacacgagagggaggacagatttccagacacactaaaacagcccggccatcctctctagtccaaacaaaaacatcaatgggtgggaacatgaatatataaatagaaaagaaaattgagcaaaaataacaaaaataaaaagagagggtatatgtatccatataatgatgatggcaaacaaaaacaaaataaatataaacaaatataaagtaaaagaccatctttcactcaac

SEQ ID NO: 207097 - DNA, 333 bp, Glycine max
tgttgtagcaacacattgcgcctttgggcatttgtctgttgaaaaggcagtagattatacaatctctaaagtgattcattaatcagataactaaaaacaagttaattttaagataatcttcaatttccttagtattagaagtgcttggtagggtgaaaataagccaaacaattggtgagggggtcatgtcttacctaaatttggcatttttgatagggctattgttaaacaaacctcattgttagctaagttaaccccctttcttggtattaaatttgttagtaccaattataccgtttaaccttgtttatacacccttaacagaagcgtgtt

SEQ ID NO: 207098 - DNA, 437 bp, Glycine max
  unsure (1)..(437): unsure at all n locations
tgagatgaggaagtgttgaagggtgaaacttcctgcttttattgtttaccacagagtggtacctggagatatgtcgcgggggtcaggagaccttggggacgtcaggtggggtgctattgcccaaaaccaagcttgaccaatcccgacccaacccgggcatagttggtcagtgagaacctgtgatgtacctaaacaggcgagctcctggcagtcaacagataaaaggaacaaagaccacaaagcaaggaggcttgtggtggctggccagctgtgaactttgattgatatgtgggttatggcctctggtaatcgattaacaagggtgggtaatcgattacaaggcttaaaaatgaagacaggnggctaagatggtctctggtaatcgattaccaggggatgtaatcgattaccaggcttgaaaacgaagtcaggaagct

SEQ ID NO: 207099 - DNA, 437 bp, Glycine max
  unsure (1)..(437): unsure at all n locations
agctttagcaccattgagggtaaagactcttctatgtggccttcggatgtctagtttggtcattttggtccccaccattttgctctttcttgagttgtgaacaatccctttgagtatgtcccttttgtccacaattaaaacagatcgtatctttatctggacaatttgaggagatgtgccctggcttcctacatctgtaacaaatgatatgagtggggaaagtattgggtttgctaccactaatgcaaatcccctagcaatagtcctctgattgtcatggcggttaccatattgcttaggaggggtcgagtatggttttcctcgatgttgaggcccattctttntgttcttcactggacctatactcctataataggttgccctgtctcgggaatctttattcccaatctgacacatgttaaccaaaagtggtaact

SEQ ID NO: 207100 - DNA, 459 bp, Glycine max
  unsure (1)..(459): unsure at all n locations
cttatgtgctttntcctcccaacaaaataggttccatatgaatacagtcataatagaaaggcttagcactcgaccagggaaaaaagcaagacaaaagttaaacgagatcaaggtttctctaaggaatcggcaatgcaaattccctattgttaggaaatataaggagaagggagagaaagaatttttttttttgtataataagaaaaacacaaaaaaaataggagagaaaactcctaacattttgtatagtaagaatttttcataattgacttggaccattatatccctcctaacatgtttatgctgggttggcgtgtaaaggacctttttagtgatgttggcaattggaattggaatataccggctataatggggcctaattatagtcttacccccccatgtggtgtctccccctctcctttgcatggtgaggacgttactgtggcctaataaagttac

SEQ ID NO: 207101 - DNA, 412 bp, Glycine max
  unsure (1)..(412): unsure at all n locations
agctntagncaaacagaataatccatttatgtctatgaatnggggggtgaaaaagcataacaggactttctgtgattggtttaaagatacaatctttgcagatgagaatgctttanaaatattaagaaagctagcagatgggcctaaaagaaatgttataacttggcaaggatacgacataaacaagtattcattttacacaaaagcgcaagatgacaaaagtacaatgcagaacagcggggtgaccctaagggctgaatctcacacttcaaagtgtgagtgatgccaatccttgtggagcttccatcccttactttgggttcattgatgaaatgtgggagcttaactatgtgaaaactattggatgtgtttccaatgtaagtgggtgacagcaacaccggtgtgcgcaccg

SEQ ID NO: 207102 - DNA, 461 bp, Glycine max
  unsure (1)..(461): unsure at all n locations
ntcacctttggtcctcctcataggtgttgcatgagataacatgctctattttcatctcccactctaaataggcctccggatcattctttcctttaaagggaggaatgttgagtttaataccatcaatttagttttgtctaggaacaccatcattccctcttctccattatgatctctattctccatttgatccaacctctcatggagggcatcatctcgttgtttcattaaactctccaaatgttgcatcaaagcttgcatttggaattgtgaaagccccactccatcattagaatttgttcctgccatctcaaacaaacaaatcaaacataacaagacaattatagttgctgtttgaatacctcactcactcaagtgtatcacacaattatggctgttctctaatgaagacactctctccttntaccactctaataccccttgagttcttatgcaatcca

SEQ ID NO: 207103 - DNA, 400 bp, Glycine max
  unsure (1)..(400): unsure at all n locations
anncttgatgcaacatatggagaggttaattaaacaacgagatgatgcgctccatgagaggttggatcaaatggagaatagagatcataatgaagaagaaaggaggagaagagggaatgatggtgttcctagacaaaaccgaattgatggtattaaactcaacattcccccctttaaaggaaagaatgatccggaggcctacttggagtgggagatgaaaatagagcatgtattctcatgcaacaactatgaggaggacaaaaaggtgaagcttgccgccacggaattttccgactatgcccttgtgtggtggaacaagctacaaaaggagagagcaagaaatgaagagccaatggttgatacatggacggagatgaaaaagatcatgaggaagcgatat

SEQ ID NO: 207104 - DNA, 439 bp, Glycine max
taacatgtctattttctataaatgttcaccctatattcttatattatttccaggtaattcccaatttagcaaacaaccagaaaaggtaacaacaggacattcagcaaaagggtcatacttttagaatataattttagtttcattacatgaagtccaataattctcaataccaaatttcatgagacatgtcactgcaacaaattatcaaacaacttgtatgcatcatttatgacactcaaccacttaatcaatcaattttctaaaaccttaaatcattatttatgactcccaacatgggtttgagcaccatcaacacacaataaacatgagaaagaaaagaacccccctaccttgaagtagatttcgaaattgcaaagacaaagaactctagcacacttgtttctatccaatgaatctatgcacacatgagtcatgtttg

SEQ ID NO: 207105 - DNA, 190 bp, Glycine max
aaaaaaggggggggggggggaaaaaagaggagggggagagaagagaagggggggaagaaagaggggggaggggaaaggaaaaagggggggggggaggaaaaaaaggaaaggaaggaaggaaaaaagagggagggaggagagggaggaaaaggggagggaaagaggggagggggaaaagggagagggggga

SEQ ID NO: 207106 - DNA, 355 bp, Glycine max
  unsure (1)..(355): unsure at all n locations
agcttcctacgcagatacctgttngtatactacgcccaatggaggccaccctcgtaggagtagactaacttatactgagcatcatccgcagatccctcttgctagacttgactcactacagggttgttacgagattgtactctaactatgcctcatcttgatacgcagatacttgctgcaagactacgcctacactaatcaggattattgtaatcgcgccctccaaaccaaaactcaactggcacatccctcatgtcacactaagttttgatgctgcttcaatcaatttctaaggcagcaatatacttaccaatgctaaagtcccctgactgtgcacactaatgggtgatcacac

SEQ ID NO: 207107 - DNA, 375 bp, Glycine max
tcaagatgaggccaagctcgctgaaagatgcagatttcaggcttaagtaggtggcgtggcacgagccgagcgcttacacaactctgaacagatgaacgcgcatttgagaatatgcgcttagggcggcctatttcactcacccgatggactgaacctgagcgcttatagggatggacattcactcagcgaacaagctcacctcatccttcttccagagactttctcatgcttatccgacgaatgctgcactcaggaaaaggctcgctaagccaacatattggctgatcgagagggagaaaactagcactatggaacttgcctaggtaacctgtataatagagatattgattattatgctcacttcatggaagtact

SEQ ID NO: 207108 - DNA, 479 bp, Glycine max
taaatactcaacttaatgagcactatatggaccaacaactagatgatgcattgtttattactagatgtgtaacgttgaggagctaataaaggaagaaagcctggccatctcatcaaaatttaatagaaattaacatatcttggagggaagagtggacatgaggctcaaaacagaactcatacctgtagtgtcaagcacaagaagatagattcttctttagatacccgaagctattttttcaaaaacgctcacgaccctaaagggatatgccgagataaacaaacacatcggtctgaatgggcaacttatattttcacgctcatcttctgaaaaggcggtgctcttgaaagaagcttggcctgacataagcattacaatactatcaaaacagtggtcttttagctttcagcacaacatgcacgtggaatcaaatatgatatttgagcacaatgctaatagaccatactacacatgattct

SEQ ID NO: 207109 - DNA, 488 bp, Glycine max
tgcatgatatacattctcccactctcttaagcacatactttttgttatcttcaaaatcttcatgattcacattctccccctttttgatgatgaccaccacccgtatgttacgagcaacaacaaaaacaaaatatttatttgcatatagcttactccccctaggctatgcaatgtttgcttatatgagacaagtcgaagatttcatattctttcatatataaaagagttgtctcataaagaatagataagtattcctactattttatctctcatctttctctctccctttggcaacataaaaaacagatcatgaatagagaggagaataatgttaccacttgttgcaatgtatgagaatcaagtgatgcccacaggcattataacaatcattcaatattaatcaagcacaaacaagttcatggacacatctatcaaaaacacaatcaatccaatattatatcaaagccatcaacaaacacatctcaaca

SEQ ID NO: 207110 - DNA, 395 bp, Glycine max
tctttatgaatctatttaaggaagcttctcaacgacgtgtgtttatttattagaggggtgtgtgtagctaaactctaacttctcaatgaagttctctcaaagaaacttctcaaggaagttctctcaagaaagcttctcaaggaagctacctactctataaatagaagcatgtgtaacacttattataactctgatgaatgaaaggcttatgagatacacttcaaagttccacttctttccttcttttattccttcaattacgcgttccccccttctctctttcttttctttcattgaagcatcctctccaagcttcttatccaaggctcatcttcggggtgaagctccttctttcatggcttattgcttaatggatggcgcctcctctcacctct

SEQ ID NO: 207111 - DNA, 456 bp, Glycine max
  unsure (1)..(456): unsure at all n locations
agcttttgtccttcaatcgaactcaaaatttttgtgagcgtttgcatttctttgtgcgtcttcgatgaccttgntgcagttgtgttttgtccatttcctcttcactctaaatgttatttgaatattacaccgcacaatgttgtcaagataatatttttgcattttagcctaccaataattttggcattcacaaatttgcattatatacccatatgttgttaatatttgacacaagtgtttccgaaagagaattgatctcttgtcaaacagtatgtgtttcgtgcgtacaacatgtcatcaagtgtgtttcaccaatgactttatcatttatgtttattttttatgatactaattatgtatgttctacaaatnttatgtgtaatcttcttttatttcgtgcgtgtaatgttattttatctctctggattattgtctatgtactacagaattgagaaa

SEQ ID NO: 207112 - DNA, 403 bp, Glycine max
cacaattggtgacacttacacaagtatcgccgtcaagagattagagacaattgctgatgaaggggagagggaatttctaactgaaattactgccattgctcgaacacatcataagaatttggtgaagctcattggtttttgcatcaatggagctaggaagcttttgtttatgaatatgtcagcaacgggtctcttgcaagtcttctcttcaatgatgagaagcacatgtcttgcagagacagactaaaaatcgccttggatgttgctagaggagtcctatatctacatgaagagtgtgaggtccgtattatccattgcagtatagatcctctaaatatacttatggatgaatatggactgcaaacatctctgatttttgattggcaaagctactgaagcttga

SEQ ID NO: 207113 - DNA, 211 bp, Glycine max
atctctgatactcctcgcaccgacacgacatagttccggacccggcccagataaccgcacagctgcgctctgagaacaccgagcaaacaacgccagcgctaagaagtcaattttgcgcgccttattcatccgcgcgacaacgcgggtgaaaggagtaaatgagaacagggcacggatcggtttcaagcctgcgcaaacatccattctttag

SEQ ID NO: 207114 - DNA, 437 bp, Glycine max
gcttttgctactggagagttctagattatattggtccaagctcgagagagtttgagagaatttgttgtgtgaagatctgaacagaacacagctggaagaggaagctatcttgagagcttgagatgtgtttgtgagtgattgttacgtcctagaggtggaggagatatccccactacttgtatttctgtaatcttgcattctcttctctttattggaaaggaagcttcccagttatggaaagctaagtcctctgttggatcttcctttgaagtacttgatgtaaatatctttcttatcaatataatgatgttttgtgtgttcactgtgctatcagaacttcattctaacatgcttttgccttgatcacgtagatgcatgtgtttttaggatcattcaatagtggacactggtctgattctaagaacttgatatgacat

SEQ ID NO: 207115 - DNA, 454 bp, Glycine max
  unsure (1)..(454): unsure at all n locations
tctgagtcacctgcggcatgcaagcttgtaagaatggggtacccatcacattttgtactacgnggcggacgggcgatggtgcacaacaagttttccacattcacaatgcgcgcataaacccaccatcccctgttgcccacctccatctgagctcacgtactcccacgtagcccatattctcgtttctctcaacaccgggtccccatcaatcctgccaagcttccacaacatccaagcaaagcaacattcaaacagcacaagctatcacagccaagcaaaacagggcaaaggcagaaaactctgctcaacacaccaaccaaaagcacagattttctcacttaaagaccccagtaacaattcctttgatccaattcgttaaccgttggatcgacttctaaattctactggaaggctatagtacataagcctacattctgaccgctgggatctacta

SEQ ID NO: 207116 - DNA, 450 bp, Glycine max
agcttgtgtgcttccaagagtgagttattatttttgaagaacaaacggctgcattttgctttatatcaaactctgaaaaaggctgtgtacaaacctgctgcattctttaagggcatactgttttcactatgcgaggtattttgcttgtttctatgttagtttttgacattccaaattaataattggtggatattttcttaagttctatttgtggcattatattaattcttcaattatggtatattttgctttttcatataataatatttcacccatcctttagggtgagctgcatctgatgtttttttattataattgctggaatatagaggggggaaattaactatgaaccgtgttctgcaaaatggaaaatatggaataacatgtatatggaatggtaaatgaacatgagaaagtgaccagctatgtttatgacacattgtgaatgat

SEQ ID NO: 207117 - DNA, 479 bp, Glycine max
actaatctttatagttgacatgggcagaaagaagctgtaaattggtctttacgagcaacgtgtcgactcactaatagttgatgtggcatgcactgcgtaactgttattatgaatcgacaactttgtgttaaaacttgtgaaattgtatcaaagtccaccaagctatggttattttgtagtgttataagttctttatgttaagatacgtataaatacttatgttattctattttgcgcgtttaatacatcattttcttttcaatttcacgaatatattatgcgaagtttatggaagtggctgagttcttacacttctcactatagcccattctgctggcttatcgagccatccgctgagcacaaccctcctcggcttatcgcaaggaagaatctggaagaatgatgagctgtgcatgtctcgtaacgaaatatttaaggccaaatgcattgttgtgggtgtggccccactaaaacactat

SEQ ID NO: 207118 - DNA, 335 bp, Glycine max
gggtccttaaacctccattaattattaactttaccttctcctccattggtggttcttcaatttctccaaggatctcctcacatgtcttgtggtgaatgtggtaacatgatattttagaaattccactgaataaacttgctatagaaactagatttgattttctatggtacaaatttcttgttcttgttcttgaaccatgagctgtggtgagtctacgttccattgagtattggtttgcttttctctgcggctgaaactgatgagaaatctgaaactggcccaatacatgctaaaagccccagtgaagaatgaataatgcccaaaggcaaaacact

SEQ ID NO: 207119 - DNA, 377 bp, Glycine max
gtacaagacaattatagttgctgtttgaatacctcacccactcaagtgtatcacacaattatggcttttctctaatgaaacactcttgccttttaccactctaattccccttgagttcttaggcaattcaagagattatggccacaacaaagaacaattcaccaatatgtgtaaggtaaggctagacaaggaaaaggttaaccaagaaaaaggctaacaatgtttttatgcacaaatgaaggaaataaaattcagaatttaggaattcaagtaacaatccttcatgcaaccaatatattaccttatagaagtgttttttttaagttcttcaagcatgaaccattcatgcccaatttttttttttttattttcttata

SEQ ID NO: 207120 - DNA, 468 bp, Glycine max
agcttgctcgcgctaagcgctagacccttgattggttgtctttatatttcagctgagtgcacatcactgtgctaagccccgcatctttacggtaattgaactttaaccagtgggcttagcatggatgatgcactaagcgccacttcttcttgagaaaaatttatcgtagcaacgctaagcgcactatcctgcgctaagccctagatccattctgtaacttgagtttttaagctgggcttagcgggccagattgaaggtgtatactttgatgaaacgtttgccccggttgctagacttgagtccatcagattgttacttggtgtagcttgcatcctcaaattcaagctgtaccaaatggatgtgaagagcgcgcttctgaatggatacctgaatgaagaagcctacgtggagcagccaaagggatatgtagatccaactcattcagatcatgtatacaggctcaagaag

SEQ ID NO: 207121 - DNA, 475 bp, Glycine max
  unsure (1)..(475): unsure at all n locations
cttaccacagttntaggaattcaatatacacttaggatttaaatttcagccagtaattcagtcaccaaaactgaaattcacaatagacacaatcataaggaaacttaaaagttcaagaaaaggttcacaatcaaagactctctaagaattatacatgaacatgttaaggactaattaacatgcaagatttgactcaaatcaaataataggctaaaaaatttcatacactcatgaataaatgagttagacaaagaaacaagataaataaaattcaacacaacataaggaatcttatgtgacaagtttcatgactagacattacttctatgacaaaactacaataggtgaacatgtcattctagatttttgagggtgtcttctacttntaattttttttaagaattctatggtttaagttttggccagaacaaaagcatgataaaactcanaggaacctanactcaacacaattcat

SEQ ID NO: 207122 - DNA, 303 bp, Glycine max
caatcacaagccgtactggcctttaagttagacacacaagttattttcactatttggcagcatacacacttattaatttcatttgcacttacaggcgtttttacacaatatatacaaagagattatgtgtatgtacaaaaatagcgtgtggatgctgtttactttgaccatgtccattcttacccagtgcctaccccatatatggaacaaatttaccttgataatgactcccctcaatatgggataaatttgctttgaatcgcgctagagcaaaacagatttctaaccattccaatccatata

SEQ ID NO: 207123 - DNA, 443 bp, Glycine max
  unsure (1)..(443): unsure at all n locations
aagcttgtacgattatggggtacccatcacatgtggtactaggtgttattttttctatggtgcacaacaatatttccacatctcacaaatcgcgcataaatccaccatcccctgttgcccacctccaactgagctcacgtactcccatgtagcccatatcctcgtttctctcaacaccgggtccccatcaatccttccatgctttcccaacattcaggtaattcaacattcaaacagcacaaactaccacagccaagaaaacagggcaaaggcagaaaactctgtccataacaccaaccaaaatcacagctctttctcacttatagaccccagtaacatttcctttgttccaattcgttcaccgttggatcgactcgaacantttactggaagtctctagtacataagcctacatcttgaccgatgggatctgctataaaaca

SEQ ID NO: 207124 - DNA, 479 bp, Glycine max
  unsure (1)..(479): unsure at all n locations
cacaagaaactcaacttgctgtgggctttatggagctagatctcgagcttttatgatgcctttatggngaaacaccaccatggagatgcaccggaagacaaaggagaagatgtgagaggaggcgccatccactatggaataatccatggaagaaggagcttcaccaccaagaatagccttggataagaagcttggaaaggatgcttcaatggaggaaaagaaagagggagagaaaaagagaggggggagcacgacattgaaagaagaaaaagggagagaagttgaactttcagtcgcgtctctcaagagtctcattcatgaaagctacaacaagtgttacacatgcttctatatatagactatgaaacttcctcgagacgctntcttaagaaaactctcttgagaagcttcttgagaaaactttcttgagaagctagaacctagctacacacacccaatctaaaactaagctcacctcc

SEQ ID NO: 207125 - DNA, 266 bp, Glycine max
cacaaaatacttgataggccactatgggagaaacagagggtgataagaaaaacggcctcacttttgatcatcctacactcgaaatgaacaaacacttgaagcctatttatggtaaagcccacataaaagggaaaaccttgttgagagtgtttggggatgaacgaacccattttaataatatgcctttgaccatactaaagagaggggcggaaggaacttattcctaccaatatgaagaggacccaatttactagaggagccccttc

SEQ ID NO: 207126 - DNA, 480 bp, Glycine max
  unsure (1)..(480): unsure at all n locations
tataagaacaaaatngccttaatcatttccaaatatgcatgttaattatgacgcatcaacaagaatcaagccaaggctattgtgcaagcaatcaatggggcaaaacacaccaaatgattataatgatgaatggctcaaattctcacaaaggtaaaatcatcactttcaaattgagctttcaaaactatcatgacatgtagagaagaatcaaggatttcaagtcacaaaatgtcaagaacttttattttcaaaacaattacccatttcttgaacatatcctataattcaaagaaaaacatgcaaagtcgtacgtgcacacaatattgacccaaaatattaaactgaatatccgacgaaactaaccacattaacaaattaacacaactaacatattaacaaaaccaacaaaactatcaaaaccaaagaacactctcctccccccatacttatacaacacatntgtcctaatgtagcacaatt

SEQ ID NO: 207127 - DNA, 444 bp, Glycine max
catgcaagcttcttaaaagatgcaaagaacttgagttttcttttatacctctctaaaagcttaactcacctccttgagatgagaagctagagcatagctacacaccccctataatagctaagctcacccccatgacaaaatacatgagaatacaaaaaaaagtccctactacaaagactacccaaaatgccctcaaatataaggctaaaaccctatactacaagaatggccaaaatacaaggccccaacgaaggaaaaacctattctaatatttacaaagataagcgggctcatacttagccatgggcttgaaatctaccctatggctcatgagaatcctagggtcttcccttggatctctgacccaatctacttggagtcttctatccaatgctcctgcggggtaggattgcatcaatttctttcttgccatgtcaactacat

SEQ ID NO: 207128 - DNA, 352 bp, Glycine max
cacacattcacatcttgattgatttttttcagcataatgtacatgctcatactcagcagcaatctgattaaaagcataccttgaaaccatgccaagtagcctcttggataaggtaactttaaaaacatgttcaaccacatgtgtacttgtttcaaaagatgccttaatttcagtatgttgtaacgtgactatgttgttcatggcattccaaacactacataggtcttcaaggctattctgtaatagtctttttaaagcccaatgagtagtagattcaaccctacctttccaatacaccacatataattaaccaatacactatatataaatcatgtattcatctaccctacta

SEQ ID NO: 207129 - DNA, 444 bp, Glycine max
  unsure (1)..(444): unsure at all n locations
agcttgtaatccatacacaaatactgtatttctttaccagagcagattntcagaaaatattctcaacagtcacatctttttatgtggttcttgaatggctatcaaaggcctatatatatgtgacttgagacacaaatttgctaatagtttttgagaacaaaaaggtcttatcctcttaaaaagcaaaatcgttttatcctcttacaaattccttggccaaaacacttgtgattcaataaagaattatttgagtgctcaaattggtcaatctatctctctcaagagagattacttcttctcttcttctttattctgaaaaaaggattaagagaccgagggtctcttgttgtaagatatctgaacacaaagaagggttgccttgtgggttacatcttgtatacgctttacaaatagtggactctcaagcggtgcttgtgactgacg

SEQ ID NO: 207130 - DNA, 156 bp, Glycine max
gaattaatgggcctggtatcgatccaaagcaacttgaaaaactgtaataatgctggcaaccaatgcactaagggaaccttctgttaaaccttctacattatgactgctgaacctccgaattttatcttcggtgcaaaactgaaacaggacctggac

SEQ ID NO: 207131 - DNA, 409 bp, Glycine max
  unsure (1)..(409): unsure at all n locations
tgcagcttgtctttcgganctcatatgagttttttgttctcaaatgagcccagattcctcgccgacaacaccttgaaaagggattaagcttttccacatgtcggcaagtcatccttggctcaaatcgtactctctcaacctcttcatgtgagacatttgagcacacaacattcaacttcactcatacactcttctaaactcacatttcacattctgtgttatcctgcatcatggtcagttgtcacttatgtatttataagcatagaaggtcaaaggctgaaattcctacccatgaacattttcaggttgttccttatccaaaactggtttcgatgtctggaatcactattcatcttgctacttgtagctctaataattaaatagcacggaacaagctatagatgacttt

SEQ ID NO: 207132 - DNA, 452 bp, Glycine max
agctttaaggacactgaaggcttcacgatttttttccaattctcggcctctccttggagcataaatgtcgcatagaggaccttatgctcctcaaggcaacccatcacctcgaaaatcttttccgtctcagctaaccacaacctagcaccttccggatcatagtctccactgaactttggcgggtggttcttatggaaagccatgactccccgatactccgccggctccacatcacgttcctgcactagagtttccggcacagcggtgatgcggtcaaggacatcacggttctgatccctaccacgtcctgccatacctatcctgtagggaaactattagtacccaagaaatcctaatgagaaagtgtaccacacaggctatgacagttataacaacatccctctctttatacatactaatacacacaacaatcctatgaatcagtcacacat

SEQ ID NO: 207133 - DNA, 447 bp, Glycine max
  unsure (1)..(447): unsure at all n locations
agcttggagtgaagtaagccctgtgtgaatctcttatgagagttnggatgcttatgtttcaagcatgttccagatcagtgtgatttgatgaatgtagaaacctgaattgggaaagcaccactgaagatactggctcaaggaagcaggaactcaagattgatgagcctgcttcagaatcagttagtgactatgaaactgcagatcatgagacactggttcacattgaccaaaacccagaggtgacaacagacaatatgcctaaaagaaccagggtttcttatcaagacttcagggttttgaagtacacactgatgacactgtcactgatgagggtgaacttccgcccaatgaagtagtgcatattgcactatttgctggtgttgagcctctttcctttgctcaagccatccaggaaggaaaatgggtagaagaaatgaatgaagagct

SEQ ID NO: 207134 - DNA, 426 bp, Glycine max
  unsure (1)..(426): unsure at all n locations
agcttaaatatatcgagatgctcttatgtattttaatgatgcccatcgcaaatacaaagggccataacttttgctccggatctccgaataaggaaagtaacctatcgcgacgctcaaaatttaacatggaagactcgggtgaattccgacgggctaatgttttgactcggatgtccgattgaggcccgtaatatatcatggcgattaaaagttgaaatggaatgaacacgcatattcggatggccataacatttgacacggatacccgatctaagctcataatttgttgagacgcacttaggatataaatgaagtccatcgcaaatacaaacgaccataacttttccatcggatatcataataagacaagtaacctaccgcgacgctcanaatttaacatggaaaactcgggtgaattccgactgg

SEQ ID NO: 207135 - DNA, 410 bp, Glycine max
  unsure (1)..(410): unsure at all n locations
atcattaccaatttgccttttaattangacgcatcaacaagaatcaatccaacgctattgtgcaagccatcaatggggccaaacacaccatatgattatgatgatggatggctcaaattctcacaaaggtaaaatcatcactttcaaattgagctttcaaaactatcatgacatgttgagaagaatcaaggatttcaagtcacaaaatgtcaagaacttttattttcaaaacaattacccatttcttgaacatattctataattcaaagaaaaacatgcaaagtcgtacgtgcacacaaaattgacccacaatattaaactaaaaatccgacgaaactattcacattaacacattaacacgactaacaaattatcaaaaccaacataactatctgaaccacagaacactc

SEQ ID NO: 207136 - DNA, 356 bp, Glycine max
  unsure (1)..(356): unsure at all n locations
agcttctaggcagaaggactaaatttcttcttccanaatgaaatgaaaaaacctattttaaaccatggacaaaatcacaacatttttggagggtccgatttattctgaccaaaaggtgtcatccttggcaatcactggagacggagaagagaaggattaccgaacaaaggattaaaaagtccgttgtcggcgttgactgcgaaaaatgggtttgcttcaaattgtggcttttttacccgatagggttttttttttcatatgggtcaattgtaaattaattaccaaaaagaaataactcataatacatgttataactttaatgtttttaattaaagtagtaaaactatgactctaaa

SEQ ID NO: 207137 - DNA, 384 bp, Glycine max
ttactgaattgacggcgggccgcttctgaatatgttcatgaaatattgttggatcaaaagactttctgatatttcccatcttcttattttgcattgcatattaataacttgttctacaatgattgagattttatgggggattagatgctaagcgcacacagctctttagatacctgtgtgggagtctgcccattacaattgaagttttacctcactcagtttgatctcacctataatgccaatgtgttactatgttgaattattacagtgaaagtctaatctgatcgaaatacaggactatagtgcattatgaaaacgtatcatcgttatgtctgatctattattgtctcgaaatttactccattcaagtcaacataataagac

SEQ ID NO: 207138 - DNA, 322 bp, Glycine max
  unsure (1)..(322): unsure at all n locations
cactatgngtgtccactatgacctgagaaacaaaagcgatcaaataacaagcctagaattaaaatgtgcttcgttgcctcctaatagcgcttttttaacaatcttgagctggacacatgatgacttgtctgtcacggacctaatacattgcttacctttggctctggacttggtcgcctattggtccgccatgtgacgtacgcaacgctctaacctttttgtggatgagctaaagggaactctataggtggtggcggtgcgtctgttgcccgctgctggccatcccaagactgctgtggtgttttcccctattcctcgctga

SEQ ID NO: 207139 - DNA, 446 bp, Glycine max
agcttatgctacaacatttataatagacctttctttcagcagaataattattacctttcaagcaacagatacaatccaagttgaaggaatcatcaaaatctgagatgggcaagtcctccacaacaacatcagcctgtccctcctttccagaatgctgctggtccaagcaagccatatgttcctcctccaatacaacagcagcagcagtagtcacaacaaagacaacaagcaactgaggctcctcctcaaccttccttagaagagttagtgaggcaaatgaccatctagaatatgcaatttcagcaagagacaagagcctccattcagagtctaacaaatcagatgggacaggtagctactcagttgaaccaagctcagtcccaaaattctgacaaattgtcttcacaaactatacagaatccgaaaaatgtgagtgccatcacctt

SEQ ID NO: 207140 - DNA, 401 bp, Glycine max
gactggagagcgggttctaatgactcctctgcggcttccacattaggcatagaggatgggcagctcaccaagatgtcttcctcgcctgatacgatgaccaaacgccctttcactacgaatttcaacttttggtggagtgaagagggaacaacccccactgagtggatccacggatgccccaacaaacagctgtagggggggttaatatccattatttggaaggtaacttgacaggtgtgagggcctatctgtactgggagatcgatctctcccctaacctctcggcgggtgccgccgaaggcactaaccaccattgaactcggctttaagtgggaggcggtgaatgataatttctccaaagtgctcttatgcatcacgtgtatactggaaccattatcgat

SEQ ID NO: 207141 - DNA, 361 bp, Glycine max
aatatactttaagataatatatatatatatatatatatatacaagaaccaactatcataaaatgagaactaaccctggcatgatcatttaaccaaataggggtggacctgctagcattctcaagattatagggatcaccatggaagaaagtcagaacaatctcataataaccaacagctacaaccttgtctaccatattccttaacatcacagagaacaaacagtattacttcccagaggtatactacatttggcatcacagacatggagaaagagagaaattgaaacagctaggaagcagaatgaacatctatagctactgcctgttgaaatgcatgttacgttcacgtgacgatctttt

SEQ ID NO: 207142 - DNA, 367 bp, Glycine max
atctctaagctactgaggctgtcactgtaaaggtagatgaacatgtttggtttttttggctaacgataaagggatgcctcacattattttcatgacacaaatgcaaagatgatgatgtggaaattttatgcaaaactggtcatgcatgcacctatgtggacgctcaaatgtcaaatatttatggtcatgtgaagctagggctcaagatttatttcctctattttaaatcaacccaatgtctccaaaatatgcgtctttatcaatttatgcatttatcctagtccatttcgtgcgtgcggggaaatattcacagcattcacccttcatgtgtagacaccgtttatcttcaaaaatcggtatgatcaat

SEQ ID NO: 207143 - DNA, 470 bp, Glycine max
ttcaacatatgtcttcacaaataatcatcacacagcagattactaactaaactacccctcatatctcccaaaaccccatacccacgaaaattaagagggaaagaagtccacccaaacctggattttcgaagtcccactcgtagccacgcacttcacgaccccgaaaatgctctccttccacgatttggagcagaaatgagcaccaaaggttgaagctttgtgtggagcttcaatggagaatgagggaggaagaaaggcaacgcgagggagagaaaaagctgtctgaaaaaaaaaaatgagggctgagtgaagtgagagagagagatgctttttggttttaaaaggcttcttcctcttttcttattattttattcaagctctgccacatgtccctatgtgattggagcaaaaggggccactttctctttttactgtacccatactagtcacaaagtgagaaaatatgacct

SEQ ID NO: 207144 - DNA, 324 bp, Glycine max
  unsure (1)..(324): unsure at all n locations
ttatcaatcgcatatggatagggctaggtcaaattgggtaaataatacataaggcaaacacgtttctattcctttaaaatcgaatattttttttaaacctccaaagtttttttctagcctttaaaaactacaaaatgttttttacaactaaaatccgaattttctatcttatattttaaaacacatttctagctgctaaaaattgtcataattaagttacgaaaaataatcaaaaactcattaactgctttaaagaatgcgttttttttcttattgatttgactctagcaatntcaaattgtcacataattgcaccttataatt

SEQ ID NO: 207145 - DNA, 358 bp, Glycine max
taagcttcttcaactgcataagacttttaatatttgaagtgtattcttgtggaaccttcacccgacgaagacactgacaaaaactaatcttcttcttcttggacaaagtatggcaggctgggggcaagataaattttcttcccatcagaccttggatgcaactgtgattcgatacccatatcagctatagcttgacgggtatttaagccatccttcgtcttgccttgaatgataaggagcgtcccaatcacactgtcacatatattattcttcacctgcataacactaatactatgtcaaacgtcgcgaacacaccactacggaagatcaaagaagatggaactcttcttccatatgc

SEQ ID NO: 207146 - DNA, 396 bp, Glycine max
  unsure (1)..(396): unsure at all n locations
ataagctcagcataacaagggttttttctattttttttacaaaagcctcacctctcaatgagctagtgagagaagaatgtggcctttacttggggtgaaaaacaagagcaagcctttgctttgctcaaagaaaagcttactaaggcacctcgtctatctcttcccgacttttctaaaacttttgagctagaatgtgatgcctctggagtgggagttggagctgttttgttgcaaggggggcaccctattgcttattttaaggaanaactttatggtgccacccttaactaccccacctatgataaagagctctattgcttaataagagcactccgaacttggggacattaccttggttcccaggagattgtcattcatagggatcatcaatcactt

SEQ ID NO: 207147 - DNA, 453 bp, Glycine max
  unsure (1)..(453): unsure at all n locations
tgcttgtggggcttctatggaggctggatctttgagctttaatgatgttctttaatggtgatattccaccatggagatgccgcgaaagacaaaggagaagaggtgagaggaggcactattcacgagggaataagccatggtagaaggagctttaccaccaagatgagccttggataaaaaacttgcagaggatgcttcaatggagggagagaaagagagaggggggagcacgaagttgaaggaagaataaaaggagagaagttgaactttgagttatgtctcataacactctcattcatcaaaggtacaaacagtgttacacatgcttctatatatagactaagtagcttccttgagaaactttcttaagaaaacttccttgagaagcttcttgagagaacttcctgcgaagctagagcttatctcacacacccatctaaanctaagctcaac

SEQ ID NO: 207148 - DNA, 388 bp, Glycine max
gtcgaatagaagttcaagtccatagccatcaaagtctaaaaagagtatgatgaactaagggatgtcaatatggccaccgatgaagccttggaacgagaaaccaagaaggcccgagaggaagaacacgaccaaagcaaagttttgaggggctttatagggcaacaatagtgagctcatactctgaagaggtgaaaggaatcatcacgggtcaaaggcatgatcttgaaagacgagctaaaggcttgccttacgtcgaaaagatattagtcccatagttaaacgagactgaagggaatatgtgggccatcatccataagtgcaaaaagaagctaaatctatcggcgactcacgagcataggctagaggatgagtacgccaagatatcatc

SEQ ID NO: 207149 - DNA, 437 bp, Glycine max
agcttgaccaatccgacccatcctgggctttgtcggtcagcgagaacctgtgatgtacctaaacaggcgagctcctggcagtcaacaaataaaaggaacaaataccacaaagcaaggaggcttgtggcggctggccaactgtgaattttgagtaatatgtggattgtggcctctggtaatcgattaccaagggtgggtaatcgattacaaggcttataaatgaaaacaggaggctaagatggtctctggtaatcgattaccaaggggtgtaatcgattaccaggctttgaaacgaagtcaggatacttagggagcctctggtaatcgattaccaccctgtgtaatcgattacacagagggatgggtcactggtaatcgattaccaagtatgtgtaatcgattacacagtgcatgtctgcttatctcatgtcctgagg

SEQ ID NO: 207150 - DNA, 445 bp, Glycine max
  unsure (1)..(445): unsure at all n locations
agcntgattatagaataattgatatttgtttgggcaattccttatacattggcaagttgtcaagcacaaccatttggagaacatggaaattttccatgccttaatttgacaacgccatgtgtaatgcttgccttggaggtgttattacacatggaagaaaattacttttaactgagttaaacaattaacatggaatgcactttgacaagtgaactattctcacaggtttcccctctcgttaattaaactattttggggtgggaaaggggtgaaaaaaggacaaaagatttntatttcaatatgccatgctttctataagaagataaaatggatcattccatgtggtaaaaccacaacatcatcatgtactatgtatgttaaccaaacaagttgtctatagactacaggggattacgaaatatatatatggaccaacagaataaca

SEQ ID NO: 207151 - DNA, 335 bp, Glycine max
cacaccaacagttcattctgtggatagtgagattgtggtgaacacccaccggccaccactagaggaataacgtggaagctacatcaaaggaagcatctaaagcacacccaaaaaggcaaatcctctatacttcaaacctttggagggatcttccgctgcattctacactgaaacagccacaaatattaatttggagaatggacatggacaccatcatgggtctgatatctaccacgccaccatctgtgtttgtgggagtgcagcgttaccaagtgaagagacaccccaatgtgctctccttgcgtctcacttggtatgaaggcaacgcttacctt

SEQ ID NO: 207152 - DNA, 434 bp, Glycine max
  unsure (1)..(434): unsure at all n locations
agcttggcatgtagaaatacatgctccaatctatatgtggntctcaccaccctaactattgaaaacctagatatatccttccccctccctctacaattatatattctcttaagaatataaatctaccttattgtcacattatattaatgaataagatgatattgtaaagcgggcaaatcttataggatgtccgtataaaaattctaaattaacagtgtatataaattgaactacgtctcttaaataatgaaacattcttacacttaattttataacaatatatacaaagtcattttgtgtaggatattaaaacgttggataaaaaaaatacttatatagggctcggaaataaattacattaccacttggcaagtgtggttactggttataacataaaacacacaacattttaattgccagtatgcatacattac

SEQ ID NO: 207153 - DNA, 311 bp, Glycine max
  unsure (1)..(311): unsure at all n locations
ctatatagtataaaacagtctcacaatcccaagcttacaaaaccatgctcatatgccattgaggaacatcaccgagcacttggggggcgcatgtttatgcatggatagcacgaaagtgggggcaacgtggcatgccccattgctttcgaatgcaccctaggcctaaggccatcccttacaacccctcaagccaactaaaacaagcagcaactcagagacacagtcctcacagctttaaggaaatacatgcgacttagagcaccataatacatcaatggaaggcangagagcccacgaacgaggcgcttact

SEQ ID NO: 207154 - DNA, 330 bp, Glycine max
tacacacagggaagccgaaccggagctaccacccgcaataaactcgcgccgagacatgaacacgaaggggttcagtcggaaggatataccccaagcctacccttatggcatgcctctggacatcactccccgaaccggtgcagacaaaatgagccaaaccgctaccttcgaggggcaactccctccttatgccgactatcccctgcgagaagatgatgaaggagatgcccatctaggccctctacttaccctaaaagaaccgcccgcccatgaatcgccccaaccaaacatagtccgccatgagctcgcttcacccgcacccgaaaagaa

SEQ ID NO: 207155 - DNA, 447 bp, Glycine max
cagctggagccccaagtaggatcttcccacccttttgtatttttatctggatctatcaaatctggtttgggtacgtgtagagggtgttctcctcctttaatatgccaattgcaaaatataatacaaacacacgagattaatacatgttattttcacaaaaactaaaaaatataactgaatatttgactgggcgcatatcacagcatgctgagcttatcgcaccttattaacatttactcaagcgctaaacgcatcaagctgacgcttaactctaatacacataaaacatttttcttgtaatacgcttatccacaactgagcttgtctacgcttcaattctacaaacacacagagttaagcttgctgacatgcttctctaactatactaacaacagacctctatcttcacacggcaccttatctgctcaaaactaaagacaggggagt

SEQ ID NO: 207156 - DNA, 442 bp, Glycine max
acccaactcgccaggcgagcatggttgcttttcttagtaacaacagccttctggaggaatatactggagggcccaagtgggcctggttgctatttgcacccccatttttactaagtacaccccccgacctctctttggtgaatcttttttcgaaaagtaccgaaactcaccaattttgcaacgatacttgttttcttttcgaaatgttacggaacctcgtagatcacataaacatccctttatcgacgtacggaatgttacggaacctcactaattgcgccacgatgcttccatttgaatgtccgtgtggcacagaaccatacggattgcgcatcaatattctcttatgttatctggcatgggccggaaattaccaaaatgctaatgaggggttcaagcacctcacaggaccaaacaaagtgcatgtataagcaaggtcccc

SEQ ID NO: 207157 - DNA, 427 bp, Glycine max
  unsure (1)..(427): unsure at all n locations
aactaagctgtccagaaatgagtgggaataacaagcccagttttgtctttcccggctaccggcatttgagacatagcattcgcgacaatgttacttgggcctaatatatatttaatcatgtaatcatactaaagaagcttaaacaggtaagtttgttgcaccggcgtttgaattacatgagacataaggtccttcaagcttcggtgggtcgacaaaataatgaaggagnggcccagaaggtaaggacaccatttgcgaaccacagtcgcgatagcataaagctctccaacatacgtggatgcacgttggagacaggagcaataaatcttactaaaatacaccatgggatgggattgtngaagaagtacaacccccatggtcgttcctgaagcatcaagtttgacagagaacaaaagtgaaaactttg

SEQ ID NO: 207158 - DNA, 223 bp, Glycine max
aaaagaaaaaaggaggggaggaaaaaaaaagacaagggaaaggaaagagaaagggggaaaaagaaggagaggaaagagaggagagaggtaaagaagaagaggaaaaaagggagaataaagaagggaagaaagcaaaaaaggggaggaaaagaaagggagagaaaaaaaagggagggaagaagggaaaaaaaaaaagaggaagaaagaaagaaaaaagaaaagg

SEQ ID NO: 207159 - DNA, 395 bp, Glycine max
tccacaagcaacagtcctgtggatgaatattctggagggcccaagtgggcctgtgtgctatttgcacccccctttttactaaatgcacccccttctattatgtttgagattctttgttcggcacgttactaaactttacgaatgtcgtaacgatacttattattcttccgcaaggttacgaatccttacggattatgtatttactcctttcaagttttcaaagaagatacgaaaactgacggattgcgcaaaaacacctctttttgatttacgccacattactgaatattacggatcgcgcaagactgctttctttagatttcagagacgtctcgcgactttatttattgcatgtcattaagtaataatcactcgacgataatatggtatgacag

SEQ ID NO: 207160 - DNA, 425 bp, Glycine max
  unsure (1)..(425): unsure at all n locations
agcnntatgctagtaagtagtttgaggcttttcttagaagatcatcaacgagcatatctgcgcataatctcttgatctaagaagatggtgcccatcatctttctgttcttaatgaaagcagtttgagtttccccaataatagtctttaacactagggctatgcggttggccataattttatacacaatcttgtataacaaattacagcaagatatgggtctaaaatggttaacctgcgaggcctggtcatgcttacgaataagcgcaataatagcatggtttaactgctttagaacttttcccggtgtaaaaaattcattagccgctacaaagatatcatcaccaatgatatctctaagcttcttgaagaatataaattgaaaccatctgcacaggagctttattgtatccatacagaaatacgt

SEQ ID NO: 207161 - DNA, 284 bp, Glycine max
  unsure (1)..(284): unsure at all n locations
aaaaangaaggaaggaggggggttattttaaaaaaaaaaagggaaagaaaattagaagaaaaagggaaggaagaagggaagagggaaagaaaaggagggaaaggagaagggaaggaaaggaaaagaaggaaaggaaaaaggagggggaaaaggaaaagggaggaaaaagaagaaggaggagaaaagagaggggaaaagagaggagaggtaagaggaggagagaggaagaaaaggagagagagaagggaaagaaaagggaggggaaagggagaagggaagaaaag

SEQ ID NO: 207162 - DNA, 450 bp, Glycine max
  unsure (1)..(450): unsure at all n locations
agcttaattcaccctataatccaaggaatgttttattctaatcgccaataattcaacaacctttcatagggatgaatgactcgggcatactttaagctatgcatggaaaatgtaattatgaaattgagatgcccgaagaaacatcattttctagttaaccatgcattaggtatcatgttcactcattttgtttttaagtgaaacgggtttatgatcccaacatggttggctcatggtaccgaatatatgcaactatgaatgcatcgcgaattctcatgcttccctcttttgttnttgttttgcagaggagaacgcaaggatcacgcatgagcaaacatgaaaacaattggtatgcacatttgtagataaaaaaaagtttgttgaacgcatatgcatgatgatgcaatgactcatgcacaatgtgatgctggaatatgataaccgacaaat

SEQ ID NO: 207163 - DNA, 451 bp, Glycine max
cttcatgatgaatcaagatgattcattgtttttttatgatagcaaagatgatgacaaaaagctcaaaagtcaagatcacttcatgataacaaagatgatgacactcacgaataaattcaagaatgagttcaagattgagtcacgaacacttcaaagatcaagaggaaatttgatttctagaatcaagaatcaagattcaagattcaagattctagaataatcaagatcaagaatcaagactcatagattcaagaatcaagagaagacttaatcaagataagtattaaaaagtttttcaaaacattgagtagcacaagaagttttcacaaaatcattaccaaagagttttactctctggtaatcaatcaccacattatagtaatcgattaccagctggtttaaaacgttcagattctcacaatatcaaatgaagggtcacatctattgatgt

SEQ ID NO: 207164 - DNA, 439 bp, Glycine max
  unsure (1)..(439): unsure at all n locations
agctgggtagagaaagagagagagagagttctttgaatccaaactcagaagtagaaaaaaaacacaaatgacaatcgctatggctaggtacgaccgagcaatcaccgtgttctcccccgacgaccatttcttctaggtccagtacgccctcgaagccatcggcattagcggcaccaacaacgtcgtcctcggcgttgagaagaaatccaccgccaaactcctagactccaggtactactacttatttcaattcaattccctccatttcaaatccctttccccttcaattactagggattaaccaagacaactacgagttataaggaaaccaaactccgtttcagagactatccaaaaagtatgcgatctctagtgtgaaaaagaataccanaatttactacagagcacaccacactacttattgggtcatttgatttat

SEQ ID NO: 207165 - DNA, 233 bp, Glycine max
caccacctatccgctcgccagccgatagagacacattaagaagcgtatgccgaactccagacttctacgcatgaccgcatgtgaatgctgaaaggacacatattggcatgagacgaagaaaagtgacaacgtctttcattaataaccacagccccacttgcatcatctggccaacagggcgcgtgaaacaactgcataatcgaaaaaaagcagtctaactcttcatgctcgag

SEQ ID NO: 207166 - DNA, 315 bp, Glycine max
tgtgctttgcaaaaacttgtctaagagcctatcttaaatcttatcttgagatcattgcttttgcttgacatcttgctttctctcaccctcgaaattcatcctgaatgatccttgaaagtccctggcattatcaaaataattcttgaagctttgctcctacacttgggaatccgcggaaaacctcaaggaacacgttctcttctttcaccttgaggacaatgtgactcttttgggggggagtattgttagacctcttataaagaatgcttataagagaaggggggaaaatatactctatgtggtggcaatagcagt

SEQ ID NO: 207167 - DNA, 423 bp, Glycine max
  unsure (1)..(423): unsure at all n locations
ntnttattggtcggactacataactgcacaagactgctgttaactaacactgttgacattaacggacctatgaatccattcccattgtaacatagngactcaagtaacaggaagtgaacggataagaatttttccatcaccaccgtgatctaacgattaagctaaactttctaacgagcacgaacggataagacatatagaggcatctcgcgatgagaatatgtcgggatacgctaacggttcatttcaaatattgaggatgatcctgacttaggcaacactcaagcagactcatcagaggaacgtcactttatctctgtacatgacagcggctcattgatctagaagacaaccatactctcaatgngacttaacccaaagttgatcttattgacgggatgaaaacacgacccactttatata

SEQ ID NO: 207168 - DNA, 364 bp, Glycine max
  unsure (1)..(364): unsure at all n locations
acttttgactttgatgtccganagccgcccgcaatatatcgagacactcgtaactggaaacagaagctctgagcaaattcaaacgacaataacttactacacggaggtccgattgaatcccgtaatatatggagacgctattaattgaaaacagaagctctgagcaaagtcacacggcaataaactttaactcggaggtccgagcgtgtccctgaacatatcgagacgctcgaaattgagaactgaagctctgaaaaaatcaaacggcaataacttcttactcggaagaccgactgagctccggacaaaatcgagacgctcgaacatgagaacagaggcactgagcaaaatcaaacgacaataa

SEQ ID NO: 207169 - DNA, 335 bp, Glycine max
tctgttttaatatacagcgtctcgagatatcacggggttttatcttatatccgagataaaagctatggtctgtgagagtattctagaagctctccttatctcattccagaatctcgagatattacgggacacaatcggacacccgagacataagccattgtcgcgggaatcttctcagagctcctatttttaattgcgagcgcgttgatataatacgggactcaatcggacatccgagtaaatagcttttgtcgctggaattttattaaagcttctgttttcaattacgagctgtctggataacacgggactcaatcggacactccaatcataag

SEQ ID NO: 207170 - DNA, 371 bp, Glycine max
aacaaggcaagatgactcttataagtgaaaacagaactatactcacgcgttggcctagttttgaatcaaacttgtctggcccaatagaaaaaagttgagatgcataaattaataatttacaagtgtgatatattttaacttctaattttcttcatagtaactggactgcagtcatagatatgtagagagaccctatccatataatactcatttcaacaacatttatattttgacataaggaaattcaaaagggaatgaaaactcactaagtggaaaagaagaaaacgctttcttcatcctcagtagcaatgagtatgaaaagcaccaaaagcacaacaaagggcgaaactcttaacccgagcaaccagaca

SEQ ID NO: 207171 - DNA, 419 bp, Glycine max
  unsure (1)..(419): unsure at all n locations
agcttatccctgagccttgntactttgtcgcagagcttagaacttgttgttcttttccggcttcacactcggtgggaaggtaaaattgccaccttatcacatcagtgaaatgtcttggtccttctggattctcttcagaattgcttcctagaggacgtttcgaaatctcactcctatcttttccttttgacttacaaggttccttcagacagtggagtatgtaacaggaacagtgtttcttggtttcaccagaagaagacatttgggtgtcatagaaagcaaagtactcagtagcaagcttaacaaaccccgcagtgtgatcatccttcttgctgtcacgagggacaacatcatcatagagtttctgcagcacaaacaaaggtatctggttctctataatgatcaagtccccaccgatg

SEQ ID NO: 207172 - DNA, 440 bp, Glycine max
  unsure (1)..(440): unsure at all n locations
agcttcaatgaaggaagaaatgagagagatttatctatttcatagtgcggcatggaaatcgaaggagaatatggatagaagtcaaacttctaagtgtgtctcataagttttccattcatcaaagttgaactttgcgacattcatttacatttcatgtgaatctaaaaggaatattccaagaatatgccaaaggcctcttagcatattccctttagatgccacaagcatggaaggtgtggctctaacacatgggaaggaaggaagacaagttgggcttggccccataggaagaaaggagggccaaaattcatttggcttggggaggtccaagtctatatgaatcttagatactcacacccctccaatagtcaactcaaccncatgcctaatacttgaaaatacaaaaagctctactgcaagactactcaaagtctgcatac

SEQ ID NO: 207173 - DNA, 401 bp, Glycine max
  unsure (1)..(401): unsure at all n locations
atactnaagctnagagatcagaatatcgggtaaagcattctcgcagacttctttgattattgatggaacacagggatctaagagccatgtcgttttaaaacgaaacctcctataaaatggtttcttacaattagcatcaagcaaaaaatggatgggtgagggatttaacttgaaggctattaaaccccctaacttgacatttggaagcatattaagccaatcaaagcttggcattgctctggcaagcctttcttctatggcattatgctttcctttgcgttttgaccatgtgaaacccgagccatccatggtagaacatggaggccatcatcagttatagcatctctgaaacctttcatgagccaccttgggtgggcttagaagccaatttttcgaactat

SEQ ID NO: 207174 - DNA, 404 bp, Glycine max
atagaagaaaacagtcaataaaatatgaaagaaaaataagtcagttcactgaacaaactaaaattaacgtaaatatctcttaacttctataaaaaaaatatgctcattcaacttctctataacaatccataaacttatagaatcgtttaaacttagaaatcaaataaaccgctcaatctatagctcttataaagcaagaaactgatctaaactaaaccataaatgcttctcttataagtcgttgaataacatttggaaaaaaaataatccaaaggattgacatattggtgcaaggtctcctatatttgatcaatgacacatacgcatcgggagggaaaatagcttccaacctaatggatatgaagacatttgtgattcagacctaagagaaaaaccataagcac

SEQ ID NO: 207175 - DNA, 436 bp, Glycine max
agcttcataccaagcaactcatattctatgtatttaaaacccctcaatttaatggattttcaaggtttgagaagagaaaatgagaatggggtaaatttaaagtaaactctcacctcacacaagtctataacatcgatctaaacttgctcaaactgattttatgcctcaaattccgccgaatcaaaatttgactcctcaacacccaattttaccctaggaatggctcttgccttcactttggtcatttgtttttctctcttgcacagtccaagctttctcataagtcctaaatgacatttcaaactaggagttactcactttaacctccatttaccactgaatcccgttgtagccttccaactctcaaagcctcactctttttctactcataacactacattctcactttctaaccctaggttaactctacccttca

SEQ ID NO: 207176 - DNA, 247 bp, Glycine max
gcaaataacacagccactgacccaacagcacgcttccgggagacgacggacaactctgaataacagggacctaggaaatgacataagaaggcgcggcaccagcaaggcccacccgctataaccaccctgagggcagcatgggaccccacaaacggggcagcggagaacaagaacgcagaaaccgcaaggacccaagacgcacgccggccagaaacgaccgacggaagcacagaacactccaacaacg

SEQ ID NO: 207177 - DNA, 451 bp, Glycine max
  unsure (1)..(451): unsure at all n locations
agctntagaatttgattagcggattcccttgatgatggcgaatcaggtgataatgaatcacaaaaataagtctcctcctcaagaatggacgcaactgttctgtcttgtaacagtttccttctcctctcagccctgttccttcttagtgtagcttctatttctaagtccaaaggaactaaagttcctataggagatctatgcataaacagtactaacagagcagtggttatccagttcaatttgagaagataaatataaattaaagaacaaatattcacagaaacaatctaagaataacaaataaagattagacacctaataatgagcttacttcccaaataaaaagaagttccttggcaacgacaccaaaaacttgttcgcaaccggcaagtaaaccggatagtacaagtagtataaaacggtaagagtattgaactctcggtgaacttgt

SEQ ID NO: 207178 - DNA, 449 bp, Glycine max
  unsure (1)..(449): unsure at all n locations
agcttgaagaataagaagagcttgaagaatttttgtcttttacatgcccaactctcttgagtggcatttgtattggttgttatattgaatgttgcatcttantccatatcatattttttgtgcatcatgcatcatcatgagtgagtaaaaagaaaatttatgaagttagaaaatttcttcaaaaggtgaaactctttgtttcaatcgattacaaccttatctaaatcgattacacaagttgtcttaagcttgtagagttatgtctcgtatcaatttaatcgattacaaccttatcataatcgattacacaattgtttttcagacaatgactatttaggagtctatgcttaaatcgattaccatgtgttataatcgattacttctctatctataagtgtttcagaagtatctaattgattacatcgttcttgagctatctccagtttttg

SEQ ID NO: 207179 - DNA, 448 bp, Glycine max
agcttgaattccttaagaccgcatataaattatcatacatgaatcatggcggttatgttttaagataaacacttccttccatctattacaatgtataatactttctggtaaactaattaaaatgagtccaaactatattgattcaaatgaatcataactttatatgacaaacttaatgtgcacaagtcatagaatgaaaaagacataaagtttaacgcaaacccttaagtcccatatgaaccatatgatcttaaactatagctaacaaacttttatttggatgattgattttgtctctatatgatcaataaagattaactcctttaataatgtctaccttatgtcaatatgttttcctttggtttcacctttattggtttgcaatgaaattgacaaatttaagaccaaaagctctatatgcctgtgatataatctcatagcatcagat

SEQ ID NO: 207180 - DNA, 457 bp, Glycine max
  unsure (1)..(457): unsure at all n locations
taagctttgctccctgcncttacacctcactgtcacgcttattgtttgttgctccaccctgtcgctcaatcgtggtttattcctagtgtcgtcgtgctgtgctaccactgttgtcaagttatgtcaccgtcaatgaccaaggtgtgaaccaaaactgttggtttcacctctgccacgccgcgacgctgaaggtatgaactcaagtttctcgcgaactaaaatgcatttgttttagcactctatagtctatattttattatttttgacatattagatttgggggtttgccatttgcatgttaaaggggtctcatgagatatttttgtgtaaagagaaagaaatccttaatgtgtggtggtattaatgtcttaaggcgagggagagaaagaacgattaatgttatggacaagtgaaaacgataataaaaataaactgaaattttgactattttgcatga

SEQ ID NO: 207181 - DNA, 422 bp, Glycine max
gcaagcttcaaaaaactatagaaaataaggaccatttgtggcttctcttcaatacatctagggaagcggaaccggggctacagaccgcaataaacttgggctgagacaagaacacgacggtgttcggtcggaagtatattcctcaagcctacccttatgggttgcctctggacttcactccccgtaccgctccggacgatttgagccaagcccctaccttcgaggggcaactccctccttatgccgactatcccctgcaagaagatgatgaaagagatgcccatctaggccctctacttcccctcaaagatcccgccccccatgaattgccccaaccaaacatatgtcggcatgtcccgtttccacccgcaccctgtaaagaatccgttccctttgcaaagaaatggacagattgattactt

SEQ ID NO: 207182 - DNA, 391 bp, Glycine max
tagcttggagacccatgttggatctctccaacctctgggttgttttttggatctatcaaaattggtttgggtacgtgtatagggtgttttcctcttctaagatgccatttgcataatatttgacaaacccacgagatttattcatgctattttcacaaaaacagaaaaatataactgaaattttgactgggcgcatagcacagcatgctgagcttaacgcaccttattaacttttactcaagcgctaaacgcagcaagctgacgcttagctcgaagacacagaaaacatttttctgtagaataggcttagcacacaactgagcgtaacctaagtctacaatttttgaaccacagaagatagagcttagcgtacatgctacccttatctaac

SEQ ID NO: 207183 - DNA, 287 bp, Glycine max
ttttccattggggtaccacacgaggttatggattatcatcctttaaaagagctccatgatcgtacacaaaacgacagttgcgaagaaatcaatattagtctacaaagtaaatgggatcttttgaggataatatgtatctacacaaagtgatttccattgactaatccaattgcaatgacacaggacatatctagtttgcgattcctaagtgaaaaaggttaactttggttggaccaatgctggaagcactaaccatatcttcctaagggatgttggaacactgccct

SEQ ID NO: 207184 - DNA, 288 bp, Glycine max
agcactaataaaatcttgaccactacctaggaagcctttcgcgaaacatgcttccctaaatgtaggatataccagaccgctgactgttctaatgtcactgtaagactgcgcacctttggcagtggatagcatcattctaagggaaaacagttcaccatctgaaggcgggacccatatgagtctgcctattgcattcccttgtgttcttggttgccagcatcttttgcgggtgacataaacaaatcttgagatatattgatgatatgcaagatcccatccatacgaata

SEQ ID NO: 207185 - DNA, 169 bp, Glycine max
  unsure (1)..(169): unsure at all n locations
agaaaataggagaaaaaagancccagagggatgatagctgaaccaatnanaaaaaaaaaagagagagaagtttttagaaaaaaaaaaagggaagaaaagggaaaaagagaaagaaggggtagggatagaaaaaaaaggggaaaggcaaaagaaaaaagagggaaggaaa

SEQ ID NO: 207186 - DNA, 432 bp, Glycine max
  unsure (1)..(432): unsure at all n locations
agctttactaactatatatatatatatatttaatatatatatatataacccccaaaataaaaaatataaaaacttataatcgttgtaattaaatacatacatgcacaaatggcacaacataaagtttcctttgtcaaactgagttataatttttgtcaaggtgttacatgtttcattctactaggtcatggtttatgagggccattactactaagtgtttaaaacctgcaattgtaggagacttaacaaaaggaatgtcataattttttaaccaaggttgggaccacacgttaatggagcttccatttccaatccttcatctcatgccatggcttaccattacttgtgaagtgtggatactatgcaaaacacaacttgtattatgttcaagaggagcatctganaaaattccaaccttgcttaanaaacttt

SEQ ID NO: 207187 - DNA, 464 bp, Glycine max
agcacctgccgcatgaagctttgaatgaggaaatgacatcatgttgttaaatgagaaatatcaccatgaaataccgatatcaccttttgcttacctctatcttgattccggtgtgatattgatcactactcaaaatttatcctccgatccgcaggatgacaagatgcaaatgcatgcatgcttatgattaggtagtttaagtgcaacaattaaacaagtttttattgtgttcaattttacttaaacacttatggcaccccattgacggagccaaatgactccggactcaagatcgagagtgtgtactctaaagaaataaaagacacaacacaagaagttaaaatgtaaatcatcaatctgatgcttattaatgttgcaatcgtggtttacaaagggttggaagactttggagaacaatcatgtattgactcctctagctgccgcaagtactaagcataatatca

SEQ ID NO: 207188 - DNA, 436 bp, Glycine max
  unsure (1)..(436): unsure at all n locations
tatatagctgaaccattntatctttattcacaagttgaattntatttagaaaaggagagcttatctcttttatcttagtgagagtgattatcctaagttcttgagtgattcaagaacacctatgctatatcaaaggactttctcaacctttgtgtgttgccctctccggaaagagtgattttttccttcctttcatcttcaaccttgttctttcaaaccacaattccagaaaatccacttctgcccataattatctcgtggccataactcccgttttaagcgctcaaaataagtgattcttgagcctaaattgaatttcaaaacgagatctttcacctcgttttggaatcacctcatttggagtcctgcagcttgagttattttcatttctatatttctatccagccatcacttaacctacgtgttatcatctcat

SEQ ID NO: 207189 - DNA, 433 bp, Glycine max
  unsure (1)..(433): unsure at all n locations
agctntatagacactggttgttccttttcttctatatgcaaaagagttgtacctcaacataattgctttagaagtaatataataaccaagactagaactatgtcaggagatataataaccaatgatacagaacccagaaatttcactatacaattatctacaaattgtgacatctttgtcaaaaagatttttataaataaggtagacatagtagatttgcaacctgctaaagaacaaatgatcctaggactttattttattacacatgataatagatcaattactattataaaatattatttattaatctctaccaactcacaaatgtcaccaatgatagacgaactcacatcagagttacgaacaaagcgtggtgatacccctaccaaccctatatctaccctcacattccaatgtccttgtgacatacctg

SEQ ID NO: 207190 - DNA, 446 bp, Glycine max
  unsure (1)..(446): unsure at all n locations
agcttcaggatggatgaacctctatatctgtatgaatattctatcttcaatatctagattgctcacatccacaacaatttttgaaggaatgtgctcagatggacagagaaattttagactaggtctgatcttattcaaaattcctcctgcaatggcataaaagtttcaaccatattagcattagaacagaacattagaaccacaaaaaaattccccatgatattatattaaattgaatntgcaacaattggcaaccgcccccctccaaaaataatgatattcagagcattcatgaactatgaatgttgatgtcagaagttagacaacggcatattttatcaaagcatggaatgtaagtcaattgacccaacataacagcagtcttcccaaggcataacaagctaatgtcatcaaccattgaaagtcggaaggctgaacactgatct

SEQ ID NO: 207191 - DNA, 435 bp, Glycine max
agcttgtagaggaagcctgagaggaagattgagagaatgatttttattaaacacatattggaggaattgaatagcatgataaacgaattacctcgcaaaggtagttattacaactaattatatagttagttgtaaggagaactaactcataactaactatgctaactctagtacatagagactaaccaactaagctaactctaattatataatgattcattctaagaacaagcatccctaatttgtgttactttatctcatacctgatatacacatgcggaattctcaaatgctttcttgatttgcaacactcataccaaagtgaaaaaataagccacatagaagtatagacaaaaaagtattccatgagaagaaacatatcataccttcttttttctaagtcgtgtctacactcaatgcacatcttattataga

SEQ ID NO: 207192 - DNA, 442 bp, Glycine max
cagcttactacgatgataaattctcataccttgtggcaataagctcttgtaacccatttgtttatgcgtttcatgagaaatggctggagtgccccatttttctacctcttgatggcagtatgccccatttatcataaagttaccttcctgatgcaatcctaccccccaagggtattggatagaaggctccaagaggcttgggctagagctactaaagatggccctagggttctcatgaaccttaggatagacttttgagcccatgggttaaggttggatccactcttctttgtaaatattagaataggtttttccttcttttgggccttgtattttggccattctattagtatagggttttagccttgtatttcacggcattttgagtagtctttgtagtacggaattctcttttttgaatttcatggattttgtcaaggag

SEQ ID NO: 207193 - DNA, 457 bp, Glycine max
agcttcagatgcaagatcaaggaaaattataatcgtttataaacaacaaacacttgaaaatgataacctataaatactacatgctttgaagaaatgagtaacgaacctacacgctatcattcaaattctttatgtagaaaactctttgtatattcttataaagtttgaaaagctctcaaaacatcttgaatactctaagacaaaaaactaaatgcttagatttcacatttgtttgtaagatgattaagatttaatcagttagcaaatcaaacaacatatcttttgatttgtatagaaccaacagtggcttggtaggacaaagaatattcggatgttaaagcttgatgataaactgtgttgtgagagctaacagtaacttttgcgatattagtgaaacttgattgctaaccaaaaactgatcttagtctgaatggtagacacaaaccaatattaatat

SEQ ID NO: 207194 - DNA, 408 bp, Glycine max
aactcaagcttcttgtgatgcgttgggtgacaatgatggtgctgacagttatgatatataactctgccagcaacaccgaggttctagccaccaattgggccctcaatctgtaaaaattacatttaaaatttaactaaaagatgtcacttagggtcaaatgcattcaagcttaactcttgacaaaaaaataacatatttgaattgttttaatatatataccaggttactaatgtatatatacttggttttttttttttaatatgaatacgttagcaagttatacctatatattgtctctaaatacaccaataatatacctagatagtttaattaatatataattagaggtatattattaataatattatgattattattattattattactaccaattactccaacatt

SEQ ID NO: 207195 - DNA, 422 bp, Glycine max
  unsure (1)..(422): unsure at all n locations
agctagtagagtaaggtgtactcgttatatgtggactangcggcgatagggtgaaggtgcaatataactctccacatccacaaatcacacataaatgcaccatccctagttgcccaccttcaactgagctcacgcactcccaagaagaccttatactcgttcctctcaacaccgggtccccatcaatccctccaagcttcccaaacatccactaaattcaacatccaaacatcatgagctatcaaaaaccaagagaacacggcagacgcataaaactctgcccacaacacaaaccaataccacaactttgcttactcaaacaccccagtaacattctcttcgttcaattcggttaccaggggatcgactcgaaaatttactggaggtccctagacataaatgacattttgaccgttgggatc

SEQ ID NO: 207196 - DNA, 451 bp, Glycine max
  unsure (1)..(451): unsure at all n locations
agcttgtttctcagagacgtatcttcatctatgaagctntctcttcccctagaaggtgcattttcattattaactcagctttcttgtctagaggtttgaaatagtcttcaacggctgcctcctgcatgaaatgtgcatctaatcatgcaacataattgagtgccacaaatgaaacaatcatagtgtatacattaaggaaatgaaattaaatatcgtataagaacttccatataatagacaaatattttaatacaaatgtttctatccaaatagaaaaatgacaatattaatcatccaatttcgacatcaacaagagtagggaaaaaggcacatttcacacagaagttctcaatgcaagttgcgataacttctcaagtgaaataagaacagattcatccaaaagagatacctgtattcgaatcctaaattctcaactttatatctttccctg

SEQ ID NO: 207197 - DNA, 447 bp, Glycine max
  unsure (1)..(447): unsure at all n locations
agctttaaaagtggcgtcacttataatttttctttttgttttgncgagaaaactaatggaaaaacgagagtgtgtaatgatttttgtttttggtcttgtatgaacatccttcaataaaatgaacatttctctctatatgattaactttgaattttgagtcatacctcatccaaatctagacatacatgactttttatactggtaaagtttataaattttttttatacgataagtataagttatgcaatagttttataaattctctatagaagaaaaaaatgtaaacttgagttttaatataaatgtttaatcagataaatatatttatgtataaatttggtttgagttggattagattgaatttcanaatgaaatccaaaatctgattttatccaaaacagatgggtttattactatttaatcggttcaactcttgggttatatgat

SEQ ID NO: 207198 - DNA, 384 bp, Glycine max
atgttcgattctggcgcataatatatctagacgctctaaattgaacaacggaagcattagagaaatttaaatggtcataacttctaactcggagggctgattcaggcgcataatctatcgagacgcccgaaatttaacaatggttgctcttgagcaattcaaaaggccataacttttaactcggatgtccatttcacgcacacaatatattgagacgcgtgaaattgtacaactgaagctcttgagaaatataaatggtcataacttttaactatgatgttcgattcacgcgcataatatattgagactctctaaaattaacaaccgaatggtataagaaattcagatggtcatacctttaactcggatgtgcctttctccccc

SEQ ID NO: 207199 - DNA, 346 bp, Glycine max
  unsure (1)..(346): unsure at all n locations
gaaaatgtaattatgaaattgagatgcccgaagaaacatcatttcctatttaaccatgcattaggtatcatgttcactcattttgtttttaagtgaaacgggtttatgatcccaacatggttggctcatggtaccgaatatatgcaactatgaatgcatcgngaattttcatgcttccctcttttgtttttgttttgcagaggagaacgcaaggatcacgcatgagcaaacatgaaaacaattggtatgcaatatgtagataaaaaaagtttgttgaacgcatatgcatgatgatgcaatgactcatgcaaaatgtgatgctggaatatgataacggacaaatgta

SEQ ID NO: 207200 - DNA, 449 bp, Glycine max
agcttctttggaccttgaacaagttttcttctcctctttcagaaccatgctatgcgctcgcgactggtccctttcttcccttcgcaacttgagttcattattgctaccccatagagctccgcgaaatttgttccggccatactcttccttgcgagccctcttggtctcttgttcaagggctctcgcggtaattgcattctcttcccgtaacccggcacactccttccgaacgtgtgtagcagccaacttgaacttctccttggcgagatttgcctttcctaactcgctgttgagagcttggacttcttcgtcctcttccggtgcttcaacattctcttcgctgacgactgttaacttggcgagccaatctaaacctcgtatgcgaactttcatccattcgtggtacccaccaatgatgccattacgaatgcgcctaatctcttgatctt

SEQ ID NO: 207201 - DNA, 396 bp, Glycine max
  unsure (1)..(396): unsure at all n locations
agcnggactcgtcatatttaaaatcctattattatgagcaaccacgggtgtcttactatgaatagtgatcaaataacaagcatatattcaaaaggtactaggttgcctcctaataacgcttctttaacgtctttatctggacgcatgatggcttgtaggtcacggacctaatactttgcttacctttggatttggacttggtcgcctgctggtcggccatgtgtcgtaagcaatactcacacctttttgtggatgagcagaggtgaactctaaaggtggtggcggtgcgtctatttgccgctaccgaccatccccaggctgctgtggtgtttcaccctgcgcctgcctggagacgcagtacttcttgatgaaagctcgatactaggcggcctgatg

SEQ ID NO: 207202 - DNA, 416 bp, Glycine max
agctagtatagctccccaatttacggttgttttggagtaaattttgtaaataaatctttttttatgcttaacattgactctagaacatttccattgaatttaatgatgaaatctgtgcattttcaggtgaaaaagaggctaagttttgaattgcaaaaagtagcagttgggctaagtgcataaccaccgctaagcccagcatcagagcgcttagtgcaaaggagaatctggcagagcatcagcatcaatgcgctaagcgcgagatcagtgcgctaagcgcaaaaggtgccttcagccaggctaagcgcaagactggcgctaacccaatttcacttactcgcgctaagcccgcgggtggcgctaagcgcaacgttgcgaattcagaccctatttaaagcttttccactgcatagtta

SEQ ID NO: 207203 - DNA, 382 bp, Glycine max
  unsure (1)..(382): unsure at all n locations
ggtaattgatcanactcttccaatntatggntattttgtagtgttataagtattttctgttaagtatagataataaatacttagtacttccattntgtgtgtttaataatcattttctctcaatttcaggttaattaggcaagctttgaaaagtgttgtttttcaccttctcgctaagccaatctgctggcttagcgagcatccgctaagcgcaacactcatggnggctaagcgcaaggaagactcttctaattaagaaggggggttgaattaattattcctaaacctttactaattaaaaatttactcttctatggcttttactatngttgtaagtaaatgaagaatagaacataaacttaaccaaaagtaaaagcggaat

SEQ ID NO: 207204 - DNA, 416 bp, Glycine max
  unsure (1)..(416): unsure at all n locations
agctnttattcataaaaatcacttgaatctattcaaaagttgaatgccttaatggtctcttttacttttatcagttaaaatgaacctttcagaaagtttataatcaaccctacacgtaactttctcgcttttaaagaactacgtaggtcttagctcctcatcgcacttgaggatacgtaggagcaaaagccacgctcttattgatcccaaaaggtaaaaatcataaaaagaggaaaaataaataaatattgaagtcatgattttgcatacttgattaaaggctatcgtcccttgtgatgaacgcgtagggtgctaataccttccccgcacgtaaacatttcccgaacccttattctgaagatttgtagaccccttttttggaaaacacacccttgagtctcgctcgccctcccact

SEQ ID NO: 207205 - DNA, 275 bp, Glycine max
  unsure (1)..(275): unsure at all n locations
gctccttcttccatggcttattccctagtggatggcgcctcctctcacctattctcctttgtcttccactgcatctccatggtggaaaatcaccattgaagctcaaagatccagcctccatagaagccccacaagcaagcttccatcangttattaaagctatcctgaggactttcgaactcgcaccaggtctcanaattaactttgcaaaaagcagttttggagcaataagagtgcctgatcagtggaagcaacttgcagccaattacttgaat

SEQ ID NO: 207206 - DNA, 417 bp, Glycine max
taagctcggcccacaaggtgttccaacatttgatccatgaaatgaaaacgaaaatgatctttacttgtggcttgatttaacttacaataatcaatgcacattctccacctcatcaaaattcttgtggggatcaactcattcttcacattcttgatgactgtcataccccctttctttagtaccacttgtaagggactaacctatgcactattagagataaggtatatcatataggcttcaagaagatctagcatctttttcctcaccacgtccttcataacatgactaagtctcttttcaagatgagctattggtttgaagatttccttatgcataatcttatgcataaaaaatgatggacaaataccttttatattagaaatagtcaagccaatggattccttattctctttcaag

SEQ ID NO: 207207 - DNA, 412 bp, Glycine max
  unsure (1)..(412): unsure at all n locations
tcttttctctctttttctctcaattgttcttcattcttctccctcttttcacttatgttcttcctttnttcttgcacaaattntgtggctcttctactggtgatgatcatggaaggctaaacacaatcaatccaatgatccactccaagcaaggctgaatttaagttctagtttagtatttcaattttgtgtgaatgtttatctttttcttcaatcctatntccaattttcatgattatgaataggcttangattgaaaactaattangttatggattcatttcctaatttcaaaatttaatcacaagttngttggatgacattccaactaatttgtgatctcaaagaatttangganttaattcgatgaactaactctaatgacattgattgaactttcataacataatca

SEQ ID NO: 207208 - DNA, 420 bp, Glycine max
  unsure (1)..(420): unsure at all n locations
agcttcatcacttcctctgcccttagcaaataaaatttatagaataatcaagggaagaaattaagtgactactattaatctacaagatatcttcattcaagtggtattgtggtaaggaattttagtgctttttttaattataaatgaaaaaaataagtattgaaccattaaatataaatctaccaattcagttcaaatgacttgacggtgaagtataattttcagatacggagggtaaaacagagaaatggcttacatcaatcttgacagcttaattgctattattgattgattactaaaatcaacttgattacatttgtttgaaatatcatatgataattgttttttaaaccaccctttgccncatttcttgtcttactcgaaccaaccctactgacataccagaacaatactcttctg

SEQ ID NO: 207209 - DNA, 342 bp, Glycine max
  unsure (1)..(342): unsure at all n locations
tattattaaagatgtttgatatttgatattaatgaaccactggataagtggcacagtcagttatttatcatttctgtttatagtgcgttgtcaagttgttcatattgtgcatgttacttattctgcctaacacttctactactgcatattcatagtttctagcttattttcttgaaggatttcaatgaagttgtggtcttgcaactttaattcacagcttgcaaatgctctatcaattgaaggggactaccagggttcaatctctgccttanagtgtggatatgtctgtgctactgaagtatgcttcccggagttgcaggtatgttgtcataggttacaaat

SEQ ID NO: 207210 - DNA, 409 bp, Glycine max
agcttgacattaatgcaactacctctcaactttgctaataacttggctttacaatgtaatctaattagtcacctttagcggggcctttcctcccaccacttatacatagtactcaaattcagaaccttatgtaaggtgatcaaatctaatttcactaaaaccaatgagcagttataattttaaaattattaattatataaaatattaaaatttagtccaaatcctaaacggaaacatttgctacacatgcaaaacaaaaacacatttttgttttgtatgcatgtcaaatgcaaaatggaatggtacatgaaacaaaaaacaagatgaggcttacctccaatgatgggtctccaacgagtcactatatgtggtcgtgcttggcgttcatggtagcaaatgagaggaagag

SEQ ID NO: 207211 - DNA, 406 bp, Glycine max
  unsure (1)..(406): unsure at all n locations
tgttgagccactagaaanatgtgaagcaagattaagagataatgactgattaaaccataatgcagaatacggctgcagtagaatctgcaataaaagaattgtgatgaacacttctggtgttgtacctcttgcttcagactatgttgaacatcatttgtaggggtttgttttttcctaggtttaccgcattccgtgaggtaccctgtttcctggaaccagatcaaaaccatacataggtgagaaaatctttcttctaaataattgtctagaagtaacttattttgcctgtggactacagagaaagatacaattatattaaattagaccattattattacaatattaattatgtcaaacatatatgctttccataaaatcaattctctgttcatccatcccattacat

SEQ ID NO: 207212 - DNA, 408 bp, Glycine max
  unsure (1)..(408): unsure at all n locations
agcttaagctccttcaactgcacaaggctcttaatatttgaagagtatccttgtggaaccttcacccgacgaagacactgacaaaaacttatattatccttctttgacaaagtatggcaggatagggacaagtaaattttcttcccatcagaccttggatgcaactgtgatcgtatacccatatcagctagatcttgacgggtattcaagccatccttcgtcttgccttgaatgttaaggagcgtcccaatcacactgtcacaaacatttttctccacatgcataacatcaatacaatgtctaacgtcaagatcacaccagtacggaagatcaaagaanatggacctcttcttccatatgcaactctgactnttatccttcttgtgggtcttcccaaatacagtattc

SEQ ID NO: 207213 - DNA, 363 bp, Glycine max
  unsure (1)..(363): unsure at all n locations
ctaagcttaagaattatggcctcatcaaactacttgtttcccgagggaaattctataaatagacctcccatctttaatggagtgggttaccactactggaaaacccgcatgcaaatctttatagaggcaatagatttaaatatctgggaagccatagaacaaggaccttatgttccctctatagtggccggaagtgcaacaatagaaaaacctagagcagattggactgatgaagaaagaagattatttcaatataatttaaaggccaaaaatattattacatctgccctaggaatagatgaatactttaaggtttcaaatngtaaagtgctaggatatgtgggatcactacagtaacacatg

SEQ ID NO: 207214 - DNA, 409 bp, Glycine max
  unsure (1)..(409): unsure at all n locations
agcttgagaggattgatggngacccggtgttgagagaaacgaggatatgggctatgtgggagtacgtgagctcagttggaggtgggcaacaggggatggtgggtttatgcgcgatttgtggatgtggaaaaacttgttgtgcaccatcgcccgaccgccacctagtaccacatgtgatggataccccataatcctacaagcttgagatgaggaagtgttgaagggtgaaacttcctgcttttattcgttgaccacagagtggtacctggagatatgtcgcgggggtcaggagaccttgtggacgtcaggtggggtgctattgcccaaaaccaagcttgaccaatcccgacccaacccgggcatagttagtcagtgagaacctgtgatgtacctaagcacgcgagctcct

SEQ ID NO: 207215 - DNA, 402 bp, Glycine max
  unsure (1)..(402): unsure at all n locations
tccatcagtgcataacgtgacttcaaaagtatttgctnttccctttntatattnttatanttttttgggttcgacaagggttgatgcaatcctaccccgcaagggcattggatagaagactccaagacaattgagccagagatgcaagagaaggccctagagttctcatgagccttanggtagatttcgggctcatgggctaagtatgagcccacttatcttagtacatattagattaaggtttcattatttttgggccttgtatttagggctcaataatgtaggtaaggtaccctagaaatgtatgatttttcagcccttgtattttagggcacctagactagttnttgtattangggtagttttgtaatttcacatgcattaagtgaatatttgatgtgt

SEQ ID NO: 207216 - DNA, 362 bp, Glycine max
agcttgatagttgaataccagtctacattaatactttgagctatttcattcctttaaaaaaactgtcgggtatttttaaagatgaagcatcgctgtcaatttgaaaaaatttaagttgaggacaatttatttcttctggaagctcatcaatgatatcactgttgcatatagaaatagaagtgcacctctcgagttcaggccaatcatcaagtgtcccatctctcagagaaaatacattatgctccttctgtgctatagacaaagcagcatctcgaaccagatcatgcatattgaaatgaatactagaacttccatccaacaccaaacctgagtttttcagctgttggactgatgtagatatt

SEQ ID NO: 207217 - DNA, 363 bp, Glycine max
ggaccttcaaactcagcgttcaatgcagcagcttctaacgagggatgtattcatattggagaatacagagaggcaggtataatgacgaacagaaatggataatagagtactctggtgaagaacaggagctttcctccttcttagcttgtctcacaacaaagggtagaaccttaatatccttatcggctacttgcgccccgtcttttaatttatgcattgctgaaatgaatgctcgtgcataaatatatctgcatgatgaaaatgtctgttcctagcttgttgtttttattataatttgatacccagatatatacaagatcaatttgcacccaaatatataagattttaatttatctcatgttt

SEQ ID NO: 207218 - DNA, 404 bp, Glycine max
  unsure (1)..(404): unsure at all n locations
agcttgaagctcattgaaagcttgaagaaaatttttgaagaagttttggcttttacatgcgcaacttccttgagtggcatttgtattggttgtttcatcttaatacaattgatatttgggttgcattgtgcatcatcatagtgtgtataaagaaaagtttctaagttagaaaaatttcttctaaggaaaaaactctctgttntaatcgactacagcttcattgtaatcgattacaataagctgtctgaagctcttagagttgagtcttgtatgagttcaatcaattaccgatatctcatattcgattacactgtngtttgagacaacgactgatttatttacgagtctgctctaatggattaccaagcgtattaatcaattacttctctctcgttctagtgttc

SEQ ID NO: 207219 - DNA, 400 bp, Glycine max
  unsure (1)..(400): unsure at all n locations
tcaggaaaatgggagtactagcctaggctttggctcttagaaaaacaacacttattgtaggtgaaatgcttggaccaatggaaatgcaaggcttaatccttatcttcttaatctaagcactttgaatgaccattaatatgactaatcggcagcttggacagccattgatgtgctctccacaagctcagccatgccttatatgacttcttgcaatttttcaaaactaactataaaaggataaagtagagttttaccaaanatggtaaaaaatgcttttgctaaaattggtaaatcttatcctaatattctagaatagtgtgttaacctcccttgagacatgtatactcagagtgaaccttgcacagagtccactcacactcatacagagacaaaatatact

SEQ ID NO: 207220 - DNA, 364 bp, Glycine max
agctagtgcgctcttggcactgtcatttagttgagaaattctgaaggagacctattccggagatggatttattgatgatgacatacctgttagtaacagcatacttatagctagctgtatagaacaaaagggatgataaaggcttaaactatacataagaatgtataattatattttatatataacttactgaaataatttattttatatgcagatagaacgtaattacggtacaacttataatattattaaagagataaaatatatagtccaaaaggttctgatatacttagacatcttaataatatcaataccttaatgagatccttcatttctctctattatctgttcttaacacatcata

SEQ ID NO: 207221 - DNA, 464 bp, Glycine max
  unsure (1)..(464): unsure at all n locations
tctttctctgctatcattgatacgtgtaagtcccacaagtttgatttacatttgcaagctgtctgtcttgtgcttgaaagataaagatcttggtgacagagcattcacgaataacgaaatctgggatacaaccagaaatttgttacttttttaatttattattgtttaaataaggctaaaatatatttttttattcttaataaatattcacaatttatgttgatttctgagcatgtcaccactgaataaatggaggagaaacatcatctccatttgttgttctattcatttcttccatttctatggntntgaaaaaataaatggtactcttcaattaatgagttacatgtcgtccattacatttatctatccaaaactntagtaatgagaagagtgaagagaanaataattggagaggataagtagctttctgtccagactgaattatgtgttttttaattaat

SEQ ID NO: 207222 - DNA, 416 bp, Glycine max
  unsure (1)..(416): unsure at all n locations
agctagtagtgaggcttggctacaaaaataattggtttttctaggattgaaaggcttggattctaagagagcacaaatcccaaacttatccaagtagtcttttcaatacaattagcttattcactagcctttcattttaacttgtatttgaccttattacaacaacacacactttctttgattgctttttttttttcctcttcttttttattttttttatttttttttaacacaacttatttgttgtgtgtgctgatgtgctttgccttccactttacatcgcggttaactcccccaaatttagggaaaatttccttgaaccatcttgatgcaatcctaccctcaaggacattggatagaagactccaagaagattgngccaaagatgcaagagaaggccctatggttctcatgag

SEQ ID NO: 207223 - DNA, 307 bp, Glycine max
  unsure (1)..(307): unsure at all n locations
tctttggacctcgaacaagcaattaactcctctttcagaaccatgctatgtgctcgcgactggtctctttcttcccttcgcaacttgagttcactattgctaccccatagagctccgcgaaatttgtttcggccatactcttccttgcgagccctcttggtctcttgttcaagggctcttgcggtaattgcattctcttcccgtaacccggcacactccttccgaacgtgtgtagcggccaacttgaacttctccttggcaagttttgcctttcctaactcgcttttgagagctnggacttcttcgt

SEQ ID NO: 207224 - DNA, 420 bp, Glycine max
agcttgtttaaatgcagattccaaagccttttagtttcattttaactttgttttccactattctctttattttgtgactggctcaatcacttagggcaattgtagaagagttttttatattttaaaggtatgatttttgttacactacctttttcatacgtgtgacgatttatttgatagcactgaagttgcaaatcttgtttcactggtcaacgtggtaaaggtttcatttgttgttgttaaggtattataattattaataataatgtcttggttgtttgctttgttttttcaaaattcaaatttagtatttgttagctcacaacaaaactaatgatgccatgtcccacaaagggaaatgtagaagcatgtttttttaaacttaatctcgtgttgggaatgaagatggatgatggggac

SEQ ID NO: 207225 - DNA, 468 bp, Glycine max
  unsure (1)..(468): unsure at all n locations
tctagccaaatggacttaccttgaattaattcctttgatatgccctttgagccttgtttccctttccttgttttgaatctctctacaagccttaaatgaaaaaccatgatatcaccatatccttaaggaattttggagctttggaattgttttgggaataagtgtggggggtttttgtttcattggataacttgttttgttggctatgcttcatgatgtattttgggccatacttgatgtacattgtatattggttaaatgttggacatgctgaatgaaatgttgtttctcanaggctatagagtaaaaaaaaaaaatattcgaaaaaagaaaaagaaaagcaataaagttgagtgaataagatcttaaatggcacaagaatgatgaaactcttggttctactctttgatgttaaatntatctttacttctttttatttcttaatttttctaatatgcacttattccc

SEQ ID NO: 207226 - DNA, 417 bp, Glycine max
  unsure (1)..(417): unsure at all n locations
agcttgtagctgaagttcttgagaggtgttgaaattggttatgcaataacaaaaaacacattcccctgctttcatttactggaagttcaaaggtaattcctctctctcttatttttgattaaacattgtaatctttatttttatgtgtttacaacgtacattacatttttatgatagtatntttatgttatgacctctactagttagctaacaagtgtaatttattataattttttgtaattcatttttttgttggttccattggtttttattctaaatacctattcttattttataacatatatggtagtagctgtaacataaaaaatggtattgaatcttaggttatgcttctttccccaccaattattctttttagttagaataattactataggttttcttcttatatatatt

SEQ ID NO: 207227 - DNA, 377 bp, Glycine max
gattcactaatcattaaccagttttgaaaaaatgtgtatacacctaaagggtgaatgctgtgaaaattttcccgaacgcccaaaatagactcggatgaatgcatgaattgataaaagaatatgctttggaaacactgggttgacttaaatagggaaaatgaatcttgagccctagtgtcacatgaccataaaaacttgatgcttgagtgtccacatgggtgcatgcatgatcagttttgcataaaatttcctaattatcattattgcatgtgtgtcatggaaataatgtgggacatcccctttatccctgaaccgctggtcaaaccaacgctctgacatatatcatgtccatccgttctacaagccttgagccaaag

SEQ ID NO: 207228 - DNA, 417 bp, Glycine max
agcttggtgcatatgatttatatgctccagcttgaggggtagtgttgaatgttgaatatttcttttgtattctagctttgtttcggagcttaatctgtaagccttattcagaaggcagcagcgagatgtcactgtcatctctcctctctctttcttttgtatcctatatatatgtaacattttgaatctaataaagctgtgagagaaagtgagggtttgactcctcctcaccttcatttcaagtaataggaattcacttatacctgcttggcttaaaaaaaaatgtcttctgttttaatttcttattttcacaaataattacaaaatgttactatggttactatttgtttcctgttatcacatatctggataggaaatagtacaaacatgaatttgttgcttcactattttataaaa

SEQ ID NO: 207229 - DNA, 422 bp, Glycine max
  unsure (1)..(422): unsure at all n locations
cacttctgtagggtttcagggctttccatcagctctgtttaatctgccatatactcagccggtattaggcctcatgagctttctcatattcagcagcttattggatttagcttgngtgacttccctttcagatacttgggtgttccccttttatcatctagattaaatgtatgtcattatgctcccttactttccaagattactggcctgattcagggatggagcaaaaagtatttatcttatgcaggtaagttagagttgatcagagcgcgtattcaacgaattgtgacattttggatggggatttttcctttgccgcaatctgttctggaccggatcaacgctntgtgccgtaattntctgtggngcaaagcggatattggaaaaacaagcccttggttgcttggtcagtagtttgttct

SEQ ID NO: 207230 - DNA, 355 bp, Glycine max
  unsure (1)..(355): unsure at all n locations
agctntaattaaacacactgatgcagaaacaaattccaatggcatgattcatgttgtcacatgcacaaatatagatatcataaaacccacaatcaatgatccaattgcaactaaccctaactaagtatcattgtcaagtgaaaattttgtcatctgtgaaatggtattcattctctcactaacttgggatgcttttttaatttttcatttgccaaagccccacaaaagaggggagaaaaattgtcaattgaaatcgtgtgtattgggatgctggaatcgaaaattaaaaattaaaaaagaagaagaaaaaacccctacaaattgggaattgaagggaaaaggagaaaccttgata

SEQ ID NO: 207231 - DNA, 346 bp, Glycine max
  unsure (1)..(346): unsure at all n locations
agaaaatagacgaagaaacatgccgganacacattggcagcagatggaaaatgactgagaaacattcaaagacaattggaatatgttgaaccattaagaagaagccacaacacaatgcttaaccacttaacagaagcaaacacacttaaccacctaaaaggtagaagcaaaccanagcttaaccatcaagagcagaagctaaacatggtgtttaaccactcaagacagaaggaaaacacaatttttgaatgcttaaccactataaaggcagaagcaacacaacaatgtttaaccatccatggtagaagctngacatcaatgcttaaccaccatggacagaaactta

SEQ ID NO: 207232 - DNA, 218 bp, Glycine max
  unsure (1)..(218): unsure at all n locations
gacacgaaactcacacatgttggcaaaagagacctaactttcttaaggcataagccttgagatgttatctatcgtacgcttcatttttcgattggacatacctatgaacctactgaaaggtttatctatataaagccttataaatgagaagcccttanaaatgactattgtgtgcgtgctccatttgtcgcacgcgtcacatttgttggcttttgggt

SEQ ID NO: 207233 - DNA, 172 bp, Glycine max
tactcatttgcaagctacggcttatatggaccagacagggctatcaactctagttacaatgcggtattctaccacaaataaatgctgagtgaatgcctcttgtgataggtgtcactatgagacatcttgcttccacctgcctatcatagagatgatcatcactctggattat

SEQ ID NO: 207234 - DNA, 381 bp, Glycine max
agctttacagcagattatagcaatgacccactatcctagaattaaaataacttaatgccattaacctagagaattaaaaaaaacttaatggctgagtgtaacagaaattgtggtaaccaaaagtcacccccaacagccaacaagttagccaccatttggtctcccaaaaggctgatgcctaagttgccaattgggcccttattacaacttgaactaaacctaactaaagcccttttagttgattaacccacaacatatttttggtcagccaactttacaaggattgggccattatttagacaaactaaacactctaaaattgagacaaagtggtgtcatttactcctcctccatttgggccatgatacaactcacaacctt

SEQ ID NO: 207235 - DNA, 387 bp, Glycine max
  unsure (1)..(387): unsure at all n locations
tacttctactgaagctgagtttctaccctcctcctgttctgacatataatctctagtgcagctgaaggatgttctagggttctcgatcattccgattcagtccttgattcttattgatctttgtcttcggggtatctctcattaaataaatatcaatgaacaatatgacggattatctgcgtttcctttttctggtctccgagacaagataatgattttcattggtctcattattcagtatttggatttgtacatctttattggttattatctattcattcattatattggtgaacttaaagtttttctacataacaatatttgatgcacaaatanaataaaatgattagaacttaaggtattaattaataattattatctcattta

SEQ ID NO: 207236 - DNA, 579 bp, Glycine max
  unsure (1)..(579): unsure at all n locations
cccctggcgaacactctgaacactaaccgaccgcgaccgctactgccacncccagccnnnncnngnnnaatgagcccttgacccctcgattcccggaccaccaaacnaagctggcaagataggagaccacagcattttcacgccttttaccgagggccacacagagacacacgacctntgtgagacactcctaccacacagacaataaagaccatagcgaaacaccataagagagacgtagtgccagaacataggaatcacattcagcaggaacaaatgattgggacaataccaacattaaaaaccatggtgacatagcaaaaaccacgcgcagcanaaatgcataaacccaaacaggggaagaacaagacaattgcagacattagcaaaaccttgtgggctatgaaaccagggcatacaggagcaatcccgcaaaaaacgtgacgaaatagaaactgctataaagaggaaatagcaccacgccccgaagcccacaaacagaaagggaccagaccaaaactggccaaccgcgaacaaacgaatcacccacgtctaagggttacccacatgaacggcaan

SEQ ID NO: 207237 - DNA, 396 bp, Glycine max
  unsure (1)..(396): unsure at all n locations
agcttacatggngggagcttacgtgatagattccaatgccatttttggacaaactgtattgatatcattgtgtgccctgatgttgccttatggaatatgacaaggcctgcttaatcagaacactgtatctaaaggacaaataatctaccgtagtagacagtaaatgagatttttttttcttttatagtgtcttacacacaaaatatgaccatttaaattgtcatatgcataataagcccttgagaactcccctgaaatactccccttcatacattttgaatccttgccttactactttactacatataaccgggttacaagtcttaaatgtataaattgatcaagtcaaaagcacgacgttgataacctaaccatcttcaaccattctggagccac

SEQ ID NO: 207238 - DNA, 353 bp, Glycine max
gactcctctagaagatgcattgctcactaagtatattcaaactcatggagaaggccagtggagatcactaccaataagagccggtaataataatatactatattagcttgctgcccattcatttcttaccctagccagctacctctctatatatgatacctcctcttgatcaccttttcatgtttaatccggcttcctaatcttctgatctcatattggggtcgtgattagatctatttttggcgacactagtcctcatttgtgtgcccttcgttataatcatagctatatattattcatagagtaacatgtcatatctcttctttctctctctttcgtcttatattttttgt

SEQ ID NO: 207239 - DNA, 404 bp, Glycine max
  unsure (1)..(404): unsure at all n locations
agctttgaattcattctatgcaccccttagggttccattcttgctttgtatgtcttcatcttcattcttctaccattggtattctttttctttgttttaagcgagtttcgaccgatcgtttaagtcgtaatctcacttaatcaatgttcaaatgaatttcaaccgatcgtttatgttgtaatctcgtttaatcacctttaaaataaaattcaaccgatcgtttatgctgtaaccacagttaatcatcaaaaaggtaagtttcaaccgatcatttactttgaaagttcgcttttaatgatttgagaaaccaaagcaaaaaatcaactcacaaatgcaagtttgtccacaagaaaatcattngaatcccgtcaaatgtccaacgccttaacggtctcttttttttt

SEQ ID NO: 207240 - DNA, 370 bp, Glycine max
  unsure (1)..(370): unsure at all n locations
gaagcttctcaaggaagctacctatgctataaatagaagcatgtgtaacacttggtgtaactntgatgaatgagagtcttgtgagacacatttcanagttcaacttctctctctcttttcctccttcaattttatgctcccctcccctctctctctctttcttttcctccattgaagcttcctctctaagctttntatccaaggcactctcttagtggtgaagcttcttcttccatggcttatttcctagtggatggcgcctcctctcaccttttctcctttatcttccgctgcatctccatggtgggaaaatagcatngaaggacctcattgaagctcanagatccaacctccatagaagcttcacaag

SEQ ID NO: 207241 - DNA, 230 bp, Glycine max
agctttaaacctatgattcattgttaggtgcacttcttgcatatatgtgaccgcgctttgccctttttctttctttgggggaataatcctagaaaaatattttatgaaactataggacagtcctcttggcatatggatatgcccgcattttcttcgaacggttgactgaacagtattgaagaatctagattcgcccactagactgtccccagatatattaatcgccccat

SEQ ID NO: 207242 - DNA, 121 bp, Glycine max
  unsure (1)..(121): unsure at all n locations
taggcacgtaaacttcanatgatcaaatctcttgtgccatatccatgaatcactaaccacttgcacatattaacattgattatcagcagtattaatttgaatatgagaggtcctattttgt

SEQ ID NO: 207243 - DNA, 405 bp, Glycine max
  unsure (1)..(405): unsure at all n locations
agcttatatgacatatgtcagacaattntaatgatcagtaatcagttagctcttttcataaacttagtgctttaaaacatcagaaatttgaggcttcaagaagcataaagaaatatcatatgaattaagacaatattaactaactagaaggattatggaatcaaattctacaatccttagactgatctgctatgaagttttcttaaacaacctcctgactggtccattaaaagcataaccatacatgtcaaacagattcatttaatagatctggcgtcctgtgctacacatctctatgtttaatattgaaataatagccagggctataaattataactacactcttagatatccttggtggttctcattngaaacacacatactgacatctattgagagggaaaa

SEQ ID NO: 207244 - DNA, 294 bp, Glycine max
  unsure (1)..(294): unsure at all n locations
tatagctgaggttggccaagcaggaacatagttcanaccttcaaaacttaccatgacatctttgtgcanaactgttgatttgttaactaataataatcatttaggtctcaccaagtaagatgcccatatctcattagctggaggaggaggctgaacccaatgccctggtatgcggctggatgaagttgcaaggaaacaaaatcaaataagataaaatgctttattttcattnttcacacttcataanagacattagaaaaaccaatacagttgcagataagccacataacagcg

SEQ ID NO: 207245 - DNA, 423 bp, Glycine max
  unsure (1)..(423): unsure at all n locations
agctntgatggtgtcgagaagaaatcacatgtttgtcatcatcaaaaagggggaaaatgtgaatgtatgtatacatgattttgatgatgtcaaaagaagaatcaaacaaggcttatttgcttcaagattaatacaagattgtttcaacaaacaaagccttgattcaagatttcttcaagatcaagccttgcctcaaaacgaaaggtttcaagtcatccaaggcacatgtaatcgattagcaatacatgtaattgattaccaaggcacatgtaatcgattaccaatggtttgaaagtgtgtaatcgattacaaatcatatgtaatcgattaccagagactctgaacgttgggaattcaaattttaaatgaagagtcacactgttcaagaaaaataacttttgtgtaatcgattacactaatgat

SEQ ID NO: 207246 - DNA, 378 bp, Glycine max
accctgatgaggatgtcccatatgttcttataactggactgattcatttgcttccaaagtttcatggccttgtaggtgaagacccgcacaaacatttgaaagaatttcacattgtctgctccaccatgaaacccccagatgtccaagaggatcacatatttctgaaggcttttcctcactcattatagggagtggcaaacgactggctgtattaccttgctccaaggtccatcacgagctgggatgaccttaagagagtattcttagaaaaatttttccctgcttccaggaccacagccatcaggaaagatatctcaggtattagacaactcagtggagagagcctgtatgagtactgggagagatttaagacactat

SEQ ID NO: 207247 - DNA, 422 bp, Glycine max
  unsure (1)..(422): unsure at all n locations
agcttaanagttggcggtaaaatttgccaattaagtaaaaaaagttaggggtaaaattcaccaaaaaaatttgggtgccaaaatttggcaaaaaaataaaaaaagttgtggcgtaaaaagtgcaattatgttaggggtaaaatgacagagggtaaaattcacaagttttttataagttgggggtaaaacgtgcaattaagcataaaaaaaaactagatttagaatttccgtattatatgataccaatccctgatccagcttacaagattcatctcacattgaataatagcaaggccaatataaattgttttatgtattgtggcatcatgaaattcagaacatgtgtgaattctatcaattatcttctcctattcatgtctaaatatttgttaacaacaattttaacatggatattgttcatg

SEQ ID NO: 207248 - DNA, 428 bp, Glycine max
  unsure (1)..(428): unsure at all n locations
gtcctgccttcttcattcctagttctcgtgaagtttaatgttagtgcagagaacctttggtgcctggtggattaaaccatttncaaagctgaaaggcatacaaaagttcaaacgaaacaaggtaaggaaaatacttcttttttttatgtatagataaaataattcgctataacaacaaaactctccctgagtatttaatgcgaatgtatacctaanaacttcaatatctnctagaacaattatgcgctaattatttcacgggttcaataataatgataataataataatttatcatgaaccatagtgtgacccaagccctgtaatcaattaattatactttngtggttttcaattaacttatctcaattatttacactangtgatgaaatgtttcaagccaagctagtcattacattttaactacatg

SEQ ID NO: 207249 - DNA, 418 bp, Glycine max
agctctagtttagcataggagagccagagcctcaatgataaacataaattataattatttattatttatatattagcatgaggcataatgactgttttagccttggtggccttgctatataaacctgagtggacgtgagtttgcgtaaccgattcccgaaacaacgcatccatagccaaccgtctctaacaaaaaacaaaactagcttcttctctttctcactctctctctctctctctgcacttgttcaatcaacaatgtcaatggcttctccttcttcaagaaaccaaacgtcgtcgccgcgttcgtactcctcggcgttcgcgtccacgtgcacgtccacgtcgtcgactagtttctctcccgtcagagtgcacgaacaccgttcgttgccgtcgaagagtgagaggaacaaaga

SEQ ID NO: 207250 - DNA, 427 bp, Glycine max
  unsure (1)..(427): unsure at all n locations
atgtgttaactctcaagctntntatgattatatctgtgtgaaatataaaaaattcataaaattactaatatttaaggtagtatatgcttatcatttaaggtaaaatatgttnttaatttttatacttttgatcaaatttaattttagtcctttgtaatatgttaaaaatttaaagggatgtcgcgaaaaggatatataaacgaaataatataaattttaacatttatagtcatattaaaattcacatttaatgtcatctaataaatattattaattttcaatactatttagcaagccttcttctcaccacatttaatttaatgtcatctaataaatattattaattttcaatactatttagcaagccttcttctcaccacatttaatgtcgatcaattaacnaattaaaataataaacaattaataa

SEQ ID NO: 207251 - DNA, 403 bp, Glycine max
  unsure (1)..(403): unsure at all n locations
agctttcaagaaattcanatggtcctaacttttaactcggaggtccgattgaggcggataatatatcgacacgctccaaattgaacaatggaagctcttgagcaattcaaatggtcataaatagtcactcggaggtccgattcaggcgcataatttatcgagacgctcgaaattgaacaacggatgctctcaagaaattcaaatggtcataacttttaagtcggaggtccgattcaggcacataatatatcgagacgcacganattgaacaacggaagctctcgataaattcaaatggtcataacttttaactcggaagtccgattcaggcgcataatatatcgagacgctcaaattgacatcggaagctctcagaaattaaatggcataacttgtactcgga

SEQ ID NO: 207252 - DNA, 330 bp, Glycine max
  unsure (1)..(330): unsure at all n locations
cttctcgatctattatgcgcctgaatcggacctncgagntattagttatgactattaagatatctcaagagcttccggtggttaattgcgtgcgtctcgatatattatgtgcctgaatcggacctctgagctaaaagntatgaccatttgaatttctcgagagcttcctgtgttcaatttcatgcgtctcgatatattatntgcctgaatcggacctccgagttaagagttatgaccatttgaatttcttgagagcttccgatgttcaatttcgagcgtctcgatatattatgtgcctgaatcggacctgcgagtgactatttatgacca

SEQ ID NO: 207253 - DNA, 324 bp, Glycine max
  unsure (1)..(324): unsure at all n locations
tggcttgaagagagaaagcgcggttagtcaatcttcctactgttatttgttgaccacagagtggtacctggagatatgtcgcggnggtcaggagaccttgaggacgtctggtggggtgctatatgcccataaccaagcttgaccaatcccgacccaacctgagcatattcagacagcgagaacctgtgacgtacctaaacacgcgagctcctgtgagccatccaatgaatgaacatacaccacaaagcaaggcggcttgtgtggtggctggccagctatggatcttgagtgatatctggaatatggcctctggttatcgattac

SEQ ID NO: 207254 - DNA, 254 bp, Glycine max
aagactgtataacgaatgatgaacgtcgaagaacagacgaaaaccttcgcgaaatcactcacggaaacgttacggaagcgcctcggcttggattgtcttcacggaactaaatctcctcagttattttgagaaagagagaagtgcctaaggtgctgaacccttttctacttcacttctccacctatttatagaaaattcggggagaagcttgccacccagctcgtccaggcgaactcagctcgcccaggcgagca

SEQ ID NO: 207255 - DNA, 417 bp, Glycine max
  unsure (1)..(417): unsure at all n locations
agcttgttgacacgcggagatntacgtcatcttccgcgcacacaagatctgtcatactgacatttgagtcacgctgacgggcggaaatacccgagtggttatccgtataaacattcttttgctgtctgtaagacaaaaagcctgatagcacgcagagactaacgtcgtcttctgcatccttcgtcaatcgcggccgacaagcccgttggcacgcggagatttacgtcatcttccgcgctcacaagatctgtcatactgacatttgagtcacgctgacggacggaaatacccgagtggttatccgtataaacattctttntgctatctgtaagatgaaaagcctgatagcatgcagagactgacatcgtcttctgcaccctatgtttccccggggacaacaagtcagttgcatgcaga

SEQ ID NO: 207256 - DNA, 360 bp, Glycine max
  unsure (1)..(360): unsure at all n locations
tgccacaatntccatgaaatgtaaggccatcgtatgagttgtataatgggaagggagcattcccaagtgaattcctttagaanagcaatcaacgatgactaanatagtagtatgtctgcagtacactagtaaaccaacgatgaagtccaaagaaaggtcctccacagccgggacggcactggcagggggcagagcaacctggcgggctttcgggcttcatatttagtgtgctggcaattgatacaagctgcaacaaacgtttgcacatcctttcttaaccctatccaagtgaaatttttgcacacccgtgcaagggtcttcataatacccatgtggccacttgtgggcattgaatgaaac

SEQ ID NO: 207257 - DNA, 397 bp, Glycine max
  unsure (1)..(397): unsure at all n locations
agcttgagatgaagaagngatgattggtgaaacttcctgcttttattgttgaccacagagtggtacctggagatatgtcgcggcggtcatgagaccttggggacgtcaagtggggtgctattgcccaaaaccaagcttgaccaatcccgacccaacccgggcatagtcggtcagtgagaacctgtgatgtacctatgcaggcgagcttctggcagtcaacagatatatggaaaacaagaccacaaagcaaggaggcttgtggtggctggccagctgagaattttgtgtaatatgtggattgtggcctctggtaatcgattactaagggtgggtaatcgattacaatgcttaaaattgaagacaggaggctaagatggtctctggtaatcgataccac

SEQ ID NO: 207258 - DNA, 268 bp, Glycine max
  unsure (1)..(268): unsure at all n locations
ctacatacgtgcacgtgagctaaatttaaaggtgggcaactggggatggtgtgcttatgcctggtttgtggaaatgggatagctgatttgtgccatcgctcgatcgccacctattgccacatatgaagggtgccccataatccaataagcttggtgtgagaaagcatggaagagtcagacttcctactttatttgttgaccacagagtggtacctagagatatgtcgcggtggttaggagaccttgtggacgtccngtggggtgctat

SEQ ID NO: 207259 - DNA, 405 bp, Glycine max
agctttaacgaatgtaagacacatcttcttctacctttgtgattcttgactccatttcattgaagcgcatatccacttgttattccaaatagtcaaacctctcaccaacaaaggtttgaagaccatcaaacctgtctaaaatctttgaaaggagagatgaatcctctccatcatgtccttcttcaccaacatgacaagtacctttcttcacccaagagccatcatgctccttttgatcagaaaaagatgctatgactgaagtgcctatatgaaaagatctcttgatggatacataaggttcagaatccagagggatgtagaagtgttgatggaatacggtatcagtatgagggtaaagcaatggagcattcaatcgctatgccttatgcatgcgatatctaacaa

SEQ ID NO: 207260 - DNA, 274 bp, Glycine max
caaagaaatgaaaagccctcaattgtggtggctattatctctatagtgattcactcaatttggagtgcttcttagtccaatagcgtcttaatgtggttggcctcttgcttcttgactcgacttcttcaagggatggcaccaatccttctttctaattgcttatatggcaactcacaaaccaggaagcatagagacaagtaataacccaagacccaaaagatgaaatgaaagctaaaccaatagatctttaacaagagatattatcaaggattat

SEQ ID NO: 207261 - DNA, 230 bp, Glycine max
cctccataacattgggcaatgattggaaaattttcgctccaagaagagaaaagagcttttattccatgtgtcaaatcactccttataaaccaatgctttatccaacctactcatagctctctcattagaaccgagcgaatttcctacccataattggaacttcctctatctccacatccaacgcataaatactgaattctctatattggcttgctccaatatacaaatca

SEQ ID NO: 207262 - DNA, 382 bp, Glycine max
  unsure (1)..(382): unsure at all n locations
actaagctggtacaaaccttcactacatcaaccgtaataatcatcctctgactgctatcctgaatcaaacatgaattaggaaagaaggttaacttgcaattcaatacagaaaccaattttgatatagagattaaattgaaattaaaagatggcaagtatagcacatcttctaagtgtaaaaactcagtaaatttgactgttccaaagtgtgtgactatgacttgntgaccagtaggcaggcgaactactatgggatttatttctctatatgtagaataacaagtcaatgaggatgcaacatgaattgtagcaccaaagtccaaaatccatgctgcagcttcanacttgtgaatattacaaacaaaggatagtatattaccta

SEQ ID NO: 207263 - DNA, 156 bp, Glycine max
agactcatcgccattaccattagcgggtgccttgcaaaacgaacccgctcgtatatacttttaaaagagacccgtttatgaaataaggtgactaaggtgacgcatttacgtaaatcttgcatcgatctaccctatatacttattcctacagtcgga

SEQ ID NO: 207264 - DNA, 333 bp, Glycine max
  unsure (1)..(333): unsure at all n locations
agcttgaaaaattctcanagctaggtttgcaggaccaatcagaagaaggaagcaaggctttttgtgagtcatcgcctganatatcaacttcttctgagactgagagtgacatgtcattttcaagggttgtatctgtattaaataatgtggatgtaaatatgcaatctagctatggtatgtaggaagagacaacttctacacacagtataaatacaccaaatgttgctcccataaggtgaagtccaagattcgaatatcaactcattgttgacccaactggatagtctaactttgattatgtatgctttaaaaatatagatttgttttactaat

SEQ ID NO: 207265 - DNA, 422 bp, Glycine max
  unsure (1)..(422): unsure at all n locations
ctattacggacctatgaaactcagcttctttactgcgttgatgccattcacgttaaataattcttatgaattntacagatctttcatcgctaaagtaattgtgacaatgtttgntattattatttcatgtatcatttgatttattggtagtctaattcataattcctggcttgtgtctacttttattgcattaacttctctgagcattgaatactttagtgctcaacatagattcatactttattttgtgtgcatattttactactaagtaatttttatgacaaaattatgcagttgagtgttctgggatgtacaagactcagtatttgagggtattgtgactattttataagctacaagtctatggatacccaacgggtgaagcatcgtacttcttcattagttgtattgataaattcact

SEQ ID NO: 207266 - DNA, 418 bp, Glycine max
  unsure (1)..(418): unsure at all n locations
agcttgtatcaatgtcatctacacaacttctgtcgtaatgccaaggtttcttttcttaatttggcttgtataaaaataaaaatatttagtgcatttaactaaggggacgtttggcaggaaagcactttttcatgttgggaaatcaagaatcttgagaatcatatttcttggaatctttagatcaatttcctgaaaataaaaaaattatgaatatttttatcgataattttaattatttatcacatataatttaataaaaaataaattgatgtttctattatagtaaaagaaaaattaaattcgaaaaagtaagattttcattttttattataagaaagtttttgtgagaaattaagttttcaacttataatttttgaanaactaaactnttcttttactaaatgtctcctttgagttt

SEQ ID NO: 207267 - DNA, 84 bp, Glycine max
  unsure (1)..(84): unsure at all n locations
atgatttaattttcttacaaatcatgaatgaagaacgaccantcttggagttggatacttagattagaagggatgaggggggtg

SEQ ID NO: 207268 - DNA, 393 bp, Glycine max
  unsure (1)..(393): unsure at all n locations
agctataacctcatcgtccctcacaatctttatatttgggagccaatccaatccttgtgttcggactctcagccacttatgatagccgccgatgatcccattactgcttcccctaagctctctgtcctttcttcacgccgcatcccatgccttgcgaactccttggagtaccctagcgttgtggtcactggaacctcgtgcgatgaaaggcgtgatgctttcgtctgatggcacttctctcatggggtagccaagctgtcttatggcgaggacgggattataattaatacaaccccttgttcccatcaagagaacattnggacatccttcgcatgaagatagaatcctgattcttccttccttctagcgaggaaaccaattaacagacgcccc

SEQ ID NO: 207269 - DNA, 419 bp, Glycine max
  unsure (1)..(419): unsure at all n locations
cgaggtacttacccgttgaagatcgaagaacgatgatgaacgaatgaagaacgtcgaagaacggttgaaatctttgcgaaattcctcacggaaaacgttacggaaacgtttcggaagcgccttggcttagattttcttcacggaaacaatttttccaagcaaattcgaaagagagagaagtgcctaaggggctgaaccccttccttcttgccttcctcccctatttatagcaaaataggggaggtggttgccgcccagctcgcccaggcgagctcagctcgcccaggcgagctcagctcgcccaggcgagcagggttgcttcctccagaagcaaccgccttctggaggaatattccggagggcccaagtgggcctgggtgctatttgcacccncatttttacttaagtacaccccctct

SEQ ID NO: 207270 - DNA, 419 bp, Glycine max
  unsure (1)..(419): unsure at all n locations
agcttgtgcatgagagcgagaatgctagtggttttgatagttcttggaggaccctaaaatgggagggttagaaattaagattaaaaattgagaaagtggaaatagttaatttaaggggtgaaatgagagaactacagataaaatgagattgtgcatgttgttgttgcgagcgatgacttggagcctggagacggcgtcctcattgacgacagcgtcggcgaccttgatgggatgatacttttctacccatggaacgttgtaggcattgcttgatgatgacaatgacatgcttctgccaacggtgaacaaagggtttcaagtttcagaccagagcggagaataaacgttctaaagcccaaaccctattttgcctaaaccacttcaaaggttcatcacttcttatttcanacggcatgttc

SEQ ID NO: 207271 - DNA, 441 bp, Glycine max
  unsure (1)..(441): unsure at all n locations
cgtgacactatgaaactcagcttctaaggaagttntcttaagaaagcttctcaaggaagctacctagtctataaataaaagcacgtgtaacacttgttgtaactttgatgaatgagagtcttgtgagacacaactcanagttcaacttctctccctttntcttccttcaatttcgtgctcccccctctctctttctctccctctttcttttcctccattgaagcatcctctccaagcttcttatccaaggctcatcttgggggtgaagctccttcttccatggcttattccttaatggatggcgcctcctctcacctcttttcctttgtcttccgctgcatctccgtgggggaaaatcaccattaaaggaccccattgaaactcanagatcccagcctcccacaagcaagcttccatcaagtggtatcagaattaaataac

SEQ ID NO: 207272 - DNA, 544 bp, Glycine max
  unsure (1)..(544): unsure at all n locations
atgagacattgatnacgngaactatgtctactcaagctgattttgtgatganangcgtttantgggagatcttctctctctcttctctataagnnnnngaagnannaaagannannagancatggggggtctcacttaataactacgtataacatgatatgggtgtcacacagttgattctggatgctgaaatagaccgacagttgctgagaatgatctaataattgataatctactgcgaanggctgaggaataactattaatgatacattgaaatgatacaccttctggtaagtaatactttaatttaaattttagactaactagatatcgcttcatatttttaacgatacactgccttcaatcaaatctaaatgtcaagccattaactattaaagatactgagaatattatctatatntattaaataaaatatgaatacactttgtgatttccttgcagatgatttcggaaatacaaagccgggaaggagcattgtgattctatatttaacgacatgtactgatgcaatattgcattacag

SEQ ID NO: 207273 - DNA, 505 bp, Glycine max
  unsure (1)..(505): unsure at all n locations
attgacaccttgagagccctngagatcctcgagagtctacctgcacgancgcgagctatgccctctgtactgcaacacaagaatgattgattcgtgtaacacgactccatcccttgagtggaggagctgtgagacacttaatcatagtcagtcgcacttcaccgaacgctggctttcgctaaggaggtctgggtcttccttagacgccagcattcaaagcccttgcgaactaccttggaactgcgcctatcgtgtgtggccgcctgtgatacatctgcgagagaaagagcgacgactcatcgtcgaatgatcggacataaggttatgggcgttccttacaccggtacgggacggaccgtagttaattttataggaccccatgttgccatcggaagagcatgcttacttacttgtgaagaggatagaagacacgatttgtccttcatttatgcgaggagaaaattgacagactcccactactgcgagccatgtatcggtgccaacg

SEQ ID NO: 207274 - DNA, 451 bp, Glycine max
  unsure (1)..(451): unsure at all n locations
cattacatagtttatttgatcttctacacataatatacattgatgtctagcttactatcgccatatagtttggcgaattatatcaaattcaagttagacaacattattttcaatatttgactcattgtattaagttgaatatgacaattctattattatttgtatctaaagataattattataaaattcaatacatttacattacattccctacaagaattataatacataatattctataatattttataatttgatgaccataataatgataaaatgcattacgctagttaactccactgaaaccttntcaatgaaacttatgtctctaacatataatatcatattaaatatgaataattttagtctcatgtacgtatgatataatatggacttaactcataaaatnttgacttttacattanctcacgcttataaaaatttcttgccc

SEQ ID NO: 207275 - DNA, 254 bp, Glycine max
agcttctatagaggttggatctttaatctttaatgaggtccttcaacggtgattttcacccatggagttgtagaggacgataaaggaaaagaggtgatatgagaccgatcgaggccgtacctgattcaaacaaacatgagaatgcagcaactaggaagtgatcctatgtcgtttcccaacgatcagggactaaccaaatgttcatattatacttgcagtaacagtaacgattgtcgggggggtgtctagctgtc

SEQ ID NO: 207276 - DNA, 318 bp, Glycine max
atctaatcattccaatccacataaatcttacaattgctcattcaaatcattctcaaacactcatttcatacaaaataatccactgcatatcaaattcaaccagttcactgttcaaacacgctctttgtacaagcaaacaactcaaagtgccaaaagttatagaactgaaacataaacattgaacattaaatgactgaacataaatcataaaataactgaaataaactaaaatgttcaaaatgcacaaatttaaatgtcctgctcctgtgggtgctcttgtgcatgctcattaagatccaacacctgagcaactggtga

SEQ ID NO: 207277 - DNA, 416 bp, Glycine max
  unsure (1)..(416): unsure at all n locations
agctntgccgatttagttntcatcggcgaatggatcgaagtgggtttgagaagaggaaaatttgattatcctgctttgatgaatgggaagcctacggcaaatggagagaataagaatgagggaggaacccatgctgtgactatcgctcctatatggccaaatttcccaccagctcaacaatatcaatactcagccaatatcagcccttctcattacccaccaccctatcagccaagaacactcaatcatccataaaggccacccctaaatcagccacaaagcctgcctgctgcacatccgataccaaacaccacccttaacacaaatcaaaacaccaactagggaaggaattntctagaaaataagcctacagaattcaccccaattccaatgtcatatgctgacttactccccta

SEQ ID NO: 207278 - DNA, 416 bp, Glycine max
  unsure (1)..(416): unsure at all n locations
ngaaggcatgtaacccaccatcttctcatattagaacactgttaacgtgtccactatcanttttatcatctcgctttccatcattgngggcactacttaagctgccagatccctccacctctgggcgtattctttgaatgattcattatctctcttgcacatgttctgtagctgcattctatctgcggccatattggaattgtaccgatactacctaatgaaggcaaccattaggtccttccaggaatggatccaagaaggttctagattagtataccaggtgacggctgccccagtaagaatttcttggaataaatgcatcaacacattttaatctttcgtgtatgcccccattntcctacagtacatcttcaggtgattcttggggcaagtagtccccttgtacttatcgaaat

SEQ ID NO: 207279 - DNA, 404 bp, Glycine max
  unsure (1)..(404): unsure at all n locations
agcnttgagacaattcaaacgactataactttttactcggatgtctgattgagtcccgtaatatatctagacgctcacaatcgaatgttgaaggtctgagccaattctaacgacaataactctttactcggatgtgctattcattgacctatcatattgggacgcttgaaattgaatgttgagcctctgagcaaattcaaacgacaataactttttactcggatgtctaatagattcccgaaatatatcgagacactcgaaattgaatgttgaacctgtgagccaattcaaacgacaataactttatactaggatgtttgaatgaatcccgaatatatccagacgctccacattgaatgtttaagctttgatccaattcacacgacatttactttttactcaga

SEQ ID NO: 207280 - DNA, 476 bp, Glycine max
  unsure (1)..(476): unsure at all n locations
actcagcttaacattcanattcgagcgtgtcgttatattataggactcagtcagacatccgagtaaaaagttattgacgtttgaatctgctcagagcttcaacactcaatttcgagcgtgtcgctatattacgggactatatcagacatccgagtaaaaagttattgtcgtttggaattgctcagagcttcaacattcaatttcgagcgtctccatatattacgggactcaatcagacatccgagtaaaaagttattgtcgtttgaatttgctcacagcttcaacattcaaattcgagcgtctcgttatattatatgactcagtcagacatccgagacaaaagtattgacgttgaatttgctagagcttaacattcatntcgagcgtgcgctatatacgggacatatatacatccgagtataagttattgtctttgaattgctacagctcaacattaattcagcgtgcgatatata

SEQ ID NO: 207281 - DNA, 417 bp, Glycine max
  unsure (1)..(417): unsure at all n locations
agctntatattaggaacctatctgccaaattattttgtcccaataagaaaaatatcttaagtgtgcttctattatctgaaatctacaaacaaaaaaactaaattaaattaatgtcactataacagccttgcatgttcatcattattcattgcagatgcccataagaaacttgtaaactcatttaacttctatgctctccttttctgtgcaattggctgtcatttctatacagacaatataaagcatctccatgctctctctattccctgttcatgtataagtttggtgagtagattctgttattctggcagcaatggcgaaagcatgcaactcgcaagaagaaattgcgagtgaagctaccaaacatgatttgaacgctctaaagaagcgccatttgcttgaggaagctgctcatgc

SEQ ID NO: 207282 - DNA, 473 bp, Glycine max
  unsure (1)..(473): unsure at all n locations
tgtctccgctgatgctacatggacacatgtgttggacatcattagtatgtctgcatggtcctgttagtgggtatgaagttctggctggttntagttntaccgattggttttgtaattatttttttgttagaataggaaaggatcctaaaaaactagttatttcttctgggtggagataaattgtaaaagaaagggaaaagaagttactttgatgttcaattgagtttatgatcctcttgacttgngtattggtgtgcgtttgaatcggagaagtacatgcagcgggttattttactgttccaaaataaaacangaaacagaatggctcatgaattaattnttgaagaggttgttggtcatgtaattgagaatccgtttgagaagtggaanaagaaaaatgtggcaagagtattattattgaagtctgtaagtnaacctggagactgttttgattgaaagtgtaccataattta

SEQ ID NO: 207283 - DNA, 338 bp, Glycine max
agctatatggtctgtttcctgttatgcatatttctttctttgatgctcccataattataatacacaaccttttccatttgatgtgttccctctcgcactatcctctattttcattcttctgcatatttatttttgttgcgaataaatgatgtttacctctcccttgtgcgattttggcgctgtatttgttagtctctttgcaacgcatgagagataaatggtttgcaaacccatgatcaacaagctcggattggtggctgcaatagatggctctaggcctatctttgattctgttgtaaacttgcatggcatattgatctttatccctttgttttaca

SEQ ID NO: 207284 - DNA, 211 bp, Glycine max
  unsure (1)..(211): unsure at all n locations
tncttgagaagctagagcttagctacacacacctctctaataactaagctcacgtncttgagaagagaagctagagcttagctacacacccctataatagctaagctcacccccatgacaaaatacatgaaaatacaaaaaaaaagtccctactacatagactactcaaaatgccctgaaatacaaggctaagaccctatactactagaat

SEQ ID NO: 207285 - DNA, 360 bp, Glycine max
  unsure (1)..(360): unsure at all n locations
agcttgttcagcctttgcatactcaacaagagctaattgtgactcgatatcagccttatcaaatttgtcatcctaaaactcaaaaatcctccaggtccttgttgaaaaatgtgcaatggaatccattgacgctcatggcccaaaatccctcatcatatccgagtctgaatggctgagcatagaggattggataagagcacgaggattaagtccttaccctatagaaaagagtagcaatcaacaccaactccaaccttggccttttagaaggcccttcattttgaggacccaaagtcaccatagtggttcttgggctagatgtangaagaggaggaggaggagcccaatcatcttcgggat

SEQ ID NO: 207286 - DNA, 431 bp, Glycine max
  unsure (1)..(431): unsure at all n locations
taagaattggaggtcctaatgattccttgaggaggtccaaacattaagcctttgaattgccccaagtattacgtgtaatatcgcttgacgatgtcaaaattcacagacgaaggtagctcttcatcatccatgttcataagaaacaacgctcctcctgagaaagtcttcttcaccataaacgatccttcatagtttggggcccatttacctcggtgatccttttggacatgcgacactntcttcagaacaagatccccctcgctgaacttacacgggcgcactcttcaatcaaaaacgttnttcactctgcactaatatagtctcccatggcttatagtagccaatctcataccctcgataagaattaattggtcaaagcatgcctgggcccactctgcttcttccaatcctaactctgctaagaatcttaa

SEQ ID NO: 207287 - DNA, 399 bp, Glycine max
  unsure (1)..(399): unsure at all n locations
agcttcattgcctaacaggccaacttacaacagcaagccccaagaaactcaacataaggatgcacaggccaaagttgagtatgtgaaaagattgtatgaccaagtgaaggtgcaaattgcaaagaagaatgaaagctataccaagcaagccaacaagaaaaggaaggaagtggtacttgaactcggtgatgatcctggacatttgagggcaaatgttttccaagaaggagggaatgatgagaatcctaaaactagccaaatacaggctaaaggcccaagtggagaaggacgaaggcccaagtggagaaggacaaagcccccgagtggagaaggatgaaggcccaagtggagaaggatgaaggcccagaggcagagacattatcaagacntattaattgt

SEQ ID NO: 207288 - DNA, 399 bp, Glycine max
  unsure (1)..(399): unsure at all n locations
ttcgattcattctatgcacccatggtggtccacattgtgtttcgtgcacttttattctcgttntgtttactttttatacgccctattgacgtgcttaagccattntacttaagtcatttctcgcttaacttaaaaataaaatcaatttccaccaaacgtttgaattgtattatccgttaacttcggttaaaatgaattccgaccgttcggtcgtgctgtaaccacgttggaaatcaaaaagaggtaaaaaataatatagtaatcaaaaaacatcttttagtaaaataaagcggaaaatcaatcggacgttttttctctttgggatttctcattcttaatcgaattgattaataactaaagtgaaactaaggctaaaatcaactcgcctagtcaagctcg

SEQ ID NO: 207289 - DNA, 265 bp, Glycine max
agcttgagtataggatcttgcccgctgaatacctaggcgcgatgatgaacataggtggagcctgtgagaacgggctataaccttaccgatatcacccacatacaagccgcagacactcctcggctagcactgtgtgcctaaagagagatctatctcacattacttgcgatacactaactgctcgcgggccagaaccctaaacctgtccagttctccgcctatatgtataaaacaacgcgagacgcttgccacccacctcgcccag

SEQ ID NO: 207290 - DNA, 181 bp, Glycine max
  unsure (1)..(181): unsure at all n locations
tcctagttgatgcagacgctatacgccacatcatgcgatgtcgcgaaccgtttgaagacgccacgagtgcgagtatggtcatatgaggaacccgactgattggtcgatgaaaggccatcgccattnctatgttaccgagcaggatttgcacgactgtgccgaaactggtcggacatcccct

SEQ ID NO: 207291 - DNA, 419 bp, Glycine max
  unsure (1)..(419): unsure at all n locations
agcttctccttccttttcatataaatagaggaaggagggaagaacaaaaatgttcaaccctcctggtatctgagattcactgaaaattagttagaaaaattgtttccatgaagaaaatccaagccgaggcgcttccgtgacgtttccgtgggtgattttgcgaagattttcaaccattcttcgtcgttctttgttcgttcttcgtcgntcttcggtcttcaaccgcgaagttcccaaaattgaatctttcaattcattctatgtacacttagtggtcctcatcgattctgcgtgcttttattttcatttcatctactttccatacccncttttgacgtgctttagtaatttatttaagtcattntctcgccttatcaaaaataaaataaatttccaccgatcatttgaattgtaacatc

SEQ ID NO: 207292 - DNA, 449 bp, Glycine max
  unsure (1)..(449): unsure at all n locations
ttctatgtacccgtggtggtccacattgtggtttcgtgtattttattcttggttcatttactttntatacccccttttgacgtgcttaagccattttatttaagtcatttctcgcttaacctaaaaataaaataaatttccaccgaacgtttgaattgtattatccgttaacttcggttaaaatgaattccgaccgttcggtcgtactgtaaccacgttggaaataaaaaaagaggtaaaataatattataataatcaaaaaatatctttgagcaaaataaagcggaaaatcaatcggacgttntctctttgggatttctcattcttaatcgaattgactaataactaaagtgaaactaaggctaanatcaactcgcctagtcaagctcgtncacaaatataggtttttgaagttgtcatttcatttcttactaagtaaatggatcatc

SEQ ID NO: 207293 - DNA, 418 bp, Glycine max
  unsure (1)..(418): unsure at all n locations
agcttgtttaccccatgttgagtttgcttacatatagagttgttcatagcgccactaattgttctccttttgaagttgtttaaggttttaacccactaactcctcttggtcttttgcatatgcataatgtttctatttttaagcataaagaaggtcaagcaaaggcgaactatgtgaagaagcttcatgagagagtcaaaaatcaaattgagaggagaaataaaagcttaaacaagccaacaaagggagaaagaaggttgtcttcgaacccgaagattgggtttgggtgcacatgagaaaaggaaggtttccggaacaaaggagatcaaagcttcaaccaaggggagatggaccatttcaagtgcttgaaagaatcaatgacaatgcttacanaagtgagttgcccggtgagtataat

SEQ ID NO: 207294 - DNA, 405 bp, Glycine max
  unsure (1)..(405): unsure at all n locations
agctgttataaacagtttaaacttttggtaatcgattacataccttgtgtaatcgattacaggctgttaaattcaaattcaaaatttgcaaattatttcataaatcaatttagccattggtaatcgattaccagagaggaaatatcatatttttgaaaatataattgttcttaaaaaaaacttgtaaaatatttcctttagccaaacctgtgcagtattaattaaggaattctttctaagatcctaactaagtacatcgttcttcttgcatttctgaattcttgacttgaattgcgctcatctttggcatcattaaaacttcatatcatatatgcttctacaatactccnnctttttatgatgacaataatatgaaatcaagataaacgatatagcattgataat

SEQ ID NO: 207295 - DNA, 424 bp, Glycine max
agcttcacaaaagtttatatgacttgaaacatgcaccgatgcagtggtacaagaagtttaatgagtttatgagcaactcaggattcaaaagatgtgacatggaccattgatgctatgttaagaaatatactaatagttatgttattcttgtcatgtatattgatgacatgttgattgcaggatctagtatgacagacattaacaagttgaagcagcagttggcagaaaactttgaaatgaatgatcttggtccagctaaacaaatccttggtatgagaattcttagaaacagatcagaaggaatcttgaagctgtcttatgagaaatatatacacaaattgcttgacagggtttaccttggagattctaagaccaggaatactcctttaggatctcatttgatagtttcaaagaagcaatcttt

SEQ ID NO: 207296 - DNA, 351 bp, Glycine max
  unsure (1)..(351): unsure at all n locations
atcatctaataacctcgtaattttcttttgtatagattataactaacagagacgatttcttgaattggtacctaagagtaaaatttagcgattaaatagttacagtctctaaatcgctagcatatatattttttgttttgttttttgtttatcatgattgttgcatatgattgttcttaattggacctaaattgacgtacaaagaattgggcaccctccaaagtttgtgacaatgatgcacagttattggtccaaatgtgaaccggcccgcattgaagttattgtgcattattattatgaatagaanaagaaaggcttacattggttcagttctctattataaatgggaaa

SEQ ID NO: 207297 - DNA, 288 bp, Glycine max
  unsure (1)..(288): unsure at all n locations
tattctctatctaccaagctacttctgttcctaaacaaattaacatatttgttgaagagtgattacgcacagataaggctatcatcttatagatggatatctaacttgagcacattattttttaactctcaagatatacaaggagttttgagagtttttttttttttttacaaactntgaatgtatagaataaagcttagagagaataagaaattcaaaaataatttgttctttgtaaatcttctagtatttataaacttctttaacaagtagtcgttatctctaaac

SEQ ID NO: 207298 - DNA, 412 bp, Glycine max
  unsure (1)..(412): unsure at all n locations
tgagctgcaacttgtgaagaaattaaatattttgttttaaagaaaatccttatgaaaaaggttgtctaaatagaattatattgtgccaaacaaagtacaaatctctaatataaaaataactcaaaaataagtatcatttactactttctccttttacaaaagtgaggcgcgtacaatcatataaaacaagtaagtactttggcattcattattattatgtgtcgtgaaatagcattgaaagtggaatgcatttaacgcatatccaaaacacgcgctaggatgggnaggagaaaaaattatgttgctcgaatgcatgatttagtagagaaactacactaaaatgttacatgagaacaaaaatcatatttgatagcctgaacttccatctaagtgcttatacctcgctccggaa

SEQ ID NO: 207299 - DNA, 388 bp, Glycine max
  unsure (1)..(388): unsure at all n locations
ctttaacaagctctgaacaatatacttggccttcatttaactgtctctgggcttggcggccacgctcaacaaagtactttcgacacctactgtacgttgatttgaccaaggctgttatgggaatgttgcgacaatccttcaaaaccttattgatacattctgagaggctggttgtcatgtggccatatcgacgtccttctttatcataagccatcagacattttttctttgaaatgcgatcaatccatgttgctatggctggacttagttcacgaaattnttctaaatcttgatcaaaaatatgcttgcaaggagtggaggctgcatanaattacttatcaataacaactttaagatatatggaagtaaataaactgaccataaatat

SEQ ID NO: 207300 - DNA, 415 bp, Glycine max
  unsure (1)..(415): unsure at all n locations
agcttgtgttttcaggagacgtcttagtaactgcaaaatgagatttcaggccaatccaacactggtaataatcttggtccaagaacggtgattctgaggcccattgactgatacggngtatcaaactcgattcaaacataaaagccattgtgtcagtgatcttgcaaggtcctacatcatttcctcgtgcaatggtagcctgtaaaccaagtaccaacacatacattactagaagattgaatccatcaattcatattttttgcatctttagtagttagtacttaaaccaaatcaacaaatggcacataactaggttttgcacttggagtaaacctcattatagtttccgatattgtaagaatttgttactaacactgctaaaaaatgattcattcctatcattntcatatttatt

SEQ ID NO: 207301 - DNA, 383 bp, Glycine max
  unsure (1)..(383): unsure at all n locations
ctagttccgctccggagtacgacagtcaccgctntatgagcgctgtacaccagcagcgcttcgaagccatcaagggatggtcgtttctccgggagcgacgcgtccagctcagggacgacgagtatactgattttcaggaggaaatatggcgccggcggtgggcaccactggttactcctatggccaagtttgatccagaaatagtccttgaattttatgccaatgcttggccaacagaggagggcgtgcgtgacatgagatcctgngttaggggtcagtggatcccgttcgatgccgacgctatcagccagctcctgggatatccgatggtgttggaagagggccaggaatgcgagtatggccagaggaggaaccggtctgat

SEQ ID NO: 207302 - DNA, 390 bp, Glycine max
  unsure (1)..(390): unsure at all n locations
agcttgtccataanaaataggcttttgaagtttgtcatttcaatttctcactaagtaaaatggatcatttttaaggtccaacgccttaaaatgatcaccacttaagtaaagaatcgcttgataaaaaagaactacgtaggtctgagttcctcattaaggatacgtaggagcaaaagccccgcttttgtctaccaccccaagagatcgttaatggtccaatgccttaacgtttctctcctttcaaaaacaagagatcgttaatggtccaacgccttaacgtttctctcctttcaaaatcaaaagaccgtttaatggttcaacaccttaaatgaccttgtgttcaataataacatattctgcaaagaagacaaaaacaacttaacaaaacac

SEQ ID NO: 207303 - DNA, 405 bp, Glycine max
  unsure (1)..(405): unsure at all n locations
gtgtaatcgattacactgctntgataatcgattaccagtgattgtttctgaataaatcaaaagatgtaactcttcanaaggtttttgactntntcaaattggttttaagttcttctaaaagttataactcttctaaatggtcctcttggtcagacatgaagagtctataaaagcaaggctttgatttgcttttcaatatacttttccaatcaatcttatacaatcctttacaagccttgaatctcttggaacttcttcttcttctttgtgccaaaagctttccaaagttttctggttttttaaaccttgaaaacttgtgctattcatccttatcattntcttctccctttgccgaacagaattcatcaaggactaaccgcctgaattctttttgtgtctctcttc

SEQ ID NO: 207304 - DNA, 400 bp, Glycine max
  unsure (1)..(400): unsure at all n locations
agcttacnnttgattgntggatttagttgtctgttaatcttatttgaaggagtaatattcattattatatgcgatcattacatgtactttataatttctggcctttgagaatttttttaataataaattatcattttgaaaggaaaaacaaaatgttactcactgtactatggtccaatcgttatatgcttataatttaagtgagaatattaatatataattaattattaaattaataatacataattaaattttaggatttatatgaacgactcacaatttcaagcattaataaataccctaactctttcatttcgggaataaaaaggtggtttatctctttctaaaactaagtatttgaatataatacggtcaattctaaaatattatatatcttaca

SEQ ID NO: 207305 - DNA, 424 bp, Glycine max
  unsure (1)..(424): unsure at all n locations
ggaccttcaaactcagcttacatactatattttatctntatcttattgttagattattacaaacttgaccgataaatagacttgtaggttagaccaagcctatgctcttaaaaaagcctttaacaaagtctagctcagctcaacttattttcacctttatgtttggtcattgtgaatatgacaccctctatctcacacatatatgtactaataataaaaggaataaaaatgtgaaattaattaatagtttttaaatcacatttaaataaaagtctttcaaaagaataaaaggctcacattcactcttttaacatcataatagaacttgttcaaataaataataaatcatctcggctcanagcaaggtncgccaagacttcatgcaatttatatagaaacttatactccaatgtcacatnctatc

SEQ ID NO: 207306 - DNA, 405 bp, Glycine max
  unsure (1)..(405): unsure at all n locations
agctttcaataagattatgttctggtggtattggtatgtgtctgtgtgttaacttggtcttacatggcaggggatgttaagagtctgcttgtacatagaactggtttacagcctgaagagcaacaactcttctttggaggaaaagataaggacaatgaagataatttgcatgaggaaggtgtgagggacaagtcaaagcttttgctcttggaggatgcttctagtgaagagaggaaacgcgaggaaattataaaacacaatgaaatgttaaaggcttctgaagcatgtgctgaagtcacagcagaagtggataagctcgctgagagggtgagcctgcttctcatattatctntgggtattgaaacataataactggagctgagaatgacgatatgagtgattttg

SEQ ID NO: 207307 - DNA, 217 bp, Glycine max
ggacttcacccctcgtgtcatcccggaagatttaagccaagcccctacttttgaggggcaactcccaccttatgaagactatcccgggcaagacgatggggaaggagatacccatcttgtgccgctgctccaccacaaagatccatccccgcatgaactaccccagtcaaacatagtccgccatataccggcctcacccacacccgtaaaagaatct

SEQ ID NO: 207308 - DNA, 356 bp, Glycine max
agcttataatatatcgaggcgctcgaaattgaacaacggaaggtcttgagaaattcaaatggtcataacttttaactcggatgtccaattcatgcgcatcacatatagagacgctaaaaaatgaacaacggaagctctccacaagttaaaatggtcataagatgtcacaaagatgtccgattcacgcttgtattatatcgagacgctcacaattaaacatcgaaagctctcgagaaattcaaatggtcataacttttcactacgatgtccgattcatgcgcatcacaaatacagacgcttcgagttgaacaacggaagctctggagaaattccaatggtcataactttttacactg

SEQ ID NO: 207309 - DNA, 383 bp, Glycine max
  unsure (1)..(383): unsure at all n locations
tctttggaccttgaacaggcaactaactcctctntcagaaccatgctatgtgctcgcgactgagccctttcttcctttcgcaacttgagttcactattgctaccccatagagctccgcgaaatttgttccggccatactctgtcttgcgagccctcttggtctcttgttcaagggctcttgcggtaattgcattctcttcccgtaacccggcacactccttccgaacgtgtgtagcggccaacttgaacttctccttggcaagttttgcctttcctaactcgcttntgagagctaggacttcttcgtcctcttccggtgcttcanaactctctttgctgacgacttttaacttggcgagccaatctaaacctcgtatatgaac

SEQ ID NO: 207310 - DNA, 405 bp, Glycine max
agcttgctctaaatttacattgatgtatgtatttatgggaggaggttgtacgccatttctgttttaagagtagtgtcccactggcaaaactaactttacaaatttttgccttcgcaggaaatggccccgaggaagcttgcctcatagaggtccaggaaggataaggcagccgaaggaactatttccgctccggagtatgacagccaccgctttatgagcgctgtacaccagcatcgcttcgaggccatcaagggatggtcgtttcttcggcagcgacgtgtccagctcatggacgacgagtatactgatttccatgaggaaatagggcgcccgcggtgggcatcactgcttactcccatggacaagtttgatccagaaatagtccttgagttttatgccaatgct

SEQ ID NO: 207311 - DNA, 183 bp, Glycine max
ctagtttaggggccccccctctctccctcgcgggagactctctctctctctcctctctctcttctattcttcgttattagttttagtctctcttctctttctctgttatttctgctttttttgaattccagttcagacttttagttttatcaataaaatttcattctctatttgattaatgga

SEQ ID NO: 207312 - DNA, 223 bp, Glycine max
gagctctcactcggaggcccgattcaggcgcataatatatctagacgctcgaaattgaacaacggaagctatcgacaaatgcacatggtcaatactgccaactgcgaggacctattaaggcgcattatatatctacacgctcaatattgaacaaaggaagctctttgaatattcaaatggttctaacgttggactcaaatgtccgagctatgcgcataatata

SEQ ID NO: 207313 - DNA, 342 bp, Glycine max
  unsure (1)..(342): unsure at all n locations
ttggagaggttaatgaaacaacgagatgatgcgctccatgagaggttggatcanatggagaatagagaccatatgaattgctcaagagcttccattgttcaatttcgagcgtctagatatataatgcgcctcaatcggacctccgagttaaaagttatgaccatttgaaatgctcaagagcttccattgttcaatttcgagcgtcacgatatattatgcacctgaatcggacctgcgagtgacaacttatgaccatttgaattgctcaagagcttgcattgttcaattttgagcgtcacgatatattatgcacctgaatcggacctgcgagtgacaacttat

SEQ ID NO: 207314 - DNA, 417 bp, Glycine max
agcttgtagaattatggcgtacccatcacatgtggtactatgtggcggtcgggcgatggtgcacaacaagctttccacatccacaatgcgcgcataaacccaccatcccctgttgcccacctccaactgagctcacgtactcccacatagcccatctcctcgtttctctcaacaccgggtccccatcaatcctctcaagcttccacaacatccaagcaaaacaacgttcaaacagcacaagctatcacagccaagcaaaacagagcaaaggcagaaaactctgctcaacacatcaaccaaaatcacagcttttctcacgtaaagaccacagtaacaattccttcgatccaattcgttaaccgttggatcgactccaaaattttactggaagtctatagtggataagcctgcattttg

SEQ ID NO: 207315 - DNA, 432 bp, Glycine max
  unsure (1)..(432): unsure at all n locations
tctacatttccttagtgacaagtcatctgcctagaagtttcttgtcttgacctggntgntgtgtctttctcatctgccatgcacttccatgtttaatttcgagtgtctcggtatattatgcgcctaaattggacatccgagtaaaaagttatggccatttgagtttgcctagaacttttgtgttcaattntgagcatcttgatatattattggcctgaatcggatatccaagtcaaaagtaatggcccattgaattntccttctgcttccatatataatattgagcgtctcgatatgctatgcacccgaatcggatattcgagtgaaaagttatgaaccatttgaattcttgagaagctttcgtgttaatntttgagcgtcttgaatatcatgggcctcaatcatacacccgagtcnaaagtatggtaattt

SEQ ID NO: 207316 - DNA, 417 bp, Glycine max
  unsure (1)..(417): unsure at all n locations
agcttgttcttgattnttcctaagttctgtatcaagcttataacaataaacttggccttctcttaattgtctttgggcttggcgaccatgatcaacaaagtactttcgacacctactatatgttgacttgaccaacgttgttattagaatgctgcgacaatctttcaacaccttattcacacattctgataggttggttgtcatgtgaccatatcgtcgtccagatgtatcgtaagccatgctccatttttcctttgaaatgcgatcaatccatcttgctatggttggactcagttgacgaaatttttctaagttttgatcaaacacatgcttgcaaggagtgtacgctgcatcaaatttgttatcatcaaaagttgtacgtagacatcanactcaaattaaattaatgtataaaat

SEQ ID NO: 207317 - DNA, 397 bp, Glycine max
  unsure (1)..(397): unsure at all n locations
gagacatttaacatanaactagtcaatgtattctacacttatgcacatgttgaccttgaacgtaacctcttctatattgttaatggagtcgatatggtcgcagatgtttccatgtggaaggaagttgctggtctagacataggtggagtccataagtttgatgaaactacagatggttacaacaagatgcagacatataggggaatgcttcttgatagtgttcccagaagtgatcaaaaacactttaatcaattaaatcaagaatctaattgattacactattctttanagctctctaggtattgggaagaacactntaatcgattacctctccttgactctgntttcatatgttnttacatattggtgtagcatatgtatgagtttctaaagatgc

SEQ ID NO: 207318 - DNA, 378 bp, Glycine max
  unsure (1)..(378): unsure at all n locations
agcttacacacttactacaagactcattaggtatcttatttcttcatgcaaagaaacttatctagggttgcttcttttgctcgcgtatgcctgacttctatcctccacatgtatgcaaatataactagaaaatttgatggacaatcttgtttttctaggaggagactcacaggcactcatgtttgtacagatcagtcctaatgaaaatgatttgagtgagacaatttgctctctgatctttgctcgttgagtaagaggaatagaattgggacctgcaagacagcagttagacactgttgaacttttgagacacaaacaaatggtatgactgatgtaatgctgttgtatttatcaagnacctatatttcactgcttaac

SEQ ID NO: 207319 - DNA, 367 bp, Glycine max
  unsure (1)..(367): unsure at all n locations
gtcttcanaacattgttcagttctatagaatttgtgttattataactctcgggtccctatgaaatgctatgaagattaagttagctacaattggggattcgatatatttttacaagtttgggtagctgatgatgtattggaaactgaagctcataaacttaataaagcagttgtgttcatataaagttnttgttattcttattagcctcttaatggaagcatcccctataatgaggtttggatgatgtangtctgagagctcgtgtgtcgatatattatatnttttattcttattagcaacttttgagacttacatctttaagttagcttagagacaaacatatacgttcagtctctctatgtatgt

SEQ ID NO: 207320 - DNA, 409 bp, Glycine max
agcttgcctcctaccaaagttcaagcccatgtgcaaaatgtaaggctttgggaacatgcaagcccaatgcccgcaaaccatgattgtcgaatgctttcacggctcgggcctttttgggccttttcgagcattttaaggatcctatcttgcgaagaaaatgctgtgattgttctgaggttggaaacagcttcaacagctatcttgctactatcatcttgggccttgatggccttactagacatgctcttgagaaggacacgccttgtgtagaaacatgctatgataatgggttgaactgctatcataacaatggccaacctccatgcaatgattaagcccattgtaaaagctattaccactgctgaaatggattgtaccactagagccattctatctcccactaaagacc

SEQ ID NO: 207321 - DNA, 348 bp, Glycine max
  unsure (1)..(348): unsure at all n locations
taaaagtactttttaattaactaatgatgagaagactcttacaccaataatactcgtttgttaaattcttttataaactatataaactttccttttccgcttaccatgcattacagctgtatatatgttcctttgaaaagaaaaaacatgaaactcatccatcagacagcttcaaattcgtaaaacttcacgaaaaatctgtcaattntcacttttaattatcgctcggaatgtgtgagtggcttgctattatatatctgattaattcgactcgaatgaactgtttaaaaggataaatttctcactgtattattcatttatttgttcatgaaactttccatatctagc

SEQ ID NO: 207322 - DNA, 369 bp, Glycine max
  unsure (1)..(369): unsure at all n locations
agcttgnggcatatctggatggtccattacttttatcaaagtggccagactttgtattccatataaatgaactttttccttgtgtagaactccctcctgaacaactgagatcctgccaaagactcctacattctttcttcctacacactttctcactcacacgtacctcatgtctgtacctgttagaccaatctgatggggatgaattcaaatcaatacaagaggccaattccctcatctgacctgacttaaaacttctaacaacgacaaggagcttgagtagttgcttttagtgaatacataatatctctttattagaagaaacaccatattctaccgctccacagttatttgggagaaaactttgca

SEQ ID NO: 207323 - DNA, 360 bp, Glycine max
  unsure (1)..(360): unsure at all n locations
cgcatactttgnggataaattgctgatgtcaatgggctccataacccataatcatctgtacaaatgaaaatattcaaatagagactctttttgtccttttctaactatgtacaactctttttggaaatccattattattgagttatgcttgtgattattacaagtatatagtacaatgcaaacttcaacttatcatatatagagaagaagaaataagagactcacacgacgactggtggatatatagtccagcacttaccatccagacatgagatcatttgctcgtgggcncatatttatctaatttgtatttgaatatgcctcanaccaattagacactatgggtatgcctatcactcc

SEQ ID NO: 207324 - DNA, 299 bp, Glycine max
gggatccttagagcacctgagctgcagcttgatagatttgaattctatttaatattatttctgtctgaggtcttttgcttttcgtcttgataattaggactaatatgcaaattttattttatttcttttacaaaaatgcaaagatccgtatggaattactgatgcctatgttcccatcacaacgttctcaaatactctattacttctttcagttgaactgctaacagactagaccccacaattagaagtggcgcttgtgaatgatcaatcttagctgaggatctgcgaatttttttttt

SEQ ID NO: 207325 - DNA, 436 bp, Glycine max
  unsure (1)..(436): unsure at all n locations
tactcttcatgtaacctatgtaaactacatggatattgattaacattgntaatatctctatatgtgctttaaccggaatgatatcgatatctacattaagtagaatattgtgcatctatacacanacatacaataaatatgaaatattatttcgttcgataataaacattatttgttattgctttagtcttctggcacgatatatataggggcccgtcttgtaaattttattcaagtatgtgtgcaactgacatattctgctatagactttttgattgatgcatgcactgacaccaattatgaaagaagggttctgaatattgtcccaattaatcacattctntgaaaatgaaatgcttgtcataacttgtattctatatatgttatgatattaacatttccaatatctgatttctggttggtaaaagtagtatat

SEQ ID NO: 207326 - DNA, 412 bp, Glycine max
agcttgtcgatggttttgttttcttctatggtgttgaagaagttagtattaagggtttacttaagttgtaatgttataattttttgtgggattgttgagttgccctcacaaaagtcatgtttgaatgtatgtgtatagtatttgaagaaaaataattttttgtgcttgtacatttttgccgaacttcgtatgagcatgaaagtgtaccagctccgtatcctcctaaataattcatgaacaaacatatgccatgtgcatgataaatgtcgggctcgtaatttatgtactgcaacccaaaatgactacgcctggtgctggtgttccgcacttgaatagcttcaattggagtgcaaccctaagagttgtgctcacaacttggtggacttttgttgtatttgctcaatttatatga

SEQ ID NO: 207327 - DNA, 299 bp, Glycine max
  unsure (1)..(299): unsure at all n locations
acttacccgtgaagactgaagaaaacgatgaacgaacgatggatcttgaagaacgggtgagaatcttcgcgtaattactcacggaaacgttacggaagcgcctcggcttggattttcttcacggaaataattttcctcagcaaattcgaaagagagataagtgcctaaggggttgaacccttttcttcttcacttctccccctatttatagcanaataggggagaagcttgccgcccagctcgcccaggcgagcaaggttgcttcctccagaagcaacagccttctggaggaatcttct

SEQ ID NO: 207328 - DNA, 261 bp, Glycine max
  unsure (1)..(261): unsure at all n locations
agctntatatagactgcagagctttaatccatcgagagatcctagctagacgtcgtctaatagctttggcacttgggacgagggcactacggcgcaaagagacagtggggaccataaacgcttgtatctcgtagagatatatataaacctatagcttaagcatgaagggtgaatacataaaatttatacttagtcaaagcaataaagctgagcgataagatcttaaatggaaaaagaaagatgagactctttgctatactc

SEQ ID NO: 207329 - DNA, 266 bp, Glycine max
  unsure (1)..(266): unsure at all n locations
ctcagcttctggtgctgactagatctatttagctagtccttggtctaanatatgaagatatcctattctacaccggagacctacatatactaagaggggaaggagctgcatcaacttcttgggattctggcagatcttggagctttaatctcgctgagttcattaaagattgtggcggatttatctacacgtttgtgtcatccacaactatctctttagcatcttttctttattttacatcattccttttaactatattattgata

SEQ ID NO: 207330 - DNA, 389 bp, Glycine max
  unsure (1)..(389): unsure at all n locations
agcttcttagtctcgcctaatgaggatgaatttgtggctacttcatgcactcctctaatgataatagcatcacttctgacactaaattgctgggagtttgaagccatcttctcaattaaatttctggcttcagcaagggtcatgtctccaagggctccaccactggcagcatctatcatacttttctccatgttgtagagtccttcatacaaatattggaggagaagctgctcagaaatctggtggtgagggcaactagcacttaattgtttaaatctctcccattattcatatangctctctccactgagctacctaatgcctgaaatatcctttctgatggccgtggttttggaagcggtgacaatttttctaacaatactctcttg

SEQ ID NO: 207331 - DNA, 345 bp, Glycine max
cttcttaagtacttagataaaatgattacttaaagtaaaggttctaagtaaaacttaatactaccactttagaagctaccttataaaatcacaagttatgttgtcataccaggtttggcttttcacatttctaatgcaaggtagatgctacttttgaataataaaactgctttttaaaaaccgtttgataaaatatcatagtaaagcttttgtaaacaaggtttctccaaaactaaagatgaacatgcaacaatggaaagtaaatgagaaacaatgaagaaggatacaatacacaaagaaattcacattggttcaacctaaccaggggcgtgtatacctacacct

SEQ ID NO: 207332 - DNA, 405 bp, Glycine max
agcttggctgggctcatttccacccctaccaatgacatagtggcggaagctcccttcttcatgagaatatcaatgcaaaacattcacttcttgtagagtgtagatgatacgaacctcccattggagggccaaaagtgacttaatagatgtaactatcatcacaaatagatgaagcgaaagtgattgttgttcaattaggtggatagaagctaaaaaatctatctctacgatgttatgtctaaacccattatttcatgtatgatgcatcccattgagtatagcaaggagctcagcatacatgttcgtagtgtaaccacaataacgataaaacccgaagagccaaagtccttgagagtcttgcattatacctccaaaacctgatggccctaggtcatccaaagaact

SEQ ID NO: 207333 - DNA, 394 bp, Glycine max
  unsure (1)..(394): unsure at all n locations
ntctataagtcctanatgacatttcaagctagggttaactcactntaacctccaactctcanaacctcactctntttccactcataacaccatattctcactntctaaccctaggttaactctacccttcatctctaacagttttccataagcaatttcagcacataaacatcacaagcatcatcataaaaaccctaaaactgaatgggtaagcttaactcatccaaacatggcaagttcaacatcctttcaacaaatttcttcacaaataactatcatgaagcagaaacctagcaaaactacccatcatatctcccagaacccaatacccacgaaaatcaagtgagaaagaagtctacccanacctgaaatttaagggtccacacgtagagat

SEQ ID NO: 207334 - DNA, 172 bp, Glycine max
atcaattaattatttacgaacatgaagccgtttccatggttcgcaatggtaatagggactctaaggatacatgcgatattgaaaaatacacaagcttagtaacctcactggttgcttctcattcgatccctaggagacccctataaacgtccttcctgtgtttagagtgatc

SEQ ID NO: 207335 - DNA, 422 bp, Glycine max
  unsure (1)..(422): unsure at all n locations
agcttgatcaaaacaattatctaatcattccaatccactcaaatcatacaattgcttattcaaatcatactcaaacactcatttcatgcaaaataatccactgcatatcattttcaatcaattcactgttcaaacacacttttggtacaagaaaacaactcaaagtgctaaaatttaaataactgaaatataaagcaaactaaaaagcaactaaatcctgataaactaaaatgttcatgcttttcagaaattaaactaaacacaatttaaacatcctgctcatcctatggctgatgttcattaagatccagtgctggagctgctgatgaatcctgnataggctgctttggctccgtgactggtgcagatggctgggtctcctcagggataggtacaggagatggctcatggatctggtttat

SEQ ID NO: 207336 - DNA, 359 bp, Glycine max
  unsure (1)..(359): unsure at all n locations
tggtaatcgattaccagtgtgtttgaacgttgaaattcaaattcaaatgtgaagagtcacatcctttcacgaaaatgctttgtgtaatcgattacactgatttggtaatcgattaccagtgatagtttctgagcaaatcaaaagatgtaactcttcaaatagtttttgactttttcaaattggtttaagttnttctaaaggtcataactcttctaatggttctcttgaccagacatgaagagtctataaaagcaagactntgttntgcattntaanaacatctttccaattcattctttagacaacaaacttttgccaattgctttctgagtctctttgaacttcttctttctcttcct

SEQ ID NO: 207337 - DNA, 393 bp, Glycine max
  unsure (1)..(393): unsure at all n locations
agcttcttntggaccttgaacaagcaatcatctcctctttcagaaccatgctatgtgctcgcgactggtccctttcttcccttcgcaacttgagttcattattgctaccccatagagctccgcgaaatttgttccggccatactcttccttgcgagccctcttggtctcttgttcaagggctcttgcggtaattgcattctcttcccgtaacccggcacactccttccgaacgtgtgtagcagccaacttgaacttctccttggcgagttttgcctttcctaactcgctattgagagcttggacttcttcgtcctcttccggtgcttcaaaattctcttcgctgacgacttttaacttggcgagccaatctaaacctcgtatgcgaactttca

SEQ ID NO: 207338 - DNA, 301 bp, Glycine max
  unsure (1)..(301): unsure at all n locations
tgatgatatcttagatgatgacananagctcacaagtcaagagcacttcatgatacaacagatgatgatctctcgaatcaaaaaatgagttcgagattgaatcacgaacacttcaaggttccgatggaacattgatttctagaatcaagaattaagtttcacgattcaagttccaagaatcaatatccagattcaagaatcaagagaagacttcatcaagataagtattaaaaagtcttttcaaacactgagtagcacatgaatttttctcagaaccttttaccaagactttctagtctct

SEQ ID NO: 207339 - DNA, 358 bp, Glycine max
agcttataacattgattaaagaattaaaaaaattattaattatgaaaattatagaacacaaaaatggtcatggatatttcaaattttagcattccaataaaaacataacacgctgttagcatttgtcatattgttattcttggatgggcctacaggttcaagttgttttgccgcaggatactatctcacacttctgtcagcataacgtggttgggaaaggtaaagcacaagctactgcgtggaaggatgtatgggttgccatcatgtgttgcatatggaactttataaataaaattggttttagacataggattttggcttctgaagattttgtggaaagcataagaatcaaaacatg

SEQ ID NO: 207340 - DNA, 322 bp, Glycine max
  unsure (1)..(322): unsure at all n locations
ctgctctgctctcacttcttttatatatatcataacatatgcatacacaaaagattgaagcaagtcatatttacaacacanaatgatcaacatcatgatacttctatagatatctaactatgtcagtgtattacttctcagctctgggtgatttgatgaacaccagaatccagatccccctccttctgccagtaatgcaagattcaggttaaagcatgttttttttctcattaatatttcttcacgaatccatcctaattgaggtaacagagaaccaatggccatagcatgcctgcacagaagactcttctgctatcctatg

SEQ ID NO: 207341 - DNA, 409 bp, Glycine max
  unsure (1)..(409): unsure at all n locations
agctntcatgctntattgagactttcttttgttcttttttgctttcgtttgttttttttttcttgcagaggacaatgcaaggatcatgcatgagtgaacatgacatgctaatgatggaaatagaatatatgaagttggcataacaaaagcatgctaaatgaaggtgtatgataatgcagtgatttatgcaaatgcaatgcacgaatatgacaactcccaagggtggtttcatgtaaatntactagcttctaagatatcatcctcttagataatacattatggtgatagggactatcagcgacaatgcatcaccaaaaaaggaaaactctagatgaggcttcactgttatcaactgagtcggagacccagcatgaccacagatcgacctccacttcctatggctcacata

SEQ ID NO: 207342 - DNA, 389 bp, Glycine max
  unsure (1)..(389): unsure at all n locations
gtggtattatagcacaagagcttcaagtatgtgctccttaaacctccatatatattttgctgtaccttctcttctatagntgcttcttcattcttctccatgtatctcctcacatgtcttgtgataaatgtttntaacatgattatttagagtttccactgattaaatttgctatacaagctagatttgattttctatggttcaaatttcttggtcttgttcttgaaccatgaattttgttgagtttaagttcctttgagttntgtcttgatattttttgtggctgacaccgaaaccataaaattcttacaaacatattaaagtataagaaaacctcacacatctagagtgacttgntcacctattgtagttntgtcatacaagtcatg

SEQ ID NO: 207343 - DNA, 396 bp, Glycine max
agcttgccgccacggagttatccgactatgctcttgtgtggtggaacaagctacaaaaggagagagcaagaaatgaagagccaatggttgatacatggacggagatgaaaaagatcatgaggaagcggtatgtgccggctagttactcaagggacttgaaattcaagctccaaaaactaacccaaggcaacaagggggttgaggagtatttcaaggaaatggatgtgctcatgattcaagcaaatattgaagaagatgaggaggtaactatggctcgatttcttaatggtttgactaatgatatccgtgatattgttgagttgcaggagtttgttgaaatggatgatttgctctacaaagcaatccaagtggagcaacaattaaaaaggaacggag

SEQ ID NO: 207344 - DNA, 289 bp, Glycine max
  unsure (1)..(289): unsure at all n locations
tctcgaatattatgcacctcgaatggacttccgtgtgactagttatgaccattntaattnttcgagagcattcggtgttcaatttcgagcgtctcgatatattatccatctgaatcggacttccgtgtgataagttatgaccatttgaatttctcgagagcttccgttgttcaatttcaagcttctcgatatattatgcacctgaatcagacttccgtgtgaaaagttatgaccatttgaatttctcgacagattccgctgttcaatttcgagcgtctcggtatattat

SEQ ID NO: 207345 - DNA, 338 bp, Glycine max
agcttgcctcatagaggtccagtaaggacatggcagccgaaggaactagttccgctccggagtatgatagtcaccgctttaggagtgctgtacaccagcagcgcttcgaggccatcaagggatggtcgtttctccgggagcgacgcgtccagctcagggacgacgagtatactgatttccaggaggaaatagggcgccggcggtgggcatcactggttactcccatggccaagtttgatccagaaatagtccttgagttttatgccaatgctcggccaacagaggagggcgtgcgtgacatgagatccagggtaaggggtcagtggatcccatttgat

SEQ ID NO: 207346 - DNA, 253 bp, Glycine max
  unsure (1)..(253): unsure at all n locations
cactgcttccatgcccacccctgaggcgtgcgtctncatggtaaataggagggagaaatctaactacatattaacacgagctgacggtagagcctcctttagggtcttaaatgcttggtcagcctccaaagtgcattcgtaaggatccctactggtgagcttgaccaaggnggcaacaatatatagaggcatacccttgaataaaccgacggtaaaaatcggcgagacccatataacttcatatagatctcgt

SEQ ID NO: 207347 - DNA, 286 bp, Glycine max
agcttctagtcgaccatagaccttcctctgggtacggactatctaacgttgcatctgtgcattcatcgcatccactaacagacgtcgagcgccgtccaactgaaggtacttgttaccaccagtggggacgccatttccagtgaaggaagatcagtctgggtacacgccacttccggttaaggaatataagtctgggtagacgccacttccaaagaaggaacatacgtctgggtagacaccactaggattaccttgagtagactgatacttggctcaacaaggatcc

SEQ ID NO: 207348 - DNA, 295 bp, Glycine max
  unsure (1)..(295): unsure at all n locations
agagtacttagtgagagtgattctcctaaattcttgagtgattcaagaacaccctggctgtatcaaaggactgtcacaacctttgtgtgttgccctcgctggaaagagtgattctttccttcctatcatctccacccttggtctttcgaaccacaattccagatnatgcacctctgcccaaaattatctcgtgaccataactnccatttcacacactcaaattaagtgattcttgagcctaaattgaatntcataacgagacacttcacctcgntgtggaatcacctcatttgga

SEQ ID NO: 207349 - DNA, 370 bp, Glycine max
agcttcaagctgctcgattgctccaggttgctgcatggaagggcaaaggtctgtatggtggtcagcaaaggagcacaaaccacaaacccttgcaacaggtacagatttcttattcaaggccagctgggttaccaaattaaccaatgcatccagtttgccttcaagcttcttagtctcagatgatgcagctgagtttgtagctacctcatgcactcctctaatgactatggcatcatttctggcgctaaactgctgagagttggaagccatcttctcaattagaattttggcttcagcagaagtcatgtcgtcaagggctccaccactggcagcatctatcatacttctctccatattactgagtccttat

SEQ ID NO: 207350 - DNA, 368 bp, Glycine max
  unsure (1)..(368): unsure at all n locations
ctcagcttacaatcaggaagcgttgatggtgtcatcgaccctccattcctagtcagacgccacgtgaagtggaagatggcccgcacgaagaanacaggggaaatgacgactgaggccgcaaaggaaatcgctgagaagattgtaagtcattntcaactaaccattacaattatatttcaatattttgtgaatgccatgtaccactgtgtgttttctgtgtaggattcttttgaggagcaggccacacagggatccttcgtccctcatcgacgtcaggatgttctcgccgctgctattggacgtccagagcaccctagatgtgtccatgctgctggatccngtgtcaccatcaatcaatactttggatc

SEQ ID NO: 207351 - DNA, 391 bp, Glycine max
agctttcttcttccctgtaaggatgatcattatggtcattgctgtggccaaagatgatgtcatcatcagaaccatccacatcactatcactgacaacataaatatgaggatcatatgtgagcaaaaagaatttgtaatcttcatccacttcatcctctgacatatgacccttctttattgttaaacttgccactttttcatgactcttcacagttgatcttgtaccactgtcactgtgattgtgcttcaattgtttgtctgaacctgaactttcaaatgtcttgcatcgtgtttctaacctacaatgcttagaattagaaccttttcggttcagaaacgctctcacatcatcataaccttccaaatcacatgtgtacagagcaggccccat

SEQ ID NO: 207352 - DNA, 131 bp, Glycine max
agttagagctttagtagtaagaatatctgcttattagtctggagatggatcatggtacactaacatgcttctatttagtacctttctgcacataaaaagtggcccaatatgtatgctgtgtcctggagtga

SEQ ID NO: 207353 - DNA, 411 bp, Glycine max
  unsure (1)..(411): unsure at all n locations
agcttcccgcatccgtacttggaaggatctgattactgccttccttaggaaatatcagtacaattccgatatggctcccgatcgcactcaactacagaacatggttaagaaggatagtgagacctttaaagagtacgctcagcggtggagagacctggcagcagaagtggcccctcccatggtcgaaagggagatgattaccatgatggtagacaccttaccggtgttttactatgagaagttggtaggctatatgccctccagcttcgcggactttggtattgccggggagagaatcaaagtaggtttgaagagagggaagttcgattacgtctccttcacaagtaccaatgctatgaggatcggagcaactggngcataaaggaaggaaggagatacccattccgtcac

SEQ ID NO: 207354 - DNA, 374 bp, Glycine max
  unsure (1)..(374): unsure at all n locations
tgcgggtctgggagacgaaagtcaagtgttcgctatatgtgaagatgatgttccaagtacttcggatttggtccgaccatgccctcctgatttccagctgggaaattggcgagtggaggaacgccccgacatttacgcaacaagcataatgtaaacctttacggttntaaaagctctatagttgggcctaggctttagagttctcattntgttaaggctctgtgtcttttgtttttgaatttataatacaaggatctttcttcatctgttcctggtctctacccattctcattcatttgcatgtttacttctttttctgaaacggcagattcgatgacgagtcccccgaagtactaatacctgngacccgtcta

SEQ ID NO: 207355 - DNA, 420 bp, Glycine max
agcttctgccccaattttctataaatagggggagaagcgtagtacaaaagggttcagccccttaggcacttctctctctttcgaatatgcttacgaaaattgttaccgcgaagaaaattctagccaaggcgctttcgtaacgttatcgtaacgcttacgtgagtgatttcgcgaatgattgccagcgttcttcgacgatcttcattcgttcttcatggttcttcagacttcaacgggtaaagacctcgtaccaagcttttcacattattatatgtacccgtggaggtccacattcggattcatgtatttttattctcgttttcatttactttatatacccacttttgacgagcttaagccattatatttgagtcatttctcgcttatcctaggaagaaaataaagttccatcgagcgttt

SEQ ID NO: 207356 - DNA, 414 bp, Glycine max
  unsure (1)..(414): unsure at all n locations
nttcgtanagcatagcggaagatctgggacctagtcatggtagatgtctccaccgaggccattgcctccctcgcccaatattatgactagccgttcaggtgcttcacctttggggacttctagttatcacccacggtggaagagtttgaagaaatcctatgatgccctctatggggaaggaaaccataccttttctcgggattctatccctctttagctagaatttcagagatagtccaaatctcggtgcaagaattacaccacagaaagcaagtcataaatggcgtggttggaataccatcgaaatgtttggaagcgaaagcaagagtctcggcaggtaacgacgaatgggaacagttcattgacatactctcactgttgatctttggagggtcctctttccaatatgatggg

SEQ ID NO: 207357 - DNA, 422 bp, Glycine max
agcttatgcgcatacttcttttacgaacgttcacttgcacaagacattcttataactaagaaaaatgcacccatgtacaatcaaggcaccttcgttacctagattatttatatgtgcttccaaggtgtatttgttacctacatctcatgcacttgcttggctaaatttacatacatgcgtactcaaagcatttggggtaccaaaaattgcacatgtgcacattccagtatttctaatacttatgcatatacaaactttgtgatgaatcttggctatctacacaacaaggtgatacatttcatgctttactcaagtttttgctacctaaagccgcatgcaaattcaagtatattttcttttgctgactaaaagtgtattcaaattaaaaggtattcttgtaaagtattctctttacataacat

SEQ ID NO: 207358 - DNA, 292 bp, Glycine max
  unsure (1)..(292): unsure at all n locations
aacttcgccaaaaatccgcattgagaaacctttattcaaacctttcacagttagtgagaaggctaatagaaaaattatggaacttagaacaactaaatccttaattgaaggcgtaggtgacaaccatagtgaattactaaacaagattggtagtttacttaaagtcattccagataccccccaagcctcggaaaatacttncaaaatggtgacaagaagtacctgcaaattaatcaatgctattaatgaagatagtgaccaaaactcatataacacaactgagataggatca

SEQ ID NO: 207359 - DNA, 393 bp, Glycine max
  unsure (1)..(393): unsure at all n locations
agcttattgttgaaatgtattcttggatattctagacttcaaaaaggatatagctgtaattctctagccaataaacgtacatgtttgcagatctcacattcttgaaaacactatattttttctcttctttgaacaagtcccaatcttatcgtccagtattgtttcttgtatagggataatctaggatggcaacaagtcataatttactagttcaattaagggagaataacacatatgataggttcaaaanatgtttgtcacacanttgatcatgtatcatggcaacaagtcataattgatatgttaaacaatagggaagaaaaacaacagatgttaattaggaccatntccataaaattgactcattacaccaatgactntaacaatgatgat

SEQ ID NO: 207360 - DNA, 310 bp, Glycine max
  unsure (1)..(310): unsure at all n locations
tactcaattgaatcaacaacagtcccagaattctgacaagctgccttctcaagctgtccaaaaccccaaaaatgtcagtgccatttcattgaggtcgggaaagcagtgtcaaggacctcaacccgtagcaccttcctcatctgcaaatgaacctgccaaacttcactctattccagaaaaaggtgatgacaaanatctacctaacaatttctgtgcaggtgaatcttcttccacaggtaattctgatttgcagaagcagcacattccccctcttccattccctccaagagcagtttccaacnaaaaaatg

SEQ ID NO: 207361 - DNA, 457 bp, Glycine max
  unsure (1)..(457): unsure at all n locations
atccctgagtcacctgcggcatgcaagcttcgtgatgatgaatcaagttgattcatgtagttntgatgatgactaagatgatgaccaaaagcccaaagaatgatttcaagattcagtcaacaagttcaagatcaagataaatttcaagtttcatgagaagaaatcaagaagattcaagattcaaggaagtttgatttcaagattcaagagaagatgaattcatgattcaagagaagaaatcaggaagacttcacaagggaagtattgaaaagatttttcaaaaaacaaacatagcacagttttgtttttcaaaagagtttttctcanaattttctaagttaccagagtttttactctctggtaatcgattaccagtttcctgtaatcgattaccagtagcaaagtttgatttcaaaagctttcaactggatgtgcaacgttccaattgatttcaaaa

SEQ ID NO: 207362 - DNA, 426 bp, Glycine max
  unsure (1)..(426): unsure at all n locations
atatcccacgaagcactactacatcatatgtgtatgacatcacttatggaatgcatactacatcaattntagaactcatgttgntcaacacaatgttaaatatatgcatatatttaacatcgatatgatttcaaatcaatgtagaaccctaataacatttaacattggttccccttgattntgatgtangaagtgacacgccctgcatgagtcaagtcacatcttacatcatttattgacataaccgatgttgaaagtttcgcttactacattgattntagcaaaaaccaatgcaaaatgtattttttttaataaaaaagttagcattttgatatgtattcattgggtccatgtntatanttgngaatatgcatcttatatattaatacactattacctatatgctatcaagttaattttttttta

SEQ ID NO: 207363 - DNA, 279 bp, Glycine max
  unsure (1)..(279): unsure at all n locations
gatcctccagcaccgcggagcagctataactcgggtttgaaaataaaccaggngaccaattttttgcatatcttcgggacagataattccctccaaagcagttgatggaggctatactgaaaaaaaatccttggcttgccttttgcgacttctagaccgaaggtccactccgatctctaaactcagaccacatagcacggcagatacgcggcccaattatgccgacccaacgctcccgggctgtgctccctcataccagcgaggcacttaaccggcccc

SEQ ID NO: 207364 - DNA, 347 bp, Glycine max
  unsure (1)..(347): unsure at all n locations
gtcttggattcttctagtaagttatcttatccacttctcagataaaatttcttctttattattaaagaggagaaaagagagaaattcttgaatggtcttgacttatataagattattgtagaacgaaagaacttggtctctataacaattatcccaaaataagataaaattatcttttaagacaagtgtatttaccttttcaaatcaactaagttctttctatgataattagccttacaaaanaatgtgaaagacattattgtctaataattcatattagactctataccgacttctctaacagtaaaaaatgaatattgttaattaaactattgtgataaccatct

SEQ ID NO: 207365 - DNA, 413 bp, Glycine max
  unsure (1)..(413): unsure at all n locations
agcttgtagaattatggggcacccatcacatgtggtactaggtggcggncgggcgatggtgcacaacaagctttccacatccacaatgcgcgcataaacccaccatcccctgttgcccacctccaactgagctcacgtactcccacgtagcccatatcctcgtttctctcaacaccgggtccccatcaatcctctcaagcttccacaacatccaagcaaaacaacattcaaacagcacaagctatcacagccaagcaaaacagagccaaggcagaaaactctgctcaacacatcaaccaaaatcacagcttttcttacgtaaagaccacagtaacaattccttcgatccaattcggtaaccgttggatcgactcacaaaatttactggaaggctatagtgtataagcctgcat

SEQ ID NO: 207366 - DNA, 208 bp, Glycine max
  unsure (1)..(208): unsure at all n locations
tatgttgatgcctactattgatatatagcattgaccatacatgatactagctagagagaatagaaactatcgataatagtacactccataggtagtaaaccacancaaactctagtggcttgcataactttagataaatttagcggctcttaatgcttatcctatatatattataatgacataagtatttctaacttggtacctccta

SEQ ID NO: 207367 - DNA, 397 bp, Glycine max
  unsure (1)..(397): unsure at all n locations
agcttgcctcanagaggtccaggaaggacattgcagccgaatgaactagttccgccccggagtacgacagtcaccgctttaggagcgttgtacaccagcagcgcttcgaagccatcaagggatggtcgtttctccgggagcgacgcgtccagctcagggacgacgagtatactgattttcacgaggaaatatggcgccggcggtgggcaccactggttactcctatggccaagttggatccacaaatagtccttgaattttatgccaatgcttggccaacagaggagggcgtgcgtgacatgagatcctgcgttaggggtcagtggatcccgttcgatgccgacgctatcaggcagctcctgtgatatccgatggagttggaagagggccaggaatg

SEQ ID NO: 207368 - DNA, 302 bp, Glycine max
  unsure (1)..(302): unsure at all n locations
atatgcatgcaatctacggaggggagcggtgttgcgaagcccanacccttggtgatatacttcactaaaagcgcagcttcgcaaaagcctggacacccctttgtagccaaacctgttcctttcctgtaccaaaatagccacgcggtcccgtggagatatgcacctccaagggagaaggaagaagaagtcactgacgtcagctcgctgtcagctaaagtaacaaatatcacgggactgagtggtgtgacccgtagtggtcgtgtgttcgcacctccggacctaccagtccaacccgcggacgt

SEQ ID NO: 207369 - DNA, 389 bp, Glycine max
agcttgaacctgaatgagcagatgttcaagtcttgttggaaagacatattccgtatgaatcagaatgaacttgagtcagaaatccggaaggtttatcgcgactcaactcttgatccaaggagagaggcataccttgtgcagaatctaatgacaaggttggttccaatgaccatagataccttgttgttatataattacaacataataaattgcgtgttcatttgacagcagtttactaattgtcttcgggcttatgttgattagttttttgtttactgcagacgctggatagcatcccaacagaagctacctaatgctccatctggtgagtctagtcaacaaatataaggatgctcaccatcatttcgagacccacagaaacatatttt

SEQ ID NO: 207370 - DNA, 265 bp, Glycine max
  unsure (1)..(265): unsure at all n locations
ttattccatttattactttgatacatacgttcatagatttgtcattcagaataataaagaaatatatagctctctaacttatactgttgtttgtcattatatatacatgatcctttctttctttgttagcttctcagaatttccgcatgctttgtgaatcttctttgnttatatctacggacaggtgtttcaatttgtgacatgtatagttatggaaaacattatgtgatcatgaagctgaacaaggttcaagcatactgtatat

SEQ ID NO: 207371 - DNA, 284 bp, Glycine max
agcttcaataggatagatggacctatggcatccctctatgacctctaaaaaagaaagtttcactcggtcatataccaaagtgtaacaatccatctccatccttcaatggtttatgcagttagactcaaagccttatattttcttaatgcgcaaactataggggtgttcatgggtcggatcaaacacggtttggtcaaatacaagactcaacccaatcaaatttgatcggcttggtttggttcagctttcacaatttgtgtttgaaacccaacccactcattaac

SEQ ID NO: 207372 - DNA, 387 bp, Glycine max
  unsure (1)..(387): unsure at all n locations
tacctattactgccttagtcaatgaaacatttaataaaataaatgattaattngttactaatggcatgaaaatcatgaatatgataaaggtaggacatatgtactttgaagacgtatatgccatgatgcaagagaatcaacacattgctacctgatattatgttcgcatgtatgttcgagaaacatgagagtntgaggttcaagaaattgtaaatatgcggcttggttgacgagcaatgtcatgcattgtcnacatgaatgaatggtcgtgtgattatggagaatatcacacacttcanattccttgctcgcatgtgattgcaacgtgtgctntttgcaattcagattatgatgactctgtcgatcctatatacaagttggaaaaca

SEQ ID NO: 207373 - DNA, 360 bp, Glycine max
agctttctcaagatgtctttttgagaagctatatccttatctacccacacccctctattaactaaattaacctccttgaaaataattatggataaaataacacaacaaatacaatcaaacatcaaacataattattaatatatatatatatatatatatatcagggggttacattatgtacctaaactgtaattgatatttctttaattatgtgataatgttttcaaattgtgtttagttggtcatctcacccattgttaagtccaaacatctgatgaagttaagagagtacggaatcctccatttaggaattttgttggaatgagccatcatctattagcctcatcttcgagatgttct

SEQ ID NO: 207374 - DNA, 345 bp, Glycine max
  unsure (1)..(345): unsure at all n locations
ctcacatgcatccatcatttctgctggagatagttggctgaatcaactgaacaaatgattntttttgttgtgactagcagatgcttgttgaaagtatgatccaatgcacaaactactagacttattggattctctccttgcctcctagctttcagatctgaaatatcacaaatcacactagaatgagggttgaacagtgttaataaaatacaataactnttttgtaaatgaataatttatgacaagttcanaaagatatatgcattggagttgtccactgataaggaaaaacaagtttgacgaaaatagaggtcgatcattcagtacatgtanagcaataatttc

SEQ ID NO: 207375 - DNA, 387 bp, Glycine max
  unsure (1)..(387): unsure at all n locations
agcttncttaagaagattcctaaagaagctagagcttagctacgcatacctctctaatagctaagctcacctcctttagatgagaagctagagcttagctacccacccnctataatagctaagctcacccccatgacaaataacatgagaatacaaaaaaaaagtgcttactacagagactactcagaatgccccgaaatacaaggctaaaaccctatactactagaatggccaaaatacaaggctcagacgaaggagaaacctattctaatatttacaaagataagtgggctaatacttagcccatgggctcgaaatctaccctaaggctcatgagaaccctagggcgttcccttggatctctagcccaatctacttggagtcttc

SEQ ID NO: 207376 - DNA, 307 bp, Glycine max
  unsure (1)..(307): unsure at all n locations
taaacaaaaatcaattgagggagcttcgccaagtgtccccatcgaaattgagaaacctttattcagacctttcaaagttagtgagaaggctaaacggaaaattagggaacttagaaaaactaaatccttaactgaaggcgtaggtgacaatcatagtgaattactaaacaagattggtagtttacttaaggtcattccagatactccccaagcctcggaaaatacttctaaaatggtaacaagaagtacctncaaattaattaatgttattaatgaagatagtgaccaaaactcagataacacaact

SEQ ID NO: 207377 - DNA, 345 bp, Glycine max
  unsure (1)..(345): unsure at all n locations
agcttgcacgtgcccagtgcgccatcagctcgcccagcgagtcaattgtctcttatggcgctaagtgcacctggctcgctaagccaaaatccactaactctcacttagcatgaaaatggtgctaagcgagccttcgaggacagaaagcccttaaaagctaaagttggcgaaaaataaaggagtgatgagagagttcggatagcttttgtgaaaagagacgcagtagagtgaaaaatctcatctttcaagaggattattaggtttagaagtgattnttaggtttctagaggtggaggagacatcctcaccactgtgtaatcttaattttacttcaaaaacctcatc

SEQ ID NO: 207378 - DNA, 376 bp, Glycine max
  unsure (1)..(376): unsure at all n locations
tctcacctcttctcctttgtcttccgntgcatctccatggtggaaaatcaccattgaaagagctcatggaagctcanagatccagcctccatagaagccccacaagcaagcttccatcatctaatttcattaaaaccctaaaaattaaaagctaaattctatgggtttctcccctaaggttaaccaaagtaaaagagtaaagggaatgaggaacttacttggattggtgatggctgaagattcgtanaagatgcagaaagaatgaatgcanaaatgcacgaatttggtgagagagaggatgcacgcagtgttctaaaaatttcaggcacatgtgagtgtaactgatggtacactcacttaagtaatttttaccctc

SEQ ID NO: 207379 - DNA, 429 bp, Glycine max
agcttgaaatgaggaagtgtagaagggtggttcttcctgcttttattcgtcgaccacagagtggtacctggagatatgtcgcgggggtcacgagactttggggacgtcaggtggggtgctattgcccacaaccaagcttgatcaatcccgacccaacccgggcatattcagtcagtgagaacctgtgatgtacctaagcaggcgagctcttggcaatcaacagataaaaggaacaaagaccacaaagcaaggaggcttgtgtggtggctggccagctgtgaatcttgcgtgatatatgggttatggcctctggtaatcaattaccaaaggtgggtaatcgattactaggcttataaatgaagacaggacgctatgatggtctctggttatcgattaccaaggggtgtaatcgattaccaggctttgaaa

SEQ ID NO: 207380 - DNA, 415 bp, Glycine max
acccttacctttaccttgatgatcatcaattaccctattggcttattagtatacatatagttaaatagcttcctgaaactccttggggtaagatttatcgaatgcctccatttgaattatatactcctttgactttcgactatcctagcattttattaaccttgcttcttgtatttggattttaagcttctttctaagaaagactccttatggatgctgcaaatattaggtaagcgaatgataataacgctgaaatacactaacaggggggaggagggtttaatagcgtatatatcaaagatataaacctttgcaatataaaagtgaatatagattacacatatattacaaatatgtcatccactgaagataaagttgatatttaatgaagatcaatatggctgtctactgataa

SEQ ID NO: 207381 - DNA, 450 bp, Glycine max
  unsure (1)..(450): unsure at all n locations
agctntttggagtagaaacatgggaccaactcattttatttcaaaaaggaagtcgtatctagtcaaggtcttagagaccatacaagtttcctaacgatttctaattatgtgggccattaagtctatcatatgctgacaatagccgagaagcccatgaatctcttcgggggcggagtaggtgtctgccatcgccttggccttggctaataatcggggaagttcttgactcccgttcaaggtaagagcaaaccgatccatccacatggttgcctcttggtgtaaagagtcgatcacccttcctctagcctctttttccgcgtatacttgggcatattcgtccgcaatcctatgctcgtgggccgcggctagacctaactcttcttggtacttggcgatgatagctagcatgttggtctccgtctcgcataaacgctgagacaagcttctttt

SEQ ID NO: 207382 - DNA, 342 bp, Glycine max
aaatgtggcaagctgccttacccagatttgacaattcttttaatatttataggcttacacatcagaggagttgattgatgctgccaaggtgggctcttgggaatacccctactgactagattattgagaagatggttttcaactcccaacaatttactgcaagaaatgatgttattgttctgagaggagtccatgaggtggccaccaattcatcttcatttactaaaaataaaaaacttgaaggaaaacttgatgccttggtcgacctattaacccaccttgtcatgaatcagaaaattcacctgttgcagagactggggctatgccctctgttgaccacca

SEQ ID NO: 207383 - DNA, 428 bp, Glycine max
agcttaatgaattttatactatatttattataaaaagaattaaatagctgaatatttttacaatgaccgtgagcaattcaatgccaaagggcggcaaaatttggcaaatattcaaatttaagtttttagtttattaaaaacgcaataagtatatgtgttattttagtcacaattttttaataaaattccaaactttttgataaaatagttaagtcctaatttttaagtgatagaacgttaagtttaggtcttaaaagaattttttaaaaaatgaacctttaaaaaaaggttaaattactcatttggttcctatagtttcataattcttacctttttggttcctataacttgaaagtggtttttttagtccctataatttatattataattctctcttactccctataattctgaaagtggatatttaa

SEQ ID NO: 207384 - DNA, 433 bp, Glycine max
tcacttgcataagtaaattctttttctttctctctacattcggatctaagaatgactgtgttgctattatgtggttgcacttgcagcattgtttggatctagttgatttcattcctaccttgaaatcgaatttgatgatgtagcattatgtgtgtgctatttttatttgcttatggagagaatcatgagcattttgtgaataagatttatataatctcttcaagttcttcgcgcagtatcaagtaaccaattgttgtggaagatgtagagttgattttgatatctactaagctagaacctatgaaaatattggaatgttcttaaattgggatgatagagtggatggttttaggtcaatggttgtgatagattcagttgggttgatgaaggaataaagcaataatattatctttgtgagatatgacattcatag

SEQ ID NO: 207385 - DNA, 448 bp, Glycine max
  unsure (1)..(448): unsure at all n locations
agcttgtgagacanaaggacctatgatcatctgaatctttacactatcagcttagatacaaatccatattaggtcccaccacccaaaagtgccatagacatgaaagcatttcaaagggacaatgacaaagaataacacagtaaaatcaaattatttgtaacataaacctgngggagaattggtttcacaaatctttcccagtttttatgtttatcaagtacacatattgataggctcatgaaggccatgacagaaaaataaaggaaaataagccaaagtagttagagtagatatagaagtagttaggtttggtttaatattagttagttactgaattagtttggtggctagcttaaatagcagaagggaagtataagatcactcattctgcattgttacttagtgtacttaccanaatccagagccaggacatgtcaaggtagatgtg

SEQ ID NO: 207386 - DNA, 419 bp, Glycine max
tctccttccttatcctataaataagggaaggagggaagaacaataaaagttcaaccctcctggtatcttagattcacttaaaattagtgagaaaaattgtttccgtgaagaaaatccaagccgaggcacttccgtaacgctttcggacgattcggggtgattcgcgaagatttcaccgttcttcgtccttcttcgttcgttcttcggtcttcaaccagtaagtttccaaaatcgaacttttcaattcattctatgtatccttagtgctccccatttgtttcgcgtgcttttatttttatttcatttactttccgtaccccttttgacttgcttttgtcatttatttaagtcattttctcgcctaatcaaaaataaaataaattttcaccgatcattcgtattgtaacatcttttaattt

SEQ ID NO: 207387 - DNA, 408 bp, Glycine max
  unsure (1)..(408): unsure at all n locations
agctntgagcaaattcaaacgacaataacctttntactcggaagtcggattgagtcccgttatatatccagacgctcgaaattgaatgttgaagctctgagcaaattcaaacgacaataacctttttactcagatgtcggatagagccccgtaatatattgagacgctcgaaatggaataccgaagctctgagcaaattcaaacgacaataactttttactcggatgttcgattgagtcccgtaatatatcgaaacgctcgaaattgaatgttgaagctctgagcaaattcaaacgacaataaatttttactcggatgtccgatggagtctcgcaatatatcgagacgctcgaaatggataaccaaagctctgagcaaattcaaacgacaataactttttactcggat

SEQ ID NO: 207388 - DNA, 356 bp, Glycine max
agctttgtacaacgctggccgataatatttctttacggtaaaggatgttttgttgtttgtgtctcctataaaattttcaatgtaggtcggctaggttttttcgtgtgagctcaacggaagttctgaatctttgccattcatcgactatgtttatcaagtgcgttgcgaaggggacttgtattcaactcgggaaaaaatttgattcactgatactaatcgaaaaaaatgttaccacgttgtctgaaagatgactgatcgaggtttaaacaagaagcatcaccggatgacgccgatcaaacatttctaatgacatcaccaaatatattcatggatataatgaaattcaatttgatgag

SEQ ID NO: 207389 - DNA, 384 bp, Glycine max
  unsure (1)..(384): unsure at all n locations
agctntgaggataagaaatctatattcatatatcctattcttgcttaagtgaatgctctaatgctagagtttaagaattcgactctctttataatcctgccaaactcatttgtttgcttttagacacaaagtataagttcaacagaaattaatctttgcccagtttgttcttcttgggatttttgttgtgcgttcaagattntagtctcttagcctctctagtgtattacgttaacatttatggaaattgactttataacgtggatctcaccaatatatgcttatagcattagtcacataatatctgtacatggatataataatgttgaatgtgactttcatattgattgctattaactctaaatgttcctataggtataacta

SEQ ID NO: 207390 - DNA, 356 bp, Glycine max
actgtgataataaatcagccatagagatttctaatcttcctgttcaatgtgattgtacaaaacatgaggaaattgacaggcatttcatctaagtgaatattgaagatggtattattgtctttcctttggttaaattataacaacaacttgttgatatgttaaccaaggtatttgcattccaaggtccgcttatatactttattcttagattacgttgggaaatataatgacaattgattgcactcaactttgaaagcggggatgttagcaatccatttaattgttagggatcagctatgactttgaatttaaattataaatgattcacatcccctgatatttattcctttttattt

SEQ ID NO: 207391 - DNA, 430 bp, Glycine max
tgcttaccacataaattgttatattatgatttagcaatgtcgaatagatgaatgccacagggattgctaatatcaacacctcaataataatacccccaggtgtatgacttgcatatacatgtactcttaaagcatgaagattgcatgtgaatttagtctttttattttatcggcaaacgctagcttttgttatccggcagattcaaacccacatgaatttagtcttaaataatcagtcttggaatcctataaatataggcgattgaaatagacagagttgtagctagctgcttaccatttaatacatatgttgatgactgagaaagacaatggtacatgatgatcataagacagagctcaaacctatgagccatgatatggctcgcaccaagataactggtcagatgacgtctgatgcaaaaacgaaatt

SEQ ID NO: 207392 - DNA, 438 bp, Glycine max
  unsure (1)..(438): unsure at all n locations
agctntgtgagtgattcttataaatcgatctctagctacaatgaacgattgggctcctcctctcatagctgcggctntgttttggctcttgagcccgggaatgatctttcagttgccggggaagaatgcaccctttcagtttatgaacatgaagaccactgttgcatccatgtttgcgcacactgttatttatggtctgtttctgatgttgttcttcgttggtcttagtatccatctttatatttaagcagcagcaaagggtatttaaagaaaacttatgtgttgctttatcttttaaagtagatcatgtaacaaccttctcttgttgatcaatatgtatgtgctcttttcgaatttccacttgatcaggcttctactaatactttcacgagtgatatgctcgtcgttcattatttaaaagtgacgtgaattactatg

SEQ ID NO: 207393 - DNA, 409 bp, Glycine max
tcttgcgtatacgctcttggtgctgatagaataccattttctaattccctcttatcactagctattgtgaattctttaattactgcaagtacaacgcttcaacattgatactccgttcctctatgccttttttgcacacataagagacatatgctggcaaaatatggatgatatcgtaagaaaaatcaaatattctatagaaaactatggtattattatcactattcaaaagcgcaactacctatctaccatagtcctttggttaatttgacttgactccttatgtggtggggttttgctaataatcttatactattgccttccaaacaaacttaaactaattctcttttcattaaaactctttcagaaaaaacttatcacctgcctccattactccccttccttctcc

SEQ ID NO: 207394 - DNA, 440 bp, Glycine max
  unsure (1)..(440): unsure at all n locations
agctttgagctttgagcacccacgactgttccaagagcagtctagggttttcttcgacccacagttccaacagtaatgtagggttttcttcgacttttcttcgataggaggttatgtgggttccaacgagcggtttccgacagtattgaaatgaatgtggggcaatgtgggtgtcgaccgagtagttttcggcagatttcgggtgggaggagaaagagaagagagaatgcaacagggttttcgagcgcgcgagttgtgaaatttcatcacgttttaacatattaacataacaacatcaacatcggttttttaaggataaccgatgttaggatgaatctgttaacatcggntttgtaaaaaccgatgttaacttcaacaaggtaacatcggtttttaaaataccgatgttaacatcaactccttaacatcggnntacccta

SEQ ID NO: 207395 - DNA, 437 bp, Glycine max
tgaagacaagactatacgaggtatctttcttgggtatagcaatatctctaagggctaccgtgtctacaacttgcaaactaaaaaactcgtcatcagtcgagatgttgaagttgatgagtacgcttcttagaattgggatgaagaaaaaatggagaagaacattcttatacctcgtcaacctactctctaagcaagaaagcctgatggaagtaagacctcagtgtgaaccactcttcactctccaccacaacaacaagatcaagaactatcatcaccagagtatactccaagaggagtaagatctttggtggacatatatgaaacctgtaacttggccatacttaaacttggaagctttgaagaagcgtcaaagcaggaagtatgggtcaaggcaatggaagaagagatacagataatcgagaaaaacaacacatggg

SEQ ID NO: 207396 - DNA, 434 bp, Glycine max
agcttgtaaatcacttgcacgggtccaacgctgtattgcttcacccaagacccttcgtcccaataatccttcatcacccacacgtcaaagcgcttctctgttcccctcacagggtaaacaaggaacccaattgaagcagattcttcaaagggtaccaaagttccaaacttttcatctgaagaatcgcgaatttttggcacccttatcttcctaaacgattctttgaccatatcaaatgctagaacaacatcttgtgttgcatcagactcttcaacaaagccccaccagtggcaacaattgtttgcgtaagtgaaaacccgagaagaaccccagatttcaattggaagagggagaagagagggatcaagttttctccaagagtttgaattgaggctatacaactcagcactccaatacccaagttgtctttcatc

SEQ ID NO: 207397 - DNA, 405 bp, Glycine max
tggatagaccctgtgcttcaagcatactaaggaagttgaacccttgctaagaacaccactccaagccagaaacttgggttctctcacattcttcactgcgtatatcatcttggactcaacttcttattcttcttgttggatcaaagtgggccttcatgagatattaaccaagtggggttgacttaattattcctaaacctcttctcttgtataatatactcttctaaggcttttactacgttgaccattagtgatgaatacaagggaagcatttccaaaagtaaccgcttgaattttagtgcacgacccacattactcgagtgaggaccatggagacaaacacacatgagtttgtatactgattcggctacacctcgtgcctacatctattccccacgcgacttg

SEQ ID NO: 207398 - DNA, 550 bp, Glycine max
  unsure (1)..(550): unsure at all n locations
accgctacccacctgatctcctcattcttcacactctccttgggtttaatgaccaattcggtttcactctatataacaccagccttgattcctcttgacnccgtactatatgcaatcaatccttctcatnggcacacgcgaatctgatggataaaacgtgggaatattcacatccttactggcgaccgcggcgagattcttgtatactgcaagaaactgatcaactattaagggaaaattagtggtcacccttagtatacttgaggctaacaatcgttgggcattagtaatcgtgatatcgtacatactacattgaatgaagaacttgtgttcgattagtgaccaccatcgaatcaccttcgccttccccctgacaacgctatggagatctaatgtctaaaaatggtactcttaaaggagaagatactctgtggcatatatgacaactggagatcgccgaactcaaaacatggtctgctaaaaacacgttatacgaaatccgatcataggctctatagataaatacccttattgtgaaaacccatcttcg

SEQ ID NO: 207399 - DNA, 380 bp, Glycine max
  unsure (1)..(380): unsure at all n locations
agcttatataaatcgatacgctcgaaattttacatcgaaaactctcgacaaattcaaatggccatatcttttcacacggatgtctgattcgggcgcataatatgtcgagaggctcgaaattgaacaatcgaagctcttgagaaattccaatggtcataagttctcacacggatgtccgattcaggcttataatatatcgatacgcgcaaaattaaacatcggaaactctcgagaaattcaaatggccataacttttcacacggatgtccgattcgggcgcataatatgtcgagaggctcgtaattgaacaacggaagctcttgagaaattcanatggtcataacttttcacacggatgttcgattaaggcgcatcacata

SEQ ID NO: 207400 - DNA, 402 bp, Glycine max
tgaatcggacatccgtgtgaaaagttatgagcatttgaattacttaatatcttccattgttcaatttcgagcatctcgatatattataagcctgaatcggacattcgtgtgaaaagttatgaccatttgaatttctcaagagcttccgttgtttaatttcgagcctctcgacatattatgcgcgttgaatccgtgctatcctgtgtgaacaagttatgaccattttgaatatttcgacagcttctgatgtgtaattctgagcgtattaatatattataagcctgaatcggacctctgtgtgaaaagttatgaccattttaatttccctagaactttcggtttttatattctagcgtgtctatatgtgatgcttcttaatataacatccttgtgaaaagtttt

SEQ ID NO: 207401 - DNA, 448 bp, Glycine max
agcttggatttcctttgctccggaaacctcttctttctcatttgaacccaaacccaatctccgggttggaaaacaacctttttgcgccccttgtttgcttgtctagcatagctctcatttctcttttcaatttgggccttgactctttcatggagctttttcccatagtccactttggcttgtccttccttatgcttaaaaactgaaatattaggcattggcaacaaatcaagaagagttagtggattgaaaccataaacaacctcaaaaggagaacaactagcggtgtcatgcacaaccctattataagaaaattcaatatgaggtaagcaaacttcccaatttttaagattttttttaaatggtccttagcaaggtacccaaagtcctattcacaacctctgtttgtccatcccattgagggtgacaagcagtagaaaatagtaac

SEQ ID NO: 207402 - DNA, 430 bp, Glycine max
  unsure (1)..(430): unsure at all n locations
tcggcagaaagtgatgaggtacaagccctaaaggcagaacttgaaagatctccgggtagtcgaagagaggttcaagtccatagccatcaaagtctgaaaagagtatgatgaactaagggatgtcaatatggccaccgctgaagccttggaacgagaaaccaagaaggccagaaaggaagaaatganccaagcaatagttttgaggggctttatagggcagcaatagtgagctcaaactccgaagaggtgaaaggaatcatcacgggtcaaaggcatgatctggaaggacgagctaaaggcttgccttangtcgaaaagaaatttgtcccaacagctaagcgagactgaagggaatatgtgggccatcgtcgatgagtgcaaagagaagctaaatctagcagcgactcacgagcaaaggctagaggatgag

SEQ ID NO: 207403 - DNA, 409 bp, Glycine max
ctatgtggagttcgcgaattcgatggttaaaatgggaaatattcagccccttactggggatcaaggtgaaattcgtgttagctgtaggaaagtgaacaactattgaaggaaaataagttgtgattagtagaaatctggaggctaaaaatcgttggcatttgtattggatattagtatacgtgtttaagccctgctttgattgtgagattatctgtaagcgtggataaaccattgtaaagtttatggaattaatatgtttaaaaatgggattcttaattttggaagatacgctatatgtttttcgccaagctggtgaagcctgatttcaatttatgtttatgctttaataagaggttatagaaaatcaataaattatgctctataaattagagactattcatggtgtaat

SEQ ID NO: 207404 - DNA, 446 bp, Glycine max
agcttcttgacttgtcttggaaccagaccacaatctgtaaccccaggtacctgttcatgtcaagaggtattaggaaaatgatatctaaagaatttagaaaaaaacttagcactcagaatcaggctagctaatacaacttcaaaaatgtagtataccagtatcatctcaagtccctttgtcaaaccaacaagacgaggaagtcgctgtgttcctaagacaatttaaaaccaggttagcaatactaaagaaaaatataataatgacaattagtcacaagaaatgcaccattactcatggtctaacttcattttacaaattattctaggcctatctaacatgtgaactaaggtattaaaccaaacttgtagttaattaataaattcattataattgaacttcaaacagctttcaatgtaatgcatgtcactcaacaatgagcagtaaca

SEQ ID NO: 207405 - DNA, 431 bp, Glycine max
  unsure (1)..(431): unsure at all n locations
tcaattcacttgagtcatctctaacaagggttaaggttacctcatggaatcctataacaactttctggttcagctactacttagaggcgtctaatcttaatcttaggtttcctctcatcccaaaagcaacttctagccaagaaggatctatagttatctctcaccgagacgtagcataatctataggggccatctctcatnctaagctaaaatatactaaaacgtgtagcacgaaaggtgattcgtaagggtctataacaaccttaagatactccacatactccaacctaactcgaaacacactaaatcacaaaccacagaaaccactacaagagctaactcagggtgagagatcctatccatgcattccatgaacacataggggcattgatcttgtcaagacatgtccaggtacacgtagagaccatggc

SEQ ID NO: 207406 - DNA, 451 bp, Glycine max
  unsure (1)..(451): unsure at all n locations
agcttcatgatgatgaacctagcaattntgatgatgtcaaaagcccaagtgatatattcaatacttcaagatcaagcatcaagaatccaatccaagattcaagattcaagggaagaaatcaagaagaaacaagtcaagacttcatatggaataagtattaaaagatttttcaaaaaccaaatagcacagttttgttttacaaaataattttctcaaattttctcaagttaccaaagtgattactctccggtaatcgattaccagttggcagtaatcgattacgagtaaccagattgggtttcaaaatgttttcacatgatttgtaacgccccgaaatgatnttcacatagtgtaatcgattacactatattagttatcgattacaagtgaatctgaacgttggaatttacaatcaattgtgaagagtcataactcttcataaaatacattg

SEQ ID NO: 207407 - DNA, 361 bp, Glycine max
  unsure (1)..(361): unsure at all n locations
tgtgctnttcatccncttcattctcttctccctttgccaaatttatttcgccaagtactaaccgcctgaattctttttgtgtctctcttctcctttttccaaaagaacgaaggactaaccgcctaaattcttttgtgtctccgcttctccccttggtcaaaagaaacaaaagaccagctgagaatctttgatcttcctttcctaaacaaagattcaaggactaactgcctgaaattttttgatccccatcacaagtatcaaaggttaacagcctaagatctttgtgcacacattgagggtacatctttgggacaagtaggggacatctacttggttgactgaaacagaagggacatctctt

SEQ ID NO: 207408 - DNA, 369 bp, Glycine max
cctgctgcatgcaagctttgagcaaatacaattacttaactttttactcggatgtctgagtgagtgctggaatatatccaaaagctcgacattgaatgtctaagctctgagcaaattcaaacgacaataactttttactcggatgtctgattgagtcccgtaatacatcgagacgctcgaaatggaataccgaagccctgagcaaattcaaacgacaataactttttactcggatgtctgattgaggccggtaatatatcgaaaagctcgaaattgaatgtagaagctctgagcaaattcacacgaccataactatttactcggatgtctgactgagtcccgaatatatcggaacgctcgaattgaatg

SEQ ID NO: 207409 - DNA, 410 bp, Glycine max
tcggtattccatttcgagcgtctcgatatattacaggtattttttagacatccgagtaaaaagttattgtcgtttgaattttctcatagcttcaacattcaatttcaagcgttccgatatattacgggactcaatcggacatccgagtaaaaagttattgtcgcttgaatttgatcagagcttacggtaattctcatttgtgagcgttcttcatatactttacgcggacctcaatcagcacatccgacaaaaaagggtacttggcgattgaatttgctcagagcttctgtattccatttcgagcgtctcgatatgttaccggactccatcacacatccgtattaatagttattgtcgtttgaaatgtgtcagagcttctacattcaatattgagcgtcttgatatatacg

SEQ ID NO: 207410 - DNA, 432 bp, Glycine max
agcttaatatttaatggtattttaagaaaaagcccaagccaaacttcattaattttaacagaaacgcaaacacaaagtaaacaggcagaaaatcataagacatgcaaaaagttatcattaattttcagttgtttttagactagctgttgtctaacatgtgtaatgatgagacaatgttgaatacttgtaatattgtttacatgttgtaacaaaagtattttgcagaatgtcccaaaagatttctctaaatctttccctctccctggttttgtaccttcagtttggactttaagctgttgtagttgataattggtttgcaggctttactgacaaagtcacaaatctgagaagaatgggtgcctttaacgcatgagttactggcacacacaaattcatcattttattgtatacaaaaataattaccttctcaat

SEQ ID NO: 207411 - DNA, 336 bp, Glycine max
caacacgtttcttcacaaatgactatcatgaagcagtagactatcatgtctacccatcacatatcccaaaaccccatacccacaagctctaacagacaaagaagtccacgcaaacctgagatttcaaagtgccactcgtagacacgcactgtacgactccggagagcgcacttctcgatgcgaagcaaaaatgatggccacacgttggagctttgttgggcggcactggcggaggaagaagagaagaaaaacgcttcgtgagagagacggagagcttctgaatttttatgctatggctgattgaagagagagaaacgctatttggttttaaataaa

SEQ ID NO: 207412 - DNA, 437 bp, Glycine max
  unsure (1)..(437): unsure at all n locations
agcttctagaaggagatcatctcgatgttctatgcttcttgaagggggcagtccatgaggaatctccttgggaaagacatctttaaattcctgcaataagggttgaacactaggagaaacataaatagttaactgattagaattatcactctctctctcttgtgtatcactcttttcctcgggtgtatcactcttctttttcatattcctttgtggtgcctcactattttctttctcttgttctctcttttctctcattctgatttggtcatcacacacttttctaggggatagaggtttaagagtaaacgaggaagatttggctattcgtctgtagggctcttctttgttacggntcaataaacgttgcatttgtgtagtccacgcgtccagaaatatgcgctgagatttctccagttgatgatatacaccaccat

SEQ ID NO: 207413 - DNA, 430 bp, Glycine max
acactatatgaaatctcagcttctacttatgtggcagggcgggcttccttcaccttcttttctctaacgcgaactttgaccattgttctttctttccgcgatgcttcttttcatgtccgcctgagtgggcgtatagtctataccatactaatcacgatgtccttggtatttatcatgctgtatgccgccgtggtttttgctaaacccatcccgggttcataaccgttccccaacataactcgggccatcattaccgctgcatcggacagacaatgctgtccaaagagggagtccacggaggaaatgctgaccacctcaaaagactggaaagcagtttctaacgattcttctgcggcttccacataatgcatggaggatgggcagcttaccaagatatctttctcgtctgacacgatgaccaagtgcccct

SEQ ID NO: 207414 - DNA, 429 bp, Glycine max
  unsure (1)..(429): unsure at all n locations
agcttgtaacctgaatagaaaatgtccaacttttttttagaacccatttgttttttgcagccactatatttgtccttcctctagttctaatcattcaccatttttagttaagaactatgatgttcctagttcctagactatgtttcagacatttaagaccttttgctttagtatcgtcaaccatagagagctctgtcaatgattccttagtgagtctagaaattttggggaaaaattgaggataatttgattaagaaaaatagtgtttagtaggttatagaataggaattcattctgaaatcgctttaagttgtgtgtttttagaaattcactcaactttggcacaccaatgtcaaatgccaaccattcggntctaatagctttcctttttacgaacttatcacctaaagctataaacaaatgagaagt

SEQ ID NO: 207415 - DNA, 408 bp, Glycine max
ttgtgtggtgcttcaatggagaatgagggaggaagaaaagcatcttgagggagagagaaagctgtctgaaaaaaaatgagggctgagtgaatagatagaaaagctttttggttttaaataaaaaggctttcctctttttctattattttattcaagctctgccacatgtgcatatttgtatgtgggagcataaaatggtgcccacttttactctttttgacatgtgacccatactcagtcacaaaagtgagaaaaatctaacctttgaaacgctaaaatcctgcctcggtttgcgtgtcgtttctctgattccagattctcgcgtttctctgcgcccgccggggccagttgtcgatagcaagccatatatatatcacaacgctcataataaaaccctcagccgtgtct

SEQ ID NO: 207416 - DNA, 395 bp, Glycine max
  unsure (1)..(395): unsure at all n locations
agcttcatgatgatgaatcatgtatgaattatgtagttntgatgatgacaaaaagcccaaaagaataaaaggtctgaacgttgaaattcaaattcaattgtgaagagtcacatcttttcataaaatgcattgtgtaatcgattacatgattatggtaatcgattaccagtgacaagttttgaataaaaggtcaagagatgtaactcttgacattgatttcttaaggttataactcttccaatggttttcttgaccagacatgaagagtctataaaagcaagaccttgacttgcattcacaacatcttcttgaacaacttttgagaaacctttaaacctttacaacctttacaattctttaagaattctttcctaactcatcttcttcttcttcct

SEQ ID NO: 207417 - DNA, 338 bp, Glycine max
  unsure (1)..(338): unsure at all n locations
agcttaatgaaaagaaaaacttacctcgattacgactattgtgacgacgacgcgacagcatgaccggcggtggtggcaagacgaaacaccaatggggatcaacatgcgcggagtagaagcaacccaatattacggaaagtactgtagcggcaaggatgggggaattccaagagcttttaaaataagggtgaagggcattntttccatttcaccaaatatgttgggtgtaccagcagttgggcaggtgcccaaagccatgatagagtcaactttgaggcccactccacttcgacagccaaacccatttttttgtcagtaccaactttgtttatttttta

SEQ ID NO: 207418 - DNA, 413 bp, Glycine max
  unsure (1)..(413): unsure at all n locations
taacagtatgctctggcatatatgtcattcatcgtgtgtgaattatactaaagacataacaaaattagtagggtgttcatgcgcacatgtcacttgttgtgggtgacatgtactggagtcacaatggtgatgcgctcttgcatgtatgccactcttcgtggatggcacacactgtgaagggcttgttaaagatgtctcanntgcgcacatgccactntgtcgtgtggtggcacacacttagagccgtgatagtaatatgcacttgcatgcatgccactcactgtgggtggcacacattgaaggtttagtaggatgctcgtgtgcacatgtcatttgtcgtgggtgacatgtattggagtcaccatcgtgatacgttcttgcatatgtgtcactcactgtgggtggcacacact

SEQ ID NO: 207419 - DNA, 87 bp, Glycine max
gccgcaacttaatattttgccccctacggtcattctgctagatgacgacatcctaatctttaccaaggaatcaatatcattgtttaa

SEQ ID NO: 207420 - DNA, 425 bp, Glycine max
  unsure (1)..(425): unsure at all n locations
gttattagttaaagttaatgaaacttggtagtttgtcaataattgaacacaatttcagtggtagagatgaactagtataaatctttgtaacttatatgtttccttgtgtttttctgctttaaagtgacataaggtttaaatttgattttgttttggaaagttctatttgttttacaaagtttctcttcaaatgataactttgttttgttaaaaaaagacttgaaaattttctaaaaccacaattcaatctctcttcttgtgatatttgcatttacaatatatatatatatatatatatatatatatatatatatatatatatatatatatatatatatatatatatattctaacactcatctaattgtctaaggtctaattangagtagactgtgcccaaaaagaaaatgcacataatgccgcat

SEQ ID NO: 207421 - DNA, 405 bp, Glycine max
ttgatggtgttgagaagaaatcacatgtttgtcatcatcaaaaatggggagaatgttaatgtatgtatacatgattttgatgatgtcaaaagaagaatcaaacaaggctcattttgctttaagattaatacaagattgtttcaacaaacaaagccttgattcaagatttttaagatcaaccttgcctcacaatgaaaggtttcaagtcattcaaggcacatgtaattgattaccaatacatgtaatcgattaccaatggtttgaaagtgtgtaatcgattacacatcatatgtaattgattaccagagactctgaacgttgggaagtcaaattttaaatgataggtcacaactgttcaagaaaaacaactatgtaatcgaatacactaattctgtaatcgatgac

SEQ ID NO: 207422 - DNA, 378 bp, Glycine max
agcttattatttactttattttgtttattttagtatttcataaaaagagagctctatttgactccctattaaataaataaataaaacatcctttttattttctaaaaacatatttattttatttaccttaaaaccattattttaattaataaaactatttattcttatttatttaattacaaaaacctcattgtttttcaaaaactctatttatttaaaaaaaaaccatttttaatttattttatgaaaaacgggatgttatagaagttgatgaggaagaagcctagcttgtttcaccaatcacaattgtaccacctcatatgcaaaattttgaagaatctttttttcaagattttgaatacgagcatagcttggatt

SEQ ID NO: 207423 - DNA, 387 bp, Glycine max
ctaatgggtataaatgttgcaatatacgaagttacaacaatactgtcaatgaaattcgatgtgaaaatattatgttcttaataataaatacttaaacaaactattttaaggggcatttgttacctatgagaaactttctaagtgtgagagcttagatgcattttgatatataccattttataatggtagcaacggttaagaattcggattaaaattattaagtgagtccaaaatgtgaacatggatataaaaataataaatttcatatgagttgaaattgtgataaaatgcattatacacatggaagctaaaaactctcataatgaaggttatatcgaattgaaatagtatatgtgacggctgatgaaaaggattatgtgaagacat

SEQ ID NO: 207424 - DNA, 451 bp, Glycine max
  unsure (1)..(451): unsure at all n locations
agcttcaagaaaaagatggcctcatcatatttcttatttccagaagggaattctatcaatagacctccaatctttaatggagagggttaccactactggaaaacccgaatgcaaatttttatcgaggcaattgatctaaatatctgggaagccattgaaatagggccttatatacccaccacagtagaaagagtttcaatagatggtagttcatcaagtgaaagcataaccatagaaaaacctagagatagatggtctgaagaggatagaaaacgagtacaatacaacctaaaagccaaaaacataataacatctgccctacgaatggatgaatatttcagagtttcaaattgcaagagtgctaacgaaatgtgggacactcttctattaacacatgaaggaactacagatgttaaaagatctangataaatgcactaactcatgagtatg

SEQ ID NO: 207425 - DNA, 420 bp, Glycine max
tgtctcagcgttcgtgcgagacggagaccaacatgctagctatcatcgtcaagtaccaagaagatttaggtctagccgcggcccactagcataggattgcggacgaatatgcccaagtatacgcggaaaaagaggctagaggaatggtgatcgactctttacaccaagagcaaccattggatggatcggtttgttcttaccttgaacgggagtcaagaacttccccgattgttagccaaggccaaagcgatggctgacacctactccgcccccgaagagattcacgggcttctcggctattgtcagcatatgatagacttaatggcccacataattagaaatcgttaggaaacttgtatggtctctcagaccttgactagatatgacttcctttttgaaataaaatgagttggtcccatg

SEQ ID NO: 207426 - DNA, 450 bp, Glycine max
  unsure (1)..(450): unsure at all n locations
agcttgatggcacactaagcctcacatctcatgctaagcgcatattgcagaaaattntgtgttgtcgaaagcgctaagcccagcctgctgcgctaagccccagatgctcactggaatttgcaacttcaagttgggcttagcatgaggttaggctaagcgcttgggtttttaaactctaacgtcacgtgggcacgctaagcgcagctctacactaagccttccatacaaatttcaatttttaaaaaaactaaaggttgagtcacttgggtgttacccaaaaaccattagcctctctgcctttgctaaccttgagcatttgtgcctttttgctgcgtgcttgaactgacttgtctgcatcttccttgcttcattctgcatttcaatcacaatccaagtaagtggatacatttccatttttaatnttcattctttaaaccatatgatagatga

SEQ ID NO: 207427 - DNA, 422 bp, Glycine max
ctaagctgctccgagatgaaggcttatggctgcctaagataagtcttctgatcgcatgttcgttggacactagtgatcggagacttatatctacttttgcggagaggtaacataaggaaactagtagttttcatcttccagtatgagaagtgaccattaccctggatgatgtggcatagttgttatcattttgcccattataggcgcattccatagctttgaggattttcttgtggatgaagtcgttttcctgttagtggaatttcttgaagttagttcagaagaagctagagctgagacagtacaatgtcatgggacatatgttaggatatcctgtgttgagacatttatcgtagcacatgtggcgcatgacagtggattgtagtatctcgagcatatttgttgtatctagtagattgcac

SEQ ID NO: 207428 - DNA, 379 bp, Glycine max
agcttcaagaaagtcctctccaagagtgactaatgaggctgttcataaggctgtgagtgcttattttctgtagttttctgttcaactgcttaattcagttgagcaagatttgttaggaaatttattgtcttgttcactgttattgatgacatcttttattctcttctcaggctgctgcattgaagggttctgatcatcgtcgcgccacaaatgtcagtgctagattggatgctcaacaaaagaagttcaaccttccaatcctcccaaccaccacaattggatccttccctcagactgttgaactgaggagggtgcgtcgcgcatacaaggctcacaagtaagatatgccttgagttgataggttggcttgtctcttgac

SEQ ID NO: 207429 - DNA, 334 bp, Glycine max
tgagatgaggaagtgttgaagggtgaaacttcctgcttttattgttgactcacatattggtacctggagatatgtcgcgggggtcaggagaccttggggacgtcaggtggggtgctattgcccaaaaccaagcttgaccaatcccgaaccaaacccgggctatgtaggaaactggatgacctaacagcactctgcagcacagataaagaacaaaccacagcaggagctgggggtggcagctggaaactgtgatatggagaatggcttggaacataccaagggggtagtcgatacaggttaaaagagacggaactaaaggctttggaatcatacc

SEQ ID NO: 207430 - DNA, 411 bp, Glycine max
agcttggtgaacagattaatattccatcttttatgcagaggcttggttgtttgattttaaaaatcctgtgtttgttgaatggtttgaaatgatcgattgcatgatttgagtgaagtgtagtgagtaaatcttatgctttgaatgtgcatgcagagattataagagaaagaacatggattatgatcatgactgaaaatgttagttagtttgacagattgattttgaaggtactcattagccacaacccggtgagtgtgtgatctttatttgtgagagaacgactagcattgagtaatgatctttgtatgaatctctaattatggaatgaatgcatgagtctgaagatgatgaaagtcatgcttgattgaacagtctcttatcacaaagcttaccttatgaatgattgatttt

SEQ ID NO: 207431 - DNA, 379 bp, Glycine max
  unsure (1)..(379): unsure at all n locations
agctntatataagggttttattacctataattntgcagcattgccgagtgctttgctttccttgtatgtacaaagcggtccaatccagtcattcatagaaattcaagagaagccagtagttcatcttcaactacgattacatatcttgactggaacagtggtttagtggtttctacagacgaaaatcaacaccaggggagaatgtgtagccttcaagacataggaggtcattttatgaaagtaccaattattgtattccaggttcttctttgtatgcatctagaggtatatgataatgaattgtgtgtttggccagcctttggaatattgtttttggagatctgaactgttttgtatttcacggaacacctgtctgtgc

SEQ ID NO: 207432 - DNA, 510 bp, Glycine max
  unsure (1)..(510): unsure at all n locations
tggctttgaattccatcctgtacgacactcgtgacacacacgcaagactcaaagcgtggtgtgaagatgtctagcatatntcatgacaggtcactatgcanagtacatgctctactgtatagtttagatgtggaagtaccattagagctcgttatacaatcacgtactcataacttcactatatntgcgcgggcacaaagttaacctgacgagaatgctttgtcagtgagagagcaaccatcgtaggatgtatgctttatgaatgtagctaggtttatagtggcttccatgagtttgagagtacatcatgagaacactgatatgaaaataatataattcaatgttgtgccttattgatcaagcgcattatatacaaggaagcagattactctcataatgcaattattttgaaaactgaatatactatgatacgtgcgatgaagaatgatatccttatacattcgatgccaataaatctatttctatgataacgtgatcacatgtctaaag

SEQ ID NO: 207433 - DNA, 386 bp, Glycine max
  unsure (1)..(386): unsure at all n locations
tcgaagagggtctgagaacatgaaaatttgattatcctgctttgatgaatgggaagcctatggcaaatggagagaataagaatgagggaggaacccatgctgtgactatctgtcctatatggccaaatttcccaccagctcaacaatatcaatactcagccaatatcagcccttttcattacccaccaccctatcagccaagaacactcaatcatccataaaggccacccctatatcagccacanagcctgcctgctgcacattcgataccaaacaccaccctctacacacatcataacacctactagggaaggaatgttctagtaaataagcctacagaattcacccccattccaatgtcatatgctgcttactcccctattact

SEQ ID NO: 207434 - DNA, 393 bp, Glycine max
cgaaggcatgtaacccaccatctcttcatataacaacactggttttgagatcactatcatttatatcatctcgcttatcatcattgacggcactacttagctgcctaatctccacttgacgatgtatggagatcattatctctcttgcacatgttctgtattgtatgtatatattgggtgccatatatggaattgtaccgatactacctaatgaatgcaaccattaggttcttccaggaatggatccaagaacgttctagattagtataccatgtgacggctgacccagcaagaatttcttggaataaatgcatcaacaatttttaatctttcgcgtatgcccccattatcctacagtacatcttcaggtgactcttgcggcaagtagtcccc

SEQ ID NO: 207435 - DNA, 566 bp, Glycine max
  unsure (1)..(566): unsure at all n locations
aagaatgactcttcgaccgatcgctctatataantcnantacttanttataancnanttttttctctcctctcgcggaccgcatgacnccntgttgatgcccgtcgnagtaccctgcgatcctctagatcaacctgccgcatgcaatctttaggtacacagatatagtattacgttcttcgagattccaggctctgttaggactgtaatatattgatcgcacacgcactccacatcgaccgattgaaattgaaaatggcaaatcaagcctggctcttatagactctccaagactgcccgagaagaccattcacaagagtcatacctttacagaaacttaaaaccaatttaagatataaacacatcttgaagagttacatcttttgatgtattcataaaccccctcctggcagcagacaacaaatcacagtaccgactacacaggctttacgtgaaaggacggacccttccatctgaatgtgaattccccgtcaaggactggcatccataccatactatgatgcaatacacctctgaattgatgaacgcggaactcatctgaaaccg

SEQ ID NO: 207436 - DNA, 409 bp, Glycine max
agcttcctttttccctttgattaggattatctttgaagcctactgctgtaagtttgcggagcttctgaagtcaatttccttaatgtgtagatgattctgtcgatttcaaatctacctagaaaagatgctttttgtcgatagtttgctcctgcagtgttgctaccttggagattctgctgtaatgcgtaatgaccattactatataggattttggcttaactatattcttggacactaatttcgtgtattatctatgtgctgtcttattattaacgaacaacacatgttaagatggaaattctcaaaaggaccaactcgactacttttaatcctaggttgagatcgtagcaactaaacatgaggaaagttaactttttatttctttcagataaaggtcactcaatatgat

SEQ ID NO: 207437 - DNA, 293 bp, Glycine max
gtgaagtcatgctgactatacaatattgtgggaataatatatggcagaactagaactcaccatgcattaagaaactaagaatgaaaaaactttttaaatcgcaacaagatataacctgaaccctcacagttgacaataccttatcctatgacaaactttcgtaccaattaaatatatatccataataaatataaactaaacacgacattaagcttgtgaacacttaataaatttggaatccaacgcatttactatagacacagaatacatttttgtaagtacagtataaatga

SEQ ID NO: 207438 - DNA, 252 bp, Glycine max
agctttataacaatgagctgggaccgaatttatgtcagcttcagtggtagtatgcaaaaaattctcgcacatagcaccattcaggcaagtttctacttcctgaaatacattatgtaggaatatgatggggtcttcaatgtcacacattttatgttttgaaaatctatacttatagcatgatggcatattatcacttaatttaagccttaacaaagtattctgtattctgtatgcttgaaatttgttttatat

SEQ ID NO: 207439 - DNA, 363 bp, Glycine max
cgcgcactctagaaacacaagcttattactctctatacatgtattggacgcagtctgtcgcttatgtgatatgagatcgcagacttatctgatcttctgataagaatacactgatatcagaacacaagaatataccgatattgtttactttctgagactgagatgacactaagcagatctactgcgacgatatagcgatcaagaggtagaatagccttattatgttcgacaacgacaatatgttaccagtagcctaaataaagtataggcaggagaggacgccgtgtgcctactcactaaatgaggcatcaaacactttctcatgcattcattcataatgttaaaacgtgatggagaatgcgc

SEQ ID NO: 207440 - DNA, 305 bp, Glycine max
  unsure (1)..(305): unsure at all n locations
agcttgtataggctacaacaagaaagtgnttcttaagaatgaaaacgggtaatatagataaattggccatggtaaacaattacactatcataagtgtgttgctcttttcctcattgcttttggttttcatgagtgcccaacaacatcatcatcgtattactttgcttttaacagaggccagacagctgcttctgcaaataagttgacattcgagaataaaatcatgtaatgtaattcatgcccctctattcatgtgaatacttanatacacgcatgctttgtttgcaaatctctgggtagagggt

SEQ ID NO: 207441 - DNA, 401 bp, Glycine max
  unsure (1)..(401): unsure at all n locations
tgaaagtgcataancttctaaacaagggatgtctcttattcaatgtcgaatttaaccagctgggctgtaataatatattttcttgatatgataattaattctacgtgcatatcagcgtgtatgccaaattttattaattttttttacttaaaatcccatttacactaataaccgcaataacacatactaattatgtaatgagtacttcaattagcctttttgctttcttaatcaattcaaactattatcctttatccctatttctaaaagaaattctgatagtttttaaagaaaaacttaatttaaaataatcttttgttttataaacttgaaatacaatgcatattttaaaaaatatttatgtgtattatgaactttaattttaatatatgttatatatt

SEQ ID NO: 207442 - DNA, 348 bp, Glycine max
  unsure (1)..(348): unsure at all n locations
agctntgatggagtaccctaacttaaaaagtataccaacccactgaaagaatagttccctacaggagtgctgcttccctatagaggagtgcggtacagggagcatggctaagtgcacatgagagaggttatttttgttcttccgggtgccataacaacaataatcttggtatattttactccaaaacacaaggttgtttttaaaattattctgttattccttttcaaagtagttttatatttaaatgttctttgtgctgtagataaaaactgaaaatcagagaataaagttgagtaagcaccagttttcatggggtttttgatagtagtaccttgggcgggacatgaa

SEQ ID NO: 207443 - DNA, 431 bp, Glycine max
tattatgatttctcgattaacccattaattaatatatgttactctctctccttttgagttatgggttccctggcctaacgcaacattgactatgaatacctttatatcagtactaaagaatatactgatctgaaaattgttcaagtacggagagaactaaagctgaattcttcgttgatgagggggatctaagctcaagtaaaaacaattattcaaaacaacaatgatagtaatttacgaaaaaaagaaattatgaagagggaggagaggacatggactccccacacactagaagaggcatcaatcactaactcatgcatccattcataatgataaaaagtgagggagaaaaagcttggagtgatcgatttcatattcatgcaaaaagagaggtagaaagataacatacatttgcatcaaatcatggtgaa

SEQ ID NO: 207444 - DNA, 378 bp, Glycine max
  unsure (1)..(378): unsure at all n locations
agctnttaactcggaggtccgattcaagcgtattatatatcgagacgctcgaaattaaccaacggaagctctcgagaaattcaaatggtcataacttttaactcggaggtccgattcaggcgcataatatatcgagacgctcgaaattgaacaacggaagctctcgagaaattcaaatgatcataacttttcacacggaggtccgattcatgcgcataatatatcgagaccctcgaaatttaacaacggaagctctcgagaaataccaagggtcataacttttcactgggatgtccgattcaggcgcataatacattgagacgctccaaattgaacaacggaagctctccaaaaattcaaatggtcataacttttcac

SEQ ID NO: 207445 - DNA, 414 bp, Glycine max
tgtgcaaatcaaatcactcctacatttcatctctagcatgcattttctttctttacccactcctcacgtttggttttttagggaaaaacaccataactaaacgcgccgcaaggtatccctatcgcaccagatccaaatctaaacaggggatcaaagagaccagacagagaagccgacatgtcggctctgaaagaacaaatggcctccatgatggaggccatgttaagtatgaagcagctcatagagaagaacgcggccaccgccgccgctgtcagttcggctgccgaagcagacccgactctcttggcaactacgcaccatcctccctcaaacatagtaggacggtgaagggacacactgtggcacgatggcagccctcacctgtgatacaaccgagcggcttacccttatgga

SEQ ID NO: 207446 - DNA, 392 bp, Glycine max
  unsure (1)..(392): unsure at all n locations
agcttcatgatgatgaatcaagttgattcttgtagctgtgatgatgacaaagatgatgaccaaaagcccaagagaatgatttcaagattgagtccacaagttcaagatcaagtgtaatttcaagcttcatgagaagaaatcaagaagattcaggaatcacgagaaatttgatttctagattcatgagaagatgaattcaagattcaagagaagacatcaagaagacttcacaagggaagtattgaaaagatttttcaaaaaacaaacatagcacaattttgtttttcaaaagagtttttctcaaaattttctaagttaccagagtgtntactctctagtaattgaataccagcttcctgtaatcgattaccagtggcaaagttcgatttcat

SEQ ID NO: 207447 - DNA, 426 bp, Glycine max
  unsure (1)..(426): unsure at all n locations
ngtaggattatggtgtacccatcacatgtggtactaggtggctgtcggtcgatggtgcaagtcaactctccacatccacaaatcacacataaacccaccatccccagttgcccaccttcattgagctcacgtactcccacgtagcccttatcctcgttcctctcaatgttgggtttccatacaatcatactcagagctttcacaacatccaagtaattcaacatccaagcatgatgaactaacacagccaagaaaacagagcagaggcagaaaactttgcccaaaacacaaatcaatatcacagcttttcacactcaaataccccaataacattctcttcgttccaattcgttaaccgttggatcgactcgaaaattttactggaagtctctattacataagtctacattctgaccgttgggatct

SEQ ID NO: 207448 - DNA, 363 bp, Glycine max
  unsure (1)..(363): unsure at all n locations
agcttgagatgaggaagtgtagaagggtgatatcttcctgcttttattgttgaccacagagtggtacctggagatatgtcgcgggggtcaggagaccttggggacgtcaggtggggtgctattgcccaaaaccaagcttgaccaatcccgacccaccccgggcatagtcggtcagtgagaacctgtgatgtacctaaacaggcgagctcctggcagtcaacagataaaaggaacaaagaccacaaagcaaagaggcttgtggtggctggccagttgtgaattttgtgtgatatgtggattatggcctctggtaatctattaccaagggtgggtaacngattacaaggcttagaaatgaagaca

SEQ ID NO: 207449 - DNA, 466 bp, Glycine max
  unsure (1)..(466): unsure at all n locations
ctgattggtgcattagcngacacgtgtagattctcaagctctcgtgagataccttcctggagaggtttcttggaaaaaacttctttgttatgctagagttaaactacacgcccccttctaataacaagccacgcctcctggaaaggtttcttttggaagactccgatagaagctagatcttagctacgcacctctttataatgctctaacctcacctccatgatatgagaggctcgagcttatacacaccccccatattggggctatgtacaccgcctttggaaactcacgaggttcccacaaataggtgctcgtgctaggactactcccaatggcgtgggtattatggtgaacctcttttctaaaagggcggcaacaacgcggcccagaagaaagaaccgtttctgactatttatttacaaagaggagtggctccctcctcgaccggcgggctgaaatatcctgt

SEQ ID NO: 207450 - DNA, 327 bp, Glycine max
  unsure (1)..(327): unsure at all n locations
agcttctcatggctatgagaggctaaaccctcattgttgggagcttggcatgccaactcttggtattcgtttagcctatttcatacatttctgatcttaatgcaatttattatttttatctttgcaaagaaatttgggagaaaagaataaataaattatgctcttcatgcgggaaatcaaatataaagtgtcttagtagatgtgggtggaaacaaagatttcattagatagaanaaaaatcattaacattgcatcacaagtagttttggcatgctaggctccaacataatcacattctgaattcatctttcggcatttaaattattg

SEQ ID NO: 207451 - DNA, 364 bp, Glycine max
tagacaaaacgatggtcagatggagaacagacagcttcaaggtttatggagaacatatagagcaagaaagcttagatggagaagaagacagcgtgaatgagaagatagcgcaaaggagatgaaacatacctaagtatggtggcgaagggagaagagagccaatgaacgagtggtcacacacatgtagagcagatgagaccttaggtgacgaataagaagagaagcgcgagttaatggaaaagacgggggcttataggctaccatattttaaaaataagtaacatcggttttaaaaaatcgagtaacacatgagttagtacatggttatgaaaactgagtacatatcaacgtatatcggtttaaa

SEQ ID NO: 207452 - DNA, 383 bp, Glycine max
agtgcactgccaaagcttttattccatcatgtgtttgtgcattgaagaactccaattgaggcacatacatgaaaacctctgatgctcctgtgagcacatattgtggcacttgccagaaaatggaaagtgaacttgacccatcacaattgctacaatcttttattgcaaacttcaacctgaatttctctaccaaccctgctgagaccatggccatgattgcaaggactagaccaattcccatcctttgaagctctgtgagtttggatttcattactttggccacaaaagggtcgagggcgtgcctatagatgaagatgaagaatgccacgcccaaaatgtcgaagctggacatgcttgctggagggattttgaaacttgaaatt

SEQ ID NO: 207453 - DNA, 395 bp, Glycine max
cggttcttctatttgctattgccgctgcagcattttacacaggctcgttgattaaaagatgtatggacaagaattcgaacattaaaacctacccagatataggtgagcttgcatttggaaagatggaagctatatatcaggtcatgtacacggagcttattgtttaatagggttcttgattctggaaggcgataacttgaataacttgtgccccattgaagaggttcagatagctggcttcgtaattggtgggaagcaactgtttgtgatattggttgcccttatcatcttgcccacagtttggttggacaacttgagtatgctttcttatgtatctgcaagtggagtgtttgcttctgctggaatcatcctatcaatatcatggactggaacat

SEQ ID NO: 207454 - DNA, 435 bp, Glycine max
agcttctggaaggagatcattttgatgttctatgcctcttgaaggtggcagtccatgaagaatctccttaggaaagacatttttaaattcctacaataagggttgaacactaggagaaatagaaatagtaaactcattagaattatcagtagaaattttactgtctttgaaatactgtagattgagtggttcatgagcaggtaacactttcctcacttcactcgcctctgcaaaataattaaattttctctcatgtgtatcactctctctcttatgtgtatcactcttttcctcgggtgtatcactcttctttttcatattcctttgaggagcctcactattttctttctcttgatctctcttttctctcattctgagttgggcatcacacacttctctaggggatagaggtttaagagtaaacgtggaagattt

SEQ ID NO: 207455 - DNA, 371 bp, Glycine max
tagacaataagtgatcatcaattccaaaacatagggggagtgatctctatttttatacatatacattgcttgcttgtgtcttgattcatacgacttatactgtcatcgttaaacagggggagattgtttcagcaaatgactttgttgtgttgatgatgatcatgagattgatgcaatgatgctaatgcccttttcaagtctaaattccatactgtgattcgacattacaaggacacaacatcatgatgatcactagtcttttacgaagggaagttctaattgatatagccgaaggataggccacggtatttaagttaaccagtgttcttcaagagacttactctctggtgatcagtaccacagaatgtaat

SEQ ID NO: 207456 - DNA, 423 bp, Glycine max
  unsure (1)..(423): unsure at all n locations
agcttgccaggaagaactgtttatgagatttagaattattgcaggactcacttcaagaaaaagataagggctcacttcagctaaagatatgaagaagactccagaatacaagtggactatgatgtagttatttctggtaataagtagacaactatcattgccttgtgtacccctataaactgtctacattatatagaatcatgatatagagtttgggacatctagtctcccctgccaattaatccaatcctatgattaggaaacatgacaaaattaattaaaatctattcatctaacctactctaaattgagatgcaaaattgtactataaagggctaacattcaggtatcttcacaattcatccattaaaattgagtatttcagtccacttgaacanaatttcagaacattcatcgatccat

SEQ ID NO: 207457 - DNA, 286 bp, Glycine max
ggctcctccacctgctctaatagcccaaaagagaccttctccctttgcttttctatcaaggatttggccatttgcatcaactattcttgcatctaagacattgtcagctccaaggacatactttcatattatggattcatatgcacctaccgtgaaggctcttcacaccttaacttgtgcaaaggtcttgctggaaaccatgaaccgaacttttctcatatattttgtaatagaccttccccatagtggcacccgcttgaatccaagccgtgctggcttctatatt

SEQ ID NO: 207458 - DNA, 274 bp, Glycine max
agctttataggaagcactatggttaagaggtttggtttcaaaactacttcaagtgaaagagccaaaaatcactgtagtacactatgacagtcaaagtgcaatgagtttgaacaaaaaccaagtgtatcataacaaaacaaagcatgtgaatgtcaagtatcacttcattcaagatatgatcaatagtaaagctattgctattaagaagatatctacaagggagaatgttgcacacatgctcacaaaagttttaccctatgagaaggtcaactat

SEQ ID NO: 207459 - DNA, 170 bp, Glycine max
ggggggagattggttggatgtccatgtgagagttcttttgatgtgtaccttataaactttgaaataccttgctctttgtgacctatttttgcggagtatgtgtgtcaaacattggtcatttcgtacatagaataatttgtgaaagcatggaccaacaaagtgatactatt

SEQ ID NO: 207460 - DNA, 338 bp, Glycine max
agcttgtagcatatgcaaacggcaataacgttttactcggatgttcgattgagtcacgtaatacatcgaaacgctcgaaattgaaaacagaagctctgtgcaaattcaaacgacaatacattttaactcggatgtccgattgagctccgtaatatatcaagacactcgaaattgagaataaaagctctgaacaaattcaaacgacaataactttttactcggatgtccgaatgagtccagtaatatatctagacactccgaattgagaatagaagagctgagctaatccaacgactttaacttttactcgaatgccgatggcgcccgacgtgtttaca

SEQ ID NO: 207461 - DNA, 332 bp, Glycine max
  unsure (1)..(332): unsure at all n locations
ntaactcggatgtccgattcaggcgcataatatatcgagacttttgatattgaataacagaagctctcgagaaattcgaatggtcataacttttcacacggatgtccgattcgggcgcataatatgtcgagacgctcgatagtgaacaacggaagctttcgagatattctaagtggtcataactttttcactcggaggaccgattcaggcgcataatatatcgagacgctcgaaattgataaacggaagctcccgagaaattcaaatgcgcataacttctaactcagaggtccgattcaggcgcataatatatagagacgctcgaaattgaa

SEQ ID NO: 207462 - DNA, 342 bp, Glycine max
agctttggtttagttattgattaattaatatcaaattacaatgggtggcgtctactgtgaagtttttcagaaatggaccactggtgaggtaagccttttgtacctttaataggcggtcatcagcaggtgaagcacttcattggtttgtaaaaaataatgaaaaaagatataaaattggagtcaggggtaattttgtaaataggagtagtagcaaccaaataataaattaaaaaagagattttttatcttcaactttttcatttatattgaatgcgtgttttattttgaaatggtgataggtcgagggttttgattcaggatcaaatgtattggggggtggta

SEQ ID NO: 207463 - DNA, 409 bp, Glycine max
  unsure (1)..(409): unsure at all n locations
tgggttttgtattctaaatctttatggttgtttattgaaagcaagttaatgatattaatattcacaaaatcatcatttaagaactcgtcangtccaagcaattaatataattcactatttatatgacagaaaaatatntcacacggaaaatacttctttattaccacacatatggaactcgcctaatgcttattggcatagcaacaatgacttactttggcaacttgctctttctctgctttccagaaatgtttttgacctattattccaacaacatcatctggcgaaattctcactgtctcactaattttctaccatggagatcttggaaccattgtcactttttttaagtttcccctctgtatcgactgtccatcctgtatcatgatgccattgttattgattcatc

SEQ ID NO: 207464 - DNA, 438 bp, Glycine max
agctttgctagttttttgttcccttagaattatcatatttccctagtttatagtttaaggacttggtagtattttcaaaacaaataaccaatgcacttacatggattgttcttaatactcatgggttatattggttgtgccataacctttttttcttggatttaaaaagaaaccttttttttctctatattatttcttaagcaaataaagtgtatagtttaagaatcgcgatattaggttatttaatgttgtcatttattggttgttttctttattatcaatgtaattttccatgcatatgtattatactatcatatacaaatattctagatagcgatgtaggatcttacagtccgagttacaattctcgagtttcaaatttttaactcccatccgatcttacgaaaatctcgatttgacaccttgctctatatatat

SEQ ID NO: 207465 - DNA, 425 bp, Glycine max
tctccttgagcacattcacctgcttaacttaaacataaaactaaaagggatgatacatatctcaatgagtgctctaaagactctaagccaactctccattctagatatccttttcttaactctcatgctttctctttttcttatatacctcacgactattgccctagaacataacatttatgcgtgttggatcataccttaatctttacttaggccattagaattgatctcctataccaaatctaagagggtagaaataatgcattacgtttcccttgataatgttcatagtctctatatttgtagctatctataattctctcatcaatttctgtcatcaatttatttacataatgtaatctaaaggtttttgggtttctttgttattcaacttaagtatcactactcttaacatgcatgttatc

SEQ ID NO: 207466 - DNA, 417 bp, Glycine max
  unsure (1)..(417): unsure at all n locations
agcttaagctccttcaactacacaaggctcttaatatttgaagagtatcctagtggaaccttcacccgacgaagacactgacaaaaacttatcttctccttcttggacaaagtatggcaggctgggggcatataggttcattccatcactgtctagtccaagtctaagatttcttggctcattcccgaaatccggatacaaaccatcaatcttcttccactgggagcaatcagccggatgacagaccattccatcagaaatccttccatttgcatgtcatgtaaggtcttttgcgtcatcctcgttagcaaagagacgcttannaccttggaataattgaagataccacanaaccttcgctggnggacccttgttggagttntcatcagaaatgctntcctcttaatccttgacttt

SEQ ID NO: 207467 - DNA, 424 bp, Glycine max
  unsure (1)..(424): unsure at all n locations
nttcttgtaatggaaggctaagcctctctgttggggagttactattgaacatcttgatgtaatattctcactatctatttaatgttatttctctgcgtccattgcttttatctatgcttattttacatgcttgtggcttgatcacccatttgtatgtgtagttaggctttttagattggaaaatgcttaaaaaccttataacttgatagagcaagctagaaatctgtatgtctaggaatggagtgcagtgatctagtccattttacaccgtaggcttagtgcagctcttttagaacaagtttgttgaggaattaagaacaaagtctaaagagagttaggctcattcatgtgaggaatcatggtttgagtagtttcttagtgtaagaacactatggtaacgttaaatagagaaaaacaaatttta

SEQ ID NO: 207468 - DNA, 285 bp, Glycine max
agctagacgttgatgtagcttgtggacatgttcttgatgagctctattctaccactgtcgcttacataaggctaacagactctattacttattgtggccattccacctcccctaaaagattaaacactccattgggattgttgtactgtgccagatggaagaacagtattcgtgaaaaccccgctcccgccgtcaaatctctatactcgtgctggattaaccattaccctaacgtatgagacatgcttctctactctgccttaagcgttacgactatggctgctc

SEQ ID NO: 207469 - DNA, 428 bp, Glycine max
tgtcacttgaggacaaccagacagacactcgccctctcgacatctgtccatgacattaaccaatgaggaagtttattgctttgacaccaagagaggggtcatagtaaagtaattaacatcgacgatcaaactttatggatagcagaaacacgatattctgaacaacagtaggtggtggcatttgggttcatgctatctgatagaacaaggactttgaagacatgttctaataatatatttcataatcttgaaactgttgtatttaagctacagcaattggagcttgctagtactcatgctatgttggttactctctagtctactgactactaaggatggagctacatgcaatctatgctatctatatgcagtatatgaagttaacagctcttcataggcaatactatacacatgacttctatgaagca

SEQ ID NO: 207470 - DNA, 421 bp, Glycine max
  unsure (1)..(421): unsure at all n locations
agctntgatttttgttctgattgcatgatgctatgatagttgatagttaaaatagtgttaggaattatattttcatacaatgtatgttgctctggttaggatttgatggcctaattgtagaagcaagcttcatgatgatgaacctagcaattttgacgatgccaaaagaccaagtgattgattcaagacttcaagatcaagcatgatgaatctaatccaagattcaagattcaagagaagaaatcaagaagcaataagtcaagacttcatatatgataagtattataagattctttcaaaaacaaaatagcacagtttttgtatacaaaagaattttctcacattctttaagttaccagagtgattactctctggtaatcgattacctgttatcagtaatcgattaccanttgtcataccc

SEQ ID NO: 207471 - DNA, 373 bp, Glycine max
tcctaacagaatatttcatgtacgtggagctacttctaataattttgacttaccacagacgcctatctctcttccattcccacctagagcaattccaaacaaaaaaatggaagcagtggaaaaggggatcttggagacctttaggaaagtagaggtgtaacataaattgaaaaggcgtcagcatattcagatatccgttttatagattgacactcacaaaagaagctaaatgcatgaaggatacatgggcaaaatggtacattgataggtaattgttctacattctaacaaagtaagaccagacttttgataccttgatattggaacataaatgaaatgccatgctaattagacatcatatgcatgcttgaca

SEQ ID NO: 207472 - DNA, 440 bp, Glycine max
  unsure (1)..(440): unsure at all n locations
agcttaagctccttcaactgcacaaggctcttaatatttgaagagtatccttgtagaaccttcacccgacgaagacactgacaaaaacttatcttctccttcttggacaaagtatggcaggctgggggcaagtaaattttcttcccatcagaccttggatgcaactatgatctgatacccatatcagttagatcttgacgggtattcaagccatccttcgtcttgccttgaatgttaaggagcgtcccaatcacactgtcacaaacatttttctccacatgcataacatcaatacaatgtctaacgtcaagatcacaccagtacgaaagatcaaagaaaatggacctcttcttccatatgcaactctgacttttatcctctctttgggtcttcccacatacagngntcaggtgttgaacccgctgatatacctgctcacc

SEQ ID NO: 207473 - DNA, 355 bp, Glycine max
gaaaattaaccatattgtattttatatttgatgttttataactcttttattaccttctactatatatagagagagagtgaattatactataatgagagttgaataatatgcactcaggataaatcttttcgaatgaaagatttttattaaataaacaagtttatttaaaaacttttgtctagtgactaagataagtattcttaagtacacgtgaattgttgtccaatgatatataacatttatttttcaatgaatatcttgtgtctagaatgtattaatagaaagctttgaaatattttaataagctaaagaacaatggtcaaaatacctcattttatactgattcagtcaatct

SEQ ID NO: 207474 - DNA, 363 bp, Glycine max
  unsure (1)..(363): unsure at all n locations
gcttatgtttgccttattgcaagtcccactgaggttaaactctgtgcttaaaatatcttcacgtccacctgttaatatatcatcttgtaaaactgatgcagaggggtttacattatctacaatctcagctaggggttctcttatatttgagccagccatttctttggaatcaatgcccatttggcatgtaccagcaatctcatccacattttcattntcttcagtaatgcagggaaggtctaattttaaactcttacgctttcctgaactgcctaagtttgaattaattcgatcccaaagagtttgaactgaagaagtgtactgacccttgcaatttggttgcaatcagaaagggacctcggc

SEQ ID NO: 207475 - DNA, 423 bp, Glycine max
gttagagcaaggaattagaaccaaacttgtcccaagagcaattacctttttactcaaccgactctttctagcagcctcacgattctgagctagcctacgtacggtctaaaagaaagcattcacaacaagtgagctgtcaacaactagacatgaagtaataataagcacaagattttgatgcaggcagctaacaaccttctggtcttcagctttaaccttagtcttactttgatcctgtgagtctacaactacaagtgccccgtacccaactccattgcaccaagacacagttgagaaacactgtcaaacattaaaatccacaattctcatcatcagtatcactatccaatacccagatattaattaataataggcaaaaatgctaggtgtcttattatttatttaattttatctttatccatt

SEQ ID NO: 207476 - DNA, 394 bp, Glycine max
  unsure (1)..(394): unsure at all n locations
agcttgttacaaataaacatattaataacttaagtgcagtagtgcacacaatgggagatgtgctcttgtaaaggtgcataccacgagaggcaccttcattaggacacacaatgggagaagagccaaaccatattttctttagagctaatatgcaaaaggactggttggaacagagccaacatgttgttagacaggttcaaacgatgtcaatctgtggtaagagtagggctggaacagaattatacagttcgaaatgtagctggaacagagtgataaaagtgagaagaaaaacaatatatgggttttgtggggttgaataactatttaatgagactcatanacttgagacatganactctcttcaaggtggataccatggccctgatatgggttt

SEQ ID NO: 207477 - DNA, 421 bp, Glycine max
ctttttaatccacagattaaggattaatggtactctatgtatcttgtgtggatcttgaaatttaccataaagattatttgtgtattgtatgtttattgttctcttctttaattgctgtcgttgttcttactatggtttaaattactcatattatttaaatcctatagtgcggtgtatggaaatttagagtttgaggggagtcagtttatagttgaaaatattgcataatttattttttttagagaagaaacaagaggtcaagataaggaatttcatttttgtttttgcaggatgagacatattaaaaaagttccatttacactatttagtgtgtgaaaatggtaaacttctcatttttgtttgatgtaaagttaatttagttttgtaccgaaagatgttatggggtatattttggatctac

SEQ ID NO: 207478 - DNA, 388 bp, Glycine max
  unsure (1)..(388): unsure at all n locations
agcttgtaacatatcaaggaaaaaatgctctgatttcctgaatcttttgattagaaaggagaagaaagttatgattattaaattaataaactattatatggtgtttaaatgtatttaggtgcctaactctggaactctttcaaccttgacatctttatatggtgtttaaatacatttggattttgaataattggtgaaattaaaatgacgaaaataatgttttataagctgccgctttctcatacacaaatttttatcttttatttttattaaatttaatataatgtgtgttgcacttccatgttgccatttgcataacagtatgcaactgtactgttagccattgttgcatttattcgtttgggttctctttggcntatatctatcg

SEQ ID NO: 207479 - DNA, 305 bp, Glycine max
tcttatccaaggctcatcttggtggtgaagctcattcttcccatggcttattccctagtggatggcgcctcctctcacgtcttctcctttgtcttccgctgcatctccatggtggaaaatcaccattaaaggacctcattgaagtctcaaagtatcccctctaaaccccacaagtacttcataccctgataaaattaagagtgagacccttattgggaaaaaacagaagaaaagaaaagaaaaaaagggagaatagcagataagagaaaatagagagagaaaaaaaatatgagaaagaagaaaaa

SEQ ID NO: 207480 - DNA, 267 bp, Glycine max
  unsure (1)..(267): unsure at all n locations
ctatttctcgcacttggctgttcagcgtgtgtctcgcccatattctacactggtagcacggcttatcacagagcattcgactcaggattatcatacggtagcccatcttcatcgggactagggcttctttttgtcgtcaatagcattatcttcatggcactgggtttcgtcattggctacccagttgcttcagcttcaggtaaaaattattttcaaatttaatgataagcccttttatttagttcaattntgataacgacaaaactt

SEQ ID NO: 207481 - DNA, 410 bp, Glycine max
ttaagaaatgtgaactcccttgcattgatttcaaatattgaggtcaatccgcgccctgatgagactaatgaaggaggtataattgctgaaattaagctaaaggagttagaacagaagtcggctgaagtcagtactgagtggagtattgtccctggacgggaggatccactctggtatttatttctgtcaaattgaatatcaattctctttaacaaccgaggaatttttggcccacccaattaatttgtttactttctatttgactttgtgtaggcttcgctccagcctggtggcactgttagttttgaacatcggaatctgcaagggctgaatagatctattaatggttctattacaactagcaacttcttgaatcctcaagtaggtacccttgagctagatcctggagt

SEQ ID NO: 207482 - DNA, 270 bp, Glycine max
  unsure (1)..(270): unsure at all n locations
agctttgcacgtatcagtcaagtgtatggaccatgtcgtagccaaagtgctcatcgataatggttccagtttaaacgtgatgcctaagagcactttggagaaattaccattcaatgcttcccacttaaagccaagttcaatggtggttcgtgccttcaacggcacccgccgagaggttaggggaaagatcaatctcccagtacaaataggccctcacacctgtcaagtcaccttccaaataatggatattaaccccncctacagctgtct

SEQ ID NO: 207483 - DNA, 275 bp, Glycine max
tgagtcgagcgaaattttaatcctatagtatcaatgtatttaatttttgaaaaataacgtaacaataaattactttcttgtggaattaagaactagttgggaattcttcatccctttcaacttttttgtttggacatgatctcactgctttgtttctcaccacgtgtataatgtgtgctattctagttcataaattgggattcggactctatagtcatttctctgtgggatgaattggctgggatttttttttttgaagaaacgctattctatca

SEQ ID NO: 207484 - DNA, 376 bp, Glycine max
agcttttgcatgacataacaatagcatcatattcttgaagaggctcacttttctgagtcatcatcttctaattcagctatatccagggaatctcaaacaatagaaattgaagccgaagtcatggctgaagagcaacatcgacgagtgaccctggaagattactcaagtacatctgtgccgcagttctttactagcattgcacgaccagaggttcaagcacagaatataacctatccacattcattaattcagaacaatttgtttcatggtctgcccaatgaagacccgtatgcatatctagccacttatattgatatttgcaacactgtcagactggctggcttgcttgaggatgctcgtaaattgagcttgtttc

SEQ ID NO: 207485 - DNA, 448 bp, Glycine max
  unsure (1)..(448): unsure at all n locations
agcttcctctctaagcttcttatccaagacactctcttggtggtgaagcttttccttccatggcttattctctagtggatggcacctcctctcacctcttcttctttatcttctgctacaactccatggctaaaaatcaccattgaaagaccttattgaagctcaaagatccagcctccataggagcttctcaagcaagcttccatcactatcatatctgaagaagttgatataaatgttaaaaatgaggaagatgttggcgtgaaagtagaacacattgattgctcttatgtctttaatacttctcaggtatttgtctaatttggtgttggaacagtaattatattacataaatgtgcattgatctcagactttctttgaattgtgttatagttggttgctactcgtgatgaagttttacattgngcacgatcggtggctcatgaaa

SEQ ID NO: 207486 - DNA, 443 bp, Glycine max
  unsure (1)..(443): unsure at all n locations
gaaactcagctttcacgactctgactgggcaggctatcgtgattctagacgttccatcataggtttttccatctaccttggacactctcttatctcttggcggtcgaagaaacaatctactatgtctcgcagctcctccgaagctgaatatagagcttcagcttcaacaacatgcgagcttcaatggctcacctnnntaccttcttcaagaaatcttcatatctcgtttggcccaactcagccatctctttattgcgataaccaatcaacaatccagatagcctctaatcaggtgtttcatgaacgcaccaagcatattgacatagattgtcatatcgttcgagagaaagtaaacaatggtcttatcaagcttcttcctgtctcgtcttccatgcaactcgccgacatttttaccaaagctntatctccatccatctttcaag

SEQ ID NO: 207487 - DNA, 352 bp, Glycine max
  unsure (1)..(352): unsure at all n locations
agcttccatcaggttattaaagctatcctgatgactttcgaactcgcaccaggtctcaaaattaactttgcaaaaagcagttttggagcaataagagtgcctgatcagtggaagcaacttgcagccaattacttgaattgtaatttgttggccattccttttgtgtacttgggcatacccattggggcaaacctgaggcgatgtcagttgtaagatcccatcattaataagtgtgagagaaaattagctaagtggaagcaaagacacgtttcctttgcggggagagtgacccttatacagtcgggactaacatcgattcccatttacttcttttcattnctttagggcccta

SEQ ID NO: 207488 - DNA, 411 bp, Glycine max
tgctcatatccaataacacaactgaaaccatttaccaccatcatcttctcgaggacttagatatacaatgaattggattatttatccaataagtagataaaggatagatattcctttttcgaaaccgtaccggccgttcatgataagtttgtctccaagatatatgaaatagcactgaagtttgttaatttgataagtaattttgctaactaaggtctgaaatgaataaatgacattttcattcaccaacaaaatgatatttaagaatatatattagtagaattatatatatacttatataagtatttacaaatacatattatatatatgcttaaatatatattttttcatacctgaaaaataggtcattttcagattacaatcttaaatttacttacagtcaattacgta

SEQ ID NO: 207489 - DNA, 333 bp, Glycine max
  unsure (1)..(333): unsure at all n locations
agcttgagatgaggaagtgttgaagggtgatacttcctgcttttattgntgaccacagagtggtacctggagatatgtcgcgggggtcaggagaccttggggacgtcaggtggggtgctattgcccaaaaccaagcttgaccaatcccgacccaacccgggcatagtcggtcagtgagaacctgtgatgtacctaagcaggcgagctcctggcagtcaacagataaaaggaaaacaagaccacaaagcaaggaggcttgtggtggctggccagctgtgacatttgtgtaatatgtggatggtggcctctggtaatcgattacaaggcttaaaa

SEQ ID NO: 207490 - DNA, 75 bp, Glycine max
agacgaggaagtgttgaagggcgaaacttactgctcttattgttgtattctcagactggtacaccgcagatatgt

SEQ ID NO: 207491 - DNA, 454 bp, Glycine max
  unsure (1)..(454): unsure at all n locations
gctttggagtttccaagagccaattcgtcttcttcttttgttcagacttcttctggcttcaattcatcagtgggctttccttctgtgtccagcatcttgggatgttcccagcctttgatgacagctttccaggttctgctatccagtgatttgaggaaggccaccatccttgctttccagtattcatagttggttccatctaggattggcggtctgttcactggtcctccttctttctccatgttcatcagaatttatctccctagatctcactctgtgatttcgagtgtttgctctgataccaattgaaattctgatactgnggacagatgtcgtaccggatgtcacgacatctcacttcagaacatgcagattagatgcgttcgtctgaacagattacacatgtaaataacacaagaggattgttacccagttcggcgcaacttccctacat

SEQ ID NO: 207492 - DNA, 344 bp, Glycine max
  unsure (1)..(344): unsure at all n locations
ntaacctcatcgtccctcacagtctttagatttgggagccaatccaatccttgtgttcggactctcagccacttatgatagccgccgatgatcccattactgcttcccctaagctctctgtcctttcttcacgccgcatcccatgccttgccgaacttccttgaacctccgtgggcctaaccccggcagaaggcggagttcgctaggcgctcttatgggagccactgcttatggcagaacgatatataaacacccttgtccataggacattggacatctccatgagaaaacttgatttcttctttacgaggaccatacagaccccccagtaccagatggcccat

SEQ ID NO: 207493 - DNA, 437 bp, Glycine max
tagcttctgtattaattaaatatgacgagtatatgtatcaaaactttggacagaacgcaacatcaatggctgactacatgcatatagttgtgactagttaagccagcgacttgcaccaggcatcattaatttattcctctaaaagcaagggaaattgaaaatgaacaaaaaatatggattccaacaaacataccacatgaacccaagatgagatgagagagcccgcaatcgttggaatcttgcacttcatcttttgcaaagcttgagtcaccaacctttaattatataatagagggttagcatgccataaacaatcctaatgtgaagaagaaggtgcaatacttgccctcgcagagaatatggaagtccttcttcttcttatatgacagaagagaagatggtagtctagcctacgctttagaaatatgggatctatg

SEQ ID NO: 207494 - DNA, 412 bp, Glycine max
  unsure (1)..(412): unsure at all n locations
gcgcttcaagataaggtccaaactccccttcaaaatatgacttcttgcttatataggtgactntgttcgtgcttgcgcgcttagtgcaattttgaaccgcttaccgctcattagtggattttggcttagcgcgtgcttttctcgctcatcggatggactgaagcggtgcacttgtggtgacccttcgcttagcgcaaatgcacagcttatccttcttctaaattctttccttgcgcttagcggatggttcgctaagccaacatattggcttagcgagagggtgaaaattaacacttcacaaacttgcctaattaacttgaaattgagagaaaatgattattaaacacacaaaatggaaatactaagtatttattacctatctttaacaaaaagtaatgacagtactacaaaa

SEQ ID NO: 207495 - DNA, 415 bp, Glycine max
  unsure (1)..(415): unsure at all n locations
agcttattctaaagataacattaacttatgcatttcaatttttgtttaaaattatatgaaacatcttctataatcaggtcaaatgaaaaaccattatttcgaatacttaaatgatcaaaagattttagagttgcgttcccagaaaggtattcaaacttcaactaaaaaatacaatagtttacagactatatccatatattctcgagcaaaagtgttattgataatatgaagatgaagtaaagcaaatagccgcgagctactcatcatattccattaagagtgacaacaactgtacgcggagtaggataatcccgatgctcacanagccatataccctaagcaaaatggaagattaaaatttattaacaattgtgaagctataataatctagactcacggttattactattaatat

SEQ ID NO: 207496 - DNA, 412 bp, Glycine max
tataataagaaagtgaagtcaaaaacttttaatgttggagatttcgtttggaaggttatcctgcccatggatagtaaggatcgagccttgggcaaatggtcctcaaattgggaaggaccgtttaaaataattagatctattcaagggcttatgaattaaggaattaccctcagaaacgtactttgaggataaatggtaaatatttgaaaaaatataaaccaacattgctcgaagttaaaataagcatataatacacagaagtagtggaaacataaacaatggcgataacagtaaaattgtcacgaaagggcatgtgtcaatattacatctggagtagaatcgaaatacagaattcgaaataaatagaaatcataagttctactaagtcatgaccaaatcctcatatagcttc

SEQ ID NO: 207497 - DNA, 367 bp, Glycine max
agcttgcttctacaactgtgtctcttttcgatgatgacaacttctgagatcaagatacatacacacacactttttgctagtcgatcactcacataaattgccattctcccgctttgtttttgaatgtatgcttctcttaaaatctaagcgattactcatgtgagttcttgatttaatccctatttctctccccctttggcatcaacaaaaagccaaagtgcgtgacatatttgaagcatacacatataactaagcctccataccacattcatggaagaatatcaaccacatcatgaagcaagaaccatgaagtaacaaccctgaatagattaattataaaaccacataggtaataacatacttaata

SEQ ID NO: 207498 - DNA, 422 bp, Glycine max
tgatacacatcgttcgcgtgtatgatatccactcgactatgtttgaagtagaggaaactctcaatcctataacgcaacgtgacaaacaaaagtgggcagttaacttgaatgaccattattgtcaatgcgacaggtatattgcgctttactatccatgttcacacattttagaacttgtggttatgtgagcatgaactactagcaatatatagatgttgtttacacaaatgagcacatcttataagaatactccgcacaatggtggcctcttatgaatgaagcggcatttcctccttctgatgatgcatggacacttatccctgacccaactacaattcgtgcgaaaggtcggccaaaatcaacaaggataaggaatgagatggattggctcgaaccatctgaccaccaacaaaaatgtaata

SEQ ID NO: 207499 - DNA, 391 bp, Glycine max
  unsure (1)..(391): unsure at all n locations
agcttacgcaagaattnttttataaccaactatttagcattagcaaaaaataaactctaatttgaagttagaattgcatttgcatcaacaaacaacgatatttaacataatgtcaactacgtggcatttaatgttgacgagtgatttgatcgttttaaagtagcaacaagttagccgatgcttataagatatttattttgcatagtaaagctatttcaaaatggtttagcacattaatgcatgattaatgtaattgctgaagcaacatatgaataaataaaataacacactttctcttgccatcatttttccttcaccctttgtcatcctgctccctggtcatactaccatactntgnttcgtncctattcattctccttcatatcacaca

SEQ ID NO: 207500 - DNA, 424 bp, Glycine max
tctaggtgtgagatatacacagcgtgaaaatatactataaaatattaaatttaattcacctcccattaatttctaactctcattattctctaacatgcagtgttaattagtgttgttttctaactatcttattcaaagttccatactatgttgttaaggtcccagttaggtccctctttcttttaattggtattttcaagaaacttatttttttattaattaatattatttattaattattaattttttgttagcggtaaaaattaaatccaccatcttttcttttttctttcttttttatcattaaattaatcttataattccacttgcttaatataatatgaaaaagggttttatttttcagttcaccaaagtcggcctaagtttgattttgggtgtgtggctgatatatgcatctaattaa

SEQ ID NO: 207501 - DNA, 418 bp, Glycine max
agctctgctgttcaattattgtatataatttatgaatatagggtgaagaaggagatcaaaattagtgtttaaaggacattaaagactcgatgaacataatatttaagataggatttaaagaacaataatgattatattatgatatgactaacaaacattatacacttgccttcgcataacattgtgtgtcaaggtacattcttcactaatttcatttgttacaccttaataaaaaagcaaagcttttaataatggcttctctccttcaactgcgttcaaataagcactcaatattctaattcgaatatgcagcatcaacaattgcttgctgcaatgtctcttaagtgagttggttaaaggttttttttttactactgaaaatggaatgtggatgcatattttatcctgagacatattt

SEQ ID NO: 207502 - DNA, 538 bp, Glycine max
  unsure (1)..(538): unsure at all n locations
cgtcctcatactttgattctttctgtctccgatctgacactctatnaaacttaagcttgttggtatttgtgaagtacgttgtatgactactacccttatttcgtatagtatctctgtctcagagcgcgcccattgtattgagtacagaccatcgttattactcaatattgtgatcgcgtgtagttcgaaacatcgttgttcatctatcgtagatgccggtattgtagaatgatacgcgtactatcgtagtataacgctgtggtcgatctctgcaatcatcacaatgatatttcatactacaagatgagaatccatcttattgtgatcttgtgtaataattggcgtgacgcatgtgtgagacgatattatcgttgtaatatcgcaggacattagagtgttactgttcgacgctctatgtttacattggcgtccttcatcggggcaacgtaagacccaagtatcctgttgacgcctcgtggctttgaacgtgacatggttcttaacgtgtctcatattttccacgtgtcttaggagctcg

SEQ ID NO: 207503 - DNA, 263 bp, Glycine max
agcttgtctttggtttagacatgtttggatttgatttgggacttgtaggatttgatttgggcaagattggatgagaggaagggtgattttcgaaatctgcacttatgcagaatttttgctgtaaaattgtgcagcagaattttgcacaagtgcagaaaaatgcttgtgtgtggttggctgtggaaagtctagtgcagaatgagttctggatgtttgctagtatatcccaacggtcaaaatgtaggcttatgtactagagactt

SEQ ID NO: 207504 - DNA, 422 bp, Glycine max
tgtagaatggctagacataatacatggcggtgtttggtctggttcaaggataaaagggatgccccacattattttcatgacacaaatgcaaagatgatgatttggaaattttatgcaaaactggtcatgcatgcacctatgcggacactcaagtgtcgaatttttatggctcatgtgaatgctagtggcgtcagggattacactttccttctatttttaagatcaacaccaactgtttctcaaaaatattgttctatttatcacatttgtagcgttcatatcgcagctcattttgtggtactctgggaaatatttcacagctattcacctcttcaggtgtatacacatttgttcaaaaactagctatgaacactgaattttttcaaagaaaagttggaagtcatctcttttcaaaagcatgt

SEQ ID NO: 207505 - DNA, 376 bp, Glycine max
agctttacagcagattttagtaatgaccctctaacctagaattaaaataacttaatgccattaacctagggaattaaaaaaaacttaatggctgagtgtaactgaaattgtggcaaccaaaagtcacccccaacagccaacaagtcagccaccatttggtctcccaaaaggctgatgcctattgttgccaatgggcccttattacaacttgaactaaacctaactaaagcccttttagttgattaacccaaaacatatttttggcagccaactctcaaggattgggcattattagacaaactaacactctaaaatgagacaaggtggggcatttagtcctcctcatttggcatgaacactcacaccttggactttt

SEQ ID NO: 207506 - DNA, 415 bp, Glycine max
  unsure (1)..(415): unsure at all n locations
taggaacccaaacttgtagcttcaatgcaaggtaacatgctttaatntggttttagagttagaaaaacatgaaaattatgattttcttgtgagagtttttgctcgaatttgggttgccccatgtttgatactttacatagaggtagcatgtgaaaacaccttgcaatagtgtgtatacataggtaaatataagaagtatgaaatccctagcaaagtgtgaatgattgtcttcctaaatgaatgtatgatagtgtggaatgccttttttgaatgcaaatatgtgcaggatgtaattagttttccaatatgcatataaataaatacgagtgaaacagtgaaaatttgtatggtgtacttcaaatgtatgtaagtagtttgtgataacagatgtttatgatataaattaggtgttaag

SEQ ID NO: 207507 - DNA, 366 bp, Glycine max
gcaagcttgtggttgttgtgttagtattctatccttggtttagatttcacaaagtctcttaagtcttcattttgatgttgcacaccaaatcttctcaaggacattctcagctttccacttgtcatctctgtgtgtggcagcatatggaaagtgagatgctatcaacatcagtcttctaatgtgtcctctgtatgtgtggcagcatatgaaagacatgatattgtctttgaggtatagtagagaacaattatgaacttcagtgattaaagtcaaaatcttcatcatcttgatgcagactctgatgaaacttcattctgatcctgtatgcgcattgcaacctttgaaacatcttatatgtaaggccat

SEQ ID NO: 207508 - DNA, 427 bp, Glycine max
tgaaggcaaactggatgcgttggtcaacttggtaacccagctggtcttgaatagaaaaatatacacctgtcgcaagggtttgtggtttgtgctcctctgctgaccaccatacagacctttgcccttccatgcagcaacctagagcaattgagcagcctgaagcttatgctgcaaaattacaatagacctcctcaacctcagcagcaaaatcaaccacagcagaacaattatgacctttccagcaacagataccaccctggatggaggaatcaccctaacctcagatggtccagccctcagcaacaatagcagcctgcttcttccttccaaaatgctgctggcccaagcagaccatacattcctccaccaatccaacaacagcaacaaccccagaaacagccaacaattgaggcccctccacaacctt

SEQ ID NO: 207509 - DNA, 450 bp, Glycine max
  unsure (1)..(450): unsure at all n locations
agcttcccagatccgatcacggaaggacttgtcaactgccttcattaggtagtaccagtacaatacggacatggctcccgatcggaaccagcttcagagtatgactaagcgagagcatgagtccattaaggaatatgcccaaagatggagagatctcgcagcccaagtcgtaccgcctatgatggagagggagatgatcacaattatggtagatacgttacccatattctactatgaaaagctgataggctacatgccagctaactttgcggatctcgtcttcgccggagaaaggattgaatccggactacgaaaaggcaagttcgaatatgctgccaacatggtccccaacaacaacagaagagccccagtagtgggtgcgaggaaaaaggaaggagacgcccacgcggtcaccaccgccccgacgtggatgaaagcaccccanaatat

SEQ ID NO: 207510 - DNA, 398 bp, Glycine max
tgtgtgtggcctggttgtggtttgtttttccctcattcccctatattatttagtggggtggttctaaagatgtgttggcttaagtatggttattctctgaaatgttattaataaatttcaatctggagcttacccaagtgagtagatcataattagttaatttgcctttatggctccgattttggttattttgttattgtatgttacaatgtattatctttcaaggttgtggagagtcctgttgatattgcattgaaccttgatgggtcatgttagaattcatatgttggaggccagataagaactcaaaattctagattttttttgcttacttctcaaccttgttagacattgtagatatggtattacttaacttgcgtttgtgtctgatgagcatt

SEQ ID NO: 207511 - DNA, 366 bp, Glycine max
gagcttgttttgatgcctgagaacacaagagtgggtgcatattgtgtgaagctactttttttggccagcaatcagctatgagccacgctataatagtttccatacacctatacgtgtaggaattttgttcatcacggacatgtaagtgtagaataggtagcaaaatacctttggcaatttacactttgggtatggtagcaaaatacttggatgtatgtacatgtaatttctggtagtcaaaatgtctcacaaaaatatatatatatgttgcatgttatgtaaagaaataccttacaaagatacctttgaatttgaatgcaattttagtcagcacaagaatatatacttgaatttgcatgcggcttt

SEQ ID NO: 207512 - DNA, 430 bp, Glycine max
tatccacagatccctcttgttagactaggcttaacttaaacttcattatcatcacaggatattcagaaaacagaaaccccacaatccatccctggtaatgtagttatttagtccttcttctatcaagttctaaggcaacaatacatttgtaaatgcttaagtcatccttaaagtacacacaagtgggtgatcaggccaagagcatgcaataattaagcattgaaagaagcattgaacacacaaaacacaattaattagatattaaagataattacatcaactgttccttagaaatccgcaagtagggtgtttagccagccatacacagaaaccctaacacaaatgagataaagagtacaaaataattgttgcttacacaagaagggggatccctcctactcttcttaggacctcacaatcactctaacac

SEQ ID NO: 207513 - DNA, 459 bp, Glycine max
  unsure (1)..(459): unsure at all n locations
agctcgatcaaagcaattatctaatcattcttatccactcatatcatacagttgctcattcaaatcattctcaaacactcatttcataaaaaacaatctactgcatatcattttcaaccaattcactgttcaaaccagctttttgtacaagcaaacaactcaaagtactaaaatttaaagaactgaaacataaaaactgaaatttaaaagactgaacataaatcataaaataattgaaaataaactaaaatgttcaaaatgcacaaatttaaatgtcctgcccctgtggttgctcctgtgcatgctcattgagatccaacacctgagcagctggtgaatcctgagggataggctactctagctcagatgctgnggcagatggtatggcatcatcacgtatgggtgctggagatggctctgggatctggtctgtggaagtctcatcctcctaagccacgt

SEQ ID NO: 207514 - DNA, 382 bp, Glycine max
taattaattcatgcatatagagtatcaatatgaggacatagaataaagagtagcgctaggattcttcatttttaagtaagctgttgaaagttatatagtgataaacttatcaaaagcaaaaactgaccatcacacgagtttgcatatttcactcgaatataagtggtataaaatacgccatttgcttgccagcttggatttctatcctgtgcattaggaaaagaagagacatggatagggatatatttataaagctcctaatctttcaattttgacatccatgctaatgtcttttgctgccttctattcctttttcggctttttttcttgcacttactgtattttttttttctttgcttaaaagaacaaagcaaatgtacca

SEQ ID NO: 207515 - DNA, 448 bp, Glycine max
agcttaataaatctatatatggtttaaaatatgcctcccatatttggtaccttaagtttcatgggattatttcttcatttggttttgatgaaaaccccatggatcaatgcatataccacaaggttagtgggagtaaaatatgttttcttgctttatatgtagatgatattttacttgcacccaatgatcggggtttgctacatgaggtaaaacaatttctctctaagaattttgacataaaggatatgggtgatgcatcttatgtcattggcattaagattcatagagatagacctcaagatattttaggtctatcacaggaaacctatattaacaaaattttagatacatttcgtatgaaagattgttcaccagttgttgatcctattgtgaaaggtgatagggttaatttgaaccaatgcccaaagaatgactttgagagggaaca

SEQ ID NO: 207516 - DNA, 280 bp, Glycine max
cttagaaattctgtcatgctgagatactttcagttggaccagccttagaggagaaaaaagagaaaccaaagaaagaggataagaagccagaagccaataaaaatccaaaggaggaatatgctcaacttctgaaggtatatgaagcctattataatcaaataattgaacctgttctataaacttgaaaaatcaactggctggtattgtatatgagttgaggatataatgaatcaagagaaatgtgacatttatgaatgacttatatgtaaaaaaggccgct

SEQ ID NO: 207517 - DNA, 442 bp, Glycine max
  unsure (1)..(442): unsure at all n locations
agcttcaacatcagaccacttccagggtgctggaactacttcacatggatttgatggggcctatgcaggttgaaagccttggaggaaagaggtatgcctatgttgttgtggatgatttctccagatttacctgngtcacctttatcagagagaaatcagaaacctttgaagtattcaaagagttgagtctaagacttcaaagagaaaaagactgtgtcatcaagagaatcaggagtgaccatggcagagaatttgaaaacagcagattcactgaactctgcacatctgaaggcatcactcatgagttctctgcagccattacaccacaacagaatgggatagttgagaggaaaaacaggaccttgcaagaggctgctcgggtcatgcttcatgccaaagaancttcctataatctctgggctgaagccatgaacacagcatg

SEQ ID NO: 207518 - DNA, 422 bp, Glycine max
gtgtaatggtaagaaaagagcagcacacacagccatttattaatcttcaagtatataaataaataaaaactgtaagtataaaataaaagtgtgtgtgctgctatttaagaaaaagaaaagctaagtacggaaaagcaagtaatagagctggaataaaaagaaaaagttgatctatgatgaatgctctcttagaacttaagcttttgcatcctagaaaaatcatgaattgtttgcagcccagcctcgttacaagcctagaaaagtccttcggattcagttgtgtgtttataactgtatgtcatgagatgaattgcaaagattgagacttgtgttagttgttgattgctgaatatccctaaacactagtgtttgagtgaaacagtagttgtgaggctttggttaatgatccttccttgatattt

SEQ ID NO: 207519 - DNA, 433 bp, Glycine max
agcttctccatatattattcccctgaatcgtgacttccgtttgaaaagttatgaccatttgaatttctcgagagcattcgttgttcaatttcgagggtgtcgatgtattatgcgcctgaaccggacttccgtgtaacaagttatgaccatatgaatttctcaagagctttcgttgttcaatttcaagcgtctagatatagtatgcgcctgaatcggacttccgtgtgacaagttttgaccatttgaatttttcgcgagcagtcgtggttcaatttcaaccttctcgatatattatgcgcctaaatcggacttccgtctgaaaaagtatgaccatttgaatttctcgagagcattcgtttgttcaattcaagcgtctcgatgtattttgcgcccgaatcggacttccgttgacaatttatgaccatctgaattt

SEQ ID NO: 207520 - DNA, 428 bp, Glycine max
  unsure (1)..(428): unsure at all n locations
tctcgatatattatgcccctgaatcggacttccatttgaaaagttatgaccatttgaatttctcgagagcttccgttgttcaatttctagcgcttcgatatattatgcgcctgaatcggactttcgtgtgaaaacttatgaccatttgaatatctcaacagcttttgtagtttagtttcaaagctgtctcgattatattaatgcacgcttaatctggactctccgttgtgaaaagttatgaaccatttgaaattctcgagagcgttcgttgttcaatttcgatcgtctccatatattatgcgcctgaatcggacttccgtgtgaatagttatgaccatttgaatttctcgggagctctcgttgttcaactntgaccgtgtccatatattatgctcctgaatcggacttccgtgtgacaagtgatgacc

SEQ ID NO: 207521 - DNA, 416 bp, Glycine max
  unsure (1)..(416): unsure at all n locations
agcttcattaagaggctttctcaagaagctttctcgtggcttctttgaaaaactttctcaagaggcttctttgagaagctaacgctntaactagtaacacccttttaataactaaactcacctccttaaaaataattacggataaaaataacacaacaaatataatcaaacatcaaacataattactaataatatgtagatatatatatcagggtgttacacgccatatgatgtgtaaagtaagggaaatctcttgttcttgtttattctgaagttaatttagcttttatacctaaagatacttgatggatagattctggtgctactactcacataagtgtaaccatgcagggttgcctgtggatccgattgccaagtgatgatgaaagattcatatttgttggcgatgacaaaaa

SEQ ID NO: 207522 - DNA, 424 bp, Glycine max
  unsure (1)..(424): unsure at all n locations
tgaacatttaanaaagaaacacaagtactcaagatgtttcaaatgtgaaagaagtgcctaagagacattgagacatagaagcctgcattgccatgtttgcaaacaacaacactcaaagctatgaaaaaattcacaaggtatggaactaagttactaaacctatatagagatgccatcatcattgtccattgtaatcattggtggagcatatggggagacattggatcgagcagtgaagttagatgactttactgcaggatcagaaaccttttcctagaaacaaaaaaaaaaaaagaaaaacacttgctaagcatctaaaagtcacactgaatatgattagaataaagaaagaacctatagtttctagtatttcacaaatgcactaatactccattagctttcttcctttatgttacttttgctc

SEQ ID NO: 207523 - DNA, 100 bp, Glycine max
  unsure (1)..(100): unsure at all n locations
tgtttaaggtaccaatatatgccttaataaaantactgcccgccctgtcactcattgctatacatgtgtaattctacaacatttcttgccccactgcacg

SEQ ID NO: 207524 - DNA, 297 bp, Glycine max
agctttaacgaatgtaatacacatcttctttattctttgtgattcttgactccatttcattgaaccgcatatccacttgtaattccaaattgtcaaacctctcaccaacaaaggtttgaagaccatcaaacctgtctaaaatctttgaaaggagagatgaatcctctccatcatgtccttcttcaccaacatgtcgagtacctttcttcacccaagaaccatcttgttcctttcgataacaaaaagatgctatgactgaagagcctataagataagatctcttgatttgaacataat

SEQ ID NO: 207525 - DNA, 161 bp, Glycine max
  unsure (1)..(161): unsure at all n locations
gacacttagaaactcagcttcccgctattctcatgaaaggccttattgttacaaatntgttagcaaagcaaattgccaattacaaaagtacaaaaaaatgaaaagtcctcaattgtggtggctattctctcttaaagggtacacttcaatttggaaagtct

SEQ ID NO: 207526 - DNA, 244 bp, Glycine max
aacttgtattgagatcttgcaaccgccgcatttagatatagatgcataccatgggccagggtatttggaaaccatgatgatgcctgattatgagtggccattgatgtggcggtctgctcctgtaatacctacaaatcacttgtactcataacacatctttctattcacgtacccaacattatatttatcgatagagtaattaccctgataccacctgaaatttttttcaaatttcacataatat

SEQ ID NO: 207527 - DNA, 199 bp, Glycine max
acactctcgagagctcaggcttactagagtcacggattgtgtataccagaacttcattttatacatgtgtgacaactagagacggggactgtgagtatgatcatccacatcgaataataatgtaccaccatacgctctatatgtcacgacacttaatattgataaggctgtcgatatgccgaaaattgaattcaacgtt

SEQ ID NO: 207528 - DNA, 259 bp, Glycine max
agcttctcctttcttttctataaatagaggaaggagggaagaacaaaaatgttcaaccctcctggtatctgagattcactgaaaattagttagaaaaattgtttccatgaagaaaatccaagccgaggcgcttccgtgacgttttcgtgggcgattttgcgaagattttcaaccattcttcgtcgttctttgttcgttcttcgacgttcttcgggcttcatcccggaagctcccataattgaatctttcatttcattct

SEQ ID NO: 207529 - DNA, 237 bp, Glycine max
  unsure (1)..(237): unsure at all n locations
tttcgattcattctatgtacccgcggtggtccacattgtgtttcgtgtatttntattcttgtttcatttactttttatacccccttttgacgtgcttaagccattgtatttaagtcatttctcgcgtaacctaaaaatagaatgacatttccaccgaagtttgaattgtatgatcgtgacttcggtaaaatgaatccaccgacggtcgactgaaccacttggaaataaaaatgggta

SEQ ID NO: 207530 - DNA, 332 bp, Glycine max
agcttgtggttgttgtgttagtattctatccttggtttagatttcacaaagtctcttaagtcttcattttgatgttgcacaccaaatcttctcaaggacattctcagctttccacttgtcatctctgtgtgtggcagcatatggaaagtgagatgctatcaacatcagtcttctaatgtgtcctctgtatgtgtggcagcatatgaaagacatgatattgtctttgaggtatagtagagaacaattatgaacttcagtgtttaaagtcaaaatcttcatcattttgatgcagactctgatgaaacttcattctgaccctgtatgcgcattgt

SEQ ID NO: 207531 - DNA, 424 bp, Glycine max
cgaaggcaaactggatgcgttggtcaacttggtaacccagctgttcttgaatagaaaaatatacacctgtcgcaagggtttgtggtttgtgctcctctgctgaccaccatacagacctttgcccttccatgcagcaacctagagcaattgagcagcctgaagcttatgctgataattacaatagacctcctcaacctcagcagcaaaatcaaccacagcagaacaattatgacctttccagcaacagataccaccctggatggaggaatcaccctaacctcagatggtccagccctcagcaacaatagcagcctgctttttccttccaaaatgctgctggcccaagcagaccatacattcctccaccaatccaacaacagcaacaaccccagaaacagccaacaattgaggcccctccacaacc

SEQ ID NO: 207532 - DNA, 452 bp, Glycine max
  unsure (1)..(452): unsure at all n locations
agcttatgcgcatatttccttacaaacgttctcttgcacaagacattctattaaccaaaaaaaaaaatgcacccatatacaatcaaggcagcttcgttacctagattatttacacgtacttccaaggtgtatttgttacttacatcacacacctccttggctaaattcacatacatgcatactcaaagcattttggggtaccaaaaattgcacatgtgcacatcttggtatttctaatacctatacatacacaaacttcatgatgaatcttgactatctacacaataaggtgctacattttatgctcttttcaagtttttgctacctaaagccgcatgcaaattcaagtatattttcctttgctgactaaaatngtattcaaattaaaaggtatacatnttttggtaatgtatcttctttacataacatgcaacatatttatngtatatttt

SEQ ID NO: 207533 - DNA, 429 bp, Glycine max
  unsure (1)..(429): unsure at all n locations
taagctcgctgttgctaccccacaaagcccctcgaaacttgtttcggtcccattcctcctttcgggccctctttgtttcccgttccaatgcttccatgatcgccacattgtgtctctcagttcgttgcactcttttcgaaccttgatggctgttgtcttgaacttttccttgactactttgtgcccttttcannagttctgcnnctttagggcttggtacctcctcactctcctcaggggttttagcctcttccttactcgaggtctttagcttcgggagccaatctaactattgcgtctgagccaatctaactattgcatccgagccatcaaccacttgtgatagccgctgatgatcccgttgttgcttcccctaagctccttatctttcctttgcaccgtgccccatgatttgtggactccttgaag

SEQ ID NO: 207534 - DNA, 441 bp, Glycine max
agcttgaggttgatgttgcttgcggacatgttcttgatggtttttattcaaccacttctgcttacaaaaggctaacaaaatctattccttagtgtggccattccacctcccaaaaaatattaaacacttcatttggattgttgttctgtttcagatggaaaaacagtatttgggaaaaccccgctcccgctgtcaaatttctattctcgtactggattaaccataaccctaacgtttgagtcatgcttctctactctgccttaagcttttcgattatggttgctcttcgaaagaagctaccatggctttgattaacaatttcacagaataatgtctgttgtacgtgctttttattttcgacgtcgtgaagactgtgcttttttctgttgtggcttgaaaggaaacatggaccaatagaaataggctttttttttcattata

SEQ ID NO: 207535 - DNA, 418 bp, Glycine max
acttgatgataaccattctgctacttgtcctcttgcgatctcccattagatttagcacaccggaactgattgttttcacaccaagcgatgtctcatagtttcattatcaacatctacgagccaactttatcgttagcgtgagctggtacgctgaaaaacagaggtgtaggctttgggttcatgctttctgatagaacaagtactttgaagacatgttgtaataatattctgcataatcttgaaactgcattatttaagcttcagcatatgctgcttgctagtactcatgctatgattgggactccttagtctacttactactaatgctggagctatttcccatctatgctctcgatatccaatattggaagtcaggagcttttcacaggctatcctatacacattacttctatgaagc

SEQ ID NO: 207536 - DNA, 363 bp, Glycine max
agcttagagctaattcaaacgacaataactttttactcggatgtttgattgagccccgtaatacatcgagacgctcaaaattgaatgttgaagctcgcagcaaattcaaacgacaataactctttactcggatggctgattgagtcccgtaatatatcgagacgctcgaaattgaatgttgaagctctcagccaattcaaacaacaataactttttactcggatgtgtgattaagtcccgtaatacattgagacgctcaaaattgagatgttgaagctctcagcgaattcaaacgacaataactcttttcctcagatgtctgattgagacccgtaatatattcgagacgatcgaaattagatt

SEQ ID NO: 207537 - DNA, 373 bp, Glycine max
tcagaattcaatttcgatcgtctcgatatattacgggtctcatattatacatctgaggaaaaaagttattgtcgtttgaatttgctgagagctcaacattcaattttgagcgtctcgatgtattacgggacttaatcattacatctccgagttaagaaaggttattgtgtgagttgaatttggtgagagctttaacattcaatttcgagcgtctcgatattttacgggactcaatcagacattcgagtcaaaagttattggcggttgaatttgctgagagctttaacattcaatttcgagcgtctcgatgtattacgggacttaatcacgacattcgagcaaaaaattattggcctttggattatctcagagc

SEQ ID NO: 207538 - DNA, 403 bp, Glycine max
  unsure (1)..(403): unsure at all n locations
agcttatcactacttgaagaacataatatatttatgaaggtaatatgctacagaacaaaaacaagacaacacttaagttaatgaacttatcatttcctctcttgggttagtcttcttcggcatatattaantatgtttattgcattatagttcgcatcctgtgtaacttgtaaccaacaatatgccagaatgaaccataactcataaggaatcaaaagatataaagcattagcttgattcatttattactttggcctaagctgttatggtgtataactacaaaacaaagatgaaattatgtaattgaaaatgacacaaatgtaaaacatgacctcctataaagctcacaagatttgttaatataagcatacacagttntgatgttgacatattccatgaactg

SEQ ID NO: 207539 - DNA, 364 bp, Glycine max
gtttatagagagctcaatcaaagaataattacaataaatgtatataatatccacccaattgattgagaataaatgttagcattaactctatcatcataataaattgttgactacttatcagcactatgaaaatagttcggttggaagggaacatctaatgattcatttgagaatataggaccaagatagtacctaggtttttcttactctagtgcatagaggtgaaatataaaattaaaaaaggaaaatagaagaaaaatctcagtaaatgaagaaacaatgatatatcaaaatcgaataaataccacataaatatagatatacgcttacattaaaaaccagacaaattttaacccgaatataa

SEQ ID NO: 207540 - DNA, 440 bp, Glycine max
agcttcccagatccgatcatggaaggacttgtcaactgccttcattaggcagtaccagtacaatacggacatggctcccgatcggaaccagcttcagagtatgactaagcgagagcatgagtccattaaggaatatgcccaaagatggagagatctcgcagcccaagtcgtaccgtccatgacggaaagggagatgatcacaattatggtagatacgttacccacgttctattatgaaaagttgataggctacatgccagctaactttgcggatctcgtcttcgtcggagaaaggattgaatccggactacgaaaaggcaagttcgaatatgcttccaatgtggcccccaacaacaatagaagagccctagtagtgggcgcgaggaataaggaaggagacgcccacgcagtcaccaccgccccgacgtggatgaaagcac

SEQ ID NO: 207541 - DNA, 350 bp, Glycine max
tccaaattagtgtaccacactaccgcagctccggccattctattctgaaagaagtgtatcaacagcttttcatctttagaatgggcgcccatcttacggcagtacattttgaggtggtttttgggacaagtcgtccctttatacttgtcgaagtccggcactttcttgactaggggaatatacaacatcgtggtactaagcaaagatccgtcatgtctgcaaacggatagtccccaaatccttccacagccctcaatctttcctcaaggagatcgagcttcctactttcttcagttgccgggggcggcccttccatagacaaaactattggcgacgctgcgacgatggga

SEQ ID NO: 207542 - DNA, 439 bp, Glycine max
  unsure (1)..(439): unsure at all n locations
agcttgcctcanagaggtccaggaaggacatggcagccgaaggaactagttccgccccggagtacgacagtcaccgctttaggagcgttgtacaccagcagcgcttcgaagccatcaagggatggtcgtttctccgggagcgacgcgtccagctcagggacgacgagtatactgattttcaggaggaaatagggcgccggcggtgggcaccactggttactcctatggccaagtttgatccagaaatagtccttgaattttatgccaatgcttggccaacagaggagggcgtgcgtgacatgagatcctgngttaggggtcagtggatcccgttcgatgccgacgctatcagccagctcctgggatatccgatggtgttggaagagggccaggaatgcgagtatggccagaggaggaaccggtctgatgggttcgatga

SEQ ID NO: 207543 - DNA, 394 bp, Glycine max
tccatcaatatatgcatgcaatctacggaggggagcggtgttgctaatcccaaacccttggcgatatacttcactaaaagcgcagcttcccaaaagcctgcacacccctttgtagccaaacctgttcctttcctgtaccaaaatagccacgcggtgccgtggagatatgcacctcaacggataaggaagaagaagtcactgacgtcagctcgctgtcagctaaaggaacaaatatcacgggactgagtggtgtgacccgtattgggcgcgtgatctgacctccggacctaccagtccaacccgctgacgtcaagggaaaaggaaaagtggtggaggaacaagatggccaagcaccccacgcttctaataaagatattccggcatagggcccccc

SEQ ID NO: 207544 - DNA, 436 bp, Glycine max
agcttgtgtattagggagagtattttagcatggaaggctaattaaggtgaagtggatcagagagagagatgaaaattcatgtttttttcatttctctcttcgagatcgccagagaagaaatcaactaatggcccattagagtggagatatgtggttaattagaaggaggggaacaaatcaaggatgaggtgacaaggcaattccagcaagtgttttcagaatcaaagttcacacgaccttgtttaccaggtgttgagtttaaacaaattagccaggtagatagctcttttcttattactccttctttggagctggagatcaaggcagcggtttggagttgtgatggtgatacaagtcttggccctgatgggttcaattttcaattctcacggcgtgttgtgaattttaaggcccaagatttgttgtatggtgcatg

SEQ ID NO: 207545 - DNA, 402 bp, Glycine max
ctacctaagaaagtgtggagctccccatttgttagcttatcgaacaacacaaacaaatattggatcacttcctagaaaacctattagcaaaacatgtatttactgaatgctagcaagacaacaggttctactgatactgagaaccgttttgtacagatatggagccttttatcggaggaaagcatcattctcatgtacaacaactctacataggaaggagatacccatatgagcctgccaaatgcatttccttgtattcttggatactagcatctttgcgcgtgcatcatgcacgaatttggacacatattctacataactaatatcgccggcacgatgacacatctatattataatacattcaagatgtgaacattgatgctctgattgtgctcttatata

SEQ ID NO: 207546 - DNA, 321 bp, Glycine max
  unsure (1)..(321): unsure at all n locations
agctttataaaaaaattggtgtaaaattcatcaataaataaataagttggtgtaattctgtttataatgaacaagttgaggattaaaattaactaaaaaaataattattttagcctgctacatcaacttaatggataaaatttgtaagttttttaaaaattagaaataaaatatgtcaaactaatttgttgaggataaaattcctctagaaatatatcgaagggagaaaggacaatcattttaacattccatgtcaacttaaaattgaancaaaataaaaaggcgaatgtaaaaatgaaattaagtttttttaaaaataac

SEQ ID NO: 207547 - DNA, 277 bp, Glycine max
tatacatatatataaacgttaacatgtaaatttaaatgtaatattagttgaacattgaaaaattaaattaaataaataccatttaacatttattttatgttggtactatgactagttttagtagtgtccattttctactaacctccgtttctgagtcacagtaggcttttggatttccacttggaacacctcgaaataccccattcccatggcaaagagctatgtgacaatggaggccaactctggtgtagcttaacttaagagtcacctgggaata

SEQ ID NO: 207548 - DNA, 229 bp, Glycine max
agcttataatatatcgatacgctcgaaattaaacatcggagactctcggaaaattcaaatagtcataactattcacacggatgtccgattcatgcttataatatatcgatacgctcgaaattaaacatcggaaactctcgcgaaattcaaatggtcataacttttcacacggagatccgattcgccacataatatgtcgagaagctcgatattgaacaacgaaagctct

SEQ ID NO: 207549 - DNA, 405 bp, Glycine max
tctacttatgtggcagggcgggcttccttcactttcttgtctccaacgcgagctctgaccactgtccttccttcccgcgatgcttcttttcatgtccgcctgagtgggcttatagcctaaaccatacttcccacgatttccttgggtttatcagtatatgccccattgtctttgcctaaacccatcccgggttcataaccgttccccaacataactcgggccatcattaccgccgcatcggacagacaaggttgcccaaagagggagtccacggaggaaatgctgaccacctcaaaagactggaaagcggtttctaacgattcttctgcggcttccacataaggcatggaggatgggcagcttaccaagatatcttcctcgcctgacacgatgaccaagtgcccc

SEQ ID NO: 207550 - DNA, 324 bp, Glycine max
  unsure (1)..(324): unsure at all n locations
agctttgatgtttgtgttgaatgcattatatgtaaatagaccaaaagtaagaaattaggtgcatatagagctacagacatcttggaattgatacatacggacatttgtgggccatttcatgcaccttcacgaaatggtcaacaatattntatatcattcatagacgattactccatatatgcatacttgtttcttatacatganatgtcacagtctctggatgtgttcaaaaaatttaaaagtgaagttgataatcaactcaacaaaaaaatcaagagtgtcagatctaactatggtggtgaatactaaggcaaatataacggt

SEQ ID NO: 207551 - DNA, 389 bp, Glycine max
  unsure (1)..(389): unsure at all n locations
taataggaaaagttttggtggaagtcttcctatagattgtgattcccaataacctttttttatccaaacctacatttttgttttggcacttcttgataacatagtaactaacaactttcaattttacaattggtttaaaggcaagttcaaactgagtctctaattcaaaatccatcacagaatatgcacactttaagtgacaaaaaccattttcacatcattttatattagttcactccaaagttctcaccgaaatagaataaagaaaaacataatgcaaattctgaaacactttcagtctaataaaggatatgcatctgagagacaagacaccagacaaagccaagaggctgaacnacagtttaaggtactaactaaacagtatacac

SEQ ID NO: 207552 - DNA, 411 bp, Glycine max
atgcatgcttgtcggattatggggtacccatcacatgttgtctaggtggcggtcgggcgatggtgcaaaacgattctccacatccacaaatcacatataactcaccatcccctgttgcccacctccaactgagctcacgtactcccaagtagcccttattctcgttcctctcaacgccgggtccccatcaatactcccaagcttccacaacatccaggtaattccacatccaatcatcatggactaaaaaaatcaagcaaaatatggcagaggcagaaaactctgcccaaacacaactcagaatcacacgcttttacatacaaataccctagtaacattttctttgttccaattcgttaaccggtggatcgactcgaacaatttactggaagtctctagtacataagtcta

SEQ ID NO: 207553 - DNA, 388 bp, Glycine max
  unsure (1)..(388): unsure at all n locations
ctataaattattaacaaaacatgtccttgtttttttcaaaatagaaatctcaatgaagaacgaggagccaaggtaaagatccatgtggtcacacctgagactctagtaacaacattaacagtttgttggtggcttcaaatcacgactacttgtctttgagcaacaaatagcggtggaaggtagaggaacaaatgatcaaatactaggacgaattgtatgacaagcttcaactggtgaaacgccatanggaagttgtgttcttgttgatcactttttaactctaaatttaacanagcatgattatctttacaaaactaacgaacatggtgtcaatagatgtgcagcttctctactgttgatggcattctcaaaaatcatgaacaagtat

SEQ ID NO: 207554 - DNA, 466 bp, Glycine max
  unsure (1)..(466): unsure at all n locations
gcaagcttatgatgttgctgtgcttaaacttatcttgcatgttctttgtttcgcagagaatgtcaaacaacacactaaagctntgatttttatctcaacaaaaacaacgatttttatcaaacaagtgtgttttctttgtagatctttcaaagcttaattctttcggataattgtttgggtgttcctgatccttctcctacgttgtttcgcatagaagcccgaacaacactaaagctttgatttttgtctcaagagaagcagtgatttctatcacaacaggagtgttttctttgtagttctttcaaagcttaatttttgtttggttaatagaacgcgtattcttgatccttctcctactgtgtttcacatacaagcccaaagaacactanagctttgattttatctcaagaaaacagcaattttatcacacaggtgcattntctttgaattctttcaagcttaattt

SEQ ID NO: 207555 - DNA, 291 bp, Glycine max
  unsure (1)..(291): unsure at all n locations
tgtcggtttcagatgggtggctagaactatggtctgatagctctcaacataacctcgagaggaactattctgaccattgccctattatcctcaagacgaagatttctaactggggccccaagcctttcaacgtttttgatggctggttgcagataaaggagtacaatcaagtattcaaagattgctggtctgtttatcgacccatgggatggnggggtcttgtcttaaagaacaagcttaagaaccttatacaaacgctgaaattgtggagtaaggagaactcagcagaca

SEQ ID NO: 207556 - DNA, 454 bp, Glycine max
  unsure (1)..(454): unsure at all n locations
agctntgagggtgcgtagcccaccatctnttcatagtatagtatcgataatgtgtctaccatcacgattatcgtctccctttccatcattgggggtaccacctgngccgccagatccctccaccttttgggcgtgttctttgaaagatccgtccccctttttgcacatgttctgtagttgcatcctatccggaaccatatcaaaattgtactgatactgcctaacaaaggcaaccattaggtccttccaagaatggactcgggaaggttccaagttagtgtaccaggtaacagctaccccagtaagactttcttggaaggaatgtatcagcaattcctcatcttttgcgtattcccccatcttctgacaatacatctttagatggttcttgggagaagtagtccccttgtacttgtcanagtccagcactttgaacttgggaggggtgatgata

SEQ ID NO: 207557 - DNA, 453 bp, Glycine max
  unsure (1)..(453): unsure at all n locations
tgtgaaatgtctcgctcagcgctgaaagtggagaattgcttagcgaaatgagctcgctaagcaagatctatagattataaatatgttcttcaacgtgaaaaatatgattttcaattctcactctctccaaaccctcacccaaaaccccaacccccctcctctaccattcacgaccaccagtgaccgccacaagccaccattgcttgcattcagaccaccatacaaagagaacgttttaattagagcggaatattcaaaatccaccttgaggattcagtagagaacgaagctttcaaccttctttcgtggtttcttcaaggtaaccatgattcccttgccttctcctagttattttgagcctctcttgggtattatttgatggngaccataatgggatgttttacacttcctttgnaaaactttgaaatgagaatgtgannaagtattctttat

SEQ ID NO: 207558 - DNA, 423 bp, Glycine max
  unsure (1)..(423): unsure at all n locations
gtagaaacatgggaccaactcattntatttcanaaaggaagtcatatctagtcaagtctgagagtccatacaagtttcctaacgatttctaattatgtgggccattaagtctatcatatgctgacaatagccgagaagcccatgaatctcttcgggggcggagtaggtgtctgccatcgctttggccttggctaacaatcggggaagttcttgactcccgttcaaggtaagagcaaaccgatccatccacatggttgcctcttggtgtaaagagtcgatcacccttcctctagcctctttttccgcatatacttgggcatactcatccgcgattctatgctcgtgggccgtggctagacccaactcttcttggtactcggcgatgatagctaacatngtggtctctgtctcgcataaacgctg

SEQ ID NO: 207559 - DNA, 411 bp, Glycine max
  unsure (1)..(411): unsure at all n locations
gagcttctatggagaatgggatcttgagcttcaatgaggtccttcaatggtgattttccaccatggagatgcagcggaagacaaaggagaagaggttagaggaggcgccatccactanggaataagccatggaagaaggagcttcgccaccaagagagtgccttggataagaagcttggagagggtgcttcaatggaggaaaagaaatagagagagaaagagagaggggggagcacgaaattgaaggaaaaaaaagaggaagagaagttgaactttgaagtttgtctcacaagactctcattcatcanagttacagcaagtgatacacacgcttctatttccttgagaagcttctntgagaaaacttccttgaaagcttagctacacacacccctctaaaaactaaactca

SEQ ID NO: 207560 - DNA, 390 bp, Glycine max
agctttgagcaaattcaaacgacaataccttttgactcggatgtcggattgagtcacgtaatatctcgagacactcggaattgaataccgaagttatgagcaaattcaatcgacaataaatttttactcggatgtcggattgagtcacgtaatatatcgagacgctcgaaattgaataccgaagctctgagcaaattcaaacgacaataactttttactcggatgtgcgattgagtcccgtaatatatcgagacgctcgaaattgaataccgaagctctgagcaaattgaaacgacaataactttttactcggatgtccgattgagtcacgtaatatgtcgagacgctcgacattgaatatcgaagctctgagcaaattcatacgacaat

SEQ ID NO: 207561 - DNA, 433 bp, Glycine max
  unsure (1)..(433): unsure at all n locations
cgacactatgatactcagcttaacattcaatntctagcgtctctatatattacgggactcaatcagacatccgtgcttaaagttattgtcgtttgaacttgctcagatcttcggtattcaatttcgagcatctcgatatattacatgactcaatccgacattcgagtaaattgttattgtggtttgactttgctcagaactttaacattcaatttcgagcgtctatatatattacgggactcaatcagacatccgtgtaaaaagttattgtcgtttggaattgctctaagcatcaacattcaatttcgagcgtcccgatatatgacgggactcaatcagacatccgagtaaaaagatattgtcgtttggatttgctcagagcatcagcattcaattccgagcgtctggatatattacgggactcaatcagaca

SEQ ID NO: 207562 - DNA, 412 bp, Glycine max
agcttcagaattggttaagcatggcagataatgtgatcgatcatctttgtaatgagtttgagggcacgtacaggttcaccgattgggacaccattcttttctccacttttcttgtatgaaccctctgttctggagatcccgggtcctggtttacaagcggagtacatgcaatcttggacatagaaagccgtgtagtaattgacgccaatgaaatccaatcctctcttgagtttctctttttcgtagctggaaaatttgggcaagaggcttccaagaacgttctccatctctgtagggtactttccgaatatgattgggtccaagaacctgcattataataaagtgttactctgggggagttgagtgaacaatagaaaatgctattattaagggagaactagtattaactata

SEQ ID NO: 207563 - DNA, 329 bp, Glycine max
  unsure (1)..(329): unsure at all n locations
tgagagtgtattattagtactaaaattatactatcaatcataaataattgntgtcgagactttctaaatcataaataattgttttcaagactttntaaattgttaatgtatagtcaataaacttactattttctaatttcaaaatcacaactcttttgtgtcttatgtatgcggacgtgcgcagatgtgtagcaaaatttattttcttttataactcgtattctgtataggtattttaaaaaaataacttcttgttttaaattaattntagtaacatgatacttatagatcaaagtcttaagaataaattacatttataccatgcacct

SEQ ID NO: 207564 - DNA, 397 bp, Glycine max
  unsure (1)..(397): unsure at all n locations
agcttatctacatgatgaagaatgctccctctatgtacttggttttgacaaagaacaaggcaacaaagcctcacatagaagactcaacaagccttactcagaagattcccaacatcagaatgaagctatattagagtctacataagaatgatgaagaaattgactctaaagactagactntagaatgcaattcaaaataattatcttttgcacttcaaagacaacatttcattttttatatgttgtcacacacactgaaggcacatcaaaaagtgaatgctaactacattagaagatacaatcaagttgaaacctgaaattttccatgagaagaattgatgtggatcatcaaaatggaagaccgtagacattatgcagtctaaccttggacaaaaca

SEQ ID NO: 207565 - DNA, 428 bp, Glycine max
  unsure (1)..(428): unsure at all n locations
cctgcatctggacaagcaaatgaagaagttgcccatgattattgttcaggctagacacatggaaaggaggacaattaaacctcataaaagatatggtcatgcatatctgatctcctatgctttaatagttggaaagaagattgaagttcaagaggaacctcactcttatgatgaggtcataagcaacaaggacaattcaaaatggattgaagctatggaagaagaaatgtcttttctagaaaagaattgtcctanagggcagtaaattgttggatgcagatggctattcaagaggaaagaaggttttgaaggagttcanagtgtaaggttcanagctaggctagtagcctgtgggttactcacaaggaaggagtcagatttgtagaaatcttctcacctatggtanaacatagttcaataagaagtcc

SEQ ID NO: 207566 - DNA, 457 bp, Glycine max
agcttatcttccacatttcccttctaaagagtgcccgcaaagcaacatatttacttaatgatatacttgaggagcgacataaaactcgctctcaataacagctggtctaagatcttcctcacgcatgaactccaagggaaaggaaacaagatgtcccttcacagacttcaacctatctatagggtctattattttgatttctccattctcatgacagaccaacttatctggggctattcccatatctatggtggtatgaccaagtttttctttccagtgaaccatgctttgccgaagtgcagctctgcatattattgtaaagttgtacattataagaaaggataaactgaaagtaacaagagataatcagaatattgggaaaaatccacacaccttgagtgtatctgattgttgggaatgcaagcaaagacctcatggtatatcctagtattttcct

SEQ ID NO: 207567 - DNA, 315 bp, Glycine max
  unsure (1)..(315): unsure at all n locations
ggctggtccaatagattttatataacaacttgaatagtggctatatctagaagttggcaccaaattaactggatttttgttcagataggctatatgttgttgaagtgccattntcatttattcttgtaaattgcaggtgatagcagcaacaaaccgtgcagatattcttgaccctgcccttatgcgttctggtcgattagatcgtaaaattgagtttccacacccaagtgaagaagcaagagctcgaattctacacgtttggtgtctttaaacttcatctgctgacttgtttatcatacagaacatctactgact

SEQ ID NO: 207568 - DNA, 425 bp, Glycine max
  unsure (1)..(425): unsure at all n locations
agcttattctaaagttaagattcacttatgcatttcaattnttggaaaaaattatatgaaacatcttctataatcaggtcaaatganaaaccattatttcgaatacttaaatgatcaaaagattttagagttgcgttcccagaaaggtattcaaacttcaactaagaaatacaatagtttacagactatatccatatattctcgagcaaaagtgttattgataatatgaagatgaagtaaagcaaatagccgtgagctactcatcatattccattaagagtgacaacaactgtacgcggtgtaggataatcccgatgctcacaaagccatataccctaagcaaaatggaaatgtaaaatntattaacaattntgaagctataataatctagactcaagtttattactattaatataagtccagct

SEQ ID NO: 207569 - DNA, 409 bp, Glycine max
  unsure (1)..(409): unsure at all n locations
atcctgcccatggatagtaaggatcgagccttgngcaaatggtccccacattgngaaggaccgtttaaaataattcagatctattcgaatggtgcttatgaattagaggaattaacccctcagaaacgtactttgaggataaatggttaatatttgaaaaaatataaaccaacattgctcgaagttgaaataagcatagaatagacagaagtaatggaaacataaaaaatggcgataacagtaaaattgccacgacagggcatgtgtcaatattacatcacgagtagaatcgaaatacagaattcgaaataaaaagaaatcataagttctactaagtcatgaccaaatcctcatatagcttcttcaatgtggccatttctttagttaagacctggntcagcactctcat

SEQ ID NO: 207570 - DNA, 446 bp, Glycine max
  unsure (1)..(446): unsure at all n locations
agctntgaagatacaaactccctccatacacctaagatggttagagttaagccatttttagcagggagttagaatttctaatccaactaattactaagtgcttgtttagcgtgtgtttgtttttccgataaacttgcagcaacatgaagtctgagactacttcagtatagaaagataggtgttgttgcttctccaactttcccaagggagatttatgaattttttaaaagggaatcaaaatgatattcagatagttttaccggtgatccaaacacacttagttagcattcaaaattaagtttagagcatctggaactaattttacaacaacatttatcttaacaggagacttgtgactaaagttaatttaatatccacacaatttaatatccacacaaaattgtgtggatatcattatgtgaattgagtcaaacaatataattatg

SEQ ID NO: 207571 - DNA, 405 bp, Glycine max
  unsure (1)..(405): unsure at all n locations
tcgtggatgcttactccagatacaactagattaggatgcaatctccaaaggaggcgaagatgacatttatcactaaagataccaacttatgctaaagggctatgccctttcagcctaacaaatgtagacgctacataccaatgactgatggaccgagtctttaaacaacaaataagacaaaacatcaaggtatatgtggacaacgttggcggtaagtctcgaagcatagtccaacatgtggcagatctgcaagaagtcttcaaggaactttacaagtatgacatgcgcctcaaccctgaanaatgtactttcggtgtaggcagaggcaagttcctcgacttcatgatcactcaccaagggattgaagccaaccctaacaaatgccctaccatactatagatgcac

SEQ ID NO: 207572 - DNA, 279 bp, Glycine max
agctgtagaaaaaaaattgtcatttaatacttatgaatagataatattatagtagataaaccatgattaatcatcacaagtaaaacagaacgtgggatgtggtcggaaaaaatgagcgattatagaaaagtgtagaaaacagaaatataaactgtgatatataatgcgaagagaaatattttttttgaaaaggatgtgtaaaaagaaaatattaaaaaaaatcaaaattacaaatactttttttttggagtaatgtaataatgttatgtaatactgtat

SEQ ID NO: 207573 - DNA, 365 bp, Glycine max
  unsure (1)..(365): unsure at all n locations
agctntacaaagcagcagcttcaatacgagcgaagtattcataaaggagaatgcagagaggcaaatataaagaagaaaagaaatgggaaataagagtacttgctgaagaacaggaagctttctcattcttagttcgtctcacaacaaaggtaagatccttaatatccttatcggttacttgcgcccagtgttttaatttatccattgctgaaatgaatgcctgtaaataaatatatntgcatgataccaatatgtctgttcctaactctttttttttttttaattatcaatttgatacccaaaatatattaaaagatcttggcttgtgggtgctgtttggatgggttaaggtggtgatgatggag

SEQ ID NO: 207574 - DNA, 490 bp, Glycine max
  unsure (1)..(490): unsure at all n locations
tattattggacattngaatgacatgaatggtgtcaaatatttgttaaagagctaccagttaaattaggagaaaattataatatattatttgtttggtaaattagccatgagagtcgaaagatctaaacgagaactttatatatccatctttatgagtgaaatttcttcacatcttgaataaatgaacaaaagaagtaggcaatataataagctataaagaaaggaacatacctctattcttggaattggatgaccgtgagttgtgattggtctttacttgtcactattccaaatcgtaagcaataaactgaatgtgagataaaaagagcagaatttggaagatagcagaaatatgttggcaagctaaacatgaattaaggatatggatggcgtactactagtccgaagaaaaccaagatcagggtaaagagcaagagaatactgagagcatgacgaaagataccagataacatactcgatcagaaatgat

SEQ ID NO: 207575 - DNA, 399 bp, Glycine max
  unsure (1)..(399): unsure at all n locations
agcttgcagtctacttcccacgtttaatgagggttgtgagtcactgcatgttgtgggtttcagtggtagaaacttggtttaaatatatacaaatttaacttgtttgccttattgacaagtcatgcaatcagctagcttgtcttcgagcaacgacacacctttcaccaaattatgtttctccatataaaaattccaacatgatggaaatgccctagacctttgtgccataattctgcattgcttacagtgcttagaatgctctttgttcttccaccattagaattagagcaaagctttttgccctcatttgcactttgaatatatctctaccatttgcatctttaattaggcaccattaccatgttttcaaatatgaccgcannaaccttttcaatcaac

SEQ ID NO: 207576 - DNA, 362 bp, Glycine max
tgcacgtatcagtcaagtgtatggaccgtatcgtagccaaagtgctcatcgataatggttccagtttaaacgtgatgcctaagagcactttggagaaattaccattcaatgcttcccacttaaagccgagttcaatggtggttcgtgccttcgacggcactcgccgagaggttaggggagagatcgatctcccagtacaaataggccctcacacctgtcaagtcaccttccaaataatggatattaaccccccctacagctgtctgttggggcgcccgtggatccactcagtgggagttgtgccctctacactccaccaaaagttgaaatttgtagtggaggggcatttggtcatcgtgtca

SEQ ID NO: 207577 - DNA, 301 bp, Glycine max
  unsure (1)..(301): unsure at all n locations
ctttgagaagctacatccttatctatccacccctctattaactaaattaacttccttaanaattattacggatgaaaataacgcaacaaataatcaaacatcaaacataattactaataatatatatatatatatatatatatatatatatatatatatatatatcaaggtgttacaactctcccacccttttagaaatttcgtcctcaaaatttaccttactcaaacaaggatgggtgagcttctcgcatctgactntctaattcccacgtggcatcttctcctgatgcacctccccata

SEQ ID NO: 207578 - DNA, 414 bp, Glycine max
accatgctatgtgctcgcgactggtccctttcttcctttcgcaacttgagttcactattgctaccccatagagctccgcgaaatttgttccggccatactcttccttgcgagccctcttggtctcttgttcaagggctcttgcggtaattgcattctcttcccgtaacccggcacactccttccgaacgtgtgtagcggccaacttgaacttctccttggaaagatttgcctttcctaactcgcttttgagagcttggacttctttgtcttcttccggtgcttcaaaattctcttcgctgacgacttttaacttggcgagccaatctaaacctcgtatatgaactttcagccattcgtggtaccaccaatgatgccattacgaatgcctctaagctcttgatctttccttaacg

SEQ ID NO: 207579 - DNA, 446 bp, Glycine max
ctaatacttgtaattagttaaagttaatgaaacttggtagtttgtcaataattgaacacaatttcagtggtagagatgaactagtataaatctttgtaacttatatgtttccttgtgtttttctgctttaaagtgacataaggtttaaatttgattttgttttggaaagttctatttgttttacaaagtttctcttcaaatgataactttgttttgttaaaaaaagacttgaaaattttctaaaaccacaattcaatctctcttcttgtgatatttgcatttacaatatatatatatatatatatatatatatatatatatatatatatatatatatatatatatatatatatatattctaacactcatctaattgtctaaggtctaattaagagtagactgtgcgcaacaagaatatgcatataatgcgcgcaaatctactaaat

SEQ ID NO: 207580 - DNA, 260 bp, Glycine max
  unsure (1)..(260): unsure at all n locations
tcacatgtntgtcatcatcaattatggggagaatgtgaatgtatgtatacatgattntgatgatgtcaaaagaagaatcaaacaaggctcattttgcttcaagattaatacaagattgtttcaacaaacaaagccttgattcaagatttcttcaagatcaagccttgcctcacaatgaaaggtttcaagtcattcaaggcacatgtaattgattaccaatacatgtgatcgattaccaatggtttgaaagtgtgtaatcg

SEQ ID NO: 207581 - DNA, 442 bp, Glycine max
tacccatcacatgtggtactatgtggcggtcgggcgatggtgcacaacaagttttccacatccacaatgcgcgcataaacccaccatcccctgttgcccacctccaactgagctcacgtactcccacgtagcccatatcctcgtttctctcaacaccaggtccccatcaatcctctcaagcttccacaacatccaagcaaaacaacattcaaacagcacaagctatcacagccaagcaaaagtagagcgaaggcagaaaactctgctcaaacaccaaccaaaatcacagcttttctcacttaaagaccacaataacaattccttcgatccaattcgttaaccggtggatcgactccaaaattttactggaagtctatagtgcataagcctacattgtgaaccgtgggatctactagcaaacatcaagaactcattctgtact

SEQ ID NO: 207582 - DNA, 418 bp, Glycine max
  unsure (1)..(418): unsure at all n locations
tgctgcttagtttcttttcttttaattagtgatgttggacaattttccattatgtgttattggataattactaacattatacactatttaacaatagccacttttcctaacatctattttcagttgaaccatcaataatccacccaaactagattattaccaagaagtattgatgcagagttgtttcaccttgattagtagtttcaaattgtagtctttgatatgtatttttgatactctatntaccatacattntaattaaaaaagcattactaattactagcccagttagcaaaaactttgtttaataggcatttactanaaagcatttcctaattccttcgcttccaaatgtggttnttgggcaatcaatggaaccttgncttaaattcctcattacatgcaacatctcaactac

SEQ ID NO: 207583 - DNA, 465 bp, Glycine max
agcttcttatccaaggcaattcttggtggtgaagctccttcttccttggcttattccctagtggatggtgcctcccctctcctcttctcctttgccttccgctgcatctccatggtgaaaaatcaccattgaaggacctcattgaagctcaaagatccagcctccatagaagctccacaagcaagcttccatcagatatttattagggatcacaaacacattttagccaaactagtatttagcttgggctagggccatggccaacactaacttttttcactttcccattcaaatttaattttaaaaaatgtttagaatggaccatgagtgactctactatctaatattgtgtcaacttgactaatgttatgtcattaattattataaaataacataaaataccacttaaaaggctacatccacttggcagactattgagatattagcaagagtactaaatcgctc

SEQ ID NO: 207584 - DNA, 383 bp, Glycine max
  unsure (1)..(383): unsure at all n locations
gtgtgagtgacanatatcacccacttgagtacttgngaaagttgtatatactcatataagtttgtgctattttcatatttattgatataaaatcatgcaattccactctttcaaattattctaaatgcgaactgattgaaactgagtttgcatataacaaaacaaacacccatacaacttggtaacctctaaaagccattaaataaataaatatgagtggactatgtaatggaagtcaaatgcaaaactcaagaatgattccagaattttcttaagctgaagaggtgtttagtgatatgaagatatgaagaatgacactacataattgaagatggaagctgcagtcactaaattntatgttagatgatgcataaacaaagctt

SEQ ID NO: 207585 - DNA, 409 bp, Glycine max
  unsure (1)..(409): unsure at all n locations
agcttctcatggctatgagaggctaaacctcttattgttgggagcttggcatgccaactcttggtattcgtttagcctatttcatacatttctgatcttaatgcaatttattatttttatctttgcaaagaaatttgggagaaaagaataaataaattatgctcttcatgcgggaaatcaaatataaagtgtcttagtagatgtgggtggaaacaaagatttcattagatagaaaaaaaatcattaacattgcatcacacagtagtttggcatgctaggctccaacataatcacattctgaattcatctttcggcatttaaattattgctcattcttcttggtatttcttccttttccttttatccccaattntcacacttacaattccttatctcttctacttcttct

SEQ ID NO: 207586 - DNA, 355 bp, Glycine max
cgatggtcagatggagaacagacagcttcaaggtagatggagaacacagagagcacgatagcttatatggagaagaagacagccagaatgagacgatcgcgcaaaggagatgaaacatacctatgtatggtggcgaacgagaagatacagagacttgagacgatgctcgagtgcgacgaacacgatgctcagatgcacatagagaccttcaaggtagacggagattataagaagaagagagcgcgaagcttagatggagaagaagacagcgggagcttcatatggctcaccatattttgtaaaatataagatcaacatcggttctttaataaaaatcgatgttaacaacatgatg

SEQ ID NO: 207587 - DNA, 404 bp, Glycine max
  unsure (1)..(404): unsure at all n locations
agcttagcactacttgaagaacataatatatttatgaaggtaatatgctacagaacaaaaacaagacaacacttaagttaatgaacttatcatttcctcttttggtttagtcttcttcggcatatattagttatgtttattgcattatagttcgcatcctgtgttacttgtaaccaacaatatgccagaatgaaccataactcanaaggaatcaaaagatataaagcattagcttgattcatttattactttggtctaagttgttatggtttataactacaaaacacagatgaaataatgtaattgaaaatgacacaaatgtaaaacatgacctcctataaagctcacaagaattggtaataaaagccatacaaagtnttgatgttgacaaattcaatgaactg

SEQ ID NO: 207588 - DNA, 279 bp, Glycine max
atagagagctcaatcaaagaataattactgctaatgtctataatatccacccaattgattgagaataaatgttagcattaactctatcatcataataaattgctgactacttatcagcactataaaatagtctgcggagggaacatatacttaaatgatattccattgtgttagataataatcatgagccgaagcatagtctacctatgggtattttccttactctagtcgcatactacgtgaaaataataaaaatttatactaacgaaaaattgagag

SEQ ID NO: 207589 - DNA, 407 bp, Glycine max
  unsure (1)..(407): unsure at all n locations
agcttcttattcaaggctcatcttggtggtgaagctccttcttccatgacttattccttagtggatggcgcctcctctcacctcttctcctttgtcttccgctgcatctccatggtggaaaatcaccattaaaggacctcattgaagctcaaagatctagccttcatagaagccccacaagcaagcttccattaagtggtaatcagagcacaagagcttcaagtaggtgctccttaaacctccattaattnttttgctttactttctcttccattgttgtttcttcatttttctccatgtatatcctcaaatgtcttttgctaaatgttgttaacatgattctttagagtttccaccgattagacttgctatagaagctagatntgattntctatggntcaaatttc

SEQ ID NO: 207590 - DNA, 452 bp, Glycine max
  unsure (1)..(452): unsure at all n locations
ttagctcgcctgngtaatctccaacttgcctatgagagctgtaagtccccaaagtgacccttttcctataaataggagtgttaggggggctgagaaggagttccaacattgagtagtgaaggaaattgagagaaataagagagaagaagaagaaagaagaggaaacgaagccaaggcactgccaaattgcgactgtgatcaatccctacatcgttccttgttcgatgttcttcgtgtgatcgtcagttacttttgtttttaagatttgaatgtgatctatgcacccttaggggtcccccttgttattntgtgcatattcatttcctccatctatcattagtaaatcttgttatntttgtaaatttaatcttaaccaatcattaacattgtaaagttgtcttttaaagacattgaaagttaataaaaccagaaataaaaccaacacataactg

SEQ ID NO: 207591 - DNA, 389 bp, Glycine max
  unsure (1)..(389): unsure at all n locations
agcttgaggagtatctggaatgaccttaagctaactactaatcttgtttagtaattcgctatgattgtcacctacgccttcaattaaggatttagtttttctaagttccctaatttttcgtttagccttatcactaactctgaaaggtttgaataaaggtttttcaatggggacactcggcgaagcttcctcaattgatttttgtttaggaactaccttagttttaatggtttctcctaaagcttgtaagtatttgttggtataatttgcctgttccattangcttttaatgtctctagaggttacttcctcgttgacatcttttgtcttgaatggaattgccatgacaggtttgttgttactgtctttgatatttggtagatgatatt

SEQ ID NO: 207592 - DNA, 225 bp, Glycine max
gtcttgatcggagtgtgtgactcctgtgtatcgtgattgatgattgacaagtgtgactgacggatgaaaagtgtgattgatgaaaggcaaagcgatgaaataatgtgagacatgctaagtaaatggcatttggctactatatgtttgtgtggttctctctagtagctagaaatgtgataactcactcctcggttgctatttgtgtttggatcctgtgatgatatt

SEQ ID NO: 207593 - DNA, 477 bp, Glycine max
  unsure (1)..(477): unsure at all n locations
cgggatcttagagtcacctgcggctgcagctaggccttnanagcctggcctattgccacccctacttctgaagaactatcttttaaaaaataaaaaatatatatcttttatatccttcaaccctaaaaatagagattgtcaatgaacttccattcatgatattaatcaagtattcaagaagcataattgtaagattgacaaaatggacttggctagataggttggctcgggcggcctgcaagtatggtcagactgggctcaaaagaaatcaacttgaatagaaacaagcattntttgctcagcttatttagcccaacgagccaaatggacttggaccagactagcccgatttgtatatataataaatattaaataaaatataatatgttaatacaatgtatagtttcaaattacaatttatactttcttaaagacaaaacatagtcattaaacataagataagtgtacacaagaagt

SEQ ID NO: 207594 - DNA, 280 bp, Glycine max
  unsure (1)..(280): unsure at all n locations
agctcatggaacatgccctacaccaattgtgataataggatacatctaatgcaaactctctgggatttctttcgaatccaagggtagctntgttatataaattctttagggatcaacctgtgtcatcaattttcggtgggatcaacagaaccatggcatcactctatgaccttaaaccaaaaaggggggggggggttcactntgtcatatgccaaagtgcaactattcatagccatacttcangaatgcatgccataggttcctaggccttatatgtgac

SEQ ID NO: 207595 - DNA, 327 bp, Glycine max
  unsure (1)..(327): unsure at all n locations
agcttatcctcacttgcanatttgataactattataatctcagcgtttcaacatcaaaatgatatgtaaatggtttagactcatcttccatgtgatcagagagatatgaaaggcatttaanaacaagctctagatgcaagtgtgaattgtcttctacaaagaaaggaaggatcttctggctaatctcaatccaactacaccctggattcttctttaatccaagctctttcatctttgatctcaccacacgtacttcatcccacttatgtgcagaagcatacatatttgacaagagaatatatggtgatgaatcatcacgatccttat

SEQ ID NO: 207596 - DNA, 300 bp, Glycine max
  unsure (1)..(300): unsure at all n locations
cccttagtgggacagccataacagccgcatcagcaaaaaacgttntcccattctccacagatacctttactgccttatatcgcctaactacttatgtgaccctgaacaaagggaattgcaaggccgtaacttaactactcaaaacagtacatacacatattgagacaacaagttcggataataagtacctgtgccccaatcgaatatccagacccttggctatgctatttacaacaggcaagtagccacggaccataagaccatgaccaccagggagcagtacctcctgtatntcacacc

SEQ ID NO: 207597 - DNA, 373 bp, Glycine max
  unsure (1)..(373): unsure at all n locations
agctntgaaggtgcgtagtccaccatcttttcatagtagaatactggtaatgtgtctactatcattatcatnttttctccgtcattgaggtgccacttgagctgtcaggttcttcacctttgggcgtattctttgaaagatctgtgcccctttttgcacatgttctgttgttgcatcctatccagaaccatatcaaaattgtactgatactgcctaatgaaggcaaccattangtcctcccaagagtggactcgagaaggttccaggttagtgtaccaggtaacagctaccccagtaagattntcttggaaggaatgtatcagcagttcctcatctttngcacatgcccncatcttccgacaatacatcttta

SEQ ID NO: 207598 - DNA, 466 bp, Glycine max
  unsure (1)..(466): unsure at all n locations
ctggaactacttcacatggactngatggggcctatgcaagttgaaagccttggaggaaagaggtatgcctatgtttgtgtggatgatttctccagatttacctgggtcaactttatcagagagaaatcagacacctttgaagtattcaaggagttgagtctaagacttcaaagagaaaaagactgtgtcatcaagagaatcaggagtgaccatggcagagagtttgaaaacaacaagtttactgaattctgcacatctgaaggcatcactcatgagttctctgcaaccattacaccacaacanaatgacatagttgaaaggaaaaacaggactttgcaagaagctgctagggtcatgcttcatgccaaagaacttccctataatctctgggctgaagccatgaacacagcatgctacatccacaacagagtcacacttagaagagggactccaaccacactgtatg

SEQ ID NO: 207599 - DNA, 428 bp, Glycine max
  unsure (1)..(428): unsure at all n locations
atcttgtcatgaatcctcgccataaaattacatagacctgccaattctaaatgaaaaatgtaataaatccaatgctaacaaaaaatagaatagcaacacacactcaaatgacacatgcaataacatttcaatgaataacaaaataacataaaaacaatgatactattcgttgaactactaagccaatacatgcaacaacctgaaccaaaaaagaaaagccaaattagcaaatagcagagaagcagaaacaaaaattatatctctgaacaaataatattgcaaccatcaacaaacaaatagaaaggccgaaaacaaacacaaaaaagttcagctgttggaaaacagaataccaacccatccttataccacacatgcaataagatntncatcaatgccaacataccacanaaagtattacactatcaatc

SEQ ID NO: 207600 - DNA, 452 bp, Glycine max
  unsure (1)..(452): unsure at all n locations
tatgtgatntagaactctgaagtagagaaaaatagtggtcagtataaggctacacaacatgctgttaaaattaactttgtgaaagcaaccaaaattacggcccacaaaatacttgaaatacctgagacaatgtataatttcacaatgtttgataccattgtaaatggctatgccagacctgattatttaataggtataattttttaaaaattgaagaattgatttgattaacatgttaatgttgctatgtttttttactttggatttttgttgaagatgttattggtgaggttgttgaaattggtcaatgaaatctgcatggcaagccaaagaaagtggtntcaaaatgaaagatgaatggtattcattagnttattattattagaatcagaangtgttactcaacattatttagttcagaagtttttaatggtacttgcatttatgaacac

SEQ ID NO: 207601 - DNA, 464 bp, Glycine max
  unsure (1)..(464): unsure at all n locations
catccaggtaatacaacattctatcagcacanactatcacagccaagaaaacagggcaaaggcagaaaactctgcccaaaacaccaaccaaaatcacagcttttctcacttaaagaccccagtaacaattccttcgttccagtttgttaaccggtggatcgactcgaaaattttactggaagtctttagtacataagcctacattntgaccgttgggatctactagcaaacatccagaactcattctgtacgactctttccacaatcagcaaatggatagcatttttctgcacaaagccaaaattttggtgtacctatttgacagcaaaattctgcataagtgcaaatttcgaaaatcacactntccctcatccaatcttgcccanatcanatcctacaagtcccaaatcatgtatcaatcatgtctaaaccaaagtcaagcttcanaccacagcaacacaaaa

SEQ ID NO: 207602 - DNA, 316 bp, Glycine max
  unsure (1)..(316): unsure at all n locations
taccatggctaccttgattaattccttggtagctctcttgagcctatgttcccctttcttttgtttgaagctcattacaagccttaagtgaaaaaccatgatatcaccttacccttaaggaattttggagctntgcaattgttttggggataagtgtgggggggtatgtttcattggaagatatgatttttggccatgcttaatgttttaatttggccatgcttgatgtatatatatattgcctagttcttgctntaatcttcaaattcatactggttaaaaaaaatganaaagttgaaaatgaaaaanaaaattc

SEQ ID NO: 207603 - DNA, 434 bp, Glycine max
  unsure (1)..(434): unsure at all n locations
gcttatagttattggagggagaataaaatatattcattatcaattgtacctttcaagtaacgaagaattctttntgcggcttttagatgaggagaggtaagagcctccgtaaagcgacacacaactcccaccgtatatagaatatcgggccttgtattggttagataccttaaactgcccacaagactcttgaaaaccgtggagtctaccttctgtccttcatcaaactttgatgacttcaagccaccttccataggtgtgttcacgggattgcaatcaagcatattaaatttcttcaacacttcttttgtgtagctttcttgtgagacaaagataccattctccatttgcttcacttccattcccaaggaatatgacatgagtcccatatctgtcatatcaaattcacgagacatagactccttgaagtcttc

SEQ ID NO: 207604 - DNA, 393 bp, Glycine max
tgtatctagtctaggtctgagagaccatacaagtttcctaacgatttctaattatgtgggccattaagtctatcatatgctgacaatagccgagaagcccatgaatctcttcggggacggagtaggtgtccgccatcgccttggccttggctaacaagcggggaagttcttgactcctgttcaaggtaagagcaaaccgatccatccacatggttgcctcttggtgtaaagagtcgatcacccttactctagcctttttttccgcgtatacttgagcatactcgtacgcgatcctatgctcgtgggccgtggctagacctaactcttattggtacttggcgatgatagctagcatgttggtctccgtctcgcataaacgctgagacaagcttc

SEQ ID NO: 207605 - DNA, 437 bp, Glycine max
  unsure (1)..(437): unsure at all n locations
acattntcgtgaatgtgacaatctattccttagtggattgattcaccttaacagcccanaaaatcatataagcataattagatgcaacaactcactcatctccaatcttcatatgattgcaccaaatgaaagcccaaacactgatgagaatgttatctcacattcatccaacatttccataaagaactccaagatggaaattggtaaatcatatataagttacaatctttaattgcataattattatatcttgtccttaaatcattcaatgagattgcatagccctttaattcctagttttttttataaggctactcaagtggtagatcctctcttaattntttttatttaaaaattatgtgatgcgtaaatattcatgtttctcatttaagttgacaatcttatgtaataaaaagaagacacaaattctcttcata

SEQ ID NO: 207606 - DNA, 284 bp, Glycine max
  unsure (1)..(284): unsure at all n locations
ttcatcttacagacagcacaagaaagtttatacggataaccactctggtatttccacccgtcaacgtgactcaaatgtcagtatgacagatcttgtgaagggtggccgacaaaagcgaggctctngctcctacgtatcctccaatgaggaactcagacctacgtagntcttgataacttgtgagacttgaaaagtctccacccgaagatgctgacatcttcggaaagggcgcagatgaccacacttggcctcatgctcgtcaatcacacttggggtcactgaat

SEQ ID NO: 207607 - DNA, 364 bp, Glycine max
agctaggagcgctatccgcagactcagcagatgtagttgggttataaatcagactatgtgcacgaatcttatacccagtgggttattgataggaccaagagctttggcctaccctaccgcttacctagatacctatcggccaccatcccaccattatccttgcctatccccttcgacaccaaggaagagttttatgaacaattaaccaaagaaaggcaagaaaaagatacttgtgagaagagatgccacgagctagagcaagagaatgagactttgaaggggaagatgacccaacagagccgtgagctttttatccagaaccagaggatgattgagaatgacgacttgcttcgtcggaaagacg

SEQ ID NO: 207608 - DNA, 397 bp, Glycine max
  unsure (1)..(397): unsure at all n locations
atcccgtcattctntttcagatagtgttataagatatatattgaagctgatctttcggaatctaccaaattggaaacgaaaaaatgtgactatttaagcaccaaattgactgcgaaagatgatgaatcatgtataagatttgaagtcaaacaacaggaggaatgttcaagaatttagatatttgcacttaaaaggtgagacagtgacatgaaaacaaccaagtgaattggtttcttgaacgtctaaaatacatgcatgaatctaattaacttgatattgttgttaattcaattacggatcttaaaacatactcccatctccaaagaggatatttgagcatgcaattatatctataatctatatatgacatcattggtgattccagaaatttaaattt

SEQ ID NO: 207609 - DNA, 258 bp, Glycine max
  unsure (1)..(258): unsure at all n locations
ttattcacacaacatacactactgacacaaaaattcttgaattatatatgcagaaagntcttcaattcgagctgccttattagctatcacaagctagacggcctcttcataaggtactcacctacacatgatttggcatgttaagttattcgggttgcgcatagcgtgatctcatttattaaggggaggttcatacttctttatcctttctgtgtatagaaacctaacttgaatatgatgtaagcatagctatcttgt

SEQ ID NO: 207610 - DNA, 309 bp, Glycine max
tatgggccatttagtctatcatatggtgacagtagctgagaagtccatggatctcctcgaggccagagtaggtgtccggcattgctctggccttggctagcaatcggagaagttcttgactcctgttcaaggaaagagcaaatcggtccatccacgttagagcttcttgatgtaacgagtcgatcacccttcctctagccttcttttgcgcatacactcgagcatactcgtgtgccactttgtgctcgtgggtcggggctagatataactcctcttggtacttgttgacgatggctaacatgctggtct

SEQ ID NO: 207611 - DNA, 408 bp, Glycine max
agcttgtaacataataatacaaattagtctcactcaactaataacaataatggtaataagttcacattcgcaaggctggctgatttgctgaatcctcgtcgtacagctgggatttcctaggtatctccactcattcaagagtgactgtagtaattttaatttaggataaccaccatgcttctgtttctctgtcactttctaattcatcattttataatgcctataatcaataaaaaaaatcttatttttttactgcaataaaaatttgtatttatttttacgttgtataatatgtttagagtttttttaacacaaaatatttctcaattaaaaatcagaaactaatctcttgaagccaataggagatccagaaattgtagttgtggagacaatatttatttactattt

SEQ ID NO: 207612 - DNA, 362 bp, Glycine max
  unsure (1)..(362): unsure at all n locations
actgtgtactanggatgacaaaatattntattcttgccattgccaatattgggagataaaatctgtcatggataaatgacggatatttgaaatggatatctattatctattgataaagtatttttttatccgctcattaataaatagggtatggtatcataataccctacctctcgatatttgttacttgcgaagntataaaaagtatatatatgtattttcaagttatatctggaaattaatggtttgaaatattagaattttatttattctgtggatctatgtntattatgcgtatatatatatatatataatcagtgaatattttcaatagagtatgcaatacgaccgtatcatatatc

SEQ ID NO: 207613 - DNA, 444 bp, Glycine max
  unsure (1)..(444): unsure at all n locations
agcttcagaccaaagcaacacanaatctatgtattcaaaacccatcaatttaatggattttcaaggtttcagaagtgaaattgagaatgaggtaaatttggagcaaactctcaccttacacaagtctataacatcaatttaaacttgctcaactggatttacacctaaaattccaccgaatcaaaatttgactcctcaacacccaattttaccctagaaatggctctttgttcactttggtcatttgtttttctctcttgtacaaccccagctttctcataagtcctaaatgacatttcaagctaggattaactcactgtaacctccaaatgccactaaatccagatttggccttccaactctcaaaacctcactctntttccactcataacaccatattctcactttctaaccctagggtaactctacccttcatctctaaca

SEQ ID NO: 207614 - DNA, 483 bp, Glycine max
  unsure (1)..(483): unsure at all n locations
gagatccaggaaggatgaagtggctgaaggaaccagttntgctcccgaatatgatagtcatcgttttaggagcgctgagcaccagcagcgcttcgaggccatcaagggatggtcatttctccgggagcgacgcatccagctcagggacgacgagtataccgacgcgcaccaacatgaccaccctgacccagatctggatgactntgctgctcagcaacatccagcccagcgatcataattccgacctccccctgccgaagtgtcagctggtgtatgccatcctgacacggatgagcattcacgtggctcagttaatcgctgatgccatctatctatntgcaggtatggcacctaccaggcaccctctggacccggataagtccaacagggccctgggatttcccgctntgatcagagaactctgccagtcgntcggagtccccgtcgcacctagcaaggtgatttcggcacccatcacccgag

SEQ ID NO: 207615 - DNA, 353 bp, Glycine max
  unsure (1)..(353): unsure at all n locations
gtcacctgctgcatgcaagcattgcggatntggtcttcgccagtgttatgatcgatgtgggtccgaaaagaggcaaatttgatcatcctactaggacgactgagaaaactggggcaaatgaagagggtgagaaagagggagaaacctatgctgtgactgccattcctatacggccaagtttcccaccaaacccaacaatgtcattactcaatcaataacaaacctcctccttacccaccacctatttatccacaaaggccatccctaaatcaaccacaaagcctgtctaccgcacttccaatgacgaagaccacctttagcacaaaccataaaaaacaccaaccaaaaggaat

SEQ ID NO: 207616 - DNA, 411 bp, Glycine max
  unsure (1)..(411): unsure at all n locations
ctcagcttcacatcagaccacttccagggtgctggatctacttcacatggacttgatggggccgatgcaagttgaaagccttggaggaaagatgtatgcctatgttgttgaggatgatttctccagatatacctgcgtcaactatatcagagaaaaatcagacaccttcgaagtattcaaagagctgagtctaagacttcaaagagaataagactatgtcatcaagagaatcaggagtgaccatggcgcagagtttgaaaacagcacgtttactgaattctgacatctgaaggcacactcatgagttctctgagccattacccacaacagaatggatatttgataggaaaaacatgactntgcaagagactgctanggtcatgcttcatgccacagaacttctctataatc

SEQ ID NO: 207617 - DNA, 375 bp, Glycine max
  unsure (1)..(375): unsure at all n locations
taacggaanattgatggctacattactttaatttgttctttcttctgagagttaagttctaacttgtaaaaacgacaagaattcattattaaagcggaatttcccttctaaatgttaatgtcttttttattttctccttttatgctaagctagctgtattatccttgagctcgaaccttcttgaattgtttatagcaagatgaaaaaaaaataaaaatttggaacacagcattatcttgggatgaagaactatgtgtcgttataagatctccatccattgctttcagatngagggtatagttagctatcaagtgcgaatgattattggttgtttcactttcccaaagtagtctaaccttattgagtattaaaaat

SEQ ID NO: 207618 - DNA, 425 bp, Glycine max
  unsure (1)..(425): unsure at all n locations
atctccaatgctatgtaccttntactcataccccttcttggtgtagcttctgctcatctttcaacaatctcttaccaagatgttgtccaactatgggaaaatctcaagttcaatcttgtctcagtgactctatgttctagccttatagtgttccttgtcaccttttacttcatgagccgtccaaggggtgtttacttggtggattttgcgtgctacaagccagagccagattgcacttgcacaagggagattttcatgcacaggtctgtggaaactggtgtgttttcggaggagaacttggcctttcagaagaagatacttgagaggtctggtttgggacaaaagacttacttgcccccagcaatcttgagtatccctccaaacccttgtatggctgaagcaaggaaagaagctgagcaagtgat

SEQ ID NO: 207619 - DNA, 465 bp, Glycine max
  unsure (1)..(465): unsure at all n locations
atatttatacatgataaaattccaagtagtgtatacaacaatagttaagcaatcacaatcctttttaactcaaatcaaatacaaaatcatgtaatgaataataagttatgttgctttacactgggtgtcaataacattaacaattggtccatcctttataatagttctttgcaattcacaaacacgtgttacaccagaggagcttgnacttcgattgaaggctctccttccaagaacactatttcctactgcactcttgccattgccagtacgtccgactaaaactagtgtcctaacttcattagacgaggatgtttttgccattgatagtaacaaatttatgttacagctgcaaggaaaatatatcataaataanaatttagcaatagaataaattatacacacacacacatatatatatgaacatataatgtaattacaactaataaacatttaanaaacaaa

SEQ ID NO: 207620 - DNA, 319 bp, Glycine max
  unsure (1)..(319): unsure at all n locations
agggtatgcgaaatattcgactntgcgcgatgccgtgaggttntatgagaggatgaggtgtgatgaggttatgcccgtggtgtatgattttacctacttgttgcagctgtcgggggagaatttggacctcaggagggggagggagattcatgggatggtgataactaatgggtttcagtccaatttgtttgccatgactgctgttgtgaatttgtatgccaagtgtatgcagatcgaggatgcatacaagatgttcgagagaatgccgcagagggacttggtttcctggaacactgtggttgcgggttatgcacagaac

SEQ ID NO: 207621 - DNA, 450 bp, Glycine max
  unsure (1)..(450): unsure at all n locations
agctnggaggctactagactgaggtgattgctatgtgaactttgttttcaacagaagaactggtttaataagtccatcaaaatcatccaactgtaaatccaaggaatcgttgtcacagaaagctgctggctcaaatgattgatcgaccacatctgcaacttcttcattcacaacatcaaggctgatgtagtcagaaagttcctcttcaagttcaccattctgtctatgtcgctttggagccaccatcatcccagatttagaaacatcagcaggaataaaaccaaaataacgccctctactgttgttctgatctgcagttctcttccttttctttcccttgctttgttttttggggtgatgaagtttgcatccggttccttgagtacaggttcctgttgcttcaaaagtaggacagacatagctgtgcttcttccgacactgaaagaacat

SEQ ID NO: 207622 - DNA, 470 bp, Glycine max
  unsure (1)..(470): unsure at all n locations
agctaccatgttcacctcatgctcaactgcctctatcttaaaacaggccctgtggtcatttggatgcttaattgtgtaaaatagattgaaggtaaccttttgatcatctacactcatttataggttaccatttccaatgtccactacatacttagcctcaacgtgaaaggatggcctaagatcaatggaatttcagcatcttcctctatatccatgatcacaaaatccacaaggaatgtgaattgacgaaccttgaccaacacatcctccaccacatcgtaagatcttgtaattgaatgattagcaagctgcaatgtcattctggttggtgcaatctctaagttcctgatccttctacacataaataggggcattagatngatgctagccctcaaatcgattagttcttttccaactgatacaacacctattgagcacgggatactcatactccctggatctttgtcctt

SEQ ID NO: 207623 - DNA, 425 bp, Glycine max
  unsure (1)..(425): unsure at all n locations
tataattatgacgccccatttgatctatgcttgattggcccattcagtttaggtcacattttcttcggcctagtctagtttggcataatcaatcgacttattgggctgagttcattntgacaactctaataataattgaggtattttatatttttttttattttttagatggttacatgaaattttaatttctcaaattctcacataaacaagtattctcttttaaagttactataagaataacttaatcctcctctctttatatatatattattgatttaattntacatcatatttgaatcatataaatatattatcatgtatattttttatccatagaaataatataaattntataaaatttataataactcgtgtctatttaactaattgagctaaattccattagtgaacactatcatgta

SEQ ID NO: 207624 - DNA, 411 bp, Glycine max
  unsure (1)..(411): unsure at all n locations
ttcttgatatatgtatttctgctaccattcaatatatcttgagatgctgntntgatcatcttgaacatttacattgcacgttttctgctacatggctagatgcatttctaatatacggtgcttcaaaattctgcaatggagcattttggctagatttcacatggatgacatgaggtgaaagcatgtcaatggtgatcggttgggtggagttgcatcatttgcaatatatgagttcaaaggaacaccattatttnttttaggtcaagctntagatgtggagaaactcttgaacaaaattttattcacgatgtggtcatggctgaagacatatcagcctgactntgatcactntctctttccatcagtggcatccaaatccgggaatatgtttgtcttagtgatttttgatat

SEQ ID NO: 207625 - DNA, 398 bp, Glycine max
gcttgtatcatcagttggactgcagtatttttaaagagaacttgtcttggaaggctgggtgcggggaaaatatcaaattctggtctgacaattggctaggggaacaatacaccctacagcagaagtacaaccagctgtttctcataagtagacaacataacgctctcatgtcacaaatgggccattataacaataatacctagtgctgggacttgaggtggaggaggacctatttgatcatgaaagtcagatggctgttcagtttttggaggagatcagcaatgtgcctattcaaagccacgtcaaggataatatgatataggtgcctgaacctaatggacagtacaccactacgtcagctgatagcttatgtatgaataccagctcagtaaattctg

SEQ ID NO: 207626 - DNA, 390 bp, Glycine max
atattataaagcttttcatggtaattcttaacttactaacataaattatgaaattctatacaagctactgttagagccatcaaacaggtcacaaattaaacatagattgcattgaaggaagaacccaactcttcaaactaattgcacataataagtgttttatctggctaaactgtacacactaagacaggacacgcagcagcaaaagatagtgaataacttagattcaaaatgtcgatctcatcactatgcacaatgatgctcagataagtagctatcttacatacttaatcaaacaacttcagaagattacaatgaaaatctcagcactagtaaaaagaacatgacactccgtcacaagattacatacaaccatgtcttgttaacaca

SEQ ID NO: 207627 - DNA, 152 bp, Glycine max
taaatgatataggcttactgtatttgacgtataagtgaaaatgcataggctcatcattatatttcccttgctcatttttgtatatcactacttgctacagaaatataaacttgtatatcaaaaagatcttggggaggagcatagctgatgcc

SEQ ID NO: 207628 - DNA, 529 bp, Glycine max
  unsure (1)..(529): unsure at all n locations
cgccattggaccatcgtgatcgcgcagcatanacgcgcacgctngatgctcatactcgaccccgcactaagggtacgcgctagtttgtccatgcttgatgtcgcaagggatcatgaaacgcagatgcgtgatgaagatatgcctctatctgtttgattgtacctacctcnagcatacgtcagaggataattttttctccacgatggtggtcgatatttccccaactgtatcactcttgatatgtagtcctaattgtaagacctgaccgctgtagggattatgtatgaccagtcgtggcctaccgagattgcctccgacatgtctcacagaattcctgagaaggacaaggttgcctggaacactttgcgggctattatgcgcgcaccggttggcgcgaatggcttaccagtggaaagcctgtgatgaggctgccttcttccatgttcttctactgataagcttgccactatgcagatttatgcttgatgagagaagctatcgagtgtactttaagcgtcctgaggatgcg

SEQ ID NO: 207629 - DNA, 443 bp, Glycine max
  unsure (1)..(443): unsure at all n locations
agcttccaacaatgggttagttagcctctcatggccatgagagacccanaacaaganaaggaaacaaaccaaatggagaacatggaagaagaagagctaccaaggtggcttttgtctccagaaaaatgccttaagcgatctccctttgtccaatggaacaattccctttntaaccctaaaaaacatttcaatgtcatttttttcaaaaagatctcgcgtgctaagcctgcatgtgcgcactaagaaccatgcatagtatagatgacttaagtcacaagacgtcgagcttgcatatgtgcattgagcgcacctacatggtacaactgacttaagaaaccaccggatgtttgacacatgttcctccaggttgggcttctcgcattgagcatgcattggcgcactaagcgagctgctctagttcttcacagatcttctagtctatt

SEQ ID NO: 207630 - DNA, 510 bp, Glycine max
  unsure (1)..(510): unsure at all n locations
cacgcatgacccttgttgatccnttcattacngacacttgatctcagcttaccagagggaggtcattcagttctgaaggattatgacatgcgtcaagaatgattgccggtgaagcgattgagacaatcttttgatagggagagagtatgatgacgggcaggaacctttttagaagacttggagacctatgcaggctaaataagaaggccaggaagctcttcaactagtcttaaccatgctatttgaaattacgcccacgttacaagtggagaaacttctgattgtcaattgcaccatgttccaagaagagtagagggtgccacttttgttgagtggctgtattagcattgttacgtgaaataaaggcccatactcgtgttgaagtgactatcaattctctttggatttgaccacctatgggctcgtttaantttaagaaatanggttaataggtgaaactctaggatgtggcttgctcttgctaaccangagatgacaattttatatgtt

SEQ ID NO: 207631 - DNA, 444 bp, Glycine max
  unsure (1)..(444): unsure at all n locations
agcttgaagaacgtgnttttgaccaactatattatatatgccccacattgaanatgatgtgaaaggtgatagtatnttaattcgaatagagcaaaggggatttatttatttaatttttaccttttttgatgatcaaggatgtttagcaagttatttcaaaatatttataacttatttgattgcaacaaaaaaaataacttatttgattaattaatttataaacctatttaattaagagcatgttnttacaacttttttgttaaatcacatgttttttcaaaaattaatatttttttctaatttctcatgcgtctgtttcaattttttaaataattagaatctttaattctttcgtgggatctctagtatcactataaactntgctcagccataanacatattaatattcaatccaaagcttaatcatatttacattntcttatc

SEQ ID NO: 207632 - DNA, 419 bp, Glycine max
actaagcgtggaaaattaacatatcataccattcttcgacttttattgattatttgcataattactttcgatgagttttgacaatctattgtagaatatttttataggacctagattcttgctgtaatatttcaacataaacatcaatttatatatgtacataataatacttgaacaataattttaactcctcaacagaattgtacattaaagtgtttcaagattttgcaccactacacctaatttaaattatatttaatttcattattgttgtgataatctctttcatttttaaaccatgatattgatacgaaattgtattcgtccaaaacaataacaaatctctattaaagaccataaacacatgtaatataaatatatgtcttcaacataatttatttcatgtgcaataatgaatc

SEQ ID NO: 207633 - DNA, 438 bp, Glycine max
agcttgaaggacacgaagatgcttcttctgattatggagattccaaagtgtatcttcctgaccttggaaagggcttgggttgtgtaattcaaacaagggatggaggctacttggcttccatgaaccctttggatattgctgtggctagaaaagatgctccaaagctagctatgcagatgtcaaggccttttgtgttggcatcacaccaatccttgacagggttcgagttgtttcagaaattggctggcattggatttgatgaactcagctccaaggttttgtccttaatgcccatagatgaaatgataggcaaaactgcagaacaggttgcttttgaaggcattgctaatgcaatcatacaaggtaggaacaaggaaggagccagttccagtgctgctagaatagtttcttacttgaacagcatgggaagtgccatga

SEQ ID NO: 207634 - DNA, 382 bp, Glycine max
tcgcagaactgtccttgtcagcatactccatccctttaccttatgtaccatcaatctttgattcaaccaccgaattccttcccgtcgacgtcaaagaggtagattccttcccatcatcacaggcttttccactcaatttaacttctttgacagagtccgacttctgcaagggcctaagaccactgttaccatttcttggattcctttttacatccatcgccaacaaccctgaagacaaacccttctgcttcctactactatttctgctcaaaccacgtggtgcatgtaacccattaccgtggttgccctcagaagcagaagctacagactgagtaggtgtaggtgcacttatgagttcagtccaatcatcatctgttagggt

SEQ ID NO: 207635 - DNA, 436 bp, Glycine max
  unsure (1)..(436): unsure at all n locations
agcttccncaacatcaaagtaatacaacattctaacagcacaagctatcacagccaagcaaaacagggaaaaggcagaaaactctgcccaaaacaccaaccaaaatcacagcttttctcacttaaagaccccagtaacaattccttcgatccaattcgttaaccgttggatcgactccaaaattttactggaagtctatagtacacaagcctacattttgaccgttgggatctactaggaaacatccagaactcattctgcactactctttccacagccaaccacacacaagcatttttctgcacaaagccaaaatcctgctacacctattttgacagcaaaattctgcataagtgcagatttcgaanatcacccttcctctcatccaatcttgcctaaatcaaatcctacaagtcccaaatcatgtatcaatcat

SEQ ID NO: 207636 - DNA, 423 bp, Glycine max
  unsure (1)..(423): unsure at all n locations
agagggtgcttcaatggaggaaaagattgagggagagattgagagaggggggagcatgaaattgaactttgagttgtgtctcacaagactcccattcatcanagttacaacaagtgttacacatgcttctatttatagactaggtagcttccttgagaagctgtcttgagaaaacttccttgagaagctttcttgagaaaacttccttgagaagcttctttgagaaaacaacacacactcatctaaaaactaagctcacctccttgagaagctagagcttagctacacatacccctctaataactaagctcacctccgtgagaagagaaactagagcttagctacacacccctataatagctaagctcaccccatgacaaaatacatggaaatacaaaaaaaagttcctactacaaagactac

SEQ ID NO: 207637 - DNA, 382 bp, Glycine max
  unsure (1)..(382): unsure at all n locations
agctntngattatgacttgatagttcctctntttaagcgaaggcttttgactcgatcccatgttctactatagtgaacaaaaatcggcgcgaatcagaactccaacatctatcatgggtggaatggatgaatgcatgatgaaatatgacacaaatgcaatttattaacacaggagcccgggaaattgtctccttcttagatacaacatcttgtggtagcaaagtgctcgacgtatgtattaaagaaggtgactcgaaccatccgtctggtttccaatgtgcgtgatgcatatgcgaaaggcgcaacacgggaatgtacagtatgacaatattcacanaatatatagcaaatggtacgtgacacttatgcatgggagtgtgaa

SEQ ID NO: 207638 - DNA, 427 bp, Glycine max
  unsure (1)..(427): unsure at all n locations
cacaacatagattccacatccacaatgcgcgcataaacccaccatcctgtgttgaccacctgcaactgagctcacagactctcacgtagcccatatccctcgatctctcgacactggatacncatcaatgctcccaagcttccacaacatgcaagcaaaacaacattcaaacagcacaagctatcacagccaagcaaaacagagcagatgcagaagactctgctcaacacatcaaccaaaatcacagctcttctcacttaaagaccacacgaacaattgcttcgatccaattcgctaaccgatggatcgactccaaaattttactggaagtctatagtgcataagcctacattgtgactcgtgggatctactagcaaacatgcagaactcattcntgtctactctgtccacagccaaccacacacaa

SEQ ID NO: 207639 - DNA, 390 bp, Glycine max
  unsure (1)..(390): unsure at all n locations
agcttgacacagcagaaaaatcctatgcttctattgtaagcaatacaaacgtataaaaaatcatgtactggttgaaatctaaaaggtttctctgatcaactaatataaactacaataacaccaataatagtagtagtgggtatgcatgattttaattntgatctatttctagtgttaaatttaacatgttaatcatatattggcatgtcattaaaggggttggactatatataatggtttattctttgggattataattttgatacaatgtcaatataattgtttttttcacatcaaccaatagaaaatcaccctagatatgaatttattacaaaagttaacaatattcaattgcataacagattatgaattgggctacataaagagttt

SEQ ID NO: 207640 - DNA, 365 bp, Glycine max
  unsure (1)..(365): unsure at all n locations
acctgtcacattnttccttatgacttctccggtgatgatgtctcctactagctatacttgttatcagagacataaagtgttcagcgccactaagctttataatcttactaaatataccaatctggaaactgaagctatcttgaggactaatggcggtgttggcagcgggggaaggtggcgtggtattaagaacatatatgatagaaaagagaanaattacgccgactgaaagccacaagagggctctgttgaatcccatcttttagctttatgaaatggtgtagtatatctgagtatatttgagctaaaacacgggtttgtggtggagaggaggagagtgaggaatgcttctattatgtgcatgt

SEQ ID NO: 207641 - DNA, 331 bp, Glycine max
  unsure (1)..(331): unsure at all n locations
ctgatcgctaagcgacaccttattcttggctaagcgcgacttagtgtcgccaagcgcaattccttacggccataactggggttcataaagctaagaatcactcatggtagctaagctggattccttacggcaatgtgagtgctaagagagtccttatcagctaagcgcattctcctctgtacttaagatgcattatttgagctaacccagccatagcttggcttagcgagaattgcagcttttcggatctgcaaacctcgctaagcagtcttaccctcatgctaagctaagcctgtgttaaaaaaaaactgantttgaatttgaaacgttg

SEQ ID NO: 207642 - DNA, 405 bp, Glycine max
catgatattagaggacaagttgaaggcttgtcaaaggtcgaagagaagtttgactgaacagctgagtaggacggaagagaatatgttgacaatcattgaccagtgtaaagagaagctaaacctagctgctagccatgagcaaaggctacaggacaagcatgcgaaggtatcggctctgcacgtgtgaaaagaagcaagagagagagtgatagaatcattgcatggaaaagctatgaaaggggtggataggttcgctcacactctgaatgggagtcaagagctctcaagctagttagccaaagccaaggcaatggcggatgtataaacagctcccgaagaagttcatagtcttttcgattattgcaacatatgatagagctgatgtcccacataattaggaatcgc

SEQ ID NO: 207643 - DNA, 453 bp, Glycine max
tttagatgatgcagatgggtttgtatctacctcatgcactcctctaatgactatggcatcatttctggcgctaaactgctgggagttggaggccatcttctcaattaaatttctggcttcagcaagagtcatgtctccaagggctccaccactggcagcatctatcatacttctctccatattactgagtccttcataaaaatattggagaagaagttgttctgaaatttgatggtgagggcaactggcacatagtttcttgaatctctcccagtactcatacaggctctctccactgagttgtctaatacctgagatatccttcctgatggctgtggtcctggaagcagggaaaaattattctaagaatactctcttaaggtcatcccagctcgtgatggaccttggagcaaggtaatacagccagtcctttgccactccctctaatgaatg

SEQ ID NO: 207644 - DNA, 367 bp, Glycine max
  unsure (1)..(367): unsure at all n locations
gagcttctatggaggctggatctttgagcttaatgaggtccttcaatggtgatntttcaccatggagatgcagcggaagacaaaggagaagaggtgagaggaggcgccatccattaaggaataagccatggaaaaaaagagcttcaccaccaagatgagccttggataagaagcttggaaggatgcttcaatggaggaaaagaaagagggagagaaagagagaggggggagcacgaaattgaaggaagaaaaagggagagaagttgaactttgagttgtgtctcacaagactctcattcatcanagttacaacaagtgttacacatgcttctatatatagactaggtagcttccttgagaagctttc

SEQ ID NO: 207645 - DNA, 472 bp, Glycine max
  unsure (1)..(472): unsure at all n locations
atccttagagtcacctgcggctgcagcttgcgtgatccttgaagttnttctatcatcatagtttctaaatctttggtttccttgattgtcacaacaatgtgcacaaatttgggatctaacgagcatagtatcttctccataattcttacatcttttaacttctcaccatttctttctagttgatttgaaactacgggaattcttgaaaaataatcagaaatggactccgactctttcatatgtaaggattcaaactcacctcttaagagtttggagacacaccttatttactttgtcttctcctttgtgagaggtttgaagcttatctcatgcctccttagcgaatgttgcatcagaaatcttctcgagcgcatcatcatctaatgcttgaaagatgaagaagagagctttcttgtctctctttcttgaatcctttaaagtcccttttgtgcttgggataatgaagtctcat

SEQ ID NO: 207646 - DNA, 572 bp, Glycine max
  unsure (1)..(572): unsure at all n locations
aactctgatggcatgatacccatgctagtacgtgacactatagatactcaagcttattacttattggcaataacagtatatccatntaatagtaattttattaaattatttatccctttaatgttaataaactaattaattaattgtttaaacttttttgtgaattaataataatatgatatcatgcataggggtgggaatgacttggcctacataaagtctggcatgaacttacctatttaattaaaaggttagactcaggtttttttaaaagcctattaaattaaatagaccaggcttatgcttattaaaaagccttataagcctgataagccggactatatatatatatatatatatatatatatatatatatatatatatatatatatatatatatatatatatatattattntttagacacaattttttttttgaaaatatcacactctgattacacattagngctctataatctctatttctacccatgatcaaggactttatatacacattataatttangngtgaggcatgtgctcttctatatttcctattattctatatata

SEQ ID NO: 207647 - DNA, 417 bp, Glycine max
  unsure (1)..(417): unsure at all n locations
gctatgagtgcaacctgaggaagggacaacaatctatcaactcgaaacctgctgcaccacatgctcctcaagcacatctagcagaaaaatagctgctgtggtagtggaggcaaacatggtcgacaacaaggtggactggattctagataccggtgcttctaaacacttatgcgccaacaaagagctttttcaccagattgaggatgctgatgacggagaatgtgttttcatgggaaattcagctacaactggagtgcttggtaaaggaaagattctccttaaacttacttctggaaaaacattatctttgagtgatgttttgtatgttccctctctgcgtangaacctaatttctggtagttgtctaaatagagctggattaaaattggtttttgaagttgacaaagtagtaataac

SEQ ID NO: 207648 - DNA, 420 bp, Glycine max
  unsure (1)..(420): unsure at all n locations
ggtctgccaattaggtgtcaattcatctatatgatcactaacagaaagaaaccactctatctctcgtcgccacattgctttcttctctgaacgcaggggctctaatctccaaagttggccaaagagggtagctgcaaattcagcaaagaaatgaacaacaacaatcaaagtcaagaatagcaaatgaataaaattcaccacaccaattaataaaaaataaaaacacagtaactgcttcaagtgtgcattttgcataccacatagattggttatggcatttgagatagccaaggctgtagcgaccccatttccacaacctgacatatcttctccaagtaacaattttgcaaacctctccttcatcatctcaatctctacaagtgagaatgaanatcanatctcatcatactgatatcatca

SEQ ID NO: 207649 - DNA, 461 bp, Glycine max
  unsure (1)..(461): unsure at all n locations
gcgcaacaaatattatattgttgcgtgatcagtgtaaatcactatctttgatcccaccaaataagatcgaaatttctcaagtgcaaacacaattgccagcaattctttctcagtggtggcatagataatctgggcatcattccaaactttgctagcataatagatggtatgaaacattctgcccttccgctgccctgccctagcatagcacctactgcataatcacttgcatcacacatcaattcaaactcttgtccccagtctggtgctataatcacataagcagaaaccaatttggctttgagagtgttaaaggcttctaagcattcttcattgaatacaaacacaacctccttgttcaacagattgcttacgggtttagaaantttggagaagtttttaatgaatcgccaataatatccagcatgacccataaagctgcgtatgccctttacattaac

SEQ ID NO: 207650 - DNA, 433 bp, Glycine max
  unsure (1)..(433): unsure at all n locations
ctaagcttaaccatgtattctggacatagtcaacaaatattntataacatgtccaccaatttgtaaatcttttcaataattcattatacgattccttatccagagattgcaacaacagttcccaagcatccatgacatcttgccactcttcaaccttattcatatggattttgcattatgtgttgacattctttgtaatatggaatagacataacaagttggttgaagaagtaaaaatagtctccaatgcattcatganagtaagatccctaacattgacaataacctgagacaacacatcatctttcacagacaatcctttcaccttacttaaagcccattaaaaaattatccgctttctcataacttacataagcaaaggaaacattgacagacatgtnntgtgaagtgaatactaacaattgcaaaagtg

SEQ ID NO: 207651 - DNA, 411 bp, Glycine max
  unsure (1)..(411): unsure at all n locations
agcttgtgagacataaggacctatgattatctgaatctttacactatcagcttagatacaaatccatattatgtcccaccacccaaaagtgccatagacatgaaagcatttcaaagggacaatgacaaagaataacacagtgaaatcaaattatttgtaacataaacctgngggagaattggtttcacaaatctttcccagtttttatgtttatcaagtacacatattgataggctcatgaaggccatgacagaaaaataaaggaaaataagccaaagtagttagagtagatatagaagtagttaggtttgggttaatattagttagttactgaattagtttggtggctagcttaaatagcagaagggaagtataagatcactcattctgcattggtacttagtgtactta

SEQ ID NO: 207652 - DNA, 372 bp, Glycine max
  unsure (1)..(372): unsure at all n locations
tctccttccttntgctataaataacggaaggagggaagaacaataaaagttcaaccctcctggtatcttagattcacttaaaattagtgagagagattgtttgcgtgaagaaaatccgagccgaggcacttccgtaacgctttcgtgacgtttccgtgggtgatttcgcgaagattntcaaccgttcttcgtgcttcttcgttcgttcttcggtcttcaaccagtgagtttccaaaatcgaacttttcaattcattctatgtatccttagtgctccccatntgtttcgcgtgcttgtattttatttcatttactgtccgtaccccttttgacttgcttttgtcatttatctaagtcattttctcgcctaatc

SEQ ID NO: 207653 - DNA, 409 bp, Glycine max
agcttgttgataagccaaaacttgatgacgatcccatataccggatgcctttgatgatcttgcaacttttcctcaagcctatgcaggtgttgtgggatgcatctatgtttacggtgtacaatgataatgtccctttgtacataaagcatgaagatcttggggaaatagcacacggtggtcaatgtctgaacatcattgctatacagttgtggattatgtaagtaaatttagattacaatccattacctaatttattgtattaaattgatgcataatttacttgatttcaacaaaaatagacatatgaatgagttaagtttgtgatcgaggaatgactctatatacgaattccttgagccacagtccatacaaagatatgtgcaatcacaattagaatctgaggattata

SEQ ID NO: 207654 - DNA, 115 bp, Glycine max
gaggaagaatcgacaattaaaggacaggaagaatattttgttgaacaagtggcctcaataacttaagagggggatgaattacattttaaagaatttctatgtgagcaaattctaa

SEQ ID NO: 207655 - DNA, 437 bp, Glycine max
  unsure (1)..(437): unsure at all n locations
agctntcacaccataaaccaaaatagataacttatgctttcatagataagtatcataatgtgtacatcgttcaagccttcaaatttaaagtaccaaagtacacaacataaactagtacctactaaatataaattagtcatatccaactacatatcctaataacaaaatataataagaaatggctcttcacttttcttcatttttatactggatctttatcaacatccttccttctagtgaaccttggtgttggcatgaaaagtaagggtgttgttgatgggccatccataacaggtgcgtctactattgaagtgtctaaaatgttcttttgtttgggtcttcttatatttagcttataccttgctactggtggaacatcaaaatatgtgcaggggcctacatgcaaatgccaaacatgaataacacttgtaatatat

SEQ ID NO: 207656 - DNA, 344 bp, Glycine max
gtgctgagtgtgtgagcatgtcttgtaaatgggttcaatggaacctttatttagaagtttgagtgcggatgttgatccttgtttgtagggtttgttatagtcttgtagataattcccgacttatagataatagccaggagcttagagataatgttagaaataaacatttgaattaaagataaaggtagaagataatcatacattgtagataatgtgatgttatagataatttaatatctgccaatagataagatattcaaatatatttgaatccggagacagcctctttgcatatgcaagggtaaggctgcgtacaacatccctcccccataccttcgcatagc

SEQ ID NO: 207657 - DNA, 459 bp, Glycine max
  unsure (1)..(459): unsure at all n locations
agcttctttggaccttgaacaggcaactatctcctctntcaaaaccatgctatgtgctcgcgactggtccctttcttcctttcgcaacttgagttcactattgctaccccatagagctccgcgaaatttgttccggccatactcttccttgcgagccctcttggtctcttgttcaagggctcttgcggtaattgcattctcttcccgtaacccggcacactccttccgaacgtgtgtagcggccaacttgaacttctccttggcaagttttgcctttcctaactcgcttttgagagcttggacttcttcgtcctcttccggtgcttcaaaactctctttgctgacgacttttaacttggcgagccaatctagacctcgtatatgaactttcagccattcgtggtacccaccaatgatgccattacgaatgcctctaagctcttgatctttctttaaccg

SEQ ID NO: 207658 - DNA, 465 bp, Glycine max
gattgataaggacttagactttaatcatgggttaaggagttgtacaactgatggagatatattacacttagttagggatgcttttgaaaatgagaatgagataaatgtttattttcatcatgaagtagatccaattttagaagaagtcccacatatgttgtacttggaatgtgatccaattcgaaaagctgctgagaatgaggatgatttacatgatgtacctgttgctggccatgaggaaggtaagttataattcatctgtacttggtccgacatggttaccataattaattaatatgattaatttttactctatcaccattgatgcagatgttggtgctggagagcagagagatgctggtgagcatatggatgttggtaagcagagggatggtggtgagcagagggatactgatgctggtgagcatagagatggtaatgatcagacggatactgatgcttgtg

SEQ ID NO: 207659 - DNA, 447 bp, Glycine max
agcttgccacccagctcgcccaggcgagctatgttgctttctccagaagcaaccgccatctggaggaatattctggaaggcccaagtgggcctggttgctatttgaacccccatttttactaagtacacccccctgcctttttttggtgattctttttccgtaacgttacgaaactttatgaatttcgtaacgatgcttgttttctttccgtaatgtcgcgaaaccttacggactacgtaatcaacccctttttggttttcgggatgtcacggaactttacggattgcctaacgatgggtgccaaatacctcgaagtggtcaaacgaaagttgcatcccaacaacggatggtcctcggacgaaattagggtatgacagttgcccctctttacttgtcttttattggagataaaagagaagtaaagataagacactaatttcgttcga

SEQ ID NO: 207660 - DNA, 377 bp, Glycine max
aacttctccttcctcaggtgtacccaaacccaatcacctggttcaagcatgactatctttctgcttttggtggcttgccttgcataactcgcatttttcttttcaatttgagccatcacttgctcatgcagcttcttcacattctcagctttagcttgtgcgtccttatgcttaaacatagcaatgttaggcatatgcaacaaatcaagaggagtcaaaggactaaatccatacactatctcaaatggtgaacaattaagtgtgctatggacagcccgattataagcaaactcaacatgaggcagacatgcttcccaagatttaagaattttctttaaaacagtcctaagtagtgtgcctaaagtcctattgactac

SEQ ID NO: 207661 - DNA, 324 bp, Glycine max
agcttgagatgaggaagtgtagaatggtgaaacttcctgcttttattcgttgaccacagagtggtacctggagatatgtcgcgggggtcaagagaccttggggacgtcaggtggggtgctattgcccaaaaccaagcttgaccaatcccgacccaacccgggcatagtcagtcagtgagaacctgtgatgtacctaaacaggcgagctcctggaagtcaacagataaaaggaactaagaccacacagcacggaggcttgtgtggtggctggccagctgtgaactttgattgatatatgggatatggcctctggtagtcgattac

SEQ ID NO: 207662 - DNA, 338 bp, Glycine max
agcttatgcatataaatatatttctctaatcaatcatgctcttgtgttctatgttgtagcctaaattactaaacctcgatccctcgtcagaccgaatcaatccaagctttgtccttagatccctcttgttggactaagcccaattgagatccctcttaggtttagacaaactttaactgagtttcatctgcagatccctcttgtaagactagactcagctcaagcagcttacgaaagtttagcctaatttaccctaagcttcattcgcagatccctcttgtaagactagacctagactaaacaacattattgtgacaacataattaaaaccaaaactt

SEQ ID NO: 207663 - DNA, 316 bp, Glycine max
  unsure (1)..(316): unsure at all n locations
gtctcggattcgaaaacttacccgttgaagaacgaanacggatgaagaacgatgaagaacggacganaaccttcacggatgtgcttacggaaacatctcggatgcgttacggaagcacctcggcttggattttcttcacggaaacaatttttttcacccaaaacagctgaagtacatagctagggggctgagggatccttagaacagcccccttcagcctttntatatgaaaaagggggaggaggttgccgcccagctcgcccaggcgacctggattgcttcctccagaagcaacccagcttcaaaaaacgttctg

SEQ ID NO: 207664 - DNA, 426 bp, Glycine max
  unsure (1)..(426): unsure at all n locations
tgtggtactangtggcggtcgggcgatggtgcacaacaagttttccacatccacaatgcgcgcataaacccaccatcccctgttgcccacctccaactgagctcacgtactcccacgtagcccatatcctcgtttctctcaacaccgggtccccatcaatcctcccaagcttccacaacatccaagaaaaacaacattcaaacagcacaagctatcacagccaagcaaaacagagcaaaggcagaaaactatgctcaacacatcaaccaaaatcacagcttttctcacttaaagaccacagtaacaattccttcgatccaattcgttaaccgttggatcgaactccaaaatgtactggaagtctatagtgcataagcctacattgtgaccgntgggatctactagcanacatctagaactcatact

SEQ ID NO: 207665 - DNA, 467 bp, Glycine max
  unsure (1)..(467): unsure at all n locations
taaaaggggtcactgacctcgacgtcgcgcttagcgccattctcgcgcttagcgcgagtaagcgaataatcgctcagtgccaaactcgcgctaagcctggaaggtggcaaacgaatcgctgagtaagctgatgacgcgctgagcacgtgcctgcatgacaaattcccttccagattcctcctaatcgctaagcacattgatgcctcgcttagtagattacactcgctaagggcattgagctcacttagcgagacatcaactntagcaattcttcaaaataacttccttttgcctgaaattgaagagaaatngacatganattcataaggaaggcttctactgagcacatatganactaaactagaaatatttacaatgctaccaaaaataaccataaatggggtggaattatatacatttgtaagttttctatacaaaagttagtcctataagacaactaacaaact

SEQ ID NO: 207666 - DNA, 333 bp, Glycine max
  unsure (1)..(333): unsure at all n locations
cacttaaccaagcatatgctcaaaactcgggaccctatcttctccttttcaacttcattttctgggtgtggccacactagctgaagccacgccgttatctggtggaatatcatattcacgatgccactgtattgccttggaagttgcagatctaatgatacccttaggtttattctagggatgtcgcgatctctatctgttgaacctgtgggtctagccatcttgttgtcactatgcaatggaatgtgactatgtgttatttccctgactntgatgcactttaatatttaactcttcatgggaacggngagtgatcgatggaggaaagcatga

SEQ ID NO: 207667 - DNA, 441 bp, Glycine max
  unsure (1)..(441): unsure at all n locations
tgagccattcccgtgggatgaaacttgtgaacaagccttcttagtcttgaagaagaccattgccacatcgccagtcctgagtcgacccaggctatgagtacccctactcctatatctttcagtagctgacaaagtcgttagcttagcccttgtacaagagaaatggaagcaccagatccctatctatgtcaccagccgcatacttcatgacgccaagaagtgctatcaaatgataataaagatggcgctagcactcattacatcggcccaacatctcaggccctactttctgagtgatcaagtggtagttaagatgaactacctcatcaaatanggtttgcgaaagcctgaactagtagggaggatgggtgttctacgatcggtaagtgcaccggatcgcgcaagtagtataaaacgggtagtgaatactgtgtatcgaac

SEQ ID NO: 207668 - DNA, 371 bp, Glycine max
gcttgtagtgaagatctatgatgatgagaatgaacttagcttcacattaataatttcatcttcttccaactattcaccaagggttctccaaatcttgccctctatttttgtacttggtcccacaaaataaaagcatagtcaatgaactccatggatgccacctttatctttttatcttttgtataggtgtggcatgcaaactataacaacccgtctcatcgctatgatatcactaactctaaaatgtgtaattttaatttttaaatgaaatctccattaatttgattatgaaaataagagtaaatttttcgcgatatacattcaccaaaaaatacacaacaatataaataaacacacacacacatatacgt

SEQ ID NO: 207669 - DNA, 392 bp, Glycine max
  unsure (1)..(392): unsure at all n locations
actggatgcgttggtcaactgggtaacccagctggccttgaatcatatatctgtacctgtcgcaagggtttgtggtttgtgctcctctgctgaccaccatacagaccttngcccttccatgcagcaacctggagcaattgagcagcctaaagcttatgcagcaaatatatacaatagacctcctcaacctcagcagcaaaatcaaccacagcagagcaattatgacctttccagcaacagatacaaccctggatggaggaatcaccctaacctcagatggtccagccctcagcaacaacaacagcagcctgctccttccttccaaaatgctgctggcccaagcagaccatacattcctccaccaatccaacaatagcaacaaccccagaaac

SEQ ID NO: 207670 - DNA, 462 bp, Glycine max
  unsure (1)..(462): unsure at all n locations
gcttctgaatcttgttcgcctaataactcatattaggatgaagtaattntacaaggtggatgcaggcatctatctgtataaagagaaaacatcattggtgaatatatttaaaataaaaatttagataaataaagagaataaaacaccttcccagttcacaggaggaaaaaggataaaacagtgaaagaaaaatgccaaattacaggctttgcaaagttggagaaattaaaacaaagattactacaagaaaccagaaagactgtctatacttaaaatgtaagataactacactntaaagtttcagcaatttgagtcaaccatcgacactacaaaattacatggcacaataagcattgcagttctacccaagatctttctttttcctttaccagaacccncanatcaagtcatcaacatattttgaggacatactgatggttcaactaaagacttcagcacatt

SEQ ID NO: 207671 - DNA, 311 bp, Glycine max
aatcatccggatctgagatgggcaagtcctctacaacaacaatagactgtcccttatttccaaaatgttgctggtccaagcaagccatatgttcctcctccaatgcatcagtggtagtaacaacaacaacaaagacaacaagcaactgaggccccttcttaaccttccttagaggagttagtgaggcaaatgaccatctagaatatgcaatttcagcaagaaacaagagcctccattcaaggtctgacaaatcagatgggtcagatggctactcaattgaaccaagcttagttccaaaattctgacaaatt

SEQ ID NO: 207672 - DNA, 447 bp, Glycine max
  unsure (1)..(447): unsure at all n locations
gcttgatggcacactaagcctcacatctcatgcttagcgcatattgcagaaaattntgtgttgtcgaaagcgctaatcccagcctgctgcgctaagccccagatgctcactggaatttgcaacttcaagttgggcttagcatgaggttaggctaagcgcttgggtttttaaactctaacgtcacgtgggcacgctaagcgcagctctacactaagccttccatacaaatttcaatttttaaaaaaactaaaggttgagtcacttgggtgttacccaaaaaccattagcctctctgcctttgctaaccttgagcatttgtgcctttatgctgcgtgcttgaactgacttgtctgcatcttccttgcttcattctgcatttcaatcacaatccaagtaagtggatacatttccatnntttaatttcattctttaaaccatatgatagat

SEQ ID NO: 207673 - DNA, 297 bp, Glycine max
tggctgccataagattaagtcttctgatcgcatgttcgttggacactagtgatcggagacttatatctacttttgcggagaggtgacataaggaaactagtagtttccatcttccagtacgagaagtgaccatcaccctggatgatgaggcatcgctgctacatttgcccattataggcgcattccatagctgtgaggattttcttgtggatgaagacgatttcctgttagtggaatttcttgaagttagttcagaagaagctagagctgagacagtacaatgtcatgggacatatg

SEQ ID NO: 207674 - DNA, 352 bp, Glycine max
  unsure (1)..(352): unsure at all n locations
acatgcttttttgggtgtcatgctacaaaggagagagcaagaaatgaagagtcaatggttgatacatgggcggaaatgaaaaagatcatgaggaagtggtatgtgctggctagttactcaagggacttgaaattaaaagctccagaactaaccctatgaaacaaacgggttgaggagtatttcaaggaaatggatgtgcttatgattcaagcaaagattgaagaagatgaggaggtaactatggctcgatttcttaatggtttgactaatgatatccgcgatattgttgagttgcacgagtttgttgaaatggatgattngcttcacaaagcaatccaagtagagcaacaat

SEQ ID NO: 207675 - DNA, 392 bp, Glycine max
  unsure (1)..(392): unsure at all n locations
tagacatgctcctatcactgtcgaactacacatgtgagtccacttagaggtaagagatgagtttatcgcaattgaggttagaataaacatgtgtaggagtccttagaggatcaaattgaggtttattttgggatgcttattatattgtaattcttcttgtatgactatgtgaaattttttgagggattctactcccggtgttgtgagaaacatttatgtataattcgattgtgttttggataagatgagtgtgataaatagctatattaagattataatattgttattgagactgagtataattgcaaagttgaacatgtngtaatttgtgagatacacgtaaacatgtgatagtggattgtgacattatgagatgttaaattatgaacatg

SEQ ID NO: 207676 - DNA, 359 bp, Glycine max
agcttcttagtttcagatgatgcagatgggtttgtagctacctcatgcactcctctaatgactatggcatcatttctggcgctaaattgctgggagttggaagccatcttctcaattaaatttctggcttcagcaggagtcatgtctccaagggctccaccactggcagcatctatcatacttctctccatattactgagtccttcataaaaatattggagaagaagctgctctgaaatctgatggtgggggcaactggcacatagtttcttaaatctctcccagtactcatacaggctctctccactgagttgtctaatacctgagatatccttcctgatggctgtggtcctggaagc

SEQ ID NO: 207677 - DNA, 423 bp, Glycine max
  unsure (1)..(423): unsure at all n locations
ttttgtcaaaggcatctagcaacctcttgcaatggtgtcaatcaaaaatgtattctactntggcttgcacacctctacatataaaatacttgaccaaattattatgcataaacttaaccaaagcagttatgagcatattttgtgtacctttgaaaatcttatttactacctctaacaaattagttgtcatatggtcatatctatgcccaccttgatcatgtgcaaatattcatttttctttggaaattcacttaatccaatgcataatttctgcattaatctcatgaaatctttaagtctgcattcaaattggcacaaacatattctataacctacagaaatgtgtaaaaataaatntaatagattggtggcatgtgttgaccaattgttacatataaacaaagagagcagcaataatctaat

SEQ ID NO: 207678 - DNA, 422 bp, Glycine max
  unsure (1)..(422): unsure at all n locations
agcttctatataagctngaaccatttatcaattaacacaagttgagttttattcagaaaattagagtttatctcttttatcttagtgagagtgattctcctaaattcttgagtgattcaagaacaccctggctgtatcaaaggacattcacaacctttgcgtgttgccctcgctggaaagagtgattctttccttcctttcatcttcacccttgttctttcaaaccacaattccagaaaatccacctctgcccagaattatcttgtggccataactcccattntacgcactcaaattaagtgattcttgagcctaaattgaatttcaaaacgagtcctttcacctcgttttggaatcacctcatttggagccctggtagctcagntatttccatttctatatttctggccagccaccactta

SEQ ID NO: 207679 - DNA, 363 bp, Glycine max
ctcacactgatgtccgattcggggacatattatatcgagactctctatattgaacaacggaagctctcgggagaatcgaatggtcataacttttcacacgaatgttcgattctgggacataactcatctagacgctcgaaattgaacaacggaagctctcgagaaattccaatggtcataagttttcacacggatgttcgattcgggaacataatatatctagacgctcgaaattgaacaacggaagctctcgagagattcgagtggtcataacttttcacacgaatgttcgattccgggacataatatatcgagacgctcgaaatggaacaacggaagctgtcgagaaattcgtatggtcat

SEQ ID NO: 207680 - DNA, 396 bp, Glycine max
  unsure (1)..(396): unsure at all n locations
agctngctctaaatntacattgatgtntgtatttattggaggaggttgtatgccatttttgttttaagggtagcatttcttggtaaaactaactttccaaatgtttgccttcgcaagaaatggccccgaggaagctcgcctcacagacgtccaggaaggacaaggcggccgaaggaactagttccgctcctgagtatgacagtcaccgctttaggagcgctgtacaccagcagcgcttcgaggccatcaagggatggtcgtttctcctggagcgacacatccagctcatggacgacgagtatactgatttccacgaggaaatatggcgcctgcggtggacatcactggttactcccatggccaagatcgatccataaatagtacttgagtttatgc

SEQ ID NO: 207681 - DNA, 479 bp, Glycine max
  unsure (1)..(479): unsure at all n locations
tactaagctgtttgtacgaaaccttataggcagattcactgtttatcctttattgaatcaaagaaacttttattgatggatcttctctaatcatgcctattaataaaataaaaagatttaaataacaaataacgtataagttgcataatatgaacataagagatgtacctactacacaactgacaattaaatatgaatcaagcttctcatgatcttgtgtcatactcatattcagacatgcgtgtggtccaccccattgtgtcactttccatgaatcaattcttttagatcaaattgccctcatataaaaagggcaatgacagtatgtgcttttattcacgcaacacacgatatacttgttcgaantgctttcaacaactataacactgtgatgcgccttcgtaacatattgcttcagtgcactttttaccgcatctttactatcaaaatccatgccaacatataattcttgccaacat

SEQ ID NO: 207682 - DNA, 311 bp, Glycine max
ttagatgatgtactggggattctttatgagtagagacatgtacgggagattatatctctctctttctctctcagatgtatgaatagagagacgcactgaaaattctctctctcactaagaatagtaatctctctctcagtataaagtgtaaaaatgttagacataggatcacacagaaacatatatatattgagatgatttcatttttcataaaatgaaacaccaaattaaacagcgttataactcactattacgaaaaaaagtttctcattacaccttgtatgaaatgtgattctcttctgaggcttata

SEQ ID NO: 207683 - DNA, 538 bp, Glycine max
  unsure (1)..(538): unsure at all n locations
gccatgagcctatgtgcgctgatgacaccagcttacacaatgtcgattcggcgccaacnantagacgatgttacgcctctatcttcaggaggtcataactctatccacatagatcagaatctggcacaccacgaatagcaccctagggttgatacgaataaactctcacgaaataaacatggtcggaacttttacctcagacatattattcatgcgccatatggatcgtgaccctcgtggaagatcaacactgagcccactctatgaaaatacggtcgtaccttcacacggtgtgactcgagtcaggcacatacttattttgacgctggagatcttacgattatgactgcttaacattcaaactgccttacgtcattccatgaaatgtgaataacgttgcctactctcttggaaatcttgaaacatagggagcttctagtgttgtaggtgctagaaacgatgttgtatttctgatttactatatctcgacagtccataantgtatgacgaagtactgaactcaatcactcgttattgc

SEQ ID NO: 207684 - DNA, 311 bp, Glycine max
agcttttttatctagttagatctaaattatcaggtacatgagcataagagacacaaccaaaaactctaaaatgttgaactgatggcttgattcttctccaggcttctttgggtgttatgtccttcaccgctagcgtggaactggggtttaatacatgcacaacccaatatactgtttctggccaaaaagtgttaggcactttcttttcaatgctgcgaaccaaattcatgactgtgcgattctttcattctgcaacaccattttgatgcggcgaatatgtagctattaatcggctgtgcgctccatgcaca

SEQ ID NO: 207685 - DNA, 371 bp, Glycine max
  unsure (1)..(371): unsure at all n locations
taacagcagnttagttcttttggattntactaataataaattcactggaaacatcctgctagatctgtgttctggcaagcacacaatatattcactgggaattaacaacagtttagttcgatcacaatttgatatattatgtgaaactggtgttaaccaagcacacaatataaaactcataagcgtactttntcactattaatacccctctccttcgtgtgcgattatttatttaanattttcatgatattaatctaaattaatgaaccttgattaagatatttgttcacagttaatttaactttagtattacaatacctgaaattaattctatgttctaaccaaacaaccaggaacaaagtgacaaacct

SEQ ID NO: 207686 - DNA, 349 bp, Glycine max
  unsure (1)..(349): unsure at all n locations
agcttttaccaaagagttntactctctggtaaacgattaccagtttactgtaatcgattaccagtagcaaaatttgttttcaaaagctttcaaattgaatttacaacgttccaattaatttcaaaatggtgtaatcgattacaagattttggtaatcgattaccagtgtgtttgaacgttgaaattcaaattcaattgtgaagagtcacatcctttcacaaaaatgctttgtgtaatcgattacaatgatttggtaatcgattaccagtgataagttttgaataaaaatcaaaagatgtaactcttccaatggttntcaagtttttctaaaggttataactcttctaat

SEQ ID NO: 207687 - DNA, 371 bp, Glycine max
  unsure (1)..(371): unsure at all n locations
tcagatntctcattgactccagattgctgtaaagatggatatagatctatatggtngattgcagaagaacatagaccacagactcttgcaacatgtgtagatttttgattcatggcaagctgagttactatgttgaccaaggcatcaagttttccttcaagctnttttattttcagtagatgaagatgaatccgtggccaccttatggactcctctaagaacaataacatcatttcttgcactgaattgttggaagtcatcttctcaatcaaattcctagtctcagcaggggtcatatcaccaagagctccaccactggcagcatcaatcatactcctctccatgtttctaagtccctcatagaaatattg

SEQ ID NO: 207688 - DNA, 458 bp, Glycine max
  unsure (1)..(458): unsure at all n locations
ttgcagctcacatcttcgaccaatcgcagtatctcaccgtaaccttcttctttntctttntatatttaattntctttatcgaatttgaaacgatgaatgcgagaggcgaggtcggttcaccggattcgttgggttcgtttcctccgttacgggttcggggatcggacggtgcctcggacgattccgagttcgagcggtattgcagcgccaactcggtgatgggaacgcccaacactagcatgagcctctgcagcgccgttacgctcttccaagatttctccgattgcgatttcgcttctgtcgccaccggcgagggtttcgaanatttcagtccgggaaaaggagccgccccggaggtgaatcgcggcggcggcgaccggaggagttntctgtacggttccactggattggagatgtacngtgattgcagtgaggaactatctattactacgctcgat

SEQ ID NO: 207689 - DNA, 484 bp, Glycine max
  unsure (1)..(484): unsure at all n locations
tgtaccctacacagaatataaggataattgtgtattttaaaatgagaaaaaatacttttttttgtattttatatatttttctttaattaaaatttcaattttaattaattcatgtaataaatgctagtatgatatataaatattgcttatattaaatattagtatgatatataacttaatttagtaaatttcaattntgatttgacaataacaccaaagatttttttgtaaagaattacatataaattttatcttttaaaaatggctaattaccatttttttttgtgtttcttcgtgcaagtattttttttgtaataccaaacatgtttcatatgtaaaaatttgtgaagtaaatnttacatttacttatntatatatgtcttctgagaataaaacatacaattaagaaatttaattaatattctgcattatacactgaaaatatttttaatttcttattacattcttngnctnttatatattc

SEQ ID NO: 207690 - DNA, 405 bp, Glycine max
  unsure (1)..(405): unsure at all n locations
tcggcgatggtgcacaacaagctntccacatccacaatgcgcgcataaacccaccatcccctgttgcccacctccaactgagctcacgtactcccacgtagcccatctcctcgtttctctcaacaccgggtccccatcaatcctctcaagcttccacaacatccaagcaaaacaacgttcaaacagcacaagctatcacagccaagcaaaacagagcaaaggcagaaaactctgctcaacacatcaaccaaaatcacagcttttctcacgtaaagaccacagtaacaattccttcgatccaattcgttaaccggtggatcgactccaaaattttactggaagtctatagtgtataagccttgcatttgaaccgtgggatatactagcaaacatccagaactcatt

SEQ ID NO: 207691 - DNA, 476 bp, Glycine max
  unsure (1)..(476): unsure at all n locations
gctactgttctttttgttgtcaattgngcttacatttggttatcttttatagttatcacattntgaggcatgttttggttgaattgattgcatgaccgagacattgtgtactggttattaatgttgtgaaatttctgatttttgagtgagcacgcgttgttgttgggtgatggttttgtgaattaaatgcgtgtgagtgagttggttagcttgcatgacaggaaattgtggatgaaaaactaaatgcttcacattaccgtgtgagttgtgtgcaccttaatggcatgagaacaactgatttcattntcttgattntgcatgattcttgaatttcttgggtgcatacatgatgtggatatgatcaaggccttcgtgtttattttaatttcagccacttaaccaaatagataatcccattgtanatgaatgactaaatcctttgcaccctcttgagcctaagtgtanatgaatgtgtc

SEQ ID NO: 207692 - DNA, 463 bp, Glycine max
  unsure (1)..(463): unsure at all n locations
agcttgtcacttgatgtcaaccagtctgctatttgttctcttgtcatcttccattatatttagcaatttggaaatttattgcttttacaccaagtgatgtttcatagtttagttattaacatctacgatcaaactttatggttagcataaactggaacgctgaacaacagtaggtgttggctttgggttcatgctttctgatagaacaagtactttgaagacatgttttaataatatttttcataattttgaaactgttttatttaagcttcagcagttgttgcttgctagtactcatgctatgttggttactctctagtctacttactactaatgttggagctntttcccatctatgctctctatatccagtatttgaagttaagagctcttcanaggcaatcctatacacattacttctatgaagcaactgtcggagctggtcttccaatttgtagcactt

SEQ ID NO: 207693 - DNA, 384 bp, Glycine max
gctctactgggaataaccaagtctctgaggtacgcgttcaatgattatttgatatcatatgccatagcaatctcttcactttgaccatcaataatttcttcaatgtgttctatctccaagttgtcaaccaaaactgctcccttatgcctgagtttgaaggaagtatatgagactgaatacaccaataagtaattaatactacaatctaatagtttaatacttaacagttgacacaaatattaattttcattaccttaatgtattgaagtgcagttctaaagtcttgtgcataacactatcgccgctagaaccgtagaagaagtctacaacacctaatctctttcctctcagtccctctttctttagaaattgagcatatccacc

SEQ ID NO: 207694 - DNA, 414 bp, Glycine max
gctagaactagagtttaaacaagctatgtctgttaaccagttttccaatttaaaacaggaatctccaaaagaagcatgttgacataaaaagctaaaattaaagactagttaatttctatatgcagagaaacaagaagggtggtggaaaccttacgattcagctaaacatgaagcaccaagagtgagagactgatgcttctataatgatcagaagactaaatcaaggaaggtgaaagtttacctccagagcagatgggaacaatgtcattcccccaatgatgctcaacccagtgagatatgcactattccccggcacgtcttctagaatctctgatgcaccgtagtccatgagaaaaaggtgaacaatagacgacacaatggccattatgtatctgccttccaacactagttgca

SEQ ID NO: 207695 - DNA, 352 bp, Glycine max
tgacaacttatgactatttgaatttcacgagagcttccgttgttcaatttcgagtttcactatatgtgatgcgccaaaattggacattcgaattaaatgttatgaccatttgaatttctcaagagcttccggtgttcaattctgagcgtctcgatatgtgatttgcctgaatcggacatccgtgtgaaaagttatgaccatttgaatttctcaagagctatcgttgttcaatgtcgagcctctcgacatattatgcgcctcaatcggacatccgcgtgaaaagttatgaccatttgaatttctcgagagtttccgatggtgaatttcgagcgtgtcaatatattataagcct

SEQ ID NO: 207696 - DNA, 483 bp, Glycine max
  unsure (1)..(483): unsure at all n locations
cactcaagctntacacgaatgtccgattcgggcgcataacaaattgaacaatgaaagctctcttgaatttcagatggtcatagactttaacacataagtctgattctggcacatcacatatagagaagctcaaagttgaacaatagaaactctcaagaaataaaaatagtcataacttttaactcggacgtctaattcaggcgcataatacatcgagacgctcgaaattgaacaacgaaagctctcgagaaattcaaatggtcataacttttcacacggaattccgattcatgcggatagtatatcgagacgctcgaaattaaacgtcggaagctgtcgaaaaattcaaatggtcataccttttcacatggatgtccaattcggatgcatcatatatcgaacaacggaagctctcgacaaattcaaatggtcataactnttaccacggaggtcagaatcacgcgcataatatattgagacgct

SEQ ID NO: 207697 - DNA, 377 bp, Glycine max
agcttcatgctgctcaattgctccaggtttctttatggaagggcaaaggtctgtatggtggtcagcagaggagcacaaaccacaaacccttgcgacaggtacagatttctgattcaaggccagctgggttaccaagttaaccaatgcattcagtgatccttcaagcttcttagtttcagatgatgcagatgggtttgtagctacctcatgcactcctctaatgactatggcatcatttctggcgctaaactgctgggagttggaggccatcttctcaattaaaattctggcttcagcaggagtcatgtctgcaagggctacaccactggcagcatctatcatacttctctccatattactgagtgcttcataaaaat

SEQ ID NO: 207698 - DNA, 343 bp, Glycine max
tatgattccatgtgctgcgaattcttggattggatgtttatgtccattggcttccccagcccagttctgtacttggatcatggagtgtgtttcttccacttcctttagtgtggcagacaatggatccatttatggtcacttcacaggacagcggggtcttagacaagaggatcctctctccccttatctgtttgtgctctgtttggagtacttttccagagatatgagcagcctcaatgatgatgccaattttaaatttcatcccaactatgcaggtattcagctatctcatttggcttttgcagatgatattatgcttctatctagatgagatatccattct

SEQ ID NO: 207699 - DNA, 320 bp, Glycine max
  unsure (1)..(320): unsure at all n locations
tactaaatgcaccccatcgtctattagtttgtcattcaatttccgccacattaccaatctttatcacatatgtaacgatacttattttgcttccgcagggatacgaatccttacagattatgtattcactcttctttaactcttagagaagctacggaaactcactgatcgtgtctgaacacctgatctccaattctcgccgcatgacggaattttacggatcgcggcaacctgcgtacatttattgctgagacactcgggacttctttattgctgcatgaagtaataatcccgatgaaatataggatgcagttgacctn

SEQ ID NO: 207700 - DNA, 511 bp, Glycine max
  unsure (1)..(511): unsure at all n locations
ctagcctgtgatccctgcatacggccttaaatctcagctgcccccgctgccccgcagcaggttcttctcttatcacncacgcggagaacttgagggggcatgacgcacatgtgtctggctactcatgttgcgaaatacaccccttgcctttgatcgcgcattcttttttcgtgaaggtactgagacttacgaacttcggaacgatacttggtttctttccgacatgatacatggccttgcggactacatgatcctcctctctctgacttacggagtgccactgaaccgcactaaacgagcgacgatgcttccatttgatttccggagtgtcacagaaccttacggcatcgtgcataggatttactcttgtcttcggcntgtcccgaatttccacatagcctatgatgggtgccagcgcctctcaatgaccacaaaacatgtgcctgttgtcacccaaaagtccctggacgagaatatggccgacagtngccgctctatctttgtttgtatn

SEQ ID NO: 207701 - DNA, 363 bp, Glycine max
  unsure (1)..(363): unsure at all n locations
agctntctacattggatgcttttaactcttaataaatatgctgcccattttttgcgtaatgttgtcatggtcttgatgtctagtggtgtgccatcagcaaaccactacaaattataaaaaaacaagtaataagtcattttcatttaaaaaaggaataaaaagaattactcaagtcaatcttttggggatagtaaatatagtcaaatcattcttcaactccccactgattatgttccaaatccaatgcctgacataataaccacactcatagcctccgctttgaacgtgactctacattcaatgggaaaaataattcaatgttacaattcagatcttaaacaacactatcaatcgcaaataact

SEQ ID NO: 207702 - DNA, 469 bp, Glycine max
  unsure (1)..(469): unsure at all n locations
tatatccatggcctcctatggtggtgagtttcttctaaactcatcttctccttgaagtggngtctcctctctctctcttccttctccattccgctgccattcatcttccaagaagcaaaggaatccattgatgaagaagatcctaggcctacaagctccaatggagcttacatcatgtggtatcaagagcatctccatctaggtgatgttcttttgcttcctctatctttttgttcggtgaattctctntaattccttgttcttcatcttattctccatgtatatcctccattgtcttgtggtttggtgctgttaagagtagattcaaaaaaaataaaccaattaaatcttagatctacacttgttcttgcatttctatggttcanattntgtagatctactcttgaatcangtttttgtgtngattntaggatctatncattttcattcataatattcttgtgctgat

SEQ ID NO: 207703 - DNA, 364 bp, Glycine max
agctttcttttgtcatagccccaacaataagaatttgaagttgatactctaccctgtgtacaccacacgtactgatactaagcaataatattttgttgaaataggtagctcaaaatttaatagctaattagtggattcatttaaaaatagtttcataaatattaaggatattccaaaaatattgtccaggaagaacaacttctgatatatataactattaagtagttccaaaacacaaatggcatgaaaaaaatgaggaaagactagaggctttctttgacacaagttgcaaactatggaatataacccaaaaggttatctaaaccatatacaaatacagacacacatgcataaacagatacat

SEQ ID NO: 207704 - DNA, 241 bp, Glycine max
cgacgagagacactgacaaatactcatctactcctctttggacatagaatgacaagctggtggcgagaacaaccctatcccatcggaccatggatgcaactgagattgcatgcacatatcaacttgaagctgatggggattcgaggcattcttcgtcttgctctgaatgaaagggagcgtacgagagacactgtaccatggctatatctcgacatgcatagcctcaatacaatgcctaacg

SEQ ID NO: 207705 - DNA, 292 bp, Glycine max
agctctacatgtctcatgacacctaagcacacttagtggataatcttggacttgatcttgttttagtgagttgaaccatagctgatattcactaatcataatgagtgaaatatttggctccaaagatggctccacaaattaaaattcaagttcaagtgaagattgaatacaaaatcttacttgctatctatattgcgggacacttacgctatatataaaagctctgcgtgtgcatgttctcaactcttgacattcgagaaattacacttccaggcttagaccttatttgagg

SEQ ID NO: 207706 - DNA, 394 bp, Glycine max
  unsure (1)..(394): unsure at all n locations
gtgtggacttggtcttcgttggcgataggatcaaagtgggtctggaaagaggcaaatctgatcaccctgctgtgatgaatgcgaanactgcggcacatgaagaggatgacaatgatggagaaacccttgctatgactaccattcctacacggtcaaatttcccatcagcccaacaatgtcgttactcatccaatagcagaccctctcacccaatcatccacaaaagccatccccaaatcagccacaaggcctgcctgctcaccacacacccaatgcccaaacaccacctatagcgcataccaaataggaattttgcagcacagagcctagangatacaccctatattccggcgtcataagctaacttgctcccatatctacttgataatacaat

SEQ ID NO: 207707 - DNA, 402 bp, Glycine max
  unsure (1)..(402): unsure at all n locations
agcttgttgccctcaacatgttaaagaatacatgagtatgcttttccctgttctggtcaagttaagatgttagccaaaacttaatttgtttccatttgaccaaatatttaaattatccttatttcacttaaaataaacctctttactggttgtactattttataaacctcaaacatgatgcattgttatttgagtatgattgatccagctaatagtttcccccattgatggtacagattatatgtcgtcattacaacatttgtgttagtgttttccctgtaactgcatccccgcactcgttgtcgttgacactgagcatcttttgaggtatgtctctatttttaaaaagtggtatgattgtaacatgtncgtgtcaaaatatcgtattgttcatgtactagt

SEQ ID NO: 207708 - DNA, 396 bp, Glycine max
  unsure (1)..(396): unsure at all n locations
cttctcttccactgagtcctccagctttttctgaaatagagtnttggcagcctcaagttctgatatagctacttccttgtcatgtaaaatggtagtgatgtattcctgttttttagcctcagaacgagcaagttcttctagtaattgatccctctctttctcaataatctcttgtctatgttgtgcctccgaaagagctnttttggttaccactaattcatcttctattcctataacatcatcttgatcaacaactacatctgtgagtttgtcatctgaatcattctgtcacacaaatagaataaatatagggtcacttcccactatcaactnntgtaattgcacctacttaatataatatcattaaaagatatgtgaaactcggtcacctttctg

SEQ ID NO: 207709 - DNA, 384 bp, Glycine max
  unsure (1)..(384): unsure at all n locations
agcttcgttaatgattatgcatatggtctggtactattcaaattttattaattccttttcttttgttatatatataccggntacgttataataattgttttaggcatgagggaactatagttagatatctcacagtaactaanaaagtggttaatatacttctcataaaacttaagcaaatgatccttccttgaagtagcttttggaaaggaattangtttggttcatttctaaagatatatatatatatatatcatacgtaaaatttattacgctctgaaaaaaaatggcatggtgttctatactagtttttttttgaactttagccactacaaaaaaacgtcatttgaatatgttacatggcttcgatatgaatcaactcat

SEQ ID NO: 207710 - DNA, 256 bp, Glycine max
  unsure (1)..(256): unsure at all n locations
gacagctttactttgatctaatgaatttcaacacatgattagtttaagattactataatctcattagttggtgttgataatgattgctgctttcncacggagttgatcaacgaatttcagaaagtgaagattacattctttttctgaaggagtgtggaaacctgtttctctgcttttggaagcctatactgaacttttgtctttatcttttgctgtttggaatgttagtgaagaacattagatattgctttaataa

SEQ ID NO: 207711 - DNA, 217 bp, Glycine max
attcaaatagtcataactattcatacggatgtcccattccggcgcataatatgtcgagaggctcgtaaatgaacaacggaagctcttgagataatcaactggtattacctttcacaccgatggtccatttacgccgaacacatattatgaagctccaaaatgcaccaccggagcttctccgaaatttcaaagggcataaattttttcaccgatggcc

SEQ ID NO: 207712 - DNA, 277 bp, Glycine max
  unsure (1)..(277): unsure at all n locations
gatcttccgttgttcaatttcgaccttctcgacatattatgcgcccgaattggacattcgtgtgaaaagttatgactatttgaatttcctgagagtttccgatgtttaatttcgagcgtatcgatatattataagcttgaatcggacatccgcgtgaaaagctatgaccacttgaatttctccagagctttcgntggtgaatttcgagcgtctccatatgtgattcgcccgaatcggacatccgtgtgaaaagttattcccgtttaatttttcacaa

SEQ ID NO: 207713 - DNA, 383 bp, Glycine max
tgcttgcatatgctgattagcatagcaccctcttgtttatactgtcatgcgagcagtaatatccggcaatcactcttaagggcttatttatttgttccacaagtgtcacctgcagcacgatacaaggtaaccattttcataattctttaggtcttgattcttgtgctgttaggtcctacttcttgcggagtttaatgataactttcacaattcttctagcagattttgcacctccacctgtgcccaatgagaaacttcctcctaaactgccagaagcctgaaaaggagaaaggttcagtggagcaatattctgttgactaccaaactggaaaggactgcctcctgatggagtctatgctccaaataaaaaatttgattgaact

SEQ ID NO: 207714 - DNA, 385 bp, Glycine max
  unsure (1)..(385): unsure at all n locations
gcattatatatatatatatatatatagatatatatatatatatatatatgtgtttggcttttgaatttgatggattttcctttagattaacattatttaattaaaactttgaattattaatatttgtgattcaacttttgatgtgaaaaatatgttatgatagacggattagaatgagacagttggacctcagatntttgatccagtcatatagtcatattctataaatagaagtaattccctttatgtcactcaaaaatcttgttgacagctctaaagtttaagactatgggattactatgatcgtgatgtaaacagtcttaaatttagttgtgaaatttggaaaatgatactgctattatatatatgtatatatatatatata

SEQ ID NO: 207715 - DNA, 387 bp, Glycine max
agcttattcatggatattgtaggacgtttacttggtatgccacgaagcattgtctcggatcgtgatcccttattcgtgagtaaattctggaaggagctcttttctctcagtgggacaaagctctgcctcagctccgcttgtcacccacaattcgatgagcaaaccgaggttgcaaaccgcatcatcgaacaatatttgagagcatttgttcatcaaaacccttcgcaatgggggcactatttgctgtgggccgaatggtcctacaatacatcttgccactcagccaccggcgtcacgccgtttgaagtaaccttcagcaggaaaccacccaatttccctcattatgtcacaggaactgccaaggtcgacgctgttgacgatatgctc

SEQ ID NO: 207716 - DNA, 365 bp, Glycine max
  unsure (1)..(365): unsure at all n locations
gtactatcttcatgcgattcctttntctccctcctctaatattatctcacaaatcccaacggttaagggatgctcaattgaatttcgaacaacatatccaaattttactacaatccaatggttaacgaatccaagatcgtatttttaccaagacagttttgggtttctgcgggaaaataaaatgctacaatgcgaagggttttatactaagctcagacatgattttgaaattcccaacggtgagaatggtcggaattgggttttgaaccgggtgcttaaatttcacgatgatccaacggtgaatgagtccgagatcatcattcttctgagacatgtttagtggtctacgggaaaagagaggttga

SEQ ID NO: 207717 - DNA, 442 bp, Glycine max
atgcgcatatttccttacaaacgttctctttcacaagacattctattaaccgaaaaaaaatgcacccatatacaatcaaggcagcttcgttacctagattatttacacgtacttccaaggtgtatttgttacttacatcacacacatctccttggctaaattcacatacatgcatactcaaagcattttggggtaccaaaaattgcacatgtgcatatcttggtatttctaatacctatacatacacaaacttcatgatgaatcttgactatctacacaataaggtgctacatttcatgctcttttcaagtttttgctacctaaagccgcatgcaaattcaagtatattttcctttgctgactaacattgtattcaaattaaaaggtatacatactttggtaatgtatcatctttacataacatgcaacatatatatgtata

SEQ ID NO: 207718 - DNA, 278 bp, Glycine max
ggtgatgaacaaaagcgcttaacggaatctttaaatgcggaaaaggatgaccctacggctgcaaattcgtcaatcccgtgggtatggcttctgaaaggggggaaaagaagtttttgaatgtaaaaacgccccccctttcgtcatttttataatttggtgcacgggtggctcgcccatgcgagctaacctgcactatttttatttttttttcttttttgaggggaacattaaccatgtcccctcccttaccatggattatcattgtgccttacttgaac

SEQ ID NO: 207719 - DNA, 405 bp, Glycine max
  unsure (1)..(405): unsure at all n locations
agcttgaaggtgtgtaactgttgtgtcattattttctcctatgtcttaaccctttttgtcaccattataattactgattagccttaattgtcaaattaattatgcagttttatcatttgggcctacttgactaattatgtgtttntaatttaatttcacgagacttataagcaattgtgcttgaatccggaatgggcttggacttgaagagacagacaatttattttaccaatcttttttatccagatttatttatctagatttatgtcgtcagatttatttcatcatcttactttcttgtcagatttatttattcgttatggctcgacttaaacaattgaagcttatggtgaacctattacaacccaggtttagtttagagtttttggaagagataattagatt

SEQ ID NO: 207720 - DNA, 374 bp, Glycine max
  unsure (1)..(374): unsure at all n locations
agcttctggtgggacatcttgacttgctgtttaatctgacattcattacacattctgccttcttctattatcagattgggaatgcctctaacagcacctttgtcaatgattatattcatgcctcttgagtgcagatgtacaaatgtttgatgccataatcagacttcatcttctttggaggatagacatgtggaggagtaactgggttcttgagatgtccatangtagcagatgtgctttgatctgctgcccttcattagaactatactcttgtcatttgtcaccaagcattctgactttgtgaagtgtacattgaattcttcatcacacagctgactgatgctgataaagtatgcagacactcccttcaccaa

SEQ ID NO: 207721 - DNA, 456 bp, Glycine max
  unsure (1)..(456): unsure at all n locations
agcttcttgacttgtcttggaaccagaccactttctgtaaccccaggtacctgttcatgtcaagaggtattangaaaatgatatctaaagaatttagaaaaaaacttagcactcagaatcaggctagctaatacaacttcaaaaatgtagtataccagtatcatctcaagtccctttgtcaaaccaacaagacgaggaagtcgctgtgttcctaagacaatttaaaaccaggttagcaatactaaagaaaaatataataatgacaattagtcacaagaaatgcaccattactcatggtctaacttcattttacaaattattctaggcctatctaacatgtgaactaagggattaaaccaaacttgtagttaattaataaattcattaaaattgaacttcaaacagctntcaatgtaatgcatgtcactcaacaatgagcagtaacagtggtaacat

SEQ ID NO: 207722 - DNA, 439 bp, Glycine max
  unsure (1)..(439): unsure at all n locations
agtcatctctaacaagggttaaggatacctcaaggaatcctataacaactctctggttcagctactacttagaggcgtctaatcttaatcttaggtttcctctcatcccaaaagcaacttctagccaagaaggatctatagttatctctcaccgagacgtagcatactctaagggccatcctcatctaactaaaatatactaaaacgtgtagcacgaaaggtgattcgtaagggtctataacaaccttaagatactccacatactccaacctaactcgaaacacactagatcacaaaccacagaaaccactacaagagctaactcanggtgagagatcctatccatgcatcccatgaacacataggggcattgatcttgtcaagacatgtccaggtacacgtagagaccatggcatgtactaaggtagtcatcggagca

SEQ ID NO: 207723 - DNA, 351 bp, Glycine max
  unsure (1)..(351): unsure at all n locations
agcttgtanggttcaccccanattccgtcgtcatatgctaaacttgatcccatatctacttgataattcaatggtagccataaccctagccaaggttcatcaaccttcatttctccgagaatacgactcgaacacaacgtgtgcttgtcacgaagaagccccggggcgttccattgagcattgtanggctctgaagtgtanggtgcgaggtctaattgatgctggctgaaatttgaggagaatcgtgtgtaaatcctgacattgacaagagatgccacacatggngcaattntgaaagcttgtgttagatgtctctaatgactcaccangattttcaactttcaccggaat

SEQ ID NO: 207724 - DNA, 357 bp, Glycine max
  unsure (1)..(357): unsure at all n locations
actctagatgctgcanagaaggacaaagatctttatggtgatctgcagaagaacatagaccacagactcttgcaacaggtgcaaatttcttattcatggcaagctgagttactatgttgaccaaggcatcaagttttccctcaagctttttattttcaatagatgaagatgaatccatggccacttcatagactcttctaaggacaatagcatcatttcttgcactgaattgttgggagttggaagccatcttctcaatcaaattcctagcctcagcaggggtcatatcaccaagagctccaccattggcagcatcaatcatactcctctccatgttgctaagtccctcatagaaat

SEQ ID NO: 207725 - DNA, 396 bp, Glycine max
agcttaacaaggctctctgtggcttataaaacatgccccaagacagtggtttgacaggttgaaatctacttttcttcagtttggctttgtgggaagcaaatgtgattcttatctgttcatctacacacatcagaagcatactgtccatcttttagtctctgtgaatgatatcatcatcacaagcaattctatctctcttattcaacagctaacttccaaactaaacactgccttctctcttaagcagctaggtcatttggattattttttgggactagagatcaaataccttgctaataattctatactagggactcaaagcaaatatatttgtgatttacttcacaaactcaaatggctgaagcacattctatttcctctcccatggtttctaac

SEQ ID NO: 207726 - DNA, 511 bp, Glycine max
  unsure (1)..(511): unsure at all n locations
ccatcaggttttggcttccagccatttgagacataatcaacagcaaggagaatataaacaaaaccaaaagagacagggaaaggccccataaaatctataccccataatgcttagcatcactcttaattntatcattttgagctttagatgctaagggaggaaaaacagaagcaaccaaataattcacaatattagcaaaccaaggagtggggaaggaatcaaaaatactatacagaatgtacaaatggtcatctggaaaatcatcccgaatgggtgagtccttagaggcacgctcaatccaactcangtggtcagccacgaggttctgtgcaccactccgatcacaaatttccaaatcaaactcttggagccaaagcatcaacctgatcaatctangctntgattcagccttcttcaacaggtacttcagagctgcatggtcagtataaacaataacacgagtacaaagtanatattaacgaaatttctgaagagcanaaactatcgctaa

SEQ ID NO: 207727 - DNA, 398 bp, Glycine max
agcttccttgagaatattcctaaagaagctagagcttagctacacacacctctctaatagctaagatcacctccttgagatgagaagctagagcttagctacacaccccctataatagctaagctcacccccatgacaaaatacatgaaaatacaaaaaaaagtccctactacaaagattactcaaaatgccctgaaatacaaggctaaaaccctatactactagaatggccaaaatacaaggcccaaaagaaggaaaaaacctattataatatttacaaagaagagtggatccaacattgacccatgggctcaaaaatctaccctaaggttcatgagaaccctagggccttctttagtagctctagccgaagcctcttggagtcttctatccaatac

SEQ ID NO: 207728 - DNA, 385 bp, Glycine max
  unsure (1)..(385): unsure at all n locations
ctgagccaaagtcccaactcaccatanaccttgccctcanattaaatacataaanaaggagaacgaaaagatgagaaaaggagaaaaggagaaaaggagaaaattcccgatcaaaagaataagaagaaagcaaaaagggaaaattcccaatcaaggaaaatgggggaaaacaaaaaaagaaagagaattctcgatcaaagatcggaagagaaaagaagaaatatgcagaaaggtcttaggaccagacaatatctgaacaatacagatttgtcaccaagtaaacaagaaaagaaaggaaaccacgacctatagtggtcctctccctttgattgccaaccaaaatcctgtgtgtcagcgactttttcgccctgcactaaacaaaaac

SEQ ID NO: 207729 - DNA, 217 bp, Glycine max
  unsure (1)..(217): unsure at all n locations
cagcttatgggccaatncnaaatactacagtattatgtatatagaggcgccattaaaaagacttttctatttaggaacttaatgaccaattgcaaataataagccttgaattaaaagtnttaaaccatctgggaatcgacggaggaaacaaatacttncacgaatctatacattaagaaaacctatactatgctaattcattttaacaaaaaataaa

SEQ ID NO: 207730 - DNA, 124 bp, Glycine max
caattcgggttaaaacagaccctatttggtgaattattgtgaaatacacgccctctacacgcaatttgccgaatatatagcaactatagaagctgtagcatgaatcattgaggataaaaggctt

SEQ ID NO: 207731 - DNA, 435 bp, Glycine max
  unsure (1)..(435): unsure at all n locations
agcttgcttccacaactacgtggcaaatatctcaacagcgcagagcgcctgggatccctggcctactctagcacatgacacatctttgccaacccaggatgcccccacatcacctcaggacgacccaacactggctcaggaggagtaaagacaggattcatttatttttctgctatttagatatagtttttagctttagttttatttatttacttatcacttttacacctttttgaacaatttatggtttttaaactatgcacagtggtttttggcttttgaaacatcttttggtttaaatctttggtgtttggtgattggattgaattggattgatttcttgaattgagtgatatgcaatactagatcacattccttgaaaaaatatgtcgtagttagaagagaaagaaacatgaaatangggcgtgagtggaa

SEQ ID NO: 207732 - DNA, 452 bp, Glycine max
  unsure (1)..(452): unsure at all n locations
gtgtcatgatttctatattaccaattatgctagctggtgatgttgcatcatagttttgctatgtcatctacctttggtctcatctctttaccttacaattcaggcaattctatcattaccctttttcaatatatagaattggcaacatgcatacatatctaatccaggaaattccaccactaatagtcagcctataatccataaccaatgaagtcccncatctccaatttattccatcttctaattntattgtagtttctgcagaattaaaataagccgttggttcttcgttttaacataaatctattggttagtttataattcacccaattctgcctttagtcattntcaacatgcagaactatcaacatgcanagagatctgattatacanaagccaggatcaacagaaaacgtattatgcaacagaagcgacatggtcatgctcagtca

SEQ ID NO: 207733 - DNA, 388 bp, Glycine max
  unsure (1)..(388): unsure at all n locations
agcttcttgtgattcacaaagctactccaccctgtagttaacaagtgccggcgcggcgtgcccctataaatgtgcctaaatttccatgtctcaccatgaacatccttggcaaggatgttctgaacgggagggtccgcggaatattccaaccgaggaaaaattgtctcagcacaatatctgggaacagaaaagcccccaccattgttggcatcaaactgtgtcaaggttttggcaaaagaaggggatttatctttattttcagatccattgatgcctacaacagcatcatcctcaaaatcaccctcgtttctggtcaaatgaacaagcctaagctntacataaacctcatcagtttcaagatcagccatgtattagatagctccaactt

SEQ ID NO: 207734 - DNA, 446 bp, Glycine max
  unsure (1)..(446): unsure at all n locations
tctaagcagcangggaatgtgggtntcanactggtgtcttttgaaaataagcttctgcatgcaatgctggtagtgtttcgtccctaagcaaagtattgaaggacttggtatgtaccatattgtaatccaaacattacctcttaacggngagaagggaaaataaaaggaacctcattaactgtacagctttcacatggttgttgtgaagaacaccatatcatgcaattatgcatggctgcatgttgctatatagaagaaacaaccattgttatttttgttgtaaagaaggtcctgctgagtttattgttatttttggtgtaacaaatgtcctgcagacattgtcaattgctactgcatttggcattgtgatattctaaatctaaatgaatggtgcactctatattggtgcagaatggtaagatcaagggactgggttcttacatata

SEQ ID NO: 207735 - DNA, 454 bp, Glycine max
  unsure (1)..(454): unsure at all n locations
tctcagcttaaacttataacttactattcgaactctaccacttgcctgaccttatacatagaagaagaattcaaggtccttggtcaaacccacactagtttctccgtgtgtgtgtgtgtatacagattgtttgattaacgatagaattgtcatttacaagattacatgacaaaaaatcaactacttagccgataaacaccgcggagacattaatcatcagacaggcaccatatgaacaatcgaagtgacaagtatcatagacattttttttagaaattcatgaactcctgtttaaacgaaagcaatataaactgtactggggtgaatatgccataaaaacagtaaactctaanagatgcttttattgaaaaataacttttaaaatggttgttatacgtaaaggttnttggcttaaaaatgggtttaacttctattaaatgagncgatattgatt

SEQ ID NO: 207736 - DNA, 418 bp, Glycine max
ttataagcgcgggtctgtgagacaaaggtcaagtgttcgcgatatgcgaagatgatgttccgagtactttggatttggtacgaccatgccctcctgatttccagctgggaaattggcgagtggaggaacgccccggcatttacgcaacgagcataatgtaaacctttacggttttaaaagctctatagttgggcctaggctttagagtttttacttttgtaaggctttgtgtcttttgattttgaatttataatacaaggatctttcttcatctgttcctggtctctacccattctcattcatttgcatgtttacttctttttctgaaacagcagatccgatgacgagtcccccgaaggtactaatacctgtgacccgcctatcgacttcgagcaagaaatgaatcatacggaagatg

SEQ ID NO: 207737 - DNA, 420 bp, Glycine max
  unsure (1)..(420): unsure at all n locations
gctctgatgatntggtcttgaccgactaaaggatctcagtgggtctaacaggaggcttatctgaccatcatgcttcgctacactcatgagctaatcgcagagaccaaatctggcatatagagacggtgagactgatggagatgcccatgctgtgactgccaatactctacaggcgagtgacacaccctccccacattgactttagtcagcctataacatgccttctccttacccaccaccaatgtatcctgataggcaatgcctaaatcataccacgaagtctgtctaccggactttcaatgacgaacactacctttagcacaaaccaagaacaccaagcaagatgtgatatctgcggcgagatagactgtgcacattaccccaattccaatgtcgcatgctgactagctgccatatcta

SEQ ID NO: 207738 - DNA, 448 bp, Glycine max
  unsure (1)..(448): unsure at all n locations
gatactcagcttcttatccaggctcatcttggtggtgaagctccttcttccgtggcttattccttaatggatggcgcctcctctcacctcctttcctttgtcttccgctgcatcttcatcgtggaaaatcaccattaaaggaccccattgaagctcaaagatccagcctccatagaagtcccacaagcaagcttccatcaagtggtaatcagagcacaagagcttcaagtaggtgcaccttanaccttcattatttttttttctttaccttctcttccattggtgtttcttcatttttctccatgtatctcctcacatgtcttgttctaaatgttattaacatgattctttagagtttccaccgattaaacttgctatagaagttagatttgattttttatggttcaaatttcttgttcttgttcttgaaccatgaattgtgttgagt

SEQ ID NO: 207739 - DNA, 445 bp, Glycine max
tctcaagagagctaccttgtctataaatagaagcatgtgtaacacttgttgtaactttgatgaatgagagtcttgtgagacacaactcaaagttcaacttctctccctttttcttccttcaatttcgtgctcccccctctctttttctctccctctttcttttcctccattgaagcatcctctccaagattcttatccaaggctcatcttggtggtgaagctccttcttccatggcttattccctagtggatggcgccgcctcttacctcttctcctttgtcttccgctgcatctccatggtggaaaatcaccattaaaggacctcattcaagctcaaagatccagcctccatagaagctccacaagcaagcttccatcaagtggtaatcaaagcacaagagcttcaagtaggtgctccttaaacctccattaatttttttcttt

SEQ ID NO: 207740 - DNA, 250 bp, Glycine max
tatttctctgtgatcatagatccctattctataatattggtctgtttaactaaccctgtagatattaatttcacaatggaagtaaaggccattagaaatctagttgcctaattttttataattagctaatggacaattgtactaggatactctagttgataaattcataacccttgccgatagcaatgcggggggtggatccggagagctcgggcttgcgattccactggaggagggcagaggggggttt

SEQ ID NO: 207741 - DNA, 432 bp, Glycine max
gcttatctagccaggttatacaaaagtgttacaagagaacctaacagtttctaattatatgggccatcaaatctatcatgtgttgacagtaattgattagcccatgaatttcctcgggggctgtacacacttcggccatggcttttgctttggctaatagtcgcgggaggtcttgacttccattcaaggtcaaggcgaacctatccatccacatagtcgcttcttgatgcaacgcatcaatcaccctccctcttgcttctttttcggcgtacacttgtgcaaaatccttcactagcttttgttcatgggtcacagcttggtccaactcttccttatactaccctatgatagctagcatgctttgctctgtggcttccaagtgttgagccaaactcctcttggatcttgcgcaagcagctaactcttctttta

SEQ ID NO: 207742 - DNA, 437 bp, Glycine max
ctgagaagtgttgtttttcaccttctcgctaagccaatctgttggcttagcgagcatccgttaagcgcaacactcatgagctaagcgcagagaccagagcttgaagatggagccggtttgagagcttgagatgagtttatgagtgattgtgagatcctagaggtgaaggagacatcctcaccacttgtatttttgcaatctttcatcttgttcttctctttgttgtaaagaaggcttcctggtatggaaagctaaatcctctattggatcttccttgtaggtacctgatgtaaatatatttctatttttttaatgatgttttgtctgttctctgtgctatctgcttttcattctagtatgcctttaccttgatcacgtagatgcatgctttgttagggtcattcaacagtggaaactggtctaactctatagtcctt

SEQ ID NO: 207743 - DNA, 438 bp, Glycine max
tctcatttatctccaccatccggtccaacttccgcttgaactctgggttttcaacatcaagaacggctgggataatccgatcagtcgtgcggtttgtctgcataaataatccagacattgaagcttgagtaactggttgtaatatacgagttcatcattagatgcttgttgatcgactttattagtgatagtttctaatgctaactcgaggctccattactttcattatatcatgttctgttactaaattgactatgtaattgagaatggataaaaacaaatattgattatacaaaataacaatggaggaatggtgattatagaaaaatgcaaacacaaactaacctcgataatgacatgcatgtcaaattcttttgtgttaagtccaatgccttcgtagaaagctgtacgttggcaatcatcgagatacattgtgac

SEQ ID NO: 207744 - DNA, 434 bp, Glycine max
  unsure (1)..(434): unsure at all n locations
tcatgagagagtcaaagatcaaattgagaggaaaaataatagctatgctaaacaagccaacaaagggagaaagaagttgtcttcaaacccggagattgggtttgggtgcacatgagaaaagaaaggtttccggaacaaaggaaatcaaaacttcaaccaaggggagatggaccatttcaagtgcttgaaagaatcaatgacaatgcttacaaagttgagctgcccggtgagtataatgttagttccaccttcaatgtctctgacttatctctttttgatgcagatggagaatccgatttgaggataaatccttctcaagagggagagaatgatgaggacatgaccaaaagcaagggccaggatccacttgaaggacttggaggacctatgancagggctagagcaaggaaagccaatgaagctcttcaacaagt

SEQ ID NO: 207745 - DNA, 444 bp, Glycine max
  unsure (1)..(444): unsure at all n locations
ctcaagcttggcgagagttaaacaagaacactntntggccaatatggaactccttcctaagaatcctagagtcatgaatcctcttcactttctctttgtagatcttggatttctcataggcttctaagcgaatctcttcaagttcttgcaattgaagcttcctttccatacccgcttcatcaaatgccatgttacaacccttcaccgcccaataagtgcagtactcaatctccaccggaagatggcatgccttaccaaaaaccaccatatagggagacatccccaaaggtgttaggtaagctatcttgtgggcccataaagcatccaaaagtagcttgctccaatccttcctattaggatgcactaccttctacaacacttgcttgatctctctattaaaaacctccacttgcccattagtttggggatgataagctatagcaa

SEQ ID NO: 207746 - DNA, 258 bp, Glycine max
aagtctatatattcaccatctattcaccctcgcgatatccataataagagacttttatggggctctgtgacgcagctaatacaatcaacacctgtggggctcgtgcgcatcctgtgagattccaactcaatcacggacaccaatgaaagatttcagtgctgcctaagaccatccacaaatagcagcatgactgaattcaacgaatggatagatgatatggaggtgtagagataccttgcgtgggcaacaagtttactt

SEQ ID NO: 207747 - DNA, 434 bp, Glycine max
  unsure (1)..(434): unsure at all n locations
atgcaaccatagattntacattgagtgtcctcattgatatgttctacagttgattttgcatgaatttctaattgtcataacatatgattcatggatatgatttcgacattctttctttcattatatttttagtcacaagccaaaaagctatcccaaagtatattgttttaccatttgcaagccctttgagccaaacacttgagttttgttagaacactaacctatgaaaaaattttcctaccttaccttaggttatgggaacaaaggtgttttgttgggaatctctatcatttggtggctaatgtgatgtaaatactctatttttaaatgtgggtattaaggtaaattaaatatttaatagaaaagataaaaagaatagactaggaaaaaaggaaatataaaaggggaacaacgtctttgtgagtagataaatg

SEQ ID NO: 207748 - DNA, 447 bp, Glycine max
  unsure (1)..(447): unsure at all n locations
ctagactaaatagaataactaanatgctgaatcttacaaattttatcttcatttaatcatcattaaaagttaatcagtggtgcaactagctaccccctgttaaaataattgaccatgtgtatatgttttatgtgtcctagtatagcaaacaacaggaatggtgaaaatggatataagagcattcctcttttgcataagagcattgagtgcagtctatgacaatgactttccctttgaagctataagaatttggagcttttcaagatcaaagttgggtagtgcattgagcgcagtctgtggcaatgaatttccctttcaagaatttaggtgcaaataatgataaacacataacctatgcaccctaccatttagttacaatgaatctccctttgaagaatntangtggcagaattcatagaacaagtttgggagacatagtacgtcata

SEQ ID NO: 207749 - DNA, 468 bp, Glycine max
  unsure (1)..(468): unsure at all n locations
ttacggacactatgaatactcagcttagagaaaagttactgganatggctntatactattggtgggagagtggaccagagaagagcagcaagtcaatatagtcaccatctattcaccttgcgatatccataataaaagacttttatggggctctgtgaggcagctaaaagaagcagcacctgnggggctgtggtgtatcctgagagatttcaactcaatcagggacacgaatgagagattcgggtgtggccaaagaccatccacaaatagcagcatgactgaattcaacgaatggatagatgatatggaggttttagagataccttgcgtgggcaaaaagtttactnggtacagatctaatggtgcttcaaggagcagattggacaggttcctagtattcccggaaaggcttggaagatggcctgcaagcttccagactactcttgctaggaatttctcanatcattg

SEQ ID NO: 207750 - DNA, 436 bp, Glycine max
  unsure (1)..(436): unsure at all n locations
agtaagatactattgctgtggagttgacgtacaggttctcactgctgttntgtgtctggatatgtgtttaggtgtgaaatatggaggtaaagctgcagacacgtgggcagtaggagttactttatactgtatgatattgggtgaatacccttttcttggagacacacttcaagatacatatgacaaagtaagaaatacacactcagacatatatgacaaagtaagaaaaacatgcatgtttttattataattacaacaaaaatgtcattctgttttcaaaagttctcactttactaagtttcgtaactttttcacccggatattatactctgattggcattcatattttctggtgcctatatcacaatcttagcttgctattttcttcctgatccagatagtcaataatcctttagtactccccaacgatatgaat

SEQ ID NO: 207751 - DNA, 438 bp, Glycine max
tatcaagttcaacaagttctaagatgtgacttctgtggtagtgaccatcataatggccattgttcaggacctggtgattgccaataggaagaagaggctcattatttgtagaatcaagccagacctcaaaagagctttcaaggaaactatcaaggctacaaaggaggctcaggttcaaatcagccttatggttggaggccacaaaataataatgcatattctggtcctactaacacttcttttacaggtccttctaacaattcttatgcaggtctctcaaataagggcccacaacaacaacaacaacaagcttaattggatatgttggatcgagtggcctcagaataattaagaaggggggttgaattaattattcctaaacctttactaattaaaaatttactcttctaaggcttttactatgtttgtaagagaata

SEQ ID NO: 207752 - DNA, 432 bp, Glycine max
cggtacatttagctaataaaactatacataaatcatgttctaagtgagtgatttaattataacaaaaaacaattttttttcattatttcaaataattcgcgacaacatttatttattaaaaaaataataaaccaatacaactatgagaaaacaacaataataccatgttgtatatgcaattgtttgttcatgaatttatttccaagaaagcatccattttctattacttttaaatagtttataagtgcgtgattgtatttaaaaaaaaaaaaaaaccaagcgacaatgagagagcgagtaccatgtcatacatacaattgtttgtccacgactatattttcatcgtcttctcaatgatttttttctcttttatcaggtatttgtatagcatgtgtaagagaatgttaagtatgtgtcactctaaaaagttat

SEQ ID NO: 207753 - DNA, 442 bp, Glycine max
  unsure (1)..(442): unsure at all n locations
tgagggaanacttgatgccttggtgaacctagtaactcagcttgccataaatcagaaatctgcatctgcacctgttattgttgcaagagtttgtggtctatgttcttttgctgatcaccatacagatctctatcattctttgtagcaatctggagtcaatgagcaacctgaagcctatgctgcaaacatttataatggaccccctcagcagcaaaaccaacaacaacagaataattatgatctttcaagcaacagatacaatccaagttggaggaatcatccaaatctgagatgggcaaatcctccacaacaacagcaacaacagcctgtccctcccttccagaatgctgctggtccaagcaggccatatgttcctcctccaatgtagcaacagcagcaacaacaacaacaaagacaacaagcaattgaggccccttctcaa

SEQ ID NO: 207754 - DNA, 433 bp, Glycine max
  unsure (1)..(433): unsure at all n locations
tggagactcagcagccccatacacacatatggtttatttgtaccagttatagcaaggaagtagtattttttatgcagcttcctacgtgcatgcattgtgtaacagtgagtgaagatttgttcgataagacttgcaccatcatgaagcctgagactacttgagtatataaagaacggtggtgatggtgctccaactctcccgaggagattcgtgaatttgatttgggttccaaaatgatatttacatagtttaccggggagccgcctgccttagttagcatttgaattgagtgtacagcatgtggaactgaatttagaacaacatctctcttagcgagagcattgtgacttaagcgatttaatagccctcaatgttttacgcacgcaggattgagcggttttcttatgtgaactcgagtatacaaattaatttn

SEQ ID NO: 207755 - DNA, 433 bp, Glycine max
tccttaagaagattcctaaagaagcttgagcttagctacacatacctctctaatagctaagctcacctccttgagatgagaagctagagcttagctacaccccccctataatagctaagctcacccccatgacaaaaaacatgaaaatacaaaaaaaagtccttactacaaagactactcaaaatgccccaaaatacaaggctaaaaccctatactactagaatggccaaaatacaaggcccagacgaaggaaacacctattctaatatttacaaagataagcgggctcatacttagcccatgggctcgaaatctaccctaaggctcatgagaaccctagggccttcccttggatctctagccaatctacttggagtcttctacccaatgcccttgcaggtaggattgcatcattccctccaccttggaaaga

SEQ ID NO: 207756 - DNA, 366 bp, Glycine max
ttaacatcacaagtaagtgccttgctcttttctttgctatatcattgaactttaagatagagatccttagattaagtcttagaattttaggagcttactgctttagaagtagctaacattttaggacttttcacatgttttgcattatgtacattgtactgagggttgtgcatgtttgatatgtcttgtagaggcccggaaaaaggaagaaaatgagctgtgttttctgcattttttctagaaaacatgatgaactcgctaagcgagcatgctacgctaagcaagttcatcaatattcattgaatatatgcgttttccgacagaactcgctgagcgcgcctaccgtgctaagcgagtttatctttg

SEQ ID NO: 207757 - DNA, 415 bp, Glycine max
  unsure (1)..(415): unsure at all n locations
ctaacctcatcatccctcacagtctttagatntgggagccaatccaatccttgtgttcggactctcagccacttatgatagccgccgatgatcccattactgcttcccctaagctctctgtcctttcttaacgccgcatcccatgccttgcgaactccttggagtaccctcgcgttgtggtcactaaaaccccgtgcgatgaaaggcgtgatgctttcgtctaatggcgctcctctcatggggtagccaagctgtcttatggcgagaatgggattataattaatacaaccctttgttcccatcaagggaacatttggacatccttcgcatgaagatagaatcttgattcttccttccttttagcgagggaaccaattaacagacgccctcccatgctagccaagagttggaccca

SEQ ID NO: 207758 - DNA, 439 bp, Glycine max
gggtgtgagaaagcatggaagagtcagtcttcctacttttatttgttgactcacagagtggtacctggagatatgtcgcgggggtcaagagaccttggggacgtcaggtggggtgctattgcccaaaaccaagcttggccaatcccgacccaacccgagcataatcagttagtgagaacctgtgacgtacctaagcaggcgagctcctagtagtcaaccaataaaagaacaaagtccacgaagcaaggaggcttgtgtggcggctggccagctatttatcttgggtgttatctgaaaaataccctctggtaatcgattaccattcgtgggtaatcgattatagggtttaaaaattgaaacagggtgttcagtagcttctggtaatcgattaccaattgtgtttaatcgattacactgtgtgatatgctactggtaatcg

SEQ ID NO: 207759 - DNA, 373 bp, Glycine max
tacatcaagtggtatcagagcacaagagcttcaagtatgtgcttcttaagacaccattaattatgtggctttaccttctcttccatgtttgactcttcatttatctccatgtatctactcacatgtcttgtgctaaatgttgtgaacatgattctgtagagttgccaccgattaaacttgctataaaagttagattagattatctatgggtcaaagttcttgttcttgttctagaaccatgaattgggttgagtttaagttcctttgaatcttgtcttgttattttttgtggctgagacctaaaccatgaaattcttacaaaaatattaaagtataacataaccccaaaaatctacagtgacattgtcaccta

SEQ ID NO: 207760 - DNA, 399 bp, Glycine max
  unsure (1)..(399): unsure at all n locations
agcctcanagaggtccaggaaggacaaggcggccgaatgaactatttctgctccggagtacgacagtcaccgctttaagagcgctgtacaccagcagcgcttcgaagccatcaagggatggtcgtttctccgggagcgacgcgtccagctcagggacgacgagtatactgattttcaggaggaaatagggcgccggcggtgggcaccactggttactcctatggccaagtttgatccaggaatagtccttgaattttatgccaatgcttggccaacagaggagggcgtgcgtgacatgagatcctgngttaggggtcagtggatcccattcgatgccgacgctatcagccagctcctgagatatccgatggtgttggaagagggccaggaatgcgagta

SEQ ID NO: 207761 - DNA, 445 bp, Glycine max
  unsure (1)..(445): unsure at all n locations
ntgagccaaaatcctgactcaccataaaccttgaccccgggtgagaatgccaatcgttaccctcggaagcaaaaaaaaaaagaagagaaggaaaatttccaatcaaaggaaaaaggagaaggaaaatttccaatcaaaggaaaaaggagaaggaaaatttccaatcaaaggaaaaaagagaggaaaggaaattcccaatcaaagaatgggagaaagcaaaaagaaaagaaaggaaattcccaatcaaagaatgggagaaagaaaaaaaaagaagaagaagaaagggaagaaagttcccgatcaaagaaaacagaagaaatatgcagaaaggtctttggaccggacaatatctgaacaatacagaattgtcaccaaatgaacaaaaagaaggaaaggaaaccacgacctanaatggtcttccccctttaattgccaaccaaaatct

SEQ ID NO: 207762 - DNA, 429 bp, Glycine max
  unsure (1)..(429): unsure at all n locations
ntatcaactagtattgacaaatatcctaagatcataattattctatccatttttagtccaatatattgaatacacacgttaaagagaaaataaaacgattgatggcgataaatgcattttattaaattcttgtctgaaactgaagactacataatataataaaatcgttacacattaaaccaattgacttcaagcaaaaaataatcgaacccgaacatggacaatactattttataagctagatcatgctttattaaaagattctaccttaaaaagttcaacgattctgaacttgtttcaaaagttaatctaattaacgtattgaacaggtgaccacctaaatacagagtaagcatattttaatataagggagttgttattggctctaatctctttgccattggtccctaacatagttgtgaattcctc

SEQ ID NO: 207763 - DNA, 446 bp, Glycine max
  unsure (1)..(446): unsure at all n locations
gacctataaaactcagcttatacaagttggctcttaatcttatttctcttcttgtttcattatcaaattcatgcaagcttctcattcatggttccaaaatttcatttttttttcattctttgaagcttgagacatcaaggatcaaagctccttgttcatctaagccattttcttgtagcttcatcaaggtaaggggggtctctctaattcttgaaccctaatcttattgtctttggaagctaagtttcactgaaagttgttttgatgttcaaaaattcgtagctacttccttggctagaaatgtatgatgtgttgcttctcttgaaattttaaggttaaaaatgggttctttggttgtcaaaacttaaggttagccttatatttcacctaaatcgaagttctctaataaaagttatgaaaaaaacaaatttaaggaatnttatttt

SEQ ID NO: 207764 - DNA, 430 bp, Glycine max
tctaattccaaactgtatgggttgctcttcaagattccataattaaaattgcttcagatatttagttctgattttgaatactatgttatcgtaaagtttgagttacatgcacttgaggccatctagtgatgcggcattacttaattatcaagtgaaagcttttaaaatcaaaggtgtttcccatgaagcacgaatcttcatctgagggtttgttgcaaatagtacctttcttggttccatacattttcacatttccaagaagagttttttggaggatggtgtattaagtgatgatgagaatatctgccatcaagcaagagcttagagtttctggatgaaatgccaacaactcagaatattgctgctgggaaggtgccacctgtggctatcatcatctctcatcagaatcttggaggtgatgtaagttcaa

SEQ ID NO: 207765 - DNA, 397 bp, Glycine max
tctcctgttgttgtatagctccaacttccttttgcatctccgttaattgatgatcgtgcttgtcgtgacttcgctagcaatgaataatcataccttgtcctagaacccaatggttctgatatggagagaatggatgctctgagtacaatatgcctatcccaagcacatgacaattgcccttagcattacaactacgaggtacttgtgtaaattgaagatgaaccattatctaagagaatgagtgtcatgagtgaagccctgatagaactcgatatctccctcttacctcatgaacatgagttgacgtatttatcctatatctttttacattggacgccccttcatgggttacctcgtatagtatcccacatatctctttgatgtctgcaatgtgaca

SEQ ID NO: 207766 - DNA, 382 bp, Glycine max
  unsure (1)..(382): unsure at all n locations
ntgtggttgtgtaaacactaaagctcaaggttagtttcctcattcagattgaaccggagtttcanaaatttctcttttatcaagttacgcacacatccgagtccatttatgcatttcgggaaaatctttcattgtgttgacccttcaggtgcacatttcttttttcaaaaacctttttgtgtttcgagtccattgatggctttttagctttctttccttgttgtttgatgatttagtttttatagaaaagtttgtactctggcaaaattgttacccgagattacactttatcaaaggaaccacaaggcgtgtgaatgataagaaaacaatgcacaaggccctatatcttttgtttagatanaccatcgcgatgcaaaacgac

SEQ ID NO: 207767 - DNA, 433 bp, Glycine max
  unsure (1)..(433): unsure at all n locations
tccatcanaaggagactgtaatagtctntaaaacaatgaaagtagaagaccatgaatgtctctgcatgccaacggactcgcttgtctctggaaggcaaagaagactgtaatagtcttgaaaacaatgaaagtggatgaccatgattgtctcctcatgccaacggactcgcttgtctctagaaggcaagggaaactgcaatagtcttgaanacaacaaaaacggaagaccatgattatctccgcatgccaacggactcgcttgtctctagaagacaaaggagattgcaatagtcttgaaaacaacaaaaatggatgaccataattgtctttgcattccaacggacttgcttgtctctggaaggcaaaggagactgcaatagtcttgaatacaatgaaagtggaagaccatgattgtctccgcatgccaacgcac

SEQ ID NO: 207768 - DNA, 443 bp, Glycine max
  unsure (1)..(443): unsure at all n locations
ntaagaganattcccttcttcttcttatcattctcctcatgttgattcaatctcttcaattccattcatgttcctgtaactttccaaacaaggtagcaagagacatgttagtaagatttcttgattcaataatggtcattacctttggttgccattccctacttatgcatcttaacactttattgacaagatcttcatttggaaatatttttcctaaagatgcaagatgatttattatgtaggtaaatctcttttgcatgtcttgtatagtttcatttggattcattctaaataactcatattcatgagttaaagtatttatcctagatctttttacatttgttgtcccttcatgggttacttgtaaggtatcccacatatctttctcatgtttgcaatttgacaccctanagtattcatctattcctaatgcagatgtaatg

SEQ ID NO: 207769 - DNA, 439 bp, Glycine max
  unsure (1)..(439): unsure at all n locations
cgatgtagagcttgattgtgtaagagtaaaaagtgatactaaacaatacttgtaacttgtgtgaagttagtgaaatttgatgattttccaagaattggacgtactctcaatggtagagatgaaccagtataaaactttttgcatttgatctttcttgctttcctttaagttttatctaaccaaagggtgtgaatntgtttttagatttaaatagatatctcgtgttttctaaaaacattnttacatcatctaatagtttttttgaaaaatctataatatgctctttacaaagttttatcagatgaaaactttgttttaagtgaaaaaagattttaaaatgtataaaatcagaattcaatccccatttgtgatagttgcctttacattaaataaaaagtatgaaaattntagatagataataaaagctgtagtttaacat

SEQ ID NO: 207770 - DNA, 450 bp, Glycine max
tccaatgagagaaatgggtctaatttatcaagctcctatgggccatcaacttttggaacaagtgtagtaaaggaggggttggccgcctttgggattacaccatgttcataaaagtcagcaaaaaccttcaacacatcatcctttagtcttggccaattttttttaaagaacttaagttaaagccattcgaagccagacttttgttactatcacaatctcatattgcttctctaatctcactctcctcaaaccttcaaacaagcatatcactctccacatcagttttatgtttgaacgactctttaactctccaaccttggtctaatcctccttcatcttgaaatctccttttaaagaaacacttcacattctctttaaccactcttggatccttctcccacttaccatttaccaataaaccacttattggaattttcatccttctccatt

SEQ ID NO: 207771 - DNA, 442 bp, Glycine max
tactgcgacgagtgcgcttcttgtaaagaatacggtatccgcactcacggcactgtataacgtcaccgggcttcagcgtattctccattccacaatctgcaacagatacaaacacaaaatcacatttcactcttaaaaccctaaaccctaaacacacacttttaacattggcaaaaaaggtaaacgaaaaacgcaattaggtcaaaaagagctgtgattagataagaaacctccgcatatgtagctgactggctcaggctgaggatccatcgctggttccagcgaggtgtaaaggaagaaggttctaggctttagcctttagctttctgctcaacgaagaaaatgtaaagtggctcagaatcagaggctctaaaacgaaggattgggcttcatcttcagcttttatgggcccaaattcgcaacttacatgtccaaaaccgag

SEQ ID NO: 207772 - DNA, 441 bp, Glycine max
  unsure (1)..(441): unsure at all n locations
tccatcacttttgacgactgttaagtgagattccttagcattggcctgataccttgcacataagtaagcacttagcatgacatatggtctatttttaattaagtagaggagtgatccaatcatacctctatatcttaactcatccactgatttacctttctcatctaagtcaaggtaagttaaagttgccattggagtagatgcttctttgcattnttccatgccaaatttcttaattagttttgtacaatatttcgtttgatttaggaaggttccatgtttcatttgcttgacttggagtccaagaaagaagttcaactctcccgtcatagacatctcaaattccttctgcatacaactagaaatttccttacacaaaatntcattagtagcaccaaatataatatcattaacatatattttaacaattagcaactcact

SEQ ID NO: 207773 - DNA, 435 bp, Glycine max
agaggaaattctccttcggttgtcgaacaatcagcttaccctatgtgaatccatgaacaccttgacttagaaaattgatgccctggtgaaccgtgtcacccccatcgtttccccatcatcatccccttcctcaccagcacctgcaactcaacattgtatgaaattagaagtaccttgtttcgatgatactgaaccccttggttggattttttaaataaaccagttctttgagtatcatggcactcctgagcatgagaggcttaccattgcttcattttatatggaaggacgtgcactttcctggttctagtggatgactggaaatggtcagtttacctcatggtcgattttcctgcaagccctgcaaacaagattcgcaccatcacagtccgaagatccaacaggcgcattctcaagcttacccaacggtgttca

SEQ ID NO: 207774 - DNA, 411 bp, Glycine max
  unsure (1)..(411): unsure at all n locations
ttggctctagctacaggttntatcctatccaatttttatttttatttttctctttgtaagctgactcagattcatgatttgtttcgatatttgcattcttgttcgcgtcttgctgggttcttgttatcattcctgatcttgatacgtccttgttcttgcttctttcaaattatgcatcaaaaattctgtttgaattatgtttcaaaattttgttacgcattctgtttggggacaattaggcttattgcaagaattttggagtttagggtttagtaggctctcgaatctatacgcctatttggctattgaatgaattgcttgattgcctctcgaatttggaccactgggattgattgaagaacaatctattatcctacacgaatattgaataagagaaagcattatataaaa

SEQ ID NO: 207775 - DNA, 476 bp, Glycine max
  unsure (1)..(476): unsure at all n locations
ttgcctgatccctctttaccgccttaaatctaagctggtgtgggctttatggaagctggatctttgagcttctccaccatggagatgcagnggcaatgcaaatgagaagacgattgaggaggcaccctcctcaatggaattagccatggaagaacgaacttccccaccaagaatgtgccttggattaaaagcttgcataggatgttttatggaagaaaagaaagagagaatgggctcgcacacaattgaacgaataaaagatggagagaaactttactttgaattgtgtatcacaagactcttattcatcatagttactacaagtgttacacatgcttctatttatagactatgtagcttccttgagaagctttcttgagaaaacttctttgagaagcttctttgagaaaactttcttgagaagctgaagcttagctacacacacccctctaagtactaagcccacctccttgaan

SEQ ID NO: 207776 - DNA, 429 bp, Glycine max
taaagtatgcccgagtcattcatccctgtgagatgttgttgaagtattggcgatcagaattgccattccttggattatagggttgaaccaagctcatgcttttacaaaaaagggtcatcaagtcaagttgaaatatggaagtaaccgtcttgcaaaattggggcaaaagatgaatcgagtcacatcactgcttcgtctactgccaaacatatttaggattattgatgtccttgttacttccagtttcaccttgacaaagatgtcatggaccatgttgaaaatctaaattgattcaaccccatatcctgcgtaaaaattcgcaatacttcgactgtacatcattcgcatgcatccatgcttttcattggttgcattgctcattgcattctttccttgaaaaattaaataaataaatgacctatcaaaaga

SEQ ID NO: 207777 - DNA, 408 bp, Glycine max
tcatccacctggttcaagtcaaggccaagccctccagagcagcgaacaggtgaagccattttactgcttacaggatcatgaccatcagttgtaagagatacagaatccgtgtgacgagcacagggttgagaagaaatatcatcaagtattctttcatcagccacattcaagtcaatatccaatggtgctcgactctgctttccagctggagcatcaggtatagaggaagttagcgccccaaaaggcattttcataactctcctgagctcggctggcctaaatgcactagtggcagcggatcccttccaaccaatttcccctttacttctcaataaatcttcaggaggcacaaagcgcccctttgcagcaacagccccagtgacaggagcaggaataccacaagacata

SEQ ID NO: 207778 - DNA, 340 bp, Glycine max
tgcacactgccctttgacatgtgacaggacaccgtctaaagaattcatcgctcgatcttgagctccgggatccacgacgacaacactacctgccataactcggataatgccttatctgacaacagtacatccagtgtaaagtccttccactctaataggagcctaagttcaccgtcgtacaaatctggctctatcttctcatttaagttttagtaacaaagtctgtccgaggtgaggatgctacatttgctctatttatcttacgactttcctctaacatctaaaacatccctctcaacttttgcaccactctctttctttgttaatgtcacttttggct

SEQ ID NO: 207779 - DNA, 411 bp, Glycine max
  unsure (1)..(411): unsure at all n locations
tctaccatgccanaacgaaggagactgagtatggatttaagataacaaagctagtaacagtgctctgggtcaaacacccacatcactacatgaaagagctgagagtatttcgggttttacaaaggaacgtaatttggaaattccgaccacgccaatgtgaccggggttcagtgtaggttacgaaaataacatgcatttcatgaaaggataatgtttacaaagtctctttctctaaggtttttcaaaggaagcataagacaagcaatggcagttccaaagtcagaaaagatgcaaagacaagatgaaactaacaagaaacaatcatagaaccatgattacctcgaaagaaaacgaaagatcagattanggttttcgttctctaccgaaaccgcaagccaagttggaaattct

SEQ ID NO: 207780 - DNA, 297 bp, Glycine max
agcaacgcaaagctcacattctctgcttcattttctatacaatccaaaattattgacttctggttatatgtcaatacatcagaatcttatgttttactagtgtcatcatgtaatgctacctctactactgattcgatagaacagattaaacaccactaaaatatgaaacctaatatcatcaacatcatataccataattcttagtactagcatcagcataattattggcatgctggatttgtgcccattccccaaataaggacttctatgatccaatctacaaatctccactccgcc

SEQ ID NO: 207781 - DNA, 429 bp, Glycine max
  unsure (1)..(429): unsure at all n locations
ctgaacaattattccttaatattgttcaattccaagaaagtagtaatctcatgttttactacttcaattnttactcaaatgataaagggtaaataagaggaaggtcaacttattgaagaagctgaacatagccctacaaatcaagcgaaaaataaactagctctgcggaagtgtcgtgcggaattgattaccagcttacagctattgggtgattatgagtccttactgacaccacctcaacttgttcttgtggaagccaatcaagctgctgccaaagctattatgttcttatcatgaaaccctgttggtagtggatgcttcaaatatatgagcacgaatgacatgccgatgaaatgttgtgagtaaattcttatgttgtggtaatcgaaatctgtaaagttctttttttctggagcatttgtacttcta

SEQ ID NO: 207782 - DNA, 455 bp, Glycine max
actaagcttctatccaaggttcgttcctaatttctctacaattgcatcacctctcaatgagctagtgaagaagaatgtggcatttaactggggtgaaaaacaagagcaagcctttgctttgcttaaagaaaagcttactaaggcacctgttctagctcttcctaacttttctaaaacttttgagctagaatgtgatgcctctggagtgggagttggagctgttttgttgcaaggtgggcaccctattgcttattttagtgaaaaacttcatggtgcgacccttaactaccccacctatgataaagagctttatgccttaataagagcactccgaacttgggaacattaccttgtttccaaggaatttgtcattcatagtgatcaacaatcacttaagttcattagagggcaaagcaagttaaacaaaaggcatgcaaaatgggtagagtacctag

SEQ ID NO: 207783 - DNA, 390 bp, Glycine max
accccatttatataactaggaacatttctcgatttaaataactttccccaaatggacgtattttttgtacagtagccctatatctgcatgcctgttttgttagctatatttatctaaaacatactttcaggaattgaattgacttctaaaactttcttgtaattgggtgtaaaattaatcaaattactaattgaaagtgcagcttctatatacattgagttggactacaagaaaacatgtacttcagggctaaatgcaagtggtgtgcacattataggatagatgcacgtttgtgtctagattcaaatttgatgtgacttgtatctaaaaataatttctttgatgatgcatcgttattgtgtacctgaagattccaagaataggaagccc

SEQ ID NO: 207784 - DNA, 439 bp, Glycine max
cggaattagataattagacatgcacatgcatagttattcagtactagactctgtgaaaattaatagtcgaaacccattgctgagtttgacagtattttacaatatgctcatccacaaaacaaagtgctcatagtaatagattaaattcctaaaatgttagaagtaacttgagccattctaacacaatcaaaataacttgggagaggtcaagataacatatgaattaatcacctatgtttaaaaatccaatttccagatagattacctgagttgcatctgatgaactttgcgccaaatacttgagatagtcagccttctttgtattgtaattgaacttcatctttcaattgtctctcaatgtcaatgtggcggttatcaagccccattgatctttctggtcgggtgaatctcacatcaacatcttctctgcacattcccc

SEQ ID NO: 207785 - DNA, 442 bp, Glycine max
  unsure (1)..(442): unsure at all n locations
ttaaatcaataaatcaatatcaatatattatataaaacaaagttattgattgtgtctgttacttaagacacatgacaaacgctgatgcagttaggcctcgcgtaattaaatattatttcccattgaagaaacaaaataaaattcaaaataagaaatcaatcaaacaccaagtaattctatcacacaataactctaaatttatttgttatattcataataacatgctattgtttaattatgtaaactgaaactgattgacgggaaaagaagaatgatagtttagataactcagaaccaacttaaataaacaattttaatgaccaagggcttaaaggatgaaaatatccaacatcttttaatattgtatgtacctttcagtagaatttttatattgatgaatgctaacaaaactcattntttaacttgatggaatccttactat

SEQ ID NO: 207786 - DNA, 429 bp, Glycine max
  unsure (1)..(429): unsure at all n locations
tcatgatgaatcaagattgattcaaggagttntgatgataacaaagatgatgacaaaaagctcaaaagtcaagatcacttcatgataacaaagatgatgacattcaagaatgagttcaagaatgagtcaagaacacttcaaagatcaagaggaaatttgatttcgagaatcaagaatcaagaatcaagaatcaagattcaagaataatcaagatcaagattcaagactcaaagattcaagaatcaagagaagacttaatcaagataagtattaaaaagtttttcaaaatattgagtagcacaagaagttttcacaaaattattaccaaagagttttactctctggtaatcgattaccaaattatagtaatcgattaccagtggttntaaaacgttaatattttcaaaatgaagagtcacatttgttgat

SEQ ID NO: 207787 - DNA, 440 bp, Glycine max
  unsure (1)..(440): unsure at all n locations
nttcgattcattctatgtacccgtagtggtccacattgtgtttcgtgcatttttattctcgttttgtttactttttataccccctgttgacgtgcttgagccattttacttaagtcatttctcgcttaacttaaaaataaaataaatttccaccgaacgtttgaattgtattatccattaacttcggttaaaataaatttcgaccattcggtcgtgccgtaaccacgttggaaatcaaaaagaggtaaaaaataatataataatcaaaaagacatcttttagtaaaataaagcggaaaatcaatcggacgttttctctttgggatttctcattcttaatcgaattgattaataactaaagtgaaactaaaggctaaaaatcaattcgcctagtcaagctcgtccataaaaataggctttngaagtttgtcatttcatttt

SEQ ID NO: 207788 - DNA, 370 bp, Glycine max
  unsure (1)..(370): unsure at all n locations
gagatgggttcgagacatttatgagatgagatgtcaagcccggaggtggattgtagcaacttgtgcttatctgctgcacctggtcggttgcactctttttgctaataagagtgcaacatatgttcatgtggtgcacctagacgcttttcgcgacctgngtcagagtggtggttatgcttggggagttgccacactggttcatatgtatgaccagttagatgaggcttctaggaccaccacacgacagattgctgggtacctgactctactacaggttgttagacaagtggcctcagatatcttaagaagggggggttgaattaagatattacaaactatttccccaattaaaattctatttcactttcta

SEQ ID NO: 207789 - DNA, 431 bp, Glycine max
tcggaagaaagtgatgaggtacaagccctaaaggcagagcttgaaagagcccgggtagtcaaagagaagttcaagtccatagccatcaaagtctgaagagagtatgatgaactaagggacgtcaatatggccaccgctgaagccttggaacgagaaaccaagaagacccgaaaggaagaacacaaccaaaacaaagttttgagaggctttatagggcagcaatagtgagctcaagctccgaagaggtgaaaggaatcatcacgggtcaaaggcatgatcttaaaggatgagctaaaggcttgccttatgtcgaaaagaaatttgtcccaacagttaagcgagactgaaggggatatgtgggccatcatcgatgagtgcaaagagaagctaaatctagcgacgactcatgagcaaaggctagaggaggagta

SEQ ID NO: 207790 - DNA, 411 bp, Glycine max
  unsure (1)..(411): unsure at all n locations
ctcaagcttgatcaanacaattatctagtaattctccttcactcagatcatataattcgctcattcaaatcattctccaacactcagtttatacaaaataatgcactacatatcattttcaatcaatataccggtaaacaagctttttggacaagctaacagctcacagagttgaaagttaaatagctgatatttatagaactaaaccgcaacgctgaaatttatatgactgaacattaatcatacaatgactgaaaataaactaaaatgtgcgtaatgcacaaatttacatgtcgtgctcttgcggttgctcctgtgcatgctcattaagatccacaacttgagcagctggcgaatcttgagagataggctgctctaacttagatactggtgcagatggtatggcatcat

SEQ ID NO: 207791 - DNA, 392 bp, Glycine max
tcccgtatccgtacttggaaagatctgattaccgccttcctaatgcagtatcagtacaattctgatatggcttctgaccgtactcaactgcagaatatgttcaaaaaagagggtgaaacctttaaagaatatgcgcatcgatggagggatttggcggcacaagtagctcctcccatggctgagagagagatgatcaccatgatggtagacactctgccagtgttctactatgagaagctagtaagttacatgccgtccagctttgcgaatctagtgtttgccggggaaagaatcgaggtacgattgaaaagaggaaagtttgattacgtttcctacacaaatgcgaatgccaaaagaatcgggtcaacatgggcaaaaaagaatgaaggaga

SEQ ID NO: 207792 - DNA, 453 bp, Glycine max
actaagcttgaaggatggcagaaatcaaggaaggattatcaaccacaacctcacagtcattgtttcactcaagctcaagtgtttaggctcattccatcataaacaactaacacaagtcccaacctttgcatttcatctcatgtcatacagcaatgaacacacaaaatgaatccgaaggactttctagtcttgtaatggggttaggcttccaacaaattatggtttttctaggattcaaaagcttaggttctaggagagcattcatccatagataaaccttcacttttcattcattcacaccccaatactttccttttacttaggcactcaactttatttcattattttgcagcatacacacttattagtttcatttgtatttacagttttttttaacacaatatatacaaagacattatgtgtatatacaaaaatagtgtgtgtatgctcttt

SEQ ID NO: 207793 - DNA, 419 bp, Glycine max
gcattacagcttttggattttgtgcatcggaaaatgtgaatagaatatgaaacatgctttgtttctaggctattacctcaatggtctagtatttcgattggtctagaatggacataattctgagccgttagattaatctcattccataagtcatatttacatcctctacaccagattatcactcccacaaacctctccctagcaaccattttcgccaaccactgtagagcgcttcatttcaaaaacttcaatcctggtcacaccaaatccttgccctcactcaccctccctttctctccaccatgtccgatggacaatccatcgctttcggcaaccccaccaccactgttcccgttctgtcaccacctaccacctctgatgactctcttaatttctcttaatcgtttctcactatttga

SEQ ID NO: 207794 - DNA, 305 bp, Glycine max
tggttcgaggtacttacccgttgaagatcgaagaacgatgaagaacgaatgaagaacgtcgaagaacggttgaaatctttgcgaaattcctcacggaaaacgttacggaaacgtttcggaagcgcctcggcttagattttcttcacggaaacaatttttccaagcaaattcgaaagagagagaagtgccaaaggggctgaaccccttccttcttcacttcctcccctatttatagcaaaataggggaggtgtgtgccgcccagctcgcccaggcgagctcagctcgcctaggcgagccaggttgc

SEQ ID NO: 207795 - DNA, 442 bp, Glycine max
  unsure (1)..(442): unsure at all n locations
tgctcgctaagcgagaacataaccctatagaatgttgagccatatagagcatgcttggcgcgcagtcagcccgtctagcgaggacattatcttttcttgcgcttaacgcattcaagccctcttagcgtacaaccacttactcttgcccagtgagacatgctcactgagcgtggcttcataagatgagaagccccatatcctttaaaaacactgagaataggggaagtaaggagacaaccagcgtgagaaagaaggaagaaggcaccaaggctgaagataagatattttctttatactttcaccattttctttcattccaacatcatttcatctttgtattaagcttgagggctaaacacttcattgttggggagctnttctactgagcactcttaatgtagaacttctaattgtctatttaatgttatttctagcgttctct

SEQ ID NO: 207796 - DNA, 311 bp, Glycine max
  unsure (1)..(311): unsure at all n locations
taaacattcaatttcgagcgtctcgatatattacgggactcaataaacatacgagaaaaaagtgattgtcgnttgaatttgctctcagtctcaacattcaatttcaagcgtcctgatttttaccaagactcatctaaacatccatgtaaaaagtcatggccgttggaattggtcaaaaggtccacaattcatttcgaaggtctcggtaatttacggaacctatacaactcccaggtaaaactttttgtgcggttgaattggctcaaagcttaaacattcattttggagcgtgtcgatatattacgggactc

SEQ ID NO: 207797 - DNA, 439 bp, Glycine max
cgctgttattgatagcttctctagaaaataccaagaggttaaagttactgatgattatgtatttgttatgtcaccaacattgcaaatccaagttagtatatatactttttgtctttcatagacatataaagaaaattcctttgtatctatgacttgacagtcagatgtttaatgatattaattctacttgttctactaacgggaaaaggtgaagaattctggtcattttggggttcatgctctcagtgaagttgcttcacacttagctccagattatgttgagcatcatggacttaaatctattcctaaatcagtggctcatggttatactgcttcaggatatggatttattcaacacatgccttatgcttacattcatgaatttaccacgaacttcatggctggaaaaatttgacaattcataggtggatatacaagt

SEQ ID NO: 207798 - DNA, 607 bp, Glycine max
  unsure (1)..(607): unsure at all n locations
tctcctcgtctaactacaacnatctncacatattaatcanttcantcgtcgcaatgtagtanctcttctntattcatttatcaaaaanannnnnnaaggccccgcgcgnncgtagattgagttcgtagtcaatncnnannncnnnancgcgaactatacaatagcgcagctcngagtctcacacgaggaacatcttcaaatttgttttacttttcacaagcgcttaagagtccgaatacgtttaacacttccacacggacatcttgaccagacaggataagtctatccaagcctcgcattgttttgcattcaccattcagtacatgcgctcacacatttacacttatttcatacaagccttgtacaagcctcgaaatttctcttgatccactacttattccttgaaccagaatatgtctgaagttttccggtttcctaaaccttgaaaacttgagctattcatcttttcattctctcttccctttgccaaaaagaattcgccacggactacctgcctgaagtcttcttgtgcatctcttctcacttttccacaagatagaacgactaactgcccgaattctcttgtgtctacctccacctcagcacn

SEQ ID NO: 207799 - DNA, 440 bp, Glycine max
  unsure (1)..(440): unsure at all n locations
gcaccggnnngttggtgtgcntgcanncggcacataaaaccagcttatgttgttgctaaaacacattcatacttcaagttgtacaaacattctccgggcggtgatgccttaatgagcctctcacccgttaatcttgggtcatgaccataccggcattcaaggggctgttatatcaaagaagacacgcacagtaaccatggttatcttaatgcgccggcgtcgagatcaattacagatcacgtttttattgttgaacctgagatgggggcggaatggctataagaccctacactcttcctaacgatcattgattccactgtcgatttagattaatattaccaaacccaggcgcattttaagcttaagagagacaacaattgtgcataatggtttgcacataatctaagtaggtatggattgagaaaagccagcttgctctt

SEQ ID NO: 207800 - DNA, 442 bp, Glycine max
tcgtggcactttgccaagaccttttaaaggactgtcggctcataactctggatctcaatggcaaccaattattagaaggttttttgccagaatctttgtccaattgcattgatctggaggttttagatcttggaaacaatcaaataaaggatgtgtttccccattggcttcaaactctaccagaattgaaagtattggttgtgcgagccaacaagttgtacggtcccattgccggtttaaagatcaagcatggatttccctgtttagtcatctttgatgtctcttccaacaacttcagcggcccaataccaaaagcctacatacaaaaatttgaagcgatgaagaacgttgttatagataccgatcagcagtacatggaaatttctatttttgaatataataacatgtacagtgattctgtgattataacaacaaaagcaat

SEQ ID NO: 207801 - DNA, 458 bp, Glycine max
  unsure (1)..(458): unsure at all n locations
acacttgaaactcagcttctatataagctgaaccattntatcaataaacacaagttgagttttattcagaaaattagagttgatctcttttatcttagtgagagtgattctcctaaattcttgagtgattcaagaacaccctctggctgtatcaaaggactttcacaacctttgtgtgttgccctcgctggaaagagtgattctttccttccttccatcttcaacctggtttttttcaaaccacaattccagaaaatccacttctgcccagaattatctcgtggccataacccctgttttacacactcaaattaagtgattcttgagcctaaattgaatttcaagacgagacctttcaccttgttttggaatcacctcatttggagccctgtagctggagttattgtcatttctatatttctgtccagccaccacttaacctacgttttctcatctca

SEQ ID NO: 207802 - DNA, 439 bp, Glycine max
  unsure (1)..(439): unsure at all n locations
tctntagttttgcataaaaccctgattntaattactaccaatatgtcacaatcacattctctttatgccatgcatgcatctcatgagtcccacaacttgatatatgtaattgacatagaccataccaatcaacgaagggttgctcataatcaagaagactaagctaatctagacttggttttcacacttgctcgtgaggtcaaaaatcaaattccttgtgcacgtgctagtcctttgtatacgtagttttctttgttcttctctctgaacgttcaattcaagctcagacttggttgcctcaacttgtcgctttcgtcatcattgattntagacgcttatgtgtcattttccttttgtgttcttgaacattgttacgagaaattcttatgcatatttttttaatgtacaggagggtaatttgatcaaaccaaataagatt

SEQ ID NO: 207803 - DNA, 444 bp, Glycine max
actcagctaataattatttggtaaaaaaaacatctacaatcagtcaaggagataagaaaaacatcatcctaaaaagtattatatcctaatatgtcccttccaacccttcaatccttgtttgatggaccatcaacggtattccaagtagctgattcataaaaaaagaaagcataatgaataccatttttatcttaaattgaaaaggctaagagattagttaaaaagataatatattttattgttgaacctgtgatgggggcggaagtggctataagaccctagacaatcccaaatcgatcattgataaccactgcaaaattaagattaattattacaaaaacagaggcaaatttaaagtatagataaaagaccaacaaatatgtcataagggttatcaaacaaaaaacttgaataggctatcgtattggagaaatagttagcatt

SEQ ID NO: 207804 - DNA, 441 bp, Glycine max
tcacacacttgggtaattgattatgatcagcctgtaatcaattaaaatagagagttttaacttcaaaagagattatcatagaaacctactcctaactcctacatgacgatgcacgatgcacatataaaatgatagagacaaagatgcaacacataataaaacaatcaatacaaatgccactcaagagagttaggcatgtaaaagacaaaacttcttcaagctcttcttcaagcttcaaggctaagtcttcatgtttctccccctatctctaacaatctcccccctttttggctttgatgatgccaaacttgattttgccattgagtatatttgaagagtctcaagagtagagacttttctttttcttagccatacctaaaagtttcttaacactcagagaagtatcaattcatatcatcatcatcattatcatcaggtaaa

SEQ ID NO: 207805 - DNA, 436 bp, Glycine max
tgtgccatggatggttaagcattgagatgttatgcttatgctttatggtggttaagcatttgttattgatttgctttaaccttgtaggtggttaaacatgtttgcttttgttaagtggttaagccttgggttatgacttctacttaatggttaaatgtaacatcccaaaacataaatacagatatttattataaaaatatatatatttgacaagattagaaaacatgtatatagtttaggtaagatagaatatttgttttatcttctattttaaaatattagttttgcattatatttataagataaataagataatatatttgttttattttatatttatatctaggataaaataagataagatgcaatcaaaataatagataataaagttactaggaattagtataaatagagattagaataataaagagacatc

SEQ ID NO: 207806 - DNA, 338 bp, Glycine max
actcagcttaacatcagaccacttgcgggtgcaggaactacttcacatggacttgatggggcctatgcaagttgaaagcctttgaggaaagaagtatgcctatggtgatgtggatgattgctccaaatttacctgggtcaactttatcatagagaaatcacacacctttgaagtattcaaggaggtgagtctaagacttcgaagagaaaaagactgtgtcgtcaagagaatcaagagtgaccatggctgagagtttgaaaacagcaagtctactgaattctgcacatcttaaggcatcactcatgagttctctgcagacattacaccacaacagaatg

SEQ ID NO: 207807 - DNA, 420 bp, Glycine max
tgtcttcataatcaacattaaaatgaatgttggtaagaacaaactaccaccttagagaagacaagataaaaatgaagttttttatttttctcttccttgtttttgtttccttcaactctaatggtggcaccacaaagtgctcctccacaatgccttccaccgggatggcactagcacatagccttgaaacttttgcatcctccacatcaccaaatcgagctccatttctttcacttatcatgccactgaattgtgctcccacactatcgagccaagttttcccaaagactgctaatgccaagaagcagcctcacaagacgccgacaccacctttttcgaagacctcccgaaagccttgtgtgaaatatatggtttctccattgtctcaactctgttagacaagtggccctagatatctga

SEQ ID NO: 207808 - DNA, 426 bp, Glycine max
  unsure (1)..(426): unsure at all n locations
tattccaaataaaatatgctgcacaacaatgcataanataagatgagtcccagattctgaactagaacttcaaatttccccatactaggagacaaagtagtggaaggtatgtgcttttgtagcatgtaattaatgttgatccttgtctagaccagcagtctagacaaaagattgggagatttgaaacaagaggaaaacaccctgagtcaagagaccaaattcttttatcaattatcatttgaaagaacaatggacattaacagaatcaagtgaagtaaaaagactaatgcaagtttctgaagaaatgaaaattccagtagatcatgaaaagtaaactgtaaaagggaataaaccctgtcaaataaattttgaagaaccagtctatcagttgtagataccaagtggctaagaatataaatcatactg

SEQ ID NO: 207809 - DNA, 363 bp, Glycine max
gcacattctgatcattctcgtttagataataagcccttaaaatataaataactgtggcttgcgaacatgatgataaagagggagaaacctatgttgtgactgccattcttattccaccaagatgtccaccaacccaacaatgtaattattcagacaattaaccatcctttttattatccaccactcaatcatccacaatggccatgcataagatcaaccacatagcctacctactatacttacaatgacggacaccacctttagcattatccaaaacaccaaccacgaaatgtatctgcagtgaaaaagaccgtagaatacaccccaatgccagtgccctatgctaactagctcccatatcta

SEQ ID NO: 207810 - DNA, 443 bp, Glycine max
  unsure (1)..(443): unsure at all n locations
tcaagcttaacattntaattatcttctctgttattgaatatatttagttttatctattgataattaaactgcgaagattcaattgtctattgattctatatacatattagattatattggattttaccagacgaaaaagagaaccaaaaccaatgatttagtaaaagggattagtctttcataacatgatgaactataattcaatgatatgttaaaaaagtacttacatttaatattcattaatactttcaataagatttcttttgaaaaaagatatttgtcggaaaaaaaaaagaaaaatagagaaaaaggaaaaaaatagaagagttaaaatgatgtttcagaagtatctaagcagttacaaaacttaagcaatattctaaaagtttgctgactcttattatcttgatatgagtgtctataattatttcttacgatttact

SEQ ID NO: 207811 - DNA, 443 bp, Glycine max
tattatgtgttgatgattataacacatatatgtatatgaattgttaaaataaattaggaattcatagttcaaataataaaattaaattgaaggaaattaatatattaagattgaacgatttatattttcaatgcatttttagtttaattatttattaataccgcgtgatttttatatgattcatgaggtttgataacatgttgcgttgagattataatattgagattgagattaagtataagtgtttgattaatacttgatgtgatattacttgtgttgtgaattatacaataacccaactgttgcttaccttgagaaaagtgtttatgcgtgaggtgttaaaaggaaagtgtagggttgcaagttacgaacttgaggtgttaaattgtagcataatgtgttaaacgtgtttgaaaacaagtgcaatgtcatgagtatagcat

SEQ ID NO: 207812 - DNA, 449 bp, Glycine max
  unsure (1)..(449): unsure at all n locations
cccacaacatccaagcaaaacaacattcaaacagcacaagctatcacagccaagcaaaacagagcaaaggcagaaaactctgccaaaacaccaaccaaatcacagcttttctcacttaaagaccccagtaacaattccttcgatccaattcgttaaccgttggatcgactccaaaattttactggaagtctatagtacataagcctacattgtgaccgttgggatctactagaaaacatccagaactcattctgcactagactttccacatccaaccacacacaagcatttttctgcacaaagccaaaatcctgctgcacctattttgacagcaaaattctgcataagtgcagatttcgaaaatcacacttcctctcatccaatcttgcccaaatcaattcctacaagtcccaaatcatgtatcaaccatgtctaacccanaatcaagc

SEQ ID NO: 207813 - DNA, 356 bp, Glycine max
aagggttgtgttggcgaatgcagctattgcgactatttccttcatataacatgcaagcaatgttgtttcctcagtatatctgtgactatattgataaaactgactgtagttttatttggaagggtttctatgggaaagggattcatatggtgggttggaagaagattacgaggtatatgaagaaaagacgtttgggggttagaaaaacatgtttctaagtcggttattttgcactttttaagacggttgtgagtcatcatatattgcggaaggctctacgacaacggttccatatccgtcttagtatgtataggattctaatactggtatgtcacctgccgtgttacaatgcattg

SEQ ID NO: 207814 - DNA, 451 bp, Glycine max
ctcaagctttgtggatttggtcttcgtcggcgaaatgatcgaagtgggtctaataagaggcaaatctgatcatcttgttttgataaatgcaaaaaaaaaaaaaaaaactggggcaagtgaagaggatgagaaggagggagaaacctatgttgtgactgccattcttatacgaccaagtttcccaccaacccaacaatgtcattactcagccaataacccaccttctcattacccaccacccaatcatccacaaaggccatccctaaaatcaaccacaaagcctacctaccacacttccaatgacaaacaccacctttagcataaaccaaaacacgaaccaagaaatgaattttgcagtgaaaaagcctgtagaattcaccccaattccagtgtcctatgctaactagctcccatatctacttgataattcaatggtagccataaccccagc

SEQ ID NO: 207815 - DNA, 399 bp, Glycine max
  unsure (1)..(399): unsure at all n locations
actatagaaactcagcttaacattcaattntgagggtctcgatagattacgggactcaatcagacatccgagaaaaaagttattgtcgtttgaatttgctcagagcatcaacattcaatttcgagcgtgtcgatatattacgggactcagtcagacatccgagttaaaagttattgtcggtcgaatttgctccgacgatcaacattcaatttcgagcgtactgatataatacgggactcaatcagacatcctagtaaaaagtggttgtcgtttgaatttgctcagagcttcaccattcaattttgagcgtctagatgtattacgggactcaatcagacatccgagtaaaaagttattgtccggtgaattagctcagagctttcacattcagtttcgagc

SEQ ID NO: 207816 - DNA, 434 bp, Glycine max
  unsure (1)..(434): unsure at all n locations
tgtcaaagagggaagcaagttagaaactctnttcaaagcaagaacattgtttctacttcgaaaccccttgaactacttcacactgatttatttggtccctctagaactatgagtttgggttgtaattactatggcttagttatagtagatgattactcaacgttcacatggactttgtttttgaaaacaaaaaatgaagcttttgatgcttttcgcanacttgccaaggtgattcaaaatgaaataggtcttaacattgtttcacttagaagtgatcatgaaggtgaatttcaaaatgagtcttttgaaatattttgtgaagaaaatggaatttaccacaatttttctgccccaagaacaccccaacaaaatggtgttgtggagaggagaaatagatcccttgaagaaggtgcaagaacccttctaaatgaaac

SEQ ID NO: 207817 - DNA, 425 bp, Glycine max
tgtgttctcccttgtagaactactaactgcagtaacagttgcggcccaactatccggtggtgatgactatagaatcaatgccttcacctcatcctcaaatttaatctgcacagattccaattgggcaagaatagtattaaactcattaatatgatcagtgacagagataccttgtcccatcttgaggatgaaaacccggcgcgtcaagtatactttgttggctgctgacggcttctcgtacgtatctgataatgccttcattaagcctgcagtagtcttctcgttcacgatgttgaacgcgaggtgcttggctaatgtcgatctgatcacgccaagagcttgtcgatctagcaagatccattcttatggcttcatgtcctctggcttaacccctgataagggctgatacagcttcttgtgatata

SEQ ID NO: 207818 - DNA, 332 bp, Glycine max
  unsure (1)..(332): unsure at all n locations
ntgatgatagaggatgcacgaacagagcctgtcaatctattcgtggggctccggactcaatggtggaggatacatgaactaaaatcaatccatggggctgcgaatataatggtggaggatgcacaaacaacattaggcaatatattcacgggtctctggactcanaggtggaggatgcatacacgacaataaatttatggggctccgactaacacttaccgatggacgatgcaccaacagtgctaggcaattattttgagcggctctacactctttggtgtaagatacctgaacaacaatcggacgctgggtctttgggatatatgcttctt

SEQ ID NO: 207819 - DNA, 433 bp, Glycine max
cttgatcttccaccaccgccaccaccatcatcttagatctatatttttatattattagtactttgattttcagccttgtatttaggctatattattatggtatttgaacaatttactatttccctatttgcatggtatgtttgaacaaatattaagtatgttatttgactatatgggttttatagataatctatttatgattgttgcttcatggtttggttgttagtatctcaatgaatgttgtatggatgtttagttatatttgattatttcaaatatgttacgcactttggctttttgttgatgcctaaggaggagagaaatgggattaaaatcaagaactcacatgagtaatcaacttaattttaagatatgcacaaattcaaaaacaaagggggagaatttatgtgagtgatcgactatgaaaaagtgt

SEQ ID NO: 207820 - DNA, 359 bp, Glycine max
tcaccatcttcttcggcaggacaaacaccaactgtggctggttccactcatcgtctgaagcttgacgttccgagatttgatggctcatacccgacgggttggaccttcaaaataactcaattttttgagtatcacaacacaccagatcatgagaggttgacgattgcatcgttctacatggaaggggccgcgttggtgtgggtccaatggatgcaccgcaacgctcaactatcgtcgtggacagcattcttacacgcgctacacacactgagttgcttcatcaacttacgaagatgctacgggattgttatgcaagttgtaacaacgatcatctgtgaacgcttacttgacggaattcc

SEQ ID NO: 207821 - DNA, 439 bp, Glycine max
tctgagtcacctgaggcatcaagcttgagaaaatactaccccatgaagttcatcattttttcatcaacagtgggaataggaaagttatctttgattgtgatggcattcaaggccctgtaatctgtgcaaaatctccaagtgccatccttcttcttgacaagaatgattggaggtgaaaaatggcttctgctaggggcaataatcccttccttgagcatgtcagctatcattaattacttcaatctgatccttccggctgtgaggatacctatatggcttgactattactggtccagcaccttcaaccaatgggattgaatgattgtgagttcttctagggggtaatcctgatggcacatcaaagactgttctataagtgtaaagtaaacagttccgcaatggcatgcgtatgctgcattcttctcaggtgattaaattg

SEQ ID NO: 207822 - DNA, 268 bp, Glycine max
gatcccgcctgtggttaccacatcacctaaaaagtgaaacattctcttttcatacatctaatacatataaaaaaaattgacactttttcttatcatcggaaaaaaaatattaattgactcttcttcttttataaaacacaaaggagcgaaaatgaccactttacatgttcacggactattaccaaaagatttattcgcttgatcgaaacttatatctccgtatccctattttatttatctacaatgttgcgtcatacctgatcctcat

SEQ ID NO: 207823 - DNA, 427 bp, Glycine max
  unsure (1)..(427): unsure at all n locations
agcttgtctcagcgtttatgcgagacggagaccaacatgctatctatcatcgccaagtaccaagaagagttaggtctagccacgacccacgagcatagaatcgcggacgagtatgctcaagtatatgcggaaaaagaggctagaggaagggtgatcgactctttacaccaagaggcaaccatgtggatggatcggtttgctcttaccttgaacgggagtcaagaacttccccgcttgttagccaaggccaaggcgatggcagacacttactccgcccccgaagagattcatgggcttctcggatattggcagcatatgatagacttaatggcccacataattaaaaatcgttaggaaacttgtatggtctctcagaccttgactagatacgactttctttntgaaataaaatgagttggtcccatgt

SEQ ID NO: 207824 - DNA, 367 bp, Glycine max
atgagatgaaaggcagtaggatctttttggttgaattccattggaagacaagatagggcttgttatgtgtctatgagccacccttactttgggagaccatgcattgatagaggctatatgatgttcaccaacaagatcttttaccatcaagcaaaataggctaaaccttgagtcacaaaggtggagattaagaaaagaaaaaaaatttcaaaaagaagaaagaagaacctacctgaagtcaaagtgggcaaagaggaaccaaaagaaaaatatgacacttaggggggattttaccaaagtgttataaacaccctctgtattcaaatatttgacctaacttacactgattcttatgaaacttggaaat

SEQ ID NO: 207825 - DNA, 420 bp, Glycine max
  unsure (1)..(420): unsure at all n locations
agctntgttacattntttttcttggctcttttctgttttgttcttctatataggaggatccttatcttcctttctctatgttacttattctcttcgcctcaaatctcaatggatttcttcttttatccaaaacaaaaaagttcttggatttcagctaagaattttttcatgtaaaaggacaaggctgctcctttgagatgatatataatatattattctttcgtcatcttactcttgtttctctttctttcttaatgaattcctttggaataaatacaaacagaaaaacttcacgaaactcattattttttaaagtatattggaaaatacatttagtgcacatggaagcacatctcactgcttgatcaatactatgttaatgaactatacaaccaaatggtaatgcagaaaagacaaatc

SEQ ID NO: 207826 - DNA, 388 bp, Glycine max
  unsure (1)..(388): unsure at all n locations
tttcgtattcaanacactagcgcaaagattagatcaaagaggaatatggtgaaaaaagtgatgggatttgcggataaagtgtataaaaaagccaacaaaagagagaggaataagaataattcgatgcccccaaataatgatgaagatgatgatggtgatataagataaaatatacgtggaaggaaaatgaatattaagaggggaaattgtttttagagtttttataatgaagaaaatttgttactattgtttgatattttagatttttcatgaccagtgatatattgtatcctcaaatgcattgagagacaatggaacggaagaaaataaagaagagaagctaattaattattacatatttatctaatacatgaaatgtcttatgtga

SEQ ID NO: 207827 - DNA, 408 bp, Glycine max
  unsure (1)..(408): unsure at all n locations
agcttngcggatttggtcttcaccggtgaaaggatcgaagtgggtctgaaaagaggaaaatctgatcatcttgctttgataaatgcaaaaactggggcaaatgaagagggtgaaaaggagggagaaacccatgctgtgaccgccattcctatacggccaagtttcccaacaacatcattactcagccaatatcaacccttcttcttacccaccacccagctatccacaaaggtcatacctaaatcaaccacaaaacccacctaccacacaaccaacacgaacaccacctttagccgaaaccaaaacaccaaccataaatgaattttgcagcgaaaaagcctgtagaattcacccccaattctggtgtcctatgctgacttgctcccatatctacttgataattcaatg

SEQ ID NO: 207828 - DNA, 359 bp, Glycine max
  unsure (1)..(359): unsure at all n locations
tcgtataagatcttcgtgctaaggtgtttgatggaacctatatttatattagttgagtgtggntgttggtccttgtttgtaagggttgttgtaaccttgtagataattcctgtgttgtagataatggccaagagcttatagataatgttagacatanacatttgcttatagatagaaggtagaaaataattgtatcttgtagataatatggtgttatagataattaaataccagccaatggataagatattcaaatacatttgaatatatccaggttagagataacctatntgttggggagccctgctgctaatggtcatgcgtctgcgctgctgtatcaaggttgacacgtgtctctt

SEQ ID NO: 207829 - DNA, 423 bp, Glycine max
  unsure (1)..(423): unsure at all n locations
agcttggaagttcaattggatctgcttatttcaattatctngaataaaacaattcaagagagcttacgacttatttgattcacaaatccagccacaactcagcaccacaactcaacttcatcataggcatcatgtaggaatcttagaaaacaaaaaagagttcaacaacaagactacttctaggaattgatttagaacatgttatgaactaaataacatgcatgaattagactcaaaattcaaaagataggctaagaatgacaagaatacatgaacaaatgtatctagaattcaataaacaaaataaaaattcaacacaaacttagagcataatgtgacaattactatgactaaacatgactctaagacaacatggattaagtgatttacacttagaattttgtgtttttctctctaatcaat

SEQ ID NO: 207830 - DNA, 428 bp, Glycine max
agctttcttcgggccatttcctaaaaagacaatcattttgggaagttagtttcaccaagaaatgctaccttcaaagcaaaaacggcatgcaacctcctccaataaacacaaacatcaatgtaaatttaaagcaaactcgtgcacatatttcctcacgagcatacattcgcacaagatattctgctaactaaaaattgcactcatgcacaatcaaggcatcttcgttacctagatcacgtatatgtacttccaaggcgtatttgctacctaaatcacatgcatttcctttgctaaatttacatacatgcatactcaatgtattttggctaccgaaaattgcacacatgcacattcgggtatttctaatacctatacatacacaaatttcgtgaggaatcttggctacccacacaataaggtgctatatt

SEQ ID NO: 207831 - DNA, 414 bp, Glycine max
  unsure (1)..(414): unsure at all n locations
gcttggactctggcaattctttaaaaactagtcatntaatagttatgagttttgaaagaatcttaagaaacaagtcacttgaagaaatgtgacttttggaaatgtatttttcgaaatcaatcactggtaatcgattaccattaaggtgtaatcgattacacatcaacagatgtgactcttcattttgaattttgaaagtcttaacgttttaaaacactggtaatcgattacctgagagtaaaactatgtggtaatgaatttgagaaaacttcttgtgctactcaatgttttgaaaaannaaattaatacttatcttgattgagtcttctcttgattcttgaatcttgagtcttgaatcttgatcttgattattcttgaatcatgaatcttgaatcttgaatcttgaatcctgga

SEQ ID NO: 207832 - DNA, 423 bp, Glycine max
  unsure (1)..(423): unsure at all n locations
agcttccttggggccatttcctgcgaaggcattctttnggaaagttagttntaccagtgggacactactcttaaaacaaaaatggcatacaacctcttcccataaacatcaatgtaaatttagagcaagcttatgcgcatatttccttacgaacgttcgcttgcacaagacattcttttaactaagaaaaatgcacccatatacaatcaaggcggcttcgttacctagattatttacatgtatttccaaggtgtatttgttacttacatcacacacatctccttggctaaatttacatacatgcatactcaaagcattttggggtaccaaaaattgcacatgtgcacatcttggtatttctaatacctatacatacacaaacttcatgatgaatattgactatctacacaataaagtgctaca

SEQ ID NO: 207833 - DNA, 424 bp, Glycine max
agctttaatgagagagaaagactaatatgactaccatccttgtccaatttgcattaatgcagacaatgtccaatagtatgacagagttgtcaaacaaattaaaccacaagagagaatggccatcacattctgcaaaaactaaacccctttttttcttctaaaaagaagcagaataagaagtacaaaatatgcagtgaaccaaagcctacagatggaagtaaagagttccaagtaccttgatcaaacctgaaatgacacttggctcaaaaatagtgtagtcggaagaatatgtagctttagtccaatctcataaaatccatcatcattggattctttcttatctttgttagactctgccacaaactaagtttgtctcaaatcaccacttccagaataagccccatggtataaacaatgttctctc

SEQ ID NO: 207834 - DNA, 403 bp, Glycine max
  unsure (1)..(403): unsure at all n locations
agctnattggctatgcctgagggaagatgttcttccacattccgattattatcaagttcacacccgttcccgttagagtgcttattccaccgatgggcgtggcgtataccaccgtgagaatcaccgcgcggtagaatttgttcaccgcctccgactgctcgtgcgcctgcggtagccgctgcacgatccccgtcgccaccggcatcatcatcaccgccgtcgccacgttgtgcagccacatgctcacgaagaatattgtcgcgcatagccctaacagtaacagcgctggatttaccgggtcgccacaaaacagcagtgttacctgtaggtcccacgccacgtttacaaatcatatcacgcttggtacgacgctgttatttttttcttcccataaaacaacaga

SEQ ID NO: 207835 - DNA, 283 bp, Glycine max
agatgcaagaatgtggggatagttccgacttggaagtttatgagtacatcattagtggtctttgcaatgtagtgacatactggaaaatgcctgcacttggtatggaggaggctttgcgcaaagcgatctgcccaagcaggcttgtctatagtaaactaactaacaggctgcctgcttcggataaatcagaaagggcttacaagctgtttttgaagatcatacatgcccgttcccttgataatgcacaataatattggcgttctaatggttggcacttttgaca

SEQ ID NO: 207836 - DNA, 421 bp, Glycine max
  unsure (1)..(421): unsure at all n locations
agcttcgaatcttccattctccatttggagccattacctcgcacttgatggaaaacgccattggcgtttccttcctcattattgttagtattttgttttgttttatttacctttcgtttgccaaaataactatttaaattgaaactgaattcagaaatgtaactttatattattttttctgacatcatagaccatgtgtcttccaattcgttggatagatactgatttcatgttaaaaatattgttaaaatttattatgcatttcgatcaatttatcttatgagtaaaaaaagtaagttttaactcttatgttttataaactaattcttttaaaaaatctaaacaggtacacttcactttatattttttattttacactntttaagaacaaagtaatctgcaaaagaattaaataatctca

SEQ ID NO: 207837 - DNA, 414 bp, Glycine max
  unsure (1)..(414): unsure at all n locations
ttacaatntcatatgagaatgaccctcacaaatgttttattatcacatcaaacaatgaaaaaagagagggtgaaagacagaaacacatatgtcagcaacgcccgtgctgaaggaaccaccagttgcaggagtgtactgacaaccacaaatggtggaggcatggctggcaacaatggaaaacaatgacaattggcaccgacaaaaacatagatgtagacaatcaccacactggagcagagaactattaacatccaatacaaaaacagggtttcatgtgcaaagatgtttgtgctcaatggaagaaagagttatgtgcntcataatattttaattaagttttaatatctataatataagtatattctcttatgataggagtgtctgccaagagtaggttttgccatgttactcact

SEQ ID NO: 207838 - DNA, 443 bp, Glycine max
  unsure (1)..(443): unsure at all n locations
gaccttaagcacctgagctgcagcttgtactttnttactgggctttttgttttgttcttctatnaaggaggatccttatcttcctttctctatgtaacttattctcttcgcctcaaatctcaatggatttcttcttttatccaaaacaaaaaagttcttggatttcagctaagaattttttcatgtagaaggacaaggctgctcctttgagatgatatataatatattattctttcgtcatcttactctcgtttctctttctttcttaatgaattcctttggaataaataccaacagaaaaacttcacgaaactcattatttcttaaagtatattggaaaatacttctagtgcacatggaagcacatctcactgcttgatcaatactatgttaatgaactatacaaccaaatggtaatgcagaaaagacacatcatctcaata

SEQ ID NO: 207839 - DNA, 441 bp, Glycine max
  unsure (1)..(441): unsure at all n locations
taaaaataggaatatannatttggtcccttatgttaaagaattcatttctttagcctaanntctcaatttgtatggtgtattttttgtattttgatccaattgaaccctaaatctaacatattcacttaaggtatcataaaaaataatttaattaattaaaatgtaaaaacatgaaacaaatggatatatgcaaaacatgatcaaatagaattaaaattgcaaattttctaagaaagtgaacgaaaatcgcaggaaataaagaaaccaaaatttcaatttagtcttatgttaaattatatggcatgttattaattaaaaactctcataataaattatagaattaatgaatatacacacataatgtaattctttaattgttggtatgaattttgagggtaatattataaatgtcaataaaattattatacataattatttat

SEQ ID NO: 207840 - DNA, 431 bp, Glycine max
  unsure (1)..(431): unsure at all n locations
agctntactatgcaaagaatatccaaggaaaatttttttatctgacttagcatcaaantttcctaagttatcttttccattattcaatacaaaacatttacaaccaaagatatgaagatgtgagatgtttggttttctgccattgaacaattcatatggagttttctttaaaatgggtcttattaaagccctatttgaaatgtagcatgcagtgttaacggcttcaacccaaaagtattttggaagaggagtatcatttaataaatttctagcaatctcttccaaagatctatttttcctttcaacaacaccattttgttgaggggttcttggtgcagaaaagttgtgctcaatcccatgcttatcacaaaataattcaaattctttattttcaaactcacccccatgatcactcctaatagatataatct

SEQ ID NO: 207841 - DNA, 372 bp, Glycine max
acttccttgagaagctgctgtgagaaaacttccttgataatctagagcatagctacagacacccatctaaaaactaagctcacctccttgaaaagctagagcatagctacacactcccatctaaaaactaagctcacctccttgacaaaattcatgaaaatacaaaaaaaagtcactactacaaagactacccaaaatgccctcaaatacaaggctaaaaccctatactacaagaatggccaaaatacaaggcccaaaagaaggaaaaacctattctaatatttacatagataagcgggctcatacttatcccatgggcccaaaatctaccctaaggctcatgagaaccctagggccttcccttggatctct

SEQ ID NO: 207842 - DNA, 423 bp, Glycine max
agcttaatgtggatgttaattgtacgcataggttcctggaacttcaagtttcaggtctcatgtgtgattcatgtggacattgactgttaggtttctcttgaaattgtggtttcactactaacatgcatgttgagttcctaacagtctataatggtttatgggtagcttgaaatgttggatttatgaaaatcattggtagattgactgcttattatcattaagcggtcgtatcaagactcctgctgctcaaccatggtagctttctttccaacacactttgaggggatgcaattagggtgccaccaagttagctaaaaaatgatcttctcctaatcttttttgtcctcgtttgataggagatcattaaaacctcccatgacacactaagggaagaaatatcatgagcaagtttccgcaaagctg

SEQ ID NO: 207843 - DNA, 467 bp, Glycine max
  unsure (1)..(467): unsure at all n locations
ctaagcttaagggataacactatgaataagagaatattcttttatattgaacttcaagaganaagtgctaagacctctnntattggaggaatataaccattgagttntgccacactgaaaaagtctggatgattcacatcgatctcttaatttccgcacacaatgaatatatgtataaagctccattntagaaagtatagatgaaaaagtctgcagttnttcagcttctctgtgcggaaaggatacaaacggacagataggaagtaagaataatgaaatatgacaaatgcaggaattaaaaacttgtaaaacagataccaagggcacaccggaattcggcttacaaatcccaggttttcgaaaacaaagaaaccgaagcggcgacagagccgcacaggatcggtgaagggagaagggagatgtgaaaaatagaactttgaatntatttcaatcgaaagaaaagctac

SEQ ID NO: 207844 - DNA, 421 bp, Glycine max
  unsure (1)..(421): unsure at all n locations
agcttcatccgtagatccctcatgtaagattaggctcgatttanacaactgtcataccctaatttcgtccggggacctttgctcgatgacgtgcgaccattctttggtcctcgtgaggtgcttggcacccatcattaggcaatttgtgaaattccaggacatgccgaaaaaaccaaaaaatattgatgcacaatccgtaagtttccgtgacacaccggaaatcaaatggaagcatcgttgcataattaagtgaggttccgtaacattccgtaagtcaaaaaggggatgattatgtaatccgcatggttccgtaacattacggaaagagaagaagtatcgttacgaaattcgtaagtttccgtaactttacgaataaagaatcaccataacacagcagaggggggtgtacttagtaaaaatg

SEQ ID NO: 207845 - DNA, 309 bp, Glycine max
  unsure (1)..(309): unsure at all n locations
tctttaacagctctagcccaatcctcatgaagcctcttgctcatggctctagtgactggtcccttcctagggagtattgcatcatcccctcccccttgaagaggaattgacctcaaatctgttagttccttcttctcaatatcagctccacctacaaaaagaattaaatcagaaatgttaaaagtggtgctgactccatacttttttgggaggtccaacctataggcattgttattgatcctctccaaaacctgaaaaggtccatccnctctatggctaagcttggatttccttttagtagggaatcta

SEQ ID NO: 207846 - DNA, 424 bp, Glycine max
  unsure (1)..(424): unsure at all n locations
agcttttctcttgccttagtttcaacaaaatttttattatactctctatgntgnttagactcaacacaatttttgcataattcttttggtacatttatcaatggcagccccccaaccatgttgtgagtactcaagtcatgcaagtttctaaaattcaagtgaccatatctgtaatgccacacccaatcatcttcactcactattgcagctaggcatttatggcaaagtgcttccaaattggctctaaatgtcctgtttctagacatagaaacatcaaatatcaaactgtttttaccacctgaatcaaacagtntaagttttttatttttcataatcaccttatggcctttctccactaatttgcctagactgagcaaattgctctctagtccaggtacataaaatacacctgatatgcagtact

SEQ ID NO: 207847 - DNA, 440 bp, Glycine max
  unsure (1)..(440): unsure at all n locations
aaagggttactccagtagactcattcttatggtatttcgtaagtggggcaaattaacatgtacattgatggtttaaggccttatactangcaatttcatgattcttctgcaaacgcaaattaacatgttcattgattcttccacttccaaaaggaaggctccggaagccaccaagcggtgtgttgtcattactcaagggacaaagctcaaagttcagtaggattccaccatattcgccactcaagtttctcaagaaccctttgagaatgtgaccatcaagcgaaacttgtgtccagaggggactgcctttcttatatatggggagatcgatgttgtctataatgagatatagcgcagaaagtggaatgagacattcaccacttctctcaaggacaatattgatgaggcattggtgatggaattctacaccaacacctatg

SEQ ID NO: 207848 - DNA, 425 bp, Glycine max
  unsure (1)..(425): unsure at all n locations
agctttatgggggacaccatatctcattttttttttttattaaanaagccgcaatatggtttaattaagtgggaataatttcggcaaatttactatataatattgcttcgggttgggtgaatgtgcaagtccctttataacttgtcgatagtgactcatcatatttttgtgggttcctaagtcacaggcagaagtgacatgagagacactctaactaaagagtgaactaaatctataagcatgtgagagaaccataattagacattaatccaaatgtaaatgtatatgtagctcaaatgacgtaagtgtcaaagacattatttattaatcttgatgatgacacttctcaagatatgaacaacttgttcgcttcctttattcaaatacttctcaaaccacataggtcgtntatctcccaaggcgtg

SEQ ID NO: 207849 - DNA, 283 bp, Glycine max
gcgactggaccctttctttctcttccaacttgagttcactattgctaccccatagagctccgcgaaatttgttccggccatactctttcttgcgagccctcttggtctctcgttcaagggctcttgcggtaattgcattctcttcccgtaacccggcacactcctttcgaacgtgtgtagcaaccaacttgaacttctccttggcgagatttgcctttcctaactcgctcttgagagcttggacgttactcgtctctgtcggggcttcataattctcctcgct

SEQ ID NO: 207850 - DNA, 425 bp, Glycine max
  unsure (1)..(425): unsure at all n locations
agctngcatgatttacattctccgcctttctctatatttcttctggacatcatcaaaattttcatgatttacattctcccccttttttatgatgacaaacacttgtaggttaggagcaacaacaaagaaaaaatatctatttgcatatagtttactcccccttggttttgcaatgattgcttatatgagacagttgaagatttcatatttttcatatgtaaacaaattgtctcataaagaatagataatttttcttactattttatattttatctttctctccccctgtgtcaacatcaaaaacaaatcatgaatagagaggagaaagatgttgccacttggtgattacatacatatattttatcttttatcttgttgattgcaatgtatgagaatcaagtgataccaaaaggcattaaaacaat

SEQ ID NO: 207851 - DNA, 297 bp, Glycine max
  unsure (1)..(297): unsure at all n locations
actcagcttttaagngncttcctatcatcaaagcaagaatttgcataacatgtagatatcnnanggngaagcttttggagagctttctttgatccaaggtggtcattaagtccatgtagcctctggtctctactcttttgcctgcaaaatcgaggagtgaattgacatgagggtggacagagtcaggggagaccttgagtctcttgatagttntctaatacacaatatcagtggaactaccctggtcaatgaggactngggacaccatgaagtttgcaatgatgatggagacaacca

SEQ ID NO: 207852 - DNA, 411 bp, Glycine max
taggctatcgcgcggtcgcagtggtgagtgtaatttttaagcgtactatatatacgctgctttgtaacatcgagaatcaagctatccgtgttgataaacatccaagtggtaaatgttaacaaagtataagacggggcaatttggtataaaaagccatgacactcgcgttaatgtcttatcgtttcttgccattgtccttgtcttatttcccatctcttcccgtaatatatatcttctttatccattcataagactaatactcaactgataactctttttatttaagattaattttacataataaatttatattttttattttatgccattatttcaacctgtcatattacttaggataaatccatgataaatatatttaaatgtataagttttattttggattaaattatt

SEQ ID NO: 207853 - DNA, 419 bp, Glycine max
agctttaccgacctgaaatcctcacagttgtctatgttacatctcaacatcagacaaccttgtccatgcttgagggctcgataaaatcatcaccctcctacttgtcaaggctactaccccagacatcacacaatctttaacattcgacaacctctttcacccacaagacgacttaaagctggggagggcttatgtactatccagggtccacaaaatacatgtggcatcttatgtggcactttaagacacacatcaaccctccatgtcatccctaacacagaagcacagacgtcgaacccttggcaattgggctcataaaccgacaagttatctttaacctccttttattcgagtatactgtcatcttttatctcttggcaggcactcaaatatctgcaaagccacccattatctataag

SEQ ID NO: 207854 - DNA, 512 bp, Glycine max
  unsure (1)..(512): unsure at all n locations
tcttctacaagtnntattaaactccacaactcacataagnggtgncattcttccttcattttcacaagctgatcaagagggaaggagacaccattntcagtcttcttccaagatttccaaagtgttcttgagtccttcttccatcaagtttaggtaaatgatctccattttcaactctaagcttgatttccacttcattttcttgctgtatttccacttgtaatttcaaaatcttatttttgcgctcttgaaggttggaactcgaatataaactccctcattattccttctaaatttcatggaaactacaagaggtaaggtggggtctctctaactcttgaactctatgctngttgttaaacttccttgaacatgttgtcttanaatttttatgcttggcttccatgtttggatctcgtttgtgaactnatttcatttaggnttttatgccaaacatgaattctttgagtgttaaacataaggtagcctaaattcacttaataggagtttct

SEQ ID NO: 207855 - DNA, 419 bp, Glycine max
agcttgtgattgatgagaatcctcatgtaagttcttcagaaggttctcttccttcaccagtgagtagttcgggttccggttcgggttcgtggtctacgaagggtgaatctcctccagctgataagcataatcctaatccatctggagattctagtcctaatccaaagtctagtagttcttttgagtcgaataagtcttccattgggaaaaaattggttccaattgtggctcctatcgcaggtgttgcagctgtggcttttgtgctcattccgctttatgtgtattgtttcaggaagaaaaagggtgtctctgagggtccagggtcattggtgattcaccctagggatgcttctgatctggacaatgtgctgaagattggtgttgctaacaacagcaatgggagcgtttccacagtgact

SEQ ID NO: 207856 - DNA, 434 bp, Glycine max
  unsure (1)..(434): unsure at all n locations
tcttctattatatagcctcatatttaagtatccattttctctcaatagnnggattcttcactatattcttcgttggatgtcttgagtccgtttgagcatttaatgcacgtctcttttcatgcaaagaccatgatgataggataacatgttttatacttaaatgaggaagtcacttctttcatcatagtaggtctacaacaatagagagcgccctttgatgaggatcaacatctccaaagtgtgggtttcatttattctttataggactntgatagatcctaggagaatggtggaggagagatcgtctaaagcacatctagatgtaacaacaatggtggtatgagagatcaccacttgagtctcagcaacagtccccttgatgctgactccatcttgtcttggtggtcttagaagaagcatatgggtcataatga

SEQ ID NO: 207857 - DNA, 417 bp, Glycine max
agcttttaattgaatatgcaacgttccaattgtatttcaaaaggtgtaatcgattacaagatattggtaatcgattaccagtgcatctgaacgttggaattcaaattcaattgtgaaaagtcacatcctttcataaaaagctctgtgtaatcgattacaaggatttggtaatcgattaccagtgacaagttttgaacaaaaatcaaaagatgaaactcttccaatgattttcaggtttttctaaaggttataacccttccaatggttatcttgaccagacttgaagagtctataaaagcaataccttgatttacatttaaaaagagcacttacaatacttacaacctttacaaacaacttttccacatattcttttacaacctttgaatctctgtgaacttcttcttcttcttcttc

SEQ ID NO: 207858 - DNA, 320 bp, Glycine max
  unsure (1)..(320): unsure at all n locations
tatgcgcatacttctttacgaacgttcacttgcacaagacattcttataactaagaaaaatgcacccatatacaatcaaggcaccttcgttacctagattatttacatgtacttccaaggtgtatttgttacctacatcacacacatttccttngctaaattcacatacatgcatactctaagcactttggctatcaaaaatngcatacgtgcacatcttggtatttctaatacctatacatacacaaacttcatgatgaatctngactatctacacaataaggggctacatttcatgcttttttcaagttttnnttttt

SEQ ID NO: 207859 - DNA, 419 bp, Glycine max
agcttaaggaacaaccacaagcttcctctgttccttttcacaaacttctaaaagtcatataaactctctcattctttattattctctaaaacttcaaggttttatgggcgaggatcttttttagatactttttaagaggaatttatcagagagaacaaataacaaatgttattcaacctccaatgaattaaacacaatgaagaataaacacaaagtgaagaaaccaaaattctaatagaagaataaacaaaagcacctacagtgcagagtttgttcctaacaaatttgtaaaaatgcccacagtacaaattaacgaaatcaaacaatgagtacccacaatacaaaaccaatgaaatcaaacaactaaataaaaaataaatcagatattaacgaaaaaaatgaacacaccgtggcatagc

SEQ ID NO: 207860 - DNA, 378 bp, Glycine max
  unsure (1)..(378): unsure at all n locations
ggtgtatatataggcacatgatgtacctatttattatacatatatattattccttctaaattngagatggtatcagagctcctgatctttgggagcctctggctgtgcaaccctaattcttatcgcaacctttattgttgtgcaccctaatccttatcgcaacctttattgctgcacaccctaatccttattgcagccttcattgctgcgcacttcattctgtaccttgatcgcacctatctgtgatggctgaaatcgtgaaccctattctggaaactggggacaaatcccaggctgctggtgaattgcagaatgttcattctgcttattgattaattggaaagaattatctcanatggtctcatactcattggagca

SEQ ID NO: 207861 - DNA, 424 bp, Glycine max
agcttatctgggacctcgagcaagcgctgaattcatctttcatgatcaaactgtctacccgtgattggtccatatcctctctctggagcttaagcgcactgttactaccccacagagcccctcggaacttgttccggtcatgctcctccccacgagccctcttggatatcttgctccaaggccttgagaaccctagggatttctctcgcatctctggcccaatcttcttggagtcttctatccaacgcccttgtggggaaggattgcatcatttcctatgtactcgacttcacgagcggggttgtcctcaataggaatacaaattacagattcatgagctaccccacagatggagcatcctgcaacctgcaaaaaaaagcatgtaagtatgtgcacactgaatacgattggcacttactattgt

SEQ ID NO: 207862 - DNA, 401 bp, Glycine max
  unsure (1)..(401): unsure at all n locations
agcatgtgtaacacttgctggaactttgatgaatgagagtcttgtgagacacaactcaaagntcaacttctctccctttttcttccttcaatatcttgctcccgcctctctctttctctccctctttcttttcctccattgaagcatcctctccaagcttcttattcaaggctcatcttggtggtgaagctccttcttccatggcttattccctagnggatggcgccgcctcttacctcttctcctttgtctttcgctgcatcttcatggtggaaaatcaccattaaaggacctcattgaagctcaaagatccagcctccatagaagccccacaagcatcaattatgtattntctttgcgttaacatcattcttttgtgcaggtaattctttatatttata

SEQ ID NO: 207863 - DNA, 382 bp, Glycine max
  unsure (1)..(382): unsure at all n locations
cttaagtcacctgaggctgcagcttgagaaatcaaagacagaacttttactttgtgtctnatngagtcccgtagtatatcgagacgcttggacttgaatgccgatgctctgagccaattcaaacgagaataactttttactcggatgttcgattgagtcccgtaatatatcgaaacgctcgaaattgaatgttgaagctctgagcaaattagaatgacaattactttcttacggggatgtctaattggctacgcgcatatatggggccttgcctatagctttcctgaagctctgataaaacttatacgacaataacattttacacggatgtttgatggagtcccgtaatatgtcaagacgctcgaaattgaataccgaatct

SEQ ID NO: 207864 - DNA, 422 bp, Glycine max
agcttatcagaaaggaaatggtaaaataccactctctttctaatattaagaaggtggcaaagcgttcctttcgcaagatgaagggacacatgaagaagaattgcaccaggttccagaaatggcttgagaagaaaggtaaatcaatctcattagtatgttatgaatctaatatggttagtgttaatattaacacctggcggattgattatggatctactattcatattgcaaattctttatagggtatgcaaacctaaggaaaccagtgggaagtgagcaaagcattttatcaggcaataagctaggctcacatgtggaggccattggaacttgcattatgactttaagtagtggctttatcttaaaattagaaaggactttttatgtaccaagtttatctcgaaacttgatttctatttcaa

SEQ ID NO: 207865 - DNA, 440 bp, Glycine max
  unsure (1)..(440): unsure at all n locations
actagctatgctgaacattacataacctctaacctaacaataaatctttcacaacagaacaattatgacctctccagcaacaggtacaatctcaggtggaggaatcatcccaaccttagatggtcgaatccttcacaacaacagcagcaacaacaacaacaaccttatttttagaatgctgttggcccaagcagaccatacattcctccaccaatccagcagcaacaacaacaacagcaacaacccagatacaacaaacagttgaggctcctccacaaccttcccttgaagaacttgtgaggcaaatgactatgcaaaacatgcagtttcaacaagagaccagagcctncattcagagcttaactaatcagatgggaaaattggctacacagttaaattaacaacagtcccagaattctgacagaataccttctcaatct

SEQ ID NO: 207866 - DNA, 422 bp, Glycine max
agcttgctttcacagttcactctcttgtaaaaattatgtcttcctctctttcactccctctctcctctctttcactctctctcctcattaggccaccaccagccgattgcaaaccttccgtgcaatactggagattgtggaccggaagttcggctgtgtgtgcaatgtgctggcgtatggcggcggcgcaagccaacatcagcagcagcaccacgcgttccaaaggtgttcaaggcgtacatgaggctctggaagcaccagcaggagaaccgcgcgaagttggtggagtgcgggttgaagcagtgggaacttgacgagatcacgagctgaatccaacagctgtactttgggcagtacctgaggagcagtgagtgcagggtcctcgtcaaggcctacgtcttctacgaggccatactcagtag

SEQ ID NO: 207867 - DNA, 370 bp, Glycine max
  unsure (1)..(370): unsure at all n locations
aacaactactatttcagatgtgtagggtaaaagatattaatntatacctataatctctaactgtaggtaaaagtcaatttacttgtacctacggtcttctataggtaaatgccatataataataataaaactagttcctaattacactctctgttgattataatttttaattaaaaatacatgagcttattattatgttgcgcacagttagagatctgctgcaacatggcctttgaaaagttacaacaacttgctacatacanattaaattttggtagcctgatttgtgattatcgtaactagatagtgtgctctttaacatattgtatcccttgatccattgtcattgtgagatgatctagcatcagta

SEQ ID NO: 207868 - DNA, 419 bp, Glycine max
agcttgcgccgcagccactctagagagagcatttttattttctgcggcgaactggctctggctcagaagtatacacgaccagctgagaagtctatagcccccaacgtgagattgaaacttggattgcttttccatattctgaacgagagctcctgcaaaagtcttcatgaacactgttccacctaaggctctcacaatcacatcatcaacggctttcctcgatctaagatcatccgaaatcgcgactgttctgaatattatatcgatgagtaacgaagcgagctccgttgacatttctgcagaaaaagaccataacgattaggtcgaacaacagacaaatcacgcattcagaccatgcatgtttatctaactaagcaataacgaagaaaaacaaagcctcattcgcgattaaacgctcg

SEQ ID NO: 207869 - DNA, 421 bp, Glycine max
  unsure (1)..(421): unsure at all n locations
ctaagctngaagccgatgaanaagcgaaccccggctggggtaaatgnttgtcacaacnccgcaactgaacttgagaaatgaacacttgtcctcctgagttcagggcctgcgatgccaacgcattcgacaaaaccgtcagagcatttcgacaacacaaggttgtcgggaacccatcgtcaccccacttgtctatctcctcattcacatcaccgcactcatcaaatggcacatattgngacgtattgaacttcagcacacatgtacctgcaccagtaaagatggtgcaaactgctcaaactctctggtataatgtattgnctaatctaatcttgagatcttcttttttaatttgtgagaatcaaagacgagatttataactcacatatcttactcaactaaatagttatatatcataacatct

SEQ ID NO: 207870 - DNA, 421 bp, Glycine max
agcttcgaaaatcagtgagaattacaaattggttactcaacaaatactgcctccatttctttatcgccgccatgattgtggcgagctctgacacgtaggtggatgcccagagaagctttcagctaaatggtttgttgaagaaggcgagaggatgatggtgttgtgataggattgcccctatgcctatccctgatgcatcagtttccactacaaaaggggaagtaaagtctgctaagcccagaactggggcttgacctagagcttccttcagtctagaaaaagcttgatcagcttcaggggtccattggaactggtccttcatcaataatgtcgtaagaggagtagctagggtcgtatatcccttgatgaaatgatgataaaatcccgagaggcccaggaatcctctcagggttctaactga

SEQ ID NO: 207871 - DNA, 334 bp, Glycine max
catctaacattttcagatgcccagcctaaacccatgagaagggagaagaaagaataagggcatgttactgtattgaaatccatggagatattctaccagaagaagcatgtgtatcaactaattaatcacctgtatcccattacttataacaccaccaaaaaggataagtatcgaatcatatacaccagtggaatcacggatgaaaacagcattgaccttaactttctcaccaaaaaccaaccaagggtaaggaatggtctggtaacgtgcattcactgaattctggtcaaaataataaaactaatcagcagcagaacaagaacaacatatgggc

SEQ ID NO: 207872 - DNA, 435 bp, Glycine max
  unsure (1)..(435): unsure at all n locations
ctctaatcgactgcagcatgcagccngccngaacactaggactttgatttgttctctacacagcaattgactcctatcttaaggtaactgattccttatcctagaggaaaatggaacaagtattctcatgcttcttaattgacttgcgtgtgattttgaattacctaagatgcaccacacttgagtaaaactgcatggtaaatcttgaagtagaacttagggtctcatactaaatatgcttagccgcttactactaccatcagtgacaatttatttgagtctacagaaatgagatcagataacataaaacctgtcatttctgtggtgaagtcttttatccttagacaaggtccgcctgatattcattggtttggaaacatcatacatatgtgttccacgcatttagtgcatgtttgggtgccaaatgaagatctt

SEQ ID NO: 207873 - DNA, 398 bp, Glycine max
atagttaagactatggttgcacaactaactaaataattaattgatatttaaaaatgctcactgatattaaaagtagaagctgaaactaaaaataattattaataaaaggttagtaaacttattattgaataactggaagatatagaataacagaaaataataatattataatttatgttataaagataatataaaaatgaatgaattattaaaaattaaagtaagaacattcaactattcaaagttagaaactaatattttaatggcactagttcaaggagcattgcataaacactataaatactaaaaaaaaactacttatccacatcaaataatttttcagtagaacaaatcaaaatttcttgctaacatactatatagtactacatatattgaat

SEQ ID NO: 207874 - DNA, 423 bp, Glycine max
  unsure (1)..(423): unsure at all n locations
agctncacgaatattatggagcatggattgctctttagaaagtcactcgattaggatttcaattatgaaggaggaatgacaggatttaacagtaatatttgaaggagtgtatgttatgagggggaaaagggaaaaataagaaaagaaaagcagcacaaagttatagtataaaaacaaagcaagtagcaatcgagaactcaacaaatcacattatatttcaataccaatcctagatgttggggttttacataagactcctatagtacatttatccaggatttcaattatgaaagtggaagcaccagtgagaacagtacatttcaaaggagcgtaagttatgagctaaaggaaaaaaattaacacggtaatagtatatacacacaaagaaagttgcaatgaagaactcagcatatcatattagtt

SEQ ID NO: 207875 - DNA, 289 bp, Glycine max
tcttatgggcggattgtttttagatggaaaaatatttctaaaaaacacaaaatattaaataatagtgaaattatatgtcgtcagaagaaaatataatcagatcatatctttattttaaagatggaatctgagaggttttttttttaacgaaatcaaaactcaaatttataatataactattaatataaaattagtgttaacaggagcaaccgaaattcccaaattagagtaaatacacacaaactcacgattaacgaggttgagcaagtatgtttacacatccttgtga

SEQ ID NO: 207876 - DNA, 418 bp, Glycine max
agctaatcccaacaagcagagcatatactctttattttttcattcgcatctttttcttatcacactcaagggcaacagacttacacttatttgacggtggacaaatgtatcctctcattttaatataattagcatatttttcttaaaactttatatttcgcactcctaatcttatatgtttgaacccccaaatttaatttaataaaattataaatatttattttaaaaattcatatttatacatattatttttatgtttgaactcactatctcattttctcactctatttatatgtctaatattttttatttatttattcatgcatatgataataattattaaatcctctctttaaaaatatatatctgttcaactgatattgggtactatatgtgctactggtcacaccatattatt

SEQ ID NO: 207877 - DNA, 496 bp, Glycine max
  unsure (1)..(496): unsure at all n locations
actaagctgtccaatcatanaaggaacaagataagattcttttatacatggnanaagngaacacagattaattttctcgccagacatgttatctaattaaactcgcggcttatatgcgcttaatacatgtacttttggcatttaaatcatagcgaaggacttatttattgtgctaaaggaaaaattgggtgcaaattttaagtcctttatttcggaaaaagtgactctggtgccggnggacatttcttacgaggacttgggtttaactgattccattctaagggaagagatttgcaaccagacagatgttattgtcaatttggcagctacaactaaagttgatgaaaggtacaagcgtttgtatcataagaaatattttttccaccaatttaacgagcttaatagttatgtacagaaatataatactttactttcttaataagaattacaatctatatactggttatcaaatacaattattatataatatatttta

SEQ ID NO: 207878 - DNA, 438 bp, Glycine max
  unsure (1)..(438): unsure at all n locations
gatcttaagcaccgcagctgcagctgtcgganatggggacccgtttatgtttttctaggnggcgatcgagcgatggtgcaagtcgactctccacatccacaaatcacacatgaactcaccatccccaattgcccaccttcaactaagctcacgtactcccacgtagcccttatcctcgttcctctcagcatcgggtccccatcaacccctccaagcttccacagcatccaagctattcaacatccagacatcatgaactatccaaagccaagaaaacaagggagaggcagaaaactctgcccaaaacacattccaataccaaagcttttcttactcatataccccagtaacattctcttcgttccgattcgttaaccggtggatcgactcgaaaagttntctggaggtccctggtacataaatctacattttgaccgt

SEQ ID NO: 207879 - DNA, 450 bp, Glycine max
  unsure (1)..(450): unsure at all n locations
cacatacacatactttntcctagtcgatcactcacttaattctccatattctccccctttgttttgagtttaagcttcacttgaaattaagttattttattatgtgagcttcttgatttaatcctttttcctctccccctttggcatcaacaaaaagccaaagtgcataacagatataaaacatacacaaatgactaatcatacataagtcattcatttgaaaattctaaaccaatcatgaagcaaaanacatgaatagaaatgactaatcttacataagtcattcatttgaaaatctaaaccaatcatgaagcacaatatagatcacatagtcatataacataattcataacaatgcattcatactaagcagatattataagacatactaaattgttcacatgtcataatgatatagatcattttgataagccactatcatcaagcaat

SEQ ID NO: 207880 - DNA, 332 bp, Glycine max
gcccttctctcatctctctcacaaacgccccaccagaccactaatgatgatctgaaaccggacttaagcactgagcagcactaaccgagaagagaggtgttgatttttatgcaaacatttaatgcttaaaaggagagtttgttggcaatacgatcctttgagcacgattttttttatttatcccaaaaatctattaggctagctgacagcatctctaatgtgagtatttaaatagcatgtctaacagactttctcattaggaaagaggacgagatgatactgaatatacataagaggatgctgctaccaaaataggcgcttatttgaacaac

SEQ ID NO: 207881 - DNA, 227 bp, Glycine max
  unsure (1)..(227): unsure at all n locations
ngaanagactaccagagaaacatatgcgtatgttgtatctttcttgagaggaggnnggcggagaggtccaacacagagagagtactatgcttccctaactcctcaagaatctcacctgttaatccagttgaccatagctgaccaacctgaagcctacgctaagatgcgacaccctttggaatcttcccagtgaacttgtttggataaggtggagaatctccagactc

SEQ ID NO: 207882 - DNA, 414 bp, Glycine max
agcttgcttctacagggactacagtgtctttgttaatgcgaacgggctctctttcgctccttattttattttaacctctccattagttttagaaaaccctaaattcctcccccaaccataaattcttgctctctctctctttgttcgtgcctccatcgttgtggagacccccacagaggtgtcgacaagtacactcgttctagcgcaccctcactttcaccctcattttacccttctcatacaccctttctttgtgctctggctcaaaaaatctcttcattttgtgtttcctcaccattgcgaccctcacctgcacattcgcaatccctcactggcatagtcacttcgcaatcccttattaacaaatcattagggttttttgttgtgcaagtgaaagtgagagtgagagagaac

SEQ ID NO: 207883 - DNA, 336 bp, Glycine max
ggaccttaaatctcagcttgtgcggggctccaaccaaactctttgatctctcaactgctaacttctatagggtggaaacctcaaccaagagatccttgatgcctaatggggcattatgatgtccagactctggagaagctattgcatcattgattccatacagctattgattacagagtcatcatgatagagctctgactcatagaaagagataatggagcttgacacctacagtgcaattctagctcataacaaactcttgacacaacacatagaggtcttagccatcagatatgcaactccctcacaatatacagattggacctcacaaacttc

SEQ ID NO: 207884 - DNA, 431 bp, Glycine max
agcttttgagcaattcaaatgggcataactctgttcacggatgtcagactcacgcgcataatatatcgagacccatgaaattgaacaacggaatctctcgagaaatacaaatgctcataacttttaacacggatgttccgattcaggcgcataatatatggagactcacgaaattgaccaacggatgctttcgagatattcaaatggtaataacctttcactcggatgtcagattcaggcgcataatatatcgagacgcttcaatattaacaatggaagctattcgagcatattctaatgggccataaacttttcactttggagggctccgattgctgggcgctataatcatattcttagacgcacacaactttaatctacgtgaagctttctgagaaattccaaatggtcataaacttttcacatcggag

SEQ ID NO: 207885 - DNA, 289 bp, Glycine max
  unsure (1)..(289): unsure at all n locations
agagnttatctcttttatcttagtgagagtgattctcctaaattcttgagtgattcaagaacaccttggctgtatcaaaggactttcacaacctttgtgtgttgccctcgttggaaagagtgattctttccttcctttcatcatcacccttgttctttcaaaccacaattccagaaaatccacctctgcccagaattatctcgtggccataactcccattttacgcactcaaattaagtgattcttgagcctaaattgaatttcataacgagacctttcacctcgtttt

SEQ ID NO: 207886 - DNA, 425 bp, Glycine max
  unsure (1)..(425): unsure at all n locations
agctngggaggatngatggggacccggtgttgttatatactaggatatgggctacgtgggagtacgtgagctcagttggaggtgggcaacaggggatggtgggtttatgcgcgcattgtggatgtggaaaaacttgttgtgcaccatcgcccgaccgccacctattaccaaggctgtgtaatcgattaccagagatggaaagccttaaaataccccttttacttgcatgtagtggttatgagacaaatcgtgtgcagcgcagttagattcttgtgaaagagtctacccctttctcttctttcttgtagatcgtgatggcggcgcagctaattcgtgatcgagtagagatggagtgcctagagggagcttgggagaccctcgaaggcaacacgaggtgccgatttcggcgcaccattcgattcacg

SEQ ID NO: 207887 - DNA, 422 bp, Glycine max
  unsure (1)..(422): unsure at all n locations
agcttgnggctgagaactatatagcagcaccatggttctatttntagagctctcgctctctctctctttttcgttttagttttagagtgctactctaaattcgttttagtctctttttcgttttggaagaataattctagttttctactgattaatggaaggctaagtctccaacatttttttctcttgaagatcaagcacgactctctttgaggttctattattactattaaattttgatcagtttctcctcttcaccaattattttgtatttgttgctattgatccttgcatgcttagtgcttgattaattgtctttgcacttaatttatgttcatgcttaatgatcgttcatggttaattggtatatgtgttggttaatcacataatgaatgccttatgtntaaatttgcatagtaatt

SEQ ID NO: 207888 - DNA, 458 bp, Glycine max
  unsure (1)..(458): unsure at all n locations
tgtgtgggatacccatgtgagcatatgtttccaaaaccctttatgtttagattgacaaccgctccagtgctagttttgcctaacccgagagaaccatttgaggtgtattgtgatgcatcaaagatgggtttaagcggagtgttgatgcaaaatggccaagtggtgacctatgcttctagacagcttaagactcatgagaggaattatcccacccatgatctagagttggttgttgtagtttttgcccttaagatttggacacattatctcgttggctctaagttcgaggtatttagtgatcataagagccttaaatacttgtttagtcagaaggagctgaacatgagacaaaggagatggttagagtttcttaaggattatgantntgagcttagctaccatnccgataaagccaatgtaatggctgatgccttgagtangaaatctctacatatgtc

SEQ ID NO: 207889 - DNA, 424 bp, Glycine max
agcttcgaaatccaaagatctaatccaaggtatatgtttcataaatgggattcccttacttgtgctgtttgattctagtgcaacccattcttttatatcctattcatgtgtagtgaaacttaagctttttgtgtcttctttaaataaagatctggtggtagagaccctaactagtggttctgtgttgacttctaatgtgtgtttgaatgtcctgtggaaatttctggtagaacattcttgattaatctgatttgcttgcctttgagccagattgatgttattcttggtatggactagttatcttccaaccatgtcttgttaaactgttttgataaaactatggtgtttgatgattctgaagtgagtaaagatataatgtttatctcttccaaccaagttgtggcgtctttaaaagaagatgttc

SEQ ID NO: 207890 - DNA, 487 bp, Glycine max
  unsure (1)..(487): unsure at all n locations
tctagaggaagcctcttaatgaagcttctagagaaaactacttggtttcttatcggtaaaaatgctgcccagccttctttaaccgttggatcgtctcgaaatttggtttgcaacttcaaaagacacttttccatgatctgaccgttgagatctgtgcgaagatgtctggagtgtgctagaagcttccgttcccgagagcatctcttatttaagcatttcagcctttgctttcttgtagcttangaaaaatgccatttcttcttctttctttcttccaaatccatttctaaagttccaagtactttctccatcacccacatccaccattagccaccacaaaccatcattgttctccattgataacccacaccgagaggaacccttcaaccgaagcagaatttccaacttggctttgcggttccgtagagaacgaanaccctaatctgatcttcatttttcttcanagaactatggtctatgcttgttc

SEQ ID NO: 207891 - DNA, 423 bp, Glycine max
  unsure (1)..(423): unsure at all n locations
agcttccatcaagtagtaatcaaagcacaagagctttcaagttgtgctccttaaacctctattaatttctagctttaccttctcctccattggtggtttcttcatttttctccatttatctcctcacatatattgttttaaatttttttaacatgattttttagaatttccaccgattaaacatgctatataagctagatttaattntctatggntcaaatttcttgttcttggtcttgaaccatgaattgtgttgagttcaagttcctttgagttttgttttgctattttttggggctgaaacctaaaccataaaattctgacaaaaacatttaagtaaaagaaaacctcaaaaatctagagtgacttgttctcctattgtagttttgtcatagaagacatgtctagtcatgaaacttgtca

SEQ ID NO: 207892 - DNA, 518 bp, Glycine max
  unsure (1)..(518): unsure at all n locations
tanaggacaactccatattacaaaagagatcgagcgcatatttgctgtttctacataaggggggaatgtactagaggagctgagtgcccttatagacatgagatgccagtaactggggaattgtctcaacaaaatattaaagatcgttattatgggtatgtatggttcaaactgacttccttacttatgacttgatctctctttcagttattctttntattccaacttagtatttctatgtattgtctcattggcattgggaagcaactcaagattttcatttccttgatgaatatagtaggtggtttcttatgcattcacttggttcttttgtgtcctgtgtgatgacctgctgtgtagctaagaagataacaaacttgcagttccccacgctctcgcccccagcaaagtcatgtgatgtgtctgcttgtagganngcttatttatacaacaatagtcaagccttattcaaccatgtggagtcaatattagtcaaaccactatctacataaacattt

SEQ ID NO: 207893 - DNA, 417 bp, Glycine max
  unsure (1)..(417): unsure at all n locations
agcttcttgcgtagctgctcttggtgctcataatatcccaaanacaaatccctcttattactagctattttgaattctttagttcctgaatgtacaaccttcaaattgttgctcgttcccctctttgttttcagcaaaaaagaaaatcaatatcaaagaaaacatggatgaagtcctaaggatgccatgtacatgtgtatttctgaagatatagtatttatattccatcaagcataaaatgactgttgattacatgtaatagacattttataacatggttgccccaaatcacaattaaaaagcacaactaccaatcttttggagtcctttggttaatttgacttgtctccttctgtggnnggggtttggttaataatattatactttcgccctccaaaanaaactgatgactgatcc

SEQ ID NO: 207894 - DNA, 425 bp, Glycine max
tctcgctcatcgccataagtgagagaagcggggttgttatcttgcttgttgaacttctttagtaagtcatccacatatttttcttgcgagataaatatttgtccaggtatttgcttgacttgcatgccaagaaaatatctcatgagtccaagatcggtcatttcatactcttgcatcatagcctttttgaattcttccatcatctgtgagttgttgctggtgtagattaaatcatctacgtataggcacaaaatcaagaaatgattaccttgcatcttcacatatagtgacggctcacttggacttttgaggaatctatgctcgacgaggtatctgtctattttggttgtccatgctcggggaagctgtttgaaaccataaagcgcctttttcaagcgatatactctgccttcttctacttgaac

SEQ ID NO: 207895 - DNA, 422 bp, Glycine max
agcttagccctagaggggatggaccttttcatgttttggagaggatcaataacaatgcctataggttggacctcccagaagagtatggagtcagcaccacttttaacatttctgatttaactccttttgcaggtggagctgatattgaggaggaggaactaacagatttgaggtcaaatcctcttcaaggggaaggggatgatgcaatcctccctaggaagggaccaatcactagaaccatgagcaagaggctccaagaagattgggctagagctgctgaagaaggccctagggttctcatgaaccttagggtagatttctgagcccatgggccaaggttgggtccaattatctttgtacatattagactaggatgtcattatatttggtccttgtatatagggctccatattgtaggtagg

SEQ ID NO: 207896 - DNA, 430 bp, Glycine max
  unsure (1)..(430): unsure at all n locations
anagtatgcccgagncattcatccctatgagatgttgtttatgtattggcgaacagaattgccattccttggattacggngttgaaccaagctcatgcttttacaaaaaggttcatcaagtcaagttgaaatatggaagtaaccgtcttgcaaaattgtggcaaaagatgaatcgagtcacatcactgcttcgtttactgccaaacatatataggatagtttatgtccttgttacttccagtttcaccttgacaaagatgtcatggaccatgttgaaaatctaatattgatcaaccccatgtcctgcgtaaaaattcgcaatacttcaactgtacatcattcgcatacatccatgcttttcattggttgcattgctcattgcactctttcccttgacaataaataaaataaattaagtaaactgacttat

SEQ ID NO: 207897 - DNA, 410 bp, Glycine max
  unsure (1)..(410): unsure at all n locations
agctcgnggngaatataatagacgtcatttgtcttctttcagcatccgcatggcttcatagacagttggctctggcactttaactggctggaatcccctttccaaagctggatccttttcaatgcgcttcctatattcatccagtgttgtggctcctatacactgcttaaaatttcaggcacacactttcttacaacagtttcaagttcctaccaaacaacagtaagcgcatatattaactcgagcattgcagtaggctaagcataaaagcataaccagataccttcaaattcacagccagcctacaatttcattctacatcactgctgagaaagctaatgcattttctttataataatacactccaagactaaatatcgcaacttccacactacttagttcaactacat

SEQ ID NO: 207898 - DNA, 422 bp, Glycine max
agcttgcctcaaagaggtccaggaaggataatgtcggtcgaaggactagttccgctcctgagtatgacagtcaccgctttaggagcgctgtacaccagcagcgcttcgaggccatcaagggatggtcgtttctccgggagcgacgcgtccagctcagggacgacgagtatactgatttccaggaggaaatagggcgccggcggtggacatcactggttacccccatgtccaagttcgatccagaaatagtccttgagttttatgccaatgcttggccaacagaggagggcgtgcgtgacatgaggtcctgggtaaggggtcagtggatcccgttcgatgcatatgctatcggccagctcctgggaatatccgtagtgctggaagagggccaggagtgcgagtatggccagaggaggaaccgg

SEQ ID NO: 207899 - DNA, 398 bp, Glycine max
  unsure (1)..(398): unsure at all n locations
tctntgagaaaacttccttgggaagctagagcttagccactttcactcttctcataactaagctcacctccttgagaaggttccttgagaagattcctaaagaagctagagcttaactacacacacctttctaatagctaagctcacctccttgagatgagaagctaaagcttagctacacaccccttttaatagttaagctcacccccatgacaaaatacatgaaaatacaaaaaagtccctactacaaagactactcaaaatgccttgaaatacaaggctaaaaccctatactagtagaatgaccaaaatacaaggcccaaacgaaggataaacctattctaatatttacaaagataagcgggctcgtacttagtccatgggctcgaaatctaccc

SEQ ID NO: 207900 - DNA, 417 bp, Glycine max
agctttataagcgcgggtctaggggacgaatgtcaagtggtcgcgatatacgaagatgatgttccgagtacattggatttggtacgaccatgccctcccgatttccagctgggaaattggcgagtggaggaacgctccgacatttacgcaacgagcataatgtaaacctttacggttttgaaaactctatagttaggcctaggctttagagtttcttttgttaaggctttgtgtcttttgttttgaatttataatacaagggtctttcttcatatgttcctacgtctctacccattctcatccatttgcatgtttacttctttatttctgaaacggcagatccgatgacgagtcccccgaaggtactaatacctgtgacccgcctatcaacttcgagcaagaaacgaatcaaacgga

SEQ ID NO: 207901 - DNA, 352 bp, Glycine max
aactggatgcattggtaactttgtacccatctggcctcgaatcataaatctatacctgtcgcaagggtttgtgggttgtgctcctctgctgaccaccatacagacctttgccctttcatgcagcaacctggagcaattgagcagcctgaaacttatgctgcagatatttacaatagacctcctcaacctcagcagaaaaatcaaccacagcaaaacaattatgacctctccagcaacagatacaatcctggatggaggaatcaccctaatctcagatggtcctgccctcagcaacaacaacagcagcctgctcctttctttcaaaatgctgcttgcccaagcagaccataca

SEQ ID NO: 207902 - DNA, 414 bp, Glycine max
agcttgtcaaggaagctacctagtctataaatagaaacatgtgtaacacttgttgtaactttgattaatgagagtcttgtgagacacaactcaaagttcaacttctctccctttttctttcttcaatttcgtgctccccctctctctttctctccctctttcttttcctccattgaagcatcctttccaagcttcttatccaaggctcatcttggtggtgaagctccttcttccatggcttattccctagtggatggcgcctcctctcacctcttctcctttgtcttccgctgcatctccatggtggaaaatcaccattaaaggaccttattgaagctcaaagatccagtctccatagaagccccacaagcaagcttctatcaagtggtaatcagagcacaagagcttcaagta

SEQ ID NO: 207903 - DNA, 252 bp, Glycine max
  unsure (1)..(252): unsure at all n locations
tacaatgacttgcgaaacanaaggtgatcaaataacaagcagagatttaaaaggtactatgttgcctcctagtagcgcttctttaacgtcttgagttggacgcctgatgacttgtcggtcacggacctagtactttgcttacctttggctttggacttggtcgcctattggttggccatgtgtcgtaggcaatactctataccttttgtggatgagctgaggggctctggaggtggcgacggttgcatttgt

SEQ ID NO: 207904 - DNA, 425 bp, Glycine max
agcttctcacttgcctacaaaacaatcacgtgtattgttactctattatacgctatcttgcattgctaatagagccataggcattggcagaatttcctgaaggaattgcatctattaaagtttcatcgatctaacaaccactcatcagaattacaccatctagatggcggtgattggttgatgcagtttatgtgtcatattccatggcaggttatgccacaaattatcgtctatatccaagttttgcttaagaaactttggctagactaccctccaaccccaacttcatgaaattctttactttagggctagtatctttcccaaaattaccatgaagtgaaagtggcaatgacctattctctactttagtgctcacgtggaagataatgttcctatcatcaacagctttatcgtcatgcttgtgt

SEQ ID NO: 207905 - DNA, 350 bp, Glycine max
  unsure (1)..(350): unsure at all n locations
cttagattctaagagagcacaaatcctagacttatctaagtgatctttttaatacaattagcttgctcactagcttttcactttcatttgcttttgaccttattacatcagcacacatttcctttgaatgctttctttttctttcttctcttcttcttttctcttttttttataacacaacttatgtgttatgtgtgctgatgctttatctctttctttgcatcccaattagttccactcccccaaatttggggtaaatttgccttgaaccatatgctctcctagaatctaaacaaggtatctggagataatcattcanggttcacggttcaattgtgacaaaatcattc

SEQ ID NO: 207906 - DNA, 428 bp, Glycine max
agcttatccttatggcctgcctcggactttattctttgccaccccggaagagttaagccaagcccctacttttgaggggcaactcccaccttatgaagactatcccgggcaagacgatggggaaggagatacctatcttggccccctgctccacctcaaagatccgtccccgcatgaactaccccagccgaacatagtccgccatatcccggcctcacccacacccgtaaaagaatctgttcccttcgcggaagataagggaaagattgaggcgcttgaagagaggttgagagcagtcgagggcctcggcaattacccattctcggatttagcggaattatgtctcgtgcccaacatcgtcatccctcccaaattcaaagtaccggactttgataagtacaaaggtacgacatgtccgaaggggcatc

SEQ ID NO: 207907 - DNA, 472 bp, Glycine max
  unsure (1)..(472): unsure at all n locations
actaagctanaggagcactcanatcgggtgtatgtagcccctaaagcctttaactctgaagagtccgtcagggcctctccctcctgattcaggttcaacccatataagatgctagcacaaagactctatctatgaactgtacaaaacacacaactcctcaatttttctcannaataatttatctcgtcgtgcttgtgattaaactcactgagtccccacagtggttcccattacaatactcgtcgcgtattaacttctcgtccttaaagggtcttataatcatgtgattgtacgattcataactctcaacttagtgcacacaacatctcaatgcacatatatattacaagtcaatacatactcaatttatcacatacaatcgggctcaatcacaatgggataaccccacattatcacacctcatgaatcatatacactttacctatgaactatgtaatacacacaactactc

SEQ ID NO: 207908 - DNA, 427 bp, Glycine max
  unsure (1)..(427): unsure at all n locations
agctntgactctcctcagcggcctggtcaatgattttttaatactagatgacaagcttctacttgtagacatagacttgcttgaaagcaagctacacttctccttaagaaaccttccaaaggcaaaagctgctctcacagctgcaagaacagctgcaaatgctatttatgttcctccagctcaacaaggtgccatagatctacagagtgggattcttcacgcagaggagaaggattacaaaactgcatatagttatttctttgaagcctttgagtctttcaatgctcttgatgaccccaaggctgtatttagcctgaaatacatgttgttatgcaagattatggtgagtcaagctgatgatgtggctggaatcatatcttctanagctggcgtgcaatatcttgggcctgtattggatgctatgaaa

SEQ ID NO: 207909 - DNA, 262 bp, Glycine max
ctcaataagaactagctgctttcttcctctattgcccttagctgaatacaccttggagtgggtctctatttgggtcttaacccctctcatgcaaccttctttacgaactctgacctagattgcccttctttatgtataaaagaaagtgtcaagtgggacgggaatgaggtctaagggtgttaatggattgaacccatagacaacctctaaggcgatcgcttggtgggtctatgaacccccctatggacgcaatatctacatg

SEQ ID NO: 207910 - DNA, 292 bp, Glycine max
ttactctatgacgcacaataaactgcaagaaaaccttgcaacattgctagccatcaacaacgcatttattatgagcaaggctgtgacaataacaactcaacactactttttattgattcacattgcatctgttactcatctgagttttgcaatcttgaggtgacggttgtgccatctgcatacatccagagcttcctatattaatgctataaaactgatttcttcattattactactatcggctatgagtttcgttttcaataaatatacatgatacacttatatcgactga

SEQ ID NO: 207911 - DNA, 316 bp, Glycine max
gcattgttttaagcccgatggagtaagataactctctggcactctctatattatttatgctgtgtcaggcatttttcatcacactctttgtgatatgggtctgagtttgttgcaataacatattgcttggacttattctgtgacatgtgatcctattctcaaacattcttaccccactttttggaatgaatataccctatgatattgtgaaagtgtatggcccctgcatatttgacgctatacacacagctgccctgtttgatcatgtgagggagattattccttgagaatcatcttcatatggtggtgaagcact

SEQ ID NO: 207912 - DNA, 421 bp, Glycine max
agcttgcttgagaagcttctatggaggctggatcttttagcttcaatgaggtccttcaatggtgatttttgaccatggagttgcagtggaagataaaggagaagaggagaaaggaggcaccatccactatggaataagccatggaaggagaaacttcaccaccaagagagtgccttggataagaatcttagagaggaagcttcaatggaggaatagaatgagggagagagagagaaaatggcatggaaaattgaaggaagaaagggagagaagttgaactttgaagtgtctctcacaagactctcattcatcaaagttgtgacaagtgttacacatgtttctatctatagcctaggtcactaactaaatgaaattcacttgtgcatttcattctcatttcatgtgaatctaacaggaatat

SEQ ID NO: 207913 - DNA, 389 bp, Glycine max
  unsure (1)..(389): unsure at all n locations
ctgagcttctcaggaagcttctcaaggaggtgagcttagnttttatatgggtgtgtntagctaagctctagcttttcaaggaagttntcgcanagaagcttctcaaggaagttttctcatgaaagcttctcaaggaagttatctagtctataaatagaagcatgtgtaacacttgttgtaacttttgatgaatganagtcttatgagatacaattcagagtgcgacttctctccttcttttcttccttcaatatcgtgctccccccttctctctttctttttctccattaaagcatcctcttcaagcttcttatacaaagcaattcttggtggtgaagaatcttcttccttggcttattccctagtggatggagcctccactctcctct

SEQ ID NO: 207914 - DNA, 417 bp, Glycine max
agcttgaaggcaaactggatgcgttggtcaacttggtaacccagttagccttgaatcagaaatttgtacctgtcgcaagggtttgtggtttgtgctcctctgctgaccaccatacagacctttgcccttccatgcagcaacctggagcaattgagcagcctgaagcttatgctgcaaatatttacaatagacctcctcaacctcagcagcaaaatcaaccacagcagagcaattatgacctttccagcaacagatacaaccctggatggaggaatcaccctaacctcagatggtccagccctcagcaacaacaacagcagcctgctccttccttccaaaatgctactggcccaagcagaccatacattcctccaccaatccaacaatagcaacaaccccagaaacagccaacagttg

SEQ ID NO: 207915 - DNA, 435 bp, Glycine max
  unsure (1)..(435): unsure at all n locations
ctcagctatgaacactaatattancatagataaatgattttatatataatggacaatgagtttgaaacaccaattaatacttctttttaatataaatatgatattctctggttattctctaacggtgttaactgaatgcacatatttatagagtgatggtaacgttgaaaacaaatataattagtaaaaaattgctatctttttagtaaatttttaatgtgtgatataagatgtatactaatttttattaaaaaatattttttgacataatactaaaggttaatataattaattacaataattttatacattcaaagagatgtttaataataattatggaatatatttacacatatactttacatttattgaaataaactattttttataaatttattaactaaaatatattataaattaattttttcgtaggag

SEQ ID NO: 207916 - DNA, 420 bp, Glycine max
  unsure (1)..(420): unsure at all n locations
agcttancaaatggacctgagagttgttcagtttcattatatcttccgtaatactcaccacctctatcatatctaataattttcacatttatgtctaattgcttttttacttcattgtagtaaatttctaaggcatccattgcctaagaaatctcgggcagtaagtagacataatcgtaacgtgaataatcatcaataatggtgataaagtatccttcattttcgaaagaactaacatcaaaaggtccacaaatatcagtatgcacaatttcaagaagctgagtgcttcttgtagctcctttctttgtatgttttgcttgttttcccttaatacaacccacacaaatatttagatcagtaaaatctagataagtaagaaattcattctttattaatctttccatcctttctctagaaatg

SEQ ID NO: 207917 - DNA, 423 bp, Glycine max
  unsure (1)..(423): unsure at all n locations
agctttgacacccatggacgtgaagatttacttactgctaccatnggaagaccataacaccctggtcgtgtctatgctactggagctagtgtcacaatcaaataatactttggactggctttaaggagctcccacacgtctacacctatggctcctgaagacctggagtagctaacacaaaaaattatggaccggctggaggagtctatcataaaaaaagtgactcaacaaataagttgcccttcagctagatgcagtcccaaatgcaattgtagatgcaacgcaaaagcaagcacatggactcactttatctcttgagcccgaggttggtctttctgctacttgattcaacacaaagaanaattgtgtcaatccctcggtgcaggacccaacatccctaagttgtccacctaatttccctta

SEQ ID NO: 207918 - DNA, 365 bp, Glycine max
  unsure (1)..(365): unsure at all n locations
ctcagcttagctggaaattctagataggggagaggctttgatgatgagctanacnccatggaacataatggtgtttggaacctcatagaattgccaaagggttgtaatgacagttggtaataagtgggtcttcaagactaaacgtgacttttatggtaaccttgaccgttacaagactagacttgttgctaanggatttactctaaaagatgacattgattataaagagatgttttcatcgatctcacgaaatgattctttcaggattatcatggcattagtagcccattatgacttggagctacatcagatgtgagaactgcctttcttaatggagatttaaaggagaatgtttatatggataa

SEQ ID NO: 207919 - DNA, 419 bp, Glycine max
agcttgccacccagctcacccaggcgagctcattttgcccaggcgagcagggttgcttcctccagaagcaacaaccttctagaggaatcttctggagggcccaagtgggcctggttgctattcgcacccccatttttactaagtacacccccttgcctttttttggtgattctttttttgtaaagttacggaaacttacgaatttcgtaacgatacttgttttctttccgtaatgttacggaaccttgcggattacataatcatcccctttttgacttacagaatgttacataacctcactaattgtgcaacgatgcttctatttgatttccggtgtgtcacggaaccttacgaattgtgcatcaatattttcttttgttttccgtcatgtcccagaatttcacaaattgccaaatgat

SEQ ID NO: 207920 - DNA, 396 bp, Glycine max
  unsure (1)..(396): unsure at all n locations
tggcgcacaacaagccntccacgagcacaatgcgcgcataaacccaccataccctgttgcccacctgcatatgagctcacgtgctgccacagtacccatatcctcggttctctcaacaccgggttcccatcgaatctcccaagctgccacaacatccagactaaacgacattcaaacggcacaagctattacagtcaagcaaaacagggcagaggcaaaatattctgctcatcacaccaaccgggagcacaactttctttacttatagacctcagtgacgattccttcgatgcagtgcgttaaccggtggatcgactacaaagaattacgtggaattctatagtgcataatacctcgtcgtgagcggtgggatctacttgcaaacgtcaatactca

SEQ ID NO: 207921 - DNA, 415 bp, Glycine max
  unsure (1)..(415): unsure at all n locations
agcttnggcacttacatgatgataaatataattttgtttcatgacganccgcgcatgaactatcactatggttacttttggcataacaaaccttacacccatcaaattcaagttttaagaaagacctccaaatatgggtcaataataatcatcatatgcaaattagcaataaaatgctcatttactaagtcataagcaaaacaaactgcttaactcattcgcggattgtatcacatttagccagaatcatctttttcaatttcaaacggacacgattccttgttaagaaaaatgagatcataggcttaggagccttggcttcatccaggtgtttgatggaagcaatggggtacaactacgttaaagccttatcccaaacccatatatctatcgaaattagagaacataaataaat

SEQ ID NO: 207922 - DNA, 465 bp, Glycine max
  unsure (1)..(465): unsure at all n locations
ggtaatggtccttgttgtagagcacatggaggagatcaccttantttggatgaangncgncaagccgggggaactcgtcgattatggtggagagcttgtcgtgaaaattctgctgagtatacttcactttgcgcatgtagaattggcgcagccgtgaaatcgcatatcctctgtgcacaacggttggtgtctgacgctgggtgcgagagaggataatgtcgaccacatccttcccatttggcaccacggtaatcttcttaaaattgtactgaaccatcgtgctctatcatcctttgtgccacacaatatttatacaaagggactatagcagtgacacaagataaactcccgggagctacataatttgagatcccaatgagagctgagagaaataagaagcattatgtgatgaggatgagaactgaccttcaaacgtctgtcgagcgtgtgtctgaactctgttgt

SEQ ID NO: 207923 - DNA, 416 bp, Glycine max
agcttgttgaaggagcctgataggtggttacatcagaaatctaactaacctatcataccagctaactaactattctaactaactatcgtaatgctgctaagaggcccccgaaagctgggaatggatattcatcattcccagcttgttgcagagaccttgaaaaaccgctggagacaaagccttggtgaagatgtcggcgagttgcttctaagaagaaacaggaagaagcttaatgagtcctgaattaactttgtttcgaacaatgtgacaatcgatttcgatatgttttgtacgttcatggaatacgggattggtcgcgatttgaatagctgattgattatcacaataaagggtagctggttgtataaaagacacacgaaagtcttgaagaaggtacgttagccattgtagctcgc

SEQ ID NO: 207924 - DNA, 416 bp, Glycine max
agcttctaaattagagtcattgtcagttaactccatttcgttttgtttaactaaagcaagaagttgttccaattcacccattaacacatctttttttttacaaaggatccctttttcttttttgtcattttggattgaatgctcaatggtattattcaattctaaatgagcttcattcataaattgtgattcaatctccaactccatctttttaacctccaaggcttcataagatgaaagttattggtccatttcttttgaatacactgacgacactcctttcatggcataatctgcattatttaaagcattcattgcataatggtcaagtgagattgtgcattgttcctcaacagttgcatgatgaaaatgacctaatcttttgtgtcagacttctatattgtttacagtaacta

SEQ ID NO: 207925 - DNA, 412 bp, Glycine max
  unsure (1)..(412): unsure at all n locations
tganagaatgcagacaatctgtggtgcattagtgaagtttcttgntgctatgngantaccttctctatgctcttcctatgtttataaatgaatcaagcagcctcaagatgtcaagaagtaaatgtggttgactgagaattacataaacaggttgggcttggttgccttgtatgttgttttgagcttcctagttgggggcctaaccttcttgaacaccaaagggaacttgatcttggagttgtggaactgcttggtgctctcccttttgcaaagtttagctgggatggtggcagttntgatgatctggatgcatggagacctgactctatgacgagatgccatttcgttgtacatgtgttcaacagcgcccgttagagtagtatcgcgatattcctttgacatggtgtgataa

SEQ ID NO: 207926 - DNA, 424 bp, Glycine max
agcctttaaaataacgatcatatggtgtgattatctaatggactcaaatttaaacattacattaacttgaacatcgtggaaacaattaaaatctgcatgaaaaactacaattaagtaatactaattttgcatggaatatgcacgtcgtcttccatttccattacctgttaactaaaaacagctaaaatttctattggcccaaattgttcctactacttagactgtattaagacctttagcatgccatcgttagttctcagcttaataatttcatatctgataactttatctaaatactcatagtagcttggtttttgaaaaaaatattgccttatcatttgtgattcatgaaaaccatatgggggaatcccataaggtgcaactcactggatcaaatcctctaatttatcgatggtacatctag

SEQ ID NO: 207927 - DNA, 396 bp, Glycine max
  unsure (1)..(396): unsure at all n locations
gaatgggtatatctcggagaagcaaagcttcatggtgaatcaaagatgattcaaaggtgttttgatgataaccatgatgataacaaaagatgatgacataggtgatgacaaaaatctcaaagatcaatcaaagaacaactcatgtgactcaaagatcaatcaaagaacaactcaagtgaatcaagaacaattcaagagttcaagataagaatcaagaagaattcaagactcaagaagaaagtgaagagtcaagaatcatgattcaaggttcaagatctcaaanatcaagatcaagattcaagaatcaagagaaggcttaatcaagataagtataaataagttttctcaaacattgagtagcacatgaattttctcaaaacattgttaccaaagagt

SEQ ID NO: 207928 - DNA, 426 bp, Glycine max
  unsure (1)..(426): unsure at all n locations
agctntgattccaaggcctagggaatatgaggggtaatcattctagcccttatgaaactacatacatgctaaaaaatggcaaacatacacataccaaattgtttcataggttattccccacaaaatcatgcgcaaatgccatcgaggcatttcaccgaacacttggtgggcatatgtttaggcatgaattgtatgggaatgggggcaatgtggcatgcccaaccttttcaaaacacaacttaggcctaaggccattgcctacaacctttcaactcaacaaaaacaagcaccgattcaaagaaaaaagcctcacggatttaagaaagaatgagcaaaataaggtatcaaaatgcaacaatggtgagccaaggaacaaagggttggacacttacttgtatggagtgaacaacaatgcctaatggaacc

SEQ ID NO: 207929 - DNA, 361 bp, Glycine max
  unsure (1)..(361): unsure at all n locations
gacaagcatcactcctcttcagatttcttctatgtgctcgcgacnnggccctttctttccttcgcaacttgaggtcactattgctaccccatagagctccgcgaaatttgttccggccatactcttcctttgcagccctcttggtctcttgttcaaaggctcttgcgggaatatgtattctcttcccgaaccccggacactccctccgaacgtgtgtagcagccaacttgaaattctccttggcgaagtttgcctttcctaactcgcttttgagagcttggacttcttcgtcctcttncggtgcttcaaaattctcttcgctgacgactnttaacttggcgagccaatctaaacctcgtat

SEQ ID NO: 207930 - DNA, 423 bp, Glycine max
  unsure (1)..(423): unsure at all n locations
agcttgcatganttacaattatgtgctactaacttttttttgtttgancaactacctctactttcttgttagttgtctggcgtatggttctagttgggcaaaatcttgaagcttctacacgcaaggaagaagagtaatttgattataaggacttacctacattgtagattagtttttagtttacaacaagtacaaaacatattttaggaaatcataacattggtatttgttttgtctggaaaactaataggtgaaaaacatatatgtgctaagagntttattgtgctcttgcatggtagaggtagaataatgatgcaaaaatggaatgaattatgagaataatgtagctttcccacactaaataccgctattgtagtggaaacttttacatggtaattaatgaacttagttataccattatca

SEQ ID NO: 207931 - DNA, 361 bp, Glycine max
  unsure (1)..(361): unsure at all n locations
agcaattcttggtaaaactaactttccaaattgttgcctttgcaagaatggccccgaggaagcttgccccaaagaggtccaggaaggacaaggcggccgaaggaactagttccgctccggagtatgacagtcaccgctttatgagcgctgtacaccatcagcgcttctaggccatcaagggatggtcgtttctccgggagcgatgcgtccagctcatggacgatgagtatacttgattccatgaggaaatatggcgccggcggtggacatcactggttactcccatggccaagttcgatccagaaatagtccttcgagtttatgccaatgcttggccaatagagganggcgtgcgtgacat

SEQ ID NO: 207932 - DNA, 426 bp, Glycine max
  unsure (1)..(426): unsure at all n locations
agctttgagcaaactgtaacgacaataactttttactttgttgtccgattttgtcccgnagtatatcgagatgctcgaaatttagaatagaagctctgagcaaactgtaacgacaataactttttactcgaatgtccgattgtgtcccgtagtgtatggagacgctcaaaatttcgaaaagaagctctgagcaaaatcaaacgacaataactttttactcggatgtccgattgtgtcccgtagtgtatcgagacactcgaaattccgaaaagaagctctgagcaaaatcaaacgacaataaattttatttcggatgtccgattgtgtcccgtagtgtatcgagacgctcgatattcagaaaagaagctctgagcaaaatcaaacgacaataactttttactcagattaccgattgtgtcacgtagt

SEQ ID NO: 207933 - DNA, 355 bp, Glycine max
tcaataaacataataacaatgtagcaaacaaactttcagagtcaaagaactacataggtctgaattcctcatcgcacctgaggatatgtaggagcgagggaaacacctttgtcgaccccaaaaagataataaacgtataaagggaaaatacacaattctgaagtcatgttttgcacactcaattaaaggttgtcgtcccttgtgatgggagtgtagggtgctaataccttacccgtgcctaaacaactctcgaaccctcatttttaaaatctgcatacctttggtggtgtttgagtttttctaacttgttcctcgaataaacgttggtggcaactccgctcattttcttccttgg

SEQ ID NO: 207934 - DNA, 421 bp, Glycine max
agcttttcgattcattctatgtacccgtggaggtcaacattgggtttcgtgtatatttattctcgtttcatttactttttatacccccttttgacgtgcttaagccattttatttaagtcatttctcgcttaacctaaaaataaaataaatttccaccgatcgtttgaattgtattatccgataatttcggttaaaatgaattccgaccgttaggtcgtgccgtaaccacgttggaaatcaaaaaaagaggtgaaataataatataataacaaaaatatataccttttagtaaaataaagcggaaaatcaatcagacgttttctctttgggatttctcatttcttaatcgaattgactaataactaaagtgaaactaaggctaaaatcaactcgcctaatcaagctcgtccacaaaaatag

SEQ ID NO: 207935 - DNA, 341 bp, Glycine max
gagaggcaaatctgatcatcatgctttgatgaacgcaaaagaaacaaaaaaaaactagggaaaatgaagagggtgagaatgagggagaagcccatgctgagactgccattcctatatagccaagtttcccaccaacccaacaatgtcattactcagccaatagacaaaccttctccttacccaccgcccagttatcgacaaaggccatccctaaatcaaccacaaagtatgtctaccgcacttccaatgacgaacatcacctttagcacaatccaaaaacacccgccaagaaatgaagtgtgacgcgaaaaagaaaacttgtagaaatcacccaaattccg

SEQ ID NO: 207936 - DNA, 422 bp, Glycine max
  unsure (1)..(422): unsure at all n locations
agcttattaattagtgcggtcacattcaaaacctgtttcgnggttctttttttttaggttggcacaaactctttgactaggtcaccaatgttgaagttacggaccttacggtgcaacttggtatcacacactcatgatctcggcggcaactatcacgttttcacgtcaaagttcttacacagctatagttgcaacgacacaaagaacatgtgcatttccatagcttagaagtcgatgttgcaagagataatataaacaacaaaactaagattaagatgaacgacgtataaataaagaacgttaactgtgagatccataacttacctgtcatgttagaattaatattttattaacccttgaactggaaagtatgctatgaagtctatctctggccaattggagcactcgaaagttctggtcaa

SEQ ID NO: 207937 - DNA, 322 bp, Glycine max
cacctgccaataaatagaaaacctagcatcatataacatttattaataacagccaagaaaatataatgttatctctctctaaagggagggaaagaggacaaggtggatgccaatagctctccatgcaatgccaaaaaaagatcatcataaggccgggtcttcaatattaaacattcagaagataattactagctgataaaatcccatcatatctcaacaagtacgcgaaatgccactcttctatataaaaaaaagaagtacaaaccggaaaatccaactgcttaagaagcactgctgcatcagctctcacttgtattgagtc

SEQ ID NO: 207938 - DNA, 422 bp, Glycine max
agcttaggcgaatgcagtcgaaccgggagttttttcttgcggcccgctggagaaagaagcggcatttggagaacctcatgaaccaactgaaccggttgagaatggaaaaccagaaatatagaaaccggttattcttaaccatgcaccagaatcttctactctccctggagaatgaacgtcttagatccgaatccatgacccttatggctagactctcggatctctatcaaattttaggcaccatgatttcacagtagtagtgtcacatagtgtcaaattttaactaaaagtaacaacaacaaaaagagactatgtgtatatgaattgagtacgtaccacgtcgtttagcttactgtataataaattaagctcgtgattatgtacttactagaaccattaaaatttggatatggttacatgtg

SEQ ID NO: 207939 - DNA, 420 bp, Glycine max
  unsure (1)..(420): unsure at all n locations
agcttctagccaaatggacttaccttgaattattttctttgatagcccttttgagccttgtttccctttccttgttttgaagctcactacaagccttaagtgaaaaaccatgatattaccatatccttaaggaattttggagctttggaattgttttgggaataagtgtggggggttttggtttcattggacaacttgttttgttggctatgcttcatgatgntatttgggccatacttgatgtacattgtatattggttaaatgtttgacatgctgaatgaaatgttgtttctcaaaggctaaagagttcaaaaaaaaaatcgaaaaaaagaaaaagacaagcaataaagttgagtgaataagatcttaaatggcacaagaatgatgaaactcttggttctactcttcatgtntaattt

SEQ ID NO: 207940 - DNA, 411 bp, Glycine max
  unsure (1)..(411): unsure at all n locations
agctngcagccattagaagagaatgagcatgtgtttggaattatgactgaaaatgttagtcagtttgttagattgattgtgaaggaatgcattgaccgtatcctggtgagagtgtaatccttaaattttgagagaaacgactatcatttagtactgatttttgcgtgaatctctgaagtatggactgaatgcatgaaattgaggatgataaaggccatgtttgattgtgatagccatttagccaaaaagctgaccatgtgcttgaatgatttatcccttgcaaccagtttgagttgaatgaattattgattgattgaaccctgagcctatacagtgttatctcctgctaccttggcttagattgtaggagagcatcatcacaggaagcgtggttcaaagcaaatttgtccc

SEQ ID NO: 207941 - DNA, 332 bp, Glycine max
  unsure (1)..(332): unsure at all n locations
actctggtggcnatctattcacacaaaccaaggccatgatgganaataggtaaggtagaaatgatcatagttattggcggaaatattgacttctgtaactgctactaagcttgcaatcgaagacattgtatatatgttgatgaattttccattcactaacacaaatttgtttaatttgtacgctcaaatctattagctcatgtgttcaatttgaaatatgaaatttctattntacatcttttatttggcattatgtaaccttgtccagcacatcacanaattttctttgatttctcttcgccatagaatagacctgttttatatagntctac

SEQ ID NO: 207942 - DNA, 419 bp, Glycine max
  unsure (1)..(419): unsure at all n locations
agcttataaaaatggaagaaatggggaggatctatttcccatttaaaatcctatcatcttatagaaaaagataattgaggtaaaagttacatcaaacaaaaattatgtgaagaggcattatgctatatgcattaaataagaaatagctgcagcaacagccataggaaagaccttatacaaaagcatttccccatgctcacaccgttcattttctggaggataatcatcttccaatgtcccttcatacgcttccagaatttcaatagcctttgatgcactgtttcatattaaaatggtcagtacaacaaactatcaaaataaaattatgccatttggataactaccaatactgaagcctggttcctagcatgatccaaagcttaacagcggaattntgatttcagagcaattaatacaac

SEQ ID NO: 207943 - DNA, 412 bp, Glycine max
  unsure (1)..(412): unsure at all n locations
tcttcatggttngagaggatgatnaaagatggaatattcctatctcatttacttcttctattctcattgatggttacagcaaaacanatcaagtagagaaggctttgttgcttcttgaggagatggatganaaaggctttccaccttgtcctgctgcctactgcagcctgatcaacacccttggagtagccaaatgctatgatgttgcanatgagctatcccaggaattgaaagagaactgcagatgttcaagtgctcgtgtgtatactgtaatgattaagcattntggaaaatgtgggagactcaatgaagctatcaatctgtttaatgagatgaanacacttggatgcacccgatgtttatgcgtaaaatgctctcatgactggaatggtaanggcagaaagagtggatg

SEQ ID NO: 207944 - DNA, 419 bp, Glycine max
  unsure (1)..(419): unsure at all n locations
agcttaaaagaatacttagtattttctcttattatagnngcacaaacacttggtttatactggttcacttaaacagagtaatgtccaattctcctttatgcaattgtaaagggtcctactaataaaaaatttgtttacaaacaagtattctctcttgacactcttggctataaaagtattccttttgccaatcttggcatacgcttagactccccttgaatctaaaaccacccaagtattgtttaatactaagccactcttggctttcacaaacaaaagtttaaatgactacaatgattcaacaacactcaaagagtcaataaacagttaagttcaattacaaataactctgcttagcaaagagtaaagaagttcacatgctgagtacatcatccactataattgcagagttttgtttc

SEQ ID NO: 207945 - DNA, 260 bp, Glycine max
tctctcgaggcaactcgagattgtaacagatacactcagtaagttgcccactccactgtctattggtcaacctacacattcttctgatctgcaagttacaggttgtaccatctagggcgatgctcatgaaacacgccaatgtattcccattgaagaaaacactcaacacgttcattatatgcgtggctcaacctacccttcggcgggagggagacgcgcgactcgcgggtgcgtcttccaataacggaatacacgtggag

SEQ ID NO: 207946 - DNA, 427 bp, Glycine max
agcttagctgaattcagattgaatcaaagttatcttatttcatccttggccagcttagtggaccaaatcagcctcagatgcaagggttgggcgctaagcgaccagtgtctttctcagttttatttttcagtttttaaaatttgaataactgtgtcctgattaattgttggattcctctgtccacagatggattccagaaagagaaaaagcattggtacaaggcccacatctcattatgacacaaggagattctcttcattagatgcttggaccaaatacactgataatgtcttgggaagaaacattttacctgagaggaaagtagaactatatcacactgagctaaatgactttaaggccgagatggagaggcgtaattttcataaacgcctcaccaatttagctgatgggagcatatacctggctt

SEQ ID NO: 207947 - DNA, 377 bp, Glycine max
  unsure (1)..(377): unsure at all n locations
atttctccaagaacaccctcttaagatcatcccaactganaatggacctgtgagcaaggtagtatagccaatcttttgccactccctcgagagaatgaggaaaaggctttagaaagatatgatcttcttggacatcagggggcttcatggtggaacaaacaatatggaactccttaagatgcttataaggatcttcacctgcaagaccatgaaacttgggcagcaaatgtattagtccaatcttgagaacatatggaacaccctcatcaagatattgaatgcacaagctntcataagtgaaatcaggtgcggtcatctccctaaaagtcctctcacgaggtggaggttgagtcatggtctcagtatgaaaattagta

SEQ ID NO: 207948 - DNA, 428 bp, Glycine max
  unsure (1)..(428): unsure at all n locations
tgcttgaccaatcctgacccgacccgggcatatttgtttattgagaacctgngatgtacctaaacatgcgagctcctggcagccaacagataaaaggaacaatgaccacatagcaaggaggcttatggtggctggccagctgtgaactttgtgtgatatatgggttattgcctctggtaatcgattaccaagggtgggtaattgattacaaggcttaaaaatgaaggcaggaggctaagatggcctctggtaatcgattaccaaggggtgtaatcgaataccaggcttgaaaacgaggtcaggaaaccagatgagcttctggtaatcgattaccaaggggtgtaatcgattaccatgcttataaagggaactgggagatggtggaggcctctggtaatcgattaccagccttgtgtatcgagtacaca

SEQ ID NO: 207949 - DNA, 383 bp, Glycine max
tggctatattattatgagaattgaacaaatggcctatttgcatggtatatggtatttgaacaatttactatttccttatttgcatgggatgtttgaacaaatattaaatatggtattcgactatatggggtttatagctaatctatctatgattgctacttcatgattcttgcttcatgggttgggtgatatttttccatgaagattgtatagatgatagattatatctgtatactttaagtgtgatacgcacttcggcgttttgttgatgcccaaggcggagaaaaatgggattaaatcaagacttcacatgaggtatcgacttatatttaaagataagcattaattcacaaacaaacggggagaaattatgtgagtgatcg

SEQ ID NO: 207950 - DNA, 429 bp, Glycine max
  unsure (1)..(429): unsure at all n locations
agctntgagacgatcatccaacggattttcatgtcgtttttgaagctgcattgacaaatgttgttgcccaggttgtatgacgctagagccactgagctgctacaaggatacagcatgaacaaatatgttaccttaaacagataaatagacaggaagtgaaaggataagcaaataacttatctattataaagaggaacataatcttgttattctgctatgacctttatctattaataacaggtttctttccctacaattagcacagaaaaaataccactgcaataggtcccacagaataatcattaacaacctatcataatatagtcacatgtaaatgggaaacaaaaacacctcanagttatgtagctgaccttccagccataggttcagcaaattactattattcagagaagcagcatagcctataat

SEQ ID NO: 207951 - DNA, 317 bp, Glycine max
  unsure (1)..(317): unsure at all n locations
actgatacatttgactccccagcaatacttagaccccttcttgcactttgtattggaccatgattcggagttgaccagtccaatcccatttgatgaagtttgagagaagcatcaaagaggtaatggtaacacttagaccgcgaggacaaaacataaatttaccacaggagtgttatactttatggaaactccaagtatgagcatgacaactgtaaataacaccctccccagggtccccacccaatataaactgttatttagaggagtatngtattccttggaaactccaagcagaatcctaaggaaaaaacatatat

SEQ ID NO: 207952 - DNA, 424 bp, Glycine max
  unsure (1)..(424): unsure at all n locations
agctntacagcagattttagtaatgacccactactcagatttaaaataacttaatgccattaacctagggaattaaaaaaacttaatggctgagtgtaactgaaattgtggcaaccaaaagtcacccccaacagccaacaagtcagccaccatttggtctcccaaaaggctgatgcctaggttgtcaattgggcccttattacaacttgaactaaacctaactaaagcccttttagttgattaacccaaaacatatttttggtcagccaactttacaaggattgggccattatttagacaaactaaacactctaaaattgagacaaagtggtgtcatttagtcctcctccatttgggccatgatacaactcacaaccttggacttttctccttgaaacttgggcttgtattcaaatagtatgga

SEQ ID NO: 207953 - DNA, 415 bp, Glycine max
  unsure (1)..(415): unsure at all n locations
agcttataagagcaaaattgcctaaatcattttcaaatttgcttgtgaattaggaagcatcaacaagaatcaagccaaggctattgtgcaagcaatcaatggggcaaaacacaccaaaagattatgatgatggatggctcaaattctcacaaaggtaaacttattactttcaaattgagctttcaaaaatatcatgacatgtagaggaaaaacaaggatttcaaatcacaaaatgtcaagagacttttattttcagaacaattacccatttcttgaacatatcctataattcaaagaaaaatgtgcaaagttgtacatgcaaacagaattgacctaaaatattaaactagaaacccaacaaaactaacaaaactaaaanaattaatacaaacaaaactaacaaaactagcaaaac

SEQ ID NO: 207954 - DNA, 437 bp, Glycine max
  unsure (1)..(437): unsure at all n locations
gctgtccccactcaaaccctatggagaactctatccttacttattattgacaggccttcttcggaagttcagaatggtgaacaattcaattgccactggccattacaatcaagtgattatgatatgaaggcaatgtataaggatctagttcattcacggcctgtggatggngatgatcacgagaaacaagaatctgttatgtcagatatatcagcaacgtgtgggattacaattgcctcagattctatagttgtagagcccgatatttttatatttgatgagttctgggaggggttcttcaattccacttcagatatcacgttntgtgggccagaggatggacacaagaatcaatcagagaactccgtaagctctctaatcaattcatgtttgctgcccattcaaaactttgacatgtcaagtatattgtctcttac

SEQ ID NO: 207955 - DNA, 423 bp, Glycine max
agcttgtagaatggctagacataatacatggttgtgtttggtttggctcaaggataaaagggatgccccacattatttccatgacacaaatgcaaaaatgatgatttggaaattttatgcaaaactggtcatgcatgcacctatgcggacactcaagtgtcaaatttttatggtcatgtgatgctagggctcaggattcatttcctctatttttagtcaacccaatgtttccaaaatatgttcttttatcaatttgtgcattcatccgagtccattgtgggcgtccgggaaaattttcacagcattcacccttcaggtgtatacacatttttcaaaaactagttatgatcagtgaattttttcaaagaaaaagtggaagtcatctcttttcaaaagcatgttggtttttcagctacacaactt

SEQ ID NO: 207956 - DNA, 366 bp, Glycine max
  unsure (1)..(366): unsure at all n locations
atgacactcgaatacttagnatttcttttattaattgattaatatgactgaacatgatgattatatttacttactcttgcggtgttatgggtttgaagttttaaacttaattattttgatgatatatgactagaggtatgcacttttatttggttattatgaatgactttctagattatatgacattctatgaagtattatctttctaagaatgatgaatggttaagatatcttgtttgattgtttntctattcttgngtatgtcatttatgtatggttcttatatctcttaaactgtctaagtntgatgaatgtgtagaatatcttgcttaattgttttctgttctcttgcatgaataggttata

SEQ ID NO: 207957 - DNA, 424 bp, Glycine max
agcttagctaaaaggctagacacatcctatcctatactgagaaccgcagttgtgtaagaaaggcccattactcggcccatataacttctcactctagactctaatgaactgttatgttcacaagcgggaaggagaaaagagagattctaatggagggaaggagaaaaggggaagaattttaattacacattatgtttgattgataagagagttgagagattataattgaggagaggaaaggaaatcgttttctcgttatgattacaagaaaagaaaacggggttttaaatataagtttttgataacaaataaaaatattttaataattccaactgaaatattttaaatttctgttccttctcctcacatccttccaatatgtgaggggaacaaaatttaaataagagattttgctcctatattt

SEQ ID NO: 207958 - DNA, 277 bp, Glycine max
  unsure (1)..(277): unsure at all n locations
ccaacgccagcaacgcaacaatctcaaacatcggaacgagcaaaacggcaggcccaactcgaagcgaacacagcagaacagagntgagcgaataaatgtggaaaagtggcagaacacacactaccacatcgtcgctgcgaaagtacaaattagggttctctccgtcaacctgttgagccacgctcgtaacgagtcccttgtgcgttagcatcactcccttcggaagccccgtcgtgccagacgagtactgcagcgcaaccacgtcatcttgagatat

SEQ ID NO: 207959 - DNA, 356 bp, Glycine max
gaccatactggggcttccctaatgagagatctcgtgagagtacaaaaacaataatataaccatcctttgtgtttttcgtaatcttatgcacaaattactaatttgactttacatttatctaattatgcaaattactctcaactaaatattcttaaacgtacaataattcctgagttgttttttattacccgaaattgcacatattcagcttactaattctatcctaaattcctacacactgacttttacattatctatttatgatatttaaaaaaataatctatatgattttttattacttcaacttacttcagatataatcgcaaatacagatattaaaatattaacttagatag

SEQ ID NO: 207960 - DNA, 424 bp, Glycine max
agcttataagaacaaaattgccttaatcattttcaaatatgcatgtgaattaggacgcatcaacaagaatcaagccaaggctattgtgcaagcaatcaatggggcaaaacacaccaaatgattataatgatggatggctcaaattctcacaaaggtaaaatcatcactttcaaattgagctttcaaaactatcatgacatgtagagaagaatcaaggatttcaagtcacaaaatgtcaagaacttttattttcaaaacaattacccatttcttgaacatatcctataattcaaagaaaaacatgcaaagtcgtacgtgcacacgaaattgacccaaaatattaaactgaaaatccgacgaaactaacaacattaacaaattaacacaactaacaaattaacaaaaccaacaaaactagcaaaac

SEQ ID NO: 207961 - DNA, 454 bp, Glycine max
  unsure (1)..(454): unsure at all n locations
aacctaagagatcttctttcatctcctgaaggaactaacggagaaatatatataggtgagggggagttattgtttgtttacagcttttgataccatagttggggtcaaggaacccaattatggngatgtatttttgtccttgtgcatgctaattttcaagaaaacactgtgttttaactaatgggatgtgatatatttgttattgatgtgtatgttaggtttcaagaaaacctttgtttttaactaatgggatgtgacatatttcttattgatgaatgaaattgtgaatgatgttaacgctgtaatgattggaatttcttggaaaagtctaattagataggaaactctgcttaaattttatatttttcttctgttactcattattaaatttatatggcataagagttgtttgatacctagtctctctttattaaattttcttaagatcagctat

SEQ ID NO: 207962 - DNA, 414 bp, Glycine max
agcttgtccaagttatatagctattgtttaattttcttgcagaatctatgatgttagccattccaaaatcacatttcaggaagaaaacaacatgccaggataatgaaggcacaaaaatagatgcccctcaaagttctgtcacctttgtttatcaaaccaaagtagcagaattattacgaagtataacaatttcatggtgcaaggatcctacagatcatttcctttccatgagcgtcgacaacactttggaagagaacaagtacacctgcaagattgatttggaatctggacagtcttggtgtaaaaagggtctcaaatcatttgaaataacgggtgcaagagtagacattctttgggattttctacgtgcaaaattctctgccacgggtccacagccttactcaggctattatg

SEQ ID NO: 207963 - DNA, 305 bp, Glycine max
  unsure (1)..(305): unsure at all n locations
ctgactctgaattccacaaccatgtaaggttggttcactaaaattattaagcaggaccaggttcttttttccaagaatcgccaaataactctatgtgaaactaattctatgataaaataaaaaacttgattttttcattatagtacctggtcaggaatccagaatctaggaatgccaaaagaatgaatgagatcagaaccacagagaagcatgacctttaaggattctacactaatcaatacaaagcaaattattgtattgttactacacttgtaanaacatgtatagatagaaatgaaattcta

SEQ ID NO: 207964 - DNA, 377 bp, Glycine max
gtgtgggttccattccaaaatccaaactaataaccaaaattagtcattccttgatccacatggactttattgggcttgtaaggtggtcaaggggtaaaagggctatcatataaaggatcagagaggcttcaagagtgttaaagggttgtattgaaaagaaaccctgagagccttgcttgtactttaatcatttaacatttgggtgggctctctccatttgcttatacataatcttatacaatttggccttctagaaaattggagactttgcctttgtttctcccttgcggattttttgttttttacattgtgtgctacccaagctataactcacctggcgttgattgtttccgcataacatggcgaccaaatttttt

SEQ ID NO: 207965 - DNA, 385 bp, Glycine max
agcttctttagctggtggcatgcattagcaatctctattacgccctcatcaccaacggtagcaacattccatagagaaagagcctctcaagaagggcatccacgagcaacagccttgagaccatgactagccaccccacgaaccctgttgcttccacggattgagagcttacccaatcctccccgagacgaagagccaacagctatggcagctagtctaacatctgttgccatctattcttccaagcttcgagagagatatgcctcacctccaaattctacatcatcaccctccttttctatggtctctacagtggcattcttgttaacacagatttcatttttgaaaaactgcttagaagcataagccatcgcttggaaacaca

SEQ ID NO: 207966 - DNA, 297 bp, Glycine max
ctttctctgattggtgtaaagatacaatcttcgctgatgagaatgcctcataaacattaagaaagctagcagattggcctaatagaaatgttataacttgtcaaggatacaacataaacaagttattcttttacacaaaagcacatgacgaaaaaagtacaatgcataacaacggtgtcaccctataggcagaatctcaatacttcacaagtgtgcatgatgacaatccctatgtagcttcatcccttactttgagtcattgatgaaattgggccttaactatgtcaatctattggt

SEQ ID NO: 207967 - DNA, 418 bp, Glycine max
  unsure (1)..(418): unsure at all n locations
gctgcagactatactttgaccaaccggccgtgttttgtctcggcccggatttaaagcgggttgcagcaccggctccgcttccctaaccgtactggaggcggttgccgtggctttgtcctctatggntttctggagttttaacatgaccttcgagatggaagccatttgatcttttaaggccgatagatcagccttcatctgttcctgcacgccctcttcattatccatttttctggatcgagtgctataggggtgccttggtgttntcttagttatgatgaatttcctaaagaaataaacaaaggtgagtatgccacccaaacatgaatatgcaaatgaatgatcggtgcacttggatccacactaaggtttttaggtaacgtaatgagtccagaacttctcattttataaaaagaac

SEQ ID NO: 207968 - DNA, 424 bp, Glycine max
  unsure (1)..(424): unsure at all n locations
agcttgtgtcacgattcactgtgacagacaaagcgctatttacttagcaaatcaccaaatgtaccatgagaggacaaagcacatagatgcgaaactacacttcatcagagatgtgattgaatctgagaaggtgaaggtcgataaggtttcaacagaagaaaacccggctgatatgtttacaaaatccctctctagtgtcaagttcaagcactgcttggacttgataaattttgaggatgcctaaagcagattggtagaagtgcatccctgaatcgcaagataagcacttgttgatatggagtcaaggtggagatttgtggtgtgtgactcanaatcacaaatggcacaagtgggaagactttaagaggtgctatcataactaaattcagttatgataactgaattggttttggcaccaaagcat

SEQ ID NO: 207969 - DNA, 421 bp, Glycine max
  unsure (1)..(421): unsure at all n locations
agctngcatcaaagatgtatgaaattgaancattcgcaagataaataccattaactacacgaaacgagatttggagaaagagagcgatgcattgaaatataaaacgaacctgaaattgaattgtgccgcaccaagatcatttcttcgatcggcgatgggatgtacagtgttttcctccgaggactaactgccaagtgagaagaacgaaattcttctaacgcacctgttgatcgaagatgccagcgtattaaatttattatacaggttaaggttatgcaccaaaaatatacaaaacatacctataaaaaattctggtttaagaattangagatgaaaaaaaaatccacatagtcttttatattaattaacatttattaaatacagagaacagaatttatagttaacttcttaataatactac

SEQ ID NO: 207970 - DNA, 327 bp, Glycine max
  unsure (1)..(327): unsure at all n locations
tcaaagctgaaccaccaagcacagactatacctcaaaggntaaccacttggcagaagcaacgatgcttaatcatcaagagcagaagcaaaataacaattcaatttttaaccatccatgaccaaagcttatattatacttaatcaccatgcacagagacttacatcaataaaatagaagaatcacaaaatcttgcttctatgaagaactttcacaaatactttgtgaaccaacaataactaatgcttaaccactcatgacttaagctacaaataaacatgcttaaccacacacatgggagaactaaatcatcaacagccaacaatagc

SEQ ID NO: 207971 - DNA, 424 bp, Glycine max
agcttgagaaaatcatttcaaggaccaacgccttaacgattctctccgcctttcaaacttgagaagaccgtttcaaggtccaacaccttaaggactctctttttttttcaaaaatcaaaatattgtttcaaggaccaacaccttaaacgacttttgttctcaattaaaatcaaatctttcaaaaaaacataaaaataatgtaacacaacaaacactcagatgaaagaactacgtaggtctgattttctcatcccacctgagaatacgtaggagcgagggcagcacccttgtcgaccctaaaaaataaaataaaaatataaaaagggaaaatacctaaataatacgaaaaggagaaaaacataattttgaagtcatgttttgcatactcgattagaggctgccgtcccttgtgacgggcgcatgg

SEQ ID NO: 207972 - DNA, 314 bp, Glycine max
ttcatgtagatttttattctattagtgtagagtatgtagagtatagactatagtatagagagaaaatatatttgcgatagggtataagttattaagttaaagcattaggttgtgacttatcactccttaaccaataaaaagcttaaagttggtttttcattttgttttaaagatgacgaatacttttgccagagggtaataagaatttatgatataggaacacactgtaggttctgcttataaactttccaaagaaaaggtgcatatagtaatgataaaaaccttctagtggggtgacagatggtaactgacag

SEQ ID NO: 207973 - DNA, 413 bp, Glycine max
agcttccccaacatgaaagtgagacagcattcattacagcacaaactatcacagccaagaaaacagagcaaaggcagaaaactctgccaaaacaccaaccaaaatcacagcttttctcacttaaagaccccagtaacaattccttcgttccaattcgttaaccgttggatcgactccaaatttttactggaagtctctagtacataagcctacattttgaccgttgggatctactagcaaacatccagaactcattctgcactgctctttccacaaccagcaaatgcctagtatttttctgcacttgtgcaaaatcctgctgcacaatttcacagcaaaaatctgcacaaaatgcagatttcgaaaaccacactttccctcatccaatcttgcccaaatcaaatcctacaagt

SEQ ID NO: 207974 - DNA, 462 bp, Glycine max
  unsure (1)..(462): unsure at all n locations
ctatgtatggcagagcttcattactgttgnttcagacatacaagnggagctgtacaaatcttctacacttggagtgatcacctgcagtcctcttgaacccttaccacccactctgtcatcatgctgacactcaggaagcccaacagctntagccttctctaagtattctgaacaaaattcaatggcttcatctgcaatgtacctctcaacaatagatgcttccggacgatatagattctttgtatacccttttaagatcttcatgtatcgctcaaccgggtacatccaccgtagataaacaggaccacagcatttgatttctctgaccatatgcacaatcaagtgaatcatgatgtcaaagaaagcanggggaatatacatctncaactggcacangataatngcgggctcattntccactcatanacattactagatcaaatcacttgctcatatagcatg

SEQ ID NO: 207975 - DNA, 424 bp, Glycine max
  unsure (1)..(424): unsure at all n locations
agcttggcgaanaacgaattccctgtccaatgtcttgtttggctgccccagaaatggaaggatcctctcgccgaatgacattntgtagcaccaccccacccagaaaacaagaaccgccgcaaaagcgtacagggccatgaaggcagagttcaaagcccattaatttcttcttcactatgctgccgtagaggatgaccaagcccggaacgctctgcaggcccaccagagtagctgacgtcagctgccacgtgttgtcacccctgttcatccactccgggcttccatcaactggcaacaggtttgatggtaggcgactcatttcttatatatatatatattcttggaaaagattgattcagtatttgagaaaatgaaaaaagttaagggataatcggttcaaattctttaactaattcttttaata

SEQ ID NO: 207976 - DNA, 413 bp, Glycine max
  unsure (1)..(413): unsure at all n locations
attaattacaagtgaattctcaatactaaagtaatggttcatacttcttaatctaacaactattttgatacattattattttttattttacgaanattacaaacaaccaagattaattaaaaattagaagacatataaacaagttgcatagaaaaataatacggtagatnttacaaaagtttaaactgtttgacacttcttatttactttcacacataaatacaacaaaaatgtgtattatcttgaanatgattacaagtatgacaacttaacgataagttgctatcacattaatacaaatcggaatacctaggagttatataagagatgataaattaattttcacaagagttctcttagtgtcacacaacacacttgtcttctcttttgacttgatgcggatactcaacatg

SEQ ID NO: 207977 - DNA, 419 bp, Glycine max
agcttaggagaacgatcttggaagagggtcatatatgtagtctaagtatccacccgggagcgactaagatgtaccaggaccttaggcagatgttttggtggtcgggtatgaagaaagaagttaatgagtttgtccttgcgtgcctagtgtgtcggaaagctaagatagaacactagaagccttcagggaagttgcaacctttagtgatacctgagtggaaataggatagcatcttcatggatttcgtggtggggttacctaggacccccaaaggtttagattccatttgggttattgtagacaggttgaccaagtctgctcacttcatcccaattaacataagatattccttagagaggttgactagcttctatgtcagtgagatatgtagactacacggtgttccttctagcatagtc

SEQ ID NO: 207978 - DNA, 371 bp, Glycine max
  unsure (1)..(371): unsure at all n locations
tctagaatacttttatttgacacttagtaaagataaaaaaaattgaaaattagtgaatgacacttacaaatgagaacaaagcttctcatagtcacaacgacaataataagattatagttgagggactccatggaaagttatgcacaaggaagaaaacacaagaagagaaagagaaaacatttttagttgtttctatttcatagcttttaaaacaccttttttttataaaaacaactttcaagatttaatacattntaaataagggattgattagtgaaaagagtaaaactgttctagaaaactatctttaaaatgaaaaaatataaagaanagcaaacagtcacaacatatttcatgatgcatacaaagca

SEQ ID NO: 207979 - DNA, 417 bp, Glycine max
agcttgtcgcccagctcaccgaagcgagctcagctcgcccaggcgagcaaggttgcttcctccagaagcaacagccttctggaggaatcttctggagggcccaagtgggcctgattgctatttgcacccccctttctatttttttgtaattcttcttccgtaacgttacgaaactttacgaatttcataacgatacttattttccttgcgcaaggttacgaatccttacggattatgtatttactcttttttagctttcgaagaagttacggaaactcacggattgtgcaaaaacacctcttttcgatttccgccacattacggaatttcacgaatcacgcaagcctgcttcctttcgatttctgagacctctcgggacttcatttattgcatgacatcaagtaataatccccggac

SEQ ID NO: 207980 - DNA, 401 bp, Glycine max
  unsure (1)..(401): unsure at all n locations
agctttggaaaaggttgttttcacctttntgctaagccaatctgctggcttagcgagcatccgctaagcgcaacactcttgggctaagtgcgaggaaaaatctagaagaagatgagttgtacatgttcgctaagcgcaccgcttcatctctctaagtgcaccgcttcagttcatccgctaagcgagaaaggcgcgctaagccaaaaatcactaacatgcactaagcggtccatacgtgcgctaagcgcacaagcacgaacaaggccacctatttaagcctgaaatcagattttgtgaagggagtttggactgggattcagagatttgcatgtctagggtttctaaagagagaaaagtccacgttccagagagttttgagagattntgttgtgtgaagatct

SEQ ID NO: 207981 - DNA, 367 bp, Glycine max
  unsure (1)..(367): unsure at all n locations
tttcggacctatcaaactcagctttanatctagcatggcattgtcaaacttactattccctataatacaagggatgctgaatgtacctggatctttacatatttcaggaatttggggaacagatttacaaatcaatgcggagacanttttgtccatgctaattcgttcactttctttaagcttctgcttattagtgcacagctccttcaagaatttagcatatctttggaattgctttattgcatccaacaggggtatgtttacctctacttttctaaatgtttccaagatctctttctctgcctccttcaatnntttgntgggaactgctcttggagggaatggaagaaggatgtgctgcttctgc

SEQ ID NO: 207982 - DNA, 406 bp, Glycine max
agcttctcccctatttggctatgaatagggggagacacgaaaaaaaaacgggttcagccttcttggcacttctctctctctcgaaattgctgaggaaaattatttccgtgaagaaaattcaatgccgaggcgcttctgtaacgtttccgtgagtaattacgcgaagattctcgaccgttcttcaagaatcatcgtgtgctcttcgttctcttcagtcttcaccgggtaagtacactccaccgagctttgcaaatcattctatgtacccgcggtggtccatattttgcttcatgtatttttattctcggaatcatttactttctatacccccttttgacgtgcgtacaccatttatttaagtcatttcttgcttaatcataaaataaaacaaatgtccaccgatcat

SEQ ID NO: 207983 - DNA, 345 bp, Glycine max
  unsure (1)..(345): unsure at all n locations
ntataagcacgggtctgggagacgaaggttttgttttcttatatacgaagatgatgctncgagtacattggatgtggtatgaccatgccctcctgatcttctgctgagaatatggcgagtggaggaacgccccggcatttacgcaacgagcataatgtaaacctttacggatgtaaaagctctatatttgggcctaggctctatagttattcctttcgtcgaggctntgagtcttctgcttttgaatttataacacaaggatctttcttcatctgttcctacgactctacccattctcattcattggcatgtttacttctttttctgaaacggcagactcgatga

SEQ ID NO: 207984 - DNA, 82 bp, Glycine max
ccccccccccccccacccacccccaaaaaacccaaacacacccccaaaacccccccccacaaaacgaccccccgacaagccc

SEQ ID NO: 207985 - DNA, 387 bp, Glycine max
  unsure (1)..(387): unsure at all n locations
ctgcagctnttaaggaggtgagcttagttatgagaggggtatgttatctaagctctagttctcaaggaagctttctcaaagaagcttctcgaggaagttttctcaagaaagcttgtcaaggaagctacctagtctataaatagaagcatgtgtcattttgaattctttgacaagggacaagggaaagggaagaatcaaaagaattctcagactgtgtcattttgaattctttgacaagggacaagggagacacaaaagaattcaggcggttagtcctttgttcttttggaaaagggagaagagagacacaaaaagaattcaggaggttagtccttggtgaattctttttggcaaagggagaagagaatgaaaagatgaatagcacaa

SEQ ID NO: 207986 - DNA, 405 bp, Glycine max
  unsure (1)..(405): unsure at all n locations
tcacctgcggcatgcaagctntagtcaaacagaataatccgaaaatgtcaaagatttgggtgttgaanagcataacaacactttctgtgattggtttaaagatacaatctttgcagatgagaatgcttcaaaaagattaagaaagctagcagatgggcctaaaagaaatgttataatctggcaaggatacgacataaacaggtattcattttacacaaaagcacaagatgacaaaagtacaatgcagaacagcggggtcaccctaagggctgaatctcaacactttgcaagtgtcaatgatgccaatccctatgtagcttccatccattactttgggttcattgatgaaattcgggagcttaattatgtgaaatttacagtatgtgttttcaaatgtaaatgggg

SEQ ID NO: 207987 - DNA, 428 bp, Glycine max
  unsure (1)..(428): unsure at all n locations
gcttctttggaccttgaacaagcaattaactcctctttcgaaccatctatgtgctcgcgactggtccctttcttcccttcgcaacttgagttcactattgctaccccatagagctccgcanaatttattccggccatactcttccttgcgagccctcttggtttcttgttcaagggctcttgcggtaatcgcattctcttcccgtaacccggcacactcttttcgaacgtgtgtagcggccaacttgaacttctctttggcaagtttcgcctttcctaactcgcttttgagagcttggacttcttcgtcctcttccggtgcttcaaaactctcttcgctgacgacttttaactnggcgagccaatctaaacttcgtatatgaactctcagccattcgtggtacccaccaatgatgccattacgaatgc

SEQ ID NO: 207988 - DNA, 362 bp, Glycine max
  unsure (1)..(362): unsure at all n locations
agctngaagngagaaatgagagagagccagcctttttacttttattcgatgacacacagcggtacctggagatatgtcgcgggggccacgagaccttggggacgtcaggtggggtgctattgcccaaaaccaagcttgaccaatcctgaccctacccgggcatagccagttagggaaaacccgcgacgcacctaaacaggcgagctcctgccagccaaccgataaaagaacaaagaccacaaagcaagtacgcttgcggggtggctggccacctatggatcctgagagataatggcccctggtaatcaatcaccaagggggtgtaatccatcacaaggcttaaaaacgaacaccagaagtta

SEQ ID NO: 207989 - DNA, 362 bp, Glycine max
  unsure (1)..(362): unsure at all n locations
acaatgaacactttctagaagccaagtaggattacaagatatgtcatttgttacgagataaagacctcagtcctcacactgacactgacattcaactaattgttaagaaaatgattcatgtctttaataatctaataacagtagaaatactagaatcaaggtaaatggttcagctacaacaggagttgggacttgggagagggggagggcaacacgatgatgagatgattntagaagttacaacttgttaacttacactttccttggattcatctaataactgtatcgctcttctaccaataaagattaatcaattacaacatgcacatcattcgtgatgtatgaactaaaagctcatgaca

SEQ ID NO: 207990 - DNA, 384 bp, Glycine max
aagcacgagcccagctatcttattatggcttaagaaattttctttttggaattacgccttcacaaaaatatctggtctctcatagcttgagattatgcaacatgtcaatttgaggtggagagataaaagggacaattattactgccatttttgcaaaatgcattccattacttgtgcaagcaaaatttgaaaagaatatacttttgttgacctgtctttattcacacttgcctttcaaatgattatcaaatttcaaattaataaaaaaaaatatcaaagcttttaaaacatgaataatcctcttcatgaatacacatgtactattgtgaacattggatgataagctacttagaaaccattgggtgtgttatttatctccaatat

SEQ ID NO: 207991 - DNA, 334 bp, Glycine max
aacctactaactcatctatctcgcctccatgttcactaaaaacctcttgacgagctaaacagagagagagcaaaagcatcacttgctatcaagccacttctagaaaagacggaagagaaactgaagacagaactagaacaaaaggcgcaccattagtgacttgatggatctacacatactgtaatacacccttctcgacatgtatgctgcaacagatatcagggactatatcgcatatgttcaataaaatggctccttgacaattacaagacatcgaaactgacttgaagattaaacaacctaaggcattaacaaaggcacagctaaaagcacc

SEQ ID NO: 207992 - DNA, 330 bp, Glycine max
cacaacaagcggtacacatacacaatgcacgcacaaacccaccaaccccagtcgcccacctgcaactgagcccacgcaccccccacaggagcccataacctcgaacctctaaaccccggggccccatgaaacctctcagagcgtcccaagcaaccaagcaaaacaaacatccaacagcacaagctatcacagccaagccaaacagagccaaggcagaaaacttctgctcagcacatcaaccaaaagcacggctttgctcacttaaagaccccaaaaacaattgcttcgaaccaatccgctcaccggcggcacaacaccaaaaaaaaaccg

SEQ ID NO: 207993 - DNA, 371 bp, Glycine max
  unsure (1)..(371): unsure at all n locations
ttttaccatngttcttccttcccgcaatgcttcttttcatgtctgcctgagtgggcttatagcctaaaccatacttcccacgatttccttgagtatttatcaggctagttatgccgccgttgttttttcctaaacccatcccgggttcaaaaccgttccccaacataactcgggccatcattaccgctgcatcggacagacaaggttgcccaaagagggagtccacggaggaaatgctgaccacctcacaagactggaaagcagtttctaacgagtcttctgcggcttccacataaggcatggaggatgggcagcttaccaagatatctttctcgcctgacacgatgaccaagtgccccctccactacgaa

SEQ ID NO: 207994 - DNA, 386 bp, Glycine max
accgctgcagcttgaagctcttctatacgagcacaactgttgttatttgatgacctgacacattgaacccattgaacctaatggcgcatgaaattgagatccatttcaatccaaagcccccctcactttttctctaatggcatatcggaggaggacatctacaaattgtactcgatctatggtttccccttttcgaatttagggttttctcattggagctgtgtaaatttgattttgagacgtgtcccgttaaggaagttgatgtaccgagacaaactcatccttaacattgtggaaggacatgttgctgaaggcacgactcatatcgaatgaaacaaatttaaggtcctttcaaccaaaatcaagactacatttgggctcgtgac

SEQ ID NO: 207995 - DNA, 404 bp, Glycine max
gagccctgaggcactagatctagtctttgttttctgcttcttgctcctccgagagatcaagtttcctccaatgagaacacgatattcatactgggacttcctatatcaaagtgcgacttggtgcattcttgagatatcgaaggatatgtatgacggcattccaacgactaacacatgaggacctcatgagtcggctaccctcattgactgcatatgtgaaacttggtctattgatagtgaggtcattgagtttgctgactatacgatgatatcattccgtgtctttcagcggctgcccttgaccctatacaagcttcacattctgaaactgcctgaagtctatgttgaaaatgcgaaacaaacaccttagagagagacacaccttctacggacagaacctcttg

SEQ ID NO: 207996 - DNA, 381 bp, Glycine max
gctaacattaacttgagcgtgtggatatatactacttattgagacatcgagtaaaaagtgattgtcgtttgaatttgctcaaagcttcaacattcaatttctgagcgtctcgatatatgacgggactcaatcagacatccgagtaaaaagttattgtcgctcgagttggctcaaagcttctacattcaattatcagcgcgtcgatatattgacgggactcaatgacacatccgagtaaaaagttattggcgtttgaattggctgagagcttcaacattcaatttcgagcgtcttgatatgttacgggactcaatcagaccttcccaataataaagttattgtcccttgaatcggctcaaagcttcaaccattaattttaag

SEQ ID NO: 207997 - DNA, 434 bp, Glycine max
ctaagctttgagcacatttatacgacaataacttcttactcggatgtagtgaatgatgttccgtaatatatcgagacgctcgaaagtgaattttgaagatctgagcatattcaaacgataataacgttttactcggatgtctgattgagtcccgtaatatatcgagacgctcgaaattgaattttgaagctctgagcaaattcaaacaacaataactttttacccggatgtctgactgagtcctataatataacgagacgctcaaagttgaatgttgaagctcttagcaaatttaaactacaataactttctactccgatgtgttattgagtcctgtcatatatcgagacgctcaaaattgaatgtttgaactctgagcaaattcgaacgacaataacttttactcggatgtctgattgagtcccgtaatatat

SEQ ID NO: 207998 - DNA, 368 bp, Glycine max
  unsure (1)..(368): unsure at all n locations
cattcccttctccctttgccaaaaagaattcgccaaggactaaccgcctgaattctttttgtgtctctcttctctattttccaaaagaacaaaggactaatcccctgaattcttttgtgtctcccttctcccttgtcaaagaattcaaaacgacacagtctgagaattcttttgattcttccctttcccatatacaaaagatttcaaaggactaaccgcctgagaattctnttgtatccccattcacaaagtttcaaagggttaactgcctgagaactttgtcttaacacattggagggtacatcctttgtggtacaagtagagggtacatctacttgggttgttgactgagaacaagagagggtaca

SEQ ID NO: 207999 - DNA, 427 bp, Glycine max
  unsure (1)..(427): unsure at all n locations
ctaagctggaacaagttatggttgtaagtggcgaatagtatgtaaactctattctgttttgtactgctgtaggaaattatttctgaacaagaacttactagttaacattaaggataagatgtgcacaaaaaacaaaaggaaaagttaaaaaaaataatatatgaataattaacctctcaaattaataactatgttaataaatggttagttggttactcattaatttaacatcaaaacccagcagtgttaccacttcagatttgaattttntatcaagaattctttttgcaatttttgtcccaaatttatcatgggccccttccccaaaattttgcttcaataattactacaaaattcttattttgttatgagcacaaagagcaaataatttttaattcaggcaaacaaatgtcactgaaaccaaaag

SEQ ID NO: 208000 - DNA, 337 bp, Glycine max
agctccacaaagaagagaaagtgggaaggggagacactctctgaagaattcttcatgcatgatccaacagatgagaagagaaaatccatctttgatatagagctacatcttgagacaccattgccttcacataaattgcaacaattcctcactattcaggtacaatatataataatatgttgtctttttattttttgatagacatataataataatatgttgccaaactttatacaaggctatctagcctttttgttttggttgaactcagttctatttcttagtcgagagttagagattagttcttcgacatagtgagattcatttaaagaatttt

SEQ ID NO: 208001 - DNA, 345 bp, Glycine max
attcagttccagtcgggaagggagaaaattcctgcggatgccatgaccagaagattatcaaggcgtggtcctgaagcagtaagagcggggatgactcacagttgcaacactctaatgaaacgaggaatgctaatactggctgcactttataaacaatgtataaagggaactatgttcggaactgagaaaacagtgttatggaaggcatgcaggatgatgattccttcaatgaagcatcgaagcagaaaactatgcatgagtttcatgctactaagaatggaggtcatggaggagtcacccaaacactctccagaattctaaacaaattaatgggccaaaatgcac

SEQ ID NO: 208002 - DNA, 394 bp, Glycine max
acctgccgcatgcaagcttatacttatggggcaaggcgggcttcctttacttattgtttaaaccgcagctttgaccaccactctttcttcccgcgatgcttctctttatatccgcttgagtgggtttataccctaaaccatatttcccacgatttcctttggcatttatcacgctatttatgccgccgttgtctttgcctaaacccattccgggtttgtaaccggtccccaacataactcgggccattattactgctgcatcggacaggcaagcttgcccagagaaggagtccactgaggaaatgcttaccaccttaaaagactggaaagcagtttttaatgactcctctgcggcttccacataaggcatagaggatggccagtttaccaagag

SEQ ID NO: 208003 - DNA, 411 bp, Glycine max
gggttgaccggcacttcatagaattggcacaggcctgtgatctatgcttgaaaccctaggccatattggacctcttcaggtccactgggtgtcgaggaggcgctatccctgcaaactgatacatagcatctgagatcaactgggaaatatgtacactcacctgagtcacgatggtgtagaccagctgacacttcagcaggaggaggtctgagttatggtcgttggggagaatgttaccaagcagcaacatcatccaaatttgtgtgagggtggtcatgctggtacgcatgatctgcacctctcttcccgctacgctctgggcaaaatcctgccctggaacacacaacaactggctgatagccttcttatcggagcctgaggcctgactcatcttctatctaaactcacagt

SEQ ID NO: 208004 - DNA, 434 bp, Glycine max
ctcagctattacatgttgatgattataacacatatatatgtgtatgaattgtttatataaattagtaattaatagttcaaataataaaattaaattgaaggaaattaatatattaagattcaatgataaatactttcaatgcatttttagtttaattatttattaattctttttaattgaaaataatatagttcgatttaatatatacatgttttgtgtcatgtaaatattaatattgtgcgatgtttatatgcttcatgaggtgggataacatgttgtgtttagattataacattgtgattgagatttgatgtatatgataaattgagtatgtgttgaattgtaagatacatgtgtattgaatttttgtgtacattgagttataagctatgaagtgtacaatcacacgactgtaatacacttcaagggcgatg

SEQ ID NO: 208005 - DNA, 427 bp, Glycine max
  unsure (1)..(427): unsure at all n locations
aagcttccgtaaantattaactctataaagaatagcgatcgagtttaatgttatacattaatagtataaagtaattttatatcgtcatttaatcataaattaatgttgatatgatttttaaaataattatcatcaaaaaataatattatcatacataataaattgtaattgaataacaatataaaattattttatacttccgtatataattttttctcataattatttgataagtgagggatgattttatggaaaagattaaaatcaatggggcacacaatctattgtgaccaaataaaaaatatgcaacgcaagttcctaatgttattccttacacatcaacaaaaaatatcatttcactctttcaatgagaaaaagaaccttaaaatttaactctaagtcaacctttttaggatttcatcatact

SEQ ID NO: 208006 - DNA, 377 bp, Glycine max
  unsure (1)..(377): unsure at all n locations
agcttaggctaaactgtcataagctatntaagctatgtttattccaacanaagggattgaggatgaagcttattttaagttagtctaaacctaggagggctgtctatattgagcctatcccaacaatagggatctgaggaagaagcttggattgattcattccaattggggatcgaggtttagtaatttaggctccaacatagaacacaaaagcatgattgattagagaaacatccttatatgcatcagctggtctgctagaaagacccaacacttctacctattgctatcaattttacttacttacatttttactgtttttatcctagacatagtttaattttactttaaaccatcaattatcaatgtttctttca

SEQ ID NO: 208007 - DNA, 422 bp, Glycine max
tatgcctgtgctaaactagaagagttgttcctagtacccaatattatttcccctcccaagttcaaggtgtcagactttgacaagtacaaggggactacttgccccaagaaccatctaaagatgtattgtcggaagatgggggcatacacaaaagatgaggaactgctgatacatttcttccaagaaagtcttactggggtagctgttacctgttacactaacttggaaccttctcgagtccattcttggaaggacctaatggttgccttcgttaggcagtatcagtacaatttcgatatggctctagataggatgcaactacagaacatgtgcaaaaaggggcacgaatctttcaaagaatacacccaaaggcggagggatttggcagcccaagtagcacccccaatgatggaaagggagat

SEQ ID NO: 208008 - DNA, 296 bp, Glycine max
ttcttttgccgatagccaccgataagattttttttctgtctaggcatgttttcgaactactctttgttcttaaaatgtctatccactttagatttttagaacatgaatatcacagaaatcttgtccttttttttttttttccaacatttcaagaactagatccccttagatggagagaattatcctttccgacaaaatcttaaggaattaattaacttttagccgctcagttttgtcacatcctaaattttaattcttcaaaattattttaaccacttttattctttttttttctt

SEQ ID NO: 208009 - DNA, 411 bp, Glycine max
  unsure (1)..(411): unsure at all n locations
gaatactctttgtttcaatgtgaaaaatattggttttgttgattcggttggctctntagaagctaaaaaattctcaataactgatattattgtcctctcttattaatatgactttggatgctgcagcatacgagatgttactgcagaggttggggctgctgtgcttctagcagcagttgaagaagaactggcacaaggaaatggtgatgtggggcccaaagaactttcccatatgtcgaaagtatggaaaaatttcagatcatacatctttatgatatatttaaactactgtctactggagaatctgccattaactgaatgctcctagtctattatgtattggcatttctgaatattgcaaaactaacgacaattgctaactggtggttaatgttgcacgatgagactgtc

SEQ ID NO: 208010 - DNA, 337 bp, Glycine max
acctgcgcgcatgcaagcttcaccaccaagagagtgtgtgggataagattcccatagatgaagctccacacaggaagagaatgacatatatggaggggggggggggccctcctaacttaaggacatctgggcaacatcacttactttctaggtcgacacatcagtcacatatcctccactacatatatatacgtgtctcccattcccccttttttatagctatatcattatgcaaacttctccttctgcacccctggagtggtatccaacccttcttcgctcataagatcggcctaaccttcctaaaaatacttgaggtgtctcctcattcccttca

SEQ ID NO: 208011 - DNA, 348 bp, Glycine max
cgccgatgatcccattactggcttccctaagctctctgtcctttcttcacgccgcatcccatgccttgcgaactccttggagtaccctcaggttgtgggcacctgaaaccccgtgcgatgaaaggcgtgatgctttcgtctggatgggccctcctcttatgggggtagccaacctgctttatggcgaggaacgggattataaattaatacaccccttgttcccatcagagaacctttgggccttccttcccataaaaatgaaatctgaatctttccttctttttgccagggacccaattacaaaagccccttccatgccatccaaaatttgttcccatttcgccttcc

SEQ ID NO: 208012 - DNA, 360 bp, Glycine max
  unsure (1)..(360): unsure at all n locations
gtctcttcacgtttattttgttctgccaagagctcgncctctacctttcaccttctcaagaagtaatcaaagccacgcattttcagggagcgccacaaaattggttaaggagcttttgctaaggaagcaattgcttggtacggaaaattatgagcctaatcgactcagtccaagtggtccagaccctcttcatcactaatgaatgtgcaattaatgcatgaaaacttgagaatcatagattcatgcaacaggaaaaggaaagattgttattgtcactgcatttaccttcccacgtacgcattccttntagaattaggaggccataaatcatttcattgcataaaaggatttatttgacca

SEQ ID NO: 208013 - DNA, 366 bp, Glycine max
aactctcccacatgcacagaatcgaacatgaacccaccatgcccagttgcccgcctttaactgagctcacgtactcctacgtagcccttatactcgatcctctcagcaccgggtccccatcaacccctccaagcttccacaatatccaagcaattcacatttccaaatatcatgaactaccctaaaccaataaaacagggcagaggcataaaactctgcccaaaacacattcacatattacaactttccttactcaaatatcccaggaacattctctttgtgccgggtcgctaaccattggatcgacttgcaaattttactggaggttgctagtacatacatctaaaatttgaccgttgggagctg

SEQ ID NO: 208014 - DNA, 432 bp, Glycine max
ctcagctgttcttgattttcctaagttctttaacaagctgtgaacaatagacttgttcttcatttaactatctttaggcttggcggccacgctcaacaaagtactttcgacacctactgtacgttgatttgaccaatgttgttatgggaatgttgcgataatcctttaaaaccttattgatacattctgaaaggttggttgtcatgtggacatatcgacgtccttctctatcataagtcatcgtccatttttcctttgaaatgcaatcaatccatgttgctagggctagactcagttgaccaaatttttctaaattttgattaaaaaaatgtgcttgcaaggaatgtatgctgcataaaattagttatgaataacaattttaactatatatgaaagttaaataaacgtgaccatcaaatatgaaatcttacc

SEQ ID NO: 208015 - DNA, 366 bp, Glycine max
acacactgaacttgtgtatggatgtgtctacacaaaggatgtcaacaaaacaataatgatcagtgatgcaatggaaacgggaacagatcatataaattctgccccagctcgagggccagatcattttccctttcacgtgaacctaccctaaaaccaaccaaactctgctatttccaagacttggaaacgaaccaaaaccatttttttatgaacaatggtcgcactgaggatcaaagtaacaaaaaacatttatttctatatcaccaatctattattaacaaatactttgctgacagggtataaaggacagtggcattggaactcaacggattaccaacagcataaacatgatgaccaacgtcaaaa

SEQ ID NO: 208016 - DNA, 411 bp, Glycine max
aatcaagttatatgtatgtgatggagactagattgtattctgtaccattatatggcacactaacaaggctagttatatattctgtaacaacgaacttgcattatgtataatctaaatctctttaaattttactttttacaggagtgcttttatagtttacttatacatgaaacacatagtgatcactcttgattcttcagatatcctatcatcggaaaaacaagaggacaaagagtgtctaacacaaatacttgaccttggaaaatattggcatataatttctctcactgatatagatcatcgagacaacgattgcttaagcctctcttgaaaacattaagaagcatactacataggggatcttgcaaatcacatccacgaatcatagttctaatacacataaaggaaaac

SEQ ID NO: 208017 - DNA, 371 bp, Glycine max
atccaaggaaacttccaaagaaaaatgtccaattgatttttttgattattttattcaaagatgttttgattattttattattatttttccatgatattttgattattttattattattttgcctattttggtttaaccgtgattacaacgtgaacgatcggttagattttgttttaacaatgattaaatgagattacaacgcaaatgatcggttgaaattcattttatcatttattaggcgagaaaacagattaaacgattggttaaagctcgttaaaaacggaagaaaagaaaatcgaaaattaatgaaatgaagatgaaagctaaaaatacaagacatgaattgaaagtctcgaattcaaaaacttacc

SEQ ID NO: 208018 - DNA, 299 bp, Glycine max
gaccacccaggggaaaagaaagatcctagaaccaacagctcagcagtcctaacgagcggggaccccaaacatagcgagtaattcgaaccaagaaagggcaaggatccaaaaggcccccagcaagaaccacgtggattgagccttgccaaacatgcaaccacccccgtaggcaaaggacacaaacaaatccggctctaagccccccaatgaggacaataccaaaggaactggcggccaaacataggaacatccaaggctaccaacgatacaaaaaaggcatagaatgcctcaaagaccac

SEQ ID NO: 208019 - DNA, 383 bp, Glycine max
tcgcaattttattttgctgactcctactgcatagcaacgtgctgaatctgctgatatgttcaattaccacaaacgattcttattcatggcagaagaaccatttcttgtatcatgcacatataatctactaggtcgcacattcaaatatctagctacttgcaagctgggaatcatggcatgtatatgcggtagctagattaattgttatgcttataggttactaacataaaagctactagttaataaacatgttcgtggaccttggttataaatggatatacatgcataatcaccattgaaagccgctctagtattatgtttacatagcgacaataacaacaattatgaaatttaaccaaagtataactctgtggagcatgatc

SEQ ID NO: 208020 - DNA, 370 bp, Glycine max
ctcttggtatctgagattcacttaaaattagtgagaaaaattgttttcgtgaagaaaatccaagccgaggtgcttccgtaacgcttccctgacgtttccgtgggtgatttcgcgaagattttcgaccgttcttcgtcgttcttcgttcgttcttcgtccgccttcggtcttcaaccggtaagttcccaaaatcaaacttttcaattcattctatgtaaccttagtggtcctcatttttttcgcatgcttttatttttatttcatttactttccgtacccccttttgacgtgctttagtcatttatttaagtcattttctcgcctaatcaaaaataaaaaaaattttcaccgaacattccttttataacct

SEQ ID NO: 208021 - DNA, 388 bp, Glycine max
  unsure (1)..(388): unsure at all n locations
agtcacctgaggcatgccaagcttgttctacacatagcaatcaagcaatttttttatattgttagtcatatataaacaagataattgaaagaaaaatttcaatcaactcaatttaaaagagaatggttntgatgctacctttttcattcttctcattcttctcgggccatgactcattcgaggggcagattgcttttatgagatcgggttgattacacttatagcatttaagtgtacgaaaaacttcttgggaactattcccattgttgaagattatgacttttctccattcttctattattgatgaatttatgaaacttcttcacaaagagtgagaagtcctctttatcatcaaattcttcttggtcttctccttcttgcattgagg

SEQ ID NO: 208022 - DNA, 404 bp, Glycine max
  unsure (1)..(404): unsure at all n locations
ctccacanataaaagatgctttattaaaattatgttatataataatgatcttaaaataaaaagcgaaactgattgtttagcaacttatgagcttgaaaattttgagtttttgttaagtatgactatttggtatgacatattatttgttgtaaactcaactagtataaagttacaatcaaaagaaatgggtatggatgttgctataaaacaattgaaaggtcttatttctttttttgaaaaatatagagaaaatagatttaaaaatgttataatttctgccaaaaaaattgctacttaaatggatatagaatctagattttgtaaaaaaacgtgttattcgtagaaaaaaacaatttgatgagaatattgataatggaattataaaatcacctaaagaatcattt

SEQ ID NO: 208023 - DNA, 397 bp, Glycine max
gctttagtataattattttatcgtattctggcccagactgatataatgtctatgtctattaatatctttctgatcagctacactataagtatgggttcttgttatgaatgaaaaaaactttaggcatttgataaaatttggtgagagtttctctccgggttccttgttgaaccacttatcacacttatcaaggtgatccttgtggcgtctacccaaacttatcttccttcactaaaagtggcgtctactgtgacttatctttcttcaccggaagtggcgtctaccctgacttatcttcctttaacggaagtggcgtcatccaaatcttcgtagactgtagtaagtgatcccttcctagtcaggttcacatcacaacgctcgttgggcgataatcttt

SEQ ID NO: 208024 - DNA, 361 bp, Glycine max
  unsure (1)..(361): unsure at all n locations
gctaaaaaagaggcccagaaatcccatnatcgattggaannctatcatagaccgtcaatctttaatggagagggttaccactactggaaaacccgaatgcaaatttttatcgaggcaatagatctaaatatccgggaagccataaaaatagggccttatatacccaccacagtagaaagagtttcaatagatggtagttcatcaagtgaaagcataaccatagaaaaacctatagattgatggtctgaataggatagaaaatgagtacaatacaacctaaaagccaaaaacataataacatctgccctaggaatggatgaatatttcagaacttcaaatcgtaagagtgctaaggaaatgt

SEQ ID NO: 208025 - DNA, 378 bp, Glycine max
gaatgcttgttaatacaatgcgttggatgttattcttttattttataaaataagttccatatgcttggatgcctacaaagacatatacacatgaagtttaaaataggattttgtaatcaattttttatttgatgacgtgtttcctataaaattcaataaaatccattagttcatacaaaatttaatataattattatcattaaaatcataaattttttaggggttagaaaccatctaataatgtgtttagttttaacaaaattatctaatgagataaaagataaaaaatatttttaaagaattttaagatgtgtaaattatgtggtagaatttatacgtaatattatagttatatggttactattatctaaaaggctt

SEQ ID NO: 208026 - DNA, 375 bp, Glycine max
gataatgtgttgatatgatattgatagtgttgtggtttgttaatatgtttgttggactgacatgttatctatatatcaatgtcccattaataatttttattaaagattaacgacaaactatcaataaatcaaaataattaaattttaaaaatataaggattaaatgtgtaataaaaaattctaatagattaaaattgtgcaataaaaaattatagaaactagaagtagatttaagccaattaattaattggataatacaacaaagtgctcaaatcttattagatatttatacaaaagcatttgatgctaataagacatacaaattaaactttttaatacagcattgcacggaaatattttatgcataaaatatgt

SEQ ID NO: 208027 - DNA, 364 bp, Glycine max
gctcaaaacaccttgaactactatcacattgatatatttggtccctctctaactatgagcgtacgtggaaactactatggcttggtaatagtggatgatcactcaaggtctacttggaccttgtacttgacaaccaaaaatgaagcttgtgaggcttttcgcaaacttgacagcgtgattcataatgaaaaaggtctgaacattgtttccattacaagtaatcatatatgtgaatcacaaaataagtatcttgaaatcatttgtgaataaaatggaattcaccacaattttttaacccatgaatacctcagcataatggggttgtgtagaggaaaaatatatcccttgtaaaaggcgcaagaac

SEQ ID NO: 208028 - DNA, 319 bp, Glycine max
gaagaaggcaaaatggcattccaaaatcggcactcgatgcagaaacacgccgccaaaaacgcgcaccaaaaacccggacggggcacaaaatgcacgcgcaaggcggggtgaggaaaggagaacacatacaggggacaggacatatgccagcagaacccaacgggcaaaaacgtagaccgacgaacaaagagaccccccaagaaaagctgcccaagaccacccaaccgcgaacgaacaggaacaaaggaaaagcaaccggggaccacacacaaggaaaagccgcacacggaaacgcggcccgggcagaaacacccgcccc

SEQ ID NO: 208029 - DNA, 326 bp, Glycine max
catctctatcgattaaaataattttaaatgttcaacgtgtatccaattaattatatggatgtgtatctcaatatgcggtaaacattagaatgaatcttaatataatacataagttatttttatttggcaaacctatctgtcttataatgaaaaagacaaaaaaaaatgtccaataccaaattaaattttatttatttcctataaattttctatatcttttctatatatagaatatagaattcctatatatagaatatagaattcttttattctttaaccttttttagttaataagggtaaagaataaaagaaaaaaaaaatacaac

SEQ ID NO: 208030 - DNA, 381 bp, Glycine max
  unsure (1)..(381): unsure at all n locations
ctgcagctaagcatgatcaacatgctcttggaactgctantttaaaatatcacaggattgcgcagagtgctgatcttatgaactttgattcttctttctgaccgaatgaagtgatatctaacatctatatgcttggttctatcatgatgaacctgatccttggccaagcatatagcactaaggctgtcacagtagatgttagcatattcttgattaattccgagatcatttatcagacctctcagccaaattccttcctttgcagcttcagtaagaaccatatattcagcctcagtagttgagagggcaacacaaggttgaagtgttgccttccagctcaccaagcagtcaccaagggtgtaagcataccctgttaatgac

SEQ ID NO: 208031 - DNA, 424 bp, Glycine max
  unsure (1)..(424): unsure at all n locations
ttaactgctgatagacctactttctggctattattaacaaanttttgtgttctgttaatttttttctacgaaaatattctagcactcaggtatatatggaccgagaagaacatacgaaaaatattatagcactcatacatttaaagaagagtgaagaattgaagaattcatgactaaaataccaggggtgatgaatctgagaaggaagcattcatctctgagcggccttaagaactaattatctttgtaaactaatttagtagcatatgtacatattatttgcactccaaataagatattattttttttattgaaattaaagaagagattactttaaatcttaaaactaaatattgttccttacattaaaaaaaattaaaattctcacatcattttatgaatatatatatatatatatatatat

SEQ ID NO: 208032 - DNA, 328 bp, Glycine max
aactcagagcaagcctggcctcaaaacgcagtaccaagacaactaaggctttgggaacccactaccaggccgcggaatcgatcaccaaaagacaattttgaaaaacaactgttaaaaaggggagttgaatatgaattgtgaaccctgaaacgataaccaaaaggttgaaatcgaataccaccaaccgaactcttgaaatccaaattcaaaagtcacgacccttcaaaacataactatggaatcgattaccagaaacctggaatcgaacaccaaaaaaaacaaccagaaaaagctttctgaaaagacagaacccttcaaaccattttga

SEQ ID NO: 208033 - DNA, 244 bp, Glycine max
ttgtcttacacctaatactttgagcggtttattttataaaatgggagatccttcttctgctgttggtgcagctctatctaaaactgaaatgccattttcaagaacccgaggattcaaagctctagtcttggcacagtgttacaagttcataaaggattcgaagaatcaacatattaaacggggggggaatatttaccacaagtttgaagcaccgcgtcaggaggtggatgaaaatgtacgccag

SEQ ID NO: 208034 - DNA, 351 bp, Glycine max
cggatgccccacattatttcctgaaacaatatgcaaaatgatgaattggagaatttatgccaaactggtcatgcatgcacctatgccgacacctaactgttaaatttttatggtcatgtgacgctaacgctcaagattcatttcctctatattaaatcaacccaatgttttcaaaatatgttcttttatccatttgtgcattcatccgagtccatttcgggcgtccggggagaatttcacagcgttcacccttcacgtgtatacacactttattttttcaaaattggatatgaattttattcaagaaaagttgtaagtcatcctttttcaaatacatgtggcgcttttcag

SEQ ID NO: 208035 - DNA, 301 bp, Glycine max
ttttttttttgtaaccactcacagaaagggtggattataagataagattctctgaagataatgcactgaatgaatcaaattaacaagaacatcagattgaatacctcgaacatgggatgggtctaccaaaaagagtggctcaatataatatataaacatctgaaaaatacccaaaacggtgtgcattccctatctgcggaaccccttctatggacgacctggtcaatatttggattcgccgcacccacgaaggggtgtacatatggtagcaatggttgcttttgcttcaccctgtggaaaa

SEQ ID NO: 208036 - DNA, 329 bp, Glycine max
gagctagtatagaggggaggatctatttttcttacaggaagttctaagaactctcaggaagttttcaaaagctttcaggaactactatctataaataaacatgtgaacacttgtgttcttgatgatgaaatttggagactattaaagtccgctctctcctctttattccttaattaatgctccccctttcttttctcctcttcttttcctgcttgaagcatcctttaagcttttatccaggctcatttggggagaaatttttcttacatgatatccctagggatacgctacttacctatatatttgtctccgtgatatcatgtggaaaa

SEQ ID NO: 208037 - DNA, 358 bp, Glycine max
ctaagctttgtgcgacgagacatcaggttctcatctcgtgatcatcgtgtttttccattttaacaaattgcggtacgcatttaatctctaaacttttaggagttctattggtaatacccgtactttttcttactagtcaatgttccttagttttttattaaggactaagagtgaaatcctaaaaattttagtgattaaatatctattatgtgcccattatggcctatttggcgaaaacgttaggaaaaccaacacgggggtatgagaattttgaaaagaaagattcgtgagttgttgttgcacggcgaacgtatacatgcccgtaacaatgtgtgaccgcctgtactcgagtgaacat

SEQ ID NO: 208038 - DNA, 329 bp, Glycine max
cagtgactgcaataccttaagagggatagacatttaatgcggaataaacaaccatgaaagcactaatggtatttagacatgcggcacatgagggaatgccactaaattaacgagaccacggacaaaagaatgtaacaactgtatcagactgcttcggaaaagtctgtgcctacgtttagtactcctaccacccacttgagagtttgcacttcctttgtaaaaatccgtgcaccaaaactaaactatatggggacaacctactggtggagttcaagaaagcttgatacttatacccttacaactgaagggcatgcacaaactcttaatgg

SEQ ID NO: 208039 - DNA, 207 bp, Glycine max
ccgacaaaaacaaaaacaattacatcaggcaaaccacacaaagcaggcaccgaataagaaatcgcccactactgaaacagccacctccaagaaacaccctaaaacaactgacaccacaatagcgcggacagcaacaaacctacaacaaaccagcaacacattaacatccacacctaaaccttaaaagacaaggttgacgaaaccaca

SEQ ID NO: 208040 - DNA, 400 bp, Glycine max
  unsure (1)..(400): unsure at all n locations
cacctgccgcatgcaagcttctctgaagctgtggatgagaggagaactttaaatttntttngncatccctcgctcaacgcaccctgtgcgctaagagaatcatcatgcttgcgttgaacgagtctcaacttgtgctaagcgccgtcaatccctacccattggtgatgagaatcctgaaactggccaaatataagctaaaggccctagtggagaaagatgaaggcccaagtggagaaagataaagcccccgattggaaaaggattaaagcctataggcacataccctatcaagactattaattgttgctgaaggccccaattaaatattgtttttagttataatttttatttattggaattttggcccaaactgtttaaaaggcctatttctatttttatt

SEQ ID NO: 208041 - DNA, 299 bp, Glycine max
tttactttttataccccctgtggacgtgcttaagccattttacttaagtcatttctcgcttaacttaaaaataaaataaatttccaccgaacgtttgaattgtattatccattaacttcggttaaaataaattccgaccgttcggtcgtgccgtaaccacgttggaaatcaaaaagaggtaaaaaataatagaatagtcaaaaagatatgttttagtaaaataaagcggaaaatcaatcggacgtgttctctttgggatttctcattcttaatcgaattgattaataactaaagggaaa

SEQ ID NO: 208042 - DNA, 271 bp, Glycine max
cgcacacacaggggcgaccagacacaacccacacagacacaacgcaatgcgagaagcagcggaacactaccaatacacaaagcgcgagaaagccacgagcaaacccacagaacgcccaccaaaaaaccacagcgagaggagcacaaccgaccaacaccaaggaaaccccaacaccagatcgaggccacaaacaaaaaacgaacaaacgcgcacacaagaagggggaacgcacaaatccgaacagcaccaacacagcacacccgaacaaaaa

SEQ ID NO: 208043 - DNA, 389 bp, Glycine max
  unsure (1)..(389): unsure at all n locations
agcaccgagctgcagctatcgancgatagagagaggnccatacttttattggtnttcagagtctctactttaatcaattaccaggggatgtaatcgattacttctctcttaaaagtgtttctgaagcgatcaataacactttatcgattatatcaagaatctaattgattacattgttcttgaaagttttccagattttgggaagaatactttaatccattgaaacgataatataatcgattacttctttgaaaaaattgattacattgtatatttaatcgattaccatgcgattataactattttctttataaaaagccaccttgtgttttcacttcaatgtggaaaaatcaagtgtgaaattatatgagtctgaagtacagataaag

SEQ ID NO: 208044 - DNA, 373 bp, Glycine max
cttgttacttgaagggtccatctcatggacacataacttcagctattttggggaaaggaacataaggaaattggctcgtggccgaggccaagacagttccttctaaataacgacaaactacgcccatgccaatatcaataccggtcttgcaagcgcgatcaaaagttaatcttattatattgctgaaggtggacaccatctattctgatgagtcactgttggggcggctctaaagcactgtgtttctggaaataacccacaatgaacgatcaataactcagcttatggcggttttcttttgctgaaagaaccaattatttcttcttcgccccattgaccataacattcccaacatctgctgtgcaaagccccc

SEQ ID NO: 208045 - DNA, 367 bp, Glycine max
  unsure (1)..(367): unsure at all n locations
agctcgctcanatttaatggagggcgtttattttgttgaggcnatagccactcttgctttaagagtaatgtcccactggcaaaactaactttccaaatgcttgccttcgcaggaatggccccgaggaagcttgccttatagaggtccaggaagggcaaggcggcccaaggaactatttccgccccggagtacgacagtcaccgctttaggagcattgtgcaccaccatcgcttcaaagccatcaggggatgggcgcttctccggtagcgacgcgtccaactcagggacgacgagtatactgatttccaggaggaaatagggcgccggcggtgggcaccactggttactcccatggccaagtttgatc

SEQ ID NO: 208046 - DNA, 418 bp, Glycine max
ctcagctggtgatatggggacccgtatatgtggactaggtggcgatctgtcgatggtgcaaatcaactctcccacatccacaaatcaaacatgaacccaccatccccagttgcccaccttcaactgagctcacgtactcctacgtagcccttatcctcgttcctctcagcactgggtccccatcaacccctccaagcttccacaatatccaagcaattcaatttccaaatatcatgaactaccctaaaccaagaaaacagggcagaggcagaaaactctgcccaaaacacattcacatattacaactttccttactcaaataccccagtaacattctcttcgttccgattcgttaaccgttagatcgacttgaaaaatttactggagggtcctagtatataattctacatttttaccg

SEQ ID NO: 208047 - DNA, 143 bp, Glycine max
cccccctccaaatacccccaaaaacgagccgcccccccccccccgatcccttccacttccccgcataaccgccagcgaagcacagccccaaaacccaaggacacagggggcagggggagggcgaacccccccgggcaaaggcc

SEQ ID NO: 208048 - DNA, 337 bp, Glycine max
  unsure (1)..(337): unsure at all n locations
ttatttttatctatcnnngaatctgtagctcctgaatgtacaaccttcaaattgttgctcgctcccctctttgttttctgcaataaagaaaatcaatatctaagaaaacatggatgaagttctaatgatgccatgtatatgtgtatttctgaagatatagtatttatattccatcaagcatacattgacttttgattacatgtaatagactttttataacatggttgcccctaatcacaattaaaaagcacaactaccaatctttcagagtcctttggctaaattgtcttgactacttcttgtggggggttctgattaataatataaaacttttgcc

SEQ ID NO: 208049 - DNA, 315 bp, Glycine max
agaagggcggagacaaaccataaaagggcgccactgacaacaaaccagccgacagagagcaaaacagcaacaaacaggaccgaggagcaatcgccgacggaacaaaaaacacatgaattgggcgagccaaaacaaagaacaacgaacgacggccaggaacaccagagcaaccgcaaccgacggaacgtcccgaccgaccccgacaagaggagccacaaacagacgaagataaaaaaacaatcgcccaccccagacaacacccacacaccacacaggccgcacgggaacggaaccaaacaaaacgatcgccgacgc

SEQ ID NO: 208050 - DNA, 377 bp, Glycine max
tttcaaagatggttattaaccgtcttaaaaagttctgtcagacatgactttctaagacggatattgatgcaagcttcattggagcttgtatgcctaggatcttcttcatcaatggattcctttgcttcttggaagataaatggcagcggaatggataaatgaagagagagaatagacgtcacttcaaggagaagatgagtctataagaagctcaccaccataggaggccatggataatagctcggaggaagaacgatatgaatgacgggagagggagagaagagcacgaaattttgtgctctatatgagctttgaaatctgaagcttaatattcaaatgatcaaagttgaaaaaaatgcacacacatgacctctatt

SEQ ID NO: 208051 - DNA, 226 bp, Glycine max
ctagcatgaggggcttcatagccatccacctattcatctgcgcccacgaacacaagtgcaagatcatcacaagagccaaacacaacaacacacagggagggagggatcacatccccagccaatagagaaacaagacaatgaaatataccgagttacaaaaacgagagaccactggcttaaacagagctcacgaaacttcacccctgcgtgggtcaaaaggcacggc

SEQ ID NO: 208052 - DNA, 395 bp, Glycine max
  unsure (1)..(395): unsure at all n locations
agcacctgcaggctgcagctttgttttaattatgagcatctcgnaatttattgttctccatcagnctccgagtgaaaagttattgtcgctcgaatttgctacgagcttcggttataaagttcgagcgtcttgctatattacgcgactcaatggaacttccgagtgaaaagttattgtcgttagaatttgcttcgatcttcgaatttaaatttcgagcgtctaattatgttacgagacttcaatcagacttccgagtgaaaagttattgtcgttcgaatttgctacaagcttcgattttaaatttcgagcttcacgatatattacgcgactcaatcggactttcgagtgaaaagttattttcgttagaattcgctaccaacttcgattttaaatat

SEQ ID NO: 208053 - DNA, 354 bp, Glycine max
atatatcgagacactcaaaaattaaaaccgaagctcttagctaatgcttacgacaataacatatcactcggaatgtcgattgagcccccgtatatatcgagacgctccataattaaaaccgaagctcgtagcaaattctaacgactataacatttcactcggaattccgattgagtcccgtaatatatcgagacgctcgaaatgtaaaaccgaagctcggggcaaattctaacgacaattacttttcactcggaagccgaattgagccccgtatattttctgaagctcgaaatttaaaacacaagctcggagcaaaagctaaccacaataacattttacttcggaagtccgatg

SEQ ID NO: 208054 - DNA, 405 bp, Glycine max
  unsure (1)..(405): unsure at all n locations
tctaagcacctgcggcatgcagcttctaaggaggtgatcttagntatgagaggtttttttttatctaaccttagcttctcaaggaagtttttctcaaagaagcttctcaaggaagttttctcaaaaaagcttctcaaggaagctacctagtctataaatagaaacatgtgtaacacttgttgtaactttgatgaatgaaagttttatgatatacactttaaaggtccacttctttccctcttttattccttcaatttcgggctccccccttctttctttcttttcctccattaaagcatcctcttcaagcttcttatccaaggcaatccttggtggtgaagctccttcttccttggcttattccctagtggatggggcctcccctattctcttctcctttgcctt

SEQ ID NO: 208055 - DNA, 348 bp, Glycine max
tttaagcaaaagctgaaactcccgatacaaactaactgagaatgatgctttcaacagagcatgttagctcaagcaagcacaagccgccatagagaacaattcttgatgttgaatataaaacaaaacaaagaattagaaatgggttaagctttccgatgcaaaggatctatccaatgaaaaatatcacgacagtggggcatttcatcgaacaacattagtgcaccacaaaacatgttctcatgggaaccataaccccacaaacacaaaatcaaaattagacccaaatcacatgtgaacacaatctccatatcccataaactaaaacataaaatttggagaaatgttgta

SEQ ID NO: 208056 - DNA, 324 bp, Glycine max
actcttgaggggccacacaacttaacatatgtaatggaggtgagatctacggacttagagaccggcgcgacctttggatgacaagttctattgagggactgtaaaatttttacactgaagctctttttccccaaacactgatgcaaggggcttaaatgatccactatatgaggtaaacttctgtttgcagcaatctccaataaatattctccctgctgcagataaaaaggctcagactcctgaattagagaatttttccttgggttgcgacctgcaagaatcacgaacaagcgaaacccgagcgcgagattgtgttgtgagaaa

SEQ ID NO: 208057 - DNA, 328 bp, Glycine max
taaaaaaccttattgtatggtaatgctgtccctaaaacatttccattggatttaatgatgaaatctgtgcattttcatcgtgaaaaagaggctaatttttgaatttcaaaatgtatcaagttgggctaagcgcatatccaccgctaagcgcagcttcaacgctcttaccgcaaatgagaatcaagctaagctcgagactggcgctaagcccaatttcccttactcgcgctaaacgcaccgttccgacttcataccctttttaaagatgtcttgtgccttatcacgcgctcttccttgaccactttcactccctttatgacactttcta

SEQ ID NO: 208058 - DNA, 396 bp, Glycine max
agtgcatggtaattcgtccacgcgagctgtttctcttctatgcgagtttcttgctcagggttgacgttacattctagcccaagccagttggatgctatcctatgcaaatttagggtcagaaagcttaaggaaaagaccatgtcgccctttcttttggctttgattttagatctaacaaacaagcatcaaaacctttaaaatcattgatgaatctttcatattaaaacaaaaatattattaaaagtacaatttatataaacacctatatttaacggtattttatataaaagctattacattcaaaggataagtggctaacattttaatcctcaaaaataattgaaatttgatgaataaaccctccaattcctttttggattgataatataaccacta

SEQ ID NO: 208059 - DNA, 345 bp, Glycine max
  unsure (1)..(345): unsure at all n locations
gatttggtcttcgccagcgagaggaggaaggngggttcattattatgcaaattcgaacaccctactaggacgactgagaagactggggccaacaaaacagcgcgaggatgacggagaaacccaagcagcgactgacaatcctgtacagacaagtatctcaccaacccatcaatagctttactcagccaacaacaaacaatcaacttacccaccacccagttatccacaaaggcacatccctacaaactaaccacacagcactgtctaccgcacttccaatgacgaacaccacctttacacaaaaccaaaacaccaaccacaaacggcaatttgcaccaagaaaac

SEQ ID NO: 208060 - DNA, 429 bp, Glycine max
  unsure (1)..(429): unsure at all n locations
tcagcttcatgatgatgaatcaagtngattcaagttgatgtgatgatgacaaatatgatgtcttaaattccaaaagaatgattgtcagattgagtcaacaagttcaagatcaagtttaatttcacgtttcaagaaaagagttcaagaagattcaggaatcaacataagtgtgatttctagatttctgagaagatgaattccagtttcaagagaagaaatctagaagacttcacaagggaagtaatgaaaagattcttctaataacaaccttagcacattttttgttcttctaaagagtttgtttcataattttctaggtaccacagtttttactctctggtaatcgattaccagtttcttgtaatcgattactagtggaaaagtttgttttcaaaaactttcaactaattttgcaacgttccaattgat

SEQ ID NO: 208061 - DNA, 323 bp, Glycine max
caagcaaacaaaggggcaaaacacaccaaaagataacgaagaaggacgacccacaatctcacaaagggaaaccccatcacctatgaaaaccgagccgtgccaaaatatcatgacccgcagaggaaacaacaagggatccccaaaacaacaaaatgcccaaagagacacctgaattttgcaaaaacaaaacccatcacccgaacatcacccaacaaatgaaaagaaaaaacaagcaaagagagaacacgccaaacagaaaccgacccaaaaatagcaaaactaaaaaacccaacaaaacctaacacaatgtaacacaaaacaaa

SEQ ID NO: 208062 - DNA, 371 bp, Glycine max
gttgatcatcctactatgacgactgagagaactggggcaaatgaagagggtgatagagagggaaaaacccatgctgtgactgccatttctatacggccaagtttcccaccaacccaacaatgacattactcagacaataacaaacctgctccttacccaccaaccagttatccataaaagccatccctaaatcgaccacagagtctgtctaccgcactttcaatgacgaacaccacctttagcaaaacctataacaccaaccaacaatgcattgtgcggcgagaaagcctgtaaaattcaccccaattacagtgtactatgctgacttgctcccatatctacttgagtatatcaatggagccataacacta

SEQ ID NO: 208063 - DNA, 338 bp, Glycine max
atcgcggacgagtatgctcaagtatacgcggaataagaggctagaggaagggtgatcgactctttacaccaaaaggcaaccatgtggatggattggtttgctcttaccttgaacgggagtcaagaactttcccgcttgttatccaaggccaaagcgatggcagacacctactccgccctcgaagagattcgtgggcttctctgctattgtcagcgtatgatagacttaatggcccacataattagaaatccgtacgaaacttggatggtctctcagaaccttgctagataccaacttctttttgaaataaatgagttggacccatgtttctactccaa

SEQ ID NO: 208064 - DNA, 397 bp, Glycine max
  unsure (1)..(397): unsure at all n locations
agtcacctgcggcatgcaagcttctacttatgtggcacaggcggcttccttctcttctngtctccaacgcagttttgaccactgttcttccttcccgcgatgcttcttttcatgtccgcctgagtgggcttatagcctaaaccatacttcccacgatttccttgggtatttatcaagctagttatgccgccgttgtctttgcctaaacccatcccgggttcataaccgttccccaacataactcgggccatcattaccgctgcatcgaacagacaaggctgcccaaagagggagtccacggaggaaatgctgaccacctcaaaagtgatgaggacataaccaagggcaaggaccatgaagcactttgaggtcccatgaccataggcagacttaaaca

SEQ ID NO: 208065 - DNA, 390 bp, Glycine max
  unsure (1)..(390): unsure at all n locations
cttaagcaccgcggctgcagctttctctctcccactcagcaancanaaatttattttgccctctcttccctcacgttgccattctcttcttcttcattctccattgaagctcaacacaaagcttccacctttggccatcatttctgctccaaatcgcgaaaggagagcattttcggggtcgtgaagtgcgtggctacgagtgggacttcgaaaattcaggtttgggtggacttctttctctcttaaatttcgtgggtatggggttttgggagatatgatgggtggttttgttagttttatgctgtgtgatgattatttgtgaaggaacttgttgaaagcttgttgaaattgccatgttgggatgagttacacatacccattctgttttag

SEQ ID NO: 208066 - DNA, 397 bp, Glycine max
  unsure (1)..(397): unsure at all n locations
ctagtatgaacgggtgtgtgagctaatctctatcttctcaaggaagttatctcaaagaagcttctctaggaagttntctcaagaaagcttctcaaggaagctacctagtctataaatagaagcatgtgtaatacttgttgtaactttgatgaatgaaagttttatgagatacacttcaaagttccacttctttccctcttttattccttcaatttcgtgctccccccttctctatttcttttcctccattaaagcatcctcttcaagcttcttatccaaggcaattcttggtggtgaagctccttcttccttggcttattccctagtggatggtgcctcccctatcctcttctcctttgccttccgctgcatctccatggtgaaaaatcaccattga

SEQ ID NO: 208067 - DNA, 324 bp, Glycine max
aaccaggaagcagtttataatcggacacgaaacctttagctctaacattcaatgcacattgcaaatcatgaactttcagctggcctaatggacggtccgtcgaataaaataagagaagaattttcaagtgatctttcggtctagtgcttcatcaataactctagatgaaacccccagacatactgttccccaaaacatctggcagaaccttcagaaagcaataaactctatatttccctaatcaaatgccccaatatgttcactctatgcctgtgaatgcacatatgccccctcatacaaggtgaatctctttttatttgacaa

SEQ ID NO: 208068 - DNA, 354 bp, Glycine max
tcttcgaccacgaaccctcactcaattgtgtcaccttctccacattcccattggaagaaacttgaggtcccgcgctctgatggaacaaacccatctaggtggatcttctaattaatgcagttcttcaaataccatgctacaccagaccatgaagactcaccatcgcctccttctacaaggaaggtccgaaaatcgcttggttacaacggatgactccaaatggccaactcgtcgtggccagggcttctctaggctctagaagcccgattatctccttttccgtacaaggatccaaccaaaaacttgcttaattgacacaacgaggcattgatcatgactattagttccaatttg

SEQ ID NO: 208069 - DNA, 387 bp, Glycine max
  unsure (1)..(387): unsure at all n locations
agcaccgcggctgcagctaagataggcagaaaggagcattattgttcattcaaaggaagaactatntccaatatttacaaaattagcaatttgcatttttcaatagttctatcacagcagtcaaaatcctgtcattttcaacaatgaatattcccaaagaaaaatattgattgaatttgaagcctatcatcatctaacatctgtcgattataagaaatgaaaaaccgaaagtagccatactccaattgcccagttgttggaaacaatagaaattccaattcccaacctgacttgacttgacagaacattaatgcgcttatccaaaatattatcagcttgttaaaaaatagtatttttcatgctttcagaactaaaataacagaacat

SEQ ID NO: 208070 - DNA, 367 bp, Glycine max
tctaacagataattgtaactatgttgaaatttaatgaaaacttaatgagttgtaaatatgtgaacatagttcaaatggttgagatcaaataacataaaatctttgcgtttatatcattttttcttcatctacttaactgacgtgtgatttgtgatttcctttttatacatcaaagccttgttttgttggaaaaaaaaaactttttgtttgatcatgcttgcgtagagtctattttttaaaaacatatcattaaacgcaaactcattggaaaaatcttgcaaaaaaattataaatcataatttagtttctttcttttgattattttcctttacaactttagccgctgtgctaaacttataatctaaaa

SEQ ID NO: 208071 - DNA, 388 bp, Glycine max
caccgcggctgcagcttaaaaacgatttggagagggccttttattttttttgagtatcacccgggagcgactaatatgtaccaggaccttatgcagatgttttggtggccgggtctgaagaatgaagttaatgagtttgtccttgcatgcctagtgtgtcataaagctaagatagaacaccttaagccttcagggaagttgcaacctttagagatacctgagtggaagggggatagcatctccatggatttcgtagtggggttacctaggacccccaaaggtttagattccatttgggttattgtagacaggttgaccaaatctgctcactttatcccaataaacatcagatattctttatagaggttgactagcttgtacgtcagtg

SEQ ID NO: 208072 - DNA, 363 bp, Glycine max
catttatgtctaaaattatgcataattaacctgaagtgatagaataaaaaagctccatattctatcaaaactttattggagttagaactaattaaatcaagcactcacttgacattttcatcctaatatcatccaaaagaattctaaaagaaaatttgatattttcaatagttcaataacagtgaagatccaaatcaaaacactactataaaagtgaaaatctacattgggtataaaaacacctatatagtaaatgcgacggcgatatttttgaaaataaagcacactttgttaatccagttacgatggtttttataaaaccactttcgatgtgaacgttactaaggcgattctataaaaacc

SEQ ID NO: 208073 - DNA, 374 bp, Glycine max
ggtgcacaacaagttatccacatccacaatgcgcgcataagcccaccatcccctgttggccacctccatctgagctcacgtactcccacgtagcccatatcctcgtttctctcaacaccgggtccccatcaatcctcccaagcttccacaacatccaagcaaaacagcattctaaccgcacaagctatcacagccaagcaaaacagagcaaaggcagaaaactctgccaaaacaccaaccaaatcacagcttttctcacttaaagaccccagtaacaattccttcgatccaattcgttaaccgttggatcgactccaaaattttactggaagtctatagtacataagcctacattgtgaccgttgggatctact

SEQ ID NO: 208074 - DNA, 227 bp, Glycine max
cagacactctccacatctctacggagagggaatcaaccgtcaaaacataccgagcatgacatcagaagtcaatgttaccaagagcacgaaccatggcaaaagtcccacacgcattacccacagttggcatcacaacaaaaactctactgagataagcctgcatcggaacaccagagcgtacaccacactaactaatggacaaagatagtacgctatatgcaaccgaa

SEQ ID NO: 208075 - DNA, 386 bp, Glycine max
  unsure (1)..(386): unsure at all n locations
agtcacctgcaccatgcagactgttgagcttatagaagacanacggtttttatttccttataaggagctctgcctcggtgcgaattgctacaaagcctccatctctgattcgttgggttccacccacttcaacaacttcctaacggatttatttcgatttttaattttcagcacaactcattgtcgtgctcttgcgtggggattaaatcgcgttctctctgtcaacaaccttttaacgtgttcttgttaatcgagccgtacatgctcatattcttaaaggctttttattttgtggcctctttcggcccaataaattaacctgaccaagaataaagatctttcctaatctctaatttcactctttatcataagctgagatccatttt

SEQ ID NO: 208076 - DNA, 374 bp, Glycine max
acgttatctgcatcttgtaaacgaatgttttacaatcgcttttattctaaccttaatttatcgcaggggcttttttggaagaaaaaacaccagcacttgtagattggtccattcactttaacaacgatgtaacaattctcaatttgaacaatgttagtttgcaaaaacataatatgctttattttgtcactacttttcacccgtttacatgaatctaagtaattgtttttcactcatggatataaatatattcttgatttatgttgctgatgggggtttactatcgaagaagtctaaataatacgaagaggctggataaagggatgcccttcaagaagaccaagagtgctttggttgtgaaaaatcaaagggta

SEQ ID NO: 208077 - DNA, 337 bp, Glycine max
ccctagcaaactacccatcatatcttccaaaaccccatacccacgaaatttaagagagatagaagtccacccaaacctgaattttcgaagtcccactcgtagccacgcacttcacgactccgggaatgccctccttttgcgatttggagcggaaatgagcaccaaaggttggagctttgttgggcaacaatggtggatgggagaaaagataaataaggctgcttgagaaagagggagagctgtctgaaattttgtggggctgagtgaagagaaagaagagtgttttttggtcttataaaaaaggattcccctttgtccattattatattcaagctct

SEQ ID NO: 208078 - DNA, 432 bp, Glycine max
  unsure (1)..(432): unsure at all n locations
atactcagcttaatatgggtctctgtagntctacggagagctgtcacctttttattggcatcacacccnctactaatcgagctttcatcacgaaatactgcgtctccatgcaggcgcagggcgaaacaccacagcatcctgcggatggctggcagcgggcaacagacgcaccgccatcacctttagagttcacctctgctcatccacaaaaaggtttgagtattgcctacaccacatggccgaccaatatgcgaccaagtccaaagccaaaggtaagcaaagtactaggtcagtgaccgacaagtcataatgcgtccagctcatgacgttaaagaagcgctactaggaggcaacctagtaccttntgaatctatgcttcgtatttgatcactctttatagtaggacgcacctagttgctcatgatcctggga

SEQ ID NO: 208079 - DNA, 383 bp, Glycine max
  unsure (1)..(383): unsure at all n locations
agctttgagccaattcagacgacaataactntntatcttattgtctgattgagcctgtcatatatcgagacgctcgaaattgaatgttgaatctttgagccaatccaaacgacaataactttttactcggatgtctgattgtgtcccgtaatataacgagactctcaaaattgaatgttgaagctctgagctaattcaaacgacaataacttttaactcggatgtctgattgagtcctgtcatacatcgagacgctcgaaattgaatgttgaagctctgagccaattcaaacgacaataactttttactcggatgtctgattgactctcgtcacatatcgagacgctcgaaattgaatgttgaagctctgagccaattcaaac

SEQ ID NO: 208080 - DNA, 422 bp, Glycine max
gctacattaatttgagcgtctcgaatattacgggactcaatcatatattcgagtaaaaatttattgtcgtttggattggctcagagattcaacattcaatttcgagcgtctccatatattacgggactcattcagacatccgagtaaaaagttgttgtagtttgaattagcttagagcttcaacaatcaatttcgagtgtctcgttatatcacgagactcaatcagacatccgagtaaaaagttattgtcgtttgaattggctcagagcttccacattcaatttcgagcgtctcaatatattacgggcctcaatcatacatccgagtaaaatgttattgtcgtttgaattggctcagagcttcaacattcaatttcgagcgtctcgatatgtgacgagagtcaatcagacatccgagtaaaa

SEQ ID NO: 208081 - DNA, 390 bp, Glycine max
  unsure (1)..(390): unsure at all n locations
gcagcacgcaagcttgaccaaccccgacacaagaggagcaagtctgttattgtaaacctgngtgaacctaaacaagcgagctcctggccgtcaacatatacaaggaacaaaaaccacatagcaaggaggcttgtgtggcggctggccacttgtgaatcttgtgtgacaaaagggttatggcctttggtaatccataaccaagggtgggtaatcgattaccaggcttaaaaatgaagaccggaggctaagatggtctctagtaatcgattaccacggggcgtaatcgattaccaggcttgaaaaccaggtcaggaagctatgagggcttttagtaatctattaccaagggggtgtaacccatcaccaagccttaaaatgaacgcaacatgt

SEQ ID NO: 208082 - DNA, 360 bp, Glycine max
cgactgctaagtgcaacactcctgcgctaagcgtgaggaagactctggaagaagatgagttgtacaagtttgctaaccgcataacttcatctcactaagcgcaccgcttcagttcatccgctaagcgagataggcgcgcttagacaaaaatcactaacatgcgctaagcgggccataagtgcactaagcgcacgagcacgaacaaggtcacctatttaagcctaaaatcagattttagaaagagattttgaactgggattcagagctttgcatgtataaggtttctagagagacaccggtccaagttctagagagttttgagagatattgttgtgtgaagatctatagagaccagatctt

SEQ ID NO: 208083 - DNA, 393 bp, Glycine max
tactcagctgattgagagtgatttagccgtaggggcttggtttttttttgcattcaggaaactgtcaagtaaaacgaccgactgatattttttattatcttattcacagatattttgatgatcttattattattcttgtcaagaaattttgattattctattattattttgttttttttatttaaccgcggttacagtctgaacaatcagttagattttgctttaacagtgtttgaacgacatttcaacacaaatgatcgattgacattcattttatcatttattaggcgagataacggcttaaatgatcagttaaagctcgtttaaagcggaagagaagaataccggacgtgaacgaaattatgatgattgcctactaacaagaaatgaatt

SEQ ID NO: 208084 - DNA, 379 bp, Glycine max
agcttttagtttagagtgagtgcagatgggtttgtagtatcctgtcatacctaatttcgtccggggacctttgattgatgacatgtgaccattcttcggtccttgtgaggtgcttggcacccatcattatgcaatttatgaaatttcaggacatggcgaaaaaccataaaaatggtgacgcccaatcctcaattttccgagacacatcgtaaatcaaatggaagcatcggtgcataattaaaagagggtccgtcacattccgtaagtcaaaaaggggatgattatgtaatctcgataatcttcttacattacggaaagaaaacacttatctgtactaaattcgtaagttcccgtaactttacaaataaagaatcaccaa

SEQ ID NO: 208085 - DNA, 418 bp, Glycine max
  unsure (1)..(418): unsure at all n locations
tcttagtttcagatgatgcagctgagttggtagctacctcatgctctcttctaatgactatagcatcatttctggcgctaaactgctgggagttggaagccatcttctcaattaaatttctggcttcagtaggagtcatgtctccaagggctccaccactggcagcatctatcatacttctctccatattactaagtccttcataaaaatattggagaagcagctgctctgaaatctgatggtgagggcaactggcacatagttttttaaatctctcccagtattcatacaggctctctccactgagttgtctaatacctgagatatccttcctgatggctatggtcctggaagcacggaaatgtttttctaaaaatactctcttcangtcatcccagctcgtgatggaccttggagc

SEQ ID NO: 208086 - DNA, 396 bp, Glycine max
  unsure (1)..(396): unsure at all n locations
ctaaccttattgagatcttctctccttctcttcatgcattctcttctttagtagactctcagcgaggcaagaaaaagcctcattcatgaatgtttattttcaccagtttcatcaaccgtaagaaaagcgtttactatgatagagcgcatcgacgctaatcatggaaaacaacctcnttcttgttgttatgtatataggagagtgctaaatatatccgctactggtgttctaattattattttcgtctaacaagaatggacaggccgttccttaatcatcataacaacagtgtgcattgttgttgtgagtgtgtctctactccacttttgtaccggccacatctatgaatagagtggataataacaccgtcttcctcaaccggacaaagagatatcg

SEQ ID NO: 208087 - DNA, 506 bp, Glycine max
  unsure (1)..(506): unsure at all n locations
aggcatgcaagctcgaagtttctttactaaatataaatatatatntttatatttactaaatgtattacaaagtaatattttgattgtactttaaaaactaatttttaaaagcttattaagtctggcgggtcaatcgtttatgataaaaatattaatattaatatgatatataatattataattatttatttactcttcttaatatgtaacatacctttaaatggactaacaaggttgacagatttatacaaagttcaggcccaagactaaaaatatgatcatgatcggtaaattcaggcttagactataaaaatataaaacagatcaagtcagactagactttgataggatccgactcaacgcagcccatttctaccactacaagtacatatggaagactagataatagttgtagtgatcaaaaagaccacanacaccattcacgggagacaatcttactcaataccattatagacacaaagttttnttatatgaagtagtaactc

SEQ ID NO: 208088 - DNA, 455 bp, Glycine max
ttggataatgatttctatacaaaagttagtcgtacaagttgttttatactcccccaaatgtacagttgtgcttgtcctcaagcaaagaaagaacaattcacttgtcctcaagtatacaaagacagtggccaatcaaaagaaaatggtgtttgattcatcaaggacatcaactgtatgaattgaaaaccatggaatgcttaaatcaattacttctcacaagcatgtagtttttcaaagataggagcacaagtattagagtcatagctgaaataagctagtaagcatgacataaatcaatgaaggatcatcaaccataacctcacagtcattgtttcactcaaactcatgtgtttaggcttatgtcatcatatacaaccaacacaagtttcaaccttcgcatttcatctcatatcatacaacaatgaacacacaaaaatgaatccgaaagactttct

SEQ ID NO: 208089 - DNA, 425 bp, Glycine max
  unsure (1)..(425): unsure at all n locations
agctntacagcagaatttagtaatgacctcttaacctataattatttaacttaatgccattaacctanggaattaaaacaaactaaatggctgagtgtaactganattgttggcaaccaaaagtcacccccaacagccaacaagtcagccaccatttggtctcccaaaaggctgatgcctangttgccaattgggcccttattacaacttgaactaaagcccttntagttgattaacccacaacatatttttggtcagccaactttacaaggattgggccattatttagacaaactaaacactctaaaattgaaataaagtggtgtcatttagtcctccatttgggccatgatacaactcacaaccttggacttttctccttgaaacttgggcttgtattcaaatagtatggaacagcacttgtg

SEQ ID NO: 208090 - DNA, 473 bp, Glycine max
gtcttgagaatacttgcttgagaagcttctttgagaaatctttcttgataagctagagcgtagctacacacacccctctcataactaagctcacctccttgagaagcatccttaagaagattcgtaaagaagctagagcttagctacacatacctctctaatagctaagctcacctccttgagatgagaagctagagcttatctacacaccccctataatagctaagctcacccccatgacaaaaaacatgaaaataaaaaaaagtccttattacatagacaactcataatgccccgaaatacatggctgaaaccctatactactagaatggccaaaataaaaggccttgacgaatgataaacctattcgaatggtcataattgttcacacggatgtccggatcggttacataactcatctagacgctcgatattgacaacggaagctcttgacacattcgaatggtcataac

SEQ ID NO: 208091 - DNA, 466 bp, Glycine max
  unsure (1)..(466): unsure at all n locations
taagcacctgaggcatgcaagcttcgtccgtagatccctcatgtaagactatgcttattctaaacagcattattggaatagcataattaaaaccaaaacttaacccgtagatcccttatgtaaggctaagttccaatcctgcttcaatcaagttctaaggcaacagtacattntccaatgctaaagtcacctaattgtgcacacaaatgagggatcagaccanaagcatataacattaagcattgaaggaagcattgaacacataaaacacaatcaattagatattaggtatttacattagttgttcattagaaatccctaactagggtgtttagacaaccattacaaagaaaccctaacaataaatgagattaanaacaaagaatgatagttccttacacaagaagggggattcaccctcctcttctcagcatctcacactcactctctactcaataatctttct

SEQ ID NO: 208092 - DNA, 423 bp, Glycine max
  unsure (1)..(423): unsure at all n locations
agctttttaatgctgacaactgcagagattttggaagtttttcatttaaacatcgcagttaatggaaagcttaagaactgccaaagatgttgggggaaactcaaatttggttctgaaacttaactttgtgttgattgtcaacttttgaacattgtgcatagaagcatatttcatgaccctatttatgagtttgggctcaaccaaaccatggcgcttgaaatcaagactaagaagggaaatcgagtcatctcgactgaacagaacccaagatacaaattttctaaatttgttcagcttacttaagtgtgaagaattgaatgcaaaattagtgagacatttncaaaggtctntctcctctttactatctcttcctcttcatcttcatcaccaacttcccctctctttcttttcctacccatatat

SEQ ID NO: 208093 - DNA, 451 bp, Glycine max
tgtttttttttctcagattaatgtagcaccatagatagctttgttttatcctagaaatggaatctagaattgacaattaattataggatggaaaggattgaagctgagtctgattttaacttttcaagttgtttgtgcatgctgtgacatcctggaaatttctacccggaattttcgaaaacaatgtattttgaatgattatatatatatatataagtattattcagtgtatatgcatatatgttcttggtagaagtaggaatagtgggggcaagatacgcgggttagactaattaaggaagagaaatccataactggaaggctataggtaaattcttaattaattagtctaaaaatcatcgttgtgcgtgtgacttataatttaacataaccaacctctgaaccacgctcggtgttttattctaagcgttgtgatatatatatttgctac

SEQ ID NO: 208094 - DNA, 423 bp, Glycine max
  unsure (1)..(423): unsure at all n locations
agcttgtctgcataaacattatgtaatctattattgtattataccacaacaattaactttaaaagttgttaatacaataccggttgatttaaaaaattgaacaactctaatccaaggtttgacaagaaaatcccattcatactcatgtttgacacgatttatgaattcttgagttgatagtgattcttctactacacaattgttcattatttctggaatcacacccgcaagtattgaaatgatggatggtgcattggagatactccctttcacaaacaatgggaggttagggttatcaatatccagaccttcccatggttntgtgtccatgactacacaaatatggtattaagaggtttatggaattgtagatggagattgcaagtaaacattgtagtggaacattgtgtattacaatagtgt

SEQ ID NO: 208095 - DNA, 447 bp, Glycine max
  unsure (1)..(447): unsure at all n locations
tcttgatgntggagatattcttcaatcaactcaaatttgttaacactntgtaccccaaaaaaatgctgtaacccttgaaccacagcatgttttactcaaaattgctttaagcgtggcccaatgtgtttagagttatttactcttcagatttttactctagaggtacgttgttacaaattatatgacgttttagattgtgactcaagtattagaggatataattaatttattgaatttcattacaaatattagataattttttaatatataatttatttatctaattaatgacttattcatttcttatatattactctcactaaatattgattaaagataatttatataatgtaacgaacgaaatactccaaattcattagttaaagctacaactaaataaattagtatttctttacttatatctatataatatacaatgaaagatat

SEQ ID NO: 208096 - DNA, 301 bp, Glycine max
tttttacacaacaagctgtttttatttctaacctacagacctcttaaaacacatggcctacttgtcggcctaaataaactattagcacaattggaaaatcaattatttacataaaacctcaatgtgagggctttgtactaaacttagcaatcttatggttccagtaactccttatgaaaactcaagctgcaaactcagtagggcatgtgactggaaaatcatcctgtttcagaattaatggctcacaaagcgaagctgtctttgggcctagggaatatcacacgcttaaaaaaggtaagga

SEQ ID NO: 208097 - DNA, 467 bp, Glycine max
  unsure (1)..(467): unsure at all n locations
agcttctagccaaagggacttaccttgtattattccttngatagcccgtttgagccttgtttccctttccttgttttgaagctcactacaagccttaagtgaaaaaccatgatattaccatatccttaaggaattttggagctttggaattgttttgggaataagtgtggggggtttttgtttcattggacaacttgtnttgttggctatgcttcatgatgtattttgggccatacttgatgtacattgtatattggttaaatgttggacatgctgaatgaaatgttgtttctcataggctaaagagtaaaaaaaaaaaaaaatcgaaaaataaaattcgaataaaaagaaaaagaaaagcaataaagttgagtgaataagatcttaaatggcacaagaatgatgaaactctcnggtctactcttcatgttaaatnttatctttacttctttttatttttaatatgc

SEQ ID NO: 208098 - DNA, 450 bp, Glycine max
tggtttatacatgatttatgatcttgttgatccaatttgggcaaaattggatgagggcaacagtgatttcgaaatctgcccaatttgtgcagcataaagctgtcaaattttgtgcaacagaaaattgtgtttgtgcagaaaatgttgtgtattgctggttgtggaaagggtagtacatattcggttctggacattttctagcaaatcccaacggtcaaaatgtagacttatgtactatggacctccagtaaaattttcgagtcgatccaacggtgaacgaattggaacaaagagaatgttattggggtatttgagtaaagaaagctgtggtattggtttgtgttttgggcagaagtttctgcctctgcccttgtttcttggttctgataattcatgatagttggatgttgaattgcttggatgttatggacgcctggagggattgatggg

SEQ ID NO: 208099 - DNA, 441 bp, Glycine max
  unsure (1)..(441): unsure at all n locations
agctagactatgnaaanatttttatgtatttctcattccgnggcngcncgnactctgcacattatcatgctctgatacaccgataatatgatagtcttctcccctctgcttgaaccattaataagggaggttaccatcagcagacatgcaacagaatgtgaacatttctatttactcttattgcggcaatagacatttgatatgtgtgtcatacttgggttgcttaatacatttaaatataagggtttactgtgtactaatgttgttaagttctttcatatactacatactaaataccttttgctgtataattcatggaaatgcaactttttcttttgtcaataacaatagaaaatgtgaattatgtgtggacattggagatatgtgggcatataatggaaatcaattcgctcacaagacttctaatatgacatttatttg

SEQ ID NO: 208100 - DNA, 465 bp, Glycine max
  unsure (1)..(465): unsure at all n locations
tcccgctagaaatggagtgtttatnttaggactcctatggtcctcattttggggcctgtccccataacagtgttctgatgactgtataaagaaacgtgtaagtctaaaacattgtattacattatctatgctagaacgcaatgttctaataatactggatgattctgtaatttctgttcatgtacaacgcattaatatgacaattgctgcggttagttatagctaagctgcccaatcacctgtttttgagtttgctgccatttacatactctcttgaactcctttttgtaataaactatagtaatttaatcacctttatattgaattcttcaaagcttaatgcaatctcagccagcattgcctgtttttgctcttgcattttctgagtgagcaattactgggtaatttgtaatccaaactttcacgaaataatttatgaagagaataataaaaagattgcaattc

SEQ ID NO: 208101 - DNA, 420 bp, Glycine max
  unsure (1)..(420): unsure at all n locations
atcctctaagtcacctgccgcatgcaagcttgacctctatggagcctagcactctccncactatctgaggacctactcggttcaaaaacaaaatatagatttggctttcaattataattacaaaatatttcactttattttcagatgttcattccaattcctatttccaaacattcatgaaaaaaattgcaccagccacctccgataaactttaaacaaaaaaaaaaactaaattcgcgtataataataaaataaattcaatagaagtttacacgatcattcactgagtctccgacaacaagcattaccgaaattcaacaattaccttccataggttgaggaccttctggcaagtcagagcgaggaaccagcatctcatcgtgctcctgctgctgctgttgctgctgcacacaacacaac

SEQ ID NO: 208102 - DNA, 420 bp, Glycine max
  unsure (1)..(420): unsure at all n locations
tttgagcctaagctaaagtgcctttttgaagaagctgcagaagaagaatccgcttaagcctggaagttttggcttatgcggaaatagggcagaatgtgttagtttcataattcacttaagcctgaaattttttggcttaagcagaatttcattgaagtgcagattgtttaggataatataaatagtttgtccgcctcttttgtagctcatatggaagatagtctaataaacagattagaggaagactagagaaaattctaaaagaatcattaaaaagggcttttgatctaaacagatttccaaatatttggtttgtgacagagcataatggcatcacttgagcaaagtatcataccccgcctagtggatatgagactnttgttgtgtgttcaatgaatcattagtgcatcccatgaatta

SEQ ID NO: 208103 - DNA, 429 bp, Glycine max
  unsure (1)..(429): unsure at all n locations
agctnggncactctaatggaataaagagttcttgngnncctcccattcagtgaaatttcattttctcttaaattctaaaatactatcatttatccacgtttctttttttaattttcaagagaatgtaaaaagttcttcacaatcgatatccacacaatggtccgagccatttatttttggaccacttaatctaacagccataagtaaatttggtatggtgcaagacttttgagcttgtgcatgctagaactcgttgtacaagatatccatttagggacaaaagatgaatagtgtgccacttttagggaccaaattgtgggttaactctaaagacattcaaattgtgggtttggcagagggggaggaaagtgataagagtttgtacagggataatgatggaagaaatggatttcaagacgtaaggtggag

SEQ ID NO: 208104 - DNA, 403 bp, Glycine max
  unsure (1)..(403): unsure at all n locations
catataananacaagatgtaatcgttgatttatgttcccattcttagatgactgaagtgaatcttgtatatctagattaagaacaagagtcaattagttatttattaaaataattctactaaaatacggttacttttcccaaatatattattggcaattattggttaattaatgatagataggatgagtaagcacgtcggcccgccccgcgtatgtcaacccatattggttacagaccgtgtcatccagcccgcattcttacatggacaaataaattggttatctcctccctgcacctcgcgggcatacaagtctgtcatgagcctaatttaaaagagtttatatttaatataatacaacacaatcaaattagtgtaattcaaataacaattagtcattacat

SEQ ID NO: 208105 - DNA, 426 bp, Glycine max
  unsure (1)..(426): unsure at all n locations
aagtcacctgangcatgcaagcttcttgcgtagccgctcttggggcttatatnatcccaaaaacaaatccctcttattactagctattntgaattctttagttcctgaatgtacaaccttcaaattgttgcgcgttcccctctttgagaatgaggaggatcttcataggacttcatccagctgatgtttgtcgtcagtttcatcatccaccacccttttcttccgtgccttctcacgttcattggtgttaaacccatatttatgccttcttcccttcatgtcttgttntatcacaactttagctgaatctcccatcttcaacatnagtgaatctcctgtcttattctccaatgacacactttgatggcctgtatctcttttcttcgtatgttctactgcttcagcttcacaatgcatagagcaatc

SEQ ID NO: 208106 - DNA, 337 bp, Glycine max
attactatgatgacgattattgtgtgacatggtagaagagtggtggtggtggacacttcgatgaaatgagaaattcggtggctctggctctaggacaatcccagtgaggagcttatcctgatcaagtgagttaatgtgagactgaccattggaattgtcgtcacccatttcctataacaacacatcgggaaaacaccacatataacggttaaagaacaaaaaaagattatctatgtattgtagagaaatcaatgatcatcacattcgtacgatatgatataccatagaaattgttatttttaatgagtgtctcattaccaaagaaaatatccaattc

SEQ ID NO: 208107 - DNA, 437 bp, Glycine max
  unsure (1)..(437): unsure at all n locations
atcctctaagtcacctgaggctgcagctattatcaataaatttcggaatgatattggtctccaatgaatcanggaacatatgacaaanaaaatgcaaaaagttgaggttttaattaatagtctttatttatttctatgtgtttaactattacaatttttttaatatcattataatataatttttcattataaatcatattatttgatcattattcatttacatcccttcttatttgttccttgttcattagtatgtaatatattaatataacttatataaaatattaatcattggtaaaatattttttttataaaactactttactaaaagagttaaatagtcacagtaattntatttgaatattaagttttaaagaatatatgaatataatngtagaaataaatattttatactttaacaatgtatttgtatcata

SEQ ID NO: 208108 - DNA, 470 bp, Glycine max
tctacttatgtggcatggcgggcttccttcactttcttttcttctcgctagctttgaccactgttcttccttcccacgatgcttcttttcatgtccgcctgagtgggcttatagcctaaaccatacttcccacgatttccttgggtatttatcatgctagttatgccgccgttgtctttgcctatacccatcccgggttcataaccgttccccaacataactcgggccatcattaccgctgcatcggacagacaaggctgcccaaagagggagtccacagaggaaatgctgaccacctcaaaagactggaaagcagtttctaacgattcttctgcggcttccacataaggcatggaggatgggcagcttaccaagatatcttcctcgcctgacacgatgaccaagtgccccctccactacgaattcagcttttggtggagtgtagaatgcacaactcccactgagtggat

SEQ ID NO: 208109 - DNA, 393 bp, Glycine max
  unsure (1)..(393): unsure at all n locations
tatcatatcttccgtaatactcatcacctctatcatatttaataattttcacatttatgtataattgcccttttacttcattgtagtaaatttctaagacattcattgcctaagaaatctcgggcagtaagtagacataacccgaacatgaataatcatcaataatggtgataaagtatcattcctttccgaaagaactaacatcaaaaggtccacaaatatcagtatgtgttggatcgagtgacctcagaataactaagaaggggaggttgaattaattattcctaanactnntaccaattaaaatttactctnttaaggcttttactanattggtaagagaaagaggagtagaagagaaacttaacagaaagtaaaagcggaaattaaatg

SEQ ID NO: 208110 - DNA, 443 bp, Glycine max
tctgatagtaggacaaagaagaatattcttcagactgtcttcgttcgatataggtagtttaaatctgacttgaccaggaaatgggcacttacagccgacaaggatggtgtggacgacactgtctgtgaaaaatacgacattaacaaggagaaatgggcccatgttttgtcagacccgcagagacccctcgtgggaggtatgtagtttgtgattttagttgttttccacaaaaaatcacttcttataattcatcgtagtaatcattttcattaatgttcgatttttgcaggatatgcggaaaaaagcacatgccatccatatacataacactgctccccacatgttgtctcgtgggggttatgaatatttagaagaaaagctcatggctgagaggacaaataatagactggaggaagctgcctattccataatcactgatggcg

SEQ ID NO: 208111 - DNA, 461 bp, Glycine max
  unsure (1)..(461): unsure at all n locations
gatctctaagcacctgagctgcagctaatgctgagcttangtgangtttgttgtgtatanncatttattanaacacgtaagtctattaatttgaaattaaatntgatgatcacccaaacacattgtaattatatataaaataagggaagcaagttctggctgtgtttgattcaggatatgaaaattgatcatcatcattaatttattagattatgctctaagttgccataaaagacaatcacacatgtaaatgctaaaatattgtaccagtactagtgagctagctgttgacacacatcttggacaattcctttgccaccgaaaaagcctcgaccaagagggctatatggtacaattccaatgccaagctccctgtatggctgtatcaataaaagctntaacaaagtcacttcattataagttataacataaataattaatagctcaagggtaataccaca

SEQ ID NO: 208112 - DNA, 478 bp, Glycine max
  unsure (1)..(478): unsure at all n locations
ttaaatctaagcttctgattaattatgtagacactttagcaacgaactgtgttttcatctaataaaagatatgtaggccaaacctattgttgatgaaacgtataaattcttgataaggaatatttccattaaatatcaaattatgccttatgattgttatatgatgcagcttaaagcaacatagctgtataatctactttcctttttaatttactttgatacttacattggtttctgttgcagagacaaccctagctttgcttcggcatcctgattactgtatctcagcatattcatctgtaagtgactttaatctcaagtcttcttggatttcaagatgttattgctgacagaccgcttagtgctattgtgctataatgatgttactctttgttaattgttgacaacttagtactaatgcataatactgtactgatcttattgctgtgatcgatgaaaccntgcgacacaccacatt

SEQ ID NO: 208113 - DNA, 493 bp, Glycine max
  unsure (1)..(493): unsure at all n locations
agcttaacgttgcccgatcattcatttcatgagatgttgttgaagtattggcgatcagaattgccattccttggattatagggttgaaccaagctcatgcttttacaaaaaggttcatcaagtcaagttgaaatatggaagtaactgtcttgcaaaattggggcaaaagatgaatcgagtcacatcactgcttcatctactgccaaacatatttaggattattgatgtccttgttacttccagtttcaccttgacaaagatgtcatggaccatgttgaaaatctaaattgattcaaccccatatcttgcgtaaaaattcgcaatacttcaattgtacatcattcgcatgcatccatgcttttcattggttgcattgctcgttgcattctttcctttgaaaataaaatanaatgaacttaatcattggtataaaanagaaagggacacgctttacgacgcccttaccgaactcgtgctagagctagagtaatgg

SEQ ID NO: 208114 - DNA, 486 bp, Glycine max
gacacttatatactaagcgttattatgaaataagtgcagccatctccctaagagtcttttctcgtatgtggaggtgagccatggtctcactatgaaaattagtaatcgaatgctcataatcaaaatgttcagaatcaccagcaacataatactcataatgctcaaaatgcatataatgatcatgatgcacactatgcctaagtaatctatgaaatgttctatctatttcatgatcaaatggttgtaaatcacctgaattgctcctattcatgcactatatgaagcaaatcatgtgtttctcatacaatcaccatgggaggggtaaaactacgactatagtcaaacgatatccaaatgagctgaaatcttgtgagcaacaccctataatcatgaatagatagcacattaatttttagacaaatatacaaagtctaactatgataactgcctaacgaaaggttattataataagacaataatacttga

SEQ ID NO: 208115 - DNA, 313 bp, Glycine max
  unsure (1)..(313): unsure at all n locations
aatatcaatatgcttagtgctntcatgaaacacttgattagaggctattngtattattgattgattatcacagaaaagaatagccggttggacaaaagatacaagatgatcttgaagaagataagtgagccactgaagctcatatgttgttgaggctaaagctcaatattcagcttcggaggagctgcgggacacagtagattgtttctttgagcactaagaaatgagcgaatggccaccgtaaatggaacagcctgtgatggagtgtctagaatcacgacatccggcccagttagagtcactgaaagctttg

SEQ ID NO: 208116 - DNA, 471 bp, Glycine max
tactcaaccttcacaatcgtgaacactccatcagaattagtattcttttcttataatctggaggattagagcctaaaggaagcgccaaatttcgaattatatcaataatatgaggctataattcagacatgagacgctccacatcccactatcctttattgttaataaagaaacattcacgctcatcatgaccttgctgatttcctgaattacaaatctcagacaacttccctactcctgacacccaattatcagaccagaaccgagttgatctaccattaccaataacccatctcacattatgtatcaacttatcccaacaaattaaccataccacgtcagaaattagaactcggtatgttggagctaatcactggaagtgtatcatacccacacttatatgttgatctaatcacacgaacctataaatcatttggtttgtgcacatattccatccagctttcagcatac

SEQ ID NO: 208117 - DNA, 478 bp, Glycine max
  unsure (1)..(478): unsure at all n locations
agctagtangccttagaacttcttcatctatggagtccttngcttcttgaagatcaatggcagcaaaatgaagaaggaggaaaggcgattggagattccacttcaaggagaagatgagccaagaacatgttcaccatcatatgaagccatggataagagcttgaaggtaggagaatatgagtggagggagagggagagaggggaacaaattttttaagagagagaagagagagaatgaggtctaaactttgaagtctaatttcccaaatgatcaatgttacaaaatgaacacacaaggcctttatttagagcctaagtgtcaaacaaaattggaaggaaatttgaatttctattcanaattcactttgaattgaattngaatgtgtggaggcaaatttgaagccacaatttcactaattatgattagtgaatttagctatgctcacccactaatacgagatcaattcaagatctcact

SEQ ID NO: 208118 - DNA, 448 bp, Glycine max
  unsure (1)..(448): unsure at all n locations
ctctctttttctctcaactgttcttctttcttcttcctcttttcacttctgttcttcctttctcttgcacaaattntgtgtatcttccattgatgatgatcatggaaggataaacattcaatcaatccaaggatccactccaagtaaggatgaatntgagttttggtttagtatttctaatctgtgtgaatgtccatctttttcttcaatcctattttcgattttcatgattatgaatatgtttaggattgaaatcgaattagtttatggattcctttcctaatttcaactttaatcacaaattgtttggatgatattccaacctaatttgtgatccctatgaatgtagggattaattcgattgaaacaactctaatgacattgattgaactctcacaacatgatcattctctacagaaccgtgataattcatttgcatatgatccta

SEQ ID NO: 208119 - DNA, 358 bp, Glycine max
  unsure (1)..(358): unsure at all n locations
ttaataatttatcacacataacaataaatatatgatcatatgatatatataacacctaaattttaaataaaaaaaattatcctattctctaaatattagaaataccaattttatgagtctttcccatgaaccgacttatgattaacctttatagttcttggaaatatattatcaccgttgatgatactttggaaataagacgagttttttgcattntaagatattaatttattcataaaanaattcaaagataaattctgggattaaattgtttgatgtttgaaaaaaaatcgtgcttataaataaatattctaataaaaggaaagagaaaggtttctccttcgctttaatttaatta

SEQ ID NO: 208120 - DNA, 443 bp, Glycine max
agtgaaacctgttctgtttatcagttgggagtttatttatcaaatactttatataaaagtcaatgatattatcattaaggcatttctgaggctgtaaaagctcaatatcgctctttctgatacaaacagcatcatggtccccctttggataaaaaaacgccttttctatgtcattgctttcaaatgcagccggatcatgctccagtatctggtctcccaaattattttcatcttctgagggattgaagttgaagtagaagtcaaagaaaatgttagacttgatttttttttttttatggaagaaagaaataaaacataaggaactattgcctaacataagtaacactgcacctaaagaatcttgtaattacgcatcttgttatataataacttgtaaataaattactatgaatgttattttgtttaaaatatgaatattatat

SEQ ID NO: 208121 - DNA, 335 bp, Glycine max
  unsure (1)..(335): unsure at all n locations
acaaacaaactnnttagtcatcttaacaataaaacatgaatcacaattgaaattccagaactaagtatgctaggtgcatgatcagaactcaataatagattacagcttcacaatcaatcataaaataataatatttcaaaattaatataaaaaaggaaaaagatacatattttctcaccacccagataaaaaagcagccaactttacatgaagataaacacggggtagtagtataagctatattcagcccacacttgaaactattgattacgtanagagtgaagcagaaagtgtgtgtgtatcgagagagagagagagtctaatggagtaaaagc

SEQ ID NO: 208122 - DNA, 432 bp, Glycine max
acttgtagagttgcaagcttgaacactcacaaaccttattcttatcttattacatttgcactcagcacacacttataggtcagaacatgtcttctataagaggaaaagggagaaaaaaaagtaagcttaaaatccaaatttatttggagagccaccccatctaaatttattgactggcaaaccctagaaattgttaaaattagcagaaattaaagagtaactattttcctaagatgaacacacaccaacatctaaagttctcaaagcatacatacctctgtgatttgctagaggtacataataatatactaaaaaaccacttcaaaagtccatcttctaaagtgttatgatcttattactataacacatgtatctttcttaatcttctattaacacacataatcaaaccgatacatctctaagtgccacaaa

SEQ ID NO: 208123 - DNA, 473 bp, Glycine max
  unsure (1)..(473): unsure at all n locations
agcttcttggaggggagacttatctctcctctaatgtataagccatataatcgggcccataatctttagcaattcttgctctcttacctcttcgaggctctatatctggttctggttgtgcaagattttcactactaatagcaggaagataattggatgaagtacccccactatcccttaatttaaaaggaaatttattttcataaaaatcagcatcatttgactctatgatcacttttgcgtttaggtcataaaacctatacgctttgctattaatagcataaccaatgaatacacattcataggctctacttgcaagtttaaccctcttaggatctgggatccttacataggccaaacatccncaagttctcanataagacaaatgtgattgtctnttctttaatatctcatanggagatgtctngctttnntgatgtgggattctatttagcacataacanacagttaac

SEQ ID NO: 208124 - DNA, 471 bp, Glycine max
  unsure (1)..(471): unsure at all n locations
ngaagaagatgctttaatgggggataagaaagatttattttggagcacgaaattgaaggaataaaagacggagagaagtggaactttgaagcgtatctcataagactctcattcatcaaagttacatcaagtgttacacatgcttctatttattgactatgtagcttccttgagaagctttcttgagaaaacttccttgagaagcttctttgagaaaacttccttgagaagctagagcttatctacacacacccctctcataactaagctcacctccttgagaagcttccttaagaagattcctaaagaagctagagctgagctgaacatacctctctaatagctaatctcacctccttaagatgataagctagagcttagctacacacccgctataataactaatctcacccccatggaatattacatgaagatacaaattataatccctactacaaagactactcatat

SEQ ID NO: 208125 - DNA, 382 bp, Glycine max
  unsure (1)..(382): unsure at all n locations
cttaaataggtggccttgatcgagctcgtgcgcttatggcacttatggaccacttagagcacgttagtgattcttggcttaccgcgcctttctcgnttagcggatgaactgaagcaatgtgcttagtgagatgaagcggtgcacttagcgaacctatacagctcatcttcttctggattcttcctcgcgcttagcctaagagtgttgtgcttaacggacgctcgctaagccagcagattggctgggcgagaaagagaaaactgcattttccanagcttgcctaattaatttgaaatcgagagaatatgattattatacacacaaaatgaagagactcagtatgtatcacctattcttaacagagaatacttaggacattaca

SEQ ID NO: 208126 - DNA, 460 bp, Glycine max
  unsure (1)..(460): unsure at all n locations
nnttgcttaggttttcattatattantagcatttcatttgttcttcttcacatttgtatgcatcattggtgtcttctagcagtgatgatatgatttttataagataaccaaatgtttacttcttccaaaattgaggtgtttgtttgggttgttgaaattttcatatttgatgttatgcttttaccctttatttcaatgttgattgttctttcattgcctcaccagacaagatctaagaggttcttggaaattcaacaattgagggagcataataaagagtatgacatgaagacaacaatatatttggttaaagaaacaactaanaccaagtttgtataaatagtatacgcccatttctgcctcatcattgaccctaaatataacgatcaacaattaatagcaacagtgagtctcctgctacttgcttgattttggtatatgcagntacattgaaaacgtg

SEQ ID NO: 208127 - DNA, 375 bp, Glycine max
  unsure (1)..(375): unsure at all n locations
aactatatgacaagagaatgtcatctcttataaactaaccgaagtcatgaagtgcattatatgacgtctctnttattaacgcaaatttgaatgacgttggggaatgccttataccaaaactattaaaagtgatgagtgataatattcgagttggaaatctgaatgaatcgcatctcatattggaaaaatatatattatatatctataccttggcgtgtgaacttggcggttgaagatacatgtcggaaatcgtcgcaatttggtgcctacaagaattgttctccagagatcaattaatagagttctgagctttaaaacatcaggtatacggatatatactaagagcaaacttgtatcatacatattataaataac

SEQ ID NO: 208128 - DNA, 391 bp, Glycine max
  unsure (1)..(391): unsure at all n locations
acacttaaaactaagctcattaaggataaagattaaactttatctatctantgtaacaacattaataataatgaacaactctttaaaaaaaaaataatgaactaaaaaaatctctcttgcattcatggataatgaaaatatttcctattaaataaataaataattaaagaaaaagttataaaatgagaaaatgatgaatatttatttacctgacattatggatgatgatatgttcaaatcaaatgtaaaatcaattcaatttaaattgattaagatatataatcataaatcaattatttaaaggaaatattctaatgaatatttactaaataaagaaaggaaataaatgaataaattaagtatatgtttaagaaacattaaatataaaaat

SEQ ID NO: 208129 - DNA, 402 bp, Glycine max
  unsure (1)..(402): unsure at all n locations
agtagatgaagatctttctgtggctctcttatgtactcctctaagaacaatagcattatttcttgcactgaattgttgggagttggaagccatcttctcaatcaaattcctagcctcagcaggcgtcatatcaccaagtgctccaccattggcagcatcaatcatactcctctccatgttgctaagtccctcatagaaatattgaagaaggagttgcttagaaatctagtggtgagagcagctagcacataatttcttgaatctttcccagtactcatacaagctntctccactaagtttgctgaagcttgaaatttattttctgatggcagtggtcctagatgcagggaagaatttctccaagaacactctcttaagggtcatcccagtgaaaatagacct

SEQ ID NO: 208130 - DNA, 456 bp, Glycine max
  unsure (1)..(456): unsure at all n locations
gctcatngactctagaatggtgcanagaatgacatatatctttttagtgatcngcagaagaacatataccatagactcttgcaacatgtgcaaatgcagatttctgattcatggcaagctgagttactatgttgaccaaggcatcaagatttctggtggtgaggacagcttgcacacaatttcttgaatctttctcagtactcgcacaagctctctccactaagttgcctgatacctaaaatgtcttttctgatggcagtggtcctatatgcagggaagaatttctccaagaacaccctcttaatgtcatcccagctgaaaatggacccgggagcaaggtagtatatccaatcttttgccactccctctagagaatgacgaaaagcctttagaaagatatgatcttcttggacatcanggggcttcatggtggaacaaacaatatggaacttctta

SEQ ID NO: 208131 - DNA, 448 bp, Glycine max
ctcaagttctaagtatggaagatcattatatgtttatgttgaagactggggccccaataagaagcgtggcggcacggttgagatgatgtcgaactaaatatatagtatgatatgtcgttgtattggtcttggtcttgttttcagaaacatatattaatgtgaaataaaaggtcgtgaatgtctcattgttctttgggtcctaagatacatctactttgtttattttactttccctatgttcattcttcataacaaatgaataagatcactaacggaaatttcgattgtatatattattgtttgtggaccatgttactagtattacgattgatgttagttctcatgtatggctaattcatgcatacgtaatatttatattatgtttccttaagctgatacttctttctatgacatcttttatatctgctcacaatgtcgtggttacgct

SEQ ID NO: 208132 - DNA, 425 bp, Glycine max
  unsure (1)..(425): unsure at all n locations
tcttctcaaaagtgtattatgtaagaattgaatttagatcttttcacgtatgttggcaatagatacactcatcggatcttagtaattctaataattttgtagcttttaacaaaatttagccaataaaagtagtatattcaaaagaatttatttctaatgcttctcttcttaaaatgtacaattttttctttgtctacttccacttatgacttatgtttagagctatgcatttggacgtccacaaccttaatacatgggcatcaatttctaagccattaaattgtggggttgtttaaagcttaacctttggggtgaacgggattaaccgcgaactctgcaaaatagaactagactaataaaagaatcgtgggagtgcgagaacnggcacattgtagaacgttatctcacttccttttaccgatatt

SEQ ID NO: 208133 - DNA, 454 bp, Glycine max
  unsure (1)..(454): unsure at all n locations
cccaccatcttttcacagtagaatactggttatgtgtctactatcattgtcatcattttttttctccatcattgaagtgccacttgagctaccatgtctctccacctttgggcgtatgtttttgaaagattcgtgccccctttttgtacatgttctgtagttgcatcctatccgaagacattatactgacactgcctaacataggcaaccactatgtccttccaagaatggactcgggaaggttccaagttagtgtcccaggtaacagctaccctagtaagactttcttggaaggaatgtattatcaattcctcatcttttgcgtatgcccccatcttccgataatgcatctttagatggttcttgtggcaagtagtccccttgtacttgtcatagtccagcaccttgaacttgggaggggtgatgatattgggtactangaacaactctccta

SEQ ID NO: 208134 - DNA, 479 bp, Glycine max
  unsure (1)..(479): unsure at all n locations
agctntanagggatactaggtgtctccctttatggccttcttaatgggnggagccggntgcgggatgatgaatcagtgatcactagcctagtgcctgctcgtacccgtccctgagcattggttaagtgggaaaaggcattacgcagtgaaacatggctacactaccacttacctcggntcatccctgtcttggaattggcgctgtattgaccatctcttgaaacgatcctgtccctgtctttcgattcacaagataaaaatgcatgtgcatgtgtatgcatgagcagtttcaaacgcaataattctttagcaaaagcctggtgggttcagttntaattaagtgcttggggcatcccatggattgagagaaaaaggctcggatcattaaaagaatacgcatcttttaaggcacaaagcgaagatcggaaccatgaatcatcaatctcgtgttctttaaatgaaatgtgacgaaaattaca

SEQ ID NO: 208135 - DNA, 436 bp, Glycine max
gaggaaagtgacatagaagattcatttgtcttagatgaagatgaagatcttagcctctttgtcaaaagattcaacaaatttattagaatgagaggaagtcaaagaagacaaaacttcaaacctaaaagaagaactgaagagtcatctcaaatcccataatgctttgagtgctatcaacccggacatctgagggctgatcgtccaatctttaagagaaagatagagaagtctgaatagaaaactattggagataagaaggcaaagaaggcctatgtcacatgggatgataacgacttagaatcgtctgatgattctaaaaaagaaatgattaatctatgtctaatgggcaaaaattatgatagcgatgaagaggtaacatcttctaacaaatctatttcttttgatgagttacaagatgcatgtgttggaatacata

SEQ ID NO: 208136 - DNA, 199 bp, Glycine max
tctcaaccacgatatgaaaaaattatggtatcaggaaaccccatcgcggaaatcgacgaggacgccaaataggagaaaaatacaacggcaacaagtgtgctactaattcaaaactaaacacaactcacaagcactatatagatgaggaatccgagatgcaacaactaaccttgtggcttgagagagaaaccacaaacat

SEQ ID NO: 208137 - DNA, 359 bp, Glycine max
  unsure (1)..(359): unsure at all n locations
aatggcgggaatcttggaacccacaccattcttgggaagggttcaagatcgcaatctcccaaaggtttcaagcttctaacctagggaatccttttcaggcattgttggcgctagaacagganaaagcagtgcaagaattcatagtccaattcgagaagcatgtcggaatggtgaaggggttggaggaaccgtntctggtgaaggtgtttcttatagggctaaaagaagagatcaacactaaggtaaggctctatgaaccaaacaacttgatggaatctatggtccaggcttggtaggtagaagataaaattatgtcttacgaaaattacccgcgagtaatactaangggtatatatttt

SEQ ID NO: 208138 - DNA, 416 bp, Glycine max
tgtaccgctaatgtgctcatacttcagagaacatttttggttacctttcacactgatgaaaccaccacctccactcttatgttttgcatcaaaagctttgaatgtaagatttcctttcttccagttctttcccattcagtgcactggtgtaagtgccaatcagtagtatgtaacagaattcacatctaataacatgtacatgctactttgagcattttcattactgaccaaacttgcaaaaattcattgattcaagcagtatgagaaatctaacctgtacatattgagataaacctttcagaagtgttccacctatatatatccatctgtgcatcaaacacaaaagtgatgacctgcctatggagcagtatattactatttcctacaacagaataataatgtgaaaatcaaaacat

SEQ ID NO: 208139 - DNA, 421 bp, Glycine max
  unsure (1)..(421): unsure at all n locations
tagacatgatacatgtcanggtttgtttttgttcaatgataaaagggatgccccacattatttccatgacacaaaaatgcaaaaatgatgatttggaaactttatgcaaaactggtcatgcatgcacctatgcggacactcaagtgtcaaatttttatggtcatgtgatgctagggctcaagattcatttcctctattttaatcaacccaatgtttccaaaatatgttcttttatcaatttgtgcattcatccgagtccatttcgggcgtccgggaaaatcttcacagcattcacccttcatgtgtatacacattttttcaaaagctagttacgatcagtgaatgtttccaaagaaaagttggatatcgtctcttttcataagcatgttggtctttcaacttgacaacttaatttttcctt

SEQ ID NO: 208140 - DNA, 372 bp, Glycine max
  unsure (1)..(372): unsure at all n locations
ataaaatggagactgcgatcaatattgggtattatattctgataatgccgtttttactatggatattattccatgctatctgacataaatattccgttgcagttttgcttgtagtttgcttagacaaggaatgaagcagattataattcatttggatagtccagaaattcaagcactagagaaggatggagacaagatggctattgcaaaggtaaagtaaacttgagaccttagtctagatgtcatctatcatgacttagcttgcatttctagtaaaacgttatagcaagcatgctaatagttggttnttcttcaatattgcaatattccagtgacatgctcttacgcgtagctgagaagtcagcttaatct

SEQ ID NO: 208141 - DNA, 448 bp, Glycine max
  unsure (1)..(448): unsure at all n locations
acatcttcttctaattgaaacaactcctagaattatatgtgaaatggattagtaaataactactatcacgcaactatgaatacttcagcaactgtatactttctaccacaaactataacagcatgcatcaaattattacatggaaagcccaagctaacacctgtttcggaaaatttatatgataaatcaccaatatttgttgtttaccttctcaactcccttcacatttttacgaaactttctaccctttgaaccagttctttcttcctgatgtagtgcctcagctgctntttttagttctcttgcttttttacccagttcagtggcttcctacagtaaccagccaggaacaccataaatatagtatggcatatcatgtaaccaaatacacacataatcaacaatntaatatatctccttcagtaacaatacagcaccttgatatact

SEQ ID NO: 208142 - DNA, 453 bp, Glycine max
  unsure (1)..(453): unsure at all n locations
agctgggntcgaggtactcatccgttgtttatctattaacgatgaagaacgaatgaagaacgtcgaagaacgggtgaaacctttgcgaaattcctcacggaaaacgttacggaaacgtttcggaagcgcctcggcttataatttcttcacggaaacaatttttccaagcaaattcgaaagagagagaagtgccaaaggggctgaacccttttcttcttcacttcctcccctatttatagcaaaatagggcaggtggttgccgcccagctcgcccaggcgagccaggttgcttcctccagaagcaacagccttctggaggaatattctggagggcccaagtgggcctgggtgctattngcacccncattnttactaagtacacccncctctgcttttttttggtgattcntttttcgtagaggtacgaanacttacgaattccataacaatact

SEQ ID NO: 208143 - DNA, 465 bp, Glycine max
  unsure (1)..(465): unsure at all n locations
ngctatgagatatttggttgttttcattctcgtccgggcggnggagactgcgtgggcgtctccttctcttttcctcgcgctcactactggggatcttctgttgttggtggaagcatattcgaacttgcctttccgtaatccagattcaatcctttctccggcgaagacgagatccgctaagttagctggcatgtagcctatcacctnttcatagtagaacgtgggtaacgtatataccataattgtgatcatctccctttccgtcatgggcgggacgacttgngctgcgagatctctccatctttgggcatattccttaatggactcatgctcttgcttagtcatactctgaagctggttccgattgtgagccatgtccgtattgtactggtactggctaatgaaggcagttgccaagtccttcatgatcggatctgggaagcttcagattgtataccatgctac

SEQ ID NO: 208144 - DNA, 447 bp, Glycine max
tctcggctcatgcggtgaacgcctatagttcaacactccgtgtctcctaagacacccacccagagggaagctccccaagttccaactccgaacacgactctaccggccggtaattccagacacgacatggaacttccctccgatgccattgccggaattcaccccgctcccaatgacgtacgaagatcttctaccatccctcatcgccaatcatttggccgtggtaactcccggaatggtcctcgaaccccctttcccgaagtggtatgaccctaatgcaacttgcaagtaccatgggggtgtcccggcgcattccgtcgaacaatgcttggcccttatatacaaggtccaacatttgatggatgccggatggctgactttccaagaagatcggcccaatgtgaggaccaacccgctcgccaatcatggatggtgagcagttaatgc

SEQ ID NO: 208145 - DNA, 452 bp, Glycine max
  unsure (1)..(452): unsure at all n locations
agcttacaaaattataatntaacttcacttaaacttctagctcacctttcacgaaatgccattattgtatgaataagggagattcttcttttaagtacatgataataaggtatggagttctaactgggaaatataaataggttcctaagggaactaaagaggttgctaaccaaaaaagacctaataccatttaggtaccaaaatctaccttctaattttgttntgtaggtgtgcctagcagttgaaaggcaactacggtatcttgatacttgttgctcaaggcttatgacatgagacaaatcaaaagaattgtgtctcttatagctaaagaaacgggttttgtaacctatggagataacaacaaagggagaattattgatgtaggtaatattggtaattccctaactacttccgtagagaatgtcttatacatggaaaggctaanacacaac

SEQ ID NO: 208146 - DNA, 495 bp, Glycine max
  unsure (1)..(495): unsure at all n locations
agctggagctattcatacatacctctctaatagctaagctcacctccttaagatgagaagctagagcttagctatacaccccctgtaatagctaagctcacccccatgacataaaacatgataatacaaaaaaaaagtccttactacaaagactactcaaaatgccccgaaatacaaggctaataccctatactactagaatggccaaaatacaaggcccagacgaaggaaatacctattctaaaatttacaaagataagcgggctcatacttcacccatgggctcgaaatctaccctaaggctcatgagaaccctatggccttcgcttggatctctagcccaatctacgtggagtcttctacccaatgccctttcggggtaggattgcatcattccctccaccttggaaaggattngacctcaaatcccganggtcttcatgctctanggctcttccctcaacacctggaaaaagaacaaaaacatatgtatta

SEQ ID NO: 208147 - DNA, 423 bp, Glycine max
ggcttctacaacacaccctcgcctttagaggactacacgttctcgccttcagaggactacacgtctctgccttcaaaggactacacgtctctgccttcaaaggactacacgtcctcgccttcacagggctacacgtcctcgccttcacagggctacacggcctcgccttcagatgactacacgccctcaccttcaaatgcctacacgtccttaccttcataggcctacacgtccttgccctcggagggctacaggccctcgacttcagaggactacacgtcctcgccttcagaggactacacgtcctcgccttcagagggctgcacgttctcgcctttagagggctgcacaccctcgccttcagatggctgcacgccctcgccttcagagggctgcacatcctcgccttcagagggttacacg

SEQ ID NO: 208148 - DNA, 454 bp, Glycine max
  unsure (1)..(454): unsure at all n locations
aataaggacacaccccaacaaaggataaggacacatcccgataatggtacactgtacacaatctttggaggggtctttcatatgaatttctatatttaataatccataagtgtggtcaatatatagattggtatcagttggtcggatcaggttctttatatatagcactgagtgtgtgtatatatatatactatttttaaactgtattgtttttcaaaataaatattataagcttttattttgtcttaattaatttttaaattacatgaaattatttaatgggtcattntattaaactgaggttaagttactgacggaataaatcattacccttaacttaccttcaatcttagtctttgataaatttaagatcctttcataatctaatttgtgtttgaaaaaaaaaacagtaaaaaacgttttatatatagatggacaataacctccaatcaaa

SEQ ID NO: 208149 - DNA, 460 bp, Glycine max
  unsure (1)..(460): unsure at all n locations
tctaagcttatgtaagagcagcactctgcctttatacntatttcttgtttagctatgaacggcctgatgaggttgcctcttaacacgagtaggcttctgatcattggaccaataacactcaaaaaataggcatggcctccttggtcatgccaagttatgcattaaaaagttgttgatgattcttgtattcttaatcgactttaagactccctagcatccttatactaagacattaataatagttcacaattgcaattgcaaatgttaaggttaaaggttttggggcctcacaaccatatatgcaatcatcctattcacgtttatcctcggtaatgtttcacaatatcaaagatcttaataaaactgtaaccttgatcagtgtgatcacaattatgtaataccttcataaacgcattgtatgaagaacaaattctgatacttacaatttatcttatgccta

SEQ ID NO: 208150 - DNA, 487 bp, Glycine max
  unsure (1)..(487): unsure at all n locations
gatcctctaagcacctgaggctgcaagctgtaatacggaaaaaagaaactatttngatcttaataaagatgaaagccaaaaaacaagaaatgaattaaaaagtctcggatttggaaacttacccgttgaagaatgaagaacggacgaagaacggtaaagaacggaggaaaaccttcacggatttgcttacggaaacctctcggaagctttacggaagcacctcggcttggattttcttcacagaaacaatttttttttacccaaaacagctgaaatgcatagccaggggaatcaggcacccttagaacaacccccttttgcctttntataggaaaaagggggaggaggttgccgcccagctcgcttaggcgagctgggttgcttccaccttaagcaagaaaatgcctagaaacctctagaagggcctagaatttgaaaatactatntgcacccnccattttactaaatacacccncattgccccttt

SEQ ID NO: 208151 - DNA, 456 bp, Glycine max
tatctacacatacctctctaatagctaagctcacctccttgttatgagaagctagagcttagctacacacccgctataatagctaatctcacccccatgagaaaaaacatgaaaataacaaaaaaaagtccttattacaaagacaactcataatgccccgaaatacaatgctaaaaccctatactactagaatggccaaaatacaaggcctagacgaaggaaaaacctattctaatatttacaaagataagcgggctcatacttagcccatgggctcgaaatctaccctaaggctcatgagaaccctatggcctttccttggatctctagcccaatctacttggagtcttctagccaatgcccttacggtgtaggattgcatcatatggtgcctaccatgcaccctttggatccagataagtccaacatgtgcctgtgatttcccacactgatcac

SEQ ID NO: 208152 - DNA, 531 bp, Glycine max
taagtcacctgaggcatgcaagcttatgataaccatcattcctacatccttttatactttaatacatcccagcgaaggtctatcttacatattaaaaaaaaatctcgaatctctctacctagacaaaaaaaaaatatagcggagcaactcgtgtgtgacgggttattattctggataaccaaccattacactgagtgagaccacattcgttgtatattcctacacacctaaataaacattgcccacatcacagaagaacataattaatgctaaagttaacaccaactatcaccaatattataaagaagtataatgagaactatatataaatagtgtttgaatatattatttcgttagatgaattaattatacattgtgtagaattgaattatataattcgtatgtcaaattcgtacttagactagaaaaaatgtacatactacatgtatcataaatcaataatctatatatgtttttcatgcgtatgatgaccatcattcttgcatccattacaactataatacactccaa

SEQ ID NO: 208153 - DNA, 456 bp, Glycine max
gtatattctgcatgtcatattcttaatagagtgccttattattattgtgtaaaaaccccttatgagctatggagaataatataaccatacctgaaatatgataatgtgtgggagtgtctaacaaagataaacatccccatttataagaaatagaaaattggaccaaaaactgtcgattgagtttctgtggatactttatacataatactacttatagattcctatgtgtttattcagaaatgtctgaaatttctaatggtatgatgatggagtataaagatgtcactttctttgaaaatcttcctccttataaaataaatcgtcaaatctttatatggtttgaaacaagctccagagcaatgacacaaaagtgtgattaagttactcttttgtatgattgtcaaattaatgataatgataaatgcgcgtgtgtgacacaattagatgataatggat

SEQ ID NO: 208154 - DNA, 420 bp, Glycine max
  unsure (1)..(420): unsure at all n locations
gatcctaagcacgagctcagctttaatgtacatataccttattgctattcaatctatgttcagggtattatttgggttttgtgtgacttgatcaaataaattcaaatgacatgaaagagaaaggcgcgttctgacacagaatttcaggaaaaaataatctaacatttgtcagtcactacttgaaaacatttgaattactaatgcttatgtcagaaggcaatgatttgaaaacaaagcctcctaaaatattgtgttccatatgctgcagtcgatgctactgttgttgaagccactaagtagctgcaccaaanaatggttcaagttcacatctgagaagacttgctagaagggaaacaaagaattctttgcagattacctcanataagtaacatatgattgagtttccggggttccaaactc

SEQ ID NO: 208155 - DNA, 462 bp, Glycine max
attaacagttttcatgtaaacgagttgtctatattttggcttctattctctttcctactctttctctcttcgttctcttctctctcttccttttcttttcctaccctatctcatgctatatattttaagctaaaagatataaatgagaatttataattatttttaaaattcttatttgaagctttagttttaaaataaatgttaaactaaagaaaaatttagatcaagcaaaactttatagtattttttttttaaaaaaaaactatagcttaaaatctactttatatgtaaagttaaaaaatattttttaaataattactttgaatttaaactattgtacaattgttaagcttaaaagttatttaatgttatgatttcttgattaatgtgttcttagagtttaaaaattgagaaaaagagagaaataaaagtgaaaatgtttaacgtgtattgtgaaaaatt

SEQ ID NO: 208156 - DNA, 500 bp, Glycine max
  unsure (1)..(500): unsure at all n locations
ttaagtcacctgaggcatgcaagcttataagaacaanattgcctcaatcttatccaaatatgcatgtgaattangatgcatcaacaagaatcaagccaaggctattgtgcaagcaatcaatggggaaaaacacaccaaatgattatgatgatggatggctcatattctcacaaaggtaaactcatcactttcaaattgagctttcaaaactatcatgacatgtagagaagaatcaaggatttcaagtcacaaaatgtcaagaacttttattttcaaaaaaattacccatttcttgaacatatcctataattcaaagaanaacatgcaaattcgtacgagcacacaaaattgacccanaatattaaactaaaaatccgacgaaactaacaacattaacaaattaacacaactaacatattaacanaaccaacacaactagcataatcaaagaacactccnncccccatacttaacaacacatttgtctcatgagcacaatt

SEQ ID NO: 208157 - DNA, 457 bp, Glycine max
  unsure (1)..(457): unsure at all n locations
tgcatccatctccctaagagttctctcacgttgtggaggntgagccangnnctcaatatgaaaattaacagtcggatgctcaaaatcagaatattcaaaatcaccctcaacagaatgctcaaaaatgcatagaatgaccatgatgcacaatatgcctaactaatctatgaaaggttctatctatttcagggtcaaagggttgtaaatcacctggattgcccctagtcatgcactatatgcaacaaataatgtgtttctcaacaagcacctaacaaggggataaaactacagctatactcaaacgatatcaaaatgagcagaaattgtgtgaggaacacccataagtcatgataaggtatgacaaatattntcaaacaaaaattcatagtctaactatgataactacctaagcaaagtttagaaaaataagacaataatactaaagaaataaaataaa

SEQ ID NO: 208158 - DNA, 465 bp, Glycine max
  unsure (1)..(465): unsure at all n locations
tcagagtcacctgcggcatgaagcttcgacattctaatacttttataatttgtaatagaacacacaagaagatccaactcaagtgtatacaaaataatctaattagtctaaagtattacctgttgagaattgcagctgatttggcccagagaaaaagaatgacaatgaggaggaggagaacattagaaacaagagacagaagagtataaccagatctttcaaacacaacccanacagctagtgtgaccaacaatatccccacagtaaggttcttccgcctccacagtattaaatctgcaactgcgttgaagcatggcattgattcagcatagattcanagatcatgatcaattaccaattcattattttcttctgattctgacccatctcccattggtactaaatgcaaataaataactaaaacaaacaagcacaggcgcagcccatatagctattccacagtta

SEQ ID NO: 208159 - DNA, 442 bp, Glycine max
catctattgaattgacctggattctttctcttctaacagaattacatgtttattttcaaactcctttgatttactgtgataatcaaagtgcagtgtccatagctcacaatccagtgttccatagtagaacaaaacatatagaaattgatgtcttttttgtaagagaacaagttttggccaaacagctctcagttgtgcatcttcctgccttagatcaatgggtagatgtcttaaccaagccactttcctcaacaagatctgaagtactgatggacaaactcaatgcgaagtatttttctttataaaaaccttccccttgagtttccgggggtattataatgaatgtataaaaataactgttacaaatatgtattggaggactgtcacgacagttagtataagctaactactttttttgtcactaacagaaatctgttaatta

SEQ ID NO: 208160 - DNA, 455 bp, Glycine max
  unsure (1)..(455): unsure at all n locations
agcttgttcagacacaattttttcaaagtattaaggctatgcggnctgataatgctaaagaattagctntgactgagtttttgcataatgcaagagtagttcaccagttttcttgcccacacagacctcaacaaaattcagtaatagagaggcgccatcaacacctattgaatgtagcacgtgctttaatgtttcaagctcagttgccaatttattttttgggagagtgtgtatccacgacagcttacatcatcaacagaacatcaagctcaaatttgcagaaccaatcaccatatgagttgctatatggtaaagtaccagcctatgatttgataaaggtgtttgggtgcttgtgctatgcagccactgtccctgctcaaagacataagttcactcctcgggccactaaatgtgtgttccttgggtatccatttggtacaaaggatacaagctct

SEQ ID NO: 208161 - DNA, 388 bp, Glycine max
  unsure (1)..(388): unsure at all n locations
ngcctggagatgtgatatttgacaattcatcaggtctttttctntacatgtgatttgagtgataacattgctgcgccctggccttcttcatcatcttcatttgcatctatgtcactctgtgcacctggtatgtgtttggacaaatttgctttctcttgatcgctgcttactttttttattcaggatgtgggtattatgatattacaaaatactgtttgcatatgcttaactcttgtctctatttttttttcagagatgtcattacctgctctcccaacatcttctcagacactaaaaaataatggcgagtcccattttgaagtgttttataaattaatactattctggctttcagttgacaaatgtaatacatatctctaaatgtttc

SEQ ID NO: 208162 - DNA, 495 bp, Glycine max
  unsure (1)..(495): unsure at all n locations
agctagaaaataaacattgtttatcctttctgccactggtggntctactataaattaaaatatttgtcattggttggctcaatgactagttcttaatcatcttacaaacgaatttacattctaagcacttggtcttttctctcaatatgttcaaggtgttttgagaattatgaactttacaagaatatactaagagctttttaaaaaaaataattagaatgttagtgcaaggttcacaacccatttcttcaaagcttttggtatttataggtcttcctcttcaagtaactattatcactaaatggatataattttcacttgagcttgtgtctganacttgtggttgttggagcattcaatgcttgcattaaatacacgtcctcttcatgctggaaaaccactctcttaagctntcatgttgagcacttcggcaggaaaccactttnngtgcgttagagtaagtctgccacaacacagcacgccttttgatgatgt

SEQ ID NO: 208163 - DNA, 417 bp, Glycine max
  unsure (1)..(417): unsure at all n locations
gcctactctctatctttttggcacgttttatgtataaaatgcgggaaggaatgggaaatggnttcattgtttcttttctacatgctgatagtggtgacttcactaccaaagttcttgttttgatttctcttgatgtatttgagaagtggctacaattttctctttagaaaaataattatttttcagttgggaatgtctaaatattaagggtagactatgtccaagagaatacatactatacttgagtaatgtgttgtgatttaaaaatgaaaaaacaccttatttttccttacatggctctcaactagtccaagaaaaagggaaaataaatttggttttgtgtcactttggattgtattgattcctaagcccanaatttaacatataatgaagatgaagtggattataaggtcactc

SEQ ID NO: 208164 - DNA, 419 bp, Glycine max
  unsure (1)..(419): unsure at all n locations
agctagacatggagcagatttatcagctttatactctgctncacaaggagagagtgcaataacatcttgtttcttacagcactatgagatgagagcacctccaaacaagaacatgccccattgtgtcttttctgtcaagatcatctccaccccagtctgagtctgaataagccacaagttgtggctcaaccttctctttctgatgtggaaatggaacaccaaagtttagtgtgcctctcaagtatctcagtatccttttagctgccatcatatgtgaatgtcttggatcactcataaacctactgataactcccacactgaaagtgatntctggtctggaatgacaaatgaatctgatactcccaacaatttgcctatacaaggtacaatgcactgcatgctcaggttcacatataccc

SEQ ID NO: 208165 - DNA, 416 bp, Glycine max
actcttattatatactattttctttgtttaataaaatcaactataaactaagttaaatgtcataagctaatgttaggaattgatagagctataataataataaaaaaatgatgatgtaatgataatataaaataattttatattattatctaataataattcagtgttattatgacttttaatataatttgtataaaatttaacataaatgataatatttgattgaatgaataactacgtaaaatcattttagattgtaaatacataatctttttctcataagaatatttgaaaaacaaaaatataacaacaaattaaatatgtgagtatagataagattattttataaaaaaaattctcaataaaaattgttatcgattgtgttcaataagaaatcatttagctaaacatatact

SEQ ID NO: 208166 - DNA, 364 bp, Glycine max
  unsure (1)..(364): unsure at all n locations
attcttaccctactattattcttctatataggggaagaatattcctattggagaagaattattaccgtgtgctcctattactaactttaattactaaatatctatattaactttaagaagcgaaaaaatcaaaagagaaaaagtcagaattttcccatatttcaacttcccataggtcatataggtacctcactaaccctcttaacaaaatacattgttccttccctcnataagttagtattttaatagattanaaaatactttaaaatgaattaagggtgacctgacagaacagagagaatttgatcatttatgtaggtgtttatatcaacctcgcgtccactattgtaaaacaaacttattt

SEQ ID NO: 208167 - DNA, 470 bp, Glycine max
  unsure (1)..(470): unsure at all n locations
tttcacggtcccaaaccttctaaagaacaacacaatcttgttatcacagaacttatgtctcagcatgtaactagattgactgccacagcaatccaagaaaaattacaatcattctacaagccacatatttctatccctcaaagcccaagataatttttcagcacaggtaactttcaaggtaaaagaatcaaccatataacggacagaaacaaatgcacaattaaaccagcaaatgtattttaaagtccatgcttgcaaaaatcatcatcattttatatccctttttcagcacttacaatgcttgtagcaccactcacatgacttgtaaattgaaaaaactcccaagaagaaagcacatacgacataacttcattttcgataaatagaaaatatcactcagattgttcctaanatagatgtcactatgtgacattgggcagaacatgggttggcacctaacttaatcctac

SEQ ID NO: 208168 - DNA, 322 bp, Glycine max
caacacgagaactgcatataataggaataaagcgctcctcgtgatggcgcgtagaacctgcaaaagcaatgccgcacactcaatggtgattacctgcttcctgtagatgcaacgacctgctgcagcactgagccctgtcaccgtgtcacctgcgtcacctgcatagctataacaccattgaaacagggatttttggaaaccatgcacaacgcgccagtggaagttgcgcgtaccactccacagtaacacaaagagaacccgctgttgctattagcgcctccctctccacgtgtgaactccttcgcggaatcgccagtggtgg

SEQ ID NO: 208169 - DNA, 388 bp, Glycine max
tatgctgcatatatttacaatagacctcctcaacctcatcatcaaaatcaaccacagcagagcaattatgacctttccagcaacagatacaaccctggatggaggaatcaccctaacctcagatggtccatccctcatcaacaacaacagcagcctgctccttccttccaaaatgctgctggcccaagcagaccatacattcctccaccaatccaacaacagctacaaccccataaacaaccaacagttgatgcccctccacaaccttccctcgaagaacttgtgaggcaaatgactatgcagaacatgcagtttcagcaagagaccatagcctccattcagagcttaaccaatcatatgggacaattagctacccaattgaatcaac

SEQ ID NO: 208170 - DNA, 395 bp, Glycine max
ttgcgctaggcggccacgctcaacaaagtactttcgacacctactgtacgttgatttgaccaatgctgttatgggaatgtttcgacaatccttcaaaaccttattgatacattctgaaagggtgagtgtcatgtggccatatcgacgtccttctctatcataagccatcgtccatttttcctttgaaattcgatcaacccatgtggctatggctggactcagttcacgaaatttttgtaaattctgataaaaaatgtgctcgcaaggagtgtaggctgcataataatagttatgaataacaattctaagtatataggagacttaaatagacgtcaccaacaaataggaaatcttacccaactttttcaacatttctttttgttaggcattatgaa

SEQ ID NO: 208171 - DNA, 365 bp, Glycine max
  unsure (1)..(365): unsure at all n locations
ctggtaaatctatgaatgaagatgtgcactctgttcccttttcttctatgcaacacgtaacaaggctagttgatgcagatactactaacactgtcgcacatagatactgaacttacgacataataactaatacgggccaagttcttcccatccgtataaattattccatagggagcgacaacaacaagaaatagttgcatatgaacatgataagtgctgagactaaggacttttcagacacaacattgtcataaatatactgagtcctctattatgcacactttatacatgtcagctgataagttacaggacattctgtattgatagacaaagcatattagntaacacaatgaagccagtaacag

SEQ ID NO: 208172 - DNA, 144 bp, Glycine max
  unsure (1)..(144): unsure at all n locations
gaaggcctcctgaggaggaaaaggagagaaaattcgttggtcagacaangaagggggggggaggaacaaagggacgacaaacaggaggaggtggacaaaagggaggaagcaggaaccaaggaaaaacaggccaaccaaacaggg

SEQ ID NO: 208173 - DNA, 254 bp, Glycine max
  unsure (1)..(254): unsure at all n locations
aaaaatcgagaaagacttcaaccgggacaacaggtacttgtttttaattaagaatgaaattatttgcccgatagttgaaatgcaaatgatccggaccctttgttattanagaaagtttgatcctacggcgcaatatagttatatgacccacaatctcagaatcctgacagacatgggtagtaatggccagaggttgaaccataccatggtgaagaatntacacgggcacacagcacagtacatttgatcaccca

SEQ ID NO: 208174 - DNA, 432 bp, Glycine max
  unsure (1)..(432): unsure at all n locations
ctgattttttctaagttctttaacaagctgtgatctttattctnggccttcatttaactgtctctgggcttggcggccacgctcaacaaagtactttcgacacctactgtacgttgatttgaccaaggttgttatgggaatgttgcgacaatccttcaaaaccttattgatacattctgagaggttggttgtcatgtggccatatcgacgtccttctctatcataagtcatcgtccatttttcctttgaaatgcgatcaatccatgttgctatggctggacttagttcacgaaaattttctaaattgtgataaaaaaaatgtgcttgcaaggagtgtacgatgcataaaattagttatcaataacaattntaagtatatagggaagttaaataaacgtgaccatcaaatatgaaatcttacccaacttcttc

SEQ ID NO: 208175 - DNA, 515 bp, Glycine max
  unsure (1)..(515): unsure at all n locations
agtcacctgangctgcagctcacttaaacccctccaagatatttcttgactcccacctaanattccatgagaaatttcttganaatgtcttgtaatctatcctgttcaacaaatagaaacagtgtatatcataagccttctcataaaacacatcttgacaaagttttgaactttttgcttcctcacagtcacagctcttctacattgattggttntcaagaacttcagtttggtgttgtgtgtttttttttctctactttcctatcctctatcttcttggaatcttctctctttctgtttttaacacaacttttatgaaaaaatgttcatttggttgtcacctgctgttactgagtattatagtaatacacagacctgcagttattcaactgcagctgtctagttagaaattaaccatagtggtagatgtcacgtacatagtcagttgactgttacaaaagtagttaaggttctggtatctgtaaatctggctataaataccgatctgtaatctc

SEQ ID NO: 208176 - DNA, 472 bp, Glycine max
  unsure (1)..(472): unsure at all n locations
tactaagcttcagatatgagtttatgtaataaatctgttgtttacatcttgttattgttatgttctattctatcatacctgtatcttatgtttttagaaaactgacatattctgggtaatggataattgtatcagaatttatgtaacttagtaacaaattcactattactagacaagcctgnggagaatatggtggaataagaaggacaatacttcatcagatataataaatataaatgcatatgtaagctgacaaacagacctttctatcagctctggcatatccaaaatatggaatgacagcagtaatatttttggctgaagccctcctgcatgcatcaatcattatgagaagctccataagattctcatttgcaggatgacatgtgggcttgacaatatacacatcacaccccctgacactctcttgcatctggacatatatctcaccatcaacataacgctttatctt

SEQ ID NO: 208177 - DNA, 464 bp, Glycine max
  unsure (1)..(464): unsure at all n locations
agcttatggaatngctagaactcggatttttctttctttatccttgccttcaattagcaaggtattttctcttgttattcaagaggaaggacaagtcactaatggaattgntgattagaaggttttggtcacttcatctgaaaaccaaaactattattcatttgaaaaccaaaattacctttaataatggaagaggaagaggaaggaagaggttcactcaaggaagaggaaatcagacagtgaaacaatgtaccttttgtaatagaatgggaaacaatgtcataaaatgggaaataatgttaggaaatgtcatatcgcctgcttcaattntcaggatgcaacttagaatattgttggataacttcatgtggtgctaattggtntaagcttaaatctaacaacccatgtngctacaaacatggtttcccactcagaagactgtagttcctcaattcactctgatc

SEQ ID NO: 208178 - DNA, 437 bp, Glycine max
  unsure (1)..(437): unsure at all n locations
gcagatgtggtgttcataactacagggtggtgtttttccgtttggacttctgaacttggctactcataatctcgaagagttcactcctgtgtttntcaaatgtttcaaaagtccaaataagcatattgttctcttatgctctgatgcgaaaatgttactctattccaaattgggatgaaaacttctagctttctttctatcttcatgataggatgggttttagacctaaagagatcaaattaagtggttggagaattgcattggatggcgttaggttattgtaattatatgatattttctttttttgtattccttcgaattggtatttctgttcttggattccaaatagttcatcttgaagaggatctgcacaaccacaattgtgtgttgagatgggattgacgtgatagaaattctttagagttggatgtcaatta

SEQ ID NO: 208179 - DNA, 470 bp, Glycine max
  unsure (1)..(470): unsure at all n locations
cagagtcacctgaggcatcaagctttgaccttnagacaagcatggattgtttgatcttctcatctgattgacaatattttccctcataagcaaggacaattctaagtaattntaattaacaaggaataaataaatcaaatatagtactacaactcgcagtatcagtattagttntcttcattgtataagaaaggagggagaaaatgagaggtataagtttctcttataatgcttgacctgaactgcaagtattacaccgtttcctaagatgcatcaacaacgggctcacggaaacaattacttgctcaccgtatgggataaattacagtgcttccacatataaaatgcatcaacaagttgtggatgccttgctaaattagttaaaagaagaattaaggaccttaattactcgcaacatcacaataaggtatcaatccaagtagcagatgattactgactaataatagatc

SEQ ID NO: 208180 - DNA, 464 bp, Glycine max
  unsure (1)..(464): unsure at all n locations
tcctcgtggcttctttgagaagntttctcaagatgcttctttttattctatatccttatctacccacacccctctattatctaatataacctccttgaaaataattacggattaaaataacacaacgaatataatcaaacatcatacataattactaataatatatagatatatatgagggtgttacactatcaaccacatgctctcacaaatgcgtactcatactgtgtcgtcactcgtgcattgcattttgtctcatcattttgtcacgagaagtcgtgtgaatcatgcaggttttgatgatgtcaaaaaaaattcgcttgataatgattgtcatcatcaaaaagggggaaaatgtgaatgtatgaatacatgattttgatgatgcctaagaataatcatataaggttactttcaagattacttcaacaaacattcaaaggttaagtattgctgtaatatta

SEQ ID NO: 208181 - DNA, 495 bp, Glycine max
  unsure (1)..(495): unsure at all n locations
agcttncattgtccttcttattggccnctttatatcactggattcagntcaaccattaattcattagagtacaagattgagatgaantttttaagaaaatcagttaacaagaatgttcaatctattaggaacgatccttcaatcctctaagtttatcatgtgccagcataatagattcgggtcttgttagtataaagccaaagatgccaagttttacatatcagacaagccagtattgaagcttagtctcaagtttgaataccatcacataacctttggggctntgggccatggtacaggtttgaccttttatattagtaaataccaaccttcgagtttatgaatatatgtgtcagtgaggttacaagtagcgcaccatcaacaggtatgtgtctntgttaatcatatagcacanataanagcaaggtcttaataaaaaaatagaagtgcaggatcactatcatagcctcaagataatgtaaagtatatacaata

SEQ ID NO: 208182 - DNA, 392 bp, Glycine max
tgtaatttctaagcttctaagcctcgtttctctctttttttggctacatcaaaaagccaaagtacgtggaaattaacataaggcataaaataacaaccataatcattcacaagtcaaaatcaaacataattcagtcataaaatactaagtgccaaatacttaaatataactaaagtttagagaataatgtcttaaaaaacatagccaaatacacgacataaaatcaaatataataataatctaaatatatgaagatgggggaggaagatcgaagcactgacgaacataacttacatcctcctcaagctaagtgatgtgggtatccatgcctgcaaagcgagcatcaatgacatcgatacaaccatccaaggaatcaaagcgctcaccaacat

SEQ ID NO: 208183 - DNA, 482 bp, Glycine max
  unsure (1)..(482): unsure at all n locations
angctgaagcttggtccctcacgcttctctcttgtgtcagtcgccttttaaatcaatcgaccctttntttttttcaaaaaaaaaaagggtgcaggttagctcgcctgggcgagcaacccctgcaccaaaatataaaaaatgaagaagggggacgtttttgcattcaaaaacttcttttccccccattcaaatgcattacccacgaaatttacgggtttacagccctaggatcactatttttcgcatttttcgattccgttntgcgcttttattcatcaccaacaagtaaggattccatccttaagctttctagcttttcattggtgtattttgatcttcttttggcgttctaaattgtgggaatgtgctcacatatgtggggcaatcttggttcgttttctcgcttgattgggttgaatcgaaggttcgtatgacatggccctatgcctataatgtatttaaagcaatggggcatgccacat

SEQ ID NO: 208184 - DNA, 437 bp, Glycine max
ctaagcttattcagcttgttgtaatcgattacaatagacttgttttttattaaaatatagaactcttcctcttaagaaatttttctatcttagaaacttctcactaaccatgataattcatgatgaaaaacccaattacacatacatggcccataaatataacatgggagcactgagaatccaacaacacctaaaactcagttcctaccaaaaaatacccaagttcattgaacccattacaaaacataaccgcaacattctaataccagttaaacaaaactaaaagatagtatgacaaatttcttgtatattgtgtccaataagaaatagtcgagtaaactattgctattaacctcccttacaatatgtcataacatccctagtatgttttctatatacaatatctcctaatattatgagaagttaaaaatcttggg

SEQ ID NO: 208185 - DNA, 462 bp, Glycine max
  unsure (1)..(462): unsure at all n locations
agctaggcaccaagtaaactcgtttctttaattatgtccaaagtatatttacgttggcataagaatatcccacttggattccttgcaacttctacaccaagaaaatacttcagggtccccaaatctttcatgtgaaagcacttgctgagatatactttaaatntttggattgtagtggagtcattcccacacacgatcaaatcatccacatacaccaaaactaccagttgcactccatgattaagaagagtaaagagcgagtggtcagaggatgattgttgaaacccaaaattcgtgaaggcaaatgatagtttggcaaaccaacatcgaggggcttgcttcaagccatacaatgatttgcgcaacttgcaaactaatcctggttgagatgtgcgaaagcctgggggcaacttcatgtaaacatcttcatgaagatcaccatggaggaaagcattatggacg

SEQ ID NO: 208186 - DNA, 434 bp, Glycine max
  unsure (1)..(434): unsure at all n locations
actcagcttctcggctataccgggaatgcctctatgtcagcacctgtgcagcctaatgcacccacccagaaggaagtctcccaagttccaactacgaacacaactcgctcggccggtaattccaacgcaacaatgaacttccctccgatgccatttcaagaattcaccccactcccaatgacgtacgaagacctcttgccgtccctcatcgccaaccatttggccgtggtaactcccggaaaggtcctccaaccccctttcccaaagtggtatgaccctaacgcaacttgcaagtaccatgggggtgtcccggtgcattccattgaaaaatgactggcctttaaatacaatgtccaacattngatagatgctggatggctgactttccaagaagatcggcccaatgtgaataccaacccactcgccaatcatgg

SEQ ID NO: 208187 - DNA, 495 bp, Glycine max
  unsure (1)..(495): unsure at all n locations
agctnttctaagagactcatcgtcatctttatntacctaatcgnctagggatgatttggatccttcaaaagttgagtctgccatcaggcatatgtttgcttcttcatcgtcttcatcatacgaggtgtcttccaagtcttcctatgtgctcgtaagccccttcttttctttagtcttaaagaaattcttcttatcttgacttttctttagatttggacattctgacttgaagtgtccaggaattctacactcatagtagactatggaaattttgtctttgtccttcttgtctcggggaattcttcttgaagaggttctctacttagacttactcttgtttctccacatcttngtggatttgcgagagatgaaggcgagctcatcttcatctgagtcttctttagattcatcatcttgccgactagttctttggatgatggttctttctttctctttttactactgagagccaaagactatctcttctataccttc

SEQ ID NO: 208188 - DNA, 466 bp, Glycine max
tagagagtatattatgtggattgtcaaagctgtattgttgttatttagatctttattggaaatgcgcattgtgagtgttaaagaatatttgattctatatcaaattgttgtttctaaaagccaaaagtgacttattgacaagttgagccaaacactaagggttgtgccagtaatggccttgagaatacttgtaagccaaaagtggcagaaaagattacttgttgtgatgaagtttgattagtggaaccatttactagttagtaaaggagaactgtacatagctcaagttgagtgaacaagtataaaactaagtatttttactgctcttctttatgttgtcaaagtattttcaaagcatattattgacacatccttgaacacaagtctttcactaatagcacaatttacacatatcactagatgacaatccatcttggcctaagataatggttcttgacactggatg

SEQ ID NO: 208189 - DNA, 404 bp, Glycine max
  unsure (1)..(404): unsure at all n locations
agctctagaaagatgtgtttttcaccttctctccttgccaatctgctagcttagcgagcgtccgttaagtgcaacactcatgggctaagcgcaaggaagacactggaagaagatgagttgtacatgttcactaagcacaccgcttcatctcactaagtgcaccacttcagttcatccgctaagcgagaaaggcacgtgctaagctaaaattcactaatgtgcactaagcggtccataattgcgctaagcgcacgagcacgaacaaggccacctatttaagcctganatcatattttagagagggagttcggattgggattcacacctttgcatgtctagagattctaaggagagacaggtccaagttccagagtgttttgagagattttgtagtgtgaagatct

SEQ ID NO: 208190 - DNA, 437 bp, Glycine max
  unsure (1)..(437): unsure at all n locations
tgaaaattaaatactttttctcttttgcaggagcaggaatacattatgcattnttgttacttgagattcgatagcaaaagtttgttagtagttgagcctgtttctggctggttattttaacgagtgatggtggtaattgctttaaatacttcatttttccgtctttcttgttgcaataaagatactatggtttatgattaaagatgaatctagggtaattcaatttttatttgcaaatgttaaataatgcagagcatccgagtcaagcaaaaatttatgctgtgaatagtaaaaattgttttccatctatcttgcaattccttcacatattgaacagttttgtgtgtgtgtgtttaaaagagtataattaaaacataatgaaatatatatgttatgtggtctggttgtaatatctgcaggttaattctaaatgtatt

SEQ ID NO: 208191 - DNA, 391 bp, Glycine max
  unsure (1)..(391): unsure at all n locations
agcttcttacgcatattgtgattgtatttcttanccgnnanatantcttctttcttttttngtngtcatttcttctttacccccgattccatccctcttctcgctggtaaccagaggttgttctctatgccacacctcatggcgttgccactgcaagcaataacttcccttcccattcactgtgaacatcagttatgcgaaggatcaaatctgatatgaagaatcaataccaagcattgtcatcatcagatttgaagaatcgaatcctacgagacctgtgaaggactttgtggtcgccgccgcactctaatataaatatttctctacaggccaatctgttgaaaaatagagctcttaactttggaaagcagcaagtgaagatatcttgttc

SEQ ID NO: 208192 - DNA, 463 bp, Glycine max
  unsure (1)..(463): unsure at all n locations
tctatcataccacacctatgctctgantttgaaagtattattgaggaaggcagngcttatttgatggaaaacctattggttggtgaccttgactggaaattcaaactcgccaagcataaatatacattgtctttagtcagggcaacaaagctcacaaagttagacatcgatattataccaaaggtctattttgaatttgtgatgtttgctgagatacttggaggaaaaaatacagtcaaagatttatttggttaatatgaattttattgaaaagtcttatcttatactattcgtttattcaaatgttgacttacttngtaaatgttatacttattacagatatcatgggtcacgtgcgttagaagtctgagatcaaagagaacaagtgataaaaataatggaaatgtaccttgaagattttgagtaattattgaattttgaaattctcatctnttatatataa

SEQ ID NO: 208193 - DNA, 472 bp, Glycine max
  unsure (1)..(472): unsure at all n locations
agcttcggaagattgtgatgatgtacattctcctaaaggcaaagcttgaaagagcccgggtagccgaagagaagttcaagtccatagccatcaaagtctgaaaagagtatgatgaactaagggacgtcaatatggccaccgctgaagccttggaacgagaaaccaagaaggcccgaaaggaagaacacgaccaaagcaaagttttgaggggctntatagggcagcaatagtgagctcaagctccgaagaggtgaaaggaatcatcacgggtcataggcatgatcttgaaggacgagctaaaggtttgccttaagtcgaaaagaaaattgtcccaacagttaagcgagactgaagggaatatgtgggccatcatcgataagtgcaaagagaagctaaatctagcggcgactcacgagcaaaggctagaggatgagtacgccaagatatcagcagaaagggaaagcagggaaag

SEQ ID NO: 208194 - DNA, 436 bp, Glycine max
tcaccaccaagagagtgtcttggataagaagcttatagtttaagcttaaatggaggaagagaatgaaagagagagagaataagtggcgtgggaatgaaggaaagataaggagagaatttaaactttgaagtatgtctcacaagactctcattcatcaaacttatttcaagtgttacccatgtttctatttatagcctatcacatgggaaacttccttgagaagcaaggaaggtagcttccttgggaaactagaggaagaaagcttccttgagaagctagaggggggctactcacaccccttcaatagcttagctcaaccccatgccaaaatacatgataatacgataggaaacttcctgcatctctgacccaatcttctgggaggcttctatccaatgcccttggtggtaggtatgcatcatgccctcctcattga

SEQ ID NO: 208195 - DNA, 447 bp, Glycine max
tcttatccaatgctcatcttggtggtgaagctccttcttctctggcttattccttaatggatggcgcctcctctcacctcctttcctttgtcttccgctgcatctccatggtggaaaatcaccattaaaggaccccattgaagctcaaagatccagcctccatagaagccccacaagcaagcttccatcacttgtggcctcaataatcttaagaggaataggcttagaatgcagaaaaagaagcaacaatcaatttaataatgttctttaaacatgcaaggcaaaattgattgcaataacataaatgagataagggaagagagaatgcaaacacatatttatactggttcggccacttcccgtgcctacatccagtactcaagcaacccacttgagatttccactatctttgtaaaatccattacaaagtctgaaccacacatggac

SEQ ID NO: 208196 - DNA, 424 bp, Glycine max
  unsure (1)..(424): unsure at all n locations
agctttgcttactggatcatctgatacttttggtagttattatctntctaganagnnnnagaacctccttccaaacttaatcttctcgaacgagggaacaaaagtggtgatttggctccacttctatcctcatgattcacagatntatcagtctctacagcgctgcagttctcaatgctaagtcttcgtgggcgcaatggatgtttctcagacaccagtgttggcttctctaatggagtgtgtggctctttaattctttggagcattactctctgagcttccttggttgccaatgcaatcttaaggttctcaacctaatattcatgtaaaatagaggaaaactgaataaggttaactccatttgagtttagaacacacactctcaaaatttcaattcttatgtatggctatgatactgaatgac

SEQ ID NO: 208197 - DNA, 426 bp, Glycine max
  unsure (1)..(426): unsure at all n locations
taagcttaaactctgtcaatacaaatataatgtcgtatgctcacctgttgtttattaaatttagctaatcaattatcagttaaatgtaaatgttttactttaattgattccgacaggttttaatctttaaaaaatttaaatttaattttaaaacagatatggacatatttttgaacattcacatattcacatatctgttattaaatatttaacgaanaaataatcaaacacaaaaattaaatatatactggagataaaaaaaaacataattaaatcatatataaaactaagaaaaataactcattcttgttggcaaagtgttctatcaagagttgtaagtagtaacccagattcgtcacttcttgttccaagtgaaatttaacacgttcacatgatcatacatggcactcacctttcgattatctg

SEQ ID NO: 208198 - DNA, 490 bp, Glycine max
  unsure (1)..(490): unsure at all n locations
taagtcacctgcggcatgcaagcttgtaagatctggccaaaacccatattacctctaagggttgcaatgcaagctcttatttctcaacagccaaaaaattcaacaagtgaccgtgtaactgagagtccaaggatgaagcattcccaaatagttttgtacaatgaagccagcagagaaagcttctcccaagagaggagagatatgagactaaacatagagaaaatgcaatggggtgtaatagaactggctaaattacgcaagcaaacgaacgttcagatgccacagttgtttacccataatgtcttgcttaatcctgctcgtgcttcatcctcaccaagaatttgttgaataccttgaccttctgtacctgtctacgactatacatgatattatggtgtatttctggaatagtaaaaagatagtaatggatntntactttggactttatatnttgcttagaaatttaacgtgatatatggaatcaaatagt

SEQ ID NO: 208199 - DNA, 444 bp, Glycine max
tgtaaaactggaaccagctaggttcataaacttttgttactatagtaccactggtactaattttagatatatataattctattgttgctgagcaaaaaaaaaaaaaaaggtttcaatttaacatttctgaacctactttgtaaactaacaaatttcaatagctcgtaggattgttgacaacaagtttaagatagaactaataacaattttatgaccactgttcacaattaaatggcaaaagaatgaaaggtttctcaggagcctatttaaagaattcatttaaaaaaaaaaagtaaaattactccaccttcccctctttttttcaagctccactatatgtgacccacgagcaaaatcctcaaaccactaactctcacgctgtaagtggcattaaatattggacaaaagatatatgaaatatacagaattaataagtcccatact

SEQ ID NO: 208200 - DNA, 434 bp, Glycine max
  unsure (1)..(434): unsure at all n locations
acctgaggcatgcaagcttgaagaaaaagctcccacctacgtttcttgtacttgtgcaaacaangnnngncatctcatggctctacaattcggtatctaaagaaatcatcaccaacatcttgtttgccaacaccgcgaaagatatctgggacgacttgaaaactatgttttcgaggaaaaatggccctagaatcttccaattgaagcaccaattaattgtcttgcaacaaggaactgacgatatcagcacgtattacacaaaacttaagtcaattagggaagaattgaccagttacaaaccaacctttccatgcacttgcgaaggtcttcaacaactccaaactcacaacgaatctgagtatgtaatgtcattcttgatgggtttgaatgattctttctctcaaatacgaagtcagatcctgatctctgatcct

SEQ ID NO: 208201 - DNA, 411 bp, Glycine max
gattcgtgaatatgatactacgacaacagtggagcacttttcttatggtgtattgctcactcatccctgagcaggtgagatggacatgaccgaaactatatagctcaagatcggagtccgtccctccaacaaactctaaggaacaaagagtgaagtggatggtctcgccaagaaagaaagtcatcatcaaagcgctaatccagatgtaatgagagcccgcaagacctatagagtcttagcttggcaaatactataaggcggcgcagatactagattccactacttgttggatttccctatcagctctttaactttctctgccagacacaaagaggaaacacatgagataatcggaaaacttgagggtagagccttataagaggcaagggcaatcaccatatataatagtat

SEQ ID NO: 208202 - DNA, 509 bp, Glycine max
agcttgagcagccctgctcctggggcatttaataagattatagtagtctctatgagatgaatgaatatgatgaattgaaaatcacgttgtgatacagggcagatacattttgagatccattccagtcaagcaacaaattacaaatattgggtgctgaaaatgttaattaaatagcgcgtgacgtagaaaggtatgaacatagtgcaggcgagcaaagtggagataaattaagtagataaacaatgacaagggtggtatctgtaaatcaattaatctctgttcggagggggtaccgtttttgcgaggcttgaggcgagcagagagagaaagccagacacgcctgaggggaaaaaacatgttggcccacatctccataaggttgtttggagatggtagtgtgatcttcttcctcctcctcctcctcctctgcccaagtggcaccgctgctatttcttttaacccggccagacctcaccacttatgagctcagcctcacctttctctcttat

SEQ ID NO: 208203 - DNA, 472 bp, Glycine max
tccttacacacttccttctgtgagtttacttctcttctttcttcttcttctctctttccggtcgccggaaacttatccggcataaccatgctcaccggagccaccggggaatcttctaattcttttctctttgtgcttctattccgcgcagattccttgttcgtcgaacatgctctttaacattccatcaccacaacttcctacctacaccttccgatattgcatcttcaactgtttaggttacatttcacacgtaataattgattgtttctttcgattggatcggtcggaaccatcgctcgaagagaatctccggtgacgtagaagcaatatcagtttactgtatgtattggttcggattaataataataaccgaaaaatagaaagaatatcagagttgaaaatagccagaagaagattaagcgcgatgttggatcttaatctgaatgccgagtcgactcagaacaacgag

SEQ ID NO: 208204 - DNA, 483 bp, Glycine max
  unsure (1)..(483): unsure at all n locations
cctgcggcatgaagcttgagaaaataaattttcttaagttttatctcggatgtcctataaagccctgtaatatatcgagacgctcgaagttgaaaacggaagctctaagaaaagtccaacaacaataacttctaactcgaatgtccgattgagtcccgtaatatatcgaaacgctcgtaatataaaacagaagctctgagcaaattcaaacgacaataacttttaactcggatgtccgattgagccctataatatattgagacgctcgaaattgaaaacggaagctctaataaaagtcaaacgacaataacttttgactcggatgtccgantgagtcccgtaagatattaagacgctaatcatatgctctgagnaattctaacgacaataacttctgaatctgatgtccgtatgtgcccgtggatntcagacgctctaattgaaactatgcttgagaaattaacgacataattttactcggtg

SEQ ID NO: 208205 - DNA, 245 bp, Glycine max
tctggtgtcaattacgagcgtcggcagatatgacgtgttctctatcggacatccgagggaaaaggtatcgtctcttgacttgacttaaagcctccgcgctcaatctcgagcgtctcgatatattataaggcgcaatcggactcccgaggtaaaggctattgtcggttgactgttcttagagcttccgttgtcaatttcaagcgtcccgatatattacagggctcaatcggacatccgaggtaaaa

SEQ ID NO: 208206 - DNA, 476 bp, Glycine max
  unsure (1)..(476): unsure at all n locations
agctngtaactctaggcaatttctntattctattcacttanaanagttatgacttttgaaagaanttttagaaacaagtcacttgaagaattgtgacttttggaaatgtatttttcgaaatcagtcactggtaattgattaccattatggtgtaatcgattacacatcaacagatgtgactcttcattnttgaatttgaaaatcttaatgttttaaaacactggtaatcgattactaccttctggtaatcgattagcagagagtaaaactctttggtaatgattttgtgaaaacttcttgtgctagtcaatgttntgaaaaagattntaatacttatcttgattgagtcttcttcttgattctagaatcttgagtcttgaatcttgatcttgattattattgaatcttgattcttgaaacttgattcttggatctttgctttgaaacttgcttaactcttgattctttggcatcat

SEQ ID NO: 208207 - DNA, 414 bp, Glycine max
tgtccttggtttagacatgattgatacatgatttttgtcttgttgatgcaatttgggaaaaattggatgaaggaaagagtggttttcgaaaatgtgcagcagaattttgcataagtgcagaaaaatgctatgtatttgctggttgtggaaagagtagtacagaattagttctggatgtttgctagtagatcccaacggtcaaaatgtagaattatgtactagagacttccagtaaaattttcgagtcgatccaacggttaacgaattggaaagaaggaaatgttactggggtctttaagtgagaaaaagctgtgatattcgtttgagttttgggtagagttttctgcctttgccactgtttgcttggtttcttaaattgtgatgaattggatgttgaattacctgggatgtggg

SEQ ID NO: 208208 - DNA, 427 bp, Glycine max
  unsure (1)..(427): unsure at all n locations
gcttgaatcgatacacttatactgttttcgattaccaaagcagattntcagaanatattctcaatagtcacatctttntatgtggttcttgaatggctatcaaaggcctatatatatgtgacttgagacacgaatttgctaagatgttttcagaacaaaaaggtcttatcctcttataaagcanaatcgttttatcctcttacaaattccttggccaaattacttgtgattcaataaggaattatttgagtgctcaaattgttcaatctatctctttcaagagagatttcttcttttcttcttcttcattctgaanagggattaagagaccgagggtctcttgttgtgaaagaattctaaacacaaaggaagggttgtccttgtgtgtttagaacttngtaaaggaatttacangatagtagaactc

SEQ ID NO: 208209 - DNA, 416 bp, Glycine max
acttggagtttccaagtgccaattcgtcttcttctttatttcagtcttcttctggcttcaattcatcagtgggctttccttctgtgtccagcatcttgggatgttcccagcctttgatgacagctttccatgttctgctatccagtgatttgaggaatgccaccatccttgctttccagtattcatagttggttccatccaaaattggtggtctgttcactggtcctccttctttctccatgttcatcagaatttatctccctacatctcactcagtgatttcaagtgcctgctctgataccaattgaaattctgatactgtggacagatgtcgtacatgatgtcacgacatcacgcttcagaacatgcaaattatatttgacagtgtgtacagtttaaacatgtaaataacacat

SEQ ID NO: 208210 - DNA, 493 bp, Glycine max
  unsure (1)..(493): unsure at all n locations
agctntgatgttgttattgttggcaatatcacaaataaaaacagtttatgctttcgttggagagagctctgcaaccaaatcctttatagagaacatggaaaaacaatatgttataagcaaaggggaggcacttgtgaagggagttggggtagggatgtancaaacagagagtttctattcttgggctctcattgtatgggttggagctgttgtggttagagtcggaagagcaaccccataagacataatgactgcagtgatgagtattctctttggtgccatgtaaggaataaaccaccttcatgattatttagaatggataaaatggttaataattaatgactaaataacaaaagtctccttgtgaattgcagatctctcacttatgcagcacctgacatgcanaatntaatcaagcaaaagctgcaggatancgaagtnttcaagtgattcanagaaagcctctaataagtaatgaatcagaaaggatgat

SEQ ID NO: 208211 - DNA, 450 bp, Glycine max
actggatgcattggttaacttggtaacccatctgttcttgaatcagaaatctgtacctgtcgcaagggtttgtggtttgtgctcctctactgaccaccattcatgcctttgcccttccatgcaacaacctgtagcaattgagcagcctgaagcctatgctacaaatatttacaatagacctcctcaacctcagcagcataatcaaccacagcagaacaattatgacctctccagcaacagatacaacccttgttggaccttgtggcctcaataatcttaagagggataggcttagaatacagaagaagcaacaccaatcaatttaacaatgttctttaaacatgcaagacacaattgattgcaacaaaataaataagataagggaagagagaatgcaaacacagttttatactggttcggccacaacccgtgcctacgtccaatactcaa

SEQ ID NO: 208212 - DNA, 458 bp, Glycine max
  unsure (1)..(458): unsure at all n locations
agctnttcgtcttacagacagcttanaatattggttatacggatcaccactcgagtatttccgccagtcagcgtgactcanatgtgagtatgacagatcttgtgagcgcggaagatgacgtaaatctccgcgtgccaacgggcttgtcggctgagattgacgaagggcgcanaagacgacgttagtctttgcgtgctatcaggcttttcgtcttacagacagcaaaaaagaatgttcatacggatgaccactcgggtatttccgcctgtcagcgggacttaaatgtcagtattacagatcttgtgagcgcggaagatgacgtatatctccgcgtgtcaacgggcttgttggccgcgattgacgaagggcgcanaagacgatgttagtctctgcctgctatcaggcttttcgtcttacagacaacanaaaagaatgcttatacggataaccactcgggt

SEQ ID NO: 208213 - DNA, 520 bp, Glycine max
  unsure (1)..(520): unsure at all n locations
ttaagccacctgaggcatgcaagcttcttatctntcccatgactagcattgtcattcctgtaaaattcaatcttctcccgctgatcttcatcaaagattctacacatgttggtcaactgtgcaaagttatgaataccgtgataatttaccatcatctttacttctggtcgaaggccattgacaaatttcacgcatttggacctctccccagcttccccctgataatgaggaaaataccttacaaggttctcaaacctcgccgcacactctgccaccgtcatactttcatgtttcagctcaagaaactccatctccttcctattcttcacatcttctggaaaatacttctccagaaaagtttgtctgaaagtctcccattggacaacaacaccacctgctccctctaaacgtgggcgagtgttctcccaccagtactccgcctcatctactagcatgtgagtagcanacaacaccttctgatggtcctgacactccatcacccggaagatcttctcaatct

SEQ ID NO: 208214 - DNA, 469 bp, Glycine max
  unsure (1)..(469): unsure at all n locations
tcccattctttgcacagcttccaaaggacaatggagggattataaaatgctggaatgaccaacgcagagtcacactcaatccataggttcaaccaccctttgtctttggccacttccaaagcaagaataacaacaaaaatctcagcaaaaagagagtcttagatacgtatgcaagcggagaaacaaccaagcatacctccctgatgctcaccaaattaaaaataccactgaaaccagcatgaccaggagaaccatgagcagatccatctgtattacacttaatggtgccagccgaggagccctccaaagcacttccttgatatacttagccttacgaggatgaatatcaatagaaaaagctgtaataatagaaaattcatgcatagaanaatcatcaaatttcataataattatatatgatatatatatatatatatatatatatatatatatatatatgtataatata

SEQ ID NO: 208215 - DNA, 444 bp, Glycine max
  unsure (1)..(444): unsure at all n locations
agcttatngaaaagctagtaaatacttgttatatatcctttngcaacatgttggtataaaaaagtaacaacgataataaaattaattaaggcgtacccaacaagctttctcttgctttgaaaagtcattaatcgtaatgaaaaataacaattaaacaacaattaataaaagagaagtcaagcttattgaaaagctagtaaatacttggaaaatatccatttgcaacatgttggtataaaaaagtaacaacgataataaaattaattaaggcgtacccaacaagctttctcttgctttgaaaagtcattaatcgtaatgaaaaataacagttaaacaacaattaataaaagagaagtcaagcttattgaaaagctagtatatacttggaaaatatccatttgcaacatgttggtataaanaagtaacaacgataatataattaat

SEQ ID NO: 208216 - DNA, 468 bp, Glycine max
  unsure (1)..(468): unsure at all n locations
ctaagctgtgcacctagaggtttaaccctttcaatttggattgtctgtgtccaaatctgatgcacttggtgtctaaataatatatctaccgctggaatatgatgttatggtaaaaataggtttgttcaatctctgtaaaccatatttgtcatgtctttgaattaattgaaataattgaaagctttttctttcagtgcaacaagcttttctggttgcagtccatcaagcataatttaaatgcatagaatttgtttattgattgaaatataatattttgacagacatgccaattgaaataattntatgatgtttggaagtgtgctttgtaaactactatgatgtctaattgagatgtttcccctaatgaggaatcaactcacattcaacaattgactagtagagggtgtttgaaaatcccaagttcccaacttggactagagatttgccaacactcaacaaccaaacatg

SEQ ID NO: 208217 - DNA, 504 bp, Glycine max
  unsure (1)..(504): unsure at all n locations
agctntgacattctaactggggnngaatgttgtgtaaacttaatagnnnnnnnnggagggataaatgcttacgagtctacttacatgatctagttgatttgaaggcttaataataatgagatcatgattntttatttttctaaatattcattatagacttaatttatggtgtcatctttaacttaccatcacttatgactatcacccaaaaaattataaccaagattatattacatattacttttcatcaaatcatgtttgacttgaataagcctcacttgttaaaaaaatctaaaatcaaagaccatcaagtatttatcatatatttcacttgttaggcttgacttaatcattcttagcttatatagttatgtatgtcaaactacttgttaggggttggactttcaaataggacaaatcattaaagtaagctctaacttccacttgtcaagagtgaattccaattggtttcattataaatatgattntaacactagtatcact

SEQ ID NO: 208218 - DNA, 462 bp, Glycine max
gcatcgatgttgaactttctaagtgcaacaacacatctgtcttgttgatgatcatcccaaggtaattaataatcataaattaatgatttatttccatgccattgattatttctttatttcttgtgctttgtatatgtacacgatgatagtttttatatatgatgacaccttgtgggatttttatattaattattctaatagttatataatgatgatatgtaattataggtttaattaacagaatatatatgcttactaaatttcaatatctttacctttctttaaaattttgcatttgaattgcttgtcaatgttctggttctaattatacttcaacttgttttgtttattttcattgtagaatcaagctcatcaccggcatcagaaggtaaatcatcgcccacccatgtgtgcttacgttaacataggataaaattttgatataatatgaactcatataca

SEQ ID NO: 208219 - DNA, 470 bp, Glycine max
  unsure (1)..(470): unsure at all n locations
agcttctccaaatggcatagntatttcctatttcctattaatatctaggaatctcgccaggtggcattccttatctttcttggaaggtaccaaagggtatggcacttcctttccctcatcagaagctgtttctttactttttttcacttgctttttcactcttactcttttcttcttctttnttttcctccctctatttcttgttcattatcttttatttcttcccttccaacaattattggtttttctctccactgacttctctcatctcttacctcattcttctttntatcagcagtgtccttcaaagcaacttgctccttcaaagaaacaacatcctcatcctcagctggcataagcttcctgcttcttgttacaataactntgcactcttctttgngattttctcgatattgctccnagctactggatgactttcactactacttggccagtgaccacctgatctc

SEQ ID NO: 208220 - DNA, 437 bp, Glycine max
  unsure (1)..(437): unsure at all n locations
cttggtttagacatgattaatacatgattngggacttgttttattcgattngggcaaaattggatgaaggcaagagtggttttcgaaatctgcactttatgcagaattttgctgttgaaatgtgcagcagaattttgtataagtgcagaaaaatgcttgtgtatggctggttgtgaaaagggtagtacatatagggttctggacatttgctagcttatcccaacggtcaaaatgtagacttatgtactatggacttccagtaaaagtttcaagtcgatccaacggtgaacgaattggaacgaaggaaatgttgctggggtctttaagtgagaaaaagctgtgattnttggtttgagttttgggcagagtttcctgcctttgccctggtttgcttggttttgttagtttgtgatgagtggatgttgaattacttggat

SEQ ID NO: 208221 - DNA, 473 bp, Glycine max
  unsure (1)..(473): unsure at all n locations
agctntgagctacggatgagaataacaatctcatctctcatcctcctcataattcanatttaacttctcagcaagcactctgaaaaaattagaagttttggttgttactacaaatccccagtacgtcatttaggtgtgttacatgaaaagtagaccacaggtaatcaacaagagaagcaattaagcaaatacagacagagaatatgtaacatacaaaaaaaaactaaaattgagaaatacagataagagttaatgtaaaagctttcaaggccacaaaataaaaggaacaactccttattttgtgccttatgttttgacagacagacacacggatcaatgacacagaggctacattgtgttttcacaggtgcaaaattgtagcatatcagaaaaatttataagccaagagctacaacatcttatattagaaaggtgcataccccatgtcaatccgttggtgtattctacagtat

SEQ ID NO: 208222 - DNA, 473 bp, Glycine max
  unsure (1)..(473): unsure at all n locations
tataatactaagcttattaagaggcttctagcacactctagatatcttctcatagatcccaacggttagattatggacaagtgtcttgtgaagttgcagaccaagtttcgagaatatccaacggttaatgaaggcttggaagcgtttgtaccgaggcagcttcatgtagctttctctagaagcttcattaagaggcttcctccagaagcttcctcgtggcttctttgagaagctttctcaagaggcttctttgagaagctagattcttatctatccacacccctctattaactaaattaacttccttaaaaataattatggacgaaaataacgcaacatataatcaaacatcaaacataattactaataatatatagatatatatatcagggtgttacaccaaccatgataaatgtcggagtcttgcttcgcactgtgttgtggttcactntattaaaacatggtgtcgagtc

SEQ ID NO: 208223 - DNA, 449 bp, Glycine max
  unsure (1)..(449): unsure at all n locations
atcctctgagtcacctgangctgcaacttggagtaaangtatttgtgtttggtggcggnggcaatngaggcaaagatagngatttcgggttttgggggaaggttcttctgataaattctataacacgaatagagagaaaaaaaataataataaaattttaatttaatgtggtgtagatattcttgttgtaatcttacactaatttcaaaaaatattatatactgttggaataaccatgaatgtagaaaggaagttgaatagattctttaagattttaccaattatttcctagattcaattaaaattaacccttaattacaaatcaaggttttctgaagaggcttgttgaagatagatcaacaacacgtaatatcaatatattcaaaaatcttataaaacaaacttttatggcctttcacatcaattcattaccatgattgattcacaaa

SEQ ID NO: 208224 - DNA, 375 bp, Glycine max
  unsure (1)..(375): unsure at all n locations
atcaagctctggcttgtgaagcacttgtctaataggatggatggtcttgactntgatcaaatgactttggaagtatgggtgcaacctccttgtagaagtcactagtgatagttccattttttcaatcatttggtatctttgttctaccattagtaagactctactagtaaagtagatcagtaattgtcttttaccattgtcctacattaatactgaactaatagttgtattagaaacaaataagcaaagaaggagttcaacacctggtgtatgtcgagatagtattataggagtcgccaagaaattctcgaattctataaatgttttctcacacttatcatcccaaacaaagtcattctatgatntcttcaatag

SEQ ID NO: 208225 - DNA, 337 bp, Glycine max
aaaaaaaaaaaaaaatgttgtgctgcacccccctaaaacgccgggaagagggcggttcacaaaattttttttccaaggaccagggggaacggaagaagcggggaacagcggcccaaccaaccaacaccgggggggccccacacaacaccaccccggaaatatgaccgaaaaaacttgaaaaggaacgcaccgggcgcggcgaccccccgatggggggcaaagggggggaaaagaagaacagcaggggcaaaacgggagggcgaaaaacgacgagaaaatagggggaaaccacgaacagggccaacagaggaccgacaggaacgacgggaaacggaga

SEQ ID NO: 208226 - DNA, 474 bp, Glycine max
  unsure (1)..(474): unsure at all n locations
catgcaagcttaagctccttcaacttctttangctcttaatantnaaagagtatcctggtggaaccttcacccgacgaagacactgacaaaaacttatattctcctttttggaaaaagtatggcaagttgggggcaagtaaattttcttcccataaaaccttggatgctactgtgattgtatccccatatcaactagatcttgacgggtattcaagccatccttcgtcttgccttgaatgttaaggagcgtcccaatcacactgccacaaacatttttctgcatatgtgtaacatcaatacaatgtctaacgtctagatcagaccagtacggaagatcaaagaacatggacctcttcttccttatgcaactcgtacttttatccttcttttgggtctttgtatatacaagatggaggtgctgaacccgctcatatacctgttcaccagtcaatgtgatctgcacaacttcatgc

SEQ ID NO: 208227 - DNA, 469 bp, Glycine max
tcatgctgttcaattgctttatattgatgcacagtttgttctttgtctgtgtggcggcacggagaggaacataatccactgagtctggcgacacgtgcattattttgattcatggccagttgggctaccatgttatccaaggcatctagtttaccttcaagcttcttagtctcagctgatgaagatgaattcgtggctacttcatgcactcctctaatgacaatagcatcatttctggcactaaattgttgggagttggaagccatcttctctatcatattcctagcctcatacatgagtcatatcaccaatggctccaccactagcatgatctatcatacttctctccatgttactgagtccttcataaatatattggagaagaagctgctcataaatttggcggtaatggcaactggcacttaactttgtatatctcttccaatattcatatacgcttctctcactg

SEQ ID NO: 208228 - DNA, 458 bp, Glycine max
  unsure (1)..(458): unsure at all n locations
agctgtggaaanagtagtttatgaattattatcttgccttcacagggagataaagtaaattaaatattaagctgaatttaagaaataaagtaattactttatcatgaaggaggactcatgcttagttcaacagtacatacaactgtggaaatgagggacaaaaatcttttttctttaccgcgaatcgaagagggacaaaaatctaacttttataaaatttaaagatcagactgattaaaattaaaatttcaaaactaaaactaagtttcatacaaactgaaaacagattgtattcttattattcttatgggttcactaagggtacaacattgttataaaattgtattagaaaatagtgcattgctaacattctatattacactttnttatagataaaaatgactnttacatctttagctattattattattagatgaaactggatcgatgggaaatat

SEQ ID NO: 208229 - DNA, 454 bp, Glycine max
  unsure (1)..(454): unsure at all n locations
tgagctcatctgtgctaccccataaagctccacgaattttttctctgtcatgctcttccttgcgagccctcttggtttcttgttcaatggcccttgcggtagctgcattttcttctcgtaacccggcacactcttttcgaacgtctgtagcgaccaacttcaattnttctttggcaagtcttgcttttcctatttctgtttttagagctcagacttcttcatcctcttccggagcttcgaagctttcttcatcgataatctttaacttggagagccaatctaaccctcgtgtacgaactttcatccattcatgataaccaccaatgatgtcattacgaatgcccctaagttctttatctttccttaacgggctttcccatgccttatggactgtttgtataatcttgaaactgtgcgcaccataatctctcacaaggaaaggagagatgctctc

SEQ ID NO: 208230 - DNA, 485 bp, Glycine max
  unsure (1)..(485): unsure at all n locations
agctngcatacatttatttccttgcctatcacttcanaaccttctagttgggtcatatagatgtcttcctctagatccccatgcaagaatgcagttttaacatctaactgctccaagtgaagattctctgcagctactatgctcagaataactctgatggtagtcatctttacaactggagagaagatctctgtgaaatcaattccttgtttctgctgaaaccctttcaccacaagtctcgccttgtatcttcttctaccgtcagattcttcctttagcctatagacccacctattctgtaatgccttctttccttctggcaagttagctaaagaccacgtcttattcttctgaagggatgccatctcatctttcatcgctagctcccactcaatagtgtcattcccctgtgtagcctcattgaaacattctgactcaccagcatcagttaacaacaaataatgcaatgaaggggaatacctatc

SEQ ID NO: 208231 - DNA, 419 bp, Glycine max
tattcccttaaaaattattcttggcttgtcttgtccctcttgaaagagagcactccgcgtcctaaatttatattgcataatctccttttgggacccaaaaccgtaaacttaattatgcttcgtatacatttatagctaacaaagttccaaaaccaacattacacatgtttaacaaaaataaaacataatgagaagtctcccacattagattataccttgttattgacatttcattaatcaaatctagtccaacaacattcaagtcacagactaaaatattacaaaaagaataatcataactgaattacatcgtctatatatatatcaaaaccgatgttaacgaagcgacgttaacatcggttttcataaaactaatgttaatgaagcaaccttaacatcggttttcataaaatcgatgc

SEQ ID NO: 208232 - DNA, 436 bp, Glycine max
  unsure (1)..(436): unsure at all n locations
agcttgtggatatatntgatccgcaagnttcntactaatcaactngatccgtaacaagcttgtggatcaacttgatccgcaagaagcttgtgtctgttntttatagaaggggatcttattttatttctgaatatgaataacataagatttgcacgaattcaaacatagaatcattccaaacataaaaataacattacattaacttcagcagagtcgaaagaaatagaattagcatcaaatacgacaactatgtgatgcttattttgtgacaaggacatattatcttccatttcgatgacatgcttactaagaacaggttaaatttctattgcgccatnatttttccagtagttagaatacactaacaccttcaacacatcatcgttggtttcagtncaataatttcgaattngataactttttctacatactcata

SEQ ID NO: 208233 - DNA, 230 bp, Glycine max
ttaaacctacattaattatttgctttaccttctcttccatagttgtttcttcatcttttctccatgtatctcctcacatgtcttgtgataaacgtctctaacatgattctttatagtttccaccgattaaacttgctatacaagctagatgtgatattctatggttcaaatttctcgttcttgttcttgaaccacgaattgtgttgagtttaagatccttcgaactttat

SEQ ID NO: 208234 - DNA, 310 bp, Glycine max
ctaattaactaagactgcatcattaattctttcatttttaaaaaactaatgtgcttatattggcgatagtgatacgacatactactttatttttctcaacacctttaattagatgatcgtgatttcgcgatacacggggttataatgacaagtacactaacaaaacagttgccacaagtttacaagtattaacaggttcaattcagcttaatttggccttttaaactaatctgtgaattagtgtccatcttaactttattttgaaacagagatgcacactttgtttaccttctattattaagaataccct

SEQ ID NO: 208235 - DNA, 448 bp, Glycine max
  unsure (1)..(448): unsure at all n locations
agaacttcgaaaaattaagaacaatcttgttctctcatcgttngcgtgtatgacatccactccacaatgtttgaagtagaggagaccttcaatcctattacgcaacgtggcggacaaaagtgggcagntaacttgaatggtcattattgtcaatgcagaaggtattctgcgcttcactatccatgttcacatattattgcagcttgtggttacgtgagcctgaactactaccaatatatagatgttgtttatacaaatgagcacatcgtataagcttactccgcacaatggtggcctctcgggaatgaaacggttattcctccttctaatgacgcatggacacttatccctgatccaacaacaattcgtgcgaaaggtcggacaaaatcaacaatgataacgaatgagatggatngtgtcgaaccctctgagcattgacaaaaataca

SEQ ID NO: 208236 - DNA, 424 bp, Glycine max
  unsure (1)..(424): unsure at all n locations
gcattttccgagagtngggaagttagatcattcttcaccttctaatctgaagcngaagcttgaaggccatctaaacaagtttgttgatttgtcaaaacagcactaagcaatgtgtgaacatcgctggcttgagaggtgggaagaacatctctggctgtatcaacagtgccacgtgttgttgataagtattcaaagtttaattcagcaaggaattgacaatcctcaagagcacgaattgtgggttgagaataagaagaacgatgttgaagatatgaatacatgttgntcaagaacttacgagactgagacaatgacgttcgaacagaaatgcggcaatagtcatatatgctcgccatttgattagcaagcacagatttgcagtaagaagggtctaacgctgagtagcatatgggttctggtggaa

SEQ ID NO: 208237 - DNA, 429 bp, Glycine max
  unsure (1)..(429): unsure at all n locations
acaaattccagaagctaagaataatatgaaagattttgtgtatatattaaaacttttctaatcaaagtatctcaatntgttaaatgatattatgttgcatgtaatgtaactaaaagtaaaatagatatgtcaattttttccataaaaataaaatttaaatttacattatattttttgtgcagaatgtaccttaataaatagttattgtgtttacatagatatatagttaatccttcaaataagtagcatattttgatattgctcggaagttggaatgcattataaaagacctagcttcgagatatattgtttaaatataaatctaaccattctataaaggaaaataaaatgaaatatctcaccaatcttaatagttattatttcacaacctatagatattgctttctgtttgatgcattattcacattc

SEQ ID NO: 208238 - DNA, 519 bp, Glycine max
  unsure (1)..(519): unsure at all n locations
ctaagccacctgangcatgcaagcttgtaagtgaaatgtgacanaaattcttaatgccttttgctgngttccttanaggctgagtttgtaagaagtgaacaatatttagagattntataaattntttatactacacattntcaaaattggaactgaaaatgataagttcatgaaatctaacctattaatataccttaatatactctggctacaggctttatcgttaaggagaagtaatagcaaggcctaagggtgaatgccaatggcaggaattaaatccttgtgccacccaaatggaaagttccttcaccacttattntattgttgtgatgccattatggtaaaatctcactattgagggctgcccactacaatttcggtaaatgttctcctaattnttttaaagagaanaatgttatgtaatctcaatntaaaaagttttatacagctatttaatcatcttgttgggtagacgctcnttttatatttttggggtagaaaaataaacaatttaagatg

SEQ ID NO: 208239 - DNA, 479 bp, Glycine max
  unsure (1)..(479): unsure at all n locations
tactaagcttcaagaaaagatggtctcagcaaactccgtatttctagtatggtattctatcaatagacctccaatctttaatggagagggttaccattactggaaaacccgaatgcaaatttttattgatgcaatatacctaaatatttgggaagccatataaatatggccttatattcccaccacagtagaaagaattacaatagatggcagtttatcaagtgaaagtataactatagaaaaacctagagatagatggtctgaagaggatagaaaacgagtacaatacaatttattagccaaaaacataataacatctgccctgtgaatggatgaatatttcanggtttcaaattgtaagagtgctaaggaaatgtgggacactcttcgattaacacatgaaggaactacagatgttaaaagatctangataaatgcactaactcatgagtatgaattatgtagaatgaatgcacatg

SEQ ID NO: 208240 - DNA, 510 bp, Glycine max
  unsure (1)..(510): unsure at all n locations
agtcacctgaggcatgcaagcttgtagccattagaagagaatgagcatgtgattgttatgttgactaanaatgttagtcagtttgtcagattgattgtgaaggaatgcattgactgtatcccggtgagagtgtgaactttaaattttgagagaaacgattatcatttagtactgatttttgcatgaatctctgaagtatggactggatgcatgaaattgaggatgatgaaggccatgtttgattgtgatagccacttagccaaaaagcttaccacgtgcttgaatgatttatcccttgcacccagtttgagctgaatgaattattgattgattgaaccttgagcctatacagtgttatctcttgctaccttgacttatgctgtaggagagcatcatccacaggaagcatggtgcaaggtaaatttgttccaaacttaggggacgcactgagtaagaattgaaatggccaaagtaaatagcatacacacactatttctgtatatacacata

SEQ ID NO: 208241 - DNA, 460 bp, Glycine max
tgaagagagttcttccacgccagtatgcacttaacgcgtatgcttctcgctaagcgaggcagttgtctcttatgcgctaagcgcaagattggcactaagccaaatatcacttactcgcgctaagcacgagaatggtgctaatcgcgccttcaagttcataaagccctttttaagcctgatttgcacagaaaaaaaaaaaaaagagtgtgataacgtgaaagaggtctgaattgactgcaaattgtgtgcagagaacagatgataagctgagcaaggaagaaaaggtcctaacttttacgtagattctacgttttagagttatcttctaggttcttagaggtggaggagacatccccactgctttgtaatctggtattttctctaaaacccttctcctatttgtgaaagttgctcccttgtaatggagggctaaaatcctttgttgggaatgtctactgag

SEQ ID NO: 208242 - DNA, 514 bp, Glycine max
  unsure (1)..(514): unsure at all n locations
tctgagtcacctgcggcatgcaagctgaagtatatccctgtttcactgtattatttaatgaggccaaattaacccttattctttccctttcctaacttgttctattacaattgtaaaaaaagaaaaagcaataaacgaagaaataaataagaggagattaatttcatatatttaatacttaattggatctataaactttntatccccactcccactcattcagactaattctgttataaaagaacataaccctatcttattcttgcattctgttatacaactgacaacaaactatgatcctatctattcttgctcatcattatttctcattattctggtggaacaataatccccattcccactcattcagacttanacccatgcttcttctttctagcatatatgtggatagctagaggtccaacanaatactaatagataacaactttatccaactattaaacattattttaatatanaacagcatatatacaaatattaacctctctgctcc

SEQ ID NO: 208243 - DNA, 394 bp, Glycine max
actggcctatagtcttcttccatcattatcttgtgcatgcagtatacagggctaatacctatgagatctgatttatgccacccaattacttccttgtgtttcttcaaaatttctactaacctattttcttctttggatgtgagtgcattgctgatcaccacatgcttagcctcatcttcttccatgaaaacatactttagatggttggataatatctttaattcttccttcttcttctcagatggagtcttgctctttagttcctcatatctggtttcctcctcagggatgctatcttatcaatccaagtcttctaagcaagcgctgagatcatcttcttcttcactggttaggcaatctaccgcattcaccatggctctgtccaatgaagtct

SEQ ID NO: 208244 - DNA, 458 bp, Glycine max
  unsure (1)..(458): unsure at all n locations
agctngacccttacgagttatttagtcttatgtagagccaacttggagaaaccttctatgaatcttcgataatatcctgctaaacctagaaaactcttaatctcanaaacagacttaggactctcccacttaagaacaacttctatcttagagggatccacagctttacccccttgagatatcacatgccctatgaaactaaatttctctaaccagaactcacacttggacaacttagcatagagttgtcggtccttaagggtatgcaacacaatcctcaaatgttcttcatgttcctctctagtcttggagtataccanaatatcatctataaatactaccacanaactatcaaggtaagggtgaaaaactttattcaggtagtccataaacactcatggagcattagtcacaccaatgggcatgactagatacttatagtgaccgtaacgggtcct

SEQ ID NO: 208245 - DNA, 450 bp, Glycine max
tccttcttttctataaataggggaaggagggttgtttctttatgttcaaccctcctggtatctgagattcacttaaaattagtgagaaaaattggttccgtgaagaaaatccaagctgatgcgcttccgtgacatttccatgggtgatttcgcgaagattttcaaccgttcttcatcgctcgttgttcgttcttcgtcgttcttcagtcttcaacaggtaagttcccgaaattgaacttttcgattcattctatgtacccttagtggtcctcatttgtttcgcgtgcttttattttcatttcatttacttttcgtaccccctgttgacgtgctttagtcatttatttaagtcattttctcgcctaatcaaaaataaaataaatttccaccgatcattcgtattgtaacatcctttaatgtctggtaaaatgtattccgaccggtcggtca

SEQ ID NO: 208246 - DNA, 522 bp, Glycine max
  unsure (1)..(522): unsure at all n locations
atccttaagtcacctgaggcatgcaagctttcctcttatttctctaatcttgagtaatttcttctctgcctttattcattacaacactattacatttatagatgtttctctaactgcctaacaacagttagttacagaaaatgaaaatatctaattgctctggaattatctataggtggttacaaccaaattcctaacatactactggtagagtagtggaggagcaaattccattagtgctagaggcccattcattactcgaattcactaaggtatactagcctggcttttatcctgttgggtctgttgcttcctatgctttggttattgctatcacaacaccacattttcacacagaacccaaatcccgtctacataaaaatgacctacccacaaagccatagcagcagcacattgcanaacaaagctaatatcgaaatgggcattcaacanaaatgcacaacacaagaaaatgaataaaaaccaacctttttgctccgagcaccaccaccaacaccctta

SEQ ID NO: 208247 - DNA, 422 bp, Glycine max
  unsure (1)..(422): unsure at all n locations
tgaataactgtctgaactaaaatctagtaaattgaaatatttgtttagtatttgttcattntatgtcccataagtcatagctaattaatcatgttacgtttatatgccaaaaaaatcatagtagaataaaagaaatagaaaagccaccttctgtttgtacaaaggagtaactatctccggtgttgccattgttgttgctaccaatttgactttaactttgtgcctttgtatacctagtgtctggattttctttatctgaattcaatcaattttgttgtatgatgggtttaggcttggttggttgaaattgacaaaatcaaatctattaatcaagttttggccattatactgcattccagttctggtcctttggctntgcaatgcatagttgaannattgaactggctgagtgaactgatctt

SEQ ID NO: 208248 - DNA, 378 bp, Glycine max
  unsure (1)..(378): unsure at all n locations
acaaagatgataacacaacgcccacgatgatgatctcaagattgaggcacgaacaattcccaagagaatgatttcaagattgagtcaacaacaattcaagaatcaagagaaatttgatttcgagattcatgaatcaagatcaagattcaagactcaagattcaagaatcaagagaagactcaatcaggataagtactcaaaagtttttcaaaacattgagtagcacatgaagtttgcacaaaagcttttaccaaagagtttcttttcgaaagctttcaaactcaatttacagtagtccaattaattncaaaatggtgtaatcgattacagaatttggtaatcgattaccactgtgtctgaccgtcgagattcaaattc

SEQ ID NO: 208249 - DNA, 386 bp, Glycine max
tctcaagatagacttctcataggaagtcttctcacggtatgcttcctatgctataaatagaagcatgtgtaacactttttgtgactttaatgaatgaaagacttatgagacacacttcaaagttccacttctctctctcttttattccttcaatttcgtgctcccccttctctatttcttttcctccattaaagcatcctcttcaagcttcttatccaaggcacattcttggtggtgaagctccttcttccatgacttattccctagtggatggtgcctcccctctcctattctcctttgacttccgctgcatcttcatggtggaaaatcatcattgaaggacctcattgaagctgaaagattcatactccatataagctgcaatg

SEQ ID NO: 208250 - DNA, 453 bp, Glycine max
tagcttgcataagacatagatgatagcaaatccatttcttgatatattttcactttaaatgggggtgcagtaagttggaaaagttccaagtaagctactgtagcagattcaactactaaagcagaatatatagcggcaagtgaggtcgttcaagaagctgtttggatgaaaaagttcatatttgaactaggtgtggttccttcaatagaagagtcagtcccattattgtgcgataataatagggctattgctcaagcaaaggaaccaagataacaccagaagtccaaacatattttgtgaaggtatcacttgattagagagataatagaacgtggtgacgttaagattgaaaaggtagatggaaaggagaatgcaatagatcccttacataggcgcttggatataagagtttgaaaacacaaatggaaattaagaatgaagtcataaatgatt

SEQ ID NO: 208251 - DNA, 393 bp, Glycine max
  unsure (1)..(393): unsure at all n locations
gcttggccttgtacctagacatctttctttttggcttcatgntggttttataaacccatntcacatcaattggtgtctttccttttggaaaatcaactaattcctaagtttcaattntctctattgacttcaattcttcttccatagcatctctccaatgagcactctaagaggcttcttcttgactcactggttttgattcagcacgcaaggcaaaatggactaattctctttntgcactgattgttgaccagaataaacttcataatctatgagtgcttgtgatgcctgcctctccctttgtgactntctgagttgaatatcaattgattcaacattctccattgcactatcttcattgcaagatgcataatcacattcctttcattgcta

SEQ ID NO: 208252 - DNA, 448 bp, Glycine max
  unsure (1)..(448): unsure at all n locations
tatatagccatataatggtagcttggaaactgttaatattgaaagcacataacatatacttagtctccagggaagacaaatggagaaagtagaagctggtgtgggaccggcttttgggttgtgcagtatgtctgttgacaatgagtcaaaagagataaagaatgtatatatatagacggtaagctacagacctttttgtctactattgatattagacacggctttattaaaattctgaacaaattcagctttcaaaataaaaaaccttctcaatttatggttgtgggtacaaaaagtactgtgataacattttgagaagcgttgttgccatagtaagtgtagcatccagttggaatatatttggttggcttcagacaactggtgataatccttacagcagtgtggaattagatttctctatttaanaattttaatatattattctatt

SEQ ID NO: 208253 - DNA, 417 bp, Glycine max
  unsure (1)..(417): unsure at all n locations
agcttgagaaattatatggaactgttagttatgctgctntgacttccaaactacacacgtgactccacttagaggtaatggatggttatcacaattgggttataatgaacatgtgtatggatccttggaggattaaattgggatttattttagtatgtttactgaattattattcttcctttatgnttataattacgatattgttgtgtttgacggaccaaattgatgtcctgatgtgaatcggttgataaattgagtgctcttggtgtttttgtgtttttgacctatgattctgattccttgattttgatatgattatgtgaaattgtttgaggggtcttactctcgatgttgngggaaacatttttgtatanatggtgtgcgtttcgacgagattactagatagcatgataaatg

SEQ ID NO: 208254 - DNA, 464 bp, Glycine max
tgtgcattcaatatcctaatgagggtgttccatatgttctcaagactggactaatacatttgctgcccaagtttcatggtcttgcaggtgaagatccttataagcatcttaatgagttccatattgtttgttccaccatgaagccccctgatgtccatgaagatcatatctttctaaaggcttttcatcattctctggagggagtggcaaaagattggttgtactaccttgctcccatgtccattttcagctgggatgaccttaaaagggtgttcttggagaaattcttccctgcatctcggaccactgccatcagaaaagacattgtaggcatcagacaacttagtggagaaaacgtgtatgagtactgggaaagattcaagaaattgtgtgcaagctgtcctcaccaccagatttctgagcaactacttcttcaatatttctatgagggacttatcaacatg

SEQ ID NO: 208255 - DNA, 369 bp, Glycine max
  unsure (1)..(369): unsure at all n locations
agctatatagaaaatcagtatggccatactctttttacacgcgatgtnccgaatcgggagacatgaatatacttgagacgctcaatatatgaacaaacgaaanactctctgagaaaatcagaatcgtcataacttttcacacggatgtccgattcggggacctaatataccgagacgctcgaattaaacagcataagctcttgagaaactcaatcggtcataacttctaaactcggatgtcccgattcagtgatataatatatacaaacgctcgaaactgaacaatagaagctttcaaaaaatttacaagcgcataacttttcactcggaatgccgaataagttgcataaaatatctagatgctcctaa

SEQ ID NO: 208256 - DNA, 401 bp, Glycine max
  unsure (1)..(401): unsure at all n locations
agcttggattttcttttagtagggaatctatctttcctaagatggngccaaacccagtcaccctcgttaaaaactagctctnttcttcctctattgcctttagttgaatacacctttgtttggttctctatttggttcttaaccctctcatgcaacttctttacaaactctgacctagattccccttctttatgtataaaagaagcgtctagtgggaagggaatgaggtctaacggtgttaggggattgaacccatagacaacctcaaaaggggagtgtctggtggttctatgaaccccccttgtgtangcaaattctacatgaggaagatactcattccaagacttatggttgcctttagcagaacccttaaatgggtggataaagacctattcactacc

SEQ ID NO: 208257 - DNA, 243 bp, Glycine max
gggaaatttttgggacacaggaaggccgaaggtcgacaaaacaacacccactgaggcacagagggacaaccccaacaacccaggaaacgacaggggagaaacacagagaaacaaacgaggaaacgaagaaaaaaagcagcgcgaccctgaacgcacaaaccaagcaagaagggcgaacgcgagacaacgggaagaggaccagaaacagaggaagacagggcccaaaagaagcccgaacgagaa

SEQ ID NO: 208258 - DNA, 380 bp, Glycine max
tcttatctacacatacccctctcataagctagctcacctccctgagaagcttccttaagaagaatccttgaaaatctgatactggggacagatgtcgtacaggatgtcacgacatcacgcttcagaacatgcagattatatttgacagtgtgtacagttgacacaaatatataacacaagagaattgtaacccacgtcggtgcaacctcacctacatctgggggctaccaagccagggaggaaatccactaaaatagtggtatgtcaagggctaacagccactggttacaaacttctcacctaaccactacccgtgcgacctctacctaagagccactcttagatatgagaaaccccgctcactccctctcaatcacact

SEQ ID NO: 208259 - DNA, 291 bp, Glycine max
agctacacatcaacatgagcatcaatatctttcttacaaagaccacacaacagtctcaactacgttcgaaaaccggactcacacaaacagcacgtccatgaaggaactcttaacagctccaacgctgatgtgcatcggaaaggtgagtcaggcacagcatatgacatatgaccttcttgtacaggcacatgccgaggctacctcgatgcttcctatatatccgaggcactaacctcaaagatgagaaggcgccaaatgatacacgatacattcgctgcctgcttctctgca

SEQ ID NO: 208260 - DNA, 296 bp, Glycine max
cgttccaaggcactggtaatccaataccataacattggaatcgattacaaccatttgaaattaaatggaatgctgtaaattcaatttgaaaacctttctaaaacaaatttgttactggtaatcgaatacaacaatttggtaatcgattaccaaagagtaaaaattctttggtaaacatgttttgagaaaaatcatgtgctactcaattcttgagaaaaacttttcatacttatcttgataaagccttctcttgatcttgaacttgagccttgaatcttgatcttggatcttgagat

SEQ ID NO: 208261 - DNA, 414 bp, Glycine max
  unsure (1)..(414): unsure at all n locations
agcttntcgattcattctatgtacccggagtggtccacattgaggttcgtgcatttttattctcgtattggttactttttataccccctcttgacgtgcttaagccattctacttaagtcatttctcgcttaacttaaaaataaaatcaatttccaccgaatgttcgaattgtattatcccgtaacttcgggtaaaataaatttcgaccgttcggtcgtgccgtaaccacgttggaaatcaaaaatagaggtaaaaaaataatataataatcacaaaacatcttttagcanaataaagcggaaaatcaatcggacgttttctctttgcgatttctcattattaatcgaattgattaataactaaagtgaaactatggctaaaatcaaactcgctagtcaagctcgtcataaaat

SEQ ID NO: 208262 - DNA, 437 bp, Glycine max
  unsure (1)..(437): unsure at all n locations
agcttacccatgttaatgacttatttntttaactcaacattnttaaactctntgttaaaatttgatgcaatgtggcaaatgtaatacacagaagatacatccaacccagtccaccaaactcgttttgatcacaaagttgctagcaaactagttcccatgtcttatataatacacaaatttggttgaggtgtaacatatctcctcaaataatgcaagaaccacatccaagcttcttttctctcacttttaacaattgcataaacaagtgcaaagatgtttcaaatagcatcttgtccaatgacagtcaacaaagtaccatgatattttccagtgaanaatgtcttatctacttgcacaatcggcttgcaatattgaaagccttcaatggatggcttanaagtccaaaatacacgattaagaattaccttagaaaactc

SEQ ID NO: 208263 - DNA, 460 bp, Glycine max
  unsure (1)..(460): unsure at all n locations
agctntgattcaattcattcaaaacacaattcatttatcggaattaataaatttcaccaacattctgttataaactcaagtcaatcagggaggcagccccaagcgcagtccagcagtattcgcacaatagaaaaattaagcaaaacagtcaatccccttaacccagacttcctttccttatgtgcaagcttactttccccattttaccccttttttcaccattgaaatttcactaaattgtgccaaaaattaactcttaaatggaatgaggatgagtcaatcttagaacttacaatagatgccccanatcatccaaaccctgaatgaattcttgatgtctcggtatacaaatatgatttgtcatccccagtaaagcattccaatgcctcttcctttctgatgcctgaattcacaaccttgctcaccaccattccaattttcattaaaacactctacaaca

SEQ ID NO: 208264 - DNA, 468 bp, Glycine max
  unsure (1)..(468): unsure at all n locations
atgcaagcttccacattaccagcgcgactactgttattcatggatattgatgtaagaattaaggaactcactgacttaggtagcagcttacagctcaaaggctgatgataaaaacaatttctcaaaatccttcaacaaacatgaactacaattaatttaactgatggtaaactgtataccattaaaaatgatccttttatgttgagaattagtgaagatacaagttgtaaacaggtaagataacatagccagtatttttttcagtgtattttagtgctttgggtcattatgagtctttgttatctcttttaggaaatagtcaatttatgccagatggttcaatttcaaataagtatgaagctatgtttacacgtgtctagtgcagatctgtagtggttgcacacatcgcctttacttangtgtaacacgggtcatgtatagattcatttgtccatattataaacactc

SEQ ID NO: 208265 - DNA, 353 bp, Glycine max
cttaactaggaaatagacaaacgttttcgcatcgccattcttaacaagaaacaagatgactatgacattggagataaaaattgaagaaatcatattaccgctttcctaagttaaatattccggaccaattctacaaaatgatggaaaaatcaacgacgatggcataccagtgggatggctcacatggagaaaagcattgggagttattcgtgatcacaaagcacctaccaactccaagacacgttcattgcacaactatatgtccagctatactatatggcagtgaatgttgggctttacagggaccacatgagagaaaaggcgagtagcaaaatgagaatgctaagatgatg

SEQ ID NO: 208266 - DNA, 352 bp, Glycine max
gatgcaatgtggcaaatgtaatacacagaatatacatccaacccagtccaccaaacttgttttgatcacaaagttgctagcaaactagttcccatgaattatataatacacaaatttggttgaggtgtaacatatcttcttaaataatgcaagaaccacatccaagcttcttttctctcacttttaacaattgcataaacaagtgcaaagatgtttcaaatagcatcttgtacaatgacagtcaacaaagtaccatgatacttcccagtgaaaaattgcttatctacttgcacaatcagggttgaattatatgaaagccttcaatggatggcttaaaaagtcaaaatacacg

SEQ ID NO: 208267 - DNA, 462 bp, Glycine max
  unsure (1)..(462): unsure at all n locations
ctgcggcatgcaagcttgacaccataggcttggccttatttacatcctttttatctttcatccaaagacatgttgtctgtaacaactataaacaaagaaaacaaacctatctgtctgcctggtgttgcttttcattattttatattttttcaagaaagcataaattgtttatattatataaattataaattgtatatgactgtcattgatttgatgcaacaaactaatatttccttaatatatttacaaatgtgtttatcaaatccatttcattgattacaaaggtacgaatgtttcctagaatgaagcataaagtttataacagcgttcattgccaccaaaatcacctcacaaaaaaggtggtaaagggtatccaaagtttttttttataactaggtntcagggttacaacaattgctgctatgaaacgagtgcacaaatttgatatggaatactttgtta

SEQ ID NO: 208268 - DNA, 321 bp, Glycine max
agctttgacttggatatacgattgatgtctttattatcaccgccctcgaatatacaaatggactgaccacgcaaaatccgaccgtcataacggttgactcggattccgatgaagctataaatatcgagagctctagataaatgaagcctcgcaatacaacgggctaactttcgtccggactccaataagaaagaacctatcgcgacgctcaaaaattaacatggaagactcgggtgaattccgacggtctaaagttttgtctcggatgtccgattgaggctcattatatattatcgcccttgaaagttgaaatggactgac

SEQ ID NO: 208269 - DNA, 467 bp, Glycine max
  unsure (1)..(467): unsure at all n locations
agcttgtanggttaaagtctcacgtatttttcgtgctcatgcaacaattgttagccgtggctatacgagacatcttgccaaacaaagtcaggttcatgataactcgcctgtacttttacttccatgctatatgtagcaaagtgattgatccagtaatgtttgatgagttggaaaatgaggccgcaattatactgtgccagttggagatgtattttccccctgctttctttgacatcatgattcacttgattgtgcatctggtcagagaaatcaaatgatgtggtcctgtttctctacggtggatgtatccgattgagcgatacatgaagatcttaaaagggtatacaaagaatctatatcgtccggaagcatctatttgtgagaggtacattgcagaagacgccattgaatnttgttcaaaatacttagagaacgctaaagctggtgggctttctgagtgtcagcat

SEQ ID NO: 208270 - DNA, 404 bp, Glycine max
agcttgctataaattacattgatgttattggaagaggtcgtatgccattattggattaagagtagcgtcccactggttaaactaactttccaaatgtttgccttggcaagaaatggccctcaggaagcttgcctcaaagaagtccatgaaggacaatgcagtcgaacgaactagttccgcttcggagtatgacagtcaccgctttaggagcgctgtacaccaccagcgcttcgaggccatcaagggatggtcgtttctccgggagtgacgcgtccagctcatggacgacgaatatactgcatttcatgaggaaatagggcgcccgccgagggcatcactggttactcccatggccaaggttgatccacaaatagtccttgagttttatgccaatgcttggccac

SEQ ID NO: 208271 - DNA, 401 bp, Glycine max
  unsure (1)..(401): unsure at all n locations
ttcttgggggtgaatcttcttcttccttggcttattccctaaaggatggggccctccctatcctcttctcctttgccttccgctgcatctccatggtgaaaaatcaccattgaaggacctcatcgaagctcaaagatccagcctccatagaaacttcacaagcaagcttccatcaagtggtaatcagagcacaagagctttaagtaagtgctccttaaacctccattaattntttttctttaccctctcttccattggtggttcttcatttttctccatgtatctcctcacatgtcctggtctaaatggtgtaacatgattctttagagttttcaccgattaaacttgctatagaaactagatttgattttctatgggtcaaattcctggtcttggtcttg

SEQ ID NO: 208272 - DNA, 395 bp, Glycine max
  unsure (1)..(395): unsure at all n locations
cttgcatagcctccacctagttatcatcttgcattgcctcgtctatgtgtctgggctcanattctaagatcaatgcagttttaccactatgatgagtccatatctttttccacttactgaggttgaaccaatgggactatgttaaaagacacttatttcattgtgaagatctcttagtttacatgggcctttggaagcatacaaatgcatgtgttttatctggaaaataaacaacgtcgactcacatgttggtcattggtagatggttgcgaaactaatcaaatgatgntgatcccagttctgaaccacaacgagtaatatacacctatgtaagactgctgtgtttttcatgaaacttttgggtgagaatgccctcacagatttacctttatcat

SEQ ID NO: 208273 - DNA, 329 bp, Glycine max
cttaaaaattgctaagggtttttttttcacccccgagacttcgggcggccttactcccggcatgatgatgctacgctactttctacattgtagctttttacgtatgaatggcactgggaaataaatggatcgtgtttcctcctttggccacatgactatggttgtcactctgaaaaacataatggtgtctttgcctggtcactttaacagagggggtttgcacttgaagcaagaagcttgtcctagcttatccttggaagcaaggatttgacatttgaaagcctgccttttacagcctggaggacctgaatgatgcactacttcatttt

SEQ ID NO: 208274 - DNA, 284 bp, Glycine max
accacagaggggcacctgtagatatgtcgcgggggtcaagagaccttggggacgtcaggtggggtgctattgcccaaaaccaagcttgaacaatcccgacccaacccgggcatagtcggttagtgacaacctgtgatgtacctaaacaggcgagctcctggcagtcaacagataaaaggaacaaagaccacaaagcaaggaggcttgtggtggctggccagttgtgaatcttgtatgatatgtggattatggcctctggtaatcgaataccaagggtgggtaat

SEQ ID NO: 208275 - DNA, 393 bp, Glycine max
  unsure (1)..(393): unsure at all n locations
tttcctctcgaaccctgaagcgctcttgattcaatcttgaactcattctttgaatcttgagaacatcatctttgttatcatgaattgttcttgatctttgagctttttgtcatcacctttgtcatcatcaaaacttctttgaatcatcatgaagcttgcttttacaccagtgactgatttcgaaaaataaatttccaaaagtcacaattcttaaagtgacttgttgctgaagaatttntcanaagtcacaactntttaagtgactagntttcaaaagagtcacaatttttaagaggtgactaagtttaaagaaattaccaagagtcacaaactctaacttgagtcatcaagagaatatatatatgtgaccatggcattaatttcataacatct

SEQ ID NO: 208276 - DNA, 342 bp, Glycine max
  unsure (1)..(342): unsure at all n locations
actgctgatttacatatcttccacctcaacaataggttcctcccaaacagctagaattgaaaacccaagagtgaaattcaatatgttacagacaccttataaagttggaacttctcatactactgtgaaagtgaatttctattcataatgaaatattatcatatagacaaaagaaacaatctcacacttagcaagactagccatgccataccaccctacattcgggaaattttatgactcattagtccattgcaaattaagggcactagggcagtatcaaatcatggnttcaatatccaacaagtaacatagatccatatgagattcaactaacatactaac

SEQ ID NO: 208277 - DNA, 431 bp, Glycine max
  unsure (1)..(431): unsure at all n locations
agctttgagcaaattgaaatgacaattancttattcacggatagccggntgagtcccgtaatatatcgagacgctcaaaatttaaatccgaagctctgagaaaattgaaatgacaataactttatacacggatgtccggctgagtcctgtaatatatcgagacgctccaaattgaaaacggaaactcttataaaattcaaacgacaataactttttactcggatgcccgacagagtgcccgaatatatcgagggacgctccaaattgaaaacgaacgctcgtatcaaattcagacgactataactntttactcggatgtccgattgagtctcggtatatatcgagacgctcaaatttagaaccggagctctgaaaaattgaatcgacataaccttatacacggatgtccggctgagtcctgtatatatcga

SEQ ID NO: 208278 - DNA, 473 bp, Glycine max
  unsure (1)..(473): unsure at all n locations
agctngcttgtggggcatctatggatgcttgatctttgagcttcaatgaggtcctttaatggtgattctccaccatgaagatgcagcggaagacaaaggagaaaaggtgagagaaggcgccatccactagggaataagccatggaagaaggagcttcaccaccaagatgagccttggataagaagcttggagaggatgcttcaatggaggaaaagaaagagggagagaaagagagaggggggagcatgagattgaaggaagaaaaagggagagaagttgaactttgagttgtgtctcacaagactctcattcatcaaagttacaacaagtgctacacatgcttctatttatagactaggtagcttccttgagaagctntcttgagaaaacttccttgagaagcttctttgagaaaactttcttgagaagctagagcttagctacacacacccctctcataactaagctcacct

SEQ ID NO: 208279 - DNA, 436 bp, Glycine max
  unsure (1)..(436): unsure at all n locations
agctntaagcctaggtggaggcgaagtgatatatgtctattcactcaattcagctaaggggggtgcagtatttattgaatcagtactcaagatggtagactgcttaaaaggcttctgtaattctccaggtaaaggtggcaagacacaatttgcaagtctgcggcacactgggcatagaaactctcccttgaaaaaaagagtgaacatttggaagagagtgaaaagattataaaggtgtcataacaaaatgaaaaaaagaaattagaanagacttaaacctgatctgggtcaacaatatgtcctccttcaaaaacaattcttctgacagatctcgccagctacaataacaataataattactccacagcaaaaaaaaaaacttgaccatctactcattgcatattaaccatttctgtattgggtatatgagcggcat

SEQ ID NO: 208280 - DNA, 414 bp, Glycine max
  unsure (1)..(414): unsure at all n locations
agctntatataacttcatgatgctccctctgttgtgatatcaacagcactcacatctcaagctgtaaatcttcctttcgaactttggctgaaggaccaaattatatgtcactcagtcagtccaaactgtgagacttgataagcaaaggtatgtctagtgaaactaacattggcagaaaatatatgatggtttacattccattacaacaacagccttatctcactaggtgagattaactacatggatcatacaacgccatttggcttggtaatggatggttacagtttataatgcttgtaaaataagatgatgctagataccttcagcgggatgtctgtgacaatgtattccacaacaggcattccaagggaagcccttgcagcatcagctacttgtaactgtcgaatcccgagc

SEQ ID NO: 208281 - DNA, 426 bp, Glycine max
  unsure (1)..(426): unsure at all n locations
agcttgagatgaggaagtgttgaagggtgttacttnctgcntttattggtgaccacagagtggtacctgtggatatgtcgcgggggtcaagagaccttggggacgtcaggtggggtgctattgcccaaaaccaagcttgaccaatcccgacccaacccgggcatagtcggtcagtgagaacctgtgatgtacctaagcaggcgagctcctggcagtcaacagataaaaggaaaacaagaccacaaagcaaggaggcttgtggtggctggccagctgtgaattntgtgtaatatgtggattgtggcctctggtaatcgattaccaaaggtgagtaatcgattacaaggcttaaaattgaggacaggacgctatgatggtctcttgtaatcgattaccaaggggtgtaatcgattaccaggcttgaaa

SEQ ID NO: 208282 - DNA, 445 bp, Glycine max
  unsure (1)..(445): unsure at all n locations
ctgagcatcagctctgccaccgctgtgggctattatttccaaaacaaatccctcttattactagctattttgaattctttagctcctgaatgtacaaccttcaaattgttgctcgttcccctatttcttttctgcaaaaaagaaaatcaatatcaaagaaaacatggatgaagtcctaaggatgccatgtacatgtgtatttatgaagatatagtatttatattccatcaaacatacattgattgttgattacatgtaatagactttttataacatggtttccccaaatcacaattaanaagcacaactaccaatctttcagagtcctttggntaatttgtcttgtctccttatgtaggggggtgttgtttataatattatactttagccttcctaaaaaaacttatgactgatcctcttttcattaattctattttgatggtat

SEQ ID NO: 208283 - DNA, 158 bp, Glycine max
tcagtgaagggacaaagagccacggacaaccccccacacaaaacacaaccgcaacggacacccaaatcccaacaaacgacccacacaattgccaaaggctggcactggcatgattcccaccaccacctccacgcaagaataacagaaacactacccca

SEQ ID NO: 208284 - DNA, 457 bp, Glycine max
agcttaacatcagaccacttccagtgtgtttgttctacttcacatggacttgatggggcctatgcaagttgaaagccttggaggaaagaggtatgcctatgttgctgtggatgatttctccagatttacctgggtcaactttatcagagaaaaatcagacacctttgaagtattcaaggagttgagtctaagactttaaagagaaaaagactgtgtcatcaagagaatcaagagtgaccatggcagagagtttgaaaacagcaggtttactgaattctgcacatctgaaggcatcactcatgagttctctgcagtcattacaccacaacagaatggcatagttgagagggaaaacaggactttgcaagaggctgctaggtcatgctccatgccaaagaacttcctataatctctggctgaaccatgacacaagatgctcatcacacagagcacactg

SEQ ID NO: 208285 - DNA, 445 bp, Glycine max
  unsure (1)..(445): unsure at all n locations
agcttatgagtttgttgatgatgtgtggcttgtgttgtcttatgcattgcaataccctccaaggagtgaggttcatagaactgcaacaaggatcaccgagggttttgaggtcaattggaaaactatgaaggagaagtggatgcgtgaggaagaagagacgaacaagatttgcaagagggaattacatgtgtgtccaaatgaaggaagtcaagtgagtaattatctcaccaaaaggagcaatatttctatatgctgattcaaaatagcttctcaccacaagtcaagaaagctatgccaataagggtcattatgagcagcatggacattacccctcttaacagtttcatttaattacctctggttattcattttatgtataaagtatctattgagtttcacgtaagaagtttctactgttctatnttgagttgtaagattactcctc

SEQ ID NO: 208286 - DNA, 352 bp, Glycine max
agctttgagccaagatcccatctctatatatatcttgacccagggtgagaatgcccatccttgccctcggaagaaaacaaaaataaaagaacaagatcgctcccgatcaaagatcggaagaaagcataagatgataattcccaatcaaagattgggagaaagcaaacaagaaagaaaaattctcgatcaaagatcataagaaaacaaaagatatatacagaatgttctttggaccagacaatatctgaacaatacagaattgtcacatgtaaacatgaaaaggaaggaaaccacgacttggagtggtcctctccctttgatcgccaaccaaaatcctgtgcgctagcgactt

SEQ ID NO: 208287 - DNA, 281 bp, Glycine max
tcgtaaccgtttcccgtgagaaattacgccgaagattctcgacccggtcttcaagattcatcggtcgttcttcgctttcttcagtcttcaacggggatttcctccaacccagcttttcaattcattatttgtacccggggtgggccacattttggttgatgatttttcatctcgttgtcattacttttataaccccttgtgcgcgcttagccattattaagcatttctcgcttactaaaataaataattccccgacgttgaatggtatccgtatttcggta

SEQ ID NO: 208288 - DNA, 375 bp, Glycine max
  unsure (1)..(375): unsure at all n locations
ctgcagcttgccttagggctgacccancacttctttcgaacctttaacctcattggctctcacagtctttaaaagtgggagcccatccaatccttgggtccggactctcagacacttatgatagccgccgatgatcccattactacttcccctaagctctctggcctttcttcacgccgcatcccatgccttgcgatctccttggagtaccctcgcgttgtggtcactgacaccccgtgcgatgaaaggcgtgatgctttccgctgatggcactcctctcatggcgtagccaagctgtcttatggtgaggacgggattataaataatacaaaccccttgctcccatcaaaggaacatttggacatccttcgcatg

SEQ ID NO: 208289 - DNA, 364 bp, Glycine max
  unsure (1)..(364): unsure at all n locations
agctntagtgattgtgtacaaccacagattttactttgagtgtcctcattgatatgaaccaaatttggctttgcctgaatttctaattgtcataacatataattcatggatatgatctaggcattctttctttctttacagccactggccaaatagctatcccaatatatattattttaccatttccattccctttaagctaaacacttgatattttgttggaacactaacctaggataaaagtttcctaccttaccttacgattatgagagcaagggtgctttgatgggaatttctatcattcggcggctaatgtcatgtaaatacttacattttatgggtattaaaggaaactacatattta

SEQ ID NO: 208290 - DNA, 479 bp, Glycine max
  unsure (1)..(479): unsure at all n locations
ttagagtcacctgcngcatcaagctgatacaaaaacccttagattttatatctctanataatataatctgagactatagaatggcaggactaagaatctaagaatattcttaattctcagggaccagccaatatttctagtaaagctgcatgagccaagattatttttaaaggaaagtcgtgcggccaagctttcctatgaagactacaaggccaagctgatcttacagtgcacgatttgaaccaaagagagcagatctgagcaaagaagattatggctcaattggaggagagagataacaaaccaaacagtggcgaataacctgaatagagagccgcaaggccacaatacaattaacttatggcagcagaatcatgacaatgatggcgacatgaatcataatatattgaagaatcaataaactggcttggacatgccaccatgtgtggaggacgaccgtagcacatggaagaaccatg

SEQ ID NO: 208291 - DNA, 414 bp, Glycine max
  unsure (1)..(414): unsure at all n locations
gtcacctgcggcatgcaagcttatanaatatataataaaagatttatttctattgaagaatctattcatgtgtcctttgatgagtctaatgctatttctccgagacaggatatcttagatgatgttgcagaatctttagaacaaatgcatattcatggacaagattctaaaggaaaagggaaaggaagcaatgaatatcctccagaagaagccaaatcaaatgatgaacttccaaaagaatggaaagcttcaaaagatcatccccttgacaacattattggtgatatctcaaaaggggtaacaactagacattctctaagagaattatgcaataatatggcttttgtgtctatgattgaacctaaatatataaatgaagccataatatatgatcattggatgattgctatgcaa

SEQ ID NO: 208292 - DNA, 456 bp, Glycine max
agctataagaagaggcccattctcttcttcttaatctgatttcaggcttaaataggtggctttgttcgtgcttgcgcgcttagcgtaattctgaaccgctttgtgctcattagtggatttcggcttaacgcgtgcttttctcgctcagtggatggactaaagcggtgcgcttcgctggatgacccttcacttagcgcaaatgcacaactcatccttcttccagattcttcctcccgctcagccgaagagtgttgcgctcagcggatggctcgctaagccaacatgttggcttagcgagagggtgaaaatcaacacttcacaaacttgcctaattaacctgaaattgagagaatatgattattacacacacaaaatggacatacttagtattattacctatttttaacaaaagtattaccatactaccaagaaatcataatttggaggagtttatac

SEQ ID NO: 208293 - DNA, 354 bp, Glycine max
ttaagtcgacctgcggcatcaagctattaaaagatttaattcttttattattaatacgagaacaatctatatgaattttacaaaaaaggatacaccaaccttcaaaaaagattctctttatagacctttttcttacactcttgaaaaagaagtttacacctagagattagagagatgagattatactcatctataaactcactaataattctgatgatatatagatataatttgattaaattgataaaaatcatattttatatatagttataaaatagtataataattacaccagtataatttcatcatttctgtctctcattattggtagttataaatgcaatggtatattct

SEQ ID NO: 208294 - DNA, 361 bp, Glycine max
tttcatcaccttcaatgcaacagccaaaaagtttgacaagattacggtgttgaaactttgaaatcaccactacttcattcatgaattcttctagaccttgtccagatgctctagatagtcttttaactgctatttcctgtccatcttgcagtttccccttgggaaaatattattaagagaacagctataaacaatggattcaaatatgacacactttgtttaaggtaccttgtacacaggaccaacaccaccctgcccaagtttgttgggcagggtggaaagttgttgtgggctattgaacccatttcgaaatctaattgtacagcttccgtagtgtaacttgtgacagttcttcaattac

SEQ ID NO: 208295 - DNA, 444 bp, Glycine max
acctgcggcatgcaagcttgacaatgagattggtcatcatggcatgtttatcttttcttatgtgaacccccgcctctaaattatgatcatagagttgcgagaggctttagttctgcgatgtttaattcgctaatggccgtttttttccctcatctgcaagtatgttataccggatgatggttgtcaaatggagggaattaaatatgaagcacactcactttctgatcactttgctccaattgatacttaagtttagtccattatatttcacttttatgttgtaattcttaaaaaaatttgcttcaatttatgggcacaatctggtcatgttactcttaattctttctgatgacataatttgctgatgacaatgaacttacgttcttcccattttgagactgatgatgttgaagcttttatctacctcacaataatcatggacta

SEQ ID NO: 208296 - DNA, 408 bp, Glycine max
  unsure (1)..(408): unsure at all n locations
tgcaactagncggaactacaggaggctttttttttagctacattcaatgggcgaatttcaccatggagaatcagcggaagacaaacgaaaagaagggagaagaagccccatccactatggaataagccatggaagaaggagcttcgccaccaagaatgtgccttggataagaagcttggagaggatgcttcaatggaggaaaagaaagagagagagaaagagagaggggagcacgaaattgaaagaggacaaggcggagagaacgtgaactctgagttgtgactcacaagactctcattcatcaaacttaccacacagtgtacacatgcttctatttatagactacggagctctccttgagaagctgtcttgagaaatatccttgagaagctttcttgagaagctaga

SEQ ID NO: 208297 - DNA, 360 bp, Glycine max
ctaaaggaatacttgaatatgttcatcccaatctctagtgaccatcaaggatccaatctcactctagtgcaagggacttcttatccattatacatgattacttttaaaaactgcggatatacacctagaaaaccaaagctgagtcatttgataacttcaagtactggaaaactcttgctgagaatcaaacataaaggaaagtaaagagggttacgactaacaatggtcttgagttctattaagattactttaatgatttctataaggaacatatgataacaaggcacaaaatagtagttggtactcagcgaaatgatttagcagaaagattaatagaatattctggaagagtgcatgtat

SEQ ID NO: 208298 - DNA, 398 bp, Glycine max
agcttatcatgaacttctatctaacttatctattctctcataagcttacaaaaacttgcaaaaagattcaaaagaatttatccaaagataatttaaaacttgagaaaactcttcagaatcaagtagaaatttcactggacgcatccacttagacatgtggagcttgtatgactcttaaagaaaaagagtccaatatatgtcttgagattgagacaagtgataaggaaaaagctacttttctcaagaacttttaggtgttggaaaacaaattgaaatatcttcaaaaggatctaaaggagctgaatgaacttcatggctatcaaatagaagataggtatgatctatggagagaatgtgcacaagcacacaaagaatatgaagatgtcataatgagcaaa

SEQ ID NO: 208299 - DNA, 350 bp, Glycine max
  unsure (1)..(350): unsure at all n locations
agctatagtcttcatgttgcttctttatctctaaccatttccccctttctggctntgatgatgccaaacttgaatatgacattgagtgcatttggagggtccgagtcttgagattagagacttatttttcttagtcaatcctgaatgcttaagaaaatatcaatttatatcatcatcatatatcttactatatatatatatatatatatatatatatatatatattatgaccacaagcatgtcattgcatacaaaagaataatgttcaaacttgagatcttgtggttcctaacatactcctatttgaagggcatattttgttaaaatatatattgtaagggcatatgtat

SEQ ID NO: 208300 - DNA, 443 bp, Glycine max
agcttctacttatgtggagggcgggctttcttcactttcttggctcaaccgcgagctttgaccaccactctttcttctcgcgatgcttctctttatatctgcccgagtgggcttataacctaaaccatacttcccatgatttcctttggcatttattaagctagttatgccgccggtgtcttttcctaaacccattccgggttcgtaaccggtccccaacataactcgggccatcattactgctgcatcggacaggcaagcttgcccagagaaggagtccacggaggaaatgcttaccacctcaaaagactggagagcggtttctaatgactcctctgcggcttcacataaggatagaggatgggcagctaccaagatgtcttcttcgttgatacatgacagatgccttcactacgatttaactttggtgaggtgaggacact

SEQ ID NO: 208301 - DNA, 321 bp, Glycine max
  unsure (1)..(321): unsure at all n locations
ggaggagtattgatagatactcattagatgttagattacttagtccaacaaatataggaatatatgtaacaaagaatggtattgggcatgcaattgattatttcttatttactttccaaattattcaataaaaactactttcatggcatagctgaagatgttgttgcaagttgtcctgtactcangaacaagtgcttataaatcaaacagttctacaactatgcaagtaatgcatacaaaaacaatntgaaagtacttttcaaatcaaagatataaatacctgagttggaggcttcagcacaattgactttccaacaatga

SEQ ID NO: 208302 - DNA, 315 bp, Glycine max
  unsure (1)..(315): unsure at all n locations
attgattaaatattggttttaacaaaagtttgtgatacgatccttggaaagatatatttttcaaaactctatttttttgtgtgatttaaaaccaattcaccccggtcttggcttgtgagttccatcatcttttttaattggtattagagcttcatcttgaaagttgctcaagatcacaattttttaaaacaaatcactttcaaagagggtatatctctcaaccgaccttcattatttgagggagaaccatttttgttttggcaaaaaagaatgaaaatntttattcaatcaatcgatccagtgcatggaatgtta

SEQ ID NO: 208303 - DNA, 420 bp, Glycine max
  unsure (1)..(420): unsure at all n locations
cgacgtggaagccagattgctggaaatgcctgttccagaaagactgaaaatgcttggtggtcaaaatgcctttcataatatggcctttgtggaagactgaaagtntctgggcttaattggtataaagaagaacttgaaaaatggtcttagtggnntaaaaacttctctttataaatctggccctaaatgaatgaaangttgaagtcttggcgcttaattgtataaagaataatcattcttttgtcagcttttaaaaaagatagaaaacgattatcttctcataattaatcttttccaagcatgcatggaagagaaaagtgagtgatactagaatgaatagcctanagtacgtacatagaaagttagtaagggagggaaatttactggctagcttgaagtcttcattttactgctactatt

SEQ ID NO: 208304 - DNA, 429 bp, Glycine max
  unsure (1)..(429): unsure at all n locations
gggtctccaaaacaacacaattctttgaatatcatgccacttcacaccaggacgggttgactattgcctccttctacatggaaatacctgctttggcatagtctcaatggatgtcgaagagaggacaaatctcattgaggccctgatatctgcatgcactggatgctcgatttcccccttcttagaggaccctattgggaccttgttcacattgaggcaatgaggcacagtacacaattactgatctgaacttgaagcactaacttatcgaatcattgggctccgcactccattcttgcttagttgctttgtgtccgagtngagcccgaaaatccaacgggaagttcaagctctacaaccactcaccttgggggaggcaatgcccttatctagacttcaggaagaaaaactcaatgagcactgccagat

SEQ ID NO: 208305 - DNA, 328 bp, Glycine max
gcacgaaacatgaaagtcaagtgctaagttagagatacttcgctgcctcctatgagcgctttgttaacgtatttagccagacgcggagtggtgattgatctgaacaaggacctaacaccggttggcacctgccctaaagctttgacaaagaaagagctatcatgcaattgtgaaaagaacaatactacaagatgcttgaatcaccctctcacttgcccctaggctgacccaagttggtgtggtgcttaccatcaccctaaatgacgcttcatatactctccaatttgcaagacactgtgaagtaaatgcaaatacatgcctgatcatg

SEQ ID NO: 208306 - DNA, 409 bp, Glycine max
  unsure (1)..(409): unsure at all n locations
tgcaagctttacaagtaagcagagagaattataattctgttcataagctacacatgcaaataagaaagcgactaagccaccttatggatatggtatactgagaaatacaatgaactcaccttatttgctgagttgaaaatgatccttctcccattatcctaatgcacatgcttacccaaacaatacaacttactaaaagacattggatacttagggtgtggttggttttatgggaagaataatgaagaatggttttgactataatcaaacttgattntataaaaatataaatggttaattactggaaggtagaattgattgttcctcaaaatgttaatctagctagaagtgacaaaaagtaatcttggtgttgggttgaaactttacactaagttttacaaaaaaaaaa

SEQ ID NO: 208307 - DNA, 458 bp, Glycine max
  unsure (1)..(458): unsure at all n locations
agcttcaagaatgatggcctttatcttactttctctatttctagaagagaaattacaatcaatagaccctcaatcttcaatggagagggttaccactactggaaaagccgaatgcaaatttttattgaggcaatagacttaaacatttgggaagccatagaaatagggccttatatacccaccacagtagatagaaccacaatagatggaagcacaacaagtggaagcacaacaatagaaaaacctagagatagatggcctgaagaggatagaagacgagtacaatataatttaaaagccaataacatattattacatctgccctgtgaatggatgaatatttcagggtcttaaattgtaagagtgctaatgaaatgtgggacactctacangtaacacatgatggcccaacagatgtgtaagatctaggataacacatttactcatgaatatgaact

SEQ ID NO: 208308 - DNA, 401 bp, Glycine max
  unsure (1)..(401): unsure at all n locations
catgaagaanaatatgttaacaattcaagatgccattttataaacttgttgacagagcattaagtaggggagttacagccatggaacatatttagaaagctatatatcaatctgccaaaaagttatataggattactttggacggtgactttagaaccaagtccatcatcatagtttccagctttccaaaactgcctacacaggggtgctacaccaatggatgatgcataagaaatgcctgtgtcatcaacaggcgacggtccctgctcaacacactggagttactatgacctgtacttggaccattagaacttatattttcttcagaatcttgtccagtagtatgactttgagatctcttgtgcttggctagttgacctttgtagtctaatatattgttt

SEQ ID NO: 208309 - DNA, 434 bp, Glycine max
  unsure (1)..(434): unsure at all n locations
ctaaagcaacacaaaatctatgtattttaaacccctcaatttaatgggatttcaaggtttgagaagtgaaattgagaatggggtaaatttggaagcaactctcacctcacacaagtctataacatcaatttaaacttgttcaaactggatttacacctaaaattccaccgaaccaaaatttgactcctcaacacccaattntaccctaaaaatggctctntgttcactctggtcatttgtttttctctctagcacagcccaaactttctcataagtcctgaatgacatttcaagctaggattaactcactttcacttccaaataccactaaatccagatttggtcttccaactctcaaacctcactctttttcactctaacacatattctacttctaacctggtaactctaccttatctntacaatttcatagc

SEQ ID NO: 208310 - DNA, 283 bp, Glycine max
aatctgtacctgtcgcaagagtctgtgagtcatgctcctctgctgaccaccatacagacctttgcccttccatgcagcaacctggagcaaatgaggagcctaaagcttatgctgcaaacatttacaatagacctcctcaacctcaacagcaaaagttgtgacatcttgtaaatctctactcgaaattttgaaaacgatgcattttgaacgattatatatatatataacgagtacttcatgtatatgcatatacggccttggcagaaacacgaataggggggca

SEQ ID NO: 208311 - DNA, 340 bp, Glycine max
cagtaccctcgaccgcagaaccgtctctacttcaccttattcaccgggctcatcataatcggaaaagtgaagaagagattaacacacaagcccccaactgaacccaatacaactaatcaccctcaagcacccaaaattgggtggtaataaatatccttaactgcttccccagacgctgagtaccctaaacccccaaacaaaccgaatccatccccaaacacaaaactctaccgaacttcttcctgtccctcgcctcagcttccaaaggcaaaaccattccaattcctcgaaagcatacacagccacacctatgccgtagaagaacaccgataaacccccg

SEQ ID NO: 208312 - DNA, 294 bp, Glycine max
ctgccctcaccaacagatgtttgagcaactatttcctcactatttccaggacggacttagcaacgtggagaggagtatgaatgatgctgccagaggggaaagctttggtgatatgacccttgccgaggctaggaatttaattgagaagatggcttccaactcccaacaattcaaagcaagaaatgatgctactggtcttagaggagtccatgaggcggacacggattcatcttcatctactgaaaataagaagcttgatggaaaacttgatgcctgggtcaacctatgaactca

SEQ ID NO: 208313 - DNA, 403 bp, Glycine max
  unsure (1)..(403): unsure at all n locations
agcttgtcaaggaagctatctattctatatatagaagcatgtataacactggctgtaactttgatgaatganagtcttatgagatacacttcaaagntccacttctctccttcttttattccttcaatttcctgctccccccttctctctttcttttcctccattaaagcatcctcttcaagcttcttatccatggaaatttttggtggtgaagctccttcttccttggcttattccctagtggatggtgcctcccgtctcctcttctccttttccttccgatgcatctccatggtgtaaaatcaccattgaaggaccccattgaagctcaacgatccagcctccatagaagccccacaagcatgcttccatcaagtggtatcatagcacaagagcttcaagt

SEQ ID NO: 208314 - DNA, 396 bp, Glycine max
  unsure (1)..(396): unsure at all n locations
gatccttaagacacctgaggcatgcaactnganggcaagagataggactttctgttatatatgatggacacttgggagacagagtgcctgcctatttacaaaagcatctcttttctaatatcttgaaggaggtgagttattgaaccagactaaaaattatcatgtattgattattaccttaatcacatttgattcctcagacaaagggacaaaggtttccccctttttttcctgacttttcatactctttttttatgatccatattaacaggatgaaatataatctgggtgaacttgataccttgatgaaatatgaaacctctttgtcaaaaaacttgagtctggactaatttcttttgatctttgtaaggcctctgactaatttattttgattac

SEQ ID NO: 208315 - DNA, 412 bp, Glycine max
  unsure (1)..(412): unsure at all n locations
agctntaataagngcagaaatgctttgcttgttgctcatgactgagggcatccggactcagttatttggataataataataataataataataataataataataataataacaataatatactcgagaaatctatggacacgtnagaaattaaatcaaataatattaattcccttattacgctattctgaaatagaaatataataagtaattttgctccataaagattatcttaactttccatttagagacatgagataaaatacgataaattaattaatattatttactagttcttgatcttaaatatattttccaaataataaattaaagatttttattctactttaatactactatgaaatatttaagaataatatgataatttattaatacccctttaattttggtc

SEQ ID NO: 208316 - DNA, 449 bp, Glycine max
  unsure (1)..(449): unsure at all n locations
tactaagcttgccggaattagatccacgccagacaagtgagcaggtttggtttgtggatgaaaattctcttgaaggcataaatcgattggattggtaacgccccaganagcgaggagcagcacactgtggttaaaagatagatatatgtgcatactggtaaactttaatctctgctattcaaaccaataaagttgaaagggtttctaatactcattgtgagaagccattccatcaattataacttcagaagcaaattatgaatgtctgacaagccagcaacataacatgattgcaacctgctgattcctgtggcgagggtcagaaggatggagaacacaccttggacaacatgattcacgtaggaccaaaacatacgtcgttattttttttaaagaaataaatacgttgtgtnttataccatgtctatatacaaactagaattatatat

SEQ ID NO: 208317 - DNA, 382 bp, Glycine max
  unsure (1)..(382): unsure at all n locations
agcttagaagatagncatacctcacaaaatatatgtatgtgtgtttaggtagtgaaaataccttagatatgcatgtatatagcaaaagtacctcacaaaatatatgtaagtatgtttaggtagcaagataccttgcatatgcatgtatatagcaaaaatatttcacaaaaatatgcacatgtttaggtagcaaaatacctcatgaaaaaaaaaaacaaaaacaaacaagaacaaaaaatatatcttttagctgaaaagccaacatgcttttgagaaagataacttccagcttttctttgaaaaaaaaattcactgatcataaccagtttttgaaagaaaatgtgtgaatacacctgaagggcaattgctgtgaaaatttccg

SEQ ID NO: 208318 - DNA, 457 bp, Glycine max
tagatactaagctggagagatgcttaatggagaaaatagaagagtttgttctcatatttaaaggaggaaaagggggagaaaagttgaacttcgagttgtgtctcacaagactctcattcatcaaagttacaacaagtggtacacatgcttctatttatagactaggtagcttcattgagaagctttcttgagaaaactttcttgagaagctgcttttagaagactttcttgagaagctagagcttagctacacacacccctctaataactaagctcacctacgtgagaagctttcttgagaagattcctaaagaagctaaagcttagctacacacacctctctaatagctaagctcaccttcttgagatgagaagctagagcttagttacacacccgctataatatcttagctcaccctcttgtacaaatgcatgaaaatacaaagaagccctactc

SEQ ID NO: 208319 - DNA, 437 bp, Glycine max
  unsure (1)..(437): unsure at all n locations
aatcacctgagctgcagctatgaattatatagagacactgttatttttaatttattctgtcncctttgatgagtctaatgctatttctccaagaaaggatattttagatgatagtgcacaatctttagaacaaatgcacattcatggacaagattctaaaggaaagggagaaggaagcaatgaagatcctccagtataagtcaaagcaaataatgatcttccaagagagtgaatagcttcaagagatcatcccattgacaacattattggtgatatctcaaaaggggtaacaactagacattctcttaaagaattatgcaataacatggcttntgtatctatgattgaaactaacaatttaaatgaagccataatagatgaagatttgataatagctatgcaggaagaactaaatcaattngaaagaaaataatgtt

SEQ ID NO: 208320 - DNA, 385 bp, Glycine max
gccactatcggggttctttttcttctttttagagcgagtttctaccgatcgtttaagccgtaatctcacttaatcgatgttaaaacgaattgtgatcgatcatttgggttctaatctcatttaaacgcctttaaaataaaattcatctgatcgtgtatgctgcaacctcgggtaatcatcaaaaaggcaaggttcaaccagacatttactttgaaagtgctctattaatgacgtgagaaataacccagtgaaactaatgatgaaatcaactcacaaatcacgcttttgctcgcgaagaggtcatttgcaaccgtttaagggccgacacctttaacgtgcctctttactttgatcggggaaatgaaccattaaagtctaattacac

SEQ ID NO: 208321 - DNA, 224 bp, Glycine max
  unsure (1)..(224): unsure at all n locations
gctgagagttgagaccattaagatttatgtgggngggttgagtctgacaaaggaaaattaaaaactcttaatttatatntttcttttcttttggatataataatacagaacctcttttgagattcttgtgtttttttatgcgtnagattcttttgtatttgatgctaaactcagaaaactggaaatgtcttaattatgtttttagtcccattaagattttcttt

SEQ ID NO: 208322 - DNA, 318 bp, Glycine max
aatgacgtaaattattagtaacacttaccactgcatgtctcaactagtcgacatcagaccttgcagatgtcgacggtgctgctgcctccgtgaccggacggatatctgtgtctggatcctgaagggcaactctgggctgcggagcatgaccatctgcccgaggatctgatggctggcccggtgtcatgaatggatgcgaaatgcggaagaatcagtccatgtagtcgctggcacactgccctggcacaacgcagatgtcacctgctacaaccatatggtcccaatagtgcatacacctagtgtgtatatcatcagacg

SEQ ID NO: 208323 - DNA, 380 bp, Glycine max
gcttgtgtgctgccccacagagcccctcttaacttgtttcggctgtgctcttccctatgagccctcttggtctcttgttccaaggctttggtggttgctatatttatatctctcagttctgtattctcctttcggattttcagagctgctaatttgaacctttctttgactgtttgggcttgctcgagttctgccctaaaggcctgcacctcttcgtcttcctccggtgcctcaacttcctcccttttaggcggcctcaaactcgggaaccaatccaaaccttgcacgtgggctttcaaccacttacggtagccaccgatgggcccattgttattgcccttgagttctttgtccttcttttgcaccaactcccatgcctt

SEQ ID NO: 208324 - DNA, 415 bp, Glycine max
  unsure (1)..(415): unsure at all n locations
agcttggatattcagcctggcgagggatcgatggtctagnaattnangccacaaaatagaacaccatagcccgattgactaataaacacttttctatgcataacctctgttgtagaaacacccaacatatctacctactgctgtcctttattaaccttgcatttgatagttcctaacatacaagtttactttaaattttgtttgaatctatcaggtatacgtgttctctctcacaatgcttcatttctgaacttaatttatgctaacattagtaccatgtgttccatactcggatacattcatcttaattgtaatacttaacaaccccgtgcgttatccggagagataactcccatttgaattttccttgaaacttacatgcatataaatgtactgtattcgggacccattacac

SEQ ID NO: 208325 - DNA, 405 bp, Glycine max
tctaatgactatggcatcatttctggggctaaactgctgggagttggaggccatcttctcaattaaatttctggcttcaacaggagtcatgtctccaagggctccaccactggcagcatctatcatacttctctccatattactgagtccttcataaaaatattggagaagaagctgttctgaaatctgatggtgggggcaactggcacataatttcttaaatctctcccagtactcatacaggctctctccactgagttgtctaatacctgagatatccttcctgatggctgtggtcctggaagcacggaaatatttttctaagaatactctcttaaggtcatcccagctcgtgatggaccttggagcaaggtaatacagccagtcctttcgcattcctctaat

SEQ ID NO: 208326 - DNA, 332 bp, Glycine max
  unsure (1)..(332): unsure at all n locations
taccttcacaatgtagttagtttaagatctcttataaatgtcaaaagaagaaatgatctcttaatgagctcatttcatattgtatgtgcaagaagaggaaaggttgaagcaaggaaggactganagtgctcatgttgtgagtacctctaaagacaagggcaaaagataaagaactgaggagcccaagaatgaagctgctaagggtctaggacaaaagaaacaaaatcagggtgacaacttgttctgtcgtagtaagctttgacgtgtatagaataaatgtaccaaatatcatgcttaccgtgaaagaaggtatgttcttacttgggctgtcc

SEQ ID NO: 208327 - DNA, 356 bp, Glycine max
  unsure (1)..(356): unsure at all n locations
ctnacctagccaagacatacaagagtgtacaactgaattctacggtttctaatcatcggggccaccaaatctatcatgtgctgacagtaactgaataacccgtgaatcatctccggggctctacacaattcagcgatggcctttgctgaggcaagcaacgcgggagagcctgacttccattcaaggtcaaggcgaacctatccatccacatagacgcttcttgaagcaatgcatcaatcaccctcccttttgcttccttttcggcgtacacttgtgcgaaataatacactagctttgggtcatgggtcacagaccgagttaactcttccttatacagccctatgatagctagcatg

SEQ ID NO: 208328 - DNA, 254 bp, Glycine max
tgggattatatacagcatactccacacaaacagattttgaagacaaaaattgggcaagtttctgcagatcgaatgttatgagctgataggaccattttatctggcttagtgagagaggtcttatacattataccacaattttaaaacaataatcacaggaaatagtaagttataatataaaaagaataattttttcagtaacatctggaaaatttgttttggctagttggaattctgatggcagattgaaaaca

SEQ ID NO: 208329 - DNA, 468 bp, Glycine max
  unsure (1)..(468): unsure at all n locations
cttatagaatattggaaacacgtactatntntactagtttctatagtgngaaacatgtggcctcagaaatttggttggatttttttctggggatgaattttaactaaattttattagttttttcgtatattaatcactccgttggcattgctatgaattttaattttcatttaagagaatatacttaaatataccacttatttcataattttgcaaaataatttcatgacagtactgaagttgattttagaagcacgttgacatgtgtttgttttgacatttcaaatattctttttacagaacaagggtaatacataattcaaaaaatagttaaatcacaaattntgggtggtggctggcaggtgcactgaaattttcacagatctataatagcaataagtaaataaccgaacttgatctgaaaatatatcttaagattggatgaataacttcaagcattatgctctg

SEQ ID NO: 208330 - DNA, 148 bp, Glycine max
tattttgcctctgagtttaaaatattgtagtaaaattttaactaaaattaacaacttaattacgtaaatggctttatgagcagctaatggggcgatgtctcgaaacctctttccaggctgttaaaactattaatatacataagtgctc

SEQ ID NO: 208331 - DNA, 362 bp, Glycine max
cacccaagaaaacctcttagctccttatcggttttggggtccaaatccaaatttctttcctcattcatctatttacaacccattgatctatatccatgactatcttctatgaatgagatattttgagggaagctcaagagattttacctacaaaacattttaaagacatttgttaattatataggtttttgttgttttgtgtttcttttgagttctagtctagggaggatctattgaactcgcaccacagaaacaaaacgtagtgttgaggagataatatctcaccctattccgggaggttccctactaattttgttagttcttattacacagcacatattttctaatgagaaatgagacaa

SEQ ID NO: 208332 - DNA, 357 bp, Glycine max
  unsure (1)..(357): unsure at all n locations
agcttgcttctataatattgtgtcttgttcattgagtacgngaatgttgtgaagatgaatgagacgtgtggtgttgtgatgtgatgttgtgtgacaaagtggtgaaataacgtgagatatgcttaagtaagttgtattttgtttatatgatatttatacctatatgttgtcttgcttctctttattagttaggaatgtgataactcacttcccatgtgttatttgtgtttggatcttgtgatgatctcaaaccttgtattcgggggagcatatgattaggtggatgactatgaagaacctcatgctagaggacatggagtattcctctcatcatcgatgatactcaaggatgacatg

SEQ ID NO: 208333 - DNA, 297 bp, Glycine max
cctattggagcctaaagaaccaatctccatagaagattctcaagccagaatcaatcacttcatcaaccaaggaaacacaagtgtgttaaagaaaaataataattgtgcataattaccaggcctatgccgcccaaattccattaagaagaaaaagaagaaacttaaccaatggcggcctaaacattggcattatcgccttggccttaaacattcttcttctcaccagactcctcttgaacgacaatatcttcctcatcaagcataaccatgttattcacgtccttcaaagggtcaaaa

SEQ ID NO: 208334 - DNA, 461 bp, Glycine max
  unsure (1)..(461): unsure at all n locations
ctgaggctgcagcttaagaaatgaaaactagagccggcgagtttgtattatctctttctttnnccgngnngaaagtgagaacacaaggtggctatttatagagaaaatagttataaccgcctttaatcaattaaattgccaatataattggntatctcgaagaagtaatcgattagattcttgaaattctaatactggggacagatgtcgtacaagatgtcacgacatcgcgcttcaaaacatgcagattatatatgacagtatgaacagattaaacaagttaataacacaagagaattgttacccagttcggtgaacgtcactacatttggggctacagccacggtgaaaatcactagatagtatttttcaaaatctacagcactgataaaacttttactaatactaccatgcactttactaaagcactttaaatgaaacccttacttctttaaactacc

SEQ ID NO: 208335 - DNA, 402 bp, Glycine max
  unsure (1)..(402): unsure at all n locations
atgcaccataaaagagaagttacaatcatactcaacatataactcccttgtgcatgagcagaccatgttgaaaggagtctcttgagtgaagcacgaatggtttagagtctaataggcgacaaatctcatgatgctctctatttgtaggggggcttctcatcagatgctaaatcaaagtagtgagcctttagtctgtaaaaccttctcaaagcttaccaatttagacttatgttgttttcttccctctcaatagcttccagatcatgcttaaagagccttccagggtagactttgatatatatggttggtgaagcttcttcatcttcttctatcaataacagtttcccttggagcaattagcctntctgaacaaaacaagcttgtccactactatcttgaact

SEQ ID NO: 208336 - DNA, 371 bp, Glycine max
  unsure (1)..(371): unsure at all n locations
agcttcttccacatgttcattcttacaaagtttttntataatacaattgtatgtaaacacattaggcaaaaggttgtaccttctcattttatcaagaaccctgaaagctgattgcacatcatctgcatcacaatatgagtgaataaatattgaataagtaaaagcgtctggctcgactctttttgacaacatatcatgaaaaatatttttagcttcatccacacgacctcctttgcaaagagcctgtaacaaattattatatgcaagcaaatccactggacatccttgttcaagcattgcttgaaacaggtcacaggctttctctgaatcaccaatctcaccccatccacttatcaaaatgctgtgagttt

SEQ ID NO: 208337 - DNA, 455 bp, Glycine max
ctataaaactaagctgtcattggcaagcaaataaaacctttcaatgtattattatagcatcaaaaagtgcattgatcatacagatgttgagagcctcaaagaacaccttcattcaaggcaatctgtattacactatatttatcgataacttcaccagaatgtgttggatttttttcttcaagttcaaatcagaggtggctgaaattttttggaagttcaaagtcaaggtagagaatgaaagtggcctcaaaattcatattttgagttcagacaatggcaccgagtacacatctgcaaaatttaatcaattttgtgaggatttcgacatccaacatcaacttactagtccttatatcccacaacaaaatagggttagtgagaggagaaatagacatatcttggagatgacgagatgcatgctatatgagaagaatttgctaaagaaatttttggag

SEQ ID NO: 208338 - DNA, 332 bp, Glycine max
agctgctcataactaacaaagagtattggttttgatttattcattgaaagcccttcaatcatcaaagctcattcccatgatctttcgttaccacttcaacaaccatttagctttcttaaatttggggatacagattgggtcattgctggcacatgcttggaatgtaggactgaatatttcattaatctccattgtttgcactataaaatacctttctaagttaactgctgttgcacgttgacaaaaaaaaatatactacacttcgcaagctaatatatttattgaagacaggaacatatttttggcctttcgccttcttagggataattcaa

SEQ ID NO: 208339 - DNA, 367 bp, Glycine max
  unsure (1)..(367): unsure at all n locations
agcttgctaacccatggaagctcctaatatcttccacactntgtggggngggccattcttggatggccttgattttctcagggtccacttggaccccatttcttccaactacaaaacctaagaaaactatattatctccacaaaaggtacacttctctatatttgcatagagggtgtttttcctaaggactgaaagaacttgcctaagatatcctaagtgatcatctaggctccaactatacactaaaatatcatcaaaataaacaactataaatctacctatgaaatccattaagacatgatgcataagcctcataaaggtgcttagtgcattagtgagcctaaaaggcatcactagtcattcata

SEQ ID NO: 208340 - DNA, 443 bp, Glycine max
  unsure (1)..(443): unsure at all n locations
agcttcttctatatataaccttcatattcaagttttcattgtctcacaatggttgggattttcactctgctctttgttagaagtcttgatcccgttgaagcatttaatgcttacattaatacatgtcccttcttcatgcaaagtccatactaataggttagtgtgtcttggactttagtagggaagtcacttatttcatcattatgttcgcaacaacagagcatgccttttgatgaggatcaacgtcttccacattctggactntatttattcttcataggactttgacatatcctaggagaatgtttctgcatgaaagaatccaagcacaaagtattaaatgaagatcttaaatgcactacttaaatgctataccagatcatcttatgaatgcatcatctaaaaggtcagatgcacgatactaatcatgatctgatagcata

SEQ ID NO: 208341 - DNA, 344 bp, Glycine max
  unsure (1)..(344): unsure at all n locations
tctggacctgtcgcaagggtttgtggtttgtgctcctctgctgaccaccatacagacctttgcccttccatgcagcaacctggagcaattgagcagcctgaagcttatgctgcaaatatttacaatagacctcctcaacctcagcagcgaaatcaaccacagcagagcaattatgacctttccagcaacagatacaaccctggatggaggaatcaccctaacctcagatggtccagccctcagcaacaacaacagcagcctgctccttcctttcnaaatgctgctggcccaagcagaccatacattcctgcaccaatccaacaacagcaacaacctcagaaaca

SEQ ID NO: 208342 - DNA, 437 bp, Glycine max
  unsure (1)..(437): unsure at all n locations
ttacattatcttggatttattattacatagaaacatatgattctgattgatatgtaattacctaataatcagtaattgattgatatgtaaccagtattgattctgatttctccattataaataaagatgagattcaagacacacaacattacaataaaacactgttatagtccccaaaagtgtcaactttttaacaaattcacactaccattttgtcaactagcaaacaatttcatccctagaatgaccaataattngtataaatgaaaactttcataaccaaagcaacacaagatgccactttctgaatcaacttttatagtatcaactaaaatcataacagagcaggaaaaaatatcactgaaggcttataatttatataactccacatagaatatcacaaggaaattagatgccacctagcatatgcacacacg

SEQ ID NO: 208343 - DNA, 296 bp, Glycine max
gctcctgagtatgacagtcaccgctttaggagcgctgtacaccagcagcgcttcgaggccatcaatggatggtcatttcttcgggagcgacgcgtccagctcaaggataacgagtatactgatttccaggaggagatatgttgccggaggtgggcatcactggttacccccatggccaagttcgatccaaaagtagtccttgagttttatgccaatgcttggccaacaaaggagggcgtgcgtgacatgatgtcctgagtgaggggtcagtggatcccgtttgatgcagatgctat

SEQ ID NO: 208344 - DNA, 307 bp, Glycine max
  unsure (1)..(307): unsure at all n locations
agacccanttccgctcccgaatatgacagccaccgtcttaggagtgctgagcaccagcagtgctttgaggccatcaagggatggtcatttctctgggagcgacgcgtccagctcagggacgatgagtataccgacttccaggaggagatagttcgccggcggtgggcatcactggttacccncatggccaagttcgacccagacatagtcctcgaattttatgctaatgcttggcctacagaggagggcgtgtgaaatatgcgatcctgggtgaggggtcaatggatccctgtcgatacggatgctc

SEQ ID NO: 208345 - DNA, 429 bp, Glycine max
  unsure (1)..(429): unsure at all n locations
agctngtaggattatggtgtacccattaatgtgttactagngggcggncgggcgatggngcacaacaagttttccacatccacaaattgcgcataaacccaccatcccctgttgcccacctccaattgagctcacatactcccacgtagcccatatcctcgtttctctcaacaccgggtccccatcaatcctcccaagcttccccaacatccaggtaaaacaacattcaaacagcacaaactatcacagccaagaaaacagggcaaaggcaaaaaactctgcccaacaccaaccaaaatcacaacttttctcacttaaagaccccagtaacaattccttcgttccagttcgttaaccgttggatcgactcgaaacttttactggaagtctctagtgcataagcctacattttgaccgttgggatctact

SEQ ID NO: 208346 - DNA, 412 bp, Glycine max
gagacatcttcttcgaccttggtgattcttgactccatctcattgaagcgcatgtccacttgtaactccaaagtatcaaacctttcaccagcaaaggtttaaagaccatcgaacctgtccaaaatctttgaaagaagagatgaatcttctccatcatgtccttcttcaccaacatgctctttttgataaccaaaggatgcaatgactgaagtgcttattagaaaggatctcttgattggaacatagggttcaaaatcaagagggatgttaaagtgttgaaggaagagggtgactatgtgtggatatggcaatggagcattcaatcgcaatgccttatgcatgagatatctaacaagatgtgcccaatcaattagtaggcctttatgaaaagcccacataacaataagatctt

SEQ ID NO: 208347 - DNA, 450 bp, Glycine max
  unsure (1)..(450): unsure at all n locations
tncatcaagtggtaatcagagcacaagagcttctagttttgctccttaaacctccattaattntttttgctttaccttctcttccattgttgtttcttcattttttctccatgtatctcctcacatgtcttgtgctaaaagttgttaacatgagtctttagagtttccaccaattaaacttgctatagaagctagatttgattttctatggttcaaatttcttgttcttgttcttgaatcatgaattgtgttgagtttaggttcctttgagttttgtcttgttattttttgtggctganacctaaaccataaaattcttacaaaaatattaaagtataagaaaacctcaaaaatctagagtgacttgttcacctattgtagttttgtcatagaaatcatgtctagtcatgaaacttgtcacataagatttcttatgttgtgctgaattta

SEQ ID NO: 208348 - DNA, 388 bp, Glycine max
tattctagaactacaacctaggctcctaattagcatcaaaccagcccatttattacaattataaattgctcttaagcacttaaataaaatgaaatcaaaactaggttgcaggctcatgttggtgcattattaggttgaccttcttttacttagatcaagtgcaccatcatggactctcttctcccattatatggttgaccatgtaatgtgttgacaacttttaaattacccttcagtctctttactcttgctctgagggatccttcttcttacatatttcatttcttcttagggttcttccttaacctctatcatgtttaggcacgtcaatagtgactaaagctacaactcttcaacactatggtaagaccccaccatgtaatcccaa

SEQ ID NO: 208349 - DNA, 287 bp, Glycine max
ttatttgtggttctatcctggaaaaaaacaccttaagtctattattggagaatccttacctggtaataatgcacaatgagccaaaaatcatttacgtggatttattaatgtgacatattataaaagcttaccacccacaatttgagatttttttattaacatggcgtatcttaatttggataaaaaaacacataaaatgatacagtagttttaatctatttatgaatctgaccgttaaaatatattttaaaaaatatggaaccaccctatggacttttacaaaatca

SEQ ID NO: 208350 - DNA, 328 bp, Glycine max
  unsure (1)..(328): unsure at all n locations
gcttcctcaatcacctcattaagaactagtattccattcatgatgtgtctgntttttatgaaagctgtctgcctctcatcaataaaaccaaatatcacttgtctcaatctatttgctaataacttagctatcaccttgtacatacatccaatcaaggagaatggtttgtagtcatcaaatgactgggggtgtttggttttgggaattagagctatgaaagaagcattactgcctctagggaagctgccatgcacatggaattcatctacaaattttctgaagtcagttttcatcatttccccaaattcttttaatgaattgaagttga

SEQ ID NO: 208351 - DNA, 483 bp, Glycine max
  unsure (1)..(483): unsure at all n locations
tcttttctctaccacttgtcatccacaaactgatgggcattcagaggtagtgaataggtctttatccactctnttaagggctcttctaaaaggcaaccataagtcttgggatgagtatcttcctcatgttgaatttgcctacaataggggggttcatagaaccaccaagcaatccccttttgaggttgtctatgggttcaatcccttaacacccttagacctcattcccctcccacttgacacttcttttatacataaagaaggggaatctaggtcagagtttgtaaagaagttgcatgagagggttaagacccaaatagagaaccaaacaaaggtgtattcaactaagggcaatagaggaagaaaggagctagttcttaatgagggggactgggtttggctccatcttangaaggaaagattccctactaaaaggaaatccaagcttagcccaagaggggatggaccttttcaagtcttgga

SEQ ID NO: 208352 - DNA, 406 bp, Glycine max
gtcacctgcggcatgcaagcttctcagatccggtcatggaaagacttgttaactgttttcattaggcagtaccagtacaacacggacatggctcctgatcggaaccaacttcagagcatgaccaagtgggaacatgagtccattaaagaatatgctcaaaggtggagagacctagcagcccaagtcgtcccacctatgactgaaagggaaatgatcacaattatggtaaatacgttgcctacgttctactatgagaagctgatagaatatatgccagctaactctacagacctcatcttcgccggagaaagaattgagtccggacggaggaaaggcaagtttgaatatgcctccaacgctgtccccaacaacaatagaagagccccagcggtgggcacacggaaaa

SEQ ID NO: 208353 - DNA, 502 bp, Glycine max
  unsure (1)..(502): unsure at all n locations
tgacctatgaaactcagcttgaggaatatggngtacccatcacatgtggtactaggtgtcgttctggcgatggngcacaacacgttnttccacatccacaatgcgcgcataaacccaccatcccctgttgcccacctccaactgagctcacgtactcccacgtagcccatatcctcgtttctctcaacaccgggtccccatcaatcctcccaagcttccacaatatccaagcaaaacaacattcacacagcacaagctatcacagccaagcaaaacagagcaaaggcagaaaactctgccaaaacaccaaccaaaaatcacagcttttcccactcaaagaccccagtaacaattccttcgatccaattcgtaaaccgttggatcgactccaaaagtttactggaagtctatagtgcataagcctacattntgaccgctgggatctactagcaaacatccagaactcattctacattactctttccacaaccagcaaatacat

SEQ ID NO: 208354 - DNA, 393 bp, Glycine max
  unsure (1)..(393): unsure at all n locations
agcttgggttaaaactctctattattggcctatgtntgttaatcagacgaaactgacaacaaaggtgcgttgaggtttatttttatttttacctttcatttntttcattcgttcccgtttggtattaggatttgggcttcgatttcgccagtaggatgggtaagggattttcaggttgcctttttgtgtgttcctctttgatgttgggtgttgggctttgattttgtcagtagggtgggttagggtttctaacgttgggcattagtttttgcgttctgtttgtagggttttatgttgtactctatttgtctgtgatgtanttagaaatatgttcttgggttctaaggttgggtttgagctcttgatttttggaaagttgcgcctgagattctg

SEQ ID NO: 208355 - DNA, 330 bp, Glycine max
  unsure (1)..(330): unsure at all n locations
aagcttgagctgaccgctaaacgaggcgtcatgccggacttgtcttgttgtctttctagangcaacagccctccaaatttttgcatccatttttgcgtcaatttacctccaaaacacttgcaatttccctccttgtgaatcctgttggtcaagaattaaaatgatatcaaaatcctcattattctcttaaaaataaatagtaaagtagaggaaatctagtcattcttgcttgatttgactatcaattaaacctaaatatcacaggtatcatgatgaacttagagattcttatgagctatatactcgagatggaagtgacgatgaaagtaa

SEQ ID NO: 208356 - DNA, 475 bp, Glycine max
  unsure (1)..(475): unsure at all n locations
agcttaaccaaagcccactacttaccttcttatttattttagttnaatcaataattntaaagttgggtcttgattacgcagaanaagagagcatttaattcatgtacccaagagtaatatatatattttcgatgaaaacattntttttaaggagtcatgaaaacatttcaaagcaacaaataaggtaatgtttatttttatttttggagcaagtgatttcttatgagttattacctttttatatctggatatcttttgatgttttagcttactactttcgcggttttaaaataagtgttgttgaaagttgtttatatatataaagaaaaattgataaataaatgaaagtgaataataattntataaaactaaccttaatattaatattatattaaaaaactaaagtgtcacttattntgaagtattagtgagaaaaaataatgttacatttgaaagtcaaatacaacacttataa

SEQ ID NO: 208357 - DNA, 483 bp, Glycine max
  unsure (1)..(483): unsure at all n locations
agcttggtntgggcaatagcaccccacctgttttctctaaggtctcctgacccccgcgacatatctccaggtaccactctgtggtcaacaaacaaaagtaggaagactgattcttccacgcttcctcatatcaagcttattggattatggggcacccatcatatgtggtactaggtggcgatcgggcgatggcgcaaatcaactatcccatttccacaagtcaggcataagcacaccatccccagttgcccaccttcaaattgagctcacgcactcccacgtagcccttatcctcgttccactcagcaccgggtccccatcaacccctcctagctttcacaatatccaaacacttcaatttcatttgtcatgaaactacactaaaccaagaaaacagagtagaggcagaaaactctgcccaaaactcattcaaattccacacngttttttctactcacatgccccagnacatttctcttcgtc

SEQ ID NO: 208358 - DNA, 410 bp, Glycine max
  unsure (1)..(410): unsure at all n locations
gcttagaccanagcgactcaaaatctaagcatctaaaacatctttattattattttatnttcaaggatagagaagcgaaaatgagaatggggtgaattaggagcaaactctcaccttacacaagattataaccttaatctaaacttgctcgaactggatttacgcctaaaattccaccaaatcaaaatttgactcctcagacacccagatgttaccctagacatggctcttgccttcactttgggtctttagattttctctgttgcacagcccaagctttctcataagacctaaatgacatttcaaactaggactaactcactgtaacctccaatttctactgaatccagattatgcgttcaaaccctcaaagcatcacactatttccactcataacactacattctcac

SEQ ID NO: 208359 - DNA, 352 bp, Glycine max
  unsure (1)..(352): unsure at all n locations
gcttttagtttagctgatgaatatgaattgtggctacttcatgcactcctctaatgacaatagcatcatttctggcactaaactattgggagttggaagccatcttctcaattaaattcctggcttcagcaggggccatgtctccaagggctccaccactggcagcatctatcatacttctctccatgttactgagtccttcataaaaatattggagaagaagctactcagaaatctggtggtgagggcaactggcacatagttntttaaatctctcccagtattcatataggctctctccactgagttgcctaatgcctgaaatatcctttcgaatggtcgcggtcctgga

SEQ ID NO: 208360 - DNA, 465 bp, Glycine max
gcgcgacactataaaacgcaagcttgaaggacgcttcaatggacgaaaagaaagaggttcttgttgagagaggggggagcacgaaattgaacgaattgaagtgggagagaagtggaactttgaagtatgtctcacaagactctcattgatcaaagttacaacaagtgttacacatgcttctatttatagactaggtagcttccttgagaagctgtgttgagacaacttccttgagaagcttctttgagaaaacttccttgagaagctagagcttagctacacacacccctctcataactaagctcacctccttgagaagctctcttaagaagactcctaaagaagctagagcttagctacacatacctctctaatagctgagctcacctccttgagatgagaagctagaacttagctacacaccctctataatagctaagctcaccctcatgacaaaagaacatg

SEQ ID NO: 208361 - DNA, 234 bp, Glycine max
gagaagaagtaggtgatgaagatactagttgcaggatcatttatcccatttcagatagcacttgggtttcacctgtccaagtggtccctaagaagtcgagcaccaccgttgtgaagaaccaggataatgagttgatcccgaatagagtggccaatagttgataagtttgaattgattataggagacttaactaggaaaattggaaggaccacttccctctcccattcattgatc

SEQ ID NO: 208362 - DNA, 455 bp, Glycine max
  unsure (1)..(455): unsure at all n locations
tggaaggtagtcatacctcacacagtatatatatgtatgattgggtagcgaagatacctaagatatgcatgtatgtaaacaaaaatacttcacaaaatatatatatatatgtatgtttagatatgcatgcatgtaggaaaaatacttcacaaaatatatatatgtatgtttaggtagcaagatacctcggatatgcatgtatatagcaaaaatatctcacaaaacatatatatgtatgtttaggtagcaagatacattggacacgcatgtatatagcaaaataactcacaaaaatatacgtatgtttaggtagcaaattacctcatgaaaaataagagcaaaaagagagtgagcaagaaaggaataagaaggaagaatagaaaagtcgtctagctaaaaaacaacatgcttgtgagagagataattccaactnttcttgaaagatttactgatct

SEQ ID NO: 208363 - DNA, 399 bp, Glycine max
  unsure (1)..(399): unsure at all n locations
ggaatccctcttgtgagggagaaattctttataatcacatatccatcttctgtaaagtccaacagtggctggcttaagaaaaatctagtggtgtgtacttggtctagttgaggttagggttgaagtctagtggagaattgacaagttgttaaaacccaatggtttgttggtctagttgtgtatttgttgtatcaatgaaatctcatctgtatgggtgaggactaggcataacccacgttgggctaaactagtataaaaatgtctatgcattctttcctcttctctttctttactctaccttgcatagatcaagaattggttatgatcaaatcattaaatatgntatctttccattacaacaccaaaactaaactttggtttactaagttcttttaaagc

SEQ ID NO: 208364 - DNA, 191 bp, Glycine max
acagccctcagatgaggcataacctatagtggaagatgcggacacacacatgcatagggaccaaagccaagattgccggtgccatttgccctaatttatatgaccttcgacaaaacaatttgaaagcccacatgctattattgtgacgagaaatcaagcttccctctgttttaatctagcatgcccacaga

SEQ ID NO: 208365 - DNA, 428 bp, Glycine max
  unsure (1)..(428): unsure at all n locations
atccttaagncacctgcggcatgcaagcttgtctcagcggttatgcgagacttagatcaacatgttagctatcatcgccaagtaccaagaagagttaggtctagccacggcccacgagcatagaatcgcggatgagtatgcccaagtatacgcggaaaaagaggctagaggaagggtgatcgactctttacaccaagaggcaaccatgtggatggatcggtttgctcttaccttgaacgggagtcaagaacttccccgattgttagccaaggccaaggcgatggcagacacctactccgcccccgaagagattcatgggcttctcggctattgtcagcatatgatagacttaatggcccacataattagaaatcgttaggaaacttgtatggtctcttagaccttgactagatacgacttcctttttg

SEQ ID NO: 208366 - DNA, 461 bp, Glycine max
  unsure (1)..(461): unsure at all n locations
gttatacaacattcaaacagcacttattattatagnccagcanaacagggcaaaggccgaaaactctgcccaaaacaccaaccaaaatcacagcttttctcacttaaagaccccagtaacaattccttcgttccaattcgttaaccgctggatcgactcgaaaattttactggaagtctatagtacttaagcctacattgtgaccgttgggatctactagcataaatccagaactcattctgtactactctttccacagcccaccacacacaagcatttttctgcacaaagccaatattctgctgcacctatttgacaacaaaattctgcataagtgcagaattcgaacatcacactttctctcatccaatcttgcgcaaatcatatcctacaagtcccaaatcatgtatcaatcatgtctaaaccanagtcatgctttaaagcacaacaacacagaatct

SEQ ID NO: 208367 - DNA, 427 bp, Glycine max
acacataaaactcagctgccattgcttatttagaattaccgcgagcttatttatattctctatgaaaaataaagtaaacaaaaaaaataaccacaattaacagagggtatgaataagatatgcatatttttcaatggatcctaacaatgcacaaaaatgagagagatagaaaatggaaaaatgatctcaaggtaacaaacaattcatgagcacttgatcacaaaatgcaaagtggataagtagttaagtcaaaattaagaatgctccatggtgatagaaattttcaaacaacactcaaccctgtcaaatgtgtatgggtttgtgtttacacttaaacaccacatgtaatgatgtaagctccatttgagcttgtaggcctaggatcttcttcatcaatggattcatctactttcttgaaaggtgaatg

SEQ ID NO: 208368 - DNA, 144 bp, Glycine max
aaccctactacttttcgccatagcattaataattgaaacagttacgcataaaatgccacccattgcatatagaattaaatcaggcagatggaaagaacggttctgcgccttggaatatggcccagagccaggacaggatttttc

SEQ ID NO: 208369 - DNA, 234 bp, Glycine max
cgaccagaggggaaccctataccgcgagcaggggacatccaccctcactgccaagacacaacgtaacaaccacaaagcgcgacacacgcgaaaaatgaagcgcagaatgcaaccgaagagggaaaaagagaagaactctgagacacccaccaaagaaccaatcgacaaaccctcgtgggtgatgcacaaccaaaccaaacagcgcacaaagagagagagggaaaccctcggaag

SEQ ID NO: 208370 - DNA, 407 bp, Glycine max
  unsure (1)..(407): unsure at all n locations
cangctttagagcacagcatcacagtttctatgtgttcaacacccctccattcaatggcttttctaggtttgaaaggtgaaatttagaatgaggtaaattcaaagcaaactctcacctcacacaagcccataacctcaagctaaacttgctcaaactgaatttacacctaaaattccaccgaaatcaaaattgacccctcaacacccaattttgccctagaaatggctctttattcactctgatcatttngttttctctctagcacagaccaagctttctcccaagtcctaaatgacatttcaagctaatattaactcactttaacctccatttaccacagaattcagacttagccttccaactctcaaagcctcactctttttccactcataacatcacattctca

SEQ ID NO: 208371 - DNA, 354 bp, Glycine max
tgagagaccatacaagtttcctaacgatttctaattatgtgggccattaagtctatcatatgctgacaatagccgagaagtccgtggatctccttgggggcggagtatgtgtccgccattgctttggccttggctagcaatcggggaagttcttgactcttgttcaaagtaagagcaaatcggtccgtccacattgttgcctcttggtgcaatgaatcaattaccctttcccttgcttgcctttctgctgatatcttggcgtactcattctctagcctttgctcgtgagtcgccgctagagttagcttctcttcgcacttatcgatgatgcgccacatacttcccttcagtctc

SEQ ID NO: 208372 - DNA, 375 bp, Glycine max
  unsure (1)..(375): unsure at all n locations
agctnggctactggagagaatgtataaaagaattctatcccaacttgttgagtatatcctttggcaatcaatcgagctttgtatctatctatagagccatccattttgtatttcaccttatacactcatctacatccaatatagtgcttatcaggtggtaatggaacaagtgtccaaatggaatatgcttcaagagcttggatttcctcattcattgctcgacgccattcaggataagaagcaacttgatgataaaattgagattcatagacaactgaaatgtgattaatgaaagctctgaaagggggctaagaggcaacaaggagcaataatgttggatgggatatgcagcctgagattgtgaaatgacataat

SEQ ID NO: 208373 - DNA, 444 bp, Glycine max
  unsure (1)..(444): unsure at all n locations
ttacgtttgagatgtcaatcctagtgtgaggaaagtnngttatatattttgactaattatataaccaaaaaagaatatataagtgggagataatctgcatcttacaagttagtttgtatggttgagttaagcttaaagtcacattgtaagatggtatcaaagcctattatagatccattaatgggtcacttatattattcacacatcaagtccaaaaagattatcgaactgctatgagactattgttggaccacttgcagatgttcaatctaacaaactttatgctaaagatgttcagtcctcaacactcaaactcacattctaagagctagatctaaatcttttaaaaatgttacannaactaaattggaagttgttagaaggaaatngaaaccttggtgacanagggataaataactttatatgaccaaaagaatctaaacg

SEQ ID NO: 208374 - DNA, 386 bp, Glycine max
  unsure (1)..(386): unsure at all n locations
agcttcttggatgtgactntgagatgtgcattaagttgtagcttcaaagagagtggcagacgcactctcaaggcagattaaggaaaaggcattgcagttagttntgaggcactattggcaagatatgtgagtcattgaagaggaaaggagggttgatcctgcattatcaaaaatcatggaggaattgaaaaaggatcctaattcccaccccaatacaccctgnaacatgaaaggctccattataagggacgattgctgttggcagcatcgtcaacctgtataggagtatatttactcgatagactgtttttcccttcttaagcttctacgtatagaattaacttcagtctattgtattgcttgtagtaactgactagagtcagttg

SEQ ID NO: 208375 - DNA, 484 bp, Glycine max
  unsure (1)..(484): unsure at all n locations
tactcagcttgatgtccccttctctttcaccattggttataaccatanctatgttcctcaatttaattttaagagcaactcccccccatccaccctgcacatctgagatccaagcctctttaatcatagaatggtaccctttatgtttaagccaccagtccaccaccctaaaaggcttagggccccaatccaccatctttgtggtcaagatgattgggcaatgatccgaataatctctttgaagaacatgttgagaagtatcaggccacaaggatagccattgatcagacaccaggaatctgtctagtctgctcttggcactgccattgtgcctaaaccaagtgaaattgttcccaaaacatcttatgtcctggagctccatctcagatatccagtcattgaagtccgaggtatctgaagtagcaacagacctctgtgatatgctaatatctctcccctggttcttatactattgaaatcccct

SEQ ID NO: 208376 - DNA, 367 bp, Glycine max
  unsure (1)..(367): unsure at all n locations
agcttncttntaatgcgtcacatctaanaccttgtttattggtagtatgagctttccacggtagttggaggaaggtgatgggggaaattgacatccccattcagataggcccccacacttgcaatgtggttttccaagtgatggacataaatcctgcctacaactgccttttggggagaccatggatccacgcgctaggagtggtcccctcgacgcttcaccataaactaaaattcacagttggtgggctcttggtgatagtgtcaggcgaagaggatatgttggtaagctgcccctcctcggcaccatatgtagaggcagcggaagaatcattggaaacagctttccaatccttcgaggtagtaag

SEQ ID NO: 208377 - DNA, 455 bp, Glycine max
  unsure (1)..(455): unsure at all n locations
tggttatgtgttgattgtaactntggtttcacttattatttttatattattaaaagatgatgcgcaaagtaaatgattgattgaaactttattttacattgataaatcgaggttacgacataaacgatcggttgaaactttattttacaatgattaagtgagattacgatacaaacgatcggttgaaactgtattttacaatgattaagtgagattatgatacaaacgatcgggtgaaaatttatgttacagtgataaggtgagattatgacacaaacgatcggttgaaatcgctttacacaaagaaatgagatcactgatggtagaagaatgagatgaaaatgtgaaaagcaacaagagggacctctaagggtgcatataatgaattcaaagcttcaaaatagaaactattctgtcgacgattaagaacgaacaaagaacggtgaataacagtg

SEQ ID NO: 208378 - DNA, 369 bp, Glycine max
agcttatctctagacacaacataccagatgcttgtattaatgacaggagattccatgcaacctcctttccaggagagcactgccatgcctgcttaagtaaaacaagaaaacacaattgaaaggttaagaagcaaattcacaatcctactgccaattgaatggaaataaacttaagtgattatcaaaattgtgatgaaattgaagcatagctccacaattcacaattcaatatatatctgctcaaaagtgaagtcaatgttgaaacttttcttgcatccctatgatctcatatgcgtattactcaaaccccacctctacttggcacagtttgtagcatcttccgaagcaatggccaaaaaataaattaaa

SEQ ID NO: 208379 - DNA, 341 bp, Glycine max
  unsure (1)..(341): unsure at all n locations
agcttcatgatgatgaatcaagttgagtcatgtgtgtttgatgatttctaaaatnatgaccaaaagccaaagagaatgatttcaagattgagtcaacaagttcaagatcaagattaatttcaagtgtcatgagaagaaacctagaagattcaagaatcaagagaagtttgatttccagattcccgagaagatgaattctagattcaagagaagaaatcaagaatacttcacaagggaggtatggaaaatatttttcaaaaaacaaacatagcacagtgttggtgttcaaaagagtttttttttcaaaatttttagttaccagagttttactctttgatatc

SEQ ID NO: 208380 - DNA, 382 bp, Glycine max
  unsure (1)..(382): unsure at all n locations
actaagctgataagtattggaaatgaaattaaccaattttattttttttgtggagggagaacacatctagagatcaggatttcaaagcatcttgcattccatgacaatggcattcagaaattgcattaagatagcaggatctgagtggtttggtttgtgaaatatattttctgttttactactagtacaaaaaaaccatcctgtcncactgtatttcttagtcaaattttgacagtaatgagaaaacactatcttgatgattttgtattatgaaaagaaacataaacatttccaaccanagccctttaaactgcatgaaaacctactggaacgcttttacatctgaattatttgttgacaagatttgattgagaaatgatat

SEQ ID NO: 208381 - DNA, 384 bp, Glycine max
agcttctacattcaatgtcgagctgttttaatattacgggactcaatcggacatcgcgagaaaaagttattgtaggttgaaattgctcacggcttcggaattccatttcgagcgtctcgatatattacgggactcaatcggacatccgagtaaaaagttattgttgtttgaatttgctcagagcttcggtattccatttcgagcatctcgatatattacgggactcaatcagacatccgagtaaaaagttattgtagtttggaattgctcagggctttcggattccatttcgagcgtctcgatgtattacgggactcaacagacatccgagtaaaaagttattgtcgtttgaattgctcagagcttttcattcaatttcagctt

SEQ ID NO: 208382 - DNA, 240 bp, Glycine max
attgaataccgaacgctgagcaattcaaacgacaataactttttactcggaggtctgatggagtcccgcaatatatcaaaaagctcgaaggtgaagtgcaaagctcacaacaatatcaaacgacaataactttttactcggatgtctgatggagtcccgaaatatatcgagatgctcgaaatggaataccgaacttctgagcacattcaaacaataataactttttactcggatggccga

SEQ ID NO: 208383 - DNA, 481 bp, Glycine max
agcttatcttaacgcagaaagggcgttctatcccctctgattaagaccaaactcatgtaatccatttatgcacacacatatgtgtagaaaaatatcctactacttatgtcaacatacaagaacatctaacatattctaatttccatacacctatatacattctgaaaaagaaaacacactttcctgctcaaagtgttgcgtcaaactttacacctaatttatatcctaaacatttgctatcacaaactacctacatacatttgaagtacaacatacaaatttttattggttcactcatatttatttatatgcatattggaaagctaaataaatcctgcacacatttgcattcaaaagggcattccatgctatcatacattcatttaggaaaaccattattcatacttggcgaggaatttatgccccctatattacacatatatctacacaccattgaaaagcatttctccacttacttaag

SEQ ID NO: 208384 - DNA, 445 bp, Glycine max
  unsure (1)..(445): unsure at all n locations
actcaagctttaattatttacgaaaatngatgnacttttgtttttgatttatttttctcatgggtgtcgcaacgtccgattatttgccatgggttgnttttatttatggctttgttcctcttcttgggctgacgtccactcgtatatatattcatatgtgatctgcatgtttttcaattttttttcaaacttttccaaccaaaagaaatgttgaacctctgtcagactcttgtcttgctttntgattttgttggagcacatttttatttaattggtggttccagtccaccgggagtttctctcaattcccttcgtttgatccttctatcatttcattcatcaacttctgttgattcatataagattttgtccgtttcatccttgtatcatttgattcaacaacttctcttgattatataaattttgtcccttttatatgggtcta

SEQ ID NO: 208385 - DNA, 215 bp, Glycine max
cgatccctacgctcttgaccttgactagatagaacctccttttaagggaaggtatttgacttgatcccatgtattactaaagcgaacaaatattggtgcgaatcataaatccgacatctatcatgggtggaatggatgaatgcatgaagaaatgcatatgacacagatgcaatttatgaatacgggagcctgggaaatttgctccttcttagata

SEQ ID NO: 208386 - DNA, 187 bp, Glycine max
cgatcatagaggagacgctcctttcaggagatgatgagtctacaaggagctcaccaccatataatgccgtggatcagagcttggaggaataaggagatgaatgaacggagaggaacataacatcttattatttgtgctctctgagagctctggactctgaagctgatgttcaagagaccctcgtggc

SEQ ID NO: 208387 - DNA, 255 bp, Glycine max
  unsure (1)..(255): unsure at all n locations
tctctcgtcttgaatggaattgccatgacaggcttgttgntactgacctcgatatttggtagctgatattgtgttgtgggaggtaattccgactggattaactcaccatccttcacttgccaatttgatatgacattagatgatggattacctatgatgacttgcttccaaggcgaggctatatcctttctgatggcataagcatgacaccaatcaaagaaaaggacattaattttgactctttccacaaatacg

SEQ ID NO: 208388 - DNA, 429 bp, Glycine max
  unsure (1)..(429): unsure at all n locations
ttaagagaaaccattaanactaaggagntcctaaacattatttttgagaagcctcgcgagtgccccatagaaaacctttaccaaaccttcaaagtagtgataagctaaacgaataattagggaacttagaaaaactaaatcctcaattgaaggcgtaggtgacaatcatagcgaattactaaacaagattagtaggttgcttaaggtcattccagatactcaccaagcttcggaaaatacttccaaaatggtaacaagaagcacctccaaattaattaatgttattaatgaagatagtgaccaaaacttagataacacaactgagataggatcagtgtctaaaaagaatataaatccattaaactccatacactggacaacccgctccagatatattatcaacgtccaactgcccctgaccttctatta

SEQ ID NO: 208389 - DNA, 380 bp, Glycine max
  unsure (1)..(380): unsure at all n locations
ttatctncttatatncattatgtgctcatgctcgtgctcatcatgtagtcgnaactaaatacgaataataaccaaatacgataaaacgcacgtgcatgatggaaggagaggcaccgacagagacaggcacagaaggcaagttcagttagggttcacaaatgaggttgaggttgaggttcacaaaaggccgcagggtgattttgggattttgcaacaattttaaaantaaaggaggtgcaggatgtactttgtcaggtgaagcaagcaactgcccttttcactgtcttcttgaaatctgggctttctgttccctaaacacgtatttatcagcacaaaaaagtatgggaactttcttgatacactaatcattttttcaatac

SEQ ID NO: 208390 - DNA, 400 bp, Glycine max
  unsure (1)..(400): unsure at all n locations
tggtattatattactcctccactgcttattttctggatatgttcatgttanataatccctattaaatattttaatccccagcatatgaacacggaagattccagccaaaagatataattgaacacagggaataccaccttttttttttttttggtctagaagaataccacctgtttaagagaagatgcatctacaagttattggtggttttttcttcttcttatgatagcatagaagaatattattgtgaaaattcagaagttaatttgtcgtatcacatgaaagtttgaggacacaatttctgcccaaaacataagctcccatcactatctacttcatcaacagactacatatatgtgatatgattctaaaaacaaaacacttataaacagccagttca

SEQ ID NO: 208391 - DNA, 398 bp, Glycine max
  unsure (1)..(398): unsure at all n locations
cttcaagaacgaagaattctttttgcggcttttagatgaggagaggtaggagcctccgtaaagctacacacaactcccaccgcatatagaatatcgggccttgtattgattagataccttaaactcctcacaagaatcttgaagatcgtggagtctaccttctctccttcatcaaactttgataacttcaagccaccttccataggtgtgttcacgggattgcaatcaagcatattaaatntcttcaacacttcttttgtgtagcttccttgtgagacaaagataccattctccgtttgcttacttccattcccaagtaatatgacatgagtcccatatctgtcatatcacattcatgagatatggactcctcgaagtcttcaaacaaaattggggta

SEQ ID NO: 208392 - DNA, 339 bp, Glycine max
agcaataggatgaaacatatctatcgagaaatcagtgctactattaaacataatcctgatcgagaattaagataaaaatagtttccatcttacattaaaattgtcagctctatctcattgcttataggaattcctccgaaggaataagaaaaaatatctgttcaagttttaaaaggacaatatccaaggattaatcactttgaaaataatagagaacccattaaatgaagtgcgctggatttgagaaactcaatcaactacctgaatctacttgacactaaactatgcgtacatgatcacctgaagagaacctgtttttttcgagcattaaagagatta

SEQ ID NO: 208393 - DNA, 448 bp, Glycine max
  unsure (1)..(448): unsure at all n locations
ctataaaactcagctgatcaatgctgcctgaccactcttcatattgtttatctattgcaccgggagcntcatcaagcaagaggacctctggatcccttagtaaggctcttgctatggcaatgcgctgcttctgcccaccagacagttgaaatccaaactgccctacctaggaaatccattgtggtttgcaataacaaagctttaatcaaagcagattacataacaaaaaattgattaaaagtttgctctctacatctcacattgttttttattctagcacatgaaaaaaaattatattgtggtccttacatgacaaaaatgcttgtataatagtacttgtcgtttattgaaggtatgatggtgcatgattttgctcagttttccactaagataacatggggatacatggngaatatatttagttcactctgcacagtctgacactcta

SEQ ID NO: 208394 - DNA, 401 bp, Glycine max
agcttaagctccttcaactgcacaaggctcttaatatttaaagagtatccttggggaaccttcacccaacgaagacactgaaagaaaaacttatcttctcctttttggaaaaagtatgacaagctgtgggcaagtaaattatcttcccattagaccttggatgcaactgggatcgtgtccccatctcagctatatctagacgggtattcaagccatccttcgtcttgccttgaatgtaaggagtgtcccaatgacattgtcgcatacatttcttctcatatgcataacatccagacaatgtctaatgtctagatcagaccagttcggaagaacaaagaaaatggaccttcttttccgtatgtggcgcaaccttcccttcggcggaagggtgacacatgact

SEQ ID NO: 208395 - DNA, 69 bp, Glycine max
tgatggtgtcaagaagaaatcacatgtctgtcatcattttatatggggagaatgtgaatgtatgtatac

SEQ ID NO: 208396 - DNA, 312 bp, Glycine max
agcttacaagaacagaaggtctttatctcagaattccttttgctcataaatgccagacatgaaaatgtgatcatgctgttgggttcgtgtatacgattaagtcaattgctaattgtatacgagaaggcatgcaacggttcacttgaccagtacttatcaagtaaggataaacatgtgaaatgttaaatttagaacaagttattttaaatgagctttgagtactatgtacaaggacatagctaaagtatgtaatataacacaggaaatttctgaatcatgcagggcaaagtgctacatcattgacttggggag

SEQ ID NO: 208397 - DNA, 468 bp, Glycine max
  unsure (1)..(468): unsure at all n locations
tgattagaggtggagcactcttcggccgcacttcatctttcttctgagaaaccccattagactcaccacaaaagtacttagagtaaacacttaagtaagcaagggtttcagcagcctcataagccccaatacactttcttcctctcacatcagtcttaagccaactggggcaagtaacagttgaaagatcaatagccctattacccccaccatcacaaacagcttcaacaccaacacattcatcataatcatcacgatccccttccatggttttctccatagaatcagaattatgggaagaaaaagagaaagaagaagagagagaagaagaagacgaagagttcttattgggaaaatgagtgggaggagacacaccnctccatgacctctcanggtgagatcgcatgtgaccaaacaaagcattctttgtgggaattcttcttgaaatgcacaaagcgtttcatcata

SEQ ID NO: 208398 - DNA, 462 bp, Glycine max
  unsure (1)..(462): unsure at all n locations
agcttctacttcaatgcactgcagctataaattatccttaacgcaagcaagggcattgccataccttctccaaagaggcaagacgatcaacagtcaaagcatcagcctgaacagctccacagtccaaaagcacctgttttacacaaatggataaacatgtgcttttaaagcagcctctttaaagcattgtactcatagccatatacacactgaagtacagctccaaggggtacaaattctcacatacagatcattggatcattgtgatcccaattgcgacaaacagttgccagctgtcgcaattgagatcatgtcgtgacactgttaaaaaagcaatttcactgaaaatcttaatcaccaggactaagttcaacatttttttattgcacatgacaaagctgcactttttcattanaagcatgaagcttttcacaagctattatttctttcttaataatcata

SEQ ID NO: 208399 - DNA, 395 bp, Glycine max
  unsure (1)..(395): unsure at all n locations
agctntgaaggtgcgtagcccaccatcttttttatttataataccgataatgtgtctaccatcacgattatcgtctccttttccatcattgggggtaccacttgggctgctagatccctccacctttgggcgtattctttgaaagatttgtgcccccttttttggcacatgttctgtagttgcatcctatccaaagccattatactgacactgcctaatgaaggcaaccattangtccttccaagcatggactcgggaaggttccaagttagtgtaccaggtaacagctaccacagtaagactttcttggaggaatgtataacaattcctcatttttacgtatgccccatcttccgaaatacatctttagatggtcttagggaaggagtcccttg

SEQ ID NO: 208400 - DNA, 392 bp, Glycine max
agcttattgttattgtgctaagcacaatagcttattattaaagcattatagccaagctccaattaagcttattgttgattccaaacttgtactcaatttgattcagtcacatcaactgtagtgcttaattattacatctttatatggagaaaagttgaatttaaatttgaacttcatatatcatatatgcatgtagcggccaaaagtgtcaaaggtaattaagcttgcttggatttatgtgccttttggttcgacgggtaataatattaagatacttagattaatttgaattaatcataaataattccaaagaagcattttcttaagggaggatgctaaatatgttggtttatgtttgaatgcagaaatatagatctaataggaaacatttg

SEQ ID NO: 208401 - DNA, 481 bp, Glycine max
  unsure (1)..(481): unsure at all n locations
tataatcccagaaacagangaagcaccagcaatatatgtttttagagaacaagggaccaagagaagagtggtgaagccagtgtaccttgatgattacgtctaaggggcagaattagaagaatgaattagtagaatcagcaccaaatcctgcttgtggtgtttgcttcttcataggcagacatgcataacaaaatctgttattaaaatattccttttggataaacatgacacaaatctgttattagaattcctctatatataaccatgttaataaacaagcaagatataagagatagaatttccttcttaccttgagtttatattcttcttcttcctctntggtctggaggtgctgaccctcgaagtcagtaaacaaactcagagcacctaacattnggtgctttcattgagagcccatggctgcctttcatggctgccataccaacctncactaccacaacccacaccactcgctatatgg

SEQ ID NO: 208402 - DNA, 105 bp, Glycine max
  unsure (1)..(105): unsure at all n locations
ggatcctcaagcgacctgcggctgcagctanaaagaggaggggaggctggagcttctgatgttactaactgcataacgcagaaagtttaggggagggaatgaaga

SEQ ID NO: 208403 - DNA, 291 bp, Glycine max
ccacacaaacacgggacgcacggagggggggggattctttaaccacgcccctgaaaaacatttataaaatgactcaccactacttaataaacaggtatctcttaatatatccattaataccattattttagagaagggcaaaaacatggcttgcaaataggaaacaaaggctcgatttacaatagaaagaagtagattttaggtcacagcacccaagagaccacaataggcggcatgaatgaccaattgtacaaacactgaactaactaaataaactggactaccagcagc

SEQ ID NO: 208404 - DNA, 367 bp, Glycine max
agaatcaagccaaggctattgtgcaagcaatcaatggggcagaacacaccaaaagattatgaggatggatggctcacatgctcacaaaggtaaacttatcactttcaaattgagctttccaaactatcatgacatgtggaggaaaaacaatgatttcaagtcacaaaatgtccagagactattatttttagaataactacccattacttgaacatatcctataattcaaagacaaacatgcaaatttaacacaacaaaactagcataattaaactagaacccgacaaaactcacaatattaaactaattgaacacaactaacagcaccaataccagagaatacatttccctcatacttaaacaacac

SEQ ID NO: 208405 - DNA, 480 bp, Glycine max
  unsure (1)..(480): unsure at all n locations
gatccttaagtcacctgaggcatgcaagcttctgccagtcaatcttctgagccaggttttttgtctagncttcctttttggagttgcgcttggagcatttgaaggtggaggggaactcggcggtgttgccatgggtcctgtaaaaaaacaaaaatagaaatgaaacactagttaattacaacaacatgtaagtatgaaattctaaataaagacagttaattgtaaataaaccaaatataattttccaacatgttaaatattatttaggtatataccgcagttacgtagctgtattctcccataaaccctcatcatgatcgttacgatttgcatgtatatcatcctcctcaatttcaacatttatggaaggcatctgtggngagaacgtcggaatctcgttaacatcaagagttgaagcatcaatatcgtaaacgataccacttgttttcccctgtagaacaactgaccatcttgagtcac

SEQ ID NO: 208406 - DNA, 295 bp, Glycine max
  unsure (1)..(295): unsure at all n locations
tnttttaaaatacatttaaatacaatcctttcaaaatgattaaagtctcacattcactattctaacatcataataaaacttgtccaaataaataataaatcatctcgactcaaaacaaggtcgtccaagacttcatgcaactaatatagaacctatatcccaatgtcacatcctatcagagcattgtgttctcacgtcttctagcatgaggttcttcatagtcatccacctaatcatctgctcccacaagcacaaagtttgagatcatcacaggatccaaacacaaatagcacac

SEQ ID NO: 208407 - DNA, 281 bp, Glycine max
tgaagctttgcaaccaacatgacttcatttttgaactcgtccaaaccttgtccagaagttttagaaagtctcttaactgcaatctcttgcccatctggcaatatgccctgacaataattttagaaacattgaaattattttgaagaggatgaacgtctgggttaaaattaatttttcgattcttaccttggacacaggttcaaagccgcccggtcccaatttggtactctctgacaactgatttgtggcattggagatggataaaaagtgaaatattggaa

SEQ ID NO: 208408 - DNA, 404 bp, Glycine max
ctccaatttatggttattttggagattattgtgtttatttatcttcggataaggctaatgctatctctagaacatttccattagatttaatgatgaaatctttgcattttcaggaggaaaaaaaggctatgttttgaattacaaaaagtagcagttgggctaagctcaatagttgggctaagcacatatccatcgctaagcacagcttcagtgcgcttagcacaaaggagaatctagtagagcatcatcatgaaagtcgtgcgctaagcgcactaggtaccttcagtcaggctaagctcgagactggcgctaagcccgaatccacttactcgcgctaagcgcaacgtcacgaattcagagcctatttaaagcttggtttgtgcataattatggtaagcagatga

SEQ ID NO: 208409 - DNA, 342 bp, Glycine max
  unsure (1)..(342): unsure at all n locations
agctgtaaagcacagcattacagaatctatgtttccaacacccctccattcaatggctcttctaggtttgaaaggtgaaatntaaaatgaggtaaattcaaagcaaactctcacctcacacaagtccataacctcaaactaaacttgctcaaactgaatttacacctaaaattccaccaaatcaaaatttgactcttcaacacccacatttgccctagaaatggctcttggttcacttttggcatttgtttttctctctagctcagcctaaccttcctcacatgtcctaaatgacatttcaagctagtattaactcactttaacctccatttaccacagaaa

SEQ ID NO: 208410 - DNA, 401 bp, Glycine max
tttggcctatgtgggtgcttggattattactccaaggtgtgagaagtcatgctcagttgaaactaaagatcaattgggtcaacattattgttgatatcatgttgaagacgaaaatgatttgctttttcaaatgtccttatatagttttgatctccaggattgttgagtattttgttgttaatacccaataggaagtctttggtttttttgaggcaaaatctgaagtaaagaccaaagtcttgaagcaaatggggtacataaagtctgaagaagatgggatttggtggattgagaagagaagagaacatcagatagaacaaaaagaagctgaagagaagaccatgagccttttatgcaattctaatctccaggattcatgactactttgttgttgataccta

SEQ ID NO: 208411 - DNA, 330 bp, Glycine max
  unsure (1)..(330): unsure at all n locations
atgcagcgaacattgaactcgaatttgcaatttgactctgtatctctgcttacattaccaatgtatggtacaacatgtcactctcttgtgtgcangttgaatcaattcaaaaaatttctcagtatgtggctcagatgagaagggttggaaagggtcacggtaagtatataactaccatcattcatatactgttcactaatgaaattgaagtttatggcttatacgcacctttccattatagtaccttactcctaaaccattggctctaatgaaaagatgtttatggcttcacgcgttggcacttgacaaaacttcttgattagaaatgct

SEQ ID NO: 208412 - DNA, 425 bp, Glycine max
tggacagcatcaaccttggccattctaaaatctttctatttcttatcagcgccctctttaatgtatgcagctggttcagtaatatttgagtccatgccattgatgtttaccccaacatggttaccttcagtgtctgagtcatctttgcaaccattcattgtgtcaaactcaactgcaaagatgtggtttgactcattcccatcattggtggagttaacaaggccaagataatgggcagcctcagccccaggaaactgtgttgagggtgctatggtgaacgcaaggccaaagccaccagaaccagaacttggggacacaattgagaaaacaaaattggcgctgaaggaataagcatcatggtggcttgtgttgctaacatttggaagggtgagcatatatgcatgcctacctattggttgatctgt

SEQ ID NO: 208413 - DNA, 474 bp, Glycine max
  unsure (1)..(474): unsure at all n locations
cttaagtcacctgcggcatgcaagctngtanaatggctagacatgatacatgttatggtttggtttctttcaaggataaaagggatgccccacattatttccatgacacaaatgcaaaaatgatgaattggaaattttatgcaaaattggtcatgcatgcacctatgcggatgctcaagtgtcaaattttacggtcatgtgatgctagggctcaggattaatttcctctattttagtcaacccaatgtttccaaaatatgttcttttatcaatctgtgcattcatccgagtccatttcgggcgttcggagaaattttcacaccattcacccttcaggtgacacacattcttttcaaaactatttatgatcagtgaatttttaaagaaagttggagtctttttttcaaacatgtggttttcagtgacaacttatttctttctactgccttttatttctttttcttaccgccttct

SEQ ID NO: 208414 - DNA, 484 bp, Glycine max
  unsure (1)..(484): unsure at all n locations
ntgcgagattcctcacggaaaacgttacggaaacgtttcttaagcgcctcggcttagaatttcttcacggaaacaatttttccaagcaaattcgaaagagagagaagtgcctaaggggctggaccccttccttcttgctttcctcccctatttatagcaaaataggggaggtggttgccgcccagctcgcccaggcgagctcagctcgcccaggcgagcagggttgcttcctccagaagcaaccgccttctggaggaatcttctggagggcccaaatgggcctgggtgctatttgcacccccatttttactaagtacacccccctctgctatnttttggtgattcttntttcgtaaagttacggaaacttacgaatttcgtaacgatacttgttntctttccgtaattgtacggaaccttgcnnggatacataatcatccccttttgacttacggaatggtacngaacctcacttaattatgcg

SEQ ID NO: 208415 - DNA, 291 bp, Glycine max
gagaatgtcaatccttaccctcggaagcaaaaaggaatagaagggaaatttccaatcaaagaaaaagagaaggaaaatttccaatgaaagcaaaaaagaaaagaaggaaaattccccaatcaaagagtgggagaaagcaaaaagaaaagaaaggaaattcccaatcaaagaatgggagaaagtaaaaaagggaaggaaagaaagttcttgaaggaaaaacagaaggaatatgcagagaggtctttggaccggacaatatctgaacaatacagaattgtcaccaaatgaacg

SEQ ID NO: 208416 - DNA, 304 bp, Glycine max
agcacaacaagaatattccacatccacaaatcgcgcataaacccaccatccctgtgtggcccaccctccaactagagctcaccggacgcccacgtagcccatattctcatttctctcaacgacggagccccatcaatcctcccaagcgtgcccaacatctaggtaatacaacattcaaacagaacaagctatcacagccaataatacagggcaaaggcagaaaactctgcccaaaacaccaaccaaaatcacagctttatctcactaaaagaccgcagtaacatatacttcagtcccattccga

SEQ ID NO: 208417 - DNA, 277 bp, Glycine max
  unsure (1)..(277): unsure at all n locations
aatatgatgcagaagaaaatgaatgtgaacatctttcccctttgaaagactttgtaaaaaaatgctttaaaacaaattctaattaatattcggattttctcctcctcttattagcatatatgcgaggggtagagggtgtcacatcttcatcttttatttngtgccactgaatattttgatcacgttcaagaagcttcatcaaatgttgcattacaagatcgctttcttttatggaagaacacaatgcacttcctgcgttgcatatctgtttaatggt

SEQ ID NO: 208418 - DNA, 479 bp, Glycine max
  unsure (1)..(479): unsure at all n locations
agcttctgagttaaaagttattgcagattgcattngctactagcttccgctntcaactacgagcgtctcgatatattactggactcaatcgatcatcagagcaaaaagttattgtcgttagaatttgttcagtgcttccgttttcaatttggagcgtctcgatatattacgggactcaatcggacatccgagtaaaaagttattgttgttagattntgctcatagcttctatttngaattgctacgagcttccgttttcaatttggagcgtctcaatatattacgggactcaatcggacatccgagtaaaaagttattgtctgttgaattcgctcacagcttctattctcaattttgagtgtctcgatatattacgggactcaatcggacatcggagtaaaaagttattgtcgttagaatttttcagagctcccgtttcaatttggatcgttcatatatacgggactcaatcggcatcc

SEQ ID NO: 208419 - DNA, 440 bp, Glycine max
agcttgataaagaggttgaagattcaacatgtgctttatacatatgaagcctggcttaaacgcctggaaggggaggctagagatctcctcagtgaggctgattttcttaaagagaaattgaaggtgctcgtcaggtttactataatttgcgtattacataactatttatttaggaattaaacaactcgtggtgataaatatggggaaaaatcaaagtatctgaatggccggtgtgcatttaatgctatattagtttgttctgtgatatacgcagcgtttggtagatgggtaaggaattattaatgtgttgttttccattttgtcgaaccttccaaatttaccaagagccttgggtgacgaccgatgatttggttctatctttggtggagttgtccaatcagtctgtggatatcactctccttcactattttatctctctc

SEQ ID NO: 208420 - DNA, 363 bp, Glycine max
  unsure (1)..(363): unsure at all n locations
agctgcttctggggcttctatggatgttgtatctttgatcttnaaggagggcctttaatggtgattttccaccatggagatgcagcggaagacaaagaagaagaggtgagaggaggcgccatccactatggaataagccatggaagaaggagcttcaccaccaagatgagccttggataagaagcttggaaggatgcttcaatggaggaaaagaaagagggagagaaagagagaggggggagcacgaaattgaaggaataaaagagggagagaagtggaactttgaagtatatctcacaagactctcattcatcaaagttacaacaagtgttacacatgcttctatttatagactaggtagct

SEQ ID NO: 208421 - DNA, 420 bp, Glycine max
  unsure (1)..(420): unsure at all n locations
agcttgngctntttgtgtgagaggatgcttgttgccctataaattctctcaactttcaaagaaatgaactntgaaagaaaggggtttgttatgtgcacccaacattttaagtaaagtggtaaaattgtccttcacttaaaattttaaaaaagtcttcctctcctctccctctctgtacatgctgtcgtatgtgccttcaataatgccttgccattagtccctgtcactgtcatcccgttcgccttcaccataagtccctcttttccacttgttcattgaaaatgggattgtgtagccataatacggattgagaatccgtataatgcatatggattgacaatctgtataattcacaaggattgctaatccgtatccattatatggtggattccaacctgtataattatttttaaaaattta

SEQ ID NO: 208422 - DNA, 349 bp, Glycine max
  unsure (1)..(349): unsure at all n locations
agctnctacaatcatcctcagtcagtatgtatcttcatttactggcttaccaaatgtgtctgtgtttcttgtactctacatataccacatagtaatacttgtttgagaatcttactagtgtaagaaactattacattttgcacttaattttcattctgtattntatcaggggatttaaagctctaaaacagactgtcaagctacattatcgactgggaaggcataaagagatgatgaaagcctatagggagatgctgacatatattaagtcagcagtgactcgtaactatagtgaaaaatgcataaacagcattatggactatgtctcgggttcagcaagccagaactt

SEQ ID NO: 208423 - DNA, 397 bp, Glycine max
  unsure (1)..(397): unsure at all n locations
tctagccaaatggacttaccttgacttaattcctttgatttctcttttgagccttcgttccctttccttgttttgaagctcactacaagccttaagtgagaaaccatgatatcaccatatccttaaggaattttggagctttggaattgttttgggaataagtgaggggggtttttgtttcattggataacatgttttgttggccatgcttcatgatactatttgagccatacttgatatacattgcatattggttaaatgttggacatgctgaatatgatgctgtttctcanaaggctacaaagcataaacaaaataaaaatcgaaaaagacaaagaaaaacagtaacgttgagtgaatgaataagaaaagaatgatgagactcttgggtctactc

SEQ ID NO: 208424 - DNA, 424 bp, Glycine max
  unsure (1)..(424): unsure at all n locations
agctgtttgggaaaaaatatcggctgagatatcttttttttatccttcccagcaggcttctgaattgagtagggtcttcaagaacttcaactgcagtgccatccaattgaagaccagaatccattggaatatttgcaggtttgcaattggtgaaaccagcatcttctaacaactctagggtgtatttccttcgggtcaagagaatgccttttacagacttagctatttccaaaccaagaaaatactttaaatcacctacgaccttgagtgtgaacaaaccttgcaactggtcagtgacttcactaattaaaggattgtttgggccagctatgatgatgtncgccatatagactaacaggagaatcagagaatcatttctccctttataaaatagagagctatcgtgcagatattgattgaatcc

SEQ ID NO: 208425 - DNA, 388 bp, Glycine max
gacaacaccacagattctgcctgtttctatttacagataggaaatgcctctaacagcaccttgtgcaatgatttacttcatgcctcttaagagcagatgaccaaatctttgatgccatattatgacttcatcttctttggagaatagacatgtggaggagtaactggattcttgaggtgtccacaggtaacggtatgcctttgatctgctgcccttcattagagcttcactcttctcattagaacccagcattctgactttgtgaagttacattgaatccttcatcacacaactgactgatgctgatcaaagttgcagtcaatctcttcactaaccaatctttgttataactagaaatccataatggccagctttcccatccagtgat

SEQ ID NO: 208426 - DNA, 179 bp, Glycine max
gctgctctaaacattccattggttaatgatgaacccggtatttagtgaaaaaacgctagatggaattgcacaagtccactaaggtagccatttcaccactagcgcactaagcgccttatgcaaagagaactgctgacatcatgataaaccgccgctacaacatggccttaccacctaac

SEQ ID NO: 208427 - DNA, 354 bp, Glycine max
  unsure (1)..(354): unsure at all n locations
agcttcttatcctaggctttctttgtggtgtatctccttcnnccatggcttattccctagtggatggcgcctcctctcacctcttctcctttgtcttccgctgcatctccatgatggaaaatcaccattaaaggacctcattgaagctcaaagatccagcctccatagaagccccacaaacaagcttccatcaggattcaactacagaacatgtgcaaaaaaaaagcatgaatctttcaaagaatacacccaaaagtggagggatctggcagcccaagtggcacccccaatgatggaaagggagatggtaatcgtgatggtagacacattaccaatattctactatgaaaaatg

SEQ ID NO: 208428 - DNA, 471 bp, Glycine max
  unsure (1)..(471): unsure at all n locations
tattgaaggataaatntagatcctatagattcttttctgtataattggctcttaagntgtaatgaatgtcaaattagatctcaataggccaattgactaattggatatttgttatgaagttttcaactctgctaaagaccaaagtttcagtgatataatttaccataaattaaaccataccataagatccctcttgacaaattcctccaatgtccttaacctccttctattcccaaaaattaaaccttgcaaactactcttcttggtacatatgctaactaccttaattgttttttgtcatcttttcctcaatcggtattacaccaatctctcctcataaacaaccattctatatcttgtcttgtatggccactcttagaatgtgagtttgggccgtaactcaaccccaaagccacacatacatattacaggtatttacagacacacacacaatatgaaataagcttttaa

SEQ ID NO: 208429 - DNA, 392 bp, Glycine max
agcttgttcgaagatcctcgagatctagaagatgattctatctttcagaaaaaactttcaagaagtttttgaagatttctctagatgaaaactataacctgcatccttttgagttcaaccattcccacttctgcaccatagggtttgttacctggtgggagaaatattattcgggccgttcagttggagacactactatcatgatctccagacttgagagtggttttacacaaccaacggtcgagaatatccgctcaaaccttcaagctcgaggtactaacttacttttgaattttctacattgatatgtattttcgccttttctaatattcttactctcaggcaaaacaatcatgaccaagaaaatcgctgaaacgcctcgagctgatgtg

SEQ ID NO: 208430 - DNA, 394 bp, Glycine max
agcttatatatgcataacacaattatgacaaatcttattcttgtgatgaatttgaaaatttatttcaatctcttataggtgaattgattaattacttataataaaattaaaattgtattatttatttacaagtttgttttgatgacaatcaacataactttctgttactttatattgtgacagatgagcaaaaaaaatctttgagacaattatgacagcagtgaataatgcttgcgatggcatgtttttcatctatggttatgttggtgttggaaagactcttatatagaagaagacattagcttcggcatcgtgttcacatggtgatattgtcttaaccgcaacatcaagtgactagcatctttgttgttgtcagagggataacaacacactc

SEQ ID NO: 208431 - DNA, 355 bp, Glycine max
tgaggttcaaacaaaggatttctctatgaaaactaactcgaaaacaccttacgaggtacgtttttaatcatgtaatttacatattatgtcatgcaaaaaacaatatttaacaaacacgaagataatcgattttatcaaaaacaatcaaaacacaagccagaagaatattggatttacttaactatatgaatgaatatatcatgcaaataggataaaatcaatcaagcaaatatactcttgaattcaaacaatcaagagacaaacaaataaagaattttaggcatcatagtccaattgtttgaataaacattcaactctaagagagatattatatgataatgggtgtgatattacc

SEQ ID NO: 208432 - DNA, 477 bp, Glycine max
  unsure (1)..(477): unsure at all n locations
cagcttgagggataagacttgccaagcgagggatcgtctctctcttatagactcacncaagctggaggatagagactctcccaagctattatcttctctctcagagaggttttttctcactctaagaaggggattcactcttgtcttggatggataggaatgaaggctcctacccttatttatactactccacctccacaatgaatggtggagattacttgtatcctagggtggagattaattctctagaatgctccacacattctaggagtctctacactcttctactcttttccatatcctttcataagggtccagaagggtccacacatctctagaatattctagagggttccacattctttcacaagcttctagagaagtctacactactctagattctccacgacgtctagaaaattctacagtttccagacggtctagaatttctagaacctctccaattaagaggatccc

SEQ ID NO: 208433 - DNA, 302 bp, Glycine max
cttgaaaggttggttggtgcttaataaaccacgactgaatatttctgtaagcgaaaaattccttatactgtgaagataataataatatggtaatgctaatgcatatgaatgcatttacacttgagggggaatcgttggagaaaaccccacttgcaaccatgcataaattctagttgactgactcacagatgtgacgtatggataccttagcttaagactaaatcatgtttttaatagaacttaaactgaatgaacaacaacaacatctgtggtaatatatgattctcaaaaaagagctgacc

SEQ ID NO: 208434 - DNA, 471 bp, Glycine max
  unsure (1)..(471): unsure at all n locations
agctngccactgtagcagttaagtgaacaaattatgttttcacagtcattggatggttgcttggtagaggtacatgctaataactaataagatttcctgtgcagggtatcattgtttttgcatgactgatggctaccttggggctggagattttggttgaatctgcctcaagtgttattttgaaggtaattgagataatcttttgttgttgtttgtttattatatacctaaatttgggttgaagactagttattcaacatgtggattatctaccatgataagtgattttatcatttgagcagatgatattatcatttgaccttgcttttgctttgattccgctcctaaagttcagtagcagcaaagtgactagcagcacaagcattgaagaggtgtgntccttcttgttngggattcatngaactataagtatacatgaaactgaaaaatgttctagttataaaatttgat

SEQ ID NO: 208435 - DNA, 431 bp, Glycine max
  unsure (1)..(431): unsure at all n locations
agcttggctctatgctttctaggagagtgttttttcctctatcttttctaagatattttcttctttagttntttgggggaactattttatcttatcttaggaactagatatcttatcttactttaggagaatgatatggaaaccaagagatgtgaagagagtaaccatggatgtgatattaatgtgaaaaacgagttagcaagatgaccgaactagacttaggtgtcttcataagaaatgtatccctacatgttatccaaacaatggtgttggtttcacttagttggacttctaaaactttttatatagaacaattaatgaacaaaggtcaagttgtcaggattgtgcaatcaactcgtgttcttcctaattttaggcatagtagacgattgaactagttttcgagtaaacatagaagtagttataattgt

SEQ ID NO: 208436 - DNA, 339 bp, Glycine max
tactacgacgactgagagaactggggcatataaagagggtgaggatgagggagaaacccatgctgcgactgccattcctatactgccaagatgtccaccaacccaacaatgtcattactcaatgaataacaaacctcctccttacccaccacccagatatccacaaaggccatccctaaatcaaccaccaagcctgtctaccgcactgtcaatgacaaaacaccacctttagcacaaaccacaaacaccaaccaagaagtgaatttgcagcgagaaagcctgtagaattcatcccaattacagagacctatgctgatatgctcccatatctacttgata

SEQ ID NO: 208437 - DNA, 289 bp, Glycine max
gaagttaagtcccaactcgcttagggttttggggttttgtgaaatcaacttcagattctgctaccacaaatgaaacggagttgcttggagtgtattgaatgatggggtttggggaatcattatgtcaaacgacattgccgtcgagagggggaaagtgttatagggtgtgagagagagaggttttgagctttggaatgattttggaatataaaatggatgggctcggaacgatttcggaatagagaggttttgtgatgcatgcgacgtgaagaatgcacggaagagcgta

SEQ ID NO: 208438 - DNA, 430 bp, Glycine max
  unsure (1)..(430): unsure at all n locations
caagcttttgtaatcgattacacttattgggtttttgattaccagngattggttctgaaaaatcaaaagatgtaactcttcaaaaaggttttgactttttcaaatgggttttaagtttttctaaaagttataactcttctgaatggccttcttgaccagacatgaaaagtctataaaagcaaggctttgttttgcattttaaatcaatctttcaaacaacaatctcatacaatcctttacaagccttgaatctctttgaatctctttgaacttcttcttcttctttgtaccaaaagctttctgaagttttctggttttctaaaccttgaaaactagngctattcatcctttttattctcttctccctttgccaaanagaattcaccaaggactaatcgcctgaattctttttgtgctctcttctctcttt

SEQ ID NO: 208439 - DNA, 463 bp, Glycine max
  unsure (1)..(463): unsure at all n locations
gctttatccctatccagaatgncatatattttatataagnnntaggatnntcttttgtcaacacttaaattgtagtacgcattttagtatttctttatcataaataaaatttgagtttcgaatttggaagcacataactaaaatcatgtcgccgactacaactgctcgtctcacaaattgacgacaaactagttgtcattttaaaagacacagacgtacaatcctaaagacttaaatatcttttcatttattttaatccattgttcaattgcataagttatgctaataacctatgacctaatgtaatttaccatgagaaacctcattnttctcctaattaaaataaaaactcgctagataaaaattgacatgcaatntgtgaaaaacgaaaaaagaanaaccttttcgtttgaattctatatctcaaatttcgaatactattattagataacacccaaataga

SEQ ID NO: 208440 - DNA, 390 bp, Glycine max
gacacataaaactcagcttcggggggaccatcctagtactgacaccgtttcttttatgtgcatgcatgcggcatccttgatgagcacatttatatgaaatcacatgcatgccgcaatatgatgaatacacgcgggcgcaaggaggcctggggaagcaactcatctcttaaccatgtggacagctggaccctcattctaggatgccctagaccctagtagtgcgtagtacacgccatcgctatctccttatgatacaacactaactctttaatatgaggaaatgatggtttaacgaatcatgggtgatcctgaatcaattgaaggggcatgactcatgagaggtctctctaatcactatatgtaggcccgatcattgtccatatcacggca

SEQ ID NO: 208441 - DNA, 188 bp, Glycine max
  unsure (1)..(188): unsure at all n locations
actcagctnaagagaaccannaagacaaggagagccgaccaataatttttgggaacgacccgaggccccaggaaaaccgggaacaaacccctcacaggaagcgacaaggccgaacgaaaaatcagggaactcagacaaactaaagccctaaatgaaggccgaggtgacaatcatagccgaacacaaaa

SEQ ID NO: 208442 - DNA, 341 bp, Glycine max
  unsure (1)..(341): unsure at all n locations
acacagatgcaagaaggagaagttttgggagagagagagcaggggaagagaaattcttgcgaatgggagtgtaattgatgttacccccactaagcaagtttcgactttctcgctaagcggcaaggttcgctaagcgggcgagcgagacatatggtttttcaaggcctatcgcttagcgaagcctcgtgcttagccaaacttcaaattcaaatttttttagagatttagagttaggcttagcgtgtggatcggaccacttatcgagatctgtagatcagaaaacctgcaactctcgctaagctgggctttgggctcgcttagctaanatcatgcattntgag

SEQ ID NO: 208443 - DNA, 474 bp, Glycine max
  unsure (1)..(474): unsure at all n locations
ntgccactgccttatctcttagaattcgtttgatttatatataatcgctagctatatagaaagatcacatggttaatcaattatgccgcgggatagacgtgagggcttgccacacctctgtacattcatcgcacggattataagcatatgcacaattagtttggaatgagtaaggcataaagattttcttaaaagaaaaaaatcacttatgtacaataattatatatgaaacgaaataaataaatataagaaaataaaaaaaaaatcaacatcaatagaagaagaaaaatagcacaacttcgatttgattagaagccgaaacttcaatagcagaaagttattcaacttgaaccacaatagtagaatcccatctcaaagccttaactaaccctaatgcaaganataatcacaaaactgaaagcaaacagtacgatcatcacaaaaccaaattaacatagggacaactaaacatta

SEQ ID NO: 208444 - DNA, 307 bp, Glycine max
  unsure (1)..(307): unsure at all n locations
aaactctgnnccatgacatttcaggcatagaagtcctagaggctgtgaatcaaatgcatacttccaaggcccctaagatcggatggcacttccaagcttatctaccaaaccttttggagtcaggtgggagatgatgtgattcgtactgccctcaatatttttaattgcgatggggacccttcttttctgaacaacacttacttaacccttatccctaaggcaaagaagtcgaaccatgctagccaattntgacccattggcctttacaatgtcattttcaaaattatcactaacacaattgcaaacc

SEQ ID NO: 208445 - DNA, 458 bp, Glycine max
  unsure (1)..(458): unsure at all n locations
acacataaaactcagctttcaggaagttcttaaaaagctctcagaaatattcttaagaaagcttctcaaggaagctacctagtctataaatagaagcatgtgtaacacttgttgtaactttgatgaatgaaagtcttatgagatacacttcaaagttccacttctttccctcttttattccttcaatttcgtgctccccccttctctctttcttttcctccattaaagcatcctcttcaagcttcttatccaaggcaattcttggtggtgaagctccttcttccttggcttattccctagtggatggtgcctcccctatcctcttctactttgcctttcgctgcatctccgtggtgaaaaatcaccattgaaggacctcattgaagctcanagatccaacctccatagaagctccacaangcaagcttcatcaagtggtatcagagcacaagagcttc

SEQ ID NO: 208446 - DNA, 328 bp, Glycine max
aagatgagatttaatttattgtaaataggggaagttagaaactgtatagcagatccgaatggatctgattttgattcttatattgtatctgtaattactttctctaacaataaataaatccatcatgtgtgttcttagacacggcctctctaaatcttatagctatatcataattgaaacacttaatagaagtgccaaaataagaagtggtgcatggaggtcacctagggctagtggctgccttggatggtggctgcacaacacgatgactggattcttgactcttgatcatgcccactggacatacgcttctaaacataccaacttg

SEQ ID NO: 208447 - DNA, 449 bp, Glycine max
  unsure (1)..(449): unsure at all n locations
tgtctttntcagggtatacgaaagaaggcccaggaaatttatattttaatgactgccctcacgtactgtctcgtggggggtatgaactgcttgacaagaaacttatggaggagaagagcaagcgtggacatgaggaacattcgtgtactgaaagcccaacactcaacgtcgacccaccatccctagttgcaagacacttgaagtggaagatcgcccgcactaagcggcatggccaaatgacgtctgaagtggcacaagaaattgcagacaaaattgtcagttcatatatttttttggttactatcattggcaaataatggttagctaacctagtcaaatttgttttattcaaattcaacaattgtatatgcatgcaggattcattacaggaacaagcaacacanngggaagtttggtctgcatgggcgacaggacatnactcacacggc

SEQ ID NO: 208448 - DNA, 373 bp, Glycine max
agcttgtacgaatataagaaacatcttcttcgaccttgttgattcttgactccatctcattgaagcgcatgtccacttgtaattccaaagtatcaaacctttcaccaacaaaggtttgaagaccatcgaacctatccaaaatcttttgaagaagagaagaatcttctccaccatgtccttcttcatcaataggtcgagcaccctttttcacccaagagccatcatgctcattttgataaccaaaggatgcaatgacaaccacgcctattagaaaggatctcttgattggaacataaggttcagaatcaagagggatgctaaagtgttgaaggaagagggtgactagatgtggatatggcaatggagcatttat

SEQ ID NO: 208449 - DNA, 450 bp, Glycine max
  unsure (1)..(450): unsure at all n locations
gcttatgaaacctatcattctatagataagtttattacgagaagattatcattatcttacaattaactaataatcaaagtgatcaatggtaacatagaagttaaagcaatagaaagatacaattaacttgataaaattgaatatcttttttttaaaaaaaggaactaaagtatgggtacaactacatcacaatccgagttctaaggggtttagccaaccatattcatagaataactaaacaacatacaatattgcattagaaataaaagagattgaaaattcttactgatttagaccctaattgttctgggtgtagttcttctcccaaaagctcttgttcctaaaatgtctaatgtctaattgagtagatttctcaatggtttgcatgtaatagattctctacttatgtggttagttctcgatagggttttaagcatntggtgtatgcat

SEQ ID NO: 208450 - DNA, 434 bp, Glycine max
accgcggctgcagctgactgaggccattttgaggtttgctcatcacgcaaggcctggcacagaatatctgcatttcaaacctgcgctttgcggagagagcatacaagtaccgcccagtgaaggtgtgagaatttgaacttccacggcagcagtgtgtggtgtacttggatctgaagcgggaagagtgtaacaactctttcccattcgggcgggtttattccacaacgttccatttgggtggacaaggtttctttctatcagcacattgcaacatggaccaacaaagctctttccattgctttgggctagtttctggaatgcatgactagggctagtgagctttgcccgcgactatgattttgctcgcaggcctaggccgacagacgatatttgttaccaagtacaaacgccacctacgcgttcactgggggaaa

SEQ ID NO: 208451 - DNA, 406 bp, Glycine max
  unsure (1)..(406): unsure at all n locations
agctntgccataagaacctatcttacgtggagttgttgctgcttttattattgntcttggtggcttcattatcgctgcgaagtactaaatttcccgtgtttaagagttgcaaaatgggccttgaggcctttgttgttgtgtttgttgaccactgaactttgttattctttgtgagaaggacgaggtttccgtcgttggttatgatcaacttggtggaattgtctttgagagggtagtcacggttagccacccacacaactgtttttactgggatgtttttgaaccagattccgaggtaacggtttgtggagtttcttatggaaaagaaacccagttcaaaagtttcatctttggaaactaaggtggtaccatcagggagagatttgacagagtgagtgtgtaattg

SEQ ID NO: 208452 - DNA, 448 bp, Glycine max
  unsure (1)..(448): unsure at all n locations
gcttagccactagcgcttctattatataaaagtactaagggttatctttttaattaattaaangaagaataaaaaggattagcatgccatagacaaagaaatatcagcccttaatgtcttgttgaaagaacatacttggctctgtcctctttagcaatctcatgatgtctcatcttttcccatagacgtgcaagctcctattcaaaattaaattaaattaaaattaaataccacctagtgaattcccaaccatcaaggttacaacactctattcaactgatgaaagaacaaacaattaataaaaaataatgtctcacttgctcaagagtgaaatgtcgctctctcttcttttttctagcatctgctatgtcctgatacgaaacaatcataatctcatctaatcaatcacaacacataattctctaatgcctcaacaattaattaattg

SEQ ID NO: 208453 - DNA, 353 bp, Glycine max
gcattaacagcttttcatccctagaatacgccctcatcttgccacaatacatattgagatggttcttaggacaagtcatccctttgtacttgtcgaaatcaggtaccttgaatattggggggatgacgatgtccgtgaccacgcaaagatccgccatgtccgtgaacagatagtcgccaaagccttcaacaactttcaatcacttctcgatgagaacgagtgttcttctttattccactggcggaggtggtccctttgtggacaaaatattggccatgctgggaaggtgggttgaggcattaccgtcggtgctggaccctcgaagaagacccgggggtaaaaatcgttgttac

SEQ ID NO: 208454 - DNA, 298 bp, Glycine max
  unsure (1)..(298): unsure at all n locations
ttatgacaaaaagccaaagagaatgatttcaagattgagtcaacaagttcaagatcaagattaatttcaagtttcatgagaagaaaccaagaagattcaagaatcaagagaagtttgatttcaagattcaagagaagatgaattcaagattcaagagaagaaatcaagaatacttcacaagggaagtattgaaaatatttttcaaaaaacaaacatagcacagttttgtttttcanaagagtttttttctcaaaattttctaaggtaccagagtttttactctttgataatcgattac

SEQ ID NO: 208455 - DNA, 411 bp, Glycine max
  unsure (1)..(411): unsure at all n locations
tacatgggatgggagatacaacatctagagatcaaggatttcaaagcatcttgcattcccatgacaatggcattccagaaattatcattcaagatatcagggtatctgacgaggttttggtttgtgaaaatatattttctgttttcactactagttacaaaaaaagccatcctgttttcactttatttctatagttcaaatttttgtacagtaaatgatgaaaacaactattcttgatagtatgtttgtattagtgaaaatagaaacataaaacatgttcacagaccataggcacctttatatactgtcatgaagatacctacctgtgaactgctctcttaacaatcctgaaatctatnttgttgataanaagattctgatttgaagtaatgaatcattgtcatgatacat

SEQ ID NO: 208456 - DNA, 409 bp, Glycine max
  unsure (1)..(409): unsure at all n locations
agcttttgatgactcgcttagagaggctcattttcttancgagatgcatccgcttagcgaggcatccagctcgcttaatggatgggaaaccctanaagaggataagtcagagatttgcacgcccagcgcgcagccatcccacccagcgaagatgttgtctcttctcgcgcttagcgggcccatgctcgcttagcggattttcacttactctcactcagcaagacatgctcgctgagcgagacttcggaagttgaaaagtccaagagcctttaaaacactaaagttggcagaaatgaaaaaaaaatggactttgagtagcaaaaagagcttgtcttcgtngaaaacaaagagattcagggttaagaggctagagaagacattctccaccattttcttccatatttctttc

SEQ ID NO: 208457 - DNA, 384 bp, Glycine max
gtaacatatgcacgtacctagagattatcgttgatctgggaggggatatacctgtgcagttattaatgttatgatactgcatgtgcacgtgagtcacagcatattaaaagattgactggcttttagtattttttttttgtcttaacccttttattcataaggagaagatgtcttcactaatccaaaattaacaagtaataatttattaattaagaattatttctgcaaagcttaatatttgatgattatttttaaattgagaaccacatatggcagttgagtattccctctgtaattcttgaattatcggtgaatttgcgccttcattatgacttatttcgctgattaaaaaatcatcatgaatataaatggcccaccagtcat

SEQ ID NO: 208458 - DNA, 406 bp, Glycine max
  unsure (1)..(406): unsure at all n locations
tgtagtagcttctgataaaatacgtatcacaatactactgtggtaccatcatgattaaaatttctgggtatctgttaaaggagactatgggtagtagatgaattttttgatattgtacataaacttaatatggttatttcttttttaatatcttgtagatagtggctttactggcagatgcattaactgaaatacaagaacaagttttggccgctgatgatgaggtatttaatgaatattgatgtgtatactaattatacactaattagtaagatcaatacctaatataatataaactgtactcacgatagtgactgggaagaagttcaagcacatggcattgaaaatgataaagaatctctntattcagtgtctacatcttcgggaaaagccaccgatgaacaac

SEQ ID NO: 208459 - DNA, 420 bp, Glycine max
cttaagtcacctgcggcatgcaagctggtcgctggagctgtgccatcttctgttctactctttcagaatggtgactcctaggctcttgaccttgacttgatagaacctatttttaagcgaaggtgcctgactcgatcccatgttttactaaagtgaaacaaaacccaatgcgaatcaagactccgacatctattatgggtggaatggataaatgcatgaagaaatgcatatgacacagatgcattttatgaatatgggagcccaagagactgtccccctcttagatacaatgttcgggtagcatggcgccccacgtatgcatttaagaaggcgacatggaccctctgttggtttgacaaagtgaggggatcaagacgcaacccgtgcatgatgctgatgcggaaaagaaaggcacaacac

SEQ ID NO: 208460 - DNA, 436 bp, Glycine max
  unsure (1)..(436): unsure at all n locations
acctgcggctgcagctaaagaactggaagaagngtgctttantcttttaactttcttgagggacatttgtattaattgttgtattgtgtcttaatctttatcttttcatatgtgcatcatgcatcatcatgtaatagtaagaagaaaggttgtaaagtaagaaaatttctcagtgcttaaaactctctgttttaatcgattacaagcgtgatcgtaatcgattacacaagtgtttgtagcttatagataagtttcttgtatcggttactaggtgatcataatcgattacttctctcttaaaagtgtttaagaaatgatcaagaacattttaatcgatcacatcaagaatttaatcaattatattgttctttacagttntccaaattttggaaggaacactttaatccattgaaatgatactataatcgattacttc

SEQ ID NO: 208461 - DNA, 485 bp, Glycine max
  unsure (1)..(485): unsure at all n locations
actaagcttacataccctnngttttcttcatctaccaccttatttttcatttttttttngaactntacaatttttatgagtctcatgacaatgagagactaaaaaatccattgttgggggctttgtgaactaaacactatgatataattatttttaccatccattcaatgttattgttagtgctattgctttctttccattattattgtcttgtttatggattgatcactcatatgcatgtgttatagtatgattgtcattggaaaatgctttaatactaaaaactaatagaaggctcctaatgaactcatgccttggaatggaatgacgtttattatctacatttttaaccgttgtgtggatccaaatcacttagcttagcttactaanggagtgagagttaagtgattcangttctctcactcgangaatatangttanggtacaattgtgacaccctctaccccacacatatatatactaat

SEQ ID NO: 208462 - DNA, 415 bp, Glycine max
  unsure (1)..(415): unsure at all n locations
agcttatgcacggaaaatgtattatgaaattttcttgcccgaagaaacaccatttcctagttaaccatgcattaggtaccatgttcaattattttgtttttaagtgaaacgggtttatgatcccaacatggttggctcgtggtgcctaacacatgaaactaagaatgtagtgtgaagtttcacgctcccccctttttttgtttttgttttgtagaggaaaacgcatggatgagcaaacatgaaaacaaatggtatgcaattttgcagaccaaaaagtttgttgaacgcatatgcatgatgatgccatgaccatgcaaaatgtgaggctggaatatgataacggacaaatgcangatatgtccattatgatgntatgaagagatgcttatgcgatgcatgatatgaatgcatttta

SEQ ID NO: 208463 - DNA, 449 bp, Glycine max
  unsure (1)..(449): unsure at all n locations
tggttcgaggtacttacccgttgaagatctttgatcgatgtttaacgaatgaagaacgncgaagaacgggtgaaacctttgcgagattcctcacggaaaacgttacggaaacgtttcggaagcgcctcggcttagatnttcttcacggaaacaatttttccaagcaaattcgaaagagagagaagtgcctaaggggctgaaccccttccttcttcacttcctcccctttntatagcaaaataggggaggtggttgccgcccagctcgcccaggcgagcagggttgcttcctccagaagcaaccgccttctggaggaatattccggagggcccaagtgggcctgggtgctatntgcacccncaattttactaagtacacncccctctgctggtntttggtgaattctttttcgtanagtacgganacttacgaatttcgtaacgatactt

SEQ ID NO: 208464 - DNA, 373 bp, Glycine max
  unsure (1)..(373): unsure at all n locations
atgcccgaagacacaccatttcctagttaaccatgcattaggtaccatgttcaattattttgattctaagtgaaacgggtttatgatcccaacatggttggctcgtggtgcctaacacatgaaactaagaatgtagtgtgaagnttcacgcttccccctcttttgtttttgttntgtagaggaaaacgcaaggatgagcaaacatgaaaacaaatggtatgcaattttgcagatcaaaaagtttgttgaacgcatatgcatgatgatgccatgactcatggcaaatgtgaggccggaatatgataacggacaaatgcaggatatgtccattatgatgttatgaagagatgcttatgcgatgcatgatatgaat

SEQ ID NO: 208465 - DNA, 405 bp, Glycine max
  unsure (1)..(405): unsure at all n locations
ttcttccggagaggggggggctctttataattttttattaaagggtaaaattgtccatacataaaagttgctgggtgcaccaccaatattgctgggtgcacctagcatctccccgtataattggtggtgttagattgcgatgggcatcattcgcgtatctatctttggtgcaatcttcacgctatgatacctctttgttgtatacaatacagacatcacaattggatcttacaattttccataaaaagtacttgaattctttgttattattctacaattggtgcatgtttgcttagttcatttcaacaaacaattaacctttcctattaaatttaatatntctaacataattatttttatgaaaatagtcattctcaaacatcattttacttctcttcaaatatt

SEQ ID NO: 208466 - DNA, 282 bp, Glycine max
tacgtatgcctagtgttgccatcccatgtactacaataaccatagttgagggcaatagaatatatatcgaaactttgatgaacatagaacccttcatactctatactgtgatggaatgagataaggataccgaaagggaatatggagacgtgaggaagtgcgtatactgcattgcaagcaaagcaacggtaaagggtatcttcttgcacgcttgtaacagatatagtgcatcctagttctatgcatgctctttatcgtggaaaggttgagatctgacatctg

SEQ ID NO: 208467 - DNA, 220 bp, Glycine max
aatgctggaaataaacctcacaaccacttcactaagcttgtgtgggcaatattgtagaatagctcaataacacaacaaatctgagatatgaatatataacaattagaaataagtgggattctatgaaaaaggaatggaaattatgggctaatcttattgggaaggacacaaggtctggctgggatgggggagaacacaaccattactgctagtgatgaat

SEQ ID NO: 208468 - DNA, 349 bp, Glycine max
atggaagaacacatactgaacacaccaccatttacctctctcaacacaagcaaccaccttcttttttaccttcaacacacaaattttacatagcgcgacttggtccctctgcactggggtttttaaatcccactgaagctgaaatcgttaaccccactggtgcctccctctcaccatatcgccagcttgagtggtgccttccagctactacctgaacagctgcaagtgctgcagcctatgcctgcagctctacaaaccacaatgcaagtgctgaagtcgctggtcaaaccagcgcttccatgcacctttggacgcgccaatatgagctgcgatatgcagtcctttgtcg

SEQ ID NO: 208469 - DNA, 393 bp, Glycine max
  unsure (1)..(393): unsure at all n locations
agcttataattaacttaagtttataagttattatattctatgagtcgagaacttaaaaatctataaattaactgactgaaggttaattgaactagtttgtaaactggtcaaattaataatttatacaagctacgtactagagtgacttatcagccacatttttgtatcatattgatctcttttattaattaaaatccatatgattctcaataattaaattgggaattagacctatcaaataagaaatcgaaaccacatgtttaattaaattcacgagagaatatattgaaaagagagagcaagagagtattttgatatatcatcatttctcatgtatatnggctatgacatttgttgactatttttgttcacaatcttctcttcaatatatat

SEQ ID NO: 208470 - DNA, 421 bp, Glycine max
tctttctattagcagttaaagtactaaaaaaacacaagctaccaaacactcttaaagaagtaatatcaaagggagttccatagagtttctcatatggagttttattactaagaaacagtgtaggtatgccatttatgagagtagcagaatgaattaaagcataagaccaaaaaatggaaggcaaattggactgaaatagcagggatctagtaacattaagtaagtgttgatgttttctttctgcaatctcattctgttgaggggtttcaacacaagatgtttggtgaacaataccagtttcatcaaaattttcttaagatgaattccgatccattttctgtcctaataactctcacctttgtattaaactgcctctcaacaacagcaacaaaattcttttaagtgtgtttgtgttcaactt

SEQ ID NO: 208471 - DNA, 480 bp, Glycine max
  unsure (1)..(480): unsure at all n locations
agctngaatggttntacttctctgatcatctgttaataaagcccaattggaaaatntcttgggactcactatctcaagtttctcagtaatttccttgaatgctggaacaaggccacgccttatgaagcacccttctataagccgcatcgaatttaactcggggagactaggagcatcttttaactccagatccaagcaaaatggggagtcttttagccacatcctgagagagtgagccttggccacaaggatgccttgtcgtgtcttacaaggaagaaaaggcgatcccatttcccaaaggcatgccttcaatgtgctgtcaagagataccatgttatactctgctgttcccgttataagtacaactgattttggtgactctggataaccctgcaaggaggcatcctgccatgcaaccaaagtccatatgttaaggcaaacagagagaatctagagctaattaaatggtgaatattatat

SEQ ID NO: 208472 - DNA, 443 bp, Glycine max
  unsure (1)..(443): unsure at all n locations
tgctatggattcaataatatgggcgtttcggcatacagatttgaatattgctgaaactgggctgaacctgttgttggagatgttgaagaagtttcacgtgtggtctttgtatattattttgttcataactctcactgttgaccttcaaagtttctttcccatagtttttcttgttttggaggattctgatcctccctcaagttttccctcatttatctctattaattttttgctgatcaaaaaaaaaaaatctctattaatttttttcttgttggttgaatgtctatttgtaacattaaacaggcatcagagttctgtaatcagttttatcgaacatactttntgacaattgagcaagagatatctgctgttctgacggacacttttcataagcctgtgttcaaatttcatgtcttggtgcttcaacatttgttctgtctggt

SEQ ID NO: 208473 - DNA, 490 bp, Glycine max
  unsure (1)..(490): unsure at all n locations
agcttcaacatcagaccacttccagggtgctggaactatcttacatggacttgatggggcctatgcaagttgaaagccttggaggaaagaggtatgcctatgttgttgtggatgatttctccagatttacctgngtcaactttatcagagaaaaatcagacacctttgaagtattcaaggagttgagtctaagactccaaagagaaaaagactgtgtcatcaagagaatcaggagtgaccatggcagagagtttgaaaacagcaagtttactgaatactgcacatctgaaggcatcactcatgagttctctgcagccattacaccacaacaaaatggcatagttgaaaggaaaaacaggactttgcaagaagctgctagggtcatgctccatgccaaagaacttccctataatctctgggctgaagccatgaacacagcatgctacatccacaacagagtcacactgagaagagggactcaaccacactg

SEQ ID NO: 208474 - DNA, 451 bp, Glycine max
  unsure (1)..(451): unsure at all n locations
tccttaagaagattcctaatgaagcttgagcttagctacacatacctctctaatagctaagctcacctccttgagatgagaagctagagcttagctacacaccccctataatagctaagctcacccccatgaccaaaaacatgaaaatacaaaaaaaaagtccttactacaaagactactcaaaatgccccgaaatacaaggctaaaaccctatactactagaatggccaaaatacaaggcccagacgaaggaaatacctattctaatatttataaagataagcgggctcatacttagcccatgggatcgaaatctaccctaaggctcatgagaaacctatggccttcccttggatctctagccaatctacttggagtcttctacccaatgcccttgcggngtaggattgcatcaagatatgtgtgaactttgatgaatctcccatcatat

SEQ ID NO: 208475 - DNA, 509 bp, Glycine max
  unsure (1)..(509): unsure at all n locations
atccttaagtcacctgcggcactgcaagcttgactctgaaatgtgactagctacctgtagtttatttnttgnnctctagaaatttacatgtagtatatgcctttgattctacaaattatgcattgtctacagaattgtgaaaagatttgatgctctagcatttattcttgatatgtatttactttgtataagatatgttgattagcaaatgcagtggaaactagtctaatcaaatggtcttctagaatggtaacagactcctccactcccctccttcccccaagcacacacacatataaaatttgtagatgttgatgcaacttgaataaatgatatgattgcctagatgtagccatgtggcagtactaactgatgttcagtacttataatttaatnttcactatganaatatattatccccatcggttatgctaggaaacatgatctataacccctgattggagggacattgagcttctgttcatgaaaatgttggcttgatgtagaat

SEQ ID NO: 208476 - DNA, 439 bp, Glycine max
ttaatggaagaccaaagatatatcatgaattgtagtttgggaaagcatgtactagtaaataatggtgactccctgcttgagtggaacctctgatttgaaaggtgtggttggtagaaactgcaaccctcaaatcactagctagctatggctggaagatttgcatgacatgacaaactcaagaggaagaagttatgtactacagctatatcttgcatgctaactggtacaagtaaatgtatatatgccttaaaacaaattccgagtggtttttgaacaaaattggacaacaaaaaaattgttccattaatttttaaatgtatatgaaaaaatgagcgagaaataaaaataattataatgttacatacatatggctaattattattgttttgttggaaaataaaactgatttaacctctcttaacaaagaaaccaaatcata

SEQ ID NO: 208477 - DNA, 445 bp, Glycine max
  unsure (1)..(445): unsure at all n locations
agctgagcacctttgtcctcacttcttctcttattgatgggttgagccttctctagggttgtatgattggtctatagtctccttccatcattttcttgtgcatgtagttggcagggctgattcctttaagatctaatatgtgccacccaattgcttccatgtgtcccttgaggacctttaccaacctattctcttcctctgctgttagctcactgtgatcaccacaggcttggtctcgctctcctccaagaacacatacttcaggtggttgggtaggatcttcaactccaccttggtcttctcggatggactcccactttttaattcttcanagctggtcccccttgcaggaatgttttcttcatgatctaagtcttccaagaaagtcctcagatccttttcctcttcaatagttagataatccacaacattgatcaaagctttc

SEQ ID NO: 208478 - DNA, 331 bp, Glycine max
tttcactccggagtacgacagtcaccgctttatgagcgctgttcaccagcagcgcttcgaagccatcaagggatggtcgtttctccgggagcgacgcgtccagctcaagacgttaaagaagcgctactatgaggcaacctattaccttttaaatttctgcctgctatttgatcactttttatagtaggacgcacctagttgctcatgatcctgggaatttaaataaaacaagcgcaagctcggaaggtagtcatacctcacaaaatatatatatgtatgtttaggtaagaaagataccctagatatgcatgtatgtaaacacaaaaacact

SEQ ID NO: 208479 - DNA, 480 bp, Glycine max
  unsure (1)..(480): unsure at all n locations
agctgggctctggccattagaaccattttattcttaagttccttaacctttaaatagacattctggtcaagtaagtgcttttctgcatcaaacagatcaaacttgatcttctaatcatctatgcccatttctagtttatcctttcccatatccaccacacaaccggcggttaacataaagggatggcccaaaatcaaggggattttagcgtcctcttcaatatccatcacaacaaaatctgcagggaaactaaactgcttcaccttaaccagaacatcttcaattatgctataaggtcttgtaatagaccgatctacaagttgtagtgtcattctagttggcataatctccaactctctaattctcctacacatggagagaggcatcataattatactggcccncaaatcaatgagagctttaccaactaacaccggaccaatagagcagggaatagtaacactcacaggatccttatgc

SEQ ID NO: 208480 - DNA, 413 bp, Glycine max
  unsure (1)..(413): unsure at all n locations
taacgacgacaaatctcgcttggtccggctcattattatgaataagcaatgtctaactacctgctccaccagcaataacttcagcctatgctaaaaagaaaacttaagcaagataaaattgatttatgtatacatatggttgatttgaacgtgaagagaaaagagagagaggatcgatctctccatcaataaaaattaatgattaatatttatagataaaagatattataaatatctattttttaatatatttttttgtggtttttaatatattttttttattaattagtgttgattaaaatttattaaaaattataaaataatgaatgaagtttattaaaaaatagtcaaacttataaatgtttttaatttctaataactaanattttcaaccaataataaagagagtctta

SEQ ID NO: 208481 - DNA, 422 bp, Glycine max
tccatcacttgctacctattctatatatacatgtacatgtgtgaaaacatcttcacaccatctatgcgtaaaggggagtcctcaccaacatgctctcattttcatgccctcttgtattgaagtcaaaagcttcggttcctagtcctagaatcacattcgggcacatattctagctcctacaagttgtccgaacactcaaaacagcagccatatatgcacaagtcaaatccccaagcaaaaattcgcatacccatgcgcaaatgccattgaggcatttcaccgagcacttggtgggcgcatgtttaggcatgaaaatttggggaatgggggcaaagtgtcacgccaaattgcttcagaacgcaccataggcctagggccatcccttacaacccctcgatcccatgaaacaagcacaaattcaa

SEQ ID NO: 208482 - DNA, 453 bp, Glycine max
  unsure (1)..(453): unsure at all n locations
agctntgagggaagaaacctcattatcgctttgtatgaaattggaagaagaaaaaaaaatggagtcctttctctcccttgaagaactcgtgcaaatgatggagaacgaagattccaagtttgacttttttgaaaaaatgaagatataagaattaaggctagtgagaaaatcaattggacaacaagaatgacccttgcctaggccatgctcaacgtgcccaaggctaccataaatgggtattttagcttttgaattttttaccagaaatggctaaagtagacttaagcaaaaaatggtaaaagttatttttgctaaaacgggtaaatcttatcttaatcttctagaatggcatgctaacttcctagattattgtgctaaccttcctaggaatacaggtactcaaagtaaaccttgcacaaagtacatacacatagagacaaattacactgcgac

SEQ ID NO: 208483 - DNA, 453 bp, Glycine max
  unsure (1)..(453): unsure at all n locations
gtatganaaacattngtacatgtgatgatgatcactattatgtccaacaacgaatgtcgtgatcacaatgcatacaggataacaaaaagtgcctacaaattacattgaacattgaagattacacatctttaactaataattgttaagcaacaacttcatgaccattgacgcagggtctaagatccaatggcttcatttccctaaaacaatattcaaccaatcaaaatgatatagaataccactcactacctctacaccaaacaagtacgcgacatggaatgaagacatgctaattcacagatagtttttcctcagttcatattcatctcattacaactagaagttacaacatcctagcattaagttaattacctcttctccttatagtgagggtgtatggatagaaacattcccggcgcagtcagcatattctaaaaacaaagcagcaatcta

SEQ ID NO: 208484 - DNA, 476 bp, Glycine max
  unsure (1)..(476): unsure at all n locations
agcttgngctatttaatgtccgatatatgttttgnggncgntatatatgatatctctcagttcagcatcaacatgttctttctctctgataaggaaaaataattctaaagaacgaataaagtaatgctaatctaaaggttaattttttttaaaaaaataatactcaatttattttgaagaaaaatattttaaattacctaataatattttccatttcttcctgtgtttttagttnttatttgttttgacttaaaaaaataattctcctatatttaataaaaaaactacattggattgtatttttgatcctcacaagtattccattccaaagcaattatacttcagacatcatcaaacacaaaaatatgaatatctcttgataaatatttcaatcgtgatctaccaccttataagaaactaatcatatctattaaatngagatactaacaatcaaactaatttagatacacattata

SEQ ID NO: 208485 - DNA, 484 bp, Glycine max
  unsure (1)..(484): unsure at all n locations
tgcattacgtgaactatgatactaagctattattgaaattaaggtatgtcagtaattttgaaattataaaataatgaactctagaaatttcataaaaaattacatatttgaatccttattctttcagaaaatttgaatacttaatatttaaataaaattttcatgggaaaccttaatgaatttctcataaaacttattaatatgtgtattacaccaaaataattatttaatcatatagccattaaatttgtcaatcaacttgacataagattatttcacttgacatctgatttatgttcgagtcctataaatgcaaaaatattaaatattttgtgaaaattttgtaccacctataataattatatctgactcaaacgagattgtctttngtgaaaggtatttatgatctacatacaanataattctaaaacctactgttagaatgaaaatcanatatatctaaactttgtttatgtggtttata

SEQ ID NO: 208486 - DNA, 477 bp, Glycine max
  unsure (1)..(477): unsure at all n locations
agcttgaggatcaaaatgtggtgattcttctatgagagttgatggtgtctggttggatgggaactcangcagatgaagcttttcctgaggcttggcattcagatgcatcagaaactagtggtgaaaacattgctcacactcgttccaaggtatatatttctcccaggctttggtaccttagagttaatgtgattcaagcccaggatttgttgctaaaaaatagtaatgatttgttgctaaaaaatagtaatattggtaatgactcgggaattgttaactcgttggcaagtgtaccaaatcgtcacaagtagtaaagttttcggaagtccgaatgtcgaatccacaaggactttgtttgtacttagattaatgcaaatccaatttanaagcatgagataagaatttaaaatataagataaagaaagatacacgatcaggtaaagaaaagataagatattatagataaaattaaagatc

SEQ ID NO: 208487 - DNA, 440 bp, Glycine max
cggagctctttgcatgcaatggctaaaggacaaggtttgtgaagcaactaaaatgatattcaaatttgttctactcttatttttgaagtctgtgttatcaaaaacaagttattttatcttgtactaacatgttatataaatttcattaattattttaatttatttatttggtaaataactgtttagtttatgcatgtttgaattagcttttttaattaaaaaaacatagcagaaatatatgaaaaagcttttaacagaaaagtgtttttgaatacagtataaattaatgcacatatttgcgtgcacttttgatttagttttacatatgtaaattgtgtaaacatgagtaaaaaataaaaacgaacaatgtcatttaaatttatttttatcatgttacgataattgattttagagagctagaagaccaatttaaaacaaat

SEQ ID NO: 208488 - DNA, 439 bp, Glycine max
  unsure (1)..(439): unsure at all n locations
agctntatacggntatgaaanntatttntttatgttagtggatactaaggatatggtttcatatacttggaacttttaaaattacaaacaaaggttgaaataattntaatgaaaatgtgaaagaaccatataatttttcgttgttatataatttttcttaagaaaatacgtgaagggagaaaattacgctgaaaattcaagttctaatcatgctgtggtaaatatgataataatcaagtcttgaaaatcactttctttattgaacaaattatttaatacacctttcatggatggatgacaaaatgatggtaattaaagtttaatcgttaattaaaagttagattattgtttggcaatttttaaaatgagacttgttggtaaagaaagtcttgagttgttcaagtgatataagcttgcgtaagctttttttttttttttt

SEQ ID NO: 208489 - DNA, 414 bp, Glycine max
  unsure (1)..(414): unsure at all n locations
gtaccaaactaatttttccctattttattgtcaaataatgcaactaatttcaggaatttcacaaagtagtggcataccaggtagatttttgtatgatttccatgcaggcttattggcatcatgctcagtccctttgtcatcattttccttgacaccagatggcgcattctgcagagcattgagtattattatattgaagaaagatgcaaaggtttcatcaatttgagtgaaaattttaaaaattatgaatattattatattcaataaagatgcaaaggtttcttcactgtgaaaattcaaaaatttatgaagacaaacagttccttgttgcactttntcttgcttcttttgataatgcttgtctttttcagtatgaatgaatgtgtatttgggttattgtacctgttattaaat

SEQ ID NO: 208490 - DNA, 454 bp, Glycine max
  unsure (1)..(454): unsure at all n locations
agcttgtcaggaaaaaaatgtttaatgattctttngtttcttataatnataaaaaaaaatntaatactntacatatcatttttaatttcttctaatctctatacatataatttaaacctttttaatcccaactgcgaggactaaacggaattaaaaaaaaatatgcatgaaaaaattaaaagggaatgtttttaaacatagggactaaaaggattttttttttgtaacttttggatgaaataagtaattaatttttttcttaggagaattttgaacagggagagggcatgcaattcttcctgtcgtattcacgtgaaatcaaaaccatgatataccgttaaaaaaaaaaaaacaaaaacaaaaactatgatatcaattatgtaattagcaattacattgcccgaaaagactcanaatatagcatgagatgatcaagactctgaaaacttgaccc

SEQ ID NO: 208491 - DNA, 386 bp, Glycine max
  unsure (1)..(386): unsure at all n locations
cgcgatactatactcaagctngaactctagtgtgtgtgtgtgatgtgtgcaagggtaccatcttgtaagagttatgtagacttaaggtgtgtntgacctattcaactctccccttccttttattgtttattttattgctttggaatgtgtaaaacctccgtccagtcatgctgaaacgggtttccaaacacacacttagccactaacaagtgatatagtttcctgagtgtaagtttaatttagttaataaagttcaaatttcatttccttccattatatcgcttcaaaacaattttgttgacgtacacacttgaatccaaaaacaattgtattgacgcatttttacgtgtatctttgaaagggaaataaagagatctgtcacactg

SEQ ID NO: 208492 - DNA, 496 bp, Glycine max
  unsure (1)..(496): unsure at all n locations
agctntaacagaaacaaggatatagaggtctcacaataatttataaacaaaaatactaatagtgaccaaaggtggaaataataataataaaaaaacaaatccaacaatgagcagatgtaaaataaatggaaaaaatcagatatgcacatttagacaactaaatattaactcacattttgtcaaagtcacatctaattcttatctcgaaattttaataaatataataagaaaaaatgtgtcaagtcaaaggaccacttaacctaaaaagttcatgttggtaagcaaggtacgactacaagtaggttgcagagaatattaaaaactaactacaggtgcagtagtataaagggaagtcaactaggtccaagagataacaaanaacactgaataataaagaaacctatgaaaccttntataaacaaagcaaaagtcataactgngtattttcctactagcacattgtaatgagtttcctctaacctaatcgaaaatacaa

SEQ ID NO: 208493 - DNA, 437 bp, Glycine max
tctaaggaggtgagccttagttttagatgggtgtgtgtagcttatctctagcttctcaaggaagcttctcaaggaggtgagcttagtttttagatgggtgtgtgtagctaaactctagcttctcaaggaagttttctcaaagaaacttctcaaggaagttttcttaagaaagcttctcaaggaagctacctagtctataaatagaagcatgtgtaacacttgttgtaactttgatgaatgaaagtcttatgagatacacttcaaagttccacttctttccttcttttattccttcaatttcgtgctccccccttctgtctttcttttgctccattaaagcatcctcttcaagcttcttatccaacgcaattcttggtggtgaagctccttcttccttggcttattccctagtggatggtgcctcccctatcctcttc

SEQ ID NO: 208494 - DNA, 476 bp, Glycine max
agcttcttatccaggcaattctggggggttaagcttcttcttccttggcttattccctagtggatgatgcctcccctctcctcttttcctttgctttgcgctgcatctccatggtcgaaaatcaccattaaaggaccccattgaagctcaaagatccagcctccatagaagccccacaagcaagtttccatcagctgagttactaggtgtaccaaggcatcaagttttccctcaagcttcttatttttagcagatgaagatgaatctgcggccacatcatggactcctctaaggacaatatcatcatttcttgcactgaattgttgggagttggaagccatcttctcaatcagattcctagcctcaacaggattcatatcactaagagctccaccactggcagcatcaatcatactcctctccatgttgctaagtccctcatagaaatattgtagaaggagttactcagaaatctg

SEQ ID NO: 208495 - DNA, 455 bp, Glycine max
tatcggcctgacaaacccaataagcattcaaaagcctcttattgtttagtaactgttactactaaagacataaatcttaatgttactactaaagccatagatcattgatgtcatttctttttatgatcaataatagttcactcacataaaaaatttcagagggcaatccaaccagacaaggagccatgcaaaacaaggtaaaagtgtcgtgcatttcagttgtgaaaagaacagaagcagcataacatagaatgaaggccagcatcaccacaacaggacctcacaatcagactagacagacaatgggatctctttgatctagagatgccaaaagaagacaggttccagcaatacaagtgttatcaatggcatatcacgcaaaatgacaaaccaataacccagtatatcatataacagatagtgttgcaggcaaatagcagaagtcttattcacat

SEQ ID NO: 208496 - DNA, 467 bp, Glycine max
  unsure (1)..(467): unsure at all n locations
agctnttaaattcattctatgcacccatggtggtccacattgtgtttcgagcatttatattctcgttttgtttactttttataccccctattgacgtgcttaagccattntacttaagtcatttctcgcttaacttaaaaataaaatcaatttccaccgaacgtttgaattgtattatccgttaacttcggttaaaatgaattccgaccgttcggtcgtgccgtaaccacgttggaaatcaaaaagaggtaaaaaaataaatataataatcaaaaaatattttttagtaaagtaaagcgaaaaatcaatcgaacgttttctctttgggatttctcattcttaatcgaattgactaataactaaagtgaaattaaggctaaaatcaactcgcctagtcaagctcgtccacaaaaatagggctttgaagtttgtcatttcaatntctcactaagtaaaatggatcattt

SEQ ID NO: 208497 - DNA, 449 bp, Glycine max
tgctgatatcaactaggcattaatcttcaactaataacttatgcttctagctgggttgatttggtcctttgatggtttttgtgtatattgactgactgccctaagatgttgaacatggttagtatagatacatttccatttgatatgaccctacctacttcaaattaaagggattaccatccaatcttctcactaactattaaaccttaacttgtaaattaacatagagaaatatgataatattaactgctacgcatgttgctttcttcatacctaactaaccgtgtgacctaagacttagtagtatccaaacgaaaacataagtttaatgtaaatgtatttttatgcctacacattattaaacaacatatgtatcaatttctattaaagagacacagaacagaaccctgctatatagccacataaccaagatttcaatggatcctcta

SEQ ID NO: 208498 - DNA, 441 bp, Glycine max
ccactatgccctaatctcattcactctgtttaatcaaagactgttatttttaattaattaagtgatcatttactattgtaaatgcgtgtaaatcgaaagataatattaattaacattcattgcacgtttgaaaatagaggcatataatataggagaggtgaaaatcaaccttagggggcgtatgtggcgtctccaagcgaaactcatgcatgatccaacccgttttgataccatttggagccctgttcctgtataacaccaatgtcttcctcatccctacaacctcacgcgtggcaaggtcaagcaccgtacgatccttccccgttgctttcaatagccagatgtcgtcgcacgattggtccgatatccagttgcatatttacggtcacggaagctgaagaataccattcgtttgattaagcttaccacctctgagagcac

SEQ ID NO: 208499 - DNA, 442 bp, Glycine max
ttcaccagatcatataagataaatgcattcaggctatctgcatatatatcctcccaaacgtcaaattctccgcctatatattcaacctttccatcactggcacgtggagtgaatcttcctccatggtgcaatactaaagttatattatcattcattctacacaatcagaaaccgcaaacatggtcagatattaggaaataaaaaaacctacctcaaaaagcgcgaagacattgacattgtcaaaaaccgcgaagacacaatcaaaaaccaaaaacattgtcatctataaaaacagagcatcataaacgaaaataataaacgatcataaacctccctacgaagcgcgaagacaatgccgcaaatgaaacccctcgaacatgtaataccccaaatcataccaccaaaacaatgcaaacgaattgaatgaaaccaccaacctgac

SEQ ID NO: 208500 - DNA, 430 bp, Glycine max
gttccaaagagttctgagagattctgctgtgtgaagatttgcagagatgcgagttcaaaacggaagccgttctgagaacttgagatgagtttgtgagtgagtgtgagatcctagaggtgaaggagacatcctcaccacttgtgtttttgtagtctttcatcatgttcttctctttgttgtaaaggacgtttccggactatggaaagctaaatcctctgttggatcttctctgtaggtacctgatgtaaatatatttctatctatgtaatgatgtttggtgtgttctctatgctatctgcttttcattccagggtgcttttaccatgatcacgtatatgcatgctttgttagggcattcaacagtgggaattggtctgattctaaagtccttggtagtacgggactaagttgttgtgctatcacaagggat

SEQ ID NO: 208501 - DNA, 418 bp, Glycine max
tctaagtaagctctcccatcttataatgtccaacattgtatgtattgttttggggcatcgtcgtctttgaatgttacactttctaagacggttgcagaaccgtcaccaacgatagaccttatttaaactgaaaaatcctgccaccatagaagtttctcaagcaagctctctcatcttaatgtccaacattctatgacagtttttgggacataaccgtcttagaatgttccactttctaagacggttgtagaaccgtcgtcgtagagtcttcaacattttatgatgtgcgcttcatggaagggtcaaaaccgacttagaaagtcgaatgtaaccgacgtggaaagacacttttctagttgtgaattcactacatgaaatatactatttaatgacggttataatacacatccaaagatga

SEQ ID NO: 208502 - DNA, 471 bp, Glycine max
  unsure (1)..(471): unsure at all n locations
agcttcattagatgttgcatttattatctcatcctctaanggaagaacgatatgcacttcttgcattataaatttgtttgattgtggngctactgttggaattgcgctccttcaacattagcaagatgtttcttggtttcaccatcgactctgtcatatcagcaataatattcttctcatccttagtcaatcgtccagtgtatggatgtccaactaaggacttggccaattcattattgttaatcccacagatcaacttcaccatccaaccttcctctccatgcactggtttcccatgaagcttgaagggacaaccacatttcctactcccagtgtctcttctaacaaattctttcttcctacacttatactgaccactcctttcacaaccaattaacacanatgaagttcttcctctactaccagtatgtgtgtcagacctcataatgattacaacataatctgtttcat

SEQ ID NO: 208503 - DNA, 453 bp, Glycine max
  unsure (1)..(453): unsure at all n locations
cttgctgatttagttttcgtcggcgaaaggatcgaagtgtgtctgaaaataggcaaatttgatcattctgctttgacgaataagaaaattggggcaaatgaagagggtgagaatgagggagaaacccatgctgtgactgccattcctatacggccaagtttcccaccaacccaacaatgtcattactcagccaataacaacccttctccttacccaccacccaatcatccacaaaggccatccctaaatcaaccacaaagcctgcctaccacacaaccaatgctaagcaccacctttatcacaaaccataacaccatccaagaaatgaattttgtagcgaaaaagcctatagaattcaccccaattccagtgtcctatgctaattntctcccatatctactcgataattcaatggttgccataaccccatccaaagttcctcaacctccattt

SEQ ID NO: 208504 - DNA, 425 bp, Glycine max
  unsure (1)..(425): unsure at all n locations
agcttatgttattattgatagaggaataatgaaagttctgataccatagaacagtgttattactataatattgtctgtcaatgatgaccatactaagtttttgtttgtaataagtaaataggatcaatattgattacataggatcaatcctccattactgattaataggaaacaaattgttctaataaattcagtatcaagaataatatcaaggtgtaatcttacacttcccttcaagctggagcatatatgggatatgaaccaagcttggtacacatatgataaacccaatcaaagcctaatatgtaactaagaaaagatatttgaaagcaatcattgtaattaaaattgtaccaaaagtttagcatagttaaaattaattggcatataaatgggaaaagtatatatagcacatganaaaatta

SEQ ID NO: 208505 - DNA, 428 bp, Glycine max
tcttagtttccgatgatgcatatgagtttgtagctacctcatgcactcctctgatgactatagcatcatttctggcactaaactgctgggagttggaagccatcttctcaattaaatttctggcttcaacaagagtcatgtctctaagggctccaccactggcagcatctatcatacttctctccatattactgagtccttaataaaaatattggagaagaagatgctccgaaatctgatggtgagggcaactggcacatagttttttaaatctctccaagtattcatataggctctctccactaagttgtctaatacctgagatatccttcctgatggtcgtggtcctggaagcaggaaattttttttctaagaatactctcttaaggtcatcccagctcgtgatggaccttggagcaaggtaatac

SEQ ID NO: 208506 - DNA, 451 bp, Glycine max
  unsure (1)..(451): unsure at all n locations
agcttccagattagtatactatgctacatctgctccggccaagctgtcttgaaagaaatggaccaacaacttttcgtccgcagaatacgcctccatctttcggcaatacatccgaagatgccctttcggacatgtcgtccctttgtatttatcgaagtccggtactttgaacttgggagggatgacgatgttgggcacgagacataaatccgctaaatccgagaatgggtaattgtcgaggccctcgactgcacttaacctctcttcaagcgcctcaatctttcccttatctttcgcgaagggaacaaattattttacgggtgtgggtgaagccgggatatggcggactatgtttggttggggtagttcatggngggacggatctttgaggtggagcagggggccgagatgggtatctccttcctcatcgtcttgccccggatagtcgtca

SEQ ID NO: 208507 - DNA, 386 bp, Glycine max
tccctcatctgcggactgcatacatatatgctgctcttctctcccgtcattgccgacttccagccggcctcgatctatcatctgttgcaacaagtcctccactgctaaacatgtttccatgttatgtagcttgccgggatgcatcaaacaggaatcttccccatgcccaccgtgggtattcacgccccccttttgtagggcctcacagataaacctccttggggtcgtcacgtccttcaaaggcttggacctgcacgacctacccaactcgacgacattaactgctcctcctccatgattggcgagtgggttcgttttcatgttgggccggtcctcttgaaacgtcagccatccggcgtctatcaaatgttggaccttgtatttaa

SEQ ID NO: 208508 - DNA, 465 bp, Glycine max
  unsure (1)..(465): unsure at all n locations
agctnntttaataaatgtatatattcattttgttctcttaaattaaatacaattaattcattcaatttcacttttccgtaacatgaatgatctgatccagcatcattctcaagacaaacaacaaatcatcgatagaatttttgaggcctgacttggaaatagtctggatatataacatgagaaataaatacgattcaacatgaacatgcaaatatggaaaattttaaagagaaccctagatgtggtatgttgaattcagtacatgatatgcgaggttgttgagaaaattctgtatatataccaagtataaaggctatagattcaataccttcatagtgcagcaaacacagagttgcaatgggctctccaagcatttatggctgataaaaaaaatagcatccaaatcaagtgcaaggtggatgtagttgagggcagaagaatgtgtgctctgttttccatgttttc

SEQ ID NO: 208509 - DNA, 420 bp, Glycine max
tgaatgggatttccccagttatattattactataaagttccatgtcattgataaaaaaaatgtttatagttgggcagataaaaaagtctaataaatgactaataatggcataacacatttgtaccaattctatcgcaggggttaaactaaaatctaatagaagtcgttatgttaaaaattgaactgcacaaaatgtcaaggtatatgtgctatgcaaaagtgcaggtctgcaggatcaaatcaattgtagaactataagtaaatggaatgaaagcaatgtggttccactatgacaaggagagtaacacaaatcctctaaaaatctcatgatgaatggaaataaaaagaaataatgccattgatgaacaaatgtaataaattttttttatcaagacttgaacatataaatactacatttta

SEQ ID NO: 208510 - DNA, 468 bp, Glycine max
  unsure (1)..(468): unsure at all n locations
tctctctccactctatctttaaaactaagaatttccatgaaatgtatcgtgtctaccaacttattttgaaaatattctgcatatccattattgaaaaactcaaattgttaaaatggatatgattgcagaaaattatatcaaaggcaaaaactatgagtctatgacaatcatcaaaacaagaaaggcaaatgtttagataaaatgagttacgtagaataataaagcaaactttcttgtttacaggtgatcatgaagcagaaaaatccccatctatattataaatcaaggagcactcaccgttgttttctataagctttgatgtatttaatctacgagagggcatggaactcaatagtcgttggtaatctggaagcagagactataaaanaaaaagtaacatatagagatgaaaaataatttttttcanaagaataaaacataaaagcaatcagtaaactaaaatatcct

SEQ ID NO: 208511 - DNA, 418 bp, Glycine max
  unsure (1)..(418): unsure at all n locations
gtaatcatactataggtcgtcagggttgttatgcatctaactgcatgtataanagccaagaacgaacctatgaaagaataaagaataatgaataataatactcctccttcctcacctagactctctctctctctctatatctctctctctccccccctcacttcttcttctcgagtagttggtcctctttcgtgaaagctaaccctaacattaagctaataaacaaaaataagattctaaatagaatattaaaaataagataacagttagaatataatttgagtttaatgtctaaataattatagtgtaaaattattttatgctgtcgtttgaacttatcatatatgctgagttgtgattggacaantttataaaaaattttacacagtatataactctttttcatatagaatttata

SEQ ID NO: 208512 - DNA, 489 bp, Glycine max
  unsure (1)..(489): unsure at all n locations
atctctaagtcacctgcggcatgcaagctntcgtgttcaatttcgagcgtctcgttatatttttgttccanaatnggacatccgngtcaaaagttatgaccattcgaatttctcgagagcttccgtagttcaatttcgagcgtctcgatatattatctcctcgaatcggacatccgtgttaaaagttatgagccatttaatttctcgaatgcttccgtttttcaatttcgagcatctcaatatattatgtcctaaaatcgaacatcagtgtgaaaagttatgaccattcaaatntctcgagagcttccgctgttcaatttcgagcatcttgatatattgtgtccccgaatcggacatctgtgtgaaaagttatgaccattcgaatttctcgatagcttccgctgttgaacttcgagcgtcttgatatattatgtccccgaatcggacatctgngtggaaagatatgaccattcaaatttctcgagagct

SEQ ID NO: 208513 - DNA, 411 bp, Glycine max
agccttgccgcatgatatatgtgagggacttatgatcactatgaatgacaaattccttgggataaaggtagtgttgccatgttttcaaagcccgtactaatgcatacaactcctaatcataagttgaatagttaagggtaggaccacttagcttttcactaaaataagcaattggatggccttcttgcatcaacacagccccaatcccaacatttgaagcatcacactcaatttcaaaagatttttgaaagtttggcaacgcgagtatgggggcattagttagcttttgcttaagaacattgaaagcttcttcttgtttctctccccatttgaaaccaacatttttcttgagcacttcattgagaggtgctgccaatgtgctaaaatccttcacaaatcgtctataaaaac

SEQ ID NO: 208514 - DNA, 488 bp, Glycine max
  unsure (1)..(488): unsure at all n locations
agcttgaagggaaagagaagggagcatggtttatatcttattgagcagaacaaagacgcanaacagagcaaggaagtcaaaaatctcagctttcaagaggattntaggtttaggagtaatttataggttcgtagaggtggaggagacatccccaccactatgtaatatgttattctcttcttaaagtataaaaaagcaagcctacaaatcaatgaatttttttattttatttttgtacatgtcattttgttgattntttttagggattatatgtattcttgattgaaggttttttattttttaatttaatgttgtggtaaggtatctatgatatattcactttagtttagtaatgctaataaattattaatatatagtcacattaaattcaattacgataacttaaaattcgttttaaattcaatactaataagagttaatatgttaataaatggagagagggagagaaagagagagaatttatatga

SEQ ID NO: 208515 - DNA, 431 bp, Glycine max
  unsure (1)..(431): unsure at all n locations
ngcaccaacattcattagtccaatacacactcaacaaatagtcatcatccatccacaattccaatcattcatgctcaatatgatgcattcacctgacctcaactctcatatgcaatatggtaccatccccaaggaaatatccaatgcgtgtccacacgacactctcacttatgaaaactaggcagtaagtgtcgaggtcaccctgtcatgcacaggcaacacccctccccccccccccccccacggtgatcaggctgagtcaaaaggagttcctaaccaaatgacatgccctcaagtacaaagattcctcctcatgagaaactacaagtacttactgtcaaagtgtatactatttaccatgtataatgatgatgaaacattggcccatcaattgcactgaccatggattattaaagactctatttctcccc

SEQ ID NO: 208516 - DNA, 475 bp, Glycine max
  unsure (1)..(475): unsure at all n locations
agctntcatctagccaagattatacaaatgtgttacattataacctaacggtttctaattatgtgggccatcaaatctatcatgtgttgacagtaattgattagcccatgaatctcctcgggggccttacacacttcggccatggcttttgctttggctaatagacgcgggaggtcttgacttccattcaaggtcaaggcgaacctatccatccacatagtcgcttcttgatgcaatgcatcaatcaccctccctcttgcttctttttcggcgtacacttgtgcaaaatcctccactagcttttgttcatgggccatagactggttcaattcttccttgtattgccctataatatctagcatgctntgctctgtggcttccaagtgttgagccaaactcctcttggatcttgcgcacgcagctaactcttcttttaagatcatgccatgcacccgtgaccggtctctttcctctc

SEQ ID NO: 208517 - DNA, 450 bp, Glycine max
gtattcaagacaaagatattcaagatggatgatcaagaaagtttctagagtcttagaaagagtatattaaaataggaagggaattcctattgaagtagcaaaaggtttggccaagaaatttaagttaaaaagtctttttcaagagattaactctttggtaatcgattaccagaggatgtaatcgattaccagtggccaaaaactgatttacaacagctattaaaatttgaattcaaaatttgcactgtgtaatcgattatacatatatggtaatcgattaccagcagttattgaacgttttaattcaaattttaaagcttgtaatcgattacacatatactgtaatcgattaccagagaaaattttcagaataatattctcaacagtcacatgtttttacttggttcttgaatggccatcaaaggcttatatatatgtgacttgagacac

SEQ ID NO: 208518 - DNA, 337 bp, Glycine max
  unsure (1)..(337): unsure at all n locations
tcangttactgaagcatcttcttgtgattttcttcggtgagccacagggaagtattgctttcaccactgttgttatagttccaagaaaaggtgtgccttcgtcgccttaatcattctcttcaacatttccttacagctcatatttgattctagaaggactttcatttctttgattcacagaagaaggaaaagcgncaatcgnctacgggaattgtgttagaaaagacactgngttatcgtgtgtctaacctcaatactagcgtaagattgtttctaattgatagaacaagaagaaaaaacatcatatgctgtggcttgcttggaattacctattcat

SEQ ID NO: 208519 - DNA, 421 bp, Glycine max
agctttatacttcgttttaacaggcaatatatacagaggtgttgttctatatttatataatagcctgaatcaagtcagatttggcgcttaatatctcatggcattgaaacttgccacctgtcattataagagaatcttgctcaatgtaatattgtaatctcaatctgcaaattgctaaataggctgtctgcatgccaatgatacttgattgagctatgtatgatgaacatctggtaactttaaacacctcattaacacctattatctttctctccccatcacatattatcatttaccatagctatatctccttctcttcacttctatttctcctgctacgtgtcatctacagcggacatgtccactaacaatctctgtatccattccctattttcttctctgttcttcaactgtgaacctg

SEQ ID NO: 208520 - DNA, 442 bp, Glycine max
  unsure (1)..(442): unsure at all n locations
ggactacaannnacaataagtgaaatatacttgtagcatagaccatacaaaaatgtattagagtgttaaataataatttattttcattgcaaaatctgttatattaaaaaacattatttacataaaaacataattttctttatcttctaaaatcttccttcttaagagttaagatacacggaagcaaacccagccacccaggcattatgcatgcggtggaatgggacgtggacacacactggacagccagctaatttaatataaattgcgaaaagtgcttttgaaaaaaataatgactntataaacgctgattacttgcatcaaactcttgactcgagtcttgttcaaataagttagcaattgggtccaggctctccgaagaggaagaagctgagggagagcgtacatccaagcatgtgaaaccggttgggcattcatctat

SEQ ID NO: 208521 - DNA, 354 bp, Glycine max
  unsure (1)..(354): unsure at all n locations
tgcttantagatgtttatcggcaacgaaaatattctctttattttgaagncgcacaaattcataatatttaatttattgtattatgtaacactgtatattatttcatgattgtacattcttagctgagaaatctctgtttttgtgtcaagttttagattcttcattcttttgttacgtgttgtgaatggaatgcatttaaagtattctctcttatctggtaaactctctcacaagactataatacttggtcataactaaaagagatatagcgctttgactataatctggagtggatgtctaatattttaaatttcaaggtggcaatgtaactaacttattatatctctatgttt

SEQ ID NO: 208522 - DNA, 460 bp, Glycine max
  unsure (1)..(460): unsure at all n locations
agctngngcgaatcaaatcactcctgcantttatctctagcatgcattctttctttcattacccactcctcacgttnggttttttagggaaaaacaccataacaaaatgcaccccaaggcatccctatcgcaccagatccaaatctagaacgatgggtgatcaagaggagacacaggaacagatgaaagccgacatgtcggctctgaaagaacagatggcttccatgatggaggccatgttaggaatgaggcagctcatggagaaaaacgtggccaccgctgccgctgtcaattcggctgccgaagcaaacccaactctcttggcaaccgcgcgccatcctccctcaaacatagtaggacggngaaggaacacgctggggcacgacggcaaccctcatctgggatacaaccgagcggcttacccttatggattgtcgcccaactactcaccacccgtcct

SEQ ID NO: 208523 - DNA, 404 bp, Glycine max
tcttatcgaaggcaattcttggtggtgaagctccttcttccttggcttattccctagtggatggtgcctcccctctcctcttctcctttgccttccgctgcatctccatggtgaaaaatcagcattgaaggacctcattgaagctcatagatccagcctccatagaagctccacaagcaagcttccatcaagtggtaattagagcacaagagcttcaagtaggtgctccttaaacctccattaatttttttttctttaccttctcttccattgttgtttcttcatttttctccattgtatctcctcacatgtcttgttctaaatgttgttaacatgaatctttagagttccactgattaaacttgctatagaagtcagatttgattttctatggttcaaaattc

SEQ ID NO: 208524 - DNA, 446 bp, Glycine max
  unsure (1)..(446): unsure at all n locations
agctngtgggtgctccccttattcctctttatgttccatcagaccatactttgactcgccccctcaaagattgttccattgtaagccttaccaatcatctatatattaatttctctttgaatttaagttgaataattcttctttgaattaaactagaatataagaggggcgagtctcataaaaaattacaaaaatcctcttttatattatttccatccttcataacaaacacaaccttataacatataaatctataacggtgatgaataactcatataaactacatcacgcaattatagtttgtgtcttggttaattctctatacatatgaaccttgagtatgtaagtatgtttttaatgtaaaaacattntaggtaattttataagagtgatgttacattgtgttatgagaaatgtatcacgaagttctgtaccgaacatattac

SEQ ID NO: 208525 - DNA, 433 bp, Glycine max
  unsure (1)..(433): unsure at all n locations
gttcacactgatttccttggaaacttctttatttgtgctttgcttanacttagagatttatgttgtcatcaaacaaacgttcgcaaaccattcttatcttgtggtgtacgaaagtgatttctttcacttctcacgaaagaaattcccagcatattcttggcctctttgaagcttactgagctaatggttttggtcattcatccccgtgttattaaattgatttcattgaatttgatatggaatatatagcaataaacttaaaataatcatccgtaaccgtaagtccataatgttgggcaaatgaatgccagaacatatgatccaatgagtcggcaattccatgtctaaacaactagaaagttcctttcttcatattctcctttaagaaaagaattcaaatacaagatgcagtcataaagtaaggatggcaccc

SEQ ID NO: 208526 - DNA, 477 bp, Glycine max
  unsure (1)..(477): unsure at all n locations
agcttcactaggctctctccctcgccattaacactctttgnnctgcccaatatggttctataattatattgatttagctcgaggaatgatttctttttatctctatacagaagctgtttcaatcccaaaaacaaatgagaacattcgcctgctctatgacactaaaggccgattccgtcttcattccatcagggatgatgaggcaaaggtactttntatatggtttatattgaatattgtgattcatttgtaggctaggtgccattatactattattgatgtagctttgttgtgtttagttatcttatatataggctaacaaatgtgttgatgctaatgaaccttttaaatgtcaatttcaggacttgtatagtcttttattttactttattctggagttaccaattttcctacttaatggttatggcttacaatatattgcttgtatgttgcgtaaatggcacttcaagctctgca

SEQ ID NO: 208527 - DNA, 444 bp, Glycine max
taacattttcacacactagcattaaagttcacaaaattctaacaatatcaattcaactccaaatgacaccaaaattgacattgataggaatgctccataataggtataccctaacaacaaaaaatcttcataccaaaattcaatcaaaatatattttatgtacattccatataagaattgaatagcatgacaaaattacataaataacctatattaaatttgtgaccatgtgtgtacttggatttgtgttcttttaatcttatcttcatctttttttatatctttttcttttattttataaaagttacacaaatatttttttctctcttttgtttcacccatctcttttctctctctcacacaacttttgtctcttttctctctctaacttattttcccatttcttttacttttatttaaaaaagatcatataaaaattaattt

SEQ ID NO: 208528 - DNA, 384 bp, Glycine max
  unsure (1)..(384): unsure at all n locations
agcttcagtnttcaattacgagtctccttttatctctatgggacacaatcggaaatccgagttaaaagttattgtcgtttgattnttcttagagcttccgttttcaattacgagggtctcgatatcctatgggacacaatcggacatccgattccaaagttattgtcgtttgaatttgcccagagcttcaatntttaattacgagcgtctcgataaaatacgggactcaatcaaacatcctaattaaaagttattgtcgtttgacttttcatagagcttccgtattcaatttcaggcgtctcgatatattaaacggctcaattggacattccgagttaaaagtatttgtcgtttgatntttctcagagcttncgttttcaatac

SEQ ID NO: 208529 - DNA, 452 bp, Glycine max
  unsure (1)..(452): unsure at all n locations
tctatataagctgaaccattgtatcaataaacacaagttgagttttattcagaaaattagagtttatctcttttatcttagtgagagtgattctcctaaattcttgagtgattcaagaacaccctggctgtatcaaaggactttcacaacctttgtgtgttgccctcgctggaaagagtgattctttccttcctatcatctccacccttgttctttcaaaccacaattccagataatccacctctgcccataattatctcgtggccataactcccattttatgcactcaaattaagtgattcttgagcctaaattgactttcaaaacgagacctttcacctcgttctgaaatcacctcattnggagccctgtagcttcagttattgccatttctatatttctgtccagccaccacttaacctacattgtaccatcccattcatccattttat

SEQ ID NO: 208530 - DNA, 459 bp, Glycine max
  unsure (1)..(459): unsure at all n locations
caagcttatatttgatattgaatattcttatctaaacataggagcacaaactcattatagcaatcaaacaagacaaatgaataaaattntgttagtcatcatataaacaagttaaatgaaagaaaaaatttcaaccaatcataatttaaaagataatggttttgatgttacctttttcatgattcaagtgcttagatctttgaagatggaagtcagccttttgtttttcttacttaaacttcttgagagatgttctcatcactttcataatccttgcatggaaggttgatctccttctctaaaccatcggatgagtcattgtcatcccaagcaatatacgccttcttagatcttctttctttatagctnttcttctcattcttctcgggccatgacccatttgaggggcagtttgcctttatgtgaccgggttgattacacttatagcatttaagtgtt

SEQ ID NO: 208531 - DNA, 370 bp, Glycine max
  unsure (1)..(370): unsure at all n locations
ntgatggtgttgagaagaaatcacatgtttgtcatcatcaaaaagggggagaatgtgaatgtatgtatacatgattttgatgatgtcaaaagaagaatcaaacaaggctcattttgcttcaagccttgcctcacaatgaaaggtttcaagtcattcaaggcacatgtaatcgattaccaatacatgtaatcgattaccaatggtttgaaagtgtgtaatcgattacacatcatatgtaatggattaccagagactctgaacgttgggaattcaaattttaaatgaagggtcacaactgttcaagaaaaacaactgtgtaatcgattactagaaaggattttcaaggaatatcgccaacagtcacatcttt

SEQ ID NO: 208532 - DNA, 428 bp, Glycine max
  unsure (1)..(428): unsure at all n locations
agctngcctcanagaggtccaggaaggatattgcggccgaaggaactagttccgctcctgagtatgacagtcaccgctttaggagcgccgtacaccagcagcgcttcaaggccatcaagggatggtcatttctccgggagcgacgcatccagctcagggacgacgagtatacggatttccaggaggagataggtcgccggcggtgggcatcactagttacccccatggccaagttcgatccagaaatagtcctcgaattttatgccaatgcttggccaacagagaagggcgtgcgtgacatgaggtcctgngtaaggggtcagtggatcccatttgatgccgatgctattggccagctcctgggatatccgttagtgctggaagagggccaggagtgtgagtatggccagagaaggaatcggtctgat

SEQ ID NO: 208533 - DNA, 356 bp, Glycine max
tctcccatctcgcttgttccctagccctctggttcaattctagtctcttgaatgcttccattgagtggttccaaagagcttggatacgtgtgcgcgcatgtcctcactactttgtccaatctgtcaaacccacttgttccttgagcattaaatcatccataaaatgatggccacaataaacctcttaacattcctctctacccactctggcacatgctcctcatgagatggcaacattgagactgagaagccatacttccgccaaatgacttatgcattcatacacctgaataaacaatgtaacaaggtctccgcctactgatcacccctcgggcactcatctgcctcgcactggg

SEQ ID NO: 208534 - DNA, 434 bp, Glycine max
  unsure (1)..(434): unsure at all n locations
tttagtttaaaagacttcctctnttcttctttntttttaaaaaaaaaaagggtatgccacatgtctccttttgagtggagccaaaagggcccactttttctcttgatgtgactcatactcagccgcaagaagagaaaaatctgaccttttgaaatgctaaaatcctacctcggtttgcatgttgtttctctggttccagtccctcgcgtttctctgcacccgtcggggccagttttcgaaggtaggcatatatatatcaaaacgctcagaatgaaaccccgagcgtggttcagaggttggttttgttaaattttaagttgcacgcaaaatngataattttagactaattaatngagaattaatctataactatccagttatgggattctcttcgtaaatagcctaacccgtgtatctttcccccatatacctac

SEQ ID NO: 208535 - DNA, 399 bp, Glycine max
  unsure (1)..(399): unsure at all n locations
aaatataattgaaggaaggacccactaatctattagctaaatttggccaaaagtatcatcgacaaaataattgatatttcacacatatactgtaaacaaaaatatggtcggtatatattaatgtatatatcaatgataaaaaaatatttcgaattagtgtaagtaacaatattgaataaaaatttactgttatacactgtgaaatattataggggtaagaataggataggttgaacaaggctttcattaaataagcctagtctatttaaaaaacttaagccctgagcctagcctactacgtgtcataagctntattnttaggcctcacttggcctagttgaaagcctagatnggtctngtagcatgcttaaaggcctatttcataataaatttattata

SEQ ID NO: 208536 - DNA, 480 bp, Glycine max
  unsure (1)..(480): unsure at all n locations
gcttacaatgaccttgcctgataggttttcacattggtcttcacatccttctcttctaagtcccaagcccttcccacgaactcagttgagaagccagtgaagattccattggaaccagttaggtaaaaatcagtgaattcaccagtcttgtgggcttttgaagtgtcacctaagaacagaacaaccaactcagtgtcctccttgttgtaccaccaggttatcacaccaaaagggagtgccaaagcatcacccttcttaattgcaaccaccttctcttctgattcagggagcacaattcctgcaactccacttcctgttttggcaagttcacatttaaaaatctgcctataatcagaataatgaatcactacaaataatcagaacggttcctcctctcttgtaatatttatataatctgtatggcaaaaattgggataattttactcaatgaactntactgtttccagagtggctacttat

SEQ ID NO: 208537 - DNA, 347 bp, Glycine max
  unsure (1)..(347): unsure at all n locations
tctaatgacaaagaccaatacatgcaactgtgaggaaatgattcttttggaagaggaattccattnttataaagatgagggtttccacaaaatcctttatatgcacttgggaagggaaaaaaaaggtttggagctgattggattctggaagggaggaatatactatacagtagcaatagggagacattgtctctgtttaggagcttangtttaggaccacgaagtgaagttattaaacatttgtattagcgtcttcgatccttttggttttattattttcaatagaaaattttggagtacaagcaaaagttaaggtaagtgcattttggtcgctttagtttattatg

SEQ ID NO: 208538 - DNA, 490 bp, Glycine max
agctggcttgtggagcttctatggaggctttatctttgagcttcaatgagggcctttaatggtgattttccaccatggagatgtagcggaagacaaaggagaagaggtgagaggaggcgccatccactagggaataagccatggaagaaggagcttcaccaccaagatgagccttggataagaagcttggaaggatgcttcaatggaggaaaagaaagagggagagaaagagagagggggaaacacgaaattgaaggaataaaagagggagagaagtggagctttgaagtatgtctcacaagactctcattcatcaaagttacaacaagtgttactcatgtttctatttatagactaggtagcttccttgagaagctttcttgagaaaacttccttgagaagcttctttgagaaaacttccttgagaagcttctttgagaaaacttccttgagaagctagagcttagctacacacacccctctaataact

SEQ ID NO: 208539 - DNA, 450 bp, Glycine max
  unsure (1)..(450): unsure at all n locations
tgatcaagccaaacaagctntatttgcaccttcttcggttccttctacttcaactacttcatccctagttattccttcaataggacttatgatagtatccaattgaccataaatggccctttccaatttgcacattcggtagtatctaaccgatatagatgaccttcccaatttggagaccacttaccacattctaaatcctttgctcccaaaggcataatcgacttccaagctatgtcacattcgctaaaacattttagctaaatgtgattgttatatgctttttcaacttttcttttgttaagttgaatctggtcaagtgccattagtcgatcctcatttaattcttctaactcatcaagcatggattattgatagttatcgaagcttaacatgttttgcttggctactctcaaagatttcatgttgatttctaaaggaaaaactact

SEQ ID NO: 208540 - DNA, 476 bp, Glycine max
  unsure (1)..(476): unsure at all n locations
agcttcatcaaagtaaggagggggggtttctctcttttgaacctggatcttgttatctttggaagctagacttcgctgcatgttgtgttaatgttcaaaattttgtagctacttccttggctgaactgtatgatatgtttttttgtcttgagattttaaggttaaaaataagttctttgggtgtcaaaacttagggttagcttgaaaattcacttaaatagaagttttctagcaaaaagttatgaacaaaaacaagtttaaggatatttataggattaaattgatcttgaaactaaaatgattgttatgaatatatggattgtttttctaaaagatttgacttcaaattttaggtgtgaaaatatagggtatcatataaaattcatgaaaaaccgattcttggagcacttataaaatngaatattagtttaggagtagaactttgtaaaattgagcaacaatttaatttagacatt

SEQ ID NO: 208541 - DNA, 426 bp, Glycine max
tgcagaatggctagacatgatacatgtcagggtttggtttggttcaaggataaaagggatgccccacattatttccatgacacaaaaatgcaaaaatgatgatttggaaactttatgcaaaactggtcatgcatgcacctatgcggacactcaagtgtcaaatttttatggtcatgtgatgctagggctcaggattcatttcctctattttaatcaacccaatgtttccaaaatatgttcttttatcaatttgtgcattcatccgagtccatttcgggcgtccgggaaaatcttcacagcattcacccttcatgtgtatacacattgtttcaaaagctagttacgatcagtgaattgttccaaagaaaagttggaaatcgtctcttttcaaaagcatggtggtctttcaacttgacaacttatttt

SEQ ID NO: 208542 - DNA, 468 bp, Glycine max
  unsure (1)..(468): unsure at all n locations
agctntaaataggctctgaattcgtgactttgtgcttagtgccaccctcgcgcttagggcgagtaagtggatttgagcttagcgtcagtcgtgtgctgagcctggctgaagacaactgttgcgcttagcgcatttatctcgcgcttagcgcgcagccttgatgatgatgccctactagattcttctattgtgctaagtgtgatgaagttgcgcttagtggtggatgcgcgcttagcccactgatgagctaagcttaactgtcacttttagcacttcatgacttagcctcattttcacctgaaattgcacatatttcatcattaaatccaatggacatattctagagacaactttaaccttaaaacaagaattatttacaaaaatcactacaaaataaccaataattgggaaactatacaagttttggaaaatgttttctacataaaagttagtcgtataaaacgacta

SEQ ID NO: 208543 - DNA, 464 bp, Glycine max
  unsure (1)..(464): unsure at all n locations
ggtcaaaagggaagcaagttaaaaactctgttcatagcataaatgttgtttctacttgtcagactctaattttgttcgggtccaaaaaaagaaagaaaaagcatgaaagaaagaaaacaagaaaaaacagagaaaacaaattaaaagaaaaaagaaaaaaaagaaaacgtataaaaagtgaaaaagaaaaaaagaaaggaaaaaaagaaagaaaacatgcaaaagaaaaaaagaagaagataatgtgaaaaaaaagaaaggaaaaaaagaaaacgtaaaagagaaaaaagtggatgaagaagaagaagaaaaagaagaagatagatcaaaaagagaaaaaatatatttattgtgtgacctatttggctctcatagggagcccattangtcaacagagatgggacaatgcatataaagcgaatatgaacgtctctgaaatatattgcacagatcagcacggattc

SEQ ID NO: 208544 - DNA, 355 bp, Glycine max
catacgagggaccctcttctccttatgatcaccaccatttgaggatcatatctgacacccttgtacccatggttcaacccggttaagcatcaccctttggactccaagccgagctgggaaggatgactgctcaagatatcatggaggctaaggctctggctgctttcatgagtcacagtgaatctgaaagaagacgcagagagagaatcatcaaccttctggccaagcttcgcagttggcttcctaacactaccaaagtaagattatattaataatgagctttaattattttatatacactcttaatgtaaaaaaagatctactctcactcaatatcagatattacttgtaacat

SEQ ID NO: 208545 - DNA, 423 bp, Glycine max
agctgcattaagatacacaattgtggcacctttcttttttatgcctaaataatacaaatcattcatgataagttacaacacgatgggtctgataactatgatcatacacttatagaaagtaattactgtgttgacttccaccaaagatgagaataatattaaagatatgatgcgtattcttgtaattcaacctcatggaatttgcaacgtcttattggcatatagtagtgaaataactttacttcatgctcaatttgattgtttttttctcttggttgtatacaggatacattacaaaataaatgtagcatatgtgatcatgctatgttgtagacataaaaataatttattcagttattaaattcataccatctgctaaaatctaattaaacagctgaataaagcttcatatgtgaagatgcg

SEQ ID NO: 208546 - DNA, 400 bp, Glycine max
  unsure (1)..(400): unsure at all n locations
gatctgtatggngaactgcanaagaacatanaccacagactcttacaacaggtgcagatttctgatttatgccaagctaagttactaggttgaccaaggcatcaagtttcccttcaagctttttattttcagtagatgaagatgaatctgtggccacctcatggactcctctaaagacaataacatcatttcttgcactgaattgttgggagtaggaagccatcttctcaatcaaattcctagcttcagcaggggttatatcaccaagagctccaccattggcagcatcaatcatactcctctccatgttgctaagtccctcatagaaatattgaagaaggagtcgctcataaatctggtgggggggacaactcgcacacaatttcttgaatctttcctg

SEQ ID NO: 208547 - DNA, 408 bp, Glycine max
tgaatgtctgcccaagtctatttccatgttttttcttctccaataacaagtcaatgaggcatcggtccattgtgggtgtccatatatgttctagtacgatcagtgccacttgagttgcgacttcctttcgtttcaccttcagaaagatatacgaccacagaggtaactactcagttctccaaagatcttatggcctataatatgaattataacatattcaagatatgacaagtgcaacaaggggatcacaaatacaatctacccatgctaattatgtatgtcattcataaattaacacttctcataattagattcaaaatataaggttctaagaagtaatacattattatacctacataacaaacatgtcctaggtatttccatgctataaacgcttgaagtgactat

SEQ ID NO: 208548 - DNA, 488 bp, Glycine max
  unsure (1)..(488): unsure at all n locations
agcttgtaggattatggagtacttatcacatgtggtactaggnggcggncgggcaatggtgcacaacaagttttccacatccacaaatcgcgcataaacccaccatcccctgttgcccacctccaactgagctcacgtactcccacgtagcccatatcctcgtttctctcaacaccgggtccccatcaatcctcccaatctttccccaacatccaagtaactcaacattcaaacaacacaaaccatcacagccaagaaaacagggcaaaggcagaaaattctgcccaaaacaccaaccaaaatcacagcttttctcacttaaaggccccagtaacaattccttcgttccaattctttaaccgttggatcgactccaaacttttactggaagtctctagtacataagcctacattgtgaccgttgggatctactagcaaacatgcagaactcattctacattactctttccacaaccagcaaatacata

SEQ ID NO: 208549 - DNA, 427 bp, Glycine max
tcaagataaggccaaacttccttccaaaatctgatttcatgcttaaataggtggctttgtgttagtcgatgaatacgactaatttttgtgtataaaacctgtgtaaattgtaccatacttccccagtttatggctattttgtagcgttataagtactttatgttaagtattggtataaaatacttaatacttccatcgtgtgtgcttaataatcatatgctctcaaattcaggttaattatgcaactctgaatagagctgattttaaccttatcactaagccaatctgttagctcatctaactgtcgcttagctcaacgtatattctagtagatgatgagattttctaactattctaatgacacctcttatatcctctctttagcatactagcatgctataactgataaaacattgtgcctattcga

SEQ ID NO: 208550 - DNA, 478 bp, Glycine max
  unsure (1)..(478): unsure at all n locations
agcttcctcggagccattcctgttattgtttctattggaaagttagntctaccagagggacattactcttaaagcaaaaatggcatataacctcctcccataaatacaaacaccaatgtaaatttagagcaagcttatgcgcatatttccttacatacgttctcttgcacaagacatttaaccgaaaaagtgcacccatatacaatcaaggcagcttcgttacctagattatttacacgtactgccaaggtgtatttgttacttacatcacacacatctccttggctgaatatacatacatgcatactcaaagcattttggggtaccaaaaattgcacatgtgcacatcttggtatttctaatacctatatatacacaaacttcatgatgaatcttgactactcttacaaaaaggtgctacacttcatcccttttttcaagttntgctacctaaagccgcatgcaaatacaagcatat

SEQ ID NO: 208551 - DNA, 380 bp, Glycine max
agcttctcggctcatgctgggatcgcctctatttcaacacccgtgcagcctaaggcacccacccagagggaagctccccaagttccaactccgaacacggctcgaccggccggtaattccaacacgacaaggaacttccctccaaggccattgccggaattcaccccgctcccgatgacgtacgaagatcttctaccatccctcatcgccaatcatttggccgtggtaactcccggaagggtcctcgaaccccctttcccgaagtggtatgaccctaatgcaacttgcaagtaccatgggggtgccccggggcattccgtcgaaaaatgcttggcccttaaatacaaggtccaacatctaatggatgccggatggctgac

SEQ ID NO: 208552 - DNA, 88 bp, Glycine max
gtcaccaccatagagagtgccttggataagaaacttagagatgaagcttcaatggaggaaaagaatgagagaggggggggggggagct

SEQ ID NO: 208553 - DNA, 450 bp, Glycine max
  unsure (1)..(450): unsure at all n locations
agcttgattagaatgcatattactttgttcagctgggatatctaagaaaatatttatattttgagtttggtgaactttgcaatgactctgttgatatattattatgtagttgagatgttaactagatcgaaactcagttgtgtttgctggaataatgtatttttttatacaatgaaaagaaatttacattgatttcgacatgattctcaaatttgatagagttggtgtgtgtgtgcgtgtgcgtgtgcgtgtgcgtgtgtgtgtgtgcgcgcgtgtgtgtgtatagataatatgtatgcttaagattaaagaaaaaaaaaaaagtataatgtgtgtgtgcgtgtgtgtgtgtatagataatatgtatgcttaagattaaagaanaaaaaaataagtataagactgtagtttttatggacacagctgtgaattggaaaccattttaatggt

SEQ ID NO: 208554 - DNA, 413 bp, Glycine max
  unsure (1)..(413): unsure at all n locations
ntatttattacatgacacatatccgccatacaaagggttcttaatcccgaataaagtgccattaactaatgcataatgcatggttcttaactaccacctcaacaacaatacaatgactctacaaattaatacagtgtgattctctgctacacgtctcaactcccgctgttttatgtctcagcctctcaaagacaactccatctctcattcacatgctctcttctcccatctctaactataagtacataataaagagttgtagacaaattatagaccctacccttctcaattcatcacagccttatccccttctttctcaactttctgtgattcacaaccatataaccctcttaccccatcccttcattcttagtagtgctacagtagtgtccatggattnttccattccttgg

SEQ ID NO: 208555 - DNA, 495 bp, Glycine max
  unsure (1)..(495): unsure at all n locations
gatccttaagtcacctgcggcatgcaagcttagcatataaattgtaatgtctgatttccacattctacaaaatggacgtcgtagaaactaacgtggtaggtgacgtgatgttagaatgtatacgtcaattctcctagtcagtcctgacactagagcacagatacagctccttcaatagtcaaactattggaccgacaggttattaacaaatatttatatatttgaatcttaatgataatgttatcatttctttatcaagttgtaagtacatacttctctactagcaatgaattatctataagcaatcgattagattatctataagtgatgaattatctattagttattatctacaagctatgaattatctaaaagagttgtaatgtcaccgtaacaactcctacaatcaaggacccgaagctctcatccaacgctataaatacagggttctaactccattttttaatntcattctcaactcactcacatacttac

SEQ ID NO: 208556 - DNA, 439 bp, Glycine max
  unsure (1)..(439): unsure at all n locations
cttgacttccttntagctgggaacaggtggcggaacatttttcattatgtttggtttcgcactctggacttattttgaatttaaaattaattttagattaattcttttatgtttgatttcatattattttaaaattaattatgagttcataattcattttaaattaaaataattttaaataatttttgtgttaaataaaaaaatttataataaattttagttttaatttaattttataaattttaaaattaattttaactcaaatcaattgtattcaaaatcaatttcatgaacacttattcaaaaagtcttattatatttaatgaacagtatataatatttcttttgtctacttctaaacaattgtgtaattaattcacattgttaaaaaaaatattaatttaagtaatgacataaaatgtatcaataaattataatt

SEQ ID NO: 208557 - DNA, 386 bp, Glycine max
cagtatgatgtagctccatgtggagcttgtaggccttggatcttcttcattaatggagtcctttgcttcttgaagatcatggcagcagaatggagaaggaagaaagatgattggagacgtcacttcaaggagaagatgagtcaagaagaagctcaccatcataggaagtcatggataagagcttgaaggaagaagaagatgagtggagggagaggaagagaaggagcacgaaattttgtgcctcaattgaggtctaaaatttgaagtgtaattctcaaatgatcaaagttgaaaaaatgcacacacatgacctatatttatagcctaagtgtcacacaaaattggagggaaattgaattctattcaatttacttcgaattgaaatg

SEQ ID NO: 208558 - DNA, 441 bp, Glycine max
cgtgacactatgatactaagcttgtcctagaagaaacacaccggatattagccttccatattgtcaaccaataacagaaaacacaattgaagctaatggcagaaacgtaaatgaaactggaaatagaaacgagaatgaaactaatgcagaaacgtaaatgaaactaatggcaacagaagaaataaaaacgaaattgcaattagaagtagagaatggaaaaatgcattacgtgaacagtaacaataagctcagaaaaacgtataaccctaaaccctatgctttgaataatagtctaacagaatagccttgcatgaatcccaaggctgctatttataagggtcactcaaagtcactgggccctattacaatatcctggcccataacgaaataaacactgaacaacatataataaaattgcaaactcctaattaaaaattaact

SEQ ID NO: 208559 - DNA, 270 bp, Glycine max
  unsure (1)..(270): unsure at all n locations
ctcaagcactcctctaatgactatagcatcatttctggcacttaactgtggggagctggaagccatcttctcaattaaattcctgactttaacaggggtcatgtctccaagggctccaccactggaagcatctatcatacttctctccatgatactgaggccttcattaaaataatggagaaaatgcatctctcaaatctggtggtgagggcaactggcgcatanttttctaaatctctcccaacattcatataagctctgtccactgag

SEQ ID NO: 208560 - DNA, 456 bp, Glycine max
tgaatgtgtgtatcccaccatcttctcatagtagaacactctttacgtgtccactatcattgttatcatctccttcttcatcattaggggcgctacttgaaatgccatatccctccacctttgggcgtattctttgaaagattcatactcctttttacacatgttttgtaactacatcctttccagatccatatcaaaattgcattgatactgcctaatgaatgcaatcattatgtccttccaagaatggactcaggaaggttccaaattagtataccaggtgatggctgccccactaagactttcttggaagaaatgcatcaataagtttccatctttggcatatgctcccattttcctgcagtactccttcaggtgattcctgtggcatgtagtcctcttgtacttatcgaagtccggcaccttgaactttggacggatgactatgtcatgcac

SEQ ID NO: 208561 - DNA, 443 bp, Glycine max
  unsure (1)..(443): unsure at all n locations
agctngcattcctctcttcctttaaacttcttttatttctatttatctnttgctttaaagaagtttattttgatttgtcttttgagtaattgatgttaagggtgcattgttaatccaaaaagaaagagtgatagttcaattggggaatagtctttgcatcttaattcaaccccactttttcttaaggtaactgaggccatttgtccaacatcctattcttgataactcacttctctctaaaaagacaaaatgaggtcacatgaacgtctatatttttacttgaaaacacagtcaatcaaatgcctttttattttttattntgaaacttatntttttntttgaaacttatttgttttttactcgttgttttatgacacccccaccaacgtgcaagatgagtaatctctgattgaacagtcttggaagtcaacactcaggagcgc

SEQ ID NO: 208562 - DNA, 439 bp, Glycine max
gcttatagtgcgggtctgggagacgaaggtcaagtggtctcattatacgaagatgatgttccaagtacattggatttggtacgaccttgccctcctgatttccagctggggaattggcgagtggaggagcgccccgacatttacgtatcgagcataatgtaaacctttacggttttaaaagctctatagttgggcctaggctttagagtttttcttttggttaaggttttgtgtattttgttttttttttataatacaaggatctttcttcatctgttcctacgtctctacccattctcatccatttgcatgtttacttctttactttttaaaacggcagatccgatgacgagtccctcgaatgtactaatacctgtgacccgcctatcaacttcgagcaagaaacgaatcaaacggaagatgaatggaacgaggatgt

SEQ ID NO: 208563 - DNA, 380 bp, Glycine max
  unsure (1)..(380): unsure at all n locations
ttcttttgcatggcatatgcagaacgaagcacaccaccgcgccactccttccgcgtgtcgaggcttaagatgaatcaacgcaccacgttgttgcctggtgatgttntcaaattttccattagggttcgtctcaacactacacctgatccaacactcttgttatactctccctctcaaaccgtaccttgccatagcttcttgcaagagggtcaattattgaagacaatgttatctcgcatacacttcttcattgattctattgaagaagtaacagaaggggtcatnttttgtgttcaagaactgttccaagatgatgatgctgcttctactcttcctttggaattcaacacggacaatccctttatggtttaaatgacatc

SEQ ID NO: 208564 - DNA, 392 bp, Glycine max
taagctgactatagagatttgaagtattcttgacattgagcacttatctttaaacataatggtacttagttaatgcaatgttttcaataaagaaagagcccttcaagagatagaggaacaactataactaccgtgacttgctaacgctcatgttaaacccaattaaatatctaaagctcagctcaatccattgaaaaatttgagattcggatggtagtaataactctgaagtcacaactcaactaaccatttgtctttatatttaatgaaattgattattactcagcacttatactgaattcatgattttttttgctatgttccatacgtctatgtcgactaattaatttaataaggaaagtcatccgctaacttcaatactgtatgcttga

SEQ ID NO: 208565 - DNA, 476 bp, Glycine max
  unsure (1)..(476): unsure at all n locations
agcttgttacatatagtctgaattctgggttctcttaaggacttagtcaaaatatccgctggctgatcattagaaccaatgaactcagtgacaatctccttggacagaagcttctctcgaatgaaatgacaatcaatctctatatgcttggtcctctcatgaaagactgggtttgaggcaatatgaagagcagcctgattatcacaatacaacttcatttgcaactcttcacaaaacctcaattcttgaagaaattgtttgatccacatgagctcacacgtaaccatagccatagatcgatactcagcttctgcactggaccaagcgacaacagtctgtttcttgcttttccaagagataagatttcctccaatgaagacatagtaacctgatgtagatctcctatccatgggacatccagcccaatcagcatcacaatatcctgatagntgcgtactacccttgtctcatacaac

SEQ ID NO: 208566 - DNA, 428 bp, Glycine max
gtcttggatactcactactaaatcagcagcataatatgtgtgtcattcttcttctgttgttcatgacaagcattcaacagtctcttgcagcattttatctttagccaaaagcaagataacatgtctaacctctagtttacaaatttcagatggggttcatttgctaatggacaagaagggtatgaagagtttgacaccccagttgcttacaagttagctttgaaaacgtgggccaactggattgactcaaccatcaatccaaacaaaacacgggtctttttcaccactatgtcaccaacacatacaaggtctctctatcttaaggaaaccttaatgaagttaaactttttatagcaacaacttaagctataagttaaatgtgtgtttggattcacgctgaatcatctaaaatcacgttgaaattacca

SEQ ID NO: 208567 - DNA, 487 bp, Glycine max
  unsure (1)..(487): unsure at all n locations
agctgggagaggatgcttcaatggaggattatatttatagagagaaagagagagagaaagagagagaggggagcacgaaattgaagcatcctctccaagcttcttatccaaggcacattcttggtggcgaagctccttcttccatggcttattccctagtggatggcgcctcctctcacctcttctcctttatcttccgctgcatctccatggtggaaaatcgccattgaaggacctcattgaagctcaaagattcagcctccatagaagctccacaagcaagcttccatcaagtggtaatcagagcacaagagcttcaagtaggtgctccttanaacctccattaattttttgctttaccttctcttccattggtggttcttcatttttctccatgtatctcctcacatgtctggtgctaaatgttnttaacatgattctttagaagttccaccgattaaactttctatagaagctagaattgatt

SEQ ID NO: 208568 - DNA, 439 bp, Glycine max
  unsure (1)..(439): unsure at all n locations
tgcttgtatagcactttntctttgtacagtatagtttctatgattgtgttagcaactaaactatcaacccacatggaatattccccaacccaacagttcagtgttccctatgcacaaactcatcactctgtattggtgactcttcccacaagacatcaccaaagccaacctcattgctttatgcactttataccgaatacttcagatgcaacaaccctcctatttgctcactgcccaccttgttttcctatactagaaatttccaataacacatccagcacatgtgattcctatttgatgtatgaaatcaactttgtataagagaatccataacattttgtgactacctctaagttttacttaattgctttgcttatagtttttctcgatatccctctacctctagtggctacattatcccccatctgatctactcttc

SEQ ID NO: 208569 - DNA, 432 bp, Glycine max
  unsure (1)..(432): unsure at all n locations
aatgcatgatgtcaatgcatatatgtgaatataatacgacattttgtattcgtatgagttatgaattgtaaaaattctaaagagtttttcagattaacattgaaatcaataatatttcgaaatctatgattctcataaataatagagaaacaatacgtatctttatttatagtgagactcttctccggtgtactttgattcctttaaaaagggaagaaacaagatttcactaccttgaatattctttctgtctctctacggtcgggatgacaagatattacatagaacacttatctgtcaggaaggggatctctctctacattattagtgggtattatccccttntataaccactactcacatttatgggtggaaacaggccagaccggcttacatgggcctatgacctgacctacataaagtctggactga

SEQ ID NO: 208570 - DNA, 393 bp, Glycine max
gaatataaaactcacttgaaatactacccgcacgtctgaggattcttttactcaacgatgcactatgaacttcttccattttctaccatggtttctttgtagagccgatactcctatttctctcgaaaggaaaacacaatacaaagaggcgaatagacgtatacgaatatataaagtgctgcaaaacttagatagaaacgagttgaaacacatttatccaaaagagaagtgaatgacaaaccaaactaaacacataaccataagtttatctcatcactcaaattgactaaatctatcatcttaacctagaagatctaaaaccaaatatgttacaaactagtatctatctactttggtatccaatatccaatgctcatatgctacacaaatatt

SEQ ID NO: 208571 - DNA, 445 bp, Glycine max
ttcatctagccaagattatacaaaggtgttataagagatcctttcggtttctaattatgtgggccatcaaatctatcatgtgttgacagtaattgattagcccatgaatctcctcgggggccgtacacacttcggccatggcttttgctttggctaatagacgcgggaggtcttgacttccattcaaggtcaaggcgaacctatccatccacatagtcgcttcttgatgcaatgcatcaatcaccctccctcttgcttctttttcggcgtacacttgtgcaaaatccaccactagcttttgttcatgggccacatactggttcaactcttccttgtattgccctatgatagctagcatgctttgctcagtggcttccaagtgttgagccaaactcctcttggatcttgcgcacgcagctaactcttcttttaagatcatgccatg

SEQ ID NO: 208572 - DNA, 359 bp, Glycine max
  unsure (1)..(359): unsure at all n locations
agctnttcgtcttacagacagcatanaagattgtttatacggataaccacttgggtatttccgctcgtcagcgtgactcaaatgtgagtatgacagatcttgtgatcgcggaagatgacgtaaatctccgcgtgtcaacaggcttgtcgacgcgattgacgaagggcgcagaagacgacgttagtctctgcgtgctattaggcttttcgtcttacagacagcaaaattaatgtgtatacggataaccactcgggtatttccgctcatcaccgcgactcaaatgtgagtatgacagatcttgtgagcgcggaagatgacatatatctccgcgtgccaacgggcttgtcggctgagtttga

SEQ ID NO: 208573 - DNA, 450 bp, Glycine max
  unsure (1)..(450): unsure at all n locations
ggcctaattaacctgaaattaacagagaatgattattattctcacaaaatgaaaatactaagtatttattacctatacttaacataaaatacttataacactacaaaataaccataaattgggagaggttgatataatttatacaatttttatacacaaaagttaatcgttttcaccgacaaacaatgcacaggtttagccaaaggatattttataaaaaaattttgtgatttcaaatatatggtattttctctttggtaatcaattaccagaggatatgtcataccctaatttcgtccggtgactgtaacaccttgatatatatatctatatattattagtaattatgtttgatgtttgattatntgttgcgttattttcatccgtaattatttntaaagaagttaatctagttaatagaggggtgtggatagataacgatctagcttc

SEQ ID NO: 208574 - DNA, 460 bp, Glycine max
  unsure (1)..(460): unsure at all n locations
agctggcctgtccgatgcancatttatgttggtccgagttatgtnggggaacggntatgaacccggaatgggtttaggcaaagacaacggcggcataactagcctgataagtgccaaaggaaatcgtgggaagtatggtttaggctataagcccactcaggcagatataaagagaagcatcgcgggaaggaagagcggtagtcaaagcttgcggttgagacaagaaagtgaaggaagcccaccctgccacataagtagaagctttataagcgcgggtctgggggacgaaggtcaagtggtcgcgatatacgaagatgacgttccgagtacatnggatntggtacgaccatgccctcctgatttccagctggtgaaatggcgagtggaggaacgccccgacatttacgcaacgagcataatgtaaacctttacgggtttaaaaactctatagttaggccta

SEQ ID NO: 208575 - DNA, 448 bp, Glycine max
tgtaattgtccatacatgatataacaagcatttcaaactcatcttccatttctcctcttatcttctttttttatcatggaggcccttggtcctcgaagtccaagtcacaacattggtgctttcattgagcatcaatggtggaagcaactcgttctatggtttcagcagatagattggaagacgccattgctaagctatcggcatcacagctagcaatgaacgcgaagattgacgatctcctgcaaagaatgacacagctcgaagccaatcaacagcaaccgcaagcttcaccagcatcttcagcatgacaaacgccaatcgtgactgtttctactcatcgtttaaagctggacgttccgagatttgatggctcagatcctacaggatggaccttcaaaataactcgaattttttagtatcacaacactccagatcatgagagaataac

SEQ ID NO: 208576 - DNA, 478 bp, Glycine max
  unsure (1)..(478): unsure at all n locations
agcttatcttacatatgtatgnctcttattgtcttgcaaagactgaatagataaaatgcatgaagttntcattctatattttcctttgagttctattagaaattaccatctatcgaacgactaattcctataattgatacatataagacctttcttgtatttctactaaaggttaccctctgtcaagtatctaacccttagagatggcgtaagaatgaatgatacataaagttaaactaagaaaggataataggaaagaaaagacctatntgtattgatagatatgaaacatataatacactttttggctttttaggtttgtgagtaactaagggggtttagccttttttgactttgcttcctatntcttttataggcccaaggtagtttacttaagctaacctgggctntcgcactaaatgagtctttgggcttcctcgtgttaagcctgagttttcccgctcagcgaggatgcata

SEQ ID NO: 208577 - DNA, 434 bp, Glycine max
tcctatacgccctctgtatttgctcatttgatgcactcttcatcactttaagtatactttaatagctctttttgcaacagttttaaagttatcttcaaaattagttaaaaaattaattaaaagttaaaaatgaactaataaccaatgataactaataattaaaagttaagaattagcttattaaattataagtatttaataaaaaaatattatgatttacctaatgaagtaacaagaaaaataaataaatatattaaggatgaatatgtaagaaaatataataaattaaaagttagtattttaaaaaatattaattcaagtggtgtttcaaaaaatgctaataactaataaaaaattattaaaaaaaatatgtaccaaatagtcaactaaattgttcaacgagtaaagaaaagtaataattaacttacccaaca

SEQ ID NO: 208578 - DNA, 462 bp, Glycine max
  unsure (1)..(462): unsure at all n locations
tgcggcatgcaagcttcttaaagatgtacttaaccgggtccatcttgtatattatctaggnnggatggctcagcatgtattgtcttaaacggtgggacacccagactaaagcgcaacacgttctttcgagtagggagtaattcattcactggccgtgaacttcttactcaagtagtagatagcgcgctctttcttcccggactcgtcatgttgccccagcatacatcccatcgactcgtccaaaatcgtcatatacaaggtgagaggccttccgggtacctgcggcataagcacaggaggattcatgagacacattttgatcctcccaaatgcctcttgacaatcctcattccaacggacagtttggtttttgcgtaagagtttgaacaacggctcacaaatagcagtgagttgtgatatgaatctggcaatataattcaaacgtcccaggaaacctcggac

SEQ ID NO: 208579 - DNA, 454 bp, Glycine max
  unsure (1)..(454): unsure at all n locations
tctatcacaatggacttaccttgaattaattcctttgtagcccttttgagccttgtttccctttccttgttttgaagctcactacaagccttaagtgaataaccatgatattaccatatccttaaggaattttggagctntggaattgttttgggaataagtgtggggagtttttgtttcattggacaacttgttttgttggctatgcttcatgatgtattttgggccatacttgatgtacattgtatattggttaaatgttggacatgctgaatgaaatgttgtttctcaaaggctaaaaaaaaaaaaaaaaaaaaaaaattcgaaaaaaaaaattttgaaaaaaaaaagatgattaaaacaacaaataaaagaaaagcaataaagttgagtgaataagatcttaaatggcacaagaatgatgaaactcttggttctactcttcaggtttaat

SEQ ID NO: 208580 - DNA, 491 bp, Glycine max
  unsure (1)..(491): unsure at all n locations
agcttgaagctcaagaaaaagctagaagattgtttatattatgttntggctnttagatgttattagcagcttcaactaccccattcatcttgggcctgtatggcgtggaattatggtgttggatcctgaaatcctcacacatttccttcatcattttgttgttcagattggtggcattatttgtgataatcttcttgggcaacccataccggcagattatctctttcttaatgaacttgaccaccacactccttgtcacactggcatatgaagcagcttcaacccatttggtgaagtagtcgatcgcaaccaaaatgaagcgacgtctattcgaagccttggcctcaatagccccaatcacatctattccccacatagagaatgcctagggctctgccaagactttcaaaggcacaagtggtgttggatcaagtggcctcagaataattaagaagggggtggtgaataattatgaacgtgtcttgactaat

SEQ ID NO: 208581 - DNA, 430 bp, Glycine max
aagtcctaaatgaaatttcaaactaggatcaactcactttagcctccaattaccactaaatccagctttagcttttcaaatccttaaagcatcacacttttccactcatatcactacattctcactttttaaccctaggttaactctacccttcatctctatgaattttccatcagaaatttcagcacacaaacatcacaaagcatcattataaaaccctaaaacagaatgggtaatcttgactcacaccaaacatgacaagtttagcatgctttcaacaaattccttcacaaataactaccataaggcataaacctagtaaaactacccatcatatctcccataacccaatacccacgaaaatttatgtgagaaaatgtctacccaaacctgatatttgaagtcccacaatgtagaggtgcgcttcacg

SEQ ID NO: 208582 - DNA, 485 bp, Glycine max
  unsure (1)..(485): unsure at all n locations
agcttcttcttaaaatagttgtttgttaaataatagtttatgtttcanaacatattttaatttttctccgacttgcttgataatagtgaaacctcgtctagagctttctctctttataatgtgttgtcgctggtattccataccgccacaatattattatcttgagtgatgatacctctagaaaacacccgtgtgagttatgaattgttggggagtagttattagagacccctagatattgtcctataggttcccaaataggggcaaagagcaaacacgctccgtgccattctttctcatgcatgttttggtttatagtttttgttagtaatgtttggtttctttagagtaatacgtaacctttntaatgctacgttgaggcgccatcatgcccaaaacgtagtattaaaattgggtctttgcgggctcgtatgtatgaattacccctctgtcttggtttctttccgtttcatgcatacgcatcg

SEQ ID NO: 208583 - DNA, 470 bp, Glycine max
cgtgacctataaaactaagcttgatacctctcagtgaacatccccattcgcattgcacgcttattccattgtcctctcccttttgtgagcattttgatgaccacctaatgcctgagagctatagaacttcctcctgcagtagttacaagaaaaaacccttggagttgctgatgctgaagcaggagcttcagctccaacttcactgctagcatcacttgagcctttcaactcgccatcaccggaattaaagttgagtgtcaagtcaagggtaatagaacctggatcagtttcatcctttgtgagacaggaggaagtggtggtgctgccctttttaagatcatgagatgcttcatgaaaggatacatttgaagccacttggctgctgccttctgaatgattttcaggttccaagttcaagtttggagtcatcatgtttgtatggacctgctatgagttaacttctttccctg

SEQ ID NO: 208584 - DNA, 477 bp, Glycine max
  unsure (1)..(477): unsure at all n locations
agcttcanagccctggcatccatcctcttatctntccgtgattcctccaattcttccaatcttgtcatgatcctcttcacttcagctntactattcttactatgtgctatttccaattctgtccttaacctatccttctcagctgcaatatttagtggtcttgttttggcagattttttctcttgtaacatctgcttcacagtagctgctgagtaaacaaacaagttggtctttagtatagcttcttttttttctgccacttcttgctttgttggcatccggccacctcttctctctacttccttaacccactggatgaactcttcctcctttggaggagagttgctaatcatagccatttgccaccttgcagcagaagtttcatttccccagacaagaattaagtacttgtgtgtggttttattntctaatttatactgccgagcacgatctgtggcatcaacattttttaccatg

SEQ ID NO: 208585 - DNA, 448 bp, Glycine max
cttgaacagttcccattttcctactccatactttgtggttgtcttatcagctgggtggctcttagacttgtcaaattcagtagcaagttcttcaacaaggcttcttccaacatgaaatgatctatgtgcctctgagaactctttggatgtgacaaatctataaggctgatctttgtctgcccagtactgctcctgatccttccttgatgttacctataacataataattaatggtcaaaattaaatgtatataacattcttttaccagtgcagacagattaaattattgggacagaacacaagaccacttacttcttgcaaaaagtctgccacacctttcctctcatgacatttaaaacccattgatttgaaaaattccagcacatgttcgcggtgaccctggtacacaatatgactatcagagagtagtataatgtcatcaaaaaga

SEQ ID NO: 208586 - DNA, 444 bp, Glycine max
  unsure (1)..(444): unsure at all n locations
agcttcattncgtctaacctactaggactgtgttgtttctgttaaccctangtacatttcatggtgacctaatcgaggtacgaggaaagcttcaagtctccacgccattgttttagatctcactgccattgtcactatttggtttcgaggtaagcttggtccctatgcctttgtacatgttcaaggtgtgtggacttaatctctaaatggctttttgtttccaatgtatttggttcaagagcccagggcacgtntgtacatgtttaatcaacattgataaggattataaagattagtgctgttcgaagggattgcatattgaagctgggatatgtcatcttgtccggntaaacctaggcgttatgattggtcaccctgcccggattggctggttgggtgcttgtgaagaattcaactagtcgttgtgtagaatcgaatgtgata

SEQ ID NO: 208587 - DNA, 381 bp, Glycine max
actcaagcttgctggttttctcataaagatcaacccctgggtgggaattttggtctagtagacttctttgctgcttgttgaattggttccctaaatgattcctccagtttgagccctgtgtgaaattcctcccttggttgaatcccagtggtcttccttggttccccgaatgattccgtcagggcctctatctgttgggtcaatagcttgttttgggctagtgttgcatcttgagttatgagttccaaaaggtttctctttgttggcgtgtatgctcgatcacgaatgatggcatgatcactggccgccatttctttgtcagctcattgcctcctcagtgtcttaacttgtttttccccctacggagcattaagattggtt

SEQ ID NO: 208588 - DNA, 468 bp, Glycine max
agctgccacgcagcgtcgacattctagctgggttgcttcctccaaaagcaacagccttctggaggaatcttctggagggcccaagtggccctggttgctatttgcacccccatttttactaagtacaccccctgcctttttttggtgattcttttttcgtaaagttacggaaacttacggatttcgtaacgatacttgttttccttccagaatgttacggaaccttgtggattacataatcatcccctgtttgacttacggaacctcactaattgcgcaacgatgcttccatttgatttccggtgtgtcacggaaccttacggatggtgcatcaatattttcttttgttttccggcatgtcccggaatttacatcatgtctaatgatgggtgccagcacctacaaggaccaaacaaagttgcacgtcatcaatcaaggtccccggacaattatggatgacagtgcccc

SEQ ID NO: 208589 - DNA, 411 bp, Glycine max
actaagctttaacatgttccttcacaaataatgattacactgttttttctaacaaaaccacccatcatatctgcctaaaccccatacccacgatatctaagagagaaagaagtccacccatacctgttattttgaagtcccactcgtagccacgcacttcacgactccaaaaatgctctcctttcacgatttggggctgaaacgggcactaaaggttgaagctgtgtatggagctttaatggagaatgagggaggaagaaaggcaacgtgagggagagagaaagctgtctgaataaaaagtgagggctgagtgaagagagagaatagctttttggtttaaataaaaggttgtcctcttgttctattatattattcatgctctgccacatgtccctatttgatcggagcaaa

SEQ ID NO: 208590 - DNA, 419 bp, Glycine max
catacacattggcatttcatttcgataggtacgaacaatgcaaatacctaaaatattaaaataaatcttaattataatattttaatatttaactaggtaatggatttacaaataaaatgttctttcatcaaccataactgtagagttgagatgtttaacatctcattgcccatacataactccaaaaacattcatcgaatatgtataagcttattcttaattattgttgccacttgccaaaagcgttcaattagattaagtagaggttgtggccttttgagtgacacatatctcttagattcatcaatattctaaacaacaaagataaagcaatattagtaaacatagggtagttatttcaattgtgaaaagagaataatataagtaaagaatatacaatggttgaaacaaccttcaca

SEQ ID NO: 208591 - DNA, 429 bp, Glycine max
tgacagttcataagttgcaacataaggaaatctgtggttcgttactgtggaaatggtgtgtgttggtgtcggttatactatgtggtagactggtcactgattggtttatcaatgttctggtcttcttgattgacaggaacttcttgtttaacacaaaggtcttgtattctgctcatggtgtgcagaagagtgttcatggcttcatatggctaagtttggttctcttgacatgggttctgcttttccaccactgagtggagacaacccgaaactgttgtacgattcttaattacataacaagggcatttgtttcttgtcttattggatcatctatattgttaaccaaaacattgcacataaagctgtttgcttcacattctcaatctactacatcttttgatctggttcaagattcaatcttcatcaata

SEQ ID NO: 208592 - DNA, 444 bp, Glycine max
  unsure (1)..(444): unsure at all n locations
agcnagagatgaggaagagaatattggtgtatcttccngccnnnantcggagaccacagagcggtacctgtagatatgtcgcgggggtcaggagaccttggggacgtcaggtggggtgctattgcccataaccaagcttgaccaatcctgacccaacctgtgcataatcggtcagtgagaacctgtgatgtacctaagcaggcgagctcctggcagtcaacagataataggaacaaagaccactaagcaaggaggcttgtggtggctggccagctatgaacttgattgatgtgtgagatatggcctctggtaatctataccataggtgggaatcgatacaaggcttaaatatgagacaggaggctagatggctctggaataattacacgggtgaatcgataccaggctgaaacgatgcaagaactctatggttttggaatcata

SEQ ID NO: 208593 - DNA, 439 bp, Glycine max
tctaaactttatacaagaatgaagctctgagacctctttgttacaagtggcctcagatatcctaagaagggggggttgaattaagatattacaaactatttccccaattaataaattctactttgattttaatgcaagttccaagttcccttaaagatgaatttctaaatgattattcaaattaaacaatttgaatgtaaatgtaaagcaacaataaataaaagattttaagggaagagaaagtgcaaacacagtttttagactggttcggcaaagtccgttgcctatgtccagtccccaagcaaccctcttgggagttccactatcttgcatatcctttacaacttctgaaacacacaaggacaacccttccttggtattcaaatttctttacaacaagagactctcggtctcttaatcccttttcagaagaatgatg

SEQ ID NO: 208594 - DNA, 479 bp, Glycine max
  unsure (1)..(479): unsure at all n locations
agcttcaacatcagaccacttccagggtgctggttctacttcacatggacttgatggggcctatgcaagttgaaagccttggaggaaagaggtatgcctatgttgttgtggatgatttctccagatttacctgngtcaactttatcagagaaaaatcagacacctttgaagtattcaaggagttgagtctaagacttcaaagagaaaaagactgtgtcatcaagagaatcaggagtgaccatggcagagagtttgaaaacagcaggtttactgaattctgcacatctgaaggcatcactcatgagttctctgcagccattacaccacaacagaatggcatagttgagaggataaacaggactttgcaagaggctgctagggtcaagcttcatgccanagaacttccctataatctctgggctgaagccatgaacacagcatgctacatccacaacagagtcacactgagaagagggact

SEQ ID NO: 208595 - DNA, 443 bp, Glycine max
ttcaaccgttcttcgacgttcttcattcgttcttcatctttcttcgatcttcaacgggtaagtacctcgaaccaagcttttcgattcattctatgtacccgtagtggtccacattgtgtttcgtgcatttttattctcgttttgtttactttttataccccctgttgacgtgcttaagccattttacttaagtcgtttctcgcttaacttaaaaataaaataaatttccaccgaacgtttgaattgtattatccattaacttcggttaaaataaattccgaccgttcggtcatgccgtaaccacgttggaaatcaaaaaagaggtaaaaaataatataaataatcaaaaaaaacatcttttattaaaataaagcggaaaatcaatcggacgttttctctttgggatttctcattcttaatcgaattgataataactaaagtga

SEQ ID NO: 208596 - DNA, 443 bp, Glycine max
  unsure (1)..(443): unsure at all n locations
agcttagccctagaggggatggacctttttggttttggagaggatcaataacaatgcctataggttggacctcccagaagagtatggagtcagcaccacttttaacatttctgatttaacttcctttgcaggtggagctgatattgaggaggaggaactaacagatttgaggtcaaatcctcttcaaggggaaggggatgatgcaatcctccctaggaagggaccaatcactagaaccatgagcaagaggctccaagaagattgggctagagctgctgaagaaggccctanggttctcatgaaccttanggtagaattctgagcccatgggccaaggttgggtccaattatctttgtacatattagactaggatgtcattatatntggtcctttgtatatagggctcatattgtaggtagggtaccctagaaatatangattt

SEQ ID NO: 208597 - DNA, 386 bp, Glycine max
ggatagagctatcatcacatgacgctttattggcacatttcatgttactttctaagcaacttgagattttaacagaaacactcggtaagctgccaactaagttgtctatgggtcaacctacacacttttctattttgcaggttacaggttgtaccatctgtggtaaggctcatgaaacaggccaatgtattcccactgaagaaaacactcaagaaattcattatataggaaatcaacagcgacaagagtatactcaaggaggattttcaggcttccaacagggtccctataatcaacaaggacagtggatgacacaccctgttaaccacttcaataaagaccagagtgggccttcatacagaccaatccaacaaggacctaacata

SEQ ID NO: 208598 - DNA, 414 bp, Glycine max
  unsure (1)..(414): unsure at all n locations
agctngaaggcaaactggatgcattgtgttttctnggtaacccagctggccttgaaccagaaatctatacctgtcgcaagggtctgtggtttatgctcctctgctgaccaccatacagacctttgcccttccatgcagcaacctggagcaattgagcagcccgaagcttatgctgcaaacatttacaatagacctcctcaacctcagcagcaaaatcaaccacaacagaacaattatgacctctctagcaacagatacaaccctggatggaggaatcaccctaatctcagatggtctagcccttagcaacaacaacagcagcctgctccttccttccaaaatgctgctggcctaagcagaccatacattcctcctccaatccaacaatagcaacagccccagaaacgaccaaca

SEQ ID NO: 208599 - DNA, 443 bp, Glycine max
tctcaccacaatttctataaatagggggagatgtgaagtgaaaaagggttcagccccttatgcacttctctctctttcgaatttgcttggaaaaattgtttccgtgaagaaaatttaagccgatgcgcttccgaaacgtttccgtgaggaatttcgcaaaggtttcgaccgttcttcgacgttcttaattcgttcttcattgttcttcgatcttcaatgggtaagtacctcgaactaagcttttcgattcattctatgtacccgtggtggtccacattgtttttcgtgtatttttattctcgtttcatttactttttatacccccttgtgacgtgcttaagccattttatttaagtcatttctcgcttaaactaaaaataaaataaatttccaccgatcgtttgaattgtattatccgttaacttcggttaaaatgaattctg

SEQ ID NO: 208600 - DNA, 434 bp, Glycine max
  unsure (1)..(434): unsure at all n locations
ctgcagcttgccaaggagctagcaattcttctgttttgcttcttncnngnaggantagcaagccctttcttttatatgtaagtaagctatttattgggctttggggcttaatataggattgagtcaggcttaaataatgttttaattaattattattctttataatttattgcgtatatgtttatcataatttaagattttatttatattttaattaattagaaattattattgtttcaggatttcttgttattgttcaatccaaatattttatcgtttgactgagttttcttataaaaatatagactacgagtgactctgtctattttccatcaacgttagatttcagttggttgttcaatcctatcaggttctttatttctctcttgactctttagaaattagattntcttctttcgcattattagattcta

SEQ ID NO: 208601 - DNA, 447 bp, Glycine max
  unsure (1)..(447): unsure at all n locations
tgcctgtccgatgcatcagtaatgatggcccgagttatgttggtgaacggttacgaacccggaatatgtttatgcaaagacaacggcggcataactagcttgataaatgccaaaggaaatcgtgggaagtatggtttaagctataaacccactcatgcggatataaagagaagcatcgcgggaagaaagagcggtggtcaaagctcgcggttgatgcaagaaagtgaatgaagcccgccctgccacataagtagaagctttataagcgcgggcctgtgagacgaatgtcaagtggtcgcgatatacgaagatgatgttccgagtacattggatttggtacgaccatgccctcctgatttccagctaggaaattggcgagtggaggaaggcccggcatttacgcaacgagcataatgtaaacctttacgggtntaanagctctatagt

SEQ ID NO: 208602 - DNA, 368 bp, Glycine max
  unsure (1)..(368): unsure at all n locations
taacagaagaactattattatctaatattctatncatgnngnttnttatgagactaaccctataaggccaagaaagcaaacacttgatgatattacagattctttagaaggcatacatattcatgaggaaggtgatgcaatattaccctccaagggcattggatagaagactccaagaagattgggccagagatgcaagagaaggccctagggttctcaggagccttatggtagatttcgggcccgtgggctaagtatgagcccacttatctttgtacatattaggttaaggtttcattactcttgggccttgtatatagggcttcataatgtangtagggtaccctagaaatgtaggattnttcaac

SEQ ID NO: 208603 - DNA, 438 bp, Glycine max
tcccatttgggcttatggtttggattgcaaggaatccctgctttttattagaaacatgagttgtacatccaaaatcaatccaccatgtattatgggaaactttagttaagtttgattcaaagcatacaagagcattaagcccgcctttcttttccaagacttacgctttcgacaatccttctagaagtatccagatttcccacaaaattgacaattattgtcctttgataccttcttctaaatttgtaaagattcatcattgatccttaatcgccccttgcctttacatgcttctccataaatttctttttagctccttgattcccttggtggcttacataatggactgagtgacttcttagattcttaagccttggttcttcctgaactaacatactgtgcaatgtatgttcattccatttatctttcatggtatta

SEQ ID NO: 208604 - DNA, 462 bp, Glycine max
  unsure (1)..(462): unsure at all n locations
agctntaagctctgcagtttatcttattaatagagttccctcatgtgtgttaaactttaagagacctcttgatgtcatttctcatcatttcacccttaattntgtcaatcatttaccaccccatatttttggttgtcatatatgtacatttgcatcctcaccaacaaacaaaattagaatctagagcaatgaaatgtgtttttgtgggatacaacaccactcaaaagggatataaggcctatcatccatctacaaaaagattttttgtatcattggatgttacatttcatgagcatgaaatgttttttcccttgaaaacacttcattcttcaccttataggggaggtgatttggaggtgcagaatcatgatagacttgaccaagatatcaggtttattgatattatgccaacaacaacagatgatggaattcaagataatggagatgagaacatggaggatc

SEQ ID NO: 208605 - DNA, 452 bp, Glycine max
cttgccaatgtataggtttttaaatgaagtggagttgaagtttctgcagtgtcatcaaggtttttaggaggagtgttgtcactacaaatatttcaacatgcaagtcactgaaccatcatcagataactaatggagagataatgtacttattaatcaacctggagagctttttgatctctaccctgtactttttgattaatgccaaaatggagaaaaataaagatagattagatttatggataagtctaaatatgtgagtaatatatttctttcgattatcaaaaatataataattgtatattaaatttattacatacatcatgcatgtgataattaattgttttttactcaaattaaacatcttttggccatccttgacccaaaaattcatgcttcatccttgaatcacccaaatgtcatttgtttctggatggtatgcaaccctcaccctt

SEQ ID NO: 208606 - DNA, 486 bp, Glycine max
  unsure (1)..(486): unsure at all n locations
agcttngatacaaactgagataacaacaatctcactataagggggacttgaatattgtgtatatcaaagataataactttntataacttttagaacaaatatagatagaaaaatatatgtacgggaagatatccactaaaaagaaaataggttttaataaagacatgtttgatcgttcaatgacttaataagagagtctttaacgcaatttttcaaataaatacttagtattaaagaagtgacaaagaatgctaatagaacacttaataaaccattaataagagaaataaaaacacttggtttatactggctcactcaacctgagctatatctagttctcttttactcaatagtaaaggatttcactaattaaaaattgattacaaaacaagtattctgactggtcacttctagctatataagtattcttaataccacttctgacattgtcttagaactcccctaaatctaagaaactcaagtatt

SEQ ID NO: 208607 - DNA, 452 bp, Glycine max
  unsure (1)..(452): unsure at all n locations
tcggaagtccatgccaaacttgagaatgcagtacatggagcatataaaattcttccttttttttttctttttaaatatacaacgtcattaaattacacacaaataaatttataataaatacataaatttttaaaatataatcatataaaagatcatgattaaaattctgcggcaaaattttgggtacaacaattaatgatcgatcacatgaactggatgttgccggtgcttggcacattgagattgaactctactagtctactttctacctaaatttctagccttacctactttttttttgtctgaaaaaagaattacttttcacttcatgtaaatttccctcttaatagttttcccctgatttgatcaaaagtgaatatgccatgagttttgatcatttgaatcanagaanagagaggcacgccaggcaccccataactatgtacgatcat

SEQ ID NO: 208608 - DNA, 371 bp, Glycine max
  unsure (1)..(371): unsure at all n locations
tctganaagaggcaaatatagtcatcctgcttggacgaatgagaaaaccggggcaaatgaagagggtgaggatgaagtataagcccatgctgtgactgccattcctatatggccaagtttcccaccaacccaacaatgtcattactcagccaataacaacccttctcattacccaccacccagttatccacaaaggccatccataaaacaatcacaaagtctgtctaccgcacttccaatgacgaacatcacctttagcacaaaccaagagcaccaaccaagaaatgaattttgcagcgagaaatcctgtanaattcaccccaattccagtgtcctatgctgacttgctcccatatctacttgataattca

SEQ ID NO: 208609 - DNA, 417 bp, Glycine max
agctctattctacacctgaataagaggatgagatagttgcgcaactgttatcttcctaacaaaaattttcatgcatgtggaccttcctctagtaattatgacttaccgcagcctcctatccctcttccattcccacctagagcaattccaaacaaaaaaatggaagaagcggaaaaggagatcttggagacctttaggaaagtagaggtgaacatacctctactagatgcgatcaagcagattccaagatatgccaagtttctaaaggagttgcacacccacaaaaggaagctcaaaggcaatgaaaggattagcatgggcagaaatgtgtcagcattgataggtaaatatgttcctcacattcctgagaaatgtaatgacccaagtactttctgtataccttgcattattgggaac

SEQ ID NO: 208610 - DNA, 445 bp, Glycine max
agcttctaactttacacacaaatgggtgtttcttccacaagcatgcataacataagcatagatagaaacattgaacacataaagtaacttcaaatagatagtaataatatttacatcaagtactcagcaaaatttcccaaggattttagccctccattaaaagggagcacctttcaccaataggagaagggtttcagagaaaatactagattacaaagcagtggggatgtctcatccacctctaagaacctagaaatcactcctagacctaaaatctacctaaagttagggcctttttcttccttgcgcaacttttcctctattcttcgttctgcacaaagctcacgtagtctattcagacctctcttttcattctttgcaattcaggcttaaaaagagctttctgttcgcgaaggcacaatgttagttgatgaatacgactaac

SEQ ID NO: 208611 - DNA, 453 bp, Glycine max
ggctaccattaaaggattcattggagaaaataattatgtttctcatattccaaatagaccaaacaacagccatccaccaagattgccaccttcctcttcttataccttccacttgcacaaaggagtgctggagaaaatgctgaattggattagatgggaacacactagtgatattcaaccatgatgtagtctcccaccaaatatgccgaatctttgagcaatggaaaaaaagatgggaagcctcctcctccattcctccacaaaaaggacatgatgcatccgtgagttgcaattgccttcttagcagattactttttgtaggcagtttgtcttgaaaaagtctccatgcgaatatagctattttacttggaatcttcaatttccataattccacataggcttggtccttacttgcagttgagcccccttcccttaacatgagatatgcagact

SEQ ID NO: 208612 - DNA, 371 bp, Glycine max
  unsure (1)..(371): unsure at all n locations
tctctcctcacctccttgaccaccatcctataatcacagcacacagcagattgtggtctctctccaatgtgaccctttgaggtgtaaggtttatagatagattcatattccctctgccgcaccacacaaaatttcctccaaaactccgaccttttggcttactcaacgcttcgtctcaagccaccatgctttctctgtctctaatccatccccacaataataataataaattaaattaaaatatgattgcaaaccttcttccctttcttattctcttccctcactactcactgggatttccgtctacaaaatattcttggttgagttctggaatttaattctccaaatgacttccctttntattctttttt

SEQ ID NO: 208613 - DNA, 438 bp, Glycine max
tgccacccagctcgcccatgcgagctaggttgcttctcgtcatattcaaccgccttctggaggaatattctggaatgcccaagtgggcctgattgctatttgcacccccatttttactaaatacaccccttgctcttttttggtgattctttttctgtaacgttacgaaactttacgaatttcgtaacgatgcttgttttctttccgtaatgttatgaaaccttacggattacgtaatcatcccttttttgcctttcggaactttatcgattgcgcactaacacttccttttaatttccggcatgttacgaaacttcacggattgtgctacaatgctttcttttgactttcggcatgtcacggaacttcacgaattgtctaacgattggtgccaaatacacttatgtggtcatacgatggtcgcattccaacaacgga

SEQ ID NO: 208614 - DNA, 455 bp, Glycine max
  unsure (1)..(455): unsure at all n locations
agctagaccaatcccgacccatcccgggtatattcggtcagtgagaacctgtgatgtacctaagcaggcgagctcctggcagtcaacagataaaaggaacaaagaccacaaagcaaggaggcttgtggtggctggccagctgtgaactttgattgatatgtgggttatggcctctagtaatcaattaccaagggtgggtaatcgattacaaggcttaaaaatgaagacaggaggcttagatggtctctggtaatcgattaccaggggatgtaatcgattaccaggcttgaaaatgaggtcaggaagctaagggagcttctggtaatcgattaccaaggggtgtaatcgattaccaggcttataaagggaactgggagatggtggaagcctctggtaatcgattaccagcctgtgtaatcgattacacagtgcattattgcatatntcatgtcctg

SEQ ID NO: 208615 - DNA, 426 bp, Glycine max
tgtaatcgattacacacatactgtaatcgattaccagttaagtttttcagaaaatattctcaacagtcacatctttttacttgattcttgaatggctgtcaaaggcctatatatgtgtgacttgggacacgaatttgctaagagtttttcagaacaaaaaggtattatcctcttaataagcaaatcgttttatcctctcacaaattccttggccaaattacttgtgagtcaataaggaattatttgagtgctcaaattgttcaatctatctctttcaagagagatttcttcttcttcattctgaaaagggattaagagaccgagggtctcttgttgtgaaagaattctaaacacaaaagaagggttgtccttgtgtgtttagaacttgtaaaacgaatttacaagatagtggaactctcaagcggg

SEQ ID NO: 208616 - DNA, 404 bp, Glycine max
  unsure (1)..(404): unsure at all n locations
agctngaatatcaaatgacagatctgggattgttgtcatattttctaggaatggaattcaagatagcaaaggagttgatgatcatgcaccatcaaaagtatacaactgatctgctcagaagattccaaatgatgagctgcaatccagcatccactccagttgaaccaggcttgaagttagtgaaggatgagtcagaaaaatcagtggatagcaccctattcaagcaagttgtagggtcattgagatatctctgtaatacaagaccagatatctcatttgcagtgggtctaattagcatattttcagacgatcctaaggcctctcattgngctgctgccaagaggattctaagatagctcagaggcacactcagctatggtattttgtttactaaggaagctgat

SEQ ID NO: 208617 - DNA, 363 bp, Glycine max
  unsure (1)..(363): unsure at all n locations
ntatagtccaaattcgctctgacattgtacgatgatcctcattggggcactattcatgcttcaacagcgaggttcagtgaatgattacctcactgggtttgaacgtttagcgaatcggatcattggtctgtcccccacgatgctactgagctgttttatttcgggcctttacccggacctccgctgcgaagtccatgctctgcaacctatgtccataccgcataccgtggcgcttgccaagttgtatgaagaaaagattcagcaccgtcgttgccattcccgcacatcctataccccttctggtccgccaccttcatcgccaccacccacttgggttccttccaccgttctcaccccgatacg

SEQ ID NO: 208618 - DNA, 243 bp, Glycine max
agcttatccctagaggggatggactcctttcatgtttggagaggatcaataacaatgcctataggttggacctcccagaagagtatggagtcagcaccacttttaacatttctgatttaactccttttgcaggtggagctgatattgaggaggaggaactaacagtattgaggtcaaatcctcttcaaggggaaggggatgatgcaatccttcctaggaagggaccaatcactagaaccatga

SEQ ID NO: 208619 - DNA, 387 bp, Glycine max
tgatagagctatcatcacatgacgctttattggctcataacaagttactttctaagcaacttgagattttaacagaaacactcggtaagctgccaactaagttgtctatgggtcaacctacacacttttctattttgcaggttacaggttgtaccatctgtggtaaggctcatgaaacaggccaatgtattcccactgaagaaaacactcaagaaattcattatataggaaatcaacagcgacaagagtatactcaaggaggattttcaggcttccaacagggtccctataatcaacaaggacagtggatgacacaccctgttaaccacttcaataaagaccagagtgggccttcaaacagaccaatccaacaaggacctaacatat

SEQ ID NO: 208620 - DNA, 129 bp, Glycine max
caactactagccacacagatgcaagagaacggcggtcaacgcagagcacaaacacagcgatcaacttcccctacagctacagcccaaaacaatgcggaaaggaacagcaccagcgagaatgcacaaccc

SEQ ID NO: 208621 - DNA, 464 bp, Glycine max
  unsure (1)..(464): unsure at all n locations
agctgtctaaaatgtcgagaactacaatttcttgtgttntctaattagaagggaaaaaatatccagaagctatcaaatgtttctgcactttcaaatggaacctaaaagaaatacaagacatttgtcactgcattgagctgcatgctgtccaaagtttcaagtacaatgttattctacaaattattcaaaaacctgttaaagaaatttgtcctaaagagtttgaggatggtgcacaataaatgcaacaaagagagaatttataaagctacaatagaaagacagaagtttctgacccatattagactctcagaacaggagatgttacaccagattacccttattaaagagtaaacataaatggataacaaaaagttttgaatcatacattcagcagttntctgaatgaagatcagacatattgcaaacgaagtaatgttaatccaaacgcaagaaaatctcctgta

SEQ ID NO: 208622 - DNA, 431 bp, Glycine max
  unsure (1)..(431): unsure at all n locations
ntcctacatttcattactcattgtttgtacactacccttccaccctcaccttttatggtaaaagaaactcaaatttgaattattctcttctcttcttaccatgaaaggtgtttgggcagtataaaaaaatatggggtgtgaaaacatcatagttacttgccaaaaattaacttggacgcatgtctataagtattgactataccatatatgcttgtaattaatatagtacctgcagcacttaaccatgttttaagatcctcaaaaacatcaagaactgaagacttttcccctgatgtcaaagagctattcagatggtcaaccgcaagacccataagctccttgcaatttttcaaaccctacttagtccttccatccatcaacttcaaccctttgataaccccatcaagatgatgatcactgaaatactcaac

SEQ ID NO: 208623 - DNA, 409 bp, Glycine max
  unsure (1)..(409): unsure at all n locations
gcttgctctanattacattgatgtgtgtattngtgggatgaggttatatgccacttttgttttaagagtaatgtcccactggtaaaactaactttccaaatgtttgccttcgcaggaatggccccgaggaagcttgcctcanagaggtccaggatggacaaggcggccgaaggaactagttccgctccggagtacgacagtcaccgctttaggagcgctgtacaccagcagcgcttcgaagccatcaagggatggtcgtttctccgggagcgacgcgtccagctcagggacgacgagtatactgattttcaggaggaaatagggcgccggcggtgggcaccactggttactcctatggccaagtntgatccagaaatagtccttgaattttatgccaatgcttggcaac

SEQ ID NO: 208624 - DNA, 372 bp, Glycine max
  unsure (1)..(372): unsure at all n locations
actaagctataatgaaatgataaacttcaactgtatttctgcagataacactactacaaaaagcagttttaacatcggcagattaacatcagttttggacaaaatcgatgttaatctaaacgcggtggcataaatgtaaataatatatattcattaacatcggtttttccgaaaaccgatgttaattaaaatatgttaacatcggttttttaaaaaaccgatgttaattggagtagttaacatcggttttngaaaaancggtggtatcatatgatacagttacatcggatgttggtaaatccgatgttaacgttttgttattaacatctgtttttatataccatcgttacgtatgatatgtaacagattgtt

SEQ ID NO: 208625 - DNA, 416 bp, Glycine max
  unsure (1)..(416): unsure at all n locations
gagggtatctctgttcgacaaacgatgtataattattatcaaggcctaacttttcttaaaatgtgcattggcttttgtattaaagagttattcatatacactagttaaagttaaatcttagtcaatgcgctttaaggaatacaactatattgatgtgttggtacttactcgtgagtagtgacatggtgatgatatatcgtcagatggttagagattgaaattgcctatatatacttttcacctcctttccaatctctctaattagaaagcgataaatgattacaaagtagagctcttcccataattaattgtaggttatttntgttgatatgtcactttccacgctcgcaacgttaaaaagctatttcattgacataaactcatggtatttatttcaaagcacatgtattgactaa

SEQ ID NO: 208626 - DNA, 440 bp, Glycine max
tagaacacttctgtgcagctctaacgatctaacaagttgttatatatgtgcttactactgtgtcaagaaagtgacttgtcaggcagtgaagctgatcatgatggtctcaatcacagtcacagtaacctttctcaagtcgcttatgttcatgacacttctcaccgagtttaatcattgttcttaccctgcttgtctattttgagcttttatcttgactaggtaacattccacctttctcatattgcatcagtaccaccctgttgatcaattcgtgtcattgtctttatatatttttaaaaagtgcaaagatcccgatctttcaaccccaatataacaatacgtctaaattccttaatggttctctcaactttaaccaacaaacttgattaataacattcaatacacctattcttagtacatttaactgaattaatatacta

SEQ ID NO: 208627 - DNA, 478 bp, Glycine max
  unsure (1)..(478): unsure at all n locations
agcttcgaagggaagagagagaccaatcatgatcatttaacatggnctggaaagaggagttagctgtntgctcaaggtccaaaagatacttgtctcagcgtttatgcgaaacaaagaccaacatgttagccatcgtcagcaagtaccaagaagaactaaatctagccacgacccatgagcataaagtggcgaatgagtatgcccgagtatacgtggaaaaagaggctagaggaagggtgatcgactcattacatcgagaggcgacaatatggatggaccgatttgctcttactttgaacgggagtcaagaacttccccgattgctagccaaggccaaagcaatggcggatgcctactccgcccccgaggagatccacggacttctcggctattgctagcatatgatagaattaatgactcatataattagaaaccactagggaagttgactggcactcagatncttgactagtataac

SEQ ID NO: 208628 - DNA, 428 bp, Glycine max
ggtgggaatttgtgatagtgattgtgtcggagatgttgatgattgattaagtactaccggatttgtattttttatgggtgattgtgtttttacatggagttctaagaagcaaggaattgtgacactttctacttgtgaagccgagtatgtagctgcaacttcttgcacatgtcataccatttggctaagaagattgttggaggaacttcagttgttgcaaaaggaaagcacaaagatctatgttgataatagatctgcacaagagcttgccaagaatccggtgttccatgaacgaagtaagcatatagatacaaggtatcatttcattagagagtgcattaccaagaaagaagtagaattgactcatgtgaaaactcaagatcaagttgcggatattgtcaccaagcctctcatatttgaagattttc

SEQ ID NO: 208629 - DNA, 514 bp, Glycine max
  unsure (1)..(514): unsure at all n locations
atctctaagtcacctgcggcatgcaagctttcctctaattaataacaaacagaattgatgctcactnccttggggaataaaaacctgataagctcataaaggtattgtcaccctttaaatattctcctaagggtttttcatcattgtcgcaacctaccttacgatgggatgacaaaggcaaaatggataagccaaagtgtccatctccaagggagaaaataagcggagtcgccaccaacgtttattcaaggaaaatgttagaaaaaccaaaaagaggtctacgaatattgaaaagaagggttcgggagttgtttacgcataaggaaggtattagaaccccacgcgcccgccaaaagggatgacatcctttaatcgagtgtgcgcaatgtgactctcaaaattgttaattttccctttntaattttatattttaatattttttgggtcgacaagggtgttgcccttgctcgtacgtatcctcaggtacgatgagaaattaaacctacgtattctt

SEQ ID NO: 208630 - DNA, 447 bp, Glycine max
gtcaccagatcatataagataaattcattcatccaatctgcagatatatcctacaaaatgtcaaattctctgcctatatattcaacctttccatcactggcacaggagtgaatcttcctccatggtgcaatattaaagttatattgtcatccattcctcacaatcagaaaccacaaacattgccatatattaggaaataaaaaacctaactcaaactcaaacataggcacatcacacaacaacatgcaatgtcatctataaaaatagagcatcatcaatgaaaataataaaggaccataaacctccctacgaagcgcgtagacaatgcaaatgaaaacccttgaacatataataccccaaatgaatccaccataacaatgaatatgaatatgaatgcaaaataaccaccaacctgactgccaagcgcgaagactcacaatcaccgac

SEQ ID NO: 208631 - DNA, 257 bp, Glycine max
  unsure (1)..(257): unsure at all n locations
caatcgcaactgtggttactgtaaactcacaaaaaaagaatatatatattaacttctctggtttatgaaaaggcacgctgcttaatataagcactgtgttatgtgattntagtattggaatagcatatattgattaaacgcgataatgatttgctgcgaacgaattccttataataaagccgtgaatcaattggggtaattaagtcaattagtattatctccgaattatgtgtgtacgatccaactccgatgaaaac

SEQ ID NO: 208632 - DNA, 436 bp, Glycine max
taagctccttcaactgcacaaggctcttaatatttgattagtatccttgaggaaccttcacccgacgaagacactgacaaaaacttatcttctccttcttggacaaagtatggcaggctgggggcaagtaaattttcttcccatcagaccttggatgcaactatgctcttatacccatatcagctagatcttgacgggtattcaagccatccttcgtcttgccttgaatgttaaggagcgtcccaatcacactgtcacaaacatttttctccacatgcataacatcaatacaatgtctaacgtcaagatcacaccagtacggaagatcaaagaatatggacctcttcttccatatgcaactctgacttttatccttcttttgggtcttcccaaatacagtgttcaggtggtgaacccgctgatatacctgctcact

SEQ ID NO: 208633 - DNA, 425 bp, Glycine max
tctccacttatttgctataaatagggggagaagtgaataagataagggttcagccccttatgcacttctctctctctcgaaattgctgaggaaaattatttccgtgaacaaaatccaatccgaggcgcttccgtaacatttccgtaacgtttccgtgagtaattacgcgaagattctcaaccgttcttcaagattcatcgttcgttcttcgttttcttcagtcttcaacgggtaagtacctcaaaccaagcttttcaattcattctatgtacccgtggtggtccacattttgtttcatgtatttttattcccgttttcatttgctttttatacccccttttgacgtgcttaagccatttatttaagtcatttctcgcttaatctaaaaataaaataaattgtcaccgatcgtttgaattgtatca

SEQ ID NO: 208634 - DNA, 495 bp, Glycine max
ttaagtcacctgaggcatgcaagcttctaattacatgagtgatatacctctattccgcatcattaggaatctgcacagatgctctccaatcactgtaaattccatcagagcagctatacaagcatcaccatcattccaaacaagccctggtattcatgatcaaagtcctgtgatccctctttcaaccaacaccagctaaagaataatatctgttgtaataatttgtccagttcaaatttatctcccctgaagatacatgaatttctgagtctccaaatgcaccataccaatgcgctccacattgtcctccataaattgcatctggttgtagataactttccatgaggtatcagcagaataaggaagaaacgttgagaaactgccccatgaatagaggattttccaagcacgctcagacaccttgcaagagaaaaggacatgacatgatgactcctccacttcgttgcagaagaatgtccacattcatccttttca

SEQ ID NO: 208635 - DNA, 446 bp, Glycine max
tatattaatggtaattaatgtatcttctaatgttatagttctatgataaataaataaaaaatacttttttaccattgatgatttattttaaaatttattaaaaagataaattgattggaagagataaattgttcatatatgtttagaattcaacatgtaatttaactagagaaattcaattattgaaaatagtttcattcaaaataataatatagattcatgatataaataggtttgaatatatttttagtttataatatatatatgtagtctttgtaactttttttaaaatagtattttatttttggttatttttgtttgtttatgtattgtccaaggtctataaaattgatgtgggaaatgacgttgcactcgatacaaacgtgagccttcaatatcaatatcttgacaaagtcaccttgatatttgaatattaatggatatat

SEQ ID NO: 208636 - DNA, 479 bp, Glycine max
  unsure (1)..(479): unsure at all n locations
agctnggagaggatgcttcaatggaggattagatagagggagagaaagagagaggggggagcacgaaattgaaggaagaaaaagggagagaagttgaactttgtgttgtgtctcagaagactctcattcatcaaagttacaacaagtgttacacatgcttctatttatagactaggtagcttccttgagaagctttcttgagaaaacttccttgagaagcttctttgagaaaacttccttgagaagctagagcttagctacacacacctctctcataactaagctcacctccttgagaaacttccttaagaagattcctaaagaagctagagcttagctacacatacctctctaatagctaagctcacctccttgagatgagaagctagagcttagctatacacaccctataatagctaagctcatccccatgacanaaaacatataatagaanaaaaagtcttactacaagactactc

SEQ ID NO: 208637 - DNA, 349 bp, Glycine max
  unsure (1)..(349): unsure at all n locations
ngattgtaaggaacttggatcaccctatgccaacaatttatgtctatcctaccactagaagatgatccggaccacataaagacaagtttcacaactatatgggggttgtggctcgagataagattcctattctccattactattggaaagttgtatcggattctttaaaggatctaatataggatgacattatggtatgttcacttaactaccctacgtgtttaaatttgtctaatttatttgaaaaagggtggcattcaataacctcttcattccaatttcttatgcatgggaaatttggatatctaaaaggcctccattgccattaaaaacgtcttgtcttcattgg

SEQ ID NO: 208638 - DNA, 467 bp, Glycine max
  unsure (1)..(467): unsure at all n locations
agctcgaagcctaaagttctaatgttcgttttaatcctaggagaagctctaatgtccgactttcttgtttgaacatggattgcacaaggcttcttgaagcctgagtatagaagacgttctggttctccaatttagtcattggcgcagtaaaggaaatgtgattaaggattgtcacgtgtctattttgggtctgtaaaaaagttggatatccccaacgttgcatcgtatgtgtactaagtaatgtgctatagaaataacgtgccacagaagtacgcacattatgtttaacgtatctcaattaatggaggagtaaaataggaatcattttacacacgtttagggatgctctcaaagttcttcttttatatatattctcaggaacctgaatgacactgaattacattntgacgtgtcaaagagactatttattctaacattaatattaatggtacactctctactatcaa

SEQ ID NO: 208639 - DNA, 434 bp, Glycine max
  unsure (1)..(434): unsure at all n locations
ctcagctaaaactctcattttgaatggagttttcttattttaagcgncncttcatgaaaaataacaaatgaaacagaggacctctaatatgagaggaccttagtagcataagcagaggattaatttccatgcatttccctgtcttggtattttctatcgctttcctttgacaagtaatttcttatcaagaagtatgagtgaagaatttttttttctggacctcttaattttttttctctattctgcttcttttatatacatatatatatatatatatatatatatatatatattctattttttttttcttcattttagtccttgttgctattaagtggtgacatatctagtagagattggataacacgtgttgctgttcctaataaaatgagaaattttccacacttgtaaaccatatgaaagtctataattta

SEQ ID NO: 208640 - DNA, 358 bp, Glycine max
  unsure (1)..(358): unsure at all n locations
agctgtaagaacgagaattatntgtggttttatnaagagcaaaggtggtggctggaggatatgcttttgtggtggtggctatccactatgatgatagtgaatctttactctctatgtgaattatataagacgggaagngaatagtctatatcttatgagtttacactattctggactaagcttacacacacttgtgtgttttattttggctatgctcaatatgatacacttttaacacatatacttggtcaggtttatgtacctacgatgtaaaaatgtctttataaaaccctgctaataatacatgtgtctacccgctcttagtactcctatatcatggtgtacctacccaaattcc

SEQ ID NO: 208641 - DNA, 421 bp, Glycine max
  unsure (1)..(421): unsure at all n locations
ngctngatttatgtataaactgttaagtttaatagctattcagtgaccgcaggataaaatagtttatcagttaaacagaaataactatttgtgtcttttaagaaaattattgtaaaattaataaatttatcatatatagtgatttgtaattagataataacgtaaaatgactttatactcctgcataattgtaagtttgtaacctatttttcttataaactatagtacctttttggtaccaagtatcttaagaaattagtcatttttttctatgcttgtgatgtgtagaaatggccaccactggggagaaagagtggtatttctactgccccagagacagaaagtacaggaacagtgcaaggccaaatagggtaacaggagctgggttctggaaagctacaaggactgatcgccctatcta

SEQ ID NO: 208642 - DNA, 414 bp, Glycine max
  unsure (1)..(414): unsure at all n locations
agcttcagcacattgtgaattanctgaatcatggacaaagtgccagatggagagattcccatagctgctatgctgagagccaaaaagaccatgaaatcaaatatcattaatacaagaaaaaaagtgaaaccttgtgcacagggccaccttatatatctcaacgaataatagctcagcaataactatgacaatgagaaaaagatacaacgtttagtccaggagttgaaaaaggatgaagggaaaaagaagtagaaaaagatcctagactcaaattcttccgattgatatttctaataaaactaacaaattaatatttaccgataaaaaaaatatgacaataagaaagganataaaaatatgacaataagaaaggaaagtggtggaaatattaatttggaagttgagtaacttaca

SEQ ID NO: 208643 - DNA, 444 bp, Glycine max
tattagaatttggaaaatgattgggattatcttcgacttatcatttcaattagttgttaatttttttattaactaaaaaattgatttgacctttcagtaaagaaccttctttaaataatttctagagttttttgaaatgctaattgaagtagcaatttttaaaacactagcttttagtttttttaatattttattttttttattcttaaaatatttattcaattattttttatttttaaataatttatttatgtcattttatatttttcaaccgcttcaatagttaatcttaacgaatacttatgatttaataagttagcttaaaaaattttagttagcagttaactttttagctagatttgtcgtatataacatttatctattttattttttaattaaagttattaatttattttataggtaatatggttatataactaaata

SEQ ID NO: 208644 - DNA, 456 bp, Glycine max
  unsure (1)..(456): unsure at all n locations
agctntgagccanaatcctgactcaccatattatttgacctanggtgagaatgtcaatccttaccctcgggagcaaaaaagaaaagaaggaaaatttccaatcaaagaggaagcaaaaaaaaaggagagaaggaaaatttccaatcaaaggaacggaaattccctatcaaagagtgggagaaagcaaaaagaaaagaaagaaaattcccaatcaaagaatgggagaaagaaaaaaaaagaagttaaaaagaagaaagcttaaggatcgaaagaaaatagaagaaatgtgcagaaaggtcgttggaccacacaatatctgaacaatacaaaattgtcaccaaatgaacaaaagaaagaaaaggaaaccacgacctanaatggtcttcctcctttaattgccaaccaaaatcttgtgcgctagcgactntntcgccccgcactaaacaaaaacagaaa

SEQ ID NO: 208645 - DNA, 470 bp, Glycine max
  unsure (1)..(470): unsure at all n locations
ntcataagtgaaattaggtgcagccatctccctaagagttctgtctttatgtggaggttgagccatgttctttgtataaaaatttgtagtggaattgctcaaaatcagaatattcagaatcaccctcaagagaatgcacaaaatgcacagaatgaccaggatgcacactatgcctaactaatctatttcaggatcaaagggttgtaaatcacctggattgcccctagtcatgcgctatatgcagcaaataatgtgtttctcaacaagcacctaacaagggggtaaaactacaactatacctaaacgatatcaaaatgagctgaaattttgtgaggaacaccctataatcgtgaaaagatagcacacaaaatttaaaacaaaaattcaatgtctaactatcgaaactgcctaaggagagtttagaanaatagaacaattaaactggaaaaataaaataaacttagtaaaca

SEQ ID NO: 208646 - DNA, 470 bp, Glycine max
  unsure (1)..(470): unsure at all n locations
agctnttagaaaatggtattcctctatgtatgttnttcctatgatgcactatgctaactgcaactttctacttactatccaactgatgacaatggctgcaatgagttggattccgttcaagaaaaaatagcaatcaacttatctgttgtgagctgttcagatcctagggacttaattacaaatgtgtgaaaaatagcatcatttgcaaaagcaagtttagactctacaacattgatctgtgcttggttgaatgtttggattaattttgtattcaaatagcaaggcaactaattcttcctaaagcagagaaattntgaggctacctatagcatggaacaacaagggcaagaagcaatgctcacatttatctaanatttgacatcattgaagtgaattattgagaaataggcgggatgttctgttaagtcatactagaaggaatatgaaagtggttggcctaacattggatg

SEQ ID NO: 208647 - DNA, 437 bp, Glycine max
  unsure (1)..(437): unsure at all n locations
taagctngcttttgtagataggaagcaccaatataaattcggtgttgcctattattgttatatagnanngagcatacatgacactagctagagagaatagaaagtgttgataatagtacactccatagctagtaaaccgcagaaaaatttagtggcttgcataacttaagttaaatttagtggcttttaatgtttatcctatatatattataatgacatcagtatttctaacgtgttacctcctaagagattccctttggagtccttattggtatgttaatctttcagttgaaacactacattttgtccatgacgttgatatacggttggatattttttataagctaatagattggtgccctaactttaaattggcaattggttagtgccacattgaaggttgtgacagctctgccatcactagtggtgacttgaaa

SEQ ID NO: 208648 - DNA, 431 bp, Glycine max
  unsure (1)..(431): unsure at all n locations
agcttaacattaatgtcgagcgcgcgattatnactatatctcatcagacatcagagaaaaacgttattgtcgtttgaatttgctcagagcttcaacattcaatttcgagcatctcgatatgttacgggactcaatcagacatccgagaaaaaagttattgtcgtttgaattagctcagaagttcaacattcaatttcgagcgtctcgatatgttacgggactcaatcatacattcgagaaaaaagttattgtcgtttgaatttgcacagaggttcaacattcaatttcgagcgtctcgatatgttacggggactaatcagacatccgagtaaaaagttatctgtcgtttgaattggctcaaagattcaacattcaatttcgagcgtctcgatatgttacgggactcaatcagacatccgagtaaaaagtta

SEQ ID NO: 208649 - DNA, 438 bp, Glycine max
  unsure (1)..(438): unsure at all n locations
ntgagccaatacaaacgacaatgactntntaatcggatgtctgattttgtttcgtaacatatcgagacgctcgaaattgaatgttgaacttctgagataattcaaacgacaataacttttttctcggatgtctgattgagtcccgtaacatattgagacgctcgaaattgaatgttgatcctcttagctaattcaaacgacaataacttttttcacggatgtctgattgagtcccgtaacatatcgagacgctcgaaattgaatgttgaagctctgagccaattcaaacgacaatatactttttctcggatgtctgattgagtcccgtaatatatcgagacgctcgaaattgaatgttgaagctctgagccaattcacacaacaataacgttttactcggatgtctgattgactcccgtaatataacgagacgctcga

SEQ ID NO: 208650 - DNA, 454 bp, Glycine max
  unsure (1)..(454): unsure at all n locations
caagctttgggatttggtcttcgccagngaaatgatcgatgtgggtctgnaaagaggcaaatctagtcatcctgcttggacgaatgagaaaactggggcaaatgaagagggtgaggatgaaggacaaacccatgttgtgactgccattcctatatggccgagtttcccaccaacccaacaatgccattactcagccaataacaacccatctccttacccaccacccagttatccacaaaggccatccctaaatcaaaccacaaaacccacctaccacacgaccaatgctaaacaccacttttagcacgaaccgaagcaccaaccaaaagggaattttgcagcaaaaagcctgtagaattcaccccaaatttcggtgtcatatgctaaacttgctctcatatctactcgataattcaatggtagccataaccnctgctaggtttcctcaacctcc

SEQ ID NO: 208651 - DNA, 453 bp, Glycine max
  unsure (1)..(453): unsure at all n locations
actcaagcttgcctgtccggtgcagcagtaatgatggctcgagttatgttggggttcggttacgaacccggaatgggtttaggcaaagacaacgacggcataactagcctgataaatgccaaaggaaatcgtgggaagcatgggttacgctataagcccactcaggcggatataaagaggagcgttgccggaaggaagagcggaagtcaaggctcgcggttgagacaagaaggtgaaggaaacccaccctgccacataagtaagagctttataagcgcgagcctgtgggacgaaggtcaagtcgtcgctatatacgaagatgacgttccgaatacgctggagttggtacgaccatgccctcctgatntccaactggngaaatggcgagtggaggaacgccccgacatttacgcgacgagcataatgtaaacctttacggtttaaaagctctat

SEQ ID NO: 208652 - DNA, 501 bp, Glycine max
ttaagccacctgaggcatgcaagcttccacatactcgatacccattctacattgtcagctaacatatgctcgacagaataacctccgaggtcaagatagaccaaattggagagattcccaatctgagatggaatcttccccatgaatccagtaagagagaggtcgaggtgagtcaaggaagtcattgtcccaaggaaagaaggaattgacatacctgctccaaggaaataattgccgctcaagatcaagtgattcaaatgctttaaatcagccaaacaaggacttatctctccaccaaactgggatttctcataagcttcctcatcgaagtgatagtagccatcatagaaagcagcataaaacgtagtgttgaggtgaagctgaagaacatgggaagtgacgttgtggcagaggactccataccagtggcaacagttggtatgattatgattccaagaccaaagcctatgtgaaggatctatgagattattcttaatcttc

SEQ ID NO: 208653 - DNA, 460 bp, Glycine max
tgagcttcaggtgatttaggatccaagagcagaagtgctgttcaaatcgtttttttcaagaatttcttgagaaaaaatcaaacctcaaatatttttaactttcgcagttgagaactcagagataacagatacacaaacaaagtaaaattggcagatttagctgccctttttttcccctttaaaatgtgttattgtctagttatgaatgagaaaagtagaaaagtttgaagtacatgacttgttgaccattcattacatagtaaatggaatgtaacactcttttgttctttaaggaaaatgaaaggcttgataatgataaaacttagaccacaaatattctgatttttttagaaatatactaaaattggaagatttacggcctgagtattctcatttaagaaactggtttataaaataaagttagactacttagtaatcaatttcttatccaaaatatata

SEQ ID NO: 208654 - DNA, 414 bp, Glycine max
agcctatggcgcgagcatagctgctcgtgtttgatgaacacgctgatataagccgctatataagtatcttaatgatcaagaacagtcgcatctcactgtgtgtgctctgatattcgactatgttgcgtacaccttgacaaattgatgtcctaaaacactgttcccccctcccttccaataaggaaaaaactctatatattgcattatttcaattactcatcacattagcaatgtacattgatttcttatagggatatccttatgacatatttgcttgaatgataaaacattccattaggaaagttctcattataatattggtaatataaagctcaaaggacatgcatttgtgttgaccttgggatgctgatacacacctctttgaaaaactcccaaacccagatgatggtactg

SEQ ID NO: 208655 - DNA, 295 bp, Glycine max
acacaaggaggccttgaccgtggggagactctctgtgactaagactttctcctgtgatgacgaaccactgctgtggaggcatatgcatgtatgtataatgattgcgatttcacgtcatcacggatcgatcattctatagactatgctatgcacgtacactggtgactccttatatcatattgttgaccgcgtaactattcgtatcgctaatcacaatctacactatcgtatgtatttactcaataagtttgttatgagcaccatcgtcaacttatatgtctcgtatgtacgacac

SEQ ID NO: 208656 - DNA, 473 bp, Glycine max
  unsure (1)..(473): unsure at all n locations
agcttggatagtaccctgggctattatgtttattntggaagttaaaccttggctgaaagaaccactccaattcaagaaacttgcgtattctaacattcttcactgcgtatatcctattgaagttgttcttcttattcttgtctatgaaccatgtgtcaagcctattgagagcaacctaagagcactctccttgcttcctcttggaggacttggccttgttctgagctctggaggggttgctagccatctttagaagataaatagagggtttggaggtagaagaaagatatggtttcaaaaatgggtgataaaaggaggtgttggtgtgattgacaagtggttacggttaccttctataaagagatagtggcgttctggttggctgatgtatgtggcgggagtaaacgcacgagtaatggacgtttgatgaggcgaacacaaagaaatgtaaccgattacacgcaatacacatg

SEQ ID NO: 208657 - DNA, 459 bp, Glycine max
  unsure (1)..(459): unsure at all n locations
ntaacctcattgtctctcacagtctntggatttgggagttcttctcttccttgngtccggactctcagccacttatgatagccgccgatgatcccattactgcttcccctaagctctctgtcctttcttcacgctgcatcacatgccttgcgaactccttggagtacctttgcattggggtcactgaaaccccgtgtaatgaaaggcgtgatgctttcgtctaatggcgctcctctcatgggacatccttcgcatgaagatagaatcctgattcttccttccttctagcgagggaaccatttaacagacgcccctccatgctagccaagagttggtgcacaacaaacaattcttgcgccgctcttttcacatccccggtcgaacgtgtcatacatggccaaaatggcgacgaccgggctttccttgccatgatgaaaggcgaggaaaagcgtcatcgct

SEQ ID NO: 208658 - DNA, 439 bp, Glycine max
  unsure (1)..(439): unsure at all n locations
agcttgtaggattatggngtacccatcacattggtactaggnggcggncgggcgatggtgcacaacaagttttccacatccacaatgcgcgcataaacccaccatcctctgttgcccacctccaactgagctcacgtactcccacgtagcccatatcctcgtttctctcaacaccgggtccccatcaatcctctcaagcttccacaacatccaagcagaacaacattcanaccgcacaagctatcacagccaagcaaaacaaagcataggcagaaaactctgccaaaacaccaaccaaatcacagcttttctcacttaaagaccccagtaacaattccttcgttccggttcattaaccgttggatcgactcgaaaattttactggaagtctctagtacttaagtctacattttgaccgttgggatctactaccaaccat

SEQ ID NO: 208659 - DNA, 462 bp, Glycine max
  unsure (1)..(462): unsure at all n locations
tatccggccccccattaatagggccttctagtaaaatattgcatgccaaggtaggaacatcaatagggttgggcacagtagcagcagggggaggaccagccagctgcagatgcatcgctgccacctctacggcagccggcagccaccatctctggagtccttctctgctcacctgtaaaggatggagctccagatgcacacatatatgcagcatgtgaccgaccagcaggcggctaatcataggggtcaggtgcaactgaatgagagcttctaccagtacaccctgcattagtagagccaagatcccagccctttcctatggcctggagataggcccaatttttaggtaagggtaggacccgcagggatccttgaagatgaagatggagcttangaagatgatgacatggctgatgtgatggactttctcctttgaggagggagagtcgcttggtcagtacc

SEQ ID NO: 208660 - DNA, 419 bp, Glycine max
agcttgtatgtcagggcagattaatgtgatttatctgttatttaaatgcctcttcatctgtcattaagatgccaattacatagctcaacgaaattcatcattcaatcttgcaactatatacacaaaatactgatgtctataataacaatggcataggctcttggcacattattccttttgtccatggatgaagttcattctgttgttgaactttcaatctgatttccaaagcgtgccattttttttcttacaatcatatgatctactataaaatctgacataacttatgatgcatgacagaatgctgttattctctggaggtatgatcctccagaaaggcatgcaagactagcacaggatgcattgaaggctaataaaaaggggacataacaccttcatggtctggttgaaatagcatg

SEQ ID NO: 208661 - DNA, 451 bp, Glycine max
  unsure (1)..(451): unsure at all n locations
acgaaattatagaaactaaacattnttcccttaatttatagtacatagatgctatcacagtgtaccgtaataattgataactgattggatgactagccattcatttgaactggtagtaacctaggctctaggctgtatgtgctttggctgggtgcaagcatgttgttgtcaaggaaggcttatttagttatttttccttttatgaagaaaatgtttgtagaagagcgaaacaaagcattcagaaactaaattagatacattgggaaaaatgctagataattttgggttaaacttaaagctgttagaattgcccgtagatgatgcaattaattcttcactaacaattggctctgaactaaccctatatttgctgggtagatntggctatcactttcttgatattagtaagttntgctcattgcttttctcgctgaaattacaattgtacaag

SEQ ID NO: 208662 - DNA, 431 bp, Glycine max
  unsure (1)..(431): unsure at all n locations
agctncaacaattggttaatagatataaatctttntgtaggtaagacaatgttcatgaattgtttaatagagataaaacaacaaccaagccttttcccactagagagattgaataacaacccttgttataacccagcaagggtcctaagatattgctactaactttccagcacattaaccttgaatgtattgagcttgaatatttaatttaatggattaaaaaggtacttcatatcaccaccaaatcagtggctaagacaatccatcatcaaatttctcattaaaaaagaaatcttgacattaatgaaatggataaactttcaatcatatgagctattcaataaagtatatgtggctccaaggtgctaatatgactggattctgataactttaggtattggttgtgattataaatacatgacaagaaaaac

SEQ ID NO: 208663 - DNA, 465 bp, Glycine max
  unsure (1)..(465): unsure at all n locations
tctacttatgtggcagggcgggcttccttcactttcttgtctcaactgcgagctttggccactgcttttccttcccgcgatgcttctcttcatatccgcctgagtgggcttatagcctaaaccatacttcccacgatttcctttggcatttatcaagctagttatgccgccgttgtctttgcccaaaccaattccgggttcgtaaccatttcccaacataactcgggccatcattactgctgcatcggacaggcaagcttgcccagagaatgagtccacggaggaaatgcttaccacctcaaaagactggaaagcggnttctaatgactcctttgcggcttccacataaggcatagaggacgggcagctcaccaagatgtcttcctcgcctgacacgatgaccanatgcccctccattacgaatttcaacttttggtggagtgtagagggaacaactcccactgg

SEQ ID NO: 208664 - DNA, 467 bp, Glycine max
agcttaacctttcctcaacctcaaacagtgcttcttctgacctgactaaagagaagaacatcactgctgctgcacctcctgctaacgacccagcaaagccacctgcaaagttagttttttttttttccttcttccttccacaaattattatatggtctcgactattaatcacgcgtgttcatgtttcgactaaatcttgatatgtcatgaagattaatcaggatttattataatagtctgatccatacaataatttctcccttcccttattttttactgcctctgtttcttcatgcagatgatgatgcttctataattgtatgcttgtgtttaatgcttgcatggtgattatcatgtgcaaattttatgattcatgcaaaataattaaaaatatgtatagtttctctggccacgaaggttataatacagatgataaagaaatcatgtcccggtttagtagtacttaa

SEQ ID NO: 208665 - DNA, 462 bp, Glycine max
  unsure (1)..(462): unsure at all n locations
ntgaaggttaattgaggtataatttacctaaatgctattaatttgaaatctaaacttaataaataaaaataaaaaaattgtcttcactctctctctctctcaacttgaaaataatcttgtatcacagtataaatttaaaaatacttattgattatatccaaaatatgaaatgtaaagactgatactactataaaatgtgaaacggaatctaacaagataccctaaccgaccgcatgcagagccacatgccacgggacaagcacaaatgaacgcaaggaactagaagatttgctaatttatgttactaatagtaatgtagaaaacatcaaggcaagcgtttgcctcaagcacaagataaaacaaacataatacataagcagcttagagttttccactacctagttactatcccttgatgtcattccctagttcttcttcccaacaaaagctggcattaatatt

SEQ ID NO: 208666 - DNA, 331 bp, Glycine max
  unsure (1)..(331): unsure at all n locations
ttgttagctaagcgtcggagaatntncacgctccacatacatatgaaaaaatagagaaaaatgtatataagttgggatagtatattaagtccagagtttttagataatatgatacctctcatactataatattggcctcaaccacattttcttattgagaccatacggctattttaaatttattattagatgacttgacctacataatatctacgnccnnnctcaaataatattggatataaataagtgtattagaaaaaaaatgtaagtctcatgtaaaagtataaaataatccacatcatataagcctgataacttctatatttgaatt

SEQ ID NO: 208667 - DNA, 452 bp, Glycine max
  unsure (1)..(452): unsure at all n locations
ctgaccggaaatatatgtntgatatagagnagcttcaagtataaatttcatatatatccccnccgaaaggaatatatgtcataattaacaagtggataattgagcatgtattgtttcaaatatatattcatcaacttgaagcggactacctcgtttcaaacatttaaaaaatatatgaaaattgaatgtccacctatttatttgggtgtacccttcaatcgtatttggtaaatgctgacgcttttttttttttaatgttgggtatatataatccacatgtgattcatcaaatgagtataacttaattgaaaatacatactgaatctataggaagaatctgactaacttcatcaatccttgtaaaataatattaaggataagcgataaactcttgcggacaaaagtctctctactgaggattaactttatcaacttgcatgtggacaaagata

SEQ ID NO: 208668 - DNA, 481 bp, Glycine max
  unsure (1)..(481): unsure at all n locations
cgcnagctntatgaagttntctggttttccacacttcttgaaatcttgtgctattcatcttttcattctcttctccctttgccaaaaagaattcgccaaggactaaccgcctgaattctttttgtgtctctcttctcctttttccaaaagaacaaaggactaaccgcctgaattcttttgtgtctcccttctcccttgtcaaagaattcaaaacgacacagtctgagaattcttttgattcttcccattccctaatacaaaagtgttcaaaggactaaccgcctgagaattcttttgtatccccattcacaaagtatcaaaggtttaaccgcctgagatctttgtctcaacacattggagggtacatcctttgtggtacaagtagagggtacatctacttgggtttgactaagaacaagagagggtacatctcttgtggatcagttctagtggagggacatccactaggttcaaagagaac

SEQ ID NO: 208669 - DNA, 443 bp, Glycine max
  unsure (1)..(443): unsure at all n locations
gaagcttctcattgatgttttctcaagacagcttctcaaggaagctacctagtctataaatagaagcatgtgtcacacttgtggcaactttgatgaatgagagtcttgtgaaacacaactcanagttcaacttctctccctttttcttccttcaatttcgtgctcccccctctctctttctctccctctttcttttcctccattgaagcatcctctccaagcttcttatccaaggctcatcttggtggtgaagctccttcttccatggcttattccttaatggatggcgcctcctctcacctctttntctttgtcttccgctgcatctccatggtggaanatcaccattaaaagaccccattgaagctcaaagatccagcctccatagaagccccacaagcaagcttccatcaacccatggctaaatacgatcccaagatagt

SEQ ID NO: 208670 - DNA, 476 bp, Glycine max
  unsure (1)..(476): unsure at all n locations
agctgggttcgaggtactgtacccgtgaagatctaataacgatgattaacgaatgaagaacgtcgaagaacggttgatatctttgcgagattcctcacggaaaacgttacggaaacgtgtcggaagcgcctcggcttatattttcttcacggaaacatattttccaagcgaattctaaagagagagaagtgcctaaggggctggctcttcttccttcttcatttcctcccctatttatagcaaaataggggaggtggttgccgcccagctcgcccaggcgagctcagctcgcccaggcgagcagggttgcttcctccagaagcaaccgccttctggaggaatcttctggagggcccagatgggcctgggtgctatttgcacccccatatntactaagtacacaccnctctggtgttttttggtgattcttttttcgtaaagctaccggaacttacgaatttcgtaacgatacttgt

SEQ ID NO: 208671 - DNA, 455 bp, Glycine max
  unsure (1)..(455): unsure at all n locations
cactcaagctgggttcgaggtacttacccgttgaagatcgaagaacgattaagaactttgattaacgtcgaagaacggttgaaacctttgcgagattcctcacggaaaacgttacggaaacgtttcggaagcgccccggcttagattttcttcacggaaacaatttttccaagcaaattcgaaagagagagaagtgcctaaggggctggaccccttccttcttcatttcctcccctatttatagcaaaataggggaggtggttgccgcccagctcgcccaggcgagcagggttgcttcctccagaagcaaccgccttctggaggaatcttctggagggcccaagggggcctgggtgctatttgcacccacatttttactaagtacacccnctctgctggtgttggtgattctttcttcgaaaagctacggaaacttacgaatctcgtaacgatac

SEQ ID NO: 208672 - DNA, 460 bp, Glycine max
  unsure (1)..(460): unsure at all n locations
agcttcagaattttctctagttntgctcgcttctggctatcctcctcaatctgctgctgtaattgatggatctctgaatctttattctggatatcagattggaacttcttcaccatgacctcataagttttcagaaggctctgttgttcttgaatttctgcagctaaacgtgagtcttggggagaaacacacactggttntgggttgttctccctgtagaaatgcttgagttcagacagatttttcagctcactaataacaagtttatcagcagtgtgaatattatcagggtcgtacggagtatgagcagcttgaagctcaatataagctgacttcaaggaagagatattcataaaaactttagatattagggtttccattgcttctggattctgattcatggccttcttctattggtgaggatggaccttctgactgttgctctcaccgtattgggtct

SEQ ID NO: 208673 - DNA, 480 bp, Glycine max
  unsure (1)..(480): unsure at all n locations
actcaagcttctacgccaagtccagagtaagaatgttgcatcttcaaacttttggttgttcttgaaagntgcattggaaaacaatattatgtttctgtgctgccaaatggaccatgtcaaagccagccaccaatactgccatctattgatccttatgccttcagccaagccatttgcgtgttgcaagaaatgttgctttggggtttgcgggaaagcacctttgatattcagccaagacaaggattcccaccaaataggttggattttgctgcaatggatgagtaagtgggctgcatcctcctccatgcttctgcagaaagggcaggacatatccgtgatctgcacctgccgcctctccaagttttttcttgttggcatctatctctaagtaacctccaggtgaagactngaaatttgcttggtatccttatactccataactcctcanaacattcatcatgtcttccctctgctgtttcc

SEQ ID NO: 208674 - DNA, 465 bp, Glycine max
  unsure (1)..(465): unsure at all n locations
agcttgagatgaggaagtgttgaagggtgattcttccttcttttattcgttgaccacagagtggtacctggagatatgtcgtgggggtcaagagaccttgnggacgtcaggtggggtgctattgcccaaaaccaagcttgaccaatcccgacccaacccgggcatagtcggtcagtgagaacctgtgatgtacctaaacaggcgagctcctggcagtcaatagataaaaggaacaaagaccacaaagcaaggaggcttgtgtggtggctggccagctgtgaactttgattgatatgtgggttatggcctctggtaatcgattaccaagggtgggtaatcgattaaaaggctaaaaaatgaagacaggaggctaagatggtctctggtaatcgattaccacggcgtgtaatcaattaccaggcttgataacgaggtcaggaagccatgacggcttctggtaatcga

SEQ ID NO: 208675 - DNA, 472 bp, Glycine max
  unsure (1)..(472): unsure at all n locations
tgtagcanatgcaaaccacaataactnttagctcgaatatccgattttgtctcataatatatcaagacgctcgtaattgaaaacggaagctcgtagcaaattcaaacgacaataactttgaacttggattttcgattgagtcctgtaatatatcgagacgcttgaaattgaatatagaagctctgagcaaatgcaaacgacaataaattttaactcggatgtccgattgagtcccgtaatttatccagacgattaaaattaaaaacagaagctcgtaacaaattcaaacgacaatatcttttaactcggatgagtcccgtaatatatcgagacactcgtcattgaaaacgaaagctctgagcaaatgcaaacgacaataacttttaacttgaaggttcgattaagtcccgtaatatatcaagacactagaaattgaaaatggaagctcgtagcacattcaaatgacaataac

SEQ ID NO: 208676 - DNA, 473 bp, Glycine max
  unsure (1)..(473): unsure at all n locations
cgcaagcttngaatctatggccgctatatccacttggtactttttgancacnaaatatactttgtgcgtttagaaatgattaaaaatataaaattttcttatgggttgttattggttggcaactttgtgtatcttagtccattttgttgattggtaagttggtaactttgtgtatcttctccatatgcaatggccaccttcacgattttaaatcaaataaagattggctggtggtgctttctctcgtgtncagcaatttctttggaagaacatgaaaatttttattttaaaatatataatatttaagtgatcttttttttgctttgtttatatttacaaaaaaattatttattgattgaaattcaaagtgaggtctatttaataaccttctcatgtgtagagatattcatcttactagacatggctgtcacatggtgttgtactcgaataatttataatatcgtaattctatt

SEQ ID NO: 208677 - DNA, 467 bp, Glycine max
  unsure (1)..(467): unsure at all n locations
ntcaatgcacaaattctaaataattatatgaacactntgttcagtttcaatnatgatattaattctttaaattatatataaaaacctaaacagcaagaaaaaaagaaaatacaaaatcaatatctctctctaaatttctccttactttatttcatcaatttatgttaattagaaaaagtactcaatttatagggttcacgctcaacacaatagcatatcaatttcacaacaattggtctgtcaaacatatatatctcacacttataattataaggataggataaaaatgacggaaacacccaaaaactcattccaattaatactctaaggatccctacacatgttctcactaatctccaattgtgaataactcatcccttacctctaagcgggcacacgtgtcttcagccagcgatagcagcataactcatcccttacctctaagcgggctcacgtgtcttcagtca

SEQ ID NO: 208678 - DNA, 231 bp, Glycine max
tctatcctaaggggaatattttataaaaaaccctgttaacaacctgttttttgtaccaaaactaccgcgatattatacctgactttatacacctttgaacgttggtctctccctataacttgctcaaaccttcttctaaactccaaaatagtaggaaaataaccaccaacctcagtgacaattagacatccatctgtattacaaggagttaaatgcactgcatgactatgt

SEQ ID NO: 208679 - DNA, 456 bp, Glycine max
  unsure (1)..(456): unsure at all n locations
aagcttaccccactattacccacaaccacccaccatttctatctttgtttagataatgacatcggcagaaatgcagttgagaagagaaaggggcctatgctttacttgtgatgacaagttntcccctagccatcgttgtcctaataagcaatattttgttccacagtgggaagaagaggatgaacctgcattacaaccagatccaccagacgaggttgagacagctggtgaccccagtttgcaagatcatcatttgtcttataatgctttaaaaggctcatcaggtcttgggacaatgaagtttcaaggatcaataaatggattgcgagtgtagattctactagatagtgngagttcagataacttcctccagcctagactagctcaatgcctgaagttacctgtagaaccaattccatatttgatgttttggttggaaatggaaatgccttgact

SEQ ID NO: 208680 - DNA, 466 bp, Glycine max
agcttgcacactagatcaatgattagttatttcactgtgtgagctgtgaaatgagtagggagtgttccaaagtgggctcctttagaaaagcgatcaacgacggtcataattaccgtggctccctgatagtttggtagaccagtaacgaagtccaaggccaaatcttcccacggacgtgacggtggcggagttggctggagtagacccgtcggtttctggggaacatatttagtttgtaagcaatcagtgcattgcttaatgaattgttgggtgtcccgacgcataccctcccagaaaaaactttgttggatgtgattgagagttttagctaatcccatgtggccgtctaacaaggacttgtggtattcctccaggagatgagggatgaaagaattctcgcggttaatccaaatgtgtccctggtggagaaggaggttatccttgatattttagctaatctctgata

SEQ ID NO: 208681 - DNA, 466 bp, Glycine max
  unsure (1)..(466): unsure at all n locations
tataaggatagtttaacataaagaattgaatttcaatnattgtattacaaagatgtagatattgaaaagcaatttaggattaattggaataaaacttagtgtaaataaaatgaatgtgatataatgatgtgttgtcaaataaatttggatacaaagatagtttaaaatatgtggaatagctataacaattttagaggataaaactaataggacagacaatagaaattgctatagcaacatttggtgtcttgaaatttaatttagatctaaaggggtacatgaataaactttaaagattattgagattgtataaatatctcaatatgatcattntagagcttgaatcattaattntagaaaatataaattgtgctatttaattaataaatattagtgattatgaaatcactaatttcatatgcacgtcactaaaacttagactactctatgtttatgaatattattt

SEQ ID NO: 208682 - DNA, 460 bp, Glycine max
  unsure (1)..(460): unsure at all n locations
agcttctcccctatattgctattattagggttgagaagtgaagaagaaaaggggtcagccccttaggcacttctctctctttcgaatttgctgaggaaaattatttttgtgaagaaaatccaagtcgaggcgctttcgtaacgtttccgtaacgtttccgtgagtaattacgcgaagattctcgaccgttcttcaaagattcatcgttcgttcttcgttttcttcagtcttcaacgggtaagtacctcaaaccaagcttttcaattcactctatgtacccgcggcggtccacattntgtttcatgtatttttattctcgttctcatttactctttatacccttttttgacgtgcttaagccatttatttaagtcatttctcgcttaatctaaaaataaaataaatttccaccgatcgttagaattgtatcatccgttaattntggtaaaatgaattccga

SEQ ID NO: 208683 - DNA, 465 bp, Glycine max
  unsure (1)..(465): unsure at all n locations
ggctctaaatntacattgatgtnnggatntattggaggatgttatatgccattnttgctttaagagtaatgtcccactaaaactaactttccaaatgtttgccttcgcaggaatggcaccgaggaagcttgcctcaaagaggtccaggaaggacaaggcggccgaaggaactagttccgccccggagtacgacagtcaccgctttaggagcgttgtacaccagcagcgtttcgaagccatcaagggatggtcgtttctccgggagcgacgcgtccagctcagggacgacgagtatactgatttccaggaggaaatatggcgccggcggtgggcaccactggttactcccatggccaagtttgatccagaaatagtccttgagttttacgccaatgcttggccaacagaggaaggcgtgcgtgacatgagatcctgngttaggggtcagtggatcccgttcgatgc

SEQ ID NO: 208684 - DNA, 427 bp, Glycine max
  unsure (1)..(427): unsure at all n locations
agcttgcttagagaactatctgttntcctatgtgaagcaggnacccgtcaacttcgttcactaacacatgcttcacatcagaggtaaggccaacagaaatgaaaagtatcataaacatggttatgctgcgaaagtaacatcactgaaaacaatatacacctaaataatcaatgaaaataaatatctcagttagcaatcaatcacattgttagtttccatctcttccactagctagctatttcgctttaacaattaaagtacaactacaactacaactgataggaaaatntgtgctaagggaactataaaaggatggtaaatatcatcaaagtcaaggccattctgttgtcacactgaagcctcaatccgaggctcaaatgagagggcagacataaagtctatgactctctcatttatgcaacatttt

SEQ ID NO: 208685 - DNA, 443 bp, Glycine max
  unsure (1)..(443): unsure at all n locations
tagcgctgtccttaactgatgtcgcccttggtttgcttttgttaagagngagttaatgccaaagcggaagctgtttggtattgcttgatcacccccgttgtgatatttatttctcctgtcaacttaagggtggctacttagcatgtctttcccctggcttccttccttcataggcttctaccaacacaagttggatgacttgtctttctaatttgcctaaaccgggtcctttgaaagatttattaacttttcaatgctcatttagtagaatatatagcttgcttaactacactgttggcaaccaataaccatacacatggctaannaacgtttaattggtttgcaaatttttgttatagcattactctcttattattagatatattcaacttttcatttgagttatgactaccctatttcgatatattctacgcacggttatg

SEQ ID NO: 208686 - DNA, 452 bp, Glycine max
  unsure (1)..(452): unsure at all n locations
agcttataagaacaaaattgcctatatcatttccaaatatgcatgtgaattaggaagcatcaacaagaatcaagccaaggctattgtgcaaggaatcaatggggcaaaacacaccaaaagattatgatgatggatggctcanattctcacaaaggtaaacttatcactttcaaattgagctttcaaaactctcatgacatgtagaggaaaaacaaggatttcaaatcacaaaatgtcaagagacttttattttcagaacaattacccatttcttgaacatatcctataatttaaagaaaaatatgcaaagttgtacatgcaaacagaattgacctataatattaaactagaaacccacaaaactaacaaaactaacaaatttaacacanaanatactaacaaaactagcagaatcaataccaaagaacactccctctatacttaaacaacac

SEQ ID NO: 208687 - DNA, 460 bp, Glycine max
  unsure (1)..(460): unsure at all n locations
ntatcatcctttttagtgacttatgttagccttgtttttatttgaactattgntctttatagaacctatcttttctaaatatgataaaggaaactcattagtaggcataaacttagaaagcttatattttgtgtttagaaggtttgtcataattaaaacaaaggattttgaactcaacataggcccattcttgttagccaacatgaaaacttccaacactaggctgaaaaaccaccaagcaccctcaacttatgtgcctactcacaacaacaacaacaacaaaacttggattccttgaggtttgagaaacgacaccttcgtacccaccatctcactcatggttagtcttaaggatccaagtttcacaatcaacaacaattcaccccatatacactaaaagggtcactaatgctcttatgagatagttttctacactctgagacaccattcaaagtaaaaa

SEQ ID NO: 208688 - DNA, 476 bp, Glycine max
  unsure (1)..(476): unsure at all n locations
agctngaatcggacctcggtgtgaaaagttatgaccatttgaatttttcgagagcttccgntgttcaatttcgtgcgtctctatatgtaatgctcctgaatcggacatccgtgtgaaaagttatgtccatttgaatttcttgagagcttccgttgttcaatttcgagcgtctcgacatattatgcgcacgaatcgggcatccgtgtgtaaaattatgacaaattgaatttctcgagagcttccgatgtttaatttcgagcatctcgatatattataagcctgaatcggacctcagtgtgaaaagctatgaccatttgaatttctcgagagctaccgttgttccttttcgagcgcctcaatatgtgatgcgcctgaatcagacatccaagtgaaaagttatgaccatttgatattctcaagagcttccgttgttcaattttgagcgtctcgatatgtgattcgcctaaatcggacat

SEQ ID NO: 208689 - DNA, 431 bp, Glycine max
  unsure (1)..(431): unsure at all n locations
agggtgatgtcgcgcgtactgatgggtaccatgaggtgtttgctgttgtttgacccacgcgggtgttgaagagacagcatgggcatctccttccttcctttntgcccctgttgtcccgattcttttggcgttcacgcttgtggaggaaacgtaatcaaactttcctctcttcaatccaacctcgattctttccccggcaaacaccagatccgcaaagctggacggcatgtaacctactagcttctcatagtagaacactggcagagtggccaccatcatggtgatcatctctctctcaaccatgggaggagctacttgtgccgccaaatccctccatcgctgcgcatattctttaaaggattcaccctctttcttgaacatattctgcagttgagtacggtcaggagccatatcagaatagtcctgatact

SEQ ID NO: 208690 - DNA, 426 bp, Glycine max
  unsure (1)..(426): unsure at all n locations
agcttcatgctaagcatagtgtcgcaatcattattggaacgatggcgtcgtgtgagataaaaatgattatgcttgtgtccggattagaagtaaaaaataaagtcaagtaaataataaatgaataaaacaactatgtcaattgtgaaatgaagaggcaaggattagaatattagaataaatgaattgaaaaagttattatgtttctttgttagaagggagatggagtaatgaatgaaagggttttgtttgtgtttctggtgagatggggtggcagagaaagaaaaaaaaagaaagtgaagtgtagacgtaaatgaaagtagaaaaactgttggagttggataccttggctaanagtttttaaatatgaatgaaaaaggttagttgagtgtcctgatctacgatcatgattgagcttctcacacacct

SEQ ID NO: 208691 - DNA, 460 bp, Glycine max
  unsure (1)..(460): unsure at all n locations
tttgttttttgacccaaagtacacaaagcccgttgggttctcctatctcattgaaatccccaaaaccatccattgtgcctaacacctctgaaacccttctgcccacatctccatcattacattccctttcccactatcaaataaatcttatggttaggaaaacaactaacatatataaccaccagcccctgcctcactatcaaaacattgaatgaaaaaggaactgaatctacgacaccccaggatagtagaccaactgcaaataattctctaatagattcaaaagaacagagaatgtgaaacgagcaaagcaaaagaacaaataggtcaaactacttccgatcaacaaggtaacagagatccgtaccccaaccaaaaaaacaaagtccaacgacaacaatgtccttataaaaagcaaagaanacatagtctaaatgcaacgaanaagaatgaagacatg

SEQ ID NO: 208692 - DNA, 337 bp, Glycine max
  unsure (1)..(337): unsure at all n locations
gagtcacctgangcatgcagcttaacgattacaatggccacgtcttgttttcttacatattctgaagacctgcaccacatagaatctgactctttcggccacgatcccgcaacctactatgttttaatatactctcagcacaccgagtatgctctatcaaacgtgtgatatacaacaatctgtctgcatttctcatgtgcataacaaactcccaaacctactgtgaaggccactctgagctgtcatctgctttggaacgcgacatcccccgatgcttggcctcttctcttctataacgacttacatgtgcttctcatacgagctatccgaatctgat

SEQ ID NO: 208693 - DNA, 445 bp, Glycine max
  unsure (1)..(445): unsure at all n locations
tctatagacactaagcttacaactgcttcatagtcaatttcaccacgngagggaattccntctgtttgtattncgaaganngccatccttgacctcctatttgtgaatgtaatttcaatcttccgatcaattcgaccatgacgaataagagtcgtgtcaagaacatcaagcctatttgtagccataattattttgacctggttataacacatcccaatttagaaagaagatatatatgtatgtagtcattgttctaaccaagtgcgaatctccttaggattgtgaacatggcacacatataaggaaatcaccttttcaagatgatttaatccatccagctggttaagcagctccttgagggttctttgtatatcacgatcataaccttggcggatactggaacgtcgtccagctatggcatccaactgcatcatgaatatgatgc

SEQ ID NO: 208694 - DNA, 474 bp, Glycine max
  unsure (1)..(474): unsure at all n locations
agcttgtaaagaanaatgatggcatgactcttatccaatcttattatgttgaanagctattgaagaagtttaattattttgatgcgaaacatgctcttactccttatgactcatccatcaagttaaagaaaaatttgagtaaatgaatttctttacataaatattctcaaagtatcggttctttgttgcatttgacaaacttctctatgcctgtctgatattgcacatgcagttggtagattggaaagtaattgagggatttagtgatataaaattgaagttctgattttgatgaaataaaaatgagaagtggttatgtctttgctttagctagttgtgcagtatcatgaaaatctactagacaagttattatttcacatgaaagcaaaaattattgctttaaatactgctactagtgagggtgaatttcttaaaaatgtattatgtgatttgtcattgttaaataagcgtata

SEQ ID NO: 208695 - DNA, 471 bp, Glycine max
  unsure (1)..(471): unsure at all n locations
ntgcaatcttcatcaccaattggcagtgaataggggagatgtactttatgatttagaaaatngttcttttaagatatatatgtaattntgtttacagcttaaaaactatgtctctactttgtgaacggggacatctcaaggtgactatcataacattcatatcgcaaagaaaataaataagagaaacagatatttgtcattatcaactatctgttttccgattaaaaaataatcataccaataaatatttaaattaatcgttggcaaaaatttaacttatgatactttagtctttaatacttccctttgttcttatatactttatccgttctcttttataaacacacaaaaaaaaattgttattaagtataaacaaatttcaacttagactatattcaaaatattctttatttaataaaaatttatgtttaatatcaagttcgaatgaataatttttataaaaaaaattat

SEQ ID NO: 208696 - DNA, 450 bp, Glycine max
  unsure (1)..(450): unsure at all n locations
agctttgatctaccaccaccacttcaccatcatcttagttttctattatgtgtaatattattagtactttgatttctagccgtgtatttggctatattattatgacatttgaacaatttagtatttcttttatttgcatgttatgattgaacaattatgaattatgctatatgactatgtggtttttatatatttgatctattcatgtttcttgcttcatgattggtttatattctttaatgaatgtcttgtgaatgattagtagtgtatatattttttttactacttgttacgtactctggctttttgttgatgccaaggggggagagaaatagggattaaatcaagaactcacataagagattaacttaatttcaagtgaagcagaaactcaaaaacacaggtgaagaatatggagaattaagtgagagatcgactangaaaaagtct

SEQ ID NO: 208697 - DNA, 468 bp, Glycine max
  unsure (1)..(468): unsure at all n locations
tttcgcanagcttatggtaaaatctgggacctatccattatagaagtctctacagaggccattgcctccctcgcccagtattatgaccagccgttgaggtgcttcacctttggggacttccaactatcacccatggtggaagaatttgaagagatcctaggatgccctctaggggggaggaaaccatacctcttcacagggttctatccctcattagctagaatttccaagatagtccaaatctcggcgcaggaattagaccacaggaagcaagttgaaaatggggtggtcggaataccaagaaaatatntggaggtaaaagcaagaatcttggcagataaaggcgagtggatcccgttcatagatattctcacactgttgattttcgggggggttctctttccgaacgtggatgggttggtggacctggcagcgatcgacgcttttctagcctatcataaccacaag

SEQ ID NO: 208698 - DNA, 449 bp, Glycine max
  unsure (1)..(449): unsure at all n locations
agcttctgtccaaggagattgtttctgagttcattggttctaaggaccagccagcggatattttgactaagtccctaagaggacccagaattcggactatatgttccaagcttggtgcatatgatttatatgctccagcttgagggggagtgttgaatgttgaatatttcttttgtattttagctttgtttggtagcttaatctgtaagccttattcagaaggcaacagtgagatgtcactgtcatctctcctctctcttttttgtatcctatatatatgtaacattttgaatctaataaagctgagagagaaagtgaggttttgacccctcctcaccttcatttcaagtcctcccaataaatgcctcgactttttctacagcaagatttattgaatntaaatcataattgaagtttgaaacaaanaggagcagaggactcattcttac

SEQ ID NO: 208699 - DNA, 446 bp, Glycine max
  unsure (1)..(446): unsure at all n locations
tcctcactttntgtggattgatgctcttaaaacggctgtgtatatattaaactgagttccaaccaaggttgtctcaaagacaccttttgagttattcaagatttggaaaccaagtttgcgacatatacgcgtttggggatgcctgtctgaagtaagaatttataatccacaagagaagaaactagaccctaggactattactaggtatttcattggatatgctgaaaggtctaaagggtataggttatattgtccatcccacaacactaggattgtggaatcaaggaatgcaaagtttcttgaaaatggcttgattagtgggagtgattaatttcagaacatttcttctgaaagggatcactatgaagttgaaccttctgggacaagtaatagattggtagtcattcccacccctcaagttaaaatgggtgttagacaaccagtga

SEQ ID NO: 208700 - DNA, 458 bp, Glycine max
agcttgttattggagcaatccataatagtatgtaatgcattgactagcaataagttctgctagtcaaagggaatgattatttatgtcaataaagaactatctagtttgtatgcattgaacttggcttattcacatgtttattccattctagttcataggttcctatgattggaaattttgatttttttctcttatctatatgtcagtcatttctatagaaacatactaaacccttatttgctacagcttaagttcggagacccttatcattttgctgtttgcatcatcgttgacgatattcattgttggagactattgatactgagcattatcacaggtacaaatacaaaacatacttttcttgtcctagtttatgttagagtccttttttacattgttttatgtgattaatgactattgttgtgcatatacttaatggttatcatgagtgaacctta

SEQ ID NO: 208701 - DNA, 455 bp, Glycine max
  unsure (1)..(455): unsure at all n locations
ntaacctcattgtctctcacagtctttagatttgggagtctatccaatccttgggtccggactctcagccacttatgatagccgccaatgatcccattactgcttcccctaagctctctgtcctttcttcacgctgcatcacatgccttgtgaactccttagagtaccctcgcattggggtcactgaaaccccgtgcaatgaaaggcgtgatgcttttgtctgatggcactcctctcatggggtagccaagctgtcttatggcgaggacgggattataattaatacaaccccttgttccatcaagggaacatttggacatccttcgcatgaagatagaatcctgattcttccttccttctagtgagggaacaaattaacagacgcccctccatgctagccaagagttggtcccaattcgcctttcctttttcgacgcacgagcggtgaccttgta

SEQ ID NO: 208702 - DNA, 471 bp, Glycine max
  unsure (1)..(471): unsure at all n locations
agcttggatgtggggattcacttttgatctctactgtaccataaggaanaacattagtcaccacaaaaggaccaatccactttgacctcaacttaccactcatgagtccgagcctagagttatacaataagactttgtgtccaaccacaaagtccttcttagctatcaagctgtcatggaacttcttggtcttctctttgtagaatttggaattctcataggcttctaaacggatctcatctagctcactgagttgcaacttcctttcctctccagcctggtccattgagaagttgcaagtctttacagcccgataggctctgtgctctatctctacaggaagatgacatgtctngccaaagacaacccgataagtaaacattcctatgggtgctttgtaggcagtcctatgcgcccaaagagcatcatctagcctggtgctccaatcctgtctgttcggtagacaatctt

SEQ ID NO: 208703 - DNA, 473 bp, Glycine max
  unsure (1)..(473): unsure at all n locations
ggaccttgaaactaagctgctatgtgaagatagcggggaaatttgtgcttatttaaaatgnnatctngcatggcaggaaagtagtgtatgagaaactaattgctgcaaaccggtgagttgtatgaatcttaattgtgagagaatgactagtatcaactactaatttttgcatgaatctatgaatgctgaatggatgcatgatgtggaaatgatgaaggccatgttgaatttatttttttgttacagagccaaatagccaccttgtatgagtaattaaagtaaacctttgcacccagtaagccaagcatgattgaatattgtcctgaaccctagccaaagtaaataattntatcacaccttgctccaggttttaggaaagcattatcttgatggaaatcgtttggttcaaatttgagaggcggtgcgtttagtaaatcatgtaaatggcataaccatgcttctatgcttaaaaa

SEQ ID NO: 208704 - DNA, 466 bp, Glycine max
  unsure (1)..(466): unsure at all n locations
agcttgaggaatcttaagagatttcttattctccgctattattgtcgnactacacgcgagcccgcttagaggtaagagatgagtttatcgcaattaggaatgaacatgtgtagggatccttataggatcaaattggagtttattttggaatgtttactttattggaattatttatttatgattataattacgagattattgtgtttgatggaccaattgatgccctgatgcgaattggttgataaaattgagtgctcttgatgttttcgtgtttttgacctatgattttgattcctttgatttagatatgattatgtgaaattgtttgaaggacttaatcatatgaacataacatgttgatattattactgtgtgaaatatatatgatgcatgaggcatgataacatgttgccttgcgattatggaagtgtgatgaactatgtgtaagtgacaagttgagtatgta

SEQ ID NO: 208705 - DNA, 461 bp, Glycine max
  unsure (1)..(461): unsure at all n locations
tcttgaggcacaaganattcaattntntaaatattcaatttatcaaatagaactttgggctttttaggttcttcatctcaaattatttctttaatccatctatagcttttggaagctcttcaagatcgagttccaataatatttacatcatccacacaaacaacaattatgaaaaatcttaaaaatacatggacaaataggatcatttttatatccttcctttagcaagtactcattaagttaattataccacatgcgacatgattgctttagtccatagagagtattcttttcgagaatatgcattattggacaaattatatccttcagagagtttcatgcaaatgtcaatatcaagatagtcgaacaagtaagttgtaacaacatccattggatgtaaactaatcccttcatgtgctactagagtcattaagtatcanaagtgctcacatccactacag

SEQ ID NO: 208706 - DNA, 439 bp, Glycine max
  unsure (1)..(439): unsure at all n locations
agcttgctcaatggtttgaccactgctttgttgactacatgnatgctgcaagtatctgatccatctgctcatgtgggttaatttgaaaatcgagatgacactggataaatctgaagtcgtgtataacactttcagattgaatcaaatttcggggttcaaccaaaattgttcaatcggataaaatcagaagattataattcaagagttntattttggtcttgtatgttatgtcaccctttatgctttttgaaccagaatgattatttatgatcaaagaacagatggtctctgaaccagatgaaaattttttctttgtaataactgccgctgatggaagttctagtaacttccatgtaactcccaaaatttgcctaaatcgaacatctcgttattacattaaaacaagcgtgcgctctttatttaacataataaagagatc

SEQ ID NO: 208707 - DNA, 459 bp, Glycine max
  unsure (1)..(459): unsure at all n locations
tgaggatagagacttcccaagcaatttatcttctctncttatttgctcgctactaggatagagtcaccctatggtggctcactcaagcttgaggatagagacttctcaagctatttatcttctctctatgagaggctctctacttggattgagtcaccctatggtggctcactcaagcttgaggatagagacttctcaagctatatatcttctctctcagagaggcttactcaagcttgaggatagaaacttcccaagctatttatcttctctctcagagaggctctctacttggattgactcactctacggtggctcactcaagcttgaggataaagacttcccacgctatatatcttctctctcagagaggcgtattctcactctaagaagcggattcactcttatctatgatggataggaatgaaggctcctacccttatttatactactccatct

SEQ ID NO: 208708 - DNA, 458 bp, Glycine max
  unsure (1)..(458): unsure at all n locations
agcttagaacaataaacttggccttctcttattttgtcttgggctnggcgaccacgatcaacaaagtactttcggcacctactatatgttgacttgaccaacggtgttattggaatgttgtgacaatctttcaacaccttattcacacattctgataggttggttgtcatgtgaccatatcttcctccagatgtatcagaagccatgctccattnttcctttgaaatgcgatcaatccatcttgctatggttggactcaattgacaaaatttttctaagttttgatcaaacacatgcttgcaaggagtgtacgctgcatcaaatttgttatcatcaaaactcgtatgtagatatgaaactcacattaaattaatgtataaaataaaccttacccaatttcttgaacatctcttttcgttntgcgttgctgaatttgcgattaaaatngttggctatgt

SEQ ID NO: 208709 - DNA, 463 bp, Glycine max
  unsure (1)..(463): unsure at all n locations
taagctgttaggtgaatgctcaagaaatggtttttatctatcagntaataaaattcttcatatgacaaccgataaatagttaaccaaaacaggcttaacaactaaacttgtcatatgacatcaccaaataaaacaagtatgatgaaaagtacatctagcatttgatgcaggtcggtgggtgaatgctgcccaaaaattggttggaaatacatcacaaaaatgaaaggaaaaaaatagttaatcagagaatgacattatatgtgaacacagacagcctcatgggtcgtgagaataaattcttacaccctccatgatatatgattntgctggtgaaaatcctgaacctgaaagatgttgtatgtatatatataagttgtgggacttaacacaaagaataataagaaaatcccccacattctntgatatataaatatattaaaagatgaaagaatagtacaataag

SEQ ID NO: 208710 - DNA, 482 bp, Glycine max
  unsure (1)..(482): unsure at all n locations
agcttctatagaaggttcgttcctaatttctctacaattgcatcacctctcaatgagctggtgaagaagaatgtggcatttacctgnggtgaaaaataagagcaagcctttgctttgctcaaagaaaagcttataaggcacctgttctagatcttcctgacttttctaaaacttttgagctagaatgtgatgcctctggagtgggagttggagctgtattgttacaaggtgggcaccctattgcttattttagtgaaaaacttcatagtgccaccctcaactaccccacctatgataaagagctttatgccttaataagagccctccaaacttgggaacattaccttgtttccaaggaatttgtcattcatagtgatcatcaatcacttaagtacattagagggcaaagcaagttaaacaagaggcatgcataatgggtagagtacctagagcacatttcatatgttatcaaatacaaaaag

SEQ ID NO: 208711 - DNA, 469 bp, Glycine max
  unsure (1)..(469): unsure at all n locations
ntatactaagggttagtctcataattggtctaaagaattaaaactaatggatttattgaggaactcattgaagaatcaaagaccctaattacaatgatcataaacgattaaaactaatgatccaccgtaaaatcacatctttaaatggtcatcaaagaatccatcaatttattattaaaacaaattaatcacgcctcctattaaaggctagaatttattattcaaataaattaacatgtctttaacgcattgcttgattgtcctgaactacaatgcattgcttagttgaacacgtattttggaagttgcaatgaatcttaagcgaagttaagctntatactaacggntagtctcataattggtctaaagaattaaaactaatggaaaaatcttaggaacccattgaagaattaaagaccctaatttcaatggtcataaacgaataanacaaatgaatccaccgtaaatc

SEQ ID NO: 208712 - DNA, 475 bp, Glycine max
  unsure (1)..(475): unsure at all n locations
agctngtagntgctgngaatccttctgggttattattgtagagctctgatgggtggaacacagcttctgttgtgggaacattctcagggccaaagcatcgcttggcctcagcagcaactgtgaaggaagggaaggtgtatttgaaccatatggttggaattggataccccaaaaagaagcatgcaattgttgaagcagttttttaactcatactttttctagaaatgtaaacagtagggaattgggcatgtggggatcatacatttacaggacgttttgttgaaatttggtgtaccttcgcttatttatgtttggttttgttgcattacttgtcctcgatgaatctcaaccaaaacataagaggctcgagtaagtaaattaccctgttgtcttagctcttgggtgcatccaaatctttcttatttctgtttcttggcgatcgcatatggaactgaatctgctgatactangcatg

SEQ ID NO: 208713 - DNA, 459 bp, Glycine max
  unsure (1)..(459): unsure at all n locations
aaactcagctttntaaaagcctntttagataaaaaggtcagactcaatttatttattaagcttgntaagcttaacaagccggtttgtttaactaataataataataataataataataataataataactttattttatccagattttattctatctagattttatttcctccagattttatttcatcccatcttatcttgtccagattttattttattttattcatttatgggcttggacttaatagatttgtaagctttggggctgaggacctatatatcagcaccaaggttttagtttaggaagttttgttcggagagaagaataattctaagattttagaattccagnttttattactgttcatgcacactgttcatgtagaataaaattcattgtctggcaaacatctctacttcatacattttttgaagtatgctcttttattatttttatat

SEQ ID NO: 208714 - DNA, 470 bp, Glycine max
  unsure (1)..(470): unsure at all n locations
agctntgtccacanaagtcacttaanaccattttaaggtccaacgccttaaacggtcctctntgcttttatcggttaacatggaccgttcaaaagcataaaatcaacccataactttaccgcttttgcaagaactacgtaggtctgatttcctcatcgcaattgaggatacataggagcaaaatccctgcttttatcgaccaccccaagagatcattaatggtccaatgccttaacgtttctctcctttcaaaaacaagagattgttaatggtccaacgccttaatgtttctctcctttcaaaaccaagagatcgttaatggtccaacgacttaacgtttctctcctttcaaaaacaagagatcattcatggtccaacgccttaacgtttctctcctttcaaaaacaagagatcgntaatggtctaacgccttaacgtttctctcctttcaaaaccatgagatcgctaat

SEQ ID NO: 208715 - DNA, 453 bp, Glycine max
  unsure (1)..(453): unsure at all n locations
tctagccaaatggacatatctccccatcctctctaccagttttctatctacattttaagcacacatatatctcanaacatcattattgaaccctaaatcaacatgggcagttttgcttacattaaacatgtcaagtttagcataattacaataatttccttcacaaacaactaccctaaagcaataacctagtagaactacccattatagctcccaagaacccaacacctgttggatcgagtggcctcaaaataattaagaagggggggttgaattaattattcctaaacctttactaattaaaaatttactcttttaaggcttttacttatgttgttaagggaataaggagtagaagagaaacttaacagaaagtaaaagcgggaattaaatgcatagcgganagtaaaatattatggaagaaggaaacaaacacacaagagttnttatact

SEQ ID NO: 208716 - DNA, 496 bp, Glycine max
atccttaagcacctgagctgcactcattatttctaataattctgtttcttcttttattctctaacatagagcgagtgagtgcatagtgtgagtgtgtgtgaataactttatttgttccaacaaatgaaagttgaataaggaaaataataaaaaagaagcaagagtagtgaactaacccggcattgaagatgatggatggaagaaggtaaatgaagagaagatcttcactgaagacaggtatatgagagttttttcctccagtagaacatcattgggggactacaaaatagaccaacatgaacaatatcactaataatcttaagctgccaaagtcaaacaaatattacttaaaaaaacatattatcagtactctaaaatctaaaaattacttcaggggtcaatctagaacctaggacaacaacaaattaaatggacaatcaatccactgtaggagaaaaatattgtttatatagagatctataacaatattagcgat

SEQ ID NO: 208717 - DNA, 476 bp, Glycine max
  unsure (1)..(476): unsure at all n locations
agaaactcaagctntagttntattgaagaaataatatctcttccaataaaatatactatttattaaataaagatattgtataaaattaatttaattgacataaaagtataactgaaattaaattatatatcatgagaaataaatttaaaaaactattatataatatgatgaaatattatatatatatatatatatatatatatatataacttaaggataactgacatttttaactaaatatttttaaaagaaaagcttgagatagatggggaaaaaaggaagggtaaatagtcatttttatctctaaatgtgtaatttgctgataaatgtatttttgaaatatgaaagtacaagatttagttctcaacagtgcaaaaaagtgcgataatatattcatccgtcatagttaataaaatagtttacctgacacagacggacgaatttatcactgaaatgaatctcaacatatggacata

SEQ ID NO: 208718 - DNA, 467 bp, Glycine max
  unsure (1)..(467): unsure at all n locations
agcttgaaattgaacaacggatgctctctatatattcaaatgatcataagttttcactctaatgtcagattcaggaacaaaatatacagagacgctcgaaattgaacaacggatgctctctagaaatttaaatggtaaaaatttttcactcggatgttagattcagcacataaaatatcaagacgttcgaaattgaatactgaagctctggtccaattcaaacggccataacttttgacatggttgtatgattgaggcccatgatgtatcgagatgctagaaattgaataacggatgctctcatgaaattcaaatgatcataacttttcactcgaatgtcggattcaggaacaatatatatagagacactcgaaattgaacacggaagctntggtccaattcatacgaccataacttttgacatgggtgtacgaatgaggcccatgatatatcaagacgctcgtaat

SEQ ID NO: 208719 - DNA, 419 bp, Glycine max
  unsure (1)..(419): unsure at all n locations
ntgatgcaacatttggagaggttaatgaaacaacgagattatgcgctccatgagaggttggatcaaatggagaatagagatcataatgaagaagaaaggaggagaagagggaatgatggtgttcctagacaaaaccgaattgatggtattaaactcaacattcctccatttaaaggaaagaatgatccggaggcctacttggagtgggagatgaaaatagagcatgttttctcatgcaacaactatgaggaggaccagaaggtgaagcttgccgccacggagttttccgactatgctcttgtgtggtggaacaagctacaaaaggagagagcaagaaatgaagagccaatgtgatgtgaatcttacggggcgcggatcgcttgatacatgctgtagagtttttggatgacgccacttcc

SEQ ID NO: 208720 - DNA, 470 bp, Glycine max
  unsure (1)..(470): unsure at all n locations
agcttatctcttaatcatttttttgactttatataaacattctttntatgtatctttctttatatttaatagattttagctaacattgtggttacctagcaaaccggtatgcagtaactcaaacctaggtaggtagcattgtggaatttgtatcattaaagatcaagaagatgcaaaaatgtgtcaagaacttttgttgccaaaccaagaatcatcccctaaaacaaccaagttttttgaatgtttctgcaaccaggttcagcacattgagcatggtttatgctcaaagattactaagatttcacggttggaatctgcataattttatgtagtgttaattctgcccccttttgctcttatgagtgcggatttcattatctcctaaaaatcctacttcagactntgtctcccattnggtaaactcatgaatcatgggatatagcaccaacactcttgactctgctctaatt

SEQ ID NO: 208721 - DNA, 466 bp, Glycine max
tcttaaatatgtgttaacttcgtaaatttaatattcaatgtttagaaaatccactgacattttaatcaaaaacattgtgcactaacgtggaatgtccatttacatatgtggatttgccacatcagcaacgatatgttacacacgcactcaacattaaaagaaataaaggatacttgatggttggactaagttgtcgcaattttttcacctttatggactaaattaatcattttcaaattatagggacaaaaatagtcactgaatgcaaagtatagggaccaaagttgtgttttatccttatatgattaaagaaacaagatgaagcataaaaaatgatagatcatatatgatttgatttcaacttctttctctacaagtctatggtgttccccataaacttgttgaacataatgcaagtgacataacttgacacatatagtacacaacataaacctacattgcaatt

SEQ ID NO: 208722 - DNA, 434 bp, Glycine max
  unsure (1)..(434): unsure at all n locations
agcnttgattaattgattgatgtcttaccttatcatgtaaagccattgcaggaccattataggtcacccattttctatcagttggaataactccttgaaccaagcaaacaagagattcccattggtttctcattatggaatcacccaccagcattattctctttcttctcattttacttagaaatcccagtgcatcaaacctgtaggtgtcataaaaaagccaaatttatatgtaactttggccaagagtggaattgatttactaactaataacctcctaagctctctagttgcaagtaaacgcctattttccaactgaattttgagctttagtaattctattttcgagattacaatagcacataaagaggaaaaaaaatatattcttcatgcatgcatataaaagtaataataataataataataataatatg

SEQ ID NO: 208723 - DNA, 464 bp, Glycine max
  unsure (1)..(464): unsure at all n locations
ctgatgttanaaatagaaatctttcccatgttatagctttattaagcaaaattgagtctttgttcatgtacatgataaatacataacaaatttatctttagtttaactaaaaagaataataaagatttagaagctcctcatgctgcatagtaatgtatagtttgtttgaaatttgaaataagatggataaatagtgaagttgactatttcatgggaaaaaaggtaaatgcatttcaaaattttaattttcagggtggaaaatagaatatgtaagttttgtaattctacaacttcccatgcacgtccaggtggcaccactgcagcgtattacttggcacacaggtaacccaagtttacttagagcgggaacagcgtgggacccacggatagggtaaaaccgtctttgaaacattgtaacaagggcagatctgtcatattgtgttggacaataatgatatcgcatt

SEQ ID NO: 208724 - DNA, 468 bp, Glycine max
  unsure (1)..(468): unsure at all n locations
agcttgagatgaggaagtgttgtatggtgtttcttcctgcttttattggtgaccacagagtggtacctggagatatgtcgcggnggtcaggagaccttgtgaacgtcaggtggggtgctattgcccaaaaccaagcttgaccaatcccgacccaacccgggcatagtcggtcagtgagaacctgtgatgtacctaagcaggcgagctcctggcagtcaacagataaaaggaacaaagaccacaaagcaatgaggcttgtggtggctggccagctgtgaaacttgattgatatgtgagatatggtctctggtaatcgattaccaagggtgggtaatcgattacaaggcttaaaaatgaagacagggggctaagatggtctctggtaatcgattaccaggcttgaaaacgaagtcaggaagctaagggagcctctggtaatcgattaccagcctgtgtaatcgattacac

SEQ ID NO: 208725 - DNA, 464 bp, Glycine max
  unsure (1)..(464): unsure at all n locations
tcaagaaaatgatggcctcagcaaattccttatttctggtatcataaccatagaaaaacctagagatagatggtctgaagaggatagaaaacgagtacaatacaacttanaagacaaaaacataataacatctgccctaggaatggatgaatatttcagggtttcaaattgtaagagtgctaaggaaatgtgggacactcttcgattaacacatgaaggaactacagatgttaaagatctaggataaatgcactaactcatgagtatgaattatttagaatgaatgcaaatgaaaatattcagagtatgcaaaagagatttacacatatagtaaatcatctagcagccttaggcaaagaatttcaaaatgaggatcttataaacaaggtgttaagatgtttaagtagagaatggcaacccaaagtaacggctatttctgaatcaagagaattgtctaacatgtc

SEQ ID NO: 208726 - DNA, 473 bp, Glycine max
  unsure (1)..(473): unsure at all n locations
agcttgttntgctaatgtcgcgcttcattgtatttttgcatcttttcttctgtaaggttctagggcagtttaataaatcaagctcatgttatatttattttgtattcgtaagaaaaatatcaagttaattagaggagctacaagaaaaggaatttaaaatatgtctctgtaattttctattaagaattcttatataataaagcaattgactgattctggccatgttaaattctatatttaaaacataaaaaattaacactaaatttaagattattccctgttctcttgtaggctatatatgtagcctttatatatggatatagtttaacttatataattaactaacgagtaaaaggcacatgctgcgtagctatataattaactaacttatatatggatacattttgttggctcggcatcagagaaagcgattctcattttaagttatataatatgaagattcaagacaaaga

SEQ ID NO: 208727 - DNA, 448 bp, Glycine max
  unsure (1)..(448): unsure at all n locations
tgtagaatggctagacataatacatggcggtgtttggtttggttcaaggataaaagggatgccccacattatttccatgacacaaatgcaaaaatgatgatttggaaactttatgcaaaactggtcttgcatgcacctatgtggacactcaagtgtcaaatttttatggtcatgtgatgctagggctcaggattcatttcctctattttaaatcaacccaatgtttccaaaatatgttcttttatcaatttgtgtattcatccgagtccattttgggtacttgggaaaatttcacagcattcacccttcaggtgtacacacattttttttccaaaaactagctatgatcagcgaattttttttaaagaagagttggaagtcatctcttttcaaaagcatgttggtttttcagctagacaacttaattttctttntttctctccttttt

SEQ ID NO: 208728 - DNA, 470 bp, Glycine max
  unsure (1)..(470): unsure at all n locations
agcttcttatccaagacacctcttggtggtgaaactctcttcttctatcgcttattccctagaggatgacgcctnctctcacctcttctcctttatcttctgctgcatctccatggtggaaaatcaccattgaaggacctcatcctcattttcattttgtcttacttaaaattggcgagaatttgtgataggtaattctacttctttggaactacgtatgagattggcctcattctcattttcatgttgtcttacttaaatattaagtgctaaacaaaataaattaattcttatgatggcatcgatttctcatcatgacatcatgtacaaatcacgttatttttctctgtactcaacattagacattttcaatttacagctcagtaatgaataatatatttagagagactagacaattagatatgagactattctaaacanagttattggtggtctcgattatatattga

SEQ ID NO: 208729 - DNA, 463 bp, Glycine max
tcttgagatgcctttcggttatctcattagatgctttagttaagtctacaatctcattagaaatatcgatattgaaaaaaacaatgaatcttgaggtcaaaactacatatggaaattcataatccaccagtcgatggattttcaacatgatatcttcaatcaatagtgcccaattcatttgaatacctgatttcatcctatatatgatctgcaagtcatcatccgtaacttgagcatgattgttggatcttagtgctagaatatatgtaataatgtataccaacattttgtcttccgctgtcagaccaccaacaccaaatctattccttaaaatccttcctaggttaagaagcatacctctgtatgtggccattttgctatagctatccacagattccttaaacttgtggactccacccatatctattcctactactgctgtccaaactacaacatcactcac

SEQ ID NO: 208730 - DNA, 436 bp, Glycine max
  unsure (1)..(436): unsure at all n locations
agcttggaaggcatgttcttttatatacttatccacgaatatggngacggctggaatatggattactgagtgtattgttatctaatcttgctctgctaacctattgtacgaacctatttagctctcaaccctataattactctctaagctgaagctgacttgtcttttgtatgaatactatgaccacgagattcagcttcggatgacttgctttaatgttctatcgagacttccttgagtggagtcttcccaactcctatagtatgaaaaaactctctgttgctagactagtgaaatctttcgtggggatcaggtcttctccaatgacatattcactggaggacattttaaccatccaatcatctaaatgattttatggaagatgctgagatgcatgtacattcatgaatactcatcgtctgtgacctattttgac

SEQ ID NO: 208731 - DNA, 438 bp, Glycine max
  unsure (1)..(438): unsure at all n locations
ggaccaatagctataaacgtgacttctattcatttgtattattacgccgaagcnactaacaagatatacgattgttctaatagataaacaatataaatttatgaacagagttaagaagagaaattaagcatttaaattctttcgcgagtgttcctaacaaaattaaaaaaaatcaatatctatcattaaaaaaaattatcccgtgtatattaactcaactatgatgcgacaagaagtgttcagtggctgaaatattaatcagatgctcgagtgctcctctctggctataatgctacatcaccaaacaatcacttctccttttccttcctaaataaagagagacacgataatgattattaagatgcagcagataggataagtcagaattattatattatatcacttggcgcatgacattatactcttagccgcctctac

SEQ ID NO: 208732 - DNA, 457 bp, Glycine max
  unsure (1)..(457): unsure at all n locations
agctntgagccaaaattctaactcaccatataccttgacccagggtgagaatgtcaatccttacccttggaagcaaaaaagaagagaaggaaaatttccaatcaaagaaaaaaaaaagagaaggaaaatttccaatcaaagagaaagtaaaaaaaaaagagagaaggaaaatttccaatcaaaggaaaaaagagaggaaaggaaattcccaatcaaagagtgggagaaagcgaaaagaaaagaaagaaaattcccaaccaaagagtgggagaaagtaaaaggaaggaaagaaagctcctgatcaaggatcaaaacaattcagaagaaatgtgcagaaaggtctttggaccggacaatatctgtacaatacaaaattgtcaccaaatgaacaaaaaaaagggaaaggaaaccacgacctgaaagtggtcttctccctttgattaccaaccaaaatcct

SEQ ID NO: 208733 - DNA, 443 bp, Glycine max
  unsure (1)..(443): unsure at all n locations
tctcaaggaagctacctagtctatatatagaagcatgtgtaacacttgggggaactttgatgaatgaaagtcttatgagatacacttcaaagttccacttctttccttcttttattccttcaatttcgtgctacccccttctctctttcttttcctccattaaagcatcctcttcaagcttcttatccaaggcaattcttggtggtgaagctccttcttccttggcttattccctagtggatggtgcctcccctatcctcttctcctttgccttccgctgcatctccatggtgaaaaatcaccattgaaggacctcattgaagctcanagatccagcctccattgaagctccacaagcaagcttccatcaagtggtatcagagcacaagagcttcaagtaggtgctccttgaacctccatttaatttttttctttaccttctc

SEQ ID NO: 208734 - DNA, 421 bp, Glycine max
  unsure (1)..(421): unsure at all n locations
tctagcctgttgttcatatacaacaaaagatctgagttcttaactctatcattctcccttctattgtctccaatgtgaataggggccattttatggaatatcatgctgtttaataataaaattccagtgtcttgttagggaagtctaacgtagaatatttatattatatagtggtccctttgcccttggttcttgaaggaatacatacatattatgtaaatttgttgcgtaatggatttcaaaacgacattgaactcgtgactcatggtaataattaagctgtaacataatacctaagaatactagccaaaattntattagtgacagtatgcttaggtgctacctaatgtggggggcactggaccaagaaaaaaataaaaaagtgctatgtggggcaccagaattcttattaaaagagaag

SEQ ID NO: 208735 - DNA, 469 bp, Glycine max
agcttgccacccagctcgcccaggcgagctcatctagtttatgcgagcagggttgcttcctccagaagtaacagccttctggagggcccaagtgggcctggttgctatttgcacccccatttttactaagtacaccccattgcctttttttttgtgattcttttttcgtaaagttacggaaacttatgaatttcgtaacgatacttgttttctttccgtaatgttacggaaccttgcggattacataatcatcccctttttgacttacggaatgttacggaacctcactaatcatccccttttttgatttccggtgtgtcacggaaccttacggattgtgcatcaatattttcttttgttttccggcatgtcccggaatttcacaaattgcctaatgatgggtgccaagcacctcacaaggaccaaacaaaagttgcatgtcatcaagcaaaggtccccggacgaaact

SEQ ID NO: 208736 - DNA, 471 bp, Glycine max
  unsure (1)..(471): unsure at all n locations
ttgagnccaaatcctgactcaccatanaccttgacccattgtgagattgtcaatccttaccctcggaagcaaaaaagaatagaggggaaatttccaatcaaagaaaaagagaaggaaaatttccaatgaaagcaaaaaaagaaaagaaggaaaattccccaatcaaagagtgggagaaagcaaaaaaagaaaagaaaggaaattcccaatcaaagaatgggagaaagcaaaaagaaaagaaagaaaattcccaatcaaagaatgggagaaagaaaaaaagagaaaagaaggaaagaaagctcctgatcaaggatcgaaagaaaacagaagaaatgtgcagagaggtctttggaccggacgatatctgaacaatacagaattgtcaccaaatgaacaaaaaaggaaggaaaggaaaccacgacctacaatggtcttcttcctttgattgccaaccaaaatcccgtgcgctag

SEQ ID NO: 208737 - DNA, 479 bp, Glycine max
agcttctaaagaaaaaattgtagattaatcttattaagggtttttctattttgagagcttctcctttgttcttgggttaaagaaatttgtcgtgttggttctaccggcaggtcacagttaggatcatgctctcttaaataactttggttatactgacaagtcctgattatgatcaagttcctcttaaataatgttaaggcctacctagattgggaaatgaaggttgaacaactctttgcttcccattatattagtgaagagagaaaagtttcattggctacccttagctttcaagggtatgccctctattggtggacttccctcgttaaggaaagaaggactcatggggatcctccaatagagtattggaatgatcttaggagtgcccttaggaagaggcacattccctcctactatgaaatggagcttatggacaagctccaaaggcttagacaagggagtatgagtgttgaaaaata

SEQ ID NO: 208738 - DNA, 487 bp, Glycine max
  unsure (1)..(487): unsure at all n locations
acactcatagaaactcaagctggtgcattcaatatcctgatgagggtgttcctatgttttatgactggactaatacattngctgcccaagtttcatggtcttgcaggtgaaaatccttataagcatcttaaggagttccatattgtttgttccaccatgaagccccctaatgtcccggaaaatcatatctttctaaaggcttttcctcgttctctggagggagtggcaaaagattggttgtactgccttgctcccaggtccattttcagctgggatgaccttaagagggtgttcttggagaaattcttccttgcatgtaggaccactgccatcaaaaaagacattttaggcatcacgcaacttattggagagagcttgtatgagtactgggaaagattcaagaaattgtgtgcaagttgtcctccccaccaaatttctaagcaactccttctnttaatttctatgagggacttagcaacatggagac

SEQ ID NO: 208739 - DNA, 471 bp, Glycine max
  unsure (1)..(471): unsure at all n locations
gctataagaacaaaatgcctatttagttctaaatatgcatgtgaattaggaagcatcaacaagaatcaagccaaggctattgtgcaagcaatcaatggggaaaaacacaccaaaagattatgatgatggatggctcaaattctcacaaaggtaaacttatcactttcaaaattatcatgacatgtagaggaaaaattgggatttcaaatcacaaaatgtcaagagacttttattttcagaacaattacccatttcttgaacatatcctataattcaaagaaaaatatgcgaagttgtacatgcaaacagaattgacctaaaatattaaactagaaacccaacaaaactaacaaaactagcaaaaccaaaaccaaagaacactctcccccctcatacttaaacaacacattntcctcaatgtaacacaattaaatgaataaatgcaattaaactatcanatagaatcggaca

SEQ ID NO: 208740 - DNA, 454 bp, Glycine max
  unsure (1)..(454): unsure at all n locations
tgcttgggngcttcatggagctggacttttgctttttggggtcctttaatggggattttccaccatggagatgcagcggaagacaaaggaaaataggtgagaggaggcgccatccattaaggaataagccatgcaagaaggagcttcaccaccaagatgagccttggataagaagcttggagaggatgcttcaatggaggaaaagaaagagggagagaaagagagaggggggagcacgaaattgaaggaataaaagaggtatagaagtggaactttgaagtatgtctcacaagactctcattcatcaaagttacaacaagtgttacacatgcttctatatatagactaggtagcttncttgagaagctntcttgagaatacttccttgagaagcttctatgagaaaacttacttgagaagctagagcttatctacacacacccctctcataact

SEQ ID NO: 208741 - DNA, 471 bp, Glycine max
  unsure (1)..(471): unsure at all n locations
agcttntagaacattctgctctaagcttctatttgttattcttaanacgcaggcactatcttcatatgtattcatagcagctaatgtcattctcaactcatctaaagatgttcaatctagtcatttgaacgaattgtttcctcctctagttccattattaacatcacatcatcatagcttacgtggctttacccacgntatcatttatggggttgatctctctctctctctctctctatatatatatatatatatcacacggaaataaatgggtcatgatatgtgtgattgctgttgcagctacttgcatatcaaaatctacataaactggttccattgttgaattatggatcttctgagatgctacctttagagaagaggtgctctgtagatttgaaaacataccttgcaagaaattctgaatgtgcacgcgataattcttattgtctgtctctcgatatatatctatat

SEQ ID NO: 208742 - DNA, 472 bp, Glycine max
  unsure (1)..(472): unsure at all n locations
ggacctataaaactcaagctggtttaaacgagtcgaacaaatctgatatgtgaatttaatgannttttttttaaagatcgcatcttactcgccaaatccactaataaacatactagtccttggacccaaaaatgatttaaaaaaatattttttgaaaaataaataatgcataaaattagaagatttttttctttcatattttaagttaaaatatatcacactaaaatatataaacttttataatagtattaaatactaaatattaaagtgttaatactaaaatatatcaacgctcatgatagtctcaatattaaaaatatcaaaatatcttaccatactggtttacatcggtaattcgcaagttagtgtataataataatcttaatttttctcgtgtgtgtacaaaccaaactaggagtagatcccttgcaaatgcatgaattcttaagtggtgaaaaacgacaatattgag

SEQ ID NO: 208743 - DNA, 455 bp, Glycine max
  unsure (1)..(455): unsure at all n locations
agctntaaatgaggaaggggtgttgttgtttcttccttcttttatggccgaccacagagtggtacttggagatatgtcgtgggggtcaggagaccttggggatgtcaggtggggtgctattgcccaaaaccaagcttgatcaatcccgatccaacccgggcatattcagtcagtgagaacctgtgatgtacctaagcatgcgagctcctggcagtcaacagataataggaacaaagaccacacagcatggaggcttgtgtggtggctggccagctgtgaaacttgattgatatatgggatgtggcctctggtaatagattaccaagggtgggtaatcgattacaaggcttaaaagtgaagacaggaagctgagatggtctctggtaatcgattaccaagggagtgtaatcgattaccaggcttgagaacgaggtcaagaagctaggagggcatct

SEQ ID NO: 208744 - DNA, 451 bp, Glycine max
  unsure (1)..(451): unsure at all n locations
tgagatgaggaagtgttgaagggtgaaactttttgttttattgttgaccacagagnggtaactggagatatgtcgcgggggtcaggagaccttggggacgtcaggtggggtgctattgcccaaaaccaagcttgaccaatcccgacccagcccgggcatagtcggtcagtgagaacctgtgatgtacctaagcaggcgagctcctggcagtcaacagataaaaggaacaaagaccacaaagcaaggaggcttgtggtggctggccagctgtgaactttgattgatatgtgggttatggcctctggtaatcgattaccaagagtgggtaatcgattacaacgcttataaatgaagacaggaggctaagatggtctctggtaatcgattaccacggggtggaatcgattaccatgcttgaaaacgatgtcaggaagctaatgaagcctctagt

SEQ ID NO: 208745 - DNA, 458 bp, Glycine max
  unsure (1)..(458): unsure at all n locations
agctntgcctttagggcttgtatcttatctttttcttccgaagctcnaacctcattgtctctcacagtctttagatatgggagccaatccaatccttgtgtccggactctcagccacttatgatagccgccaatgatcccattactgcttcccctaagctctctgtcctttcttcacgctgcatcacatgccttgcgaactccttagagtaccctcgcattggggtcactgaaaccccgtgcaatgaaaggcgtgatgcttttgtctgatggcactcctctcatggggtagccaagctgtcttatggcgaggacgggattataattaatacaaccccttgttccatcaagggaacatatggacatccttcgcatgaagatagaatcctgagtcttccttccttctagtgagggaacagattaacagacgcccctccatgcttaccaagagttggtccc

SEQ ID NO: 208746 - DNA, 452 bp, Glycine max
tatcttgcacagtcatcacaagcaataataattctttcttttattttgtggggcccttcatataggtggcttcattagcatgcatgatcataccatgcacatggtgagtacattaaacttgtttgatatttgtttaaaggttaataattttaagattaaatgtttatttatttaccataaatgtatttttttctgttggcagaagaatttggtcattctgtacatactgttgaggtcttttaactgacccatataagaaaggatactattgaattttgtgatgaaagatctatgagaacgcatgtccaattttttaattatgttttcttcattttattcacatcattatgttactgaaagttgtctttgataatattcaaagaatatattctcaagctaggtcttaaagctgtatcatttgttatggaattagagactacccctctttgtag

SEQ ID NO: 208747 - DNA, 473 bp, Glycine max
  unsure (1)..(473): unsure at all n locations
agcttgtgcaattntaaaaccatataccattaattatatataagaacaaaacttacatagtatatgcacttctttaaatactttnggtgttatagatctccaatcagaattgaagtttcatttccatctcaataatcgatgtaataaaagtttatattaaatgttaccataaatataaaccttaattagtaatcgtaatgaaactctgattttttttttcttcataaaatcacatgtaaaatatgatgatgggtcggtgactcacgtttagtttgaattccaacgtgggtggagtggtggaatgatgatcattgtcggggagagaggcagaagcatcaaccttgttgttgttgttgtcatcatctntggtactattcttgtcggagaataagtccatctcggttctgttgttgtggagagatggtggcgaagaggcatcatcatgattggttggagaacatctaacgctgact

SEQ ID NO: 208748 - DNA, 454 bp, Glycine max
  unsure (1)..(454): unsure at all n locations
tcaggatttcatacttcgtttgaactttgaatcttagctatctgattccatggnttatctatgaaatgaattatttcaattagaagcagtgatgcccatcacgccatattactcgcaacaaaatggaaatgaagtgttcatcaccatttgtttttgccatatatttcaactgtttaccttccaccatatgttgcattcgaagtcttcttatttataagagaataaagctgcacccaaagttggacacttaaatctatattcagccgtattatactatttagtaaagagataaatgggaaattctacagtaaaatatataaaaaaaaaatagaaattgcgcttcgaaaggaagaatagaagactttacttgtccatggtggaaaaagcatgaaggcacataaatccaaggcaaaactctgtttccttcacaagcataaacatcggttctacagat

SEQ ID NO: 208749 - DNA, 357 bp, Glycine max
  unsure (1)..(357): unsure at all n locations
agttgctgacatagaaatttccatcatcgtcatacactatgtacctatagtctgcacaattagaacaagcactaaaggtgggtgcattgattactataccaagactagttagatgaaagagtagaaaggctaccatctttgtgtgaatatggaactatctaggaagatatacgtcacattcacataaantttcaaacttactattttttacaaaaaaaaaaacctacatagctaattaaatatttgatgcatcacacaaaaatagtggccgggaggataaaagatattagctgcattcttataataattaagatggaaagagagaaagacatgctgaattacgatctggaatatatt

SEQ ID NO: 208750 - DNA, 477 bp, Glycine max
  unsure (1)..(477): unsure at all n locations
agcttaaatgaagtggagaaattttcagctttatgtattatcagcatttctaaatggctatcttgaagaagatgtctatgttgaacaaccaatgggttntgtcatcgaaggtcaagaaggaaaagtcttgaaattgaacaaggcgttgtatggtctaaagcaagcaccgagggcatggaatactcgcattgacaagtacttccaagacaatgggcttgttcgttgtcaaaatgagtatgctctttatgttaaaacttttaataatggtgatgtcttatttatttgtctttatgtggatgaccttatctttaccggcaataacccaaatntgtttgaagacttcaaggagtctatgtctcgtgaatttgatatgacagatatgggactcatgtcatattacttgngaatggaagtgaagcacatggagaatggtatctttgtctcacaagacagctacacaaaagaagtgttgaagaa

SEQ ID NO: 208751 - DNA, 465 bp, Glycine max
  unsure (1)..(465): unsure at all n locations
aactaacttgccgaaagtatctnacccctttaaggaccaatgccnttttctgtcctctttgctnttatcggttaacatggaccgttcaaaagcataaaatcaacacataactttaccgntctttggttgttcttcgttgttctttgttctccaaccgataagtttttaaatttgaatctttcaattcattctatgcaccttcagcggtccattcttgttatgtatgctttcatttttatttcgcttactttcgatattcttttcttttgctcttaacgagctttttgaccgtttatttaagccgttatctcgccaaataattgataaaatgaatttcaactaatcatttatgttgtaatctcgtttaattactgttaaaataaaatccaaccgatcgtttacgctgttacctctgctgaatcanaacagacacatataataataaaataatcaaaatatctttga

SEQ ID NO: 208752 - DNA, 479 bp, Glycine max
  unsure (1)..(479): unsure at all n locations
agctttgcatgtgtagcaagttctagagagtatatatgttcatgttcaagagagntctaagagattctgctgtatgaagatctacagagacgagagcttgaggcggaagccattctgagagcttgagatgagtttgtgagtaattgtgagatcctagaggtgaaggagacatcctcaccacttgtatttttgcaatctttcatcttgttcttctatgtgttgtaaaggaggtttctggactatggaaagctaaatcctctgtttgatcttccctgtaggtacctgatgtaaatatatttctatctatgtaatgatgttttgggtgttctctgtgctatctgcttttcattctagtatgcctttaccttgatcacgtagatgcatgctttgttagggtcattcaacaatggaaattgtgttgattctatagtccttgatagtacgaggctaagctgctgtactatcatgaggaatcggcg

SEQ ID NO: 208753 - DNA, 434 bp, Glycine max
  unsure (1)..(434): unsure at all n locations
tcttaaacctcagcttattcagatgcatgcttgatgctgggctcatgcttcattttatgttatcagngacantattatgatatctttctcttttagctctattagaagttctctatcgagcgtctaacccctataacttatgcatgcatacctttattatattcttattaaggattatcctctgtcgagcatctaaccctttaaacaatgtaaagataagtaatgcatgaaattcaaataggaaaagataataggatagaacacaccaattgcattgataaatatgaagtacatcatacgtctctgggctttttaagtctgccagaccctaactaggggtgtagcctcttattggcataatggtcttacattgaaatatgggtataagaactggtggaggagaatgagtggaagaagagaatattaaatgatga

SEQ ID NO: 208754 - DNA, 453 bp, Glycine max
agcttaaacaagaatggccaagcaaagggcttctcaagatcattgatttgcctaaggacttctaccattacatattggtgcaactttgggcataatgactaacccaaaaataagatgtgaatgaaatctagcacaaccaaatttttgagcatgattgctttattgtaatcaagtactcttgaaacttctttcctagttctttacacatttaaaatagtagcaatcttgcttcccacgatagtgtttccaaagttggctactacatgccgctatccatgattgataattgggagaaccacactgcaaaaactatttgttgtagtttgagtaaaagagctctaggacctgtacacatcatgccaaaattccatatttccaaatatcagcttgagtttcataccttgcagttggattctaaaatttcaccatgatgggcatccctattgcccatgt

SEQ ID NO: 208755 - DNA, 486 bp, Glycine max
  unsure (1)..(486): unsure at all n locations
gacactaaaaactaagcnttaaatatgtgtcttcgttgcaaacaagcggcatgagttttacatttgtggaattgcagagtttaccatagactagtaagggaattagtgcacagccaacacccacatgggcaatagggatgcccatcatggtgaaattttagaatccaactacaaggtatgaaactcaagctgatatttggaaatatggaattttggcatgatgtgtacaggtcctagggctcttttactcaaactacaacaaatagcttttgcagtgtggttctcccaattatcaatcatggatagcggcatgtagtagccgactttgaaaacactatcgcgggaagcaagattgctagtattttaaatgtgtaaagaactaggaaagaagtttcaagagtacttgattacaaaaaagcaatcatgctcaaaaattcnggtgtgatagatntcattcacatcttatttttgggttagtcattatgc

SEQ ID NO: 208756 - DNA, 474 bp, Glycine max
  unsure (1)..(474): unsure at all n locations
agcttgttagagctatcatcacatgatgctttattggtttataataagnngattnctaggaaacttgagattntaacagaaacatttggtaagttgccaactaaattgtatattggtcaacctacacattcttctgttttgcaggttacaggttgtaccatctgtggtgaggctcatgaaataggccaatgtattcccattgatgaaaacactcaagaagtttactatatgggaaatcaatagagacaaggatatactcaaggaggatttttaggcttccagcagggtccttataaccaacaaggacagtggagatgataccctggcaatcaattcaacaaggaccagggtggaccttccaacaagccaattcaacaagggcctatttttcaaaggactactaagctggaggagactntgactcagtttatgcaggtaacaatgtcaaatcataaaagcactaagtcagcactg

SEQ ID NO: 208757 - DNA, 473 bp, Glycine max
  unsure (1)..(473): unsure at all n locations
tcgggttgctcaattgctcaaggttgctgcatggaagggttaaggtttgtatggtggtcagnagaggagcacaaaccacagacccttgcaacagatacagatttctgattcaaggccagctgggttaccaagttaaccaatgcatctagtttgccttcaagcttcttagtctcagatgatgcagctgagtttgtagctacctcatgcactcctctaatgactatggcatcatttctggcgttaaactgctgggagttggaagccatcttttcaattaaatttctggcttcagcaggagtcatgtttccaagggctccaccattggcatcatctatcatacttctctccatattactgagtccttcataaaaatattggagaagaagctgctccgaaatctgatggtgagggcaattggcacatagttttttaaatttctcccagtactcatacaggctctctccactgagttg

SEQ ID NO: 208758 - DNA, 435 bp, Glycine max
  unsure (1)..(435): unsure at all n locations
agcttcggagaactacgaagcttttcttgtttctatgcanccccaacggcatgccccttgtaatgtgtacgcatagctatcattcttgtttcctaccccagtctaatgtgtagcatagagttttctaattaacaagcagtagaagtgctaaagctatcaccgcgcgacatgtgaatgtcgtgtacagacaagttaaagacaagacatagaccacagggtcccatcgataaattatggataaattaataaatacggcaaatcttgacacgattataatgaaattcttatggctgtctaatgccgcggtttacaaagcagcgggacatatgttgacaatcacgaacgcgaccatgattatatttctttaataaaatcatatatttgaagacaaaattctattttagtccttattataatatcttttatcatttctct

SEQ ID NO: 208759 - DNA, 367 bp, Glycine max
  unsure (1)..(367): unsure at all n locations
nttacgnncaacgnagacggaacgcaagaacaccatattttatcaagagttgacaccctgacttctgtggacttgaactcaatattgaaaatttacaagcatcacccaagtgtcgatgacgggagcagcatacatctccaattttattacagcccggaccctgcactgagtagaattaacaattgactcataaacccaaacccttctgcggaaatggatgatccttgagcaatctcattaatgcacatgtctcttcacgaagcgacctagcagagaaacgagtggatctttgaatggcctaatctcattaatcttacgaaaaaccccgatgaactgctacggaatgcactattcataaccctaagcc

SEQ ID NO: 208760 - DNA, 450 bp, Glycine max
  unsure (1)..(450): unsure at all n locations
agctntctagcgtttcataggtgtattntgttctccttttggcgctctaaattgtgggagtgtgctcaaatatatagggcaattttggtttgttttcttgcttgattaagttgaattaggggtgtgtatgggatggccctacgcctataatgcattttggaacaatgggacatgccacattgtccccgttctcttgctattgacgcctaaacgcgtgcccaccaagtgttcggtgaaatgcctcaatggcattagcgcgtgacttttgaaatggccccgaggaagcttgcctcatagaggtccaggaaggataaggcagccgaaggaactatttccgctccggagtatgacagtcaccgctttaggagcgctgtacaccaacagcgcttcgaggccatcaagggatggtcgtttctccgggagcgacgcgtccagctcaagacgttaaag

SEQ ID NO: 208761 - DNA, 449 bp, Glycine max
ggactcacaccaaacatggcaaggtcaacatgctttcatttaatttcttcacacataactatcatgaagtagaaacctagcaaaactacccatcatatctcccaaaacccaatacccacgaaaatcaagtgagaaagaagtctacccaaacctgaaatttcgaagtcccacacgtagagatgcgcttcacgactctgaaaatgccttcctttcgcgatttggagcaaaaatggctaccaaaggttggagctttgttggagcttcaatggtggaggaagaagaaaagaatggcaacgtgagagagagagagagagagaaaggcttctgaaattttggggctgagtgaggagagagagtgttgttttgggttaaaaaaaggctttctcttttctatatttcatttaagctatgccaaatgtcccatttgagtggagcataagagccacttt

SEQ ID NO: 208762 - DNA, 460 bp, Glycine max
  unsure (1)..(460): unsure at all n locations
agctnttgtattcaattgtgagtttctcgttttattaaangactcaatcggatatccgagtcaatagctattgtcgtttgaatctgctcagagcttctgtttgaaattcgagtgtctcgatttattacgggactctatcgatcatccgagttaaaagttattgtcttttgaatgtgcttagagttactgttttcaatttcgtgcatctcgatatactgcaggactcactcaaactttccagaaaaaagttattgtcatttgaattttgtgagagcttctatattcaattccgagcgtcttgaattattaaatgactcaatcggacatctgagtcagaagttacattcgtttgaatttcctaagagcttttgttttcaattttgagcgtctagataaattactggacacaatcagacatccgagngacaagatatagtcctttaaatgtggtgagagcttc

SEQ ID NO: 208763 - DNA, 378 bp, Glycine max
  unsure (1)..(378): unsure at all n locations
aacacagctcaagcaaagttaatgatataactntngactcggatatccgacagagccattgaataattcgaaacgctcgacactgaatacagaagctctaagcaaatacaaatgacaataacacgtgactcagataatcgatcgagccatcgtataatatgagacgctcaaaatcgaatgcaagagctctcaccaaattcaaatgacaataactttatactcaaatgtcccactgaggcccgtaatacatcatgacactcaaaatggaaaacagaagctctcgagcaattcaagccaaaggaacttctgactcaaatgtccgaatgagccatcgaagaatcaaagacgctcggaattgaaaacagaagctctcacaaa

SEQ ID NO: 208764 - DNA, 458 bp, Glycine max
agcttcttagtttcagaagatgttgattgttttgtatctacctcacgcactcctctaatgactatggcatcatttctgtcgctaaactgctgggagttggaggccatcttctaaattaaatttctggctctagcaggagtcatgtctccaagggctccaccactggcaccatctatcatacttctctccatattactgagcccttcataaaaatattggagaataagctattctgaaatctgatggtggcggcaactggcacatattttcttatatctctcccaatactcatacaggctctcttcactgagttgcgtaataccagagatatccttcctgatggttgtggtcctggaagcacggaaaatttattctaagactactctcttaacgtcatcccagcttgtgatggaccctggagcagggcatacacccagtcctttgccactccctctaat

SEQ ID NO: 208765 - DNA, 388 bp, Glycine max
  unsure (1)..(388): unsure at all n locations
ggacacttgaaactcagctgaccaattgatgaaattctcttgaattgctatttctttggaaacnctgataaaagtttcaactcagacaaattgtacacatagctaaaaatgaaaatgatcatgttggctgagaatgatggctcgaacttaatactaggatttattaacttatacatggatgaaagaaaggtagatgctgagaacttgccctttnatgattcctttctaaacttactctttttctctattatgaatgtgcttttctctattcattattcattctttgctttataataatagtttgcctttgggatttttatatatatgactgaaatgaattttgattgcctataaaaatatctacatgtcactccactataccctgata

SEQ ID NO: 208766 - DNA, 451 bp, Glycine max
  unsure (1)..(451): unsure at all n locations
agctntcgtaggtgaaatcaggtgcagccatttcccttagagtcctctcacggggtggaggttgtgccatgttctcagaatgttcaaaatcacaatgctcaaaattataatgctcaaaatcaggatgttcaaaatcaccaatagcagaatgcacagattcaccagtaatggaatgctcaggatgatcaaaaggtataaaatgatgcctaactaatctatgaaatgtcctatctatctcaggatcaaagggttgtaagccagatggattgcctctagtcatacacaacattcagcatgcacaagttgccttgtcatgtaaataaaggtgtaggtttgaactgcagctaccctcaaatgatatccaaatgaacttgaaatttgtgagcaaccttataaaatgatgagaagatagcacanaatatttcaggcaaaaattcatagtctaactatg

SEQ ID NO: 208767 - DNA, 426 bp, Glycine max
  unsure (1)..(426): unsure at all n locations
tgcctcanagagatctaggaaggataaagcagctgaatgttcgctgagcaccagcagcgcttcgaggccatcaagggatggtcatttctctgggagtgacgcgtccagctcagggacgaagagtataccgacttccaggagaagatagttcgccggcgttgggcatcactggttacccccatggccaagttcgacccagacatagtcctcgaattttatgctaatgcttggcctacagaggagggcgtgcgagatatgcgatcctgggtgaggggtcagtgaatcccgttcgatgcggatgctctcagtcagtgcctgggataccctttagtgctggaggagggccaggaatgcgagtatggccagaggaggaatcggtccgacgggttcgatgaggaggccatcacccagttgctatgtataccg

SEQ ID NO: 208768 - DNA, 462 bp, Glycine max
  unsure (1)..(462): unsure at all n locations
agctngactaggcgagttaattttatccttattttcactntagntattagtcaattcggttaagaatgaganatcccaaagagaaaacgtccgattgattttccgctttattttactaaaagatgtttttttattattatattgttattttacctctttttttttatttccaacgtggttacggcacgaccgaacggtcggaattcattttaaccgaagttaacggataatacaattcaaacgatcggtggaaatttattttatttttaggttaagcgagaaatgacttaagtaaaatggcttaagcacgtcaagagggggtataaaaagtaaatgaaacgagaataaaaatacacgaaacacaatgtggaccaccatcggtgcatagaatgaatcgaatagcttggttcgaggtacttacccgttgaagatcgaagaacgatgaagaacgaatgaagaacg

SEQ ID NO: 208769 - DNA, 459 bp, Glycine max
  unsure (1)..(459): unsure at all n locations
tctaaactntatacaagaatgaagctctgataccacttgttatacaagnggcctcagatatcttaagaaggggggttgaattaagatattgcaaactatttccccaattaaaattctatttcaatttcaatgcaagttacaagttcccttaaaaatgaactcttcaataatgattcaaatagaacaatctgaatataaatgtaaagcaataataaataaaagagtttaagggaatagaaagtgcaaactcagatttatactggttcggccacacccttgtgcctacgtccagtccccaagcaacccgcttgagagtttcactatcttgtaaaatccctttacaagttctgaacacacaaggacaatccttcctttgtgttcagatttctttacaacaagagaccctcggtctctcaatcccctttgagaatntagaaagaagaaaagaataaatctctc

SEQ ID NO: 208770 - DNA, 459 bp, Glycine max
  unsure (1)..(459): unsure at all n locations
agctttgagccaaaattctgactcaccatataccttgacccagggtgagaatgtcaatccttaccctcggaagcaaaaaaagaatagaggggaaatttccaatcaaagaaaaagagaaggaaaatttccaatgaaagcaaaaaaagaaaagaaggaaaattccccaatcaaagagtgggagaaagcaaaaagaaaagaaaggaaaattcccaatcaaagaatgggagaaagtaaaaaaggaagaagaagaaggaaagaaagctcctgatcaaggatcgaaagaaaacagaagaaatgtgcagagaggtctttggaccggacaatatctgaacaatacagaattgccaccaaatgaacgaaaaaagaaggaaagggaaccacgacctanaatagtcttctcccttngattaccaaccaaaatcccgtgcgctagcgaccttttttttctcgccccgcact

SEQ ID NO: 208771 - DNA, 455 bp, Glycine max
  unsure (1)..(455): unsure at all n locations
ngaccaatcccgacccaacccgggcatagtcagtcagtgttaacctgtgatgtacctaaacaggcgagctcctggcagtcaacagataaaagaacaaagaccacaaagcaaggaggcttgtgtggtggctggccagctgtgaactttgagtgttatatgggatatggtctctggtaatcgattaccaagggtgggtaatcgattacaaggcttaaaaacgagatccgaaagctaagagggctcttggtaatcgattaccaaggggtgtaatcgattaccaggcttagaaatgaaggcagcatgttgtggaggcctctggtaatcgattactaggctgtgtaatcgattacatagaggaacatgccgctggtaatcgattaccagttatgtgtaatcgattacacagtgcattnnttgcaggtttcatgtcctgaggctgtgtaattcgagtttag

SEQ ID NO: 208772 - DNA, 450 bp, Glycine max
  unsure (1)..(450): unsure at all n locations
gggttcgaggtacttacccgttgaagatcgaagaacgatttagaacgaatgaagaacgtcgaagaacggtcgataaccttgcgaaattcttcacggaaaacgttacggaaacgtttcggaagcgcctcggcttagattttcttcacggaaacaatttttccaagcaaattcgaaagagagagaagtgcctaaggggctgaacccttttcttcttcacttcctcccctacttatagcaaaataggggagatggttgccgcccagctcgcccaggcgagccaggttgcttcctccagaagcaacagccttctggaggaatcttctggagggcccaagtgggcttggttgctatttgcacccccatttntactaagtacaccctcctctactntttnttntggtgaattcgttttcgtaaagttacggaaacttacgaatntcgtaacgatac

SEQ ID NO: 208773 - DNA, 466 bp, Glycine max
  unsure (1)..(466): unsure at all n locations
agctngaccggatgtaagatacatcttcttctatctttgtcatccttgactccatttcattgaagcgcatatccacttgcaattctaaattatcaaacttctcaccaacaaaggcttgaagaccatcaaacctttccaaaatcttcaaaagaagagatgaatcttctccctcatgtccttcttcaccaatatttctagcacccttctttacccatgagccatcatgctccttaatataaccaaaggatgctatgactgaagcgcttataaggaatgatctcttgattggaacataaggttcagaatcaagagggatgttgaaatgttgaaggaagagggtaacaaggtgaggataaggaaatggngcattcaatcgcaatgcgttatgcatgcgatatctaacaagatgtgcccaatcaatttgtaaacctttatgagaggcccacatgacaatgagatcttcttc

SEQ ID NO: 208774 - DNA, 419 bp, Glycine max
tggtgtcataccctaatttcgtccagagacctttgcttgttgacattctatcctttctttggccttgtgaggtgcttggcatccatcattagccaatttgtgaaattccaggacatgccgaaaaaccaaaaaaatattgatgcacaatccgtaagtttccgtgacacaccggatatcaaatggaagcatcgttgcataattaagtgaggttccgtaacattccgtaagtcaaaagggggatgattatgtaatccgcaaggtttcgtaacattacggaaagaaaacaagtatcgttacgaaattcgtaagtttccgtaactttacgaaaaaagaatcaccaaaaaacagcagagggggtgtacttagtaaaaatgggggtgcaaatagcacccaggcccacttgggccctccagaatatt

SEQ ID NO: 208775 - DNA, 469 bp, Glycine max
  unsure (1)..(469): unsure at all n locations
agcttctaggactntaacacctagctggcattttaattttctgtaatgcttaaacacaggttttaatacatgctntacacatatacatgtatatataacaagtagtaacaatgtgctttacctggacttgatataatgaaacagcttccacaacaacaccaatggacaaaccaacttcaactacaacaaactaattcagcttcgcctagagttcatataatgagtaatgacattagaagaactcaaagccaaaccaagatcaagtacatcaaactaattcagcattttctcaaccaaagtatgtcaaactacttgttggttattaaaagtgttatgtattcatgtgacaggcatagcattctagtttctattcatgattaagattcactaaccagatatagtgttctttctacaatgagtgctgatatgtgaacaaacatatttgttagagcacagaggtatgaacacc

SEQ ID NO: 208776 - DNA, 457 bp, Glycine max
  unsure (1)..(457): unsure at all n locations
cctagctgtaacttatagacgaactttataacatttttttttttgtgactncngaacagngatgtatgaacttttgcttgtttaacctttaaagctttgacaatgcttgctgtgtacttttagaattgtgagttctgaaatgttgcatacagaaacagatatcacaaattatatgttgcaaataaataatgtggtttcaatcagatcaattaattggctagctagaggaaaataatggtcaattaatggatgttgttccttcaatcacccaagataaagctcgagcagtattcacattccacttgacttgcgaccgatatcaagattaaagctgttgaactatgtgctgactcttactatatggcatacaagccaaagaaagacgtttatgactcaaactaacgcaagtgagataacagccttcatcctaacaaagatcactcagaaaacatcactc

SEQ ID NO: 208777 - DNA, 479 bp, Glycine max
  unsure (1)..(479): unsure at all n locations
agctngactcttcttactcatgatgtagatcttatgtatatccatgtcattcttgagtagtcatcaattatggacagaaaataccttccaccacctagtgaaggtactcttgcaggcccccaacagtcagcatgaatgtaatcaagagttcctttggtggtgggaattgctttaggaaatttaatcctatgttgcttgccgaaaacacagtgctcacagaatttccgttcatccagtttctgatttcccaatagctgatgtttttgaagtatcatcatacctttttcactcatatgacctagcctcatgtgccagaattgagttaagtcaggtatgctcttattggatcttgatgcaacagctactagaccatcatcaatacatgttgtaccttgaagtatatagagattacccctctntatacccttcatcaccattgtagagcctntctgaattttcataaccccattntcagtgct

SEQ ID NO: 208778 - DNA, 469 bp, Glycine max
  unsure (1)..(469): unsure at all n locations
tganagaagaatattagtaattaatgtaaataaattaaatattaatttttataatgaaggttgattaatggttatctagatttcataaagttagaaaagggttaattaaattataagagtttaaagtggagaacatttttgtaaataactatacaactagtttaaaaatagaattttagtttaattagttggtgactaattaaagtgtttggttatatgatgtagaataattaaaataagttagagttgtaacacagtgaaaaattacaactcagactgacagagaaattgtgttgtgtcatttgtgtatgtatgaatttaatttcaatacttgtatgtttttaattatagaatttgcgtgctatatatgtctatacttagtgtaaataatttgtttagtctaccttgacaaggatatggaaactacttaacaaananttcatctgttacaaaattacgttgtacactg

SEQ ID NO: 208779 - DNA, 313 bp, Glycine max
agcttcaccactaagagagtgcctaggataataatcttatatataagcttcaatggacgaggagaatgacatgcatggacgtcgagtgtcctaactccccctgtttattactcttctgctcacaatccatgacttctacatcaccattatctactgcccagattcaccaaccatgcattgctcccgatgatcaaattgtataaaatgatgcctaactaatctatgaaatgtcctatctatctcatgatcaaaggtttgccagccacattgattgcctctattcatacacaacattcatctctctctctcttct

SEQ ID NO: 208780 - DNA, 480 bp, Glycine max
agaaactcaagcttgtcactggtaatcgattatcaaatccttgtaatcgattacacaaagtttttttgaaaggatgtgactcttcacacttgattttgaatttcaacgttcagatacactggtaatcgattaccaatatcttgtaatcgattacacccttttgaaatcaattggaacgttgcaaattcagttaaaagcttttgaaatcaaactttgtcactgttaaccgattaccagagagtaaaaactctggtaactaagaaaattttgagaaaaactcttttgaaaaacaaaattgtgctatgtttgttttttgaaaaagcttttcaatacttcccttgtgaagtcttcttgatttcttttcttgaaccttgaattcatcttttcttgaatcttgaaatcaaacttctcttgattcttgaatcttgctcttgaaatcattctcttggtcttttgtcatcatctttgtatcatcaaact

SEQ ID NO: 208781 - DNA, 328 bp, Glycine max
  unsure (1)..(328): unsure at all n locations
agctttcaattcattctatgtacccgtgtgtggtccacattntgtttcatgtatttnttattctcgttttcatttactctttatacctcattttgacgcgcttaagccatttatttaagtcatttctcgcttaatctacaaataaaataaatctccaccgatcgtttgaattgtatcatccgttaatttcggttaaaatgaattccgaccgttcggtcgtgccgtaaccacgttgggagataaaaaaagaggtaacataataatagtatgatcaaaaaaatccctcttataaaattataacaaaaaaatcactcgacggtttctcttt

SEQ ID NO: 208782 - DNA, 422 bp, Glycine max
  unsure (1)..(422): unsure at all n locations
tgagttgaggaagtgtagaagggtgaaactttctgcttttgttgttgaccacagagtggtacctggagatatgtcgcgggggtcaggagaccttggggacgtcaggtggggtgctattgcccaaaaccaagcttgaccaatcccgacccaacccgggcatagtcggtcagtgagaacctgtgatgtacctaaacaggcgagctcctggcagtcaacagataaaaggaacaaagaccacaaagcaaggaggcttgtggtggctggccagctgtgaattttgtgtgacatgtggattgtggcctctggtaatcgattaccaaaggtgggtaatcgattacaaggcttataaatgaagacaggaggctaagatggtctctggtaattgattactacggngtgtaatcgattaccaggcttgaaaa

SEQ ID NO: 208783 - DNA, 437 bp, Glycine max
  unsure (1)..(437): unsure at all n locations
agcttgacgactntggactgaacatattctctaatgaaatgatgatcaatgtcaatgtgcttagatcgttcatgatgagcaggatttgaagcaagacttatagcagatttattatcacaaaataacatcacagagggcacatcaacttcaaagtgaagaagtaacctgtgtaaccaaacaatttcactagtaacagaagacaagacacgatattcagctntagtggatgattttgaaacagtgggttgtttcttagaacgccaagaaagaaggttgtttcccaaaaagacacaaaagccagaagtggatcttctagtatcaacacaattgggccaatcagcattcgcaaggcagtgaggttgagagagttctgagcaggaaaaacaaaccttgttcaggagcaaatttgatatactgcagaagatgatgaacaacat

SEQ ID NO: 208784 - DNA, 465 bp, Glycine max
tatctcccgtcatatgattactgcaaccagagattcagatttctctcttctccatctgaacaggatgtgtcacctcttcatatgctaccaacaaaacctcatcctcgatatcagtttcctcttcaaacattgtgtaatgggcttgtttctcaactccagggcattcatactgaaaatggcccagcttatggcattgaaaacattcaatgagtgccttgttaaaaggctgtcttccacggcctctcccacgcccacggtttccgcggccatgaccacgtcttgctcctgatctatcatcatgcgtaactttcaggacttgttcctttggttgagaattctccattcgttgttcatgaatgagtagactaccatggagttcatcaagacttagagtgttcaagtcgttggactcctcgatagaacatactacatagttgaagtttgcgggtcaagatctgagtatct

SEQ ID NO: 208785 - DNA, 447 bp, Glycine max
  unsure (1)..(447): unsure at all n locations
agcttggtcatgtgttgatattatctttgatttcacttatttactttcaaactcattaaaagaggacttgcaaagtaaatgaccagttaaaactttattctacattgataaactgtgattacggcataaacgatcggttgaaattttattttacattgataaagtgagattaaagtgcaaatgatcgtttcaaattttattttacagtgataaagtgagattagagcgcaaacgatcgaagaacggcatagaacggtgtagaaatcagtcacagaagcgattcggaagcgcctcgacctcgttttttcttcttctttctccttcttttcaccaatttcactaaaatccgctcaatatatgatgttgaacccctaccttcagccncttcatgcctatatataagaaatgaggggtggaggttgcacagcagctcgcccatgtgagctg

SEQ ID NO: 208786 - DNA, 462 bp, Glycine max
  unsure (1)..(462): unsure at all n locations
tgttaattaggactacactgctgaacttcttgaaatgtttgttgaaaatgaagagttagcttcctgtttactccatactcactaaaatgaaacctttaaaattatttgaaaggagttcttgcaatataaaaactgaatatagaaaaggaaaaggttgatagcgatacaagagatgatcgagaatgtaatgaattaagcaaattaagaaacactactaactataacatgtccttaatctctttaacactttaaagtctcaatctttgaactataaaataggcaaaataaactatgaaggaatggcacgctacaagcatgaacacaaaactgaatgtaattatgctccaaaaatgcaatcaagagcttaggcttattacaaatcataatgaatcanaactgcaacagctcttgaactaaatacattgaatacaaaaaggcagctacagattaagtccaaacaac

SEQ ID NO: 208787 - DNA, 429 bp, Glycine max
  unsure (1)..(429): unsure at all n locations
agcttgctcgtctgggcgagctatgtggcatgctcctcccctantttgccataaatagggggaggagtgaagaagaaaagggttcagcctttttggcacttctctctctctcgaaattgctgaggaaaattatttctgtgaagaaaatccaagccgaggcgcttccgtaacgtttccgtgagtaattacgtgaagattctcgaccgttcttcaacattcatcgttcgctcttcgttttcttcagtcttcaacgggtaagtacctcaaaccgagcttttcaattcattctatgtactcgtggtggtccacattttgtttcatgtatttttattctctttttcatttgctttttatacccccttttgacgtgcttataccatntatntaagtcatttctcgcttaatctacaaataaaataaaattccact

SEQ ID NO: 208788 - DNA, 446 bp, Glycine max
ttccatatagacttttgtagtaccgtacggtatactattttcttgtttatggtggcttattcacatataatatattgtgctaaaatagcagtctaaactttactattgtcaagccttgagagatgacattagacaaggctcttgtgttcaacaatctctgagcaagcatttcaatttcaattatagaagatttttcacttaaaaaattataaaaataaaataaaataaaagcacagtaataaaattatgttttcaagtctacaaagtatatttaaattacgaagttaggaacaagcacaataataaaattatgttttttacatttattatttaaatttaaattataatacaaataaaataatatattgtgttaggaacaagcatagtaataaaattgtgttcttaccccaatgcctccagttaatcaccaaacattgcaggcctct

SEQ ID NO: 208789 - DNA, 455 bp, Glycine max
  unsure (1)..(455): unsure at all n locations
agcttaatagactttcttttatagattatatttaggtcattggcactaaagaattacggtgccagaggcacaaataccatatttctatactctaaatctctaattcaggttacgagtgtttgacaaattaaagagttcttgaaataattttaaaactattgatataaaaaaatatttattgtggaactaaatttgctagtaaattcacatgaaattttatcctaattttcctaccacattattataatattaataaattttacctacaaatacatgtccacaagaaaatcgtaggtatttcctggaaattatatatccctataaaatccgcaagtatttcctattgattttcttcanataaaaattagtaggaatttcttgtggattatttttcacacattaattcaaaagaaattatcactcttctagtagtgtgaacggatagtgtaacttga

SEQ ID NO: 208790 - DNA, 456 bp, Glycine max
  unsure (1)..(456): unsure at all n locations
tgccactgtagcagntaagggaacatatgaagtgtccattgtcatngganggntgcttggtagaggtacatgctaataactaataagatttcctgtgcagggtatcattgtttttgcatgactgatggctaccttggggctggagattttggttgaatctgcctcaagtgttattttgaaggtaattgagataatcttttgttgttgcttgtttattatatacctaaatctgggttcaagactagttattcaacatgtggattatctaccataagattgttctaataagtgattttatcatttgagcagatgatattatcanttgaccttgcttttgctttgattccgctcctaaagttcagtagcagcaaagtgactagcagcacaagcattgaagaggtgtgtntccttcttgtttgtggattcatgaactataagttaatacatgaaactgaa

SEQ ID NO: 208791 - DNA, 466 bp, Glycine max
  unsure (1)..(466): unsure at all n locations
agctcttctccaagcatctagcttatttnttcatgcngcncatattgagtattcaataaaaaccttttaattaaaacttgattttaaagatgagtatacaataaaaaccttgtaattaaaacttgatttatatgttagttaagatgtagaataactgatttagtgttcttaattaaaaatagattttagacttgtgtaaaaataaataaagagatagagaagaagagtgcacatatatttttatattggttcacctctaactttgggctacatccagtcctcgcccttcaagatgagatttccactaacacaaccagttcacaactagagcaggaatgaatttcacagcctcatcagttcctcactgaactttagaactagcctctactagaccagctacaccgctagatttccttgttgccagacacttttgacctttacaaagaatgggtttatgacttttcta

SEQ ID NO: 208792 - DNA, 453 bp, Glycine max
  unsure (1)..(453): unsure at all n locations
tagcgcaattcctcttaggttgggatttgcgttgagcgttacaatttgctctcagcataattcctcttgcgcttagcgcaattctttgtcgggttggaattgtggttagtgtgattctctggtctaagcttgataatttgtaaatcacaacggtcaaatggtggggacatgtgttaggcacctacagtcaaaatttgacaatgatccaacggttaacgattctatggttgctattntaccagaataggtgtaggtaaaatttgaaatctcataatttcaacataggtcaataaaaatccacttaactcaacatccacatcaagcaaatcacatatgactaattcaaatcatacctcaactcattcaagtcaatcatataaccaaataacacgataaatacaattaaatatcgattttatagttagaanaattntagggcgttacaactcttca

SEQ ID NO: 208793 - DNA, 465 bp, Glycine max
agcttggtctcctcctctaagctcttctctataaactgaacctggctcgcagagagacgtcgcttcttctcgggttgatgaaagtactcgtccatgcactcatccccattgtcgtccatgtcaaacgcgcggaagaaggagccgttacaccccttccctccttctccttcaaaactcatcatggatctcgaacctgaaccaaattataacaaaaacaccatccattagtcataagtcaaaaacaaaaattggtgagagagaggttagattacttctttttttttttttttaacgaacaaatgctattttgttaatttttgttacaaatgttagtccagtatattcgaactcacgatctctctttcttttggtctttcccaactcttgagtcaacctccccatatatcttaagatgttagattagttaggaagtgaatacgaagatataagatgaatcagatgatt

SEQ ID NO: 208794 - DNA, 453 bp, Glycine max
  unsure (1)..(453): unsure at all n locations
nttaggagagttagtccttgacaaatggcaagatatatttatgaatgngaaagtaaataacaagatgaaagtgagaccaattaaaattctgcaattaatgcttcaattaaacttatgaaaatgggcaacatgcactaagaggtcaaatcattcaaatacttgcacctacatgatgccaacatttcaataggatctaacgataacataaagctatgaaaagatttagaccaattataaaagataaagaaaacatcaactgaaattctgtaaaccttctaaaactgcacctatatatgattttaaataagacctgaaattaccctaaaaagagagggcaagtattaccccatgaaccacaatctatctccttgaatagtaaagatacagtcaacccctttcgcaagaaattaatccagaaatccctattcatgaacacctcagcatcccatcact

SEQ ID NO: 208795 - DNA, 484 bp, Glycine max
agcgactgagctgcaagctgtctgtcaagagccacaccagatactgttgtttctacaaaagctcttccaagacaagcttttggtaaattcattaccaagttgggaatgattaacatctattcaccaacttgagggggtattacgattctgttataactgcaattagttagttattatacagttaattagttactccttatcctctgtatataaattagttttttaagcacatttatcaatgaattttcaatctatttttttccttccctttcatatccgatatgatggtatgtttttacttgaattagaaggaaataacgtgagagaaattatgagaatcagagtcaccgaagtttttagtcctttgaggtatacttgtggcgaatccatcagtgtattagaaaaagaagaataaagaagtaatgatcagcacatagaaccttgaagatggtgttttgggagaaagaagtaggaatgaatgaat

SEQ ID NO: 208796 - DNA, 489 bp, Glycine max
gatctcaagcactgagctgcagctagtcacaagtcacaactcacaagcattttattgtatggaaaagtggaaggaggtgaaccaggaagaatttcttttctgaaacgataacgtttacagaaatcaccttatttattgacaacgtttgtcactttgcaaatgtagattcttggtctaataattggtgtagttcctccgttccaaaagatgtttgttggagatgatgctcctttacgtgtgattgaagactctgcatccatgctagggtaagtaagtttccttgtcttgctaaccatggcataatgtgggtatcagattcttacaggttgctttatttgattgatttaccaatattagaatcataatatactatagaagcaaaaatatgtgctgagaactggcaagtaactacttactttgtcatgatcaaatttcattcgcgtaagtaatcaagagaacgaatttttgttatcattattaggagatgta

SEQ ID NO: 208797 - DNA, 464 bp, Glycine max
  unsure (1)..(464): unsure at all n locations
gacactcatagaaactaccgctntgatcacctttgcccttaatgttcgatctgatctctctgtgtgcttatttctgaatctggggttgattggcttcgttatgtttcatcgaggatttgattttccaatcaaatgcaccaaataaaacatgatagaaaaaacatcgtgttgcttcatttcatcaacagttcgaagtaaaatattgttgtcaatctgaatcgtcaccaagtatgtgggtgttcccgactgttatgtattctcatgtgggaatctggtttgacttttgatgtgtgcattagtaacgcgtagtattccgccacctgtgtctttggtagcaatagcatgcacaatatatctggtattatgacctgtgagatccaatttagtggatgctagtgctggagattacaccataggtttctgggctatgcacattacttattttgtcatatgtgtcgaaaatg

SEQ ID NO: 208798 - DNA, 327 bp, Glycine max
ccaaatgtcgaacggcgttactatcctttctaggacatgcacccatgtctcgggcctataggaaccacgcgcttgtgcgttgatctgactggaataatgagagcttgctttatccttctgaccattgtaaggcgctctattatggtcggcatatgactctggactgatatagatgacattgatggggaggagccactatcgacgggtatgaggtatatgatctctttcactatggaaggcattgcgacgcacataataatccggagcggcgaaaatacaatacagtgtgtatcctggatttctttcgaggattgatgattaaagaaa

SEQ ID NO: 208799 - DNA, 480 bp, Glycine max
  unsure (1)..(480): unsure at all n locations
agcttatgataactagtaaaagtaaatatttttgaatatattaaatttacaatggacaatttaagctgtgatataaagttattttaattactaacaatgttcataaaattttattgaaatacaattcagagatggagataaaaaaatgtaaattaaaaaatagacaattacaaaattaagtattaattatgtaaataaagataaaggaatctaatttgagatgactaagactaatttttaaaattaggcatagtaatgtatgaatgcatttaaagaaaggaaaaaaagataatagtgaaacaatagatactatatatcatatactaacaagtgttatgtaagtggtaacggtttgtctcccttaattaagtggtctagaatttgaatcttgatnttgagaatgaaataaaccgtgtttaataaaaatacccatcatatgtgtatttatatcttttaacgaanattagtcaatatttagta

SEQ ID NO: 208800 - DNA, 444 bp, Glycine max
  unsure (1)..(444): unsure at all n locations
agcttctctcatacatgatggcaaatgctatccccaaatgaccatccaaaccagcctcttcaatgatctcacgtgccccactagtcttggtggtgaggcaagcttcctttggcatcttacatcaccttccttcaactggcacaatgctctcaccgctactccctcttctggggtgtccacaaactctagtgcatcgctccattcgaaccccttcgacttcatccaacgcttgaatgccctcaaacgcctgtgcaaagaaagacagagcgagttgttcagacacagaaacaaacacgtggtgtgtttaacagcaatgtgaagattttaacttgcggcgtgtgtggcaaatggttaaatctggagctagtcgtgttnttttttttttttttgccttggcatggttcagcaacaaagacagagaagtaatgattntaactggtgact

SEQ ID NO: 208801 - DNA, 426 bp, Glycine max
  unsure (1)..(426): unsure at all n locations
tgagttgttgatgaatgcgaggaactgtgttctaaattttagctgcagttggcctgttgtgttgtttatcattttcatgtttccttccttaacaatataataaactatttaaaacattatatatatatatatatatatatatatatatatatatatatatataatgtaatttttatattatatactatgcttatttaaaaaacaaataagaaaaagaaaaactcgtggttcaaaataaatgtctaacacactaaaaagaaaaaaaatacttaaaataaatggagggtctgttggctcaattcttccaaccctaattttactataatcttaaaagtgaggttggaatcttaagacttttaaggttatatattanagctaagatggtgagaattgtgtcaatgggtccaacatttctntataaatgct

SEQ ID NO: 208802 - DNA, 475 bp, Glycine max
  unsure (1)..(475): unsure at all n locations
agcttctttgccttctcaacggtcttttgttttangggtaaaaccaaacggtagtaaaaaaaaaaaaaccaaacaatgaaagaagaagaatgtagaagaggaaaaatcgtataacaaaacccttcttctcgtgttttttttttctccttttggtcccatctaatctctcactcacccacaaatccattttcttgtggtagaggtgcatgcaaggggggaaaagaaagagaaatggagagagaaggtgtgaaggaaaagattcacaaatagaaagataaaagataaaagaaaaagaggagaggattgaggaagagaaagagaaagagggggagaaagagaatattaaggaatagagagtaacgtggagaagattgaggaagagaaagagaagattgaggaaaggagagtaacgtggagaatattcaagaagagagaggagagttccgattattaagtgaaattaaatggagagttg

SEQ ID NO: 208803 - DNA, 461 bp, Glycine max
  unsure (1)..(461): unsure at all n locations
ntntaaggggtgaaatgaatatcttgacggcacacgatcttgggtgggaataggagttaagtccttacaatcaatatgaagaagagagaactcctaattttgaaagtgtgtttgaggaattcatggcataccatgccagctcaaaagctaatcaaaattcaatgaaaaatcatgaaattcattttggtaagagctatccaatagaaaattttcatgggggaccaaagttacaaccttactatcaaaatgaagcagaaagaggttccaatctgtataaattgctgatgcaattcaaggaaacaactaaatcaactcaaagagcactccaaagtgtagaaatccaggttggtgagctggcagaagcagtgactcaatttatgttcagacgagaaaaatactttgtagaggttgaagcttaagaaaaaaccctatataagagcatgagtcaagagaaaaagatg

SEQ ID NO: 208804 - DNA, 470 bp, Glycine max
  unsure (1)..(470): unsure at all n locations
agcttatctgtctaatgaaatactagtatttattaatctctgncgaccnaacttaagagagttccataacaaacaaacaaaaaaaagtggattcataaaagagcaaaaaccgcggaccaaatatcatttgttacgctatgatacaacataaaaccatatagtaatctatcacttggttcattcaaaattaaaaaagatagatataatcaatggtattatcaaacatttcatgatagaaatttggtagttgtcttcattgcaaacctctattaacatatttgagttcttttgcatatccacaaaacatgtatttgtatatatttttattttcattttatcttttggacagagacatgttgctttgctgcctccaatgattcactaactaataaaagatagataccctaaaatctgttgttttcatgataagtcctgcacagaatggnagggtgaaatttacatatatacta

SEQ ID NO: 208805 - DNA, 470 bp, Glycine max
  unsure (1)..(470): unsure at all n locations
ccttgaaactatgcttctagggactgaaatcggagctttacatcttgttataacttgtttaattaaggcgcactgtattatgattgctggagcaatttgtagtattctgataattctgaacttgggtaaaagataaatgaaagtgaatgaataaccttcacgaatattatgtcttttntatgccattcacaaacaggatagtaatatcttaggcttgaacgatataccgccgtgatacatcatgtattttctagcacgcaaaagcaggtttgcaactccaatgtaagttgacagaccgactaaaagtgatatacaaatttatcatcaagttgctaccttaaaatatgaaatataaaaaatgaatttgagcattacaccatgatctgcggtatgtgctgactgactcaccagcatactctaattgctggaaaccntacctacatgtgtctacgcttagcgaatcatacaag

SEQ ID NO: 208806 - DNA, 453 bp, Glycine max
  unsure (1)..(453): unsure at all n locations
agcttgtttgctaggacgatctcattgtattantgcatctttncttcggtaagggtctagggcagtttaataaatcaagctcatgttatatttattttgtatttgtaagaaaaatatcaagttaattagaggagctacaagacaaggaatttaaaatatgtctctgtaattttctattaagaattcttatataataaagcaattgactgattctggccatgttaaattctatatttaaaacataaaaaattaacactaaatttaagattattccctgttctcttgtaggctatatatgtagcctttatatatggatatagtttaacttatataattaactaacgagtaaaaggcacatgctgcgtagctatataattaactaacttatatatggatacattntgttggttcggcatcacagaaagcgaatttcatcttaagtatataatatga

SEQ ID NO: 208807 - DNA, 452 bp, Glycine max
tgtagaatggctagacataatacatggcgcggtttggtttgttttttgataaaagggatgccccacattatttccatgacacaaatgcaaaaatgatgatttggaaactttatgcaaaactggtcttgcatgcacctatgtggacactcaagtgtcaaatttttatggtcatgtgatgctagggctcaagattcatttcctctattttaaatcaacccaatgtttccaaaatatgttcttttatcaatttgtgtattcatccgagtccattttgggtacttgggaaaatttcacagcattcacccttcaggtgtacacacattttttttccaaaaactagctatgatcagcgaattttttttcatagaagagttggaagtcatctcttttcaaaagcatgttggcttttcagctagacaacgtattttcattttctctctacttctttttat

SEQ ID NO: 208808 - DNA, 348 bp, Glycine max
acctggaaaaaccaatctagttggtgatgctctttccaagaagtattttgatgacccaccatatatgtgtctctctcatctcctatccttgagatgggggagcattttgcagtagttttatttctcacattaaaagggcaccaaagtaataagaagcttatcacagactcatctatgaaggagaactttatttttcacgaccaattactttatttcaagggtcgtctattcaatacctgatcatagcttcaagtctagaaacattaacaagggtttatgtgaaatctatgtcttcttgtgggttaaagccttgagctactaacatagctttgttccttactaccttat

SEQ ID NO: 208809 - DNA, 449 bp, Glycine max
  unsure (1)..(449): unsure at all n locations
ntatttggtaaacttcaatctagatgggatggtccttttgttattactaatggttttttcccatggtgcagttgagattaaaaatgaagttagcgacaaagtcttcaaagtgaacttaagccttttcatgaaagccccacaagcagaggaggaatttatggcggatctctctttggttttgccaattttatgtgatgatgtgccttgaatggcacttgagaagtttccttccattttcttttatatgttgtgtctttgtttgcatttcaagtgtggggggaaggtttagaaaaatctgttttttgttttctgttattattgattttgatctgtctggatttgttttttgctctgcttagttcttgctctgcctatttttctatatttgtatgttgcttctgttatggtgctttctattctctatcttagtggatttgttttgttttgtg

SEQ ID NO: 208810 - DNA, 181 bp, Glycine max
tcagacggattaacacgagctcacttttaaacaatttttatcacccttataaaatattctaaaatacgataaatacccaatatcaactcaactatctatatttgatttttagggtacatgcccaaatatatttatttaaaattaagaaattaaattcataaaccagagttaactcacttag

SEQ ID NO: 208811 - DNA, 457 bp, Glycine max
tctacttatgtggcagggcgggctttcttcaccttcttgtctccaacgcgaactttgaccattgttcttccttcccgcgatgcttcttttcatgtccgcctgagtgggcttatagcctaaaccatacttcccacgatttccttgggtatttatcaggctagttatgccgccgttgttttttcctaaacccatcccgggttcataaccgttccccaacataactcgggccatcattaccgctgcatcggacagacaaggctgcccaaagagggagtccacggaggaaatgctgaccacctcaaaagactggaaagcagtttctaacgattcttctgcggcttccacataaggcatggaggatgggcagcttaccaagatatcttcctcgcctgacacgatgaccaagtgcccctccactacgaatttcagcttttggtggagtgtagaaggcacaact

SEQ ID NO: 208812 - DNA, 398 bp, Glycine max
  unsure (1)..(398): unsure at all n locations
agcttgaatcggacatccgtgtgataagttatgaccattngaatttctcaagagcttccgtagttcaattttgagcgtcttgatatgtgatttgcctgaaaaggtcatccgtgtgaaaagttataccagttgaatttctcaagagcttccgttgttcaatttcgagcttctcgacatactatgtgcccgaataggatatccgtgtgaaaagttatgaccatttgaatttcgcgagagtttccgatgcttaatttcgagcgtatcgatatattataagcctgaatcggacatccgtgtgaaaagttatgaccatttgaatttctaaagaactttcgttgttcaatattgagcttctcgacatattatgtgcncgaatcggatattcgtgtgaaaagtta

SEQ ID NO: 208813 - DNA, 461 bp, Glycine max
  unsure (1)..(461): unsure at all n locations
ntgatgcaacatatggagaggttaatgaaacaacgagattatgcgctccatgagaggttggatcaaatggagaatagagatcataatgaagaagaaaggaggagaagagggaatgatggtgttcctagacaaaaccgaattgatggtattaaactcaacattcctccatttaaaggaaagaatgatccggaggcctacttggagtgggagatgaaaatagagcatgttttctcatgccacaactatgaggaggaccagaaggtgaagcttgccgccacggagttttccgactatgctcttgtgtggtggaacaagctacaaaaggagagagcaagaaatgaagagccaatggttgatacatggacggagatgaaaaagatcatgaggaagcggtatgtgccggctagttactcaagggacttgaaattcaagctccaaaaactaacccaaggcaacaaggg

SEQ ID NO: 208814 - DNA, 448 bp, Glycine max
  unsure (1)..(448): unsure at all n locations
gtcgcaatgagtcacttcatttatcttattatatacagncaatgcatgttttcttactgccattattctttgcagccagttgaactntggagtggtgagcagttatttagcattatactgcgcccacatgctaatatgagagtctatgtgaatcttactgttaaggagagaaactacactgaagacaagataatataagacaagaaaattgaatggaaaacattgtgcccaaatgatgggtgtggttattttcgtaatagcgagttgatctctggacaagctggaaaggttactttaagctagttactctaaatttaccttgattatttcatttcatatttctatgctcaagaggattgtttaactgtaggtaaacttaaattttcatgactactgtgtatgtatgtgataccaccattggtgaagaattacgtgagcctttagtaca

SEQ ID NO: 208815 - DNA, 327 bp, Glycine max
catggaaaagtacaaagaagcatcaactccaatgacaacatcaacttatcttgacttatatgagaaaggtaaatcagttgatgagtcaaggtgttgcaacctacccttcggcaggagggtgacccagcgctcacaggttcctcttccaagaaagaaaaatgcacggacgctccaccaaccgttatcttaagaaaacgtcctataaactgcaaaaggtgtggtctaccaaatcttattgttaacggttctgcacttgtcttacgcacggggaaagtattatcacctcacgcttactgtccaaggaaccacaatctttaatcaaatgtg

SEQ ID NO: 208816 - DNA, 481 bp, Glycine max
  unsure (1)..(481): unsure at all n locations
ngagatgaggaagtatagaagggtgaaacttcctgcttttattcgttgaccacagagtggtacctggagatatgtcgcggtggtcacgacaccttggggatgtcaggtggggtgctattgcccaaaaccaagcttgaccaatcccaacccaacccgggcatagtcggtcagtgagaatctgtgatgtacctaagcaggagagctcctggcagtcaacagataagaggaacaaagaccacatagcaagggggcttgtggtggctggccagctgtgaantttgtgtgatatatgggttgtggctctggtaatcgattaccaaggatgggtaatcgattacaaggcttaaaaatgaagacaggagactgagatggtctctggtaatcgattaccaacggngtgtaatcgattaccaggcttgaaaacgacgtcagaaagctgatggcttctggtaatcgattaccaaggaggtgtaatcgatta

SEQ ID NO: 208817 - DNA, 486 bp, Glycine max
  unsure (1)..(486): unsure at all n locations
gaagaaaggcatatattttgttgaaattttctcaccggtggtgaagacttggaggttgattagtaattcttagtttagagcaattctcggtctagctgcaaaacaagacttggaggttgagcagcttgatgtcaaaacaccattcttacatggagacttagaggaagaaatttatatggagcaaccaaaaagattctgtagaactagggaaagaacacttagtgtgccgcctgaagaaaatttgggatctgacaaattagtccaatgaaaacttacttatattttgatccaatctattcagcaatcatgggacagaattgtcagcgctntacacctttatgagtaaaaataattatttattctttttctgtggcttgatacttgactgcngtatattatgtattatgtacttaatttctgtgttcattntcatatttaaagcattcaatcagaatcatgaacaatcattgctcacaagaagcattc

SEQ ID NO: 208818 - DNA, 432 bp, Glycine max
  unsure (1)..(432): unsure at all n locations
cgtccatcccactacttttataggatcggggccccacaaagaccaatttctcagttacctatgggttgtggtaagagaaaaaaattccaattgtccactccaattggaatggtgtccccgacgatctaaagacaataatctgggaagacattttggtaaaatcttttaaccacacgttgcaacttcatacttgtgctgataattcagtttcagatcacaaatttagttattggttcatcacacctttaatctgcagcgcaaatttgacatccctgaaggtgacgatgcgaaaaaaaaggtgatgtcaatagtcgctactagatggaggcaatttaagtcttcgntgacgtctaaatntgtctatgctgataacgaagggcaacaaaagagtgatcctatagtgaagtatggggttcatcctgcaacatgggc

SEQ ID NO: 208819 - DNA, 439 bp, Glycine max
agcttccttagaagattcgaaagaagcttgagcttatctacacatacctctctaatagctaagctcacctccttgagatgagaagctagagcttagctacacaccccctataatagctaagctcacccccatgacaaaaaacatgaaaataaaaaaaagtccttattacaaagacaactcaaaatgccccgaaatacaaggctaaaaccctatactactagaatggccaaaatacaaggcctagatgaaggaaaaacctattctaatatttacaaagataagcgggctcatacttagcccatgggctcgaaatctaccctaaggctcatgagaaccctagggcctttccttggatctctagcccaatctacttggagtcttctagccaatgcccttgcggggtaggatggcatcattcaaccatcatgcttttttttta

SEQ ID NO: 208820 - DNA, 516 bp, Glycine max
  unsure (1)..(516): unsure at all n locations
actcagcttataggtattgngaagtatgttgtatgaactcttcccatttattcgtatacctacttgagggcccattgttttgccagccatgctttatgatatgtgatggtgtatccgactcttgtcttacgaatgtaggaatggttagttgctcgtttcttcaaccatcacaaggatatttttgcctacaagtttcgaatccatcttattgtgatcttgtgaaatggttggcataacgcatgtgtgaggcccttctatcattctaatttcccaaacttttagattttttctttcggatgctctaagtttccactagcacccatgattcttaatgtgccacatttttaccgtgtgtttcaagtcctccaattgacaaaatcgttgaccaacatacaacttgtcatcgtgagtcagattgttgttggtggtccaaaaaatgcctatagtcggngttgtcaagcacttggttgcaccaacatcagcgctattgtatatggacgatagaaattttagttg

SEQ ID NO: 208821 - DNA, 325 bp, Glycine max
  unsure (1)..(325): unsure at all n locations
cttaactcctctgcatcatctgctgtctcatctctttatgaaatgcttctctttttttttgtcaaatataattgtcattcactaaaatgataacggacttacacagcatagtgtgctataaagtgctcaatcagcaccatgcacactgatgctacaaatagcatcttgaaatcaaaaccaaaacagaacatatatatacactttcctgactaagaaactagaagtgcatgagcttnntctttctttggattcttctgacatgccgtctcacaaatatataataagacactaatcatcttgatgtaacaacacattggactaacta

SEQ ID NO: 208822 - DNA, 517 bp, Glycine max
  unsure (1)..(517): unsure at all n locations
tactcttgcttattatagaccaacgcaatgaatatctcttaatttctatccttncatgaaaacttatttgtagtccttacaattttatatcatccactttaatctaaacacacattgtgatatggccattgatactaattcactgatgtatatgtagataaaaaaagaatcaacaaaattctcttttcttttaagcaaacaatttttttatgtactttaaaaaaaaaacttgattttagtctcttatgaatagtgttgtgttgtgattctatatatcagcaaaaataaaattaaatggctccaacaaagttaaggattaactttatagttatattcgcggagatatttgatcaagagtttatgagaatcataatctattctcataaatttatattagttcttctatgtaaaattattcttcaaatagtgacctacaaatatgatattatcatatgtggcatacgcatttaagaattattcttcagctgcgtattcttataacagtgatactcatgcg

SEQ ID NO: 208823 - DNA, 324 bp, Glycine max
agcagcagccgacacagagggcaaaccattttttctgatcactcctgagctaaaaacagaccaacaacatttgagccggcattggggcaacaacttcgagactaaaaaagacagaactaggatcaggccactctccttgtatcaatcatagtggatatgcgaacccagatattgagaagggaccaaatatatactcaagattatgatgcaacataatagtcttgcatatctttctaacatactcgtaaaagtaacttatcactgatcggtgccatcctctattcgaaccttcttatttttgtacatgggaatgcgcacctatct

SEQ ID NO: 208824 - DNA, 434 bp, Glycine max
taaaatctttgtttcaattccaaatattcgattttatactcttacttttattccatagctgttttgccactataattctgaaatatgttattttttatcattcaatatgttatatttaatctaattaagtttctaactctggttatactatttaaccagcaaaattgcatgttaatactataccggacatatgttagataatttgacattcacatatcaatcaacatgatatctatgcaagtatgtaactggtcacacgtgacaagtgttgcatgcattatataaaaaatattttttatccctgaaatttttttaaagtttgattttatttctcatagaattgaaagttcgattgtagtcctcacacaattctaattgtaattctagtctttaattaatgttatctcaattatagtatcggttaaactctaatt

SEQ ID NO: 208825 - DNA, 346 bp, Glycine max
ttcatctcttcattctcttctccctttgccaaaaagaatatgccaaggactaactgcctgaatattttttgtgtctctcttctcccttttccaaaagaacgaaagactaaccgcctgaattcttttgtgtctcccttctcccttgtcaaagaattcaaaatgacacagtctgagaattcttttgattcttcccatttccttatacaaaagagttcaaaggactaactgcctgagaattcttttgatccccattcacaaagtataaacggtaacccgctgagatctttgctcacacattggagggtcactcttgtggtcaagttagggtcatctacttggttactga

SEQ ID NO: 208826 - DNA, 484 bp, Glycine max
  unsure (1)..(484): unsure at all n locations
agctcgcccaggcgagcaagggtgcttccttcatatgcaacagccttctggaggaatcttctggagggcccaagtgggcctggttgctatttgcacccaccctttttactaaatgcacccccttctatttttttggtaattctttttccgtaacgttacgaaacttcacgaatttcgtaacgatacttatttcccttacgcaaggttacgaatccttacggattatgtatttactctnttttagctttcgaagaagctacggaaactcactgattgcgcaaaaacacctctgttgacttccgccaccttatggaatttcacggatcgtgcaagcctgcttgcttttgatttctgagaggtctcgggacttcatttattgtgcaacacaggatgccaagtatctcagagcggctaaccaaagggtgcatgtcatcaagtaataatccgcggacgaaattanggtatgacagctgcccctctttac

SEQ ID NO: 208827 - DNA, 400 bp, Glycine max
tagccaagggataaatagtattactctaatgacaacattgtaaagctctgaaacaacctcctaaagttgcatgttatatccactctctgttccaaccatgcaaatcttgcctgaatattctgaccacaacccatcaagactaaacattattgaacttggaaaacactggcggctctttaatcctttgccacctgtgaagcttcccacacggtaatatgaaccggcagttgtaactaacaaggtagctccaactttgtgtatgccaaagacatcaagttcataacacactcttgataccaagggaactaggttctgactcagttctggaaggtgtaccaccaacaatttgtcaccccaaaggttaaccaacttggaattaccatgtggaaggcatgaactt

SEQ ID NO: 208828 - DNA, 481 bp, Glycine max
tctcaagggaagctttctcaagagagcttctcaaggatgtctacctagtctataaatagaagcatatgtaatacttgttgtaacttcgatgaatgagagtcttatgagacacaactcacagttcaacttctctgccttcttcttccttcaatttcgtgctaccctctctctctttctccccctctttcttttcctccattgaagcatcctctctaagcttcttatccaaggctcatcttggaggtgaagctccttcttccatggcttattccctagtggatggagcctcctctcacctgttctcctttgtcttacactgcatctccatggtggaaaatcaccattaaaggacctcattgaagctcagagatccagcctccatagaagccccacaagcaagcgtccatcaagaaccttctcatccagcacactcacctgcatacaaacatcctggtccatcaattctcttgcttcattaaat

SEQ ID NO: 208829 - DNA, 302 bp, Glycine max
ttactaatatactggagaatggatgatgttttgtacacataccagatgtaatgcgcctagcggaccttgttggcaagagaagcgcgatgctacctactcaccgcctatgatgccttagctcacccccatgccaaaaaaattgccaatgaaactgagtacagtgtacaaggtcaacataaagcgcaacaaaatggaaggtgacctcaatgtggctgatacaatggcctgctgtcttagaaatatgaatgattatccaattgcatagtgacatagataagtggtctaaaactccgccggtgcga

SEQ ID NO: 208830 - DNA, 402 bp, Glycine max
ctcacactgactttgccactgggtgaagcgaacggtagaagttagaatttatacctgcaaaaacctttgaccaacttgaaaaacccaaaatcaaattcagaaattctatgcaatttattttaaagaggaaaacggctccaaaggtgtagacctacatttcactctttacactatttatttattgcttcttttatttattgttatgccatttaattataacacatatattaagaaaagtagttaaacttttcattatattaaacattagtataattaatctattatactttctttcttattcctttaatatttcatatggtggaaattaagtctaaacgtcaaatcgtataatagctaataatatatcaatcgaacatcatacaagtaatccagatccataaa

SEQ ID NO: 208831 - DNA, 417 bp, Glycine max
  unsure (1)..(417): unsure at all n locations
agcttctagccaattggacttttcttgtatatattccttngatagcccttttgagccttggttccctttccttgttttgaagctcactacaagccttaagtgaaaaaccatgatattactatatccttaaggaattttggagctttggaattgttttgggaataagtgtgggggggtttttgtttcattggacaacttgctttgttggctatgcttcatgatgtattttgggccatacttgatgtacattgtatattggttaaatgttggacatgctgaaagaaatgttgctcctcaaaggctaaagagtaaaaaaaaaaaaaaaaaaaattcgaaaaatataaattcgacaaaaagaaaaagaaaagcattcagtgagtgaataaatctaaatggacaagaatatgaaactcttgg

SEQ ID NO: 208832 - DNA, 458 bp, Glycine max
  unsure (1)..(458): unsure at all n locations
tgagtgaaacaatgactgtgagggtntggttgatgattcttccttgatttttgtcatgcttactagcttatttcagctatgactctaatgcttatgctcctatctttgaaaagctgcatgcttgtgagaagtgattgatttaagaattccatgatattcagttcatatggttgaattcctttatgaatcagacaccattttcttttgattgaccactatctttgtcacttaaggacaagtgagttgttctttctttgcttgaggacaagcaaaactgtaaatttgggggagtttgttagtcgccttatacgactaacttttgtatagaaatcattttccaaaacttgtataattcctcaatttatggttattttttagtgacttttgtaaataaatnttgttttatggataaagttgtctctagaatatgtccattcgatttaatgatgaaatatgtg

SEQ ID NO: 208833 - DNA, 409 bp, Glycine max
  unsure (1)..(409): unsure at all n locations
agcttgaaagctcattaaaagactcaaagtgtcattggntgagtattgcaatgaagaagtcaacatgctcactagataaagagaaaaacttatagcaaagagaagtaatcaacaacaaaataacaagaagaatggtgcaaacatgaacatctgcacaatgatattaacatgaagaacaacattgttgcaacacaatcataatgaaattttatcaacatgatgagttcattctggacattgtgtctagagttccataaaagcaattaagatgctattggtggatatgtaaatgctgaagaaagatattcaacttccatgaacaagtcgtgggttgatgcaacttgaatcatagacaaaattgagcctcaagttgcaaaagatgatccgcttggacaacttaatatgtgtg

SEQ ID NO: 208834 - DNA, 327 bp, Glycine max
aaaagaccaaaggggcgggcttcacaagactgctctcctacgcggactgcatgcatatatgctgctcttctcttccctcactgccgacatgcagacgaccctgatctatcatccggtgaacaactcctacactgccaaacacttttccatgaaatgcagctcgccggaatgcaacaaacaaaaatcctccttatgcccaccatggggaatcacacctcccttgtgtagggcctcgaagataaacctcctaggggatgccacatcctttaaagagatagaccgacggggcctatctgacccaatggcgttaaccactcccccttcatg

SEQ ID NO: 208835 - DNA, 503 bp, Glycine max
  unsure (1)..(503): unsure at all n locations
ttactcattcatttntctaactctattacatgagaaaatttacacatcaataaatacatatacttctttaggtttaaatacacttgattgtgcccataatttacctattttttaattnttaaaagtgttcctataatttttttttgtgattaattggtccttgccactctctcaattataaattaaaatacacaatttaaaagtgaaatttcttttagacgtgtattnttcacactactttcacatttgcctaatatttctctctaaattatattaaattagccttccttaacttttatatgtacatttgattttcttaattgtatatttctttcaatttaccttattttattcagtttctaaattgaattgcataactttgtttgaaagacattatcaacagttaanaacaaacttatattataatttgaattattcattataaatctaaaatacaatntatatatgtaaatatatgtaattatagtatatgtatatattaa

SEQ ID NO: 208836 - DNA, 418 bp, Glycine max
  unsure (1)..(418): unsure at all n locations
ctcttctagtggctctaagggctaaccaataagagcatctatcccgagttccaaacactgctttntggtacagctggcttctcggcatattcatcccattgaacctctcactctaccacatgtctcttgaagccagactgcaccattcatgctacattcttgtttaatttgtccccacattcttctatattccttcctcaattagcttgtgattgagccttgtcaagaaatctaacctaattagcctcctagcaagaaacatcatgtagattatacattggtactgtctggatagcattagaaggcctacattgataccctttgaccctatatggtggcgaacaagacatggaagaaacattcgttccctacgaaggaatcaagaatgatctcacaggaaggtagatgtctacaagca

SEQ ID NO: 208837 - DNA, 346 bp, Glycine max
atacatactcccccattttgaagaagacaaccacctggggggtaggagcaacaacacagaaaaaaaatctattcgcacatagatcactcccccttgggcttcaatatttgcctatatgagacaattgaagatttcatatttttcatatataaaaaggcggcgcatataaaataaagaaattttcctactattttatcttttatctctctctccccctgtgtgaacatcaaaaaccaattatgaatagagaggagaaaaaatcgttccacgtggtgcaacgtataacaatcaagcgagaccaagaggcgttaaaacaaactaatttgcacccacaaaaacaccatca

SEQ ID NO: 208838 - DNA, 512 bp, Glycine max
  unsure (1)..(512): unsure at all n locations
tctagccaaatggacttaccttgaattaattcctttgatattctctttgagccttgcttccctttccttgttttgaagctcactacaagccttaagtgaaaaaccatgatattaccatatccttaaggaatnttggagctttggaattgttttgggaataagtgtggggggttttggtttcattggacaacttgttttgttggctatgcttcatgatgtattttgggccatacttgatgtacattgtatattggttaaatgtttgacatgctgaatgaaatgttgtttctcaaaggctaaagagttcaaaaaacatatcgaacaatagaaaaagaagagcattaaagttgagtgaataatatcttaaatggcacaagaatgatganactcttggctctactcttcatgtttaattgttatcattacttctttatagtatcttattntgttcttaatatacacttatttccctctgctcctctattnctttgngatttagccacttattccat

SEQ ID NO: 208839 - DNA, 102 bp, Glycine max
aaaagaaaagggggcccccccaagaggaatcaacaaaccgagggctaggcccgcaggagaacaaaagcggaccgggaaaccagaggaaaaaaggaagagcac

SEQ ID NO: 208840 - DNA, 254 bp, Glycine max
accagcacagtgactctctgctttgcaaatcttgattaatatgcacctcgaaatagtgggtttacaggctcttccgtcttgcaacgaagactagtacttgacactaatgcaacatgccttttactcgccaatcacaaaacaagctttctactatgctgacacataactgtgcaatgccctcagatttgaacaaaattatgaaacgcgaatagcctatctaatgaatctttacttgcatatatctaactgctgtc

SEQ ID NO: 208841 - DNA, 434 bp, Glycine max
  unsure (1)..(434): unsure at all n locations
agctngnggactngacaagcctcattgactagttattctctcaaacttgttgagggtaccacacctgacactggacaacattcgtgcacacttgggggcttggcaaactcatcaccctctgcttgccaagactactaccttggacatcaaacaaactcccttgacataagacaatctcttttgcccgcaagccggctcaaagcttggggggcttaaatgtcaagtttgcaatttaagtcctatccaaggcttcgctatacaaaagttaaagtattctaaatatccttaagcattcaatgtcctatttttaagttctaaaaaatattctttcccactctttgcaaatntcttcaattgcctccaattccaatggtgttcgatcccttaaaatctacaacttacaacaattataattaagctaatcacattaaata

SEQ ID NO: 208842 - DNA, 457 bp, Glycine max
  unsure (1)..(457): unsure at all n locations
cattncactcgnactattaagaatagtttgaagaacaaaaaaatgtaactaggaaatatcttatcgtattaattacttaataacagaaatgaatagtattattatacggctttaatgtttaagtattgtcaatataaagtttattacacggttaatcaattgaaaataataatgactttttagataactacggtcaaagtcaacatccttttatatattggtgattaagtgataatataaattttttatattatcagctcattaattcttttcttattatatttaaaaacccaaattctataataattcaatccattgggaatcttataaggtttgcttattaattttaatgttacattgataaaatatattcttagctaatataaatatatattattntattctattttaactctaatcttcacagttctattttttaaaacaatatatcttaaca

SEQ ID NO: 208843 - DNA, 456 bp, Glycine max
  unsure (1)..(456): unsure at all n locations
gatcctcagagtcacctgaggctgcagcttatacataatttaaatcctctttttactctctctaatgagttaaaataaattattctcaacttctgtggatggttaaaaagacgtaaattaaatttgtaagattttaagttaagaataaaatgtctgttaacgatgaattcccttacaaaataaagagtagggataaaaagtgtacatcttattatttaatttttaaaaaatttgatacgaacaatcaattaatgtaatgtgaaattacaatttgattgttagatggataaaatttacatattatataatttaatgtaaaattattgatatattagttagtgaaaattaaattagcccgatgtaatttaatttattattattttcttccattacacnagttatactaatgatatcggatntggttcattacactacaactttctgtanattcttttc

SEQ ID NO: 208844 - DNA, 503 bp, Glycine max
  unsure (1)..(503): unsure at all n locations
tttggtggcaagtgagccacaaggtcataactgctcgatgtcttgctgcattgcagtacatcaatttcctccaaggcataacctcaccatcctttntcctaagttccatgtagatatctgtcatacaaaatctctctttcatcatcatgtcttcccacttcccttggatagacgacactntntctctgttattcaaaatcgctttcattatccaagtactatttggtttcacattctcctccatcacgttcttgtttttgaaatagtacgtatgaacccaacggacccacaaactatctgccttcctgcaaagattccagagaagtttaagcatagtgactgtattccaaattttcaagtcgataacattcaaactcccatttataataggtttacaaacattactccacgcaactggactntntttactagtctccgcactacctgtccacagaanagtatgacanatagaattgatcttcttaatcacaaacttcgatagc

SEQ ID NO: 208845 - DNA, 493 bp, Glycine max
  unsure (1)..(493): unsure at all n locations
tattgatttgtcattaactgaaccctgaactntaaatgattatctcctaataccttggttagaatttaggagagcatatggttcaagacaaatttactctgaatttgggggagaaaagttgaaaagaatgaaaagaaaaaggttaagcatcagcacacacaacaaataagttgtatgtaaaaaaaaaagttgtgttgttacaataaggtcaaaagcaaattaagaaaaggtaatagtgagaaggttatttttacaaaacaagaaaagatcattgggattagtctaggacttgtgctctcttagaatctaaacctttgaatcctagaaaaaccaatgaatttttgtagccaagcctcactacaagcctgagaaagtccttctgattatgtttatacatttctgacttgatagcatgagatgaaatgcaaagattggaccacttnngtggttgtatcaatgaatagcttanacacttgtgcttgagtgaaacaat

SEQ ID NO: 208846 - DNA, 426 bp, Glycine max
  unsure (1)..(426): unsure at all n locations
agctntccaaanaatggaagagttagaaattatttcatgatagggttcttataaagaatttaggtcattgtaatctacctcttcttgttttgcttctgagacttcaaagatggcttcaaccattaaacataggtttgcttgttcttcctcttcatcatcatcctctcccgatgatgtatcgtcaaggtcctcctacatggacataagacctttctttccctttttcttgacgaataactttttcttcttatctttgttcttctcaaggtcagtgcactcagatttgaagtgtctaggcttcttgcactcatagcaaatgattggactcttgtccttcttcttctttttagtaaaacttcttgcttttacttttccatctgaatacacctttatatttccacatagcacatatcctttttgagataa

SEQ ID NO: 208847 - DNA, 517 bp, Glycine max
  unsure (1)..(517): unsure at all n locations
catcgaccttaaactagcttaccttctggaggacccatttaactacatatgggtttctggaagcaaaatatagattacacagtggtggngatgtctcctccacctctatgaacttataaattactctaaaacctaagatcctcttgaaagctgggttttttggtgctcccttgccttattgtgtctctcacgtaatagttctctgtgttttctgccaaagctctctccttttttgccaacttcagctnttaagggctttctgtcctcgaaggctcacttagtgccatttttgcgctaagcacgagtaagtgattttcggcttagcgagtcagacgcgccgagagccagaagagacaaacaactcgttgggcgagctgatggcgtgctgggcgcgtgaatgcgtgatagattctctttcaaattatcttaattcgctaagcaaactgatgtctcgcttagcggatgttgctcgttaagcgcatatgcttcgcttaacgagacatctactgcaacaaca

SEQ ID NO: 208848 - DNA, 348 bp, Glycine max
  unsure (1)..(348): unsure at all n locations
atgcctaagggttgtgattcaagggtttaaattgtgggtgtggtcgtggttgcagttttgtcgtattccttatattgtgggaaattgcagacctatgtggccatgcagccatgggtgtgggtgcagaaacttcaaaaactttgactttgtggccataattgttgatggctaaatgcattcttagagaccacaggggtaattttcaactaccggggactaatttgtctttgactttatctatcaagcatgggtggtagagtttatgcatcacaataaggtntgaatgccatttggctcgccaccatgtattgaattacggatggttcttgaatcgtgtggtacgtggat

SEQ ID NO: 208849 - DNA, 381 bp, Glycine max
  unsure (1)..(381): unsure at all n locations
tagaaaactagacaactgtggagagcntttgttccttagaagaagaagcncacagagattcatagcttgtcaaggattgtccccaattgaacggattcgatcaaaggctgatagaatatgcaaaacaaagccttgctcttatagactcttcatgtctggtcaaaaggaccatttacaaaagttataactttgataaaaacttaaaaccaatccgaaaaagtcaaaactcatttgaaaagttacatcttctgatntattcagaaacaatcactggtcatcgattaccaaatcagtggaatcgattacacaaagctcttatgtgaaaggatgtgactcttcactcttgaatctgaatttcaacgntcataggcactggtaatc

SEQ ID NO: 208850 - DNA, 385 bp, Glycine max
  unsure (1)..(385): unsure at all n locations
tattagaagaaaaataaaacaaatttcaattatttcaacattatattggttcgngtgaacaatcaaatatagaaaatcatatcttttataaatgtatgatgaagggtttagaaaagttattctactcatctcttgaaataagtaatttgactttttcattatatatattcttttctatcaattgtatcaacataatttctcatttttcttcatttgtgctaatccttgagtaacttactggtactaagagaaaccatttttttatgattataggaggaaaaaaactgttcattcttatgtaaacgcattatacataatttgaaatttattaaatatttatgtaagatatttgtaataagaatattggtaaaaaataattaatatt

SEQ ID NO: 208851 - DNA, 404 bp, Glycine max
  unsure (1)..(404): unsure at all n locations
cgacgaagacactgacaaaaacttatctttttcttcttggacaaagtatggcacgctgggggcaagtaaattatcttcccatcagaccttggatgcaactgtgatcgcatacccatatcagctagatcttgacaggtattcaagccatccttcgtcttgccttgaatgttaaggagcgtcccaatcacactgacacaaacattattatccacatgcataacatcaatacaatgtctaacggcaagatcacaccagtacggaagatcaaagaacagggacctcttcttccatatgcaactctgactattatccttctttaggagcttcccaaatacagtattcagcgagtgaacccgctgattacctgctcaccaccagtggataggncaatacatgctattgac

SEQ ID NO: 208852 - DNA, 122 bp, Glycine max
gtgacgatcataccgatgcatgagattatgagtagtgtgaggtagcacccatcaacaacacgtttgcatgtcataactatactcggcattggcgtgtctctcttatccttacttggctatgc

SEQ ID NO: 208853 - DNA, 428 bp, Glycine max
  unsure (1)..(428): unsure at all n locations
actcaacgctatctgcgcctagagagggtcacggtcactagtagtgacttcttctttcttggnntgagcttacggccgcatcatctgcttcagcgatgagaaagactaacttgcaggagcacctgtgccctcgctaaaacctctcatcgcatttgaagcatagccctttctcgcggtgcgtaggtatttcttacagagaaaggcgctcgactggcggaggtggacgtttacctgatgcgggcacaagagcaagaaccactggcgagggcacgacgattatggatacgggtggcatgagcgactaccgtggcggcactgatgagccatacctaccgggaaccgtggtgttggactgccactattactcatgcagagatccatgtccgctgtatgtgtgacggtgacgagttgtgcaccttcacctcaca

SEQ ID NO: 208854 - DNA, 307 bp, Glycine max
  unsure (1)..(307): unsure at all n locations
atctatcctttctattatggagccaaacccagtctccctcattaagaactagctcttttattcctttatagccagcagatgaatacaccncttggttggttctctattttcgtcttaaccctctcatgcaacttctatacaaattctgacctagagtccccttctttatgtataaaagaagcgttcgtcggaggggaatgaggtctaacggagttaggggctcgacccgctactacctcacaggggactgttggtggtctatgaacccnctgttgangctaatctacactgaggagatacttactcc

SEQ ID NO: 208855 - DNA, 457 bp, Glycine max
  unsure (1)..(457): unsure at all n locations
tcaagccatngacaattcttatgacgaatgagtattgtatagacactacagtatcttaggattgacaatggcctggaatcttgttctacttaattcaacgaatgttgtagagatgaaggcataacaaggtagagtattgtatgccatactccacaacataatggagtaactgaaagaatgaatcggaccttattggaaagggccagatgcatgctatccaattcaagattgaatatgagtttctgggctgaggtagtcagcataatatgctatcttgtgaatcgttcaccatccactcccatagacttcaaggcccctattgaggtatggtctaacaaaccaactaaatactcacatgtgaagctatttggatgtgtggtatactatcacatacgtgaaggtaagctgaagcccaaagccaagaagagattctttatgggttatggagatgtcaaag

SEQ ID NO: 208856 - DNA, 469 bp, Glycine max
  unsure (1)..(469): unsure at all n locations
tacgaacctacacactaacagtntgttattttgtgtattctaccaaccgccctttctttatgaagctcattatgctctcaaaacaccttgaacatcttgagagaaaagactaatagcttagattgtatattcattcgtgagacgattggaaattagtcattgagccaaccaaataacaaatcttcttatctattttagagctagcagtggtctggtaggacaaaaaatattgggttgctctagcttggtgataatcttggtttgtaagagccaaaagtgatagtgaagaatacttataagtttgaaaagttagtggaacttggtagttttctaagaaatggatgtagtctcaatggaatagacaaaccaatataaaaattcctggctgattcctattactatgtgtggttaactaatctaaggtttgaatctgatcttgattgaaaacttgctttacaaatatgtgatc

SEQ ID NO: 208857 - DNA, 198 bp, Glycine max
tatataaacatgctacaaataaaccaactttatttaaaagagaaaacgttccctcggaaagaaacatgaaatggacactcaaagggactactatacataacgaaactcgaacgatgcgaccagatagttgagaaggaccgtttttcccatcaaagctcgggctgcatatcaaagaaagacgttatttgagtacaccac

SEQ ID NO: 208858 - DNA, 460 bp, Glycine max
  unsure (1)..(460): unsure at all n locations
acccacgaaactctggcacaagagactcgatcattgccatcttgaaagaatgctaaacatgaaaaaaaggaaatatgcaaaagaaaatttgaagaaggttcaaatggaggaatgcaagtctattagcacaccaatgaatcataaggagaagtttagcacagaagaaggtgttgataacattgatgaaggatattatgggagtttgattggatgtccaatgtatctcactacaacaaggccaaacattctattttctcaaaagaacaaaactgaaatttttgttgacaatcaagtagccattattggtgcaaacaatcccgtgtgtcatgggaagactaaacatttcaacatcaaggtttattatttgataaagatgcaacanagtggagaagtgaacttaanttactacaagtctaaagatcaactggctgacatgtntacaaagtcactacctatcaat

SEQ ID NO: 208859 - DNA, 436 bp, Glycine max
agctttgtctgacgtgttcaatggattctttcgctcatcatacatatgtaaagacggggctaatgcatagtttccaaattttccatatcggagagagagaaaaaaaaaactctacctctttggaaaatgagaaaaagatacaaaaaaagaaatagtcaactgaaaatattttccttttggatgtgagctctaaactaactggccataattttctccttgaattgctaggcattttagatttttctctttgcattcgcaaaaataaagaaagataagaatagagtttcgagatattttcagcgctaaaaatatttgtgggtaggggaatgctacatagcatgaactgtagtacatatggactcggcgttctctatgagatatgagagtatcctgacagattctacttctcacaggggccccctacacatattgtcac

SEQ ID NO: 208860 - DNA, 507 bp, Glycine max
  unsure (1)..(507): unsure at all n locations
actaagctgggataattcgtgcttaatccncatagttaagcctatgttttatgtgcttaagagtcaatggattgcaaatcaagttcaatttgaatctcactcacaaatataaattctccctaccaaccaacactatagaaggtttggatttcatacaaacatagaacaattacacatgcaaacttctcttacctacaacatcccccacgataggtctttgaagaagagaagaaaagaaggaatcttgagctccaataagaatttcctccaatcaacgacaccatcacaacatatccatcgaatactcacaaaaacaacacatatgaggattttctataccaaaacccatcatgattcgacccaaggaaggaaaggtgaaaagagaggaatcaagagatcaaaacagaaagaaaaacaggcttacctactccaaaggaaacctaataagctccgaggaagaggaaagcangccaccaagggtgtagaaatctaacttcaactcaagcg

SEQ ID NO: 208861 - DNA, 436 bp, Glycine max
  unsure (1)..(436): unsure at all n locations
agctngaatgtttctatgctatcatcaatatttccaattatatcaaaactctgagacatctcccacaacaaactttaataatgaataagcatgataaggaatgcaaaccatatgatcgcaaaatgtcaccttaaacacaacaacaataacaaaccttcttcattcaatatgtcatatggactaggaaagaaaagcaaattcatttaacaatcaagtcacactaaacattatagaacaacaaaagcctacctaaaatcccagaaagcaaacctaaaacctagtttatgaattgactaaccaaatccccaaaaattacaactcaatataggggatcaaaacacccaaacggcaaaacagagcataaaccctgtcacatctatttaaataaaccaaaagctaaatcacaacataccttggcatccatcaagaccaattc

SEQ ID NO: 208862 - DNA, 403 bp, Glycine max
  unsure (1)..(403): unsure at all n locations
tataaaactcagcttcctcagtcgagatgtaccgactactgccattgggcgattaaagcaccctagncgngtttgtgctactggagccaatgtcgcaattaaacaatactttggaccggctacaaggagttctctcatgtctacgtccatggctcttgaagacaaaaaatcagggaccagctggaggagtcgatcacagaaaaagtgactcgacaactaatgttgtccttcagccagatgcaatcacagggactcacactgttggacaagtggcctcaataacttaagaggggggtgaattaaagtttcaaatttcccactaacaaactataacccccttgtagattataggctcaaatgcagaagagaagcacaatcaatttaatcgatgttcttaaacgtg

SEQ ID NO: 208863 - DNA, 255 bp, Glycine max
  unsure (1)..(255): unsure at all n locations
acaactcanagttcaacttctctccctctttcttctttcaatttcgcgctccccctctttctntctctccctctntcttttcctccattgaagcatcctctccaagctntttatccaaggctcatcttagtggtgaagctccttcttccatggcttattccctaggagatggcgccctctctcacctcttctcctttgtcttccgctgcatctccatggagtaaaatcaccatgtgaacgacctgcattgaactc

SEQ ID NO: 208864 - DNA, 498 bp, Glycine max
  unsure (1)..(498): unsure at all n locations
ttaggcacaacaacaccatgttcttttcacacgatgttttantttttctctccaatctctggtatcaaccatgggttatggccaacctactaaccgggtcagccatggtttgctacttataatttcatataacatgtaggtttagtgatgatgtgtcatacatatataatttgcgtctgaattaatcttcttatgacaatactattcctacttttatctttaacaatttgtattgattttaggtactactatttgattaacataggaagttaaggctaccgaaaaacatgttgttctttgactgaagataaactcgtataattatcactgtcgtcaccgcactcatagtttttgttactagcatcttttgaggtatgtatgccattctgtcagttatgttgatattacatttattgttcatatatgagtcatgtctaatggttaaattatctgcattgtaagtgaaccacaagttcccatttaagattcaatacaccg

SEQ ID NO: 208865 - DNA, 377 bp, Glycine max
  unsure (1)..(377): unsure at all n locations
agattcacggcttgtcaaggatcgtatgaaataagtgttcaagattattgaaatgaacaacaaagccttgcttttatagactcttcatgtctggtcaagacaaccatttagaagagttataacttttagaaaaacttataaccaatttgaaaaagtcaaaaaccttttgaagagtttcatcttttgatttattcagaaacaatcactggtaatcgattaccaaatccgtgtaatcaattacacaaggcttntatgtgaaaggatgtgactcttcacattngaatttgaatatcaacgttcaatggcactgtgaatcgattaccacaacattataatcgattacagctctttgaaattaattggaacgttcgaaattc

SEQ ID NO: 208866 - DNA, 505 bp, Glycine max
  unsure (1)..(505): unsure at all n locations
tactcagcttcagaattatggcctcatcaaactacttgcttctcgattgaaattctataaacagacctcccatctttaatggactgggttaccactactagaaaacccgcatgcaaatctttatagaggcaatagatttaaatatttgggaagccatagaacaaggaccttatgttccctctataatagccggaagtgcaacaatagaaaaacctagagcagattggactgaggaagaaagaagattagtacaatataatttaaaggccaaaaatattattacatctgccttaggaatagatgaatactttagggtttcaaattgtaaaagtgctaaggatatgtgggatacactacaagtaacacatgaaggcacaacagatgttaaaagatctacgataaacactntaattcgtgaatatgaactttttaggatgaatgtaaattaaagtatacaagacatgcagaagaggttcacacacatagttaatcatcttgcatctct

SEQ ID NO: 208867 - DNA, 385 bp, Glycine max
atgtctgattgagtcctgtaatatatcgagacgctccaaatggaacaccgacactctgagcaaatttaaacgacaataacgctcttactcggatgtctgattgagtcccgcaatatatcgagatgctacaaattgaatcgctgaagctcctgatcaaattcaaacgacaataactttttactcggatgtccgattgagtctcgtaatatatcgagacgctcgaaatggaatatcgaaactctgagcaaattcaaacaataataactttttactcggatgttcgattgagtcccgtaatatatcggaacgcttgaattgaatgggaagctctgacaaattcaaccacaataaattttacttcgatgctgattgatcccgtatatat

SEQ ID NO: 208868 - DNA, 431 bp, Glycine max
tctacattcaatgtcgagcttttcgatatattacgggatctcatctgacttccgagtaaaaagttattgtagtttgaatctgctcagggcttcggtattccatttcgagcgtctcgatatattacgggactcaatcggacatgcgagtaaaaagttattggcgtttgaatttgctcagagcttctgtattccatttcgagcatctcgatatattacgggactcaatcagacatccgagtaaaaagttattgtagtttgaatttgctcacggcttcggcattccatttcgagcgtctcgatgaattacgggactcaatcagacatgcgagtaaaaagttattgtcggttgatattgctcagagcttctacattcaatttcgagcttttcgatatattacgggactcagtcagacatccgacgtaaaagtatt

SEQ ID NO: 208869 - DNA, 395 bp, Glycine max
  unsure (1)..(395): unsure at all n locations
agcttaccaccatgggaagctattgatttagctcgaaggtgggagaggatgattagagggagaaagagcatgaaattttgtgcctcaaatgaggtctgaactttgaagtgtaattctcaaatgatcaaagttaaaaaaatgcacatacatgacctctatttatagcctaagtgtcacacataattggagggaaatttgaatctctattcaaatttcacttgaatttgtggagccaaattttggagccaaaatttcactaattatgattagtgaattntagctatggttcagcccactaatccaagatcaagtccaagattctccactaagtgtgcttaggtttcatgagacatgtaaagcatgatagacatgcacacagtgtgactatatgatgt

SEQ ID NO: 208870 - DNA, 342 bp, Glycine max
tatgggtaatgattgttccaacttctaacaaaaccaaattttatgcgagaatgcaagaaattggtggaatggaataaaataattattctcttgttagatattgtggaaagagtggaaagttatgagcaaaacccaaaggcagaaataacttccatctatactccaaatggaaaagagaaacggcgtttggataaatggaataaaagcttctatgaggacttataatattcatccattcttttatactccacatacatatatattttgtatataaactatatgctgcataaatggacgaaatacaagtcaaaatgtcagcgatataattttgcctcgctggga

SEQ ID NO: 208871 - DNA, 429 bp, Glycine max
  unsure (1)..(429): unsure at all n locations
cagctttataccgatatgaaattattttttttgttagtggaaactaaggatatgggttcatatacttggaacttttaaaattacaaacaaagggtgaaataattttaatgaaaatgtgaaagaaccatataatttttcgttgttatataatttttcttaagaaaatacgtgaagggagaaaattacgctgaaaattcaagttctaatcatgctgcggtaaatatgataataatcaagtcttgaaaatcactttctttattgaacaaattatttaatacacctttcatggatggatgacaaaatgatggtaattaaagattaatcgttaattaaaagctagattattgtttggcaatntttaaaatgagacttgttggtaaagaaagtcttgagttgtcaagtgatataagctngcgtaagctttttttt

SEQ ID NO: 208872 - DNA, 477 bp, Glycine max
  unsure (1)..(477): unsure at all n locations
ttaagaaagcacaggagactataccacatgtattctactaatttttccctattgtattgtcaaataatgcaactaagttcaggaatttcacaaagtagtggcataccacgtagatctttgtatgatttccatgcaggcttattggcatcatgctcagtccctttgtcatcattttccttgacaccagatggcgcattctgcagagcattgagtattattatattgaagaaagatgcaaaggtttcatcaatttgagcgaaaattntaaaaattatgaatattattatattcaataaagatgcanaggtttcttcactgtgaaaattcaaaaatttatgaagacaaacagctccttgntgcactttttcttgcttcttangataatgcttgtctttctcagtatgaatgatgctgtatttgggttattgtacctcgtattaaatgtattgacttctgattctcatcacctncatgcat

SEQ ID NO: 208873 - DNA, 306 bp, Glycine max
cttgcggccacacatcttctggctacactcattagtgggctttccttccgcgaccaacatcatgggacgatcccactcttcgatgacacctttccatggtccgctatcctgtgatttgaggaaggccaccatccttgctttcagtattcatagctgggtccattcagaatgggtggtctgcacactggtccttcttctttctccgtgatcattataatgtatccccctagatatcactccctgattagcaggcccgctctgatgccaagtgagattctgatactgaggccagatgacggaccggat

SEQ ID NO: 208874 - DNA, 455 bp, Glycine max
  unsure (1)..(455): unsure at all n locations
ctaaagaggaagcctatggccctaaagatcattaaggaaattgagaagaatgcagttgtactttaacacattcctttaatttattgcataatgtcacataaagaaatgagggcaagttaaaattcagtattttcttttttctctttttcgggggtgtcatataatttgcaactttgtactaccacgggaatgaataaaaagacatgatgtcaagtcttacgaaactttctagttnttatcaatgtaacttcgtgtcagttacgatcgtgtggagagtgcaaagccatttgttttatgcttaatttggagtttaactctcagtgtacttacaattgagtatatcaattgagagtttatgttgagaaaaacactcgattagtaattactttattgtgtgtataatattttacagggctaagcatctctttggtttctacanatgtacaaacattctc

SEQ ID NO: 208875 - DNA, 418 bp, Glycine max
  unsure (1)..(418): unsure at all n locations
agcttgccttatagacaaatatacaagatatagnccattggttttttctcttanaatttataaagttggatggttcaaggtccaaaaaatacacgtgacaccctacatgacactttgagacacgtgtcaaccgtcacaccagccctggaataagagtacggacactctggccttaacagtcaaactccctaattgacagcttatctctaacctcttaataattgaatatatttgaatctcctaattatctacatactacacattatctataaggtacaaatatcctctagcttttatttttaaactacgtattatctctaacattatctataagggacaantatctactagcttttatctttaagctacgcattatctctaatattatggataagctaccgactcttatttataagcc

SEQ ID NO: 208876 - DNA, 473 bp, Glycine max
atatgctagatctccatatctacttgataattcaatggtagccataaccctagccaaggttcatcaacctccatttctccgagaatacgactcgaacgcaacgtgtgcttgtcacggagaagccccggggcgttccattgagcatggtagggctctgaagcgtaaggtgcaaggtctaattgatacgggctggctgaaatttgaggagaatcgcttgttgaatcctaacattgacaagcaacaccatacatggggcaattttgaaagttgttggtaggtgtccctaatgactcatcagggtttccaagtttatgccattattgtaaaccacagctacgatgttaaatgaaatggataaagttgatatctttggccctcatcctctcacatacgcatgtttgcttattcaaactctcaccggaatgtgggcgtaagccataggtctgtatgctcaagcaacctgcgctcctgag

SEQ ID NO: 208877 - DNA, 391 bp, Glycine max
agcttaaaaacagctaacaaacttagatatcaagttatcatgtattccgaaatatagggggagaaaacggatgcacattttatctatatacagctgcttgttgtctgcttgaatcttgatttcacgtattgtattgtcattatcaaaaagggggagattgtacatgccattggctttgcatgtttgatgatgatcatgatgatgtgttgcaattgatgcaaatgggcttttcaagattaaaattcaagacaatacttcaagattacaagtcacaacatcaagatgatcactagaatattatgaagggaattcctattcgaattaccaaggcttggcccagtgatttacaataaaaagtgttgttcacagggtttactctcttgtaatcgat

SEQ ID NO: 208878 - DNA, 481 bp, Glycine max
  unsure (1)..(481): unsure at all n locations
ntctcatgagtcctagatgacatttcaagctagtattatctcattttaacctccatttaccacagaattcagacttagccttcccactctcaaagcctcactctttttgcactcataacaccacattctcactttctaaccctaagttagttctacccttcgtctctaacagatttccatcaggaatttcagcatataaacatcacaaacatcatcacgaaaaccctaaaacagaatgggtatgtttaactcatccaaacatggcaatttcaacaagttttcagcagatgccttcacaaataatcatcatacagcagaaacctagcaagactacccatcatatctcccagaaccccatacccacgagaatcaaaggagaaagaagtccacccaaaccagatatttcgaagtcccactcgtagccacgcacttcacgaccccganaatgctctcctttcgcggattggagcagaaatgagca

SEQ ID NO: 208879 - DNA, 287 bp, Glycine max
tatacaggtgctcaatcaaatcattcgccaacactcatttgatactaaacattcccctacatattaaaatcaactagttcactgtttaaacaaacctttttgtaccagccattaacttcaagtactcgaaattcaatgactgaacattaatcataaaatgactgatataaaatatattgcttcaaatgcacaaaatataatgtcctgctcctgcgatttctcttgtgcatgctcaatgagatcaaacacccagaacggctaggagaatcctgaaggatatgctggtt

SEQ ID NO: 208880 - DNA, 508 bp, Glycine max
  unsure (1)..(508): unsure at all n locations
tttaaatntgaattaaaacgttcagaaactgctgngaatttattaccatatatngtgaatcgattacacagtgcaaattttgaattcaaattttaataactgttgtaaatcagttttggccactggtaatcgattacatcctctggtaatcgattaccagagagtaaatttcttgaaaaaaactttttaacttaaatttcttggccaaaccttttgctacttcaattagaattcccttcctatttaatataccctttctaagactctagagactgtcttgatcatccatcttgaatatctntaatttctttgtcttgaataaagctttgagacgcatgtgaacctttggcatcatcaaaacattcagcttgatcctttgtctacatcgcacaccanactttgatttgtaaaatcaagtgcattcctatgcctccacatggccttttgcttatgctattaaagcttanagagtngtgataagaatgagagaaccgacaaatgggcaaag

SEQ ID NO: 208881 - DNA, 478 bp, Glycine max
  unsure (1)..(478): unsure at all n locations
tatgctcctttttttttgtaatcanggcaagggatcctttgcttatgcttgggcacttgatgaaagttctgaagaaagagaaagggggataactatgacagtggctgttgcttattttgacaccaagagatatcatgttgttgtgctcgactcccctggccataaagattttgtcccaaacatgatatctggngcaacacaagctgatgctgcaattcttgttatagatgcctcacttggttcatttgaagctggtatggatggcagcaaagggcaaacaagggagcatgcacaacttatcagaagctntggtgttgatcgggttatagttgctgtaaataagatggatgctgttgtgtactccanagatcgatttngattttaaggcagcagctgggagtttttctccactctctgtggttcaaagattcttcgctatcttggattcccatgaagtgctatggagatcaaaatttgg

SEQ ID NO: 208882 - DNA, 429 bp, Glycine max
  unsure (1)..(429): unsure at all n locations
tagcttcttaacattcaaggcaagacaaattatggtttgaatactcatcgacatctaactgggatgggtatacgagaccagttacatccaaggtctgatggtgagaaaatatacctgcctctaacttggcatactntgnctaaaaaggagaagataagtctgtgtcattgtctctgccatgtcaaagtgtctcggggattctctggaagcaatgtctttcaagggtattctgatgatgtcaaagaatccagagctaagccaagtttcaagcaaagattcaagaatccaggttccagagtctagactcaagaatcaagtgtcaagaattcagaatcaagaataatccagatccacattctagactcaagactcaagaatcaagaagaagactccatcgacataattcttaataaggtcttgaaaacattg

SEQ ID NO: 208883 - DNA, 475 bp, Glycine max
  unsure (1)..(475): unsure at all n locations
cttgaaactcagctataggatccccttcgttggcccgaaactgaggactgtctatgtggccgaagtcgcaccatgacccagtctcctatgtcaaaatagacatccctgcgtttcatattagctgtgtgcttcatcgccagttgggctttctcgagcttcttccttatttcagcaaaagcagattccttgtctgataagaactcatctactgcctccactttagacgagcctgtaatatactggggcaggcttagtggcttcttcctaaatgtaatttcgaatggtgaaacacttgaacctgagtgttgcgaacgtgtgtaagaccattctacctagttgagaaatttgccccaagacgaaagtttcttgtggacgaaggcgcgtatgtattgttcgataacgcaattcanaactcttgtttgtccgtctatctatggatgataggccgagctcattcgctattgcgtgccactca

SEQ ID NO: 208884 - DNA, 395 bp, Glycine max
gtcacctgaggatgcagctttcattattcttgtcccgtttggccacattgggtttcgagcatttttattctcgttttgtatactttttataccccctggtgacgtgcttaagccattttacttaagtcatttctcgcttaacttaaaaataaaataaatttccaccgaacgtttgaattgtattatccattaacttcggttaaaataaattccgaccgttcggtcgtgccgtaaccacgttggaaatcaaaaagaggtaaaaaagaatattataatcaaaaagacatcttttagtaaaataaagcggaaaatcaatcggacgttttctctttgggatttctcattcttaatcgaattgattaataactaaagtgaaactaaagggctaaatcaat

SEQ ID NO: 208885 - DNA, 301 bp, Glycine max
aacaacagccttattttcaaatgttgctggcccaagcagaccatacgttcctccaccaatccagcagcaacagcaacaaccccagaaacagcaaacatgtgaggcccctccgcaaccttcccttgaagaaattgtgaggcaaatgactatgctaaacatgcagtttcaacaagagaccagagcctccattcagagcttaactaatcagatgggacagttggctacacagttaaatcaacaacagtcccagaattctgatagattaccttctcaatttgtccagaatccccaaaatgtgagt

SEQ ID NO: 208886 - DNA, 349 bp, Glycine max
  unsure (1)..(349): unsure at all n locations
ccactccatcaattatcaagccatttatgaggtaatccttttggtacgaggcaaattaaaatttctgatgaacactgacagcgatatttctcttttctgttcctaaatttgagcctgcttctgattttgtctatgttccccatataaatgtataaaataaaaaaatactacagtgtttcctgatgttcagcttataagcttgccgttccagtttttnggtattgttagntgataagctaactaagttgtattgtatctctgtcttgtgttctccagtacattgaaattaaaacttgtgttgtgtccttgaattttgctgcccatcttttatttcatagattcaatttcc

SEQ ID NO: 208887 - DNA, 482 bp, Glycine max
  unsure (1)..(482): unsure at all n locations
tgatgatatggtcttcatcgacgaaaggatcaatgtgtttctaataagaggcaaatctgatcatcatgctttgataaatgcaaaaaaaactagggcaaatgaagagggtgaaaatgagggagaagcccatgctgtgactgccattcctatacagccaagtttcccaccaacccaacaatgtcattactcagccaataacaaaccttctccttacccaccgcccagttatccacaaaggccattgctaaatcaatcacaaagtccgtctaccgcacttccaatgacgaacaccacctttagcacgaaccgaagcaccaaccaagaaatgaattntgcagcgagaaagcctgtagaattcaccccaattccagtgtcctatgctaacttgctcccatatctacttgataactcaatggtagccataaccctagccaaggttcatcaacctccatttctccgagaatacgactcgaacacaacgt

SEQ ID NO: 208888 - DNA, 396 bp, Glycine max
agctttaatatcaattggtaataaccttgttttgtggaagaacatcatcaaaagttggaggccttagcacagtatggctgccaagtgccttttgttggatgcccaagaggtttatgctaataaacaatatgggtggaagacctacaagttataggcaaagcaattgcattgcattctcttttgggctgatggtctattccttgcgggacgtggattttaacatcgggtatgagggcaatgcatggcaagcggatgcccttggttacattgatgtgtattaagagaaaatatttgtagtctcatttccctagttgctggatgaggtgttaatgctacaactgtgtatggcctcattgttaagcatgtgcgacgtgcaatcattccttttgctatcaa

SEQ ID NO: 208889 - DNA, 511 bp, Glycine max
  unsure (1)..(511): unsure at all n locations
ntntcaaaatccactntaaaaaccataactggcttctttctctgaatagcttcctcaaccacctcattgagagtcagaatgccatgaaggatatgtctatcctttatgaacgctgactgcttttcatcaattatcccagaaagcactctcctcaacctttttgccaaaagtttgactattattgtatacatgcaaccaataagagaaatgggtctgtaatcatttaaagactgagggtgggttgttttaggaataagggccaaaaaggaggcattgctgcctctagggaagctgccatgaacatggaattcatccacaaatcttctgaaatcaggtttcaacgccccccaaaattccttgataaagttgaaattaaaaccatctggccccggacatttatccnccccacaacgtccaaacagcatcttgagttcttggtcagaagaaggtgcagtcatcccctccctttgtctctgatcaatcatggngaaatggaccccatccaaagtac

SEQ ID NO: 208890 - DNA, 408 bp, Glycine max
  unsure (1)..(408): unsure at all n locations
agcttaactatttngtaaaatgtcatatctatactaatatcatggggaggtaataagatatggcttagaccagtacaatcatattcatcaaaggttgaaagctttcataaaacatgaaaatgattttgtgcatgaaaagtcggaaacaacgtgttgaacaaaaactttctaaacatagcatcctagacaatgtcattttgagtaacaacattctgagtactgttgtcaacacaacaactttctaagtggtgatttatcattacataataactaaaatatatatgtatttatgggatgatcttctaaacatgagcaaatgcacattgacattacgttttcataatcctatccaccatttaataacgagtgttgtgactaagctaaccacttaaaagtcaaactccgtaa

SEQ ID NO: 208891 - DNA, 266 bp, Glycine max
attgatttctctttattttctttattgttgtaaagatattcagatgattgtagtattatttgcttcaagatgtttcaattattttgttcaagatactctgaatcttattattattttttctacttaaccgaggttgcaacgcgaacgatcggttggattttattttaacagcgattaatgattattacaacacaggtgatcggtggaaattcattctatcaatggttcagcgacatactggcttaaataatctattgaaagtgcgt

SEQ ID NO: 208892 - DNA, 436 bp, Glycine max
  unsure (1)..(436): unsure at all n locations
agctttcgagtaattcaaatggtcataactatttactcttatgttcgattcacgcacataatatatcgaaacgctcgaaattgaacacaaaagctctctgtaaattcaaacggccaaaagttttgactcggttgtatgcatgaagcccattatatgtcgagacactcaaaatgaacgacgaaagctatcgagaaattcaaatggtgaatacatttcactcacttgtccagttttggcgcataatatatcgaaatggtagaaattgaacatagaagctgtcggcaaattcgaacagccataacttttgactcgggtgtatgtctgacgcctgtgatatattcacacgctcgaaaaaaaaacaaacagaagctctcgagtaattcaattgggtataatttntcattcagatgtccgatgatatatcgagacacttgaa

SEQ ID NO: 208893 - DNA, 499 bp, Glycine max
  unsure (1)..(499): unsure at all n locations
tcggaccttaaaactcagctntnttgtcgatgtgcctaaaaattacaatgttgttctgctatgtttcttcgggcgaactgaaccgaagttgtgtttcggccgactggcatgttctcattttgtcggccaggaaaacattagcccacctcggcataaaaaacatgattcaccgatatttgacaggaaaagaaaaatgctagccgacgtcggccaggaaagatgaccgaccgaggtctgaaaaagaagcatgaccggatgactccggtcgaacatttcctaactgatatcatccaagtattattcagggattgaatagaaaaaacaatagccgacatcggtagttaaatagccgtgactgatatttttcggccgacattgcgcaatttcttttacaaacgctggccgttaatatttctttacggtaaaggatgttnntgctgtttgggtgtcgcctataaaattttcaatgtaggtcggctagggtttttcgtgcgagctc

SEQ ID NO: 208894 - DNA, 444 bp, Glycine max
  unsure (1)..(444): unsure at all n locations
cccgggatccttaagtcacctgcagcatgcagcttgaaggctttagtcttattattgttacgtgacgatgcaacaatggttagtcgtggctatactaaacatcttgccaacaaagtcaagttagccataactcgcctgagctttntcttccatgccatatgtagcaaaggcggtgatcctgtcaaggttgatgagttggaaaatgagaccgcaattatactatgccagttggagatgtattttccccctgctttttttgacatcatgattcacttgattgtgcatctggtcagagaaatcaaatgttgtggtcctgtttatttgcgggggatgtacccggctgagcgatacatgaagatcttaaaagggtatacaaagaatctatatcatccaaaagcatctattggtgagaggtacattgcagaagaagccattggtttgttc

SEQ ID NO: 208895 - DNA, 388 bp, Glycine max
agcttctacaagaatagatggtcttaaggttcaaggatggacttctcatctaaagaaaagaaggaaaaaattagaaggagctgaattggagcacgttgaagattgttgaacaacatgcctgtgcttagcgcatgctgtcaagcctaatgcgagtggtctatcttatcactcaccttcagcatgaatttacgagagctagatgtaaatatgccttattagaggcttagttatcctcttaagcctagttctataaatactcagaaactcttaattgtagaaacctttgacataattgaaattaagcttgtgcttagagaaagcttaacctctattatggtttttgactgaaaaccaaattgattcttatcaaggaagctattcctttgtg

SEQ ID NO: 208896 - DNA, 407 bp, Glycine max
  unsure (1)..(407): unsure at all n locations
tctaataacctaacgttctgaatgtggagctcttaaacttcacctggttaatgacatccctaaccttgcccaaatcttcattagaattaaaaagaaacatagagagttttcccaaagcgacatcttaactcaaaatgatctttctttcatatggagaccaaactcanaatcttttgaatccatctctatagcctatgacaaatcccttcttaacttaggggtctaacttactgttacttacatgatagtatatcgaacatccaaacatcttcagtattaagtatttagctagtctgctagaccatagcttaatagcgatcttgaagtctatagcaatggatggtgagcgatttacgagataacatcgtgtgttgactgcctcagcccanaaactctattcaagcctg

SEQ ID NO: 208897 - DNA, 413 bp, Glycine max
atgctgtcctcttgtgtgaggaaactccttcattcttatgtgaatcagcctctattgggcaatgccatggtgtggacaacctctgatcatctcttgtgacctttcccggtctttaggtagacttttttgcttcctttgcacaatgtttccctgatatacttatctgtattcatgggagagaaatacttccataagaaagcatttgcacattggttccataaagagatgttgttttctggtaaagagctaagccaatcccataccttccattaagagagaaaatgaaggcgtagagggtgacatattctgccaatacacaattttgtctcactgtgttagaaattttgaggaacttcttcaagttctggatatgagcttcatgggtaccactaaatgtgttgtctccagcatca

SEQ ID NO: 208898 - DNA, 493 bp, Glycine max
  unsure (1)..(493): unsure at all n locations
cgtcgtgggaagaggaggctcttgcaagagagagagattttcttttgagaagagatgcaatatgtgttacgtgacttatctttagtaaacaatcacatgtcacgtatgttaagaatcgtcccaacctaatttcgactaagagaataataacatattataattgtccaaagatagaaaaataagcgtatttcttttgtatcaactaagatacaactttagatattttccagacataaaagaaaatcttttagccatcttagaattactttctacaaaaggtatgttaattaaggtgagggtgtacaggtagagaaagggtaccggnggtgtgggtgggacggttaaatagaatacctaccctgactagcttttggttgaaggatccaatatttgcatatcttcattaaaatccaacaactatatantttttcaactataaataaggccattttttcagactagatatatgaactatacaattgtgtcttcctcg

SEQ ID NO: 208899 - DNA, 339 bp, Glycine max
ttatgctctattaaaattacgtcaaacaacaaatgatcttaaaataaaaagcgaaactgagctgttatctacttatgagcttgaaagatatgagttgttgataagaatgactacttgcgatgacatattatttgctgccaactcaactattataaagttacaatcaaaacatatgggtatggatgttgctataaaacaatcgaaaggtcttatttcttttgttgacacatctatagaacatatatttattaacgttattatctctcgcaaaaaacttgctacttacatgcgtatacaatctacattttgtaaataacgtgtattcctagacaaaacaat

SEQ ID NO: 208900 - DNA, 486 bp, Glycine max
  unsure (1)..(486): unsure at all n locations
tgacatttatctatcatactaagttgtatatacatctaaaatgatggctggacaagcataaagatcattacccattcaaatttcaaaataacccatggaataaccattgtgacatttcatcaaacagttggtatgcgcatgttaaaacatatataaatgagagataaggaacaatatgacatgaaaattcataatagaatcaaggataggcctagaaccatccattacagccaccaatccaagcattttgatcatgggtttgcacatagctcatctcacaaatattgcaaagaaaacaacaaagcaccaaacatcacaaggaaaaggtgaacatagatggagatgacacttacttgagtgggatgaaagcaatgcaagataaatgacacacatgtgcagataaaaagcttgaagttgctgcataaagtggagtcccatgggtctcgcngagcctttggtgagctttgaagagaatgngaagaagat

SEQ ID NO: 208901 - DNA, 338 bp, Glycine max
tcatactaatcttaataatacaagattatcttgttgtcattgccctattctactattggatgaagaggtccatttgataatgtccttgatgataattaaagacttgatgctataatagagattatgagagtgagaaacacgtttgttctaattctaatctaaaccggtcctgatcataggattatggctaataggatatcactagatctggatagactaatatatatgtgagagtatctatcggatacatatcaatagatctcatttattaacgcgcatatatagatgaatcacatgttgatgtgatcattgaactgactcaatagagatcttctaat

SEQ ID NO: 208902 - DNA, 378 bp, Glycine max
  unsure (1)..(378): unsure at all n locations
gatcctctgagtcacctgaggctgcagctttgacaccttgttgagtctagaaatctttattatttatttggacaagttcgaatatgatgtagaagaaaatgaatgtgagcctttttcccctttgaaagacttgtttaaaaaaaatgttttaaaaatactttcaattaatattagaatttttttttattccttattaatatatatgtgaggggttgagggtgtcacacaacacactaaaattaaagcattctttgaaacaagttcacatgtggttggacatgtttttaaagntatcttatacaacaggctctttggcatggtttaaaggtatgctttaaatcacaatactgttgaataccaacatgtacattatgctgg

SEQ ID NO: 208903 - DNA, 496 bp, Glycine max
  unsure (1)..(496): unsure at all n locations
ttgaagctggaatcatttatcctatctccgacagcctatgggtgagtcccgtccaggtagtcccgaagaaaaccggcctcactgtgataaataatgagaagaagaagttgattcctactcgggtgcagaacagttggagagtctgcatcgactataggaggctgaaccaggttaccaaaaaggaccattttcccctgccattcattgaccagatgcttgaacgcctggcaggtaaatctcactattgtttccttaatggtttttctggttatatgcaaatcactattgctcctgaggatcaggaaaagaccacatttacctgcccctttgacactnttgcctataggaggatgcctttcggcctgtgaaatgcccctggtacattccagcggtgcatgatcagtagttttagtgatgttntagaanattgcatagaggtgtttatggatgatttcactgtatatggatcctctcttgatattcgttcggatagtct

SEQ ID NO: 208904 - DNA, 320 bp, Glycine max
gcattgccagtctgagatgctagatatctcattgtgatgaaaatatatccgctctagcgcgttgtcatactattgcattgggatggttcgtctgaagcacgaaaactaactaaaatagaaagaaagagaaaaggggtcttgggtatgggttccttttggtcacacgccttttcgtcctttgataaaaggaaatcttgagtaacaactctgcctaggttaccaactttttctataaaaaactaaaaaagaaatctaagagaaaaactaaaaacctacatgcttttgaaaaaaagaaatgatcaccagatttcttctggaaa

SEQ ID NO: 208905 - DNA, 358 bp, Glycine max
ctctttcttcacacataataggtcagaactaacaaaggttttcttccaagcacgacaaactaacttcagaatcaaacaatatatccgaggaactctatctagaatccgtattgaaatctcattaggaaaggacggaattcgtcttgggttgtcctcacaagagtgaggtgacaacctctggctcttgcaagattcaccttgcaagaccccatgggaatccattcgtctagtctttgaacggtttagaaatcagattatccccattaaaaccactttaaaccaaaaccaagcactcacatcagactttcaagaataatctgcttcatatcaatcatacaaaacatgtcagtccattcca

SEQ ID NO: 208906 - DNA, 388 bp, Glycine max
  unsure (1)..(388): unsure at all n locations
ggtcacagtgatacacatttagtccacaattgggtaaaggtggaaagagacattacccatatgaccactttctctgttttcaaatntgcaaactatgatgatctttgtgctgccaaaccgttgctaacagcattntgagagttgaactcactcttacattctgataagcaatatgcctataatgtcacatctatgtagctattccttttaacccatatatcctttttcctaggatcgcattccacctgatggagttgagagatctggtataagcactgcacacgaatcaagtgttactggtgaaccactgcctgtgacacaagtagctggggtactatctatctcaacatgatcttctatgaattcgagatttatttggctatcgaca

SEQ ID NO: 208907 - DNA, 408 bp, Glycine max
  unsure (1)..(408): unsure at all n locations
nagcttgagatgaggaagtgtataagggtgtaacttcctgcttttactcgntgaccacagagtggtacctggagatatgtcgcgggggtcaggagaccttggggacgtcaggtggggtgctattgcccaaaaccaagcttgaccaatcccgacccaacccgggcatagtcagtcagtgagaacctgtgatgtacctaaacaggcgagctcctggcagtcaacagataaaagtaacaaagaccacaaagcaaggaggcttgtggtggctggccagctgtgaattttgtgtgatatagggttatggcctctggtaatcgattaccaagggtgggtaatcgattacaaggcttacaaatgaagacaggagactaagatggtctctggttatcgattaccaaggggtgtaat

SEQ ID NO: 208908 - DNA, 497 bp, Glycine max
  unsure (1)..(497): unsure at all n locations
actcagcttatatgatatatgtgatttcttacattattctgattttatcactatgcgcaagaatatcttgggtttagaattgtgtattttatgttattcccttatataaaaaaaattgtgaatttgggtaaaaattggatatatgttattccctttaaatataatgctcaaaactcaaatatgtgagtcttgagcccttatatataaaattatgttattccctttaaatatgtgagatatgagcctatattctttatttttgacatgtatatccttggatgaactctgaattttcctgagaagtgagacatttagtaggctttcttgaggcttgtgattcttttgatgaattcttcccttaggtagccttttttagcctaaattatgaattactctgtgtccttgaattgngatcatgtgaaatattaatgtgaggcaaaatatggcgatggactgaatgtattatgcacgctactgtgagaagtaaatcctaactc

SEQ ID NO: 208909 - DNA, 396 bp, Glycine max
agcttcatataaaggacgttcctcatgtttctacttttgtcttccctctcaatgagctgtggaagaagaatgttgtatttacctggggtgaaaaacaagagcacgcctttgctttgctcaaagaaaatcttactaaggcacctgttctagctcttcctgacttttctaaaacttttgagctacaatgtgatgcctctggagtgggagttggagctgtattgatacaaggtgggcaccctattgcttattttagtgaaaaacttcatagtgcccccctcaactaccccacctatgataaagagctttatgccttaataagagcgcttcatacttaggatcattaccttgtttccaaggaatttgtcattcatagagatcatcaatcacttaaataca

SEQ ID NO: 208910 - DNA, 238 bp, Glycine max
gatatcctgatgaccacgcttgtatgatcctacaaagtgtagatgtcacatagtgcgactattgaccacggatatccaagagccgaagatgaaggacgattatcgtatttatgacatgcacatgaacattcttgagattgacaatgcttgcactgtcttgtgagagaggatgacggatcacaagctggtgaaactgatccataaatacttgcctattatattaggcgtgagagtcaca

SEQ ID NO: 208911 - DNA, 385 bp, Glycine max
agcttcctcaatagttgcaggcagcgcaatctgtctattcttcagtcatgcacattgggggatgcaacatctgtggtggggcccatgagtcaggcatgtgcaaggtccaagatgatgtatccaaagaagtcaactatatgaccaatccacaccatcaagggttccatcaaagatgaccttctggatacaatcaggggggaaatttctctcaaggccacagttggagatcccaccccgagaataatttcaacagaaataaaaaagttttatctaattgtgctcccaatcaagggtctaaattatatgagaaaaccaccaagctagaagacactttgaattagtttatgcaagtgtctttgtcaaatcacaagagcattgtctacca

SEQ ID NO: 208912 - DNA, 413 bp, Glycine max
  unsure (1)..(413): unsure at all n locations
gattcaagaatagttgaaaaaatactggtggctgttcctgaaagatttgaggctactattacatccttggagaatattaaggatttgtcaaaacttaccttgacagaacttgtaaatgctntgcaagcccaagagcaaagaagaagaatgagggctgatgattctgtggaaggagcattgcaagctaaattgcaaattaaccaaggagagaaaagcaagtggaagaaatacaagaagaagaatttcaacacacaagaagcagcggctaacactagcaacaaaagtggagacaacaacaaaggatttcttccttgcaagcactgtggcagaatgggtcatcctcctttcaaatgttggagaagacctgatgttaagtgtgaaaagtgcaacaagtcgggacatcatgtgagaat

SEQ ID NO: 208913 - DNA, 420 bp, Glycine max
  unsure (1)..(420): unsure at all n locations
agcttatganattttttatatggttttttctaattgcggngatttgatctttgtattaatttcttttataataaactcacccctcgcaatttttgtaccatgtggttggtacctatgatgatcgcgaacctttattcgtgtgagcagaatgacagcagtagagtacgaaaagtgagattcttttgtggagtcgccgagccgacgtgatgacgttgggattattttgggagagagttttgttctgttaatcaactcctccatagttggttccatgattctttttgttgaattaaagatgtaaatcacaaatttaattatatgtatgaacaaatttactttccgttatgtgaatggtgtgtactgagttactacttctatatatatgtgtattcacttaagtaatggggtattggttggtga

SEQ ID NO: 208914 - DNA, 435 bp, Glycine max
  unsure (1)..(435): unsure at all n locations
ctgcattcggaccttgaaactaagcttaagagtctttatttcttagccttcattgatagtacatgcttcctttacaactattgtttctagtctttcacattctactattaatactaattatgatgtgtcaaaacattatggctctagctctttgtggcatgctagattaagtcatcctaatgctcatgtattaagacttgtattgaatcattttaagataactccatctaataagattctagatttttgttcatgctcatagacttccctcctttgtctaaaattntttactctacacctttggagttagtcattagtaacctttggggtcctttacatgttcctttaatgaataggtatttgtattatgttccatttgttgatggcttttcttgatttacttggatctatcctttacaacatagatctaatact

SEQ ID NO: 208915 - DNA, 411 bp, Glycine max
  unsure (1)..(411): unsure at all n locations
agcttgaacatactaatggattaaggtattttatagaaacaaatttctttatgtttactaattactcctctaattgaaaaatgctaccaagtactaacatagtaacatgcccttagtccaagttattcagtaatatccatcgtaaaactttatccaataatatttgaaaagtgatcaaaactagaagtagttttgatgctgccctagatttttaagcataggaaggtagtaatttaagccaaaactcattatgccttttaacatgctatcctatcaaattatgacaattttataaatntataatcattactctcaaaattcttgcaaaccataaaatgttcgtctagntttctttctttttggatatcctttggccgagagtcaaanaactaatttttaaagtactaatat

SEQ ID NO: 208916 - DNA, 360 bp, Glycine max
  unsure (1)..(360): unsure at all n locations
ttagctcgggttaattgggtcggaaggtttaaggtggctggtggggaaagcttctctggtgccccttggtctacctcgtaagtgaatgttgatagctagaacaatcacttacttaagctgttgattgctatgggcaaagtacactgtccattgttttcagctaacttatattgtatgacatggtttacagaacctaaagttgggctatgacctaggaacacttgtgcaatatattctaacagtagttctgcggaatgttctttatcacttggtattgtntcactacctattcatcttataccactcgtacgaattgaattctgtggactcaatctgaatgacatatcgcaccttaatgtg

SEQ ID NO: 208917 - DNA, 433 bp, Glycine max
  unsure (1)..(433): unsure at all n locations
agctntataagtgaaatcaggtgcagtctttttctttatagtcctctcacgagggggagggtgagccatattttgagaatgttcaaaatcagaatgctcaaaattaggatgttcaaaattaccaaccatagaatgctcagactcaccaataacagaatgctcaggatgctcaaaaggtacaaaatgtttgaaatgttaagggtaatcaagatgcacactgtgcctaactaatctatgaaatgtcgtatctatttcaggatcaaagggttgtaagtcacttggattgcctctagtcatgcaccatatgcagaagttcatgtgtttctcagacaaagcaaaagaggtgggttaaaactacagctatacttaaacaatatccaaatgagctgaaattttgtgagcaacaccctaaaatcattaagagatagcacaa

SEQ ID NO: 208918 - DNA, 515 bp, Glycine max
  unsure (1)..(515): unsure at all n locations
ctaagttntcctacacacaaacaaagaaccacaacaatctttatcatcacaaattcctactcagntactcttgagagttgataagtcaagacattaacacccactttccatcatttgcattttctgatcgcttgccatatcattccattgcccttcacaaattatacaggtgaccagtctaataatccgtgacccggcattgaaattcatggtataacagacatcagaaaaacaaattcaatatgactacaaccatcaaatctctatagctcattaaaacacaactagtgagtaagtgctaataacaaacaacgaacaccaaacatcagcaaacaaccaacaccaagcattcaacaaaacaaccagagaatgcacagaanaacatagcagactcacaactcactggccgaaaggtttgacttgctctgataccactaaatgtaatgacccgcctcgtcgctacggtatccacactctaatattcgataatttcaattttataanaagaactccct

SEQ ID NO: 208919 - DNA, 468 bp, Glycine max
  unsure (1)..(468): unsure at all n locations
ctattcgatgcagcagtaatgatggcccgagttatgttgtttaacggntacgaacccggaatgggtttaggcaaagacaacggtggcataactagcctgataaatgccaaaggaaatcgtgggaagtatgggttaggctataagcccactcaggcagatataaagagaagcatcgcgggaaggaagagcggtagtcaaagctcgcggttgagacaagaaggtgaacgaagcccaccctgccacataagtaggagctttataagcgcgggtctggnggacgaatgtcaagtggtcgcgatatacgaagatgatgttccgggtacattgcgattggtacgaccatgccctcctgatttccagctgggaaattggcgagtggaagaacgccccggcatttacgcaacgagcataatgtacacctttacgggtttaaagctctatatgtgggcctaggctttagaagttttc

SEQ ID NO: 208920 - DNA, 259 bp, Glycine max
  unsure (1)..(259): unsure at all n locations
taatggacgcagctggatcagtaatatttgagtccatgccattgatgattaccccaacatggttaccctcagagnctgagacatctttgtaaccattcattgtgtcaaactcaactgcaaagatgtggtttgactcattctcatcattggcggagttaacaaggccaagataatggccagcctcagccccaagaaactgtgttgaaggtgctatggtgaaagcaatgccaaagccaccataaccagaacttggggacac

SEQ ID NO: 208921 - DNA, 430 bp, Glycine max
  unsure (1)..(430): unsure at all n locations
tgggtcattgcaatttacctcattggcctggtctgattcaaatccttcaaacgatgtgtttgccatcatgcatatattngcttcttcagcatcttcattagatgaggtgtcatccaaatcatcccatgtgctcataagccccttcttttctttagtcttaaaagaatctgctcttatcttgacttttctcctaatttggacattccaacgtgaagtgtccaaactttntttactcatagcagactatgtgaaatttttctttgtcctctntgtctcgtgtcattcttctcgaagagcttcttcacttagacccatcataactgcgaaatctgagctaatttgatagtcaattttggctaatcaatgggtgtaatttctatattntataactggtcttaagaaaataatgaagaaattaacatctttgtaa

SEQ ID NO: 208922 - DNA, 487 bp, Glycine max
  unsure (1)..(487): unsure at all n locations
ctaagcttaataatctatatatggttataacaagccttctgtcttttgtccttaagnnncatgggataatttcttcatttggttttgatgaaaacctcatggatcaatgcatattccacaaggtcagagggagtaaaatatgttgtcttgtttcatatgtacatgatattttatttacatccaatgattgtggtttgctacatgaggtgaaattctttctctctaataattttgacatgacggataggggtgatgcaccttatgtcattggcatcaagattcatagagatagaccttgaggtattttatgtctaccacaggaaacctatattaacaaaattttagagagattttggatgacagattgttcaccaagtgttgctctcattgtgaagggtgatatgttaaatttgaaccaatgcctanagaatgactctgaaagggaacagatgaaaaacattcctcatgctctagttgttggaagcct

SEQ ID NO: 208923 - DNA, 244 bp, Glycine max
tggaaatttgacgcttctttctgtaaccccagatggttaccgatggttgccataatgttcttgacttctaaggacactaatgacaacatgggggatactctttcatctaaagaccaagatgatattttaaccgtattagaagacttggaaatccctgcacatggatatccattctctttaatcttcgatttcgtctactcacctcaataagaatatcatattcaacctgaccaaatgaactggg

SEQ ID NO: 208924 - DNA, 429 bp, Glycine max
gccagccatactgaccaaagtgccttattggttgttgagttcccaagctggagtttatggaaagccagtccctgaagattttactgctgattatgaacactggaaacgtgtagtgtcccagtcttatctagatgggatgggaattaaatggccacatgtgcgcaatgtcatggatatgaggtctatctatggagggcgagctaaagtcactgttttgattttcgattgttactctgacttatatttgcacttgctaatatgtcctttgtttgacatctttcaccgttcgtggattccagatatgctgcagctctgagagattcgaatgcttgcgtcatgaatgtggctacaatagactctcctgatactcttcccattattcttgaacgacgtctgttcggtatatatcatgattggtgtgaatcattt

SEQ ID NO: 208925 - DNA, 305 bp, Glycine max
ctttaagaaactccttaccatctcccaactaaagacttactataatatgaaacccttatgctctctaagaaccctaaagcaaagtcaaggatatcaaaactatgatcacgggtttatctaaacaaaataatattacttttggctcaacaggggtgccacggataaatacatcacaggttggtcttttggctgagtggcttaaataaaaaaaaacatggacatgatcaaattcaccttatgcatataatcaagcagcctaaaaatgatgcacaattatgaatataaatgcagacattctctcataa

SEQ ID NO: 208926 - DNA, 413 bp, Glycine max
aatccacccacactccaaatttgttttttgtgtttcccaccctttcaactacctatcttaagatcaatcgcgaaaaattattccattataattagcagtcttcaatgcgaatcttgaataacatcaagtgctgacgagacaatctcttactttaaatggccctacttgattcgagaaagcttgtttttcatgaaagatacttatagtttgtgtcatgattatctatcttattttggcttttgagatagtgagtggaagaagggtccgcttttgatcttggtattggtgtgggaggaggtcatggcatacaacagtggaaaatccaacaacgagggtgttgaagggactcaactctaggtgatagtggaaggtgaaggccaacattgtgacagtgataacggaacgcgtcttga

SEQ ID NO: 208927 - DNA, 390 bp, Glycine max
agctagcatgatgtacacttctcactttcttaagaatattcttctcgatatcatcaaaatcttcatgaggtacaaacacagatcatttaccatggtgagcccaaaataccctaccctcagaatcttccaggccatggcatgttcattggcatgtgttccaaaggccccctcatgcacctccatgaggatccgctcggcctctttggcgttcatgcatcggagcaagaccatatcatgatctcgcttttacaggatatccctgctaaaaagaagccagctgctaatcttataaatatgctctatgcgttgcgaaagcctaaatacgactccctgtcttgatgataattaatgtaaagaccacagttaccgcttgctcccttatataacagc

SEQ ID NO: 208928 - DNA, 445 bp, Glycine max
  unsure (1)..(445): unsure at all n locations
tactcaagctgctctanattacattgatgttagcatttattggatgtttttgtattgccgctttgntttaagggtagcatttcttggtaaaactaactttccaaatgtttgccttcgcatgaaatggccccgaggaagcttgcctcanagaggtccaggaaggacaaggcggccgaaagaactagttccgctcctgagtatgacaatcaccgctttaggagcgatgtacaacagcaatgcttcgaggccatcaagggatggtcgtttctccgggagcgacgcgtccatctcatggacgacgagtatactgatttccatgatgaaataaggcgccggcggtggacatcactggttactcccatggccaagttcgatccataaatagtccttgagtattatgccaatgcctcgccaacagaggagggtgtgcgtgacatgatatcct

SEQ ID NO: 208929 - DNA, 497 bp, Glycine max
  unsure (1)..(497): unsure at all n locations
tatcacaattntntgcanaattatcaacttcctaattttataccttattctcanaatcctacttcattttatccttactttccatcaccaccaccaatgaattntatgcanaataatcagaccccttgcactgaaaattctcaaacttttccttcaatgccacaaacacaattcttccatgtttcgtaaccctcccaatagttctagtgatccacaaactccttccaatgatgacgttgaaacgcaatttcaacaattttctactcaacttgggctagaaaacatcacattggaacgaggagagtattctacaaaaaaaatattgtgacttttcttttttctattgaagaggatacacatcttattgcgttgtgacttaatgtctcaatggatccaattgttggtgatgcgcaagcaagagaccatctttggatgagagtaacaacaaattacaatagctntcgagaggaactacaagaaagagcatcgagtcaact

SEQ ID NO: 208930 - DNA, 299 bp, Glycine max
  unsure (1)..(299): unsure at all n locations
agcttacacaaactttcactagtccaatgtatattcaacaaatagncatcatcaggccataattccaatcaatcatgctcggtatgatgcatgcacctaagacctcaactctcaaatgaaatgtggtaccatccccaaggaaatagcctatgcgtgttcacacgacactctcacttgggaaaactaagcagtaagtgtcgaggtcaccctgtcgtgcacaagaaactcccccctacccccccacggtgatcaacctgagtcttaagggagattctaaccgagtgacaagcccccaagta

SEQ ID NO: 208931 - DNA, 318 bp, Glycine max
agtcgctgaacactctatcgaccatttttcttgtatagcaaccgatcatatcggctgctaatatgcaagtttgtaatagggcaaatgcgggtgggagaataagggaagagatgactgaatggggatatttcatgggagggagtgaaaagaatacatgttggatagagaggtgaagagaatgggacgcaaaaatatcactatggggtgaggtgaaaaataaaaagtacaccggagggaagggtgataatatgaattttaactagactaaaactggagtgtgataatactaaaaaaaagtgtgacatgacaagtccccta

SEQ ID NO: 208932 - DNA, 498 bp, Glycine max
  unsure (1)..(498): unsure at all n locations
ctaagctttatccagccatcttgggtaagctctttttcttgcttatcccctagngattagggcctcctctcaactcttcttcttctccattttgctgccattaaaattcaagaagcaaatgtctccattaatgaagaagatccaaggcctataagctccaatggagctgcatcacttaacatgtccaattgttaaaataaatattatgtttattccctttcattcaattgtttatttatcacatcaaattatcatgtnttggttaacctttgtccctatgcatgcaattttacagatgacactaattacactataatattttattgttatcaatatattcctatttcatctctaattctactaatgaaggagttagtttaaatcacatgtgatttattatacctcttaaaggaattgcctagttttctaactctcttataaatagtatttttatggtcttagcctcatttttctgaatttatctgtcgaaatgatact

SEQ ID NO: 208933 - DNA, 381 bp, Glycine max
gtgcaggtttaagacacataggccaagctgccgtgatatgcgatgatgactccccgaggagatcggatttggtacggccatgtcttcctagtttccgactacgaaattggcgagaggaggaacgcccagacgttcacgcgacaagcataatgtaaccctttgtagctttaaaactctacgggtgggcctaagctttagagtatccttttgttaaggcattatgtcttttgttcttgaagttataatataacaatctttcttcatctgttcctgtgcctttacccattctcattcatttgcatgtttatttctttacgcttaatacgccagatccgacgacgagtccctcgaatgtacttatactcgagacccgactgtcaa

SEQ ID NO: 208934 - DNA, 489 bp, Glycine max
  unsure (1)..(489): unsure at all n locations
tactcaagcttcntanacctatttaactntaacctacttctgttcctatgtttttagttttgccaagaaatcttatatacttaaaatttctgtattggaagctgggtgcaaaaacttcattcccatcccagatatgacttagtctgtgacttccacaaggacatattttatgttatagcaatcatactttacttttttttaccatagaagtacctaaatgttaccataaggattctttgttagccagatataaaaatacaatcatagtcagtagtgcctctcagcctctgttaatcaattatcagaatgttagtctaagtagcctcaacagaggttaataaaataaattataacaatcaacagggcttggtgcatctagttttcttcactactgccaattacagaatcttgacgtaggcatgctgagacactgtgacatgtcaaattagttaaatctaataaatgagcaccatgactctgaagagcatg

SEQ ID NO: 208935 - DNA, 488 bp, Glycine max
  unsure (1)..(488): unsure at all n locations
agatctaacagactcagcctaatgttgatgagtatgatttgttcagacaatattaagatatctctccctagaatcgaaagtgccaaaagggttatgagattagtgggagagtgttctcaaacagttgataagtctattgctgggacattaatgagtacattgaccaccatgaagtttgatggttcacatattatgtgtgaacatgtcattgagatgacaaacattgcagcaagacttaagaccttgagaatataatgactgtgaataagaactttcttgttcagtttattctaaactcattaccatctgagtttggcccgttctaaatgaactataataccatgaaagataaatggaatgtgcatgaatngcacagtatgttagttcaagaagaaacgaggcttaagaatcaaggaagtcactcagttcattatgtaagtcaccaagggaatcaaggagctcgaaaagaaatntatgaataagcatga

SEQ ID NO: 208936 - DNA, 418 bp, Glycine max
agctttgatggtgtcaataaaaaatcacattgttgttatcactcaaaagggggagacagtgaatgtatgtatacatgatcttgatgatgtccaagaaaaatcttacaaggctgcttcaaatgttaagcatttgcttcaagaataattcaagattgcttccacaaacaaagtcttgtttcaagattcactaaagaccacgtcttgccttaaaacaatgtgctttcaagacatgccaggctctggttatctattaccaccaagtgttatcgattaccacaagacagggttgagaaatagctgctgaaaaatgttttgaatttgaatattcaacatcgtatcgattaccatatgtctgtgaacgactaccacccacgaaactctggaaattctactccaaatcataacccttctaatatta

SEQ ID NO: 208937 - DNA, 461 bp, Glycine max
  unsure (1)..(461): unsure at all n locations
tgggttttggaagcacaaacctgtatcatgaaggtgtcttcttttgtgaaggtgcgtgaagagtcactattgagcgtcctatgaacattgacgtggcttttgttttcaagtaagttattttatttgtggggtttgtttgtggatgtggtccatatagtttagggtttaatttgtgcatgcccttcaacagagtggttttgttaatttgtgtggtggtcgtgtgtggatagttttgtgtgtttgtgtggggtttgttggtggttgaattgtgtggaaaggtttgtctatttgtgttgagtttttggggtccacgaggctttagtggttttattctgntgtggtgttctgttatgtggtcgttggtggtgtggtcccgatactgagtttgatggngtttgtgctgatatagttgtttttttgtggtggacccttattgttgtaaattgaaacatgaatgctgg

SEQ ID NO: 208938 - DNA, 432 bp, Glycine max
  unsure (1)..(432): unsure at all n locations
agctngcatactgtgtaagctatttgaggtatacaatttgagagtaagcataagcgtaagaatgagaagagttttagaaaaaggacaacattagttttttaagaatcgttgttaatgcatgctaaacaatattagtttttgaaaaactaatgttaaaaacaatcagacaacattggttnttataaaaaccgatgttaacatcgacacacaacattggtttttgaaaaaccaatgttaacaaactcaatttatatacaaatatgccaccacactttttttaacatcggttcttataaaatcgatgttaaaatggtgcttttaaaaacatattttctagtagtgtcatcaccaaattgtacttnttgaccttgttgaaagcaaaatcaactttcttgagactcacctgtgtcgccataactcgctttaaagata

SEQ ID NO: 208939 - DNA, 353 bp, Glycine max
  unsure (1)..(353): unsure at all n locations
taacgacnngcagacagttcccatcacatcaaggattaatgtgcataatcatcatggatcaataagactttttaagattggactagtacgaaactttggctctggctgatctgtgctttttttcttttggtgtgagtaggagagcatgcataaagattttggtagtaacttatatgggcaatcacatcctgtccccccatgttttgaccaagttactattgctccccttctttttattccttcaacaactctgtcattgttcagacattgttggcctaagaacttgcattccttctacttcctttgcccttccaattttgattgatggatccagcctttctttttccttttct

SEQ ID NO: 208940 - DNA, 417 bp, Glycine max
  unsure (1)..(417): unsure at all n locations
agctcgacaaaccggctaggtttatanattattatattattatgaanaanaatgactattatctataccatttttgtggcatcatgaatgacaagatgtagtgacataaagcgcttatagaagtcactcgcatgtgaaacattctcaaaaagaaatagacttaatgctaaaggataatgccaccagattaatacttccaaagaaaaatatgttttgcaaagacattttcagacaatttaaatatttttatttgactatattagtataaatcatctctaatccatatattttctaatatcatgcccttctcattcattttcttttgaatactttgcgtttaataatatgaatcacatgagtttggttataattatctctggtttggcattacttatccaaatctatagcttctttttt

SEQ ID NO: 208941 - DNA, 501 bp, Glycine max
  unsure (1)..(501): unsure at all n locations
taagaaaaagcttaacaaacttagaaatcaagtgatcatgtattcttcaatatagggggagaanaacggatgcacattntatctatatacaattgtttggtgcttgcttgaatcttgatttcaggtattgtattgtcatcatcaaaaagggggagattgtagatgcaattggctttgatgttttgatgatgatcatgatgatgtgttgcaattgatgcaaatgggcttttcaagattaaaattcaagacaatacttcaagattacaaggcacaacatcaagatgatcactagaatattaggaagggaattcctaattgaattagcaaaggtttggccaagtgatttaaaataaaaagtgtttttcaaaggttttactctctggtaatcgattaccagaggatgtaatcgattaccagtggccaaatacgttttataacagctataanaacttgaattcaaaattntagactgtgtaatcgattacacaatnttggtaatcg

SEQ ID NO: 208942 - DNA, 378 bp, Glycine max
tgcaagcttgcatgaaagaaatgttatttttattctggtgcaatcaaaacacacacaccaaggccataatcgaaaataggtaaagttcaaacgatcatagtccatggcgaaaatattgacttctcgaactgctactaagttagcgatggaagaccattgatatatattgatgaattttgcattcactaacataacattgtttaatttgtacgctcaaatctattagctcatgtgttcaacttaaaatatgaaatttctattttacatctgttatttggcattatgtaaccctgcttggcacattacaaaattctctttgatttctctagccatagattagatctgattatatacttcactttgctgaataaaaacaaa

SEQ ID NO: 208943 - DNA, 496 bp, Glycine max
  unsure (1)..(496): unsure at all n locations
tatacataataattctaattacatttcatctctcctatttatgtaatcgataaatgaatgctgatatatcttggcaaaaactaaggcaacttccactgatagtaatttataatactgtgcaacttgtttctcttaaattaaactttcatatttgttagttttgtacaaccaatttcttaattacttataattgtatacatcttttgtttgtttgcagctaataagtccagaaattttcataattgttgtgtgagaagttatattctaatcacacattaattatttcatagttacatcaatttttataaacaaaatattgtatatcatatttaatttctgtctagcatcttcagacttgtaaggaccttgtacaaaaaatgaaatcatacaaaaattggagtgacatagacaaatatgcaatatataaataccatgatatntgattaaataactgtaacatacaaatatcatgatantttgctanataatatgttca

SEQ ID NO: 208944 - DNA, 313 bp, Glycine max
  unsure (1)..(313): unsure at all n locations
agcttattcaacaatggtagatcacataatattatnttgaagacacccaccctcactaggagcagtatcctaaatcaactactttatcgcttcgcataagacgatacgagaaagtaatagtttcgtgtatcacgactatccatgatacgcgcgccacccagctcaagtaaaaacacaaccccttgtgggattttcgtttcatcaagaatccagacatccaggtttgcatcacctataaccccctcaattactcgagagaagaacatgtgtaatgaatgccctaaacgatgattccccttaagagacctaaaac

SEQ ID NO: 208945 - DNA, 492 bp, Glycine max
tatatatacttctgcagtatatacacaactggtgattattctattcctccaataattaattgattaaaaaatatatatactggtctcttttccttgcttcagcaaattgaacaaaagttttgatctcaaggactacttggactcgttatatacggacgcagctcaatacaattacccttctgagcacccagttaagatcgtatgtggagcaattgacgcagctgctaatataaccgatattcttggccaaatatttgaaggtgttggtgcttataagcaacatcgttcatgttatgacatgaatgaatataaccatccaactgaatctttcctgggttggagatggcaggtaaatgttatatggtcttattaaagagaccaatgtcattatactgttaacataaaagtctttacatcgtgaattatatgttaggtataattctaatctttagaataatcattataaaaatcaacacacttatcacgtgttat

SEQ ID NO: 208946 - DNA, 327 bp, Glycine max
agcttaggggcaggtacaagctagtgctttgtctactatctatcaaccatcatcctgcatccggcttaagacaagcgctactaggaggcagcctattacctttaaaatttctgctttttatttattcgcctattcaaatatgcctagtttatttgcaatcctaggaattaaagaaatatacaagcataacaagggtatgtttaaactttttttaaaaaaaacaaaacaaaaattggtcaggttagctcgcctgggcgagcatgtctgcaccagaaagctttaaaaggggaggggtgaagcttcattcaccccataatcctcctcaat

SEQ ID NO: 208947 - DNA, 476 bp, Glycine max
  unsure (1)..(476): unsure at all n locations
taccctgatgaggatgtcttatatgttcttaatactggactgattcattagcttccaaagtttcatggccttgcaggtgaagacccgcacaaacatttgaaggaatttcatattgtctgctccaccatgaaacccccagatgtccaggacgattgtggcgtccctaaattaatgactggtttgatagtaatgatttaaataacaaaaaccatggtaaatttctttttcttctttttctttttcatttctttctcttttcaccataactaggtttagaaggaaaatccccactatagagtcctgaatggccagttcacaactctattcggagtcatttctttcttaccgctcataatctctanactattttgctgtttcagaagggaaaatgtaccagccattactttatgtcgtacgtgaaaataaagaataaatacggccataactctttacaataaagtgtaatgcttctttca

SEQ ID NO: 208948 - DNA, 327 bp, Glycine max
  unsure (1)..(327): unsure at all n locations
tctggaatgattcgcaatatcagaangtgtctttagtttctggngccgngcttagctgaacgatctcaccattcttcctttcttttggactttgcttcctcctgtatccctggttagctattgcgaccctgccctgctgatatctttcgttccctaacattaacattatcttatctcagttataagtctacaaagaaggataattaaattgttatttaagtaaactcacattctagtccctgacattgagtattttcaaccattagattaaaaccaaatcatggacctacatttggtgaaagagtcatggtatttatgtcgcgatat

SEQ ID NO: 208949 - DNA, 435 bp, Glycine max
gaaacatacattcttgactactgaacattctgtcatcaaatgtatgaatcagatcatactgcacgaatgataatactaactctcccacgtgtctgtgtgctcgaactgacattatagcgtattatgatatacacaagaaccgatgatgcacaccaaatgctaccaacaatattcaagttctgataggagaagccagtgtatatccacgaaatattatttggaattgataagacctaattataaaaaccgcctatagagtttagtatatagattggcaagtgtgtaacacagactattcaataagctagagaactcactggtatcacatgtgtcacagatggactgttcaagggatgactttactggattaagaagtatagttggacagacatattttgcgaagactcatgtttatatcccagatgctcctgatga

SEQ ID NO: 208950 - DNA, 494 bp, Glycine max
  unsure (1)..(494): unsure at all n locations
tctgaggcacaactttgaaatgatacttaactcttcatgtaaggatcctcattcgattatatataactaaaaggaactcttcactctcacttgatatatttcttccatttgcgagaggtcatttttgggactaagcttgcagaggtttttcttgctctccttttacctgttgttgcagatttttataaacatggaagagtaagtatgaaatagactgtcctattattttcaagttaattacttcttacatatataccatgtcaatgtacttccactactgcaaaaatgaaatacaacgacggctcttaagcacattcaaagatgattcacaaccatctttgaagccaacatcgtcgaaagtcaagacttttgaagatggttcctataaaacctccttataacaatgtatcattctaagatgattcttagctaanaaccatcttagaaggttactcttctaagacagctatttaactaaaaatgtcttanaatga

SEQ ID NO: 208951 - DNA, 506 bp, Glycine max
  unsure (1)..(506): unsure at all n locations
agtacgcccgagtcattcatccctatgagatgttgttgatgtattggcgatcagaattgccattgcttggattatagggttgaaccaagctcacgcttttacaaaaaggttcatcaagtcaagttgaaatatggaagtaaccgtcttgcaaaattggggcaaaagatgaatcgagtcacatcactgcttcgtctactgccaaacacatttaggattattgatgtccttgttacttccagtttcaccttgacaaagatgtcatggaccatgttgaaaatctaaattgattcaaccccatatcttgcgtaaaaattcgcaatacttcaattgtacatcattcgcatgcatccatgcttttcattggttgcattgctagttgcattctttcctttgaaaataaaataaaatgaacttaatcattggtataaaaaagaaagggacacgctntacgacgcccttaccgaactcgtgctatagctagagtaatgggtgaagtagaggagata

SEQ ID NO: 208952 - DNA, 496 bp, Glycine max
  unsure (1)..(496): unsure at all n locations
catcgttcgcgtgtatgacatccactccactttgttgtagtataggagaccttcaatcctattatgcaacgtggcggacaaaagtgggcagttaaattgaatggtcattattgtcaatgcagaaggtattcagcgtttcactatccatgttcatacttattgcagcttgtggttacgtgagcctgaactactaccaatatatagatgttgtttacacaaatgagcacatcttataagcttactccgcacaatggtggccttttgggaatgaagtggctattcctccttctaatgacgcatggacacttatctctgacccaactacaattcgtgcgaaaggtcggccaaaatcaacaaggataaggaatgagatggattgtgtcaaaccatctgagcaccgacaaaatgtagtagatgtggagccgaagaccataacaggagtcgctgtccaatgcaatctaagcgtgngagatgttcataccattgatttatgtat

SEQ ID NO: 208953 - DNA, 456 bp, Glycine max
  unsure (1)..(456): unsure at all n locations
aatcgncttggagtaaactcttgtgatgatagttcttgatcctgctgctgcggtggaggtgaaggtggttcacctgggtcttcttcctcagtttcttcttgaggtagttgagcgggtataagaacgttcttctccactttttcttcatcccaattccaagaagtatactcatcaactacaacatctcgactgatgacgagtttcttagtttgcaagttgtagacacggtagcccttagagatattgctatacccaaggaagatacctcgtatagtcttgttntcaagcttcgtgcctcttcacgttggaatatgaatgtagcatatagatccaaagacccttatgtgctttgctgatggcttcttcccattccaagcttcaattggagtcttgtcttttacagacttagttggacatctgntgagtatgtaaacagcagtgtagactgcttcacct

SEQ ID NO: 208954 - DNA, 388 bp, Glycine max
agacttgcaccaacttatctgttttcccatgtttcacttaagacacaagcgctaagttatagatctactactccatgaatcttgggaagtgtgacactaccataggggataaggatcataaatctttttaagaaactggtaacaaaagagacaagtttgttctaattggattttaatgtctcttgccatttcacaacctcaaattagcttgtcatgttctcatgtcatcatgcatcatatcattgcattgcatttagtcacctataaaatttcttgggctatgggagggttttttaacatatagcgtgaaattataaagcccagtatttgtctacaaaccatatctttatgttatagccatacctatcttgcacatcttacttttatg

SEQ ID NO: 208955 - DNA, 499 bp, Glycine max
  unsure (1)..(499): unsure at all n locations
tgataacacgcanagactaatgtgctctttttgtctcttcgtcaatcgcggctgacaaacccgttgacacgcggagatttacgtcatcttccgcgctcacaagatctgtcatattgacttttgagtcaagctgacaggcggaaatacccgagtggttatccgtataaactttttgctgtctgtaagatgaaaagcctgatagcacgcagagactaatgtcgtcttctacgcccttcgtcaatcgcggccgacaagcccgttgactcgcggagatttacgtcatcttccgcgctcacaagatctgtcatactgacttttgagtcacgctgacgggcggaaatacccgagtggttatccgtataaaccttttgctgtctgtaagatgaaaagcctgatagcacgcagagactaatgtcgtcttctgcgcccttcgtcaatcgcggccgacaagcccgttgacacgcggagatttacgtcatctttcgcgctcacaagatct

SEQ ID NO: 208956 - DNA, 392 bp, Glycine max
agcttatgacaatttgaattctcgatttcttcgtctttaatttcgagcgggtcgatatattatgcgcccgaatcggattaccttgtgaaaagttttgaatatctaaatttctcgagagcttccgttgttcaatttttggtgtcttgatatattatgcgcctatatctgacatccgagttaaaagttatctccatttgaatttcccgagagcttccgttgttcaatttcgagcgtctctaaatattatgcgcctgaattagacatgcgagctaaaagttatgaccatgtgaatttctcgagagcttccgttgttgaatttcgagcatctctatatattatacccctatatctgaactctgcgtgaatacatatgaccatttagatttctcgag

SEQ ID NO: 208957 - DNA, 313 bp, Glycine max
  unsure (1)..(313): unsure at all n locations
caacggaagctctcgangaaatcttatgtgtcttactcttcactcggatgtccgagtcatgctatatcgagacgctcgacattcaacaatggaagctctcgagaaattcaaatggacttaacttatcactcggatgtgcgattcaggtgcataatatatcgagacgctcgaaatcgagcaacggaagctcttgagtaattcatatggtcataactcttaacccggatgaccgatctaggacatcacatatacagaatctcgaaattgacaacggaagctctcgagagtttcacatggtcataacttttcactc

SEQ ID NO: 208958 - DNA, 416 bp, Glycine max
agcttgtaactaaatttgcaaagctccatatgaattttaaatggagtgatcgattataatatattggtgatcgagtacctgtgcatctaaacattaaaaatcaaattcaattgtgaagagtcctatcttttcattaaaagcatagcgtaatcgattgcgtggttatggtaatcgattaccactgacatgctttgaataaaaggtcaagagatgtaactcttccaatggatttctcccgattatctcaagggcataactctttcaatggttatcttgactagacatgaagagtcttaaaagcaagagctcgacttgcattcatataacttttgaacttctttaaacaacttttgagaaatctagaacctttcctactcatctctcttcttcttctgcctttcccaaaagctatctaa

SEQ ID NO: 208959 - DNA, 503 bp, Glycine max
  unsure (1)..(503): unsure at all n locations
gcttaagtatgcccgagtcattcatccctatgagatgttgtttaagtattggcgatcagaattgccattccttggattatatggttgaaccaagctcatgcttttacaaaaaggttcatcaagccaagttgaaatatggaagtaaccgtcttgcaaaattggggcaaaagatgaatcaagtcacatcactgcttcgtctactgccaaacatatntaggattattgatgtccttgttacttccagtttcaccttgacaaagatgtcatggaccatgttgaaaatctaaattgatttaaccccatatcctgcgtaanaattcgcaatacttcaactgtacatcattcgcatacatctcatgctttcattggttgcattgctcattgcattctctccttganaaatanaataaaataaaataaaatgaacttaatcattgttatcaaaaagataaggacacgccttacggcgcccttaccgaactcgtgctagagctagagtaatg

SEQ ID NO: 208960 - DNA, 354 bp, Glycine max
agctcgtacagaacttaggatatataattactttcttgttcgcacatcgttcgcggtaccatatccactcgacaaggtttgaagtacaagagaccttcaatcctataacgcaacgtggcggacaaatatgggcagtcaacttgaatggccattattgtcaatgcggaaggttttctgcgcttcactatccatgttcacacattatagcagcttgtgggtacgtgagcatgaactactaccaatatatagatgttgatcacaccaatgaacacatcttaaaagcatactccgcacagtggtggcctcttgggaatgaagcggcaacttctatctttaatgaggaatggacactaa

SEQ ID NO: 208961 - DNA, 444 bp, Glycine max
  unsure (1)..(444): unsure at all n locations
ttcatcttgngaactgtgctaacttgatttatctaattacttaactctgtatacgacgtacaatctcagaggaagatttgtttccacttgataatgagattgaaagaacttgtcagaggaacaacaccatatagaataagtgacaactacatgagaggagggttagacagagggctcanaaagcctctccttctcaaccaacatcaccacctttacctcttcccaacctagaggagcctttgctcacgaggaagaagacgaacccagagtaacgattgaggattactcaactcatgcaattccataatacttcacaagtattgctagacccaatgtgcaagcggctggcatttgctattcttattncgtcatccaattgatccaaggcaacctcgtccatagatggcctaatcaggatccatttgctcacctagctacatacat

SEQ ID NO: 208962 - DNA, 399 bp, Glycine max
agctttatgatgaattcccttaattccttatacacaaaaagaaatggtggcccattttgtgagagataatgaaaggaattatttaaattttctcttgaaaatgaaaaaaaatacaccgtgcaatcatgggttggttgttagaaaatcaatttcacgtgttagacacatctcaatctaatcattctctcaaaacacagtgaacaacattttatgtcaaaacacagtgacacaaacattcaaagaatcacagcagagacgtacctcaatcacagtgactgagaccgaatggaaagacacagcttcaatggcagcctcaacggtagtggtaccttcagcgcagcttcaatgacagtggtagcaaaaagaaagaggacaaaggacaaatggcaatgtgtttga

SEQ ID NO: 208963 - DNA, 437 bp, Glycine max
  unsure (1)..(437): unsure at all n locations
ccagtacaacacnggatatgggctctctgatcagtaactaactctcacacgcatgaccatagcggtgaaccatgaagtccattaaacgaatatggctcataatgtcggagagaacctagtnagccgcaagtcgtcctcgccccatgaactgatgagggagcatgcatcacgattatgggtagatacgttgcctacgttctactacgagnaagctgataggatacatgccagctaactttgcagacctcgtcttcgccggagaaagaatcgagtccagactgagaaaaggcaagtttgaatatgcctccaatgttgcccccaacaacaacagaagagccccagtggtgggcacacggaaaaaggaaggagatacccacgcggtcaccaccaccccaacatggatgaaagcaccccagaatgcccaaaactcataccag

SEQ ID NO: 208964 - DNA, 358 bp, Glycine max
  unsure (1)..(358): unsure at all n locations
agcttcggaagatattgatgatgtacacttcctaaaggcagagcttgaaagagcctgngtagtcgaatagatgttcaagtccatatccatcaaagtctgaaaagagtattgatgaactaagggatgtcaatatggccaccgatgaagccttggaatgagaaaccaataatgcccgaaaggaagaacacgaccaaagcaaagttttgaggggctttatagggcaacaatagtgagctcaagctccgaagaggagaaaggaatcatcacgggtcaaaggcttgatcttgaaggacgagctaaaggtttgccttagtctaaaagaaacttgttccaacagttaatcgagactgaagggata

SEQ ID NO: 208965 - DNA, 425 bp, Glycine max
tcttatccaaagcaattcatggtggtgaagcttcttctttcttggcttattccctagtggatggtgcctcccctatcctcttctcctttgccttccgctgcatctccatggtgaaaaatcaccattgaaggacctcatcgaagctcaaagatccagcctccatagaagctccacaagcaagcttccatcaagtggtaatcagagcacaagagcttcaagtaggtgctccttaaacctccattaattgtttttctttaccttctcttccattgttgtttcttcatttttctccatgtatctcctcacatgtcttggtctaaatgttgttaacatgattctttagagtttccaccgattaaacttgctatagaaactagatttgactttctatggttcacattacttgttcttgttcttgaaccatg

SEQ ID NO: 208966 - DNA, 427 bp, Glycine max
  unsure (1)..(427): unsure at all n locations
agcttcttagtatcagatgatgcagatggttttgtagctacctcatgcactcctctaattactatggcatcatttctggcactaaattgctgggagttggaagccatcttctcaattataattctggcttcagcaagagtcatgtctccaagggctccaccactggcagcatctatcatacttctcttcatattactgagtccttcataaaaatattggagaagatactgctctgaaatctgatggtgggggcaactggcacatagttttttaaatctctctcagtactcatacaggctctctccactgagtagtctaatacctgagatatcctttctgatggctgtggtcctggaaacagggaaaattttntctaagaatactctcttaaggtcatcccagctcgtgatggaccttggagcaaggt

SEQ ID NO: 208967 - DNA, 497 bp, Glycine max
  unsure (1)..(497): unsure at all n locations
tgtctcagcgtttatgcgagacggagaccatcttgctatctatcatcgccaagtgccaagaagagttaggtctagccgcggcccacgagcataggattgcggacgaatatgcccaagtatacgcggaaaaagaggctagaggaagggtgatcgactctttacaccaagaggcaaccatgtggatggatcggtttgctcttaccttgaacgggagtcaagaacttccccgattgttagccaaggccaaggcgatggcagacacctactccgcccccgaagagattcatgggcttctcggctattgtcagcatatgatagacttaatggcccacataattagaaatcgttaggaaacttgtatggtctctcagaccttgactagatacgacttcctttttgaaataaaatgagttggtcccatgtttctactccaaaaaccttgtgcaaatcaagtcactcccgcattntatctctagcatgcattgtatgttggtctc

SEQ ID NO: 208968 - DNA, 453 bp, Glycine max
  unsure (1)..(453): unsure at all n locations
tcgacccggatccttaagtcacctgcggcatgcaagctgctgggttcttctattgtactggatctntgagcttcaatgggatcctctaatggtgattttccaccatggagatgccgcggaagacaaaggaaaagaggtgagaggaggcgccatccattaatgaataagccatggaagaaggagcttcaccaccaagatgagccttggataagaagctcggagaggatgcttcactggaggaaaagaaaaagggagagaaagagaggggggagcacgaaattgaaggaagaaaaagggagagaagctgaactttgagttgtgtctcacaagattctcattcatcaaagatacaactagtgttacacatgcttgtatttatagactacgtagctgccttgagaagctttcttgagaaaacttccttgagatgctttcttgagacaactttcttga

SEQ ID NO: 208969 - DNA, 330 bp, Glycine max
aaaagttactatgaggcgaagaagatattgcgcctgatgggtatgaagtttcagaaaattcatgcctgccctaatgattgcatattgagtaaacattcgccccaggtatggggtatcacagtacaaagtaaatgatgatgacgagtgtatcaatgatgaaagcacacagaaatgcccccccaatgaaggtgttatggtatctttctatcactccaaggtctaagggtctgtttgctaatggagatgatgcaaaagaccttacatggcatgcaaatacgagaaactgtgatggaatgctttgccatccgacttattcctcccagaggaaga

SEQ ID NO: 208970 - DNA, 391 bp, Glycine max
agcttcagtggatgagtgaagtcttaagcgttttcttgttttattggttactggaggagaacatggttgaatgtaacattgactatttacatgtcaatataatcataattcatgttaatcaatatatactatttggataattctctaaaagaggatatatctatatataatcataattcatgctaatcaatcaatactatttatctatctatatgtcaacatgtcattatttacaaccaaattgtgattaaggtcaaaacaaattgtaacaacaatctaataagaatgatccaaattacaaccaaaatttactattctaccaaagtaatgctaaacgttgaaaaaaaaatcgtcaaatatatcaagtactcaccttgttcaaagttcaaac

SEQ ID NO: 208971 - DNA, 400 bp, Glycine max
catagtcggtcagtgagaacctgttatgttcctaaacaggcgagctcctggcagacaacagataatatgaacaaagaccacatagcaaggaggcttgtggtagctggccagctgtgaaacttgattgatatgtgagatatggtctctggtaatcgattaccaatggtgggtaatctattacaagggcttacaaatgaagacaaggggctaagatggtctctggtaatctattaccatgggatgtaatcgattaccaggcttgataacggagtcaggaagctaatggagccttctgtaatcgattaccagcctgtggaatatattacacatagggatggggcactgggaatctattaccaggcatgtgtaatcgattacacagtgcattaattgcattatt

SEQ ID NO: 208972 - DNA, 342 bp, Glycine max
ggtccaacgcttggtgagcatgtgtcggtaaacaaccttggtgacatatagccgttccaactgagataattcaagcagggcaaattagctcatttgagtactatgtgagtttaattcttgatgaaagtaatttttaatcagacccttcttatcttttcgttcacatctagattacttagagtcccttttttcttacgaaggattgaaatgataagaatatttaattaaaggattaaaagcaaatcttgtaagagattctaaccaatcagattatgcagcttaaaaaattgcacttatatattctaaatcaactttctggttgacttagagttaaacaattta

SEQ ID NO: 208973 - DNA, 286 bp, Glycine max
atagaacaaaatcactcgcagaaatgtggaacacaataattcttatgtgtggaattgcatacaatcaactataagaacataagaaaaggggacccccaaaaagagagagatcttacttataaacagcttctcgaccatgctcagcaacatattaaatatacaaacggcaatcctctttcctctgacgtttagactataccctgagtatggaatatcagtaagggaagaacggaatcgtatcacaaatcaaatggccaataatgaatactatggccaactgacaaac

SEQ ID NO: 208974 - DNA, 391 bp, Glycine max
tcccgacccaacctcgggcatagtcagtcttttataacatgtgacgtacctaaacaggcgagctcctggcagtcaaccaacaaaagaacaaagtccacaaagcaaggaggcttgtgtggcggctgaccatctatgtatcttgggtctggtaatcgattaccatttgtgggtaatcgattacaaggataaaaaatggagacaggatgttaaaatggcctctggtaatcgattaccaattgtgtgtaatcgattacacaaagtgacagggcattggtaatcgattaccagttaggtgtaatcgattacacagtgtaatttgtagatttccatgtgcaaaggctgagtaattcatgtttgggcactggtaatcgattacatactctggtaatca

SEQ ID NO: 208975 - DNA, 325 bp, Glycine max
ggctgaagcactgagttcgctgtcctaactgcattggaggcggttgccgcggcattatcctctagagatttctagagttttagcatggcctccgcggagaagccatttgatcttttaaggccgatagatccgccttcatctgctctttcacgccctcttcattatccatttgtctggatcgagtgttataggggtgcctttgagctttcttagctaatggtaactccctaaagaaacatacaacggtgagtatgccaccaaaacatgatatgctaatgaatgatcggagcacctggatccaccccaagggtttcaaaaacctgat

SEQ ID NO: 208976 - DNA, 418 bp, Glycine max
  unsure (1)..(418): unsure at all n locations
cacctgcggcatgcaagctngaagcggttngtgactggttgtattcgaatcagtttataagagaanaaaatagaaggaagaggcacgggagaaatagagagagaaatgaaattaggcacagaagaataaagaaaggaagaggcacaagagaaatggacagctgtaaggtcacgtgtcacaacctggagcatgggcacaataagtatttccctagacaactcttttataagacttagtatagacaattttagttgcatcatgatcaataaaatatactcttgataccaagatgccaattactcaaagtaacatgctaaaattaaagccaatttgataggtcatacaagtataacttcaatgtcttcttccacaccagagtatacaaaggctaacttctaggtggttgttaaaatccatt

SEQ ID NO: 208977 - DNA, 444 bp, Glycine max
ccaagctatttatcttctctctcagagaggctctctattcttttagctctctcactccaaggagtggattcactcttgtctcttggatcgactcactctacggtggctcactcaagcttgaggatagagacttcccaagctatttatctactctcttagagaggctctctacttggatggttaggaatgaaggcttctacccttatttatactactccacctccacaatgaatggtggagattacttgtatcttatggtggagattaattctctagaatgctccacacattctatgagtctctacactcttctactccctttcatatccttccataagggtccacgaatgttccacacatctccacaatattctagaagtttcaacattcttccacaagcttctagagagttctacactactctataagtctccggaacgttct

SEQ ID NO: 208978 - DNA, 408 bp, Glycine max
gctgggacgcaagagttagtttggctcctgaagctatttgtttcttgtgaggaagaggctgaaacccctgaggagagtgaggaggtgcaagccttgaaggaggaacttgaaagagtgcaagcagtcaaggaaaagttgaagacgaaaactatcaaggtccgaaaagaatgtgaagaactgagaggcgtcaatgtggccaccaccgaagcattggaacgggaaacaaagaggggccaaaaggaagaatggagccgaaataagtggctgaaagcttggatgcaagagttagcttggctcccgaagattaagacatcaagtgaggaagaggctgaaacccctgaggagagtaaggtggtgcaagccttgaaggaggaacttgaaagagtgcaagtgtcgcaacgtgccctt

SEQ ID NO: 208979 - DNA, 457 bp, Glycine max
  unsure (1)..(457): unsure at all n locations
ctcagctgatggaaaacaccttnttgcaatgaggtgcaagcggcagccagttttctggatgatatctcgcggagtcatattgatcggtggacatcagactgctgggtttggaaaccagaacctaatggccagttttctacaaggagcgcataccgtatgctactagaaggagcagctgatcagactgtggatgaggctttagaggacctatggcagctcaaaatccctttataagcatcaacatttgcttggcgattgatcaaagagagactcccaactaaagggaaattgtggagaagacgggttcagctgaacgatttgatgtgccccttctgcagtagacaagaggaggaagcctcccacctgtttttaactgtccaagaattctccccttatggtgggaatccctagcttggaccaaaactgtgggagtattcttccccattccaaggcacaa

SEQ ID NO: 208980 - DNA, 372 bp, Glycine max
  unsure (1)..(372): unsure at all n locations
agagacacctgcggcatgcaagctttactgctntagtgttgaatgcggtgacatttattagtggttccagcgctacatcatcgtgtgtgggtaaagaagcttggggagagagagcctatccaacttacggtttgggttcttgatgtagttgttaatatgagggtaatgagaaattcccgtgacagaatcccatggtgccaaataaacagattgaaagtatatgacctctttagatgaatatttttataagagatttgatatgcacaagggagggctaaccgtttgtggaactagaaagaaatcattggatggattcagaaggtagctctaacatacacactcaagtgaatgctaaagcttttgccttggacc

SEQ ID NO: 208981 - DNA, 452 bp, Glycine max
actagctgtaagaaactagaaaaataagaacaagcttgttcgcacatcgttctcgtgtatgatatccactccacaaggtttgaagtagaggagaccttcaaccctataacgcaacgtggcggacaaaagtgggcagttaacttgaatggcaatattttcaatgcggaaagtattctacgcttcactatccatgttcacacattattgcagcttgtgggtacctgagcatgaactactaccaatatatagatgttgtttacacgaatgagcacatcttaaaagcatactccgcacagtggtggtctcttgggaatgaagcgacaattcctccttctgatgaggcatggacactaatccctgacccaactacaattcgtgcgaaaggtcggccaaaatcaactatgataaggaatgagatggattggctcgaaccatctgaccaccgacaaaaa

SEQ ID NO: 208982 - DNA, 384 bp, Glycine max
tgaattcggtggtttgccaagaactaaacatagtctcgtagttgagaggaaccaatataaatcttttgtgtcttattctatttattcttgttatgttatttgaactaacttaggttttgaatttgatctttacttttgaaaaactctattaattttacaaaagatctaaaactgtcgtctaatctatcttgagaaaaattgttatttatttttcttaagtgttacttcatcatacgataactttgttattttagagaaaaaaaagttttaaatataataaaaaaacacaatttaaccctatttcttgtaatatttgcctttacaagtagcttagcatgaaaacttcaattcattgagtgttagaaaactctttagaatagacta

SEQ ID NO: 208983 - DNA, 398 bp, Glycine max
  unsure (1)..(398): unsure at all n locations
agctnggagcagtttactgcatgaagaaacaatttatcttttaagtgggtcccaattggattcctaattttcaacttacctttttggaagtgacatcatggcagttaggtcccagctttccatcgcggattcagtcacaaaacaaacttcaatatgttggactgtctaacacggggattttagattctattcccacttggttctgggaaccacactctcaggttttgtatttaaacctctctcataatcatatccatggtgagcttgtgactacaataaaaaatccaatatctatccaaactgttgatctaagcacaaatcacttatgtggtaaattaccctatctttcaaatgatgtgtatgggttaaacctttcgaccaattcattctctgaatcc

SEQ ID NO: 208984 - DNA, 421 bp, Glycine max
  unsure (1)..(421): unsure at all n locations
agtcacctgcggcatgcaagcttgtccacaaaaataggattgtgaaagtttatcatttctgtttcttactaagtaaaatggatcattttcaaggtccaacgccttaaaatgatcacctttcaagtaaaaaagaatcacttgattcacgcataaagaaagaactacgtaggtctgatttcctcatcacaattgaggaatacgtaggagcaaagggaaacacccttgtcgaccacaaaaagagaaaaaaatataaaggatataaggacataaaagggaacataaaaatcaaagtcatgtttgcacattcgattaaaggctgttgtcctttgagacaaacgtgagaggtgctaataccttcctcaagcgtaaatacaactcccgaacttagaattttcctttttgaccggnttccttcggtttt

SEQ ID NO: 208985 - DNA, 422 bp, Glycine max
  unsure (1)..(422): unsure at all n locations
actcatggtcactatgaatgactntttccttgggataaaggtagtgttgccatgtgttcaaagcccgtactaaggcatacaactccttatcataagttgaatagttaagggtaggaccacttaacttttcactaaaataagcaattggatggccttcttgcatcaacacagccccaatcccaacatttgaaacatcacactcaatttcaaaagattttngaaagtttggcaacgcaagtatgggggcattagttagcttttgcataagaacattgaaagcttcttcttgtttctctccccatttgaaaccaacatttttcttgagcacttcattgagaggtgctgccaatgtgctaaaatccttcacaaatcgtctataaaaacttcctaagccatgaaaactcctcaccttggtcacggac

SEQ ID NO: 208986 - DNA, 421 bp, Glycine max
  unsure (1)..(421): unsure at all n locations
agcacctgcggcatgcaagcttcanaccacagcaacacagaatctaggtgtctctttacccctcaattcaatggtttttctaggtttgaaaggtgaaatttagaatgaggtaaatttgaagcaaactctcacctcacacaagtccataacatcaatctaaacttgctcaaactgaatttacacctaaatttccaccgaatcaaaatttgactcctcaacacccaattttcgccctagaattggctcttggttcactttggtcatttgtttttctctctagttcagcctaacctctctcacatgtcctaaatgacatttcaagctagtattaactcactttaacctccatataccacagaattcagacttagccttccaactctcaaagtctcactctttttccactcataacatcacattc

SEQ ID NO: 208987 - DNA, 378 bp, Glycine max
acgccccacactatttccatgacacaaatgcaaaaatgatgatttggaaacttttatgcaaaactggtcatgcatgcacctatgtggacactcaagtgtcaaacttttatggtcatgtgatgctaaggctcaggattcattttctccattttaaatcaacccaatgtttccaaaatatggttctttatcaatttgtgcattcctccaagtccatttcgggcatccggggaaatttcacagcattcacccttcaggtgtagacacgttttttttaaaaactagctatgatcagcgaatttttcttttaaagaaaagatggaaatcatctcttttcaaaagcatgtcgattttttagctagacaacttattttctctttt

SEQ ID NO: 208988 - DNA, 224 bp, Glycine max
acaaccaagaggcaccgcaggagatcaggaccagagacacgaaaacagtcgaccgacccaaccgaagaagcaacagagcgcgcatccgacctgacggaacccacggaaaaggagccacataaaaacacccggccggcccgagcccagaaagaaaggaacgtacccccatccacgtacacgcactcaccacacggaacccaggcaaaaacccgggccccatgccc

SEQ ID NO: 208989 - DNA, 438 bp, Glycine max
tatgcagatggggacctgtgttccacttcgaacctctctcttaatgggacccaatgttttgcatagcttgaagcctctatcagagcatataacgtgatttgcgatccagcatcatcagagagatacacactcaatttttcagttggataatcataagccataacagatagcactgtgttaaacaccatcattgctggctcaatatctggatctgctgtgcacacaaatatgtccactcttggcaactttttctcatatctagtcagaaacacatttttttccaattatgtatcactctggaacttgttcatacgatcatacccatctattacccctaataaatgttacaaggcatgaaagctcaaacagaaaattagacttatattatacaagcctaattatggtttataacaagaaatgtgtcaaaaaatggtaaat

SEQ ID NO: 208990 - DNA, 222 bp, Glycine max
agcttcgagaaagtgtatagaatgaaaatggctatgctatacccgcatgggccatggcgatatagagggccaggcgcacctgaggatcgccggaaaatgtgttttttccatctgggtcggcgtcgaatggcggattcggcggcgcggggggggatgccccctctctctctcctctttcctactgccccatgggtatctcctctgtccgccttctctgtatta

SEQ ID NO: 208991 - DNA, 454 bp, Glycine max
  unsure (1)..(454): unsure at all n locations
ctcaagctcttaanatatgcagatggtgacctgagttccacgttgaacctcttgcattatgggacccaatgttttgcaaagtttgaagcctctaacagagcatagaacgtgatctgcgatccagcatcatcagagagatacacactcaatttttcagttggataatcataagccataacagatagcactgtggtaatcaccatcattgctggctcaatatctggatctggtgtgcacacaaatatgttcactcttggcaactttgtctcatatctggtcagaaacacatttgtttccaattatggatcactctggaactttttcatacgagcatacccatctattacccctaataaatgttaccaggcatgaaagcttagacagaaaatagactaatttattaccagcataatatatgggttataacaagaaatgtgtcaaaagaatggaaaat

SEQ ID NO: 208992 - DNA, 355 bp, Glycine max
tgaagtcgacacttggtgtctagaatctaggtttcaaactagaatgtcgtagcatctagctgcattacagttgactcataacactgatttgggtctgtaatttctcattctaatttatttccctttgaacaaccaagatgtattgtattgatcagggttagtgacttgagaacagtctattttcttattttaagaagcatcagagtttgcatctttcctgattgaatctaaggaaaaggagctttattaagacactggcttggcctgagtccagaaagaaatgatcttactttcatcctctttcattctctcagcatatctattcatgtcaaatcctgtgtcaccattcccacca

SEQ ID NO: 208993 - DNA, 409 bp, Glycine max
  unsure (1)..(409): unsure at all n locations
cacacattccttggggatcntngcttgtgaaggattatacattgtttaatganatctcaagaaccggtggttgcttggtgactgaatgtacgcacacgttgttgccaaaccagataaaattcttgtgtttgtcttcttcttccctacactctttaatttttgctgtgcactttaattattgcttttacttttgggtaaagttgctatttctgctctttactttcttaacgtagtagtaaaaacattattgaatctaataacatttagaaggataagttctttaattagtaaaggttcattaataattaattcaacccccccttcttaattattctgaggccgcttgatccaacataatccacttgccatacatggaggctgtgtggttaatgaagtgaaaaaatgggag

SEQ ID NO: 208994 - DNA, 343 bp, Glycine max
  unsure (1)..(343): unsure at all n locations
ccgaccaacacaggaacgcagagcagccacagccaccccccaccccgaaccccaaaccacggacatacctccaaacaacgggtaggacaaccacacccacaagangcgagaaccgngacgaaaaaaggccagccgagaacaaaagcngacaggtgcacaaacaaacataaccacgacaaccatagcaagagaaggccccgccaacgggaacaaaccaggcaagaccggacgcaccaaaagaagcgaggggccaccgaagcatcccgcggcccaacactcccacgaaaaacacgcaaaccgcccaaaccccagccccggaaaaacacaggggaagaacccaccc

SEQ ID NO: 208995 - DNA, 354 bp, Glycine max
  unsure (1)..(354): unsure at all n locations
ctaatgatggntttataaaaccacctttgatataaatgttacgaaggtggctttataaaaaccaccttcgtttgtaagcctattactaaggtttttaaataccgcctttgtttgtacgcctactactatcgttttttaaaaaccgcctttgcctcatatttataattacttcaatccttgtttttcagactgaaactcatatgcacatgctcctttacatttcactcttgcccttcaccctgccctggcctccgcacatctcactctcgcccttcacccttccatgagctccgcaatctgccacaaccttcattgggacctccgatacttgccgaaatcttcattatggacatt

SEQ ID NO: 208996 - DNA, 413 bp, Glycine max
ctcagcttctctgtatagcccaaccaaagattggaagttgtactctactctgtgtattccacgcgtactgatactaacacacttttttatatttatatatagattaagaaaatagcgaagcacattaagaaattgaacttacttgataacatgtttttgagatggtatataaccaatggctttaatctgagaatctcaccagcaattccagcccatccatcaaccattatgtatgtcataaagaaagtagccttcattggaatggaaactccaatcgttctaaaaacctatagccaataataaaattcacaagaccaatctagtggaaagtaaaatgagtctttaactggagagaaaaaaatccttggacattgaaaagaacagaaagatttccaattcagtgaaaattcata

SEQ ID NO: 208997 - DNA, 411 bp, Glycine max
cacctgcggcagtgcaagcttattgctcttagagggtttaggtttgatatcctttctctggcagaggctgccgactttgctttaccttcaggtgctatgatgaagattgaaccatgttctgcaataagttagttggaaaactttctagcccgacttttctggtagaaattagactagtgagtgtcatgcaaagtctgtaatgataaggagggcgtataagagtagaggggctcttacagcgagaattattaggtggttttcaatcagtatggtccctcctaattttatattatatgacacttaattaaatgttataaattctttctcataaattatataatttgaatacgtgttgtataaatattagttgggatgatggataggtgtagttgagaaccacctaataatttc

SEQ ID NO: 208998 - DNA, 389 bp, Glycine max
tttagtatgacccctaacctttattttaataacttaatgccattaacctagggaattaaaaaaacttaatggctgagtgtaactgaaattgtggcaaccaaaagtcacccccaacagccaacaagtcagccaccatttggtctcccaaaaggctgatgcctaggttgccaattgggcccttattacaacttgaactaaacctaactaaagcccttttagttgattaacccaaaacatatttttggtcagccaactttacaaggattgggccattatttagacaaactaaacactctaaaattgaaacaaagtggtgtcatttagtcctcctccatttgggccatgatacaactcacaaccttggacttttctccttgaaacttgggctt

SEQ ID NO: 208999 - DNA, 439 bp, Glycine max
gctatccttatggcctgcctccggacttcaccctccgtgccactccggattatatattccaagcccctacttttgaggggcaactcccaccttatgaagactatcccggacaagacgatggggaaggagatacccatcttggcttcctgctccacctcaaagatcaatccccgcatgaactaccccagccgaacataggtcgccatatcccggcctcacccacacccgtaaaagaatctgttccctttgcggaagataagggaaagattgaggcgcttgaagagaggttaagagcagtcgagggcctcggtaattacccattctcggatttggcagatttatgtcttgtgcccaacatcgtcatccctcccaagttcaaagtaccagactttggtaagtacaaagggacgacatgtccaaaggggcatctccggatgta

SEQ ID NO: 209000 - DNA, 413 bp, Glycine max
aataactgagctgcagctaatcaaccccttatgcgcaatgcaaaacatacttatattgtttcatacaaccacaaacaagcaaactctaactagatgcaatgaaaacgaaattaaaaaggactgggttgcctcccaacaagcgctaatttaacgtcattagcttgacgcatagttcttcatgggtcagggtcaaacttggttctcacctttagaacctcttcaccaaactccttcacctgcaaacaaacattctggtctagcacttgtttttcttcatcaaatagatcaaaactgatcttttgatcttcaatgcccatttctaactttcgctttcccatgtccaccacacagcttgcggttaacatgaaaggacatcccaaaatcaaggggatctcagcatcttcttcaatgtc

SEQ ID NO: 209001 - DNA, 413 bp, Glycine max
  unsure (1)..(413): unsure at all n locations
ctgagacacgccctagcacttatgctaacaatgatctttttngcgcggtcaaatactttgggagagtttgaaaatcaagcccattgctaataagctcatgcaccattaccagatgaagatgggtgttaaagtcgggtgggcctctttaaatgtgttcaagttggggaaaatgcttcaattgtataactagtcttggaaaaagtgaaggagctccatgtggagctcgtaggccttggatattcttcataatggattcctttgcttctgaagttcaatggcagcgaaagggataagtaaggaagatgactggagatgccacttcaaggagaagatgagtctagaagaagctcaccaccataggtaagccatggatgagagcttgaaaggacgaacaaatgaccggagggatatgg

SEQ ID NO: 209002 - DNA, 400 bp, Glycine max
  unsure (1)..(400): unsure at all n locations
agctntctcccaagtcctaaatgacatttcaagctagtattaactcactttaacctccatttaccacagaattcagacttagccttccaactcttaaagcctcactctttttccactcataacatcacattctcactttctaaccctaagttaactctacccttcacctctaacagttttccataagaaatatcagcatataaacatcacaaacatcatcacaaaaaccctaaatcagaatgggtatgtctaactcatccaaacatggcaatttcaacaagctttcagcaagggtcttcacaaaataatcataccccggcaaaaccttacaagaactcccattatattttccaaaacccccttccccacaaaattaaagggaaaagaaggccaccccaac

SEQ ID NO: 209003 - DNA, 453 bp, Glycine max
ctaagctttatggggctgatcttgagctcaatggggccttaatggtgatttccaccatggagatgcagcggaagataaaggagaagaggtgagaggaggcgccatccactagggaataagccatggaagaaggagtttcaccaccaagagagtgtggaagcaaaacttcatgatgaatcaacaatgattcaaaggtgttttgatgataacaatgatgacaacaaaagatgatgacaaaagtgatgaacaaaaagctcaagtgaatcaaagaacatccatctcaagaatcaagattcaagattcaagttcaagaatcaagaagaattcaagactcaagaagaaagcctacaaacaaagattcaagatctcaagaatcaagatcaagattcaagatctcaagaatcaagatcaagattcaagactcaagattcaagaatgaagaaaagactcaat

SEQ ID NO: 209004 - DNA, 415 bp, Glycine max
agcacctgaggcatgcaagcttagggttcaagtcaatcaatcaaattctcatctttcatgggtgcaagggataaatcattcatgcacaaggtaagctctttggctaagtggctatttcaatcaatcatggccttcatcatcttcaaactcatgcattcattcagtaatcaaagattcatgcgaaaatcggtacccaatgttagtcattctctcacagttaaagatcacacactcaccaggtagtggctaatgattaccttcacaatttacttgtcaaaccaactaacattttcagtcaggctcctaattcatgttctttctcttctaattactgcatactcattcaaagcatatgatctacgcatcacaattcactcaattcatgccattgatcaatccaaatcattcacaaaca

SEQ ID NO: 209005 - DNA, 452 bp, Glycine max
tcctgactcaccatataccttgacccagggtgataattttcttccttaccctcggaagcaaaaaaaaaaagataggaaaaatgagaaggaaaatttccaatcaaaggagaaaggaaaggaaattcccaatcaaagagtgggagaaagcaaaaagaaaagaaagaaaattcccaattaaagaatgggagaaagaaaaaaagagagaaagtaataagaagaaagctcctggtcagagaaaccataagaaatgtgccgagaggtccttggaccagacaatatctgaacaatacagaattgtcaccaaatgaataaaaaagaaggaaaggaaaccacgacctaaaatggtcttccccctttaattgccaaccaaaatcttgtgcgccctgcactaaacaaaaacagaaaaggaaaaagccaacctaaaatcaaaagccataaacacacaatagcaa

SEQ ID NO: 209006 - DNA, 414 bp, Glycine max
agcacctgcggcatgcaagcttggatagttaccaattgtgtgggcatatactcttttatcttgaataacacaattcaagagagctttagacttatttttatttacaaatccagccacaacttagcaccactactcaacttcatcataggcatcatgtaggaaacttataaaagaaaaaaaagttcaacaacaagactacttctaggaattgatttagaacatgttataaactaaaaaacatgcatgaattagactcaaaattcaaaagataggctaagaatgacaagaatacatgaacaaatgtatctagaattcaatcaacaaaataaaaattcaacacaaacttagaacataatgtgacaattattttgactaatcatgactctaagacaacatggattaagtgatttacac

SEQ ID NO: 209007 - DNA, 435 bp, Glycine max
gctgatttggttaatatgattatcatgattaggacttgtatgatctctatttgagcaaaattggatgtgggcaagatggatttcgaaatcttccctattatgcagaaaattgttgttgaattgtgcaacagaatttttgttcatgtgcagaaaatgtttgtgcattgctggttatgggaaaggtagtacatattgggttctagacatttcctagcagatcccaacggtcaaaatgtagatttatgtactatgaacctccagtaaaattttcaagttgatccaatggttaacgaatcggaacgaagagaatgttactggggtatttgagtaaggaaagatgtaatatgtgaatgtgttttgggcagaagtttctgcctctgccttgttttcttggtttagggtagttcatgataattggaattgattgctgggata

SEQ ID NO: 209008 - DNA, 352 bp, Glycine max
ctttaacgtccattcaccacggaattcggacttagccgtccaactttgaaagccatagtctttgtgaagtcataacatgacatggtgattttgtaacgctaaggtgacgttaccgtgggcgattagcagtttatcataagaagtattagcatataaacttgacaaacatcaggacaaaaaccctaaatgagaatgggtatgtataacatgtccaaacaggggaatttaaagaagctttgagcaagtgttttcacaaataatacttagacagcagaaatctggcgggactaccgattatatctgcgaaaaccccatgcccacgaaaataagggagaaagaagtccacccaaac

SEQ ID NO: 209009 - DNA, 342 bp, Glycine max
  unsure (1)..(342): unsure at all n locations
aatggtaagatcagaacagaactntaattttagccgactatattacttccaccaaggtttttaattgggtgtgtgcatgagggattacttaagtacagtattctttctttaaaaaaaaaaaggtgtagatttcttgttaaaagaatgctggcttttgttctttttatccaccaattaacaagtacacgttctcctcctctttgcctatcttaaattatcatttacattttcatgcgtgtatttatttgatatgtgaccccatgtgcaagtgcctggtatagtccaaaataaggtctaccaacctttgattcggaagctaagctttctattttgagaatctct

SEQ ID NO: 209010 - DNA, 368 bp, Glycine max
  unsure (1)..(368): unsure at all n locations
agtcacctgcggcatgcaagctntctgaagttntctggttttccaaaccttgtatttttgtgctattcatcctttcattctcttctccctttgccaaaaagaattcgccaaggactaaccgcctgaattctttttgtgtctctcttctcccttttccaaaagaacgaaggactgatcgcctgaattcttttgtgtctcccttctcccttgtcaaagaattcaaaacgacacagtttgagaattcttttgattcttccctttccctaatacaaaattgttcaaaggactaaccgcctgagaattcttttgtatccccattcataaagtatcaaaggtttaacagcctgagatctttgttttaacacatt

SEQ ID NO: 209011 - DNA, 446 bp, Glycine max
  unsure (1)..(446): unsure at all n locations
agctgagaggatgcttaatggaggataagatagagagaaggtgtgtatctctattattgaaggaataaaagagggagagaagtggaactttgaagtatgtctcacaagactctcattcatcaaagttacaacaagtgttacacatgcttctatttatagactaggtagccttcttaagaagcttttttgagaaaacttncttgagaagcttctttgagaaaacttccttgagaagctagagcttatcttcacagcacccctctcataactaagctcaccttcttgagaaaattccttaagaagattcctaaagaagctagagcttagctacacatacctctttaatagctaagctcacctccttgaatgagaagctagaacttactccccccccccatatagttaactcaccccctgcataaacttgaaattcaaaaaaagtcttc

SEQ ID NO: 209012 - DNA, 394 bp, Glycine max
  unsure (1)..(394): unsure at all n locations
caagcaccgcagctgcagctganacttatgctacgtgtgnaacagttttgttttctactatcctataagaatggcactatatggatttacattctctgaagttattttttatatagcaaataaaaataaatttgaaaaagaagataatctatctcccaagaaatattagagactataaaattaaaattaaatataagaaaagatgaattagctatacagaaaataaaggaggacgaagataaaagaagaatggcaaaaaaaaaaacgataattagtttatgatatttagttacttttaaatcgttccgtcaatattaaacatgtcataagagatattcagttacacgttggcaatcgtggtgctcatcggataatcaccattctaagagtttat

SEQ ID NO: 209013 - DNA, 451 bp, Glycine max
ccccacttcaaacattcgctaaaaaagcattatgatacacatatcttatttttgtagtataatacaataaagcgaactaacatgtctggaacatcatgcaattaaaacagaaactcatgcctcaatgtcacatcctaccaaagcattatgtccccgcgtccttcagcacgaggttacttaaagcaatccacctagccatctactctcacaaacataaagtttaagatcatgataggatctaaacacaaacaacacacatggagtgagtcatcatattcctcaacgaatagagataaacgaaagcatacatgtatgatataaatataacaacaatataattattacaacaatacaggtataataaggctcaactctggcataatttgcatcattttaacattcaacacgtaacatcactcgccctataatttaatcacaaaatacatgtcac

SEQ ID NO: 209014 - DNA, 355 bp, Glycine max
ctgttttagggttcttgtgatgatgtttgtgatgtttatatgctgaaattgcttatggaaaactgttagagatgaatggtagagtcaacctagggttagaaagtgagaatgtgatgttatgagtggaaaaagagtgaggctttgagagttggaaggttaagtctgaattctgtggtaaatgggggttaaagtgagttaatactagcttgaaatgtcatttaggacttgcgagaaagcttggactgtgctagagagaagaacaaatgatcaaaatgaacaaagagctatttctagggcaaaattgggtgttgaggagtcaaattttgattcggtggaattttaggtgtaaattcac

SEQ ID NO: 209015 - DNA, 445 bp, Glycine max
  unsure (1)..(445): unsure at all n locations
atgagctgcgtntagcggcactaagctgtgcataaatntcactatagtatgggagcttagtgagtgaagctcgcttatctcagcggatgccgcagccaattgcgcttggcttaagaatgctcagcttagcacgtggctatcaccaaaaaaatggttaagttacctgtgcttagcgattcagcctcgcttggcataagtagttcagcagaggatgaaatgtcatcctcaaaggatgaactcgcttagcgcagtaagtgcgcttggcgagttcttcataaaaagcttatatacaatgagtattgatgaactcgcttagcgcagccttcttgcttagcgagttcatcgcatttttccagaaaatgtagaaaacacagcttcgttttctcgcacttttcaagccttttaaaggcatatcagacatgcaatgtgtgtgcnatactcaatt

SEQ ID NO: 209016 - DNA, 339 bp, Glycine max
  unsure (1)..(339): unsure at all n locations
aggaatctagttntaggaatgaaattaggtttttacatagcatatattccatgttcatactttaatttctaggttacgttttcctaagggattagtaatctaatttagggattaaggatcaattacctaaggattaggatttgatcatttgagttgagtcttggttgaattgaaactaagaatatgatcggaaattgaatcacatatgatgaattctatggaatttgagtttagcaacactttttccattgattttcactcgcaaactctattaaaaatttgacaaacatctgatatttgggccgtaataaagcgataacccgttctaggaaaattgct

SEQ ID NO: 209017 - DNA, 397 bp, Glycine max
  unsure (1)..(397): unsure at all n locations
tatggatgagaggaagtgtgattntcgaaatctgcacttatgcagaatcttgctgtcaaaataggtacagcagaattttggcttgtgcagataaatgcttgcgtgtggtatggtgtggaaagagtagtacagaatgagttctggacattngctattaaatcccaacggtcaaaatgtatgcttatgtactatatactttcagtaaaattttggagtcgattcaacggttaacgaattggatcgatagaattgttactggggtctttaagtgagaaaagctgtgattctggttggggtttgaacagagttttctgcttttgtctgttttgcttggctgtgaaagcttgagctgtttgaatgttggtttgcttggatgttgtggaagcttgggaagatt

SEQ ID NO: 209018 - DNA, 389 bp, Glycine max
tgtttggcatagccccacctgacgccttttgtctcctgacccccgcgacatatctccaggtaccactctgtggtcaacaataaaagcaggaagtttcacccttcaacacttcctcatctcaagcttgtaggattatggggtacccatcacatgtggtactaggtggcggttgggcgatggtgcacaacaagttttccacatccacaatgcgcgcataaacccaccatcccctgtagcccacctccaactgagctcacgtactcccacgtagcccatatcctcgtttctctgaacaccgggtccccatcaatcctcccaagcttccccaacatcaaagtaatacaacattcaaacagcacaaactatcacagccaagaaaacagagcaaa

SEQ ID NO: 209019 - DNA, 413 bp, Glycine max
  unsure (1)..(413): unsure at all n locations
tagttttacaagataatgcttatcttaacacanaaatgacatgctaatccctccgatttagaatgaactcatgcacactcttaaggtaaaatatttatgcacatgcgtatgtgtagaatatcctactatttatgtcaacgtacaaggacatccaacacattctaattgccatacatatatatatgcattttgaaaagaacacacattctcatgctcaaggcattgagtcaaaatttacacctaatcacatcctaaacatttgctatcacaaactacctatacatatttgaaacatatatcatacaaacttttattgtttcactcacatttatttatatgcatgttggaaagctaattacggcatgcacacacttgcattcaaaagggaattccatgccagcatacattcattt

SEQ ID NO: 209020 - DNA, 397 bp, Glycine max
gaatttgactacattatcaaatataccatttttctctttatatattataattcattggccatcacctatggatttttttaatgtacttcggcaaacttaatttagaaaacgtaattttaaaaaaattattttgtttaaaagtgaatttaaagataaatgtgtaacttctacagtccaaaacccactaaaagacaaaattcaccattcataagaaatattaatattttgtgtagggcattttttattttgccattttatttgaaatgggctattttttgggccaattgtaagcggataaattatgtttttagttatcaaattttttaaaaaatatatttttaatccttaaatttttatttgaccattcttaatttataaatgatctgttttattttta

SEQ ID NO: 209021 - DNA, 421 bp, Glycine max
  unsure (1)..(421): unsure at all n locations
gcaagagacacgtgcacgcatgcaagctngagatgaggatgtgttgaagggtgaaacttcctgcttttattgttgaccacagagtggtacctggagatatgtcgcgggggtcaggataccttggggacgtcaggtggggtgctattgcccaaaaccaagcttgaccaatcccgacccaacccgggcatagtcggtcagtgagaacctgtgatgtacctaagcaggcgagctcctggcagtcaacagataaaaggaaaacaagaccacaaagcaaggaggcttgtggtggctggccagctgtgaattttgtgtaatatgtggattgtggcctctggtaatcgattaccaaaggtgagtaatcgattacaaggcttaaaaattgaggacaggaggctaagatggtctctggtaatcgattacc

SEQ ID NO: 209022 - DNA, 413 bp, Glycine max
cacctgcggcatgcaagcttcaattgaattctgctaagtgcaccttcggtgatagttaagcaaactgttgggtctcaaagtcagtgagaaagacatagaggttgatcctgataaagtgcaagcaatcttggagatgccaacccctagtatagaaaagaaagttcatgggttcttgggaaggttgaaatacattgttaggttcatatcccatttaactgctacttggtttgctcgtaggctcaagcaatatatgttgtctcacaccacttggtctccaaaatggattcaatcaagtatatattcgagaagcctactttcaccggtcaaattgattgctgccaaatgttactattagagtatggtattgtttacgtcacccaaaaagttgtaaaaggtagcaacctagcagaata

SEQ ID NO: 209023 - DNA, 432 bp, Glycine max
tggctataagaccactgaccaatatctccttaattaaatgtcgatcaatctctatgtgctctgttcgatcatgttgagatggattgtgtgcaatgctgatggtggacttattatcacaaaccaatcccataggagcttcatattttattttgaggtcatcaactatgatcttcatccataacaactcacaaacaccttgagccatagctctgaattctgcttctgcacttgatcttgcaaccacattttgctttttactcctccgcgtttctaaatttccacccaagaacatgcagtatcctgtagtagatctcctatcaacaattgatcttgcatagtcagcatcagaatatactttcatggataattttttctcctttttaaacaacaacccctttcctggagaaacttaagtactgaatgatcctattt

SEQ ID NO: 209024 - DNA, 400 bp, Glycine max
  unsure (1)..(400): unsure at all n locations
agcttgagctgactctatctaggatcattngtattattgtgtatattggcaacttggcataataatatggatggaattatgttctgggtgatggccatgccaaatgtttgcccaccttttatccgtaaaattttgttatcttttattctatcgcatgagtacatggaaatttatagaagttcgttggttcagtccttttattaaattttattttgctactcttgaacaaaatatatgtcattatcactttggtacaagatagccaaaagatcctaccttgaattggattggaaaggcagagggaactcttaagttgtgtaataatatggacagtatgttctttcctaaaatataaaaatatatccatacatattgttcgtgcataactgcatataacata

SEQ ID NO: 209025 - DNA, 401 bp, Glycine max
tgcaagcttcagatgcaagctcaaaggagaatgataatcgtttataaacaacaaacacttgaaaatgaaaacctataaatactagatgctttgaagaaatgagtaacgaacctacacgctatcattcaaattctttatgtagaaaactctttgtatattcttataaagtttgaaaagctctcaaaacatcttgaatactctaagacaaaaaactaaatgcttagatttcacatttgtttgtaagatgattaagatttaatcagttagcaaatcaaacaacatatcttcttatttgtatagaaccaacagtggcttggtaggacaaagaatattcggttgttaaagcttggcgataaactttgttgtgagagctaaaagtaacagtgacaaatacttgtaac

SEQ ID NO: 209026 - DNA, 438 bp, Glycine max
  unsure (1)..(438): unsure at all n locations
ctgactggtagatgttcaagacttctgtcattatcgtctggataatcagccgnggcccgaaactagcagtgtgacaggaatcaagcagacatgctgaaaccattgatgcaattacaaggtatttggatatgggtacgtacagtgaatgggatgaagaaaagaaactggacttcttaactatagagttgaaagggaagagaccacctggtccttccagtatagaggtgaagatcgttatacatagcaaaagctttacaagctctatatccagtaggatgggaaaacttttcattttaagaaaaggacagaagttgatatttatattatcttgagcttcttttcatttttcaatattattgattgaagtttgaaagttattttgcttactttaatctacaacttgactggtacattacctatacttgcttttggtctttt

SEQ ID NO: 209027 - DNA, 423 bp, Glycine max
ctcagagtcacctgcggccatgcaagcttctttggaccttgaacaagcaattaactcctctttcataaccatgctatgtgctcgcgactggtctctttcttcccttcgcaacttgagttcactattgctaccccatagagctccgcgaaatttgttccggccatactcttccttgcgagccttcttggtctcttgttcaagggctcttgcagtaattgcattctcttcccgtaacccggcacactccttccgatcgtgtgtagcggccaacttgaacttctccttggcaagttttgcctttcctaactctcttttgagagtttggacttcttcgtcctcttccggtgcttcaaaactctcttcgctgacgacttttaactcggcgagccaatctaaacctcgtatatgaactttcatccattc

SEQ ID NO: 209028 - DNA, 394 bp, Glycine max
  unsure (1)..(394): unsure at all n locations
tacttcgggcatgtattatagagcaacaaggtagctggatggattgtttgccattgattgagtttacttacaacaatagctatcaagccagcattggtatggctccttttgaagctttatatggacgaaagtgcaaaactcctatttgttggtatgatgatggagaagcggtacttcttggacctgaaatgctacaacggattaacgaacaagtgatgttgattcaagagtagataaaagcatctcaggataggcagaagagctattatgatagaaggaggaagccactagattttcaagaaggagaacatgtgttgttgaaggtttctcccgtaaccggngtcggaagagctctcaaggctaggaagttgacacccaagtatctatgtccgta

SEQ ID NO: 209029 - DNA, 347 bp, Glycine max
accgcggataacccttaaaggcgtcgatagctacatttatgggaacctttccatgcagcatatattattgatccctccatgctctattgagacattcttagtcaatggcaagtgggtacatattagtttgagtattatgaacataacccgtagtcgtgctttttggtgagatcatgagcttcactttcatatgagactttggtgcggtgaaagtccaaattggaggcgttgaaatatattactatgatatcttgaactatccgtgggtccataagggtgacgaacatataaatggtgaatttatgatcctgcctcctccttttggtgttgaatgggtgaatctgatt

SEQ ID NO: 209030 - DNA, 400 bp, Glycine max
atagacacttgttttctatgaccattaatatgcatttaatcaaatcaagtccaattggagtctcatcctctaaaactaatgattgcaaagaaatgttcactcatctcacttcactcaagttttttaggataaaatccttttcactcagcttctcaatgcaaagtgtcttactatagtgaggggggagcgggattgaggaatgtcccttgaggaaaggcatctgaatattgcgttaagaaccaagcatacatttgttgaacaaggctttcatggtgttgttgtcgatgttgcattacctcgagtatctgctagatatgagagtatgactcttggtccttatgcatctcaataagagtatcaagaatggttgcaacatcaacctatgatagggcagtgaatg

SEQ ID NO: 209031 - DNA, 398 bp, Glycine max
cttgagtcacctgcggcatgcaagctaaacattcaatttcgagtgtctcgatatattactttcctcaatcagacatccgagtaaaaagttattgttgttggaattggctcaaagcttaaacattcaacttcgagcgtctcgatatattacgggcctcaatcagacatccgaataaaaagatattgtcgtttgaattggctcagagcttcaacattcaatttcgagcgtttcgatatattacgggcctcaatcagacatccgagtaaaaagttattgtcgtttgaattggctcagagcttcaacattcaattttgagcgtctcgatatatgacaggactcaatcagacatccgaggaaaaagttattgtcctttgaattggctcaaagcttcaacattc

SEQ ID NO: 209032 - DNA, 405 bp, Glycine max
  unsure (1)..(405): unsure at all n locations
ctcagcttgagccattctacgacatatcttntactcggatgtcttatttgttgtccgtaatatatagagaagctcgaaattgaatgttgaacctctgagccaattcaaacgacaataacgttttactcggatgtctgattgaggcccgtaatatatcgagacgctcaaaattgaatgttgaagctctgagccaattcaaacgacaataacttcttactcggaattctgattgactatcgtcacatatcgagacgctcgaaattgaatgttgaatctctgagccaattcaaacgacaataactttttactaggatgtctgattgagtcccgccatatatcgagacgcttaaaattgaatggtgaagctctgatcaaattcaaacgacaataactttttactcggat

SEQ ID NO: 209033 - DNA, 329 bp, Glycine max
tacctagacataattaagctatccttgagcggacgatgacagtcaaaaggctgacctactacatagcacacacaatcactgacacttgacaaagtgcatcataatctgacatgtcaaaggaaaagtgatgctgcaccatgaaaatatggtgacaagatagggggacaccaacgaaatgtggtgatcaaccttatcacacacagagacaagacaggtactacaccaatgaatgatgacccctaacaccctaaagagggaggcgaccaccctcggttgccaaggagcacccactataaatagagggaagagtgtgactcttttcctcaagt

SEQ ID NO: 209034 - DNA, 343 bp, Glycine max
aaaaatacagaaatattgcggaccaaccaaccaaggctcgcgcgctgatgctgcaacagaacaagaattattattattttccaaaaccttaaaaagatgtagcactcgcgcgtgtataacataattgccacttttgaagaacaactaggagactgcgtcgttcaacacctcatttcacacaaaatgatcaagggctcgcaagatatggaccaactaactgtacgcaacacttatatatgttaaaaccctagcctgatgtcttctttataaagagaacgataagaaaaacaatgatagtatgtatttggaaacacataaacatctgcttatatgagcaacgacc

SEQ ID NO: 209035 - DNA, 314 bp, Glycine max
gaacatgataatcagatgcacctcattttcttacatgagatataatcttatttatacttgagccaatttcaaccattataaaaaataaaactctgttgataaatgcttaacacatacacactgtatattattaaatgtttaacacatacgcatattatatatctattggctagaaaaatgcaaaagttgaatttaaaattattaattaaagtaaaataatcctatcttagtggatcatcaatagatcgatgtatatgtacctactttgaataatggaaagtgttgaaaactattggtccatttattgtgttaga

SEQ ID NO: 209036 - DNA, 384 bp, Glycine max
gagaacaatattgtgtcatgtatccactattaatgaaagaagatacataaagtgatcagaacgagaataaagcagcaggcaaaacaagagtgtccaaatatagaagtagatatgtataggaccacattattaaaaagagacacaacgtataatctagtagagagattgattataaatcattctagatggcccaagttgtggctgtggccaacatccgaaaacaaataatttgagaatatataactctgatatccgatttgttcggataaaaatgaatggaatgaggtttatgtcttaccttgttttacctatcaatcaatataacttgtcacctaagcttccctatataaatatggtatccattgtagaaaactaaattgataa

SEQ ID NO: 209037 - DNA, 310 bp, Glycine max
  unsure (1)..(310): unsure at all n locations
ctcgcgagcatcactctnaaatcctaatgtcttgagctcgtcttccccacagccaataacctctggctggcccttgctcctggatagaaggagctgaaatcggggtccattgagagggctctatggtacaaaggatcgaccagccaatagggtgcactgcaagcgctcagggcatgtgattaagtggtcattggtgaggccacaagcttgcatgaatgaatgaaccactgctggaccaacgtacctaaagccccccctcaccatgccattgctacatgcccccagactntgacgcctacactgaaacctt

SEQ ID NO: 209038 - DNA, 418 bp, Glycine max
  unsure (1)..(418): unsure at all n locations
tttggagctttggtattgttttgggaataagtgtgggggagttttgtttcactggataacatgtnttgttggctatgattcatgatgtattntgggccatacttgatgtacattttatattggttaaatgttggacatgctaaatgagatgctatttctcaaaggctacagagcataaaaaaaaaatcgaaagataaaaaaaagcaataaagttgagtgaataagatcttaaatggcaaaagaatgattagactcttggttctattctttatgtttaaagtttatctttagttctttttattcttttttcatttttttcttaatatgcacttattccccattgctcctttattcctttgggatttagccacttattccatatttttccataccttgtccttcgccccattacaacctt

SEQ ID NO: 209039 - DNA, 350 bp, Glycine max
  unsure (1)..(350): unsure at all n locations
atggggttgtatactaactctcattaatncagncttaacagcctcacccatgtatttgctctccttcttcaagaggcctaaacatgtggcgcaaaagattacatctattcaaaggaatcctttatggggaagtcaccaagactccatcaagactcctggggtgaggagggacacaatttgcctacctaagaggaaaggggggttagggatcaaagattggactaaatttaatgaggctttgcttgccaaaggggagtgggagccggcaaataatcagaatcaatcctggaccacaattctatcggccaaatatgggggatggaaggaactgattcctggtaggaactgca

SEQ ID NO: 209040 - DNA, 407 bp, Glycine max
agcaccgcggcatgcagcttataggcggtctgggagacaagtattttgttgcgatatgtgaagatgatgttccaagtacttcggatttggtccgaccatgccctcctgatttccagctgggaaattggcgagtggaggaacgccccggcatttacgcaacgagcataatgtaaacctttagggttctaaaagctctataggtgggcccaaggctttaaaagttttcaattttggtaaaggcttttggggtctttggtttttggaaattaataatacaacggaatctttcttcaatctggttcctggacctctagcccaattctcattcatttgcatagttgaacttctttttcctgacaacgggcagacttcgatgagcgaagtcccccggaaggtactatatacct

SEQ ID NO: 209041 - DNA, 379 bp, Glycine max
actctctgcactattatacttgctttgtcatacacagattctgcggatctttcatcgatgatgatcatggaaggcttaacaattaatcaatccaaggatccactccaaggaaggctgatattgagttctgatttacgacttctaatttgtgcgaataggcatctttttcttccatacctcttttcgattttcatgattactaatatgctcaagattgaacaagaattaggttatggattcctttccaaattacgaacttaatcacaaatcggttggatgatactccaacctaatttgtgatctcaatgaatttagggattaattcgattgaattaactctgacgacttcgtatggacattcaccacctgatcattctcc

SEQ ID NO: 209042 - DNA, 398 bp, Glycine max
ctgcagctagtaatagatcctaatatcttattttgaactttgttggttattgattaataatttccacttattagctttctaactttagcacatctaaatcatgaaaccaaactttgatcttgaagtggaggcatgagcaaaagatgaatctaaggtagtaaggttgcttccaatgtatctattcaagaaacctctacatgtccatgtagtggaagcctcactaacatttccaatgtcacaaatccaataggaactcatcatcctaattcagaagctatttcacttgactcagctctcaactccaacaatagtgagccaagggaaagagattcaatatgattctcaatctcaagcactggtgatagcaacaatgaatctgcctctcaaactacaacagc

SEQ ID NO: 209043 - DNA, 404 bp, Glycine max
tatgttgtctctacatatataaaacagtcccaccatcccaatttcgcaaaatcatattcatatatcattggggcatttcaccgagcacttggggggcgcacgtttggacacaaattgcaagagaatggggacaatatggcatgcccaattgcttcagaatacaacataggcctaatgccttctcacacaaaccctcaactcaacaaaacaagcatgaattcagatgcgaattgcttcacgaattttgcaaaaaatgagcaactaaagcaccaaaacacatgaatggagagccaaataaccaagggaaattgcacttacttgtggggagtgaattaaagcgtgaaaagggaagcaaaaactcaacaatggaagcttgggggctgctgttctcgtagttcccgtga

SEQ ID NO: 209044 - DNA, 419 bp, Glycine max
gtcacctgcggcatgcaagcttgcccagagaaggagtccacggaggaaatgcttttctccctcaaaagactggaaagcgatttctaatgactcctctgcggcttccacataaggcatagaggatgggcagctcaccaagatgtcttcctcgcctgatacgatgaccagatgcccttccactacgaatttcaacttttggtggagtgttgagggaacaactcctactgagtggatccacgggcgccccaacagacagctgtagggggggttaatatccattatttggaaggtaacttgacaggtgtgagggcctatctgtactgggagatcgatctctcccctaacctctcggcgggtgccgtcgaaggcacgaaccaccattgaactcggctttaagtgggaagcattgaatggtaatt

SEQ ID NO: 209045 - DNA, 402 bp, Glycine max
  unsure (1)..(402): unsure at all n locations
aaagaggagacagtttttgggagaggagaataattgtaggttttgcaattctagttnttattgttgttcatgcgcactgttcacgtagaataaaattcattttctgcaattttgtttctacttcaatctgcaatttcactttctgcttccaattgcaatttcgttttctgctgattaatggaaggctaagtctccagcattgttttctcttgaggatcaagcacaacactctttgaggttttgttattactattgaattctgatcagtttttcctcttcaccaattactttgtatttgttgctattaatccatgcatgcttagtgcttgattaattgtctctgcgcttaatttacgttcatgcttaatgatcattttcgnntcatgaataatggtgtatgtg

SEQ ID NO: 209046 - DNA, 417 bp, Glycine max
cacctgaggcatgcaagcttcatccaactcaagcatggaaagaagacagtttattcttacaccaaagatttctgaaagcttttcacccttattgatgattgaaaaaatcttttaatggaagtcaggagaatgaaggccccccagaaccattaactggaaaccaagttcatgatcgggtaaaggacaattgtaaccgtgtttgggaagtcatagaagaagacatcatctcccaacaacatgtggaagagacgctcaatattctttgatcttccatactggtctgatctacatgtgcatcattgtctagatgttatgcatgtggagaaaaatgtgtgtgatagtttaattggtactcttcttaacattaaaggggtgacaaaggatggtttgaaatgtcgtcaagacttggttgacatg

SEQ ID NO: 209047 - DNA, 419 bp, Glycine max
  unsure (1)..(419): unsure at all n locations
tgacttagatgatgacaaaaggcccaaagaatgatntcaagattgagtcaacaagttcaagatcaagtttaatttcaagtttcatgagaagaaatcaagaagattcaagaatcaagagaagtttgatttcaagattcaagagaagatgaattctagattgaaaaggagaaatcaagaagacttcacaagggaagtattgaaaagatttttcaaaaaacacacatagcacaattttgttctttcaaaagagtttttctcaaaattttctaagttaccagagtttttactctctggtaatcgattaccagtgttctataatcgattaccagtggcaaagtttgatttcaaaagttttcaacttaaattgcaccgttccaattgatttccaaatggcgtaatcaattacaagatattggtta

SEQ ID NO: 209048 - DNA, 418 bp, Glycine max
ctgcggcatgcaagcttgcattgcgggaatatacacccaaattatgattttctttattcctattctttttactacactttttttcttgtttcactgattgatggacaaacaagttaaaaaagtcagagttaaggaatcagaatgtgcgaacaagaatatcataagccacaaaaattaaatcctaaaaatgatagaaaatatcttttaaataaacaatgagcatataagagaaagaagaaaatgatcctttgacaagtgttttgtgatgaatattaagttcagactttataggcagtgccttgttcattgacaccaattccattgccttcttcaatttttatattcctttgaaatattgtactttacataattcatttttaaaattattatattattaattttatttttctgaacttgg

SEQ ID NO: 209049 - DNA, 461 bp, Glycine max
ctcagctctgagtcacctgatgccgattcttgtataaacaatgtctatttcgggtgagtcaaaagaaggaagagttatttatacaaaaccatgcaaagacaaatatgaacttattatgctaactgtcattctaatcaatacaactgtcaccacaacgaacacaacatatgtgaactttgaaggcttaacatcattaaatcaacacaacacctcacattcaggtcatacctactcaattaaatcacaagttcatcaccagcaatgatcatattcatatcagataaaacaaagcaacaaaaaaactttttatcaaatataattgattatcaattaatttaacatatgttcatatctaaactgatttgtattttaatcaatattttcagggtaatatccttacaattttatctcccgttgttttatttcctattgcagaagcatttcttagttttactctttgg

SEQ ID NO: 209050 - DNA, 390 bp, Glycine max
agcaccgcggctgcagctaaataagatatatcatttacaatctttgttgtgggatcaaatatgtttcttacttctggctaaataagtagagcatggtttgttccctataaaaggcatttaataacaacaggtgtgtatggccaaaggaggttgtaaaagaatgatagattctataattaggggtaatgacaaccccaccctctatacataattggattgattgatgggtttgattgcggtcacaaatattttcagaccctatttacacatatgataaaatatttgtctaaaagtgtgcttgtttaggttcggtcactattcgactatctaactatcaatattattatttcatcccaactgtggagatattcagctatctcattcggcttt

SEQ ID NO: 209051 - DNA, 388 bp, Glycine max
  unsure (1)..(388): unsure at all n locations
ctcagcttatacaataatatagaacctatatcctaatgtcacatcctatcatagcgttgtgtcccgatgtccttcagcacatggttccttanagcaattcacctagtcatctgctcccccgaacacaaagttcaagatcatcacaggattcaaacacaaacaacacacggggagtgaattatcatattcctaactaatagagaaacaaggcaactagatatacatatcatataaaccaaataaaacttagttacacgtaattcacgtaattccaccactttgtaattcaaagttcacttttcaatcatcaatcacattacacaagaatcacacgctctgatcaagacataataacacatcaatgtcataataaacaattagcaagcgc

SEQ ID NO: 209052 - DNA, 369 bp, Glycine max
gagcaccgcggctgcagcttatgaattggtcaggagggccattgtgtttattgacaacaaagatgaagacaaaaagtccatgagagcgagttcaagattgaatcaagaacacttcaaggatcaagagagagtgaattcaagattgaatcaagaccacttcaagaatcaaatgagaatgagttcaagactgaatcgagaacacttcaagaatcaagaggaaattcgatttaaagattcaagaatcaagaatcaagaatcaagaataatcaaggggaagattcaagaatcaagaaaagactcaatcatgatcaggactacaaagactttcaaaacattgagtaccccatgaatttgtcacaatacctttta

SEQ ID NO: 209053 - DNA, 61 bp, Glycine max
tcacgacaaataatcaggatcaattgcgcacgatgaaaacgaggaaaatactacggcatac

SEQ ID NO: 209054 - DNA, 393 bp, Glycine max
gcttctatataagctgaaccatgttatcaataaacacttgtttagttttattcagaaaattagagcttatctcttttatcttagtgagagtgattctcctaaattcttgagtgattcaagaacaccctggctgtatcaaaggactttcacaacctttgtgtgttgccctcgctagaaagagtgattctttccttcctttcatcttcacccttgttctttcaaaccacaattccagaaaattcacctctgcccagaattatctcgtggccataactcccattttacgcactcaaattaagtgattcttgagcctaaattgaatttcaaaacgagacctttcacctcgttttggaatcacctcatttggagccctgtagcttcagttatttccat

SEQ ID NO: 209055 - DNA, 420 bp, Glycine max
  unsure (1)..(420): unsure at all n locations
cttgagatgttttgtatttacatgctcgaatcccttgagtngcattattattgggtgatatattaaatgatgcatcttattccatatcatatcttttgtgcatcatgcatcatcatgagtaagtcagacaaaaattttcttagatagaaaatttcttcagaaggcaaaaatctatgttttaatggattacaagcttatcgtaatcgataaccaaacttgtttgaagcttgcagagttatgtctcggatcggtttaatcaattacaaccttatcataattgattatgtcgcaacctacccttcagcgggaaggtgatgcgtgacttcagggtgagtctttctaaaaagaaaatgcgcgggagtcttcaccaacgcttattcaaggaaaatgctataaataccacaatgggggctatgaatt

SEQ ID NO: 209056 - DNA, 352 bp, Glycine max
tttcatactggctcatcggaaataatacaaagttcaccgtgagagaataggggtcgacaataggggatggtgaaggtattaatacgctacagcaacctagggttagaagtgagaataacacatcattaaacaatgaagccttttcccttcccatccctcaaataaaaaacaaacaaacacaatgtcacagacatgaaattcaaatggcaccgacgaagacattgccagagtaaaatgcatgcgtatgtgtcataccttaatttcgtcccgggactattgcttgatggcatgcaacctttgattggccgcttcaagatacttggcaccctttgttacacaatatgtgaagtcc

SEQ ID NO: 209057 - DNA, 276 bp, Glycine max
agtcatcatatatacaaggcaagtgaagaaaaattttacctactatattaaagatatgggttgatggtccttttcatgattacgtgcgagatctttatagaaggaggacacctttgtttatcttacttaaacttattgagagaagtctcatcactgctcatagaccttggaaagaaggaagatcttcttctccaaccatcagatgagtcattgacattccaagcaatatacgccttctgggaactctttctttaaacttttttagtattcttttcg

SEQ ID NO: 209058 - DNA, 393 bp, Glycine max
  unsure (1)..(393): unsure at all n locations
tgacactccttgtaccaccaagtttttattctaatcacttttaaagtcctactgactgagtacaaagtgacttacaacaatttgatgagtaactaagcattcatttgtatgtcaaattttaaaatcatatacatatctaatacgaatttcatgttaatttcaagatgtgtaaagtaccatgtactcatttataaaagctgcaagaacttgaaagatattatggagtgtaggatagtttataatcatcataagaaaactgcaaaaattggaaatggatagagaaattttgcataatcacagaatttacttactaagtctcagatgtaacttctaacattattttattttagctntgtttgtaattaaagtacattactactctaatattatcaa

SEQ ID NO: 209059 - DNA, 411 bp, Glycine max
gcaagcttcatggggaatcaagaatgattcatagatgttttgtttattacaatgacgataacaaaagatgatgacaaaggtgatgacaaaaatctcaaaggtcaatcaaagaatgagttcaaaatgttcaagatggaatcaagaacaattcattactcaagaggaaaagttgaagaacacttcaagattcaagaggaaagttgaatacaagaatcaagattcaaggatcaagcttcaagaatcaagatcaagattcaagattcaagaatcaagattcaagaatcaagagaagacttaattaagataagtatgaaaaggatttttcaaaaactgagaagcacatggatttttctcaaaacatgtttaccaaagagtttttactctctggtaatcgattaccaaatgattgta

SEQ ID NO: 209060 - DNA, 404 bp, Glycine max
  unsure (1)..(404): unsure at all n locations
ttatggcataacgntttgggtctagatattaaaatttataatttatgaaaagggtactataactattttttatttatatttttaaaaacaatacgataataaaattaatttagtcattttaaatgtacaatcactctagcatgagattagacgtgttacatagagaaaaatgaagggattatatgcgaagacggatctataaaccttataataggagaaatgaaattttttttcttcttttataattttttaaatgtgtaactcttaataaataataagttttaaaaaatgtgctatgttttatatataaaattaaaattaattttaatattaaatgatgataaccttaattggtatcataataatataaaactcaactaattttatataattttacactagtt

SEQ ID NO: 209061 - DNA, 312 bp, Glycine max
gggcatccccttcctttcatcttgccccagttgctttgatccttctattgtccgtgccgacgggggagacataatcaaacttctctctcttcaagcctacttcaatcctctcacctgtgaacactaaatccgcaaagctagagggcatctaacccaccaacttttcatggtataacactggcagagtgtcaactatcatagtaatcatatacctttcaaccgtgggaggtgccacttgagcccccaaatcccttccactttaggcgcactccttgaaagattcacgttcctgtttggtcatgtttggaattg

SEQ ID NO: 209062 - DNA, 392 bp, Glycine max
  unsure (1)..(392): unsure at all n locations
agctttcttccaaaggatgaggtctttgcagcttattctggtataagccactacccacactcatccattttcaatgaagcctcacttccttcataggtttaattcgagtctccccgaatggtcaaactatgttaagggatgtacattgaccactcaaaaggtgaaaatctaccaagagtgaagagtctgcatgacataacaagatagttaggcatgtaatttgctatttgtggatgagaataatgtgttacttgatgagttgtataattatagtgttattgaaaatgtgatgaatattctatataccttatgaaatggtgatcttatgctatttttaattatatgatgtattcttttaaaatgagcttaccttgctttntctgttgaactat

SEQ ID NO: 209063 - DNA, 414 bp, Glycine max
  unsure (1)..(414): unsure at all n locations
ccaagcaccgcggctgcagcttctgataatgaagaaccatgaaccagtttttgttttatccacagntactatttctatgtacttttgtgaaggcttctccacattctgactttggttgacagactttaattttgtaaggggaattgagacctgaaatggcatagaaattgaagtacatatcagcaaaagtatgaagaaagattaaggagatagctcggaagcacttgcatgatagacactatataaaaaaaattaaaaagaaagtcaccttataatggactctaacatcatctccatttggggaagagatcttgatggatctatcactgcaaaaggcaactttatcagtggatatgaagagaagaccagcaataggaccagatgtggttgataagtagcattgtgatgctttca

SEQ ID NO: 209064 - DNA, 408 bp, Glycine max
  unsure (1)..(408): unsure at all n locations
gcaagcttataattncaatattgaagaaacagactttgttttttttcatattcccgatcagattggcgatgctatggccatctttcctgttattcgggcgcttgaattgcataaaattaagcatcttttaattgtaacgtcgacaattaatttagaagtctttaatgcgcttaaacttgaacagactaaattaacattagtcacaatgactatgcaggatcacgcaacattaaaagaaataaaagatttagcaaagaacataacacagcaatacggtacgccggatctttgcattgaggggatgcgtaaaaagaacctgaaaacgatgttatttatcagtcagttgaaagcaaaaacgaattttcaggttgttggtataaccatgaattgcttctcccctttgtgcaa

SEQ ID NO: 209065 - DNA, 459 bp, Glycine max
  unsure (1)..(459): unsure at all n locations
ctcagctgggttgctatgcgaatgtataaaacctgtgatttccgttttattatttaaagagtgttccattcggggcactcttttttacattccctctacagaactagcccttctctcacagaaaatgaataaataaaaatgcggcaccgccagaatcgcgttcgatgtgactatgatcattttcggtgagtactgctttgatctaaaagctgtgtttttgtgatgattgaccagcctcagagtattgatgacaccatcgctcataacagatcggcattactatgcataagtactgtctcatattctcgccaaaacactttttaatgcctttgcgaattcatccagacttatattgtcaattttttgcccaacgacgactgactccgagacatctgccattgcgggccatctcgttntgtaatcatcataaattgcaacaacaggggtattatatgcact

SEQ ID NO: 209066 - DNA, 419 bp, Glycine max
  unsure (1)..(419): unsure at all n locations
cttaagtcacctgcggcatgcaagctntaactganacactatgtaagtttccatctttattgcatgctagtcaacctttaccctcatctgttttacaggttacaggttgcacactttgtggtggagctcataggtcaggcttgtgtattcccattgaagaaacatctcatgaagttaattacatgggaaaccaacctagacaaaattttaatgcaggtggattttctagattgcaacatggccaaccttactaggaacataatcaatggagaactcaccctggtaatcagttcaataaagaccagggtgggtcacctaacaggccacaacaacaagggcctaacttatatgagagaacaacaaagctggaacaaactcttgctcattttatgcaggtgccattgactaattataagagc

SEQ ID NO: 209067 - DNA, 363 bp, Glycine max
ttttttgcctagccctaatccactttgacacaagtatttcccattttcttttcccgagctcaaacctaacattgctaacccttgctcttaagtctaattcccttcaacggtggataacaaatctttgggtagtggcgttgtgaaaatgtctgcaagcttggctttaagaactacaaatcttaaagatacaaggccccttgtcctaaaactaagtgcttaatgactaccaacccttaccacgaagagggtttgtgtacataaaaagtcctatcactatcaaaataattttattttgaacaccatctaataattttgaaaagcatagaatctgtttgaacaatccatccaattctttcaacctat

SEQ ID NO: 209068 - DNA, 367 bp, Glycine max
  unsure (1)..(367): unsure at all n locations
gcagcagcagctgggagcaccaaaacgcggaccgcggnnctttgtaatagacgacgacacacgcaccatgacctgggacgatagcaccgatcatatccaccaagctgacaacgcacacacaaaatccgagggaaaagagaaactaacaggattcggaacgcacatgccaacacaggaatgcccaaaaggaaacaaaaaaaacaagtacacgtaacgaccactgaaaacggctccccttgcaccaaccacaccagaccgacggcccctacgcgaccatgccaccctcgcggccaaagagacgcctcctcaactaacaaagtctaccaaaacctaacaagcccagctcagacatggcccccccacaaac

SEQ ID NO: 209069 - DNA, 397 bp, Glycine max
gctataatatatggatatgctcgaagataaacatcttttactctcgagaaattcaaatggtcataacttttcacacggatgtccgattcgatcgcataggatgtcgagaggctcgaatttgaacaacggaaggtcttgagaaattcaaatggtcataacttttcacacagaggtccgattcaggcttataatatatcgatacgctcgaaattaaacatcggaaacactcaagaaattcaaatggtcataacttttcacacggatgtccgattcgatcgcataacatgtcgagacgcttaaatttgaacaacggaaggttttgagaaattcaaatgctcataacttttcacacggatgtccgattcaggcttataatatatcgatacgctcgaaatta

SEQ ID NO: 209070 - DNA, 367 bp, Glycine max
ttggagagtttccgacgtctaattacgagcgtatccatatattatacgcctggagaggacctccgagcgaaaagatatgaccattggaatctctggagagcttccggtgtgcaatttcgagcgtcgctatatgtgatgcgcccgaatcggacattcgagcgaaaagttatgaccatatgaatttctgaagagcttccgttgttcaatattgagcgtctccatatatgatacgccggaatcggacatccgtgcgaaaagatatgaccatttgaatttctcgagagcttccgctggtcaatttcgagcgtctcgatatatgatgcgcccgaatcggacatgcgcgtgaaaagttatgaccatttgattt

SEQ ID NO: 209071 - DNA, 423 bp, Glycine max
  unsure (1)..(423): unsure at all n locations
agcacctgcggcatgcaagctngatgggtctaaactccatactaacttacaagttttctctgggacaaatacaattttgtctagaagtacttgtgccgaagtaagaaaaggtcaaaaaatcaggcacataaaaaaggcaatattgtaagttctattgtccaagaaatcgttgggtccctgcatgtcaagatcaactgcagtgtgatctatccaagttgaccctgataactgaagcacctccacaagttacaacctcgtgcttcatcaccattcggtgcaaccattagtttttggcgacatgtggcatcttctcatcacggtgaggtaaaggaagttgaaggtaagtaaaatcacattctatcagaatcacaatcatgaaaggggtagttccaacaccctcgccttgcctcctatgttgccgca

SEQ ID NO: 209072 - DNA, 410 bp, Glycine max
ctcggccttctgctgcacacttattatctcatgttaatatattgtattaaacgttacaggtttcattgcatatacatatataaacttgtgagaggcatgactttccagagagttttgagttgtcaaaccagatatggtcctgcttattttgttactgagcgatatattatattggctgtcatgcataacatgctctgcgaatatctattttgaaacttgaaccaattctaataatttgatattcccccatggttcaacatcaaattgcatggttggtattagttagaaaaaacaaacttatttgaaatgcgtccaacaaatttaattaaaatggtccttacgtactctactatcaaataatattgcaaatcttaagtcagtcttccacagaataactatgacttgggaca

SEQ ID NO: 209073 - DNA, 399 bp, Glycine max
ctgtagggttcacacagataattcatattcaattcatcaaataaagtataaagtctaaatgaatatatgttggttccatattaagtgcattagtgtaaaataatggatgcaatgctacatctaaggtttgactcaattaacatgaccatgctttagttagaatgagaagcttttcctgtcttcgtatactatgagttggaataattggtaaagttgtacaggtacaaagtttcaaacaccgaaccatgagtaatgcatgaattaaataattaatccaactggaaatttagtttaatacaaaatttaggacacatacctaaattggggctaagcttcagttaaggaatcacttatgcactttgacgatgctaaagcaacacaatgatggagtggcactgg

SEQ ID NO: 209074 - DNA, 361 bp, Glycine max
aatccgctgatttgatgaggtgttattcttactcgaccaacttggagaagaaatagaagaactaccacgatggagaaagatgaataggagaataataagaactggacgagaatatgaccaggaggaaaaaatcaatgcaagcaagcatgcttaaggcgcccttatggtctaaactattggggaaaagacgatcacccaaatgatggcatttaatccctttaaaggcaatatcagccctccttactggtgaaggataataaactgatgttaaagattcacgtgtgcatccatgtggcgactaacgtgccatataacacatttactaacgatgttcagagactactaatggcagggataaact

SEQ ID NO: 209075 - DNA, 406 bp, Glycine max
  unsure (1)..(406): unsure at all n locations
tgcagcttctanatccggcatggaagactgncagctgtttctttatgcagtaccaatacaacacggatatggctcctgatcggaaccaacttcagagtatgaccaagcgggaacatgagtctattaaagaatatgctcaaaggtggagagacctagcatcccaagtcgtcccgcctatgactaaaagggaaatgatcacgattatggtagatacgttgcccacgttctactacgagaagctgataggatatatgtcggctaactttgcagacctcgtcttcgccagagaaagaatcgagtccggactgagaaaaggcaagtttgaatatgcctccaacgttgcccccaacaacaataaaagagccccagtggtgggcacacataaaaaggaaggagatacccacgc

SEQ ID NO: 209076 - DNA, 457 bp, Glycine max
  unsure (1)..(457): unsure at all n locations
gaagcctctgaggaagcttctcatgaagcctcacaagaagtntttattgaagctgtctgatctgtcccgagaaaagtgccctcctgcattctttaactgttggatcttctcaaaatttgatatgtcttctggtgtgtgagagaagcttcttttcctgagagcagaaacacttgagtatttcaagtcttatttttcatgtagccttggaaaacaaccattcctttcttcttctttcttccaaaaccctttcccaacgtcccaagcttcttcttcgccacccacaaccaccaatagccaccacgaaccgtcgtagttctccgttgaaaccccacactgagaggaacccttcaatcggagcggaatcttctaagcttgtctcgcggtttcggtagagaatgaagcccaatctgaccttcacgactttcttcgaggtaaccgtgattctacgcttggtcct

SEQ ID NO: 209077 - DNA, 402 bp, Glycine max
aagcacctgcggcatgcaagcttcttagtttcagatgatgcagatgggtttgtatttacctcatgcactcctctaatgactatggcatcatttctggcgctaaactgcttggagttggaggccatcttctcaattaaatttctggcttcagcaggagtcatgtctccaagggctccaccactggcagcatctatcatacttctccccatattactgagtccttcataaaaatattggagaagaagctgttctgaaatctgatggtgggggcaactggcacatagtttcttaaatctctcccagtactcatacaagctctctccactgagttgtctaatacctgagatatccttcctgatggctgtggtcccggaaacagggaaaattttttctaagaatact

SEQ ID NO: 209078 - DNA, 403 bp, Glycine max
tgcggctgcaagcttataagcgcgggttcgggagacaaaggtcatgttttctcgatatgcgaagatgatattccgagtactttggatttggtccgaccatgccctcctgatttccggctgggaaattggcgagtggaggaatgccccggcatttacgcaacaagcataatgtaaacctttacggttttaaaagctctatagttgggcctaggctttagagtttttccttttgttaaggctttgtgtcttttgtttttgaatttataatacaaggatctttcttcatctattcctggtctctacccattctcattcatttgcatgtttacttctttttctgaaacggcagatccgatgacgagtcccccgaaggtactaatacctgggacccgtctatcgactt

SEQ ID NO: 209079 - DNA, 432 bp, Glycine max
  unsure (1)..(432): unsure at all n locations
gcttgtactaccaatctaccttcggttaccaagctgcatatttgtaacctattgaagcttttgcatccaacatacaatggcgtctgcgcatctatttgaagatcatcataaatatctgcatgaaaatcacgaaagccctcttgcccaagatcacgtatcatgtcttccattcgatcgccgctttctagctcaactggctgagctggacatgttgttctatgaccaagcaactcaccatgccatatccactttgtgcatgtggggctaaacccattacatatcagatgtgatctaatgtcattcaaggaatgacgcctaccattcacacatttaacacaagggcagaaataccttgcattctgtggttggtgaatttatttgggcaaatgacaaanactcttcaacctcgttttcatacgctttgcttatgcg

SEQ ID NO: 209080 - DNA, 420 bp, Glycine max
agcgacctgcggcatgcaagcttatcatatatgaagattataattgactatatatttctattttacattgtcaatgcattgcattgtgtttttccaacaataataaatattttgatcacatatgcaattaatgtgagacattaacataaacttcttcatctaggtactatatttcaccaaaattttctccttttctcataaaactctgatgttagttgtgggtcatccctatcagagtggactcttgaacgacaaatgaccaaaacatggtgaaatctagtcaaattttgttgacaatcaaagatcaagaccagagaaatgtcaccactattgagaaaatatacaatgaacaaaaaaatatcgatgtgaacaaaagggtccaagaatgtaggtacaacatctaatggagttgatagatta

SEQ ID NO: 209081 - DNA, 415 bp, Glycine max
  unsure (1)..(415): unsure at all n locations
ctaagcttctatccagggcacattctggtgggaagctccttcttccatggcttattccctagtggatggtgcctcccctctcctcttctccttttccttccgctgcatctccatggtggaaaatcaccattgagggacctcattgaagctctaagatctagcctccatagaagctccacaagcaagtttccatcaagtggtaatcagagcacaagagcttcaacaaggtgctccttaaaccttcattaattttttgctttaccttctcttcgattgttggttctntcatttttctccatgtatctcctaacattccccttgctaaatggtttttacatgattctttagagtttccaccgattaaacttgctatagaagctagatttgattttctatgggtcaaatttcttgttct

SEQ ID NO: 209082 - DNA, 405 bp, Glycine max
  unsure (1)..(405): unsure at all n locations
acctgcggcagcaagctcagctntgagtctatgcatcatggaaggttgtttatttaaactggcactcctcctgaattctcatccactctcatgtgaaagcgaccggcattcatcttctacatcacaggccgtggtaaagaaagatgacagtccctatatggatctgaacggtttcaaaaaatatattttgtttgcacagataaatcaaaaagctcagtcttgttctcactctgcatcataacgaaaacacacttttcgtttttattgaacaaagccttgaaaatggaaaccaggtaaaaaatatggttacatattgctattggtaattagttataaaaacagttaacgttcgctcatacaaacaaatgcttcatttgtattttttgcactgcctgtgcacgtgtt

SEQ ID NO: 209083 - DNA, 366 bp, Glycine max
ttttgccttcacgaattaatgcattctaattaaaatctaaaatttgaagatatgtaaaatgtaaaatccaggttatactaaaaaaaggcttatctaataatttcttatcgccataaaatgctgtccagtactagtcctgcttctaaaaaacttattcgagttaaacaatgatatcctttttctttgactatatccaaaaaagagattttgaaattccgaaatggattctcaacaaagaaggagaagttacgtgcaaaatccatgtgatatcctatctggtaaaaagatgtgtttccaaatagatcatgcagtgggccgggaacatcacaaaggttacacgtgcaaagacaatgagaaaagaaaaag

SEQ ID NO: 209084 - DNA, 470 bp, Glycine max
caactaacttacctaataagccaatacactaagactaacatcctggatatggttatatatttactacatcttctatggcactactcaactctgtggccacatcgaagaatacccaattatatgatgataacacagaatataaacgagattttggtggctccataatacattccagcatctactctcaaatcacgaccccattagaacaaatgaaattcaggtggagacctatagaacaaattcaaagtctgaaagtcctatatcctcccagaccagaagaaacgcacccacccctatagggttgtcaggacaacgaagatgatgaataccatgaactgcccaactgagggtaagaagacctcaggcctgtatctaacccgctgtaattactaacaagaggtgccttgtgattactcataaccttcctggtacacgagaattctatcagtagaaaccaaccaaataatatt

SEQ ID NO: 209085 - DNA, 396 bp, Glycine max
  unsure (1)..(396): unsure at all n locations
agcttagcanatggacctgtgtgttgcccagttttatttatcttccgtaaaactcatcacctctatcatatctaataattttcacatttatgtctaattgcccttttacttcattgtagtaaatttctaaggcatccattgcctaagaaatctcgggcagtaagtagagataactgtaacgtgaataatcatcaaaaatggtgataaagtatcattgctttccgaaagaactaacatcaaaaggtccacaaatatcagtatgcacaatttcaagaagctgagtgctttttgtagctcctttctttgcatgttttgtttgttttcctttaatacaacccacacaaatatttagatccgtaaaatctaaataaggaagaattttattttttattaatc

SEQ ID NO: 209086 - DNA, 442 bp, Glycine max
  unsure (1)..(442): unsure at all n locations
gtgatctactcgcgctgagcgaggggagtcgcgctaagcgaacctattattgcccaaagcccaattcagtagctataaataaagagtcaggccctaactaagggtttagccacttatggccattgagggcgatgtatgatgtacttttcactatttatcaatgcaataccaggtgctttccttcatattttcttttctatttttatcttgcatactcatctttatattntgttaagggttagatgctcatgaaagggtaacttctaaataagatttaaagaaggtatgcatgcattagttntaggggttagacgctcgggagaggataacttctaaaagaacaagaagaaaatatatcataataaaatcattgctagacatacagtgattgcattatgcccatgcatcanagaaaacatctagaattagaacttcatgcatt

SEQ ID NO: 209087 - DNA, 423 bp, Glycine max
ctctaagtcacctgcggcatgcaagcttgtaacgccatcagcaatggcgagaaagcactgatgtcgccattcacaacagtgagacatgctgtgactcactgtccatgccgccattcgtactggcaggacatgctgagtaggaaagatgctgatctcgccagtccttcctgcgagacacgagcccatgccgccattggtactggcgggacatgccaacgtggacagtcccgccattggctccagcgagacacgttcacgccatgcataggtttgaagatgccactgttgatgatgagactgaagcatttttttcgtgatgcaggctagggctcaaaggttagagttgtagttcacatgcattctgtgcagagactgaagcatttttttcgtgatgcaggctatggctagagttgtagttcacat

SEQ ID NO: 209088 - DNA, 381 bp, Glycine max
acaggcttagtgccacctcgtgctaagcccacaaactccttgcattggagctaagcgcgcactgatagcttagcccctatgttattttttgtgatttgcttattgtgccctgtttttactaaccttagtcttgtttcctttatttttgcagatggcttcaccaaaacgacgtgttgtacccactcagcctcaagagggagagcctgcatgggactcctcctgattcacatcagagatcgcttagcacagataccaagacaatgttcatctccagaatatcctttcggagtggaacgcggagctcgcccctgccatgttcgatgagttttatggagaactccaacaccgatagtggcaccgccggctcacacgccttccgga

SEQ ID NO: 209089 - DNA, 361 bp, Glycine max
tttacagttcttaaaacataaccaagaacaatttaacatattacaacacctcataatccattataacatgttatcaaatacaattttaagcataaaaaatcaactttgttcatacaactataagtacacaaagattacaaaaatattaatgttgcttcttattctattacttttattaataaaaattaattactttaaaatcatataaataataagatctaattaattgataatataatttttagtcactaataaatgcatatgaaactcactctttttcttcttctcaaaatcacctgctaatatatatattttttgggtttctattctacattaaaacataggaccctatttatactaa

SEQ ID NO: 209090 - DNA, 398 bp, Glycine max
  unsure (1)..(398): unsure at all n locations
gacatactctttttaatcattcattctaagatgcaaatggaagcctcctatagaaaaatcctacagctgtttttgcgttaggtaagcagctattgattaaatttgaagttaaggatctccaactctccataggcttcctccctctaaatgaggtttcaatcaaattctggtgcatatgagtttgtctcaaattgttgaagatgacccctcactctccgtaattccatggtatattccgtgttctactcaataataatagcttcggtctattgaaaagttcatttgaacgatactggtaagatgctaatgtaatgccgaatatttaaattttagaaaaattataactataactggactgagactntaatggtttttaagttccttgattcttttttccc

SEQ ID NO: 209091 - DNA, 348 bp, Glycine max
gatctctaaacactgggagctcctctcttacttggggctgacgcctacctcacatggtaagtctttgattgaacgtaaaggcagacgccaccctgataaaggataacctaatctcgcttggctcatatgtttgaaatggaagagtaggaattttgagatgcttgttttcaccacaggtgtgtaacagcgagctttgaattatagagaaagactcatacatacactatataaatagtggattatgaactgaacatccgaagaattacttggtgatgtaataatattgaatctaggggtaaggtaagtattcttaaagaagctacttgttcatgattagaacagtgaccc

SEQ ID NO: 209092 - DNA, 382 bp, Glycine max
ggtatattaaacaggataggaatctcaattgaagtaacataaggtgtggccaagataattaagttaaaaaaatctttacaagaaatttactctctggcaatccattaccaaaggatgttatccgattaccaatggccaaaactgatttacaacagttattaaaaattgaattcaaaatttgccctgtgtaatcgtatacacatatatgtgaatcgattaccaccagtgtctgaacattataattcaaattttaaagcttgatattgattacacatatacctggatcgaataccagagcatattttcagaaaaaattctcaacatgcacatccttttattgtctgtctgaatgggtattaaaggcctaaatatatgtgacttg

SEQ ID NO: 209093 - DNA, 375 bp, Glycine max
tctatcctttctaatatatagccaaacccaattaccctcattaagaattagctattttcttcctctattgtctttagttgaatacacctttgtttggttttctatttggttcttaactctctcatgcaacttctttacaatgttaagggattgaacccatagacaacctcaaaagaggattgcttggtggttctatgaacccccctattgtaggcaaattctacatgaggaagatactcatcccaagacttatggttgcctttcagaagagcccttaaaagggtggatacagacctattcactacctctatttgcccatcagtttgtggatgacaagtggtagagaaaataagtttagttcctagcttagcccat

SEQ ID NO: 209094 - DNA, 400 bp, Glycine max
  unsure (1)..(400): unsure at all n locations
ttcctctctttggcttttcctagctaagaacataagatagattacttaaaaggggtgtttgataagggaaatttctttaatttcatgtgaatcttataatgagaaacttagtttttcatgtttgacatctactgtaaaatataacattgatgggaaaggaggttttatggggggaaaaaaattatgtagttttccaaaaagcttttctgttagaaaggtggcaatctaacttttttgagttaattttctaactatcctaaaaatatcacattacttttattagaatattacttaatacatttcaattcatttgttttggtctttcctagttaagaagatagcataggatattcaagaagatattntgtacgggagaaacttttaagttccaaagaatctt

SEQ ID NO: 209095 - DNA, 390 bp, Glycine max
acttctcagagaaattaacctattttaacaggacatccataaaccatagtttgaaagagaattcaaggatgttggagacactacagaggcatatgcaagaatgttggttcataaagctcatatgctccaacttgaaagagtgtaaaaataaaatcaatgaacaatgtacaaataatggtactaaactactaatcaattcctatctagtaaaagggagatctgtattgatagtagatataaaaaaaagtattgcaatcatgtaagagcaatgtttgctcccaaccaagttataagctaagaagccgataaaagaatgtgtcctacccctccccccacacgcacagaatttctttgtatatcatatctaaatatttttttctctctaactaa

SEQ ID NO: 209096 - DNA, 396 bp, Glycine max
  unsure (1)..(396): unsure at all n locations
tcccctcctatcttcctccaaaacaaagttcatagagtgctntaacatggaaaagcctatttcaagctacatttcactttctccacttgagacacgatctttgtcagatctataactacccctggtacaactcacaatggttcaaccactcagaagtgagaattcttcccaccaattctaactcaaatgaaatcttgtcatttatcaatacccttaacgatgataaatatcatctgaagggacgaattgaacaccatattcaagcatagtctgctctcaagaaatactttgcttctacatctatgtcaaccaaagctcatattccattgaacaatcttgataagtattcttcccccactaacaaggaatgccataaactttacccaacccaactat

SEQ ID NO: 209097 - DNA, 406 bp, Glycine max
  unsure (1)..(406): unsure at all n locations
cttcttagtttcagatgatgcagatgggtttgtntctattctatgcactcctctaatgactatggcatcatttctggcgctaaactgctgggagttggaagccatcttctcaattatatttctggcttcagcaggagtcatgtctccaagggctccaccactggcagcatctatcatacttctctccatattactgagtccttcataaaaatattggagaagaagctgttctgaaatctgatggtgggggcaactggcacatagtttcttaaatatctcccaatactcatacaggctctctccactgagttgtctaatacctgagatatccttcctgatggctgtggtcctggaagcagggaaaaatttctctaagaatactctcttaaggtcatcccagctcgtg

SEQ ID NO: 209098 - DNA, 327 bp, Glycine max
actctagccacttatgatagccgccgaagaaaccaatacagcgtcccctaagctctctggcctttcttcacaccgcatcacatgccttgtgaactccttagagaaccctcgcattggggtgactgaaaccccacgcgacgaaaagacggatgccttcgtctgatggcaccccttttatggtggagccaaaccgtcttatggcgaggacgggagaataattaatacaacccccctggtccatcaaaggaacaatttggcagaccctcgcacgaagtagaaacccgagcgtccctcctctagcagggacaaataacagaccccctcctg

SEQ ID NO: 209099 - DNA, 416 bp, Glycine max
  unsure (1)..(416): unsure at all n locations
cttaagcacctgcggcatgcaagctngaggganaatttcttgcccaagcttaagggttctttaaataagttgttactagaaatttttggagcagatttcctactatagactaggtcatcctttacatggttagttaattatcctaaataattgttgttgctaatcttataaaaaaaaacataatctcgcatagctcataggtctaatatgttattgaaggaattatgatatgctttttttctcagaggttgtaagaatgcatgctttgcataatttagatatactcaaacatctatttaattaatatttgattctgttatgaatttttagagttttacaatgtgatgtatttatattttagttagtggcaaggtaggtttctaagatgatgtaatttgtcttgattgaacaatgac

SEQ ID NO: 209100 - DNA, 455 bp, Glycine max
  unsure (1)..(455): unsure at all n locations
gcttcttccacctcagttanaccggaagatatccatcaagaggatgattagatgggcatgtcactagaactaccacaactagagagacgacaattccttacttagtttaaacaacagagattcatagagttggaatctagaagtctaatttgtgaaagataccatcaataggtatttgggtgagccatctacccttgatgaggatggtatggatacatcatcggatgaaaaggcactatgagttcaaactagatacagtagctaacctcttatgcatacctggtcacacctattaggtggtagctactggaaagccatggaggattgtgagagctagcataaagactaccactcagatttgggaaaatttcatttttgtccaatgtcatcccagtaactcatgtgttataattaatatggatagagcataccttatatggtgtattatgcaacaa

SEQ ID NO: 209101 - DNA, 413 bp, Glycine max
  unsure (1)..(413): unsure at all n locations
ctgcggcatgcaagctntcgagactaagacatataaaagaaactgaattgttcccaaatatagaacatcaaataagtaaaagaaagattgcatgtgttaaaataaaactagtaaaagtagaatcgcacgtacttcaaatatgcatgaagttggattagttacagttcaattttacaaacacacgcaccccaaatttaaactgatatggtcacgcgtttcaaagagtgaatgattaaaaaaactcataattttagttgtcttatcgtaaagttaggacaaagggatgaatggatgaaaatattttgattaaattgcattatcacagaggattttgttatgggtatcaatatattactatttattaactgattttcaagcaattaaataaactaatagtttataaatatgtattt

SEQ ID NO: 209102 - DNA, 365 bp, Glycine max
  unsure (1)..(365): unsure at all n locations
ctatatctggtgttatattataataactggtcattaatctaaaatatctcagcccttcgtccactagaccagcatggctacaagcacttagaactgccataaacaccatcttatctggtttaatatgatgagaatcatgaaacaggccaaatacagtctaaaggcccaagtggagaaggacgaatgcccaagtggagaaggacaaagcccccgagtggagaatgatgaatgcccaagtggagaaggatgaangcccagatgcagagacactatcaagactattaattgttgctgaaggcccaaactaatntgaaggcccaagttaaataagtttttaagtataatttaattttattggaattttg

SEQ ID NO: 209103 - DNA, 407 bp, Glycine max
  unsure (1)..(407): unsure at all n locations
agcactgggctgcagctaaacctagggagatgattatggctcttatttngcattgtcgttcaactatattgttttcggttttagggtttataatgtagggtttagttaggttttaaagcccaataggggcaatgcctgtaagaggggtgacgacccctcatttctgctggaaatcacgatgaacgcgctaagcgcaccagctgcgcttagccgattcatcgcaactgacaaatttttagatttccagatgatcgcgctaagcccgaccatgtcatgctaagtgcgttcatccttctgatgagtttcaatgatgagctcgctaagcacgcctgtatgctaagcgagactaatgtttcagacacttagcatttttcaaaatttttgttcagcgctaagcctgtatgtca

SEQ ID NO: 209104 - DNA, 449 bp, Glycine max
agtgctcatgctctaattctgcgagaatgacaaagatcttgttggtgattgtagaagcaagcttcattgcttcatgatgatgaatcaagattgattcaaggtgttttaacgataacaaagatgatgaccaaaagcccatgagaatgatctcaagattgagtcaagaacaattcaagaatctagagaaagattcaagagaagcttccagttttcaagttttaagttgtcaagaatcaagaatcaagaataatcaagttcaagattcaagactcatgattcgagaatcaagaaaaggctcaatcaagataagtactaaaaaagtttttcaaaacattgatgagcacatgaatttttcacaaaaccttttaccaaagagatttactctctggtgatcgattaccagtttattgtaatcgataactagtagcaaagattgttttctaaagctt

SEQ ID NO: 209105 - DNA, 372 bp, Glycine max
cacctgggctgcagctatacaacttggcgattacatcttccattgtttcttccattgctgtcttctgctcctttcccactcgagaactcaagtctatgattgctccaatattcacaacaatcttggagttcaatattgggcactctatgttgctgccttctatttcataatcattatttgcattagcaatagcttctgaccacacccacagaagcaggagtacccacaataacggaaaagaaaacatggaattgttcaaacttgagggaaaaagtgaactattattgcttacagctatttatcacaatattgtccttattaattttggggtaagtattaaatggcctttggatagaaaattagaaccttttt

SEQ ID NO: 209106 - DNA, 421 bp, Glycine max
  unsure (1)..(421): unsure at all n locations
ctcagagtcacctgcggcagcaagctnataagcgcgggtctgggagacaaatgtcatgtggtcgcgatatacgaagatgatgttccgagtacattagatttggtacgaccatgccctcctgatttccagctgggaaattggcgagtggaggaacgccccggcatttacgcaacgagcataatgtaaacctttacggttttaaaagctctatagttgggcctaggctttagagtttttccttttgttaaggctttgtgtcttttgtttttgaatttataatacaaggatctttcttcatctgttcctacgtctctacccattctcatacatttgcatgtttacttctttttctgaaacagcagatccgatgacgagtcccccgaaggtactaatacctgggacccgcctatcgacttcgagc

SEQ ID NO: 209107 - DNA, 354 bp, Glycine max
aaacatgtgtaacacttggtgtaactatgaagaatgagagacttgtgagacatactttaaagatccacttctctccctcttttattccttcaatttcgagctcccccccctctctttctctccctctttcttttcctccattgaagcattctctcaaacttcttattccaaggctcatcttggtggtgaagcttcttcttccatggcttattccccaatggatggcgcctcttctcacttcttctcctttggcctccgctgcatcttcgtggtgagaaatcacccataaaggacctcattgaagctcaaagatccagcctccataaaaggtccacaagccagctttcattaccc

SEQ ID NO: 209108 - DNA, 402 bp, Glycine max
agtcacctgcggcatgcaagcttctactccaattatctagtagaagggggttatgtgttgtataaaagggttcagccccttaggcacttatctctctctttctcgaaatacctgaggaaaattagttccgcgaacaaaatacatgccgaggcgcttccgtaacgtttccgagaataattacccgacgattctcgaccgttctctgagatggatccgccgttcttcgagttgattgagtcttcaacgggtaagtacctcaaaccaagcttttcaattcattctatgtgcccatggggggacacattttggatcatgtagtattattctcgaggatattgactttgtaatcccccttttgacgtgcttaagccatttatttaagtcctttttcgcttaatctaa

SEQ ID NO: 209109 - DNA, 313 bp, Glycine max
tctactgagcggacccaatttatagtaacacattctgttactaccatgtacatttcttttcacattggggtcctattaaatccatatcctcatctttggcctattcttaaaagttcatgctcctcttaccatgtttgtattgatctatccaacctaaaaatggcctgatactccaaagatggcaacatttggtcttccagaaaggacttgcaaggttcttattattacccaagtacggtgcccaattaaatttcttgaagaaaccataataattttcattgttgagtagccccatttttctgttgacatctta

SEQ ID NO: 209110 - DNA, 451 bp, Glycine max
  unsure (1)..(451): unsure at all n locations
tgaggcatgtaacccaccatcttctcatagtagaacattggtnacgtgtctactatcattggtataatctccctcttcatcattgtgggtgctacttgagctgccagatccctccacctttgggcgtattctttgaaagggtcatgcttgttcttacacatgttctgtagctgcattctatccggagccatatcaaaattgtactgatactgcctaatgaaggcaaccattagctcctttcaagaatggactcatgaaggttccacgagatnggtatgctatgtgacggttgccccagtaagactttcctagaagaaatgcatcaacaatttttcattgttcgagtatgcccccattttcctgttggacatctttatgtgatcttggggcaagtagtccccttgtacttattgaaatttggcaccttgagctttcgagggataacgacatc

SEQ ID NO: 209111 - DNA, 401 bp, Glycine max
  unsure (1)..(401): unsure at all n locations
cctgagctgcagctaatgggctctatgttatgcacacgatctccgtttggtctattnggaacatggacgatagagtgccaatagcatcaaccacttgattttcctctctaggaatgtggtgaaatgatatataatcaaagagtcccatcaattccttgatgtaagcctgataaggtatcaacttatggcctctggactcccattcacctttcagctgatggattaccaacgctgagtctcagtacactttgagcaacttgaccctaaagtcgattgctgctcagatccctagggggcattcttcgtactctgccatattatttgtaaaatcaaaacacaatctagccgtgaaaggcaaacattgtttgtctggtgaaaccaacactgccccaattccatga

SEQ ID NO: 209112 - DNA, 298 bp, Glycine max
gagatgagcttacgaatctgagagagagattatcttcttatagagccggacgaagatgaaagctctcactcaagattatgaaattacagattaaattatgaagacggaagattaaagataaagcgcgcatttaataaaatataaattaacaatcacaatacataatggaaatactaaaattcgctataaggtccctagatttgaatcacaaaaaaaaataatccccatttgattggttgatatagctatgtaatcctttatgatgcccatgaatggagtatacataatatatatctgt

SEQ ID NO: 209113 - DNA, 356 bp, Glycine max
cttacaagagtctgggtgtgtgtgtgtgttgcggggggcggtatatgatacaaacaagccataattgaggggaggaaggatacatagaagttctatgttcggtatatgaaatatttttctacatctttaaaacacaggttttttggccgtgctaggacccccgtactgtactctgattagcatgtgtctctatagctttatatattaaattggttatgaagttcttgggcatggcggcttcacaatcgtttccacaaagcttttattgattgttatcgttgttgcgtacatcctgatttaagggagatgccgctatgcagcgctgattatgaaatgctattagcccttgatgaggc

SEQ ID NO: 209114 - DNA, 384 bp, Glycine max
ctcattaagaattagctcgtgtcttcctctgtagcctatagttgaatacacctctggcaggttcactatttggtacttaaccctgtcatgcaacttctttacaaactatgacctagattcctcttctgtatgtataaaagaagtggctattggaaggggaaagaggtctaaccgggttaggcgattgaacccctaaatatcctcaaaaaggggactgcttggtggttctatgaacccccccgttgtaggaaaattttgcctgagaaagatacttatcccaagacttatggttgcccttccaaagatcccctatcggagatccattggcttgggggttgatgataacatgaggattgataaaattgaggcaatgggcttttcaag

SEQ ID NO: 209115 - DNA, 409 bp, Glycine max
ctgcagctagatacatatcgtcttagaatcatgagattcttatctttaagcttgcctacttgtatcatcttaaaatcaagagacaactccactttcgctacatacacttcttattgcttttgattaaaaaaacttgttctagtcaatgtcttgggtgtagcataagcaacttctagaaaataaatcaggcacaagatgttattatattattatatgttatcagaaaatagttttatcaaaaaggacaaacaaaattcaaaatgaaccgtgatggatatcccaaaaggaaaattatggaattcaaacaataagacaagccattctttacctttcttcactgaaactttttgtcttgaaaattacccacacaataagcaagcaaaatcaacttgttctcattaacaaaatt

SEQ ID NO: 209116 - DNA, 458 bp, Glycine max
tactgctattgtaacagatcacttaagttgatggtcacttttctttcaatgaattttttgttctagtgcctttactgatttgagcttagcaagtttgacttatctgttaaacaagattccatttatattcttggcttaaggttttccactgaagtcaaaagtaatacaaactaaacaaatttcaaaccaatatcaacatgttcatgttcaaacaaattaaacagtacaatacaaaccaaacaatgtagcataatcaaatttcaaagcaatattaacatcattaaacaattacagcataatatgaaatttatttcatcattcattcgtattctacttcagcctaaaaccctcaaaactaaccctagaccctaataaaaaaacatttttcataaatttaaacctatttgacatttttttaaaattaaaatatggtaatacaaatcaagttgatccgcaag

SEQ ID NO: 209117 - DNA, 369 bp, Glycine max
agttttttctttctcttaatcttgaacctcgatcttttatttcaggcacacgcaacaatttgtgtcagcaaggctttgaagtggtggaagaagaccctaaagcctaatatgattgagatccactcggcacaagaactggaccattctttgctcaacgctggtgattcattggttgtggttgatttctattcacctggttgtggaggctgcaaagcccttcatcctaaggtatgtttgtttttgttttgtggtgctagaaaagacatattcttaaattcttcatttttttcctagtttttttctttttgtttgtctgcggttacaatatttgacttggtttcatgtgcgaccagatatgtccaatagctg

SEQ ID NO: 209118 - DNA, 323 bp, Glycine max
cagctgcatacaaatgtgaccactactagaagagaacacgtgtaattgatttatttatagttcctcctctatagcaccatatagaaagactattttcacatgcatatgttgcatctcgaggacaatatgagctactaataccaagattagatgaagagaatctttcttagatataagagaaaaagcttattgtgttgtcgattccttctatttgagagatatctttataaaacgaatcttgccttggatctgtcaatggagcgcaatgaatacattttggggttaacgacttacttataatccatgggctatagcccattagg

SEQ ID NO: 209119 - DNA, 418 bp, Glycine max
  unsure (1)..(418): unsure at all n locations
agagacacctgcggcatgcaagctntcatctagccaagattatacaaaggtgtttctatataacctaacggtttctaattatgtgggccatcaaatctatcatgtgttgacagtaattgattagcccatgaatctcctcgggggccgtacacacttcggccatggcttttgctttggctaatagacgcgggaggtcttgacttccattcaaggtcaaggcgaacctatccatccacatagtcgcttcttgatgcaatgcatcaatcaccccccctcttgcttctttttcggtgtacacttgtgcaaaatcctccactagcttttgttcatgggccacagactggttcaactcttccttgtattgccctatgatagctagcatgctttgctccgtggcttccaagtgttgagccaaact

SEQ ID NO: 209120 - DNA, 329 bp, Glycine max
cttgacacaccctcaccccatatctagtttctatttgttatatattatagtactttgatttctagccatgtatttggctatattattatgacatttgaacaatttagtatttcttttatctgcatggtatgattgaacaattgtgaattatgctatatgactatgtggttttaatatatttgatctattcatgtttcttgcttcatgattgggttataatctttaatgaatgccttgtgaatgattagtagtgtatatatgttatgtttactactctgtatgtactttggctctttgttgatgccaaagggggagagaaatatggatta

SEQ ID NO: 209121 - DNA, 415 bp, Glycine max
  unsure (1)..(415): unsure at all n locations
gcgagtctgatnagaggcaaatttaatcatcctacttggacgaatgagaaaactgtggcaaatgaagagggtgagaatgaaggagaaacccatgctgcgattgtcgttcctacatggaaacttcccaccagccaaacaatgtcattactcagccaataacaacccttctccttacccaccaccaagttatccacaaaggccatccctaaatcaactacaaaacccaccttccacacaaccaatgctaaacaccaccttgagcacaaaccaaaacaccaaccagaaagagatnttgcagcaaaaagcctatatgattcaccccaaattccggtgtcatatgctaacttgctcccatatctacttcgacaattcaatggttgccataaaccctgctaggtttcctcaacctccattt

SEQ ID NO: 209122 - DNA, 424 bp, Glycine max
cagagcgacctgcggcagcaagcttctatgaaggttcgttcctaatttctctactattgcatcacctctcaatgagctggtgaagaagaatgtggcatttacctggggtgaaaaacaagagcaagcctttgctttgctcaaagaaaagcttactaaggcacctgttctagctcttcctgacttttctaaaacttttgagctagaatgtgatgcctctggagtgggagttggagctgtattgttacaaggtgggcaccctattgcttattttagtgaaaaacttcatagtgccaccctcaactaccccacctatgataaagagctttatgccttaataagagccctccaaacttgggaacattaccttgtttccaaggaatttgtcattcatagtgatcatcaatcacttaagtacattagaggg

SEQ ID NO: 209123 - DNA, 418 bp, Glycine max
  unsure (1)..(418): unsure at all n locations
tcagctatgccatctctctntatactcactcgagcttatntaagcatatactggctatattctcctcactcatatacttacttgagtgttagagtcctttgttttgtaggtcccccctcctatcctcttgacaaaggccactctcaaagtcgacgtgtgaagtccaggagcccaccttggccacgtccaccctaacgtgtcccaactctagatattggtaagtacattttggccttaccatggggccatggtaaaacatatcctatgatctctggtcaactctctcggcaactgcatcatgagagatttcatgaagggatctacagtcttcacactagaggacactccctagccaccaaagcggtacgagctggctactattgggcaacactcatgaaaaatgccctcaactttacca

SEQ ID NO: 209124 - DNA, 403 bp, Glycine max
gcttaggcacccgccgttatcttacccttcctcaacttaatagctgtttatttatacagtgagtcctgtttcggacttctcactcctcatttaatcaactgaagctgaacccgtttttttctgcatgactcaatcgtcaaaattcttcgccaccagtcagcactgccataacttgtcacattgcaaaagtagccaaattgcttcaggcaccatcagttcaccatcaccaaaaaaaagaaacattccagaacttccgcatctcgcccagccgctccgacttctatactgaatagaaaacgccaacataagagaaacctatgccattacccgattttcatgtttctgaaccttttaccctcggtattgaactggaaatgcaggtggttaatccgccgggctatga

SEQ ID NO: 209125 - DNA, 412 bp, Glycine max
  unsure (1)..(412): unsure at all n locations
agtcacctgcggcatgcaagcttcatgatgatgaaccaagcaattntgatgatttttaaagcccaagngattgattcaagatttcaagatcaagcatcaaaaatcaagaatccaatccaagattcaagattcaagattcaagagaagaaatcaagaagcaacaagtcaagacttcatataggataagtattaaaagaatttctcaaaaaccaaatagcacagttttgttttacaaaagaattttcttaaattttctaagttaccagagtgattactctctggtaatcgattaccagttattagtaatcaattaccagtggaccagttggttttcaaaatgttttcaaatgttttataatgttccaaaatgattttcaaataggtaatcgattacactatattagtaatcgat

SEQ ID NO: 209126 - DNA, 330 bp, Glycine max
  unsure (1)..(330): unsure at all n locations
tattttgttatatgaacccaacatattttattatcaatggcagtgatgcaaaaccacttgtttagatgactgagtatagatctcttccctggtgtatttatatagttacctgtacaatttaaatatctttaatgccctctacaagcaatatgtcttgggcaatgcactgcaccaagggatgtttcaaaatgtggggggaatgggttgaataactcactcatattctctataanttattaattttatcaaatattacaaaaacatttttaacaaattgtatctcttgaaaaccacaggttaaaactggtggctttttgtaaaccattatgc

SEQ ID NO: 209127 - DNA, 376 bp, Glycine max
  unsure (1)..(376): unsure at all n locations
agcttgtcggtngagctgacctatcggctgcctttgcttttttatactggtgatccttaggctacttgtatatgtcgtgatagaacctgtttattatctaaggctttcgacttgaccccatgctttactaaattgaacaaatctacgcaaattaaaactcctacatctatcatgggtggcacggacgaatgcatgatgacttgcacatgacacatatgcaatttatgaacacgggagcccgggaaattgtctccttcttaaatacaacggcttgcggtaacatagtgcccgacgtatgtatttaacaaggtgacacagacccttcgatgatttgtctatatagggctgtcatacggtacccgagtgtgatgactat

SEQ ID NO: 209128 - DNA, 402 bp, Glycine max
agcttatagttatttaagagaggttataaagtattgttggagaacaaaagtgcttgactaaagatgctggtgacaaagatattctcaaagtaaaaatgaaaggaaaaagctttgttttaaatccattggaggatgagcaaattgctttttcagtaaaaaagaataacactaaattatgggacaagaaaccaaaagttgatgaagatcaaccaagttctgaaatagcagctctcacatcttggaatggtgctgctgaagcaaggttgccaccagcaaagggacaagaaaaatctgctttagagaaagtagctattgtgcagaagcatacaaacaagaagacacaattgagtgagaaagctgcaaaaattgagcataatgagaagtgtttaaagtttctgacaa

SEQ ID NO: 209129 - DNA, 436 bp, Glycine max
tagtataaagtaaactattaactaatgctgcattgtccttgtttttcccatcacaacttacctttcatggaaacttcaataaactactattaaatttccataaaattagaaccatatgcgagtgaaacgagggttctgttccaaacccatcatgagaatacgtctaattaatctccgtccttctcctctcagttcttatacacagactctctctaacacactcccacatactccgtacataaactacaggcactactagctaggaattatgatagaaaacaacgtaagaatgtgctttacacatacatggatatatataagtatggtattagtatatatatgtgtatataaatactgagagaaaaagtcaaagagatttgagtgataatatatatatacctactattccgtatgtaccacctggcgttgtattata

SEQ ID NO: 209130 - DNA, 169 bp, Glycine max
cacaaatcttttcgctttccaggagaatcgacgctcgtccataaattaaataaatgaatcagacttcttatttaagtatttgtatcaaccatgtggctctcagtgttgggcaatttatttttcctagttctcttttgccctactttctctccacgtccttattctataa

SEQ ID NO: 209131 - DNA, 184 bp, Glycine max
ttatcaagccatactcattccgcttatgcctcctatataactaatattatatacagttccggccgcccctcactgcacaattcatttttcaatgcttgagacgcctatctatgcatacaaatgggtgatctaaccaagaacaatcatgagattgacgctctactatcttttatcacatgatgca

SEQ ID NO: 209132 - DNA, 235 bp, Glycine max
  unsure (1)..(235): unsure at all n locations
gtcacctgcggcatgaagcttgtggatatggagacccatcatatgttgtctaggtggcggncgggcaatggtgcacaactaagttttccacatccacaaatcgcgtataaatataatattctctgttgcccacctccaactaagctcacgtactcccacgtagcccatatcctcgtttctctcaacaccggatccccatcaatcctcccaagcttccccaacatccaggtaattc

SEQ ID NO: 209133 - DNA, 429 bp, Glycine max
  unsure (1)..(429): unsure at all n locations
gcttctatactggtgtaccaaatgaccgctgccccaaccaagctatcttggaagaagtgcatcaacagcttgtcatccctagaatgcgcccctatcttgcgacaatacattatgagatggttcttagcagagcatccctttgtacctatcgaaatcaggtaccttgaatttcggggggatgacgacgtccggtactaagcaaagatcagccatgtccgcgaacggatagacgccaaagccttcaacagctctcaatctctcttcgatgagagtgagtttcctcttttcttctgctgccaggggtggcccttctgtggacaaaaatattggctgtgttgtgggctttctaagatctcccgtgaggttggactgnggtagtgtgttgtgcgccatcacctcaacggagaccggggagtacgaatcgatgtc

SEQ ID NO: 209134 - DNA, 371 bp, Glycine max
  unsure (1)..(371): unsure at all n locations
ctgtttcgtattacagtcacttcacttctccttgcctttgaacttgctttgganaaacgccccccccccaccgcttacgttgtatgaacactggatcattgtcaactgagactgcagactgcatgtgcacaaaaacctgagcgccatgatatagtaccatatgcaaatctgtcataattttgctaatccaaagagattgatcctctgccgccacaacggctacatactccgattatgcagtcgattgagcaacaacttcatgacttttataacaccaagagaagactctctaaccagcggaagtacaataaccagaggagcttctcataacacacctcaacctgccgcagcactatcagaatatccacgga

SEQ ID NO: 209135 - DNA, 213 bp, Glycine max
aattgaattaaaacgttcataatctgctggtaatcgattaccatatatgtgtaatcgattacacaaggcaaattttgaattcaaattttaatagctgttgtaaatcagttttggccactggtaatcgattacatcctctggtaatcgattaccagagagtaaattttttgtaaaagactttttaatttaattttcttggccaaaccttttgat

SEQ ID NO: 209136 - DNA, 459 bp, Glycine max
  unsure (1)..(459): unsure at all n locations
tggtagaactatcatcacatgacattntactggcacagaatatttttctttctgagcaacttgagattttaatagaaacacttggtaagttgcccaactgaacttgtctattngtgtcaacctacacatcttttcggttgcacggtataagttgtaccatctgtggtgaggctcatgaaataggccaatgtattcctagtgaagaacacactcaagaagttcactatatgggaaatcaacagagacaaggatatacttttcacaacctacccttcgacgggaaggcgacgcggggctcacatgtgcgtcttccaagaaaggaaaatgcgtggagtcgccaccaacgtttatttgaggaaaacgtctgaaaagctggaaaggtgtagtctacgaactttaatttgcggaaggctcgagagttttttttacgcacggngaagatattagcaccccacgcgt

SEQ ID NO: 209137 - DNA, 224 bp, Glycine max
gctgtgagcaaattcaaacgacaataagtttttactctgttttctgattgagtcccgtaatatatcgagacgctcgaaattgaatgttgaacctatgagccaattcaaacgacaaaaactttttactcggaggtctgactgagtcccctaatataacgagacactcgaaattgaatgttgaacctatgagccaattcaaacgacaataactttttactcggatg

SEQ ID NO: 209138 - DNA, 415 bp, Glycine max
  unsure (1)..(415): unsure at all n locations
actaagctaaacatncaatttcgagcgtctcgatatattacaggacttatttatatatnngagnnnaaagttatcgccgcangaattggctcacacgctcaacattcaattttgagcgtctcaatatattagtgactccatcagacatccgagtaaaaagttattgtcgtttgaattggctcagagctttaacattaaatttcgagcgtctcgatatattacgggactcaatcagacatccgagtaaaaagatattgtcttttgaattggctcagaggttcaacattcaatttcgagcgtctcgatatattatgggactcaatcagacatccgagtaaaaagttattgtcgtttgaattggctcataggttgaacattcaatttcgagcgtctcgatatactacgggactcaatc

SEQ ID NO: 209139 - DNA, 182 bp, Glycine max
tggaaaatcccaatggttaaaacatgaagacataagttatgcacctgcaattcaagttagaaagttatccaacgattaatgaattctagatgatggtttcaccaaaacaggttttttaggtcaaacttgaaatctcacatttccaacataggtcaatcaaactccacataacctaacattca

SEQ ID NO: 209140 - DNA, 379 bp, Glycine max
ttctcctcatatccctcttgttggactagacttagaccatatagcattattgtaacaacatatttaaaaccaaaacttaatccgcagatccctcatttaagactaagtttcaatcctgcttcataacctctaaggcaacagtacatttcccaatgctaaagtcacctaactatgcatacaaatgggtgatcagaccaagagcatacatgatttaagcactgaaagaagcattgaacacatgaaacacaatcaattagatattaaagtaattacatcaatcgttctttagaaatccccaacaagggtgtttagccagccattacaaaaaaaccctaacaataatgagattaagagtagagattaactgcttcttacacaa

SEQ ID NO: 209141 - DNA, 223 bp, Glycine max
  unsure (1)..(223): unsure at all n locations
agctngaaagaanattagtaattaatgtatgtaaagttagaaattaagttgggataattaaggttgattaatggtgatctagatttcacagaattagaaaaaagggcaattaagtcataagagtttaaggtggaaggtcttttcataaatgactatataactagtttaaaaatatattttagtttaactagtttgtgactaattaaagtgtttaattatatga

SEQ ID NO: 209142 - DNA, 434 bp, Glycine max
  unsure (1)..(434): unsure at all n locations
tattctttatccaaagaagttgagcacaatagcttgctgctaacatatatttggcttcagcaatggtcaatgtagttgagccttgcgtcttgcatatccatgttactaagatgccacctataaggacatgttccacttgtgctttttctttcaactttaccaccagcatagtctgcatcataatagcttataagtctgaaacttctactcttttgaacataagaccaagattacaagtttcaattagatatctaaaaatatgtttgactatagttaggtgaacttcccttggttctttttgaaatcttgtaaatagataaacactgaacatgatatcangcttggatgcagcgagatagagcacanaaccaatcattgctctatactaagtcccatccacctttgntaatttctcgtccaatccaaggtatgtg

SEQ ID NO: 209143 - DNA, 220 bp, Glycine max
agcttaacttctcatttaatatttttttttattgtgtaattggtagcagcaagtgtccttcctaagaatatttattagcattttcctaatggccctaatcttgttaaagtgaacaaaccagaaaaaagtttcacttattttcgtaataggactttagtcaataaactaattataagtttcacttgtttcataccaagttaagaaaattgtatctataatg

SEQ ID NO: 209144 - DNA, 446 bp, Glycine max
tataattcatatgaagagtggaaaataagaattgggaattaaatcctatcaaaattcaggaattcgttacatattttgttcataaataaaatctggttagaacaaaatgcatagcggtatatctttatcgtgagactgagaaacaaaaataaagaacaatgagcatttgttaagctataacagtgaaacacataggtctaaagcctttagcaacatgagagaatactaaaggattataaagaaactatatgcagataataaaagataaaacatattacagttttctgcaaatatcatccatagaagcaatcaacatcaggaacaaaagaagaaaatcattagtcaaatagtattttttttttataagcaaaagtattatttattagtcaaatagtattgattatacctttcattaaggctgtaagtttttgaattccaccatagta

SEQ ID NO: 209145 - DNA, 218 bp, Glycine max
agcttaaagatggaacacttacttggtgtttatgaataaaagcgcacaacggaatcgaagaatgcgaaaaatagagatcctagggctgcaaactcgtaaattccgtgggtatggcttttgaaaggggagaaaggaagtttttgaatgcaaaaacgtccccccctttcgtcacttttatatttaggtgcaagggttgctcgcccaggcgagctaacctg

SEQ ID NO: 209146 - DNA, 440 bp, Glycine max
  unsure (1)..(440): unsure at all n locations
tttcttctctgttntagaatatgctatgccataactttcttatatgttgttagtgacaaagaaataattattttcaatgaagggttcctttgcggcttaatgttgttttgtgttatttgaatcgcttgttggaagagcatagcacacagggcagctttgtgccttctggacgtgacgatattttgaacatggctattggaagactcgagcatccaagtcgggtacctgtggctgggacaggagttacagttagccagtactttggtccagcatcatgtcggtctacgacttcgtcaaactcgataactccagaacagttggctgatatcattagtaacttaaaggaagaatggcgaagagaggttgaataagaaaacataaaaagagaggatgggtggatgatgagggtanaatatgaaatacaacacactatggagaca

SEQ ID NO: 209147 - DNA, 220 bp, Glycine max
  unsure (1)..(220): unsure at all n locations
agctnttaataaaagggtaaattgtttttcttgtctccataatttttcaaaaaatttattaagttattgaactttttttctttttttttttattgaatccttgaactttttttaattacaggtataatggattagtgttgctgaagtactgcaacttcaattgaatctattgtaagttttttttttcttccaaagttttaactttctgaaaggaaaaaaa

SEQ ID NO: 209148 - DNA, 449 bp, Glycine max
  unsure (1)..(449): unsure at all n locations
tatctagacctggagacaagttatgaacaaaacatgtttattaaaaatanntggatcaacctgaatcaatggntctttaggaaataaaatggaatatggtattttattgttaatagaggaagagcgcctcccattaatcaaaaaatatactgtcaaaactgcatcaccccaatgtcggacaagtacattggcatggagtaataatgtccgaggagtctcaacaagatgcatatttttcctttcgacaatgtcattttgttgaggagtatgaggacaagaggattggtggagaatgccctacgctgacaaaaaggaagaaataacataagaaaagtattttttcacattatcactcctaaggatcttaattgtcttactaaactgagttttaatttcattaataaaagaagtgagaatggacaaaatttcatattgttctttcattaaga

SEQ ID NO: 209149 - DNA, 236 bp, Glycine max
gatccttaagtcacctgcggcatgcagcttagccatattttcttctacgtttctggcacaagaattctataactaagaaaaaatgcacccatatacaatcaaggcagcttcgttatctagattatttacatgtacttccaaggtgtatttgttacttacatcacacacatctccttggctaaatttacatacatgcatactcaaagcattttggggtaccaaaaattgcacatgtg

SEQ ID NO: 209150 - DNA, 382 bp, Glycine max
  unsure (1)..(382): unsure at all n locations
tgtgactggattagggcatatatttcgactnttttatgctgtctctacatacacaaaatagccccaccatcccaattttgcaaaatcatattcattcatcattggggaagttaccgtaacgtgtagagcgcatgtttgaacataaattgcaagaggatggggacaatgtggcatgccccattgcttcagaatacaacctaggcctaaggccttctcatacaaatcctcaacccaagaaaacaaggatcaaagcaaaccaaaactgtctcacagatataagcatgttctcacaatttagagtaccaaaagatgaagaaaacacatcaatgggaagcgaagaacatcaaggatggaatacttacttgttggagtgaatgataac

SEQ ID NO: 209151 - DNA, 227 bp, Glycine max
agctcttaacctcatattactagttattgatgtaagcgatatcctaatatagcaagattagcttattactcaagagccttaatacaaaaacatggggcttacataccaatcgtaaaaagagtgattaaaattcttaacctttgcagacaaccaagaccacgctttgaatcgaatctgctccaccctactatagaagtccagcttttcaccataaaaaattatcctat

SEQ ID NO: 209152 - DNA, 440 bp, Glycine max
taggacctcgtgcaaactaatttcatcctctatcactatgttatttctaatgagttctgacgataaattcattttaaattgtagtatgaagctaattctcttttatgcagtaaaaatgctcgattccaacgcgagcttatatattgttcaatctgctggcagattattgcatggaggaagtacattgttatagcagtgtgttaagtggaatttgtatgaaggtcaacccgttcatgatgcacaaataattctgtcatgcggtttggtgaattatagaccacttcaattggggagcattgcagtttgagtgggatgtgggttttgatcgtgctgctatcaaaacagatcacgaattatttgtatctgattgttttttccttggatattacgtacttcttgtgctgatgcaatggattatatagtaaaagttctttagcttc

SEQ ID NO: 209153 - DNA, 183 bp, Glycine max
aatccatttctaaagaattaatgtatacatagccgactacacagattcatgcatggcaacttattaatttcctaggaaatcacatctatattttcattcctcttaaatataattcattcagaaaagagtataaattctaattggccgaatgcttctatactcgagcatttcaccaaaatccaa

SEQ ID NO: 209154 - DNA, 391 bp, Glycine max
tgcgtgcagatcttattaggaatctaggtaatatgtgtaaccctgagctacacaaagctaggctttagtgccccactaatcaaggagtatattgacgaggtatcaactcagttgagaatggtctgcaactctgattcggaggagcttgcattggaagaaaagctttctttcatgcatgaaacgagacatgcatttgggaggactgctttgttgttaagtgggggtgcttcccttggagcttttcatgttggtgtggttaaaacactggttgaacataaacttatgcctaagataatcgctggttcaagtgtaggatccattatgtgttctattgttgccactaggtcttggcctgagctataaagcttttttgaggattcattgcactcac

SEQ ID NO: 209155 - DNA, 168 bp, Glycine max
gcaactgctgacaaagaatactactaatggttatttttggaagcactgtgtcaaaatttgaatcaatataaaaagatatttttattcgagcaggccctttttttatactttctaagagttatatatacatatatatatatatatatatatatatatataccggggaat

SEQ ID NO: 209156 - DNA, 459 bp, Glycine max
  unsure (1)..(459): unsure at all n locations
tactcaagcttgatctcgagttttcgaagntntataacaaccttagaacaatattcttgtccttcatnnaatngnntttgggtttaccgaccacagtcaacaaagtactttcgacacntattatatgtngattcgcccccccccccacgcggatgttgcgacaatccttcaataccttatttacacatttctgagaggggtggtttgtcattgcgaccaatatctacatcacttctttatcataagtcatggtccatttttcctttgaaatgcgatcaatccatgtacctatggctggactcaactgacgaaattttattaaattttgatcaaagatatgcttgcaaggagtgtagcctgcataaaattagttagcacaaacaattntaactatatatatgatacttaaagtaacttcataatgccccattaaatcttacccaacttcttcaacatttc

SEQ ID NO: 209157 - DNA, 184 bp, Glycine max
aagtatgatcaataagaaaatctcaatttctcatttttataagaaaattaaaattctacaatttttagttatttaaaattctgttttaaaattctaaaaatttaaattattcataaaaaaattcaaacaataaattttagattaaaaaaatttaaattttttgataaattatttttttcagtta

SEQ ID NO: 209158 - DNA, 318 bp, Glycine max
  unsure (1)..(318): unsure at all n locations
tcagtcgcacacctattngcaggatgtgttgtttatgatttattctcacttcactactataatcataacattgcggattgtttttaatagaagctaggaacaacagtttccatatcgcactanttctttgtccgatatgtttattcacgaaaatggattgagagctcaaaaactagtaacatcgaataataataggtcacttaatattctttattacaacatgtgatatgtttattctaaaatataaaaaaaacactaatacttttaaattattatattatttaaatttgaacatttctttaaaataatgctagcata

SEQ ID NO: 209159 - DNA, 224 bp, Glycine max
agcttccaagcctgaatagaggcttaaggtgttgttgctgtcatgccccaaattatgggtcttgcgatgaactcgctaagtgagcctgcctcgctaagcgagttcatacattttgatgaatttctgggtttcaagatgaattcgctaagtgtgccttgttccgctaagcaagttcatcaaatttgtttaaatttctgcattttgtatgaacttgctaagacatt

SEQ ID NO: 209160 - DNA, 466 bp, Glycine max
ccccaaactaagctttggtaaaatgtgagatttgtagggaaatgggcaatgtttctttgttttgttgtgacactcatctaagacagttagagtttttagggacaccaattgatagggaatggaaccttgaacgaaggggaacatccgactaggctctgtaataggataagatttcctagtgaaagaggtgtggcaccatcaaggtaatttctagacaaattgagatgagtgagtttgggaagattaccaatttcaggtgggattgtcccttttagtccacttcctgagacctctagccattctaaattcttgaaagcacaaaggtttagtgttgcaaattaaatcccttgtgtagaattcaagtatctgattctagttatggttccagcatcattgcaagatataccatcccacagatattgtgggtatttgattgcccttgaataccctttacaaatagctcaca

SEQ ID NO: 209161 - DNA, 440 bp, Glycine max
  unsure (1)..(440): unsure at all n locations
tttacacttgacagtagttntaagacaagctttntgattttattctatgcacctcacaatgcatgcacacatctacttttcaaagatgtttacactaaaagagttaagtagaaatgttaatctccacccaatttgtcatccttacaacatgcattgctagtggtttgtcataattaaaactaaggatgtagactcaacacatgtctcaactttcaacttgttgcatctttaaatcctatcaacattaatcttctaatgagccctttatgtgtgtggctacacattgaagatgtgatgttgtcaatttcagtcttacaatgaacccactttgtatgtggttgcataaggaagacaagatgttngtcactgcaccattctaatgttgctaactcatatcttcagaagaaccaactatgtttgtcactgcatatggaacacat

SEQ ID NO: 209162 - DNA, 223 bp, Glycine max
agctaggttcgaggtacttacccgttgtttatcgaagaacgatgaagaacgaatgaagaacgtcgaagaacggttgaaacctttgcgagattcctcacggaaaacgttacggaaacgtttcggaagcgcctcggcttagattttcttcacggaaacaatttttccaagcaaattcgaaagagagagaagtgcctaaggggctggacccttttcttcttgcatt

SEQ ID NO: 209163 - DNA, 425 bp, Glycine max
aggcttaagacaagggagtatgattgttgaagaatatagaaaacaaatggaactactccttttaagagctggacttaaggaggaggaaagaacaagcataactagcgtcttcctgggcttaatatggaagtgagggacaaggttgaactccatccatatagggacctagatgagctagtccaactttgtataagagtggagcaacaacttataagaaagccttcttcaaaatcttatagctttcacttttatccaaggaaggaccaagcccaaggaaatttgggggctgcaccttcaaaacccaaggaagataagggtaagaccatagagaaatccacccttaagactagttcctaagaaaggactagcaacatgaaatgcttcaaatgtcttgggagaggtgcacattgcctctaatacccaac

SEQ ID NO: 209164 - DNA, 187 bp, Glycine max
ttggaatgcatgaattgtgtaaaacaaacacacactaaactaataggttttaaaaacattgtaggttggggtgctgatggaaaagccatcatagcaatactaagccatagaaatgctacccaaaggactcaaatcagaaaagcacatatagccgaatctctgccaagaggatctcatcaaacgcctt

SEQ ID NO: 209165 - DNA, 466 bp, Glycine max
  unsure (1)..(466): unsure at all n locations
ctatgaaactcagcttttaagcaattaacagattatgttaccaccagcatgtattcttataataactaaaaatgaatttgcactttcaaaattttgtggacaggctattcaaacccacatttagtgcacaaaaaaatcctcccccaagaatgcaatcttataataactaaaaatgaatttgcactttcactaatgatccaggcacatagtatctattaaacacaaaatcaactttttaaaaaaatacatagcaaaagaagaagaaaaatcccttcaacaaagaactgagaaattgaagtgtcccaaacaaatttgagggggaaaatttaatgcgtctacaacataatatccatttaacacaaaatcaatattcttttcanaataaacctaatcagcaaaacaaaacataaatcatagcaaccaaaacagagaaatagaagtatccaaaacgaaatcgagagggtaa

SEQ ID NO: 209166 - DNA, 218 bp, Glycine max
agctagcacagagaagaatagggttttattcataagctatataacaggtcaaggaaatctgcagcagagggtacttctatagtaagctaccacctcctgagacaccttttccttgttacctatcagcaccatagttgacatttaacttttttctagtgctcaatgcacactccaaattataaactcattcaagttaaatgttattgttgttgagcaat

SEQ ID NO: 209167 - DNA, 449 bp, Glycine max
  unsure (1)..(449): unsure at all n locations
taaccaacatataaataacaaaatataactaaacagtatttatatatacttaattaactnggttaaaccttagcaggaaaaaccattgaagcaacaaaataataaagcataaattgtctgatacgactgtatttgagtaacaacattaataaaaacattaaagaaataaacaaaaaagaggttgtgtccatggtgtctgcacattatcttcagcgggaaaggtcctcatcatcccatataacttcctttctaaatacaacttcccatacatgtttgtcaaatctgaagaagaatattacatcatctctaggcattaaattattttcagagagatattggaaccatggctgggcaacagatgggacaccatcatgcatggtgattttccattgttggcgtttgccatagcctctctgaacaggaataattntntgtgatctaaacaaaaa

SEQ ID NO: 209168 - DNA, 222 bp, Glycine max
  unsure (1)..(222): unsure at all n locations
agcttacaccatataaaaacccatgtattcttgcgaaccaattactgcccaatgaatgagtaagtgggtttgacgtttcttanagtggaaaatggcgaatatatttatgcgaagaatatgtatttggttacaaaatatcaataagtaattatatataatatttttcagtaaaaattattattttatattttaatcttgacaataattaatttgattctcatg

SEQ ID NO: 209169 - DNA, 451 bp, Glycine max
  unsure (1)..(451): unsure at all n locations
tctgaacaccaaaatcatcaacaacacggtgagcagtatattataatgaagatgatgacgaaacagaacggtgatcctataaaannnantcactcactaacttgaaggccaacacctgtttggggtatcctcttcttgctcccacccctgttcttcttcttcttgttcttcttcttattgntattattgttattggaattggaattccccgtggtgccctcaatcacgcacccatctcccatcactggcggtgcagaaaagagtgaaaatttaagggaatgtttgattcttttttgggtttgtcaaaattgttagggtagtaacataaacagagagagaaggggtagtgttcacgtcacaggtgtcctcaaggttatgatcggacagagacaggtgtactctctgctttctttctgcaatatacggcttaccctttttatggaatcccaca

SEQ ID NO: 209170 - DNA, 219 bp, Glycine max
  unsure (1)..(219): unsure at all n locations
agctttttatattcaatagtattattattaatccntggccacctcatggactcctctaaagacaatagcatcatttcttgcactgaattgttgggatttggaagccatcttcttaatcaaattcctagccttagcaggggtcatatcaccaagagctccaccactggtagcatcaatcatactcctctccatgttgctaagtccctcatagaaatattg

SEQ ID NO: 209171 - DNA, 442 bp, Glycine max
  unsure (1)..(442): unsure at all n locations
ctttagacaacaccatggctgcaacattcaatgtcttattttttctaaccttngacgcccttgtttcccaaattcctttgatctctcactacatcaaccaatacatgttcatctcaaaccatgcaaataacttgtttccttgttactttttttttttctgaaacttttcttttgcctgtcattttttcattagatgacttcattgaagttaatgtcacttatttaacttgtaaataacaaatattagatacaagctactttattaatttgactagtccactacacaatcatagaaaatatttcaagcaaagtttttatgcaaaaacaaagtacataaaagtctatcttcaataacaaagtacaatagtaacaaagtacacaaagtttgtctgccatatagcaaattacatataaaaaagaactacctctaagcaaagtttct

SEQ ID NO: 209172 - DNA, 221 bp, Glycine max
agcttactgcatctctgtccaaaggaccttattgggtcaaagacttgaccattgcagcagttggtgactactttgttcttcatctctctcctaatagtacttctaattccttgtggtggtttgattttgttgtacctctctctgaacactcttgagtgttgattttgccagagtttgggcctataaaaaattattggtgatattgaaggacaaatgaataa

SEQ ID NO: 209173 - DNA, 424 bp, Glycine max
tcatgacgttgaatcaagattgattcaaggagtgttgatgattactaagatgatgacaaaaagcccaagagaatgagttcaagattgaatcaagaacacttcaagaatcaagaggaaatttgattcagatcaagaatcaagtttcaagatttaagtttcaagaatcaagaatcaagaataatcaagttaaagattcaagaatcaagaaaagactcaatcaagataagtactaacaagcttctcaaaacattgagtcgcacatgaatttttcacacaaccttttaccaaagagtttttactctctagtaatcgattactagtttattgtaatcgattaccaatagcaaagattggtttcacatagctctcaactgaatttacaacattccaattgagttctaaatggtgtaatccattacaatga

SEQ ID NO: 209174 - DNA, 227 bp, Glycine max
  unsure (1)..(227): unsure at all n locations
agctntcttgaganaacttccttgagattctatatcttagctacatacacccctctaataactaagctcacctccttgagaagattcctaaagaagctagagcttagctacacacatctctctaatagctaagctcacctccttgagatgagaagctagagcttagctacacaccccctataatagctaagctcacccccattccaaaaatacatgaaaatacaaat

SEQ ID NO: 209175 - DNA, 456 bp, Glycine max
  unsure (1)..(456): unsure at all n locations
ttgagccanaatcctgactcaccataaaccttgacccattgtgataatgtcaatccttgccctcgaaagcgaaaagaatagaagggaaatttccaatcaaagaaaaggaaagaaggaagatttccatcgcgagaaagcataaagaaaagaaagaaaattcccaatcaaagaatgggagaaagtaaaaaaggaagaagaagaaggaaggaaagctcctgatcagggatcgaaggaaaacagaagaaatgtgcagaaaggtctttggaccggacaatatctgaacaatacagaattgtcaccaaatgaacaaaaagaaggaaaggaaaccacgacctanaatggtcttctccctttgattaccaaccaaaatcccgtgcgctagcgactntttcgccccgcactatacaaaaacagaanaagaanagccaacaaaaaaatcaaaagccaaaaacacac

SEQ ID NO: 209176 - DNA, 206 bp, Glycine max
acgacaataacttttttctatgatgtccgattgaatcgggtaatatatcaggacgctcaaaattgagacttgaactctctaagaaaatgaaacgaatataactttatacacggatttccgacagattgccgtaatatatcgagacgctttaaattgaaaaaagaagctcgtaggaaattcgaacgacaatatgtttttactcatat

SEQ ID NO: 209177 - DNA, 437 bp, Glycine max
  unsure (1)..(437): unsure at all n locations
ctaagcttctggtttcaattgcaacgtctcgatatattacagaatgttatttgacatccgcgtataaagntattggcaattcaattntctcagaacttcggatctaaattttgagcgtctcgatatattaccggactcactccgacatccgagtaaaaagttattggcgtttgaatttcctacgagcttccgttttcaatgtggagcatctctatatattaaaggactctaccggacatccatgtataaagttattgtcaattcaattttctcagagcttcagattaaaattttgagcgtctggatatattacgggactcaatcagacatccgagtaaaaatgtattgtcgtttggaattgatacgagcttccgttttcaatttggagcatccctcgataaattaccacactctgttgggcatccgagtaaaaagta

SEQ ID NO: 209178 - DNA, 245 bp, Glycine max
  unsure (1)..(245): unsure at all n locations
ctctaagncacctgaggcatgcaagcttattcaaacagggtctaagaccttattattatatcttcaacaattactctatgaaatgttcttaacacaatagatttgcaggtgttgctattctacacattccataacacaatacaaaaacagatctttccacaggattcaagttgtaaaataacaattctaactgagaaacatgaaataccaaggcacataattaacgaagctagttcattctttca

SEQ ID NO: 209179 - DNA, 437 bp, Glycine max
  unsure (1)..(437): unsure at all n locations
cttgatgtttcctcagctctttaacaagcgttgaacaatatacttgtnnntnatntgaagatctttgggcttggcggtcanantnaacatagtactttcagcacatactgtaccttgattccccatcctgttatgggaatgttgcgacaatcctttaaaaccttattgatacattctgagaggttggttgtcatgtggccatatcgacgtccttctctatcataagtcatcgtccattttttctttgaaatgcgatcaatccatgttgctatggctggactcagttaacgaaatttttctaaattttgatcaaaaatgtgtttgtaagaagtgtacgctgcatagcaattagtatgaataacaattntaagtatatatgagagttaaataaaagtgaccatcacataagaaatcttacccattgtcttcaacatttc

SEQ ID NO: 209180 - DNA, 449 bp, Glycine max
  unsure (1)..(449): unsure at all n locations
ctttcggaaggatcaaaaagtgccttatgaagtgctctttcttatgccaccagtacctggaaggcctctcattttgtacatgacaatcttggacgagtcaatggggtgtatgctggggcaactgacgctccgggaagaaagagcgcgttgtttactacctaagtaagaagttcacgacctgtgagatgagttactccttgctcgaaagaacgtgttgtgctttagtatgggcatcccatcgcctaaggcagtacatgctgagccatactacctggttgatatccaaaatggacccggttaagtacatctttgaaaagccagctctcacgggacgaatcgcccggtggcaagtcctgctatccgagtttgatatagtctacgtcacccaaaaggcgataaaaggaagcgccttagcagattattnggctcaactgcctcttaacgactac

SEQ ID NO: 209181 - DNA, 450 bp, Glycine max
  unsure (1)..(450): unsure at all n locations
taattctaatcaaacttctgaaaaatgctggaaaagctattgtttttgaggncaanacaccgagcagaggatatgtgctatattgagctgttgaaaggcagaaattttacagaattttnttgttgactccatcttagaaaaaagagaaattatataaatacgaatttgaggaatttttaaatatttgtttcatattgcgattttttgtttttttagcttttctttcagtatattgtaagagatagtatcatcgatccggttaaagatgaggtacttagcccttctaagttttttgaaaaataattatttaattttggattttctcttataaattataataactgtatatgctaaaattataataacttgtttttttaatgaaattatcttaaccactttttttcgttacactttcgtaattaatatagatattcatttataaaattaata

SEQ ID NO: 209182 - DNA, 216 bp, Glycine max
agctttgcatatccttagataactttttatagtaccagcgaggcctaagaaacctctcagctgcttgatattgagtggtgtaggccactctaaaactgcctgcaccttaatagcatccatagcaactccttcacctgaaactatatgtcccaagtactctatctccaatacaccaaaagagcatttagacaacttagcaaacaaaacattttcttt

SEQ ID NO: 209183 - DNA, 457 bp, Glycine max
  unsure (1)..(457): unsure at all n locations
actataaaactcagcttcaaggtttaaccgcctgagatctttgtcttaacacattgtatggtacatnctttgtggacaagtagagggtacatctacttangntattgactgagaacaagagagggtacatctcttgcgatacttctagtggagggtacatccactaggttcaaagagaacaagggagggtacatcccttatggatctttgcttgtaaaaggatttttacaaggatgaaaataaatctcaaggaccgcaagtcgcttggggactggatgtaggcacgggttgttgcaaaaccagtataaaacctcttgtgtgtttgtctctttcttccctactctnttactttccgctgtgcattntaatttctgcctttacttttggttaagtttctcttctactccttattctcttaacaacacaagtaaaagccttagaagagtataattttaat

SEQ ID NO: 209184 - DNA, 165 bp, Glycine max
acatatgttaggacgatttcttaaatttactttcattttattggtagggtatattttgcgaaatgagaataaatgaaaggagaaaaaacataaacttaaaggtctcctctttctgattgattggactcaaataaaatgagataacaaagaggggaaatgaatgat

SEQ ID NO: 209185 - DNA, 426 bp, Glycine max
  unsure (1)..(426): unsure at all n locations
tagtaaccaaacactntngatataagggnncttactatttttttaatgnnanntcagnttcattatctcttttttgtacttattttcattgattgtgacttaatcatccatattcatctttgcttacagtttagacattggaaaatatttatctctaaagaactggaataaagcatttagataatttatctttagggatagaatgatgttatttagtctattttatgcatctatgcttataatgtaatttagctaatttatctcttaagggattaggggaggaattaggctcttctgtgtgaggaatcatgattatagtatatgagtagacgtaggtgataattgaaataatgttgaataaagaaaaatcattgatattgcatcaagagtagtttcgataggttaagccccaaaatattcgtattc

SEQ ID NO: 209186 - DNA, 261 bp, Glycine max
cttgcaccgggccgtggattcgtaagactgttttatcttggcggctacgtttacgttggaccgcgtgggtcgtcgtccgttgttattgtctagtgtcgggggggtggggccctgttccaacgcttgcgatcagcctcactgttattgatcattcggagagggaaataatgtgggccgttggatcgagcataaccatggtgttggcttacgtggccacgttcttcatcggtgcgggtcccatcacgtgggtctatagttctg

SEQ ID NO: 209187 - DNA, 221 bp, Glycine max
gctgctctaaattacattgatgtttgttttattgtatgaggttgtctgccatttttgttttaagagtagcattccttggtaaaactaactttccaaatgtttgccttcgcaggaaatggccccgaggaagcttgcctcaaagaggtccaggaaggataaggcggccgaagggactatttccgctcctgagtatgacagtcaccgctttaggagcgctgtac

SEQ ID NO: 209188 - DNA, 429 bp, Glycine max
  unsure (1)..(429): unsure at all n locations
tgtagaatggctagacataatacatggcggggttgggttgttttatgtataaagggatgccccacattatttccatgacacaaatgcaaagatgatgatttggaaattttatgcaaaactggcatgatccacctatgcggacactcaagtgtcaaatttttatggtcatgtgatgctagggctcangattcatttcctctattttaaatcaacccaatgtttccaaaatatgttcttttatcaatttgtgcattcatccgagtccattttgggtactcgggaaaatttcacagcattcacccttcaggtgtatacacattntttcaaaaactagttatgatcagtgaattttttcaaagaatagttggaagtcatctcttttaaaagcatgttggtttttcagctagacaacttaattttcttntttct

SEQ ID NO: 209189 - DNA, 224 bp, Glycine max
  unsure (1)..(224): unsure at all n locations
agctntatacatttcacatgcatcaaagtatatttcatatgccatttgccggaagctagttatcctttccttgataacttcaattttttattctggaaagaattatttgaagaactcgcctttgattggctcccataaggatagactatggtgtggctgagaattaagctgaaaaagtagcatcttgatgtgattgtctttgattctgggtattcttactaatg

SEQ ID NO: 209190 - DNA, 393 bp, Glycine max
  unsure (1)..(393): unsure at all n locations
atttactcaaaatgtttttggctgtaactttaataaaaaattctgtctgtgttcagattggattttgtcatctttgattctttgtaacaagtaggggcagtgttcatattttattttggtttaataatgtatatgcttctttactgttagtgagtccagttttaattatcatgttacatgactattgctatttgaagatagattccatgtgtgacaagttcttaagcatttgtaattaaactttggttatggctacaaattgttatagtgtataaccaattttaaataagagaagtgataagaatcatgtatttgattttttattgcgcttgcaaattgtttattgcgctgtggaagatcattnttaatgtagaatctacctatattaccaat

SEQ ID NO: 209191 - DNA, 279 bp, Glycine max
gaagtcatgacatgctacagagatgaataaactaagggatctcccagagaagcttgcatcttgcacatggattcccgaaaaggaattcatcaagatctccacaatgttttccaaagttatctatgtgaataatggaacgagaggcacaacattgtgagggatgatgatgtttcttctatatttttacatctttcattcatgtcacttgagctgcctcaccaacaaagtgcatactatagtggcatgtttctgctccactatgaggaacgtattgtggaa

SEQ ID NO: 209192 - DNA, 183 bp, Glycine max
ggtaggagaacaatcgacaacaacacacgttgatatggtggaagaagaagctcaacaagagctaactcctcaatggaacccttttgagtcccttatgattcaaaggatggatgctatccttcatctccattaagagcatcaagccaaagttcacagctccttagagaacataatctaggctta

SEQ ID NO: 209193 - DNA, 455 bp, Glycine max
  unsure (1)..(455): unsure at all n locations
tcattaaccccaaaactccccccaacactcaaggatgattgtgttcattatagggcacaattttgcagcccccaagcaaccatttttgtgctttgcttccattntctgcatncttggtcactnnnccaaagcccccctcgaaaaagcttcccgcgaaaaggtccaagaaggacaccaccggagaaggctccagcgttgcctcgcaagctgacatggacttcgatcagcaccgattccgaagcgctgagcatcagaagtgctttgacaccatcaagggatggtcattccttagagaaaggcgggtccagctgagggaccacttgtgatacccgtggctaaattcgaccaggaaatagtcatagagttttatgccaattgtcgcaacatgcccttttgccggcgtgcgaggcgaggctcacgggtgcgtcttccanaggaggaaagatgcgcggagt

SEQ ID NO: 209194 - DNA, 224 bp, Glycine max
agcttatgttatagttttctaagagatataagttcatcgaaatttccctcatcttcctgatttgattcagaaccctcagaagcgatatcttccatcagacatatgttggcttcttcattgtcttcatcggatgaggagtcatccaggtcttcccacatgttcataagatccttcattctttagacttacaaaagaattttgtatcttgacttttctctagattt

SEQ ID NO: 209195 - DNA, 430 bp, Glycine max
  unsure (1)..(430): unsure at all n locations
cgagaagaaatcacatgtttgtcatcatataaaaggtggagaatgngaatgtatgtatacatgattctgatgatgtcaaanaaaaatctaacaaggctgtttcaaatgataagcntctgcttcagaataattcaagattgcttcaacaaacaaagccttgtttcaagattcactaaagaccaagccttgccttaaaacaaagtgctttcaagacatgcaaggctctggtaatcgattaccaggaagtgtaatcgattaccagaagacagggttgagaaatagctgttgaaaaaggttttgaatttgaattttcaacatgtaatcgattaccatatgtctataatcgattaccagcaacgaaactttggaaattcaaattcaaaagtcataacccttcanaatataactgtgtaaatcgatacacaaacat

SEQ ID NO: 209196 - DNA, 220 bp, Glycine max
  unsure (1)..(220): unsure at all n locations
gcttacatgagaagaggcgagtttgttatagcttagnctcacacacctctctaatagctaagagcacctccttaagatgagaagctagagcttagctacacaccccctataatagctaagctcaccccatgacaaaatacatgaaaatacaaaaaaagtccctactacaaagactactcaaaatgccctgaaatacaaggctaaaaccctatactactag

SEQ ID NO: 209197 - DNA, 427 bp, Glycine max
  unsure (1)..(427): unsure at all n locations
gaganagcgtggaagagtcagtcttcctacttttgtttgttgaccacagagtggtacctggagatatgtcgcgggagtcaggagaccttggggacgtcaggtggggtgctattggtgaaacaagcttgaccaatcccgacccaacccgggcatagttagtcagtgagaacctgtgacgtacctaaacaggcgagctcttggcagtcaaccaataaaagaacaaagaccacgaagcaatgaggcttgtgtggcggctggccagctttgaatcttgagtggtatctggaaattggcatctggtaatcgattaccaagggtgtgtaatcgattacagggcttaaaaatggagacaggaagttaaaatggcctctggtaatcgattaccaagggtgtgtaatcgattatagggctttaaaatggagacaag

SEQ ID NO: 209198 - DNA, 216 bp, Glycine max
agcttcttccagttagatcctccatgcatcttgctcatgtttctaccaagcctttaactcctactcaattcaagactctagtttccaagctgggaatgatgagcatctattcccagcttgaggggggctcttagccactatgagaattcgagttgctgctactgcatttaggatgctactactgctgcatacatttcatttatccttcatttcatt

SEQ ID NO: 209199 - DNA, 463 bp, Glycine max
  unsure (1)..(463): unsure at all n locations
gacctataaaactaagcttgcgactatgccacanatctcccatggagaagacggttcacatatcagtagttcctggtcctggcttcagccacttagtcccaattcttcaattctcaaagagacttgttcatctccatccaatttatgtcacatgcataattccctcagtagggtctccctcatgtgcctcaaaatccatccttgaaactcttccaccaaatataacctctatttttcttcaaccagtgaaacctgaaaacctaccacaagaggttgctatagaagcccaaattcagttcacagtgaccttctctctgccatctatacatcaaaccctcaagaccttaacttcaaggactcactntgtggccttggtggctgattcttttgcctttgaggcattagattntgctaaagaactcaacatgttgtcatatatttacttccctacatcagcaacaac

SEQ ID NO: 209200 - DNA, 221 bp, Glycine max
agcttttaacaatgtatctacagattattattacactgcattatcaataaaatatttaaacaatgacatttggttaaggaaaaacttaagatgaggatatattaggacaattgtttctactatgaccatgtcaccggcaaagtccacatttttttctacgtggtcgttcattttcgtcttcgtccatcttagtaagaatgcgagttgaaacgggacgacct

SEQ ID NO: 209201 - DNA, 463 bp, Glycine max
  unsure (1)..(463): unsure at all n locations
gcacaagaaactcagctgtaaaataatttttttagtagacttacacttattttcaaataagctctcattntataagaacttatagaataaatgcttagttaacttgtttaccaaaacatgccaaagtntnacttaacgcctacaaaggaagctataaagaatttaaaaggtcagtcacttgtaatttagtaaaaagtcatataaagcttgtacattgttgtttccactaaaagctagcaaagatgttgggctattatcaacataatgaccttaatcgccaagtctgtgttatttcaaatagcaagcaccaattaatataaattatacaaagagaagaaaaaaatagcactggaattaattgatagaaaaactcacagaacaccataatatgataaggtagccatatttaattgaaggcacaaaatggagaatagaaatngaaggtacccatatttaattgatt

SEQ ID NO: 209202 - DNA, 221 bp, Glycine max
  unsure (1)..(221): unsure at all n locations
gcttatgaagctagaatgaaaatatnttatctgtctctagagcaaacatttcaatctaaaattaatatctctaaaaatgatggagataagaaaaataaccacagtaaatttcctaaaaaaagaggaggagcatttactaatcgtggtaaaaggagcggaaagcaatggagtaataatgcttcaagctcctattgcaaattatgcaagaaaaataatcatga

SEQ ID NO: 209203 - DNA, 451 bp, Glycine max
  unsure (1)..(451): unsure at all n locations
tttgaattgttacctccatttacctcgcttaggttttatgtgtatttatnnggttaagacaactttcctcaaaatttgagggagtttctttgatagataatttaaaaggtaagaaacaacaatcaccctcaaattattaaaatgttgtgttaaaaaaagagagagaaattcaaataagtgtgtgctgttaaaacaaagtcaagtgaaaggctagtgaatggactaagtggattgaaaagacaaactgggttagtctaggatttgtgctctcttagaatttaagcctttgaatcctagaaaaaccaataattnttgtagccaagcctcactacaagcctttgaaagtccttctgattctattcatgtatttctgactttatggcatgagatgaagtacatagattagaaatcttgcaggttgttattgcttaatagcctaaacacttgagct

SEQ ID NO: 209204 - DNA, 216 bp, Glycine max
agcctttggaaagagaaactctaatggctcttataggaagaccacgacctaagcacagttctgaggggctttatatggcatccatactgagctcaatctccgaataggtgaaaggaatcgtggcgggtcaaaggcatgatcttgaacgacgagctaaaggttcgccttaggtcgaaaagaaatttgtcccaacagctaagcgatactgaagggaat

SEQ ID NO: 209205 - DNA, 445 bp, Glycine max
  unsure (1)..(445): unsure at all n locations
ntntgtacaggcaatcaactcagagtgcttaaatgtttatagactggaattaaaaaaattgaaatataatgcaaactaaaaagcaactaaataactggtaaactaaaatgttcatgcttgctaaattaaactaaacacaatttaaacaactaaacaaaatttaaacgtcctgctcatcctgtggctgatcttcattaagatccagtgctggagttgctgatgaatcttgaataggctgctctggctccatgactggtgcagatggctaggtttccttatgaacatgtgcaggagatggctctggtatctggtctaaggaagtctccttctcctgagccatgtgtacatatgcatcaaaataaaagggctcaggaggagtgagctcatcnctcccctctgctgctgctggctcctctggtttaagctcctgcgatgtggagaacac

SEQ ID NO: 209206 - DNA, 164 bp, Glycine max
ttgaagaatctgaggaaaaacatgaccactcttgctcagacttggaacattctttccttttgtaacctcatccccacttcccacacttttgatgtaactcttgacaaagccaaacttatttatggcatcatcatgaagatggacataaatatggggtacctcat

SEQ ID NO: 209207 - DNA, 445 bp, Glycine max
  unsure (1)..(445): unsure at all n locations
ntttggaaggatcaagaagtgccttatgaatcctcttgtgtcttatgccaccagtacctggaaggcctctgatgttgtacatgacaatcttagacgagtcaatggggngtatgttggggaacatactaatccggaaagaaagagcgcgttgtttactacctaagtaagaagttcacgacctgtgaaatgaactactccttgctcgaaagaacgtgttgtgctttagtatgggcatcccatcgcctaaggcagtacatgcggagccatactacctggttgatatccaagatggacccggttaagtacatctttgaaaagccagctctcacgggacgaatcgcccggtggcaagtcctgctatccgagtttgacatagtctacgtcacccacaaggcgataaaaggaagcgccttagcagattatttggctcaacagnctcttaacg

SEQ ID NO: 209208 - DNA, 220 bp, Glycine max
  unsure (1)..(220): unsure at all n locations
agcttctcaaagaggtgagcttagttattatatgttgtgtgcagctaanctctagcttctcaaggaagttttctcaaagaagcttctcaaggaagttttctcaagaaagcttcttaaggaagctaccaattctataaatagaagcatgtgtaacacttgttgtaactttgatgaatgagagtcttgtgagacatacttcaaaggtccacttctctccctc

SEQ ID NO: 209209 - DNA, 363 bp, Glycine max
  unsure (1)..(363): unsure at all n locations
ttgatgatatcaaaaagaatntacttgacaaagggggatattttatatcatgcaagcttgatgatgtcgagaagaaatcacatgtttgtcatcatcaaaaagggggataatgtgaatgtatgttaatgacctacatgatgtcaaagaagaattaaacaaggctgcttcaaatgataagcatttgcatcaagaataattcaagattgtttcaacaaacaaagccttgtttcaagattcactaaagaccaagccttgccttaaaacagagtgctttcaagacacctatttataggcctntgatggccattcacaaatccattgaaaagatgtgactgttggaccttgtgcnacataactcaaaaa

SEQ ID NO: 209210 - DNA, 220 bp, Glycine max
  unsure (1)..(220): unsure at all n locations
agcttctacgaagggcatgggtatntctattttttctggaaaatctaacaatctcgctaaatgacggtctttctccttctttgaaggtaccacaggatatggtacttccataccttcattcatagctttatcacttctactcttctcttcattctcattttttcatctttttcaatttttttttattttctttatctttttctacttctttttctttatc

SEQ ID NO: 209211 - DNA, 431 bp, Glycine max
tacgtgaaatcaagtgcatccatctccctaagaattctctcacgaggtggaggttgagccatgttctcagtatgaaaattagtagttgaatgctcaaaatcagaatattcagaatcaccactgaacgtactcagaatgctcaaaatgcacagaatgatcaggatgcacaatatgcctaactaatctatgaaaggttgtatctatttcaggatgaaagggttgtaaatcacctagattgcccctagttatgcactatatgcagcaaataatgtgttctcaaacaagcaccaggggagggttaaaactacaactatagtcaaatgatatccaaatgagctgaaattttgtgagcaacaccctataatcatgaaaagatagcacaaaaaatttcaaacaaaaattcaaagtctaactatgaaaactacttaagc

SEQ ID NO: 209212 - DNA, 213 bp, Glycine max
aagacacagtatcccaaatcattttgatttggcacgaaggacctctatatatgtgtgtctgatttcaaaaggcaagagagagatattccaagagaacttcattgtcaaatgctttctcaactactcttgggcaaacacttgcaaatttattgagagttcatccaggaacttcgaattatattatccactctgaaggagagaaatctttctgtt

SEQ ID NO: 209213 - DNA, 450 bp, Glycine max
  unsure (1)..(450): unsure at all n locations
aaaactaagctgaaaaggaaattagngttaatgtaagaagggttatatttttggggataattaaggttgattaatcgtgatctagatttcatagaattagaaaacgggnaattatggcatanngggtaagtgactgccttgttataaatgactatacaacttgtttaaaaatataattttagtttaactagttggtgaccaattaaagcgtctgattatatgatgtagaataattaaaataagttagagttgtaacaccttgaaaaattacaactcggattgataaagaaaactctgtgttatgtcatttatgaatgtatgaatttaatttaagtaattatatgtttttaatcatggaatttcgttccatgtatgaatatatgtgtatatgatttgtttagcacaagttgacagaaaaatagaaactgtttgaaccaaaattccatctac

SEQ ID NO: 209214 - DNA, 203 bp, Glycine max
cccctcacaatcacattttggtttatattggaaaggaccatcattcagagcactacctgatttgtaatattcaggtgcaaactttgctactgaacatttccttggagaacctgctgtacttctgtcctgatatacaattccagtatgcatttgaaagccatttgaatttcacacgaaatttcacatagttttctgtatcaagc

SEQ ID NO: 209215 - DNA, 224 bp, Glycine max
gctttctttagaaaacttggttgagatgtttttttgataaaaattccttgagaagttagaacttagctacacacaccctctcataactaagctcaccttcttcagaagcttgcttaagaagattcctaaagaagctagagcttagctacacacacctctctaatagctaagctcacctcattgagatgagaagctagagcttagctacacaacccctataataa

SEQ ID NO: 209216 - DNA, 449 bp, Glycine max
  unsure (1)..(449): unsure at all n locations
tctaaagnagtataatgaagtcggctatgatgaggagttaatatctgacctncaatactaaatgccaattccnaagctacagtggagatccnaatagctaacacatcccttgcattgcgggagcgtcaccctttaactcattcaatttccaccacattaagatatcaaaatctgaacttcttggcaaaacttcttcctctaagtaatgatctaactctattttcatagttgaggttcttgcccttttctttctttcaatgtatctatcataatcacacaatttactctttccatcactaaccacatcttgtgattcaaaagaactagtagaatcttgatggcttttggcttgatattccgaaaccaaatcataatacaagtttcggatcctattaacttgagaanaanaatcaatgggataaattgattcaaagtaaaactcaagcaac

SEQ ID NO: 209217 - DNA, 172 bp, Glycine max
gagaaacaactaggaatgcgtctatcttgggttttgacgaggctcaccaagggtagaccttgtgtttgatgagcctttggagaagcgacaaagagtgcatctgtcctgtgttttttcgaggttcaccaagggtagaccttaggtatgatgagcctttggagaagcgagactc

SEQ ID NO: 209218 - DNA, 440 bp, Glycine max
tatctagaagcatttctagggaaagagaataagatgtttattatgaaatgagtttctccatatactcaaattaatttatagtagctctcttctttgatagaagctatatgagagaacttctactaatccttaatttatgcataagctaattttagcttatggagaagtttatttcattttttcttcatattttcttttcgtagaagtacttttggataaacttacccaaacagaccctttgagacttctcagacaatgcaaatactctgaactgtatattatattttttttttaacttttatttttaaaactttaatatcaacacaaatgggaatatcacaattcataatatttaaaataattagataaattatagtattttattatgttactcactctcactcttaaaacaatgattttcatgttggattatgattcta

SEQ ID NO: 209219 - DNA, 221 bp, Glycine max
  unsure (1)..(221): unsure at all n locations
agctngcacattactgctttatatattatgagcattatggnaagccgtggtaccatgacatcaagcggtacatagagtgtaaggagtatccacaaggggcttctggcaacgacaagaggatgttgcagaggttggaaactagtttctttctaagtgggggtatcatgatgtagctccattggagcttgttggccttggatcttcttcatcaatggagtcct

SEQ ID NO: 209220 - DNA, 414 bp, Glycine max
  unsure (1)..(414): unsure at all n locations
nntctgagaaaacttcattgagaagcttgcttaagatgatttcttatgaagcttgagcttagctacacatacctctctaatagctaagctcacctccttgagatgagaagctagagcttagcacccccccctataatagctaagctcacccccatgacaaaaaacatgaaaatacaaaaaaaagtccttactacaaagactactcaaaatgccccaaaatacaaggctaaaaccctatactactagaatggccaaaatacaaggcccagacgaaggaaacacctattctaatatttacaaagataagcgggctcatacttagcccatgggctcgaaatctaccctaaggctcatgagaaccctagggccttccctgggatctctagccaatctacttggagtcttctacccaat

SEQ ID NO: 209221 - DNA, 359 bp, Glycine max
  unsure (1)..(359): unsure at all n locations
gaaccaattaatataactcctcanccatngnnttttattccttatacatgttgcatacatattttaagttttggaaaacctcattttatataagtacaactctgatcttatattattatttttttttacaactattttaaccttcgagcgctacactttatttttattgaaacaaaaaccagaatatgtaataataggttttgttattcccagcagcaattttccgaagcaacataacatttgtttaacttaattagagattntttgttggattatctatcttatctgagtaattaagatgaacagcctagctcctaattaaatntttaatttccatacaataacttgaaaataaatat

SEQ ID NO: 209222 - DNA, 183 bp, Glycine max
agcaacgcattctcttgagacgccattgatgatcgtcaccaagctctagataccataaaagagttcttaacagaagtgaagaagaagaagatgagattaagagaaaaaaagagaaagagcttacagaatcagaaaatgttattatgattgggcaactgatctctgttacaaagagaagtatat

SEQ ID NO: 209223 - DNA, 460 bp, Glycine max
  unsure (1)..(460): unsure at all n locations
ctataaaactaagcttgtaaagtaattgacatgtgcttctattatattaacattttattgattcagttatgcaacacgaaactaaatttgcctttatttcttcaatttaatttgtaggggcctggtnnagcacttttgacaccagttgggagcatcctaggatattcttcaggtgctagtggaaagtgaaacaagtgagactttgctcatatcttgtgcttatttcatatttctatacaaagctatctatgtaaagtccttttgcaatctaccattcgacgagagggcaaggcgaaaagaaaaaggtgcgtattctcatgaagaaaacgcatggagtcgntgtaagtcgtcatctacgactaacttttgtatagaanagntntccaaaatgtatatattttccccaatttatggttctttctgtaggattgtaaatattctcttgtttagttntatcttt

SEQ ID NO: 209224 - DNA, 181 bp, Glycine max
ccatatatatgaagagggcaaacgaaggtccacaaaaatccttacacgcaagcacaacaacctagcatgccatcaaatacaacgtgaaatatgacacagtgcaacaataaacagcagacgctgaacgcacgaggagaacaccaaccatgagacacacaatatccacagcacagacacaagc

SEQ ID NO: 209225 - DNA, 160 bp, Glycine max
tcttgtggttttgaaatgattggcatgtacgggacaaaataatatccatgaggaccaagtggtgacttttgaactatataattggtgcgggtaatgggttacaaagtgtctgattttggtacagaggaatgaggtgagatgatagggtgataattctcat

SEQ ID NO: 209226 - DNA, 444 bp, Glycine max
  unsure (1)..(444): unsure at all n locations
tgaagaagttntatcttttacatgtccaactctcttgttttacatttgtattgattattatactgtgtgttgcatcttagtttttatctttttatatgtgcatcatgcatcatcangtccgagacgaagaaaagttctatagttagaaaatttcttcagtgtttaaaactctctattttaatcaattacagactaattgtaatcgagtacacaagtctttatagcttgcaaagaagtctctcatatcgatttaatcgattacagggtaatcgtaatcaattacacaattctttttgagacaatgattggtttttctggagtctctgctttaatcaattaccaggtgatataatctattatttctctcttagagtgtttcaaaagtgatcaataacactttaatcgactacatcaagaatctaatcgattacattgttcttgaaa

SEQ ID NO: 209227 - DNA, 225 bp, Glycine max
agccttctcccccatttgctataaatagggggataagtgaataagaaaagggttcagcctctaaggcacttctctctctctcgaaattgctgaggaaaattatttccgtgaagaaaatccaagccgaggcgcttccgtaacgtttccgtgagtaattacgcgaagattctcgaccgttcttcaagattcatcgttagttcttcgttttcttcagtcttcaacggg

SEQ ID NO: 209228 - DNA, 419 bp, Glycine max
  unsure (1)..(419): unsure at all n locations
tggggtacccatcacatgtggtactaggtgtttgtctgtcgatggngcacaacaagttgttcacatccacaaagcgcgcataaacccaccatcccctgttgcccacctncatntcgctacgtactcccacgtaacccatatcctcgtttctctcaacaccgggtccccatcaatcctctcaagcttccacaacatccaagcaaaacaacattcaaacagcacaatctatcacagccaagaaaacagagcaaaggcagaaaactctgccaaaacaccaaccaaagatcacagcttttcccacccaaagaccccagtaacaattccttcgatccaatttgttaaccgttggatcgactccaaaattttactggaagtctatagtgcataagcctacattgtgactggtgggatcgactagc

SEQ ID NO: 209229 - DNA, 178 bp, Glycine max
  unsure (1)..(178): unsure at all n locations
cccaaacccaaaactcagccagccaccacccaaagncgcctacacaactccnctgttgcaaggagtgttggacacatgggcatactatgacaaaaggtttccgtcccggccccatccactagtccttagaaacgcaacgtgaaactacaatacggggaacacaaaaaaagagcgacaa

SEQ ID NO: 209230 - DNA, 283 bp, Glycine max
  unsure (1)..(283): unsure at all n locations
aaattaaaaaatgtaaaggagataatagtacatatgttgtgcacttgtgcagatgattcaacgacaaaaaaaaagtcaaaagtcgattctcaaaaaggcaaaggagataatagcacatatgttgcgcacttgtgcagatgatgtangaaaaagttatgatctacaattgctggaatgcgattgcgtcaaatgagatgatgacacgtgcacggaaaagatataagatgacacgcggcgtaccttaagataaaatcaaccatcttggatagaacgccgtggatgg

SEQ ID NO: 209231 - DNA, 141 bp, Glycine max
ttctttttctttgttttaagcgagtttcgaccgatcgcttaagccgtaatctcacttaatcaatgatcaaatggaattcaactgatcatttgcgttgtaatctcgtttaatcagctttaaaataaaatgcaaccgatcatt

SEQ ID NO: 209232 - DNA, 450 bp, Glycine max
  unsure (1)..(450): unsure at all n locations
tgcagccattagaagagaatgagcatgtgattggaagtatgttttgttatgttagtcactttggtagattgattgtgaaggaatgcattgactgtatcccagtaagagtgtgatcttcaaannnccgaaacacactatcatttagtactgatttttgcatgaatctctgaagtatggactgaatgcatgaagttgaggatgatgaaggccatgtttgattgtgatagccacttagccaaaaagctgaccacgtacttgaatgatttatcccttgcaccgaatttgagctgaatgaattattgattgattgaaccctgagcctaaacagtgttatctcctgctaccttgtcttaagttgtaggagagcatcatctgcagggagcttggttcanagcaaatttgtcccanattntgggagtaattatcaaggtaaatttgttccaaaattgg

SEQ ID NO: 209233 - DNA, 183 bp, Glycine max
tgggcagatggagggtgccaaccgtatcataaaacagtacctacgagcttttgttcaccggaagccggcgtcgtgggggcaatttttgttatgggccgaatggtcttataacacctcgtgccattccgctactggggtcaccccattcgagatcatttatggtcgaaagccaccagtcattcc

SEQ ID NO: 209234 - DNA, 450 bp, Glycine max
  unsure (1)..(450): unsure at all n locations
nggccttgtacctagacacttctccatttggcttcatttttgttttataaacccatttcacatcaattggtgtctttccttttggaaaatcaactaattcctaagtttcaattttctctatggactcattcttcttccatagcatctctccaatgagcactctaagaggcttcttcttgactcactggttttgattcagcacgcaaggcaaaatggactaattctctttttgcactgattgttgtaccagaataaacttcataatctatgagtgcttgtgatgcctgcctctccctttgtgactttctgagttgaatatcaattgattcaacattctccattgcactatcttcattgtcaagatgcataatcacattcctttcattgctattagttgttgtagcagtacaatccttaacctttgattcatcaatcaacacatctctacta

SEQ ID NO: 209235 - DNA, 244 bp, Glycine max
  unsure (1)..(244): unsure at all n locations
taagtcacctgccgcatgcaagcttncattgagccctgtagctttcatttttttttctttntctttcatctcacacaagtaccatctccattcaaatttaaccttttcatcggccagctgctgtgtgtttcgaggcaagactntgctcgaagtgtggcggggagacaggtgcggatcatgcgtactagcatgaccaccctgacatagatttgtatgacactgcttctcagcaacatcctcacca

SEQ ID NO: 209236 - DNA, 446 bp, Glycine max
  unsure (1)..(446): unsure at all n locations
tggaatggtgaggatnttatatcaagtacaaatagtgccttgttttatttgannnttgngaacgcgacattccatgggatatttcatanangtcttctagtctcttctatgttgcctttttggttcattttaattatttaaacataatagagacaaaccaaatttgaataaaacaatacatgtgtactttcctttttcgtgatactcagtccttaagactggacgcacaaatttaccttatgacagtgtgttatgctgttttgcataaaagtgaacgctcactaaatatagcgtgttggatgataggttaaaacagagcatactctntatagttatggacaatattcctttaacataataattttgtccacttgtcaaaaactcattagaatatcaataatttatacttatgttatacatcaaaatctacggtgaatgagatgcat

SEQ ID NO: 209237 - DNA, 167 bp, Glycine max
ccttgtacatcatgcagggaaagatatgaaaaagggagatgaatgttgctcaagatgcaaccaaagaatagtggctcgagagattgggacacatgagtgagaaacgtctggagtttctaacaaaggatcactttccatacataaaggggcaaccacttgaatcctgc

SEQ ID NO: 209238 - DNA, 434 bp, Glycine max
  unsure (1)..(434): unsure at all n locations
tctcgtgggacatcttgacttgctttccaatctgacttttttacaaattctgccttcttctattttcagattgggaatgcctctaacagcacttttgtcaaggattttcttcatgcctnttaggcccatgtccaaacctttgatgccatattctgacttcatcttctttggaggatagacatgtggaggagtagctggtttcttggggtgtccataggtaacaattgtcctttgatctgctgcccttcattagaacttcactcttctcatttgtcaccaagcattctgactntgtgaagtttacattgaatccttcatcacacagctgactgatgctaatcaagtttgcagtcagtcccttcaccagcagtactttgttcagactaggaagtccattatgaactagctttcccatttcaatgatctttccttta

SEQ ID NO: 209239 - DNA, 161 bp, Glycine max
aacgctacaggacgagacaattaaaatattacttaatagttaacgtatcacatcagagttgttaatgacattaattaatagccatccatccaaaatactaatacgaatgacacgagagactgtattaagatggaaaaatggcctcattgtgttcatataca

SEQ ID NO: 209240 - DNA, 408 bp, Glycine max
  unsure (1)..(408): unsure at all n locations
tagagactacaggcaaacacttttattattgttttgaacgccttaaatgatctactagtgttatgtgatgtgacacgtggaaactggatgttaaatgagtgtgcnattgcaatcaccaaatgtctagttntacacacaaataagtccattggactctaattattattttagctatatttctcctcctcacaatacctattttgagtattttatggtcgcaataaaaattcgatcatcatatatgaaaatgagtttatatcaatatcatcatcatcagcataaaaaagaaacttccattttttatattattatattctgaattattaactatattcattgtttgcctttctcatatcttaattgacaacggacattgacagtgattatgtgaacagtgtgatagaaaat

SEQ ID NO: 209241 - DNA, 346 bp, Glycine max
  unsure (1)..(346): unsure at all n locations
atgaggggaagtgtgatcctccaaatctgcacttatgcacaattttgcnnnnncctgccgccccccgattttattttggtgcagaaaatgcttgtgtgtggttggctgcggaaagagtattacagaatgagttcttgatctttgctagtagatcccaacgggcacaatgtaggcttatgcactatatacttccagtaaaattttggagtcgatccaacggttaacgaattggatctaacgaattgttactgtggtctttaagtgacaaaagctgtgattttggttggtggttgagcatagatttctgcctttgctctgctcttgcctggctgtgatagcatatgct

SEQ ID NO: 209242 - DNA, 107 bp, Glycine max
aacaaaacaccccagctcaagatcaccggaagcagaagaaccggggggcactattgcaataggccgaacgggaccaccacacctggggccattcggctcctggggga

SEQ ID NO: 209243 - DNA, 419 bp, Glycine max
  unsure (1)..(419): unsure at all n locations
ttgaagaaaaccaacanatatttagagacacaaaacttgtttttatcatcaagncttctgaacaaagcaactagaagaaaataagattgttgcaaacttgagactaaaatgtttcgnttgnccactccttgaagtgttaaacattgtccctgaacctttgacatatgattttggatgtttcggatcctttggaaggccttggatacagcaaaaaatccttgttacaacattttgttcgttgtagattgtaaccaacgtccaatcatatagagagttccatccagtattcgcatacaacgaattgtgctcaaagtgttgtggttagtgacttacatccacaaattgcattcaatgacttgcgttaatgaattgcgttgatgacagtgtttattttgaaacaatttaaggccaaattgtta

SEQ ID NO: 209244 - DNA, 179 bp, Glycine max
gcatggtcactggctaacatattctaaattagcttagttgcttcttctggagttttcagctatatttttccacctgcaaaagcatctagcagttgcttggtttatggtttcagcccatctataaacatattcaattgaattggctcggaaaacccatgggtgggagttcttctcaataa

SEQ ID NO: 209245 - DNA, 451 bp, Glycine max
  unsure (1)..(451): unsure at all n locations
nttagtgttgttctacaacttgaatgggagtttcatctctataatacacattaacattggctcgaaacctttattacacggattacttgagtgaaactccaattctgattggagagcaangncaagccctaataaaactacatctaagttttgtaattgcttttattatttatactgtgttgcgagaatttgtttgattttgggaggaaagaaggaaaacaaagcacacaacattttttttaatttgattttaatctctaccattaattgttttagttgtcatctaagcgttaaaatcaattgttctcatttctcatttgaaacatcccattttatatatatatatagatgaaagtgtgttaaaactccccctgagtccaacaactnttaagcatgttaaagagaatatatagaaccagagcaagcatgtatatataaatagtggatggat

SEQ ID NO: 209246 - DNA, 213 bp, Glycine max
gctagcatgttttcgggtgattttgttttcagttctggggcgcatgctttgcttaataaagattgtgagcttgggcgtggaggatttggagcagtgtaccaaactgttcttagagatggacattcagttgctataaagaagctcactgtgtcaagccttgtcaagtctcaagaagattttgaaagagaagtgaagaaattaggaaaaatcaga

SEQ ID NO: 209247 - DNA, 455 bp, Glycine max
  unsure (1)..(455): unsure at all n locations
acggaactataaaactaagctgtacatanaacccacaggcctatcctacttttatgtctngaattaaattatcaatcattttgacatatatgaaaggtttgatggataagttcatgcaataaaatgttcacaccacactcacatatgtattgtattatattttatcttatactttactttatagtatcatatcttatacacatgccaaacaagccctaaatatttttattagcaaaccttttaaaatcaattaaccacataatctcttcatttgatggctcgtgcttacatataataacagagcttcctatattaatactatctaatccactaaatgtgtacaaacatcaaacagaaaccaaattatgtaaaatttctaaacttccagcatcccaanaaagcagctaattntgctcaggacttcattgttaatatccaagagaagcatatacatg

SEQ ID NO: 209248 - DNA, 160 bp, Glycine max
  unsure (1)..(160): unsure at all n locations
ttcactttttttcttccattttattgcaaaaactntgtggattcttcattggtgatgaacatggaagggtaaacacttcatcgatccaagcattcacttcaagcaaggctgaatcttgagtttagtttaatatttctaatctttgtgaatagtcatcttt

SEQ ID NO: 209249 - DNA, 434 bp, Glycine max
  unsure (1)..(434): unsure at all n locations
tgctctanattacattggtgtttgtatttatgggatgttgttatatgccatttttgctttaagagtaatgtcccactggtaaaactaactttccaaatgtttgccttcncangaatggcccacgaagcttgcctcaaagaggtccaggaaggacaaggcggccgaaggaactagttccgccccggagtacgacagtcaccgctttaggagcattgtgcaccagcagcgcttcgaagccatcaagggatggtcgtttctccgggagcgacgcgtccagctcagggacgacgagtatactgatttccaggaggaaatagggcgccggcggtgggcaccactggttactcccatggccaagtttgatccagaaatagtccttgagttttatgccaatgcttgtgcaacagaggagggcatgcgtgacatgagatcct

SEQ ID NO: 209250 - DNA, 241 bp, Glycine max
  unsure (1)..(241): unsure at all n locations
tctaagncacctgcagcatgcaagcttaaaattggatagaatgttagtaacttttggtaatcgatcaccatccatgtgtaatcgattacacagtgtaaaatttgaattcaaatttctaatagctgttataaatcattttggccattggtaatcaattacatcctctggtaatcgattaccacagagtaaatctcttgaaaaagacattttagcttaaatttcttggccaaacctttagttg

SEQ ID NO: 209251 - DNA, 443 bp, Glycine max
  unsure (1)..(443): unsure at all n locations
actaagcttggtatctccttcttcactacatcaagaagtagcgggtttagtcttctctcgggctgcatactggtgtagctacatcttntaaattgattcgatggtacatgtggatgggctatataccagtgcgctcaccggtccagcctataaccttnttatgcttattgagaactgacaacaacttctcctcttgctcatcagcaagggaggcagatataatcactggaaaactcttgctatcatccaagtaagcgtattctaaatttgatggcagaggcttcaattctggtgtggtcggctggacagtggtagaaggagatggtttctcagcctttacctcataaagaaagtcagaggtatgtgtactttctgaaacatggttagtcctatctgactctataaaatcaatctcaagaggtagaacaccaccaccaggtatg

SEQ ID NO: 209252 - DNA, 222 bp, Glycine max
catgcagcttgtaaaagacctacttgtacatgtttttgtgttggatcatcagcatccaggtgagattgttgcagtgacatcaagacatccatgacctagtaaaggaaaaaatgaaaactatacattagcacactgaaagtaaacaatgagtaaaggaaagaaaatataaaaattactacttccagaaatacatatgaatttaaaaagaaacacaagaaacaa

SEQ ID NO: 209253 - DNA, 426 bp, Glycine max
  unsure (1)..(426): unsure at all n locations
aagcttagcactcgaaattcggatgctctatcggcgaacctgcctatgttgtggaaagggtatgcgcttttggggcatgccttcgctcagataaatgtaattactgcacattcaccatttgttgatggnttttcgaccctgacaacgctggtgagccaaatggaaaacctgacctctctgatgaagtttacatggaggagtcaacttcttctttgacggatttatgtcactcttctcccatcttacttttcttctgagatataggtttggcttgggggaagatagccagtttgtggcagattatgccaagatggatcctcgacatgtcagatggctaccaggcaaataaatttgcatttcagcataacacgtcgatgatgcgccgatgctcatgactggcgaggtccctactgagctgtgtgcatt

SEQ ID NO: 209254 - DNA, 162 bp, Glycine max
aggtgagatggtggcagtgacatcaagacatccatgaactagtggaggaaaaaatgaaaactatacattagcacacttgaaagtaacaatggagtaaggaaagaaaatatcaaaattactacttccagaaatacatatgaatttaaaaagaaacacaggaaa

SEQ ID NO: 209255 - DNA, 405 bp, Glycine max
ttcggatgctctatcggcgaacctgccgatgttggtgaaagggtatgcgtctttggggcatgccttgttcaaataagtgtaatcactgcacattcaccatttgttgttggccttttaccatgacaacgctggtgagccaaatggaaaacctgacctctctgatgaagtttacatggaggagtcaacttcttctttgacggttttatgtcactcttctcccatcttccttttcttctgtgatataggtttggcttgggggaagatagccagtttgtggcagattatgccaagatggatcctcgacatgtcagatggctaccaggcaaataaatttgcatttcagcatagcacgtcgatgatgcgccgatgctcatgactggtgaggtccctactgagctgtgtgca

SEQ ID NO: 209256 - DNA, 164 bp, Glycine max
caataaaaaaatgttgagcctttgtgtgggggggacgaggaggtttctaagaaagtccattctatagcttgggactagttgtgtaaaccaaaatgagctagtgggttgggtctaaggtcaactaaatctactaataaagccttccttcttaaaattggctagaa

SEQ ID NO: 209257 - DNA, 457 bp, Glycine max
  unsure (1)..(457): unsure at all n locations
actaagctttanaagggaaaaggctcacatccacttttctaacatcatattaaaaattntncaaataaataataaattgtctcggctcaaaacaaggtcgtccaagacttcatacaattaatatagaaantttacccaatgtcacatcctatcagagtattgtgttcccgtgccctctagcatgaggttcttcatagtcatccacctaatcatttgctcccacaaatacaaagttcgagatcatcacagaatccaaacacaataacacatggggagtgagttatcacattcctaactaatagagagaaacaagacaacatgtaggtataaataccatataaacaaaatacaacttacttaagcataactcacgttatttcaccactttatcgtgcaacatcacatcacaacacgacacgtctcattcgttttcacaatatttacgtactaaatgatc

SEQ ID NO: 209258 - DNA, 224 bp, Glycine max
agcttaagagcaggtacgaacaggtgctatgcttattatcgatagatcatcatcctgtgtccgactaaagacgttaaagaagcactcctaggaggcagcctagtatctctaacttttctctttaatttcctgttttatgcttgttcatttccttgaattatatcttgaattcgcctaagcttatatgcaattatagaatttttagaggaaatataacaatgaat

SEQ ID NO: 209259 - DNA, 454 bp, Glycine max
  unsure (1)..(454): unsure at all n locations
tgacattaataactcataaatagctcgtttataaatagaatattataattaanannacngagagtctacaatatcatatcatatgnntaacacatattttatttgtagattattacatagtannnaactatttattaaataataaattgacagttaaaaaatgatttaataatttttttgcaagttaaaaaataatcaaattttaaatgaggtaaaccattcaagctcaagctcatgctttagttttttcaaaaaagccaaactcaagcttataattaggtttgtttaaataaatgagtcaagcttgagccactcctttttttcacaagccaagcttcaatccctagtgttgagctcatttacacccttatcttcagggactaaaatgacaatacataattaagtttagaaatcataatgtgagtaatgtggtaagttcaagaactaanatgac

SEQ ID NO: 209260 - DNA, 375 bp, Glycine max
  unsure (1)..(375): unsure at all n locations
caagaaactcagcttccagtatggaaagctaaatttatgatggatcttttttttgtacttgatgaaatacttgatatctatttaatgatgttntatgngttcattgtgctatcagaacttcattntattgtgcttgaccttgatcacgtagatgcatgtgtttttagggtaattcaatagtggaaactggtctgattcttggaacttgataggacagggctagtttgtcatactatcacgagggattggggtatgataacctagttgttgtatgtttgtattaatgcggtcctggccaagtttagttcaacaagaggaatctgcggacgatgcttgattaggattacgctagactatcactaggaatcagggttt

SEQ ID NO: 209261 - DNA, 220 bp, Glycine max
  unsure (1)..(220): unsure at all n locations
agcttccatcaagtggtatcagagcacattatcttcaagtaggtgctccttaaacctccattaatttttttgctttaccttctcttccattgntgtttcttcattttttctccatgtatctcctcccatgtcttgtgataaatgtttttaacatgattctttagagtttccaccgattaaacttgctatagaagctagatttgattttctatggttcaaa

SEQ ID NO: 209262 - DNA, 430 bp, Glycine max
  unsure (1)..(430): unsure at all n locations
tgctctanatntacattgatgtttgtattgatgggaggatgttacatgccatttttgctttaagagtaacgtcccactggtaaaactaactttccaaatgtttgccttcgcaagaatggccctgagacccttgcctcaaagaggtccaggaaggacaaggcggccgaaggaactagttccgccccggagtacgacagtcaccgctttaggagcgttttacaccagcagcgcttcgaagccatcaagagatggtcgtttctccgggagcgacgcgtccagctcagggacgacgagtatactgattttcaggaggaaatagggcgccggcggtgggcaccactggttactcctatggccaagtttgatccagaaatagtccttgaattttatgccaatgcttggccaacagaggagggcgtgcgtgacatga

SEQ ID NO: 209263 - DNA, 185 bp, Glycine max
catacccattctgttttaaggtttttgtgatgatgtttgtgatgtttatatgctgaaattgctaatggaaatctgttatagacgaagggtagaactaacccaaggttagaaagtgagaatgtgatgttatgagtggaaaaagagtgagactttgagagttggaaggctaagtcggaattctgtgg

SEQ ID NO: 209264 - DNA, 445 bp, Glycine max
  unsure (1)..(445): unsure at all n locations
gggagaagatggatccgccactggagatggtggattatttgtgcactggtcgacctgtgcacgtgtgggctcaagaggagtagcctcgtcgggtctcacctgttgaggtgtctgggctgtttgatccacaatctctcacaatcgaaagtcgagctccagaccaggctacctgctcaaggaactgctctacatttgtaattggcctttggtgggccaattcttgcaggctctgcataataataacctgtccctggaataagctttgcagcatagtgactgcagtttgggagctctgggcatctggtcctgttgatgcagatggaggagatggagtggatgatgaagggatgtcatttgctctggccctgggtttcctttntcttgatgccatntgaaataaaaagaactcacaattcacattagaccaacatttattcaagttaat

SEQ ID NO: 209265 - DNA, 365 bp, Glycine max
  unsure (1)..(365): unsure at all n locations
acaagattttanatccagaatgcgcgcataaacccagcatacgctgtagaccaacttcagggatgtcgagtactccgacgtaggccatatcctgatttatctcaacaccgggtccagcatcaatcctctcaagcttccacaacatgcgagcaaaacagcattcaaacagcacaagctatcagatccaagcaaaacagagcataggcagaaaactctgctcaaacaccaaccaaaatcacagattttctcacttaaagacccagtgacaattccttcgatccaattcgttaaccagtggatcaactgcaaaattgtactggaagtctatagtgcataatcctacattgagaccgcgtgatctacta

SEQ ID NO: 209266 - DNA, 150 bp, Glycine max
cccgccttggaagtaagagtgcacccaagaaggggagtgacgttgacactctggtttatctttgtagaggtcatcccccacgcttaactgaaaatcatttcatgcctttcatttgaattgcttgaagatccacaaacttctatagggtcc

SEQ ID NO: 209267 - DNA, 433 bp, Glycine max
  unsure (1)..(433): unsure at all n locations
aactaagcataaacttcaacttaagaccgattaagtttttgttttatgaagnatcttacagctcagaagttatgtgaatggctaatataaaaaagggagagaggggggtttcttcctttggagacaaaactactatttgtgatatattaaaaaataaattacattacaatcattcaaaatcaaattataatatcaaaagtaatatattaaaaataaattatccaatgaaaaataagaataatattaaacaataaaaattattcttcataatatattaaaaactataaataaactataaaagtgaattatgtgtaattgccttatttatataaaataataaaatattagttaattgaattatgcacttgaaaataatctaattattctaatttacaatattttaatacgttaattatgttatttaatattgatt

SEQ ID NO: 209268 - DNA, 215 bp, Glycine max
  unsure (1)..(215): unsure at all n locations
agctntcaaattctcacctactattcactttataagttgatatagagtttgatttaccaggatgacaagcatagcacatgggctcaagatttctctcacccatccttcttccattaagctttccacttgcctttgtatctcctttgtccttttcagattgcttctatatgttggcttatttggtaaggaagctcctggaatgagatcaatttggt

SEQ ID NO: 209269 - DNA, 430 bp, Glycine max
  unsure (1)..(430): unsure at all n locations
ctctatggaagcaagatctatgagcttacacgaggttctttaatggngattttcaaccatggagacgcgtcacacgataaaggagaagaggggagaggaggtgccatccactagaaatcttcgtcgccttgattagcttaccaccaagagaatgccttggataaaaagcttagaaatgaagcttcaatggaagaaaataatgagagagagagaggggggagcacgaaattgaaggagaaaaagatggagagaagttgaactttgaagtgtgtcttacaagtttcacattcatcatagtaatgacaagtgttacacatgcttctatttatagcttgtgttactaattaaatgaaagcttccttgagaagctagagtttagctacacacacgccgtttatagctaagttcacctncttgagaagcttccttg

SEQ ID NO: 209270 - DNA, 186 bp, Glycine max
tggttgctgcgaagcctggccctacacctacctggggacgaagtatttctcgatgaaggccctattaataggcagctggatgaccttgctgggggcgacgggttctccgtagaactggtagaggctcgtgatcatagcgtgaaacccacggccctattggacttctccgagtccacagggtgtctc

SEQ ID NO: 209271 - DNA, 451 bp, Glycine max
  unsure (1)..(451): unsure at all n locations
tcggacacttaaaactaagctaggtacttggctactgctaggctcttgacgcttttttggnnnngggccaccaaaattttgaaagggattatattgatctgaaaagtgcaagatgagtttggttgtctattctttgttgaggtgcaggtgcttgaagtattagagttagttgaaagttaatacaaatgtatcttctttctgctaggtagattcctgcgtaatttttgccaacttttgttgatggaatgtgaatgtcctatgcaaatattttggtgtattatttttgaagtattatgtgaatacttttacgttgcaatgaaggaaatattttggtgttacctttaaagaaagtgattatgcggtattgttggtaacttgtctttccttctcatttctattccaacaaattgctttctccagtcttgaacgtgttgatcgagtagcaatttct

SEQ ID NO: 209272 - DNA, 222 bp, Glycine max
gctagccacccagctcgcccaggcgagttatgttgcttcctccagaagcatccgccttctggaggaagaatctggaaggcccaagtgggcctggttgctatttgcacccctatttttactaaatacacccttgcctttttttttgtgattcttttttcgtaacgttacgaaactttacgaactttataacgatgcttgttttctttccgtaatgttacaaaa

SEQ ID NO: 209273 - DNA, 442 bp, Glycine max
  unsure (1)..(442): unsure at all n locations
tgtagaacggctagacatgatacatgtaaggtgttggtttgttttattgataaaagggatgccccacattagttttatgacacaaatgcaaaaatgatgatttggaaattttattgcaaactggatggttcacctatgtggacacttaagtgtnaaatttttatggtcatgtgatgctagggctcatgatttattttctctattttaaatcaacccaatgtgtccaaaatatgttcttttatcaatttgtgcattcatacgagtccattttgggcgtccgggaaaactttcacagtatttacccttcaggtgtatacacattgtttttaaaaagtggttatgatcaatgatatttttcaaagaagacgtggaagtcatctcttttgagaagcatgttggatttataggtagacaacttatttttgtttctctctgttttcat

SEQ ID NO: 209274 - DNA, 187 bp, Glycine max
agtgggtctgagaagaggcaaatttgattatcctgctttgatgaataggaagcccggggaaaatggagagaataagaaggagggagaaacccatgttgtgactgcagttcctacatgaccaaatttcctactagctcaacaatatcaatacgcagccaatatcagcccttctcattacccaccacct

SEQ ID NO: 209275 - DNA, 424 bp, Glycine max
aagaaagagggatatttttatagaggggggagcgacaaattgggtgaagaaaaagggagagaagttgaactctgagttgagtcttataagactttcgttactgacgtcccacaagtgttacacatgtttttatttgtagactatgcagctctcttgagaagctctattgagaaaacttacttgagaagcttctttgagataaccttcttgagaagctagagcttgattacacacacccctctcatatctaagctcacctacttgagaagcttctataagaagattgctaagagaactagagcttatctacacataactatctaatagctaatctcacctccttgagatgagacgctagagcttatctacacaccctctataatagctatggtgacgccgatgacaaaaataagatgataataca

SEQ ID NO: 209276 - DNA, 223 bp, Glycine max
agctagtcaagaaccatcctcttctctggtgtttttatgtcatcaatttgttatgaattacatcacataaattctgtaggacaacaccatgtgacatattgtatgaccttatgctccataggtcctctgactcttatcttatacactaattgttgaaagagccaacagtttgttacatatcctttcatctatatatattgatggctgcaagaacttaggaccg

SEQ ID NO: 209277 - DNA, 385 bp, Glycine max
  unsure (1)..(385): unsure at all n locations
tctccacaaacacacagncaccctttgnctcacaggaatagcattcctcagagtggtgtttctttacaattgcagaattcaattcgtcacaaatcatatcaaaagtttctcttcccatcctaaaagcctttctaaactcttcttcaggaaaatcctctttgttgcatccatcccaccatgcccctgaacgatccttcacccacagccttctctgtgagcctcccacaccagatttcaccccttcagcactaccaccaccaccctctccctgtctttcgcacgctaccaccgccaccggacgtgccatgccgcgtgacttcttcctcttcaccctctctgactcctcgacgtggctgtaatacttcgcaagggtggaatagtactg

SEQ ID NO: 209278 - DNA, 327 bp, Glycine max
tggggtaaagcgaaaaaagccccccccccctcctctcattatccacgaacacagttgtgtccattattgtagtaacatattgtcttattgagttgggactacaagcacgactagggacctagctgcatattgctctattttattgtaaatatatattgcataatctattatgtcaaagtatgtgcttcctattgtaaaacacattgctttgacacatgtctgggagaatatattggaccttgctcgacgaaatttttaggtacaagcctagacggagcttacacacctactactgattgatgctgactaagtaccctatatacctta

SEQ ID NO: 209279 - DNA, 297 bp, Glycine max
  unsure (1)..(297): unsure at all n locations
aggaacacactagaaaaagatgagnnnnnaaggcggactaaacgcacacgatatatntnattaagagcaccacttcagttcatctgctaagcgagaaaggcatgcgtgaaagcctgaagatagattgtagaaagagaagttggactaagattcagagctatgcatgtctaggacatctaaagagacaaagggccaagttgcgaagagaattgagagatttttgctgtctgaagatctgcacggaccagagattgaagcaggagccggtttgaaagcttgagatgagattgtgagtga

SEQ ID NO: 209280 - DNA, 429 bp, Glycine max
  unsure (1)..(429): unsure at all n locations
ctctgagaanatttccttgagaagctagagcgtagttattacacccctctcataactaagctcagcgccttgagaagcttccttaagaagattcctaaagaagctagagcttagctncnctaccgggctaatagctaagctcaccttcttgagatgagaagctagaacttagctacacaccccctataatagctaagctcacccccatgacaaaaaaaaacatgaaaatacgaaaaaaaagtccttgctacaaagactactcaaaatgccccgaaatacaaggctaaaaccctatactactagaatggccaaaatacaaggcccaaacgaaggaaaatcctattctaatatttacaaagataagcgggctcatacttagcccatgggctcgaaatctaccctaaggctcatgagaaccctagggcctac

SEQ ID NO: 209281 - DNA, 222 bp, Glycine max
  unsure (1)..(222): unsure at all n locations
agctagaagcgggttgtggctggttgtgttctaatcggaagagaagagaanaaaatataagaagaaagaaaggaagaggctcgggagaaattgagagagaaatggaattaggcacaaaagaagaaagaaaggaagaggctcgggagaaatggacagctctagggtcacctgccaatcttaaaaaatttacaaaattccaattctgttaactacagggggaca

SEQ ID NO: 209282 - DNA, 434 bp, Glycine max
  unsure (1)..(434): unsure at all n locations
ntactatgcaaggaataaccaaggaaaattccttcatttgactttgtcaaaaaggaaaacaagggtttctttcaaatcaaagaatattgtttctacaactcacccttacactttgctagacttttggtccttctagaactatgagttttggaggaaaatactatgctcgcattatagttgatgattattcaagattcatatggacattatttcttactcataaaagtgattcttttcatgcttttaagaaacttgctaaactcattcaaaacaagaaaaatcttaacattatatccattaggagtgatcatggaggagaatttgaaaataaagattttgaattattttgtgatgaaaatggtattgaacataattnttctgcacctagaacccctcaacaaaatggagttgttgagaggaaaaataggtcttta

SEQ ID NO: 209283 - DNA, 222 bp, Glycine max
agcttgttagatctagatgacaacttttatacatctaccttggattttgatgattaaacataagtataaattattgatgttttaataagtttatgacaagtggataggatcaactatattaaaggacttaactacaatttacatgtatcgtccacactctaagataaaattttctattaattattttattagtgttcaatgaactaaaaccaacaagcgttt

SEQ ID NO: 209284 - DNA, 440 bp, Glycine max
  unsure (1)..(440): unsure at all n locations
tctaatagnntaaccttctcagtcaggtggattgtctactttttctagangnaancttagccgtgttgccatcagtatgcgcnnatnnancaaattcagtaaagataaagcaattaaaataagattccctccgaattgtaaatatccacattaaaaaaatgtattacaattagtttaatatgatatacattactttggtatactacagttacatgggaatattcccaaaaatgaacatgattagcacattaattttttttctaaactagttgatgaaagttctattgtgctcttgcaacaccctcatcatgttcatttttgggtgagtaactatgacattntgtttgtgagcatctatgtgtgaaataacctttggtgtgttgtttaatagatacaaatgcgcttgtgagatctcctagcaatccattgttacaacattg

SEQ ID NO: 209285 - DNA, 220 bp, Glycine max
  unsure (1)..(220): unsure at all n locations
gcttatagaattacttgaaattcaatttctgatcatacttaanaatgattccttagcacaagcactacgtaattttttatcatactgctaattctatttgaagcatttctttctatgtgagacgatgccgcaagcagagctggaaatgaggtaagactttctagagatagccttcctaactaaatcttttgatgggatcttctttagctgaacctgagtt

SEQ ID NO: 209286 - DNA, 446 bp, Glycine max
  unsure (1)..(446): unsure at all n locations
ctagtgaagaaattcacccgttgggagacaacatacactttgattatgaanntacacattaacattcgattttgttgttgtaaaaaactntttataaatgtctatataactccgcaaaataagctatatcctaagagaaatgactaagggctaagattgtatatttgtttgtaagacaattaagagccggtcattgtgcacacaaacaacaaatgtgtttgatttatataagggctaataagattgtatattcgtgtgtaagaagattaaaagctagccattgtacaaacaaacaacaaattcatttgatttatatagagtcaacagtggctttgtaggacaaaaatatcgagttttaacaaagttggggtagagtttgtcttgtgtagtaaagtgtggtcgtgacaaaatactcataactctgaaaaagttattgaaacttggtt

SEQ ID NO: 209287 - DNA, 231 bp, Glycine max
gatcttaagcgacgcagctgcagcttgagtggaccttgtgttttatttatgaccatttgaatttctcgagagcttccatttttcaatttcgaacatctcgatatattatgcgcccgaatcagacatccgtgtgaaaaattatgaccaatagaatttctcgagagcttccgttgttcattttcaagagcctttatattggatgcgcctgaatcggacatctgagttaaaagt

SEQ ID NO: 209288 - DNA, 375 bp, Glycine max
  unsure (1)..(375): unsure at all n locations
tatactatatcgagacgctcaaaattaaacatcgtattctgtggaganantcaaatggtcataactgtttacacggatgnnnnannnnggcgcataatatgtcgagagcctacaaannaacaaccgaagctcttgagaaattcaaatggtcataacttttcaaacggatgtccgattcaagcttataatatatcaatacgctcgaaattaaacaacggaaactctcgcgaaattcaaatagtcataactattcacacggatgtccggttcgggcgcttaatatgtcgagaggctcgaaattgaacaacggaagctcttgagaaattcaactggtataacttttcacacggatggccgatttaggcaaatcacata

SEQ ID NO: 209289 - DNA, 233 bp, Glycine max
accttaagtcacctgcggcatgcaagcttgtgatatgagcttgttgattttaaaatgagttatgctttttgagaaaaaacaataatcaaacatttaaatagtatagtatcctcctagccgctagaactttggcttagttgtacatagtacatactgttcatttgctctaaattattctatttatgggatctattaatatgctttttatatgtgcctttttcctatgattttct

SEQ ID NO: 209290 - DNA, 288 bp, Glycine max
ctttctgtccagaacactatttgagaacctcgatgatgatctttacaattatagaatgcgccccctctggatcttgtacacttaatggattaagaggaaatttgatttgctgaatcaataatcgatgattatgattcaggttccaggactctatatcttgattctagaagcagagagaagactcgctcttgatagacttgataagcttcttcaaaacctgagtagcacatgcacttttctcataacgtttgaccatggagtgattactctctgataatcaattaccag

SEQ ID NO: 209291 - DNA, 179 bp, Glycine max
atatttaatttatcatgttattatttttagaaaataattattttttattttattatcatatttattattttattaaattattaatttggtaaatccttgattaaaatgagagatttattatcatgatagagattatgataatgagaaacaagtcttttataattttaatctaaattatt

SEQ ID NO: 209292 - DNA, 444 bp, Glycine max
  unsure (1)..(444): unsure at all n locations
tgagaaanttaccttttgggttcagaaacaagctaatttgagaanantnctatatgaaacaagacaaggttgagttgatgggaccttgtacgcatgttgtgacatgtgtggattggatatttggcaagggcataatggaagattggaggtttttttattattatttgggaaattggaggttatgtaaatgattcttttaatttactaacatagcaagcttttttattattattttcatgcattgacaatataaattgtgttaatctgcaattaaagataatcttaattattttcatggatggaaaaacttggaatttgctctcatttttttttataaatgatatggtttttttaagtaaattatttgaattataaaataaaaaattgtattttcaatttataaacaagtttgaacaaaacgatattaagaattgacgcaacata

SEQ ID NO: 209293 - DNA, 434 bp, Glycine max
  unsure (1)..(434): unsure at all n locations
agagacctgaggcatgcaagcttgcttctacaatattttcttggtagaactcatngatgttctttgatttngnattggacgagtataaccactaaattgggtgaaagaggttgaaatngcatgattttatgaagaaatgaagactttacacttgataatgattgtggtatatttaccacgaacatggtaagtagcacaaccatgataaaagcataactgccctctataacagtgccaaccatccgacaatggtcatggtaaatttcaccatggccatggtaaaccatgggggccacaatcaatccacaatgccccaaagcttgagcgtcactatttttttaatcatggccatggtggaatttaccacaatcgtattgtgctnttttagattgatatcttttaggaatntataaataggactctgaactttgtaa

SEQ ID NO: 209294 - DNA, 453 bp, Glycine max
  unsure (1)..(453): unsure at all n locations
agggagcctcgccaagtgtccccatcgaaattgataaacctttattcaaacctttcaaaggtagtgagaaggctaaacggaaaattagggaacttagaaaaactaaatccttaactgaaggcgtaggtgacaatcatagtgaattactaaacaagattggtagtttacttaaggtcattccagatactccccaagcctcggaaaatacttctaaaatggtaacaagaagtacctccaaattaattaatgttattaatgaagatagtgaccaaaactcagataacacaactgagataggatcagtatcaaaaaagagtataaatccaattaattccaaaaactggagaacaccctccaaattatattatcaacgtccaactgcccctgaccttctactagaagaaagaagtgaaaacaantttaaaaagtttagcgcanataacatctacgaat

SEQ ID NO: 209295 - DNA, 309 bp, Glycine max
agcttttcgattcattctatgcacccatggtgggtcacatatttgttttttcatttccaatcccgcagcggtacctttaataccccccgtagcgtgcttaagccttttacttaagaattcctcgcttacgttaaaagaaaatcaatttcccccgatcgttggaagtgtataatccgttaactttggttaaaatgatacccaaccgttcggtcgtgccgtaaccacgttggacatcaaaaagaggtaataaatactgtcatactcaaaataacatctttttcgtaaaacaaaaccgataatcaaacggac

SEQ ID NO: 209296 - DNA, 435 bp, Glycine max
  unsure (1)..(435): unsure at all n locations
tacacactcaacanatagtcatctttcatccacaattccaatcattcatgctcaatatgatgcatgcacctgacatcaactctcatatgcaatgtgggaccatccccaaggaaatagcctaagcgtgtccacacaacactttcacttatgaaaactaggcagtaagtgtcgaggtcaccctgtcttgcacatgcaactccccccgtccccccttacggagatcagcctgagtctcaagggagctcctaaccaagtgacatgctccctagtacaagtattcctcctcatgagaaactacacagccttactgacaaagnttatactatttccatgtgatatgaagtatgatacatgcgcaccatcaaatgcactgactgtggataattaagattcacagcatccccctcagagagcttanactcttaccactatatt

SEQ ID NO: 209297 - DNA, 406 bp, Glycine max
agcttctatataagctgaaccattttatcaataaacacaagttgagttttattcagaaaattagagttattctcttttatcttagtgagagtgattctcctaaattcttgagtgattcaagaacaccttggctgtatcaaaggactttcacaacctttgtgtgttgccctcgctggaaagagtgattctttccttcctttcatcttcacccttgttctttcaaaccacaattccagaaaattcacctctgcccaaaattatctcgtggccataactcccattttacgcactcaaattaagtgattcttgagcctaaattgaatttcaaaacgagacctttcacctcgttttggaatcacctcatttggagccctgtagcttcagttattgccatttctatatttct

SEQ ID NO: 209298 - DNA, 405 bp, Glycine max
  unsure (1)..(405): unsure at all n locations
atcacggaccacagaaactaagcttatgacacgaaaggactttgagactaatcactttttatattggaaagaanaagaaaggaattacacttaaagcctcatcttcaattcaagaagaaagtgacaaagaggacttgaatgatatagatgaagatgatgatttcagtttcttcgtgaagagatttagtaaattcctaagaaacaaaggatatcatagaagatcatacttctaacaatagagaagaggagaagattcatcttctgttccanagtgttatgaatgtaaccaacctgtacatttgagagttgattgccctatttccaagaaaagaatggaaaatctgacaccacaaccttcaatgataagaaagagaagaaagcttacatcacttgtgacgataacga

SEQ ID NO: 209299 - DNA, 406 bp, Glycine max
  unsure (1)..(406): unsure at all n locations
agcttggaggagttcggggcattatgaaacattttcactttaaaagggggtcccaattggattcctaaatttcaacttacctatttggatgtgacatcatggcagataggtcccaactttccatcgtggattcagtcacaaaacaaacttcaatatgttggactgtctaacacggggattttagattctattcccacttggttctggaaagcacactctcaggttttgtatttaaacctctctcataatcatatccatggtgagctggtgactacaataaaaaatccaatatctatccaaactgttgatctaagcacaaatcacttatgtggtaaattaccctatctttcaaatgatgtngtatgagtagacctttcaaccaattcattctctgaatccatgcaag

SEQ ID NO: 209300 - DNA, 486 bp, Glycine max
tatatccaagttcactgtggatgttaattatctttttattcttacacaacccttacaagccaaaaattgaccacccttctatcatgtgaacgtattatgtcttgtccctacaagcttatgaaaagataagttgcatattgtaacatataagataatatcatggcgtgagatcatattcttcgttcatggagaaagagagaataataaaaagagtttgagttggttgccatatttcatagctggtgtaaaccttttatttaaagacaacgcacaaatccaaaggaaaaaaaaatattaccttattactttgacacctttttactttatatatactcaaaacttagcaaaagcttttactcacatcacaatcctattaccatagagggtaccctggcaatggcatcacactttcataattggatctcattctcattgatgtctctcattaagacgagttatcaacacaagactctggcaacatgctac

SEQ ID NO: 209301 - DNA, 406 bp, Glycine max
agcttaaactttcaacttcgagcgtctcaatatatgactggactcaatcagacattcgagtaaaaagttattgtcgtttgaattggctaaaagcttaaacattcaatttcgagcggctcgatatattacgggactcaatcaaacatctgagaaaaaagttattgtcgtttgaattggctcagaggttcaacatttaatttcgatcgtctggttatattacgagactcaatcagacatccgagtaaaaagttattgtcgtttgaattggctgagagcttcaacattcaatttcgagcgtctcgatatgttacgggactcattcagacatccgagtaaaaagttattgtcgtttgaattggctgagagcttcaacattcaatttctagcgtctcgatatattatggga

SEQ ID NO: 209302 - DNA, 431 bp, Glycine max
  unsure (1)..(431): unsure at all n locations
gggagccaatacaaacgaccataactctttactttgatgtttgatngaggctcgcaatatatcgagacgctcgaaattgaatgttgaagctctgagccaatataaacgacaatgaccttttactcggatgtttgattgagtcccgtaacatatcgagacactcgaaattgaatgttgaacctctgtgcatattcaaacgacaataaatgtttactcagatgtctgattgagtcccgtaacttatcgagacgctctaaattgaacgttgaagctctgagccaatacaaacgaccataacttgttactcggatgtctgattgaggctcgtaacatatcgagacgctcgagattgaatgttgaacctctgagcaaattctaacgacaataacgttgtactcggatgattgattgagtccccgaacatctcgaga

SEQ ID NO: 209303 - DNA, 389 bp, Glycine max
  unsure (1)..(389): unsure at all n locations
agcttactccgcacaaggggcctctgggatgatatcggntatncctccntctaatgacgcatggacacttatccctgacccaacaacaattcgtgcgaaaggtcggccaaaatcaacaaggataaggaatgagatagattgggtcgagccctctgagcaccgacaaaaatgcagtagatgtggagccgaagggcataacaggcgtcgctgtccaatgcaatatgagcgtgggagttgttcaactcgttgatttatgtatgttagtcgagtgacttgtatttgtttaagttctcttcaatgtattgaatttgtggggttgaataaatttgtttgctaaattcataacttattttggtttatgtacattagctatttgtggtgttcaatga

SEQ ID NO: 209304 - DNA, 78 bp, Glycine max
acaagggaccacccgacggaaccagccccaagacgaaaagagaagccacgaagcagggcgcaggaccggaccgaagca

SEQ ID NO: 209305 - DNA, 397 bp, Glycine max
agcttttctataaaggtatcaaggtcgggaactacatattatttctcagaaagctccaaaccaaggaattaatggaagactaagatatatattagaatgaagcaacatcagaaacacgtattaaaatgacttcctgcattagtctaaacttacttttgattgagttcaagaaatatcttatctacatcaaatctcaaagcaagctagatactcattacaatgaaactagggagaatcaagctatatatatgatacactttctgaggtatcatatgaagtattgaatttgcaactattgatgaagttattaagttcctctcaaatttccacatgagtaacattctgaggattcattagaatctgaagatttctcaatacaaggatgcaagataagtgt

SEQ ID NO: 209306 - DNA, 342 bp, Glycine max
gaatgagccactctgagagacagacgagtccatatatgctagccatagcctggaggacaccctcttgaattaaaatgctggcccaaggcattaacacgagtactagaatatactctatctgaggagcaccaaaatgttgctcatcaacatgaactttttcctcacagaccatgagagcataagcaagagcgccaattatatcaccaactggtgaatcacggcgaggagaacgcgaaacctctgcaagatatattatttaagcagacatgccaccacggatattgggtaaagctctagttgcatgctcctgcagagactggcccgcatcaccttgctacactc

SEQ ID NO: 209307 - DNA, 407 bp, Glycine max
  unsure (1)..(407): unsure at all n locations
agcttcacatgattgatagtggtgttagatttggtcaatttgaaggcaagatatgggaggagtgataaaattttcactgaattgcttgtgttgttgaagaagatgatccctaaagataacaagttgttgaatattcactatgaggtgaagaaaatactatgtcctattagtatggagtaccataaaatacatgcttgccttaatgattggataccaaaaaatgagtttgcagaaatgcataagtgccctacatgtggggtatcgtgatacaaagtgaaggatgatgactacagtaatgatgaaagcacacaaaaaaaccatccaacaaaggtgtgttgctatcttccaataattccaatgcttaagtgattctttgctaatggagacaacatanaagaccatatgtt

SEQ ID NO: 209308 - DNA, 482 bp, Glycine max
  unsure (1)..(482): unsure at all n locations
tncncatagaactcacaacaccaacatattcattcttattactgccaaaggtaacaacaagccatgcttcttcatttcctgctacaatgctactactttagtactttgctgatgcttccttcattatcaccaaaaaacaatattaaaaaaaatgaaactttcaagcggtggcaatcgtttgctcataaccaaaaagctaaattcagaggtttctccttcacactatatttaacttaatttttaaatgggttttatcctaacttatcataatttttcaattcagtccaaagacttgtcacatgggtttgcttacatggacaaagacttgtcacatagacatatgactagtggaaattggattntaacagtatggacttatctgcataatgaatgtcaagatagagactatgttctacatttaaaaaagatagagactaatttgcaaaatgggccaaaagtaaagatcacaatgcatattactc

SEQ ID NO: 209309 - DNA, 388 bp, Glycine max
  unsure (1)..(388): unsure at all n locations
agcttctatggaggttggatcttttatcttttatgaggtccttcaatggngattttccaccatggagatgcagcggaaggcaaaggagaagaggagaggggaggcaccatccacaagggaataagccaaggaaaaaggagtttcaccaccaagaatgtgccttggataagaagcctgaagaggatgctttaatggagggaaagaaagagagaaggggggagcacgaaattgaaggaataaaagagggagagaagtggaactttgaagtgtgtctcataagactttcattcatcaaagttacagcaagtgttacacatgcttctatttatagacaaggtaactntcttgagaagctntcttgataaaacttccttgagagcttctttga

SEQ ID NO: 209310 - DNA, 389 bp, Glycine max
  unsure (1)..(389): unsure at all n locations
tctcaatgagttgcaccctcaccagcgcgtatacgctgtgaattctctagcctacgaagccgaaatgcgcctccgagaccctgttaatgggtgtgttggaatcatctctcttcttcaccagcagcttcgccagctccacatggacctccagagtgccaaatttgagctctcaaggatccataacttgggtgtaaccatacccactggatacggtcacacttctgctgcggttatcacgcccgttagcgcctctcatgttatgaatggtgctgatggtagctatgataaccgctattataaccaacaacatagntatcatcagtgtgtgcctcagcagttagttatgaactttgttggtgcacggaacaactgtgatgacggtaatgtgt

SEQ ID NO: 209311 - DNA, 387 bp, Glycine max
  unsure (1)..(387): unsure at all n locations
agcttgnggngctgttgttttctgataaaaatatttatgtgtattatnnnntacaccttaaccttaattttaaagccttttataaaggaggataaagtggtacaaaaaacacaagacacttatcatattttagtgaagaacagcactacacacacctgctgaacttagatagatttgccatttgcttttgttcagatactatctgcttttcttgttgaaaacatggtgagaatatccatgattttgggctaattactggaacttgaccctttagttatgttgagataatcacatgtaaaagtaaaaatcctgcatttattatcattaataatagtctgattgaccagttaatatcatgttgagagaatttaatgtgattcagaggct

SEQ ID NO: 209312 - DNA, 453 bp, Glycine max
  unsure (1)..(453): unsure at all n locations
actatanatactcccgctcgtttgaatntcaaattatcaacacctgccataatttggttataaaaagagtcagcacatgcagtcttcaatattcttgaaataatccgcctggttagcataattaagcactctatcaaaagcctgcgttgtcctacctaagttccaagcatcttgctattcattgagaattcacgtgccgcagaacaacattatagggttcatgttcctctccgaaatccttccttgacgaattaatgtcatcatcacaccgtaactttctagctgttgcttctgaatcaatcttacacaaacctgatatacaacattatagtaattgacaattccttatggcaatatggacacgtaagttttccacaaagtaaccaataattaattcagaacaatgaaattatggaccctgccactccaatgttggattaatcttcatctcaa

SEQ ID NO: 209313 - DNA, 409 bp, Glycine max
  unsure (1)..(409): unsure at all n locations
agctngagctaatctgagaatgaatnncttatgtccctgatgttttttttttctcacttatacctagctatagcattattccaaaaaataaaattatttggcactaatcatttgttctacctttagggagcaattaattcatcataaccagattttagaattatgtggcacaaatctatcactcatcttggcaatgggccatgagttcatgagatcttaccttgacaattgggctggtaaaataattgatcttcaagaaaaaaccctaacctcttccttgcttcctttgatctgttaatgctcaaagatttcatttttcctcgtggatcggtctagtgggagacttgatgacaagatcctctctcgggatgagatgggatttcaataaaaagaaattctattccttttc

SEQ ID NO: 209314 - DNA, 415 bp, Glycine max
  unsure (1)..(415): unsure at all n locations
ctcaagcttntatacctaatcctagcagcctcaacttcactctgttgccgctccagctcctccttcgcgagcatcaacttactattctccaacaacaccgtcctctccgcctccatcaagtgatcctccttcatcttcagcgccggcagcgccgcctcgagatccgattcaagaattcgaagatccgagtcatctccgggtatccggttctccgtgaacagactctcgaacaaaaccctatcagactccgacgctccgtaatcgtcgttcacgcttgcgctaggccggttgtcgttcaacaccgacctaacactagttcgtagacgacgacatcttctgtcgccgtcgacgagaaacctatactgctactgctatggggcctcctattgaacctgacaaagcataacaactacac

SEQ ID NO: 209315 - DNA, 415 bp, Glycine max
  unsure (1)..(415): unsure at all n locations
agctntacaacacaagtattctttctctacctggctactttttactctaaagcaaatcaacgaatttgttgaggtttgtatgcacatagactagcttaatcgtcttgcagacagatacacaaattcaccatttagtctttttctcttaggatttacatagtgttttgaaagttttacaacttaagaatttacaaagaaagagttagagaagtgggaacaactaattacaattattagtatattggtttgtgtctttaactcttcaaaacgtttcatatttataggaattttttagcaagtgtttgttgtctctaaacgactccatttttttcattgagaggatgcatatgaagaagtgtctattggagcatttaatgcaagcattaaatgcatgccctccccatgctgaaacgtc

SEQ ID NO: 209316 - DNA, 489 bp, Glycine max
  unsure (1)..(489): unsure at all n locations
aggagtctcatgacactactatgaagcttgttatattatgtaaatggtggtctcttcctccttgaaggtctcatgcaagaagaagaaaatgaaggctgaagttttggtttttggagaggaaatggtgagaaatgatgaaaagttatgcaaaagctatgcctaatgctattgataagctcacttgacaagcttgaatgaccagtttatggccatatgtaggtagttttgcttttgaatgtttagctagaaatggataaagtaggtatagacaaaaatgataaaatttcttttgctatgataaatcttatcctaatcttctagactagtgtgataactttccttgagaatattgtacttagagtgaaccttccacatagtctactcaatacacaatgcaatttttacacanatgaagatctagctcaatcaatttctctctctatcaagctttactaaatcaattacacacacatacacatatcacaaaat

SEQ ID NO: 209317 - DNA, 397 bp, Glycine max
  unsure (1)..(397): unsure at all n locations
agcttccaagaatcaagatcaagattcaagactcatgattcaaaagtcaaaagaagacttaatcaagataagtatgaaaaggttttttcaaaaactgagtagcacatggatttttctcaaaacttgtttaccaaagagtttttactctcttggaatcgattaccagattgttgtgatcgaataccagtagcaaaatgggtttaaaaaagtttccaaatgaatttacaacgttccaattgatttcaaaaaagctgtaatcgattacaatgttttggtaatcgattaccagtgcctttgaatgttgaaattcaaattcaaatgtgaagagtcacattctttcacataaaatctttgtggtaatgntacactgatttcggaatcggtaccactgattggt

SEQ ID NO: 209318 - DNA, 443 bp, Glycine max
  unsure (1)..(443): unsure at all n locations
tgcatgtcgcctcttaatattctaagagatgcaccaaattattaccttgctccacttatgctgggattagtattttgacattgtttgggtaagactctctaatttttagctgtcaactataaaaccgttgacaaatgtatgcacggccaaatttggtaaacctaagaaacattaagcagcttctcattaatcatactctttgagaaggatttgaatctccttgcaaaagttgtgtttcagaagataattaaacaaacccttatgacagtgtaaaatcaattctcaaaatattaaaatataccgaaccagacttgnttccttcaccacctgaccacgagcagctgctaaagcataaaataagttaatccgaaacactcaatataagtttctagttgcacaatcaagggttggatgtagcttaatatgtctctagaatgtcacta

SEQ ID NO: 209319 - DNA, 398 bp, Glycine max
  unsure (1)..(398): unsure at all n locations
agctttttccacgttttacttgatacctgtgtggttatgcaatttcaaaattttgttataacaacttagcaaaatatcttgtatgaaatggctataaaaaggggtaatgatgaaataaaaagatatgagaattattccctgcaatttagcttttcttttattccagctagctatcaactggtccgaccttatcttttcttttattccagttagctatcaacagactaataggaaagaacaaaatactaaacatttatttaattaaatctaataaaaaatttacttcaatcacattatttaacanaatacttgncaggtacgggtgtcttctaagagatggagtgtttggcacctattataaggaagtttgaagccaagttcgcaaaatggaaacaaag

SEQ ID NO: 209320 - DNA, 389 bp, Glycine max
  unsure (1)..(389): unsure at all n locations
ngtactcttgttggaggaacccttactcaagctatcctatattgtatactacaaaccataacaacttcatcacactcatagcaaatcagaaataaatggcgtgaatggtttatcattacagttacaacaaatcaaacacaagtggtgcacaaatcatacatgaatggtgcgaatggtttttctttgcaactactatccacaaagtgagatataggttatggattaaacaaatcaaagcacaaaagtaataatgttatttgtagtgtgagaaaataacaatngaagattgctaatgcgcggaaaataatcaattacacttcttcacaaattgagataaagcttcaagattaagactatacaagtgaaaaattagaagaataatggtatct

SEQ ID NO: 209321 - DNA, 416 bp, Glycine max
  unsure (1)..(416): unsure at all n locations
agcttattgattntgaaattntcatgcaacgttacgaacgccaacaacagttgttccccaccattgctaactttgttggccgctcttaaggttcttaccatgggaagaaattcaccctctctcataaggcctccttcaactgcaataacctatttcctcatgacaacaatcaaggtgccaaatgctccatgcctgtgtgccaatattgtgttacacggggtcacatgataggttaggaaaaccactcatggctaggttcaagaaatgattggccaagcaatgaagtcctttgccgaatgccaacggtaagagaatgagcaattttgcctctctttgcaaaatgccataaacacaattctccaaccttggtgtcgtccttttacagaacatccaacaggctcaaataacaatgcttg

SEQ ID NO: 209322 - DNA, 398 bp, Glycine max
ggtgaaagatataagagactcagtctaatattcatgagaataactattgcagacagtattaagacagatctccctaagactaataatgctaaagagtttatggagttagtgggagaatactctcaaacaactgataagtctcttgctgggacattaatgagtacactgaccaccatcgaagttgatggttcgtgtactatgcatgatcatgtcattgagatgacaaatattgcagcatgacttaatgccttgggaatggttgagaatgaaaactttcttgttcagtttattctaaactctttaccgtttgagtatggcctgttccaaatgagctataataccatgatagataaatgaaatgtacatgaattgcacaatatgttagttcacgaagaaac

SEQ ID NO: 209323 - DNA, 407 bp, Glycine max
  unsure (1)..(407): unsure at all n locations
agcttagcaatcataggatcatagtgcatgttatctgtgtctccttctttaactccagtctccacccgaactgccaaaatagcaaattttcagtataaaaagaaagatccacaaatctatattgaagtttcatagttattccaaccaaagtggggaaaattcagattcatcattaataaattagtaggctaattttgcatatctgacctgcagatgagactggaacatgataatggtgtagaactccagttgctggaagaaaccctttttgaacattttcagcatagattcgagcttcaaaagcatgacctgccatcacaaaaagagntataatatactgaatctttaaggcctctacataatagatggatggaactntacacatgatagtaaaattttctatgtgc

SEQ ID NO: 209324 - DNA, 263 bp, Glycine max
  unsure (1)..(263): unsure at all n locations
tacacacattncatctgtgggtggaaccatacatccaaagggttcccaaaccaatattagtagtgatggcggatctaaccaatcatcattacaattctcggtgagactagaagacatacacaggaaaaaaagaatctagcgaaagagaaacgtttattgggcgtgcctgacaaaatagagacggtgaaacaaatgctttacaaatatactcaccgtgtacttctcaacacggcgaatatagagctttacagacatactcacct

SEQ ID NO: 209325 - DNA, 399 bp, Glycine max
  unsure (1)..(399): unsure at all n locations
agcttgtggttacgtgagcatgaactactattttatatagatgntgnttacacaaatgagcacatcttaaaagcatactccgcacaatggtggcctcttgggaatgaagtggcaattcctccttctgatgatgcatggacacttatccctgacccaactacaattcgtgcgaaaggtcggccaaaatcaacaaggataaggaatgagatggattggctcaaaccatctaaccaccgacaaaaatgtagtagatgcggagcagaagggcacaataggcgccaatgtccaatgcaatctgaccgtgggagtaattcatttaattgatttatgtatgttagatgagtgacttgtattggttgaggttctattcaatgtatttactttgtggtgttcaatgaa

SEQ ID NO: 209326 - DNA, 438 bp, Glycine max
  unsure (1)..(438): unsure at all n locations
tatgcgccatgttccttacgaacgtacacttgctgaagatatcctattaaccgaaataatgcacccatatacaatcaaggcagctntgttacctagattatntacacgtacttccaaggtgtatttgttacttacatcacacacatctccttggctaaattcacatacatgcatactccaagcatttggggtaccaaatattgcacatgtgcacatcttggtatttctaatacctatacatacacgaacttcatgatgaatcttgactatctacacaataaggtgctacatttcatgccctttttcaagtttttgctacctaaagccgcatgcaaattcaagcatattttcctttgctgactaaaatctgattcacattatatatatattttttggaatatagtttctttcatacaacattcaacataattatatata

SEQ ID NO: 209327 - DNA, 313 bp, Glycine max
agcttgtaatcgattacacatatactgtaatctattaccagaggagtttttcagaaaccattctcaacagtcacatctttctgtgtggttcttgaatggctatcataagcctatatatatgtgacttgagacaccgaattgctaagagtttttcacaacaaaatggtcctatcctctaaaaagcagatcgttttatcctcttacaaattccttggccacgtacttgtgattaataaagaattattatggggctcaagtgttcatctatctcttcaaagagattcttctttcttctctcattcgaaagggataa

SEQ ID NO: 209328 - DNA, 443 bp, Glycine max
cgtcacgaatcaaaactcttgtctgttttttgcattttcacaatttcgagcacaacctagaattacgctatttttgaatcggtttcttcaatccttggctattcgctcagtttgaggatgtgagcagataaaataggcgtggacttgatgtgtatttatagggaggaagacgaacgtggaaaacaactatctgatatctaggaggttaccacggcattattatacaataatggatttcaagaataatactccatttcaagcaactttatgttttaacatacgtaacgaatgaaggattgctgttaccatgcaaaaaggggagtgtgatcataactattaattataatgctttaaataattaaacaaaatatattcatttcgcctacacatttttaagtgttaagttatcactcaattacttttagaaccacctatatcataat

SEQ ID NO: 209329 - DNA, 393 bp, Glycine max
agcttgatcaaaacaattatctaattattccaatccattttttcatacaatcgctcattcgaatcattctcaaacactcatttcatacaaaacaatccactggatatcattttcaaccagttcactattcaaacaagctttttgtacaagcaatcaactcagagtactgaaatttaaagcactacaacattgtaactgcaaattaaatgactgaacataaatcataaaataactgagaataaactaaaattttaaaaatgcacaaatttaaatgtcctgctcctgtggttgttcctgtgcatgctcattgagatccaacacctgagcagctggtgaatcctgagagataagctgctctatctcacatgctggtgcagatggcatggaatcatc

SEQ ID NO: 209330 - DNA, 309 bp, Glycine max
  unsure (1)..(309): unsure at all n locations
atacanaagcttctcggctcatgctgggaacagctgtaggagaacacccgtgtcttctaaggcgcccacccagagggaagcttcccaaagttcaacttacgaacacagctcgaccgggcgagaattccaacacgacaatgaacttccctccaaagccattgccggaattcaccccgctcccgaagacgtactaagatcttctaccatccctcatcgccaatcatatgggcaggggaactcacggaagggtcctcgaaccccctttcccgaagagagatgaccctaatgcaacttgcaagtaccatgggg

SEQ ID NO: 209331 - DNA, 403 bp, Glycine max
agctaggagattatggatgtgctactcttctttatagtaccccgccaatggaggagggcgacgcacgttatatgccacaggaaatccttaatgagaattatgatcaccttgacaaggttgatatcttctccttgggagcttctatttatgaactaattcgtaggttgcctttgccagaatcaggatgtcaattttttaatcttaaagagggcaagtttccccttctgcctggacattcgctgcaacttcaaaacttgctcaaggtactatattctctcttcccaatgattttgttatctttcaacatggtggatgttttgcaagagtgatgggaagtctagtgtatgacttgcgggatactttggtcaagaaactaggcactcacatatgaaggaattataat

SEQ ID NO: 209332 - DNA, 403 bp, Glycine max
ggagtaaagtattcagagagtgtatatatgtttgagtgtgagtacatagtaggagactattatctgagttacactgaatttgaaattatacatatattctcacacttgttttgggtgaactgaaatcactccttctcttaattcgacgagctctattcaaaagatttcaatgcatgtgtttttattgagtaacaagctatctttccacaaaagtatgaacaaaatattatattcggtttaattttttaattacaatcataagagtattacaaacgtgtatagctatgagaaacactttgtgtgaatacatcgaaacacgtaaatgaatgtctttttacataaattattgaagacttatacattgcaaggcttatatagtactaatttgagtagttaactatac

SEQ ID NO: 209333 - DNA, 387 bp, Glycine max
  unsure (1)..(387): unsure at all n locations
agcttgaagatgctatgcgtgaatttttattggagaggttgcaagaaaacttttgaaatatttggagtaagtgtaagtgtaacggctgctacactttacttatccatttttcgaccaactcgcttcgcgagtcaacccactaagcgagagagagacgtttggcttctcgccttctttcttggtgggccgacatgctgggcccaatttcaaattcaaacattttatttgaactatgcttagcgcanagtagcacactaagcgagtgtgcagataaggaatcctgcaactctcgctaagccgggctcaaggccgacttagcgaatatactgcatcttgcatacagagggggtatgcgcttagcgagtggttgctagcttagtgctattt

SEQ ID NO: 209334 - DNA, 423 bp, Glycine max
  unsure (1)..(423): unsure at all n locations
tatcgtaatcgattacataattctttgtgagacaatgactaatctttcaggagtccctactataatctattaccaggtgatataattgattacttttctcttaaatgtatttcagaagtgatcaagaacactttaatcagctacattgagaatctaattgattacattgctcttgaaagttttccaattctttggaagaacactttaaaattacttctttgaaataatcgattgcattgtataaatagccacctagtatcctcacttagaacaacttctaaatgagctagaattaggagctaatattagtaagataaagaagaggaaaacaaagtgtngaaatatagtgtgactcataacttctaaccgctcattatgaagaacttttttgtgaaaagtgagttgtgaatatctcttgagttc

SEQ ID NO: 209335 - DNA, 332 bp, Glycine max
agcttgcagagctcaataattgattggatagtattataaacttcaatttatctgttagatgacattctgtttactcatgatcaaattaatttaattgttgaaatattttataatttacaacaataagtatcttaacattttcagacaccaaatttgatattatatattaaggttagttcaaaattgtagaaacttcagcaaaattttgaattaatattctcccatttcatgtttatccacatagtttctaactaataataagcttaataacatatgcataaatgttgaacaattaaaatgcttaaaataacatgatttattgttttaatatc

SEQ ID NO: 209336 - DNA, 343 bp, Glycine max
  unsure (1)..(343): unsure at all n locations
ntgagggtggtgcaaatgggggaggagttgggcattaattttgaagaagaagtgaaaggaaattgtctcgagatgtgctaagatggaatagagaaacaagcaagaattgcagtagtaggaggtggttcttatgggggaagatatggtttgctacgaagatacatagtaagaatattaggggtcctcggggcatatgaagtggagagaattaaagaatttaataaaattcgtacaacctaactttgtgtgtgtttaagaaacaaaacaaaactaagctctatggatgataagatttgctcaattatttgtggcgattaaaatgttgaatggaaaaatgttcctg

SEQ ID NO: 209337 - DNA, 416 bp, Glycine max
agcttgcaggtagaactctcacatacccatgatggatagtggaaaacttactggtcaaggttggaaaattcatttttcctgcaggctttacgattatggatataaacgaagatgaagaaataccaattattttgggacaatccatcctcaacacaggaggaaccttgattgatgtcagggaaaggaaattgacttggaggctaggtgatgaggaggaagtatttaaggtttttggtactgtaaagagctcattctctcccccttcctacaattacaagtcactaacaagatggaagtcactatggctaagcctcacccaagtgtggggaagaaagacccttccaggaacaaagtcattccaaaagaccttggatggagtaagaacaagggagataacatcaccgttcatgctcttg

SEQ ID NO: 209338 - DNA, 468 bp, Glycine max
  unsure (1)..(468): unsure at all n locations
ggcataagtgatgaagggggtgtttcatcttttataaatagtctattcaatacactaggctaggctatgactgaattttcaatagactcatattttataaacaattttttcaatacacttacaggatttttggctagtttatatgttgaggatgcataacttccaccaaaactctagtagcacaaacttcaaccaattgtttataagtttttagatttgaaatttaataattataggcattaaaatatcagcattaattattagtaggtaactggtcatattatggaggctatagtttgtttgtaggcatgagaaatctaactggtcataagttgtccttgcaaaattagttaaaattgtatttttttgtttaatttttaaaacaagcactaaccaaaggcaagctaacattaattaaggatggtngtgttgaagatatggcttttgtttgttaattttatgttttaa

SEQ ID NO: 209339 - DNA, 411 bp, Glycine max
  unsure (1)..(411): unsure at all n locations
agcttgagatgaggaagtgttgaagggngaaacttcctgcntttattgttgaccacagagtggtacctggagatatgtcgcgggggtaaggagaccttatggacgtcaggtggggtgctattgcccaaaaccaagcttgaccaatctcgacccaacccgggcatagtcggtcagtgagaacctgtgatgtacctaaacaggcgagctcctggcagtcaacagataaaaggaacaaagaccacaaagcaaggaggcttgtgtggtggctggccagctgtgaaacttgattgatatgtgagatatggcctctggtaatcgattaccaagggtgggtaatcgattacaaggcttaaaaataaagacaggagactaagatggtctctggtaatcgatttccaagggggtgtaatc

SEQ ID NO: 209340 - DNA, 476 bp, Glycine max
  unsure (1)..(476): unsure at all n locations
tctcgtatattacgagactcaatcgcacattngaggaataagttattgtcattngaatttgttcgaagcttctattttcaatttcaagcatcatgatatatgacgggactcaatcggacatccgagtaaaaactaattgtcgtttgaatttcctcacagtttctattttcaattgtgtgagtctcgatatactacacgattcaatcggactttccagtaaaaatgtattatcgtttgaattttctcagagcttctattttcaatttcgagcacctagaattattaagggactcaattggacatccgagtcaaaagttattgtcctttgaatntcctcagagcttctattatcaattttgagcgtctcgaattattaaaggactcaatccgacatctgtgacaaaagttatatttctttgaatgtcctcagaagcttctgttcaattttgagtgttagattattatgggaactcatc

SEQ ID NO: 209341 - DNA, 405 bp, Glycine max
agcttgagatgaggaagtgttgaagggtgaaacttcctgcttttattcgttgaccacagagtggtacctggagatatgtcgcgggggtcaggagaccttggggacgtcaggtggggtgctattgcccaaaaccaagattgaccaatcccgacccaacccgggcatagtcggtcagtgagaacctgtggaggcctctggtaatcgattaccagtctgtgtaatcgattacacagaggaatgggtcactggtaatcgattaccaggtatgtgtaatcgattacagagtgccttatgcaggttttcatgtcctgaagctgtgtgattcaagtttggcctctggtaatcgattaccaaggctgtgtaatcaattaccagagatgaaaagccttgagataccccttttac

SEQ ID NO: 209342 - DNA, 402 bp, Glycine max
  unsure (1)..(402): unsure at all n locations
ctcagctttagaggaagcttcatggaggacaanaagagagagngtggattgcacgaaattgaagaaggaaaagagggagacaagttgaactctgaagtgtgtctcacaagactctcattcatcaaatgtacaacaagtggtacatatgtgtcgcaacatgcccttttgcgggcgagcaaagcgaggctcacgggtgcgctttccaaaggaggaaagatgcgcggagtcgccaccaacgtttatttgtgggaaacgtcggataaaaccgaaggaaaccggtcaaaatgaaaattctaagttcgggagttgatttactttgaagaaggattagcacctctcacattcggctcaaggacaacaacctattttttagaatgtggaaagtgtataccttaactttat

SEQ ID NO: 209343 - DNA, 369 bp, Glycine max
agcttcttagtttcagatgatgcagatgggcttgtagctattttatgctttcctctaatgactatggcatcatttctggcgctaaactgttgggagttggaagccatcttctcaattaaatttctggcttcagcaggagtcatgtctccaagggctccaccactggcagcatctatcatacttctctccatattgctgagtccttcataaaaatataggagaaagaagctgctccgaaatctgatggtgagggcaactggcacatagtttcttaaatcgctcccagtactcatacaggctctctccactaagttgtctaatacctgagatatctttcctgatggctgtggtccttgaagtagggaaaag

SEQ ID NO: 209344 - DNA, 404 bp, Glycine max
  unsure (1)..(404): unsure at all n locations
agcttctcgaggaagcttcttaatgaagtntcttaaggaagctacatgaagttgtctcggtaaaaacgctgcccagccttcgttaaccgctggatcatctcgaaatttggttttcagcttcacaagacacttgtccatgatcagactattgggatctttgagaagatgtctaaagtgtgcgcgacttttccgctcccgagagcattgctcatttgtgcgttntgagccttgtagtccaagtagcttaagaaaaatgccatttcttctcctttctttcttccaaaaccatttccaacgttccaatctctttctccatcacccacagcccccattagccaccgcaaactgcccttgttctccgttgaaactccacaacaagaggaacccgtcgatcatagtggaac

SEQ ID NO: 209345 - DNA, 454 bp, Glycine max
  unsure (1)..(454): unsure at all n locations
gcttcaatggaggaagagaatgagggagagaaagacaaaatggtcaggaaaattgaagaaagaaaggaagaatagttgaactttgaagtgtgtctcacaagactctcattcatcaaagttgtgacaagtgttacacatgtgtctatttataacctaggtcactaactatgtgaatttcatttacatttcatgttaatctaagaggaatattccaaggatatgtcaaacgcatcttagcatattccaagaatataacacaggcatcttagcatattccaagaatatgccaaagacaatatgctaaaggtatcttagcatattccttgagaatctaaaggagagaaactacacacccccctncaatagctaatgtcacccccatgtcaaaatacatgaatataccacaaataagtccctactataaagactactcaaaatgccatgaaatataacg

SEQ ID NO: 209346 - DNA, 407 bp, Glycine max
agcttgtacacaaacaagaaatagagcatgctttttacaaaattgacctcactacccaactggctatgtatttgaatgagaaacagacatgttaaaagcatcattacaacaaatggttataagaaaataaaataaagtctgcaattacctgttttcataagggcttccattctagaaaaaagtcttttactttgaactataggagtttcattgagatcaacctcccttaagtttccatttgaaccttttgagtttgatgcagaaagaccagcaaactcagatgttgtctcagcatgtgcaatgtccatggctagtttggcttctgaagggaagaaaagtcttgcaaatgccactgcagtagagagcaatatttactcgtcaatggtttgagcataaaatatctcatg

SEQ ID NO: 209347 - DNA, 407 bp, Glycine max
  unsure (1)..(407): unsure at all n locations
tnctaatagaacttttgaagagaagaaaatacaatttctttgtgggagataagctttctcaaacttgtgcaaaaacttgatatagttttctatggagaatatcttgttatgagcatagtagtccttgccctcttttttcttttatcacctttttctatgaaaaaaatgctacactaataacgtgaaaattccccttttgcttatattgtatggccaactattttgttagggattgattgagggtacttgccatttttttttcaattgatctctctgcaggatgttggcacaatttgtgaacagttacctgctctgaggacaatcaacttatctaacaacttaatgtcaccgtataaatcagagctttcattactgaagaacatcaaagttgtggtgtacataatact

SEQ ID NO: 209348 - DNA, 395 bp, Glycine max
agcttcaccttctggtcctcctcatagttgtggcatgagaaaacatgctctattttcatctcccactccaagtaggcctccggatcattctttcctttaaatggaggaatgttgagtttaataccatcaattcggttttgtctaggaacaccatcattccctcttctcctcctttcttcttcattatgatctctattctccatttgatccaacctctcatggagcgcatcatctcgttgtttcattaacctctccatatgttgcatcaaagcttgcatttggaattgcgaaagccccactccatcattaggattagtacctgacatctcaaacaaacaaatcaaacgtaacaagacaattatagttgctgtttgaatacctcacccactcaagtg

SEQ ID NO: 209349 - DNA, 291 bp, Glycine max
  unsure (1)..(291): unsure at all n locations
ctgngcaatccctgaataattttttgatgatgacgactatgaactgttcggntggcttcatccggtgatgctctttggtatacctcgactggtaatctttcttggccgatgtcgcatcggattattttcgatcaatgtttgtaatggagtcttttctctgttgaggtcggttacatttttgtttgcctattcaattaccgcagtccaatgtcacccgaaatgaacgtcggttgagtgtgcacaaaataccatatgcgaccttgacggataaccttttgagcgacaatgaat

SEQ ID NO: 209350 - DNA, 396 bp, Glycine max
agctttgatggtgtcgagaagaaatcacatgttttttattatcaaaaagggggagaatgtgaatgtatgtatacatgattttgatgatgtcaaagaagaatctaacaaggctgcttcaaatgataagcatttgcttcaagaataattcaagattgcttcaacaaacaaagccttgtttcaagattcactaaagaccaagccttgccttaaaacaaagtgctttcaagacatgcaaggctctggtaatcgattaccaggaagtgtaatcgattaccagaagacagggttgagaaatagttgttgaaaaaggttttgaatttgaattttcaacatgtaatcgattaccatatgtctgtaatcgattaccagcaacgaaactttggaaattcaaattca

SEQ ID NO: 209351 - DNA, 291 bp, Glycine max
cctttactttgctctgcacaaatttaaaaattgttttttgtccaaatcattgaatctatcatgttacccaaattaacaaaaaagacctaaaattattttaccaaaagcttttattaagcaactatctttgaaacacaagtcttaaatggcgaaagaattattttttcaaaactgttgcattttcattatgagcaactttccattatgaactcgcctatatgaattatcttcacaaacattttgtttaaaagaaacctcaataagtcttaaaaaccaatttaacaccccttc

SEQ ID NO: 209352 - DNA, 393 bp, Glycine max
  unsure (1)..(393): unsure at all n locations
agcttggtacaaanggaggcaatattcagcagaattgtattatcacgacggntcgagtcgtggggatgctccaaaaagctcagtggcagccaacgaaggcccttatttgcgacaggcattgtgcacccgagaataacgcacgccctaaggcaaaaggaggtgggtgcagtgtaacgctcgccagagatgtgtcgggtggtgtgcatgaacttcccttgacagaaaagggccatgtgtggggtcactgcggcggcgtattgagttggctgcacacatggtcagcgcggcattcttgaaaggtcactaatgcagaccgagcagcacactggctgccaaacaggcccaatagtgagcgcgggtactgttcacccacaaagaaagttgcacacagat

SEQ ID NO: 209353 - DNA, 251 bp, Glycine max
gatcgccaccaccacaagtaatcctcactgtacaactggaagtccgaaccacaatggtgatttcagcacaagcgactatgaggatgaccaataccacaataagaagccgtgaatgttttaaaactgattcaaccagattgaagtgaggatatagacaagctcgatgaaaacagcatcatatggaaggattccttcgatcagaactgataagacacgatacattgaccatgcctgctcatggatcatgcttg

SEQ ID NO: 209354 - DNA, 396 bp, Glycine max
agcttatacacgagtccttttcatttcttattatttgggagtctcatgacaaattcatccgacccagcttgtccggtcagtcttcgagtaacaatgccagaacccccagattcagcctggtacagaaacaattcatcttatatcatcttactatgactagcatcacatcaacatctaagataatttaacaaaatcctaaccgcacttaatttataaaaaaaaaaactgaataaggtgcgatacctcagcaagaacttcattgatgagtttctcagcagaggcaatcgcatcaggagtgcccataagctcaaccatcctagtggaagaattagggtccgcatcgatatcacgagtaatttgaattttggcaccagactgcaactggagatacttaat

SEQ ID NO: 209355 - DNA, 456 bp, Glycine max
gcttgaggaatcttgagaaaccgctagagacactgttatctctgttcaactacacacgtgagcctgcttagaggtaagggatgagtttatcgcagttagggttaaaatgaacatgtgtagggatccttagaggatcaaattgaaatttattctgggatgtttactgtatcatgattcttcctttacaaatataattatgagattgctgtgtttgacggactaattgatgccctgacacgaattatttgataaaaataagtggtcttagtgctttcatgtttttgaactatgattgtgattcctttgattttgatataattatgtgaaagtgtttgagggggttaatcatatgaacataacatattaatattattatcgcgtgacatgtatataatgcatgaggcgtgaaaatgattgtcttgggatatcaaaatgtgatgaactatgtgtaagtga

SEQ ID NO: 209356 - DNA, 390 bp, Glycine max
  unsure (1)..(390): unsure at all n locations
agcttgaccaatcccgacccaacccgggcatattcagtcagtgagaacctgtgatgtacctaaacaggcgatctcctggcagtcaaccaataaaagaacaaagtccacaaagcatggaggcttgtgtggcggttggcgagctatgaatcttgagtgatatctggaaattggcctctggtatttgattaccaagggtgtgtaatcgattacaaggcttaaaaatggagacaggatgttaaaatgacctttggtaatcgattaccaattgtgtgtaatcgattacacagagtaacagggctctggtaatcgattaccagttgggtgtaatcgattacacagggagataggacacttgtaatcgattaccatntangtgtaatcgattacaca

SEQ ID NO: 209357 - DNA, 389 bp, Glycine max
  unsure (1)..(389): unsure at all n locations
gggcccagacacagtatacacaaccctgttccaccacataaaaaggtccaaagaggaaggccaaagaaaaatataaagagatctgtagatgatgacaatgtcacaggacataagctaaagaggaaattggctgagtttacatgtggaaggtgtggccaaaccaatcataacattagaagctgtaaaaatattggagttcctgttaggccaaagaaatatgttgcaccatcaacttcaaatgaggatgaccacctattatctcaagatgaacaagctntgaatgagactgaagaagctgctgctcatgttcaacaagatccggtggagataatttatctcaccctcattgcacaagatagtgacaggagtgatggtaatattgtacaaca

SEQ ID NO: 209358 - DNA, 410 bp, Glycine max
  unsure (1)..(410): unsure at all n locations
agcttgcagagatctttttgataaactctatactttaaaatataaatctaatcaattacttctttatgataattgattacattgaaaatttaatcgattataggcggntataattgttttctctataaatagtcaccttgtgttctgactttcatgcattcgagtgaatgagtttagactgagcttttgcgactcacacattctagtctttgtttatgaagtgttcatgggtaaagtgagttattaacatctttgttcgttcaatcaagcattggtttttgcatttgaatgaccaagttgtttctttccttgacacaattttcatatgtttttacatgttgttttagcatatgcatgagtttctgaaagaaggctagaatagggttttctagtttgggctaaggatatgt

SEQ ID NO: 209359 - DNA, 477 bp, Glycine max
ttacgtgaactataaatctcagctagtgagtaaattaagcccaaaagtacgaataaataatgaaatgatagctaattaagaaaaacaaactaattgaggatataagggctaattaaggaatatagactaactgagaaaaacatggttaattaaggaaaccagaataattaatataagcaaaataattaaggaaagaaggctaatcaaggaaagaaggactaattaaggaaatcagactaattcagaagtctggtaatctgtacctataaaagaataagagagaagaaggagaagacacatggaaattccaagagaatacaattccttatataagacaaaggctagaagaaggtgaagcaaacaatgagagtcattccttccctctattccctttcttatcttttccccctgtactaaacattcccctcttgcaattgtaaagccttcatgacaatgagaggctagaacccctttatg

SEQ ID NO: 209360 - DNA, 409 bp, Glycine max
agcttgtaacgccataagcaatggcgagaaagacgatgccgccattgacaacagcgagacatgctgtgactcactgcccatgccgccattcatactggcgggacatgctgactaggaaagatgagcatctcgccagtccttcctgcgagacacgagcccatgccgccattggtactggcgggacatgccaacgtggacagtcccgccattggctcctacgagacacgttcacgccatgcttaagtctgaagatgccactgttgatgatgagactgaagcattgtgatgcaggctagggctcaaaggctagggctgtggttcacatgcattatatgcagaggctgaagcatttttttcgtgatgcaggctatggctagagttgtagttcacatgcattctgtgcaagtat

SEQ ID NO: 209361 - DNA, 480 bp, Glycine max
  unsure (1)..(480): unsure at all n locations
tatccatgaacactgatatatgtagaagcaagcttcatgatgacgtatcaagattaattcaagttgttttgatgataacaaagatgatgacaaaaagctcaagagaatgatttcaagattgagtcaagaacaattcccaagagaatgatttcaagattgagtcaagaacaattcaagaatcaagagaaatttgatttcaagaatcaagaatcaagaataatcaagatcaagattcaagactcaagattcaagaatcaagagaagactcaatcaagataagtattaaaaagtttttcaaaacattgagtagcacatgaagttttcacaaaatcttttaccaaagagtttttactctctggtaatcgattactnagttactgtaatcgattaccaatgacaaagtttggtttcaaaagctctcaactgatattacaacgtctcaattaatttcanaatggtgtaatcgattacaagatattg

SEQ ID NO: 209362 - DNA, 398 bp, Glycine max
  unsure (1)..(398): unsure at all n locations
agctntgtttggagcttcaatggagaatgaaggagaagatttggctcgtgagggagagagagagctgtctgaaaagtgtgggggctgagtgaagagagagaaaagctttttggttttaaataaaaagggttttctctttttttctattattttatttaatcaatgccacatgtctccatttgagtggagcaaaaagggcccactttcccttttgactgtgacccatactcagccacaaaagtggggaaaatctgacctttgaaacgctaaaatccagcctcggtttgtgtgccgtttctttggttccagttcctcgcgtttctctgcgtccgtcggggccagttttcgaaagcaagcaatatatatatcaaaacgctcagaatagaaccccgagcgtg

SEQ ID NO: 209363 - DNA, 426 bp, Glycine max
  unsure (1)..(426): unsure at all n locations
actcaagctatcagcagatgttagaatgacccactaacctagaatttatataacttaatgccattaacctagggaattaaaacaaacttaatggctgagtgttactgaaattggtggcaaccaaaagtcacccccaacagccaacaagtcagccaccatttggtctcccaaaaggctgatgcctaagttgccaattgggcccttattacaacttgaactagagcccttttagttgattaacccaaaacatatttttggtcagccaactttacaaggattgtgccattatttatacaaactaaacactctataattgaaataaagtggtgtcatttagtcctccatttgggccatgatacaactcacaaccttggactttatttcctgaaacttgngcttgtttcaaataatatgtacagcacttgt

SEQ ID NO: 209364 - DNA, 406 bp, Glycine max
  unsure (1)..(406): unsure at all n locations
agcttagctntttggctaagtagctagtcataatcaaacatggtcttcatcatccttaagttcacgcatccaatccatactttagagattcacacaaaaataagcactaaatgatagtcgtttctctcaaaattttaaagatcacactctcaccgggatatgggtaatgcattccttcataatcaatctgacgaccgactaacattttcagacataattccaatcatatgctcattctcttctaatgacagcaaacttgatccaaacaatcatccgatcatcccaatccattcaattcatacatttgctaaatcaaatcatttccaaacactcattccataccaaacaatccattgcatacaatgttcaatgaattcaatgttcaatcaagctttttgacaagcac

SEQ ID NO: 209365 - DNA, 492 bp, Glycine max
  unsure (1)..(492): unsure at all n locations
tggagaattatggcgtacccatcacatgtggtactaggtggcggtctggcgatggngcacaacaagctcttcacattcacaatgcgcgcataaacccaccatcccctgttgcccacctacaactgagctcacgtactcccacgtaggccatctcctcggtgctctcaacaccgggtccccatcaattctctcaagctgtcacaacatccaagcaaaacaacgttcaaacagcacaagctatcacagccaatcaaaacaaagcataggcataaaactctgctcaacacatcaaccaaaatcacagctggtctcacgtaaagaccacagtaacaattgcttcgatccaattcgtaaccgttggatcgactccaaaattttactggaagtctatagtgtatcagcctgcattttgaccgctgggatatactaacatacatccagaactcattctgcactagacttttcacagccaacacacacagacattttctg

SEQ ID NO: 209366 - DNA, 477 bp, Glycine max
  unsure (1)..(477): unsure at all n locations
ctcagctagtacctctcctgtcnttgacactgacaatgaccttttattnntgtagtttaaattgccttagtaggatccagtgcgccttttaattggatacacattggctagtagtgtttaaaagatgaaaacaatttattttgttgcaatgccatagttgcaagttttntgttcatcatgctttgcctgagagtagcctattctgatgttgctactcttgtggtgctggtgagccacttgattggatcccaccttcctctgcacctagactgaccactgctttgacaacattggattagaggagtcttaccaaattaataggagctttgttttaccctctttgctcgtgttcttttgctctttcttgctttcattttttatgataactgatgcttgacttacaattttgactcataggtttaccttctgcttgctcaggatancagctgggactacaaatgtactgatctataatac

SEQ ID NO: 209367 - DNA, 395 bp, Glycine max
  unsure (1)..(395): unsure at all n locations
agcttctccgaagggcatggttatttccagtttcctgaaaatatctaaaaatctcgccaaataacgatctttttccttcttggaaggtaccataggatatggtacttccacagctttttcacttgtactcttctttgcattcttattatttttttcttctttttcatttttttcattttctatatctttttgtttttcttggtccttcaattctttattcttgaccattatttgctcctctttttcttgattactttcacctctcaacttatttttcttgccatcagtacctttcttgtcagcaattttcttcttatgcacaacattatcctcatcctcagcctccataaaccttntactccttgggattatgttctngtattgccacaaaactg

SEQ ID NO: 209368 - DNA, 425 bp, Glycine max
  unsure (1)..(425): unsure at all n locations
tccatcaagtggtaatcagagcacaagagcttctattttgttctccatanacctcaattaattttcagctttaccttctcctccatcggtcgttcttcatttatctccatgtatctcctcatatgtcttgtgctaaatgttgttaacatgattctttagagtttccaccgattaaacttgctatagaagctagatttgattctctatggctcaaatttcttgttcttgttccttaaccatgaattgtgttgagtttaagttcctttgaaatttgtcttgttattttttatggctgaaactgtcaatcggtgaatacaactaactcttgcgtataaaacatggtggaaatcgatccaacctctcccattaatgggtatttatagtgttgaattactttttgttaagatacgaataatacttacact

SEQ ID NO: 209369 - DNA, 402 bp, Glycine max
agcttagacgtttaccttcaaagagattgctttatattattgcctcatcatagattccttgcattaattctaatgaatttttatttatttttaattataccaaaacatatcctactcattcattatttaatttatagtaagaaatctcttcataagaattaacagttctctctgctcccccttccaccaattgaattagtttttatttttttaaaaaataaattataatgtaagagggaactataatgacagtcaaactatcactaattaagatattgcacatgtaacacattaggtgaagatttaaattaaagtacaatataaattcgttaaaaaatattatggagttcaacgaggttttgtaaatgggttgaagtggaagaaaaattagatgcttatttt

SEQ ID NO: 209370 - DNA, 468 bp, Glycine max
  unsure (1)..(468): unsure at all n locations
tttggtgtgtatncaaccaccttctctctgtatactgtttaatnttacaagntcttctaattcatgataaaagtaagattcttatagaaaccatcatatatgcttcatcagtgctatcttataacttcatcttgcatgagaacctaaaataatctgataatgttacatgaaatgctgtaaatggtataggtttgttgtgggaccaacttgagatgaaataatactttcagcacatattagtaaaattacaacttggaaagatccaaataaacatgtatgttagagagcagttttctggatccattaatttgtgattcctatattgtaaaatctgtatcttgtacattcaaggcacattgaaaacatttagtcctgctatataagtagttgacttgtcctatagaaagacagggtatataatatatgtcttctactttcactaacgacatatcagagtgggaatcattt

SEQ ID NO: 209371 - DNA, 396 bp, Glycine max
  unsure (1)..(396): unsure at all n locations
agcttagaaccctctatataagagagagaatttgtttccccctagctnnnggccaccattttttaaagagagggaaagaacttcttcttctcccttgcttggtggggtgagtgtgaaatgaaaagctctangtgagtatccaagcctcttttcatgctcttctctcttgctacattttcatggctatgccctagggagtgctaaaggattaaacccatgccatactcatttgtttgtttctttgtgtcaaccaagtggtaaggaaggactacttggtcacttagaacctatgctttgattataagaagttaaacatcatttatgttgtgtttgtatgtgattatatgaaactcaattntgtgttgtgaccttgtgaatgatacatgctgtttattg

SEQ ID NO: 209372 - DNA, 396 bp, Glycine max
  unsure (1)..(396): unsure at all n locations
agcttttcgattcattctatgtacccgtagtgtgtccacattgngtttcgggcattnttattctcgttttgtttactttttatacccgctgttgacgtgcttaagccattttacttaagtcatttctcgcttaacttaaaaataaaataaatttccaccgaacgtttgaattgtattatccgataacttcggttaaaataaattccgaccgttcagtcgtgccgtaaccacgttggaaatcaaaaagaggtaaaaaataatataataataaaaaaaacatcttttagcaaaataaagcggaaaatcaatcggacgttttctctttgggatttctcattcttaatcgaattgattaataactaaagtgaaactaaggctaaaatcaactcgcctagt

SEQ ID NO: 209373 - DNA, 411 bp, Glycine max
  unsure (1)..(411): unsure at all n locations
tgagatgaggaagtgtngaagggtgaaactctctgcttttattgttgaccacagaatggtacctggagatatgtcgcgggggtcacgagaccttgtggacgtcaggtggggtgctattgcccaaaaccaagcttgaccaatcccgacccaacccgggcatagtcggtcagtgagaacctgtgatgtacctaagcaggcgagctcctggcagtcaacagataaaaggaaaacaagaccacaaagcatggaggcttgtggtggctggccagctgtgaattctgtgtaatatgtggattgtggcctctggtaatcgattactaacggtgggtaatcgattacaaggcttaaaaatagaagacaggaggctaagatggtctctggtaatcgattaccacggcgtggtaatcgata

SEQ ID NO: 209374 - DNA, 406 bp, Glycine max
agcttcactaaactaatcagatgtatatatatatatataggccgacctatcaggcttataaggctttttaatatgcctaagcctggcctatttaatttaataggcttttaaaaaagcctgagcctagccttttaattaaataagtcacgccagggcaggctttatataggccagttcgtacgcccctgtaggccggactagcctattcccacccctacctgtaagcataagtgaatagtaagaataaggacttaaaacgttttggtagcctatcgtatataatatttgtaggaaagtttaattttggctatgtcttgtgatttaaaattgtcttattatttttaacgaaaatatttgactttgctagagaatttttttatatttttaaatatgagacaaactttta

SEQ ID NO: 209375 - DNA, 436 bp, Glycine max
ggaccttaaatactaagcttggtatcaaatattggatttggtaatcgatttattctatgaactaaggcaaaatctcaatagaagtcaattcttgtgctagtcttttcaccttgtgattgattacactaattggtacttgattacactatgaaaaacttgcttttcttccaaaaccttatgcaccaagtcatcatgaatgattatccttaagcatgtagaagttataaaagtattctaagcacacacatgcctaaatagaacactcaatacaatgccacacctataaaatatgttttggcacgtaaaaagataaaaatcaaaacctaagctaagagatacaagattcttcaatctcattttcctaagcagaaaacctttgtgaggtgaagaattgtatatgtgcacgctaaaacatagaatccctctgatattgaac

SEQ ID NO: 209376 - DNA, 393 bp, Glycine max
  unsure (1)..(393): unsure at all n locations
agcttctctgaagttatagatgagaaataactcaattcttttttcagtcatccactcgctcaacgcgctctgtgcgctaagcgaatcatccttcatgcgctgagcgagtaaccactcgcgctaagagcgccaatccctacccattggctaaaaggtctcgctaagcgagacagctgcactaagcccaaaaccccctctggaattgcatttaatggaattgggctaagcgagttatctcgctaagcatagcacatagtctcgctaagcgcaactgtatgctaagcacacatacctctctgcctggacccccatgnccaatgggctaagcaggtcatactagctaagcccaattatctccctagaatggcattgcactaagcgagaccatctcgc

SEQ ID NO: 209377 - DNA, 337 bp, Glycine max
aaatgcatcatcgcaagttgcttactccatcaatctcttctcatgcctactcaattcagacttctacctcctttcgtcttggcatcaaagacacggtcatcccattcacctctcgtgttcttcatcgtgcgcctcaagaccaacaaaaggtctattcttgtctcatctggagtcttggtattaataagagtcataaattaccattcaatgaatcttcgttgacgcgcaccaatcctctagatattatatatatagtccgatgttttgcaaggcggaccttctctctttgtttatattcaatataagatgtgaacatctttgaccctcacaaagaaaa

SEQ ID NO: 209378 - DNA, 391 bp, Glycine max
  unsure (1)..(391): unsure at all n locations
agcttagagcctctatttggtttgaaaaaacattgtctgttctcatttcttgctttcactaattacaaaataacccccctgttttcattttctttccaattttcaaaagtttgtacaagaaatgttgattggtgaaaaaggcattatcttttcacttttcaccatttttttgtacaatcttcaatgtggcatttttataattattaatgaaaacaaaaaaaacaatttctcaaacccaataggcccttagattgcattacaaagccaatggacgcaaataggtaaatatttctaatagtctcagtttcctatgtaatggtacaactgtaactagaaagctcanataagttattcaatcttaacaaataacctttaatttcaataaacaata

SEQ ID NO: 209379 - DNA, 403 bp, Glycine max
  unsure (1)..(403): unsure at all n locations
agcttagcacgaanaaacttgaaggcacgcttattgcgaattttacattaagngcatgancaccgtcatactcattaagcgcagcagtcatgctttacgcatgattgcatgaaaattaaactgactaatgcctattaaaggagtaggaagcgaaggagaaaaacacaccgagactcaaagctttctactaaatacacccaaaagcctgtacattttaaataagagaaaccctctctagagccatctcccacccgctccccctttctacatctatattcttcttcttccatcccgattaatgcaattcttctcctactatctatataatgtcattccaatgtttattggcccttttctatgcttatggttatcgattatgcgttgatcatacatactcatgcat

SEQ ID NO: 209380 - DNA, 318 bp, Glycine max
  unsure (1)..(318): unsure at all n locations
aaaggatttggtgaaagataagttaactattagtgataaaacatagatttgggttagtggaaaatttaacaatgtggtaatnaaaattgtttgtaagagaggaaaattgaatgatgaataaagtttgtgtgaagtaattatacaaaattaagtttattcaaaatcaattatgtaaatgctggtgcaaacaaacttacttctaaccattacgtttaaacaaaataaatgttgaaaaaatgctattcaaattagtaaatacctttggagatgaattatttagaaattacgagggttgactgaacatgtaacatatggata

SEQ ID NO: 209381 - DNA, 397 bp, Glycine max
agcttcttagtttcagctgatgaagatcaatttgtgtctacttcatgcactcctctaatgacaatagcatcattgttgcactaaactgttgggagatggaagccatcttctcaattaaatttctagctctagcagaggtcatgtcttcaaaggctccaccactggcagcatcaatcatacttctctccatgttactgagtccttcataaaaatattggagaacaaactgctcataaatctggcggtgagggcaactggcacgtagttttttaaatctctcccagtattcatatacgctctctccactgagttgcctaatgcctgacatatactttctgatggccatggtcttggaagcagggaaattattttctaagaatactttcttgaggtcatc

SEQ ID NO: 209382 - DNA, 420 bp, Glycine max
tttcatttgatccagcagaggaggagcatacaacctatttctcttctttctcacccacggaattcaagcacaagagacttggtcattgccatcttgaaagaatgctaaacatgaaataaggaaatatgcaaaagataatttgaagaagtctcaaatgaaggaatgcaaatctgttagcacaccaatgaatcaaaagcagaagttcaacatggaagaacgtgtcgataacattgatgaaagatattatgggagcttgattggatgtctaatgcatctcactacaacaaggccaaatattctatttgctcaaaagaatataactgaaatctttgttgacaatcaagtaaccaatgctattgcatataattccgtgtgtcatgggaagactaaacatttcaacatcaaagtctattatttgat

SEQ ID NO: 209383 - DNA, 396 bp, Glycine max
agcttctggtgggacatcttgacttgctttccaatctgacatttaccacagattctgccttcttctattttcagattgggaatgcctctaacagcacttttgtcaaggattttcttcatgcctcttaagtgcagatgtccaaacctttgatgccatattctgacttcatcttctttggaggatagacatgtggaggagtagctggtttcttggggtgtccataagtaacaattgtcctttgatctgctgcccttcattagaacttcactcttctcatttgtcaccaagcattctgactttgtgaagtttacattgaatccttcatcacacagttgactgatgctgatcaagtttgcagtcagtcccttcaccagcagtactttgttcagactaggc

SEQ ID NO: 209384 - DNA, 220 bp, Glycine max
cgcattgattgccagcgcgcgcgactaccacgatcgtggtggtcccgagagccatatgacagaaactcgaccttgtgaccctttctctgtggaattatgccctactatctaaggccctgagcaaggatgaatgctgcttcctaatgcgtcactctttcgttatgacacgttactgtcgaacattatgttcccggtgatactattactaagacccatctcc

SEQ ID NO: 209385 - DNA, 397 bp, Glycine max
tagctggaagcgagaaagtgtggaagagtcagtcttcctacttttattcgtggaccacagagtggtacctggagatatgtcgcgggggtcaggagaccttggggacgtcaggtggggtgctattgcccaaaacctagcttgaccaatcccgacccaacccgggcatagtcagtcagtgagaacctgtgacgtacctaaacaggcgagctcctggctgtcaaacgataaaagaacaaagaccacaaagcaaggaggcttgtgtggtggctggccagctatgaatcttgagtgatatttagaatatggcctctagtaatcgattaccaagggtgtgtaatcgattacaaggcttaaaaatgaagacaggaacgtaagatgacctctggtaatcgattac

SEQ ID NO: 209386 - DNA, 354 bp, Glycine max
  unsure (1)..(354): unsure at all n locations
ntatctaaaggtntgcatcttgtatgagagaagttctctctttgtgtatgagatagatcacaagaatgacctccaaggagccttctaaccattaagaggtcaccttcttcgtgggggtagactccctcattacactcttcaccccttactatatcttcacttccactagaggaagggcaagagagagtctcctcttgactactataaatttcttgaccgctcatgaccataatctaccttgtggggcatagagaggcaatgcgacctctcacaagacatttgaagcattcaataatactagtcctttgctgggaactaggcttaggggcgtagttctctatggtcttaccttta

SEQ ID NO: 209387 - DNA, 401 bp, Glycine max
  unsure (1)..(401): unsure at all n locations
agctttgatgcaacattnggagaggttaatgtttcaacgagatgatgcgctccatgagaggttggatcaaatggagaatagagatcataatgaagaagaaaggaggagaagagggaatgatggtgttcctagacaaaaccgaattgatggtattaaactcaacattcctccatttaaaggaaagaatgatccggaggcctacttggagtgggagatgaaaatagagcatgttttctcatgcaacaactatgaggaggaccagaaggtgaagcttgccgccacggagttttccgactatgctcttgtgtggtggaacaagctacaaaaggagagagcaagaaatgaagagccaatggttgatacatggacagagatgaaaaagatcatgatgaagcggtatg

SEQ ID NO: 209388 - DNA, 442 bp, Glycine max
tcctagaaaaccatgatgtgtgggttttccttctctcttacaagcctagaaaggccttaggattcattttgtgtgtttatttccacatcgcatgagacgaaatgcaaagattactacttgcgttagttgtttatgatggaatgagcctaaacacttgtgcttgactaaaacaatgaccatgaggctttggttgatgatccttccttgatatttgtcattcttactagcttatattagttgtgactctggtacatatgttcctatctttcaaaagttgcatgttctgtgaagtgacattgattgaagcattccatgatattcatttcatatgattaaatctttctgtgacacaagcatcactctgattgaccactgtattttgtcacttaaagacaagtgaagtgttctttctttgcttgaagacaagaaactctgtaaattt

SEQ ID NO: 209389 - DNA, 400 bp, Glycine max
  unsure (1)..(400): unsure at all n locations
agctntacagcacaacaacacataatctaggtgtccaacacccctcaattcaatgggttttctaggtttgaaaagcgaaattgagaatgaggtgattttggagcaaactctcacctcacacaagtccataacatctatttagacttgttcaaactggatttacacctaaaatctcaccgaatcaaaatttgactcttcaacacccaaatttgccctagaaatggctctttattcactttgatcatttgtttttctctctagcacagaccaagctttctcccaagtcctaaatgacatttcaagctagtattaactcactttaacctccatttaccacagaattcagactttgccttcccactctcaaagcctcactctntttccactcataacaccacat

SEQ ID NO: 209390 - DNA, 467 bp, Glycine max
  unsure (1)..(467): unsure at all n locations
ctgttaggttaaagtctcacgagtgtcatgagntgatgctacatattgtagccgtggctatacgagacatcttgccaaacaaagtcaggttagccataactcgcctgtgcttattcttccatgccatatgtagcaaagtcgttgatcctgtcaagtctgatgagctggaaaatgaggctgcaattatactgtgccagttggagatgtattttccccctactctctttgacatcatgattcacttgattgtgcatctgggcagagaaatcacacgttgtgggcctatttatttgcggtggatgtacccaattgagcgatacatgaagatcttaaaggggatacaagaatctatattgcgcagnacatctattggtgagaggacattgtacaagaacgcatgaactttgttcaaatacattgaaaagctaacctgtggccttctgagctcggatgaaacagatggggga

SEQ ID NO: 209391 - DNA, 394 bp, Glycine max
  unsure (1)..(394): unsure at all n locations
agcttagtgactagngacatatattatgctatttttggaanaaccncggggaaataatcgcttatttttcgaaaattctctgagaaaactaaaaaaaataggtgattatttctctaaagtaaattgaagcaatcatacattaaatataaaaattgttattggtgttacctctacgagcagcaagcaaagcggcctcattgacaacatttgccacatcagcacctactaaaccagtagtaagagaagcaattaaatggcaaatgatgctagtgtcctcctccaaaggaactcctcttagatgcacagccaatatctttctccttccttcttcatcaggctcacctacatatacttttcttgagaaacgaccagtgcgacatagagctggatccaa

SEQ ID NO: 209392 - DNA, 391 bp, Glycine max
agcttgccagtgctggagaacataatcaatctaacttctgcatcacacagaatagatagctctctagctttcttcactaacccatttcttctcttggaaaacgtcacttgccggctagtggaattgtcaatccttcgaatcacgatctttcctctccccatcttttcgtacaaagtcaaaacttaattactagctacggttctttcacaaagttttctcaaattacaaagaaatttggaggactgattgaaaaattaaaaaatgaaagaaacacaataaataaatgaggaaaaaagagaatataatataattatggtatgaacagtgctaataactaccgcagacaaagaataatgaaattagtcagtaacttacttgaaaattatggaac

SEQ ID NO: 209393 - DNA, 344 bp, Glycine max
  unsure (1)..(344): unsure at all n locations
gacacttagaaactcaagctttatagagtgggtcattgaagctgatgatcctcttgactcttacaaangcaagcaagtcttgctggagataaaacctataatgccatagtgaccagcagttctatgatagttattataaggattgagtgtttaactaacgctgaccaaatagcaaaattggtcttatttttaacaacaatacctgaaagtcaagtgccctatctaagatcattcttgacatcatttctggcaacaggctgtattattccctttattagcacgacaacataaatattaattggaaagagcatcgtgataaaccattctttccatcatgcatcttt

SEQ ID NO: 209394 - DNA, 390 bp, Glycine max
agcttagaggagtgatagagtgagttattatttcttagtgactataatagtttaaactagaaaatgactgtaagtatcatgaaacaaaatcataagtcataattaagtgtgaagtcttgttgtttatgaattgcagcattcttatggccaccggtagcattttgtcaatttggagcttggattttttattttattttttctgaaactacggcaagtggagctgcggcaggagagaaagagaataaaataggaaaaaaacaaaacttattccgtgataatttaatttcattaagtcagcaccacacataaattaaaaaataataataaaacaaatgaatggattcaaatccctccatctaattgtataatggctaatcatttattcattaa

SEQ ID NO: 209395 - DNA, 400 bp, Glycine max
  unsure (1)..(400): unsure at all n locations
tgagaggctntccttagaagaacactctgtatggatttgtttcaagcatangaacatgcgcgagttcgacacagctagtgtaaatatttgcctctgaatgcaaaatacatggagactgaagtccatctagtatttgtattgcatcatccgattatttgactctgatgtgtgcaagacacattttgaccaatattagtctaatttaattaccaaacacataaaagtaattgaaggggggaagggaatgagggttcaacaaatcatacaattataaaaacaggaaataatgtgcgtatacataatgaatgattatattcaacgtttctggagctcaaattctaactgaaccacaaagcaatgacaatggtaatggttaaacacaaactcatatccattgaat

SEQ ID NO: 209396 - DNA, 399 bp, Glycine max
agctttttcttaagcttttgctacaacctttttctccccctttggcaacatcaaaaagccaaagaactcggaaatcaacacagttataacaatggagtagcaagatataagtatcagagtattaaatccaataagccaaacttataatcaagaaaataatcaaaccagaattcaaataacataaaatgtcaacaaccacaaaatatccaagactgaaacacaagaaaaataagcaaagtacttagcataataatgtaaattctaagaaactaaaagccaaaatacacggcttataaaagataaataagcagaatctaaaatctaagaagacggaggaggtggtggaagatcaaaactctgacgaatgtatccgacatcctcttcaagctgtgtaagacg

SEQ ID NO: 209397 - DNA, 338 bp, Glycine max
  unsure (1)..(338): unsure at all n locations
ctatgtangagtgcgtgagctcaattgaaaggtgggcaactggggatgggtgcttatgtttgacttgtggaagtgggagagttgagttgcgccatcgcccgatcgccacctagtaccacatatgacgggtgccccataatcaaataagctcgatgtgagaaagcgtggaagagtcagtcttcctacttttgtttgtngaccacaaagtggtacctggagatatgtcgcgggggtcaggagaccttgtggacgtcaggtggggtgctatttgcccaaaccaagcttgggtggtatctgaaatttagcctctggtaatcgattaccattcgtgggtaatc

SEQ ID NO: 209398 - DNA, 402 bp, Glycine max
agcttgtatagttccctaatttatggttatttcatagtaaattgtgtaaataaatcttgttttatggttaatgctgtctctataacatttccattggaattaatgataaaatctgtgcatttttaggtgaaaaagaggctaagttttgaattgcaaaaagtagcagttgggctaagctcagtgattaggctaagcgcataaccatcgctaagtgcagcttcagcgcgcttagcacaaaggagaatctggcagagcatcagcatcaaagtcgcgcgctaagcactgtaggtgccttcagccaggctatgcttgagactggcgctaagcccaatttcacttactcgcgctaagcgcgagggtggcactaagtgcaacaccgtgatttcaaagcctattttgtgc

SEQ ID NO: 209399 - DNA, 483 bp, Glycine max
  unsure (1)..(483): unsure at all n locations
taaaactaagcttgaggcanactggatgcgntggtcaacttggtaacccatctggccttgaatcagaaatctgtacctgtcgcaagggtttgtggattgtgctcctctgctgaccaccatacagacctttgcccttccatgcagcaacctggagtaattgagcaacctgaagcttatgctgcaaatatttacaatagacctcctcaacctcagcagcaaaatcaaccacagcagagcaattatgacctttccagcaacagatacaaccctggatggaggaatcaccctaacctcagatggtccagccctcagcaacaacaacaacagcctgctccttccttccaaaatgctgctggcctaagcagaccatacattcctccaccaatccaacaacagcaacaaccccagaaacagccaacaggtgaggcccctccacaaccttccctcgaagaacttgtgaggcanatgactatgcagaacatg

SEQ ID NO: 209400 - DNA, 410 bp, Glycine max
  unsure (1)..(410): unsure at all n locations
agcttgaccgataaaattcataaaattatgaaaggtaagtaataaaatttacaaaaatgaaacttatatggtagaattcataaaataataaaaatgggagtatacagtgtacaattaaaccttaatataatgagctaacttgaatagaagaaaaaaaaaaaacttgattaacctatcaatactaaatatgtatagtaaatggcgtttctaggaataagtaaggtctttaaaaaaaagggaatcaagcaagagaataagaattttaaattataattagtcataacctagtgattagtcgtagttttgaaaaggtgattgaccgatacaaantcttccttttaacagtctatgctcagtagctgcggaaaaaagaactctaattattcttagcgcaaaatctctacttaata

SEQ ID NO: 209401 - DNA, 462 bp, Glycine max
  unsure (1)..(462): unsure at all n locations
ntaaaggagaaagagaaacaaacgtatgagagtagggttgaagtgtccacgccagcaaaaaaattaattttagctttaagaggagaaagagaaaaaagcatatgagagagtagagggaagtgtacccgtcagcaaaaaaaattaattttacttaggtaacatctactgcaagctattcagcaaaaataaaataaaatctattgtaagcttaattgtcatatgacttgagtaaaaatggtttgaaagataagacgagtatacatctataaaaaaagaattaatgttatttaatcttattaatctcaaataaaaaatataattattttgtaaaaaaatattaacatctgatatcatatacaaaaaaaatcattaataatagagatacataagaaaatattttaaataacataaaatacaataaaactatttatatttaagaccgtatttgtcttatcattatta

SEQ ID NO: 209402 - DNA, 408 bp, Glycine max
  unsure (1)..(408): unsure at all n locations
agcttttaactgaanttgcaatgttccaattcttttttaaattgtgtaatcgattacaatatattggtaatcgattactagtgtatctgaacgttgaaattcaaattcaattgtgaaaagtcacatcttttcataaaatgttttgtgtaatcgattacatggctttggtaatcgattaccagtgacaagttttgaataaaaatcaagagacgtaactcttccaatggttttctcaagattttctcaaggttataagtcttccaatggttttcttgactagacatgaagagtctataaaagcaagaccttgacttgcattntatgtacttgatataactcttacaatctttntgaacatccttttgaacttcttcttcttcttcttcttcctttgcctaaaaagctttc

SEQ ID NO: 209403 - DNA, 461 bp, Glycine max
tctccctgatgctgccttatgttgaatagatcttcacattattaaagtcctgacttcttaggattcaagaacaagataccttttcaaatattatcagaacctactttctttccttcttggccttctccataagcaatgttggatcaccaatcccatctccaaacaggatgaattgcaccccataagttcatccatattttgcattgaaagtaaagaatactttcagtgcaacttatagttgttgaatgtggagaattgctcagttgaagaagtatggagaatcaagaaccttctgtaagtcaaaatcacctctctttggcaatggagggaaagccaaccctggatatgtagtctggaagccctcaagcaactgtcaacaaatcacaacaaatcaaagtttcatcatgagaaagttaaagaaaacacagcctattgcttttgtttatccactctggagctct

SEQ ID NO: 209404 - DNA, 376 bp, Glycine max
  unsure (1)..(376): unsure at all n locations
atttgacaacaagacaacgagggatactctnnattatatatactgagtcttatacatatgtctgcttgtaatgacttaaaaatacattcgatctgcacgcatggttcttcaataatcggagtcaatgaagaaataccaacaaaagaaagagaattgattgcgagttacatctgagatttggttgatannataaagatgtatctgcgaatcgtcattgagaaagtgtttttctcttctcacttcagtcactccagcaatcatatctggttgattgggctgtttattctttctgtaccaaatattnntatataagaatgttctctttttgttgaaaagtatgaactaaatgtgaagggtgatggctataaatttggta

SEQ ID NO: 209405 - DNA, 397 bp, Glycine max
agctgtaatgtgacaggatgcgactctaaacttttgaattttattttcaatgctcaaaggcactggtaatcgattaccaaaacattgtaatcgattacaactttttaaaattaattggaacgttgtaaattcagtttgaaaactttttcaaaacaattttgctactggtaatcgattgcaccaatctggtaatcgattaccagagagtaaaaactctttggtaaacatgttttaagaaaaatcatgtgctactcaatttttgagaaaaacttttcatacttatcttgattaagccttttcttgagtcttgaatcttgatcttgattcttgagatcttgaaccttgaatcttgattcttgactcttaactttcttcttcttgactctattatgaactc

SEQ ID NO: 209406 - DNA, 432 bp, Glycine max
tgtattaattattatacattagaaataaaattgtgtgttttacagtgacagatgacatatatatagcacatagttagttattacatatcaaaataataaattttaaaggtgaccaattaaataaattatgaggccaaatttatttactgttaaagttatataattgtttctctcaaaaaaaaaatccacaagacaaaaataaatgatagtttataaacatttacctcacgtgaaaacacttttaaagacaaaactctagaaacacacgacggctatcaaagtcatttgttccataacaaataataatgaagagtgtgtttgattagatactctagcaatttatatgtttaaatattcatattacttgcctcatattaataaggatctatctgtaattatcacttctcggaaagtggcacttgattatatgta

SEQ ID NO: 209407 - DNA, 396 bp, Glycine max
  unsure (1)..(396): unsure at all n locations
agcttcacaaaaacttggaaatagctcatattgcggttcaaaaactgatggttttggagccaagtaacagtggtcattacagtctccttgttaacatgtatgctgaagaaaataggtggaatgaggttgcatagattcggacaaccatgaaggatctgggtgtagagaaaagatgtcctggatctagctgggttgaaatcaataagacagttcatctatttgcagcttctgatacatatcacccttcttatagtcaacttcacttgttgctagctgaactggatgaccagctgaggctagcaggctatgtccctgaactggggtctattntataatgacttanactcttccatgtacgagaatccttataaggaggatagatatctttaggataga

SEQ ID NO: 209408 - DNA, 472 bp, Glycine max
  unsure (1)..(472): unsure at all n locations
actcaagcttttttttcaatgtatatgcagaatgttccttttagttacagaaaaataaaatgacttcattcttccaaattntagggttaaactgatttttgttccactacttatctatttattttaaaatgtgacatcaaaacacactagttataatgttattgatcaagtgaaaaagagacatcataattcttagaaaatacttaagtcccacatcatctataaataaaatcccattagaatgtataaatacggaacattcctcatctcttgagttagttttttggggttgaattaagtctttcacactattcatcttaacatgatatcataacacaagcgatccagcactaacagttgaataagacgaaattagaagagttactattctagatgttcagtgggaagtacctatcttgataagaatatattggattcttgaaacataatccatttaaagataaaatataat

SEQ ID NO: 209409 - DNA, 396 bp, Glycine max
  unsure (1)..(396): unsure at all n locations
agcttgaaggtgtgtaacccaccatttccataatagaacactggtaacgtgtctactatcattgtgataatctttctctgttattgggggtgctacttgagctgccaagtctctccatatttgggcgtattctttgaaagattcgagccccctttttgcacatgttttgtagttgcatcctatccgaagccattatactgacactgcctaatgaaggcaaccattaggtccttccaagaatggactcgggaaggttccaagttagtgtaccaggtaacagctaccccagtaagactttctttgaaggaatgtatcagcaattcctcatcttttgcgtatgcccncatcttccgacaatacatctttagatggttcttggggcaagtagtccccttg

SEQ ID NO: 209410 - DNA, 401 bp, Glycine max
  unsure (1)..(401): unsure at all n locations
ctcagctttccctatttcctataatagggggagaagtgaaggtgttaaatgttcaaccctcctgttaattcgagatcacttgaaattagtgaaaaaaattgtttccgtgaagaanatccaagccgaggcgcttccctaacatttctgtaatgtttccgtgggtgatttcgcgaagattttcaatcgttcttcattcgttcttcgtcgttcttcgtcgttcttcagtcttcaaccagtaagttcccaaaatcgaacttttcaattcattctatgtacccttagtggtcctcatttgttttcacatgctcttattttcattccttttactttccgtacccccttttgacgtgctttagtcacttacttaagtcattgtctcgcctaatcgaaaaaataaaata

SEQ ID NO: 209411 - DNA, 400 bp, Glycine max
  unsure (1)..(400): unsure at all n locations
agctntgccacacgcctcttcaactctttatatttttacacacaaaataaaattcttttagcataaactcaaatgatcaatatttgaaaccaatgtattaaaatcctaactggctcattcaaccagttggactatgatccagttatgtctccaagtcgattacaccttatttcataactccaaaagttatgtctccagttctaataagttcttttaacacatttgtattgagaaacttgaaagtgtgaagagtttttacactgtcaactaattagaaattgtcatgcatgataatttattgacatttatatatataataactattttaaaggtcgtagctagtatgatttttgataaattgataatataaagtattctactgataacacataggaattaa

SEQ ID NO: 209412 - DNA, 349 bp, Glycine max
ttcacccatacaggcgaatgaagaaggcatttaatggttcatctgagtttgacagtgcaccgattcctttgtcaggtcatgaagtttttgatcgggtgaagaacatcgtcactatatatgggaagacacaaaataaggatgggtcccacaaccagctttggaagaaaaagtctatattttttgatctgccttactggtgtcatttagatgtgagacattgcttatatgttatgcatgttgagaaaaatgtatgtgatagtctagttgggacactgctaaacattaaaggcaagacataagatggtttgaaatgcccgcaagatttattagagatgggcatacgacaaca

SEQ ID NO: 209413 - DNA, 381 bp, Glycine max
  unsure (1)..(381): unsure at all n locations
agcttaatcctcttagnatccagttcattatttatttntccactcattggcgatatttagcgaccctgtgggtgaattcttctattatatatctccatcagtaatttaaattagtcaacaacctcagtgcagttccaggagaaattttgtgctaatattgataagttaatttttttttataaaataagagtgcagctatagtactcacacaataatgatgtttagttattaaaagcaaaacatttgtcatttgaagttcttgatgaaaaaattgcttcttgaaaaggaaattatcaataggttatcttttggcaatttgaatccttttaaatgagttcgacagggtaatattaattcttgtaagcacctcctagtgcgcat

SEQ ID NO: 209414 - DNA, 396 bp, Glycine max
  unsure (1)..(396): unsure at all n locations
tgcttgaaatgaggaagcgtttattggtgattcttcctgcttttattcgaagaccacagagtggtacctggagatatgtcgcgggggtcacgagaccttggggacgtcaggtggggtgctattgcccaaaaccaagcttgaccagtcccgacccaacccgggcatagtcagtcagtgagaacctgtgatgtacctaatcaggcgagctcctggctgtcaacagataaaaggaacaaagaccacaaagcgaggaggcttgtgtggtggctggccanctgtgaactctgattgatatatgggatatggcctctggtaatcgattaccaagggtgggtaatcgattacaaggcttataaatgaagacaggaggctaagatggtctctggtaatcgatta

SEQ ID NO: 209415 - DNA, 388 bp, Glycine max
  unsure (1)..(388): unsure at all n locations
cttcttagtattggctccaaagatgctggatgacttctcagataattgcttggccagttgacccacctggatctcaagggtttttagggttgacttagtactcttatggttggacatggtcacttgcataaattgagctagtgtctcctctagtttggtggtcctctgaaaaatatttggcccttgttgaggtggtctgntggaaggtccaccctggtccttattgaattgattgccagggtgtgatctccattgcccttgttgattatagggaccttgctggaacctctaaaatcctccttgggtggatccttgtctctattgatttcccatgtaatgaacttcctgagagtgttcttcaatgggaaagcaatgaccagattcatga

SEQ ID NO: 209416 - DNA, 393 bp, Glycine max
agcttgagaggaggaagtgtagaatggtgattcttcctgcttttattcgttgaccacagagtggtacctggagatatgtcgcgggggtcaggagaccttggggacgtcaggtggggtgctattgcccaaaaccaagcttgaccaatcccgacccaacccgggcatagtcagtcagtgagaacctgtgatgtacctaagcaggcaagctcctggcagtcaatagataaaaggaacaaataccataaagcaaggaggcttgtgtggtggctggccagctgtgaactttgattgatatatgggatatgggctctggtaatcgattaccaagggtgggtaatcgattacaaggcttaaaaataaagacaggaggctaagatggtctctggtaatcga

SEQ ID NO: 209417 - DNA, 465 bp, Glycine max
  unsure (1)..(465): unsure at all n locations
tgttggattatggggtacccgtcatatgtggtactatgtggcgatcangcgatggcgcanatcaactctcccacttccacaaatcaaacatgaacccaccatccccagttgcccaccttcaactgagctcacgtattcctacgtagcccttatcctcgttcctctcagcaccgggtccccatcaacccctccaagcttccacaatatccaagcaattcaacttccaaatatcatgaactaccctaaaccaagaaaacagggtagaggcagaaaactctgcccaaaacacattcacatattacaactnttcttactcaaataccccagtaacattctctgtgtccaattcgttaaccggtggatcgactttgaaaatttactggaggggtctagtacataagtctacatttttcatcgttggatctggtagaaaatggtcagaaaccaataggtactacctttcca

SEQ ID NO: 209418 - DNA, 409 bp, Glycine max
agcttcctcggggccatttcctgcgaaggcattaatttggaaagttagttttaccagggggacactactcttaaaacaaaaatggcatacaacctcctcccataaatacaaacatcaatctaaatttagagcaagcttatgcgcatatttccttacgaacgttcacttgcacaagacatcctatcaactaagaaaaatgcacccatatacaatcaaggtagcttcattacctagattatttacatgtacttccaaggtgtatttgttatttacatcacacacgcctccttggctgaatttacatacatgcatactcaaagcattttggggtaccaaaaactgcacatgcgctcatcttggtatttctaatacccatacatatacaaacttcacgatgaatcttgactac

SEQ ID NO: 209419 - DNA, 411 bp, Glycine max
  unsure (1)..(411): unsure at all n locations
tcatctaattggtcatacatatgaaccagcgcggcaacttcccatgcataaccaccactctgacccaggtcgtgaaaagcctctagatgcaccacatgaacatatgttgcactcttgttagcaaaaagagtgcaacccaccaggtgcaacagataagcaagagctgctacaatccatcgtcgtgcctcgcatctcatctcatagatgtctcgaacccatcccagccgtacatatgccccgcgtgatcgtgttgtctcggctctagccttctcagcagacacctcaagcaactctatcaacaaaaatatcgcctcgtccacaaaaagagcatganagctatggaaggcgccactgataggcaaatggaggagtgacgacacatcatccagtgtgatcgtcaactcttctact

SEQ ID NO: 209420 - DNA, 370 bp, Glycine max
  unsure (1)..(370): unsure at all n locations
tagcttgctaaagtggatccgaagaccattttttattatcaaaagggnttcatccaacgaagaaaattcacgagagtgttggcatcacatatgaaacgatcaacatgttgtattctaatccccttggcggccatatggtgcgaaaaattgatgttaggaaagcttttgacacattggattgagattatgttcctagagggtcttcaatcttttggttttaatttgaaattctatcaacggattcatacaatattaaactcaagaaagctctcctttantggaaacaaaaatcttattggtttcttcaattgtaaaagaggtgttcatcaaggcctatcctctatctcctctcttggactacttagccgag

SEQ ID NO: 209421 - DNA, 228 bp, Glycine max
  unsure (1)..(228): unsure at all n locations
agcactacgaatggaaatgaaagtgtgtattatattcatgaagacgaggacgattcaaagctcctcctgaagcaagagaatgatncatatttcgaaagacggcacagcataatatcatctctttattcatgatcgagagaaactgcctacagcatacctgctttctgtgtaatgagaagtcacaagaatttatacagtttagcacttgaattactgtagttggtgagg

SEQ ID NO: 209422 - DNA, 411 bp, Glycine max
agcttgcttatatggtatggttataccatattgtttatggatgtcatgcaaaatatctttgggtttataattgatgttatctcgcaacctttcttctatgaaactcacaatccaatcaacagaagcctgatggtgcccattgtttgcatttctcccacaggtatgtgtcccatcaatacttctaatagtaaatgttggggcattatggagcttgacagcacgaatccgccatggacagccatctgaggcacacttagcgaagtagcgaatcacgtcacttttaatagtacaaagctcaaaatgctgtgcaatggcagcttctttaattgcattccgaaatgccttcacatcatggaacttttgaccgacaaaaaaattgtagtcttccatagagtcaagatttacttattt

SEQ ID NO: 209423 - DNA, 412 bp, Glycine max
aactaacttttaggtaaaaggctgtactggcttagtgagtttttttttaagaaggttatcaaatctaagtttaatatgatattattatcttgctagcagaatgatgttccccagtggttgtctgagacaaagaaatatttaatttagagcttggctcaactctattgaaagtttctggtgagtatggtgattcttaaaataattacatttggaagttctcgacagaagaacaaaagcgactattggttatgacagcaatttcaaacttggcatggaaataatattgtcaatagctccactgtggcattagcacatatgctgaactaatgtctaagcaaattcttcaaaaaaatatttagttcttctcataactagacactgaactgaaagaacctaagactgtgacctcatg

SEQ ID NO: 209424 - DNA, 408 bp, Glycine max
agcttgagatgaggaagtgttgaagtgtgaaacttcctgcttttattgttgaccacagagtggtacctggagatatgtcgcgggggtcaggagatcttggggacgtcaggtggggtgctattgcccaaaaccaagcttgaccaatcccgacccaacccgggcatagtcggtcagtgagaacctgtgatgtacctaagcaggcgagctcctggcagtcaacagataaaaggaacaaagaccacaaagcaaggaggcttgtggtggctggccagctgtgaattttgtgtgatatgtggattatggcccctggtaatcgattacaaggcttaaaagtgaagacaggaggttaagatggtctctggtaatcgattaccaaggggtgtaatcgattaccaggcttgaaaacga

SEQ ID NO: 209425 - DNA, 476 bp, Glycine max
  unsure (1)..(476): unsure at all n locations
ctcagcttccatcagtagctccaagttgaaatccttcttaaggattgttgtatgattggtcgtcaagggtgtgtaacgctcgtacctgngccctttcgggagaggctgacgcttgtctggcttgtgcctcttgtttaacttgtgtgagttggccttggtgtttccttcctgcttgtcgcgcttttgttcggcatgtcataccttgttccagaacctagacatcacgtccatttggatgtagcctttggctcgttcacgcaactcatccatgctactatgggttttttttgcacaaacaattcacaaacttaccangccttagagtgaagagcatggggtgtaatgctacctctgggttgagattacggatctcgacaacaatacgtccaaatctatcccatgaattttggagagatcatcatctacttatcacaggcttgctatagcagtcgatgtcatacgatgtgaccgactgg

SEQ ID NO: 209426 - DNA, 394 bp, Glycine max
agcttatgacctttgtcacttgagagccaaatattaaccatactttagcggcatgaattaagattttaaaaggctttattcgataaaatattatggtattcaatcacatgttttaaataatataaataaatcttgtgatattcaatcatcactatcataattttgtacgaatgtaacaaaatttggtggtattctaaaaaaatcttccatagataaatgtcacttagaatgaatttcgatagatttctcatgacattttagtataatatataatgtcacatctatctagcaatttcacccaaactgttgagactattctaaactctcattctttctttgttagaggatagttaaacttttctttatcccatcacatataattcattctctctta

SEQ ID NO: 209427 - DNA, 501 bp, Glycine max
  unsure (1)..(501): unsure at all n locations
tctccataacctgtaatccataagattatgaatgtttctctcatctctccatttatgataaataagaattctctacattatatttggcattatatctggatcaactacaatgacagtacaaatgaggataaaagtcataanacaaacaatgaggagcatactgagggacaagaaaaacatattgtgcagaaaagcaatctgatgttacctcctccaaacttctagaccagagtgattnttctttaaatgcctaatttgcttcttttgaagttttatttttgccctcaagaatgcagggccatcacctatttgaagagacactgaaggtcaaaagtatacctataatctataagagactacataagcaaatactgctcaatatactatagtgactcttgcatgtactgcacaaggtaaaacttatgaatcagagtgactnttttttctttcaaaatgtgtaatatatatagtaaacaatcatctagcccttatgaatgacat

SEQ ID NO: 209428 - DNA, 399 bp, Glycine max
agcttgctagttgcaacctattttccactaccagcagcattcacaaaggtactaaaatcccaaatctcaataacctctaaaaatagcacacagatttttatttcctgttgtcaaaactagtgttgttttggatgtaaaagctaaatgccttggtcatgtagtcaaagtagttaaataaccccacattatagtgcagtacctgacccctatatgctataatggtacagcaaagcagctgctacaccaaagcaaatagtttctatataacatgctcaaaactaaagtactcaaatcaaaactggagaaacagtgttgggcttggttggaaaaggatgaaagagaggctgagggacaggaaaatgcagagggtacagagaccaacaaagcatgaacaggagt

SEQ ID NO: 209429 - DNA, 437 bp, Glycine max
  unsure (1)..(437): unsure at all n locations
cgcttgggcaacacatgattagactatttcctcggcttgttattcatacatttgtaattaatttgtatgctccaaaacgtcaattgggtaataagaaatacagtaaagtatacacaccaatccaagtctaaatgacgggctcataaaacccaataaagcatgaagataaggatgccaattaaactcgatacaactcatttaatatgtcaaaacgagttggattatatagntcatcccttcaactcacataattctacctacataacttattaattagacatgtcaagagcgagttgtattaattcgttaggttgggatttattntttggttggaggttttcacgaattgcgtagatagatattgttttgtggactaatagatttcatcacgtagttttgcctacattacatgtattcaatgtatgaagacagcttat

SEQ ID NO: 209430 - DNA, 291 bp, Glycine max
agcttcttttggaccttgaactttcaatcaactcctctttcaaaaccatgctatgtgctcgcgactggtccctttcttcccttcgcaactcgagttcattattgctaccccatagagctccgcgaaatttgttccggccatactctttcttgcgagccctcttggtctcttgttcaagggctcttgcggtaattgcattcttttcccgtaaacccgcacacctccttcgaacgtgtgtagcagccaacttgaacttcttcttggcgaagtttgcctttcctaactcgcttt

SEQ ID NO: 209431 - DNA, 406 bp, Glycine max
tttagggcttgtacctcatcactttctttctattcttttacctcattgactctcacaggctttagatttgggagccaatccaatccttgtgtctggactctcagccacttatgatagccgccgatgatcccattactgcttcccctaagctctctgtcctttcttcatgccgcatcccatgccttgcgaactccttggagtaccctcgcgttgtggtcactgaaaaccccgtgcgatgaaaggcgtgatgctttcgtctgatggcactcctctcatggggtagccaagctgtcttatggcgaggacgagattataattaatacaaccccttggtcccatcaagggaacatctggacatcctttcgatgaagatagaaacccgattcttcttccttctacgagggac

SEQ ID NO: 209432 - DNA, 401 bp, Glycine max
  unsure (1)..(401): unsure at all n locations
agcttgaagaagttntgtctttcacatgaccttctctttgagtgacatttgtattgattgttgtattgattgttgaatcttagtctctatattttcatatgtacaccatgcatcatcatgtagaagaaataatattgtttctaaagttagaaacttctttagcacataaaactctttgttttaattgattaccaagcttatcgtaatcaattacacaagtgtttatagccggcagagagattctagttttggtttaatcgattacatagtttagttgagacaacgactggattttcatgagtctatgctttaatcgattatcatataatcgtaagcgattacttctttgttaaaagtgttcctagaagtgatcaagaatactttaatcgattacatcaaga

SEQ ID NO: 209433 - DNA, 399 bp, Glycine max
  unsure (1)..(399): unsure at all n locations
tctccctattntgctataagtagggggagaagtgtgattaaaggacacttctctctctctctcgaaatagctgaggaaaattagttccgtgaagaanatccaagccgaggcacttccgtaacgtttccgtgagtaattacgcgaagattctcgaccgttcttcaagattcatcgttcgttctttgttttcttcggtcttcaacgggtaagtacctcaaaccaagcttttcaattcattntatgtacccgtggtggtccacattttgtttcatgtatttttattctcgttgtcatttactttttataccccattttgacgtgcttaagccatttatttaagtcattcctcgcttaatctagaaataaaataaatttccaccgatcggttgaattgtatca

SEQ ID NO: 209434 - DNA, 395 bp, Glycine max
agcttgcatgagtgtatttctttggcagagtttcttactttactttataaacaggattgagaacataaccacaaacaagatgcttatcatttgacaaaagtaggatcaagtggtttgtgaaatagaaaggataacatattaacatgggagcagtttgggataatgaaattattctcctcataaattggtagatacataatgggagtggattagcagctggttctgaatgccaacatacatataataacaaccaagctggtcccgaagaaagaacatttaccctgcactaattacttcgattattgtagctaccattctttcctaattacaaaaagctgctgttagattgcctttaattaaagctcccttaccctcaaaaggaacaacactaactg

SEQ ID NO: 209435 - DNA, 450 bp, Glycine max
  unsure (1)..(450): unsure at all n locations
acgagtcctatcaatagcatttatagatgatgaaatatccaacataatatgagtaactgaaattgaatgcttaaactaacaatattatgaacatatttgacataagtattctcttacaaaatggaatgaattgccatattctagatattgcaaatggttagatatttagatcttattagcggtatttctttggtataatttgcactgtcattttagttaatnttttctattgaatgaaatcatatgtcatactaagntatttgtccttcctactatgacttatatntatttgtttcttctgcggcaagttatcgtgaataatgaatagaagagttacattcttacaaagagaaaanaagttgatacaagaatattgtgtaagattcaaaaattgtgtcgcattaaaataattntaattattaattattttctagcattaaaaatattttg

SEQ ID NO: 209436 - DNA, 401 bp, Glycine max
agcttgtacgaatataagaaacatcttcgaccttggtgattcttgactccatctcattgaatcgcatgtccacttgtaactccaaagtatcaaacctttcaccaacaaaggtttgaagaccatcgaacctatccaaaatcttttgaagaagaaaggaatcttctccaccatgtaaatgtccttcttcatcaacggatcgagcaccctttttcacccaagagccattatgctctttttgataaccaaaggatgcaatcacaacagcacatattagaaaggatctcttgattggaacataaggttcaaaatcaagagggatgttgaagtgttgaaggaagagggtgattaggtgtggatatggcaatggagaatttaatcgcaaagccttatgcttgcgatat

SEQ ID NO: 209437 - DNA, 207 bp, Glycine max
ctttgaagcaatcatataagggggtattctgcaacgtttggacaaattttgcactctcacaccacctataaacaccttgataagttatatatctctagagtccgttttatcaccgatccgaatatttaaatccgcttgtaaactaatacttttctacattaattttacaaacaagacctcgtttaggagtggagacaagggattcca

SEQ ID NO: 209438 - DNA, 393 bp, Glycine max
agcttgtaggattatggggtacccatcacattttgtactaggtggcggtcgggcgatggtgcacaataagttttccacatccacaaatcgcgcataaacccaccatcccctgttgcccacctccaactgagctcacgtactcccacgtagcccatatcctcgttcctctcaacgccgggtccccatcaatcctcccaagcttccccaacatccaagtaaaacaacattcaaacagcacaaactatcacagccaagaaaacagagcaaaggcagaaactctgccaaaacaccaaccaaaatcacagcttttctcacttaaagaccccagtaacaattccttcgttccaattcgttaaccgttggatcgactccaaaattttactggaagtctct

SEQ ID NO: 209439 - DNA, 392 bp, Glycine max
  unsure (1)..(392): unsure at all n locations
cgaccaaacactgctgtgcttctgtctagcccggattaaggcgggctgcagcaccggctccgcttccctaactgtactggaggcggttatcgtggctttatcctctatagttttctagagttttaacatgacctccgagatggaagccatttgatcttttaaggccgatagatcggccttcatctgttcttgcacgccctcttcattatccatttttctggatcgagttttataggggtgcctttgtgcttttntagttatgatgaaattcctaaagacataaacaacggtgagtatgcaaccaaaacatgaatatgcaaatgaatgatcgaagcactttgatccaccccaaggtctttagataacgtgataagttcatacttctcatttat

SEQ ID NO: 209440 - DNA, 396 bp, Glycine max
agcttcctcaatttttgtggattgatgctcttatgacggctgcgtatatattaaaccgagttccaaccaaggctgtctcaaagacaccttttgagttattcaagggttggaaaccaagtttgcgacatatacgcgtttggggatgcccgtctgaagtaagaatttataatccacaagagaagaaactagaccctaagactattactgggtatttcattggatatgctgaaaggtctaaagggtataggttctattgtccatcccacaacactaggattgtggaatcaaggaatgcaaagtttcttgaaaataacttgattagtgggagtgatcaatttcataacatttcttatttcagaacatttcttctgaaagggatcactatgaagctgaacc

SEQ ID NO: 209441 - DNA, 332 bp, Glycine max
  unsure (1)..(332): unsure at all n locations
tgctcanattcagtccttgaagagaggagatttgagatttgcagtgctttaaagaagataacattaggggcaaaggttattgatggatcataacagttgtagcctttttgagtaggagagtacaacaacaacaatcaataattnttccttaatagttttcctgtagttttcctcggtctttctttgcctctagtgattggactacttttcatctcctgactgggagttctacatgtcttctccacactcactcaaacaaccacccatggcgagattctaccatcttttctacaatagatgtaatgcaatcctaccccccaagggcattggat

SEQ ID NO: 209442 - DNA, 399 bp, Glycine max
agcttgcttctacaatctccccctttgtgatgatgacaaccctgaaatctataaacacatacacattttttttcctagtcgatcactcacttaattctccatattctccccctttgtttttgagtttaagattcacttgaaattaagttatttaattatatgatttcttgatttaatccctattttctctccccctttggcttcaataaaaagccaaagtctgtaaaaaatataaaaacatacataaatgactaatcatacaagagaatagaaaagaatcaaacaagataacttaaccattcatcgaaatagaaagataatacttcataatatgtcatatcatccagagagtcattcataatagccaaataaaactactaatgcaggaggaaaaaatgc

SEQ ID NO: 209443 - DNA, 410 bp, Glycine max
  unsure (1)..(410): unsure at all n locations
actcaagctgtagggtgatttaaatttaaactaaatctttctacctctctttcactctcattattgaagaatatgctacacctgaatgttgctgcatgccatctaaaattgggagaatgcagaaagtccattgagacttgcaataaggtatgcttgatgatctcaactatcatgtatctactaatttatttcattggaataaacagaatagcatggaatttgatttatatcagcttattacaagaaataaacataattggaggagattntgatcctctaaatcagatatgacttgtctataaataagatatacaatacatatagaatatttgaatctgattttcaaccatgggctgctttccttttcttgtcataaatatggcttctggcaattgattgcgctctatatg

SEQ ID NO: 209444 - DNA, 407 bp, Glycine max
agcttattgggaccgtaaagtaactgaaggatttatcatatattgcttggaacaagtgtccaaaggaaaacgacatgatacaagttttaccaagaatgggagttgactagaaaaaattatgacaaatcaaagtttaagaacaagtttcataaccttagaagacaatggtgagtatggtataaattatttagtaaagaaactggtcttggatgggataatgccaaaattactgttgattgaagtgatgaatggtaggagaaaaacaattggtatgtgttacataaatgtgtattgttgtaagtctaagttttttgtatagtgtatttatcctatgataaattctaaatgtgcaggaaaatcctttatatggaaaatttaggatcaagggacttccatctgctcacaaa

SEQ ID NO: 209445 - DNA, 463 bp, Glycine max
  unsure (1)..(463): unsure at all n locations
ttgatcttaatntagtggaggctgttcttgatgagaatgtggaggagaagataatgattatattttctccaaattgcacgacaacattgtntgaaagcatgctcaaagaggtccaattgacgtagttgtcatacaaggtttgtagggcctataagaggtccaattgacgtagttgtcatacaaggtttgtagggcctataaggttgttgatgacgagggttgttcactggttttaaaattatatttattttattttctaaatttaaaaataatgaagaaatataattgtgatttgaaacaaccactatttaacaaccaccgagattcattacctaatagacatctattccattngacataaatgacccaattgggtaaaatagaaataaatttatcatgtaaaaaaactagggaccaattaatattaaaataatgtataaagaagaatattgatgtattgagc

SEQ ID NO: 209446 - DNA, 402 bp, Glycine max
  unsure (1)..(402): unsure at all n locations
agctttataagcgcgggtctgggagacaaaggtcaagcgttcgcgatatgcgaggatgatattccgagtactttggatttggtacgaccatgccctcctgatttccagctgggaaattggcgagtggaggaacgccccggcatttacgcaacgagcataatgtaaacctttacggttttaaaagctctatagttgggcctaggctttagagtttttccttttgttaaggctttgtgtcttttgtttttgaatttataatacaaggatctttcttcatctgttcctggtctctacccattctcattcatttgcatgtttacttctttttctgaaacggcagatccggtgacgagtcccccgaaggtacttatacctgngacccgcctatcgacttcgagcgag

SEQ ID NO: 209447 - DNA, 432 bp, Glycine max
  unsure (1)..(432): unsure at all n locations
tccatcaagtggtatcagagcacaagagcttcaagtatgtgctccttatacctccattaatattttgctttaccttctcttccattgataggttcttcattatttctccatgtatctcctcacatgtcttgtgctaaatgttttgaacatgattctttatagtttccaccaattaaacttgttatagaagccagatctgattttctatggctcanatttcttgttcttgttcttgaaccatgaattgtgttgagtttacgttcctttgagatttgtcttgatattttttgtggctgaaacctaaatcataaaatttggtcacctattgtagaagataaactcacaaatctagagtgactcggtcacctattgtagatttgtcatataggtcatgtctagtcatgagacangtcacataagaattcttatgtt

SEQ ID NO: 209448 - DNA, 411 bp, Glycine max
agcttgaaatcagcttcctctacaattgcaacttgatgaattggctgcaaaaaatgtatatccccttactaatgaacgacaattacttcaattggtgcaattctttcaatctcatatatcaaggcatccattttttgcttaaactctaccttgattttatccctatttgagtgtctcctatcttttagtgccttatttagttgatcaaagtcaaagacctggatctgagctatcaacatccataggatccagaatgatcgggaggctaatttgttctagttcacacttttctaatatgtcctacttttgcacattcaacttatcaatttgtgcctcctgtaaagacaatatggatgtttgctatccatattatgcggaggaagttacacaagagacaagaattgtacccat

SEQ ID NO: 209449 - DNA, 407 bp, Glycine max
ttagttccaggtctttgatagacccagtggagatcattgctgttttattgtggattaaattattccactgctactgctcctcattattgagttattaatgccactaccatatctagacttatattcactgattcatggaatgtgactctgaaacctgggaagcttgggatccactacacagtttagagacccaaataaagatctgataccacattgtactaagagttaaacctgtatgaaaccaatttagtagtatatatcacaaacctgacccaccgtgttagaggatagtataaaagttaaaacatttagttcattcctgaaaatatataagtgtaaaggcagatctctctctgatttaagtttaacaaataacacctaaacagttgaagactcacacaaggtat

SEQ ID NO: 209450 - DNA, 401 bp, Glycine max
agcttgtctcagcgtctatgcgagacagaaaccaacatgttagctatcatcgccaagtaccaagaagagttgggtctagccacggcccacgagcatagaatcacggatgagtatgcccaagtatatgcggaaaaagaggctagaggaagggtgatcgactctttacaccaagaggcaaccatgtggatggatcggtttgctcttaccttgaacgggagtcaagaacttccccgattgttagccaaggccaaggcgatggcagacacctactccgcccccgaagagattcatgggcttctcggctattgtcagcatatgatagacttaatggcccacataattagaaatcgttaggaaacttgtatggtctctcagaccttgactagatatgatttcttttt

SEQ ID NO: 209451 - DNA, 392 bp, Glycine max
  unsure (1)..(392): unsure at all n locations
agcttgcattttaaagcataacaccccaccctatangctgataatctaaccaacaatccctcactaccttctgaaattgcttgttcattaaccatccatcataaaccttaaaaggtttagggccccaatcaatacatttagagtgcatgataataggacagtggtcagagtaattcctctcaaggttaaattgggagctgtcaggccatttggacaaccagccatcagaaacacacactctgttcagtttgcttttgcaggaaccattaggcctaacccaagtaaagggtttacccacacaaggaatatcatcaacctccattgcagtaagccaatcattgaattcagatattaggccattatccgaatttgctgcggtgcttcccaatctt

SEQ ID NO: 209452 - DNA, 398 bp, Glycine max
  unsure (1)..(398): unsure at all n locations
caatgactagtgctaaggtatcgtcnaaagaagtgaagatgtataatgatttgggtgatatgcaattcctttggaggctcgtgcttctagaggatgacgcataatgctgcgacgcttatggcttagatgaagagctcttggaaatgggttcaaagcccgttcttgccgtgctttttttctatcccatatccacccaagtttttatcccttttcatctatgacaaatcttcaatgttcactcttttttacggagattgtcacaacttttttactgtcattatagtgaagaacagaggttgccgtacgaaaatgaaaaaaaggtgagtgacaatatattgtataagctctaaaatcgttagataatgtgaattttagctgacttttttacacaagaagtt

SEQ ID NO: 209453 - DNA, 392 bp, Glycine max
gagctttggtgagaaaaagatgttattcgattattcatatacacgagaggacaggagtcttcagatcgaacctttatttctcaccataatatcttatcaatttctcaagattgtataagccaacaaactttgcgtaaaaaatgattttgttgccaatgtacaggttgttagttatatctgaagatcaacccccagaattgcttacgaaaatgaattcggttacgagacgcattgatctaaactgcaagctgcttgctcctgtcatttctggattcataataagctttgtatcactgaaagcatctgctataaccttagcactgtggactactgtctctgttggggtggagtattggcttttcacatttgtatatcatggaattccagctttg

SEQ ID NO: 209454 - DNA, 404 bp, Glycine max
agcttctaaactttatacaagaatgaagctctgataccacttgttagacaagtggcctcagatatcttaagaagggggggttgagctaagatatcacaaactatttccccaattaaaattttatttcactttctattcaagctataaattcccttaaaaactgaactgttaaatattgattcaaatagagccatttgaatatgaatataacacaataataaataaaggagtttaagggaagagagaatgcaaactcagatttatactggttcagtcacacccttgtgcctacgtccagtccccaagcaacccgcttgagagttccactatcttgtaaaagcctattacaagatctgaaccacacaaggacaatccttcctttgtgtttagatttctttacaaca

SEQ ID NO: 209455 - DNA, 441 bp, Glycine max
ggatgttatgaaaagaatagagaccatcagcactctcatctccttgaagaaccttattggtctcctgagatttcacaagacataagtgatgatgaaattcaaagaaaatcgagttatctttagcaaattgactcacacttaacaaatttttcgaaattgaaggaacatgcttgtcaagtttgaaagttatgtgagagtcattaggagacacaaaagaggaggaaccaacactagagatacttaaaccttcaccatttcctatgaagatttggttaggtccatcaaagtgtgtcaaactgtttgatatgctgtgattcaccagtcacatggaagctagctccagaatctggaatccaggttgaactagcttgaccattgccatgagaggacgagtttgtaagcatagcactgagctgattggatggttgagagcaacacact

SEQ ID NO: 209456 - DNA, 373 bp, Glycine max
agcttatagactttctacaagattgaagctttgttatccttagataggaaagcggactacaatctcttcagaagggggggtcgtgctgctatatctctaactatcttcccaattgaagtgatactaagcttcaagcctagctggaaatgacgttagacttgatagagataacctttgaatcgaatatttcagatgggatatgcttttgctgcacctgtgatctattgaggttggtgggagacagaaagcaaccttagatgacttctgccattgtcacaccttcgtgcctacctccacttcccagatacaacgcttgagagtatcactatcttgtggatcctattcaatagctgactccacaggacgatacttt

SEQ ID NO: 209457 - DNA, 258 bp, Glycine max
ttttctagacataaacgctgattaaatgcctatataactgcgctatctatcgcgaattgactcacacatatcacatttggctaaaatgtgtgatcttgctgggagactttgaaaatcctgtgatagtgctcacgagacacaaaagaggatgagccatctctagagttacttgaacctttacccttgtctatgaagatttggagctgtccatctgacagtgccacaccgcttgctatgctagtatttaccaatcacatg

SEQ ID NO: 209458 - DNA, 401 bp, Glycine max
  unsure (1)..(401): unsure at all n locations
agcttgatattggattcaataaaatattaagttcttgaacattgatacttagtcctacatgaagtctggtttaataaaacattttaataaagcttaataataaaaaaaaagaaaaacaccatgtaaataagataaaatgaaaacactttaattccaaatctacactttctgaattcatgtataacattactaacaaaatatatatatatatatatattgttagtaaatatttattttataatttaaatttataaaaatattttattcattaattctgtttttataaaataaattatttgttttagaatctggtatgtaaaattagatttcctatcttttctaataatattntgtttttagtgggtcaatgtagtttgttacgtatttgtacgtttggtata

SEQ ID NO: 209459 - DNA, 414 bp, Glycine max
cataaaacagccaaagacctcggaaattaacacagatatgataaaggagtagaaaatatataaatatcagagtataaaacacaagaagccaaacgcacaaagaagaaataatcaaaccagaatccaaataactgaaaatgtcaacaatcacaaaacatccaagactgaaatttaaaaaccacaagataaataagcaaagtacttagcataataatgtaaattctaagaaactaaaagccaaaatacacggcttataaaagataactaattagaaactaaaatctaagaagacggacgtggtggtggaagatcgaaactcttgacaatgtatccgacatcctcttcaagctgtgtaagacgaatgtccatatccgcaaaacgtgaatctaacgagtcgaagcggcaccaacatac

SEQ ID NO: 209460 - DNA, 386 bp, Glycine max
agcttctagctttgactgaaccgatttggttatcctcaatgcagctttggtcagtcatagacacttgacaagttcagcactaattcaagaaggaatatacaagggaagactacattaaaccaactaataataaaagttaactttaggtaccattacactaaatcaactacagtatttcaagtttcaatcccatttttgttcaatttttttctgacaaaaagtgaatgtttgttatgataataataatttggattttaaggtaaacaaacgcataaaaactatttaatttggatttcctggcaatattaataataataataatagaataaaaacaagggctaaattccaacggatccggcgtggacggttacaattgaccaaaagtg

SEQ ID NO: 209461 - DNA, 388 bp, Glycine max
aggagacatttgctgtgtctcgctagtgggatggatcttgtcactagcgattcaagactataacaagcagttattataaaggaggggataccaaagataccagtagatcatcaaggaaaaattcaattgaagaagagattgaaacttaaactgctgaagcgcaaacgtaagtttattatgcatataatttcagtatcattcttgttatatgattctggctcttgggtatgggcagattctctagcaaaaaatggggaagaagagaaagcagtgagacaactcatgacgaggcacagccccacaaggaacaactcatgatgaggcacagcccgaaaataaatttctttgactggctttattttgccttttcttcttctaaatcatgcac

SEQ ID NO: 209462 - DNA, 399 bp, Glycine max
agctttgagattaaaggggtaaatatgtatgttcaatatttaatttatcatgttattatttttagaaaataattattttttattttattatcatatttattattttattaaattattaatttggtaaatccttgattaaaatgagagatttattatcatgatagagattatgataatgagaaacaagtcttttataattttaatctaaattattttttatcgtaggaatattgtgaatagaatatcaataattcagatagatcaatatatgtgtaatgatctttattgaataaagattaataaatatcatttattaaattgtatatatagatgatatatatgtggatatcataattgaattgatttaattaagaattcttaatagttaatattacctcc

SEQ ID NO: 209463 - DNA, 356 bp, Glycine max
  unsure (1)..(356): unsure at all n locations
gacaaggttgagttgatgggaccttgtacgcatgttgtgacatgtgtggattggatactttggggaagggcataatggaagactggaggtttttttattattatttgggaaatcggaggttatgttaatgattcttttaatctactaacatagcaagcttntttattattattttcatgcatcgacaatataaattgtgttaatctgcaattaaagataatcttaattattttcatggatggaaaaactagaaatttgctctcattttttctaaaatgatatggatttttaagtcaatatttgaattataaaaaaaaattgtatttcaattataaacagtttgacaaacgatataa

SEQ ID NO: 209464 - DNA, 368 bp, Glycine max
agcttcaatggagaatgaagacacagattttctatttgagggagagggagagacagcttctgaaaatgtggtgttgagtgaggagagagagagctgctttttggttataaaaaaaggctcttctcttttctctttattttatttaagctatgccacatgtctccatttgagtggagcacaaagggtccactttctcttttgattgtgacccatactctgcctcaaaaagcgagaaaaatcttaccttggaaaagctcaaatcctgcctcaatttttgtgccgtttctctagttccagctcctcgcgttgctctgcgtccgtcgaagccagttttctaaaataaccaatatatatatatcacaacgctc

SEQ ID NO: 209465 - DNA, 416 bp, Glycine max
  unsure (1)..(416): unsure at all n locations
ntcctcgaagagatctaggaaggacgccgcggccgcagagactagtgccgctcccgagttcgatagccatcgtttcaggagcgctgagcaccagtagcgtttcgaagccatcaagggatggtccttccaccgagagagacgcgttcacctcagggacaacaagtacacagatttccaggaggagatagctcgccggtgttggacgtcgctggtcacgcccatggccaagtttgatccagatatagttctcgagttatacgccaatgcttggcctacagaggagggtgtacaggatctgcggttctgcgtgagggactagtggattcctttcgatgcagacgccctcagacggtttctgcgatatccgctagtattggaggaaggccaggagtgctaatatggtcatagaccgaact

SEQ ID NO: 209466 - DNA, 371 bp, Glycine max
ctgacaacaatacttccctctatatacaacagctcatagcgatagtatacagttaatctggtatgcagtgaaaccttcctaccttaagtgatccggccgtagatgcttcctgagataatctatcaaacaatttctcattcttttcatgcaacctctgcaaaccactcaaatataaaattgagcctctaaccagtccaatataaaaccttagtacgcctatcgaaatccaatacacttaaagaattaaccaaaaggcgtgcttgatatacacctaacgtaaagttcaatgagaatagtacaggttaattattcaagatactggacaatccttgggtctgtacaatatatggtggacaatggacagcacaaac

SEQ ID NO: 209467 - DNA, 462 bp, Glycine max
  unsure (1)..(462): unsure at all n locations
ggaccttaagcacctgagctgcagcttggaaactacaaaatgaaaacgtaaccttttgtaccttgcgatgatgtcagactccaatggaggatgctcctcctcactgtagtcacaaatcccaacaaaattcgcaaaccccagcggcgataatggtgagaaggagatggcggtgacaggtcgcatatggcggtcgtaggttgcaaacaacgatgataggtcttgcgggtgaaagggagaagaggaaggctttgtcaatagatgttttgtgttttcatttatgtataacacaacatcggttttatattaaagaatactgatgttaacctctattgggtaacattacgttattaaaaaaccgatgttaacaatatcatgttaacatcggttnttaacatccgatgttaataaccgatgtctacacgtttcgtaacatcagtttccaaaaactgattgtataattga

SEQ ID NO: 209468 - DNA, 509 bp, Glycine max
  unsure (1)..(509): unsure at all n locations
gacctatgatactcagctataagaacanaactgcctcaatcatttccaaatatgcatgtgaattatgaagcaccaacaagaatcaagccaacgctattgtgcaagcaatcaatggggcaaaacacaccaaatgattatgatgatgtatggctcaaattctcacaaaggtaaactcatcactttcaaattgagcttttaaaacgatcatgatatgtagaggagaatcaaagatttcaagtcacaaaatgttaaaaacttttattttcaaaacaattacccatttcttgaacctattctataattcaaagaaaaacatgctaagtcgtacatgctcacagaattgacccaaactattaaactaaaaatccgactaaactaataacattgacaaattaacacaactgacaaattaacaaaactaacagaactagcataagcaaaaaacactccctcatacttaaacacacattgtcctcatgtncacaataagagattaaaacattaaatat

SEQ ID NO: 209469 - DNA, 429 bp, Glycine max
  unsure (1)..(429): unsure at all n locations
agcttccatcaccttgcccttggagaggtttattctccatgtttttgtggangcgaaagagcttctatcccttactgtgatggactttgagtatgacatggagagggtgttaattgatggaattggagatgaatcattaacactccatgtatcacttttcttttccaattgtctcatttgcaaactctaaagagcctatccacaataaaacattacacaatttaccccttttattggagaattttaaattgatttcagctcttttatttaattctcaaaacctcatgctaacaactaatgcatggatcctcaaggaaatcattctaagaatcaaactcaaaatatataaataaattctagatagggctcgtgtaaattagaaaaaaaataaccgattttattctggcatcaaacaaatcaacanatatg

SEQ ID NO: 209470 - DNA, 422 bp, Glycine max
  unsure (1)..(422): unsure at all n locations
tngcatgtatagcgactctagagagagagagcgccaagttttacagagttctgagagatcttgttgcgtgaagatctgcagagaccagagcttgaagccaaagtcgctctgatagcttgagatgagtttgtgaggggttatgagatcctagaggtgaaggagacatcctcaccacttgtatgtttgcaatctttcatattgttcttctctttgctgaacaggaggcttcctgtttatggaaagctaaaattctttgtcggatcttctttgtaggtacttgatgtcaatatctctctatctgttcaatgacgatttgtatgctctctgctatcagcttttcattctagcatgcctctaccttgaccacatacatgcatgctctgttagggtcagtcttatagtggcaactggcctgactttga

SEQ ID NO: 209471 - DNA, 230 bp, Glycine max
agggagacagagggctgtctgaaaatttgctctgctgagtgaggagagagaaaagctttttggtcttaaacaaaaggagttcctctttttctataaataaattcacgctctgccacatgtccctatttgattggagcaaaaaaggcccactttctctttctgactgtgacccatacttcaccgcacaaggtgagaaaaatctgacttttgatacgccttaatgccgcccc

SEQ ID NO: 209472 - DNA, 346 bp, Glycine max
agctttgacgcaacatatggagagggtaatgatacaacgagacgacgcactccatgagaggcgggatcaaacggagacaagagaccacacagaacaagaaaggaggagaagagggaatgatggtgttcctacacaaaaccgaaatgatggtattaaactcaacatccctccacttaaggaaagaatgatccggaggcccacttggagagggagacgaaaataaagcatgttttttcatgcaacaactatgaggaggaccataaggcgaagcctgccgccacggagttttccgactatgctctcgtggggcggaacacgctacaaaaggagagagcaagaaacgaag

SEQ ID NO: 209473 - DNA, 318 bp, Glycine max
tctcgatatattatgcacctgaatcggacttccgtgtgattagttatgaccatttcgaattatcgacagctcccgttgttcaatttcaagcttctccatatattatgcgtctgaatcgaacttccgtgcgataagatatgaccacttgaattttttgagtgctttccgttgtcaatttccagcgtcttgatatattatgcgcctgaatcggacttccgcgtgacaagttatgaccattttgaatttcttgagagtttctgtcgttcaatattcaagtgttccgatatattatgcgtcttgaacggacttcttggatca

SEQ ID NO: 209474 - DNA, 371 bp, Glycine max
agatacagctatcatcacatgacgctctattggtatatgatatgatacttcctaagcaacttgagactttaatatatacactctgttagctgccgactaacgtctttatggctcaacctacgcattcttctatattgtaggtcacggcgtgtaccatttgcggtgaggctcatgagataggccaatgtattcctactgaagaaaacactttagagatttattatgtgggaaatcaatatcgttaagggtatactcaccgaagagtatctggcttctagcacggtccttataatcaacaaggattgtggaggacacatcttagtaactattttaataaggacttgagtgagccttctaatacgctcattcta

SEQ ID NO: 209475 - DNA, 152 bp, Glycine max
aaatcccaagtcgcctgcagcatcaatctggaaagctccaaaatgagacttaagcctatctgttccttgcttcgaggccaaactccaatggaggatgctcctcctcactcgagacacaaatacaatctacaaccccacacctcaccgctcat

SEQ ID NO: 209476 - DNA, 186 bp, Glycine max
ctgaacggcttaactaagaatctggatttatatatggagcctaatggtgctcgaatctatgctacaccaaagtcaatatcataatgttagtttatgagatgaggactgtctacgtttcttatagcactatctcacatctatttatcgatcatgtgggatcttaacacaattgtacacacacacgat

SEQ ID NO: 209477 - DNA, 347 bp, Glycine max
catagccaaccaatcaaagcaatcaagataaaactattttgagcatcgataatattagactatctgtaaataagaattttcatgcttttattccacagaaaattttaatatgcattaagaattaattcattgagcataactagtggtggtgcacacaagaaacatttaacactagatttgagtgattcccaaggcattgaactcacacaattatttgtgacaatatggtgtatctactggagccaaaataaataaaataggatggtgggagatgccaacaaacattcttaaaaaccatattttaggaatgactcaagagacctcacacctaatttcggagtcctcat

SEQ ID NO: 209478 - DNA, 489 bp, Glycine max
ctttgccttctcctccaagcgcttccttggtatcccaactaccccatttctattttgcttcaaccggtctagctcctgttctgagatcttgaccacttttgctattctagccatagaaggatagaacctggaaaaaaaagtatggctttcttcctcctagcgggcatcctaagatcccttcgaactcttctatggtcggtgccaactgaaaatccctgaaagtgaagcatctgagcgactggctatagtattgagcgagggatgcaatggtcttaacgagaacttctaccatggccaaattccaaatttttccatacgccttgctgaaggctagacgtcgcacttgattcatccgctattctagttctcgtaagctggctagttctacgttcttgactttgagatgatagaacctctatataaaggagggtgcttggtccgatcctatgtttgtccgaatgagagtcctagtgaccaatacatcaacac

SEQ ID NO: 209479 - DNA, 369 bp, Glycine max
agcttagtgtggacatcagagatttttgttatatctttggtgatgcctgtctcacaaacagcagctggccaccgttcaccgctgtcatgccctccgttctctggcaccacccaccccctagagttaggtataggtagaaactgatattgagtggatgaggttgggtgactaggggaggaaggatactccaacatcgtattatatgggaattctgactcattgaagaggacatcctttgaaatgtatattccgccagaacgagacagacatctgttaccttttcgagaggaagaatatcccaagaaaagacactcctgggatctaaagactattttgtgggtattatacggcctgggcaacggaaaacat

SEQ ID NO: 209480 - DNA, 462 bp, Glycine max
ctataaaactcagctttgggatgaggacctatataacagcttcagtgttttagtttaacgagttcttggagagacgagaataattttagggttttggcaattccagtttttattagtgttcatgcacactgttcacgtaaaataaaattcattttctgcaatttcctttctgcttcaatctacaatttccgtttttgttgattaatggaaagctaagtctccagcgttgctttctcttgaggatcaagcacaactttctttgacggttttttattactattgaatactgatcattttttctctttaccaaattctctggatttgctgctataaatcatgcatgcttagtgcttgataagtgttaatgccttaaattacgttcatgcttatgatcagttccgtcatgagtaatcggtgatgtgttgcttaatacataacgacagcttatgtaaatcttgttag

SEQ ID NO: 209481 - DNA, 137 bp, Glycine max
cactactgaaacctcatcatggtccctccccattaccgacgatccactaccctctctggccgatgatcaccattccctcttcacatcattaatcatatcggacaggagatggcacacttcagccactccctcgctat

SEQ ID NO: 209482 - DNA, 453 bp, Glycine max
agctctatctgaagaactcgccaagcgcacttactattctaagtgagttcatcctttgaggatgaacattcatcctcttgatgaactacctgtggctaagcgaggctgaatcgctaagcccaagtaacttaaccatttttttgtggcgatagccgcacgctcagctgagcattcctgagccaagcgcaattggttgcggcatccactgagctaagtgagcttcagtcgctaagctcccataacttagtgaaatttttgctcagtctagtgccgctaagcgcagcttattcttggctaagctcaaatccatgcggctaaccttaggcttagcggtctcctcgccagctaagccacatttgaaaacactagatcgtagcaattcttcactaagcggacatcctgtgttgctaaacccaatgtcatttttgtgaaggcccactaagcgaagtatgt

SEQ ID NO: 209483 - DNA, 514 bp, Glycine max
  unsure (1)..(514): unsure at all n locations
ctaagaaactcaagcttacacaacttattnttctcanacttgagttctggaagatttattactaagtctttcctaactagatgattgacatgagacatgtttatttgtgcaatcctacgatgccataactaagaatcatctatcttacttaccaaatagctaagctcatgaaatgatgcatgttcaatgttcaaaggagatgatatggactaagatgcaaaattcaatataacaaccaataaaaatgccactcacaggagttgggcatgtaaaaaacaaaacatcttcaagcttttctccaagcttcaagctttagtcttcatgtcgcttcccttatctctaacagctctcggttagttctacctcaatataagggagttcattagaaacactctgagatagatagatcgatatatatagagagagagagagtttccttgtattatgtctttcgctagtaataacatacacaacgcgtgctactctcttcttcttctatgacaagcttcttcct

SEQ ID NO: 209484 - DNA, 405 bp, Glycine max
  unsure (1)..(405): unsure at all n locations
acctgcagcatgcaagcntgacagaaaataaagaaatcgtctgagctagatttccatctgtgcaagacttgcactgtgcactgagtcacggtgtaatatgtacctgcgtgaggctaatttgagcacatgcatccctacggaaattaacacaataatctaggaagttagcacattaatctagacatttaacataagatttacgagctttggtaaaaaaacaaattttactattctttcctacgtctactttaaccatttctggtttaaatttcacaagcaataatacccatcggaagcatgacttaacacgttcaacatggctggccactagtcaatcatggggccaattaagcttgacaattacgcttaatcaaaatttcttttggacaacagccttatacctta

SEQ ID NO: 209485 - DNA, 474 bp, Glycine max
tgagatgaggaagtgtacaacggtgaaacttcctgctcttattctttgaccacagagtggcacctggagatatgtcgcggtggtcaggagaccttggggacgttaggtggggtgctattgcccaaaaccaagcttgaccaatcccgacccaacccgggcatagtcagtcagtgagaacctgtgacgtacctaaataggcgagctcttggtagtcaacaaataaaaggaacaaagaccacatagcaaggaggcttgtgtggtggctggccagctgtgaatcttgtgtgatatatggattgtggtctctggtaatctattaccaacgcggggtaatcgaatacaacgtttaaaaatgaatactggagactaagatggtctctggtaattgattaccaaggggtgtaatcgattaccacgcttgaaaatcacgttacgaagctaggggagcttctggtaattgattactaacggatg

SEQ ID NO: 209486 - DNA, 451 bp, Glycine max
tgagctgcagctggactccatctttctgctgctgcactttttctgtaaaatctcctgatgtacctgatagaaatttctcgtctgtccattggttaggaggtggtatggtgtggataccctgtgtacaaccccgtactttttacgcatggcatgcattgatttgttgcaaacatgggttccttgatcactaacgattgctttaagtactccaaacctgcaaaacagattagatctgacaaaatctacaacaaccttagcatcaatagtcctagtgggcttggtttccacccattttgaaacataatcaactgcgaggagaatgttaacataactcaaagagacaggaaaagggcccatgatatctattctccagacatcacacacctcacacaatagcatgggttgctgaagcatttgttgtcgccatgaaagtgcactttctgctctctga

SEQ ID NO: 209487 - DNA, 449 bp, Glycine max
  unsure (1)..(449): unsure at all n locations
tgtagaatggctagacatgatacatgtcagggtttggtttggttcaaggataaaagggatgccccacattattttcatgacacaaatgcaaagatgatgatttggaaattttatgcaaaactggtcatgcatgcacctatgtggacgctcaagtgtcaaatttttatggtcatgtgatgctagggctcacgattcatttcctctattttaaatcaacccaatgtttccaaaatatgctcttttatcaatttatgcatttatcctagttcatttcgtgcgtctggggaaatttttacagtattcactcttcaggtgtagacacgttttttcttcaaaaatcggctatgatctatgaatttttcttcttaaagaaaagctggaaattatctcttttcagaagcatgtcggttnttagctagacaacttagtttatctttcttctccttctc

SEQ ID NO: 209488 - DNA, 410 bp, Glycine max
acctgcggcatgctagcttacaaaccctaatttgaggaacacacttactattattgttggaattcacaggacagaagcttgataaaccctaatttgaggaagaagaagcaagtgaccagaagaagctttataaacacagacttcagtgccacgttggatagtctatgtggcactataattgccaacaatgcacctcactgacggtgttaccttcgaatttaacggctaagactattttacaacacttatgcaaagatagggactattttttacatttcaataggatagggactaatatgcaaaatgactactaagacagggaccacaatgcctattcactcgatttttgaataatgagctttgacatttagagacacttaatagtcacttttgtccctgcatggctttga

SEQ ID NO: 209489 - DNA, 462 bp, Glycine max
  unsure (1)..(462): unsure at all n locations
cgcctanactatggacctttctcccgtgagaggataactttaactcaggacgctcctgaattgaagtataaaggaacgcaaaattcgttaaaatcatcatttacaggaaaactaatttcagtcataaagtataatttacaagtaactaaaaataaatattataaatacctctcccgtccatacgctgcaagcaacgtgttcctcatactgggttaacacggatgggttgctcggaccacccggaaatccctaatgctcattctcagtagcctccgcgcctgtgtccataggaatgtttgtcacaatatcctcagaattaactggtgccattggctcattcggaaatacattagtctcaacatctggcgcagggactactggctcattgtgcgttgtagttacaatgactagctgcctccgtgcggatgcggtaggtcatcgacgctgtagagcatcatcaga

SEQ ID NO: 209490 - DNA, 369 bp, Glycine max
ctgtggcatgcacgcttctagggaggtgagcttatttatgttatgggtgtgtgtaactaagctctagcttctcaaagaatttttctcaaagaagattcttatggaagttttttaaagaaagcttctcacggaagctacctagtctataaatagaagcatgtgtaacacttgctgtaactttgatgaatgagagccttgtgagacacaactcaaagttcaacttctctcccttttttcttccttccatttcatgctccccctctctctatctctctctctttcttttcctccattgaagcattctctccaagcttcttatccaaggctcatcttggtggagaagctccttctatcatggcttattcccta

SEQ ID NO: 209491 - DNA, 448 bp, Glycine max
tacataagatttagcaatgatccactaacctataattaatagaacttaatgccaataacctagggaattaaaataacataatggctgagtgtaactgaaattgtggcaaccaaaagtcacccccaacagccatcaagccgaccaccatttggtctcccaaaaggctgatgcctacgttgccaattgggcccttattacaacttaaactaaaccaaactaaagtctttctagctgattaacccaaaacatatttttggtcactcaactctacaaggattatgccattatttatacaaactaaatactctaaaattgagacaaagcggtgccatttagtcttcctccatttgggccatgagacaactcacaactttgaacttttctccttgaaactttggcttgtatttaaatagtatggacaacactcgttgaagagccttcttggctt

SEQ ID NO: 209492 - DNA, 300 bp, Glycine max
aacggacctataaaactagcttggtcaaagtatccggcgaagacaacttgtatcttgttatgtgactgccgctcttagagaaaatgatagaatgatgataactgaaaatgttgataatgagcctaatgtaatagctatggtggactcagagctaacgaggaatcattcaacgacacgtgatggtccaataagaatattaaaattgcactcacatctacaacaagacatgagtaacattcaatgttctattgtactgagaatggatatgtgtaactgatgtgcacatcaatgaaggaggat

SEQ ID NO: 209493 - DNA, 246 bp, Glycine max
tcttagacacgccaccaagggagaaagagaattgtcctcaaacaccgagattgggcttgggagcacacgagaaaagaaaggcctccggaacaaaggaaatcaaagcttccaccaaggggagatggaccacctcaagagctcgaaagaatcaatcgccatgcttacaaaagcaagccacccagagagtataatgctacgcccacctcctaaggagccgacgcacctcctttagacgcagacggacaa

SEQ ID NO: 209494 - DNA, 490 bp, Glycine max
  unsure (1)..(490): unsure at all n locations
tcagctctcagcccanactctcttcacaaaatctgatctcatgcttaaataggtggtcttgctcgagctctagcgctaggcgcaattctgaaccgcttagcacacattagcgaatttcagcttagcgcgcgcctttctcgctcaacggatggactgaagcggtgcgcttaacgagatgaatcagtgcgctcagcgaatctgtacagctcatcttttgccagagtcatnctcgcacttagccaatgagtgatgtgctcagcggatgctcgctaagttagcagagagacttatcaagaacgtgaaaaacaacacttctaaacttgcctaattaatctgacattgagagagattgattataaacatcaaacataattactaagtatatattacctatctttaactaaaataacttataacactactgaataactatacatttgaggagtttgactcaatttacacaagctttatacacacaagttagtcgtat

SEQ ID NO: 209495 - DNA, 302 bp, Glycine max
accaagcgatataataaaaataaactatattaccaccgatccaaatcaatgaaccgaaatataaaacataaaatcaacataagaaggatagggggcgacatatataatttctttacaagcagaagcatttattctcgcgcagccgcgcattattatgcggcgcggctgaaaacaagacgccacaaatacttcttaaacaacatatcacaagggctgaggaacttactgtgataggacatatcccaaattctcatggaaccaagtaaaaatcactttactaaatcttaaactatacctaaacg

SEQ ID NO: 209496 - DNA, 505 bp, Glycine max
gctatcacgtgacctatgaaactcagcttaatgtgttctcccttgtagaactactaactgtagtaatagttgcagcccaactatctggtagtgatgacaatagagtcaatgtctttacctcatcctcaaatttaatctgcactgactctaactgggcaagaatagtattaaattcattaatatgatcagttacagagataccttctcccatcttgaggttgaacaaccgacgcatcaagtatactctgttggctgctgacggcttcttgtacatatctaataacgcctttattaagcctgcagcagcctttttgtttatgatgttgaacgcgatgttcttggctagtgctaatctgatcacgctaagagcttgtcgatctaccaagtctcattcttcttgttttatgttgcctgacatatctcttgataagggttgatacaacttcttttggatagagaattctttatctgcatcttccacaagctgagatctttgctatcgaac

SEQ ID NO: 209497 - DNA, 229 bp, Glycine max
  unsure (1)..(229): unsure at all n locations
aaacctctatcggtcgaccttactccatacgatgaatataaaaaatagaggagaacctatagatcgcatactcatcaaatttccttcaaatgttttaccacagatcaaataatccaaactccttcttagggttgcacatgagtnggaacaacctactgctcccatattctgtactcatttagcttatacttcggttgcagccaactaattatatctctgttatgattga

SEQ ID NO: 209498 - DNA, 234 bp, Glycine max
tataaaactcagctcgacccaaatggctatgcggcatctgactatcatatatacttcctcatacctatattgatgcatcacatctactgaaattgagtcttgacttgagaagttctaatgactgaatgaagaataatcactgccttatgctatatctctgccatattatattcttttagctaatacaacttttctatgacgaactctgtgatgatattagataaaagacctcct

SEQ ID NO: 209499 - DNA, 406 bp, Glycine max
aaaaaaactttattttaataaaacgctgcaacataaacctaaatccgtagactgcataatatacatcagtctgacaataaaaagtactaaagacatgacaataataaaactgttcaaaaaacggggaaataaaaatcgcgatcctgacatgaacttggcagagaacatggcatgctcattcaagtccagtgcaacaatgcctgatggtgaatcctgagaaagacgcacatctggcattggtgcagaagactcacgctgaaaagaagacatgtccagcactgcacgggaagaaactggcgacacccatggggcttagcgcaagaaacacgtttagcgcgccttaataaaaactaatcaagcgctaaacgcgatagccacatgctttgagagtgaacacagaaaaaaa

SEQ ID NO: 209500 - DNA, 474 bp, Glycine max
  unsure (1)..(474): unsure at all n locations
ttanaattngaattaaaacgttcagaaactgctggtaatctattaccatatatgtgtaatcgattacacagtgcaaattttgaattcaaactttaatagctgttgtaaatcagttttggccactggtaatcgattacatcctctggcaatcgattaccagaaagtaaatttgttgaaaaagactttttaacttaaatttattggtcaaactttttgctactttaattggaattccctttctatttaatatatcctttctaagactctagagactgtcttgatcattcatcttgaatatttttaattcctttgtcttgaataaagctttgagacacatgtgaaactttggctatattaaaacatttagcttgatcctttatctacaaagcgtttcctattctgtcggtccatagaggatgtcttagttagagttggtgaactaaattctctttgtgatttttatgtttcgaatat

SEQ ID NO: 209501 - DNA, 430 bp, Glycine max
agcttgttggggggtcttgggagatacccatatgggatcacttgtgatttcagtggcaaagctaaggtcttggcttcacaatggttattgaagaagatgccaatgggtgcttctatgatgaagaaaatgatgaacttgagatatgggatggtgggtgtggctttgggtctcattatggttttttttaatggttttggtttttggtttagagggagttaaaatgctgggttatggggtatgagtgttttagagaagatgttcggagtcattatggaaaaagtggtgtatattttgtggacaaagaaaggcattggatttcttgaaggtttagtattataaagtaagaaaaactccctcttcttttgctcaagaaaaagatctgagaaatagttgagatgagatctaccagggaaggtacaactacaacaag

SEQ ID NO: 209502 - DNA, 484 bp, Glycine max
  unsure (1)..(484): unsure at all n locations
actcagcttcagctntngctcattagaattgaagctgctntggtgcactaaaaaatgagaatccgatcatgctgggtcatgtacagctatatgcaccaaaaaatagtatatctcttagatacgaatgcaaattagtcctcaagattttatctttaagatacgtctcatgtaagaaactggaaattcattgaacattatctcctctntattggatgcaaaacttttggcatgtcatatggtatcattgctttcgcctttggttattccattagcctcaatctacgcagggcttcatgttgttatcactttactttcttctccagtaagagatatgtttccctcattgatctgcacagatttttgatgatttaaaattaggaaagaaggaaaagaagagcttcattatatcatactaccggcttcttttcacggatatatgtattagatatgtctacgttgtccatgttgggaacaggaattattt

SEQ ID NO: 209503 - DNA, 318 bp, Glycine max
cccatatctactcgacaatacaatggtagccataaccccaaccaagggtcctcaacctccatattctcgaggatacaactcgaacacaacaagtgctcatcatggaggaagcccagagcattccattgagcatagtaggacccagaaacataacgcgcatggccttctcgacgctggctgctgaaatatgacgacaatcacttgtgaatatctgacattgacacgcgacatcatacatagggcaaactgaacgtcggtggtacatgaccataatgactcattaggaatctcaagcttatgccattaatggacacaaca

SEQ ID NO: 209504 - DNA, 423 bp, Glycine max
  unsure (1)..(423): unsure at all n locations
nntacgaattggtcttcgccgggtaaaggatcaaagcgggtctaattagaggcttatttaatcgtcttgcttggacgaatgaganaaaactgtggcaaatgaagagggtgagaataagggagaaacccatgttgtgactgccgttcctacatggtcgagtttcccaccaacccaacaatgtcattactcagccagtaacaactcttttccttcctcaccacccaattatttacaaaggccatccctaaatcaatcataaagtctgtctactacataaccaatgttaaacatcatctttagcacgaaccaaaatatcaaccaaaaagtaatcttgtagcaaaaaatctgtagaattcaccccaattctggcgtcctattctgacttgctcccatattcacttcataatgcaatggcagctataa

SEQ ID NO: 209505 - DNA, 361 bp, Glycine max
  unsure (1)..(361): unsure at all n locations
ctttgtgtctaatctaaactaaagcacaagtatagagggcgcacgaaactcggcccatttaagcatgaccgttgtgtntaaatgttccgaaagagccgagaaaataacgctatacagcttgcttaaactttcaagtgaagggtctaaaattcttaccgtctggttggagatggatgccaagaatattatattctgtggttcacaacaagatatttttaaagataacacggaggttggcaacaagaccaatcgcgacgattattaaatcatatgtagaacactcttacacatttccaaaagcatgaaacaatggcctatgaaatcgggttatagtctcaaagaaacacatattctttcaaat

SEQ ID NO: 209506 - DNA, 428 bp, Glycine max
tctaagataactctatagctacacaacactagattactctgtaattgttaagctcatgttgcagggaatcaaaacgaatagattgatagaagctctctataaataactccaatctataactcaaacaagagagaaaaagtgaataacaacaatgatccgatacttgtccatgttactgcttatcatcatctttcgccattctataatatatatgatatcacccacaactagatctcatgagccttaccatattctaggcggtgagcatatcctaaatcgaaaagtttatcgattcttcttgtgtcgagctggtattggaccacaaactatattatccggtgctgttttatcaagatagtatctagtgctagtggtggttcaagagaactcatgtgagatacttgtccaggctatatgaatacctatat

SEQ ID NO: 209507 - DNA, 353 bp, Glycine max
  unsure (1)..(353): unsure at all n locations
tatatagaggattaacaaaagttactatacccaccaaagtattgcataagccgtaatggagtcaaagtggggttatttgctaactctttataaccattaagacttacaaacgcctaaccaaaaaaatagcatcatcagtgctgagactcgcagaactttcattgtagatgatgattatgtgtgataattgcgattacaagaagccaacaccaggagactcagacatttgcacttagtatcagcagaaacgtcacagtttcactgacaaatatcggtttcattgatgctgctccatctcgacttcagcaatntgaactatatgaataatattaacttgtaaacgcaaatcttct

SEQ ID NO: 209508 - DNA, 490 bp, Glycine max
ttaaaactcagcttctaatattgagaaaataacacccaagttacacagtggctagatatattgcaagatagaatatataagtagaggacaagccctcaccactagagttatcttctacggcgcgttgacgttaatacctacaaacatctatatatgctacacctcttaataatatacttcaaagactatcgactaactaacacaacttgacgagtttactcactcttataaagagaacactataatgagacagaaagataaacgcaccaccttacaatacttcgcaaattagtcaatattccaagattctctggctaggatccaataatgttgacactctctaataattcggcaactaatcatacaatatgcaaagtgatagcaacaacacataagcatacctatattttcattccttgagacactcttttatcaacacaataactcgaataataagaataataatcataattatattatctgactcaca

SEQ ID NO: 209509 - DNA, 364 bp, Glycine max
  unsure (1)..(364): unsure at all n locations
tagcttcatgatgaaacaagattgattcacttatgtttcgacgaccacaaagatgataacacgaagatgatgaccaaggtgatgacataaaactcaaaggtcaatcaacgaatgagatcaagatgttcaagatacaaacaagaacactttaaggtcggttaataactgacataaaaagttcgactttgcatggtgcctgcctagacatcgatcatacaatcaacgtaaaagatctttctcaactgatggatgcagcgctctctcagttgggtaaacaccatatattaaaaactgagattttaatctcaaccatcaatctnttaaattacaatctaacgtgtaagaaaaattcttatcatttctc

SEQ ID NO: 209510 - DNA, 460 bp, Glycine max
  unsure (1)..(460): unsure at all n locations
gacactannagaaactcaagcttgaacatgctcatgttgaaaacgtcatatcacaagataattatatgaaacaaaacaaagtgctatgtcgctgncagtttattggacgaaggaaacttgagtcaattgattaaatcctagctcttctaacttagtgagtttcattgtattcaaacttattgtgtaaacactctttgagtgattaaaatacattttgtatcaaacatatattgcttataagagtcacgagtggcttactgacaaataatacttgggtcttaatctcacggggggattaagagtagtgttaagagcgcgttatagatactcattatagtcagaagtgacatagagaatacgtggtataatcaaagaattgattagcggaactattaacgttttaattatgctaggatatatgtcgacaaagcgtaactgaatcctcaatgtcgtactgagc

SEQ ID NO: 209511 - DNA, 399 bp, Glycine max
  unsure (1)..(399): unsure at all n locations
nagcttcccaagaccaggttggccatccacatatgactgtccttccatgcagaaaaagggcaacagaatctgttgccatatctgatgagaatccaaatcccccaaagcctatgaaagcgcggtttaagaggaagtctttcaagaggaaaccctctagagacaagatgggccaaattcatactgaaaacttgggcattggagcaaatatcaatcatgacgtagaaacacatgccagtggtaatggcgaatctggcgtccttgaaaagaaatctgatacattcacttcagaagccgccaacaattgtgagaatggagtatcagttacatatcaagagaaagaaccatcggctggggagagttctcttgctgtcataaccaggaaagaattttgagatggga

SEQ ID NO: 209512 - DNA, 496 bp, Glycine max
actcaagctttgacaaaagatatggtcgtgaaaatatcagacttaacttctaatcttttatttccaattcaaaaaatgagtgaccagtcattatatacccctaagtatgtgacatcagtttggtcatctgaagcacgaaaagtaacatcagcagtgttcctcggtaaatggcaaggagaacaacaatgttaatggagcttacaattcattgcttctaatctttccagtattattcgttgcacgtatagttttaagtatgctgtcattaaaatgttaaacaagccaggttactagttgcttataacaggctatagaagcttaatagctgtaatgcttgtcaaacctatttgttgcggtacaaatatcatgcagttagtgcctagactctagattcgtacgcaatttctcttttacttcatatgaagtgggtctcatctgatcatatgattcctattattgcagcgcgtcaaatatcaggtagatgctctctgaagtt

SEQ ID NO: 209513 - DNA, 316 bp, Glycine max
tttttcactatgagacacacaagcgagctttaaccactgatctacgtcccgcgatgatcttcttcatgtccgcctgagtgggcttatagcctaaaccatacatcccacgattttcttgggtatttatcaagctaagtatgccgccgttgtctttgcctaaacccattccgggtttataaccggtccccaacataactcgggccatcattaccgctgcatcggacagacaaggttgcccaaagaaggagtccacggaggaaatgcttaccacctcataagactggaaagcagttctaaagattctttgcggtttcac

SEQ ID NO: 209514 - DNA, 447 bp, Glycine max
tattactgacctatagaaactcaagctgcacaaatgaacggctacgcaggcatcttatattctatttgataatcaatctgtaggcctctcatctataaaggagaggagtattactactggaaaactctcacgcgaaattgttattgaagcattatacttgaatatatagggacagccatagagaacatggccttatatatccaccactagtgacagaagtactatagacggaagctcatcatgtgaaagtctaatatcacaaatatctactgataaagggtctgaagaggatacaagatgattataatacaattcagaagtcgagaggataattacttctgtcctgggaatggaagaatattctacggttgcaaatagtacgagtgctatggaaacgttggacactctacatataacatatgacggtacaattgatcgtaaaagatc

SEQ ID NO: 209515 - DNA, 471 bp, Glycine max
  unsure (1)..(471): unsure at all n locations
ntaatcttcttggaatcaaatacaaaccaacaatagtcttatattgttaataatgttcacatcgtgtctcaatacaattaattgattgatctaatatgtctaaaaaatattcaatactaaaagattcttcatgtgaatgtgcgatctcattactaatagatcttttttatgaacagaagatgatgagatgaacaaatgtgaacactgaaatctataaagtgagatatattacttacgaaattgagacgggttaaaggaaagttaatacggatttacttttttgggataaataaaatattttaaatgacattaatcttgacaatggctaattcgtaaaaagatgatatcgactgactaattcttanggaagagagagattctaaactatattattctcattacccaacatttgttaatacttaataatacaaaattaagagacccttacatgtctcgtactatccacgacct

SEQ ID NO: 209516 - DNA, 201 bp, Glycine max
caccaagagagcggctcgaataaaaagcctagagaggaagccttcctgacggaagagaatgacagacagagagagagagagagaaagagagagagtggcgtgagaatgaacgaaagatagggagagaagctgaactttgaagtgcgtctcagaagactctcatttatcaaaggtatcacaagcgcgacacatgctcctatt

SEQ ID NO: 209517 - DNA, 295 bp, Glycine max
gacctatagaaactcaagctcaaggaatttgttgaacttatctcctgatcgttacttattgttcattcttgggtcttgacttttgttcataataaatcgacgcgctatctgtaaatggtttcttgatttaataaaaaactatgccagtctttaatttataataattgcttaagggaaagcaatacttaagcgtatggcggttgataaattgttatttgattgtgcttaaacctcattatttgtcccattttatcttgttttgactctatactgttatcacagcttatcgtcatgt

SEQ ID NO: 209518 - DNA, 349 bp, Glycine max
tccagcatccgcacttggaaggatctgattactgccttattatgcaatatcagcataattctgatatggcttccgatcagactcagctgcagaacatggtataaaaggaaagtgagtcctttaaagagtacgctcaacgttggagggacctggaagcacaagtggccccttccatggtctaaagggaaatgattaccatgatggtagacaccttgccggtgttttactatgagaaattagtgggctacacgcccttcagctttgcagacttggtattcaccgggaaaagaattgaagtatgtttgaagagagggatgttctgatacgtcttctccacaagtaccaatgc

SEQ ID NO: 209519 - DNA, 447 bp, Glycine max
tctcacgtctttgtctctcagcttcaacatgattcagcggttcctctctcccatttgccggctttctacctctttatctgggcttccgctcatctgcatgaatggaggatgagtcttcattaccgagatctagacaaggaaccccgcttccttgagcattaaaattcccagccatcatttgattcagttgagggaacattttaccttcattactgacacctaaagtctcattggaagaatttccataagcatggctcacccttagtgcttgaacctcataggagtcctaagtaaaactaggatcatctttcaccttctgggagaaactaatagctatagactcgagaatttgtgttccctacgcttaactcatgctccaaaatctttggaaacacttttgtctgtctcggactggattcctacatgctgccttgatatctcccaaca

SEQ ID NO: 209520 - DNA, 331 bp, Glycine max
attactagattttatatgggagtggtcttaccggcaagcgcaccgggtcgccaagtaaattaatcaaaatggaatgaaccgagtatcgaacataaggaacttgctcatttagcaaagttatgttaagtaaaccaggcatttgcaacacaagattaatgattgtgaattaaagaaacagtttgttctatcctaagtaaaagcaataaatgagaacaagtaagtgtgaaaacagatatctaaaggccgtgggctctcctactgagtaagttgatgcaaataacagatgcttttctaattaaagatggttcctatgtctatggtgacgacaaaa

SEQ ID NO: 209521 - DNA, 458 bp, Glycine max
  unsure (1)..(458): unsure at all n locations
cgtatagttccccaattatgcgtcatttgcagcacaattggtaaataaatcttgttttatgggtaacactatctctagaacattttcattgaatntaatgatgaaatctgtggattcttaggtgaaaaagaggctaagttttgaattgcaaaaagcagcagttgggctaagcgcatatccaccactaagcgcaacttcagcgcgcttagcgcaaaggagaatttggcagagcattagtatcaaagccgtacactaagcacgagattagtgcgctaagtgtagtacgtgccttcagccacgctaagctcgagactggtgctaagtccaatttcacttacttgcgataagcacgagggtggcgttaagcacagtgctgcgagttcaagtctatttaaagcatgttttgtgcagaattatggtatacaacgtccagcgcacacaattctatatcagtcaca

SEQ ID NO: 209522 - DNA, 454 bp, Glycine max
  unsure (1)..(454): unsure at all n locations
agctaggtaccttcctagacgaggttgaaatcttatttgagctgtgccaccctaatcagtaagaaaaattttcagtttagcaaactgaaatgtaaactcaatacacaaccaagtaaacaaatgcattatgcatatgctaaaattctacctttgagactctagcacaactgccattgttaatgctccaatatcttatctcaccatcaacatcacaagagcagataagatcatctttattagggtgaaaatctagtgacataacagatgaagaatgtcccgtgaaggtacgaagcgaatatccaggctgcattggtaattacatatcagctaaagcagaacacgaagaanaacacacaaacacatgtgtgcacacaatccataaaaatccagagatataggctaactaactatctgatccagcaatcattagcaacccagctcatacatggacctg

SEQ ID NO: 209523 - DNA, 474 bp, Glycine max
ttatactctgcttctgtactagatcgagccacaactttctgcttcatagaccaccagggcacaagataggtcctagagaaataacagcccctgatgttgatcttctatcatcaagatctgaagcccagccagcatcacagtaggcttggacagagacatttggggagtttgaaggctgaagtctgagaccacggttgagagtgccattcaagtatctgagaattctcttaacagcaatccagtgttgttcagaaggatctgacataaattggtagaccttgctaacagaaaaactgatttcacgtcttgttatagtgggcatactgcaatgctccaaccactgaaagatatatagtaggatctgagaatctctctgaacctaactcggacagtttgcactctccaatcatacgagaagcaataggacttgtttcattcattttgtttacaagaagactctacattgtagttata

SEQ ID NO: 209524 - DNA, 401 bp, Glycine max
atgatgaaacacgagtgagacacttatgttgtgttgataacaaacacgacaccacaagatgatgactaagatgatgacaaaaagctcaaaggtcaatctaagaatgagttcaacacattcaagatagaatcaagaacacctcaagactcagaaggaaagctgacttcaagaaataagagaacaagattccatgaatcaagattcaagagaacaaaagcccagacccaagattcaacaatcaagagaaggcctaatcatcataaggatgaaaagggcttctcataaattgagaaccacatggagtcttctcaaaaacttgataccaaagagactttaatctctcataacaactaccagatcggtggatcgcataccagaacacaattgattgaaaaagttac

SEQ ID NO: 209525 - DNA, 427 bp, Glycine max
tagcactcaacatctaaggatcacgcctcaagagtgcaaacttatattaagcacacacattctccctctattatagaagtacaggggtcttcacgaaggtgttcaaagtatttacatcaaattctatccgatgacttctcaccctcacctgcttaggtgatctattctcggtgtcatagaggttcgtataaaacttcttcacaatggccacgttgatgttgttgttagcaaaatcagtcaattccttatcccagcgttttctctccggttcctccttgaactcatctaactcagtgtaataaactactacatttctttctagaagaaatctccttggcacagatatattaccatatctttctcacgtttttgagagggaacttggatttgcatatatggcctgcgaacggctgaacgagtcttcttt

SEQ ID NO: 209526 - DNA, 332 bp, Glycine max
  unsure (1)..(332): unsure at all n locations
agcctgcagacagagaagagatttaccctttattanacatanatatctcccgcactctgtatgcacgacatcatattcaatatctcaaaaaggtaatcaatcatgtgattcatataccataacaaatttaacatcataacactcactcataataactatacaagacactgtaatttattttcacataaataggcctaaaaaacttcttaaaacgcctaatgcctagcctttcctaactaaatatatgtttaccggactaattcgaaaccagaccgtanattcctatcagacgacctaaccaatctctatctatttatgtgaaaaatgaataa

SEQ ID NO: 209527 - DNA, 312 bp, Glycine max
gggtatgagaccttgggaacgtcaggtggggtgctattgcccaaaaccaagcttgaccaatcccgacccaacccgagcatagtcagtcagtgagaacctgtgatgtacctaaacaggcgagctcctggcagtcaacagataatatgaacaaagaccacaaagcaaggaggcttgtggtggctggccagctgagaatcttgtgtgatatatgggtaatggcctctgctaatccattaccaagggtgggtaatcgattacaacggcttaaaatgaacacaggaggctaagatggtctctggtattcaataccaa

SEQ ID NO: 209528 - DNA, 495 bp, Glycine max
  unsure (1)..(495): unsure at all n locations
ctttgctttctcctccaagcgcttcctcggtatcccaactacctcatttctantttgcttcaacctgtctagctcatgttctgagatcttgaccacttttgccattcttgccatagaaggataaaacccacaaaaaaggcatggcttccttcctcctagcgagcatcctaagatcccttcgaactctattatggtcgataccaaatgaaaatccccgaaagtgaagcatctaagagactagttctagtattgagtgagggttgcgatggctttaacggacacttctatcatggccaaatcccagatattcccatatgccttgctgaaggcttgatgtcaaacttgatccatctgttgctctagttctcgcaagctggctagttctaggttcttgactctgacatgatagaaccttctttaaaggagggcgcttggttcgactccatcgttgcggaaatgagaaatctgatgaccaatatgtcaacactctatcat

SEQ ID NO: 209529 - DNA, 484 bp, Glycine max
ctataaaactcagcttatgtagaagatgtcacatgcctggagaagcatgcttttatgaaaaaagtgatgtcctagcttatcttcaagagaaggaatgtctacttcagaagaaagaggggaatagctagcacttgctatgcagatatcaaccacttgtgaagcttcaaaattaacttgtatgccaatccatgaaagaaaggcaattgcagttttaaagccactgtcaactaggaatgctccaaccagagctataaccacatcagcaattgtttttctatgtaatcaatgatgatttttgttacatcgggtttcagttgcttttccttgttgcataacagaatttatacaaaagtgtatgctttctttggttcattgctcaaactcttgggtaggacggcccaatgcataaactgagtgggacaaatgtctgattcatatatagacctgaagagggagcgaggagatagagataacacttatgtca

SEQ ID NO: 209530 - DNA, 394 bp, Glycine max
atgagaatatattatatcggtttcttattcttcgcataacaaaaatatttttaatcttataacttactatattttattctttattctttatttttgtaagaatatttcttatttttgactcttataaattacattcattttatctttactccttaaaataatttaaataatatttctaataacgttctctaaaatattatagaaataacaattaaaacaaacataatttataattaacgactaacaatcaacatataattttctctgatagaacaaaatattagattgttaaactaaaaaaaataatactagtcactgatatatatatatatatatatatatatatatatatcggtcccacagctagatctgtgccaaatcaatgaactctttc

SEQ ID NO: 209531 - DNA, 431 bp, Glycine max
  unsure (1)..(431): unsure at all n locations
cagctggtaaagagggacaacacttgggcttttctcttattaggatagccacaacctccacaaatgttagtcataatcagcatgcaattcattcattcgattaaccgaatgacgacatacatatatttgttgttgcctcttggtcntgacataattatttatagcctcacacaatatcttggtgtgttgatcgagtggttgtcaatgactctgtctatataaaaacaaaactcaatttcttgtttggcaaacgaaggagcaatgaattctatagtcttggactatgctgctaaatgttagttgtgactaccctccaaactttgctcttctatatgaacaaaacccataatgtgtctcggagacagccatgtcctattgttggcgaccaacaaacactttgtagctacttataccttgagcgataacacact

SEQ ID NO: 209532 - DNA, 385 bp, Glycine max
  unsure (1)..(385): unsure at all n locations
gagacactatcgaacactcaggcttgtaacgaatagatatatagatggtctatagagacccttgttatatagtgtaatangatctgttgcatgcctcactctctcgaaattctcagagtctctatcggatgccgatggaggtcggactatacatagacccgatctaatagccttgcttacctagcatttcttctcattaactagacctttatccgctcagacaaaagcttccccatcagatcagcttagccatgaccgcgagagctatctgatctcatcacatttctattcgctgcgaaaaaacgaagagatcgaccgaataatgatcgaagagaacacctatatatcagtcgacaagtgctagaggtctccttactcaacacta

SEQ ID NO: 209533 - DNA, 335 bp, Glycine max
aagagtatacattgtggaacctttcaccctattaatacactgacataaacttatctttttcttcttggacaaagtatggcaggctgggggcaagaaaatattctttccattagaccttggatgcaactgtgatcatatacccatatcagctacatcttgacgggtattcaagccatccttcgtattgcctttgaatgctaatgagcgtcccaatcacactgtcacaaacatttttctacacatgcataacatcaatacaatgtctaacgtcaaaatcacaccagtacggaagatcaacaaaatggacctcttttccatagcaactcgactttatc

SEQ ID NO: 209534 - DNA, 438 bp, Glycine max
  unsure (1)..(438): unsure at all n locations
tgttcccagattcgactgaatcatcaatgcagntacagncaggaacatcattgtctagaaggagctcaattgaattccaaaactgcatgactgcctttgccaggttgtgagacaaaattttcaccccaagatgtttgctttggttttcaaatcttaaccgagaagtaaaagttgcctgatgagacaattgtgcggcagcagttatcttccaaagacgcttctacaaacacattttggtgggacaaaaggatgtattaaaaatctaatatcaattaaatttaacaagggttagtcttcaagtccttagaatgatgatagagcagagaatcacaactggtctagaaaataaacctgtgcaaattattgccaacatgtatttcttgaagacaaacccagcgagattttatgatctggagaaatggcaacaatatttgcatc

SEQ ID NO: 209535 - DNA, 160 bp, Glycine max
cactcgtagaggatgacttgacaaatttacccttcaattgacgatcgctacgctactgggaccgttcatgtgcattcacacttttcctcatgccacgcccagaaatggctggacaattgtttctttctctgataatcctctcatctatgacgagttccac

SEQ ID NO: 209536 - DNA, 418 bp, Glycine max
cggatccttggcttgattatattgaattatatgttctcgtttaattatgcaaatctgaatgaatccccccaatttcaaattaatactaggtgtttgatgaattgtatctctaaaaaatgagctgacttggccctatattgcaaaattttattggggaattcaatggcttttgatggcagctggcattgctgtcaaatgccccacatcaagatggaaacaaattatgtcaaataaggacagagccagcgcttaatctaaatcaagttaaaatttggctttcaaatcatctttaaggacaattatttatacattaaattctgcaattctcaggctataagtgagcaaatagataacaatgctcttggcatgagaatgaaagtatacaatcagaacacattctctgagagtctctgctata

SEQ ID NO: 209537 - DNA, 424 bp, Glycine max
  unsure (1)..(424): unsure at all n locations
agcttgaagaggatgctntaatggaggatattaaagagagaatgtggggatcacgaaattgaaggaataaaagagggagagaaatggaactttgaagtgtatctcataagactttcattcatcaaagttacaacaagtgttacatatgcttctatttatagactaggtagcttccttgagaagctttcttgagaaaacttccttgagaaggcttcttgagaaaacttccttgagaagctagagcttagctacacacacccctctcataactaagctcacctccttgaaaagcttccttaagaagattcctaaagaagctagagcttagctacacacacctttttaatagctaagctcaccttcttgagatgagaagctagagcttatctacacaccccctataatagctaagctcacccccatg

SEQ ID NO: 209538 - DNA, 485 bp, Glycine max
tgccacccaactcgcccagacgagctagggtgcttcctccagaagcaaccgccttctggaggaatattctggaagctcaagtgggcctagttgctatttgcacccccatttttactaaatacactcccttgctctttattgttgatttctttcgtaacgttactaaactttactaatttcgtaacgatgctttttttctttccgtaatgttacgaaaccttacagattacgtaattattctctttttgtctttcgaaacgttacagaactttatggattgcgtactaacacttcttttcaatttctggtatgtcatagaactttatggattgtgctacaatgccttctattgactttcggcatgtcatggaactttactaattgcttaacaatgggtgctaagtgtcttgaagtgctcaaacaagggtctgatctcaataatggatggcctctgacgagatatggttgacagagtgtacataagt

SEQ ID NO: 209539 - DNA, 501 bp, Glycine max
  unsure (1)..(501): unsure at all n locations
acctatgaaactaagctggtattccaccactttatttatttgtatctgatatttttgtttctgatcaacatcttgatcccaatattgcatctcaacaactcgaaacattatcaaagctctaaccagtagttnttggatgctagtatttatcattgccaaaataatgtactaatcaacatgtatatgataataatatacaatatctactttaagctagcacacttgccgtaactaacacaagtgactttgaggcgagtaagcttgactagaactagaagcttcgaatttttttctatatctaaacaatatgtatcatttattggatataattatgttcagttcaaatgggataagactaccactgacaaaactctcgttatgcacttacatactataattcggaaattaaatctttcggtttaagttgaaacatatttcagctatgttatacacttagcggtataagttatggatctatgtcataataaatgagacaaatta

SEQ ID NO: 209540 - DNA, 445 bp, Glycine max
agtcgctcagctcgcccaggcgagcaaggatgctctctctcataactacagccttctaaggaatcttctggagggcccaagtgggtctggctgttatttgcacctccatttttactaaatacaccccctcttctattgttccggtgattctttttccgtaatgttacgaaactttacgaatttcgtaacgatacttattattcttttcgcaacgttactaacctttacgaattacgatttactctctctagctttcgaaaagtacggaacttactgatcggcttaacacctcttttgatttcgctatattacgaattcaccgacgtcaagcttgtttcttagattttgagagcctacgattcatttattgcatgcacaataaaatctctgacaaattagggatgaatatcttgactcttgtagatttagtgagacatttactatt

SEQ ID NO: 209541 - DNA, 487 bp, Glycine max
ttgcgatgttacacactaaagaaaataaatacgagagagaatccttattgcttacacttgcacatttgagaagcaaactcattcgaccaggagctcatggaaggtgctcaaagacaattgtgatagtagggtacatctagtgttagtcactcatgtagactctctatggttcccatgttatcaagaatcagcaggatcgatagatctatggcatccctctaagatcttatattaagagagttttatttggtcatatatcaaagtgtaacaacttattgtcatctatcaatggcgcacgtggtcggtccaaaagtcttatatatccttgctgtggaaaataatcgaagttttttttttaacaaataaaaagaaagggacaaaccctatgattaataatttagttgattgactaaatgtcaaatggctcaattgtcatcattcaatatcgtcaagcgattaaattaaactaaatatacactattaacga

SEQ ID NO: 209542 - DNA, 418 bp, Glycine max
  unsure (1)..(418): unsure at all n locations
agctntacacaacaaaagaacggtgttctattataattttcattnacataccgagcgactggaaatttcattctgagctcaaaacaattctccattatgattgattcattctaaactatcattataaaccttcttgtttgcaagggaagcttaaaatttttcaaaaccccaattcaaccccccttcttgtgatattatagtcgcttcagggtggatctcaacaaggaagaggagtaatggcatcaatgtcatggatgtagaggaacattcttaccatttctagagagtatcacagacgaagatggggaggatgagagaaatcaagagagagaaggagggaagtaaagtaaaacaccaaatttattcacaaattttctcatctaatagtggaagttcgcactggtaggtcccacacaat

SEQ ID NO: 209543 - DNA, 490 bp, Glycine max
  unsure (1)..(490): unsure at all n locations
ntanatacaccaaggatcaagtaaatacccgtggttcgaagttatgtgttagaagaatgttacttggttttatatttccatgaattatgttattcccatgtacgtactttaaacctctggcagtatccattgccactttctgcctttgcttccaagtcaatgattggaaacttccccttgcattatgtttaaaatttcctttacatcttcatgtcaatagcaaattcaattcttcaatgagatttcatgcataaaatttttaaactaaattcgtagataagtaaaaggtcatgtattagtccttacttgttaggtactattcaagtgaaccgttgcatactcgctcatacacaatcgttagttggcttctatttgtgcataaaaccaacagcatgaccatatatttatgtttagcactgatgaacaattgtaattctacctgtctctctagcaagtcttcaatagcaggtccatgttctctctctgataa

SEQ ID NO: 209544 - DNA, 383 bp, Glycine max
  unsure (1)..(383): unsure at all n locations
aactcaagctcaatctaacagcancctcacgcacaccagccagtttgactttgttgcaaatcncaatataaccggctagacatgcatacacgtctttattgtgcacaccatgaaacaaattgctctgaatcaactgaattaatgaatgtggatatgttatatttcgtgcttgaacctctggccgtgcaacgctagtaaagaactgtggcacacttgagctagagtaatcttcaacggtaactctttttggttcattaaccatgatattggctctaaataatactatgtgagactccctttgtttttgaaaactataagacgtctcaaaagatacatgttttttctgaatagtcgttgctctaatgtcctgtaaaaactttcta

SEQ ID NO: 209545 - DNA, 272 bp, Glycine max
gcactaaggaatatcactccttatcatacgttcaatagttaagagtccgaccaattaactttccactaacataagccaatggatggtcttctagcaacactacaatcgtaatcacaacattagaagcatcatactcaattctataagagcatcgaaagtatggtaatcccagtacggggggtattactcagcttttgcttaagaacattgaaagcttcatcttgcacctcttcccattcgaaaccaacatttttctcgagctcttcattgag

SEQ ID NO: 209546 - DNA, 462 bp, Glycine max
  unsure (1)..(462): unsure at all n locations
cgtgcaaatcaaatcactcctacatatcatctctagtatgtatnnttcttctttacccactctcacgttggtttttagggaaaaacaccataactaaactgcgccacaaggcatccctatcgcatcagatccaatattataacgatgggtgatcaagaggagacacatgatcagatgatagtctatatgtttgctttgaaagaacaaatggctctcatgatggaggccatgttacgtattaggtagttcatggagataaactccccaccgctgctgctgttagttcggttgctatagcacactccactctcttggcaattgtgtaccatcctctcttaaacatattatgacggcgaagggacatgccgctgcactacggcaactttatatggcgtcatactttatatcgctcggcgatctttgctcgatgacgtgcgaccatttattggttcttgtgaggtg

SEQ ID NO: 209547 - DNA, 439 bp, Glycine max
  unsure (1)..(439): unsure at all n locations
agctngcctcatagagggccaggaaggacatggtcttttaatgaacntaccccgctccggagtatgacagtcaccgctttatgagcgctgtacaccagcagcgcttcgaggccatcaagggatggtcgtttctccgggagcgacgcgttcagctcagggacgacgagtatactgatttccaggaggaaatatggcgccggcgcggggcatcactggttactcccatggccaagtttgatccagaaatagtccttgagttttatgccaatgcttggccaacagaggagggcgtgcgtgacatgagatcctgggtaaggggtcagtggatcccgtttgatgccgacgctatcggccaactactatgatatacgtcggtgttggaagagggccacgaatgtgagtatggccagatgaggaaccggtctgatgggttcgatga

SEQ ID NO: 209548 - DNA, 486 bp, Glycine max
tgaaggtaagctacatggcttggttaacctggtaacccaactggccatgaatcaaaaatctgcacctgtcgcctgactctgtggtttatgctcctctgccgaccaccacacagacctttgcccttctatgcaacaatcagaagcaattgaacagcctgaagcttatgctgcaaacatctacaatacacctcttcaacctcaataacaaaatcagccacaacagaacaattatgacctcttcagcaacaggtacaatcccgggtggaggaatcatcccaaccttagatggtcgagtccttcacaacatcaacagcagcaacaacaacagccatattttcaaaatgttgctggcccaagcagaccatacgtttctccaccaattcagcaacaacaacagcaacattcccagaaacagtaaatagttgaggctcctccgcagccttcccttgaagagcttgtgaggcaaatgactatgctaaacatgca

SEQ ID NO: 209549 - DNA, 252 bp, Glycine max
tattttttcccacaacactttctgtacctgcttagtcctgtcaatactcgtcgcgcggtgtcttttttatagaacgggtaagaccccaggtggtcagggcctacctgcactaaaagtccggaagttacctaccttttgtttgcttggaggaaaccccgatatcactaaacaaggatgcatcgaacacaaatgttgacctatctgtgaccctactcatgcaattacgtgaatatacgccaagccaagaatgtt

SEQ ID NO: 209550 - DNA, 417 bp, Glycine max
  unsure (1)..(417): unsure at all n locations
tagtgacatccgtgacttgatcttgagcgaagatgttcgcaagagagattcaggagaatcttccagtcatgtttccaattcagcattgaatactgaaggcaggggaaggactacccacaagggtcagaatggtcgaggcagatcaaagtcaagagggaaaggtcagagaaaatttcaaagtgacgttacttgttggaattgtgacaagagaggtcactttagcaattagtgcaaggcaccaaagaagaacaagtcgcacaaaaacaagaagcgcgatgatgatgaattctgcaatgccgcaactgatgaacttgatgatgcattaatctgcagtttggatagtcctgttgattcatggaatatggactcacgtgtgtcgtccacactactccctctaaagatntattggctaactat

SEQ ID NO: 209551 - DNA, 447 bp, Glycine max
  unsure (1)..(447): unsure at all n locations
cacctgaggcatgcaagctatactaacaaaaatttcattcacgttttctttcttctaattattntgacttaccgcagccttttatccctcttccattcccacctagagcaattccaaacaaaaagatggaagaatcagaaaaggagatcttggagaccttaagaaaagtagaggtgaacatacctctgctagatgccatcaagctgattccaagatatgccaagtttctaaaggatctgtgcacccacaaaaggaagttcaagggcaatgaaagaattagcatgggtagaaacgtgtcggcattgataggtaaatttgttcctcacattcctgagacaatgaatgaccacggtcttttatataccttgcattattgggacagtaaatttgaaaatgccatgctaatctaggacatcggtagggcatgccctgtcattttcattcttt

SEQ ID NO: 209552 - DNA, 478 bp, Glycine max
tcgctactcctactctgccgccaccaccttcgagggctatggtagcaaaatgctcgcaacaacaacaacaatgacgttcaaccttcctttgattttctctttctattctttcataaaccctaacatattttcccatcctttttttggccaactcaggtcacgaaccaagaaaccaccaccatcaatagcctccctttatgttcgcaacaaaacccctctgattttagtttatgctactgtgaggcaattttcagcctccttgcgttgttgtcattcgccatagaaatcaatttgtaggttcacgcttcgcttgcgtggtggcaccgaggagtgtctcggcttgcgtgggtgacaatttcgcgagcatggaatgttgtcgtttaatcaagttcctaatcgcgtctaaatctctatgtgtgacgatgtcatttaagaggatagggtccacgaaggccaccttcagtttgatgtctagagt

SEQ ID NO: 209553 - DNA, 294 bp, Glycine max
atacaacctttcttctccctttgatggcttgcttaacatatacttttattcttccttccaatatgacctttgactctctgatgaagcttcttcacatagtccgcctttgcttgaccttctttatacttaaaaacagacacattacgcctacgcaaaagatcaagaggagttagtgggtaacaaccataaaccacttcataggagaacaattagcggcgctatgaacaagcttattgttagctaattcaacatggggtaaacaagcttcccaagttttaagttattcctcaaacc

SEQ ID NO: 209554 - DNA, 259 bp, Glycine max
ggcgaccccaacagccagagaggaagcggagagagcggagagacaaacgaagggaatctcaaagagggtaggaacaccaatggacacagcggcacagaaaaaacaacgacgctccgacacataaaacgccggcaaattttgactcttcaaatacaccaccgaacactgtaaggcggccccgcaaaacccggcttagaatgcgcgccacaaaaaaattaaacttcctcaatacaaaaccgccaccgcgggaccatccaaa

SEQ ID NO: 209555 - DNA, 493 bp, Glycine max
  unsure (1)..(493): unsure at all n locations
nngagtgtacactaagctaagcacacactaagcctaggtggnggcacgctaagcgagctgcccacttcttcaattnttcttcaagggtttttcttccactttttgccttaattttccttcaaagcacttgaattcttcttctctcgacttctgctgatcaataatagcaaagatgttaatttcttcattatttcattaaaaacaataataaagtaaagaaactacactcatttatcaaattagctcatatttcgcagtcataattgctttttccctagtcttagctagtctcattttcctttggtttcttgcaaggcctacttcacttctcttgacagacaagacaaggaagacgttactatgctttctctttcacatctatattatgaataaagttaatttgttcactcttatattccattataacgaatccatacaacgaatcctctaagagaatgacatgcttgcaagcatgcaaatatggaatcatgac

SEQ ID NO: 209556 - DNA, 440 bp, Glycine max
  unsure (1)..(440): unsure at all n locations
tgaggcatgcacgcttatataaaatataacaagtgaactattaccangtaattttttattcctgcctcctttgaggaggctaatgctatttctccaaaaaaggatattttagatgatattgcagaatctttacaacaaatgcatattcatggacaagattttaaaggaaaagggaaaggaagccatgaagatcctctttaagaagccaatacagacgactgatctcccccataatggaaagcttcaaaagatcatccccttgacaacattattggtgatatctcttaaggggtaacaactacacattctcttaaagacatatgcacaaatatgacctttgtgtttatgattgaacctacacaattaaatgaggccataataaaatatcattggagtagcgctatgcaacaagacctaaattatgttgagagaaacaatgt

SEQ ID NO: 209557 - DNA, 512 bp, Glycine max
gagacactagagaacactcaaagctgtaggattatggcgtacccatcacatgtggtactacgtggcggtttttcgatggtgcacaacaagttttccacgtccacaatgcgcgcataaatccaccatcctctgatgcccacctccaactgagcttacgtactcccacgtagcccatatcctcgattctctcaacaccgggtccccatcaatcctcccaagcttccacaacatccaagaaaaacaacattcacacagcacaagttattatagccaagcaaaacagagcataggcagaaaaatctgccaaaacaccaaccaaatcacagcttctctcacttaaagaccccagtaacaaatcctttgatccaattcgttaaccgttggattgactctcaaattttactggaagtctatagcacataagcctacattttgaccgtggggatctactagcagacattcagaacttattctgcactactctgtctacagtcaaccacacataagtattt

SEQ ID NO: 209558 - DNA, 498 bp, Glycine max
  unsure (1)..(498): unsure at all n locations
cggacctataaaactcagctgtcttgataaatagggacacaactttatttatttaggcacagaattccacagagaccacaatgcctatttcgggaaaagagctctggaggcagcaagaggagcagcttttgcaaggatacctaggttttgtaatctcattattattattacgggtttttctgtaatggcttgctaaacacccttgttggggatttctaatgaacagctgatgtaattattttaatatctattgattgtgtttcttgtattcaatgcttctttcagtgcttaaatttcgtatgctcttggtctgatcactcatttgtgtgcatagttaggtgaatttagcattgcgaaatgtattattgccttagaacttgaatgaagcacaattgatacttagtcttactagagggatctgtggatgaagatctggttttatgtatgctatcacaataatgtngtttagtctaagtttagtacaacaagagggatctg

SEQ ID NO: 209559 - DNA, 199 bp, Glycine max
acgcagccgcagcaacgcccaaagacattacctttctgctccaacaacaaccgagaaaatgcacccatatacaagcaaacgcagcgatcgatacccagaataattacacgaacctcccaggcgcagtggtgactcacatcacacacatctccttggctaaatacacatacccgcatactcaaagcatgctggggcacca

SEQ ID NO: 209560 - DNA, 501 bp, Glycine max
  unsure (1)..(501): unsure at all n locations
gacacaagaaactcaagcttcttataagctgaaccattntatcaataaacattatgttatttttattcagacaatcagagttcatctcttttatcttagtgagagtgattctcctaaattcttgagtgattcacgaacaccctggctgtatcaaaggactttcacaacctttgtgtgttgccctcgctggaaagagagattctttcctttctatcatcttcacccttgctctatcaaaccacaatcccagaaaatccacctctgtccaaaattatctcgtgaccataactcctatatcacacactcaaattaagtgattcttgagcctaaattgaattttaaaacgagacctttcactctgttttggaatcacctcatatggagtcctgtagcttccgtcattgccatttctatatttctggccaggctccacttaacctacgtcttaccatcccattcatccattttatgccagagaccaccttattaagacccacgaga

SEQ ID NO: 209561 - DNA, 406 bp, Glycine max
gacctatacaaactcaagctcgaatcttccatggtcgggtacatgagcatatgctttgcttctaaatactctcaagcgatcaactctcggcttcactccactccatgctccctgtggtatccgatcatcgacattctttgtcggggagcgatcgcactaataaaacgcacatgcaacaccttttgtccacaacttctatggcctatttttagccgccaacatacatctatgcctaataagacacaccttatattttttctttgataccctattttgcagcggagatctacgaacccgcatagggcgaccaatcttatgctcttcacaaaaatcatcaattttctctgatgcgaattcacctcccttatcggatcttacagctatgattacataaccactctccttt

SEQ ID NO: 209562 - DNA, 487 bp, Glycine max
  unsure (1)..(487): unsure at all n locations
tntcacttctaataaacttctagagggagattattaaaataaatgttctttntaacttatttcaataaactttataattaaactcttaagtgacaactaacaaacacttaaatattgtttgaagtgaaccataaaaattcaattaaacatagaaaagaacatgaattaaactacaaagagactatggtatagtagctacaaatagagagagagagagagagagctcacggatcaataagggtgacgttggcttgacgttgtatagtatttgcaaggttggcaccggcaataccaccttctaggatcaccactttcttcttcgccatattttgtgcatgaaatattctctctctcttgattactagttgaaggctgcgttataataatgattggtatgttcttacaagataaggcatcaacatagatagatgttcgttcgtacgtcattgcatgtatcatcaaaataagtcctaatgtcaaattttga

SEQ ID NO: 209563 - DNA, 364 bp, Glycine max
  unsure (1)..(364): unsure at all n locations
tgctctanattacattgatgctcgtatttattataagatgttatatgccatttttgctttaagagtagcgccccactggtaaaattaactttccaaatgtttgccttcgcacgaatggccccgaggaagcttgcctcaaagaggttcaggaaggacaacgcggccgaacgaactaaatccgctccggagtacgacagtcaccgctttaggagcgctggacaccagcagcgcttctaaactatcaagggatggtcggttctccgggagtcgaccgttcagtttacggactaagagtatactgatttttaggaggaaatagggcgctggcggtgggcactactggttactcctatggccaagcttg

SEQ ID NO: 209564 - DNA, 426 bp, Glycine max
cgacagctcaaggatgagatacttacttggtggagtgagtatgagtataaaaaatgaaagccaaatgccaccaaaggtggcttgggggagccaaaaccatgagtcccgtaagctttcttttttgaatgaggggggggcgtcccctccccttcttcccctccttctctctcctctcctctttctttctcctcctctccctccccaccaccctcctctccctccacctctcctcccccctactctactccctttctacttcccctcctcatcctccttctaatccctctcctttacatctctctcctctcatccccttcctccctctcccccctatttttcctctttatctcttcctcaaccctctcttctcttctccctctctcccccccctttctctcttctcccctatccccttcttcccctccc

SEQ ID NO: 209565 - DNA, 450 bp, Glycine max
  unsure (1)..(450): unsure at all n locations
agcttgtcaccatagaactcaacaatnacatatacttgttngatattatatttcgantctgcccttttagaagaactggccattttgatcctttgggacaacatgatgaatttagtagatctttataggaggctcttgggatcaatatcggcaatgcaattcatccaacgataagcctaacttgaattatagagttagatacaattaaacccaaataaacaacatgttaaatattggggttattactcatttttgtaggttttattctcaaattatttcttcaattaatataagaaatagcaataataaataatatatataaagaattcttttatcccattcggaaggatatcatttcatttcataattatctatgactatcatctttgatcttgctttcctttctttggttctctctttaacatttactaanaaattctgtatacttac

SEQ ID NO: 209566 - DNA, 491 bp, Glycine max
tctctggtatgaacttgttgtgagccaatatgggtcgttggtcatatactcccacaaacacacatggattaagaaaaagtaacatatacatagattatagttatatcgcaaactcctaacaggttaacatattctctagtattaaaccgtgcatggtaacatagatgggattcttccattcgccttataccttcttttataacttagtcttttatggcgacactaaaactaatatttatttttcagtgtattccttttcctagtatgaacttttaattgtgacttgaattgtattactataagtgcatgtaactttttaaatcgtcatggaatttgaatcgagttgattatttcttattttaccaaaagtatattaggttaagttaacttatgacaggccaacttgggagagtgaagctggctcacttgacaacttctaatattcatatcaaaagcttatactaatagtagagacacaagtcttgacatat

SEQ ID NO: 209567 - DNA, 430 bp, Glycine max
gaagacccataagctcaaaatggtattattttatatatgaaaatcgtggaataaaattgtaaccttgagaacacaatcgccctcactacaatcatgtacattctccttttctttatcattgactttgaagaacccgtacaaaatcattaggggaagaatggatgtagcttgttacacaaagaagggtgatcgattgaataaggagagattaaggaggttgaatataaattggagttacattttttaacaacatgggaaaactgaaaagaagatggttcgagacttgagacagcgtgagactaaattatgagaggtgtggttacattttttattagttattcatttatctattagacaactttttcaacgataatcgcataaatatatgttatgtaattactaaacgataaagtgatcttaaactaaaatg

SEQ ID NO: 209568 - DNA, 416 bp, Glycine max
  unsure (1)..(416): unsure at all n locations
agcgtgtataaatttatagtgacacccttcaacatacatatagttgttcacaaatncacgccactcagtttcactttccaaaggaattgtttaatataaaaaccatagttggcatattttagaaaaataagagtctaagattatactaaaataggaaaacactttaaaagtttgtggggatatacagagactatatacaatgtcatagtaacaaaacatatttttccaaaactaaatttgtattccaagtacccttttcaaacttattttccttctgttggcaaaattctattttaagcgtaataaatcatttttaattaacaaaggaccttgaaaattatgagaaaaatgagcattctctttagagataacttacgacattcatttttatgcatgagatatagctctaaatcact

SEQ ID NO: 209569 - DNA, 490 bp, Glycine max
  unsure (1)..(490): unsure at all n locations
tcttagtttcagatgatacagctaagtatggagctacctcatgcactcctctaatgactatagcatcatttctggcgctaaactgctgggagttggaagccatcttctcaattaaatttctggcttcagcaggagtcatgtctccaagggctccaccactggcaccatctatcatacttctctccatattactgagtccttcataaaaatattgaagaagaagctgctctcaaatctgatggtgggggcaactggcacatagttttttaaatcgctctcagtactcatacaggctctctccactgagttgtctaatatctgagatatattttctgatggctgtgatcctggaagcacggaaactttttgctaagaatactctcttaaggtcatcccacctcgcgatggaccatggagcaacgtaatacagccagtcctttgccactctctctaatgaatgacgaanagctttcacagatatgtgatcttc

SEQ ID NO: 209570 - DNA, 423 bp, Glycine max
  unsure (1)..(423): unsure at all n locations
ctgacccatcaactgttctattttttttatactggagatccctacgctcttgaccttgacttgataaaacctctttttaagcgaaggcatctgacttgatcccatgttntactaaagtgaacaaaacgaagcgaatcaaaactccaacatctatcatgggtggaatggatgaatgcatgaagacatgcatatgacacatatgcaatttatgaataccggagcccgggaaattgtctccttcttagatacaaccgcttggggtaacaaagagcccaacgtatgtatttaagaaggtgacacacacccttcgtgatttgtctatataggggataagaccgaaccctgtgtgatgatatgccatacgcgaatatcggaacgacatattacgacactctcacaaagaaaaaaagggacacgaaacta

SEQ ID NO: 209571 - DNA, 460 bp, Glycine max
  unsure (1)..(460): unsure at all n locations
cttcgattcattctatgcacccatggtggtccacattgtgtttcgtgcatatttactctcgttntgtttactttttataccccctcttgacgtgcttaagccgctttacttaagtcatttctcgcttaacttaaaaataaaataaatttccaccgaacgtttgaattatattatccgttaacttcggttaaaatcaattccgaccgttcggtcgtgccgtaaccacgttggaaatcaaaaagaggtaaaaaacaatataataattaaaaaacgttttttagtaaaataaagcggaaaatcaatcggacgttgtctctttgggatttctcattcttaaccgacttgattaataactaaagtgaaactaaggctaaaattaactctgctagctaagctcgtcacaaaaatgggcttntgaagttcgtcatttcattcctcactaagtaaaatggatcatttt

SEQ ID NO: 209572 - DNA, 466 bp, Glycine max
atatcaaatttgagaaagagagtgtatgatttttgtgctaaaggtacgcaaaccaaatatagtcttcaacacacaaatgcagtaacatcatagagagttctataactactgcacatagacctgtttggtccacccaaaacacttagcctgtgtgggtagagatatggattagcgatagttgatgcattctctagattcacatggatttattatttttctatacagataaggcttttgaagcatttagaaagttttataagagagttgagaatgaaggaacaaattgacaatagcactatgtatatagtgatctatggccggagaatttgaaaaacaactatctttattacttgatttgatgaagatggtatcccctataactcgtctcgtactataatatcttcatagaattgcgttgtggaaaggagaaatatattcttatatgtgaggctaacatactacacta

SEQ ID NO: 209573 - DNA, 126 bp, Glycine max
gaaacgaggcgaggaccaacgaagggaggcaaaacctcccaaggggaggaaaagagcaaccctaccaagaagggaccgcccacaaaccacgagcccaagctcgaaaaggagggccagaccggagaa

SEQ ID NO: 209574 - DNA, 426 bp, Glycine max
atctttagagaacttccttgagaagctgctttgagtattttatcttgagaagctagagcttagctacacaaccctttcataactaagctcacctccttgagaagattcctaaagaagctagagcttagctacacatacctctctaatagttaagctcacctccttgagatgagaagctagagcttagctacacaccccctataatagctaagctcaccctcatgactaaatacatgaaaatacaaaaaaaaaatccttactactaagactactcagaaggcctcgaaatacaaggctaacatcttatactactagaatggccaaaatacaaggcctacacgaacgaaaaatctattctaatatttataaagataagcgggttcatacttagcctatgggctcgaaatctactctaagagtcatgag

SEQ ID NO: 209575 - DNA, 394 bp, Glycine max
  unsure (1)..(394): unsure at all n locations
tcataagacgatcgcttcttgaaagtctagatatatgagatattagtagtcaanactctctctacaactattacttattacaagttacacatttaaacaatctcaaaggaagaaaaacaaaaattcagtccctctttaataagctcttggatctgcccctattggtagatcatcctacattgtaagccaaaatcagcctctcaactttccatctgcgtatatggtgcaaagccatatattgctactatacataagattagcttccttccaatgaaattgtcagttctttccttaacagctcaactgtcccacccccaacacaagaggatgaaagcacattgtacactattaagagcactactatataactaatcccagcccatccaaaggaaaa

SEQ ID NO: 209576 - DNA, 388 bp, Glycine max
ttataagcgcggctctgcgagacgaaggtcacgtggtcgctttatactacgatgatgctccaagtacattggacctggcacgaccctgccctcctgatttccacctagggaattggcgagtggaggaacgccccgacattaacgcatcgagcataatgcaaactcttacggctctaaaagctctatattcgggcctacgctcaagagctcatctttagcgcaacgcttagcgcatctgcggtattatacttataatacaaggatctatcttcatctgttcttacgacgctacccatactagtcatcctgatgtttacttctcttctcgaacggcagattctatgaccactctcctcaccgtactaatatttgcgactcgtctatcaac

SEQ ID NO: 209577 - DNA, 54 bp, Glycine max
gggaaggcagagaaagggaggaccccaccccaaaagagaacgacaagccacaaa

SEQ ID NO: 209578 - DNA, 476 bp, Glycine max
tgatttgcgagttgatcttagccttagcttcactttggttattagtcaattcattcaaggaaacttctaacgaaagacgtccgattgatttttcttattaattttattcaaagatatttcgattattttattattattttgcctttctttggtttaactgtggttacggtgtgaacgatcggttagattttattttaatggtgattaaacgacattacaacacacatgatcaattgaaattcattctatcatttattacgtgagaaacaactcacataaacggttaaaagctcgttaaaaagggtacgaaaaataaacgtagtgaaagtaaaagtacacaaaacaagtagggaccaataacggtgcatagaatgaattgaaagaatccatttcgagaacttatcgattgaagaccgaagaactaacaaagaacggtgaacaacgatgaacaacggtgaagaatcttcactaaattg

SEQ ID NO: 209579 - DNA, 416 bp, Glycine max
  unsure (1)..(416): unsure at all n locations
cgatttgcgagttgattatagccttagtttcactttggttattagtcaattcattcaaggaaacttctaacgaaagacgtccgattgattcttcttattaattttattcaaagatattttgattattttattattattttgcctttntttggtttaactgtggttaccgtgtgaacgatcggttagattttattttaatggtgattaaacgagattacaacacaaatgatcaattgaaattcattttatcatttattaggtgagaaacaacttaaataaacggttaaaagctcgttaaaaagggtacgaacaataaacgtagtgaaagtaaaagtacacaaaacaagtagggatcaattaaggtgcatacaatgaatcgaaagattccattccagaacttattgattgagactcaa

SEQ ID NO: 209580 - DNA, 197 bp, Glycine max
ccagcagctacacaactaggtgaagagccagaccgctcttgcgaagatgatgatgaagacagcggacaagaatacaccgctggattcaatcttcatagtcattggtgaacaagctgcaggagtaggctttaacttcatcctgaacaaaagaacattcctataactctccacgatactgcttgacctagagcatggga

SEQ ID NO: 209581 - DNA, 380 bp, Glycine max
  unsure (1)..(380): unsure at all n locations
tgttattcattttatccaaacaactttacaaatctcacatgctntcaagaaacaacctcttcaatcttccatgtgtaccttcaaccctttaaagcatgttaatgtaatgtcaacagaagattattcttataaaaaacaaaatgtgaaacaagtaggcaattacatgaatgtacctattagctgttgtgtttccaatatgcataacccaatcagtccatgcttctacaaacttcttcttatgaggcatcaacaatgtatagtaaacatactaaaaaaatactaaaaactatgaacatagcggcataccctaatttcgtccggagaccaattattcgtggcatgcggccttcatttgactactctaaaatggttaacaccta

SEQ ID NO: 209582 - DNA, 322 bp, Glycine max
agcttaacctaagtaagtaagtaagagatctttgactatggttttatccctcatcttcacgaagcgccactccttgattcatattaactgcaagccgggaagagtcatccaagtctttgggttgaatggaagaacaactaacatgggctatggtttgatttgcaacaaagaggggctagggttcaagttgtacgagcgccatgttttaaatgactaaggtagggttcaaattgaacgatgaatggcttcattgcatggtgggagctgagtgcttccgaacatgtgcttattatttttcctcgattacgaggggctttaactt

SEQ ID NO: 209583 - DNA, 454 bp, Glycine max
  unsure (1)..(454): unsure at all n locations
gtttatgtgaaagaatgcgactcttcacatctgaatntgtattttattattcaaaagcactggtaatcgagtaccacaacattgtaatcgagtacagctttttgaaattaattggaacattgtaaattccatttgaaaactttttcaaaagaattatgctactggtaatatcgattaccagagagtaaaaactctctggtaaacatgtgttgagaaaaatcatatgctatttaattgttgagaaaaacttttcatacttatcttgattaagccttctctcgattcttgaatcttgagttctgaatcttgatcttgatttttgagatgttgaaccttgaattttgattctcgactctaaactttttccttgagttgtgaaattttcttgatgtttatcttgaactctcgaagtgtatatgagtcacttgagttgatctcttattgatctatgagc

SEQ ID NO: 209584 - DNA, 302 bp, Glycine max
agcttgctacactcaaggtccacccttagtgttcctcttctgttgccaaaatctgcatacgctcaaatctaaggtacgcaaggtctgtccttgcacgtctccctattattaaagtttatctgtgcacgaatacaagtctacaataacactagaaacccaagtccattcttgggacacactcgtacaaaaatccaaggcacgcccttggtaagctcactcccttaaaactatgatgaatatagcccatgggccaacctccataagggaaaatgaataccaccacattggtcagcaagaactta

SEQ ID NO: 209585 - DNA, 479 bp, Glycine max
  unsure (1)..(479): unsure at all n locations
ttntgtcagaaacattctcaattgcagtaacccctagcttgtcttagtcgttgcctttttgggggctgccttaattgcagccttaaggggggtggtttagtcccacatcgactagagattgacttaaatagagcttgtaaagcttgggcatacctcaccttacactcgattttgtggggttgagatcggctctaagctcaaattctaacatgatattagaacttatcctagatctgttggtgggccacctgcatttgtcactcttcatgctggtaaccctgggcatgagggagagtgttggaaagctgtcttaattgcaatcattcctagcccaccttagttgtggccattttgggggttgcctcaattgcaacctagagggtgcgtggttagtcccatatctataagagatatggcttaaatagagcttactaagatcgcgctgtcctcagctagtgataaggacttgtgtgttatgg

SEQ ID NO: 209586 - DNA, 432 bp, Glycine max
acgcagatgcagcttatgctgaacattataatagactttctatgcatcattttcaacaacaacagagtaattatgacctttcaagcaatagatacaatccaggttggaggaatcatccaaatctgaaatggacaagtcctcaacaacaacaacagcctgtccctcctttccagaatggtgctggtccaagcaagccatatgttcctcctccaatatagcagtagcaacaacaatagtcacaacaaagatgacaagcaactaaggctcctcctcaaccttccttagaagatttagtgagggaaatgaccatccagaatatgcaattttggcaagagacaagagcctctattcagagtctgacaaatcagatggggcagatggctacttagttgaaccaagctcagtcccaaaattctgacaaattgccttcac

SEQ ID NO: 209587 - DNA, 477 bp, Glycine max
  unsure (1)..(477): unsure at all n locations
tattcggacctatgaaactcagcttaactttctaatattctcactaaaccttnggctgaggatatttttaaatttattgaatctttaattaatgccaaatgttcgactgatctctaattaggcatgatatttcatgtttatgcttttgattgagcgaaatccatgcttgggtgctaaatatttgaaaaatttgatgtacctcgtgtttgcttaactaaattgggtgttgatgccaattcctagtacatgctcattaatggtgattatgtttttaccatttaaaatttatgcttttctgcgttatcttttctttctccttggctctactatataaacaagtgtgggtaaacaactaatcacaccactcaaatctctctcaattttactctctcctcttggctctctggaacttccctctatatattgagttcaacagaactactataaacggtcagaactaanactatggttgtaaag

SEQ ID NO: 209588 - DNA, 413 bp, Glycine max
  unsure (1)..(413): unsure at all n locations
nttgtcactccacccatatctgaccttgacattaaccagttttaatattgctgaaaacaatgtcaatgaattgctgcaccccgaatacaatggcttccttgaaacagtttgcaatgtatcatacataggggcatgtgcttgctgaaaagactcttgtccaagatcatgaatcatatcctctaggtaatctcccatttctacatcaaacgatttagattgggaccttctctgcatgtttgtcaatttactatgtcatatcacacattgtataattcttcttaatcttatcacacaaatgatgtttctgtatgtcattgagtattcgttgtctctcattcaaacaatttatacaaggacaaaatgaaaattgtcctcatctgattgactcgtttcaaagctaatgcaagaactac

SEQ ID NO: 209589 - DNA, 410 bp, Glycine max
  unsure (1)..(410): unsure at all n locations
tgcagcatgcacgcattacgaccctattgattttctctatttttaaactcacgaatatgaacatctatatttcttttatgcactaacgtccaccaaacaaactataatgtgaacaccaaaattcccacaccacataatgagttgtctaagcaataacttctatatggttcagaatatataatcccgacgatttggtctttgcatacgcaattaatagcctatggtcaataatatttgttgtctccaaaatttgaagccataactatctggtcaactagatgcattctctatcatatgcactaatgcgcatcttacattcgtattcataataatctatcatcttctaaataaccactcccaaggagtacacagctgctttatttgatactttntatctctcaacatactca

SEQ ID NO: 209590 - DNA, 393 bp, Glycine max
tgtttctcttttctctcttcctcctcctctctccccccagcctgactatgcatagaacatgcataacggacctataaaactcagcttgtagatatggggacccatcacatgtggtcctagtgtgtgtccggcgatggtgcacaacaagtttcttcacattcacaatgcgcgcataaacccaccattccctggtgcccaacttcaactgagctcacgtacttccacgtagcccatatccttgattctctcaacaccgggtccccattaatcctctcaagctttcacaaaatccaagctaaacaacatttatacagcacaagctattatagtctaactaaatagagtcaaggcagaaaactctgtctaaacactcaccaaaagatacagctttta

SEQ ID NO: 209591 - DNA, 488 bp, Glycine max
  unsure (1)..(488): unsure at all n locations
caaactcaagctncaacaaaggctncacaaataaccagcacacagtttatttctagcaagactacccatgatgtctcgccaaaccctatacccacgagaatcaaaggagaaagaagtccacccaaacctgaaatttcgaagccccactcgtagacacgcacttcacgaccccgaaaatgccctcctctcacgattcgcggtagaaatgatggtcaaaggttgaagctttgtttggagctacaatggagaatgacaaagaaaatggcaacgtgagggagagagagagctgtctgaaaagtgtggcggctgactgaagacagagaaaagcctttcggttataaaaacaacggtcgtcttcttactattattctatttaaacaatgccacatgtctccacttgagtggagaataagggccactntctcttagactgcgaccatactcagtaccacagtgagaaaatcctatctacgaaacctcgaaactgc

SEQ ID NO: 209592 - DNA, 466 bp, Glycine max
atcctctgagacacctgcggcatgcaagcttgtagagttatgtctcgtattgcgttattcgattattgaaaaaagatgatggaactcaataaaccaaaaggggggtgaattggttttaaaaaaaaaaagttactttaaaaaaaatagagttgcagaaaaaaaaacttttctaaacgaatcgtatcacaaaacaaatatgaatcgaatgtaatcaatacttaatcaatcattccttacacatgacctttcattaacttcctttctttcagaatcacaaaacttgaatctttaaaaccttgataaaacttgaatgagttgattaaaccttgaaggagtgaaagatatgaacaagagaaaaagacacaatattttatactagttcactcactatttctagagaagcttatctagttatcaaatccacaacctgaattatatttccactattggtagacttttcaaaagc

SEQ ID NO: 209593 - DNA, 496 bp, Glycine max
  unsure (1)..(496): unsure at all n locations
taaaactcagctttttatctctctttttgcaagacatatttaaaccgaacaaaagtcatttaaggcgttggaccattaacgatctcttggttntttaaaagtagtggtaaagttagacgttaattttatgtttccgaaggtccatattaaccaataaaagcaaagagaaccttttaaggcattggaccttaaaacggtttttagtgacttttgcggacaaaagcttcatttgtgagttgattttagccttaatttcactttggttattagtcaattcattcaaggaaactttctaagaaaaatgctcgagtgattttttttctttttgagtatcttattcaaagatattttgattattttattatttttccttnttttggtttaaaacgtggttacaacgtgaatgatcagttggattttattttaacagggattaaacgatattacaactcacatgatcagtggaaattcattttattatttattatgtgagaaa

SEQ ID NO: 209594 - DNA, 350 bp, Glycine max
actcaatcaacggctaacaaaccatacaactaccttggtgctctataatacacgcccgaaaaagaacctctagagactgaaaggatcgtacagtctgaccatctgcttgaggatgataagctgaactaagcctcagctttgtcctcaaggcgtcatgaagactcgtccaaaaacgcgaagagaacctcggatccctggcagatacaatactagaaggaattacacgcagccttactacttccttgaagacaactccacgaggttctccattctatactttatattcactgggataaaaagagcagaattggggaggcgaactactatgacccacacagcatcatggccac

SEQ ID NO: 209595 - DNA, 406 bp, Glycine max
tctacttatgtggcagggcgggcttccttcactttcttgtcttcaacgcgagctctgaccactgttcttcctttccgcggtgcttcttttcatgtccgcctgagtgggcttatagcctaaaccatacttcccacgatttccttgggtttttatcaggctagatatgccgccattgtccttgcctaaacccatcccgggttcataaccgttccccaacataactcgggccaccattaccgccgcatcggatagacaaggttgcccaaagagggagtccaccgaggaaatgctgaccacctcaaaagactggaaagcggtttctaacgattcttctgcggcttccacataaggcatggaggatgggcagcttaccaagatatcttcttcgcctgacacgatgaccaag

SEQ ID NO: 209596 - DNA, 450 bp, Glycine max
  unsure (1)..(450): unsure at all n locations
acactcatagaaactcaagctntgtattgttaccttgagattcacgaaagcactttgatttattgatgttttgcgatgaaaacggtcattgaccaatccctttgcataactcaccccaatcgacagagaccgtggacaatttgaaggtacactgaatgacaattggaaagttgatatctctgcatatgatgcccgccagttggtttcgatcaaccatgcggagatggcaggacgcctctttgtcggtgcattggctatcgaaagcctcatcattattatcacactgtgcgtaatatgcttccacaatctttcaaccttgcccaggcttctgatgaagagcttgtcatcatgtgggccttacataccgggcgctaattcgattgggcacactcagacacagattccatgcataacgtattcgcaataaatgctccaatgccatagctacag

SEQ ID NO: 209597 - DNA, 464 bp, Glycine max
  unsure (1)..(464): unsure at all n locations
cgttntcgctaaattaaggggttgtaagggatggtcttatgcttatgttgcattttggagtaatggggcatgccacattgcctgcattcttttgctattcatgccaaaacatgcgcccaccaagtgcccggtgaaatgcctcaatgacatatgggcatggttttgtaagcttgggattgtgggactgttttatatgtatagggacagcatgaaggatttaaaatgagtgcccgaatgcgattctaggtctacgaacccaagcttttaatttcaatacaaggaagcatgacttactcctaggaatctaagttttggttttgaatgtaaaaaggcatgaatattacgacatgcttgagagggttttattagagattagatttggcttgcccatgaggaatacctttgacttaggtagctcggaaaatacctttcaactgtatgtatatatgtgaatatatatagca

SEQ ID NO: 209598 - DNA, 387 bp, Glycine max
ctcaataaactcaagattataatagatcatcttaaattatattaaagactcaaaatacatttatttatattaatctttttagagaaagactaacaaaacatctctgtgaatataaattaataatgaatttttttttatcatttctgctcacatcttcagaactaccttaggggattttgtgcccctagctattcccatccttatggggaaaaaattgagctctaaactaaagacctctattgggtaattcccacaaatttttaatcactaaaaatagtatgttattattatgttatgagaataacctacaacaacgaatctcgactcttatatatttcgttatggcaaacacttacacctatatagctcctacgctccttctcatat

SEQ ID NO: 209599 - DNA, 347 bp, Glycine max
ttataagcgcgggtctgggagacgaaggtcaagtggtcgttatatacgaagatgatgtttcgagtacattggatttggtatgaccatgccctcctgatttcctgctgggaaattggcgagtggaggaacgccccggcatttacgcaacgagcataatgtaaacctttacggttttaaaagctctatagttgggcctaggctctagagcttttccttttgttgaggctttgtgtcttttgtttttgaatttataatacaaggatctttcttcatctgttcctacgtctctacccattctcaatcatttgcatgtttacttctttttctgaaacggcagattcgatgac

SEQ ID NO: 209600 - DNA, 353 bp, Glycine max
ttgtgtattggcacttacaagctgtctgttttcatcctcaaccttgcacccattgccacctctcactcttctgcaagaaaataaaatggagaagacccaggtgagaaaaaaaaaaaaacctcataaaacaccattgaaagtagcatcatcataacatacaaaatacagagagagagagaagaagcatacgggcgaggacgaatggtccagaagacagagtaagtccaatctgagttgagacacacacttctgagggcctcatgaagggccatcatcccaacagcttctttgctcctatctgtttttgttgttgttgttcctgagcccaccatctctctctctctctgtatatc

SEQ ID NO: 209601 - DNA, 350 bp, Glycine max
agcttattccaaagttcattccagaactagatggttgcttgaaagcaataggtcacatcaaaatagatgggccaattgatgagatatcaacaaaatcaaatagaaatgaccaaaaggtggtcataagcacatcaaatacttgtgataaatactcaccagtaacaagaggcaatggtctaaaggaagtggcataatgggaaaaacaggataagcgacagtatgcaccatgtgctctaccagatatcaaacgtaatgaaacatgtaatcaaagaaaaagtacatcatattacgccatggctcaagatctgggagtaacatgcgggaaagaagaggaatcattgattattatg

SEQ ID NO: 209602 - DNA, 427 bp, Glycine max
agctttcataagagaagtcagctgcagccatctttttaagagtcctctcacgaggtggagattgagccatgttcttagtatgaaaattagcagccgaatgctcaaaatcagaatgttcagaccagcaacagaatgctcagaatgcacagaatgattaggatgcacagaatgataaggatgcacagaatgatcaggatgcacactatgccttactaatatatgaaaggttctatctagttcaggatcaaagggttgtaaatcacctggattgcccctagtcatgcactatatgcagcaattaatgtatttctcaaacaagcaccaaagggggtaaaactacaactatactcaaacgatatccataagagctagaaatttgtgagcaacactctaaaatcatgacaagatagcacaaaaagtttcagac

SEQ ID NO: 209603 - DNA, 390 bp, Glycine max
  unsure (1)..(390): unsure at all n locations
naagctctgctntaggagaaccaaagaaagttacatggtttaagacaaagaacaatgccacaagttatagttgaccacagctcaaattaaccaaatgtcctaatcacttaaattagaattagaattttaagatgaaaaaaaaaatggtcccactaatacagctggttagcaacacaagtgagaatcacatcgaccagattacgcgatttaagagaaggttaattgacatgacctttaatgtgattttaataaagtcccacgaaaattctttgtgggttgatgtgatgcatgaattatataaagcgtacaatagtagacaaagtgaggagggataatcataatagcgggtagtagaaaaactcctttaacttgcactatatcttacaattg

SEQ ID NO: 209604 - DNA, 360 bp, Glycine max
tgcatcacgtttccaatatctctttctctgcctctcccatatttttgttggaaactgctcttggagggaatggaagagggggaatgtgctgcttctgcacatcagaattacctgtggaagaagattcacctgcacagatattgttaggtaaatttttgtcatcacctttttctggaatagagtgaagtttggcatgttcatttgcagatgaggaaggtgctatgggttgaggtccttgacactgctttcccgacctcaatgaaatggccctgacatttttgggattttggacagcttgagaaggcaccttgtcagaattctgggactgttgttgattcacttgggtatctaattgcccca

SEQ ID NO: 209605 - DNA, 462 bp, Glycine max
  unsure (1)..(462): unsure at all n locations
agctaggcacaagaatgattgttgttgctgacattgtgtcttattgngnttcaccaacaccgggcaataattgctttagtacgatcaagcaaattttccttgttgatttcgctcaatgataggtttaccatcgacgtcgcctgtggtatttcgtgggaactcaaccgccgttgtgtttcggtcgacattggcctgcgctggtagaagaggcaaagaaaaatatacccgaccttggcagcaaaaaaaaatacctcgacaaacttggataaagagcaattctagccgacatcggccaagaaagattaccgatcgctgtattccaaaaggaatcaccggatgaagacaatcgaaaatttccttatcgacatcatccgaaaattattcagggattgaacagaaaagcaatagcccacaacggtcgtatactacacccgactgatatttttgcacagacctcaccgg

SEQ ID NO: 209606 - DNA, 429 bp, Glycine max
caacaactgacttctgtgtttggaccctctccttcctcaggtgtacccaaactctatcacctggttcaagcacgactttctttctgcttttgttggcttgccttgcatagctcgcatttttcttttcaatttgaaccttcacttgctcatgcaactttttcacatactcagctttagcctgtgcatccttatgcttaaacatagcaatgttaggcataggcaacaaatcaagaggagtcaaaggattaaatccatacactatctcaaatggtgaacaattagttgtgctatggacagcccgattataagcaaactcaacatgaggcatacaggcttcccaagatttaagatttttctttaaaacagacctaagcggcgtgcctaaagtcctattgactacctcagtttgaccatcacgttgcgggtgac

SEQ ID NO: 209607 - DNA, 296 bp, Glycine max
ggaatagattatagcctccattttattgtcaaggtgcaagactaatttatctttgcataaccattatttcacaaatctcaatgatgagactattcaaaaaagggttatgaaggtggtgtccaccttacatgacaatccaacgattggttaagttaagatcgtcagtttactgcgataggttctgggtgtctataaaaaaagagaaagctcagtgcaagagatctttattccgccacagacattatctcataaatcccaatggtggatgtatgaaaaaataagttcccaacctcgtg

SEQ ID NO: 209608 - DNA, 384 bp, Glycine max
tatcttccgtaatacttatcacctctatcatatctaataattttcacatttatgtctaattgcccttttatttcattgtagtaaatttctaaggcatccattgcctatgaaatctcgggcagtaagtagacataaccgtaacgtgaataatcatcaataatggtgataaagtatctttcctttccgaaagaactaacatcaaaaggtccacaaatatcagtatgcacaatttcaagaagctgagtgcttcttgtagctcctttatttgtatgttttgcttgttttcccttaatacaacccacacaaatatttagatccgtaaaatctagataaggaagaatttcattctttattaatctttccatcctttctctagaaatgtga

SEQ ID NO: 209609 - DNA, 438 bp, Glycine max
  unsure (1)..(438): unsure at all n locations
agctngaaagtcatntgttatgtgatttgtacttaattgatacatataattgagtatggagatacttgcactatatagtgctccaatatgaatttctgactgcaagatgaaaatgggatgttataatttgcaccttttcatttaatcattttactttttgcagattatcgcagagagcttatctgaagaagaaatagctggcttaaaagaaatgttcaagatgatagatgcagacaacagtggtcaaatcacttttgaagaacttaaagctggtttgaaaagagtgggtgctaatcttaaggagtctgaaatttatgatttaatgcaagcggtaagttttttttaagcttattttataaaataaaaagaaacaagtggtattacatagattatggtgcacaaaataaatgagaagtgaatatattttacaatatttaa

SEQ ID NO: 209610 - DNA, 448 bp, Glycine max
  unsure (1)..(448): unsure at all n locations
agctngaatgtgcgtacgccaccttcttttatagtaaacactggtaatgtgtctactattattgtgatcatctctttctccatcatcggaggtgccacttgagctgccaggtttctccacctttgggcgtattctttgaaagattcgtgcccctttttgcacatgttctgtaattgcatcctatccggagccatatcagaattgtattgatactgcctaacgaaggcaaccattaagtccttccaagaatggactcggaaaggttccaaggtagtgtaccaagtaacagctaccccagtgagactcttttataagaaatgtatcagcagttcctcatcttttgagtatgcccccatcttccgacaatacatctttagatggttcttggggcaaggactccccttgtacttgtcacagttcggccccttgaacttgggaggggtgactg

SEQ ID NO: 209611 - DNA, 410 bp, Glycine max
aagcttatgatgatgaagcaaggcaatttggtgatgccaaaagcccaagtgattgattcaagacttcaagatcaagcatcaagaatccaatccaagattcaagattcaagagaagaaatcaagaagcaacaagacaagacttcatataggataagtactaaaagattttttatcaaaaaccaaatagcacagttttgttttacaaaataattttctcaaattttctaagttaccagagtgattactctctggtaatcaattaccagttattagtaatcgattaccagtgaccagcttggttttccaaatattttcaaatggtttgcaacgttccaaaatgattttcaaacagtgtaatcgattacactatattagtaatcgattacaagtgaatctgaacgttgaaattc

SEQ ID NO: 209612 - DNA, 230 bp, Glycine max
  unsure (1)..(230): unsure at all n locations
agctnttgcaaggagaaatctttatactattttcctactatctgntatgaacattgcaacatgtcccctttttcttttaaaatttgatcgaggccatacctgaatcaaataaacattaaaatgtagtaacaaggaagtgatcctangtngtttcccaacgagcaatgataaaccaaatgttcataacagatagtaggaaacgaattgcgggggggggggggggtcctctt

SEQ ID NO: 209613 - DNA, 407 bp, Glycine max
cattactaaacaagctgaaattaatcacaatcacatgcaagatatcctaactacatgcacgaggtgagaatgaaaatagacaagggaaagaaaagctggattgcctcccagtaagcgctcttttaacgtcactagcttgacgcatcgtcctgttatccaggatctaagagagctcctacttcaaggaccttcttctcaagtctcttttcctccatcacatgcattttcaaacagacattttggcgcagaggatctttgtcctcatggaacaaatcaaagttgatcttctatgcccatctgcagtatcttctttcccatgtccaccatgcagcttgtagtagacatgaatgtccggccaagaatgagaggaatgtcagcatcctcttctatatctatgacaacaaaat

SEQ ID NO: 209614 - DNA, 403 bp, Glycine max
agcttcagcctgatcgctaagcgacagcttatccttggctaagcgtgacctattgtcgccaagcacaattccttacggccataactgaggtccatgaagctaagctccagtcatggtagctaagcgagattcattgcggtagtatgagtgctaagcgagtacttatcctctaagcgcatgctcctctgtacataagatacatcattttagctaagccagccagagtctggcttagcgagagttgcagcttttcggatatgcaaaccttgctaagcagttggattctcgcgctaagccaagcctgtgttaaaagaaacactgatttgaatttgaaacgttggctaagcgcgcgtattcgctaagcgagccttgttgagaaaccaaacgtctctctggctcgctt

SEQ ID NO: 209615 - DNA, 414 bp, Glycine max
  unsure (1)..(414): unsure at all n locations
tcagaccanagcaactcanaatctaggcatctaaaacccctcaatttattggagtttcaaggtttgagaagtgaaaatgagaatgggtaaatttggagcaaactctcacttcaaacaagtctatatcatcaatctaaacttgctcaaactggttttacgcctaaaattccaccgaatcaaaatttgactcctcaacacccaatttttaccctagacatggttcttgccttcactttggtcatttgttttcctctcttgcacagaccaagctttctcataagacctaaacgacatttgaaactacgattaactcactttaatctccatttaccactgaatccagattaggcctatcaaaccctcaaagcatcacacttttccactcacaggactacattctcactttctaaccct

SEQ ID NO: 209616 - DNA, 443 bp, Glycine max
  unsure (1)..(443): unsure at all n locations
agctagcactggcattatgaatgggtcgtttattgaaccaccttttcgaggtcaactaatgtaaagcccattttgtcttcgcataccccagtatttgcattaacccaactacaattgaacacaagaactctaaattgaccgtaatcaagcacccaatatcttcaatgactccatagtagggcattgaggcgtgaatcggattgttatcagaaacactactaaaatgatttgactgaccgtcaacactaacccctactattagaaaatacacttccaacattggttatttacgacattctacatcagttttaaaactgatgttgaaagtattattgttaacatcggntttgaaaaaaatcgatgttatatataaataactacagcaaaataagtgtatgctgatgaacattacatcagtttatagaaaaccgatgtatatatac

SEQ ID NO: 209617 - DNA, 410 bp, Glycine max
  unsure (1)..(410): unsure at all n locations
actcaagcttgcttatcaatcttacatatatttcaatagataataaaatattgtctttgttnaaatccgattaatatttatgtttacaacatccacaaggcgtgacacaaatgacaagtagtctgacttctttaagcatatgtgaggagttcaaattatatgaatataacaattcatgtacgaatgaaagtttctcattaatggatattttatgactttcggctatggagatacatacctttagggaaaaaaaatatttctcttaacttcaattaatgcatgcaagtttttttttatacaaaaaacttaattacaataaatgcacatctcataataaattaaattcacccaaacattaaaaaatccctaatttaaccatttcaaaatatcacttaatattacaaagattt

SEQ ID NO: 209618 - DNA, 439 bp, Glycine max
  unsure (1)..(439): unsure at all n locations
gcttctgcttattagagcacaactccttctataatttagtatatcttggaatttgctttattgcatccagcagaggtatatttacctctactttcctaaatgtttccaagatctctttctctaccactctcatttttttgttgggaactactcttggaggaaatgggaaagggatatgctgcttctgaaaatcagaattacctgtggaagattcacctgcacagaaattgttaggtaacttactctttaaatntttgtcatcatctttttctggagtaaagtgaagttgggcaggtgctattgcggatgaggaaggtgctactggttgaggtccttgacactactttcctaacctcaatgaaatggcactcacanttttggaatcttgacagactgagaaggcagcttgtcaaaaanttctggactgttgtgattacct

SEQ ID NO: 209619 - DNA, 379 bp, Glycine max
atcgcgtgaatccattcaaggtccaacgccttatacggtctttttacttttaagcggttaaaatgaacctttagaagtctaaaatcaatcctacacgtaattttctttcttcaaagaactacgtaggtctaagttcctcatcgcaattgaggatacgtaggagcgagagccccgcttgaccctaaaaagataaaaaaacagaaaaaagggaaaataaactaaaaattgaagtcatgattttgcacatttgattaaaggttgtcgtcccttgtgacaaacgcgtagggtgctaataccttccgtgtgcataaacaactccagaccctttattttttaagattcatagaccatcccttggtttttctaatgttttcctcaa

SEQ ID NO: 209620 - DNA, 355 bp, Glycine max
taaaaacatatgcacataaacgacaccaaagttcaagaaatggaattattattatatttaaaaggcctattttactttacctggacctgggacggtgataggattcagaaggaggcttaacagaggtaataggcagaagctgcaaatcccagtctttctctataaaaggaaacttccccacgaatttcaagtaactctcgtaagtagccgcagcaccaatcaaccaaaacttatcataatgaacctgcaacaacttcgctaattctccaaccacactctttagaccctcaccttcttcatcgctcacaaaacccttcaagtctccgaagctcaccacaacaccgggccccacaca

SEQ ID NO: 209621 - DNA, 411 bp, Glycine max
  unsure (1)..(411): unsure at all n locations
aatctgactgacataatatgattatcgcactaaatttattgttttttcttgagaatgnattatgtaagggtgaatctaaatattctccaagaaactcaaaatgtgttgaattggtaacatctggtattcaattccattaatttaataatttcattccctctcctgtgccctttcttgtaattatctccacttgttatcttgatttcttcccatttattatggaacacaaataggttcttacattcatacgtcaaaacaatgtagtcctactgcatgaatataattctgttgaatctgtttagatgccaattacgacctatttacttgtgtttttatttactgcttttattcattgggtgtactccttaaatacaaaaatactacctttgtttcattatggattttttaaaa

SEQ ID NO: 209622 - DNA, 416 bp, Glycine max
  unsure (1)..(416): unsure at all n locations
agtcacctgcggcatgcaagctngngtatctgtctacatgtagncgtctatttgttattcttattctcatattaactaanaagtgtgttagtttgttcatgtttgaactttcttatgatcactatttattttgtaagaggtgtgtgataaaatgaatggtagagtgaaagagaaaacattaagacaaaagagagagaggaaaaatgctcacatggaaatctgtcacggaattctatgattgtctcacttagaatcattcatgttattctaaccaaattttgaaaaacacatataagccgtaagtcaagtggaagaatcccaagtagaagaatcttatctttgtgatatactttctatctactaagacaccatgtggtggtggagcagtagtcagtagtcaatctctatttggcatc

SEQ ID NO: 209623 - DNA, 345 bp, Glycine max
ctcatgatggaaatttactttttctgttatcaattcacacgtaaataccactttgtaaaaatgctcatatttggcattctaagggtggtcatatatcagaccaagtttccaatcatttgaataataaaattgggttacaattctctcctaatttctcttcttctaaatgttctatatgatcacattctaaaatttggaagattatcctttcctaactctaacaatttatctgatttaccttttgattgacttcattgcgatatatgggggctatgcccaccctacatatgacgtgaataaaatttttccttaaacaggtagaagactgctcaagaatcacttggc

SEQ ID NO: 209624 - DNA, 410 bp, Glycine max
acccggatccttagagtcaccgcggctgcagcttcttgcttcttatatagaatgttttatctcatatttttccattcttttcttgaaaccagggcaatcaactctcagatgtcctggttgattacattcataacactttggaatagaagatgattcttctcctcttttctttggtttgaagtttgatcttctctgatttcctttgtttcttatgaaattattgaatctctttatgaagaaacttaaatcatcatcttcttctatttcattcaagtcttctttatcactttcttcttgaattgaagaagaagctttaagtgtgattcctttctatttctagacattttcttcatgtttatgtagtctcatgagttgcatttcgtggtcctgaagctttccaaaagagttgc

SEQ ID NO: 209625 - DNA, 387 bp, Glycine max
  unsure (1)..(387): unsure at all n locations
ctcgatataactatgcagattagaaaaaaggtcttgttttcacaaggtctgtgggcttaacgcgtcgttccatggatcttggtccatatacccacccttattaatagtggaccaaaattgctaaattttataaacatgtaaaacactataattatagggaccaaaagtggatttaatcctaaattatatatttttcacaaataatttatattgtgatattttattatattaaattattgatatatctttatgaaaatattgaaattcatgtagttgaaaataaaaaggctaaaataaaatttggtctccctatttttttcaatccacaattgtgaccctattagaaaatagacacgtntagtcccctgaattttaaaaaatcaagaa

SEQ ID NO: 209626 - DNA, 455 bp, Glycine max
agcttaccaccataggaggccatggatattatcttggttgaagaaagagatgaatgaagggagagggagagaagagcacgaaattctgtgctcaaaaagagctctgaaatctgaagttaatattcaaatgatcaaagttgaaaaaaatgcacacacatgacctctatttatagcctaagtgtcacacaaaattagagggaaattcaaatttcacttgaatttgaaattgaatttgtggagccaaactttggagccaaaatttcactaattatgattagtgaattttagttatggttcagcccactaatccaagatcaatctcaagattctccactaagtgtgcttaggtgtcatgaggcatgaaaagcatgaaggacatgctcaaagtgtgactatatgatgtggcaatggggtgtagtaagcaaatgctcacctccccctctaaacattaattg

SEQ ID NO: 209627 - DNA, 237 bp, Glycine max
acgcgcacccaggggaaaacacaaaaggacccacgagccaaacccccccaagaacccacagcaagcaccagcagggaaccaacacaaacccagagggcccaaaccccacaagaagcgcgaaccgcacaacacggggggccaacatgccgaaacaccaaggatctccacacacggcccgcgataaaaggcccaaacacgaatccctagacttgccaccgagaaaacctgcgagagaag

SEQ ID NO: 209628 - DNA, 403 bp, Glycine max
tgccccattagcctaaccaacccgaaggacatggcttctggatgtggtcatacagtaagtcttctaaatgaacctattattgtttaacgccaatgtcaatgtggtctagactagagtttataagctctgtttgtgtgaataacagacattgaagggaatttaggttacagttttcacatcccagtttcttatagtcaagaacagaactaagaaaaaaaatctgctagataggggtaagattatataaatcaaacgtgttattgctttatgtcaaaagactagttttcgaaaagctatttggatattcttttatcaggaaatgttaattgttagttctgtaaaaaggtagttaatggatggaaacataactctcttcctccttctcttacttttttaaaatgta

SEQ ID NO: 209629 - DNA, 362 bp, Glycine max
ctcagctatagcaacaactgggagtccaaactcttaagagtcttttattatctgtgttaccacaaccccaatattgtaacttcccatatctgcctcttgaaccacacagttgcccctgctttatcaactggttaaaccaccatagcaaagactgttcctttaaagagaaaaaaaaatacaattttccttgatatgctaattttggcttcccccattaccaccaatgtttaaaaaacaagggagggccagttccatgccatttcgtgttcctggctatttcctaacggttttccctttattttctcactttctactggaagtgtgaatttttttaatggccctttgaaaattttttctttttt

SEQ ID NO: 209630 - DNA, 347 bp, Glycine max
  unsure (1)..(347): unsure at all n locations
aaatcagccatgtctccttcataaattacttgtcatatatatgtatgttggaatgctatgtgtaaccagtatccacttacacctagttaaatataggaggcaaagaaggataagatatgcaaggcttccatatatgggaagttacttagttgggacttgcaatttgtaagtgtatgctntaagtatctagattgaactttagtttaaatgctatgtgtaactagatagtatccacttacagaatttcataattgttggttggaaatagctagacaaaatgtaattgcttttaaaaaaactattatttattaaaacagactctaacatgtacatggtatcataagttt

SEQ ID NO: 209631 - DNA, 465 bp, Glycine max
  unsure (1)..(465): unsure at all n locations
agcttccccaacatccagagaatttaacatttattatcatcacaaactaacaaaccaagcagaacagggcaaaggcagaaaactctgcccaaaactcaaaccaaaatcacagctntttctcacttaaagaccccagtgacatttccttcgttccaattcgttaaccgctggatcgactcgaaaatcttactggaagtctctcgtacataagcctacatttcaaccgttgggatctgctagcaaacctctagaactcattctacactactctttccacaaccagcaaaacatagcattgttctgcacttatgcaaaattctgctgcacaatttcacagcaaaattctgcataaagtgcagaattcgaaaaccacacnttccctcattcaatcttgcccaaatcaaatctacaagtcccatatcatgtatcaatcatgtctaaaccaaagtcaagcttcaaaacaca

SEQ ID NO: 209632 - DNA, 415 bp, Glycine max
  unsure (1)..(415): unsure at all n locations
gctaatggnatctatccaaacattatgcttcttagagcctgacaattgatctacaatcaggtaagtgttgaatattcgatttgaagtgtcaatcaaagttagtaggtggcacctcaataagttgaactttaggtatgtatgacttactacacttgcgaatgacagcaactaaaaatgtagctttggctgcactttgtactacaaaaattaagtcaataaagttaggggaattagaacatatctccacaacttctacccaccataatcacaaataatttttaaataaatggtcatatttaacagacatagaatatacatgagaaacaagtattgctaatatctattaagcattaactaggtgatgatgaaaagtataacttgcaaagtggatcacatctgcataggaaatgggtcc

SEQ ID NO: 209633 - DNA, 338 bp, Glycine max
  unsure (1)..(338): unsure at all n locations
agcttcaacctagaggagacgtaccattcttagtgntggagaagatcaacgacaatgcctacaagattgacttgcctagtgagtataatgtaagtgccactttcaatgtgtctgatctatctctttttgatgcagatggaggagccttggatttgaggacaaatccttttcaagaaggagggagtgatgaggacataaccaagggcaaggaccatgaagcacttgaaggtcccatgaccagaggcagacttaaacaagcccaacacgtcatagagacaaggctagtcatttgtatagctgccattgatgatgaatgaaggcccaagtggagaaagatg

SEQ ID NO: 209634 - DNA, 358 bp, Glycine max
  unsure (1)..(358): unsure at all n locations
ctctanattacatngatgtttgtatttatggaggttatatgccattttttctttaagagtagtgtcccactggtaaaattaactttccaaatgtttgcctccgcacgaatggccccgaggaagcttgcctcaaagaggtccaggaaggacaaggcggccgaaggaactagttccgccccggagtacgacagtcaccgctttaggagcgttgtacaccagcagcgcttcgaagccatcatgggatggtcgtttttccgggagcgacgcgtccagctcagggacgacgagtatactgatttccaggaggaaatagggcgccggcggtgggcatcactggttactcccatggccagtttga

SEQ ID NO: 209635 - DNA, 447 bp, Glycine max
agctcgtgatatgtttctttgccttatatataattttagtttccctattttttaaaattcataaattattttttatttaaaaatagagacatttagttctcattttttaaaaaattataattttaatccctctattttaattagagacatttagttttcacttttgtaaaatttgtgatgttagtctttcaaaaatattaattggtaaaagattaatctaatgagacccaaatttaatgatgtgacacaagattatttgtttaatctatatcataatcaacttaatctcttaatagtcaacacttttagtttaactaaataaccaaaatcgtagatttaataaaattaggggttaaatgtctctattttaaaataagataatcaaaactatagattgtaaaaaatataaacatttaaggcattttttttctattggtataaactatt

SEQ ID NO: 209636 - DNA, 460 bp, Glycine max
  unsure (1)..(460): unsure at all n locations
agcttatattagataaaccttgccatgattaatttatgttactcttgcatatacaccactctacactcagtctaatacacccttacccttttacaatagaagtgattcctagttccttagttcttcaaaaatattttaaattagcactaggaaaatttctcatatctcatcaaagttatcttttcacgtcaagatactatatggagattttcatattttatgttgtatgttgcttgtaattatatctttacaattctaaaccaaagaataattgcattctgttaaagtggtggcaatacactattagaaaatatgctttctacatcggttatttatgactttcaacattggtttttgaaccgatgttgaaagtaccgacgttgatagtatttatcgtaacatcggttnttaanaaaccaatggtaacatannaataccaacatcggttatataaataacc

SEQ ID NO: 209637 - DNA, 403 bp, Glycine max
  unsure (1)..(403): unsure at all n locations
ctttgctcaacctttaaggtttagatgtttctcatattatggctatctactcgcgggatggagacatagaaacatgtgcttgatgatgactcaattgacactgcaagctaaaanagagagaggaaccttggatacagaaagtttgaagggaatgagagaaaacgaggggcttccatcatataacacaaatggagaaagcctttgaagcgggcttatgccttttgctacccacctataccctttccctatacacacgcctccctacatgtgccaaggcctaaaatcaagcccattaatcatgaaagaccctacaatacattaaacatgtgacaattcatgctatattattagttaaaccactacataaccaaattaaatctttttcgaattcccctccaacttt

SEQ ID NO: 209638 - DNA, 368 bp, Glycine max
  unsure (1)..(368): unsure at all n locations
agctnnttgtgccatcaacaaacttcactatacttcctttaaaataacttgagccaccatcaaggaggcaccagataaacgtggttgcaccggaggagcctccacataagcattgttcataatttctagtgcttgaaacgatgttaccaatgactcttccgaggcttcctggtcgacggccgtcaagtgcaccagatcgtgcaagtagtttaaaacgataagaaccaagtattgaactctcggggaacttattttacttggtaaagctatggttcggtaaataagcatctttttataaaaggtttatgtgtagtatggacacgtgtgtaaactaattaaacaaaggtaaataaaaggtgagtagtggt

SEQ ID NO: 209639 - DNA, 402 bp, Glycine max
cgatgttgcctaaaaatatacgatgcagttcggtttgtttcttcgtgcgaactgaaccgaagttgtgtttcggccgactggcatgttctcattttgtcggccaggaaaacattagcccacctcggcataaaaaacatgattcaccgatattgacaggaaaagaaaaatgctagccgacgtcggccaggaaagatgaccgaccgaggtctgaaaaagaagcatgaccggatgactccggtcgaacatttcctaacagatatcatccaagtattattcagggattgaatagaaaaaacaatagccgacatcggtagttaaatagccgtgactgatatttttcggccgacattgcgcaatttcttttacaaacgctggccgttactgtaaaggatgttttgctgt

SEQ ID NO: 209640 - DNA, 408 bp, Glycine max
  unsure (1)..(408): unsure at all n locations
agcttctcacacgacctatatgctcccccttcgttatttgtcgcgaatntaaatatgcctggcccgtggaagcacatgtcactaggaaagaaaaagattgaccagtctacctcgttctcatttttttttttccaggccatgcatttgttatctcagttattttctccgaaacatatttaataattgtaagaattaaatatattcttatttctaaaaaatattttatttttatatttattttttaataattttttgttttgtgatgtgttcttaataaaataataattttactttttattttttatacttatttttactggatgataaattagtaaattttatatttattccatgataaatattttttatttgttattaatacaaattaaaataaaattcactaattta

SEQ ID NO: 209641 - DNA, 413 bp, Glycine max
atgactctgcttagccaaaaatagaatatattaagtgtttttatatcgtccactcaattatgcagagtttcgcttcgaagaacatttgcttgtttttcactctattgtcttgtctattattctaaaggagagacaccttttatagacttcagtgaaggatttattaagggatcggtcttcaaccttgatatgaccattgtctcacaactggaggtgaaaacatgtggcatgctctgaatggcaaggacaggaataaaagtacagaaagttgcatgtgttcctcttcgataatgaaaacgaccattgaggaatattttgccaaagcattctactctcttccattgagtcctttccttagattcaaatgttaacaattcatataaagagaggcgaaacttacatatgataaggga

SEQ ID NO: 209642 - DNA, 355 bp, Glycine max
aacacccatccagaccactcaatataggctctagctaaccatcaagagaggacacatacgtgagacaagtggccacaaatatctgaagacggggggagagagtgacttaagatattccaaactacttccccaaagaaaaatctattgcactatttatgcaaggcatccaacacccctaacaatgaaccccctaaacatggactcaaagaaaacaacctgaacatgaaaggcaagccataataaacaaaggagttgaacggaagaaaaagagcaagactcagacctatactgggtcggccacacccttgtgcctacgagcaactccccaagcaacccgctagagagttccaccatc

SEQ ID NO: 209643 - DNA, 451 bp, Glycine max
  unsure (1)..(451): unsure at all n locations
agcttaagttattagttgaagattaaggcctatttgatatcggcaaggttgttattggaccaataccagaattagtgctgcttacttccttttctttntattagtgctacttaaaaatcaaattaattagtggttcttagttccttttcttttaattagtgctgctaaacaatttgccattgtgtgctattggataattactaacattatacactatttaacaataacaacttttcctaacatctattttcaattgaaccatcaatatttcacccaaactagattattaccaagaagtactgatgtagagttgtctcaccttgattagtagtttcaaatagtagtctttgatatgtatttttggcactctatgtaccatacactttaattgaaaagcatttactaattattagcccagttagcaaaaactctgtttaataggcagttacta

SEQ ID NO: 209644 - DNA, 381 bp, Glycine max
  unsure (1)..(381): unsure at all n locations
gagggagctgatagagaccatctctttctcttgcccttttagaagaacatgtgtagaatcctgtgatttaacaagacaaaaagatgagtgaaactcaaagaagacattattatctttacaaaacggactaacactaatgagatacttagtaatggaaggaacaaacaatagattactaggaggagaagaaaaagaggaaactcctaaagaattaatgttgagaccttgaccatgaccaatagtgatctgatcaagaccctcanaaggtggcacttggtgtatattctacaacatatttgtcacatggtgagaagcaccaaatgcaaagtaccaactctgcccctgagttagagtgtgagaggagctagcttcattaatctg

SEQ ID NO: 209645 - DNA, 468 bp, Glycine max
  unsure (1)..(468): unsure at all n locations
acctgaggcatgcaagctngtcctctccgatagaagaagaccgttactttatgtcttctgcgccttataaaggacaatgatagtcaagtcaacctatgcttgtacctcctccatgccaattgaatggccacagcagcccaagttctccaccctggtgagtaataccttgcacttctcttcacctttnccttaacaaatgtgtacctgaaatgtagtgtcacatacttcacgtcctgtgcttcaaggccgaacgcctcggtggtttccaacgtgatgagtgtggatgaataccgcggaaggcgttctatgaaaggcctcctcaaacaccacaaaaggagctcgtccccactgaagtttactggacctaacatgcaacaactcttcacaccatcctttatgacttggctgcttagagatgactcttactacaatagcatncctgaattggtctcctttctactatctgat

SEQ ID NO: 209646 - DNA, 358 bp, Glycine max
gtatgacccactaacctataattaaaataactttatgttctttacctagggaattaaaaaaaaacttaatggctgagtgtaactgatattgtggcaacctaaagtcacccccatcagccaacaagtcagccaccatttaggtctcccaaaatgctgatgcctaggttgccaattgggcccttattacaacttgaactaaacctaactaaagccctttatttgattaacccaaaacatatttttggcaccaacttacaaggattgtaccattatttatactaacttaacactctaaaattgagacaaagtggtgtcatttagtcctcctccatttgggccatgattcaactcacaactt

SEQ ID NO: 209647 - DNA, 395 bp, Glycine max
  unsure (1)..(395): unsure at all n locations
agctntggagggcaaatatcaatgttctaaaatttataaagaagtcaatgttgggctaaagtaggccaaacttaaggaagaaaataaaacaaaggagaaaccaaacatactcatggacctatgcccacccagttaacaagttaatgaaaagaggtaaataagggtattgctatttacgcaaccatttttgctaatggcattacccatgtgagtgctctttagccatattccaaaatttccccttgaaaaattgcacaacggaatctggtttttgttgtgcacttgggggtgtgaaaaaaaaaatagaagtatgttttcgttgtacatgtgtacaataaaatcgtatttccgttgttatttttcacccccaaatagcacaaaatcatgatttcatt

SEQ ID NO: 209648 - DNA, 364 bp, Glycine max
actccaccaatttagttctctgttcacacttcacaacatgggacctcacaagtcacacggtccaattgcaatcacactgcaaagattccaacactgtttcatttcttaaaatttaaattggtgcctctatagtactgtgccacagccacactatacactactttctgagagagtagctctcgtatttcttgaatttgatcttatctgtattaaattcttatactttcttttttctctgcgcttcatattaatattatgaaattgtccctgccagaaaaaaatgtaatttttattggagaccgtgaatgctcctaagggtagtgaaatttcaatacagtttattctatatccaaagatcactctg

SEQ ID NO: 209649 - DNA, 352 bp, Glycine max
  unsure (1)..(352): unsure at all n locations
gtgactcttcacatttgaattgaatntcaacgttcaatggcactggtaatcgattaccaaaacattgtaatcgattatagctntttgaaaataattggaacgttgtaaattcagtttgaaaactttnttaaactcattttgctactggtaatcgattacaacaatatggtaatcgattaccagagagtaaaaactctttggtaaaaggttttgtaaaaaattcatgtgctattcaaagttttttaaaaaactttttaatacttatcttgattgagtcttctctttattcttgaatcttgagtcttcaatcttgatcttgattcttgagatcttgaaccttgaatcttgattc

SEQ ID NO: 209650 - DNA, 402 bp, Glycine max
  unsure (1)..(402): unsure at all n locations
attctatcaatagacctccaatctttaatggagagggttaccactactggaaaacccgaatgcaaatttttattgaggcaatagacctataatattgggaagccatagaaatagggccttatatacccaccacggtagaaagagttacaatagatggcagttcatcaagtgaaagtataacaatagaaaaacctagagatagatggtctgaagaggatagaaaacgagtacaatacaatttgaaagccaaaaacataataacatctgccctgagaatggatgaatattntagggtttcaaattgtaagagtgctaaagaaatgtgggacgctcttcgattaacacatgaaggaactacagatgttaaaagatctaggataaatgcactaactcatgagtatg

SEQ ID NO: 209651 - DNA, 394 bp, Glycine max
ataagagataactatccataatatattgactgtatggaaacgtacatctagtccactcaatataggctctagctaatcatcatgaatggagatatatgttagacaagtggccttagatatcttaagaaggggggagagattgaattaagatattccaaactacttccccaaataaaaatctatttcactttttattcaagttataaattcccttaacaatgaacttcttaaatattgattcaaataaaacaatttgaatatgaatgtaaagcaataataaataaaggagtttaagggaagagaaagtgcaaactcagatttatactggttcggccacacccttgtgcctacgtccagtccccaagcaacccgcttgagagttccactatcttgt

SEQ ID NO: 209652 - DNA, 357 bp, Glycine max
agcttttatgtgaaaggatgtgactcttcttatttgtaattgaatttcaacgttcaaacacattggtaatcgattaccaaaacattgtaatcaattacaacattttgaaatcaattggaacgttgtaaattcagttgaaagctttttgaaaaccattttgctactggtaatcgattaccaaagagtaaaaactctttggtaaaaggttttgagaaaaattcatgtgctactcagtttttgaaaaacctttttaatacttatcttgattaagtcttttcttgattcttgagtcttgaatcttgatcttgattcttggaacttgaatcttgaaacttgattcttgattcttgaaatcaa

SEQ ID NO: 209653 - DNA, 403 bp, Glycine max
  unsure (1)..(403): unsure at all n locations
cttctatggaggctggatcattgagcttcaatgatgtcctttaatggtgattttccaccatggagatgcagcggaagacaaaggagaagaggtgagaggaggcgccatccactagggaataagccatggaagaaggagcttcaccaccaagatgagccttggataagaagcttggaaggatgcttcaatggaggaaaagaaagagggagagaaagagagaggggggagcacgaaattgaaggaataaaagagggagaaaagtggaactttgaagtatgtctgatgtgccatcattttcttttattttctaaaccccttttgcaccattttaattactgaatggtccttaattggcaataattaagcagtttattatttgngctcatttactaatttgatggtt

SEQ ID NO: 209654 - DNA, 217 bp, Glycine max
  unsure (1)..(217): unsure at all n locations
agcttatcctgaaatagaatccacagccnttaatattccaacttgttcaactcacgcacattactatacaatttaaaataggcgaaattgtaaaattgatcccccactttatctctaattatggatttggtcttcctataatttaattcacaaatttggtccccaactttattaataaactcctgcaaaactgctcctatacacccgatttggaatt

SEQ ID NO: 209655 - DNA, 421 bp, Glycine max
  unsure (1)..(421): unsure at all n locations
ctcaagctntaatattgcctcccacgcatntgaagatggagctctctctagtaccttaatttatacctccccgggcacaagtgagaattcatttgttactgtttgttgctttcaaatattaattgntaataagcttatatttttccctcttttgattgcataggtgcaatgcccactagaggtcattaatctccacccaagcaaggatgttgccgatcttgacttctcctacaagtttggtaacgatatggtacataaatttaaacttactaatttcaaaaatcatgatagagttgagttgatcatatccttcctaggctagtataaaaaaatatgcaggtaggctactttatgttgcatctagttgcataaacaaattatcttgagatatattcctcaagaaaccaagcattggatttaa

SEQ ID NO: 209656 - DNA, 331 bp, Glycine max
  unsure (1)..(331): unsure at all n locations
agcttccacaacattcaagcgaattattatttatcatcangaactatcaaaaaccaagaaaaccaggcttaggcagaaaactctgtccaaaacacaaccaataccacatctttccttactcaaataccccagtaacattctcttcgttccaattcgttcaccgttggatctactcaaaaattttactggaggggcctaacgcataagtatacattttgaccgttgggatctgctagacaatgtcctgaacccaatatgtacaacccttttcacaaccagccgtgcgtgagcattttctgcacaagcacaaatttttgctgcacatttcaac

SEQ ID NO: 209657 - DNA, 287 bp, Glycine max
  unsure (1)..(287): unsure at all n locations
aacaanccggagacaacgagcaacccgaagcnnaagccgcaaacatnnataanagacccccncaggagcaaaaccaacaacaananaagaaagaggaacccgcaagcaacagaganaanccaggcgggaagaaacatccaaatctgagatgggcaagtcttccacaacaacaacagcctgtccctcctttccagaatgctgctggttcaagcaggccatatgttcctcctccaatgcagcagcaacaacaacaacaaagacaacaagcagctgaggccccttctcaa

SEQ ID NO: 209658 - DNA, 357 bp, Glycine max
  unsure (1)..(357): unsure at all n locations
ataaaaggccatcctttgaatcccatatcaccatttattgtcttagtatttaacggctctaaagattaattaatcttgacaaatattatagacaacaataagtgcttcaattctttcacaaattaggaaatgaaaatttggatttttttaggtttcaccatcaacaccaaaggaaggaagcaaaagctcaaaattaaccacgatataagggcaattccattcgatgttgatctcatattttgtttacaaaaaccaacttgaaaaggtaaacatataacattaaagaacttgcatgccgatcccagctgggactacactgntactatatatagaaatatacagtttcctagctgatgc

SEQ ID NO: 209659 - DNA, 298 bp, Glycine max
atggaaacgggcatccagtccactctattgaggctctagctaatcatcatgaatggagatatatgtcacgacaaggggcctatatatcttaagaaggggggagagattgaattaaaatattccacactacttccccaaataaaaatctatttcaccttatattcaagttataaaatcccttaacaatgaactctcttaatattgcttcacattaaacaatttgaatatgaatgttaagccataataaactaacgcgcttaaggcaagagaaagtgcaaactcagagttatactggttc

SEQ ID NO: 209660 - DNA, 442 bp, Glycine max
agcttctagaggaagcctcttattgaagtttctatagaaagctagatgcagctgcctcggtaaaaacgctgcccagccttcattaaccgttggatcttctcaaaatttggtcttacacttcacaagacacttttccatgatctaaccgttgggatctttgagaagatgtctggagtgtgctagaagcctcttaatgaagcttctagagaaaactacatggagctgcctcggtaaaaatgattcccagccttctttaaccgttggatcttctcgaaatttggtttgtaacttcacaagacacttgtccatgatctgaccgttgggatctgtgagaagatgtctgtagtgtgctaaaagcttccattcccgagagcatctcttattaagcatttcacctttgtttggtgtacttaagaaaacatcatttttcttcttttttctt

SEQ ID NO: 209661 - DNA, 409 bp, Glycine max
  unsure (1)..(409): unsure at all n locations
ctcagcttcttatccaggcaattcttggagggaagctccttcttccttggcttattccctagaggatggtgcctcccctctcctcttctcctttgccttccgctgcatctctatggtgaaaaatcaccattgaaggacctcattgaagctcaaagatccagcttccatagaagctccacaagcaagatcaaacgacaataactttttactcggatgtccgattgtgtcctgtagtatgtcgagacgctcganattcagaacagaagctctaagcaaaatcaaatgacaataactttttacgctgatctgcgattgtgtcccgtagtatatagagacgctcaaaatacataaaagaagttgtgagcaacatcaaatgacaataactttttactcggatatccgaatgaat

SEQ ID NO: 209662 - DNA, 319 bp, Glycine max
  unsure (1)..(319): unsure at all n locations
agcttcgactgatcgattaagccgntatcttctataattttgataaaatgaatttcaaccgatcatttgtgttggaatctcgttaatactgttaaaaaaaattcaaccgatcattcacacttgtaaccgtcggttaataaacaaaagaaggtcaaatacagctcccaatctggacaacttgtatctctaaacagtttcttataaaatgagttgataaataatcaatgtttagttcttaaagaactacgtatgtctgatttccctaccgcaattgaggagtctgtggaacaaatgtcccgctattgcctaccccaaaaaa

SEQ ID NO: 209663 - DNA, 149 bp, Glycine max
tgcttctgcctttatagttgtttatcattcaaaaaatgctgcttgcttctgccttgagtggctaagcaccatgtttagctactgctcttgatgggtaagctttgccttgcttctacctattaagtggataagagccctcgctctcgcta

SEQ ID NO: 209664 - DNA, 486 bp, Glycine max
tctaagtcacctgcggcatgcaagcttattactagtccagatgcattgatattcattttgttcaaagccaggtatttcccatataatgattcttttgatgcacaatttaggagtagtccacgctacacctagcgaagcatttggacctccagaaacattgttagagaagggtgtatagcagggttgggagggatgatcatgtgagggtgtgggatgacaagtggttatgaggaattgagtacaagaagttaactcaataccagcccataggaaaaatggtgtcttgcaagatagtttctttcaccatgttttggctcctaaaaacaagtgcattctcgtgtcttcataaggaccacgccttttcaaaccatacaatatctcactgtcatttttcccttaatctaatccaatccgatgaatgttgataaacatgagctatcggacattgcggcaaaacggatcgaagccgcaaccaattataacaag

SEQ ID NO: 209665 - DNA, 360 bp, Glycine max
agctttatatcacggagtttgacgagtttatattgtatttggagaggcgcaacctgcacaagcgtctcaccaactcaactgatggcagtattgatgtcgcggtggtcaaggagttctacgcaaacctctatgaccctaaagataactcaccaaagcaggtgagagtgagagggcacttgataaagttcgatgcagacaccttcaacacatttctggggaccccagtggtattggagcctgaggagaccatccccacatattccagattttgcagactgaggatggatcctcaagagatagcggctcgcctctgtattccaggcaggggatttgttctaaatgttgaaggcaagttatgga

SEQ ID NO: 209666 - DNA, 358 bp, Glycine max
agtcaaacagaataatccgaaaatgtcaaagaattgggtgttgaaaaagcataacaagactttctgtgattggtttaaagatacaatctttgcagatgagaatgcttcagaaacattaagaaagctagcagatgggcctaaaagaaatgttataacctggcaaggatacgacataaacatatattcattgtacacaaaagcacaagatgacaaaagtacaatgcataacagcagggtcaccctaatggctgaatctcaacactttgcaagtgtcaatgacgccaatccctgtgtagcttccatcccttactttgggttcattgatgaaatttgggagcttaattatgtgaaatttata

SEQ ID NO: 209667 - DNA, 455 bp, Glycine max
  unsure (1)..(455): unsure at all n locations
agcttgcgcctcatgaaaacaagttagggtatgcattgttgtgtgcttgagaaatcaagtactatgacaccataacactaaaaaaaggtcaatttatcggccaccaaagagtatggtcacaaatggaaaccattttagccatcacatttgttttttgtttaacaattttactacaattatttagtgacgcattatgatcattggacataaaaaagagaaaaactcatgaaatttgtggatctttccacataaaatgactcatggaggttgtgagtctcactatatgatgggatttacaaatctcgtgagtctttctctctcctatcggtttagtatggaagaggaatcggttccctctatttctagcaacaatccattaatcaacctttatgaatatgattatccccacaactacacgtgactcacgcacnctttatccatccgaatatggcacc

SEQ ID NO: 209668 - DNA, 373 bp, Glycine max
  unsure (1)..(373): unsure at all n locations
cagtgacagacaagctgtacgcatctctttttgctaacacgattggcgaggacaagatcttcctcactgttgcacaggctgttgcatattgttctccaaaggtggttgaggacccatgaaaaatatgaatttgctgagagaaaaaaatgggacacgtagatgaaatgtcgagggaatagaaatagagacccgaagtgattttttatccatttacaccttctctctccataaaattctcaaaatatattactttacattttatatcccaaaatgcctcagttttgagcttctttgagaaataangcgccggcgcgaggcaccactggttactttttgttcatttgttgatcgaattatttcttaatttatgttt

SEQ ID NO: 209669 - DNA, 475 bp, Glycine max
  unsure (1)..(475): unsure at all n locations
catgcaagctntgagaaaattcaaacgacaataactttttactcggatgtcnngatgagncccgaaatatatcgagacgctcgaaattgaataccgaagcgctaagcaaattcaaacgacaaaaactctttactcggatgtctgattgagtcccgtaatatatcgaaaagctcgaatgtgaatgtagaagctctgagcaaattcaaacaacaataactttttactcggatgtctgattgagtcccgtaatatatcgagatgctcgaaatggaataccgaagctcggagcaaattcaaacaataataactttntactcggatgtccgaatgagtcccgtaatatatcggaacgcttgaaattgaatgtagaagctctgagcaaattcaaacgacgataactttttactccgatgtctgaatgagtccggtaatatatcgaaaagctcgacaatgaatgttgaagctctgagcaaat

SEQ ID NO: 209670 - DNA, 432 bp, Glycine max
  unsure (1)..(432): unsure at all n locations
ctcaagctctacattcaatntcgagctnttcatatattacgggactcaatcggacatccgagtaaaaagttattgtagtttgaatatgctcagggcttcggtattccatttcgagcgtctcgatatattacgggactcaatcggacatcagagtaaaaagttattgttgtttgaatttgctcaaagcttcggtattccatttcgagcatctcgatatattacgggactcaatcagacatcggagtaaaaagttattgtagtttcaatttgctcagggcttcggtattccatttcgagcgtctcgatgtattacgggactcaatcagacatccgagtaaaaagttattgtcgtttgaatttgctcagagcttctacattcaatttcgagcttttcgatatattacgggactcaatcagacatccgagtaaaaa

SEQ ID NO: 209671 - DNA, 273 bp, Glycine max
  unsure (1)..(273): unsure at all n locations
tcccaaactcaagatgatggctctgtgtgctttgtccagcaagatcttcttatctttaccttccatcttcaaatcaagattggtttcaccattcaaagcatctttgagaccttgatgcacaagaagagccctcgtctttaatcaccaaagattgaaatcattntgtcctgtgaatttctcgacttcatactgtgcaaatgccatggctaattattccatgttcaccgcaccagcttattgtgcgagtatcacaaaatgacacacgacttctca

SEQ ID NO: 209672 - DNA, 415 bp, Glycine max
  unsure (1)..(415): unsure at all n locations
gcttgatggaatgagttgtcacaatgctagctgttttcttttgtacatctctaataatgaatcaacaataaatggttgctgaatgaacaatagatggttaattaattaactagcactgcacaaaaaaaatgaatttttgtaaagatctcattgatcagaaccaagcaacccactttcctcatcatcatttttattttcccgctctggttgtttctgagctagctccactgccctcttacattgctgctcccaatctgtttgaatcaatgtgtaaacnnnnnacaaagacatgaagcctgtgcagccaccattccagaccacaaacccaccaattcatatttatatatgaatgtagcanaaacagaaactggcaatcccactatataaaatgcacacaagtttattctggcaccca

SEQ ID NO: 209673 - DNA, 487 bp, Glycine max
  unsure (1)..(487): unsure at all n locations
ttaagtcacctgcgggcatgcaagctgaaaatagtctacagctggttttgtgtttctattgttgagtataacatgctattgaataatattgcctctattgaatctgtagaagtggttagagtccctaacagaagcagagaaacaagctttgcttcaagaagttgaggaagagaagagtcgctggctagaggtacgcaggggaattggagtagcttgtttgtctatatacattaaaatgaagttttgccaaagtaattgaaacataaattttggtctatatggactagttgagaaaggttttagctatgctttcttcaatttacttagacaaaaggatgagacttcaaaatccttagtgttccgctcacanaaatttccagatggaagcaactctgtaagatatgatgataatgcttttaagttccacgtctcttattctcaacactaaattctttntcctactagctttacccatttctatgctaca

SEQ ID NO: 209674 - DNA, 410 bp, Glycine max
taactcactatcctagacctctgaccccaatctaactcatccttttttgtcctgctgaatgactacaaagtaagttgtagcagtttggcgagtaactcagcaccgtatataatcaatacaaaaaacctctatttgtcaaattttaaaatcatatacatatctaagatgaacttaatgttaatttcaggatgtatcgagtaccatgtactcatttatggaaggtgcaagattcacccatctgaatttgaaagggattatggaatgcaagtttgtttataatcattggaggaagtctgcaaaaattgactatggatggaagacttttgcacaattacaaaatttgaaagttggaactcaaatattgagttcccagatgcaacatctaactttattttaatttggatttattt

SEQ ID NO: 209675 - DNA, 391 bp, Glycine max
  unsure (1)..(391): unsure at all n locations
agcttgaagatgtgtaatccaccattttctatttagagcacagnaatatgtctactatcattgttattttttctttctttgtcattgagggaaacacttgggctgccaggtccctccacctttgggcgtattctttgaaagattcgtgccccctttttgcacatgttctgtagttgcatcctatctgaagccattatactggcactgcctaacgaaggcaaccattaggtccttccaagaatggactcgggaaggttccaagttagtgtaccaggtaacagctaccctagtaagactttcttggaaggaatgtatcagcaattcctcatcttttgcatacgcccccatcttccaacaatacatctttagatgattcttggggcaagtagtc

SEQ ID NO: 209676 - DNA, 408 bp, Glycine max
  unsure (1)..(408): unsure at all n locations
ctcagctgctctanattacattgatgtttgtatntgtgggaggaggttatatgctcatttttgttttaagagtaatgtcccactggtaaaactaactttccaaatgtttgccttcgcaggaatggccccgaggaagcttgcctcaaagaggtccaggaaggacaaggcggctgaaggaactagttccgctccggagtacgacagtcaccgctttaggagcgctgtacaccagcagcgcttcgaagccatcaagggatggtcgtttctccgggagcgacgcgtccagcttanggacgacgagtatactgattttcaggaggaaatagggcgccggcggtgggcaccactggttactcctatggccaagtttgatccagaaatagtccttgaattttatgtcaatgcttg

SEQ ID NO: 209677 - DNA, 410 bp, Glycine max
agctttacactgaggcaatgaggggcacctatcatgatcctcaagtaaacctaggggtagattagaagttctcacccaataggttccctcctacaaggtcatgacgaaagacaacgattggtacctcaaagccttacactggggcaatgaggggcatcgtgcatgagcctcaagtgaacataggggcagatcaaaagttctcacctgtcgatgtttttaaacaacaaaaaaaggggggacaaaccctatgatttcaatggattgatcaaacatcaaacgactccattgccgtcactccagaatggtcaagtgactaaatcaaacagaacacacactctgagggagttcctggagagattgcaaaaaagatagatgaggtgcatgattatcaccttttcacaagacagcaa

SEQ ID NO: 209678 - DNA, 412 bp, Glycine max
tgtccgatgcaacagtatgatggcccgagttatgttggggaactgttactaacccggaatgggtttaggcaaagacaacggcggcataactagcctgataaatgccacaggaaatcgtgggaagtatgggttaggctataagcccactcaggcagatataaagagaagcatcgcgggaaggaagagcggtagtcaaagctcgcggttgagacaagaaggtgaatgaagcccgccctgccacataagtagaagctttataagcgcgggtttgggggacgaagttcaagtggtcgcgatatacgaagatgatgttccgagtacattggatttggtacgaccatgcccttctgatttccagctgggaaattggcgagtggaggaacaccccgacatttacgcaacgagcataatg

SEQ ID NO: 209679 - DNA, 464 bp, Glycine max
agcttgaaggacatgcacaaagtgtgactatatgatgtggtaatagggtgtagcaagcaaatgctcacctccccctctaaaatttaattggattgagcttctcccaattcaattaaatttattttccaacacacacatcaaatattaacttaatgcatatgaaattacaaaactacccctaatctaaaaactagtctaggtgccccaaaatacaagggctgaaaaatcatacatttgtagggtaccctacctacgttatggagccctaaataaaaggcccaaaaataatgaaaccttaatctaatatgtactaaaataagtgggctcacacttagcccatgggcctaaaatctatcctaaggttcatgagaaccctagggtcttctcttgcatctctagcccaatctacttggagtcttctatccaatgcccttgcgggtaggattgcatattccctcccccat

SEQ ID NO: 209680 - DNA, 432 bp, Glycine max
ctcaagcttgcctgtccgatgcagcagtaatgatggcccgagttatgttggggaactgttacgaacccggaatgggtttaggcaaagacaacggtggcataactaacctgataaatgccaaaggaaatcgtgggaagtatgggttaggctataagcccactcaggcagatataaagagaagcatcgcgggaaggaagagcggtagtcaaagcttgcggttgagacaagaaggtgaaggaagcccgccctgccacataagtagaagctttataagcgcgggtctgagggacgaaggtcaagtggtcgcgatatacgaagatggtgttccgggtacattggatttggtacgaccatgccctcctgatttccagctgggaaattggcgagtggaagaacgccccggcatttacgcgacgagcataatgtaaacct

SEQ ID NO: 209681 - DNA, 398 bp, Glycine max
  unsure (1)..(398): unsure at all n locations
agctttggatatcataggcaaagatttcctgtgctttcttccaaaaggagcgacacgatttatatgatcggaggatctccaagatatccggctcaactgattgccataacacggcacatagttgatagtcaagcttctcccattcaggtcttttatcaactgaaacagaatccgaggttttctccaagtggtcatggtgtccttgaccaaggaaccacatctccatggaagcagaccacgaagggatagttttccagttcagctttgcagtagtgatagttggagtcccggaaaacgaaaaaacaggtccagaggaggccatttaagagccaaacagcanaccctaacactcaagagaggaagacactctagagcataccatatggcttgccggaagc

SEQ ID NO: 209682 - DNA, 385 bp, Glycine max
  unsure (1)..(385): unsure at all n locations
cataggcctcgacataagtgtgcgcagnctcattttatatttaccgcnccacgcaaacttagaccgatgaatgtggttgttgcgggcattcactgcttgcattaagtgcacgtcctttcctcatgtagagagttcactctttgaagcttacatgtttagtaattgcaggggtagacacttactttatgtgagagcagaactcgtgcaggacagctctttttttgaaggacttgatgaatttcgaccttgacttcattattctcatcggatttggagaaccttggatatatgttctgtcaagaaatatcacccccatttcaatgtcgaacaacgatgacccttctggcattggctgaacatcaactcaacttctcaaggctggttt

SEQ ID NO: 209683 - DNA, 441 bp, Glycine max
  unsure (1)..(441): unsure at all n locations
agctntaagagcctgcacttctgaattcttatttacactcgngttatctcatgtcttttgcatatggaatcttttttttttctaatctattttagggaatatagtttcataaccttactcgtgttcttccacttctctaaatttgtccctaattaaataaaaaaatcatcacttaatccctaaaagcagtaaaaaattaaataaaaataaaatatcaaccattaaagcagttcactcacaaatatttaagtatgtcatattttctagttgtcgaaaaggtgaaaaatagaaaccataccttaccacaagtcatttggtttaagtatcttgggccacggttccactcaacaaatgtctaacttcccaattacaactcaatatcttttttgttttatttctctagcaactaactgatatcaccaactactactcttcgccgct

SEQ ID NO: 209684 - DNA, 404 bp, Glycine max
  unsure (1)..(404): unsure at all n locations
cttcacactctgcttcatccctcatatccgctctaacggatatagatcgtatcatcgcattcagaggaatcttaggaactggttagagatgtctctatcgctatcggaggacacgcgagcccgcttattagttatggatgagtttttcacaaatgtgggatagcgagaacatgtgggcggaccttagaggagctaaactgggtggatatgttgggatgtttatgtgagatgaaaattctcctttattatcatcacatacacatagttgttctgattanaacctgttgacagcatgtgctcttgggattagtatatgttgacctatagattgtgaaataactgagtcatattatctgaatggataagggtgtgacatatagtggtatcatagcgagacgaacctt

SEQ ID NO: 209685 - DNA, 297 bp, Glycine max
  unsure (1)..(297): unsure at all n locations
ccccccgaggcctgtgctctgacgcacccaagcacgcgcagcacncaaaagagagcgaaatgtttttaaacacaacggcacacgtaccacatcgataccaaacgccagaacaagaagccttcaaaaaacatttttcccggaacatttaaaaaactagagttcagcccaactgcttaaactcagcaacaatgacaagcggccgtccagtaaagctcaagacgtaacggaccgaacctgagggaggaaggataacggatgacgaaacccaaaaaaatccaggaataccccgactaagac

SEQ ID NO: 209686 - DNA, 441 bp, Glycine max
  unsure (1)..(441): unsure at all n locations
agctngaaggggngtaacccaccattntctatattagattactagnaatatgtctactatcattgttattatttcttttttcgtcattaagggaaacacttgggctgccagatccctccacctttgggcgtattctttaaaagatccgtgacccctttttgcacatgttctgtagttgcatcctatccaaaaacattatactgacactgcctaacgaaggaaaccattatgtccttccaagcatggacttgggaaggttccaagttagtgtaccaggtaacagctaccccaataagacattcttggaaggaatgtatcagcaattcctcatcttttacgtatgcccccatcttcctacaatacatccttagatggttcttggagcaagtagtcctcttgtatttgtcaaagttcgacaccttgaactagggaatgaccatg

SEQ ID NO: 209687 - DNA, 406 bp, Glycine max
  unsure (1)..(406): unsure at all n locations
ttgagggcagaaaacactgtgtatcatcaaagttgtattgttaatgtatgtatacatgattntgatgatgtcaaagaagaatctaataaggctgcttcaaatgataagcatttgcttcaagaataattcaagattgcttcaacaaacaaagccttgttttaagattcactaaagaccaagccttgccttaaaacaaagtgctttcaagacatgcaaggctctggtaattgattaccaggaagtgtaatcgattaccagaaagataaggttgagaaatagctgttgaaaaaagttntgaatttgaattttcaacatgtaatcgattaccatatgtctgtaatcgattaccagcaacgaaactttggagattcaaattccaaagtcataacccttcaaataataacta

SEQ ID NO: 209688 - DNA, 464 bp, Glycine max
agcttatggttaatctgcgaaagttttctttatatgagtggccaaaagtaagatttgcagagggtcatataatggtttataacaacaaaaaagcagaaggctttggtaacggagtaaatcaagtgtagaaggaaaattcatacgcaagtgttgcgagaaagcagggtcaatttgaacagaataaaaacaggtgagcctataaatataagggagatgtgaataggaaaaagtctgttcatatggctttctctcctaagcaaaaagttctaaagagttagaaagggcctatgtgggtatagtaaccactaaccaaacagagggattcatattttactgtgaagaagatgcaattggaaggcattatgatctctttgtcccatatgattgaagatctctaaatcttttactgataaacttcattttgggatcttagataatcttttatgggtttcacatggatctca

SEQ ID NO: 209689 - DNA, 411 bp, Glycine max
cacagaatctgggtgtccaaaacccctcaattcattggcttttctaagttcgaaaggtggaatttagaatgaggtaaatttggagcaaactctcacctcacacaaggctataacatcaatctaaacttgctcaaactggatttacacctaaatttccaccgaatcaaaatttgactcctcaacacccaattttgccctagaaatggctcttggttcactttggtcatttgtttttctctctagctcagcctaacctttctcacatgtcctaaatgacatttcaagctagtattaactcactttaacctccatttaccacagaatttagacttagccttccaactctcaaagactcactctttttccactcataacatcacattctcactttctaaccctaggttagttcta

SEQ ID NO: 209690 - DNA, 315 bp, Glycine max
  unsure (1)..(315): unsure at all n locations
ctcgcgacnctcgntcatcttcaatcagtcttgcactcatggtctcttccactncctctccttctgactcacgttggcccattgccatcatgaaaggtacacggactactctgtataatcaacctatttataacttcttaagataccactgtttgattcctttatacaattccttagttttcttattggccctccttactattcctttcactgtcccgcaggcacttgaacattctggttgctgacatgctatcattgatgagatgcagggtcttgaaaataacgagactggggacttgtttctttttcttctag

SEQ ID NO: 209691 - DNA, 343 bp, Glycine max
  unsure (1)..(343): unsure at all n locations
agcttcaggccagtctactcgctcaatgtttgctccatagntataattgtcctgtggagagccaattctcgcaggctgtgcatgataataaactgtcctcgaaataagctttgtagcataggggctaaggtttgagagctttggacatctggtcttatggttgctgacggaggagctggagtggatgatgatgggatgtcatatgctctagccctttttctcgatgccatctgtaactaaaagaactcaaaattccttagaccaaatttattcaagtttaaaaatagaaataaaggctgaaattaacgatgggcacttagcaggatacagctcgctcagcgcg

SEQ ID NO: 209692 - DNA, 229 bp, Glycine max
  unsure (1)..(229): unsure at all n locations
gcttctatgaagctgatcttgagcttaatgaggtccttcaatggtgattntccaccatggagatgcagcataagataaaggagaagagttgagagaaggccccatctactagggaataagccatggaagaaagagtttcaccaccaagagagtgccttggataagaagcttagaaaggaagcttcaatagagaaaaagaaagagagagagagaaaaggcggtggggttt

SEQ ID NO: 209693 - DNA, 374 bp, Glycine max
agcttcgaccgggttagggtgaagacaaattctttaccatccaccaatgacaattcatccacatgaatgtatagtctaataaccacacttcctcaccccgagatttaaacaagccactgacattagttactaccatctgaatcaggtatatcttcctctgatccatctgcttcctcattccgagtccagaattcagataaccggtctctgtcaattgcatcagtggaactaaaaattcagagttgtgaataaaccaaaagctaaacattatttaattggattagaccatataggaaagggaatcacaagccaattataaaattcacatggaataacctgaaattgatactaacatgtcacaacgtgcaattctc

SEQ ID NO: 209694 - DNA, 415 bp, Glycine max
  unsure (1)..(415): unsure at all n locations
ctcagctagcctccttcctttctattttattagacattactgtctattatttaagcnccaaatctatcggaatgaaccaaaggagaaccatgtggagtgcaacctccttctattcttagaacccataattcatttctggcaaaacacaccctcaacacccatcccccctttctcacacacaaactcaagaaaaaaatccacactaacccaaacaaaataacctccaacatgacacatacccaaaaccaaaaaaaccaacccccacagaaaaacaccaccaccaacaacaaccttagtttctccgagcagcggtcccttcttcttgcaatcacgcaatggccgtcgctggtcgaatccaccaccacctctcattccttatcttgatcttatacttcatccctttctcatgcgggac

SEQ ID NO: 209695 - DNA, 453 bp, Glycine max
  unsure (1)..(453): unsure at all n locations
agctnggatcagcaacgaccaatggttattttttatcctgccagtgggagaggatcagggcccaataaagaaaagtttcatagttatctggaggttgtagcacgagaaaaaattcctattgcccactccaattggaatgttgtcccagaatctttaaagaacctaatatgggatgacattttgataagtgcatatttaagttgacatttggattcaattttctttaattagtttcaaaatatgatcattcactaaatgttacataacaatttcaatttggaggccaaattagacatccatgagggcggcaatgccaaaaagaaggtgatgtcaatgatcgttactagataaaggcaatctaagtcctcccttacgacaaaatatatttatgctgacaatgagggtcaacacaaagatgatccttctgttaagtatggtattgatgcagcaact

SEQ ID NO: 209696 - DNA, 348 bp, Glycine max
  unsure (1)..(348): unsure at all n locations
agcttgatgtcgcccacgtgtgactttcttactcacggngaatgtgttccttctaaagggctcttctttgtacttgttgcaagaggttgaccttgagtatagagagtgagaggaagagtgacgatacaaagaggcatgagagaggagagggaaacattaaaaataatcaaaaagcttctaatacggtttcgtaaaaccgttttagagtgacatccttctaagacagtttttgctaaaatcgtcttcgaattgcatctttctaagatggttntgcggaaagcatcttanaatgacaaccattctaagattgttttcgcanaatcgtcgtagaatagttatatttattta

SEQ ID NO: 209697 - DNA, 368 bp, Glycine max
  unsure (1)..(368): unsure at all n locations
tgagagatagatacatggactgagatgagaagggttatgctatatagtatgtgccaactaggtacagcagaaccaagcaacagaaactccaaaggctgtcccaaggaagtttgactgtggaggtgtactacaaagagatggagatggcactagtgagggctagcattgaacaagaaactgaggacacaatgtctcattttccgaatggtctaaatcctgacattatagacgttgttgaattacaagagtatgtggagttggatgactggttgcataaggcagnacgggttgaacaatatctcaagaggaaaagtgtancaagaaggaactcatccaatactttcaaccaaaattggaccaccagatcc

SEQ ID NO: 209698 - DNA, 368 bp, Glycine max
agcttgcagctttgatagtaatggtataattttctaaacagctttcgaaataagttgctaaaacccacaaatatgttaaaaataaaaactgaccagttacaccacaatgttctgcacaatcaatagcaaatgaaaagggagagaaataaagcaaaaacacaaacctaaaatcccaataactgtaggtttttccttgaaccaagaaaaacaacttctgccaactatactgtcacataccttatcttttctttttcttttgcagtaagatgtgaagccttcagttataaactgagaaaagtgatctctctctcgctcctgaaaatataaaaccataaatacttaattctctgaagttaaaaaaactgtac

SEQ ID NO: 209699 - DNA, 414 bp, Glycine max
  unsure (1)..(414): unsure at all n locations
tactaagctaacgcatgcttcctgttaaataaatcagaggnngaaagttgtttcnttatgaagnccattcaaaaacatctgaattcatttggtatttgagaaagccattcattgttttcattctcaatgtttccaaaaatccttttgttgtgttatgatccaatcaaaagtaagtttcaaaaatacaagttgctgattatttccaaagcatgttatgtccaaaaaaaacttgtttaagtcccaaaaagagttatatataatctacaactatactaacaaaataaaatatatcaaattagtcaaaaacacaaacttgcgtaagttccaaacaaaaattcaaaaatagttaataatgtaataaagtaataaaattaatacatatcgataataaacataaagaaagttcacgatttt

SEQ ID NO: 209700 - DNA, 412 bp, Glycine max
  unsure (1)..(412): unsure at all n locations
agctttcanaattttctaactaagtaaactgaactatatttactgtactaaaacataaactaaaaataaaatgtatctaaagcagaaaaataaataaaattcctgtcaacaatcatcctgaactagtgtgggctcgtcctgagctgatgcaggctcatcatgaggtgaagatggagtatcctaggctggctgaggtgtctcttgtgttgttgtaggccagggatcccaggtactctgcaccgcctatagatctgctgcatagttggtgtcttcaacgccttcttcaccctcaaagacctccacgagaggtgaagtagcatgtgaaacctgtggagtcgcctctggagtggcctcatgagcaacctcaggctctgattgaggctcttgggttgcagaagccttaccctccccc

SEQ ID NO: 209701 - DNA, 350 bp, Glycine max
cttgttaacctgatgcatggatgccttatactcaggagtttcgacttgttttatagctataacaagcgccgcaatgtggctattgtgtggcccccctcgcattgatggaaaaacagcataatctatctctacttcaaagtcgtattgagcactatcatgtccttgcttacaagatacctctcttccttggcttagtccctaagagaaaaattatgccttccatagcgacctcgaatacccatatgatgtggagaaggatgactggctcaataacgcaaaggattatcaactttctcgaaagacaacaccccgttcctataaaaaaaaatattgacctttctttcaaaatt

SEQ ID NO: 209702 - DNA, 346 bp, Glycine max
tcaagcttctccccaattgtctataaataggttgtttgtgaagtgaaaaagggttcagccccttaggcacttctctctctatcgaatttgcttggaaaaattgtttccatgaagaaaattcaagccgagccgcttccgaaacgtttccgtaacgtttccgtgaggaatctcgcgaaggtttcgaccgttcttcaagattcatcgttcgttcttcgttttcttcagtcttcaacgggtaagtacctcaaaccaagcttttcaattcattctatgtacccatggaggtccacatttcgtttcatgctattttattcctcgtttatttactttttatactccttttgac

SEQ ID NO: 209703 - DNA, 315 bp, Glycine max
aaacgtgggcctaatacactttggagatattaccattcaatgccttccacttatagccgcattcaatggtggttcgtgccttcgacggcacccgccgagaggttaggggagagatctatctcccagtacagataggccctcacacctgtcaagttactttccaaataatggattttaacccccccttaatctgtctgttggggcgcccctggatccactcaataggagttgttccctctacactccaccaaaagtggaatatcttagcggaaggcatctggtcattctatcaggcgaggaagacattttggagag

SEQ ID NO: 209704 - DNA, 448 bp, Glycine max
  unsure (1)..(448): unsure at all n locations
agcttccaagaattcaaagatgcttcaagtttgatagttttaaaatctaaattgacgaaaataattgaatttaattttctctttagtaatgaaggtgagtttatgatatgctttttgtggtttttcacatgtatcctatttcagcaattatgttcgagacatgatcagatattacgtgttaacattttttctaacaagaattcaaatattggtttaaagggaaatgtagaaaaaaaacatgtgggaaaaagagcatagcacacttaaggagcaagtgaatggatattgaatctaaaaaatttagagataaagtaaaaagtaaaaaatgttaatattttgtacacagatntaaggaaaatatttgatgtattaaaatccatcttgagtgtctttatctactctgcanacatcatatatcttggacaagttatctattacgataacgtta

SEQ ID NO: 209705 - DNA, 410 bp, Glycine max
  unsure (1)..(410): unsure at all n locations
gctgtgagggatgaactatganacatggntctctagatctttcttttcgtgtgttctggtgngngnnngatgaggtgtcattctaatatgtgaatgtgcatttgatgcatgaagaacgagagccacccccgtgacaacatagactcacaacctgagataactgagaggatgagagctatactagttgattggctgatacaagtccaaaccaagtttgaactttcacttgagaccctttacttgacaatcaatatagttgattggttcctggcggttaagaatgttccaaagagggaactgcaattggttggcatcagtgctgtgcagatggcaaccaagtatgaagaaatctatccccctcaggtaagtataataatttgttgctacctttatgtgctcattgctttact

SEQ ID NO: 209706 - DNA, 351 bp, Glycine max
  unsure (1)..(351): unsure at all n locations
gtgacgcagncttgggtcaagatgaatcaatatagattacttttgctatctttccatcttattttttattgggtattgaataccaaagaaagaagataactgatgtgaacttattttgagaaaaatctttttatataggccagacgatttattcgccctgtgagaataccttctttaaatgagattacttacaaaaataattagaacgcaattcaacttcttgtgttttgacctatgtatgtcttacattaatccttaagcctatggagatgatgaaactgaattgctgttagttttttagtcaggcaattatagccctttcaacaaaattatttttcgcctattttctta

SEQ ID NO: 209707 - DNA, 283 bp, Glycine max
taaagttctaacaaatgaggaaatcttctaactatagaaactttctccttactcctgcatgatgatgcataatggatatatgaaatgatagagactaagatgcaacacaccacacaacaatcaatacaaatgtccctcaagagagttaggcatgtaaaagataaaacttgttcaaggttcacagctaaccttacatgttactccccctatctctaacatgatgcagccgctgttgtcgccaatgactaagccaaccagtggctgcaatactaacacagacaca

SEQ ID NO: 209708 - DNA, 387 bp, Glycine max
  unsure (1)..(387): unsure at all n locations
agctntttctcatcaacattagtaggtgtttttttttaactgacgtcaagcaaaaaaaatatcacaagcctatgtcgtccaaaaaagtccaagccgacgtttgccaaaaaattgccccaacccaattatgtgtgtttaagctgtattagcacggttatttgttatattttgtgaaaactgggaattccattctgtaattgtctgtttgtgtactgggcttgttttattgcagaagcaaaggagacactttcttgttttgtaatggccttttctctcactctggtgtcttacagatgaaaatgtatggttctaccatttttgtttgtttcaaaattaatacactaatgtcaattgaactctcttttttatattgggatatgattgatg

SEQ ID NO: 209709 - DNA, 403 bp, Glycine max
acggtgtgagatattcccaggactctatctatgtgcaattttccttggcatccttaatcatgttcaaattgttggtaagttttggtcttttaatccaaaaaaggaaacttggttaccatgtgagagtaatttggataaatgaaaatagttttggttgttatatgcatgactatttcaatgcttgtttgcaacaatgtattataaaaaagtacctaccacatagagagttgctatgcaatttggaatgcatcaagaagtttcagattgtgtgattgcattctctgacaccaaagctattgcattgaaaaataactgcatacccaaaattactttaaaaaattgcaaacaatattacttggcaaaaaagcattctaaagctactctgccatcatggacctcatgt

SEQ ID NO: 209710 - DNA, 413 bp, Glycine max
  unsure (1)..(413): unsure at all n locations
agctttggcaaaaggaagaagaagaagattttctagagactcacanatcaatgtggaaaagttgcttgtataaagaatgaattggacaagattgattgatagattggatagttgtaaaatgcaaaacgaagccttgcttttatagactcttcatgtctggtcaagagaaccatttaaatgagttatgacttttataaagactcaaaaccaatttgaaaaagtcaaaaaccatttgaagagttacatcttttggtaatcgattaccaaatcagtgtaatcgattacacaaagcttttatgtgaaaggatgtgactcttcacatttgaatttgaatntcaacgttcaaacacactggtaatcgataccaaaacattgtaatcgattacaactttttgaatcaattggaacgttgt

SEQ ID NO: 209711 - DNA, 405 bp, Glycine max
agcttcgtagatagtgtaccagatgaccgctgccccagccaagctatcttgtatgatatgcatcaacagcttctcgtccctggaagacgcacccattttatgacaatacattttgagatgattcttacgacaagttgtccctttgtacctatcgaaatcaggtaccttgaatttcggagggatgacgacgtccgacactaagcaaaggtcagtcatgtccacgaacggataatcaccgaagccttcaacgaccttcaatctctcttcgatgagatcaagtttgcccttttcttctgctgtcaggggtggcccccttgcggacaaaaatattggttgagttgtgcgatatctaggttctctcgagaggttgggctgaggtatcgcgtttggtgctcttcccttggt

SEQ ID NO: 209712 - DNA, 463 bp, Glycine max
  unsure (1)..(463): unsure at all n locations
agcttcatgatgaatcaagaatgattcatttatgttntgatgataacaaaagatgatgacaaaggtgatgacaaaaagctcaagatagaatcaagaacacttcaagattcaagaggaaagttgaagaacacttcaagattcaagaggaaagttgaattcaagaatcaagaatcaagattcaaggatcaagcatcaagaatcaagatcaagattcatgaatcaagagaagacttaatcaagataagtatgaaaaggttttttcaaaaactgagtagcacatggattnttctcaaaacatgtttaccaaagagtcataactcttctaatggttgtcttgcccagatatgaagagtctatcaaagcaaggctttgtttttcattntcaatcaatcttttctaatcacatcttttccaatacaatcctttacaagccttanatctctttgaacttcttcttcttctt

SEQ ID NO: 209713 - DNA, 414 bp, Glycine max
  unsure (1)..(414): unsure at all n locations
gcacgcanagactaatgtcgtcttctgcgccctttgtcatccttaggcggcgggctcgatgacatgcgggaaccatttggtcccgcactgtcttttgctatctgtaagactcaaagcatgatagcacacagagactaacgtcgtcttttgcgccttttgtcatccagaggtggcaggcccgatgacatgcgggaaccatttggtcccgcacttttaaaatacttttgctatctataagactcaaagcatgatagcacgcagagactaacatcgtcttttgtggcttttgtcatccaaaggcggcgggcccgatgacatgcggttatccgcacactcgatgagtgataaacgcgtatagatgaattctgcgcccattatcattntggagtagcgagtcgagtggtaaacgcgcat

SEQ ID NO: 209714 - DNA, 445 bp, Glycine max
  unsure (1)..(445): unsure at all n locations
agcttcaagacagtgtagattctttatatatccttttaaaatcttcatgtatcgctcaaccaggtacattgaccgcaaataaacaggaccacaacatttaatttctctcatcagatgaacaattaagtgaaccaagatgttgaagaacacatgaggaaaatacatctccaattgacacaatataatgacagcctcattttccaactcatctaatttgacaggatcaaggactttgctacatatggtattgaagaaaaagcacagccgagttatggcatgcctaactttgttaggcaaaatgtctcgtatggccgctaacaattgttgcatgaagacgtacaatcatgagactntaagcctactaactttagatctttcaactacacaatgctcttaatattngaagagtatctctatgggactttgacacggcacagacactgac

SEQ ID NO: 209715 - DNA, 402 bp, Glycine max
aaaccgatacgagacataactatgcaatcttcatactacttgtgtaatcgattatgataagaccgtaatcgattacaacaaagagtttttccttctgaagaaagttttctaacttagaaaattttcttctcactttctcatgatgatgcatgatgcacaaaagatatgatatggactaagatgcaacattcaatataacaaccaatacaaatgtcactcaagggagttgggcatgtaaaagacaaaacatcttcaagcttttgtccaagcttcaagctttagtccacatgttgttcttgttgctccccctatctctaacatcatcttccaaccccaatcctaaacatgaaatccttatatgaaatactacacaaaaccaggaccaacccactttatctacac

SEQ ID NO: 209716 - DNA, 467 bp, Glycine max
  unsure (1)..(467): unsure at all n locations
agcttgttgtgataatgttgatacaactcatttacctattaatttcactctttgtaccgttattctcacaattgtacaatttcccccatttttcgacaaattgtctcttattttttatattgtgtgaatccatattttcttctaacataaaagtcaacattcaaagaaagtagtgtcaaattcgagaacaatatcaaaatcatgatgtatgaagacatatgagatgcatggtcaatagaaaataaataattcatgttttttttatagcacacatttgtctcttattttttatattttttgaatccatactttcctccaacatgaaagtcgatcaacattcgaagaaagtagtgttaagttcgagaacaatatcatgatcatgatgtgtgaagacatatgagatgtatggtcaatagaaagcacataattcatgttattctttntctatagcacacatttgtctctta

SEQ ID NO: 209717 - DNA, 345 bp, Glycine max
tttttttttaaaaaaaatcttctctactgtggtgatatcaaacaatcgaagtttacttacacatattgtatttctttaagggctttattacatacattaaaaaatatttaatttatacaacttaatttttgaaataatgatagattgtattacttatgtgttgtgttaaaacaaaatatattatttctattaaaaaaaccattaatggcttgcatattttttttcttatttaaataaataaagaaagattctgccccaacatacttttttgcttcaaatcttaatggggtcttatactccttatcacctaaaaaataactatacttaaagtttttttatgaaaaa

SEQ ID NO: 209718 - DNA, 395 bp, Glycine max
  unsure (1)..(395): unsure at all n locations
agctnagggaattcttatggtaacggcctatcttctacttaacaatgtgcccaaaacaacgtgttctccccatttcccataaatcagaccatgtttcttttaaaccaattcccttctccctccccaagacagttttttaacatcttatcaccacaaagatctaaccgttgggatgaagaaaaagattctgcttaaggaaagacccatatttggctcttactagccctagccaacaaagagttttcctcctccaagaatctccagccccatttccccagtagaaccttattcaataaagagagatctatagcacctaaacccccctcattatttgatatacacactctagactaagtcggccaaagtatgtttctctcatcacaaccccccacaag

SEQ ID NO: 209719 - DNA, 396 bp, Glycine max
caatactctaactcatctgagagaaaagttctttctcctatacccctttcttctgcattaccatattcgtttgtctcttctcgtacccaagagagagagattaagaaaatgggtgagggtgttgtctcttgtcgtctgcagctgttcttctttcttcttcatgggttgttgttgacccaagtgatacgaaagggttcttcttctgctttggattatgcgcaatgcgatgtgttcactggaacgcgggtggtggacgaatcgtacccgccctatgatcctcccacgtgtccctttatctagcgccagttcatgtgcaaagggaatggacggtccgatctcctttacactccctatttgtggcacccacttgcctgtaatttactcaagttaatacct

SEQ ID NO: 209720 - DNA, 449 bp, Glycine max
agcttgttgtgggatctccttactaaatcttttttctcacaaacaggatcaatgcagtttgaagttcaattgttgacgatctgatcgtacaggagtgattgaaaagatggtcttaattataatttcttccatgtcttttctatgccttaatctatcccctaaggggacaacaccgatgattcctttgacaaccttgatttccttgattaatagaagcctcgacatgaaagtctttgttttttggtttgcaaaaaacaatgatatattattgataatgacacgcttaatacctgacccatatagaaaatagaacaaactaaacaccttatagtctgaacactataacccatagcaattctatatggtgcttacaaaccttttaagtataatgttaggttcacgggattctgagtgaaagtcttatttaagactaggtgagaaggtcaatg

SEQ ID NO: 209721 - DNA, 355 bp, Glycine max
  unsure (1)..(355): unsure at all n locations
gcttgaagaagcgtcatagcaggaagtatgggtcatggaaatggaagattatatatttatgatcgagaaaaataacacatgaaagttagtaaatcgtccccatggaaaagatatcattggggttaagtgggtctataagacaaagctcaactctgatggcaccatacagaaacacaaggcaaggctagtagctaagggttactcacagcaacccggaattgactacaatcagacatttgcaccagtagctcgtcttgatacccatanaagctctaataactcttgcgtcacaaaaaggatggagtatccatcaactagatgtcaaattccgctttcttaacgacgtacttgaaaa

SEQ ID NO: 209722 - DNA, 459 bp, Glycine max
  unsure (1)..(459): unsure at all n locations
agcttgctaagcgagatctgcagattataaatatattcttcagcatgaaaaaccacaattttatgtcttcttctctcaaaactccgcctaaaaaccctagaaagtcttcctccaccacccatgaccaccggtggccaccacgagtagccattgcttgccgccgaaccaccatatagagaggaacattttaatcagagcggaattgtcagaatccacctcaaagattcagtggagaacaagctctcaattgtttctttcgtagcttctctgaggtgatcttgaattctatgcctttttccttgttagtttgagcttcccttagtgtctcttgtgtttttggtatcgtattaagatatttttacacttccttagaaaaacccttgaaaataaagcgtngtaaaagttatctttttataaaattgatgttggtttcatgacctttgcagaaccctggtcaca

SEQ ID NO: 209723 - DNA, 417 bp, Glycine max
gagagcattacttaataagcatttaaccttgctgtttgtatcttatgaaaaacgccatttcttctcctttatttcttccaaagccatttctaacctcccaagcactttcgccatcacccacaacacaccataagccaccacaaaccgccattgttctccgttgcaatcccacactgagaggaacccttcaaccgaagcggaatcttccaacttggcttgtggtttcggtagagaacgaaaccctaatctgacctttcgttttcctttgagctaaccatgggtctatgcttgtttcttgttagtttcaggttgtctttgcattttttctgactttggaaccaccattgcatgttttacgtttcctctgaaaaaccctagagaaagagactctgtaaacgttatcttttcatgaaatgc

SEQ ID NO: 209724 - DNA, 384 bp, Glycine max
agcaagcttgtgcccatggatgtcaagatgtactgactgctgccattgagcgaccaaagcaccctggtcgtgtccatgctgttggagctgatgtcacgatcaaacactacttgggacaggcttcaaggggctcccgcacctctttgtccatggctgctgaagacctagagtagctaacacaaaagattagagaccagctggaggagtcgatcacacaaaaagggactcaacaattaataatgtccttcagccagatgcaatcccgaatgcagccgcagatgcaatcacagggactcacactgcctgttgaggctgaggttggtccttctgttgctcatgtcgatgatgtttctttgggaaatgatcaagtgaagcttggtgttg

SEQ ID NO: 209725 - DNA, 400 bp, Glycine max
ggcctagcaacttctgattccacaaggaagctcattcaatacgcctcctatctgtaataaagagggttaccattactggaaaacccgaatgcaaatcttcattgaggcaatagactcaaacatttgagaagccatagaaataggaccttatgtacccaccaaagttgatagaagcacaatagatggaagcacaacaagtggaggcacaacaatagaaaaacctagagataaatggtccgaagaagatagaagacgagtacaacataacttgaaagccaagaatattacatttgccctgtgaatggatgaatattttagggtttcaaattgtaagagtgctaacgaaatgtgggacactctacaagttacacatgagggcacaacatatgttaaacgatct

SEQ ID NO: 209726 - DNA, 350 bp, Glycine max
  unsure (1)..(350): unsure at all n locations
agcttatcgtaattgattacacaattcttttntagacaatgactgttttttagaattctttgctttaattgattaccaagtgatataatcgattacttttctttcaaaagtgtttcagaagtgatcaagaacactttaatcgattacattgagaatataatcgattacattgttcttgaaagtttttcagtttttgggaagaacactttaatctattgaaatgataatataattgttttctctataaatagtcaccttgtgttctcacttcaaataactcctaacaacttctgaatgagctaaggttacgagctaatattagtaagaaaaagaagagagaaaaaaagtgc

SEQ ID NO: 209727 - DNA, 415 bp, Glycine max
  unsure (1)..(415): unsure at all n locations
agcttctanagatgtactngaccgggtccatcttgtatatcagccaggtggtatggctcagcatgtactgtcttgaacagtgggatgcccagactaaagcacaacatgtcctttctagcagggagtagttcatctcacaggccgtgaacttcttactgaagtagtagacgactcgctctcttttcccagactcgtcatgttgccccagcatacacttcattgactcgtccaaaatcgtcaggtaatggatgagaggtttcctgggcaccagtgacataagcatggaagggttcatgaggcactgtttgatctttccaaacgccttttgacagtcctcgttccagtggatggattggttcttgtgtaagagcttgaacagtggctcatagatagcggtgagctgtgatatgaatct

SEQ ID NO: 209728 - DNA, 379 bp, Glycine max
  unsure (1)..(379): unsure at all n locations
agcttgtcatcattggtcttgaaggcactttattgaggtaagtggaaggtaaaccactgatagagtaaaggtgcacaacaagaaatggttccccggccagcctgtgtacggtcatggatagaatggtaggtatcggcgagtaaagtgggtacggngttctttgcaagaaagattttaatggcattgatatcgatgaagttgtcaacatttgggaagagtaaaaggccatatataaggagggctaggatagaatggaaggcaagtatactagctgcttcagcaaatatggaggcttgttggtagaggaagtgggtgggaagaccttggaggcctcctttataggtaagggttgcttggatgatggaggttntaagatgga

SEQ ID NO: 209729 - DNA, 412 bp, Glycine max
ctcagcttgtattttttgcgggattgagttctttttatggttctctattctcagtgggttttgtttcccccaattatttgtgtggatatatttgcttaattttattgggaaaaaccaagatagagtatataagtctggtacaactttcactttacaagccagttttgaagggttgagttaaggtcaaacccaaattctaagatagcatcaaagttatcctaaatctattaatggaccacctaccatattatccacacacctttcccaaaaatgctgggcatgagggagtgtattaggaaaaactcaaagtccacgttcattatagataataccaagataaagtatataagtggggggacaaccctcaccttaatagcctatttgtaggggtgagttaagctcaaacccaaaa

SEQ ID NO: 209730 - DNA, 450 bp, Glycine max
  unsure (1)..(450): unsure at all n locations
agctntcaagtctttcttttctccaatgctctcatatcctcatgcatggnttgagccagctcccatcctttaagggcttgtgtaataatgtggaaatcctaatagaatcaatagctgataggaaactctggcactacaaagaaatgtgtttagtggaactcaagttaatgggtaagtaatcagaactataaaggcaatcatctgaattctgaaggagaattactgaagactcaaggctaccaatatttttctccaatgaatactctatttcagacgattgggattgttggactaggtcgggtttctgtcatttagatacacattgcagcaattacaattgcctctagagtaggattggtactagcagatacaaatgtctctcgggtagtagatacaagtggtaagtataccctcatgtatcacatacttagtaagggtagcgaccacaca

SEQ ID NO: 209731 - DNA, 425 bp, Glycine max
  unsure (1)..(425): unsure at all n locations
gctnttctcctcctttcggggttatttctcctgtaagtagcttcaatctcttaacctattggagctaaatcacttgttgaaggattaccttgcatacaagaaccaactaaatagagcaacagttaaccaagccaagagaaaaattgaattctaactattcagagaaattaatcaaataataaagaataaatgttcccaaactgaattaatcaaataaggcaaatgttgagttctgtactagaaaatctatttgaacctaaacaaaatatctaaagttgtaaaaagtgaaaactatcaagttaaaagcattggggagtgttctattgaatttatcttgatgtacgaaaggtatttttctctatttaacgttatcctagtgttcttatgctgagaaactactcaaaccatgattcctcacatgaatg

SEQ ID NO: 209732 - DNA, 422 bp, Glycine max
  unsure (1)..(422): unsure at all n locations
agctngaagaactttgcaagatagtcattctacgaacttgaattccactcacttagagttntattacagctaggctatgtaacaagagctactctttttcctaccttgactttttatccatataaaaatatgaaggtttttgccgagaaggttttaatgagacctcatcctacaaatattatcaatgaagaaatatttcaacaatcacacttatgtcattatattactccttttttaatattgctccccctagaataccctctttggctaaggttaaacttcattaatcataattagtagttccctcctgaataccctgttgaactaaggtttaacttccttaatcataattaatagttccttcctaacaactctcttcgctaagggtaaacttcataataatcataattaacagtttgaat

SEQ ID NO: 209733 - DNA, 417 bp, Glycine max
  unsure (1)..(417): unsure at all n locations
tgcttaagaagattcctanagaagctagagcttagctactcatacctcnctaatagctaagctcacctcctttagatgagaagctagagctctactacacaccccctataatagctaagctcacccccatgactaagaacatgaaaataaaaagaaagtccttattacaaagacaactcaaaaggccccgaaatacaaggctaagaccctatactactagaatggccgaaatacaaggtcttgacgaaggaaaaacctattctaatatttacaaagataagcgggctcatacttagcccatgggctcgaaatctaccctaaggctcatgagaaccctagggcctttccatggatctctagcccaatctacttggaggcttataaccaatgcccttgcggggtaagattgcatcatta

SEQ ID NO: 209734 - DNA, 449 bp, Glycine max
  unsure (1)..(449): unsure at all n locations
agcttcttagtttcagctaatgaatatgatttcgnggctacttcatgcactcctctaatgacaatagcatcctttntggcactaaactggtgggagttggaagccatcttctcaattaaattcctgagttcagtaagggtcatgtctccaagggctccacccctggcagcatctatcatacttctctccatgttactgagtccttcataaaaatattggagaagaagctgctcataaatctggtggtgagggcaactggcgcataattttttaaatctctcctagtattcatataggctctctccactgagttgcctaatgcctgaaatatcctttctgatagtcgtggtcctggaagcacggaaatctctttctaagaatactctcttgaggtcatcccanctcgtgatggaccttggagcaaggtaatatagccagtcctttgccac

SEQ ID NO: 209735 - DNA, 429 bp, Glycine max
  unsure (1)..(429): unsure at all n locations
tggacctatagatactcagctcttattttagcagatgaagatgaatctgcggccacatcattttcttctctaangacaatatcatcacttcttgcactgaattgttgggagttggaagccatcttctcaatcagaatcctagcctcaacaggattcatatcactaatagctccaccactggcagcatcaatcatactcctctccatgtagctaagcccctcatagaaatattggacaacgagctactcagaaatctggtggtgaggacgactcgcgcacaattttttgaatccttcccaatactcatacaagctctctccactaagttgcctaatgcctgaaatgtcttttctgatggcaatggacctacaagtaaggaagaatttctccaataacacctttttaacgtcactccacttaataatggac

SEQ ID NO: 209736 - DNA, 161 bp, Glycine max
acagaagcttaccgattacagactattaattatagcatcgctgggtaaatacatcgaactacacagaaactttttgcactaccaagtaagcggaatctattactctattcacaacacgatattttcaattgtatgacctgaaatatttcttggcctctttt

SEQ ID NO: 209737 - DNA, 355 bp, Glycine max
aactagctaacaaaccaatatggatcttgctttcgaagttctactaattgaaggcatcagctccgtcctttggtcaaagaaatgacagttatataatctgcaccaactttaacaaattcttggttaaaaagaatactactacagggtatactgtatgatcaatgaaagttctgtgtatcatgtcaatatattttgtacatggaccaaactatgcttacgtttgtagactcttaattgaaactctctgcatcgttagcaggatgtattaacagaccatgaatgccgaataaaactcctttaatttcatataacacacaccgagcgttgtgaacaaattcaatcatgtccatcatgc

SEQ ID NO: 209738 - DNA, 383 bp, Glycine max
  unsure (1)..(383): unsure at all n locations
agctnttaacgattataggccaatttctcttatatgctgtgtctacaaagttgtatccaaggtcttggctaatagattagcccttattctacctcagctgattgatgaaaggcaaacagcctttatgaaaggaaggcatattttgcatggagtgttgatagctaatgaggttatagttgaagctaaatcaaaaaataaaccttgcatgttcttcaaggttgattttgaaaaagcttacgactcggtctcttggggctttcttaattacatgatgttaaggatgggtttttgtgaaaggtggagaaagtggatccatggttgccttgctactgcatcagtttccattntaattaatggaagtcccacctcggagtttgcaccca

SEQ ID NO: 209739 - DNA, 417 bp, Glycine max
  unsure (1)..(417): unsure at all n locations
gctgaggttcttgtntcttacttgcttaggctcttcatcatggnggtggatttataattgaattgcgggtgctacgtatataattaaattttcttctctcccaagctagcaaccttttgcaactcagattcagtggtgtagaacaaatggcaacaccttgtggagaatatatattaattggggctgccaaaagtaaatttcactattcatgtctttggaaattaaacacctagctaggttgctgaaattaagaagatgccatgcatcaaagcatcttgcatggaagtactatttgcctcttggggcattntgttaaattatgatgcttcgtgcttaattgtgccacctcgtgctaccctgtaacatgtcctctcccttctgtctatggacccgtccaaaatacttatctattaaaat

SEQ ID NO: 209740 - DNA, 355 bp, Glycine max
  unsure (1)..(355): unsure at all n locations
agcttgtaaaggtgttctgatgccgacatatgttttgacctccttttanaatttcataatgcttaggcgacacacaaacttatttaatcttattcgttagattagatcatattagttagctttttgaaagcaattcagctggtattttataacatcgaatgagtggatcaatttgtgggattgtttcatcttcgagcacggcggaaccagaaaaaattatcaagggagcaaaaatttaaagaatataacatatactaatttttactattaatggttgtctaaaatttagtttaataataaataatatattaaatatcttataaaagtaaaaatatcaataaatcaaaattatcta

SEQ ID NO: 209741 - DNA, 424 bp, Glycine max
  unsure (1)..(424): unsure at all n locations
gcttcttaagatacgtgggtccattaatgaacctccttaccgaattgagtttcantatgattcttgattgttcagatctcaagcaactcttaaagtcctaaagcctcacattttttaaagttcaaaactgaattgtgtaaaatgtgatgttcttaccttgttgtggagtaagttcatccttagttcttagattgggagcatctaaggtgcttttgtcaggctgttctgcaagtaccacctcaccttcataaacaacttgacgatcctcaaaatttccagttcttgtatccaacacacattgacatttgtcattttcaatagtgacgacatgttaacaacaaattgtaagttagggtttaattgaattttgggaaataaagatatacaaaaattaaaaccttaacatcaacttacatgggtctga

SEQ ID NO: 209742 - DNA, 448 bp, Glycine max
  unsure (1)..(448): unsure at all n locations
agctttcaactttagatactagaaagaatttcttcttantgttaacgncacttaccaaaatgtcatcccatactaggtcatttagcaagtccgatacatctttccaattgttatgtacaattggaattttttctctagttatgacccctagatagctgtggaacttctctttatgtgggcctgatcctcaccaagttgcagcatcgatgtttacagttggtctgggctgatccaaagttcttaaagacaaccttcttagccatatggattgtctagtattcctaaacatagcctctgactgtacatctaaccgcggaggggacggtggtggtgttcccatgactttgtataataaaacaaatatgttaacaatagggacttacaaatagcatatacttangtaaatggaaatatgaacattaatatactaccaaacaaataacgcaat

SEQ ID NO: 209743 - DNA, 267 bp, Glycine max
aaaacaatctgagttccaggctcgaactatgattacataagcaaatatatgtttgccgcctatagagcgttcctgcctgtaaactgaccgagatttacacaactaacgcctcgattactttttatgattttataaggttataatctgtctcgagcgggcaagcaaacattcctttggggacaagtgtcactcagcctcgaagagtgacaaaattagtttatatgttattggaaaagtaaaattcgggaattaatagttgagaaagta

SEQ ID NO: 209744 - DNA, 386 bp, Glycine max
  unsure (1)..(386): unsure at all n locations
gcaagcttgagcaaattctaacgacaataactttntactcttatgtctgactgagtcccgtaatatatcgagacgctcggaattgattatcgatgctctgagcaaattcaaacgactataactttttactctgatgtctgattgagtcccgtaatatatcgagacgctcgaaatggaataccgaagctctgagcaaattcaaacgacaataactctttactcggatgtctgattgaggcccgtaatatatcgagacgctcgaaattgaataccgaagctctgagcaaattcaaacgacaatcacatttttactcggatgtctgattgagtcctgaaatatatcagaacgctcgaaatggaaagttgaagctctgagcaaattcaaa

SEQ ID NO: 209745 - DNA, 342 bp, Glycine max
gagcttctcgacatattacgggactcaatcagatatgtgatgtaaaaagtgattgtcgtttgaatttgctcatagcttccacattcaattttgagcgctttgatatattacgatactcaatcggacatccgagtaaaatgttattgtcgtctgaaatttttcagagcttcggtattccattccgagcatctcgatagtattacgggacttcaagcgaacatccaagtataaggtattggtcgttggatttgctcagaagcttcaataatcagtttcaacatcttggtatattaccgggactcaaccaaacattccagaaaaaaggtaatggccgtcgaaatt

SEQ ID NO: 209746 - DNA, 426 bp, Glycine max
  unsure (1)..(426): unsure at all n locations
agcttcaaagaaggatgaattttattttacctcatcatntttaaacacaataatgagatgcttaatttaccgaccatacatactagcacaaatgcattatagttgcagaccgaccaagcaagacctcataactttgcccaggctgcaaattctgctaagcaaaattgaatacaatattgtccaattttgtttgttattagtatatctaattataaactatacaatgaaccattattgaccccaaatgtttttattctgctgcattgcatatatatctcactctttttttattatctattgttattaatcaagagtactactattctgttccccactccatgtcctgagcacactggtattttatctcatatcatttcactacttccaaagaatatttatcaagacatgctcgcctggatgtattag

SEQ ID NO: 209747 - DNA, 417 bp, Glycine max
cggaggaaaacttgatgccttggtcaacctagtaacccagcttgtcatgaatcagaaatctacacctgttgcaagagtctgtggtctatgttcttcagcagatcaccatacagatctctgtccttcttgtagcaatatggagtcaatgagcaacctgaagcttacgctgcaaacatttataatagacctcctcagcagcaaaaccaaaaacaacagaataattgtgacctttcaagcaatagatacaatccaggttggaggaatcatccaaatttgagatggacaagtcctccacaacaacaacaacttgtccctccttttcagaatgctgctggtccaagcaagccatatgttcctcctccaatacatcagcagtcacaacaaagacaacaagcaactgaggctcctactcaacct
